(19) United States
(12) Patent Application Publication
(10) Pub. No.: US 2007/0042381 A1
(43) Pub. Date: Feb. 22, 2007

(54) BIOINFORMATICALLY DETECTABLE GROUP OF NOVEL REGULATORY VIRAL AND VIRAL ASSOCIATED OLIGONUCLEOTIDES AND USES THEREOF

(75) Inventors: Itzhak Bentwich, Kfar Daniel (IL); Amir Avniel, Rishon leZion (IL)

Correspondence Address: HOWREY LLP, C/O IP DOCKETING DEPARTMENT, 2941 FAIRVIEW PARK DR, SUITE 200, FALLS CHURCH, VA, 22042-2924, US

(73) Assignee: Rosetta Genomics, Rehovot (IL)

(21) Appl. No.: 10/709,739

(22) Filed: May 26, 2004

Related U.S. Application Data
(63) Continuation-in-part of application No. 10/708,952, filed on Apr. 2, 2004.
Application No. 10/708,952 is a continuation-in-part of application No. PCT/IL03/00998, filed on Nov. 26, 2003.
Application No. PCT/IL03/00998 is a continuation-in-part of application No. 10/707,003, filed on Oct. 30, 2003.
Application No. 10/707,003 is a continuation of application No. 10/604,984, filed on Aug. 29, 2003.
Application No. 10/707,003 is a continuation-in-part of application No. 10/605,838, filed on Oct. 30, 2003.
Application No. 10/605,838 is a continuation of application No. 10/604,944, filed on Aug. 28, 2003.
Application No. 10/605,838 is a continuation of application No. 10/605,840, filed on Oct. 30, 2003.
Application No. 10/604,944 is a continuation of application No. 10/609,943, filed on Jun. 30, 2003.
(60) Provisional application No. 60/521,433, filed on Apr. 26, 2004.
(60) Provisional application No. 60/457,788, filed on Mar. 27, 2003.
(60) Provisional application No. 60/441,230, filed on Jan. 16, 2003.
(60) Provisional application No. 60/441,241, filed on Jan. 17, 2003.

(51) Int. Cl. C12Q 1/68; C07H 21/04

(52) U.S. Cl. 435/6; 536/23.1

(57) ABSTRACT

The present invention relates to a first group of novel viral and human associated oligonucleotides, here identified as “Genomic Address Messenger” or “GAM” oligonucleotide, and a second group of novel operon-like viral and human polynucleotides, here identified as “Genomic Record” or “GR” polynucleotide. GAM oligonucleotides selectively inhibit translation of known “target” genes, many of which are known to be involved in various viral diseases. Nucleic acid molecules are provided respectively encoding 1,655 viral and 105,537 human GAM precursor oligonucleotides, and 190 viral and 14,813 human GR polynucleotides, as are vectors and probes both comprising the nucleic acid molecules, and methods and systems for detecting GAM oligonucleotides and GR polynucleotides and specific functions and utilities thereof, for detecting expression of GAM oligonucleotides and GR polynucleotides, and for selectively enhancing and selectively inhibiting translation of the respective target genes thereof.

### CROSS REFERENCE TO RELATED APPLICATIONS

[0001] This application is a continuation in part of and claims priority from the following patent applications, the disclosures of which applications are all hereby incorporated herein by reference: U.S. patent application Ser. No. 10/604,984 filed 29-Aug.-03, U.S. patent application Ser. No. 10/604,945 filed 27-Aug.-03, and U.S. patent application Ser. No. 10/604,942 filed 27-Aug.-03. This application also claims priority from International Application Number: PCT/IL 03/009998, filed 26-Nov.-03, the disclosure of which application is hereby incorporated herein by reference. All of the aforesaid patent applications are entitled “Bioinformatically Detectable Group of Novel Viral Regulatory Genes and Uses Thereof”; This application also is a continuation in part of and claims priority from U.S. patent application Ser. No. 10/708,952 filed 2-Apr.-04, entitled “Bioinformatically Detectable Group of Novel Viral Regulatory Oligonucleotides and Uses Thereof”; This application also is a continuation in part of and claims priority from the following patent applications: U.S. patent application Ser. No. 10/605,838 filed 30-Oct.-03, and U.S. patent application Ser. No. 10/604,944 filed 28-Aug.-03. Both of the aforesaid patent applications are entitled “Bioinformatically Detectable Group of Novel HIV Regulatory Genes and Uses Thereof”; This application also is a continuation in part of and claims priority from the following patent applications: U.S. patent application Ser. No. 10/605,840 filed 30-Oct.-03, and U.S. patent application Ser. No. 10/604,943 filed 28-Aug.-03. Both of the aforesaid patent applications are entitled “Bioinformatically Detectable Group of Novel Vaccinia Regulatory Genes and Uses Thereof”; This application also is a continuation in part of U.S. Provisional Patent Application Ser. No. 60/521,433 filed 26-Apr.-04, entitled “A Microarray for the Detection of MicroRNA Oligonucleotides”, the disclosure of which is hereby incorporated by reference and claims priority therefrom. U.S. patent application Ser. No. 10/708,952, filed 2-Apr.-04, entitled “Bioinformatically Detectable Group of Novel Viral Regulatory Oligonucleotides and Uses Thereof” is a continuation in part of and claims priority from the following patent applications, the disclosures of which applications are all hereby incorporated herein by reference: U.S. patent application Ser. No. 10/604,984 filed 29-Aug.-03, U.S. patent application Ser. No. 10/604,945 filed 27-Aug.-03, and U.S. patent application Ser. No. 10/604,942 filed 27-Aug.-03. This application also claims priority from International Application Number: PCT/IL 03/009998, filed 26-Nov.-03, the disclosure of which application is hereby incorporated herein by reference. All of the aforesaid patent applications are entitled “Bioinformatically Detectable Group of Novel Viral Regulatory Genes and Uses Thereof”; This application also is a continuation in part of and claims priority from the following patent applications: U.S. patent application Ser. No. 10/605,838 filed 30-Oct.-03, and U.S. patent application Ser. No. 10/604,944 filed 28-Aug.-03. Both of the aforesaid patent applications are entitled “Bioinformatically Detectable Group of Novel HIV Regulatory Genes and Uses Thereof”; This application also is a continuation in part of and claims priority from the following patent applications: U.S. patent application Ser. No. 10/605,840 filed 30-Oct.-03, and U.S. patent application Ser. No. 10/604,943 filed 28-Aug.-03. Both of the aforesaid patent applications are entitled “Bioinformatically Detectable Group of Novel Vaccinia Regulatory Genes and Uses Thereof”; International Application Number: PCT/IL 03/00998, filed 26-Nov.-03, entitled “Bioinformatically Detectable Group of Novel Viral Regulatory Genes and Uses Thereof” claims priority from the following patent applications, the disclosures of which applications are all hereby incorporated herein by reference: U.S. patent application Ser. No. 10/604,984 filed 29-Aug.-03, U.S. patent application Ser. No. 10/604,945 filed 27-Aug.-03, U.S. patent application Ser. No. 10/604,942 filed 27-Aug.-03, and U.S. Provisional Patent Application Ser. No. 60/457,788 filed 27-Mar.-03. All of the aforesaid patent applications are entitled “Bioinformatically Detectable Group of Novel Viral Regulatory Genes and Uses Thereof”; This application also claims priority from the following patent applications: U.S. patent application Ser. No. 10/605,838 filed 30-Oct.-03, and U.S. patent application Ser. No. 10/604,944 filed 28-Aug.-03. Both of the aforesaid patent applications are entitled “Bioinformatically Detectable Group of Novel HIV Regulatory Genes and Uses Thereof”; This application also claims priority from the following patent applications: U.S. patent application Ser. No. 10/605,840 filed 30-Oct.-03, U.S. patent application Ser. No. 10/604,943 filed 28-Aug.-03, and U.S. Provisional Patent Application Ser. No. 60/441,241 filed 17-Jan.-03. All of the aforesaid patent applications are entitled “Bioinformatically Detectable Group of Novel Vaccinia Regulatory Genes and Uses Thereof”; U.S. patent application Ser. No. 10/605,840, filed 30-Oct.-03, entitled “Bioinformatically Detectable Group of Novel Vaccinia Regulatory Genes and Uses Thereof” is a continuation of and claims priority from the following patent applications, the disclosures of which applications are all hereby incorporated herein by reference: U.S. patent application Ser. No. 10/604,943 filed 28-Aug.-03, and U.S. Provisional Patent Application Ser. No. 60/441,241 filed 17-Jan.-03. Both of the aforesaid patent applications are entitled “Bioinformatically Detectable Group of Novel Vaccinia Regulatory Genes and Uses Thereof”; This application also is a continuation in part of and claims priority from the following patent applications: U.S. patent application Ser. No. 10/604,984 filed 29-Aug.-03, U.S. patent application Ser. No. 10/604,945 filed 27-Aug.-03, U.S. patent application Ser. No. 10/604,942 filed 27-Aug.-03, U.S. Provisional Patent Application Ser. No. 60/457,788 filed 27-Mar.-03, and U.S. patent application Ser. No. 10/310,188 filed 5-Dec.-02. All of the aforesaid patent applications are entitled “Bioinformatically Detectable Group of Novel Viral Regulatory Genes and Uses Thereof”; This application also is a continuation in part of and claims priority from the following patent applications: U.S. patent application Ser. No. 10/605,838 filed 30-Oct.-03, U.S. patent application Ser. No. 10/604,944 filed 28-Aug.-03, and U.S. Provisional Patent Application Ser. No. 60/441,230 filed 16-Jan.-03. All of the aforesaid patent applications are entitled “Bioinformatically Detectable Group of Novel HIV Regulatory Genes and Uses Thereof”; U.S. patent application Ser. No. 10/605,838, filed 30-Oct.-03, entitled “Bioinformatically Detectable Group of Novel HIV Regulatory Genes and Uses Thereof” is a continuation of and claims priority from the following patent applications, the disclosures of which applications are all hereby incorporated herein by reference: U.S. patent application Ser. No. 10/604,944 filed 28-Aug.-03, and U.S. Provisional Patent Application Ser. No. 60/441,230 filed 16-Jan.-03. Both of the aforesaid patent applications are entitled “Bioinformatically Detectable Group of Novel HIV Regulatory Genes and Uses Thereof”; This application also is a continuation in part of and claims priority from the following patent applications: U.S. patent application Ser. No. 10/604,984 filed 29-Aug.-03, U.S. patent application Ser. No. 10/604,945 filed 27-Aug.-03, U.S. patent application Ser. No. 10/604,942 filed 27-Aug.-03, U.S. Provisional Patent Application Ser. No. 60/457,788 filed 27-Mar.-03, and U.S. patent application Ser. No. 10/310,188 filed 5-Dec.-02. All of the aforesaid patent applications are entitled “Bioinformatically Detectable Group of Novel Viral Regulatory Genes and Uses Thereof”; This application also is a continuation in part of and claims priority from the following patent applications: U.S. patent application Ser. No. 10/604,943 filed 28-Aug.-03, and U.S. Provisional Patent Application Ser. No. 60/441,241 filed 17-Jan.-03. Both of the aforesaid patent applications are entitled “Bioinformatically Detectable Group of Novel Vaccinia Regulatory Genes and Uses Thereof”; U.S. patent application Ser. No. 10/604,984, filed 29-Aug.-03, entitled “Bioinformatically Detectable Group of Novel Viral Regulatory Genes and Uses Thereof” is a continuation of U.S. Provisional Patent Application Ser. No. 60/457,788, filed 27-Mar.-03, entitled “Bioinformatically Detectable Group of Novel Regulatory Genes and Uses Thereof”, the disclosure of which is hereby incorporated herein and claims priority therefrom; and is a continuation in part of and claims priority from the following patent applications, the disclosures of which applications are all hereby incorporated herein by reference: U.S. patent application Ser. No. 10/604,945 filed 27-Aug.-03, U.S. patent application Ser. No. 10/604,942 filed 27-Aug.-03, U.S. patent application Ser. No. 10/310,188 filed 5-Dec.-02, and U.S. patent application Ser. No. 10/303,778 filed 26-Nov.-02. All of the aforesaid patent applications are entitled “Bioinformatically Detectable Group of Novel Viral Regulatory Genes and Uses Thereof”; This application also is a continuation in part of and claims priority from the following patent applications: U.S. patent application Ser. No. 10/604,944 filed 28-Aug.-03, and U.S. Provisional Patent Application Ser. No. 60/441,230 filed 16-Jan.-03. Both of the aforesaid patent applications are entitled “Bioinformatically Detectable Group of Novel HIV Regulatory Genes and Uses Thereof”; This application also is a continuation in part of and claims priority from the following patent applications: U.S. patent application Ser. No. 10/604,943 filed 28-Aug.-03, and U.S. Provisional Patent Application Ser. No. 60/441,241 filed 17-Jan.-03. Both of the aforesaid patent applications are entitled “Bioinformatically Detectable Group of Novel Vaccinia Regulatory Genes and Uses Thereof”; U.S. patent application Ser. No. 10/604,943 filed 28-Aug.-03, entitled “Bioinformatically Detectable Group of Novel Vaccinia Regulatory Genes and Uses Thereof” is a continuation of U.S. Provisional Patent Application Ser. No. 60/441,241, filed 17-Jan.-03, entitled “Bioinformatically Detectable Group of Novel Vaccinia Regulatory Genes and Uses Thereof”, the disclosure of which is hereby incorporated herein and claims priority therefrom; This application also is a continuation in part of and claims priority from the following patent applications: U.S. patent application Ser. No. 10/604,945 filed 27-Aug.-03, U.S. patent application Ser. No. 10/604,942 filed 27-Aug.-03, U.S. Provisional Patent Application Ser. No. 60/457,788 filed 27-Mar.-03, U.S. patent application Ser. No. 10/310,188 filed 5-Dec.-02, and U.S. patent application Ser. No. 10/303,778 filed 26-Nov.-02. All of the aforesaid patent applications are entitled “Bioinformatically Detectable Group of Novel Viral Regulatory Genes and Uses Thereof”; This application also is a continuation in part of and claims priority from the following patent applications: U.S. patent application Ser. No. 10/604,944 filed 28-Aug.-03, and U.S. Provisional Patent Application Ser. No. 60/441,230 filed 16-Jan.-03. Both of the aforesaid patent applications are entitled “Bioinformatically Detectable Group of Novel hiv Regulatory Genes and Uses Thereof”; U.S. patent application Ser. No. 10/604,944, filed 28-Aug.-03, entitled “Bioinformatically Detectable Group of Novel HIV Regulatory Genes and Uses Thereof” is a continuation of U.S. Provisional Patent Application Ser. No. 60/441,230, filed 16-Jan.-03, entitled “Bioinformatically Detectable Group of Novel HIV Regulatory Genes and Uses Thereof”, the disclosure of which is hereby incorporated herein and claims priority therefrom; This application also is a continuation in part of and claims priority from the following patent applications: U.S. patent application Ser. No. 10/604,945 filed 27-Aug.-03, U.S. patent application Ser. No. 10/604,942 filed 27-Aug.-03, U.S. Provisional Patent Application Ser. No. 60/457,788 filed 27-Mar.-03, U.S. patent application Ser. No. 10/310,188 filed 5-Dec.-02, and U.S. patent application Ser. No. 10/303,778 filed 26-Nov.-02. All of the aforesaid patent applications are entitled “Bioinformatically Detectable Group of Novel Viral Regulatory Genes and Uses Thereof” This application also is a continuation in part of U.S. Provisional Patent Application Ser. No. 60/441,241, filed 17-Jan.-03, entitled “Bioinformatically Detectable Group of Novel Vaccinia Regulatory Genes and Uses Thereof”, the disclosure of which is hereby incorporated by reference and claims priority therefrom; U.S. patent application Ser. No. 10/604,945, filed 27-Aug.-03, entitled “Bioinformatically Detectable Group of Novel Viral Regulatory Genes and Uses Thereof” is a continuation of U.S. patent application Ser. No. 10/303,778, filed 26-Nov.-02, entitled “Bioinformatically Detectable Group of Novel Regulatory Genes and Uses Thereof”, the disclosure of which is hereby incorporated herein and claims priority therefrom; and is a continuation in part of and claims priority from the following patent applications, the disclosures of which applications are all hereby incorporated herein by reference: U.S. patent application Ser. No. 10/604,942 filed 27-Aug.-03, U.S. Provisional Patent Application Ser. No. 60/457,788 filed 27-Mar.-03, and U.S. patent application Ser. No. 10/310,188 filed 5-Dec.-02. All of the aforesaid patent applications are entitled “Bioinformatically Detectable Group of Novel Viral Regulatory Genes and Uses Thereof”; This application also is a continuation in part of U.S. Provisional Patent Application Ser. No. 60/441,230 filed 16-Jan.-03, entitled “Bioinformatically Detectable Group of Novel HIV Regulatory Genes and Uses Thereof”, the disclosure of which is hereby incorporated by reference and claims priority therefrom; This application also is a continuation in part of U.S. Provisional Patent Application Ser. No. 60/441,241, filed 17-Jan.-03, entitled “Bioinformatically Detectable Group of Novel Vaccinia Regulatory Genes and Uses Thereof”, the disclosure of which is hereby incorporated by reference and claims priority therefrom; U.S. patent application Ser. No. 10/604,942, filed 27-Aug.-03, entitled “Bioinformatically Detectable Group of Novel Viral Regulatory Genes and Uses Thereof” is a continuation of U.S. patent application Ser. No. 10/310,188, filed 5-Dec.-02, entitled “Bioinformatically Detectable Group of Novel Regulatory Genes and Uses Thereof”, the disclosure of which is hereby incorporated herein and claims priority therefrom; and is a continuation in part of and claims priority from the following patent applications, the disclosures of which applications are all hereby incorporated herein by reference: U.S. Provisional Patent Application Ser. No. 60/457,788 filed 27-Mar.-03, and U.S. patent application Ser. No. 10/303,778 filed 26-Nov.-02. All of the aforesaid patent applications are entitled “Bioinformatically Detectable Group of Novel Viral Regulatory Genes and Uses Thereof”; This application also is a continuation in part of U.S. Provisional Patent Application Ser. No. 60/441,230 filed 16-Jan.-03, entitled “Bioinformatically Detectable Group of Novel HIV Regulatory Genes and Uses Thereof”, the disclosure of which is hereby incorporated by reference and claims priority therefrom; This application also is a continuation in part of U.S. Provisional Patent Application Ser. No. 60/441,241, filed 17-Jan.-03, entitled “Bioinformatically Detectable Group of Novel Vaccinia Regulatory Genes and Uses Thereof”, the disclosure of which is hereby incorporated by reference and claims priority therefrom; U.S. Provisional Patent Application Ser. No. 60/457,788, filed 27-Mar.-03, entitled “Bioinformatically Detectable Group of Novel Viral Regulatory Genes and Uses Thereof” is a continuation in part of and claims priority from the following patent applications, the disclosures of which applications are all hereby incorporated herein by reference: U.S. patent application Ser. No. 10/310,188 filed 5-Dec.-02, and U.S. patent application Ser. No. 10/303,778 filed 26-Nov.-02. Both of the aforesaid patent applications are entitled “Bioinformatically Detectable Group of Novel Viral Regulatory Genes and Uses Thereof”; This application also is a continuation in part of U.S. Provisional Patent Application Ser. No. 60/441,230 filed 16-Jan.-03, entitled “Bioinformatically Detectable Group of Novel HIV Regulatory Genes and Uses Thereof”, the disclosure of which is hereby incorporated by reference and claims priority therefrom; This application also is a continuation in part of U.S. Provisional Patent Application Ser. No. 60/441,241, filed 17-Jan.-03, entitled “Bioinformatically Detectable Group of Novel Vaccinia Regulatory Genes and Uses Thereof”, the disclosure of which is hereby incorporated by reference and claims priority therefrom; U.S. Provisional Patent Application Ser. No. 60/441,241, filed 17-Jan.-03, entitled “Bioinformatically Detectable Group of Novel Vaccinia Regulatory Genes and Uses Thereof” is a continuation in part of and claims priority from the following patent applications, the disclosures of which applications are all hereby incorporated herein by reference: U.S. patent application Ser. No. 10/310,188 filed 5-Dec.-02, and U.S. patent application Ser. No. 10/303,778 filed 26-Nov.-02. Both of the aforesaid patent applications are entitled “Bioinformatically Detectable Group of Novel Viral Regulatory Genes and Uses Thereof”; This application also is a continuation in part of U.S. Provisional Patent Application Ser. No. 60/441,230 filed 16-Jan.-03, entitled “Bioinformatically Detectable Group of Novel HIV Regulatory Genes and Uses Thereof”, the disclosure of which is hereby incorporated by reference and claims priority therefrom; U.S. Provisional Patent Application Ser. No. 60/441,230, filed 17-Jan.-03, entitled “Bioinformatically Detectable Group of Novel Vaccinia Regulatory Genes and Uses Thereof” is a continuation in part of and claims priority from the following patent applications, the disclosures of which applications are all hereby incorporated herein by reference: U.S. patent application Ser. No. 10/310,188 filed 5-Dec.-02, and U.S. patent application Ser. No. 10/303,778 filed 26-Nov.-02. Both of the aforesaid patent applications are entitled “Bioinformatically Detectable Group of Novel Viral Regulatory Genes and Uses Thereof”; U.S. patent application Ser. No. 10/310,188, filed 05-Dec.-02, entitled “Bioinformatically Detectable Group of Novel Viral Regulatory Genes and Uses Thereof” is a continuation in part of U.S. patent application Ser. No. 10/303,778, filed 26-Nov.-02, entitled “Bioinformatically Detectable Group of Novel Viral Regulatory Genes and Uses Thereof”, the disclosure of which is hereby incorporated by reference and claims priority therefrom.

### REFERENCES CITED

[0002] Altschul, S. F., Gish, W., Miller, W., Myers, E. W., and Lipman, D. J. (1990). Basic local alignment search tool. J. Mol. Biol. 215, 403-410.
[0003] Dan Gusfield, Algorithms on strings, trees, and sequences: computer science and computational biology, Cambridge University Press, 1997.
[0004] Elbashir, S. M., Lendeckel, W., and Tuschl, T. (2001). RNA interference is mediated by 21- and 22-nucleotide RNAs. Genes Dev. 15, 188-200.
[0005] Gussow, D. and Clackson, T. (1989). Direct clone characterization from plaques and colonies by the polymerase chain reaction. Nucleic Acids Res. 17, 4000.
[0006] Hamosh A, Scott A F, Amberger J, Bocchini C, Valle D and McKusick V A. (2002). Online Mendelian Inheritance in Man (OMIM), a knowledgebase of human genes and genetic disorders. Nucleic Acids Res. 30: 52-55.
[0007] Jenuth, J. P. (2000). The NCBI. Publicly available tools and resources on the Web. Methods Mol. Biol. 132, 301-312.
[0008] Kirkness, E. F. and Kerlavage, A. R. (1997). The TIGR human cDNA database. Methods Mol. Biol. 69, 261-268.
[0009] Krichevsky, A. M., King, K. S., Donahue, C. P., Khrapko, K., and Kosik, K. S. (2003). A microRNA array reveals extensive regulation of microRNAs during brain development. RNA. 9, 1274-1281.
[0010] Lagos-Quintana, M., Rauhut, R., Lendeckel, W., and Tuschl, T. (2001). Identification of novel genes coding for small expressed RNAs. Science 294, 853-858.
[0011] Lau, N. C., Lim, L. P., Weinstein, E. G., and Bartel, D. P. (2001). An abundant class of tiny RNAs with probable regulatory roles in Caenorhabditis elegans. Science 294, 858-862.
[0012] Lockhart, D. J., Dong, H., Byrne, M. C., Follettie, M. T., Gallo, M. V., Chee, M. S., Mittmann, M., Wang, C., Kobayashi, M., Horton, H., and Brown, E. L. (1996). Expression monitoring by hybridization to high-density oligonucleotide arrays. Nat. Biotechnol. 14, 1675-1680.
[0013] Mathews, D. H., Sabina, J., Zuker, M., and Turner, D. H. (1999). Expanded sequence dependence of thermodynamic parameters improves prediction of RNA secondary structure. J. Mol. Biol. 288, 911-940.
[0014] Reinhart, B. J., Slack, F. J., Basson, M., Pasquinelli, A. E., Bettinger J. C., Rougvie, A. E., Horvitz, H. R., and Ruvkun, G. (2000). The 21-nucleotide let-7 RNA regulates developmental timing in Caenorhabditis elegans. Nature 403, 901-906.
[0015] Southern, E. M. (1992). Detection of specific sequences among DNA fragments separated by gel electrophoresis. 1975. Biotechnology 24, 122-139.
[0016] Tom M. Mitchell, Machine Learning, McGraw Hill, 1997.
[0017] Wightman, B., Ha, I., and Ruvkun, G. (1993). Posttranscriptional regulation of the heterochronic gene lin-14 by lin-4 mediates temporal pattern formation in C. elegans. Cell 75, 855-862.

### BACKGROUND OF THE INVENTION

[0018] 1. Field of the Invention

[0019] The present invention relates to a group of bioinformatically detectable novel viral oligonucleotides and to a group of bioinformatically detectable novel human oligonucleotides associated with viral infections, both are identified here as “Genomic Address Messenger” (GAM) oligonucleotides.

[0020] All of abovementioned oligonucleotides are believed to be related to the microRNA (miRNA) group of oligonucleotides.

[0021] 2. Description of Prior Art

[0022] miRNA oligonucleotides are short ˜22 nucleotide (nt)-long, non-coding, regulatory RNA oligonucleotides that are found in a wide range of species. miRNA oligonucleotides are believed to function as specific gene translation repressors and are sometimes involved in cell differentiation.

[0023] The ability to detect novel miRNA oligonucleotides is limited by the methodologies used to detect such oligonucleotides. All miRNA oligonucleotides identified so far either present a visibly discernable whole body phenotype, as do Lin-4 and Let-7 (Wightman, B., Ha, I., and Ruvkun, G., Cell 75: 855-862 (1993); Reinhart et al. Nature 403: 901-906 (2000)), or produce sufficient quantities of RNA so as to be detected by standard molecular biological techniques.

[0024] Ninety-three miRNA oligonucleotides have been discovered in several species (Lau et al., Science 294: 858-862 (2001), Lagos-Quintana et al., Science 294: 853-858 (2001)) by sequencing a limited number of clones (300 by Lau and 100 by Lagos-Quintana) of size-fractionated small segments of RNA. miRNAs that were detected in these studies therefore represent the more prevalent among the miRNA oligonucleotide family and cannot be much rarer than 1% of all small ˜20 nt-long RNA oligonucleotides.

[0025] The aforementioned studies provide no basis for the detection of miRNA oligonucleotides which either do not present a visually discernable whole body phenotype, or are rare (e.g. rarer than 0.1% of all of the size-fractionated, ˜20 nt-long RNA segments that were expressed in the tissues examined), and therefore do not produce large enough quantities of RNA to be detected by standard biological techniques.

[0026] To date, miRNA oligonucleotides have not been detected in viruses.

[0027] The following U.S. patents relate to bioinformatic detection of genes: U.S. Pat. No. 348,935, entitled “Statistical algorithms for folding and target accessibility prediction and design of nucleic acids”, U.S. Pat. No. 6,369,195, entitled “Prostate-specific gene for diagnosis, prognosis and management of prostate cancer”, and U.S. Pat. No. 6,291,666 entitled “Spike tissue-specific promoter”, each of which is hereby incorporated by reference herein.

### BRIEF DESCRIPTION OF SEQUENCE LISTING, TABLES AND COMPUTER PROGRAM LISTING

[0028] A sequence listing is attached to the present invention, comprising 4,204,915 genomic sequences, is contained in a file named SEQ_LIST.txt (622912 KB, 25-May-04), and is hereby incorporated by reference herein.

[0029] Tables relating to genomic sequences are attached to the present application, appear in the following files (size, creation date) included on CD, incorporated herein: TABLE_{—}1.txt (113 MB, 24-May-04), TABLE_{—}2A.txt (619 MB, 25-May-04), TABLE_{—}2B.txt (515 MB, 25-May-04), TABLE_{—}3.txt (19.4 MB, 24-May-04), TABLE_{—}4.txt (56.2 MB, 24-May-04), TABLE_{—}5.txt (12.1 MB, 24-May-04), TABLE_{—}6.txt (377 MB, 24-May-04), TABLE_{—}7.txt (587 MB, 24-May-04), TABLE_{—}8_A.txt (619 MB, 24-May-04), TABLE_{—}8_B.txt (619 MB, 24-May-04), TABLE_{—}8_C.txt (583 MB, 24-May-04), TABLE_{—}9.txt (3.64 MB, 24-May-04), TABLE_{—}10.txt (98.5 MB, 24-May-04), and TABLE_{—}11.txt (79.8 MB, 25-May-04), all of which are incorporated by reference herein. Further, additional tables relating to genomic sequences are attached to the present application, appear in the following files (size, creation date) attached to the application, incorporated herein: TABLE_{—}12.txt (188 KB, 25-May-04), TABLE_{—}13.txt (140 KB, 25-May-04) and TABLE_{—}14.txt (39 KB, 25-May-04) are incorporated by reference herein.

LENGTHY TABLES FILED ON CD
The patent application contains a lengthy table section. A copy of the table is available in electronic form from the USPTO web site (http://seqdata.uspto.gov/?pageRequest=docDetail&DocID=US20070042381A1). An electronic copy of the table will also be available from the USPTO upon request and payment of the fee set forth in 37 CFR 1.19(b)(3).

[0030] A computer program listing constructed and operative in accordance with a preferred embodiment of the present invention is enclosed on an electronic medium in computer readable form, and is hereby incorporated by reference herein. The computer program listing is contained in 7 files, the name, sizes and creation date of which are as follows: AUXILARY_FILES.txt (117K, 14-Nov.-03); EDIT_DISTANCE.txt (144K, 24-Nov.-03); FIRST-K.txt (96K, 24-Nov.-03); HAIRPIN_PREDICTION.txt (19K, 25-Mar.-04); TWO_PHASED_SIDE_SELECTOR.txt (4K, 14-Nov.-03); TWO_PHASED_PREDICTOR.txt (74K, 14-Nov.-03), and BS_CODE.txt (118K, 11-May-04).

### SUMMARY OF THE INVENTION

[0031] The present invention relates to a novel group of 659 bioinformatically detectable viral regulatory RNA oligonucleotides, which repress expression of human target genes, by means of complementary hybridization to binding sites in untranslated regions of these human target genes. It is believed that this novel group of viral oligonucleotides represents a pervasive viral mechanism of attacking hosts, and therefore knowledge of this novel group of viral oligonucleotides may be useful in preventing and treating viral diseases.

[0032] Additionally, the present invention relates to a novel group of 6272 bioinformatically detectable human regulatory RNA oligonucleotides, which repress expression of viral target genes, by means of complementary hybridization to binding sites in untranslated regions of these viral target genes. It is believed that this novel group of human oligonucleotides represents a pervasive novel anti-viral host defense mechanism, and therefore knowledge of this novel group of human oligonucleotides may be useful in preventing and treating viral diseases.

[0033] Furthermore, the present invention relates to a novel group of 104,504 bioinformatically detectable human regulatory RNA oligonucleotides, which repress expression of human target genes associated with viral diseases, by means of complementary hybridization to binding sites in untranslated regions of these human target genes. It is believed that this novel group of human oligonucleotides represents a pervasive novel host response mechanism, and therefore knowledge of this novel group of human oligonucleotides may be useful in preventing and treating viral diseases.

[0034] Additionally, the present invention relates to a novel group of 1,406 bioinformatically detectable viral regulatory RNA oligonucleotides, which repress expression of viral target genes, by means of complementary hybridization to binding sites in untranslated regions of these viral target genes. It is believed that this novel group of viral oligonucleotides represents a pervasive novel internal viral regulation mechanism, and therefore knowledge of this novel group of viral oligonucleotides may be useful in preventing and treating viral diseases.

[0035] Also disclosed are 190 novel microRNA-cluster like viral polynucleotides and 14,813 novel microRNA-cluster like human polynucleotides, both referred to here as Genomic Record (GR) polynucleotides.

[0036] In various preferred embodiments, the present invention seeks to provide improved method and system for detection and prevention of viral diseases, which are mediated by the abovementioned groups of novel oligonucleotides.

[0037] Accordingly, the invention provides several substantially pure nucleic acids (e.g., genomic DNA, cDNA or synthetic DNA) each comprising a novel GAM oligonucleotide, vectors comprising the DNAs, probes comprising the DNAs, a method and system for selectively modulating translation of known target genes utilizing the vectors, and a method and system utilizing the GAM probes to modulate expression of target genes.

[0038] The present invention represents a scientific breakthrough, disclosing novel miRNA-like oligonucleotides the number of which is dramatically larger than previously believed existed. Prior-art studies reporting miRNA oligonucleotides ((Lau et al., Science 294:858-862 (2001), Lagos-Quintana et al., Science 294: 853-858 (2001)) discovered 93 miRNA oligonucleotides in several species, including 21 in human, using conventional molecular biology methods, such as cloning and sequencing.

[0039] Molecular biology methodologies employed by these studies are limited in their ability to detect rare miRNA oligonucleotides, since these studies relied on sequencing of a limited number of clones (300 clones by Lau and 100 clones by Lagos-Quintana) of small segments (i.e. size-fractionated) of RNA. miRNA oligonucleotides detected in these studies therefore, represent the more prevalent among the miRNA oligonucleotide family, and are typically not be much rarer than 1% of all small ˜20 nt-long RNA oligonucleotides present in the tissue from the RNA was extracted.

[0040] Recent studies state the number of miRNA oligonucleotides to be limited, and describe the limited sensitivity of available methods for detection of miRNA oligonucleotides: “The estimate of 255 human miRNA oligonucleotides is an upper bound implying that no more than 40 miRNA oligonucleotides remain to be identified in mammals” (Lim et al., Science, 299:1540 (2003)); “Estimates place the total number of vertebrate miRNA genes at about 200-250” (Ambros et al. Curr. Biol. 13:807-818 (2003)); and “Confirmation of very low abundance miRNAs awaits the application of detection methods more sensitive than Northern blots” (Ambros et al. Curr. Biol. 13:807-818 (2003)).

[0041] The oligonucleotides of the present invention represent a revolutionary new dimension of genomics and of biology: a dimension comprising a huge number of non-protein-coding oligonucleotides which modulate expression of thousands of proteins and are associated with numerous major diseases. This new dimension disclosed by the present invention dismantles a central dogma that has dominated life-sciences during the past 50 years, a dogma which has emphasized the importance of protein-coding regions of the genome, holding non-protein-coding regions to be of little consequence, often dubbing them “junk DNA”.

[0042] Indeed, only in November, 2003 has this long held belief as to the low importance of non-protein-coding regions been vocally challenged. As an example, an article titled “The Unseen Genome—Gems in the Junk” (Gibbs, W. W. Sci. Am. 289:46-53 (2003)) asserts that the failure to recognize the importance of non-protein-coding regions “may well go down as one of the biggest mistakes in the history of molecular biology.” Gibbs further asserts that “what was damned as junk because it was not understood, may in fact turn out to be the very basis of human complexity.” The present invention provides a dramatic leap in understanding specific important roles of non-protein-coding regions.

[0043] An additional scientific breakthrough of the present invention is a novel conceptual model disclosed by the present invention, which conceptual model is preferably used to encode in a genome the determination of cell differentiation, utilizing oligonucleotides and polynucleotides of the present invention.

[0044] Using the bioinformatic engine of the present invention, 1,655 viral GAM oligonucleotides and their respective precursors and targets have been detected and 105,537 human GAM oligonucleotides and their respective precursors and targets have been detected. These bioinformatic predictions are supported by robust biological studies. These bioinformatic predictions are supported by robust biological studies. Microarray experiments validated expression of 1,637 of the human GAM oligonucleotides of the present invention. Of these, 938 received an extremely high score: over six standard deviations higher than the background “noise” of the microarray, and over two standard deviations above their individual “mismatch” control probes and 69 received a high score: over four standard deviations higher than the background “noise” of the microarray. Further, 38 GAM oligonucleotides were sequenced.

[0045] In various preferred embodiments, the present invention seeks to provide an improved method and system for specific modulation of the expression of specific target genes involved in significant human diseases. It also provides an improved method and system for detection of the expression of novel oligonucleotides of the present invention, which modulate these target genes. In many cases, the target genes may be known and fully characterized, however in alternative embodiments of the present invention, unknown or less well characterized genes may be targeted.

[0046] A “Nucleic acid” is defined as a ribonucleic acid (RNA) molecule, or a deoxyribonucleic acid (DNA) molecule, or complementary deoxyribonucleic acid (cDNA), comprising either naturally occurring nucleotides or non-naturally occurring nucleotides.

[0047] “Substantially pure nucleic acid”, “Isolated Nucleic Acid”, “Isolated Oligoucleotide” and “Isolated Polynucleotide” are defined as a nucleic acid that is free of the genome of the organism from which the nucleic acid is derived, and include, for example, a recombinant nucleic acid which is incorporated into a vector, into an autonomously replicating plasmid or virus, or into the genomic nucleic acid of a prokaryote or eukaryote at a site other than its natural site; or which exists as a separate molecule (e.g., a cDNA or a genomic or cDNA fragment produced by PCR or restriction endonuclease digestion) independent of other nucleic acids.

[0048] An “Oligonucleotide” is defined as a nucleic acid comprising 2-139 nts, or preferably 16-120 nts. A “Polynucleotide” is defined as a nucleic acid comprising 140-5000 nts, or preferably 140-1000 nts.

[0049] A “Complementary” sequence is defined as a first nucleotide sequence which reverses complementary of a second nucleotide sequence: the first nucleotide sequence is reversed relative to a second nucleotide sequence, and wherein each nucleotide in the first nucleotide sequence is complementary to a corresponding nucleotide in the second nucleotide sequence (e.g. ATGGC is the complementary sequence of GCCAT).

[0050] “Hybridization”, “Binding” and “Annealing” are defined as hybridization, under in vivo physiological conditions, of a first nucleic acid to a second nucleic acid, which second nucleic acid is at least partially complementary to the first nucleic acid.

[0051] A “Hairpin Structure” is defined as an oligonucleotide having a nucleotide sequence that is 50-140 nts in length, the first half of which nucleotide sequence is at least partially complementary to the second part thereof, thereby causing the nucleic acid to fold onto itself, forming a secondary hairpin structure.

[0052] A “Hairpin-Shaped Precursor” is defined as a Hairpin Structure which is processed by a Dicer enzyme complex, yielding an oligonucleotide which is about 19 to about 24 nts in length.

[0053] “Inhibiting translation” is defined as the ability to prevent synthesis of a specific protein encoded by a respective gene by means of inhibiting the translation of the mRNA of this gene. For example, inhibiting translation may include the following steps: (1) a DNA segment encodes an RNA, the first half of whose sequence is partially complementary to the second half thereof; (2) the precursor folds onto itself forming a hairpin-shaped precursor; (3) a Dicer enzyme complex cuts the hairpin-shaped precursor yielding an oligonucleotide that is approximately 22 nt in length; (4) the oligonucleotide binds complementarily to at least one binding site, having a nucleotide sequence that is at least partially complementary to the oligonucleotide, which binding site is located in the mRNA of a target gene, preferably in the untranslated region (UTR) of a target gene, such that the binding inhibits translation of the target protein.

[0054] A “Translation inhibitor site” is defined as the minimal nucleotide sequence sufficient to inhibit translation.

[0055] The present invention describes novel GAM oligonucleotides, detected using a bioinformatic engine described hereinabove. The ability of this detection engine has been demonstrated using stringent algorithmic criteria, showing that the engine has both high sensitivity, indicated by the high detection rate of published miRNA oligonucleotides and their targets, as well as high specificity, indicated by the low amount of “background” hairpin candidates passing its filters. Laboratory tests, based both on sequencing of predicted GAM oligonucleotides and on microarray experiments, validated 1672 of the GAM oligonucleotides in the present invention. Further, almost all of the viral target genes (2,055 of the 2,195) and almost all of the human target genes (588 out of 657) described in the present invention are bound by one or more of the 1672 human GAM oligonucleotides validated by the microarray experiments.

[0056] There is thus provided in accordance with a preferred embodiment of the present invention a bioinformatically detectable isolated oligonucleotide which is endogenously processed from a hairpin-shaped precursor, and anneals to a portion of a mRNA transcript of a target gene, wherein binding of the oligonucleotide to the mRNA transcript represses expression of the target gene, and wherein the oligonucleotide has at least 80% sequence identity with a nucleotide sequence selected from the group consisting of SEQ ID NOs: 1-1672 and 1673-119264.

[0057] There is further provided in accordance with another preferred embodiment of the present invention a bioinformatically detectable isolated oligonucleotide having a nucleotide sequence selected from the group consisting of SEQ ID NOs: 1-1672 and 1673-119264.

[0058] There is still further provided in accordance with another preferred embodiment of the present invention a bioinformatically detectable first oligonucleotide which is a portion of a mRNA transcript of a target gene, and anneals to a second oligonucleotide that is endogenously processed from a hairpin precursor, wherein binding of the first oligonucleotide to the second oligonucleotide represses expression of the target gene, and wherein nucleotide sequence of the second nucleotide is selected from the group consisting of SEQ ID NOs: 1-1672 and 1673-119264.

[0059] There is additionally provided in accordance with another preferred embodiment of the present invention a bioinformatically detectable oligonucleotide having a nucleotide sequence selected from the group consisting of SEQ ID NOs: 3362235-4097720.

[0060] There is moreover provided in accordance with another preferred embodiment of the present invention a bioinformatically detectable isolated oligonucleotide which anneals to a portion of a mRNA transcript of a target gene associated with B19 virus infection, wherein binding of the oligonucleotide to the mRNA transcript represses expression of the target gene, and wherein the oligonucleotide has at least 80% sequence identity with a nucleotide sequence selected from the group consisting of SEQ ID NOs shown in Table 13 row 2.

[0061] There is further provided in accordance with another preferred embodiment of the present invention a bioinformatically detectable isolated oligonucleotide which anneals to a portion of a mRNA transcript of a target gene associated with Barmah Forest virus infection, wherein binding of the oligonucleotide to the mRNA transcript represses expression of the target gene, and wherein the oligonucleotide has at least 80% sequence identity with a nucleotide sequence selected from the group consisting of SEQ ID NOs shown in Table 13 row 3.

[0062] There is still further provided in accordance with another preferred embodiment of the present invention a bioinformatically detectable isolated oligonucleotide which anneals to a portion of a mRNA transcript of a target gene associated with BK polyomavirus infection, wherein binding of the oligonucleotide to the mRNA transcript represses expression of the target gene, and wherein the oligonucleotide has at least 80% sequence identity with a nucleotide sequence selected from the group consisting of SEQ ID NOs shown in Table 13 row 4.

[0063] There is additionally provided in accordance with another preferred embodiment of the present invention a bioinformatically detectable isolated oligonucleotide which anneals to a portion of a mRNA transcript of a target gene associated with Bunyamwera virus infection, wherein binding of the oligonucleotide to the mRNA transcript represses expression of the target gene, and wherein the oligonucleotide has at least 80% sequence identity with a nucleotide sequence selected from the group consisting of SEQ ID NOs shown in Table 13 row 5.

[0064] There is moreover provided in accordance with another preferred embodiment of the present invention a bioinformatically detectable isolated oligonucleotide which anneals to a portion of a mRNA transcript of a target gene associated with Colorado tick fever virus infection, wherein binding of the oligonucleotide to the mRNA transcript represses expression of the target gene, and wherein the oligonucleotide has at least 80% sequence identity with a nucleotide sequence selected from the group consisting of SEQ ID NOs shown in Table 13 row 6.

[0065] There is further provided in accordance with another preferred embodiment of the present invention a bioinformatically detectable isolated oligonucleotide which anneals to a portion of a mRNA transcript of a target gene associated with Crimean-Congo hemorrhagic fever virus infection, wherein binding of the oligonucleotide to the mRNA transcript represses expression of the target gene, and wherein the oligonucleotide has at least 80% sequence identity with a nucleotide sequence selected from the group consisting of SEQ ID NOs shown in Table 13 row 7.

[0066] There is still further provided in accordance with another preferred embodiment of the present invention a bioinformatically detectable isolated oligonucleotide which anneals to a portion of a mRNA transcript of a target gene associated with Dengue virus infection, wherein binding of the oligonucleotide to the mRNA transcript represses expression of the target gene, and wherein the oligonucleotide has at least 80% sequence identity with a nucleotide sequence selected from the group consisting of SEQ ID NOs shown in Table 13 row 8.

[0067] There is additionally provided in accordance with another preferred embodiment of the present invention a bioinformatically detectable isolated oligonucleotide which anneals to a portion of a mRNA transcript of a target gene associated with Dobrava virus infection, wherein binding of the oligonucleotide to the mRNA transcript represses expression of the target gene, and wherein the oligonucleotide has at least 80% sequence identity with a nucleotide sequence selected from the group consisting of SEQ ID NOs shown in Table 13 row 9.

[0068] There is moreover provided in accordance with another preferred embodiment of the present invention a bioinformatically detectable isolated oligonucleotide which anneals to a portion of a mRNA transcript of a target gene associated with Eastern equine encephalitis virus infection, wherein binding of the oligonucleotide to the mRNA transcript represses expression of the target gene, and wherein the oligonucleotide has at least 80% sequence identity with a nucleotide sequence selected from the group consisting of SEQ ID NOs shown in Table 13 row 10.

[0069] There is further provided in accordance with another preferred embodiment of the present invention a bioinformatically detectable isolated oligonucleotide which anneals to a portion of a mRNA transcript of a target gene associated with Hepatitis A virus infection, wherein binding of the oligonucleotide to the mRNA transcript represses expression of the target gene, and wherein the oligonucleotide has at least 80% sequence identity with a nucleotide sequence selected from the group consisting of SEQ ID NOs shown in Table 13 row 11.

[0070] There is still further provided in accordance with another preferred embodiment of the present invention a bioinformatically detectable isolated oligonucleotide which anneals to a portion of a mRNA transcript of a target gene associated with Hepatitis B virus infection, wherein binding of the oligonucleotide to the mRNA transcript represses expression of the target gene, and wherein the oligonucleotide has at least 80% sequence identity with a nucleotide sequence selected from the group consisting of SEQ ID NOs shown in Table 13 row 12.

[0071] There is additionally provided in accordance with another preferred embodiment of the present invention a bioinformatically detectable isolated oligonucleotide which anneals to a portion of a mRNA transcript of a target gene associated with Hepatitis C virus infection, wherein binding of the oligonucleotide to the mRNA transcript represses expression of the target gene, and wherein the oligonucleotide has at least 80% sequence identity with a nucleotide sequence selected from the group consisting of SEQ ID NOs shown in Table 13 row 13.

[0072] There is moreover provided in accordance with another preferred embodiment of the present invention a bioinformatically detectable isolated oligonucleotide which anneals to a portion of a mRNA transcript of a target gene associated with Hepatitis D virus infection, wherein binding of the oligonucleotide to the mRNA transcript represses expression of the target gene, and wherein the oligonucleotide has at least 80% sequence identity with a nucleotide sequence selected from the group consisting of SEQ ID NOs shown in Table 13 row 14.

[0073] There is further provided in accordance with another preferred embodiment of the present invention a bioinformatically detectable isolated oligonucleotide which anneals to a portion of a mRNA transcript of a target gene associated with Hepatitis E virus infection, wherein binding of the oligonucleotide to the mRNA transcript represses expression of the target gene, and wherein the oligonucleotide has at least 80% sequence identity with a nucleotide sequence selected from the group consisting of SEQ ID NOs shown in Table 13 row 15.

[0074] There is still further provided in accordance with another preferred embodiment of the present invention a bioinformatically detectable isolated oligonucleotide which anneals to a portion of a mRNA transcript of a target gene associated with Human adenovirus A infection, wherein binding of the oligonucleotide to the mRNA transcript represses expression of the target gene, and wherein the oligonucleotide has at least 80% sequence identity with a nucleotide sequence selected from the group consisting of SEQ ID NOs shown in Table 13 row 16.

[0075] There is additionally provided in accordance with another preferred embodiment of the present invention a bioinformatically detectable isolated oligonucleotide which anneals to a portion of a mRNA transcript of a target gene associated with Human adenovirus B (HAdV-B) infection, wherein binding of the oligonucleotide to the mRNA transcript represses expression of the target gene, and wherein the oligonucleotide has at least 80% sequence identity with a nucleotide sequence selected from the group consisting of SEQ ID NOs shown in Table 13 row 17.

[0076] There is moreover provided in accordance with another preferred embodiment of the present invention a bioinformatically detectable isolated oligonucleotide which anneals to a portion of a mRNA transcript of a target gene associated with Human adenovirus C infection, wherein binding of the oligonucleotide to the mRNA transcript represses expression of the target gene, and wherein the oligonucleotide has at least 80% sequence identity with a nucleotide sequence selected from the group consisting of SEQ ID NOs shown in Table 13 row 18.

[0077] There is further provided in accordance with another preferred embodiment of the present invention a bioinformatically detectable isolated oligonucleotide which anneals to a portion of a mRNA transcript of a target gene associated with Human adenovirus D infection, wherein binding of the oligonucleotide to the mRNA transcript represses expression of the target gene, and wherein the oligonucleotide has at least 80% sequence identity with a nucleotide sequence selected from the group consisting of SEQ ID NOs shown in Table 13 row 19.

[0078] There is still further provided in accordance with another preferred embodiment of the present invention a bioinformatically detectable isolated oligonucleotide which anneals to a portion of a mRNA transcript of a target gene associated with Human adenovirus E infection, wherein binding of the oligonucleotide to the mRNA transcript represses expression of the target gene, and wherein the oligonucleotide has at least 80% sequence identity with a nucleotide sequence selected from the group consisting of SEQ ID NOs shown in Table 13 row 20.

[0079] There is additionally provided in accordance with another preferred embodiment of the present invention a bioinformatically detectable isolated oligonucleotide which anneals to a portion of a mRNA transcript of a target gene associated with Human adenovirus F infection, wherein binding of the oligonucleotide to the mRNA transcript represses expression of the target gene, and wherein the oligonucleotide has at least 80% sequence identity with a nucleotide sequence selected from the group consisting of SEQ ID NOs shown in Table 13 row 21.

[0080] There is moreover provided in accordance with another preferred embodiment of the present invention a bioinformatically detectable isolated oligonucleotide which anneals to a portion of a mRNA transcript of a target gene associated with Human astrovirus infection, wherein binding of the oligonucleotide to the mRNA transcript represses expression of the target gene, and wherein the oligonucleotide has at least 80% sequence identity with a nucleotide sequence selected from the group consisting of SEQ ID NOs shown in Table 13 row 22.

[0081] There is further provided in accordance with another preferred embodiment of the present invention a bioinformatically detectable isolated oligonucleotide which anneals to a portion of a mRNA transcript of a target gene associated with Human coronavirus 229E infection, wherein binding of the oligonucleotide to the mRNA transcript represses expression of the target gene, and wherein the oligonucleotide has at least 80% sequence identity with a nucleotide sequence selected from the group consisting of SEQ ID NOs shown in Table 13 row 23.

[0082] There is still further provided in accordance with another preferred embodiment of the present invention a bioinformatically detectable isolated oligonucleotide which anneals to a portion of a mRNA transcript of a target gene associated with Human coronavirus OC43 (HCoV-OC43) infection, wherein binding of the oligonucleotide to the mRNA transcript represses expression of the target gene, and wherein the oligonucleotide has at least 80% sequence identity with a nucleotide sequence selected from the group consisting of SEQ ID NOs shown in Table 13 row 24.

[0083] There is additionally provided in accordance with another preferred embodiment of the present invention a bioinformatically detectable isolated oligonucleotide which anneals to a portion of a mRNA transcript of a target gene associated with Human echovirus 1 infection, wherein binding of the oligonucleotide to the mRNA transcript represses expression of the target gene, and wherein the oligonucleotide has at least 80% sequence identity with a nucleotide sequence selected from the group consisting of SEQ ID NOs shown in Table 13 row 25.

[0084] There is moreover provided in accordance with another preferred embodiment of the present invention a bioinformatically detectable isolated oligonucleotide which anneals to a portion of a mRNA transcript of a target gene associated with Human enterovirus A infection, wherein binding of the oligonucleotide to the mRNA transcript represses expression of the target gene, and wherein the oligonucleotide has at least 80% sequence identity with a nucleotide sequence selected from the group consisting of SEQ ID NOs shown in Table 13 row 26.

[0085] There is further provided in accordance with another preferred embodiment of the present invention a bioinformatically detectable isolated oligonucleotide which anneals to a portion of a mRNA transcript of a target gene associated with Human enterovirus B infection, wherein binding of the oligonucleotide to the mRNA transcript represses expression of the target gene, and wherein the oligonucleotide has at least 80% sequence identity with a nucleotide sequence selected from the group consisting of SEQ ID NOs shown in Table 13 row 27.

[0086] There is still further provided in accordance with another preferred embodiment of the present invention a bioinformatically detectable isolated oligonucleotide which anneals to a portion of a mRNA transcript of a target gene associated with Human enterovirus C infection, wherein binding of the oligonucleotide to the mRNA transcript represses expression of the target gene, and wherein the oligonucleotide has at least 80% sequence identity with a nucleotide sequence selected from the group consisting of SEQ ID NOs shown in Table 13 row 28.

[0087] There is additionally provided in accordance with another preferred embodiment of the present invention a bioinformatically detectable isolated oligonucleotide which anneals to a portion of a mRNA transcript of a target gene associated with Human enterovirus D infection, wherein binding of the oligonucleotide to the mRNA transcript represses expression of the target gene, and wherein the oligonucleotide has at least 80% sequence identity with a nucleotide sequence selected from the group consisting of SEQ ID NOs shown in Table 13 row 29.

[0088] There is moreover provided in accordance with another preferred embodiment of the present invention a bioinformatically detectable isolated oligonucleotide which anneals to a portion of a mRNA transcript of a target gene associated with Human enterovirus E infection, wherein binding of the oligonucleotide to the mRNA transcript represses expression of the target gene, and wherein the oligonucleotide has at least 80% sequence identity with a nucleotide sequence selected from the group consisting of SEQ ID NOs shown in Table 13 row 30.

[0089] There is further provided in accordance with another preferred embodiment of the present invention a bioinformatically detectable isolated oligonucleotide which anneals to a portion of a mRNA transcript of a target gene associated with Human erythrovirus V9 infection, wherein binding of the oligonucleotide to the mRNA transcript represses expression of the target gene, and wherein the oligonucleotide has at least 80% sequence identity with a nucleotide sequence selected from the group consisting of SEQ ID NOs shown in Table 13 row 31.

[0090] There is still further provided in accordance with another preferred embodiment of the present invention a bioinformatically detectable isolated oligonucleotide which anneals to a portion of a mRNA transcript of a target gene associated with Human herpesvirus 1 infection, wherein binding of the oligonucleotide to the mRNA transcript represses expression of the target gene, and wherein the oligonucleotide has at least 80% sequence identity with a nucleotide sequence selected from the group consisting of SEQ ID NOs shown in Table 13 row 32.

[0091] There is additionally provided in accordance with another preferred embodiment of the present invention a bioinformatically detectable isolated oligonucleotide which anneals to a portion of a mRNA transcript of a target gene associated with Human herpesvirus 10 infection, wherein binding of the oligonucleotide to the mRNA transcript represses expression of the target gene, and wherein the oligonucleotide has at least 80% sequence identity with a nucleotide sequence selected from the group consisting of SEQ ID NOs shown in Table 13 row 33.

[0092] There is moreover provided in accordance with another preferred embodiment of the present invention a bioinformatically detectable isolated oligonucleotide which anneals to a portion of a mRNA transcript of a target gene associated with Human herpesvirus 2 infection, wherein binding of the oligonucleotide to the mRNA transcript represses expression of the target gene, and wherein the oligonucleotide has at least 80% sequence identity with a nucleotide sequence selected from the group consisting of SEQ ID NOs shown in Table 13 row 34.

[0093] There is further provided in accordance with another preferred embodiment of the present invention a bioinformatically detectable isolated oligonucleotide which anneals to a portion of a mRNA transcript of a target gene associated with Human herpesvirus 3 infection, wherein binding of the oligonucleotide to the mRNA transcript represses expression of the target gene, and wherein the oligonucleotide has at least 80% sequence identity with a nucleotide sequence selected from the group consisting of SEQ ID NOs shown in Table 13 row 35.

[0094] There is still further provided in accordance with another preferred embodiment of the present invention a bioinformatically detectable isolated oligonucleotide which anneals to a portion of a mRNA transcript of a target gene associated with Human herpesvirus 4 (Epstein-Barr virus) infection, wherein binding of the oligonucleotide to the mRNA transcript represses expression of the target gene, and wherein the oligonucleotide has at least 80% sequence identity with a nucleotide sequence selected from the group consisting of SEQ ID NOs shown in Table 13 row 36.

[0095] There is additionally provided in accordance with another preferred embodiment of the present invention a bioinformatically detectable isolated oligonucleotide which anneals to a portion of a mRNA transcript of a target gene associated with Human herpesvirus 5 infection, wherein binding of the oligonucleotide to the mRNA transcript represses expression of the target gene, and wherein the oligonucleotide has at least 80% sequence identity with a nucleotide sequence selected from the group consisting of SEQ ID NOs shown in Table 13 row 37.

[0096] There is moreover provided in accordance with another preferred embodiment of the present invention a bioinformatically detectable isolated oligonucleotide which anneals to a portion of a mRNA transcript of a target gene associated with Human herpesvirus 6 infection, wherein binding of the oligonucleotide to the mRNA transcript represses expression of the target gene, and wherein the oligonucleotide has at least 80% sequence identity with a nucleotide sequence selected from the group consisting of SEQ ID NOs shown in Table 13 row 38.

[0097] There is further provided in accordance with another preferred embodiment of the present invention a bioinformatically detectable isolated oligonucleotide which anneals to a portion of a mRNA transcript of a target gene associated with Human herpesvirus 6B infection, wherein binding of the oligonucleotide to the mRNA transcript represses expression of the target gene, and wherein the oligonucleotide has at least 80% sequence identity with a nucleotide sequence selected from the group consisting of SEQ ID NOs shown in Table 13 row 39.

[0098] There is still further provided in accordance with another preferred embodiment of the present invention a bioinformatically detectable isolated oligonucleotide which anneals to a portion of a mRNA transcript of a target gene associated with Human herpesvirus 7 infection, wherein binding of the oligonucleotide to the mRNA transcript represses expression of the target gene, and wherein the oligonucleotide has at least 80% sequence identity with a nucleotide sequence selected from the group consisting of SEQ ID NOs shown in Table 13 row 40.

[0099] There is additionally provided in accordance with another preferred embodiment of the present invention a bioinformatically detectable isolated oligonucleotide which anneals to a portion of a mRNA transcript of a target gene associated with Human herpesvirus 9 infection, wherein binding of the oligonucleotide to the mRNA transcript represses expression of the target gene, and wherein the oligonucleotide has at least 80% sequence identity with a nucleotide sequence selected from the group consisting of SEQ ID NOs shown in Table 13 row 41.

[0100] There is moreover provided in accordance with another preferred embodiment of the present invention a bioinformatically detectable isolated oligonucleotide which anneals to a portion of a mRNA transcript of a target gene associated with Human immunodeficiency virus 1 (HIV-1) infection, wherein binding of the oligonucleotide to the mRNA transcript represses expression of the target gene, and wherein the oligonucleotide has at least 80% sequence identity with a nucleotide sequence selected from the group consisting of SEQ ID NOs shown in Table 13 row 42.

[0101] There is further provided in accordance with another preferred embodiment of the present invention a bioinformatically detectable isolated oligonucleotide which anneals to a portion of a mRNA transcript of a target gene associated with Human immunodeficiency virus 2 (HIV-2) infection, wherein binding of the oligonucleotide to the mRNA transcript represses expression of the target gene, and wherein the oligonucleotide has at least 80% sequence identity with a nucleotide sequence selected from the group consisting of SEQ ID NOs shown in Table 13 row 43.

[0102] There is still further provided in accordance with another preferred embodiment of the present invention a bioinformatically detectable isolated oligonucleotide which anneals to a portion of a mRNA transcript of a target gene associated with Human metapneumovirus infection, wherein binding of the oligonucleotide to the mRNA transcript represses expression of the target gene, and wherein the oligonucleotide has at least 80% sequence identity with a nucleotide sequence selected from the group consisting of SEQ ID NOs shown in Table 13 row 44.

[0103] There is additionally provided in accordance with another preferred embodiment of the present invention a bioinformatically detectable isolated oligonucleotide which anneals to a portion of a mRNA transcript of a target gene associated with Human papillomavirus type 11 infection, wherein binding of the oligonucleotide to the mRNA transcript represses expression of the target gene, and wherein the oligonucleotide has at least 80% sequence identity with a nucleotide sequence selected from the group consisting of SEQ ID NOs shown in Table 13 row 45.

[0104] There is moreover provided in accordance with another preferred embodiment of the present invention a bioinformatically detectable isolated oligonucleotide which anneals to a portion of a mRNA transcript of a target gene associated with Human papillomavirus type 16 infection, wherein binding of the oligonucleotide to the mRNA transcript represses expression of the target gene, and wherein the oligonucleotide has at least 80% sequence identity with a nucleotide sequence selected from the group consisting of SEQ ID NOs shown in Table 13 row 46.

[0105] There is further provided in accordance with another preferred embodiment of the present invention a bioinformatically detectable isolated oligonucleotide which anneals to a portion of a mRNA transcript of a target gene associated with Human papillomavirus type 17 infection, wherein binding of the oligonucleotide to the mRNA transcript represses expression of the target gene, and wherein the oligonucleotide has at least 80% sequence identity with a nucleotide sequence selected from the group consisting of SEQ ID NOs shown in Table 13 row 47.

[0106] There is still further provided in accordance with another preferred embodiment of the present invention a bioinformatically detectable isolated oligonucleotide which anneals to a portion of a mRNA transcript of a target gene associated with Human papillomavirus type 18 infection, wherein binding of the oligonucleotide to the mRNA transcript represses expression of the target gene, and wherein the oligonucleotide has at least 80% sequence identity with a nucleotide sequence selected from the group consisting of SEQ ID NOs shown in Table 13 row 48.

[0107] There is additionally provided in accordance with another preferred embodiment of the present invention a bioinformatically detectable isolated oligonucleotide which anneals to a portion of a mRNA transcript of a target gene associated with Human papillomavirus type 18, complete genome infection, wherein binding of the oligonucleotide to the mRNA transcript represses expression of the target gene, and wherein the oligonucleotide has at least 80% sequence identity with a nucleotide sequence selected from the group consisting of SEQ ID NOs shown in Table 13 row 49.

[0108] There is moreover provided in accordance with another preferred embodiment of the present invention a bioinformatically detectable isolated oligonucleotide which anneals to a portion of a mRNA transcript of a target gene associated with Human papillomavirus type 19 infection, wherein binding of the oligonucleotide to the mRNA transcript represses expression of the target gene, and wherein the oligonucleotide has at least 80% sequence identity with a nucleotide sequence selected from the group consisting of SEQ ID NOs shown in Table 13 row 50.

[0109] There is further provided in accordance with another preferred embodiment of the present invention a bioinformatically detectable isolated oligonucleotide which anneals to a portion of a mRNA transcript of a target gene associated with Human papillomavirus type 31 infection, wherein binding of the oligonucleotide to the mRNA transcript represses expression of the target gene, and wherein the oligonucleotide has at least 80% sequence identity with a nucleotide sequence selected from the group consisting of SEQ ID NOs shown in Table 13 row 51.

[0110] There is still further provided in accordance with another preferred embodiment of the present invention a bioinformatically detectable isolated oligonucleotide which anneals to a portion of a mRNA transcript of a target gene associated with Human papillomavirus type 45 infection, wherein binding of the oligonucleotide to the mRNA transcript represses expression of the target gene, and wherein the oligonucleotide has at least 80% sequence identity with a nucleotide sequence selected from the group consisting of SEQ ID NOs shown in Table 13 row 52.

[0111] There is additionally provided in accordance with another preferred embodiment of the present invention a bioinformatically detectable isolated oligonucleotide which anneals to a portion of a mRNA transcript of a target gene associated with Human papillomavirus type 5 infection, wherein binding of the oligonucleotide to the mRNA transcript represses expression of the target gene, and wherein the oligonucleotide has at least 80% sequence identity with a nucleotide sequence selected from the group consisting of SEQ ID NOs shown in Table 13 row 53.

[0112] There is moreover provided in accordance with another preferred embodiment of the present invention a bioinformatically detectable isolated oligonucleotide which anneals to a portion of a mRNA transcript of a target gene associated with Human papillomavirus type 6 infection, wherein binding of the oligonucleotide to the mRNA transcript represses expression of the target gene, and wherein the oligonucleotide has at least 80% sequence identity with a nucleotide sequence selected from the group consisting of SEQ ID NOs shown in Table 13 row 54.

[0113] There is further provided in accordance with another preferred embodiment of the present invention a bioinformatically detectable isolated oligonucleotide which anneals to a portion of a mRNA transcript of a target gene associated with Human papillomavirus type 8 infection, wherein binding of the oligonucleotide to the mRNA transcript represses expression of the target gene, and wherein the oligonucleotide has at least 80% sequence identity with a nucleotide sequence selected from the group consisting of SEQ ID NOs shown in Table 13 row 55.

[0114] There is still further provided in accordance with another preferred embodiment of the present invention a bioinformatically detectable isolated oligonucleotide which anneals to a portion of a mRNA transcript of a target gene associated with Human parainfluenza virus 1 strain Washington/1964 infection, wherein binding of the oligonucleotide to the mRNA transcript represses expression of the target gene, and wherein the oligonucleotide has at least 80% sequence identity with a nucleotide sequence selected from the group consisting of SEQ ID NOs shown in Table 13 row 56.

[0115] There is additionally provided in accordance with another preferred embodiment of the present invention a bioinformatically detectable isolated oligonucleotide which anneals to a portion of a mRNA transcript of a target gene associated with Human parainfluenza virus 2 infection, wherein binding of the oligonucleotide to the mRNA transcript represses expression of the target gene, and wherein the oligonucleotide has at least 80% sequence identity with a nucleotide sequence selected from the group consisting of SEQ ID NOs shown in Table 13 row 57.

[0116] There is moreover provided in accordance with another preferred embodiment of the present invention a bioinformatically detectable isolated oligonucleotide which anneals to a portion of a mRNA transcript of a target gene associated with Human parainfluenza virus 3 infection, wherein binding of the oligonucleotide to the mRNA transcript represses expression of the target gene, and wherein the oligonucleotide has at least 80% sequence identity with a nucleotide sequence selected from the group consisting of SEQ ID NOs shown in Table 13 row 58.

[0117] There is further provided in accordance with another preferred embodiment of the present invention a bioinformatically detectable isolated oligonucleotide which anneals to a portion of a mRNA transcript of a target gene associated with Human parechovirus 2 infection, wherein binding of the oligonucleotide to the mRNA transcript represses expression of the target gene, and wherein the oligonucleotide has at least 80% sequence identity with a nucleotide sequence selected from the group consisting of SEQ ID NOs shown in Table 13 row 59.

[0118] There is still further provided in accordance with another preferred embodiment of the present invention a bioinformatically detectable isolated oligonucleotide which anneals to a portion of a mRNA transcript of a target gene associated with Human respiratory syncytial virus infection, wherein binding of the oligonucleotide to the mRNA transcript represses expression of the target gene, and wherein the oligonucleotide has at least 80% sequence identity with a nucleotide sequence selected from the group consisting of SEQ ID NOs shown in Table 13 row 60.

[0119] There is additionally provided in accordance with another preferred embodiment of the present invention a bioinformatically detectable isolated oligonucleotide which anneals to a portion of a mRNA transcript of a target gene associated with Human rhinovirus 89 infection, wherein binding of the oligonucleotide to the mRNA transcript represses expression of the target gene, and wherein the oligonucleotide has at least 80% sequence identity with a nucleotide sequence selected from the group consisting of SEQ ID NOs shown in Table 13 row 61.

[0120] There is moreover provided in accordance with another preferred embodiment of the present invention a bioinformatically detectable isolated oligonucleotide which anneals to a portion of a mRNA transcript of a target gene associated with Human rhinovirus B infection, wherein binding of the oligonucleotide to the mRNA transcript represses expression of the target gene, and wherein the oligonucleotide has at least 80% sequence identity with a nucleotide sequence selected from the group consisting of SEQ ID NOs shown in Table 13 row 62.

[0121] There is further provided in accordance with another preferred embodiment of the present invention a bioinformatically detectable isolated oligonucleotide which anneals to a portion of a mRNA transcript of a target gene associated with Human T-lymphotropic virus 1 infection, wherein binding of the oligonucleotide to the mRNA transcript represses expression of the target gene, and wherein the oligonucleotide has at least 80% sequence identity with a nucleotide sequence selected from the group consisting of SEQ ID NOs shown in Table 13 row 63.

[0122] There is still further provided in accordance with another preferred embodiment of the present invention a bioinformatically detectable isolated oligonucleotide which anneals to a portion of a mRNA transcript of a target gene associated with Human T-lymphotropic virus 2 infection, wherein binding of the oligonucleotide to the mRNA transcript represses expression of the target gene, and wherein the oligonucleotide has at least 80% sequence identity with a nucleotide sequence selected from the group consisting of SEQ ID NOs shown in Table 13 row 64.

[0123] There is additionally provided in accordance with another preferred embodiment of the present invention a bioinformatically detectable isolated oligonucleotide which anneals to a portion of a mRNA transcript of a target gene associated with Influenza A virus infection, wherein binding of the oligonucleotide to the mRNA transcript represses expression of the target gene, and wherein the oligonucleotide has at least 80% sequence identity with a nucleotide sequence selected from the group consisting of SEQ ID NOs shown in Table 13 row 65.

[0124] There is moreover provided in accordance with another preferred embodiment of the present invention a bioinformatically detectable isolated oligonucleotide which anneals to a portion of a mRNA transcript of a target gene associated with Influenza B virus infection, wherein binding of the oligonucleotide to the mRNA transcript represses expression of the target gene, and wherein the oligonucleotide has at least 80% sequence identity with a nucleotide sequence selected from the group consisting of SEQ ID NOs shown in Table 13 row 66.

[0125] There is further provided in accordance with another preferred embodiment of the present invention a bioinformatically detectable isolated oligonucleotide which anneals to a portion of a mRNA transcript of a target gene associated with Japanese encephalitis virus infection, wherein binding of the oligonucleotide to the mRNA transcript represses expression of the target gene, and wherein the oligonucleotide has at least 80% sequence identity with a nucleotide sequence selected from the group consisting of SEQ ID NOs shown in Table 13 row 67.

[0126] There is still further provided in accordance with another preferred embodiment of the present invention a bioinformatically detectable isolated oligonucleotide which anneals to a portion of a mRNA transcript of a target gene associated with JC virus infection, wherein binding of the oligonucleotide to the mRNA transcript represses expression of the target gene, and wherein the oligonucleotide has at least 80% sequence identity with a nucleotide sequence selected from the group consisting of SEQ ID NOs shown in Table 13 row 68.

[0127] There is additionally provided in accordance with another preferred embodiment of the present invention a bioinformatically detectable isolated oligonucleotide which anneals to a portion of a mRNA transcript of a target gene associated with Machupo virus infection, wherein binding of the oligonucleotide to the mRNA transcript represses expression of the target gene, and wherein the oligonucleotide has at least 80% sequence identity with a nucleotide sequence selected from the group consisting of SEQ ID NOs shown in Table 13 row 69.

[0128] There is moreover provided in accordance with another preferred embodiment of the present invention a bioinformatically detectable isolated oligonucleotide which anneals to a portion of a mRNA transcript of a target gene associated with Marburg virus infection, wherein binding of the oligonucleotide to the mRNA transcript represses expression of the target gene, and wherein the oligonucleotide has at least 80% sequence identity with a nucleotide sequence selected from the group consisting of SEQ ID NOs shown in Table 13 row 70.

[0129] There is further provided in accordance with another preferred embodiment of the present invention a bioinformatically detectable isolated oligonucleotide which anneals to a portion of a mRNA transcript of a target gene associated with Measles virus infection, wherein binding of the oligonucleotide to the mRNA transcript represses expression of the target gene, and wherein the oligonucleotide has at least 80% sequence identity with a nucleotide sequence selected from the group consisting of SEQ ID NOs shown in Table 13 row 71.

[0130] There is still further provided in accordance with another preferred embodiment of the present invention a bioinformatically detectable isolated oligonucleotide which anneals to a portion of a mRNA transcript of a target gene associated with Molluscum contagiosum virus infection, wherein binding of the oligonucleotide to the mRNA transcript represses expression of the target gene, and wherein the oligonucleotide has at least 80% sequence identity with a nucleotide sequence selected from the group consisting of SEQ ID NOs shown in Table 13 row 72.

[0131] There is additionally provided in accordance with another preferred embodiment of the present invention a bioinformatically detectable isolated oligonucleotide which anneals to a portion of a mRNA transcript of a target gene associated with Murray Valley encephalitis virus infection, wherein binding of the oligonucleotide to the mRNA transcript represses expression of the target gene, and wherein the oligonucleotide has at least 80% sequence identity with a nucleotide sequence selected from the group consisting of SEQ ID NOs shown in Table 13 row 73.

[0132] There is moreover provided in accordance with another preferred embodiment of the present invention a bioinformatically detectable isolated oligonucleotide which anneals to a portion of a mRNA transcript of a target gene associated with Norwalk virus infection, wherein binding of the oligonucleotide to the mRNA transcript represses expression of the target gene, and wherein the oligonucleotide has at least 80% sequence identity with a nucleotide sequence selected from the group consisting of SEQ ID NOs shown in Table 13 row 74.

[0133] There is further provided in accordance with another preferred embodiment of the present invention a bioinformatically detectable isolated oligonucleotide which anneals to a portion of a mRNA transcript of a target gene associated with Poliovirus infection, wherein binding of the oligonucleotide to the mRNA transcript represses expression of the target gene, and wherein the oligonucleotide has at least 80% sequence identity with a nucleotide sequence selected from the group consisting of SEQ ID NOs shown in Table 13 row 75.

[0134] There is still further provided in accordance with another preferred embodiment of the present invention a bioinformatically detectable isolated oligonucleotide which anneals to a portion of a mRNA transcript of a target gene associated with Puumala virus infection, wherein binding of the oligonucleotide to the mRNA transcript represses expression of the target gene, and wherein the oligonucleotide has at least 80% sequence identity with a nucleotide sequence selected from the group consisting of SEQ ID NOs shown in Table 13 row 76.

[0135] There is additionally provided in accordance with another preferred embodiment of the present invention a bioinformatically detectable isolated oligonucleotide which anneals to a portion of a mRNA transcript of a target gene associated with Respiratory syncytial virus infection, wherein binding of the oligonucleotide to the mRNA transcript represses expression of the target gene, and wherein the oligonucleotide has at least 80% sequence identity with a nucleotide sequence selected from the group consisting of SEQ ID NOs shown in Table 13 row 77.

[0136] There is moreover provided in accordance with another preferred embodiment of the present invention a bioinformatically detectable isolated oligonucleotide which anneals to a portion of a mRNA transcript of a target gene associated with Reston Ebola virus (REBOV) infection, wherein binding of the oligonucleotide to the mRNA transcript represses expression of the target gene, and wherein the oligonucleotide has at least 80% sequence identity with a nucleotide sequence selected from the group consisting of SEQ ID NOs shown in Table 13 row 78.

[0137] There is further provided in accordance with another preferred embodiment of the present invention a bioinformatically detectable isolated oligonucleotide which anneals to a portion of a mRNA transcript of a target gene associated with Rubella virus infection, wherein binding of the oligonucleotide to the mRNA transcript represses expression of the target gene, and wherein the oligonucleotide has at least 80% sequence identity with a nucleotide sequence selected from the group consisting of SEQ ID NOs shown in Table 13 row 79.

[0138] There is still further provided in accordance with another preferred embodiment of the present invention a bioinformatically detectable isolated oligonucleotide which anneals to a portion of a mRNA transcript of a target gene associated with SARS coronavirus infection, wherein binding of the oligonucleotide to the mRNA transcript represses expression of the target gene, and wherein the oligonucleotide has at least 80% sequence identity with a nucleotide sequence selected from the group consisting of SEQ ID NOs shown in Table 13 row 80.

[0139] There is additionally provided in accordance with another preferred embodiment of the present invention a bioinformatically detectable isolated oligonucleotide which anneals to a portion of a mRNA transcript of a target gene associated with Seoul virus infection, wherein binding of the oligonucleotide to the mRNA transcript represses expression of the target gene, and wherein the oligonucleotide has at least 80% sequence identity with a nucleotide sequence selected from the group consisting of SEQ ID NOs shown in Table 13 row 81.

[0140] There is moreover provided in accordance with another preferred embodiment of the present invention a bioinformatically detectable isolated oligonucleotide which anneals to a portion of a mRNA transcript of a target gene associated with Sin Nombre virus infection, wherein binding of the oligonucleotide to the mRNA transcript represses expression of the target gene, and wherein the oligonucleotide has at least 80% sequence identity with a nucleotide sequence selected from the group consisting of SEQ ID NOs shown in Table 13 row 82.

[0141] There is further provided in accordance with another preferred embodiment of the present invention a bioinformatically detectable isolated oligonucleotide which anneals to a portion of a mRNA transcript of a target gene associated with Tula virus infection, wherein binding of the oligonucleotide to the mRNA transcript represses expression of the target gene, and wherein the oligonucleotide has at least 80% sequence identity with a nucleotide sequence selected from the group consisting of SEQ ID NOs shown in Table 13 row 83.

[0142] There is still further provided in accordance with another preferred embodiment of the present invention a bioinformatically detectable isolated oligonucleotide which anneals to a portion of a mRNA transcript of a target gene associated with Uukuniemi virus infection, wherein binding of the oligonucleotide to the mRNA transcript represses expression of the target gene, and wherein the oligonucleotide has at least 80% sequence identity with a nucleotide sequence selected from the group consisting of SEQ ID NOs shown in Table 13 row 84.

[0143] There is additionally provided in accordance with another preferred embodiment of the present invention a bioinformatically detectable isolated oligonucleotide which anneals to a portion of a mRNA transcript of a target gene associated with Vaccinia virus infection, wherein binding of the oligonucleotide to the mRNA transcript represses expression of the target gene, and wherein the oligonucleotide has at least 80% sequence identity with a nucleotide sequence selected from the group consisting of SEQ ID NOs shown in Table 13 row 85.

[0144] There is moreover provided in accordance with another preferred embodiment of the present invention a bioinformatically detectable isolated oligonucleotide which anneals to a portion of a mRNA transcript of a target gene associated with Variola virus infection, wherein binding of the oligonucleotide to the mRNA transcript represses expression of the target gene, and wherein the oligonucleotide has at least 80% sequence identity with a nucleotide sequence selected from the group consisting of SEQ ID NOs shown in Table 13 row 86.

[0145] There is further provided in accordance with another preferred embodiment of the present invention a bioinformatically detectable isolated oligonucleotide which anneals to a portion of a mRNA transcript of a target gene associated with West Nile virus infection, wherein binding of the oligonucleotide to the mRNA transcript represses expression of the target gene, and wherein the oligonucleotide has at least 80% sequence identity with a nucleotide sequence selected from the group consisting of SEQ ID NOs shown in Table 13 row 87.

[0146] There is still further provided in accordance with another preferred embodiment of the present invention a bioinformatically detectable isolated oligonucleotide which anneals to a portion of a mRNA transcript of a target gene associated with Western equine encephalomyelitis virus infection, wherein binding of the oligonucleotide to the mRNA transcript represses expression of the target gene, and wherein the oligonucleotide has at least 80% sequence identity with a nucleotide sequence selected from the group consisting of SEQ ID NOs shown in Table 13 row 88.

[0147] There is additionally provided in accordance with another preferred embodiment of the present invention a bioinformatically detectable isolated oligonucleotide which anneals to a portion of a mRNA transcript of a target gene associated with Yellow fever virus infection, wherein binding of the oligonucleotide to the mRNA transcript represses expression of the target gene, and wherein the oligonucleotide has at least 80% sequence identity with a nucleotide sequence selected from the group consisting of SEQ ID NOs shown in Table 13 row 89.

[0148] There is moreover provided in accordance with another preferred embodiment of the present invention a bioinformatically detectable isolated oligonucleotide which anneals to a portion of a mRNA transcript of a target gene associated with Zaire Ebola virus (ZEBOV) infection, wherein binding of the oligonucleotide to the mRNA transcript represses expression of the target gene, and wherein the oligonucleotide has at least 80% sequence identity with a nucleotide sequence selected from the group consisting of SEQ ID NOs shown in Table 13 row 90.

[0149] There is further provided in accordance with another preferred embodiment of the present invention a method for treatment of a disease involving a tissue in which a protein is pathologically expressed to an undesirable extent, the protein having a messenger RNA, the method including: providing a material which modulates activity of a microRNA oligonucleotide which binds complementarily to a segment of the messenger RNA, and introducing the material into the tissue, causing modulation of the activity of the microRNA oligonucleotide and thereby modulating expression of the protein in a desired manner.

[0150] There is still further provided in accordance with another preferred embodiment of the present invention a method for treatment of a disease involving tissue in which a protein is pathologically expressed to an undesirable extent, the protein having a messenger RNA, the method including: providing a material which at least partially binds a segment of the messenger RNA that is bound complementarily by a microRNA oligonucleotide, thereby modulating expression of the protein, and introducing the material into the tissue, thereby modulating expression of the protein.

[0151] There is additionally provided in accordance with another preferred embodiment of the present invention a method for treatment of a disease involving a tissue in which a protein is pathologically over-expressed, the protein having a messenger RNA, the method including: providing a microRNA oligonucleotide which binds complementarily to a segment of the messenger RNA, and introducing the microRNA oligonucleotide into the tissue, causing the microRNA oligonucleotide to bind complementarily to a segment of the messenger RNA and thereby inhibit expression of the protein.

[0152] There is moreover provided in accordance with another preferred embodiment of the present invention a method for treatment of a disease involving a tissue in which a protein is pathologically over-expressed, the protein having a messenger RNA, the method including: providing a chemically-modified microRNA oligonucleotide which binds complementarily to a segment of the messenger RNA, and introducing the chemically-modified microRNA oligonucleotide into the tissue, causing the microRNA oligonucleotide to bind complementarily to a segment of the messenger RNA and thereby inhibit expression of the protein.

[0153] There is further provided in accordance with another preferred embodiment of the present invention a method for treatment of a disease involving a tissue in which a protein is pathologically under-expressed, the protein having a messenger RNA, the method including: providing an oligonucleotide that inhibits activity of a microRNA oligonucleotide which binds complementarily to a segment of the messenger RNA, and introducing the oligonucleotide into the tissue, causing inhibition of the activity of the microRNA oligonucleotide and thereby promotion of translation of the protein.

[0154] There is still further provided in accordance with another preferred embodiment of the present invention a method for treatment of a disease involving a tissue in which a protein is pathologically under-expressed, the protein having a messenger RNA, the method including: providing a chemically-modified oligonucleotide that inhibits activity of a microRNA oligonucleotide which binds complementarily to a segment of the messenger RNA, and introducing the chemically-modified oligonucleotide into the tissue, causing inhibition of the activity of the microRNA oligonucleotide and thereby promotion of translation of the protein.

[0155] There is additionally provided in accordance with another preferred embodiment of the present invention a method for diagnosis of a disease involving a tissue in which a protein is expressed to abnormal extent, the protein having a messenger RNA, the method including: assaying a microRNA oligonucleotide which at least partially binds a segment of the messenger RNA and modulates expression of the protein, thereby providing an indication of at least one parameter of the disease.

[0156] There is moreover provided in accordance with another preferred embodiment of the present invention a method for detection of expression of an oligonucleotide, the method including: determining a first nucleotide sequence of a first oligonucleotide, which first nucleotide sequence is not complementary to a genome of an organism, receiving a second nucleotide sequence of a second oligonucleotide whose expression is sought to be detected, designing a third nucleotide sequence that is complementary to the second nucleotide sequence of the second oligonucleotide, and a fourth nucleotide sequence that is complementary to a fifth nucleotide sequence which is different from the second nucleotide sequence of the second oligonucleotide by at least one nucleotide, synthesizing a first oligonucleotide probe having a sixth nucleotide sequence including the third nucleotide sequence followed by the first nucleotide sequence of the first oligonucleotide, and a second oligonucleotide probe having a seventh nucleotide sequence including the fourth nucleotide sequence followed by the first nucleotide sequence of the first oligonucleotide, locating the first oligonucleotide probe and the second oligonucleotide probe on a microarray platform, receiving an RNA test sample from at least one tissue of the organism, obtaining size-fractionated RNA from the RNA test sample, amplifying the size-fractionated RNA, hybridizing the adaptor-linked RNA with the first and second oligonucleotide probes on the microarray platform, and determining expression of the first oligonucleotide in the at least one tissue of the organism, based at least in part on the hybridizing.

[0157] There is further provided in accordance with another preferred embodiment of the present invention a bioinformatically detectable isolated polynucleotide which is endogenously processed into a plurality of hairpin-shaped precursor oligonucleotides, each of which is endogenously processed into a respective oligonucleotide, which in turn anneals to a portion of a mRNA transcript of a target gene, wherein binding of the oligonucleotide to the mRNA transcript represses expression of the target gene.

[0158] There is still further provided in accordance with another preferred embodiment of the present invention a bioinformatically detectable isolated oligonucleotide which is endogenously processed from a hairpin-shaped precursor, and anneals to a portion of a mRNA transcript of a target gene, wherein binding of the oligonucleotide to the mRNA transcript represses expression of the target gene, and wherein the target gene does not encode a protein.

[0159] There is additionally provided in accordance with another preferred embodiment of the present invention a bioinformatically detectable isolated oligonucleotide which is endogenously processed from a hairpin-shaped precursor, and anneals to a portion of a mRNA transcript of a target gene, wherein binding of the oligonucleotide to the mRNA transcript represses expression of the target gene, and wherein a function of the oligonucleotide includes modulation of cell type.

[0160] There is moreover provided in accordance with another preferred embodiment of the present invention a bioinformatically detectable isolated oligonucleotide which is endogenously processed from a hairpin-shaped precursor, and anneals to a portion of a mRNA transcript of a target gene, wherein binding of the oligonucleotide to the mRNA transcript represses expression of the target gene, and wherein the oligonucleotide is maternally transferred by a cell to at least one daughter cell of the cell, and a function of the oligonucleotide includes modulation of cell type of the daughter cell.

[0161] There is further provided in accordance with another preferred embodiment of the present invention a method for bioinformatic detection of microRNA oligonucleotides, the method including: bioinformatically detecting a hairpin-shaped precursor oligonucleotide, bioinformatically detecting an oligonucleotide which is endogenously processed from the hairpin-shaped precursor oligonucleotide, and bioinformatically detecting a target gene of the oligonucleotide wherein the oligonucleotide anneals to at least one portion of a mRNA transcript of the target gene, and wherein the binding represses expression of the target gene, and the target gene is associated with a disease.

### BRIEF DESCRIPTION OF DRAWINGS

[0162] FIG. 1 is a simplified diagram illustrating a mode by which an oligonucleotide of a novel group of oligonucleotides of the present invention modulates expression of known target genes;

[0163] FIG. 2 is a simplified block diagram illustrating a bioinformatic oligonucleotide detection system capable of detecting oligonucleotides of the novel group of oligonucleotides of the present invention, which system is constructed and operative in accordance with a preferred embodiment of the present invention;

[0164] FIG. 3 is a simplified flowchart illustrating operation of a mechanism for training of a computer system to recognize the novel oligonucleotides of the present invention, which mechanism is constructed and operative in accordance with a preferred embodiment of the present invention;

[0165] FIG. 4A is a simplified block diagram of a non-coding genomic sequence detector constructed and operative in accordance with a preferred embodiment of the present invention;

[0166] FIG. 4B is a simplified flowchart illustrating operation of a non-coding genomic sequence detector constructed and operative in accordance with a preferred embodiment of the present invention;

[0167] FIG. 5A is a simplified block diagram of a hairpin detector constructed and operative in accordance with a preferred embodiment of the present invention;

[0168] FIG. 5B is a simplified flowchart illustrating operation of a hairpin detector constructed and operative in accordance with a preferred embodiment of the present invention;

[0169] FIG. 6A is a simplified block diagram of a Dicer-cut location detector constructed and operative in accordance with a preferred embodiment of the present invention;

[0170] FIG. 6B is a simplified flowchart illustrating training of a Dicer-cut location detector constructed and operative in accordance with a preferred embodiment of the present invention;

[0171] FIG. 6C is a simplified flowchart illustrating operation of a Dicer-cut location detector constructed and operative in accordance with a preferred embodiment of the present invention;

[0172] FIG. 7A is a simplified block diagram of a target gene binding site detector constructed and operative in accordance with a preferred embodiment of the present invention;

[0173] FIG. 7B is a simplified flowchart illustrating operation of a target gene binding site detector constructed and operative in accordance with a preferred embodiment of the present invention;

[0174] FIG. 8 is a simplified flowchart illustrating operation of a function and utility analyzer constructed and operative in accordance with a preferred embodiment of the present invention;

[0175] FIG. 9 is a simplified diagram describing a novel bioinformatically-detected group of regulatory polynucleotides, referred to here as Genomic Record (GR) polynucleotides, each of which encodes an “operon-like” cluster of novel microRNA-like oligonucleotides, which in turn modulate expression of one or more target genes;

[0176] FIG. 10 is a block diagram illustrating different utilities of novel oligonucleotides and novel operon-like polynucleotides, both of the present invention;

[0177] FIGS. 11A and 11B are simplified diagrams which, when taken together, illustrate a mode of oligonucleotide therapy applicable to novel oligonucleotides of the present invention;

[0178] FIG. 12A is a bar graph illustrating performance results of a hairpin detector constructed and operative in accordance with a preferred embodiment of the present invention;

[0179] FIG. 12B is a line graph illustrating accuracy of a Dicer-cut location detector constructed and operative in accordance with a preferred embodiment of the present invention;

[0180] FIG. 12C is a bar graph illustrating performance results of the target gene binding site detector 118, constructed and operative in accordance with a preferred embodiment of the present invention.

[0181] FIG. 13 is a summary table of laboratory results validating expression of novel human oligonucleotides detected by a bioinformatic oligonucleotide detection engine constructed and operative in accordance with a preferred embodiment of the present invention, thereby validating its efficacy;

[0182] FIG. 14A is a schematic representation of an “operon-like” cluster of novel human hairpin sequences detected by a bioinformatic oligonucleotide detection engine constructed and operative in accordance with a preferred embodiment of the present invention, and non-GAM hairpin sequences used as negative controls thereto;

[0183] FIG. 14B is a schematic representation of secondary folding of hairpins of the operon-like cluster of FIG. 14A;

[0184] FIG. 14C is a picture of laboratory results demonstrating expression of novel oligonucleotides of FIGS. 14A and 14B and lack of expression of the negative controls, thereby validating efficacy of bioinformatic detection of GAM oligonucleotides and GR polynucleotides detected by a bioinformatic oligonucleotide detection engine, constructed and operative in accordance with a preferred embodiment of the present invention;

[0185] FIG. 15A is an annotated sequence of EST72223 comprising known human microRNA oligonucleotide MIR98 and novel human oligonucleotide GAM25 PRECURSOR detected by the oligonucleotide detection system of the present invention; and

[0186] FIGS. 15B, 15C and 15D are pictures of laboratory results demonstrating laboratory confirmation of expression of known human oligonucleotide MIR98 and of novel bioinformatically-detected human GAM25 RNA respectively, both of FIG. 15A, thus validating the bioinformatic oligonucleotide detection system of the present invention;

[0187] FIGS. 16A, 16B and 16C are schematic diagrams which, when taken together, represent methods of designing primers to identify specific hairpin oligonucleotides in accordance with a preferred embodiment of the present invention.

[0188] FIG. 17A is a simplified flowchart illustrating construction of a microarray constructed and operative to identify novel oligonucleotides of the present invention, in accordance with a preferred embodiment of the present invention;

[0189] FIG. 17B is a simplified block diagram illustrating design of a microarray constructed and operative to identify novel oligonucleotides of the present invention, in accordance with a preferred embodiment of the present invention;

[0190] FIG. 17C is a flowchart illustrating a mode of preparation and amplification of a cDNA library in accordance with a preferred embodiment of the present invention;

[0191] FIG. 18A is a line graph showing results of detection of known microRNA oligonucleotides and of novel GAM oligonucleotides, using a microarray constructed and operative in accordance with a preferred embodiment of the present invention;

[0192] FIG. 18B is a line graph showing specificity of hybridization of a microarray constructed and operative in accordance with a preferred embodiment of the present invention; and

[0193] FIG. 18C is a summary table demonstrating detection of known microRNA oligonucleotides using a microarray constructed and operative in accordance with a preferred embodiment of the present invention.

[0194] FIG. 19 presents pictures of laboratory results demonstrating laboratory confirmation of “dicing” of four novel bioinformatically-detected HIV1 GAM PRECURSORSs into their corresponding mature GAM RNAs;

[0195] FIG. 20 presents pictures of laboratory results demonstrating laboratory confirmation of expression of two novel bioinformatically-detected Vaccinia GAM precursors, herein designated GAM501943 PRECURSORS and GAM501981 PRECURSORS.

[0196] FIG. 21A is a picture of laboratory results demonstrating bands demarcating the presence of small, approximately 60 nt-long oligonucleotides (representing 22 nt-long GAM RNA ligated to adaptors) in control H9 cells and H9 cells infected with the HIV virus, thereby validating that HIV infection can alter the levels of efficacy of small, 22 nt-long oligonucleotides of the present invention;

[0197] FIG. 21B is a table of laboratory results validating expression of novel human oligonucleotides in human cells infected with HIV, that are detected by a bioinformatic oligonucleotide detection engine constructed and operative in accordance with a preferred embodiment of the present invention, thereby validating its efficacy;

### BRIEF DESCRIPTION OF SEQUENCES

[0198] A Sequence Listing of genomic sequences of the present invention designated SEQ ID NO:1 through SEQ ID: 4,204,915 is attached to this application, and is hereby incorporated herein. The genomic listing comprises the following nucleotide sequences: nucleotide sequences of 1,655 viral and 105,537 human GAM precursors of respective novel oligonucleotides of the present invention; nucleotide sequences of 117,017 human and 2,246 viral GAM RNA oligonucleotides of respective novel oligonucleotides of the present invention; and nucleotide sequences of 527,821 human and 197,218 viral target gene binding sites of respective novel oligonucleotides of the present invention.

### DETAILED DESCRIPTION

[0199] Reference is now made to FIG. 1, which is a simplified diagram describing a plurality of novel, bioinformatically-detected oligonucleotide of the present invention referred to here as the Genomic Address Messenger (GAM) oligonucleotide, which modulates expression of respective target genes whose function and utility are known in the art.

[0200] GAM is a novel, bioinformatically detectable, regulatory, non-protein-coding, miRNA-like oligonucleotide. The method by which GAM is detected is described with additional reference to FIGS. 1-8.

[0201] The GAM PRECURSOR is preferably encoded by a viral genome. Alternatively or additionally, the GAM PRECURSOR is encoded by the human genome. The GAM TARGET GENE is a gene encoded by the human genome. Alternatively or additionally, the GAM TARGET GENE is a gene encoded by a viral genome.

[0202] The GAM PRECURSOR encodes a GAM PRECURSOR RNA. Similar to other miRNA oligonucleotides, the GAM PRECURSOR RNA does not encode a protein.

[0203] GAM PRECURSOR RNA folds onto itself, forming GAM FOLDED PRECURSOR RNA, which has a two-dimensional “hairpin” structure. As is well-known in the art, this “hairpin structure” is typical of RNA encoded by known miRNA precursor oligonucleotides and is due to the full or partial complementarity of the nucleotide sequence of the first half of an miRNA precursor to the nucleotide sequence of the second half thereof.

[0204] A complementary sequence is a sequence which is reversed and wherein each nucleotide is replaced by a complementary nucleotide, as is well known in the art (e.g. ATGGC is the complementary sequence of GCCAT).

[0205] An enzyme complex composed of Dicer RNaseIII together with other necessary proteins, designated DICER COMPLEX, cuts the GAM FOLDED PRECURSOR RNA yielding a single-stranded, ˜22 nt-long RNA segment designated GAM RNA.

[0206] GAM TARGET GENE encodes a corresponding messenger RNA, designated GAM TARGET RNA. As is typical of mRNA of a protein-coding gene, each GAM TARGET RNAs of the present invention comprises three regions: a 5′ untranslated region, a protein-coding region and a 3′ untranslated region, designated 5′UTR, PROTEIN-CODING and 3′UTR, respectively.

[0207] GAM RNA binds complementarily to one or more target binding sites located in the untranslated regions of each of the GAM TARGET RNAs of the present invention. This complementary binding is due to the partial or full complementarity between the nucleotide sequence of GAM RNA and the nucleotide sequence of each of the target binding sites. As an illustration, FIG. 1 shows three such target binding sites, designated BINDING SITE I, BINDING SITE II and BINDING SITE III, respectively. It is appreciated that the number of target binding sites shown in FIG. 1 is only illustrative and that any suitable number of target binding sites may be present. It is further appreciated that although FIG. 1 shows target binding sites only in the 3′UTR region, these target binding sites may instead be located in the 5′UTR region or in both the 3′UTR and 5′UTR regions.

[0208] The complementary binding of GAM RNA to target binding sites on GAM TARGET RNA, such as BINDING SITE I, BINDING SITE II and BINDING SITE III, inhibits the translation of each of the GAM TARGET RNAs of the present invention into respective GAM TARGET PROTEIN, shown surrounded by a broken line.

[0209] It is appreciated that the GAM TARGET GENE in fact represents a plurality of GAM target genes. The mRNA of each one of this plurality of GAM target genes comprises one or more target binding sites, each having a nucleotide sequence which is at least partly complementary to GAM RNA and which when bound by GAM RNA causes inhibition of translation of the GAM target mRNA into a corresponding GAM target protein.

[0210] The mechanism of the translational inhibition that is exerted by GAM RNA on one or more GAM TARGET GENEs may be similar or identical to the known mechanism of translational inhibition exerted by known miRNA oligonucleotides.

[0211] The nucleotide sequences of each of a plurality of GAM oligonucleotides that are described by FIG. 1 and their respective genomic sources and genomic locations are set forth in Tables 1-3, hereby incorporated herein.

[0212] The nucleotide sequences of GAM PRECURSOR RNAs, and a schematic representation of a predicted secondary folding of GAM FOLDED PRECURSOR RNAs, of each of a plurality of GAM oligonucleotides that are described by FIG. 1 are set forth in Table 4, hereby incorporated herein.

[0213] The nucleotide sequences of “diced” GAM RNAs of each of a plurality of GAM oligonucleotides that are described by FIG. 1 are set forth in Table 5, hereby incorporated herein.

[0214] The nucleotide sequences of target binding sites, such as BINDING SITE I, BINDING SITE II and BINDING SITE III that are found on GAM TARGET RNAs of each of a plurality of GAM oligonucleotides that are described by FIG. 1, and a schematic representation of the complementarity of each of these target binding sites to each of a plurality of GAM RNAs that are described by FIG. 1 are set forth in Tables 6-7, hereby incorporated herein.

[0215] It is appreciated that the specific functions and accordingly the utilities of each of a plurality of GAM oligonucleotides that are described by FIG. 1 are correlated with and may be deduced from the identity of the GAM TARGET GENES inhibited thereby, and whose functions are set forth in Table 8, hereby incorporated herein.

[0216] Studies documenting the well known correlations between each of a plurality of GAM TARGET GENEs that are described by FIG. 1 and the known gene functions and related diseases are listed in Table 9, hereby incorporated herein.

[0217] The present invention discloses a novel group of viral and human oligonucleotides, belonging to the miRNA-like oligonucleotide group, here termed GAM oligonucleotides, for which a specific complementary binding has been determined bioinformatically.

[0218] Reference is now made to FIG. 2, which is a simplified block diagram illustrating a bioinformatic oligonucleotide detection system and method constructed and operative in accordance with a preferred embodiment of the present invention.

[0219] An important feature of the present invention is a bioinformatic oligonucleotide detection engine 100, which is capable of bioinformatically detecting oligonucleotides of the present invention.

[0220] The functionality of the bioinformatic oligonucleotide detection engine 100 includes receiving expressed RNA data 102, sequenced DNA data 104, and protein function data 106; performing a complex process of analysis of this data as elaborated hereinbelow, and based on this analysis provides information, designated by reference numeral 108, identifying and describing features of novel oligonucleotides.

[0221] Expressed RNA data 102 comprises published expressed sequence tags (EST) data, published mRNA data, as well as other published RNA data. Sequenced DNA data 104 comprises alphanumeric data representing genomic sequences and preferably including annotations such as information indicating the location of known protein-coding regions relative to the genomic sequences.

[0222] Protein function data 106 comprises information from scientific publications e.g. physiological functions of known proteins and their connection, involvement and possible utility in treatment and diagnosis of various diseases.

[0223] Expressed RNA data 102 and sequenced DNA data 104 may preferably be obtained from data published by the National Center for Biotechnology Informatiion (NCBI) at the National Institute of Health (NIH) (Jenuth, J. P. (2000). Methods Mol. Biol. 132:301-312 (2000), herein incorporated by reference) as well as from various other published data sources. Protein function data 106 may preferably be obtained from any one of numerous relevant published data sources, such as the Online Mendelian Inherited Disease In Man (OMIM™, Hamosh et al., Nucleic Acids Res. 30: 52-55 (2002)) database developed by John Hopkins University, and also published by NCBI (2000).

[0224] Prior to or during actual detection of bioinformatically-detected group of novel oligonucleotides 108 by the bioinformatic oligonucleotide detection engine 100, bioinformatic oligonucleotide detection engine training & validation functionality 110 is operative. This functionality uses one or more known miRNA oligonucleotides as a training set to train the bioinformatic oligonucleotide detection engine 100 to bioinformatically recognize miRNA-like oligonucleotides, and their respective potential target binding sites. Bioinformatic oligonucleotide detection engine training & validation functionality 110 is further described hereinbelow with reference to FIG. 3.

[0225] The bioinformatic oligonucleotide detection engine 100 preferably comprises several modules which are preferably activated sequentially, and are described as follows:

[0226] A non-protein-coding genomic sequence detector 112 operative to bioinformatically detect non-protein-coding genomic sequences. The non-protein-coding genomic sequence detector 112 is further described herein below with reference to FIGS. 4A and 4B.

[0227] A hairpin detector 114 operative to bioinformatically detect genomic “hairpin-shaped” sequences, similar to GAM FOLDED PRECURSOR RNA (FIG. 1). The hairpin detector 114 is further described herein below with reference to FIGS. 5A and 5B.

[0228] A Dicer-cut location detector 116 operative to bioinformatically detect the location on a GAM FOLDED PRECURSOR RNA which is enzymatically cut by DICER COMPLEX (FIG. 1), yielding “diced” GAM RNA. The Dicer-cut location detector 116 is further described herein below with reference to FIGS. 6A-6C.

[0229] A target gene binding site detector 118 operative to bioinformatically detect target genes having binding sites, the nucleotide sequence of which is partially complementary to that of a given genomic sequence, such as a nucleotide sequence cut by DICER COMPLEX. The target gene binding site detector 118 is further described hereinbelow with reference to FIGS. 7A and 7B.

[0230] A function & utility analyzer, designated by reference numeral 120, is operative to analyze the function and utility of target genes in order to identify target genes which have a significant clinical function and utility. The function & utility analyzer 120 is further described hereinbelow with reference to FIG. 8

[0231] According to an embodiment of the present invention, the bioinformatic oligonucleotide detection engine 100 may employ a cluster of 40 personal computers (PCs; XEON®, 2.8 GHz, with 80 GB storage each) connected by Ethernet to eight servers (2-CPU, XEON™ 1.2-2.2 GHz, with ˜200 GB storage each) and combined with an 8-processor server (8-CPU, Xeon 550 Mhz w/8 GB RAM) connected via 2 HBA fiber-channels to an EMC CLARIION™ 100-disks, 3.6 Terabyte storage device. A preferred embodiment of the present invention may also preferably comprise software that utilizes a commercial database software program, such as MICROSOFT™ SQL Server 2000.

[0232] According to a preferred embodiment of the present invention, the bioinformatic oligonucleotide detection engine 100 may employ a cluster of 80 Servers (XEON®, 2.8 GHz, with 80 GB storage each) connected by Ethernet to eight servers (2-CPU, XEON™ 1.2-2.2 GHz, with ˜200 GB storage each) and combined with storage device (Promise Technology Inc., RM8000) connected to an 8-disks, 2 Terabytes total. A preferred embodiment of the present invention may also preferably comprise software that utilizes a commercial database software program, such as MICROSOFT™ SQL Server 2000. It is appreciated that the abovementioned hardware configuration is not meant to be limiting and is given as an illustration only. The present invention may be implemented in a wide variety of hardware and software configurations.

[0233] The present invention discloses 1,655 viral and 105,537 human novel oligonucleotides of the GAM group of oligonucleotides, which have been detected bioinformatically and 190 viral and 14,813 human novel polynucleotides of the GR group of polynucleotides, which have been detected bioinformatically. Laboratory confirmation of bioinformatically predicted oligonucleotides of the GAM group of oligonucleotides, and several bioinformatically predicted polynucleotides of the GR group of polynucleotides, is described hereinbelow with reference to FIGS. 13-15D, FIG. 18 and Table 12.

[0234] Laboratory confirmation of bioinformatically predicted oligonucleotides of the viral GAM group of oligonucleotides, and several bioinformatically predicted viral polynucleotides of the GR group of polynucleotides, is described hereinbelow with reference to FIGS. 19-20.

[0235] Reference is now made to FIG. 3, which is a simplified flowchart illustrating operation of a preferred embodiment of the bioinformatic oligonucleotide detection engine training & validation functionality 110 described hereinabove with reference to FIG. 2.

[0236] bioinformatic oligonucleotide detection engine training & validation functionality 110 begins by training the bioinformatic oligonucleotide detection engine 100 (FIG. 2) to recognize one or more known miRNA oligonucleotides, as designated by reference numeral 122. This training step comprises hairpin detector training & validation functionality 124, further described hereinbelow with reference to FIG. 5A, Dicer-cut location detector training & validation functionality 126, further described hereinbelow with reference to FIGS. 6A and 6B, and target gene binding site detector training & validation functionality 128, further described hereinbelow with reference to FIG. 7A.

[0237] Next, the bioinformatic oligonucleotide detection engine training & validation functionality 110 is operative bioinformatically detect novel oligonucleotides, using bioinformatic oligonucleotide detection engine 100 (FIG. 2), as designated by reference numeral 130. Wet lab experiments are preferably conducted in order to validate expression and preferably function of some samples of the novel oligonucleotides detected by the bioinformatic oligonucleotide detection engine 100, as designated by reference numeral 132. FIGS. 13A-15D, FIG. 18 and Table 12 illustrate examples of wet lab validation of sample novel human oligonucleotides bioinformatically-detected in accordance with a preferred embodiment of the present invention. Laboratory confirmation of bioinformatically predicted oligonucleotides of the viral GAM group of oligonucleotides, and several bioinformatically predicted viral polynucleotides of the GR group of polynucleotides, is described hereinbelow with reference to FIGS. 19-20.

[0238] Reference is now made to FIG. 4A, which is a simplified block diagram of a preferred implementation of the non-protein-coding genomic sequence detector 112 described hereinabove with reference to FIG. 2. The non-protein-coding genomic sequence detector 112 preferably receives at least two types of published genomic data: Expressed RNA data 102 and sequenced DNA data 104. The expressed RNA data 102 may include, inter alia, EST data, EST clusters data, EST genome alignment data and mRNA data. Sources for expressed RNA data 102 include NCBI dbEST, NCBI UniGene clusters and mapping data, and TIGR gene indices (Kirkness F. and Kerlavage, A. R., Methods Mol. Biol. 69:261-268 (1997)). Sequenced DNA data 104 may include sequence data (FASTA format files), and feature annotations (GenBank file format) mainly from NCBI databases. Based on the abovementioned input data, the non-protein-coding genomic sequence detector 112 produces a plurality of non-protein-coding genomic sequences 136. Preferred operation of the non-protein-coding genomic sequence detector 112 is described hereinbelow with reference to FIG. 4B.

[0239] Reference is now made to FIG. 4B, which is a simplified flowchart illustrating a preferred operation of the non-protein-coding genomic sequence detector 112 of FIG. 2. Detection of non-protein-coding genomic sequences 136, generally preferably progresses along one of the following two paths:

[0240] A first path for detecting non-protein-coding genomic sequences 136 (FIG. 4A) begins with receipt of a plurality of known RNA sequences, such as EST data. Each RNA sequence is first compared with known protein-coding DNA sequences, in order to select only those RNA sequences which are non-protein-coding, i.e. intergenic or intronic sequences. This can preferably be performed by using one of many alignment algorithms known in the art, such as BLAST (Altschul et al., J. Mol. Biol. 215:403-410 (1990)). This sequence comparison preferably also provides localization of the RNA sequence on the DNA sequences.

[0241] Alternatively, selection of non-protein-coding RNA sequences and their localization on the DNA sequences can be performed by using publicly available EST cluster data and genomic mapping databases, such as the UNIGENE database published by NCBI or the TIGR database. Such databases, map expressed RNA sequences to DNA sequences encoding them, find the correct orientation of EST sequences, and indicate mapping of ESTs to protein-coding DNA regions, as is well known in the art. Public databases, such as TIGR, may also be used to map an EST to a cluster of ESTs, known in the art as Tentative Human Consensus and assumed to be expressed as one segment. Publicly available genome annotation databases, such as NCBI's GenBank, may also be used to deduce expressed intronic sequences.

[0242] Optionally, an attempt may be made to “expand” the non-protein RNA sequences thus found, by searching for transcription start and end signals, respectively upstream and downstream of the location of the RNA on the DNA, as is well known in the art.

[0243] A second path for detecting non-protein-coding genomic sequences 136 (FIG. 4A) begins with receipt of DNA sequences. The DNA sequences are parsed into non-protein-coding sequences, using published DNA annotation data, by extracting those DNA sequences which are between known protein-coding sequences. Next, transcription start and end signals are sought. If such signals are found, and depending on their robustness, probable expressed non-protein-coding genomic sequences are obtained.

[0244] Such an approach is especially useful for identifying novel GAM oligonucleotides which are found in proximity to other known miRNA oligonucleotides, or other wet lab validated GAM oligonucleotides. Since, as described hereinbelow with reference to FIG. 9, GAM oligonucleotides are frequently found in clusters; sequences located near known miRNA oligonucleotides are more likely to contain novel GAM oligonucleotides. Optionally, sequence orthology, i.e. sequence conservation in an evolutionary related species, may be used to select genomic sequences having a relatively high probability of containing expressed novel GAM oligonucleotides.

[0245] It is appreciated that in detecting non-human GAM oligonucleotides of the present invention, the bioinformatic oligonucleotide detection engine 100 utilizes the input genomic sequences, without filtering protein-coding regions detected by the non-protein-coding genomic sequence detector 112. Hence, non-protein-coding genomic sequences 136 refers to GENOMIC SEQUENCES only.

[0246] Reference is now made to FIG. 5A, which is a simplified block diagram of a preferred implementation of the hairpin detector 114 described hereinabove with reference to FIG. 2.

[0247] The goal of the hairpin detector 114 is to detect hairpin-shaped genomic sequences, similar to those of known miRNA oligonucleotides. A hairpin-shaped genomic sequence is a genomic sequence, having a first half which is at least partially complementary to a second half thereof, which causes the halves to folds onto themselves, thereby forming a hairpin structure, as mentioned hereinabove with reference to FIG. 1.

[0248] The hairpin detector 114 (FIG. 2) receives a plurality of non-protein-coding genomic sequences 136 (FIG. 4A). Following operation of hairpin detector training & validation functionality 124 (FIG. 3), the hairpin detector 114 is operative to detect and output hairpin-shaped sequences, which are found in the non-protein-coding genomic sequences 136. The hairpin-shaped sequences detected by the hairpin detector 114 are designated hairpin structures on genomic sequences 138. A preferred mode of operation of the hairpin detector 114 is described hereinbelow with reference to FIG. 5B.

[0249] hairpin detector training & validation functionality 124 includes an iterative process of applying the hairpin detector 114 to known hairpin-shaped miRNA precursor sequences, calibrating the hairpin detector 114 such that it identifies a training set of known hairpin-shaped miRNA precursor sequences, as well as other similarly hairpin-shaped sequences. In a preferred embodiment of the present invention, the hairpin detector training & validation functionality 124 trains the hairpin detector 114 and validates each of the steps of operation thereof described hereinbelow with reference to FIG. 5B

[0250] The hairpin detector training & validation functionality 124 preferably uses two sets of data: the aforesaid training set of known hairpin-shaped miRNA precursor sequences, such as hairpin-shaped miRNA precursor sequences of 440 miRNA oligonucleotides of H. sapiens, M. musculus, C. elegans, C. Brigssae and D. Melanogaster, annotated in the RFAM database (Griffiths-Jones 2003), and a background set of about 1000 hairpin-shaped sequences found in expressed non-protein-coding human genomic sequences. The background set is expected to comprise some valid, previously undetected hairpin-shaped miRNA-like precursor sequences, and many hair-pin-shaped sequences which are not hairpin-shaped miRNA-like precursors.

[0251] In a preferred embodiment of the present invention the efficacy of the hairpin detector 114 (FIG. 2) is confirmed. For example, when a similarity threshold is chosen such that 87% of the known hairpin-shaped miRNA precursors are successfully predicted, only 21.8% of the 1000 background set of hairpin-shaped sequences are predicted to be hairpin-shaped miRNA-like precursors.

[0252] Reference is now made to FIG. 5B, which is a simplified flowchart illustrating preferred operation of the hairpin detector 114 of FIG. 2. The hairpin detector 114 preferably initially uses a secondary structure folding algorithm based on free-energy minimization, such as the MFOLD algorithm, described in Mathews et al. J. Mol. Biol. 288:911-940 (1999) and Zuker, M. Nucleic Acids Res. 31: 3406-3415 (2003), the disclosure of which is hereby incorporated by reference. This algorithm is operative to calculate probable secondary structure folding patterns of the non-protein-coding genomic sequences 136 (FIG. 4A) as well as the free-energy of each of these probable secondary folding patterns. The secondary structure folding algorithm, such as the MFOLD algorithm (Mathews, 1997; Zuker 2003), typically provides a listing of the base-pairing of the folded shape, i.e. a listing of each pair of connected nucleotides in the sequence.

[0253] Next, the hairpin detector 114 analyzes the results of the secondary structure folding patterns, in order to determine the presence and location of hairpin folding structures. The goal of this second step is to assess the base-pairing listing provided by the secondary structure folding algorithm, in order to determine whether the base-pairing listing describes one or more hairpin type bonding pattern. Preferably, sequence segment corresponding to a hairpin structure is then separately analyzed by the secondary structure folding algorithm in order to determine its exact folding pattern and free-energy.

[0254] The hairpin detector 114 then assesses the hairpin structures found by the previous step, comparing them to hairpin structures of known miRNA precursors, using various characteristic hairpin structure features such as its free-energy and its thermodynamic stability, the amount and type of mismatched nucleotides and the existence of sequence repeat-elements, number of mismatched nucleotides in positions 18-22 counting from loop, and Percent of G nucleotide. Only hairpins that bear statistically significant resemblance to the training set of hairpin structures of known miRNA precursors, according to the abovementioned parameters, are accepted.

[0255] In a preferred embodiment of the present invention, similarity to the training set of hairpin structures of known miRNA precursors is determined using a “similarity score” which is calculated using a multiplicity of terms, where each term is a function of one of the abovementioned hairpin structure features. The parameters of each function are found heuristically from the set of hairpin structures of known miRNA precursors, as described hereinabove with reference to hairpin detector training & validation functionality 124 (FIG. 3). The selection of the features and their function parameters is optimized so as to achieve maximized separation between the distribution of similarity scores validated miRNA precursor hairpin structures, and the distribution of similarity scores of hairpin structures detected in the background set mentioned hereinabove with reference to FIG. 5B.

[0256] In an alternative preferred embodiment of the present invention, the step described in the preceding paragraph may be split into two stages. A first stage implements a simplified scoring method, typically based on thresholding a subset of the hairpin structure features described hereinabove, and may employ a minimum threshold for hairpin structure length and a maximum threshold for free-energy. A second stage is preferably more stringent, and preferably employs a full calculation of the weighted sum of terms described hereinabove. The second stage preferably is performed only on the subset of hairpin structures that survived the first stage.

[0257] The hairpin detector 114 also attempts to select hairpin structures whose thermodynamic stability is similar to that of hairpin structures of known miRNA precursors. This may be achieved in various ways. A preferred embodiment of the present invention utilizes the following methodology, preferably comprising three logical steps:

[0258] First, the hairpin detector 114 attempts to group hairpin structures into “families” of closely related hairpin structures. As is known in the art, a secondary structure folding algorithm typically provides multiple alternative folding patterns, for a given genomic sequence and indicates the free-energy of each alternative folding pattern. It is a particular feature of the present invention that the hairpin detector 114 preferably assesses the various hairpin structures appearing in the various alternative folding patterns and groups' hairpin structures which appear at identical or similar sequence locations in various alternative folding patterns into common sequence location based “families” of hairpins. For example, all hairpin structures whose center is within 7 nucleotides of each other may be grouped into a “family”. Hairpin structures may also be grouped into a “family” if their nucleotide sequences are identical or overlap to a predetermined degree.

[0259] It is also a particular feature of the present invention that the hairpin structure “families” are assessed in order to select only those families which represent hairpin structures that are as thermodynamically stable as those of hairpin structures of known miRNA precursors. Preferably only families which are represented in at least a selected majority of the alternative secondary structure folding patterns, typically 65%, 80% or 100% are considered to be sufficiently stable. Our tests suggest that only about 50% of the hairpin structures, predicted by the MFOLD algorithm with default parameters, are members of sufficiently stable families, comparing to about 90% of the hairpin structures that contain known miRNAs. This percent depends on the size of the fraction that was fold. In an alternative embodiment of the present invention we use fractions of size 1000 nts as preferable size. Different embodiment uses other sizes of genomics sequences, more or less strict demand for representation in the alternative secondary structure folding patterns.

[0260] It is an additional particular feature of the present invention that the most suitable hairpin structure is selected from each selected family. For example, a hairpin structure which has the greatest similarity to the hairpin structures appearing in alternative folding patterns of the family may be preferred. Alternatively or additionally, the hairpin structures having relatively low free-energy may be preferred.

[0261] Alternatively or additionally considerations of homology to hairpin structures of other organisms and the existence of clusters of thermodynamically stable hairpin structures located adjacent to each other along a sequence may be important in selection of hairpin structures. The tightness of the clusters in terms of their location and the occurrence of both homology and clusters may be of significance.

[0262] Reference is now made to FIGS. 6A-6C, which together describe the structure and operation of the Dicer-cut location detector 116, described hereinabove with reference to FIG. 2.

[0263] Reference is now made to FIG. 6A, which is a simplified block diagram of a preferred implementation of the Dicer-cut location detector 116. The goal of the Dicer-cut location detector 116 is to detect the location in which the DICER COMPLEX, described hereinabove with reference to FIG. 1, dices GAM FOLDED PRECURSOR RNA, yielding GAM RNA.

[0264] The Dicer-cut location detector 116 therefore receives a plurality of hairpin structures on genomic sequences, designated by reference numeral 138 (FIG. 5A), and following operation of Dicer-cut location detector training & validation functionality 126 (FIG. 3), is operative to detect a plurality of Dicer-cut sequences from hairpin structures, designated by reference numeral 140.

[0265] Reference is now made to FIG. 6B, which is a simplified flowchart illustrating a preferred implementation of Dicer-cut location detector training & validation functionality 126.

[0266] A general goal of the Dicer-cut location detector training & validation functionality 126 is to analyze the Dicer-cut locations of known diced miRNA on respective hairpin-shaped miRNA precursors in order to determine a common pattern in these locations, which can be used to predict Dicer-cut locations on GAM folded precursor RNAs.

[0267] The Dicer-cut locations of known miRNA precursors are obtained and studied. Locations of the 5′ and/or 3′ ends of the known diced miRNA oligonucleotides are preferably represented by their respective distances from the 5′ end of the corresponding hairpin-shaped miRNA precursor. Additionally or alternatively, the 5′ and/or 3′ ends of the known diced miRNA oligonucleotides are preferably represented by the relationship between their locations and the locations of one or more nucleotides along the hairpin-shaped miRNA precursor. Additionally or alternatively, the 5′ and/or 3′ ends of the known diced miRNA oligonucleotides are preferably represented by the relationship between their locations and the locations of one or more bound nucleotide pairs along the hairpin-shaped miRNA precursor. Additionally or alternatively, the 5′ and/or 3′ ends of the known diced miRNA oligonucleotides are preferably represented by the relationship between their locations and the locations of one or more mismatched nucleotide pairs along the hairpin-shaped miRNA precursor. Additionally or alternatively, the 5′ and/or 3′ ends of the known diced miRNA oligonucleotides are preferably represented by the relationship between their locations and the locations of one or more unmatched nucleotides along the hairpin-shaped miRNA precursor. Additionally or alternatively, locations of the 5′ and/or 3′ ends of the known diced miRNA oligonucleotides are preferably represented by their respective distances from the loop located at the center of the corresponding hairpin-shaped miRNA precursor.

[0268] One or more of the foregoing location metrics may be employed in the Dicer-cut location detector training & validation functionality 126. Additionally, metrics related to the nucleotide content of the diced miRNA and/or of the hairpin-shaped miRNA precursor may be employed.

[0269] In a preferred embodiment of the present invention, Dicer-cut location detector training & validation functionality 126 preferably employs standard machine learning techniques known in the art of machine learning to analyze existing patterns in a given “training set” of examples. Standard machine learning techniques are capable, to a certain degree, of detecting patterns in examples to which they have not been previously exposed that are similar to those in the “training set”. Such machine learning techniques include, but are not limited to neural networks, Bayesian Modeling, Bayesian Networks, Support Vector Machines (SVM), Genetic Algorithms, Markovian Modeling, Maximum Likelihood Modeling, Nearest Neighbor Algorithms, Decision Trees and other techniques, as is well-known in the art.

[0270] In accordance with an embodiment of the present invention, two or more classifiers or predictors based on the abovementioned machine learning techniques are separately trained on the abovementioned training set, and are used jointly in order to predict the Dicer-cut location. As an example, FIG. 6B illustrates operation of two classifiers, a 3′ end recognition classifier and a 5′ end recognition classifier. Most preferably, the Dicer-cut location detector training & validation functionality 126 implements a “best-of-breed” approach employing a pair of classifiers based on the abovementioned Bayesian Modeling and Nearest Neighbor Algorithms, and accepting only “potential GAM RNAs” that score highly on one of these predictors. In this context, “high scores” means scores that have been demonstrated to have low false positive value when scoring known miRNA oligonucleotides. Alternatively, the Dicer-cut location detector training & validation functionality 126 may implement operation of more or less than two classifiers.

[0271] Predictors used in a preferred embodiment of the present invention are further described hereinbelow with reference to FIG. 6C. A computer program listing of a computer program implementation of the Dicer-cut location detector training & validation functionality 126 is enclosed on an electronic medium in computer-readable form, and is hereby incorporated by reference herein.

[0272] When evaluated on the abovementioned validation set of 440 published miRNA oligonucleotides using k-fold cross validation (Mitchell, 1997) with k=3, the performance of the resulting predictors is as follows: In 70% of known miRNA oligonucleotides, a 5′ end location is correctly determined by a Support Vector Machine predictor within up to two nucleotides; a Nearest Neighbor (EDIT DISTANCE) predictor achieves 56% accuracy ( 247/440); and a Two-Phased Predictor that uses Bayesian modeling (TWO PHASED) achieves 80% accuracy ( 352/440) when only the first phase is used. When the second phase (strand choice) is implemented by a naive Bayesian model, the accuracy is 55% ( 244/440), and when the K-nearest-neighbor modeling is used for the second phase, 374/440 decisions are made and the accuracy is 65% ( 242/374). A K-nearest-neighbor predictor (FIRST-K) achieves 61% accuracy ( 268/440). The accuracies of all predictors are considerably higher on top-scoring subsets of published miRNA oligonucleotides.

[0273] Finally, in order to validate the efficacy and accuracy of the Dicer-cut location detector 116, a sample of novel oligonucleotides detected thereby is preferably selected, and validated by wet lab experiments. Laboratory results validating the efficacy of the Dicer-cut location detector 116 are described hereinbelow with reference to FIGS. 13-15D, FIG. 18 and also in the enclosed file Table 12.

[0274] Laboratory confirmation of bioinformatically predicted oligonucleotides of the viral GAM group of oligonucleotides, and several bioinformatically predicted viral polynucleotides of the GR group of polynucleotides, is described hereinbelow with reference to FIGS. 19-20.

[0275] Reference is now made to FIG. 6C, which is a simplified flowchart illustrating an operation of a Dicer-cut location detector 116 (FIG. 2), constructed and operative in accordance with a preferred embodiment of the present invention. The Dicer-cut location detector 116 preferably comprises a machine learning computer program module, which is trained to recognize Dicer-cut locations on known hairpin-shaped miRNA precursors, and based on this training, is operable to detect Dicer-cut locations of novel GAM RNA (FIG. 1) on GAM FOLDED PRECURSOR RNA (FIG. 1). In a preferred embodiment of the present invention, the Dicer-cut location module preferably utilizes machine learning algorithms, including but not limited to Support Vector Machine, Bayesian modeling, Nearest Neighbors, and K-nearest-neighbor algorithms that are known in the art.

[0276] When initially assessing a novel GAM FOLDED PRECURSOR RNA, each 19-24 nt-long segment thereof is considered to be a potential GAM RNA, because the Dicer-cut location is initially unknown.

[0277] For each such potential GAM RNA, the location of its 5′ end or the locations of its 5′ and 3′ ends are scored by at least one recognition classifier or predictor, operating on features such as the follwing: Locations of the 5′ and/or 3′ ends of the known diced miRNA oligonucleotides, which are preferably represented by their respective distances from the 5′ end of the corresponding hairpin-shaped miRNA precursor. Additionally or alternatively, the 5′ and/or 3′ ends of the known diced miRNA oligonucleotides, which are preferably represented by the relationship between their locations and the locations of one or more nucleotides along the hairpin-shaped miRNA precursor. Additionally or alternatively, the 5′ and/or 3′ ends of the known diced miRNA oligonucleotides, which are preferably represented by the relationship between their locations and the locations of one or more bound nucleotide pairs along the hairpin-shaped miRNA precursor. Additionally or alternatively, the 5′ and/or 3′ ends of the known diced miRNA oligonucleotides, which are preferably represented by the relationship between their locations and the locations of one or more mismatched nucleotide pairs along the hairpin-shaped miRNA precursor. Additionally or alternatively, the 5′ and/or 3′ ends of the known diced miRNA oligonucleotides, which are preferably represented by the relationship between their locations and the locations of one or more unmatched nucleotides along the hairpin-shaped miRNA precursor. Additionally or alternatively, locations of the 5′ and/or 3′ ends of the known diced miRNA oligonucleotides, which are preferably represented by their respective distances from the loop located at the center of the corresponding hairpin-shaped miRNA precursor. Additionally or alternatively, metrics related to the nucleotide content of the diced miRNA and/or of the hairpin-shaped miRNA precursor.

[0278] In a preferred embodiment of the present invention, the Dicer-cut location detector 116 (FIG. 2) may use a Support Vector Machine predictor.

[0279] In another preferred embodiment of the present invention, the Dicer-cut location detector 116 (FIG. 2) preferably employs an “EDIT DISTANCE” predictor, which seeks sequences that are similar to those of known miRNA oligonucleotides, utilizing a Nearest Neighbor algorithm, where a similarity metric between two sequences is a variant of the Edit Distance algorithm (Gusfield, 1997). The EDIT DISTANCE predictor is based on an observation that miRNA oligonucleotides tend to form clusters, the members of which show marked sequence similarity.

[0280] In yet another preferred embodiment of the present invention, the Dicer-cut location detector 116 (FIG. 2) preferably uses a “TWO PHASE” predictor, which predicts the Dicer-cut location in two distinct phases: (a) selecting a double-stranded segment of the GAM FOLDED PRECURSOR RNA (FIG. 1) comprising the GAM RNA by naive Bayesian modeling and (b) detecting which strand of the double-stranded segment contains GAM RNA (FIG. 1) by employing either naive or K-nearest-neighbor modeling. K-nearest-neighbor modeling is a variant of the “FIRST-K” predictor described hereinbelow, with parameters optimized for this specific task. The “TWO PHASE” predictor may be operated in two modes: either utilizing only the first phase and thereby producing two alternative Dicer-cut location predictions, or utilizing both phases and thereby producing only one final Dicer-cut location.

[0281] In still another preferred embodiment of the present invention, the Dicer-cut location detector 116 preferably uses a “FIRST-K” predictor, which utilizes a K-nearest-neighbor algorithm. The similarity metric between any two sequences is 1−E/L, where L is a parameter, preferably 8-10 and E is the edit distance between the two sequences, taking into account only the first L nucleotides of each sequence. If the K-nearest-neighbor scores of two or more locations on the GAM FOLDED PRECURSOR RNA (FIG. 1) are not significantly different, these locations are further ranked by a Bayesian model, similar to the one described hereinabove.

[0282] In accordance with an embodiment of the present invention, scores of two or more of the abovementioned classifiers or predictors are integrated, yielding an integrated score for each potential GAM RNA. As an example, FIG. 6C illustrates an integration of scores from two classifiers, a 3′ end recognition classifier and a 5′ end recognition classifier, the scores of which are integrated to yield an integrated score. Most preferably, the INTEGRATED SCORE of FIG. 6C preferably implements a “best-of-breed” approach employing a pair of classifiers and accepting only “potential GAM RNAs” that score highly on one of the abovementioned “EDIT DISTANCE” or “TWO PHASE” predictors. In this context, “high scores” means scores that have been demonstrated to have low false positive value when scoring known miRNA oligonucleotides. Alternatively, the INTEGRATED SCORE may be derived from operation of more or less than two classifiers.

[0283] The INTEGRATED SCORE is evaluated as follows: (a) the “potential GAM RNA” having the highest score is preferably taken to be the most probable GAM RNA, and (b) if the integrated score of this most probable GAM RNA is higher than a pre-defined threshold, then the most probable GAM RNA is accepted as a PREDICTED GAM RNA. Preferably, this evaluation technique is not limited to the highest scoring potential GAM RNA.

[0284] In a preferred embodiment of the present invention, PREDICTED GAM RNAs comprising a low complexity nucleotide sequence (e.g., ATATATA) may optionally be filtered out, because there is a high probability that they are part of a repeated element in the DNA, and are therefore not functional, as is known in the art. For each PREDICTED GAM RNA sequence, the number of occurrences of each two nt combination (AA, AT, AC) comprised in that sequence is counted. PREDICTED GAM RNA sequences where the sum of the two most probable combinations is higher than a threshold, preferably 8-10, are filtered out. As an example, when the threshold is set such that 2% of the known miRNA oligonucleotides are filtered out, 30% of the predicted GAM RNAs are filtered out.

[0285] Reference is now made to FIG. 7A, which is a simplified block diagram of a preferred implementation of the target gene binding site detector 118 described hereinabove with reference to FIG. 2. The goal of the target gene binding site detector 118 is to detect one or more binding sites located in 3′UTRs of the mRNA of a known gene, such as BINDING SITE I, BINDING SITE II and BINDING SITE III (FIG. 1), the nucleotide sequence of which binding sites is partially or fully complementary to a GAM RNA, thereby determining that the abovementioned known gene is a target gene of the GAM RNA.

[0286] The target gene binding site detector 118 (FIG. 2) receives a plurality of Dicer-cut sequences from hairpin structures 140 (FIG. 6A) and a plurality of potential target gene sequences 142, which are derived from sequenced DNA data 104 (FIG. 2).

[0287] The target gene binding site detector training & validation functionality 128 (FIG. 3) is operative to train the target gene binding site detector 118 on known miRNA oligonucleotides and their respective target genes and to build a background model for an evaluation of the probability of achieving similar results randomly (P value) for the target gene binding site detector 118 results. The target gene binding site detector training & validation functionality 128 constructs the model by analyzing both heuristically and computationally the results of the target gene binding site detector 118.

[0288] Following operation of target gene binding site detector training & validation functionality 128 (FIG. 3), the target gene binding site detector 118 is operative to detect a plurality of potential novel target genes having binding site/s 144, the nucleotide sequence of which is partially or fully complementary to that of each of the plurality of Dicer-cut sequences from hairpin structures 140. Preferred operation of the target gene binding site detector 118 is further described hereinbelow with reference to FIG. 7B.

[0289] Reference is now made to FIG. 7B, which is a simplified flowchart illustrating a preferred operation of the target gene binding site detector 118 of FIG. 2.

[0290] In an embodiment of the present invention, the target gene binding site detector 118 first compares nucleotide sequences of each of the plurality of Dicer-cut sequences from hairpin structures 140 (FIG. 6A) to the potential target gene sequences 142 (FIG. 7A), such as 3′ side UTRs of known mRNAs, in order to find crude potential matches. This step may be performed using a simple alignment algorithm such as BLAST.

[0291] Then, the target gene binding site detector 118 filters these crude potential matches, to find closer matches, which more closely resemble published miRNA oligonucleotide binding sites.

[0292] Next, the target gene binding site detector 118 expands the nucleotide sequences of the 3′UTR binding site found by the sequence comparison algorithm (e.g. BLAST or EDIT DISTANCE). A determination is made whether any sub-sequence of the expanded sequence may improve the match. The best match is considered the alignment.

[0293] Free-energy and spatial structure are computed for the resulting binding sites. Calculation of spatial structure may be performed by a secondary structure folding algorithm based on free-energy minimization, such as the MFOLD algorithm described in Mathews et al. (J. Mol. Biol. 288: 911-940 (1999)) and Zuker (Nucleic Acids Res. 31: 3406-3415 (2003)), the disclosure of which is hereby incorporated by reference. Free-energy, spatial structure and the above preferences are reflected in scoring. The resulting scores are compared with scores characterstic of known binding sites of published miRNA oligonucleotides, and each binding site is given a score that reflects its resemblance to these known binding sites.

[0294] Finally, the target gene binding site detector 118 analyzes the spatial structure of the binding site. Each 3′UTR-GAM oligonucleotide pair is given a score. Multiple binding sites of the same GAM oligonucleotides to a 3′UTR are given higher scores than those that bind only once to a 3′UTR.

[0295] In a preferred embodiment of the present invention, performance of the target gene binding site detector 118 may be improved by integrating several of the abovementioned logical steps, using the methodology described hereinbelow.

[0296] For each of the Dicer-cut sequence from hairpin structures 140, its starting segment, e.g. a segment comprising the first 8 nts from its 5′ end, is obtained. For each starting segment, all of the 9 nt segments that are highly complementary to the starting segment are calculated. These calculated segments are referred to here as “potential binding site end segments”. In a preferred embodiment of the present invention, for each 8 nt starting segment, the potential binding site end segments are all 9 nt segments whose complementary sequence contains a 7-9 nt sub-sequence that is not different from the starting segment by more than an insertion, deletion or replacement of one nt. Calculation of potential binding site end segments is preferably performed by a pre-processing tool that maps all possible 8 nt segments to their respective 9 nt segments.

[0297] Next, the mRNAs 3′UTRs is parsed into all the segments, with the same length as the potential binding site end segments, preferably 9 nt segments, comprised in the 3′UTR. Location of each such segment is noted, stored in a performance-efficient data structure and compared to the potential binding site end segments calculated in the previous step.

[0298] The target gene binding site detector 118 then expands the binding site sequence, preferably in the binding site 5′ direction (i.e. immediately upstream), assessing the degree of its alignment to the Dicer-cut sequence from hairpin structures 140. Preferably, an alignment algorithm is implemented which uses specific weighting parameters based on an analysis of known miRNA oligonucleotide binding sites. As an example, it is apparent that a good match of the 3′ end of the binding site is critically important, a match of the 5′ end is less important but can compensate for a small number of mismatches at the 3′ end of the binding site, and a match of the middle portion of the binding site is much less important.

[0299] Next, the number of binding sites found in a specific 3′UTR, the degree of alignment of each of these binding sites, and their proximity to each other are assessed and compared to these properties found in known binding sites of published miRNA oligonucleotides. In a preferred embodiment, the fact that many of the known binding sites are clustered is used to evaluate the P value of obtaining a cluster of a few binding sites on the same target gene 3′UTR in the following way. It scans different score thresholds and calculates for each threshold the number and positions of possible binding sites with a score above the threshold. It then gets a P value for each threshold from a preprocessed calculated background matrix, described hereinbelow, and a number and positions of binding sites combination. The output score for each Dicer-cut sequences from hairpin structures 140 and potential target gene sequences 142 is the minimal P value, normalized with the number of threshold trails using a Bernoulli distribution. A preference of low P value pairs is made.

[0300] As mentioned hereinabove, for each target gene, a preprocessed calculated background matrix is built. The matrix includes rows for each number of miRNA oligonucleotide binding sites (in the preferred embodiment, the matrix includes 7 rows to accommodate 0 to 6 binding sites), and columns for each different score threshold (in the preferred embodiment, the matrix includes 5 columns for 5 different thresholds). Each matrix cell, corresponding to a specific number of binding sites and thresholds, is set to be the probability of getting equal or higher number binding sites and an equal or higher score using random 22 nt-long sequences with the same nucleotide distribution as known miRNA oligonucleotides (29.5% T, 24.5% A, 25% G and 21% C). Those probabilities are calculated by running the above procedure for 10000 random sequences that preserved the known miRNA nucleotide distribution (these sequence will be also referred to as miRNA oligonucleotide random sequences). The P value can be estimated as the number of random sequences that obeys the matrix cell requirement divided by the total number of random sequences (10000). In the preferred embodiment, 2 matrices are calculated. The P values of the second matrix are calculated under a constraint that at least two of the binding site positions are under a heuristically-determined constant value. The values of the second matrix are calculated without this constraint. The target gene binding site detector 118 uses the second matrix if the binding site positions agree with the constraint. Otherwise, it uses the first. In an alternative embodiment, only one matrix is calculated without any constraint on the binding sites positions.

[0301] A test performed using the target gene binding site detector 118 shows that all of the known miRNA oligonucleotide target genes are found using this algorithm with a P value of less than 0.5%. Running known miRNA oligonucleotides against 3400 potential 3′UTR of target gene sequences yields on average 32 target genes for each miRNA oligonucleotide with a P value less than 0.5%, while background sequences, as well as inverse or complement sequence of known miRNA oligonucleotide (which preserve their high order sequence statistics) found, as expected, 17 target genes on average. This result reflects that the algorithm has the ability to detect real target genes with 47% accuracy.

[0302] Finally, orthology data may optionally be used to further prefer binding sites based on their conservation. Preferably, this may be used in cases such as (a) where both the target mRNA and miRNA oligonucleotide have orthologues in another organism, e.g. Human-Mouse orthology, or (b) where a miRNA oligonucleotide (e.g. viral miRNA oligonucleotide) targets two mRNAs in orthologous organisms. In such cases, binding sites that are conserved are preferred.

[0303] In accordance with another preferred embodiment of the present invention, binding sites may be searched by a reverse process. Sequences of K (preferably 22) nucleotides in a UTR of a target gene are assessed as potential binding sites. A sequence comparison algorithm, such as BLAST or EDIT DISTANCE variant, is then used to search elsewhere in the genome for partially or fully complementary sequences that are found in known miRNA oligonucleotides or computationally-predicted GAM oligonucleotides. Only complementary sequences that meet predetermined spatial structure and free-energy criteria as described hereinabove, are accepted. Clustered binding sites are strongly preferred and potential binding sites and potential GAM oligonucleotides that occur in evolutionarily-conserved genomic sequences are also preferred. Scoring of candidate binding sites takes into account free-energy and spatial structure of the binding site complexes, as well as the aforesaid preferences.

[0304] UTRs of GAM viral target genes were preferably extracted directly from annotation of UTR records. Alternatively, UTR of GAM viral target genes were preferably extracted by taking the sequences spanned from last coding position to the 3′ end of the mRNA sequence annotation. Alternatively, UTR of GAM viral target genes were preferably extracted by taking 400 nts downstream to the end-coding region of the mRNA sequence. All of abovementioned methods were applied on complete viral genomes data in GeneBank format from the NCBI RefSeq database, version 18-Jan.-2004 (ftp://ftp.ncbi.nih.gov/refseq/release/viral).

[0305] Reference is now made to FIG. 8, which is a simplified flowchart illustrating a preferred operation of the function & utility analyzer 120 described hereinabove with reference to FIG. 2. The goal of the function & utility analyzer 120 is to determine if a potential target gene is in fact a valid clinically useful target gene. Since a potential novel GAM oligonucleotide binding a binding site in the UTR of a target gene is understood to inhibit expression of that target gene, and if that target gene is shown to have a valid clinical utility, then in such a case it follows that the potential novel oligonucleotide itself also has a valid useful function which is the opposite of that of the target gene.

[0306] The function & utility analyzer 120 preferably receives as input a plurality of potential novel target genes having binding site/s 144 (FIG. 7A), generated by the target gene binding site detector 118 (FIG. 2). Each potential oligonucleotide is evaluated as follows: First, the system checks to see if the function of the potential target gene is scientifically well established. Preferably, this can be achieved bioinformatically by searching various published data sources presenting information on known function of proteins. Many such data sources exist and are published, as is well known in the art. Next, for those target genes the function of which is scientifically known and is well documented, the system then checks if scientific research data exists which links them to known diseases. For example, a preferred embodiment of the present invention utilizes the OMIM™ (Hamosh et al, 2002) database published by NCBI, which summarizes research publications relating to genes which have been shown to be associated with diseases. Finally, the specific possible utility of the target gene is evaluated. While this process too may be facilitated by bioinformatic means, it might require manual evaluation of published scientific research regarding the target gene, in order to determine the utility of the target gene to the diagnosis and or treatment of specific disease. Only potential novel oligonucleotides, the target genes of which have passed all three examinations, are accepted as novel oligonucleotide.

[0307] Reference is now made to FIG. 9, which is a simplified diagram describing each of a plurality of novel bioinformatically-detected regulatory polynucleotide referred to in this Table as the Genomic Record (GR) polynucleotide. GR encodes an operon-like cluster of novel miRNA-like oligonucleotides, each of which in turn modulates expression of at least one target gene. The function and utility of at least one target gene is known in the art.

[0308] The GR PRECURSOR is a novel, bioinformatically-detected, regulatory, non-protein-coding polynucleotide. The method by which the GR PRECURSOR is detected is described hereinabove with additional reference to FIGS. 1-9.

[0309] GR PRECURSOR is preferably encoded by a viral genome and contains a cluster of novel viral oligonucleotides, which preferably bind to human target genes or to virus genes. Alternatively or additionally, GR PRECURSOR is encoded by the human genome and contains a cluster of novel human oligonucleotides, which preferably bind to viral target genes or to human genes.

[0310] The GR PRECURSOR encodes GR PRECURSOR RNA that is typically several hundred to several thousand nts long. The GR PRECURSOR RNA folds spatially, forming the GR FOLDED PRECURSOR RNA. It is appreciated that the GR FOLDED PRECURSOR RNA comprises a plurality of what is known in the art as hairpin structures. Hairpin structures result from the presence of segments of the nucleotide sequence of GR PRECURSOR RNA in which the first half of each such segment has a nucleotide sequence which is at least a partial, and sometimes an accurate, reverse-complement sequence of the second half thereof, as is well known in the art.

[0311] The GR FOLDED PRECURSOR RNA is naturally processed by cellular enzymatic activity into a plurality of separate GAM precursor RNAs, herein schematically represented by GAM1 FOLDED PRECURSOR RNA through GAM3 FOLDED PRECURSOR RNA. Each GAM folded precursor RNA is a hairpin-shaped RNA segment, corresponding to GAM FOLDED PRECURSOR RNA of FIG. 1.

[0312] The abovementioned GAM folded precursor RNAs are diced by DICER COMPLEX of FIG. 1, yielding schematically represented by GAM1 RNA through GAM3 RNA, short RNA segments of about 22 nts in length. Each GAM RNA corresponds to GAM RNA of FIG. 1.

[0313] GAM1 RNA, GAM2 RNA and GAM3 RNA each bind complementarily to binding sites located in the untranslated regions of their respective target genes, designated GAM1 TARGET RNA, GAM2 TARGET RNA and GAM3 TARGET RNA, respectively. These target binding sites correspond to BINDING SITE I, BINDING SITE II and BINDING SITE III of FIG. 1. The binding of each GAM RNA to its target RNA inhibits the translation of its respective target proteins, designated GAM1 TARGET PROTEIN, GAM2 TARGET PROTEIN and GAM3 TARGET PROTEIN, respectively.

[0314] It is appreciated that the specific functions, and accordingly the utilities, of the GR polynucleotide are correlated with and may be deduced from the identity of the target genes that are inhibited by GAM RNAs that are present in the operon-like cluster of the polynucleotide. Thus, for the GR polynucleotide, schematically represented by GAM1 TARGET PROTEIN through GAM3 TARGET PROTEIN that are inhibited by the GAM RNA. The function of these target genes is elaborated in Table 8, hereby incorporated herein.

[0315] Reference is now made to FIG. 10, which is a block diagram illustrating different utilities of oligonucleotide of the novel group of oligonucleotides of the present invention referred to here as GAM oligonucleotides and GR polynucleotides. The present invention discloses a first plurality of novel oligonucleotides referred to here as GAM oligonucleotides and a second plurality of operon-like polynucleotides referred to here as GR polynucleotides, each of the GR polynucleotide encoding a plurality of GAM oligonucleotides. The present invention further discloses a very large number of known target genes, which are bound by, and the expression of which is modulated by each of the novel oligonucleotides of the present invention. Published scientific data referenced by the present invention provides specific, substantial, and credible evidence that the abovementioned target genes modulated by novel oligonucleotides of the present invention, are associated with various diseases. Specific novel oligonucleotides of the present invention, target genes thereof and diseases associated therewith, are described hereinbelow with reference to Tables 1 through 12. It is therefore appreciated that a function of GAM oligonucleotides and GR polynucleotides of the present invention is modulation of expression of target genes related to known viral diseases, and that therefore utilities of novel oligonucleotides of the present invention include diagnosis and treatment of the abovementioned diseases.

[0316] FIG. 10 describes various types of diagnostic and therapeutic utilities of novel oligonucleotides of the present invention. A utility of novel oligonucleotide of the present invention is detection of GAM oligonucleotides and of GR polynucleotides. It is appreciated that since GAM oligonucleotides and GR polynucleotides modulate expression of disease related target genes, that detection of expression of GAM oligonucleotides in clinical scenarios associated with said viral diseases is a specific, substantial and credible utility. Diagnosis of novel oligonucleotides of the present invention may preferably be implemented by RNA expression detection techniques, including but not limited to biochips, as is well known in the art. Diagnosis of expression of oligonucleotides of the present invention may be useful for research purposes, in order to further understand the connection between the novel oligonucleotides of the present invention and the abovementioned related viral diseases, for disease diagnosis and prevention purposes, and for monitoring disease progress.

[0317] Another utility of novel oligonucleotides of the present invention is anti-GAM therapy, a mode of therapy which allows up regulation of a viral disease-related target gene of a novel GAM oligonucleotide of the present invention, by lowering levels of the novel GAM oligonucleotide which naturally inhibits expression of that target gene. This mode of therapy is particularly useful with respect to target genes which have been shown to be under-expressed in association with a specific viral disease. Anti-GAM therapy is further discussed hereinbelow with reference to FIGS. 11A and 11B.

[0318] A further utility of novel oligonucleotides of the present invention is GAM replacement therapy, a mode of therapy which achieves down regulation of a viral disease related target gene of a novel GAM oligonucleotide of the present invention, by raising levels of the GAM which naturally inhibits expression of that target gene. This mode of therapy is particularly useful with respect to target genes which have been shown to be over-expressed in association with a specific viral disease. GAM replacement therapy involves introduction of supplementary GAM products into a cell, or stimulation of a cell to produce excess GAM products. GAM replacement therapy may preferably be achieved by transfecting cells with an artificial DNA molecule encoding a GAM which causes the cells to produce the GAM product, as is well known in the art.

[0319] Yet a further utility of novel oligonucleotides of the present invention is modified GAM therapy. Disease conditions are likely to exist, in which a mutation in a binding site of a GAM RNA prevents natural GAM RNA to effectively bind inhibit a viral disease related target gene, causing up regulation of that target gene, and thereby contributing to the disease pathology. In such conditions, a modified GAM oligonucleotides is designed which effectively binds the mutated GAM binding site, i.e. is an effective anti-sense of the mutated GAM binding site, and is introduced in disease effected cells. Modified GAM therapy is preferably achieved by transfecting cells with an artificial DNA molecule encoding the modified GAM which causes the cells to produce the modified GAM product, as is well known in the art.

[0320] Reference is now made to FIGS. 11A and 11B, which are simplified diagrams which when taken together illustrate anti-GAM therapy mentioned hereinabove with reference to FIG. 10. A utility of novel GAMs of the present invention is anti-GAM therapy, a mode of therapy which allows up regulation of a viral disease-related target gene of a novel GAM of the present invention, by lowering levels of the novel GAM which naturally inhibits expression of that target gene. FIG. 11A shows a normal GAM inhibiting translation of a target gene by binding of GAM RNA to a BINDING SITE found in an untranslated region of GAM TARGET RNA, as described hereinabove with reference to FIG. 1.

[0321] FIG. 11B shows an example of anti-GAM therapy. ANTI-GAM RNA is short artificial RNA molecule the sequence of which is an anti-sense of GAM RNA. Anti-GAM treatment comprises transfecting diseased cells with ANTI-GAM RNA, or with a DNA encoding thereof. The ANTI-GAM RNA binds the natural GAM RNA, thereby preventing binding of natural GAM RNA to its BINDING SITE. This prevents natural translation inhibition of GAM TARGET RNA by GAM RNA, thereby up regulating expression of GAM TARGET PROTEIN.

[0322] It is appreciated that anti-GAM therapy is particularly useful with respect to target genes which have been shown to be under-expressed in association with a specific viral disease.

[0323] Furthermore, anti-GAM therapy is particularly useful, since it may be used in situations in which technologies known in the art as RNAi and siRNA can not be utilized. As in known in the art, RNAi and siRNA are technologies which offer means for artificially inhibiting expression of a target protein, by artificially designed short RNA segments which bind complementarily to mRNA of said target protein. However, RNAi and siRNA can not be used to directly up regulate translation of target proteins.

[0324] Reference is now made to FIG. 12A, which is a bar graph illustrating performance results of the hairpin detector 114 (FIG. 2) constructed and operative in accordance with a preferred embodiment of the present invention.

[0325] FIG. 12A illustrates efficacy of several features used by the hairpin detector 114 to detect GAM FOLDED PRECURSOR RNAs (FIG. 1). The values of each of these features is compared between a set of published miRNA precursor oligonucleotides, represented by shaded bars, and a set of random hairpins folded from the human genome denoted hereinbelow as a hairpin background set, represented by white bars. The published miRNA precursor oligonucleotides set is taken from RFAM database, Release 2.1 and includes 148 miRNA oligonucleotides from H. Sapiens. The background set comprises a set of 10,000 hairpins folded from the human genome.

[0326] It is appreciated that the hairpin background set is expected to comprise some valid, previously undetected hairpin-shaped miRNA precursor-like GAM FOLDED PRECURSOR RNAs of the present invention, and many hairpin-shaped sequences that are not hairpin-shaped miRNA-like precursors.

[0327] For each feature, the bars depict the percent of known miRNA hairpin precursors (shaded bars) and the percent of background hairpins (white bars) that pass the threshold for that feature. The percent of known miRNA oligonucleotides that pass the threshold indicates the sensitivity of the feature, while the corresponding background percent implies the specificity of the feature, although not precisely, because the background set comprises both true and false examples.

[0328] The first bar pair, labeled Thermodynamic Stability Selection, depicts hairpins that have passed the selection of “families” of closely related hairpin structures, as described hereinabove with reference to FIG. 5B.

[0329] The second bar pair, labeled Hairpin Score, depicts hairpins that have been selected by hairpin detector 114 (FIG. 5B), regardless of the “families” selection.

[0330] The third bar pair, labeled Conserved, depicts hairpins that are conserved in human, mouse and rat, (UCSC Goldenpath™ HG16 database).

[0331] The fourth bar pair, labeled Expressed, depicts hairpins that are found in EST blocks.

[0332] The fifth bar pair, labeled Integrated Selection, depicts hairpin structures predicted by a preferred embodiment of the present invention to be valid GAM PRECURSORs. In a preferred embodiment of the present invention, a hairpin may be considered to be a GAM PRECURSOR if its hairpin detector score is above 0, and it is in one of the following groups: a) in an intron and conserved or b) in an intergenic region and conserved or c) in an intergenic region and expressed, as described below. Further filtering of GAM precursor may be obtained by selecting hairpins with a high score of Dicer-cut location detector 116 as described hereinabove with reference to FIGS. 6A-6C, and with predicted miRNA oligonucleotides, which pass the low complexity filter as described hereinabove, and whose targets are selected by the target gene binding site detector 118 as described hereinabove with reference to FIGS. 7A-7B.

[0333] It is appreciated that these results validate the sensitivity and specificity of the hairpin detector 114 (FIG. 2) in identifying novel GAM FOLDED PRECURSOR RNAs, and in effectively distinguishing them from the abundant hairpins found in the genome.

[0334] Reference is now made to FIG. 12B, which is a line graph illustrating accuracy of a Dicer-cut location detector 116 (FIG. 2) constructed and operative in accordance with a preferred embodiment of the present invention.

[0335] To determine the accuracy of the Dicer-cut location detector 116, a stringent training and test set was chosen from the abovementioned set of 440 known miRNA oligonucleotides, such that no two miRNA oligonucleotides in the set are homologous. This was performed to get a lower bound on the accuracy and avoid effects of similar known miRNA oligonucleotides appearing in both the training and test sets. On this stringent set of size 204, mfold cross validation with k=3 was performed to determine the percent of known miRNA oligonucleotides in which the Dicer-cut location detector 116 described hereinabove predicted the correct miRNA oligonucleotide up to two nucleotides from the correct location. The accuracy of the TWO PHASED predictor is depicted in the graph. The accuracy of the first phase of the TWO PHASED predictor is depicted by the upper line, and that of both phases of the TWO PHASED predictor is depicted by the lower line. Both are binned by the predictor score, where the score is the score of the first stage.

[0336] It is appreciated that these results validate the accuracy of the Dicer-cut location detector 116.

[0337] Reference is now made to FIG. 12C, which is a bar graph illustrating the performance results of the target gene binding site detector 118 (FIG. 7A) constructed and operative in accordance with a preferred embodiment of the present invention.

[0338] FIG. 12C illustrates specificity and sensitivity of the target gene binding site detector 118. The values presented are the result of testing 10000 artificial miRNA oligonucleotide sequences (random 22 nt sequences with the same base composition as published miRNA oligonucleotide sequence). Adjusting the threshold parameters to fulfill 90% sensitivity of validated, published miRNA-3′UTR pairs, requires the P VAL of potential target gene sequences-Dicer-cut sequences to be less than 0.01 and also the P VAL of potential target ortholog gene sequences-Dicer-cut sequences to be less than 0.05. The target gene binding site detector 118 can filter out 99.7% of potential miRNA/gene pairs, leaving only the 0.3% that contain the most promising potential miRNA/gene pairs. Limiting the condition for the P VAL of potential target ortholog gene sequences-Dicer-cut sequences to be less than 0.01 reduces the sensitivity ratio to 70% but filters out more then 50% of the remaining 0.3%, to a final ratio of less than 0.15%.

[0339] It is appreciated that these results validate the sensitivity and specificity of the target gene binding site detector 118.

[0340] Reference is now made to FIG. 13, which is a summary table of laboratory results validating the expression of 29 novel human GAM RNA oligonucleotides in HeLa cells or, alternatively, in liver or thymus tissues detected by the bioinformatic oligonucleotide detection engine 100 (FIG. 2).

[0341] As a positive control, we used a reference set of eight known human miRNA oligonucleotides: hsa-MIR-21; hsa-MIR-27b; hsa-MIR-186; hsa-MIR-93; hsa-MIR-26a; hsa-MIR-191; hsa-MIR-31; and hsa-MIR-92. All positive controls were successfully validated by sequencing.

[0342] The table of FIG. 13 lists all GAM RNA predictions whose expression was validated. The field “Primer Sequence” contains the “specific” part of the primer; the field “Sequenced sequence” represents the nucleotide sequence detected by cloning (excluding the hemispecific primer sequence); the field “Predicted GAM RNA” contains the GAM RNA predicted sequence; the field “Distance” indicates the distance from the Primer; the number of mismatches between the “specific” region of the primer and the corresponding part of the GAM RNA sequence; the field “GAM Name” contains GAM RNA PRECURSOR ID followed by “A” or “B”, which represents the GAM RNA position on the precursor as elaborated in the attached Tables.

[0343] A primer was designed such that its first half, the 5′ region, is complementary to the adaptor sequence and its second half, the 3′ region, anneals to the 5′ terminus of GAM RNA sequence, yielding a hemispecific primer (as elaborated hereinbelow in the Methods section). A sample of 13 predicted GAM RNA sequences was examined by PCR using hemispecific primers and a primer specific to the 3′ adaptor. PCR products were cloned into plasmid vectors and then sequenced. For all 13 predicted GAM RNA sequences, the GAM RNA sequence found in the hemispecific primer plus the sequence observed between the hemispecific primer and the 3′ adaptor was completely included in the expected GAM RNA sequence (rows 1-7, and 29). The rest are GAM RNA predictions that were verified by cloning and sequencing, yet, by using a primer that was originally designed for a slightly different prediction.

[0344] It is appreciated that failure to detect a predicted oligonucleotide in the lab does not necessarily indicate a mistaken bioinformatic prediction. Rather, it may be due to technical sensitivity limitation of the lab test, or because the predicted oligonucleotides are not expressed in the tissue examined, or at the development phase tested. The observed GAM RNAs may be strongly expressed in HeLa cells while the original GAM RNAs are expressed at low levels in HeLa cells or not expressed at all. Under such circumstances, primer sequences containing up to three mismatches from a specific GAM RNA sequence may amplify it. Thus, we also considered cases in which differences of up to 3 mismatches in the hemispecific primer occur.

[0345] The 3′ terminus of observed GAM RNA sequences is often truncated or extended by one or two nucleotides. Cloned sequences that were sequenced from both 5′ and 3′ termini have an asterick appended to the row number.

[0346] Interestingly, the primer sequence followed by the observed cloned sequence is contained within five GAM RNA sequences of different lengths, and belong to 24 precursors derived from distinct loci (Row 29). Out of these, one precursor appears four times in the genome and its corresponding GAM Names are 351973-A, 352169-A, 352445-A and 358164-A.

[0347] The sequence presented in Row 29 is a representative of the group of five GAM RNAs. The full list of GAM RNA sequences and their corresponding precursors is as follows (each GAM RNA sequence is followed by the GAM Name):

TCACTGCAACCTCCACCTCCCA (352092, 352651,355761),
TCACTGCAACCTCCACCTCCCG (351868, 352440, 351973,
352169, 352445, 358164, 353737, 352382, 352235,
352232, 352268, 351919, 352473, 352444, 353638,
353004, 352925, 352943),
TCACTGCAACCTCCACCTCCTG (358311),
TCACTGCAACCTCCACCTTCAG (353323),
and
TCACTGCAACCTCCACCTTCCG (353856).

Method Section
Cell Lines

[0348] Three common human cell lines, obtained from Dr. Yonat Shemer at Soroka Medical Center, Be'er Sheva, Israel, were used for RNA extraction; Human Embryonic Kidney HEK-293 cells, Human Cervix Adenocarcinoma HeLa cells and Human Prostate Carcinoma PC3 cells.

RNA Purification

[0349] Several sources of RNA were used to prepare libraries:

[0350] Total HeLa S100 RNA was prepared from HeLa S100 cellular fraction (4C Biotech, Belgium) through an SDS (1%)-Proteinase K (200 g/ml) 30 minute incubation at 37 C followed by an acid Phenol-Chloroform purification and isopropanol precipitation (Sambrook et al; Molecular Cloning—A Laboratory Manual).

[0351] Total HeLa, HEK-293 and PC3 cell RNA was prepared using the standard Tri-Reagent protocol (Sigma) according to the manufacturer's instructions, except that 1 volume of isopropanol was substituted with 3 volumes of ethanol.

[0352] Nuclear and Cytoplasmic RNA was prepared from HeLa or HEK-293 cells in the following manner:

[0353] Cell were washed and harvested in ice-cold PBS and precipitated in a swing-out rotor at 1200 rpm at 4 C for 5 minutes. Pellets were loosened by gentle vortexing. 4 ml of “NP40 lysis buffer” (10 mM Tris HCl, 5 mM MgCl2, 10 mM NaCl, 0.5% Nonidet P40, 1 mM Spermidine, 1 mM DTT, 140 U/ml rRnasine) was then added per 5*107 cells. Cells and lysis buffer were incubated for 5 minutes on ice and centrifuged in a swing-out rotor at 500×g at 4 C for 5 minutes. Supernatant, termed cytoplasm, is carefully removed to a tube containing SDS (1% final) and proteinase-K (200 g/ml final). Pellet, termed nuclear fraction, is rewashed and incubated with a similar amount of fresh lysis buffer. Lysis is monitored visually under a microscope at this stage, typically for 5 minutes. Nuclei are pelleted in a swing-out rotor at 500×g at 4 C for 5 minutes. Supernatant is pooled, incubated at 37 C for 30 minutes, Phenol/Chloroform-extracted, and RNA is alcohol-precipitated (Sambrook et al). Nuclei are loosened and then homogenized immediately in >10 volumes of Tri-Reagent (Sigma). Nuclear RNA is then prepared according to the manufacturer's instructions.

Total Tissue RNA

[0354] Total tissue RNA was obtained from Ambion USA, and included Human Liver, Thymus, Placenta, Testes and Brain.

RNA Size Fractionation

[0355] RNA used for libraries was always size-fractionated. Fractionation was done by loading up to 500 microgram RNA per YM100 Amicon Microcon column (Millipore) followed by a 500×g centrifugation for 40 minutes at 4 C. Flow-through “YM100” RNA is about one quarter of the total RNA and was used for library preparation or fractionated further by loading onto a YM30 Amicon Microcon column (Millipore) followed by a 13,500×g centrifugation for 25 minutes at 4 C. Flow-through “YM30” was used for library preparation “as is” and consists of less than 0.5% of total RNA. Additional size fractionation was achieved during library preparation.

Library Preparation

[0356] Two types of cDNA libraries, designated “One-tailed” and “Ligation”, were prepared from the one of the abovementioned fractionated RNA samples. RNA was dephosphorylated and ligated to an RNA (designated with lowercase letters)-DNA (designated with UPPERCASE letters) hybrid 5′-phosphorylated, 3′ idT blocked 3′-adapter (5′-P-uuuAACCGCATCCTTCTC-idT-3′ Dharmacon # P-002045-01-05) (as elaborated in Elbashir et al., Genes Dev. 15:188-200 (2001)) resulting in ligation only of RNase III type cleavage products. 3′-Ligated RNA was excised and purified from a half 6%, half 13% polyacrylamide gel to remove excess adapter with a Nanosep 0.2 microM centrifugal device (PaII) according to instructions, and precipitated with glycogen and 3 volumes of ethanol. Pellet was resuspended in a minimal volume of water.

[0357] For the “Ligation” library, a DNA (UPPERCASE)-RNA (lowercase) hybrid 5′-adapter (5′-TACTAATACGACTCACTaaa-3′ Dharmacon # P-002046-01-05) was ligated to the 3′-adapted RNA, reverse transcribed with “EcoRI-RT”: (5′-GACTAGCTGGAATTCAAGGATGCGGTTAAA-3′), PCR-amplified with two external primers essentially as in El-bashir et al. (2001), except that primers were “EcoRI-RT” and “PstI Fwd” (5′-CAGCCAACGCTGCAGATACGACTCACTAAA-3′). This PCR product was used as a template for a second round of PCR with one hemispecific and one external primer or with two hemispecific primers.

[0358] For the “One-tailed” library, the 3′-adapted RNA was annealed to 20 pmol primer “EcoRI RT” by heating to 70 C and cooling 0.1 C/sec to 30 C and then reverse-transcribed with Superscript II RT (according to manufacturer's instructions, Invitrogen) in a 20 microliters volume for 10 alternating 5 minute cycles of 37 C and 45 C. Subsequently, RNA was digested with 1 microliter 2M NaOH and 2 mM EDTA at 65 C for 10 minutes. cDNA was loaded on a polyacrylamide gel, excised and gel-purified from excess primer as above (invisible, judged by primer run alongside) and resuspended in 13 microliters of water. Purified cDNA was then oligo-dC tailed with 400 U of recombinant terminal transferase (Roche Molecular Biochemicals), 1 microliter 100 microM dCTP, 1 microliter 15 mM CoCl2, and 4 microliters reaction buffer, to a final volume of 20 microliters for 15 minutes at 37 C. Reaction was stopped with 2 microliters 0.2M EDTA and 15 microliters 3M NaOAc pH 5.2. Volume was adjusted to 150 microliters with water, Phenol:Bromochloropropane 10:1 extracted and subsequently precipitated with glycogen and 3 volumes of ethanol. C-tailed cDNA was used as a template for PCR with the external primers “T3-PstBsg(G/I)18” (5′-AATTAACCCTCACTAAAGGCTGCAG GTGCAGGIGGGIIGGGIIGGGIIGN-3′ where I stands for Inosine and N for any of the 4 possible deoxynucleotides), and with “EcoRI Nested” (5′-GGAATTCAAGGATGCGGTTA-3′). This PCR product was used as a template for a second round of PCR with one hemispecific and one external primer or with two hemispecific primers.

Primer Design and PCR

[0359] Hemispecific primers were constructed for each predicted GAM RNA oligonucleotide by an in-house program designed to choose about half of the 5′ or 3′ sequence of the GAM RNA corresponding to a TM of about 30-34 C constrained by an optimized 3′ clamp, appended to the cloning adapter sequence (for “One-tailed” libraries, 5′-GGNNGGGNNG on the 5′ end or TTTAACCGCATC-3′ on the 3′ end of the GAM RNA; for “Ligation” libraries, the same 3′ adapter and 5′-CGACTCACTAAA on the 5′ end of the GAM RNA). Consequently, a fully complementary primer of a TM higher than 60 C was created covering only one half of the GAM RNA sequence permitting the unbiased elucidation by sequencing of the other half.

[0360] For each primer, the following criteria were used: Primers were graded according to the TM of the primer half and the nucleotide content of 3 nucleotides of the 3′ clamp from worst to best, roughly: GGG-3′<CCC-3′<TTT-3′/AAA-3′<GG-3′<CC-3′<a TM lower than 30<a TM higher than 34<TT-3′/AA-3′<3G/C nucleotide combination<3 A/T nucleotide combination<any combination of two/three different nucleotides<any combination of three/three different nucleotides.

Validation PCR Product by Southern Blot

[0361] GAM RNA oligonucleotides were validated by hybridization of Polymerase Chain Reaction (PCR)-product Southern blots with a probe to the predicted GAM RNA.

[0362] PCR product sequences were confirmed by Southern blot (Southern E. M., Biotechnology 1992, 24:122-139 (1975)) and hybridization with DNA oligonucleotide probes synthesized as complementary (antisense) to predicted GAM RNA oligonucleotides. Gels were transferred onto a Biodyne PLUS 0.45 m (PaII) positively charged nylon membrane and UV cross-linked. Hybridization was performed overnight with DIG-labeled probes at 42 C in DIG Easy-Hyb buffer (Roche). Membranes were washed twice with 2×SSC and 0.1% SDS for 10 minutes at 42 C and then washed twice with 0.5×SSC and 0.1% SDS for 5 min at 42 C. The membrane was then developed by using a DIG luminescent detection kit (Roche) using anti-DIG and CSPD reaction, according to the manufacturer's protocol. All probes were prepared according to the manufacturer's (Roche Molecular Biochemicals) protocols: Digoxigenin (DIG) labeled antisense transcripts were prepared from purified PCR products using a DIG RNA labeling kit with T3 RNA polymerase. DIG-labeled PCR was prepared by using a DIG PCR labeling kit. 3′-DIG-tailed oligo ssDNA antisense probes, containing DIG-dUTP and dATP at an average tail length of 50 nts were prepared from 100 pmole oligonucleotides with the DIG Oligonucleotide Labeling Kit. Control reactions contained all of the components of the test reaction except library template.

Validation of PCR Product by Nested PCR on the Ligation

[0363] To further validate predicted GAM PCR product sequence derived from hemi-primers, a PCR-based diagnostic technique was devised to amplify only those products containing at least two additional nucleotides of the non hemi-primer defined part of the predicted GAM RNA oligonucleotide. In essence, a diagnostic primer was designed so that its 3′ end, which is the specificity determining side, was identical to the desired GAM RNA oligonucleotide, 2-10 nts (typically 4-7, chosen for maximum specificity) further into its 3′ end than the nucleotide stretch primed by the hemi-primer. The hemi-primer PCR product was first ligated into a T-cloning vector (pTZ57/T or pGEM-T) as described hereinabove. The ligation reaction mixture was used as template for the diagnostic PCR under strict annealing conditions with the new diagnostic primer in conjunction with a general plasmid-homologous primer, resulting in a distinct ˜200 base-pair product. This PCR product can be directly sequenced, permitting the elucidation of the remaining nucleotides up to the 3′ of the mature GAM RNA oligonucleotide adjacent to the 3′ adapter. Alternatively, following analysis of the diagnostic PCR reaction on an agarose gel, positive ligation reactions (containing a band of the expected size) were transformed into E. coli. Using this same diagnostic technique and as an alternative to screening by Southern blot colony hybridization, transformed bacterial colonies were screened by colony—PCR (Gussow, D. and Clackson, T, Nucleic Acids Res. 17:4000 (1989)) with the nested primer and the vector primer, prior to plasmid purification and sequencing.

Validation of PCR Product by Cloning and Sequencing

[0364] PCR products were inserted into pGEM-T (Promega) or pTZ57/T (MBI Fermentas), heat-shock transformed into competent JM109 E. coli (Promega) and seeded on LB-Ampicilin plates with IPTG and XgaI. White and light blue colonies were transferred to duplicate gridded plates, one of which was blotted onto a membrane (Biodyne Plus, PaII) for hybridization with DIG tailed oligo probes (according to instructions, Roche) complementary to the expected GAM. Plasmid DNA from positive colonies was sequenced.

[0365] It is appreciated that the results summarize in FIG. 13 validate the efficacy of the bioinformatic oligonucleotide detection engine 100 of the present invention.

[0366] Reference is now made to FIG. 14A, which is a schematic representation of a novel human GR polynucleotide, located on chromosome 9, comprising 2 known human miRNA oligonucleotides—MIR24 and MIR23, and 2 novel GAM oligonucleotides, herein designated GAM7617 and GAM252 (later discovered by other researchers as hsa-mir-27b), all marked by solid black boxes. FIG. 14A also schematically illustrates 6 non-GAM hairpin sequences, and one non-hairpin sequence, all marked by white boxes, and serving as negative controls. By “non-GAM hairpin sequences” is meant sequences of a similar length to known miRNA precursor sequences, which form hairpin secondary folding pattern similar to miRNA precursor hairpins, and yet which are assessed by the bioinformatic oligonucleotide detection engine 100 not to be valid GAM PRECURSOR hairpins. It is appreciated that FIG. 14A is a simplified schematic representation, reflecting only the order in which the segments of interest appear relative to one another, and not a proportional distance between the segments.

[0367] Reference is now made to FIG. 14B, which is a schematic representation of secondary folding of each of the MIRs and GAMs of the GR MIR24, MIR23, GAM7617 and GAM252, and of the negative control non-GAM hairpins, herein designated N2, N3, N252, N4, N6 and N7. N0 is a non-hairpin control, of a similar length to that of known miRNA precursor hairpins. It is appreciated that the negative controls are situated adjacent to and in between real miRNA oligonucleotides and GAM predicted oligonucleotides and demonstrates similar secondary folding patterns to that of known MIRs and GAMs.

[0368] Reference is now made to FIG. 14C, which is a picture of laboratory results of a PCR test upon a YM100 size-fractionated “ligation” library, utilizing a set of specific primer pairs located directly inside the boundaries of the hairpins. Due to the nature of the library the only PCR amplifiable products can result from RNaseIII type enzyme cleaved RNA, as expected for legitimate hairpin precursors presumed to be produced by DROSHA (Lee et al, Nature 425 415-419, 2003). FIG. 14C demonstrates expression of hairpin precursors of known miRNA oligonucleotides hsa-mir23 and hsa-mir24, and of novel bioinformatically-detected GAM7617 and GAM252 hairpins predicted bioinformatically by a system constructed and operative in accordance with a preferred embodiment of the present invention. FIG. 14C also shows that none of the 7 controls (6 hairpins designated N2, N3, N23, N4, N6 and N7 and 1 non-hairpin sequence designated N0) were expressed. N252 is a negative control sequence partially overlapping GAM252.

[0369] In the picture, test lanes including template are designated “+” and the control lane is designated “−”. The control reaction contained all the components of the test reaction except library template. It is appreciated that for each of the tested hairpins, a clear PCR band appears in the test (“+”) lane, but not in the control (“−”) lane.

[0370] FIGS. 14A through 14C, when taken together validate the efficacy of the bioinformatic oligonucleotide detection engine in: (a) detecting known miRNA oligonucleotides; (b) detecting novel GAM PRECURSOR hairpins which are found adjacent to these miRNA oligonucleotides, and which despite exhaustive prior biological efforts and bioinformatic detection efforts, went undetected; (c) discerning between GAM (or MIR) PRECURSOR hairpins, and non-GAM hairpins.

[0371] It is appreciated that the ability to discern GAM-hairpins from non-GAM-hairpins is very significant in detecting GAM oligonucleotides since hairpins are highly abundant in the genome. Other miRNA prediction programs have not been able to address this challenge successfully.

[0372] Reference is now made to FIG. 15A, which is an annotated sequence of an EST comprising a novel GAM oligonucleotides detected by the oligonucleotide detection system of the present invention. FIG. 15A shows the nucleotide sequence of a known human non-protein-coding EST (Expressed Sequence Tag), identified as EST72223. The EST72223 clone obtained from TIGR database (Kirkness and Kerlavage, 1997) was sequenced to yield the above 705 bp transcript with a polyadenyl tail. It is appreciated that the sequence of this EST comprises sequences of one known miRNA oligonucleotide, identified as hsa-MIR98, and of one novel GAM oligonucleotide referred to here as GAM25, detected by the bioinformatic oligonucleotide detection engine 100 (FIG. 2) of the present invention.

[0373] The sequences of the precursors of the known MIR98 and of the predicted GAM25 precursors are marked in bold, the sequences of the established miRNA 98 and of the predicted miRNA-like oligonucleotide GAM25 are underlined.

[0374] Reference is now made to FIGS. 15B, 15C and 15D, which are pictures of laboratory results, which when taken together demonstrate laboratory confirmation of expression of the bioinformatically-detected novel oligonucleotide of FIG. 15A. In two parallel experiments, an enzymatically synthesized capped, EST72223 RNA transcript, was incubated with Hela S100 lysate for 0 minutes, 4 hours and 24 hours. RNA was subsequently harvested, run on a denaturing polyacrylamide gel, and reacted with either a 102 nt antisense MIR98 probe or a 145 nt antisense GAM25 precursor transcript probe respectively. The Northern blot results of these experiments demonstrated processing of EST72223 RNA by Hela lysate (lanes 2-4, in FIGS. 15B and 15C), into ˜80 bp and ˜22 bp segments, which reacted with the MIR98 precursor probe (FIG. 15B), and into ˜100 bp and ˜24 bp segments, which reacted with the GAM25 precursor probe (FIG. 15C). These results demonstrate the processing of EST72223 by Hela lysate into MIR98 precursor and GAM25 precursor. It is also appreciated from FIG. 15C (lane 1) that Hela lysate itself reacted with the GAM25 precursor probe, in a number of bands, including a ˜100 bp band, indicating that GAM25-precursor is endogenously expressed in Hela cells. The presence of additional bands, higher than 100 bp in lanes 5-9 probably corresponds to the presence of nucleotide sequences in Hela lysate, which contain the GAM25 sequence.

[0375] In addition, in order to demonstrate the kinetics and specificity of the processing of MIR98 and GAM25 precursors into their respective mature, “diced” segments, transcripts of MIR98 and of the bioinformatically predicted GAM25 precursors were similarly incubated with Hela S100 lysate, for 0 minutes, 30 minutes, 1 hour and 24 hours, and for 24 hours with the addition of EDTA, added to inhibit Dicer activity, following which RNA was harvested, run on a polyacrylamide gel and reacted with MIR98 and GAM25 precursor probes. Capped transcripts were prepared for in vitro RNA cleavage assays with T7 RNA polymerase, including a m7G(5′)ppp(5′)G-capping reaction using the T7-mMessage mMachine kit (Ambion). Purified PCR products were used as template for the reaction. These were amplified for each assay with specific primers containing a T7 promoter at the 5′ end and a T3 RNA polymerase promoter at the 3′ end. Capped RNA transcripts were incubated at 30 C in supplemented, dialysis concentrated, Hela S100 cytoplasmic extract (4 C Biotech, Seneffe, Belgium). The Hela S100 was supplemented by dialysis to a final concentration of 20 mM Hepes, 100 mM KCl, 2.5 mM MgCl2, 0.5 mM DTT, 20% glycerol and protease inhibitor cocktail tablets (Complete mini Roche Molecular Biochemicals). After addition of all components, final concentrations were 100 mM capped target RNA, 2 mM ATP, 0.2 mM GTP, 500 U/ml RNasin, 25 microgram/ml creatine kinase, 25 mM creatine phosphate, 2.5 mM DTT and 50% S100 extract. Proteinase K, used to enhance Dicer activity (Zhang et al., EMBO J. 21, 5875-5885 (2002)) was dissolved in 50 mM Tris-HCl pH 8, 5 mM CaCl2, and 50% glycerol, was added to a final concentration of 0.6 mg/ml. Cleavage reactions were stopped by the addition of 8 volumes of proteinase K buffer (200 Mm Tris-Hcl, pH 7.5, 25 m M EDTA, 300 mM NaCl, and 2% SDS) and incubated at 65 C for 15 min at different time points (0, 0.5, 1, 4, 24 h) and subjected to phenol/chloroform extraction. Pellets were dissolved in water and kept frozen. Samples were analyzed on a segmented half 6%, half 13% polyacrylamide 1×TBE-7M Urea gel.

[0376] The Northern blot results of these experiments demonstrated an accumulation of a ˜22 bp segment which reacted with the MIR98 precursor probe, and of a ˜24 bp segment which reacted with the GAM25 precursor probe, over time (lanes 5-8). Absence of these segments when incubated with EDTA (lane 9), which is known to inhibit Dicer enzyme (Zhang et al., 2002), supports the notion that the processing of MIR98 and GAM25 precursors into their “diced” segments is mediated by Dicer enzyme, found in Hela lysate. Other RNases do not utilize divalent cations and are thus not inhibited by EDTA. The molecular sizes of EST72223, MIR-98 and GAM25 and their corresponding precursors are indicated by arrows.

[0377] FIG. 15D present Northern blot results of same above experiments with GAM25 probe (24 nt). The results clearly demonstrated the accumulation of mature GAM25 oligonucleotide after 24 h.

[0378] To validate the identity of the band shown by the lower arrow in FIGS. 15C and 15D, a RNA band parallel to a marker of 24 base was excised from the gel and cloned as in Elbashir et al (2001) and sequenced. Ninety clones corresponded to the sequence of mature GAM25 oligonucleotide, three corresponded to GAM25* (the opposite arm of the hairpin with a 1-3 nt 3′ overhang) and two to the hairpin-loop.

[0379] GAM25 was also validated endogenously by sequencing from both sides from a HeLa YM100 total-RNA “ligation” libraries, utilizing hemispecific primers as described in FIG. 13.

[0380] Taken together, these results validate the presence and processing of a novel miRNA-like oligonucleotide, GAM25, which was predicted bioinformatically. The processing of this novel GAM oligonucleotide product, by Hela lysate from EST72223, through its precursor, to its final form was similar to that observed for known miRNA oligonucleotide, MIR98.

[0381] Transcript products were 705 nt (EST72223), 102 nt (MIR98 precursor), 125 nt (GAM25 precursor) long. EST72223 was PCR-amplified with T7-EST 72223 forward primer: 5′-TAATACGACTCACTATAGGCCCTTATTAGAGGATTCTGCT-3′ and T3-EST72223 reverse primer: ″-AATTAACCCTCACTAAAGGTTTTTTTTTCCTGAGA CAGAGT-3′. MIR98 was PCR-amplified using EST72223 as a template with T7MIR98 forward primer: 5′-TAATACGACTCACTATAGGGTGAGGTAGTAAGTTGTATT GTT-3′ and T3MIR98 reverse primer: 5′-AATTAACCCTCACTAAAGGGAAAGTAGTAAGTTGTATAG TT-3′. GAM25 was PCR-amplified using EST72223 as a template with GAM25 forward primer: 5′-GAGGCAGGAGAATTGCTTGA-3′ and T3-EST72223 reverse primer: 5′-AATTAACCCTCACTAAAGGCCTGAGACAGAGTCT TGCTC-3′.

[0382] It is appreciated that the data presented in FIGS. 15A, 15B, 15C and 15D when taken together validate the function of the bioinformatic oligonucleotide detection engine 100 of FIG. 2. FIG. 15A shows a novel GAM oligonucleotide bioinformatically-detected by the bioinformatic oligonucleotide detection engine 100, and FIGS. 15C and 15D show laboratory confirmation of the expression of this novel oligonucleotide. This is in accord with the engine training and validation methodology described hereinabove with reference to FIG. 2.

[0383] Reference is now made to FIGS. 16A-C, which schematically represent three methods that are employed to identify GAM FOLDED PRECURSOR RNA from libraries. Each method involves the design of specific primers for PCR amplification followed by sequencing. The libraries include hairpins as double-stranded DNA with two different adaptors ligated to their 5′ and 3′ ends.

[0384] Reference is now made to FIG. 16A, which depicts a first method that uses primers designed to the stems of the hairpins. Since the stem of the hairpins often has bulges, mismatches, as well as G-T pairing, which is less significant in DNA than is G-U pairing in the original RNA hair-pin, the primer pairs were engineered to have the lowest possible match to the other strand of the stem. Thus, the F-Stem primer, derived from the 5′ stem region of the hairpin, was chosen to have minimal match to the 3′ stem region of the same hairpin. Similarly, the R-stem primer, derived from the 3′ region of the hairpin (reverse complementary to its sequence), was chosen to have minimal match to the 5′ stem region of the same hairpin. The F-Stem primer was extended in its 5′ sequence with the T3 primer (5′-ATTAACCCTCACTAAAGGGA-3′) and the R-Stem primer was extended in its 5′ sequence with the T7 primer (5′-TAATACGACTCACTATAGGG). The extension is needed to obtain a large enough fragment for direct sequencing of the PCR product. Sequence data from the amplified hairpins is obtained in two ways. One way is the direct sequencing of the PCR products using the T3 primer that matches the extension of the F-Stem primer. Another way is the cloning of the PCR products into a plasmid, followed by PCR screening of individual bacterial colonies using a primer specific to the plasmid vector and either the R-Loop (FIG. 16B) or the F-Loop (FIG. 16C) primer. Positive PCR products are then sent for direct sequencing using the vector-specific primer.

[0385] Reference is now made to FIG. 16B, which depicts a second method in which R-Stem primer and R-Loop primers are used in a nested-PCR approach. First, PCR is performed with the R-Stem primer and the primer that matches the 5′ adaptor sequence (5-ad primer). PCR products are then amplified in a second PCR using the R-Loop and 5-ad primers. As mentioned hereinabove, sequence data from the amplified hairpins is obtained in two ways. One way is the direct sequencing of the PCR products using the 5-ad primer. Another way is the cloning of the PCR products into a plasmid, followed by PCR screening of individual bacterial colonies using a primer specific to the plasmid vector and F-Stem primer. Positive PCR products are then sent for direct sequencing using the vector-specific primer. It should be noted that optionally an extended R-Loop primer is designed that includes a T7 sequence extension, as described hereinabove (FIG. 16A) for the R-Stem primer. This is important in the first sequencing option in cases where the PCR product is too short for sequencing.

[0386] Reference is now made to FIG. 16C, which depicts a third method, which is the exact reverse of the second method described hereinabove (FIG. 16B). F-Stem and F-Loop primers are used in a nested-PCR approach. First, PCR is performed with the F-Stem primer and the primer that matches the 3′ adaptor sequence (3-ad primer). PCR products are then amplified in a second PCR using the F-Loop and 3-ad primers. As in the other two methods, sequence data from the amplified hairpins is obtained in two ways. One way is the direct sequencing of the PCR products using the F-Loop primer. Another way is the cloning of the PCR products into a plasmid, followed by PCR screening of individual bacterial colonies using a primer specific to the plasmid vector and R-Stem primer. Positive PCR products are then sent for direct sequencing using the vector-specific primer. It should be noted that optionally an extended F-Loop primer is designed that includes a T3 sequence extension, as described hereinabove (FIG. 16A) for the F-Stem primer. This is important in the first sequencing option in cases where the PCR product is too short for sequencing and also in order to enable the use of T3 primer.

[0387] In an embodiment of the present invention, the three methods mentioned hereinabove may be employed to validate the expression of GAM FOLDED PRECURSOR RNA.

[0388] Reference is now made to FIG. 17A, which is a flow chart with a general description of the design of the microarray to identify expression of published miRNA oligonucleotides, and of novel GAM oligonucleotides of the present invention.

[0389] A microarray that identifies miRNA oligonucleotides is designed (FIG. 17B). The DNA microarray is prepared by Agilent according to their SurePrint Procedure (reference describing their technology can be obtained from the Agilent website, http://www.agilent.com). In this procedure, the oligonucleotide probes are synthesized on the glass surface. Other methods can also be used to prepare such microarray including the printing of pre-synthesized oligonucleotides on glass surface or using the photolithography method developed by Affymetrix (Lockhart D J et al., Nat Biotechnol. 14:1675-1680 (1996)). The 60-mer sequences from the design are synthesized on the DNA microarray. The oligonucleotides on the microarray, termed “probes” are of the exact sequence as the designed 60-mer sequences. Importantly, the 60-mer sequences and the probes are in the sense orientation with regards to the miRNA oligonucleotides. Next, a cDNA library is created from size-fractionated RNA, amplified, and converted back to RNA (FIG. 17C). The resulting RNA is termed “cRNA”. The conversion to RNA is done using a T7 RNA polymerase promoter found on the 3′ adaptor (FIG. 17C; T7 NcoI-RNA-DNA 3′Adaptor). Since the conversion to cRNA is done in the reverse direction compared to the orientation of the miRNA oligonucleotides, the cRNA is reverse complementary to the probes and is able to hybridize to it. This amplified RNA is hybridized with the microarray that identifies miRNA oligonucleotides, and the results are analyzed to indicate the relative level of miRNA oligonucleotides (and hairpins) that are present in the total RNA of the tissue (FIG. 18).

[0390] Reference is now made to FIG. 17B, which describes how the microarray to identify miRNA oligonucleotides is designed. miRNA oligonucleotide sequences or potential predicted miRNA oligonucleotides are generated by using known or predicted hairpins as input. Overlapping potential miRNA oligonucleotides are combined to form one larger sub-sequence within a hairpin.

[0391] To generate non-expressed sequences (tails), artificial sequences are generated that are 40 nts in length, which do not appear in the respective organism genome, do not have greater than 40% homology to sequences that appear in the genome, and with no 15-nucleotide window that has greater than 80% homology to sequences that appear in the genome.

[0392] To generate probe sequences, the most probable miRNA oligonucleotide sequences are placed at position 3 (from the 5′ end) of the probe. Then, a tail sub-sequence to the miRNA oligonucleotide sequence was attached such that the combined sequence length will meet the required probe length (60 nts for Agilent microarrays).

[0393] The tails method provides better specificity compared to the triplet method. In the triplet method, it cannot be ascertained that the design sequence, and not an uncontrolled window from the triplet probe sequence, was responsible for hybridizing to the probe. Further, the tails method allows the use of different lengths for the potential predicted miRNA oligonucleotide (of combined, overlapping miRNA oligonucleotides).

[0394] Hundreds of control probes were examined in order to ensure the specificity of the microarray. Negative controls contain probes which should have low intensity signal. For other control groups, the concentration of certain specific groups of interest in the library are monitored. Negative controls include tail sequences and non-hairpin sequences. Other controls include mRNA for coding genes, tRNA, and snoRNA.

[0395] For each probe that represents known or predicted miRNA oligonucleotides, additional mismatch probes were assigned in order to verify that the probe intensity is due to perfect match (or as close as possible to a perfect match) binding between the target miRNA oligonucleotide cRNA and its respective complementary sequence on the probe. Mismatches are generated by changing nucleotides in different positions on the probe with their respective complementary nucleotides (A<->T, G<->C, and vice versa). Mismatches in the tail region should not generate a significant change in the intensity of the probe signal, while mismatches in the miRNA oligonucleotide sequences should induce a drastic decrease in the probe intensity signal. Mismatches at various positions within the miRNA oligonucleotide sequence enable us to detect whether the binding of the probe is a result of perfect match or, alternatively, nearly perfect match binding.

[0396] Based on the above scheme, we designed a DNA microarray prepared by Agilent using their SurePrint technology. Table 11 is a detailed list of microarray chip probes

Known miRNA Oligonucleotides:

[0397] The miRNA oligonucleotides and their respective precursor sequences are taken from Sanger Database to yield a total of 186 distinct miRNA oligonucleotide and precursor pairs. The following different probes are constructed:

1. Single miRNA Oligonucleotide Probes:

[0398] From each precursor, 26-mer containing the miRNA oligonucleotide were taken, then assigned 3 probes for each extended miRNA oligonucleotide sequence: 1. the 26-mer are at the 5′ of the 60-mer probe, 2. the 26-mer are at the 3′ of the 60-mer probe, 3. the 26-mer are in the middle of the 60-mer probe. Two different 34-mer subsequences from the design tails are attached to the 26-mer to accomplish 60-mer probe. For a subset of 32 of Single miRNA oligonucleotide probes, six additional mismatches mutations probes were designed:

[0399] 4 block mismatches at 5′ end of the miRNA oligonucleotide;

[0400] 6 block mismatches at 3′ end of the miRNA oligonucleotide;

[0401] 1 mismatch at position 10 of the miRNA oligonucleotide;

[0402] 2 mismatches at positions 8 and 17 of the miRNA oligonucleotide;

[0403] 3 mismatches at positions 6, 12 and 18 of the miRNA oligonucleotide; and

[0404] 6 mismatches at different positions out of the miRNA oligonucleotide.

2. Duplex miRNA Oligonucleotide Probes:

[0405] From each precursor, a 30-mer containing the miRNA oligonucleotide was taken, then duplicated to obtain 60-mer probe. For a subset of 32 of probes, three additional mismatch mutation probes were designed:

[0406] 2 mismatches on the first miRNA oligonucleotide;

[0407] 2 mismatches on the second miRNA oligonucleotide; and

[0408] 2 mismatches on each of the miRNA oligonucleotides.

3. Triplet miRNA Oligonucleotide Probes:

[0409] Following Krichevsky's work (Krichevsky et al., RNA 9:1274-1281 (2003)), head to tail ˜22-mer length miRNA oligonucleotide sequences were attached to obtain 60-mer probes containing up to three repeats of the same miRNA oligonucleotide sequence. For a subset of 32 probes, three additional mismatch mutation probes were designed:

[0410] 2 mismatches on the first miRNA oligonucleotide;

[0411] 2 mismatches on the second miRNA oligonucleotide; and

[0412] 2 mismatches on each of the miRNA oligonucleotides.

4. Precursor with miRNA Oligonucleotide Probes:

[0413] For each precursor, 60-mer containing the miRNA oligonucleotide were taken.

5. Precursor without miRNA Oligonucleotide Probes:

[0414] For each precursor, a 60-mer containing no more then 16-mer of the miRNA oligonucleotide was taken. For a subset of 32 probes, additional mismatch probes containing four mismatches were designed.

Control Groups:

[0415] 1. 100 60-mer sequences from representative ribosomal RNAs.

[0416] 2. 85 60-mer sequences from representatives tRNAs.

[0417] 3. 19 60-mer sequences from representative snoRNA.

[0418] 4. 294 random 26-mer sequences from human genome not contained in published or predicted precursor sequences, placing them at the probe's 5′ and attached 34-mer tail described above.

[0419] 5. Negative Control: 182 different 60-mer probes contained different combinations of 10 nt-long sequences, in which each 10 nt-long sequence is very rare in the human genome, and the 60-mer combination is extremely rare.

Predicted GAM RNAs:

[0420] There are 8381 pairs of predicted GAM RNA and their respective precursors. From each precursor, a 26-mer containing the GAM RNA was placed at the 5′ of the 60-mer probe and a 34-mer tail was attached to it. For each predicted probe, a mutation probes with 2 mismatches at positions 10 and 15 of the GAM RNA were added.

[0421] For a subset of 660 predicted precursors, up to 2 probes each containing one side of the precursor including any possible GAM RNA in it were added.

Microarray Analysis:

[0422] Based on known miRNA oligonucleotide probes, a preferred position of the miRNA oligonucleotide on the probe was evaluated, and hybridization conditions adjusted and the amount of cRNA to optimize microarray sensitivity and specificity ascertained. Negative controls are used to calculate background signal mean and standard deviation. Different probes of the same miRNA oligonucleotide are used to calculate signal standard deviation as a function of the signal.

[0423] For each probe, BG_Z_Score=(log(probe signal)−mean of log(negative control signal))/(log(negative control signal) standard deviation) were calculated.

[0424] For a probe with a reference probe with 2 mismatches on the miRNA oligonucleotide, MM_Z_Score MM_Z_Score=(log(perfect match signal)−log(reference mismatch signal))/(standard deviation of log(signals) as the reference mismatch log(signal)) were calculated.

[0425] BG_Z_Score and MM_Z_Score are used to decide whether the probe is on and its reliability.

[0426] Reference is now made to FIG. 17C, which is a flowchart describing how the cDNA library was prepared from RNA and amplified. The general procedure was performed as described previously (Elbashir S M, Lendeckel W, Tuschl T. RNA interference is mediated by 21- and 22-nucleotide RNAs. Genes Dev. 2001 15:188-200) with several modifications, which will be described hereinbelow.

[0427] First, the starting material is prepared. Instead of starting with standard total RNA, the total RNA was size-fractionated using an YM-100 Microcon column (Millipore Corporation, Billerica, Mass., USA) in the present protocol. Further, the present protocol uses human tissue or cell lines instead of a Drosophila in vitro system as starting materials. Finally, 3 micrograms of size-fractionated total RNA was used for the ligation of adaptor sequences.

[0428] Libraries used for microarray hybridization are listed hereinbelow: “A” library is composed of a mix of libraries from Total HeLa YM100 RNA and Nuclear HeLa YM100 RNA; “B” library is composed of a mix of libraries from Total HEK293 YM100 RNA and Nuclear HEK293 YM100 RNA; “C” library is composed of a mix of YM100 RNA libraries from Total PC3, Nuclear PC3 and from PC3 cells in which Dicer expression was transiently silenced by Dicer specific siRNA; “D” library is prepared from YM100 RNA from Total Human Brain (Ambion Cat#7962); “E” library is prepared from YM100 RNA from Total Human Liver (Ambion Cat#7960); “F” library is prepared from YM100 RNA from Total Human Thymus (Ambion Cat#7964); “G” library is prepared from YM100 RNA from Total Human Testis (Ambion Cat#7972); and “H” library is prepared from YM100 RNA from Total Human Placenta (Ambion Cat#7950).

[0429] Library letters appended by a numeral “1” or “2” are digested by XbaI (NEB); Library letters affixed by a numeral “3” are digested by Xba1 and SpeI (NEB); Library letters appended by a numeral “4” are digested by Xba1 and the transcribed cRNA is then size-fractionated by YM30, retaining the upper fraction consisting of 60 nts and longer; Library letters affixed by a numeral “5” are digested by Xba1 and the transcribed cRNA is then size-fractionated by YM30 retaining the flow-through fraction consequently concentrated with YM10 consisting of 30 nts-60 nts; Library letters affixed by a numeral “6” are digested by Xba1 and the DNA is fractionated on a 13% native acrylamide gel from 40-60 nt, electroeluted on a GeBaFlex Maxi column (GeBa Israel), and lyophilized; Library letters affixed by a numeral “7” are digested by Xba1 and the DNA is fractionated on a 13% native acrylamide gel from 80-160 nt, electroeluted and lyophilized.

[0430] Next, unique RNA-DNA hybrid adaptor sequences with a T7 promoter were designed. This step is also different than other protocols that create libraries for microarrays. Most protocols use complements to the polyA tails of mRNA with a T7 promoter to amplify only mRNA. However, in the present invention, adaptors are used to amplify all of the RNA within the size-fractionated starting material. The adaptor sequences are ligated to the size-fractionated RNA as described in FIG. 13, with subsequent gel-fractionation steps. The RNA is then converted to first strand cDNA using reverse transcription.

[0431] Next, the cDNA is amplified using PCR with adaptor-specific primers. At this point, there is the optional step of removing the tRNA, which is likely to be present because of its low molecular weight, but may add background noise in the present experiments. All tRNA contain the sequence ACC at their 3′ end, and the adaptor contains GGT at its 5′ end. This sequence together (GGTACC) is the target site for NcoI restriction digestion. Thus, adding the restriction enzyme NcoI either before or during PCR amplification will effectively prevent the exponential amplification of the cDNA sequences that are complements of the tRNAs.

[0432] The amplified DNA is restriction enzyme-digested with Xba1 (and, optionally, with Pst or SpeI) to remove the majority of the adaptor sequences that were initially added to the RNA. Using the first set of RNA-DNA hybrid adaptors listed below, the first two sets of primers listed below, and Xba1 restriction digest yields the following cRNA products: 5′GGCCA-PRE/miRNA-UAUCUAG, where PRE is defined as GAM PRECURSOR (palindrome). Using the second set of RNA-DNA hybrid adaptors listed below, the second set of primers listed below, and Xba1 and Pst restriction digest yields the following, smaller cRNA products: 5′GG-PRE/miRNA-C*.

[0433] Then, cDNA is transcribed to cRNA utilizing an RNA polymerase e.g. T7 dictated by the promoter incorporated in the adaptor. cRNA may be labeled in the course of transcription with aminoallyl or fluorescent nucleotides such as Cy3- or Cy5-UTP and CTP among other labels, and cRNA sequences thus transcribed and labeled are hybridized with the microarray.

[0434] The following RNA-DNA hybrid adaptors are included in the present invention:

Name: T7 Ncol-RNA-DNA 3′Adapter
Sequence:
5′ (5phos)rUrGrGCCTATAGTGAGTCGTATTA(3InvdT)3′
2. Name: 5Ada RNA-DNA XbaBseRI
Sequence:
5′ AAAGGAGGAGCTCTAGrArUrA 3′ or option-ally:
3. Name: 5Ada MC RNA-DNA PstAtaBser
Sequence:
5′ CCTAGGAGGAGGACGTCTGrCrArG 3′
4. Name: 3′Ada nT7 MC RNA-DNA
Sequence:
5′ (5phos) rCrCrUATAGTGAGTCGTATTATCT(3InvdT)3′

[0435] The following DNA primers are included in the present invention:

1. Name: T7 Ncol-RT-PCR primer
Sequence: 5′ TAATACGACTCACTATAGGCCA 3′
2. Name: T7Nhel Spel-RT-PCR primer
Sequence: 5′ GCTAGCACTAGTTAATACGACTCACTATAGGCCA 3′
3. Name: 5Ada XbaBseRl Fwd
Sequence: 5′ AAAGGAGGAGCTCTAGATA 3′
4. Name: Pst-5Ada XbaBseRl Fwd
Sequence: 5′ TGACCTGCAGAAAGGAGGAGCTCTAGATA 3′
or optionally:
5. Name: 5Ada MC PstAtaBser fwd
Sequence: 5′ ATCCTAGGAGGAGGACGTCTGCAG 3′
6. Name: RT nT7 MC Xbal
Sequence: 5′ GCTCTAGGATAATACGACTCACTATAGG 3′

[0436] Reference is now made to FIG. 18A, which demonstrates the detection of known miRNA oligonucleotides and of novel GAM oligonucleotides, using a microarray constructed and operative in accordance with a preferred embodiment of the present invention. Based on negative control probe intensity signals, we evaluated the background, non-specific, logarithmic intensity distribution, and extracted its mean, designated BG_mean, and standard deviation, designated BG_std. In order to normalize intensity signals between different microarray experiments, a Z score, which is a statistical measure that quantifies the distance (measured in standard deviations) that a data point is from the mean of a data set, was calculated for each probe with respect to the negative control using the following Z score formula: Z=(logarithm of probe signal BG_mean)/BG_std. We performed microarray experiments using RNA extracted from several different tissues and we calculated each probes maximum Z score. FIG. 18A shows the percentages of known, predicted and negative control groups that have a higher max Z score than a specified threshold as a function of max Z score threshold. The negative control group plot, included as a reference, considers probe with a max Z score greater then 4 as a reliable probe with meaningful signals. The sensitivity of our method was demonstrated by the detection of almost 80% of the known published miRNA oligonucleotides in at least one of the examined tissues. At a threshold of 4 for the max Z score, 28% of the predicted GAMs are present in at least one of the examined tissues.

[0437] Reference is now made to FIG. 18B, which is a line graph showing specificity of hybridization of a microarray constructed and operative in accordance with a preferred embodiment of the present invention and described hereinabove with reference to FIGS. 17A-17C.

[0438] The average signal of known miRNA oligonucleotides in Library A2 is presented on a logarithmic scale as a function of the following probe types under two different hybridization conditions: 50 C and 60 C: perfect match (PM), six mismatches on the tail (TAIL MM), one mismatch on the miRNA oligonucleotide (1MM), two separate mismatches on the miRNA oligonucleotide (2MM), three separate mismatches on the miRNA oligonucleotide (3MM). The relative equality of perfect match probes and probes with the same miRNA oligonucleotide but many mismatches over the tail attest to the independence between the tail and the probe signal. At a hybridization temperature of 60 C, one mismatch in the middle of the miRNA oligonucleotide is enough to dramatically reduce the probe signal. Conducting chip hybridization at 60 C ensures that a probe has a very high specificity.

[0439] It is appreciated that these results demonstrate the specificity of the microarray of the present invention in detecting expression of miRNA oligonucleotides.

[0440] Reference is now made to FIG. 18C, which is a summary table demonstrating detection of known miRNA oligonucleotides using a microarray constructed and operative in accordance with a preferred embodiment of the present invention and described hereinabove with reference to FIGS. 17A-17C.

[0441] Labeled cRNA from HeLa cells and Human Liver, Brain, Thymus, Placenta, and Testes was used for 6 different hybridizations. The table contains the quantitative values obtained for each miRNA oligonucleotide probe. For each miRNA oligonucleotide, the highest value (or values) is given in bolded font while lower values are given in regular font size. Results for MIR-124A, MIR-9 and MIR-122A are exactly as expected from previous studies. The “References” column contains the relevant references in the published literature for each case. In addition to these miRNA oligonucleotides, the table shows other known miRNA oligonucleotides that are expressed in a tissue-specific manner. The results indicate that MIR-128A, MIR-129 and MIR-128B are highly enriched in Brain; MIR-194, MIR-148 and MIR-192 are highly enriched in Liver; mIR-96, MIR-150, MIR-205, MIR-182 and MIR-183 are highly enriched in Thymus; MIR-204, MIR-10B, MIR-154 and MIR134 are highly enriched in Testes; and MIR-122, MIR-210, MIR-221, MIR-141, MIR-23A, MIR-200C and MIR-136 are highly enriched in Placenta. In most cases, low but significant levels are observed in the other tissues. However, in some cases, miRNA oligonucleotides are also expressed at relative high levels in an additional tissue.

[0442] It is appreciated that these results reproduce previously published studies of expression of known miRNA oligonucleotides. These results demonstrate the reliability of the microarray of the present invention in detecting expression of published miRNA oligonucleotides, and of novel GAM oligonucleotides of the present invention.

[0443] Reference is now made to FIG. 19, which presents pictures of laboratory results that demonstrate laboratory confirmation of excision (“dicing”) of four bioinformatically-detected novel HIV1 miRNA-like oligonucleotides from their predicted precursors by incubation in HeLa S-100 lysate as described in FIG. 15.

[0444] FIG. 19A presents the entire 5′UTR of HIV1 (U5R) containing two predicted GAM precursors in bold. The bioinformatically-predicted mature GAM RNAs are underlined, one closer to the 5′ end (FIG. 19B) and the second closer to the 3′ end (FIG. 19C). The 5′-most GAM RNA matches the known HIV1 RNA structure named TAR to which the TAT protein binds (Nature 1987. 330:489-93).

[0445] FIGS. 19B and 19C depict Northern blot analysis of GAM RNA oligonucleotides that are present in U5R, hybridized with predicted mature GAM RNA probes. The upper arrow indicates the molecular size of the entire 355 nt U5R transcript. The predicted molecular sizes of the two GAM RNAs are 22 nt and 17 nt, respectively. The lower arrow indicates the 22 nt molecular marker. Lanes: 1—Hela lysate; 2—U5R transcript in HeLa Lysate without incubation; and 3—U5R transcript incubated for 24 hours with Hela lysate.

[0446] FIGS. 19D and 19E present partial transcripts of HIV1 RNA reacted with predicted mature HIV1-GAM RNA probes. In each figure, the experimental transcript sequence is shown, and the predicted mature GAM RNA is underlined. Northern blot analyses of GAM precursors are presented. It is demonstrated that one GAM precursor transcript is 163 nt and the other GAM precursor transcript is 200 nt. The predicted molecular sizes of mature GAM RNA are both 24 nt. The 22 nt molecular marker is indicated. Lanes: 1—Transcript in HeLa Lysate without incubation and 2—Transcript incubated for 24 hours with HeLa lysate.

[0447] It is appreciated that the sequences of the expected sizes that hybridize with the probe comprise sequences of novel GAM oligonucleotides, detected by the bioinformatic oligonucleotide detection engine 100 of the present invention, described hereinabove with reference to FIG. 2.

[0448] Reference is now made to FIG. 20, which presents pictures of laboratory results that confirm expression of the bioinformatically-detected novel Vaccinia GAM oligonucleotides GAM501943 (FIGS. 20A and 20C) and GAM501981 (FIG. 19B). HeLa cells were infected with 50 PFU Vaccinia Virus and total RNA was harvested after 3 days. Northern blot analysis was performed with a 53 nt DIG-labeled RNA probe for GAM501943 predicted precursor (FIG. 19A), a 73 nt DIG-labeled RNA probe for GAM501981 predicted precursor (FIG. 19B) or a 22 nt 32P-ATP-labeled DNA oligonucleotide probe for predicted mature GAM501943.2 (FIG. 19C). Lanes: 1—GAM precursors in total RNA extracted from HeLa cells infected with Vaccinia Virus; 2—GAM precursors in total RNA extracted from HeLa cells that were not infected with Vaccinia Virus; and 3—a transcript of predicted sequence and size was run alongside the other lanes to serve as a size marker and a hybridization control (FIGS. 19A and 19B). The arrow in FIG. 19C marks a band 53 nt, which is the predicted precursor size, that reacts with mature 22 nt GAM501943.2 probe.

[0449] It is appreciated that the sequences that hybridized with the probe appear only in infected cells in vivo and comprise sequences of novel GAM gene precursors, referred to here as GAM501943 and GAM501981, detected by the bioinformatic gene detection engine 100 of the present invention, as described hereinabove with reference to FIG. 2.

[0450] Reference is now made to FIG. 21A, which is a picture of an agarose gel demonstrating the effect of HIV infection on GAM RNA levels in H9 cells. DNA libraries were created from H9 cells and from HIV-infected H9 cells as described in FIG. 17C. Briefly, adaptor sequences were ligated to YM100 RNA, reverse transcribed to cDNA and amplified to libraries using PCR with hemispecific primers. The PCR product was run on an agarose gel and stained with ethidium bromide. Some representative gels are presented in FIG. 21A. Lane 1 shows PCR product from a reaction run with all of the reaction components except for the library and serves as a control; Lane 2 shows PCR product levels from an H9 cell library that has not been infected with HIV; and Lane 3 shows PCR product levels from an H9 cell library that was infected with HIV.

[0451] It is appreciated that HIV infection of H9 cells increases the expression of small, approximately 22 nt-long oligonucleotides in certain predicted GAM RNAs (Examples 1 and 2), while decreasing them in other predicted GAM RNAs (Example 3). Lanes that did not contain any libraries did not show any bands, demonstrating a lack of contaminated DNA in the procedure. The 60 nt bands representing 22 nt-long GAM RNA ligated to adaptors were then excised, cloned and sequenced, with reference to FIG. 21B hereinbelow.

[0452] Reference is now made to FIG. 21B, which is a table of laboratory results validating expression of novel human oligonucleotides in human cells infected with HIV, that are detected by a bioinformatic oligonucleotide detection engine 100 (FIG. 2), constructed and operative in accordance with a preferred embodiment of the present invention. It is appreciated that the bioinformatic predictions presented here serve only as examples of a large quantity of results from the bioinformatic oligonucleotide detection engine 100. The bands from the gels depicted in FIG. 21A were cloned and sequenced as described hereinabove. In brief, a primer was designed such that its first half, the 5′ region, is complementary to the adaptor sequence and its second half, the 3′ region, anneals to the 5′ terminus of GAM RNA sequence, yielding a hemispecific primer (as elaborated herein above with reference to FIG. 13). Predicted GAM RNA sequences were examined by PCR using hemispecific primers and a primer specific to the 3′ adaptor. PCR products were cloned into plasmid vectors and then sequenced. (The predicted GAM RNA were verified by cloning and sequencing using a primer that was originally designed for a slightly different prediction.)

[0453] The results are presented in a table that includes the following fields: “Primer Sequence” contains the “specific” part of the hemispecific primer; “Sequenced sequence” represents the nucleotide sequence detected by cloning (excluding the hemispecific primer sequence); “Predicted GAM RNA” contains the GAM RNA sequence that is predicted by the bioinformatic oligonucleotide detection engine 100; “GAM precursor sequence” contains the sequence of the GAM precursor RNA that is predicted by the bioinformatic oligonucleotide detection engine 100; “Chr” depicts the human chromosome on which the GAM precursor lies; “Strand” indicates whether the predicted GAM precursor lies on the “+” or “−” strand of the chromosome; and “Start Offset” contains the nucleotide number of the specified chromosome at which the predicted GAM precursor sequence begins.

[0454] It is appreciated that the “sequenced sequence” from Row 1 of the table in FIG. 21B was sequenced from the 60 nt band in Lane 3 of Example 1 of 21A. It is further appreciated that the “sequenced sequence” from Rows 2 and 3 were sequenced from the 60 nt band in Lane 3 of Example 2 of 21A. Row 3 was cloned from five independent clones showing robustness of that GAM RNA. It is further appreciated that the “sequenced sequence” from Row 4 was sequenced from the 60 nt band in Lane 2 of Example 3 of 21A. It is still further appreciated that the “sequenced sequence” from Rows 5 and 6 were sequenced from the 60 nt band in Lane 3 of Example 3 of 21A. Thus, it may be speculated that HIV infection of H9 cells down-regulates the GAM RNA presented in Row 4 of the Table and simultaneously upregulates the GAM RNAs presented in Rows 5 and 6 of the Table, with an overall downregulation of band signal intensity.

### DETAILED DESCRIPTION OF TABLES

[0455] Table 1 comprises data relating the SEQ ID NO of oligonucleotides of the present invention to their corresponding GAM NAME, and contains the following fields: GAM SEQ-ID: GAM SEQ ID NO, as in the Sequence Listing; GAM NAME: Rosetta Genomics Ltd. nomenclature (see below); GAM RNA SEQUENCE: Sequence (5′ to 3′) of the mature, “diced” GAM RNA; GAM ORGANISM: identity of the organism encoding the GAM oligonucleotide; GAM POS: Dicer-cut location (see below); and

[0456] Table 2 comprises detailed textual description according to the description of FIG. 1 of each of a plurality of novel GAM oligonucleotides of the present invention, and contains the following fields: GAM NAME: Rosetta Genomics Ltd. nomenclature (see below); GAM ORGANISM: identity of the organism encoding the GAM oligonucleotide; PRECUR SEQ-ID: GAM precursor Seq-ID, as in the Sequence Listing; PRECURSOR SEQUENCE: Sequence (5′ to 3′) of the GAM precursor; GAM DESCRIPTION: Detailed description of GAM oligonucleotide with reference to FIG. 1; and

[0457] Table 3 comprises data relating to the source and location of novel GAM oligonucleotides of the present invention, and contains the following fields: GAM NAME: Rosetta Genomics Ltd. nomenclature (see below); PRECUR SEQ-ID: GAM precursor SEQ ID NO, as in the Sequence Listing; GAM ORGANISM: identity of the organism encodes the GAM oligonucleotide; SOURCE: For human GAM—chromosome encoding the human GAM oligonucleotide, otherwise—accession ID (GenBank, NCBI); STRAND: Orientation of the strand, “+” for the plus strand, “−” for the minus strand; SRC-START OFFSET: Start offset of GAM precursor sequence relative to the SOURCE; SRC-END OFFSET: End offset of GAM precursor sequence relative to the SOURCE; and

[0458] Table 4 comprises data relating to GAM precursors of novel GAM oligonucleotides of the present invention, and contains the following fields: GAM NAME: Rosetta Genomics Ltd. nomenclature (see below); PRECUR SEQ-ID: GAM precursor Seq-ID, as in the Sequence Listing; GAM ORGANISM: identity of the organism encoding the GAM oligonucleotide; PRECURSOR-SEQUENCE: GAM precursor nucleotide sequence (5′ to 3′); GAM FOLDED PRECURSOR RNA: Schematic representation of the GAM folded precursor, beginning 5′ end (beginning of upper row) to 3′ end (beginning of lower row), where the hairpin loop is positioned at the right part of the draw; and

[0459] Table 5 comprises data relating to GAM oligonucleotides of the present invention, and contains the following fields: GAM NAME: Rosetta Genomics Ltd. nomenclature (see below); GAM ORGANISM: identity of the organism encoding the GAM oligonucleotide; GAM RNA SEQUENCE: Sequence (5′ to 3′) of the mature, “diced” GAM RNA; PRECUR SEQ-ID: GAM precursor Seq-ID, as in the Sequence Listing; GAM POS: Dicer-cut location (see below); and

[0460] Table 6 comprises data relating SEQ ID NO of the GAM target gene binding site sequence to TARGET gene name and target binding site sequence, and contains the following fields: TARGET BINDING SITE SEQ-ID: Target binding site SEQ ID NO, as in the Sequence Listing; TARGET ORGANISM: identity of organism encode the TARGET gene; TARGET: GAM target gene name; TARGET BINDING SITE SEQUENCE: Nucleotide sequence (5′ to 3′) of the target binding site; and

[0461] Table 7 comprises data relating to target-genes and binding sites of GAM oligonucleotides of the present invention, and contains the following fields: GAM NAME: Rosetta Genomics Ltd. nomenclature (see below); GAM ORGANISM: identity of the organism encoding the GAM oligonucleotide; GAM RNA SEQUENCE: Sequence (5′ to 3′) of the mature, “diced” GAM RNA; TARGET: GAM target gene name; TARGET REF-ID: For human target genes—Target accession number (RefSeq, GenBank); Otherwise—the location of the target gene on the genome annotation. TARGET ORGANISM: identity of organism encode the TARGET gene; UTR: Untranslated region of binding site/s (3′ or 5′); TARGET BS-SEQ: Nucleotide sequence (5′ to 3′) of the target binding site; BINDING SITE-DRAW: Schematic representation of the binding site, upper row represent 5′ to 3′ sequence of the TARGET, Lower row represent 3′ to 5′ Sequence of the GAM RNA; GAM POS: Dicer-cut location (see below); and

[0462] Table 8 comprises data relating to functions and utilities of novel GAM oligonucleotides of the present invention, and contains the following fields: GAM NAME: Rosetta Genomics Ltd. nomenclature (see below); GAM RNA SEQUENCE: Sequence (5′ to 3′) of the mature, “diced” GAM RNA; GAM ORGANISM: identity of the organism encoding the GAM oligonucleotide; TARGET: GAM target gene name; TARGET ORGANISM: identity of organism encode the TARGET gene; GAM FUNCTION: Description of the GAM functions and utilities; GAM POS: Dicer-cut location (see below); and

[0463] Table 9 comprises references of GAMs target genes and contains the following fields: TARGET: Target gene name; TARGET ORGANISM: identity of organism encode the TARGET gene; REFERENCES: reference relating to the target gene; and

[0464] Table 10 comprises data relating to novel GR (Genomic Record) polynucleotides of the present invention, and contains the following fields: GR NAME: Rosetta Genomics Ltd. nomenclature (see below); GR ORGANISM: identity of the organism encoding the GR polynucleotide; GR DESCRIPTION: Detailed description of a GR polynucleotide, with reference to FIG. 9; and

[0465] Table 11 comprises data of all sequences printed on the microarray of the microarray experiment, as described herein above with reference to FIG. 17 and include the following fields: PROBE SEQUENCE: the sequence that was printed on the chip PROBE TYPE: as described in detail in FIG. 17 in chip design section and summarized as follows: Known: published miRNA sequence; Known_mis1: similar to published miRNA sequence, but with 1 mismatch mutation on the miRNA sequence; Known_mis2: similar to published miRNA sequence, but with 2 mismatch mutations on the miRNA sequence; Known_mis3: similar to published miRNA sequence, but with 3 mismatch mutations on the miRNA sequence; Known_mis4: similar to published miRNA sequence, but with 6 mismatch mutations on regions other than the miRNA sequence; Predicted: predicted GAM RNA sequences; Mismatch: sequences that are similar to predicted GAM RNA sequences but with 2 mismatches; Edges1: left half of GAM RNA sequences; Edges2: right half of GAM RNA sequences extended with its hairpin precursor (palindrome); Control1: negative control; Control2: random sequences; Control3: tRNA; Control4: snoRNA; Control5: mRNA; Control6: other; GAM RNA SEQ ID/MIR NAME: GAM oligonucleotide using Rosetta Genomics Ltd. Nomenclature (see below) or published miRNA oligonucleotide terminology; GAM RNA SEQUENCE: Sequence (5′ to 3′) of the mature, “diced” GAM RNA; LIBRARY: the library name as defined in FIG. 17C; SIGNAL: Raw signal data for library; BACKGROUND Z-SCORE: Z-score of probe signal with respect to background, negative control signals; MISMATCH Z-SCORE: Z-score of probe signal with respect to its mismatch probe signal; and

[0466] Table 12 lists the GAM oligonucleotide sequences included in the present invention that were validated by laboratory means. For validated sequences of the present invention with more than one SEQ ID, the SEQ ID listed in the table may be arbitrarily chosen. The table includes the following fields: SEQUENCED: GAM oligonucleotides that were sequenced, as described hereinabove with reference to FIG. 13, are denoted by “1”; CHIP EXPRESSION: GAM oligonucleotide sequences that were validated by microarray experiments, as described hereinabove with reference to FIGS. 17A-C and 18A-C, are denoted by either “1” or “2”. A “chip expression” value of 2 refers to GAM oligonucleotide sequences whose intensity is more than 6 standard deviations above the background intensity and 2 standard deviations above the intensity of the mismatch probe. A “chip expression” value of 1 refers to miRNA oligonucleotide sequences, whose intensity was more than 4 standard deviations above the background intensity. Note that some miRNA oligonucleotide sequences were validated by both microarray experiments and sequencing; SIGNAL: a raw signal data; BACKGROUND Z-SCORE: a Z-score of probe signal with respect to background, negative control signals; MISMATCH Z-SCORE: a Z-score of probe signal with respect to its mismatch probe signal; and

[0467] Table 13 comprises sequence data of GAMs associated with different viral infections. Each row refers to a specific viral infections, and lists the SEQ ID NOs of GAMs that target genes associated with that viral infection. The table contains the following fields: ROW#: index of the row number; INFECTION NAME: name of the infecting organism; and SEQ ID NOs OF GAMS ASSOCIATED WITH INFECTION: list of sequence listing IDs of GAMs targeting genes that are associated with the specified infection.

[0468] Table 14 lists HIV-1 GAM oligonucleotides detected by the bioinformatics detection engine 100 of the present invention and include the following fields: GAM PRECURSOR SEQUENCE: Nucleotide sequence of the GAM precursor; GAM RNA SEQ: Nucleotide sequence of the GAM RNA; SOURCE: Source accession number encoding the GAM oligonucleotide; SRC-START OFFSET: Start offset of GAM precursor sequence relative to the SOURCE; STR: Orientation of the strand, “+” for the plus strand, “−” for the minus strand; TARGET: Target gene name; TARGET ORGANISM: organism encoding the target; TAR-REF ID: For human target genes-Target accession number (RefSeq, GenBank), otherwise, the location of the target gene on the genome annotation; BINDING SITE SEQUENCE: Nucleotide sequence of the target binding site;

[0469] The following conventions and abbreviations are used in the tables: The nucleotide “U” is represented as “T” in the tables, and;

[0470] GAM NAME or GR NAME are names for nucleotide sequences of the present invention given by Rosetta Genomics Ltd. nomenclature method. All GAMs/GRs are designated by GAMx/GRx where x is a unique ID.

[0471] GAM POS is a position of the GAM RNA on the GAM PRECURSOR RNA sequence. This position is the Dicer-cut location: A indicates a probable Dicer-cut location; B indicates an alternative Dicer-cut location.

[0472] All human nucleotide sequences of the present invention as well as their chromosomal location and strand orientation are derived from sequence records of UCSC-hg16 version, which is based on NCBI, Build34 database (April, 2003).

[0473] All viral sequences of the present invention as well as their genomic location are derived from NCBI, RefSeq database.

| GAM RNA SEQ | GAM SEQ-ID SEQUENCED CHIP_EXPRESSION | | | | | |
|---|---|---|---|---|---|---|
| CHIP_MM_Z_SCORE | CHIP_SIGNAL CHIP_BG_Z_SCORE | | | | | |
| TTTGCTGCCTCTCCCAGCTCCC | 1 | 0 | 2 | 4807 | 7.1600103 | 7.8129125 |
| CACTAGTAGTCTCTGGC | 2 | 0 | 1 | 4435 | 7.298171 | −1.4740227 |
| GCTAGTGCAGGGAAATCTTTGG | 3 | 0 | 1 | 2688 | 13.465069 | −4.7450089 |
| CGCTGCTCCGCCTTGTCCATAT | 4 | 0 | 1 | 3421.5 | 5.0435877 | 7.0959082 |
| CCCCACTGTCCCCGGAGCTGGC | 5 | 0 | 2 | 65518 | 22.799175 | 24.102064 |
| TGCCCTGGCTCTTCTTGTTCCA | 6 | 0 | 2 | 9983 | 8.4301682 | 12.997806 |
| ACATTCTCTGATTGGTGCCTCC | 7 | 0 | 2 | 6695 | 12.723179 | 6.4453721 |
| AATATTTCTTCTAAAGCCCTTT | 8 | 0 | 1 | 1018.5 | 4.8226123 | 2.7607162 |
| GTTGAGGTGATGCCAGCCCTGC | 9 | 0 | 2 | 3770.5 | 12.133699 | 8.0446234 |
| TCATGGGGCCACAGCTGCCAGC | 10 | 0 | 1 | 1294.5 | 5.4938359 | −3.9189341 |
| TGGGGGACACCAGTCTCTCTCT | 11 | 0 | 1 | 3739 | 4.4848466 | −2.4173083 |
| TGGTCCCCATCCTTGCGATT | 12 | 0 | 1 | 4035.5 | 4.9446163 | 6.7577944 |
| TCCTGGGAGGCGGAGGTTGCAG | 13 | 0 | 2 | 2269 | 6.121397 | 7.7621231 |
| AGCAAGACCAGGGTTTTGTGTT | 14 | 1 | 0 | | | |
| CCCAGGCTGGAGTGTAATGGTG | 15 | 0 | 2 | 3009 | 7.0731392 | 13.781642 |
| AGCCCCTTGGTACTGTCCT | 16 | 0 | 1 | 9378 | 18.433018 | 1.0831363 |
| CTCTGTTTGCCTGCTGCCATC | 17 | 0 | 2 | 15154 | 17.421993 | 10.804789 |
| GTCTCCCAGCCTACATCTTTCT | 18 | 0 | 1 | 7497 | 5.4792051 | −2.7626641 |
| CCCGGGTGGAGCCTGGGCTGTG | 19 | 1 | 0 | | | |
| TCACTGCAAGCTCCACCCTCCG | 20 | 0 | 2 | 3370 | 12.960393 | 9.7885542 |
| AACCCAGGAGGTGGAGGTTGTG | 21 | 0 | 1 | 2482.5 | 5.7054992 | 11.887776 |
| ACCTTGTGATCCACCTGCTTTG | 22 | 0 | 2 | 9350 | 10.149202 | 4.1434402 |
| CCGGCTACTCGGGAGGCTGACG | 23 | 0 | 1 | 3014 | 4.2986312 | 12.683091 |
| CTGCCCTGGGGGGCCTCCTTGC | 24 | 0 | 2 | 4817 | 12.989676 | 3.0056505 |
| GACCTCATGATCCACCTGCCTT | 25 | 0 | 2 | 5103 | 8.7762318 | 12.394208 |
| TTCTCTGTGCTGGGTCCTGAGG | 26 | 0 | 2 | 5272.5 | 8.1261625 | 9.2259359 |
| TGGGTAGTTTCCCCTGCCCTGC | 27 | 0 | 1 | 2944.5 | 4.1729741 | 10.251331 |
| AAAACAGCTTCCTCCAGTGGCTC | 28 | 0 | 1 | 2883 | 4.3991041 | 8.6778612 |
| TCACTGCACTCCAGCCTGGGTG | 29 | 0 | 2 | 65518 | 25.576307 | 20.417265 |
| CACCAGGAGGACAGGCCCCTAC | 30 | 0 | 1 | 1419 | 6.8781896 | −4.1960559 |
| ACGCCTGTAATCCCAGCACTTT | 31 | 0 | 2 | 6898 | 10.893064 | 18.948416 |
| TGACCTCCTTTCTCGACTAATT | 32 | 0 | 2 | 43651 | 10.281033 | 24.914602 |
| CCTGGCTCTGCCACTTACTGCC | 33 | 0 | 1 | 7371 | 5.4429383 | 8.8807936 |
| CTGCTCCCCAGCCTGCGCCTTT | 34 | 0 | 2 | 15059 | 11.630778 | 16.378119 |
| CATTGCACTCCAGCCTCCCATA | 35 | 0 | 2 | 10435 | 16.077471 | 9.6274853 |
| TTCTGATGGTTAAGTTCTGTCA | 36 | 1 | 0 | | | |
| CTGCAGTATGAGCTACCCAGGT | 37 | 0 | 1 | 671 | 4.2650108 | 3.2315347 |
| TACCATCCAAGCTGGTTTG | 38 | 0 | 1 | 1295 | 5.434535 | 7.9920983 |
| TGGTTTCCCTTTTGGCCTCTCC | 39 | 0 | 2 | 10935 | 11.08107 | 6.0971227 |
| ACTCTTTCTGCCCACAGG | 40 | 0 | 1 | 2806 | 5.5159893 | 5.3098421 |
| GGCTCACTGCAAACTGTGCCTC | 41 | 0 | 2 | 6270 | 10.347923 | 7.3339972 |
| ACCATTGCCCCCTAGTGTCTGT | 42 | 0 | 2 | 6005.5 | 16.011629 | 9.1782494 |
| CATTGCACTCCAGCCTGGGTGA | 43 | 0 | 2 | 65518 | 29.090452 | 30.6901 |
| TTCCTGGTCACTGCTGTTCCCT | 44 | 0 | 1 | 6518.5 | 5.1799512 | 10.527549 |
| GTCATGGTGCTAGCGGGAATGT | 45 | 0 | 2 | 23180 | 29.411751 | 28.092485 |
| GCGCCTGTGCCTCCTAA | 46 | 0 | 2 | 17094 | 12.760594 | 23.842529 |
| GCCCTCCTGGCAGGCAGTGATG | 47 | 0 | 1 | 3239.5 | 4.4799371 | 8.1225739 |
| CTGTAATCCCAGCTACCTGGGA | 48 | 0 | 1 | 902 | 4.8697472 | 5.3667827 |
| CAAGGGTTTGCATTGGCTTT | 49 | 0 | 1 | 2817.5 | 4.1292181 | 6.8459005 |
| GTTTCTCTGGGCTTGGCAT | 50 | 0 | 2 | 8298 | 10.689093 | 5.6611276 |
| CCTGGGAGGCTGAGGCTGCAGT | 51 | 0 | 1 | 2965.5 | 4.9182892 | 9.9978838 |
| CACTGCAAGCTCCACCTCCCGG | 52 | 0 | 2 | 7048 | 12.263177 | 14.099768 |
| CACTGCAGCCTCGACTTCCCTG | 53 | 0 | 1 | 8874 | 6.8341184 | 1.4886127E-2 |
| CCCGGGTTGTCCGCGCGTCCGG | 54 | 0 | 2 | 7828 | 9.6190052 | 4.963129 |
| TAGCACAGGGCTCCTCAACCCA | 55 | 0 | 2 | 1806 | 7.8335514 | 5.4125681 |
| TCCTCCCCAAAGCCCAGCCTGG | 56 | 0 | 1 | 3388 | 4.4911599 | 5.001718 |
| ACAAAGTGCCTCCTTTTAGAGT | 57 | 0 | 2 | 65518 | 13.412503 | 32.421429 |
| CCCGGGAGGTGGAGCTTGCAGT | 58 | 0 | 1 | 2094 | 5.0106125 | 8.1183786 |
| CACTGCACTCCAGCCTGGCGAC | 59 | 0 | 2 | 65518 | 21.073904 | 27.87985 |
| CTGGGCTCAAGTGATCCACCCA | 60 | 0 | 1 | 2046 | 4.3300858 | 5.4814286 |
| TCTTTGCTATTGTGAATAGTGC | 61 | 0 | 2 | 9707 | 23.491186 | 2.1807733 |
| GTATGTGCTGAGCTTTCCCCGC | 62 | 0 | 2 | 2572.5 | 6.3526735 | 4.20855 |
| ACAGATTCACTGCACTGGCCAT | 63 | 0 | 2 | 15207 | 9.5306025 | 12.396938 |
| CACCTGTAATCCCAGCACTTCA | 64 | 0 | 1 | 2591 | 5.442101 | 10.425298 |
| CCCCTACACACCCCTCTTGGCA | 65 | 0 | 2 | 13065.5 | 7.4358983 | 7.0756011 |
| TCCTTCCTCTGTCAGGCAGGCC | 66 | 0 | 2 | 10471 | 20.063852 | 2.295146 |
| CAGGCTGAAGTGCAGTGGTGTG | 67 | 0 | 2 | 2136 | 8.2628632 | 9.4549208 |
| CGGAGTCTTGCTATGTTGCCCA | 68 | 0 | 1 | 1781 | 5.2067318 | 5.238801 |
| GCCATCCTGATGACAGGCCACT | 69 | 0 | 1 | 3787 | 14.638888 | −0.88807422 |
| GCTCACTGCAACCTCCGCCTTC | 70 | 0 | 2 | 42294 | 20.673286 | 23.478565 |
| TCAAGCCATTCTCCTGCC | 71 | 0 | 2 | 7209.5 | 8.1129141 | 18.200718 |
| TATTCCAGCCGCTTGAGCTCGC | 72 | 0 | 2 | 4174 | 10.310376 | 2.8741286 |
| GCAGCCTGGGCAACAGAGTGAG | 73 | 0 | 1 | 2157 | 4.5432754 | 10.740927 |
| TCACCAGGCTGGAGTGCAGTGG | 74 | 0 | 2 | 4254.5 | 12.14083 | 15.720531 |
| TGTGACACTGGCCATCTGGGTT | 75 | 0 | 2 | 2784.5 | 11.518049 | 11.150477 |
| TGCAATCCCCGCCTCAACAGGA | 76 | 0 | 2 | 7725 | 6.5569119 | 20.462164 |
| TGCCTGTTGCCCACCTGATAAA | 77 | 0 | 2 | 5059 | 6.2758183 | 2.6550572 |
| TCACTGCAACCTCCACCTTCAG | 78 | 1 | 0 | | | |
| TGCGCGCCAGCTCCCAGGTTCG | 79 | 0 | 1 | 2256 | 5.0988479 | 6.3105674 |
| GCGGGGTTCCGTGCCCCAGAGT | 80 | 0 | 2 | 4053 | 7.8508492 | 13.874727 |
| TTGCCCAGGCTGGAGTGCAGTG | 81 | 0 | 2 | 30880.5 | 19.972326 | 29.117062 |
| ACCATTGCACTCTAGCCTGGGC | 82 | 0 | 2 | 24856 | 14.974783 | 26.093969 |
| CTAGAGTGCAGGTGTATGGTTA | 83 | 0 | 2 | 1669 | 7.7501578 | 4.8546963 |
| TGTGCTGGCCTTTGGTGACTTC | 84 | 0 | 2 | 65518 | 44.612064 | 26.016636 |
| GCCCTTTGTGTCTGGCTGGGGT | 85 | 0 | 2 | 5320 | 11.978069 | 10.261797 |
| GGAGGCGGAGGCTGCAGTGAGC | 86 | 0 | 2 | 2820.5 | 9.8273449 | 10.098513 |
| AGCTCATTGCAACCTCCGCCTC | 87 | 0 | 2 | 30089 | 17.692238 | 12.997955 |
| ACTGCACTCCTGCCTGGGTAAC | 88 | 0 | 2 | 46280 | 12.181033 | 26.546303 |
| TCGCGGGTTGCACATGGCCATC | 89 | 0 | 1 | 3200 | 5.0210557 | 12.488149 |
| ATTGCACTCCAGCCTGGGCGAC | 90 | 0 | 2 | 65518 | 24.324524 | 35.482765 |
| GTGGCCCCAGGGCCCTGTCTGG | 91 | 0 | 1 | 2103 | 4.3064132 | 5.4394917 |
| GGGCAGATCACCTGAGGTCAGG | 92 | 0 | 2 | 3840 | 11.253606 | 14.604554 |
| GTCCCCGCCGTCGCTCAGGCTG | 93 | 0 | 1 | 5861 | 5.2278342 | 1.3164479 |
| GGCCCCCGGAACGCTCTGTGACC | 94 | 0 | 1 | 8124 | 16.673124 | −2.3175049 |
| CGGTGCAAGGGTAGCGGCAGGC | 95 | 0 | 1 | 3417.5 | 4.6143517 | 0.71493685 |
| GCTCAAGCCTTCTGCCCACCTC | 96 | 0 | 1 | 1983.5 | 4.2462573 | 7.6688213 |
| GAGCCCAGGAGTTTGATGCTGC | 97 | 0 | 1 | 2802 | 4.1153555 | 12.440318 |
| TGAGTCAGCCTTGGCAGCCCCT | 98 | 0 | 1 | 4321 | 9.5403223 | −0.46607512 |
| TTTCACCATCTTGGCCAGGCTG | 99 | 0 | 1 | 1450.5 | 5.8872299 | 6.5283771 |
| GGACACGTGGCTGAAGGCGGCC | 100 | 0 | 2 | 3613 | 11.24597 | 5.512249 |
| CGGGGTTCATCCATGCTGTGGC | 101 | 0 | 1 | 3762 | 4.0037775 | 5.9347458 |
| AGTCCTGGCCTGGGGGACC | 102 | 0 | 1 | 4747 | 5.1204491 | 11.736219 |
| GCTGCACCCCAGCCTGGGTAAC | 103 | 0 | 2 | 7858 | 6.2366548 | 20.271864 |
| ATGCAGCCCCCTGGTGCCCGGG | 104 | 0 | 2 | 14258.5 | 14.995996 | 10.545995 |
| TTAGGGTTACACCAGCCTCCTG | 105 | 0 | 2 | 12631 | 6.595377 | 2.2383578 |
| GTGGCTCACGCCTGTAATCCCA | 106 | 0 | 2 | 20268 | 15.527308 | 18.321419 |
| CCATTGCACTCCATCCTGGGCA | 107 | 0 | 2 | 37862.5 | 18.121622 | 18.236954 |
| GACCTTGTGATCTGCCTGCCTT | 108 | 0 | 2 | 7752 | 23.901592 | 13.466584 |
| TGTCCCCACCCAAATCTCATCT | 109 | 0 | 1 | 2845.5 | 5.6470904 | 0.60507727 |
| ACCTGTCTGCCTCCCACCATCAA | 110 | 0 | 2 | 6789 | 17.796188 | 8.0814438 |
| GTTGGCCAGGCTGGTCTCAAAC | 111 | 0 | 2 | 1993.5 | 6.2810149 | 2.2314062 |
| CAGCTGTTCATTGTTGCCACCC | 112 | 0 | 1 | 3205.5 | 5.7638865 | −1.2926182 |
| ATAGCAGCGCTGGCCCTCTGCC | 113 | 0 | 2 | 11135.5 | 8.3489428 | 16.26886 |
| AGTGGCCTGGAGCCCCGCCTGG | 114 | 0 | 2 | 64840 | 12.445142 | 20.585953 |
| GGCCGTCAGCCCCGATTTGCCA | 115 | 0 | 1 | 3015.5 | 4.7711444 | 4.6092601 |
| GCTGACCCCTACAGGTTGTGTT | 116 | 0 | 2 | 7867 | 6.2393546 | 19.308796 |
| CCTGGCTCCTACGGGTATTTTG | 117 | 0 | 1 | 3308 | 4.5325184 | 0.97975397 |
| CTCAGCTTGGCCTGGACGTAGC | 118 | 0 | 1 | 4410 | 4.8741584 | 14.490013 |
| CTCCTTGCCATTTCTTTTC | 119 | 0 | 2 | 5430.5 | 13.120463 | 6.2777233 |
| CCCAGGAGGCGGAGGTTGCAGT | 120 | 0 | 2 | 2787.5 | 6.7205362 | 12.188313 |
| CCCAGCAGTAGAGCTCATATGG | 121 | 0 | 1 | 4022 | 20.382507 | −2.8780954 |
| TCTCGATCTCCTGACCTTGTGA | 122 | 0 | 2 | 7138 | 10.617272 | 15.065091 |
| CACCATGCCCGGCTAATTTTGG | 123 | 0 | 2 | 5040 | 7.316802 | 9.882267 |
| TAGCCCTTCTCCACCTCGCCC | 124 | 0 | 2 | 8140 | 13.744523 | 2.9828069 |
| CCTGTGCTTGGCCAGAGAGGTT | 125 | 0 | 1 | 3994 | 4.3371038 | 14.052099 |
| CATGCCTGTAATCCCAGCACTT | 126 | 0 | 2 | 10382 | 14.765577 | 17.657774 |
| CCTGGGCCTCTCAAAGTGCTGG | 127 | 0 | 2 | 7478 | 6.5816064 | 16.968868 |
| GTCCCCGACGTTTGGCTTGATG | 128 | 0 | 1 | 3207 | 4.4545999 | 5.6476693 |
| CTGCACTGACTTCCCCGGCTGC | 129 | 0 | 1 | 2702 | 4.0437126 | 7.0977674 |
| TCCTGGGATCAAGTGATCCTCC | 130 | 0 | 1 | 2812 | 4.0140038 | −0.25205359 |
| TTGCTAGTGTTTGGTTGATGGT | 131 | 0 | 2 | 13321 | 29.278065 | 21.353354 |
| ATCATTATCCTCCTATTTGCCT | 132 | 0 | 2 | 2916 | 8.0566654 | 5.4937286 |
| TGCTCTGATTTTTGCCCCAGCT | 133 | 0 | 2 | 10768.5 | 14.230415 | 7.0602937 |
| TCTGTGTCTCCACCCAAATCTCA | 134 | 0 | 1 | 3991.5 | 4.6330791 | −6.5020531E-2 |
| TACTATGGTTATTATCCCTCTCC | 135 | 0 | 1 | 1264 | 4.0216489 | 1.9981372 |
| GGAGTGCAGTGGCGTGATCTCG | 136 | 0 | 2 | 3942.5 | 10.745003 | 10.263955 |
| TCGAAGGCCTCTTGCTCCTCGA | 137 | 0 | 1 | 1306 | 4.9944282 | 4.6041131 |
| GTATTTGGAAACCACCAGTGCC | 138 | 0 | 2 | 1363 | 7.8097911 | 4.1715727 |
| TTGCCCAGGCTGGAGTGCAGTA | 139 | 0 | 2 | 11492 | 11.738238 | 20.495441 |
| CTGTCCCTGAGCAACTCCTGTT | 140 | 0 | 2 | 2516 | 6.2773986 | 8.6073799 |
| AGCGTGTTGGGAGGAGCTGCAG | 141 | 0 | 2 | 1410 | 9.0065594 | 8.8227701 |
| CCGGGCTGGAGTGCAATGGCTC | 142 | 0 | 2 | 3585.5 | 7.393702 | 15.612262 |
| GGGCGTGGAGCTGGAATGATGT | 143 | 1 | 0 | | | |
| GCTGAACGAGCTGGCCAAGTTC | 144 | 0 | 2 | 9451 | 6.6551905 | 19.321331 |
| CCACTGCACTCCAGCCTGCCAA | 145 | 0 | 2 | 65518 | 20.333113 | 17.882483 |
| TCTCTAGTCCTGCCTCCCC | 146 | 0 | 2 | 12753 | 19.169752 | 7.0407801 |
| CACTGCACTGCAGCCTGGAGAC | 147 | 0 | 1 | 6050 | 5.6199274 | 17.140821 |
| ATGGGGTGAGTGACGCCCTC | 148 | 0 | 1 | 1899 | 5.3449593 | 1.7462343 |
| AGCACGGTGGGTTTGGCTGGCA | 149 | 0 | 2 | 8532 | 8.91047 | 7.0811062 |
| ATGCCACTGCACTTCAGCTTGG | 150 | 0 | 2 | 7484.5 | 6.5842552 | 19.414671 |
| ACATCCTCCCGATCTACTGGCT | 151 | 0 | 1 | 3651 | 4.4286699 | 1.3539879 |
| ACTGTCCGGGACAGGCCCATCC | 152 | 0 | 2 | 1271 | 9.39785 | 2.6795073 |
| TGACAATGAGGCCCTCCACAAA | 153 | 0 | 1 | 1679 | 5.1023388 | 2.1864455 |
| AAGTGCTAGTGAGTCTATTGTA | 154 | 0 | 2 | 15263 | 30.581371 | 17.914198 |
| GACCTCGTGATCCGCCTGCTTT | 155 | 0 | 2 | 4080.5 | 7.6009617 | 13.947659 |
| TGACCTCCTGGGCTCAAGCC | 156 | 0 | 1 | 1564.5 | 4.9039502 | −9.6304779 |
| CTCGACTTCCCTGGCTTGCGTGA | 157 | 0 | 2 | 6890 | 6.5380254 | 11.584653 |
| AGAGATGGGGTTTCACCACGTT | 158 | 0 | 2 | 2101.5 | 7.7702832 | 10.676204 |
| GGTGGCAGTAGCACTGGGCCTG | 159 | 0 | 2 | 1077 | 6.041307 | 2.6370835 |
| GTGACCTGGCCGCCTAAACCCA | 160 | 0 | 1 | 5941.5 | 5.6531525 | 18.527802 |
| AATTGCACGGTATCCATCTGTA | 161 | 0 | 2 | 18407 | 8.3120737 | 26.950815 |
| CTGTCCTGTGCTTTTTACTGTC | 162 | 0 | 1 | 5185 | 5.3258371 | 1.2787153 |
| CCTGCCTACTGAGTTTTATATT | 163 | 0 | 1 | 3745 | 12.145576 | 4.7314309E-2 |
| GCGGCGGCGGTAGCAAAAATGA | 164 | 0 | 2 | 65518 | 27.5298 | 22.089998 |
| CTGGCCACTGCACCTCTTCCT | 165 | 0 | 1 | 3912 | 5.3084121 | 3.5621116 |
| TCAGCCTCCTCCACCCCAGAGT | 166 | 0 | 2 | 6996.5 | 14.03341 | 7.0927162 |
| AGCAGCAGTATCCTTCCCCGGC | 167 | 0 | 1 | 3825 | 4.4749479 | 9.2136803 |
| CCAGGAGGTGGAGGTTGCGGTG | 168 | 0 | 2 | 2398 | 6.4942522 | 7.9789319 |
| GGCTGGCCCCATCCAGGCTGGCA | 169 | 0 | 2 | 65518 | 10.117671 | 10.864906 |
| TGCAGGTTGCTGGTCTGATCTC | 170 | 0 | 2 | 8079 | 24.743416 | 17.869699 |
| TGGTGCAGCGTGTGGTGGCTCT | 171 | 0 | 2 | 4082.5 | 9.6208868 | 12.887189 |
| TTGCCTTCCTGCCCAGCTTCTG | 172 | 0 | 2 | 5405 | 6.7744174 | 12.840696 |
| CTCTTTGGTTGGTTCCTGATGC | 173 | 0 | 2 | 9661 | 15.128378 | 18.743273 |
| TCACCGAGGCTGGAGTGCAGTG | 174 | 0 | 2 | 3619 | 11.230327 | 15.315854 |
| GCGTCCGGCCTCTCTCGCTCCCG | 175 | 0 | 1 | 3319 | 5.4790416 | 5.205163 |
| CGGTGCCTCCTCCAGTGTTGCT | 176 | 0 | 2 | 8559 | 10.886886 | 9.833169 |
| CAGGCTGGAGTGCAGTGGCGCT | 177 | 0 | 2 | 7523 | 15.30444 | 19.097713 |
| AGGCACCACATCTCCCTCCCC | 178 | 0 | 1 | 2510.5 | 5.2200365 | 3.5559428 |
| GATATGGAAGGCCATGCC | 179 | 0 | 1 | 1268 | 6.3048329 | 0.48396423 |
| TAGAACTATGGCTATGTGCCA | 180 | 0 | 2 | 2523.5 | 18.843672 | 7.4688845 |
| GTTGCCTAGGCTGGTCTTGAAC | 181 | 0 | 2 | 4155 | 10.291553 | 9.7640581 |
| AGCACCTCCAGAGCTTGAAGCT | 182 | 0 | 2 | 7872 | 6.2408533 | 20.331314 |
| GGGTTGGCATCAGGGTTCTGTG | 183 | 0 | 1 | 4777 | 4.5148683 | 8.4523115 |
| ACTGCACTGCAGCCTGGCCAAC | 184 | 0 | 2 | 10584 | 7.3915148 | 12.856659 |
| TTCACTGCAACCTCCGCCTCCC | 185 | 0 | 2 | 32044.5 | 19.90851 | 19.617628 |
| CTCACTGCAACCTCCGTCTCCC | 186 | 0 | 2 | 36527.5 | 21.028955 | 23.176895 |
| ATATGCAGTCTCTTGCCCTTCT | 187 | 0 | 2 | 18270 | 7.3851495 | 16.705791 |
| GGCCTGTAATCCCAGCTACTCA | 188 | 0 | 1 | 3140.5 | 5.8857031 | 12.328485 |
| AGCAGAGTGCCCATCCCGGA | 189 | 0 | 1 | 1287 | 5.9567142 | 7.4900131 |
| CTCACTGCAAGCTCTGCCTCCA | 190 | 0 | 2 | 18388.5 | 17.632027 | 21.920879 |
| GTGGTAGCTCCAGGCTGTCTGA | 191 | 0 | 2 | 10711 | 30.533655 | 22.150589 |
| TGGCGGCGTGTGGACTGAGGAC | 192 | 0 | 2 | 15121 | 9.9330997 | 18.565649 |
| CCCCTCAGTTTGCTAGTATTTT | 193 | 0 | 1 | 11735 | 24.905746 | 1.1986766 |
| ACTGCCCTCCAGCCTGGGTGAC | 194 | 0 | 2 | 21572 | 13.925464 | 26.790289 |
| GTTGGTCTTCATTAAATGCTTT | 195 | 0 | 2 | 3499.5 | 17.153486 | 5.8892236 |
| AGCTTTGGTTGCCATGATCTGA | 196 | 0 | 1 | 1665 | 5.5821729 | 10.27639 |
| CATAATTTCTACCAGGGCCATA | 197 | 0 | 1 | 886 | 5.792675 | 1.0480881 |
| TCCTTGTGCTGAGGGTGTTGCT | 198 | 0 | 1 | 2546 | 5.148253 | 3.1969757 |
| TCTGGCTTCCCTCTGTTCTGGG | 199 | 0 | 1 | 6739 | 9.2949047 | 0.96471214 |
| TCCCCCAGGCTGGAGTGCAGTG | 200 | 0 | 2 | 7443 | 15.029393 | 17.058321 |
| CTTCATCAGCTGGCTTACTGTT | 201 | 0 | 1 | 2296.5 | 4.4541421 | −4.1260543 |
| TGCGTTCCAGTTGCTGCCAGGC | 202 | 0 | 2 | 5079 | 11.194171 | 5.7294831 |
| CCTGGAGGCGGAGGTTGCAGTG | 203 | 0 | 2 | 3559.5 | 8.169879 | 12.004289 |
| CCTCTGCACCAACCTGTCAAGA | 204 | 0 | 2 | 2057.5 | 11.429537 | 3.11975 |
| CACTGCAGCCTCCATCTCTGGG | 205 | 0 | 2 | 4050 | 6.9180322 | 10.574921 |
| GGTGCCCCATCGCGGGTGGCTG | 206 | 0 | 2 | 27077 | 14.316696 | 22.61035 |
| GCAGGGAACTGGCTGGGCTTT | 207 | 0 | 2 | 16084 | 7.1124773 | 22.951672 |
| CCGTCCCCGGTGCTGCCTGCGC | 208 | 0 | 2 | 48514 | 9.4747534 | 7.9190497 |
| ATTAGGAGAGTGGGTGCTAAGT | 209 | 1 | 0 | | | |
| ACCCAGGCTGGAGTGCAGTGAT | 210 | 0 | 2 | 1941.5 | 7.7255301 | 11.090164 |
| CACTGCACTCCAGCTTGGGCAA | 211 | 0 | 2 | 65518 | 28.324137 | 30.232615 |
| CAGAGCTGGCTTCATGGGTGTGC | 212 | 0 | 2 | 5653 | 6.236114 | 16.840534 |
| TCTTCCTGTCAATGAGAATTAA | 213 | 0 | 1 | 3699 | 5.0892124 | 3.8346827 |
| GCAGGCGGAGGTTGCAGTGAGC | 214 | 0 | 1 | 1579 | 4.3141651 | 8.2424784 |
| GTCTTTTGCTAGCCAGAGAGCT | 215 | 0 | 2 | 2153 | 8.0217466 | 10.245297 |
| CACTGCACTCCAGCCTGGGCAA | 216 | 0 | 2 | 65518 | 31.916103 | 33.140068 |
| GCCCCCGTAGTAGATGAGGCGC | 217 | 0 | 2 | 16235 | 27.099997 | 7.9834018 |
| GGTCGCTGTGTAGGTTCAGCTA | 218 | 0 | 1 | 3938.5 | 5.7133183 | 2.4790351 |
| TCTGGCTCTGGAGTCCACCTGC | 219 | 0 | 2 | 3242.5 | 6.90412 | 4.9786406 |
| GACAGCTCCAGCTCCTCCAGGC | 220 | 0 | 1 | 1845 | 4.1900787 | 8.3998461 |
| TCACTACAACCTCCGCCTCCTG | 221 | 0 | 2 | 28515 | 18.559631 | 13.999067 |
| ACCCAGGCTGGCGTGCAGTGGC | 222 | 0 | 1 | 1413.5 | 5.045722 | 6.4478707 |
| CCTGTGGTCCCTGTCTGTGCCT | 223 | 0 | 2 | 17748 | 13.149311 | 10.342139 |
| ATTGCACTCCAGCCTGGGCAAC | 224 | 0 | 2 | 65518 | 33.306091 | 35.513947 |
| TCAAGCAATTCTCCTGCCTCGGC | 225 | 0 | 2 | 10092.5 | 16.702658 | 19.82888 |
| AATGCTGAGTCCTGTGAGTCTT | 226 | 0 | 1 | 923 | 4.3064132 | 5.5901709 |
| AGTCGCTGTTGGTCGTGGCACT | 227 | 0 | 2 | 2426.5 | 6.5083675 | 3.8499751 |
| CTGCAAGCTACCCCTAGCATCA | 228 | 0 | 1 | 1187 | 5.359941 | 7.49787 |
| AGGACCTGTCCCCTGGCCCACT | 229 | 0 | 2 | 65518 | 15.796532 | 15.770715 |
| GCAGGCATTAGCCCCCATGGCT | 230 | 0 | 1 | 2898 | 5.201571 | 11.64039 |
| AGGCCAAGAAGGAAGCAGAGG | 231 | 1 | 0 | | | |
| CTTCCTGCCTCTCGCCGCCCGC | 232 | 0 | 2 | 7982 | 10.846725 | 2.7860351 |
| ATTGTTGCCCATGTTTTTATTT | 233 | 1 | 0 | | | |
| CTGGCAGGTTATAGAGCTGCCC | 234 | 0 | 2 | 1302 | 7.096612 | 5.6983724 |
| TCTCCACAGCTGGCCCCCAAGA | 235 | 0 | 2 | 19483.5 | 23.591568 | 26.742323 |
| GGGTTGGATCCTGGTGGCTGCC | 236 | 0 | 1 | 2919 | 4.99542 | −1.0961211 |
| CCTTTTGTCCTGCTTGGTTTCG | 237 | 0 | 1 | 5359.5 | 5.4283695 | 7.2327213 |
| TGGTGCTTGTGGAGCTGGTGCT | 238 | 0 | 1 | 6931 | 22.109066 | −15.237776 |
| CAGCCTGCATCATCTGCAGC | 239 | 0 | 1 | 1052.5 | 6.097331 | −9.9813395 |
| TCACTGCAATCTCAGCCTCCTG | 240 | 0 | 2 | 13609 | 16.304766 | 12.973942 |
| TGGGTGGAGCAGGCTGGTGCTT | 241 | 0 | 1 | 1915.5 | 4.7277126 | 2.129667 |
| CTGAGATAGGACTCTGCTGGCT | 242 | 0 | 1 | 3797.5 | 4.0238738 | −0.4093681 |
| GCCTATCTGTCAAATTTCTCTG | 243 | 0 | 1 | 2514 | 5.7133183 | −1.7767694 |
| TTCTTCTGCCCCTTGCCTGACA | 244 | 0 | 2 | 10593.5 | 16.647232 | 9.2061243 |
| ACTGCACTCCAGCCTGGGCAAC | 245 | 0 | 2 | 65518 | 37.057747 | 34.517231 |
| TGCCTAGGCTGGAGTGCAATGG | 246 | 0 | 1 | 1842 | 4.9093466 | 7.6070156 |
| CTGGCCTGGCGCAGTGGCTCAC | 247 | 0 | 1 | 3273.5 | 4.5061736 | −1.0821109 |
| CTCCTTCTGGGCCTGGCAGTGG | 248 | 0 | 2 | 17180 | 8.0816298 | 15.63814 |
| CAAGGTGCCATGCTGGGCGGGG | 249 | 0 | 2 | 2339 | 11.124713 | 9.2460661 |
| AGTGGGCCGGACAGCCCAGGCC | 250 | 0 | 1 | 3009 | 10.806414 | −0.20481651 |
| TGCTTATATTTCATTGGCCCAA | 251 | 0 | 1 | 1737 | 5.1939707 | 0.85535181 |
| CCAAAGTGCTAGGATTACAGGC | 252 | 0 | 2 | 1345 | 8.5948114 | 8.4856577 |
| CGGCACTGTAGTCTGGCTGGGA | 253 | 0 | 2 | 3297 | 6.7212648 | 9.1534166 |
| TGCCGCAAGTACTGCTGCCTGT | 254 | 0 | 1 | 1966.5 | 5.8571658 | 3.7118392 |
| GATGTCGTGATCCACCCGCCTT | 255 | 0 | 2 | 3425 | 7.313684 | 10.200798 |
| CGTGCCACTGCACTCTAGCCTG | 256 | 0 | 2 | 27042.5 | 12.034669 | 26.515484 |
| CATGGCAGCTCCTCCAGTGTGA | 257 | 0 | 2 | 2256.5 | 6.8781896 | 5.7773385 |
| GGAATCCTGCCAGCTCTGCCCC | 258 | 0 | 1 | 13916 | 12.002161 | 2.1075698E-2 |
| CCAGTACGTTGCTCAGCTCCTC | 259 | 0 | 2 | 10610.5 | 11.484417 | 2.7025924 |
| TGTCTCCCCACTGGTCTTCCAG | 260 | 0 | 1 | 7039 | 5.6089306 | 15.167439 |
| CTGGCCTAAAAATACAGAACAA | 261 | 0 | 1 | 8784.5 | 6.609952 | −0.46130967 |
| CAGGCTCTTCCCTCTGGCCAAG | 262 | 0 | 2 | 25089 | 10.865691 | 11.601097 |
| ACTCTGGCCATCTTGGACCTTG | 263 | 0 | 1 | 4235 | 5.8999434 | 14.697995 |
| CGGCGAGCGGGACCTGCGCCTG | 264 | 0 | 2 | 13179 | 8.0060148 | 5.5586901 |
| TGTGCCTGTTCCCACTTTGCCT | 265 | 0 | 1 | 2611 | 5.0901771 | 2.5660698 |
| CTCACTGCAACCTCCGCCTCCT | 266 | 0 | 2 | 62403 | 22.993574 | 18.170233 |
| AGGCTCCCTGAATCGCCCGTTC | 267 | 0 | 1 | 3782.5 | 5.0892124 | −3.9663608 |
| CTCTGCCTCCCAGGTTCAAGCG | 268 | 0 | 2 | 20999.5 | 17.079414 | 18.674911 |
| GCTAGTGTTTGCCAGCGTAGCC | 269 | 0 | 1 | 825 | 4.6319594 | 4.9597144 |
| GGAGTTCCAGACCAGACTGGCC | 270 | 0 | 1 | 2430 | 4.3969355 | 2.4696999 |
| CTCAGCTCATCCACTAAATCCC | 271 | 1 | 0 | | | |
| ATTGCACTCCGGCCTGGGTGAC | 272 | 0 | 2 | 15397 | 13.126676 | 25.123175 |
| CAACATGGTGAAACCCCGTCTC | 273 | 0 | 2 | 8706 | 11.270616 | 12.27146 |
| GTGCCGACGCTCCAGCACCATCC | 274 | 0 | 1 | 1384 | 5.1635141 | 3.8417749 |
| ACTGTACTCCAGCCTGGTGGCA | 275 | 0 | 2 | 9608.5 | 7.5143518 | 22.582787 |
| GTGACAGTGAATCTAGACAGAC | 276 | 1 | 0 | | | |
| TCACTGCAACCTCCGCCTGCTG | 277 | 0 | 2 | 39092.5 | 19.973478 | 20.767599 |
| TCTGCGGTCCCCTTCTCGCCCT | 278 | 0 | 2 | 10190 | 10.797435 | 8.6208448 |
| CAGGCTGGAGTGCAGTGGTGCC | 279 | 0 | 2 | 8766 | 16.20937 | 18.915073 |
| CCTCTTTCACCGTGCCTGTCCC | 280 | 0 | 2 | 8800 | 16.616077 | 5.438931 |
| CTGAGCTCACGCCATTCTCCTT | 281 | 0 | 2 | 10524 | 16.186312 | 18.177279 |
| GGTGATCCACCAGCCTCGGCCT | 282 | 0 | 2 | 5029 | 8.9257526 | 7.78508 |
| TGACCCCTATATCCTGTTTCTT | 283 | 0 | 2 | 6691 | 6.3185239 | 5.4931335 |
| ACTTCCCACCCCTCCAG | 284 | 0 | 1 | 3259.5 | 4.1611338 | 12.380153 |
| CTTTATGAAAACCTGAATTATG | 285 | 0 | 2 | 3768 | 23.111034 | 14.960108 |
| CGGCTCACTGCAGCTCCGCCTC | 286 | 0 | 2 | 14047 | 17.9716 | 6.964889 |
| GGCCTGTGGTGCGCTATTTCAG | 287 | 0 | 1 | 3159 | 4.7927871 | 10.763789 |
| CTTGCTTTCAGTCTCGGCCTCA | 288 | 0 | 1 | 1763 | 4.0555487 | 1.144424 |
| ATCACTTTGAGTCCAGGAGTTT | 289 | 0 | 2 | 7335 | 6.5335536 | 19.718058 |
| GAGGCAGAGGTTGCAGTGAGCT | 290 | 0 | 2 | 2657 | 8.4238987 | 11.530189 |
| CTGGCCAAGATGGTGAAACCCC | 291 | 0 | 1 | 29538 | 10.824452 | 1.9062781 |
| GCCTGGGTCCACCGCTCGCGCT | 292 | 0 | 2 | 7299 | 6.5360622 | 9.6849566 |
| GAGGCCACTGTCCCTGCCTTCC | 293 | 0 | 1 | 3343.5 | 4.653738 | 9.7698135 |
| ACCCGCCGCACGTCCAGGCTGA | 294 | 0 | 1 | 5018 | 5.1787949 | −1.1583936 |
| TGGCTTCCCCGGAGTGACATGT | 295 | 0 | 2 | 13507.5 | 16.857716 | 15.057426 |
| GGAGGAGCATGAGAGGGTAGTG | 296 | 0 | 1 | 1193 | 4.0301342 | −18.279354 |
| GCTGTCCAGCCCTTGTTCACCT | 297 | 0 | 1 | 2068 | 6.8781896 | −1.7931671 |
| GCCTCCAGGTCGGTCTTTCTCT | 298 | 0 | 2 | 7529 | 13.077046 | 6.7496343 |
| AGGGAAATCTCAGCTCTAAAAT | 299 | 0 | 2 | 8991 | 16.352005 | 20.399546 |
| CTCAGTGCAACCTCCGCCTACT | 300 | 0 | 2 | 4516 | 8.8905106 | 13.512998 |
| CCGGTCTGTGTACTTGCTGGCC | 301 | 0 | 1 | 10835 | 16.283325 | 0.65039492 |
| CACTGTCTTCCTTTGGCTCCTC | 302 | 0 | 2 | 8497 | 10.860129 | 11.864268 |
| CACTGCACTCCAGCCTGGGAGA | 303 | 0 | 2 | 65518 | 22.925808 | 34.725494 |
| TACTGTGTGCCCAGCCGAGCTG | 304 | 0 | 1 | 1632 | 5.7854853 | 4.7016063 |
| GCCCAGATCTCCTGACCCTCAG | 305 | 0 | 1 | 4383 | 4.3306851 | 5.3791971 |
| TCACTTCCCAGACGGGGTGGCA | 306 | 0 | 1 | 1907 | 4.2122374 | 7.5382385 |
| TGCTGCCCTAAGACCACCTT | 307 | 0 | 2 | 4950 | 11.124713 | 13.249466 |
| ACACTGATGTTGGCCCTGGTCA | 308 | 0 | 2 | 6128 | 7.7381911 | 9.9548664 |
| ATGGCTGCCTGGGCGCTGGCCG | 309 | 0 | 2 | 65518 | 12.023874 | 4.5536995 |
| TTTCTCCTCATGACTGGTTGTG | 310 | 0 | 1 | 2943 | 4.1956687 | 3.8969367 |
| AAAGCGCTTCCCTTTGGAGCGT | 311 | 0 | 1 | 6099 | 5.6389537 | 17.599831 |
| AACGCCCAGCCTTGATCAAATG | 312 | 0 | 1 | 983 | 5.3299565 | 0.62059402 |
| TGAGCACATGCCAGCCCTTCTC | 313 | 0 | 2 | 7638 | 17.835676 | 6.0798554 |
| GACCTCGTGATCTGCCGGCCTT | 314 | 0 | 2 | 2588 | 16.253777 | 11.608788 |
| TGGCTAACAAGGTGAAACCCCG | 315 | 0 | 2 | 22025 | 9.0206518 | 5.915132 |
| TGTGCTCTGACTTTCTCCTGGT | 316 | 0 | 2 | 6627 | 6.2784839 | 12.047 |
| TCTAGGTAGGCTGTGTGTGGAA | 317 | 0 | 1 | 20581 | 30.987326 | −4.863667 |
| GAAGTGTAGTCTTGAGCCCCCA | 318 | 0 | 1 | 2564 | 9.2326555 | −0.1792703 |
| CCTGCCTCCCCATCAGTTATACA | 319 | 0 | 1 | 7820.5 | 15.964743 | 1.1131122 |
| ACCACTGCACTCCAGTCTGGGC | 320 | 0 | 2 | 65518 | 19.886633 | 30.113441 |
| CTGCTCTGGTTTCCTCTGTC | 321 | 0 | 2 | 7506.5 | 7.7015729 | 15.622507 |
| GGGGCATTGTGTCTGGGTTCCT | 322 | 0 | 1 | 2912 | 5.6041431 | 2.0277293 |
| GCTGGCAGACTTCCTCTGGAAC | 323 | 0 | 2 | 1985 | 9.0118723 | 2.4699371 |
| CCTCCAACCATAGGTCCAGGGG | 324 | 0 | 1 | 1203.5 | 6.5887036 | −0.78580427 |
| TCTCCTGGAGCCCAGATGCTGG | 325 | 0 | 1 | 2100.5 | 4.8226123 | 5.4119086 |
| CTCCTTGCTGGTCTGGTGTAAT | 326 | 0 | 2 | 12887 | 13.768332 | 6.9087734 |
| AAAGTGCTGGTATTACAGGTGT | 327 | 0 | 2 | 1430 | 8.6389112 | 8.4515057 |
| CTCCAGTTGGCCCCAGTTGGTT | 328 | 0 | 2 | 10654 | 12.255802 | 17.910707 |
| CCTCACTCAGGTTTGGACCCTG | 329 | 0 | 2 | 7301 | 15.895414 | 5.3846102 |
| ACTGCACTCCAGCCTTCCAG | 330 | 0 | 2 | 65518 | 16.869547 | 28.85684 |
| TGCCTAGCCAAGTCCAGTATTT | 331 | 0 | 2 | 5823 | 17.976177 | 16.478537 |
| CGCATGAGACCTGCCGGCCATC | 332 | 0 | 1 | 2073 | 9.8048887 | −3.4777019 |
| ATGCCCCTGGCCTGGGGAACAT | 333 | 0 | 1 | 5475 | 5.3843775 | 17.659876 |
| TCTCGCTCTGTCGCCCAGGCTG | 334 | 0 | 2 | 8558 | 11.966861 | 10.057902 |
| TAGTGCCCTCCCCTTTGGGATA | 335 | 0 | 2 | 3843 | 11.037247 | 12.832376 |
| GGCTCCTGGGGGTGCTCCTGCC | 336 | 0 | 2 | 9895 | 9.94205 | 8.883275 |
| AATGGGGTAGTGGGCAGCCTGG | 337 | 0 | 2 | 7138 | 14.468472 | 13.397085 |
| AACCCAGGAGGCGGAGGTTGTG | 338 | 0 | 2 | 3802 | 7.9819422 | 12.273234 |
| GGCTCACTGCAACTTCCGCCTC | 339 | 0 | 2 | 31704 | 19.028578 | 16.190495 |
| CCCGGAGGCAGAGGTTGCAGTG | 340 | 0 | 1 | 1643.5 | 5.8650842 | 6.6221547 |
| CGCCTGGCCCCCAGTACTTTGT | 341 | 0 | 2 | 65518 | 14.386203 | 22.674049 |
| TGGCTGTACATTGGAATTATCT | 342 | 0 | 1 | 4116 | 4.8355722 | 0.55707508 |
| CGTGCGCCTCAGCCTCGTGCGC | 343 | 0 | 1 | 3284 | 4.5142207 | 12.660418 |
| TCAGAATATGGCTAGGAGTGCT | 344 | 0 | 2 | 1830 | 9.6709318 | 10.3449 |
| CAGGCTGGAGTGCAGTGGGGCG | 345 | 0 | 2 | 4013 | 11.398844 | 15.757032 |
| TACGCCTGTAATCCCAGCACTT | 346 | 0 | 2 | 5888.5 | 12.35752 | 15.497684 |
| TGTCCCTGCAAATAACAT | 347 | 0 | 1 | 1509.5 | 5.3898416 | 8.1098919 |
| CTTCCCCAGGCTGGTCTGTAT | 348 | 0 | 1 | 3686 | 4.3019638 | −0.81996107 |
| CATGTTGGTGTGCTGCACCCGT | 349 | 0 | 2 | 3866 | 8.1607409 | 11.896873 |
| AGGCTGTAGTGCATGTGCTATG | 350 | 0 | 2 | 17379.5 | 8.1088619 | 26.406704 |
| ACTGCGCTCCAGCCTGGGTGAC | 351 | 0 | 2 | 46098 | 18.273163 | 32.816708 |
| AGTCCCCCTCTGAGCCCAGGGA | 352 | 0 | 1 | 5483 | 5.3878217 | −0.95005888 |
| TAGGTATAGGATTCTAGGTTGG | 353 | 0 | 2 | 1295 | 6.1877456 | 2.5713561 |
| CAATTCCCAGCTGCCGGGCTGC | 354 | 0 | 2 | 7442 | 8.735631 | 7.0616617 |
| CCATCCCTTGGAAGCTGGTTTTA | 355 | 0 | 2 | 4197 | 11.864914 | 11.215641 |
| GTGCTCCCTCCTTCCTCAAGGA | 356 | 0 | 2 | 3789 | 7.298171 | 9.6469736 |
| CCAAAGTGCTAGGATTACAGGT | 357 | 0 | 1 | 1054 | 4.3064132 | 4.0962029 |
| TGGATTCACACCATTCTCCTGC | 358 | 0 | 2 | 7131.5 | 8.6853085 | 6.5294394 |
| AAGTGCTGGGATTACAGGCATG | 359 | 0 | 2 | 1812 | 7.3370275 | 10.102645 |
| TGAGATGGAGTCTCGCTCTGTT | 360 | 0 | 1 | 1785 | 5.1520457 | 7.9560995 |
| TTGCTGCTCTGCCGGTACAGCT | 361 | 0 | 2 | 9885 | 6.0708628 | 22.70689 |
| GCCTGTCCCGCACCGGAGCCCG | 362 | 0 | 2 | 2397 | 7.096612 | 10.159995 |
| GTCTCCCCAGGGCCCTCTTCAT | 363 | 0 | 1 | 4158 | 6.0783563 | 1.3304862 |
| TGGATGGCTGTGGTCTTTGCCC | 364 | 0 | 1 | 4573 | 7.9280648 | −2.8086965 |
| CTTCCTTCTCACTAGCAGCGCC | 365 | 0 | 1 | 2665 | 5.1787534 | 2.627044 |
| TCCTTTGCTTCTGTCATTCTCC | 366 | 0 | 1 | 2483 | 4.0944448 | 6.7577206E-2 |
| GAGGCTGAGGTTGCAGTGAGCT | 367 | 0 | 2 | 1999 | 6.8439331 | 8.8330622 |
| GTAATATGTGCTGAGTCCT | 368 | 0 | 1 | 1202 | 4.4296627 | 8.1321344 |
| CTGGTTATCTCGGCCACAGAGA | 369 | 0 | 1 | 3187.5 | 5.22434 | −0.64146328 |
| GGCCACTGCTCTCCAGCCTGGG | 370 | 0 | 2 | 40431 | 15.478172 | 22.089659 |
| CCTGGCTCTGGCTTCCTGTTGT | 371 | 0 | 2 | 34525 | 11.373339 | 6.4300051 |
| AGCCCCAAACACCAGGATTACT | 372 | 0 | 1 | 4319 | 8.0879526 | 1.9557818 |
| CCGCCGCTGATAGCTCTGGGC | 373 | 0 | 2 | 7166 | 6.0192232 | 10.085858 |
| AGGGGCTCCTTTGTGCTGCGTC | 374 | 0 | 2 | 1911.5 | 7.5021071 | 5.5356297 |
| TCTTCACGCCAAGTGCCCCTCA | 375 | 0 | 1 | 4150 | 9.149087 | −6.0181384 |
| GGCCTCAGTGATGATGGGTTAAA | 376 | 0 | 2 | 6124 | 6.4003 | 5.4322863 |
| AAGGCTCGGCAATGTGCGGCTC | 377 | 0 | 2 | 1617 | 6.3867145 | 5.1396852 |
| TTTCCCTTTAGCCTGAGAATCC | 378 | 0 | 1 | 2392 | 5.359941 | 11.933125 |
| CAAAGTGCTAGGATTATAGGTG | 379 | 0 | 2 | 1570.5 | 9.1333447 | 8.6484661 |
| GAGGCAGGAGGATTGCTTGAGC | 380 | 0 | 2 | 11218 | 8.9163761 | 23.396725 |
| TCCGGGTGCCCACGTGCCCCTA | 381 | 0 | 2 | 13959 | 8.1505041 | 9.7457113 |
| GAGGCTGAGGCGGATGGATCAC | 382 | 0 | 2 | 37381 | 14.008185 | 28.093838 |
| ACCACCCAGCCAGCTTCTCCCT | 383 | 0 | 1 | 6121 | 8.7047195 | −0.78491044 |
| TGTCCAGCCGGCCCACGCCCAT | 384 | 0 | 1 | 2478 | 9.9760656 | −5.2396908 |
| GGCTCTTCCGCCACCAGCCACA | 385 | 0 | 1 | 1624 | 4.4541421 | 1.0276202 |
| TGCAGCATTGCACTCCAGCCTG | 386 | 0 | 2 | 11232 | 11.505449 | 21.076042 |
| TGGGTCTCTGGCCACCCCAGCC | 387 | 0 | 2 | 12948.5 | 8.0436459 | 19.699574 |
| TCTCTAGTCTCCTTTAACCTGA | 388 | 0 | 1 | 1148 | 5.2546234 | 2.501446 |
| TAGGTTGTCCATCTCTAGAAGC | 389 | 0 | 2 | 1004.5 | 8.2524061 | 4.2505751 |
| ACTGCAGTCTTGATCTCCTGGGC | 390 | 0 | 1 | 4871 | 4.5565634 | 1.9227443 |
| ACATCTAGACTCTTGCCCTCTT | 391 | 0 | 2 | 6310 | 10.886886 | 15.850095 |
| CTGGTCTGCCACCCACACCCCT | 392 | 0 | 1 | 5580 | 7.5570545 | −1.1313673 |
| GTGCCAGGCACAGGAAGCAGCC | 393 | 0 | 1 | 1855 | 4.0386124 | 0.18331024 |
| TCCTCCCTCACCTCAGTCTGGG | 394 | 0 | 2 | 8976.5 | 11.361602 | 9.0995693 |
| GTCCTCACTGGCCGCACGCTGA | 395 | 0 | 2 | 8536 | 7.1346483 | 19.281561 |
| CTGGCCTCGGCAGCAGGAACAG | 396 | 0 | 1 | 3757 | 4.0009317 | 4.5684352 |
| GAGTGCAGTGGCGTGATCTCTG | 397 | 0 | 2 | 1660.5 | 6.5337977 | 5.7436481 |
| GTGTTCCTGTGCTGGATGGTCA | 398 | 0 | 2 | 2131 | 11.864914 | 6.3784571 |
| CCAGGCTGGAGTATAGTGGCGC | 399 | 0 | 1 | 1270 | 4.4945917 | 7.4746661 |
| CCAGACCCTCCATTCAAGCTCC | 400 | 0 | 2 | 8423 | 9.3362026 | 7.7677507 |
| CACTAGGCTGGAGTGCAGTGGC | 401 | 0 | 2 | 4301 | 12.202009 | 16.549067 |
| TCACTGCGCTTCAGCCTGGGTG | 402 | 0 | 1 | 1929.5 | 5.0829325 | 1.1913716 |
| TCTTTGCTATTGTGAGTAGTGC | 403 | 0 | 1 | 3427 | 15.098435 | −1.562425 |
| TTGTATAGCCCAGAGAGTGAGA | 404 | 0 | 2 | 1038.5 | 6.9170618 | 6.1502376 |
| CATTGCACTCCAGCCTGGGCCA | 405 | 0 | 2 | 65518 | 29.033922 | 21.707558 |
| CTGCCCGCACCATCCCCGGGCT | 406 | 0 | 1 | 1967 | 5.5675011 | 7.4003267 |
| CGGCATGGGCGTCCCCCTCACT | 407 | 0 | 1 | 6042 | 5.6168065 | 9.6102333 |
| TTGCATTTGGTTCTGCCTGGTA | 408 | 0 | 2 | 7111 | 6.8737931 | 11.158542 |
| GAGCCCCACCCTAGACATTCTG | 409 | 0 | 1 | 2592 | 5.6915727 | −3.6630919 |
| GGATGGACGTGATGCCTTAGCCA | 410 | 0 | 1 | 5225 | 18.121622 | −2.3604157 |
| TGCCTGCTGTATTCCAGAG | 411 | 0 | 1 | 1491 | 5.1635141 | 7.662797 |
| CCTGGTCGGCGTGGTGACGGCG | 412 | 0 | 2 | 6434.5 | 6.2044091 | 6.2762375 |
| TCACTGCAGCCTCTGCCTCCCG | 413 | 0 | 2 | 17181 | 17.958405 | 9.3027229 |
| ACTGTACTCCAGCCTTGGCGAC | 414 | 0 | 1 | 3187 | 4.4324884 | 14.526779 |
| CTCCAGTCTTCTCATGTATCCC | 415 | 0 | 1 | 2943.5 | 5.1170878 | 6.0549593 |
| TAGCAGTGTCTAGGTAGGCCAT | 416 | 0 | 1 | 7447 | 24.057808 | 1.1526781 |
| GCCCTTGGCCTCTTTGGCCCGG | 417 | 0 | 1 | 6460 | 6.3274021 | −0.69839072 |
| CATTCTGCGATCCTCAAGCACA | 418 | 0 | 1 | 1481 | 4.0957041 | 9.367939 |
| AGCAGCTTTCACCTCCCCGCCT | 419 | 0 | 1 | 65518 | 12.03591 | 0 |
| TGGAGCCAGCGGCCTGCTGAGG | 420 | 0 | 1 | 744 | 4.4214902 | 3.8499751 |
| AGCTGGGGCTGTGGTTGTGATT | 421 | 0 | 1 | 3007 | 5.3449593 | 10.225232 |
| TAGCTGAGCCGCCTGGCTGGGG | 422 | 0 | 2 | 9026 | 6.8317003 | 8.4015751 |
| CCATCACCCTAACTAGTG | 423 | 0 | 1 | 2735.5 | 11.982088 | −3.3107362 |
| GCCTGGCCTAATTCCAGCATTT | 424 | 0 | 2 | 62842.5 | 13.758234 | 31.293688 |
| CACAGCCTCCTCTGGCTCACGG | 425 | 0 | 2 | 14804 | 7.7305474 | 23.87908 |
| CCGAGGTCCTGGACTTGGCCCT | 426 | 0 | 1 | 6198 | 7.1988444 | −1.3169746 |
| GCAGAGTGCTGTCGTACGCCCC | 427 | 0 | 1 | 1421 | 4.527245 | 1.0200601 |
| CTGTAACTGTCCCTTTTGCC | 428 | 0 | 1 | 3318 | 4.9795561 | 11.643893 |
| TCACTGCAACCTCCACCTCCTG | 429 | 1 | 2 | 45662 | 20.504339 | 18.911047 |
| TTGCTTTGCAGTGCCTATAGGA | 430 | 0 | 2 | 1273 | 6.826138 | 5.0606236 |
| TGGAGGCTGGAGTGCAGTGGCG | 431 | 0 | 2 | 2034.5 | 7.5323806 | 10.788618 |
| AAGGTGGAGGTTGCAGTGAGCT | 432 | 0 | 2 | 4275.5 | 9.1417122 | 11.853789 |
| GCAGGCTGTCTAAAGTTAGAGT | 433 | 0 | 1 | 960 | 5.3449593 | 4.6880941 |
| GCGCCCCATCTACAGTACTTTT | 434 | 0 | 1 | 3901 | 7.4468746 | 1.8634913 |
| TCTGCCTTCTATCTTTTGTCTG | 435 | 0 | 1 | 2195 | 4.2943249 | 5.856668 |
| CCTTCCCATGCAGCCTGTCTGA | 436 | 0 | 1 | 4066 | 5.3572183 | 6.7426419 |
| GCCTGGCCTAAATTAGTAATTT | 437 | 0 | 2 | 65518 | 14.47023 | 33.939186 |
| TTCTGGCTTCTCCCAGGCGGCC | 438 | 0 | 2 | 5582 | 8.2352791 | 10.879703 |
| GGCGCCCCCTTCAAACAGAGCA | 439 | 0 | 1 | 1745 | 4.7277126 | 8.7167349 |
| TCCCAATAGCCTAAGAGCCTGG | 440 | 0 | 1 | 2742.5 | 4.4703951 | 1.2259418 |
| GCCTGGCCAACGTGGTGAAACC | 441 | 0 | 1 | 18181.5 | 9.7641363 | −0.38965413 |
| TGTCTGGCTTTCTTCAGTTAGC | 442 | 0 | 2 | 6191 | 9.9906111 | 15.989508 |
| TGGGTTTTGTTTGTACAGTGTA | 443 | 1 | 0 | | | |
| CTGTGGTGAGGCCCTAGAATCTG | 444 | 0 | 2 | 3222 | 11.085442 | 6.6749387 |
| TTGCTCAGGCTGGCGTGCAATG | 445 | 0 | 2 | 9724 | 11.115126 | 19.742767 |
| GGAGGTGGAGGTTGCAGTGAGC | 446 | 0 | 2 | 4936 | 10.584228 | 13.28014 |
| GGAGGCGGAGGTTGCAGTGAGT | 447 | 0 | 2 | 2351 | 7.6334682 | 8.3588333 |
| CTGAGCCTCCTGCTTCTATTTC | 448 | 0 | 1 | 1864 | 5.9849868 | 3.7265418 |
| ACTGTACTCCAGCCTGGGAAAC | 449 | 0 | 1 | 4692 | 5.6260824 | 17.568949 |
| TCACATTTTCAAAAGCTGGTGC | 450 | 0 | 1 | 764.5 | 4.7752681 | −3.7142565 |
| CGCACCCCACTGTCCCTCAACC | 451 | 0 | 2 | 4601.5 | 6.5281987 | 4.8853817 |
| ACACTTTGCCCCTGGCCGCCTT | 452 | 0 | 2 | 42189 | 12.009233 | 22.436626 |
| GCAACTGAACATGTGTGTGGCC | 453 | 0 | 1 | 2167 | 6.7475801 | 0.27415401 |
| CCCAGGAGTTGGAGGCTGCAGT | 454 | 0 | 2 | 4273.5 | 6.2922449 | 14.155445 |
| GTCTGTTTTCTCTTCTGTGGGA | 455 | 0 | 1 | 3260 | 4.4957891 | 12.91537 |
| ATGGTACTCCAGCCTGGGTGAC | 456 | 0 | 2 | 4173 | 7.3957338 | 16.409479 |
| AGAATCCCAGGCCCCACTG | 457 | 0 | 2 | 3122 | 8.3376312 | 13.851473 |
| ACTGCACTCCAGCCTGGGTGAC | 458 | 0 | 2 | 65518 | 27.343826 | 34.911034 |
| TGGTAGGTTGGGCAGTTC | 459 | 0 | 2 | 8731.5 | 31.377066 | 20.530041 |
| CAGCCCTCCTACCCTGCCAGGC | 460 | 0 | 2 | 7825 | 9.6958656 | 6.1267514 |
| AGTGAGCAAGTTGATAATGGCC | 461 | 0 | 1 | 2206 | 12.457526 | 1.2831149 |
| CCCTGCCTGTCCTGGTCCCGTT | 462 | 0 | 2 | 18466 | 9.747386 | 21.814604 |
| CACTGCTACCTCTGCCTCCCGG | 463 | 0 | 2 | 19159 | 17.182699 | 10.042536 |
| GCTGTGGAAGTCTTTATA | 464 | 0 | 1 | 1228 | 5.2394924 | 0.15779255 |
| TCTGAGCCAGGGTCTCCTCCCT | 465 | 0 | 2 | 2987 | 6.3731112 | 9.5772123 |
| AGGAAAAAAATTAATGTGAGTC | 466 | 1 | 0 | | | |
| ATTGCACTCCAGCCTGGGTGAC | 467 | 0 | 2 | 60365.5 | 24.984217 | 35.201714 |
| GCCTGTGTCTGGGTGGCCAGAG | 468 | 0 | 1 | 3356 | 4.7288775 | 1.1448419 |
| TGTCCTCGTCCGCCTCGAACTC | 469 | 0 | 1 | 2812.5 | 4.2049069 | −1.0601429 |
| CACTGCACTCCAGCACTCCAGC | 470 | 0 | 2 | 6054.5 | 6.051445 | 10.920486 |
| GGTCTTTTCTGCTGCAGGTTGT | 471 | 0 | 1 | 3605 | 4.629807 | 6.2433772 |
| GGAGCCGCCGCCCTTCATT | 472 | 0 | 2 | 4182 | 6.2263575 | 9.809968 |
| TTTGGTGTTCCGGTCATTGCTG | 473 | 0 | 1 | 1967 | 4.1357851 | 5.2781134 |
| GAACTTGTGATCCGCCCACCTT | 474 | 0 | 1 | 2483 | 4.4610376 | 7.0900927 |
| CTTCTGGCTGGTCAAGGACT | 475 | 0 | 2 | 4005 | 8.6937799 | 9.6446276 |
| GTCAGTCATTGAATGCTGGCCT | 476 | 0 | 2 | 8592.5 | 23.067156 | 11.230301 |
| GGAGTTTGCCTATTGCTTTTGG | 477 | 0 | 2 | 3720 | 6.173347 | 6.482801 |
| CAGGCTGGAGTGCAATGACGCC | 478 | 0 | 2 | 2761 | 6.4190331 | 12.467172 |
| CTCTGATGTCTGCCCCTCACCT | 479 | 0 | 2 | 12084 | 23.231821 | 2.7038672 |
| AAGCCCTGGACGGCCCTTCCCC | 480 | 0 | 1 | 4492 | 7.5995965 | −3.6259129 |
| GACCCTCTAGATGGAAGCACTG | 481 | 0 | 1 | 3638 | 4.4202566 | 13.507792 |
| CTGGCCAGATGTTACGTCCAAT | 482 | 0 | 1 | 2339.5 | 9.680912 | −11.645831 |
| AGCTGGTTTAATATGCTGTCTG | 483 | 0 | 2 | 11390 | 14.25641 | 8.7015753 |
| TCCTGCCTGGGGCCGCCTG | 484 | 0 | 1 | 2616 | 4.7310023 | 10.146957 |
| GAGCTGGGCCTGCGAGTGCTGC | 485 | 0 | 1 | 2060.5 | 5.0099111 | 1.7965864 |
| ACGCCCAGACTCCCATACTTTG | 486 | 0 | 1 | 2459 | 4.50102 | 4.1521502 |
| TTAAAGCCTCCCTCATAAGGA | 487 | 0 | 2 | 3650 | 8.3206406 | 14.328845 |
| CCCAGGGGTTCAAGGCTGCAGT | 488 | 0 | 1 | 1033 | 4.0216489 | 6.0328941 |
| TTCCAGTTCTGGGCTGGCTGCT | 489 | 0 | 1 | 3769.5 | 4.0091105 | 3.8919213 |
| TCTCTTCCTCCGCGCCGCCGC | 490 | 0 | 2 | 7111 | 6.0010505 | 12.012436 |
| CGTGACTGGGTCCGTCTGGCT | 491 | 0 | 1 | 4430 | 5.1234531 | 8.6597939 |
| AACCCGGGAGGCGGAGGTTGTG | 492 | 0 | 1 | 1833 | 5.103756 | 10.290462 |
| GGCCCCGCAGACCCAGCACGT | 493 | 0 | 2 | 1905.5 | 6.5486112 | 6.9167981 |
| ACTGTACTCCAACCTGGGCAAC | 494 | 0 | 1 | 6841 | 5.909749 | 20.226805 |
| CGCCCGCTGGCCCTGCGATCTC | 495 | 0 | 2 | 65518 | 15.196337 | 33.776985 |
| CTCACCTCCAGGAGCTGCTGGC | 496 | 0 | 1 | 8262.5 | 9.149087 | −4.4073544 |
| ATGGCCCTAATGAGTTGGTGTT | 497 | 0 | 2 | 5385.5 | 19.2614 | 5.6697388 |
| GGTAGTCGGCCTTGCCCTGGGC | 498 | 0 | 1 | 1782 | 5.1635141 | 8.7292385 |
| CTCGCCCCTCTCAGCCCTGCAA | 499 | 0 | 1 | 14248.5 | 19.352268 | 1.4588933 |
| GCCCCAGCTCACCGGCTCACTG | 500 | 0 | 2 | 15345 | 20.667051 | 7.4258513 |
| AAGTGCTCATAGTGCAGGTAGT | 501 | 0 | 2 | 27166.5 | 9.1624584 | 28.31859 |
| CAACTCACTGCGGCCTCAACCT | 502 | 0 | 1 | 3783 | 5.4047599 | 5.8278494 |
| CCTCTTCAGGCACTCGAAGGCC | 503 | 0 | 1 | 2775.5 | 11.314644 | −1.779775 |
| CTGCCATGCCACTGTGACTGCA | 504 | 0 | 1 | 2352.5 | 10.038951 | −0.80460918 |
| CCCAGGCCCTGGCAGAGCTTGT | 505 | 0 | 1 | 3205 | 4.2292862 | 11.181579 |
| TGCAGAAACAAGCCATCATTCA | 506 | 0 | 2 | 1094 | 6.8781896 | 4.4873405 |
| GGCTCAATGCAACTTCTGCCTC | 507 | 0 | 2 | 6445 | 11.169347 | 10.793466 |
| ATTGTACTCCAGCCTGGGTGAC | 508 | 0 | 2 | 13270 | 12.799824 | 24.968328 |
| CTGGGAGGCAGAGGTTGCAGTG | 509 | 0 | 2 | 1910 | 6.9613633 | 10.357609 |
| GCAGCTGACATCTGGCTGGGCC | 510 | 0 | 2 | 2573 | 8.120388 | 3.4149001 |
| GTCCAGTTGTATGTCCAGTGTC | 511 | 0 | 2 | 2058 | 8.4334011 | 5.2194672 |
| TGACTACAACCTCCACCTCCCG | 512 | 0 | 2 | 4496 | 8.9163761 | 9.9170055 |
| AGGCTGGAGTGCAGTTGCATGA | 513 | 0 | 1 | 1154 | 4.7976661 | 6.3405333 |
| CACCTGGCTGGCAATTTATAAT | 514 | 0 | 2 | 9852 | 8.0965796 | 17.484594 |
| GCTCCCTGGTAGCCATGCTCTC | 515 | 0 | 2 | 12312 | 6.6286459 | 3.9085872 |
| CTAGACTGAAGCTCCTTGAGGA | 516 | 1 | 0 | | | |
| GAGAAATATGGCTCAGTTCCAC | 517 | 0 | 1 | 1451.5 | 5.3449593 | 6.0128675 |
| CTCACTGCAAGCTCCACCTCTT | 518 | 0 | 2 | 4183.5 | 15.744108 | 13.408605 |
| TCACCTTGTGATCCGCCCACCT | 519 | 0 | 1 | 2944 | 5.0713305 | 4.4200244 |
| ACTGCACTCCAGCCTGGGTAAC | 520 | 0 | 2 | 65518 | 29.763027 | 35.404873 |
| ACTGCACTCCAACCTGGGTGAC | 521 | 0 | 2 | 5289.5 | 9.2819481 | 17.745958 |
| TTCCTGGTCTATTTAGAATTGC | 522 | 0 | 1 | 3974 | 4.2977972 | 7.7437348 |
| CTCGTGATCCGCCCACCTCAGC | 523 | 0 | 2 | 9254 | 12.490854 | 15.083214 |
| CACTGCACTCCAGCCTGCGCAA | 524 | 0 | 2 | 65518 | 26.453463 | 34.462708 |
| ACAATGCTCCCTGTAGTCAGGA | 525 | 0 | 1 | 1874 | 4.6958904 | 7.40031 |
| AGGAGGCCCTGGCGTTT | 526 | 0 | 2 | 7670 | 9.8578186 | 18.796598 |
| ACTGCACTCCAGCCTGGGT | 527 | 0 | 2 | 65518 | 27.764378 | 33.832714 |
| CTCACAGTCTGCCTTTCCCTTG | 528 | 0 | 2 | 4450.5 | 6.7386289 | 12.351869 |
| TCTCTCTTTTTTGAACCCGCTC | 529 | 0 | 1 | 2311.5 | 4.0555487 | 1.0858992 |
| AAATGTGGGGCTGGAGGCAGGA | 530 | 0 | 1 | 4164 | 4.2210102 | 16.645317 |
| CAAGCCATTCTCCTGCCTCAGC | 531 | 0 | 2 | 18892 | 18.51676 | 21.383736 |
| CCTGCCCTGCTCACTGTCGGTA | 532 | 0 | 1 | 4583 | 4.9649172 | 0.75725234 |
| TGCACCACTGCACTCCAGCCTG | 533 | 0 | 2 | 65518 | 25.040926 | 34.867786 |
| GGCCCTGGTCCTAGGGGTGGAA | 534 | 0 | 1 | 3918 | 5.2506523 | −11.347021 |
| CACGCCTGTAATCCCAGCACTT | 535 | 0 | 2 | 13062 | 15.57386 | 18.50495 |
| ACTTGGAACTGGCCCCTTTCAT | 536 | 0 | 2 | 17782 | 14.512917 | 23.881441 |
| CAGGAAAAGGCGGCTCGGGGCT | 537 | 0 | 2 | 27684.5 | 9.7338009 | 6.1309323 |
| TCGCCCAGGCTGGAGTGCAGTG | 538 | 0 | 2 | 16241 | 17.047142 | 24.279329 |
| GTGGCCCATCACGTTTCGCCTT | 539 | 0 | 2 | 65518 | 14.54515 | 20.760025 |
| CAAGTGATCCTCCCATCTTGGC | 540 | 0 | 1 | 2388 | 5.3808784 | 7.4311776 |
| GAGAGGTGGAGGTTGCAGTGAG | 541 | 0 | 2 | 2534.5 | 6.4362307 | 12.629781 |
| TTTCCCAGCCTCAGCTCAGCAG | 542 | 0 | 1 | 4894.5 | 7.2876582 | −0.72574896 |
| GTGCGGCCTGGCCTTCAAGTGG | 543 | 0 | 2 | 15350 | 9.6908836 | 19.487803 |
| CACTGCACTCCAGCCTGGGTCA | 544 | 0 | 2 | 65518 | 26.882214 | 33.427895 |
| ACCTCCTGGCCTCAAGCAATCC | 545 | 0 | 2 | 58457 | 12.381654 | 19.294073 |
| TGGGAGGCCAAGGCAGGCGGAT | 546 | 0 | 1 | 1193 | 4.9847255 | 7.2392049 |
| TGTCCTTCTTGTCTTGCCCAAA | 547 | 0 | 1 | 3592.5 | 5.1910453 | 1.0036907 |
| CCCGGGAGGTGGAGGTTGCAGT | 548 | 0 | 2 | 2962 | 7.343236 | 13.058587 |
| GCCACTGAGCCCGGCCATTGTT | 549 | 0 | 2 | 2514 | 7.7381911 | 2.2476037 |
| GTCTCGGACTCCTGATCTCAGG | 550 | 0 | 1 | 1380 | 4.1414785 | 3.9894354 |
| CAGGAGGATTGCTTGAGGCCAG | 551 | 0 | 2 | 9887.5 | 8.4761457 | 19.047802 |
| AACCCGTGATCCTGACTCCCCT | 552 | 0 | 1 | 7080 | 5.843668 | 7.8386455 |
| GCTCCTGGCCGGGCTGCTCCTG | 553 | 0 | 2 | 27106 | 14.495318 | 9.280777 |
| AAGGGAATGTTGTGGCTGGTTT | 554 | 0 | 2 | 3896 | 10.519875 | 13.251223 |
| ACCATCTCCTGTGCCTCCAGCT | 555 | 0 | 2 | 16520 | 12.522655 | 19.197701 |
| TCTGCCTAGAAACAGTGTTTGC | 556 | 0 | 2 | 5275 | 7.7571926 | 3.0926366 |
| TTGGTCCCCTTCAACCAGCTAC | 557 | 0 | 2 | 20228 | 9.5504265 | 23.87529 |
| GCCTGCTCCCAGTTGGCGCCTC | 558 | 0 | 1 | 3775 | 7.6600766 | −1.6529437 |
| CGGGCAAGGCGAGACTAGGCCC | 559 | 0 | 1 | 1455.5 | 5.7638865 | −0.9456889 |
| GGGGGGCGCCATGGTCTCTTGG | 560 | 0 | 1 | 3867.5 | 4.3061237 | −0.1289482 |
| ATGCCACTGCACTCCAGCCTAG | 561 | 0 | 2 | 49924.5 | 14.368088 | 30.30353 |
| GGTCTGTCTTCCCAATCGTGGC | 562 | 0 | 1 | 4046.5 | 4.2799697 | 6.4598308 |
| GGCTGTGGAGCTGCAGAGTTGG | 563 | 0 | 2 | 5971 | 7.1055961 | 2.2149129 |
| CAGGCTGGAGTGCAGTGGCGCC | 564 | 0 | 2 | 4637 | 11.871922 | 16.185398 |
| GGCCCCTCTGAGCTTACTCTGT | 565 | 0 | 2 | 6262.5 | 11.684633 | 9.8594589 |
| GCGCCTCCTCGGCCTC | 566 | 0 | 2 | 12734 | 7.9515629 | 6.2195482 |
| CACCAGGCTGGAGTGCAGTGGC | 567 | 0 | 2 | 5291 | 13.367915 | 17.112989 |
| TGGCTAGGCTGGTGTCAAGCTC | 568 | 0 | 2 | 2082 | 6.3935094 | 7.687212 |
| GCCCAGCCACAGTCACTTTCAT | 569 | 0 | 1 | 2139 | 4.7320642 | 8.6496077 |
| CTTCCCACCATCTCCTG | 570 | 0 | 1 | 2625 | 4.8619056 | 7.170155 |
| GACCTCAGGTGATCTGC | 571 | 0 | 2 | 5069 | 10.007993 | 16.466791 |
| TTCCCTGGGACTGGCCTGCACC | 572 | 0 | 2 | 17948.5 | 9.3010607 | 15.061718 |
| ATGTTCATATCCCCATTCTGAT | 573 | 0 | 2 | 1760 | 8.5004892 | 7.7344885 |
| CATTGCACTCTAGCCT | 574 | 0 | 1 | 875 | 4.0046587 | 2.2476213 |
| TCACTGCAACCTCCACCTCCCA | 575 | 1 | 0 | | | |
| GCCATTTCACACAGACATTTG | 576 | 0 | 2 | 1978.5 | 6.6882792 | 9.8837452 |
| GTAGTCCCAGCTACCCCGGAGG | 577 | 0 | 2 | 3868.5 | 12.13766 | 12.272501 |
| CCTGTCATATACATACCTCCTC | 578 | 0 | 1 | 1712 | 4.1733551 | 4.783987 |
| TCTCTCAGGCTGGAGTGCAGTG | 579 | 0 | 2 | 2711 | 9.6044931 | 12.843214 |
| TAGCTACCATTATTGAGCACCT | 580 | 0 | 1 | 757 | 4.2067757 | 2.5492058 |
| GTTTACTTGTGCCTTGGCTTAA | 581 | 0 | 1 | 1948.5 | 4.0322022 | −15.512288 |
| AGCGCCGCCCCTGCTGGTGTTG | 582 | 0 | 1 | 4465 | 4.3703461 | 6.2275581 |
| TCCAGGGCCATCTCCATGAGGC | 583 | 0 | 1 | 1948 | 5.4790416 | 9.0826721 |
| TCAGTCTTGAACAGCCCCCTGT | 584 | 0 | 2 | 6402 | 12.333841 | 7.9963231 |
| ACTGCAACCTCCACCTCCTGGG | 585 | 0 | 2 | 26924 | 17.396763 | 10.658098 |
| TGGTGGAGGCGCTGCTGGCCAG | 586 | 0 | 2 | 11424 | 10.211181 | 12.62489 |
| CTGCAGCCTTTGCCTCCTGGGTT | 587 | 0 | 2 | 8429 | 12.857187 | 13.758839 |
| GGCTCACTGCAACCTCTGCCTC | 588 | 0 | 2 | 62440 | 23.696358 | 18.67169 |
| TGCCGAGGCTGGAGTGCAGTGG | 589 | 0 | 2 | 2467.5 | 8.8668938 | 8.8795528 |
| CCGGGTTGAGGTTCCCATAGAT | 590 | 0 | 2 | 6920 | 8.8808632 | 18.126587 |
| CTGCTGCGCTGGCCGTCACGGT | 591 | 0 | 2 | 45168 | 18.758972 | 18.507338 |
| TCCTGGTCTTCAGGTTGCAAAA | 592 | 0 | 1 | 7121 | 5.3691082 | 9.0031843 |
| CACCCTCCAGCTCCCGGGGGCT | 593 | 0 | 2 | 5651.5 | 10.5429 | 4.3305707 |
| CATTGCACTCCAGCCTGGGCAA | 594 | 0 | 2 | 65518 | 32.881447 | 28.077059 |
| TCAGGGGTTGGCTTGTTGTGTT | 595 | 0 | 2 | 20519.5 | 8.8405285 | 21.048086 |
| AGCCTCTGGTCCTTTTTTCCCT | 596 | 0 | 2 | 11308.5 | 12.165344 | 5.3993454 |
| ACTGCACTCCAGCCTCGGGGTC | 597 | 0 | 2 | 49031.5 | 14.262467 | 31.189104 |
| GCCAGCCTCCATCCTCCCTTG | 598 | 0 | 2 | 10191 | 21.391727 | 11.342846 |
| GCTCCGCCACGCCCACTCCTAC | 599 | 0 | 2 | 4705 | 6.8716969 | 9.635397 |
| CCGCGGGGTCATGGCTGGGCCG | 600 | 0 | 2 | 7300.5 | 6.5837302 | 5.0417223 |
| ATGGCCCTCTTATCACAGCTCC | 601 | 0 | 2 | 5586.5 | 21.480997 | 6.3762493 |
| AACCTTGTGATCCACCCACCTT | 602 | 0 | 2 | 3034 | 7.7903786 | 12.639959 |
| CAAAGGGAAAAGCCATGTGGGC | 603 | 0 | 1 | 1205.5 | 6.3321967 | −1.1940883 |
| TCCTGGCTTGTCACATCTACGT | 604 | 0 | 1 | 4198 | 4.4526401 | 3.8407443 |
| CATTGCACTCCTGCCTGGGCAA | 605 | 0 | 2 | 65518 | 27.010284 | 16.583426 |
| GGCCTCTTATCTGGCTCCTGCA | 606 | 0 | 2 | 5318 | 6.4274201 | 6.5868769 |
| AGTGGCGTGATCTCGGCTCGGT | 607 | 0 | 2 | 3395 | 8.8775339 | 14.742507 |
| TGGCTATTCCTTGGACACA | 608 | 0 | 1 | 2806 | 18.035503 | −3.2833591E-2 |
| GCTCCCCAAAAGCTCCAGGAAA | 609 | 0 | 1 | 2161 | 5.5307322 | 0.0302024 |
| CCAGGAGGTTGAGGCTGCAGTG | 610 | 0 | 2 | 5379 | 11.585869 | 13.504684 |
| ACAGCCTCCATCTCCTGGGCT | 611 | 0 | 2 | 5043 | 8.2979441 | 10.987616 |
| CCAGGAGGCGGAGGTTGCAGCG | 612 | 0 | 1 | 1831 | 4.9563489 | 9.9608593 |
| TGCCCGGATACCCCTGGCCTC | 613 | 0 | 2 | 46111 | 13.316625 | 10.030684 |
| TGCGACCCTAGCCCCCTCACTT | 614 | 0 | 2 | 5417 | 11.129067 | 4.3243365 |
| CTGTCCTGGGGAAAGCCAGCCC | 615 | 0 | 2 | 1892 | 8.5004892 | 5.7830157 |
| GCAGCTCCTGGAGGTGAGAGGCG | 616 | 0 | 2 | 5368 | 7.8018293 | 15.956004 |
| CACCCAGGCTGGAGTGCAGTGG | 617 | 0 | 2 | 4215 | 12.088334 | 14.940107 |
| AGCCCTCGTTTCTGCATCCTGT | 618 | 0 | 1 | 4923 | 15.10443 | 0.58649576 |
| ATTGCACTTCAGCCTGGGTGAC | 619 | 0 | 2 | 11488.5 | 11.742085 | 23.617636 |
| TCTTCTATCCTCAGCCCCTGCC | 620 | 0 | 1 | 5352.5 | 9.7554712 | 1.239718 |
| GTGGCTCACACCTGTAATCCCA | 621 | 0 | 2 | 15446 | 13.370042 | 20.396935 |
| CACTGCAAGCTCCGCCTCCTGG | 622 | 0 | 2 | 16781 | 17.735508 | 9.1570225 |
| GTGGCAGACCTTCCCTTCTCCT | 623 | 0 | 2 | 4139 | 6.9686718 | 8.4107714 |
| GCTCACTGCAACCTCCACCTCC | 624 | 0 | 2 | 33649 | 18.60092 | 20.711613 |
| TCTAAGAGAAAGGAAGTTCAGA | 625 | 1 | 0 | | | |
| TTGTTCTTGTCTTTGCCTTCAC | 626 | 0 | 1 | 4146 | 5.8114853 | 5.746397 |
| CCAGGCTGGAGTGCAGTGGCAC | 627 | 0 | 2 | 14590 | 15.059402 | 24.507948 |
| AAAGTGCTTCCTTTTTGAGGGT | 628 | 0 | 1 | 4403.5 | 4.8706794 | 7.6543956 |
| TCCAAATGAGCTCTGCCTTCCA | 629 | 0 | 1 | 8231 | 5.6790619 | 11.278896 |
| GCCTGTAATCCCAGCACTTTGT | 630 | 0 | 2 | 6291 | 12.232025 | 12.874677 |
| AATGTGTTGAATAAATTGTGCC | 631 | 0 | 2 | 1493 | 7.7202153 | 3.8070927 |
| CCAGCCCGAATCCCTGGCCAGG | 632 | 0 | 1 | 3382 | 13.906728 | 1.8086184 |
| CTAGATAACTTATTTTCAAGGA | 633 | 0 | 1 | 693.5 | 4.0893412 | 1.9033302 |
| GCTGCTGGGCCATTTGTTGG | 634 | 0 | 1 | 4101 | 7.4591732 | 1.3319389 |
| CTCATTGCCCAGATCCCCACAG | 635 | 0 | 1 | 2016 | 4.838347 | 8.3423147 |
| CTGTGGTACAGCTGGGACGGA | 636 | 0 | 1 | 664 | 4.6319594 | 3.5137784 |
| GTGTTGTCGCTGGGTTTTGAGGG | 637 | 0 | 1 | 3030 | 4.5279474 | 3.9595523 |
| TGGAGTTGGCTGCAGATGAGTC | 638 | 0 | 2 | 9954 | 13.087917 | 15.585505 |
| CAGTCACAAGCGTACCTAATTT | 639 | 0 | 2 | 2097.5 | 9.4896584 | 6.2945709 |
| ACTGCAAAGGGAAGCCCTTTCT | 640 | 0 | 2 | 14213 | 7.6344547 | 19.22015 |
| AGCGCCACTGCACTCCAGCCTG | 641 | 0 | 2 | 65518 | 21.477427 | 32.126575 |
| CACTGCACTCCAGCCTCGGTGA | 642 | 0 | 2 | 65518 | 19.946772 | 34.137524 |
| GGGCTAGCCTCTTCCCTGCTCC | 643 | 0 | 1 | 2982 | 4.0539145 | 1.5543098 |
| TGCGCCATGTGCTCTCGGCCCT | 644 | 0 | 1 | 3290 | 5.4790416 | 8.9091539 |
| TTTTGGCCACATCCTTTTGAGT | 645 | 0 | 1 | 932 | 4.3311777 | 5.6849165 |
| CGGCATCCCCACTTCCTCCTGC | 646 | 0 | 2 | 5467 | 7.7441764 | 4.2301731 |
| CTGGCTCTCAGGCTGGTCCCCA | 647 | 0 | 2 | 11103 | 17.197889 | 7.7209744 |
| TGCACCACTGCACCCCAGTCTG | 648 | 0 | 2 | 5009 | 7.3463378 | 16.848854 |
| TGCCAGTATCCTTCTGAGACCC | 649 | 0 | 2 | 9374.5 | 18.697142 | 19.309006 |
| GCAAGTGTCTGTCCCCTT | 650 | 0 | 1 | 2829.5 | 5.2069716 | 4.7231493 |
| TGACATTTCCTAGTGCTTTGTG | 651 | 0 | 2 | 1338.5 | 7.1093221 | 8.5563574 |
| TCACTGCACTCCAGCCTGGGCA | 652 | 0 | 2 | 65518 | 34.101166 | 18.829176 |
| AAGACCAGCCTATGTTTTCCAT | 653 | 0 | 2 | 1307 | 6.3594904 | 4.4498701 |
| CTTAGAGATGGGTTTTACTTAG | 654 | 0 | 1 | 886 | 7.7022095 | 1.8901725 |
| AAAGTGCTGGGATTACAGGCAT | 655 | 0 | 1 | 1350 | 5.680541 | 7.7369747 |
| CTGGCCCCTTTCATTCTGGAAG | 656 | 0 | 2 | 11008.5 | 19.356289 | 14.29258 |
| GCCTCATTTCCACCTCCCC | 657 | 0 | 1 | 7161.5 | 19.507957 | 0.16928124 |
| TTCCCTGCCATACCTGAAGGCA | 658 | 0 | 2 | 3785 | 7.4591732 | 4.4417677 |
| GGTTTTATCCTACCCACACAGC | 659 | 0 | 1 | 2980.5 | 5.771091 | 0.75884527 |
| TGCGCCTGGGGCCCTGGCTGTC | 660 | 0 | 1 | 4313 | 4.8216996 | 7.0607853 |
| CACTGCACTCCATCCTGGGAAA | 661 | 0 | 2 | 6397.5 | 6.6049953 | 18.619169 |
| CAGTTCCCTCCGCCAGCACTTC | 662 | 0 | 2 | 6955 | 6.4068542 | 9.6022158 |
| CCAGACCATTTTGCCTTACC | 663 | 0 | 2 | 38076 | 30.955603 | 11 .095823 |
| TACAACCTCTGCCTCCCAAGTT | 664 | 0 | 2 | 6090 | 14.013508 | 12.263943 |
| CGCCATGTCCAGCGTCTTCGGG | 665 | 0 | 2 | 8765 | 20.334946 | 20.485155 |
| TGCCTCCAACAGCCCATCCTAG | 666 | 0 | 2 | 5709 | 13.713832 | 8.2213135 |
| TCACCAGGCTAGAGTGCAGTGG | 667 | 0 | 1 | 1159.5 | 4.8244257 | 6.5572648 |
| CCCACTGCTGCGCCGGGCGCCG | 668 | 0 | 2 | 17950 | 21.138054 | 12.695562 |
| GCAGGCTCTGGCTTATTCTGGG | 669 | 0 | 1 | 4399 | 4.4706116 | 13.904231 |
| GCGCCGCCATCCGCATCCTCGT | 670 | 0 | 2 | 4801 | 16.34218 | 9.281786 |
| TCACATCTAATTCCATTTCTGC | 671 | 0 | 2 | 8429 | 13.263923 | 4.5787411 |
| GTGACACCCGCATGCCACTGTG | 672 | 0 | 1 | 4433 | 5.2274818 | 8.4032717 |
| TGCAGCCTCTTGTTTCAGCCCC | 673 | 0 | 2 | 11243 | 15.895414 | 2.5227482 |
| GGCCCAGTGCAAGCTCTTTCTG | 674 | 0 | 2 | 2960 | 7.6298795 | 6.4523926 |
| AGGCTGGAGTGCAGTGGTGTGA | 675 | 0 | 2 | 7407.5 | 15.261675 | 13.995954 |
| GCTCACTGCAAGCTCTGCCTCC | 676 | 0 | 2 | 20572.5 | 19.847269 | 12.887133 |
| CAAATTCCATTCATGCTCCCTT | 677 | 0 | 2 | 3158.5 | 7.6177769 | 5.7730742 |
| GCCATCCCAAGCATTTTGG | 678 | 0 | 2 | 3676 | 17.232298 | 13.983404 |
| GACAAGCTCCCGGTGGCCCTCC | 679 | 0 | 1 | 12851 | 9.4387512 | −5.8295474 |
| AGCTACCTGATCCTTCTTCTGA | 680 | 0 | 1 | 3226 | 4.1367669 | 12.153009 |
| GGGTAAATCTCTTTTCATGGCT | 681 | 0 | 1 | 3221 | 4.827455 | 8.7138081 |
| CTGTCCTTCCAGCCGAAATCTA | 682 | 0 | 1 | 2360 | 4.3559012 | 11.170581 |
| GCATGGCTTCGGGGTGCTGCCT | 683 | 0 | 1 | 3747 | 5.1863647 | 12.211168 |
| TAGGACCCTGGTGGCCCCC | 684 | 0 | 2 | 5109 | 8.5892859 | 8.0437737 |
| AAAAGGGACGACAACAGGCCAC | 685 | 0 | 1 | 1681 | 4.7831736 | −0.22445607 |
| CCCAGCTCTTCAAGTCACCCCC | 686 | 0 | 1 | 2752.5 | 5.4642267 | 3.5884585 |
| ACTGCACTCCAGCCTGGGACAC | 687 | 0 | 2 | 65518 | 25.933289 | 35.343163 |
| AGCTGGCTTACTTGAGATGCAT | 688 | 0 | 2 | 3049 | 8.8567095 | 7.4132333 |
| GACCTTGTGATCCCCCTGCCTT | 689 | 0 | 2 | 6915 | 8.0644264 | 17.640575 |
| CCGCCTGGCCCATTGCAGGGCA | 690 | 0 | 2 | 65518 | 18.506096 | 29.045151 |
| TGAACTCCTGACCTCATGATCC | 691 | 0 | 2 | 6999.5 | 26.17539 | 18.849899 |
| GACCATCCTGGCCAACGTGGTA | 692 | 0 | 1 | 3690 | 4.9752827 | 15.844102 |
| CCCAGGCTTTTCTCTTGCCCCA | 693 | 0 | 2 | 5771 | 12.212635 | 10.303027 |
| TTCTTCAGCCTACCTTGACCTC | 694 | 0 | 1 | 1982 | 4.5595746 | 0.49319306 |
| CTGCGGGGCCTGGACAGGGAGG | 695 | 0 | 2 | 11797 | 7.1950088 | 21.891239 |
| GGCTGTGTGGCCGTGGGCTCTA | 696 | 0 | 1 | 1700 | 4.3887382 | 4.3097105 |
| GGGCCACCCCACTGCCCACGCT | 697 | 0 | 1 | 3459 | 4.6319594 | 4.3550696 |
| CCCCACTGTTTTCTTCATCCTA | 698 | 0 | 2 | 50957 | 31.882698 | 4.8442335 |
| GGAGTGCAGTGGCGTGAGCTCG | 699 | 0 | 1 | 1283.5 | 4.7879038 | 3.6301775 |
| TAGGAGGATTGCTTGTGGCCAG | 700 | 0 | 1 | 3154.5 | 4.6519237 | 4.9273152 |
| CTGAGGGCAGGTGGTGCTGCCA | 701 | 0 | 2 | 1847.5 | 8.3489428 | 5.0725312 |
| GCACCACCACCATCGGCACCTC | 702 | 0 | 2 | 3012 | 6.4477148 | 2.4866204 |
| CTTGTTTATCTCTGTAGCCCTG | 703 | 0 | 1 | 3684 | 5.9854388 | 8.3862486 |
| GTGGGTTCGTGGTCTCGCTGGC | 704 | 0 | 2 | 65518 | 26.617212 | 17.195196 |
| AAAGCCCTGGCCAGACACCAGT | 705 | 0 | 2 | 5732.5 | 6.8473902 | 6.6282077 |
| ATCGGCAAGCCCCACACCGTCC | 706 | 0 | 1 | 1713 | 4.0142264 | 9.0132332 |
| AGCCTCAGGTTGTTGGTTCTT | 707 | 0 | 1 | 1042.5 | 4.1900787 | 4.8052392 |
| CGGTGGGTGCTTCAGGCGGTGG | 708 | 0 | 1 | 3999 | 5.0099111 | 5.715847 |
| AATGGTCTTCCTCCACCCCTCTG | 709 | 0 | 1 | 4451 | 4.8959856 | 5.1994057 |
| TCACTGCAAGCTCTGCCTTCCG | 710 | 0 | 2 | 9055 | 7.7008362 | 11.763208 |
| TGGTCTTTGTCCCTCCTTGATC | 711 | 0 | 1 | 3743 | 4.256711 | 2.9960811 |
| AGTGCAATGGCGTGATCTTGGC | 712 | 0 | 2 | 5951 | 8.6127348 | 17.549313 |
| ATGCCACTGCGCTCCAGCCTGG | 713 | 0 | 2 | 44255 | 14.692498 | 32.195774 |
| TTTCTTCCTGCTTTGTCCCATG | 714 | 0 | 1 | 4054 | 5.4825935 | 11.238956 |
| CTCTCGCCAGCGGGGCTGCGCT | 715 | 0 | 2 | 13140 | 7.6419506 | 17.506365 |
| TATGTTTGGCCTGGCAATTTCA | 716 | 0 | 1 | 2780 | 4.5881057 | 9.7094517 |
| CCACCAGCTGCATATGCACGTA | 717 | 0 | 1 | 1730 | 4.4214902 | 1.1879559 |
| GTGTCCCCACCCAAATCTCATC | 718 | 0 | 1 | 2826 | 5.9052849 | 6.1014419 |
| GGAAAGGCCTGGGTGTCCTGGG | 719 | 0 | 1 | 5274 | 6.3618565 | −1.7002298 |
| GGGCGGATCATTTGAGGTCAGG | 720 | 0 | 2 | 1943.5 | 6.9547186 | 9.5280085 |
| ACTGTACTCCAGCCTCGGTGAC | 721 | 0 | 1 | 3141 | 5.0527177 | 14.756032 |
| GATAATCCACTCTGCTGACTTT | 722 | 0 | 1 | 3054 | 4.3317614 | 6.3779197 |
| GCCTGTAATCCCAGCACTTTGG | 723 | 0 | 2 | 8675.5 | 12.842025 | 14.392535 |
| TTTAAATCACAACTCTGCCCCT | 724 | 0 | 2 | 15129 | 15.825633 | 8.2785378 |
| GATGAGTTTGCCTGGCCTGCAG | 725 | 0 | 2 | 25445.5 | 12.297516 | 17.035336 |
| TGCCACCCCGGACCCCGAAGTG | 726 | 0 | 1 | 2106 | 4.6232533 | 7.5721364 |
| CACTGCAACCTCCGCCTCCTGG | 727 | 0 | 2 | 55476 | 22.094246 | 10.714499 |
| CACTGCAAGCAAGCTCCGCCTC | 728 | 0 | 1 | 7633 | 15.721508 | 0.38197863 |
| GGCTCATATCCCGGCCATCATT | 729 | 0 | 2 | 2692.5 | 14.02678 | 7.6887875 |
| ATTCTGTGCTAACTGCAGGCCA | 730 | 0 | 2 | 4140 | 19.305922 | 11.530575 |
| CAGGCTGGAGTTCAGTGGTGTG | 731 | 0 | 1 | 1648.5 | 4.3088479 | 8.9180403 |
| CATTCCTGGCCCGGGCGCCGTC | 732 | 0 | 1 | 2736 | 4.0554576 | 10.724096 |
| CAGGTTCAAGCGATTCTCCTGC | 733 | 0 | 2 | 9179 | 16.397514 | 14.266402 |
| GCCTGGCCGGGTCTTGGATTTT | 734 | 0 | 1 | 5031.5 | 5.5863533 | 7.3384004 |
| GGTTCTCAGCCTGAGCCGCCCC | 735 | 0 | 1 | 18192 | 21.105703 | 1.4826102 |
| CGCGAGGTGGAGGTTGCAGTGA | 736 | 0 | 2 | 2801 | 7.2209163 | 4.0311246 |
| TCACTGCACTTCAGCTTGGGCA | 737 | 0 | 2 | 31458 | 10.144489 | 22.4685 |
| AAGTGCTGGGATTACAGGCGTG | 738 | 0 | 2 | 3421 | 6.6648126 | 13.608858 |
| ATGTGAGTGCTATGATAGACAG | 739 | 0 | 2 | 1139 | 8.0798817 | 5.4914975 |
| ATCACCCAGGCTGGAGTGCAGT | 740 | 0 | 2 | 4395.5 | 12.324327 | 14.314183 |
| TATCGAGCTGGACGGGCTGGTC | 741 | 0 | 1 | 6607 | 5.2088056 | 6.9531446 |
| GCTGTTTTCCCATAGCTGGTCA | 742 | 0 | 2 | 7061 | 19.803032 | 6.222959 |
| GGAGTGCAATGGCTTGATCTTG | 743 | 0 | 1 | 5693 | 6.7378373 | 1.033795 |
| AGGATCTTGCTATGTTGGCCAG | 744 | 0 | 2 | 2784 | 10.949057 | 7.9714575 |
| CTTTTCCCCTTTGGACTC | 745 | 0 | 1 | 4238.5 | 5.1553736 | 7.0349116 |
| CTGAGGCTGGAGTGCAGTGGTG | 746 | 0 | 2 | 4514 | 12.474048 | 16.694977 |
| GCCATGACTCTCCATACCAAAG | 747 | 0 | 2 | 1592 | 6.0272546 | 8.5714464 |
| CCTGCTGGCTCTGTTGCTCGGC | 748 | 0 | 1 | 13366.5 | 10.797435 | −3.9057117 |
| CCCTGCCTTGTCTGGGCTAGGT | 749 | 0 | 1 | 200 | 24.0046587 | 9.0806446 |
| GGCCCAGGTTGGAGTGCAGTGA | 750 | 0 | 2 | 2994 | 8.0930119 | 10.374014 |
| TGCTCTGTTGGCTTCTTTTGTC | 751 | 0 | 2 | 8407 | 17.417171 | 17.734081 |
| AGTGATTCTCCTGCCTCAGCCT | 752 | 0 | 2 | 35041 | 21.798445 | 19.430222 |
| AGTTGGCACTGAGCTGTGATTG | 753 | 0 | 1 | 3303 | 4.4303179 | −1.0004215 |
| AAGGTGGGTGGATCACGAGGTC | 754 | 0 | 2 | 1791 | 6.7066569 | 9.7404299 |
| GAATCCCTTGCATTATCCCTTT | 755 | 0 | 2 | 2882 | 6.153091 | 4.2042389 |
| TCCCCAAGCAGGCAATCTCCCG | 756 | 0 | 1 | 3149 | 4.4257097 | 6.5767608 |
| TGCCCACTGCTGGCCACCACCC | 757 | 0 | 2 | 32112 | 15.630626 | 16.785101 |
| GCCCTGCCCTCTCGGCACTCGC | 758 | 0 | 1 | 2717 | 5.5086098 | 11.520112 |
| AAAGTGCTAGGATTACAGGTGT | 759 | 0 | 1 | 820 | 4.1482205 | 4.6776071 |
| GGGCGGATCACCTGAGGTCAGG | 760 | 0 | 2 | 7018 | 13.621652 | 16.918211 |
| CTGTGCTCTTTCCACGGCCCCA | 761 | 0 | 2 | 6477.5 | 13.662484 | 9.3280506 |
| CTCCCCAGCCCTGGTATTCTGA | 762 | 0 | 1 | 5384.5 | 5.0192461 | 5.6187172 |
| CATTGCACTCCAGCCTGGGTAA | 763 | 0 | 2 | 65518 | 31.334749 | 27.271093 |
| GCGCTGCGCCTCCTCTTCCGCA | 764 | 0 | 1 | 2221 | 4.0475416 | 8.1211281 |
| AGTGCTGGGCTATCTACTGCTA | 765 | 0 | 2 | 18896.5 | 8.3062468 | 21.32906 |
| TGTGACTGGTTGTCCCGCTTTC | 766 | 0 | 1 | 2849 | 5.792357 | 8.2097464 |
| CTCATTGCAACCTCCGCCTCCC | 767 | 0 | 2 | 33077 | 19.544933 | 20.350861 |
| GCCATTGCACTCCAGCCTAGGC | 768 | 0 | 2 | 5526 | 10.291553 | 17.393818 |
| TTCCACATGTTAGCTGGTTAAA | 769 | 0 | 2 | 2748 | 17.300783 | 11.944987 |
| GACTGTGGGGAAGCAGATGCCA | 770 | 0 | 1 | 1511 | 4.0386124 | −0.97461921 |
| TGTCCGTGGCCTTCTGGAT | 771 | 0 | 1 | 4401 | 5.2269702 | 12.950581 |
| ACTGCATTCCAGCCTGGGCAAC | 772 | 0 | 2 | 65518 | 24.732506 | 33.288292 |
| TCCATTGGCCTTTTATCCTAGA | 773 | 0 | 2 | 5760 | 15.329782 | 8.1126537 |
| CACTGCAAGCTCCGCCTCTGGG | 774 | 0 | 2 | 7054.5 | 14.676391 | 11.85893 |
| CTTGGGAGGCAGAGGTTGCAGT | 775 | 0 | 1 | 1287.5 | 5.3808784 | 8.0099583 |
| TCCACAAGGCAGCTCCTCCAGG | 776 | 0 | 1 | 2706 | 5.4716368 | 1.7482823 |
| GCTCCCACCGCCGCTATGGGTA | 777 | 0 | 1 | 3502 | 4.3559012 | 3.5113876 |
| CTCGCATGCCCTGCCTCATCCA | 778 | 0 | 1 | 2410.5 | 5.5748396 | 0.29925746 |
| GGCCGGGGCCTGCTCGCCTGTG | 779 | 0 | 1 | 3488 | 5.4115729 | −8.3415947 |
| GGTCAGGAGCCCTTGGCCCCCT | 780 | 0 | 2 | 5270 | 7.1600103 | 6.9067311 |
| TGGTCTGGCCCACATGGTC | 781 | 0 | 2 | 8349 | 13.022524 | 4.8629713 |
| GGTTCAGAGCCTGCCCAGTATA | 782 | 0 | 1 | 1813 | 6.9879608 | −2.6342282 |
| CATTGGCCTTTTATCCTAGAGG | 783 | 0 | 2 | 4983.5 | 15.452302 | 15.902376 |
| TCCTCAGCTTGGCCACGGAGTT | 784 | 0 | 1 | 6478.5 | 5.8972673 | 17.989834 |
| ATGTTGGCCAGGCTGGTCTTGA | 785 | 0 | 2 | 2519 | 7.2414885 | 7.5854573 |
| GTCCACAGCTCTGAGGTCTCCC | 786 | 0 | 1 | 6493 | 5.3572183 | 1.3877324 |
| GCCTAGTGGATTTGAAGGGCC | 787 | 0 | 2 | 2352 | 11.945862 | 8.8114462 |
| TCAGCTCCTACCCCGGCCCCAG | 788 | 0 | 2 | 8279.5 | 11.228731 | 17.399603 |
| AGAGTCTCCCTGTGTTGCCCTG | 789 | 0 | 2 | 10467 | 7.4270558 | 12.602409 |
| GTGTAAGAACCTTCTAGAGCCC | 790 | 0 | 2 | 3204 | 7.0456204 | 2.6366203 |
| ACTGTAACCTCAAACTCCTGGG | 791 | 0 | 1 | 6067.5 | 5.62674 | 11.00416 |
| GTGGCCAACCTGGCCCTGAACT | 792 | 0 | 1 | 4379 | 4.9676137 | −1.203916 |
| TATTTGTCTGGTCTAAGGAGGG | 793 | 0 | 1 | 3219.5 | 4.6818242 | 11.217502 |
| GGAGTGCAGTGGCGTGATCTCA | 794 | 0 | 2 | 2509 | 9.1686945 | 10.351524 |
| TCCTCCAGAGCTTCATCCTGCC | 795 | 0 | 2 | 16927 | 19.618345 | 5.2284846 |
| TGAGGCCCACCTTGGCCCCGGC | 796 | 0 | 1 | 4794 | 5.7001333 | 14.264636 |
| ATGATGGCTAGGCTGGTTTTGA | 797 | 0 | 1 | 1068 | 4.3558846 | 3.1461418 |
| CGCCCCGGACGTCTGACCAAAC | 798 | 0 | 2 | 7410 | 6.9984522 | 2.8285146 |
| GGCCGCCCTTTCCACGGTTTCT | 799 | 0 | 2 | 2520 | 9.4387512 | 10.455907 |
| AGGCTTACAGCAGCAGGC | 800 | 0 | 1 | 1484 | 4.7118134 | −0.64998931 |
| GGCTTCCTGCCTCGGGCTGGCC | 801 | 0 | 2 | 58372 | 11.079018 | 4.4936109 |
| GATGGGTTTGTTGGAGAGGTC | 802 | 0 | 1 | 5425.5 | 4.8749881 | 17.533426 |
| TCACTGCAACCTCCACCTCCCG | 803 | 1 | 2 | 31810 | 20.186802 | 16.772465 |
| GAATGTGTACTGAGTGCCCCTT | 804 | 0 | 1 | 5542 | 12.220497 | −4.4586358 |
| TCCACTGTCCCTGGCACTTTT | 805 | 0 | 2 | 9134 | 6.4327211 | 12.8872 |
| GCACCACTACACTCCAGCCTGG | 806 | 0 | 2 | 3563 | 6.3702331 | 11.491977 |
| ATGGTAGCTGTCCACATCAGGA | 807 | 0 | 2 | 8208 | 25.85717 | 21.352978 |
| CTGAGGCAGGCAGATCACTTGA | 808 | 0 | 1 | 1210 | 4.8558879 | 3.7993965 |
| GTGGCCCAGGTTGGAGTGCAGT | 809 | 0 | 2 | 4915 | 12.333922 | 6.7368903 |
| GACCTTGTGATCTGCCCACCTT | 810 | 0 | 2 | 8467 | 31.729177 | 18.925035 |
| GTGATCTGCCAGCCTCAGCCTC | 811 | 0 | 2 | 7194 | 15.083432 | 9.3042612 |
| AGACAGGGTGATCGCTTGAGCC | 812 | 0 | 1 | 3466 | 4.6497626 | 7.744925 |
| CCCAGGAGGTCAAGGCTGCAGT | 813 | 0 | 2 | 2036.5 | 6.6226544 | 11.643046 |
| CGGTCTCCCGTGTGTGTGCGCT | 814 | 0 | 1 | 4407 | 5.3256574 | 16.37768 |
| AGCGGGGTGTTTTGGGTGGCCT | 815 | 0 | 1 | 4033.5 | 8.2409916 | 0.52406603 |
| GTCTCCTCCCTTTCATTCACCT | 816 | 0 | 2 | 4807 | 8.0566654 | 3.426122 |
| CCTGCTCTCTGTTCTTAAGCTT | 817 | 0 | 2 | 5021 | 9.0648565 | 7.4354005 |
| CAAGTGGAATGCTCTTCCTCCC | 818 | 0 | 1 | 3123.5 | 4.0142264 | 6.7150235 |
| AAGGCCGCCCCTTCATGCTCCT | 819 | 0 | 2 | 6358.5 | 9.1175785 | 8.5895061 |
| TGTCCTCATCCTCCAGTCTGTC | 820 | 0 | 1 | 3129 | 5.6114564 | 1.2281151 |
| TGGCGATGGTCATTTTTC | 821 | 0 | 2 | 2609 | 7.1536875 | 3.1643765 |
| TTGGGGGAGGCCTGCTGCCCAT | 822 | 0 | 2 | 3549 | 9.3567915 | 8.3044834 |
| GCGGGGCCCGGACCCAGCCTCT | 823 | 0 | 1 | 4254 | 4.2667646 | 3.5057929 |
| TGGGGTATCCGTTAGTAAGATG | 824 | 0 | 1 | 3380.5 | 4.0906634 | 13.235014 |
| TGGAGTTGGCCGCCCGGACCGA | 825 | 0 | 2 | 8187 | 7.0123053 | 19.997877 |
| AGTGTGTTGTAGGCTCAAATGG | 826 | 0 | 1 | 1296.5 | 5.0562248 | 4.8389935 |
| CGCTTCCAGAGTAAGGCGCTGC | 827 | 0 | 1 | 2448 | 4.256711 | −0.95797318 |
| GATATCATTGAGCCCAGGAGTT | 828 | 0 | 1 | 3794 | 4.876976 | 13.768772 |
| CACTGCACTCCAGCTTGGGTGA | 829 | 0 | 2 | 65518 | 18.826578 | 34.620605 |
| CTGAAGCCCAGCTTCC | 830 | 0 | 1 | 10934 | 14.751002 | −0.56149203 |
| CATCTCTGGCTTGGATTATGGT | 831 | 0 | 1 | 2875.5 | 4.1804218 | 9.7742558 |
| TTTACCTTTGTGGGTCTCCCTC | 832 | 0 | 1 | 3593 | 4.5381126 | 8.0754824 |
| CTAGCCCCTACTCCAAGTTGA | 833 | 0 | 2 | 6032.5 | 13.43356 | 13.731526 |
| GCTGGCAAGGTGCTGGAGGGCC | 834 | 0 | 2 | 3498.5 | 14.638888 | 3.7599447 |
| TTCCAAAGGCTGCACCTTGCCC | 835 | 0 | 1 | 6400 | 14.44299 | −2.3250175 |
| GAAGGGGGAAGAGAGCTGGCCG | 836 | 0 | 2 | 63993 | 20.677708 | 18.040138 |
| TTGTTCCTATCTGCCTCCTGC | 837 | 0 | 2 | 4838.5 | 9.8048887 | 4.8166785 |
| TGGAGCTGGGTCTGGGGCA | 838 | 0 | 2 | 6426 | 15.46969 | 17.843594 |
| CACTGCACTCCAGCCTGGGTGA | 839 | 0 | 2 | 65518 | 28.667358 | 32.660065 |
| CATTGCACTCTAGCCTGGGTGA | 840 | 0 | 2 | 20339 | 14.318895 | 21.095203 |
| AGCCTGTCCCTTCTCCTG | 841 | 0 | 2 | 4545 | 14.269382 | 3.7745585 |
| TCACCCAGGCTGGAGTGTAGTG | 842 | 0 | 2 | 4518.5 | 12.479655 | 15.868072 |
| CTGCTGCCGGAGACTCGTC | 843 | 0 | 1 | 1437 | 4.8540587 | 2.4149714 |
| AAAACCTAAGCCAGTAGCTCCC | 844 | 0 | 1 | 2386.5 | 4.5235443 | 0.87618637 |
| GGCTCACTGCAACCTCCACCTC | 845 | 0 | 2 | 38975.5 | 20.41017 | 17.418346 |
| CTGTAATCCCAGCTACTCGGGA | 846 | 0 | 1 | 2806 | 5.0527177 | 13.475494 |
| GCCATCATATCCCCTGTGACCT | 847 | 0 | 2 | 5493 | 17.421993 | 9.6620798 |
| CCAGGTTGGAGTTCAGTGGCGC | 848 | 0 | 1 | 1854.5 | 4.1551623 | 4.9337268 |
| TGGTTAACTTCTGAGCAGGCTG | 849 | 0 | 1 | 1338 | 4.0301342 | 2.5747242 |
| GCTGGCTGACAGATTTGGGGTG | 850 | 0 | 1 | 3232 | 5.4790416 | −2.1113901 |
| CATCCCTGTCGTCAAGTCTCTG | 851 | 0 | 1 | 6284 | 5.1015582 | −0.33885518 |
| AAAGTGCTGCGACATTTGAGCG | 852 | 0 | 2 | 20430.5 | 8.490345 | 28.331139 |
| ATGTCATGAGGCTAGCCCCCAA | 853 | 0 | 1 | 1710 | 6.4409542 | −1.0215437 |
| AATCACTTGAACCCAAGAAGTG | 854 | 1 | 0 | | | |
| TGAGGCAGGCGGATCACGAGGTC | 855 | 0 | 2 | 1475 | 6.1789246 | 8.965416 |
| AAGAGGTAGCAGTCACAAAAGA | 856 | 0 | 1 | 682 | 4.1900787 | 3.1956244 |
| CCGTGGTCACCTGAGCTCCTTG | 857 | 0 | 1 | 2997 | 4.0277519 | −1.3587624 |
| CAGTTTCTTCCTCCCCCAGAGA | 858 | 0 | 1 | 2348 | 4.165566 | 0.71364939 |
| ATCTTTTATCACTCCCACTGCT | 859 | 0 | 1 | 5396 | 5.4679914 | 11.567021 |
| TCACCCAGGCTGGAGTGCAGTG | 860 | 0 | 2 | 6851 | 14.545588 | 17.889225 |
| TCTCCCAGGCAGGAGTGCAGTG | 861 | 0 | 2 | 2795 | 6.2941146 | 8.1798553 |
| GGGGCTGGTCTTTCCACTTACT | 862 | 0 | 2 | 65518 | 11.24554 | 19.391401 |
| TGTAATCCCAGCTACTCGGGAG | 863 | 0 | 2 | 4677 | 11.408354 | 16.218851 |
| CTGATCTCAAGTGATCCACCCA | 864 | 0 | 2 | 2249 | 7.9458203 | 9.493042 |
| TAGGTTACAGCCAGCCAG | 865 | 0 | 2 | 1963 | 10.949057 | 11.221157 |
| CCTCTGTGTCTCCAAGAGGCCT | 866 | 0 | 1 | 3752 | 9.7851496 | 0.61701149 |
| CTGCCTGCCTGGCCCAGGAACC | 867 | 0 | 2 | 65518 | 14.752467 | 36.164337 |
| ACAAAGTGCCTCCCTTTAGAGT | 868 | 0 | 2 | 65518 | 22.461653 | 34.028076 |
| GGGGAAAGCCAGCCCTGCTTCC | 869 | 0 | 2 | 1892.5 | 6.826138 | 6.2401505 |
| GGAGTGCAGTGGTGGGATCTCA | 870 | 0 | 1 | 1541 | 5.5753407 | 8.2118359 |
| ATCGATCCCGCGTAAGGCCCCG | 871 | 0 | 1 | 1231 | 4.8226123 | 1.2662603 |
| TCTGTGCTAGGCAGCCTGGCCC | 872 | 0 | 2 | 11107 | 23.362293 | 13.677877 |
| CTGTCCCCACCCAAATCTCATC | 873 | 0 | 2 | 2917 | 10.575051 | 6.3207545 |
| GAGCCGCCCTCCACGATGTCCC | 874 | 0 | 2 | 7252 | 8.6663809 | 14.735928 |
| GGTGGTGGAGCGGGCCCAGGCC | 875 | 0 | 2 | 4320.5 | 7.4591732 | 12.328825 |
| TCACTGCAACCTCCACCAGCCT | 876 | 1 | 0 | | | |
| CTGTCCTGCCAGTCCTGGACTC | 877 | 0 | 1 | 3377 | 5.8142152 | 7.2265315 |
| GGCGGGCAGCGTCTTGCTGGCC | 878 | 0 | 1 | 4755 | 7.4653172 | −11.274526 |
| TCCTGGGGCTTGTCGCTGGCCA | 879 | 0 | 2 | 28926 | 9.8624611 | 7.4913173 |
| CAGCTGGTGCTTGCCTGGCTAA | 880 | 0 | 2 | 7373 | 13.676201 | 7.9258513 |
| CAGGCTGGCTCCCTGAAGGTTC | 881 | 0 | 2 | 8459.5 | 6.1472831 | 17.683357 |
| AGGTGGCCACAAGGTGGCTGGC | 882 | 0 | 2 | 13621 | 20.378857 | 17.680929 |
| TGGAGACACAGGACCAGACTGC | 883 | 0 | 2 | 2004 | 6.981535 | 2.3005965 |
| GGCTCTGGCTTTGGAGGAGCAG | 884 | 0 | 2 | 4483.5 | 6.8781896 | 14.473881 |
| CTGGCTAAGATCCAAGAAAGGC | 885 | 0 | 2 | 5036 | 14.178236 | 6.6532001 |
| GCTGTAGTGAATGGCCGCGTTC | 886 | 0 | 2 | 15429 | 7.8280811 | 7.1725068 |
| TGTTTGTGTGGGGCCTTGGC | 887 | 0 | 2 | 7702 | 6.3522415 | 7.8300943 |
| ATCAAGAGCACAGTGCTGGCAT | 888 | 0 | 1 | 1172 | 4.3064132 | 2.099376 |
| CTGGGAGGCGGAGGTTGCAGTG | 889 | 0 | 2 | 4850 | 10.57113 | 16.432323 |
| TCACTGCAACCTCCGCCTCCCG | 890 | 0 | 2 | 42376 | 20.906567 | 16.209127 |
| TCTCTATTTGCCTAGGCTTGTG | 891 | 0 | 1 | 1775 | 4.0386124 | 5.2510257 |
| GTGGCGTGATCTCGGCTCACTG | 892 | 0 | 2 | 5379.5 | 9.6190071 | 14.266473 |
| TCGTTACCATAGCCTTGTCCCT | 893 | 0 | 2 | 2169 | 6.6286459 | 10.14022 |
| CCCAGGAGGCCTGCCTGGCCGG | 894 | 0 | 1 | 4711 | 5.0298901 | 9.8042231 |
| CAGCTCGGGCCTCCCTCTCCCG | 895 | 0 | 2 | 5136 | 8.3545942 | 10.162696 |
| ATGAGATGAGGAATGGCCCTCC | 896 | 0 | 2 | 2753 | 10.024472 | 4.1300974 |
| AGGCCGAGGCGGGCGGATCACC | 897 | 0 | 1 | 1354 | 5.2067318 | 8.9456701 |
| ACGGTGCAGCCTGTCCCTTCTC | 898 | 0 | 1 | 3755 | 6.826138 | −1.7736735 |
| GGAGGTACTGTAGCTGGCGTT | 899 | 0 | 2 | 1877 | 10.634505 | 9.6884193 |
| CTTTGGAACACCCAGCTCTGTG | 900 | 0 | 1 | 4367 | 4.3228598 | 8.8246651 |
| TGGGCGACAGAGCAAGACTCCG | 901 | 0 | 2 | 8120.5 | 7.6260972 | 20.824087 |
| TGGGTGACAGAGCAAGACTCTG | 902 | 0 | 1 | 3917.5 | 4.9988604 | 13.126308 |
| TGGCTTTAGTAATAAGTTTCTC | 903 | 0 | 2 | 12660 | 16.773508 | 11.141039 |
| TGCTAGCTGCCCGAAGGTCTCA | 904 | 0 | 2 | 39989 | 47.058292 | 15.67876 |
| GCTTCAGAGAGGGGTGAAGCTG | 905 | 0 | 2 | 21900 | 17.158428 | 13.963737 |
| GCTGCCTTGCCCTCTTCCCATA | 906 | 0 | 2 | 8045 | 13.299488 | 9.9672127 |
| GCTGTAAGTCACCTGGCCCGAT | 907 | 0 | 2 | 26191 | 8.8471966 | 25.053482 |
| TGCTGGCTATCCTGCGCCTTTC | 908 | 0 | 2 | 7903 | 10.469044 | 13.746831 |
| CCAGGCTGGAGTGCAAGCAGCA | 909 | 0 | 2 | 8552.5 | 10.636292 | 19.600433 |
| GCTAGGTTGGGGAAGTTCTCCT | 910 | 0 | 2 | 2180 | 6.2453051 | 9.2986526 |
| CCAAAGTGCTGGGATTACAGGC | 911 | 0 | 1 | 2212.5 | 5.0945106 | 7.6044312 |
| GCCTGGACTGTTCTACCATTTT | 912 | 0 | 1 | 2709.5 | 4.8429475 | 1.7205493 |
| GCCGGGCCCGGGTTGGCCG | 913 | 0 | 2 | 11714 | 7.709898 | 8.2685728 |
| CAGCCTCTATGCCCCCGTCACC | 914 | 0 | 2 | 9484 | 16.652414 | 11.957335 |
| CTGGCTAGATGTGTGGCCATGA | 915 | 0 | 2 | 3221 | 21.032122 | 14.058989 |
| ACTGCACTCCATCCTGGGCAAC | 916 | 0 | 2 | 46281.5 | 15.235478 | 33.271416 |
| CCTTCTCAGCCCCAGCTCCCGC | 917 | 0 | 1 | 3674 | 6.026938 | 0.30380982 |
| GTCTCCCAAACTCTGATGGTCC | 918 | 0 | 1 | 5069 | 6.4115953 | −0.19100553 |
| GGTCCCCCCATGGTGAGCACTG | 919 | 0 | 1 | 2640 | 6.9299874 | −3.5790675 |
| CGGGTTCACGCCATTCTCCTGC | 920 | 0 | 2 | 25205.5 | 15.182484 | 6.2870688 |
| AGCGACACCGCCTGCAGGCCAT | 921 | 0 | 1 | 3210 | 17.247011 | 1.8362232 |
| GAACTTGGCCTGTCTGTCTGGC | 922 | 0 | 1 | 3174 | 4.165082 | −0.96377498 |
| TGGGTCAGAGGGAAAGTGTAT | 923 | 0 | 1 | 1240 | 5.4864416 | 4.4304075 |
| TGTTGCCCAGGTTCTCTCCTGC | 924 | 0 | 1 | 2527 | 4.6479778 | 4.8975463 |
| CATTGCACTCCAGTCTGGGCCA | 925 | 0 | 2 | 20401.5 | 20.588572 | 15.621833 |
| TGGTTCTTCGCTGGGCGGCTGC | 926 | 0 | 2 | 18451 | 17.683105 | 11.562138 |
| CAAAGTGCTAGGATTACAGGCG | 927 | 0 | 2 | 1593 | 7.9515629 | 8.8260517 |
| TGGTAGGTACTGGCTTCAGGC | 928 | 0 | 1 | 1959 | 5.7638865 | 10.948694 |
| CACTGCACTCCAGCTCTGGGT | 929 | 0 | 2 | 65518 | 20.15584 | 31.571056 |
| GTCTTGTCCCAGCTCTGCCACT | 930 | 0 | 1 | 5667 | 5.9998269 | 10.289277 |
| GCCTGGGAGTTGCGATCTGCCCG | 931 | 0 | 2 | 65518 | 31.678772 | 9.6128397 |
| GCAGCATCCCGGCCTCCACTGT | 932 | 0 | 2 | 5995 | 7.2606683 | 11.881517 |
| TCTGCCCCAGCCGCACTG | 933 | 0 | 1 | 3479 | 5.2319188 | 7.0148258 |
| ACCCATCCAGTGTCCCTGCTAG | 934 | 0 | 2 | 3030 | 8.7047195 | 5.2593546 |
| GCCTGGCCAACATAGTGGGACC | 935 | 0 | 2 | 16749 | 8.6138811 | 20.486101 |
| CATTGCACTCTAGTCTGGGTGA | 936 | 0 | 1 | 2023 | 4.2580843 | 8.942131 |
| AAGACACCAGTGGCAGCCCC | 937 | 0 | 2 | 3888.5 | 10.940197 | 2.9559026 |
| TCCTGGGCTTTGGCTTGTTGGG | 938 | 0 | 2 | 10813.5 | 7.7058806 | 7.1675959 |
| TGGTAGTCGGCCTCGGTGGCTC | 939 | 0 | 2 | 38277.5 | 43.447659 | 21.633255 |
| TACTGCGCCTTCACCAAGCGGC | 940 | 0 | 2 | 2073 | 6.069356 | 2.6888943 |
| TCACTGCAAGCTCCGCCTTCCG | 941 | 0 | 2 | 11075 | 17.517977 | 5.425684 |
| AGTGCCTTCAGATTTGCCCCAG | 942 | 0 | 1 | 5977 | 9.7207422 | 0.54957581 |
| ACCCTCTTGAGGGAAGCACTTT | 943 | 0 | 2 | 7337 | 6.0748458 | 18.790304 |
| GCCCCAAGTCCCTATGTTTCCA | 944 | 0 | 1 | 8950 | 12.678107 | 1.0439761 |
| ATCCCCCTGTATCTGGAAGAAT | 945 | 0 | 1 | 2318 | 5.7854853 | 3.7798862 |
| GTGCTTTGCTGGAATCGAGGAA | 946 | 0 | 2 | 1710 | 10.403996 | 8.5636625 |
| GAGGCTGAGGTTGCAGTGAGCC | 947 | 0 | 1 | 1366.5 | 5.0199966 | 6.459177 |
| TGGTCGGGCTGCATCTTCCGGC | 948 | 0 | 2 | 4093 | 7.5570545 | 2.1106353 |
| ACCACTGCCTCCAAGGTTCAG | 949 | 0 | 2 | 3247.5 | 10.014809 | 6.09551 |
| TTTGGTCCCCTTCAACCAGCTA | 950 | 0 | 2 | 13310 | 7.6353297 | 18.880299 |
| GGTATGCTGAAGCCAGCTCGCA | 951 | 0 | 2 | 792 | 6.1946688 | 4.135592 |
| TTGCTTGGGCTGGAGTGCAATG | 952 | 0 | 1 | 2486 | 4.9725943 | −2.7821193 |
| TATCTATGTGCTCTGACCTCTC | 953 | 0 | 2 | 6670 | 9.7406015 | 7.9747272 |
| AGGAGAAGCCAAGTTGTGAGCA | 954 | 0 | 2 | 6905.5 | 29.559206 | 20.101482 |
| ACCCATGGTCTGGTGGGGCCCT | 955 | 0 | 1 | 4897 | 5.121223 | 1.2881944 |
| ACCCCGCTCCTTGCAGCCTCTG | 956 | 0 | 2 | 9609 | 6.7912097 | 4.80404 |
| CACTGCAAGCTCCGCCTCCCGG | 957 | 0 | 2 | 13890 | 17.77289 | 14.108605 |
| ATTCTTGGATTTGGCTCTAGTG | 958 | 0 | 1 | 2081 | 5.359941 | 9.4660416 |
| ACTGCACTCCATCCAGCCTGGC | 959 | 0 | 2 | 5668 | 7.6480083 | 10.938603 |
| GCCCAGGCTGGAGTGCAGTGGT | 960 | 0 | 2 | 12883 | 15.701074 | 24.210485 |
| CTGCGTTCTGCCTGGCGGCCTA | 961 | 0 | 2 | 5047 | 6.173347 | 11.160098 |
| TCACTGCAAGCTCCACCTCCCG | 962 | 0 | 2 | 9843 | 15.895414 | 13.694772 |
| CACTGCCTTGGCCACCTATCCT | 963 | 0 | 2 | 10671 | 9.1234684 | 14.108407 |
| TCCTTTAAACAACCAGCTCTCA | 964 | 0 | 1 | 2428 | 5.5528088 | 7.3969135 |
| GGCCTCTCTTGGGACAGCTGTC | 965 | 0 | 2 | 2816.5 | 11.840509 | 11.64073 |
| GAAGAGTGGTTATCCCTGCTGT | 966 | 0 | 1 | 2580 | 4.6407037 | 10.335828 |
| CCCTGATAGCCCCTATCATCAG | 967 | 0 | 2 | 3127 | 14.184772 | 3.5698271 |
| CACTGCAACCTCTGCCTCCTGG | 968 | 0 | 2 | 53207 | 22.508492 | 13.233194 |
| TCATTGCAACCTCCTCCTGGGT | 969 | 0 | 2 | 5648 | 10.772061 | 9.7537737 |
| CTGCAGTCTACCTGGATTTTTA | 970 | 0 | 1 | 4922 | 4.5788498 | 17.83988 |
| GGACCCTAGAGAGAGCCAGCCT | 971 | 0 | 1 | 1774.5 | 10.895789 | 0.5640983 |
| ACCCGATGTTGGTGCTCTAGTA | 972 | 0 | 1 | 2346 | 5.8714437 | −2.1286945 |
| CGGAGGTTGAGGCTGCAGTGAG | 973 | 0 | 1 | 1322.5 | 4.7339053 | 5.850657 |
| TTGCATCTTCTGGTTGAGCCCC | 974 | 0 | 1 | 3115.5 | 4.8583755 | 5.3206172 |
| GAGAGAGCTCTGTGCCTGGGAT | 975 | 0 | 1 | 1460 | 4.1398292 | 2.7307003 |
| GGCCCGGTGACGTCACT | 976 | 0 | 1 | 2095 | 4.7288775 | −1.6421453 |
| TCTAGCTCTGCTTATCATGGCT | 977 | 0 | 1 | 4019.5 | 11.909512 | 1.1704206 |
| CTGGCTGGAGTGCAGGTGAGTG | 978 | 0 | 2 | 4570 | 6.2398477 | 8.3825598 |
| GATGGCCTCATGGCTGCAGGCC | 979 | 0 | 1 | 902 | 4.7118134 | 1.0811797 |
| GAGGCCAAGGTGGGCAGATCAC | 980 | 0 | 2 | 2720.5 | 8.2338047 | 10.671504 |
| GTCCTTCCACATGGCCAACTTC | 981 | 0 | 1 | 3716 | 4.1157985 | 8.4863319 |
| CAGGAGTTTTAAATCTAGCATG | 982 | 0 | 1 | 1165.5 | 10.034127 | −3.4165139 |
| GGAGGGGCTCAGTCTTTCTTGG | 983 | 0 | 2 | 2551 | 7.60566 | 8.0373402 |
| AAGGCAAGGCTTCCAGCTCCCC | 984 | 0 | 2 | 2465.5 | 6.0202217 | 6.2276101 |
| TCACTGCAACCTCCACCACGTG | 985 | 1 | 0 | | | |
| CACCGAGGCTGGAGTGCAGTGG | 986 | 0 | 2 | 3565 | 11.145717 | 13.107421 |
| CCACAGTCCTGGCTTCTGTCTG | 987 | 0 | 1 | 4568 | 4.546155 | 15.062599 |
| GCCCGCTGGCTGGGCTCCAGCT | 988 | 0 | 1 | 3048 | 4.0028958 | −8.7108431 |
| ACTGCACTTCAGCCTGGGTGAC | 989 | 0 | 2 | 21975 | 15.030581 | 28.149118 |
| CTTCCCACCAAAGCCCTTGTTG | 990 | 0 | 2 | 3477.5 | 6.069356 | 7.7381773 |
| AAGTGCTGGGATTATAGGCATG | 991 | 0 | 1 | 1598 | 4.0027814 | 6.5471692 |
| TCGTGATCTGTCCACCTCGGCC | 992 | 0 | 2 | 5621.5 | 23.653496 | 15.646881 |
| GCGGCAGGAGTAAAGGAGGAAG | 993 | 0 | 2 | 3316.5 | 10.005136 | 13.926331 |
| GGCTCACTGCAAGCTCCGCCTC | 994 | 0 | 2 | 20587 | 20.311087 | 3.6339736 |
| GTGCCCAGCAGCAGCGTCCCCG | 995 | 0 | 1 | 2773 | 6.90412 | −1.4229031 |
| ACTGTACTCCAGCTCTGGGTGA | 996 | 0 | 2 | 8927.5 | 10.2185 | 21.731802 |
| GGAGGCGGAAGTTGCAGTGAGC | 997 | 0 | 2 | 2314 | 8.7133474 | 5.029707 |
| TGGTTGTTAGGGAAGATTCATC | 998 | 0 | 1 | 1996 | 5.7277908 | −0.53821027 |
| ACCTCCTGGCGGGCATCCTC | 999 | 0 | 1 | 3524 | 4.3451629 | 9.1596689 |
| TAGCTGAATTGTGGGAGACCTA | 1000 | 0 | 1 | 1518.5 | 7.60566 | −4.9874139 |
| TCCTGCCGTCCTCCGGGGCCTC | 1001 | 0 | 2 | 9326 | 11.404112 | 5.8492618 |
| TGGTTGTGCACGGGTTGGT | 1002 | 0 | 1 | 4287 | 5.809895 | 12.026738 |
| TGTCCAGGCTGGAGTGCAGTGG | 1003 | 0 | 2 | 9691 | 12.871147 | 16.345312 |
| AAAGATGTTGCTGCTCCGCCCT | 1004 | 0 | 1 | 10873 | 11.395624 | −1.3708899 |
| TGGGAGGCCGAGGCAGGTGGAT | 1005 | 0 | 2 | 1509 | 6.3071833 | 8.9423923 |
| TCACTGCAACCTCCACCTTCCG | 1006 | 1 | 0 | | | |
| CTCCTGAATTGTCCCTCACAGC | 1007 | 0 | 1 | 3894 | 4.6719613 | −2.2086017 |
| CAAAGTGCTGGGATTACAGGTG | 1008 | 0 | 1 | 2224 | 4.9705548 | 11.770996 |
| CATGGTGAAACCCCGTCTC | 1009 | 0 | 2 | 3678 | 7.6599259 | 10.599221 |
| CATCCAGGCTGGAGTACAGTGG | 1010 | 0 | 1 | 1197.5 | 5.0059147 | 6.9278154 |
| TTGGCCATCTAAGCCCAGCCAC | 1011 | 0 | 2 | 2464 | 9.1909533 | 7.750977 |
| GGCCGCCGCCTTGTGCTCTGC | 1012 | 0 | 1 | 5552 | 9.3362026 | −7.5507455 |
| CCCTCTGGCCCCTGTGGTGGAT | 1013 | 0 | 2 | 65518 | 14.648276 | 19.804953 |
| TAACAGATGTCATTTCGGCGGC | 1014 | 0 | 1 | 43807 | 16.818501 | 0.21859378 |
| TCTCTTTGCCTGCTGCCATCCA | 1015 | 0 | 2 | 11985 | 23.580763 | 9.5384855 |
| GCTCTAGTAGGAATGTCCCTCT | 1016 | 0 | 2 | 6301 | 15.744108 | 2.9028673 |
| AGCTCAATGCAACCTCCGCCTC | 1017 | 0 | 2 | 11240 | 13.15651 | 6.5624309 |
| CCTGGTTCAAGTGATGCCCCT | 1018 | 0 | 2 | 11617.5 | 9.2222452 | 3.8587017 |
| CACCTGTACAGGGCCGGGCTGG | 1019 | 0 | 2 | 15471 | 7.5139775 | 10.770471 |
| CTGCAGCCTCCACTTTCTGGGC | 1020 | 0 | 1 | 2839 | 4.7054248 | 13.918253 |
| GCCCCCGAGGAGGTGATGTCGC | 1021 | 0 | 1 | 5201 | 12.058164 | −2.6986685 |
| GAGGTTGGGGCTGCAGTGAGCT | 1022 | 0 | 2 | 2391.5 | 7.2082191 | 11.666763 |
| ACTGCACTCCAGCCTGGGCGGC | 1023 | 0 | 2 | 65518 | 25.924618 | 35.366241 |
| CTCTGTGGTGGAGTGGGTCACC | 1024 | 0 | 1 | 2634 | 4.6613207 | 1.0710925 |
| GACCTTGTGATCCGCCCACTTT | 1025 | 0 | 2 | 3834 | 7.5950313 | 9.0545225 |
| GGGGCTTCTAGGGTGCCAGATC | 1026 | 0 | 2 | 3012.5 | 13.356146 | 7.901947 |
| TTGCTGACCTTTGCTCTCCGTT | 1027 | 0 | 1 | 4311 | 5.1390486 | 6.5618801 |
| AAGTGCTGGGATTACAGGTGTG | 1028 | 0 | 2 | 3352.5 | 6.344357 | 13.838893 |
| CAGCAGAGAAATTACATATTTG | 1029 | 0 | 1 | 1053.5 | 5.0869894 | 0.55714673 |
| TGGCTTTCTCACAGACCACCTC | 1030 | 0 | 1 | 8109.5 | 13.15651 | −1.1421698 |
| AATAAACAAAGGACAAGGAGGT | 1031 | 0 | 1 | 913 | 5.4493914 | −0.35933188 |
| GCTCACAGCCTCCCCCGGCCTG | 1032 | 0 | 2 | 13198 | 7.8765292 | 3.4258959 |
| GTGGTTCACTTGAGGTCAGGAG | 1033 | 0 | 2 | 2687 | 7.6964669 | 6.9500546 |
| CCCAAAAGTTCTGAGATGGCT | 1034 | 0 | 1 | 1275.5 | 7.5570545 | −0.66594625 |
| CTGGAGGAGCTGCCATG | 1035 | 0 | 2 | 3669 | 12.842446 | 14.933422 |
| TGTCTATTCCCCCACCTCCGTT | 1036 | 0 | 1 | 2379.5 | 4.5837574 | 3.2563431 |
| GGCCTGGCAGAGCGCGCGGCTG | 1037 | 0 | 1 | 3187 | 4.2506533 | 0.47298598 |
| CCAGGCTGGAGTGCAATGGCGT | 1038 | 0 | 2 | 1892 | 6.8911996 | 11.028392 |
| CGCCCAGGCTGGAGTGCAGTGG | 1039 | 0 | 2 | 12926 | 16.758549 | 16.607355 |
| TGGCTCCTCACGTCCTCAGAGC | 1040 | 0 | 1 | 1612 | 5.3898416 | 4.4133153 |
| TCCTCCAGTTCCTTGGTTTCAG | 1041 | 0 | 1 | 4451.5 | 4.743588 | 5.2467165 |
| TGGTGGAATTGTAAAATAGTGT | 1042 | 0 | 2 | 3325 | 12.173241 | 2.7421064 |
| CGACCTTGTGATCCTCCCGCCT | 1043 | 0 | 2 | 4594 | 6.1166434 | 4.4487605 |
| TAGCTCCTCCCAGATCTCATCT | 1044 | 0 | 2 | 3659 | 10.385338 | 3.9473054 |
| CCACGCATCCCTCCACAGAGAG | 1045 | 0 | 1 | 2981 | 4.6559062 | 10.40073 |
| ACCCAGGCTGGAGTGCAGTGGG | 1046 | 0 | 2 | 4950 | 12.992976 | 17.386417 |
| GCACCGCCTTGGACCGCCCGCT | 1047 | 0 | 1 | 3964 | 4.1457386 | 10.605991 |
| CAACATGGTAAAACCCCGTCTC | 1048 | 0 | 1 | 2540 | 4.2821875 | 2.931881 |
| GGCTGGGCCTCTCCCTCAGCTG | 1049 | 0 | 1 | 6453 | 5.1583419 | 16.296978 |
| TTTTCTCTTCCCTCTGGACCTG | 1050 | 0 | 1 | 3826 | 4.9174376 | 7.1403542 |
| AGGCCCCCTCCACCCATTCTGG | 1051 | 0 | 2 | 2151 | 8.4221792 | 7.0899777 |
| AGTTTGTGTAAGAAAAGC | 1052 | 1 | 0 | | | |
| TCAGGGCTGCACTGGCTGGTCT | 1053 | 0 | 2 | 9852 | 10.620815 | 11.96568 |
| CCCTCGTGCATCCATCATTTAG | 1054 | 0 | 2 | 2096 | 6.675056 | 2.2716882 |
| CACTGCACTCCAGCCTGGCCTG | 1055 | 0 | 2 | 65518 | 20.659618 | 21.962681 |
| TTCACTGCTCTAGCCCTAATTT | 1056 | 0 | 2 | 5739 | 15.599205 | 7.8376389 |
| AAGACACCAGAGACTGGCCTCA | 1057 | 0 | 1 | 6306 | 5.8909965 | 5.1631103 |
| CAGAGCTGGTGTGTCCTGGCAT | 1058 | 0 | 1 | 4347 | 4.3130379 | 0.72330654 |
| TATTGGCCGGGCGCGGTGGCTC | 1059 | 0 | 1 | 3005 | 5.9769301 | 7.7475381 |
| AGGTCTCTTGCTGTCTCTGGGC | 1060 | 0 | 1 | 8026.5 | 6.4136252 | 0.43719938 |
| TAGCCCAGGCTGGAGTGCAGGG | 1061 | 0 | 2 | 6013 | 9.3222113 | 19.078527 |
| CACTGCACTTCAGCCTGGGTGA | 1062 | 0 | 2 | 65518 | 19.494125 | 35.251587 |
| AGTGTTGGCTCGGCTGGCTGCC | 1063 | 0 | 2 | 9220.5 | 15.521686 | 7.1320724 |
| CTCTGCTGTGCCGCCAGGGCCT | 1064 | 0 | 1 | 5084 | 6.4544711 | 0.20225658 |
| TGCAATCCAGCCTGGGCGACA | 1065 | 0 | 1 | 4499 | 4.9212852 | 16.91279 |
| AGTGATCCACCCGCCTCAACCT | 1066 | 0 | 2 | 5364 | 8.4659891 | 7.8198662 |
| TGCCGTGGGGCTGAGGCTGGAG | 1067 | 0 | 1 | 4521 | 4.5795527 | 15.352057 |
| TTTAGATTGTGACCTCCCCCCA | 1068 | 0 | 2 | 5251.5 | 9.5200853 | 6.4590821 |
| GGAGGCTGGCCTTCAGACGGGT | 1069 | 0 | 2 | 65518 | 12.034198 | 25.266558 |
| CCTGCCAGAGCAGCTTGTCCTC | 1070 | 0 | 2 | 3950 | 6.2292013 | 6.3928571 |
| TGGCCTCGGCATCCAGCAAGAG | 1071 | 0 | 1 | 4673 | 4.4677706 | 4.3334913 |
| CCACGGGCAGATGTGGTTGGTT | 1072 | 0 | 2 | 2023.5 | 6.754149 | 4.0614367 |
| ACTGTACTCCAGCCTGGGGGAC | 1073 | 0 | 1 | 3910 | 5.224843 | 16.213413 |
| CCCTCTTGGCTTCTATCCCACC | 1074 | 0 | 2 | 7596 | 7.1978688 | 6.3785648 |
| GCCCACGGCCCTGCTCTGC | 1075 | 0 | 1 | 3930 | 4.9654756 | 0.13763157 |
| GGCTGCTGGTTTCTTGTTTTAG | 1076 | 0 | 2 | 7926 | 12.94939 | 11.212504 |
| GGAGCCTCTGGCAGGGGGCCA | 1077 | 0 | 1 | 2402 | 4.6396155 | 6.1019282 |
| TCCTGGCCATCCAGCCTGGGGA | 1078 | 0 | 2 | 16778 | 7.2028656 | 18.973217 |
| TCTTGCCACTTCATCCCCTTTC | 1079 | 0 | 2 | 5428 | 8.6937799 | 2.063446 |
| GCGTCTCATCCTCCCGCTAATT | 1080 | 0 | 1 | 2019 | 4.072968 | 2.8117723 |
| CCTTCCCACATTCCTTACATGC | 1081 | 0 | 1 | 4637 | 9.2534456 | 1.1731225 |
| CGCGCTCTCCTTCTGGCACCCA | 1082 | 0 | 2 | 8509 | 6.424386 | 19.448072 |
| GAGGCGGGCAGATCACCTGAGG | 1083 | 0 | 2 | 1864 | 6.033988 | 5.7446184 |
| GGGAGTTGTGGTTGGCTTCTGG | 1084 | 0 | 2 | 4978 | 8.3206406 | 9.2158394 |
| TGGGGCCATCTCACCCACTGTT | 1085 | 0 | 2 | 1828 | 9.8785877 | 4.2386732 |
| GCTAGGCTGCTGGCCACTGAGG | 1086 | 0 | 2 | 6972.5 | 13.127683 | 19.686853 |
| TGCCGCCCGGCCATCTCGGCTC | 1087 | 0 | 2 | 6915.5 | 13.391404 | 5.9536037 |
| AGCTGGAATTACAGGAGCCCAT | 1088 | 0 | 1 | 1223 | 9.1280918 | −4.934659 |
| GGGAACAGCTTGGGCTCTGCCA | 1089 | 0 | 1 | 4814 | 4.5313773 | 3.7230809 |
| CCCTGGCTCACTTTCTGTTGTG | 1090 | 0 | 2 | 20839 | 12.591182 | 5.4283981 |
| TCACTGCAAGCTCCGCCTCCCG | 1091 | 0 | 2 | 19903 | 18.896269 | 11.699102 |
| CTGGACTGAGCTCCTTGAGGCC | 1092 | 1 | 0 | | | |
| CTGGGTTGGGGTTACATGACTG | 1093 | 0 | 2 | 6057.5 | 6.2405562 | 7.4004421 |
| CTGGTGTTGGGTCTTGCTTTTA | 1094 | 0 | 2 | 4756 | 6.5764294 | 8.8639517 |
| ACAGGCGATCCACCCGCCTCAG | 1095 | 0 | 1 | 2228 | 5.9650521 | 8.9491081 |
| TCAGGCACCTTCCTCTTATCTG | 1096 | 0 | 1 | 2858 | 4.891077 | 9.5462265 |
| CGGGTTCACGCCATTCTCCTGCC | 1097 | 0 | 2 | 25616.5 | 15.660168 | 6.7002292 |
| AAAGTGCTTCTCTTTGGTGGGT | 1098 | 0 | 2 | 65518 | 11.238881 | 30.157898 |
| GGCTCCCTGCAACCTCCGCCTC | 1099 | 0 | 2 | 39003 | 18.926107 | 13.134951 |
| AGTTGTTCGTGGTGGATTCGCT | 1100 | 0 | 1 | 3494 | 4.0696526 | 11.844742 |
| GCTCACTGCAACCTCTGCCTCC | 1101 | 0 | 2 | 52175 | 22.994247 | 20.293594 |
| CTCCTCCACCCGCTGGGGCCCA | 1102 | 0 | 1 | 4352 | 4.8429317 | −0.27487165 |
| TTATTGCACTCCAGCCTGGGTA | 1103 | 0 | 2 | 45303 | 21.338472 | 22.149384 |
| ACTGTACTCCAGCCTGGGAGAC | 1104 | 0 | 2 | 8375 | 6.4653163 | 21.671926 |
| ACAACTCCTTCTTGGGTCCTGG | 1105 | 0 | 1 | 6494 | 5.7869687 | 2.3521452 |
| CCAGGAGTTGGAGGCTGCAGTG | 1106 | 0 | 2 | 4602 | 7.9332623 | 12.632589 |
| AAGTCTCTCACATATCTGGTCC | 1107 | 0 | 1 | 3668 | 4.6719613 | 6.1481905 |
| GAATTTTATTACTAGTCAACTG | 1108 | 0 | 2 | 1889 | 7.8809133 | 3.6355321 |
| GGCTGCTGGTCTTTCATAGTGGG | 1109 | 0 | 2 | 12604.5 | 21.291653 | 18.561375 |
| CACTGCAATCTCCATCTCCTGG | 1110 | 0 | 2 | 5091 | 10.483025 | 11.471234 |
| CCGGAGTGTCTGGCCTGCTGGG | 1111 | 0 | 1 | 3411 | 4.093287 | 9.0740547 |
| TCCCCTGGTGCCACGATCTGCT | 1112 | 0 | 1 | 5256 | 5.5488677 | −7.7961345 |
| TCTTGGGCAGCTTGCTCGCCCC | 1113 | 0 | 1 | 1661 | 5.9425497 | −1.1524448 |
| TTTCTTGGGCCGTGTGCTGGT | 1114 | 0 | 2 | 7386 | 8.0159159 | 10.662634 |
| GGCTCTGCTTGAGGCCAGCCTG | 1115 | 0 | 2 | 1496 | 8.5616169 | 2.8241165 |
| TGGGTCCTGGCTGAAGATCTCT | 1116 | 0 | 2 | 13345 | 7.4858232 | 22.909485 |
| GCGGGCGGCTTCATCTTGCCCT | 1117 | 0 | 1 | 5038 | 5.1213508 | 7.6892729 |
| GCAGCTATTGTCTCCTGGGCCC | 1118 | 0 | 1 | 3900 | 4.0808616 | 12.07268 |
| GCCTTCCCACCACCCGTCC | 1119 | 0 | 2 | 6139 | 7.5813851 | 3.1351645 |
| GACCTCGTGATCCGCCCGCTTT | 1120 | 0 | 2 | 4513 | 8.2720776 | 14.007803 |
| CACTGCACTCCAGCTGGGTGAC | 1121 | 0 | 2 | 7458.5 | 7.5623012 | 16.072519 |
| CGTCCCGGGTTCACGCCATTCT | 1122 | 0 | 2 | 4935 | 8.0834999 | 8.5963545 |
| CTCTGGAGTGTCTGGCCAGGGT | 1123 | 0 | 1 | 3361.5 | 4.2338123 | 13.302693 |
| GCCTGTATTCCCAGCACTTTGG | 1124 | 0 | 1 | 3873 | 6.2997189 | −0.46441609 |
| GGCGGTCTCAGCACCCTCTTGG | 1125 | 0 | 1 | 2606 | 4.5257893 | 0.3523702 |
| TGCCCAGGCTGGAGTACAGTGG | 1126 | 0 | 2 | 8395.5 | 13.998208 | 16.034225 |
| ATCAGAGTAGTTGTTGCCCAGA | 1127 | 0 | 1 | 1471 | 5.5012255 | 7.6935115 |
| CAGCAGCACACTGTGGTTTGTA | 1128 | 0 | 2 | 65518 | 16.623587 | 30.172779 |
| GCCTGGCCTCCTACAGTACTTT | 1129 | 0 | 2 | 35866 | 15.014146 | 23.263319 |
| ACTGCACTTCAGCCTGGGTGTC | 1130 | 0 | 2 | 30071 | 14.363188 | 30.014778 |
| GACCTCGTGATCCGCCCTCCTT | 1131 | 0 | 2 | 6551 | 25.696636 | 10.76053 |
| CAGTTTGTCCCCATGGCCATGT | 1132 | 0 | 2 | 6591.5 | 13.401958 | 5.2375259 |
| GGGCAGAGCCAGCCAGTCCC | 1133 | 0 | 2 | 3180 | 11.937795 | 10.093319 |
| GCTCATGACTGTAATCCCAGCA | 1134 | 0 | 1 | 2783.5 | 6.7136006 | 1.7869294 |
| GCTGCTCTCCAAGCCTCCTTGA | 1135 | 0 | 1 | 3797.5 | 5.4047599 | 5.8530407 |
| ACTGCACTCCAACCTGGGCAAT | 1136 | 0 | 2 | 21062 | 16.688629 | 27.100132 |
| GGCGTGCCCTGGCCCCGAGGCT | 1137 | 0 | 2 | 28813 | 10.987214 | 21.873014 |
| AAATGCAACGGGCTTTCCTTAT | 1138 | 0 | 1 | 3531 | 4.3887382 | 1.0790982 |
| CCCTGGAGGTTGAGGCTGCAGT | 1139 | 0 | 1 | 1366 | 4.2553997 | 5.5404139 |
| GCCCAGGAGGAGAGGCTGCAGT | 1140 | 0 | 1 | 1922 | 4.5738077 | 5.7069306 |
| TCAAGTGATTCTCCTGCC | 1141 | 0 | 2 | 9836 | 15.970009 | 19.168186 |
| GCCCTGTGCAGGTGTGCAGCAG | 1142 | 0 | 1 | 1165 | 6.2430058 | −0.72478187 |
| CTTGCTGCCAGCCACCATACTG | 1143 | 0 | 2 | 1793 | 6.5887036 | 2.1328712 |
| TCTGCCTCCAGGAGCTGGCA | 1144 | 0 | 2 | 12022.5 | 6.4897313 | 19.629604 |
| TGATTTCAAGCCAGGGGGCGTT | 1145 | 0 | 1 | 3186 | 4.1073384 | 9.1334038 |
| TGGGGGAGCTCAGTCCAGCCCA | 1146 | 0 | 2 | 3738 | 7.3541789 | 13.35856 |
| AGGCCAGCCTGCCCAAAGCTGC | 1147 | 0 | 1 | 1444 | 6.8652005 | 1.3340253 |
| TTGTCCGTGGTGAGTTCGCATT | 1148 | 0 | 1 | 2678 | 5.3224468 | 5.8358331 |
| ATGGCCGCCTGTCCTTCCCGCC | 1149 | 0 | 2 | 5678.5 | 6.8652005 | 8.8366051 |
| CATTCTAGGCCTGGCTTGGGCC | 1150 | 0 | 1 | 4350 | 4.3145142 | 0 |
| CAGTGCCCGCCGCCGTTCCTGG | 1151 | 0 | 1 | 4235 | 4.8511839 | 14.764318 |
| AGGTGCTGGGGCTTGGCCTGCT | 1152 | 0 | 2 | 54992 | 14.781937 | 19.839622 |
| CAGCAGCTCAGCCTCCTTCCCA | 1153 | 0 | 2 | 6588 | 11.002058 | 9.0820408 |
| CTCATTGTAGCCTCCAGTTCTTG | 1154 | 0 | 2 | 5375 | 10.634505 | 9.6296253 |
| CTCAGTGCTGCTGGCTCCTGTC | 1155 | 0 | 2 | 30057 | 40.88406 | 25.543219 |
| AGCCTGGGCAACAGAGCAAAAC | 1156 | 0 | 1 | 2910 | 4.664422 | −2.435894 |
| ATTTACATACCCAGCAGCCTCC | 1157 | 0 | 2 | 9344 | 14.651403 | 5.7202735 |
| AAAGTGCTGGGATTACAGGCGT | 1158 | 0 | 1 | 2149 | 5.1885619 | 11.850306 |
| GCTCCCACCTTAACCTTCACAT | 1159 | 0 | 1 | 2577 | 8.7701244 | 1.6405232 |
| CTACTGGCCATCTGATCTACAA | 1160 | 0 | 2 | 4485 | 7.3851671 | 14.238548 |
| TGCCTAGTTCTGTATTTACAGT | 1161 | 0 | 2 | 1442 | 7.7322025 | 7.1628423 |
| TACCCAGTGCCACCCTCTGAGG | 1162 | 0 | 1 | 2340.5 | 4.2727714 | 6.8743863 |
| AGCCCAGGAGTTTGAGGCTGTG | 1163 | 0 | 1 | 2967 | 4.5458264 | 13.880125 |
| CACTGCAAGCTCTGCCACCTGG | 1164 | 0 | 2 | 4423 | 9.3773403 | 10.346853 |
| CGCCTCCTCTCTGTCCTGATTT | 1165 | 0 | 2 | 11564 | 15.306285 | 4.1242805 |
| TAGCCCCTGCCTTTGAACCTGG | 1166 | 0 | 1 | 3340 | 5.771091 | 7.2742958 |
| CACTGCACTTCAGCCTGGGCGA | 1167 | 0 | 2 | 65518 | 19.854979 | 32.441864 |
| CCCAGGAGGTGGAGGCTGCAGT | 1168 | 0 | 2 | 1868 | 6.0943484 | 7.1866341 |
| TGAGTGACCAGAAGTCCCCCTC | 1169 | 0 | 1 | 2715 | 5.5675011 | 1.1538888 |
| TTGATCTTTTCTTGCTGCCCCA | 1170 | 0 | 2 | 12258 | 18.854212 | 2.8578236 |
| CATTAGGACGCCCCGCCCATAC | 1171 | 0 | 1 | 3517 | 4.7521834 | 7.6331592 |
| GGTGGTTCACGCCTATAATCCC | 1172 | 0 | 1 | 2909.5 | 4.983528 | 14.240087 |
| GTAGCTCTGTTTAAAGTTCTTT | 1173 | 0 | 2 | 1147 | 7.4468746 | 3.0822921 |
| AGGCGCCTGCGGGATCCTTGCC | 1174 | 0 | 2 | 4344 | 8.3828068 | 9.3085003 |
| GCACTTTGCCCCTCCTTTGGCA | 1175 | 0 | 1 | 3096 | 5.8571658 | 1.1003072 |
| TCGCTCAGGCAGGAGTGCAGTG | 1176 | 0 | 1 | 1902 | 5.7879028 | 8.7315207 |
| TGCCAGCTGCTTGTCCCCCACA | 1177 | 0 | 1 | 2506 | 8.8620977 | −2.5429773 |
| AAGTGATACGCCTGCCTCGGCC | 1178 | 0 | 2 | 16691 | 9.2873106 | 2.0918362 |
| GGGCTCTCCCACAACGTGCCAG | 1179 | 0 | 1 | 2349.5 | 4.1230264 | 5.3486781 |
| ACTGCACTCCAGCCTGGGTGAT | 1180 | 0 | 2 | 65518 | 27.70583 | 35.281982 |
| TCATCAGGGATATTGGCCTGAA | 1181 | 0 | 2 | 2532.5 | 6.9170618 | 10.842815 |
| GGGAGGCAGTGCTGGAGGCTGG | 1182 | 0 | 2 | 9212.5 | 9.3155737 | 13.897033 |
| CCAGTTCCAGTGCTCACATCCA | 1183 | 0 | 1 | 2332.5 | 4.5615263 | 1.8066665 |
| TGCCTAGGTCTGGCCTCCTTGG | 1184 | 0 | 2 | 10161 | 16.315468 | 2.7759731 |
| CGGGGCCCTGGGGCTGAAGGTC | 1185 | 0 | 1 | 4941 | 5.1423211 | 2.6783533 |
| ATTGGTAGTTTTGTATTTCTCT | 1186 | 0 | 2 | 2205.5 | 8.1146107 | 5.780735 |
| CTGGCAAGAAATATATATCTTA | 1187 | 0 | 1 | 1119 | 5.1329703 | 0.56972069 |
| GCCGACTGCCTTGTGAGCCT | 1188 | 0 | 1 | 3002 | 4.0046587 | 4.5328951 |
| GCTCCAGTGACCATCGTTTTAG | 1189 | 0 | 1 | 719 | 4.2234468 | 3.1870663 |
| CCCAGGAGGTTGAGGCTGCAGT | 1190 | 0 | 2 | 2825 | 8.4417934 | 12.283764 |
| CGCCCAGGCTGGAGTGCAGTGA | 1191 | 0 | 2 | 9513 | 14.644378 | 17.344313 |
| CTCCCGGCTGCTCCGGCTCCCG | 1192 | 0 | 1 | 3404.5 | 4.0221744 | 10.150807 |
| GTTACTCCTGGTTGAGCTTGGT | 1193 | 0 | 1 | 4309.5 | 4.4103327 | 15.300289 |
| GCCTCCAGCCCACGCAGGCCTG | 1194 | 0 | 1 | 4519.5 | 9.7356396 | −2.5970438 |
| TATTCATTGCCCATGTTTGTGA | 1195 | 1 | 0 | | | |
| CACCCAGGTTGGAGTGCAGTGG | 1196 | 0 | 2 | 5832 | 13.915822 | 17.475407 |
| AGAAGGGCTGGCAGGAGTT | 1197 | 0 | 2 | 26652 | 14.563484 | 25.132761 |
| GAAGTTTGAAGCCTGTTGTTCA | 1198 | 1 | 0 | | | |
| GCTTTATCCGCTTGACCCTTAC | 1199 | 0 | 1 | 3616 | 4.4118524 | 13.271925 |
| TCGCCCAGCTCATCTCCCACAA | 1200 | 0 | 1 | 2703.5 | 5.3652906 | 1.3689227 |
| GAGGCGGAGGTTGCAGTGAGCT | 1201 | 0 | 2 | 4226 | 9.1032648 | 13.02844 |
| GCTTGGCCCATTGATCAGCTGG | 1202 | 0 | 1 | 5906.5 | 8.7156487 | −2.7078445 |
| GCCCTGGGCAAGGTTCTGGCCA | 1203 | 0 | 1 | 2714 | 4.0351701 | −0.23995513 |
| CTGGGAGGCGGAGCTTGCAGTG | 1204 | 0 | 1 | 2035.5 | 5.6867909 | 7.8000135 |
| AAAGCCTCCCAGGTTATGAGTA | 1205 | 0 | 1 | 2572 | 5.2848206 | 7.2430992 |
| GCACTGCTGCCTCCTGG | 1206 | 0 | 1 | 2627 | 5.5307322 | 7.414557 |
| GACCTTGTGATCCACCTGCCTT | 1207 | 0 | 2 | 9694.5 | 12.58271 | 17.013798 |
| CCCGGGAGGCAGAGGTTGCAGT | 1208 | 0 | 1 | 1794 | 5.9571199 | 9.9902372 |
| TGGCCTTGGCCGTGCTGGGGTC | 1209 | 0 | 1 | 5712 | 4.9820457 | −0.35016832 |
| GAGGCCTGGGCAAGGGGGTCTG | 1210 | 0 | 1 | 3266 | 5.8565254 | 9.1992407 |
| CCAGAAAAATCCTCCCTTGTCC | 1211 | 0 | 1 | 3211.5 | 5.2451043 | 8.3984203 |
| GCTCCCACTGCTGTCCTGCCAT | 1212 | 0 | 1 | 9433 | 17.716768 | 1.6475885 |
| GGCCGGGTGCTCTGGAGGTGCT | 1213 | 0 | 2 | 14393 | 11.734104 | 12.172738 |
| GGCTGGTTAGATTTGTGGTCTT | 1214 | 0 | 2 | 21258 | 33.569485 | 15.757149 |
| CTGAGGCAGGAGAGTTGCTTGA | 1215 | 0 | 1 | 1306.5 | 5.4962068 | −1.4525892 |
| TCCCGTCTTGCTGTTGTCTGCG | 1216 | 0 | 2 | 9875 | 9.1909533 | 2.2802107 |
| GGTGTCAGACTTTGCATATCCT | 1217 | 0 | 2 | 1808 | 6.4814534 | 9.6383839 |
| CTCACTGCAAGCTCTGCCTCCC | 1218 | 0 | 2 | 26494.5 | 19.073179 | 16.964733 |
| CTGCTCTGCTGATCAGTGTCTC | 1219 | 0 | 1 | 4736 | 4.4964242 | 11.948936 |
| GGAATGGTGGTTGTATGGTTG | 1220 | 1 | 0 | | | |
| TGATATGTCCCTCGACATCAGG | 1221 | 0 | 1 | 1273.5 | 4.8226123 | 7.3988724 |
| TTGTCTTTTGTGGGAAATATGG | 1222 | 0 | 1 | 1686 | 8.4781733 | 1.0731497 |
| CACCATGCCTGGCTAATTTTTT | 1223 | 0 | 1 | 4149 | 5.579587 | 14.67128 |
| CCGAGGCTGGAGTGCAGTGGCG | 1224 | 0 | 1 | 1129 | 4.6293564 | 7.4294724 |
| CAGGAGCTCAGATGACATCTCA | 1225 | 0 | 1 | 1856 | 4.9010544 | 10.314 |
| GACCTCGTGATCTGCCAGCCTT | 1226 | 0 | 2 | 4406.5 | 24.777288 | 14.546185 |
| CTCTCCTTGGCCACCTCCATGA | 1227 | 0 | 2 | 23276 | 9.521204 | 7.0737572 |
| CCTGGCCGCTGTGCCCCCT | 1228 | 0 | 2 | 40002 | 11.873036 | 10.703612 |
| AGGTGCTCTGTGTATGCATAGA | 1229 | 0 | 2 | 11593 | 19.340197 | 19.182079 |
| AGTCGGAAGCTGTGCGTAAATC | 1230 | 0 | 1 | 1043 | 4.256711 | 6.0202398 |
| TGTCTGATCATGAGGCAGGGCT | 1231 | 0 | 1 | 4775.5 | 4.5141959 | −2.3209548 |
| GCCCGCGGCCCGGGGTG | 1232 | 0 | 2 | 9597 | 6.2839761 | 20.307545 |
| CTCACTGCAAGCTCCGCCTCCC | 1233 | 0 | 2 | 25071 | 20.895596 | 18.134468 |
| CTTGGAGTAGGTCATTGGGTGG | 1234 | 0 | 2 | 51071 | 16.39068 | 33.942337 |
| TCAGCCAGCCAGCTACAGGCTT | 1235 | 0 | 1 | 1054 | 5.2848206 | 1.757583 |
| CATTCTGTGAGCTGCTGGCTTT | 1236 | 0 | 2 | 6884 | 11.220102 | 9.6062307 |
| TGCCTCCCTGGCAAGTCTCTCC | 1237 | 0 | 1 | 4529 | 4.4007978 | 9.8346052 |
| CAGCCCGCCCTGAACTTTCGGG | 1238 | 0 | 1 | 2994 | 5.1533017 | 10.540549 |
| CTTCCTCCTCCATCTCGAAGGC | 1239 | 0 | 1 | 2834 | 4.6479778 | 8.16576 |
| CTGTGCTCCCTCTGGCGCCCCG | 1240 | 0 | 2 | 7554.5 | 6.8389502 | 13.825434 |
| ACATGATTGTCTGGCTTGGCCA | 1241 | 0 | 1 | 4115 | 4.3157549 | −0.68419188 |
| ACTATAGATGCTGGCGAGGCTG | 1242 | 0 | 2 | 1628 | 7.8868184 | 9.2165308 |
| TGGCTCATTTCTAAACCCAGCT | 1243 | 0 | 1 | 3232 | 5.0716186 | 3.3175437 |
| GTGCTTAAAGAATGGCTGTCCG | 1244 | 0 | 2 | 3362 | 12.66304 | 13.195816 |
| GGACAGCCGAGTGGCCTTCTCC | 1245 | 0 | 1 | 2573 | 4.0717006 | 6.836751 |
| GGAGTGCAATGGCGTGATCTCA | 1246 | 0 | 1 | 1123 | 4.2392659 | 5.4389768 |
| CCCTGCATCCAAAGGCCTCCTC | 1247 | 0 | 1 | 4119.5 | 8.5837584 | −4.0344296 |
| CTCAGGTGATCCACCCCTCTTG | 1248 | 0 | 2 | 8190 | 8.7424583 | 3.9819176 |
| ACTGCAACCTCCGCCTGCCAGG | 1249 | 0 | 2 | 24273 | 17.594145 | 15.796898 |
| GCTGCACTTCAGCCTGGGTGTC | 1250 | 0 | 2 | 5310 | 7.5533419 | 15.940791 |
| GCAGGTGGATCACCTGAGGTCA | 1251 | 0 | 2 | 1573.5 | 6.542747 | 9.5370836 |
| GGCCCTGGCAGCCACGAAAGCC | 1252 | 0 | 1 | 2349 | 4.256711 | 8.8494081 |
| TCAGTGACTCCTTCTTCCTGCT | 1253 | 0 | 1 | 2889 | 5.3898416 | −3.7892516 |
| CGAGGCCTCCTCGCCGCCACCG | 1254 | 0 | 1 | 2917 | 4.3228712 | −0.75868702 |
| TGGTGGCTCACACCTGTAATCC | 1255 | 0 | 2 | 5307 | 8.9909515 | 17.038876 |
| TGATCTCGTGATCTACCCGCCT | 1256 | 0 | 1 | 1982 | 5.9927278 | 6.810081 |
| GCTCACTGCAAGCTCCGCCTCC | 1257 | 0 | 2 | 20232.5 | 20.168652 | 18.056574 |
| CACTGCACTCCAGCCCGAGCAA | 1258 | 1 | 0 | | | |
| CAGTGCACGGGCCAGTCCTGCC | 1259 | 0 | 2 | 2112 | 9.479496 | 10.392011 |
| ATCCTCCAGCTCCTGCTTCTGC | 1260 | 0 | 1 | 3174 | 4.2183352 | 2.8458629 |
| ATGCCACTGCACTTCAGCCTGG | 1261 | 0 | 2 | 37857.5 | 13.168159 | 31.471567 |
| CATTGCACTCCAGCCTAGGCAA | 1262 | 0 | 2 | 35413 | 18.971554 | 24.194717 |
| CGTTCAGCGGGCTGGCCGTGGA | 1263 | 0 | 2 | 65518 | 10.117671 | 31.213285 |
| AGCCCTCTTCCAGCCAGCACAG | 1264 | 0 | 1 | 6035 | 10.519875 | 0.3822628 |
| GTGTGTCTCCCAAGAAGGCCCA | 1265 | 0 | 1 | 3536 | 4.6024246 | 8.0168934 |
| TCCTTTCTCCCTCATCTT | 1266 | 0 | 1 | 2966 | 4.4738102 | 11.3113 |
| GGCCCAGGCTGGAGTGCAGTGG | 1267 | 0 | 2 | 12915 | 16.751265 | 19.536619 |
| TCGCACCATTGCACTCCAGCCA | 1268 | 0 | 2 | 3636 | 8.0997972 | 12.774747 |
| CCTCAAGTGCCTCCTGCTGCT | 1269 | 0 | 2 | 5375 | 12.938377 | 9.593914 |
| GGGAAATAATTAATGTGAAGTC | 1270 | 1 | 0 | | | |
| GAGGTGGGCGGATCACAAGGTC | 1271 | 0 | 1 | 2041 | 5.9412212 | 9.3532887 |
| TTGACATGCCTCCTACATGATC | 1272 | 0 | 2 | 5065 | 12.953059 | 10.809283 |
| ATTGCACTCCAGCCTGGGGGAC | 1273 | 0 | 2 | 27662 | 16.315468 | 27.849897 |
| CTCTGGACCCTCCTGCTGAGAG | 1274 | 0 | 1 | 3192 | 5.8815751 | 12.393508 |
| TTGGAATGCACACTGAGCCTGC | 1275 | 0 | 1 | 1641 | 5.4196582 | 4.3278909 |
| CCATGAATTCACTCCATGCTAG | 1276 | 0 | 1 | 1780.5 | 5.4047599 | 0.20065525 |
| TCCTTCACTCCCTCTGCATCCA | 1277 | 0 | 1 | 3533.5 | 5.2938275 | 8.4558067 |
| CCACTGAGGTAGCTGGTGACTG | 1278 | 0 | 2 | 2861 | 16.719574 | 7.8953633 |
| TGTCTCTTTTCAAGCTACCCTT | 1279 | 0 | 1 | 1480.5 | 8.1952085 | −1.8686998 |
| CGATGGTATCGGCCAGCCCCGG | 1280 | 0 | 2 | 1767 | 8.5116291 | 3.1429348 |
| CACCTTGTGATCCACCCGCCTT | 1281 | 0 | 1 | 2139 | 5.5668392 | 4.7121377 |
| CTGAGCTCAAGCGATCCTCCCA | 1282 | 0 | 1 | 1617 | 4.0809031 | 1.5567338 |
| AGGGTTGTGTGCTGGCCGCTGG | 1283 | 0 | 2 | 65518 | 29.01285 | 32.102142 |
| AGATTTCCCTTCCTGCTTGCCT | 1284 | 0 | 2 | 5251 | 6.0291886 | 13.065763 |
| ACACAGAGCCAAACCATATCAC | 1285 | 0 | 1 | 1680 | 5.9849868 | −1.285585 |
| TCTCAACAGTGCAAGCTGCTCC | 1286 | 0 | 1 | 4000 | 14.71687 | −15.406388 |
| TCTGGAGGGAAGCACTTTCTGT | 1287 | 0 | 2 | 10399 | 6.8974981 | 22.211288 |
| TGTCTCCTCGGCTGTCCAGCCA | 1288 | 0 | 1 | 6736 | 5.2501798 | 5.3288264 |
| CAGAGCCCCTCGTCTCCACCAC | 1289 | 0 | 1 | 2694 | 5.538096 | 0.54361749 |
| TGCTTGCTGTGGTTGGCTGGTA | 1290 | 0 | 2 | 6974 | 21.75724 | 11.332961 |
| TCCAGTCGGATAACTAGACGGT | 1291 | 0 | 2 | 1198 | 8.0100813 | 7.3187399 |
| ACTTGCTGGCTCCTTGCTTCTA | 1292 | 0 | 2 | 8816 | 12.372648 | 16.758364 |
| ACTGCACTCCAGCCTGGGCTAC | 1293 | 1 | 0 | | | |
| CTGAGCAGATGACCAGCCCCAG | 1294 | 0 | 2 | 3552 | 7.8454118 | 5.6452436 |
| GGTATATGGGCCTCACTTG | 1295 | 0 | 1 | 716 | 4.1230264 | 3.7952623 |
| GGCCGTGGTCGCTGACTCTCGT | 1296 | 0 | 2 | 4980 | 6.9448657 | 12.094063 |
| TCCTTCAGCCTCCCAGCTCAAA | 1297 | 0 | 2 | 3775 | 7.1473608 | 4.387816 |
| GCCTTGGTGGTTTTGGTAGT | 1298 | 0 | 2 | 10696 | 15.110422 | 8.3110876 |
| GTTCAAGACCAGCCTGGCCAAC | 1299 | 0 | 2 | 16360 | 17.522753 | 9.7908163 |
| GGAGGCTGAGGCAGGCGGATCA | 1300 | 0 | 2 | 3046 | 8.4162111 | 8.6580906 |
| GAGGAGCCCCTCTGCC | 1301 | 0 | 2 | 2540 | 6.3185239 | 6.9227304 |
| GCAGCCATGTTCCCGTCTCAGCT | 1302 | 0 | 2 | 2992 | 8.4334011 | 13.142536 |
| CACTTCCCTTCTCTGCTCATGG | 1303 | 0 | 2 | 7886.5 | 7.3931818 | 7.7415953 |
| CTCTTCCTAGTGTGCAGCGTGG | 1304 | 0 | 2 | 4232 | 15.394135 | 7.1230512 |
| ACCAGCCTGGCCAACATGGCAA | 1305 | 0 | 2 | 8606 | 8.2232008 | 18.60726 |
| CCCTCTGCATACAGGCGAGGAG | 1306 | 0 | 1 | 1363 | 5.7277908 | −3.2187812 |
| GTGAGGCGAAGGTGCTGGCGCC | 1307 | 0 | 1 | 2222 | 5.5968246 | 2.6594312 |
| ACTGGGGACTCTGGCCTTTTGA | 1308 | 0 | 2 | 15830 | 9.3586321 | 14.166217 |
| GATTACTGGTATTTGCTGGCTCC | 1309 | 0 | 2 | 13394 | 25.892035 | 5.407784 |
| AGCTGGTGCTCGGGGAGCTGGC | 1310 | 0 | 2 | 65518 | 21.547987 | 16.272154 |
| TCTCTATGCCATGCTGGCCT | 1311 | 0 | 2 | 6926 | 17.665062 | 2.5852687 |
| GCAGGGAACTGGCTGGGCTTTC | 1312 | 0 | 1 | 9142.5 | 5.9037857 | 16.801399 |
| TTTGGCTTCTCCTACCACCTCT | 1313 | 0 | 1 | 4981 | 5.5610046 | 7.3423386 |
| GACCTTGTGATCCGCCCGCCTT | 1314 | 0 | 2 | 7757.5 | 11.425945 | 12.53443 |
| AAACTGCTTCCTTGGCCT | 1315 | 0 | 1 | 7436 | 5.6282043 | 5.6413546 |
| TGCCTGCCGTTAAATGTTACTT | 1316 | 0 | 2 | 3936 | 12.749383 | 11.509386 |
| TCAGGTGCCTTGGCTAATTGTT | 1317 | 0 | 1 | 4158 | 4.3205009 | 12.139079 |
| GGCGCTGGCCTGTGGGATCCCG | 1318 | 0 | 2 | 65518 | 24.841112 | 31.449797 |
| GGCTCACTACAACCTCCGCCTT | 1319 | 0 | 2 | 14771.5 | 14.710124 | 15.748096 |
| TCCACCAAGCCGGGGCCACTTC | 1320 | 0 | 1 | 2648.5 | 4.7161036 | 4.8864894 |
| CTCACTGCAAGCTCAGCCTCCC | 1321 | 0 | 2 | 6344 | 15.211771 | 11.712019 |
| CCCAGGTTGGCCTACAGA | 1322 | 0 | 1 | 5095.5 | 4.6688876 | 17.382532 |
| GACCCCTAAACCCGCTGGGCTG | 1323 | 0 | 2 | 30088.5 | 13.552105 | 6.4749699 |
| TGCACCACTGCATTCCAGCCTG | 1324 | 0 | 2 | 41028 | 15.563788 | 31.684296 |
| CCCGGGAGGCGGAGGTTGCAGT | 1325 | 0 | 2 | 3131.5 | 7.7846441 | 13.396295 |
| GCTGGCCACAGATCCCCAGGGA | 1326 | 0 | 1 | 10408 | 25.43759 | −5.445076 |
| GGGAAGCTGGTCACCCACAGGC | 1327 | 0 | 2 | 12450 | 11.913556 | 20.388573 |
| AGGOAGAGAGGACCAGAGACT | 1328 | 1 | 0 | | | |
| AAAGTGCTTCCTTTTAGAGGCT | 1329 | 0 | 2 | 7504 | 6.1279302 | 9.924984 |
| AGCCCAGGCTGGAGTGCAGTGG | 1330 | 0 | 2 | 12054.5 | 14.262013 | 20.370312 |
| CTCCTCTTTAGCCCCAGCTGGA | 1331 | 0 | 1 | 1799 | 4.2898717 | 8.4259157 |
| GCAAAAAGTAGTGCTGGTTAGG | 1332 | 0 | 2 | 9711 | 21.974758 | 16.433075 |
| CAGGGATGGCGCTGGCTGCCCG | 1333 | 0 | 1 | 7317 | 5.4272056 | 19.166769 |
| CCTCCGGTCATTGTGCGGGCCT | 1334 | 0 | 2 | 2835 | 7.0583911 | 5.132216 |
| ACTCACTGCAACCTCCACCTCC | 1335 | 1 | 0 | | | |
| GGGGTGCGGGCCCCATCTGGCT | 1336 | 0 | 1 | 49070 | 17.152702 | −0.3207902 |
| CAGCCCCACACGGTCTAGCTCT | 1337 | 0 | 1 | 11400 | 8.6508255 | −0.19845468 |
| ATGCCACTTCATTCCAGCCTCG | 1338 | 0 | 2 | 2970 | 6.3867145 | 3.6728451 |
| AGATGGGGTTTCATCATGTTGG | 1339 | 0 | 2 | 4401.5 | 10.491898 | 11.499362 |
| GTGGTGTTTGAGCTGCCAGGGA | 1340 | 0 | 1 | 2963 | 4.502933 | 8.8193016 |
| GCGCTCTCTTCTCCTGGCCCGC | 1341 | 0 | 2 | 65518 | 10.953011 | 12.865757 |
| CACTGCAACCTCTGCCTCCCAGG | 1342 | 0 | 2 | 34808 | 18.792194 | 12.987083 |
| GCCTCCTGAGTAGCTGGGATTG | 1343 | 0 | 2 | 7261 | 10.548355 | 12.900331 |
| CTTTAATTGTAGCTCCCATAAT | 1344 | 0 | 1 | 3034.5 | 4.9478436 | 10.275362 |
| AACCCAGGCTGGAGTGCAGTGG | 1345 | 0 | 2 | 5616 | 13.703417 | 16.740423 |
| TCAAGCAATTCTCCTGCCTCAG | 1346 | 0 | 2 | 22552 | 20.397219 | 19.767324 |
| ACAGTCCAGCCTAGTATGTATA | 1347 | 0 | 1 | 1760 | 5.992043 | 1.5357794 |
| TCAGGAGGCGGAGGTTGCAGTG | 1348 | 0 | 2 | 2550 | 6.5481095 | 12.094613 |
| AATGGTCTCTTTGTTCCCTGCT | 1349 | 0 | 2 | 9183 | 7.6419687 | 3.2526188 |
| GGCCGTCCCTAGAGATGGGGTT | 1350 | 0 | 2 | 11689.5 | 8.4446125 | 7.2657032 |
| ATCCTAGAATCAGCCCTTGCTG | 1351 | 0 | 1 | 2772 | 6.7080827 | −0.69137686 |
| GGAAGCTCTGCCTAGATTTCAG | 1352 | 0 | 2 | 7993 | 8.3658886 | 4.2364674 |
| CTGGGAGGCAGAGGTTGTAGTG | 1353 | 0 | 1 | 1370 | 4.1524282 | 5.7353191 |
| GTCCCAAACTCCTGACCTCAGG | 1354 | 0 | 1 | 1638 | 4.5023069 | 7.1563048 |
| TGGCGCGACGTGCCCCCTGCTT | 1355 | 0 | 1 | 2537.5 | 5.5675011 | 1.0830367 |
| GGCGTGGGCGAGGTGCTCTATC | 1356 | 0 | 2 | 1796 | 7.1220169 | 4.9086099 |
| CTCGGGCACCCTGGTTCTGGTG | 1357 | 0 | 2 | 65518 | 11.238881 | 23.126007 |
| ATGGGCTGTCCATTGCTGGCTG | 1358 | 0 | 1 | 4362 | 7.0200324 | −1.9789392 |
| TGAGCTTCCCTCCTGCACTACA | 1359 | 0 | 1 | 2569 | 4.6559782 | 11.27425 |
| CCCGGCACCTCCGCTGCACAC | 1360 | 0 | 2 | 50589.5 | 16.062937 | 10.848449 |
| GTGGGCATCACCAGGGCCTCCA | 1361 | 0 | 1 | 1305 | 4.6559782 | 1.3485987 |
| GAACCCTAGCATGTCCTTTAGG | 1362 | 0 | 1 | 783.5 | 5.8142152 | 4.4672356 |
| AGGGCAGGAGGTCCGTCCCTTC | 1363 | 1 | 0 | | | |
| AGGGCAGAGCGTTTCCTGCCCC | 1364 | 0 | 1 | 1099 | 5.4493914 | 0.13351524 |
| GCTTGGCTTTACTAGGGGGACA | 1365 | 0 | 1 | 3943.5 | 4.974093 | 8.3365431 |
| CATGAAATTGTATTGGCCTCAA | 1366 | 0 | 1 | 1209 | 6.4949188 | 1.5365099 |
| CACTGCACTCCAGCCTGGGCCA | 1367 | 0 | 2 | 65518 | 31.247635 | 27.744917 |
| ATCTGAGCTCCGCCTCCTGTCA | 1368 | 0 | 2 | 3672 | 6.5016451 | 12.313261 |
| TCTGCCTTTTACTAGCTGGATG | 1369 | 0 | 2 | 12954 | 6.649405 | 9.6133747 |
| ATGGGTTCAAGTGATTCTCCTG | 1370 | 0 | 2 | 3260 | 9.7943249 | 13.811167 |
| CATGTGTCTTGCTGCCCTCCAT | 1371 | 0 | 2 | 11157 | 17.133692 | 10.310522 |
| GCCTCCTGTCCCAGGCTGAGGA | 1372 | 0 | 1 | 2413.5 | 5.771091 | −1.0079587 |
| AGGACCTGTAATCCCAGCACTT | 1373 | 0 | 1 | 1119.5 | 4.0140038 | 5.6218853 |
| TTCAAGTGTTTAAGTTCTGCTT | 1374 | 1 | 0 | | | |
| CTGCCCCCAGCCTGGGCTTCGA | 1375 | 0 | 1 | 1502 | 5.1329703 | 2.1353233 |
| AGCTCCTGGCTTCAAGCAATCC | 1376 | 0 | 2 | 14107 | 10.339123 | 18.669428 |
| TGGCCCACCCGTTGA | 1377 | 0 | 2 | 3982 | 17.579905 | 15.494586 |
| AGTCCGTCCTGTCAAGCAGCTG | 1378 | 0 | 2 | 19706 | 7.5470443 | 26.932724 |
| CCGGGGTAGGCCCTGAGGCAGC | 1379 | 0 | 1 | 4622.5 | 6.3919153 | −2.5578749 |
| ATGCCACTGCGCTCTAGCCTGG | 1380 | 0 | 2 | 12177 | 8.2681303 | 19.851286 |
| CATTATTCTCAGTTCTGTGCAG | 1381 | 0 | 2 | 11732.5 | 27.869678 | 16.957344 |
| CACCCGCTGGTCCCTGCAGTTC | 1382 | 0 | 2 | 20816 | 8.5344362 | 27.261486 |
| TACTGCACTCCAGCCTGGGTGA | 1383 | 0 | 2 | 65518 | 22.371189 | 36.002476 |
| GTGGCCCAGGCTGGAGTGCAGT | 1384 | 0 | 2 | 14037 | 16.79743 | 18.340912 |
| TCACTCAGGCTGGAGTGCAGTG | 1385 | 0 | 2 | 2427 | 8.9816837 | 12.445157 |
| TACCACCATTTGCCTGCTGTAT | 1386 | 0 | 1 | 2224 | 5.3224468 | 6.6427116 |
| GCCCTCCAGCCTGTGGAACCGG | 1387 | 0 | 2 | 2293 | 7.0838871 | 2.9603255 |
| CGCCCAGGCTGGAGTGCCAGTG | 1388 | 0 | 2 | 4722 | 9.6376123 | 13.758563 |
| ATGGTGCTGGTGGGAGTGTATT | 1389 | 0 | 2 | 4053 | 18.971554 | 14.625937 |
| CCAAAGTGCTGGGATTACAGGT | 1390 | 0 | 1 | 2646 | 5.0643582 | 9.7789927 |
| AGCGGCTGGCGGAGGACACG | 1391 | 0 | 1 | 8764.5 | 5.8134389 | 21.684513 |
| ATGCCACTGCACTCCAGCCTGG | 1392 | 0 | 2 | 65518 | 26.690199 | 28.459244 |
| CCTTTGATTTCCCCCGTCTCAG | 1393 | 0 | 1 | 2348 | 4.8108587 | 4.7235146 |
| GGGTTACTCTGTGTTGGTCAGG | 1394 | 0 | 2 | 7310 | 8.6937799 | 12.815997 |
| GCCCATAGTCTCTTTCTTTCTT | 1395 | 0 | 1 | 1838 | 6.1946688 | −2.755475 |
| ATTGCACTCCAGCCTGAGCAAA | 1396 | 0 | 2 | 46579 | 22.505102 | 33.557095 |
| CACTGCACCCTCAAACTCCTGG | 1397 | 0 | 1 | 6945.5 | 5.9455066 | 1.1890075 |
| TCCCATGGGGCCAGCCGCCATC | 1398 | 0 | 2 | 3581 | 15.749751 | 10.859034 |
| CACTGCACTCCAGCCTGGGCGA | 1399 | 0 | 2 | 65518 | 30.700432 | 26.58386 |
| GGGGTCTTGGAACAGGTGGCCCT | 1400 | 0 | 1 | 1856 | 5.8500195 | −1.9162606E-2 |
| CACTGCAGCCTCAAATTCCTGG | 1401 | 0 | 1 | 4509 | 5.5284224 | 3.5514677 |
| TGCAGGCTCTTGGTGACGTGGG | 1402 | 0 | 2 | 2639.5 | 6.3321967 | 6.947082 |
| GGTGGCCCCTGGGAGATGCTGG | 1403 | 0 | 2 | 65518 | 31.295538 | 14.111359 |
| AACCAAGCCAGCCAGCCTCTC | 1404 | 0 | 2 | 4971 | 17.613102 | 15.532504 |
| GCCCAGGCTGGAGTTCAGTGGT | 1405 | 0 | 2 | 1573.5 | 6.542747 | 8.0195217 |
| AGCCTGCGATCCCACCTGGCCT | 1406 | 0 | 2 | 20991 | 9.0031242 | 4.5749111 |
| TAACCTCTCTGTGCCTCAGTTT | 1407 | 0 | 1 | 4997.5 | 5.1691394 | 10.657457 |
| TAGCATGGCTCTATGGAACA | 1408 | 0 | 2 | 1393 | 10.196934 | 8.9662762 |
| CTGGCCTATCATAAGCATTTT | 1409 | 0 | 1 | 65516 | 13.391268 | 1.4583727 |
| CAGCCTGGTCCCCGGCTCACCC | 1410 | 0 | 1 | 3234 | 4.2474666 | 6.4346752 |
| GCCCAGGCTGGAGTGCAGTGGC | 1411 | 0 | 2 | 24154 | 17.516109 | 26.539131 |
| CCAGGCTGGAGTGCAATGGCAT | 1412 | 0 | 2 | 2590.5 | 6.1812749 | 11.923506 |
| CACTGCAATCTCTGCCTCCTGGG | 1413 | 0 | 2 | 27656.5 | 19.716053 | 17.422838 |
| TGCCTCAAGCCCTCCACTGCAC | 1414 | 0 | 2 | 6112 | 10.263255 | 7.5186887 |
| GACCCATCCTCCACTTGGCAGC | 1415 | 0 | 2 | 2498 | 6.505065 | 6.8388047 |
| AACCACCATTCTCTCCTCTTCC | 1416 | 0 | 1 | 2979 | 4.7405486 | 1.3000224 |
| TTCCATTTGGAGCTCGCAGCCT | 1417 | 0 | 1 | 5965 | 4.9900851 | 14.792343 |
| AAGGTTCCTCTCTCCACCCAGC | 1418 | 0 | 1 | 2925 | 4.0868788 | 6.821908 |
| CTCCTGGGAAAGGCTGGACACA | 1419 | 0 | 1 | 2176 | 4.3887382 | 5.3727546 |
| ACTGCACTCCAGCCTGGGCACA | 1420 | 0 | 2 | 65518 | 31.833015 | 34.428837 |
| TCACCAGCTCTGCCTCGCCAGT | 1421 | 0 | 2 | 10572 | 6.2146297 | 17.905064 |
| GTTGCCTAGGCTGGAGTGCAGT | 1422 | 0 | 2 | 3942 | 8.7036104 | 9.8695612 |
| TGCCTGGCCTCTTCAGCACTTC | 1423 | 0 | 2 | 27021 | 10.873885 | 26.68429 |
| CCCTGCCAGCTCCCAGCA | 1424 | 0 | 1 | 2367.5 | 5.8455133 | 7.8306561 |
| GAGGCCTCAGCCTGCCCTGAAC | 1425 | 0 | 1 | 1470.5 | 7.0200324 | −0.58433282 |
| TCACTGCAAGCTCAGCCTCCCG | 1426 | 0 | 2 | 6757.5 | 12.953059 | 11.945885 |
| TCCAGGCCCTCAATCCATTTCCA | 1427 | 0 | 2 | 8934.5 | 13.815792 | 9.5553522 |
| AAAAGCAATTGCGGGTTTTGCC | 1428 | 0 | 2 | 4663 | 15.116411 | 4.7130346 |
| TCCTCAGAATCACCTGGCAGCT | 1429 | 0 | 2 | 2574 | 6.6020346 | 3.5169666 |
| GGGTTCAGTCCCTCTTGCTACT | 1430 | 0 | 1 | 3765.5 | 4.6101117 | 4.239377 |
| TAGTTTCATCTCCACCCTGCCC | 1431 | 0 | 1 | 2083 | 5.4642267 | 0.15956412 |
| GGGTCTCTGTTGGCTTCTT | 1432 | 0 | 2 | 11264.5 | 7.8554482 | 5.5741806 |
| GGGGAACGCGCTGGCCCGCGCC | 1433 | 0 | 2 | 7005 | 6.2445078 | 11.806351 |
| AGGCGGAAGATGGCCCCATAGA | 1434 | 0 | 2 | 1471.5 | 6.9170618 | 3.567507 |
| TCTCTTCGCTGGCCCTCGGGGA | 1435 | 0 | 2 | 47791.5 | 15.379544 | 20.008915 |
| TGCCCAGGGTGGAGTGCAGTGG | 1436 | 0 | 2 | 6671.5 | 10.579865 | 17.748798 |
| AATTGCTTGAACCCAGGAAGTGGA | 1437 | 1 | 0 | | | |
| GCACACGGCAGCCTCCTCCTGA | 1438 | 0 | 2 | 2910 | 8.0682802 | 10.311243 |
| CTCCTGCTTCACGGGCACCGCC | 1439 | 0 | 2 | 10401.5 | 13.127683 | 2.1750216 |
| CCCTTTAGCCCCTGCAGAGACT | 1440 | 0 | 1 | 39494 | 29.852627 | 0.54301858 |
| TATTGAGACCAGTGCTTGCTTA | 1441 | 0 | 2 | 1212.5 | 10.770452 | 7.2894559 |
| TCGCCCAGGCTGGAAGTGCAGT | 1442 | 0 | 2 | 2518 | 8.9316044 | 12.591391 |
| GCTCTGCCAGCCCAAGGCGCAG | 1443 | 0 | 1 | 5831.5 | 4.9416537 | 10.837112 |
| GGAGGCGGAGGTTGCAGTGAGC | 1444 | 0 | 2 | 3959.5 | 10.600774 | 13.769753 |
| CCCTCACTCCTGCCGGG | 1445 | 0 | 1 | 5527 | 5.4066739 | −0.32305354 |
| GCCCCTGCCTTTGAACCTGGAG | 1446 | 0 | 2 | 9052 | 20.457079 | 3.550808 |
| TTCTCCAGTGCGGTAGCCAT | 1447 | 0 | 1 | 2372 | 15.630626 | 0.20187679 |
| GCTCCTTTATTTTCTCTCGTGT | 1448 | 0 | 1 | 2092 | 4.9322701 | 6.8224359 |
| CATTCTCAGTATCAGCCAGCCC | 1449 | 0 | 1 | 2579 | 12.640401 | 1.6748168 |
| TAGCAGAAGTTGCAAACTAGGG | 1450 | 0 | 1 | 964.5 | 4.0301342 | 0.67141521 |
| CCAAGCAGAGCAGCCTCTCTGG | 1451 | 0 | 2 | 50138.5 | 17.876169 | 21.568254 |
| CTAGGCTGGAGTGCAGTGGCAC | 1452 | 0 | 2 | 2019.5 | 7.9472141 | 11.208291 |
| TTCCTGCGCCCTTCTCGCCCGC | 1453 | 0 | 1 | 6532 | 6.8755865 | −0.67481649 |
| CTGTGCTGGGTCCTTCTTTTGA | 1454 | 0 | 2 | 3805 | 10.533696 | 10.867439 |
| AGCTCACCACAACCTCCGCCTC | 1455 | 0 | 2 | 18085 | 14.695093 | 9.1603575 |
| AGTCTTCCCAGAGGAGGTGCCA | 1456 | 0 | 1 | 1153.5 | 6.3185239 | −1.0385203 |
| GAGGCGGAGGTTGCAGTGAGCC | 1457 | 0 | 2 | 2617 | 7.804688 | 11.36616 |
| GCCCTCCTGAGCTAGCACGTGT | 1458 | 0 | 1 | 12521 | 12.908952 | −0.01282406 |
| CATTGCACACCAGCCTGGGCAA | 1459 | 0 | 2 | 65518 | 23.259714 | 27.904207 |
| AGTTCTCTTGCTTCAGCCTCCC | 1460 | 0 | 1 | 8418 | 8.3884401 | 1.3339518 |
| TCCAGCTGTCCACGTCTTCCTG | 1461 | 0 | 1 | 4070 | 5.0534353 | 4.2019873 |
| TGCCTGGCCTCCTGATTCCCTC | 1462 | 0 | 2 | 37634.5 | 13.004288 | 2.9085336 |
| GCCTCCAGGGATGATTCCTTCC | 1463 | 0 | 2 | 2862 | 10.98442 | 5.283977 |
| GTCCCTGAGCCTGGCATTTCCC | 1464 | 0 | 2 | 9774 | 6.3336153 | 2.3762388 |
| ACTGGCCAGCCAACAACAATAG | 1465 | 0 | 1 | 877 | 5.0408092 | −4.5819459 |
| GCTGGCTCCACCTGCTGCCAGG | 1466 | 0 | 2 | 2916 | 6.3332305 | 13.052609 |
| GCCCCAGCCTCCCGAGTAGCTG | 1467 | 0 | 1 | 2330 | 5.0814857 | 9.9303665 |
| TCCCAGCTCCTGGGCCCCACAG | 1468 | 0 | 1 | 5372.5 | 4.7662401 | 7.1915674 |
| CACTGCACTCCAGCCCGGGCAA | 1469 | 0 | 2 | 65046 | 15.988069 | 31.551188 |
| TGACCTCATGATCCGCCCACCTC | 1470 | 0 | 2 | 11003 | 34.517956 | 15.899262 |
| GGCCGCTCTCCGGTGTGGATCT | 1471 | 0 | 2 | 13720 | 8.10710811 | 8.136568 |
| CTAAATGCCCCTTCTGGCACAG | 1472 | 0 | 2 | 63453 | 11.163343 | 20.293009 |
| TCACTGCAACCTCTGCCTGCCA | 1473 | 0 | 2 | 25898 | 18.696442 | 17.538256 |
| CCGGTGTTCAAAGTCTGGTATG | 1474 | 0 | 2 | 6055 | 6.6824059 | 12.060349 |
| CACCCAGGCTGGAATGCAGTGG | 1475 | 0 | 2 | 3367 | 10.824119 | 13.172818 |
| CACCCAGGCTGGAGTGCAGTGA | 1476 | 0 | 2 | 2243 | 8.5379591 | 11.457872 |
| TTCCATATCTGTTGCATATCAT | 1477 | 0 | 1 | 1059 | 4.0724583 | 4.4120793 |
| CCACTGCACTTCAGCCTGGGTG | 1478 | 0 | 2 | 61492.5 | 17.94875 | 20.821732 |
| GCCAAATAAGTGTCCGGCCCTC | 1479 | 0 | 1 | 5930 | 10.101467 | 3.6227588E-2 |
| GCCCGCGCCAGCCTCTCCATCT | 1480 | 0 | 2 | 3281 | 7.5448685 | 10.447037 |
| CATTGCACTCCAGCCTTGGCAA | 1481 | 0 | 2 | 16173.5 | 8.520524 | 19.366573 |
| TGATAGATCCATATTTTGGTAA | 1482 | 1 | 0 | | | |
| TGCTCGCCCCACATGCCCTCAT | 1483 | 0 | 2 | 5021 | 8.3489428 | 2.7518404 |
| TGCCTGCCCCAGCTGAGATATC | 1484 | 0 | 2 | 5686 | 10.380668 | 15.221783 |
| TCACTGCAACCTCTGCCTCTTG | 1485 | 0 | 2 | 48652.5 | 22.205072 | 18.44136 |
| TGGAGGAGAGTTTGTCAGTATAG | 1486 | 1 | 0 | | | |
| CCCAGGCTGGAGTGCAGTGGCG | 1487 | 0 | 2 | 5921 | 13.471205 | 18.407236 |
| CACCCAGGCTGGAGAGCAGTGG | 1488 | 0 | 2 | 2370 | 8.847928 | 11.617569 |
| TCTGCACCATCGTATGCTTAAT | 1489 | 0 | 1 | 3861 | 4.0593572 | 6.2677927 |
| CTCTGAGCTGCCTTTTGAGCTT | 1490 | 0 | 1 | 1602.5 | 4.3898053 | 5.8146801 |
| TCCCGCCCTTGTACTTGCCGAG | 1491 | 0 | 1 | 5151.5 | 5.9488397 | 7.757297 |
| CGCCCAGGCTGGAGAGCAGTGG | 1492 | 0 | 1 | 1602.5 | 5.2608914 | 6.5835171 |
| GGTGGCTATGGCTGTGCTCGC | 1493 | 0 | 2 | 3426.5 | 15.917648 | 2.9563422 |
| CCTAGAGCCGCACCTCCTCCAC | 1494 | 0 | 1 | 2369 | 5.835712 | 4.0593348 |
| GCCTCCCCAAGCAGCAGGGATT | 1495 | 0 | 2 | 2657 | 6.1669488 | 6.5350518 |
| AGAAAGTGCTTCCCTTTGGTGA | 1496 | 0 | 1 | 4890.5 | 5.1180902 | 15.543441 |
| ACCCTGGCCGACTGCCCCTT | 1497 | 0 | 2 | 35652 | 12.982363 | 11.41268 |
| TGCTGCACCCTCTGCCTCCGGG | 1498 | 0 | 2 | 6094.5 | 6.9428978 | 10.588869 |
| CAGGAGGTTGAGGGTGCAGTGA | 1499 | 0 | 1 | 1559 | 5.1060648 | 7.4941492 |
| TGGGATGCTCAGGGCCTGGAGC | 1500 | 0 | 1 | 1824 | 8.0682802 | 0.78988832 |
| TGCTCTGATTTTTGCCCCAGC | 1501 | 0 | 2 | 7060.5 | 10.413313 | 7.7476549 |
| CGTCTGGCTTCTCCACGGTAAA | 1502 | 0 | 1 | 8462 | 5.8395977 | 11.586881 |
| TGTCATAGTGTGGTAGCAGTGG | 1503 | 0 | 1 | 2076.5 | 12.082075 | −3.4609232 |
| TGTGGTAGTCACGGCCCGCCAC | 1504 | 0 | 2 | 5909.5 | 23.027369 | 15.816967 |
| CTCTGCCTGTCTCATCCTGCAA | 1505 | 0 | 1 | 5028 | 4.6244407 | 0.84503251 |
| CATCTTTGCCCATCCACTTCCA | 1506 | 0 | 2 | 3944 | 14.688863 | 11.31537 |
| GGCTGGTGGCTGGTTCTGGACC | 1507 | 0 | 2 | 20736.5 | 31.680035 | 17.914019 |
| AGTGGTCTTAGCTTGCTGGGCT | 1508 | 0 | 1 | 2958 | 11.094181 | 1.2701284 |
| CCCCTGCTGTGCTTGCATGGCT | 1509 | 0 | 2 | 12605 | 18.076384 | 11.74684 |
| AGCCAGCCAGCAGGTATGC | 1510 | 0 | 2 | 2011 | 11.254579 | 11.186662 |
| GAGGCTGAGGCAGGAGGATCAC | 1511 | 0 | 2 | 13980 | 11.834332 | 23.254768 |
| ATGAGCACACTGATAAGCCCCT | 1512 | 0 | 1 | 3757 | 9.4285412 | −1.0390751 |
| AGTGCTATCGAGTTCTAATGCT | 1513 | 0 | 1 | 1529 | 11.816049 | −1.6991031 |
| CAGCCTGTAGTCTGGTCCAGGT | 1514 | 0 | 1 | 1863 | 5.1711364 | 10.847687 |
| CTGGCTCCTGTTTAACCAGCTG | 1515 | 0 | 2 | 2294 | 6.0272546 | 8.8361721 |
| GTCCCCTGTCCAGGGCCAGCCA | 1516 | 0 | 1 | 3915.5 | 9.6158686 | −3.1074336 |
| CTTGCCTGCCCTGTGTCATAAA | 1517 | 0 | 2 | 5903.5 | 11.970026 | 3.0393276 |
| TCCCGTAGGTTGCTGTAGTCGG | 1518 | 0 | 1 | 3606 | 5.655231 | 9.4085045 |
| GTTGGCCAGGCTGGTCTCAATC | 1519 | 0 | 1 | 2090 | 5.0410533 | −4.0856218 |
| TCTCCCAGATCCTTTAGCCTCC | 1520 | 0 | 2 | 7384.5 | 14.663905 | 2.166656 |
| GCCTCCTGGGGTGCCATCATCT | 1521 | 0 | 1 | 8207 | 11.668092 | 1.0917441 |
| ATCATTAACAGTGCAGGGGTAGG | 1522 | 0 | 2 | 1291 | 6.7080827 | 6.8988318 |
| TGGCCACCACCAATACTTGCCT | 1523 | 0 | 1 | 1777 | 4.5837574 | 0.96471441 |
| GGCCTCCCGGACCGCAGCGCC | 1524 | 0 | 1 | 1805 | 4.437829 | 2.6645198 |
| AGCCCAGGTCCAGTTCACTGCA | 1525 | 0 | 2 | 910.5 | 6.2636547 | 2.1727333 |
| TCCCCTCTTGGCTTGGTCCAGA | 1526 | 0 | 2 | 10285 | 8.0190945 | 16.142628 |
| CTGGCCTAGACAGACCCTGATC | 1527 | 0 | 1 | 24673.5 | 24.969994 | −5.0956011 |
| CCCTGGCTGCGTGATGGATGAA | 1528 | 0 | 1 | 3966 | 4.1167688 | 10.868774 |
| GTAGGCCATGGTGGTTGTCTCT | 1529 | 0 | 1 | 2289.5 | 4.7606225 | 9.7036562 |
| TGTGGCTCAGGCGGCTTCTCCT | 1530 | 0 | 1 | 7641 | 5.5752053 | 5.2592807 |
| TCCCTGTGTCCTGGGGGCACCT | 1531 | 0 | 1 | 3722 | 5.4018469 | 0.76068252 |
| ACCTGAGCTCCACCTCCTGCC | 1532 | 0 | 1 | 3490.5 | 5.5675011 | 2.1058514 |
| CCCAGCGAGTTTGCCGGTGAAC | 1533 | 0 | 1 | 1491.5 | 8.489337 | 0.20919423 |
| TTCAAAGGGAAAAGCAGGCTGG | 1534 | 0 | 1 | 7722 | 5.5424767 | 6.6963782 |
| CGGCCCCTCCTCTCGCGCC | 1535 | 0 | 2 | 4246 | 7.6359258 | 11.74948 |
| AAGTGATTCAGCCCTCA | 1536 | 0 | 2 | 4389 | 9.3773403 | 14.014197 |
| GGCCTGGGCTCCGGGAGTTACT | 1537 | 0 | 1 | 3130.5 | 4.0424356 | −4.2492251 |
| CCTCGGCCGGAGAGCCAAGTGC | 1538 | 0 | 2 | 2066.5 | 16.716997 | 8.8393974 |
| TCTGTGCCTGCTTCCCCACCCA | 1539 | 0 | 2 | 4441 | 10.529091 | 6.8799772 |
| CTGCACTCCCGCCTGGGC | 1540 | 0 | 2 | 11228 | 7.6034174 | 5.8922038 |
| GCACTCCAGCCTGGGTAACAGC | 1541 | 0 | 2 | 65518 | 29.270939 | 27.328928 |
| CTGGAGCAGACAAAAGG | 1542 | 0 | 2 | 8594 | 11.848651 | 3.8546574 |
| CTCACTGCAACCTCTGCCTCCC | 1543 | 0 | 2 | 48422 | 21.955811 | 20.696438 |
| TGTGCCTAGTTCTGTATTTACA | 1544 | 0 | 2 | 2504.5 | 10.873516 | 8.0277433 |
| GGTTTTCACCTCCAGAATGTGC | 1545 | 0 | 2 | 2724 | 8.9372482 | 2.5630777 |
| CGTAAGTCACAGCGCCTGGCCC | 1546 | 0 | 2 | 38826 | 11.506068 | 25.787857 |
| CTCTGTGATATGGTTTGTAATA | 1547 | 0 | 2 | 6862 | 19.265455 | 13.692534 |
| TCTCCCCTGGTCTCGCGCGCTG | 1548 | 0 | 2 | 21744.5 | 8.1104021 | 2.3839858 |
| CACTGCAACCTCCACCTCCTGG | 1549 | 1 | 2 | 31393 | 19.150194 | 22.611071 |
| CTGGTAGCTCCTGAATATCCCT | 1550 | 0 | 2 | 2223 | 17.251909 | 5.7171526 |
| ATGCCTGTAATCCCAGCACTTT | 1551 | 0 | 2 | 8871 | 12.921462 | 20.372988 |
| ACAAAGCGCTTCTCTTTAGAGT | 1552 | 0 | 2 | 65518 | 11.238881 | 26.766436 |
| AATCGCTTGAACCCAGGAAGTG | 1553 | 1 | 0 | | | |
| GGGCTTTTGGAATGGTCTGT | 1554 | 0 | 2 | 4463 | 9.6709318 | 2.0551727 |
| AGCAACTCTCACCTGGCTGC | 1555 | 0 | 1 | 7806.5 | 5.9086308 | 13.562915 |
| TGCCCTCTTTCTGTACAGCTCC | 1556 | 0 | 2 | 6133 | 10.524484 | 4.3130703 |
| TGGTTTTAGGGAATCAATCTAT | 1557 | 0 | 1 | 2404 | 5.3749018 | 0.52072495 |
| TTCCCACTGTGGCAGAGCCTCG | 1558 | 0 | 2 | 4853 | 8.5227718 | 8.7430191 |
| CGTGTAGCATGCGCCACCACCA | 1559 | 0 | 1 | 1152 | 4.372324 | −1.7681072 |
| TGCCTAGGCTGGAGTGTAGTGG | 1560 | 0 | 1 | 1960 | 5.1336985 | −5.655652 |
| TACTCTTTTAGCCCCACAGAGA | 1561 | 0 | 2 | 7108.5 | 14.535069 | 18.807434 |
| CAAATCCCTGCTCTGTGCTG | 1562 | 0 | 1 | 3854 | 4.0554743 | 15.468264 |
| CCAAGGTGGGAGGATTGCTTGA | 1563 | 0 | 2 | 65518 | 19.42584 | 35.754147 |
| CCAGACTGCTTGCTTCCCAGCC | 1564 | 0 | 1 | 14958 | 21.194012 | −0.46141499 |
| CTCTGCAAGTCCAGCCCCTGGC | 1565 | 0 | 1 | 4339 | 4.6901293 | −2.0411224 |
| TGTGAGACTTTCTTTGGCCTCT | 1566 | 0 | 1 | 2660 | 6.6352882 | 0.18635188 |
| CTCTGAGTCCTGCACTCACCCG | 1567 | 0 | 1 | 2770 | 6.7869315 | 1.284364 |
| ACTGCACTTTAGCCTGGGC | 1568 | 0 | 2 | 28568 | 11.638906 | 27.546202 |
| TCAGCCATTCCTTACCTTTC | 1569 | 0 | 2 | 3289 | 10.019641 | 3.658488 |
| TCACTGAAACCTCCACCTCTCG | 1570 | 0 | 2 | 4339.5 | 9.3257465 | 9.4827623 |
| AGATTTGGTGTCTGGTTGATAT | 1571 | 0 | 1 | 3906 | 5.6260681 | 15.079812 |
| CAGGCCTCTTACCCTCTCT | 1572 | 0 | 1 | 2175 | 4.1754398 | 3.2060738 |
| ACGCGCTGGGGCGCTGGCCAAT | 1573 0 | 2 | 65518 | 13.337035 | 9.5484018 | |
| CCTGTGGCGGGGGCCAGTGCCT | 1574 | 0 | 2 | 2732.5 | 7.5204544 | 6.9828696 |
| CACTCAGCTGAGCCCTCAGCCC | 1575 | 0 | 2 | 3808 | 6.236114 | 7.0009232 |
| TCCCCCACTGTTTCTGCTAC | 1576 | 0 | 1 | 4143.5 | 4.8829288 | 1.3394566 |
| GCCTGTCCTCTTCCGCCTGTCT | 1577 | 0 | 1 | 14508 | 12.145576 | 1.6282115 |
| CCACCTGAGATAAGAGAGCTCA | 1578 | 0 | 1 | 1308 | 5.8285513 | 3.6287591 |
| CCAGGAGGCGGAGGTTGCAGTG | 1579 | 0 | 2 | 4649 | 9.3886547 | 16.137344 |
| TCACTGCAAGCTCCTCCTCCTG | 1580 | 0 | 2 | 12173.5 | 21.173698 | 8.2767439 |
| GTATTGCTTGAGCCCAGGAGTT | 1581 | 0 | 2 | 65518 | 20.541035 | 33.582275 |
| CCCTGGCTGATACCGGAAAGGC | 1582 | 0 | 2 | 9281 | 7.5079288 | 7.661869 |
| CTCACTGCAACCTCTGCCCCCA | 1583 | 0 | 2 | 39028 | 21.537285 | 22.098822 |
| CACCACTTTCTCCTTCTCCTTGG | 1584 | 0 | 1 | 3132 | 5.2580366 | 8.4857149 |
| AGGAGGGGTTCTCGGGTGCTGA | 1585 | 0 | 2 | 1395 | 7.4959846 | 3.0751243 |
| GTAGACCATTTATCTGGGGAGT | 1586 | 0 | 2 | 3261 | 18.415466 | 9.8317289 |
| TCTGCACCCCAGCCTGAGTGA | 1587 | 0 | 1 | 3009.5 | 5.033093 | 10.499595 |
| TGCCTAGGCTGGAGTGCAGTGA | 1588 | 0 | 2 | 2695 | 6.3287864 | 5.4875331 |
| CCTTTTATCCCCTAATTGGCCT | 1589 | 0 | 2 | 8596 | 19.616385 | 9.8835402 |
| AGAAAGTGCTTCCCTTTGGACT | 1590 | 0 | 2 | 11968 | 7.2289524 | 23.562014 |
| TTGTCACTGCACTCCAGTCTGG | 1591 | 0 | 2 | 12372.5 | 9.9857264 | 24.029345 |
| TTGCTCTTGAAAATTGATGCTG | 1592 | 0 | 1 | 18285 | 23.095486 | 0.6942786 |
| AAGCCAATGCTAGCCCACATGC | 1593 | 0 | 2 | 3477 | 8.0798817 | 10.92757 |
| TCTAATCCTATGGTGGGGAGGG | 1594 | 0 | 2 | 1947 | 8.5338745 | 6.3978777 |
| CGTGCCACTGCACTCCAGTCTG | 1595 | 0 | 2 | 29565 | 13.984879 | 26.717236 |
| CCACTGCACTCCAGCCTTGGCA | 1596 | 0 | 2 | 65518 | 19.59687 | 23.317396 |
| GGCGGAGCTTGCAGTGAGCCGA | 1597 | 0 | 1 | 1587 | 4.3907022 | 2.4575887 |
| AGCTGGAGATGAGTGACGTGCC | 1598 | 0 | 1 | 10661 | 16.698954 | 0.85748941 |
| TTTTGGTTGTTGGGTAAGAGTA | 1599 | 0 | 1 | 2392 | 4.963624 | 5.6073937 |
| TTGCCGCCGTCTGCTCGCCCCG | 1600 | 0 | 1 | 4152.5 | 4.4578457 | 2.1733229 |
| TGATGTGGCCCCACTTAGCTGT | 1601 | 0 | 1 | 2921.5 | 18.344973 | −1.1306779 |
| TGACCTCATGATCCGCCCACCT | 1602 | 0 | 2 | 7185 | 29.981552 | 13.353135 |
| GCCGTCCACCTCGATGGCCACT | 1603 | 0 | 1 | 4073 | 4.6692619 | −8.5749388 |
| GACAGGCTTCCACTATGTTGCC | 1604 | 0 | 1 | 1321 | 5.3749018 | 6.195621 |
| TACTGCACTCCAGCCTTGCCAA | 1605 | 0 | 2 | 18364 | 10.029301 | 16.731598 |
| CTCTGTAGAAAGAGCCCAGGTG | 1606 | 0 | 2 | 1166 | 10.625381 | 5.0621781 |
| TTCTTTTCTGAGCCTTG | 1607 | 0 | 1 | 3674.5 | 4.927527 | −1.7429894 |
| GACGAGAGACTCCATCCACCAC | 1608 | 0 | 2 | 1036 | 6.9557924 | 5.046813 |
| ATCTCAGCTCTGCCTCCTGGGT | 1609 | 0 | 2 | 8963 | 12.361974 | 12.799247 |
| CTGGAGGTGCTTCGCTGGCCAC | 1610 | 0 | 1 | 33822 | 24.215584 | −8.2400523E-2 |
| TTCCCTTAAATTATGGCATCTA | 1611 | 0 | 1 | 4395 | 7.3068743 | −0.26304191 |
| TTAGGCCTTTGATTGGGGTGCT | 1612 | 0 | 1 | 1685.5 | 4.1420093 | 7.9094262 |
| CCCATTTCTTGAGTTCAGCTCT | 1613 | 0 | 2 | 3582 | 13.552105 | 2.9659367 |
| GAGGGGAGCCCCCATCCTCCAG | 1614 | 0 | 2 | 3509 | 6.0553408 | 8.2040138 |
| TTCTCCCTGTCCTATCAAGACT | 1615 | 0 | 1 | 4699 | 4.7479568 | 12.121504 |
| TCATTCCCTCATTGTTCACTGG | 1616 | 0 | 1 | 8088 | 8.6392965 | 1.1877192 |
| GGGGGCTTGGCCCGGTCTGGTT | 1617 | 0 | 2 | 17107.5 | 8.3545551 | 12.59028 |
| ATGGGCCTCCTATTATCCCCAT | 1618 | 0 | 2 | 4745.5 | 13.363207 | 5.1394033 |
| GCCTGGATTCCTTGTTTCTCAG | 1619 | 0 | 1 | 2049 | 4.3417811 | 7.2988648 |
| TGTGGGTGGCATCGTCCTGGCC | 1620 | 0 | 1 | 9679.5 | 6.8719993 | 0.49652323 |
| GCCGGGTTCAAGCCATTCTCCT | 1621 | 0 | 2 | 3787 | 7.9569592 | 12.92104 |
| GCCAGCCAGAAACGTCACACTG | 1622 | 0 | 2 | 3409 | 16.32616 | 4.566371 |
| CTCACTGAAACCTCCGCCTCCC | 1623 | 0 | 2 | 18912 | 16.516399 | 5.5995822 |
| GTGCTGGTGCTCGCTCCTCTGG | 1624 | 0 | 2 | 8165 | 11.725875 | 9.7062302 |
| TGCCCAGGCTGGAGTGCAGTGG | 1625 | 0 | 2 | 22039 | 16.547016 | 22.788761 |
| TAGAGTGTCATAACAGTGCCCA | 1626 | 0 | 1 | 1991 | 9.5302086 | 1.9559761 |
| TATGCCACTGCTCTCCATCCTA | 1627 | 0 | 1 | 3874.5 | 5.9149723 | 1.1388568 |
| TGGTCTGCTGAACAGCCGTATC | 1628 | 0 | 1 | 1757 | 4.743588 | 1.0271198 |
| ACCAGCCTGGCCAACATGGTGA | 1629 | 0 | 2 | 14312.5 | 12.221603 | 21.144381 |
| GCCAGCAGCTTCTTCTCATCCT | 1630 | 0 | 1 | 12277 | 6.6476259 | −3.0264895 |
| TGGCTCTGTCCTCAGCT | 1631 | 0 | 1 | 6081 | 5.0312958 | 9.2481689 |
| ACCCAGGCTGGAGTGCAGTGGC | 1632 | 0 | 2 | 6072 | 13.647521 | 18.928474 |
| TCCCCAGCTTGCTACTTCTGCT | 1633 | 0 | 1 | 3083 | 5.0408092 | 4.8841767 |
| CTTCCCTCTGCTCCTTGGTCCA | 1634 | 0 | 1 | 19594.5 | 9.4720697 | 1.9364738 |
| CTTCTCGGGGTTCCCGCGCCCT | 1635 | 0 | 1 | 2766.5 | 4.3488479 | 3.1100295 |
| AGGGAAGGACTGCTGGGTTGGC | 1636 | 0 | 2 | 10310 | 6.1609344 | 2.3204882 |
| CCTGCCTATGAGACGTTTTGCC | 1637 | 0 | 1 | 2184 | 7.8809133 | −5.31426 |
| TTTTCCTTCATATCCCTTATGT | 1638 | 0 | 1 | 1319.5 | 4.0893412 | −2.6567316 |
| CATTGCACTCCAGCTCTGGGCG | 1639 | 0 | 2 | 59621 | 23.220642 | 28.257877 |
| GGGAGGTTGAGGCTGCAGTGAG | 1640 | 0 | 2 | 3383 | 10.8508 | 12.95626 |
| GGCGGCCCAGGCGCTTGGAGAT | 1641 | 0 | 2 | 6899.5 | 8.1672001 | 10.434432 |
| GTGCTGTGCCCTCTGCTGGGAA | 1642 | 0 | 1 | 3638 | 12.00617 | −1.0814483 |
| AGCAGAGCAGTCTCCGCTCA | 1643 | 0 | 2 | 11919 | 6.4712315 | 22.303505 |
| TGGCACAGCCTCCATGTCGTCC | 1644 | 0 | 2 | 2677 | 6.0342832 | 3.5939596 |
| GCCTCAGTCTCCCGAGTAGCTG | 1645 | 0 | 2 | 11503 | 10.848304 | 18.821283 |
| CGCGCCGTCGGGTCCAGCC | 1646 | 0 | 1 | 2247.5 | 4.7277126 | 7.7918286 |
| CCCCGAGGCTGGAGTGCAGTGG | 1647 | 0 | 2 | 8152 | 11.888549 | 9.8740635 |
| CGTGCTGGGTCTGCGGGGCCGT | 1648 | 0 | 1 | 5352 | 9.8540783 | −5.7792974 |
| TAGGCCCCTAGTGCCACGTGGC | 1649 | 0 | 1 | 1019 | 4.9789224 | −0.50027198 |
| GACCTTGTGATCCACCCGCTTT | 1650 | 0 | 2 | 4584 | 8.4290171 | 13.331941 |
| CCCTGGCTGGCTCTGCCCGGAC | 1651 | 0 | 1 | 5439.5 | 4.9906063 | 0.71976095 |
| GCACTGGCCGCACGCGTAGGGC | 1652 | 0 | 2 | 11799 | 10.682883 | 23.348194 |
| GACCTTGTGATCCACCCGCCTT | 1653 | 0 | 2 | 8371 | 11.550721 | 15.977306 |
| CAAAGTGCTGGGATTACAGGCT | 1654 | 0 | 1 | 2028 | 5.1953826 | 10.857911 |
| TGGTGGCTCACGTCTGTAATCT | 1655 | 0 | 1 | 1871 | 5.7638865 | −7.8935137 |
| CATCCAGGCTGAAGTGCAGTGG | 1656 | 0 | 2 | 2134 | 8.2575912 | 10.422696 |
| TGATATGGTTTGGCTGTGTT | 1657 | 0 | 2 | 4515 | 12.488225 | 16.236593 |
| TCCGGGAGGCAGAGGTTGCAGT | 1658 | 0 | 1 | 1221 | 4.4037938 | 7.4545732 |
| GGTGAATTTGCCTCCCGACTGA | 1659 | 0 | 1 | 3632.5 | 5.797946 | 13.529587 |
| GGGTGCTTTGGCTCACGCCTGT | 1660 | 0 | 1 | 2429 | 4.6753616 | 12.409147 |
| TTCACCATGTTGGCCAGGCTGG | 1661 | 0 | 2 | 8459 | 14.352482 | 9.058075 |
| TGGTGCTAGTTAAATCTTCAGG | 1662 | 0 | 2 | 2715 | 17.999035 | 10.341267 |
| CCTCGGCTGGGCCTTGGCCACT | 1663 | 0 | 2 | 7735 | 6.1994433 | 14.162719 |
| CTCACTGCAATCTCCGTCTCCC | 1664 | 0 | 2 | 14910 | 15.75562 | 18.259068 |
| CCTGGCCTTTGAACGCTAGACT | 1665 | 0 | 1 | 11406 | 7.0146093 | 0.75884587 |
| AGCTCACTGCAACCTCCGCCTC | 1666 | 0 | 2 | 47293.5 | 20.812145 | 17.740503 |
| GGGCAAGGAAACAGCCCCCA | 1667 | 0 | 1 | 2351 | 7.9984035 | −0.44823697 |
| GGCTCTGTGTCTCCACCCAAAT | 1668 | 0 | 1 | 3079 | 5.4224949 | 9.948535 |
| TCACTGCAACCTCTGCCTCCCG | 1669 | 0 | 2 | 43860.5 | 21.342369 | 14.672491 |
| TCACCCCTCCATTCTCTCATGT | 1670 | 0 | 1 | 3872 | 5.0523677 | 5.8481488 |
| TGCTATGTTGCCCAGGGTGGCC | 1671 | 0 | 2 | 5818 | 7.5935292 | 5.3837776 |
| AGCCCAATCCTAGCACTTTGAG | 1672 | 0 | 2 | 2126.5 | 6.5217991 | 3.5096016 |

[0474]

| ROW# | INFECTION NAME | SEQ ID NOs OF GAMS ASSOCIATED WITH INFECTION |
|---|---|---|
| 2 | B19 virus | 11, 23, 28, 31, 36, 48, 66, 68, 73, 74, 85, 92, 105, 143, 144, 166, 177, 187, |
| | | 216, 272, 279, 290, 293, 296, 299, 304, 315, 345, 346, 367, 380, 393, 418, 422, |
| | | 433, 466, 467, 488, 492, 563, 564, 598, 610, 612, 619, 627, 637, 667, 681, 731, |
| | | 746, 808, 838, 846, 855, 861, 879, 887, 891, 946, 947, 954, 973, 1009, 1012, |
| | | 1053, 1065, 1078, 1128, 1133, 1161, 1163, 1166, 1172, 1174, 1181, 1186, 1195, |
| | | 1206, 1270, 1273, 1299, 1303, 1328, 1348, 1363, 1385, 1406, 1442, 1469, 1486, |
| | | 1520, 1523, 1547, 1579, 1594, 1642, 1670 and 119265-124793. |
| 3 | Barmah Forest virus | 2, 11, 23, 31, 48, 49, 50, 68, 72, 73, 74, 82, 84, 85, 89, 92, 101, 105, 112, |
| | | 131, 135, 143, 144, 166, 177, 198, 200, 201, 212, 216, 272, 277, 279, 290, 293, |
| | | 296, 304, 315, 325, 330, 342, 345, 346, 364, 367, 377, 380, 393, 405, 418, 433, |
| | | 466, 467, 479, 488, 492, 497, 503, 508, 529, 535, 563, 564, 566, 594, 595, 598, |
| | | 601, 605, 610, 612, 619, 627, 637, 642, 658, 667, 694, 710, 712, 731, 746, 765, |
| | | 808, 831, 838, 846, 855, 861, 882, 887, 891, 900, 945, 946, 947, 954, 973, 991, |
| | | 1009, 1053, 1058, 1065, 1078, 1093, 1122, 1132, 1133, 1152, 1161, 1163, 1166, |
| | | 1172, 1174, 1181, 1185, 1231, 1273, 1274, 1283, 1299, 1328, 1348, 1363, 1374, |
| | | 1385, 1389, 1400, 1406, 1442, 1459, 1469, 1473, 1485, 1486, 1520, 1523, 1547, |
| | | 1554, 1575, 1579, 1594, 1626, 1670 and 124794-128803. |
| 4 | BK polyomavirus | 4, 11, 20, 23, 24, 29, 31, 35, 36, 37, 40, 43, 47, 48, 49, 50, 51, 66, 67, 70, |
| | | 73, 74, 77, 78, 96, 114, 120, 143, 148, 169, 171, 174, 187, 188, 189, 200, 203, |
| | | 212, 219, 231, 234, 239, 240, 244, 247, 252, 261, 262, 277, 279, 284, 286, 289, |
| | | 290, 295, 303, 304, 310, 315, 321, 323, 334, 336, 339, 347, 356, 357, 366, 370, |
| | | 374, 376, 380, 394, 395, 396, 399, 400, 401, 405, 413, 416, 424, 429, 431, 433, |
| | | 437, 441, 443, 446, 453, 454, 462, 463, 465, 466, 481, 484, 500, 507, 509, 510, |
| | | 515, 518, 526, 529, 537, 541, 544, 547, 551, 553, 561, 566, 567, 574, 575, 577, |
| | | 579, 585, 587, 594, 605, 607, 610, 612, 617, 624, 625, 627, 635, 640, 652, 653, |
| | | 654, 661, 663, 667, 676, 681, 684, 694, 696, 701, 709, 710, 713, 715, 720, 731, |
| | | 734, 737, 746, 749, 754, 756, 760, 763, 773, 776, 777, 786, 801, 803, 804, 811, |
| | | 813, 829, 832, 838, 839, 840, 846, 847, 854, 856, 862, 868, 872, 873, 876, 882, |
| | | 886, 887, 889, 909, 911, 914, 920, 924, 925, 927, 935, 936, 938, 954, 960, 962, |
| | | 966, 969, 973, 977, 979, 980, 985, 988, 998, 1006, 1008, 1019, 1020, 1037, 1038, |
| | | 1040, 1049, 1050, 1058, 1062, 1065, 1069, 1070, 1084, 1086, 1090, 1096, 1101, |
| | | 1106, 1123, 1129, 1133, 1138, 1139, 1144, 1152, 1153, 1159, 1163, 1168, 1172, |
| | | 1190, 1195, 1196, 1204, 1205, 1212, 1219, 1225, 1239, 1245, 1251, 1254, 1257, |
| | | 1258, 1262, 1268, 1270, 1271, 1274, 1284, 1290, 1293, 1297, 1299, 1306, 1321, |
| | | 1328, 1330, 1335, 1338, 1339, 1349, 1353, 1363, 1364, 1390, 1391, 1392, 1411, |
| | | 1412, 1416, 1423, 1424, 1426, 1432, 1456, 1459, 1467, 1469, 1473, 1476, 1481, |
| | | 1485, 1487, 1488, 1503, 1505, 1507, 1511, 1526, 1549, 1552, 1574, 1578, 1579, |
| | | 1580, 1584, 1586, 1598, 1606, 1617, 1631, 1633, 1637, 1639, 1640, 1642, 1643, |
| | | 1654, 1656, 1665, 1669 and 128804-147105. |
| 5 | Bunyamwera virus | 166, 323, 462, 478, 484, 541, 553, 559, 798, 867, 1057, 1063, 1069, 1484, 1560 |
| | | and 147106-147728. |
| 6 | Colorado tick fever | 20, 58, 64, 69, 88, 99, 103, 126, 130, 166, 186, 228, 245, 264, 286, 306, 319, |
| | virus | 329, 330, 333, 346, 354, 361, 375, 386, 402, 418, 429, 451, 458, 470, 476, 502, |
| | | 518, 520, 524, 527, 540, 548, 575, 584, 585, 611, 640, 677, 687, 691, 728, 732, |
| | | 735, 774, 784, 803, 818, 847, 851, 876, 916, 932, 937, 940, 957, 959, 962, 964, |
| | | 968, 1023, 1047, 1110, 1130, 1136, 1154, 1177, 1180, 1184, 1187, 1208, 1218, |
| | | 1233, 1249, 1253, 1254, 1258, 1277, 1294, 1321, 1335, 1342, 1376, 1395, 1410, |
| | | 1413, 1420, 1425, 1427, 1447, 1451, 1455, 1489, 1521, 1532, 1533, 1536, 1555, |
| | | 1568, 1575, 1583, 1588, 1645, 1664 and 147729-148041. |
| 7 | Crimean-Congo hemorrhagic | 63, 166, 271, 323, 462, 478, 484, 541, 553, 559, 569, 570, 798, 867, 1057, 1063, |
| | fever virus | 1069, 1285, 1484, 1560 and 148042-149020. |
| 8 | Dengue virus | 63, 64, 68, 166, 169, 196, 204, 229, 238, 271, 323, 376, 448, 462, 466, 478, |
| | | 484, 541, 553, 559, 569, 570, 656, 657, 669, 798, 838, 853, 859, 867, 875, 935, |
| | | 1005, 1057, 1063, 1069, 1239, 1285, 1308, 1358, 1372, 1373, 1386, 1400, 1402, |
| | | 1484, 1560 and 149021-151652. |
| 9 | Dobrava virus | 9, 63, 166, 271, 323, 462, 478, 484, 541, 553, 559, 569, 570, 798, 867, 951, |
| | | 1057, 1063, 1069, 1285, 1484, 1560, 1581 and 151653-152681. |
| 10 | Eastern equine encephalitis | 4, 5, 11, 20, 23, 24, 29, 31, 33, 35, 37, 43, 47, 48, 49, 51, 66, 67, 70, 73, |
| | virus | 74, 77, 78, 83, 84, 96, 99, 112, 114, 120, 129, 143, 145, 148, 154, 169, 171, |
| | | 172, 174, 180, 187, 188, 189, 200, 203, 212, 219, 223, 224, 232, 234, 239, 240, |
| | | 247, 252, 257, 261, 262, 268, 272, 277, 279, 283, 289, 290, 295, 303, 304, 306, |
| | | 310, 315, 320, 321, 323, 334, 336, 337, 339, 347, 356, 357, 366, 370, 374, 376, |
| | | 380, 386, 394, 395, 396, 399, 400, 401, 405, 413, 416, 424, 429, 431, 433, 437, |
| | | 441, 443, 446, 453, 454, 462, 465, 466, 467, 481, 483, 484, 500, 504, 507, 509, |
| | | 510, 515, 518, 522, 526, 537, 541, 544, 547, 551, 553, 561, 562, 567, 574, 575, |
| | | 577, 579, 587, 594, 605, 607, 610, 612, 617, 624, 627, 635, 637, 640, 652, 654, |
| | | 661, 667, 676, 681, 684, 694, 701, 709, 710, 713, 715, 720, 731, 734, 737, 746, |
| | | 749, 754, 756, 760, 763, 773, 774, 776, 777, 786, 801, 803, 804, 811, 813, 829, |
| | | 838, 839, 840, 846, 847, 848, 854, 856, 862, 868, 873, 876, 882, 886, 889, 909, |
| | | 911, 914, 924, 925, 927, 932, 935, 936, 938, 946, 954, 959, 960, 962, 966, 968, |
| | | 969, 973, 977, 979, 985, 988, 998, 1006, 1008, 1019, 1020, 1037, 1038, 1040, |
| | | 1049, 1058, 1062, 1065, 1069, 1070, 1084, 1086, 1090, 1096, 1101, 1105, 1106, |
| | | 1115, 1123, 1124, 1129, 1133, 1138, 1139, 1152, 1153, 1159, 1163, 1168, 1172, |
| | | 1190, 1196, 1204, 1205, 1212, 1219, 1225, 1229, 1234, 1239, 1245, 1251, 1254, |
| | | 1257, 1258, 1262, 1268, 1270, 1271, 1274, 1281, 1284, 1290, 1293, 1297, 1299, |
| | | 1305, 1306, 1321, 1328, 1330, 1335, 1338, 1339, 1349, 1353, 1363, 1364, 1374, |
| | | 1383, 1390, 1391, 1392, 1408, 1411, 1412, 1416, 1423, 1424, 1426, 1432, 1456, |
| | | 1459, 1460, 1467, 1469, 1473, 1474, 1476, 1481, 1485, 1487, 1488, 1499, 1503, |
| | | 1507, 1511, 1526, 1537, 1549, 1551, 1552, 1574, 1578, 1579, 1580, 1584, 1606, |
| | | 1617, 1624, 1627, 1631, 1633, 1637, 1639, 1640, 1643, 1644, 1654, 1656, 1661, |
| | | 1665, 1669 and 152682-166891. |
| 11 | Hepatitis A virus | 9, 23, 31, 36, 48, 78, 88, 105, 150, 162, 189, 203, 219, 229, 232, 233, 244, |
| | | 248, 272, 278, 303, 306, 315, 325, 334, 351, 353, 365, 366, 373, 404, 416, 422, |
| | | 429, 453, 458, 466, 467, 492, 520, 521, 541, 544, 561, 565, 571, 575, 581, 586, |
| | | 597, 604, 614, 615, 619, 625, 641, 654, 661, 694, 713, 720, 736, 760, 778, 781, |
| | | 802, 803, 820, 829, 839, 846, 875, 876, 877, 901, 909, 922, 973, 985, 989, 1006, |
| | | 1009, 1012, 1019, 1035, 1036, 1047, 1062, 1065, 1069, 1092, 1116, 1129, 1130, |
| | | 1134, 1144, 1157, 1166, 1172, 1180, 1185, 1195, 1197, 1199, 1205, 1216, 1227, |
| | | 1251, 1258, 1266, 1268, 1287, 1293, 1299, 1304, 1328, 1332, 1335, 1338, 1351, |
| | | 1363, 1371, 1373, 1392, 1394, 1406, 1429, 1437, 1469, 1486, 1488, 1550, 1554, |
| | | 1557, 1594, 1598, 1611, 1619, 1631, 1637, 1640 and 166892-176205. |
| 12 | Hepatitis B virus | 2, 6, 7, 8, 9, 10, 11, 13, 15, 19, 23, 24, 26, 28, 31, 36, 38, 47, 48, 50, 51, |
| | | 54, 56, 57, 60, 66, 67, 68, 73, 74, 77, 78, 81, 83, 84, 85, 88, 92, 96, 101, |
| | | 103, 105, 110, 114, 116, 127, 129, 130, 135, 139, 140, 142, 143, 144, 149, 150, |
| | | 151, 154, 155, 158, 160, 162, 163, 166, 167, 169, 173, 174, 175, 177, 179, 182, |
| | | 187, 189, 193, 194, 198, 199, 200, 202, 203, 204, 207, 208, 210, 212, 213, 216, |
| | | 218, 219, 220, 221, 222, 225, 229, 230, 231, 232, 233, 234, 235, 236, 244, 247, |
| | | 248, 249, 256, 261, 262, 263, 265, 272, 276, 278, 279, 280, 284, 286, 289, 290, |
| | | 293, 295, 296, 298, 299, 302, 303, 304, 306, 307, 309, 312, 315, 318, 321, 323, |
| | | 325, 331, 334, 336, 339, 344, 345, 346, 347, 351, 353, 356, 358, 359, 363, 365, |
| | | 366, 367, 370, 372, 373, 374, 380, 382, 385, 387, 391, 393, 394, 396, 399, 400, |
| | | 402, 404, 408, 409, 410, 412, 416, 418, 420, 422, 424, 425, 429, 433, 434, 435, |
| | | 437, 443, 445, 446, 448, 453, 454, 457, 458, 460, 462, 463, 466, 467, 468, 469, |
| | | 470, 471, 476, 478, 480, 481, 482, 484, 485, 486, 487, 488, 490, 492, 493, 499, |
| | | 500, 505, 506, 509, 511, 516, 520, 521, 522, 526, 530, 531, 532, 534, 537, 539, |
| | | 541, 542, 544, 545, 546, 551, 553, 555, 559, 561, 563, 564, 565, 566, 567, 569, |
| | | 570, 572, 575, 579, 581, 583, 584, 585, 586, 590, 597, 598, 603, 604, 606, 610, |
| | | 612, 614, 615, 618, 619, 623, 625, 627, 629, 635, 636, 637, 641, 643, 644, 645, |
| | | 653, 654, 656, 661, 663, 666, 667, 668, 669, 671, 676, 679, 681, 684, 686, 688, |
| | | 692, 693, 694, 698, 700, 703, 704, 707, 709, 711, 713, 715, 717, 720, 725, 731, |
| | | 734, 736, 738, 744, 746, 750, 754, 760, 762, 765, 767, 778, 781, 783, 784, 786, |
| | | 788, 795, 796, 797, 798, 801, 802, 803, 808, 809, 812, 813, 817, 820, 827, 829, |
| | | 831, 832, 836, 838, 839, 846, 847, 848, 851, 854, 855, 857, 859, 861, 862, 867, |
| | | 868, 872, 875, 876, 877, 879, 881, 882, 884, 886, 887, 889, 891, 894, 900, 901, |
| | | 905, 908, 909, 910, 915, 918, 919, 920, 922, 924, 926, 927, 931, 932, 933, 935, |
| | | 937, 938, 946, 947, 954, 960, 963, 965, 973, 975, 978, 980, 982, 983, 984, 985, |
| | | 989, 990, 992, 993, 995, 998, 999, 1000, 1003, 1005, 1006, 1008, 1009, 1010, |
| | | 1011, 1012, 1015, 1016, 1017, 1019, 1022, 1024, 1026, 1034, 1035, 1036, 1038, |
| | | 1040, 1042, 1043, 1044, 1046, 1047, 1052, 1053, 1054, 1056, 1057, 1058, 1060, |
| | | 1062, 1063, 1065, 1067, 1069, 1070, 1071, 1075, 1076, 1078, 1081, 1085, 1086, |
| | | 1088, 1089, 1092, 1095, 1099, 1101, 1102, 1106, 1107, 1108, 1109, 1114, 1116, |
| | | 1118, 1119, 1123, 1128, 1129, 1130, 1132, 1133, 1134, 1139, 1142, 1144, 1148, |
| | | 1149, 1152, 1153, 1154, 1155, 1157, 1161, 1163, 1166, 1168, 1169, 1172, 1173, |
| | | 1174, 1180, 1181, 1182, 1183, 1185, 1186, 1189, 1190, 1194, 1195, 1197, 1198, |
| | | 1199, 1200, 1201, 1203, 1204, 1205, 1206, 1207, 1209, 1214, 1215, 1216, 1220, |
| | | 1222, 1224, 1225, 1227, 1235, 1236, 1241, 1251, 1256, 1258, 1261, 1266, 1267, |
| | | 1268, 1270, 1271, 1272, 1273, 1276, 1282, 1287, 1289, 1293, 1294, 1295, 1299, |
| | | 1303, 1304, 1305, 1310, 1312, 1318, 1322, 1326, 1328, 1330, 1332, 1333, 1334, |
| | | 1335, 1337, 1338, 1339, 1340, 1343, 1344, 1346, 1347, 1348, 1349, 1351, 1353, |
| | | 1359, 1363, 1365, 1369, 1371, 1372, 1373, 1374, 1376, 1380, 1384, 1385, 1392, |
| | | 1394, 1402, 1405, 1406, 1410, 1411, 1412, 1414, 1416, 1419, 1421, 1423, 1424, |
| | | 1425, 1427, 1428, 1429, 1432, 1436, 1437, 1439, 1442, 1447, 1451, 1452, 1458, |
| | | 1462, 1463, 1466, 1467, 1469, 1477, 1478, 1484, 1486, 1487, 1488, 1489, 1494, |
| | | 1495, 1496, 1502, 1503, 1505, 1506, 1509, 1510, 1511, 1513, 1515, 1520, 1521, |
| | | 1523, 1525, 1529, 1539, 1547, 1548, 1550, 1553, 1554, 1560, 1562, 1565, 1569, |
| | | 1571, 1572, 1574, 1575, 1576, 1577, 1579, 1584, 1585, 1586, 1587, 1589, 1590, |
| | | 1592, 1594, 1595, 1596, 1598, 1601, 1604, 1606, 1607, 1609, 1611, 1612, 1616, |
| | | 1618, 1619, 1622, 1624, 1625, 1629, 1631, 1632, 1633, 1636, 1637, 1640, 1642, |
| | | 1643, 1644, 1645, 1649, 1654, 1656, 1658, 1660, 1662, 1663, 1667, 1670 and |
| | | 176206-229013. |
| 13 | Hepatitis C virus | 2, 6, 7, 8, 9, 10, 11, 13, 14, 15, 19, 23, 24, 26, 28, 31, 36, 38, 40, 47, 48, |
| | | 50, 51, 54, 56, 57, 60, 66, 67, 73, 74, 77, 78, 81, 84, 88, 101, 103, 105, 110, |
| | | 114, 116, 127, 129, 130, 135, 139, 140, 142, 143, 149, 150, 151, 154, 155, 158, |
| | | 160, 162, 163, 166, 167, 169, 173, 174, 175, 177, 179, 182, 187, 189, 193, 194, |
| | | 199, 200, 203, 204, 207, 208, 209, 210, 212, 213, 218, 219, 220, 221, 222, 225, |
| | | 229, 230, 231, 232, 233, 234, 235, 236, 244, 247, 248, 249, 256, 261, 262, 263, |
| | | 265, 272, 276, 278, 279, 280, 286, 289, 290, 295, 298, 302, 303, 304, 306, 307, |
| | | 309, 312, 315, 321, 323, 325, 328, 331, 334, 336, 339, 344, 345, 346, 351, 353, |
| | | 356, 359, 363, 365, 366, 367, 370, 372, 373, 374, 380, 382, 385, 387, 391, 393, |
| | | 394, 396, 399, 400, 404, 408, 409, 410, 412, 416, 420, 422, 424, 425, 429, 433, |
| | | 434, 435, 437, 443, 445, 446, 448, 453, 454, 458, 460, 462, 466, 467, 468, 469, |
| | | 470, 471, 476, 478, 480, 481, 482, 484, 485, 486, 490, 492, 493, 499, 500, 505, |
| | | 506, 509, 511, 516, 520, 521, 522, 526, 530, 531, 532, 534, 537, 539, 541, 542, |
| | | 544, 545, 546, 551, 553, 555, 559, 561, 564, 565, 566, 567, 569, 570, 572, 575, |
| | | 581, 583, 584, 586, 590, 597, 598, 603, 604, 606, 610, 612, 614, 615, 618, 619, |
| | | 623, 625, 627, 629, 635, 636, 641, 643, 645, 654, 656, 661, 666, 667, 668, 669, |
| | | 671, 679, 684, 686, 688, 692, 693, 694, 698, 700, 703, 704, 707, 709, 711, 713, |
| | | 715, 717, 720, 725, 731, 734, 736, 738, 744, 750, 754, 756, 760, 762, 765, 767, |
| | | 778, 781, 783, 784, 786, 788, 795, 797, 798, 801, 802, 803, 804, 808, 809, 812, |
| | | 813, 817, 820, 827, 829, 831, 832, 836, 838, 839, 846, 847, 848, 851, 855, 856, |
| | | 857, 859, 861, 862, 867, 868, 872, 875, 876, 877, 879, 881, 882, 884, 886, 889, |
| | | 894, 900, 901, 905, 908, 909, 910, 915, 919, 920, 922, 924, 926, 927, 931, 932, |
| | | 933, 935, 937, 938, 946, 947, 960, 963, 965, 973, 975, 978, 980, 982, 983, 984, |
| | | 985, 989, 990, 992, 993, 995, 998, 999, 1000, 1003, 1005, 1006, 1008, 1009, |
| | | 1010, 1011, 1012, 1015, 1016, 1017, 1019, 1024, 1026, 1035, 1036, 1038, 1040, |
| | | 1042, 1043, 1044, 1046, 1047, 1052, 1053, 1054, 1056, 1057, 1058, 1060, 1062, |
| | | 1063, 1065, 1067, 1068, 1069, 1070, 1071, 1075, 1078, 1081, 1085, 1086, 1088, |
| | | 1089, 1092, 1095, 1099, 1102, 1106, 1107, 1108, 1109, 1114, 1116, 1118, 1119, |
| | | 1123, 1124, 1129, 1130, 1132, 1134, 1135, 1138, 1139, 1142, 1144, 1148, 1149, |
| | | 1152, 1153, 1154, 1155, 1157, 1163, 1166, 1168, 1169, 1172, 1173, 1180, 1181, |
| | | 1182, 1183, 1185, 1189, 1190, 1194, 1195, 1197, 1198, 1199, 1200, 1203, 1204, |
| | | 1205, 1206, 1209, 1214, 1215, 1216, 1220, 1222, 1224, 1225, 1227, 1230, 1235, |
| | | 1236, 1251, 1256, 1258, 1261, 1266, 1267, 1268, 1270, 1271, 1276, 1282, 1287, |
| | | 1289, 1293, 1294, 1295, 1299, 1304, 1305, 1310, 1312, 1318, 1322, 1326, 1328, |
| | | 1330, 1332, 1333, 1334, 1335, 1337, 1338, 1339, 1340, 1343, 1344, 1346, 1347, |
| | | 1348, 1349, 1351, 1353, 1359, 1363, 1369, 1371, 1372, 1373, 1374, 1376, 1380, |
| | | 1384, 1385, 1392, 1393, 1394, 1397, 1402, 1405, 1406, 1410, 1411, 1412, 1414, |
| | | 1416, 1419, 1421, 1423, 1424, 1427, 1428, 1429, 1432, 1436, 1437, 1439, 1442, |
| | | 1447, 1451, 1452, 1458, 1462, 1463, 1466, 1467, 1469, 1477, 1478, 1483, 1484, |
| | | 1486, 1487, 1488, 1489, 1494, 1495, 1496, 1502, 1503, 1506, 1509, 1510, 1511, |
| | | 1513, 1515, 1520, 1521, 1525, 1529, 1547, 1548, 1550, 1552, 1553, 1554, 1560, |
| | | 1562, 1565, 1569, 1571, 1572, 1574, 1575, 1576, 1577, 1579, 1584, 1585, 1587, |
| | | 1589, 1590, 1592, 1594, 1595, 1596, 1598, 1601, 1604, 1606, 1607, 1609, 1611, |
| | | 1612, 1616, 1618, 1619, 1622, 1624, 1625, 1629, 1631, 1632, 1633, 1636, 1637, |
| | | 1640, 1643, 1645, 1649, 1654, 1656, 1658, 1660, 1662, 1663, 1667, 1670, 1672 and |
| | | 229014-279918. |
| 14 | Hepatitis D virus | 2, 9, 15, 23, 26, 28, 31, 36, 48, 51, 78, 81, 88, 96, 105, 110, 139, 149, 150, |
| | | 151, 162, 166, 173, 175, 189, 192, 202, 203, 204, 207, 213, 219, 229, 232, 233, |
| | | 235, 244, 248, 249, 256, 272, 276, 278, 286, 289, 302, 303, 304, 306, 315, 318, |
| | | 323, 325, 334, 339, 340, 346, 351, 353, 365, 366, 370, 373, 402, 404, 416, 422, |
| | | 424, 429, 432, 437, 446, 448, 453, 458, 462, 466, 467, 470, 478, 480, 484, 486, |
| | | 492, 500, 506, 520, 521, 522, 526, 541, 544, 553, 559, 561, 565, 575, 581, 586, |
| | | 597, 600, 604, 610, 614, 615, 619, 625, 629, 635, 636, 641, 644, 645, 654, 661, |
| | | 669, 679, 688, 692, 694, 700, 709, 713, 720, 734, 736, 750, 760, 762, 765, 767, |
| | | 778, 781, 798, 802, 803, 820, 825, 827, 829, 839, 846, 847, 854, 867, 875, 876, |
| | | 877, 894, 901, 909, 919, 922, 933, 935, 938, 963, 973, 975, 982, 985, 989, 995, |
| | | 998, 1006, 1009, 1012, 1016, 1019, 1035, 1036, 1039, 1047, 1052, 1053, 1057, |
| | | 1058, 1062, 1063, 1065, 1069, 1078, 1092, 1107, 1108, 1114, 1116, 1118, 1126, |
| | | 1129, 1130, 1134, 1144, 1149, 1157, 1163, 1166, 1169, 1172, 1173, 1180, 1181, |
| | | 1185, 1191, 1195, 1197, 1199, 1201, 1205, 1206, 1216, 1227, 1236, 1251, 1258, |
| | | 1266, 1268, 1270, 1276, 1287, 1293, 1295, 1299, 1304, 1312, 1328, 1330, 1333, |
| | | 1335, 1338, 1340, 1344, 1349, 1351, 1363, 1365, 1371, 1373, 1374, 1376, 1385, |
| | | 1392, 1394, 1406, 1428, 1429, 1436, 1437, 1442, 1467, 1469, 1484, 1486, 1488, |
| | | 1492, 1521, 1539, 1547, 1550, 1553, 1554, 1560, 1569, 1571, 1574, 1577, 1585, |
| | | 1594, 1595, 1598, 1607, 1611, 1616, 1619, 1622, 1631, 1633, 1637, 1640, 1658, |
| | | 1660, 1663 and 279919-296910. |
| 15 | Hepatitis E virus | 7, 9, 23, 31, 36, 48, 78, 88, 92, 102, 105, 150, 162, 165, 166, 189, 192, 203, |
| | | 218, 219, 223, 225, 229, 232, 233, 244, 248, 272, 278, 296, 303, 306, 315, 325, |
| | | 334, 351, 353, 365, 366, 373, 401, 404, 416, 422, 429, 447, 453, 458, 459, 466, |
| | | 467, 492, 520, 521, 541, 544, 560, 561, 565, 575, 581, 586, 597, 600, 604, 614, |
| | | 615, 619, 625, 641, 654, 661, 694, 713, 720, 736, 760, 773, 778, 781, 802, 803, |
| | | 818, 820, 829, 839, 846, 853, 855, 862, 875, 876, 877, 882, 895, 901, 909, 922, |
| | | 928, 939, 973, 976, 985, 989, 997, 1006, 1009, 1012, 1019, 1035, 1036, 1042, |
| | | 1047, 1062, 1065, 1069, 1092, 1116, 1129, 1130, 1134, 1139, 1144, 1157, 1163, |
| | | 1166, 1172, 1180, 1185, 1195, 1197, 1199, 1201, 1205, 1216, 1224, 1227, 1251, |
| | | 1258, 1266, 1268, 1270, 1287, 1293, 1298, 1299, 1304, 1318, 1328, 1335, 1336, |
| | | 1338, 1345, 1346, 1351, 1356, 1363, 1371, 1373, 1392, 1394, 1406, 1429, 1437, |
| | | 1439, 1444, 1469, 1486, 1488, 1508, 1550, 1554, 1594, 1597, 1598, 1610, 1611, |
| | | 1619, 1631, 1637, 1640, 1647, 1648, 1667 and 296911-304515. |
| 16 | Human adenovirus A | 4, 11, 16, 20, 23, 24, 29, 31, 35, 36, 37, 40, 43, 47, 48, 49, 51, 66, 67, 70, |
| | | 73, 74, 77, 78, 96, 102, 114, 120, 143, 148, 151, 154, 169, 171, 174, 187, 188, |
| | | 189, 197, 200, 203, 212, 216, 219, 231, 234, 239, 240, 247, 248, 252, 261, 262, |
| | | 271, 276, 277, 279, 284, 286, 289, 290, 295, 303, 304, 310, 315, 321, 323, 329, |
| | | 334, 336, 339, 347, 356, 357, 366, 370, 374, 376, 380, 383, 394, 395, 396, 399, |
| | | 400, 401, 405, 413, 416, 421, 424, 429, 431, 433, 437, 441, 443, 446, 450, 453, |
| | | 454, 460, 462, 463, 465, 466, 481, 484, 485, 500, 507, 509, 510, 515, 518, 526, |
| | | 537, 541, 544, 547, 551, 553, 561, 566, 567, 574, 575, 577, 579, 585, 587, 594, |
| | | 605, 607, 610, 612, 617, 624, 625, 627, 635, 640, 652, 653, 654, 656, 661, 663, |
| | | 667, 676, 681, 684, 694, 701, 709, 710, 713, 715, 720, 731, 734, 737, 746, 749, |
| | | 750, 754, 756, 760, 763, 773, 776, 777, 786, 801, 803, 804, 811, 813, 829, 836, |
| | | 838, 839, 840, 846, 847, 854, 856, 862, 868, 873, 876, 882, 886, 889, 909, 911, |
| | | 914, 920, 924, 925, 927, 929, 934, 935, 936, 938, 954, 960, 962, 966, 969, 973, |
| | | 977, 979, 980, 985, 988, 998, 1006, 1008, 1019, 1020, 1035, 1037, 1038, 1040, |
| | | 1049, 1058, 1062, 1065, 1068, 1069, 1070, 1078, 1079, 1084, 1086, 1090, 1096, |
| | | 1101, 1106, 1123, 1129, 1133, 1138, 1139, 1142, 1144, 1146, 1152, 1153, 1155, |
| | | 1159, 1163, 1168, 1172, 1190, 1195, 1196, 1198, 1204, 1205, 1212, 1219, 1225, |
| | | 1239, 1245, 1251, 1254, 1257, 1258, 1262, 1268, 1270, 1271, 1274, 1284, 1290, |
| | | 1293, 1297, 1299, 1306, 1315, 1321, 1328, 1330, 1335, 1338, 1339, 1349, 1353, |
| | | 1363, 1364, 1390, 1391, 1392, 1393, 1411, 1412, 1416, 1423, 1424, 1426, 1432, |
| | | 1456, 1459, 1460, 1467, 1469, 1473, 1476, 1481, 1485, 1487, 1488, 1503, 1505, |
| | | 1507, 1511, 1526, 1549, 1552, 1574, 1578, 1579, 1580, 1584, 1586, 1606, 1617, |
| | | 1631, 1633, 1637, 1639, 1640, 1642, 1643, 1645, 1654, 1656, 1665, 1669 and |
| | | 304516-323838. |
| 17 | Human adenovirus B | 1, 25, 33, 51, 52, 60, 81, 91, 103, 111, 126, 129, 131, 151, 157, 162, 164, 167, |
| | (HAdV-B) | 180, 183, 186, 210, 222, 247, 270, 302, 307, 309, 310, 324, 326, 349, 373, 383, |
| | | 430, 434, 439, 442, 461, 473, 474, 486, 494, 505, 527, 529, 530, 531, 533, 545, |
| | | 563, 571, 576, 582, 634, 657, 660, 714, 775, 795, 804, 807, 813, 850, 858, 871, |
| | | 872, 893, 923, 957, 960, 981, 1001, 1011, 1022, 1042, 1046, 1063, 1066, 1074, |
| | | 1075, 1083, 1093, 1115, 1126, 1133, 1143, 1209, 1214, 1223, 1229, 1261, 1292, |
| | | 1315, 1316, 1337, 1346, 1352, 1353, 1375, 1391, 1405, 1408, 1411, 1423, 1425, |
| | | 1443, 1475, 1489, 1490, 1496, 1498, 1517, 1540, 1545, 1568, 1577, 1593, 1596, |
| | | 1606, 1610, 1632, 1642, 1643, 1654, 1664 and 325308-325714. |
| 18 | Human adenovirus C | 1, 7, 17, 26, 33, 36, 44, 46, 50, 60, 69, 73, 84, 89, 90, 91, 95, 97, 100, 103, |
| | | 111, 112, 115, 117, 121, 125, 129, 136, 140, 141, 143, 144, 149, 150, 151, 164, |
| | | 165, 167, 169, 174, 183, 186, 191, 192, 200, 201, 202, 203, 212, 216, 219, 228, |
| | | 237, 242, 247, 248, 250, 256, 257, 264, 265, 268, 271, 275, 286, 287, 292, 294, |
| | | 296, 301, 302, 303, 309, 311, 314, 316, 320, 321, 323, 325, 327, 333, 334, 343, |
| | | 347, 362, 367, 370, 373, 376, 380, 382, 384, 385, 386, 389, 392, 397, 403, 406, |
| | | 408, 411, 414, 418, 421, 424, 437, 441, 442, 445, 447, 450, 451, 455, 459, 468, |
| | | 472, 474, 475, 477, 479, 480, 485, 486, 489, 490, 493, 494, 495, 499, 505, 510, |
| | | 518, 525, 526, 532, 533, 541, 542, 544, 545, 552, 553, 563, 566, 567, 568, 572, |
| | | 582, 584, 587, 591, 593, 599, 600, 611, 616, 618, 623, 626, 629, 632, 648, 656, |
| | | 658, 660, 661, 663, 670, 674, 677, 679, 680, 685, 690, 691, 694, 697, 699, 702, |
| | | 707, 714, 716, 720, 721, 732, 733, 736, 742, 743, 746, 749, 750, 752, 759, 760, |
| | | 765, 769, 770, 775, 778, 779, 781, 783, 784, 785, 786, 794, 795, 796, 799, 804, |
| | | 805, 809, 813, 819, 825, 829, 839, 842, 843, 848, 851, 856, 862, 870, 874, 880, |
| | | 883, 886, 888, 893, 900, 901, 903, 912, 918, 919, 920, 924, 928, 929, 932, 933, |
| | | 934, 935, 939, 940, 947, 948, 955, 956, 958, 960, 966, 974, 976, 977, 978, 979, |
| | | 980, 987, 990, 993, 996, 997, 999, 1002, 1012, 1015, 1018, 1025, 1028, 1035, |
| | | 1038, 1039, 1047, 1049, 1051, 1055, 1058, 1062, 1067, 1069, 1072, 1073, 1075, |
| | | 1076, 1078, 1081, 1084, 1085, 1093, 1094, 1101, 1102, 1104, 1109, 1113, 1115, |
| | | 1121, 1126, 1127, 1128, 1129, 1131, 1139, 1141, 1142, 1152, 1153, 1154, 1157, |
| | | 1163, 1166, 1167, 1170, 1177, 1186, 1191, 1194, 1197, 1201, 1204, 1207, 1209, |
| | | 1214, 1218, 1226, 1227, 1233, 1239, 1246, 1253, 1255, 1257, 1265, 1270, 1281, |
| | | 1283, 1287, 1289, 1300, 1305, 1307, 1308, 1310, 1315, 1318, 1320, 1321, 1324, |
| | | 1327, 1329, 1330, 1331, 1332, 1333, 1336, 1340, 1344, 1348, 1353, 1355, 1356, |
| | | 1358, 1360, 1367, 1370, 1375, 1376, 1379, 1382, 1391, 1399, 1404, 1405, 1406, |
| | | 1408, 1410, 1411, 1412, 1421, 1423, 1427, 1433, 1436, 1438, 1439, 1442, 1444, |
| | | 1447, 1454, 1455, 1458, 1466, 1467, 1469, 1478, 1480, 1489, 1490, 1492, 1498, |
| | | 1499, 1504, 1509, 1510, 1519, 1521, 1527, 1528, 1535, 1538, 1541, 1555, 1575, |
| | | 1577, 1582, 1583, 1585, 1586, 1592, 1600, 1626, 1628, 1629, 1631, 1633, 1634, |
| | | 1636, 1642, 1648, 1650, 1651, 1652, 1653, 1657, 1664, 1665, 1666, 1667 and |
| | | 326939-329044. |
| 19 | Human adenovirus D | 1, 4, 5, 8, 9, 12, 17, 19, 21, 23, 25, 26, 33, 36, 40, 41, 44, 45, 46, 51, 52, |
| | | 58, 65, 69, 71, 73, 74, 80, 81, 84, 89, 91, 93, 97, 99, 102, 103, 111, 112, 115, |
| | | 117, 121, 123, 124, 125, 126, 128, 130, 133, 137, 143, 145, 148, 149, 151, 162, |
| | | 164, 167, 169, 172, 174, 182, 183, 186, 192, 194, 196, 199, 200, 201, 203, 206, |
| | | 210, 216, 217, 218, 219, 222, 223, 225, 228, 232, 240, 247, 248, 250, 252, 256, |
| | | 257, 264, 265, 267, 268, 272, 273, 279, 283, 286, 289, 290, 292, 296, 297, 301, |
| | | 302, 303, 309, 316, 321, 323, 324, 325, 332, 334, 342, 343, 350, 352, 357, 361, |
| | | 363, 365, 367, 370, 373, 375, 384, 392, 397, 401, 406, 407, 412, 418, 420, 421, |
| | | 423, 424, 432, 434, 438, 439, 442, 444, 447, 450, 455, 467, 468, 469, 474, 484, |
| | | 485, 486, 490, 493, 495, 496, 499, 503, 504, 505, 510, 513, 514, 518, 544, 545, |
| | | 548, 553, 559, 563, 566, 567, 572, 579, 582, 586, 587, 589, 591, 593, 599, 600, |
| | | 601, 613, 616, 617, 618, 623, 632, 634, 642, 645, 648, 656, 660, 661, 662, 664, |
| | | 667, 670, 690, 694, 695, 696, 697, 702, 714, 719, 724, 736, 738, 742, 744, 750, |
| | | 765, 766, 770, 778, 779, 781, 785, 786, 790, 795, 798, 799, 806, 809, 810, 819, |
| | | 826, 829, 839, 842, 843, 847, 848, 850, 851, 852, 860, 861, 868, 872, 874, 879, |
| | | 880, 882, 888, 892, 895, 897, 903, 911, 928, 929, 933, 934, 935, 940, 947, 948, |
| | | 956, 957, 960, 966, 974, 975, 977, 978, 979, 980, 987, 991, 997, 999, 1001, |
| | | 1004, 1009, 1011, 1012, 1015, 1018, 1022, 1028, 1029, 1035, 1039, 1040, 1043, |
| | | 1046, 1047, 1048, 1049, 1053, 1058, 1062, 1063, 1069, 1072, 1075, 1076, 1078, |
| | | 1079, 1080, 1083, 1088, 1093, 1101, 1102, 1109, 1112, 1115, 1121, 1126, 1128, |
| | | 1129, 1133, 1139, 1142, 1143, 1146, 1152, 1153, 1155, 1162, 1163, 1164, 1177, |
| | | 1181, 1188, 1191, 1192, 1194, 1199, 1201, 1204, 1208, 1209, 1219, 1223, 1225, |
| | | 1227, 1228, 1231, 1239, 1240, 1245, 1247, 1250, 1257, 1258, 1259, 1263, 1265, |
| | | 1276, 1277, 1282, 1287, 1289, 1292, 1295, 1298, 1300, 1307, 1308, 1309, 1310, |
| | | 1311, 1316, 1318, 1320, 1321, 1328, 1330, 1331, 1332, 1333, 1334, 1335, 1336, |
| | | 1337, 1340, 1341, 1342, 1345, 1348, 1355, 1356, 1358, 1375, 1376, 1379, 1391, |
| | | 1395, 1404, 1405, 1406, 1410, 1411, 1414, 1419, 1421, 1423, 1425, 1426, 1427, |
| | | 1436, 1439, 1443, 1444, 1447, 1454, 1455, 1458, 1466, 1467, 1469, 1475, 1476, |
| | | 1480, 1489, 1492, 1493, 1498, 1499, 1508, 1509, 1510, 1515, 1519, 1521, 1523, |
| | | 1528, 1533, 1535, 1536, 1537, 1538, 1540, 1549, 1575, 1579, 1581, 1582, 1585, |
| | | 1597, 1600, 1602, 1628, 1631, 1632, 1642, 1643, 1647, 1648, 1651, 1652, 1661, |
| | | 1664 and 329045-331119. |
| 20 | Human adenovirus E | 4, 19, 32, 33, 36, 44, 51, 58, 61, 71, 74, 81, 84, 91, 93, 95, 97, 103, 107, |
| | | 115, 126, 127, 128, 129, 137, 140, 141, 145, 149, 151, 164, 165, 169, 172, 174, |
| | | 182, 183, 191, 192, 200, 203, 206, 210, 216, 218, 220, 222, 223, 227, 228, 231, |
| | | 232, 247, 248, 252, 253, 256, 260, 264, 268, 271, 275, 279, 288, 291, 294, 297, |
| | | 301, 303, 304, 307, 309, 321, 324, 326, 329, 334, 342, 343, 349, 350, 357, 361, |
| | | 364, 365, 367, 370, 373, 376, 384, 385, 386, 392, 403, 406, 408, 412, 414, 416, |
| | | 421, 423, 424, 429, 434, 437, 439, 441, 444, 447, 449, 455, 459, 464, 468, 469, |
| | | 478, 484, 485, 486, 490, 493, 494, 495, 496, 497, 499, 502, 503, 504, 505, 513, |
| | | 524, 532, 533, 541, 544, 548, 553, 560, 563, 566, 567, 575, 577, 582, 584, 585, |
| | | 586, 587, 589, 591, 599, 600, 601, 608, 613, 614, 615, 616, 618, 632, 634, 636, |
| | | 643, 645, 648, 649, 656, 660, 661, 667, 670, 690, 693, 695, 697, 702, 714, 721, |
| | | 722, 725, 746, 749, 750, 762, 765, 769, 770, 779, 780, 781, 786, 792, 795, 799, |
| | | 803, 806, 813, 819, 821, 829, 834, 839, 842, 843, 847, 848, 850, 860, 862, 868, |
| | | 872, 874, 880, 882, 886, 895, 897, 911, 919, 928, 929, 932, 933, 934, 935, 939, |
| | | 940, 946, 947, 948, 960, 962, 979, 981, 987, 993, 996, 997, 999, 1001, 1002, |
| | | 1012, 1022, 1035, 1039, 1040, 1042, 1043, 1046, 1047, 1049, 1051, 1053, 1058, |
| | | 1062, 1063, 1067, 1069, 1072, 1073, 1076, 1077, 1078, 1083, 1088, 1102, 1104, |
| | | 1109, 1112, 1115, 1126, 1127, 1129, 1133, 1139, 1142, 1146, 1152, 1153, 1163, |
| | | 1164, 1177, 1181, 1191, 1192, 1194, 1197, 1201, 1202, 1204, 1206, 1208, 1209, |
| | | 1212, 1219, 1225, 1228, 1229, 1239, 1247, 1249, 1250, 1254, 1263, 1269, 1274, |
| | | 1277, 1287, 1292, 1307, 1310, 1318, 1320, 1321, 1324, 1330, 1331, 1336, 1337, |
| | | 1340, 1341, 1353, 1356, 1358, 1360, 1363, 1375, 1376, 1391, 1398, 1400, 1403, |
| | | 1405, 1410, 1411, 1416, 1419, 1421, 1430, 1436, 1439, 1443, 1444, 1454, 1455, |
| | | 1458, 1466, 1470, 1474, 1478, 1480, 1489, 1492, 1495, 1498, 1499, 1521, 1523, |
| | | 1526, 1530, 1532, 1535, 1537, 1538, 1540, 1560, 1572, 1578, 1579, 1588, 1597, |
| | | 1598, 1600, 1602, 1610, 1613, 1624, 1628, 1631, 1632, 1642, 1643, 1647, 1648, |
| | | 1665, 1667 and 331120-332804. |
| 21 | Human adenovirus F | 5, 9, 19, 25, 33, 36, 40, 44, 46, 49, 50, 52, 61, 69, 74, 81, 82, 84, 88, 97, |
| | | 99, 115, 119, 131, 136, 141, 145, 151, 164, 167, 169, 172, 183, 186, 191, 192, |
| | | 196, 199, 202, 210, 216, 218, 220, 222, 226, 235, 242, 245, 247, 252, 256, 257, |
| | | 259, 274, 279, 288, 292, 303, 307, 309, 316, 319, 320, 323, 325, 326, 337, 343, |
| | | 344, 350, 357, 364, 370, 373, 376, 378, 383, 403, 406, 408, 409, 420, 421, 423, |
| | | 432, 434, 441, 447, 458, 459, 461, 464, 468, 477, 478, 479, 481, 483, 485, 487, |
| | | 490, 493, 494, 495, 505, 517, 520, 528, 529, 532, 535, 536, 541, 544, 553, 563, |
| | | 567, 579, 582, 586, 587, 591, 593, 616, 623, 632, 634, 637, 648, 656, 657, 660, |
| | | 661, 662, 667, 670, 685, 687, 696, 697, 703, 712, 716, 724, 733, 738, 742, 746, |
| | | 750, 755, 765, 775, 776, 783, 785, 786, 790, 792, 794, 795, 799, 806, 810, 815, |
| | | 819, 821, 826, 829, 834, 839, 843, 847, 848, 850, 861, 863, 864, 870, 874, 883, |
| | | 888, 893, 895, 900, 901, 903, 910, 911, 912, 915, 916, 923, 928, 929, 932, 934, |
| | | 949, 950, 960, 973, 974, 978, 979, 981, 982, 990, 991, 993, 997, 999, 1011, |
| | | 1012, 1018, 1023, 1028, 1030, 1033, 1035, 1038, 1042, 1046, 1047, 1058, 1062, |
| | | 1063, 1069, 1072, 1076, 1078, 1079, 1081, 1083, 1084, 1085, 1086, 1102, 1103, |
| | | 1105, 1109, 1110, 1112, 1113, 1126, 1127, 1130, 1132, 1136, 1142, 1153, 1164, |
| | | 1167, 1172, 1175, 1180, 1194, 1199, 1201, 1204, 1205, 1206, 1212, 1221, 1227, |
| | | 1233, 1239, 1245, 1246, 1253, 1265, 1283, 1289, 1294, 1300, 1303, 1307, 1309, |
| | | 1313, 1315, 1320, 1321, 1331, 1332, 1333, 1339, 1342, 1346, 1347, 1354, 1356, |
| | | 1367, 1374, 1376, 1382, 1387, 1391, 1399, 1403, 1405, 1406, 1410, 1411, 1412, |
| | | 1420, 1423, 1427, 1431, 1433, 1436, 1439, 1443, 1444, 1448, 1449, 1455, 1458, |
| | | 1466, 1469, 1478, 1479, 1480, 1495, 1498, 1499, 1504, 1515, 1521, 1526, 1528, |
| | | 1530, 1532, 1554, 1563, 1571, 1577, 1582, 1585, 1590, 1597, 1599, 1600, 1627, |
| | | 1632, 1633, 1634, 1636, 1643, 1651, 1664 and 332805-334515. |
| 22 | Human astrovirus | 197, 450, 466, 954, 1198 and 334516-335246. |
| 23 | Human coronavirus 22 | 36, 120, 173, 197, 201, 225, 231, 233, 276, 284, 286, 290, 347, 356, 388, 389, |
| | 9E | 404, 408, 450, 454, 461, 463, 466, 488, 544, 545, 548, 566, 579, 585, 616, 625, |
| | | 643, 653, 663, 676, 694, 712, 768, 813, 831, 839, 855, 868, 887, 894, 909, 920, |
| | | 954, 959, 980, 1029, 1033, 1062, 1079, 1085, 1092, 1101, 1118, 1138, 1139, 1140, |
| | | 1144, 1153, 1163, 1168, 1172, 1173, 1187, 1190, 1195, 1198, 1208, 1222, 1258, |
| | | 1259, 1293, 1315, 1325, 1335, 1346, 1396, 1430, 1431, 1442, 1469, 1471, 1505, |
| | | 1522, 1551, 1585, 1586, 1593, 1642 and 335247-340599. |
| 24 | Human coronavirus OC43 | 132, 545, 563, 1195, 1292, 1522 and 340600-340686. |
| | (HCoV-OC43) | |
| 25 | Human echovirus 1 | 4, 11, 20, 23, 24, 29, 31, 35, 36, 37, 43, 47, 48, 49, 51, 66, 67, 68, 70, 73, |
| | | 74, 77, 78, 85, 92, 96, 105, 114, 120, 143, 144, 148, 154, 166, 169, 171, 174, |
| | | 177, 187, 188, 189, 200, 203, 212, 216, 219, 229, 231, 234, 239, 240, 247, 252, |
| | | 261, 262, 272, 276, 277, 279, 284, 286, 289, 290, 293, 295, 296, 303, 304, 310, |
| | | 315, 321, 323, 334, 336, 339, 345, 346, 347, 353, 356, 357, 366, 367, 370, 374, |
| | | 376, 380, 393, 394, 395, 396, 399, 400, 401, 405, 413, 416, 418, 424, 429, 431, |
| | | 433, 437, 441, 443, 446, 453, 454, 462, 463, 465, 466, 467, 481, 484, 488, 492, |
| | | 500, 507, 509, 510, 515, 518, 526, 537, 541, 544, 547, 548, 551, 553, 561, 563, |
| | | 564, 566, 567, 574, 575, 577, 579, 585, 587, 594, 598, 605, 607, 610, 612, 614, |
| | | 616, 617, 619, 624, 625, 627, 635, 637, 640, 641, 643, 652, 653, 654, 661, 663, |
| | | 667, 676, 681, 684, 694, 701, 709, 710, 713, 715, 720, 731, 734, 737, 746, 749, |
| | | 754, 756, 760, 763, 773, 776, 777, 786, 801, 803, 804, 808, 811, 813, 829, 838, |
| | | 839, 840, 846, 847, 854, 855, 856, 861, 862, 868, 873, 876, 882, 886, 887, 889, |
| | | 891, 894, 901, 909, 911, 914, 920, 924, 925, 927, 935, 936, 938, 946, 947, 954, |
| | | 960, 962, 966, 969, 973, 977, 979, 980, 985, 988, 998, 1006, 1008, 1009, 1019, |
| | | 1020, 1029, 1037, 1038, 1040, 1047, 1049, 1053, 1058, 1062, 1065, 1069, 1070, |
| | | 1078, 1079, 1084, 1086, 1090, 1092, 1096, 1101, 1106, 1118, 1123, 1129, 1133, |
| | | 1134, 1138, 1139, 1140, 1144, 1152, 1153, 1159, 1161, 1163, 1166, 1168, 1172, |
| | | 1173, 1174, 1181, 1185, 1187, 1190, 1195, 1196, 1199, 1204, 1205, 1208, 1212, |
| | | 1219, 1225, 1239, 1245, 1251, 1254, 1257, 1258, 1262, 1268, 1270, 1271, 1273, |
| | | 1274, 1284, 1290, 1293, 1297, 1299, 1306, 1315, 1321, 1325, 1328, 1330, 1332, |
| | | 1335, 1338, 1339, 1348, 1349, 1351, 1353, 1363, 1364, 1373, 1385, 1390, 1391, |
| | | 1392, 1406, 1411, 1412, 1416, 1423, 1424, 1426, 1432, 1442, 1456, 1459, 1467, |
| | | 1469, 1471, 1473, 1476, 1481, 1485, 1486, 1487, 1488, 1503, 1505, 1507, 1511, |
| | | 1520, 1523, 1526, 1547, 1549, 1552, 1557, 1574, 1578, 1579, 1580, 1584, 1585, |
| | | 1586, 1594, 1598, 1606, 1611, 1617, 1631, 1633, 1637, 1639, 1640, 1642, 1643, |
| | | 1654, 1656, 1665, 1669, 1670 and 345885-370019. |
| 26 | Human enterovirus A | 4, 11, 20, 23, 24, 29, 31, 35, 36, 37, 43, 47, 48, 49, 51, 66, 67, 68, 70, 73, |
| | | 74, 77, 78, 85, 92, 96, 105, 114, 120, 143, 144, 148, 154, 166, 169, 171, 174, |
| | | 177, 187, 188, 189, 200, 203, 212, 216, 219, 229, 231, 234, 239, 240, 247, 252, |
| | | 261, 262, 272, 276, 277, 279, 284, 286, 289, 290, 293, 295, 296, 303, 304, 310, |
| | | 315, 321, 323, 334, 336, 339, 345, 346, 347, 353, 356, 357, 366, 367, 370, 374, |
| | | 376, 380, 393, 394, 395, 396, 399, 400, 401, 405, 413, 416, 418, 424, 429, 431, |
| | | 433, 437, 441, 443, 446, 453, 454, 462, 463, 465, 466, 467, 481, 484, 488, 492, |
| | | 500, 507, 509, 510, 515, 518, 526, 537, 541, 544, 547, 548, 551, 553, 561, 563, |
| | | 564, 566, 567, 574, 575, 577, 579, 585, 587, 594, 598, 605, 607, 610, 612, 614, |
| | | 616, 617, 619, 624, 625, 627, 635, 637, 640, 641, 643, 652, 653, 654, 661, 663, |
| | | 667, 676, 681, 684, 694, 701, 709, 710, 713, 715, 720, 731, 734, 737, 746, 749, |
| | | 754, 756, 760, 763, 773, 776, 777, 786, 801, 803, 804, 808, 811, 813, 829, 838, |
| | | 839, 840, 846, 847, 854, 855, 856, 861, 862, 868, 873, 876, 882, 886, 887, 889, |
| | | 891, 894, 901, 909, 911, 914, 920, 924, 925, 927, 935, 936, 938, 946, 947, 954, |
| | | 960, 962, 966, 969, 973, 977, 979, 980, 985, 988, 998, 1006, 1008, 1009, 1019, |
| | | 1020, 1029, 1037, 1038, 1040, 1047, 1049, 1053, 1058, 1062, 1065, 1069, 1070, |
| | | 1078, 1079, 1084, 1086, 1090, 1092, 1096, 1101, 1106, 1118, 1123, 1129, 1133, |
| | | 1134, 1138, 1139, 1140, 1144, 1152, 1153, 1159, 1161, 1163, 1166, 1168, 1172, |
| | | 1173, 1174, 1181, 1185, 1187, 1190, 1195, 1196, 1199, 1204, 1205, 1208, 1212, |
| | | 1219, 1225, 1239, 1245, 1251, 1254, 1257, 1258, 1262, 1268, 1270, 1271, 1273, |
| | | 1274, 1284, 1290, 1293, 1297, 1299, 1306, 1315, 1321, 1325, 1328, 1330, 1332, |
| | | 1335, 1338, 1339, 1348, 1349, 1351, 1353, 1363, 1364, 1373, 1385, 1390, 1391, |
| | | 1392, 1406, 1411, 1412, 1416, 1423, 1424, 1426, 1431, 1432, 1442, 1456, 1459, |
| | | 1467, 1469, 1471, 1473, 1476, 1481, 1485, 1486, 1487, 1488, 1503, 1505, 1507, |
| | | 1511, 1520, 1523, 1526, 1547, 1549, 1552, 1557, 1574, 1578, 1579, 1580, 1584, |
| | | 1585, 1586, 1594, 1598, 1606, 1611, 1617, 1631, 1633, 1637, 1639, 1640, 1642, |
| | | 1643, 1654, 1656, 1665, 1669, 1670 and 370020-394641. |
| 27 | Human enterovirus B | 466, 876, 1332, 1431, 1557 and 394642-397190. |
| 28 | Human enterovirus C | 466, 876, 1332, 1431, 1557 and 397191-399739. |
| 29 | Human enterovirus D | 36, 231, 284, 286, 347, 356, 463, 466, 544, 566, 579, 585, 625, 653, 663, 676, |
| | | 694, 839, 876, 909, 920, 980, 1062, 1101, 1144, 1195, 1258, 1293, 1332, 1335, |
| | | 1431, 1469, 1505, 1557, 1586 and 399740-404272. |
| 30 | Human enterovirus E | 466, 876, 1332, 1431, 1557 and 404273-406821. |
| 31 | Human erythrovirus V9 | 28, 36, 66, 187, 299, 422, 681, 1128, 1186, 1195, 1206, 1270, 1303, 1642 and |
| | | 406822-408538. |
| 32 | Human herpesvirus 1 | 1, 4, 9, 11, 12, 17, 19, 20, 21, 23, 24, 29, 31, 33, 35, 37, 40, 43, 45, 47, 48, |
| | | 49, 51, 54, 58, 60, 61, 66, 67, 68, 69, 70, 73, 74, 77, 78, 80, 84, 85, 88, 89, |
| | | 92, 93, 95, 96, 101, 102, 105, 114, 115, 117, 119, 120, 123, 128, 130, 136, 141, |
| | | 143, 144, 148, 154, 166, 167, 169, 171, 172, 174, 177, 182, 183, 186, 187, 188, |
| | | 189, 191, 192, 196, 200, 201, 202, 203, 206, 210, 212, 216, 217, 218, 219, 220, |
| | | 222, 223, 227, 229, 231, 234, 235, 239, 240, 247, 248, 250, 252, 255, 256, 257, |
| | | 259, 261, 262, 264, 267, 272, 277, 279, 282, 284, 286, 287, 288, 289, 290, 291, |
| | | 292, 293, 295, 296, 297, 301, 303, 304, 310, 314, 315, 316, 321, 322, 323, 324, |
| | | 326, 332, 334, 336, 339, 340, 343, 345, 346, 347, 349, 351, 352, 353, 355, 356, |
| | | 357, 362, 363, 365, 366, 367, 370, 374, 376, 377, 379, 380, 381, 385, 387, 389, |
| | | 393, 394, 395, 396, 399, 400, 401, 402, 403, 405, 407, 408, 409, 412, 413, 416, |
| | | 418, 419, 421, 424, 429, 431, 432, 433, 434, 437, 438, 439, 441, 443, 444, 446, |
| | | 447, 448, 451, 453, 454, 455, 456, 459, 462, 463, 465, 466, 467, 469, 472, 473, |
| | | 477, 478, 481, 484, 485, 486, 488, 492, 493, 495, 499, 500, 504, 505, 507, 509, |
| | | 510, 515, 518, 520, 523, 524, 526, 532, 533, 537, 541, 544, 547, 548, 551, 552, |
| | | 553, 560, 561, 563, 564, 566, 567, 568, 572, 574, 575, 577, 578, 579, 582, 585, |
| | | 586, 587, 589, 593, 594, 598, 600, 605, 607, 610, 611, 612, 613, 614, 616, 617, |
| | | 618, 619, 624, 625, 626, 627, 628, 632, 635, 636, 637, 640, 641, 643, 645, 652, |
| | | 653, 654, 661, 663, 667, 670, 674, 676, 678, 681, 684, 690, 693, 695, 696, 697, |
| | | 699, 701, 706, 709, 710, 713, 715, 716, 718, 719, 720, 724, 725, 728, 731, 734, |
| | | 736, 737, 738, 742, 746, 749, 750, 754, 756, 760, 762, 763, 768, 770, 771, 773, |
| | | 776, 777, 778, 779, 780, 781, 786, 794, 796, 798, 799, 801, 802, 803, 804, 805, |
| | | 808, 809, 811, 812, 813, 815, 819, 821, 822, 824, 825, 826, 829, 836, 838, 839, |
| | | 840, 842, 846, 847, 848, 850, 852, 854, 855, 856, 860, 861, 862, 868, 869, 873, |
| | | 874, 876, 879, 880, 882, 883, 885, 886, 887, 889, 891, 892, 897, 901, 903, 909, |
| | | 911, 914, 919, 920, 923, 924, 925, 927, 928, 932, 933, 934, 935, 936, 937, 938, |
| | | 939, 944, 945, 946, 947, 948, 949, 951, 954, 955, 957, 960, 962, 966, 968, 969, |
| | | 973, 976, 977, 978, 979, 980, 981, 985, 988, 993, 997, 998, 1001, 1002, 1006, |
| | | 1008, 1009, 1012, 1019, 1020, 1022, 1026, 1028, 1030, 1032, 1033, 1034, 1036, |
| | | 1037, 1038, 1039, 1040, 1043, 1046, 1047, 1049, 1051, 1053, 1058, 1059, 1062, |
| | | 1065, 1066, 1067, 1069, 1070, 1072, 1075, 1077, 1078, 1083, 1084, 1085, 1086, |
| | | 1089, 1090, 1096, 1098, 1101, 1102, 1103, 1106, 1109, 1115, 1120, 1122, 1123, |
| | | 1124, 1129, 1133, 1134, 1137, 1138, 1139, 1144, 1146, 1152, 1153, 1155, 1157, |
| | | 1159, 1161, 1163, 1166, 1168, 1170, 1172, 1174, 1179, 1181, 1184, 1185, 1190, |
| | | 1191, 1192, 1194, 1195, 1196, 1197, 1199, 1204, 1205, 1208, 1212, 1214, 1218, |
| | | 1219, 1222, 1223, 1224, 1225, 1226, 1228, 1229, 1230, 1233, 1239, 1240, 1245, |
| | | 1246, 1251, 1254, 1255, 1257, 1258, 1262, 1263, 1265, 1268, 1270, 1271, 1273, |
| | | 1274, 1277, 1282, 1284, 1285, 1289, 1290, 1293, 1295, 1297, 1299, 1300, 1305, |
| | | 1306, 1307, 1308, 1310, 1318, 1321, 1324, 1328, 1329, 1330, 1333, 1334, 1335, |
| | | 1336, 1338, 1339, 1340, 1341, 1342, 1345, 1348, 1349, 1351, 1353, 1355, 1356, |
| | | 1358, 1360, 1361, 1363, 1364, 1365, 1370, 1373, 1375, 1376, 1379, 1382, 1385, |
| | | 1389, 1390, 1391, 1392, 1395, 1400, 1403, 1405, 1406, 1411, 1412, 1413, 1416, |
| | | 1419, 1421, 1423, 1424, 1426, 1427, 1430, 1432, 1433, 1434, 1438, 1439, 1442, |
| | | 1443, 1444, 1456, 1459, 1462, 1466, 1467, 1469, 1473, 1474, 1476, 1481, 1485, |
| | | 1486, 1487, 1488, 1489, 1492, 1495, 1497, 1499, 1503, 1504, 1505, 1507, 1508, |
| | | 1509, 1510, 1511, 1515, 1520, 1523, 1526, 1533, 1535, 1537, 1538, 1547, 1549, |
| | | 1552, 1558, 1560, 1574, 1578, 1579, 1580, 1583, 1584, 1585, 1586, 1588, 1589, |
| | | 1594, 1597, 1600, 1606, 1608, 1611, 1612, 1615, 1617, 1631, 1632, 1633, 1634, |
| | | 1636, 1637, 1639, 1640, 1642, 1643, 1647, 1648, 1649, 1654, 1656, 1663, 1664, |
| | | 1665, 1667, 1669, 1670 and 408539-430762. |
| 33 | Human herpesvirus 10 | 6, 19, 20, 23, 24, 29, 31, 34, 48, 50, 51, 67, 69, 70, 73, 74, 77, 78, 104, 112, |
| | | 114, 116, 120, 121, 141, 143, 151, 167, 174, 177, 179, 188, 204, 212, 219, 223, |
| | | 231, 234, 239, 240, 247, 259, 276, 277, 279, 288, 290, 298, 303, 304, 306, 310, |
| | | 315, 323, 334, 336, 339, 345, 351, 366, 367, 370, 380, 384, 385, 394, 396, 399, |
| | | 400, 401, 410, 413, 422, 423, 424, 429, 431, 433, 452, 454, 462, 466, 478, 480, |
| | | 481, 484, 500, 509, 510, 515, 518, 526, 544, 546, 561, 564, 568, 569, 572, 575, |
| | | 576, 577, 582, 587, 598, 607, 609, 610, 612, 617, 624, 625, 627, 640, 643, 651, |
| | | 652, 654, 661, 667, 674, 676, 681, 684, 688, 693, 710, 713, 720, 725, 731, 734, |
| | | 737, 746, 749, 750, 754, 760, 770, 772, 777, 784, 795, 803, 812, 813, 816, 829, |
| | | 839, 846, 847, 854, 859, 861, 862, 868, 873, 876, 879, 880, 881, 886, 887, 889, |
| | | 909, 914, 935, 938, 947, 960, 962, 966, 973, 985, 988, 993, 1005, 1006, 1019, |
| | | 1020, 1022, 1038, 1040, 1043, 1044, 1047, 1058, 1060, 1062, 1065, 1069, 1075, |
| | | 1086, 1101, 1103, 1106, 1108, 1115, 1118, 1126, 1128, 1129, 1132, 1133, 1134, |
| | | 1135, 1139, 1153, 1156, 1164, 1165, 1168, 1172, 1176, 1185, 1190, 1195, 1196, |
| | | 1197, 1198, 1203, 1204, 1225, 1251, 1257, 1258, 1268, 1293, 1299, 1310, 1321, |
| | | 1327, 1328, 1335, 1338, 1343, 1353, 1357, 1363, 1364, 1392, 1394, 1397, 1402, |
| | | 1410, 1411, 1412, 1423, 1424, 1426, 1467, 1469, 1473, 1476, 1485, 1486, 1487, |
| | | 1488, 1507, 1510, 1511, 1520, 1526, 1538, 1553, 1572, 1574, 1579, 1580, 1585, |
| | | 1606, 1631, 1633, 1637, 1640, 1643, 1657, 1669, 1672 and 430763-447103. |
| 34 | Human herpesvirus 2 | 4, 5, 9, 11, 12, 17, 19, 20, 23, 24, 29, 31, 33, 35, 37, 43, 47, 48, 49, 51, 54, |
| | | 58, 59, 66, 67, 68, 70, 73, 74, 77, 78, 84, 85, 88, 89, 90, 91, 92, 93, 96, 101, |
| | | 102, 105, 114, 117, 120, 127, 128, 129, 140, 143, 144, 145, 148, 151, 152, 154, |
| | | 155, 162, 164, 166, 167, 169, 171, 174, 176, 177, 178, 182, 184, 185, 187, 188, |
| | | 189, 192, 194, 196, 200, 203, 206, 210, 211, 212, 216, 217, 218, 219, 222, 223, |
| | | 228, 229, 231, 232, 234, 235, 237, 239, 240, 245, 247, 250, 252, 253, 255, 256, |
| | | 257, 259, 261, 262, 264, 267, 270, 272, 275, 277, 279, 284, 286, 287, 289, 290, |
| | | 291, 292, 293, 294, 295, 296, 299, 303, 304, 306, 307, 310, 314, 315, 321, 323, |
| | | 324, 325, 330, 332, 334, 335, 336, 339, 340, 343, 345, 346, 347, 350, 351, 352, |
| | | 353, 356, 357, 362, 363, 365, 366, 367, 370, 374, 375, 376, 377, 378, 380, 381, |
| | | 383, 385, 387, 393, 394, 395, 396, 397, 399, 400, 401, 403, 405, 406, 409, 412, |
| | | 413, 416, 418, 420, 421, 423, 424, 429, 430, 431, 432, 433, 434, 437, 438, 439, |
| | | 440, 441, 443, 446, 447, 448, 451, 453, 454, 457, 458, 462, 463, 465, 466, 467, |
| | | 470, 472, 480, 481, 483, 484, 488, 490, 492, 493, 495, 496, 499, 500, 504, 505, |
| | | 507, 509, 510, 514, 515, 518, 520, 524, 526, 527, 532, 533, 535, 537, 541, 543, |
| | | 544, 547, 548, 550, 551, 553, 554, 555, 559, 560, 561, 562, 563, 564, 566, 567, |
| | | 572, 574, 575, 577, 579, 582, 584, 585, 587, 591, 593, 594, 598, 599, 600, 605, |
| | | 607, 610, 611, 612, 613, 614, 615, 617, 618, 619, 624, 625, 626, 627, 632, 635, |
| | | 637, 640, 641, 642, 648, 652, 653, 654, 655, 660, 661, 663, 667, 670, 674, 676, |
| | | 681, 684, 685, 687, 693, 695, 697, 701, 702, 703, 709, 710, 712, 713, 714, 715, |
| | | 719, 720, 721, 731, 734, 736, 737, 746, 749, 750, 754, 756, 760, 763, 773, 776, |
| | | 777, 779, 780, 783, 786, 796, 798, 799, 801, 802, 803, 804, 805, 808, 811, 812, |
| | | 813, 815, 819, 821, 822, 826, 829, 836, 838, 839, 840, 843, 845, 846, 847, 848, |
| | | 853, 854, 855, 856, 860, 861, 862, 868, 869, 873, 874, 876, 879, 882, 886, 887, |
| | | 889, 890, 891, 892, 901, 909, 911, 912, 914, 916, 919, 920, 921, 924, 925, 927, |
| | | 929, 933, 934, 935, 936, 937, 938, 945, 946, 947, 948, 954, 956, 959, 960, 962, |
| | | 966, 969, 973, 976, 977, 979, 980, 981, 985, 988, 990, 993, 994, 997, 998, 999, |
| | | 1001, 1002, 1006, 1008, 1009, 1012, 1018, 1019, 1020, 1022, 1023, 1026, 1032, |
| | | 1033, 1035, 1037, 1038, 1039, 1040, 1043, 1046, 1047, 1049, 1051, 1053, 1055, |
| | | 1058, 1062, 1065, 1069, 1070, 1072, 1073, 1075, 1076, 1078, 1081, 1083, 1084, |
| | | 1086, 1088, 1090, 1091, 1096, 1101, 1102, 1103, 1104, 1106, 1112, 1118, 1120, |
| | | 1121, 1122, 1123, 1128, 1129, 1130, 1131, 1133, 1134, 1136, 1137, 1138, 1139, |
| | | 1144, 1146, 1152, 1153, 1157, 1158, 1159, 1161, 1162, 1163, 1166, 1167, 1168, |
| | | 1172, 1174, 1177, 1179, 1180, 1181, 1185, 1190, 1191, 1192, 1194, 1195, 1196, |
| | | 1197, 1199, 1204, 1205, 1208, 1212, 1214, 1219, 1222, 1225, 1226, 1227, 1228, |
| | | 1230, 1239, 1245, 1250, 1251, 1254, 1255, 1257, 1258, 1262, 1268, 1270, 1271, |
| | | 1273, 1274, 1284, 1289, 1290, 1293, 1297, 1298, 1299, 1300, 1301, 1305, 1306, |
| | | 1307, 1316, 1318, 1319, 1321, 1324, 1328, 1330, 1334, 1335, 1336, 1337, 1338, |
| | | 1339, 1340, 1344, 1348, 1349, 1351, 1353, 1356, 1360, 1363, 1364, 1367, 1373, |
| | | 1375, 1379, 1383, 1385, 1389, 1390, 1391, 1392, 1399, 1400, 1403, 1406, 1411, |
| | | 1412, 1416, 1420, 1421, 1423, 1424, 1425, 1426, 1427, 1432, 1433, 1435, 1436, |
| | | 1439, 1442, 1444, 1456, 1459, 1462, 1464, 1467, 1469, 1473, 1476, 1480, 1481, |
| | | 1485, 1486, 1487, 1488, 1492, 1493, 1495, 1497, 1498, 1499, 1503, 1505, 1507, |
| | | 1508, 1511, 1514, 1515, 1520, 1521, 1523, 1526, 1533, 1535, 1540, 1547, 1549, |
| | | 1552, 1555, 1559, 1568, 1572, 1574, 1577, 1578, 1579, 1580, 1581, 1584, 1585, |
| | | 1586, 1589, 1594, 1597, 1600, 1606, 1610, 1611, 1612, 1613, 1617, 1628, 1631, |
| | | 1632, 1633, 1634, 1636, 1637, 1638, 1639, 1640, 1643, 1644, 1647, 1648, 1649, |
| | | 1651, 1652, 1654, 1656, 1665, 1667, 1669, 1670 and 447104-468934. |
| 35 | Human herpesvirus 3 | 4, 9, 11, 18, 19, 20, 23, 24, 29, 31, 35, 37, 43, 45, 47, 48, 49, 51, 54, 59, |
| | | 66, 67, 68, 70, 72, 73, 74, 77, 78, 85, 88, 89, 92, 93, 96, 99, 101, 105, 114, |
| | | 120, 130, 143, 144, 148, 152, 154, 166, 169, 171, 174, 177, 187, 188, 189, 191, |
| | | 192, 200, 203, 211, 212, 216, 219, 229, 231, 234, 235, 239, 240, 242, 247, 252, |
| | | 261, 262, 272, 274, 275, 277, 279, 284, 286, 289, 290, 292, 293, 295, 296, 303, |
| | | 304, 310, 315, 321, 322, 323, 327, 334, 336, 339, 345, 346, 347, 353, 355, 356, |
| | | 357, 366, 367, 369, 370, 374, 376, 377, 380, 393, 394, 395, 396, 399, 400, 401, |
| | | 405, 411, 413, 414, 416, 418, 423, 424, 429, 431, 433, 437, 439, 441, 443, 446, |
| | | 447, 449, 451, 453, 454, 462, 463, 465, 466, 467, 481, 484, 486, 487, 488, 492, |
| | | 495, 500, 507, 509, 510, 515, 518, 520, 523, 526, 529, 537, 541, 544, 547, 551, |
| | | 553, 560, 561, 563, 564, 566, 567, 574, 575, 577, 579, 585, 587, 589, 594, 598, |
| | | 600, 605, 607, 610, 612, 614, 615, 617, 619, 624, 625, 627, 632, 635, 637, 640, |
| | | 641, 652, 653, 654, 661, 663, 667, 673, 676, 681, 684, 701, 709, 710, 713, 715, |
| | | 716, 720, 721, 731, 734, 737, 740, 742, 746, 749, 754, 756, 759, 760, 763, 773, |
| | | 776, 777, 786, 798, 801, 803, 804, 805, 808, 811, 813, 826, 829, 838, 839, 840, |
| | | 846, 847, 848, 854, 855, 856, 861, 862, 863, 868, 873, 876, 879, 882, 886, 887, |
| | | 889, 891, 901, 909, 911, 914, 918, 920, 924, 925, 927, 935, 936, 938, 945, 946, |
| | | 947, 954, 960, 962, 966, 969, 973, 977, 979, 980, 985, 987, 988, 996, 997, 998, |
| | | 1001, 1006, 1008, 1009, 1011, 1018, 1019, 1020, 1030, 1033, 1037, 1038, 1040, |
| | | 1047, 1049, 1053, 1058, 1062, 1065, 1069, 1070, 1073, 1078, 1084, 1086, 1090, |
| | | 1096, 1098, 1101, 1103, 1104, 1106, 1121, 1122, 1123, 1126, 1129, 1133, 1134, |
| | | 1138, 1139, 1144, 1152, 1153, 1159, 1161, 1163, 1166, 1167, 1168, 1172, 1174, |
| | | 1179, 1181, 1185, 1190, 1192, 1195, 1196, 1199, 1204, 1205, 1212, 1214, 1219, |
| | | 1222, 1224, 1225, 1230, 1231, 1239, 1245, 1251, 1254, 1257, 1258, 1262, 1268, |
| | | 1270, 1271, 1272, 1273, 1274, 1283, 1284, 1290, 1293, 1297, 1299, 1306, 1307, |
| | | 1321, 1328, 1330, 1335, 1336, 1338, 1339, 1340, 1344, 1345, 1348, 1349, 1351, |
| | | 1353, 1355, 1359, 1362, 1363, 1364, 1367, 1373, 1378, 1385, 1390, 1391, 1392, |
| | | 1399, 1406, 1407, 1411, 1412, 1416, 1423, 1424, 1426, 1432, 1438, 1442, 1444, |
| | | 1449, 1455, 1456, 1459, 1460, 1467, 1469, 1472, 1473, 1474, 1476, 1479, 1481, |
| | | 1485, 1486, 1487, 1488, 1497, 1503, 1504, 1505, 1507, 1511, 1520, 1523, 1526, |
| | | 1541, 1547, 1549, 1551, 1552, 1554, 1570, 1574, 1578, 1579, 1580, 1584, 1586, |
| | | 1589, 1591, 1594, 1598, 1606, 1608, 1611, 1617, 1631, 1633, 1637, 1639, 1640, |
| | | 1643, 1647, 1652, 1654, 1656, 1661, 1665, 1669, 1670 and 468935-489881. |
| 36 | Human herpesvirus 4 | 19, 24, 29, 33, 51, 60, 74, 77, 81, 93, 97, 99, 117, 118, 121, 126, 127, 129, |
| | (Epstein-Barr virus) | 130, 131, 133, 148, 151, 155, 162, 164, 167, 169, 183, 186, 189, 198, 203, 210, |
| | | 212, 222, 223, 231, 234, 240, 247, 250, 253, 267, 270, 279, 290, 291, 302, 304, |
| | | 307, 310, 314, 324, 326, 332, 336, 342, 347, 349, 352, 367, 370, 373, 376, 382, |
| | | 383, 384, 392, 406, 412, 423, 424, 429, 432, 441, 442, 447, 461, 476, 493, 494, |
| | | 502, 505, 517, 529, 530, 532, 533, 545, 548, 553, 563, 571, 575, 584, 587, 598, |
| | | 602, 604, 614, 632, 636, 643, 645, 654, 657, 673, 677, 690, 691, 696, 697, 733, |
| | | 735, 746, 770, 771, 779, 784, 792, 795, 798, 801, 803, 808, 813, 819, 825, 847, |
| | | 858, 861, 863, 872, 877, 919, 923, 942, 947, 960, 978, 981, 990, 997, 999, 1011, |
| | | 1012, 1015, 1022, 1023, 1038, 1039, 1042, 1046, 1051, 1052, 1053, 1063, 1067, |
| | | 1075, 1083, 1085, 1086, 1090, 1092, 1120, 1126, 1128, 1129, 1131, 1133, 1139, |
| | | 1146, 1154, 1163, 1166, 1179, 1184, 1188, 1194, 1195, 1201, 1205, 1209, 1223, |
| | | 1224, 1226, 1228, 1241, 1245, 1264, 1269, 1285, 1287, 1289, 1293, 1295, 1298, |
| | | 1305, 1308, 1315, 1316, 1330, 1337, 1341, 1352, 1356, 1359, 1360, 1363, 1375, |
| | | 1378, 1382, 1387, 1391, 1394, 1404, 1405, 1406, 1408, 1410, 1411, 1412, 1423, |
| | | 1425, 1443, 1444, 1451, 1458, 1466, 1467, 1485, 1489, 1490, 1493, 1495, 1501, |
| | | 1509, 1517, 1526, 1528, 1538, 1545, 1566, 1577, 1583, 1593, 1596, 1600, 1610, |
| | | 1627, 1632, 1633, 1642, 1643, 1645, 1650, 1653, 1664, 1669 and 489882-493677. |
| 37 | Human herpesvirus 5 | 1, 2, 4, 6, 7, 9, 11, 13, 17, 19, 20, 21, 23, 24, 27, 29, 31, 35, 36, 37, 40, |
| | | 41, 43, 45, 47, 48, 49, 50, 51, 63, 64, 66, 67, 68, 69, 70, 71, 72, 73, 74, 77, |
| | | 78, 83, 85, 86, 88, 92, 93, 95, 96, 97, 99, 100, 105, 112, 114, 120, 121, 123, |
| | | 127, 128, 129, 130, 133, 134, 140, 141, 143, 144, 148, 149, 150, 152, 154, 156, |
| | | 159, 162, 164, 165, 166, 167, 168, 169, 171, 172, 174, 176, 177, 179, 180, 181, |
| | | 182, 184, 186, 187, 188, 189, 192, 195, 196, 200, 201, 202, 203, 204, 206, 207, |
| | | 209, 210, 211, 212, 216, 217, 218, 219, 220, 222, 227, 228, 229, 231, 232, 233, |
| | | 234, 235, 238, 239, 240, 247, 250, 251, 252, 253, 254, 255, 256, 259, 261, 262, |
| | | 264, 265, 271, 272, 274, 276, 277, 279, 284, 286, 289, 290, 292, 293, 294, 295, |
| | | 296, 297, 301, 302, 303, 304, 309, 310, 311, 314, 315, 316, 317, 319, 321, 323, |
| | | 325, 326, 327, 332, 334, 336, 339, 340, 342, 345, 346, 347, 348, 349, 350, 353, |
| | | 356, 357, 360, 361, 362, 363, 366, 367, 368, 369, 370, 373, 374, 376, 380, 381, |
| | | 382, 386, 387, 392, 393, 394, 395, 396, 397, 398, 399, 400, 401, 404, 405, 406, |
| | | 407, 410, 412, 413, 415, 416, 418, 419, 423, 424, 429, 431, 433, 437, 440, 441, |
| | | 443, 444, 446, 447, 448, 451, 452, 453, 454, 456, 458, 459, 462, 463, 464, 465, |
| | | 466, 467, 468, 469, 472, 476, 477, 478, 481, 482, 484, 485, 488, 490, 492, 493, |
| | | 495, 496, 500, 504, 505, 507, 508, 509, 510, 511, 515, 518, 520, 521, 523, 524, |
| | | 526, 530, 532, 533, 535, 537, 540, 541, 543, 544, 545, 547, 548, 550, 551, 552, |
| | | 553, 555, 559, 560, 561, 562, 563, 564, 566, 567, 569, 570, 572, 574, 575, 577, |
| | | 578, 579, 582, 585, 586, 587, 594, 596, 597, 598, 600, 604, 605, 607, 610, 612, |
| | | 613, 614, 615, 616, 617, 618, 619, 624, 625, 626, 627, 632, 634, 635, 636, 637, |
| | | 640, 641, 648, 649, 652, 653, 654, 656, 657, 658, 661, 663, 667, 669, 670, 671, |
| | | 674, 676, 680, 681, 684, 688, 693, 696, 697, 698, 701, 702, 709, 710, 712, 713, |
| | | 715, 720, 724, 729, 731, 733, 734, 735, 737, 738, 739, 740, 741, 742, 746, 748, |
| | | 749, 754, 756, 758, 759, 760, 762, 763, 765, 766, 767, 769, 773, 776, 777, 779, |
| | | 784, 786, 793, 795, 798, 799, 801, 802, 803, 804, 806, 808, 809, 811, 813, 815, |
| | | 817, 819, 821, 827, 829, 833, 834, 838, 839, 840, 841, 842, 843, 844, 846, 847, |
| | | 848, 851, 853, 854, 855, 856, 858, 859, 860, 861, 862, 864, 867, 868, 869, 873, |
| | | 874, 875, 876, 877, 880, 881, 882, 883, 884, 885, 886, 887, 889, 891, 892, 893, |
| | | 895, 901, 904, 909, 910, 911, 914, 919, 920, 921, 924, 925, 927, 929, 931, 932, |
| | | 934, 935, 936, 937, 938, 939, 940, 942, 946, 947, 948, 954, 955, 956, 958, 959, |
| | | 960, 962, 966, 969, 973, 976, 977, 978, 979, 980, 985, 987, 988, 989, 990, 991, |
| | | 992, 993, 997, 998, 999, 1000, 1001, 1002, 1005, 1006, 1008, 1009, 1012, 1013, |
| | | 1014, 1015, 1017, 1019, 1020, 1022, 1028, 1029, 1031, 1033, 1034, 1035, 1037, |
| | | 1038, 1039, 1040, 1043, 1046, 1047, 1049, 1052, 1053, 1058, 1060, 1062, 1063, |
| | | 1065, 1066, 1067, 1068, 1069, 1070, 1071, 1075, 1076, 1078, 1079, 1081, 1083, |
| | | 1084, 1086, 1088, 1090, 1094, 1096, 1101, 1102, 1106, 1109, 1115, 1118, 1119, |
| | | 1120, 1123, 1128, 1129, 1130, 1131, 1132, 1133, 1134, 1137, 1138, 1139, 1140, |
| | | 1144, 1145, 1150, 1152, 1153, 1155, 1157, 1159, 1161, 1162, 1163, 1166, 1168, |
| | | 1172, 1174, 1177, 1180, 1181, 1185, 1186, 1190, 1191, 1192, 1194, 1195, 1196, |
| | | 1197, 1198, 1199, 1201, 1204, 1205, 1207, 1208, 1211, 1212, 1219, 1223, 1224, |
| | | 1225, 1226, 1228, 1229, 1234, 1239, 1245, 1249, 1250, 1251, 1253, 1254, 1257, |
| | | 1258, 1261, 1262, 1263, 1264, 1265, 1268, 1270, 1271, 1272, 1273, 1274, 1277, |
| | | 1284, 1285, 1290, 1291, 1293, 1294, 1297, 1299, 1300, 1306, 1307, 1308, 1309, |
| | | 1318, 1320, 1321, 1324, 1326, 1327, 1328, 1330, 1331, 1332, 1334, 1335, 1337, |
| | | 1338, 1339, 1340, 1343, 1345, 1346, 1348, 1349, 1351, 1353, 1355, 1356, 1358, |
| | | 1359, 1360, 1363, 1364, 1370, 1372, 1373, 1377, 1378, 1379, 1380, 1382, 1385, |
| | | 1386, 1389, 1390, 1391, 1392, 1396, 1398, 1400, 1402, 1403, 1404, 1405, 1406, |
| | | 1408, 1410, 1411, 1412, 1414, 1416, 1418, 1421, 1423, 1424, 1425, 1426, 1427, |
| | | 1432, 1434, 1436, 1437, 1438, 1439, 1442, 1444, 1447, 1449, 1451, 1453, 1456, |
| | | 1457, 1459, 1460, 1464, 1466, 1467, 1469, 1473, 1474, 1475, 1476, 1477, 1478, |
| | | 1481, 1485, 1486, 1487, 1488, 1492, 1493, 1499, 1501, 1503, 1505, 1507, 1509, |
| | | 1511, 1513, 1514, 1519, 1520, 1521, 1522, 1523, 1526, 1530, 1533, 1535, 1538, |
| | | 1541, 1544, 1545, 1546, 1547, 1549, 1552, 1553, 1555, 1559, 1563, 1566, 1567, |
| | | 1569, 1570, 1574, 1578, 1579, 1580, 1582, 1584, 1585, 1586, 1594, 1596, 1597, |
| | | 1600, 1606, 1607, 1608, 1609, 1611, 1612, 1615, 1617, 1618, 1625, 1626, 1628, |
| | | 1629, 1630, 1631, 1632, 1633, 1634, 1636, 1637, 1638, 1639, 1640, 1643, 1644, |
| | | 1648, 1652, 1654, 1656, 1664, 1665, 1669, 1670 and 527975-565503. |
| 38 | Human herpesvirus 6 | 2, 5, 8, 9, 17, 23, 26, 46, 48, 50, 60, 61, 72, 77, 88, 93, 97, 105, 112, 118, |
| | | 122, 132, 133, 141, 148, 152, 164, 167, 178, 182, 183, 185, 191, 192, 196, 199, |
| | | 202, 212, 220, 223, 232, 233, 243, 252, 260, 264, 275, 279, 287, 290, 296, 297, |
| | | 302, 303, 315, 317, 343, 352, 355, 357, 360, 361, 362, 373, 378, 380, 383, 384, |
| | | 386, 403, 404, 407, 409, 419, 423, 438, 441, 442, 447, 449, 450, 451, 455, 456, |
| | | 464, 466, 469, 470, 487, 489, 490, 493, 494, 499, 505, 508, 520, 522, 525, 532, |
| | | 537, 544, 545, 557, 560, 561, 562, 585, 589, 595, 599, 623, 626, 628, 632, 649, |
| | | 661, 670, 695, 696, 697, 698, 706, 713, 714, 716, 718, 720, 721, 728, 733, 736, |
| | | 739, 740, 744, 752, 760, 769, 774, 781, 785, 786, 805, 808, 829, 831, 839, 846, |
| | | 847, 852, 854, 855, 873, 876, 892, 896, 911, 921, 929, 932, 933, 935, 937, 946, |
| | | 956, 957, 958, 964, 968, 979, 982, 991, 997, 1009, 1015, 1023, 1028, 1029, 1030, |
| | | 1040, 1047, 1052, 1062, 1065, 1069, 1073, 1094, 1103, 1104, 1105, 1109, 1110, |
| | | 1121, 1124, 1128, 1138, 1153, 1154, 1157, 1170, 1172, 1184, 1192, 1194, 1195, |
| | | 1201, 1205, 1209, 1214, 1219, 1221, 1222, 1230, 1231, 1239, 1241, 1249, 1265, |
| | | 1269, 1272, 1275, 1282, 1284, 1292, 1294, 1311, 1328, 1330, 1331, 1332, 1333, |
| | | 1334, 1335, 1337, 1338, 1342, 1344, 1356, 1359, 1360, 1363, 1368, 1378, 1385, |
| | | 1392, 1396, 1401, 1403, 1404, 1407, 1413, 1416, 1427, 1431, 1434, 1435, 1436, |
| | | 1439, 1444, 1448, 1460, 1462, 1464, 1467, 1474, 1482, 1492, 1495, 1496, 1497, |
| | | 1504, 1523, 1526, 1536, 1537, 1540, 1551, 1555, 1558, 1560, 1563, 1567, 1571, |
| | | 1577, 1588, 1589, 1593, 1594, 1597, 1604, 1628, 1634, 1636, 1638, 1644, 1659 and |
| | | 565504-567893. |
| 39 | Human herpesvirus 6B | 1, 4, 5, 8, 9, 17, 18, 19, 20, 23, 26, 29, 40, 46, 48, 50, 54, 61, 88, 93, 95, |
| | | 99, 100, 122, 124, 132, 134, 141, 143, 145, 150, 152, 161, 165, 176, 196, 201, |
| | | 226, 231, 233, 240, 242, 250, 264, 277, 289, 290, 292, 296, 297, 300, 302, 310, |
| | | 315, 316, 320, 321, 340, 343, 347, 349, 355, 362, 365, 369, 370, 375, 378, 380, |
| | | 384, 388, 403, 406, 407, 418, 423, 424, 429, 439, 447, 450, 466, 469, 472, 473, |
| | | 485, 487, 489, 490, 493, 496, 501, 502, 503, 505, 510, 517, 520, 522, 525, 528, |
| | | 529, 530, 532, 533, 537, 542, 550, 552, 553, 560, 563, 566, 575, 577, 579, 599, |
| | | 602, 614, 615, 620, 626, 628, 633, 652, 677, 678, 685, 695, 703, 706, 710, 712, |
| | | 721, 722, 724, 725, 728, 735, 737, 740, 765, 769, 774, 777, 782, 783, 786, 790, |
| | | 793, 801, 803, 805, 808, 810, 821, 826, 831, 846, 850, 854, 861, 863, 873, 874, |
| | | 876, 883, 886, 890, 892, 918, 924, 932, 933, 934, 937, 939, 941, 944, 946, 949, |
| | | 957, 958, 962, 968, 974, 975, 977, 980, 987, 992, 993, 997, 999, 1001, 1009, |
| | | 1012, 1014, 1015, 1025, 1032, 1047, 1051, 1053, 1059, 1065, 1066, 1069, 1072, |
| | | 1076, 1081, 1091, 1094, 1103, 1105, 1110, 1121, 1127, 1138, 1152, 1155, 1157, |
| | | 1166, 1172, 1179, 1195, 1197, 1199, 1201, 1205, 1207, 1214, 1219, 1222, 1227, |
| | | 1228, 1230, 1231, 1239, 1245, 1270, 1272, 1281, 1285, 1292, 1295, 1297, 1303, |
| | | 1307, 1309, 1311, 1315, 1320, 1321, 1324, 1328, 1331, 1334, 1340, 1342, 1344, |
| | | 1352, 1355, 1358, 1362, 1363, 1366, 1378, 1385, 1391, 1396, 1403, 1407, 1413, |
| | | 1415, 1416, 1426, 1431, 1433, 1435, 1439, 1444, 1447, 1451, 1462, 1467, 1473, |
| | | 1478, 1480, 1485, 1495, 1497, 1509, 1518, 1526, 1530, 1535, 1545, 1547, 1551, |
| | | 1554, 1559, 1577, 1578, 1580, 1585, 1589, 1591, 1594, 1596, 1597, 1608, 1619, |
| | | 1626, 1628, 1634, 1638, 1643, 1644, 1650, 1653, 1657, 1660, 1661, 1669 and |
| | | 567894-570313. |
| 40 | Human herpesvirus 7 | 4, 5, 7, 8, 9, 10, 14, 15, 16, 17, 18, 19, 20, 22, 23, 24, 25, 26, 28, 29, 31, |
| | | 36, 37, 40, 42, 47, 48, 49, 50, 51, 56, 60, 61, 62, 63, 67, 68, 70, 72, 73, 74, |
| | | 77, 78, 86, 88, 89, 96, 97, 101, 105, 106, 109, 112, 114, 116, 120, 122, 127, |
| | | 130, 132, 133, 134, 140, 141, 143, 144, 150, 151, 154, 158, 159, 162, 163, 166, |
| | | 169, 171, 173, 174, 177, 179, 180, 183, 187, 188, 189, 190, 191, 196, 197, 199, |
| | | 200, 201, 202, 203, 204, 207, 210, 211, 212, 218, 221, 222, 226, 231, 232, 233, |
| | | 235, 236, 237, 239, 240, 241, 244, 246, 247, 248, 249, 252, 253, 262, 265, 266, |
| | | 267, 269, 271, 276, 277, 279, 280, 281, 285, 286, 288, 290, 293, 296, 298, 299, |
| | | 302, 303, 304, 306, 308, 310, 314, 315, 316, 319, 321, 323, 325, 328, 332, 334, |
| | | 339, 342, 345, 347, 348, 350, 356, 357, 358, 359, 360, 361, 366, 367, 368, 369, |
| | | 370, 374, 376, 378, 380, 382, 388, 389, 391, 393, 394, 397, 399, 400, 401, 404, |
| | | 407, 408, 409, 413, 424, 426, 427, 429, 431, 433, 442, 443, 444, 446, 447, 450, |
| | | 452, 453, 454, 460, 462, 463, 466, 470, 475, 478, 481, 482, 484, 485, 486, 488, |
| | | 489, 500, 502, 503, 506, 507, 508, 509, 510, 512, 515, 516, 517, 518, 519, 520, |
| | | 522, 523, 525, 526, 536, 537, 538, 541, 544, 546, 549, 551, 553, 557, 559, 561, |
| | | 563, 564, 567, 571, 575, 576, 577, 579, 580, 583, 585, 586, 587, 592, 602, 607, |
| | | 608, 610, 611, 612, 617, 620, 621, 624, 626, 627, 631, 633, 634, 635, 636, 637, |
| | | 638, 639, 640, 641, 643, 645, 646, 649, 651, 652, 654, 656, 657, 659, 661, 663, |
| | | 667, 670, 671, 673, 676, 681, 682, 684, 686, 688, 689, 691, 692, 693, 694, 701, |
| | | 703, 707, 709, 710, 712, 713, 714, 715, 716, 717, 720, 724, 729, 731, 734, 737, |
| | | 739, 742, 744, 746, 749, 750, 751, 753, 754, 758, 760, 761, 764, 765, 766, 767, |
| | | 769, 771, 777, 779, 780, 781, 784, 786, 790, 793, 795, 801, 802, 803, 805, 808, |
| | | 810, 812, 813, 817, 820, 821, 827, 829, 830, 836, 838, 839, 842, 846, 847, 854, |
| | | 855, 856, 858, 860, 861, 862, 864, 867, 873, 875, 876, 877, 879, 881, 882, 883, |
| | | 884, 886, 888, 889, 891, 894, 898, 899, 900, 901, 903, 905, 907, 909, 911, 913, |
| | | 914, 920, 924, 927, 929, 931, 935, 938, 947, 953, 954, 959, 960, 961, 962, 965, |
| | | 966, 971, 973, 975, 977, 980, 982, 983, 985, 988, 991, 992, 996, 997, 1002, |
| | | 1004, 1005, 1006, 1007, 1008, 1009, 1013, 1015, 1016, 1017, 1019, 1020, 1021, |
| | | 1022, 1024, 1028, 1029, 1031, 1036, 1038, 1039, 1041, 1046, 1049, 1050, 1058, |
| | | 1060, 1062, 1063, 1065, 1069, 1070, 1071, 1074, 1076, 1078, 1083, 1086, 1092, |
| | | 1094, 1095, 1099, 1101, 1103, 1106, 1108, 1109, 1110, 1111, 1114, 1118, 1120, |
| | | 1122, 1123, 1126, 1127, 1128, 1129, 1131, 1133, 1134, 1135, 1138, 1139, 1140, |
| | | 1141, 1144, 1146, 1152, 1153, 1154, 1156, 1157, 1159, 1163, 1166, 1168, 1172, |
| | | 1173, 1174, 1175, 1181, 1182, 1184, 1185, 1186, 1187, 1190, 1191, 1194, 1195, |
| | | 1196, 1197, 1198, 1199, 1202, 1204, 1205, 1206, 1207, 1211, 1212, 1214, 1215, |
| | | 1218, 1219, 1220, 1221, 1222, 1225, 1226, 1227, 1230, 1233, 1235, 1237, 1243, |
| | | 1248, 1249, 1251, 1252, 1255, 1256, 1257, 1258, 1259, 1260, 1261, 1266, 1267, |
| | | 1268, 1270, 1271, 1272, 1275, 1277, 1279, 1280, 1282, 1283, 1284, 1285, 1288, |
| | | 1289, 1293, 1295, 1296, 1297, 1299, 1300, 1303, 1305, 1310, 1311, 1312, 1314, |
| | | 1316, 1321, 1326, 1327, 1328, 1330, 1331, 1333, 1335, 1338, 1344, 1346, 1349, |
| | | 1353, 1355, 1356, 1358, 1359, 1363, 1366, 1370, 1374, 1377, 1380, 1388, 1390, |
| | | 1392, 1394, 1401, 1409, 1411, 1412, 1416, 1419, 1422, 1423, 1424, 1426, 1429, |
| | | 1433, 1436, 1437, 1440, 1441, 1442, 1444, 1445, 1463, 1464, 1467, 1468, 1469, |
| | | 1472, 1473, 1475, 1476, 1483, 1484, 1485, 1486, 1487, 1488, 1492, 1497, 1505, |
| | | 1507, 1509, 1511, 1512, 1513, 1516, 1517, 1520, 1521, 1522, 1523, 1526, 1533, |
| | | 1534, 1538, 1543, 1545, 1547, 1549, 1553, 1557, 1558, 1560, 1562, 1565, 1567, |
| | | 1570, 1574, 1578, 1579, 1580, 1582, 1583, 1585, 1589, 1594, 1596, 1599, 1606, |
| | | 1611, 1614, 1615, 1619, 1621, 1622, 1625, 1627, 1629, 1631, 1632, 1633, 1636, |
| | | 1637, 1638, 1640, 1642, 1643, 1644, 1645, 1647, 1654, 1655, 1656, 1658, 1660, |
| | | 1661, 1663, 1669 and 570314-612723. |
| 41 | Human herpesvirus 9 | 6, 9, 24, 40, 47, 68, 78, 128, 130, 150, 174, 177, 221, 223, 234, 247, 248, 271, |
| | | 272, 279, 304, 306, 328, 334, 336, 345, 356, 370, 380, 384, 394, 403, 429, 431, |
| | | 437, 466, 467, 478, 512, 537, 553, 561, 564, 575, 577, 590, 596, 598, 601, 619, |
| | | 643, 688, 691, 713, 731, 770, 779, 803, 822, 823, 827, 836, 847, 855, 879, 881, |
| | | 909, 931, 935, 945, 979, 993, 998, 1006, 1031, 1047, 1068, 1078, 1106, 1117, |
| | | 1118, 1129, 1133, 1139, 1161, 1173, 1178, 1186, 1195, 1198, 1249, 1250, 1251, |
| | | 1261, 1273, 1302, 1304, 1326, 1328, 1331, 1333, 1335, 1338, 1339, 1340, 1363, |
| | | 1370, 1374, 1380, 1385, 1392, 1393, 1394, 1396, 1416, 1419, 1424, 1425, 1431, |
| | | 1480, 1502, 1513, 1523, 1538, 1549, 1585, 1630, 1656 and 614865-620650. |
| 42 | Human immunodeficiency | 33, 61, 117, 132, 133, 210, 222, 243, 352, 505, 553, 776, 777, 960, 1039, 1046, |
| | virus 1 (HIV-1) | 1154, 1195, 1292, 1298, 1353, 1391, 1405, 1411, 1489, 1504, 1546, 1632 and |
| | | 620651-620770. |
| 43 | Human immunodeficiency | 198, 210, 222, 260, 310, 658, 714, 810, 860, 958, 999, 1046, 1074, 1143, 1195, |
| | virus 2 (HIV-2) | 1261, 1264, 1287, 1305, 1460, 1509, 1546, 1632, 1645 and 701430-701510. |
| 44 | Human metapneumovirus | 1, 17, 20, 29, 36, 44, 73, 77, 112, 120, 154, 161, 186, 224, 231, 240, 276, 277, |
| | | 284, 286, 288, 289, 290, 310, 321, 347, 356, 361, 429, 454, 455, 463, 488, 518, |
| | | 527, 529, 544, 548, 554, 566, 575, 579, 585, 616, 625, 626, 643, 652, 653, 663, |
| | | 676, 694, 696, 710, 712, 737, 739, 742, 768, 793, 795, 803, 813, 826, 839, 855, |
| | | 876, 890, 894, 909, 920, 925, 941, 959, 962, 980, 1015, 1028, 1029, 1062, 1079, |
| | | 1091, 1092, 1094, 1101, 1118, 1139, 1140, 1143, 1144, 1163, 1168, 1170, 1173, |
| | | 1187, 1190, 1195, 1206, 1208, 1218, 1233, 1241, 1244, 1250, 1258, 1274, 1282, |
| | | 1292, 1293, 1297, 1310, 1315, 1321, 1325, 1335, 1340, 1344, 1359, 1426, 1442, |
| | | 1469, 1471, 1473, 1482, 1485, 1505, 1562, 1568, 1580, 1583, 1585, 1586, 1592, |
| | | 1599, 1624, 1642, 1664, 1669 and 782091-786807. |
| 45 | Human papillomavirus | 69, 126, 162, 233, 235, 408, 411, 528, 578, 615, 776, 806, 822, 987, 1035, 1103, |
| | type 11 | 1222, 1277, 1320, 1331, 1335, 1513, 1515, 1551, 1637, 1644, 1661 and |
| | | 786808-787035. |
| 46 | Human papillomavirus | 26, 64, 110, 162, 165, 166, 388, 466, 511, 555, 630, 649, 682, 723, 724, 1221, |
| | type 16 | 1239, 1331, 1671 and 787036-787200. |
| 47 | Human papillomavirus | 97, 114, 169, 262, 410, 446, 541, 714, 787, 862, 884, 939, 1035, 1061, 1092, |
| | type 17 | 1152, 1195, 1271, 1323, 1363, 1402, 1416, 1486, 1506, 1598, 1636 and |
| | | 787201-788364. |
| 48 | Human papillomavirus | 125, 134, 223, 265, 320, 438, 501, 545, 806, 872, 999, 1015, 1272, 1275, 1285, |
| | type 18 | 1362, 1376, 1422, 1454, 1466, 1489, 1521, 1558, 1559 and 788365-788549. |
| 49 | Human papillomavirus | 10, 410, 639, 1043, 1060, 1118, 1186, 1374, 1637 and 788550-789320. |
| | type 18, complete genome | |
| 50 | Human papillomavirus | 7, 10, 19, 21, 33, 34, 42, 48, 49, 51, 53, 56, 59, 68, 77, 78, 80, 84, 88, 92, |
| | type 19 | 96, 101, 102, 105, 113, 122, 125, 127, 129, 134, 148, 151, 157, 159, 168, 169, |
| | | 173, 174, 177, 180, 184, 190, 193, 200, 203, 205, 207, 210, 211, 217, 221, 222, |
| | | 231, 233, 234, 236, 249, 252, 256, 260, 261, 262, 272, 274, 279, 280, 286, 289, |
| | | 290, 295, 296, 298, 303, 312, 315, 319, 323, 325, 328, 334, 338, 339, 343, 344, |
| | | 345, 349, 356, 357, 358, 366, 367, 370, 371, 373, 378, 380, 387, 394, 396, 399, |
| | | 402, 404, 408, 409, 410, 412, 419, 421, 422, 423, 425, 429, 433, 434, 437, 443, |
| | | 446, 450, 454, 458, 462, 463, 466, 467, 469, 474, 478, 481, 484, 485, 486, 491, |
| | | 492, 493, 498, 500, 505, 506, 507, 510, 515, 520, 521, 522, 526, 527, 537, 539, |
| | | 540, 544, 546, 551, 552, 553, 563, 564, 565, 567, 568, 569, 570, 575, 582, 585, |
| | | 586, 595, 597, 598, 603, 607, 610, 613, 617, 619, 627, 635, 639, 641, 654, 661, |
| | | 665, 668, 669, 671, 674, 684, 688, 691, 693, 697, 700, 701, 706, 707, 731, 736, |
| | | 745, 749, 750, 758, 762, 767, 776, 777, 783, 786, 788, 798, 803, 809, 812, 813, |
| | | 814, 816, 817, 830, 835, 839, 846, 850, 854, 860, 862, 875, 876, 879, 881, 884, |
| | | 894, 905, 908, 909, 911, 914, 919, 920, 924, 927, 932, 935, 939, 940, 945, 947, |
| | | 949, 954, 959, 960, 962, 965, 972, 973, 977, 978, 983, 984, 985, 989, 992, 993, |
| | | 994, 1002, 1005, 1006, 1008, 1009, 1011, 1012, 1031, 1033, 1038, 1039, 1046, |
| | | 1047, 1062, 1065, 1068, 1069, 1070, 1071, 1076, 1078, 1081, 1082, 1086, 1092, |
| | | 1095, 1099, 1106, 1108, 1119, 1122, 1125, 1128, 1129, 1130, 1132, 1133, 1135, |
| | | 1144, 1149, 1152, 1156, 1157, 1159, 1163, 1168, 1173, 1174, 1177, 1180, 1182, |
| | | 1185, 1186, 1187, 1190, 1191, 1193, 1195, 1196, 1197, 1198, 1200, 1204, 1205, |
| | | 1212, 1216, 1218, 1219, 1224, 1227, 1237, 1249, 1250, 1251, 1261, 1266, 1267, |
| | | 1269, 1270, 1271, 1278, 1287, 1293, 1295, 1297, 1299, 1300, 1305, 1312, 1316, |
| | | 1318, 1319, 1327, 1328, 1330, 1335, 1340, 1343, 1345, 1349, 1350, 1353, 1359, |
| | | 1363, 1364, 1366, 1372, 1374, 1376, 1377, 1380, 1381, 1382, 1384, 1388, 1390, |
| | | 1402, 1403, 1405, 1410, 1411, 1412, 1416, 1423, 1424, 1427, 1428, 1429, 1442, |
| | | 1452, 1455, 1467, 1469, 1476, 1478, 1482, 1484, 1486, 1488, 1492, 1495, 1496, |
| | | 1503, 1507, 1509, 1510, 1511, 1513, 1521, 1525, 1537, 1538, 1543, 1549, 1568, |
| | | 1569, 1573, 1578, 1584, 1585, 1590, 1591, 1592, 1596, 1605, 1611, 1620, 1621, |
| | | 1622, 1629, 1632, 1636, 1637, 1640, 1645, 1653, 1654, 1656, 1663, 1665, 1670 and |
| | | 789321-813754. |
| 51 | Human papillomavirus | 1, 77, 110, 145, 162, 301, 321, 511, 531, 762, 768, 783, 1081, 1219, 1366, 1374, |
| | type 31 | 1454, 1551 and 813755-813950. |
| 52 | Human papillomavirus | 1, 62, 64, 165, 288, 319, 408, 430, 533, 545, 776, 843, 886, 946, 991, 999, |
| | type 45 | 1089, 1138, 1292, 1324, 1466, 1551, 1638 and 813951-814099. |
| 53 | Human papillomavirus | 4, 33, 118, 165, 201, 232, 240, 321, 368, 386, 449, 476, 484, 694, 749, 824, |
| | type 5 | 876, 890, 946, 1091, 1124, 1155, 1225, 1316, 1320, 1331, 1337, 1359, 1366, 1426, |
| | | 1448, 1588, 1627, 1637, 1650, 1669 and 814100-814228. |
| 54 | Human papillomavirus | 17, 26, 27, 77, 90, 112, 126, 132, 224, 269, 272, 288, 297, 319, 346, 384, 404, |
| | type 6 | 408, 467, 496, 504, 578, 682, 716, 749, 774, 831, 847, 924, 949, 1187, 1221, |
| | | 1273, 1277, 1335, 1396, 1551, 1661 and 814229-814460. |
| 55 | Human papillomavirus | 33, 73, 98, 118, 134, 228, 297, 311, 321, 334, 545, 739, 844, 977, 1110, 1153, |
| | type 8 | 1154, 1374, 1423, 1570 and 814461-814585. |
| 56 | Human parainfluenza | 36, 98, 120, 132, 219, 231, 276, 284, 286, 288, 290, 347, 356, 360, 408, 438, |
| | virus 1 strain Washington/ | 454, 463, 488, 522, 544, 548, 566, 579, 585, 602, 616, 620, 625, 633, 643, 653, |
| | 1964 | 663, 676, 685, 694, 785, 793, 810, 813, 839, 855, 894, 903, 909, 910, 920, 951, |
| | | 974, 980, 1011, 1025, 1029, 1036, 1062, 1076, 1079, 1084, 1092, 1101, 1109, |
| | | 1118, 1139, 1140, 1144, 1163, 1168, 1173, 1187, 1190, 1195, 1207, 1208, 1222, |
| | | 1258, 1281, 1293, 1315, 1325, 1335, 1368, 1442, 1469, 1471, 1482, 1505, 1545, |
| | | 1554, 1562, 1578, 1585, 1586, 1624, 1631, 1642, 1650, 1653 and 814586-819257. |
| 57 | Human parainfluenza | 36, 120, 223, 231, 276, 284, 286, 290, 347, 356, 360, 384, 404, 454, 455, 463, |
| | virus 2 | 488, 508, 544, 548, 563, 566, 579, 585, 616, 625, 637, 643, 653, 658, 663, 676, |
| | | 694, 725, 739, 813, 839, 844, 855, 894, 909, 920, 958, 980, 1029, 1062, 1079, |
| | | 1092, 1101, 1109, 1118, 1139, 1140, 1144, 1163, 1168, 1173, 1187, 1190, 1195, |
| | | 1208, 1258, 1275, 1293, 1315, 1325, 1335, 1344, 1442, 1469, 1471, 1505, 1562, |
| | | 1567, 1585, 1586, 1642 and 819258-823843. |
| 58 | Human parainfluenza | 26, 36, 48, 60, 120, 132, 201, 231, 237, 276, 284, 286, 289, 290, 310, 347, 356, |
| | virus 3 | 454, 455, 463, 473, 476, 488, 544, 548, 566, 579, 585, 616, 620, 625, 626, 643, |
| | | 653, 663, 676, 694, 714, 813, 839, 846, 855, 888, 894, 900, 909, 920, 958, 980, |
| | | 1015, 1029, 1062, 1079, 1092, 1094, 1101, 1113, 1118, 1126, 1139, 1140, 1144, |
| | | 1154, 1163, 1168, 1170, 1173, 1187, 1190, 1195, 1208, 1222, 1258, 1293, 1315, |
| | | 1325, 1331, 1335, 1340, 1442, 1469, 1471, 1482, 1505, 1555, 1562, 1585, 1586, |
| | | 1626, 1638, 1642, 1657 and 823844-828574. |
| 59 | Human parechovirus 2 | 4, 11, 20, 23, 24, 29, 31, 35, 36, 37, 43, 47, 48, 49, 51, 66, 67, 70, 73, 74, |
| | | 77, 78, 96, 114, 120, 143, 148, 169, 171, 174, 187, 188, 189, 197, 200, 203, |
| | | 212, 219, 234, 239, 240, 247, 252, 261, 262, 276, 277, 279, 289, 290, 295, 303, |
| | | 304, 310, 315, 321, 323, 334, 336, 339, 347, 356, 357, 366, 370, 374, 376, 380, |
| | | 394, 395, 396, 399, 400, 401, 405, 413, 416, 424, 429, 431, 433, 437, 441, 443, |
| | | 446, 450, 453, 454, 462, 465, 466, 481, 484, 488, 500, 507, 509, 510, 515, 518, |
| | | 526, 537, 541, 544, 547, 548, 551, 553, 561, 567, 574, 575, 577, 579, 587, 594, |
| | | 605, 607, 610, 612, 616, 617, 624, 625, 627, 635, 640, 643, 652, 654, 661, 667, |
| | | 676, 681, 684, 694, 701, 709, 710, 713, 715, 720, 731, 734, 737, 746, 749, 754, |
| | | 756, 760, 763, 773, 776, 777, 786, 801, 803, 804, 811, 813, 829, 838, 839, 840, |
| | | 846, 847, 854, 855, 856, 862, 868, 873, 876, 882, 886, 889, 894, 909, 911, 914, |
| | | 924, 925, 927, 935, 936, 938, 954, 960, 962, 966, 969, 973, 977, 979, 985, 988, |
| | | 998, 1006, 1008, 1019, 1020, 1029, 1037, 1038, 1040, 1049, 1058, 1062, 1065, |
| | | 1069, 1070, 1079, 1084, 1086, 1090, 1092, 1096, 1101, 1106, 1118, 1123, 1129, |
| | | 1133, 1138, 1139, 1140, 1152, 1153, 1159, 1163, 1168, 1172, 1173, 1187, 1190, |
| | | 1195, 1196, 1198, 1204, 1205, 1208, 1212, 1219, 1225, 1239, 1245, 1251, 1254, |
| | | 1257, 1258, 1262, 1268, 1270, 1271, 1274, 1284, 1290, 1293, 1297, 1299, 1306, |
| | | 1315, 1321, 1325, 1328, 1330, 1332, 1335, 1338, 1339, 1349, 1353, 1363, 1364, |
| | | 1390, 1391, 1392, 1411, 1412, 1416, 1423, 1424, 1426, 1432, 1442, 1456, 1459, |
| | | 1467, 1469, 1471, 1473, 1476, 1481, 1485, 1487, 1488, 1503, 1507, 1511, 1526, |
| | | 1549, 1552, 1557, 1574, 1578, 1579, 1580, 1584, 1585, 1606, 1617, 1631, 1633, |
| | | 1637, 1639, 1640, 1642, 1643, 1654, 1656, 1665, 1669 and 828575-848188. |
| 60 | Human respiratory syncytial | 5, 36, 61, 67, 96, 109, 120, 131, 132, 173, 231, 233, 263, 276, 284, 286, 290, |
| | virus | 291, 302, 310, 316, 319, 321, 325, 332, 347, 350, 356, 359, 361, 367, 378, 382, |
| | | 399, 403, 412, 426, 430, 433, 454, 455, 462, 463, 465, 466, 473, 488, 544, 548, |
| | | 553, 559, 566, 567, 579, 585, 616, 625, 626, 627, 643, 653, 663, 676, 694, 701, |
| | | 716, 746, 765, 785, 792, 813, 820, 826, 839, 855, 873, 887, 894, 909, 912, 920, |
| | | 938, 947, 974, 980, 991, 1002, 1003, 1028, 1029, 1038, 1047, 1052, 1058, 1062, |
| | | 1078, 1079, 1081, 1092, 1101, 1105, 1118, 1135, 1139, 1140, 1144, 1152, 1163, |
| | | 1166, 1168, 1170, 1171, 1173, 1184, 1185, 1187, 1190, 1195, 1208, 1220, 1222, |
| | | 1227, 1258, 1293, 1310, 1315, 1325, 1326, 1328, 1335, 1412, 1423, 1442, 1465, |
| | | 1469, 1471, 1482, 1505, 1509, 1511, 1522, 1562, 1585, 1586, 1588, 1589, 1599, |
| | | 1635, 1642 and 848189-856593. |
| 61 | Human rhinovirus 89 | 36, 120, 231, 276, 284, 286, 290, 347, 356, 454, 463, 488, 544, 548, 566, 579, |
| | | 585, 616, 625, 643, 653, 663, 676, 694, 813, 839, 855, 876, 894, 909, 920, 980, |
| | | 1029, 1062, 1079, 1092, 1101, 1118, 1139, 1140, 1144, 1163, 1168, 1173, 1187, |
| | | 1190, 1195, 1208, 1258, 1293, 1315, 1325, 1332, 1335, 1442, 1469, 1471, 1505, |
| | | 1557, 1585, 1586, 1642 and 856594-862881. |
| 62 | Human rhinovirus B | 36, 120, 231, 276, 284, 286, 290, 347, 356, 454, 463, 488, 544, 548, 566, 579, |
| | | 585, 616, 625, 643, 653, 663, 676, 694, 813, 839, 855, 876, 894, 909, 920, 980, |
| | | 1029, 1062, 1079, 1092, 1101, 1118, 1139, 1140, 1144, 1163, 1168, 1173, 1187, |
| | | 1190, 1195, 1208, 1258, 1293, 1315, 1325, 1332, 1335, 1442, 1469, 1471, 1505, |
| | | 1557, 1585, 1586, 1642 and 862882-869169. |
| 63 | Human T-lymphotropic | 2, 5, 6, 8, 9, 10, 11, 13, 15, 19, 20, 22, 23, 24, 25, 27, 29, 31, 32, 33, 35, |
| | virus 1 | 36, 39, 40, 41, 42, 47, 48, 50, 51, 52, 56, 57, 60, 61, 63, 66, 67, 68, 70, 73, |
| | | 74, 75, 76, 77, 78, 79, 81, 84, 85, 86, 88, 89, 92, 94, 96, 97, 99, 100, 101, |
| | | 105, 108, 113, 114, 117, 120, 121, 123, 124, 125, 127, 128, 130, 134, 135, 139, |
| | | 141, 143, 144, 145, 150, 151, 155, 166, 167, 168, 169, 171, 173, 174, 177, 178, |
| | | 188, 189, 190, 191, 195, 197, 202, 203, 204, 205, 207, 208, 210, 212, 213, 216, |
| | | 217, 218, 219, 221, 222, 223, 225, 228, 231, 233, 234, 236, 237, 239, 240, 241, |
| | | 244, 246, 247, 248, 249, 252, 253, 257, 260, 262, 266, 267, 269, 270, 271, 272, |
| | | 276, 277, 278, 279, 280, 281, 285, 286, 290, 293, 296, 300, 303, 304, 306, 307, |
| | | 310, 315, 316, 317, 321, 323, 324, 325, 327, 328, 334, 336, 339, 340, 341, 344, |
| | | 345, 346, 347, 348, 350, 351, 353, 356, 357, 358, 359, 360, 361, 364, 366, 367, |
| | | 370, 371, 373, 376, 378, 379, 380, 382, 384, 387, 389, 391, 393, 394, 397, 398, |
| | | 399, 400, 401, 404, 405, 407, 409, 410, 413, 418, 419, 421, 424, 425, 426, 429, |
| | | 431, 432, 433, 434, 436, 437, 441, 442, 443, 444, 446, 447, 449, 450, 454, 458, |
| | | 459, 462, 463, 464, 465, 466, 467, 468, 470, 474, 478, 482, 484, 485, 486, 488, |
| | | 491, 492, 493, 500, 502, 505, 507, 509, 512, 513, 515, 516, 518, 519, 520, 521, |
| | | 526, 529, 537, 539, 541, 544, 551, 552, 553, 558, 561, 563, 564, 569, 572, 573, |
| | | 575, 576, 577, 579, 582, 583, 585, 586, 587, 594, 596, 598, 601, 603, 604, 605, |
| | | 607, 608, 610, 611, 612, 613, 616, 617, 619, 623, 624, 625, 626, 627, 634, 635, |
| | | 637, 638, 639, 640, 641, 643, 645, 649, 651, 652, 654, 656, 657, 658, 659, 661, |
| | | 667, 669, 671, 672, 673, 676, 680, 684, 688, 689, 691, 692, 693, 696, 701, 705, |
| | | 707, 710, 711, 713, 714, 715, 716, 720, 722, 725, 726, 729, 731, 734, 736, 737, |
| | | 742, 744, 745, 746, 747, 749, 750, 754, 755, 757, 759, 760, 761, 764, 766, 767, |
| | | 775, 777, 779, 781, 783, 784, 785, 787, 788, 789, 800, 801, 802, 803, 808, 809, |
| | | 812, 813, 814, 817, 818, 822, 823, 827, 828, 829, 830, 836, 838, 839, 842, 846, |
| | | 847, 849, 850, 854, 855, 858, 859, 860, 861, 862, 867, 868, 869, 872, 873, 874, |
| | | 875, 876, 877, 879, 880, 881, 882, 883, 884, 886, 887, 889, 891, 894, 900, 901, |
| | | 902, 903, 906, 908, 909, 910, 911, 914, 917, 918, 919, 920, 924, 927, 928, 929, |
| | | 930, 931, 932, 935, 938, 943, 945, 946, 947, 953, 954, 955, 959, 960, 961, 962, |
| | | 963, 966, 967, 970, 971, 973, 975, 977, 978, 979, 980, 982, 983, 984, 985, 986, |
| | | 988, 989, 993, 995, 997, 998, 1005, 1006, 1007, 1008, 1009, 1011, 1014, 1015, |
| | | 1016, 1017, 1019, 1020, 1022, 1033, 1035, 1037, 1038, 1040, 1046, 1047, 1050, |
| | | 1052, 1053, 1055, 1056, 1058, 1062, 1063, 1065, 1067, 1068, 1069, 1071, 1076, |
| | | 1077, 1078, 1083, 1086, 1087, 1088, 1090, 1092, 1095, 1099, 1100, 1101, 1102, |
| | | 1103, 1105, 1106, 1107, 1113, 1114, 1116, 1117, 1118, 1119, 1122, 1123, 1127, |
| | | 1128, 1129, 1130, 1131, 1132, 1133, 1134, 1135, 1139, 1140, 1142, 1144, 1147, |
| | | 1149, 1152, 1153, 1155, 1156, 1157, 1159, 1160, 1161, 1162, 1163, 1165, 1166, |
| | | 1168, 1172, 1173, 1174, 1175, 1177, 1178, 1180, 1181, 1182, 1183, 1184, 1185, |
| | | 1187, 1188, 1190, 1194, 1195, 1196, 1197, 1198, 1199, 1200, 1201, 1204, 1205, |
| | | 1206, 1210, 1211, 1212, 1215, 1217, 1218, 1219, 1220, 1222, 1223, 1224, 1225, |
| | | 1227, 1233, 1235, 1237, 1238, 1242, 1243, 1244, 1249, 1251, 1252, 1255, 1257, |
| | | 1258, 1261, 1265, 1268, 1270, 1273, 1275, 1276, 1278, 1282, 1284, 1285, 1286, |
| | | 1289, 1293, 1294, 1297, 1299, 1300, 1301, 1304, 1305, 1310, 1312, 1321, 1326, |
| | | 1327, 1328, 1330, 1331, 1333, 1335, 1337, 1338, 1339, 1346, 1347, 1348, 1349, |
| | | 1351, 1353, 1354, 1355, 1356, 1358, 1359, 1363, 1364, 1370, 1374, 1380, 1381, |
| | | 1384, 1385, 1389, 1390, 1391, 1392, 1393, 1394, 1395, 1396, 1397, 1398, 1403, |
| | | 1405, 1406, 1409, 1411, 1412, 1414, 1416, 1417, 1418, 1419, 1422, 1423, 1424, |
| | | 1426, 1427, 1428, 1429, 1430, 1431, 1432, 1433, 1438, 1442, 1444, 1446, 1447, |
| | | 1450, 1451, 1452, 1453, 1459, 1460, 1461, 1462, 1466, 1467, 1469, 1473, 1475, |
| | | 1476, 1477, 1478, 1479, 1480, 1482, 1483, 1484, 1485, 1486, 1487, 1488, 1490, |
| | | 1497, 1499, 1500, 1502, 1504, 1505, 1506, 1507, 1509, 1511, 1512, 1513, 1515, |
| | | 1517, 1520, 1522, 1523, 1524, 1525, 1526, 1531, 1532, 1533, 1537, 1538, 1543, |
| | | 1547, 1549, 1551, 1552, 1553, 1554, 1556, 1557, 1560, 1561, 1562, 1569, 1571, |
| | | 1572, 1574, 1579, 1580, 1584, 1585, 1586, 1588, 1589, 1592, 1594, 1598, 1604, |
| | | 1606, 1607, 1612, 1613, 1614, 1616, 1619, 1621, 1622, 1626, 1627, 1629, 1630, |
| | | 1631, 1632, 1633, 1634, 1636, 1638, 1640, 1642, 1643, 1646, 1652, 1654, 1655, |
| | | 1657, 1658, 1660, 1665, 1669, 1670 and 869170-930394. |
| 64 | Human T-lymphotropic | 9, 19, 26, 51, 58, 91, 102, 124, 148, 153, 174, 192, 196, 200, 203, 218, 223, |
| | virus 2 | 276, 290, 292, 296, 302, 316, 340, 345, 349, 369, 380, 382, 404, 421, 426, 432, |
| | | 437, 444, 447, 456, 459, 466, 477, 480, 485, 504, 525, 526, 530, 545, 548, 553, |
| | | 554, 571, 586, 591, 602, 625, 654, 692, 719, 750, 779, 785, 790, 793, 798, 802, |
| | | 805, 813, 824, 825, 834, 850, 851, 862, 872, 879, 883, 903, 952, 973, 978, 993, |
| | | 997, 999, 1022, 1029, 1035, 1036, 1042, 1059, 1063, 1067, 1069, 1072, 1075, |
| | | 1077, 1083, 1084, 1094, 1108, 1133, 1139, 1143, 1146, 1197, 1201, 1204, 1208, |
| | | 1222, 1224, 1250, 1253, 1265, 1279, 1287, 1298, 1300, 1301, 1303, 1316, 1333, |
| | | 1336, 1348, 1353, 1359, 1363, 1365, 1373, 1419, 1427, 1430, 1436, 1444, 1486, |
| | | 1499, 1504, 1511, 1537, 1545, 1560, 1561, 1566, 1579, 1585, 1588, 1589, 1610, |
| | | 1636, 1637, 1647, 1650, 1651, 1668 and 930395-933934. |
| 65 | Influenza A virus | 4, 7, 11, 20, 23, 24, 29, 31, 35, 36, 37, 43, 47, 48, 49, 51, 66, 67, 68, 70, |
| | | 73, 74, 77, 78, 96, 114, 120, 122, 133, 143, 148, 154, 169, 171, 174, 187, 188, |
| | | 189, 190, 200, 203, 207, 212, 219, 221, 231, 234, 239, 240, 247, 252, 253, 257, |
| | | 261, 262, 263, 266, 276, 277, 279, 284, 286, 289, 290, 291, 295, 303, 304, 310, |
| | | 315, 321, 323, 325, 332, 334, 336, 339, 347, 356, 357, 366, 370, 374, 376, 380, |
| | | 394, 395, 396, 399, 400, 401, 405, 413, 416, 424, 429, 431, 433, 437, 441, 443, |
| | | 446, 453, 454, 462, 463, 465, 466, 481, 484, 488, 500, 507, 509, 510, 512, 515, |
| | | 518, 523, 526, 537, 541, 544, 547, 548, 551, 553, 555, 559, 561, 566, 567, 574, |
| | | 575, 577, 579, 585, 587, 594, 605, 607, 610, 612, 616, 617, 624, 625, 627, 635, |
| | | 640, 643, 646, 652, 653, 654, 661, 663, 667, 676, 681, 684, 694, 701, 709, 710, |
| | | 713, 715, 720, 731, 734, 737, 746, 749, 754, 756, 760, 763, 773, 776, 777, 781, |
| | | 785, 786, 792, 801, 803, 804, 811, 813, 829, 838, 839, 840, 846, 847, 854, 855, |
| | | 856, 862, 868, 873, 876, 881, 882, 884, 886, 889, 894, 909, 911, 914, 920, 924, |
| | | 925, 927, 935, 936, 938, 954, 960, 962, 966, 969, 973, 977, 979, 980, 985, 988, |
| | | 998, 1006, 1008, 1010, 1019, 1020, 1029, 1037, 1038, 1040, 1047, 1049, 1058, |
| | | 1062, 1065, 1069, 1070, 1078, 1079, 1084, 1086, 1090, 1092, 1096, 1101, 1105, |
| | | 1106, 1118, 1123, 1126, 1129, 1133, 1138, 1139, 1140, 1144, 1152, 1153, 1159, |
| | | 1163, 1168, 1171, 1172, 1173, 1187, 1190, 1195, 1196, 1204, 1205, 1208, 1210, |
| | | 1212, 1218, 1219, 1225, 1233, 1239, 1245, 1251, 1254, 1257, 1258, 1262, 1265, |
| | | 1268, 1270, 1271, 1274, 1284, 1290, 1293, 1297, 1299, 1306, 1312, 1315, 1318, |
| | | 1321, 1325, 1326, 1328, 1330, 1332, 1335, 1338, 1339, 1349, 1353, 1363, 1364, |
| | | 1390, 1391, 1392, 1411, 1412, 1416, 1423, 1424, 1426, 1429, 1432, 1442, 1456, |
| | | 1459, 1465, 1467, 1469, 1471, 1473, 1476, 1481, 1484, 1485, 1487, 1488, 1503, |
| | | 1505, 1507, 1511, 1526, 1538, 1543, 1549, 1552, 1562, 1574, 1578, 1579, 1580, |
| | | 1584, 1585, 1586, 1589, 1606, 1617, 1631, 1633, 1635, 1636, 1637, 1639, 1640, |
| | | 1642, 1643, 1653, 1654, 1656, 1663, 1665, 1669 and 933935-955071. |
| 66 | Influenza B virus | 4, 7, 11, 20, 23, 24, 29, 31, 35, 36, 37, 43, 47, 48, 49, 51, 66, 67, 68, 70, |
| | | 73, 74, 77, 78, 96, 114, 120, 122, 133, 143, 148, 154, 169, 171, 174, 187, 188, |
| | | 189, 190, 200, 203, 207, 212, 219, 221, 231, 234, 239, 240, 247, 252, 253, 257, |
| | | 261, 262, 263, 266, 276, 277, 279, 284, 286, 289, 290, 291, 295, 303, 304, 310, |
| | | 315, 321, 323, 325, 332, 334, 336, 339, 347, 356, 357, 366, 370, 374, 376, 380, |
| | | 394, 395, 396, 399, 400, 401, 405, 413, 416, 424, 429, 431, 433, 437, 441, 443, |
| | | 446, 453, 454, 462, 463, 465, 466, 481, 484, 488, 500, 507, 509, 510, 512, 515, |
| | | 518, 523, 526, 537, 541, 544, 547, 548, 551, 553, 555, 559, 561, 566, 567, 574, |
| | | 575, 577, 579, 585, 587, 594, 605, 607, 610, 612, 616, 617, 624, 625, 627, 635, |
| | | 640, 643, 646, 652, 653, 654, 661, 663, 667, 676, 681, 684, 694, 701, 709, 710, |
| | | 713, 715, 720, 731, 734, 737, 746, 749, 754, 756, 760, 763, 773, 776, 777, 781, |
| | | 785, 786, 792, 801, 803, 804, 811, 813, 829, 838, 839, 840, 846, 847, 854, 855, |
| | | 856, 862, 868, 873, 876, 881, 882, 884, 886, 889, 894, 909, 911, 914, 920, 924, |
| | | 925, 927, 935, 936, 938, 954, 960, 962, 966, 969, 973, 977, 979, 980, 985, 988, |
| | | 998, 1006, 1008, 1010, 1019, 1020, 1029, 1037, 1038, 1040, 1047, 1049, 1058, |
| | | 1062, 1065, 1069, 1070, 1078, 1079, 1084, 1086, 1090, 1092, 1096, 1101, 1105, |
| | | 1106, 1118, 1123, 1126, 1129, 1133, 1138, 1139, 1140, 1144, 1152, 1153, 1159, |
| | | 1163, 1168, 1171, 1172, 1173, 1187, 1190, 1195, 1196, 1204, 1205, 1208, 1210, |
| | | 1212, 1218, 1219, 1225, 1233, 1239, 1245, 1251, 1254, 1257, 1258, 1262, 1265, |
| | | 1268, 1270, 1271, 1274, 1284, 1290, 1293, 1297, 1299, 1306, 1312, 1315, 1318, |
| | | 1321, 1325, 1326, 1328, 1330, 1332, 1335, 1338, 1339, 1349, 1353, 1363, 1364, |
| | | 1390, 1391, 1392, 1411, 1412, 1416, 1423, 1424, 1426, 1429, 1432, 1442, 1456, |
| | | 1459, 1465, 1467, 1469, 1471, 1473, 1476, 1481, 1484, 1485, 1487, 1488, 1503, |
| | | 1505, 1507, 1511, 1526, 1538, 1543, 1549, 1552, 1562, 1574, 1578, 1579, 1580, |
| | | 1584, 1585, 1586, 1589, 1606, 1617, 1631, 1633, 1635, 1636, 1637, 1639, 1640, |
| | | 1642, 1643, 1653, 1654, 1656, 1663, 1665, 1669 and 959226-980361. |
| 67 | Japanese encephalitis | 4, 7, 11, 20, 23, 24, 29, 31, 35, 37, 43, 47, 48, 49, 51, 66, 67, 70, 73, 74, |
| | virus | 77, 78, 96, 114, 120, 124, 143, 148, 154, 169, 171, 174, 187, 188, 189, 196, |
| | | 200, 203, 207, 212, 219, 231, 234, 239, 240, 247, 252, 261, 262, 263, 265, 277, |
| | | 279, 289, 290, 291, 295, 303, 304, 310, 315, 321, 323, 325, 332, 334, 336, 339, |
| | | 347, 356, 357, 363, 366, 370, 374, 376, 380, 387, 388, 394, 395, 396, 399, 400, |
| | | 401, 405, 413, 416, 424, 429, 431, 433, 437, 441, 443, 446, 453, 454, 462, 465, |
| | | 466, 481, 484, 500, 507, 509, 510, 515, 518, 526, 537, 541, 544, 545, 547, 551, |
| | | 553, 561, 567, 574, 575, 577, 579, 587, 594, 605, 607, 610, 612, 617, 624, 627, |
| | | 629, 635, 640, 652, 654, 661, 667, 676, 681, 684, 701, 702, 709, 710, 713, 715, |
| | | 720, 731, 734, 737, 746, 749, 754, 756, 760, 763, 773, 776, 777, 785, 786, 792, |
| | | 801, 803, 804, 811, 813, 815, 829, 838, 839, 840, 846, 847, 854, 856, 861, 862, |
| | | 868, 873, 876, 879, 882, 886, 889, 909, 911, 914, 924, 925, 927, 935, 936, 938, |
| | | 954, 960, 962, 964, 966, 969, 973, 977, 979, 981, 985, 988, 998, 999, 1006, |
| | | 1008, 1019, 1020, 1036, 1037, 1038, 1040, 1047, 1049, 1058, 1062, 1065, 1069, |
| | | 1070, 1078, 1084, 1086, 1090, 1096, 1101, 1105, 1106, 1113, 1123, 1129, 1133, |
| | | 1138, 1139, 1150, 1152, 1153, 1159, 1162, 1163, 1168, 1171, 1172, 1190, 1196, |
| | | 1204, 1205, 1212, 1219, 1225, 1239, 1245, 1251, 1254, 1257, 1258, 1262, 1268, |
| | | 1269, 1270, 1271, 1274, 1277, 1284, 1287, 1290, 1293, 1294, 1297, 1299, 1306, |
| | | 1312, 1321, 1326, 1328, 1330, 1332, 1335, 1338, 1339, 1349, 1353, 1363, 1364, |
| | | 1390, 1391, 1392, 1407, 1411, 1412, 1416, 1419, 1423, 1424, 1426, 1432, 1456, |
| | | 1459, 1465, 1467, 1469, 1473, 1476, 1481, 1485, 1487, 1488, 1493, 1503, 1507, |
| | | 1511, 1521, 1526, 1549, 1552, 1562, 1567, 1574, 1578, 1579, 1580, 1584, 1589, |
| | | 1606, 1617, 1631, 1633, 1635, 1637, 1639, 1640, 1643, 1654, 1656, 1665, 1669 and |
| | | 982439-998310. |
| 68 | JC virus | 36, 40, 50, 116, 244, 466, 529, 656, 696, 766, 817, 832, 872, 887, 971, 1050, |
| | | 1129, 1483, 1523, 1640, 1642 and 998311-1001489. |
| 69 | Machupo virus | 166, 323, 462, 478, 484, 541, 553, 559, 798, 867, 1057, 1063, 1069, 1484, 1560 |
| | | and 1001490-1002112. |
| 70 | Marburg virus | 45, 63, 64, 68, 140, 166, 169, 189, 196, 197, 201, 204, 229, 233, 237, 238, 271, |
| | | 310, 316, 323, 326, 353, 366, 376, 378, 416, 448, 450, 462, 466, 478, 484, 541, |
| | | 553, 557, 559, 569, 570, 614, 625, 626, 641, 656, 657, 669, 714, 720, 743, 760, |
| | | 770, 798, 838, 853, 856, 859, 864, 867, 875, 887, 901, 909, 935, 954, 1002, |
| | | 1005, 1015, 1029, 1047, 1057, 1063, 1069, 1094, 1134, 1138, 1185, 1186, 1195, |
| | | 1198, 1199, 1205, 1222, 1239, 1276, 1285, 1299, 1308, 1328, 1340, 1344, 1351, |
| | | 1358, 1372, 1373, 1386, 1400, 1402, 1406, 1484, 1488, 1508, 1545, 1560, 1611, |
| | | 1623, 1638, 1642 and 1002113-1007260. |
| 71 | Measles virus | 4, 11, 20, 21, 23, 24, 26, 29, 31, 35, 36, 37, 43, 47, 48, 49, 51, 65, 66, 67, |
| | | 70, 73, 74, 77, 78, 84, 89, 96, 101, 105, 114, 120, 140, 143, 148, 154, 169, |
| | | 171, 174, 183, 187, 188, 189, 197, 198, 200, 201, 203, 212, 219, 229, 231, 234, |
| | | 239, 240, 247, 248, 250, 252, 253, 257, 258, 261, 262, 276, 277, 279, 284, 286, |
| | | 289, 290, 292, 295, 303, 304, 306, 309, 310, 315, 321, 323, 334, 336, 339, 342, |
| | | 347, 349, 350, 353, 356, 357, 363, 364, 366, 370, 374, 376, 377, 378, 380, 386, |
| | | 388, 389, 394, 395, 396, 399, 400, 401, 405, 413, 415, 416, 421, 424, 429, 431, |
| | | 433, 437, 441, 443, 445, 446, 450, 452, 453, 454, 462, 463, 465, 466, 475, 479, |
| | | 481, 484, 485, 496, 497, 500, 507, 509, 510, 515, 518, 526, 537, 541, 544, 547, |
| | | 551, 553, 559, 561, 563, 566, 567, 572, 574, 575, 577, 579, 585, 587, 594, 605, |
| | | 607, 610, 612, 614, 615, 616, 617, 624, 625, 627, 635, 640, 641, 645, 646, 652, |
| | | 653, 654, 658, 661, 662, 663, 667, 676, 678, 681, 684, 691, 694, 695, 701, 709, |
| | | 710, 713, 715, 720, 731, 734, 737, 742, 746, 749, 754, 756, 760, 763, 765, 769, |
| | | 770, 771, 773, 775, 776, 777, 779, 781, 783, 786, 801, 803, 804, 811, 813, 821, |
| | | 829, 831, 838, 839, 840, 843, 846, 847, 850, 854, 856, 862, 868, 872, 873, 876, |
| | | 881, 882, 884, 886, 889, 901, 909, 911, 914, 920, 924, 925, 927, 935, 936, 938, |
| | | 942, 945, 950, 954, 960, 962, 966, 969, 973, 977, 978, 979, 980, 981, 985, 988, |
| | | 991, 998, 1002, 1006, 1008, 1010, 1019, 1020, 1037, 1038, 1040, 1047, 1049, |
| | | 1053, 1058, 1062, 1065, 1069, 1070, 1079, 1084, 1086, 1088, 1090, 1093, 1096, |
| | | 1101, 1102, 1103, 1106, 1109, 1122, 1123, 1129, 1133, 1134, 1138, 1139, 1140, |
| | | 1141, 1144, 1146, 1152, 1153, 1154, 1159, 1163, 1168, 1170, 1172, 1181, 1185, |
| | | 1190, 1195, 1196, 1198, 1199, 1204, 1205, 1210, 1212, 1214, 1219, 1221, 1222, |
| | | 1225, 1234, 1239, 1245, 1251, 1254, 1257, 1258, 1262, 1265, 1268, 1270, 1271, |
| | | 1274, 1276, 1284, 1290, 1293, 1294, 1297, 1299, 1300, 1306, 1315, 1317, 1318, |
| | | 1321, 1328, 1330, 1331, 1335, 1338, 1339, 1349, 1351, 1353, 1363, 1364, 1368, |
| | | 1373, 1390, 1391, 1392, 1406, 1411, 1412, 1416, 1423, 1424, 1426, 1429, 1431, |
| | | 1432, 1456, 1459, 1464, 1467, 1469, 1473, 1476, 1481, 1485, 1487, 1488, 1490, |
| | | 1501, 1503, 1505, 1507, 1508, 1509, 1511, 1521, 1526, 1538, 1549, 1552, 1562, |
| | | 1567, 1574, 1578, 1579, 1580, 1584, 1585, 1586, 1606, 1611, 1617, 1619, 1631, |
| | | 1633, 1636, 1637, 1639, 1640, 1642, 1643, 1648, 1654, 1656, 1665, 1669 and |
| | | 1007261-1027883. |
| 72 | Molluscum contagiosum | 1, 4, 7, 12, 18, 20, 23, 26, 27, 32, 33, 35, 41, 43, 44, 46, 51, 53, 54, 58, 59, |
| | virus | 61, 69, 72, 73, 74, 77, 81, 84, 89, 90, 93, 95, 97, 99, 100, 103, 107, 111, 115, |
| | | 117, 119, 121, 123, 125, 128, 129, 134, 137, 140, 141, 143, 144, 148, 149, 151, |
| | | 152, 155, 161, 162, 164, 165, 167, 173, 174, 176, 181, 182, 183, 184, 186, 191, |
| | | 192, 194, 198, 202, 203, 206, 207, 211, 212, 216, 217, 218, 219, 220, 224, 225, |
| | | 227, 228, 230, 231, 232, 233, 240, 245, 247, 248, 252, 253, 255, 256, 257, 258, |
| | | 259, 260, 264, 265, 267, 268, 269, 274, 275, 277, 282, 283, 286, 287, 288, 290, |
| | | 291, 292, 297, 300, 302, 303, 306, 307, 310, 311, 313, 314, 316, 318, 319, 321, |
| | | 322, 323, 324, 326, 327, 329, 332, 334, 340, 343, 345, 346, 351, 354, 355, 357, |
| | | 360, 361, 362, 365, 370, 373, 377, 380, 381, 382, 384, 385, 386, 387, 397, 401, |
| | | 402, 403, 405, 406, 407, 409, 411, 415, 416, 418, 419, 423, 424, 429, 432, 434, |
| | | 437, 438, 439, 441, 445, 447, 457, 464, 469, 470, 472, 473, 478, 480, 481, 483, |
| | | 485, 486, 489, 490, 492, 493, 495, 496, 499, 501, 503, 504, 511, 512, 513, 514, |
| | | 522, 523, 524, 529, 530, 532, 533, 535, 540, 541, 542, 543, 544, 550, 553, 559, |
| | | 562, 566, 572, 574, 575, 582, 584, 586, 587, 589, 591, 594, 595, 600, 601, 605, |
| | | 613, 614, 615, 616, 618, 626, 630, 632, 637, 642, 643, 648, 650, 658, 660, 661, |
| | | 667, 670, 677, 678, 679, 682, 694, 695, 696, 697, 699, 710, 712, 714, 718, 719, |
| | | 720, 723, 724, 728, 732, 733, 736, 738, 741, 746, 750, 755, 759, 760, 765, 768, |
| | | 771, 776, 777, 778, 779, 783, 785, 790, 792, 793, 798, 799, 800, 801, 803, 804, |
| | | 805, 809, 812, 813, 815, 819, 839, 840, 843, 845, 848, 850, 852, 855, 856, 864, |
| | | 869, 872, 874, 876, 879, 880, 882, 883, 886, 890, 892, 893, 895, 897, 900, 901, |
| | | 911, 916, 921, 924, 925, 927, 929, 932, 933, 935, 939, 940, 941, 942, 944, 948, |
| | | 949, 951, 956, 957, 958, 959, 960, 962, 974, 975, 976, 977, 978, 980, 981, 991, |
| | | 992, 993, 997, 999, 1001, 1004, 1008, 1012, 1014, 1015, 1017, 1018, 1023, 1026, |
| | | 1028, 1029, 1032, 1033, 1035, 1038, 1039, 1040, 1043, 1047, 1049, 1062, 1067, |
| | | 1069, 1072, 1075, 1076, 1077, 1079, 1083, 1088, 1089, 1091, 1093, 1098, 1102, |
| | | 1109, 1115, 1118, 1120, 1121, 1126, 1128, 1129, 1131, 1133, 1136, 1137, 1139, |
| | | 1152, 1153, 1154, 1155, 1163, 1167, 1170, 1177, 1179, 1181, 1185, 1187, 1191, |
| | | 1192, 1194, 1197, 1201, 1205, 1206, 1207, 1209, 1215, 1218, 1219, 1222, 1223, |
| | | 1224, 1225, 1226, 1227, 1230, 1233, 1239, 1240, 1245, 1249, 1253, 1254, 1255, |
| | | 1258, 1263, 1264, 1268, 1273, 1277, 1281, 1284, 1287, 1289, 1291, 1292, 1294, |
| | | 1300, 1301, 1303, 1307, 1310, 1316, 1317, 1318, 1320, 1321, 1324, 1327, 1328, |
| | | 1330, 1331, 1333, 1334, 1336, 1337, 1340, 1341, 1342, 1345, 1346, 1348, 1352, |
| | | 1355, 1356, 1358, 1359, 1360, 1363, 1366, 1367, 1370, 1375, 1378, 1382, 1387, |
| | | 1389, 1391, 1396, 1399, 1405, 1406, 1408, 1410, 1411, 1412, 1414, 1416, 1420, |
| | | 1421, 1422, 1423, 1426, 1433, 1435, 1436, 1438, 1439, 1442, 1443, 1444, 1447, |
| | | 1448, 1454, 1455, 1458, 1459, 1462, 1466, 1467, 1469, 1472, 1473, 1474, 1480, |
| | | 1481, 1482, 1485, 1490, 1492, 1498, 1499, 1504, 1508, 1514, 1515, 1518, 1519, |
| | | 1528, 1529, 1530, 1533, 1535, 1537, 1538, 1541, 1546, 1551, 1555, 1559, 1572, |
| | | 1575, 1577, 1580, 1581, 1582, 1583, 1591, 1592, 1597, 1598, 1600, 1604, 1609, |
| | | 1624, 1628, 1631, 1634, 1636, 1638, 1642, 1643, 1644, 1647, 1648, 1650, 1651, |
| | | 1652, 1653, 1654, 1664, 1665, 1667, 1668, 1669, 1671 and 1027884-1030599. |
| 73 | Murray Valley encephalitis | 4, 11, 20, 23, 24, 29, 31, 35, 37, 43, 47, 48, 49, 51, 66, 67, 70, 73, 74, 77, |
| | virus | 78, 90, 96, 114, 120, 143, 148, 169, 171, 174, 176, 187, 188, 189, 196, 200, |
| | | 203, 212, 219, 234, 239, 240, 247, 252, 261, 262, 277, 279, 289, 290, 295, 303, |
| | | 304, 310, 315, 321, 323, 325, 334, 336, 339, 347, 356, 357, 363, 366, 370, 374, |
| | | 376, 380, 387, 388, 394, 395, 396, 399, 400, 401, 405, 413, 416, 424, 429, 431, |
| | | 433, 437, 441, 443, 446, 453, 454, 462, 465, 466, 481, 484, 500, 507, 509, 510, |
| | | 515, 518, 526, 528, 537, 541, 544, 545, 547, 551, 553, 561, 567, 574, 575, 577, |
| | | 579, 587, 594, 605, 607, 610, 612, 617, 624, 627, 635, 640, 652, 654, 661, 667, |
| | | 676, 681, 684, 701, 709, 710, 713, 715, 720, 731, 734, 737, 746, 749, 754, 756, |
| | | 760, 763, 773, 776, 777, 786, 801, 803, 804, 811, 813, 829, 838, 839, 840, 846, |
| | | 847, 854, 856, 862, 868, 873, 876, 879, 882, 886, 889, 909, 911, 914, 924, 925, |
| | | 927, 935, 936, 938, 954, 960, 962, 964, 966, 969, 973, 977, 979, 985, 987, 988, |
| | | 998, 999, 1006, 1008, 1019, 1020, 1022, 1037, 1038, 1040, 1049, 1058, 1062, |
| | | 1065, 1069, 1070, 1084, 1086, 1090, 1096, 1101, 1106, 1123, 1129, 1133, 1138, |
| | | 1139, 1152, 1153, 1159, 1162, 1163, 1168, 1172, 1190, 1196, 1204, 1205, 1212, |
| | | 1219, 1225, 1239, 1245, 1251, 1254, 1257, 1258, 1262, 1268, 1270, 1271, 1274, |
| | | 1284, 1290, 1293, 1297, 1299, 1306, 1321, 1328, 1330, 1335, 1338, 1339, 1349, |
| | | 1353, 1363, 1364, 1390, 1391, 1392, 1407, 1411, 1412, 1416, 1419, 1423, 1424, |
| | | 1426, 1432, 1456, 1459, 1467, 1469, 1473, 1476, 1481, 1485, 1487, 1488, 1503, |
| | | 1507, 1511, 1521, 1526, 1549, 1552, 1574, 1578, 1579, 1580, 1584, 1606, 1617, |
| | | 1631, 1633, 1637, 1639, 1640, 1643, 1654, 1656, 1665, 1669 and 1030600-1044555. |
| 74 | Norwalk virus | 148, 197, 299, 337, 401, 420, 430, 450, 466, 636, 781, 812, 824, 844, 883, 901, |
| | | 915, 929, 937, 954, 1128, 1198, 1224, 1320, 1339, 1585, 1610 and |
| | | 1044556-1045454. |
| 75 | Poliovirus | 143, 154, 166, 207, 223, 239, 307, 383, 459, 533, 553, 583, 611, 683, 795, 827, |
| | | 855, 876, 883, 914, 1126, 1140, 1194, 1212, 1258, 1305, 1312, 1324, 1332, 1333, |
| | | 1363, 1497, 1557, 1636, 1651 and 1045455-1048772. |
| 76 | Puumala virus | 63, 166, 271, 323, 462, 478, 484, 541, 553, 559, 569, 570, 798, 867, 1057, 1063, |
| | | 1069, 1285, 1484, 1560 and 1048773-1049751. |
| 77 | Respiratory syncytial | 5, 36, 61, 67, 72, 96, 109, 120, 132, 135, 201, 225, 231, 263, 269, 276, 284, |
| | virus | 286, 290, 291, 302, 316, 319, 321, 325, 327, 332, 347, 349, 350, 356, 359, 360, |
| | | 364, 367, 369, 381, 382, 386, 399, 403, 404, 408, 412, 426, 430, 433, 454, 461, |
| | | 462, 463, 465, 466, 470, 473, 479, 488, 502, 540, 544, 548, 553, 559, 566, 567, |
| | | 579, 585, 616, 625, 627, 643, 653, 663, 676, 680, 694, 701, 712, 716, 746, 759, |
| | | 765, 785, 792, 802, 813, 820, 826, 829, 831, 839, 855, 873, 887, 894, 896, 909, |
| | | 920, 932, 938, 947, 958, 980, 991, 1003, 1009, 1028, 1029, 1038, 1047, 1058, |
| | | 1062, 1078, 1079, 1092, 1093, 1101, 1105, 1118, 1132, 1135, 1138, 1139, 1140, |
| | | 1141, 1144, 1152, 1154, 1157, 1163, 1166, 1168, 1171, 1173, 1185, 1186, 1187, |
| | | 1190, 1195, 1208, 1220, 1222, 1227, 1241, 1258, 1275, 1276, 1283, 1293, 1315, |
| | | 1325, 1326, 1328, 1335, 1340, 1389, 1408, 1412, 1423, 1442, 1465, 1469, 1471, |
| | | 1482, 1493, 1505, 1509, 1511, 1547, 1559, 1562, 1571, 1585, 1586, 1589, 1599, |
| | | 1623, 1635, 1642, 1657 and 1049752-1058276. |
| 78 | Reston Ebola virus | 132, 310, 392, 801, 1214, 1346, 1613 and 1058277-1058330. |
| | (REBOV) | |
| 79 | Rubella virus | 4, 6, 11, 13, 20, 23, 24, 29, 30, 31, 35, 36, 37, 40, 43, 47, 48, 49, 51, 57, |
| | | 63, 64, 66, 67, 68, 70, 73, 74, 77, 78, 85, 86, 88, 92, 96, 105, 112, 114, 120, |
| | | 128, 129, 138, 141, 143, 144, 148, 150, 154, 156, 159, 164, 166, 167, 168, 169, |
| | | 171, 174, 177, 180, 184, 187, 188, 189, 192, 193, 195, 196, 200, 202, 203, 204, |
| | | 206, 207, 209, 212, 216, 218, 219, 227, 229, 231, 233, 234, 238, 239, 240, 247, |
| | | 252, 254, 256, 261, 262, 264, 265, 271, 272, 276, 277, 279, 284, 286, 290, 292, |
| | | 293, 295, 296, 303, 304, 306, 310, 315, 319, 321, 323, 326, 329, 334, 336, 339, |
| | | 340, 345, 346, 347, 356, 357, 366, 367, 370, 373, 374, 376, 380, 393, 394, 395, |
| | | 396, 399, 400, 401, 405, 413, 418, 420, 424, 429, 431, 433, 437, 439, 441, 443, |
| | | 446, 447, 448, 453, 454, 458, 462, 463, 465, 466, 467, 468, 478, 481, 482, 484, |
| | | 485, 486, 488, 492, 500, 503, 505, 507, 509, 510, 515, 517, 518, 520, 521, 526, |
| | | 532, 537, 540, 541, 544, 545, 547, 551, 553, 559, 561, 563, 564, 566, 567, 569, |
| | | 570, 574, 575, 577, 578, 579, 585, 587, 589, 594, 597, 598, 600, 604, 605, 607, |
| | | 610, 612, 614, 617, 619, 622, 624, 625, 627, 634, 635, 637, 640, 652, 653, 654, |
| | | 656, 657, 661, 663, 667, 669, 671, 676, 680, 681, 684, 693, 695, 701, 709, 710, |
| | | 713, 715, 720, 724, 727, 731, 734, 737, 740, 741, 746, 747, 748, 749, 750, 754, |
| | | 758, 760, 763, 765, 766, 773, 776, 777, 779, 786, 796, 801, 803, 808, 809, 811, |
| | | 813, 817, 829, 833, 838, 839, 840, 841, 846, 847, 848, 853, 854, 855, 858, 859, |
| | | 861, 862, 867, 869, 873, 874, 875, 876, 877, 881, 882, 884, 886, 887, 889, 891, |
| | | 901, 904, 909, 911, 914, 917, 919, 920, 924, 925, 927, 928, 935, 936, 938, 946, |
| | | 947, 954, 955, 957, 959, 960, 962, 966, 968, 969, 971, 973, 977, 978, 979, 980, |
| | | 985, 988, 989, 997, 998, 999, 1001, 1005, 1006, 1008, 1009, 1013, 1017, 1019, |
| | | 1020, 1022, 1029, 1031, 1033, 1035, 1037, 1038, 1039, 1040, 1049, 1052, 1053, |
| | | 1058, 1062, 1065, 1068, 1069, 1070, 1071, 1078, 1079, 1083, 1084, 1086, 1090, |
| | | 1094, 1096, 1101, 1106, 1108, 1118, 1123, 1128, 1129, 1130, 1132, 1133, 1139, |
| | | 1140, 1144, 1145, 1152, 1153, 1159, 1161, 1163, 1166, 1168, 1172, 1174, 1180, |
| | | 1181, 1182, 1185, 1187, 1188, 1190, 1191, 1195, 1196, 1197, 1201, 1204, 1205, |
| | | 1211, 1212, 1219, 1222, 1225, 1234, 1239, 1245, 1251, 1254, 1257, 1258, 1261, |
| | | 1262, 1268, 1270, 1271, 1272, 1273, 1274, 1283, 1284, 1285, 1289, 1290, 1293, |
| | | 1297, 1299, 1306, 1307, 1308, 1315, 1317, 1321, 1327, 1328, 1330, 1335, 1338, |
| | | 1339, 1343, 1348, 1349, 1353, 1358, 1359, 1362, 1363, 1364, 1366, 1372, 1373, |
| | | 1377, 1380, 1385, 1386, 1390, 1391, 1392, 1398, 1400, 1402, 1403, 1406, 1410, |
| | | 1411, 1412, 1423, 1424, 1425, 1426, 1427, 1428, 1432, 1436, 1437, 1442, 1444, |
| | | 1445, 1456, 1457, 1459, 1460, 1466, 1467, 1469, 1473, 1476, 1477, 1481, 1485, |
| | | 1486, 1487, 1488, 1492, 1495, 1505, 1507, 1508, 1509, 1511, 1513, 1520, 1521, |
| | | 1523, 1526, 1527, 1541, 1544, 1547, 1549, 1553, 1566, 1569, 1574, 1578, 1579, |
| | | 1580, 1582, 1585, 1586, 1594, 1597, 1600, 1606, 1607, 1611, 1612, 1616, 1617, |
| | | 1618, 1625, 1631, 1633, 1634, 1636, 1637, 1639, 1640, 1642, 1643, 1649, 1654, |
| | | 1656, 1665, 1667, 1669, 1670 and 1063298-1098229. |
| 80 | SARS coronavirus | 36, 40, 167, 173, 197, 198, 201, 226, 231, 237, 276, 284, 286, 289, 310, 342, |
| | | 347, 356, 385, 389, 418, 441, 450, 455, 463, 466, 473, 483, 504, 514, 522, 544, |
| | | 554, 566, 578, 579, 585, 616, 625, 645, 648, 653, 655, 663, 676, 694, 712, 716, |
| | | 744, 768, 807, 839, 844, 855, 909, 920, 939, 954, 980, 982, 1036, 1062, 1076, |
| | | 1079, 1093, 1101, 1118, 1128, 1144, 1158, 1171, 1195, 1198, 1209, 1221, 1231, |
| | | 1258, 1293, 1297, 1315, 1335, 1359, 1421, 1448, 1469, 1505, 1509, 1586, 1593, |
| | | 1615, 1642, 1668 and 1098230-1102172. |
| 81 | Seoul virus | 63, 166, 271, 323, 462, 478, 484, 541, 553, 559, 569, 570, 798, 867, 1057, 1063, |
| | | 1069, 1285, 1484, 1560 and 1102173-1103153. |
| 82 | Sin Nombre virus | 8, 45, 63, 166, 271, 323, 368, 462, 478, 484, 497, 541, 553, 559, 569, 570, 798, |
| | | 867, 951, 1029, 1057, 1063, 1069, 1205, 1285, 1484, 1560, 1581 and |
| | | 1103154-1104234. |
| 83 | Tula virus | 63, 231, 271, 284, 286, 347, 356, 463, 544, 566, 569, 570, 579, 585, 653, 663, |
| | | 676, 839, 909, 920, 951, 980, 1062, 1101, 1144, 1195, 1221, 1258, 1285, 1335, |
| | | 1469, 1505, 1581, 1586, 1659 and 1104235-1105729. |
| 84 | Uukuniemi virus | 29, 74, 140, 645, 652, 667, 716, 737, 949, 1164 and 1105730-1105756. |
| 85 | Vaccinia virus | 7, 8, 40, 44, 60, 61, 72, 75, 83, 112, 123, 132, 134, 144, 151, 173, 180, 201, |
| | | 226, 248, 255, 282, 289, 315, 342, 344, 349, 360, 365, 368, 378, 388, 389, 404, |
| | | 415, 440, 504, 517, 530, 536, 540, 576, 620, 626, 633, 636, 637, 639, 655, 703, |
| | | 714, 716, 722, 724, 737, 742, 769, 773, 790, 804, 805, 826, 846, 847, 856, 879, |
| | | 900, 910, 964, 982, 990, 1004, 1015, 1017, 1029, 1074, 1081, 1083, 1094, 1110, |
| | | 1133, 1138, 1154, 1157, 1158, 1195, 1199, 1221, 1222, 1223, 1241, 1242, 1255, |
| | | 1270, 1274, 1275, 1276, 1311, 1328, 1344, 1349, 1366, 1419, 1431, 1435, 1455, |
| | | 1482, 1513, 1522, 1545, 1547, 1566, 1571, 1593, 1599, 1613, 1638, 1661 and |
| | | 1105757-1107056. |
| 86 | Variola virus | 2, 7, 8, 44, 61, 132, 134, 151, 152, 164, 173, 180, 226, 237, 247, 248, 255, |
| | | 342, 344, 349, 360, 365, 368, 388, 389, 404, 414, 415, 440, 455, 464, 517, 522, |
| | | 525, 530, 536, 540, 576, 585, 586, 616, 626, 633, 640, 654, 655, 694, 703, 716, |
| | | 724, 742, 773, 782, 786, 790, 793, 804, 808, 826, 856, 883, 896, 900, 939, 957, |
| | | 958, 964, 1004, 1017, 1029, 1042, 1094, 1154, 1157, 1158, 1170, 1171, 1186, |
| | | 1195, 1199, 1221, 1222, 1227, 1231, 1241, 1242, 1249, 1255, 1270, 1272, 1275, |
| | | 1276, 1280, 1311, 1342, 1344, 1347, 1349, 1362, 1366, 1416, 1455, 1479, 1482, |
| | | 1522, 1547, 1551, 1566, 1599, 1638 and 1107057-1108297. |
| 87 | West Nile virus | 4, 11, 20, 23, 24, 29, 31, 35, 37, 43, 47, 48, 49, 51, 66, 67, 70, 73, 74, 77, |
| | | 78, 96, 114, 120, 143, 148, 154, 169, 171, 174, 187, 188, 189, 200, 203, 212, |
| | | 219, 234, 239, 240, 247, 252, 261, 262, 277, 279, 289, 290, 295, 303, 304, 310, |
| | | 315, 321, 323, 334, 336, 339, 347, 356, 357, 366, 370, 374, 376, 380, 394, 395, |
| | | 396, 399, 400, 401, 405, 413, 416, 424, 429, 431, 433, 437, 441, 443, 446, 453, |
| | | 454, 462, 465, 466, 481, 484, 500, 507, 509, 510, 515, 518, 526, 537, 541, 544, |
| | | 547, 551, 553, 561, 567, 574, 575, 577, 579, 587, 594, 605, 607, 610, 612, 617, |
| | | 624, 627, 635, 640, 652, 654, 661, 667, 676, 681, 684, 701, 709, 710, 713, 715, |
| | | 720, 731, 734, 737, 746, 749, 754, 756, 760, 763, 773, 776, 777, 786, 801, 803, |
| | | 804, 811, 813, 829, 838, 839, 840, 846, 847, 854, 856, 862, 868, 873, 876, 882, |
| | | 886, 889, 909, 911, 914, 924, 925, 927, 935, 936, 938, 954, 960, 962, 966, 969, |
| | | 973, 977, 979, 985, 988, 998, 1006, 1008, 1019, 1020, 1037, 1038, 1040, 1049, |
| | | 1058, 1062, 1065, 1069, 1070, 1084, 1086, 1090, 1096, 1101, 1106, 1123, 1129, |
| | | 1133, 1138, 1139, 1152, 1153, 1159, 1163, 1168, 1172, 1190, 1196, 1204, 1205, |
| | | 1212, 1219, 1225, 1239, 1245, 1251, 1254, 1257, 1258, 1262, 1268, 1270, 1271, |
| | | 1274, 1284, 1290, 1293, 1297, 1299, 1306, 1321, 1328, 1330, 1335, 1338, 1339, |
| | | 1349, 1353, 1363, 1364, 1390, 1391, 1392, 1411, 1412, 1416, 1423, 1424, 1426, |
| | | 1432, 1456, 1459, 1467, 1469, 1473, 1476, 1481, 1485, 1487, 1488, 1503, 1507, |
| | | 1511, 1526, 1549, 1552, 1574, 1578, 1579, 1580, 1584, 1606, 1617, 1631, 1633, |
| | | 1637, 1639, 1640, 1643, 1654, 1656, 1665, 1669 and 1108298-1122207. |
| 88 | Western equine encephalomyelitis virus | 4, 11, 20, 23, 24, 29, 31, 35, 37, 43, 47, 48, 49, 51, 66, 67, 70, 73, 74, 77, |
| | | 78, 96, 114, 120, 143, 148, 154, 169, 171, 174, 187, 188, 189, 200, 203, 212, |
| | | 219, 234, 239, 240, 247, 252, 261, 262, 277, 279, 289, 290, 295, 303, 304, 310, |
| | | 315, 321, 323, 334, 336, 339, 347, 356, 357, 366, 370, 374, 376, 380, 394, 395, |
| | | 396, 399, 400, 401, 405, 413, 416, 424, 429, 431, 433, 437, 441, 443, 446, 453, |
| | | 454, 462, 465, 466, 481, 484, 500, 507, 509, 510, 515, 518, 526, 529, 537, 541, |
| | | 544, 547, 551, 553, 561, 567, 574, 575, 577, 579, 587, 594, 605, 607, 610, 612, |
| | | 617, 624, 627, 635, 640, 652, 654, 661, 667, 676, 681, 684, 701, 709, 710, 713, |
| | | 715, 720, 722, 731, 734, 737, 746, 749, 754, 756, 760, 763, 773, 776, 777, 786, |
| | | 801, 803, 804, 811, 813, 829, 838, 839, 840, 846, 847, 854, 856, 862, 868, 873, |
| | | 876, 882, 886, 889, 909, 911, 914, 924, 925, 927, 935, 936, 938, 954, 960, 962, |
| | | 966, 969, 973, 977, 979, 985, 988, 998, 1006, 1008, 1019, 1020, 1037, 1038, |
| | | 1040, 1049, 1058, 1062, 1065, 1069, 1070, 1084, 1086, 1090, 1096, 1101, 1106, |
| | | 1123, 1129, 1133, 1138, 1139, 1152, 1153, 1159, 1163, 1168, 1172, 1190, 1196, |
| | | 1204, 1205, 1212, 1219, 1225, 1239, 1245, 1251, 1254, 1257, 1258, 1262, 1268, |
| | | 1270, 1271, 1274, 1284, 1290, 1293, 1297, 1299, 1306, 1321, 1328, 1330, 1335, |
| | | 1338, 1339, 1349, 1353, 1363, 1364, 1390, 1391, 1392, 1411, 1412, 1416, 1423, |
| | | 1424, 1426, 1432, 1456, 1459, 1467, 1469, 1473, 1476, 1481, 1485, 1487, 1488, |
| | | 1503, 1507, 1511, 1526, 1549, 1552, 1574, 1578, 1579, 1580, 1584, 1606, 1617, |
| | | 1631, 1633, 1637, 1639, 1640, 1643, 1654, 1656, 1665, 1669 and 1122296-1136577. |
| 89 | Yellow fever virus | 166, 323, 462, 478, 484, 541, 553, 559, 798, 867, 1057, 1063, 1069, 1484, 1560 |
| | | and 1136701-1137323. |
| 90 | Zaire Ebola virus (ZEBOV) | 563, 637, 872, 1052, 1063, 1094, 1154, 1401, 1522, 1624 and 1137324-1137407. |

[image]

[image]

[image]

[image]

[image]

[image]

[image]

[image]

[image]

The application's sequence listing, which the Patent Office published only in electronic form, follows.

SEQUENCE LISTING (4204915 sequences)

SEQ ID NO: 1 - RNA, 22 nt, Human
uuugcugccucucccagcuccc

SEQ ID NO: 2 - RNA, 17 nt, Human
cacuaguagucucuggc

SEQ ID NO: 3 - RNA, 22 nt, Human
gcuagugcagggaaaucuuugg

SEQ ID NO: 4 - RNA, 22 nt, Human
cgcugcuccgccuuguccauau

SEQ ID NO: 5 - RNA, 22 nt, Human
ccccacuguccccggagcuggc

SEQ ID NO: 6 - RNA, 22 nt, Human
ugcccuggcucuucuuguucca

SEQ ID NO: 7 - RNA, 22 nt, Human
acauucucugauuggugccucc

SEQ ID NO: 8 - RNA, 22 nt, Human
aauauuucuucuaaagcccuuu

SEQ ID NO: 9 - RNA, 22 nt, Human
guugaggugaugccagcccugc

SEQ ID NO: 10 - RNA, 22 nt, Human
ucauggggccacagcugccagc

SEQ ID NO: 11 - RNA, 22 nt, Human
ugggggacaccagucucucucu

SEQ ID NO: 12 - RNA, 20 nt, Human
ugguccccauccuugcgauu

SEQ ID NO: 13 - RNA, 22 nt, Human
uccugggaggcggagguugcag

SEQ ID NO: 14 - RNA, 22 nt, Human
agcaagaccaggguuuuguguu

SEQ ID NO: 15 - RNA, 22 nt, Human
cccaggcuggaguguaauggug

SEQ ID NO: 16 - RNA, 19 nt, Human
agccccuugguacuguccu

SEQ ID NO: 17 - RNA, 21 nt, Human
cucuguuugccugcugccauc

SEQ ID NO: 18 - RNA, 22 nt, Human
gucucccagccuacaucuuucu

SEQ ID NO: 19 - RNA, 22 nt, Human
cccggguggagccugggcugug

SEQ ID NO: 20 - RNA, 22 nt, Human
ucacugcaagcuccacccuccg

SEQ ID NO: 21 - RNA, 22 nt, Human
aacccaggagguggagguugug

SEQ ID NO: 22 - RNA, 22 nt, Human
accuugugauccaccugcuuug

SEQ ID NO: 23 - RNA, 22 nt, Human
ccggcuacucgggaggcugacg

SEQ ID NO: 24 - RNA, 22 nt, Human
cugcccuggggggccuccuugc

SEQ ID NO: 25 - RNA, 22 nt, Human
gaccucaugauccaccugccuu

SEQ ID NO: 26 - RNA, 22 nt, Human
uucucugugcuggguccugagg

SEQ ID NO: 27 - RNA, 22 nt, Human
uggguaguuuccccugcccugc

SEQ ID NO: 28 - RNA, 23 nt, Human
aaaacagcuuccuccaguggcuc

SEQ ID NO: 29 - RNA, 22 nt, Human
ucacugcacuccagccugggug

SEQ ID NO: 30 - RNA, 22 nt, Human
caccaggaggacaggccccuac

SEQ ID NO: 31 - RNA, 22 nt, Human
acgccuguaaucccagcacuuu

SEQ ID NO: 32 - RNA, 22 nt, Human
ugaccuccuuucucgacuaauu

SEQ ID NO: 33 - RNA, 22 nt, Human
ccuggcucugccacuuacugcc

SEQ ID NO: 34 - RNA, 22 nt, Human
cugcuccccagccugcgccuuu

SEQ ID NO: 35 - RNA, 22 nt, Human
cauugcacuccagccucccaua

SEQ ID NO: 36 - RNA, 22 nt, Human
uucugaugguuaaguucuguca

SEQ ID NO: 37 - RNA, 22 nt, Human
cugcaguaugagcuacccaggu

SEQ ID NO: 38 - RNA, 19 nt, Human
uaccauccaagcugguuug

SEQ ID NO: 39 - RNA, 22 nt, Human
ugguuucccuuuuggccucucc

SEQ ID NO: 40 - RNA, 18 nt, Human
acucuuucugcccacagg

SEQ ID NO: 41 - RNA, 22 nt, Human
ggcucacugcaaacugugccuc

SEQ ID NO: 42 - RNA, 22 nt, Human
accauugcccccuagugucugu

SEQ ID NO: 43 - RNA, 22 nt, Human
cauugcacuccagccuggguga

SEQ ID NO: 44 - RNA, 22 nt, Human
uuccuggucacugcuguucccu

SEQ ID NO: 45 - RNA, 22 nt, Human
gucauggugcuagcgggaaugu

SEQ ID NO: 46 - RNA, 17 nt, Human
gcgccugugccuccuaa

SEQ ID NO: 47 - RNA, 22 nt, Human
gcccuccuggcaggcagugaug

SEQ ID NO: 48 - RNA, 22 nt, Human
cuguaaucccagcuaccuggga

SEQ ID NO: 49 - RNA, 20 nt, Human
caaggguuugcauuggcuuu

SEQ ID NO: 50 - RNA, 19 nt, Human
guuucucugggcuuggcau

SEQ ID NO: 51 - RNA, 22 nt, Human
ccugggaggcugaggcugcagu

SEQ ID NO: 52 - RNA, 22 nt, Human
cacugcaagcuccaccucccgg

SEQ ID NO: 53 - RNA, 22 nt, Human
cacugcagccucgacuucccug

SEQ ID NO: 54 - RNA, 22 nt, Human
cccggguuguccgcgcguccgg

SEQ ID NO: 55 - RNA, 22 nt, Human
uagcacagggcuccucaaccca

SEQ ID NO: 56 - RNA, 22 nt, Human
uccuccccaaagcccagccugg

SEQ ID NO: 57 - RNA, 22 nt, Human
acaaagugccuccuuuuagagu

SEQ ID NO: 58 - RNA, 22 nt, Human
cccgggagguggagcuugcagu

SEQ ID NO: 59 - RNA, 22 nt, Human
cacugcacuccagccuggcgac

SEQ ID NO: 60 - RNA, 22 nt, Human
cugggcucaagugauccaccca

SEQ ID NO: 61 - RNA, 22 nt, Human
ucuuugcuauugugaauagugc

SEQ ID NO: 62 - RNA, 22 nt, Human
guaugugcugagcuuuccccgc

SEQ ID NO: 63 - RNA, 22 nt, Human
acagauucacugcacuggccau

SEQ ID NO: 64 - RNA, 22 nt, Human
caccuguaaucccagcacuuca

SEQ ID NO: 65 - RNA, 22 nt, Human
ccccuacacaccccucuuggca

SEQ ID NO: 66 - RNA, 22 nt, Human
uccuuccucugucaggcaggcc

SEQ ID NO: 67 - RNA, 22 nt, Human
caggcugaagugcaguggugug

SEQ ID NO: 68 - RNA, 22 nt, Human
cggagucuugcuauguugccca

SEQ ID NO: 69 - RNA, 22 nt, Human
gccauccugaugacaggccacu

SEQ ID NO: 70 - RNA, 22 nt, Human
gcucacugcaaccuccgccuuc

SEQ ID NO: 71 - RNA, 18 nt, Human
ucaagccauucuccugcc

SEQ ID NO: 72 - RNA, 22 nt, Human
uauuccagccgcuugagcucgc

SEQ ID NO: 73 - RNA, 22 nt, Human
gcagccugggcaacagagugag

SEQ ID NO: 74 - RNA, 22 nt, Human
ucaccaggcuggagugcagugg

SEQ ID NO: 75 - RNA, 22 nt, Human
ugugacacuggccaucuggguu

SEQ ID NO: 76 - RNA, 22 nt, Human
ugcaauccccgccucaacagga

SEQ ID NO: 77 - RNA, 22 nt, Human
ugccuguugcccaccugauaaa

SEQ ID NO: 78 - RNA, 22 nt, Human
ucacugcaaccuccaccuucag

SEQ ID NO: 79 - RNA, 22 nt, Human
ugcgcgccagcucccagguucg

SEQ ID NO: 80 - RNA, 22 nt, Human
gcgggguuccgugccccagagu

SEQ ID NO: 81 - RNA, 22 nt, Human
uugcccaggcuggagugcagug

SEQ ID NO: 82 - RNA, 22 nt, Human
accauugcacucuagccugggc

SEQ ID NO: 83 - RNA, 22 nt, Human
cuagagugcagguguaugguua

SEQ ID NO: 84 - RNA, 22 nt, Human
ugugcuggccuuuggugacuuc

SEQ ID NO: 85 - RNA, 22 nt, Human
gcccuuugugucuggcuggggu

SEQ ID NO: 86 - RNA, 22 nt, Human
ggaggcggaggcugcagugagc

SEQ ID NO: 87 - RNA, 22 nt, Human
agcucauugcaaccuccgccuc

SEQ ID NO: 88 - RNA, 22 nt, Human
acugcacuccugccuggguaac

SEQ ID NO: 89 - RNA, 22 nt, Human
ucgcggguugcacauggccauc

SEQ ID NO: 90 - RNA, 22 nt, Human
auugcacuccagccugggcgac

SEQ ID NO: 91 - RNA, 22 nt, Human
guggccccagggcccugucugg

SEQ ID NO: 92 - RNA, 22 nt, Human
gggcagaucaccugaggucagg

SEQ ID NO: 93 - RNA, 22 nt, Human
guccccgccgucgcucaggcug

SEQ ID NO: 94 - RNA, 23 nt, Human
ggcccccggaacgcucugugacc

SEQ ID NO: 95 - RNA, 22 nt, Human
cggugcaaggguagcggcaggc

SEQ ID NO: 96 - RNA, 22 nt, Human
gcucaagccuucugcccaccuc

SEQ ID NO: 97 - RNA, 22 nt, Human
gagcccaggaguuugaugcugc

SEQ ID NO: 98 - RNA, 22 nt, Human
ugagucagccuuggcagccccu

SEQ ID NO: 99 - RNA, 22 nt, Human
uuucaccaucuuggccaggcug

SEQ ID NO: 100 - RNA, 22 nt, Human
ggacacguggcugaaggcggcc

SEQ ID NO: 101 - RNA, 22 nt, Human
cgggguucauccaugcuguggc

SEQ ID NO: 102 - RNA, 19 nt, Human
aguccuggccugggggacc

SEQ ID NO: 103 - RNA, 22 nt, Human
gcugcaccccagccuggguaac

SEQ ID NO: 104 - RNA, 22 nt, Human
augcagcccccuggugcccggg

SEQ ID NO: 105 - RNA, 22 nt, Human
uuaggguuacaccagccuccug

SEQ ID NO: 106 - RNA, 22 nt, Human
guggcucacgccuguaauccca

SEQ ID NO: 107 - RNA, 22 nt, Human
ccauugcacuccauccugggca

SEQ ID NO: 108 - RNA, 22 nt, Human
gaccuugugaucugccugccuu

SEQ ID NO: 109 - RNA, 22 nt, Human
uguccccacccaaaucucaucu

SEQ ID NO: 110 - RNA, 23 nt, Human
accugucugccucccaccaucaa

SEQ ID NO: 111 - RNA, 22 nt, Human
guuggccaggcuggucucaaac

SEQ ID NO: 112 - RNA, 22 nt, Human
cagcuguucauuguugccaccc

SEQ ID NO: 113 - RNA, 22 nt, Human
auagcagcgcuggcccucugcc

SEQ ID NO: 114 - RNA, 22 nt, Human
aguggccuggagccccgccugg

SEQ ID NO: 115 - RNA, 22 nt, Human
ggccgucagccccgauuugcca

SEQ ID NO: 116 - RNA, 22 nt, Human
gcugaccccuacagguuguguu

SEQ ID NO: 117 - RNA, 22 nt, Human
ccuggcuccuacggguauuuug

SEQ ID NO: 118 - RNA, 22 nt, Human
cucagcuuggccuggacguagc

SEQ ID NO: 119 - RNA, 19 nt, Human
cuccuugccauuucuuuuc

SEQ ID NO: 120 - RNA, 22 nt, Human
cccaggaggcggagguugcagu

SEQ ID NO: 121 - RNA, 22 nt, Human
cccagcaguagagcucauaugg

SEQ ID NO: 122 - RNA, 22 nt, Human
ucucgaucuccugaccuuguga

SEQ ID NO: 123 - RNA, 22 nt, Human
caccaugcccggcuaauuuugg

SEQ ID NO: 124 - RNA, 21 nt, Human
uagcccuucuccaccucgccc

SEQ ID NO: 125 - RNA, 22 nt, Human
ccugugcuuggccagagagguu

SEQ ID NO: 126 - RNA, 22 nt, Human
caugccuguaaucccagcacuu

SEQ ID NO: 127 - RNA, 22 nt, Human
ccugggccucucaaagugcugg

SEQ ID NO: 128 - RNA, 22 nt, Human
guccccgacguuuggcuugaug

SEQ ID NO: 129 - RNA, 22 nt, Human
cugcacugacuuccccggcugc

SEQ ID NO: 130 - RNA, 22 nt, Human
uccugggaucaagugauccucc

SEQ ID NO: 131 - RNA, 22 nt, Human
uugcuaguguuugguugauggu

SEQ ID NO: 132 - RNA, 22 nt, Human
aucauuauccuccuauuugccu

SEQ ID NO: 133 - RNA, 22 nt, Human
ugcucugauuuuugccccagcu

SEQ ID NO: 134 - RNA, 23 nt, Human
ucugugucuccacccaaaucuca

SEQ ID NO: 135 - RNA, 23 nt, Human
uacuaugguuauuaucccucucc

SEQ ID NO: 136 - RNA, 22 nt, Human
ggagugcaguggcgugaucucg

SEQ ID NO: 137 - RNA, 22 nt, Human
ucgaaggccucuugcuccucga

SEQ ID NO: 138 - RNA, 22 nt, Human
guauuuggaaaccaccagugcc

SEQ ID NO: 139 - RNA, 22 nt, Human
uugcccaggcuggagugcagua

SEQ ID NO: 140 - RNA, 22 nt, Human
cugucccugagcaacuccuguu

SEQ ID NO: 141 - RNA, 22 nt, Human
agcguguugggaggagcugcag

SEQ ID NO: 142 - RNA, 22 nt, Human
ccgggcuggagugcaauggcuc

SEQ ID NO: 143 - RNA, 22 nt, Human
gggcguggagcuggaaugaugu

SEQ ID NO: 144 - RNA, 22 nt, Human
gcugaacgagcuggccaaguuc

SEQ ID NO: 145 - RNA, 22 nt, Human
ccacugcacuccagccugccaa

SEQ ID NO: 146 - RNA, 19 nt, Human
ucucuaguccugccucccc

SEQ ID NO: 147 - RNA, 22 nt, Human
cacugcacugcagccuggagac

SEQ ID NO: 148 - RNA, 20 nt, Human
auggggugagugacgcccuc

SEQ ID NO: 149 - RNA, 22 nt, Human
agcacgguggguuuggcuggca

SEQ ID NO: 150 - RNA, 22 nt, Human
augccacugcacuucagcuugg

SEQ ID NO: 151 - RNA, 22 nt, Human
acauccucccgaucuacuggcu

SEQ ID NO: 152 - RNA, 22 nt, Human
acuguccgggacaggcccaucc

SEQ ID NO: 153 - RNA, 22 nt, Human
ugacaaugaggcccuccacaaa

SEQ ID NO: 154 - RNA, 22 nt, Human
aagugcuagugagucuauugua

SEQ ID NO: 155 - RNA, 22 nt, Human
gaccucgugauccgccugcuuu

SEQ ID NO: 156 - RNA, 20 nt, Human
ugaccuccugggcucaagcc

SEQ ID NO: 157 - RNA, 23 nt, Human
cucgacuucccuggcuugcguga

SEQ ID NO: 158 - RNA, 22 nt, Human
agagaugggguuucaccacguu

SEQ ID NO: 159 - RNA, 22 nt, Human
gguggcaguagcacugggccug

SEQ ID NO: 160 - RNA, 22 nt, Human
gugaccuggccgccuaaaccca

SEQ ID NO: 161 - RNA, 22 nt, Human
aauugcacgguauccaucugua

SEQ ID NO: 162 - RNA, 22 nt, Human
cuguccugugcuuuuuacuguc

SEQ ID NO: 163 - RNA, 22 nt, Human
ccugccuacugaguuuuauauu

SEQ ID NO: 164 - RNA, 22 nt, Human
gcggcggcgguagcaaaaauga

SEQ ID NO: 165 - RNA, 21 nt, Human
cuggccacugcaccucuuccu

SEQ ID NO: 166 - RNA, 22 nt, Human
ucagccuccuccaccccagagu

SEQ ID NO: 167 - RNA, 22 nt, Human
agcagcaguauccuuccccggc

SEQ ID NO: 168 - RNA, 22 nt, Human
ccaggagguggagguugcggug

SEQ ID NO: 169 - RNA, 23 nt, Human
ggcuggccccauccaggcuggca

SEQ ID NO: 170 - RNA, 22 nt, Human
ugcagguugcuggucugaucuc

SEQ ID NO: 171 - RNA, 22 nt, Human
uggugcagcgugugguggcucu

SEQ ID NO: 172 - RNA, 22 nt, Human
uugccuuccugcccagcuucug

SEQ ID NO: 173 - RNA, 22 nt, Human
cucuuugguugguuccugaugc

SEQ ID NO: 174 - RNA, 22 nt, Human
ucaccgaggcuggagugcagug

SEQ ID NO: 175 - RNA, 23 nt, Human
gcguccggccucucucgcucccg

SEQ ID NO: 176 - RNA, 22 nt, Human
cggugccuccuccaguguugcu

SEQ ID NO: 177 - RNA, 22 nt, Human
caggcuggagugcaguggcgcu

SEQ ID NO: 178 - RNA, 21 nt, Human
aggcaccacaucucccucccc

SEQ ID NO: 179 - RNA, 18 nt, Human
gauauggaaggccaugcc

SEQ ID NO: 180 - RNA, 21 nt, Human
uagaacuauggcuaugugcca

SEQ ID NO: 181 - RNA, 22 nt, Human
guugccuaggcuggucuugaac

SEQ ID NO: 182 - RNA, 22 nt, Human
agcaccuccagagcuugaagcu

SEQ ID NO: 183 - RNA, 22 nt, Human
ggguuggcaucaggguucugug

SEQ ID NO: 184 - RNA, 22 nt, Human
acugcacugcagccuggccaac

SEQ ID NO: 185 - RNA, 22 nt, Human
uucacugcaaccuccgccuccc

SEQ ID NO: 186 - RNA, 22 nt, Human
cucacugcaaccuccgucuccc

SEQ ID NO: 187 - RNA, 22 nt, Human
auaugcagucucuugcccuucu

SEQ ID NO: 188 - RNA, 22 nt, Human
ggccuguaaucccagcuacuca

SEQ ID NO: 189 - RNA, 20 nt, Human
agcagagugcccaucccgga

SEQ ID NO: 190 - RNA, 22 nt, Human
cucacugcaagcucugccucca

SEQ ID NO: 191 - RNA, 22 nt, Human
gugguagcuccaggcugucuga

SEQ ID NO: 192 - RNA, 22 nt, Human
uggcggcguguggacugaggac

SEQ ID NO: 193 - RNA, 22 nt, Human
ccccucaguuugcuaguauuuu

SEQ ID NO: 194 - RNA, 22 nt, Human
acugcccuccagccugggugac

SEQ ID NO: 195 - RNA, 22 nt, Human
guuggucuucauuaaaugcuuu

SEQ ID NO: 196 - RNA, 22 nt, Human
agcuuugguugccaugaucuga

SEQ ID NO: 197 - RNA, 22 nt, Human
cauaauuucuaccagggccaua

SEQ ID NO: 198 - RNA, 22 nt, Human
uccuugugcugaggguguugcu

SEQ ID NO: 199 - RNA, 22 nt, Human
ucuggcuucccucuguucuggg

SEQ ID NO: 200 - RNA, 22 nt, Human
ucccccaggcuggagugcagug

SEQ ID NO: 201 - RNA, 22 nt, Human
cuucaucagcuggcuuacuguu

SEQ ID NO: 202 - RNA, 22 nt, Human
ugcguuccaguugcugccaggc

SEQ ID NO: 203 - RNA, 22 nt, Human
ccuggaggcggagguugcagug

SEQ ID NO: 204 - RNA, 22 nt, Human
ccucugcaccaaccugucaaga

SEQ ID NO: 205 - RNA, 22 nt, Human
cacugcagccuccaucucuggg

SEQ ID NO: 206 - RNA, 22 nt, Human
ggugccccaucgcggguggcug

SEQ ID NO: 207 - RNA, 21 nt, Human
gcagggaacuggcugggcuuu

SEQ ID NO: 208 - RNA, 22 nt, Human
ccguccccggugcugccugcgc

SEQ ID NO: 209 - RNA, 22 nt, Human
auuaggagagugggugcuaagu

SEQ ID NO: 210 - RNA, 22 nt, Human
acccaggcuggagugcagugau

SEQ ID NO: 211 - RNA, 22 nt, Human
cacugcacuccagcuugggcaa

SEQ ID NO: 212 - RNA, 23 nt, Human
cagagcuggcuucaugggugugc

SEQ ID NO: 213 - RNA, 22 nt, Human
ucuuccugucaaugagaauuaa

SEQ ID NO: 214 - RNA, 22 nt, Human
gcaggcggagguugcagugagc

SEQ ID NO: 215 - RNA, 22 nt, Human
gucuuuugcuagccagagagcu

SEQ ID NO: 216 - RNA, 22 nt, Human
cacugcacuccagccugggcaa

SEQ ID NO: 217 - RNA, 22 nt, Human
gcccccguaguagaugaggcgc

SEQ ID NO: 218 - RNA, 22 nt, Human
ggucgcuguguagguucagcua

SEQ ID NO: 219 - RNA, 22 nt, Human
ucuggcucuggaguccaccugc

SEQ ID NO: 220 - RNA, 22 nt, Human
gacagcuccagcuccuccaggc

SEQ ID NO: 221 - RNA, 22 nt, Human
ucacuacaaccuccgccuccug

SEQ ID NO: 222 - RNA, 22 nt, Human
acccaggcuggcgugcaguggc

SEQ ID NO: 223 - RNA, 22 nt, Human
ccuguggucccugucugugccu

SEQ ID NO: 224 - RNA, 22 nt, Human
auugcacuccagccugggcaac

SEQ ID NO: 225 - RNA, 23 nt, Human
ucaagcaauucuccugccucggc

SEQ ID NO: 226 - RNA, 22 nt, Human
aaugcugaguccugugagucuu

SEQ ID NO: 227 - RNA, 22 nt, Human
agucgcuguuggucguggcacu

SEQ ID NO: 228 - RNA, 22 nt, Human
cugcaagcuaccccuagcauca

SEQ ID NO: 229 - RNA, 22 nt, Human
aggaccuguccccuggcccacu

SEQ ID NO: 230 - RNA, 22 nt, Human
gcaggcauuagcccccauggcu

SEQ ID NO: 231 - RNA, 21 nt, Human
aggccaagaaggaagcagagg

SEQ ID NO: 232 - RNA, 22 nt, Human
cuuccugccucucgccgcccgc

SEQ ID NO: 233 - RNA, 22 nt, Human
auuguugcccauguuuuuauuu

SEQ ID NO: 234 - RNA, 22 nt, Human
cuggcagguuauagagcugccc

SEQ ID NO: 235 - RNA, 22 nt, Human
ucuccacagcuggcccccaaga

SEQ ID NO: 236 - RNA, 22 nt, Human
ggguuggauccugguggcugcc

SEQ ID NO: 237 - RNA, 22 nt, Human
ccuuuuguccugcuugguuucg

SEQ ID NO: 238 - RNA, 22 nt, Human
uggugcuuguggagcuggugcu

SEQ ID NO: 239 - RNA, 20 nt, Human
cagccugcaucaucugcagc

SEQ ID NO: 240 - RNA, 22 nt, Human
ucacugcaaucucagccuccug

SEQ ID NO: 241 - RNA, 22 nt, Human
uggguggagcaggcuggugcuu

SEQ ID NO: 242 - RNA, 22 nt, Human
cugagauaggacucugcuggcu

SEQ ID NO: 243 - RNA, 22 nt, Human
gccuaucugucaaauuucucug

SEQ ID NO: 244 - RNA, 22 nt, Human
uucuucugccccuugccugaca

SEQ ID NO: 245 - RNA, 22 nt, Human
acugcacuccagccugggcaac

SEQ ID NO: 246 - RNA, 22 nt, Human
ugccuaggcuggagugcaaugg

SEQ ID NO: 247 - RNA, 22 nt, Human
cuggccuggcgcaguggcucac

SEQ ID NO: 248 - RNA, 22 nt, Human
cuccuucugggccuggcagugg

SEQ ID NO: 249 - RNA, 22 nt, Human
caaggugccaugcugggcgggg

SEQ ID NO: 250 - RNA, 22 nt, Human
agugggccggacagcccaggcc

SEQ ID NO: 251 - RNA, 22 nt, Human
ugcuuauauuucauuggcccaa

SEQ ID NO: 252 - RNA, 22 nt, Human
ccaaagugcuaggauuacaggc

SEQ ID NO: 253 - RNA, 22 nt, Human
cggcacuguagucuggcuggga

SEQ ID NO: 254 - RNA, 22 nt, Human
ugccgcaaguacugcugccugu

SEQ ID NO: 255 - RNA, 22 nt, Human
gaugucgugauccacccgccuu

SEQ ID NO: 256 - RNA, 22 nt, Human
cgugccacugcacucuagccug

SEQ ID NO: 257 - RNA, 22 nt, Human
cauggcagcuccuccaguguga

SEQ ID NO: 258 - RNA, 22 nt, Human
ggaauccugccagcucugcccc

SEQ ID NO: 259 - RNA, 22 nt, Human
ccaguacguugcucagcuccuc

SEQ ID NO: 260 - RNA, 22 nt, Human
ugucuccccacuggucuuccag

SEQ ID NO: 261 - RNA, 22 nt, Human
cuggccuaaaaauacagaacaa

SEQ ID NO: 262 - RNA, 22 nt, Human
caggcucuucccucuggccaag

SEQ ID NO: 263 - RNA, 22 nt, Human
acucuggccaucuuggaccuug

SEQ ID NO: 264 - RNA, 22 nt, Human
cggcgagcgggaccugcgccug

SEQ ID NO: 265 - RNA, 22 nt, Human
ugugccuguucccacuuugccu

SEQ ID NO: 266 - RNA, 22 nt, Human
cucacugcaaccuccgccuccu

SEQ ID NO: 267 - RNA, 22 nt, Human
aggcucccugaaucgcccguuc

SEQ ID NO: 268 - RNA, 22 nt, Human
cucugccucccagguucaagcg

SEQ ID NO: 269 - RNA, 22 nt, Human
gcuaguguuugccagcguagcc

SEQ ID NO: 270 - RNA, 22 nt, Human
ggaguuccagaccagacuggcc

SEQ ID NO: 271 - RNA, 22 nt, Human
cucagcucauccacuaaauccc

SEQ ID NO: 272 - RNA, 22 nt, Human
auugcacuccggccugggugac

SEQ ID NO: 273 - RNA, 22 nt, Human
caacauggugaaaccccgucuc

SEQ ID NO: 274 - RNA, 23 nt, Human
gugccgacgcuccagcaccaucc

SEQ ID NO: 275 - RNA, 22 nt, Human
acuguacuccagccugguggca

SEQ ID NO: 276 - RNA, 22 nt, Human
gugacagugaaucuagacagac

SEQ ID NO: 277 - RNA, 22 nt, Human
ucacugcaaccuccgccugcug

SEQ ID NO: 278 - RNA, 22 nt, Human
ucugcgguccccuucucgcccu

SEQ ID NO: 279 - RNA, 22 nt, Human
caggcuggagugcaguggugcc

SEQ ID NO: 280 - RNA, 22 nt, Human
ccucuuucaccgugccuguccc

SEQ ID NO: 281 - RNA, 22 nt, Human
cugagcucacgccauucuccuu

SEQ ID NO: 282 - RNA, 22 nt, Human
ggugauccaccagccucggccu

SEQ ID NO: 283 - RNA, 22 nt, Human
ugaccccuauauccuguuucuu

SEQ ID NO: 284 - RNA, 17 nt, Human
acuucccaccccuccag

SEQ ID NO: 285 - RNA, 22 nt, Human
cuuuaugaaaaccugaauuaug

SEQ ID NO: 286 - RNA, 22 nt, Human
cggcucacugcagcuccgccuc

SEQ ID NO: 287 - RNA, 22 nt, Human
ggccuguggugcgcuauuucag

SEQ ID NO: 288 - RNA, 22 nt, Human
cuugcuuucagucucggccuca

SEQ ID NO: 289 - RNA, 22 nt, Human
aucacuuugaguccaggaguuu

SEQ ID NO: 290 - RNA, 22 nt, Human
gaggcagagguugcagugagcu

SEQ ID NO: 291 - RNA, 22 nt, Human
cuggccaagauggugaaacccc

SEQ ID NO: 292 - RNA, 22 nt, Human
gccuggguccaccgcucgcgcu

SEQ ID NO: 293 - RNA, 22 nt, Human
gaggccacugucccugccuucc

SEQ ID NO: 294 - RNA, 22 nt, Human
acccgccgcacguccaggcuga

SEQ ID NO: 295 - RNA, 22 nt, Human
uggcuuccccggagugacaugu

SEQ ID NO: 296 - RNA, 22 nt, Human
ggaggagcaugagaggguagug

SEQ ID NO: 297 - RNA, 22 nt, Human
gcuguccagcccuuguucaccu

SEQ ID NO: 298 - RNA, 22 nt, Human
gccuccaggucggucuuucucu

SEQ ID NO: 299 - RNA, 22 nt, Human
agggaaaucucagcucuaaaau

SEQ ID NO: 300 - RNA, 22 nt, Human
cucagugcaaccuccgccuacu

SEQ ID NO: 301 - RNA, 22 nt, Human
ccggucuguguacuugcuggcc

SEQ ID NO: 302 - RNA, 22 nt, Human
cacugucuuccuuuggcuccuc

SEQ ID NO: 303 - RNA, 22 nt, Human
cacugcacuccagccugggaga

SEQ ID NO: 304 - RNA, 22 nt, Human
uacugugugcccagccgagcug

SEQ ID NO: 305 - RNA, 22 nt, Human
gcccagaucuccugacccucag

SEQ ID NO: 306 - RNA, 22 nt, Human
ucacuucccagacgggguggca

SEQ ID NO: 307 - RNA, 20 nt, Human
ugcugcccuaagaccaccuu

SEQ ID NO: 308 - RNA, 22 nt, Human
acacugauguuggcccugguca

SEQ ID NO: 309 - RNA, 22 nt, Human
auggcugccugggcgcuggccg

SEQ ID NO: 310 - RNA, 22 nt, Human
uuucuccucaugacugguugug

SEQ ID NO: 311 - RNA, 22 nt, Human
aaagcgcuucccuuuggagcgu

SEQ ID NO: 312 - RNA, 22 nt, Human
aacgcccagccuugaucaaaug

SEQ ID NO: 313 - RNA, 22 nt, Human
ugagcacaugccagcccuucuc

SEQ ID NO: 314 - RNA, 22 nt, Human
gaccucgugaucugccggccuu

SEQ ID NO: 315 - RNA, 22 nt, Human
uggcuaacaaggugaaaccccg

SEQ ID NO: 316 - RNA, 22 nt, Human
ugugcucugacuuucuccuggu

SEQ ID NO: 317 - RNA, 22 nt, Human
ucuagguaggcuguguguggaa

SEQ ID NO: 318 - RNA, 22 nt, Human
gaaguguagucuugagccccca

SEQ ID NO: 319 - RNA, 23 nt, Human
ccugccuccccaucaguuauaca

SEQ ID NO: 320 - RNA, 22 nt, Human
accacugcacuccagucugggc

SEQ ID NO: 321 - RNA, 20 nt, Human
cugcucugguuuccucuguc

SEQ ID NO: 322 - RNA, 22 nt, Human
ggggcauugugucuggguuccu

SEQ ID NO: 323 - RNA, 22 nt, Human
gcuggcagacuuccucuggaac

SEQ ID NO: 324 - RNA, 22 nt, Human
ccuccaaccauagguccagggg

SEQ ID NO: 325 - RNA, 22 nt, Human
ucuccuggagcccagaugcugg

SEQ ID NO: 326 - RNA, 22 nt, Human
cuccuugcuggucugguguaau

SEQ ID NO: 327 - RNA, 22 nt, Human
aaagugcugguauuacaggugu

SEQ ID NO: 328 - RNA, 22 nt, Human
cuccaguuggccccaguugguu

SEQ ID NO: 329 - RNA, 22 nt, Human
ccucacucagguuuggacccug

SEQ ID NO: 330 - RNA, 20 nt, Human
acugcacuccagccuuccag

SEQ ID NO: 331 - RNA, 22 nt, Human
ugccuagccaaguccaguauuu

SEQ ID NO: 332 - RNA, 22 nt, Human
cgcaugagaccugccggccauc

SEQ ID NO: 333 - RNA, 22 nt, Human
augccccuggccuggggaacau

SEQ ID NO: 334 - RNA, 22 nt, Human
ucucgcucugucgcccaggcug

SEQ ID NO: 335 - RNA, 22 nt, Human
uagugcccuccccuuugggaua

SEQ ID NO: 336 - RNA, 22 nt, Human
ggcuccugggggugcuccugcc

SEQ ID NO: 337 - RNA, 22 nt, Human
aaugggguagugggcagccugg

SEQ ID NO: 338 - RNA, 22 nt, Human
aacccaggaggcggagguugug

SEQ ID NO: 339 - RNA, 22 nt, Human
ggcucacugcaacuuccgccuc

SEQ ID NO: 340 - RNA, 22 nt, Human
cccggaggcagagguugcagug

SEQ ID NO: 341 - RNA, 22 nt, Human
cgccuggcccccaguacuuugu

SEQ ID NO: 342 - RNA, 22 nt, Human
uggcuguacauuggaauuaucu

SEQ ID NO: 343 - RNA, 22 nt, Human
cgugcgccucagccucgugcgc

SEQ ID NO: 344 - RNA, 22 nt, Human
ucagaauauggcuaggagugcu

SEQ ID NO: 345 - RNA, 22 nt, Human
caggcuggagugcaguggggcg

SEQ ID NO: 346 - RNA, 22 nt, Human
uacgccuguaaucccagcacuu

SEQ ID NO: 347 - RNA, 18 nt, Human
ugucccugcaaauaacau

SEQ ID NO: 348 - RNA, 21 nt, Human
cuuccccaggcuggucuguau

SEQ ID NO: 349 - RNA, 22 nt, Human
cauguuggugugcugcacccgu

SEQ ID NO: 350 - RNA, 22 nt, Human
aggcuguagugcaugugcuaug

SEQ ID NO: 351 - RNA, 22 nt, Human
acugcgcuccagccugggugac

SEQ ID NO: 352 - RNA, 22 nt, Human
agucccccucugagcccaggga

SEQ ID NO: 353 - RNA, 22 nt, Human
uagguauaggauucuagguugg

SEQ ID NO: 354 - RNA, 22 nt, Human
caauucccagcugccgggcugc

SEQ ID NO: 355 - RNA, 23 nt, Human
ccaucccuuggaagcugguuuua

SEQ ID NO: 356 - RNA, 22 nt, Human
gugcucccuccuuccucaagga

SEQ ID NO: 357 - RNA, 22 nt, Human
ccaaagugcuaggauuacaggu

SEQ ID NO: 358 - RNA, 22 nt, Human
uggauucacaccauucuccugc

SEQ ID NO: 359 - RNA, 22 nt, Human
aagugcugggauuacaggcaug

SEQ ID NO: 360 - RNA, 22 nt, Human
ugagauggagucucgcucuguu

SEQ ID NO: 361 - RNA, 22 nt, Human
uugcugcucugccgguacagcu

SEQ ID NO: 362 - RNA, 22 nt, Human
gccugucccgcaccggagcccg

SEQ ID NO: 363 - RNA, 22 nt, Human
gucuccccagggcccucuucau

SEQ ID NO: 364 - RNA, 22 nt, Human
uggauggcuguggucuuugccc

SEQ ID NO: 365 - RNA, 22 nt, Human
cuuccuucucacuagcagcgcc

SEQ ID NO: 366 - RNA, 22 nt, Human
uccuuugcuucugucauucucc

SEQ ID NO: 367 - RNA, 22 nt, Human
gaggcugagguugcagugagcu

SEQ ID NO: 368 - RNA, 19 nt, Human
guaauaugugcugaguccu

SEQ ID NO: 369 - RNA, 22 nt, Human
cugguuaucucggccacagaga

SEQ ID NO: 370 - RNA, 22 nt, Human
ggccacugcucuccagccuggg

SEQ ID NO: 371 - RNA, 22 nt, Human
ccuggcucuggcuuccuguugu

SEQ ID NO: 372 - RNA, 22 nt, Human
agccccaaacaccaggauuacu

SEQ ID NO: 373 - RNA, 21 nt, Human
ccgccgcugauagcucugggc

SEQ ID NO: 374 - RNA, 22 nt, Human
aggggcuccuuugugcugcguc

SEQ ID NO: 375 - RNA, 22 nt, Human
ucuucacgccaagugccccuca

SEQ ID NO: 376 - RNA, 23 nt, Human
ggccucagugaugauggguuaaa

SEQ ID NO: 377 - RNA, 22 nt, Human
aaggcucggcaaugugcggcuc

SEQ ID NO: 378 - RNA, 22 nt, Human
uuucccuuuagccugagaaucc

SEQ ID NO: 379 - RNA, 22 nt, Human
caaagugcuaggauuauaggug

SEQ ID NO: 380 - RNA, 22 nt, Human
gaggcaggaggauugcuugagc

SEQ ID NO: 381 - RNA, 22 nt, Human
uccgggugcccacgugccccua

SEQ ID NO: 382 - RNA, 22 nt, Human
gaggcugaggcggauggaucac

SEQ ID NO: 383 - RNA, 22 nt, Human
accacccagccagcuucucccu

SEQ ID NO: 384 - RNA, 22 nt, Human
uguccagccggcccacgcccau

SEQ ID NO: 385 - RNA, 22 nt, Human
ggcucuuccgccaccagccaca

SEQ ID NO: 386 - RNA, 22 nt, Human
ugcagcauugcacuccagccug

SEQ ID NO: 387 - RNA, 22 nt, Human
ugggucucuggccaccccagcc

SEQ ID NO: 388 - RNA, 22 nt, Human
ucucuagucuccuuuaaccuga

SEQ ID NO: 389 - RNA, 22 nt, Human
uagguuguccaucucuagaagc

SEQ ID NO: 390 - RNA, 23 nt, Human
acugcagucuugaucuccugggc

SEQ ID NO: 391 - RNA, 22 nt, Human
acaucuagacucuugcccucuu

SEQ ID NO: 392 - RNA, 22 nt, Human
cuggucugccacccacaccccu

SEQ ID NO: 393 - RNA, 22 nt, Human
gugccaggcacaggaagcagcc

SEQ ID NO: 394 - RNA, 22 nt, Human
uccucccucaccucagucuggg

SEQ ID NO: 395 - RNA, 22 nt, Human
guccucacuggccgcacgcuga

SEQ ID NO: 396 - RNA, 22 nt, Human
cuggccucggcagcaggaacag

SEQ ID NO: 397 - RNA, 22 nt, Human
gagugcaguggcgugaucucug

SEQ ID NO: 398 - RNA, 22 nt, Human
guguuccugugcuggaugguca

SEQ ID NO: 399 - RNA, 22 nt, Human
ccaggcuggaguauaguggcgc

SEQ ID NO: 400 - RNA, 22 nt, Human
ccagacccuccauucaagcucc

SEQ ID NO: 401 - RNA, 22 nt, Human
cacuaggcuggagugcaguggc

SEQ ID NO: 402 - RNA, 22 nt, Human
ucacugcgcuucagccugggug

SEQ ID NO: 403 - RNA, 22 nt, Human
ucuuugcuauugugaguagugc

SEQ ID NO: 404 - RNA, 22 nt, Human
uuguauagcccagagagugaga

SEQ ID NO: 405 - RNA, 22 nt, Human
cauugcacuccagccugggcca

SEQ ID NO: 406 - RNA, 22 nt, Human
cugcccgcaccauccccgggcu

SEQ ID NO: 407 - RNA, 22 nt, Human
cggcaugggcgucccccucacu

SEQ ID NO: 408 - RNA, 22 nt, Human
uugcauuugguucugccuggua

SEQ ID NO: 409 - RNA, 22 nt, Human
gagccccacccuagacauucug

SEQ ID NO: 410 - RNA, 23 nt, Human
ggauggacgugaugccuuagcca

SEQ ID NO: 411 - RNA, 19 nt, Human
ugccugcuguauuccagag

SEQ ID NO: 412 - RNA, 22 nt, Human
ccuggucggcguggugacggcg

SEQ ID NO: 413 - RNA, 22 nt, Human
ucacugcagccucugccucccg

SEQ ID NO: 414 - RNA, 22 nt, Human
acuguacuccagccuuggcgac

SEQ ID NO: 415 - RNA, 22 nt, Human
cuccagucuucucauguauccc

SEQ ID NO: 416 - RNA, 22 nt, Human
uagcagugucuagguaggccau

SEQ ID NO: 417 - RNA, 22 nt, Human
gcccuuggccucuuuggcccgg

SEQ ID NO: 418 - RNA, 22 nt, Human
cauucugcgauccucaagcaca

SEQ ID NO: 419 - RNA, 22 nt, Human
agcagcuuucaccuccccgccu

SEQ ID NO: 420 - RNA, 22 nt, Human
uggagccagcggccugcugagg

SEQ ID NO: 421 - RNA, 22 nt, Human
agcuggggcugugguugugauu

SEQ ID NO: 422 - RNA, 22 nt, Human
uagcugagccgccuggcugggg

SEQ ID NO: 423 - RNA, 18 nt, Human
ccaucacccuaacuagug

SEQ ID NO: 424 - RNA, 22 nt, Human
gccuggccuaauuccagcauuu

SEQ ID NO: 425 - RNA, 22 nt, Human
cacagccuccucuggcucacgg

SEQ ID NO: 426 - RNA, 22 nt, Human
ccgagguccuggacuuggcccu

SEQ ID NO: 427 - RNA, 22 nt, Human
gcagagugcugucguacgcccc

SEQ ID NO: 428 - RNA, 20 nt, Human
cuguaacugucccuuuugcc

SEQ ID NO: 429 - RNA, 22 nt, Human
ucacugcaaccuccaccuccug

SEQ ID NO: 430 - RNA, 22 nt, Human
uugcuuugcagugccuauagga

SEQ ID NO: 431 - RNA, 22 nt, Human
uggaggcuggagugcaguggcg

SEQ ID NO: 432 - RNA, 22 nt, Human
aagguggagguugcagugagcu

SEQ ID NO: 433 - RNA, 22 nt, Human
gcaggcugucuaaaguuagagu

SEQ ID NO: 434 - RNA, 22 nt, Human
gcgccccaucuacaguacuuuu

SEQ ID NO: 435 - RNA, 22 nt, Human
ucugccuucuaucuuuugucug

SEQ ID NO: 436 - RNA, 22 nt, Human
ccuucccaugcagccugucuga

SEQ ID NO: 437 - RNA, 22 nt, Human
gccuggccuaaauuaguaauuu

SEQ ID NO: 438 - RNA, 22 nt, Human
uucuggcuucucccaggcggcc

SEQ ID NO: 439 - RNA, 22 nt, Human
ggcgcccccuucaaacagagca

SEQ ID NO: 440 - RNA, 22 nt, Human
ucccaauagccuaagagccugg

SEQ ID NO: 441 - RNA, 22 nt, Human
gccuggccaacguggugaaacc

SEQ ID NO: 442 - RNA, 22 nt, Human
ugucuggcuuucuucaguuagc

SEQ ID NO: 443 - RNA, 22 nt, Human
uggguuuuguuuguacagugua

SEQ ID NO: 444 - RNA, 23 nt, Human
cuguggugaggcccuagaaucug

SEQ ID NO: 445 - RNA, 22 nt, Human
uugcucaggcuggcgugcaaug

SEQ ID NO: 446 - RNA, 22 nt, Human
ggagguggagguugcagugagc

SEQ ID NO: 447 - RNA, 22 nt, Human
ggaggcggagguugcagugagu

SEQ ID NO: 448 - RNA, 22 nt, Human
cugagccuccugcuucuauuuc

SEQ ID NO: 449 - RNA, 22 nt, Human
acuguacuccagccugggaaac

SEQ ID NO: 450 - RNA, 22 nt, Human
ucacauuuucaaaagcuggugc

SEQ ID NO: 451 - RNA, 22 nt, Human
cgcaccccacugucccucaacc

SEQ ID NO: 452 - RNA, 22 nt, Human
acacuuugccccuggccgccuu

SEQ ID NO: 453 - RNA, 22 nt, Human
gcaacugaacauguguguggcc

SEQ ID NO: 454 - RNA, 22 nt, Human
cccaggaguuggaggcugcagu

SEQ ID NO: 455 - RNA, 22 nt, Human
gucuguuuucucuucuguggga

SEQ ID NO: 456 - RNA, 22 nt, Human
augguacuccagccugggugac

SEQ ID NO: 457 - RNA, 19 nt, Human
agaaucccaggccccacug

SEQ ID NO: 458 - RNA, 22 nt, Human
acugcacuccagccugggugac

SEQ ID NO: 459 - RNA, 18 nt, Human
ugguagguugggcaguuc

SEQ ID NO: 460 - RNA, 22 nt, Human
cagcccuccuacccugccaggc

SEQ ID NO: 461 - RNA, 22 nt, Human
agugagcaaguugauaauggcc

SEQ ID NO: 462 - RNA, 22 nt, Human
cccugccuguccuggucccguu

SEQ ID NO: 463 - RNA, 22 nt, Human
cacugcuaccucugccucccgg

SEQ ID NO: 464 - RNA, 18 nt, Human
gcuguggaagucuuuaua

SEQ ID NO: 465 - RNA, 22 nt, Human
ucugagccagggucuccucccu

SEQ ID NO: 466 - RNA, 22 nt, Human
aggaaaaaaauuaaugugaguc

SEQ ID NO: 467 - RNA, 22 nt, Human
auugcacuccagccugggugac

SEQ ID NO: 468 - RNA, 22 nt, Human
gccugugucuggguggccagag

SEQ ID NO: 469 - RNA, 22 nt, Human
uguccucguccgccucgaacuc

SEQ ID NO: 470 - RNA, 22 nt, Human
cacugcacuccagcacuccagc

SEQ ID NO: 471 - RNA, 22 nt, Human
ggucuuuucugcugcagguugu

SEQ ID NO: 472 - RNA, 19 nt, Human
ggagccgccgcccuucauu

SEQ ID NO: 473 - RNA, 22 nt, Human
uuugguguuccggucauugcug

SEQ ID NO: 474 - RNA, 22 nt, Human
gaacuugugauccgcccaccuu

SEQ ID NO: 475 - RNA, 20 nt, Human
cuucuggcuggucaaggacu

SEQ ID NO: 476 - RNA, 22 nt, Human
gucagucauugaaugcuggccu

SEQ ID NO: 477 - RNA, 22 nt, Human
ggaguuugccuauugcuuuugg

SEQ ID NO: 478 - RNA, 22 nt, Human
caggcuggagugcaaugacgcc

SEQ ID NO: 479 - RNA, 22 nt, Human
cucugaugucugccccucaccu

SEQ ID NO: 480 - RNA, 22 nt, Human
aagcccuggacggcccuucccc

SEQ ID NO: 481 - RNA, 22 nt, Human
gacccucuagauggaagcacug

SEQ ID NO: 482 - RNA, 22 nt, Human
cuggccagauguuacguccaau

SEQ ID NO: 483 - RNA, 22 nt, Human
agcugguuuaauaugcugucug

SEQ ID NO: 484 - RNA, 19 nt, Human
uccugccuggggccgccug

SEQ ID NO: 485 - RNA, 22 nt, Human
gagcugggccugcgagugcugc

SEQ ID NO: 486 - RNA, 22 nt, Human
acgcccagacucccauacuuug

SEQ ID NO: 487 - RNA, 21 nt, Human
uuaaagccucccucauaagga

SEQ ID NO: 488 - RNA, 22 nt, Human
cccagggguucaaggcugcagu

SEQ ID NO: 489 - RNA, 22 nt, Human
uuccaguucugggcuggcugcu

SEQ ID NO: 490 - RNA, 21 nt, Human
ucucuuccuccgcgccgccgc

SEQ ID NO: 491 - RNA, 21 nt, Human
cgugacuggguccgucuggcu

SEQ ID NO: 492 - RNA, 22 nt, Human
aacccgggaggcggagguugug

SEQ ID NO: 493 - RNA, 21 nt, Human
ggccccgcagacccagcacgu

SEQ ID NO: 494 - RNA, 22 nt, Human
acuguacuccaaccugggcaac

SEQ ID NO: 495 - RNA, 22 nt, Human
cgcccgcuggcccugcgaucuc

SEQ ID NO: 496 - RNA, 22 nt, Human
cucaccuccaggagcugcuggc

SEQ ID NO: 497 - RNA, 22 nt, Human
auggcccuaaugaguugguguu

SEQ ID NO: 498 - RNA, 22 nt, Human
gguagucggccuugcccugggc

SEQ ID NO: 499 - RNA, 22 nt, Human
cucgccccucucagcccugcaa

SEQ ID NO: 500 - RNA, 22 nt, Human
gccccagcucaccggcucacug

SEQ ID NO: 501 - RNA, 22 nt, Human
aagugcucauagugcagguagu

SEQ ID NO: 502 - RNA, 22 nt, Human
caacucacugcggccucaaccu

SEQ ID NO: 503 - RNA, 22 nt, Human
ccucuucaggcacucgaaggcc

SEQ ID NO: 504 - RNA, 22 nt, Human
cugccaugccacugugacugca

SEQ ID NO: 505 - RNA, 22 nt, Human
cccaggcccuggcagagcuugu

SEQ ID NO: 506 - RNA, 22 nt, Human
ugcagaaacaagccaucauuca

SEQ ID NO: 507 - RNA, 22 nt, Human
ggcucaaugcaacuucugccuc

SEQ ID NO: 508 - RNA, 22 nt, Human
auuguacuccagccugggugac

SEQ ID NO: 509 - RNA, 22 nt, Human
cugggaggcagagguugcagug

SEQ ID NO: 510 - RNA, 22 nt, Human
gcagcugacaucuggcugggcc

SEQ ID NO: 511 - RNA, 22 nt, Human
guccaguuguauguccaguguc

SEQ ID NO: 512 - RNA, 22 nt, Human
ugacuacaaccuccaccucccg

SEQ ID NO: 513 - RNA, 22 nt, Human
aggcuggagugcaguugcauga

SEQ ID NO: 514 - RNA, 22 nt, Human
caccuggcuggcaauuuauaau

SEQ ID NO: 515 - RNA, 22 nt, Human
gcucccugguagccaugcucuc

SEQ ID NO: 516 - RNA, 22 nt, Human
cuagacugaagcuccuugagga

SEQ ID NO: 517 - RNA, 22 nt, Human
gagaaauauggcucaguuccac

SEQ ID NO: 518 - RNA, 22 nt, Human
cucacugcaagcuccaccucuu

SEQ ID NO: 519 - RNA, 22 nt, Human
ucaccuugugauccgcccaccu

SEQ ID NO: 520 - RNA, 22 nt, Human
acugcacuccagccuggguaac

SEQ ID NO: 521 - RNA, 22 nt, Human
acugcacuccaaccugggugac

SEQ ID NO: 522 - RNA, 22 nt, Human
uuccuggucuauuuagaauugc

SEQ ID NO: 523 - RNA, 22 nt, Human
cucgugauccgcccaccucagc

SEQ ID NO: 524 - RNA, 22 nt, Human
cacugcacuccagccugcgcaa

SEQ ID NO: 525 - RNA, 22 nt, Human
acaaugcucccuguagucagga

SEQ ID NO: 526 - RNA, 17 nt, Human
aggaggcccuggcguuu

SEQ ID NO: 527 - RNA, 19 nt, Human
acugcacuccagccugggu

SEQ ID NO: 528 - RNA, 22 nt, Human
cucacagucugccuuucccuug

SEQ ID NO: 529 - RNA, 22 nt, Human
ucucucuuuuuugaacccgcuc

SEQ ID NO: 530 - RNA, 22 nt, Human
aaauguggggcuggaggcagga

SEQ ID NO: 531 - RNA, 22 nt, Human
caagccauucuccugccucagc

SEQ ID NO: 532 - RNA, 22 nt, Human
ccugcccugcucacugucggua

SEQ ID NO: 533 - RNA, 22 nt, Human
ugcaccacugcacuccagccug

SEQ ID NO: 534 - RNA, 22 nt, Human
ggcccugguccuagggguggaa

SEQ ID NO: 535 - RNA, 22 nt, Human
cacgccuguaaucccagcacuu

SEQ ID NO: 536 - RNA, 22 nt, Human
acuuggaacuggccccuuucau

SEQ ID NO: 537 - RNA, 22 nt, Human
caggaaaaggcggcucggggcu

SEQ ID NO: 538 - RNA, 22 nt, Human
ucgcccaggcuggagugcagug

SEQ ID NO: 539 - RNA, 22 nt, Human
guggcccaucacguuucgccuu

SEQ ID NO: 540 - RNA, 22 nt, Human
caagugauccucccaucuuggc

SEQ ID NO: 541 - RNA, 22 nt, Human
gagagguggagguugcagugag

SEQ ID NO: 542 - RNA, 22 nt, Human
uuucccagccucagcucagcag

SEQ ID NO: 543 - RNA, 22 nt, Human
gugcggccuggccuucaagugg

SEQ ID NO: 544 - RNA, 22 nt, Human
cacugcacuccagccuggguca

SEQ ID NO: 545 - RNA, 22 nt, Human
accuccuggccucaagcaaucc

SEQ ID NO: 546 - RNA, 22 nt, Human
ugggaggccaaggcaggcggau

SEQ ID NO: 547 - RNA, 22 nt, Human
uguccuucuugucuugcccaaa

SEQ ID NO: 548 - RNA, 22 nt, Human
cccgggagguggagguugcagu

SEQ ID NO: 549 - RNA, 22 nt, Human
gccacugagcccggccauuguu

SEQ ID NO: 550 - RNA, 22 nt, Human
gucucggacuccugaucucagg

SEQ ID NO: 551 - RNA, 22 nt, Human
caggaggauugcuugaggccag

SEQ ID NO: 552 - RNA, 22 nt, Human
aacccgugauccugacuccccu

SEQ ID NO: 553 - RNA, 22 nt, Human
gcuccuggccgggcugcuccug

SEQ ID NO: 554 - RNA, 22 nt, Human
aagggaauguuguggcugguuu

SEQ ID NO: 555 - RNA, 22 nt, Human
accaucuccugugccuccagcu

SEQ ID NO: 556 - RNA, 22 nt, Human
ucugccuagaaacaguguuugc

SEQ ID NO: 557 - RNA, 22 nt, Human
uugguccccuucaaccagcuac

SEQ ID NO: 558 - RNA, 22 nt, Human
gccugcucccaguuggcgccuc

SEQ ID NO: 559 - RNA, 22 nt, Human
cgggcaaggcgagacuaggccc

SEQ ID NO: 560 - RNA, 22 nt, Human
ggggggcgccauggucucuugg

SEQ ID NO: 561 - RNA, 22 nt, Human
augccacugcacuccagccuag

SEQ ID NO: 562 - RNA, 22 nt, Human
ggucugucuucccaaucguggc

SEQ ID NO: 563 - RNA, 22 nt, Human
ggcuguggagcugcagaguugg

SEQ ID NO: 564 - RNA, 22 nt, Human
caggcuggagugcaguggcgcc

SEQ ID NO: 565 - RNA, 22 nt, Human
ggccccucugagcuuacucugu

SEQ ID NO: 566 - RNA, 16 nt, Human
gcgccuccucggccuc

SEQ ID NO: 567 - RNA, 22 nt, Human
caccaggcuggagugcaguggc

SEQ ID NO: 568 - RNA, 22 nt, Human
uggcuaggcuggugucaagcuc

SEQ ID NO: 569 - RNA, 22 nt, Human
gcccagccacagucacuuucau

SEQ ID NO: 570 - RNA, 17 nt, Human
cuucccaccaucuccug

SEQ ID NO: 571 - RNA, 17 nt, Human
gaccucaggugaucugc

SEQ ID NO: 572 - RNA, 22 nt, Human
uucccugggacuggccugcacc

SEQ ID NO: 573 - RNA, 22 nt, Human
auguucauauccccauucugau

SEQ ID NO: 574 - RNA, 16 nt, Human
cauugcacucuagccu

SEQ ID NO: 575 - RNA, 22 nt, Human
ucacugcaaccuccaccuccca

SEQ ID NO: 576 - RNA, 21 nt, Human
gccauuucacacagacauuug

SEQ ID NO: 577 - RNA, 22 nt, Human
guagucccagcuaccccggagg

SEQ ID NO: 578 - RNA, 22 nt, Human
ccugucauauacauaccuccuc

SEQ ID NO: 579 - RNA, 22 nt, Human
ucucucaggcuggagugcagug

SEQ ID NO: 580 - RNA, 22 nt, Human
uagcuaccauuauugagcaccu

SEQ ID NO: 581 - RNA, 22 nt, Human
guuuacuugugccuuggcuuaa

SEQ ID NO: 582 - RNA, 22 nt, Human
agcgccgccccugcugguguug

SEQ ID NO: 583 - RNA, 22 nt, Human
uccagggccaucuccaugaggc

SEQ ID NO: 584 - RNA, 22 nt, Human
ucagucuugaacagcccccugu

SEQ ID NO: 585 - RNA, 22 nt, Human
acugcaaccuccaccuccuggg

SEQ ID NO: 586 - RNA, 22 nt, Human
ugguggaggcgcugcuggccag

SEQ ID NO: 587 - RNA, 23 nt, Human
cugcagccuuugccuccuggguu

SEQ ID NO: 588 - RNA, 22 nt, Human
ggcucacugcaaccucugccuc

SEQ ID NO: 589 - RNA, 22 nt, Human
ugccgaggcuggagugcagugg

SEQ ID NO: 590 - RNA, 22 nt, Human
ccggguugagguucccauagau

SEQ ID NO: 591 - RNA, 22 nt, Human
cugcugcgcuggccgucacggu

SEQ ID NO: 592 - RNA, 22 nt, Human
uccuggucuucagguugcaaaa

SEQ ID NO: 593 - RNA, 22 nt, Human
cacccuccagcucccgggggcu

SEQ ID NO: 594 - RNA, 22 nt, Human
cauugcacuccagccugggcaa

SEQ ID NO: 595 - RNA, 22 nt, Human
ucagggguuggcuuguuguguu

SEQ ID NO: 596 - RNA, 22 nt, Human
agccucugguccuuuuuucccu

SEQ ID NO: 597 - RNA, 22 nt, Human
acugcacuccagccucgggguc

SEQ ID NO: 598 - RNA, 21 nt, Human
gccagccuccauccucccuug

SEQ ID NO: 599 - RNA, 22 nt, Human
gcuccgccacgcccacuccuac

SEQ ID NO: 600 - RNA, 22 nt, Human
ccgcggggucauggcugggccg

SEQ ID NO: 601 - RNA, 22 nt, Human
auggcccucuuaucacagcucc

SEQ ID NO: 602 - RNA, 22 nt, Human
aaccuugugauccacccaccuu

SEQ ID NO: 603 - RNA, 22 nt, Human
caaagggaaaagccaugugggc

SEQ ID NO: 604 - RNA, 22 nt, Human
uccuggcuugucacaucuacgu

SEQ ID NO: 605 - RNA, 22 nt, Human
cauugcacuccugccugggcaa

SEQ ID NO: 606 - RNA, 22 nt, Human
ggccucuuaucuggcuccugca

SEQ ID NO: 607 - RNA, 22 nt, Human
aguggcgugaucucggcucggu

SEQ ID NO: 608 - RNA, 19 nt, Human
uggcuauuccuuggacaca

SEQ ID NO: 609 - RNA, 22 nt, Human
gcuccccaaaagcuccaggaaa

SEQ ID NO: 610 - RNA, 22 nt, Human
ccaggagguugaggcugcagug

SEQ ID NO: 611 - RNA, 21 nt, Human
acagccuccaucuccugggcu

SEQ ID NO: 612 - RNA, 22 nt, Human
ccaggaggcggagguugcagcg

SEQ ID NO: 613 - RNA, 21 nt, Human
ugcccggauaccccuggccuc

SEQ ID NO: 614 - RNA, 22 nt, Human
ugcgacccuagcccccucacuu

SEQ ID NO: 615 - RNA, 22 nt, Human
cuguccuggggaaagccagccc

SEQ ID NO: 616 - RNA, 23 nt, Human
gcagcuccuggaggugagaggcg

SEQ ID NO: 617 - RNA, 22 nt, Human
cacccaggcuggagugcagugg

SEQ ID NO: 618 - RNA, 22 nt, Human
agcccucguuucugcauccugu

SEQ ID NO: 619 - RNA, 22 nt, Human
auugcacuucagccugggugac

SEQ ID NO: 620 - RNA, 22 nt, Human
ucuucuauccucagccccugcc

SEQ ID NO: 621 - RNA, 22 nt, Human
guggcucacaccuguaauccca

SEQ ID NO: 622 - RNA, 22 nt, Human
cacugcaagcuccgccuccugg

SEQ ID NO: 623 - RNA, 22 nt, Human
guggcagaccuucccuucuccu

SEQ ID NO: 624 - RNA, 22 nt, Human
gcucacugcaaccuccaccucc

SEQ ID NO: 625 - RNA, 22 nt, Human
ucuaagagaaaggaaguucaga

SEQ ID NO: 626 - RNA, 22 nt, Human
uuguucuugucuuugccuucac

SEQ ID NO: 627 - RNA, 22 nt, Human
ccaggcuggagugcaguggcac

SEQ ID NO: 628 - RNA, 22 nt, Human
aaagugcuuccuuuuugagggu

SEQ ID NO: 629 - RNA, 22 nt, Human
uccaaaugagcucugccuucca

SEQ ID NO: 630 - RNA, 22 nt, Human
gccuguaaucccagcacuuugu

SEQ ID NO: 631 - RNA, 22 nt, Human
aauguguugaauaaauugugcc

SEQ ID NO: 632 - RNA, 22 nt, Human
ccagcccgaaucccuggccagg

SEQ ID NO: 633 - RNA, 22 nt, Human
cuagauaacuuauuuucaagga

SEQ ID NO: 634 - RNA, 20 nt, Human
gcugcugggccauuuguugg

SEQ ID NO: 635 - RNA, 22 nt, Human
cucauugcccagauccccacag

SEQ ID NO: 636 - RNA, 21 nt, Human
cugugguacagcugggacgga

SEQ ID NO: 637 - RNA, 23 nt, Human
guguugucgcuggguuuugaggg

SEQ ID NO: 638 - RNA, 22 nt, Human
uggaguuggcugcagaugaguc

SEQ ID NO: 639 - RNA, 22 nt, Human
cagucacaagcguaccuaauuu

SEQ ID NO: 640 - RNA, 22 nt, Human
acugcaaagggaagcccuuucu

SEQ ID NO: 641 - RNA, 22 nt, Human
agcgccacugcacuccagccug

SEQ ID NO: 642 - RNA, 22 nt, Human
cacugcacuccagccucgguga

SEQ ID NO: 643 - RNA, 22 nt, Human
gggcuagccucuucccugcucc

SEQ ID NO: 644 - RNA, 22 nt, Human
ugcgccaugugcucucggcccu

SEQ ID NO: 645 - RNA, 22 nt, Human
uuuuggccacauccuuuugagu

SEQ ID NO: 646 - RNA, 22 nt, Human
cggcauccccacuuccuccugc

SEQ ID NO: 647 - RNA, 22 nt, Human
cuggcucucaggcuggucccca

SEQ ID NO: 648 - RNA, 22 nt, Human
ugcaccacugcaccccagucug

SEQ ID NO: 649 - RNA, 22 nt, Human
ugccaguauccuucugagaccc

SEQ ID NO: 650 - RNA, 18 nt, Human
gcaagugucuguccccuu

SEQ ID NO: 651 - RNA, 22 nt, Human
ugacauuuccuagugcuuugug

SEQ ID NO: 652 - RNA, 22 nt, Human
ucacugcacuccagccugggca

SEQ ID NO: 653 - RNA, 22 nt, Human
aagaccagccuauguuuuccau

SEQ ID NO: 654 - RNA, 22 nt, Human
cuuagagauggguuuuacuuag

SEQ ID NO: 655 - RNA, 22 nt, Human
aaagugcugggauuacaggcau

SEQ ID NO: 656 - RNA, 22 nt, Human
cuggccccuuucauucuggaag

SEQ ID NO: 657 - RNA, 19 nt, Human
gccucauuuccaccucccc

SEQ ID NO: 658 - RNA, 22 nt, Human
uucccugccauaccugaaggca

SEQ ID NO: 659 - RNA, 22 nt, Human
gguuuuauccuacccacacagc

SEQ ID NO: 660 - RNA, 22 nt, Human
ugcgccuggggcccuggcuguc

SEQ ID NO: 661 - RNA, 22 nt, Human
cacugcacuccauccugggaaa

SEQ ID NO: 662 - RNA, 22 nt, Human
caguucccuccgccagcacuuc

SEQ ID NO: 663 - RNA, 20 nt, Human
ccagaccauuuugccuuacc

SEQ ID NO: 664 - RNA, 22 nt, Human
uacaaccucugccucccaaguu

SEQ ID NO: 665 - RNA, 22 nt, Human
cgccauguccagcgucuucggg

SEQ ID NO: 666 - RNA, 22 nt, Human
ugccuccaacagcccauccuag

SEQ ID NO: 667 - RNA, 22 nt, Human
ucaccaggcuagagugcagugg

SEQ ID NO: 668 - RNA, 22 nt, Human
cccacugcugcgccgggcgccg

SEQ ID NO: 669 - RNA, 22 nt, Human
gcaggcucuggcuuauucuggg

SEQ ID NO: 670 - RNA, 22 nt, Human
gcgccgccauccgcauccucgu

SEQ ID NO: 671 - RNA, 22 nt, Human
ucacaucuaauuccauuucugc

SEQ ID NO: 672 - RNA, 22 nt, Human
gugacacccgcaugccacugug

SEQ ID NO: 673 - RNA, 22 nt, Human
ugcagccucuuguuucagcccc

SEQ ID NO: 674 - RNA, 22 nt, Human
ggcccagugcaagcucuuucug

SEQ ID NO: 675 - RNA, 22 nt, Human
aggcuggagugcagugguguga

SEQ ID NO: 676 - RNA, 22 nt, Human
gcucacugcaagcucugccucc

SEQ ID NO: 677 - RNA, 22 nt, Human
caaauuccauucaugcucccuu

SEQ ID NO: 678 - RNA, 19 nt, Human
gccaucccaagcauuuugg

SEQ ID NO: 679 - RNA, 22 nt, Human
gacaagcucccgguggcccucc

SEQ ID NO: 680 - RNA, 22 nt, Human
agcuaccugauccuucuucuga

SEQ ID NO: 681 - RNA, 22 nt, Human
ggguaaaucucuuuucauggcu

SEQ ID NO: 682 - RNA, 22 nt, Human
cuguccuuccagccgaaaucua

SEQ ID NO: 683 - RNA, 22 nt, Human
gcauggcuucggggugcugccu

SEQ ID NO: 684 - RNA, 19 nt, Human
uaggacccugguggccccc

SEQ ID NO: 685 - RNA, 22 nt, Human
aaaagggacgacaacaggccac

SEQ ID NO: 686 - RNA, 22 nt, Human
cccagcucuucaagucaccccc

SEQ ID NO: 687 - RNA, 22 nt, Human
acugcacuccagccugggacac

SEQ ID NO: 688 - RNA, 22 nt, Human
agcuggcuuacuugagaugcau

SEQ ID NO: 689 - RNA, 22 nt, Human
gaccuugugaucccccugccuu

SEQ ID NO: 690 - RNA, 22 nt, Human
ccgccuggcccauugcagggca

SEQ ID NO: 691 - RNA, 22 nt, Human
ugaacuccugaccucaugaucc

SEQ ID NO: 692 - RNA, 22 nt, Human
gaccauccuggccaacguggua

SEQ ID NO: 693 - RNA, 22 nt, Human
cccaggcuuuucucuugcccca

SEQ ID NO: 694 - RNA, 22 nt, Human
uucuucagccuaccuugaccuc

SEQ ID NO: 695 - RNA, 22 nt, Human
cugcggggccuggacagggagg

SEQ ID NO: 696 - RNA, 22 nt, Human
ggcuguguggccgugggcucua

SEQ ID NO: 697 - RNA, 22 nt, Human
gggccaccccacugcccacgcu

SEQ ID NO: 698 - RNA, 22 nt, Human
ccccacuguuuucuucauccua

SEQ ID NO: 699 - RNA, 22 nt, Human
ggagugcaguggcgugagcucg

SEQ ID NO: 700 - RNA, 22 nt, Human
uaggaggauugcuuguggccag

SEQ ID NO: 701 - RNA, 22 nt, Human
cugagggcagguggugcugcca

SEQ ID NO: 702 - RNA, 22 nt, Human
gcaccaccaccaucggcaccuc

SEQ ID NO: 703 - RNA, 22 nt, Human
cuuguuuaucucuguagcccug

SEQ ID NO: 704 - RNA, 22 nt, Human
guggguucguggucucgcuggc

SEQ ID NO: 705 - RNA, 22 nt, Human
aaagcccuggccagacaccagu

SEQ ID NO: 706 - RNA, 22 nt, Human
aucggcaagccccacaccgucc

SEQ ID NO: 707 - RNA, 21 nt, Human
agccucagguuguugguucuu

SEQ ID NO: 708 - RNA, 22 nt, Human
cggugggugcuucaggcggugg

SEQ ID NO: 709 - RNA, 23 nt, Human
aauggucuuccuccaccccucug

SEQ ID NO: 710 - RNA, 22 nt, Human
ucacugcaagcucugccuuccg

SEQ ID NO: 711 - RNA, 22 nt, Human
uggucuuugucccuccuugauc

SEQ ID NO: 712 - RNA, 22 nt, Human
agugcaauggcgugaucuuggc

SEQ ID NO: 713 - RNA, 22 nt, Human
augccacugcgcuccagccugg

SEQ ID NO: 714 - RNA, 22 nt, Human
uuucuuccugcuuugucccaug

SEQ ID NO: 715 - RNA, 22 nt, Human
cucucgccagcggggcugcgcu

SEQ ID NO: 716 - RNA, 22 nt, Human
uauguuuggccuggcaauuuca

SEQ ID NO: 717 - RNA, 22 nt, Human
ccaccagcugcauaugcacgua

SEQ ID NO: 718 - RNA, 22 nt, Human
guguccccacccaaaucucauc

SEQ ID NO: 719 - RNA, 22 nt, Human
ggaaaggccuggguguccuggg

SEQ ID NO: 720 - RNA, 22 nt, Human
gggcggaucauuugaggucagg

SEQ ID NO: 721 - RNA, 22 nt, Human
acuguacuccagccucggugac

SEQ ID NO: 722 - RNA, 22 nt, Human
gauaauccacucugcugacuuu

SEQ ID NO: 723 - RNA, 22 nt, Human
gccuguaaucccagcacuuugg

SEQ ID NO: 724 - RNA, 22 nt, Human
uuuaaaucacaacucugccccu

SEQ ID NO: 725 - RNA, 22 nt, Human
gaugaguuugccuggccugcag

SEQ ID NO: 726 - RNA, 22 nt, Human
ugccaccccggaccccgaagug

SEQ ID NO: 727 - RNA, 22 nt, Human
cacugcaaccuccgccuccugg

SEQ ID NO: 728 - RNA, 22 nt, Human
cacugcaagcaagcuccgccuc

SEQ ID NO: 729 - RNA, 22 nt, Human
ggcucauaucccggccaucauu

SEQ ID NO: 730 - RNA, 22 nt, Human
auucugugcuaacugcaggcca

SEQ ID NO: 731 - RNA, 22 nt, Human
caggcuggaguucaguggugug

SEQ ID NO: 732 - RNA, 22 nt, Human
cauuccuggcccgggcgccguc

SEQ ID NO: 733 - RNA, 22 nt, Human
cagguucaagcgauucuccugc

SEQ ID NO: 734 - RNA, 22 nt, Human
gccuggccgggucuuggauuuu

SEQ ID NO: 735 - RNA, 22 nt, Human
gguucucagccugagccgcccc

SEQ ID NO: 736 - RNA, 22 nt, Human
cgcgagguggagguugcaguga

SEQ ID NO: 737 - RNA, 22 nt, Human
ucacugcacuucagcuugggca

SEQ ID NO: 738 - RNA, 22 nt, Human
aagugcugggauuacaggcgug

SEQ ID NO: 739 - RNA, 22 nt, Human
augugagugcuaugauagacag

SEQ ID NO: 740 - RNA, 22 nt, Human
aucacccaggcuggagugcagu

SEQ ID NO: 741 - RNA, 22 nt, Human
uaucgagcuggacgggcugguc

SEQ ID NO: 742 - RNA, 22 nt, Human
gcuguuuucccauagcugguca

SEQ ID NO: 743 - RNA, 22 nt, Human
ggagugcaauggcuugaucuug

SEQ ID NO: 744 - RNA, 22 nt, Human
aggaucuugcuauguuggccag

SEQ ID NO: 745 - RNA, 18 nt, Human
cuuuuccccuuuggacuc

SEQ ID NO: 746 - RNA, 22 nt, Human
cugaggcuggagugcaguggug

SEQ ID NO: 747 - RNA, 22 nt, Human
gccaugacucuccauaccaaag

SEQ ID NO: 748 - RNA, 22 nt, Human
ccugcuggcucuguugcucggc

SEQ ID NO: 749 - RNA, 22 nt, Human
cccugccuugucugggcuaggu

SEQ ID NO: 750 - RNA, 22 nt, Human
ggcccagguuggagugcaguga

SEQ ID NO: 751 - RNA, 22 nt, Human
ugcucuguuggcuucuuuuguc

SEQ ID NO: 752 - RNA, 22 nt, Human
agugauucuccugccucagccu

SEQ ID NO: 753 - RNA, 22 nt, Human
aguuggcacugagcugugauug

SEQ ID NO: 754 - RNA, 22 nt, Human
aagguggguggaucacgagguc

SEQ ID NO: 755 - RNA, 22 nt, Human
gaaucccuugcauuaucccuuu

SEQ ID NO: 756 - RNA, 22 nt, Human
uccccaagcaggcaaucucccg

SEQ ID NO: 757 - RNA, 22 nt, Human
ugcccacugcuggccaccaccc

SEQ ID NO: 758 - RNA, 22 nt, Human
gcccugcccucucggcacucgc

SEQ ID NO: 759 - RNA, 22 nt, Human
aaagugcuaggauuacaggugu

SEQ ID NO: 760 - RNA, 22 nt, Human
gggcggaucaccugaggucagg

SEQ ID NO: 761 - RNA, 22 nt, Human
cugugcucuuuccacggcccca

SEQ ID NO: 762 - RNA, 22 nt, Human
cuccccagcccugguauucuga

SEQ ID NO: 763 - RNA, 22 nt, Human
cauugcacuccagccuggguaa

SEQ ID NO: 764 - RNA, 22 nt, Human
gcgcugcgccuccucuuccgca

SEQ ID NO: 765 - RNA, 22 nt, Human
agugcugggcuaucuacugcua

SEQ ID NO: 766 - RNA, 22 nt, Human
ugugacugguugucccgcuuuc

SEQ ID NO: 767 - RNA, 22 nt, Human
cucauugcaaccuccgccuccc

SEQ ID NO: 768 - RNA, 22 nt, Human
gccauugcacuccagccuaggc

SEQ ID NO: 769 - RNA, 22 nt, Human
uuccacauguuagcugguuaaa

SEQ ID NO: 770 - RNA, 22 nt, Human
gacuguggggaagcagaugcca

SEQ ID NO: 771 - RNA, 19 nt, Human
uguccguggccuucuggau

SEQ ID NO: 772 - RNA, 22 nt, Human
acugcauuccagccugggcaac

SEQ ID NO: 773 - RNA, 22 nt, Human
uccauuggccuuuuauccuaga

SEQ ID NO: 774 - RNA, 22 nt, Human
cacugcaagcuccgccucuggg

SEQ ID NO: 775 - RNA, 22 nt, Human
cuugggaggcagagguugcagu

SEQ ID NO: 776 - RNA, 22 nt, Human
uccacaaggcagcuccuccagg

SEQ ID NO: 777 - RNA, 22 nt, Human
gcucccaccgccgcuaugggua

SEQ ID NO: 778 - RNA, 22 nt, Human
cucgcaugcccugccucaucca

SEQ ID NO: 779 - RNA, 22 nt, Human
ggccggggccugcucgccugug

SEQ ID NO: 780 - RNA, 22 nt, Human
ggucaggagcccuuggcccccu

SEQ ID NO: 781 - RNA, 19 nt, Human
uggucuggcccacaugguc

SEQ ID NO: 782 - RNA, 22 nt, Human
gguucagagccugcccaguaua

SEQ ID NO: 783 - RNA, 22 nt, Human
cauuggccuuuuauccuagagg

SEQ ID NO: 784 - RNA, 22 nt, Human
uccucagcuuggccacggaguu

SEQ ID NO: 785 - RNA, 22 nt, Human
auguuggccaggcuggucuuga

SEQ ID NO: 786 - RNA, 22 nt, Human
guccacagcucugaggucuccc

SEQ ID NO: 787 - RNA, 21 nt, Human
gccuaguggauuugaagggcc

SEQ ID NO: 788 - RNA, 22 nt, Human
ucagcuccuaccccggccccag

SEQ ID NO: 789 - RNA, 22 nt, Human
agagucucccuguguugcccug

SEQ ID NO: 790 - RNA, 22 nt, Human
guguaagaaccuucuagagccc

SEQ ID NO: 791 - RNA, 22 nt, Human
acuguaaccucaaacuccuggg

SEQ ID NO: 792 - RNA, 22 nt, Human
guggccaaccuggcccugaacu

SEQ ID NO: 793 - RNA, 22 nt, Human
uauuugucuggucuaaggaggg

SEQ ID NO: 794 - RNA, 22 nt, Human
ggagugcaguggcgugaucuca

SEQ ID NO: 795 - RNA, 22 nt, Human
uccuccagagcuucauccugcc

SEQ ID NO: 796 - RNA, 22 nt, Human
ugaggcccaccuuggccccggc

SEQ ID NO: 797 - RNA, 22 nt, Human
augauggcuaggcugguuuuga

SEQ ID NO: 798 - RNA, 22 nt, Human
cgccccggacgucugaccaaac

SEQ ID NO: 799 - RNA, 22 nt, Human
ggccgcccuuuccacgguuucu

SEQ ID NO: 800 - RNA, 18 nt, Human
aggcuuacagcagcaggc

SEQ ID NO: 801 - RNA, 22 nt, Human
ggcuuccugccucgggcuggcc

SEQ ID NO: 802 - RNA, 21 nt, Human
gauggguuuguuggagagguc

SEQ ID NO: 803 - RNA, 22 nt, Human
ucacugcaaccuccaccucccg

SEQ ID NO: 804 - RNA, 22 nt, Human
gaauguguacugagugccccuu

SEQ ID NO: 805 - RNA, 21 nt, Human
uccacugucccuggcacuuuu

SEQ ID NO: 806 - RNA, 22 nt, Human
gcaccacuacacuccagccugg

SEQ ID NO: 807 - RNA, 22 nt, Human
augguagcuguccacaucagga

SEQ ID NO: 808 - RNA, 22 nt, Human
cugaggcaggcagaucacuuga

SEQ ID NO: 809 - RNA, 22 nt, Human
guggcccagguuggagugcagu

SEQ ID NO: 810 - RNA, 22 nt, Human
gaccuugugaucugcccaccuu

SEQ ID NO: 811 - RNA, 22 nt, Human
gugaucugccagccucagccuc

SEQ ID NO: 812 - RNA, 22 nt, Human
agacagggugaucgcuugagcc

SEQ ID NO: 813 - RNA, 22 nt, Human
cccaggaggucaaggcugcagu

SEQ ID NO: 814 - RNA, 22 nt, Human
cggucucccgugugugugcgcu

SEQ ID NO: 815 - RNA, 22 nt, Human
agcgggguguuuuggguggccu

SEQ ID NO: 816 - RNA, 22 nt, Human
gucuccucccuuucauucaccu

SEQ ID NO: 817 - RNA, 22 nt, Human
ccugcucucuguucuuaagcuu

SEQ ID NO: 818 - RNA, 22 nt, Human
caaguggaaugcucuuccuccc

SEQ ID NO: 819 - RNA, 22 nt, Human
aaggccgccccuucaugcuccu

SEQ ID NO: 820 - RNA, 22 nt, Human
uguccucauccuccagucuguc

SEQ ID NO: 821 - RNA, 18 nt, Human
uggcgauggucauuuuuc

SEQ ID NO: 822 - RNA, 22 nt, Human
uugggggaggccugcugcccau

SEQ ID NO: 823 - RNA, 22 nt, Human
gcggggcccggacccagccucu

SEQ ID NO: 824 - RNA, 22 nt, Human
ugggguauccguuaguaagaug

SEQ ID NO: 825 - RNA, 22 nt, Human
uggaguuggccgcccggaccga

SEQ ID NO: 826 - RNA, 22 nt, Human
aguguguuguaggcucaaaugg

SEQ ID NO: 827 - RNA, 22 nt, Human
cgcuuccagaguaaggcgcugc

SEQ ID NO: 828 - RNA, 22 nt, Human
gauaucauugagcccaggaguu

SEQ ID NO: 829 - RNA, 22 nt, Human
cacugcacuccagcuuggguga

SEQ ID NO: 830 - RNA, 16 nt, Human
cugaagcccagcuucc

SEQ ID NO: 831 - RNA, 22 nt, Human
caucucuggcuuggauuauggu

SEQ ID NO: 832 - RNA, 22 nt, Human
uuuaccuuugugggucucccuc

SEQ ID NO: 833 - RNA, 21 nt, Human
cuagccccuacuccaaguuga

SEQ ID NO: 834 - RNA, 22 nt, Human
gcuggcaaggugcuggagggcc

SEQ ID NO: 835 - RNA, 22 nt, Human
uuccaaaggcugcaccuugccc

SEQ ID NO: 836 - RNA, 22 nt, Human
gaagggggaagagagcuggccg

SEQ ID NO: 837 - RNA, 21 nt, Human
uuguuccuaucugccuccugc

SEQ ID NO: 838 - RNA, 19 nt, Human
uggagcugggucuggggca

SEQ ID NO: 839 - RNA, 22 nt, Human
cacugcacuccagccuggguga

SEQ ID NO: 840 - RNA, 22 nt, Human
cauugcacucuagccuggguga

SEQ ID NO: 841 - RNA, 18 nt, Human
agccugucccuucuccug

SEQ ID NO: 842 - RNA, 22 nt, Human
ucacccaggcuggaguguagug

SEQ ID NO: 843 - RNA, 19 nt, Human
cugcugccggagacucguc

SEQ ID NO: 844 - RNA, 22 nt, Human
aaaaccuaagccaguagcuccc

SEQ ID NO: 845 - RNA, 22 nt, Human
ggcucacugcaaccuccaccuc

SEQ ID NO: 846 - RNA, 22 nt, Human
cuguaaucccagcuacucggga

SEQ ID NO: 847 - RNA, 22 nt, Human
gccaucauauccccugugaccu

SEQ ID NO: 848 - RNA, 22 nt, Human
ccagguuggaguucaguggcgc

SEQ ID NO: 849 - RNA, 22 nt, Human
ugguuaacuucugagcaggcug

SEQ ID NO: 850 - RNA, 22 nt, Human
gcuggcugacagauuuggggug

SEQ ID NO: 851 - RNA, 22 nt, Human
caucccugucgucaagucucug

SEQ ID NO: 852 - RNA, 22 nt, Human
aaagugcugcgacauuugagcg

SEQ ID NO: 853 - RNA, 22 nt, Human
augucaugaggcuagcccccaa

SEQ ID NO: 854 - RNA, 22 nt, Human
aaucacuugaacccaagaagug

SEQ ID NO: 855 - RNA, 23 nt, Human
ugaggcaggcggaucacgagguc

SEQ ID NO: 856 - RNA, 22 nt, Human
aagagguagcagucacaaaaga

SEQ ID NO: 857 - RNA, 22 nt, Human
ccguggucaccugagcuccuug

SEQ ID NO: 858 - RNA, 22 nt, Human
caguuucuuccucccccagaga

SEQ ID NO: 859 - RNA, 22 nt, Human
aucuuuuaucacucccacugcu

SEQ ID NO: 860 - RNA, 22 nt, Human
ucacccaggcuggagugcagug

SEQ ID NO: 861 - RNA, 22 nt, Human
ucucccaggcaggagugcagug

SEQ ID NO: 862 - RNA, 22 nt, Human
ggggcuggucuuuccacuuacu

SEQ ID NO: 863 - RNA, 22 nt, Human
uguaaucccagcuacucgggag

SEQ ID NO: 864 - RNA, 22 nt, Human
cugaucucaagugauccaccca

SEQ ID NO: 865 - RNA, 18 nt, Human
uagguuacagccagccag

SEQ ID NO: 866 - RNA, 22 nt, Human
ccucugugucuccaagaggccu

SEQ ID NO: 867 - RNA, 22 nt, Human
cugccugccuggcccaggaacc

SEQ ID NO: 868 - RNA, 22 nt, Human
acaaagugccucccuuuagagu

SEQ ID NO: 869 - RNA, 22 nt, Human
ggggaaagccagcccugcuucc

SEQ ID NO: 870 - RNA, 22 nt, Human
ggagugcaguggugggaucuca

SEQ ID NO: 871 - RNA, 22 nt, Human
aucgaucccgcguaaggccccg

SEQ ID NO: 872 - RNA, 22 nt, Human
ucugugcuaggcagccuggccc

SEQ ID NO: 873 - RNA, 22 nt, Human
cuguccccacccaaaucucauc

SEQ ID NO: 874 - RNA, 22 nt, Human
gagccgcccuccacgauguccc

SEQ ID NO: 875 - RNA, 22 nt, Human
ggugguggagcgggcccaggcc

SEQ ID NO: 876 - RNA, 22 nt, Human
ucacugcaaccuccaccagccu

SEQ ID NO: 877 - RNA, 22 nt, Human
cuguccugccaguccuggacuc

SEQ ID NO: 878 - RNA, 22 nt, Human
ggcgggcagcgucuugcuggcc

SEQ ID NO: 879 - RNA, 22 nt, Human
uccuggggcuugucgcuggcca

SEQ ID NO: 880 - RNA, 22 nt, Human
cagcuggugcuugccuggcuaa

SEQ ID NO: 881 - RNA, 22 nt, Human
caggcuggcucccugaagguuc

SEQ ID NO: 882 - RNA, 22 nt, Human
agguggccacaagguggcuggc

SEQ ID NO: 883 - RNA, 22 nt, Human
uggagacacaggaccagacugc

SEQ ID NO: 884 - RNA, 22 nt, Human
ggcucuggcuuuggaggagcag

SEQ ID NO: 885 - RNA, 22 nt, Human
cuggcuaagauccaagaaaggc

SEQ ID NO: 886 - RNA, 22 nt, Human
gcuguagugaauggccgcguuc

SEQ ID NO: 887 - RNA, 20 nt, Human
uguuuguguggggccuuggc

SEQ ID NO: 888 - RNA, 22 nt, Human
aucaagagcacagugcuggcau

SEQ ID NO: 889 - RNA, 22 nt, Human
cugggaggcggagguugcagug

SEQ ID NO: 890 - RNA, 22 nt, Human
ucacugcaaccuccgccucccg

SEQ ID NO: 891 - RNA, 22 nt, Human
ucucuauuugccuaggcuugug

SEQ ID NO: 892 - RNA, 22 nt, Human
guggcgugaucucggcucacug

SEQ ID NO: 893 - RNA, 22 nt, Human
ucguuaccauagccuugucccu

SEQ ID NO: 894 - RNA, 22 nt, Human
cccaggaggccugccuggccgg

SEQ ID NO: 895 - RNA, 22 nt, Human
cagcucgggccucccucucccg

SEQ ID NO: 896 - RNA, 22 nt, Human
augagaugaggaauggcccucc

SEQ ID NO: 897 - RNA, 22 nt, Human
aggccgaggcgggcggaucacc

SEQ ID NO: 898 - RNA, 22 nt, Human
acggugcagccugucccuucuc

SEQ ID NO: 899 - RNA, 21 nt, Human
ggagguacuguagcuggcguu

SEQ ID NO: 900 - RNA, 22 nt, Human
cuuuggaacacccagcucugug

SEQ ID NO: 901 - RNA, 22 nt, Human
ugggcgacagagcaagacuccg

SEQ ID NO: 902 - RNA, 22 nt, Human
ugggugacagagcaagacucug

SEQ ID NO: 903 - RNA, 22 nt, Human
uggcuuuaguaauaaguuucuc

SEQ ID NO: 904 - RNA, 22 nt, Human
ugcuagcugcccgaaggucuca

SEQ ID NO: 905 - RNA, 22 nt, Human
gcuucagagaggggugaagcug

SEQ ID NO: 906 - RNA, 22 nt, Human
gcugccuugcccucuucccaua

SEQ ID NO: 907 - RNA, 22 nt, Human
gcuguaagucaccuggcccgau

SEQ ID NO: 908 - RNA, 22 nt, Human
ugcuggcuauccugcgccuuuc

SEQ ID NO: 909 - RNA, 22 nt, Human
ccaggcuggagugcaagcagca

SEQ ID NO: 910 - RNA, 22 nt, Human
gcuagguuggggaaguucuccu

SEQ ID NO: 911 - RNA, 22 nt, Human
ccaaagugcugggauuacaggc

SEQ ID NO: 912 - RNA, 22 nt, Human
gccuggacuguucuaccauuuu

SEQ ID NO: 913 - RNA, 19 nt, Human
gccgggcccggguuggccg

SEQ ID NO: 914 - RNA, 22 nt, Human
cagccucuaugcccccgucacc

SEQ ID NO: 915 - RNA, 22 nt, Human
cuggcuagauguguggccauga

SEQ ID NO: 916 - RNA, 22 nt, Human
acugcacuccauccugggcaac

SEQ ID NO: 917 - RNA, 22 nt, Human
ccuucucagccccagcucccgc

SEQ ID NO: 918 - RNA, 22 nt, Human
gucucccaaacucugauggucc

SEQ ID NO: 919 - RNA, 22 nt, Human
gguccccccauggugagcacug

SEQ ID NO: 920 - RNA, 22 nt, Human
cggguucacgccauucuccugc

SEQ ID NO: 921 - RNA, 22 nt, Human
agcgacaccgccugcaggccau

SEQ ID NO: 922 - RNA, 22 nt, Human
gaacuuggccugucugucuggc

SEQ ID NO: 923 - RNA, 21 nt, Human
ugggucagagggaaaguguau

SEQ ID NO: 924 - RNA, 22 nt, Human
uguugcccagguucucuccugc

SEQ ID NO: 925 - RNA, 22 nt, Human
cauugcacuccagucugggcca

SEQ ID NO: 926 - RNA, 22 nt, Human
ugguucuucgcugggcggcugc

SEQ ID NO: 927 - RNA, 22 nt, Human
caaagugcuaggauuacaggcg

SEQ ID NO: 928 - RNA, 21 nt, Human
ugguagguacuggcuucaggc

SEQ ID NO: 929 - RNA, 21 nt, Human
cacugcacuccagcucugggu

SEQ ID NO: 930 - RNA, 22 nt, Human
gucuugucccagcucugccacu

SEQ ID NO: 931 - RNA, 23 nt, Human
gccugggaguugcgaucugcccg

SEQ ID NO: 932 - RNA, 22 nt, Human
gcagcaucccggccuccacugu

SEQ ID NO: 933 - RNA, 18 nt, Human
ucugccccagccgcacug

SEQ ID NO: 934 - RNA, 22 nt, Human
acccauccagugucccugcuag

SEQ ID NO: 935 - RNA, 22 nt, Human
gccuggccaacauagugggacc

SEQ ID NO: 936 - RNA, 22 nt, Human
cauugcacucuagucuggguga

SEQ ID NO: 937 - RNA, 20 nt, Human
aagacaccaguggcagcccc

SEQ ID NO: 938 - RNA, 22 nt, Human
uccugggcuuuggcuuguuggg

SEQ ID NO: 939 - RNA, 22 nt, Human
ugguagucggccucgguggcuc

SEQ ID NO: 940 - RNA, 22 nt, Human
uacugcgccuucaccaagcggc

SEQ ID NO: 941 - RNA, 22 nt, Human
ucacugcaagcuccgccuuccg

SEQ ID NO: 942 - RNA, 22 nt, Human
agugccuucagauuugccccag

SEQ ID NO: 943 - RNA, 22 nt, Human
acccucuugagggaagcacuuu

SEQ ID NO: 944 - RNA, 22 nt, Human
gccccaagucccuauguuucca

SEQ ID NO: 945 - RNA, 22 nt, Human
aucccccuguaucuggaagaau

SEQ ID NO: 946 - RNA, 22 nt, Human
gugcuuugcuggaaucgaggaa

SEQ ID NO: 947 - RNA, 22 nt, Human
gaggcugagguugcagugagcc

SEQ ID NO: 948 - RNA, 22 nt, Human
uggucgggcugcaucuuccggc

SEQ ID NO: 949 - RNA, 21 nt, Human
accacugccuccaagguucag

SEQ ID NO: 950 - RNA, 22 nt, Human
uuugguccccuucaaccagcua

SEQ ID NO: 951 - RNA, 22 nt, Human
gguaugcugaagccagcucgca

SEQ ID NO: 952 - RNA, 22 nt, Human
uugcuugggcuggagugcaaug

SEQ ID NO: 953 - RNA, 22 nt, Human
uaucuaugugcucugaccucuc

SEQ ID NO: 954 - RNA, 22 nt, Human
aggagaagccaaguugugagca

SEQ ID NO: 955 - RNA, 22 nt, Human
acccauggucugguggggcccu

SEQ ID NO: 956 - RNA, 22 nt, Human
accccgcuccuugcagccucug

SEQ ID NO: 957 - RNA, 22 nt, Human
cacugcaagcuccgccucccgg

SEQ ID NO: 958 - RNA, 22 nt, Human
auucuuggauuuggcucuagug

SEQ ID NO: 959 - RNA, 22 nt, Human
acugcacuccauccagccuggc

SEQ ID NO: 960 - RNA, 22 nt, Human
gcccaggcuggagugcaguggu

SEQ ID NO: 961 - RNA, 22 nt, Human
cugcguucugccuggcggccua

SEQ ID NO: 962 - RNA, 22 nt, Human
ucacugcaagcuccaccucccg

SEQ ID NO: 963 - RNA, 22 nt, Human
cacugccuuggccaccuauccu

SEQ ID NO: 964 - RNA, 22 nt, Human
uccuuuaaacaaccagcucuca

SEQ ID NO: 965 - RNA, 22 nt, Human
ggccucucuugggacagcuguc

SEQ ID NO: 966 - RNA, 22 nt, Human
gaagagugguuaucccugcugu

SEQ ID NO: 967 - RNA, 22 nt, Human
cccugauagccccuaucaucag

SEQ ID NO: 968 - RNA, 22 nt, Human
cacugcaaccucugccuccugg

SEQ ID NO: 969 - RNA, 22 nt, Human
ucauugcaaccuccuccugggu

SEQ ID NO: 970 - RNA, 22 nt, Human
cugcagucuaccuggauuuuua

SEQ ID NO: 971 - RNA, 22 nt, Human
ggacccuagagagagccagccu

SEQ ID NO: 972 - RNA, 22 nt, Human
acccgauguuggugcucuagua

SEQ ID NO: 973 - RNA, 22 nt, Human
cggagguugaggcugcagugag

SEQ ID NO: 974 - RNA, 22 nt, Human
uugcaucuucugguugagcccc

SEQ ID NO: 975 - RNA, 22 nt, Human
gagagagcucugugccugggau

SEQ ID NO: 976 - RNA, 17 nt, Human
ggcccggugacgucacu

SEQ ID NO: 977 - RNA, 22 nt, Human
ucuagcucugcuuaucauggcu

SEQ ID NO: 978 - RNA, 22 nt, Human
cuggcuggagugcaggugagug

SEQ ID NO: 979 - RNA, 22 nt, Human
gauggccucauggcugcaggcc

SEQ ID NO: 980 - RNA, 22 nt, Human
gaggccaaggugggcagaucac

SEQ ID NO: 981 - RNA, 22 nt, Human
guccuuccacauggccaacuuc

SEQ ID NO: 982 - RNA, 22 nt, Human
caggaguuuuaaaucuagcaug

SEQ ID NO: 983 - RNA, 22 nt, Human
ggaggggcucagucuuucuugg

SEQ ID NO: 984 - RNA, 22 nt, Human
aaggcaaggcuuccagcucccc

SEQ ID NO: 985 - RNA, 22 nt, Human
ucacugcaaccuccaccacgug

SEQ ID NO: 986 - RNA, 22 nt, Human
caccgaggcuggagugcagugg

SEQ ID NO: 987 - RNA, 22 nt, Human
ccacaguccuggcuucugucug

SEQ ID NO: 988 - RNA, 22 nt, Human
gcccgcuggcugggcuccagcu

SEQ ID NO: 989 - RNA, 22 nt, Human
acugcacuucagccugggugac

SEQ ID NO: 990 - RNA, 22 nt, Human
cuucccaccaaagcccuuguug

SEQ ID NO: 991 - RNA, 22 nt, Human
aagugcugggauuauaggcaug

SEQ ID NO: 992 - RNA, 22 nt, Human
ucgugaucuguccaccucggcc

SEQ ID NO: 993 - RNA, 22 nt, Human
gcggcaggaguaaaggaggaag

SEQ ID NO: 994 - RNA, 22 nt, Human
ggcucacugcaagcuccgccuc

SEQ ID NO: 995 - RNA, 22 nt, Human
gugcccagcagcagcguccccg

SEQ ID NO: 996 - RNA, 22 nt, Human
acuguacuccagcucuggguga

SEQ ID NO: 997 - RNA, 22 nt, Human
ggaggcggaaguugcagugagc

SEQ ID NO: 998 - RNA, 22 nt, Human
ugguuguuagggaagauucauc

SEQ ID NO: 999 - RNA, 20 nt, Human
accuccuggcgggcauccuc

SEQ ID NO: 1000 - RNA, 22 nt, Human
uagcugaauugugggagaccua

SEQ ID NO: 1001 - RNA, 22 nt, Human
uccugccguccuccggggccuc

SEQ ID NO: 1002 - RNA, 19 nt, Human
ugguugugcacggguuggu

SEQ ID NO: 1003 - RNA, 22 nt, Human
uguccaggcuggagugcagugg

SEQ ID NO: 1004 - RNA, 22 nt, Human
aaagauguugcugcuccgcccu

SEQ ID NO: 1005 - RNA, 22 nt, Human
ugggaggccgaggcagguggau

SEQ ID NO: 1006 - RNA, 22 nt, Human
ucacugcaaccuccaccuuccg

SEQ ID NO: 1007 - RNA, 22 nt, Human
cuccugaauugucccucacagc

SEQ ID NO: 1008 - RNA, 22 nt, Human
caaagugcugggauuacaggug

SEQ ID NO: 1009 - RNA, 19 nt, Human
cauggugaaaccccgucuc

SEQ ID NO: 1010 - RNA, 22 nt, Human
cauccaggcuggaguacagugg

SEQ ID NO: 1011 - RNA, 22 nt, Human
uuggccaucuaagcccagccac

SEQ ID NO: 1012 - RNA, 21 nt, Human
ggccgccgccuugugcucugc

SEQ ID NO: 1013 - RNA, 22 nt, Human
cccucuggccccugugguggau

SEQ ID NO: 1014 - RNA, 22 nt, Human
uaacagaugucauuucggcggc

SEQ ID NO: 1015 - RNA, 22 nt, Human
ucucuuugccugcugccaucca

SEQ ID NO: 1016 - RNA, 22 nt, Human
gcucuaguaggaaugucccucu

SEQ ID NO: 1017 - RNA, 22 nt, Human
agcucaaugcaaccuccgccuc

SEQ ID NO: 1018 - RNA, 21 nt, Human
ccugguucaagugaugccccu

SEQ ID NO: 1019 - RNA, 22 nt, Human
caccuguacagggccgggcugg

SEQ ID NO: 1020 - RNA, 22 nt, Human
cugcagccuccacuuucugggc

SEQ ID NO: 1021 - RNA, 22 nt, Human
gcccccgaggaggugaugucgc

SEQ ID NO: 1022 - RNA, 22 nt, Human
gagguuggggcugcagugagcu

SEQ ID NO: 1023 - RNA, 22 nt, Human
acugcacuccagccugggcggc

SEQ ID NO: 1024 - RNA, 22 nt, Human
cucugugguggagugggucacc

SEQ ID NO: 1025 - RNA, 22 nt, Human
gaccuugugauccgcccacuuu

SEQ ID NO: 1026 - RNA, 22 nt, Human
ggggcuucuagggugccagauc

SEQ ID NO: 1027 - RNA, 22 nt, Human
uugcugaccuuugcucuccguu

SEQ ID NO: 1028 - RNA, 22 nt, Human
aagugcugggauuacaggugug

SEQ ID NO: 1029 - RNA, 22 nt, Human
cagcagagaaauuacauauuug

SEQ ID NO: 1030 - RNA, 22 nt, Human
uggcuuucucacagaccaccuc

SEQ ID NO: 1031 - RNA, 22 nt, Human
aauaaacaaaggacaaggaggu

SEQ ID NO: 1032 - RNA, 22 nt, Human
gcucacagccucccccggccug

SEQ ID NO: 1033 - RNA, 22 nt, Human
gugguucacuugaggucaggag

SEQ ID NO: 1034 - RNA, 21 nt, Human
cccaaaaguucugagauggcu

SEQ ID NO: 1035 - RNA, 17 nt, Human
cuggaggagcugccaug

SEQ ID NO: 1036 - RNA, 22 nt, Human
ugucuauucccccaccuccguu

SEQ ID NO: 1037 - RNA, 22 nt, Human
ggccuggcagagcgcgcggcug

SEQ ID NO: 1038 - RNA, 22 nt, Human
ccaggcuggagugcaauggcgu

SEQ ID NO: 1039 - RNA, 22 nt, Human
cgcccaggcuggagugcagugg

SEQ ID NO: 1040 - RNA, 22 nt, Human
uggcuccucacguccucagagc

SEQ ID NO: 1041 - RNA, 22 nt, Human
uccuccaguuccuugguuucag

SEQ ID NO: 1042 - RNA, 22 nt, Human
ugguggaauuguaaaauagugu

SEQ ID NO: 1043 - RNA, 22 nt, Human
cgaccuugugauccucccgccu

SEQ ID NO: 1044 - RNA, 22 nt, Human
uagcuccucccagaucucaucu

SEQ ID NO: 1045 - RNA, 22 nt, Human
ccacgcaucccuccacagagag

SEQ ID NO: 1046 - RNA, 22 nt, Human
acccaggcuggagugcaguggg

SEQ ID NO: 1047 - RNA, 22 nt, Human
gcaccgccuuggaccgcccgcu

SEQ ID NO: 1048 - RNA, 22 nt, Human
caacaugguaaaaccccgucuc

SEQ ID NO: 1049 - RNA, 22 nt, Human
ggcugggccucucccucagcug

SEQ ID NO: 1050 - RNA, 22 nt, Human
uuuucucuucccucuggaccug

SEQ ID NO: 1051 - RNA, 22 nt, Human
aggcccccuccacccauucugg

SEQ ID NO: 1052 - RNA, 18 nt, Human
aguuuguguaagaaaagc

SEQ ID NO: 1053 - RNA, 22 nt, Human
ucagggcugcacuggcuggucu

SEQ ID NO: 1054 - RNA, 22 nt, Human
cccucgugcauccaucauuuag

SEQ ID NO: 1055 - RNA, 22 nt, Human
cacugcacuccagccuggccug

SEQ ID NO: 1056 - RNA, 22 nt, Human
uucacugcucuagcccuaauuu

SEQ ID NO: 1057 - RNA, 22 nt, Human
aagacaccagagacuggccuca

SEQ ID NO: 1058 - RNA, 22 nt, Human
cagagcugguguguccuggcau

SEQ ID NO: 1059 - RNA, 22 nt, Human
uauuggccgggcgcgguggcuc

SEQ ID NO: 1060 - RNA, 22 nt, Human
aggucucuugcugucucugggc

SEQ ID NO: 1061 - RNA, 22 nt, Human
uagcccaggcuggagugcaggg

SEQ ID NO: 1062 - RNA, 22 nt, Human
cacugcacuucagccuggguga

SEQ ID NO: 1063 - RNA, 22 nt, Human
aguguuggcucggcuggcugcc

SEQ ID NO: 1064 - RNA, 22 nt, Human
cucugcugugccgccagggccu

SEQ ID NO: 1065 - RNA, 21 nt, Human
ugcaauccagccugggcgaca

SEQ ID NO: 1066 - RNA, 22 nt, Human
agugauccacccgccucaaccu

SEQ ID NO: 1067 - RNA, 22 nt, Human
ugccguggggcugaggcuggag

SEQ ID NO: 1068 - RNA, 22 nt, Human
uuuagauugugaccucccccca

SEQ ID NO: 1069 - RNA, 22 nt, Human
ggaggcuggccuucagacgggu

SEQ ID NO: 1070 - RNA, 22 nt, Human
ccugccagagcagcuuguccuc

SEQ ID NO: 1071 - RNA, 22 nt, Human
uggccucggcauccagcaagag

SEQ ID NO: 1072 - RNA, 22 nt, Human
ccacgggcagaugugguugguu

SEQ ID NO: 1073 - RNA, 22 nt, Human
acuguacuccagccugggggac

SEQ ID NO: 1074 - RNA, 22 nt, Human
cccucuuggcuucuaucccacc

SEQ ID NO: 1075 - RNA, 19 nt, Human
gcccacggcccugcucugc

SEQ ID NO: 1076 - RNA, 22 nt, Human
ggcugcugguuucuuguuuuag

SEQ ID NO: 1077 - RNA, 21 nt, Human
ggagccucuggcagggggcca

SEQ ID NO: 1078 - RNA, 22 nt, Human
uccuggccauccagccugggga

SEQ ID NO: 1079 - RNA, 22 nt, Human
ucuugccacuucauccccuuuc

SEQ ID NO: 1080 - RNA, 22 nt, Human
gcgucucauccucccgcuaauu

SEQ ID NO: 1081 - RNA, 22 nt, Human
ccuucccacauuccuuacaugc

SEQ ID NO: 1082 - RNA, 22 nt, Human
cgcgcucuccuucuggcaccca

SEQ ID NO: 1083 - RNA, 22 nt, Human
gaggcgggcagaucaccugagg

SEQ ID NO: 1084 - RNA, 22 nt, Human
gggaguugugguuggcuucugg

SEQ ID NO: 1085 - RNA, 22 nt, Human
uggggccaucucacccacuguu

SEQ ID NO: 1086 - RNA, 22 nt, Human
gcuaggcugcuggccacugagg

SEQ ID NO: 1087 - RNA, 22 nt, Human
ugccgcccggccaucucggcuc

SEQ ID NO: 1088 - RNA, 22 nt, Human
agcuggaauuacaggagcccau

SEQ ID NO: 1089 - RNA, 22 nt, Human
gggaacagcuugggcucugcca

SEQ ID NO: 1090 - RNA, 22 nt, Human
cccuggcucacuuucuguugug

SEQ ID NO: 1091 - RNA, 22 nt, Human
ucacugcaagcuccgccucccg

SEQ ID NO: 1092 - RNA, 22 nt, Human
cuggacugagcuccuugaggcc

SEQ ID NO: 1093 - RNA, 22 nt, Human
cuggguugggguuacaugacug

SEQ ID NO: 1094 - RNA, 22 nt, Human
cugguguugggucuugcuuuua

SEQ ID NO: 1095 - RNA, 22 nt, Human
acaggcgauccacccgccucag

SEQ ID NO: 1096 - RNA, 22 nt, Human
ucaggcaccuuccucuuaucug

SEQ ID NO: 1097 - RNA, 23 nt, Human
cggguucacgccauucuccugcc

SEQ ID NO: 1098 - RNA, 22 nt, Human
aaagugcuucucuuuggugggu

SEQ ID NO: 1099 - RNA, 22 nt, Human
ggcucccugcaaccuccgccuc

SEQ ID NO: 1100 - RNA, 22 nt, Human
aguuguucgugguggauucgcu

SEQ ID NO: 1101 - RNA, 22 nt, Human
gcucacugcaaccucugccucc

SEQ ID NO: 1102 - RNA, 22 nt, Human
cuccuccacccgcuggggccca

SEQ ID NO: 1103 - RNA, 22 nt, Human
uuauugcacuccagccugggua

SEQ ID NO: 1104 - RNA, 22 nt, Human
acuguacuccagccugggagac

SEQ ID NO: 1105 - RNA, 22 nt, Human
acaacuccuucuuggguccugg

SEQ ID NO: 1106 - RNA, 22 nt, Human
ccaggaguuggaggcugcagug

SEQ ID NO: 1107 - RNA, 22 nt, Human
aagucucucacauaucuggucc

SEQ ID NO: 1108 - RNA, 22 nt, Human
gaauuuuauuacuagucaacug

SEQ ID NO: 1109 - RNA, 23 nt, Human
ggcugcuggucuuucauaguggg

SEQ ID NO: 1110 - RNA, 22 nt, Human
cacugcaaucuccaucuccugg

SEQ ID NO: 1111 - RNA, 22 nt, Human
ccggagugucuggccugcuggg

SEQ ID NO: 1112 - RNA, 22 nt, Human
uccccuggugccacgaucugcu

SEQ ID NO: 1113 - RNA, 22 nt, Human
ucuugggcagcuugcucgcccc

SEQ ID NO: 1114 - RNA, 21 nt, Human
uuucuugggccgugugcuggu

SEQ ID NO: 1115 - RNA, 22 nt, Human
ggcucugcuugaggccagccug

SEQ ID NO: 1116 - RNA, 22 nt, Human
uggguccuggcugaagaucucu

SEQ ID NO: 1117 - RNA, 22 nt, Human
gcgggcggcuucaucuugcccu

SEQ ID NO: 1118 - RNA, 22 nt, Human
gcagcuauugucuccugggccc

SEQ ID NO: 1119 - RNA, 19 nt, Human
gccuucccaccacccgucc

SEQ ID NO: 1120 - RNA, 22 nt, Human
gaccucgugauccgcccgcuuu

SEQ ID NO: 1121 - RNA, 22 nt, Human
cacugcacuccagcugggugac

SEQ ID NO: 1122 - RNA, 22 nt, Human
cgucccggguucacgccauucu

SEQ ID NO: 1123 - RNA, 22 nt, Human
cucuggagugucuggccagggu

SEQ ID NO: 1124 - RNA, 22 nt, Human
gccuguauucccagcacuuugg

SEQ ID NO: 1125 - RNA, 22 nt, Human
ggcggucucagcacccucuugg

SEQ ID NO: 1126 - RNA, 22 nt, Human
ugcccaggcuggaguacagugg

SEQ ID NO: 1127 - RNA, 22 nt, Human
aucagaguaguuguugcccaga

SEQ ID NO: 1128 - RNA, 22 nt, Human
cagcagcacacugugguuugua

SEQ ID NO: 1129 - RNA, 22 nt, Human
gccuggccuccuacaguacuuu

SEQ ID NO: 1130 - RNA, 22 nt, Human
acugcacuucagccuggguguc

SEQ ID NO: 1131 - RNA, 22 nt, Human
gaccucgugauccgcccuccuu

SEQ ID NO: 1132 - RNA, 22 nt, Human
caguuuguccccauggccaugu

SEQ ID NO: 1133 - RNA, 20 nt, Human
gggcagagccagccaguccc

SEQ ID NO: 1134 - RNA, 22 nt, Human
gcucaugacuguaaucccagca

SEQ ID NO: 1135 - RNA, 22 nt, Human
gcugcucuccaagccuccuuga

SEQ ID NO: 1136 - RNA, 22 nt, Human
acugcacuccaaccugggcaau

SEQ ID NO: 1137 - RNA, 22 nt, Human
ggcgugcccuggccccgaggcu

SEQ ID NO: 1138 - RNA, 22 nt, Human
aaaugcaacgggcuuuccuuau

SEQ ID NO: 1139 - RNA, 22 nt, Human
cccuggagguugaggcugcagu

SEQ ID NO: 1140 - RNA, 22 nt, Human
gcccaggaggagaggcugcagu

SEQ ID NO: 1141 - RNA, 18 nt, Human
ucaagugauucuccugcc

SEQ ID NO: 1142 - RNA, 22 nt, Human
gcccugugcaggugugcagcag

SEQ ID NO: 1143 - RNA, 22 nt, Human
cuugcugccagccaccauacug

SEQ ID NO: 1144 - RNA, 20 nt, Human
ucugccuccaggagcuggca

SEQ ID NO: 1145 - RNA, 22 nt, Human
ugauuucaagccagggggcguu

SEQ ID NO: 1146 - RNA, 22 nt, Human
ugggggagcucaguccagccca

SEQ ID NO: 1147 - RNA, 22 nt, Human
aggccagccugcccaaagcugc

SEQ ID NO: 1148 - RNA, 22 nt, Human
uuguccguggugaguucgcauu

SEQ ID NO: 1149 - RNA, 22 nt, Human
auggccgccuguccuucccgcc

SEQ ID NO: 1150 - RNA, 22 nt, Human
cauucuaggccuggcuugggcc

SEQ ID NO: 1151 - RNA, 22 nt, Human
cagugcccgccgccguuccugg

SEQ ID NO: 1152 - RNA, 22 nt, Human
aggugcuggggcuuggccugcu

SEQ ID NO: 1153 - RNA, 22 nt, Human
cagcagcucagccuccuuccca

SEQ ID NO: 1154 - RNA, 23 nt, Human
cucauuguagccuccaguucuug

SEQ ID NO: 1155 - RNA, 22 nt, Human
cucagugcugcuggcuccuguc

SEQ ID NO: 1156 - RNA, 22 nt, Human
agccugggcaacagagcaaaac

SEQ ID NO: 1157 - RNA, 22 nt, Human
auuuacauacccagcagccucc

SEQ ID NO: 1158 - RNA, 22 nt, Human
aaagugcugggauuacaggcgu

SEQ ID NO: 1159 - RNA, 22 nt, Human
gcucccaccuuaaccuucacau

SEQ ID NO: 1160 - RNA, 22 nt, Human
cuacuggccaucugaucuacaa

SEQ ID NO: 1161 - RNA, 22 nt, Human
ugccuaguucuguauuuacagu

SEQ ID NO: 1162 - RNA, 22 nt, Human
uacccagugccacccucugagg

SEQ ID NO: 1163 - RNA, 22 nt, Human
agcccaggaguuugaggcugug

SEQ ID NO: 1164 - RNA, 22 nt, Human
cacugcaagcucugccaccugg

SEQ ID NO: 1165 - RNA, 22 nt, Human
cgccuccucucuguccugauuu

SEQ ID NO: 1166 - RNA, 22 nt, Human
uagccccugccuuugaaccugg

SEQ ID NO: 1167 - RNA, 22 nt, Human
cacugcacuucagccugggcga

SEQ ID NO: 1168 - RNA, 22 nt, Human
cccaggagguggaggcugcagu

SEQ ID NO: 1169 - RNA, 22 nt, Human
ugagugaccagaagucccccuc

SEQ ID NO: 1170 - RNA, 22 nt, Human
uugaucuuuucuugcugcccca

SEQ ID NO: 1171 - RNA, 22 nt, Human
cauuaggacgccccgcccauac

SEQ ID NO: 1172 - RNA, 22 nt, Human
ggugguucacgccuauaauccc

SEQ ID NO: 1173 - RNA, 22 nt, Human
guagcucuguuuaaaguucuuu

SEQ ID NO: 1174 - RNA, 22 nt, Human
aggcgccugcgggauccuugcc

SEQ ID NO: 1175 - RNA, 22 nt, Human
gcacuuugccccuccuuuggca

SEQ ID NO: 1176 - RNA, 22 nt, Human
ucgcucaggcaggagugcagug

SEQ ID NO: 1177 - RNA, 22 nt, Human
ugccagcugcuugucccccaca

SEQ ID NO: 1178 - RNA, 22 nt, Human
aagugauacgccugccucggcc

SEQ ID NO: 1179 - RNA, 22 nt, Human
gggcucucccacaacgugccag

SEQ ID NO: 1180 - RNA, 22 nt, Human
acugcacuccagccugggugau

SEQ ID NO: 1181 - RNA, 22 nt, Human
ucaucagggauauuggccugaa

SEQ ID NO: 1182 - RNA, 22 nt, Human
gggaggcagugcuggaggcugg

SEQ ID NO: 1183 - RNA, 22 nt, Human
ccaguuccagugcucacaucca

SEQ ID NO: 1184 - RNA, 22 nt, Human
ugccuaggucuggccuccuugg

SEQ ID NO: 1185 - RNA, 22 nt, Human
cggggcccuggggcugaagguc

SEQ ID NO: 1186 - RNA, 22 nt, Human
auugguaguuuuguauuucucu

SEQ ID NO: 1187 - RNA, 22 nt, Human
cuggcaagaaauauauaucuua

SEQ ID NO: 1188 - RNA, 20 nt, Human
gccgacugccuugugagccu

SEQ ID NO: 1189 - RNA, 22 nt, Human
gcuccagugaccaucguuuuag

SEQ ID NO: 1190 - RNA, 22 nt, Human
cccaggagguugaggcugcagu

SEQ ID NO: 1191 - RNA, 22 nt, Human
cgcccaggcuggagugcaguga

SEQ ID NO: 1192 - RNA, 22 nt, Human
cucccggcugcuccggcucccg

SEQ ID NO: 1193 - RNA, 22 nt, Human
guuacuccugguugagcuuggu

SEQ ID NO: 1194 - RNA, 22 nt, Human
gccuccagcccacgcaggccug

SEQ ID NO: 1195 - RNA, 22 nt, Human
uauucauugcccauguuuguga

SEQ ID NO: 1196 - RNA, 22 nt, Human
cacccagguuggagugcagugg

SEQ ID NO: 1197 - RNA, 19 nt, Human
agaagggcuggcaggaguu

SEQ ID NO: 1198 - RNA, 22 nt, Human
gaaguuugaagccuguuguuca

SEQ ID NO: 1199 - RNA, 22 nt, Human
gcuuuauccgcuugacccuuac

SEQ ID NO: 1200 - RNA, 22 nt, Human
ucgcccagcucaucucccacaa

SEQ ID NO: 1201 - RNA, 22 nt, Human
gaggcggagguugcagugagcu

SEQ ID NO: 1202 - RNA, 22 nt, Human
gcuuggcccauugaucagcugg

SEQ ID NO: 1203 - RNA, 22 nt, Human
gcccugggcaagguucuggcca

SEQ ID NO: 1204 - RNA, 22 nt, Human
cugggaggcggagcuugcagug

SEQ ID NO: 1205 - RNA, 22 nt, Human
aaagccucccagguuaugagua

SEQ ID NO: 1206 - RNA, 17 nt, Human
gcacugcugccuccugg

SEQ ID NO: 1207 - RNA, 22 nt, Human
gaccuugugauccaccugccuu

SEQ ID NO: 1208 - RNA, 22 nt, Human
cccgggaggcagagguugcagu

SEQ ID NO: 1209 - RNA, 22 nt, Human
uggccuuggccgugcugggguc

SEQ ID NO: 1210 - RNA, 22 nt, Human
gaggccugggcaagggggucug

SEQ ID NO: 1211 - RNA, 22 nt, Human
ccagaaaaauccucccuugucc

SEQ ID NO: 1212 - RNA, 22 nt, Human
gcucccacugcuguccugccau

SEQ ID NO: 1213 - RNA, 22 nt, Human
ggccgggugcucuggaggugcu

SEQ ID NO: 1214 - RNA, 22 nt, Human
ggcugguuagauuuguggucuu

SEQ ID NO: 1215 - RNA, 22 nt, Human
cugaggcaggagaguugcuuga

SEQ ID NO: 1216 - RNA, 22 nt, Human
ucccgucuugcuguugucugcg

SEQ ID NO: 1217 - RNA, 22 nt, Human
ggugucagacuuugcauauccu

SEQ ID NO: 1218 - RNA, 22 nt, Human
cucacugcaagcucugccuccc

SEQ ID NO: 1219 - RNA, 22 nt, Human
cugcucugcugaucagugucuc

SEQ ID NO: 1220 - RNA, 21 nt, Human
ggaauggugguuguaugguug

SEQ ID NO: 1221 - RNA, 22 nt, Human
ugauaugucccucgacaucagg

SEQ ID NO: 1222 - RNA, 22 nt, Human
uugucuuuugugggaaauaugg

SEQ ID NO: 1223 - RNA, 22 nt, Human
caccaugccuggcuaauuuuuu

SEQ ID NO: 1224 - RNA, 22 nt, Human
ccgaggcuggagugcaguggcg

SEQ ID NO: 1225 - RNA, 22 nt, Human
caggagcucagaugacaucuca

SEQ ID NO: 1226 - RNA, 22 nt, Human
gaccucgugaucugccagccuu

SEQ ID NO: 1227 - RNA, 22 nt, Human
cucuccuuggccaccuccauga

SEQ ID NO: 1228 - RNA, 19 nt, Human
ccuggccgcugugcccccu

SEQ ID NO: 1229 - RNA, 22 nt, Human
aggugcucuguguaugcauaga

SEQ ID NO: 1230 - RNA, 22 nt, Human
agucggaagcugugcguaaauc

SEQ ID NO: 1231 - RNA, 22 nt, Human
ugucugaucaugaggcagggcu

SEQ ID NO: 1232 - RNA, 17 nt, Human
gcccgcggcccggggug

SEQ ID NO: 1233 - RNA, 22 nt, Human
cucacugcaagcuccgccuccc

SEQ ID NO: 1234 - RNA, 22 nt, Human
cuuggaguaggucauugggugg

SEQ ID NO: 1235 - RNA, 22 nt, Human
ucagccagccagcuacaggcuu

SEQ ID NO: 1236 - RNA, 22 nt, Human
cauucugugagcugcuggcuuu

SEQ ID NO: 1237 - RNA, 22 nt, Human
ugccucccuggcaagucucucc

SEQ ID NO: 1238 - RNA, 22 nt, Human
cagcccgcccugaacuuucggg

SEQ ID NO: 1239 - RNA, 22 nt, Human
cuuccuccuccaucucgaaggc

SEQ ID NO: 1240 - RNA, 22 nt, Human
cugugcucccucuggcgccccg

SEQ ID NO: 1241 - RNA, 22 nt, Human
acaugauugucuggcuuggcca

SEQ ID NO: 1242 - RNA, 22 nt, Human
acuauagaugcuggcgaggcug

SEQ ID NO: 1243 - RNA, 22 nt, Human
uggcucauuucuaaacccagcu

SEQ ID NO: 1244 - RNA, 22 nt, Human
gugcuuaaagaauggcuguccg

SEQ ID NO: 1245 - RNA, 22 nt, Human
ggacagccgaguggccuucucc

SEQ ID NO: 1246 - RNA, 22 nt, Human
ggagugcaauggcgugaucuca

SEQ ID NO: 1247 - RNA, 22 nt, Human
cccugcauccaaaggccuccuc

SEQ ID NO: 1248 - RNA, 22 nt, Human
cucaggugauccaccccucuug

SEQ ID NO: 1249 - RNA, 22 nt, Human
acugcaaccuccgccugccagg

SEQ ID NO: 1250 - RNA, 22 nt, Human
gcugcacuucagccuggguguc

SEQ ID NO: 1251 - RNA, 22 nt, Human
gcagguggaucaccugagguca

SEQ ID NO: 1252 - RNA, 22 nt, Human
ggcccuggcagccacgaaagcc

SEQ ID NO: 1253 - RNA, 22 nt, Human
ucagugacuccuucuuccugcu

SEQ ID NO: 1254 - RNA, 22 nt, Human
cgaggccuccucgccgccaccg

SEQ ID NO: 1255 - RNA, 22 nt, Human
ugguggcucacaccuguaaucc

SEQ ID NO: 1256 - RNA, 22 nt, Human
ugaucucgugaucuacccgccu

SEQ ID NO: 1257 - RNA, 22 nt, Human
gcucacugcaagcuccgccucc

SEQ ID NO: 1258 - RNA, 22 nt, Human
cacugcacuccagcccgagcaa

SEQ ID NO: 1259 - RNA, 22 nt, Human
cagugcacgggccaguccugcc

SEQ ID NO: 1260 - RNA, 22 nt, Human
auccuccagcuccugcuucugc

SEQ ID NO: 1261 - RNA, 22 nt, Human
augccacugcacuucagccugg

SEQ ID NO: 1262 - RNA, 22 nt, Human
cauugcacuccagccuaggcaa

SEQ ID NO: 1263 - RNA, 22 nt, Human
cguucagcgggcuggccgugga

SEQ ID NO: 1264 - RNA, 22 nt, Human
agcccucuuccagccagcacag

SEQ ID NO: 1265 - RNA, 22 nt, Human
gugugucucccaagaaggccca

SEQ ID NO: 1266 - RNA, 18 nt, Human
uccuuucucccucaucuu

SEQ ID NO: 1267 - RNA, 22 nt, Human
ggcccaggcuggagugcagugg

SEQ ID NO: 1268 - RNA, 22 nt, Human
ucgcaccauugcacuccagcca

SEQ ID NO: 1269 - RNA, 21 nt, Human
ccucaagugccuccugcugcu

SEQ ID NO: 1270 - RNA, 22 nt, Human
gggaaauaauuaaugugaaguc

SEQ ID NO: 1271 - RNA, 22 nt, Human
gaggugggcggaucacaagguc

SEQ ID NO: 1272 - RNA, 22 nt, Human
uugacaugccuccuacaugauc

SEQ ID NO: 1273 - RNA, 22 nt, Human
auugcacuccagccugggggac

SEQ ID NO: 1274 - RNA, 22 nt, Human
cucuggacccuccugcugagag

SEQ ID NO: 1275 - RNA, 22 nt, Human
uuggaaugcacacugagccugc

SEQ ID NO: 1276 - RNA, 22 nt, Human
ccaugaauucacuccaugcuag

SEQ ID NO: 1277 - RNA, 22 nt, Human
uccuucacucccucugcaucca

SEQ ID NO: 1278 - RNA, 22 nt, Human
ccacugagguagcuggugacug

SEQ ID NO: 1279 - RNA, 22 nt, Human
ugucucuuuucaagcuacccuu

SEQ ID NO: 1280 - RNA, 22 nt, Human
cgaugguaucggccagccccgg

SEQ ID NO: 1281 - RNA, 22 nt, Human
caccuugugauccacccgccuu

SEQ ID NO: 1282 - RNA, 22 nt, Human
cugagcucaagcgauccuccca

SEQ ID NO: 1283 - RNA, 22 nt, Human
aggguugugugcuggccgcugg

SEQ ID NO: 1284 - RNA, 22 nt, Human
agauuucccuuccugcuugccu

SEQ ID NO: 1285 - RNA, 22 nt, Human
acacagagccaaaccauaucac

SEQ ID NO: 1286 - RNA, 22 nt, Human
ucucaacagugcaagcugcucc

SEQ ID NO: 1287 - RNA, 22 nt, Human
ucuggagggaagcacuuucugu

SEQ ID NO: 1288 - RNA, 22 nt, Human
ugucuccucggcuguccagcca

SEQ ID NO: 1289 - RNA, 22 nt, Human
cagagccccucgucuccaccac

SEQ ID NO: 1290 - RNA, 22 nt, Human
ugcuugcugugguuggcuggua

SEQ ID NO: 1291 - RNA, 22 nt, Human
uccagucggauaacuagacggu

SEQ ID NO: 1292 - RNA, 22 nt, Human
acuugcuggcuccuugcuucua

SEQ ID NO: 1293 - RNA, 22 nt, Human
acugcacuccagccugggcuac

SEQ ID NO: 1294 - RNA, 22 nt, Human
cugagcagaugaccagccccag

SEQ ID NO: 1295 - RNA, 19 nt, Human
gguauaugggccucacuug

SEQ ID NO: 1296 - RNA, 22 nt, Human
ggccguggucgcugacucucgu

SEQ ID NO: 1297 - RNA, 22 nt, Human
uccuucagccucccagcucaaa

SEQ ID NO: 1298 - RNA, 20 nt, Human
gccuuggugguuuugguagu

SEQ ID NO: 1299 - RNA, 22 nt, Human
guucaagaccagccuggccaac

SEQ ID NO: 1300 - RNA, 22 nt, Human
ggaggcugaggcaggcggauca

SEQ ID NO: 1301 - RNA, 16 nt, Human
gaggagccccucugcc

SEQ ID NO: 1302 - RNA, 23 nt, Human
gcagccauguucccgucucagcu

SEQ ID NO: 1303 - RNA, 22 nt, Human
cacuucccuucucugcucaugg

SEQ ID NO: 1304 - RNA, 22 nt, Human
cucuuccuagugugcagcgugg

SEQ ID NO: 1305 - RNA, 22 nt, Human
accagccuggccaacauggcaa

SEQ ID NO: 1306 - RNA, 22 nt, Human
cccucugcauacaggcgaggag

SEQ ID NO: 1307 - RNA, 22 nt, Human
gugaggcgaaggugcuggcgcc

SEQ ID NO: 1308 - RNA, 22 nt, Human
acuggggacucuggccuuuuga

SEQ ID NO: 1309 - RNA, 23 nt, Human
gauuacugguauuugcuggcucc

SEQ ID NO: 1310 - RNA, 22 nt, Human
agcuggugcucggggagcuggc

SEQ ID NO: 1311 - RNA, 20 nt, Human
ucucuaugccaugcuggccu

SEQ ID NO: 1312 - RNA, 22 nt, Human
gcagggaacuggcugggcuuuc

SEQ ID NO: 1313 - RNA, 22 nt, Human
uuuggcuucuccuaccaccucu

SEQ ID NO: 1314 - RNA, 22 nt, Human
gaccuugugauccgcccgccuu

SEQ ID NO: 1315 - RNA, 18 nt, Human
aaacugcuuccuuggccu

SEQ ID NO: 1316 - RNA, 22 nt, Human
ugccugccguuaaauguuacuu

SEQ ID NO: 1317 - RNA, 22 nt, Human
ucaggugccuuggcuaauuguu

SEQ ID NO: 1318 - RNA, 22 nt, Human
ggcgcuggccugugggaucccg

SEQ ID NO: 1319 - RNA, 22 nt, Human
ggcucacuacaaccuccgccuu

SEQ ID NO: 1320 - RNA, 22 nt, Human
uccaccaagccggggccacuuc

SEQ ID NO: 1321 - RNA, 22 nt, Human
cucacugcaagcucagccuccc

SEQ ID NO: 1322 - RNA, 18 nt, Human
cccagguuggccuacaga

SEQ ID NO: 1323 - RNA, 22 nt, Human
gaccccuaaacccgcugggcug

SEQ ID NO: 1324 - RNA, 22 nt, Human
ugcaccacugcauuccagccug

SEQ ID NO: 1325 - RNA, 22 nt, Human
cccgggaggcggagguugcagu

SEQ ID NO: 1326 - RNA, 22 nt, Human
gcuggccacagauccccaggga

SEQ ID NO: 1327 - RNA, 22 nt, Human
gggaagcuggucacccacaggc

SEQ ID NO: 1328 - RNA, 21 nt, Human
aggcagagaggaccagagacu

SEQ ID NO: 1329 - RNA, 22 nt, Human
aaagugcuuccuuuuagaggcu

SEQ ID NO: 1330 - RNA, 22 nt, Human
agcccaggcuggagugcagugg

SEQ ID NO: 1331 - RNA, 22 nt, Human
cuccucuuuagccccagcugga

SEQ ID NO: 1332 - RNA, 22 nt, Human
gcaaaaaguagugcugguuagg

SEQ ID NO: 1333 - RNA, 22 nt, Human
cagggauggcgcuggcugcccg

SEQ ID NO: 1334 - RNA, 22 nt, Human
ccuccggucauugugcgggccu

SEQ ID NO: 1335 - RNA, 22 nt, Human
acucacugcaaccuccaccucc

SEQ ID NO: 1336 - RNA, 22 nt, Human
ggggugcgggccccaucuggcu

SEQ ID NO: 1337 - RNA, 22 nt, Human
cagccccacacggucuagcucu

SEQ ID NO: 1338 - RNA, 22 nt, Human
augccacuucauuccagccucg

SEQ ID NO: 1339 - RNA, 22 nt, Human
agaugggguuucaucauguugg

SEQ ID NO: 1340 - RNA, 22 nt, Human
gugguguuugagcugccaggga

SEQ ID NO: 1341 - RNA, 22 nt, Human
gcgcucucuucuccuggcccgc

SEQ ID NO: 1342 - RNA, 23 nt, Human
cacugcaaccucugccucccagg

SEQ ID NO: 1343 - RNA, 22 nt, Human
gccuccugaguagcugggauug

SEQ ID NO: 1344 - RNA, 22 nt, Human
cuuuaauuguagcucccauaau

SEQ ID NO: 1345 - RNA, 22 nt, Human
aacccaggcuggagugcagugg

SEQ ID NO: 1346 - RNA, 22 nt, Human
ucaagcaauucuccugccucag

SEQ ID NO: 1347 - RNA, 22 nt, Human
acaguccagccuaguauguaua

SEQ ID NO: 1348 - RNA, 22 nt, Human
ucaggaggcggagguugcagug

SEQ ID NO: 1349 - RNA, 22 nt, Human
aauggucucuuuguucccugcu

SEQ ID NO: 1350 - RNA, 22 nt, Human
ggccgucccuagagaugggguu

SEQ ID NO: 1351 - RNA, 22 nt, Human
auccuagaaucagcccuugcug

SEQ ID NO: 1352 - RNA, 22 nt, Human
ggaagcucugccuagauuucag

SEQ ID NO: 1353 - RNA, 22 nt, Human
cugggaggcagagguuguagug

SEQ ID NO: 1354 - RNA, 22 nt, Human
gucccaaacuccugaccucagg

SEQ ID NO: 1355 - RNA, 22 nt, Human
uggcgcgacgugcccccugcuu

SEQ ID NO: 1356 - RNA, 22 nt, Human
ggcgugggcgaggugcucuauc

SEQ ID NO: 1357 - RNA, 22 nt, Human
cucgggcacccugguucuggug

SEQ ID NO: 1358 - RNA, 22 nt, Human
augggcuguccauugcuggcug

SEQ ID NO: 1359 - RNA, 22 nt, Human
ugagcuucccuccugcacuaca

SEQ ID NO: 1360 - RNA, 21 nt, Human
cccggcaccuccgcugcacac

SEQ ID NO: 1361 - RNA, 22 nt, Human
gugggcaucaccagggccucca

SEQ ID NO: 1362 - RNA, 22 nt, Human
gaacccuagcauguccuuuagg

SEQ ID NO: 1363 - RNA, 22 nt, Human
agggcaggagguccgucccuuc

SEQ ID NO: 1364 - RNA, 22 nt, Human
agggcagagcguuuccugcccc

SEQ ID NO: 1365 - RNA, 22 nt, Human
gcuuggcuuuacuagggggaca

SEQ ID NO: 1366 - RNA, 22 nt, Human
caugaaauuguauuggccucaa

SEQ ID NO: 1367 - RNA, 22 nt, Human
cacugcacuccagccugggcca

SEQ ID NO: 1368 - RNA, 22 nt, Human
aucugagcuccgccuccuguca

SEQ ID NO: 1369 - RNA, 22 nt, Human
ucugccuuuuacuagcuggaug

SEQ ID NO: 1370 - RNA, 22 nt, Human
auggguucaagugauucuccug

SEQ ID NO: 1371 - RNA, 22 nt, Human
caugugucuugcugcccuccau

SEQ ID NO: 1372 - RNA, 22 nt, Human
gccuccugucccaggcugagga

SEQ ID NO: 1373 - RNA, 22 nt, Human
aggaccuguaaucccagcacuu

SEQ ID NO: 1374 - RNA, 22 nt, Human
uucaaguguuuaaguucugcuu

SEQ ID NO: 1375 - RNA, 22 nt, Human
cugcccccagccugggcuucga

SEQ ID NO: 1376 - RNA, 22 nt, Human
agcuccuggcuucaagcaaucc

SEQ ID NO: 1377 - RNA, 15 nt, Human
uggcccacccguuga

SEQ ID NO: 1378 - RNA, 22 nt, Human
aguccguccugucaagcagcug

SEQ ID NO: 1379 - RNA, 22 nt, Human
ccgggguaggcccugaggcagc

SEQ ID NO: 1380 - RNA, 22 nt, Human
augccacugcgcucuagccugg

SEQ ID NO: 1381 - RNA, 22 nt, Human
cauuauucucaguucugugcag

SEQ ID NO: 1382 - RNA, 22 nt, Human
cacccgcuggucccugcaguuc

SEQ ID NO: 1383 - RNA, 22 nt, Human
uacugcacuccagccuggguga

SEQ ID NO: 1384 - RNA, 22 nt, Human
guggcccaggcuggagugcagu

SEQ ID NO: 1385 - RNA, 22 nt, Human
ucacucaggcuggagugcagug

SEQ ID NO: 1386 - RNA, 22 nt, Human
uaccaccauuugccugcuguau

SEQ ID NO: 1387 - RNA, 22 nt, Human
gcccuccagccuguggaaccgg

SEQ ID NO: 1388 - RNA, 22 nt, Human
cgcccaggcuggagugccagug

SEQ ID NO: 1389 - RNA, 22 nt, Human
auggugcuggugggaguguauu

SEQ ID NO: 1390 - RNA, 22 nt, Human
ccaaagugcugggauuacaggu

SEQ ID NO: 1391 - RNA, 20 nt, Human
agcggcuggcggaggacacg

SEQ ID NO: 1392 - RNA, 22 nt, Human
augccacugcacuccagccugg

SEQ ID NO: 1393 - RNA, 22 nt, Human
ccuuugauuucccccgucucag

SEQ ID NO: 1394 - RNA, 22 nt, Human
ggguuacucuguguuggucagg

SEQ ID NO: 1395 - RNA, 22 nt, Human
gcccauagucucuuucuuucuu

SEQ ID NO: 1396 - RNA, 22 nt, Human
auugcacuccagccugagcaaa

SEQ ID NO: 1397 - RNA, 22 nt, Human
cacugcacccucaaacuccugg

SEQ ID NO: 1398 - RNA, 22 nt, Human
ucccauggggccagccgccauc

SEQ ID NO: 1399 - RNA, 22 nt, Human
cacugcacuccagccugggcga

SEQ ID NO: 1400 - RNA, 23 nt, Human
ggggucuuggaacagguggcccu

SEQ ID NO: 1401 - RNA, 22 nt, Human
cacugcagccucaaauuccugg

SEQ ID NO: 1402 - RNA, 22 nt, Human
ugcaggcucuuggugacguggg

SEQ ID NO: 1403 - RNA, 22 nt, Human
gguggccccugggagaugcugg

SEQ ID NO: 1404 - RNA, 21 nt, Human
aaccaagccagccagccucuc

SEQ ID NO: 1405 - RNA, 22 nt, Human
gcccaggcuggaguucaguggu

SEQ ID NO: 1406 - RNA, 22 nt, Human
agccugcgaucccaccuggccu

SEQ ID NO: 1407 - RNA, 22 nt, Human
uaaccucucugugccucaguuu

SEQ ID NO: 1408 - RNA, 20 nt, Human
uagcauggcucuauggaaca

SEQ ID NO: 1409 - RNA, 21 nt, Human
cuggccuaucauaagcauuuu

SEQ ID NO: 1410 - RNA, 22 nt, Human
cagccugguccccggcucaccc

SEQ ID NO: 1411 - RNA, 22 nt, Human
gcccaggcuggagugcaguggc

SEQ ID NO: 1412 - RNA, 22 nt, Human
ccaggcuggagugcaauggcau

SEQ ID NO: 1413 - RNA, 23 nt, Human
cacugcaaucucugccuccuggg

SEQ ID NO: 1414 - RNA, 22 nt, Human
ugccucaagcccuccacugcac

SEQ ID NO: 1415 - RNA, 22 nt, Human
gacccauccuccacuuggcagc

SEQ ID NO: 1416 - RNA, 22 nt, Human
aaccaccauucucuccucuucc

SEQ ID NO: 1417 - RNA, 22 nt, Human
uuccauuuggagcucgcagccu

SEQ ID NO: 1418 - RNA, 22 nt, Human
aagguuccucucuccacccagc

SEQ ID NO: 1419 - RNA, 22 nt, Human
cuccugggaaaggcuggacaca

SEQ ID NO: 1420 - RNA, 22 nt, Human
acugcacuccagccugggcaca

SEQ ID NO: 1421 - RNA, 22 nt, Human
ucaccagcucugccucgccagu

SEQ ID NO: 1422 - RNA, 22 nt, Human
guugccuaggcuggagugcagu

SEQ ID NO: 1423 - RNA, 22 nt, Human
ugccuggccucuucagcacuuc

SEQ ID NO: 1424 - RNA, 18 nt, Human
cccugccagcucccagca

SEQ ID NO: 1425 - RNA, 22 nt, Human
gaggccucagccugcccugaac

SEQ ID NO: 1426 - RNA, 22 nt, Human
ucacugcaagcucagccucccg

SEQ ID NO: 1427 - RNA, 23 nt, Human
uccaggcccucaauccauuucca

SEQ ID NO: 1428 - RNA, 22 nt, Human
aaaagcaauugcggguuuugcc

SEQ ID NO: 1429 - RNA, 22 nt, Human
uccucagaaucaccuggcagcu

SEQ ID NO: 1430 - RNA, 22 nt, Human
ggguucagucccucuugcuacu

SEQ ID NO: 1431 - RNA, 22 nt, Human
uaguuucaucuccacccugccc

SEQ ID NO: 1432 - RNA, 19 nt, Human
gggucucuguuggcuucuu

SEQ ID NO: 1433 - RNA, 22 nt, Human
ggggaacgcgcuggcccgcgcc

SEQ ID NO: 1434 - RNA, 22 nt, Human
aggcggaagauggccccauaga

SEQ ID NO: 1435 - RNA, 22 nt, Human
ucucuucgcuggcccucgggga

SEQ ID NO: 1436 - RNA, 22 nt, Human
ugcccaggguggagugcagugg

SEQ ID NO: 1437 - RNA, 24 nt, Human
aauugcuugaacccaggaagugga

SEQ ID NO: 1438 - RNA, 22 nt, Human
gcacacggcagccuccuccuga

SEQ ID NO: 1439 - RNA, 22 nt, Human
cuccugcuucacgggcaccgcc

SEQ ID NO: 1440 - RNA, 22 nt, Human
cccuuuagccccugcagagacu

SEQ ID NO: 1441 - RNA, 22 nt, Human
uauugagaccagugcuugcuua

SEQ ID NO: 1442 - RNA, 22 nt, Human
ucgcccaggcuggaagugcagu

SEQ ID NO: 1443 - RNA, 22 nt, Human
gcucugccagcccaaggcgcag

SEQ ID NO: 1444 - RNA, 22 nt, Human
ggaggcggagguugcagugagc

SEQ ID NO: 1445 - RNA, 17 nt, Human
cccucacuccugccggg

SEQ ID NO: 1446 - RNA, 22 nt, Human
gccccugccuuugaaccuggag

SEQ ID NO: 1447 - RNA, 20 nt, Human
uucuccagugcgguagccau

SEQ ID NO: 1448 - RNA, 22 nt, Human
gcuccuuuauuuucucucgugu

SEQ ID NO: 1449 - RNA, 22 nt, Human
cauucucaguaucagccagccc

SEQ ID NO: 1450 - RNA, 22 nt, Human
uagcagaaguugcaaacuaggg

SEQ ID NO: 1451 - RNA, 22 nt, Human
ccaagcagagcagccucucugg

SEQ ID NO: 1452 - RNA, 22 nt, Human
cuaggcuggagugcaguggcac

SEQ ID NO: 1453 - RNA, 22 nt, Human
uuccugcgcccuucucgcccgc

SEQ ID NO: 1454 - RNA, 22 nt, Human
cugugcuggguccuucuuuuga

SEQ ID NO: 1455 - RNA, 22 nt, Human
agcucaccacaaccuccgccuc

SEQ ID NO: 1456 - RNA, 22 nt, Human
agucuucccagaggaggugcca

SEQ ID NO: 1457 - RNA, 22 nt, Human
gaggcggagguugcagugagcc

SEQ ID NO: 1458 - RNA, 22 nt, Human
gcccuccugagcuagcacgugu

SEQ ID NO: 1459 - RNA, 22 nt, Human
cauugcacaccagccugggcaa

SEQ ID NO: 1460 - RNA, 22 nt, Human
aguucucuugcuucagccuccc

SEQ ID NO: 1461 - RNA, 22 nt, Human
uccagcuguccacgucuuccug

SEQ ID NO: 1462 - RNA, 22 nt, Human
ugccuggccuccugauucccuc

SEQ ID NO: 1463 - RNA, 22 nt, Human
gccuccagggaugauuccuucc

SEQ ID NO: 1464 - RNA, 22 nt, Human
gucccugagccuggcauuuccc

SEQ ID NO: 1465 - RNA, 22 nt, Human
acuggccagccaacaacaauag

SEQ ID NO: 1466 - RNA, 22 nt, Human
gcuggcuccaccugcugccagg

SEQ ID NO: 1467 - RNA, 22 nt, Human
gccccagccucccgaguagcug

SEQ ID NO: 1468 - RNA, 22 nt, Human
ucccagcuccugggccccacag

SEQ ID NO: 1469 - RNA, 22 nt, Human
cacugcacuccagcccgggcaa

SEQ ID NO: 1470 - RNA, 23 nt, Human
ugaccucaugauccgcccaccuc

SEQ ID NO: 1471 - RNA, 22 nt, Human
ggccgcucuccgguguggaucu

SEQ ID NO: 1472 - RNA, 22 nt, Human
cuaaaugccccuucuggcacag

SEQ ID NO: 1473 - RNA, 22 nt, Human
ucacugcaaccucugccugcca

SEQ ID NO: 1474 - RNA, 22 nt, Human
ccgguguucaaagucugguaug

SEQ ID NO: 1475 - RNA, 22 nt, Human
cacccaggcuggaaugcagugg

SEQ ID NO: 1476 - RNA, 22 nt, Human
cacccaggcuggagugcaguga

SEQ ID NO: 1477 - RNA, 22 nt, Human
uuccauaucuguugcauaucau

SEQ ID NO: 1478 - RNA, 22 nt, Human
ccacugcacuucagccugggug

SEQ ID NO: 1479 - RNA, 22 nt, Human
gccaaauaaguguccggcccuc

SEQ ID NO: 1480 - RNA, 22 nt, Human
gcccgcgccagccucuccaucu

SEQ ID NO: 1481 - RNA, 22 nt, Human
cauugcacuccagccuuggcaa

SEQ ID NO: 1482 - RNA, 22 nt, Human
ugauagauccauauuuugguaa

SEQ ID NO: 1483 - RNA, 22 nt, Human
ugcucgccccacaugcccucau

SEQ ID NO: 1484 - RNA, 22 nt, Human
ugccugccccagcugagauauc

SEQ ID NO: 1485 - RNA, 22 nt, Human
ucacugcaaccucugccucuug

SEQ ID NO: 1486 - RNA, 23 nt, Human
uggaggagaguuugucaguauag

SEQ ID NO: 1487 - RNA, 22 nt, Human
cccaggcuggagugcaguggcg

SEQ ID NO: 1488 - RNA, 22 nt, Human
cacccaggcuggagagcagugg

SEQ ID NO: 1489 - RNA, 22 nt, Human
ucugcaccaucguaugcuuaau

SEQ ID NO: 1490 - RNA, 22 nt, Human
cucugagcugccuuuugagcuu

SEQ ID NO: 1491 - RNA, 22 nt, Human
ucccgcccuuguacuugccgag

SEQ ID NO: 1492 - RNA, 22 nt, Human
cgcccaggcuggagagcagugg

SEQ ID NO: 1493 - RNA, 21 nt, Human
gguggcuauggcugugcucgc

SEQ ID NO: 1494 - RNA, 22 nt, Human
ccuagagccgcaccuccuccac

SEQ ID NO: 1495 - RNA, 22 nt, Human
gccuccccaagcagcagggauu

SEQ ID NO: 1496 - RNA, 22 nt, Human
agaaagugcuucccuuugguga

SEQ ID NO: 1497 - RNA, 20 nt, Human
acccuggccgacugccccuu

SEQ ID NO: 1498 - RNA, 22 nt, Human
ugcugcacccucugccuccggg

SEQ ID NO: 1499 - RNA, 22 nt, Human
caggagguugagggugcaguga

SEQ ID NO: 1500 - RNA, 22 nt, Human
ugggaugcucagggccuggagc

SEQ ID NO: 1501 - RNA, 21 nt, Human
ugcucugauuuuugccccagc

SEQ ID NO: 1502 - RNA, 22 nt, Human
cgucuggcuucuccacgguaaa

SEQ ID NO: 1503 - RNA, 22 nt, Human
ugucauagugugguagcagugg

SEQ ID NO: 1504 - RNA, 22 nt, Human
ugugguagucacggcccgccac

SEQ ID NO: 1505 - RNA, 22 nt, Human
cucugccugucucauccugcaa

SEQ ID NO: 1506 - RNA, 22 nt, Human
caucuuugcccauccacuucca

SEQ ID NO: 1507 - RNA, 22 nt, Human
ggcugguggcugguucuggacc

SEQ ID NO: 1508 - RNA, 22 nt, Human
aguggucuuagcuugcugggcu

SEQ ID NO: 1509 - RNA, 22 nt, Human
ccccugcugugcuugcauggcu

SEQ ID NO: 1510 - RNA, 19 nt, Human
agccagccagcagguaugc

SEQ ID NO: 1511 - RNA, 22 nt, Human
gaggcugaggcaggaggaucac

SEQ ID NO: 1512 - RNA, 22 nt, Human
augagcacacugauaagccccu

SEQ ID NO: 1513 - RNA, 22 nt, Human
agugcuaucgaguucuaaugcu

SEQ ID NO: 1514 - RNA, 22 nt, Human
cagccuguagucugguccaggu

SEQ ID NO: 1515 - RNA, 22 nt, Human
cuggcuccuguuuaaccagcug

SEQ ID NO: 1516 - RNA, 22 nt, Human
guccccuguccagggccagcca

SEQ ID NO: 1517 - RNA, 22 nt, Human
cuugccugcccugugucauaaa

SEQ ID NO: 1518 - RNA, 22 nt, Human
ucccguagguugcuguagucgg

SEQ ID NO: 1519 - RNA, 22 nt, Human
guuggccaggcuggucucaauc

SEQ ID NO: 1520 - RNA, 22 nt, Human
ucucccagauccuuuagccucc

SEQ ID NO: 1521 - RNA, 22 nt, Human
gccuccuggggugccaucaucu

SEQ ID NO: 1522 - RNA, 23 nt, Human
aucauuaacagugcagggguagg

SEQ ID NO: 1523 - RNA, 22 nt, Human
uggccaccaccaauacuugccu

SEQ ID NO: 1524 - RNA, 21 nt, Human
ggccucccggaccgcagcgcc

SEQ ID NO: 1525 - RNA, 22 nt, Human
agcccagguccaguucacugca

SEQ ID NO: 1526 - RNA, 22 nt, Human
uccccucuuggcuugguccaga

SEQ ID NO: 1527 - RNA, 22 nt, Human
cuggccuagacagacccugauc

SEQ ID NO: 1528 - RNA, 22 nt, Human
cccuggcugcgugauggaugaa

SEQ ID NO: 1529 - RNA, 22 nt, Human
guaggccauggugguugucucu

SEQ ID NO: 1530 - RNA, 22 nt, Human
uguggcucaggcggcuucuccu

SEQ ID NO: 1531 - RNA, 22 nt, Human
ucccuguguccugggggcaccu

SEQ ID NO: 1532 - RNA, 21 nt, Human
accugagcuccaccuccugcc

SEQ ID NO: 1533 - RNA, 22 nt, Human
cccagcgaguuugccggugaac

SEQ ID NO: 1534 - RNA, 22 nt, Human
uucaaagggaaaagcaggcugg

SEQ ID NO: 1535 - RNA, 19 nt, Human
cggccccuccucucgcgcc

SEQ ID NO: 1536 - RNA, 17 nt, Human
aagugauucagcccuca

SEQ ID NO: 1537 - RNA, 22 nt, Human
ggccugggcuccgggaguuacu

SEQ ID NO: 1538 - RNA, 22 nt, Human
ccucggccggagagccaagugc

SEQ ID NO: 1539 - RNA, 22 nt, Human
ucugugccugcuuccccaccca

SEQ ID NO: 1540 - RNA, 18 nt, Human
cugcacucccgccugggc

SEQ ID NO: 1541 - RNA, 22 nt, Human
gcacuccagccuggguaacagc

SEQ ID NO: 1542 - RNA, 17 nt, Human
cuggagcagacaaaagg

SEQ ID NO: 1543 - RNA, 22 nt, Human
cucacugcaaccucugccuccc

SEQ ID NO: 1544 - RNA, 22 nt, Human
ugugccuaguucuguauuuaca

SEQ ID NO: 1545 - RNA, 22 nt, Human
gguuuucaccuccagaaugugc

SEQ ID NO: 1546 - RNA, 22 nt, Human
cguaagucacagcgccuggccc

SEQ ID NO: 1547 - RNA, 22 nt, Human
cucugugauaugguuuguaaua

SEQ ID NO: 1548 - RNA, 22 nt, Human
ucuccccuggucucgcgcgcug

SEQ ID NO: 1549 - RNA, 22 nt, Human
cacugcaaccuccaccuccugg

SEQ ID NO: 1550 - RNA, 22 nt, Human
cugguagcuccugaauaucccu

SEQ ID NO: 1551 - RNA, 22 nt, Human
augccuguaaucccagcacuuu

SEQ ID NO: 1552 - RNA, 22 nt, Human
acaaagcgcuucucuuuagagu

SEQ ID NO: 1553 - RNA, 22 nt, Human
aaucgcuugaacccaggaagug

SEQ ID NO: 1554 - RNA, 20 nt, Human
gggcuuuuggaauggucugu

SEQ ID NO: 1555 - RNA, 20 nt, Human
agcaacucucaccuggcugc

SEQ ID NO: 1556 - RNA, 22 nt, Human
ugcccucuuucuguacagcucc

SEQ ID NO: 1557 - RNA, 22 nt, Human
ugguuuuagggaaucaaucuau

SEQ ID NO: 1558 - RNA, 22 nt, Human
uucccacuguggcagagccucg

SEQ ID NO: 1559 - RNA, 22 nt, Human
cguguagcaugcgccaccacca

SEQ ID NO: 1560 - RNA, 22 nt, Human
ugccuaggcuggaguguagugg

SEQ ID NO: 1561 - RNA, 22 nt, Human
uacucuuuuagccccacagaga

SEQ ID NO: 1562 - RNA, 20 nt, Human
caaaucccugcucugugcug

SEQ ID NO: 1563 - RNA, 22 nt, Human
ccaaggugggaggauugcuuga

SEQ ID NO: 1564 - RNA, 22 nt, Human
ccagacugcuugcuucccagcc

SEQ ID NO: 1565 - RNA, 22 nt, Human
cucugcaaguccagccccuggc

SEQ ID NO: 1566 - RNA, 22 nt, Human
ugugagacuuucuuuggccucu

SEQ ID NO: 1567 - RNA, 22 nt, Human
cucugaguccugcacucacccg

SEQ ID NO: 1568 - RNA, 19 nt, Human
acugcacuuuagccugggc

SEQ ID NO: 1569 - RNA, 20 nt, Human
ucagccauuccuuaccuuuc

SEQ ID NO: 1570 - RNA, 22 nt, Human
ucacugaaaccuccaccucucg

SEQ ID NO: 1571 - RNA, 22 nt, Human
agauuuggugucugguugauau

SEQ ID NO: 1572 - RNA, 19 nt, Human
caggccucuuacccucucu

SEQ ID NO: 1573 - RNA, 22 nt, Human
acgcgcuggggcgcuggccaau

SEQ ID NO: 1574 - RNA, 22 nt, Human
ccuguggcgggggccagugccu

SEQ ID NO: 1575 - RNA, 22 nt, Human
cacucagcugagcccucagccc

SEQ ID NO: 1576 - RNA, 20 nt, Human
ucccccacuguuucugcuac

SEQ ID NO: 1577 - RNA, 22 nt, Human
gccuguccucuuccgccugucu

SEQ ID NO: 1578 - RNA, 22 nt, Human
ccaccugagauaagagagcuca

SEQ ID NO: 1579 - RNA, 22 nt, Human
ccaggaggcggagguugcagug

SEQ ID NO: 1580 - RNA, 22 nt, Human
ucacugcaagcuccuccuccug

SEQ ID NO: 1581 - RNA, 22 nt, Human
guauugcuugagcccaggaguu

SEQ ID NO: 1582 - RNA, 22 nt, Human
cccuggcugauaccggaaaggc

SEQ ID NO: 1583 - RNA, 22 nt, Human
cucacugcaaccucugccccca

SEQ ID NO: 1584 - RNA, 23 nt, Human
caccacuuucuccuucuccuugg

SEQ ID NO: 1585 - RNA, 22 nt, Human
aggagggguucucgggugcuga

SEQ ID NO: 1586 - RNA, 22 nt, Human
guagaccauuuaucuggggagu

SEQ ID NO: 1587 - RNA, 21 nt, Human
ucugcaccccagccugaguga

SEQ ID NO: 1588 - RNA, 22 nt, Human
ugccuaggcuggagugcaguga

SEQ ID NO: 1589 - RNA, 22 nt, Human
ccuuuuauccccuaauuggccu

SEQ ID NO: 1590 - RNA, 22 nt, Human
agaaagugcuucccuuuggacu

SEQ ID NO: 1591 - RNA, 22 nt, Human
uugucacugcacuccagucugg

SEQ ID NO: 1592 - RNA, 22 nt, Human
uugcucuugaaaauugaugcug

SEQ ID NO: 1593 - RNA, 22 nt, Human
aagccaaugcuagcccacaugc

SEQ ID NO: 1594 - RNA, 22 nt, Human
ucuaauccuaugguggggaggg

SEQ ID NO: 1595 - RNA, 22 nt, Human
cgugccacugcacuccagucug

SEQ ID NO: 1596 - RNA, 22 nt, Human
ccacugcacuccagccuuggca

SEQ ID NO: 1597 - RNA, 22 nt, Human
ggcggagcuugcagugagccga

SEQ ID NO: 1598 - RNA, 22 nt, Human
agcuggagaugagugacgugcc

SEQ ID NO: 1599 - RNA, 22 nt, Human
uuuugguuguuggguaagagua

SEQ ID NO: 1600 - RNA, 22 nt, Human
uugccgccgucugcucgccccg

SEQ ID NO: 1601 - RNA, 22 nt, Human
ugauguggccccacuuagcugu

SEQ ID NO: 1602 - RNA, 22 nt, Human
ugaccucaugauccgcccaccu

SEQ ID NO: 1603 - RNA, 22 nt, Human
gccguccaccucgauggccacu

SEQ ID NO: 1604 - RNA, 22 nt, Human
gacaggcuuccacuauguugcc

SEQ ID NO: 1605 - RNA, 22 nt, Human
uacugcacuccagccuugccaa

SEQ ID NO: 1606 - RNA, 22 nt, Human
cucuguagaaagagcccaggug

SEQ ID NO: 1607 - RNA, 17 nt, Human
uucuuuucugagccuug

SEQ ID NO: 1608 - RNA, 22 nt, Human
gacgagagacuccauccaccac

SEQ ID NO: 1609 - RNA, 22 nt, Human
aucucagcucugccuccugggu

SEQ ID NO: 1610 - RNA, 22 nt, Human
cuggaggugcuucgcuggccac

SEQ ID NO: 1611 - RNA, 22 nt, Human
uucccuuaaauuauggcaucua

SEQ ID NO: 1612 - RNA, 22 nt, Human
uuaggccuuugauuggggugcu

SEQ ID NO: 1613 - RNA, 22 nt, Human
cccauuucuugaguucagcucu

SEQ ID NO: 1614 - RNA, 22 nt, Human
gaggggagcccccauccuccag

SEQ ID NO: 1615 - RNA, 22 nt, Human
uucucccuguccuaucaagacu

SEQ ID NO: 1616 - RNA, 22 nt, Human
ucauucccucauuguucacugg

SEQ ID NO: 1617 - RNA, 22 nt, Human
gggggcuuggcccggucugguu

SEQ ID NO: 1618 - RNA, 22 nt, Human
augggccuccuauuauccccau

SEQ ID NO: 1619 - RNA, 22 nt, Human
gccuggauuccuuguuucucag

SEQ ID NO: 1620 - RNA, 22 nt, Human
uguggguggcaucguccuggcc

SEQ ID NO: 1621 - RNA, 22 nt, Human
gccggguucaagccauucuccu

SEQ ID NO: 1622 - RNA, 22 nt, Human
gccagccagaaacgucacacug

SEQ ID NO: 1623 - RNA, 22 nt, Human
cucacugaaaccuccgccuccc

SEQ ID NO: 1624 - RNA, 22 nt, Human
gugcuggugcucgcuccucugg

SEQ ID NO: 1625 - RNA, 22 nt, Human
ugcccaggcuggagugcagugg

SEQ ID NO: 1626 - RNA, 22 nt, Human
uagagugucauaacagugccca

SEQ ID NO: 1627 - RNA, 22 nt, Human
uaugccacugcucuccauccua

SEQ ID NO: 1628 - RNA, 22 nt, Human
uggucugcugaacagccguauc

SEQ ID NO: 1629 - RNA, 22 nt, Human
accagccuggccaacaugguga

SEQ ID NO: 1630 - RNA, 22 nt, Human
gccagcagcuucuucucauccu

SEQ ID NO: 1631 - RNA, 17 nt, Human
uggcucuguccucagcu

SEQ ID NO: 1632 - RNA, 22 nt, Human
acccaggcuggagugcaguggc

SEQ ID NO: 1633 - RNA, 22 nt, Human
uccccagcuugcuacuucugcu

SEQ ID NO: 1634 - RNA, 22 nt, Human
cuucccucugcuccuuggucca

SEQ ID NO: 1635 - RNA, 22 nt, Human
cuucucgggguucccgcgcccu

SEQ ID NO: 1636 - RNA, 22 nt, Human
agggaaggacugcuggguuggc

SEQ ID NO: 1637 - RNA, 22 nt, Human
ccugccuaugagacguuuugcc

SEQ ID NO: 1638 - RNA, 22 nt, Human
uuuuccuucauaucccuuaugu

SEQ ID NO: 1639 - RNA, 22 nt, Human
cauugcacuccagcucugggcg

SEQ ID NO: 1640 - RNA, 22 nt, Human
gggagguugaggcugcagugag

SEQ ID NO: 1641 - RNA, 22 nt, Human
ggcggcccaggcgcuuggagau

SEQ ID NO: 1642 - RNA, 22 nt, Human
gugcugugcccucugcugggaa

SEQ ID NO: 1643 - RNA, 20 nt, Human
agcagagcagucuccgcuca

SEQ ID NO: 1644 - RNA, 22 nt, Human
uggcacagccuccaugucgucc

SEQ ID NO: 1645 - RNA, 22 nt, Human
gccucagucucccgaguagcug

SEQ ID NO: 1646 - RNA, 19 nt, Human
cgcgccgucggguccagcc

SEQ ID NO: 1647 - RNA, 22 nt, Human
ccccgaggcuggagugcagugg

SEQ ID NO: 1648 - RNA, 22 nt, Human
cgugcugggucugcggggccgu

SEQ ID NO: 1649 - RNA, 22 nt, Human
uaggccccuagugccacguggc

SEQ ID NO: 1650 - RNA, 22 nt, Human
gaccuugugauccacccgcuuu

SEQ ID NO: 1651 - RNA, 22 nt, Human
cccuggcuggcucugcccggac

SEQ ID NO: 1652 - RNA, 22 nt, Human
gcacuggccgcacgcguagggc

SEQ ID NO: 1653 - RNA, 22 nt, Human
gaccuugugauccacccgccuu

SEQ ID NO: 1654 - RNA, 22 nt, Human
caaagugcugggauuacaggcu

SEQ ID NO: 1655 - RNA, 22 nt, Human
ugguggcucacgucuguaaucu

SEQ ID NO: 1656 - RNA, 22 nt, Human
cauccaggcugaagugcagugg

SEQ ID NO: 1657 - RNA, 20 nt, Human
ugauaugguuuggcuguguu

SEQ ID NO: 1658 - RNA, 22 nt, Human
uccgggaggcagagguugcagu

SEQ ID NO: 1659 - RNA, 22 nt, Human
ggugaauuugccucccgacuga

SEQ ID NO: 1660 - RNA, 22 nt, Human
gggugcuuuggcucacgccugu

SEQ ID NO: 1661 - RNA, 22 nt, Human
uucaccauguuggccaggcugg

SEQ ID NO: 1662 - RNA, 22 nt, Human
uggugcuaguuaaaucuucagg

SEQ ID NO: 1663 - RNA, 22 nt, Human
ccucggcugggccuuggccacu

SEQ ID NO: 1664 - RNA, 22 nt, Human
cucacugcaaucuccgucuccc

SEQ ID NO: 1665 - RNA, 22 nt, Human
ccuggccuuugaacgcuagacu

SEQ ID NO: 1666 - RNA, 22 nt, Human
agcucacugcaaccuccgccuc

SEQ ID NO: 1667 - RNA, 20 nt, Human
gggcaaggaaacagccccca

SEQ ID NO: 1668 - RNA, 22 nt, Human
ggcucugugucuccacccaaau

SEQ ID NO: 1669 - RNA, 22 nt, Human
ucacugcaaccucugccucccg

SEQ ID NO: 1670 - RNA, 22 nt, Human
ucaccccuccauucucucaugu

SEQ ID NO: 1671 - RNA, 22 nt, Human
ugcuauguugcccaggguggcc

SEQ ID NO: 1672 - RNA, 22 nt, Human
agcccaauccuagcacuuugag

SEQ ID NO: 1673 - RNA, 22 nt, B19 virus
aguuuugucuguaacauccuua

SEQ ID NO: 1674 - RNA, 22 nt, B19 virus
ggcagccauuuuaaguguuuca

SEQ ID NO: 1675 - RNA, 22 nt, Barmah Forest virus
gucauaguaaugugagacuaug

SEQ ID NO: 1676 - RNA, 22 nt, Barmah Forest virus
auaagauuaguuuguuauguaa

SEQ ID NO: 1677 - RNA, 22 nt, Barmah Forest virus
cuagacucgcuaguacugugau

SEQ ID NO: 1678 - RNA, 22 nt, BK polyomavirus
gugcuugauccauguccagagu

SEQ ID NO: 1679 - RNA, 22 nt, Colorado tick fever virus
ucgcaaggugaggcaguucaug

SEQ ID NO: 1680 - RNA, 22 nt, Colorado tick fever virus
cauuuguauugcacaauguacu

SEQ ID NO: 1681 - RNA, 22 nt, Dengue virus
gcuuccuccauuucagcugcca

SEQ ID NO: 1682 - RNA, 20 nt, Dobrava virus
ucaugugggguuuacuauug

SEQ ID NO: 1683 - RNA, 22 nt, Dobrava virus
aaaggaaaauuuuauguauuca

SEQ ID NO: 1684 - RNA, 22 nt, Dobrava virus
uaguaguagacuccgcaagaaa

SEQ ID NO: 1685 - RNA, 21 nt, Eastern equine encephalitis virus
acguaguucaccucguagcgu

SEQ ID NO: 1686 - RNA, 22 nt, Eastern equine encephalitis virus
augcuaauguggucaacgcugu

SEQ ID NO: 1687 - RNA, 22 nt, Eastern equine encephalitis virus
caagucacugcaaagaugcuuu

SEQ ID NO: 1688 - RNA, 22 nt, Eastern equine encephalitis virus
ggguuaaucggcgccauaggcg

SEQ ID NO: 1689 - RNA, 20 nt, Eastern equine encephalitis virus
gcucucgauguauaccacau

SEQ ID NO: 1690 - RNA, 22 nt, Eastern equine encephalitis virus
guguggauauucgguagcagca

SEQ ID NO: 1691 - RNA, 21 nt, Eastern equine encephalitis virus
uggucgcacagugucgcuggc

SEQ ID NO: 1692 - RNA, 22 nt, Eastern equine encephalitis virus
cgccuaggcggauuaggauccc

SEQ ID NO: 1693 - RNA, 22 nt, Hepatitis A virus
aaucuuaugauugguggagaau

SEQ ID NO: 1694 - RNA, 22 nt, Hepatitis A virus
ccauuuaucaucacauugauaa

SEQ ID NO: 1695 - RNA, 22 nt, Hepatitis A virus
cugauuuauagauccaagguuu

SEQ ID NO: 1696 - RNA, 22 nt, Hepatitis A virus
ugcaggaaaauuaaucaugguu

SEQ ID NO: 1697 - RNA, 22 nt, Hepatitis A virus
gaacucuugcuauacaaucucu

SEQ ID NO: 1698 - RNA, 22 nt, Hepatitis B virus
gaugaugugguauugggggcca

SEQ ID NO: 1699 - RNA, 22 nt, Hepatitis B virus
ugagucccuuuuuaccucuauu

SEQ ID NO: 1700 - RNA, 22 nt, Hepatitis B virus
gguggcuuuggggcauggacau

SEQ ID NO: 1701 - RNA, 22 nt, Hepatitis B virus
cauguccuacuguucaagccuc

SEQ ID NO: 1702 - RNA, 22 nt, Hepatitis C virus
acuccccacaacgcagcuucga

SEQ ID NO: 1703 - RNA, 22 nt, Hepatitis C virus
caaugaggguugcgggugggcg

SEQ ID NO: 1704 - RNA, 22 nt, Hepatitis C virus
cacccaaggguccugucaucca

SEQ ID NO: 1705 - RNA, 23 nt, Hepatitis C virus
gcagcccugccuccucuggacag

SEQ ID NO: 1706 - RNA, 22 nt, Hepatitis C virus
uggaccaagaccuugugggcug

SEQ ID NO: 1707 - RNA, 22 nt, Hepatitis C virus
ugucuccccguggcucucggcc

SEQ ID NO: 1708 - RNA, 22 nt, Hepatitis C virus
aacuguagucucggcgggcgug

SEQ ID NO: 1709 - RNA, 22 nt, Hepatitis C virus
aggccgcuuccguuggcauaac

SEQ ID NO: 1710 - RNA, 22 nt, Hepatitis C virus
gccgggagaagguuggcgagag

SEQ ID NO: 1711 - RNA, 22 nt, Hepatitis C virus
acgacugguuccacagccacgg

SEQ ID NO: 1712 - RNA, 22 nt, Hepatitis C virus
aguaccucuucaacugggcagu

SEQ ID NO: 1713 - RNA, 22 nt, Hepatitis C virus
cagcccgcgucauagcacucac

SEQ ID NO: 1714 - RNA, 22 nt, Hepatitis C virus
gcgcucccgacaagcagaucga

SEQ ID NO: 1715 - RNA, 22 nt, Hepatitis C virus
ucgaucugcuugucgggagcgc

SEQ ID NO: 1716 - RNA, 22 nt, Hepatitis C virus
gcacacuccggggugugucccu

SEQ ID NO: 1717 - RNA, 22 nt, Hepatitis C virus
uccuccugcuccugcuggcguu

SEQ ID NO: 1718 - RNA, 22 nt, Hepatitis C virus
ucuguccagaggaggcagggcu

SEQ ID NO: 1719 - RNA, 22 nt, Hepatitis C virus
uuguucuaucuaucccggccau

SEQ ID NO: 1720 - RNA, 21 nt, Hepatitis D virus
cuagagagauuuguggguccc

SEQ ID NO: 1721 - RNA, 22 nt, Hepatitis D virus
agggagagccacuuuucucucg

SEQ ID NO: 1722 - RNA, 22 nt, Hepatitis D virus
acugguccccaauguucaaagu

SEQ ID NO: 1723 - RNA, 22 nt, Hepatitis D virus
cuagagagauuuguggguccca

SEQ ID NO: 1724 - RNA, 22 nt, Hepatitis E virus
agagauuguggcgcucugggcc

SEQ ID NO: 1725 - RNA, 22 nt, Hepatitis E virus
caccgccggaaccgccgcugcg

SEQ ID NO: 1726 - RNA, 23 nt, Hepatitis E virus
ucgcuacauuaaccaaggucaca

SEQ ID NO: 1727 - RNA, 22 nt, Hepatitis E virus
ugaccuugguccagucgagcga

SEQ ID NO: 1728 - RNA, 22 nt, Hepatitis E virus
caccgcccggucagccgucugg

SEQ ID NO: 1729 - RNA, 23 nt, Hepatitis E virus
ccagacggcugaccgggcggugg

SEQ ID NO: 1730 - RNA, 22 nt, Hepatitis E virus
cgcagcggcgguuccggcggug

SEQ ID NO: 1731 - RNA, 22 nt, Hepatitis E virus
gaccuugguuaauguagcgacc

SEQ ID NO: 1732 - RNA, 22 nt, Human
aaaaacacaacugucuuucucu

SEQ ID NO: 1733 - RNA, 22 nt, Human
aaaaaccauugucuucagucuc

SEQ ID NO: 1734 - RNA, 22 nt, Human
aaaaacugguaacuauucccca

SEQ ID NO: 1735 - RNA, 22 nt, Human
aaaaacuguaauuacuuuugca

SEQ ID NO: 1736 - RNA, 22 nt, Human
aaaaagacagaggaugaggcag

SEQ ID NO: 1737 - RNA, 22 nt, Human
aaaaagagaaaugcucuagucc

SEQ ID NO: 1738 - RNA, 22 nt, Human
aaaaagcuuaaaugagcaguuc

SEQ ID NO: 1739 - RNA, 22 nt, Human
aaaaagucugcaaaggagguug

SEQ ID NO: 1740 - RNA, 22 nt, Human
aaaaauagaaggauugacugag

SEQ ID NO: 1741 - RNA, 22 nt, Human
aaaaauagcuucucuugucccu

SEQ ID NO: 1742 - RNA, 22 nt, Human
aaaaaugaaacggcugguuggc

SEQ ID NO: 1743 - RNA, 21 nt, Human
aaaaaugaaguuguucaggaa

SEQ ID NO: 1744 - RNA, 22 nt, Human
aaaaauguuaucuacuguccga

SEQ ID NO: 1745 - RNA, 22 nt, Human
aaaacacacuggaccaauuuaa

SEQ ID NO: 1746 - RNA, 22 nt, Human
aaaacagaggugccugggccca

SEQ ID NO: 1747 - RNA, 22 nt, Human
aaaacaggaguuuugguaggcu

SEQ ID NO: 1748 - RNA, 22 nt, Human
aaaacaggugucagcaaacuau

SEQ ID NO: 1749 - RNA, 22 nt, Human
aaaacauugaauugcacacuau

SEQ ID NO: 1750 - RNA, 22 nt, Human
aaaaccaaguuuuccuuagucu

SEQ ID NO: 1751 - RNA, 22 nt, Human
aaaaccacaauuauuuuugcac

SEQ ID NO: 1752 - RNA, 22 nt, Human
aaaaccaggcguuuccuauuau

SEQ ID NO: 1753 - RNA, 22 nt, Human
aaaacccuucugcagacucuga

SEQ ID NO: 1754 - RNA, 22 nt, Human
aaaaccucaguucugcucuuaa

SEQ ID NO: 1755 - RNA, 22 nt, Human
aaaaccugauugaauucuauuu

SEQ ID NO: 1756 - RNA, 22 nt, Human
aaaaccugugaauaguuaacuc

SEQ ID NO: 1757 - RNA, 22 nt, Human
aaaaccuucagguuuggaguuu

SEQ ID NO: 1758 - RNA, 22 nt, Human
aaaacguuaugcauuguuuauc

SEQ ID NO: 1759 - RNA, 22 nt, Human
aaaacugaaccuugagaucuuu

SEQ ID NO: 1760 - RNA, 22 nt, Human
aaaacugagguuuccugaagaa

SEQ ID NO: 1761 - RNA, 22 nt, Human
aaaacuuucagggauacagaaa

SEQ ID NO: 1762 - RNA, 22 nt, Human
aaaagagcuugguugauuuugc

SEQ ID NO: 1763 - RNA, 22 nt, Human
aaaagaggagugguuuaugaca

SEQ ID NO: 1764 - RNA, 22 nt, Human
aaaagagucuuaggcagucaua

SEQ ID NO: 1765 - RNA, 22 nt, Human
aaaagaugaaauggugucuugg

SEQ ID NO: 1766 - RNA, 22 nt, Human
aaaagcaaguugccuagguuga

SEQ ID NO: 1767 - RNA, 22 nt, Human
aaaagcaauugcaguucuugcc

SEQ ID NO: 1768 - RNA, 22 nt, Human
aaaagccaagguccucuucaga

SEQ ID NO: 1769 - RNA, 22 nt, Human
aaaagccaugcauaccuaagag

SEQ ID NO: 1770 - RNA, 22 nt, Human
aaaaggaggcaaacagccuaga

SEQ ID NO: 1771 - RNA, 22 nt, Human
aaaaggaggucacuuuauuccu

SEQ ID NO: 1772 - RNA, 22 nt, Human
aaaaggcauggagguugauagu

SEQ ID NO: 1773 - RNA, 22 nt, Human
aaaaggcauuuugucaaccaua

SEQ ID NO: 1774 - RNA, 22 nt, Human
aaaaggcuagcuaguaacagaa

SEQ ID NO: 1775 - RNA, 22 nt, Human
aaaaggcuuggaaccuuucccu

SEQ ID NO: 1776 - RNA, 22 nt, Human
aaaagggacuacucucagcucc

SEQ ID NO: 1777 - RNA, 22 nt, Human
aaagcuggcuuuuacaggggcu

SEQ ID NO: 1778 - RNA, 22 nt, Human
aaagcuguuguauggcccuugg

SEQ ID NO: 1779 - RNA, 22 nt, Human
aaagcuuaggauagggaauaua

SEQ ID NO: 1780 - RNA, 22 nt, Human
aaagcuucuauucacuuacuug

SEQ ID NO: 1781 - RNA, 22 nt, Human
aaagcuuucuagcuauguucua

SEQ ID NO: 1782 - RNA, 22 nt, Human
aaagcuuugcuggaaggaagag

SEQ ID NO: 1783 - RNA, 22 nt, Human
aaagcuuuucaguauguucaug

SEQ ID NO: 1784 - RNA, 22 nt, Human
aaaggaagaucuauacacccca

SEQ ID NO: 1785 - RNA, 22 nt, Human
aaaggacucagacugaagggag

SEQ ID NO: 1786 - RNA, 22 nt, Human
aaaggacugaugcugaguaccu

SEQ ID NO: 1787 - RNA, 22 nt, Human
aaaggagaaaacauacaggacu

SEQ ID NO: 1788 - RNA, 22 nt, Human
aaaggagacagucuuaccugga

SEQ ID NO: 1789 - RNA, 22 nt, Human
aaaggagauaaagggcccuuca

SEQ ID NO: 1790 - RNA, 22 nt, Human
aaaggaggccacauggcuagga

SEQ ID NO: 1791 - RNA, 22 nt, Human
aaaggaguuacucauaaagcuu

SEQ ID NO: 1792 - RNA, 22 nt, Human
aaaggcaaaggcugguauggcu

SEQ ID NO: 1793 - RNA, 20 nt, Human
aaaggcacagcaacagagcu

SEQ ID NO: 1794 - RNA, 22 nt, Human
aaaggcacuggauagcugggga

SEQ ID NO: 1795 - RNA, 22 nt, Human
aaaggcaggcuuucacaucuca

SEQ ID NO: 1796 - RNA, 22 nt, Human
aaaggcauaggauguggaaucg

SEQ ID NO: 1797 - RNA, 22 nt, Human
aaaggcaucuagccaaguugag

SEQ ID NO: 1798 - RNA, 22 nt, Human
aaaggcauggauagugaauuca

SEQ ID NO: 1799 - RNA, 22 nt, Human
aaaggcaugugggcugguugua

SEQ ID NO: 1800 - RNA, 22 nt, Human
aaaggccaagcaugagguggac

SEQ ID NO: 1801 - RNA, 22 nt, Human
aaaggccaccaacaugaagcau

SEQ ID NO: 1802 - RNA, 22 nt, Human
aaaggccagguuggcugguauu

SEQ ID NO: 1803 - RNA, 22 nt, Human
aaaggcccacagucagucuacc

SEQ ID NO: 1804 - RNA, 22 nt, Human
aaaggccuugagcugggugcca

SEQ ID NO: 1805 - RNA, 22 nt, Human
aaaggcuaugagauagaagaua

SEQ ID NO: 1806 - RNA, 22 nt, Human
aaaggcuaugauaguccagugg

SEQ ID NO: 1807 - RNA, 22 nt, Human
aaaggcuauucagggacuugcc

SEQ ID NO: 1808 - RNA, 22 nt, Human
aaaggcucaacagcuguacuuu

SEQ ID NO: 1809 - RNA, 22 nt, Human
aaaggcucagaaucggcagacc

SEQ ID NO: 1810 - RNA, 22 nt, Human
aaaggcuccuucucccaugacc

SEQ ID NO: 1811 - RNA, 22 nt, Human
aaaggcugccagguaaaauauu

SEQ ID NO: 1812 - RNA, 22 nt, Human
aaaggcuuaauguuguuguaau

SEQ ID NO: 1813 - RNA, 22 nt, Human
aaaggcuucacuuauuuauuuu

SEQ ID NO: 1814 - RNA, 22 nt, Human
aaaggcuucagugaguggguau

SEQ ID NO: 1815 - RNA, 22 nt, Human
aaaggcuucggaucagaaggua

SEQ ID NO: 1816 - RNA, 22 nt, Human
aaaggcuucuauuggacguugc

SEQ ID NO: 1817 - RNA, 22 nt, Human
aaaggcuucucagaaaggccuu

SEQ ID NO: 1818 - RNA, 22 nt, Human
aaaggcuugacuagaagggaga

SEQ ID NO: 1819 - RNA, 22 nt, Human
aaaggcuugcgauuccuuguaa

SEQ ID NO: 1820 - RNA, 22 nt, Human
aaaggcuugguauuuuggaguu

SEQ ID NO: 1821 - RNA, 22 nt, Human
aaaggcuuguccaguaagggga

SEQ ID NO: 1822 - RNA, 22 nt, Human
aaaggcuuguuugaggacuggu

SEQ ID NO: 1823 - RNA, 22 nt, Human
aaaggcuuuaaagaaccagaac

SEQ ID NO: 1824 - RNA, 22 nt, Human
aaaggcuuuugguauauaggag

SEQ ID NO: 1825 - RNA, 22 nt, Human
aaacagcuccuuaguuuccauc

SEQ ID NO: 1826 - RNA, 22 nt, Human
aaacagcugcaguacacggccu

SEQ ID NO: 1827 - RNA, 22 nt, Human
aaacagcugggagguagaggcg

SEQ ID NO: 1828 - RNA, 22 nt, Human
aaacagcuuucagaaucucuca

SEQ ID NO: 1829 - RNA, 22 nt, Human
aaacaggcuugcaacauguuuu

SEQ ID NO: 1830 - RNA, 22 nt, Human
aaacaggcuuuuaagucaauag

SEQ ID NO: 1831 - RNA, 22 nt, Human
aaacaguacucgauuuuuguag

SEQ ID NO: 1832 - RNA, 22 nt, Human
aaacagugccaggcagaugcca

SEQ ID NO: 1833 - RNA, 22 nt, Human
aaacagugccuggcauggagga

SEQ ID NO: 1834 - RNA, 22 nt, Human
aaacaguguuuuuaugauuuau

SEQ ID NO: 1835 - RNA, 22 nt, Human
aaacaguuaauugcuuucaguu

SEQ ID NO: 1836 - RNA, 22 nt, Human
aaacaguuguuauuuuuauaug

SEQ ID NO: 1837 - RNA, 22 nt, Human
aaacauagauaauagauagaug

SEQ ID NO: 1838 - RNA, 22 nt, Human
aaacaucuacuguaggcuggag

SEQ ID NO: 1839 - RNA, 22 nt, Human
aaacaucuauuaugugcugagc

SEQ ID NO: 1840 - RNA, 22 nt, Human
aaacaucuggaggccccguuug

SEQ ID NO: 1841 - RNA, 22 nt, Human
aaacaucugguuaccuaggguc

SEQ ID NO: 1842 - RNA, 22 nt, Human
aaacaucuugcucugauuggua

SEQ ID NO: 1843 - RNA, 22 nt, Human
aaacaucuuucuauugcaaguu

SEQ ID NO: 1844 - RNA, 22 nt, Human
aaacaugaguuaaaaguaacug

SEQ ID NO: 1845 - RNA, 18 nt, Human
aaacauggcuuaaaggcu

SEQ ID NO: 1846 - RNA, 22 nt, Human
aaacauguaauucugcuuaaga

SEQ ID NO: 1847 - RNA, 22 nt, Human
aaacauguuuucugaauauuuu

SEQ ID NO: 1848 - RNA, 22 nt, Human
aaacauucaaagcaggaugugu

SEQ ID NO: 1849 - RNA, 22 nt, Human
aaacauucacauuugcuaguaa

SEQ ID NO: 1850 - RNA, 20 nt, Human
aaacauucauguacaaguga

SEQ ID NO: 1851 - RNA, 22 nt, Human
aaacauuccauuucuauguaag

SEQ ID NO: 1852 - RNA, 22 nt, Human
aaacauucucagcccugcuugc

SEQ ID NO: 1853 - RNA, 22 nt, Human
aaacauugaccucauccuggca

SEQ ID NO: 1854 - RNA, 22 nt, Human
aaacauugagcacuugcuauuu

SEQ ID NO: 1855 - RNA, 22 nt, Human
aaacauuguacauucuguagcu

SEQ ID NO: 1856 - RNA, 22 nt, Human
aaacauuguuaugauaaauuac

SEQ ID NO: 1857 - RNA, 22 nt, Human
aaacauuugcaacucgguuugg

SEQ ID NO: 1858 - RNA, 22 nt, Human
aaaccacuuauaucgugauuug

SEQ ID NO: 1859 - RNA, 22 nt, Human
aaaccaucagauaauucauacu

SEQ ID NO: 1860 - RNA, 22 nt, Human
aaaccauggaguaaguucacau

SEQ ID NO: 1861 - RNA, 22 nt, Human
aaaccauuagguuuuaucuacu

SEQ ID NO: 1862 - RNA, 22 nt, Human
aaaccauugcaucuuucuuaau

SEQ ID NO: 1863 - RNA, 22 nt, Human
aaaccauuugaauuauuacuga

SEQ ID NO: 1864 - RNA, 22 nt, Human
aaacccagagacuagaaagacc

SEQ ID NO: 1865 - RNA, 22 nt, Human
aaacccugcucuuauggaacuu

SEQ ID NO: 1866 - RNA, 22 nt, Human
aaaccuagguuuccucauucag

SEQ ID NO: 1867 - RNA, 22 nt, Human
aaaccucugugcuaugacaccc

SEQ ID NO: 1868 - RNA, 22 nt, Human
aaaccucuucucaagauuucug

SEQ ID NO: 1869 - RNA, 22 nt, Human
aaaccugaaguacguuacauaa

SEQ ID NO: 1870 - RNA, 22 nt, Human
aaaccuguggccacuaaauuug

SEQ ID NO: 1871 - RNA, 22 nt, Human
aaaccuguuaauagagcgaugc

SEQ ID NO: 1872 - RNA, 22 nt, Human
aaaccuucacaucuacucuaca

SEQ ID NO: 1873 - RNA, 22 nt, Human
aaaccuuuaccagacuagcaag

SEQ ID NO: 1874 - RNA, 22 nt, Human
aaaccuuugugugucugugccu

SEQ ID NO: 1875 - RNA, 22 nt, Human
aaaccuuuucagcugaauggag

SEQ ID NO: 1876 - RNA, 22 nt, Human
aaacuaaaccuggcuuaguaag

SEQ ID NO: 1877 - RNA, 23 nt, Human
aaacuacaacgccaggcacugag

SEQ ID NO: 1878 - RNA, 22 nt, Human
aaacuacaucucauggaugagg

SEQ ID NO: 1879 - RNA, 22 nt, Human
aaacuacugaugccugggcccu

SEQ ID NO: 1880 - RNA, 22 nt, Human
aaacuagaugauuaugaagcau

SEQ ID NO: 1881 - RNA, 22 nt, Human
aaacuaucaaguguugggggag

SEQ ID NO: 1882 - RNA, 22 nt, Human
aaacucaaguuucuuaauguca

SEQ ID NO: 1883 - RNA, 22 nt, Human
aaacucagauguggugaagacc

SEQ ID NO: 1884 - RNA, 22 nt, Human
aaacuccagugaauacuagaau

SEQ ID NO: 1885 - RNA, 22 nt, Human
aaacucuaguaaaauguauuca

SEQ ID NO: 1886 - RNA, 22 nt, Human
aaauuauuuucagaauggagaa

SEQ ID NO: 1887 - RNA, 22 nt, Human
aaauucacucuguuccucaugg

SEQ ID NO: 1888 - RNA, 22 nt, Human
aaauucaguguucuucccguaa

SEQ ID NO: 1889 - RNA, 22 nt, Human
aaauucaguuucuguccuggga

SEQ ID NO: 1890 - RNA, 22 nt, Human
aaauucaguuuuaauaaucacu

SEQ ID NO: 1891 - RNA, 22 nt, Human
aaauucauauguugaaaugcua

SEQ ID NO: 1892 - RNA, 22 nt, Human
aaauuccagcaacaccuuuuua

SEQ ID NO: 1893 - RNA, 22 nt, Human
aaauucuaaggucacaauguug

SEQ ID NO: 1894 - RNA, 22 nt, Human
aaauucugcaauuugacaagau

SEQ ID NO: 1895 - RNA, 22 nt, Human
aaauucuggccuaucacaguga

SEQ ID NO: 1896 - RNA, 22 nt, Human
aaauucuguccugaaugccauu

SEQ ID NO: 1897 - RNA, 22 nt, Human
aaauugcaaccaggucucuguc

SEQ ID NO: 1898 - RNA, 22 nt, Human
aaauugcagguaggugggugau

SEQ ID NO: 1899 - RNA, 22 nt, Human
aaauugcauuuuaaagguagau

SEQ ID NO: 1900 - RNA, 22 nt, Human
aaauugcgcacauuucuccguu

SEQ ID NO: 1901 - RNA, 22 nt, Human
aaauuggcaguucagggaauua

SEQ ID NO: 1902 - RNA, 19 nt, Human
aaauuggcaugcugaccuc

SEQ ID NO: 1903 - RNA, 22 nt, Human
aaauuguauauuccauuuguau

SEQ ID NO: 1904 - RNA, 22 nt, Human
aaauugucucuauuuugauucg

SEQ ID NO: 1905 - RNA, 20 nt, Human
aaauuuaggaaauuuuacgc

SEQ ID NO: 1906 - RNA, 22 nt, Human
aaauuucuaagucaagaagaac

SEQ ID NO: 1907 - RNA, 22 nt, Human
aaauuucuugaggcucucuagc

SEQ ID NO: 1908 - RNA, 22 nt, Human
aaauuugucaacuucauauguu

SEQ ID NO: 1909 - RNA, 22 nt, Human
aaauuuuccugguaaagaugga

SEQ ID NO: 1910 - RNA, 21 nt, Human
aaauuuucuuggcuguagugu

SEQ ID NO: 1911 - RNA, 22 nt, Human
aacaaacauuaccuggugcugg

SEQ ID NO: 1912 - RNA, 22 nt, Human
aacaaagaugggugggaaagag

SEQ ID NO: 1913 - RNA, 22 nt, Human
aacaaaguagcugcuguucuua

SEQ ID NO: 1914 - RNA, 22 nt, Human
aacaaaugauaccaguucucaa

SEQ ID NO: 1915 - RNA, 22 nt, Human
aacaaaugauuguugguuggag

SEQ ID NO: 1916 - RNA, 22 nt, Human
aacaaauguaaaaugcagaugc

SEQ ID NO: 1917 - RNA, 22 nt, Human
aacaaauguguuuuguaauuaa

SEQ ID NO: 1918 - RNA, 22 nt, Human
aacaagauagagcucuugccuu

SEQ ID NO: 1919 - RNA, 22 nt, Human
aacaagaugggagaaggaccuc

SEQ ID NO: 1920 - RNA, 22 nt, Human
aacaaguaaguuuauauauauu

SEQ ID NO: 1921 - RNA, 22 nt, Human
aacaagucuuugguuuuggcua

SEQ ID NO: 1922 - RNA, 17 nt, Human
aacaauaggauguguau

SEQ ID NO: 1923 - RNA, 22 nt, Human
aacaaucuccaagaccaaugug

SEQ ID NO: 1924 - RNA, 22 nt, Human
aacaaugaccacacaauguacu

SEQ ID NO: 1925 - RNA, 22 nt, Human
aacaaugcacuaucguaagugg

SEQ ID NO: 1926 - RNA, 22 nt, Human
aacaaugccaacagcaugcugg

SEQ ID NO: 1927 - RNA, 22 nt, Human
aacaauguucuuuuagcuugaa

SEQ ID NO: 1928 - RNA, 22 nt, Human
aacaauuagacugacgguauua

SEQ ID NO: 1929 - RNA, 22 nt, Human
aacaauugacacuucauuguga

SEQ ID NO: 1930 - RNA, 22 nt, Human
aacacaaaaauucucaggggca

SEQ ID NO: 1931 - RNA, 22 nt, Human
aacacagaagugccaagagcca

SEQ ID NO: 1932 - RNA, 22 nt, Human
aacacagaguauuugaagcauu

SEQ ID NO: 1933 - RNA, 22 nt, Human
aacacaggaggcuauguuuucu

SEQ ID NO: 1934 - RNA, 22 nt, Human
aacacagggcagcugcugggaa

SEQ ID NO: 1935 - RNA, 22 nt, Human
aacacaggggcguggcucuuac

SEQ ID NO: 1936 - RNA, 22 nt, Human
aacacagguucauucugugagg

SEQ ID NO: 1937 - RNA, 22 nt, Human
aacacaguuaguaagggaaaua

SEQ ID NO: 1938 - RNA, 22 nt, Human
aacacaguuucucuaugagagu

SEQ ID NO: 1939 - RNA, 22 nt, Human
aacacauagacguuugauauca

SEQ ID NO: 1940 - RNA, 22 nt, Human
aacacauauuuauauaugcaca

SEQ ID NO: 1941 - RNA, 21 nt, Human
aacacauccagaguauuugac

SEQ ID NO: 1942 - RNA, 22 nt, Human
aacacauugccagagaucagca

SEQ ID NO: 1943 - RNA, 23 nt, Human
aacacauugcuaauuacauucaa

SEQ ID NO: 1944 - RNA, 22 nt, Human
aacacauuuugccuaggcaaua

SEQ ID NO: 1945 - RNA, 22 nt, Human
aacaccuugcagggauuaugac

SEQ ID NO: 1946 - RNA, 22 nt, Human
aacacuaaaggucaguuagaag

SEQ ID NO: 1947 - RNA, 22 nt, Human
aacacucaauuuacaaacucug

SEQ ID NO: 1948 - RNA, 22 nt, Human
aacacuccguggaggcaugcag

SEQ ID NO: 1949 - RNA, 22 nt, Human
aacacugaaaugucuuaagauu

SEQ ID NO: 1950 - RNA, 22 nt, Human
aacacugagaacaauacagagu

SEQ ID NO: 1951 - RNA, 22 nt, Human
aacacugagaggggaguggcac

SEQ ID NO: 1952 - RNA, 22 nt, Human
aacacugaguaucagaguuggg

SEQ ID NO: 1953 - RNA, 22 nt, Human
aacacugauggaaaguauguuu

SEQ ID NO: 1954 - RNA, 22 nt, Human
aacacugcugcuggguucugug

SEQ ID NO: 1955 - RNA, 22 nt, Human
aacacugguuuggcauuagaug

SEQ ID NO: 1956 - RNA, 22 nt, Human
aacacuguacuggaagauggac

SEQ ID NO: 1957 - RNA, 22 nt, Human
aacacugugcaguguaaugcug

SEQ ID NO: 1958 - RNA, 22 nt, Human
aacacugugcuccccaggcugu

SEQ ID NO: 1959 - RNA, 22 nt, Human
aacacuucaagcagaagguugg

SEQ ID NO: 1960 - RNA, 22 nt, Human
aacacuucucaucacugcaagc

SEQ ID NO: 1961 - RNA, 22 nt, Human
aacacuucuguugauaauaagc

SEQ ID NO: 1962 - RNA, 23 nt, Human
aacacuugcaugaacagcuacac

SEQ ID NO: 1963 - RNA, 22 nt, Human
aacacuuuggaauagagauagg

SEQ ID NO: 1964 - RNA, 22 nt, Human
aacacuuuuuccuccugucugg

SEQ ID NO: 1965 - RNA, 22 nt, Human
aacagaaaucauuuagggcucu

SEQ ID NO: 1966 - RNA, 22 nt, Human
aacagaaggggguauuuacauu

SEQ ID NO: 1967 - RNA, 22 nt, Human
aacagacagaaaaaugugaucu

SEQ ID NO: 1968 - RNA, 22 nt, Human
aacagagcugaccagugagggc

SEQ ID NO: 1969 - RNA, 22 nt, Human
aacagaggauguuugaaauuca

SEQ ID NO: 1970 - RNA, 22 nt, Human
aacagauuugugaagcuacuca

SEQ ID NO: 1971 - RNA, 22 nt, Human
aacagcagaaacugcaagcuac

SEQ ID NO: 1972 - RNA, 22 nt, Human
aacagcagggaaauuccaaguc

SEQ ID NO: 1973 - RNA, 22 nt, Human
aacagcagggaugacauggcca

SEQ ID NO: 1974 - RNA, 22 nt, Human
aacagcagggggaccugcuggu

SEQ ID NO: 1975 - RNA, 22 nt, Human
aagaaaugcagaaaugugcugg

SEQ ID NO: 1976 - RNA, 22 nt, Human
aagaaauuaaggaaugcaacga

SEQ ID NO: 1977 - RNA, 17 nt, Human
aagaacacucaauagca

SEQ ID NO: 1978 - RNA, 22 nt, Human
aagaacauaacagaagcugugu

SEQ ID NO: 1979 - RNA, 22 nt, Human
aagaacaugaaccucuucuaac

SEQ ID NO: 1980 - RNA, 22 nt, Human
aagaacaugggugugggcauuc

SEQ ID NO: 1981 - RNA, 22 nt, Human
aagaacauugauauugucuaug

SEQ ID NO: 1982 - RNA, 22 nt, Human
aagaaccaaaaugaagcuaggu

SEQ ID NO: 1983 - RNA, 22 nt, Human
aagaacugugcuccaggcucca

SEQ ID NO: 1984 - RNA, 21 nt, Human
aagaagcaauuuauuggaagg

SEQ ID NO: 1985 - RNA, 22 nt, Human
aagaagcauucuuucauugguu

SEQ ID NO: 1986 - RNA, 22 nt, Human
aagaagcugcgugguaugugaa

SEQ ID NO: 1987 - RNA, 22 nt, Human
aagaaggccucugcccuggcuu

SEQ ID NO: 1988 - RNA, 22 nt, Human
aagaaggccugguagacgucuu

SEQ ID NO: 1989 - RNA, 22 nt, Human
aagaaguuaaauaaauggacca

SEQ ID NO: 1990 - RNA, 18 nt, Human
aagaaguuggccaaagag

SEQ ID NO: 1991 - RNA, 22 nt, Human
aagaauaaguagaugggagaag

SEQ ID NO: 1992 - RNA, 22 nt, Human
aagaauacguaucaacaauggu

SEQ ID NO: 1993 - RNA, 22 nt, Human
aagaauaucuguuuuauuuagg

SEQ ID NO: 1994 - RNA, 22 nt, Human
aagaauauuuccugcacuuggg

SEQ ID NO: 1995 - RNA, 22 nt, Human
aacauugcaaauaagcuugcag

SEQ ID NO: 1996 - RNA, 22 nt, Human
aacauugcagcuuaauugcagg

SEQ ID NO: 1997 - RNA, 22 nt, Human
aacauugcauucucuaugagau

SEQ ID NO: 1998 - RNA, 22 nt, Human
aacauuggauauuuauuaaaag

SEQ ID NO: 1999 - RNA, 22 nt, Human
aacauuuauauggguucaugaa

SEQ ID NO: 2000 - RNA, 22 nt, Human
aacauuuauucuaauucuggga

SEQ ID NO: 2001 - RNA, 22 nt, Human
aacauuucagcaaauaagaaca

SEQ ID NO: 2002 - RNA, 22 nt, Human
aacauuucagcaccugauuccu

SEQ ID NO: 2003 - RNA, 22 nt, Human
aacauuugagaaaaauacucuu

SEQ ID NO: 2004 - RNA, 22 nt, Human
aacauuuguacuaaagaaguuc

SEQ ID NO: 2005 - RNA, 22 nt, Human
aaccacuggucugagguacaag

SEQ ID NO: 2006 - RNA, 22 nt, Human
aaccagacucuccaaaggcaaa

SEQ ID NO: 2007 - RNA, 23 nt, Human
aaccagauaaauggcuccagggc

SEQ ID NO: 2008 - RNA, 22 nt, Human
aaccagcacugcuggggccugc

SEQ ID NO: 2009 - RNA, 22 nt, Human
aaccagcuccucaccccauugu

SEQ ID NO: 2010 - RNA, 19 nt, Human
aaccaggaacuaaagcaga

SEQ ID NO: 2011 - RNA, 19 nt, Human
aaccaggacaaggggcugg

SEQ ID NO: 2012 - RNA, 22 nt, Human
aaccaggagauuaaagaaaggu

SEQ ID NO: 2013 - RNA, 22 nt, Human
aaccaggauuuaagauucuaga

SEQ ID NO: 2014 - RNA, 22 nt, Human
aaccaggugacucauggugagc

SEQ ID NO: 2015 - RNA, 22 nt, Human
aaccagucccagugagaugaac

SEQ ID NO: 2016 - RNA, 22 nt, Human
aaccaguuggcaaccagcaguu

SEQ ID NO: 2017 - RNA, 22 nt, Human
aaccauggauuucaguucaccu

SEQ ID NO: 2018 - RNA, 22 nt, Human
aaccauugauacaugcaacaau

SEQ ID NO: 2019 - RNA, 22 nt, Human
aacccacucuaccuggcuccau

SEQ ID NO: 2020 - RNA, 22 nt, Human
aacccaggaggcagaggcugca

SEQ ID NO: 2021 - RNA, 22 nt, Human
aacccaggaguuggaggcugug

SEQ ID NO: 2022 - RNA, 22 nt, Human
aacccaggguggagguugcagu

SEQ ID NO: 2023 - RNA, 22 nt, Human
aacccauguuggaagcuuauca

SEQ ID NO: 2024 - RNA, 22 nt, Human
aaccccaaaaccucugaagugg

SEQ ID NO: 2025 - RNA, 22 nt, Human
aaccccgcucaggcugggugag

SEQ ID NO: 2026 - RNA, 22 nt, Human
aacccuggagaaggcuuuggau

SEQ ID NO: 2027 - RNA, 22 nt, Human
aaccuaggacuauagauaucau

SEQ ID NO: 2028 - RNA, 22 nt, Human
aaccucaggcucucuggacaau

SEQ ID NO: 2029 - RNA, 22 nt, Human
aaccucuacauccaggaaagga

SEQ ID NO: 2030 - RNA, 22 nt, Human
aaccucucccuuugugucccug

SEQ ID NO: 2031 - RNA, 22 nt, Human
aaccugaaacuacauucuugau

SEQ ID NO: 2032 - RNA, 22 nt, Human
aaccugaaaguaguaaaagcug

SEQ ID NO: 2033 - RNA, 22 nt, Human
aaccugagauaauaggagagua

SEQ ID NO: 2034 - RNA, 20 nt, Human
aaccugaggcaguguuccag

SEQ ID NO: 2035 - RNA, 22 nt, Human
aaccugcauguuucuaaaagca

SEQ ID NO: 2036 - RNA, 22 nt, Human
aaccugcuuucucagagaaggg

SEQ ID NO: 2037 - RNA, 22 nt, Human
aaccuggaggacugcaauccau

SEQ ID NO: 2038 - RNA, 19 nt, Human
aaccuuuagaucauucucc

SEQ ID NO: 2039 - RNA, 22 nt, Human
aaccuuuugcaagugccuugac

SEQ ID NO: 2040 - RNA, 22 nt, Human
aacgaagcuuaacuuuucugag

SEQ ID NO: 2041 - RNA, 22 nt, Human
aacgaauagggauuuuucuaac

SEQ ID NO: 2042 - RNA, 23 nt, Human
aacgacagcuacaggcaucccac

SEQ ID NO: 2043 - RNA, 22 nt, Human
aacgagcucuccuucuuucauu

SEQ ID NO: 2044 - RNA, 22 nt, Human
aacgugcaccaggaggucauga

SEQ ID NO: 2045 - RNA, 22 nt, Human
aacgugcauuaggaccucucca

SEQ ID NO: 2046 - RNA, 22 nt, Human
aacuaaaacugguuuguucucu

SEQ ID NO: 2047 - RNA, 22 nt, Human
aacuaaaagugugucucuugua

SEQ ID NO: 2048 - RNA, 22 nt, Human
aacuaaaccaugacauuauauu

SEQ ID NO: 2049 - RNA, 22 nt, Human
aacuaaaggcuguugcagggaa

SEQ ID NO: 2050 - RNA, 22 nt, Human
aacuaacagucauuaaaagaac

SEQ ID NO: 2051 - RNA, 22 nt, Human
aacuacagcucuugucuuucug

SEQ ID NO: 2052 - RNA, 22 nt, Human
aacuacaguauguccaaagaau

SEQ ID NO: 2053 - RNA, 22 nt, Human
aacuacagugggcagaggcaau

SEQ ID NO: 2054 - RNA, 22 nt, Human
aacuacaucacccuauuucugu

SEQ ID NO: 2055 - RNA, 20 nt, Human
aacuagaaagcacccaugga

SEQ ID NO: 2056 - RNA, 19 nt, Human
aacuagaaagguuuugaga

SEQ ID NO: 2057 - RNA, 22 nt, Human
aacuagagcuuccagcuucuug

SEQ ID NO: 2058 - RNA, 22 nt, Human
aacuaguaaaagcaacaguaua

SEQ ID NO: 2059 - RNA, 22 nt, Human
aacuauaaugggguuaggaaau

SEQ ID NO: 2060 - RNA, 22 nt, Human
aacuauacauauuuacauagac

SEQ ID NO: 2061 - RNA, 22 nt, Human
aacuauauaaucugaaagugaa

SEQ ID NO: 2062 - RNA, 20 nt, Human
aacuaugaauagaagagauu

SEQ ID NO: 2063 - RNA, 22 nt, Human
aacuauuuuuggagcuaacucu

SEQ ID NO: 2064 - RNA, 22 nt, Human
aacucacuuuguggcuucugaa

SEQ ID NO: 2065 - RNA, 20 nt, Human
aacucagagaugaaaaagac

SEQ ID NO: 2066 - RNA, 22 nt, Human
aacucaguucuuuccacaaugc

SEQ ID NO: 2067 - RNA, 22 nt, Human
aacuccagugucagcugcaaug

SEQ ID NO: 2068 - RNA, 22 nt, Human
aacuccauuucccugccuccug

SEQ ID NO: 2069 - RNA, 22 nt, Human
aacuccucacugccucuggcac

SEQ ID NO: 2070 - RNA, 23 nt, Human
aacuccugaaucgugagccaucu

SEQ ID NO: 2071 - RNA, 22 nt, Human
aacuccuguucuaugacaagag

SEQ ID NO: 2072 - RNA, 22 nt, Human
aacucugcaaccuauguagacc

SEQ ID NO: 2073 - RNA, 23 nt, Human
aacucuggcuagcauagaauaga

SEQ ID NO: 2074 - RNA, 22 nt, Human
aacucugguuucagacucacuu

SEQ ID NO: 2075 - RNA, 22 nt, Human
aacucuugggcugcaugcuguu

SEQ ID NO: 2076 - RNA, 22 nt, Human
aacucuuugaacagugaggcua

SEQ ID NO: 2077 - RNA, 22 nt, Human
aacucuuuguggacauuaaauu

SEQ ID NO: 2078 - RNA, 22 nt, Human
aacugaaacguauuuuugagau

SEQ ID NO: 2079 - RNA, 22 nt, Human
aacugaaaguuucaccugaggu

SEQ ID NO: 2080 - RNA, 22 nt, Human
aacugaacauaaugaaagccaa

SEQ ID NO: 2081 - RNA, 22 nt, Human
aacugagacacgaacuaugauu

SEQ ID NO: 2082 - RNA, 23 nt, Human
aacugagauaauguauguaaagc

SEQ ID NO: 2083 - RNA, 22 nt, Human
aacugagauuacaagagacauu

SEQ ID NO: 2084 - RNA, 22 nt, Human
aacugaggaauaacugaguugc

SEQ ID NO: 2085 - RNA, 22 nt, Human
aacugaggccaagugaggaaag

SEQ ID NO: 2086 - RNA, 22 nt, Human
aacugagguaucugcuguguuu

SEQ ID NO: 2087 - RNA, 22 nt, Human
aacugauaauggacacauaaaa

SEQ ID NO: 2088 - RNA, 22 nt, Human
aacugaugcuagaagagacguu

SEQ ID NO: 2089 - RNA, 22 nt, Human
aacugcaaaaaugguagucuua

SEQ ID NO: 2090 - RNA, 21 nt, Human
aacugcaaaugaugcuggaga

SEQ ID NO: 2091 - RNA, 22 nt, Human
aacugcaauuacuuuugcacca

SEQ ID NO: 2092 - RNA, 22 nt, Human
aacagcagguccuggcaugggu

SEQ ID NO: 2093 - RNA, 22 nt, Human
aacagcaguggcaggagaaggc

SEQ ID NO: 2094 - RNA, 22 nt, Human
aacagcuaguaccaauccacua

SEQ ID NO: 2095 - RNA, 22 nt, Human
aacagcugcaaaagguugccug

SEQ ID NO: 2096 - RNA, 22 nt, Human
aacagcuguucgcagauguagg

SEQ ID NO: 2097 - RNA, 22 nt, Human
aacagcuuugugcucagauuug

SEQ ID NO: 2098 - RNA, 22 nt, Human
aacaggaaauacuuaugaggua

SEQ ID NO: 2099 - RNA, 22 nt, Human
aacaggaacuauuuguauucca

SEQ ID NO: 2100 - RNA, 22 nt, Human
aacaggaaugaggagaaaaggu

SEQ ID NO: 2101 - RNA, 22 nt, Human
aacaggacacugggauggcuac

SEQ ID NO: 2102 - RNA, 22 nt, Human
aacaggagucauugucauuauu

SEQ ID NO: 2103 - RNA, 22 nt, Human
aacaggcaaacugugggauccc

SEQ ID NO: 2104 - RNA, 22 nt, Human
aaguaugacauuuaagacaauu

SEQ ID NO: 2105 - RNA, 22 nt, Human
aaguaugcuaauuaacuagcac

SEQ ID NO: 2106 - RNA, 22 nt, Human
aaguaugucuuuggguauuauu

SEQ ID NO: 2107 - RNA, 22 nt, Human
aaguauuauuuaacaaauuugu

SEQ ID NO: 2108 - RNA, 19 nt, Human
aaguauucuuuguuagcag

SEQ ID NO: 2109 - RNA, 22 nt, Human
aaguauuuggaauggcauuuuu

SEQ ID NO: 2110 - RNA, 22 nt, Human
aagucacaagcauauaugcauu

SEQ ID NO: 2111 - RNA, 22 nt, Human
aagucacacuagacaacugagg

SEQ ID NO: 2112 - RNA, 22 nt, Human
aagucacagaguuggaagucag

SEQ ID NO: 2113 - RNA, 23 nt, Human
aagucaccaagaggaaggcggag

SEQ ID NO: 2114 - RNA, 22 nt, Human
aagucaccccacacucuuggga

SEQ ID NO: 2115 - RNA, 18 nt, Human
aagucaccccugcucccu

SEQ ID NO: 2116 - RNA, 22 nt, Human
aagucacuaagugaaccacugg

SEQ ID NO: 2117 - RNA, 22 nt, Human
aagucacuggaggaacucuacu

SEQ ID NO: 2118 - RNA, 22 nt, Human
aagucagaaaucaucuagugua

SEQ ID NO: 2119 - RNA, 22 nt, Human
aagucagcacuccaggaagcca

SEQ ID NO: 2120 - RNA, 22 nt, Human
aagucaggaagugcaaaaguug

SEQ ID NO: 2121 - RNA, 22 nt, Human
aagucaggugagacucucuggg

SEQ ID NO: 2122 - RNA, 22 nt, Human
aagucauagucuaacccagcca

SEQ ID NO: 2123 - RNA, 22 nt, Human
aagucauuccugcuuguugccc

SEQ ID NO: 2124 - RNA, 22 nt, Human
aaguccaaggcugggugcagug

SEQ ID NO: 2125 - RNA, 22 nt, Human
aaguccaaggucaccauucaca

SEQ ID NO: 2126 - RNA, 22 nt, Human
aaguccagaacuccugugauag

SEQ ID NO: 2127 - RNA, 17 nt, Human
aaguccagaguugagca

SEQ ID NO: 2128 - RNA, 22 nt, Human
aaguccagugauacuggcagga

SEQ ID NO: 2129 - RNA, 22 nt, Human
aaguccauaguuugcauuacag

SEQ ID NO: 2130 - RNA, 22 nt, Human
aaguccauuaggccccugccug

SEQ ID NO: 2131 - RNA, 22 nt, Human
aaggcaccauaggcaaauccag

SEQ ID NO: 2132 - RNA, 22 nt, Human
aaggcaccaugagaugcugguu

SEQ ID NO: 2133 - RNA, 22 nt, Human
aaggcacucagccuugggacag

SEQ ID NO: 2134 - RNA, 21 nt, Human
aaggcagaagcauggaaugag

SEQ ID NO: 2135 - RNA, 22 nt, Human
aaggcagagauuagcagaauga

SEQ ID NO: 2136 - RNA, 22 nt, Human
aaggcagauauaaagacuagag

SEQ ID NO: 2137 - RNA, 22 nt, Human
aaggcagcaagaauuccagguu

SEQ ID NO: 2138 - RNA, 22 nt, Human
aaggcagcaugaaucccuguac

SEQ ID NO: 2139 - RNA, 22 nt, Human
aaggcagccgugugacugcaug

SEQ ID NO: 2140 - RNA, 22 nt, Human
aaggcagccuuuguuugauuga

SEQ ID NO: 2141 - RNA, 22 nt, Human
aaggcagcucagcucauggcag

SEQ ID NO: 2142 - RNA, 22 nt, Human
aaggcaggaugcggacccaucu

SEQ ID NO: 2143 - RNA, 22 nt, Human
aaggcagguauugaugccacag

SEQ ID NO: 2144 - RNA, 22 nt, Human
aaggcaguaggaucuuccacag

SEQ ID NO: 2145 - RNA, 22 nt, Human
aaggcagugguuggguggagga

SEQ ID NO: 2146 - RNA, 22 nt, Human
aaggcaguuaccgcaauggagg

SEQ ID NO: 2147 - RNA, 22 nt, Human
aaggcauagucuuuaaguucug

SEQ ID NO: 2148 - RNA, 22 nt, Human
aaggcaugauguaaucaaugau

SEQ ID NO: 2149 - RNA, 22 nt, Human
aaggcauggcaggguuuacaca

SEQ ID NO: 2150 - RNA, 22 nt, Human
aaggcauuaugauuugaguacc

SEQ ID NO: 2151 - RNA, 22 nt, Human
aaggcauugagcaguuacagua

SEQ ID NO: 2152 - RNA, 22 nt, Human
aaggcauugcugauccucaggu

SEQ ID NO: 2153 - RNA, 22 nt, Human
aaggccaaaguuuucaggcuaa

SEQ ID NO: 2154 - RNA, 22 nt, Human
aaggccacgucuccuuccagag

SEQ ID NO: 2155 - RNA, 22 nt, Human
aaggccagacaggaccacaucu

SEQ ID NO: 2156 - RNA, 22 nt, Human
aaggccagacucuggaaugaca

SEQ ID NO: 2157 - RNA, 22 nt, Human
aaggccagagcagacuggaguu

SEQ ID NO: 2158 - RNA, 22 nt, Human
aaggccagagcguguccugccu

SEQ ID NO: 2159 - RNA, 22 nt, Human
aaggccagaguugaacugcucc

SEQ ID NO: 2160 - RNA, 22 nt, Human
aaggccagcaguuugagaccag

SEQ ID NO: 2161 - RNA, 22 nt, Human
aaggccagcccuaaugaugcuc

SEQ ID NO: 2162 - RNA, 22 nt, Human
aaggccagccuuggaacccuga

SEQ ID NO: 2163 - RNA, 22 nt, Human
aaggccagcuggagggaugagg

SEQ ID NO: 2164 - RNA, 22 nt, Human
aaggccaggaaauuaucccuau

SEQ ID NO: 2165 - RNA, 22 nt, Human
aaggccaggacaccaggggacu

SEQ ID NO: 2166 - RNA, 22 nt, Human
aaggccaggcagggagcuguga

SEQ ID NO: 2167 - RNA, 22 nt, Human
aaggccaggccagaugacaguc

SEQ ID NO: 2168 - RNA, 22 nt, Human
aaggccaguggauaaaaccucu

SEQ ID NO: 2169 - RNA, 22 nt, Human
aaggccauuguaauguaaauau

SEQ ID NO: 2170 - RNA, 22 nt, Human
aaggcccuaauagagcacauau

SEQ ID NO: 2171 - RNA, 22 nt, Human
aaggcccugucuccaaauacag

SEQ ID NO: 2172 - RNA, 22 nt, Human
aaggcccuuccaccaguccucg

SEQ ID NO: 2173 - RNA, 22 nt, Human
aaggccucccugugugcaggug

SEQ ID NO: 2174 - RNA, 21 nt, Human
aaggccugcuuacugcuaguu

SEQ ID NO: 2175 - RNA, 22 nt, Human
aaggccuggauuuagguuguga

SEQ ID NO: 2176 - RNA, 22 nt, Human
aaggccugggaggccucucuuc

SEQ ID NO: 2177 - RNA, 22 nt, Human
aaggccuuucuuaucaguagau

SEQ ID NO: 2178 - RNA, 22 nt, Human
aaggcucaauuaacuaagaagu

SEQ ID NO: 2179 - RNA, 22 nt, Human
aaggcucccucuucucgagugu

SEQ ID NO: 2180 - RNA, 21 nt, Human
aaggcuccuccucuaggccuc

SEQ ID NO: 2181 - RNA, 22 nt, Human
aaggcuccuuuguaguucuuuu

SEQ ID NO: 2182 - RNA, 22 nt, Human
aaggcucucugauggcagcagu

SEQ ID NO: 2183 - RNA, 22 nt, Human
aaggcucugcaaaaccuccaag

SEQ ID NO: 2184 - RNA, 22 nt, Human
aaggcugaauucaaggguaggc

SEQ ID NO: 2185 - RNA, 22 nt, Human
aaggcugacucaacagggggcc

SEQ ID NO: 2186 - RNA, 21 nt, Human
aaggcugagacaacucaggag

SEQ ID NO: 2187 - RNA, 22 nt, Human
aaggcugagccagggccccuau

SEQ ID NO: 2188 - RNA, 22 nt, Human
aaggcugaggcagugaggcaga

SEQ ID NO: 2189 - RNA, 19 nt, Human
aaggcuggagaaggccucu

SEQ ID NO: 2190 - RNA, 21 nt, Human
aaggcuggagaugcaggucug

SEQ ID NO: 2191 - RNA, 22 nt, Human
aaggcuggagaugguuggaaug

SEQ ID NO: 2192 - RNA, 22 nt, Human
aaggcuggaguacagugcagug

SEQ ID NO: 2193 - RNA, 22 nt, Human
aaggcuggggugcagacggccu

SEQ ID NO: 2194 - RNA, 22 nt, Human
aaggcuggucagauguggugaa

SEQ ID NO: 2195 - RNA, 22 nt, Human
aaggcugguuccaucccuggug

SEQ ID NO: 2196 - RNA, 22 nt, Human
aaggcuuccuggaggagguguc

SEQ ID NO: 2197 - RNA, 22 nt, Human
aaggcuucuuugcaggcuuuag

SEQ ID NO: 2198 - RNA, 22 nt, Human
aaggcuuuaaauaaccguaaag

SEQ ID NO: 2199 - RNA, 22 nt, Human
aaggcuuuaugugaccaaaaga

SEQ ID NO: 2200 - RNA, 22 nt, Human
aaggcuuucagcuaacuugauu

SEQ ID NO: 2201 - RNA, 22 nt, Human
aaggcuuuugacgguugccucu

SEQ ID NO: 2202 - RNA, 22 nt, Human
aagggacccuggaucaaaugga

SEQ ID NO: 2203 - RNA, 22 nt, Human
aagggagacaguugugugagga

SEQ ID NO: 2204 - RNA, 22 nt, Human
aagggagcggggagacccuaug

SEQ ID NO: 2205 - RNA, 22 nt, Human
aagggaggaggauuuauuguac

SEQ ID NO: 2206 - RNA, 22 nt, Human
aagggaggccagagguuuugca

SEQ ID NO: 2207 - RNA, 22 nt, Human
aagggaggggauguaagccugg

SEQ ID NO: 2208 - RNA, 22 nt, Human
aagggcagcugacagaugcuua

SEQ ID NO: 2209 - RNA, 22 nt, Human
aagggcaggcacccacccucac

SEQ ID NO: 2210 - RNA, 22 nt, Human
aagggcauugaggcugagagac

SEQ ID NO: 2211 - RNA, 22 nt, Human
aagggccaucccagaacagaaa

SEQ ID NO: 2212 - RNA, 22 nt, Human
aagggccauugcugagagcagu

SEQ ID NO: 2213 - RNA, 22 nt, Human
aaguggacuaauacaaggacua

SEQ ID NO: 2214 - RNA, 21 nt, Human
aaguggagaagaaaagcugga

SEQ ID NO: 2215 - RNA, 22 nt, Human
aaguggagucccuacaaccagc

SEQ ID NO: 2216 - RNA, 18 nt, Human
aaguggcacaggagugca

SEQ ID NO: 2217 - RNA, 22 nt, Human
aaguggcccuaggccaagggga

SEQ ID NO: 2218 - RNA, 18 nt, Human
aagugggaaaagcaagca

SEQ ID NO: 2219 - RNA, 22 nt, Human
aagugggaauagaaaugaaggu

SEQ ID NO: 2220 - RNA, 22 nt, Human
aaguggugguaugaaccgaggg

SEQ ID NO: 2221 - RNA, 22 nt, Human
aagugguuauuuugaucuagaa

SEQ ID NO: 2222 - RNA, 21 nt, Human
aagugguuuacauccagcugu

SEQ ID NO: 2223 - RNA, 22 nt, Human
aagugguuugagcacagugcug

SEQ ID NO: 2224 - RNA, 22 nt, Human
aaguguauaacgaccuacagga

SEQ ID NO: 2225 - RNA, 22 nt, Human
aaguguauauaugacuuauaaa

SEQ ID NO: 2226 - RNA, 22 nt, Human
aagugucuaacugguuacuucu

SEQ ID NO: 2227 - RNA, 22 nt, Human
aagugucugcuggcucuacccu

SEQ ID NO: 2228 - RNA, 22 nt, Human
aagugugacacuguguuaauua

SEQ ID NO: 2229 - RNA, 22 nt, Human
aagugugagccagcccuuugca

SEQ ID NO: 2230 - RNA, 22 nt, Human
aaguguguauuuuucuucagug

SEQ ID NO: 2231 - RNA, 19 nt, Human
aaguguguugagccaggau

SEQ ID NO: 2232 - RNA, 22 nt, Human
aaguguuauguaggauuucaga

SEQ ID NO: 2233 - RNA, 22 nt, Human
aaguguuuauugauuggucuag

SEQ ID NO: 2234 - RNA, 22 nt, Human
aaguguuucaauaauuuggacc

SEQ ID NO: 2235 - RNA, 22 nt, Human
aaguuaacccaguauuucuuuu

SEQ ID NO: 2236 - RNA, 22 nt, Human
aaguuaagggucccagucuguu

SEQ ID NO: 2237 - RNA, 22 nt, Human
aaguuacagucagagguuaaca

SEQ ID NO: 2238 - RNA, 22 nt, Human
aaguuacagucugcuugcugac

SEQ ID NO: 2239 - RNA, 22 nt, Human
aaguuacaguuauuauuuaaaa

SEQ ID NO: 2240 - RNA, 22 nt, Human
aaguuacaguuggaacugugaa

SEQ ID NO: 2241 - RNA, 22 nt, Human
aaguuacauaaauguccucuag

SEQ ID NO: 2242 - RNA, 22 nt, Human
aaguuacuuuaccucuuuagcu

SEQ ID NO: 2243 - RNA, 22 nt, Human
aaguuaggagaguaaaguggua

SEQ ID NO: 2244 - RNA, 22 nt, Human
aaguuaggcuuaguugagauuu

SEQ ID NO: 2245 - RNA, 22 nt, Human
aaguuagugccuccuuaaauuu

SEQ ID NO: 2246 - RNA, 22 nt, Human
aaguuauugguggagagcacug

SEQ ID NO: 2247 - RNA, 22 nt, Human
aaguucaagcucugccuaaaau

SEQ ID NO: 2248 - RNA, 22 nt, Human
aagguauuguucccuaguuucu

SEQ ID NO: 2249 - RNA, 23 nt, Human
aagguauuuauuuuaaagguaag

SEQ ID NO: 2250 - RNA, 22 nt, Human
aaggucaaagacaguaacuuuu

SEQ ID NO: 2251 - RNA, 22 nt, Human
aaggucaacacugauuuuaguc

SEQ ID NO: 2252 - RNA, 23 nt, Human
aaggucacagaacuuagcaagcc

SEQ ID NO: 2253 - RNA, 22 nt, Human
aaggucagagcaggaaggaguc

SEQ ID NO: 2254 - RNA, 22 nt, Human
aaggucauggcaaauuacuuuu

SEQ ID NO: 2255 - RNA, 22 nt, Human
aaggucauuguugcauguucuc

SEQ ID NO: 2256 - RNA, 22 nt, Human
aagguccaguuugaauuacugu

SEQ ID NO: 2257 - RNA, 22 nt, Human
aagguccuuuugcagugugauc

SEQ ID NO: 2258 - RNA, 22 nt, Human
aaggucuaaagcuacugaguug

SEQ ID NO: 2259 - RNA, 22 nt, Human
aaggucucaaguuuuccaaagu

SEQ ID NO: 2260 - RNA, 22 nt, Human
aaggucugcuuguuuucuugag

SEQ ID NO: 2261 - RNA, 22 nt, Human
aaggucuggaugaugggugugc

SEQ ID NO: 2262 - RNA, 21 nt, Human
aaggucuguaaagugacagga

SEQ ID NO: 2263 - RNA, 22 nt, Human
aaggucugugaggcuguuuguc

SEQ ID NO: 2264 - RNA, 22 nt, Human
aaggugaaacuggaagcuggcc

SEQ ID NO: 2265 - RNA, 22 nt, Human
aaggugacucacaaagccaguu

SEQ ID NO: 2266 - RNA, 22 nt, Human
aaggugccacuucccucagacu

SEQ ID NO: 2267 - RNA, 22 nt, Human
aaggugcuguggacuugggagc

SEQ ID NO: 2268 - RNA, 19 nt, Human
aagguggcagcagguauua

SEQ ID NO: 2269 - RNA, 22 nt, Human
aagguggcggcugccagguccu

SEQ ID NO: 2270 - RNA, 22 nt, Human
aagguggucuuacugaugguau

SEQ ID NO: 2271 - RNA, 22 nt, Human
aagguggugaucaucuugaagg

SEQ ID NO: 2272 - RNA, 22 nt, Human
aagguggugcuucugcuccucu

SEQ ID NO: 2273 - RNA, 22 nt, Human
aaggugguucgcugguacccag

SEQ ID NO: 2274 - RNA, 22 nt, Human
aaggugucauccaggauggugg

SEQ ID NO: 2275 - RNA, 23 nt, Human
aaggugucauugaugggauucua

SEQ ID NO: 2276 - RNA, 22 nt, Human
aaggugucauuguuuauggaga

SEQ ID NO: 2277 - RNA, 22 nt, Human
aaggugucggcagagccgcuuc

SEQ ID NO: 2278 - RNA, 22 nt, Human
aaggugugaagagaugggaaga

SEQ ID NO: 2279 - RNA, 23 nt, Human
aagguguucuguauuuaacucag

SEQ ID NO: 2280 - RNA, 22 nt, Human
aagguuaguaaguaucuuaugu

SEQ ID NO: 2281 - RNA, 22 nt, Human
aagguucuaagggaagccaugc

SEQ ID NO: 2282 - RNA, 22 nt, Human
aagguugcagcaguguugauga

SEQ ID NO: 2283 - RNA, 22 nt, Human
aagguugcuguuuugcuucaaa

SEQ ID NO: 2284 - RNA, 22 nt, Human
aagguuucgggagcgggucugg

SEQ ID NO: 2285 - RNA, 22 nt, Human
aaguaaaauguuuccuuuauua

SEQ ID NO: 2286 - RNA, 22 nt, Human
aaguaaacagauaagaaaucug

SEQ ID NO: 2287 - RNA, 22 nt, Human
aaguaacaaugcuguugaauug

SEQ ID NO: 2288 - RNA, 21 nt, Human
aaguaacaccacuccuggagu

SEQ ID NO: 2289 - RNA, 22 nt, Human
aaguaacacggaacuugaagca

SEQ ID NO: 2290 - RNA, 23 nt, Human
aaguaacagggauaauagcaguu

SEQ ID NO: 2291 - RNA, 22 nt, Human
aaguaacuaaagauauccauuu

SEQ ID NO: 2292 - RNA, 22 nt, Human
aaguacauauauuuaugauucu

SEQ ID NO: 2293 - RNA, 22 nt, Human
aaguacauccuagucucuuuca

SEQ ID NO: 2294 - RNA, 22 nt, Human
aaguacaugcuuuauucagagu

SEQ ID NO: 2295 - RNA, 22 nt, Human
aaguacauuauaugagcagaau

SEQ ID NO: 2296 - RNA, 22 nt, Human
aaguaccuagaaauauuuuuga

SEQ ID NO: 2297 - RNA, 22 nt, Human
aaguagaaaaccgcacuggacu

SEQ ID NO: 2298 - RNA, 22 nt, Human
aaguagaaucucagguaggcua

SEQ ID NO: 2299 - RNA, 22 nt, Human
aaguagauagugcuacggaguu

SEQ ID NO: 2300 - RNA, 21 nt, Human
aaguagaucacuguucucuug

SEQ ID NO: 2301 - RNA, 19 nt, Human
aaguagucaucccauucuu

SEQ ID NO: 2302 - RNA, 22 nt, Human
aaguauaagcuauucuucauga

SEQ ID NO: 2303 - RNA, 22 nt, Human
aaguauauacuaaauguuaauc

SEQ ID NO: 2304 - RNA, 22 nt, Human
aaguauauuuagcugagcuugu

SEQ ID NO: 2305 - RNA, 22 nt, Human
aaguaucuuucuagcaacuaaa

SEQ ID NO: 2306 - RNA, 18 nt, Human
aaguaugccuauguuauu

SEQ ID NO: 2307 - RNA, 22 nt, Human
aaguaugucaaucauacuucaa

SEQ ID NO: 2308 - RNA, 22 nt, Human
aaguaugugugggaugcuggga

SEQ ID NO: 2309 - RNA, 22 nt, Human
aaguauugugggaaagcagaaa

SEQ ID NO: 2310 - RNA, 22 nt, Human
aaguauuucguucugaaaaagu

SEQ ID NO: 2311 - RNA, 22 nt, Human
aagucaaaccuugcucacagga

SEQ ID NO: 2312 - RNA, 21 nt, Human
aagucaauacagauaagucuu

SEQ ID NO: 2313 - RNA, 22 nt, Human
aagucaauuaguaaacuuggaa

SEQ ID NO: 2314 - RNA, 22 nt, Human
aagucacacaguuaacaugagg

SEQ ID NO: 2315 - RNA, 22 nt, Human
aagucacacugcugggaacucu

SEQ ID NO: 2316 - RNA, 22 nt, Human
aagucacagaacccauuguaac

SEQ ID NO: 2317 - RNA, 22 nt, Human
aagucacagcuaaauagcuaag

SEQ ID NO: 2318 - RNA, 22 nt, Human
aagucacccacaggcagcagaa

SEQ ID NO: 2319 - RNA, 19 nt, Human
aagucacuugagggcagga

SEQ ID NO: 2320 - RNA, 22 nt, Human
aagucagaaaacagagcaauua

SEQ ID NO: 2321 - RNA, 22 nt, Human
aagucagaaauaucugccauca

SEQ ID NO: 2322 - RNA, 22 nt, Human
aaucuucuacuugacaguucuc

SEQ ID NO: 2323 - RNA, 22 nt, Human
aaucuuggcaaauguagcuucc

SEQ ID NO: 2324 - RNA, 22 nt, Human
aaucuuucaaauuucuuugggu

SEQ ID NO: 2325 - RNA, 22 nt, Human
aaucuuucguuucuccugucug

SEQ ID NO: 2326 - RNA, 22 nt, Human
aaucuuuugauucuagggcugu

SEQ ID NO: 2327 - RNA, 22 nt, Human
aaugaaagaaugaaacagccca

SEQ ID NO: 2328 - RNA, 22 nt, Human
aaugaaaugaagauaugaucag

SEQ ID NO: 2329 - RNA, 22 nt, Human
aaugaacaacacugaaggaaga

SEQ ID NO: 2330 - RNA, 22 nt, Human
aaugaacacgcugguggugcaa

SEQ ID NO: 2331 - RNA, 22 nt, Human
aaugaacaggugaaugucagau

SEQ ID NO: 2332 - RNA, 22 nt, Human
aaugaacagugggugagguacc

SEQ ID NO: 2333 - RNA, 22 nt, Human
aaugaacauauaaagagaucuu

SEQ ID NO: 2334 - RNA, 22 nt, Human
aaugaacauggacaaguuaaua

SEQ ID NO: 2335 - RNA, 22 nt, Human
aaugaacccuucaagcucugau

SEQ ID NO: 2336 - RNA, 22 nt, Human
aaugaacgguguccaucuguuu

SEQ ID NO: 2337 - RNA, 22 nt, Human
aaugaagcaagcugcuguguuu

SEQ ID NO: 2338 - RNA, 21 nt, Human
aaugaaguggcuauuuugagg

SEQ ID NO: 2339 - RNA, 20 nt, Human
aaugaaguuauuaaugaugu

SEQ ID NO: 2340 - RNA, 22 nt, Human
aaugaauaccguuucacucagu

SEQ ID NO: 2341 - RNA, 22 nt, Human
aaugaaugaaccacauauaaca

SEQ ID NO: 2342 - RNA, 22 nt, Human
aaugaauugcaguacugacuug

SEQ ID NO: 2343 - RNA, 22 nt, Human
aaugacaauaaucauuaacuuu

SEQ ID NO: 2344 - RNA, 22 nt, Human
aaugacauaagugcagaugcua

SEQ ID NO: 2345 - RNA, 22 nt, Human
aaugacuaauaaguuuuacugu

SEQ ID NO: 2346 - RNA, 22 nt, Human
aaugacuaguccacauuuguaa

SEQ ID NO: 2347 - RNA, 19 nt, Human
aaugacugaguacauuguc

SEQ ID NO: 2348 - RNA, 22 nt, Human
aaugagaaccuugaaaggaacu

SEQ ID NO: 2349 - RNA, 22 nt, Human
aaugagacacgugaagcagaug

SEQ ID NO: 2350 - RNA, 22 nt, Human
aaugagaucagagauaacucaa

SEQ ID NO: 2351 - RNA, 22 nt, Human
aaugagauggaggacucuuaau

SEQ ID NO: 2352 - RNA, 22 nt, Human
aaugagauguugaauuauuguu

SEQ ID NO: 2353 - RNA, 22 nt, Human
aaugagauuccaauagcuccug

SEQ ID NO: 2354 - RNA, 22 nt, Human
aaugagcuagaccugcuuccuc

SEQ ID NO: 2355 - RNA, 22 nt, Human
aaugagcugcugcuguuccacc

SEQ ID NO: 2356 - RNA, 22 nt, Human
aaugaggcuugcauugugaacu

SEQ ID NO: 2357 - RNA, 22 nt, Human
aaugaguuauuagguguaagug

SEQ ID NO: 2358 - RNA, 22 nt, Human
aaugaguuauuuaauagaaagg

SEQ ID NO: 2359 - RNA, 20 nt, Human
aaugaguuauuuuguauaug

SEQ ID NO: 2360 - RNA, 22 nt, Human
aaugaguucugguucauuuuau

SEQ ID NO: 2361 - RNA, 23 nt, Human
aaugaguugggcagcauacaggc

SEQ ID NO: 2362 - RNA, 22 nt, Human
aaugauaccgccaauauuacca

SEQ ID NO: 2363 - RNA, 22 nt, Human
aaugauauagcagacauagccu

SEQ ID NO: 2364 - RNA, 22 nt, Human
aaugauauuuauugaauagaug

SEQ ID NO: 2365 - RNA, 22 nt, Human
aaugaucaccugguaaagagag

SEQ ID NO: 2366 - RNA, 22 nt, Human
aaugaucacugcaguugaugag

SEQ ID NO: 2367 - RNA, 22 nt, Human
aaugauguauuaguacaacaca

SEQ ID NO: 2368 - RNA, 23 nt, Human
aaugaugucagaagaugaagucu

SEQ ID NO: 2369 - RNA, 22 nt, Human
aaugaugugaguuuuuauucuc

SEQ ID NO: 2370 - RNA, 22 nt, Human
aaugauguuuuuaaagaacaua

SEQ ID NO: 2371 - RNA, 22 nt, Human
aaugauugucauuccaaaaagu

SEQ ID NO: 2372 - RNA, 23 nt, Human
aaugauuucaugaugauagcagc

SEQ ID NO: 2373 - RNA, 22 nt, Human
aaugcaaagcaagcagagauuu

SEQ ID NO: 2374 - RNA, 22 nt, Human
aaugcaaagcucuuuaauccuu

SEQ ID NO: 2375 - RNA, 22 nt, Human
aaugcaaagugaggugaguggc

SEQ ID NO: 2376 - RNA, 22 nt, Human
aaugcaaccugcugaucugaca

SEQ ID NO: 2377 - RNA, 22 nt, Human
aaugcaagaucaaaucuaacac

SEQ ID NO: 2378 - RNA, 22 nt, Human
aaugcaaggccuguaucugauu

SEQ ID NO: 2379 - RNA, 22 nt, Human
aaugcacauauauguguauaca

SEQ ID NO: 2380 - RNA, 22 nt, Human
aaugcaccuaccuugauucugc

SEQ ID NO: 2381 - RNA, 22 nt, Human
aaugcaguuucauuuguagaau

SEQ ID NO: 2382 - RNA, 22 nt, Human
aaugcauaaugguuugugacaa

SEQ ID NO: 2383 - RNA, 22 nt, Human
aaugcauacguguuuguggcaa

SEQ ID NO: 2384 - RNA, 19 nt, Human
aaugcauggaaguuggaga

SEQ ID NO: 2385 - RNA, 22 nt, Human
aaugcauguauucauuguggaa

SEQ ID NO: 2386 - RNA, 23 nt, Human
aaugcauuaauuugggagaguac

SEQ ID NO: 2387 - RNA, 22 nt, Human
aaugcauucuuucauggaccug

SEQ ID NO: 2388 - RNA, 22 nt, Human
aaugccguagacuuuuacuuau

SEQ ID NO: 2389 - RNA, 22 nt, Human
aaugccucuuggaagaagacuu

SEQ ID NO: 2390 - RNA, 22 nt, Human
aaugccuuauaggcugaaaauu

SEQ ID NO: 2391 - RNA, 22 nt, Human
aaugccuuuccacuggguauca

SEQ ID NO: 2392 - RNA, 22 nt, Human
aaugcuaacauugguuuauauc

SEQ ID NO: 2393 - RNA, 22 nt, Human
aaugcuagugugauauguaagg

SEQ ID NO: 2394 - RNA, 22 nt, Human
aaugcucaaaauguuucaucua

SEQ ID NO: 2395 - RNA, 22 nt, Human
aaugcucugucucugacagugg

SEQ ID NO: 2396 - RNA, 22 nt, Human
aaugcuggaagccucaguagau

SEQ ID NO: 2397 - RNA, 22 nt, Human
aaugcuucaaccucccacaugu

SEQ ID NO: 2398 - RNA, 22 nt, Human
acagaaaugauguuuggcaaua

SEQ ID NO: 2399 - RNA, 19 nt, Human
acagaaauguaagugagac

SEQ ID NO: 2400 - RNA, 22 nt, Human
acagaaauucaaacuggaauuu

SEQ ID NO: 2401 - RNA, 22 nt, Human
acagaacauauugcuucucuca

SEQ ID NO: 2402 - RNA, 22 nt, Human
acagaacauggauuuuugaagu

SEQ ID NO: 2403 - RNA, 20 nt, Human
acagaacugagaacagucuc

SEQ ID NO: 2404 - RNA, 22 nt, Human
acagaacuggaauuggaacuca

SEQ ID NO: 2405 - RNA, 22 nt, Human
acagaagaccaagaaagcuucc

SEQ ID NO: 2406 - RNA, 22 nt, Human
acagaagagcuggcucugugcu

SEQ ID NO: 2407 - RNA, 22 nt, Human
acagaagauaaugcugccuugg

SEQ ID NO: 2408 - RNA, 21 nt, Human
acagaagcggcgaguggcccc

SEQ ID NO: 2409 - RNA, 22 nt, Human
acagaaguccccaugaagaagc

SEQ ID NO: 2410 - RNA, 22 nt, Human
acagaagugacaauuucuuggg

SEQ ID NO: 2411 - RNA, 22 nt, Human
acagaauacuacagacugguua

SEQ ID NO: 2412 - RNA, 22 nt, Human
acagaauauugguuacuguugc

SEQ ID NO: 2413 - RNA, 22 nt, Human
acagaauauuguaagugccacu

SEQ ID NO: 2414 - RNA, 22 nt, Human
acagaaugcguagugcauguug

SEQ ID NO: 2415 - RNA, 22 nt, Human
acagaaugggauuugaauauuu

SEQ ID NO: 2416 - RNA, 22 nt, Human
acagaauuaggagauccucuug

SEQ ID NO: 2417 - RNA, 22 nt, Human
acagaauuaucaggaaauguua

SEQ ID NO: 2418 - RNA, 22 nt, Human
acagaauucuaguauguggcuu

SEQ ID NO: 2419 - RNA, 18 nt, Human
acagacaaaauggaaaug

SEQ ID NO: 2420 - RNA, 22 nt, Human
acagacaguaaauaguguggcu

SEQ ID NO: 2421 - RNA, 22 nt, Human
acagacaguaugguggggcuga

SEQ ID NO: 2422 - RNA, 22 nt, Human
acagacaucaucaacaucuucc

SEQ ID NO: 2423 - RNA, 22 nt, Human
acagacaucuauccauuuaauu

SEQ ID NO: 2424 - RNA, 22 nt, Human
acagacaugcuguuuggguggu

SEQ ID NO: 2425 - RNA, 22 nt, Human
acagacaugggccgcucuugag

SEQ ID NO: 2426 - RNA, 23 nt, Human
acagacauuccauaauguacacc

SEQ ID NO: 2427 - RNA, 22 nt, Human
acagacauuuucuguauugccu

SEQ ID NO: 2428 - RNA, 22 nt, Human
acagaccaaguuuccagcaggu

SEQ ID NO: 2429 - RNA, 22 nt, Human
acagaccucuagauuacauuug

SEQ ID NO: 2430 - RNA, 22 nt, Human
acagacuaaaauugcacagugg

SEQ ID NO: 2431 - RNA, 22 nt, Human
acacugagauuuuccugacacc

SEQ ID NO: 2432 - RNA, 22 nt, Human
acacugagcaucucuagaggca

SEQ ID NO: 2433 - RNA, 22 nt, Human
acacugaguauugaguagggua

SEQ ID NO: 2434 - RNA, 22 nt, Human
acacugaguuuuaccaggcaca

SEQ ID NO: 2435 - RNA, 18 nt, Human
acacugcagcagucugcu

SEQ ID NO: 2436 - RNA, 22 nt, Human
acacuggacucagaggccagaa

SEQ ID NO: 2437 - RNA, 22 nt, Human
acacugggcuuguuacguugca

SEQ ID NO: 2438 - RNA, 22 nt, Human
acacuggguuaccuguacuauu

SEQ ID NO: 2439 - RNA, 22 nt, Human
acacugguucucuuaacccuau

SEQ ID NO: 2440 - RNA, 22 nt, Human
acacugguugaauuguauaacu

SEQ ID NO: 2441 - RNA, 22 nt, Human
acacuguaaagugaugcuuaaa

SEQ ID NO: 2442 - RNA, 22 nt, Human
acacuguaggagaaaggaguuu

SEQ ID NO: 2443 - RNA, 22 nt, Human
acacugucucauaugaggggac

SEQ ID NO: 2444 - RNA, 22 nt, Human
acacugugacaagaaagagcug

SEQ ID NO: 2445 - RNA, 22 nt, Human
acacugugacggaaauaaagaa

SEQ ID NO: 2446 - RNA, 22 nt, Human
acacugugucuagcauuuuaca

SEQ ID NO: 2447 - RNA, 20 nt, Human
acacuguucuucacacauuu

SEQ ID NO: 2448 - RNA, 22 nt, Human
acacuuauuuuuguccacuucc

SEQ ID NO: 2449 - RNA, 22 nt, Human
acacuucaaaugguuggaaaau

SEQ ID NO: 2450 - RNA, 22 nt, Human
acacuucaggacucuggggcaa

SEQ ID NO: 2451 - RNA, 22 nt, Human
acacuucauuuacauuauaggc

SEQ ID NO: 2452 - RNA, 22 nt, Human
acacuucucccaucuccuguug

SEQ ID NO: 2453 - RNA, 22 nt, Human
acacuugaggaauguggugauu

SEQ ID NO: 2454 - RNA, 22 nt, Human
acacuugagguuuuuaggugcg

SEQ ID NO: 2455 - RNA, 22 nt, Human
acacuuggcucugagucacuac

SEQ ID NO: 2456 - RNA, 22 nt, Human
acacuuguggccuuucuaguaa

SEQ ID NO: 2457 - RNA, 22 nt, Human
acacuuuaagcauuucacacug

SEQ ID NO: 2458 - RNA, 22 nt, Human
acacuuuacagcuuccuuugca

SEQ ID NO: 2459 - RNA, 22 nt, Human
acacuuuagaaaaaagaauggu

SEQ ID NO: 2460 - RNA, 22 nt, Human
acacuuuaucaauauucaaaaa

SEQ ID NO: 2461 - RNA, 22 nt, Human
acacuuugcuacauuucauauu

SEQ ID NO: 2462 - RNA, 22 nt, Human
acacuuugggcuggauaauuau

SEQ ID NO: 2463 - RNA, 22 nt, Human
acacuuuguuguggcauauacg

SEQ ID NO: 2464 - RNA, 22 nt, Human
acacuuuuaagacuuuaaugaa

SEQ ID NO: 2465 - RNA, 22 nt, Human
acacuuuuguguauauccaguu

SEQ ID NO: 2466 - RNA, 22 nt, Human
acagaaaaugccagaagggugg

SEQ ID NO: 2467 - RNA, 22 nt, Human
acagaaagaccuuguaacacuu

SEQ ID NO: 2468 - RNA, 20 nt, Human
acagaaagagagaaugucag

SEQ ID NO: 2469 - RNA, 18 nt, Human
acagaaauagcugugccu

SEQ ID NO: 2470 - RNA, 22 nt, Human
acagaacugcagacagugccaa

SEQ ID NO: 2471 - RNA, 22 nt, Human
acagaacugggggcacagauag

SEQ ID NO: 2472 - RNA, 21 nt, Human
acagaacuguauagugauaaa

SEQ ID NO: 2473 - RNA, 22 nt, Human
acagaacuuccugcuggagugg

SEQ ID NO: 2474 - RNA, 22 nt, Human
acagaagaccagagagcuaacu

SEQ ID NO: 2475 - RNA, 22 nt, Human
acagaagagcacauuuaguaug

SEQ ID NO: 2476 - RNA, 22 nt, Human
acagaagauaacugggaccaga

SEQ ID NO: 2477 - RNA, 22 nt, Human
acagaagcagcgcggcucuucu

SEQ ID NO: 2478 - RNA, 22 nt, Human
acagaagccuuuggccauuuga

SEQ ID NO: 2479 - RNA, 22 nt, Human
acagaaguuggaauuagauacu

SEQ ID NO: 2480 - RNA, 22 nt, Human
acagaauacucauaagaagggg

SEQ ID NO: 2481 - RNA, 22 nt, Human
acagaauuaaaguguuugugga

SEQ ID NO: 2482 - RNA, 22 nt, Human
acagaauuaaugaaaauuacaa

SEQ ID NO: 2483 - RNA, 22 nt, Human
acagaauugaagcugaguaaau

SEQ ID NO: 2484 - RNA, 22 nt, Human
acagaauugggguucuugggga

SEQ ID NO: 2485 - RNA, 22 nt, Human
acagaauuuuuacacaggguaa

SEQ ID NO: 2486 - RNA, 22 nt, Human
acagacacaggcguggagucgc

SEQ ID NO: 2487 - RNA, 22 nt, Human
acagacagacagagaacuauuc

SEQ ID NO: 2488 - RNA, 22 nt, Human
acagacagaggcuccaugagga

SEQ ID NO: 2489 - RNA, 21 nt, Human
acagacagggccagugucccc

SEQ ID NO: 2490 - RNA, 21 nt, Human
acagacaguccagagaaaaga

SEQ ID NO: 2491 - RNA, 22 nt, Human
acagacauucagcuaagucuau

SEQ ID NO: 2492 - RNA, 22 nt, Human
acagacauuuaauaaaugcuga

SEQ ID NO: 2493 - RNA, 19 nt, Human
acagacauuugcaauuagc

SEQ ID NO: 2494 - RNA, 22 nt, Human
acagacauuuuaagacacuuua

SEQ ID NO: 2495 - RNA, 22 nt, Human
acagaccuauggcagcugccau

SEQ ID NO: 2496 - RNA, 22 nt, Human
acagacuccccagguuaucuca

SEQ ID NO: 2497 - RNA, 22 nt, Human
acagacugagucaucuucuuaa

SEQ ID NO: 2498 - RNA, 22 nt, Human
acagacuggccugucucgcacc

SEQ ID NO: 2499 - RNA, 22 nt, Human
acagacuguuggccuacugagc

SEQ ID NO: 2500 - RNA, 21 nt, Human
acagagaaagagcagccuccu

SEQ ID NO: 2501 - RNA, 22 nt, Human
acagagaaaguuccucucaggc

SEQ ID NO: 2502 - RNA, 22 nt, Human
acagagaccagcaucuucugcc

SEQ ID NO: 2503 - RNA, 22 nt, Human
acagagaccaguuacagcgucc

SEQ ID NO: 2504 - RNA, 23 nt, Human
acagagacugccaagauauucuc

SEQ ID NO: 2505 - RNA, 22 nt, Human
acagagagaauuggguuuacag

SEQ ID NO: 2506 - RNA, 22 nt, Human
acagagauggcuuuucagaggc

SEQ ID NO: 2507 - RNA, 22 nt, Human
acagagcauaaugucuagcaca

SEQ ID NO: 2508 - RNA, 22 nt, Human
acagagcaucagaugaaaucaa

SEQ ID NO: 2509 - RNA, 22 nt, Human
acagagcaugcucaguguguga

SEQ ID NO: 2510 - RNA, 22 nt, Human
acagagcauuugggacagagag

SEQ ID NO: 2511 - RNA, 22 nt, Human
acagagccaaaaggacauagua

SEQ ID NO: 2512 - RNA, 22 nt, Human
acagagcuaauguugcauaggc

SEQ ID NO: 2513 - RNA, 19 nt, Human
acagagcucucugcuucug

SEQ ID NO: 2514 - RNA, 22 nt, Human
acagagcugggaucugaaccca

SEQ ID NO: 2515 - RNA, 22 nt, Human
aauuagggaggacaaagguaca

SEQ ID NO: 2516 - RNA, 22 nt, Human
aauuauacauugaacaaucuag

SEQ ID NO: 2517 - RNA, 20 nt, Human
aauuauauaacuccaacauu

SEQ ID NO: 2518 - RNA, 22 nt, Human
aauuauauugaaguugaauguc

SEQ ID NO: 2519 - RNA, 22 nt, Human
aauuaucagauauaaaacugca

SEQ ID NO: 2520 - RNA, 22 nt, Human
aauuauccuuaaugcaguaagc

SEQ ID NO: 2521 - RNA, 22 nt, Human
aauuaugagguagauaucacau

SEQ ID NO: 2522 - RNA, 22 nt, Human
aauuaugauuggucuaaaccag

SEQ ID NO: 2523 - RNA, 22 nt, Human
aauuaugcaaccaaugaccacg

SEQ ID NO: 2524 - RNA, 22 nt, Human
aauuaugguauguucaacaacu

SEQ ID NO: 2525 - RNA, 22 nt, Human
aauuaugguggaucccaguggg

SEQ ID NO: 2526 - RNA, 22 nt, Human
aauuauguggaagaggauuaaa

SEQ ID NO: 2527 - RNA, 22 nt, Human
aauuauguuugcuuuagaugga

SEQ ID NO: 2528 - RNA, 22 nt, Human
aauuauugagcaucuacugugu

SEQ ID NO: 2529 - RNA, 22 nt, Human
aauucaaagacuagaauuuugc

SEQ ID NO: 2530 - RNA, 22 nt, Human
aauucaaucuaagaaaugauca

SEQ ID NO: 2531 - RNA, 22 nt, Human
aauucacaaaaccagauugcuu

SEQ ID NO: 2532 - RNA, 22 nt, Human
aauucacaguucugcaccuuac

SEQ ID NO: 2533 - RNA, 22 nt, Human
aauucacaugcaugucugugca

SEQ ID NO: 2534 - RNA, 22 nt, Human
aauucacugaacuucucugaga

SEQ ID NO: 2535 - RNA, 22 nt, Human
aauucagagacaugaagugaca

SEQ ID NO: 2536 - RNA, 22 nt, Human
aauucagaguccuggccccacg

SEQ ID NO: 2537 - RNA, 22 nt, Human
aauucaguaaucauuaaugaug

SEQ ID NO: 2538 - RNA, 22 nt, Human
aauucagugucuggcacugcug

SEQ ID NO: 2539 - RNA, 22 nt, Human
aauucaguuauauguccacuuc

SEQ ID NO: 2540 - RNA, 22 nt, Human
acagccccccgcucaguuucca

SEQ ID NO: 2541 - RNA, 22 nt, Human
acagccugacuuuuguugucac

SEQ ID NO: 2542 - RNA, 22 nt, Human
acagccugauuuauggagcagu

SEQ ID NO: 2543 - RNA, 22 nt, Human
acagccuggacuggcucucugc

SEQ ID NO: 2544 - RNA, 21 nt, Human
acagccugucaucucaugguc

SEQ ID NO: 2545 - RNA, 22 nt, Human
acagccuguuugaucuggugcu

SEQ ID NO: 2546 - RNA, 22 nt, Human
acagccuucucuucacuguguc

SEQ ID NO: 2547 - RNA, 23 nt, Human
acagccuucuggggcuucugggc

SEQ ID NO: 2548 - RNA, 22 nt, Human
acagccuuggguucucuggggg

SEQ ID NO: 2549 - RNA, 21 nt, Human
acagcuaagcaacaacuacug

SEQ ID NO: 2550 - RNA, 22 nt, Human
acagcuaagcucccacaaccug

SEQ ID NO: 2551 - RNA, 22 nt, Human
acagcuaaucccccuagauucu

SEQ ID NO: 2552 - RNA, 22 nt, Human
acagcuacaucaaacucagaag

SEQ ID NO: 2553 - RNA, 22 nt, Human
acagcuaucugacuuugacuca

SEQ ID NO: 2554 - RNA, 22 nt, Human
acagcucauuuguaaaacggag

SEQ ID NO: 2555 - RNA, 22 nt, Human
acagcucugcauuuuggguuaa

SEQ ID NO: 2556 - RNA, 22 nt, Human
acagcucugggugcaggaggug

SEQ ID NO: 2557 - RNA, 22 nt, Human
acagcucuguguauugucaucu

SEQ ID NO: 2558 - RNA, 22 nt, Human
acagcugaaaccagggaucugg

SEQ ID NO: 2559 - RNA, 22 nt, Human
acagcugacauuggcagcuauu

SEQ ID NO: 2560 - RNA, 22 nt, Human
acagcugauaguuaccucuguc

SEQ ID NO: 2561 - RNA, 22 nt, Human
acagcugcucaccugugagccc

SEQ ID NO: 2562 - RNA, 21 nt, Human
acagcuggaaauuacuugccc

SEQ ID NO: 2563 - RNA, 22 nt, Human
acagcuggacaggggagaguuu

SEQ ID NO: 2564 - RNA, 22 nt, Human
acagcuggagugaggauggagu

SEQ ID NO: 2565 - RNA, 22 nt, Human
acagcuguauccccagagcuca

SEQ ID NO: 2566 - RNA, 22 nt, Human
acagcuguauucaaguugcaag

SEQ ID NO: 2567 - RNA, 21 nt, Human
acagcugucuuagcuugggcu

SEQ ID NO: 2568 - RNA, 22 nt, Human
acagcugugaagcaagcacucu

SEQ ID NO: 2569 - RNA, 23 nt, Human
acagcuguugaaauuucaguggg

SEQ ID NO: 2570 - RNA, 22 nt, Human
acagcuuccaguauucuugaaa

SEQ ID NO: 2571 - RNA, 22 nt, Human
acagcuucgaggaucucauccc

SEQ ID NO: 2572 - RNA, 22 nt, Human
acagcuugucugguuucagguc

SEQ ID NO: 2573 - RNA, 22 nt, Human
acagcuuuaguguggguggugc

SEQ ID NO: 2574 - RNA, 22 nt, Human
acagcuuuguuuucccugcuga

SEQ ID NO: 2575 - RNA, 22 nt, Human
acagcuuuucaauucugcugag

SEQ ID NO: 2576 - RNA, 22 nt, Human
acaggaacuguuaucucagaug

SEQ ID NO: 2577 - RNA, 22 nt, Human
acaggaagugggaagaaacagg

SEQ ID NO: 2578 - RNA, 22 nt, Human
acaggaaguuuggaaagccuca

SEQ ID NO: 2579 - RNA, 22 nt, Human
acaggacugugauccaguaacc

SEQ ID NO: 2580 - RNA, 22 nt, Human
acaggacuuaagucauuuauaa

SEQ ID NO: 2581 - RNA, 22 nt, Human
acaggagcaacagacuaagaca

SEQ ID NO: 2582 - RNA, 22 nt, Human
acaggagccaaacacaugccag

SEQ ID NO: 2583 - RNA, 22 nt, Human
acaggagcccaggaugggcgga

SEQ ID NO: 2584 - RNA, 22 nt, Human
acaggaguggagaggugccucu

SEQ ID NO: 2585 - RNA, 22 nt, Human
acaggaguucagaggacacccc

SEQ ID NO: 2586 - RNA, 22 nt, Human
acaggauaguuuuuaaucuucc

SEQ ID NO: 2587 - RNA, 22 nt, Human
acaggaucgcccuguugcccag

SEQ ID NO: 2588 - RNA, 22 nt, Human
acaggaugagaauaucauauuu

SEQ ID NO: 2589 - RNA, 22 nt, Human
acaggauuacuggauuaugaca

SEQ ID NO: 2590 - RNA, 22 nt, Human
acaggauuagcaaguaaucagg

SEQ ID NO: 2591 - RNA, 22 nt, Human
acaggauuucaccauguuggcc

SEQ ID NO: 2592 - RNA, 21 nt, Human
acaggcaaauuuuagacaaug

SEQ ID NO: 2593 - RNA, 22 nt, Human
acaggcaagaggaaagcaagua

SEQ ID NO: 2594 - RNA, 23 nt, Human
acaggcaauaaagggagucucca

SEQ ID NO: 2595 - RNA, 22 nt, Human
acaggcaauauauaaauuauga

SEQ ID NO: 2596 - RNA, 22 nt, Human
acaggcaauuagcaagcuguua

SEQ ID NO: 2597 - RNA, 22 nt, Human
acaggcacaccuuccugcaggc

SEQ ID NO: 2598 - RNA, 22 nt, Human
acaggcacuuugacaugccauc

SEQ ID NO: 2599 - RNA, 22 nt, Human
acaggcagcgucauugcugcuc

SEQ ID NO: 2600 - RNA, 23 nt, Human
acaggcaggcauggccaaaugug

SEQ ID NO: 2601 - RNA, 22 nt, Human
acaggcaggcgggacagcccga

SEQ ID NO: 2602 - RNA, 22 nt, Human
acaggcagggaccucuugaguu

SEQ ID NO: 2603 - RNA, 22 nt, Human
acaggcagguccugucccagcu

SEQ ID NO: 2604 - RNA, 22 nt, Human
acaggcaguugagguuugugug

SEQ ID NO: 2605 - RNA, 22 nt, Human
acaggccagccugggguaaggu

SEQ ID NO: 2606 - RNA, 22 nt, Human
acaggccuacgaagucaggugc

SEQ ID NO: 2607 - RNA, 22 nt, Human
acaggccuagcuaaugcuuucc

SEQ ID NO: 2608 - RNA, 22 nt, Human
acaggccuggguucaaauuugg

SEQ ID NO: 2609 - RNA, 22 nt, Human
acaggccugugugcacacgagg

SEQ ID NO: 2610 - RNA, 22 nt, Human
acaggccuuggcaggcauguga

SEQ ID NO: 2611 - RNA, 22 nt, Human
acaggccuugguccugaccuaa

SEQ ID NO: 2612 - RNA, 22 nt, Human
acaggcgcacaugagggccgug

SEQ ID NO: 2613 - RNA, 21 nt, Human
acaggcuacaugcaggagcug

SEQ ID NO: 2614 - RNA, 18 nt, Human
acaggcuauugcaggaga

SEQ ID NO: 2615 - RNA, 22 nt, Human
acaggcugacuuccugccaugu

SEQ ID NO: 2616 - RNA, 22 nt, Human
acaggcuguugggguccagggu

SEQ ID NO: 2617 - RNA, 22 nt, Human
acaggcuuacaggcugcaagua

SEQ ID NO: 2618 - RNA, 22 nt, Human
acaggcuuuaaauuuaaaacca

SEQ ID NO: 2619 - RNA, 22 nt, Human
acaggcuuuauuauugguuagu

SEQ ID NO: 2620 - RNA, 22 nt, Human
acaggcuuuuuugcucucgaau

SEQ ID NO: 2621 - RNA, 22 nt, Human
acagggaaggauuuagugggaa

SEQ ID NO: 2622 - RNA, 19 nt, Human
acagggaauuuccacagaa

SEQ ID NO: 2623 - RNA, 22 nt, Human
acagggagauaucuucaauauc

SEQ ID NO: 2624 - RNA, 22 nt, Human
acagggagucugaggggauagu

SEQ ID NO: 2625 - RNA, 18 nt, Human
acagggaugggguaagug

SEQ ID NO: 2626 - RNA, 17 nt, Human
acagggcagaaacagcu

SEQ ID NO: 2627 - RNA, 22 nt, Human
acagggcagagugaaaugcuau

SEQ ID NO: 2628 - RNA, 22 nt, Human
acaauguucugucugacuuguc

SEQ ID NO: 2629 - RNA, 22 nt, Human
acaauguuuugaaacaucuagg

SEQ ID NO: 2630 - RNA, 22 nt, Human
acaauguuuuuguucaaagagu

SEQ ID NO: 2631 - RNA, 22 nt, Human
acaauuagugaucagugaugcc

SEQ ID NO: 2632 - RNA, 22 nt, Human
acaauucugugguugucugugg

SEQ ID NO: 2633 - RNA, 22 nt, Human
acaauuguggcaauuuguaugu

SEQ ID NO: 2634 - RNA, 20 nt, Human
acaauuuccucacuauaugc

SEQ ID NO: 2635 - RNA, 22 nt, Human
acaauuucuuauaguucaauuc

SEQ ID NO: 2636 - RNA, 22 nt, Human
acacaaagcuauugagugucau

SEQ ID NO: 2637 - RNA, 22 nt, Human
acacaacagaagagcaauugca

SEQ ID NO: 2638 - RNA, 22 nt, Human
acacaagaaguuaaugggcaaa

SEQ ID NO: 2639 - RNA, 21 nt, Human
acacaagcacucguacauacg

SEQ ID NO: 2640 - RNA, 23 nt, Human
acacaaggguaacugccagccau

SEQ ID NO: 2641 - RNA, 22 nt, Human
acacaagugaauauuuuaagga

SEQ ID NO: 2642 - RNA, 22 nt, Human
acacaauaaauuuauccuuuga

SEQ ID NO: 2643 - RNA, 23 nt, Human
acacaauagaguacuauucagcc

SEQ ID NO: 2644 - RNA, 19 nt, Human
acacaaugacacauauaua

SEQ ID NO: 2645 - RNA, 22 nt, Human
acacaaugaggaggggcuuuuc

SEQ ID NO: 2646 - RNA, 22 nt, Human
acacaauggcgugugccacaga

SEQ ID NO: 2647 - RNA, 22 nt, Human
acacaauguaccauaucuccaa

SEQ ID NO: 2648 - RNA, 22 nt, Human
acacaaugugcaggacaccugu

SEQ ID NO: 2649 - RNA, 22 nt, Human
accuucaacucaaaguguccca

SEQ ID NO: 2650 - RNA, 22 nt, Human
accuucaagauugugggucaau

SEQ ID NO: 2651 - RNA, 21 nt, Human
accuucaagccagaggugguc

SEQ ID NO: 2652 - RNA, 22 nt, Human
accuucaaugaaaauaauaguc

SEQ ID NO: 2653 - RNA, 22 nt, Human
accuucugaccaguuaucuuga

SEQ ID NO: 2654 - RNA, 22 nt, Human
accuucuggucugccugacagc

SEQ ID NO: 2655 - RNA, 22 nt, Human
accuugaugccuuuccaagaug

SEQ ID NO: 2656 - RNA, 22 nt, Human
accuuggaacugaaguguuuuu

SEQ ID NO: 2657 - RNA, 22 nt, Human
accuuggggugaugcugaaaga

SEQ ID NO: 2658 - RNA, 21 nt, Human
accuuuaauucaagcaucagg

SEQ ID NO: 2659 - RNA, 22 nt, Human
accuuuauaugaaagaugacau

SEQ ID NO: 2660 - RNA, 22 nt, Human
accuuuauguuugauuacaauu

SEQ ID NO: 2661 - RNA, 22 nt, Human
accuuucacgguaucagacauc

SEQ ID NO: 2662 - RNA, 19 nt, Human
accuuuccuuucucagaug

SEQ ID NO: 2663 - RNA, 22 nt, Human
accuuuggaggacuagggucau

SEQ ID NO: 2664 - RNA, 22 nt, Human
accuuuggauaauuugaguuug

SEQ ID NO: 2665 - RNA, 21 nt, Human
accuuuggguguuuauaauag

SEQ ID NO: 2666 - RNA, 22 nt, Human
accuuugguaaguuuccaaaac

SEQ ID NO: 2667 - RNA, 22 nt, Human
accuuuuccagcuucuagaggc

SEQ ID NO: 2668 - RNA, 22 nt, Human
acccggagucggagguugcagu

SEQ ID NO: 2669 - RNA, 22 nt, Human
acccuaauaaucacagacuagu

SEQ ID NO: 2670 - RNA, 19 nt, Human
acccuaggaggucugguga

SEQ ID NO: 2671 - RNA, 22 nt, Human
acccucaacaaauucacucuau

SEQ ID NO: 2672 - RNA, 22 nt, Human
acccucagacauauuccaucau

SEQ ID NO: 2673 - RNA, 22 nt, Human
acccucaggcagaauguauucu

SEQ ID NO: 2674 - RNA, 22 nt, Human
acccuccacaccagucuuauuu

SEQ ID NO: 2675 - RNA, 20 nt, Human
acccuccacuguucacugug

SEQ ID NO: 2676 - RNA, 22 nt, Human
acccucccauuuccauguagca

SEQ ID NO: 2677 - RNA, 22 nt, Human
acccucugccuugagcagugcc

SEQ ID NO: 2678 - RNA, 22 nt, Human
acccucuggcucauuuccuagu

SEQ ID NO: 2679 - RNA, 20 nt, Human
acccugaggcuccccagccu

SEQ ID NO: 2680 - RNA, 22 nt, Human
acccugagggguauagcagaag

SEQ ID NO: 2681 - RNA, 22 nt, Human
acccugagggugcuggguuucu

SEQ ID NO: 2682 - RNA, 22 nt, Human
acccugagucagacagccugac

SEQ ID NO: 2683 - RNA, 22 nt, Human
acccugagugcaacggugagga

SEQ ID NO: 2684 - RNA, 22 nt, Human
acccugccgugggcugcuugug

SEQ ID NO: 2685 - RNA, 22 nt, Human
acccugccucugcuuccuguag

SEQ ID NO: 2686 - RNA, 21 nt, Human
acccugcuuuaugccguccuc

SEQ ID NO: 2687 - RNA, 22 nt, Human
acccuggagcaauaaucccugg

SEQ ID NO: 2688 - RNA, 22 nt, Human
acccuggagcuuuucuggcccu

SEQ ID NO: 2689 - RNA, 22 nt, Human
acccuggagguggaggugcagu

SEQ ID NO: 2690 - RNA, 22 nt, Human
acccuggcagccuucuguccug

SEQ ID NO: 2691 - RNA, 18 nt, Human
acccuggcaugcucuucc

SEQ ID NO: 2692 - RNA, 22 nt, Human
acccuggccugguucaugugau

SEQ ID NO: 2693 - RNA, 22 nt, Human
acccugggacuuccgaguugag

SEQ ID NO: 2694 - RNA, 23 nt, Human
acccugggcaagucaccuaaccu

SEQ ID NO: 2695 - RNA, 22 nt, Human
acccugggucauauacagugug

SEQ ID NO: 2696 - RNA, 21 nt, Human
acccuggguucuccauacccu

SEQ ID NO: 2697 - RNA, 22 nt, Human
acccuguaugcuauaucccuaa

SEQ ID NO: 2698 - RNA, 22 nt, Human
acccugugucacaguggccugu

SEQ ID NO: 2699 - RNA, 22 nt, Human
acccuuccaaaugagcuuauua

SEQ ID NO: 2700 - RNA, 22 nt, Human
acccuuuguccaauagaaauga

SEQ ID NO: 2701 - RNA, 22 nt, Human
acccuuuugccuuuaauucaug

SEQ ID NO: 2702 - RNA, 22 nt, Human
accgugucugacacuuugggcg

SEQ ID NO: 2703 - RNA, 22 nt, Human
accuaacuuaccuagguccaca

SEQ ID NO: 2704 - RNA, 22 nt, Human
accuaagagaucuucuggucca

SEQ ID NO: 2705 - RNA, 22 nt, Human
accuacuaauugagauaauagg

SEQ ID NO: 2706 - RNA, 22 nt, Human
accuagaaacugacagaauauu

SEQ ID NO: 2707 - RNA, 22 nt, Human
accuagaauccaucugcuuauu

SEQ ID NO: 2708 - RNA, 22 nt, Human
accuagaauuuaaaacauugcu

SEQ ID NO: 2709 - RNA, 20 nt, Human
accuaguacaaucuguuucu

SEQ ID NO: 2710 - RNA, 22 nt, Human
accuauuuaugcaauuaugaaa

SEQ ID NO: 2711 - RNA, 22 nt, Human
accucaagugauccacucaccu

SEQ ID NO: 2712 - RNA, 22 nt, Human
accucagaacggcguucuugaa

SEQ ID NO: 2713 - RNA, 22 nt, Human
accucagagauacaaaccaugg

SEQ ID NO: 2714 - RNA, 22 nt, Human
accucagauuguggcuccgcug

SEQ ID NO: 2715 - RNA, 22 nt, Human
accucccagcucugagcuuggg

SEQ ID NO: 2716 - RNA, 22 nt, Human
accuccccauuaggucacccac

SEQ ID NO: 2717 - RNA, 22 nt, Human
accucccuccaucuggacacua

SEQ ID NO: 2718 - RNA, 22 nt, Human
accucccuugcuaaagacugug

SEQ ID NO: 2719 - RNA, 22 nt, Human
accuccuggugcccaaguguuu

SEQ ID NO: 2720 - RNA, 22 nt, Human
accucgaguucuuucaauucac

SEQ ID NO: 2721 - RNA, 22 nt, Human
accucugcaaugcaaugucaug

SEQ ID NO: 2722 - RNA, 22 nt, Human
accucugcaguagggcugugcc

SEQ ID NO: 2723 - RNA, 22 nt, Human
accucugcuucccggguucaag

SEQ ID NO: 2724 - RNA, 22 nt, Human
accucuuaauauugcaccuucu

SEQ ID NO: 2725 - RNA, 22 nt, Human
accugaaaccaacuuguguacu

SEQ ID NO: 2726 - RNA, 22 nt, Human
accugaauugauuugaccugua

SEQ ID NO: 2727 - RNA, 22 nt, Human
accugaggaagggcgagaagcu

SEQ ID NO: 2728 - RNA, 22 nt, Human
accugauauguuugaucacccu

SEQ ID NO: 2729 - RNA, 22 nt, Human
accugauguauagauucuagau

SEQ ID NO: 2730 - RNA, 22 nt, Human
accugcagcugagaaaaugacu

SEQ ID NO: 2731 - RNA, 22 nt, Human
accugccagcugagaagggugu

SEQ ID NO: 2732 - RNA, 19 nt, Human
accugccaugacagccuga

SEQ ID NO: 2733 - RNA, 22 nt, Human
accugcccggggacauuccuuu

SEQ ID NO: 2734 - RNA, 20 nt, Human
accuggagacagcacucugg

SEQ ID NO: 2735 - RNA, 20 nt, Human
accuggagagauuauuacca

SEQ ID NO: 2736 - RNA, 22 nt, Human
accuggaugcuggccuugccuu

SEQ ID NO: 2737 - RNA, 22 nt, Human
accuggauuuugcuuagacaug

SEQ ID NO: 2738 - RNA, 22 nt, Human
accuggcaugaagcaugccuua

SEQ ID NO: 2739 - RNA, 22 nt, Human
accuggcugagaacgugcagcu

SEQ ID NO: 2740 - RNA, 20 nt, Human
accuggcuuccucuuggcau

SEQ ID NO: 2741 - RNA, 22 nt, Human
accuggcuuuggggauaggcuu

SEQ ID NO: 2742 - RNA, 22 nt, Human
accugggaagaucuuugaagcu

SEQ ID NO: 2743 - RNA, 22 nt, Human
accugggaggcggagguugcag

SEQ ID NO: 2744 - RNA, 22 nt, Human
accugggauggggccagguuua

SEQ ID NO: 2745 - RNA, 22 nt, Human
accugggcauuuuggaugauua

SEQ ID NO: 2746 - RNA, 20 nt, Human
accugggguugccugugcuc

SEQ ID NO: 2747 - RNA, 22 nt, Human
accugucuauaaaagugaauac

SEQ ID NO: 2748 - RNA, 22 nt, Human
accugucugcaugaucuaaaac

SEQ ID NO: 2749 - RNA, 21 nt, Human
accugugaauagccacugcac

SEQ ID NO: 2750 - RNA, 22 nt, Human
accugugcaaagacuggucagg

SEQ ID NO: 2751 - RNA, 22 nt, Human
accugugcacagucagcccugg

SEQ ID NO: 2752 - RNA, 22 nt, Human
accuguuuacccugggcucccc

SEQ ID NO: 2753 - RNA, 22 nt, Human
accuguuucucucugaguuacu

SEQ ID NO: 2754 - RNA, 22 nt, Human
accuguuuggaggagguguuag

SEQ ID NO: 2755 - RNA, 19 nt, Human
accuuacagaaacaggcau

SEQ ID NO: 2756 - RNA, 22 nt, Human
accuuagaccagcaagauauuu

SEQ ID NO: 2757 - RNA, 22 nt, Human
accuucaccuccacaccuuggg

SEQ ID NO: 2758 - RNA, 22 nt, Human
acucauuuaaacauuuacugaa

SEQ ID NO: 2759 - RNA, 22 nt, Human
acucauuugacacuuuaaacug

SEQ ID NO: 2760 - RNA, 22 nt, Human
acuccagacacagacacuauga

SEQ ID NO: 2761 - RNA, 22 nt, Human
acuccaggauguagaaucagag

SEQ ID NO: 2762 - RNA, 22 nt, Human
acuccagggcuccaccccagau

SEQ ID NO: 2763 - RNA, 22 nt, Human
acuccagggcugaacgaggccc

SEQ ID NO: 2764 - RNA, 22 nt, Human
acuccaggguuuugcaccugga

SEQ ID NO: 2765 - RNA, 22 nt, Human
acuccagguuuucucucaaguu

SEQ ID NO: 2766 - RNA, 22 nt, Human
acuccagguuuuuucacugaag

SEQ ID NO: 2767 - RNA, 22 nt, Human
acuccaguucucuuguuuauaa

SEQ ID NO: 2768 - RNA, 22 nt, Human
acucccacuccagaguagaagc

SEQ ID NO: 2769 - RNA, 22 nt, Human
acucccagaacaugcucuucuu

SEQ ID NO: 2770 - RNA, 22 nt, Human
acucccucucuaguccuugcaa

SEQ ID NO: 2771 - RNA, 22 nt, Human
acucccuggcaggucuuuaucu

SEQ ID NO: 2772 - RNA, 22 nt, Human
acucccuugguggagaaugcaa

SEQ ID NO: 2773 - RNA, 22 nt, Human
acucccuuuccaggaaacacaa

SEQ ID NO: 2774 - RNA, 22 nt, Human
acuccuggaaaagaacgcaggg

SEQ ID NO: 2775 - RNA, 22 nt, Human
acuccugggugcauuucugauu

SEQ ID NO: 2776 - RNA, 22 nt, Human
acucuaaaaugcuaugagaucu

SEQ ID NO: 2777 - RNA, 22 nt, Human
acucuaaauagccucuuaaaca

SEQ ID NO: 2778 - RNA, 22 nt, Human
acucucacugcuuggcuccugc

SEQ ID NO: 2779 - RNA, 22 nt, Human
acucucagaggguggcagcaau

SEQ ID NO: 2780 - RNA, 22 nt, Human
acucucccugagagggaggcau

SEQ ID NO: 2781 - RNA, 22 nt, Human
acucuccuuuugaucuucagaa

SEQ ID NO: 2782 - RNA, 22 nt, Human
acucucugggcaugccccacca

SEQ ID NO: 2783 - RNA, 21 nt, Human
acucugaaaauuaauaguuau

SEQ ID NO: 2784 - RNA, 22 nt, Human
acucugaaauagaggcuggugg

SEQ ID NO: 2785 - RNA, 22 nt, Human
accuuuuuguucuguucucagc

SEQ ID NO: 2786 - RNA, 22 nt, Human
accuuuuuucagaacucuaaag

SEQ ID NO: 2787 - RNA, 22 nt, Human
acgaaauacuuugcacaguuuu

SEQ ID NO: 2788 - RNA, 22 nt, Human
acgaagacgccguucuugccga

SEQ ID NO: 2789 - RNA, 22 nt, Human
acgagucugcucuugaaaaagu

SEQ ID NO: 2790 - RNA, 22 nt, Human
acgcagaagggccuggcgugcc

SEQ ID NO: 2791 - RNA, 22 nt, Human
acgccaguagacugaaccuuuc

SEQ ID NO: 2792 - RNA, 22 nt, Human
acgcuucugguucuggcuuuag

SEQ ID NO: 2793 - RNA, 22 nt, Human
acggccuggugcagcaggucgc

SEQ ID NO: 2794 - RNA, 22 nt, Human
acgggcagacagagcuacucgc

SEQ ID NO: 2795 - RNA, 22 nt, Human
acggguggcugaggaggccucu

SEQ ID NO: 2796 - RNA, 22 nt, Human
acgguaacagauaccacagacu

SEQ ID NO: 2797 - RNA, 22 nt, Human
acggugccgguggugaugagcc

SEQ ID NO: 2798 - RNA, 22 nt, Human
acguagcacugagagaugcagg

SEQ ID NO: 2799 - RNA, 22 nt, Human
acguaguguguuguggaaagag

SEQ ID NO: 2800 - RNA, 22 nt, Human
acgugcauauguauacacacau

SEQ ID NO: 2801 - RNA, 22 nt, Human
acgugcaucuuuccauaugugg

SEQ ID NO: 2802 - RNA, 22 nt, Human
acgugcgugugcgcacacauac

SEQ ID NO: 2803 - RNA, 20 nt, Human
acguggccaccaguggcuua

SEQ ID NO: 2804 - RNA, 22 nt, Human
acguguucaauuuccaucugac

SEQ ID NO: 2805 - RNA, 22 nt, Human
acguuaaacauuuagcauagua

SEQ ID NO: 2806 - RNA, 22 nt, Human
acguugaaugguuaauuuguau

SEQ ID NO: 2807 - RNA, 22 nt, Human
acguugaauguccauuugagau

SEQ ID NO: 2808 - RNA, 22 nt, Human
acguuugcuuucuuuggccugg

SEQ ID NO: 2809 - RNA, 22 nt, Human
acguuuucagccuuaauguaga

SEQ ID NO: 2810 - RNA, 22 nt, Human
acuaaacauucuugucucucaa

SEQ ID NO: 2811 - RNA, 22 nt, Human
acuaaaguccuguuguagcaua

SEQ ID NO: 2812 - RNA, 22 nt, Human
acuaaagugcaccccuuugaga

SEQ ID NO: 2813 - RNA, 22 nt, Human
acuaaaguguuggagaaugagg

SEQ ID NO: 2814 - RNA, 22 nt, Human
acuaaaugagauacugucuuca

SEQ ID NO: 2815 - RNA, 22 nt, Human
acuaaaugcauugguaucuauu

SEQ ID NO: 2816 - RNA, 22 nt, Human
acuaaauggaaugauuacuaua

SEQ ID NO: 2817 - RNA, 23 nt, Human
acuaaauggggcuuugcuuaaag

SEQ ID NO: 2818 - RNA, 20 nt, Human
acuaacauuugcaaggggcu

SEQ ID NO: 2819 - RNA, 20 nt, Human
acuaaggugguagcagcagg

SEQ ID NO: 2820 - RNA, 22 nt, Human
acuaaguaguuucacauauaau

SEQ ID NO: 2821 - RNA, 20 nt, Human
acuaaucauccagucacagu

SEQ ID NO: 2822 - RNA, 22 nt, Human
acuaaugauuauugucauugug

SEQ ID NO: 2823 - RNA, 22 nt, Human
acuaauugaaaugagacuggug

SEQ ID NO: 2824 - RNA, 22 nt, Human
acuacacuccaauuuucuaggu

SEQ ID NO: 2825 - RNA, 22 nt, Human
acuacacugcccuggggaucaa

SEQ ID NO: 2826 - RNA, 22 nt, Human
acuacaguacuauaucuauagg

SEQ ID NO: 2827 - RNA, 22 nt, Human
acuaccuuauacaaaauguagg

SEQ ID NO: 2828 - RNA, 22 nt, Human
acuacuacaagugaguacaaag

SEQ ID NO: 2829 - RNA, 23 nt, Human
acuagaaaaugacuuucucccug

SEQ ID NO: 2830 - RNA, 22 nt, Human
acuagaaagaaguuuuuugaga

SEQ ID NO: 2831 - RNA, 22 nt, Human
acuagaaagcacuaagcuaggc

SEQ ID NO: 2832 - RNA, 20 nt, Human
acuagaaagucacugggggg

SEQ ID NO: 2833 - RNA, 22 nt, Human
acuagaaugcaagcuccacaag

SEQ ID NO: 2834 - RNA, 22 nt, Human
acuagacaucgagcuacagagu

SEQ ID NO: 2835 - RNA, 22 nt, Human
acuagcagggauauuauauaag

SEQ ID NO: 2836 - RNA, 22 nt, Human
acuagcagucagcgguuggcaa

SEQ ID NO: 2837 - RNA, 22 nt, Human
acuaggaauucaaguagacaga

SEQ ID NO: 2838 - RNA, 22 nt, Human
acuaggagaaaacuuacacuga

SEQ ID NO: 2839 - RNA, 22 nt, Human
acuaguauuagacuaaaaguca

SEQ ID NO: 2840 - RNA, 22 nt, Human
acuaguguccuuauauaagagg

SEQ ID NO: 2841 - RNA, 22 nt, Human
acuaguuuauuacaguuccacu

SEQ ID NO: 2842 - RNA, 22 nt, Human
acuauaaaaggauaaaccagaa

SEQ ID NO: 2843 - RNA, 22 nt, Human
acuauaaccuguuagaauagau

SEQ ID NO: 2844 - RNA, 22 nt, Human
acuauacaguauguacgugcac

SEQ ID NO: 2845 - RNA, 22 nt, Human
acuauacugucucuuauagaua

SEQ ID NO: 2846 - RNA, 22 nt, Human
acuauagcucggguuauaaugu

SEQ ID NO: 2847 - RNA, 22 nt, Human
acuaugaaaguauaauauugaa

SEQ ID NO: 2848 - RNA, 22 nt, Human
acuaugauguauuuugcaucua

SEQ ID NO: 2849 - RNA, 22 nt, Human
acuaugcucauuguuaauauuu

SEQ ID NO: 2850 - RNA, 22 nt, Human
acuauugcaauacgugucagca

SEQ ID NO: 2851 - RNA, 23 nt, Human
acucaaaauuuggcauuugagga

SEQ ID NO: 2852 - RNA, 22 nt, Human
acucaaguagauauuaacaaaa

SEQ ID NO: 2853 - RNA, 19 nt, Human
acucaagucuaaugaaauc

SEQ ID NO: 2854 - RNA, 21 nt, Human
acucaaguggagaugccaggu

SEQ ID NO: 2855 - RNA, 21 nt, Human
acucaagugggcaugcgcaga

SEQ ID NO: 2856 - RNA, 22 nt, Human
acucacagacugcagguuuauu

SEQ ID NO: 2857 - RNA, 18 nt, Human
acucacagcagaagaagg

SEQ ID NO: 2858 - RNA, 22 nt, Human
acucacagcaugagcuuggcag

SEQ ID NO: 2859 - RNA, 22 nt, Human
acucacagucccuguaggagug

SEQ ID NO: 2860 - RNA, 22 nt, Human
acucagaaccauuuacucugag

SEQ ID NO: 2861 - RNA, 23 nt, Human
acucagagaccccgggaagugac

SEQ ID NO: 2862 - RNA, 22 nt, Human
acucagagccucgagggacugc

SEQ ID NO: 2863 - RNA, 22 nt, Human
acucagcucaggagcuggcugg

SEQ ID NO: 2864 - RNA, 22 nt, Human
acucaggaaaugagaggcucuc

SEQ ID NO: 2865 - RNA, 21 nt, Human
acucaggagacuaacuauguc

SEQ ID NO: 2866 - RNA, 22 nt, Human
acucaggcacucagcccucgcc

SEQ ID NO: 2867 - RNA, 22 nt, Human
agacauauggugaaacauuuua

SEQ ID NO: 2868 - RNA, 22 nt, Human
agacaucauguuacagauuaag

SEQ ID NO: 2869 - RNA, 22 nt, Human
agacaucucccaugcauuuuua

SEQ ID NO: 2870 - RNA, 22 nt, Human
agacaucuugcacacauauacu

SEQ ID NO: 2871 - RNA, 23 nt, Human
agacauggcaggaauacagcuuc

SEQ ID NO: 2872 - RNA, 21 nt, Human
agacaugugaacuaaagguga

SEQ ID NO: 2873 - RNA, 22 nt, Human
agacaugugguauaaucagggg

SEQ ID NO: 2874 - RNA, 22 nt, Human
agacauuggcuaaaaguagugu

SEQ ID NO: 2875 - RNA, 22 nt, Human
agacauuuauguuucucuagga

SEQ ID NO: 2876 - RNA, 22 nt, Human
agacauuuccuagacaucaaug

SEQ ID NO: 2877 - RNA, 22 nt, Human
agacauuuggaagauacacaua

SEQ ID NO: 2878 - RNA, 22 nt, Human
agaccaaagaaaacacaucugg

SEQ ID NO: 2879 - RNA, 22 nt, Human
agaccaagugcaggugccacua

SEQ ID NO: 2880 - RNA, 22 nt, Human
agaccacuaaaacuuucucuau

SEQ ID NO: 2881 - RNA, 22 nt, Human
agaccacuuggauaagaaacag

SEQ ID NO: 2882 - RNA, 22 nt, Human
agacccacacuuugaguagcaa

SEQ ID NO: 2883 - RNA, 22 nt, Human
agaccccauaccucagcaggua

SEQ ID NO: 2884 - RNA, 22 nt, Human
agacccugcaccucucgugggc

SEQ ID NO: 2885 - RNA, 20 nt, Human
agacccuguguccuguggcc

SEQ ID NO: 2886 - RNA, 22 nt, Human
agacccuguuaguuccagucuu

SEQ ID NO: 2887 - RNA, 22 nt, Human
agaccucaauaccaggcaccac

SEQ ID NO: 2888 - RNA, 22 nt, Human
agaccucugcucccuucauggu

SEQ ID NO: 2889 - RNA, 21 nt, Human
agaccucuucccuucaugcac

SEQ ID NO: 2890 - RNA, 23 nt, Human
agaccugcaucugauaggcccug

SEQ ID NO: 2891 - RNA, 22 nt, Human
agaccuggagugaagaguuccc

SEQ ID NO: 2892 - RNA, 22 nt, Human
agaccuggaguggggccucagg

SEQ ID NO: 2893 - RNA, 22 nt, Human
agaccuggguucgaguccuaac

SEQ ID NO: 2894 - RNA, 22 nt, Human
agaccugguuuaucaccagcau

SEQ ID NO: 2895 - RNA, 22 nt, Human
agaccuguuggguucauuggcu

SEQ ID NO: 2896 - RNA, 22 nt, Human
agacgcgguggugcaugccugu

SEQ ID NO: 2897 - RNA, 22 nt, Human
agacuaaauaaugauuuacugg

SEQ ID NO: 2898 - RNA, 22 nt, Human
agacuaaauugggauguguugu

SEQ ID NO: 2899 - RNA, 22 nt, Human
agacuaagcgguucuuuucaau

SEQ ID NO: 2900 - RNA, 20 nt, Human
agacucaguuucuaugcucu

SEQ ID NO: 2901 - RNA, 22 nt, Human
agacucaugacacuuccuauga

SEQ ID NO: 2902 - RNA, 22 nt, Human
agacuccucggaccaaucagcg

SEQ ID NO: 2903 - RNA, 22 nt, Human
agacucugaaaucuaggugcaa

SEQ ID NO: 2904 - RNA, 22 nt, Human
agacucugagacaugaaccauc

SEQ ID NO: 2905 - RNA, 23 nt, Human
agacucugagagugugcuuugca

SEQ ID NO: 2906 - RNA, 22 nt, Human
agacucugaggagcccugagac

SEQ ID NO: 2907 - RNA, 22 nt, Human
agacucugauucccucauguca

SEQ ID NO: 2908 - RNA, 21 nt, Human
agacucuggggaucucugucc

SEQ ID NO: 2909 - RNA, 22 nt, Human
agacugaacccucugcugcacu

SEQ ID NO: 2910 - RNA, 22 nt, Human
agacugaaguaagaaugcagcu

SEQ ID NO: 2911 - RNA, 22 nt, Human
agacugaauaacaagcaaauaa

SEQ ID NO: 2912 - RNA, 22 nt, Human
agacugaauaggaaagagggaa

SEQ ID NO: 2913 - RNA, 22 nt, Human
agacuggauagcuuuggacuug

SEQ ID NO: 2914 - RNA, 22 nt, Human
agacuguaauuuguggccuccu

SEQ ID NO: 2915 - RNA, 21 nt, Human
agacuucuagaagugagauag

SEQ ID NO: 2916 - RNA, 22 nt, Human
agacuuuaacaauggguaugaa

SEQ ID NO: 2917 - RNA, 22 nt, Human
agacuuuaaugugcaaaugaaa

SEQ ID NO: 2918 - RNA, 22 nt, Human
agacuuuagaaucagauagccu

SEQ ID NO: 2919 - RNA, 22 nt, Human
agacuuuagggccaugguaggu

SEQ ID NO: 2920 - RNA, 22 nt, Human
agacuuucuugaccuaguuaau

SEQ ID NO: 2921 - RNA, 23 nt, Human
agagaaaaauaucugggcacauu

SEQ ID NO: 2922 - RNA, 22 nt, Human
agagaaaacucauugagguguc

SEQ ID NO: 2923 - RNA, 22 nt, Human
agagaaaagaguucaggcuuug

SEQ ID NO: 2924 - RNA, 22 nt, Human
agagaaaguaaagauucuaccu

SEQ ID NO: 2925 - RNA, 22 nt, Human
agagaaauauuuaggaaaggag

SEQ ID NO: 2926 - RNA, 22 nt, Human
agagaacauuagcaaaaacagc

SEQ ID NO: 2927 - RNA, 22 nt, Human
agagaacuucuccuaaaucuca

SEQ ID NO: 2928 - RNA, 22 nt, Human
agagaagcauucuucucagggc

SEQ ID NO: 2929 - RNA, 22 nt, Human
agagaaggaaagcugacauggg

SEQ ID NO: 2930 - RNA, 22 nt, Human
agagaagggguaaagaguccug

SEQ ID NO: 2931 - RNA, 22 nt, Human
agagaaggguguagccugggcc

SEQ ID NO: 2932 - RNA, 22 nt, Human
agagaaucuagaauguuuauac

SEQ ID NO: 2933 - RNA, 22 nt, Human
agagaaucugggaagauguuaa

SEQ ID NO: 2934 - RNA, 20 nt, Human
agagaauucccuuuggagau

SEQ ID NO: 2935 - RNA, 22 nt, Human
acugagguugaaauagugaugu

SEQ ID NO: 2936 - RNA, 22 nt, Human
acugagguuguaguaggaauuc

SEQ ID NO: 2937 - RNA, 22 nt, Human
acugagguuuuuaguguuaaau

SEQ ID NO: 2938 - RNA, 22 nt, Human
acugaguuauggguaugccuug

SEQ ID NO: 2939 - RNA, 22 nt, Human
acugauaaguugcuugcucuca

SEQ ID NO: 2940 - RNA, 22 nt, Human
acugaucaaggguuuaauuuua

SEQ ID NO: 2941 - RNA, 22 nt, Human
acugaucugccuguauguagcu

SEQ ID NO: 2942 - RNA, 22 nt, Human
acugaugaguaggcagacaagg

SEQ ID NO: 2943 - RNA, 22 nt, Human
acugaugaucugggaguagagu

SEQ ID NO: 2944 - RNA, 22 nt, Human
acugauguucagccauguucug

SEQ ID NO: 2945 - RNA, 23 nt, Human
acugauuaacaugugugauauuc

SEQ ID NO: 2946 - RNA, 23 nt, Human
acugauucuugaaguugacaagu

SEQ ID NO: 2947 - RNA, 22 nt, Human
acugcaaucuggauccuagaag

SEQ ID NO: 2948 - RNA, 22 nt, Human
acugcaauuauuuguucaccaa

SEQ ID NO: 2949 - RNA, 22 nt, Human
acugcacaccuccagggcacua

SEQ ID NO: 2950 - RNA, 22 nt, Human
acugcacagauuaaguuagauu

SEQ ID NO: 2951 - RNA, 22 nt, Human
acugcaccuugcgguccugugg

SEQ ID NO: 2952 - RNA, 22 nt, Human
acugcacugauuuaucauccca

SEQ ID NO: 2953 - RNA, 22 nt, Human
acugcagagcuuuucaguugag

SEQ ID NO: 2954 - RNA, 22 nt, Human
acugcagagguggggugcagag

SEQ ID NO: 2955 - RNA, 22 nt, Human
acugcagccuagggaccacagu

SEQ ID NO: 2956 - RNA, 22 nt, Human
acugcagcuggugguggcucug

SEQ ID NO: 2957 - RNA, 22 nt, Human
acugcaggagacacagcugcug

SEQ ID NO: 2958 - RNA, 18 nt, Human
acugcaggagaggugagg

SEQ ID NO: 2959 - RNA, 22 nt, Human
acugcaucugaaacauggguca

SEQ ID NO: 2960 - RNA, 22 nt, Human
acugcauucuuuaucccacaac

SEQ ID NO: 2961 - RNA, 22 nt, Human
acugccaccuggugguccugga

SEQ ID NO: 2962 - RNA, 22 nt, Human
acugccagaagacagcuuuuca

SEQ ID NO: 2963 - RNA, 22 nt, Human
acugccauuggucaaaugagug

SEQ ID NO: 2964 - RNA, 22 nt, Human
acugcccacagugaaugguugg

SEQ ID NO: 2965 - RNA, 22 nt, Human
acugcccacaucucuuuccgcu

SEQ ID NO: 2966 - RNA, 21 nt, Human
acugcccaccaguuaacgcug

SEQ ID NO: 2967 - RNA, 22 nt, Human
acugcccaggaaucucaaagaa

SEQ ID NO: 2968 - RNA, 22 nt, Human
acugccucuuggugcugagaga

SEQ ID NO: 2969 - RNA, 22 nt, Human
acugccugagcuauuggaaaag

SEQ ID NO: 2970 - RNA, 22 nt, Human
acugccugaugugguucuaaau

SEQ ID NO: 2971 - RNA, 22 nt, Human
acugccugcauccuuaggguag

SEQ ID NO: 2972 - RNA, 23 nt, Human
acugccugcuacuaugcccacgg

SEQ ID NO: 2973 - RNA, 18 nt, Human
acugccuggcgaagauag

SEQ ID NO: 2974 - RNA, 21 nt, Human
acugccuggggugcuggccaa

SEQ ID NO: 2975 - RNA, 22 nt, Human
acugccuguagcucuucaucuc

SEQ ID NO: 2976 - RNA, 22 nt, Human
agaacauaauuaucauaaacug

SEQ ID NO: 2977 - RNA, 22 nt, Human
agaacaucuaaauaucugagac

SEQ ID NO: 2978 - RNA, 20 nt, Human
agaaccuaaguuaaaacaca

SEQ ID NO: 2979 - RNA, 22 nt, Human
agaaccuuccaucacucccuac

SEQ ID NO: 2980 - RNA, 21 nt, Human
agaaccuuggaugccauugca

SEQ ID NO: 2981 - RNA, 22 nt, Human
agaaccuuggugagucuaaccu

SEQ ID NO: 2982 - RNA, 22 nt, Human
agaaccuuucuuuagaaauuca

SEQ ID NO: 2983 - RNA, 22 nt, Human
agaacgcuauucagaacacugg

SEQ ID NO: 2984 - RNA, 22 nt, Human
agaacguggaauguggcuccuu

SEQ ID NO: 2985 - RNA, 22 nt, Human
agaacugugccaaaaauuuugu

SEQ ID NO: 2986 - RNA, 22 nt, Human
agaacuuuuggagacuuuuagu

SEQ ID NO: 2987 - RNA, 22 nt, Human
agaagaaaugaggccguucugc

SEQ ID NO: 2988 - RNA, 22 nt, Human
agaagaaaugugaaggccacug

SEQ ID NO: 2989 - RNA, 22 nt, Human
agaagaauacuugauguucaug

SEQ ID NO: 2990 - RNA, 21 nt, Human
agaagagaagcaggacccucu

SEQ ID NO: 2991 - RNA, 22 nt, Human
agaagagccacuguugacggca

SEQ ID NO: 2992 - RNA, 22 nt, Human
agaagauuuagguugacgcuau

SEQ ID NO: 2993 - RNA, 22 nt, Human
agaagcacaccaguagacaggg

SEQ ID NO: 2994 - RNA, 22 nt, Human
agaagcacagguaaagugauuu

SEQ ID NO: 2995 - RNA, 22 nt, Human
agaagcacuagaggguauggaa

SEQ ID NO: 2996 - RNA, 22 nt, Human
agaagcagaaacugggcuugug

SEQ ID NO: 2997 - RNA, 22 nt, Human
agaagcagggcagggaaaagca

SEQ ID NO: 2998 - RNA, 18 nt, Human
agaagcagguaaaauucu

SEQ ID NO: 2999 - RNA, 22 nt, Human
agaagcaguuauuuuuugcaca

SEQ ID NO: 3000 - RNA, 22 nt, Human
agaagcauuauaacaugcaagg

SEQ ID NO: 3001 - RNA, 22 nt, Human
agaagccaaaugccagugaccu

SEQ ID NO: 3002 - RNA, 22 nt, Human
agaagccacaggaaagcagcuu

SEQ ID NO: 3003 - RNA, 22 nt, Human
agaagccagcuucagcugcccg

SEQ ID NO: 3004 - RNA, 21 nt, Human
agaagccaugugguggagaac

SEQ ID NO: 3005 - RNA, 22 nt, Human
agaagccauucccuguaggcuc

SEQ ID NO: 3006 - RNA, 21 nt, Human
agaagccauuuguuaggacuu

SEQ ID NO: 3007 - RNA, 22 nt, Human
agaagcccagcauggaaccagc

SEQ ID NO: 3008 - RNA, 22 nt, Human
agaagccucauccucucuagug

SEQ ID NO: 3009 - RNA, 21 nt, Human
agaagccugaugaggucugcu

SEQ ID NO: 3010 - RNA, 21 nt, Human
agaagccuggguggagguggg

SEQ ID NO: 3011 - RNA, 22 nt, Human
agaagccuguugagagggccgu

SEQ ID NO: 3012 - RNA, 22 nt, Human
agaagcuaauucaugucuuaug

SEQ ID NO: 3013 - RNA, 22 nt, Human
agaagcuauaacaacaauuaua

SEQ ID NO: 3014 - RNA, 22 nt, Human
agaagcugccuacaugaccagc

SEQ ID NO: 3015 - RNA, 22 nt, Human
agaagcugcguuuauuuaaauc

SEQ ID NO: 3016 - RNA, 19 nt, Human
agaagcugugaaaugaagg

SEQ ID NO: 3017 - RNA, 22 nt, Human
agaagcuuccuacauuguucuu

SEQ ID NO: 3018 - RNA, 22 nt, Human
agaagcuugaaggagcagugac

SEQ ID NO: 3019 - RNA, 22 nt, Human
agaaggaaaaccugucuuaugu

SEQ ID NO: 3020 - RNA, 22 nt, Human
agaaggaguguacaggucaugc

SEQ ID NO: 3021 - RNA, 21 nt, Human
agaaggcaccagcaaggacug

SEQ ID NO: 3022 - RNA, 22 nt, Human
agaaggcacucacacuggcacg

SEQ ID NO: 3023 - RNA, 22 nt, Human
agaaggcagguuuuaaaauguc

SEQ ID NO: 3024 - RNA, 22 nt, Human
agaaggcauagaccggauuaug

SEQ ID NO: 3025 - RNA, 22 nt, Human
agaaggccaugucuugguacuu

SEQ ID NO: 3026 - RNA, 22 nt, Human
agaaggcuaaaguaacuuagua

SEQ ID NO: 3027 - RNA, 22 nt, Human
agaaggcucacuaagagugacu

SEQ ID NO: 3028 - RNA, 22 nt, Human
agaaggcucaucccucacccca

SEQ ID NO: 3029 - RNA, 22 nt, Human
agaaggcucauuugacugcauu

SEQ ID NO: 3030 - RNA, 22 nt, Human
agaaggcuccaaguagaguuug

SEQ ID NO: 3031 - RNA, 19 nt, Human
agaaggcuccuguuggaga

SEQ ID NO: 3032 - RNA, 20 nt, Human
agaaggcuccuuuugccaag

SEQ ID NO: 3033 - RNA, 21 nt, Human
agaagggauugugguaaagau

SEQ ID NO: 3034 - RNA, 22 nt, Human
agaaggggcccaaggaugucag

SEQ ID NO: 3035 - RNA, 22 nt, Human
agaaggguguauacauuuccug

SEQ ID NO: 3036 - RNA, 22 nt, Human
agaaggguucaggaauauguua

SEQ ID NO: 3037 - RNA, 22 nt, Human
agaaguauuuggcuaaaagaca

SEQ ID NO: 3038 - RNA, 22 nt, Human
agaagucaaguggucuaugaaa

SEQ ID NO: 3039 - RNA, 22 nt, Human
agaagucaauaguuguuugaug

SEQ ID NO: 3040 - RNA, 22 nt, Human
agaagucagccacagugggaga

SEQ ID NO: 3041 - RNA, 22 nt, Human
agaaguccccccagcaucguag

SEQ ID NO: 3042 - RNA, 22 nt, Human
agaagugccgaaaggaagacag

SEQ ID NO: 3043 - RNA, 20 nt, Human
agaaguggcugcagacacua

SEQ ID NO: 3044 - RNA, 22 nt, Human
agaaguguuuauuucagcaaca

SEQ ID NO: 3045 - RNA, 22 nt, Human
agaaguuauccaccuuagaugc

SEQ ID NO: 3046 - RNA, 23 nt, Human
agaaguucaagaccagccugccc

SEQ ID NO: 3047 - RNA, 22 nt, Human
agaaguucuggagacggaagug

SEQ ID NO: 3048 - RNA, 22 nt, Human
agaaguuuccagucuaguaagg

SEQ ID NO: 3049 - RNA, 22 nt, Human
agaaguuucucugaacguguag

SEQ ID NO: 3050 - RNA, 22 nt, Human
agaaguuugcucacuugggaca

SEQ ID NO: 3051 - RNA, 22 nt, Human
acuguaaaacugcuuuggaaac

SEQ ID NO: 3052 - RNA, 22 nt, Human
acuguaaagguuuguagcccag

SEQ ID NO: 3053 - RNA, 22 nt, Human
acuguaacgccagcuuuaaaug

SEQ ID NO: 3054 - RNA, 22 nt, Human
acuguaagguaaggauaaaacc

SEQ ID NO: 3055 - RNA, 22 nt, Human
acuguacaaauauugcaaaaua

SEQ ID NO: 3056 - RNA, 22 nt, Human
acuguacacagugguguacugu

SEQ ID NO: 3057 - RNA, 22 nt, Human
acuguacacauucgucaagacu

SEQ ID NO: 3058 - RNA, 22 nt, Human
acuguacacgugucauuuacag

SEQ ID NO: 3059 - RNA, 22 nt, Human
acuguacauauggauucuaaga

SEQ ID NO: 3060 - RNA, 22 nt, Human
acuguacaugcaucuugucuau

SEQ ID NO: 3061 - RNA, 22 nt, Human
acuguagaauggaaccaauugu

SEQ ID NO: 3062 - RNA, 19 nt, Human
acuguagcacugcaguaua

SEQ ID NO: 3063 - RNA, 22 nt, Human
acuguagugaugauaauuaagu

SEQ ID NO: 3064 - RNA, 22 nt, Human
acuguauauuggacaaggaaaa

SEQ ID NO: 3065 - RNA, 22 nt, Human
acuguauugguuuucuauugcu

SEQ ID NO: 3066 - RNA, 22 nt, Human
acuguauuuccaacagacaaau

SEQ ID NO: 3067 - RNA, 22 nt, Human
acuguauuuuugaaucauugug

SEQ ID NO: 3068 - RNA, 22 nt, Human
acugucaaaagagauuauauua

SEQ ID NO: 3069 - RNA, 22 nt, Human
acugucacuccaacugagucgu

SEQ ID NO: 3070 - RNA, 22 nt, Human
acugucacugugauguuagaga

SEQ ID NO: 3071 - RNA, 22 nt, Human
acugucaucagaagaugaaaau

SEQ ID NO: 3072 - RNA, 22 nt, Human
acugucaucugguagaugaugg

SEQ ID NO: 3073 - RNA, 22 nt, Human
acugucaucuuguaagcaaugu

SEQ ID NO: 3074 - RNA, 22 nt, Human
acugucaugcauuauggcaugu

SEQ ID NO: 3075 - RNA, 22 nt, Human
acugucccauuuauguagacau

SEQ ID NO: 3076 - RNA, 22 nt, Human
acuguccucgaaguaccugugc

SEQ ID NO: 3077 - RNA, 22 nt, Human
acugucgauuaugaugagucag

SEQ ID NO: 3078 - RNA, 23 nt, Human
acugucugauauguuuuccauca

SEQ ID NO: 3079 - RNA, 22 nt, Human
acugucugugccagaugcuggg

SEQ ID NO: 3080 - RNA, 22 nt, Human
acugucuucaaaugaauauauu

SEQ ID NO: 3081 - RNA, 22 nt, Human
acugucuuguuccaagacuaaa

SEQ ID NO: 3082 - RNA, 17 nt, Human
acugucuuuuacacccu

SEQ ID NO: 3083 - RNA, 21 nt, Human
acugugacuggguguaugggu

SEQ ID NO: 3084 - RNA, 22 nt, Human
acugugaguuuauuuaucugau

SEQ ID NO: 3085 - RNA, 22 nt, Human
agcucuuaucucuaagcacagc

SEQ ID NO: 3086 - RNA, 22 nt, Human
agcucuuccaccucaugauggg

SEQ ID NO: 3087 - RNA, 15 nt, Human
agcucuuucagcuac

SEQ ID NO: 3088 - RNA, 22 nt, Human
agcucuuuugugagcauuuggc

SEQ ID NO: 3089 - RNA, 20 nt, Human
agcucuuuuuagcuaaggua

SEQ ID NO: 3090 - RNA, 22 nt, Human
agcugaaagcuugacuggggcu

SEQ ID NO: 3091 - RNA, 23 nt, Human
agcugaaagcuugcaacgaggca

SEQ ID NO: 3092 - RNA, 22 nt, Human
agcugaaaggguguuggagugu

SEQ ID NO: 3093 - RNA, 22 nt, Human
agcugaaauucuuuguccucag

SEQ ID NO: 3094 - RNA, 17 nt, Human
agacugaggacacagga

SEQ ID NO: 3095 - RNA, 21 nt, Human
agacugccaucuuugggccac

SEQ ID NO: 3096 - RNA, 23 nt, Human
agacuggggcauaagaagauggc

SEQ ID NO: 3097 - RNA, 22 nt, Human
agacuggguuugagacuuagca

SEQ ID NO: 3098 - RNA, 22 nt, Human
agacuguaaagggccagaaagu

SEQ ID NO: 3099 - RNA, 22 nt, Human
agacuguaauugacaugucagc

SEQ ID NO: 3100 - RNA, 22 nt, Human
agacuguacuuucugcagcucu

SEQ ID NO: 3101 - RNA, 22 nt, Human
agacuguagcuucugucuugag

SEQ ID NO: 3102 - RNA, 22 nt, Human
agacugugccacacaugggagu

SEQ ID NO: 3103 - RNA, 22 nt, Human
agacuguuaauuucaauuaaaa

SEQ ID NO: 3104 - RNA, 22 nt, Human
agacuuaauagaagcaugacau

SEQ ID NO: 3105 - RNA, 22 nt, Human
agacuucacucccagagauucu

SEQ ID NO: 3106 - RNA, 22 nt, Human
agacuucucuccuugacuugca

SEQ ID NO: 3107 - RNA, 22 nt, Human
agacuucucuuggcuauauuau

SEQ ID NO: 3108 - RNA, 22 nt, Human
agacuucuugagcuggcacuuc

SEQ ID NO: 3109 - RNA, 22 nt, Human
agacuugggaccuaggaaugga

SEQ ID NO: 3110 - RNA, 22 nt, Human
agacuuugagcucuuagagaag

SEQ ID NO: 3111 - RNA, 18 nt, Human
agacuuugaguuagaggg

SEQ ID NO: 3112 - RNA, 22 nt, Human
agagaaacugauguccuuugaa

SEQ ID NO: 3113 - RNA, 19 nt, Human
agagaaagaauugagucua

SEQ ID NO: 3114 - RNA, 22 nt, Human
agagaaaugauuccugggcaga

SEQ ID NO: 3115 - RNA, 22 nt, Human
agagaaaugggguaaucuuuca

SEQ ID NO: 3116 - RNA, 22 nt, Human
agagaaauucucaguggaagau

SEQ ID NO: 3117 - RNA, 22 nt, Human
agagaacaaauuaaaggugguu

SEQ ID NO: 3118 - RNA, 22 nt, Human
agagaacacgugcaucugcaau

SEQ ID NO: 3119 - RNA, 22 nt, Human
agagaacagacagaugcaauga

SEQ ID NO: 3120 - RNA, 22 nt, Human
agagaagagcaaugauaaauuu

SEQ ID NO: 3121 - RNA, 21 nt, Human
agagaagaggacuuucucaca

SEQ ID NO: 3122 - RNA, 22 nt, Human
agagaagagucuugucaaauua

SEQ ID NO: 3123 - RNA, 19 nt, Human
agagaaggauccuaugguu

SEQ ID NO: 3124 - RNA, 21 nt, Human
agagaagggacucuuccaguc

SEQ ID NO: 3125 - RNA, 22 nt, Human
agagaaggguagcccauucucc

SEQ ID NO: 3126 - RNA, 22 nt, Human
agagaagugagcuuguucacuc

SEQ ID NO: 3127 - RNA, 22 nt, Human
agagaauacaggguaacaggaa

SEQ ID NO: 3128 - RNA, 23 nt, Human
agagaaucauggaaacucuuucu

SEQ ID NO: 3129 - RNA, 22 nt, Human
agagaauccucuacauguuuuu

SEQ ID NO: 3130 - RNA, 21 nt, Human
agagacagagaaaguaacauu

SEQ ID NO: 3131 - RNA, 22 nt, Human
agagacagaggcaauauagcuu

SEQ ID NO: 3132 - RNA, 22 nt, Human
agagacagaucugagggaccuc

SEQ ID NO: 3133 - RNA, 22 nt, Human
agagacaggaguucuguuucca

SEQ ID NO: 3134 - RNA, 22 nt, Human
agagaccagaauccagcugccu

SEQ ID NO: 3135 - RNA, 20 nt, Human
agagacccuguagcuugcag

SEQ ID NO: 3136 - RNA, 22 nt, Human
agagaccuuuguuauucuagga

SEQ ID NO: 3137 - RNA, 22 nt, Human
agagaccuuuugccuucuaguu

SEQ ID NO: 3138 - RNA, 22 nt, Human
agagacugauggagcucacucu

SEQ ID NO: 3139 - RNA, 22 nt, Human
agagacuggagaugggcagugu

SEQ ID NO: 3140 - RNA, 22 nt, Human
agagacuggaguuacgaguuca

SEQ ID NO: 3141 - RNA, 22 nt, Human
agagacugucacauaacagagg

SEQ ID NO: 3142 - RNA, 22 nt, Human
agagacuguggcucuuugaagg

SEQ ID NO: 3143 - RNA, 21 nt, Human
agagagaaggccauauggucc

SEQ ID NO: 3144 - RNA, 18 nt, Human
agagagaauuccaguagg

SEQ ID NO: 3145 - RNA, 22 nt, Human
agagagagaaaugaaaugugcu

SEQ ID NO: 3146 - RNA, 22 nt, Human
agagagaggggcgagcaaacac

SEQ ID NO: 3147 - RNA, 22 nt, Human
agagagcauggcacagaggggu

SEQ ID NO: 3148 - RNA, 22 nt, Human
agagagcauugaggaaaucuuc

SEQ ID NO: 3149 - RNA, 22 nt, Human
agagagcccgggccagggcaca

SEQ ID NO: 3150 - RNA, 22 nt, Human
agagagcuguccugggacaccc

SEQ ID NO: 3151 - RNA, 22 nt, Human
agagaggcauucggugauccca

SEQ ID NO: 3152 - RNA, 22 nt, Human
agagagggcauagaaaaaggga

SEQ ID NO: 3153 - RNA, 22 nt, Human
agagaggucucaggagaaacca

SEQ ID NO: 3154 - RNA, 22 nt, Human
agagagguuaaggagcucuugu

SEQ ID NO: 3155 - RNA, 22 nt, Human
agagagguuggcuaggauguuu

SEQ ID NO: 3156 - RNA, 22 nt, Human
agagauacuuuucuuuggaugc

SEQ ID NO: 3157 - RNA, 21 nt, Human
agagauagacuagaauugaug

SEQ ID NO: 3158 - RNA, 22 nt, Human
agagaucccuucugccugggga

SEQ ID NO: 3159 - RNA, 22 nt, Human
agagaucuagcaccugcugguc

SEQ ID NO: 3160 - RNA, 22 nt, Human
agagaucugucuacuauuuaag

SEQ ID NO: 3161 - RNA, 22 nt, Human
agagaugacugauggcugauua

SEQ ID NO: 3162 - RNA, 22 nt, Human
agagaugcugacguuuacauuu

SEQ ID NO: 3163 - RNA, 22 nt, Human
agagauggccuuaggugggaau

SEQ ID NO: 3164 - RNA, 18 nt, Human
agagaugggaguuggaaa

SEQ ID NO: 3165 - RNA, 18 nt, Human
agagaugguguagaguuu

SEQ ID NO: 3166 - RNA, 22 nt, Human
agagauuaagucacuuggucag

SEQ ID NO: 3167 - RNA, 22 nt, Human
agagauucauguuuacuguagg

SEQ ID NO: 3168 - RNA, 22 nt, Human
agagauuggggaugaaucuuuc

SEQ ID NO: 3169 - RNA, 22 nt, Human
agagauuugucaaugauuucca

SEQ ID NO: 3170 - RNA, 22 nt, Human
agagcaccccgggaagagcaag

SEQ ID NO: 3171 - RNA, 22 nt, Human
agagcacugagugagcaaggcc

SEQ ID NO: 3172 - RNA, 20 nt, Human
agagcagcaguuggugaggu

SEQ ID NO: 3173 - RNA, 22 nt, Human
agagcagccucagcucccugug

SEQ ID NO: 3174 - RNA, 22 nt, Human
agagcagccugugaugaugcac

SEQ ID NO: 3175 - RNA, 22 nt, Human
agagcagcuggggcagagacca

SEQ ID NO: 3176 - RNA, 22 nt, Human
agagcagcugugacauggacag

SEQ ID NO: 3177 - RNA, 22 nt, Human
agagcagcuuuucggaaccacu

SEQ ID NO: 3178 - RNA, 22 nt, Human
agagcaggcauaaagcuuugaa

SEQ ID NO: 3179 - RNA, 22 nt, Human
agagcauccauuuuugucacau

SEQ ID NO: 3180 - RNA, 22 nt, Human
agagccagagaccuggguucac

SEQ ID NO: 3181 - RNA, 22 nt, Human
agagccaggaugucuucugggg

SEQ ID NO: 3182 - RNA, 22 nt, Human
agagccaggcaggcaauguuga

SEQ ID NO: 3183 - RNA, 22 nt, Human
agagccaggccaggccggggca

SEQ ID NO: 3184 - RNA, 22 nt, Human
agagccaguuacaacuguggag

SEQ ID NO: 3185 - RNA, 22 nt, Human
agagccaguuguuaagcacuua

SEQ ID NO: 3186 - RNA, 22 nt, Human
agagcccagaaaguaugucaua

SEQ ID NO: 3187 - RNA, 22 nt, Human
agagcccaggcaggcauccagg

SEQ ID NO: 3188 - RNA, 22 nt, Human
agagcccagucuuugugugaag

SEQ ID NO: 3189 - RNA, 22 nt, Human
agagccccugguggagugagaa

SEQ ID NO: 3190 - RNA, 22 nt, Human
agagcccucucauuggcuuauu

SEQ ID NO: 3191 - RNA, 22 nt, Human
agagcccucuucacugccccuu

SEQ ID NO: 3192 - RNA, 22 nt, Human
agagcccugacggggacagaug

SEQ ID NO: 3193 - RNA, 22 nt, Human
agagcccuuucuccaggcaccu

SEQ ID NO: 3194 - RNA, 22 nt, Human
agaggucacuccaccuucuucu

SEQ ID NO: 3195 - RNA, 22 nt, Human
agaggucagaacaggaaagugu

SEQ ID NO: 3196 - RNA, 22 nt, Human
agaggucagaggucgccagguc

SEQ ID NO: 3197 - RNA, 21 nt, Human
agaggucuaagauucuagcuu

SEQ ID NO: 3198 - RNA, 22 nt, Human
agaggucucaguuauguuuaaa

SEQ ID NO: 3199 - RNA, 22 nt, Human
agaggucuuaaguuccuugaug

SEQ ID NO: 3200 - RNA, 22 nt, Human
agaggucuuuuggucugcagaa

SEQ ID NO: 3201 - RNA, 22 nt, Human
agaggugacauaggagaggcuc

SEQ ID NO: 3202 - RNA, 22 nt, Human
agagguggagcucuuggcauca

SEQ ID NO: 3203 - RNA, 22 nt, Human
agagguggccaugggcgcugga

SEQ ID NO: 3204 - RNA, 22 nt, Human
agagguucaaacuucauaauuu

SEQ ID NO: 3205 - RNA, 22 nt, Human
agagguuguuagaauaguggag

SEQ ID NO: 3206 - RNA, 22 nt, Human
agagguuucuuaggggcuuccu

SEQ ID NO: 3207 - RNA, 22 nt, Human
agaguaaauaggagaugacagc

SEQ ID NO: 3208 - RNA, 22 nt, Human
agaguacauucagagcuaccua

SEQ ID NO: 3209 - RNA, 22 nt, Human
agaguacugccucaguuaugaa

SEQ ID NO: 3210 - RNA, 20 nt, Human
agaguagagguagauuuaug

SEQ ID NO: 3211 - RNA, 22 nt, Human
agaguaugcuacaaagccagcc

SEQ ID NO: 3212 - RNA, 22 nt, Human
agagucaacaucgagccacugg

SEQ ID NO: 3213 - RNA, 22 nt, Human
agagucaccuuuuccucaggau

SEQ ID NO: 3214 - RNA, 22 nt, Human
agagucagaaagcagacagggg

SEQ ID NO: 3215 - RNA, 22 nt, Human
agcaagaaaaucucuguccaau

SEQ ID NO: 3216 - RNA, 22 nt, Human
agcaagaaaucuucaguguucu

SEQ ID NO: 3217 - RNA, 18 nt, Human
agcaagacagugguguga

SEQ ID NO: 3218 - RNA, 22 nt, Human
agcaagauuuuucagguuagua

SEQ ID NO: 3219 - RNA, 22 nt, Human
agcaagcagaauucuguccucu

SEQ ID NO: 3220 - RNA, 22 nt, Human
agcaagcaggauggucaaacua

SEQ ID NO: 3221 - RNA, 18 nt, Human
agcaagcaguuuucaugu

SEQ ID NO: 3222 - RNA, 22 nt, Human
agcaaggaaaguaggcacggaa

SEQ ID NO: 3223 - RNA, 22 nt, Human
agcaaggcagucagcuggcugg

SEQ ID NO: 3224 - RNA, 22 nt, Human
agcaaggccuacagagaggggc

SEQ ID NO: 3225 - RNA, 22 nt, Human
agcaaggcuaaauuucaguuau

SEQ ID NO: 3226 - RNA, 22 nt, Human
agcaaggcucggucagggugau

SEQ ID NO: 3227 - RNA, 22 nt, Human
agcaaggggcagugaaagugug

SEQ ID NO: 3228 - RNA, 22 nt, Human
agcaauaaccacucuaauuuau

SEQ ID NO: 3229 - RNA, 23 nt, Human
agcaauaagaagggauacaugug

SEQ ID NO: 3230 - RNA, 22 nt, Human
agcaauaagggauccucuauaa

SEQ ID NO: 3231 - RNA, 22 nt, Human
agcaauagacacaagauggaua

SEQ ID NO: 3232 - RNA, 22 nt, Human
agcaauauaaauguuggguaga

SEQ ID NO: 3233 - RNA, 22 nt, Human
agcaaugacuaaggcacuuugg

SEQ ID NO: 3234 - RNA, 22 nt, Human
agcaaugacuggcuauaugauu

SEQ ID NO: 3235 - RNA, 22 nt, Human
agcaaugcuuauugcugacuau

SEQ ID NO: 3236 - RNA, 22 nt, Human
agcaauuauuguauaagaacaa

SEQ ID NO: 3237 - RNA, 21 nt, Human
agcaauuucauuugguuuaac

SEQ ID NO: 3238 - RNA, 23 nt, Human
agcacaaaguguuuuccuuguag

SEQ ID NO: 3239 - RNA, 22 nt, Human
agcacaauagagcaguuaaaaa

SEQ ID NO: 3240 - RNA, 22 nt, Human
agcacaauauggguuuuauagu

SEQ ID NO: 3241 - RNA, 22 nt, Human
agcacacaggacuugauucaug

SEQ ID NO: 3242 - RNA, 22 nt, Human
agcacacaguauuagccauugu

SEQ ID NO: 3243 - RNA, 22 nt, Human
agcacacagucuuccuuccucc

SEQ ID NO: 3244 - RNA, 22 nt, Human
agcacacaucacuucugcucau

SEQ ID NO: 3245 - RNA, 22 nt, Human
agcacagaaagcacauuugaaa

SEQ ID NO: 3246 - RNA, 22 nt, Human
agcacagaaugagguggaagug

SEQ ID NO: 3247 - RNA, 22 nt, Human
agcacagaauggcuuggaagcc

SEQ ID NO: 3248 - RNA, 22 nt, Human
agcacagacuggucccaggucu

SEQ ID NO: 3249 - RNA, 22 nt, Human
agcacagagaagauuucaauua

SEQ ID NO: 3250 - RNA, 22 nt, Human
agcacagagcucggggaaugga

SEQ ID NO: 3251 - RNA, 22 nt, Human
agcacagauaacauggagugga

SEQ ID NO: 3252 - RNA, 22 nt, Human
agcacagaugcaugaucaccag

SEQ ID NO: 3253 - RNA, 22 nt, Human
agcacagauggauguauucauu

SEQ ID NO: 3254 - RNA, 21 nt, Human
agcacagcauauccaauguca

SEQ ID NO: 3255 - RNA, 22 nt, Human
agcacagccucugguuucugac

SEQ ID NO: 3256 - RNA, 22 nt, Human
agcacaggcuuuggugugaggg

SEQ ID NO: 3257 - RNA, 22 nt, Human
agcacagguaauacagaguaac

SEQ ID NO: 3258 - RNA, 22 nt, Human
agcacagugcucuggacagagu

SEQ ID NO: 3259 - RNA, 22 nt, Human
agcacaguggcuucuaugucua

SEQ ID NO: 3260 - RNA, 22 nt, Human
agcacaguugguaaaauuguua

SEQ ID NO: 3261 - RNA, 19 nt, Human
agcacaguuuccacaugca

SEQ ID NO: 3262 - RNA, 22 nt, Human
agcacaguuuucauugcagggu

SEQ ID NO: 3263 - RNA, 22 nt, Human
agcacauauucaguucauacaa

SEQ ID NO: 3264 - RNA, 22 nt, Human
agcacaugagcugauggugggc

SEQ ID NO: 3265 - RNA, 22 nt, Human
agcacauucccaccuguacuuc

SEQ ID NO: 3266 - RNA, 22 nt, Human
agcacauucuugccuuaaccuc

SEQ ID NO: 3267 - RNA, 22 nt, Human
agcacauugauuuauuuuggag

SEQ ID NO: 3268 - RNA, 22 nt, Human
agcacauuuaaguaugaaauau

SEQ ID NO: 3269 - RNA, 22 nt, Human
agcacauuuuauuuaagaaaau

SEQ ID NO: 3270 - RNA, 22 nt, Human
agcaccagcaacuaugggcugc

SEQ ID NO: 3271 - RNA, 22 nt, Human
agcaccagcgugggggccguug

SEQ ID NO: 3272 - RNA, 20 nt, Human
agcaccagugggggcagccc

SEQ ID NO: 3273 - RNA, 21 nt, Human
agcaccaguuuuaugccaggc

SEQ ID NO: 3274 - RNA, 22 nt, Human
agcaccaugaccuugccauuga

SEQ ID NO: 3275 - RNA, 22 nt, Human
agcaccauugcaaauauggcag

SEQ ID NO: 3276 - RNA, 22 nt, Human
agcaccugcacaguggaggaaa

SEQ ID NO: 3277 - RNA, 22 nt, Human
agcaccugcuaugugucaggga

SEQ ID NO: 3278 - RNA, 22 nt, Human
agcaccugcuugugacuaggga

SEQ ID NO: 3279 - RNA, 22 nt, Human
agcaccugucacaagcagaagg

SEQ ID NO: 3280 - RNA, 22 nt, Human
agcaccuguggcucaugcucgu

SEQ ID NO: 3281 - RNA, 22 nt, Human
agcaccuguugcacuucauaau

SEQ ID NO: 3282 - RNA, 21 nt, Human
agcaccuucaauucuauuguc

SEQ ID NO: 3283 - RNA, 22 nt, Human
agcaccuugaucuuggacuucc

SEQ ID NO: 3284 - RNA, 22 nt, Human
agcacucuucugugauaguugu

SEQ ID NO: 3285 - RNA, 22 nt, Human
agcacugugauuuauaacauuu

SEQ ID NO: 3286 - RNA, 22 nt, Human
agcacuguuaugggaugacuua

SEQ ID NO: 3287 - RNA, 22 nt, Human
agcacuuaacugacaguacuau

SEQ ID NO: 3288 - RNA, 22 nt, Human
agcacuuuagaauuuagaguug

SEQ ID NO: 3289 - RNA, 22 nt, Human
agcagaaacagccagucuggac

SEQ ID NO: 3290 - RNA, 22 nt, Human
agcagaaaugaugguaugggac

SEQ ID NO: 3291 - RNA, 21 nt, Human
agcagaacagucgagcacugc

SEQ ID NO: 3292 - RNA, 22 nt, Human
agcagaacagucuucuaguucu

SEQ ID NO: 3293 - RNA, 22 nt, Human
agcagaaccacagcacuguuga

SEQ ID NO: 3294 - RNA, 22 nt, Human
agcagaagaggucuuguugcug

SEQ ID NO: 3295 - RNA, 17 nt, Human
agcagaagucagaggga

SEQ ID NO: 3296 - RNA, 22 nt, Human
agcagacaacccagaugaccca

SEQ ID NO: 3297 - RNA, 21 nt, Human
agcagacacuugugaccuucc

SEQ ID NO: 3298 - RNA, 22 nt, Human
agcagagaccauauagcccaga

SEQ ID NO: 3299 - RNA, 22 nt, Human
agcagagcagauaguauuaucu

SEQ ID NO: 3300 - RNA, 22 nt, Human
agcagagcauggugggaagggc

SEQ ID NO: 3301 - RNA, 22 nt, Human
agcagagcgccugcucagaggg

SEQ ID NO: 3302 - RNA, 22 nt, Human
agcagagcugggauccuggguc

SEQ ID NO: 3303 - RNA, 22 nt, Human
agggaggaaggaacuccuucua

SEQ ID NO: 3304 - RNA, 22 nt, Human
agggaggaguccucaaagucau

SEQ ID NO: 3305 - RNA, 22 nt, Human
agggaggaucugcuccuugucu

SEQ ID NO: 3306 - RNA, 22 nt, Human
agggaggugguuccccagugga

SEQ ID NO: 3307 - RNA, 21 nt, Human
agggagucuggaggaagcguu

SEQ ID NO: 3308 - RNA, 22 nt, Human
agggaguuccgaucugugcacc

SEQ ID NO: 3309 - RNA, 22 nt, Human
agggaucaaaaaauguacaugc

SEQ ID NO: 3310 - RNA, 22 nt, Human
agggaugagugaguaaacaaua

SEQ ID NO: 3311 - RNA, 22 nt, Human
agggaugaucaggguagaggcu

SEQ ID NO: 3312 - RNA, 22 nt, Human
agggaugauggaaagaagcagg

SEQ ID NO: 3313 - RNA, 22 nt, Human
agggaugauuucagugucugcc

SEQ ID NO: 3314 - RNA, 22 nt, Human
agggaugcaguaaaaacuguag

SEQ ID NO: 3315 - RNA, 22 nt, Human
agggauggaagacuugaagacc

SEQ ID NO: 3316 - RNA, 22 nt, Human
agggauggagcccagcuguucu

SEQ ID NO: 3317 - RNA, 22 nt, Human
agggauggcaaguuaaccugag

SEQ ID NO: 3318 - RNA, 22 nt, Human
agggaugugggaacugcagguu

SEQ ID NO: 3319 - RNA, 22 nt, Human
agggcaaggguugaagauaaga

SEQ ID NO: 3320 - RNA, 22 nt, Human
agggcacaggcuggcaggaucu

SEQ ID NO: 3321 - RNA, 22 nt, Human
agggcacucugcagggaccacc

SEQ ID NO: 3322 - RNA, 22 nt, Human
agggcagaaguacagacacuua

SEQ ID NO: 3323 - RNA, 22 nt, Human
agggcagacuaggauggaagug

SEQ ID NO: 3324 - RNA, 22 nt, Human
agggcagagaucugagugggca

SEQ ID NO: 3325 - RNA, 22 nt, Human
agggcagaggcggacacggaag

SEQ ID NO: 3326 - RNA, 22 nt, Human
agggcagccugagugcuggccc

SEQ ID NO: 3327 - RNA, 20 nt, Human
agggcagcuugaggagccgg

SEQ ID NO: 3328 - RNA, 22 nt, Human
agggcagugggaaagccugcuc

SEQ ID NO: 3329 - RNA, 22 nt, Human
agggcaguucagccacaggcuc

SEQ ID NO: 3330 - RNA, 22 nt, Human
agggcaugaaaugggcagaagc

SEQ ID NO: 3331 - RNA, 22 nt, Human
agggcaugaagcaguggacagc

SEQ ID NO: 3332 - RNA, 22 nt, Human
agggcaugcuggaggagagaca

SEQ ID NO: 3333 - RNA, 22 nt, Human
agggccacaguaaugcugagua

SEQ ID NO: 3334 - RNA, 22 nt, Human
agggccagaguacaucagggcu

SEQ ID NO: 3335 - RNA, 22 nt, Human
agggccagagucuguguagaua

SEQ ID NO: 3336 - RNA, 22 nt, Human
agggccagaguggcaaaagccu

SEQ ID NO: 3337 - RNA, 22 nt, Human
agggccagaugaagccacaagc

SEQ ID NO: 3338 - RNA, 22 nt, Human
agggccagcacuccuggcagga

SEQ ID NO: 3339 - RNA, 22 nt, Human
agggccagccaggcccuacaaa

SEQ ID NO: 3340 - RNA, 22 nt, Human
agggccagccccacccucucug

SEQ ID NO: 3341 - RNA, 22 nt, Human
agggccagccgacuuccagccu

SEQ ID NO: 3342 - RNA, 22 nt, Human
agggccaggaucacagccaaga

SEQ ID NO: 3343 - RNA, 22 nt, Human
agggccagggaagcuguauuuu

SEQ ID NO: 3344 - RNA, 22 nt, Human
agggccaguaaauguuuccuca

SEQ ID NO: 3345 - RNA, 22 nt, Human
agggccagucguguauuacugu

SEQ ID NO: 3346 - RNA, 22 nt, Human
agggcccuaaggaaggcacaca

SEQ ID NO: 3347 - RNA, 22 nt, Human
agggcccuagggaaugagacau

SEQ ID NO: 3348 - RNA, 22 nt, Human
agggcccucugggcacuguggc

SEQ ID NO: 3349 - RNA, 22 nt, Human
agggcccugaguugcagcccug

SEQ ID NO: 3350 - RNA, 22 nt, Human
agggccuccagggcagcagugg

SEQ ID NO: 3351 - RNA, 22 nt, Human
agggccucgaaggcagagggau

SEQ ID NO: 3352 - RNA, 22 nt, Human
agggccucugacgcccccagcc

SEQ ID NO: 3353 - RNA, 22 nt, Human
agggccucugagccaguucugg

SEQ ID NO: 3354 - RNA, 22 nt, Human
agggccugacacccuugccagc

SEQ ID NO: 3355 - RNA, 22 nt, Human
agggccugaggcugacggggag

SEQ ID NO: 3356 - RNA, 20 nt, Human
agggccuggaguacagcagg

SEQ ID NO: 3357 - RNA, 23 nt, Human
agggccuggcguggagugugugc

SEQ ID NO: 3358 - RNA, 22 nt, Human
agggccugggaagaggaacccu

SEQ ID NO: 3359 - RNA, 22 nt, Human
agggccugggauguccuccuag

SEQ ID NO: 3360 - RNA, 21 nt, Human
agggccugugcucuccagguc

SEQ ID NO: 3361 - RNA, 19 nt, Human
agggcggggcccaggcaca

SEQ ID NO: 3362 - RNA, 22 nt, Human
agggcucaccacugugcacucc

SEQ ID NO: 3363 - RNA, 22 nt, Human
agggcucagaaaugucuacggg

SEQ ID NO: 3364 - RNA, 22 nt, Human
agggcucagggcacgucaucca

SEQ ID NO: 3365 - RNA, 22 nt, Human
agcucccaggcagucaugagga

SEQ ID NO: 3366 - RNA, 22 nt, Human
agcucccugagaugccacagca

SEQ ID NO: 3367 - RNA, 22 nt, Human
agcuccuacucuaugccagaca

SEQ ID NO: 3368 - RNA, 22 nt, Human
agcuccugaaaauccagacugg

SEQ ID NO: 3369 - RNA, 18 nt, Human
agcuccugaacucugugg

SEQ ID NO: 3370 - RNA, 22 nt, Human
agcuccugauacaugcaggaau

SEQ ID NO: 3371 - RNA, 22 nt, Human
agcuccugauucucagagauag

SEQ ID NO: 3372 - RNA, 22 nt, Human
agcuccugcaccaggggccccu

SEQ ID NO: 3373 - RNA, 20 nt, Human
agcuccuggacuagagagug

SEQ ID NO: 3374 - RNA, 22 nt, Human
agcuccugggccaucacaacca

SEQ ID NO: 3375 - RNA, 20 nt, Human
agcuccugguauaggugccu

SEQ ID NO: 3376 - RNA, 23 nt, Human
agcuccuguaagguggucgucac

SEQ ID NO: 3377 - RNA, 22 nt, Human
agcuccugugugaagccucccu

SEQ ID NO: 3378 - RNA, 22 nt, Human
agcuccuugaaggcaguagcug

SEQ ID NO: 3379 - RNA, 22 nt, Human
agcuccuugcagguugccuugg

SEQ ID NO: 3380 - RNA, 20 nt, Human
agcuccuuuguguccaggau

SEQ ID NO: 3381 - RNA, 21 nt, Human
agcucuaugacuuggccaggu

SEQ ID NO: 3382 - RNA, 22 nt, Human
agcucucauuacuuuacagaug

SEQ ID NO: 3383 - RNA, 22 nt, Human
agcucuccaucuaucugugaug

SEQ ID NO: 3384 - RNA, 22 nt, Human
agcucucccaccuucuucuuac

SEQ ID NO: 3385 - RNA, 22 nt, Human
agcucucccauagggcaagauc

SEQ ID NO: 3386 - RNA, 23 nt, Human
agcucugaaauagggaaagagga

SEQ ID NO: 3387 - RNA, 22 nt, Human
agcucugacaaggauuuucugc

SEQ ID NO: 3388 - RNA, 22 nt, Human
agcucugcuucuugggaagaug

SEQ ID NO: 3389 - RNA, 22 nt, Human
agcucuggaauaaugaugugau

SEQ ID NO: 3390 - RNA, 22 nt, Human
agcucuggagccggaggauuuc

SEQ ID NO: 3391 - RNA, 23 nt, Human
agcucuggcguuggggagguagu

SEQ ID NO: 3392 - RNA, 22 nt, Human
agcucugggaguaguuccaccu

SEQ ID NO: 3393 - RNA, 22 nt, Human
agcucugggccaggaacccuaa

SEQ ID NO: 3394 - RNA, 22 nt, Human
agcucugguauuucuuuaaucc

SEQ ID NO: 3395 - RNA, 20 nt, Human
agcucuuaagaagaagauga

SEQ ID NO: 3396 - RNA, 20 nt, Human
agcucuuacuuugcagcagc

SEQ ID NO: 3397 - RNA, 22 nt, Human
agcucuuccugcaccuguggcu

SEQ ID NO: 3398 - RNA, 22 nt, Human
agcucuuugagcaaggcagcuc

SEQ ID NO: 3399 - RNA, 19 nt, Human
agcucuuugcugcauucca

SEQ ID NO: 3400 - RNA, 22 nt, Human
agcucuuuuaucaugaggagag

SEQ ID NO: 3401 - RNA, 22 nt, Human
agcugaaaauuagugauaguuu

SEQ ID NO: 3402 - RNA, 22 nt, Human
agcugaaagugcuuugaggacu

SEQ ID NO: 3403 - RNA, 22 nt, Human
agcugaaauucacaaggaucca

SEQ ID NO: 3404 - RNA, 22 nt, Human
agcugaaauuuuacugaguaua

SEQ ID NO: 3405 - RNA, 22 nt, Human
agcugaaucuugacuaggaaga

SEQ ID NO: 3406 - RNA, 22 nt, Human
agcugacucuggccucuggucc

SEQ ID NO: 3407 - RNA, 23 nt, Human
agcugagaauaaggagccguuug

SEQ ID NO: 3408 - RNA, 22 nt, Human
agcugagauuguuuccauuucu

SEQ ID NO: 3409 - RNA, 22 nt, Human
agcugagcauuugauccaccuc

SEQ ID NO: 3410 - RNA, 22 nt, Human
agcugagccagcagcaacagga

SEQ ID NO: 3411 - RNA, 22 nt, Human
agcugagcuaguaguuccagug

SEQ ID NO: 3412 - RNA, 22 nt, Human
uucacaggauagcuauugcacg

SEQ ID NO: 3413 - RNA, 22 nt, Human
uucacaggugagcauuaggccg

SEQ ID NO: 3414 - RNA, 22 nt, Human
uucacagugccagggggcaggc

SEQ ID NO: 3415 - RNA, 22 nt, Human
uucacagugcucacaguucagu

SEQ ID NO: 3416 - RNA, 22 nt, Human
uucacagugcugcaccuggcuu

SEQ ID NO: 3417 - RNA, 22 nt, Human
uucacaguggcccucucugagu

SEQ ID NO: 3418 - RNA, 22 nt, Human
uucacagugguaaggguuguga

SEQ ID NO: 3419 - RNA, 22 nt, Human
uucacagugguagugcauuuag

SEQ ID NO: 3420 - RNA, 22 nt, Human
uucacauaauccuccaguggca

SEQ ID NO: 3421 - RNA, 22 nt, Human
uucacauaaugauacaaagcuu

SEQ ID NO: 3422 - RNA, 22 nt, Human
uucacaugaaaguaggaaagga

SEQ ID NO: 3423 - RNA, 22 nt, Human
uucacaugacagggugaagcau

SEQ ID NO: 3424 - RNA, 22 nt, Human
uucacauggcaauagagaggga

SEQ ID NO: 3425 - RNA, 22 nt, Human
uucacauuaagccuccuccuac

SEQ ID NO: 3426 - RNA, 22 nt, Human
uucacauuagugguucuauaua

SEQ ID NO: 3427 - RNA, 22 nt, Human
uucacauucagaaaaagcccgu

SEQ ID NO: 3428 - RNA, 19 nt, Human
uucacauuggaagaaguag

SEQ ID NO: 3429 - RNA, 22 nt, Human
uucacauuggugauauguuucu

SEQ ID NO: 3430 - RNA, 22 nt, Human
uucacauuguuuuaaugugaau

SEQ ID NO: 3431 - RNA, 22 nt, Human
uucacauuucauaccacagcuu

SEQ ID NO: 3432 - RNA, 22 nt, Human
uucacauuugcccuuaugugug

SEQ ID NO: 3433 - RNA, 22 nt, Human
uucaccacagucucaucuacgc

SEQ ID NO: 3434 - RNA, 22 nt, Human
uucaccacuuugcaccaggccu

SEQ ID NO: 3435 - RNA, 22 nt, Human
uucaccagguguacaguuaguu

SEQ ID NO: 3436 - RNA, 22 nt, Human
uucacccugagccccaccucug

SEQ ID NO: 3437 - RNA, 22 nt, Human
uucaccuugaauaugucuuaaa

SEQ ID NO: 3438 - RNA, 22 nt, Human
uucacugaauuaaaaagaguau

SEQ ID NO: 3439 - RNA, 22 nt, Human
uucacugcagcccaugaaggga

SEQ ID NO: 3440 - RNA, 22 nt, Human
uucacuguacugacugucuuau

SEQ ID NO: 3441 - RNA, 22 nt, Human
uucacugugaacucauauucag

SEQ ID NO: 3442 - RNA, 22 nt, Human
uucacuguuguuagcagaggcg

SEQ ID NO: 3443 - RNA, 22 nt, Human
uucacuuaacaucauaucauga

SEQ ID NO: 3444 - RNA, 22 nt, Human
uucacuuauuucuugaguagca

SEQ ID NO: 3445 - RNA, 22 nt, Human
uucagaaacagagugagugagu

SEQ ID NO: 3446 - RNA, 22 nt, Human
uucagaaacaucaguggaugga

SEQ ID NO: 3447 - RNA, 22 nt, Human
uucagaaaggcugugccagcca

SEQ ID NO: 3448 - RNA, 22 nt, Human
uucagaaagguaaauggauuuc

SEQ ID NO: 3449 - RNA, 23 nt, Human
uucagaagaaaugaguacaggag

SEQ ID NO: 3450 - RNA, 17 nt, Human
uucagaagcauuuuggc

SEQ ID NO: 3451 - RNA, 22 nt, Human
uucagaaggauuuuaacacaug

SEQ ID NO: 3452 - RNA, 22 nt, Human
uucagaagugcuuucacacucu

SEQ ID NO: 3453 - RNA, 22 nt, Human
uucagaauaacuuuuuauugaa

SEQ ID NO: 3454 - RNA, 22 nt, Human
uucagaauauuuguuuuacaug

SEQ ID NO: 3455 - RNA, 22 nt, Human
uucagaaugacuuauguaaggc

SEQ ID NO: 3456 - RNA, 16 nt, Human
uucagaauuuguagaa

SEQ ID NO: 3457 - RNA, 22 nt, Human
uucagacaauaagagucaucuc

SEQ ID NO: 3458 - RNA, 22 nt, Human
uucagacugcuggugcuucccu

SEQ ID NO: 3459 - RNA, 22 nt, Human
uucagagaacuucauggaagag

SEQ ID NO: 3460 - RNA, 22 nt, Human
uucagagaagcaaaggcagauu

SEQ ID NO: 3461 - RNA, 22 nt, Human
uucagagaagugcacaaaauca

SEQ ID NO: 3462 - RNA, 22 nt, Human
uucagagaauuggauaauucgu

SEQ ID NO: 3463 - RNA, 22 nt, Human
uucagagacauguucuagauca

SEQ ID NO: 3464 - RNA, 22 nt, Human
uucagagcucagaaaagugucu

SEQ ID NO: 3465 - RNA, 22 nt, Human
uucagaguaggauacuagcuua

SEQ ID NO: 3466 - RNA, 22 nt, Human
uucagaguuagacgaaaagcaa

SEQ ID NO: 3467 - RNA, 22 nt, Human
uucagauaagucaaguuaguau

SEQ ID NO: 3468 - RNA, 22 nt, Human
uucagauguggcuuugucaggc

SEQ ID NO: 3469 - RNA, 22 nt, Human
uucagauuuuuuaauagguaau

SEQ ID NO: 3470 - RNA, 22 nt, Human
uucagcaacucaaaccuauuag

SEQ ID NO: 3471 - RNA, 22 nt, Human
uucagcaaugacagccuauaua

SEQ ID NO: 3472 - RNA, 22 nt, Human
uucagcaauuuuuuaagcuaau

SEQ ID NO: 3473 - RNA, 22 nt, Human
uucagcacugacugagugguua

SEQ ID NO: 3474 - RNA, 22 nt, Human
uucagcacuggacagcgagucu

SEQ ID NO: 3475 - RNA, 18 nt, Human
uucagcagcagacacacu

SEQ ID NO: 3476 - RNA, 22 nt, Human
uucagcagcuuuuaguacauug

SEQ ID NO: 3477 - RNA, 21 nt, Human
uucagcaguccucuagagaua

SEQ ID NO: 3478 - RNA, 17 nt, Human
uucagcaguguuucucc

SEQ ID NO: 3479 - RNA, 22 nt, Human
uucagcauagcagcuucaggac

SEQ ID NO: 3480 - RNA, 22 nt, Human
uucagcauugguaugaaaaccc

SEQ ID NO: 3481 - RNA, 22 nt, Human
uucagcgauauuauucaugagc

SEQ ID NO: 3482 - RNA, 22 nt, Human
uucagcuaaaaaugcccacuug

SEQ ID NO: 3483 - RNA, 22 nt, Human
uucagcuaaaggaaacucagau

SEQ ID NO: 3484 - RNA, 22 nt, Human
uucagcuacccuuggcuuaaua

SEQ ID NO: 3485 - RNA, 22 nt, Human
uucagcuagcaucucacuuggu

SEQ ID NO: 3486 - RNA, 22 nt, Human
uucagcuucauuugucuuuaug

SEQ ID NO: 3487 - RNA, 22 nt, Human
uucaggaaauuggaguccuucu

SEQ ID NO: 3488 - RNA, 22 nt, Human
uucaggaauauaggcauugaca

SEQ ID NO: 3489 - RNA, 22 nt, Human
uucaggacuaggggcuucaagg

SEQ ID NO: 3490 - RNA, 15 nt, Human
uucaggauaugacuc

SEQ ID NO: 3491 - RNA, 22 nt, Human
uucaggaugcucagaguagucu

SEQ ID NO: 3492 - RNA, 22 nt, Human
uucaggauggcggauguugggg

SEQ ID NO: 3493 - RNA, 22 nt, Human
uucaggcaucccuacaguuagg

SEQ ID NO: 3494 - RNA, 22 nt, Human
uucaggcuauagaccaauuugg

SEQ ID NO: 3495 - RNA, 22 nt, Human
uucagggacuuugauguaucag

SEQ ID NO: 3496 - RNA, 23 nt, Human
uucagggccucagaggugaagcu

SEQ ID NO: 3497 - RNA, 22 nt, Human
uucagggcugacaagccuauug

SEQ ID NO: 3498 - RNA, 22 nt, Human
uucaguagggcccucacacagu

SEQ ID NO: 3499 - RNA, 22 nt, Human
uucaguauacauuaucuaauug

SEQ ID NO: 3500 - RNA, 22 nt, Human
uucaguaugcugaaugauuuuu

SEQ ID NO: 3501 - RNA, 22 nt, Human
uucaguauguguaaacuacuuu

SEQ ID NO: 3502 - RNA, 22 nt, Human
uucaguauuucaugacuuucuu

SEQ ID NO: 3503 - RNA, 22 nt, Human
uucaguauuugaaaccauaggc

SEQ ID NO: 3504 - RNA, 22 nt, Human
uucagugagugaaugaaugaau

SEQ ID NO: 3505 - RNA, 22 nt, Human
uucagugcagucggaacuacug

SEQ ID NO: 3506 - RNA, 22 nt, Human
uucaguguauauuuuuugagua

SEQ ID NO: 3507 - RNA, 22 nt, Human
uucagugugaagcuucugaaag

SEQ ID NO: 3508 - RNA, 19 nt, Human
uucagugugcuggcuccug

SEQ ID NO: 3509 - RNA, 22 nt, Human
uucagugugucaguuucagcag

SEQ ID NO: 3510 - RNA, 22 nt, Human
uucaguguucuuuucuguuagc

SEQ ID NO: 3511 - RNA, 22 nt, Human
uucaguuccuuaucauaggguu

SEQ ID NO: 3512 - RNA, 22 nt, Human
uucaguuuccacuuacauuuaa

SEQ ID NO: 3513 - RNA, 22 nt, Human
uucaguuucccuaaagccaauu

SEQ ID NO: 3514 - RNA, 22 nt, Human
uucaguuucuaaagauguuccu

SEQ ID NO: 3515 - RNA, 22 nt, Human
uucaguuugaauucuguagaac

SEQ ID NO: 3516 - RNA, 22 nt, Human
uucauaaacaacugaugguaau

SEQ ID NO: 3517 - RNA, 22 nt, Human
uucauacaguggcugcacucca

SEQ ID NO: 3518 - RNA, 22 nt, Human
uucauagaaagugcuuagauug

SEQ ID NO: 3519 - RNA, 22 nt, Human
uucauagagcagcucacugaau

SEQ ID NO: 3520 - RNA, 22 nt, Human
uguguauagaaaguaggaaagg

SEQ ID NO: 3521 - RNA, 22 nt, Human
uuagcauucucugugugcauaa

SEQ ID NO: 3522 - RNA, 22 nt, Human
uuagcauuguacauuugugcuu

SEQ ID NO: 3523 - RNA, 22 nt, Human
uuagcuaaacuguaacuagaau

SEQ ID NO: 3524 - RNA, 22 nt, Human
uuagcugaguggugcuggcuca

SEQ ID NO: 3525 - RNA, 22 nt, Human
uuagcuguggaagcuucagcca

SEQ ID NO: 3526 - RNA, 22 nt, Human
uuagcuuaauuaaauaaucagu

SEQ ID NO: 3527 - RNA, 22 nt, Human
uuagcuuuucacuugcauuauc

SEQ ID NO: 3528 - RNA, 22 nt, Human
uuaggaaaaucaugagagauga

SEQ ID NO: 3529 - RNA, 22 nt, Human
uuaggaaacaucauuuuugcug

SEQ ID NO: 3530 - RNA, 22 nt, Human
uuaggaaagucucuuggcuggg

SEQ ID NO: 3531 - RNA, 22 nt, Human
uuaggaagaugcuuuuucuggg

SEQ ID NO: 3532 - RNA, 22 nt, Human
uuaggaaggcacugggugccaa

SEQ ID NO: 3533 - RNA, 22 nt, Human
uuaggaaguuauaguggaaaug

SEQ ID NO: 3534 - RNA, 22 nt, Human
uuaggaaguuucagaaaaugca

SEQ ID NO: 3535 - RNA, 18 nt, Human
uuaggaaguuucuccguc

SEQ ID NO: 3536 - RNA, 22 nt, Human
uuaggaauuuauuccauuguug

SEQ ID NO: 3537 - RNA, 22 nt, Human
uuaggagaugguccucuaggga

SEQ ID NO: 3538 - RNA, 22 nt, Human
uuagggaaauauuuauauacuu

SEQ ID NO: 3539 - RNA, 22 nt, Human
uuagggcaaaguuucaacaguu

SEQ ID NO: 3540 - RNA, 22 nt, Human
uuagguauucauuuacauguuc

SEQ ID NO: 3541 - RNA, 22 nt, Human
uuaguaauguguuaauaugaau

SEQ ID NO: 3542 - RNA, 22 nt, Human
uuaguacagaaucaaaagcaau

SEQ ID NO: 3543 - RNA, 22 nt, Human
uuaguagagagucauguuuuua

SEQ ID NO: 3544 - RNA, 18 nt, Human
uuaguauaacugccugug

SEQ ID NO: 3545 - RNA, 22 nt, Human
uuagucaauagugaauauagag

SEQ ID NO: 3546 - RNA, 22 nt, Human
uuagucccauuauaugacuucu

SEQ ID NO: 3547 - RNA, 22 nt, Human
uuagugaucaaaaucaaaauug

SEQ ID NO: 3548 - RNA, 22 nt, Human
uuagugaugacuagacuuuugu

SEQ ID NO: 3549 - RNA, 22 nt, Human
uuagugcaaaccucagagacac

SEQ ID NO: 3550 - RNA, 22 nt, Human
uuagugcuaaauacucccacag

SEQ ID NO: 3551 - RNA, 22 nt, Human
uuagugcucauccagauggggg

SEQ ID NO: 3552 - RNA, 22 nt, Human
uuagugcuucuguccaaauaua

SEQ ID NO: 3553 - RNA, 22 nt, Human
uuagugucuuucaaaagguuua

SEQ ID NO: 3554 - RNA, 22 nt, Human
uuagugugcauggaucugugga

SEQ ID NO: 3555 - RNA, 22 nt, Human
uuaguuacuuauaggugauaga

SEQ ID NO: 3556 - RNA, 22 nt, Human
uuaguuagucccugguaccuuu

SEQ ID NO: 3557 - RNA, 22 nt, Human
uuaguuaguggggcugucaguc

SEQ ID NO: 3558 - RNA, 21 nt, Human
uuaguucuaccacuugcauuc

SEQ ID NO: 3559 - RNA, 22 nt, Human
uuaguugacccccaguccuggc

SEQ ID NO: 3560 - RNA, 20 nt, Human
uuaguugaguagcuccugaa

SEQ ID NO: 3561 - RNA, 22 nt, Human
uuaguugauguucuggagguag

SEQ ID NO: 3562 - RNA, 22 nt, Human
uuaguuguaaaauggaauuugu

SEQ ID NO: 3563 - RNA, 22 nt, Human
uuaguuuauaauucauuucugu

SEQ ID NO: 3564 - RNA, 22 nt, Human
uuaguuuccaccacacauguuc

SEQ ID NO: 3565 - RNA, 22 nt, Human
uuauaaagauuguuauguaucu

SEQ ID NO: 3566 - RNA, 22 nt, Human
uuauaaagguuugugcauauuu

SEQ ID NO: 3567 - RNA, 22 nt, Human
uuauaagacuguagugaguauu

SEQ ID NO: 3568 - RNA, 22 nt, Human
uuauaagaguauauaguguacu

SEQ ID NO: 3569 - RNA, 22 nt, Human
uuauacagggaguuucccugca

SEQ ID NO: 3570 - RNA, 21 nt, Human
uuauacauauguucucugccu

SEQ ID NO: 3571 - RNA, 22 nt, Human
uuauacauguuuauaagguuga

SEQ ID NO: 3572 - RNA, 22 nt, Human
uuauacccuccauaccuggccu

SEQ ID NO: 3573 - RNA, 22 nt, Human
uuauacgcucaauccuaucauc

SEQ ID NO: 3574 - RNA, 22 nt, Human
uuauagaacagccuccucuaga

SEQ ID NO: 3575 - RNA, 22 nt, Human
uuauagaaggagcauucacuua

SEQ ID NO: 3576 - RNA, 22 nt, Human
uuauaggaaaaguucuagaaaa

SEQ ID NO: 3577 - RNA, 22 nt, Human
uuauaggaaauaguucaugcga

SEQ ID NO: 3578 - RNA, 22 nt, Human
uuauagugcauaauuaacaugg

SEQ ID NO: 3579 - RNA, 22 nt, Human
uuauaucagaaggugagauuga

SEQ ID NO: 3580 - RNA, 20 nt, Human
uuauaucauaaugugccaau

SEQ ID NO: 3581 - RNA, 22 nt, Human
uuauaugaacuggacuuuagga

SEQ ID NO: 3582 - RNA, 22 nt, Human
uuauaugauugaagugcauaag

SEQ ID NO: 3583 - RNA, 22 nt, Human
uuauauuguguaauaagugaag

SEQ ID NO: 3584 - RNA, 22 nt, Human
uuauauuucugguagccuucag

SEQ ID NO: 3585 - RNA, 22 nt, Human
uuaucacuuaugagcuuuuugc

SEQ ID NO: 3586 - RNA, 22 nt, Human
uuauccaagcagaagcugcaca

SEQ ID NO: 3587 - RNA, 22 nt, Human
uuaucguaucucuuggucuuca

SEQ ID NO: 3588 - RNA, 22 nt, Human
uuaucugguauaguggggaaga

SEQ ID NO: 3589 - RNA, 22 nt, Human
uuaucugucaucaggcagacag

SEQ ID NO: 3590 - RNA, 22 nt, Human
uuaucuguuuaacaaaguaucu

SEQ ID NO: 3591 - RNA, 22 nt, Human
uuaucuuagaggugauuguauu

SEQ ID NO: 3592 - RNA, 22 nt, Human
uuaucuuggguaacuuugugca

SEQ ID NO: 3593 - RNA, 22 nt, Human
uuaugaacaauuucuaggaaug

SEQ ID NO: 3594 - RNA, 19 nt, Human
uuaugaauagcuucaucca

SEQ ID NO: 3595 - RNA, 22 nt, Human
uuaugcagauggcaugaggagg

SEQ ID NO: 3596 - RNA, 22 nt, Human
uuaugcagucgacaucugauca

SEQ ID NO: 3597 - RNA, 22 nt, Human
uuaugcaugagauaaaaauugg

SEQ ID NO: 3598 - RNA, 22 nt, Human
uuaugccuccgaaaccuggagu

SEQ ID NO: 3599 - RNA, 22 nt, Human
uuaugcuaaaugaaucaaguca

SEQ ID NO: 3600 - RNA, 22 nt, Human
uuaugcuaagugcaacaagcca

SEQ ID NO: 3601 - RNA, 22 nt, Human
uuaugcuaguauaguccuuaga

SEQ ID NO: 3602 - RNA, 22 nt, Human
uuaugcuaguugaaauaacaca

SEQ ID NO: 3603 - RNA, 22 nt, Human
uuaugcuucccugaggaucuua

SEQ ID NO: 3604 - RNA, 18 nt, Human
uugaggaguucacugucu

SEQ ID NO: 3605 - RNA, 22 nt, Human
uugaggaguugugacagauacu

SEQ ID NO: 3606 - RNA, 22 nt, Human
uugaggauucaugucagaauuc

SEQ ID NO: 3607 - RNA, 22 nt, Human
uugaggcaaaaucaacgggaag

SEQ ID NO: 3608 - RNA, 22 nt, Human
uugaggcacacacagguugcau

SEQ ID NO: 3609 - RNA, 22 nt, Human
uugaggcagguccggguccuuc

SEQ ID NO: 3610 - RNA, 22 nt, Human
uugaggccccauggaugagaac

SEQ ID NO: 3611 - RNA, 22 nt, Human
uugaggcccggcaggccgagcg

SEQ ID NO: 3612 - RNA, 22 nt, Human
uugagggagaaagccgaggugu

SEQ ID NO: 3613 - RNA, 22 nt, Human
uugagggagcacagauucuuau

SEQ ID NO: 3614 - RNA, 22 nt, Human
uugagggagccugggagccaug

SEQ ID NO: 3615 - RNA, 22 nt, Human
uugagggauugcaccagaagag

SEQ ID NO: 3616 - RNA, 22 nt, Human
uugagguaguucuauugugagu

SEQ ID NO: 3617 - RNA, 22 nt, Human
uugaggucaaagaagugagugg

SEQ ID NO: 3618 - RNA, 22 nt, Human
uugaggucaaguaaccacugga

SEQ ID NO: 3619 - RNA, 22 nt, Human
uugaggucaauucuguuuccug

SEQ ID NO: 3620 - RNA, 22 nt, Human
uugaggucugagacugugcagg

SEQ ID NO: 3621 - RNA, 22 nt, Human
uugaggucuguguaggcagcaa

SEQ ID NO: 3622 - RNA, 22 nt, Human
uugaggucuucaggaucaggcu

SEQ ID NO: 3623 - RNA, 22 nt, Human
uugaggucuucauucuugggca

SEQ ID NO: 3624 - RNA, 22 nt, Human
uugaggucuuugagcaaacgca

SEQ ID NO: 3625 - RNA, 22 nt, Human
uugagucuccucagcagggcua

SEQ ID NO: 3626 - RNA, 22 nt, Human
uugagucugcaauacauaacac

SEQ ID NO: 3627 - RNA, 17 nt, Human
uugagucuggggucuac

SEQ ID NO: 3628 - RNA, 22 nt, Human
uugaguguaaggaauguggggc

SEQ ID NO: 3629 - RNA, 22 nt, Human
uugauacagcagccugugaucc

SEQ ID NO: 3630 - RNA, 22 nt, Human
uuauguucccuuaagagaacag

SEQ ID NO: 3631 - RNA, 22 nt, Human
uuauuaaaaugcggauuuggcu

SEQ ID NO: 3632 - RNA, 22 nt, Human
uuauuaagugccuacaauaaag

SEQ ID NO: 3633 - RNA, 22 nt, Human
uuauuaauaaaguggcauagcc

SEQ ID NO: 3634 - RNA, 22 nt, Human
uuauuacagucccagggaguag

SEQ ID NO: 3635 - RNA, 22 nt, Human
uuauuacuguauuaauccagag

SEQ ID NO: 3636 - RNA, 22 nt, Human
uuauuagagauauuugguuagg

SEQ ID NO: 3637 - RNA, 22 nt, Human
uuauuagagugcuuugagaaag

SEQ ID NO: 3638 - RNA, 22 nt, Human
uuauuaggaaaaggucagaugu

SEQ ID NO: 3639 - RNA, 22 nt, Human
uuauuagggugguuuauguucu

SEQ ID NO: 3640 - RNA, 22 nt, Human
uuauuauugugaccugagaaug

SEQ ID NO: 3641 - RNA, 22 nt, Human
uuauucagauuggcuacaggau

SEQ ID NO: 3642 - RNA, 22 nt, Human
uuauucauuaacagggaccaaa

SEQ ID NO: 3643 - RNA, 22 nt, Human
uuauuccaauuucuccuacaaa

SEQ ID NO: 3644 - RNA, 22 nt, Human
uuauuccaccuccauuuuccua

SEQ ID NO: 3645 - RNA, 22 nt, Human
uuauuccaguaaucucuguaau

SEQ ID NO: 3646 - RNA, 22 nt, Human
uuauuccauuauuucacuuagg

SEQ ID NO: 3647 - RNA, 22 nt, Human
uuauuccauucaguucaacaag

SEQ ID NO: 3648 - RNA, 22 nt, Human
uuauucugagaguugaaguaau

SEQ ID NO: 3649 - RNA, 22 nt, Human
uuauucugcacuuuuaaaauau

SEQ ID NO: 3650 - RNA, 22 nt, Human
uuauucuggaggaagcaaaugg

SEQ ID NO: 3651 - RNA, 17 nt, Human
uuauucuggcauaugug

SEQ ID NO: 3652 - RNA, 22 nt, Human
uuauucuguauuucagguaugu

SEQ ID NO: 3653 - RNA, 19 nt, Human
uuauucugucagagcacac

SEQ ID NO: 3654 - RNA, 22 nt, Human
uuauucugucuuuggucucaau

SEQ ID NO: 3655 - RNA, 22 nt, Human
uuauucuguugcuuuuacagua

SEQ ID NO: 3656 - RNA, 22 nt, Human
uuauucuguuugccgaccagua

SEQ ID NO: 3657 - RNA, 22 nt, Human
uuauucuuggaucugagucucu

SEQ ID NO: 3658 - RNA, 22 nt, Human
uuauugaaauggaagcuauaac

SEQ ID NO: 3659 - RNA, 22 nt, Human
uuauugaagcaagcuuuucuga

SEQ ID NO: 3660 - RNA, 22 nt, Human
uuauugagaccguaagucaggu

SEQ ID NO: 3661 - RNA, 22 nt, Human
uuauugagcacauaguaugugg

SEQ ID NO: 3662 - RNA, 22 nt, Human
uuauugagcaccuacuaugugu

SEQ ID NO: 3663 - RNA, 23 nt, Human
uuauugaggguguagauuggugu

SEQ ID NO: 3664 - RNA, 22 nt, Human
uuauugcaaccuuuucuggugu

SEQ ID NO: 3665 - RNA, 22 nt, Human
uuauugcaacuuuagggauaga

SEQ ID NO: 3666 - RNA, 22 nt, Human
uuauugcacuauugauuuucua

SEQ ID NO: 3667 - RNA, 22 nt, Human
uuauugcagauggugugagaga

SEQ ID NO: 3668 - RNA, 23 nt, Human
uuauugcauccaaaugcauuccu

SEQ ID NO: 3669 - RNA, 22 nt, Human
uuauugcugauaguguuuauaa

SEQ ID NO: 3670 - RNA, 22 nt, Human
uuauugcuggcaccuucaauuc

SEQ ID NO: 3671 - RNA, 23 nt, Human
uuauugcuuucccugccuuccug

SEQ ID NO: 3672 - RNA, 22 nt, Human
uuauuguagcacuuuggcagug

SEQ ID NO: 3673 - RNA, 22 nt, Human
uuauuguaggccuauuguagaa

SEQ ID NO: 3674 - RNA, 22 nt, Human
uuauugugaggaauaagugaga

SEQ ID NO: 3675 - RNA, 22 nt, Human
uuauuguuaggcuuuuggaauu

SEQ ID NO: 3676 - RNA, 22 nt, Human
uuauuuaauuuucucacucaga

SEQ ID NO: 3677 - RNA, 22 nt, Human
uuauuuacuggauggccuuggg

SEQ ID NO: 3678 - RNA, 22 nt, Human
uuauuuaggaggaaacugaggu

SEQ ID NO: 3679 - RNA, 22 nt, Human
uuauuuagucuagaugaauuuu

SEQ ID NO: 3680 - RNA, 22 nt, Human
uuauuuauggcccucaccugau

SEQ ID NO: 3681 - RNA, 22 nt, Human
uuauuuauucauucugucuguc

SEQ ID NO: 3682 - RNA, 22 nt, Human
uuauuuccaaacuggauauacc

SEQ ID NO: 3683 - RNA, 22 nt, Human
uuauuuccacaaugugguaggg

SEQ ID NO: 3684 - RNA, 22 nt, Human
uuauuuccaguccagaaauuua

SEQ ID NO: 3685 - RNA, 22 nt, Human
uuauuuccuaaaucucuuuguu

SEQ ID NO: 3686 - RNA, 22 nt, Human
uuauuugaaugauggcacaauu

SEQ ID NO: 3687 - RNA, 20 nt, Human
uuauuugcucuuuaucugca

SEQ ID NO: 3688 - RNA, 22 nt, Human
uuauuugcugauuucaguuuca

SEQ ID NO: 3689 - RNA, 22 nt, Human
uuauuuggaaauauggcuucug

SEQ ID NO: 3690 - RNA, 22 nt, Human
uuauuuggguuugaguguggca

SEQ ID NO: 3691 - RNA, 22 nt, Human
uuauuugguugcugacuuggaa

SEQ ID NO: 3692 - RNA, 22 nt, Human
uuauuugugaaucauuuaucua

SEQ ID NO: 3693 - RNA, 18 nt, Human
uuauuuguuacagcacau

SEQ ID NO: 3694 - RNA, 20 nt, Human
uuauuuguuuacuuuggucc

SEQ ID NO: 3695 - RNA, 22 nt, Human
uuauuuguuuucugagaaguau

SEQ ID NO: 3696 - RNA, 22 nt, Human
uuauuuugguaaauguuugccu

SEQ ID NO: 3697 - RNA, 23 nt, Human
uuauuuugucagaagggacuuuu

SEQ ID NO: 3698 - RNA, 22 nt, Human
uuauuuuuaaaaguucacacag

SEQ ID NO: 3699 - RNA, 22 nt, Human
uucaaaacaaucuguuugcauu

SEQ ID NO: 3700 - RNA, 22 nt, Human
uucaaaacagcuagauauugga

SEQ ID NO: 3701 - RNA, 22 nt, Human
uucaaaaguaaucaguauuaga

SEQ ID NO: 3702 - RNA, 22 nt, Human
uucaaacacuggcuuagccaau

SEQ ID NO: 3703 - RNA, 22 nt, Human
uucaaacacuguuggcacuggg

SEQ ID NO: 3704 - RNA, 22 nt, Human
uucaaacaggggucagggagau

SEQ ID NO: 3705 - RNA, 22 nt, Human
uucaaaccuucacuugcagagu

SEQ ID NO: 3706 - RNA, 22 nt, Human
uucaaagaauuuugagaccuga

SEQ ID NO: 3707 - RNA, 22 nt, Human
uucaaagaccuuacuuggcaaa

SEQ ID NO: 3708 - RNA, 21 nt, Human
uucaaagacuugaugcugacc

SEQ ID NO: 3709 - RNA, 22 nt, Human
uucaaagagaaauuguauuuuc

SEQ ID NO: 3710 - RNA, 22 nt, Human
uucaaagaguugggugucuggg

SEQ ID NO: 3711 - RNA, 22 nt, Human
uucaaagcaauagaaagaguga

SEQ ID NO: 3712 - RNA, 22 nt, Human
uucaaaguaccguacuuaaugg

SEQ ID NO: 3713 - RNA, 22 nt, Human
uucaaagugcuguucaaaguag

SEQ ID NO: 3714 - RNA, 20 nt, Human
uucaaaguguaugauaugca

SEQ ID NO: 3715 - RNA, 22 nt, Human
uucaaaguugcaugacagcuua

SEQ ID NO: 3716 - RNA, 22 nt, Human
uucaaaucacuuuggagcuuaa

SEQ ID NO: 3717 - RNA, 22 nt, Human
uucaaaucucuccuaauccacu

SEQ ID NO: 3718 - RNA, 22 nt, Human
uucaacaaacuguucacgaaug

SEQ ID NO: 3719 - RNA, 22 nt, Human
uugcauguacguacagagagag

SEQ ID NO: 3720 - RNA, 22 nt, Human
uugcauguaugugaucuguuca

SEQ ID NO: 3721 - RNA, 22 nt, Human
uugcauguccaggguauugugg

SEQ ID NO: 3722 - RNA, 22 nt, Human
uugcauguccuacaucuguguc

SEQ ID NO: 3723 - RNA, 22 nt, Human
uugcaugugacucuauuuaugc

SEQ ID NO: 3724 - RNA, 22 nt, Human
uugcauguguauaaaaguugga

SEQ ID NO: 3725 - RNA, 22 nt, Human
uugcauuagugucauaaggugg

SEQ ID NO: 3726 - RNA, 22 nt, Human
uugcauuccaugguuuuccuuc

SEQ ID NO: 3727 - RNA, 22 nt, Human
uugcauucccagccaaguuagu

SEQ ID NO: 3728 - RNA, 21 nt, Human
uugcauuccuguuaguauaag

SEQ ID NO: 3729 - RNA, 22 nt, Human
uugcauucuguuaaaauguauu

SEQ ID NO: 3730 - RNA, 22 nt, Human
uugcauugaaugcacauuuuua

SEQ ID NO: 3731 - RNA, 20 nt, Human
uugcauuggaugugcaggug

SEQ ID NO: 3732 - RNA, 22 nt, Human
uugcauugugauuacagaggug

SEQ ID NO: 3733 - RNA, 22 nt, Human
uugcauuuauagacugccauuu

SEQ ID NO: 3734 - RNA, 22 nt, Human
uugcauuucccauugaguaaug

SEQ ID NO: 3735 - RNA, 22 nt, Human
uugcauuugcucauuugauaug

SEQ ID NO: 3736 - RNA, 22 nt, Human
uugcauuuguuugaguagaaug

SEQ ID NO: 3737 - RNA, 22 nt, Human
uugcauuuuuacaaguagccag

SEQ ID NO: 3738 - RNA, 22 nt, Human
uugcauuuuugagcacgaaguu

SEQ ID NO: 3739 - RNA, 22 nt, Human
uucuguuagcauucugaucucc

SEQ ID NO: 3740 - RNA, 22 nt, Human
uucuguuuauaauuugcaguug

SEQ ID NO: 3741 - RNA, 22 nt, Human
uucuguuugugaacuggcugag

SEQ ID NO: 3742 - RNA, 22 nt, Human
uucuguuuuagaaauaaguagu

SEQ ID NO: 3743 - RNA, 22 nt, Human
uucuuaagcaccuaaaaagugg

SEQ ID NO: 3744 - RNA, 22 nt, Human
uucuuaagcaguuuggcauguu

SEQ ID NO: 3745 - RNA, 22 nt, Human
uucuuaaguaugaucuuaacgg

SEQ ID NO: 3746 - RNA, 22 nt, Human
uucuuaauggcaaaggauuuua

SEQ ID NO: 3747 - RNA, 19 nt, Human
uucuuacaacacccuggga

SEQ ID NO: 3748 - RNA, 22 nt, Human
uucuuacuaguauguuucagca

SEQ ID NO: 3749 - RNA, 22 nt, Human
uucuuagagaugguuaaaaaua

SEQ ID NO: 3750 - RNA, 22 nt, Human
uucuuaggacuaguauagcaug

SEQ ID NO: 3751 - RNA, 22 nt, Human
uucuuauauugggucauggaua

SEQ ID NO: 3752 - RNA, 22 nt, Human
uucuuauguucacauaauucca

SEQ ID NO: 3753 - RNA, 23 nt, Human
uucuuauuuacuuuggaaucucc

SEQ ID NO: 3754 - RNA, 22 nt, Human
uucuucaaaguccuuauuccuu

SEQ ID NO: 3755 - RNA, 22 nt, Human
uucuucaaccaucuacauaaac

SEQ ID NO: 3756 - RNA, 22 nt, Human
uucuucaaggguaaaggcaacg

SEQ ID NO: 3757 - RNA, 22 nt, Human
uucuucaauaaauucccauaag

SEQ ID NO: 3758 - RNA, 22 nt, Human
uuucauauuguccagucagcgc

SEQ ID NO: 3759 - RNA, 22 nt, Human
uuucaucaucaaaauagugagg

SEQ ID NO: 3760 - RNA, 22 nt, Human
uuucaucuaacacuacauaggg

SEQ ID NO: 3761 - RNA, 17 nt, Human
uuucaucugggaccacc

SEQ ID NO: 3762 - RNA, 22 nt, Human
uuucaucuucccagagaccuug

SEQ ID NO: 3763 - RNA, 22 nt, Human
uuucaucuuccuuggcauaggu

SEQ ID NO: 3764 - RNA, 22 nt, Human
uuucaugaggcugcauaaggag

SEQ ID NO: 3765 - RNA, 22 nt, Human
uuucauggcuaggacuagagug

SEQ ID NO: 3766 - RNA, 22 nt, Human
uuucauguacugucgaaguuga

SEQ ID NO: 3767 - RNA, 22 nt, Human
uuucaugucauuccauuucaga

SEQ ID NO: 3768 - RNA, 22 nt, Human
uuucauuaguaugacagcacgc

SEQ ID NO: 3769 - RNA, 18 nt, Human
uuucauuauaaagcaggc

SEQ ID NO: 3770 - RNA, 22 nt, Human
uuucauuauacagcuucauaaa

SEQ ID NO: 3771 - RNA, 22 nt, Human
uuucauuauguuccuggaagag

SEQ ID NO: 3772 - RNA, 22 nt, Human
uuucauucauguguuaaaggug

SEQ ID NO: 3773 - RNA, 21 nt, Human
uuucauugaaugagauaaggu

SEQ ID NO: 3774 - RNA, 22 nt, Human
uuucauugagaauauaagauuu

SEQ ID NO: 3775 - RNA, 18 nt, Human
uuucauugagugugauau

SEQ ID NO: 3776 - RNA, 22 nt, Human
uuucauugcagagucugugugc

SEQ ID NO: 3777 - RNA, 22 nt, Human
uuucauugucaauaaacuguau

SEQ ID NO: 3778 - RNA, 22 nt, Human
uuucauugucagagcuuugaau

SEQ ID NO: 3779 - RNA, 22 nt, Human
uuucauuucauagaauuguguu

SEQ ID NO: 3780 - RNA, 22 nt, Human
uuucauuuugguuaugccauaa

SEQ ID NO: 3781 - RNA, 22 nt, Human
uuuccaaaggaggaaccaguuu

SEQ ID NO: 3782 - RNA, 22 nt, Human
uuuccaaauaaggucacauucu

SEQ ID NO: 3783 - RNA, 22 nt, Human
uuuccaacuguaccccaguguu

SEQ ID NO: 3784 - RNA, 22 nt, Human
uuuccaagacuccaguucuccc

SEQ ID NO: 3785 - RNA, 22 nt, Human
uuuccaaguacugagcugucaa

SEQ ID NO: 3786 - RNA, 22 nt, Human
uuuccaaguuguuaccuucuac

SEQ ID NO: 3787 - RNA, 22 nt, Human
uuuccaauguagaugucucugg

SEQ ID NO: 3788 - RNA, 22 nt, Human
uuuccacacaggcucuacuacu

SEQ ID NO: 3789 - RNA, 22 nt, Human
uuuccacacucacugcacucau

SEQ ID NO: 3790 - RNA, 22 nt, Human
uuuccagaugcuagguugaaag

SEQ ID NO: 3791 - RNA, 22 nt, Human
uuuccagggaggaauguggggu

SEQ ID NO: 3792 - RNA, 22 nt, Human
uuuccagguaucaagcuucagg

SEQ ID NO: 3793 - RNA, 22 nt, Human
uuuccagugaaauuuugaaugu

SEQ ID NO: 3794 - RNA, 22 nt, Human
uuuccaugaucguuauagaacu

SEQ ID NO: 3795 - RNA, 22 nt, Human
uuuccauguuaucuugcagacu

SEQ ID NO: 3796 - RNA, 22 nt, Human
uuucccaacagucucucucaaa

SEQ ID NO: 3797 - RNA, 22 nt, Human
uuucccaagaaaaauaauugga

SEQ ID NO: 3798 - RNA, 22 nt, Human
uuucccaagugaagugaagcca

SEQ ID NO: 3799 - RNA, 22 nt, Human
uuucccaggcuggaaugcagug

SEQ ID NO: 3800 - RNA, 22 nt, Human
uuucccaguuagugaagacaug

SEQ ID NO: 3801 - RNA, 22 nt, Human
uuucccaguucccugcucuaua

SEQ ID NO: 3802 - RNA, 22 nt, Human
uuucccuugaauaaagauaucu

SEQ ID NO: 3803 - RNA, 22 nt, Human
uuuccuaagauagauacuucag

SEQ ID NO: 3804 - RNA, 22 nt, Human
uuuccuaaucccaaugacauuu

SEQ ID NO: 3805 - RNA, 22 nt, Human
uuuccuacccuuccaggcagag

SEQ ID NO: 3806 - RNA, 22 nt, Human
uuuccucuaaacgcauuugcuu

SEQ ID NO: 3807 - RNA, 22 nt, Human
uuuccucuccaccaggaggucu

SEQ ID NO: 3808 - RNA, 22 nt, Human
uuuccucugaugcugacuugga

SEQ ID NO: 3809 - RNA, 22 nt, Human
uuuccucugggcccugccaccc

SEQ ID NO: 3810 - RNA, 22 nt, Human
uuuccucuucgauuaaguuugg

SEQ ID NO: 3811 - RNA, 22 nt, Human
uuuccucuucuucccaugucau

SEQ ID NO: 3812 - RNA, 22 nt, Human
uuuccucuuugugacacagcug

SEQ ID NO: 3813 - RNA, 22 nt, Human
uuuccugagccagaguuucauu

SEQ ID NO: 3814 - RNA, 21 nt, Human
uuuccugcccuuugucaucac

SEQ ID NO: 3815 - RNA, 22 nt, Human
uuuccugccuggaccucugcuu

SEQ ID NO: 3816 - RNA, 22 nt, Human
uuuccuggaccaacugagauug

SEQ ID NO: 3817 - RNA, 22 nt, Human
uuuccuggaggguccccagcag

SEQ ID NO: 3818 - RNA, 22 nt, Human
uuuccuggcucuguggccuugu

SEQ ID NO: 3819 - RNA, 22 nt, Human
uuuccuuccagguuccuaaggc

SEQ ID NO: 3820 - RNA, 22 nt, Human
uuuccuuccuaaggugaagcaa

SEQ ID NO: 3821 - RNA, 18 nt, Human
uuuccuuguaugaacaua

SEQ ID NO: 3822 - RNA, 22 nt, Human
uuuccuuguucauuugcccuau

SEQ ID NO: 3823 - RNA, 22 nt, Human
uuuccuuuaugacaucaccacu

SEQ ID NO: 3824 - RNA, 20 nt, Human
uuuccuuucauuuuaguacc

SEQ ID NO: 3825 - RNA, 22 nt, Human
uuuccuuucuagaagccuaaau

SEQ ID NO: 3826 - RNA, 22 nt, Human
uuuccuuugaggguccuacacu

SEQ ID NO: 3827 - RNA, 22 nt, Human
uuucuaaacaaagggaguuugg

SEQ ID NO: 3828 - RNA, 22 nt, Human
uuucuaagaaaguaaugguuau

SEQ ID NO: 3829 - RNA, 22 nt, Human
uuucuaagacauuugucaucuu

SEQ ID NO: 3830 - RNA, 22 nt, Human
uuucuaagcuuaguaugaggca

SEQ ID NO: 3831 - RNA, 22 nt, Human
uuucuaaggaaaguaccuggga

SEQ ID NO: 3832 - RNA, 22 nt, Human
uuucuaaggcuaggucuuaagg

SEQ ID NO: 3833 - RNA, 22 nt, Human
uuucuaaggugauccuuucuua

SEQ ID NO: 3834 - RNA, 22 nt, Human
uuucuaaguaaacacagcauac

SEQ ID NO: 3835 - RNA, 22 nt, Human
uuucuaaguaucuugcaguuuu

SEQ ID NO: 3836 - RNA, 22 nt, Human
uuucuaagucugagggaguaua

SEQ ID NO: 3837 - RNA, 22 nt, Human
uuucuaagugaacauucaaguu

SEQ ID NO: 3838 - RNA, 22 nt, Human
uuucuaaguguauugagcuugg

SEQ ID NO: 3839 - RNA, 22 nt, Human
uuucuaaucuuuaguuacaaaa

SEQ ID NO: 3840 - RNA, 22 nt, Human
uuucuacaauuuuuggcaugag

SEQ ID NO: 3841 - RNA, 22 nt, Human
uuucuacagcuggugcaacuuu

SEQ ID NO: 3842 - RNA, 22 nt, Human
uuucuacauuuguaaccagauu

SEQ ID NO: 3843 - RNA, 22 nt, Human
uuucuagaaauagagauagagu

SEQ ID NO: 3844 - RNA, 22 nt, Human
uuucuagcuguaggaagcugag

SEQ ID NO: 3845 - RNA, 22 nt, Human
uuucuaggucuuccauacugcc

SEQ ID NO: 3846 - RNA, 22 nt, Human
uuucuagguguucacagagcau

SEQ ID NO: 3847 - RNA, 22 nt, Human
uuucuaguaaaagcuaauuacc

SEQ ID NO: 3848 - RNA, 22 nt, Human
uugaagcaugguacuuguucaa

SEQ ID NO: 3849 - RNA, 22 nt, Human
uugaagguuuaacugagaggca

SEQ ID NO: 3850 - RNA, 18 nt, Human
uugaaguuauuuacauuc

SEQ ID NO: 3851 - RNA, 22 nt, Human
uugaaguuuaaugguagauucc

SEQ ID NO: 3852 - RNA, 22 nt, Human
uugaauaguguuuucaguauac

SEQ ID NO: 3853 - RNA, 19 nt, Human
uugaauaugcaaacugaag

SEQ ID NO: 3854 - RNA, 22 nt, Human
uugaaucucucugagauucagu

SEQ ID NO: 3855 - RNA, 22 nt, Human
uugaaugaaauugcuguguuau

SEQ ID NO: 3856 - RNA, 22 nt, Human
uugaaugaauaaaagaguaagg

SEQ ID NO: 3857 - RNA, 22 nt, Human
uugaaugaauuugagcagagau

SEQ ID NO: 3858 - RNA, 22 nt, Human
uugaaugaccaugaugcaaggg

SEQ ID NO: 3859 - RNA, 22 nt, Human
uugaaugaguguuuuacucaug

SEQ ID NO: 3860 - RNA, 22 nt, Human
uugaaugcaugguucacucugu

SEQ ID NO: 3861 - RNA, 22 nt, Human
uugaauucauuucucauugagu

SEQ ID NO: 3862 - RNA, 19 nt, Human
uugaauuguuuugaguagg

SEQ ID NO: 3863 - RNA, 22 nt, Human
uugacaaaguuuaguaauaauc

SEQ ID NO: 3864 - RNA, 22 nt, Human
uugacaaauacccauuagacca

SEQ ID NO: 3865 - RNA, 22 nt, Human
uugacaagaacaccgguuugag

SEQ ID NO: 3866 - RNA, 22 nt, Human
uugacaagaaucguugccuugg

SEQ ID NO: 3867 - RNA, 22 nt, Human
uugacaaggagccauugcaucu

SEQ ID NO: 3868 - RNA, 22 nt, Human
uugacaaugcacugugcuaagu

SEQ ID NO: 3869 - RNA, 22 nt, Human
uugacaauguccuuugaauuuc

SEQ ID NO: 3870 - RNA, 22 nt, Human
uugacacaggaaaguuguaacu

SEQ ID NO: 3871 - RNA, 22 nt, Human
uugacaggagccaaaauaggau

SEQ ID NO: 3872 - RNA, 22 nt, Human
uugaccauaccuccaggcaguu

SEQ ID NO: 3873 - RNA, 22 nt, Human
uugggaagaggccccuggauuc

SEQ ID NO: 3874 - RNA, 22 nt, Human
uugggacagcaaccaucugcua

SEQ ID NO: 3875 - RNA, 22 nt, Human
uugggacauguaagcuggaagu

SEQ ID NO: 3876 - RNA, 22 nt, Human
uugggagaaauaguugauccgc

SEQ ID NO: 3877 - RNA, 22 nt, Human
uugggagauggggagauaauau

SEQ ID NO: 3878 - RNA, 22 nt, Human
uugggagcaaauaggaaagagg

SEQ ID NO: 3879 - RNA, 22 nt, Human
uugggagguaauggagccaagu

SEQ ID NO: 3880 - RNA, 22 nt, Human
uugggaguuccuacugcgguuu

SEQ ID NO: 3881 - RNA, 21 nt, Human
uugggaucugagaagugaaaa

SEQ ID NO: 3882 - RNA, 22 nt, Human
uugggcaaaguguuucuggagc

SEQ ID NO: 3883 - RNA, 23 nt, Human
uugggcaaaucacuaacgucucc

SEQ ID NO: 3884 - RNA, 22 nt, Human
uugggcagaggcugugcagagg

SEQ ID NO: 3885 - RNA, 22 nt, Human
uugggcaggcacauagaguuua

SEQ ID NO: 3886 - RNA, 22 nt, Human
uugggcaggcuggcagacugcu

SEQ ID NO: 3887 - RNA, 22 nt, Human
uugggcagugauuaguucauga

SEQ ID NO: 3888 - RNA, 20 nt, Human
uugggccacacugauucagc

SEQ ID NO: 3889 - RNA, 22 nt, Human
uugggcccauggggcuaagcua

SEQ ID NO: 3890 - RNA, 23 nt, Human
uugggcucaguggcaggaagagu

SEQ ID NO: 3891 - RNA, 22 nt, Human
uugggcuccuguugauccuguc

SEQ ID NO: 3892 - RNA, 22 nt, Human
uugggcugaacccugcagcuga

SEQ ID NO: 3893 - RNA, 22 nt, Human
uugggcuuggucgguuugaggc

SEQ ID NO: 3894 - RNA, 22 nt, Human
uuggggaagaguugacuuugga

SEQ ID NO: 3895 - RNA, 22 nt, Human
uuggggaaggcuucccuguacc

SEQ ID NO: 3896 - RNA, 23 nt, Human
uuggggacaaacaugcuacuuuc

SEQ ID NO: 3897 - RNA, 22 nt, Human
uuggggcaccuccccagcauuu

SEQ ID NO: 3898 - RNA, 22 nt, Human
uuggggcagagaggauacggca

SEQ ID NO: 3899 - RNA, 22 nt, Human
uuggggccgggauaagguuguu

SEQ ID NO: 3900 - RNA, 22 nt, Human
uugggggaagaggauagacagu

SEQ ID NO: 3901 - RNA, 22 nt, Human
uugggguaaaaugucguaagag

SEQ ID NO: 3902 - RNA, 22 nt, Human
uugggguacgcaggucugggag

SEQ ID NO: 3903 - RNA, 18 nt, Human
uuggggugaggccaggaa

SEQ ID NO: 3904 - RNA, 22 nt, Human
uugggucaugggaucccagcau

SEQ ID NO: 3905 - RNA, 22 nt, Human
uugggucuacguagaaagaaca

SEQ ID NO: 3906 - RNA, 22 nt, Human
uugguaaacuugacagagaauc

SEQ ID NO: 3907 - RNA, 22 nt, Human
uugguaaauacucuuuggagac

SEQ ID NO: 3908 - RNA, 22 nt, Human
uugguaaauccccuuacacaaa

SEQ ID NO: 3909 - RNA, 22 nt, Human
uugguaaauuauuucuuccaau

SEQ ID NO: 3910 - RNA, 22 nt, Human
uugguaauuguguuuauuaaau

SEQ ID NO: 3911 - RNA, 22 nt, Human
uugguacauuacaguuugauug

SEQ ID NO: 3912 - RNA, 22 nt, Human
uuggucaagucuuaaagaaaaa

SEQ ID NO: 3913 - RNA, 20 nt, Human
uuggucagugguucaguuug

SEQ ID NO: 3914 - RNA, 22 nt, Human
uugguccugggcacugauuaac

SEQ ID NO: 3915 - RNA, 22 nt, Human
uuggucuucauccgucacagca

SEQ ID NO: 3916 - RNA, 22 nt, Human
uuggugggagaagacucugguu

SEQ ID NO: 3917 - RNA, 22 nt, Human
uuggugggcacaggggagaagu

SEQ ID NO: 3918 - RNA, 22 nt, Human
uugguggguuaaugagugacug

SEQ ID NO: 3919 - RNA, 22 nt, Human
uugguguugaacaaaacuaaau

SEQ ID NO: 3920 - RNA, 22 nt, Human
uugguuaccuucagaaaugagu

SEQ ID NO: 3921 - RNA, 22 nt, Human
uugguuaugcaauuucuuugcu

SEQ ID NO: 3922 - RNA, 22 nt, Human
uugguucaauacuaacuugaac

SEQ ID NO: 3923 - RNA, 22 nt, Human
uugguucauugcaggcgccggg

SEQ ID NO: 3924 - RNA, 20 nt, Human
uugguugagccagggccugg

SEQ ID NO: 3925 - RNA, 22 nt, Human
uugguuuacucuggggauaucu

SEQ ID NO: 3926 - RNA, 22 nt, Human
uugguuuaggaacuggcuugga

SEQ ID NO: 3927 - RNA, 22 nt, Human
uugguuuaguaccugccagcgu

SEQ ID NO: 3928 - RNA, 22 nt, Human
uugguuuguucaccaucaagca

SEQ ID NO: 3929 - RNA, 21 nt, Human
uugguuuucugagucuguaca

SEQ ID NO: 3930 - RNA, 22 nt, Human
uuguaaacuggauagaccuauu

SEQ ID NO: 3931 - RNA, 22 nt, Human
uuguaaacuuguuugaagguau

SEQ ID NO: 3932 - RNA, 22 nt, Human
uuguaaaggcuguuauugacuu

SEQ ID NO: 3933 - RNA, 22 nt, Human
uuguaaaguacuuagcacagca

SEQ ID NO: 3934 - RNA, 22 nt, Human
uuguaacacucccacucuucuu

SEQ ID NO: 3935 - RNA, 22 nt, Human
uuguaacacuuuucuauuaaua

SEQ ID NO: 3936 - RNA, 22 nt, Human
uuguaacuguggguugauuaga

SEQ ID NO: 3937 - RNA, 22 nt, Human
uuguaacuugugauuauaaucu

SEQ ID NO: 3938 - RNA, 22 nt, Human
uuguaagagagaauugcaaauu

SEQ ID NO: 3939 - RNA, 22 nt, Human
uuguaagucacaccagggcagg

SEQ ID NO: 3940 - RNA, 21 nt, Human
uuguacacccacagaucagcc

SEQ ID NO: 3941 - RNA, 19 nt, Human
uuguacagcaaccaacccu

SEQ ID NO: 3942 - RNA, 22 nt, Human
uuguacuaucaccaugucaugu

SEQ ID NO: 3943 - RNA, 22 nt, Human
uuguacuaugucuaagucacug

SEQ ID NO: 3944 - RNA, 22 nt, Human
uuguagcagggaucagaauaca

SEQ ID NO: 3945 - RNA, 22 nt, Human
uuguagcaucaaucaguacuuu

SEQ ID NO: 3946 - RNA, 22 nt, Human
uuguagcuagguuuuuguagaa

SEQ ID NO: 3947 - RNA, 22 nt, Human
uuguaguggccaaagaacucuu

SEQ ID NO: 3948 - RNA, 22 nt, Human
uuguauacaggucuuguccauu

SEQ ID NO: 3949 - RNA, 22 nt, Human
uuguaugaccacaaucugacgu

SEQ ID NO: 3950 - RNA, 22 nt, Human
uuguaugagcuccaggaacuca

SEQ ID NO: 3951 - RNA, 22 nt, Human
uuguaugaucaaaagaaaugua

SEQ ID NO: 3952 - RNA, 22 nt, Human
uuguaugcugaucaaaagcuuc

SEQ ID NO: 3953 - RNA, 22 nt, Human
uuguaugcugaugacaccaccu

SEQ ID NO: 3954 - RNA, 22 nt, Human
uuguauguuucugugcacauga

SEQ ID NO: 3955 - RNA, 22 nt, Human
uuguauuaauugaaaugaaugc

SEQ ID NO: 3956 - RNA, 22 nt, Human
uuguauuccagccaccacaggc

SEQ ID NO: 3957 - RNA, 22 nt, Human
gaagcuucgaaagagugauuuc

SEQ ID NO: 3958 - RNA, 22 nt, Human
gaagcuucguggcucuucaaau

SEQ ID NO: 3959 - RNA, 22 nt, Human
gaagcuucuggcauuucucaaa

SEQ ID NO: 3960 - RNA, 22 nt, Human
gaagcuugagaacuacuguccu

SEQ ID NO: 3961 - RNA, 22 nt, Human
gaagcuuugagagcagaagccc

SEQ ID NO: 3962 - RNA, 22 nt, Human
gaaggaaaacagaucugccuga

SEQ ID NO: 3963 - RNA, 21 nt, Human
gaaggagaaagcaagugcugc

SEQ ID NO: 3964 - RNA, 22 nt, Human
gaaggagcuaaagggagcccug

SEQ ID NO: 3965 - RNA, 22 nt, Human
gaaggauuugagauuauccuag

SEQ ID NO: 3966 - RNA, 22 nt, Human
gaaggcaaggagggaagccacc

SEQ ID NO: 3967 - RNA, 22 nt, Human
gaaggcacccggcgugcggcgg

SEQ ID NO: 3968 - RNA, 22 nt, Human
gaaggcacccuccaucacucac

SEQ ID NO: 3969 - RNA, 22 nt, Human
gaaggcacugaacuccuucugg

SEQ ID NO: 3970 - RNA, 22 nt, Human
gaaggcagggaauguggugcua

SEQ ID NO: 3971 - RNA, 22 nt, Human
gaaggcauaaaaccaauuuugu

SEQ ID NO: 3972 - RNA, 22 nt, Human
gaaggcaucucuggacuuauuu

SEQ ID NO: 3973 - RNA, 18 nt, Human
gaaggcauucaguggcuu

SEQ ID NO: 3974 - RNA, 22 nt, Human
gaaggccacggaauggagcugg

SEQ ID NO: 3975 - RNA, 22 nt, Human
gaaggccaguuuugagauaggu

SEQ ID NO: 3976 - RNA, 22 nt, Human
gaaggccauugcguccugggau

SEQ ID NO: 3977 - RNA, 22 nt, Human
gaaggcccagucaaggggcuag

SEQ ID NO: 3978 - RNA, 22 nt, Human
gaaggcccugguauucuugagg

SEQ ID NO: 3979 - RNA, 17 nt, Human
gaaggccugcacaggcc

SEQ ID NO: 3980 - RNA, 22 nt, Human
gaaggcuccuugagggaaggac

SEQ ID NO: 3981 - RNA, 22 nt, Human
gaaggcucuggggauugagaua

SEQ ID NO: 3982 - RNA, 22 nt, Human
gaaggcucuugaggccagguaa

SEQ ID NO: 3983 - RNA, 19 nt, Human
gaaggcugaaaugaagcac

SEQ ID NO: 3984 - RNA, 22 nt, Human
gaaggcuggaaggcaaguagga

SEQ ID NO: 3985 - RNA, 22 nt, Human
gaaggcuggcucagcuuuccag

SEQ ID NO: 3986 - RNA, 22 nt, Human
gaaggcuggcuuucugagagca

SEQ ID NO: 3987 - RNA, 22 nt, Human
gaaggcugucagagaggagggc

SEQ ID NO: 3988 - RNA, 21 nt, Human
cccaggcugaauuaaaaauau

SEQ ID NO: 3989 - RNA, 22 nt, Human
cccaggcugauguucagcgggu

SEQ ID NO: 3990 - RNA, 22 nt, Human
cccaggcugcaugaguccaugg

SEQ ID NO: 3991 - RNA, 22 nt, Human
cccaggcugcguauccacaaua

SEQ ID NO: 3992 - RNA, 22 nt, Human
cccaggcuggagugcaauggca

SEQ ID NO: 3993 - RNA, 22 nt, Human
cccaggcuggcacugcugaagu

SEQ ID NO: 3994 - RNA, 22 nt, Human
cccaggcugguccugaacuccu

SEQ ID NO: 3995 - RNA, 22 nt, Human
cccaggcuucccaaucagaagg

SEQ ID NO: 3996 - RNA, 21 nt, Human
cccagggaagccgcagucacc

SEQ ID NO: 3997 - RNA, 17 nt, Human
cccagggaccacugcuu

SEQ ID NO: 3998 - RNA, 22 nt, Human
cccagggagguagcaggagaaa

SEQ ID NO: 3999 - RNA, 22 nt, Human
cccagggcugcagauggaggcu

SEQ ID NO: 4000 - RNA, 22 nt, Human
cccaggggagguccucagggaa

SEQ ID NO: 4001 - RNA, 22 nt, Human
cccaggguggaugcaagcagca

SEQ ID NO: 4002 - RNA, 22 nt, Human
cccaggguugccugccucugcu

SEQ ID NO: 4003 - RNA, 23 nt, Human
cccaggucaaaauucacaggccu

SEQ ID NO: 4004 - RNA, 22 nt, Human
cccaggucccggggccagcugc

SEQ ID NO: 4005 - RNA, 22 nt, Human
cccaggucgucagcaguguggu

SEQ ID NO: 4006 - RNA, 22 nt, Human
cccaggucucccugcagcccug

SEQ ID NO: 4007 - RNA, 22 nt, Human
cccaggucugccagccuguggg

SEQ ID NO: 4008 - RNA, 22 nt, Human
cccaggugcugaaggaggccgc

SEQ ID NO: 4009 - RNA, 21 nt, Human
cccaggugggaugguugccuc

SEQ ID NO: 4010 - RNA, 22 nt, Human
cccaggugggcaccucgaggaa

SEQ ID NO: 4011 - RNA, 22 nt, Human
cccagguggguuggccucuguc

SEQ ID NO: 4012 - RNA, 19 nt, Human
cccagguguuugaggcugc

SEQ ID NO: 4013 - RNA, 22 nt, Human
cccaguccagaccaugaccuca

SEQ ID NO: 4014 - RNA, 22 nt, Human
cccagugccaggcacaggcagc

SEQ ID NO: 4015 - RNA, 22 nt, Human
cccaguggggagcugagguuca

SEQ ID NO: 4016 - RNA, 22 nt, Human
cccagugggucacugcaucuca

SEQ ID NO: 4017 - RNA, 22 nt, Human
cccaguggugcuggcaucugug

SEQ ID NO: 4018 - RNA, 22 nt, Human
cccagugucauucuaagggagg

SEQ ID NO: 4019 - RNA, 22 nt, Human
cccaguuguugccggcucugga

SEQ ID NO: 4020 - RNA, 22 nt, Human
cccaugagaccugguuuaaggc

SEQ ID NO: 4021 - RNA, 22 nt, Human
cccaugagauucugaauuuggc

SEQ ID NO: 4022 - RNA, 22 nt, Human
cccaugcaucccucuccugggc

SEQ ID NO: 4023 - RNA, 22 nt, Human
cccauucuucaugguuuccugu

SEQ ID NO: 4024 - RNA, 22 nt, Human
cccauugugguuguugaggaua

SEQ ID NO: 4025 - RNA, 22 nt, Human
cccauuuaaguaaugauaaacu

SEQ ID NO: 4026 - RNA, 22 nt, Human
cccauuuauuuaaguaggucuu

SEQ ID NO: 4027 - RNA, 22 nt, Human
cccauuuuggaacgaguagcca

SEQ ID NO: 4028 - RNA, 18 nt, Human
ccccaaaagucacccugg

SEQ ID NO: 4029 - RNA, 22 nt, Human
ccccaaagccucagccugccug

SEQ ID NO: 4030 - RNA, 22 nt, Human
ccccaaaguguuggauaauuga

SEQ ID NO: 4031 - RNA, 22 nt, Human
ccccaacccugguuccguggcg

SEQ ID NO: 4032 - RNA, 22 nt, Human
ccccacaccugccgggcagcag

SEQ ID NO: 4033 - RNA, 22 nt, Human
ccccacacucuuuacauucaua

SEQ ID NO: 4034 - RNA, 22 nt, Human
ccccacaguccgugaggagcca

SEQ ID NO: 4035 - RNA, 22 nt, Human
ccccaccaccaaggcucaguuu

SEQ ID NO: 4036 - RNA, 22 nt, Human
ccccagaaagccuggcacuagg

SEQ ID NO: 4037 - RNA, 22 nt, Human
ccccagaaggggacagagggua

SEQ ID NO: 4038 - RNA, 22 nt, Human
ccccagcacuaccagaagccag

SEQ ID NO: 4039 - RNA, 22 nt, Human
ccccagcagacucagggcaggu

SEQ ID NO: 4040 - RNA, 22 nt, Human
ccccagccagcaggaccucuga

SEQ ID NO: 4041 - RNA, 22 nt, Human
ccccagcucagugcagggacau

SEQ ID NO: 4042 - RNA, 22 nt, Human
ccccagcugcauacuugccaag

SEQ ID NO: 4043 - RNA, 22 nt, Human
ccccaggaagccucagauuugc

SEQ ID NO: 4044 - RNA, 22 nt, Human
ccccagggaagcuuugcuuacu

SEQ ID NO: 4045 - RNA, 22 nt, Human
ccccagggacugguuucaugga

SEQ ID NO: 4046 - RNA, 22 nt, Human
ccccagguggauggcucgcaua

SEQ ID NO: 4047 - RNA, 22 nt, Human
ccccaucuucccugagggauuu

SEQ ID NO: 4048 - RNA, 21 nt, Human
ccccauggaguacaguugggc

SEQ ID NO: 4049 - RNA, 22 nt, Human
ccccauggcaacugcugggggu

SEQ ID NO: 4050 - RNA, 18 nt, Human
cccccagccaaauucucu

SEQ ID NO: 4051 - RNA, 22 nt, Human
cccccagccagcagugcucagc

SEQ ID NO: 4052 - RNA, 22 nt, Human
cccccauccaugucaggagagg

SEQ ID NO: 4053 - RNA, 22 nt, Human
cccccucugccgggguccuuca

SEQ ID NO: 4054 - RNA, 22 nt, Human
ccccggaggcggagguugcagu

SEQ ID NO: 4055 - RNA, 17 nt, Human
ccccuaccuccguuuga

SEQ ID NO: 4056 - RNA, 16 nt, Human
ccccucaggaaguaca

SEQ ID NO: 4057 - RNA, 22 nt, Human
ccccucauuacaggcggggagc

SEQ ID NO: 4058 - RNA, 22 nt, Human
ccccucauucucugagcuaguu

SEQ ID NO: 4059 - RNA, 22 nt, Human
ccccuccuggccacacugucag

SEQ ID NO: 4060 - RNA, 22 nt, Human
ccccugccagcuaucccugaac

SEQ ID NO: 4061 - RNA, 22 nt, Human
ccccugcuggccugcugguuuc

SEQ ID NO: 4062 - RNA, 21 nt, Human
ccccugggagcccugucagua

SEQ ID NO: 4063 - RNA, 22 nt, Human
ccccuggggaucagcuggaauu

SEQ ID NO: 4064 - RNA, 22 nt, Human
ccccuggguccaggcuucucug

SEQ ID NO: 4065 - RNA, 22 nt, Human
ccccuguguuguucaaggguca

SEQ ID NO: 4066 - RNA, 22 nt, Human
gacagcaaagcagagccaaggc

SEQ ID NO: 4067 - RNA, 22 nt, Human
gacagcaacacucaauucugca

SEQ ID NO: 4068 - RNA, 21 nt, Human
gacagcaacuguaguccucuu

SEQ ID NO: 4069 - RNA, 22 nt, Human
gacagcagacaaaccauguuuu

SEQ ID NO: 4070 - RNA, 22 nt, Human
gacagcagacagccuggccccu

SEQ ID NO: 4071 - RNA, 22 nt, Human
gacagcagauaagaccucauca

SEQ ID NO: 4072 - RNA, 22 nt, Human
gacagcagcauguuuacaggcc

SEQ ID NO: 4073 - RNA, 22 nt, Human
gacagcaggagaucaugauaga

SEQ ID NO: 4074 - RNA, 22 nt, Human
gacagcaguuuuucucuagggu

SEQ ID NO: 4075 - RNA, 22 nt, Human
gacagcauggugucuguucagg

SEQ ID NO: 4076 - RNA, 22 nt, Human
gacagccaacuggggagggcau

SEQ ID NO: 4077 - RNA, 22 nt, Human
gacagcugcauccucagacaca

SEQ ID NO: 4078 - RNA, 22 nt, Human
gacagcugccucuguguagauc

SEQ ID NO: 4079 - RNA, 22 nt, Human
gacagcugcucccguuucugcu

SEQ ID NO: 4080 - RNA, 22 nt, Human
gacagcugcuuaugaaccaacg

SEQ ID NO: 4081 - RNA, 22 nt, Human
gacagcugggaggaugacauaa

SEQ ID NO: 4082 - RNA, 22 nt, Human
gacagcuuagugaaaauguaaa

SEQ ID NO: 4083 - RNA, 22 nt, Human
gacagcuucuagaaauggucac

SEQ ID NO: 4084 - RNA, 22 nt, Human
gacagcuucuagaggaauuggu

SEQ ID NO: 4085 - RNA, 22 nt, Human
gacagcuucuaugugacgagca

SEQ ID NO: 4086 - RNA, 22 nt, Human
gacagcuugccugguacugcaa

SEQ ID NO: 4087 - RNA, 20 nt, Human
gacagcuuggggugucaccu

SEQ ID NO: 4088 - RNA, 22 nt, Human
gacaggaaacaagaaggcagga

SEQ ID NO: 4089 - RNA, 22 nt, Human
gacaggaagucugaaggaggga

SEQ ID NO: 4090 - RNA, 19 nt, Human
gacaggacgaagggaaguu

SEQ ID NO: 4091 - RNA, 22 nt, Human
gacaggacuucacuguguugcc

SEQ ID NO: 4092 - RNA, 20 nt, Human
gacaggagaguuagguaggu

SEQ ID NO: 4093 - RNA, 22 nt, Human
gacaggcaccuugucugucuug

SEQ ID NO: 4094 - RNA, 22 nt, Human
gacaggcagaccugugcccugg

SEQ ID NO: 4095 - RNA, 22 nt, Human
gacaggcaugcuuucaggacua

SEQ ID NO: 4096 - RNA, 22 nt, Human
gacaggccagacaggagacuga

SEQ ID NO: 4097 - RNA, 22 nt, Human
gacaggccaggggcugaggugg

SEQ ID NO: 4098 - RNA, 22 nt, Human
gacaggcccccucaggacugau

SEQ ID NO: 4099 - RNA, 22 nt, Human
gacaggcccgaguagcugauga

SEQ ID NO: 4100 - RNA, 17 nt, Human
gacaggcucagugacga

SEQ ID NO: 4101 - RNA, 22 nt, Human
gacaggcugugauggccgggag

SEQ ID NO: 4102 - RNA, 22 nt, Human
gacaggcuucauccucagaguu

SEQ ID NO: 4103 - RNA, 22 nt, Human
gacagggacucccugguuagaa

SEQ ID NO: 4104 - RNA, 22 nt, Human
gacagggaggagcagagcuucu

SEQ ID NO: 4105 - RNA, 22 nt, Human
gacagggcaagacucugucuaa

SEQ ID NO: 4106 - RNA, 22 nt, Human
gacaggggucccucugggcugu

SEQ ID NO: 4107 - RNA, 22 nt, Human
gacaggguccaaaggcagggga

SEQ ID NO: 4108 - RNA, 22 nt, Human
cccugaaaguacacugggacgg

SEQ ID NO: 4109 - RNA, 22 nt, Human
cccugaaauccugugcucugug

SEQ ID NO: 4110 - RNA, 18 nt, Human
cccugaagggcaagauaa

SEQ ID NO: 4111 - RNA, 22 nt, Human
cccugacucggcgcgcucccgu

SEQ ID NO: 4112 - RNA, 22 nt, Human
cccugacuugaucuuugacuug

SEQ ID NO: 4113 - RNA, 22 nt, Human
cccugagaagaucauugccacg

SEQ ID NO: 4114 - RNA, 22 nt, Human
cccugagagugagugccaccuu

SEQ ID NO: 4115 - RNA, 22 nt, Human
cccugagcaacaaacugaauac

SEQ ID NO: 4116 - RNA, 22 nt, Human
cccugagccacacagagcaggu

SEQ ID NO: 4117 - RNA, 22 nt, Human
cccugagccgcugcuccaaccu

SEQ ID NO: 4118 - RNA, 22 nt, Human
cccugagcucaggcccuugggg

SEQ ID NO: 4119 - RNA, 22 nt, Human
cccugaggaaaggguggagggc

SEQ ID NO: 4120 - RNA, 19 nt, Human
cccugaggcaaaagccuuu

SEQ ID NO: 4121 - RNA, 22 nt, Human
cccugaggggcuuacuuugccc

SEQ ID NO: 4122 - RNA, 22 nt, Human
cccugaguuaguacaguugagu

SEQ ID NO: 4123 - RNA, 22 nt, Human
cccugauguuuucucugccuuu

SEQ ID NO: 4124 - RNA, 22 nt, Human
cccugcacagccuggcucucuu

SEQ ID NO: 4125 - RNA, 22 nt, Human
cccugcagagccagcccugacc

SEQ ID NO: 4126 - RNA, 22 nt, Human
cccugcagccggccagcucauu

SEQ ID NO: 4127 - RNA, 22 nt, Human
cccugcagccuugcaugccuuc

SEQ ID NO: 4128 - RNA, 21 nt, Human
cccugcaggccagggcugagc

SEQ ID NO: 4129 - RNA, 22 nt, Human
cccugcagggaggauucugaag

SEQ ID NO: 4130 - RNA, 22 nt, Human
cccugcaggggaccugcagccu

SEQ ID NO: 4131 - RNA, 23 nt, Human
cccugcagucagggugagauggu

SEQ ID NO: 4132 - RNA, 22 nt, Human
cccugcagugugaccucaccua

SEQ ID NO: 4133 - RNA, 22 nt, Human
cccugccagaugugcuucaguu

SEQ ID NO: 4134 - RNA, 22 nt, Human
cccugcccaucggggcggccug

SEQ ID NO: 4135 - RNA, 19 nt, Human
cccugcccuggugacuggg

SEQ ID NO: 4136 - RNA, 22 nt, Human
cccugccuucuuggccuuuaaa

SEQ ID NO: 4137 - RNA, 22 nt, Human
cccugccuugggguccacaccg

SEQ ID NO: 4138 - RNA, 22 nt, Human
cccugcugacaacuugauuuug

SEQ ID NO: 4139 - RNA, 22 nt, Human
cccugcugaugccuugauuuug

SEQ ID NO: 4140 - RNA, 22 nt, Human
cccugcugccuucacccaggac

SEQ ID NO: 4141 - RNA, 22 nt, Human
cccugcuucccugggagaggcg

SEQ ID NO: 4142 - RNA, 21 nt, Human
cccugcuuggggcagaacaac

SEQ ID NO: 4143 - RNA, 22 nt, Human
cccuggacggggaauaugacuu

SEQ ID NO: 4144 - RNA, 19 nt, Human
cccuggagaauacccugga

SEQ ID NO: 4145 - RNA, 22 nt, Human
cccuggagcaucucugcugucu

SEQ ID NO: 4146 - RNA, 22 nt, Human
cccuggaggaaaaucugaggcu

SEQ ID NO: 4147 - RNA, 22 nt, Human
cccuggaggaagaaacaauggc

SEQ ID NO: 4148 - RNA, 22 nt, Human
cccuggagucagguuggccugg

SEQ ID NO: 4149 - RNA, 22 nt, Human
cccuggcaagugcuguguagcu

SEQ ID NO: 4150 - RNA, 22 nt, Human
cccuggcacuagcgacggccau

SEQ ID NO: 4151 - RNA, 23 nt, Human
cccuggccuuggggcacaggcug

SEQ ID NO: 4152 - RNA, 22 nt, Human
cccuggcucugccucagagccc

SEQ ID NO: 4153 - RNA, 22 nt, Human
cccuggcugcuuguagucuggc

SEQ ID NO: 4154 - RNA, 22 nt, Human
cccugggagaaguugagggcug

SEQ ID NO: 4155 - RNA, 22 nt, Human
cccugggucuagguuaugugcu

SEQ ID NO: 4156 - RNA, 17 nt, Human
cccugggugaguucuca

SEQ ID NO: 4157 - RNA, 22 nt, Human
cccuggucagggaaggcgccug

SEQ ID NO: 4158 - RNA, 22 nt, Human
cccuggugguacggcacuggca

SEQ ID NO: 4159 - RNA, 22 nt, Human
cccugguguccacuggaggaag

SEQ ID NO: 4160 - RNA, 22 nt, Human
cccugguguggaugugauuggc

SEQ ID NO: 4161 - RNA, 22 nt, Human
cccuguccugcuaggcccuggu

SEQ ID NO: 4162 - RNA, 22 nt, Human
cccugugacgagcacggccagu

SEQ ID NO: 4163 - RNA, 22 nt, Human
cccugugcagauggcagcuggg

SEQ ID NO: 4164 - RNA, 22 nt, Human
cccugugccagagaggcaggag

SEQ ID NO: 4165 - RNA, 22 nt, Human
cccugugccuaguuggccuaaa

SEQ ID NO: 4166 - RNA, 22 nt, Human
cccugugcugucaugcugggcg

SEQ ID NO: 4167 - RNA, 22 nt, Human
cccugugggccaugugucuaca

SEQ ID NO: 4168 - RNA, 22 nt, Human
cccugugguugcuagggcacag

SEQ ID NO: 4169 - RNA, 22 nt, Human
cccuuagcucaauuucuugccc

SEQ ID NO: 4170 - RNA, 22 nt, Human
cccuuagcucacaagcuaaagc

SEQ ID NO: 4171 - RNA, 23 nt, Human
cccuucagcgagggcauuaaggu

SEQ ID NO: 4172 - RNA, 22 nt, Human
cccuucagcugagugggacagc

SEQ ID NO: 4173 - RNA, 22 nt, Human
cccuucccuucugggagaucca

SEQ ID NO: 4174 - RNA, 22 nt, Human
cccuuccucccaggcuucugug

SEQ ID NO: 4175 - RNA, 22 nt, Human
gaccauuugcuaguaaauugca

SEQ ID NO: 4176 - RNA, 22 nt, Human
gaccauuuguugaaaagauuau

SEQ ID NO: 4177 - RNA, 22 nt, Human
gacccagaggccugacagugug

SEQ ID NO: 4178 - RNA, 22 nt, Human
gacccaggagugcagagagugg

SEQ ID NO: 4179 - RNA, 22 nt, Human
gacccaggcucgugggacggcu

SEQ ID NO: 4180 - RNA, 22 nt, Human
gacccucaaacaauuacacugc

SEQ ID NO: 4181 - RNA, 22 nt, Human
gacccuccacucacugcugugu

SEQ ID NO: 4182 - RNA, 22 nt, Human
gacccugaggaugcaccagcag

SEQ ID NO: 4183 - RNA, 22 nt, Human
gacccugccaugagugacaggg

SEQ ID NO: 4184 - RNA, 22 nt, Human
gacccuggcuagggcuuaaccu

SEQ ID NO: 4185 - RNA, 22 nt, Human
gacccuggcuggagcuggccug

SEQ ID NO: 4186 - RNA, 22 nt, Human
gacccuuagaaugugaucuuau

SEQ ID NO: 4187 - RNA, 22 nt, Human
gacccuuucagacccuuuagua

SEQ ID NO: 4188 - RNA, 22 nt, Human
gaccugaaaugggggccugucc

SEQ ID NO: 4189 - RNA, 22 nt, Human
gaccugagauuuugaggcucau

SEQ ID NO: 4190 - RNA, 22 nt, Human
gaccugccugagcugccucugc

SEQ ID NO: 4191 - RNA, 22 nt, Human
gaccuggaagaacugaggccuu

SEQ ID NO: 4192 - RNA, 22 nt, Human
gaccuggaauuuguguguguuc

SEQ ID NO: 4193 - RNA, 22 nt, Human
gaccuggacugaguuagauggc

SEQ ID NO: 4194 - RNA, 22 nt, Human
gaccuggauucaaauucagacu

SEQ ID NO: 4195 - RNA, 22 nt, Human
gaccuggcuuugggccccggca

SEQ ID NO: 4196 - RNA, 22 nt, Human
gaccuggugcuagcuggugugu

SEQ ID NO: 4197 - RNA, 22 nt, Human
gaccugugcagugacugguggc

SEQ ID NO: 4198 - RNA, 22 nt, Human
gaccuuccuucuuugcuccggg

SEQ ID NO: 4199 - RNA, 22 nt, Human
gaccuuuagugucauguuauau

SEQ ID NO: 4200 - RNA, 22 nt, Human
gacgcacugaaggcugguuacc

SEQ ID NO: 4201 - RNA, 22 nt, Human
gacuaaauuccuguucgcgaug

SEQ ID NO: 4202 - RNA, 22 nt, Human
gacuacaacucccagaagacuu

SEQ ID NO: 4203 - RNA, 22 nt, Human
gacuacaggccggcaucagaga

SEQ ID NO: 4204 - RNA, 22 nt, Human
gacuaggggcagcgugggagcu

SEQ ID NO: 4205 - RNA, 22 nt, Human
gacuauuuaaaaagaacuacug

SEQ ID NO: 4206 - RNA, 22 nt, Human
gacuauuuuauaaacuagugaa

SEQ ID NO: 4207 - RNA, 22 nt, Human
gacuauuuugcacaaaacaauu

SEQ ID NO: 4208 - RNA, 19 nt, Human
gacuccaacuuuaagcaug

SEQ ID NO: 4209 - RNA, 22 nt, Human
gacuccagaaucuggacggucc

SEQ ID NO: 4210 - RNA, 22 nt, Human
gacuccagggauuggaagaugu

SEQ ID NO: 4211 - RNA, 22 nt, Human
gacuccaggugcaggaggagcc

SEQ ID NO: 4212 - RNA, 22 nt, Human
gacuccccacguuaaggaaugu

SEQ ID NO: 4213 - RNA, 21 nt, Human
gacucucuagugcuguccagu

SEQ ID NO: 4214 - RNA, 22 nt, Human
gacugaggagguaagguuugaa

SEQ ID NO: 4215 - RNA, 22 nt, Human
gacugaggccuuuauugagaca

SEQ ID NO: 4216 - RNA, 22 nt, Human
gacugcauucauuugguuggca

SEQ ID NO: 4217 - RNA, 22 nt, Human
gacugccagaaugugaggccug

SEQ ID NO: 4218 - RNA, 22 nt, Human
gacugccuuuuugagcaaaaug

SEQ ID NO: 4219 - RNA, 22 nt, Human
gacugcuuugacaaaugauacc

SEQ ID NO: 4220 - RNA, 22 nt, Human
gacugcuuugguuuguaaaugu

SEQ ID NO: 4221 - RNA, 22 nt, Human
ccccucuuguacuagacaguuu

SEQ ID NO: 4222 - RNA, 22 nt, Human
ccccugccauagucaaaucuaa

SEQ ID NO: 4223 - RNA, 22 nt, Human
ccccuucucugcaagccugcuc

SEQ ID NO: 4224 - RNA, 22 nt, Human
cccggacagaggggcagagugu

SEQ ID NO: 4225 - RNA, 22 nt, Human
cccgggaacauaaagcagugag

SEQ ID NO: 4226 - RNA, 22 nt, Human
cccguguggacagcgugccagu

SEQ ID NO: 4227 - RNA, 22 nt, Human
cccguguggaugcgcuggugcu

SEQ ID NO: 4228 - RNA, 22 nt, Human
cccuaaggacaccugcugucca

SEQ ID NO: 4229 - RNA, 22 nt, Human
cccuagggcuaagcaggacugc

SEQ ID NO: 4230 - RNA, 22 nt, Human
cccuauuagugaccacaucaua

SEQ ID NO: 4231 - RNA, 22 nt, Human
cccucagcucaagccccugugc

SEQ ID NO: 4232 - RNA, 22 nt, Human
cccucagcuccacccucagcag

SEQ ID NO: 4233 - RNA, 22 nt, Human
cccucaggagaugucagcugga

SEQ ID NO: 4234 - RNA, 22 nt, Human
cccucaugccagacagcaugca

SEQ ID NO: 4235 - RNA, 22 nt, Human
cccuccagggagccaugcuggg

SEQ ID NO: 4236 - RNA, 22 nt, Human
cccuccauuaaaacagaccuau

SEQ ID NO: 4237 - RNA, 22 nt, Human
cccucccuuccaaguugaggac

SEQ ID NO: 4238 - RNA, 22 nt, Human
cccuccucaacucuggcuucca

SEQ ID NO: 4239 - RNA, 22 nt, Human
cccuccucucccuaagagucac

SEQ ID NO: 4240 - RNA, 22 nt, Human
cccuccugugccugaggccagc

SEQ ID NO: 4241 - RNA, 22 nt, Human
cccucgcucuaggcagcccugu

SEQ ID NO: 4242 - RNA, 22 nt, Human
cccucgggucgcggacugcgcu

SEQ ID NO: 4243 - RNA, 22 nt, Human
cccucucagucagagccagaua

SEQ ID NO: 4244 - RNA, 22 nt, Human
cccucuccuggcugcauggagc

SEQ ID NO: 4245 - RNA, 22 nt, Human
cccucucugcugcauagaggaa

SEQ ID NO: 4246 - RNA, 22 nt, Human
cccucugaaccugguagcagaa

SEQ ID NO: 4247 - RNA, 22 nt, Human
cccucugaccuccugccacagu

SEQ ID NO: 4248 - RNA, 22 nt, Human
cccucugcaggcuggaccugcc

SEQ ID NO: 4249 - RNA, 22 nt, Human
cccucuggcucuucucaggccg

SEQ ID NO: 4250 - RNA, 18 nt, Human
cccucuugcacaaagcaa

SEQ ID NO: 4251 - RNA, 22 nt, Human
cccugacagauggcaggggagc

SEQ ID NO: 4252 - RNA, 22 nt, Human
cccugaccccacggcuggagaa

SEQ ID NO: 4253 - RNA, 22 nt, Human
cccugacccuaucagagggcca

SEQ ID NO: 4254 - RNA, 22 nt, Human
cccugagaacaacuuagggguc

SEQ ID NO: 4255 - RNA, 22 nt, Human
cccugagcuaccuauguaagca

SEQ ID NO: 4256 - RNA, 23 nt, Human
cccugagcugguccaggcucaac

SEQ ID NO: 4257 - RNA, 22 nt, Human
cccugaggaccaggaaggaggg

SEQ ID NO: 4258 - RNA, 22 nt, Human
cccugaggauagggcaggaccc

SEQ ID NO: 4259 - RNA, 22 nt, Human
cccugaggaugucuccuuccug

SEQ ID NO: 4260 - RNA, 22 nt, Human
cccugaggcacaggccacguau

SEQ ID NO: 4261 - RNA, 22 nt, Human
cccugagucaucauugcggaag

SEQ ID NO: 4262 - RNA, 22 nt, Human
cccugaugacacgggcaucagg

SEQ ID NO: 4263 - RNA, 22 nt, Human
cccugauggcacaguggcaggc

SEQ ID NO: 4264 - RNA, 22 nt, Human
cccugauggccuaucuggcagu

SEQ ID NO: 4265 - RNA, 22 nt, Human
cccugcacacucgugucuugac

SEQ ID NO: 4266 - RNA, 17 nt, Human
cccugcacccuacucuc

SEQ ID NO: 4267 - RNA, 22 nt, Human
cccugcagagaccacugaccuu

SEQ ID NO: 4268 - RNA, 22 nt, Human
cccugcagaucagugagaacuu

SEQ ID NO: 4269 - RNA, 22 nt, Human
cccugcagaucuaggguccuuc

SEQ ID NO: 4270 - RNA, 23 nt, Human
cccugcaucugucccucaccagu

SEQ ID NO: 4271 - RNA, 17 nt, Human
cccugccaccaggaagc

SEQ ID NO: 4272 - RNA, 22 nt, Human
cccugccccaggcggcuucacu

SEQ ID NO: 4273 - RNA, 22 nt, Human
cccugcccuggagacacuuaaa

SEQ ID NO: 4274 - RNA, 22 nt, Human
cccugccuuguuggagccuaug

SEQ ID NO: 4275 - RNA, 22 nt, Human
cccugcuagaaccuccaacaug

SEQ ID NO: 4276 - RNA, 22 nt, Human
cccugcuaguccuuccuuggcu

SEQ ID NO: 4277 - RNA, 22 nt, Human
cccugcucuuagugccugugug

SEQ ID NO: 4278 - RNA, 22 nt, Human
cccugcugaaucccauggaguc

SEQ ID NO: 4279 - RNA, 22 nt, Human
cccugcugugucccaccuggaa

SEQ ID NO: 4280 - RNA, 22 nt, Human
cccugcuuagcacccuugcacc

SEQ ID NO: 4281 - RNA, 22 nt, Human
cccugcuuugcacccaggcugg

SEQ ID NO: 4282 - RNA, 22 nt, Human
cccuggaaaugaggcaugugcg

SEQ ID NO: 4283 - RNA, 22 nt, Human
cccuggaacuccuaggcaagca

SEQ ID NO: 4284 - RNA, 22 nt, Human
ccugccuggcacauaguacucu

SEQ ID NO: 4285 - RNA, 20 nt, Human
ccugccuggccauuccuugg

SEQ ID NO: 4286 - RNA, 22 nt, Human
ccugccuguacuagagacccag

SEQ ID NO: 4287 - RNA, 23 nt, Human
ccugccuguucuaacuccauuuc

SEQ ID NO: 4288 - RNA, 22 nt, Human
ccugccuucccagcuuggcuuu

SEQ ID NO: 4289 - RNA, 22 nt, Human
ccugccuuucucaguaaucuuu

SEQ ID NO: 4290 - RNA, 22 nt, Human
ccugcgcgucugggucugucuc

SEQ ID NO: 4291 - RNA, 22 nt, Human
ccugcgggcugugcugaagccu

SEQ ID NO: 4292 - RNA, 22 nt, Human
ccugcucaccugauguggcaac

SEQ ID NO: 4293 - RNA, 22 nt, Human
ccugcucagagcgucuugugug

SEQ ID NO: 4294 - RNA, 22 nt, Human
ccugcucugccaaguccucuuu

SEQ ID NO: 4295 - RNA, 22 nt, Human
ccugcucuuauagcuguuucca

SEQ ID NO: 4296 - RNA, 22 nt, Human
ccugcugcuuaggccauauuuc

SEQ ID NO: 4297 - RNA, 22 nt, Human
ccugcuggacagggguguucau

SEQ ID NO: 4298 - RNA, 22 nt, Human
ccugcuggaccucaacacauuu

SEQ ID NO: 4299 - RNA, 22 nt, Human
ccugcuggcagaggggguuacu

SEQ ID NO: 4300 - RNA, 22 nt, Human
ccugcuggcauucuugcucccu

SEQ ID NO: 4301 - RNA, 22 nt, Human
ccugcuguagggccccuggggc

SEQ ID NO: 4302 - RNA, 22 nt, Human
ccugcugucagcauccucgcga

SEQ ID NO: 4303 - RNA, 22 nt, Human
ccugcuguucuguuuagugaac

SEQ ID NO: 4304 - RNA, 22 nt, Human
ccugcuuaacauugccaugaca

SEQ ID NO: 4305 - RNA, 22 nt, Human
ccugcuuugcugguaccaucag

SEQ ID NO: 4306 - RNA, 22 nt, Human
ccuggaaagcugcccugugaca

SEQ ID NO: 4307 - RNA, 22 nt, Human
ccuggaaaugcaaaagccauga

SEQ ID NO: 4308 - RNA, 22 nt, Human
ccuggaagucauuccucguucc

SEQ ID NO: 4309 - RNA, 22 nt, Human
ccuggaaguuggagguugcagu

SEQ ID NO: 4310 - RNA, 22 nt, Human
ccuggaaucuggaguuggaauc

SEQ ID NO: 4311 - RNA, 22 nt, Human
ccuggacagggccaggccaugc

SEQ ID NO: 4312 - RNA, 22 nt, Human
ccuggaccaaacacuggccugg

SEQ ID NO: 4313 - RNA, 22 nt, Human
ccuggacucaggcugugggcac

SEQ ID NO: 4314 - RNA, 22 nt, Human
ccuggagacgaggcuggaccau

SEQ ID NO: 4315 - RNA, 22 nt, Human
ccuggagcacagcccaguccca

SEQ ID NO: 4316 - RNA, 22 nt, Human
ccuggagcgcgggucaagcugg

SEQ ID NO: 4317 - RNA, 18 nt, Human
ccuggagcuccacagcaa

SEQ ID NO: 4318 - RNA, 22 nt, Human
ccuggagggacccuggcccugu

SEQ ID NO: 4319 - RNA, 22 nt, Human
ccuggagggcgccgcacagucc

SEQ ID NO: 4320 - RNA, 19 nt, Human
ccuggaggugaagguucuc

SEQ ID NO: 4321 - RNA, 22 nt, Human
ccuggaguugaaggaagguggg

SEQ ID NO: 4322 - RNA, 22 nt, Human
ccuggauagcuacuggccaggc

SEQ ID NO: 4323 - RNA, 22 nt, Human
ccuggaucagucacuguugcug

SEQ ID NO: 4324 - RNA, 22 nt, Human
ccuggauccaugaaaaggcuac

SEQ ID NO: 4325 - RNA, 22 nt, Human
ccuggaucccgauggcugugag

SEQ ID NO: 4326 - RNA, 22 nt, Human
ccuggauucaagucuuucuuuc

SEQ ID NO: 4327 - RNA, 22 nt, Human
ccuggauucucacuggacucca

SEQ ID NO: 4328 - RNA, 22 nt, Human
ccuggcaacauuucaaggucuu

SEQ ID NO: 4329 - RNA, 22 nt, Human
ccuggcaagugggcucccagau

SEQ ID NO: 4330 - RNA, 23 nt, Human
ccuggcacacaaggggugcugca

SEQ ID NO: 4331 - RNA, 22 nt, Human
ccuggcacacgguggcauucaa

SEQ ID NO: 4332 - RNA, 22 nt, Human
ccuggcacagagcgguggucac

SEQ ID NO: 4333 - RNA, 22 nt, Human
ccuggcacauaauaguggcuca

SEQ ID NO: 4334 - RNA, 22 nt, Human
ccuggcacauagugggcaugca

SEQ ID NO: 4335 - RNA, 22 nt, Human
ccuggcacaugcaguacucaag

SEQ ID NO: 4336 - RNA, 21 nt, Human
ccuggcagaagccugauaugc

SEQ ID NO: 4337 - RNA, 22 nt, Human
ccuggcagacugugagggcagg

SEQ ID NO: 4338 - RNA, 22 nt, Human
ccuggcagcccagagcgccgcu

SEQ ID NO: 4339 - RNA, 22 nt, Human
ccuggcagcgccgaagcuggcc

SEQ ID NO: 4340 - RNA, 22 nt, Human
ccuggcagguagcauugaggag

SEQ ID NO: 4341 - RNA, 22 nt, Human
ccuggcaguuuugcccaggauu

SEQ ID NO: 4342 - RNA, 20 nt, Human
ccuggccaaugagauaggaa

SEQ ID NO: 4343 - RNA, 22 nt, Human
ccuggccagccagggcuggggu

SEQ ID NO: 4344 - RNA, 22 nt, Human
ccuggccauagggcccaggaaa

SEQ ID NO: 4345 - RNA, 22 nt, Human
ccuggccauuugaacuucagac

SEQ ID NO: 4346 - RNA, 22 nt, Human
ccuggcccagggacuuucgccu

SEQ ID NO: 4347 - RNA, 22 nt, Human
ccuggcccuggaauagggcagg

SEQ ID NO: 4348 - RNA, 22 nt, Human
ccuggccgguaucccaccuccu

SEQ ID NO: 4349 - RNA, 22 nt, Human
ccuggccuccuggccuucucau

SEQ ID NO: 4350 - RNA, 22 nt, Human
ccuggccuggcacucccucugc

SEQ ID NO: 4351 - RNA, 22 nt, Human
ccuggccuuaagggcagggagc

SEQ ID NO: 4352 - RNA, 22 nt, Human
ccuggcuaggagagcugggcuc

SEQ ID NO: 4353 - RNA, 22 nt, Human
ccuggcucaaggcgaggacucc

SEQ ID NO: 4354 - RNA, 22 nt, Human
ccuggcucagaccccaguucug

SEQ ID NO: 4355 - RNA, 22 nt, Human
ccuggcucaggcacgcauggcu

SEQ ID NO: 4356 - RNA, 22 nt, Human
ccuuggcuuaccuucugugugg

SEQ ID NO: 4357 - RNA, 22 nt, Human
ccuuggcuuccuucccucuaga

SEQ ID NO: 4358 - RNA, 22 nt, Human
ccuugggacccugcuggagguu

SEQ ID NO: 4359 - RNA, 22 nt, Human
ccuugggcuugggcauagcuuu

SEQ ID NO: 4360 - RNA, 22 nt, Human
ccuuggguuccaagucacugaa

SEQ ID NO: 4361 - RNA, 22 nt, Human
ccuuggugcucugcugggaugg

SEQ ID NO: 4362 - RNA, 22 nt, Human
ccuugguuuccaggaugaggcu

SEQ ID NO: 4363 - RNA, 23 nt, Human
ccuugucuggcuggcuggacuuu

SEQ ID NO: 4364 - RNA, 22 nt, Human
ccuuguuucucucccagauaag

SEQ ID NO: 4365 - RNA, 22 nt, Human
ccuuuaauuuacaauguuaauu

SEQ ID NO: 4366 - RNA, 22 nt, Human
ccuuuacaguaugguuguauca

SEQ ID NO: 4367 - RNA, 20 nt, Human
ccuuuagaaacucauaugua

SEQ ID NO: 4368 - RNA, 22 nt, Human
ccuuuagaaagucaguaguugc

SEQ ID NO: 4369 - RNA, 20 nt, Human
ccuuuauuauuuguaugaug

SEQ ID NO: 4370 - RNA, 22 nt, Human
ccuuucagguacaccagggaug

SEQ ID NO: 4371 - RNA, 22 nt, Human
ccuuuccccgcgggaggugcca

SEQ ID NO: 4372 - RNA, 18 nt, Human
ccuuuccuccccucagcu

SEQ ID NO: 4373 - RNA, 22 nt, Human
ccuuucuaagauacugcaacuu

SEQ ID NO: 4374 - RNA, 22 nt, Human
ccuuucucauuuuaagcauuag

SEQ ID NO: 4375 - RNA, 22 nt, Human
ccuuucucuggcagcaggacag

SEQ ID NO: 4376 - RNA, 22 nt, Human
ccuuucuguguugcccuauuug

SEQ ID NO: 4377 - RNA, 22 nt, Human
ccuuucuuuuauccaccagcca

SEQ ID NO: 4378 - RNA, 22 nt, Human
ccuuugagccugggcgcggacc

SEQ ID NO: 4379 - RNA, 22 nt, Human
ccuuugcauucuagauguuuag

SEQ ID NO: 4380 - RNA, 22 nt, Human
ccuuugccaugacauggcacaa

SEQ ID NO: 4381 - RNA, 22 nt, Human
ccuuugggguccugccugggcu

SEQ ID NO: 4382 - RNA, 22 nt, Human
ccuuuggugguuuucagagauc

SEQ ID NO: 4383 - RNA, 22 nt, Human
ccuuuguaagaugugaagacug

SEQ ID NO: 4384 - RNA, 22 nt, Human
ccuuuguauuuaccuagucuca

SEQ ID NO: 4385 - RNA, 22 nt, Human
ccuuugugagguccuguggggg

SEQ ID NO: 4386 - RNA, 22 nt, Human
ccuuuuauaaaguuguauugaa

SEQ ID NO: 4387 - RNA, 22 nt, Human
ccuuuucuaaucuuaagaaugu

SEQ ID NO: 4388 - RNA, 22 nt, Human
ccuuuucugaaccacuuaaaua

SEQ ID NO: 4389 - RNA, 22 nt, Human
ccuuuugaggcuugggcucaga

SEQ ID NO: 4390 - RNA, 22 nt, Human
ccuuuugcucucccauccagaa

SEQ ID NO: 4391 - RNA, 22 nt, Human
ccuuuuucugaguuguagcuuc

SEQ ID NO: 4392 - RNA, 22 nt, Human
ccuuuuuucuaugccaacucug

SEQ ID NO: 4393 - RNA, 17 nt, Human
cguggcugagccauaga

SEQ ID NO: 4394 - RNA, 22 nt, Human
cguggcuggggaggucagccag

SEQ ID NO: 4395 - RNA, 22 nt, Human
cguggcugguggaccugagggc

SEQ ID NO: 4396 - RNA, 22 nt, Human
cgugggaggaaaaaugggcuuc

SEQ ID NO: 4397 - RNA, 22 nt, Human
cguguaaccccugaacucgcau

SEQ ID NO: 4398 - RNA, 22 nt, Human
cgugugcgugcauaugcacaag

SEQ ID NO: 4399 - RNA, 22 nt, Human
cguguuucagccagggccaccu

SEQ ID NO: 4400 - RNA, 17 nt, Human
cguuagugauuccugcc

SEQ ID NO: 4401 - RNA, 22 nt, Human
cguucucucaugaucuucccga

SEQ ID NO: 4402 - RNA, 22 nt, Human
cguuuacuguguaccaggcacu

SEQ ID NO: 4403 - RNA, 22 nt, Human
cguuuucauggguagagguucu

SEQ ID NO: 4404 - RNA, 22 nt, Human
cuaaaaacucuacgaugcacag

SEQ ID NO: 4405 - RNA, 22 nt, Human
cuaaaauuaucaagauaauucc

SEQ ID NO: 4406 - RNA, 22 nt, Human
cuaaacaagauacuaaugaggu

SEQ ID NO: 4407 - RNA, 22 nt, Human
cuaaacaaugaacaaagcacug

SEQ ID NO: 4408 - RNA, 22 nt, Human
cuaaacaggaaggagcaccuga

SEQ ID NO: 4409 - RNA, 22 nt, Human
cuaaacaugcaagagcuucugg

SEQ ID NO: 4410 - RNA, 22 nt, Human
cuaaaggcuaggucugaacuca

SEQ ID NO: 4411 - RNA, 22 nt, Human
cuaaagugccaggaauacaggu

SEQ ID NO: 4412 - RNA, 17 nt, Human
cuaaauacuugcguuuc

SEQ ID NO: 4413 - RNA, 22 nt, Human
cuaaaucaucauuuauguuugu

SEQ ID NO: 4414 - RNA, 22 nt, Human
cuaaaugauggauuuaaacuuu

SEQ ID NO: 4415 - RNA, 22 nt, Human
cuaaaugucagaguagcuugca

SEQ ID NO: 4416 - RNA, 22 nt, Human
cuaaaugugacucaccaucuca

SEQ ID NO: 4417 - RNA, 22 nt, Human
cuaaccugcauggcagcuagaa

SEQ ID NO: 4418 - RNA, 22 nt, Human
cuaacgaauauguaugcauguu

SEQ ID NO: 4419 - RNA, 20 nt, Human
cuaacuaaccacuuucugau

SEQ ID NO: 4420 - RNA, 22 nt, Human
cuaacuacaagcggggcauccu

SEQ ID NO: 4421 - RNA, 22 nt, Human
cuaagaaauguugugaaugcca

SEQ ID NO: 4422 - RNA, 22 nt, Human
cuaagaaggaggaaaagugcca

SEQ ID NO: 4423 - RNA, 22 nt, Human
cuaagcaagaaugagugcaaca

SEQ ID NO: 4424 - RNA, 22 nt, Human
cuaagcuuuucaaaaacauguu

SEQ ID NO: 4425 - RNA, 22 nt, Human
cuaaggaaaggaaauacaguaa

SEQ ID NO: 4426 - RNA, 22 nt, Human
cuaaggaauucaaauaguuagu

SEQ ID NO: 4427 - RNA, 19 nt, Human
cuaaggcaagaaacuggac

SEQ ID NO: 4428 - RNA, 22 nt, Human
cuaaggcagacagaauauuugg

SEQ ID NO: 4429 - RNA, 22 nt, Human
cuaaggguugaaacagcaagaa

SEQ ID NO: 4430 - RNA, 22 nt, Human
cuaauagauaccacauuggaca

SEQ ID NO: 4431 - RNA, 20 nt, Human
cuaauauucuacucuaagga

SEQ ID NO: 4432 - RNA, 22 nt, Human
cuaauauuuuuagaaaucacga

SEQ ID NO: 4433 - RNA, 22 nt, Human
cuaaucaucuuucucuuaaagc

SEQ ID NO: 4434 - RNA, 22 nt, Human
cuaauguaaaacagacuugcau

SEQ ID NO: 4435 - RNA, 22 nt, Human
cuaauguaucauggcucucagc

SEQ ID NO: 4436 - RNA, 22 nt, Human
cuacaaagaaagcugaggggaa

SEQ ID NO: 4437 - RNA, 22 nt, Human
cuacaaauccacaaggcacuuu

SEQ ID NO: 4438 - RNA, 22 nt, Human
cuacaacauagucuucuacaga

SEQ ID NO: 4439 - RNA, 22 nt, Human
cuacaacauuaugcuuucuguc

SEQ ID NO: 4440 - RNA, 22 nt, Human
cuacacuagaguugcaauggaa

SEQ ID NO: 4441 - RNA, 22 nt, Human
cuacagaagaaacuaucacuau

SEQ ID NO: 4442 - RNA, 22 nt, Human
cuacagaaggagaaauggguaa

SEQ ID NO: 4443 - RNA, 22 nt, Human
cuacagaauucaacaaaugguu

SEQ ID NO: 4444 - RNA, 22 nt, Human
cuacagacccaccuuggaagaa

SEQ ID NO: 4445 - RNA, 22 nt, Human
cuacagagaacucagcugcccu

SEQ ID NO: 4446 - RNA, 22 nt, Human
cuacagagaauugugugauuuu

SEQ ID NO: 4447 - RNA, 22 nt, Human
cuacagaggacacaaagaucuu

SEQ ID NO: 4448 - RNA, 21 nt, Human
cuacagaggagagggaaaggc

SEQ ID NO: 4449 - RNA, 22 nt, Human
cuacagaguaucuaaagaggua

SEQ ID NO: 4450 - RNA, 22 nt, Human
cuacagcagagaccagccacau

SEQ ID NO: 4451 - RNA, 22 nt, Human
cuacagcagagcuacacuaacu

SEQ ID NO: 4452 - RNA, 22 nt, Human
cuacagccagaugcagaaaguu

SEQ ID NO: 4453 - RNA, 22 nt, Human
cuacagcuguaaaaggaauguc

SEQ ID NO: 4454 - RNA, 22 nt, Human
cuacagcuguguguuuaugugc

SEQ ID NO: 4455 - RNA, 22 nt, Human
cuacaggucaguaagaccuaga

SEQ ID NO: 4456 - RNA, 22 nt, Human
cuacagugaagacuagcuauag

SEQ ID NO: 4457 - RNA, 22 nt, Human
cuacauacuguguguaaagaau

SEQ ID NO: 4458 - RNA, 22 nt, Human
cuacaucucaccuuccaggaca

SEQ ID NO: 4459 - RNA, 22 nt, Human
cuacauucugggaaaucagaug

SEQ ID NO: 4460 - RNA, 22 nt, Human
cuacauuuacacaguuaggcuu

SEQ ID NO: 4461 - RNA, 22 nt, Human
cuacauuuugugauuaugaaau

SEQ ID NO: 4462 - RNA, 22 nt, Human
cuacccagagugaaucucuuaa

SEQ ID NO: 4463 - RNA, 21 nt, Human
cuacccucuccugcucauauc

SEQ ID NO: 4464 - RNA, 22 nt, Human
cuaccuaauaauuugauauuca

SEQ ID NO: 4465 - RNA, 22 nt, Human
cuaccuucaaguuccucccucu

SEQ ID NO: 4466 - RNA, 22 nt, Human
cuaccuuucugacucuugggau

SEQ ID NO: 4467 - RNA, 22 nt, Human
cuacuagaucaguaugccucaa

SEQ ID NO: 4468 - RNA, 22 nt, Human
cuacugaaacucagaaauucaa

SEQ ID NO: 4469 - RNA, 22 nt, Human
cuacugaugauguugguugugg

SEQ ID NO: 4470 - RNA, 23 nt, Human
cuacugccuugcacaggcuagau

SEQ ID NO: 4471 - RNA, 22 nt, Human
cuacuguaguuaaaguuuugua

SEQ ID NO: 4472 - RNA, 22 nt, Human
cuacugucucaucaguguuauu

SEQ ID NO: 4473 - RNA, 22 nt, Human
cuacugucuuccuugguaacaa

SEQ ID NO: 4474 - RNA, 22 nt, Human
ccuggcucaguguugaaggggu

SEQ ID NO: 4475 - RNA, 22 nt, Human
ccuggcuccaaagcugugacuc

SEQ ID NO: 4476 - RNA, 22 nt, Human
ccuggcuccgugucacgugccc

SEQ ID NO: 4477 - RNA, 22 nt, Human
ccuggcuccugcacagaucuuu

SEQ ID NO: 4478 - RNA, 22 nt, Human
ccuggcucugggaucuucgcuu

SEQ ID NO: 4479 - RNA, 22 nt, Human
ccuggcucuguccucgcgcaaa

SEQ ID NO: 4480 - RNA, 22 nt, Human
ccuggcugacagcuuaauucca

SEQ ID NO: 4481 - RNA, 23 nt, Human
ccuggcugaccugaagguguagu

SEQ ID NO: 4482 - RNA, 22 nt, Human
ccuggcugcaguuuuugcagaa

SEQ ID NO: 4483 - RNA, 22 nt, Human
ccuggcugccgagugugcagcg

SEQ ID NO: 4484 - RNA, 22 nt, Human
ccuggcugcuauagcagcaugu

SEQ ID NO: 4485 - RNA, 22 nt, Human
ccuggcuggacuggaccguggc

SEQ ID NO: 4486 - RNA, 17 nt, Human
ccuggcugggaaucuga

SEQ ID NO: 4487 - RNA, 22 nt, Human
ccuggcugggccugauuucuca

SEQ ID NO: 4488 - RNA, 22 nt, Human
ccuggcugugcauguuucuaug

SEQ ID NO: 4489 - RNA, 22 nt, Human
ccuggcuguuuauuucggggcu

SEQ ID NO: 4490 - RNA, 22 nt, Human
ccuggcuucagcauugcccucu

SEQ ID NO: 4491 - RNA, 21 nt, Human
ccuggcuucagggugcacugg

SEQ ID NO: 4492 - RNA, 23 nt, Human
ccuggcuucauucucuuagggug

SEQ ID NO: 4493 - RNA, 22 nt, Human
ccuggcuuccuucaugaccugg

SEQ ID NO: 4494 - RNA, 22 nt, Human
ccuggcuucugggucugugaga

SEQ ID NO: 4495 - RNA, 22 nt, Human
ccuggcuuuagcugccuucccu

SEQ ID NO: 4496 - RNA, 22 nt, Human
ccuggcuuucucauuuacaggc

SEQ ID NO: 4497 - RNA, 20 nt, Human
ccuggcuuugcagcaugaga

SEQ ID NO: 4498 - RNA, 22 nt, Human
ccuggcuuuuguuuauaaauuc

SEQ ID NO: 4499 - RNA, 22 nt, Human
ccugggaaagugaggucauuau

SEQ ID NO: 4500 - RNA, 22 nt, Human
ccugggaaggucuuagcaucua

SEQ ID NO: 4501 - RNA, 22 nt, Human
ccugggaaucugcauugucagc

SEQ ID NO: 4502 - RNA, 19 nt, Human
gaggggaggaauugacaag

SEQ ID NO: 4503 - RNA, 22 nt, Human
gaggggaguguccuccgggccc

SEQ ID NO: 4504 - RNA, 22 nt, Human
gaggggauuggaaggaacaccc

SEQ ID NO: 4505 - RNA, 22 nt, Human
gaggggcaagaaguuggccucu

SEQ ID NO: 4506 - RNA, 21 nt, Human
gaggggcagcucuuagcauua

SEQ ID NO: 4507 - RNA, 22 nt, Human
gaggggcaguugauugugcuau

SEQ ID NO: 4508 - RNA, 22 nt, Human
gaggggccuggcgaggacaugu

SEQ ID NO: 4509 - RNA, 22 nt, Human
gaggggcguccugagugggccu

SEQ ID NO: 4510 - RNA, 22 nt, Human
gaggggcugggcagucccugga

SEQ ID NO: 4511 - RNA, 22 nt, Human
gaggggcugggguugacuccaa

SEQ ID NO: 4512 - RNA, 22 nt, Human
gagggggcuagcgcagugccca

SEQ ID NO: 4513 - RNA, 22 nt, Human
gaggggucacaugggcuggcuu

SEQ ID NO: 4514 - RNA, 22 nt, Human
gagggugcaggaggaugguagu

SEQ ID NO: 4515 - RNA, 22 nt, Human
gagggugcugugccaagaugac

SEQ ID NO: 4516 - RNA, 22 nt, Human
gagggugguggcuuaaggugcu

SEQ ID NO: 4517 - RNA, 22 nt, Human
gagggugucugcguaacuggca

SEQ ID NO: 4518 - RNA, 22 nt, Human
gagguaagggcaggagagugaa

SEQ ID NO: 4519 - RNA, 22 nt, Human
gagguagguguaggaggccugc

SEQ ID NO: 4520 - RNA, 22 nt, Human
gagguauguaugcuacauucuu

SEQ ID NO: 4521 - RNA, 22 nt, Human
gagguauuugauccucugcagu

SEQ ID NO: 4522 - RNA, 22 nt, Human
gagguauuuuugcaugccugau

SEQ ID NO: 4523 - RNA, 19 nt, Human
gaggucagcaagaaguauu

SEQ ID NO: 4524 - RNA, 22 nt, Human
gaggucaggcuugcagcagggu

SEQ ID NO: 4525 - RNA, 22 nt, Human
gaggucaugcaaaauugaauca

SEQ ID NO: 4526 - RNA, 22 nt, Human
gagguccagccaagcggcaagg

SEQ ID NO: 4527 - RNA, 18 nt, Human
gagguccugcucuagccc

SEQ ID NO: 4528 - RNA, 22 nt, Human
gaggucugagugcggaaagccu

SEQ ID NO: 4529 - RNA, 22 nt, Human
gaggucugggauggggccugaa

SEQ ID NO: 4530 - RNA, 22 nt, Human
gaggugaugguugcacaaugcu

SEQ ID NO: 4531 - RNA, 22 nt, Human
gagguggaggggaaaaauagau

SEQ ID NO: 4532 - RNA, 22 nt, Human
gagguggcaauuuaaugcaguc

SEQ ID NO: 4533 - RNA, 22 nt, Human
gagguggcacugugaggagcac

SEQ ID NO: 4534 - RNA, 22 nt, Human
gagguggcauuaagauucuggu

SEQ ID NO: 4535 - RNA, 18 nt, Human
gagguggcugggccaucu

SEQ ID NO: 4536 - RNA, 22 nt, Human
gagguggguguaucacagguca

SEQ ID NO: 4537 - RNA, 22 nt, Human
gagguggucgaggagggguacc

SEQ ID NO: 4538 - RNA, 22 nt, Human
gaggugguuuguggugacucau

SEQ ID NO: 4539 - RNA, 22 nt, Human
gaggugucaggguagucaugau

SEQ ID NO: 4540 - RNA, 22 nt, Human
gagguguccucagccaacucug

SEQ ID NO: 4541 - RNA, 22 nt, Human
gaggugugaggaaugaaugggg

SEQ ID NO: 4542 - RNA, 22 nt, Human
gaggugugcacagcgugcugac

SEQ ID NO: 4543 - RNA, 22 nt, Human
gaggugugguccucagccccca

SEQ ID NO: 4544 - RNA, 19 nt, Human
gagguucacgcgcuggaug

SEQ ID NO: 4545 - RNA, 22 nt, Human
gagguucaguaaggaauacuga

SEQ ID NO: 4546 - RNA, 22 nt, Human
gagguucaguccugcucuguca

SEQ ID NO: 4547 - RNA, 22 nt, Human
gagguucauucagcucugucac

SEQ ID NO: 4548 - RNA, 22 nt, Human
gagguuccagacagcuuaggga

SEQ ID NO: 4549 - RNA, 22 nt, Human
gagguuccccauuguacuggcu

SEQ ID NO: 4550 - RNA, 22 nt, Human
gagguucugggggucugccugg

SEQ ID NO: 4551 - RNA, 22 nt, Human
gagguugggaugagggauacag

SEQ ID NO: 4552 - RNA, 22 nt, Human
gagguuguuucaacaguagucu

SEQ ID NO: 4553 - RNA, 22 nt, Human
gagguuuuaaguugaaggggga

SEQ ID NO: 4554 - RNA, 22 nt, Human
gaguaaaauaggugagaaucaa

SEQ ID NO: 4555 - RNA, 22 nt, Human
gaguaacaaauacuucaguagu

SEQ ID NO: 4556 - RNA, 22 nt, Human
gaguaacaucuggaaccgacac

SEQ ID NO: 4557 - RNA, 22 nt, Human
gaguaauauucuguacuggagg

SEQ ID NO: 4558 - RNA, 22 nt, Human
gaguaauuagagcaaugacuuu

SEQ ID NO: 4559 - RNA, 22 nt, Human
gaguaauucugguaaaucauug

SEQ ID NO: 4560 - RNA, 22 nt, Human
gaguaauuuucuugauuucuua

SEQ ID NO: 4561 - RNA, 22 nt, Human
gaguacaucuuaauuugacuaa

SEQ ID NO: 4562 - RNA, 22 nt, Human
gaguacauguauagagauuaac

SEQ ID NO: 4563 - RNA, 22 nt, Human
gaguagaaaguaaaguacgaau

SEQ ID NO: 4564 - RNA, 22 nt, Human
gaguagaacuagaauucuucaa

SEQ ID NO: 4565 - RNA, 22 nt, Human
gaguagacauuaaauuacacug

SEQ ID NO: 4566 - RNA, 22 nt, Human
gaguagcagccacagaggaccc

SEQ ID NO: 4567 - RNA, 22 nt, Human
gaguaggguuuccagguuagag

SEQ ID NO: 4568 - RNA, 22 nt, Human
gaguaguugcugcagagaauac

SEQ ID NO: 4569 - RNA, 22 nt, Human
gaguauauauagacaugucaca

SEQ ID NO: 4570 - RNA, 20 nt, Human
gaguauauuucuuccuuugc

SEQ ID NO: 4571 - RNA, 22 nt, Human
gaguauuccucagucauuuugu

SEQ ID NO: 4572 - RNA, 22 nt, Human
gaguauuuauauguaaguaccu

SEQ ID NO: 4573 - RNA, 22 nt, Human
gagucacauacuauguaauaga

SEQ ID NO: 4574 - RNA, 22 nt, Human
gagucaccuuggccgcuguccc

SEQ ID NO: 4575 - RNA, 22 nt, Human
gagucagaaaguagugugccua

SEQ ID NO: 4576 - RNA, 22 nt, Human
gagucaggaguuaugcuccacc

SEQ ID NO: 4577 - RNA, 22 nt, Human
gagucagguccguggacaguua

SEQ ID NO: 4578 - RNA, 22 nt, Human
gagucauuguuggucccucccc

SEQ ID NO: 4579 - RNA, 22 nt, Human
gaguccaggcuguugcucaucu

SEQ ID NO: 4580 - RNA, 20 nt, Human
gaguccaggggccuguagca

SEQ ID NO: 4581 - RNA, 22 nt, Human
gaguccaguaguuaggacagag

SEQ ID NO: 4582 - RNA, 22 nt, Human
gaguccaguucuuuccagcagu

SEQ ID NO: 4583 - RNA, 22 nt, Human
gagucccaggaaugagcauagu

SEQ ID NO: 4584 - RNA, 22 nt, Human
gagucccaggauaugugcuguu

SEQ ID NO: 4585 - RNA, 22 nt, Human
gaguccucaacggggagaggcg

SEQ ID NO: 4586 - RNA, 22 nt, Human
gaguccugcccuuguguagucc

SEQ ID NO: 4587 - RNA, 22 nt, Human
ccuguucuguagugaguuugag

SEQ ID NO: 4588 - RNA, 22 nt, Human
ccuguuguuuagcacuuagaac

SEQ ID NO: 4589 - RNA, 22 nt, Human
ccuguuuauccaugccaauccu

SEQ ID NO: 4590 - RNA, 22 nt, Human
ccuguuuaucuaucuagagaug

SEQ ID NO: 4591 - RNA, 22 nt, Human
ccuguuugguacaaucugccaa

SEQ ID NO: 4592 - RNA, 22 nt, Human
ccuuaaauucuccauuugaaag

SEQ ID NO: 4593 - RNA, 22 nt, Human
ccuuacaccuaaaaugagaguu

SEQ ID NO: 4594 - RNA, 22 nt, Human
ccuuagagaguacugggcugcc

SEQ ID NO: 4595 - RNA, 22 nt, Human
ccuuagcaaauuggcaucuucu

SEQ ID NO: 4596 - RNA, 22 nt, Human
ccuuagcaacugucauagagca

SEQ ID NO: 4597 - RNA, 17 nt, Human
ccuuagggcaguguggu

SEQ ID NO: 4598 - RNA, 22 nt, Human
ccuuagugaaacagaggcaauu

SEQ ID NO: 4599 - RNA, 22 nt, Human
ccuucaaauucucuuagcugaa

SEQ ID NO: 4600 - RNA, 22 nt, Human
ccuucaaauuuagaacaaguga

SEQ ID NO: 4601 - RNA, 22 nt, Human
ccuucaaucagcagucuagcuu

SEQ ID NO: 4602 - RNA, 22 nt, Human
ccuucagaaugaaauucuaaug

SEQ ID NO: 4603 - RNA, 22 nt, Human
ccuucagucccauguuucucuu

SEQ ID NO: 4604 - RNA, 22 nt, Human
ccuucaugucauuggacaccuu

SEQ ID NO: 4605 - RNA, 22 nt, Human
ccuucauugcaucuuuaagaga

SEQ ID NO: 4606 - RNA, 22 nt, Human
ccuuccaaaggagccacaucug

SEQ ID NO: 4607 - RNA, 22 nt, Human
ccuuccaagugcugcuuuuucc

SEQ ID NO: 4608 - RNA, 22 nt, Human
ccuuccagauguaagagcugau

SEQ ID NO: 4609 - RNA, 22 nt, Human
ccuuccagggagcaggcagugu

SEQ ID NO: 4610 - RNA, 22 nt, Human
ccuuccaguauguuaagauggu

SEQ ID NO: 4611 - RNA, 21 nt, Human
ccugugugucugacugggcua

SEQ ID NO: 4612 - RNA, 22 nt, Human
ccuguguuuagauaugaugcug

SEQ ID NO: 4613 - RNA, 22 nt, Human
ccuguucacugcacaguuuccg

SEQ ID NO: 4614 - RNA, 22 nt, Human
ccuguucagagcuaagcaucau

SEQ ID NO: 4615 - RNA, 22 nt, Human
ccuguucauuuuuugacucugc

SEQ ID NO: 4616 - RNA, 22 nt, Human
ccuguucuguggcucucaaagg

SEQ ID NO: 4617 - RNA, 22 nt, Human
ccuguucuguuaauuaaacuuu

SEQ ID NO: 4618 - RNA, 19 nt, Human
ccuguucuuggcugaggcu

SEQ ID NO: 4619 - RNA, 23 nt, Human
ccuguugggacagcuuuaccaga

SEQ ID NO: 4620 - RNA, 22 nt, Human
ccuguugucucuuccuguugac

SEQ ID NO: 4621 - RNA, 22 nt, Human
ccuguuuacaucaucaaggacu

SEQ ID NO: 4622 - RNA, 22 nt, Human
ccuguuuauugugaagaaccca

SEQ ID NO: 4623 - RNA, 23 nt, Human
ccuuaaauaucuacccuguggca

SEQ ID NO: 4624 - RNA, 22 nt, Human
ccuuacacugccuggggccacg

SEQ ID NO: 4625 - RNA, 22 nt, Human
ccuuaccugauugcuggcaucc

SEQ ID NO: 4626 - RNA, 22 nt, Human
ccuuagacuggagcuaugccgu

SEQ ID NO: 4627 - RNA, 22 nt, Human
ccuuagaggcaggaagaauugc

SEQ ID NO: 4628 - RNA, 22 nt, Human
ccuuagaucaggcugucuaggg

SEQ ID NO: 4629 - RNA, 22 nt, Human
ccuuagcaacacuuagcaacug

SEQ ID NO: 4630 - RNA, 22 nt, Human
ccuuaggggugacagaaauacc

SEQ ID NO: 4631 - RNA, 21 nt, Human
ccuuagucuuccacauagucc

SEQ ID NO: 4632 - RNA, 22 nt, Human
ccuuagugugaggggauacccc

SEQ ID NO: 4633 - RNA, 22 nt, Human
ccuuagugugccugaggcagau

SEQ ID NO: 4634 - RNA, 22 nt, Human
ccuuaucacaauggagugucac

SEQ ID NO: 4635 - RNA, 22 nt, Human
ccuucaaaacacuaguuuuuga

SEQ ID NO: 4636 - RNA, 22 nt, Human
ccuucaaacuuucauuaaccag

SEQ ID NO: 4637 - RNA, 22 nt, Human
ccuucaaagaguauuuccugag

SEQ ID NO: 4638 - RNA, 22 nt, Human
ccuucaaaguacacaucuuuau

SEQ ID NO: 4639 - RNA, 22 nt, Human
ccuucaaggcaaggagggcugg

SEQ ID NO: 4640 - RNA, 22 nt, Human
ccuucacacagguagaagcaga

SEQ ID NO: 4641 - RNA, 22 nt, Human
ccuucagaccuagacaggaauc

SEQ ID NO: 4642 - RNA, 22 nt, Human
ccuucagagguguagauugcgu

SEQ ID NO: 4643 - RNA, 22 nt, Human
ccuucagccaguuuucuuuguu

SEQ ID NO: 4644 - RNA, 22 nt, Human
ccuucauucauuaauuuagccc

SEQ ID NO: 4645 - RNA, 22 nt, Human
ccuuccaagugcuugccgcuuu

SEQ ID NO: 4646 - RNA, 22 nt, Human
ccuuccagaggcgugacacccu

SEQ ID NO: 4647 - RNA, 19 nt, Human
ccuuccagcuccuuuucag

SEQ ID NO: 4648 - RNA, 22 nt, Human
ccuuccaggugcaggcaagccu

SEQ ID NO: 4649 - RNA, 22 nt, Human
ccuuccagguuuuggcuccauu

SEQ ID NO: 4650 - RNA, 22 nt, Human
ccuuccucauccauuucucuug

SEQ ID NO: 4651 - RNA, 17 nt, Human
ccuuccucaucuccuuc

SEQ ID NO: 4652 - RNA, 19 nt, Human
ccuuccuccccagggccau

SEQ ID NO: 4653 - RNA, 22 nt, Human
ccuuccuggcuguccgccugau

SEQ ID NO: 4654 - RNA, 21 nt, Human
ccuucuccacagggucuccgg

SEQ ID NO: 4655 - RNA, 22 nt, Human
ccuucucccucugagaggaacc

SEQ ID NO: 4656 - RNA, 22 nt, Human
ccuucucucugaagaccccaaa

SEQ ID NO: 4657 - RNA, 22 nt, Human
ccuucucugcagguaguuggcu

SEQ ID NO: 4658 - RNA, 22 nt, Human
ccuucugauacugacaucauuu

SEQ ID NO: 4659 - RNA, 22 nt, Human
ccuucuuaaacaucauuuuggc

SEQ ID NO: 4660 - RNA, 22 nt, Human
ccuugaaagccaggcagaggaa

SEQ ID NO: 4661 - RNA, 22 nt, Human
ccuugcaggggaacaggcagug

SEQ ID NO: 4662 - RNA, 22 nt, Human
ccuugcauauauuauaucuuug

SEQ ID NO: 4663 - RNA, 20 nt, Human
ccuugccaguagggcuggga

SEQ ID NO: 4664 - RNA, 22 nt, Human
ccuugcucaagcuagugacggg

SEQ ID NO: 4665 - RNA, 22 nt, Human
ccuugcucaucccccagugccu

SEQ ID NO: 4666 - RNA, 22 nt, Human
ccuuggagaagacagugccagg

SEQ ID NO: 4667 - RNA, 22 nt, Human
ccuuggaggacugcugcuucuu

SEQ ID NO: 4668 - RNA, 19 nt, Human
ccuuggaguuccaggugga

SEQ ID NO: 4669 - RNA, 22 nt, Human
ccuuggcaggcacguccugcgg

SEQ ID NO: 4670 - RNA, 22 nt, Human
ccuuggcccuagccucaggcaa

SEQ ID NO: 4671 - RNA, 22 nt, Human
ccuuggcuggaauuacucuggg

SEQ ID NO: 4672 - RNA, 21 nt, Human
ccuuggcuggcaucuagcacc

SEQ ID NO: 4673 - RNA, 22 nt, Human
ccuuggcuguguugccugcccu

SEQ ID NO: 4674 - RNA, 22 nt, Human
ccuuggcuugcacacggccacc

SEQ ID NO: 4675 - RNA, 21 nt, Human
ccuugggaugcaagugagacu

SEQ ID NO: 4676 - RNA, 22 nt, Human
ccuugggauuucucaugccaau

SEQ ID NO: 4677 - RNA, 22 nt, Human
ccuuggggaacuggacgugcug

SEQ ID NO: 4678 - RNA, 22 nt, Human
ccuuggggaauauccauucuuc

SEQ ID NO: 4679 - RNA, 22 nt, Human
ccuuguccucugguuuccuguu

SEQ ID NO: 4680 - RNA, 22 nt, Human
ccuugugcagguucaugauggg

SEQ ID NO: 4681 - RNA, 22 nt, Human
ccuuguguuuacaccugucuuu

SEQ ID NO: 4682 - RNA, 22 nt, Human
ccuuuacaguagcccuuuugaa

SEQ ID NO: 4683 - RNA, 22 nt, Human
ccuuuagaauucugccccuccu

SEQ ID NO: 4684 - RNA, 22 nt, Human
ccuuuagagcaaacgccaccua

SEQ ID NO: 4685 - RNA, 22 nt, Human
ccuuuagaugaucucuuggaca

SEQ ID NO: 4686 - RNA, 22 nt, Human
ccuuucaaaacagaacacuagc

SEQ ID NO: 4687 - RNA, 22 nt, Human
ccuuucaaauuacaugacugcu

SEQ ID NO: 4688 - RNA, 22 nt, Human
ccuuucccgcuuugagggcaag

SEQ ID NO: 4689 - RNA, 22 nt, Human
ccuuuccuguguccuuuuaagg

SEQ ID NO: 4690 - RNA, 22 nt, Human
ccuuuccuuuuuagugugggag

SEQ ID NO: 4691 - RNA, 22 nt, Human
ccuuucuacagaugccucuugc

SEQ ID NO: 4692 - RNA, 16 nt, Human
ccuuucucugccuucc

SEQ ID NO: 4693 - RNA, 22 nt, Human
ccuuucucuuugcugaucaugu

SEQ ID NO: 4694 - RNA, 20 nt, Human
ccuuucuggagugcuguuca

SEQ ID NO: 4695 - RNA, 21 nt, Human
ccuuugaguguguuugaagua

SEQ ID NO: 4696 - RNA, 22 nt, Human
ccuuugcauuauccuugauuga

SEQ ID NO: 4697 - RNA, 22 nt, Human
ccuuugcauuuauguguccauu

SEQ ID NO: 4698 - RNA, 22 nt, Human
ccuuuggagaguuuguuagggg

SEQ ID NO: 4699 - RNA, 22 nt, Human
ccuuuggcauuuugaggaugcg

SEQ ID NO: 4700 - RNA, 22 nt, Human
ccuuugggugaauuccucucuu

SEQ ID NO: 4701 - RNA, 22 nt, Human
ccuuuggguucaaucucggucu

SEQ ID NO: 4702 - RNA, 22 nt, Human
ccuuuggucaccuccacucuua

SEQ ID NO: 4703 - RNA, 19 nt, Human
ccuuugguuuccaugacau

SEQ ID NO: 4704 - RNA, 22 nt, Human
ccuuuguauacaguucuuguga

SEQ ID NO: 4705 - RNA, 19 nt, Human
cgcacagccugccaggcgc

SEQ ID NO: 4706 - RNA, 22 nt, Human
cgcacuggagcuggaacgaguc

SEQ ID NO: 4707 - RNA, 22 nt, Human
cgcagaagagguugucuagucc

SEQ ID NO: 4708 - RNA, 21 nt, Human
cgcagagcgaacuugcggcgc

SEQ ID NO: 4709 - RNA, 19 nt, Human
cgcagagggcuucugagag

SEQ ID NO: 4710 - RNA, 22 nt, Human
cgcagcugcacggggcugagcc

SEQ ID NO: 4711 - RNA, 22 nt, Human
cgcagcugcugcucugaaacag

SEQ ID NO: 4712 - RNA, 22 nt, Human
cgcagcuguccauguguggggg

SEQ ID NO: 4713 - RNA, 22 nt, Human
cgcaggaagacaaggguggaaa

SEQ ID NO: 4714 - RNA, 22 nt, Human
cgcaggcaagagaguacaguua

SEQ ID NO: 4715 - RNA, 22 nt, Human
cgcagggauuucaaggggccuu

SEQ ID NO: 4716 - RNA, 22 nt, Human
cgcaggugaacuguucugcagu

SEQ ID NO: 4717 - RNA, 19 nt, Human
cgcagguggaaggagccgc

SEQ ID NO: 4718 - RNA, 22 nt, Human
cgcaggugggcccuucauugau

SEQ ID NO: 4719 - RNA, 22 nt, Human
cgccaguauguggcugucuuug

SEQ ID NO: 4720 - RNA, 22 nt, Human
cucagcuacgcuuucaccagcu

SEQ ID NO: 4721 - RNA, 22 nt, Human
cucagcucacucuuuugugcuu

SEQ ID NO: 4722 - RNA, 22 nt, Human
cucagcucugacaggaggcauc

SEQ ID NO: 4723 - RNA, 22 nt, Human
cucagcucuuuauacuagcugu

SEQ ID NO: 4724 - RNA, 22 nt, Human
cucagcugucucaugggucugu

SEQ ID NO: 4725 - RNA, 22 nt, Human
cucaggaaaauauugaagaagu

SEQ ID NO: 4726 - RNA, 22 nt, Human
cucaggaaaggccaugcaaggg

SEQ ID NO: 4727 - RNA, 22 nt, Human
cucaggacagauuccagagaaa

SEQ ID NO: 4728 - RNA, 22 nt, Human
cucaggacccaccuuauuagga

SEQ ID NO: 4729 - RNA, 22 nt, Human
cuccuuaaguaugggcugugca

SEQ ID NO: 4730 - RNA, 22 nt, Human
cuccuucaaaagucauaguaaa

SEQ ID NO: 4731 - RNA, 22 nt, Human
cuccuucagcugaaucccugcu

SEQ ID NO: 4732 - RNA, 22 nt, Human
cuccuuccaacaagagaaagag

SEQ ID NO: 4733 - RNA, 22 nt, Human
cuccuucuccucgggaggccag

SEQ ID NO: 4734 - RNA, 22 nt, Human
cuccuucugaggcucuggguuc

SEQ ID NO: 4735 - RNA, 22 nt, Human
cuccuuugaucccaaaugaccc

SEQ ID NO: 4736 - RNA, 22 nt, Human
cucgcaagucgcuccgguuacu

SEQ ID NO: 4737 - RNA, 22 nt, Human
cucgccccggcacaguguccgu

SEQ ID NO: 4738 - RNA, 22 nt, Human
cucuaauacugaccaagucacc

SEQ ID NO: 4739 - RNA, 21 nt, Human
cucuacauucccagcaacucu

SEQ ID NO: 4740 - RNA, 22 nt, Human
cucuacucuuaacacagcuagg

SEQ ID NO: 4741 - RNA, 22 nt, Human
cucuagaaagauuguugaccaa

SEQ ID NO: 4742 - RNA, 22 nt, Human
cucuagaguacgggcuggcaug

SEQ ID NO: 4743 - RNA, 22 nt, Human
cucuaggggcuggucagcgucu

SEQ ID NO: 4744 - RNA, 22 nt, Human
cucucaaauguaauuugagguu

SEQ ID NO: 4745 - RNA, 19 nt, Human
cucucacucgccacauccu

SEQ ID NO: 4746 - RNA, 22 nt, Human
cucucagaaguuuaugucagaa

SEQ ID NO: 4747 - RNA, 19 nt, Human
cucucagccugucuccuug

SEQ ID NO: 4748 - RNA, 22 nt, Human
cucucaggcuugggucguggca

SEQ ID NO: 4749 - RNA, 22 nt, Human
cucucagggacccagccagccu

SEQ ID NO: 4750 - RNA, 22 nt, Human
cucucagggucccugcggagga

SEQ ID NO: 4751 - RNA, 22 nt, Human
cucucaugagcauuccuaaggg

SEQ ID NO: 4752 - RNA, 19 nt, Human
cucuccaccuaacagguau

SEQ ID NO: 4753 - RNA, 22 nt, Human
cucuccacucagcgucaugucc

SEQ ID NO: 4754 - RNA, 22 nt, Human
cucuccacuguccuuugcuggu

SEQ ID NO: 4755 - RNA, 22 nt, Human
cucuccaggacuuuggcccaau

SEQ ID NO: 4756 - RNA, 22 nt, Human
cucuccaggggaacauuguucc

SEQ ID NO: 4757 - RNA, 21 nt, Human
cucuccagugguuccugauuc

SEQ ID NO: 4758 - RNA, 22 nt, Human
cucuccauucccuacaguuuuc

SEQ ID NO: 4759 - RNA, 20 nt, Human
cucucccagcacagcuuccu

SEQ ID NO: 4760 - RNA, 22 nt, Human
cucuccccacacccucugcaug

SEQ ID NO: 4761 - RNA, 22 nt, Human
cucucccuagguuagcggucag

SEQ ID NO: 4762 - RNA, 22 nt, Human
cucucccucauuggguuccauu

SEQ ID NO: 4763 - RNA, 22 nt, Human
cucuccuccaacagcccugccg

SEQ ID NO: 4764 - RNA, 22 nt, Human
cucuccugggcugaccguccga

SEQ ID NO: 4765 - RNA, 22 nt, Human
cucuccuuucacuaaauauucu

SEQ ID NO: 4766 - RNA, 22 nt, Human
cucucuccuuagcugcagacca

SEQ ID NO: 4767 - RNA, 20 nt, Human
cucucucuccauucccaggg

SEQ ID NO: 4768 - RNA, 22 nt, Human
cucucugaugucaggucgcuga

SEQ ID NO: 4769 - RNA, 22 nt, Human
cucucuggcacuucauugcugu

SEQ ID NO: 4770 - RNA, 22 nt, Human
cucucugggggccaugccaaga

SEQ ID NO: 4771 - RNA, 22 nt, Human
cucucugggguuccagacgugg

SEQ ID NO: 4772 - RNA, 22 nt, Human
cucucugguuucagcgaagggg

SEQ ID NO: 4773 - RNA, 22 nt, Human
cucucugugguggcugucccau

SEQ ID NO: 4774 - RNA, 22 nt, Human
cucucuuucugaaugaggacua

SEQ ID NO: 4775 - RNA, 22 nt, Human
cucucuuugauguauaaauaau

SEQ ID NO: 4776 - RNA, 22 nt, Human
cucugaaagacaagcucucauu

SEQ ID NO: 4777 - RNA, 22 nt, Human
cucugaagguuucuguuacugu

SEQ ID NO: 4778 - RNA, 22 nt, Human
cucugacagccacauagaggcu

SEQ ID NO: 4779 - RNA, 22 nt, Human
cucugacagccuucauuaugca

SEQ ID NO: 4780 - RNA, 22 nt, Human
cucugaccauucccuugauuuu

SEQ ID NO: 4781 - RNA, 22 nt, Human
cucugagacuuagcaucuacau

SEQ ID NO: 4782 - RNA, 22 nt, Human
cucugagaggauccugcccggg

SEQ ID NO: 4783 - RNA, 22 nt, Human
cucugagaggcugcccugccau

SEQ ID NO: 4784 - RNA, 22 nt, Human
cucugagaugauaccuucugga

SEQ ID NO: 4785 - RNA, 22 nt, Human
cucugagcagcggugccgaagu

SEQ ID NO: 4786 - RNA, 22 nt, Human
cucugaggaagucaaguagcca

SEQ ID NO: 4787 - RNA, 22 nt, Human
cucugaggcuuguucuauguau

SEQ ID NO: 4788 - RNA, 22 nt, Human
cucugagggcucgagggacgcg

SEQ ID NO: 4789 - RNA, 20 nt, Human
cucugagguaucuguaaagu

SEQ ID NO: 4790 - RNA, 22 nt, Human
cucugagguccuacagugaccc

SEQ ID NO: 4791 - RNA, 22 nt, Human
cucugagguucccuggguccca

SEQ ID NO: 4792 - RNA, 22 nt, Human
cucugauuuccuuauucuguca

SEQ ID NO: 4793 - RNA, 22 nt, Human
cucugcaaucugagcacuugua

SEQ ID NO: 4794 - RNA, 22 nt, Human
cucugcacacaaguaauuucau

SEQ ID NO: 4795 - RNA, 23 nt, Human
cucugcaccaggugguuuucagc

SEQ ID NO: 4796 - RNA, 22 nt, Human
cucugcaccuacacaacaggaa

SEQ ID NO: 4797 - RNA, 22 nt, Human
cucugcaggccugugaagggug

SEQ ID NO: 4798 - RNA, 22 nt, Human
cucugcaucagcuucauucugu

SEQ ID NO: 4799 - RNA, 22 nt, Human
cucugcauuuuaacagaugauu

SEQ ID NO: 4800 - RNA, 22 nt, Human
cucugccacucgaagucaagga

SEQ ID NO: 4801 - RNA, 22 nt, Human
cucugccaucuuggagcucaag

SEQ ID NO: 4802 - RNA, 22 nt, Human
cucugccauuuaucagaacugu

SEQ ID NO: 4803 - RNA, 22 nt, Human
cucugccucagugauuucuuua

SEQ ID NO: 4804 - RNA, 22 nt, Human
cucugccugugucgccaccaca

SEQ ID NO: 4805 - RNA, 22 nt, Human
cucugcguggcugggcccaggg

SEQ ID NO: 4806 - RNA, 22 nt, Human
cucugcugagccagagucccca

SEQ ID NO: 4807 - RNA, 21 nt, Human
cucugcugagcuccauuuuca

SEQ ID NO: 4808 - RNA, 22 nt, Human
cucugcugccaccagaaccacu

SEQ ID NO: 4809 - RNA, 20 nt, Human
cucugcugcccgccggcugc

SEQ ID NO: 4810 - RNA, 22 nt, Human
cucugcuggccaugaagagaga

SEQ ID NO: 4811 - RNA, 22 nt, Human
cucugcugggauguaaagucuu

SEQ ID NO: 4812 - RNA, 22 nt, Human
cucugcuggugaccacugggcc

SEQ ID NO: 4813 - RNA, 22 nt, Human
cucugcugucucagaugggcca

SEQ ID NO: 4814 - RNA, 22 nt, Human
cucugcuuggaacuggacagaa

SEQ ID NO: 4815 - RNA, 19 nt, Human
cucugcuugguccauaugc

SEQ ID NO: 4816 - RNA, 22 nt, Human
cucugcuuguaucacauuugcu

SEQ ID NO: 4817 - RNA, 20 nt, Human
cucugcuuuaggagagucag

SEQ ID NO: 4818 - RNA, 22 nt, Human
cucugcuuucucaaacccugug

SEQ ID NO: 4819 - RNA, 22 nt, Human
cucugcuuuguaaguugugagg

SEQ ID NO: 4820 - RNA, 22 nt, Human
cucugcuuuuaugugccggcgc

SEQ ID NO: 4821 - RNA, 22 nt, Human
cucuggaccucagcuacagacu

SEQ ID NO: 4822 - RNA, 19 nt, Human
cucuggagaacaauagugc

SEQ ID NO: 4823 - RNA, 22 nt, Human
cucuggagaacuccuugugucu

SEQ ID NO: 4824 - RNA, 22 nt, Human
cucuggagagguucccauggga

SEQ ID NO: 4825 - RNA, 23 nt, Human
cucuggagauccucugccugggu

SEQ ID NO: 4826 - RNA, 22 nt, Human
cucuggagaugguucucaauug

SEQ ID NO: 4827 - RNA, 22 nt, Human
cucuggagcgcugcuucccgcg

SEQ ID NO: 4828 - RNA, 22 nt, Human
cucuggaggccuaaggaagugg

SEQ ID NO: 4829 - RNA, 22 nt, Human
cuccaguaucuguaggaaaagg

SEQ ID NO: 4830 - RNA, 22 nt, Human
cuccagucauagucugucuugu

SEQ ID NO: 4831 - RNA, 22 nt, Human
cuccagucauguuuacugugca

SEQ ID NO: 4832 - RNA, 22 nt, Human
cuccagucuuucagaugucccu

SEQ ID NO: 4833 - RNA, 22 nt, Human
cuccagugcacuggucuuuuca

SEQ ID NO: 4834 - RNA, 22 nt, Human
cuccagugcucaugccguugac

SEQ ID NO: 4835 - RNA, 22 nt, Human
cuccagugucucagagcagaug

SEQ ID NO: 4836 - RNA, 22 nt, Human
cuccauauggcccugggaccug

SEQ ID NO: 4837 - RNA, 22 nt, Human
cuccaucagcuguugguugagg

SEQ ID NO: 4838 - RNA, 15 nt, Human
cuccaugauuuugca

SEQ ID NO: 4839 - RNA, 22 nt, Human
cuccauugaacauccucucaga

SEQ ID NO: 4840 - RNA, 22 nt, Human
cucccacauggaauagcaggga

SEQ ID NO: 4841 - RNA, 22 nt, Human
cucccagccuucgccagucuga

SEQ ID NO: 4842 - RNA, 22 nt, Human
cucccaggccaugcucuagcca

SEQ ID NO: 4843 - RNA, 22 nt, Human
cucccaggguagggagagacua

SEQ ID NO: 4844 - RNA, 22 nt, Human
cucccaggugucccuucugcca

SEQ ID NO: 4845 - RNA, 22 nt, Human
cuccccaagccuuggcuucucc

SEQ ID NO: 4846 - RNA, 22 nt, Human
cucugggacaucccuuggccua

SEQ ID NO: 4847 - RNA, 22 nt, Human
cucugggagaggacacuuggag

SEQ ID NO: 4848 - RNA, 18 nt, Human
cucugggagaggcauaca

SEQ ID NO: 4849 - RNA, 22 nt, Human
cucugggaugaggccuaggcac

SEQ ID NO: 4850 - RNA, 22 nt, Human
cucugggcaaguaugauagaaa

SEQ ID NO: 4851 - RNA, 22 nt, Human
cucugggcacauuuuccaggac

SEQ ID NO: 4852 - RNA, 22 nt, Human
cucugggccaugcuacugcucu

SEQ ID NO: 4853 - RNA, 21 nt, Human
cucugggccauuuucuuccac

SEQ ID NO: 4854 - RNA, 22 nt, Human
cucugggcggcccaggccaacc

SEQ ID NO: 4855 - RNA, 23 nt, Human
cucugggcgggcaggucagccuc

SEQ ID NO: 4856 - RNA, 22 nt, Human
cucugggcugccuuuuagcucu

SEQ ID NO: 4857 - RNA, 22 nt, Human
cucugggguggaggaggcugac

SEQ ID NO: 4858 - RNA, 22 nt, Human
cucugggucccacgucauugcu

SEQ ID NO: 4859 - RNA, 20 nt, Human
cucugggucgagacagacuu

SEQ ID NO: 4860 - RNA, 17 nt, Human
cucugggucuccugcuu

SEQ ID NO: 4861 - RNA, 22 nt, Human
cucugggugagacagaccuggu

SEQ ID NO: 4862 - RNA, 22 nt, Human
cucugggugggcagcagaugga

SEQ ID NO: 4863 - RNA, 22 nt, Human
cucuggguggucucacugagug

SEQ ID NO: 4864 - RNA, 22 nt, Human
cucugggugugacagcaccugg

SEQ ID NO: 4865 - RNA, 22 nt, Human
cucuggucuucaaggccaccuc

SEQ ID NO: 4866 - RNA, 22 nt, Human
cucugguugcagcugaaguucc

SEQ ID NO: 4867 - RNA, 22 nt, Human
cucuguagccauggguauauuc

SEQ ID NO: 4868 - RNA, 22 nt, Human
cucuguaugaaucauauggagu

SEQ ID NO: 4869 - RNA, 22 nt, Human
cucugucacuucuccagcugag

SEQ ID NO: 4870 - RNA, 22 nt, Human
cucugucagaguguugucccca

SEQ ID NO: 4871 - RNA, 18 nt, Human
cucugucauaagugucau

SEQ ID NO: 4872 - RNA, 22 nt, Human
cucugucuaucccauucugugc

SEQ ID NO: 4873 - RNA, 22 nt, Human
cucuguggaagaagaaagaagg

SEQ ID NO: 4874 - RNA, 17 nt, Human
cucuguggagguguuua

SEQ ID NO: 4875 - RNA, 22 nt, Human
cucuguggcuacacaaaccucc

SEQ ID NO: 4876 - RNA, 22 nt, Human
cucugugggggagaggcagcug

SEQ ID NO: 4877 - RNA, 22 nt, Human
cucuguggguauuuauauguau

SEQ ID NO: 4878 - RNA, 22 nt, Human
cucugugguuagacuauggcug

SEQ ID NO: 4879 - RNA, 22 nt, Human
cucugugugcuggugggguccu

SEQ ID NO: 4880 - RNA, 22 nt, Human
cucugugugguaugauugucau

SEQ ID NO: 4881 - RNA, 22 nt, Human
cucuguguuaaauuggguuuuu

SEQ ID NO: 4882 - RNA, 22 nt, Human
cucuguuuggcgcugcuccuuc

SEQ ID NO: 4883 - RNA, 22 nt, Human
cucuuaaauaacaucauugcuu

SEQ ID NO: 4884 - RNA, 19 nt, Human
cucuuaaauugucucuugc

SEQ ID NO: 4885 - RNA, 22 nt, Human
cucuuaaugaccuuaauucaag

SEQ ID NO: 4886 - RNA, 22 nt, Human
cucuuaauguuuuauagauuga

SEQ ID NO: 4887 - RNA, 22 nt, Human
cucuuagaaagaaacacacugg

SEQ ID NO: 4888 - RNA, 22 nt, Human
cucuuagauauggagaauuacc

SEQ ID NO: 4889 - RNA, 22 nt, Human
cucuuauuccuacaguaacagg

SEQ ID NO: 4890 - RNA, 22 nt, Human
cucuucaaaugauuuccuuagg

SEQ ID NO: 4891 - RNA, 22 nt, Human
cucuucagauaaaagggauauu

SEQ ID NO: 4892 - RNA, 22 nt, Human
cucuucagauauacaguacucu

SEQ ID NO: 4893 - RNA, 22 nt, Human
cucuucagcaaugcuuuagucc

SEQ ID NO: 4894 - RNA, 22 nt, Human
cucuucagccuauuugagugca

SEQ ID NO: 4895 - RNA, 22 nt, Human
cucuucaggaauaugucaguca

SEQ ID NO: 4896 - RNA, 22 nt, Human
cucuucaguaaaugacacuguu

SEQ ID NO: 4897 - RNA, 22 nt, Human
cucuuccauauuacucagggua

SEQ ID NO: 4898 - RNA, 22 nt, Human
cucuuccauuucuacuucacag

SEQ ID NO: 4899 - RNA, 22 nt, Human
cucuuccuuaagacuauaaaga

SEQ ID NO: 4900 - RNA, 22 nt, Human
cucuucucugcagccuuugaag

SEQ ID NO: 4901 - RNA, 22 nt, Human
cucuucuguaccucggccucca

SEQ ID NO: 4902 - RNA, 22 nt, Human
cucuucuuuccaucccuagcca

SEQ ID NO: 4903 - RNA, 22 nt, Human
cucuugaaaauuggaacacaga

SEQ ID NO: 4904 - RNA, 22 nt, Human
cucuugaacuuucuaguuucau

SEQ ID NO: 4905 - RNA, 22 nt, Human
cucuugcaugagauccaggagu

SEQ ID NO: 4906 - RNA, 22 nt, Human
cucuugccagagaugagacucu

SEQ ID NO: 4907 - RNA, 22 nt, Human
cucuugggugggcagugggccu

SEQ ID NO: 4908 - RNA, 22 nt, Human
cucuuuaacucccauucugucc

SEQ ID NO: 4909 - RNA, 22 nt, Human
cucuuuaguuugaaauccacau

SEQ ID NO: 4910 - RNA, 22 nt, Human
cucuuucugauucgcugggacc

SEQ ID NO: 4911 - RNA, 22 nt, Human
cucuuucuggaaggcagagugg

SEQ ID NO: 4912 - RNA, 22 nt, Human
cucuuugaaauccaucacugcu

SEQ ID NO: 4913 - RNA, 22 nt, Human
cucuuuggagaagcacguauua

SEQ ID NO: 4914 - RNA, 22 nt, Human
cucuuuggccagaaaauguuuu

SEQ ID NO: 4915 - RNA, 22 nt, Human
cucuuuggcuuugacucccauu

SEQ ID NO: 4916 - RNA, 21 nt, Human
cucuuugggaucuuuggaaag

SEQ ID NO: 4917 - RNA, 22 nt, Human
cucuuugggaugggcucugcug

SEQ ID NO: 4918 - RNA, 22 nt, Human
cucuuuguauuucuuugggcca

SEQ ID NO: 4919 - RNA, 20 nt, Human
cucuuuguuggcaaacucuu

SEQ ID NO: 4920 - RNA, 20 nt, Human
cucuuuucacucucaguggu

SEQ ID NO: 4921 - RNA, 22 nt, Human
cugaaaaauauguuuuggagaa

SEQ ID NO: 4922 - RNA, 22 nt, Human
cugaaaagcuuugaaccguuaa

SEQ ID NO: 4923 - RNA, 22 nt, Human
cugaaacuuuaguucugcaaca

SEQ ID NO: 4924 - RNA, 22 nt, Human
cugaaagaauaagauguuuaca

SEQ ID NO: 4925 - RNA, 22 nt, Human
cugaaaggguuacauaguaagu

SEQ ID NO: 4926 - RNA, 22 nt, Human
cugaaauaguuucauagaacuu

SEQ ID NO: 4927 - RNA, 22 nt, Human
cugaaaugacgguuuggggcaa

SEQ ID NO: 4928 - RNA, 22 nt, Human
cugaaaugggcaaaaguagauu

SEQ ID NO: 4929 - RNA, 22 nt, Human
cugaacaaagaaauagucaugg

SEQ ID NO: 4930 - RNA, 20 nt, Human
cugaacacagaauaagcaca

SEQ ID NO: 4931 - RNA, 22 nt, Human
cugaacaucccgcagugcacga

SEQ ID NO: 4932 - RNA, 22 nt, Human
cugaaccaucucuguucuguau

SEQ ID NO: 4933 - RNA, 22 nt, Human
cugaacucaugauaugcuuuug

SEQ ID NO: 4934 - RNA, 22 nt, Human
cugaacuucucugagccucagu

SEQ ID NO: 4935 - RNA, 22 nt, Human
cugaagacugcugagaaguuac

SEQ ID NO: 4936 - RNA, 22 nt, Human
cugaagaggacuggguuggagg

SEQ ID NO: 4937 - RNA, 20 nt, Human
cugaagaguggccugaucug

SEQ ID NO: 4938 - RNA, 22 nt, Human
uuugcucugacagugccagaga

SEQ ID NO: 4939 - RNA, 22 nt, Human
uuugcucuugcuggaaaaguug

SEQ ID NO: 4940 - RNA, 21 nt, Human
uuugcugaagauuuuaggcug

SEQ ID NO: 4941 - RNA, 21 nt, Human
uuugcugaaugauuccagggc

SEQ ID NO: 4942 - RNA, 22 nt, Human
uuugcugucagccgcuauuuuc

SEQ ID NO: 4943 - RNA, 22 nt, Human
uuugcugugcuuacauauguau

SEQ ID NO: 4944 - RNA, 22 nt, Human
uuugcuuaaaguucuuucuggu

SEQ ID NO: 4945 - RNA, 22 nt, Human
uuugcuuucuguugaacagagu

SEQ ID NO: 4946 - RNA, 22 nt, Human
uuuggaaacugccucagcucuu

SEQ ID NO: 4947 - RNA, 22 nt, Human
uuuggaaaugagaagccaccuu

SEQ ID NO: 4948 - RNA, 22 nt, Human
uuuggaacaagacaaaacauua

SEQ ID NO: 4949 - RNA, 22 nt, Human
uuuggaauguaguuuaaucauc

SEQ ID NO: 4950 - RNA, 22 nt, Human
uuuggaauuacuuacucaagcc

SEQ ID NO: 4951 - RNA, 22 nt, Human
uuuggaauuaugcuuaaaguuu

SEQ ID NO: 4952 - RNA, 22 nt, Human
uuuggaauuggaaagugcugug

SEQ ID NO: 4953 - RNA, 22 nt, Human
uuuggacaaaugucugacuuuc

SEQ ID NO: 4954 - RNA, 22 nt, Human
uuuggacauguugagucugaua

SEQ ID NO: 4955 - RNA, 23 nt, Human
uuuggacuugugacucuucuccu

SEQ ID NO: 4956 - RNA, 22 nt, Human
uuuggagaaaaguugagaccau

SEQ ID NO: 4957 - RNA, 22 nt, Human
uuuggagagcagcuaggcccuu

SEQ ID NO: 4958 - RNA, 22 nt, Human
uuuggaucacuguuccucuggg

SEQ ID NO: 4959 - RNA, 22 nt, Human
uuuggcaagcgaguacuuucug

SEQ ID NO: 4960 - RNA, 22 nt, Human
uuuggcacagcuucccagacuu

SEQ ID NO: 4961 - RNA, 19 nt, Human
uuuggcacucugaaguguu

SEQ ID NO: 4962 - RNA, 22 nt, Human
uuuggcacuguucuaggugcaa

SEQ ID NO: 4963 - RNA, 22 nt, Human
uuuggcauuuaauaggugauca

SEQ ID NO: 4964 - RNA, 22 nt, Human
uuuggccaagaaaguucugugg

SEQ ID NO: 4965 - RNA, 22 nt, Human
uuuggccacagauccuuggggg

SEQ ID NO: 4966 - RNA, 22 nt, Human
uuuggccacuucauagaucauu

SEQ ID NO: 4967 - RNA, 18 nt, Human
uuuggccaugaccuggcu

SEQ ID NO: 4968 - RNA, 22 nt, Human
uuuggccucaugaauuucuugc

SEQ ID NO: 4969 - RNA, 22 nt, Human
uuuggcgucucucaggagcuca

SEQ ID NO: 4970 - RNA, 22 nt, Human
uuuggcucugguucuggcucca

SEQ ID NO: 4971 - RNA, 22 nt, Human
uuuggcucuucccguaccauaa

SEQ ID NO: 4972 - RNA, 22 nt, Human
uuuggcugagaaguugugcuuu

SEQ ID NO: 4973 - RNA, 22 nt, Human
uuuggcuuaacuuacaugauau

SEQ ID NO: 4974 - RNA, 22 nt, Human
uuuggcuugcacuggcaccaac

SEQ ID NO: 4975 - RNA, 22 nt, Human
uuugggaaacuuaggggucaga

SEQ ID NO: 4976 - RNA, 22 nt, Human
uuugggaaccagaaguucaaaa

SEQ ID NO: 4977 - RNA, 22 nt, Human
uuugggaacucuaucauggaaa

SEQ ID NO: 4978 - RNA, 22 nt, Human
uuugggaacuuaauuaugucug

SEQ ID NO: 4979 - RNA, 22 nt, Human
uuugggaagaggaaucucugga

SEQ ID NO: 4980 - RNA, 19 nt, Human
uuugggaagcccagagugu

SEQ ID NO: 4981 - RNA, 22 nt, Human
uuugggaauaauugcacagauu

SEQ ID NO: 4982 - RNA, 22 nt, Human
uuugggaauuguagcugucuug

SEQ ID NO: 4983 - RNA, 22 nt, Human
uuugggacuggagcuuggagag

SEQ ID NO: 4984 - RNA, 22 nt, Human
uuugggcaaagguagaaggaga

SEQ ID NO: 4985 - RNA, 22 nt, Human
uuugggcaagcucacugauuca

SEQ ID NO: 4986 - RNA, 22 nt, Human
uuugggcaagguccagauuccu

SEQ ID NO: 4987 - RNA, 22 nt, Human
uuugggcacagauauuaaguau

SEQ ID NO: 4988 - RNA, 22 nt, Human
uuugggcagaagcugaaugucu

SEQ ID NO: 4989 - RNA, 22 nt, Human
uuugggcauuaguaaguuaagc

SEQ ID NO: 4990 - RNA, 22 nt, Human
uuugggcucuugcugaccuggg

SEQ ID NO: 4991 - RNA, 22 nt, Human
uuugggcugguuugccaugccc

SEQ ID NO: 4992 - RNA, 21 nt, Human
uuugggcuuuuacuggacgug

SEQ ID NO: 4993 - RNA, 22 nt, Human
uuuggguucagacaugauuaca

SEQ ID NO: 4994 - RNA, 22 nt, Human
uuuggucaaauauuauccugag

SEQ ID NO: 4995 - RNA, 22 nt, Human
uuuggucaggguaggacaguug

SEQ ID NO: 4996 - RNA, 22 nt, Human
uuugguccaaguuuuacucuuu

SEQ ID NO: 4997 - RNA, 22 nt, Human
uuuggucucauucacucauggg

SEQ ID NO: 4998 - RNA, 22 nt, Human
uuuggucucugugcauccuccu

SEQ ID NO: 4999 - RNA, 22 nt, Human
uuuggucuuuuguaaguuaucu

SEQ ID NO: 5000 - RNA, 22 nt, Human
aaaaugaugcuguaauuuggca

SEQ ID NO: 5001 - RNA, 20 nt, Human
aaaaugaugggcagggcagg

SEQ ID NO: 5002 - RNA, 22 nt, Human
aaaaugcaaaccuaccuacaua

SEQ ID NO: 5003 - RNA, 18 nt, Human
aaaaugcaggcgacaugg

SEQ ID NO: 5004 - RNA, 22 nt, Human
aaaaugcucaucagcgauggcu

SEQ ID NO: 5005 - RNA, 22 nt, Human
aaaauggcuguggucuggcaag

SEQ ID NO: 5006 - RNA, 22 nt, Human
aaaauguaugauggaggugcua

SEQ ID NO: 5007 - RNA, 22 nt, Human
aaaaugucugcuguugguuuau

SEQ ID NO: 5008 - RNA, 22 nt, Human
aaaauuauggaguaucccaaag

SEQ ID NO: 5009 - RNA, 22 nt, Human
aaaauucauagaacuguacgcu

SEQ ID NO: 5010 - RNA, 22 nt, Human
aaaauugagagucuugugcaag

SEQ ID NO: 5011 - RNA, 22 nt, Human
aaaauugaggccaguaugccau

SEQ ID NO: 5012 - RNA, 19 nt, Human
aaaauugcguauuuugagg

SEQ ID NO: 5013 - RNA, 22 nt, Human
aaaauugucagaaguugaucuu

SEQ ID NO: 5014 - RNA, 22 nt, Human
aaacaaccuaaaguuacugauc

SEQ ID NO: 5015 - RNA, 22 nt, Human
aaacaagagcuuacauggcugc

SEQ ID NO: 5016 - RNA, 22 nt, Human
aaacaagcaagcacauaauuuu

SEQ ID NO: 5017 - RNA, 20 nt, Human
aaacaagguugcucugagga

SEQ ID NO: 5018 - RNA, 22 nt, Human
aaacaaguguaaacuagucugu

SEQ ID NO: 5019 - RNA, 22 nt, Human
aaacaaugagcuuuuacacacu

SEQ ID NO: 5020 - RNA, 22 nt, Human
aaacaauguacacaugaauguu

SEQ ID NO: 5021 - RNA, 22 nt, Human
aaacaauguacauuuauaaugc

SEQ ID NO: 5022 - RNA, 23 nt, Human
aaacaaugucaucaggacuuggu

SEQ ID NO: 5023 - RNA, 22 nt, Human
aaacaauguugcugggugcggu

SEQ ID NO: 5024 - RNA, 22 nt, Human
aaacaauguugucuccaagagg

SEQ ID NO: 5025 - RNA, 22 nt, Human
aaacacaauguuucuuuguucu

SEQ ID NO: 5026 - RNA, 22 nt, Human
aaacacagcauguccuugggga

SEQ ID NO: 5027 - RNA, 22 nt, Human
aaacacugaagaccuaucuggu

SEQ ID NO: 5028 - RNA, 22 nt, Human
aaacacugcaggguuuacuuga

SEQ ID NO: 5029 - RNA, 22 nt, Human
aaacacugcgugguggcaacuc

SEQ ID NO: 5030 - RNA, 22 nt, Human
aaacacugugggacaucuuacu

SEQ ID NO: 5031 - RNA, 22 nt, Human
aaacacuucaaggacuucuguc

SEQ ID NO: 5032 - RNA, 22 nt, Human
aaacacuugcaaaaugguuccu

SEQ ID NO: 5033 - RNA, 22 nt, Human
aaacacuuuagaaagggacuug

SEQ ID NO: 5034 - RNA, 22 nt, Human
aaacagaugaguuauaauagcc

SEQ ID NO: 5035 - RNA, 22 nt, Human
aaacagcaauggagaagccagg

SEQ ID NO: 5036 - RNA, 22 nt, Human
aaacagcaggaacaucuugcca

SEQ ID NO: 5037 - RNA, 20 nt, Human
aaacagcuaaaccagcucuc

SEQ ID NO: 5038 - RNA, 22 nt, Human
aaacagcuaaguacauucaagg

SEQ ID NO: 5039 - RNA, 22 nt, Human
aaacagcuaauggccaggaaua

SEQ ID NO: 5040 - RNA, 22 nt, Human
ugucuccugggcccuggcccug

SEQ ID NO: 5041 - RNA, 22 nt, Human
ugucuccuugcuuuucccugua

SEQ ID NO: 5042 - RNA, 22 nt, Human
ugucucuagggcaaugugaacu

SEQ ID NO: 5043 - RNA, 19 nt, Human
ugucucugaaagaugagcu

SEQ ID NO: 5044 - RNA, 22 nt, Human
ugucucugaggugagggucagc

SEQ ID NO: 5045 - RNA, 22 nt, Human
ugucucugccagcuagcagaau

SEQ ID NO: 5046 - RNA, 22 nt, Human
ugucucugcuuuccuugcaggg

SEQ ID NO: 5047 - RNA, 22 nt, Human
ugucucugggugauucaguccu

SEQ ID NO: 5048 - RNA, 22 nt, Human
ugucucugguauuaggugaaaa

SEQ ID NO: 5049 - RNA, 22 nt, Human
ugucucugucuuccagggcugu

SEQ ID NO: 5050 - RNA, 22 nt, Human
ugucucugugagaucugacgau

SEQ ID NO: 5051 - RNA, 22 nt, Human
ugucucuucccacucagacccc

SEQ ID NO: 5052 - RNA, 22 nt, Human
ugucucuuggcucuaucacuua

SEQ ID NO: 5053 - RNA, 22 nt, Human
ugucucuugguguccagaggag

SEQ ID NO: 5054 - RNA, 20 nt, Human
ugucugaaaaggaagcuauc

SEQ ID NO: 5055 - RNA, 22 nt, Human
ugucugaacgaaguagguccac

SEQ ID NO: 5056 - RNA, 22 nt, Human
ugucugagugauccaguuucuc

SEQ ID NO: 5057 - RNA, 22 nt, Human
ugucugaguggugcaaggcuga

SEQ ID NO: 5058 - RNA, 21 nt, Human
ugucugccccuguuuaccaga

SEQ ID NO: 5059 - RNA, 22 nt, Human
ugucugccugcgggccggcaca

SEQ ID NO: 5060 - RNA, 22 nt, Human
ugucugcucgggguucccaccu

SEQ ID NO: 5061 - RNA, 22 nt, Human
ugucugcugcccuggagccugg

SEQ ID NO: 5062 - RNA, 18 nt, Human
ugucugcuucuccaacuc

SEQ ID NO: 5063 - RNA, 19 nt, Human
ugucuggaagagcugcagg

SEQ ID NO: 5064 - RNA, 22 nt, Human
ugucuggacauugacaaucaug

SEQ ID NO: 5065 - RNA, 22 nt, Human
ugucuggggguucugaaagcug

SEQ ID NO: 5066 - RNA, 22 nt, Human
ugucugguggguugacaggcag

SEQ ID NO: 5067 - RNA, 22 nt, Human
ugucuguaagguguuuauguua

SEQ ID NO: 5068 - RNA, 22 nt, Human
ugucuguaaucaacugaguuuc

SEQ ID NO: 5069 - RNA, 22 nt, Human
ugucuguauaucacuuuugucc

SEQ ID NO: 5070 - RNA, 20 nt, Human
ugucuguaugcagucauaua

SEQ ID NO: 5071 - RNA, 22 nt, Human
ugucuguccuuguuugguauca

SEQ ID NO: 5072 - RNA, 22 nt, Human
ugucugugaccucuuuggagcc

SEQ ID NO: 5073 - RNA, 22 nt, Human
ugucuguguccaaauuuccucu

SEQ ID NO: 5074 - RNA, 22 nt, Human
ugucugugugagcaaaugacuu

SEQ ID NO: 5075 - RNA, 19 nt, Human
ugucuuaauuaacucagag

SEQ ID NO: 5076 - RNA, 22 nt, Human
ugucuuaauuuggaugauguuu

SEQ ID NO: 5077 - RNA, 17 nt, Human
ugucuuaucuguccugu

SEQ ID NO: 5078 - RNA, 22 nt, Human
ugucuuauuuugaaguguucac

SEQ ID NO: 5079 - RNA, 22 nt, Human
ugucuucacaaagcagaaggga

SEQ ID NO: 5080 - RNA, 22 nt, Human
ugucuucagauaggcauucuuc

SEQ ID NO: 5081 - RNA, 22 nt, Human
ugucuucagcaaaugccuuucu

SEQ ID NO: 5082 - RNA, 21 nt, Human
ugucuucauaugagauggugu

SEQ ID NO: 5083 - RNA, 22 nt, Human
ugucuucauucuguauguccag

SEQ ID NO: 5084 - RNA, 22 nt, Human
ugucuuccucuuggcuugagcu

SEQ ID NO: 5085 - RNA, 23 nt, Human
ugucuugguuucuucacccuagu

SEQ ID NO: 5086 - RNA, 22 nt, Human
ugucuuuagaaagaagcagaca

SEQ ID NO: 5087 - RNA, 22 nt, Human
ugucuuuagagucacaaaacca

SEQ ID NO: 5088 - RNA, 22 nt, Human
ugucuuuagcccauauagacuu

SEQ ID NO: 5089 - RNA, 22 nt, Human
ugucuuuaguuuuacugucugg

SEQ ID NO: 5090 - RNA, 20 nt, Human
ugucuuuccauggcuggauc

SEQ ID NO: 5091 - RNA, 21 nt, Human
ugucuuuggccucauucccag

SEQ ID NO: 5092 - RNA, 22 nt, Human
ugucuuuggggcuguaccuguu

SEQ ID NO: 5093 - RNA, 19 nt, Human
ugucuuuggucugaguuuc

SEQ ID NO: 5094 - RNA, 22 nt, Human
ugucuuuugccaaagaucaguu

SEQ ID NO: 5095 - RNA, 22 nt, Human
ugugaaaagcaggcuacuuucu

SEQ ID NO: 5096 - RNA, 22 nt, Human
ugugaaagagucuuauaguuuc

SEQ ID NO: 5097 - RNA, 22 nt, Human
ugugaaagcaagucuaguucuc

SEQ ID NO: 5098 - RNA, 19 nt, Human
ugugaaagcuaguguucuu

SEQ ID NO: 5099 - RNA, 22 nt, Human
ugugaaaggagccauagacagu

SEQ ID NO: 5100 - RNA, 21 nt, Human
ugugaaauagcuaugcuacau

SEQ ID NO: 5101 - RNA, 22 nt, Human
ugugaaaucugaacucaaagau

SEQ ID NO: 5102 - RNA, 22 nt, Human
ugugaaauuacuuaaaggaaau

SEQ ID NO: 5103 - RNA, 18 nt, Human
ugugaacacauuuuucug

SEQ ID NO: 5104 - RNA, 22 nt, Human
ugugaacucuggaacaaaacua

SEQ ID NO: 5105 - RNA, 22 nt, Human
ugugaacuuuggaugguucuga

SEQ ID NO: 5106 - RNA, 22 nt, Human
ugugaagcauagauucuguaga

SEQ ID NO: 5107 - RNA, 22 nt, Human
ugugaaggacuuguuccauugu

SEQ ID NO: 5108 - RNA, 22 nt, Human
ugugaaggagaugaagggagug

SEQ ID NO: 5109 - RNA, 22 nt, Human
ugugaagguaaggaggggcaag

SEQ ID NO: 5110 - RNA, 22 nt, Human
ugugaagguaagguuugcuuga

SEQ ID NO: 5111 - RNA, 22 nt, Human
ugugaagguuaaauaauaugau

SEQ ID NO: 5112 - RNA, 22 nt, Human
ugugaauaaugccgcaauaaac

SEQ ID NO: 5113 - RNA, 22 nt, Human
ugugaauauuuccuucuuugga

SEQ ID NO: 5114 - RNA, 22 nt, Human
ugugaauggacaauuaaaucua

SEQ ID NO: 5115 - RNA, 22 nt, Human
ugugaauggcaguuggauagca

SEQ ID NO: 5116 - RNA, 22 nt, Human
ugugaauguauaguuuguauau

SEQ ID NO: 5117 - RNA, 22 nt, Human
ugugaaugucuagguuuuaugu

SEQ ID NO: 5118 - RNA, 23 nt, Human
ugugaauugaggacaucaaaagc

SEQ ID NO: 5119 - RNA, 20 nt, Human
ugugacaaaggcauauuuua

SEQ ID NO: 5120 - RNA, 22 nt, Human
ugugacaccacacccgacuaau

SEQ ID NO: 5121 - RNA, 21 nt, Human
ugugacagaggcggugccuac

SEQ ID NO: 5122 - RNA, 22 nt, Human
ugugacagaucuuuaaauaaug

SEQ ID NO: 5123 - RNA, 23 nt, Human
ugugacagggucauugaaaaggg

SEQ ID NO: 5124 - RNA, 22 nt, Human
ugugacaguaacuugggaugga

SEQ ID NO: 5125 - RNA, 19 nt, Human
ugugacaucacugggcagc

SEQ ID NO: 5126 - RNA, 22 nt, Human
ugugacccagacucaucuucuu

SEQ ID NO: 5127 - RNA, 23 nt, Human
ugugaccccuaggaguggggacc

SEQ ID NO: 5128 - RNA, 22 nt, Human
ugugaccucaucuuaacuggaa

SEQ ID NO: 5129 - RNA, 22 nt, Human
ugugacguuccugcuggcgacc

SEQ ID NO: 5130 - RNA, 22 nt, Human
ugugacuggaguccagcccacu

SEQ ID NO: 5131 - RNA, 22 nt, Human
ugugacuggcagaggugucugg

SEQ ID NO: 5132 - RNA, 22 nt, Human
ugugacuuauaacauagaauuu

SEQ ID NO: 5133 - RNA, 22 nt, Human
ugugacuugauguuugcaccag

SEQ ID NO: 5134 - RNA, 21 nt, Human
ugugagaagaguacugagguc

SEQ ID NO: 5135 - RNA, 22 nt, Human
ugugagacacacugcugcuuca

SEQ ID NO: 5136 - RNA, 22 nt, Human
ugugagacaggaccuguugacu

SEQ ID NO: 5137 - RNA, 22 nt, Human
ugugagacguguuagaacagug

SEQ ID NO: 5138 - RNA, 22 nt, Human
ugugagagagugcauuugcaua

SEQ ID NO: 5139 - RNA, 22 nt, Human
ugugagcacuggcugggaaagu

SEQ ID NO: 5140 - RNA, 22 nt, Human
ugugagcugaagugacaggcug

SEQ ID NO: 5141 - RNA, 22 nt, Human
ugugaggaccucagcagagucu

SEQ ID NO: 5142 - RNA, 22 nt, Human
uuuuggcucugcagguuugcac

SEQ ID NO: 5143 - RNA, 22 nt, Human
uuuuggcucugucuguaucuuu

SEQ ID NO: 5144 - RNA, 22 nt, Human
uuuuggcuuuuccucagcaagc

SEQ ID NO: 5145 - RNA, 22 nt, Human
uuuugguagaaucaacaaugua

SEQ ID NO: 5146 - RNA, 20 nt, Human
uuuuggugaauuccagaaua

SEQ ID NO: 5147 - RNA, 16 nt, Human
uuuuggugacccugga

SEQ ID NO: 5148 - RNA, 18 nt, Human
uuuuggugaggaagugag

SEQ ID NO: 5149 - RNA, 17 nt, Human
uuuuggugaguuguuuc

SEQ ID NO: 5150 - RNA, 22 nt, Human
uuuuggugcaccuagcuuuuuc

SEQ ID NO: 5151 - RNA, 22 nt, Human
uuuugguggugggcuuggcagc

SEQ ID NO: 5152 - RNA, 19 nt, Human
uuuugucuucccuuaguuu

SEQ ID NO: 5153 - RNA, 22 nt, Human
uuuugugaauaguuuaucuaag

SEQ ID NO: 5154 - RNA, 22 nt, Human
uuuugugacagaaagauuaagu

SEQ ID NO: 5155 - RNA, 22 nt, Human
uuuuguguagagauggggucuu

SEQ ID NO: 5156 - RNA, 22 nt, Human
uuuuguguccuucacaucaugu

SEQ ID NO: 5157 - RNA, 22 nt, Human
uuuuguguugccauguuaagca

SEQ ID NO: 5158 - RNA, 22 nt, Human
uuuuguguuguaaugucagcua

SEQ ID NO: 5159 - RNA, 22 nt, Human
uuuuguuggcuuaagaaauaca

SEQ ID NO: 5160 - RNA, 22 nt, Human
uuuuuaaccuaccuuaagagca

SEQ ID NO: 5161 - RNA, 22 nt, Human
uuuuuacacuuagcauugagcg

SEQ ID NO: 5162 - RNA, 22 nt, Human
uuuuuaguagagguggguuuca

SEQ ID NO: 5163 - RNA, 23 nt, Human
uuuuuaguuacaccucugccacc

SEQ ID NO: 5164 - RNA, 22 nt, Human
uuuuuauaacucuuuugugaca

SEQ ID NO: 5165 - RNA, 22 nt, Human
uuuuuauacuuugcucaagauu

SEQ ID NO: 5166 - RNA, 22 nt, Human
uuuuuaugccuacgcugaaaag

SEQ ID NO: 5167 - RNA, 22 nt, Human
uuuuucaagacaaccugcaugu

SEQ ID NO: 5168 - RNA, 22 nt, Human
uuuuucagccaugaauuacacu

SEQ ID NO: 5169 - RNA, 22 nt, Human
uuuuucaucugauugauaacuc

SEQ ID NO: 5170 - RNA, 22 nt, Human
uuuuucauugcagccucucucc

SEQ ID NO: 5171 - RNA, 22 nt, Human
uuuuuccaccguacuuccugag

SEQ ID NO: 5172 - RNA, 22 nt, Human
uuuuucccauauagaaagccaa

SEQ ID NO: 5173 - RNA, 22 nt, Human
uuuuuccuaagcaguggagcug

SEQ ID NO: 5174 - RNA, 22 nt, Human
uuuuucuacugguguuggugua

SEQ ID NO: 5175 - RNA, 22 nt, Human
uuuuucuagaccuuaaaggcca

SEQ ID NO: 5176 - RNA, 20 nt, Human
uuuuucugggcuuccauagc

SEQ ID NO: 5177 - RNA, 22 nt, Human
uuuuuggcagcucagaaacuuc

SEQ ID NO: 5178 - RNA, 22 nt, Human
uuuuuggguccaggcuguaucu

SEQ ID NO: 5179 - RNA, 22 nt, Human
uuuuuguauagaaaugaacuaa

SEQ ID NO: 5180 - RNA, 22 nt, Human
uuuuuguauaugcuucgaggau

SEQ ID NO: 5181 - RNA, 22 nt, Human
uuuuugucuauucacugauuca

SEQ ID NO: 5182 - RNA, 22 nt, Human
uuuuuguguauccugcuccaug

SEQ ID NO: 5183 - RNA, 22 nt, Human
uuuuuguucugauuauacuggu

SEQ ID NO: 5184 - RNA, 22 nt, Human
uuuuuuauagcaaugaacccac

SEQ ID NO: 5185 - RNA, 22 nt, Human
uuuuuuccuucaugacuuaaga

SEQ ID NO: 5186 - RNA, 22 nt, Human
uuuuuuggugcuccuaggaagg

SEQ ID NO: 5187 - RNA, 21 nt, Human
uuucucaguugugugagcagc

SEQ ID NO: 5188 - RNA, 21 nt, Human
uuucucauaaaauacucauua

SEQ ID NO: 5189 - RNA, 22 nt, Human
uuucucauagucaugccucuua

SEQ ID NO: 5190 - RNA, 22 nt, Human
uuucucaucuggaaacagugcu

SEQ ID NO: 5191 - RNA, 22 nt, Human
uuucucauggaacauagcuccu

SEQ ID NO: 5192 - RNA, 21 nt, Human
uuucuccaagugacugauucc

SEQ ID NO: 5193 - RNA, 22 nt, Human
uuucuccacgccagcuugcuua

SEQ ID NO: 5194 - RNA, 22 nt, Human
uuucuccacuucucuugccaac

SEQ ID NO: 5195 - RNA, 22 nt, Human
uuucucccccaugauaauuucu

SEQ ID NO: 5196 - RNA, 22 nt, Human
uuucuccuaacucaaauuuaag

SEQ ID NO: 5197 - RNA, 22 nt, Human
uuucuccuccagagagacacag

SEQ ID NO: 5198 - RNA, 22 nt, Human
uuucuccugaguuccacgcuac

SEQ ID NO: 5199 - RNA, 22 nt, Human
uuucuccugcccagaugccugg

SEQ ID NO: 5200 - RNA, 22 nt, Human
uuucuccugugaggucagaagu

SEQ ID NO: 5201 - RNA, 17 nt, Human
uuucuccuuccaucuca

SEQ ID NO: 5202 - RNA, 22 nt, Human
uuucucuccccaaguggaauug

SEQ ID NO: 5203 - RNA, 19 nt, Human
uuucucucccucaucccga

SEQ ID NO: 5204 - RNA, 22 nt, Human
uuucucucuacaguacuuucau

SEQ ID NO: 5205 - RNA, 22 nt, Human
uuucucucuauuuagacaggua

SEQ ID NO: 5206 - RNA, 23 nt, Human
uuucucugagaagcaguucucua

SEQ ID NO: 5207 - RNA, 22 nt, Human
uuucucugcugccugugucgau

SEQ ID NO: 5208 - RNA, 22 nt, Human
uuucucuggcauuagguauaaa

SEQ ID NO: 5209 - RNA, 22 nt, Human
uuucucuggccucaguuuaaca

SEQ ID NO: 5210 - RNA, 22 nt, Human
uuucucugggcacucuccaaac

SEQ ID NO: 5211 - RNA, 22 nt, Human
uuucucuuaaugucucugugcu

SEQ ID NO: 5212 - RNA, 22 nt, Human
uuucucuuugacaggaaucaga

SEQ ID NO: 5213 - RNA, 22 nt, Human
uuucugaagucuucuaacagau

SEQ ID NO: 5214 - RNA, 22 nt, Human
uuucugaauaacucuaugauau

SEQ ID NO: 5215 - RNA, 18 nt, Human
uuucugaaugucuauuuc

SEQ ID NO: 5216 - RNA, 22 nt, Human
uuucugagaaauuaaacacuuu

SEQ ID NO: 5217 - RNA, 22 nt, Human
uuucugcaaaauaaauagugac

SEQ ID NO: 5218 - RNA, 22 nt, Human
uuucugcaacgagucuuugacu

SEQ ID NO: 5219 - RNA, 19 nt, Human
uuucugcagcccagcagca

SEQ ID NO: 5220 - RNA, 22 nt, Human
uuucugcauauguauguaugga

SEQ ID NO: 5221 - RNA, 17 nt, Human
uuucugcaugauuggac

SEQ ID NO: 5222 - RNA, 22 nt, Human
uuucugcauuuacaaaaugagg

SEQ ID NO: 5223 - RNA, 22 nt, Human
uuucugccuuaucuuugcugag

SEQ ID NO: 5224 - RNA, 22 nt, Human
uuucugcucgcucucaaucagg

SEQ ID NO: 5225 - RNA, 22 nt, Human
uuucugcuuccuugagaaggag

SEQ ID NO: 5226 - RNA, 22 nt, Human
uuucugcuuucuauccuuguca

SEQ ID NO: 5227 - RNA, 22 nt, Human
cucuccagaauaugccgccgug

SEQ ID NO: 5228 - RNA, 22 nt, Human
cucuccaggcugggacaggacc

SEQ ID NO: 5229 - RNA, 22 nt, Human
cucuccagguuagagcacuuau

SEQ ID NO: 5230 - RNA, 22 nt, Human
cucucccuaugccucccaggag

SEQ ID NO: 5231 - RNA, 22 nt, Human
cucuccuacauuucauucacaa

SEQ ID NO: 5232 - RNA, 22 nt, Human
cucuccucagaacaggcccucu

SEQ ID NO: 5233 - RNA, 22 nt, Human
cucuccuccaggaacucacagu

SEQ ID NO: 5234 - RNA, 23 nt, Human
cucuccugaaggacaagcugccg

SEQ ID NO: 5235 - RNA, 17 nt, Human
cucuccuuccucugagg

SEQ ID NO: 5236 - RNA, 22 nt, Human
cucuccuugcagauggcugccu

SEQ ID NO: 5237 - RNA, 20 nt, Human
cucuccuugccgacuuggca

SEQ ID NO: 5238 - RNA, 22 nt, Human
cucucuagaggcccaccuugag

SEQ ID NO: 5239 - RNA, 22 nt, Human
cucucuauggaugcaguuuuuc

SEQ ID NO: 5240 - RNA, 22 nt, Human
cucucucaguguaauacaggau

SEQ ID NO: 5241 - RNA, 20 nt, Human
cucucuccaucucaguggcc

SEQ ID NO: 5242 - RNA, 22 nt, Human
cucucucuuguguugcugcaga

SEQ ID NO: 5243 - RNA, 22 nt, Human
cucucugcaaguuuugaaauag

SEQ ID NO: 5244 - RNA, 22 nt, Human
cucucuggaagggggagcugau

SEQ ID NO: 5245 - RNA, 22 nt, Human
cucucuggcccauccuguugcc

SEQ ID NO: 5246 - RNA, 22 nt, Human
cucucuguauguguauauuuau

SEQ ID NO: 5247 - RNA, 22 nt, Human
cucucuguuaugcuuucaugaa

SEQ ID NO: 5248 - RNA, 18 nt, Human
cucucuuuccacucuuug

SEQ ID NO: 5249 - RNA, 22 nt, Human
cucucuuuuucgugugccgaag

SEQ ID NO: 5250 - RNA, 22 nt, Human
cucugaaacuccagccccaggu

SEQ ID NO: 5251 - RNA, 22 nt, Human
cucugaaagcaaaacuagagaa

SEQ ID NO: 5252 - RNA, 22 nt, Human
cucugaaaguuagagaaaauag

SEQ ID NO: 5253 - RNA, 22 nt, Human
gcaguacacacauauguauucg

SEQ ID NO: 5254 - RNA, 22 nt, Human
gcaguagugucaguacagcaaa

SEQ ID NO: 5255 - RNA, 22 nt, Human
gcaguauacacugauacaugag

SEQ ID NO: 5256 - RNA, 22 nt, Human
gcaguaugaguguuuuagacau

SEQ ID NO: 5257 - RNA, 22 nt, Human
gcagucaucaguccuuuaauua

SEQ ID NO: 5258 - RNA, 22 nt, Human
gcaguccaaaguggcucucacc

SEQ ID NO: 5259 - RNA, 22 nt, Human
gcaguccauugacagaggucuu

SEQ ID NO: 5260 - RNA, 22 nt, Human
gcagucccauaucuuuaacaua

SEQ ID NO: 5261 - RNA, 22 nt, Human
gcaguccuguagcgacuuuuuu

SEQ ID NO: 5262 - RNA, 22 nt, Human
gcagucuauaaaucagcuuugc

SEQ ID NO: 5263 - RNA, 22 nt, Human
gcagucuaucuugugauuuaac

SEQ ID NO: 5264 - RNA, 22 nt, Human
gcagucucucaggauuuaagcu

SEQ ID NO: 5265 - RNA, 18 nt, Human
gcagucucucuggucuuc

SEQ ID NO: 5266 - RNA, 20 nt, Human
gcagucugccucuguguggu

SEQ ID NO: 5267 - RNA, 22 nt, Human
gcagucuuugaaugugaaauag

SEQ ID NO: 5268 - RNA, 22 nt, Human
gcagugaguuaugaucaugcca

SEQ ID NO: 5269 - RNA, 22 nt, Human
gcagugauuggaucagagaugg

SEQ ID NO: 5270 - RNA, 21 nt, Human
gcagugcagcuuggaggguag

SEQ ID NO: 5271 - RNA, 22 nt, Human
gcagugcaggaacauagcuucu

SEQ ID NO: 5272 - RNA, 22 nt, Human
gcagugcaugucggaacucauu

SEQ ID NO: 5273 - RNA, 22 nt, Human
gcagugccuugcuucucugucu

SEQ ID NO: 5274 - RNA, 22 nt, Human
gcagugcuaaggauucugccuu

SEQ ID NO: 5275 - RNA, 22 nt, Human
gcagugcugagaggugaucgga

SEQ ID NO: 5276 - RNA, 22 nt, Human
gcagugcuuuagucuguccuuu

SEQ ID NO: 5277 - RNA, 23 nt, Human
gcaguggaaugucucuguuugga

SEQ ID NO: 5278 - RNA, 22 nt, Human
gcaguggauccaaugguaucuu

SEQ ID NO: 5279 - RNA, 22 nt, Human
gcaguggcaccgcuggcucugg

SEQ ID NO: 5280 - RNA, 22 nt, Human
gcaguggcuaagcucgcaugca

SEQ ID NO: 5281 - RNA, 22 nt, Human
gcagugggagcuuaggcagugc

SEQ ID NO: 5282 - RNA, 22 nt, Human
gcaguggggcgcugggaguugg

SEQ ID NO: 5283 - RNA, 22 nt, Human
gcagugguccaguucacaccca

SEQ ID NO: 5284 - RNA, 22 nt, Human
gcaguggugggacaguggaaaa

SEQ ID NO: 5285 - RNA, 22 nt, Human
gcagugucagugccuggguggu

SEQ ID NO: 5286 - RNA, 19 nt, Human
gcagugucaugguaggagc

SEQ ID NO: 5287 - RNA, 22 nt, Human
gcagugugacgcuguucuccgu

SEQ ID NO: 5288 - RNA, 22 nt, Human
gcagugugcauggcuuuuggcc

SEQ ID NO: 5289 - RNA, 22 nt, Human
gcaguguguggugagggcugcc

SEQ ID NO: 5290 - RNA, 22 nt, Human
gcaguguuaaugcgaguguuca

SEQ ID NO: 5291 - RNA, 22 nt, Human
gcaguguuaccucuucaguggg

SEQ ID NO: 5292 - RNA, 22 nt, Human
gcaguguuaccuugggcugguu

SEQ ID NO: 5293 - RNA, 22 nt, Human
gcaguguuauguuuucuauaau

SEQ ID NO: 5294 - RNA, 22 nt, Human
gcaguguuccuucuacuggggc

SEQ ID NO: 5295 - RNA, 22 nt, Human
gcaguguugacuaugguaugag

SEQ ID NO: 5296 - RNA, 22 nt, Human
gcaguguugagccagcuggggg

SEQ ID NO: 5297 - RNA, 22 nt, Human
gcaguguugagugguggcugaa

SEQ ID NO: 5298 - RNA, 22 nt, Human
gcaguguuggcaggauggggcu

SEQ ID NO: 5299 - RNA, 22 nt, Human
gcaguguugguuugcucugcag

SEQ ID NO: 5300 - RNA, 22 nt, Human
gcaguguugugauccaggucuu

SEQ ID NO: 5301 - RNA, 22 nt, Human
gcaguguuucagugcuuuuucu

SEQ ID NO: 5302 - RNA, 23 nt, Human
gcaguguuugcuucaucuuaucc

SEQ ID NO: 5303 - RNA, 22 nt, Human
gcaguguuuuacagaccagcau

SEQ ID NO: 5304 - RNA, 21 nt, Human
gcaguuaauagcagagcacac

SEQ ID NO: 5305 - RNA, 22 nt, Human
gcaguuccuacaguggaaagcg

SEQ ID NO: 5306 - RNA, 22 nt, Human
gcaguucuacuuauccauagac

SEQ ID NO: 5307 - RNA, 22 nt, Human
gcaguuguaauaugaugugagg

SEQ ID NO: 5308 - RNA, 22 nt, Human
gcaguuuacugucaauaacucu

SEQ ID NO: 5309 - RNA, 22 nt, Human
gcauaaaugugcacacacaugu

SEQ ID NO: 5310 - RNA, 22 nt, Human
gcauaacaacagacucuguguu

SEQ ID NO: 5311 - RNA, 18 nt, Human
gcauacagaggggaagua

SEQ ID NO: 5312 - RNA, 22 nt, Human
gcauaggccacuagugccagga

SEQ ID NO: 5313 - RNA, 22 nt, Human
gcauauuaguaaucuuucaaca

SEQ ID NO: 5314 - RNA, 20 nt, Human
gcaucaagguacgcucucca

SEQ ID NO: 5315 - RNA, 19 nt, Human
gcaucauuugucucuucuu

SEQ ID NO: 5316 - RNA, 22 nt, Human
gcauccaggacuauaugaugau

SEQ ID NO: 5317 - RNA, 17 nt, Human
gcauccaguaacaugcc

SEQ ID NO: 5318 - RNA, 22 nt, Human
gcauccucccggugcugcuggc

SEQ ID NO: 5319 - RNA, 22 nt, Human
gcauccucugagagcucuagau

SEQ ID NO: 5320 - RNA, 22 nt, Human
gcaucucuacaacgaagacagu

SEQ ID NO: 5321 - RNA, 22 nt, Human
gcaucucuuacccacgagccag

SEQ ID NO: 5322 - RNA, 22 nt, Human
gcaucuuuagccucuccguggc

SEQ ID NO: 5323 - RNA, 22 nt, Human
gcaucuuucuguccauucagca

SEQ ID NO: 5324 - RNA, 22 nt, Human
gcaugagacuagcucaugagca

SEQ ID NO: 5325 - RNA, 22 nt, Human
gcaugagguucuuggccagcau

SEQ ID NO: 5326 - RNA, 22 nt, Human
gcaugauagcuaacuccccuca

SEQ ID NO: 5327 - RNA, 22 nt, Human
gcaugcaaucuauccuuaggaa

SEQ ID NO: 5328 - RNA, 22 nt, Human
gcaugcacggggcauaugggac

SEQ ID NO: 5329 - RNA, 22 nt, Human
gcaugcaggaagggcuugggga

SEQ ID NO: 5330 - RNA, 22 nt, Human
gcaugcagggagggucuggcug

SEQ ID NO: 5331 - RNA, 22 nt, Human
gcaugcaugugugcagacaguc

SEQ ID NO: 5332 - RNA, 22 nt, Human
gcaugcauuucacuagguaugu

SEQ ID NO: 5333 - RNA, 22 nt, Human
gcaugcauuuccauucucacau

SEQ ID NO: 5334 - RNA, 22 nt, Human
gcaugcugcagggaaugcuugu

SEQ ID NO: 5335 - RNA, 22 nt, Human
gcaugcugcugaggcuggaaua

SEQ ID NO: 5336 - RNA, 22 nt, Human
cucuuauuuuauggcauuugug

SEQ ID NO: 5337 - RNA, 22 nt, Human
cucuucaacugccaggcagucu

SEQ ID NO: 5338 - RNA, 22 nt, Human
cucuucaauagauuguugaggg

SEQ ID NO: 5339 - RNA, 22 nt, Human
cucuucaggauggcuugugaug

SEQ ID NO: 5340 - RNA, 21 nt, Human
cucuucaguggugagcucuuc

SEQ ID NO: 5341 - RNA, 22 nt, Human
cucuucaguucaccccuaagca

SEQ ID NO: 5342 - RNA, 22 nt, Human
cucuucauguguuuaauuuuua

SEQ ID NO: 5343 - RNA, 22 nt, Human
cucuucauuaguuccuguccca

SEQ ID NO: 5344 - RNA, 22 nt, Human
cucuuccaccuccuucaggaga

SEQ ID NO: 5345 - RNA, 22 nt, Human
cucuucuuggaaugcugacugu

SEQ ID NO: 5346 - RNA, 22 nt, Human
cucuugaagcaggggccaguuc

SEQ ID NO: 5347 - RNA, 21 nt, Human
cucuugaaugcuugauaagau

SEQ ID NO: 5348 - RNA, 22 nt, Human
cucuugaguggcaugcucuaac

SEQ ID NO: 5349 - RNA, 22 nt, Human
cucuugcagauaccuugaagga

SEQ ID NO: 5350 - RNA, 22 nt, Human
cucuugggagugcucuggagaa

SEQ ID NO: 5351 - RNA, 19 nt, Human
cucuuggguggcagaggcc

SEQ ID NO: 5352 - RNA, 22 nt, Human
cucuuuaaaguaaaauuugucu

SEQ ID NO: 5353 - RNA, 22 nt, Human
cucuuuaagcuccuaacagcca

SEQ ID NO: 5354 - RNA, 20 nt, Human
cucuuuacaugucucuuccu

SEQ ID NO: 5355 - RNA, 17 nt, Human
cucuuuauaaagaguua

SEQ ID NO: 5356 - RNA, 22 nt, Human
cucuuuccucgaugggcuccug

SEQ ID NO: 5357 - RNA, 22 nt, Human
cucuuugacgugcccauguccc

SEQ ID NO: 5358 - RNA, 20 nt, Human
cucuuugcaaugcagaagac

SEQ ID NO: 5359 - RNA, 22 nt, Human
cucuuugccuaacuguuuucaa

SEQ ID NO: 5360 - RNA, 22 nt, Human
cucuuuggauagaauuacaaag

SEQ ID NO: 5361 - RNA, 16 nt, Human
cucuuugggcuuccag

SEQ ID NO: 5362 - RNA, 22 nt, Human
cucuuuggggcuggaagccuag

SEQ ID NO: 5363 - RNA, 22 nt, Human
cucuuuggggugccccacuggu

SEQ ID NO: 5364 - RNA, 22 nt, Human
cucuuuggucgcaucauccauu

SEQ ID NO: 5365 - RNA, 22 nt, Human
cucuuuguggccaccuaaucuu

SEQ ID NO: 5366 - RNA, 22 nt, Human
cugaaguuuugacaucucauuu

SEQ ID NO: 5367 - RNA, 22 nt, Human
cugaauaauacagacuagcuuc

SEQ ID NO: 5368 - RNA, 22 nt, Human
cugaauaauauuccauuaugag

SEQ ID NO: 5369 - RNA, 22 nt, Human
cugaauaucauuuacauuugga

SEQ ID NO: 5370 - RNA, 22 nt, Human
cugaaucauggucauuaguuua

SEQ ID NO: 5371 - RNA, 22 nt, Human
cugaaugaaugguuugucuuau

SEQ ID NO: 5372 - RNA, 22 nt, Human
cugaaugaggaaaagagugagg

SEQ ID NO: 5373 - RNA, 22 nt, Human
cugaaugaguggauuuuucauu

SEQ ID NO: 5374 - RNA, 22 nt, Human
cugaaugucgaucagcuugggu

SEQ ID NO: 5375 - RNA, 22 nt, Human
cugaauuaauacacagaauggc

SEQ ID NO: 5376 - RNA, 22 nt, Human
cugacaaaggcaaggcaggggg

SEQ ID NO: 5377 - RNA, 22 nt, Human
cugacagcgagagaguugcccc

SEQ ID NO: 5378 - RNA, 22 nt, Human
cugacagcuccuagugcucacu

SEQ ID NO: 5379 - RNA, 22 nt, Human
cugacaguuuuugcuguauugu

SEQ ID NO: 5380 - RNA, 22 nt, Human
cugaccaacauggugaaaccuu

SEQ ID NO: 5381 - RNA, 22 nt, Human
cugaccagcccugcccagggaa

SEQ ID NO: 5382 - RNA, 22 nt, Human
cugacccuagcaucucugugca

SEQ ID NO: 5383 - RNA, 22 nt, Human
cugacccuggucaaguugccuc

SEQ ID NO: 5384 - RNA, 22 nt, Human
cugacccuugcucgggcccugu

SEQ ID NO: 5385 - RNA, 18 nt, Human
cugacccuuuuacauucc

SEQ ID NO: 5386 - RNA, 22 nt, Human
cugaccugcggggaggagggcc

SEQ ID NO: 5387 - RNA, 22 nt, Human
cugacucacuguggcucuuaau

SEQ ID NO: 5388 - RNA, 22 nt, Human
cugacucagcagcugaugaucc

SEQ ID NO: 5389 - RNA, 22 nt, Human
cugacucccuccccaaagcugg

SEQ ID NO: 5390 - RNA, 22 nt, Human
cugacuccuuaccauaugcuuu

SEQ ID NO: 5391 - RNA, 22 nt, Human
cugacucuccugagauggggag

SEQ ID NO: 5392 - RNA, 22 nt, Human
cugacucugacaggacuugugg

SEQ ID NO: 5393 - RNA, 22 nt, Human
cugacugucucuucucccauga

SEQ ID NO: 5394 - RNA, 22 nt, Human
cugagaaaagcuuucuuauaca

SEQ ID NO: 5395 - RNA, 22 nt, Human
cugagaaaaguaugagcucugg

SEQ ID NO: 5396 - RNA, 22 nt, Human
cugagaaaugcauuuuuccagc

SEQ ID NO: 5397 - RNA, 22 nt, Human
cugagaaggaagccuccacucu

SEQ ID NO: 5398 - RNA, 22 nt, Human
cugagaauaaagccagcaggag

SEQ ID NO: 5399 - RNA, 22 nt, Human
cugagacccagacaccugagga

SEQ ID NO: 5400 - RNA, 22 nt, Human
cugagagguaagcagcgcagug

SEQ ID NO: 5401 - RNA, 22 nt, Human
cugagagguaaucacacaaaau

SEQ ID NO: 5402 - RNA, 22 nt, Human
cugagaguaauuuucuacuuga

SEQ ID NO: 5403 - RNA, 22 nt, Human
cugagagugcucuuugauguca

SEQ ID NO: 5404 - RNA, 22 nt, Human
cugagauacuguggcgaaugca

SEQ ID NO: 5405 - RNA, 22 nt, Human
cugagaucuuuauacgaggcac

SEQ ID NO: 5406 - RNA, 23 nt, Human
cugagcacagcucugugggccuc

SEQ ID NO: 5407 - RNA, 22 nt, Human
cugagcaccuguuauagguuag

SEQ ID NO: 5408 - RNA, 22 nt, Human
cugagcacguaguuagggucca

SEQ ID NO: 5409 - RNA, 22 nt, Human
cugagcacugggcacauagcug

SEQ ID NO: 5410 - RNA, 22 nt, Human
cugagcagaggucaagauacuu

SEQ ID NO: 5411 - RNA, 22 nt, Human
cugagcagcaacccagagccuc

SEQ ID NO: 5412 - RNA, 22 nt, Human
cugagcagcaauugcuggccca

SEQ ID NO: 5413 - RNA, 22 nt, Human
cugagcagcucccugagugguc

SEQ ID NO: 5414 - RNA, 22 nt, Human
cugagcaggacagugggagacc

SEQ ID NO: 5415 - RNA, 19 nt, Human
cugagcaggcagguaggau

SEQ ID NO: 5416 - RNA, 22 nt, Human
cugagcagggaccaaaagcauu

SEQ ID NO: 5417 - RNA, 22 nt, Human
cugagcagucugacucaagcua

SEQ ID NO: 5418 - RNA, 22 nt, Human
cugagcagugguucuugagcgc

SEQ ID NO: 5419 - RNA, 22 nt, Human
cugagcaucauggcagaaucuu

SEQ ID NO: 5420 - RNA, 22 nt, Human
cugagcaugcuacaugcagcac

SEQ ID NO: 5421 - RNA, 22 nt, Human
cugagccacugcuuguucagug

SEQ ID NO: 5422 - RNA, 22 nt, Human
cugagccagagggagucggguc

SEQ ID NO: 5423 - RNA, 22 nt, Human
cugagccagcgggcucacuuuu

SEQ ID NO: 5424 - RNA, 22 nt, Human
cugagccaguagucagggacaa

SEQ ID NO: 5425 - RNA, 22 nt, Human
cugagccaugggucuaagcacu

SEQ ID NO: 5426 - RNA, 20 nt, Human
cugagcccagaucccagguc

SEQ ID NO: 5427 - RNA, 22 nt, Human
cugagcccucuguuuucccucu

SEQ ID NO: 5428 - RNA, 22 nt, Human
cugagcccugccucuugucacu

SEQ ID NO: 5429 - RNA, 22 nt, Human
cugagccuuauucaccagcccu

SEQ ID NO: 5430 - RNA, 22 nt, Human
cugagcugaaacuugagaggcu

SEQ ID NO: 5431 - RNA, 22 nt, Human
cugagcugguggaagcaugcag

SEQ ID NO: 5432 - RNA, 22 nt, Human
cugagcuguuuaaucccagaua

SEQ ID NO: 5433 - RNA, 22 nt, Human
cugagcuucagugcacugggag

SEQ ID NO: 5434 - RNA, 22 nt, Human
cugagcuuggcuuaucuccagc

SEQ ID NO: 5435 - RNA, 22 nt, Human
cugaggaagacagcagcugugu

SEQ ID NO: 5436 - RNA, 22 nt, Human
cugaggaaggcugggggcaucc

SEQ ID NO: 5437 - RNA, 22 nt, Human
cugaggacauugaugaggcaau

SEQ ID NO: 5438 - RNA, 22 nt, Human
cugaggagacagaagccaaaua

SEQ ID NO: 5439 - RNA, 22 nt, Human
cugaggagagaucacguggugu

SEQ ID NO: 5440 - RNA, 22 nt, Human
cugaggagauccccccagaagu

SEQ ID NO: 5441 - RNA, 22 nt, Human
cugaggaggcuaauuugaggau

SEQ ID NO: 5442 - RNA, 22 nt, Human
cugaggagggaaguccccaaag

SEQ ID NO: 5443 - RNA, 22 nt, Human
cugaggaguuggugaauaagcc

SEQ ID NO: 5444 - RNA, 22 nt, Human
cugaggaguuuggguuguucaa

SEQ ID NO: 5445 - RNA, 22 nt, Human
cugcaggacgaccgccucaucu

SEQ ID NO: 5446 - RNA, 22 nt, Human
cugcaggagcaaagccucugcu

SEQ ID NO: 5447 - RNA, 22 nt, Human
cugcaggauucucccaguugga

SEQ ID NO: 5448 - RNA, 22 nt, Human
cugcagggaccacaagcagguu

SEQ ID NO: 5449 - RNA, 22 nt, Human
cugcagggacccaagucuuugg

SEQ ID NO: 5450 - RNA, 22 nt, Human
cugcagggagcagauggcgugu

SEQ ID NO: 5451 - RNA, 22 nt, Human
cugcagggcagggccuccuggc

SEQ ID NO: 5452 - RNA, 22 nt, Human
cugcagggcauuguaacucuuu

SEQ ID NO: 5453 - RNA, 22 nt, Human
cugcagggugacguugcccacc

SEQ ID NO: 5454 - RNA, 22 nt, Human
cugcaggguuucgccaguugug

SEQ ID NO: 5455 - RNA, 22 nt, Human
cugcaggucucugugugcauuc

SEQ ID NO: 5456 - RNA, 22 nt, Human
cugcaguaaccacuguaggugu

SEQ ID NO: 5457 - RNA, 22 nt, Human
cugcaguaacgaucauggugcc

SEQ ID NO: 5458 - RNA, 22 nt, Human
cugcaguacaagaagcaucucu

SEQ ID NO: 5459 - RNA, 22 nt, Human
cugcaguaucuuaaaauuugua

SEQ ID NO: 5460 - RNA, 22 nt, Human
cugcagucaucugaagauuuug

SEQ ID NO: 5461 - RNA, 22 nt, Human
cugcagucuuccuuccuuaggc

SEQ ID NO: 5462 - RNA, 22 nt, Human
cugcagugaaaucaggaagcaa

SEQ ID NO: 5463 - RNA, 22 nt, Human
cugcagugaggauucuuaggug

SEQ ID NO: 5464 - RNA, 22 nt, Human
cugcagugccugccacugagcc

SEQ ID NO: 5465 - RNA, 22 nt, Human
cugcaguucuuuggcuuuuaga

SEQ ID NO: 5466 - RNA, 22 nt, Human
cugcaguugacucccuguuugc

SEQ ID NO: 5467 - RNA, 22 nt, Human
cugcaguugguggguccucggu

SEQ ID NO: 5468 - RNA, 22 nt, Human
cugcaguuucagccuuucuggc

SEQ ID NO: 5469 - RNA, 22 nt, Human
cugcauaucaaauuacuccugg

SEQ ID NO: 5470 - RNA, 22 nt, Human
cugcaucacagcaggaggcaca

SEQ ID NO: 5471 - RNA, 22 nt, Human
cugcaucacucuuacuggcuuu

SEQ ID NO: 5472 - RNA, 22 nt, Human
cugcaucauaaaauuuagaguu

SEQ ID NO: 5473 - RNA, 22 nt, Human
cugcaucauuggugauucagga

SEQ ID NO: 5474 - RNA, 22 nt, Human
cugcauccuaaccuccaugcag

SEQ ID NO: 5475 - RNA, 22 nt, Human
cugcauccuggaaauagcuaag

SEQ ID NO: 5476 - RNA, 21 nt, Human
cugcaucucauagaacauguc

SEQ ID NO: 5477 - RNA, 21 nt, Human
cugcaucugagucauuaugcc

SEQ ID NO: 5478 - RNA, 22 nt, Human
cugcaucugcauaaucaacuuc

SEQ ID NO: 5479 - RNA, 22 nt, Human
cugcaucuuagucaaaaucugu

SEQ ID NO: 5480 - RNA, 22 nt, Human
cugcaugguucaaaugagcuaa

SEQ ID NO: 5481 - RNA, 22 nt, Human
cugcauguguuucugcuggguu

SEQ ID NO: 5482 - RNA, 22 nt, Human
cugcauguuuacauuuuugaga

SEQ ID NO: 5483 - RNA, 22 nt, Human
cucuuuuaauugucauaacaac

SEQ ID NO: 5484 - RNA, 22 nt, Human
cucuuuuacaccaaaaggccua

SEQ ID NO: 5485 - RNA, 22 nt, Human
cucuuuuagagaugaaaauugg

SEQ ID NO: 5486 - RNA, 17 nt, Human
cucuuuugucuucuucc

SEQ ID NO: 5487 - RNA, 22 nt, Human
cucuuuuucaccucugucagcg

SEQ ID NO: 5488 - RNA, 22 nt, Human
cucuuuuucagccuuaccaaag

SEQ ID NO: 5489 - RNA, 19 nt, Human
cugaaaaacauucucagga

SEQ ID NO: 5490 - RNA, 22 nt, Human
cugaaaauguuacacaggaaga

SEQ ID NO: 5491 - RNA, 22 nt, Human
cugaaaauguuagugauacgaa

SEQ ID NO: 5492 - RNA, 19 nt, Human
cugaaacacagagagggcu

SEQ ID NO: 5493 - RNA, 22 nt, Human
cugaaacuacaguaaggagaac

SEQ ID NO: 5494 - RNA, 22 nt, Human
cugaaacuauggggaggggagc

SEQ ID NO: 5495 - RNA, 22 nt, Human
cugaaacuccaugagaaauugc

SEQ ID NO: 5496 - RNA, 20 nt, Human
cugaaaggagucgggauguc

SEQ ID NO: 5497 - RNA, 22 nt, Human
cugaaagguauaaauaagacuu

SEQ ID NO: 5498 - RNA, 17 nt, Human
cugaaauauuaugauaa

SEQ ID NO: 5499 - RNA, 22 nt, Human
cugaaauuccauuucagccaca

SEQ ID NO: 5500 - RNA, 22 nt, Human
cugaaauucugccucugcacaa

SEQ ID NO: 5501 - RNA, 22 nt, Human
cugaacaguacuuggccaguuu

SEQ ID NO: 5502 - RNA, 22 nt, Human
cugaacauucuugaacaucugu

SEQ ID NO: 5503 - RNA, 20 nt, Human
cugaaccaaggcuuucucag

SEQ ID NO: 5504 - RNA, 15 nt, Human
cugaacucuaaacca

SEQ ID NO: 5505 - RNA, 22 nt, Human
cugaacuuauugagugcuugcu

SEQ ID NO: 5506 - RNA, 22 nt, Human
cugaagaagucucuaggcuauu

SEQ ID NO: 5507 - RNA, 22 nt, Human
cugaagaauagcaggugggcac

SEQ ID NO: 5508 - RNA, 22 nt, Human
cugaagaaugacagugcuuuga

SEQ ID NO: 5509 - RNA, 18 nt, Human
cugaagacaaaaugucca

SEQ ID NO: 5510 - RNA, 22 nt, Human
cugaagagcaaaccaacuggac

SEQ ID NO: 5511 - RNA, 22 nt, Human
cugaagauuuuugguaaucaug

SEQ ID NO: 5512 - RNA, 23 nt, Human
cugaagcaauauccccucacuuc

SEQ ID NO: 5513 - RNA, 22 nt, Human
cugaagcaggccuacuucauug

SEQ ID NO: 5514 - RNA, 22 nt, Human
cugaagcaugcguuuguaaacu

SEQ ID NO: 5515 - RNA, 22 nt, Human
cugaagccaugugcucacuggu

SEQ ID NO: 5516 - RNA, 22 nt, Human
cugaagcuuaguuuacgcucca

SEQ ID NO: 5517 - RNA, 22 nt, Human
cugaaggacuuggugauaguug

SEQ ID NO: 5518 - RNA, 22 nt, Human
cugaaggagcauagucaguuuu

SEQ ID NO: 5519 - RNA, 22 nt, Human
cugaaggagguagagugacaua

SEQ ID NO: 5520 - RNA, 22 nt, Human
cugaaggauucaaaauggcagg

SEQ ID NO: 5521 - RNA, 18 nt, Human
cugaaggcaccagggcag

SEQ ID NO: 5522 - RNA, 22 nt, Human
cugaaggcauuuuugcugauuu

SEQ ID NO: 5523 - RNA, 22 nt, Human
cugaaggggguuucacugagcu

SEQ ID NO: 5524 - RNA, 22 nt, Human
cugaagucauacacuguucuga

SEQ ID NO: 5525 - RNA, 22 nt, Human
cugaagucccuguuuuguuuac

SEQ ID NO: 5526 - RNA, 19 nt, Human
cugaagucuuuucagcugg

SEQ ID NO: 5527 - RNA, 22 nt, Human
cugaaguuauuguacaaauuug

SEQ ID NO: 5528 - RNA, 22 nt, Human
cugaaguuucgagauggaugug

SEQ ID NO: 5529 - RNA, 22 nt, Human
cugaauaauguucucuuguaug

SEQ ID NO: 5530 - RNA, 22 nt, Human
cugaauggaaucaucccugcuu

SEQ ID NO: 5531 - RNA, 22 nt, Human
cugaauggcgaguuaguuaguu

SEQ ID NO: 5532 - RNA, 22 nt, Human
cugaauuacuuauuagugggga

SEQ ID NO: 5533 - RNA, 22 nt, Human
cugaauuagaugaaaaaggcuc

SEQ ID NO: 5534 - RNA, 22 nt, Human
cugacagcaaaggccaguggcu

SEQ ID NO: 5535 - RNA, 22 nt, Human
cugacagccauguuuuagagaa

SEQ ID NO: 5536 - RNA, 19 nt, Human
cugacagcgccugauaaga

SEQ ID NO: 5537 - RNA, 22 nt, Human
cugacagcugaagggucccaga

SEQ ID NO: 5538 - RNA, 22 nt, Human
cugacagcugcugccgccgcau

SEQ ID NO: 5539 - RNA, 22 nt, Human
cugacaguguacacugacagcu

SEQ ID NO: 5540 - RNA, 20 nt, Human
cugacccaaucucugucccc

SEQ ID NO: 5541 - RNA, 22 nt, Human
cugacccauauaagaguggagg

SEQ ID NO: 5542 - RNA, 22 nt, Human
cugacccuuaaugagcaaguaa

SEQ ID NO: 5543 - RNA, 23 nt, Human
cugaccugacccauaagcaagga

SEQ ID NO: 5544 - RNA, 22 nt, Human
cugaccugagugguacaaggca

SEQ ID NO: 5545 - RNA, 22 nt, Human
cugaccuguaacuguaagagac

SEQ ID NO: 5546 - RNA, 22 nt, Human
cugacucccaagcuagugcucu

SEQ ID NO: 5547 - RNA, 22 nt, Human
cugacugugagagcaggaaugg

SEQ ID NO: 5548 - RNA, 22 nt, Human
cugacuguugcuguugaugagg

SEQ ID NO: 5549 - RNA, 22 nt, Human
cugacuguuugcugaaaggucu

SEQ ID NO: 5550 - RNA, 22 nt, Human
cugacuuugacuuggucauuga

SEQ ID NO: 5551 - RNA, 22 nt, Human
cugacuuuuccaaauaauacuu

SEQ ID NO: 5552 - RNA, 22 nt, Human
cugacuuuuuucagccacagug

SEQ ID NO: 5553 - RNA, 22 nt, Human
cugagaaacauauuuccaucua

SEQ ID NO: 5554 - RNA, 22 nt, Human
cugcaucuguuagauuaucacc

SEQ ID NO: 5555 - RNA, 22 nt, Human
cugcaugucacucugcuguccc

SEQ ID NO: 5556 - RNA, 20 nt, Human
cugcauguuggagguguacc

SEQ ID NO: 5557 - RNA, 22 nt, Human
cugcauguuuucuuaauuguga

SEQ ID NO: 5558 - RNA, 22 nt, Human
cugcauuaaguugccuguaaga

SEQ ID NO: 5559 - RNA, 22 nt, Human
cugcauuacuaacaaacuccca

SEQ ID NO: 5560 - RNA, 22 nt, Human
cugcauuauuggggccuguuuc

SEQ ID NO: 5561 - RNA, 22 nt, Human
cugccacuagcuuucacaucuu

SEQ ID NO: 5562 - RNA, 22 nt, Human
cugccacuuacuaggcauggug

SEQ ID NO: 5563 - RNA, 22 nt, Human
cugccacuuuggagugcucaga

SEQ ID NO: 5564 - RNA, 22 nt, Human
cugccagacacguuaugcucau

SEQ ID NO: 5565 - RNA, 22 nt, Human
cugccagagaucugggcagagu

SEQ ID NO: 5566 - RNA, 22 nt, Human
cugccagcaagcuacccuggca

SEQ ID NO: 5567 - RNA, 22 nt, Human
cugccagcuagcuccuaguuga

SEQ ID NO: 5568 - RNA, 22 nt, Human
cugccagcucaccggcucagac

SEQ ID NO: 5569 - RNA, 22 nt, Human
cugccagcucgccacaaugaca

SEQ ID NO: 5570 - RNA, 22 nt, Human
cugccaggcagggagauggcug

SEQ ID NO: 5571 - RNA, 22 nt, Human
cugccagggcauccuguggugg

SEQ ID NO: 5572 - RNA, 22 nt, Human
cugccagggcccuacucaguuu

SEQ ID NO: 5573 - RNA, 22 nt, Human
cugccaggugccagggcgcggc

SEQ ID NO: 5574 - RNA, 22 nt, Human
cugccauccacggcccacucau

SEQ ID NO: 5575 - RNA, 22 nt, Human
cugccaucugagccaaaagugc

SEQ ID NO: 5576 - RNA, 22 nt, Human
cugccaugcucaagaagucuuu

SEQ ID NO: 5577 - RNA, 22 nt, Human
cugcccacacucauggggaagg

SEQ ID NO: 5578 - RNA, 22 nt, Human
cugcccaccccgaggcaggaag

SEQ ID NO: 5579 - RNA, 22 nt, Human
cugcccagaagcuuagagcuua

SEQ ID NO: 5580 - RNA, 18 nt, Human
cugcccagagcacuugug

SEQ ID NO: 5581 - RNA, 22 nt, Human
cugcccagauuuuaccaccugc

SEQ ID NO: 5582 - RNA, 22 nt, Human
cugcccauaaacuuuccaccug

SEQ ID NO: 5583 - RNA, 23 nt, Human
cugccccaauuauaaaagaagau

SEQ ID NO: 5584 - RNA, 22 nt, Human
cugccccagccuggggccuucu

SEQ ID NO: 5585 - RNA, 22 nt, Human
cugccccaggaccucuucugga

SEQ ID NO: 5586 - RNA, 22 nt, Human
cugcccccaggcugcauggcug

SEQ ID NO: 5587 - RNA, 22 nt, Human
cugccccucgaccaagcgcguc

SEQ ID NO: 5588 - RNA, 22 nt, Human
cugccccugccaggcagcuguc

SEQ ID NO: 5589 - RNA, 22 nt, Human
cugcccgucccuuugcucucgc

SEQ ID NO: 5590 - RNA, 21 nt, Human
cugcccuagauggcucuggaa

SEQ ID NO: 5591 - RNA, 22 nt, Human
cugcccugaccugccucagagu

SEQ ID NO: 5592 - RNA, 22 nt, Human
cugcccugacugaccuuuugaa

SEQ ID NO: 5593 - RNA, 22 nt, Human
cugcccugagucaugccagaug

SEQ ID NO: 5594 - RNA, 22 nt, Human
cugcccugauaugauuuagaac

SEQ ID NO: 5595 - RNA, 22 nt, Human
cugcccugccuggccagugugg

SEQ ID NO: 5596 - RNA, 22 nt, Human
cugcccugcucuccgggaucuu

SEQ ID NO: 5597 - RNA, 22 nt, Human
cugcccugcuuguuuccagugg

SEQ ID NO: 5598 - RNA, 22 nt, Human
cugcccuggaaaacguaucuua

SEQ ID NO: 5599 - RNA, 22 nt, Human
cugcccuggucccauggcugau

SEQ ID NO: 5600 - RNA, 22 nt, Human
cugcccugucugcagccuggcu

SEQ ID NO: 5601 - RNA, 22 nt, Human
cugcccugucuuuuucugauga

SEQ ID NO: 5602 - RNA, 22 nt, Human
cugcccugugcacaggaaacug

SEQ ID NO: 5603 - RNA, 20 nt, Human
cugccgaccacagccaugga

SEQ ID NO: 5604 - RNA, 22 nt, Human
cugccucagccuucugggugac

SEQ ID NO: 5605 - RNA, 22 nt, Human
cugccucagcguuguggcccua

SEQ ID NO: 5606 - RNA, 22 nt, Human
cugccuccaggcucaccuugac

SEQ ID NO: 5607 - RNA, 22 nt, Human
cugccuccuggcugauggguag

SEQ ID NO: 5608 - RNA, 22 nt, Human
cugccucucagccugaccgcca

SEQ ID NO: 5609 - RNA, 22 nt, Human
cugccucugguuuuggucccug

SEQ ID NO: 5610 - RNA, 22 nt, Human
cugccugacugauaaucucuga

SEQ ID NO: 5611 - RNA, 22 nt, Human
cugccugcacugccuggcucca

SEQ ID NO: 5612 - RNA, 22 nt, Human
cugccugcaggacaccucgcua

SEQ ID NO: 5613 - RNA, 22 nt, Human
gccuggaggaauguagcugagg

SEQ ID NO: 5614 - RNA, 20 nt, Human
gccuggaggcaaugggaaga

SEQ ID NO: 5615 - RNA, 22 nt, Human
gccuggaggcgagaacccaaug

SEQ ID NO: 5616 - RNA, 22 nt, Human
gccuggagggucccucucugga

SEQ ID NO: 5617 - RNA, 23 nt, Human
gccuggauuaaggcagugacuuc

SEQ ID NO: 5618 - RNA, 22 nt, Human
gccuggcacaguagggacccaa

SEQ ID NO: 5619 - RNA, 22 nt, Human
gccuggcacauugcaguggauu

SEQ ID NO: 5620 - RNA, 22 nt, Human
gccuggcaggaaucucagugcu

SEQ ID NO: 5621 - RNA, 22 nt, Human
gccuggcauauaguaguugugc

SEQ ID NO: 5622 - RNA, 22 nt, Human
gccuggcauuggagccggggca

SEQ ID NO: 5623 - RNA, 22 nt, Human
gccuggcuaagcagaaggaccc

SEQ ID NO: 5624 - RNA, 22 nt, Human
gccuggcugccggccuuggcaa

SEQ ID NO: 5625 - RNA, 22 nt, Human
gccuggcugcuagccagaggca

SEQ ID NO: 5626 - RNA, 22 nt, Human
gccuggcugggcaccaggggag

SEQ ID NO: 5627 - RNA, 22 nt, Human
gccuggcuggucacugccuggc

SEQ ID NO: 5628 - RNA, 22 nt, Human
gccuggcugucuggcaagguuc

SEQ ID NO: 5629 - RNA, 21 nt, Human
gccuggcuucacaggcacuga

SEQ ID NO: 5630 - RNA, 22 nt, Human
gccuggcuuggggcucaguggu

SEQ ID NO: 5631 - RNA, 22 nt, Human
gccugggacccuuagcucuugg

SEQ ID NO: 5632 - RNA, 18 nt, Human
gccugggagaaguuucac

SEQ ID NO: 5633 - RNA, 22 nt, Human
gccugggagaaugaccuccaac

SEQ ID NO: 5634 - RNA, 22 nt, Human
gccugggagaugcguuguggcc

SEQ ID NO: 5635 - RNA, 22 nt, Human
gccugggagauuaauuaggaag

SEQ ID NO: 5636 - RNA, 19 nt, Human
gccugggaugggcagaacu

SEQ ID NO: 5637 - RNA, 20 nt, Human
gccugggauuauccacuggu

SEQ ID NO: 5638 - RNA, 22 nt, Human
gccugggauucucaaaggggug

SEQ ID NO: 5639 - RNA, 22 nt, Human
gccuggggggcaugucauaaua

SEQ ID NO: 5640 - RNA, 22 nt, Human
gccugggugcucuguguaaggg

SEQ ID NO: 5641 - RNA, 22 nt, Human
gccuggguggagaggggugaca

SEQ ID NO: 5642 - RNA, 22 nt, Human
gccuggguuccugcuuuuguga

SEQ ID NO: 5643 - RNA, 22 nt, Human
gccuggugaaaggcagagagcg

SEQ ID NO: 5644 - RNA, 22 nt, Human
gccuggugucuccccaaggaag

SEQ ID NO: 5645 - RNA, 22 nt, Human
gccuguauuuauugagagugua

SEQ ID NO: 5646 - RNA, 20 nt, Human
gccuguccugagugucaugg

SEQ ID NO: 5647 - RNA, 22 nt, Human
gccugugaccccuccaucugcu

SEQ ID NO: 5648 - RNA, 22 nt, Human
gccugugcuguucccucugcca

SEQ ID NO: 5649 - RNA, 22 nt, Human
gccuguggguuggagcuuggcc

SEQ ID NO: 5650 - RNA, 22 nt, Human
gccugugucauguaguagcuuc

SEQ ID NO: 5651 - RNA, 22 nt, Human
gccuguguggaugggccccugg

SEQ ID NO: 5652 - RNA, 18 nt, Human
gccuguguucagccuuuc

SEQ ID NO: 5653 - RNA, 18 nt, Human
gccuguucccuacuaucc

SEQ ID NO: 5654 - RNA, 22 nt, Human
gccuguuuaucuaucaugaacu

SEQ ID NO: 5655 - RNA, 22 nt, Human
gccuguuucuaaucucauuucu

SEQ ID NO: 5656 - RNA, 22 nt, Human
gccuguuugacuggucucugcu

SEQ ID NO: 5657 - RNA, 22 nt, Human
gccuguuuguuugcaaaggagc

SEQ ID NO: 5658 - RNA, 22 nt, Human
gccuguuuuugcuucguuuaag

SEQ ID NO: 5659 - RNA, 22 nt, Human
gccuuacugagggcaauuuuga

SEQ ID NO: 5660 - RNA, 22 nt, Human
gccuuagccugcacuuccuguu

SEQ ID NO: 5661 - RNA, 22 nt, Human
gccuuaggggucagacagagcu

SEQ ID NO: 5662 - RNA, 22 nt, Human
gccuucagcccugacuggccag

SEQ ID NO: 5663 - RNA, 22 nt, Human
cugcugcucuugugcauuagug

SEQ ID NO: 5664 - RNA, 22 nt, Human
cugcugcugcuaucuacccagg

SEQ ID NO: 5665 - RNA, 21 nt, Human
cugcugcuggggucugggcag

SEQ ID NO: 5666 - RNA, 22 nt, Human
cugcugcuuuugcgggagaaca

SEQ ID NO: 5667 - RNA, 22 nt, Human
cugcuggaaguuugcuguggau

SEQ ID NO: 5668 - RNA, 22 nt, Human
cugcuggagggagcugauagug

SEQ ID NO: 5669 - RNA, 22 nt, Human
cugcuggagguuggagcaugca

SEQ ID NO: 5670 - RNA, 22 nt, Human
cugcuggcaagcccaguuggag

SEQ ID NO: 5671 - RNA, 22 nt, Human
cugcugggccuggucucugagg

SEQ ID NO: 5672 - RNA, 22 nt, Human
cugcugggggacacagguccgg

SEQ ID NO: 5673 - RNA, 22 nt, Human
cugcuggggucagagcacuggg

SEQ ID NO: 5674 - RNA, 22 nt, Human
cugcugggucuaugcaagugga

SEQ ID NO: 5675 - RNA, 22 nt, Human
cugcuggugcagaguggggcug

SEQ ID NO: 5676 - RNA, 22 nt, Human
cugcugguugcacagagcuagg

SEQ ID NO: 5677 - RNA, 22 nt, Human
cugcuguacuuaggaagaggaa

SEQ ID NO: 5678 - RNA, 22 nt, Human
cugcuguccaggagugcccugu

SEQ ID NO: 5679 - RNA, 22 nt, Human
cugcugucgccacggucgccgc

SEQ ID NO: 5680 - RNA, 22 nt, Human
cugcugucgccgagcugcaugc

SEQ ID NO: 5681 - RNA, 22 nt, Human
cugcugucuaguaucuuaaaaa

SEQ ID NO: 5682 - RNA, 22 nt, Human
cugcugucuuuauuucacugcu

SEQ ID NO: 5683 - RNA, 22 nt, Human
cugcugugagcacuccagccug

SEQ ID NO: 5684 - RNA, 22 nt, Human
cugcugugaguuuggaggucua

SEQ ID NO: 5685 - RNA, 22 nt, Human
cugcugugcauauuuaucuagg

SEQ ID NO: 5686 - RNA, 22 nt, Human
cugcugugccuuaaaaugcaag

SEQ ID NO: 5687 - RNA, 22 nt, Human
cugcuguggaugcaggaccuca

SEQ ID NO: 5688 - RNA, 22 nt, Human
cugcuguguaucauuuuagaug

SEQ ID NO: 5689 - RNA, 22 nt, Human
cugcuguguggugaaacucagu

SEQ ID NO: 5690 - RNA, 22 nt, Human
cugcuguguuccuccugcaucu

SEQ ID NO: 5691 - RNA, 22 nt, Human
cugcuguuugccgucauugccu

SEQ ID NO: 5692 - RNA, 23 nt, Human
cugcuguuuucuguaccugaagc

SEQ ID NO: 5693 - RNA, 22 nt, Human
cugcuuaaaaugcagauucugu

SEQ ID NO: 5694 - RNA, 22 nt, Human
cugcuucaaggaaaugaaucgg

SEQ ID NO: 5695 - RNA, 22 nt, Human
cugcuucacccugccugagaac

SEQ ID NO: 5696 - RNA, 22 nt, Human
cugcuucacguugugccuuguu

SEQ ID NO: 5697 - RNA, 22 nt, Human
cugcuucacuucgguugcauag

SEQ ID NO: 5698 - RNA, 20 nt, Human
cugcuuccaggcucaccccc

SEQ ID NO: 5699 - RNA, 22 nt, Human
cugcuuccauaaauaaugugcu

SEQ ID NO: 5700 - RNA, 22 nt, Human
cugcuuccauggucuggagacu

SEQ ID NO: 5701 - RNA, 22 nt, Human
cugcuuccugcugggauacuga

SEQ ID NO: 5702 - RNA, 22 nt, Human
cugcuucuccaaaguaggacuu

SEQ ID NO: 5703 - RNA, 22 nt, Human
cugcuucugggaugauggagua

SEQ ID NO: 5704 - RNA, 18 nt, Human
cugcuucugucugccagu

SEQ ID NO: 5705 - RNA, 22 nt, Human
cugcuugccuggacagcguuag

SEQ ID NO: 5706 - RNA, 17 nt, Human
cugcuuggccucugggg

SEQ ID NO: 5707 - RNA, 22 nt, Human
cugcuuggguccuggcaugggu

SEQ ID NO: 5708 - RNA, 22 nt, Human
cugcuugucuucgaggggugca

SEQ ID NO: 5709 - RNA, 22 nt, Human
cugcuuuaaguauucaacaaag

SEQ ID NO: 5710 - RNA, 22 nt, Human
cugcuuuaauguaagauauacc

SEQ ID NO: 5711 - RNA, 21 nt, Human
cugcuuuacuucagaggaucu

SEQ ID NO: 5712 - RNA, 22 nt, Human
cugcuuuagacggcuuucgcug

SEQ ID NO: 5713 - RNA, 22 nt, Human
cugcuuuauauugagcuugaaa

SEQ ID NO: 5714 - RNA, 22 nt, Human
cugcuuucugcaccccaggucg

SEQ ID NO: 5715 - RNA, 22 nt, Human
cugcuuugaaaauaaacuuguc

SEQ ID NO: 5716 - RNA, 18 nt, Human
cugcuuugccuucauucc

SEQ ID NO: 5717 - RNA, 22 nt, Human
cugcuuuggcucagugacauca

SEQ ID NO: 5718 - RNA, 22 nt, Human
cugcuuuguaaaauagacauaa

SEQ ID NO: 5719 - RNA, 22 nt, Human
cugcuuuguggaaucacacugg

SEQ ID NO: 5720 - RNA, 22 nt, Human
cugcuuuguguggucccuccag

SEQ ID NO: 5721 - RNA, 22 nt, Human
cugcuuuugagcccagugcuca

SEQ ID NO: 5722 - RNA, 22 nt, Human
cugcuuuuucuaggaggacaau

SEQ ID NO: 5723 - RNA, 22 nt, Human
cuggaaagcugcaggacccaga

SEQ ID NO: 5724 - RNA, 22 nt, Human
cuggaaagugcauguaaugagg

SEQ ID NO: 5725 - RNA, 22 nt, Human
cuggaaagugcuuuucugagag

SEQ ID NO: 5726 - RNA, 22 nt, Human
cuggaaaguucaagauaaagcu

SEQ ID NO: 5727 - RNA, 22 nt, Human
cuggaaaucacuacuagucaau

SEQ ID NO: 5728 - RNA, 22 nt, Human
cuggaaauuggagaugauguuu

SEQ ID NO: 5729 - RNA, 22 nt, Human
cuggaacaaguggccuugcaag

SEQ ID NO: 5730 - RNA, 22 nt, Human
gcuaaugacugaguuuuuagca

SEQ ID NO: 5731 - RNA, 22 nt, Human
gcuaaugugauagagcagaaag

SEQ ID NO: 5732 - RNA, 22 nt, Human
gcuaauucacaguaggaaauuu

SEQ ID NO: 5733 - RNA, 22 nt, Human
gcuacagacugagcauggcucu

SEQ ID NO: 5734 - RNA, 22 nt, Human
gcuacagauuuaucauguuaua

SEQ ID NO: 5735 - RNA, 22 nt, Human
gcuacaggagauaaaggccucu

SEQ ID NO: 5736 - RNA, 22 nt, Human
gcuacagugauaggaaacacau

SEQ ID NO: 5737 - RNA, 22 nt, Human
gcuacccagagccucacccugu

SEQ ID NO: 5738 - RNA, 22 nt, Human
gcuaccugagcaagagcuucaa

SEQ ID NO: 5739 - RNA, 22 nt, Human
gcuacuaggaagauuccaggau

SEQ ID NO: 5740 - RNA, 22 nt, Human
gcuacuaguacagcaaggacua

SEQ ID NO: 5741 - RNA, 22 nt, Human
gcuacugugaaggagucuuucu

SEQ ID NO: 5742 - RNA, 22 nt, Human
gcuagcaaaugucauuuggaag

SEQ ID NO: 5743 - RNA, 22 nt, Human
gcuagccugcaguggcuauggu

SEQ ID NO: 5744 - RNA, 22 nt, Human
gcuagcuggguuucacugugga

SEQ ID NO: 5745 - RNA, 22 nt, Human
gcuaggaaaggaagaacuuuga

SEQ ID NO: 5746 - RNA, 22 nt, Human
gcuaggaacauuuauauacaaa

SEQ ID NO: 5747 - RNA, 22 nt, Human
gcuaggaagaagggugcuugaa

SEQ ID NO: 5748 - RNA, 22 nt, Human
gcuaggaaucggacccaggaag

SEQ ID NO: 5749 - RNA, 22 nt, Human
gcuaggagauugagcucugaag

SEQ ID NO: 5750 - RNA, 22 nt, Human
gcuaggagugggauggaagucg

SEQ ID NO: 5751 - RNA, 16 nt, Human
gcuaggcaacaggcug

SEQ ID NO: 5752 - RNA, 22 nt, Human
gcuaggcuguguuucagacccu

SEQ ID NO: 5753 - RNA, 22 nt, Human
gcuagggaaccucuucugagga

SEQ ID NO: 5754 - RNA, 18 nt, Human
gcuagggcaugcauggug

SEQ ID NO: 5755 - RNA, 22 nt, Human
gcuaggucugugcgcagccgcu

SEQ ID NO: 5756 - RNA, 23 nt, Human
gcuaggugcuuccacacgugcug

SEQ ID NO: 5757 - RNA, 22 nt, Human
gcuaugcaggagccuaaugaca

SEQ ID NO: 5758 - RNA, 22 nt, Human
gcuaugggaugugcuguggaug

SEQ ID NO: 5759 - RNA, 22 nt, Human
gcuauguguaucuguuagagag

SEQ ID NO: 5760 - RNA, 22 nt, Human
gcuauuguuuauuuugaaucua

SEQ ID NO: 5761 - RNA, 22 nt, Human
gcuauuuauuaaaauagugaag

SEQ ID NO: 5762 - RNA, 22 nt, Human
gcuauuuauuaaaauggugaag

SEQ ID NO: 5763 - RNA, 22 nt, Human
gcuauuuuugagccauuuauaa

SEQ ID NO: 5764 - RNA, 22 nt, Human
gcucaaaugucauggggagccu

SEQ ID NO: 5765 - RNA, 19 nt, Human
gcucaacagcucggguccu

SEQ ID NO: 5766 - RNA, 22 nt, Human
gcucacagagggugcuuaauac

SEQ ID NO: 5767 - RNA, 22 nt, Human
gcucaccacugcuagagucuau

SEQ ID NO: 5768 - RNA, 22 nt, Human
gcucaccucgcugcaggugggu

SEQ ID NO: 5769 - RNA, 22 nt, Human
gcucacugccauucucuagaug

SEQ ID NO: 5770 - RNA, 22 nt, Human
gcucacuuaauuucaugcuaca

SEQ ID NO: 5771 - RNA, 22 nt, Human
gcucagacucuggccugaugau

SEQ ID NO: 5772 - RNA, 22 nt, Human
cuggagccauguauagccuaug

SEQ ID NO: 5773 - RNA, 22 nt, Human
cuggagccaugucuugacugcu

SEQ ID NO: 5774 - RNA, 22 nt, Human
cuggagccccagacagggagag

SEQ ID NO: 5775 - RNA, 22 nt, Human
cuggagccgcauggagcaggga

SEQ ID NO: 5776 - RNA, 22 nt, Human
cuggagccggcgagccccagcc

SEQ ID NO: 5777 - RNA, 22 nt, Human
cuggagcucuccagagccccgu

SEQ ID NO: 5778 - RNA, 22 nt, Human
cuggagcuggcccaggcuggcc

SEQ ID NO: 5779 - RNA, 22 nt, Human
cuggagcugggcuaggguagga

SEQ ID NO: 5780 - RNA, 22 nt, Human
cuggagcugucuucacaggccu

SEQ ID NO: 5781 - RNA, 22 nt, Human
cuggagcuguuuuuucaggaaa

SEQ ID NO: 5782 - RNA, 21 nt, Human
cuggagcuuggugagaagugu

SEQ ID NO: 5783 - RNA, 22 nt, Human
cuggaggaauaaucuccuaccc

SEQ ID NO: 5784 - RNA, 22 nt, Human
cuggaggacagaggccaugucu

SEQ ID NO: 5785 - RNA, 22 nt, Human
cuggaggaccccugccuggaag

SEQ ID NO: 5786 - RNA, 22 nt, Human
cuggaggagaacuugaggaagg

SEQ ID NO: 5787 - RNA, 21 nt, Human
cuggaggcagguggugccagg

SEQ ID NO: 5788 - RNA, 22 nt, Human
cuggaggccacuguacagauug

SEQ ID NO: 5789 - RNA, 22 nt, Human
cuggagggacuuucucacggau

SEQ ID NO: 5790 - RNA, 22 nt, Human
cuggagggauguaggguguauu

SEQ ID NO: 5791 - RNA, 22 nt, Human
cuggagggcugcagcgaggcug

SEQ ID NO: 5792 - RNA, 22 nt, Human
cuggagggcuucugcagguuac

SEQ ID NO: 5793 - RNA, 21 nt, Human
cuggaggguagaguugggcug

SEQ ID NO: 5794 - RNA, 22 nt, Human
cuggagggugagccucaucucu

SEQ ID NO: 5795 - RNA, 22 nt, Human
cuggagguaauguuauuuuugu

SEQ ID NO: 5796 - RNA, 22 nt, Human
cuggagucacacacaccaaggu

SEQ ID NO: 5797 - RNA, 22 nt, Human
cuggagucacucauguagcugc

SEQ ID NO: 5798 - RNA, 21 nt, Human
cuggagucuggggguggcagu

SEQ ID NO: 5799 - RNA, 22 nt, Human
cuggagucuuagguuaugguga

SEQ ID NO: 5800 - RNA, 22 nt, Human
cuggagucuucagcuugcugcc

SEQ ID NO: 5801 - RNA, 22 nt, Human
cuggagugaagcuuauuuuuca

SEQ ID NO: 5802 - RNA, 22 nt, Human
cuggagugaagucuggcagcuu

SEQ ID NO: 5803 - RNA, 22 nt, Human
cuggaguggccggugcuguggc

SEQ ID NO: 5804 - RNA, 20 nt, Human
cuggaguguagcaguggcug

SEQ ID NO: 5805 - RNA, 22 nt, Human
cuggaguucaguggcgugaaca

SEQ ID NO: 5806 - RNA, 22 nt, Human
cuggauaagaguuuuacuuccu

SEQ ID NO: 5807 - RNA, 22 nt, Human
cuggauccaucgggucccgagu

SEQ ID NO: 5808 - RNA, 22 nt, Human
cuggaucuguuugugcuugugg

SEQ ID NO: 5809 - RNA, 22 nt, Human
cuggauguaacgaagguuucac

SEQ ID NO: 5810 - RNA, 22 nt, Human
cuggaugugguaaugacuuuga

SEQ ID NO: 5811 - RNA, 22 nt, Human
cuggauguuuaugaaggaccca

SEQ ID NO: 5812 - RNA, 22 nt, Human
cuggauguuuugcuaaggacuc

SEQ ID NO: 5813 - RNA, 22 nt, Human
cuggauuaaguaaaauagagga

SEQ ID NO: 5814 - RNA, 22 nt, Human
cuggauucucaucagagccaga

SEQ ID NO: 5815 - RNA, 22 nt, Human
cuggauuuaggacuaguccaag

SEQ ID NO: 5816 - RNA, 22 nt, Human
cuggauuuuagaaggcuuccua

SEQ ID NO: 5817 - RNA, 22 nt, Human
cuggcaaguacugggccagcuc

SEQ ID NO: 5818 - RNA, 22 nt, Human
cuggcacauaguaggugcacag

SEQ ID NO: 5819 - RNA, 22 nt, Human
cuggcagcagcugguaccuuau

SEQ ID NO: 5820 - RNA, 19 nt, Human
cuggcagccugucuguguc

SEQ ID NO: 5821 - RNA, 22 nt, Human
cuggcagcgguuugcagccugg

SEQ ID NO: 5822 - RNA, 22 nt, Human
cuggcagcucugagucccuucu

SEQ ID NO: 5823 - RNA, 22 nt, Human
cuggcagcuucaggacacucgg

SEQ ID NO: 5824 - RNA, 22 nt, Human
cuggcaggaaguuagaugguaa

SEQ ID NO: 5825 - RNA, 22 nt, Human
cuggcaggagcauucacagagg

SEQ ID NO: 5826 - RNA, 20 nt, Human
cuggcaggagcgagucuacc

SEQ ID NO: 5827 - RNA, 22 nt, Human
cuggcaggagcuguggccguag

SEQ ID NO: 5828 - RNA, 22 nt, Human
cuggcaggaucuaaccagggaa

SEQ ID NO: 5829 - RNA, 22 nt, Human
cuggcagggcugguauucaaaa

SEQ ID NO: 5830 - RNA, 22 nt, Human
cuggcagguccagcuggacuca

SEQ ID NO: 5831 - RNA, 22 nt, Human
cuggcaggucucgcugacgugu

SEQ ID NO: 5832 - RNA, 22 nt, Human
cuggcagguggagguugcagug

SEQ ID NO: 5833 - RNA, 22 nt, Human
cuggcagucugguggaaggccu

SEQ ID NO: 5834 - RNA, 22 nt, Human
cuggcagugcccagucacuguu

SEQ ID NO: 5835 - RNA, 22 nt, Human
cuggcagugcccucagccccca

SEQ ID NO: 5836 - RNA, 22 nt, Human
cuggcaugaaauggcaucucau

SEQ ID NO: 5837 - RNA, 21 nt, Human
cuggcauuaugauagcguccu

SEQ ID NO: 5838 - RNA, 18 nt, Human
cuggcauucuucccugga

SEQ ID NO: 5839 - RNA, 22 nt, Human
cuggcauuuagacccacagcaa

SEQ ID NO: 5840 - RNA, 22 nt, Human
cuggccaacuugcuuguuggca

SEQ ID NO: 5841 - RNA, 22 nt, Human
cuggccaauccauuaauuuguu

SEQ ID NO: 5842 - RNA, 19 nt, Human
cuggccacaccugcugguu

SEQ ID NO: 5843 - RNA, 20 nt, Human
cuggccagaacgccuacaca

SEQ ID NO: 5844 - RNA, 22 nt, Human
cuggccagaguuggagggugug

SEQ ID NO: 5845 - RNA, 19 nt, Human
cuggccaggccaggggccc

SEQ ID NO: 5846 - RNA, 22 nt, Human
cuggccaggcuugggacagaca

SEQ ID NO: 5847 - RNA, 22 nt, Human
cuggccagugccugugggcccc

SEQ ID NO: 5848 - RNA, 22 nt, Human
cugggucacccaaaagggccag

SEQ ID NO: 5849 - RNA, 20 nt, Human
cugggucacuuggcugcucu

SEQ ID NO: 5850 - RNA, 22 nt, Human
cugggucccaauagcuuuuguu

SEQ ID NO: 5851 - RNA, 22 nt, Human
cugggucccacagccugcuggg

SEQ ID NO: 5852 - RNA, 22 nt, Human
cugggucccggcuucuauccac

SEQ ID NO: 5853 - RNA, 18 nt, Human
cugggucuccaggcugcc

SEQ ID NO: 5854 - RNA, 22 nt, Human
cugggucucuuuagggugccgu

SEQ ID NO: 5855 - RNA, 22 nt, Human
cugggucugggccuccuggagu

SEQ ID NO: 5856 - RNA, 22 nt, Human
cugggucugugcccagggaccu

SEQ ID NO: 5857 - RNA, 19 nt, Human
cugggucuuauucugugaa

SEQ ID NO: 5858 - RNA, 22 nt, Human
cugggucuucagcagcaggcgg

SEQ ID NO: 5859 - RNA, 22 nt, Human
cugggugacagagugagauggu

SEQ ID NO: 5860 - RNA, 22 nt, Human
cugggugaguauaggaaaggga

SEQ ID NO: 5861 - RNA, 22 nt, Human
cugggugccagcauggcugagu

SEQ ID NO: 5862 - RNA, 22 nt, Human
cugggugcgugagcgcaugcgu

SEQ ID NO: 5863 - RNA, 22 nt, Human
cuggguguagauggaaguuugg

SEQ ID NO: 5864 - RNA, 22 nt, Human
cuggguguuggguacugaccgu

SEQ ID NO: 5865 - RNA, 22 nt, Human
cugguaaagaagacaaacaggg

SEQ ID NO: 5866 - RNA, 23 nt, Human
cugguaaaucacuaaaauuacaa

SEQ ID NO: 5867 - RNA, 22 nt, Human
cugguaaaugaugagaagcacc

SEQ ID NO: 5868 - RNA, 22 nt, Human
cugguacaguguuacaaaaugg

SEQ ID NO: 5869 - RNA, 22 nt, Human
cugguacauaguaagaacacaa

SEQ ID NO: 5870 - RNA, 22 nt, Human
cugguacauuugaugauaauag

SEQ ID NO: 5871 - RNA, 22 nt, Human
cugguaggggugacuguuaucg

SEQ ID NO: 5872 - RNA, 22 nt, Human
cugguaguuugcaaaauggugu

SEQ ID NO: 5873 - RNA, 22 nt, Human
cuggucaaggagagucucugca

SEQ ID NO: 5874 - RNA, 22 nt, Human
cuggucacuccuccaccugcuu

SEQ ID NO: 5875 - RNA, 22 nt, Human
cuggucaggcugaacugccaca

SEQ ID NO: 5876 - RNA, 17 nt, Human
cuggucccaccaagccc

SEQ ID NO: 5877 - RNA, 22 nt, Human
cuggucccugaguaguuaugca

SEQ ID NO: 5878 - RNA, 22 nt, Human
cuggucccuggaccucccugga

SEQ ID NO: 5879 - RNA, 22 nt, Human
cuggucccuguagguauuugac

SEQ ID NO: 5880 - RNA, 22 nt, Human
cugguccucuccagcaggcauu

SEQ ID NO: 5881 - RNA, 22 nt, Human
cugggagcuagcucugagcuga

SEQ ID NO: 5882 - RNA, 22 nt, Human
cugggagcuuggagccuuuggu

SEQ ID NO: 5883 - RNA, 22 nt, Human
cugggagcuuguuaggaaugca

SEQ ID NO: 5884 - RNA, 22 nt, Human
cugggaggacaacuuggagcuc

SEQ ID NO: 5885 - RNA, 22 nt, Human
cugggaggcaccgcgucgugcu

SEQ ID NO: 5886 - RNA, 22 nt, Human
cugggaggcccacguugggaag

SEQ ID NO: 5887 - RNA, 20 nt, Human
cugggaggucuuccaaauca

SEQ ID NO: 5888 - RNA, 22 nt, Human
cugggaggugaacagaaaaacu

SEQ ID NO: 5889 - RNA, 22 nt, Human
cugggaggugcagcaaaaauca

SEQ ID NO: 5890 - RNA, 22 nt, Human
cugggaguacugggggauguca

SEQ ID NO: 5891 - RNA, 22 nt, Human
cugggagucaccaggagcaagg

SEQ ID NO: 5892 - RNA, 22 nt, Human
cugggagucccuggaauagcuc

SEQ ID NO: 5893 - RNA, 22 nt, Human
cugggagucuggccucuggucc

SEQ ID NO: 5894 - RNA, 22 nt, Human
cugggaguggugacagcucucg

SEQ ID NO: 5895 - RNA, 22 nt, Human
cugggaguguucuaggucacau

SEQ ID NO: 5896 - RNA, 22 nt, Human
cugggaguuucuagagaaagac

SEQ ID NO: 5897 - RNA, 22 nt, Human
cugggaguuuguuaguaaugca

SEQ ID NO: 5898 - RNA, 22 nt, Human
cugggaucagcaguagugauga

SEQ ID NO: 5899 - RNA, 22 nt, Human
cugggaugauagugcuaguauu

SEQ ID NO: 5900 - RNA, 22 nt, Human
cugggaugcggagguugcggug

SEQ ID NO: 5901 - RNA, 22 nt, Human
cugggaugucuauagaacacuu

SEQ ID NO: 5902 - RNA, 22 nt, Human
cugggcaauaugcugggccugg

SEQ ID NO: 5903 - RNA, 22 nt, Human
cugggcacaaguggcccuggau

SEQ ID NO: 5904 - RNA, 22 nt, Human
cugggcaccuuugcagcaggcu

SEQ ID NO: 5905 - RNA, 22 nt, Human
cugggcacugcagcaggcauca

SEQ ID NO: 5906 - RNA, 22 nt, Human
cugggcacuuuggggagccuac

SEQ ID NO: 5907 - RNA, 22 nt, Human
cugggcagagcuaacaccugag

SEQ ID NO: 5908 - RNA, 22 nt, Human
cugggcagaguccggaagaugg

SEQ ID NO: 5909 - RNA, 22 nt, Human
cugggcagcacaucaucguauc

SEQ ID NO: 5910 - RNA, 22 nt, Human
cugggcagcuguaucagggagu

SEQ ID NO: 5911 - RNA, 22 nt, Human
cugggcaggagaggugguugga

SEQ ID NO: 5912 - RNA, 22 nt, Human
cugggcagugcagcuauagaac

SEQ ID NO: 5913 - RNA, 22 nt, Human
cugggcagugguggcaucuuug

SEQ ID NO: 5914 - RNA, 22 nt, Human
cugggccacagacucaaggcag

SEQ ID NO: 5915 - RNA, 18 nt, Human
cugggccagaguuucugc

SEQ ID NO: 5916 - RNA, 22 nt, Human
cugggccaggaccaggguugaa

SEQ ID NO: 5917 - RNA, 22 nt, Human
cugggccagggaggugucugua

SEQ ID NO: 5918 - RNA, 22 nt, Human
cugggccaugggccagcgaggc

SEQ ID NO: 5919 - RNA, 22 nt, Human
cugggcccuauggaagaaaggg

SEQ ID NO: 5920 - RNA, 22 nt, Human
cugggccuaacccacagcguuu

SEQ ID NO: 5921 - RNA, 22 nt, Human
cugggccucaagcucagauuuc

SEQ ID NO: 5922 - RNA, 22 nt, Human
cugggccucacccuagaccaau

SEQ ID NO: 5923 - RNA, 22 nt, Human
cugggccucauccccagaguuu

SEQ ID NO: 5924 - RNA, 22 nt, Human
cugggccucauccucagaguuu

SEQ ID NO: 5925 - RNA, 22 nt, Human
cugggccuccagcucugccagc

SEQ ID NO: 5926 - RNA, 22 nt, Human
cugggccuggacgggcagaucu

SEQ ID NO: 5927 - RNA, 22 nt, Human
cugggccuggggcuguugagag

SEQ ID NO: 5928 - RNA, 22 nt, Human
cugggccugugacucccauccu

SEQ ID NO: 5929 - RNA, 22 nt, Human
cugggccugugggcacacggac

SEQ ID NO: 5930 - RNA, 22 nt, Human
cugggccuuagggcacucccuu

SEQ ID NO: 5931 - RNA, 22 nt, Human
cugggccuugcaucccagagcc

SEQ ID NO: 5932 - RNA, 22 nt, Human
cugggccuugccuugcccacag

SEQ ID NO: 5933 - RNA, 22 nt, Human
cugggccuuuaccuacggaguu

SEQ ID NO: 5934 - RNA, 22 nt, Human
cugggccuuugcuuauuaauuu

SEQ ID NO: 5935 - RNA, 22 nt, Human
cugggcucaaauccuggcccug

SEQ ID NO: 5936 - RNA, 21 nt, Human
cugggcucaagcaauccuuuc

SEQ ID NO: 5937 - RNA, 22 nt, Human
cugggcucagaaccuuguuaag

SEQ ID NO: 5938 - RNA, 22 nt, Human
cugggcuccuaaccauccaggu

SEQ ID NO: 5939 - RNA, 22 nt, Human
cugggcucuaagggagcaccgu

SEQ ID NO: 5940 - RNA, 22 nt, Human
cugggcucuagaaaggaaagaa

SEQ ID NO: 5941 - RNA, 22 nt, Human
cugggcucugcaguugauguuu

SEQ ID NO: 5942 - RNA, 22 nt, Human
cugggcucuucccagauccaga

SEQ ID NO: 5943 - RNA, 22 nt, Human
cugggcugaaaguguuccuuga

SEQ ID NO: 5944 - RNA, 22 nt, Human
cugggcugcaucaaagaggcau

SEQ ID NO: 5945 - RNA, 22 nt, Human
cugggcugccagguaggcacac

SEQ ID NO: 5946 - RNA, 22 nt, Human
cugggcuggacacacuuaaccu

SEQ ID NO: 5947 - RNA, 22 nt, Human
cugggcugucaauggcccucug

SEQ ID NO: 5948 - RNA, 22 nt, Human
cugggcugucccaaccccaucc

SEQ ID NO: 5949 - RNA, 22 nt, Human
cugggcugucccagggcggcag

SEQ ID NO: 5950 - RNA, 22 nt, Human
cugggcuguucugccccugggu

SEQ ID NO: 5951 - RNA, 22 nt, Human
cugggcuucucccccuggcaga

SEQ ID NO: 5952 - RNA, 22 nt, Human
cugggcuuguguuagcugacaa

SEQ ID NO: 5953 - RNA, 21 nt, Human
cugggcuuucucucaaagaca

SEQ ID NO: 5954 - RNA, 22 nt, Human
cugggcuuuugagucacaaggg

SEQ ID NO: 5955 - RNA, 20 nt, Human
cuggggacagcaauggcugu

SEQ ID NO: 5956 - RNA, 22 nt, Human
cuggggacucauucagagcaua

SEQ ID NO: 5957 - RNA, 22 nt, Human
cuggggagacgaucgauguucu

SEQ ID NO: 5958 - RNA, 22 nt, Human
cuggggaggaugcuacgaccug

SEQ ID NO: 5959 - RNA, 22 nt, Human
cuggggagugaaauucuuaaau

SEQ ID NO: 5960 - RNA, 22 nt, Human
cuggggcaugggccccuagagg

SEQ ID NO: 5961 - RNA, 22 nt, Human
cuggggcccaucgagggcugag

SEQ ID NO: 5962 - RNA, 22 nt, Human
cuggggcccgagccuugggcca

SEQ ID NO: 5963 - RNA, 22 nt, Human
cugucccucucacaccucacca

SEQ ID NO: 5964 - RNA, 22 nt, Human
cugucccuucauuauucacuac

SEQ ID NO: 5965 - RNA, 22 nt, Human
cuguccucaacccauccuucuc

SEQ ID NO: 5966 - RNA, 22 nt, Human
cuguccuccggccaccuacagu

SEQ ID NO: 5967 - RNA, 22 nt, Human
cuguccugaaagggagauuggg

SEQ ID NO: 5968 - RNA, 22 nt, Human
cuguccugaguucuuggagguc

SEQ ID NO: 5969 - RNA, 22 nt, Human
cuguccuguacuuugaggcccu

SEQ ID NO: 5970 - RNA, 23 nt, Human
cuguccuguaguucacguuggcc

SEQ ID NO: 5971 - RNA, 22 nt, Human
cuguccuguggaccugaggacg

SEQ ID NO: 5972 - RNA, 22 nt, Human
cuguccuguggugacagguaca

SEQ ID NO: 5973 - RNA, 20 nt, Human
cuguccuuuuguuggaagac

SEQ ID NO: 5974 - RNA, 22 nt, Human
cugucuaguuaggaugccagca

SEQ ID NO: 5975 - RNA, 22 nt, Human
cugucuccgcccucuugguagg

SEQ ID NO: 5976 - RNA, 22 nt, Human
cugucucucuaggacacugggg

SEQ ID NO: 5977 - RNA, 22 nt, Human
cugucugccaauaaucuauggc

SEQ ID NO: 5978 - RNA, 19 nt, Human
cugucugcggggccuguuc

SEQ ID NO: 5979 - RNA, 22 nt, Human
cugucugcuagaacaucuauac

SEQ ID NO: 5980 - RNA, 22 nt, Human
cugucugggucuacauccucug

SEQ ID NO: 5981 - RNA, 22 nt, Human
cugucuguacaaauguggggcc

SEQ ID NO: 5982 - RNA, 22 nt, Human
cugucuguacugagaguucugu

SEQ ID NO: 5983 - RNA, 22 nt, Human
cugucugucaaguucaucucca

SEQ ID NO: 5984 - RNA, 22 nt, Human
cugucugucaccaaaacagacu

SEQ ID NO: 5985 - RNA, 22 nt, Human
cugucugugaccucugcauguc

SEQ ID NO: 5986 - RNA, 22 nt, Human
cugucugugccucuucucccag

SEQ ID NO: 5987 - RNA, 22 nt, Human
cugucuguuucaaaagugguua

SEQ ID NO: 5988 - RNA, 22 nt, Human
cugucuucccgaggcccuggag

SEQ ID NO: 5989 - RNA, 22 nt, Human
cugucuucuccuuuguuucagg

SEQ ID NO: 5990 - RNA, 21 nt, Human
cuuguuuugaaaggacuggcc

SEQ ID NO: 5991 - RNA, 22 nt, Human
cuuuaaauaauacaagguccag

SEQ ID NO: 5992 - RNA, 22 nt, Human
cuuuaacaguuccauucaauuu

SEQ ID NO: 5993 - RNA, 22 nt, Human
cuuuaagagaucaccaaucaca

SEQ ID NO: 5994 - RNA, 22 nt, Human
cuuuaaggugaugagagaugcu

SEQ ID NO: 5995 - RNA, 23 nt, Human
cuuuaaugaaauucucugugaag

SEQ ID NO: 5996 - RNA, 22 nt, Human
cuuuaauucucaggugcacaua

SEQ ID NO: 5997 - RNA, 22 nt, Human
cuuuacaaagcaauuuugucuc

SEQ ID NO: 5998 - RNA, 22 nt, Human
cuuuacacaaugauuuucuuua

SEQ ID NO: 5999 - RNA, 22 nt, Human
cuuuacacauccuaaccagugu

SEQ ID NO: 6000 - RNA, 22 nt, Human
cuuuacagaaagagaacucugg

SEQ ID NO: 6001 - RNA, 22 nt, Human
cuuuacagaauaagaauacugg

SEQ ID NO: 6002 - RNA, 22 nt, Human
cuuuacagugcugcuaauggcu

SEQ ID NO: 6003 - RNA, 22 nt, Human
cuuuacauccuguuucccguuu

SEQ ID NO: 6004 - RNA, 22 nt, Human
cuuuacauuaauuucuacugau

SEQ ID NO: 6005 - RNA, 22 nt, Human
cuuuaccagauuccauugcaag

SEQ ID NO: 6006 - RNA, 22 nt, Human
cuuuacuucagcaagcuuuccu

SEQ ID NO: 6007 - RNA, 22 nt, Human
cuuuacuucucaaaauaaagca

SEQ ID NO: 6008 - RNA, 22 nt, Human
cuuuagaaaucuggauguauuu

SEQ ID NO: 6009 - RNA, 20 nt, Human
cuuuagaagaacccaagcau

SEQ ID NO: 6010 - RNA, 22 nt, Human
cuuuagcaacgaugaugauauu

SEQ ID NO: 6011 - RNA, 22 nt, Human
cuuuagugguauuuuagcaagu

SEQ ID NO: 6012 - RNA, 22 nt, Human
cuuuaguuaguagauaauggca

SEQ ID NO: 6013 - RNA, 20 nt, Human
cuuuaguuauuaacagcacu

SEQ ID NO: 6014 - RNA, 22 nt, Human
cuuuaguuuaagaacaugauga

SEQ ID NO: 6015 - RNA, 22 nt, Human
cuuuaucuguguccucuugccu

SEQ ID NO: 6016 - RNA, 22 nt, Human
cuuuaugaaggaacaaugcucc

SEQ ID NO: 6017 - RNA, 22 nt, Human
cuuuaugacugaguugucaauu

SEQ ID NO: 6018 - RNA, 22 nt, Human
cuuuauggaaucaaagacugga

SEQ ID NO: 6019 - RNA, 22 nt, Human
cuuuauguccaccagacugcaa

SEQ ID NO: 6020 - RNA, 22 nt, Human
cuuuauguucaguacaaugcuu

SEQ ID NO: 6021 - RNA, 22 nt, Human
cuuuauguuggggugucuuagu

SEQ ID NO: 6022 - RNA, 22 nt, Human
cuuuauuccuacaagauuuucu

SEQ ID NO: 6023 - RNA, 22 nt, Human
cuuuauucugcaaauugccuug

SEQ ID NO: 6024 - RNA, 22 nt, Human
cuuucaaugucaucugugaaug

SEQ ID NO: 6025 - RNA, 22 nt, Human
cuuucacagcacaagccugccu

SEQ ID NO: 6026 - RNA, 22 nt, Human
cuuucacucgagcuccugcagc

SEQ ID NO: 6027 - RNA, 22 nt, Human
cuuucagaagccggaagggcag

SEQ ID NO: 6028 - RNA, 22 nt, Human
cuuucagaggggcguacacagc

SEQ ID NO: 6029 - RNA, 22 nt, Human
cuuucagagguuacucaggaaa

SEQ ID NO: 6030 - RNA, 22 nt, Human
cuuucaguuaaugacuccauag

SEQ ID NO: 6031 - RNA, 22 nt, Human
cuuucauccgcagaugagccuc

SEQ ID NO: 6032 - RNA, 22 nt, Human
cuuucauuugauaagaaugcca

SEQ ID NO: 6033 - RNA, 22 nt, Human
cuuuccaacucuagugaaauuu

SEQ ID NO: 6034 - RNA, 22 nt, Human
cuuuccaagaaugcagauaccu

SEQ ID NO: 6035 - RNA, 22 nt, Human
cuuuccaaugcauuuccaaugu

SEQ ID NO: 6036 - RNA, 22 nt, Human
cuuuccaggaauccucacagcc

SEQ ID NO: 6037 - RNA, 22 nt, Human
cuuucccacgcaguggaugaga

SEQ ID NO: 6038 - RNA, 22 nt, Human
cuuucccuuagccccauucuau

SEQ ID NO: 6039 - RNA, 22 nt, Human
cuuuccuaguaguuacagaaug

SEQ ID NO: 6040 - RNA, 22 nt, Human
cuuuccuccacucccuaggcuu

SEQ ID NO: 6041 - RNA, 22 nt, Human
cuuuccuucucgugguucucac

SEQ ID NO: 6042 - RNA, 22 nt, Human
cuuucuaaauguuccuugauua

SEQ ID NO: 6043 - RNA, 22 nt, Human
cuuucuagaguauggagucugu

SEQ ID NO: 6044 - RNA, 22 nt, Human
cuuucucuggaggggagugguu

SEQ ID NO: 6045 - RNA, 22 nt, Human
cuuucucugugugguaaagggc

SEQ ID NO: 6046 - RNA, 22 nt, Human
cuuucucuucacugucaugauc

SEQ ID NO: 6047 - RNA, 22 nt, Human
cuuucucuucgaaaaccugccc

SEQ ID NO: 6048 - RNA, 22 nt, Human
cuuucugaucccugcaacccuc

SEQ ID NO: 6049 - RNA, 22 nt, Human
cuuucuggaguggaaagguauu

SEQ ID NO: 6050 - RNA, 22 nt, Human
cuuucuuccauagggcccaguc

SEQ ID NO: 6051 - RNA, 22 nt, Human
cuuugaaaaaugguuuccuaga

SEQ ID NO: 6052 - RNA, 22 nt, Human
cuuugaagagauuacugugcuc

SEQ ID NO: 6053 - RNA, 22 nt, Human
cuuugaagauggcaaauuuaga

SEQ ID NO: 6054 - RNA, 22 nt, Human
cuuugaauuaacgacacaagug

SEQ ID NO: 6055 - RNA, 22 nt, Human
cuuugacauccuuguuccucag

SEQ ID NO: 6056 - RNA, 22 nt, Human
cuuugacuccaucucucuuugu

SEQ ID NO: 6057 - RNA, 22 nt, Human
cuuugauuccaggcacauguuu

SEQ ID NO: 6058 - RNA, 23 nt, Human
cuuugcaaaaacauuagucagug

SEQ ID NO: 6059 - RNA, 22 nt, Human
cuuugcaaacgauuaccacaug

SEQ ID NO: 6060 - RNA, 22 nt, Human
cuuugcaaagucuuuggcaaga

SEQ ID NO: 6061 - RNA, 22 nt, Human
cuuugcaauagaggcacacaug

SEQ ID NO: 6062 - RNA, 22 nt, Human
cuuugcagauuuguuuagugcu

SEQ ID NO: 6063 - RNA, 17 nt, Human
cuuugcagcagacaugu

SEQ ID NO: 6064 - RNA, 22 nt, Human
cuuugcaguuagccuaggauug

SEQ ID NO: 6065 - RNA, 22 nt, Human
cuuugcaguuucagaacccuga

SEQ ID NO: 6066 - RNA, 21 nt, Human
cuuugcaucuauauguucuca

SEQ ID NO: 6067 - RNA, 22 nt, Human
cuuugcaugggucugaaggcuu

SEQ ID NO: 6068 - RNA, 22 nt, Human
cuuugcaugugguagaagguuc

SEQ ID NO: 6069 - RNA, 22 nt, Human
cuuugcugccagaacccagcag

SEQ ID NO: 6070 - RNA, 22 nt, Human
cuuugcuucuccaaccugcuca

SEQ ID NO: 6071 - RNA, 22 nt, Human
cuuugcuuuacucccacugugu

SEQ ID NO: 6072 - RNA, 22 nt, Human
cuuuggaaggaagaccuuucag

SEQ ID NO: 6073 - RNA, 22 nt, Human
cuuuggaauauuuuauugagaa

SEQ ID NO: 6074 - RNA, 22 nt, Human
cuuuggagaagaaugcauccuu

SEQ ID NO: 6075 - RNA, 22 nt, Human
cuuuggaggaaaauugagguca

SEQ ID NO: 6076 - RNA, 22 nt, Human
cuuuggaggaccuaugugcaau

SEQ ID NO: 6077 - RNA, 19 nt, Human
cuuuggaggaugaggcugg

SEQ ID NO: 6078 - RNA, 22 nt, Human
cuuuggaugacuggugcagguu

SEQ ID NO: 6079 - RNA, 22 nt, Human
cuuuggcaaugucauuuucaau

SEQ ID NO: 6080 - RNA, 22 nt, Human
cuuuggcuaacaaaucagcuug

SEQ ID NO: 6081 - RNA, 22 nt, Human
cuuuggcuacaagcgcugcaau

SEQ ID NO: 6082 - RNA, 22 nt, Human
cuuuggcucaugguuuuaucca

SEQ ID NO: 6083 - RNA, 22 nt, Human
cuuuggcuugcacuauuacacu

SEQ ID NO: 6084 - RNA, 22 nt, Human
cuuuggcuugcccuggcaguac

SEQ ID NO: 6085 - RNA, 22 nt, Human
cuuugggcaaagggccaauucg

SEQ ID NO: 6086 - RNA, 22 nt, Human
cuuuggugucauguuucugcgg

SEQ ID NO: 6087 - RNA, 22 nt, Human
cuuugguguucauuaaacaugg

SEQ ID NO: 6088 - RNA, 21 nt, Human
cuuugguuuccuccugccuuc

SEQ ID NO: 6089 - RNA, 22 nt, Human
cuuuguaagucuuucuccaaga

SEQ ID NO: 6090 - RNA, 22 nt, Human
cuuuguauucauccguaauaau

SEQ ID NO: 6091 - RNA, 19 nt, Human
cuuugucagaacaugcuuc

SEQ ID NO: 6092 - RNA, 22 nt, Human
cuuugucauuuugucucucagu

SEQ ID NO: 6093 - RNA, 22 nt, Human
cuuugugcaaacccuagaauca

SEQ ID NO: 6094 - RNA, 22 nt, Human
cuuuguuagcagccaauuuguu

SEQ ID NO: 6095 - RNA, 22 nt, Human
cuuuguucaugacaucugcuuc

SEQ ID NO: 6096 - RNA, 22 nt, Human
cuuuguucugcacacacagaca

SEQ ID NO: 6097 - RNA, 22 nt, Human
cuuuguuuauauuucuccucga

SEQ ID NO: 6098 - RNA, 22 nt, Human
cuuuuaaugagcauugcugucu

SEQ ID NO: 6099 - RNA, 22 nt, Human
cuugggauguaaccuuuguucc

SEQ ID NO: 6100 - RNA, 22 nt, Human
cuugggcaggggaaacagcugc

SEQ ID NO: 6101 - RNA, 22 nt, Human
cuugggccagcccagggggcau

SEQ ID NO: 6102 - RNA, 22 nt, Human
cuugggcucagacuugaggaca

SEQ ID NO: 6103 - RNA, 22 nt, Human
cuugggcuuagaagguaaguga

SEQ ID NO: 6104 - RNA, 22 nt, Human
cuuggggaugcaaagccagugu

SEQ ID NO: 6105 - RNA, 22 nt, Human
cuuggggcagcccaggcugagc

SEQ ID NO: 6106 - RNA, 22 nt, Human
cuuggggcagugcuuggcacau

SEQ ID NO: 6107 - RNA, 22 nt, Human
cuuuuacauuuguugaagagua

SEQ ID NO: 6108 - RNA, 22 nt, Human
cuuuuacugugaaaagaaacug

SEQ ID NO: 6109 - RNA, 22 nt, Human
cuuuuagcuguuuccauggcaa

SEQ ID NO: 6110 - RNA, 22 nt, Human
cuuuucaaacgcugaugucagu

SEQ ID NO: 6111 - RNA, 22 nt, Human
cuuuucaggcuacauuauggga

SEQ ID NO: 6112 - RNA, 19 nt, Human
cuuuucaucaacagccaau

SEQ ID NO: 6113 - RNA, 22 nt, Human
cuuuucaugccagcccaucaca

SEQ ID NO: 6114 - RNA, 22 nt, Human
cuuuuccucaggaggagacgcg

SEQ ID NO: 6115 - RNA, 21 nt, Human
cuuuucuagucccagccccgc

SEQ ID NO: 6116 - RNA, 21 nt, Human
cuuuucucuccgcaggacauu

SEQ ID NO: 6117 - RNA, 22 nt, Human
cuuuucuguaucaaaaggauua

SEQ ID NO: 6118 - RNA, 22 nt, Human
cuuuucugucagugcccaaauu

SEQ ID NO: 6119 - RNA, 22 nt, Human
cuuuucuuauguggacguaccu

SEQ ID NO: 6120 - RNA, 18 nt, Human
cuuuuguuuucccuccuc

SEQ ID NO: 6121 - RNA, 22 nt, Human
cuuuuuacucuguugucucagc

SEQ ID NO: 6122 - RNA, 22 nt, Human
cuuuuucaagucaaagagggua

SEQ ID NO: 6123 - RNA, 19 nt, Human
cuuuuucaccuucuagaag

SEQ ID NO: 6124 - RNA, 22 nt, Human
cuuuuuccucguagagccuaau

SEQ ID NO: 6125 - RNA, 22 nt, Human
cuuuuucugauguuccaugauu

SEQ ID NO: 6126 - RNA, 22 nt, Human
gaaaaaugagcugaugucaggg

SEQ ID NO: 6127 - RNA, 22 nt, Human
gaaaaccaccucccaucaagca

SEQ ID NO: 6128 - RNA, 22 nt, Human
gaaaacuaacggaaaaguuagg

SEQ ID NO: 6129 - RNA, 22 nt, Human
gaaaacuauuggccuagaacaa

SEQ ID NO: 6130 - RNA, 22 nt, Human
gaaaagaacugcaugggauuaa

SEQ ID NO: 6131 - RNA, 22 nt, Human
gaaaagagacagggugggugau

SEQ ID NO: 6132 - RNA, 22 nt, Human
gaaaagaguccugugugaggag

SEQ ID NO: 6133 - RNA, 22 nt, Human
gaaaagcuaggccaguucagcu

SEQ ID NO: 6134 - RNA, 22 nt, Human
gaaaaggauugguaaaauaucu

SEQ ID NO: 6135 - RNA, 22 nt, Human
gaaaaguacacagcccaaacau

SEQ ID NO: 6136 - RNA, 22 nt, Human
gaaaauaggcugcaucuccuuc

SEQ ID NO: 6137 - RNA, 22 nt, Human
gaaaauaguucaucacaaugau

SEQ ID NO: 6138 - RNA, 22 nt, Human
gaaaaugugccuuuggguauug

SEQ ID NO: 6139 - RNA, 22 nt, Human
gaaacaauacuuguccucacua

SEQ ID NO: 6140 - RNA, 22 nt, Human
gaaacagcacguuuggagagau

SEQ ID NO: 6141 - RNA, 22 nt, Human
gaaacagcuagaaagccauugg

SEQ ID NO: 6142 - RNA, 22 nt, Human
gaaacagugagaacuuuuccug

SEQ ID NO: 6143 - RNA, 22 nt, Human
gaaacauacgauuuaggagaaa

SEQ ID NO: 6144 - RNA, 22 nt, Human
gaaacauaguugagacacugcu

SEQ ID NO: 6145 - RNA, 22 nt, Human
gaaacauauuaauccagugaaa

SEQ ID NO: 6146 - RNA, 22 nt, Human
gaaacauugagcagaaggagaa

SEQ ID NO: 6147 - RNA, 20 nt, Human
gaaaccagaacgcagcccug

SEQ ID NO: 6148 - RNA, 22 nt, Human
gaaaccagcuagaggcagaggg

SEQ ID NO: 6149 - RNA, 22 nt, Human
gaaaccuauuuauaacuucuag

SEQ ID NO: 6150 - RNA, 22 nt, Human
gaaaccucuuagccucucuuug

SEQ ID NO: 6151 - RNA, 22 nt, Human
gaaaccugggauauauaaguuu

SEQ ID NO: 6152 - RNA, 22 nt, Human
gaaaccugugcugauuuguuag

SEQ ID NO: 6153 - RNA, 22 nt, Human
gaaacguuaaaccauauguaau

SEQ ID NO: 6154 - RNA, 22 nt, Human
gaaacguuggcauaaguuuaug

SEQ ID NO: 6155 - RNA, 22 nt, Human
gaaacuagauguauuagagauu

SEQ ID NO: 6156 - RNA, 22 nt, Human
gaaacugugaucguguucuggg

SEQ ID NO: 6157 - RNA, 22 nt, Human
gaaacuguuucuggcuuuggug

SEQ ID NO: 6158 - RNA, 22 nt, Human
gaaacuucuugucucacaguuc

SEQ ID NO: 6159 - RNA, 22 nt, Human
gaaacuuuuaaaccucaugagu

SEQ ID NO: 6160 - RNA, 22 nt, Human
gaaagaccagcaugaggcuuua

SEQ ID NO: 6161 - RNA, 22 nt, Human
gaaagacuaacuagaaagugca

SEQ ID NO: 6162 - RNA, 22 nt, Human
gaaagacuuccuuugagaguac

SEQ ID NO: 6163 - RNA, 22 nt, Human
gaaagaggaaggagauguauua

SEQ ID NO: 6164 - RNA, 22 nt, Human
gaaagauauuuauuggcaacag

SEQ ID NO: 6165 - RNA, 18 nt, Human
gaaagaugaacuuuuuuc

SEQ ID NO: 6166 - RNA, 22 nt, Human
gaaagcaaguugacugcagaau

SEQ ID NO: 6167 - RNA, 22 nt, Human
gaaagcacuaaaagagaauccu

SEQ ID NO: 6168 - RNA, 22 nt, Human
gaaagcacugugagaucuuguu

SEQ ID NO: 6169 - RNA, 17 nt, Human
gaaagcaucacaugcuc

SEQ ID NO: 6170 - RNA, 22 nt, Human
gaaaggagaggguuaaggagcu

SEQ ID NO: 6171 - RNA, 22 nt, Human
gaaaggagggcucacaaaagug

SEQ ID NO: 6172 - RNA, 22 nt, Human
gaaaggagugaauauuugugac

SEQ ID NO: 6173 - RNA, 22 nt, Human
gaaaggccaccaugccagggac

SEQ ID NO: 6174 - RNA, 22 nt, Human
gaaaggcuaaaauuauaagggu

SEQ ID NO: 6175 - RNA, 22 nt, Human
gaaaggcucacuuuagaucaug

SEQ ID NO: 6176 - RNA, 22 nt, Human
gaaaggcucagaaguuuguauu

SEQ ID NO: 6177 - RNA, 23 nt, Human
gaaaggcucugggacccccaacu

SEQ ID NO: 6178 - RNA, 22 nt, Human
gaaaggcugggauuuagcgcug

SEQ ID NO: 6179 - RNA, 22 nt, Human
gaaagggcaugggcaugacaac

SEQ ID NO: 6180 - RNA, 22 nt, Human
gaaaggugccccauaggcagga

SEQ ID NO: 6181 - RNA, 22 nt, Human
gaaagguugggugaauggugga

SEQ ID NO: 6182 - RNA, 22 nt, Human
gaaagguuucaucuacuuuuca

SEQ ID NO: 6183 - RNA, 22 nt, Human
gaaaguauucucccugaauuuu

SEQ ID NO: 6184 - RNA, 22 nt, Human
gaaaguauuuaaguccauauuu

SEQ ID NO: 6185 - RNA, 19 nt, Human
gaaagucauagagcuuguc

SEQ ID NO: 6186 - RNA, 22 nt, Human
gaaagugcagucagacaaggca

SEQ ID NO: 6187 - RNA, 22 nt, Human
gaaagugcaugugcccaccauu

SEQ ID NO: 6188 - RNA, 22 nt, Human
gaaaguuauugaaccuuauuua

SEQ ID NO: 6189 - RNA, 22 nt, Human
gaaaguucacacauccacaugg

SEQ ID NO: 6190 - RNA, 22 nt, Human
gaaaguugcaaucauggcuuuu

SEQ ID NO: 6191 - RNA, 22 nt, Human
gaaaguuugccucucucuugag

SEQ ID NO: 6192 - RNA, 22 nt, Human
gaaaguuuucucacacaguaau

SEQ ID NO: 6193 - RNA, 22 nt, Human
gaaauaacagcucuggaagagu

SEQ ID NO: 6194 - RNA, 22 nt, Human
gaaauaaccucaugcaccauga

SEQ ID NO: 6195 - RNA, 22 nt, Human
gaaauaauucugugucugaaca

SEQ ID NO: 6196 - RNA, 22 nt, Human
gaaauacaauuuugucccagcu

SEQ ID NO: 6197 - RNA, 22 nt, Human
gaaauacugcacacccuguaag

SEQ ID NO: 6198 - RNA, 22 nt, Human
gaaauagaggacagcuggauca

SEQ ID NO: 6199 - RNA, 22 nt, Human
gaaauaguacagcauaguucuu

SEQ ID NO: 6200 - RNA, 22 nt, Human
gaaauauugggacucagagcuu

SEQ ID NO: 6201 - RNA, 22 nt, Human
gaaaucaggaugauguuccaga

SEQ ID NO: 6202 - RNA, 22 nt, Human
gaaaucaguucugaaauuuaca

SEQ ID NO: 6203 - RNA, 22 nt, Human
gaaaucuacgauuagugaaaau

SEQ ID NO: 6204 - RNA, 22 nt, Human
gaaaucuacuuagugucuggau

SEQ ID NO: 6205 - RNA, 22 nt, Human
gaaaucugaacucuguauccuu

SEQ ID NO: 6206 - RNA, 22 nt, Human
gaaaucugaaucuucuguuggu

SEQ ID NO: 6207 - RNA, 22 nt, Human
gaaaucuuuauggaaauaacaa

SEQ ID NO: 6208 - RNA, 22 nt, Human
cuuugcagcucuagguggaagc

SEQ ID NO: 6209 - RNA, 22 nt, Human
cuuugcaggaguaugugauaau

SEQ ID NO: 6210 - RNA, 19 nt, Human
cuuugcaggggauggguga

SEQ ID NO: 6211 - RNA, 22 nt, Human
cuuugcagugaauccauaaaua

SEQ ID NO: 6212 - RNA, 18 nt, Human
cuuugcaguuacagggca

SEQ ID NO: 6213 - RNA, 23 nt, Human
cuuugccacccagagccugacag

SEQ ID NO: 6214 - RNA, 19 nt, Human
cuuugccacugauaggagu

SEQ ID NO: 6215 - RNA, 22 nt, Human
cuuugccauguugccugcagaa

SEQ ID NO: 6216 - RNA, 22 nt, Human
cuuugcuaauguugcauuuuca

SEQ ID NO: 6217 - RNA, 22 nt, Human
cuuugcuacugugaauagugcc

SEQ ID NO: 6218 - RNA, 18 nt, Human
cuuugcuauaaauuguau

SEQ ID NO: 6219 - RNA, 22 nt, Human
cuuugcuguuauaaugauagcu

SEQ ID NO: 6220 - RNA, 22 nt, Human
cuuugcuuacuggugucugcau

SEQ ID NO: 6221 - RNA, 19 nt, Human
cuuugcuuguuucuguguc

SEQ ID NO: 6222 - RNA, 22 nt, Human
cuuuggaaagugguucagguga

SEQ ID NO: 6223 - RNA, 22 nt, Human
cuuuggaacaagaagaaauggc

SEQ ID NO: 6224 - RNA, 22 nt, Human
gaaauguuaugagauauguacu

SEQ ID NO: 6225 - RNA, 22 nt, Human
gaaauguuccugaucccugauu

SEQ ID NO: 6226 - RNA, 22 nt, Human
gaaauguuguccugucucuuga

SEQ ID NO: 6227 - RNA, 22 nt, Human
gaaauguuuccuuuuguaugcu

SEQ ID NO: 6228 - RNA, 23 nt, Human
gaaauguuucuugauuaauccua

SEQ ID NO: 6229 - RNA, 22 nt, Human
gaaauuaaccaccuuuggcuuu

SEQ ID NO: 6230 - RNA, 22 nt, Human
gaaauuauugcuagagacugca

SEQ ID NO: 6231 - RNA, 22 nt, Human
gaaauucaaaaugucaguauag

SEQ ID NO: 6232 - RNA, 22 nt, Human
gaaauucaggacaaagacucuu

SEQ ID NO: 6233 - RNA, 22 nt, Human
gaaauugucagugauaugauac

SEQ ID NO: 6234 - RNA, 22 nt, Human
gaacaaacagucaggacagucu

SEQ ID NO: 6235 - RNA, 22 nt, Human
gaacaaauuggagaaaucagga

SEQ ID NO: 6236 - RNA, 22 nt, Human
gaacacaacucagaaugcuggu

SEQ ID NO: 6237 - RNA, 22 nt, Human
gaacacaagcguaugucuuugu

SEQ ID NO: 6238 - RNA, 22 nt, Human
gaacacagucaagggcugcugu

SEQ ID NO: 6239 - RNA, 22 nt, Human
gaacaccuggguccccuggggc

SEQ ID NO: 6240 - RNA, 22 nt, Human
gaacacugagaaagucagcuuu

SEQ ID NO: 6241 - RNA, 22 nt, Human
gaacacugggguaucauugagc

SEQ ID NO: 6242 - RNA, 19 nt, Human
gaacacuuacuauauuucu

SEQ ID NO: 6243 - RNA, 22 nt, Human
gaacacuuggcuuuggauuuaa

SEQ ID NO: 6244 - RNA, 22 nt, Human
gaacacuuuaacauuccuuuuc

SEQ ID NO: 6245 - RNA, 23 nt, Human
gaacagacauuagugagccaggc

SEQ ID NO: 6246 - RNA, 22 nt, Human
gaacagacuuggaggagugauc

SEQ ID NO: 6247 - RNA, 22 nt, Human
gaacagagaagcuuuacuaaag

SEQ ID NO: 6248 - RNA, 22 nt, Human
gaacagagcugacuacaaggca

SEQ ID NO: 6249 - RNA, 17 nt, Human
gaacagcagaggggaca

SEQ ID NO: 6250 - RNA, 22 nt, Human
gaacagcaugcaugcaagacua

SEQ ID NO: 6251 - RNA, 22 nt, Human
gaacagcuucuugggagcuggg

SEQ ID NO: 6252 - RNA, 22 nt, Human
gaacagguaaucaguaaaaugu

SEQ ID NO: 6253 - RNA, 22 nt, Human
gaacaguaacugucugcugugu

SEQ ID NO: 6254 - RNA, 22 nt, Human
gaacaguacuaagagcuuuaca

SEQ ID NO: 6255 - RNA, 22 nt, Human
gaacaguauuuccaggaauccc

SEQ ID NO: 6256 - RNA, 22 nt, Human
gaacagugccagcacacaauaa

SEQ ID NO: 6257 - RNA, 22 nt, Human
gaacaucaaggucugugucuag

SEQ ID NO: 6258 - RNA, 22 nt, Human
gaacaucaugaagaaaacauau

SEQ ID NO: 6259 - RNA, 22 nt, Human
gaacaugauggcuguuauuuug

SEQ ID NO: 6260 - RNA, 22 nt, Human
gaacauuauuguacaaaugucu

SEQ ID NO: 6261 - RNA, 23 nt, Human
gaacauucauugguugcuuuaga

SEQ ID NO: 6262 - RNA, 22 nt, Human
gaacauuugaugaugacauugg

SEQ ID NO: 6263 - RNA, 21 nt, Human
gaacauuuggguuguuucuac

SEQ ID NO: 6264 - RNA, 22 nt, Human
gaaccaugagaaauugcuauuu

SEQ ID NO: 6265 - RNA, 22 nt, Human
gaacccaguccaggugcagccu

SEQ ID NO: 6266 - RNA, 22 nt, Human
gaaccucuuugugcuucagcuu

SEQ ID NO: 6267 - RNA, 20 nt, Human
gaaccuggggaaggaguagg

SEQ ID NO: 6268 - RNA, 22 nt, Human
gaacgcacuuuguaaacuguaa

SEQ ID NO: 6269 - RNA, 22 nt, Human
gaacuacaggugcagcaaguga

SEQ ID NO: 6270 - RNA, 22 nt, Human
gaacuacaguaagaauugaugu

SEQ ID NO: 6271 - RNA, 22 nt, Human
gaacucuugguggucauuagau

SEQ ID NO: 6272 - RNA, 19 nt, Human
gaacugaggucugaggcuu

SEQ ID NO: 6273 - RNA, 22 nt, Human
gaacuggugagaguucacggga

SEQ ID NO: 6274 - RNA, 22 nt, Human
gaacuguaaaauaauuggcaau

SEQ ID NO: 6275 - RNA, 22 nt, Human
gaacuguuuuuaaguccuaaga

SEQ ID NO: 6276 - RNA, 22 nt, Human
gaacuuggaccugguccuuugg

SEQ ID NO: 6277 - RNA, 22 nt, Human
gaacuuuaaaacaaaguacagu

SEQ ID NO: 6278 - RNA, 22 nt, Human
gaacuuugcaaaugucagaagc

SEQ ID NO: 6279 - RNA, 17 nt, Human
gaacuuuuauuaaauuc

SEQ ID NO: 6280 - RNA, 22 nt, Human
gaagaaauugaauucaugagcu

SEQ ID NO: 6281 - RNA, 22 nt, Human
gaagaacaagcagugcuuuccu

SEQ ID NO: 6282 - RNA, 22 nt, Human
gaagaacuuuagggcagaauuu

SEQ ID NO: 6283 - RNA, 22 nt, Human
gaagaagacauggaacaauagu

SEQ ID NO: 6284 - RNA, 22 nt, Human
gaagaaggguaaggaguguuga

SEQ ID NO: 6285 - RNA, 22 nt, Human
gaagaaguauuuuuguccuguu

SEQ ID NO: 6286 - RNA, 19 nt, Human
gaagaaguuggaggaucuc

SEQ ID NO: 6287 - RNA, 22 nt, Human
gaagaauauauaaugauuuugu

SEQ ID NO: 6288 - RNA, 22 nt, Human
gaagaauccaugcuaauuuacc

SEQ ID NO: 6289 - RNA, 22 nt, Human
gaagaauccuguccucuuuagg

SEQ ID NO: 6290 - RNA, 22 nt, Human
gaagacacaauuggugggucca

SEQ ID NO: 6291 - RNA, 22 nt, Human
gaagacacucugcagaguuauc

SEQ ID NO: 6292 - RNA, 22 nt, Human
gaagacauguggauucuaguuu

SEQ ID NO: 6293 - RNA, 22 nt, Human
gaagaccacccccuacagcaca

SEQ ID NO: 6294 - RNA, 22 nt, Human
gaagaccauauucagcaggcau

SEQ ID NO: 6295 - RNA, 22 nt, Human
gaagagaaaggcaaggaguuuu

SEQ ID NO: 6296 - RNA, 22 nt, Human
gaagagaagguguaggccaucc

SEQ ID NO: 6297 - RNA, 22 nt, Human
gaagagagcagcaaacuggagu

SEQ ID NO: 6298 - RNA, 21 nt, Human
gaagagaguccucauccugag

SEQ ID NO: 6299 - RNA, 22 nt, Human
gaagagcuccaaaaacagugag

SEQ ID NO: 6300 - RNA, 22 nt, Human
gaagagcugacagugucauccu

SEQ ID NO: 6301 - RNA, 22 nt, Human
gaagagcugcacacuggggacu

SEQ ID NO: 6302 - RNA, 22 nt, Human
gaagagcuguagccugcucuuu

SEQ ID NO: 6303 - RNA, 22 nt, Human
gaagauaauuccuacuuauaac

SEQ ID NO: 6304 - RNA, 22 nt, Human
gaagauauucucuaaauacuuu

SEQ ID NO: 6305 - RNA, 22 nt, Human
gaagaucagaguaagcuuuuua

SEQ ID NO: 6306 - RNA, 22 nt, Human
gaagauguuauggagagcucag

SEQ ID NO: 6307 - RNA, 22 nt, Human
gaagauuuauaggagccuauua

SEQ ID NO: 6308 - RNA, 22 nt, Human
gaagauuuguuguaauuuuuag

SEQ ID NO: 6309 - RNA, 22 nt, Human
gaagauuuucuccuuuaaauga

SEQ ID NO: 6310 - RNA, 22 nt, Human
gaagcaaguggccugauucaga

SEQ ID NO: 6311 - RNA, 22 nt, Human
gaagcaaucuggcucccagcca

SEQ ID NO: 6312 - RNA, 22 nt, Human
gaagcacagggcucgaucucag

SEQ ID NO: 6313 - RNA, 22 nt, Human
gaagcacauggcugugagcaac

SEQ ID NO: 6314 - RNA, 22 nt, Human
gaagcacauuagaugugucuuc

SEQ ID NO: 6315 - RNA, 22 nt, Human
gaagcagaacccacuccccaac

SEQ ID NO: 6316 - RNA, 22 nt, Human
gaagcagaagguuuggacgugc

SEQ ID NO: 6317 - RNA, 22 nt, Human
ggagugaaucacuagaugcaga

SEQ ID NO: 6318 - RNA, 22 nt, Human
ggagugagagaguuuaagguca

SEQ ID NO: 6319 - RNA, 22 nt, Human
ggagugagcaaauagagauuug

SEQ ID NO: 6320 - RNA, 22 nt, Human
ggagugaggcauuuguagcuga

SEQ ID NO: 6321 - RNA, 22 nt, Human
ggagugaguggccuugucacug

SEQ ID NO: 6322 - RNA, 23 nt, Human
ggagugcaauggcgccaucucgg

SEQ ID NO: 6323 - RNA, 22 nt, Human
ggaguggccucuccugugcagg

SEQ ID NO: 6324 - RNA, 22 nt, Human
ggaguggcuguuucugccccca

SEQ ID NO: 6325 - RNA, 22 nt, Human
ggaguggugucacugagaggaa

SEQ ID NO: 6326 - RNA, 17 nt, Human
ggaguucugcagucagg

SEQ ID NO: 6327 - RNA, 22 nt, Human
ggaguugacggccgacacccag

SEQ ID NO: 6328 - RNA, 19 nt, Human
ggaguuuccaauggguaaa

SEQ ID NO: 6329 - RNA, 23 nt, Human
ggauaaaucucagcuucuuccau

SEQ ID NO: 6330 - RNA, 22 nt, Human
ggauacaacuagaagauggcag

SEQ ID NO: 6331 - RNA, 22 nt, Human
ggaucagaaucucugagaguuu

SEQ ID NO: 6332 - RNA, 22 nt, Human
ggaucaggcgccaugggaagug

SEQ ID NO: 6333 - RNA, 22 nt, Human
ggaucauuaacacauccaucac

SEQ ID NO: 6334 - RNA, 19 nt, Human
ggauccagaggaucugcca

SEQ ID NO: 6335 - RNA, 22 nt, Human
ggaugacagaugcaggcuuuga

SEQ ID NO: 6336 - RNA, 19 nt, Human
ggaugagggucaggcauag

SEQ ID NO: 6337 - RNA, 22 nt, Human
ggaugcaggaggucggggagca

SEQ ID NO: 6338 - RNA, 22 nt, Human
ggaugcaugugcauuuugaaaa

SEQ ID NO: 6339 - RNA, 17 nt, Human
cuucuagaaggcaaacu

SEQ ID NO: 6340 - RNA, 22 nt, Human
cuucuaggucuugauugaaugu

SEQ ID NO: 6341 - RNA, 22 nt, Human
cuucucaacugcacuugccagg

SEQ ID NO: 6342 - RNA, 22 nt, Human
cuucucagagcuuccagaaaac

SEQ ID NO: 6343 - RNA, 22 nt, Human
cuucucagaucucagcuuugag

SEQ ID NO: 6344 - RNA, 22 nt, Human
cuucucagcauuuugucagucu

SEQ ID NO: 6345 - RNA, 19 nt, Human
cuucuccagcuucuagaag

SEQ ID NO: 6346 - RNA, 22 nt, Human
cuucuccucugaguccugggag

SEQ ID NO: 6347 - RNA, 22 nt, Human
cuucuccuguaagaagaucaaa

SEQ ID NO: 6348 - RNA, 22 nt, Human
cuucucuacuuccuggaagggg

SEQ ID NO: 6349 - RNA, 22 nt, Human
cuucucucccuggcacucagac

SEQ ID NO: 6350 - RNA, 22 nt, Human
cuucucucugcauaggcauggg

SEQ ID NO: 6351 - RNA, 22 nt, Human
cuucucugcccauaggaaaugc

SEQ ID NO: 6352 - RNA, 22 nt, Human
cuucugaguuaacaguagauuu

SEQ ID NO: 6353 - RNA, 22 nt, Human
cuucugcaggccuuauuuuagu

SEQ ID NO: 6354 - RNA, 19 nt, Human
cuucugcagggugacagug

SEQ ID NO: 6355 - RNA, 22 nt, Human
cuucugccccuguagccugagu

SEQ ID NO: 6356 - RNA, 22 nt, Human
cuucugcugccgccucggcaca

SEQ ID NO: 6357 - RNA, 22 nt, Human
cuucugcugcuguucaugguug

SEQ ID NO: 6358 - RNA, 22 nt, Human
cuucuggagcucaccaacuucc

SEQ ID NO: 6359 - RNA, 22 nt, Human
cuucuggaggcuccagggaggu

SEQ ID NO: 6360 - RNA, 22 nt, Human
cuucuggcaaaacaggcagaaa

SEQ ID NO: 6361 - RNA, 19 nt, Human
cuucuggcccugagccacc

SEQ ID NO: 6362 - RNA, 22 nt, Human
cuucugggcagaaguuuugaga

SEQ ID NO: 6363 - RNA, 22 nt, Human
cuucuggguugcaggucuuggc

SEQ ID NO: 6364 - RNA, 22 nt, Human
cuucugugaagagcagaaccau

SEQ ID NO: 6365 - RNA, 22 nt, Human
cuucugugcuaaaugcaaaacc

SEQ ID NO: 6366 - RNA, 22 nt, Human
cuucuguguuuuacuauaugua

SEQ ID NO: 6367 - RNA, 22 nt, Human
cuucuuaacuguauauacuaug

SEQ ID NO: 6368 - RNA, 22 nt, Human
cuucuuaucaaguggcaaaucu

SEQ ID NO: 6369 - RNA, 22 nt, Human
cuucuucagaggccagccucug

SEQ ID NO: 6370 - RNA, 20 nt, Human
cuucuucagccuaugcuuca

SEQ ID NO: 6371 - RNA, 22 nt, Human
cuucuucauaggcaguccuguu

SEQ ID NO: 6372 - RNA, 22 nt, Human
cuucuucaucuguaaaacuugg

SEQ ID NO: 6373 - RNA, 22 nt, Human
cuucuucauguauugauagucu

SEQ ID NO: 6374 - RNA, 22 nt, Human
cuucuucucaaggggcaggugg

SEQ ID NO: 6375 - RNA, 22 nt, Human
cuucuucuggacaggcagcucc

SEQ ID NO: 6376 - RNA, 22 nt, Human
cuucuucugguuuauguggcaa

SEQ ID NO: 6377 - RNA, 22 nt, Human
cuucuucuucccccuucagggg

SEQ ID NO: 6378 - RNA, 19 nt, Human
cuucuucuuggcagccaag

SEQ ID NO: 6379 - RNA, 20 nt, Human
cuucuuggagaugguguuuu

SEQ ID NO: 6380 - RNA, 22 nt, Human
cuucuuggcugcaagucucugu

SEQ ID NO: 6381 - RNA, 22 nt, Human
cuucuugggcugccaguuucag

SEQ ID NO: 6382 - RNA, 21 nt, Human
cuucuuggggagcagcuagac

SEQ ID NO: 6383 - RNA, 22 nt, Human
cuucuugggucagagaaucauu

SEQ ID NO: 6384 - RNA, 22 nt, Human
cuucuuggugauggcuuaccug

SEQ ID NO: 6385 - RNA, 22 nt, Human
cuucuugguugguuucauucca

SEQ ID NO: 6386 - RNA, 22 nt, Human
cuucuugucagugauuucuucc

SEQ ID NO: 6387 - RNA, 22 nt, Human
cuucuugugcacucucuaugua

SEQ ID NO: 6388 - RNA, 18 nt, Human
cuucuuguuugauuuggg

SEQ ID NO: 6389 - RNA, 22 nt, Human
cuucuuucaagaauggauuagg

SEQ ID NO: 6390 - RNA, 22 nt, Human
cuucuuucccaggcauguuuua

SEQ ID NO: 6391 - RNA, 22 nt, Human
cuucuuugaaaaaggcagucag

SEQ ID NO: 6392 - RNA, 22 nt, Human
cuugaaagcuuugcgucuucua

SEQ ID NO: 6393 - RNA, 22 nt, Human
cuugaaaugacaggagcacauc

SEQ ID NO: 6394 - RNA, 22 nt, Human
cuugaaccaaucacuguagcca

SEQ ID NO: 6395 - RNA, 22 nt, Human
cuugaagaaaguauguugggau

SEQ ID NO: 6396 - RNA, 22 nt, Human
cuugaaguggagcuuuugaaau

SEQ ID NO: 6397 - RNA, 22 nt, Human
cuugaauccaaaugggagauga

SEQ ID NO: 6398 - RNA, 22 nt, Human
cuugaauguaaauaauguacag

SEQ ID NO: 6399 - RNA, 22 nt, Human
cuugacauuaguuaugcagaua

SEQ ID NO: 6400 - RNA, 22 nt, Human
cuugagaaaggaacaggaagcu

SEQ ID NO: 6401 - RNA, 22 nt, Human
cuugagaaugugagccacagau

SEQ ID NO: 6402 - RNA, 21 nt, Human
cuugagaauuaacuguucauu

SEQ ID NO: 6403 - RNA, 22 nt, Human
cuugagagccacuccuggggcc

SEQ ID NO: 6404 - RNA, 22 nt, Human
cuugagcacagcggcuucagga

SEQ ID NO: 6405 - RNA, 22 nt, Human
cuugagguaugaaaccugcauu

SEQ ID NO: 6406 - RNA, 22 nt, Human
cuugagguuuugacucagcuuu

SEQ ID NO: 6407 - RNA, 22 nt, Human
cuugaguaaagaaguauuuuag

SEQ ID NO: 6408 - RNA, 22 nt, Human
cuugaguuacagcucuccaaga

SEQ ID NO: 6409 - RNA, 22 nt, Human
cuugauccuaggauggaaggga

SEQ ID NO: 6410 - RNA, 22 nt, Human
cuugaucuacauagugaaaccc

SEQ ID NO: 6411 - RNA, 22 nt, Human
cuugaugaaauuuuucaauugu

SEQ ID NO: 6412 - RNA, 22 nt, Human
cuugaugacucaggaggaggag

SEQ ID NO: 6413 - RNA, 22 nt, Human
cuugaugagccuagugcuuaga

SEQ ID NO: 6414 - RNA, 22 nt, Human
cuugaugauagaaugugaggag

SEQ ID NO: 6415 - RNA, 22 nt, Human
cuugaugauagcaggcagggaa

SEQ ID NO: 6416 - RNA, 22 nt, Human
cuugauuuauuacccacuauau

SEQ ID NO: 6417 - RNA, 22 nt, Human
cuugcaaaguagcugagagguu

SEQ ID NO: 6418 - RNA, 22 nt, Human
cuugcacagaacucuuagaggu

SEQ ID NO: 6419 - RNA, 22 nt, Human
cuugcagccuuaccaaggcauu

SEQ ID NO: 6420 - RNA, 22 nt, Human
cuugcaggcccagccuuacaag

SEQ ID NO: 6421 - RNA, 22 nt, Human
cuugcaggccuuucuagcucua

SEQ ID NO: 6422 - RNA, 22 nt, Human
cuugcaguguggccuugaagag

SEQ ID NO: 6423 - RNA, 22 nt, Human
cuugccaguguugcagaagcuc

SEQ ID NO: 6424 - RNA, 20 nt, Human
cuugcccagggucuccugcc

SEQ ID NO: 6425 - RNA, 23 nt, Human
cuugccuggccucucugcccaga

SEQ ID NO: 6426 - RNA, 22 nt, Human
gaauugcugaugaaucugauug

SEQ ID NO: 6427 - RNA, 22 nt, Human
gaauuguacgcuuuacauaggu

SEQ ID NO: 6428 - RNA, 22 nt, Human
gaauuguaugcaguuacuugga

SEQ ID NO: 6429 - RNA, 22 nt, Human
gaauuuaaggaccaagcauuuu

SEQ ID NO: 6430 - RNA, 22 nt, Human
gaauuuacaaguugaauaacaa

SEQ ID NO: 6431 - RNA, 22 nt, Human
gaauuucaacaguccucaaaug

SEQ ID NO: 6432 - RNA, 22 nt, Human
gaauuucacaaggugaggauaa

SEQ ID NO: 6433 - RNA, 22 nt, Human
gaauuucagagguaacaucauc

SEQ ID NO: 6434 - RNA, 22 nt, Human
gaauuucaggacaacuggaagg

SEQ ID NO: 6435 - RNA, 22 nt, Human
gaauuugggguguguuauuuca

SEQ ID NO: 6436 - RNA, 22 nt, Human
gaauuugucccuugauauaaaa

SEQ ID NO: 6437 - RNA, 19 nt, Human
gaauuuuaggacuucagca

SEQ ID NO: 6438 - RNA, 22 nt, Human
gaauuuugcuuuuaugucaagu

SEQ ID NO: 6439 - RNA, 22 nt, Human
gacaaaaguguuuugaacaagg

SEQ ID NO: 6440 - RNA, 22 nt, Human
gacaaagagaaguaacaguacc

SEQ ID NO: 6441 - RNA, 22 nt, Human
gacaaagcgccugcucgcgggc

SEQ ID NO: 6442 - RNA, 22 nt, Human
gacaaagucaacaguacucuca

SEQ ID NO: 6443 - RNA, 22 nt, Human
gacaaaugaagucacugaccuu

SEQ ID NO: 6444 - RNA, 22 nt, Human
gacaacaauaauguggagcuga

SEQ ID NO: 6445 - RNA, 20 nt, Human
gacaacacagcuucaggucc

SEQ ID NO: 6446 - RNA, 22 nt, Human
gacaacagugguuucagguucc

SEQ ID NO: 6447 - RNA, 22 nt, Human
gacaagacaccucucuccaucc

SEQ ID NO: 6448 - RNA, 22 nt, Human
gacaagacagcuugcagacaac

SEQ ID NO: 6449 - RNA, 22 nt, Human
gacaagacaugugaugacauca

SEQ ID NO: 6450 - RNA, 22 nt, Human
gacaagacauugguaaagauau

SEQ ID NO: 6451 - RNA, 22 nt, Human
gacaagauaaugaagugcaauu

SEQ ID NO: 6452 - RNA, 22 nt, Human
gacaagauuaaccauaguuaag

SEQ ID NO: 6453 - RNA, 22 nt, Human
gacaagauuuagagucugcuaa

SEQ ID NO: 6454 - RNA, 22 nt, Human
gacaagcaggcuccugaagaaa

SEQ ID NO: 6455 - RNA, 22 nt, Human
gacaaggaaauuacuagcugga

SEQ ID NO: 6456 - RNA, 16 nt, Human
gacaaguggaggggcc

SEQ ID NO: 6457 - RNA, 21 nt, Human
gacaaugcagucuuuuuugga

SEQ ID NO: 6458 - RNA, 22 nt, Human
gacaauguaaaucaggauagca

SEQ ID NO: 6459 - RNA, 22 nt, Human
gacaauguguugaaagggaaaa

SEQ ID NO: 6460 - RNA, 22 nt, Human
gacaauuagguuaagagcaaga

SEQ ID NO: 6461 - RNA, 21 nt, Human
gacacaaaggguaguaauggu

SEQ ID NO: 6462 - RNA, 22 nt, Human
gacacagaauuuacucccgaua

SEQ ID NO: 6463 - RNA, 22 nt, Human
gacacagacaguuagagguaau

SEQ ID NO: 6464 - RNA, 22 nt, Human
gacacagagggcaccagauaug

SEQ ID NO: 6465 - RNA, 22 nt, Human
gacacagaugaucaggugugga

SEQ ID NO: 6466 - RNA, 22 nt, Human
gacacagcuuucugaagagcau

SEQ ID NO: 6467 - RNA, 22 nt, Human
gacacaggaaucaccuuggaug

SEQ ID NO: 6468 - RNA, 22 nt, Human
gacacaggauuccuggcucugc

SEQ ID NO: 6469 - RNA, 20 nt, Human
gacacaggcaguccucagag

SEQ ID NO: 6470 - RNA, 22 nt, Human
gaaaucuuuuaaccauucauuu

SEQ ID NO: 6471 - RNA, 22 nt, Human
gaaaucuuuucaucucauuuga

SEQ ID NO: 6472 - RNA, 22 nt, Human
gaaaucuuuuccaauuguuuag

SEQ ID NO: 6473 - RNA, 22 nt, Human
gaaaugaacugauuaucauugc

SEQ ID NO: 6474 - RNA, 22 nt, Human
gaaaugcagauucugauucugu

SEQ ID NO: 6475 - RNA, 22 nt, Human
gaaaugcaggcuuggauucagc

SEQ ID NO: 6476 - RNA, 22 nt, Human
gaaaugcauaaucuuaguagau

SEQ ID NO: 6477 - RNA, 22 nt, Human
gaaaugcuacacuuguuaauga

SEQ ID NO: 6478 - RNA, 22 nt, Human
gaaauguaauucucuugaagau

SEQ ID NO: 6479 - RNA, 22 nt, Human
gaaauguagaauugcuuaacug

SEQ ID NO: 6480 - RNA, 22 nt, Human
gaaauguauaagcuggucuuuu

SEQ ID NO: 6481 - RNA, 22 nt, Human
gaaauguaugucuucccccauu

SEQ ID NO: 6482 - RNA, 22 nt, Human
gaaaugucauugccuucagccc

SEQ ID NO: 6483 - RNA, 22 nt, Human
gaaaugucucuggauuugcuuu

SEQ ID NO: 6484 - RNA, 22 nt, Human
gaaaugucuuugacaagagagg

SEQ ID NO: 6485 - RNA, 22 nt, Human
gaaauguuuuacaaggcauacu

SEQ ID NO: 6486 - RNA, 22 nt, Human
gaaauucacuguauuucuuggg

SEQ ID NO: 6487 - RNA, 20 nt, Human
gaaauucucguauuaguuua

SEQ ID NO: 6488 - RNA, 22 nt, Human
gaaauucugugucccagagugc

SEQ ID NO: 6489 - RNA, 22 nt, Human
gaaauugccagaucuaguagau

SEQ ID NO: 6490 - RNA, 22 nt, Human
gaaauugucagcuucuuucagu

SEQ ID NO: 6491 - RNA, 22 nt, Human
gaaauugugcauuuagcaacac

SEQ ID NO: 6492 - RNA, 22 nt, Human
gaacaaauucucaucaacuugu

SEQ ID NO: 6493 - RNA, 22 nt, Human
gaacaacucuucuugagagaug

SEQ ID NO: 6494 - RNA, 22 nt, Human
gaacaaggauucccaaagaaga

SEQ ID NO: 6495 - RNA, 22 nt, Human
gaacacagcagggauaaccacu

SEQ ID NO: 6496 - RNA, 22 nt, Human
gaacacagcggggcuuacccgg

SEQ ID NO: 6497 - RNA, 22 nt, Human
gaacacagugguuguuuggagg

SEQ ID NO: 6498 - RNA, 22 nt, Human
gaacacaucacauuuuacagug

SEQ ID NO: 6499 - RNA, 22 nt, Human
gaacacaugauuauaaaugcua

SEQ ID NO: 6500 - RNA, 22 nt, Human
gaacacauguccuccuuggauu

SEQ ID NO: 6501 - RNA, 22 nt, Human
gaacacucauggaagaguuuuu

SEQ ID NO: 6502 - RNA, 22 nt, Human
gaacacuugcuguuaauaagug

SEQ ID NO: 6503 - RNA, 22 nt, Human
gaacagaagaggcuggugccac

SEQ ID NO: 6504 - RNA, 22 nt, Human
gaacagaauuaccgaagaucug

SEQ ID NO: 6505 - RNA, 22 nt, Human
gaacagacuuugccaauuacag

SEQ ID NO: 6506 - RNA, 22 nt, Human
gaacagaguugaaacaaggcug

SEQ ID NO: 6507 - RNA, 18 nt, Human
gaacagcaauuucauguu

SEQ ID NO: 6508 - RNA, 22 nt, Human
gaacagcauguaagaagcuacu

SEQ ID NO: 6509 - RNA, 22 nt, Human
gaacagcucugaagcaguaaau

SEQ ID NO: 6510 - RNA, 22 nt, Human
gaacagcugcuagagaucugug

SEQ ID NO: 6511 - RNA, 21 nt, Human
gaacaggaaaagcuggcuuca

SEQ ID NO: 6512 - RNA, 22 nt, Human
gaacagggaguacggcacauuu

SEQ ID NO: 6513 - RNA, 22 nt, Human
gaacaggguugggugagagagg

SEQ ID NO: 6514 - RNA, 22 nt, Human
gaacaguagaugagaugcuaga

SEQ ID NO: 6515 - RNA, 22 nt, Human
gaacaguuucccuguagaaaau

SEQ ID NO: 6516 - RNA, 22 nt, Human
gaacauacaagaauuaaguaca

SEQ ID NO: 6517 - RNA, 22 nt, Human
gaacaucugggaucauugcugu

SEQ ID NO: 6518 - RNA, 22 nt, Human
gaacaucugugaucucuuuggg

SEQ ID NO: 6519 - RNA, 20 nt, Human
gaacauggcagguggagggg

SEQ ID NO: 6520 - RNA, 22 nt, Human
gaacauuuauauuagauagcua

SEQ ID NO: 6521 - RNA, 20 nt, Human
gaacauuuggccauacugag

SEQ ID NO: 6522 - RNA, 22 nt, Human
gaaccacaaugugaagaaggag

SEQ ID NO: 6523 - RNA, 22 nt, Human
gaaccagcaguugccugaaaaa

SEQ ID NO: 6524 - RNA, 22 nt, Human
gaaccauuucugaauaguuugu

SEQ ID NO: 6525 - RNA, 21 nt, Human
gaacccagcagcagugcucug

SEQ ID NO: 6526 - RNA, 23 nt, Human
gaacccagcucugccacuugcca

SEQ ID NO: 6527 - RNA, 22 nt, Human
gaaccucagugaaacuggaggu

SEQ ID NO: 6528 - RNA, 22 nt, Human
gaaccucucagcagccaugauc

SEQ ID NO: 6529 - RNA, 20 nt, Human
gaaccucucccagccccugg

SEQ ID NO: 6530 - RNA, 22 nt, Human
gaaccucuuuaaagaacagaau

SEQ ID NO: 6531 - RNA, 21 nt, Human
gaaccugagugaagacuuggg

SEQ ID NO: 6532 - RNA, 22 nt, Human
gaaccuggaaucuauuacaagg

SEQ ID NO: 6533 - RNA, 22 nt, Human
gaaccuguaaguauagaugugg

SEQ ID NO: 6534 - RNA, 22 nt, Human
gaaccuguccugagugaggagu

SEQ ID NO: 6535 - RNA, 22 nt, Human
gaaggcuggggcaucagugaaa

SEQ ID NO: 6536 - RNA, 22 nt, Human
gaaggcuggggccuucucaucu

SEQ ID NO: 6537 - RNA, 16 nt, Human
gaaggcuuacugcagg

SEQ ID NO: 6538 - RNA, 22 nt, Human
gaaggcuuaugugugacuuucg

SEQ ID NO: 6539 - RNA, 22 nt, Human
gaagggaacugggucuccuugu

SEQ ID NO: 6540 - RNA, 22 nt, Human
gaagggaauuuggaggguuuca

SEQ ID NO: 6541 - RNA, 22 nt, Human
gaagggagaagguugggugacg

SEQ ID NO: 6542 - RNA, 19 nt, Human
gaaggggaagguggguacc

SEQ ID NO: 6543 - RNA, 22 nt, Human
gaaggggaguggcuagugugug

SEQ ID NO: 6544 - RNA, 22 nt, Human
gaagggggagcucuuccuaauu

SEQ ID NO: 6545 - RNA, 22 nt, Human
gaaggggguugcagucuagggu

SEQ ID NO: 6546 - RNA, 22 nt, Human
gaagguagcugcugagaugaca

SEQ ID NO: 6547 - RNA, 22 nt, Human
gaagguguccacuucucaccuc

SEQ ID NO: 6548 - RNA, 22 nt, Human
gaagguuuucaggagccuaguc

SEQ ID NO: 6549 - RNA, 22 nt, Human
gaagguuuuguuugcaaaucau

SEQ ID NO: 6550 - RNA, 22 nt, Human
gaaguacauucugauagggaag

SEQ ID NO: 6551 - RNA, 22 nt, Human
gaaguagaaagccucguaaaua

SEQ ID NO: 6552 - RNA, 22 nt, Human
gaaguagauucguugcaucuug

SEQ ID NO: 6553 - RNA, 23 nt, Human
gaagucagcccuacagagagcag

SEQ ID NO: 6554 - RNA, 22 nt, Human
gaaguccucaaugcauugucuu

SEQ ID NO: 6555 - RNA, 22 nt, Human
gaaguccuccuaucuugcucuu

SEQ ID NO: 6556 - RNA, 19 nt, Human
gaaguccucuaguaaauuu

SEQ ID NO: 6557 - RNA, 22 nt, Human
gaaguccugguccucucauuca

SEQ ID NO: 6558 - RNA, 22 nt, Human
gaagucucacagacagaucaga

SEQ ID NO: 6559 - RNA, 22 nt, Human
gaagucucauaguuaaaauucu

SEQ ID NO: 6560 - RNA, 22 nt, Human
gaagucugagugggggccaggc

SEQ ID NO: 6561 - RNA, 22 nt, Human
gaagucugcugcucaggaguuu

SEQ ID NO: 6562 - RNA, 22 nt, Human
gaagucuggcugacgagaguua

SEQ ID NO: 6563 - RNA, 22 nt, Human
gaagucuuuucuuccacccaaa

SEQ ID NO: 6564 - RNA, 22 nt, Human
gaagugcaaccugaaauacuag

SEQ ID NO: 6565 - RNA, 22 nt, Human
gaaguggaauuacugggucaua

SEQ ID NO: 6566 - RNA, 23 nt, Human
gaagugucugagcuguauuuuuc

SEQ ID NO: 6567 - RNA, 20 nt, Human
gaagugucuuguuucuggau

SEQ ID NO: 6568 - RNA, 22 nt, Human
gaagugugaaggugauguggag

SEQ ID NO: 6569 - RNA, 22 nt, Human
gaaguuacauacugucacuucu

SEQ ID NO: 6570 - RNA, 22 nt, Human
gaaguuagauguggucacugac

SEQ ID NO: 6571 - RNA, 22 nt, Human
gaaguuagucauugaagcccca

SEQ ID NO: 6572 - RNA, 22 nt, Human
gaaguuauagcuaugaucuuaa

SEQ ID NO: 6573 - RNA, 22 nt, Human
gaaguuaucaaagauguauucu

SEQ ID NO: 6574 - RNA, 22 nt, Human
gaaguuauuugcuaucuacuga

SEQ ID NO: 6575 - RNA, 22 nt, Human
gaaguucaaaagacagauuuga

SEQ ID NO: 6576 - RNA, 22 nt, Human
gaaguucaacugccaugcuugg

SEQ ID NO: 6577 - RNA, 22 nt, Human
gaaguucuagaacugugcccuu

SEQ ID NO: 6578 - RNA, 22 nt, Human
gaaguucucaaggaucacagaa

SEQ ID NO: 6579 - RNA, 22 nt, Human
gaaguucugggauuuccacagu

SEQ ID NO: 6580 - RNA, 23 nt, Human
gaaguucuguucagccagacaag

SEQ ID NO: 6581 - RNA, 22 nt, Human
gaaguugauagaguacaugauu

SEQ ID NO: 6582 - RNA, 22 nt, Human
gaaguuguaagccugggaaggu

SEQ ID NO: 6583 - RNA, 22 nt, Human
gaaguuuagguucuuauguuua

SEQ ID NO: 6584 - RNA, 22 nt, Human
gaaguuuauuucaaucuauuca

SEQ ID NO: 6585 - RNA, 22 nt, Human
gaaguuugauuuuucuccuaga

SEQ ID NO: 6586 - RNA, 22 nt, Human
gaaguuuuagucaaaauguaga

SEQ ID NO: 6587 - RNA, 22 nt, Human
gaauaacauuuuuuccuuuaca

SEQ ID NO: 6588 - RNA, 23 nt, Human
gaauacaaagcagaugguccagc

SEQ ID NO: 6589 - RNA, 22 nt, Human
gacacaguaauguguuucaucu

SEQ ID NO: 6590 - RNA, 22 nt, Human
gacacaguagccagugcaguga

SEQ ID NO: 6591 - RNA, 22 nt, Human
gacacagucaagaguggaggaa

SEQ ID NO: 6592 - RNA, 19 nt, Human
gacacaguugguuccuuug

SEQ ID NO: 6593 - RNA, 22 nt, Human
gacacaguuuuucucacggugg

SEQ ID NO: 6594 - RNA, 22 nt, Human
gacacauagaucuaucucacuc

SEQ ID NO: 6595 - RNA, 22 nt, Human
gacacauaugcguauaguuuag

SEQ ID NO: 6596 - RNA, 18 nt, Human
gacacauccccaggccuc

SEQ ID NO: 6597 - RNA, 22 nt, Human
gacacaugucagacggacaccc

SEQ ID NO: 6598 - RNA, 22 nt, Human
gacacauugaugugaguacaua

SEQ ID NO: 6599 - RNA, 22 nt, Human
gacaccaguaaauauucaaaag

SEQ ID NO: 6600 - RNA, 22 nt, Human
gacacuacguggcucacauuuc

SEQ ID NO: 6601 - RNA, 22 nt, Human
gacacugaggcaugcagagccg

SEQ ID NO: 6602 - RNA, 22 nt, Human
gacacuggauuucuagaaaugu

SEQ ID NO: 6603 - RNA, 22 nt, Human
gacacuggcuugucccgccauc

SEQ ID NO: 6604 - RNA, 22 nt, Human
gacacuguuauggugagguaag

SEQ ID NO: 6605 - RNA, 22 nt, Human
gacacuuuauuaagcuguuguu

SEQ ID NO: 6606 - RNA, 22 nt, Human
gacacuuugggacucagcccua

SEQ ID NO: 6607 - RNA, 22 nt, Human
gacacuuuggugcuuugugguu

SEQ ID NO: 6608 - RNA, 22 nt, Human
gacacuuuuuuaaagcucauua

SEQ ID NO: 6609 - RNA, 22 nt, Human
gacagaacucaaacaugagaag

SEQ ID NO: 6610 - RNA, 22 nt, Human
gacagaaucaucuccugggacu

SEQ ID NO: 6611 - RNA, 22 nt, Human
gacagacaggagcucacaggca

SEQ ID NO: 6612 - RNA, 22 nt, Human
gacagacuaaauggcuguagga

SEQ ID NO: 6613 - RNA, 22 nt, Human
gacagagauugaaucaggaaau

SEQ ID NO: 6614 - RNA, 22 nt, Human
gacagcaaugacggggcagcug

SEQ ID NO: 6615 - RNA, 22 nt, Human
gacagcagaauccauucccagu

SEQ ID NO: 6616 - RNA, 22 nt, Human
gacagcagauacuuucauugaa

SEQ ID NO: 6617 - RNA, 22 nt, Human
gacagcagccacagggagaggg

SEQ ID NO: 6618 - RNA, 22 nt, Human
gacagcaggaugugaggggaug

SEQ ID NO: 6619 - RNA, 22 nt, Human
gacagcagggacauguaggaag

SEQ ID NO: 6620 - RNA, 22 nt, Human
gacagcaugaucaaggagccca

SEQ ID NO: 6621 - RNA, 22 nt, Human
gacagcauuccaucugcagguu

SEQ ID NO: 6622 - RNA, 22 nt, Human
gacagccaucagcacacgcugc

SEQ ID NO: 6623 - RNA, 22 nt, Human
gacagcuccuuuuggugcauau

SEQ ID NO: 6624 - RNA, 22 nt, Human
gacagcugaaaaauguaaggua

SEQ ID NO: 6625 - RNA, 22 nt, Human
gacagcugaacaggugggauaa

SEQ ID NO: 6626 - RNA, 22 nt, Human
gacagcuguacacuccugguua

SEQ ID NO: 6627 - RNA, 22 nt, Human
gacaggaacauaaauguaggag

SEQ ID NO: 6628 - RNA, 22 nt, Human
gacaggaauguguggaugcgga

SEQ ID NO: 6629 - RNA, 22 nt, Human
gacaggaggcagagcucaggug

SEQ ID NO: 6630 - RNA, 22 nt, Human
gacaggcaauuaccagcgccca

SEQ ID NO: 6631 - RNA, 22 nt, Human
gacaggccuagauucacugcug

SEQ ID NO: 6632 - RNA, 22 nt, Human
gacaggcuggcaaugcccugcu

SEQ ID NO: 6633 - RNA, 22 nt, Human
gacaggcuuagggagggugcuc

SEQ ID NO: 6634 - RNA, 22 nt, Human
gacaggcuucaugauggcagga

SEQ ID NO: 6635 - RNA, 22 nt, Human
gacaggcuuucucaggaugagc

SEQ ID NO: 6636 - RNA, 22 nt, Human
gacaggcuuugagucccagaac

SEQ ID NO: 6637 - RNA, 22 nt, Human
gacagggaacuucauuagcugu

SEQ ID NO: 6638 - RNA, 22 nt, Human
gacagggacacagccagugagg

SEQ ID NO: 6639 - RNA, 22 nt, Human
gacagggccaaaccggcugauc

SEQ ID NO: 6640 - RNA, 22 nt, Human
gacagggcgcccagccuguuuc

SEQ ID NO: 6641 - RNA, 23 nt, Human
gacagggcugacuuggcagcugc

SEQ ID NO: 6642 - RNA, 22 nt, Human
gacaggguggcugauagggcuc

SEQ ID NO: 6643 - RNA, 23 nt, Human
gacagguaaggguugggagaauc

SEQ ID NO: 6644 - RNA, 22 nt, Human
gaauucuaccagggcaagaggg

SEQ ID NO: 6645 - RNA, 22 nt, Human
gaauucugucgcuuacuagaug

SEQ ID NO: 6646 - RNA, 22 nt, Human
gaauugaauucauuuacucaaa

SEQ ID NO: 6647 - RNA, 22 nt, Human
gaauuguaugcugucuugauag

SEQ ID NO: 6648 - RNA, 22 nt, Human
gaauuguauugauuuuucagag

SEQ ID NO: 6649 - RNA, 22 nt, Human
gaauugucuuggccagugagaa

SEQ ID NO: 6650 - RNA, 22 nt, Human
gaauuuaaaggccagaccugag

SEQ ID NO: 6651 - RNA, 22 nt, Human
gaauuuaagaggaugaaucugu

SEQ ID NO: 6652 - RNA, 22 nt, Human
gaauuucagaucagagaccauu

SEQ ID NO: 6653 - RNA, 22 nt, Human
gaauuucagggucugguaggaa

SEQ ID NO: 6654 - RNA, 22 nt, Human
gaauuugaaaagugaugggaau

SEQ ID NO: 6655 - RNA, 22 nt, Human
gaauuugcaggugugcugugua

SEQ ID NO: 6656 - RNA, 22 nt, Human
gaauuugcuuucgugacagggu

SEQ ID NO: 6657 - RNA, 22 nt, Human
gaauuugugcucaggaagauua

SEQ ID NO: 6658 - RNA, 22 nt, Human
gaauuuuagaauaugugggcuu

SEQ ID NO: 6659 - RNA, 18 nt, Human
gacaaaaguacagacaga

SEQ ID NO: 6660 - RNA, 22 nt, Human
gacaaagcagacaagauaauuc

SEQ ID NO: 6661 - RNA, 22 nt, Human
gacaaagccuaagaaguauuua

SEQ ID NO: 6662 - RNA, 18 nt, Human
gacaaaugcaauuuaaag

SEQ ID NO: 6663 - RNA, 22 nt, Human
gacaaauguaccccuagagucu

SEQ ID NO: 6664 - RNA, 22 nt, Human
gacaacaggcagacgucagaaa

SEQ ID NO: 6665 - RNA, 22 nt, Human
gacaaccgagcagcugugggaa

SEQ ID NO: 6666 - RNA, 22 nt, Human
gacaagacuauguagaaaguau

SEQ ID NO: 6667 - RNA, 22 nt, Human
gacaaggcaaccagggaggcuu

SEQ ID NO: 6668 - RNA, 22 nt, Human
gacaaggguucugcagagccug

SEQ ID NO: 6669 - RNA, 22 nt, Human
gacaaggugauaauagcuucug

SEQ ID NO: 6670 - RNA, 22 nt, Human
gacaagucaucuggggccugug

SEQ ID NO: 6671 - RNA, 22 nt, Human
gacaagugcugauuuaucuccc

SEQ ID NO: 6672 - RNA, 22 nt, Human
gacaaguuguggagaagagggu

SEQ ID NO: 6673 - RNA, 22 nt, Human
gacaauaagaaaagaggaggca

SEQ ID NO: 6674 - RNA, 22 nt, Human
gacaauacagaaagggacaugc

SEQ ID NO: 6675 - RNA, 19 nt, Human
gacaauuagagaucacuca

SEQ ID NO: 6676 - RNA, 22 nt, Human
gacacagaaggucacauguuca

SEQ ID NO: 6677 - RNA, 22 nt, Human
gacacagaauuccccuccaagu

SEQ ID NO: 6678 - RNA, 22 nt, Human
gacacagaccaccaggcccugg

SEQ ID NO: 6679 - RNA, 22 nt, Human
gacacagagacuugcaguugua

SEQ ID NO: 6680 - RNA, 22 nt, Human
gacacagcacuguacaaggaau

SEQ ID NO: 6681 - RNA, 18 nt, Human
gacacaggagagaguccc

SEQ ID NO: 6682 - RNA, 23 nt, Human
gacacaggagcacccagcugagc

SEQ ID NO: 6683 - RNA, 22 nt, Human
gacacagggacgugcucugccu

SEQ ID NO: 6684 - RNA, 22 nt, Human
gacacagggggauguguggacg

SEQ ID NO: 6685 - RNA, 21 nt, Human
gacacaguaaucuuggggcuu

SEQ ID NO: 6686 - RNA, 22 nt, Human
gacacagugguucugugaguaa

SEQ ID NO: 6687 - RNA, 22 nt, Human
gacacaguuacuuauuuugccu

SEQ ID NO: 6688 - RNA, 22 nt, Human
gacacauacagcaguaagucua

SEQ ID NO: 6689 - RNA, 18 nt, Human
gacaccagccucugcccc

SEQ ID NO: 6690 - RNA, 22 nt, Human
gacaccaggucuguuguccucc

SEQ ID NO: 6691 - RNA, 22 nt, Human
gacacuauaugacacuucaguu

SEQ ID NO: 6692 - RNA, 22 nt, Human
gacacugugcuagcugggcuua

SEQ ID NO: 6693 - RNA, 22 nt, Human
gacacuuuaggccaccaugcaa

SEQ ID NO: 6694 - RNA, 22 nt, Human
gacagaagaggaacuuggacag

SEQ ID NO: 6695 - RNA, 22 nt, Human
gacagacaccugggggguugcu

SEQ ID NO: 6696 - RNA, 22 nt, Human
gacagacacuguguccucacuu

SEQ ID NO: 6697 - RNA, 22 nt, Human
gacagacagggguucuccugga

SEQ ID NO: 6698 - RNA, 22 nt, Human
gacagacuucauauccuuccuc

SEQ ID NO: 6699 - RNA, 22 nt, Human
gacagagaggcugagcaguaca

SEQ ID NO: 6700 - RNA, 22 nt, Human
gacagaggcuggagcaccuccu

SEQ ID NO: 6701 - RNA, 22 nt, Human
gacagagguguccuugagucca

SEQ ID NO: 6702 - RNA, 22 nt, Human
gacagagugcagggcuagaaga

SEQ ID NO: 6703 - RNA, 22 nt, Human
gacagaugagggaguauucuca

SEQ ID NO: 6704 - RNA, 22 nt, Human
gacagauggucaguguugaagu

SEQ ID NO: 6705 - RNA, 22 nt, Human
gacagaugugggugacagcagc

SEQ ID NO: 6706 - RNA, 22 nt, Human
ggccacagugggaaauccuggg

SEQ ID NO: 6707 - RNA, 22 nt, Human
ggccaccuaggagccacaguga

SEQ ID NO: 6708 - RNA, 22 nt, Human
ggccaccuccgugaaggaauga

SEQ ID NO: 6709 - RNA, 19 nt, Human
ggccaccucucuucccagg

SEQ ID NO: 6710 - RNA, 22 nt, Human
ggccaccucugcccuaccgagu

SEQ ID NO: 6711 - RNA, 22 nt, Human
ggccaccuggcugugggggcag

SEQ ID NO: 6712 - RNA, 22 nt, Human
ggccaccuggguucgacugggc

SEQ ID NO: 6713 - RNA, 22 nt, Human
ggccacugaccuacaucugggg

SEQ ID NO: 6714 - RNA, 22 nt, Human
ggccagaaaguuaagcuguggc

SEQ ID NO: 6715 - RNA, 17 nt, Human
ggccagaggcggggcug

SEQ ID NO: 6716 - RNA, 22 nt, Human
ggccagagggagggcacaaauc

SEQ ID NO: 6717 - RNA, 22 nt, Human
ggccagaguugauggcaucuug

SEQ ID NO: 6718 - RNA, 19 nt, Human
ggccagcacagggcucugu

SEQ ID NO: 6719 - RNA, 22 nt, Human
ggccagcauauagagugaagua

SEQ ID NO: 6720 - RNA, 22 nt, Human
ggccagccuggggcucccagac

SEQ ID NO: 6721 - RNA, 22 nt, Human
ggccagcucaggguccuugggc

SEQ ID NO: 6722 - RNA, 20 nt, Human
ggccagcugaugcacgaugc

SEQ ID NO: 6723 - RNA, 22 nt, Human
ggccagcuggaguuccgggugg

SEQ ID NO: 6724 - RNA, 22 nt, Human
ggccagcuguggggccgagccu

SEQ ID NO: 6725 - RNA, 22 nt, Human
ggccaggaagggaagaucagca

SEQ ID NO: 6726 - RNA, 22 nt, Human
ggccaggagaggagggcacuga

SEQ ID NO: 6727 - RNA, 22 nt, Human
ggccaggagcugcacagggcuc

SEQ ID NO: 6728 - RNA, 22 nt, Human
ggccaggaggcaggggcucaau

SEQ ID NO: 6729 - RNA, 22 nt, Human
ggccaggcgaugaccccuccac

SEQ ID NO: 6730 - RNA, 22 nt, Human
ggccagggaggagaggccccug

SEQ ID NO: 6731 - RNA, 22 nt, Human
ggccagggccaaggcuuuccca

SEQ ID NO: 6732 - RNA, 21 nt, Human
ggccaguggccuugacuuucc

SEQ ID NO: 6733 - RNA, 19 nt, Human
ggccaucucugccccagca

SEQ ID NO: 6734 - RNA, 22 nt, Human
ggccaugccuggucuggcacca

SEQ ID NO: 6735 - RNA, 22 nt, Human
ggccaugcucguggcuggacug

SEQ ID NO: 6736 - RNA, 19 nt, Human
ggccauggcgggggucaca

SEQ ID NO: 6737 - RNA, 22 nt, Human
ggccaugggaagagguggagag

SEQ ID NO: 6738 - RNA, 20 nt, Human
ggccauggguugccugaggu

SEQ ID NO: 6739 - RNA, 22 nt, Human
ggccauggucaugggugagcuu

SEQ ID NO: 6740 - RNA, 22 nt, Human
ggccauggugguuugagcaccu

SEQ ID NO: 6741 - RNA, 22 nt, Human
ggccaugguuggggaagacaug

SEQ ID NO: 6742 - RNA, 22 nt, Human
ggccauguuuggcagaaggauu

SEQ ID NO: 6743 - RNA, 22 nt, Human
ggcccaaacggguccagugaaa

SEQ ID NO: 6744 - RNA, 19 nt, Human
ggcccaaguacugagugcc

SEQ ID NO: 6745 - RNA, 22 nt, Human
ggcccacaccaggggccacagu

SEQ ID NO: 6746 - RNA, 22 nt, Human
ggcccagaauacuuuguaaaau

SEQ ID NO: 6747 - RNA, 22 nt, Human
ggcccagacccaagaguggugg

SEQ ID NO: 6748 - RNA, 22 nt, Human
ggcccagagcucccuggcaccu

SEQ ID NO: 6749 - RNA, 22 nt, Human
ggcccagagggucaggagcuga

SEQ ID NO: 6750 - RNA, 22 nt, Human
ggcccagccggcgagucucgcg

SEQ ID NO: 6751 - RNA, 22 nt, Human
ggcccagccuugggguuucuuu

SEQ ID NO: 6752 - RNA, 22 nt, Human
ggcccagcgaggccaccuacag

SEQ ID NO: 6753 - RNA, 22 nt, Human
gagcugggcacacgccacuuga

SEQ ID NO: 6754 - RNA, 22 nt, Human
gagcuggucgaaaugggcugac

SEQ ID NO: 6755 - RNA, 22 nt, Human
gagcuggugaucagcuggagga

SEQ ID NO: 6756 - RNA, 22 nt, Human
gagcuggugcucuugucaagac

SEQ ID NO: 6757 - RNA, 22 nt, Human
gagcugguggugagaaagcucu

SEQ ID NO: 6758 - RNA, 22 nt, Human
gagcuguccaagauggucguaa

SEQ ID NO: 6759 - RNA, 22 nt, Human
gagcugucuggggacucugggu

SEQ ID NO: 6760 - RNA, 22 nt, Human
gagcugugccaaucugucuggg

SEQ ID NO: 6761 - RNA, 22 nt, Human
gagcugugcuuauaccaauuca

SEQ ID NO: 6762 - RNA, 22 nt, Human
gagcuguguucaugaggagaaa

SEQ ID NO: 6763 - RNA, 22 nt, Human
gagcuguguugucuaguaccga

SEQ ID NO: 6764 - RNA, 22 nt, Human
gagcuguuaagagggagugaca

SEQ ID NO: 6765 - RNA, 20 nt, Human
gagcuucaacucagcaaaca

SEQ ID NO: 6766 - RNA, 22 nt, Human
gagcuucagcgugugcuaaggg

SEQ ID NO: 6767 - RNA, 18 nt, Human
gagcuucaggcuaaccug

SEQ ID NO: 6768 - RNA, 22 nt, Human
gagcuuccagagacaucagagu

SEQ ID NO: 6769 - RNA, 22 nt, Human
gagcuuggaagcagauccucac

SEQ ID NO: 6770 - RNA, 22 nt, Human
gagcuuggaugucuuuuguuca

SEQ ID NO: 6771 - RNA, 22 nt, Human
gagcuuggggcauauggugcua

SEQ ID NO: 6772 - RNA, 22 nt, Human
gagcuuugucccuugggggcuc

SEQ ID NO: 6773 - RNA, 22 nt, Human
gagcuuuucuuccaguuaauga

SEQ ID NO: 6774 - RNA, 20 nt, Human
gaggaaaagcugccaggccu

SEQ ID NO: 6775 - RNA, 22 nt, Human
gaggaaaaugggacaggcugua

SEQ ID NO: 6776 - RNA, 18 nt, Human
gaggaaacaggcucugug

SEQ ID NO: 6777 - RNA, 18 nt, Human
gaggaacauucaccuccu

SEQ ID NO: 6778 - RNA, 22 nt, Human
gaggaaccaaaucagcuugcac

SEQ ID NO: 6779 - RNA, 22 nt, Human
gaggaaccaccuuggguaggcu

SEQ ID NO: 6780 - RNA, 22 nt, Human
gaggaaccuaugauuuagagca

SEQ ID NO: 6781 - RNA, 22 nt, Human
gaggaacuucaucucuaugcca

SEQ ID NO: 6782 - RNA, 22 nt, Human
gaggaagaaagcauaggugggg

SEQ ID NO: 6783 - RNA, 22 nt, Human
gaggaagaaucaggguggugag

SEQ ID NO: 6784 - RNA, 22 nt, Human
gaggaagaugguugaguggucc

SEQ ID NO: 6785 - RNA, 22 nt, Human
gaggaagcugcguggcauuuca

SEQ ID NO: 6786 - RNA, 22 nt, Human
gaggaaggagggaaagcgcgcg

SEQ ID NO: 6787 - RNA, 22 nt, Human
gaggaaggucccaucagaauuu

SEQ ID NO: 6788 - RNA, 22 nt, Human
gaggaaguucuaugauuacauc

SEQ ID NO: 6789 - RNA, 22 nt, Human
gaggacaccucacagccucaca

SEQ ID NO: 6790 - RNA, 23 nt, Human
gaggaccaaauauauacauggaa

SEQ ID NO: 6791 - RNA, 22 nt, Human
gaggaccuuuaguagaagugca

SEQ ID NO: 6792 - RNA, 22 nt, Human
gaggacucugcaggcugcuccu

SEQ ID NO: 6793 - RNA, 22 nt, Human
gaggacugaaacuuacaggaaa

SEQ ID NO: 6794 - RNA, 22 nt, Human
gaggagaagggcacggagaaaa

SEQ ID NO: 6795 - RNA, 22 nt, Human
gaggagaaugcgcaccacauau

SEQ ID NO: 6796 - RNA, 22 nt, Human
gaggagacaguggagccgcuac

SEQ ID NO: 6797 - RNA, 22 nt, Human
gaggagacugacagcagauucu

SEQ ID NO: 6798 - RNA, 22 nt, Human
gaggagagccugcacuuugacc

SEQ ID NO: 6799 - RNA, 22 nt, Human
gaggagaggcuggacgcgguga

SEQ ID NO: 6800 - RNA, 19 nt, Human
gaggagcuaucggagacag

SEQ ID NO: 6801 - RNA, 22 nt, Human
gaggagcuggcagcgucuccgc

SEQ ID NO: 6802 - RNA, 22 nt, Human
gaggagcugggacccugucauc

SEQ ID NO: 6803 - RNA, 22 nt, Human
gaggagcuguucccucaccucu

SEQ ID NO: 6804 - RNA, 19 nt, Human
gaggaggaaaacuagugua

SEQ ID NO: 6805 - RNA, 22 nt, Human
gaggaggaggaaguggaaccca

SEQ ID NO: 6806 - RNA, 22 nt, Human
gaggaggccaguggaaggaagc

SEQ ID NO: 6807 - RNA, 22 nt, Human
gaggaggcuaagugggcucugg

SEQ ID NO: 6808 - RNA, 22 nt, Human
gaggaggucccccgacaugccu

SEQ ID NO: 6809 - RNA, 22 nt, Human
gaggaggucgcugcugagcccc

SEQ ID NO: 6810 - RNA, 22 nt, Human
gaggaguggaguugcuggguug

SEQ ID NO: 6811 - RNA, 18 nt, Human
gaggaucagaaaucugua

SEQ ID NO: 6812 - RNA, 22 nt, Human
gaggaugcugcagugcaggaca

SEQ ID NO: 6813 - RNA, 22 nt, Human
gaggauggaggugugagcuaug

SEQ ID NO: 6814 - RNA, 22 nt, Human
gaggcaagaaaggacuuucuag

SEQ ID NO: 6815 - RNA, 22 nt, Human
gaggcaaggccgcacgucucag

SEQ ID NO: 6816 - RNA, 22 nt, Human
gaggcacagagcccuaggagcu

SEQ ID NO: 6817 - RNA, 23 nt, Human
gaggcacucaggaaaugugagug

SEQ ID NO: 6818 - RNA, 22 nt, Human
gaggcacucucgacaagggugg

SEQ ID NO: 6819 - RNA, 22 nt, Human
gaggcacugaauacuugagggu

SEQ ID NO: 6820 - RNA, 22 nt, Human
gaggcacuggaggaaaggagaa

SEQ ID NO: 6821 - RNA, 22 nt, Human
gaggcagagugcaccccaggag

SEQ ID NO: 6822 - RNA, 22 nt, Human
gaggcagcaauaaaaagaauuu

SEQ ID NO: 6823 - RNA, 22 nt, Human
gaggcagcaggcugaggaggau

SEQ ID NO: 6824 - RNA, 22 nt, Human
gacuaaauaaaagccaaacuuc

SEQ ID NO: 6825 - RNA, 22 nt, Human
gacuacaacaauaagaacagcu

SEQ ID NO: 6826 - RNA, 22 nt, Human
gacuaggcucucauagagguag

SEQ ID NO: 6827 - RNA, 22 nt, Human
gacuagggaaucauucuuggau

SEQ ID NO: 6828 - RNA, 19 nt, Human
gacuaucucuggagaccau

SEQ ID NO: 6829 - RNA, 22 nt, Human
gacuaugugaagugugaauagg

SEQ ID NO: 6830 - RNA, 22 nt, Human
gacuauuuaguuucagauuagu

SEQ ID NO: 6831 - RNA, 22 nt, Human
gacuauuuauaaugcugcagaa

SEQ ID NO: 6832 - RNA, 22 nt, Human
gacuauuuauuuacagaaagcu

SEQ ID NO: 6833 - RNA, 22 nt, Human
gacucagugauuugacaugccu

SEQ ID NO: 6834 - RNA, 22 nt, Human
gacuccagagugacuauuuguc

SEQ ID NO: 6835 - RNA, 22 nt, Human
gacuccauccaaucuguguucu

SEQ ID NO: 6836 - RNA, 22 nt, Human
gacuccucccgcucccaugccg

SEQ ID NO: 6837 - RNA, 22 nt, Human
gacuccugccuccucuguuugc

SEQ ID NO: 6838 - RNA, 21 nt, Human
gacucugcaccaaauuaagcc

SEQ ID NO: 6839 - RNA, 22 nt, Human
gacucugcuacaggccgagguu

SEQ ID NO: 6840 - RNA, 22 nt, Human
gacucugcugacuaguugacua

SEQ ID NO: 6841 - RNA, 22 nt, Human
gacucuggcagcacuagggggc

SEQ ID NO: 6842 - RNA, 22 nt, Human
gacucugguugcggguucugcu

SEQ ID NO: 6843 - RNA, 22 nt, Human
gacucuuucaaacagaaagcca

SEQ ID NO: 6844 - RNA, 22 nt, Human
gacugagaaucauagaaggcaa

SEQ ID NO: 6845 - RNA, 22 nt, Human
gacugcaugauguuccagagga

SEQ ID NO: 6846 - RNA, 22 nt, Human
gacugcuuaaauauaugauguu

SEQ ID NO: 6847 - RNA, 22 nt, Human
gacugcuugagaaggaacaaau

SEQ ID NO: 6848 - RNA, 22 nt, Human
gacuggagcccccaaggacacc

SEQ ID NO: 6849 - RNA, 22 nt, Human
gacuggagugccuccaggaaag

SEQ ID NO: 6850 - RNA, 22 nt, Human
gacuggauguuuaaucaacaga

SEQ ID NO: 6851 - RNA, 22 nt, Human
gacuggccuggggcugggcaca

SEQ ID NO: 6852 - RNA, 22 nt, Human
gacuggcucacuccacuccuau

SEQ ID NO: 6853 - RNA, 22 nt, Human
gacugggccaaggucagcagcu

SEQ ID NO: 6854 - RNA, 22 nt, Human
gacugggcuccaagagggagag

SEQ ID NO: 6855 - RNA, 22 nt, Human
gacuggggcucuagccaggccu

SEQ ID NO: 6856 - RNA, 22 nt, Human
gacuggucuuuugugauggaug

SEQ ID NO: 6857 - RNA, 22 nt, Human
gacugucuuguuucuaagauga

SEQ ID NO: 6858 - RNA, 22 nt, Human
gacuguggcagaaauguuguug

SEQ ID NO: 6859 - RNA, 22 nt, Human
gacuguggccuuggaccauggg

SEQ ID NO: 6860 - RNA, 22 nt, Human
gacugugggcuccuugagggca

SEQ ID NO: 6861 - RNA, 22 nt, Human
gacuguuaccuauauuuaugug

SEQ ID NO: 6862 - RNA, 23 nt, Human
ggcucacacggagugccuccacc

SEQ ID NO: 6863 - RNA, 22 nt, Human
ggcucagacucccaggcccucu

SEQ ID NO: 6864 - RNA, 22 nt, Human
ggcucagaggccagcagguaga

SEQ ID NO: 6865 - RNA, 22 nt, Human
ggcucagauuccgaguggcccu

SEQ ID NO: 6866 - RNA, 22 nt, Human
ggcucagcgcgcugggagggag

SEQ ID NO: 6867 - RNA, 22 nt, Human
ggcucagguuaccagucccucc

SEQ ID NO: 6868 - RNA, 22 nt, Human
ggcucagguuuaaagugcuuua

SEQ ID NO: 6869 - RNA, 19 nt, Human
ggcucagugacauaggugc

SEQ ID NO: 6870 - RNA, 22 nt, Human
ggcucaguguuuguggaacaua

SEQ ID NO: 6871 - RNA, 22 nt, Human
ggcucauaaacucaguucaguu

SEQ ID NO: 6872 - RNA, 22 nt, Human
ggcuccaaagggcagugugagg

SEQ ID NO: 6873 - RNA, 16 nt, Human
ggcuccagaauagcga

SEQ ID NO: 6874 - RNA, 22 nt, Human
ggcuccagaugucuccuggcaa

SEQ ID NO: 6875 - RNA, 23 nt, Human
ggcuccaggccugacgggcgcgg

SEQ ID NO: 6876 - RNA, 22 nt, Human
ggcuccagguacguaugggagg

SEQ ID NO: 6877 - RNA, 22 nt, Human
ggcuccaggugcaugccaggcu

SEQ ID NO: 6878 - RNA, 22 nt, Human
ggcuccaugcuccgcuucuugu

SEQ ID NO: 6879 - RNA, 22 nt, Human
ggcuccaugcugagcuuugaau

SEQ ID NO: 6880 - RNA, 22 nt, Human
ggcucccaggagggccuggagg

SEQ ID NO: 6881 - RNA, 23 nt, Human
ggcucccuccuagcuuucccaau

SEQ ID NO: 6882 - RNA, 18 nt, Human
ggcuccgacgggccgugc

SEQ ID NO: 6883 - RNA, 22 nt, Human
ggcuccucucuggccgcucccg

SEQ ID NO: 6884 - RNA, 22 nt, Human
ggcuccugauaggagaaugcgg

SEQ ID NO: 6885 - RNA, 22 nt, Human
ggcuccugauuugagggggcug

SEQ ID NO: 6886 - RNA, 23 nt, Human
ggcuccugcuucaugucccaccu

SEQ ID NO: 6887 - RNA, 22 nt, Human
ggcuccuggcaucuggugggua

SEQ ID NO: 6888 - RNA, 22 nt, Human
ggcuccuguuauuuaaugagga

SEQ ID NO: 6889 - RNA, 22 nt, Human
ggcucgagcagcuguguaggau

SEQ ID NO: 6890 - RNA, 22 nt, Human
ggcucugcagagggcccagcuu

SEQ ID NO: 6891 - RNA, 22 nt, Human
ggcucugcagugacuugagggg

SEQ ID NO: 6892 - RNA, 22 nt, Human
ggcucugcaugcagguugucag

SEQ ID NO: 6893 - RNA, 22 nt, Human
ggcucugcccagaugaagagga

SEQ ID NO: 6894 - RNA, 22 nt, Human
ggcucugcgcgguaaagugacu

SEQ ID NO: 6895 - RNA, 22 nt, Human
ggcucugcuccuggugccagug

SEQ ID NO: 6896 - RNA, 22 nt, Human
ggcucugcuggauugaggccag

SEQ ID NO: 6897 - RNA, 22 nt, Human
ggcucugcugguaagaugccuc

SEQ ID NO: 6898 - RNA, 22 nt, Human
ggcucuggaauguguagucagg

SEQ ID NO: 6899 - RNA, 22 nt, Human
ggcucugggguuggcccaucuc

SEQ ID NO: 6900 - RNA, 22 nt, Human
ggcucugguugaccaugauggc

SEQ ID NO: 6901 - RNA, 22 nt, Human
ggcucugucaccuaugagcuga

SEQ ID NO: 6902 - RNA, 22 nt, Human
ggcucuguggcuggccaugaug

SEQ ID NO: 6903 - RNA, 22 nt, Human
ggcucuugagaggcacagguuu

SEQ ID NO: 6904 - RNA, 22 nt, Human
ggcucuugggagcucagaguug

SEQ ID NO: 6905 - RNA, 22 nt, Human
ggcucuuguucguaccauggcu

SEQ ID NO: 6906 - RNA, 22 nt, Human
ggcucuuuaacuugucuaaauu

SEQ ID NO: 6907 - RNA, 22 nt, Human
ggcucuuuggcgggccuugaac

SEQ ID NO: 6908 - RNA, 22 nt, Human
ggcugaaagguaguaguaggcu

SEQ ID NO: 6909 - RNA, 22 nt, Human
ggcugaaauuggauccuugggc

SEQ ID NO: 6910 - RNA, 22 nt, Human
ggcugaagaacugggagucuca

SEQ ID NO: 6911 - RNA, 22 nt, Human
ggcugaaguucuuuuuguucag

SEQ ID NO: 6912 - RNA, 22 nt, Human
ggcugagaaucaacaaccugcu

SEQ ID NO: 6913 - RNA, 22 nt, Human
ggcugagacaaccugggaccca

SEQ ID NO: 6914 - RNA, 22 nt, Human
ggcugagccacugcgccuggcu

SEQ ID NO: 6915 - RNA, 19 nt, Human
ggcugagcgccuuggcugc

SEQ ID NO: 6916 - RNA, 22 nt, Human
ggcugagcguggcugccguggg

SEQ ID NO: 6917 - RNA, 22 nt, Human
ggcugagcuuauauaugugcug

SEQ ID NO: 6918 - RNA, 22 nt, Human
ggcugagcuuuucaugaugguu

SEQ ID NO: 6919 - RNA, 22 nt, Human
ggcugaggcggcgaugcccuug

SEQ ID NO: 6920 - RNA, 22 nt, Human
ggcugagguguggggaacuaua

SEQ ID NO: 6921 - RNA, 22 nt, Human
ggcugaguggcugggucuaguu

SEQ ID NO: 6922 - RNA, 22 nt, Human
ggcugaguugagaggauuacuu

SEQ ID NO: 6923 - RNA, 22 nt, Human
ggcugaucaggugcaaaugcau

SEQ ID NO: 6924 - RNA, 22 nt, Human
ggcugcaagcaugcacagauac

SEQ ID NO: 6925 - RNA, 22 nt, Human
ggcugcagaaguacuuccggau

SEQ ID NO: 6926 - RNA, 19 nt, Human
ggcugcagagccccggcgc

SEQ ID NO: 6927 - RNA, 22 nt, Human
ggcugcagagcugggugggccu

SEQ ID NO: 6928 - RNA, 22 nt, Human
ggcugcagaggcgaucugaggu

SEQ ID NO: 6929 - RNA, 22 nt, Human
ggcugcagauagccagccacca

SEQ ID NO: 6930 - RNA, 22 nt, Human
ggcugcaggaacgacggagggg

SEQ ID NO: 6931 - RNA, 20 nt, Human
ggcugcaggacucauuggcu

SEQ ID NO: 6932 - RNA, 22 nt, Human
ggcugcaggaugcccagccgug

SEQ ID NO: 6933 - RNA, 22 nt, Human
ggcugcaggcuucccuccagca

SEQ ID NO: 6934 - RNA, 21 nt, Human
ggcugcagggagcccuggggu

SEQ ID NO: 6935 - RNA, 22 nt, Human
ggcugcauaggcagaagcugug

SEQ ID NO: 6936 - RNA, 22 nt, Human
ggcugccacgucgaggguccaa

SEQ ID NO: 6937 - RNA, 22 nt, Human
gagcagcuuaugucaagccaga

SEQ ID NO: 6938 - RNA, 22 nt, Human
gagcaggacgugggaaugggaa

SEQ ID NO: 6939 - RNA, 22 nt, Human
gagcaggauggcacuucuguga

SEQ ID NO: 6940 - RNA, 22 nt, Human
gagcaggaugggagcuggggcc

SEQ ID NO: 6941 - RNA, 22 nt, Human
gagcaggcaacucugcagugcc

SEQ ID NO: 6942 - RNA, 22 nt, Human
gagcaggcucugccuguguguc

SEQ ID NO: 6943 - RNA, 22 nt, Human
gagcaguagaguacauggcucc

SEQ ID NO: 6944 - RNA, 22 nt, Human
gagcagugacuggagcaugaga

SEQ ID NO: 6945 - RNA, 22 nt, Human
gagcagugagugaauguugccu

SEQ ID NO: 6946 - RNA, 22 nt, Human
gagcaguggugguguguuagag

SEQ ID NO: 6947 - RNA, 22 nt, Human
gagcagugguugaacagaggca

SEQ ID NO: 6948 - RNA, 22 nt, Human
gagcaguucuccuugguagggg

SEQ ID NO: 6949 - RNA, 22 nt, Human
gagcaguugggcucuaggaagu

SEQ ID NO: 6950 - RNA, 22 nt, Human
gagcauccaugacuuuggcuuu

SEQ ID NO: 6951 - RNA, 21 nt, Human
gagcaucuccuuccuccugcu

SEQ ID NO: 6952 - RNA, 20 nt, Human
gagcaucugucugcugugca

SEQ ID NO: 6953 - RNA, 22 nt, Human
gagcauggugcuucagugaagg

SEQ ID NO: 6954 - RNA, 22 nt, Human
gagcauuugguuauaguaauuu

SEQ ID NO: 6955 - RNA, 22 nt, Human
gagccaagaucgcaccacugca

SEQ ID NO: 6956 - RNA, 22 nt, Human
gagccaagauugugucccugca

SEQ ID NO: 6957 - RNA, 22 nt, Human
gagccagaaaagcugccugacu

SEQ ID NO: 6958 - RNA, 16 nt, Human
gagccaggugccuuga

SEQ ID NO: 6959 - RNA, 22 nt, Human
gagccaugagauaguugguucg

SEQ ID NO: 6960 - RNA, 22 nt, Human
gagccauuguccaagccuguuu

SEQ ID NO: 6961 - RNA, 20 nt, Human
gagcccaaguagggagaaau

SEQ ID NO: 6962 - RNA, 22 nt, Human
gagcccagcuguccuuggcaaa

SEQ ID NO: 6963 - RNA, 22 nt, Human
gagcccaggaugguguauggcu

SEQ ID NO: 6964 - RNA, 21 nt, Human
gagcccaggcaucucauuaau

SEQ ID NO: 6965 - RNA, 22 nt, Human
gagcccagggugaaauagcagc

SEQ ID NO: 6966 - RNA, 22 nt, Human
gagccccuucugcagucagguu

SEQ ID NO: 6967 - RNA, 22 nt, Human
gagcccuccauggagccaggca

SEQ ID NO: 6968 - RNA, 19 nt, Human
gagcccucuccauggccac

SEQ ID NO: 6969 - RNA, 20 nt, Human
gagcccucugcacuagcgcc

SEQ ID NO: 6970 - RNA, 22 nt, Human
gagcccucuugucuauauggua

SEQ ID NO: 6971 - RNA, 22 nt, Human
gagguggcuuagucucuggaca

SEQ ID NO: 6972 - RNA, 22 nt, Human
gaggugggaugugugugcuacu

SEQ ID NO: 6973 - RNA, 19 nt, Human
gagguggguccccgcagcc

SEQ ID NO: 6974 - RNA, 22 nt, Human
gaggugucaucaggcagcucug

SEQ ID NO: 6975 - RNA, 22 nt, Human
gaggugucauuuaguuaaucag

SEQ ID NO: 6976 - RNA, 22 nt, Human
gaggugucuguuaggaauaggc

SEQ ID NO: 6977 - RNA, 19 nt, Human
gaggugucuuuccugagua

SEQ ID NO: 6978 - RNA, 22 nt, Human
gaggugugaugcagaguggugg

SEQ ID NO: 6979 - RNA, 22 nt, Human
gagguguguuacagauugucau

SEQ ID NO: 6980 - RNA, 22 nt, Human
gagguuagaggucagugcaguc

SEQ ID NO: 6981 - RNA, 22 nt, Human
gagguuggcgcccugccuggcc

SEQ ID NO: 6982 - RNA, 22 nt, Human
gagguugggaaguccaagcugg

SEQ ID NO: 6983 - RNA, 22 nt, Human
gagguuggugaggggacacggu

SEQ ID NO: 6984 - RNA, 22 nt, Human
gagguuucuuaucaagaaagcu

SEQ ID NO: 6985 - RNA, 22 nt, Human
gaguagggaugcuggugacucc

SEQ ID NO: 6986 - RNA, 22 nt, Human
gaguagguugucagacuccaaa

SEQ ID NO: 6987 - RNA, 22 nt, Human
gaguauaaguaauuucaagcaa

SEQ ID NO: 6988 - RNA, 22 nt, Human
gaguauauuucucucucuuaag

SEQ ID NO: 6989 - RNA, 22 nt, Human
gaguauucaauauauacaaaug

SEQ ID NO: 6990 - RNA, 22 nt, Human
gagucacaaagccuuucuuauu

SEQ ID NO: 6991 - RNA, 22 nt, Human
gagucaccuugggucagcgaua

SEQ ID NO: 6992 - RNA, 22 nt, Human
gagucagaauguccuccugcgg

SEQ ID NO: 6993 - RNA, 22 nt, Human
gagucaugcacugucuuucucc

SEQ ID NO: 6994 - RNA, 22 nt, Human
gagucauugcacacuagcucag

SEQ ID NO: 6995 - RNA, 22 nt, Human
gaguccagcucauugucuggga

SEQ ID NO: 6996 - RNA, 22 nt, Human
gaguccagcucugccucuuacu

SEQ ID NO: 6997 - RNA, 22 nt, Human
gaguccaggauuugagcucugu

SEQ ID NO: 6998 - RNA, 22 nt, Human
gaguccaggcuggucaaauagc

SEQ ID NO: 6999 - RNA, 22 nt, Human
gaguccaguguuuaccaggggu

SEQ ID NO: 7000 - RNA, 22 nt, Human
gaguccaguuguucacagaggc

SEQ ID NO: 7001 - RNA, 21 nt, Human
gaguccuggcuaggguggcag

SEQ ID NO: 7002 - RNA, 19 nt, Human
gaguccugugcuccuuguu

SEQ ID NO: 7003 - RNA, 22 nt, Human
gaguccuuaauacacuggugga

SEQ ID NO: 7004 - RNA, 22 nt, Human
gaguccuucuggcuggcaggau

SEQ ID NO: 7005 - RNA, 22 nt, Human
gaguccuugacacauaguaggu

SEQ ID NO: 7006 - RNA, 22 nt, Human
gaguccuuggcaucaucaguac

SEQ ID NO: 7007 - RNA, 22 nt, Human
gaguccuuuugugccacaggga

SEQ ID NO: 7008 - RNA, 18 nt, Human
gagucgucggagagucug

SEQ ID NO: 7009 - RNA, 22 nt, Human
gagucuaaggaaaaauagagua

SEQ ID NO: 7010 - RNA, 22 nt, Human
gagucuggaaugaugaagaccu

SEQ ID NO: 7011 - RNA, 22 nt, Human
gagucuuucugggcuuguucuu

SEQ ID NO: 7012 - RNA, 22 nt, Human
gagucuuugguaaagucugcug

SEQ ID NO: 7013 - RNA, 22 nt, Human
gagucuuuguauuuacuuccca

SEQ ID NO: 7014 - RNA, 22 nt, Human
gagugaaaaaggaagggccaua

SEQ ID NO: 7015 - RNA, 22 nt, Human
gagugacucuagaaaguuucuu

SEQ ID NO: 7016 - RNA, 22 nt, Human
gagugaggcuggaaucauggcu

SEQ ID NO: 7017 - RNA, 22 nt, Human
gagugaguagcuacaguuuuua

SEQ ID NO: 7018 - RNA, 19 nt, Human
gagugauggaucuccuugc

SEQ ID NO: 7019 - RNA, 22 nt, Human
gagugcaauguagacaucaggg

SEQ ID NO: 7020 - RNA, 22 nt, Human
gagugccaagagaagaggcugg

SEQ ID NO: 7021 - RNA, 22 nt, Human
gagugccagauggaccucuugg

SEQ ID NO: 7022 - RNA, 22 nt, Human
gagugcuccuggauggauuucc

SEQ ID NO: 7023 - RNA, 22 nt, Human
gagugcuguaucugagaaagca

SEQ ID NO: 7024 - RNA, 20 nt, Human
gagugcuuuggcuugcucuc

SEQ ID NO: 7025 - RNA, 22 nt, Human
gaguggagcaaaagagguagau

SEQ ID NO: 7026 - RNA, 22 nt, Human
gaguggcagaacuggggguccu

SEQ ID NO: 7027 - RNA, 22 nt, Human
gaguggcauaugugccugugaa

SEQ ID NO: 7028 - RNA, 21 nt, Human
gagugggacaugggagugguu

SEQ ID NO: 7029 - RNA, 22 nt, Human
gagugggcuuggggagaguuug

SEQ ID NO: 7030 - RNA, 22 nt, Human
gagugguaaugagcagauuagg

SEQ ID NO: 7031 - RNA, 22 nt, Human
gagugguaggcaguguuaggaa

SEQ ID NO: 7032 - RNA, 22 nt, Human
gagugguuagaaguaguguggc

SEQ ID NO: 7033 - RNA, 22 nt, Human
gaguguaaucugaaaacuugaa

SEQ ID NO: 7034 - RNA, 22 nt, Human
gagugucaaggcucucuuuggc

SEQ ID NO: 7035 - RNA, 22 nt, Human
gaguguccgugcagccccagac

SEQ ID NO: 7036 - RNA, 22 nt, Human
gagugucucacaguagcauuuu

SEQ ID NO: 7037 - RNA, 22 nt, Human
gagugucuguggggcauggaca

SEQ ID NO: 7038 - RNA, 22 nt, Human
gagugugcuuagagagcugcau

SEQ ID NO: 7039 - RNA, 18 nt, Human
gaguguggcacugggccc

SEQ ID NO: 7040 - RNA, 22 nt, Human
gaguguguuauuaaagauggaa

SEQ ID NO: 7041 - RNA, 22 nt, Human
gaguguuccagaaacuggcccu

SEQ ID NO: 7042 - RNA, 22 nt, Human
gaguuaaaagcccucucagcag

SEQ ID NO: 7043 - RNA, 22 nt, Human
gaguuaauaggguucuuuguga

SEQ ID NO: 7044 - RNA, 22 nt, Human
gaguuaauguguacacaaaggg

SEQ ID NO: 7045 - RNA, 22 nt, Human
gaguuacacagaagucaguuug

SEQ ID NO: 7046 - RNA, 22 nt, Human
gaguuacauucauuguuacgcu

SEQ ID NO: 7047 - RNA, 22 nt, Human
gaguuagagccauagagcacgg

SEQ ID NO: 7048 - RNA, 22 nt, Human
gaguucugaacugugaaaugca

SEQ ID NO: 7049 - RNA, 22 nt, Human
gaguugaagaaauaguuuugau

SEQ ID NO: 7050 - RNA, 22 nt, Human
gaguuguucaacgugugugaaa

SEQ ID NO: 7051 - RNA, 22 nt, Human
gaguuuaaaacgcuuguauuua

SEQ ID NO: 7052 - RNA, 22 nt, Human
gaguuuaaagcauacauauuuu

SEQ ID NO: 7053 - RNA, 22 nt, Human
gaguuuagauggcauuaaggua

SEQ ID NO: 7054 - RNA, 22 nt, Human
gaguuuagguucaugaacgagu

SEQ ID NO: 7055 - RNA, 22 nt, Human
gaguuuaguuuggcuuaaacug

SEQ ID NO: 7056 - RNA, 22 nt, Human
gaguuuauucaggaaauagcca

SEQ ID NO: 7057 - RNA, 22 nt, Human
gaguuuauuugacuggauucuc

SEQ ID NO: 7058 - RNA, 22 nt, Human
gaguuucuccagugcuaguugu

SEQ ID NO: 7059 - RNA, 22 nt, Human
gaguuugauagagaggaaccgg

SEQ ID NO: 7060 - RNA, 22 nt, Human
gauaaaauaacuauggaauacu

SEQ ID NO: 7061 - RNA, 22 nt, Human
gauaaaauucuuauuuuacccg

SEQ ID NO: 7062 - RNA, 21 nt, Human
gauaaagcagcuugccuaagg

SEQ ID NO: 7063 - RNA, 20 nt, Human
gauaaauugucucuuaagug

SEQ ID NO: 7064 - RNA, 22 nt, Human
gauaacccccaagaaggucuuu

SEQ ID NO: 7065 - RNA, 19 nt, Human
gauaaguuuccagguaacu

SEQ ID NO: 7066 - RNA, 22 nt, Human
gauaauauuagaagauacaaau

SEQ ID NO: 7067 - RNA, 22 nt, Human
gauaaugaugacaaugacaacc

SEQ ID NO: 7068 - RNA, 22 nt, Human
gauaaugugccgauaauuucua

SEQ ID NO: 7069 - RNA, 22 nt, Human
gauaauuauaggcuaagccacu

SEQ ID NO: 7070 - RNA, 22 nt, Human
gauaauuuugguuccagguugg

SEQ ID NO: 7071 - RNA, 22 nt, Human
gggauaggagauugggaguguu

SEQ ID NO: 7072 - RNA, 22 nt, Human
gggauauguuuagguguuggag

SEQ ID NO: 7073 - RNA, 22 nt, Human
gggaucagaaacauagcccuga

SEQ ID NO: 7074 - RNA, 20 nt, Human
gggaucaggaaaggaggcua

SEQ ID NO: 7075 - RNA, 22 nt, Human
gggauccauccgugcagcagag

SEQ ID NO: 7076 - RNA, 22 nt, Human
gggaucugcuccagagggaaaa

SEQ ID NO: 7077 - RNA, 22 nt, Human
gggaucugggacaacagguggu

SEQ ID NO: 7078 - RNA, 22 nt, Human
gggaucugggccucacacacau

SEQ ID NO: 7079 - RNA, 23 nt, Human
gggaucuguaaaccuggagaacc

SEQ ID NO: 7080 - RNA, 22 nt, Human
gauuuucuugggaaacaaugag

SEQ ID NO: 7081 - RNA, 22 nt, Human
gauuuugucaaauuccaaaugu

SEQ ID NO: 7082 - RNA, 22 nt, Human
gcaaaaacugcaauuacuuuug

SEQ ID NO: 7083 - RNA, 22 nt, Human
gcaaaaauuccagggacgacuc

SEQ ID NO: 7084 - RNA, 22 nt, Human
gcaaaaguacagccggauuucu

SEQ ID NO: 7085 - RNA, 22 nt, Human
gcaaaaugaucuucuucaggcu

SEQ ID NO: 7086 - RNA, 22 nt, Human
gcaaaauuaaacuuagcaucau

SEQ ID NO: 7087 - RNA, 22 nt, Human
gcaaacaagcugccugaagauu

SEQ ID NO: 7088 - RNA, 22 nt, Human
gcaaacaaggacauacauccug

SEQ ID NO: 7089 - RNA, 22 nt, Human
gcaaacaugcugagaaauaaga

SEQ ID NO: 7090 - RNA, 22 nt, Human
gcaaacauuccacagaaggaag

SEQ ID NO: 7091 - RNA, 18 nt, Human
gcaaacauucuuccaguc

SEQ ID NO: 7092 - RNA, 22 nt, Human
gcaaagaaaugucagugagagg

SEQ ID NO: 7093 - RNA, 22 nt, Human
gcaaagacaaauuagaacuccu

SEQ ID NO: 7094 - RNA, 23 nt, Human
gcaaagacucugccaaaaacugc

SEQ ID NO: 7095 - RNA, 22 nt, Human
gcaaagcagaacccucucuauc

SEQ ID NO: 7096 - RNA, 22 nt, Human
gcaaaggccacuggggcgaugg

SEQ ID NO: 7097 - RNA, 22 nt, Human
gcaaaggcuucuuuuauucucc

SEQ ID NO: 7098 - RNA, 22 nt, Human
gcaaaguaaaaauagauucuga

SEQ ID NO: 7099 - RNA, 22 nt, Human
gcaaagucucaagacccaagug

SEQ ID NO: 7100 - RNA, 22 nt, Human
gcaaauacauguugagcaccua

SEQ ID NO: 7101 - RNA, 22 nt, Human
gcaaaucaccaccuagcuggau

SEQ ID NO: 7102 - RNA, 19 nt, Human
gcaaaucugaccaaauagu

SEQ ID NO: 7103 - RNA, 22 nt, Human
gcaaaugaguuguaacauaaaa

SEQ ID NO: 7104 - RNA, 22 nt, Human
gcaaaugcucuccagccugggu

SEQ ID NO: 7105 - RNA, 22 nt, Human
gcaaaugcucuccuuggucagg

SEQ ID NO: 7106 - RNA, 20 nt, Human
gcaaauggacacucagggaa

SEQ ID NO: 7107 - RNA, 22 nt, Human
gcaaauguucuauauuugcugu

SEQ ID NO: 7108 - RNA, 22 nt, Human
gcaaauucuuaacuggacugug

SEQ ID NO: 7109 - RNA, 22 nt, Human
gcaaauugcuagcuuucucugc

SEQ ID NO: 7110 - RNA, 22 nt, Human
gcaacacaauaucccaguacau

SEQ ID NO: 7111 - RNA, 22 nt, Human
gcaacaguuggauuccagagga

SEQ ID NO: 7112 - RNA, 22 nt, Human
gcaacaugaagaaaacagaacc

SEQ ID NO: 7113 - RNA, 22 nt, Human
gcaacauucauguucuguaacc

SEQ ID NO: 7114 - RNA, 22 nt, Human
gcaacauugagucuaaguacca

SEQ ID NO: 7115 - RNA, 22 nt, Human
gcaaccauuuggaauguaaaaa

SEQ ID NO: 7116 - RNA, 22 nt, Human
gcaagaaaagagccuucagugg

SEQ ID NO: 7117 - RNA, 22 nt, Human
gcaagaacaggugcuuggcaag

SEQ ID NO: 7118 - RNA, 22 nt, Human
gcaagaacugcaauuacuuuug

SEQ ID NO: 7119 - RNA, 22 nt, Human
gcaagacaugucuaagguuuaa

SEQ ID NO: 7120 - RNA, 22 nt, Human
gcaagauagaguugcaaauauu

SEQ ID NO: 7121 - RNA, 22 nt, Human
gcaagaugguuauaaaaaaugu

SEQ ID NO: 7122 - RNA, 22 nt, Human
gcaagauuguguggcugaagua

SEQ ID NO: 7123 - RNA, 22 nt, Human
gcaagcaagcagguagagcuga

SEQ ID NO: 7124 - RNA, 22 nt, Human
gcaagcaaguaucuggcaggga

SEQ ID NO: 7125 - RNA, 20 nt, Human
gcaagcaugaagaguagaga

SEQ ID NO: 7126 - RNA, 21 nt, Human
gcaagccaccacugcugccac

SEQ ID NO: 7127 - RNA, 22 nt, Human
gcaagcugaugugauagugaaa

SEQ ID NO: 7128 - RNA, 22 nt, Human
gcaagcugcuuaagcucauugu

SEQ ID NO: 7129 - RNA, 22 nt, Human
gcaagcuggcuguuagaggaug

SEQ ID NO: 7130 - RNA, 20 nt, Human
gcaagcuuauuagugauauu

SEQ ID NO: 7131 - RNA, 22 nt, Human
gcaaggacucccugggucauuc

SEQ ID NO: 7132 - RNA, 22 nt, Human
gcaaggagacuguagggccaag

SEQ ID NO: 7133 - RNA, 20 nt, Human
gcaaggcacagugaggaggg

SEQ ID NO: 7134 - RNA, 22 nt, Human
gcaaggcagcgcggaguagcua

SEQ ID NO: 7135 - RNA, 18 nt, Human
gcaaggcucaggccaggc

SEQ ID NO: 7136 - RNA, 20 nt, Human
gcaaggcuccaaggggugug

SEQ ID NO: 7137 - RNA, 22 nt, Human
gcaaggcuggugguggugaagu

SEQ ID NO: 7138 - RNA, 22 nt, Human
gcaaggcuuugugaauuuuaaa

SEQ ID NO: 7139 - RNA, 22 nt, Human
gcaaguacaaacgcaucggcug

SEQ ID NO: 7140 - RNA, 22 nt, Human
gcaaguaggaaguguccuccuu

SEQ ID NO: 7141 - RNA, 23 nt, Human
gcaagugaggcgucagcagucaa

SEQ ID NO: 7142 - RNA, 21 nt, Human
gcaaguguuucugacaguggc

SEQ ID NO: 7143 - RNA, 22 nt, Human
gcaauaaacauguuugaugcgc

SEQ ID NO: 7144 - RNA, 23 nt, Human
gcaauacaagacuggucaugagc

SEQ ID NO: 7145 - RNA, 22 nt, Human
gcaauagauuaugaucuacagu

SEQ ID NO: 7146 - RNA, 22 nt, Human
gcaauaguauuuauuaaaguag

SEQ ID NO: 7147 - RNA, 20 nt, Human
gcaauauaugagugcaauaa

SEQ ID NO: 7148 - RNA, 22 nt, Human
gcaaugagcacccagagggcag

SEQ ID NO: 7149 - RNA, 22 nt, Human
gcaaugcauauguggguagcau

SEQ ID NO: 7150 - RNA, 22 nt, Human
gcaaugggcacagcccagccca

SEQ ID NO: 7151 - RNA, 22 nt, Human
gcaauguuuuuccuuccauauu

SEQ ID NO: 7152 - RNA, 22 nt, Human
gcaauuauuuuugcaccaaugu

SEQ ID NO: 7153 - RNA, 22 nt, Human
gcaauuguacuagaaaacaaua

SEQ ID NO: 7154 - RNA, 22 nt, Human
gcacaaaagguacuucauguag

SEQ ID NO: 7155 - RNA, 22 nt, Human
gcacaagaauaaccauauuuaa

SEQ ID NO: 7156 - RNA, 22 nt, Human
gcacaaggagaauucauuagug

SEQ ID NO: 7157 - RNA, 22 nt, Human
gcacaaggagcaguguaugaaa

SEQ ID NO: 7158 - RNA, 22 nt, Human
gcacaauaacagccaagguuau

SEQ ID NO: 7159 - RNA, 22 nt, Human
gcacaauaauuuuuuuaagagg

SEQ ID NO: 7160 - RNA, 22 nt, Human
gcacaauuccaugggacagccc

SEQ ID NO: 7161 - RNA, 22 nt, Human
gcacacacaugugaguacaugc

SEQ ID NO: 7162 - RNA, 22 nt, Human
gcacacagaacauuuggauccu

SEQ ID NO: 7163 - RNA, 22 nt, Human
gcacacagaauugauucacugu

SEQ ID NO: 7164 - RNA, 16 nt, Human
gcacacagccagccuu

SEQ ID NO: 7165 - RNA, 22 nt, Human
gcacacagggauuuuugaaugg

SEQ ID NO: 7166 - RNA, 22 nt, Human
gcacacaggggaguucucagaa

SEQ ID NO: 7167 - RNA, 22 nt, Human
gcacacaguacuauaugcuaca

SEQ ID NO: 7168 - RNA, 22 nt, Human
gcacacaguauaugcucauuaa

SEQ ID NO: 7169 - RNA, 22 nt, Human
gcacacaugcaugugugcaucc

SEQ ID NO: 7170 - RNA, 19 nt, Human
gcacacccugcaccaccau

SEQ ID NO: 7171 - RNA, 22 nt, Human
gcacaccuuagaggggagcugc

SEQ ID NO: 7172 - RNA, 19 nt, Human
gcacacguugugcuugagc

SEQ ID NO: 7173 - RNA, 22 nt, Human
gcacacuuaauacucacugugc

SEQ ID NO: 7174 - RNA, 22 nt, Human
gcacagaacagagaaauagcca

SEQ ID NO: 7175 - RNA, 22 nt, Human
gcacagaacccuaucuuucgga

SEQ ID NO: 7176 - RNA, 22 nt, Human
gcacagaauaacacucugggcu

SEQ ID NO: 7177 - RNA, 22 nt, Human
gcacagagagcagugggggaca

SEQ ID NO: 7178 - RNA, 18 nt, Human
gcacagagcccaggcucu

SEQ ID NO: 7179 - RNA, 22 nt, Human
gcacagagcuggcccuccaggc

SEQ ID NO: 7180 - RNA, 22 nt, Human
gcacagaggaagcacagacucu

SEQ ID NO: 7181 - RNA, 22 nt, Human
gcacagagucacuagcuaagca

SEQ ID NO: 7182 - RNA, 22 nt, Human
gcacagcaauuucuauaagcuc

SEQ ID NO: 7183 - RNA, 22 nt, Human
gcacagcacagcaacauguuuu

SEQ ID NO: 7184 - RNA, 22 nt, Human
gcacagccacugagugagaacc

SEQ ID NO: 7185 - RNA, 22 nt, Human
gagcuuggcagugucacuaggg

SEQ ID NO: 7186 - RNA, 22 nt, Human
gagcuuggccucuugaacgugg

SEQ ID NO: 7187 - RNA, 22 nt, Human
gagcuuggcuggaccucacgga

SEQ ID NO: 7188 - RNA, 22 nt, Human
gagcuuggugcacagugguuaa

SEQ ID NO: 7189 - RNA, 22 nt, Human
gcagaccugaccuugggcagca

SEQ ID NO: 7190 - RNA, 17 nt, Human
gcagacugcgggucccc

SEQ ID NO: 7191 - RNA, 22 nt, Human
gcagagaaaguuuuguccucag

SEQ ID NO: 7192 - RNA, 22 nt, Human
gcagagacagacuaaugaaaag

SEQ ID NO: 7193 - RNA, 22 nt, Human
gggcuauagcacuauguauggg

SEQ ID NO: 7194 - RNA, 22 nt, Human
gggcucagacaucccuccugga

SEQ ID NO: 7195 - RNA, 23 nt, Human
gggcucagauuucauucugugcc

SEQ ID NO: 7196 - RNA, 22 nt, Human
gggcucagcugggcgugcuggu

SEQ ID NO: 7197 - RNA, 22 nt, Human
gggcucaggucagggcaucagc

SEQ ID NO: 7198 - RNA, 22 nt, Human
gggcuccaaaauccuguagccu

SEQ ID NO: 7199 - RNA, 22 nt, Human
gggcuccacagcagugagugga

SEQ ID NO: 7200 - RNA, 22 nt, Human
gggcuccaccuagggacacugg

SEQ ID NO: 7201 - RNA, 21 nt, Human
gggcuccagagauguagcuuc

SEQ ID NO: 7202 - RNA, 22 nt, Human
gggcuccagccacuggcugagg

SEQ ID NO: 7203 - RNA, 22 nt, Human
gggcuccagccagcuccuugug

SEQ ID NO: 7204 - RNA, 20 nt, Human
gggcuccagcugugauucuu

SEQ ID NO: 7205 - RNA, 22 nt, Human
gggcuccaggcaggcaggaaau

SEQ ID NO: 7206 - RNA, 22 nt, Human
gggcucugagcucugggaauua

SEQ ID NO: 7207 - RNA, 22 nt, Human
gggcucugcgcucagcuccagc

SEQ ID NO: 7208 - RNA, 22 nt, Human
gggcucuggaaggugcaccaug

SEQ ID NO: 7209 - RNA, 22 nt, Human
gggcucugggaugcucuuagag

SEQ ID NO: 7210 - RNA, 22 nt, Human
gggcucuggggugcccuggcau

SEQ ID NO: 7211 - RNA, 22 nt, Human
gggcucugguacuuccuggcuc

SEQ ID NO: 7212 - RNA, 22 nt, Human
gggcucuggugccuucacagaa

SEQ ID NO: 7213 - RNA, 22 nt, Human
gggcucugugcaccccagcacc

SEQ ID NO: 7214 - RNA, 22 nt, Human
gggcucugugguugugcuuugu

SEQ ID NO: 7215 - RNA, 22 nt, Human
gggcucuguguucuagcucucg

SEQ ID NO: 7216 - RNA, 22 nt, Human
gggcucuguuuagaccagagau

SEQ ID NO: 7217 - RNA, 20 nt, Human
gggcucuuagguagcagggg

SEQ ID NO: 7218 - RNA, 22 nt, Human
gggcucuuuucugagcuucacu

SEQ ID NO: 7219 - RNA, 22 nt, Human
gggcugacaccacccaggcgca

SEQ ID NO: 7220 - RNA, 22 nt, Human
gggcugacagcacgccuucugu

SEQ ID NO: 7221 - RNA, 17 nt, Human
gggcugacaguggccuc

SEQ ID NO: 7222 - RNA, 22 nt, Human
gggcugaccccaccccucacuc

SEQ ID NO: 7223 - RNA, 22 nt, Human
gggcugacucugcacugagcca

SEQ ID NO: 7224 - RNA, 22 nt, Human
gggcugagacgauggggucuuc

SEQ ID NO: 7225 - RNA, 22 nt, Human
gggcugagagugacuguucugu

SEQ ID NO: 7226 - RNA, 22 nt, Human
gggcugaggaacauauuuuguu

SEQ ID NO: 7227 - RNA, 22 nt, Human
gggcugaugaugagcagaggug

SEQ ID NO: 7228 - RNA, 22 nt, Human
gggcugcaaugcuucaguuguu

SEQ ID NO: 7229 - RNA, 22 nt, Human
gggcugcacuagggcaagguga

SEQ ID NO: 7230 - RNA, 22 nt, Human
gggcugccaagccugccugccu

SEQ ID NO: 7231 - RNA, 22 nt, Human
gggcugccuuucuucugggagc

SEQ ID NO: 7232 - RNA, 22 nt, Human
gggcugcuacgagaacugaaua

SEQ ID NO: 7233 - RNA, 23 nt, Human
gggcugcuccaggccaaggcugg

SEQ ID NO: 7234 - RNA, 22 nt, Human
gggcugcugccaccagguggau

SEQ ID NO: 7235 - RNA, 22 nt, Human
gggcugcugggcaagaaacauu

SEQ ID NO: 7236 - RNA, 22 nt, Human
gggcugcuuccuggggaaugcu

SEQ ID NO: 7237 - RNA, 22 nt, Human
gggcugcuuggaggaggcgcuc

SEQ ID NO: 7238 - RNA, 22 nt, Human
gggcugcuuuuaagggucucag

SEQ ID NO: 7239 - RNA, 22 nt, Human
gggcuggaagacaggaaaugcu

SEQ ID NO: 7240 - RNA, 16 nt, Human
gggcuggagauacagu

SEQ ID NO: 7241 - RNA, 22 nt, Human
gggcuggagccagcuguggcug

SEQ ID NO: 7242 - RNA, 22 nt, Human
gggcuggaggaccggccucgga

SEQ ID NO: 7243 - RNA, 22 nt, Human
gggcuggaggagauccagaggc

SEQ ID NO: 7244 - RNA, 19 nt, Human
gggcuggagggauagagcc

SEQ ID NO: 7245 - RNA, 22 nt, Human
gggcuggagucuucugaaagcc

SEQ ID NO: 7246 - RNA, 22 nt, Human
gggcuggaucucacgugagacc

SEQ ID NO: 7247 - RNA, 17 nt, Human
gggcuggauggccaugg

SEQ ID NO: 7248 - RNA, 22 nt, Human
gggcuggcucccagguguugaa

SEQ ID NO: 7249 - RNA, 22 nt, Human
gggcugggauggcuugaagauu

SEQ ID NO: 7250 - RNA, 22 nt, Human
gggcugggauugcuugcuguga

SEQ ID NO: 7251 - RNA, 22 nt, Human
gggcuggucuggcuuagucagg

SEQ ID NO: 7252 - RNA, 22 nt, Human
gggcugugagaguggggcugcu

SEQ ID NO: 7253 - RNA, 22 nt, Human
gggcugugaggugagaacuuac

SEQ ID NO: 7254 - RNA, 22 nt, Human
gggcuguguaaugugcucuuuu

SEQ ID NO: 7255 - RNA, 22 nt, Human
gggcuguguaucaguuaucuau

SEQ ID NO: 7256 - RNA, 22 nt, Human
gggcugugugcaguacgggucc

SEQ ID NO: 7257 - RNA, 22 nt, Human
gggcuucaaaauuggcacucuu

SEQ ID NO: 7258 - RNA, 22 nt, Human
gggcuucagauccagggaccuc

SEQ ID NO: 7259 - RNA, 22 nt, Human
gggcuucaguucugaccaucuu

SEQ ID NO: 7260 - RNA, 22 nt, Human
gggcuucuaagugaaaguguaa

SEQ ID NO: 7261 - RNA, 22 nt, Human
gggcuucuacuugcaaaggaua

SEQ ID NO: 7262 - RNA, 22 nt, Human
gggcuucuauucaagucuguuu

SEQ ID NO: 7263 - RNA, 22 nt, Human
gggcuucuggcuacuguaugag

SEQ ID NO: 7264 - RNA, 22 nt, Human
gggcuucugggcaccacucccu

SEQ ID NO: 7265 - RNA, 22 nt, Human
gggcuuggcuggggccaccaga

SEQ ID NO: 7266 - RNA, 22 nt, Human
gggcuuuaacacccagucaggg

SEQ ID NO: 7267 - RNA, 22 nt, Human
ggggaaaggccauggcaagaac

SEQ ID NO: 7268 - RNA, 22 nt, Human
ggggaagaauggcagaaaacau

SEQ ID NO: 7269 - RNA, 22 nt, Human
ggggaaggaaaguuauuagcag

SEQ ID NO: 7270 - RNA, 22 nt, Human
ggggaaggauaugauuagacua

SEQ ID NO: 7271 - RNA, 16 nt, Human
ggggaaggcaagaggg

SEQ ID NO: 7272 - RNA, 22 nt, Human
ggggaagggaguccaaguguua

SEQ ID NO: 7273 - RNA, 20 nt, Human
ggggaagucacugcagucag

SEQ ID NO: 7274 - RNA, 22 nt, Human
ggggaaugagugcccagaaagc

SEQ ID NO: 7275 - RNA, 22 nt, Human
ggggagaauuaccaaaagcgcu

SEQ ID NO: 7276 - RNA, 22 nt, Human
ggggagaugcuuagguccgggg

SEQ ID NO: 7277 - RNA, 22 nt, Human
ggggaggaguguacagguuuau

SEQ ID NO: 7278 - RNA, 22 nt, Human
ggggaggcaagaugaagugagg

SEQ ID NO: 7279 - RNA, 19 nt, Human
ggggagguauuguuuucau

SEQ ID NO: 7280 - RNA, 22 nt, Human
ggggaucuaggcuuaugagggc

SEQ ID NO: 7281 - RNA, 22 nt, Human
ggggauggaggcgugugguccu

SEQ ID NO: 7282 - RNA, 22 nt, Human
ggggauggauuccgggucccug

SEQ ID NO: 7283 - RNA, 22 nt, Human
ggggauggugggaaggcaaucu

SEQ ID NO: 7284 - RNA, 22 nt, Human
ggggcagagaauaaaaaccuaa

SEQ ID NO: 7285 - RNA, 22 nt, Human
ggggcagaguagcuggggugug

SEQ ID NO: 7286 - RNA, 22 nt, Human
ggggcagauggaacagagcaca

SEQ ID NO: 7287 - RNA, 22 nt, Human
ggggcagggagguuaucgccga

SEQ ID NO: 7288 - RNA, 21 nt, Human
ggggcaucaagacagaguuag

SEQ ID NO: 7289 - RNA, 22 nt, Human
ggggccagcuucgcgugcucuu

SEQ ID NO: 7290 - RNA, 22 nt, Human
ggggccagguccagcuuccaaa

SEQ ID NO: 7291 - RNA, 22 nt, Human
ggggcccagcaccccuccucgc

SEQ ID NO: 7292 - RNA, 21 nt, Human
ggggccucuccacacagccgg

SEQ ID NO: 7293 - RNA, 23 nt, Human
ggggccugcaccggucugcgcgg

SEQ ID NO: 7294 - RNA, 22 nt, Human
ggggccugcgagguucaacuuc

SEQ ID NO: 7295 - RNA, 22 nt, Human
ggggccuguagagcuucaggga

SEQ ID NO: 7296 - RNA, 22 nt, Human
ggggcggggcucugagaagcau

SEQ ID NO: 7297 - RNA, 22 nt, Human
ggggcucacaccucccuaaggg

SEQ ID NO: 7298 - RNA, 22 nt, Human
gagguucacuuccugaaauagc

SEQ ID NO: 7299 - RNA, 22 nt, Human
gagguucacuuccuggauccuu

SEQ ID NO: 7300 - RNA, 22 nt, Human
gagguucagcugcugccuggua

SEQ ID NO: 7301 - RNA, 22 nt, Human
gagguucaggaaaugggcaaag

SEQ ID NO: 7302 - RNA, 22 nt, Human
gagguucgauacagcguauuua

SEQ ID NO: 7303 - RNA, 22 nt, Human
gagguuucacuguguuguccag

SEQ ID NO: 7304 - RNA, 22 nt, Human
gaguaaaucgucauugcagcau

SEQ ID NO: 7305 - RNA, 22 nt, Human
gaguaacagcauaaauuuguga

SEQ ID NO: 7306 - RNA, 22 nt, Human
gcaaacuggcaaaccugucugu

SEQ ID NO: 7307 - RNA, 22 nt, Human
gcaaacugguagcucgccugcc

SEQ ID NO: 7308 - RNA, 22 nt, Human
gcaaagaaugcagauuugccuc

SEQ ID NO: 7309 - RNA, 22 nt, Human
gcaaagcaaaugccugaaggcg

SEQ ID NO: 7310 - RNA, 22 nt, Human
gcaaagcaagauucagauguag

SEQ ID NO: 7311 - RNA, 22 nt, Human
gcaaagcacacuggagaugucg

SEQ ID NO: 7312 - RNA, 22 nt, Human
gcaaagcugggugugaaugcac

SEQ ID NO: 7313 - RNA, 22 nt, Human
gcaaagucugcaucuggaucag

SEQ ID NO: 7314 - RNA, 22 nt, Human
gcaaagugaaauggggcagaga

SEQ ID NO: 7315 - RNA, 22 nt, Human
gcaaauaaaugcucacugcugu

SEQ ID NO: 7316 - RNA, 22 nt, Human
gcaaaugcacugcauuuagauu

SEQ ID NO: 7317 - RNA, 22 nt, Human
gcaaauggagugaagagcugga

SEQ ID NO: 7318 - RNA, 22 nt, Human
gcaaauguuuuugaguguuuac

SEQ ID NO: 7319 - RNA, 22 nt, Human
gcaaauuaaccaaucaugcucg

SEQ ID NO: 7320 - RNA, 22 nt, Human
gcaacacagaucuucuuuguug

SEQ ID NO: 7321 - RNA, 18 nt, Human
gcaacaguaucagcaggc

SEQ ID NO: 7322 - RNA, 22 nt, Human
gcaacuguuuugagcacccagu

SEQ ID NO: 7323 - RNA, 21 nt, Human
gcaacuuaucgcauucugcag

SEQ ID NO: 7324 - RNA, 22 nt, Human
gcaagaacgaauccuacuugcu

SEQ ID NO: 7325 - RNA, 23 nt, Human
gcaagagacagagcauccuguuc

SEQ ID NO: 7326 - RNA, 22 nt, Human
gcaagaguuuuuucucucuuga

SEQ ID NO: 7327 - RNA, 22 nt, Human
gcaagauuuacagacaacuucg

SEQ ID NO: 7328 - RNA, 22 nt, Human
gcaagauuucuuuuaggugaag

SEQ ID NO: 7329 - RNA, 22 nt, Human
gcaagcaaaaugggagauuccc

SEQ ID NO: 7330 - RNA, 22 nt, Human
gcaagcaaauuauuuauaggca

SEQ ID NO: 7331 - RNA, 23 nt, Human
gcaagcaaggcaggguaaagaga

SEQ ID NO: 7332 - RNA, 22 nt, Human
gcaagcacagauagacucagcc

SEQ ID NO: 7333 - RNA, 22 nt, Human
gcaagcagcccagaacagcucu

SEQ ID NO: 7334 - RNA, 22 nt, Human
gcaagcaguucgcagcccgccu

SEQ ID NO: 7335 - RNA, 18 nt, Human
gcaagcccucuccauuaa

SEQ ID NO: 7336 - RNA, 22 nt, Human
gcaagcuucauauggcauuuuc

SEQ ID NO: 7337 - RNA, 22 nt, Human
gcaaggaagagcagguggugcu

SEQ ID NO: 7338 - RNA, 22 nt, Human
gcaaggaagcagaguugcuauc

SEQ ID NO: 7339 - RNA, 22 nt, Human
gcaaggcagcauccuuuugagg

SEQ ID NO: 7340 - RNA, 18 nt, Human
gcaaggcagcucucuggg

SEQ ID NO: 7341 - RNA, 22 nt, Human
gcaaggcaguccuggggcccug

SEQ ID NO: 7342 - RNA, 22 nt, Human
gcaaggccugaggugggugcuc

SEQ ID NO: 7343 - RNA, 17 nt, Human
gcaaggccuguuuguuc

SEQ ID NO: 7344 - RNA, 22 nt, Human
gcaaggcucccgcagcccaggg

SEQ ID NO: 7345 - RNA, 22 nt, Human
gcaaggcugaccucucuagacu

SEQ ID NO: 7346 - RNA, 22 nt, Human
gcaaggcugcccacuucaaaag

SEQ ID NO: 7347 - RNA, 22 nt, Human
gcaaggcugcugccacccaucu

SEQ ID NO: 7348 - RNA, 22 nt, Human
gcaaggcugggagaugaggccu

SEQ ID NO: 7349 - RNA, 22 nt, Human
gcaaggcuguugcugcugcaag

SEQ ID NO: 7350 - RNA, 21 nt, Human
gcaaggcuuuuguguuuccca

SEQ ID NO: 7351 - RNA, 17 nt, Human
gcaagggaugggagauu

SEQ ID NO: 7352 - RNA, 22 nt, Human
gcaaggucuuucagaaaggaaa

SEQ ID NO: 7353 - RNA, 22 nt, Human
gcaaguccuuugcaugcaggga

SEQ ID NO: 7354 - RNA, 20 nt, Human
gcaagugaaaacuaugggug

SEQ ID NO: 7355 - RNA, 22 nt, Human
gcaauaaaauguaaugauuggg

SEQ ID NO: 7356 - RNA, 22 nt, Human
gcaauaaaguagcagcucauca

SEQ ID NO: 7357 - RNA, 22 nt, Human
gcaauacagaagaguggcaagg

SEQ ID NO: 7358 - RNA, 22 nt, Human
gcaauacaguagguuuauuggu

SEQ ID NO: 7359 - RNA, 22 nt, Human
gcaauacucaacacuuuugcuu

SEQ ID NO: 7360 - RNA, 22 nt, Human
gcaauacugagauuauuguacu

SEQ ID NO: 7361 - RNA, 22 nt, Human
gcaauagacuguuuuuauuguu

SEQ ID NO: 7362 - RNA, 22 nt, Human
gcaauagugccuauucucuuga

SEQ ID NO: 7363 - RNA, 22 nt, Human
gcaaugauauugaagugaugaa

SEQ ID NO: 7364 - RNA, 22 nt, Human
gcaaugcaaucagaugauuauu

SEQ ID NO: 7365 - RNA, 22 nt, Human
gcaaugcauaacagagugggcc

SEQ ID NO: 7366 - RNA, 22 nt, Human
gcaaugucugugcuaaaaacug

SEQ ID NO: 7367 - RNA, 22 nt, Human
gcaauguuaagaucacaccugg

SEQ ID NO: 7368 - RNA, 20 nt, Human
gcaauguugguuccugucac

SEQ ID NO: 7369 - RNA, 22 nt, Human
gcacaacaccaagggagguauc

SEQ ID NO: 7370 - RNA, 22 nt, Human
gcacaagcacgagcagcgugcg

SEQ ID NO: 7371 - RNA, 16 nt, Human
gcacacacaucaauga

SEQ ID NO: 7372 - RNA, 22 nt, Human
gcacacagaaucagugggcaua

SEQ ID NO: 7373 - RNA, 22 nt, Human
gcacacagauuaggaaacagaa

SEQ ID NO: 7374 - RNA, 22 nt, Human
gcacacagccagcugagggcua

SEQ ID NO: 7375 - RNA, 20 nt, Human
gcacacauagaaaugcauau

SEQ ID NO: 7376 - RNA, 22 nt, Human
gcacacauauauaugagcaugu

SEQ ID NO: 7377 - RNA, 22 nt, Human
gcacacaugcaugcacaggagu

SEQ ID NO: 7378 - RNA, 22 nt, Human
gcacacaugcguguauaugggu

SEQ ID NO: 7379 - RNA, 22 nt, Human
gcacacaugugaguguccuuuc

SEQ ID NO: 7380 - RNA, 22 nt, Human
gcacacuccuggauccuagaga

SEQ ID NO: 7381 - RNA, 22 nt, Human
gcacacugcggugaugugaguc

SEQ ID NO: 7382 - RNA, 22 nt, Human
gcacacugugaauuugcauaug

SEQ ID NO: 7383 - RNA, 22 nt, Human
gcacagaaguaaaauacaaguc

SEQ ID NO: 7384 - RNA, 22 nt, Human
gcacagacauauccauauuuac

SEQ ID NO: 7385 - RNA, 22 nt, Human
gcacagacuuugauugcaguca

SEQ ID NO: 7386 - RNA, 22 nt, Human
gcacagagagucccgggugccc

SEQ ID NO: 7387 - RNA, 18 nt, Human
gcacagagcaaguuucau

SEQ ID NO: 7388 - RNA, 22 nt, Human
gcacagagccugguaccgagaa

SEQ ID NO: 7389 - RNA, 22 nt, Human
gcacagagcuuguuuacauuug

SEQ ID NO: 7390 - RNA, 22 nt, Human
gcacagagguggaggacaaaua

SEQ ID NO: 7391 - RNA, 22 nt, Human
gcacagcagcugggggcccugg

SEQ ID NO: 7392 - RNA, 22 nt, Human
gcacagcaugaagagaggaagc

SEQ ID NO: 7393 - RNA, 22 nt, Human
gcacagccugucccuguccugg

SEQ ID NO: 7394 - RNA, 22 nt, Human
gcacagcuaugagcugaauugu

SEQ ID NO: 7395 - RNA, 22 nt, Human
gcacagcuggacucugccuggc

SEQ ID NO: 7396 - RNA, 22 nt, Human
gcacaggagccagguccuucac

SEQ ID NO: 7397 - RNA, 22 nt, Human
gcacaggcaauagauacagcua

SEQ ID NO: 7398 - RNA, 22 nt, Human
gcacaggcuguuggccuucaga

SEQ ID NO: 7399 - RNA, 21 nt, Human
gcacagggacagaucaucaca

SEQ ID NO: 7400 - RNA, 22 nt, Human
gcacagggaggcuggccuggcc

SEQ ID NO: 7401 - RNA, 22 nt, Human
gcacagggcaacaggucuguua

SEQ ID NO: 7402 - RNA, 22 nt, Human
gcacaggucaggagaugagauu

SEQ ID NO: 7403 - RNA, 22 nt, Human
gcacagguugcaaaaguucaca

SEQ ID NO: 7404 - RNA, 22 nt, Human
gcacaguaccugucacagaggc

SEQ ID NO: 7405 - RNA, 22 nt, Human
gcacaguagguauuuacccagu

SEQ ID NO: 7406 - RNA, 22 nt, Human
gcacaguauugcacaacucuag

SEQ ID NO: 7407 - RNA, 20 nt, Human
gcagcugaaaguaugacacc

SEQ ID NO: 7408 - RNA, 22 nt, Human
gcagcugaagcugcaguuccag

SEQ ID NO: 7409 - RNA, 18 nt, Human
gcagcugacacuggaguu

SEQ ID NO: 7410 - RNA, 20 nt, Human
gcagcugcccccagucccug

SEQ ID NO: 7411 - RNA, 22 nt, Human
gcagcugccuaaagugcuaaga

SEQ ID NO: 7412 - RNA, 22 nt, Human
gcagcugccuauucagggcuug

SEQ ID NO: 7413 - RNA, 22 nt, Human
gcagcugcgcugguguggggca

SEQ ID NO: 7414 - RNA, 22 nt, Human
gcagcugcuguggcaucaagcu

SEQ ID NO: 7415 - RNA, 19 nt, Human
gcagcugcuugaaaagaaa

SEQ ID NO: 7416 - RNA, 22 nt, Human
gcagcuggagaaauaccacccu

SEQ ID NO: 7417 - RNA, 22 nt, Human
gcagcuggagcaucuucucauc

SEQ ID NO: 7418 - RNA, 22 nt, Human
gcagcuggagccagccagacac

SEQ ID NO: 7419 - RNA, 22 nt, Human
gcagcugggccccagccucucc

SEQ ID NO: 7420 - RNA, 22 nt, Human
gcagcuggggaggucgugggga

SEQ ID NO: 7421 - RNA, 21 nt, Human
gcagcuggucucagagcuugc

SEQ ID NO: 7422 - RNA, 22 nt, Human
gcagcuggugcaaaugucacuc

SEQ ID NO: 7423 - RNA, 23 nt, Human
gcagcugguuagaagggaaggag

SEQ ID NO: 7424 - RNA, 22 nt, Human
gauacaguauuuaaagagcaac

SEQ ID NO: 7425 - RNA, 22 nt, Human
gauacaguguguuaacgagaaa

SEQ ID NO: 7426 - RNA, 22 nt, Human
gauacauuccgggagggcuacc

SEQ ID NO: 7427 - RNA, 22 nt, Human
gauacauuucaaggaggacugg

SEQ ID NO: 7428 - RNA, 22 nt, Human
gauaccuuuuguuggaauuucc

SEQ ID NO: 7429 - RNA, 22 nt, Human
gauacuuuccauccaaaugcau

SEQ ID NO: 7430 - RNA, 22 nt, Human
gauagaaagguguugaaaucca

SEQ ID NO: 7431 - RNA, 22 nt, Human
gauagcaacauagaacagaauu

SEQ ID NO: 7432 - RNA, 22 nt, Human
gauagcugcugggauauuuuua

SEQ ID NO: 7433 - RNA, 22 nt, Human
gauaggaccagguaaccucuaa

SEQ ID NO: 7434 - RNA, 22 nt, Human
gauaggauuauucccauuucca

SEQ ID NO: 7435 - RNA, 22 nt, Human
gauagggcuucacuaggcggag

SEQ ID NO: 7436 - RNA, 19 nt, Human
gauauaaagagauggugaa

SEQ ID NO: 7437 - RNA, 22 nt, Human
gauauacaauccacaguugauu

SEQ ID NO: 7438 - RNA, 22 nt, Human
gauauaguuggaauuauaaagg

SEQ ID NO: 7439 - RNA, 22 nt, Human
gauauaucacagcuuacuguca

SEQ ID NO: 7440 - RNA, 22 nt, Human
gauaucauaucagacaaccucu

SEQ ID NO: 7441 - RNA, 22 nt, Human
gauaugaaguggcauugugaag

SEQ ID NO: 7442 - RNA, 22 nt, Human
gauauguauugaaugaucauuu

SEQ ID NO: 7443 - RNA, 22 nt, Human
gauauucaaagauuacugauau

SEQ ID NO: 7444 - RNA, 22 nt, Human
gauauucaacuaaagugaauua

SEQ ID NO: 7445 - RNA, 22 nt, Human
gauauucuauuuuagccagcua

SEQ ID NO: 7446 - RNA, 22 nt, Human
gauauucuggugaaaccuuugg

SEQ ID NO: 7447 - RNA, 22 nt, Human
gauauuuacaaauuugccaaua

SEQ ID NO: 7448 - RNA, 21 nt, Human
gauauuuaugacucauuccuu

SEQ ID NO: 7449 - RNA, 22 nt, Human
gauauuuugagaaauccuauga

SEQ ID NO: 7450 - RNA, 22 nt, Human
gauauuuuuaguauuucugccu

SEQ ID NO: 7451 - RNA, 22 nt, Human
gaucaauucaaacuauuuuccu

SEQ ID NO: 7452 - RNA, 22 nt, Human
gaucacaauuuagacuuuuuaa

SEQ ID NO: 7453 - RNA, 22 nt, Human
gaucacaguauuuuagaugugu

SEQ ID NO: 7454 - RNA, 22 nt, Human
gaucagaaucuucauuuucagu

SEQ ID NO: 7455 - RNA, 22 nt, Human
gaucagaaugggacauauccug

SEQ ID NO: 7456 - RNA, 22 nt, Human
gaucagaauucuuguguguuuc

SEQ ID NO: 7457 - RNA, 20 nt, Human
gaucaggaagcggcuuggga

SEQ ID NO: 7458 - RNA, 22 nt, Human
gaucaggaauauuggaaaguac

SEQ ID NO: 7459 - RNA, 22 nt, Human
gaucaugugauuugaaguaaug

SEQ ID NO: 7460 - RNA, 22 nt, Human
gaucauuaacaaccuuacccuu

SEQ ID NO: 7461 - RNA, 22 nt, Human
gaucauuuuguauagcaaaggu

SEQ ID NO: 7462 - RNA, 22 nt, Human
gauccaaauuauuuuuuagagg

SEQ ID NO: 7463 - RNA, 22 nt, Human
gauccacaggaaccaaaacgca

SEQ ID NO: 7464 - RNA, 22 nt, Human
gauccacaguuugaugaucaua

SEQ ID NO: 7465 - RNA, 22 nt, Human
gauccacuguguuuguguugag

SEQ ID NO: 7466 - RNA, 22 nt, Human
gauccccaggacuagggggugg

SEQ ID NO: 7467 - RNA, 22 nt, Human
gauccugucuguggagucagca

SEQ ID NO: 7468 - RNA, 22 nt, Human
gauccugugguuuuccugugca

SEQ ID NO: 7469 - RNA, 22 nt, Human
gaucggguggguucugccauca

SEQ ID NO: 7470 - RNA, 22 nt, Human
gaucuagaaggcaaauauagug

SEQ ID NO: 7471 - RNA, 22 nt, Human
gaucugagaucuaaaccagagg

SEQ ID NO: 7472 - RNA, 22 nt, Human
gaucugggcuggagacugagaa

SEQ ID NO: 7473 - RNA, 22 nt, Human
gaucuguccuggcaguuaacac

SEQ ID NO: 7474 - RNA, 22 nt, Human
gaucuguuauaaucucuuuuau

SEQ ID NO: 7475 - RNA, 16 nt, Human
gaucuguucuauuuca

SEQ ID NO: 7476 - RNA, 22 nt, Human
gaucuugagcaaguugcauccc

SEQ ID NO: 7477 - RNA, 22 nt, Human
gaucuuggggggaucaccaugg

SEQ ID NO: 7478 - RNA, 22 nt, Human
gaucuuucaucuauguauuuag

SEQ ID NO: 7479 - RNA, 22 nt, Human
gaucuuuucagguuucucuagu

SEQ ID NO: 7480 - RNA, 22 nt, Human
gaugaaaaauugcugugucaua

SEQ ID NO: 7481 - RNA, 22 nt, Human
gaugaagcuaaaucuaagguuu

SEQ ID NO: 7482 - RNA, 18 nt, Human
gaugaagcugcuggggau

SEQ ID NO: 7483 - RNA, 22 nt, Human
gaugaagcuuugaagucuaauc

SEQ ID NO: 7484 - RNA, 22 nt, Human
gaugaagucauuauccuuuugg

SEQ ID NO: 7485 - RNA, 22 nt, Human
gaugaauuguuauggcuacgag

SEQ ID NO: 7486 - RNA, 20 nt, Human
gaugacauacucacuuaggg

SEQ ID NO: 7487 - RNA, 22 nt, Human
gaugaggaauuugagguuagaa

SEQ ID NO: 7488 - RNA, 22 nt, Human
gaugaggcaagccagaggacug

SEQ ID NO: 7489 - RNA, 18 nt, Human
gaugaggcugucugagaa

SEQ ID NO: 7490 - RNA, 22 nt, Human
gaugagucauucacagucguga

SEQ ID NO: 7491 - RNA, 21 nt, Human
gaugaugccauccuccaucuc

SEQ ID NO: 7492 - RNA, 21 nt, Human
gaugauggcaggcagcacugg

SEQ ID NO: 7493 - RNA, 22 nt, Human
gaugaugugucccaagaaguag

SEQ ID NO: 7494 - RNA, 22 nt, Human
gaugauucuguguuuggaaugc

SEQ ID NO: 7495 - RNA, 22 nt, Human
gaugauuuaaguggccaaagua

SEQ ID NO: 7496 - RNA, 22 nt, Human
gaugauuugaggauuucaugag

SEQ ID NO: 7497 - RNA, 22 nt, Human
gaugauuuuaguugacuaaacu

SEQ ID NO: 7498 - RNA, 22 nt, Human
gaugauuuucuguguuagaaga

SEQ ID NO: 7499 - RNA, 22 nt, Human
gaugauuuugaugcaguaaaga

SEQ ID NO: 7500 - RNA, 22 nt, Human
gaugcaaaaguaucauuuuaau

SEQ ID NO: 7501 - RNA, 22 nt, Human
gaugcaaagcauuuuugugugu

SEQ ID NO: 7502 - RNA, 22 nt, Human
gaugcacaugugaguauagaag

SEQ ID NO: 7503 - RNA, 22 nt, Human
gaugcacugcaguauauacugu

SEQ ID NO: 7504 - RNA, 22 nt, Human
gaugcacuugccccuccucaga

SEQ ID NO: 7505 - RNA, 22 nt, Human
gaugcaggugugccacagagcu

SEQ ID NO: 7506 - RNA, 22 nt, Human
gaugcagugcuuaaaucauuug

SEQ ID NO: 7507 - RNA, 22 nt, Human
gaugcugagagguggagggaac

SEQ ID NO: 7508 - RNA, 22 nt, Human
gaugcugccagucaaucccaag

SEQ ID NO: 7509 - RNA, 22 nt, Human
gaugcuuaagauguugguggca

SEQ ID NO: 7510 - RNA, 18 nt, Human
gauggaaaguguaugagu

SEQ ID NO: 7511 - RNA, 22 nt, Human
gauggaaugaauggcagauaca

SEQ ID NO: 7512 - RNA, 22 nt, Human
gauggaaugucacuucuguggu

SEQ ID NO: 7513 - RNA, 22 nt, Human
gauggacagccuggaaggaaag

SEQ ID NO: 7514 - RNA, 22 nt, Human
gauggaggaaaaguuggaaugc

SEQ ID NO: 7515 - RNA, 22 nt, Human
gauggauacuauaggaggcaca

SEQ ID NO: 7516 - RNA, 22 nt, Human
gcagagcuggaacugguacuca

SEQ ID NO: 7517 - RNA, 18 nt, Human
gcagagcugggauuccca

SEQ ID NO: 7518 - RNA, 22 nt, Human
gcagagcugggauuuguacugg

SEQ ID NO: 7519 - RNA, 20 nt, Human
gcagagcuguucugugggga

SEQ ID NO: 7520 - RNA, 23 nt, Human
gcagaggagcaagcuggacacca

SEQ ID NO: 7521 - RNA, 22 nt, Human
gcagaggauagcauaugaaccu

SEQ ID NO: 7522 - RNA, 22 nt, Human
gcagaggccaggccaccagcaa

SEQ ID NO: 7523 - RNA, 22 nt, Human
gcagaggccaucaacuuugcca

SEQ ID NO: 7524 - RNA, 22 nt, Human
gcagaggccugaagguggcggg

SEQ ID NO: 7525 - RNA, 22 nt, Human
gcagaggcuccauuuuacagau

SEQ ID NO: 7526 - RNA, 22 nt, Human
gcagaggcucuuuaaugcuuag

SEQ ID NO: 7527 - RNA, 22 nt, Human
gcagaggcugggugucccaguc

SEQ ID NO: 7528 - RNA, 22 nt, Human
gcagaggguccugugccagcag

SEQ ID NO: 7529 - RNA, 22 nt, Human
gcagagguggaugcaauugggg

SEQ ID NO: 7530 - RNA, 23 nt, Human
gcagagguuauguuuuuuaggcu

SEQ ID NO: 7531 - RNA, 22 nt, Human
gcagagugaagcaguauggaaa

SEQ ID NO: 7532 - RNA, 22 nt, Human
gcagagugaggaagagcuucca

SEQ ID NO: 7533 - RNA, 22 nt, Human
gcagagugauggaaugugggug

SEQ ID NO: 7534 - RNA, 22 nt, Human
gcagagugccgagauggaagcg

SEQ ID NO: 7535 - RNA, 20 nt, Human
gcagagugugagagggugaa

SEQ ID NO: 7536 - RNA, 22 nt, Human
gcagaguucucuuccagcuaac

SEQ ID NO: 7537 - RNA, 22 nt, Human
gcagaguuggagccagcccagg

SEQ ID NO: 7538 - RNA, 18 nt, Human
gcagaucauuagauaauu

SEQ ID NO: 7539 - RNA, 19 nt, Human
gcagauccaaaagucacau

SEQ ID NO: 7540 - RNA, 22 nt, Human
gcagaugcagaacucagugggu

SEQ ID NO: 7541 - RNA, 22 nt, Human
gcagaugcagagauggcugggg

SEQ ID NO: 7542 - RNA, 22 nt, Human
gcagauggacuguaugaccuga

SEQ ID NO: 7543 - RNA, 18 nt, Human
gcagauggagauucaggg

SEQ ID NO: 7544 - RNA, 22 nt, Human
gcagauggcgcaguggaaguuc

SEQ ID NO: 7545 - RNA, 21 nt, Human
gcagaugggagucaucaggcu

SEQ ID NO: 7546 - RNA, 22 nt, Human
gcagaugguggaggcaagaggc

SEQ ID NO: 7547 - RNA, 22 nt, Human
gcagaugguggggcaggaaaau

SEQ ID NO: 7548 - RNA, 22 nt, Human
gcagauggugggggaggaguac

SEQ ID NO: 7549 - RNA, 22 nt, Human
gcagcaaacuuccacaaguaga

SEQ ID NO: 7550 - RNA, 18 nt, Human
gcagcaaagggcccgggg

SEQ ID NO: 7551 - RNA, 21 nt, Human
gcagcaaaugacaacagugag

SEQ ID NO: 7552 - RNA, 22 nt, Human
gcagcaacgcggcccuacugcu

SEQ ID NO: 7553 - RNA, 22 nt, Human
gcagcacacgguggugcccugg

SEQ ID NO: 7554 - RNA, 20 nt, Human
gcagcagacagacaggggac

SEQ ID NO: 7555 - RNA, 22 nt, Human
gcagcagagaacacaaugaugg

SEQ ID NO: 7556 - RNA, 22 nt, Human
gcagcagagcuuuguccuggcu

SEQ ID NO: 7557 - RNA, 22 nt, Human
gcagcagaggcccuacucuuug

SEQ ID NO: 7558 - RNA, 22 nt, Human
guauuuuaagugacuacuaggu

SEQ ID NO: 7559 - RNA, 22 nt, Human
guauuuuacugcucaaagcucu

SEQ ID NO: 7560 - RNA, 22 nt, Human
guauuuuauggcaugcaguggc

SEQ ID NO: 7561 - RNA, 22 nt, Human
guauuuuauggccuggggccua

SEQ ID NO: 7562 - RNA, 22 nt, Human
guauuuuucauuccaagugaga

SEQ ID NO: 7563 - RNA, 22 nt, Human
gucaaaacaaaguuaagaauuc

SEQ ID NO: 7564 - RNA, 22 nt, Human
gucaaacaaauuaacauaucca

SEQ ID NO: 7565 - RNA, 20 nt, Human
gucaaacuacuggcagugcc

SEQ ID NO: 7566 - RNA, 22 nt, Human
gucaaauauacuaagagguaaa

SEQ ID NO: 7567 - RNA, 22 nt, Human
gucaaauauaugcaaaacuauu

SEQ ID NO: 7568 - RNA, 22 nt, Human
gucaaauauuaugcagcuugga

SEQ ID NO: 7569 - RNA, 22 nt, Human
gucaacaaguaguuuucuucca

SEQ ID NO: 7570 - RNA, 22 nt, Human
gucaacaagugguuauugggau

SEQ ID NO: 7571 - RNA, 22 nt, Human
gucaacaauuccaguuuuuacu

SEQ ID NO: 7572 - RNA, 22 nt, Human
gucaacagagacagagacacug

SEQ ID NO: 7573 - RNA, 22 nt, Human
gucaacaucggaaagcguguaa

SEQ ID NO: 7574 - RNA, 22 nt, Human
gucaacauguucugggugaaug

SEQ ID NO: 7575 - RNA, 22 nt, Human
gucaacuguaccuaaagaaagu

SEQ ID NO: 7576 - RNA, 22 nt, Human
gucaacuugcaagaugcugggc

SEQ ID NO: 7577 - RNA, 22 nt, Human
gucaacuuuaagaugaucuuuu

SEQ ID NO: 7578 - RNA, 22 nt, Human
gucacacacauuucuuuggugc

SEQ ID NO: 7579 - RNA, 22 nt, Human
gucacacucagaaugacuagag

SEQ ID NO: 7580 - RNA, 22 nt, Human
gucacaggaaaggguguaaggg

SEQ ID NO: 7581 - RNA, 22 nt, Human
gucacaggccuggaugaggggc

SEQ ID NO: 7582 - RNA, 22 nt, Human
gucacaguggggucacagugug

SEQ ID NO: 7583 - RNA, 22 nt, Human
gucacaugccagugcacacagg

SEQ ID NO: 7584 - RNA, 22 nt, Human
gucacauucaugcagaaucaaa

SEQ ID NO: 7585 - RNA, 22 nt, Human
gucaccaucuacagcuccaaac

SEQ ID NO: 7586 - RNA, 22 nt, Human
gucacccacucccugcugcugu

SEQ ID NO: 7587 - RNA, 22 nt, Human
gucacccguuugacuauccacc

SEQ ID NO: 7588 - RNA, 22 nt, Human
gucaccucgcugucuuccugag

SEQ ID NO: 7589 - RNA, 22 nt, Human
gucaccucucaucacaugcuac

SEQ ID NO: 7590 - RNA, 22 nt, Human
gucaccuugaacaggcuacuca

SEQ ID NO: 7591 - RNA, 22 nt, Human
gucacuuuauuaauuuugguga

SEQ ID NO: 7592 - RNA, 21 nt, Human
gucagagaugcccaacugccu

SEQ ID NO: 7593 - RNA, 22 nt, Human
gucagagcccuucccugauuuu

SEQ ID NO: 7594 - RNA, 20 nt, Human
gucagaggacccuagagcga

SEQ ID NO: 7595 - RNA, 22 nt, Human
gucagaggggacaagacacaga

SEQ ID NO: 7596 - RNA, 22 nt, Human
gucagaggggcagcugccaggc

SEQ ID NO: 7597 - RNA, 22 nt, Human
gucagaucuuuggggaugcugu

SEQ ID NO: 7598 - RNA, 22 nt, Human
gucagcaauaguuaguuuacaa

SEQ ID NO: 7599 - RNA, 22 nt, Human
gucagcagaaacgccacaugca

SEQ ID NO: 7600 - RNA, 22 nt, Human
gucagcauaguucacacacagu

SEQ ID NO: 7601 - RNA, 22 nt, Human
gucagcuacugcagggaacuuu

SEQ ID NO: 7602 - RNA, 22 nt, Human
gucagcucucuuauccaugagg

SEQ ID NO: 7603 - RNA, 21 nt, Human
gucagcugugugugaggaccc

SEQ ID NO: 7604 - RNA, 22 nt, Human
gucaggacaagguggucuccag

SEQ ID NO: 7605 - RNA, 22 nt, Human
gucaggacauuuuaccauccug

SEQ ID NO: 7606 - RNA, 22 nt, Human
gucaggagauagggcaagcuuc

SEQ ID NO: 7607 - RNA, 22 nt, Human
gucaggaucucccaguacauau

SEQ ID NO: 7608 - RNA, 22 nt, Human
gucaggaugacaagugcuuuca

SEQ ID NO: 7609 - RNA, 22 nt, Human
gucaggaugcuauuguuauuaa

SEQ ID NO: 7610 - RNA, 22 nt, Human
gucaggauguuuauucuccagu

SEQ ID NO: 7611 - RNA, 20 nt, Human
gucaggauuaguaaacucug

SEQ ID NO: 7612 - RNA, 22 nt, Human
gucaggauuauaauccccaugg

SEQ ID NO: 7613 - RNA, 22 nt, Human
gucaggauuauuuuauuaaaag

SEQ ID NO: 7614 - RNA, 21 nt, Human
gucaggcccauagcagugccu

SEQ ID NO: 7615 - RNA, 22 nt, Human
gucaggcugcuggagcuugggu

SEQ ID NO: 7616 - RNA, 22 nt, Human
gucagggauccacugcucuucu

SEQ ID NO: 7617 - RNA, 22 nt, Human
gucagggcacagugacagcucc

SEQ ID NO: 7618 - RNA, 22 nt, Human
gucaggggccaugggccaagga

SEQ ID NO: 7619 - RNA, 21 nt, Human
gucagugcugaaacaccuucc

SEQ ID NO: 7620 - RNA, 22 nt, Human
gucaguguagguucaucagugg

SEQ ID NO: 7621 - RNA, 20 nt, Human
gucagugucuucaguaguga

SEQ ID NO: 7622 - RNA, 22 nt, Human
gucagugugaguugauuccaua

SEQ ID NO: 7623 - RNA, 22 nt, Human
gucaguucauuagcacuuccaa

SEQ ID NO: 7624 - RNA, 22 nt, Human
gucauaaagcuuguugcauuua

SEQ ID NO: 7625 - RNA, 22 nt, Human
gccagagcacaggcugguagua

SEQ ID NO: 7626 - RNA, 18 nt, Human
gccagagcauaucuccag

SEQ ID NO: 7627 - RNA, 22 nt, Human
gccagagcaugcacugccugca

SEQ ID NO: 7628 - RNA, 22 nt, Human
gccagagcugagacacgagucc

SEQ ID NO: 7629 - RNA, 23 nt, Human
gccagaggaacgcagagcuuucu

SEQ ID NO: 7630 - RNA, 22 nt, Human
gccagagugccaucagugccau

SEQ ID NO: 7631 - RNA, 22 nt, Human
gccagaucugacauaguggaag

SEQ ID NO: 7632 - RNA, 22 nt, Human
gccagauguagauagcaaggua

SEQ ID NO: 7633 - RNA, 22 nt, Human
gccagcaacuaggagcugaauu

SEQ ID NO: 7634 - RNA, 22 nt, Human
gccagcaaggaggggaaaaaug

SEQ ID NO: 7635 - RNA, 19 nt, Human
gccagcacccagcuguguc

SEQ ID NO: 7636 - RNA, 19 nt, Human
gccagcagaaugaugaggc

SEQ ID NO: 7637 - RNA, 22 nt, Human
gccagcagccacagaagucacu

SEQ ID NO: 7638 - RNA, 22 nt, Human
gccagcaguccaguccuuagug

SEQ ID NO: 7639 - RNA, 22 nt, Human
gccagcaguccugcugugugcc

SEQ ID NO: 7640 - RNA, 22 nt, Human
gccagcauccugguggugguug

SEQ ID NO: 7641 - RNA, 22 nt, Human
gccagccacaagggaggcuugu

SEQ ID NO: 7642 - RNA, 22 nt, Human
gccagccacuucagcuauggcu

SEQ ID NO: 7643 - RNA, 22 nt, Human
gccagccacuucccagacuggc

SEQ ID NO: 7644 - RNA, 22 nt, Human
gccagccagaguggcugugugu

SEQ ID NO: 7645 - RNA, 22 nt, Human
gccagccaggaagaaaguaaga

SEQ ID NO: 7646 - RNA, 21 nt, Human
gccagccaugcuugccuaggc

SEQ ID NO: 7647 - RNA, 22 nt, Human
gccagcccagcuccaggggaaa

SEQ ID NO: 7648 - RNA, 22 nt, Human
gccagccccagacauccuaucg

SEQ ID NO: 7649 - RNA, 22 nt, Human
gccagccccuuagggcucuccc

SEQ ID NO: 7650 - RNA, 22 nt, Human
gccagccuucuguggccugcaa

SEQ ID NO: 7651 - RNA, 21 nt, Human
gccagcggccgcccuccagga

SEQ ID NO: 7652 - RNA, 22 nt, Human
gccagcucuguggcuguacuug

SEQ ID NO: 7653 - RNA, 22 nt, Human
gccagcugaaauuucaguucug

SEQ ID NO: 7654 - RNA, 21 nt, Human
gccagcugcagggcuuccuug

SEQ ID NO: 7655 - RNA, 22 nt, Human
gccagcuggaaaucugcuugaa

SEQ ID NO: 7656 - RNA, 22 nt, Human
gccagcuggcugcaggucccag

SEQ ID NO: 7657 - RNA, 22 nt, Human
gccagcuguaucuuuggccagc

SEQ ID NO: 7658 - RNA, 22 nt, Human
gccagcuguucagacauucuuu

SEQ ID NO: 7659 - RNA, 22 nt, Human
gccaggaaaaaccggcccugcu

SEQ ID NO: 7660 - RNA, 22 nt, Human
gccaggaaaaaggguggccaau

SEQ ID NO: 7661 - RNA, 22 nt, Human
gccaggaaauucaugccagauc

SEQ ID NO: 7662 - RNA, 22 nt, Human
gccaggaagcaguuagaugggu

SEQ ID NO: 7663 - RNA, 22 nt, Human
gccaggaaggcucccuggucac

SEQ ID NO: 7664 - RNA, 22 nt, Human
gccaggaaugcauaaaugaccu

SEQ ID NO: 7665 - RNA, 19 nt, Human
gccaggacauccuccugcu

SEQ ID NO: 7666 - RNA, 22 nt, Human
gccaggacugagaaugggagca

SEQ ID NO: 7667 - RNA, 22 nt, Human
gccaggagaaugcuagcagagg

SEQ ID NO: 7668 - RNA, 22 nt, Human
gccaggaggcugcuguguaggc

SEQ ID NO: 7669 - RNA, 21 nt, Human
gccaggaguagauuacauuua

SEQ ID NO: 7670 - RNA, 23 nt, Human
gccaggcacaugguggacacgca

SEQ ID NO: 7671 - RNA, 22 nt, Human
gccaggcacugcucuaagcccu

SEQ ID NO: 7672 - RNA, 22 nt, Human
gccaggcagacaggucaucagg

SEQ ID NO: 7673 - RNA, 22 nt, Human
gcaguuagcuugucacaguccu

SEQ ID NO: 7674 - RNA, 22 nt, Human
gcaguuauguauguguuugaga

SEQ ID NO: 7675 - RNA, 22 nt, Human
gcaguuaugugaaucaugugac

SEQ ID NO: 7676 - RNA, 22 nt, Human
gcaguuuggaaaaugugccucu

SEQ ID NO: 7677 - RNA, 22 nt, Human
gcauaaaggacuauaaggauca

SEQ ID NO: 7678 - RNA, 19 nt, Human
gcauaaauacacuauuguc

SEQ ID NO: 7679 - RNA, 22 nt, Human
gcauaauuaaacaggcaagauu

SEQ ID NO: 7680 - RNA, 22 nt, Human
gcauaucagcaucaaaacacag

SEQ ID NO: 7681 - RNA, 22 nt, Human
gcauaugaucacgugugucggu

SEQ ID NO: 7682 - RNA, 22 nt, Human
gcauauggcuucauuuaauucu

SEQ ID NO: 7683 - RNA, 22 nt, Human
gcauauuuucacaagcucuugg

SEQ ID NO: 7684 - RNA, 22 nt, Human
gcauccaaaccauucaucagcc

SEQ ID NO: 7685 - RNA, 20 nt, Human
gcauccagacacccagcugc

SEQ ID NO: 7686 - RNA, 22 nt, Human
gcauccagguagagcuugcggg

SEQ ID NO: 7687 - RNA, 22 nt, Human
gcauccagucuuggcuccugga

SEQ ID NO: 7688 - RNA, 22 nt, Human
gcauccaugcaugcagggugug

SEQ ID NO: 7689 - RNA, 22 nt, Human
gcauccauggagagcacucuga

SEQ ID NO: 7690 - RNA, 19 nt, Human
gcauccauggaggccgcuu

SEQ ID NO: 7691 - RNA, 22 nt, Human
gcauccuggcucuaggugucau

SEQ ID NO: 7692 - RNA, 22 nt, Human
gcaucuaaacuugcaucauugu

SEQ ID NO: 7693 - RNA, 22 nt, Human
gcaucuaaaucacuuuaaugua

SEQ ID NO: 7694 - RNA, 22 nt, Human
gcaucuaagguggauaacuucu

SEQ ID NO: 7695 - RNA, 22 nt, Human
gcaucuaauccaguccagcauc

SEQ ID NO: 7696 - RNA, 19 nt, Human
gcaucugcaugaugggguu

SEQ ID NO: 7697 - RNA, 22 nt, Human
gcaucuguuagagugugcaugc

SEQ ID NO: 7698 - RNA, 21 nt, Human
gcaugaaaacagccugugcuc

SEQ ID NO: 7699 - RNA, 22 nt, Human
gcaugaaaugagcgaauauaau

SEQ ID NO: 7700 - RNA, 20 nt, Human
gcaugaggaaucauugcagc

SEQ ID NO: 7701 - RNA, 22 nt, Human
gcaugagggggguuaggaaguu

SEQ ID NO: 7702 - RNA, 22 nt, Human
gcaugaugaaggaggaggaguc

SEQ ID NO: 7703 - RNA, 22 nt, Human
gcaugcaaauagucaugcuucc

SEQ ID NO: 7704 - RNA, 22 nt, Human
gcaugcaaggggugugaaguga

SEQ ID NO: 7705 - RNA, 22 nt, Human
gcaugcaauguaucagugauag

SEQ ID NO: 7706 - RNA, 22 nt, Human
gcaugcacaccugugcacauuu

SEQ ID NO: 7707 - RNA, 22 nt, Human
gcaugcacaguuuuucaccuca

SEQ ID NO: 7708 - RNA, 22 nt, Human
gcaugcagaaaaugaacaacga

SEQ ID NO: 7709 - RNA, 22 nt, Human
gcaugcagucaaccaguaaggg

SEQ ID NO: 7710 - RNA, 22 nt, Human
gcaugcagugcaauucaaugua

SEQ ID NO: 7711 - RNA, 22 nt, Human
gcaugcaugauguuggcagugg

SEQ ID NO: 7712 - RNA, 22 nt, Human
gcaugcauuacaugggauaugc

SEQ ID NO: 7713 - RNA, 21 nt, Human
gcaugccugcaucuuaguguu

SEQ ID NO: 7714 - RNA, 20 nt, Human
gcaugcuuggagagagagaa

SEQ ID NO: 7715 - RNA, 22 nt, Human
gcauggaugggaguggacagau

SEQ ID NO: 7716 - RNA, 22 nt, Human
gcauggcaaauaucgagggcag

SEQ ID NO: 7717 - RNA, 22 nt, Human
gcauggcauuaacaagauggaa

SEQ ID NO: 7718 - RNA, 22 nt, Human
gcauggccucugugcuuguugc

SEQ ID NO: 7719 - RNA, 22 nt, Human
gcauggccuugugcuccuucuc

SEQ ID NO: 7720 - RNA, 20 nt, Human
gcauggcuaaucuguacuga

SEQ ID NO: 7721 - RNA, 22 nt, Human
gcauggcuauuaugaggcagaa

SEQ ID NO: 7722 - RNA, 22 nt, Human
gcauggcuauucuaacucacau

SEQ ID NO: 7723 - RNA, 22 nt, Human
gcaugggaggacagucugggcu

SEQ ID NO: 7724 - RNA, 22 nt, Human
gcaugggcaagaggacuggggg

SEQ ID NO: 7725 - RNA, 17 nt, Human
gcauguaguacauguaa

SEQ ID NO: 7726 - RNA, 22 nt, Human
gcauguggauauguuaggguga

SEQ ID NO: 7727 - RNA, 22 nt, Human
gcaugugucaucugccuuucgu

SEQ ID NO: 7728 - RNA, 22 nt, Human
gcaugugucuuuauagcagcau

SEQ ID NO: 7729 - RNA, 22 nt, Human
gcaugugugagaccuuuuagca

SEQ ID NO: 7730 - RNA, 22 nt, Human
gcaugugugucacuuuccugcc

SEQ ID NO: 7731 - RNA, 22 nt, Human
gcauguguuagagugugcaugc

SEQ ID NO: 7732 - RNA, 22 nt, Human
gcauguguugguuuaugcaugu

SEQ ID NO: 7733 - RNA, 22 nt, Human
gcauuagaaacuauugcugcaa

SEQ ID NO: 7734 - RNA, 22 nt, Human
gcagcugcaggcaggcuugcug

SEQ ID NO: 7735 - RNA, 22 nt, Human
gcagcuggaagugacacucugu

SEQ ID NO: 7736 - RNA, 22 nt, Human
gcagcuggcccugacacgcaga

SEQ ID NO: 7737 - RNA, 22 nt, Human
gcagcugucagaaguuggaauc

SEQ ID NO: 7738 - RNA, 22 nt, Human
gcagcuucagccagagggccag

SEQ ID NO: 7739 - RNA, 22 nt, Human
gcagcuuccugaguguggacag

SEQ ID NO: 7740 - RNA, 22 nt, Human
gcagcuuuagaaacaagggcug

SEQ ID NO: 7741 - RNA, 22 nt, Human
gcagcuuucuaagcuuuauugc

SEQ ID NO: 7742 - RNA, 22 nt, Human
gcagcuuucugcaaugucaucc

SEQ ID NO: 7743 - RNA, 22 nt, Human
gcagcuuucugggacagaaagg

SEQ ID NO: 7744 - RNA, 22 nt, Human
gcagcuuucuugcccuaaucuu

SEQ ID NO: 7745 - RNA, 22 nt, Human
gcagcuuugaagacuuauuugc

SEQ ID NO: 7746 - RNA, 22 nt, Human
gcagcuuuggagguggaacucu

SEQ ID NO: 7747 - RNA, 22 nt, Human
gcagcuuuguggagaggcccau

SEQ ID NO: 7748 - RNA, 22 nt, Human
gcaggaaaaccuucccauguuu

SEQ ID NO: 7749 - RNA, 22 nt, Human
gcaggaaagguugagacuuugc

SEQ ID NO: 7750 - RNA, 19 nt, Human
gcaggaaaugagugauugc

SEQ ID NO: 7751 - RNA, 22 nt, Human
gcaggaacagggcuucaagcuu

SEQ ID NO: 7752 - RNA, 22 nt, Human
gcaggaaccacugccccccugu

SEQ ID NO: 7753 - RNA, 22 nt, Human
gcaggaaccccgggaggcuggc

SEQ ID NO: 7754 - RNA, 22 nt, Human
gcaggaacccggccgcccuggc

SEQ ID NO: 7755 - RNA, 22 nt, Human
gcaggaacuggagcuggauguu

SEQ ID NO: 7756 - RNA, 22 nt, Human
gcaggaacuugcaaaaugagca

SEQ ID NO: 7757 - RNA, 23 nt, Human
gcaggacaacagagugggaaggc

SEQ ID NO: 7758 - RNA, 22 nt, Human
gcaggacucaaaucugaaggca

SEQ ID NO: 7759 - RNA, 22 nt, Human
gcaggagacaacuguaaggaga

SEQ ID NO: 7760 - RNA, 22 nt, Human
gcaggagagucugugccagguu

SEQ ID NO: 7761 - RNA, 22 nt, Human
gcaggagcaauggccuaucaga

SEQ ID NO: 7762 - RNA, 22 nt, Human
gcaggagcuuugcuuacugcug

SEQ ID NO: 7763 - RNA, 22 nt, Human
gcaggaguguggugggacaucc

SEQ ID NO: 7764 - RNA, 22 nt, Human
gcaggaguuaggcgucguggau

SEQ ID NO: 7765 - RNA, 19 nt, Human
gcaggauaggcugagacua

SEQ ID NO: 7766 - RNA, 22 nt, Human
gcaggaugaacuaacaccugca

SEQ ID NO: 7767 - RNA, 22 nt, Human
gcaggaugaaggcagaggcuga

SEQ ID NO: 7768 - RNA, 21 nt, Human
gcaggaugcaucuuggugucu

SEQ ID NO: 7769 - RNA, 22 nt, Human
gcaggauugggcagagggugaa

SEQ ID NO: 7770 - RNA, 22 nt, Human
gcaggcaauuuuggaaggucag

SEQ ID NO: 7771 - RNA, 22 nt, Human
gcaggcacaugggcgggucugg

SEQ ID NO: 7772 - RNA, 22 nt, Human
gcaggcaccacggcucaggucu

SEQ ID NO: 7773 - RNA, 14 nt, Human
gcaggcagaccacc

SEQ ID NO: 7774 - RNA, 16 nt, Human
gcaggcagaucacaug

SEQ ID NO: 7775 - RNA, 14 nt, Human
gcaggcagaucacc

SEQ ID NO: 7776 - RNA, 14 nt, Human
gcaggcagaucacu

SEQ ID NO: 7777 - RNA, 14 nt, Human
gcaggcagaucauu

SEQ ID NO: 7778 - RNA, 22 nt, Human
gcaggcagccacgauucccuug

SEQ ID NO: 7779 - RNA, 15 nt, Human
gcaggcaggucaccu

SEQ ID NO: 7780 - RNA, 22 nt, Human
gcaggcagucaucuuucauauu

SEQ ID NO: 7781 - RNA, 22 nt, Human
gcaggcaguugcaguuuucuag

SEQ ID NO: 7782 - RNA, 22 nt, Human
gcaggcaguuugcuuuucccuc

SEQ ID NO: 7783 - RNA, 22 nt, Human
gcaggccaagcccucgcagaga

SEQ ID NO: 7784 - RNA, 19 nt, Human
gcaggccaggaggcggagg

SEQ ID NO: 7785 - RNA, 22 nt, Human
gcaggccaggcuaggggcuguc

SEQ ID NO: 7786 - RNA, 22 nt, Human
gcaggccauucaggagaugugc

SEQ ID NO: 7787 - RNA, 19 nt, Human
gcaggcccagucgggcugg

SEQ ID NO: 7788 - RNA, 22 nt, Human
gcaggccugucuugcucgcccu

SEQ ID NO: 7789 - RNA, 22 nt, Human
gucuggacugcaaaauaaggau

SEQ ID NO: 7790 - RNA, 22 nt, Human
gucuggacuuuaucccaagguu

SEQ ID NO: 7791 - RNA, 22 nt, Human
gucuggagccacccuaagcauu

SEQ ID NO: 7792 - RNA, 22 nt, Human
gucuggagccugggucccugcu

SEQ ID NO: 7793 - RNA, 22 nt, Human
gucuggaggggagauuuggguu

SEQ ID NO: 7794 - RNA, 18 nt, Human
gucuggaggucaggagcu

SEQ ID NO: 7795 - RNA, 22 nt, Human
gucuggaguaccauaaaaagga

SEQ ID NO: 7796 - RNA, 22 nt, Human
gucuggcacauaagaggagcuc

SEQ ID NO: 7797 - RNA, 16 nt, Human
gucuggccuaccugcc

SEQ ID NO: 7798 - RNA, 22 nt, Human
gucuggccugccagcucuggug

SEQ ID NO: 7799 - RNA, 22 nt, Human
gucuggcuguuccugccuguga

SEQ ID NO: 7800 - RNA, 22 nt, Human
gucuggcuuuugcccuguguuu

SEQ ID NO: 7801 - RNA, 22 nt, Human
gucugggacaggacuggggaac

SEQ ID NO: 7802 - RNA, 22 nt, Human
gucugggcaccuggccugggaa

SEQ ID NO: 7803 - RNA, 22 nt, Human
gucuggguggcugcuuucagcu

SEQ ID NO: 7804 - RNA, 22 nt, Human
gucugguauucaauuauuauuu

SEQ ID NO: 7805 - RNA, 22 nt, Human
gucuguaauuauuaaagaaagg

SEQ ID NO: 7806 - RNA, 22 nt, Human
gucuguagaauaaauaugagua

SEQ ID NO: 7807 - RNA, 22 nt, Human
gucugucacucaggggcuggag

SEQ ID NO: 7808 - RNA, 22 nt, Human
gucugucucucuccagagugca

SEQ ID NO: 7809 - RNA, 22 nt, Human
gucugucuguuguugagaagca

SEQ ID NO: 7810 - RNA, 22 nt, Human
gucugugcuuauucagcagggg

SEQ ID NO: 7811 - RNA, 22 nt, Human
gucuguggcaggggagaaguuu

SEQ ID NO: 7812 - RNA, 22 nt, Human
gucugugugcacagagcuuugg

SEQ ID NO: 7813 - RNA, 18 nt, Human
gucuguguggcuugggga

SEQ ID NO: 7814 - RNA, 22 nt, Human
gucuuauuggguccaagguggc

SEQ ID NO: 7815 - RNA, 22 nt, Human
gucuuauuuaaggacaagaaga

SEQ ID NO: 7816 - RNA, 22 nt, Human
gucuuauuuaaggcuuauacaa

SEQ ID NO: 7817 - RNA, 22 nt, Human
gucuucaauugcauuugauggg

SEQ ID NO: 7818 - RNA, 22 nt, Human
gucuucaggacccggaauuuug

SEQ ID NO: 7819 - RNA, 22 nt, Human
gucuucaggaccuggaauuuug

SEQ ID NO: 7820 - RNA, 19 nt, Human
gucuucugaauguggcugc

SEQ ID NO: 7821 - RNA, 22 nt, Human
gucuucuggaagagagccagcu

SEQ ID NO: 7822 - RNA, 22 nt, Human
gucuucuguuuacuuugaaguu

SEQ ID NO: 7823 - RNA, 22 nt, Human
gucuucuuguuuugaaggaaau

SEQ ID NO: 7824 - RNA, 19 nt, Human
gucuuggcucucaaccauc

SEQ ID NO: 7825 - RNA, 20 nt, Human
gucuuguagcucaaguuauu

SEQ ID NO: 7826 - RNA, 22 nt, Human
gucuugucaguguuggcagcuu

SEQ ID NO: 7827 - RNA, 22 nt, Human
gucuuuaagggacugaauuugg

SEQ ID NO: 7828 - RNA, 22 nt, Human
gucuuuagagcuccuggcaucu

SEQ ID NO: 7829 - RNA, 22 nt, Human
gucuuuaucuuugaaauuaguc

SEQ ID NO: 7830 - RNA, 20 nt, Human
gucuuuauguuuuaugaccu

SEQ ID NO: 7831 - RNA, 22 nt, Human
gucuuucuaugcauagagcaga

SEQ ID NO: 7832 - RNA, 22 nt, Human
gucuuucugccaugugaagaga

SEQ ID NO: 7833 - RNA, 22 nt, Human
gucuuucugcugcacggacugc

SEQ ID NO: 7834 - RNA, 22 nt, Human
gucuuucuuaauucaagugcuu

SEQ ID NO: 7835 - RNA, 18 nt, Human
gucuuuggaguggaggua

SEQ ID NO: 7836 - RNA, 22 nt, Human
gucuuuggauguaagauaaagu

SEQ ID NO: 7837 - RNA, 22 nt, Human
gugaaacacccuccaaugcaca

SEQ ID NO: 7838 - RNA, 22 nt, Human
gugaaagacagcauuaauggcu

SEQ ID NO: 7839 - RNA, 22 nt, Human
gugaacaggagaaagugaugga

SEQ ID NO: 7840 - RNA, 22 nt, Human
gugaacaucagauuacaugaga

SEQ ID NO: 7841 - RNA, 22 nt, Human
gugaacauugaggcagaaagga

SEQ ID NO: 7842 - RNA, 22 nt, Human
gugaaccaagaagucaaagcga

SEQ ID NO: 7843 - RNA, 22 nt, Human
gugaacuauuggguaucauaaa

SEQ ID NO: 7844 - RNA, 22 nt, Human
gcccaagagagcgaagguuggc

SEQ ID NO: 7845 - RNA, 22 nt, Human
gcccaagaguuaagucucugcu

SEQ ID NO: 7846 - RNA, 22 nt, Human
gcccaagaucacacuggaaauc

SEQ ID NO: 7847 - RNA, 22 nt, Human
gcccaagccgccuuccagagac

SEQ ID NO: 7848 - RNA, 22 nt, Human
gcccaagggcaucaaguucuac

SEQ ID NO: 7849 - RNA, 22 nt, Human
gcccaaggucacacacaggaag

SEQ ID NO: 7850 - RNA, 20 nt, Human
gcccaagguccagaaggggg

SEQ ID NO: 7851 - RNA, 22 nt, Human
gcccaagucagugcuucuggca

SEQ ID NO: 7852 - RNA, 22 nt, Human
gcccaauagagaaauagugaaa

SEQ ID NO: 7853 - RNA, 22 nt, Human
gcccaauaguggggauauaccu

SEQ ID NO: 7854 - RNA, 23 nt, Human
gcccacauuggugcaugaauguu

SEQ ID NO: 7855 - RNA, 22 nt, Human
gcccacauuuuuggcuuagagg

SEQ ID NO: 7856 - RNA, 22 nt, Human
gcccaccuaaccugcucaccuu

SEQ ID NO: 7857 - RNA, 22 nt, Human
gcccagaagugacucagcacug

SEQ ID NO: 7858 - RNA, 22 nt, Human
gcccagacauuuggccaaacau

SEQ ID NO: 7859 - RNA, 22 nt, Human
gcccagagagaugcuguagacc

SEQ ID NO: 7860 - RNA, 23 nt, Human
gcccagagaggcucaccaggaau

SEQ ID NO: 7861 - RNA, 18 nt, Human
gcccagaggucugggccc

SEQ ID NO: 7862 - RNA, 21 nt, Human
gcccagaguccucccacucca

SEQ ID NO: 7863 - RNA, 22 nt, Human
gcccagaguuugaagauacagu

SEQ ID NO: 7864 - RNA, 22 nt, Human
gcccagcaaggaccaagggccg

SEQ ID NO: 7865 - RNA, 21 nt, Human
gcccagcaaggugagaaggcc

SEQ ID NO: 7866 - RNA, 22 nt, Human
gcccagcacuccucucugacau

SEQ ID NO: 7867 - RNA, 22 nt, Human
gcccagcagcugguggagaagg

SEQ ID NO: 7868 - RNA, 22 nt, Human
gcccagcaggacagagugguuu

SEQ ID NO: 7869 - RNA, 22 nt, Human
gcccagccagagcugugugaug

SEQ ID NO: 7870 - RNA, 22 nt, Human
gcccagcugagaagcgcggggc

SEQ ID NO: 7871 - RNA, 22 nt, Human
gcccaggaaagauagggccuca

SEQ ID NO: 7872 - RNA, 22 nt, Human
gcccaggaaauaaaagugggcu

SEQ ID NO: 7873 - RNA, 22 nt, Human
gcccaggaaguugaggcugccg

SEQ ID NO: 7874 - RNA, 20 nt, Human
gcccaggaauuugcauuucu

SEQ ID NO: 7875 - RNA, 22 nt, Human
gcccaggacucagggugucgcg

SEQ ID NO: 7876 - RNA, 22 nt, Human
gcccaggaggucaaguagcuau

SEQ ID NO: 7877 - RNA, 22 nt, Human
gcccaggaguucaaggcugcag

SEQ ID NO: 7878 - RNA, 22 nt, Human
gcccaggaguucaagucuagug

SEQ ID NO: 7879 - RNA, 22 nt, Human
gcccaggaguugguggcugcag

SEQ ID NO: 7880 - RNA, 22 nt, Human
gcccaggaguuugcauuuuaac

SEQ ID NO: 7881 - RNA, 22 nt, Human
gcccaggauggagaauaguggu

SEQ ID NO: 7882 - RNA, 22 nt, Human
gcccaggccggagagcagugcu

SEQ ID NO: 7883 - RNA, 22 nt, Human
gcccaggcuagcguagagugca

SEQ ID NO: 7884 - RNA, 22 nt, Human
gcccagggucuacaaaaauauu

SEQ ID NO: 7885 - RNA, 22 nt, Human
gcccaggugcccucugccuuac

SEQ ID NO: 7886 - RNA, 22 nt, Human
gcccaucuucuagcagcuguua

SEQ ID NO: 7887 - RNA, 20 nt, Human
gcccaugaggacugcagcug

SEQ ID NO: 7888 - RNA, 22 nt, Human
gcccaugcacuuucugugaugg

SEQ ID NO: 7889 - RNA, 22 nt, Human
gcccauggacacccaagugcca

SEQ ID NO: 7890 - RNA, 22 nt, Human
gcccauggcagaacugugagca

SEQ ID NO: 7891 - RNA, 22 nt, Human
gccccaagggagcccagcacac

SEQ ID NO: 7892 - RNA, 22 nt, Human
gccccaccgagggugcaguccu

SEQ ID NO: 7893 - RNA, 22 nt, Human
gccccagccuaguuuucuuuca

SEQ ID NO: 7894 - RNA, 15 nt, Human
gccccaggaaucaaa

SEQ ID NO: 7895 - RNA, 22 nt, Human
gccccaggauaaauuuguaaga

SEQ ID NO: 7896 - RNA, 22 nt, Human
gcccccagaagggccacagauu

SEQ ID NO: 7897 - RNA, 22 nt, Human
gcccccucaaagaggaagcucu

SEQ ID NO: 7898 - RNA, 22 nt, Human
gccccuccgggcgcgucauagc

SEQ ID NO: 7899 - RNA, 22 nt, Human
gccccucucccuugaggcaggc

SEQ ID NO: 7900 - RNA, 22 nt, Human
gccccuguuguggcuuugucua

SEQ ID NO: 7901 - RNA, 22 nt, Human
gccccuucguggaagugcauuc

SEQ ID NO: 7902 - RNA, 22 nt, Human
gcccgugucuccugcucugugg

SEQ ID NO: 7903 - RNA, 21 nt, Human
gcccuaggcuaccuggagcgc

SEQ ID NO: 7904 - RNA, 22 nt, Human
gcccuagggggaaccgaggacu

SEQ ID NO: 7905 - RNA, 22 nt, Human
gcccuaucauucauugagugcu

SEQ ID NO: 7906 - RNA, 22 nt, Human
gcaggccuuggcaaugagccug

SEQ ID NO: 7907 - RNA, 22 nt, Human
gcaggcucaaaagcugguagga

SEQ ID NO: 7908 - RNA, 22 nt, Human
gcaggcucacucuguuuggcuc

SEQ ID NO: 7909 - RNA, 22 nt, Human
gcaggcuccaaggccugggaga

SEQ ID NO: 7910 - RNA, 22 nt, Human
gcaggcucguuggaaguccccu

SEQ ID NO: 7911 - RNA, 22 nt, Human
gcaggcugaguauuacccuagu

SEQ ID NO: 7912 - RNA, 22 nt, Human
gcaggcugccaccuucugaguu

SEQ ID NO: 7913 - RNA, 22 nt, Human
gcaggcuggaggcuguucuggg

SEQ ID NO: 7914 - RNA, 22 nt, Human
gcaggcuggucugaccaucccu

SEQ ID NO: 7915 - RNA, 22 nt, Human
gcaggcuugagagaucagaugg

SEQ ID NO: 7916 - RNA, 18 nt, Human
gcaggcuuuuccuggguc

SEQ ID NO: 7917 - RNA, 22 nt, Human
gcagggaagggaaacagagacc

SEQ ID NO: 7918 - RNA, 22 nt, Human
gcagggaaggggacggaaccag

SEQ ID NO: 7919 - RNA, 22 nt, Human
gcagggaaggggcaugcuggag

SEQ ID NO: 7920 - RNA, 21 nt, Human
gcagggacaaagcuucaggag

SEQ ID NO: 7921 - RNA, 22 nt, Human
gcagggacaucuucagaucacu

SEQ ID NO: 7922 - RNA, 22 nt, Human
gcagggaccaaaagaggcagua

SEQ ID NO: 7923 - RNA, 22 nt, Human
gcagggaccuugcccacccucc

SEQ ID NO: 7924 - RNA, 22 nt, Human
gcagggacugugaucucacaga

SEQ ID NO: 7925 - RNA, 22 nt, Human
gcagggacuuuggcaacaggug

SEQ ID NO: 7926 - RNA, 22 nt, Human
gcagggaggaagagaugcuucc

SEQ ID NO: 7927 - RNA, 22 nt, Human
gcagggcagcuuagucccuguc

SEQ ID NO: 7928 - RNA, 22 nt, Human
gcagggcagggcaagaacuggg

SEQ ID NO: 7929 - RNA, 22 nt, Human
gcagggcauagaggcacggagg

SEQ ID NO: 7930 - RNA, 22 nt, Human
gcagggcggcccagagcaggcc

SEQ ID NO: 7931 - RNA, 22 nt, Human
gcagggcuccccaggcccgagg

SEQ ID NO: 7932 - RNA, 19 nt, Human
gcagggcucucccagaugc

SEQ ID NO: 7933 - RNA, 18 nt, Human
gcagggcuggacaaguca

SEQ ID NO: 7934 - RNA, 22 nt, Human
gcagggcuggggcugcuccuga

SEQ ID NO: 7935 - RNA, 22 nt, Human
gcagggcugggugggagacaga

SEQ ID NO: 7936 - RNA, 22 nt, Human
gcagggcuuagaaaugguggcu

SEQ ID NO: 7937 - RNA, 22 nt, Human
gcaggggcuaaggacacagaga

SEQ ID NO: 7938 - RNA, 22 nt, Human
gcaggggcugagcaccagcggg

SEQ ID NO: 7939 - RNA, 22 nt, Human
gcagggguggaggcuguccugu

SEQ ID NO: 7940 - RNA, 22 nt, Human
gcaggguauaauacuuagguga

SEQ ID NO: 7941 - RNA, 22 nt, Human
gcagggucuugagaggcagcca

SEQ ID NO: 7942 - RNA, 22 nt, Human
gcagggugaaggucacauagaa

SEQ ID NO: 7943 - RNA, 22 nt, Human
gcagggugacguugcccaccuc

SEQ ID NO: 7944 - RNA, 22 nt, Human
gcagggugugucucauacaguu

SEQ ID NO: 7945 - RNA, 22 nt, Human
gcagguccagucaccagagaga

SEQ ID NO: 7946 - RNA, 22 nt, Human
gcaggucccagaaaguuaauuc

SEQ ID NO: 7947 - RNA, 22 nt, Human
gcaggugaaagugaguagugag

SEQ ID NO: 7948 - RNA, 22 nt, Human
gcaggugagggugucugaauag

SEQ ID NO: 7949 - RNA, 22 nt, Human
gcaggugaugugaugugagcau

SEQ ID NO: 7950 - RNA, 19 nt, Human
gcagguggauguggucagc

SEQ ID NO: 7951 - RNA, 22 nt, Human
gcagguggauuaucagaagugc

SEQ ID NO: 7952 - RNA, 22 nt, Human
gcagguggcagaggugggaucu

SEQ ID NO: 7953 - RNA, 22 nt, Human
gcccuguuuugaaacuugcaua

SEQ ID NO: 7954 - RNA, 22 nt, Human
gcccuuacaggguggucagcca

SEQ ID NO: 7955 - RNA, 22 nt, Human
gcccuuagggccacugucacug

SEQ ID NO: 7956 - RNA, 22 nt, Human
gcccuuauaaacaaggcuucag

SEQ ID NO: 7957 - RNA, 22 nt, Human
gcccuucauuuauaguuggaau

SEQ ID NO: 7958 - RNA, 22 nt, Human
gcccuuggaaagccaaggcagc

SEQ ID NO: 7959 - RNA, 22 nt, Human
gcccuugggagguuccacuggg

SEQ ID NO: 7960 - RNA, 22 nt, Human
gcccuuggggugucuguaauaa

SEQ ID NO: 7961 - RNA, 22 nt, Human
gcccuuucuucuucuggacugg

SEQ ID NO: 7962 - RNA, 22 nt, Human
gccgaagcugccgucugguccu

SEQ ID NO: 7963 - RNA, 22 nt, Human
gccgagcacagugcagcugccu

SEQ ID NO: 7964 - RNA, 22 nt, Human
gccggacugcugcagcugcuag

SEQ ID NO: 7965 - RNA, 22 nt, Human
gccguccuacgccaucauagcg

SEQ ID NO: 7966 - RNA, 22 nt, Human
gccgugggugucauggcccaua

SEQ ID NO: 7967 - RNA, 20 nt, Human
gccuaagagcuagcugucac

SEQ ID NO: 7968 - RNA, 22 nt, Human
gccuaauaacuagcuguguaac

SEQ ID NO: 7969 - RNA, 22 nt, Human
gccuaggagacaagcgugaaag

SEQ ID NO: 7970 - RNA, 22 nt, Human
gccuaggaucaaccacaugaaa

SEQ ID NO: 7971 - RNA, 22 nt, Human
gccuagggguaagaguacuggc

SEQ ID NO: 7972 - RNA, 20 nt, Human
gccuagggucacuucaguga

SEQ ID NO: 7973 - RNA, 19 nt, Human
gccuaugucuucaaaucau

SEQ ID NO: 7974 - RNA, 22 nt, Human
gccuauuuuauuaugcauguaa

SEQ ID NO: 7975 - RNA, 22 nt, Human
gccucacauauucaugguuacu

SEQ ID NO: 7976 - RNA, 22 nt, Human
gccucagcuguugcaggggccc

SEQ ID NO: 7977 - RNA, 22 nt, Human
gccucaggacuggcauacucau

SEQ ID NO: 7978 - RNA, 22 nt, Human
gccucaggccgcccugcugcuc

SEQ ID NO: 7979 - RNA, 22 nt, Human
gccucaggugcaucucucauuc

SEQ ID NO: 7980 - RNA, 22 nt, Human
gccucaguaaccuuaggggaua

SEQ ID NO: 7981 - RNA, 22 nt, Human
gccucaguguccuccuccaugu

SEQ ID NO: 7982 - RNA, 22 nt, Human
gccucaguuuauacaccuguaa

SEQ ID NO: 7983 - RNA, 18 nt, Human
gccucaguuuccucaccu

SEQ ID NO: 7984 - RNA, 18 nt, Human
gccuccaccauggagggu

SEQ ID NO: 7985 - RNA, 22 nt, Human
gccuccagcuggggcauuucag

SEQ ID NO: 7986 - RNA, 22 nt, Human
gccucccuguucuuccacaaua

SEQ ID NO: 7987 - RNA, 22 nt, Human
gccucccuuggugucucccggg

SEQ ID NO: 7988 - RNA, 22 nt, Human
gccuccucuugagggucaggga

SEQ ID NO: 7989 - RNA, 22 nt, Human
gccuccuguuaugccaugugcc

SEQ ID NO: 7990 - RNA, 22 nt, Human
gccucuagggcuguugggaauu

SEQ ID NO: 7991 - RNA, 22 nt, Human
gccucuccucuuaauaccauua

SEQ ID NO: 7992 - RNA, 22 nt, Human
gccucucugggcugccgaggcu

SEQ ID NO: 7993 - RNA, 22 nt, Human
gccucugcaacuccgccuuggu

SEQ ID NO: 7994 - RNA, 22 nt, Human
gccucugcugacaagauggaca

SEQ ID NO: 7995 - RNA, 22 nt, Human
gccucugcugcaagccugguug

SEQ ID NO: 7996 - RNA, 19 nt, Human
gccucugcuggggacaggc

SEQ ID NO: 7997 - RNA, 20 nt, Human
gccucuggagccaaggacca

SEQ ID NO: 7998 - RNA, 22 nt, Human
gccucugggcucugccccuggc

SEQ ID NO: 7999 - RNA, 22 nt, Human
gccucuggucccucaugcugug

SEQ ID NO: 8000 - RNA, 22 nt, Human
gccucuuguuuccuuacaugga

SEQ ID NO: 8001 - RNA, 22 nt, Human
gccugagacagugugguccaau

SEQ ID NO: 8002 - RNA, 22 nt, Human
gccugagagaacugaccaagag

SEQ ID NO: 8003 - RNA, 22 nt, Human
gccugagaguugaaguucagug

SEQ ID NO: 8004 - RNA, 22 nt, Human
gccugagaucagccaagccccu

SEQ ID NO: 8005 - RNA, 22 nt, Human
gccugagauucugcauuucuaa

SEQ ID NO: 8006 - RNA, 22 nt, Human
gccugagcagcuauacacacag

SEQ ID NO: 8007 - RNA, 21 nt, Human
gccugagcaugucuucagguc

SEQ ID NO: 8008 - RNA, 19 nt, Human
gccugagccagccaugcaa

SEQ ID NO: 8009 - RNA, 20 nt, Human
gccugagcuccgccuccugu

SEQ ID NO: 8010 - RNA, 22 nt, Human
gccugaggaaugcuccugacuu

SEQ ID NO: 8011 - RNA, 20 nt, Human
gccugauggacauuucaguu

SEQ ID NO: 8012 - RNA, 19 nt, Human
gccugcagaaaaggcaggg

SEQ ID NO: 8013 - RNA, 22 nt, Human
gccugcagacguguuuuccuca

SEQ ID NO: 8014 - RNA, 22 nt, Human
gccugcagauauauaggauggu

SEQ ID NO: 8015 - RNA, 22 nt, Human
gccugcagccucaagggcugag

SEQ ID NO: 8016 - RNA, 18 nt, Human
gccugcaggcacgggggu

SEQ ID NO: 8017 - RNA, 22 nt, Human
gccugcagggcccuuguggguc

SEQ ID NO: 8018 - RNA, 20 nt, Human
gccugcagguuggaugggau

SEQ ID NO: 8019 - RNA, 21 nt, Human
gccugcaguuuugaagcccuu

SEQ ID NO: 8020 - RNA, 22 nt, Human
gccugccacgcaugcagaguca

SEQ ID NO: 8021 - RNA, 19 nt, Human
gccugccagauaguaauga

SEQ ID NO: 8022 - RNA, 22 nt, Human
gccugccaguguuugaggauug

SEQ ID NO: 8023 - RNA, 22 nt, Human
gccugcccacggggcuggcaua

SEQ ID NO: 8024 - RNA, 18 nt, Human
gccugccuagagcuugcc

SEQ ID NO: 8025 - RNA, 22 nt, Human
gcauagaagguuuugguaucaa

SEQ ID NO: 8026 - RNA, 22 nt, Human
gcauagaauuuagagacaaaag

SEQ ID NO: 8027 - RNA, 22 nt, Human
gcauagcuuugaugcugccuua

SEQ ID NO: 8028 - RNA, 19 nt, Human
gcaucaaagcugacuccug

SEQ ID NO: 8029 - RNA, 22 nt, Human
gcaucaagacgaugugaaaucg

SEQ ID NO: 8030 - RNA, 17 nt, Human
gcaucacagauaacacg

SEQ ID NO: 8031 - RNA, 22 nt, Human
gcauccaaauguuucauuucuu

SEQ ID NO: 8032 - RNA, 22 nt, Human
gcauccaggcugccccucugcg

SEQ ID NO: 8033 - RNA, 20 nt, Human
gcauccauauaugcaugugu

SEQ ID NO: 8034 - RNA, 22 nt, Human
gcauccaucagcagauugacug

SEQ ID NO: 8035 - RNA, 22 nt, Human
gcaucuaaauaaacgugggagu

SEQ ID NO: 8036 - RNA, 22 nt, Human
gcaucucuuuagaaucagaugg

SEQ ID NO: 8037 - RNA, 22 nt, Human
gcaucugauccaauagauauau

SEQ ID NO: 8038 - RNA, 22 nt, Human
gcaucuucacacaaagccagug

SEQ ID NO: 8039 - RNA, 22 nt, Human
gcaugauuaauaugcuuacugu

SEQ ID NO: 8040 - RNA, 22 nt, Human
gcaugcaaaaaauguauuuguu

SEQ ID NO: 8041 - RNA, 23 nt, Human
gcaugcaaagaauauagguguuc

SEQ ID NO: 8042 - RNA, 23 nt, Human
gcaugcaacuugcaguaguauuc

SEQ ID NO: 8043 - RNA, 22 nt, Human
gcaugcaaggaccaagggagca

SEQ ID NO: 8044 - RNA, 22 nt, Human
gcaugcaauuaugguauuagau

SEQ ID NO: 8045 - RNA, 22 nt, Human
gcaugcagacagucugagacca

SEQ ID NO: 8046 - RNA, 22 nt, Human
gcaugcagagaauaccugugau

SEQ ID NO: 8047 - RNA, 22 nt, Human
gcaugcaguaaaauucagcaac

SEQ ID NO: 8048 - RNA, 22 nt, Human
gcaugcauuuucugagagucag

SEQ ID NO: 8049 - RNA, 22 nt, Human
gcaugcuacagcccaacuguga

SEQ ID NO: 8050 - RNA, 22 nt, Human
gcaugcugagcccacgccuggg

SEQ ID NO: 8051 - RNA, 22 nt, Human
gcauggcaagacccugucucua

SEQ ID NO: 8052 - RNA, 22 nt, Human
gcauggcagccaguacauggug

SEQ ID NO: 8053 - RNA, 21 nt, Human
gcauggcaggucacuggggca

SEQ ID NO: 8054 - RNA, 22 nt, Human
gcauggcagugaggauggugcu

SEQ ID NO: 8055 - RNA, 22 nt, Human
gcauggcauuugaagguagaag

SEQ ID NO: 8056 - RNA, 22 nt, Human
gcauggcuccugucuuacuccc

SEQ ID NO: 8057 - RNA, 22 nt, Human
gcauggcugcucccuggcugca

SEQ ID NO: 8058 - RNA, 22 nt, Human
gcauggcugguguccugaggga

SEQ ID NO: 8059 - RNA, 22 nt, Human
gcauggcuguugaagucagcuc

SEQ ID NO: 8060 - RNA, 22 nt, Human
gcauggcuuacagaggcugcag

SEQ ID NO: 8061 - RNA, 22 nt, Human
gcauggcuuccaaaagugcuaa

SEQ ID NO: 8062 - RNA, 22 nt, Human
gcauggcuucugccaggcaccu

SEQ ID NO: 8063 - RNA, 22 nt, Human
guugccuucuaugauucucagu

SEQ ID NO: 8064 - RNA, 22 nt, Human
guugcugaaauuaauauuggag

SEQ ID NO: 8065 - RNA, 22 nt, Human
guugcugauggcaagauuccag

SEQ ID NO: 8066 - RNA, 22 nt, Human
guugcugcaaaggaguguaggu

SEQ ID NO: 8067 - RNA, 22 nt, Human
guugcuuuuuugauagguggaa

SEQ ID NO: 8068 - RNA, 22 nt, Human
guuggagugcagcuugugcgau

SEQ ID NO: 8069 - RNA, 22 nt, Human
guuggcacuuagccccagucua

SEQ ID NO: 8070 - RNA, 22 nt, Human
guuggcagagagaagccuagca

SEQ ID NO: 8071 - RNA, 22 nt, Human
guugggcugaagugugugcuua

SEQ ID NO: 8072 - RNA, 22 nt, Human
guugggcugggagcugcccuga

SEQ ID NO: 8073 - RNA, 22 nt, Human
guuggggaaggugggagaaugu

SEQ ID NO: 8074 - RNA, 22 nt, Human
guuggucauaucauugaagcuu

SEQ ID NO: 8075 - RNA, 22 nt, Human
guugguuaggucaggauucaga

SEQ ID NO: 8076 - RNA, 22 nt, Human
guuguaaauacaguacugaaac

SEQ ID NO: 8077 - RNA, 19 nt, Human
guuguaaauggagguuucu

SEQ ID NO: 8078 - RNA, 22 nt, Human
guuguaaguuuaaugucaauug

SEQ ID NO: 8079 - RNA, 23 nt, Human
guuguaauggauaaugcaaauug

SEQ ID NO: 8080 - RNA, 22 nt, Human
guuguacaaaauaucagugagg

SEQ ID NO: 8081 - RNA, 22 nt, Human
guuguacauaugaggauaaguu

SEQ ID NO: 8082 - RNA, 22 nt, Human
guugugcagaagugccucagua

SEQ ID NO: 8083 - RNA, 22 nt, Human
guugugcagggcgaggaccuga

SEQ ID NO: 8084 - RNA, 22 nt, Human
guuguugaugaagaucugacug

SEQ ID NO: 8085 - RNA, 22 nt, Human
guuguuuauaaaaauaucuagc

SEQ ID NO: 8086 - RNA, 22 nt, Human
guuguuuuaaaauacuccagaa

SEQ ID NO: 8087 - RNA, 22 nt, Human
guuguuuuauaggcucaugccu

SEQ ID NO: 8088 - RNA, 22 nt, Human
guuguuuucacaaacccaugau

SEQ ID NO: 8089 - RNA, 19 nt, Human
guuguuuuucuuauuaugg

SEQ ID NO: 8090 - RNA, 22 nt, Human
guuguuuuugaacggugguggc

SEQ ID NO: 8091 - RNA, 22 nt, Human
guuguuuuuguucucuauagcu

SEQ ID NO: 8092 - RNA, 22 nt, Human
guuuaaagucuuggaaggagga

SEQ ID NO: 8093 - RNA, 22 nt, Human
guuuaaauaauuaggggccugu

SEQ ID NO: 8094 - RNA, 22 nt, Human
guuuaaccaagagcauugugca

SEQ ID NO: 8095 - RNA, 22 nt, Human
guuuaagaggguuucauuccca

SEQ ID NO: 8096 - RNA, 22 nt, Human
guuuaauaauguugaauuacua

SEQ ID NO: 8097 - RNA, 22 nt, Human
guuuacaacaucuuguccuuca

SEQ ID NO: 8098 - RNA, 22 nt, Human
guuuacauaugucugucugcac

SEQ ID NO: 8099 - RNA, 22 nt, Human
guuuacauauuuuaauugguga

SEQ ID NO: 8100 - RNA, 22 nt, Human
guuuacugcucuagguugcaca

SEQ ID NO: 8101 - RNA, 22 nt, Human
guuuacuguuuucugauaagug

SEQ ID NO: 8102 - RNA, 22 nt, Human
guuuacuuagaugcucaugcag

SEQ ID NO: 8103 - RNA, 22 nt, Human
guuuagaaaauagugaagcaag

SEQ ID NO: 8104 - RNA, 22 nt, Human
guuuagaacacggaaauacuga

SEQ ID NO: 8105 - RNA, 21 nt, Human
guuuagaaguagucuggcuca

SEQ ID NO: 8106 - RNA, 22 nt, Human
guuuagaaugaaacuuuugagc

SEQ ID NO: 8107 - RNA, 22 nt, Human
guuuagaauucuaacuuuaagg

SEQ ID NO: 8108 - RNA, 22 nt, Human
guuuagacuccuuggucuucug

SEQ ID NO: 8109 - RNA, 22 nt, Human
guuuagcaauaaaaacacauga

SEQ ID NO: 8110 - RNA, 20 nt, Human
guuuagcauggcagugaaag

SEQ ID NO: 8111 - RNA, 22 nt, Human
guuuaguguuucaagacucuuu

SEQ ID NO: 8112 - RNA, 22 nt, Human
guuuauaaggcccaauauuucu

SEQ ID NO: 8113 - RNA, 22 nt, Human
guuuauaagguaaaggagagag

SEQ ID NO: 8114 - RNA, 22 nt, Human
guuuauaugugugccacucuua

SEQ ID NO: 8115 - RNA, 22 nt, Human
guuuaucugcacucucuuguag

SEQ ID NO: 8116 - RNA, 22 nt, Human
guuuaugaaauuucaggcauuu

SEQ ID NO: 8117 - RNA, 22 nt, Human
guuuaugaauguuacuauagag

SEQ ID NO: 8118 - RNA, 22 nt, Human
guuuaugaguuacguagggguu

SEQ ID NO: 8119 - RNA, 22 nt, Human
guuuauuagaguuuucugucug

SEQ ID NO: 8120 - RNA, 22 nt, Human
guuuauuccagcaaucugcuua

SEQ ID NO: 8121 - RNA, 22 nt, Human
guuuauugauaaaagcuggaca

SEQ ID NO: 8122 - RNA, 22 nt, Human
guuucaaagcacagcucacauu

SEQ ID NO: 8123 - RNA, 22 nt, Human
guuucaaaggugucaggcaguu

SEQ ID NO: 8124 - RNA, 22 nt, Human
guuucaaguagcugcugauuau

SEQ ID NO: 8125 - RNA, 22 nt, Human
guuucaauuucacuuuccaggc

SEQ ID NO: 8126 - RNA, 22 nt, Human
guuucacaagcaacggguaagg

SEQ ID NO: 8127 - RNA, 22 nt, Human
guuucacauaauuuuaaauugu

SEQ ID NO: 8128 - RNA, 22 nt, Human
guuucagaacaccccauuuggg

SEQ ID NO: 8129 - RNA, 22 nt, Human
guuucauaggcaugugaccuau

SEQ ID NO: 8130 - RNA, 22 nt, Human
guuucauauauaguaacugaaa

SEQ ID NO: 8131 - RNA, 22 nt, Human
guuucaugacugauguuguuga

SEQ ID NO: 8132 - RNA, 18 nt, Human
guuucaugcaugugaaac

SEQ ID NO: 8133 - RNA, 19 nt, Human
guuucauuaagauaggaaa

SEQ ID NO: 8134 - RNA, 22 nt, Human
guuucauucggcagcucauaag

SEQ ID NO: 8135 - RNA, 22 nt, Human
guuucauuuacaucuguaggua

SEQ ID NO: 8136 - RNA, 20 nt, Human
guuuccaaauugugcauuuu

SEQ ID NO: 8137 - RNA, 22 nt, Human
guuuccacgucucaguuccaaa

SEQ ID NO: 8138 - RNA, 22 nt, Human
guuuccagcucuuagcaaaggc

SEQ ID NO: 8139 - RNA, 22 nt, Human
guuuccaggcuuugguaugguu

SEQ ID NO: 8140 - RNA, 22 nt, Human
guuuccaugcaguagagcuuag

SEQ ID NO: 8141 - RNA, 22 nt, Human
guuuccauggaagcaaaggugg

SEQ ID NO: 8142 - RNA, 22 nt, Human
guuuccauggcucuguuaaugg

SEQ ID NO: 8143 - RNA, 22 nt, Human
guuuccaugggagaagacagug

SEQ ID NO: 8144 - RNA, 22 nt, Human
guuuccaugguguuucuugggu

SEQ ID NO: 8145 - RNA, 22 nt, Human
guuucccaaauuguucacaggg

SEQ ID NO: 8146 - RNA, 22 nt, Human
guuucccauaucuagggagagg

SEQ ID NO: 8147 - RNA, 22 nt, Human
guuuccuauaacucaggcacca

SEQ ID NO: 8148 - RNA, 22 nt, Human
guuuccugacccuggcccagca

SEQ ID NO: 8149 - RNA, 22 nt, Human
guuuccugcgugugccacucau

SEQ ID NO: 8150 - RNA, 22 nt, Human
guuuccuggaaacauuaggaga

SEQ ID NO: 8151 - RNA, 22 nt, Human
guuuccuguggccacagaauaa

SEQ ID NO: 8152 - RNA, 19 nt, Human
guuuccuuggguguaggga

SEQ ID NO: 8153 - RNA, 22 nt, Human
guuuccuuuuucugcccucaau

SEQ ID NO: 8154 - RNA, 22 nt, Human
guuucgucaggcuuauucuauc

SEQ ID NO: 8155 - RNA, 22 nt, Human
guuucuaauuggaacuuugagg

SEQ ID NO: 8156 - RNA, 22 nt, Human
guuucuacaugccucuuucacc

SEQ ID NO: 8157 - RNA, 22 nt, Human
guuucucuuaacacauaaagua

SEQ ID NO: 8158 - RNA, 22 nt, Human
gcuccuggccagcacagggccc

SEQ ID NO: 8159 - RNA, 22 nt, Human
gcuccuggcuccaggcagccaa

SEQ ID NO: 8160 - RNA, 22 nt, Human
gcuccuggcucucugagggcug

SEQ ID NO: 8161 - RNA, 22 nt, Human
gcuccuggcucuggccaaggga

SEQ ID NO: 8162 - RNA, 22 nt, Human
gcuccuggguguggcugccccu

SEQ ID NO: 8163 - RNA, 22 nt, Human
gcuccuggugcaaaguuucuuc

SEQ ID NO: 8164 - RNA, 18 nt, Human
gcuccugguuggaaagaa

SEQ ID NO: 8165 - RNA, 22 nt, Human
gcuccugucagucaucaggugc

SEQ ID NO: 8166 - RNA, 22 nt, Human
gcuccuguccuuagccccagag

SEQ ID NO: 8167 - RNA, 22 nt, Human
gcuccugugaaggcauuaggug

SEQ ID NO: 8168 - RNA, 22 nt, Human
gcucgcuuagauuuuccucuga

SEQ ID NO: 8169 - RNA, 22 nt, Human
gcucggagucccaccugggaaa

SEQ ID NO: 8170 - RNA, 22 nt, Human
gcucgguggccagccugaggcc

SEQ ID NO: 8171 - RNA, 22 nt, Human
gcucguugaaccuguccccgag

SEQ ID NO: 8172 - RNA, 22 nt, Human
gcuaggaguggugggucaagga

SEQ ID NO: 8173 - RNA, 22 nt, Human
gcuaggcuucaaaaucucccug

SEQ ID NO: 8174 - RNA, 22 nt, Human
gcuagggacuagggaaggagca

SEQ ID NO: 8175 - RNA, 22 nt, Human
gcuaggugcagcagacagcuua

SEQ ID NO: 8176 - RNA, 22 nt, Human
gcuaguccacagccauccaggc

SEQ ID NO: 8177 - RNA, 22 nt, Human
gcuaguuucuugaauacucuaa

SEQ ID NO: 8178 - RNA, 22 nt, Human
gcuauacacauuucuugguagu

SEQ ID NO: 8179 - RNA, 22 nt, Human
gcuauacagcaggagaauggaa

SEQ ID NO: 8180 - RNA, 22 nt, Human
gcuauaggaagaaauuuguuuu

SEQ ID NO: 8181 - RNA, 22 nt, Human
gcuauaggguacauuuguguuu

SEQ ID NO: 8182 - RNA, 23 nt, Human
gcuauagguagaaggaaucuuuu

SEQ ID NO: 8183 - RNA, 22 nt, Human
gcuaucucuuuaguacuagauu

SEQ ID NO: 8184 - RNA, 22 nt, Human
gcuaucuucauggaaauacagg

SEQ ID NO: 8185 - RNA, 21 nt, Human
gcuaugaauguagaaaauuau

SEQ ID NO: 8186 - RNA, 22 nt, Human
gcuauguguguuuugcugcagc

SEQ ID NO: 8187 - RNA, 22 nt, Human
gcuauuuagugagucacauccu

SEQ ID NO: 8188 - RNA, 22 nt, Human
gcucacaggcaguguugggaga

SEQ ID NO: 8189 - RNA, 22 nt, Human
gcucacaggggcagacgaguug

SEQ ID NO: 8190 - RNA, 22 nt, Human
gcucacaguacagugcuggcuc

SEQ ID NO: 8191 - RNA, 22 nt, Human
gcucacagucugcugagugcag

SEQ ID NO: 8192 - RNA, 22 nt, Human
gcucacagucuggcauagucuc

SEQ ID NO: 8193 - RNA, 22 nt, Human
gcucagaaaagugaggcucagu

SEQ ID NO: 8194 - RNA, 22 nt, Human
gcucagaaauggcagauggaga

SEQ ID NO: 8195 - RNA, 22 nt, Human
gcucagaccccacccuggcaga

SEQ ID NO: 8196 - RNA, 22 nt, Human
gcucagagaaauuauaggaauu

SEQ ID NO: 8197 - RNA, 22 nt, Human
gcucagagaauuuacugcugcc

SEQ ID NO: 8198 - RNA, 22 nt, Human
gcucagagagaggauauguuau

SEQ ID NO: 8199 - RNA, 21 nt, Human
gcucagagaggguaauuaacc

SEQ ID NO: 8200 - RNA, 22 nt, Human
gcucagagauggggaaugaaaa

SEQ ID NO: 8201 - RNA, 22 nt, Human
gcucagagaugucugcugccuu

SEQ ID NO: 8202 - RNA, 22 nt, Human
gcucagagcagaugguacucag

SEQ ID NO: 8203 - RNA, 19 nt, Human
gcucagagccaugggggcu

SEQ ID NO: 8204 - RNA, 22 nt, Human
gcucagagcuugaaguuccacu

SEQ ID NO: 8205 - RNA, 22 nt, Human
gcucagaggaugcuccuuuaug

SEQ ID NO: 8206 - RNA, 19 nt, Human
gcucagagggcccugugcu

SEQ ID NO: 8207 - RNA, 21 nt, Human
gcucagcaaaggugaggugca

SEQ ID NO: 8208 - RNA, 19 nt, Human
gcucagcagacccagugcu

SEQ ID NO: 8209 - RNA, 22 nt, Human
gcucagccgaacuucagagcag

SEQ ID NO: 8210 - RNA, 22 nt, Human
gcucagcugagcgaaggacaug

SEQ ID NO: 8211 - RNA, 22 nt, Human
gcucagcugcaccuggagagcc

SEQ ID NO: 8212 - RNA, 22 nt, Human
gcucagcuugggagcgcccggu

SEQ ID NO: 8213 - RNA, 22 nt, Human
gcucaggaaaacagucuaguaa

SEQ ID NO: 8214 - RNA, 22 nt, Human
gcucaggaaauaguuuaguguu

SEQ ID NO: 8215 - RNA, 22 nt, Human
gcucaggacccaggugugaccu

SEQ ID NO: 8216 - RNA, 22 nt, Human
gcucaggagcugacagccucaa

SEQ ID NO: 8217 - RNA, 22 nt, Human
gcucaggaucccaggggugugc

SEQ ID NO: 8218 - RNA, 22 nt, Human
gcucaggauuucauccaugugu

SEQ ID NO: 8219 - RNA, 22 nt, Human
gcucaggcaaauuucuggugaa

SEQ ID NO: 8220 - RNA, 22 nt, Human
gcucaggccuccagaggggcaa

SEQ ID NO: 8221 - RNA, 22 nt, Human
gcucaggcuggauugcaguggc

SEQ ID NO: 8222 - RNA, 19 nt, Human
gcucaggcugugugugggg

SEQ ID NO: 8223 - RNA, 22 nt, Human
gcucagggcgcgagggacgugg

SEQ ID NO: 8224 - RNA, 22 nt, Human
gcucagggcuaaggcugagggg

SEQ ID NO: 8225 - RNA, 22 nt, Human
gcucagggugcaguguccauga

SEQ ID NO: 8226 - RNA, 22 nt, Human
gcucaggucuuacccaugccug

SEQ ID NO: 8227 - RNA, 19 nt, Human
gcucagucuccugauugcu

SEQ ID NO: 8228 - RNA, 22 nt, Human
gcucagugagauauugacucca

SEQ ID NO: 8229 - RNA, 19 nt, Human
gcucagugaugccagacca

SEQ ID NO: 8230 - RNA, 22 nt, Human
gcucagugcaucauuccaggcu

SEQ ID NO: 8231 - RNA, 22 nt, Human
gcucaguguucaucuguaugca

SEQ ID NO: 8232 - RNA, 23 nt, Human
gcucaucaggcuuagagucaagg

SEQ ID NO: 8233 - RNA, 22 nt, Human
gcucauccagcaagccagggcc

SEQ ID NO: 8234 - RNA, 22 nt, Human
gcucaugggcccagagcagccc

SEQ ID NO: 8235 - RNA, 22 nt, Human
gcucaugugugauuacaguuuu

SEQ ID NO: 8236 - RNA, 20 nt, Human
gcuccaagccccuuuagagg

SEQ ID NO: 8237 - RNA, 22 nt, Human
gcuccacuaggaaucugcucuu

SEQ ID NO: 8238 - RNA, 22 nt, Human
gcuccacugccccugggcaccg

SEQ ID NO: 8239 - RNA, 22 nt, Human
gcuccacuuccuucugcccuca

SEQ ID NO: 8240 - RNA, 22 nt, Human
gcuccagagcagagacuagguu

SEQ ID NO: 8241 - RNA, 22 nt, Human
gcuccaggcgagcuggaccaga

SEQ ID NO: 8242 - RNA, 22 nt, Human
gcuccagggacccaagagaaaa

SEQ ID NO: 8243 - RNA, 22 nt, Human
gcuccagguauuugcccuuuua

SEQ ID NO: 8244 - RNA, 22 nt, Human
gcucccaacucaggccuccucc

SEQ ID NO: 8245 - RNA, 22 nt, Human
gcucccaccuccagccugaguu

SEQ ID NO: 8246 - RNA, 22 nt, Human
gcucccacgcaauucuuuucag

SEQ ID NO: 8247 - RNA, 22 nt, Human
gcucccacugcagcccugagcc

SEQ ID NO: 8248 - RNA, 22 nt, Human
gcucccagauuucagccuugug

SEQ ID NO: 8249 - RNA, 22 nt, Human
gcucccagcaauugaggcagcc

SEQ ID NO: 8250 - RNA, 22 nt, Human
gcucccagcauugcuucccagg

SEQ ID NO: 8251 - RNA, 22 nt, Human
gcucccagggcagcgcagaaga

SEQ ID NO: 8252 - RNA, 22 nt, Human
gcucccagucugauggaggaga

SEQ ID NO: 8253 - RNA, 22 nt, Human
gcuccccaggcugguccccucg

SEQ ID NO: 8254 - RNA, 22 nt, Human
gcucccugcauuucccacccuu

SEQ ID NO: 8255 - RNA, 22 nt, Human
gcuccucuccucggagucgggg

SEQ ID NO: 8256 - RNA, 22 nt, Human
gcuccugcaggacccaggagac

SEQ ID NO: 8257 - RNA, 22 nt, Human
gcuccuggcaggcagugugugu

SEQ ID NO: 8258 - RNA, 22 nt, Human
gcuccugggcccugggcuaacu

SEQ ID NO: 8259 - RNA, 22 nt, Human
gcuccugggcucuaccuugcua

SEQ ID NO: 8260 - RNA, 21 nt, Human
gcuccuggugcugcguggcgc

SEQ ID NO: 8261 - RNA, 22 nt, Human
gcuccuggugcuguagagauuu

SEQ ID NO: 8262 - RNA, 22 nt, Human
gcuccuguaauuuuuaaaaguc

SEQ ID NO: 8263 - RNA, 22 nt, Human
gcuccugugcaggucucgguug

SEQ ID NO: 8264 - RNA, 22 nt, Human
gcuccuguuuguuuguuccuga

SEQ ID NO: 8265 - RNA, 22 nt, Human
gcuccuguuuucuuccagaaau

SEQ ID NO: 8266 - RNA, 22 nt, Human
gcuccuucaggugguagcuguu

SEQ ID NO: 8267 - RNA, 22 nt, Human
gcuccuucuggcucccuuuugg

SEQ ID NO: 8268 - RNA, 22 nt, Human
gcucgcagaucaccugggggcg

SEQ ID NO: 8269 - RNA, 22 nt, Human
gcucgcgccgcaccgguccacc

SEQ ID NO: 8270 - RNA, 22 nt, Human
gcucguacaccagcguggaggu

SEQ ID NO: 8271 - RNA, 19 nt, Human
gcucuaaaagauuuugaag

SEQ ID NO: 8272 - RNA, 22 nt, Human
gcucuaaagaacccagaggagu

SEQ ID NO: 8273 - RNA, 20 nt, Human
gcucuaaagccacagauuga

SEQ ID NO: 8274 - RNA, 22 nt, Human
gcucuaauugaaaaauacugca

SEQ ID NO: 8275 - RNA, 22 nt, Human
gcucuagguuccuagccaaguc

SEQ ID NO: 8276 - RNA, 22 nt, Human
gcugagcagguuugaugcuuuu

SEQ ID NO: 8277 - RNA, 22 nt, Human
gcugagccccccugcguggguc

SEQ ID NO: 8278 - RNA, 22 nt, Human
gcugagcucccagcaguaucug

SEQ ID NO: 8279 - RNA, 22 nt, Human
gcugagcugggacaguccuggg

SEQ ID NO: 8280 - RNA, 22 nt, Human
gcugaggaagucagguggccca

SEQ ID NO: 8281 - RNA, 22 nt, Human
ggcuggcagaggggagucugug

SEQ ID NO: 8282 - RNA, 22 nt, Human
ggcuggcagcuucaucccagau

SEQ ID NO: 8283 - RNA, 22 nt, Human
ggcuggcauccagggaaaucca

SEQ ID NO: 8284 - RNA, 22 nt, Human
ggcuggcauuuacacaaugcau

SEQ ID NO: 8285 - RNA, 22 nt, Human
ggcuggccagggcccucgcugg

SEQ ID NO: 8286 - RNA, 22 nt, Human
ggcuggccuguguggccgccac

SEQ ID NO: 8287 - RNA, 22 nt, Human
ggcuggcgcucucccagcgcug

SEQ ID NO: 8288 - RNA, 22 nt, Human
ggcuggcuacauuggaggaagg

SEQ ID NO: 8289 - RNA, 22 nt, Human
ggcuggcuggcugguagacaag

SEQ ID NO: 8290 - RNA, 22 nt, Human
ggcuggcuggcuuagcagagga

SEQ ID NO: 8291 - RNA, 22 nt, Human
ggcuggcuugccaagcucaggg

SEQ ID NO: 8292 - RNA, 22 nt, Human
ggcuggcuuggugagcugucac

SEQ ID NO: 8293 - RNA, 22 nt, Human
ggcugggagccccacagaguca

SEQ ID NO: 8294 - RNA, 22 nt, Human
ggcugggagcuggacaggccgg

SEQ ID NO: 8295 - RNA, 22 nt, Human
ggcugggcauccauccaugaga

SEQ ID NO: 8296 - RNA, 22 nt, Human
ggcugggccagggccuguggac

SEQ ID NO: 8297 - RNA, 22 nt, Human
ggcugggcucgcugauuggcug

SEQ ID NO: 8298 - RNA, 22 nt, Human
ggcuggucaggaaacuaggcuc

SEQ ID NO: 8299 - RNA, 22 nt, Human
ggcuggucucagugcuggguuc

SEQ ID NO: 8300 - RNA, 22 nt, Human
ggcuggugaguucagagaaccc

SEQ ID NO: 8301 - RNA, 22 nt, Human
ggcugguguugagugccuguag

SEQ ID NO: 8302 - RNA, 21 nt, Human
ggcugguguuuagcugugaua

SEQ ID NO: 8303 - RNA, 22 nt, Human
ggcuguagguuggugcuggaca

SEQ ID NO: 8304 - RNA, 22 nt, Human
ggcuguagucagugacauggua

SEQ ID NO: 8305 - RNA, 22 nt, Human
ggcugucagggugagcuggcuu

SEQ ID NO: 8306 - RNA, 22 nt, Human
ggcuguccaccuaccaugccgg

SEQ ID NO: 8307 - RNA, 20 nt, Human
ggcugucccgcggcugccgg

SEQ ID NO: 8308 - RNA, 22 nt, Human
ggcugucucugugacugccacc

SEQ ID NO: 8309 - RNA, 22 nt, Human
ggcugugaacccuggcagugug

SEQ ID NO: 8310 - RNA, 22 nt, Human
ggcugugaaguagcaggggcag

SEQ ID NO: 8311 - RNA, 22 nt, Human
ggcugugcaccauccaccuccc

SEQ ID NO: 8312 - RNA, 17 nt, Human
ggcugugccaggugaga

SEQ ID NO: 8313 - RNA, 22 nt, Human
ggcugugcccucacauggggca

SEQ ID NO: 8314 - RNA, 20 nt, Human
ggcugugcccuuccguggcc

SEQ ID NO: 8315 - RNA, 18 nt, Human
ggcugugcguggaggcug

SEQ ID NO: 8316 - RNA, 22 nt, Human
ggcugugcugagggggaagccc

SEQ ID NO: 8317 - RNA, 22 nt, Human
ggcuguggucucaucuagccuu

SEQ ID NO: 8318 - RNA, 22 nt, Human
ggcuguggucugggugcucccc

SEQ ID NO: 8319 - RNA, 22 nt, Human
ggcuguguccuguaugauuauu

SEQ ID NO: 8320 - RNA, 22 nt, Human
ggcuguguuccaagugucagga

SEQ ID NO: 8321 - RNA, 22 nt, Human
ggcuguguuucuguuugacauu

SEQ ID NO: 8322 - RNA, 22 nt, Human
ggcuguugacagacauagguuu

SEQ ID NO: 8323 - RNA, 22 nt, Human
ggcuuaaaacuuugaaaguguu

SEQ ID NO: 8324 - RNA, 22 nt, Human
ggcuuaaaguuuucuagaauaa

SEQ ID NO: 8325 - RNA, 22 nt, Human
ggcuuaagaugguagcuuugag

SEQ ID NO: 8326 - RNA, 22 nt, Human
ggcuuagaaggcaaaugacuug

SEQ ID NO: 8327 - RNA, 20 nt, Human
ggcuuagacugaguucucac

SEQ ID NO: 8328 - RNA, 22 nt, Human
ggcuuauauauuuucacuugcc

SEQ ID NO: 8329 - RNA, 22 nt, Human
ggcuuauauugcucuauucaca

SEQ ID NO: 8330 - RNA, 22 nt, Human
ggcuucaccaggugcaugcaug

SEQ ID NO: 8331 - RNA, 22 nt, Human
ggcuucacucauaauuagguuc

SEQ ID NO: 8332 - RNA, 22 nt, Human
ggcuucagaggagaagagggug

SEQ ID NO: 8333 - RNA, 17 nt, Human
ggcuucagggagcuggg

SEQ ID NO: 8334 - RNA, 22 nt, Human
ggcuucaggggcccagucagca

SEQ ID NO: 8335 - RNA, 22 nt, Human
ggcuuccagcugggccuuggag

SEQ ID NO: 8336 - RNA, 22 nt, Human
ggcuuccagugaugccucuuug

SEQ ID NO: 8337 - RNA, 22 nt, Human
ggcuucccaggcgguccccaca

SEQ ID NO: 8338 - RNA, 22 nt, Human
ggcuuccccacaaagcacacaa

SEQ ID NO: 8339 - RNA, 20 nt, Human
ggcuuccccgccaucuuccg

SEQ ID NO: 8340 - RNA, 22 nt, Human
ggcuuccccuccagugcucugu

SEQ ID NO: 8341 - RNA, 22 nt, Human
ggcuuccuccuuccugcuguca

SEQ ID NO: 8342 - RNA, 22 nt, Human
ggcuucucagcacacuguccac

SEQ ID NO: 8343 - RNA, 22 nt, Human
ggcuucucucuucacauggcuu

SEQ ID NO: 8344 - RNA, 22 nt, Human
ggcuucugaaacuguauugaga

SEQ ID NO: 8345 - RNA, 22 nt, Human
ggcuucugaaaucucugugcgu

SEQ ID NO: 8346 - RNA, 22 nt, Human
ggcuucuuaaucaugagaguga

SEQ ID NO: 8347 - RNA, 23 nt, Human
ggcuucuugccugucuuggugcu

SEQ ID NO: 8348 - RNA, 22 nt, Human
ggcuucuugugugucaggcucu

SEQ ID NO: 8349 - RNA, 22 nt, Human
ggcuugaacucccaaucauuua

SEQ ID NO: 8350 - RNA, 22 nt, Human
ggcuugaagggaggaaagcagg

SEQ ID NO: 8351 - RNA, 22 nt, Human
ggcuugaauggauauaaucugu

SEQ ID NO: 8352 - RNA, 22 nt, Human
ggcuugagacccgggagccaga

SEQ ID NO: 8353 - RNA, 22 nt, Human
ggcuuggcagaggugggugcuu

SEQ ID NO: 8354 - RNA, 22 nt, Human
ggcuuguccuucugguugucuu

SEQ ID NO: 8355 - RNA, 22 nt, Human
ggcuuguugaaacacagauugu

SEQ ID NO: 8356 - RNA, 22 nt, Human
ggcuuuaaacacugaaauugca

SEQ ID NO: 8357 - RNA, 22 nt, Human
ggcuuuacuauaugguacauuu

SEQ ID NO: 8358 - RNA, 22 nt, Human
ggcuuuauauuguuugagcaga

SEQ ID NO: 8359 - RNA, 22 nt, Human
ggcuuuaugcacagcagauggu

SEQ ID NO: 8360 - RNA, 22 nt, Human
ggcuuucaacacaggcuuuccu

SEQ ID NO: 8361 - RNA, 22 nt, Human
ggcuuucuccuugccuuagucu

SEQ ID NO: 8362 - RNA, 22 nt, Human
ggcuuucugagucaaacacuga

SEQ ID NO: 8363 - RNA, 23 nt, Human
ggcuuugcucuggguucuagggu

SEQ ID NO: 8364 - RNA, 22 nt, Human
ggcuuugcuuuggcuguuucag

SEQ ID NO: 8365 - RNA, 22 nt, Human
ggcuuugggcccucaagucucc

SEQ ID NO: 8366 - RNA, 22 nt, Human
ggcuuuggggguguccaagaaa

SEQ ID NO: 8367 - RNA, 22 nt, Human
ggcuuugguagacacagauuga

SEQ ID NO: 8368 - RNA, 21 nt, Human
gggaaacucugcuuaacagag

SEQ ID NO: 8369 - RNA, 22 nt, Human
gggaaacugcaacucagagagg

SEQ ID NO: 8370 - RNA, 22 nt, Human
gggaaacuggggacugaaucug

SEQ ID NO: 8371 - RNA, 22 nt, Human
gggaaagaagaucuagauacug

SEQ ID NO: 8372 - RNA, 22 nt, Human
gggaaagaccuuccuggggugu

SEQ ID NO: 8373 - RNA, 22 nt, Human
gggaaauagagcuggaaccuug

SEQ ID NO: 8374 - RNA, 23 nt, Human
gggaaaucaaaagauauuucuuc

SEQ ID NO: 8375 - RNA, 22 nt, Human
gggaaauuguaacaagucuguu

SEQ ID NO: 8376 - RNA, 22 nt, Human
gggaaauuuuagguuugucucg

SEQ ID NO: 8377 - RNA, 22 nt, Human
gggaacuauuuuaagcacuuga

SEQ ID NO: 8378 - RNA, 22 nt, Human
gggaacuguguggugcucugau

SEQ ID NO: 8379 - RNA, 22 nt, Human
gggaagaagacauggugaaggc

SEQ ID NO: 8380 - RNA, 22 nt, Human
gggaagcagaucauaccagacc

SEQ ID NO: 8381 - RNA, 22 nt, Human
gggaaggacauucugggcucag

SEQ ID NO: 8382 - RNA, 22 nt, Human
gggaaggagguggcuugaagug

SEQ ID NO: 8383 - RNA, 22 nt, Human
gggaaggcaccaugguguucca

SEQ ID NO: 8384 - RNA, 22 nt, Human
gggaaggcagugucugguugaa

SEQ ID NO: 8385 - RNA, 22 nt, Human
gggaaggccgguccagucaggu

SEQ ID NO: 8386 - RNA, 22 nt, Human
gggaagguauuuagcugcugaa

SEQ ID NO: 8387 - RNA, 22 nt, Human
ggccaugccugugggugcaggc

SEQ ID NO: 8388 - RNA, 22 nt, Human
ggccauggaccccgagcugacc

SEQ ID NO: 8389 - RNA, 22 nt, Human
ggcccacacugacagcugagcu

SEQ ID NO: 8390 - RNA, 22 nt, Human
ggcccagaaaaaggcuuagaau

SEQ ID NO: 8391 - RNA, 22 nt, Human
ggcccagaauacaugaaguaua

SEQ ID NO: 8392 - RNA, 22 nt, Human
ggcccagagucugcaauggagu

SEQ ID NO: 8393 - RNA, 22 nt, Human
ggcccagcaucuugugaaguuu

SEQ ID NO: 8394 - RNA, 22 nt, Human
ggcccagcccgagucagccuuc

SEQ ID NO: 8395 - RNA, 22 nt, Human
ggcccagccuggcaacaaugac

SEQ ID NO: 8396 - RNA, 22 nt, Human
ggcccagcucuauugaauuaca

SEQ ID NO: 8397 - RNA, 22 nt, Human
ggcccagcuuucauuccuugcu

SEQ ID NO: 8398 - RNA, 22 nt, Human
ggcccaggcuggagugcggugg

SEQ ID NO: 8399 - RNA, 22 nt, Human
ggcccagguccagcgaguaccu

SEQ ID NO: 8400 - RNA, 22 nt, Human
ggcccagugucccggucguggc

SEQ ID NO: 8401 - RNA, 22 nt, Human
ggccccaaaugucaauaguacu

SEQ ID NO: 8402 - RNA, 21 nt, Human
ggccccagcccauggguucuc

SEQ ID NO: 8403 - RNA, 22 nt, Human
ggccccagccucaguccccuga

SEQ ID NO: 8404 - RNA, 22 nt, Human
ggccccaggaccuccacggucc

SEQ ID NO: 8405 - RNA, 22 nt, Human
ggccccagggaagaaggugguc

SEQ ID NO: 8406 - RNA, 22 nt, Human
ggccccagguagaagauauaga

SEQ ID NO: 8407 - RNA, 22 nt, Human
ggccccaguucacuccuggccg

SEQ ID NO: 8408 - RNA, 22 nt, Human
ggcccccaggguggguguagac

SEQ ID NO: 8409 - RNA, 22 nt, Human
ggccccucuuguggcacauacg

SEQ ID NO: 8410 - RNA, 22 nt, Human
ggccccuggcaccaggcugauu

SEQ ID NO: 8411 - RNA, 22 nt, Human
ggcccugagcacagcuccucuc

SEQ ID NO: 8412 - RNA, 22 nt, Human
ggcccugagcugaaguacugug

SEQ ID NO: 8413 - RNA, 22 nt, Human
ggcccugcugaagccgggucua

SEQ ID NO: 8414 - RNA, 19 nt, Human
ggcccuguaggaugugagu

SEQ ID NO: 8415 - RNA, 22 nt, Human
ggcccuguccccuucaguuuug

SEQ ID NO: 8416 - RNA, 22 nt, Human
ggcccuuccucuugugcuggca

SEQ ID NO: 8417 - RNA, 22 nt, Human
ggcccuuccugcucucuuagcu

SEQ ID NO: 8418 - RNA, 22 nt, Human
ggcccuugcagcaggcgcuggc

SEQ ID NO: 8419 - RNA, 20 nt, Human
ggccggggagcucuccaggg

SEQ ID NO: 8420 - RNA, 22 nt, Human
ggccuagccucuccugagagag

SEQ ID NO: 8421 - RNA, 22 nt, Human
ggccuaggaaggggauguaacu

SEQ ID NO: 8422 - RNA, 22 nt, Human
ggccucagaggaggugugaguc

SEQ ID NO: 8423 - RNA, 18 nt, Human
ggccucagccuggccgga

SEQ ID NO: 8424 - RNA, 20 nt, Human
ggccucaguguccuuguuug

SEQ ID NO: 8425 - RNA, 22 nt, Human
ggccucaguuucuucaacugua

SEQ ID NO: 8426 - RNA, 22 nt, Human
ggccuccuguuggcuaguguga

SEQ ID NO: 8427 - RNA, 22 nt, Human
ggccucgcggcuucugguggcu

SEQ ID NO: 8428 - RNA, 22 nt, Human
ggccucggcccacugcugcggu

SEQ ID NO: 8429 - RNA, 22 nt, Human
ggccucucagggcagagacccu

SEQ ID NO: 8430 - RNA, 22 nt, Human
ggccucucaugcccagagccaa

SEQ ID NO: 8431 - RNA, 22 nt, Human
ggccucugaggacagccuuggc

SEQ ID NO: 8432 - RNA, 22 nt, Human
ggccucugcccucacuccuguc

SEQ ID NO: 8433 - RNA, 22 nt, Human
ggccucugccucaucugggcac

SEQ ID NO: 8434 - RNA, 22 nt, Human
ggccucugcuuaugcugaugac

SEQ ID NO: 8435 - RNA, 22 nt, Human
ggccucuggcaggcaggcccuc

SEQ ID NO: 8436 - RNA, 23 nt, Human
ggccucuguguucugcccacaug

SEQ ID NO: 8437 - RNA, 22 nt, Human
ggccugaaauagcucugagguu

SEQ ID NO: 8438 - RNA, 22 nt, Human
ggccugacauuugcaucaacac

SEQ ID NO: 8439 - RNA, 21 nt, Human
ggccugagcaccuguccaccu

SEQ ID NO: 8440 - RNA, 22 nt, Human
ggccugagcucuggggaggcaa

SEQ ID NO: 8441 - RNA, 22 nt, Human
ggccugaggcaauagucagaca

SEQ ID NO: 8442 - RNA, 19 nt, Human
ggccugaggccacagaucc

SEQ ID NO: 8443 - RNA, 17 nt, Human
ggccugcaccuccugcu

SEQ ID NO: 8444 - RNA, 19 nt, Human
ggccugcccaaugucugcu

SEQ ID NO: 8445 - RNA, 22 nt, Human
ggccugcuaaccugaaacggag

SEQ ID NO: 8446 - RNA, 22 nt, Human
ggccugcuauuggugggcagac

SEQ ID NO: 8447 - RNA, 22 nt, Human
ggccugcucaaacagauuccug

SEQ ID NO: 8448 - RNA, 22 nt, Human
ggccugcugcugguuagauggg

SEQ ID NO: 8449 - RNA, 22 nt, Human
ggccugcuguguacugauguca

SEQ ID NO: 8450 - RNA, 22 nt, Human
ggccugcuucucugggcuuucu

SEQ ID NO: 8451 - RNA, 22 nt, Human
ggccuggaaggacagcgugaug

SEQ ID NO: 8452 - RNA, 22 nt, Human
ggccuggaaugcuuuccuacca

SEQ ID NO: 8453 - RNA, 22 nt, Human
ggccuggacaaaugcaccaagg

SEQ ID NO: 8454 - RNA, 22 nt, Human
ggccuggagaaggcccagggag

SEQ ID NO: 8455 - RNA, 22 nt, Human
ggccuggccuccagaugugggc

SEQ ID NO: 8456 - RNA, 22 nt, Human
ggccuggccucccuuccuagcg

SEQ ID NO: 8457 - RNA, 19 nt, Human
ggccuggcuaucccugcug

SEQ ID NO: 8458 - RNA, 22 nt, Human
ggccuggcucuugcccagccug

SEQ ID NO: 8459 - RNA, 22 nt, Human
ggccugggcccacugucaagag

SEQ ID NO: 8460 - RNA, 22 nt, Human
ggccugugcaagacagcacccc

SEQ ID NO: 8461 - RNA, 19 nt, Human
ggccugugcagagcccguc

SEQ ID NO: 8462 - RNA, 22 nt, Human
ggccugugcugucagcccuagu

SEQ ID NO: 8463 - RNA, 22 nt, Human
ggccugugggaggacagcuggg

SEQ ID NO: 8464 - RNA, 22 nt, Human
ggccugugucugugccuguccu

SEQ ID NO: 8465 - RNA, 22 nt, Human
ggccuuagcugucuuuccuuug

SEQ ID NO: 8466 - RNA, 22 nt, Human
ggccuuccagggaagacagggc

SEQ ID NO: 8467 - RNA, 22 nt, Human
ggccuuccauugcucuuuucua

SEQ ID NO: 8468 - RNA, 21 nt, Human
ggccuuccccugcagucuccg

SEQ ID NO: 8469 - RNA, 22 nt, Human
ggccuugagagccagugcaggc

SEQ ID NO: 8470 - RNA, 22 nt, Human
ggccuugaucucucuaacugcu

SEQ ID NO: 8471 - RNA, 22 nt, Human
ggccuugcagccacagaacaca

SEQ ID NO: 8472 - RNA, 22 nt, Human
ggccuugccucaauagcuccac

SEQ ID NO: 8473 - RNA, 22 nt, Human
ggccuuggaaagauacccagcu

SEQ ID NO: 8474 - RNA, 20 nt, Human
ggccuuggaauagcacagcu

SEQ ID NO: 8475 - RNA, 20 nt, Human
ggccuuggccucuuugcagc

SEQ ID NO: 8476 - RNA, 21 nt, Human
ggccuuggcgggggccgaauu

SEQ ID NO: 8477 - RNA, 22 nt, Human
ggccuugggauguggcugcagc

SEQ ID NO: 8478 - RNA, 17 nt, Human
ggccuuggggccucagu

SEQ ID NO: 8479 - RNA, 19 nt, Human
ggccuuggggucccaaagu

SEQ ID NO: 8480 - RNA, 20 nt, Human
ggccuuggguuucgccuguu

SEQ ID NO: 8481 - RNA, 22 nt, Human
ggccuugguaaauuggcauuug

SEQ ID NO: 8482 - RNA, 22 nt, Human
ggccuuggugccauggccaguu

SEQ ID NO: 8483 - RNA, 19 nt, Human
ggccuuucaccuggaugcu

SEQ ID NO: 8484 - RNA, 22 nt, Human
ggccuuuuguguccuugcccgu

SEQ ID NO: 8485 - RNA, 22 nt, Human
ggcgagggaaguuuacugugag

SEQ ID NO: 8486 - RNA, 22 nt, Human
ggcgccccauauaguucuuaau

SEQ ID NO: 8487 - RNA, 22 nt, Human
ggcgccgcacucggugcagccg

SEQ ID NO: 8488 - RNA, 22 nt, Human
ggcggcacgcaggcugcugucg

SEQ ID NO: 8489 - RNA, 22 nt, Human
ggcggccugugggucggccuca

SEQ ID NO: 8490 - RNA, 22 nt, Human
ggcggggguccaggagccugca

SEQ ID NO: 8491 - RNA, 22 nt, Human
ggcgguggcgugaagguggcug

SEQ ID NO: 8492 - RNA, 22 nt, Human
ggcuaaggaacgcaggcuucuc

SEQ ID NO: 8493 - RNA, 22 nt, Human
ggcuacagaggccgugagccug

SEQ ID NO: 8494 - RNA, 22 nt, Human
ggcuacagcgggguggagacgg

SEQ ID NO: 8495 - RNA, 22 nt, Human
ggcuagaagucagaggucaaga

SEQ ID NO: 8496 - RNA, 22 nt, Human
ggcuagaguggaacuggagcgg

SEQ ID NO: 8497 - RNA, 22 nt, Human
ggcuagcaagguagcagaaugc

SEQ ID NO: 8498 - RNA, 22 nt, Human
ggcuaggccucaggccugccug

SEQ ID NO: 8499 - RNA, 22 nt, Human
ggccugugcugagaaccuggcu

SEQ ID NO: 8500 - RNA, 22 nt, Human
ggccuguggcaaggugagaaug

SEQ ID NO: 8501 - RNA, 17 nt, Human
ggccuguguggcugcag

SEQ ID NO: 8502 - RNA, 20 nt, Human
ggccuuagggagggcuguaa

SEQ ID NO: 8503 - RNA, 22 nt, Human
ggccuuagguucccugccucca

SEQ ID NO: 8504 - RNA, 22 nt, Human
ggccuucacgugaccuggcgug

SEQ ID NO: 8505 - RNA, 22 nt, Human
ggccuucugccuuucagcaaug

SEQ ID NO: 8506 - RNA, 22 nt, Human
ggccuugagcagggagaaacca

SEQ ID NO: 8507 - RNA, 22 nt, Human
ggccuugauguucuugggagau

SEQ ID NO: 8508 - RNA, 22 nt, Human
ggccuuggaguccuccacugga

SEQ ID NO: 8509 - RNA, 22 nt, Human
ggccuugggcagacacgucaca

SEQ ID NO: 8510 - RNA, 22 nt, Human
ggccuugggcgagucccucagu

SEQ ID NO: 8511 - RNA, 22 nt, Human
ggccuuggguauagguggguau

SEQ ID NO: 8512 - RNA, 22 nt, Human
ggccuugguggcuuugcugaug

SEQ ID NO: 8513 - RNA, 22 nt, Human
ggccuuuaagcaauugaaaaga

SEQ ID NO: 8514 - RNA, 22 nt, Human
ggccuuugcguccacgccgcuu

SEQ ID NO: 8515 - RNA, 22 nt, Human
ggcgagcagagcacugccagga

SEQ ID NO: 8516 - RNA, 22 nt, Human
ggcgagcaugagucacucuggg

SEQ ID NO: 8517 - RNA, 22 nt, Human
ggcgagggagcagugcgguggg

SEQ ID NO: 8518 - RNA, 22 nt, Human
ggcgaggugucugccaucaagc

SEQ ID NO: 8519 - RNA, 22 nt, Human
ggcgcaggccuuggauccuggu

SEQ ID NO: 8520 - RNA, 22 nt, Human
ggcgcaguugagcgugcuguuc

SEQ ID NO: 8521 - RNA, 22 nt, Human
ggcgccagcacugcagcgccuc

SEQ ID NO: 8522 - RNA, 22 nt, Human
ggcgccagcccaggccgucgug

SEQ ID NO: 8523 - RNA, 22 nt, Human
ggcgcggugacucagccucgcu

SEQ ID NO: 8524 - RNA, 22 nt, Human
ggcgcuggccacgguggcucug

SEQ ID NO: 8525 - RNA, 22 nt, Human
ggcgcugucgugagcucgcccg

SEQ ID NO: 8526 - RNA, 22 nt, Human
ggcggcuacuccuccuggugag

SEQ ID NO: 8527 - RNA, 22 nt, Human
ggcgggaaguucuugcccacuu

SEQ ID NO: 8528 - RNA, 22 nt, Human
ggcgggagauggggccguucag

SEQ ID NO: 8529 - RNA, 22 nt, Human
ggcgggaggcugaggaguuggu

SEQ ID NO: 8530 - RNA, 22 nt, Human
ggcggggccucgcgaacggccu

SEQ ID NO: 8531 - RNA, 22 nt, Human
ggcggggucugagcgccgcgcc

SEQ ID NO: 8532 - RNA, 22 nt, Human
ggcgggugcacagacccuuccc

SEQ ID NO: 8533 - RNA, 22 nt, Human
ggcggugguugagaggacggcg

SEQ ID NO: 8534 - RNA, 22 nt, Human
ggcguggcagucaggaaaaggu

SEQ ID NO: 8535 - RNA, 22 nt, Human
ggcguggggccuucugcccgcu

SEQ ID NO: 8536 - RNA, 22 nt, Human
ggcuaaagauguguucuuugga

SEQ ID NO: 8537 - RNA, 19 nt, Human
ggcuaaugucuuugaaaua

SEQ ID NO: 8538 - RNA, 22 nt, Human
ggcuacagacugcauaagggca

SEQ ID NO: 8539 - RNA, 22 nt, Human
ggcuacaguggcacugggcuuu

SEQ ID NO: 8540 - RNA, 22 nt, Human
ggcuagaacuuuacacuuugca

SEQ ID NO: 8541 - RNA, 23 nt, Human
ggcuagaguggaggggaacugca

SEQ ID NO: 8542 - RNA, 22 nt, Human
ggcuaggcgggcacauggugga

SEQ ID NO: 8543 - RNA, 22 nt, Human
ggcuagggaaaaugauuggaua

SEQ ID NO: 8544 - RNA, 22 nt, Human
ggcuaggggaauaaucuguggu

SEQ ID NO: 8545 - RNA, 22 nt, Human
ggcuauggaaauggcaggacau

SEQ ID NO: 8546 - RNA, 22 nt, Human
ggcuauggaagauaaggcugaa

SEQ ID NO: 8547 - RNA, 22 nt, Human
ggcuauguguguccaguguauu

SEQ ID NO: 8548 - RNA, 22 nt, Human
ggcuauuucauuuaguacuagg

SEQ ID NO: 8549 - RNA, 22 nt, Human
ggcucaagcagucugccugccu

SEQ ID NO: 8550 - RNA, 19 nt, Human
ggcucaagcauccagguag

SEQ ID NO: 8551 - RNA, 22 nt, Human
ggcucacaaaauguugcuuaau

SEQ ID NO: 8552 - RNA, 22 nt, Human
ggcucaccauggccucccugcu

SEQ ID NO: 8553 - RNA, 22 nt, Human
ggcucaccauuuucacucucug

SEQ ID NO: 8554 - RNA, 22 nt, Human
ggcucacgcaauuaucccggcc

SEQ ID NO: 8555 - RNA, 23 nt, Human
ggcucagaaaaaguccuggccuc

SEQ ID NO: 8556 - RNA, 22 nt, Human
ggcucagaaggccaugcucugc

SEQ ID NO: 8557 - RNA, 22 nt, Human
ggcucagagguugaggccggca

SEQ ID NO: 8558 - RNA, 22 nt, Human
ggcucagaguuaggacccaugu

SEQ ID NO: 8559 - RNA, 22 nt, Human
ggcucagcacagggcuggcauc

SEQ ID NO: 8560 - RNA, 18 nt, Human
ggcucagcaggcucucuc

SEQ ID NO: 8561 - RNA, 22 nt, Human
ggcucagcuuggugcgcagaaa

SEQ ID NO: 8562 - RNA, 22 nt, Human
ggcucaggacacagugguuuag

SEQ ID NO: 8563 - RNA, 22 nt, Human
ggcucaggaccugggauugcca

SEQ ID NO: 8564 - RNA, 22 nt, Human
ggcucaggaugagccuucucau

SEQ ID NO: 8565 - RNA, 22 nt, Human
ggcucaggccagaccacgacuc

SEQ ID NO: 8566 - RNA, 18 nt, Human
ggcucaggcuauccuaac

SEQ ID NO: 8567 - RNA, 22 nt, Human
ggcucagggaaugaggaagaau

SEQ ID NO: 8568 - RNA, 19 nt, Human
ggcucagggcgcugccgcc

SEQ ID NO: 8569 - RNA, 22 nt, Human
ggcucagguuuccuucccagcu

SEQ ID NO: 8570 - RNA, 22 nt, Human
ggcucauguuucagaaagugga

SEQ ID NO: 8571 - RNA, 22 nt, Human
ggcuccaacacuaaauguguuu

SEQ ID NO: 8572 - RNA, 22 nt, Human
ggcuccaagucucagagugaag

SEQ ID NO: 8573 - RNA, 22 nt, Human
ggcuccacugcugaccacucca

SEQ ID NO: 8574 - RNA, 22 nt, Human
ggcuccagaaaucauagagcag

SEQ ID NO: 8575 - RNA, 22 nt, Human
ggcuccagaggccuuaccugca

SEQ ID NO: 8576 - RNA, 18 nt, Human
ggcuccaggaccuaccca

SEQ ID NO: 8577 - RNA, 22 nt, Human
ggcuccagggaguggagagaag

SEQ ID NO: 8578 - RNA, 22 nt, Human
ggcuccagguuuaaggguaugu

SEQ ID NO: 8579 - RNA, 22 nt, Human
ggcucccacccauagggcgagu

SEQ ID NO: 8580 - RNA, 22 nt, Human
ggcucccugggugcuccugcuc

SEQ ID NO: 8581 - RNA, 22 nt, Human
ggcuccugaaagacuaugggaa

SEQ ID NO: 8582 - RNA, 22 nt, Human
ggcuccugagaaugggccauca

SEQ ID NO: 8583 - RNA, 22 nt, Human
ggcuccugccgucuuuucugag

SEQ ID NO: 8584 - RNA, 21 nt, Human
ggcuccugcuuugugaggggc

SEQ ID NO: 8585 - RNA, 22 nt, Human
ggcuccuggaggcaccacuggu

SEQ ID NO: 8586 - RNA, 22 nt, Human
ggcuccugggagauagagguca

SEQ ID NO: 8587 - RNA, 22 nt, Human
ggcuccuggggaggugagcuug

SEQ ID NO: 8588 - RNA, 22 nt, Human
ggcuccuguccccucagcugcu

SEQ ID NO: 8589 - RNA, 22 nt, Human
ggcuccuguggcaagacagcuu

SEQ ID NO: 8590 - RNA, 19 nt, Human
ggcuccuguggcugcagcc

SEQ ID NO: 8591 - RNA, 20 nt, Human
ggcuccuucuuucauggccc

SEQ ID NO: 8592 - RNA, 22 nt, Human
ggcucucagggaaaggccuccc

SEQ ID NO: 8593 - RNA, 22 nt, Human
ggcucucugaggaaacccuucc

SEQ ID NO: 8594 - RNA, 22 nt, Human
ggcucucuggaggagcucaccc

SEQ ID NO: 8595 - RNA, 22 nt, Human
ggcucucuuaacuggccauccu

SEQ ID NO: 8596 - RNA, 22 nt, Human
ggcucugaaggagacagcugcu

SEQ ID NO: 8597 - RNA, 22 nt, Human
ggcucugaauuauuccugaguc

SEQ ID NO: 8598 - RNA, 22 nt, Human
ggcucugaccucccaggcaguu

SEQ ID NO: 8599 - RNA, 22 nt, Human
ggcucugaggcagaucgauggg

SEQ ID NO: 8600 - RNA, 22 nt, Human
ggcucugcccagguggacagca

SEQ ID NO: 8601 - RNA, 22 nt, Human
ggcucugccucugacccucugg

SEQ ID NO: 8602 - RNA, 22 nt, Human
ggcucugccugcccagcagcac

SEQ ID NO: 8603 - RNA, 22 nt, Human
ggcucugcgccugcggggacuu

SEQ ID NO: 8604 - RNA, 22 nt, Human
ggcucugcggcgugugcgcagg

SEQ ID NO: 8605 - RNA, 22 nt, Human
ggcucugcucacagcccgcagc

SEQ ID NO: 8606 - RNA, 22 nt, Human
ggcucugcugcaagucuuccuc

SEQ ID NO: 8607 - RNA, 22 nt, Human
ggcucugcugcacccuuggcuc

SEQ ID NO: 8608 - RNA, 22 nt, Human
ggcucugcuuccuggaauugug

SEQ ID NO: 8609 - RNA, 22 nt, Human
ucaggauccauagacucccaaa

SEQ ID NO: 8610 - RNA, 22 nt, Human
ucaggaugacuucaaggaggaa

SEQ ID NO: 8611 - RNA, 22 nt, Human
ucaggauggagucuauccagug

SEQ ID NO: 8612 - RNA, 22 nt, Human
gggaagugauggagccaggauu

SEQ ID NO: 8613 - RNA, 22 nt, Human
gggaaugaccuuaauaaguagg

SEQ ID NO: 8614 - RNA, 22 nt, Human
gggaaugugucugauggaaaga

SEQ ID NO: 8615 - RNA, 22 nt, Human
gggacaauggaggccucucucc

SEQ ID NO: 8616 - RNA, 22 nt, Human
gggacagaggcaaacuagcaga

SEQ ID NO: 8617 - RNA, 22 nt, Human
gggacaugaggccauagugauu

SEQ ID NO: 8618 - RNA, 22 nt, Human
gggacauggcuaggauuccaau

SEQ ID NO: 8619 - RNA, 22 nt, Human
gggaccacuccgacauguaggg

SEQ ID NO: 8620 - RNA, 22 nt, Human
gggaccaggucagggcucugac

SEQ ID NO: 8621 - RNA, 22 nt, Human
gggaccagugucugugagaaaa

SEQ ID NO: 8622 - RNA, 22 nt, Human
gggacccagguaauccugugcu

SEQ ID NO: 8623 - RNA, 22 nt, Human
gggacccugggaggcuggcgca

SEQ ID NO: 8624 - RNA, 19 nt, Human
gggaccugacuaauuggca

SEQ ID NO: 8625 - RNA, 22 nt, Human
gggaccugaggcccugcuccac

SEQ ID NO: 8626 - RNA, 22 nt, Human
gggaccugccaaggccacccag

SEQ ID NO: 8627 - RNA, 22 nt, Human
gggacgacaggcucugugguag

SEQ ID NO: 8628 - RNA, 22 nt, Human
gggacgagaucuuggcagugug

SEQ ID NO: 8629 - RNA, 22 nt, Human
gggacgagccccaggcuggagg

SEQ ID NO: 8630 - RNA, 22 nt, Human
gggacgugagugaagaaggucu

SEQ ID NO: 8631 - RNA, 22 nt, Human
gggacuggaacuacuggugcag

SEQ ID NO: 8632 - RNA, 22 nt, Human
gggacuguccucugugucugug

SEQ ID NO: 8633 - RNA, 22 nt, Human
gggagaacuggguggagcaucu

SEQ ID NO: 8634 - RNA, 22 nt, Human
gggagaagaaugugucaauugu

SEQ ID NO: 8635 - RNA, 22 nt, Human
gggagacacgcugcaggcauaa

SEQ ID NO: 8636 - RNA, 22 nt, Human
gggagacacuugcuuuagaggg

SEQ ID NO: 8637 - RNA, 22 nt, Human
gggagagaauuauugccagacc

SEQ ID NO: 8638 - RNA, 22 nt, Human
gggagagcgggaggugccacag

SEQ ID NO: 8639 - RNA, 22 nt, Human
gggagagguuacccgagcaacu

SEQ ID NO: 8640 - RNA, 22 nt, Human
gggagaguagcuggaagguucu

SEQ ID NO: 8641 - RNA, 22 nt, Human
gggagcauaaacucagauuuca

SEQ ID NO: 8642 - RNA, 22 nt, Human
gggagcauuuauuuuccguuag

SEQ ID NO: 8643 - RNA, 22 nt, Human
gggagccacucagcugagaguu

SEQ ID NO: 8644 - RNA, 19 nt, Human
gggagccagacccuuugcu

SEQ ID NO: 8645 - RNA, 22 nt, Human
gggagccagagucaccuagaga

SEQ ID NO: 8646 - RNA, 22 nt, Human
gggagccagccuuugccuauaa

SEQ ID NO: 8647 - RNA, 22 nt, Human
gggagccaugcuggucuucuuu

SEQ ID NO: 8648 - RNA, 22 nt, Human
gggagcgggacugcgcaggcuu

SEQ ID NO: 8649 - RNA, 22 nt, Human
gggagcucucccugaggccugg

SEQ ID NO: 8650 - RNA, 22 nt, Human
gggagcugaaguagggguaaau

SEQ ID NO: 8651 - RNA, 22 nt, Human
gggagcugagcuggaagagaau

SEQ ID NO: 8652 - RNA, 19 nt, Human
gggagcugaggucuuuggu

SEQ ID NO: 8653 - RNA, 22 nt, Human
gggagcugcugaacacaagggu

SEQ ID NO: 8654 - RNA, 22 nt, Human
gggagcuggaugauugaggcaa

SEQ ID NO: 8655 - RNA, 18 nt, Human
gggagcugggaagcuggu

SEQ ID NO: 8656 - RNA, 22 nt, Human
gggagcuggggcauuuauaccc

SEQ ID NO: 8657 - RNA, 22 nt, Human
gggagcugguuccugcccucca

SEQ ID NO: 8658 - RNA, 22 nt, Human
gggagcugugggauugguugag

SEQ ID NO: 8659 - RNA, 19 nt, Human
gggagcuuuccaucugucc

SEQ ID NO: 8660 - RNA, 22 nt, Human
gggaggagcugagugugugugc

SEQ ID NO: 8661 - RNA, 20 nt, Human
gggaggccccagaguccagg

SEQ ID NO: 8662 - RNA, 22 nt, Human
gggagggaaggaggcgccgugu

SEQ ID NO: 8663 - RNA, 22 nt, Human
gggagggagaggacaguucuau

SEQ ID NO: 8664 - RNA, 22 nt, Human
gggagggaggugcugguucacg

SEQ ID NO: 8665 - RNA, 16 nt, Human
gggagggaguuggugg

SEQ ID NO: 8666 - RNA, 22 nt, Human
gggagggauuaguucugccugg

SEQ ID NO: 8667 - RNA, 22 nt, Human
gggagggccagugcucucuaga

SEQ ID NO: 8668 - RNA, 22 nt, Human
gggagggcuuggacccagaugu

SEQ ID NO: 8669 - RNA, 22 nt, Human
gggagggucugagagcugcacc

SEQ ID NO: 8670 - RNA, 22 nt, Human
gggagguaaagaugagcucagu

SEQ ID NO: 8671 - RNA, 22 nt, Human
gggagugguccuuuccuaucug

SEQ ID NO: 8672 - RNA, 22 nt, Human
gggaguguugagcgcccugcca

SEQ ID NO: 8673 - RNA, 22 nt, Human
gggauagguuuggaagaggugg

SEQ ID NO: 8674 - RNA, 21 nt, Human
gggaucugaggcaagucuccu

SEQ ID NO: 8675 - RNA, 22 nt, Human
gggaucugaguaggcagaagcu

SEQ ID NO: 8676 - RNA, 22 nt, Human
gggaucugaguugucaggaagg

SEQ ID NO: 8677 - RNA, 22 nt, Human
gggaucugauuuaggaugggag

SEQ ID NO: 8678 - RNA, 22 nt, Human
gggaucuugggaacacccuuac

SEQ ID NO: 8679 - RNA, 22 nt, Human
gggaucuuguuuaauauuguuu

SEQ ID NO: 8680 - RNA, 22 nt, Human
gggaugaggaucaaucagggag

SEQ ID NO: 8681 - RNA, 22 nt, Human
gggaugauggaaaagucuguua

SEQ ID NO: 8682 - RNA, 22 nt, Human
gggauggcucaaaggagucagg

SEQ ID NO: 8683 - RNA, 22 nt, Human
gggauggggagcuggaaagggg

SEQ ID NO: 8684 - RNA, 22 nt, Human
gggaugucacugugccuggcac

SEQ ID NO: 8685 - RNA, 22 nt, Human
gggauuacagaugugagccauu

SEQ ID NO: 8686 - RNA, 18 nt, Human
gggcaagcggcugucacc

SEQ ID NO: 8687 - RNA, 22 nt, Human
gggcaagcucuucagaagcucu

SEQ ID NO: 8688 - RNA, 22 nt, Human
gggcaaguguuuugucugccug

SEQ ID NO: 8689 - RNA, 22 nt, Human
gggcacagcccagugggguccc

SEQ ID NO: 8690 - RNA, 22 nt, Human
gggcacagccuaacuauggaga

SEQ ID NO: 8691 - RNA, 22 nt, Human
gggcacaggaauuugggaugug

SEQ ID NO: 8692 - RNA, 22 nt, Human
gggcacauguaaagcuggagaa

SEQ ID NO: 8693 - RNA, 23 nt, Human
gggcaccaggagcaccggacagg

SEQ ID NO: 8694 - RNA, 22 nt, Human
gggcaccuggcuagugacagug

SEQ ID NO: 8695 - RNA, 22 nt, Human
gggcaccuugggucucaggcaa

SEQ ID NO: 8696 - RNA, 22 nt, Human
gggcacugaacacccucuucgc

SEQ ID NO: 8697 - RNA, 22 nt, Human
gggcacugaaugccaagcuagg

SEQ ID NO: 8698 - RNA, 22 nt, Human
gggcacugagaauuuuccacuu

SEQ ID NO: 8699 - RNA, 22 nt, Human
gggcacugcuggaggcucccug

SEQ ID NO: 8700 - RNA, 22 nt, Human
gggcacugcuuugcucugucac

SEQ ID NO: 8701 - RNA, 22 nt, Human
gggcacuggccgcccaucccug

SEQ ID NO: 8702 - RNA, 22 nt, Human
gggcacugggucuucuccacgc

SEQ ID NO: 8703 - RNA, 22 nt, Human
gggcacuggugcugccaucuug

SEQ ID NO: 8704 - RNA, 22 nt, Human
gggcagagguucaacuucaaca

SEQ ID NO: 8705 - RNA, 22 nt, Human
gggcagauggggcacaggcuga

SEQ ID NO: 8706 - RNA, 22 nt, Human
gggcagcacagacagugaaggc

SEQ ID NO: 8707 - RNA, 21 nt, Human
gggcagcacgucauuccugug

SEQ ID NO: 8708 - RNA, 22 nt, Human
gggcagcacguuucaggaggau

SEQ ID NO: 8709 - RNA, 22 nt, Human
gggcagcacucauaccuauauu

SEQ ID NO: 8710 - RNA, 22 nt, Human
gggcagcagaggaucccuuaau

SEQ ID NO: 8711 - RNA, 22 nt, Human
gggcagcauucugugggcaggu

SEQ ID NO: 8712 - RNA, 22 nt, Human
gggcagccgcgugaccugccag

SEQ ID NO: 8713 - RNA, 20 nt, Human
gggcagccucgggagugggu

SEQ ID NO: 8714 - RNA, 22 nt, Human
gggcagcuccuguggaauccac

SEQ ID NO: 8715 - RNA, 22 nt, Human
gggcagcucugcccaucagagg

SEQ ID NO: 8716 - RNA, 22 nt, Human
gggcagcuggcuuauagguuug

SEQ ID NO: 8717 - RNA, 22 nt, Human
gggcagcuguaucugagcuuau

SEQ ID NO: 8718 - RNA, 22 nt, Human
ggggugggguuacucauugugc

SEQ ID NO: 8719 - RNA, 20 nt, Human
gggguugacccucuuggacu

SEQ ID NO: 8720 - RNA, 22 nt, Human
gggguugguuuaaaugcuugag

SEQ ID NO: 8721 - RNA, 22 nt, Human
ggguaagcugcuuuaucucucu

SEQ ID NO: 8722 - RNA, 22 nt, Human
ggguaaggucagccagaaguuc

SEQ ID NO: 8723 - RNA, 22 nt, Human
ggguacuuaauauuuacggggu

SEQ ID NO: 8724 - RNA, 21 nt, Human
ggguagcagaggaggccgugg

SEQ ID NO: 8725 - RNA, 22 nt, Human
ggguagcaugugucagaguuug

SEQ ID NO: 8726 - RNA, 22 nt, Human
ggguaggaaauccagagguggc

SEQ ID NO: 8727 - RNA, 22 nt, Human
ggguaggaugguagaagggacc

SEQ ID NO: 8728 - RNA, 22 nt, Human
ggguaggccgugggucaccagg

SEQ ID NO: 8729 - RNA, 22 nt, Human
ggguaggcugcuccuggggccc

SEQ ID NO: 8730 - RNA, 18 nt, Human
ggguauccagaacugguc

SEQ ID NO: 8731 - RNA, 22 nt, Human
ggguauuugacaaacugacacu

SEQ ID NO: 8732 - RNA, 22 nt, Human
gggucaagccguugcccaaggc

SEQ ID NO: 8733 - RNA, 22 nt, Human
gggucacuuuugcuauguuggc

SEQ ID NO: 8734 - RNA, 22 nt, Human
ggguccagacacuccagaggaa

SEQ ID NO: 8735 - RNA, 22 nt, Human
ggguccagagccucagcccaga

SEQ ID NO: 8736 - RNA, 22 nt, Human
ggguccagaguugaagagguua

SEQ ID NO: 8737 - RNA, 16 nt, Human
ggguccagaucugcuc

SEQ ID NO: 8738 - RNA, 22 nt, Human
ggguccagauggugagaguuaa

SEQ ID NO: 8739 - RNA, 20 nt, Human
ggguccaggacucugaauuu

SEQ ID NO: 8740 - RNA, 22 nt, Human
ggguccagggacguuucugcag

SEQ ID NO: 8741 - RNA, 22 nt, Human
ggguccaguuucaucugagguu

SEQ ID NO: 8742 - RNA, 22 nt, Human
gggucccaggaaggagcagugu

SEQ ID NO: 8743 - RNA, 22 nt, Human
ggguccccucaucauggagacu

SEQ ID NO: 8744 - RNA, 22 nt, Human
ggguccuggaaucugcauuuua

SEQ ID NO: 8745 - RNA, 21 nt, Human
ggguccugggaugggauccag

SEQ ID NO: 8746 - RNA, 22 nt, Human
gggucuaggagacaugggcaag

SEQ ID NO: 8747 - RNA, 22 nt, Human
gggucuccauguuaacaucacu

SEQ ID NO: 8748 - RNA, 22 nt, Human
gggucuccugagagaagaugcu

SEQ ID NO: 8749 - RNA, 22 nt, Human
gggucucuccuccccagcugug

SEQ ID NO: 8750 - RNA, 22 nt, Human
gggucugagcugaggggaaauc

SEQ ID NO: 8751 - RNA, 22 nt, Human
gggucugcuccaccugcagccc

SEQ ID NO: 8752 - RNA, 22 nt, Human
gggucuggagggcagcccuucu

SEQ ID NO: 8753 - RNA, 22 nt, Human
gggucuucauuuauucuacacu

SEQ ID NO: 8754 - RNA, 22 nt, Human
gggucuucgccgccgccauaac

SEQ ID NO: 8755 - RNA, 22 nt, Human
gggugacagcagcuaaugacag

SEQ ID NO: 8756 - RNA, 22 nt, Human
gggugacauuaggaagauagac

SEQ ID NO: 8757 - RNA, 22 nt, Human
gggugagagucaggcagagauu

SEQ ID NO: 8758 - RNA, 22 nt, Human
gggugaggcccauuugaggcca

SEQ ID NO: 8759 - RNA, 22 nt, Human
gggugaggccuugcugccauca

SEQ ID NO: 8760 - RNA, 22 nt, Human
gggugcaaacccguucugcacc

SEQ ID NO: 8761 - RNA, 22 nt, Human
gggugcaggcagcccaggcagg

SEQ ID NO: 8762 - RNA, 22 nt, Human
gggugcaggggacccuagggac

SEQ ID NO: 8763 - RNA, 22 nt, Human
gggugccugaguuagggcagaa

SEQ ID NO: 8764 - RNA, 22 nt, Human
gggugcgguccccacagcccgu

SEQ ID NO: 8765 - RNA, 22 nt, Human
gggugcugggaggcugacaucu

SEQ ID NO: 8766 - RNA, 22 nt, Human
ggguggaauuguuggcaucgga

SEQ ID NO: 8767 - RNA, 22 nt, Human
ggguggagagaaagaaacguga

SEQ ID NO: 8768 - RNA, 22 nt, Human
ggguggagccaguugacucugu

SEQ ID NO: 8769 - RNA, 22 nt, Human
ggguggagcuuggacaccagua

SEQ ID NO: 8770 - RNA, 22 nt, Human
ggguggcagcuguugccaaggu

SEQ ID NO: 8771 - RNA, 22 nt, Human
ggguggcaggauuggcaggagu

SEQ ID NO: 8772 - RNA, 22 nt, Human
ggguggccuuaggcaagucacu

SEQ ID NO: 8773 - RNA, 20 nt, Human
gggugggagagucugagggu

SEQ ID NO: 8774 - RNA, 17 nt, Human
gggugggcacugcuggc

SEQ ID NO: 8775 - RNA, 21 nt, Human
ggguggguggaauuaggagug

SEQ ID NO: 8776 - RNA, 16 nt, Human
ggguggucuuggagac

SEQ ID NO: 8777 - RNA, 22 nt, Human
gggugguggcggaggcuccagg

SEQ ID NO: 8778 - RNA, 22 nt, Human
ggguguagaaagaacccucugg

SEQ ID NO: 8779 - RNA, 22 nt, Human
ggguguccagggcgugucugga

SEQ ID NO: 8780 - RNA, 22 nt, Human
ggguguccugugccaagcuggg

SEQ ID NO: 8781 - RNA, 22 nt, Human
ggguguguuccuaaggaaacca

SEQ ID NO: 8782 - RNA, 18 nt, Human
ggguucaccugccuuugg

SEQ ID NO: 8783 - RNA, 22 nt, Human
ggguucagacuaaagcuaugca

SEQ ID NO: 8784 - RNA, 22 nt, Human
ggguucagagucaggugugaua

SEQ ID NO: 8785 - RNA, 22 nt, Human
ggguucccugccuggccacucu

SEQ ID NO: 8786 - RNA, 22 nt, Human
ggguugaggcggaugucggcgg

SEQ ID NO: 8787 - RNA, 22 nt, Human
gguaaaaaucacaaauacuuua

SEQ ID NO: 8788 - RNA, 22 nt, Human
gguaacacauggaacauuuaca

SEQ ID NO: 8789 - RNA, 22 nt, Human
gguaacugcagaaugugccuca

SEQ ID NO: 8790 - RNA, 22 nt, Human
gguaagcacuucauguacauga

SEQ ID NO: 8791 - RNA, 22 nt, Human
gguacacauugugacuguauua

SEQ ID NO: 8792 - RNA, 22 nt, Human
gguacagaauaaaaauccuaca

SEQ ID NO: 8793 - RNA, 22 nt, Human
gguacauuuuucugucacuuug

SEQ ID NO: 8794 - RNA, 22 nt, Human
gguagaaggggaagagguccau

SEQ ID NO: 8795 - RNA, 22 nt, Human
gguagacaacuuuguaauagcc

SEQ ID NO: 8796 - RNA, 20 nt, Human
gguagcagcugcugucaucc

SEQ ID NO: 8797 - RNA, 20 nt, Human
gguagcugcugcaguuggua

SEQ ID NO: 8798 - RNA, 22 nt, Human
gguaggaguauuuugcagcagu

SEQ ID NO: 8799 - RNA, 22 nt, Human
gguaggagugaagacuuaagau

SEQ ID NO: 8800 - RNA, 22 nt, Human
gguaggcagaucacugucuaug

SEQ ID NO: 8801 - RNA, 22 nt, Human
gguagggaugggauuuggaagu

SEQ ID NO: 8802 - RNA, 22 nt, Human
gguaggggaagacaagugaaaa

SEQ ID NO: 8803 - RNA, 22 nt, Human
gguaguacauggaagaguacac

SEQ ID NO: 8804 - RNA, 22 nt, Human
gguagucauggauagcuaugag

SEQ ID NO: 8805 - RNA, 22 nt, Human
gguagugaggugaaagagaggu

SEQ ID NO: 8806 - RNA, 22 nt, Human
gguauaaaugaucagaucgcug

SEQ ID NO: 8807 - RNA, 22 nt, Human
gguaucaaagaagggggugcca

SEQ ID NO: 8808 - RNA, 22 nt, Human
gguauuuauaugucugaagcug

SEQ ID NO: 8809 - RNA, 22 nt, Human
ggucaaagggugagauggcagg

SEQ ID NO: 8810 - RNA, 22 nt, Human
ggucaagacgggcucugcccuu

SEQ ID NO: 8811 - RNA, 22 nt, Human
ggucacaaggcagauaauaagg

SEQ ID NO: 8812 - RNA, 22 nt, Human
ggucacaagguacuguaagaaa

SEQ ID NO: 8813 - RNA, 22 nt, Human
ggucacagggaagggcucucaa

SEQ ID NO: 8814 - RNA, 22 nt, Human
ggucacaggggagaagagugau

SEQ ID NO: 8815 - RNA, 22 nt, Human
ggucacauauccucgguuugga

SEQ ID NO: 8816 - RNA, 22 nt, Human
ggucacaugugauuugagccaa

SEQ ID NO: 8817 - RNA, 22 nt, Human
ggucacauucugagguauuagg

SEQ ID NO: 8818 - RNA, 22 nt, Human
ggucacugcucuaaacaaaagu

SEQ ID NO: 8819 - RNA, 22 nt, Human
ggucacugucuucugggcucug

SEQ ID NO: 8820 - RNA, 22 nt, Human
ggucagagcuggagagauaggg

SEQ ID NO: 8821 - RNA, 22 nt, Human
ggucagcagugcagggcagagc

SEQ ID NO: 8822 - RNA, 22 nt, Human
ggucagcaguuucuuugaauuu

SEQ ID NO: 8823 - RNA, 19 nt, Human
ggucagcugggcuagaggc

SEQ ID NO: 8824 - RNA, 22 nt, Human
ggucaggauccaagucugugcu

SEQ ID NO: 8825 - RNA, 21 nt, Human
ggucaggcaugugcccugagc

SEQ ID NO: 8826 - RNA, 22 nt, Human
ggucagggcucuuccaguggcu

SEQ ID NO: 8827 - RNA, 22 nt, Human
gggaugacaaagugucuguccc

SEQ ID NO: 8828 - RNA, 22 nt, Human
gggaugagagcugggacagaag

SEQ ID NO: 8829 - RNA, 22 nt, Human
gggaugcagacuacagggcuua

SEQ ID NO: 8830 - RNA, 22 nt, Human
gggaugcaguauguauauuuuc

SEQ ID NO: 8831 - RNA, 22 nt, Human
gggaugcagucagagccccugu

SEQ ID NO: 8832 - RNA, 22 nt, Human
gggaugccaguccuggcccugc

SEQ ID NO: 8833 - RNA, 22 nt, Human
gggauggaucuuggcugaggcu

SEQ ID NO: 8834 - RNA, 22 nt, Human
gggauggcugccugcaucagga

SEQ ID NO: 8835 - RNA, 22 nt, Human
gggaugguggcuugcaucugua

SEQ ID NO: 8836 - RNA, 22 nt, Human
gggauucaucaacuguuuuaca

SEQ ID NO: 8837 - RNA, 22 nt, Human
gggcaaaaccugggcaucauga

SEQ ID NO: 8838 - RNA, 22 nt, Human
gggcaaaggcagaaagcggugu

SEQ ID NO: 8839 - RNA, 22 nt, Human
gggcaacagagcgagggccugu

SEQ ID NO: 8840 - RNA, 22 nt, Human
gggcaagaagcuggaagcauuc

SEQ ID NO: 8841 - RNA, 22 nt, Human
gggcaagcuuugaacaucagca

SEQ ID NO: 8842 - RNA, 22 nt, Human
gggcaauggaugugaugacucc

SEQ ID NO: 8843 - RNA, 22 nt, Human
gggcaauucacaggguuguuau

SEQ ID NO: 8844 - RNA, 22 nt, Human
gggcacaccuugucugagcaca

SEQ ID NO: 8845 - RNA, 22 nt, Human
gggcacagagaagguuuuagug

SEQ ID NO: 8846 - RNA, 22 nt, Human
gggcacagagggucuugaagaa

SEQ ID NO: 8847 - RNA, 22 nt, Human
gggcacaggagaaggaucuggc

SEQ ID NO: 8848 - RNA, 22 nt, Human
gggcacaguacuccaaucaacu

SEQ ID NO: 8849 - RNA, 22 nt, Human
gggcacagucuaaaguugggcc

SEQ ID NO: 8850 - RNA, 22 nt, Human
gggcaccagcggccgcacugcc

SEQ ID NO: 8851 - RNA, 22 nt, Human
gggcacugagggcccacaggau

SEQ ID NO: 8852 - RNA, 22 nt, Human
gggcacuggcagucggggacgc

SEQ ID NO: 8853 - RNA, 22 nt, Human
gggcacuguggggcccaugcug

SEQ ID NO: 8854 - RNA, 22 nt, Human
gggcagagaaauggacaguugg

SEQ ID NO: 8855 - RNA, 21 nt, Human
gggcagaggggccuccugggu

SEQ ID NO: 8856 - RNA, 22 nt, Human
gggcagaggggcgcuucccucu

SEQ ID NO: 8857 - RNA, 22 nt, Human
gggcagcaaaucugagucuggu

SEQ ID NO: 8858 - RNA, 18 nt, Human
gggcagcacagcagccuc

SEQ ID NO: 8859 - RNA, 22 nt, Human
gggaggagcuuggagauucacu

SEQ ID NO: 8860 - RNA, 22 nt, Human
gggaggagggugcuggcuaaac

SEQ ID NO: 8861 - RNA, 22 nt, Human
gggaggcacgaggcgcgcagug

SEQ ID NO: 8862 - RNA, 22 nt, Human
gggagggacacaaagaguuccc

SEQ ID NO: 8863 - RNA, 22 nt, Human
gggagggaggugaugcuuggcu

SEQ ID NO: 8864 - RNA, 22 nt, Human
gggagggaucugcuaggcaaug

SEQ ID NO: 8865 - RNA, 22 nt, Human
gggagggguugcauguuugagu

SEQ ID NO: 8866 - RNA, 22 nt, Human
gggaggugaaagguugcugcag

SEQ ID NO: 8867 - RNA, 22 nt, Human
gggaggugauuaggaccaugua

SEQ ID NO: 8868 - RNA, 22 nt, Human
gggagguguucugccaacgcgg

SEQ ID NO: 8869 - RNA, 22 nt, Human
gggagugguugauggugaaaau

SEQ ID NO: 8870 - RNA, 22 nt, Human
gggagugugcagaagcuggggg

SEQ ID NO: 8871 - RNA, 18 nt, Human
gggauauaucagugaaga

SEQ ID NO: 8872 - RNA, 23 nt, Human
gggauauggaccuuggaggaguc

SEQ ID NO: 8873 - RNA, 22 nt, Human
gggaucagacucugggauguag

SEQ ID NO: 8874 - RNA, 22 nt, Human
gggaucagcaagccacugcacc

SEQ ID NO: 8875 - RNA, 19 nt, Human
gggaucagcccagggcucu

SEQ ID NO: 8876 - RNA, 18 nt, Human
gggaucaggcugccuagg

SEQ ID NO: 8877 - RNA, 22 nt, Human
gggaucaguuaaggagaguuuu

SEQ ID NO: 8878 - RNA, 22 nt, Human
gggaucuggaauuuugguaugu

SEQ ID NO: 8879 - RNA, 23 nt, Human
gggaucuguaaguugaagacaaa

SEQ ID NO: 8880 - RNA, 20 nt, Human
gggaucuuccaggcucuccu

SEQ ID NO: 8881 - RNA, 22 nt, Human
gggaugagaguagggugugaaa

SEQ ID NO: 8882 - RNA, 20 nt, Human
gggaugagaguccuagcucu

SEQ ID NO: 8883 - RNA, 22 nt, Human
gggaugauaaugccagaguuaa

SEQ ID NO: 8884 - RNA, 22 nt, Human
gggauggacugacgguagcgcg

SEQ ID NO: 8885 - RNA, 22 nt, Human
gggauggacuuggggacuccag

SEQ ID NO: 8886 - RNA, 22 nt, Human
gggauggccuagacuagcuugg

SEQ ID NO: 8887 - RNA, 22 nt, Human
gggauggcuuuguggcugacuc

SEQ ID NO: 8888 - RNA, 22 nt, Human
gggaugggagagcauuuagaga

SEQ ID NO: 8889 - RNA, 19 nt, Human
gggaugggcccucacccuc

SEQ ID NO: 8890 - RNA, 22 nt, Human
gggauggggucaacauguaccu

SEQ ID NO: 8891 - RNA, 22 nt, Human
gggauuuaguaggauaguauac

SEQ ID NO: 8892 - RNA, 22 nt, Human
gggauuucaccauguugguugg

SEQ ID NO: 8893 - RNA, 22 nt, Human
gggcaaaauacuuauaaaggcu

SEQ ID NO: 8894 - RNA, 19 nt, Human
gggcaaagugaucguccug

SEQ ID NO: 8895 - RNA, 22 nt, Human
gggcaacugaaaaauuguauuc

SEQ ID NO: 8896 - RNA, 22 nt, Human
gggcaaggcagaagaguuggag

SEQ ID NO: 8897 - RNA, 22 nt, Human
gggcaaguccggugcccagagc

SEQ ID NO: 8898 - RNA, 22 nt, Human
gggcaagugucaagcaugucau

SEQ ID NO: 8899 - RNA, 22 nt, Human
gggcaaguugagaagaaugcua

SEQ ID NO: 8900 - RNA, 22 nt, Human
gggcaaugggcuuuucuguaag

SEQ ID NO: 8901 - RNA, 19 nt, Human
gggcacagccuccccccag

SEQ ID NO: 8902 - RNA, 22 nt, Human
gggcacagcugcuacccagugc

SEQ ID NO: 8903 - RNA, 22 nt, Human
gggcacagucugcagcccccca

SEQ ID NO: 8904 - RNA, 21 nt, Human
gggcacugaaagggaauagca

SEQ ID NO: 8905 - RNA, 22 nt, Human
gggcacugacagggucccaacu

SEQ ID NO: 8906 - RNA, 22 nt, Human
gggcacugaguggaugaugcag

SEQ ID NO: 8907 - RNA, 22 nt, Human
gggcacuggaggccaaggagcu

SEQ ID NO: 8908 - RNA, 22 nt, Human
gggcacugugcuaggugcugag

SEQ ID NO: 8909 - RNA, 22 nt, Human
gggcacugugcugggugcuuua

SEQ ID NO: 8910 - RNA, 19 nt, Human
gggcagaauggcaucucag

SEQ ID NO: 8911 - RNA, 22 nt, Human
gggcagagacucagaaacagaa

SEQ ID NO: 8912 - RNA, 22 nt, Human
gggcagaggcucuggcccaucc

SEQ ID NO: 8913 - RNA, 22 nt, Human
gggcagaugucuggacaccuca

SEQ ID NO: 8914 - RNA, 22 nt, Human
gggcagcaugaggacccucauc

SEQ ID NO: 8915 - RNA, 22 nt, Human
gggcagcauuugaaaaacagau

SEQ ID NO: 8916 - RNA, 22 nt, Human
gggcagcccagaacugcugcag

SEQ ID NO: 8917 - RNA, 22 nt, Human
gggcagccucggugccugcugc

SEQ ID NO: 8918 - RNA, 22 nt, Human
gggcagcucagccaccaugcag

SEQ ID NO: 8919 - RNA, 22 nt, Human
gggcagcucucacagcagccaa

SEQ ID NO: 8920 - RNA, 22 nt, Human
gggcagcucuggcugugggaag

SEQ ID NO: 8921 - RNA, 22 nt, Human
gggcaggcugagcaugucaccu

SEQ ID NO: 8922 - RNA, 22 nt, Human
gggcaggucugggucagccuga

SEQ ID NO: 8923 - RNA, 22 nt, Human
gggcagguggccucuuguacua

SEQ ID NO: 8924 - RNA, 22 nt, Human
gggcagguguugucaaucuaau

SEQ ID NO: 8925 - RNA, 22 nt, Human
gggcagguguuuccaaggugag

SEQ ID NO: 8926 - RNA, 23 nt, Human
gggcagguuuuuauaggcuucag

SEQ ID NO: 8927 - RNA, 22 nt, Human
gggcagugacaaaggggaugaa

SEQ ID NO: 8928 - RNA, 22 nt, Human
gggcaguggcucacgccuguaa

SEQ ID NO: 8929 - RNA, 22 nt, Human
gggcagugguccaggcuacagc

SEQ ID NO: 8930 - RNA, 22 nt, Human
gggcaguguugcucucaaaguc

SEQ ID NO: 8931 - RNA, 22 nt, Human
gggcaguuuauucuagaugguu

SEQ ID NO: 8932 - RNA, 18 nt, Human
gggcaucauucacaaagu

SEQ ID NO: 8933 - RNA, 21 nt, Human
gggcauccuuucccacccugc

SEQ ID NO: 8934 - RNA, 22 nt, Human
gggcaugccugcgcagugcaug

SEQ ID NO: 8935 - RNA, 23 nt, Human
gggcauggaguguagguggaagg

SEQ ID NO: 8936 - RNA, 22 nt, Human
uccaggcugugcgcaccgugug

SEQ ID NO: 8937 - RNA, 22 nt, Human
uccaggcuugagaccaggcucu

SEQ ID NO: 8938 - RNA, 22 nt, Human
uccaggcuuuuucaugcugucu

SEQ ID NO: 8939 - RNA, 22 nt, Human
uccagggaaggugugaggcugg

SEQ ID NO: 8940 - RNA, 21 nt, Human
uccagggaauuucaacuuuua

SEQ ID NO: 8941 - RNA, 22 nt, Human
uccagggaucuuuagagucuuu

SEQ ID NO: 8942 - RNA, 22 nt, Human
uccagggaugguaaugagcagu

SEQ ID NO: 8943 - RNA, 20 nt, Human
uccagggcaacuagagugug

SEQ ID NO: 8944 - RNA, 22 nt, Human
uccagggcagggugcgcauggg

SEQ ID NO: 8945 - RNA, 23 nt, Human
uccagggcaguggcugggucugc

SEQ ID NO: 8946 - RNA, 22 nt, Human
uccagggccacagaggaugcua

SEQ ID NO: 8947 - RNA, 22 nt, Human
uccagggccaugaaguugcaca

SEQ ID NO: 8948 - RNA, 22 nt, Human
uccagggccccccaguugcacg

SEQ ID NO: 8949 - RNA, 22 nt, Human
uccagggccugagguugaagug

SEQ ID NO: 8950 - RNA, 21 nt, Human
uccaggggccagcacccaagc

SEQ ID NO: 8951 - RNA, 19 nt, Human
uccaggggcuccaccuccu

SEQ ID NO: 8952 - RNA, 22 nt, Human
uccaggggcugucuuggaaucu

SEQ ID NO: 8953 - RNA, 22 nt, Human
uccagguacucauuggcuguua

SEQ ID NO: 8954 - RNA, 22 nt, Human
uccagguaggccaagacagcua

SEQ ID NO: 8955 - RNA, 22 nt, Human
uccagguaucuggcuuccacau

SEQ ID NO: 8956 - RNA, 22 nt, Human
uccagguaucuuuaugaaacuu

SEQ ID NO: 8957 - RNA, 22 nt, Human
uccagguaugacaggccacucc

SEQ ID NO: 8958 - RNA, 22 nt, Human
uccagguaugacauggcuguuu

SEQ ID NO: 8959 - RNA, 22 nt, Human
uccagguccagagguucaacug

SEQ ID NO: 8960 - RNA, 22 nt, Human
uccaggucccuggggagauuuu

SEQ ID NO: 8961 - RNA, 22 nt, Human
uccaggucuggccugcuaggca

SEQ ID NO: 8962 - RNA, 22 nt, Human
uccaggucugguuggacagguu

SEQ ID NO: 8963 - RNA, 22 nt, Human
uccaggucuuccuauuccaggu

SEQ ID NO: 8964 - RNA, 22 nt, Human
uccaggugugcucugugcccug

SEQ ID NO: 8965 - RNA, 22 nt, Human
uccagguuuucugaaggcagga

SEQ ID NO: 8966 - RNA, 22 nt, Human
uccaguacaggucucucauuuc

SEQ ID NO: 8967 - RNA, 22 nt, Human
uccaguaucaaaguccuagucc

SEQ ID NO: 8968 - RNA, 22 nt, Human
uccagucaugguguccucacaa

SEQ ID NO: 8969 - RNA, 22 nt, Human
uccagucccuugccuccacagc

SEQ ID NO: 8970 - RNA, 22 nt, Human
uccaguccuagaaacuggagag

SEQ ID NO: 8971 - RNA, 23 nt, Human
uccagucuccugaaaggcagcgu

SEQ ID NO: 8972 - RNA, 22 nt, Human
uccagugcaauggcucauucau

SEQ ID NO: 8973 - RNA, 22 nt, Human
uccagugcauucagacacuugg

SEQ ID NO: 8974 - RNA, 22 nt, Human
uccaguggcaccuuggcccuca

SEQ ID NO: 8975 - RNA, 22 nt, Human
uccaguggcaggcggugagguc

SEQ ID NO: 8976 - RNA, 22 nt, Human
gggcagcauaacaaucacugaa

SEQ ID NO: 8977 - RNA, 22 nt, Human
gggcagcaucaggaggggcuuu

SEQ ID NO: 8978 - RNA, 22 nt, Human
gggcagcucggaagugggaaag

SEQ ID NO: 8979 - RNA, 22 nt, Human
gggcagcucuuugguauccuuc

SEQ ID NO: 8980 - RNA, 22 nt, Human
gggcagcugcagggauggugac

SEQ ID NO: 8981 - RNA, 22 nt, Human
gggcagcugccaagugcaucgc

SEQ ID NO: 8982 - RNA, 22 nt, Human
gggcagcugccacuccgcuugc

SEQ ID NO: 8983 - RNA, 22 nt, Human
gggcagcugccccucucugggc

SEQ ID NO: 8984 - RNA, 22 nt, Human
gggcagcuggccagguauucug

SEQ ID NO: 8985 - RNA, 22 nt, Human
gggcagcugucuugguucucaa

SEQ ID NO: 8986 - RNA, 23 nt, Human
gggcagcuuaagcuuguuuuucu

SEQ ID NO: 8987 - RNA, 22 nt, Human
gggcaggagaagguggaugucc

SEQ ID NO: 8988 - RNA, 22 nt, Human
gggcaggagagaacagucaugg

SEQ ID NO: 8989 - RNA, 22 nt, Human
gggcagggguagcauuccaagu

SEQ ID NO: 8990 - RNA, 21 nt, Human
gggcaggucucugaugucaac

SEQ ID NO: 8991 - RNA, 22 nt, Human
gggcagucacagugcuggagca

SEQ ID NO: 8992 - RNA, 22 nt, Human
gggcagugaauauuggugggaa

SEQ ID NO: 8993 - RNA, 19 nt, Human
gggcaguggcacuagggag

SEQ ID NO: 8994 - RNA, 20 nt, Human
gggcaguggcgcuaucucag

SEQ ID NO: 8995 - RNA, 22 nt, Human
gggcaguggguggcugcagccu

SEQ ID NO: 8996 - RNA, 22 nt, Human
gggcagugucuggcccccaggc

SEQ ID NO: 8997 - RNA, 22 nt, Human
gggcaguguugugguucucuau

SEQ ID NO: 8998 - RNA, 22 nt, Human
gggcaguugauggaggucugga

SEQ ID NO: 8999 - RNA, 22 nt, Human
gggcaucugguggagccucagg

SEQ ID NO: 9000 - RNA, 22 nt, Human
gggcaugcaggacuguggcaga

SEQ ID NO: 9001 - RNA, 22 nt, Human
gggcaugccugagccugccacu

SEQ ID NO: 9002 - RNA, 22 nt, Human
gggcaugguggugcacaccugu

SEQ ID NO: 9003 - RNA, 22 nt, Human
gggcauguacauaaucuagaaa

SEQ ID NO: 9004 - RNA, 22 nt, Human
gggcauguagugugcauagaga

SEQ ID NO: 9005 - RNA, 22 nt, Human
gggcauuucuugucaauguagg

SEQ ID NO: 9006 - RNA, 22 nt, Human
gggccaagggugcguggcagga

SEQ ID NO: 9007 - RNA, 22 nt, Human
gggccacaggccuugcccgcag

SEQ ID NO: 9008 - RNA, 21 nt, Human
gggccacucuagagaaagaaa

SEQ ID NO: 9009 - RNA, 22 nt, Human
gggccagaccucuucucaggga

SEQ ID NO: 9010 - RNA, 22 nt, Human
gggccagcaguaucggaggcau

SEQ ID NO: 9011 - RNA, 22 nt, Human
gggccagcucugugauguaggg

SEQ ID NO: 9012 - RNA, 22 nt, Human
gggccaggucggugaaugguca

SEQ ID NO: 9013 - RNA, 22 nt, Human
gggcccagcgugguuccaucug

SEQ ID NO: 9014 - RNA, 22 nt, Human
gggccccaaaaugccaggcucu

SEQ ID NO: 9015 - RNA, 22 nt, Human
gggccccuugcugcucugcugg

SEQ ID NO: 9016 - RNA, 22 nt, Human
gggcccugccccguggcucuga

SEQ ID NO: 9017 - RNA, 22 nt, Human
gggcccugcgacucgcggcgga

SEQ ID NO: 9018 - RNA, 22 nt, Human
gggcccuggggauguggacgcg

SEQ ID NO: 9019 - RNA, 22 nt, Human
gggccguagaccacguccgggc

SEQ ID NO: 9020 - RNA, 22 nt, Human
gggccucaccucuccaccgccu

SEQ ID NO: 9021 - RNA, 22 nt, Human
gggccucagguucuggagaagg

SEQ ID NO: 9022 - RNA, 22 nt, Human
gggccugacugagagcuccuca

SEQ ID NO: 9023 - RNA, 22 nt, Human
gggccugagacugagggugagg

SEQ ID NO: 9024 - RNA, 22 nt, Human
gggccugggaacuugcauuuag

SEQ ID NO: 9025 - RNA, 22 nt, Human
gggccugucucacucccugguu

SEQ ID NO: 9026 - RNA, 22 nt, Human
gggccuucuaguuagccccaau

SEQ ID NO: 9027 - RNA, 23 nt, Human
gggccuuggauuuguggaguuca

SEQ ID NO: 9028 - RNA, 22 nt, Human
gggcgcugggugucgagacuca

SEQ ID NO: 9029 - RNA, 22 nt, Human
gggcgggguggcucaugccugu

SEQ ID NO: 9030 - RNA, 22 nt, Human
gggcguggauggucagugcagg

SEQ ID NO: 9031 - RNA, 22 nt, Human
gggcuaagugaagauugcucca

SEQ ID NO: 9032 - RNA, 22 nt, Human
gggcuagaaguuagcuagagaa

SEQ ID NO: 9033 - RNA, 22 nt, Human
gggcuagggccugcuaugguuu

SEQ ID NO: 9034 - RNA, 20 nt, Human
gggcuagguagccauuuggc

SEQ ID NO: 9035 - RNA, 22 nt, Human
gggcucaggaguuugaggcugc

SEQ ID NO: 9036 - RNA, 22 nt, Human
gggcucaggccuggccucucac

SEQ ID NO: 9037 - RNA, 22 nt, Human
gggcucagggacacaugugugu

SEQ ID NO: 9038 - RNA, 21 nt, Human
gggcucaguggaaaagagugu

SEQ ID NO: 9039 - RNA, 22 nt, Human
gggcuccaaaaucuaugucuuc

SEQ ID NO: 9040 - RNA, 22 nt, Human
gggcuccaaggaggccagccug

SEQ ID NO: 9041 - RNA, 22 nt, Human
gggcuccagcuguuugccauga

SEQ ID NO: 9042 - RNA, 22 nt, Human
gggcuccaguuguccccaggau

SEQ ID NO: 9043 - RNA, 22 nt, Human
gggcuccaguuuggccaggaag

SEQ ID NO: 9044 - RNA, 22 nt, Human
gggcuccgcccuuggcugagcu

SEQ ID NO: 9045 - RNA, 22 nt, Human
gggcugugcugaguaggaggug

SEQ ID NO: 9046 - RNA, 22 nt, Human
gggcuguggagccgcgagggcu

SEQ ID NO: 9047 - RNA, 22 nt, Human
gggcuguuugcauauguuuaua

SEQ ID NO: 9048 - RNA, 22 nt, Human
gggcuuaaggccagugugcuuu

SEQ ID NO: 9049 - RNA, 22 nt, Human
gggcuucucugaucaauauuuc

SEQ ID NO: 9050 - RNA, 22 nt, Human
gggcuucucuuaugcuaacugg

SEQ ID NO: 9051 - RNA, 19 nt, Human
gggcuucugggaucaagag

SEQ ID NO: 9052 - RNA, 22 nt, Human
gggcuucuguuccuuucacuug

SEQ ID NO: 9053 - RNA, 22 nt, Human
gggcuucuugcaggggcaacau

SEQ ID NO: 9054 - RNA, 22 nt, Human
gggcuugcuuaaggucacccgg

SEQ ID NO: 9055 - RNA, 20 nt, Human
gggcuuggaggacucgaggg

SEQ ID NO: 9056 - RNA, 22 nt, Human
gggcuuggaguaggcugaugaa

SEQ ID NO: 9057 - RNA, 22 nt, Human
gggcuugguggagagaaugcug

SEQ ID NO: 9058 - RNA, 19 nt, Human
gggcuuuacuccaaguggg

SEQ ID NO: 9059 - RNA, 23 nt, Human
ggggaaagaccaugcuugaggac

SEQ ID NO: 9060 - RNA, 22 nt, Human
ggggaaauuguggcugacagug

SEQ ID NO: 9061 - RNA, 22 nt, Human
ggggaagaaaucuggguucuuc

SEQ ID NO: 9062 - RNA, 22 nt, Human
ggggaagaaugcucucuagaga

SEQ ID NO: 9063 - RNA, 22 nt, Human
ggggaagucggagccugagcac

SEQ ID NO: 9064 - RNA, 22 nt, Human
ggggacagucgaucuagugauu

SEQ ID NO: 9065 - RNA, 22 nt, Human
ggggacaguuaaagaccaagac

SEQ ID NO: 9066 - RNA, 22 nt, Human
ggggacccucaggacugcgucu

SEQ ID NO: 9067 - RNA, 22 nt, Human
ggggaccugggcuucaaggguu

SEQ ID NO: 9068 - RNA, 22 nt, Human
ggggaccuuuccauuucugaga

SEQ ID NO: 9069 - RNA, 22 nt, Human
ggggacgggacuuagcaugagu

SEQ ID NO: 9070 - RNA, 22 nt, Human
ggggacugaggcacugaaggug

SEQ ID NO: 9071 - RNA, 22 nt, Human
ggggacugccuuccacagacac

SEQ ID NO: 9072 - RNA, 19 nt, Human
ggggagaacuagagacagc

SEQ ID NO: 9073 - RNA, 22 nt, Human
ggggagcuugguuauucaugca

SEQ ID NO: 9074 - RNA, 22 nt, Human
ggggaggaagcuggaacacggg

SEQ ID NO: 9075 - RNA, 22 nt, Human
ggggaggagccauguaacuagu

SEQ ID NO: 9076 - RNA, 22 nt, Human
ggggaggccaguggaccguccc

SEQ ID NO: 9077 - RNA, 22 nt, Human
ggggagugacgcagggccauag

SEQ ID NO: 9078 - RNA, 22 nt, Human
ggggaguguuuucaugggcuug

SEQ ID NO: 9079 - RNA, 22 nt, Human
ggggauggaauguaguagugau

SEQ ID NO: 9080 - RNA, 22 nt, Human
ggggcacacuuuugguagauau

SEQ ID NO: 9081 - RNA, 22 nt, Human
ggggcaccuccucuuggcaauu

SEQ ID NO: 9082 - RNA, 22 nt, Human
ggggcacuuuacugccucaucu

SEQ ID NO: 9083 - RNA, 22 nt, Human
ggggcagcuaccggaaguaggg

SEQ ID NO: 9084 - RNA, 22 nt, Human
ggggcaggagguguucucuuuu

SEQ ID NO: 9085 - RNA, 22 nt, Human
ggggccacuggcaggaccuugg

SEQ ID NO: 9086 - RNA, 22 nt, Human
ggggccccucggacacgugcgg

SEQ ID NO: 9087 - RNA, 19 nt, Human
ggggcccggggucugcgag

SEQ ID NO: 9088 - RNA, 22 nt, Human
ggggcccuuguggcugcaggcc

SEQ ID NO: 9089 - RNA, 15 nt, Human
ggugucugcagugug

SEQ ID NO: 9090 - RNA, 22 nt, Human
ggugucuguugccuccugguua

SEQ ID NO: 9091 - RNA, 22 nt, Human
ggugugaauuuugaccuuuuaa

SEQ ID NO: 9092 - RNA, 22 nt, Human
ggugugacucgcccucagggac

SEQ ID NO: 9093 - RNA, 22 nt, Human
ggugugauuaugacaugugacu

SEQ ID NO: 9094 - RNA, 22 nt, Human
ggugugcaggcuaucacagaca

SEQ ID NO: 9095 - RNA, 22 nt, Human
ggugugcuaagagcacuuucaa

SEQ ID NO: 9096 - RNA, 22 nt, Human
gguguggcaguggaccugugaa

SEQ ID NO: 9097 - RNA, 22 nt, Human
ggugugggcccugaugucagca

SEQ ID NO: 9098 - RNA, 19 nt, Human
ggugugugcuggggccugu

SEQ ID NO: 9099 - RNA, 22 nt, Human
gguguuaacuuguuuaugacaa

SEQ ID NO: 9100 - RNA, 22 nt, Human
gguguucaaaugaacacaugca

SEQ ID NO: 9101 - RNA, 22 nt, Human
gguuaaaacugauauuaugggu

SEQ ID NO: 9102 - RNA, 22 nt, Human
gguuaaaaucuaaaaugugacu

SEQ ID NO: 9103 - RNA, 22 nt, Human
gguuaaggcuuuacagucaaac

SEQ ID NO: 9104 - RNA, 19 nt, Human
gguuaauguuaggauacuu

SEQ ID NO: 9105 - RNA, 22 nt, Human
gguuauuguggagaaguuccgg

SEQ ID NO: 9106 - RNA, 22 nt, Human
gguucacacuaagcuuaagugg

SEQ ID NO: 9107 - RNA, 22 nt, Human
gguucacauauugagaguauuc

SEQ ID NO: 9108 - RNA, 22 nt, Human
gguucagggcuaccagugggug

SEQ ID NO: 9109 - RNA, 22 nt, Human
gguucaguuuacauuaaaaucu

SEQ ID NO: 9110 - RNA, 22 nt, Human
gguuccccaggcggcccuugga

SEQ ID NO: 9111 - RNA, 22 nt, Human
gguucccggaucuccgaguccc

SEQ ID NO: 9112 - RNA, 19 nt, Human
gguuccucacgcuaagggc

SEQ ID NO: 9113 - RNA, 23 nt, Human
gguuccugagcagggaucuggaa

SEQ ID NO: 9114 - RNA, 22 nt, Human
gguuccugauagauuccuuuug

SEQ ID NO: 9115 - RNA, 22 nt, Human
gguuccuggcagauguagggcu

SEQ ID NO: 9116 - RNA, 22 nt, Human
gguuccuguacuuagcuaugua

SEQ ID NO: 9117 - RNA, 22 nt, Human
gguuccugugccucuagcuggc

SEQ ID NO: 9118 - RNA, 22 nt, Human
gguucuaggucuggggauaaug

SEQ ID NO: 9119 - RNA, 22 nt, Human
gguucuccuugagugucccagg

SEQ ID NO: 9120 - RNA, 22 nt, Human
gguugaaucauucuuugcaccg

SEQ ID NO: 9121 - RNA, 22 nt, Human
gguugcauuucucaguggaaua

SEQ ID NO: 9122 - RNA, 23 nt, Human
gguuggcuguacccaggcucccu

SEQ ID NO: 9123 - RNA, 22 nt, Human
gguuuaaugggugaaggcauga

SEQ ID NO: 9124 - RNA, 22 nt, Human
gguuuaauuaccugcaucucaa

SEQ ID NO: 9125 - RNA, 22 nt, Human
gguuuacucguaguggcgguuu

SEQ ID NO: 9126 - RNA, 22 nt, Human
gguuucaaaguggacaguuagu

SEQ ID NO: 9127 - RNA, 22 nt, Human
gguuucaacuaaaucaagaagg

SEQ ID NO: 9128 - RNA, 22 nt, Human
gguuucaacuucaaccucucca

SEQ ID NO: 9129 - RNA, 22 nt, Human
gguuucaacuuuugugaggaau

SEQ ID NO: 9130 - RNA, 22 nt, Human
gguuuccaagugguugaaaagu

SEQ ID NO: 9131 - RNA, 22 nt, Human
gguuuccaggagaagagauuug

SEQ ID NO: 9132 - RNA, 22 nt, Human
gguuucucuagggcugaccagu

SEQ ID NO: 9133 - RNA, 22 nt, Human
gguuugcacgauauuuccaugg

SEQ ID NO: 9134 - RNA, 22 nt, Human
gguuugcauucugaaaggcuca

SEQ ID NO: 9135 - RNA, 22 nt, Human
gguuuucaaagaggcauuucau

SEQ ID NO: 9136 - RNA, 22 nt, Human
guaaaaaggccaagcccuugug

SEQ ID NO: 9137 - RNA, 22 nt, Human
guaaaaggucaaggccaagucu

SEQ ID NO: 9138 - RNA, 20 nt, Human
guaaaauauggucuuugggu

SEQ ID NO: 9139 - RNA, 22 nt, Human
guaaaauucuagcaucugaaag

SEQ ID NO: 9140 - RNA, 22 nt, Human
guaaacaauagcauugccugau

SEQ ID NO: 9141 - RNA, 22 nt, Human
guaaacacuacaaaucaaggcu

SEQ ID NO: 9142 - RNA, 22 nt, Human
guaaacaggaauguggucaugg

SEQ ID NO: 9143 - RNA, 22 nt, Human
guaaacaucgacccaacagggg

SEQ ID NO: 9144 - RNA, 22 nt, Human
guaaacaugcuguguacucagc

SEQ ID NO: 9145 - RNA, 22 nt, Human
guaaacauuuucaucugugccc

SEQ ID NO: 9146 - RNA, 22 nt, Human
guaaagcagguaguugggacac

SEQ ID NO: 9147 - RNA, 16 nt, Human
guaaaggcagggaauu

SEQ ID NO: 9148 - RNA, 22 nt, Human
guaaaguucuauuugaauuuag

SEQ ID NO: 9149 - RNA, 22 nt, Human
guaaauauucccucgguuccua

SEQ ID NO: 9150 - RNA, 22 nt, Human
guaaaugugaaugucauuuagc

SEQ ID NO: 9151 - RNA, 22 nt, Human
guaaaugugacuccaccugagu

SEQ ID NO: 9152 - RNA, 22 nt, Human
guaaaugugcuucuuuuaacuu

SEQ ID NO: 9153 - RNA, 22 nt, Human
guaaauguugcauuuaugggua

SEQ ID NO: 9154 - RNA, 20 nt, Human
ucccacugggccucaguuuc

SEQ ID NO: 9155 - RNA, 22 nt, Human
ucccacugucugucuugcugca

SEQ ID NO: 9156 - RNA, 22 nt, Human
ucccacugugccuguuguaauc

SEQ ID NO: 9157 - RNA, 22 nt, Human
ucccagaagagaugccacuuga

SEQ ID NO: 9158 - RNA, 22 nt, Human
ucccagaagugaaauuucuaga

SEQ ID NO: 9159 - RNA, 22 nt, Human
ucccagaaucuuuggaagagca

SEQ ID NO: 9160 - RNA, 22 nt, Human
ucccagagacaucauuucuccg

SEQ ID NO: 9161 - RNA, 22 nt, Human
ucccagagccaagcuauggaug

SEQ ID NO: 9162 - RNA, 22 nt, Human
ucccagaggacuguuggugcua

SEQ ID NO: 9163 - RNA, 22 nt, Human
ucccagaggucucugcugguuc

SEQ ID NO: 9164 - RNA, 22 nt, Human
ucccagagucagagguggggcc

SEQ ID NO: 9165 - RNA, 22 nt, Human
ucccagcagggccgaccagccu

SEQ ID NO: 9166 - RNA, 22 nt, Human
ucccagcagucagagcuaugug

SEQ ID NO: 9167 - RNA, 22 nt, Human
ucccagccauuccuuuaggugu

SEQ ID NO: 9168 - RNA, 22 nt, Human
ucccagcccagauuugugugac

SEQ ID NO: 9169 - RNA, 22 nt, Human
ucccagcccagguaugaugaua

SEQ ID NO: 9170 - RNA, 23 nt, Human
ucccagccucuucucuugcauac

SEQ ID NO: 9171 - RNA, 22 nt, Human
ucccagccuuaucuccccuggc

SEQ ID NO: 9172 - RNA, 22 nt, Human
ucccagccuuccuuguggugaa

SEQ ID NO: 9173 - RNA, 22 nt, Human
ucccagccuuucuuuucugcug

SEQ ID NO: 9174 - RNA, 22 nt, Human
ucccagcuacucuagaggcuga

SEQ ID NO: 9175 - RNA, 22 nt, Human
ucccagcucacauaugguaacu

SEQ ID NO: 9176 - RNA, 22 nt, Human
ucccagcugagauugagcaagg

SEQ ID NO: 9177 - RNA, 21 nt, Human
ucccagcugggucagugcugc

SEQ ID NO: 9178 - RNA, 19 nt, Human
ucccaggaaccuuuuauuu

SEQ ID NO: 9179 - RNA, 22 nt, Human
ucccaggaagaucccagggacc

SEQ ID NO: 9180 - RNA, 22 nt, Human
ucccaggaauccguccucuaga

SEQ ID NO: 9181 - RNA, 22 nt, Human
ucccaggacaggccacauggaa

SEQ ID NO: 9182 - RNA, 22 nt, Human
ucccaggauguuuauggcuggu

SEQ ID NO: 9183 - RNA, 22 nt, Human
ucccaggcaaaggcagcucauu

SEQ ID NO: 9184 - RNA, 22 nt, Human
ucccaggcagcuucuuucauca

SEQ ID NO: 9185 - RNA, 22 nt, Human
ucccaggcaggugacaggggga

SEQ ID NO: 9186 - RNA, 16 nt, Human
ucccaggccaggugga

SEQ ID NO: 9187 - RNA, 22 nt, Human
ucccaggcgccugguggggagc

SEQ ID NO: 9188 - RNA, 22 nt, Human
ucccaggcuaccagugagguca

SEQ ID NO: 9189 - RNA, 22 nt, Human
ucccaggcuggggccaggugac

SEQ ID NO: 9190 - RNA, 23 nt, Human
ucccagggaaggugagcgaggcu

SEQ ID NO: 9191 - RNA, 22 nt, Human
ucccagggacugggcuaggcuu

SEQ ID NO: 9192 - RNA, 22 nt, Human
ucccagggcuuuucucaugcuu

SEQ ID NO: 9193 - RNA, 22 nt, Human
ucccagucuagagccggauugg

SEQ ID NO: 9194 - RNA, 22 nt, Human
ucccagugcuacagacagggca

SEQ ID NO: 9195 - RNA, 22 nt, Human
ucccagugcugcuaaagaggua

SEQ ID NO: 9196 - RNA, 22 nt, Human
ucccaguggcuucauaaggcag

SEQ ID NO: 9197 - RNA, 22 nt, Human
ucccauauaugcaaaaauguaa

SEQ ID NO: 9198 - RNA, 18 nt, Human
ucccaucauccucuccag

SEQ ID NO: 9199 - RNA, 22 nt, Human
ucccaugugacucagcugccug

SEQ ID NO: 9200 - RNA, 22 nt, Human
ucccauguguuccucuagucua

SEQ ID NO: 9201 - RNA, 22 nt, Human
ucccauguuagguguuucuguu

SEQ ID NO: 9202 - RNA, 22 nt, Human
ucccauuuauuaauuaguuugc

SEQ ID NO: 9203 - RNA, 22 nt, Human
ucccauuucacaacaaaacugg

SEQ ID NO: 9204 - RNA, 22 nt, Human
uccccaaguaaagauccugaga

SEQ ID NO: 9205 - RNA, 22 nt, Human
gucaccagcaccaaugccacau

SEQ ID NO: 9206 - RNA, 22 nt, Human
gucaccaggucugaugcagcca

SEQ ID NO: 9207 - RNA, 22 nt, Human
gucaccagucccagcuccugaa

SEQ ID NO: 9208 - RNA, 22 nt, Human
gucaccauggauaagaaucacu

SEQ ID NO: 9209 - RNA, 22 nt, Human
gucacccugcuggcuguucagc

SEQ ID NO: 9210 - RNA, 18 nt, Human
gucaccuggaucagauua

SEQ ID NO: 9211 - RNA, 22 nt, Human
gucacuguauccagguuccagc

SEQ ID NO: 9212 - RNA, 17 nt, Human
gucacugucuaaugaag

SEQ ID NO: 9213 - RNA, 18 nt, Human
gucacuguguuucugagc

SEQ ID NO: 9214 - RNA, 22 nt, Human
gucacuuuacacuccuacuaaa

SEQ ID NO: 9215 - RNA, 22 nt, Human
gucacuuugaagcuguuuuuag

SEQ ID NO: 9216 - RNA, 22 nt, Human
gucacuuuuaagggccuuuucu

SEQ ID NO: 9217 - RNA, 22 nt, Human
gucagaaaacuucccuuugagu

SEQ ID NO: 9218 - RNA, 22 nt, Human
gucagaagcauuuguggcugaa

SEQ ID NO: 9219 - RNA, 22 nt, Human
gucagacacauuucuuucagug

SEQ ID NO: 9220 - RNA, 22 nt, Human
gucagagauggcaugaaagauu

SEQ ID NO: 9221 - RNA, 22 nt, Human
gucagagcuggaggcaaguucu

SEQ ID NO: 9222 - RNA, 18 nt, Human
gucagaggauggggaaau

SEQ ID NO: 9223 - RNA, 22 nt, Human
gucagaugauacacuguuguca

SEQ ID NO: 9224 - RNA, 22 nt, Human
gucagcaaaaaauuuaugugag

SEQ ID NO: 9225 - RNA, 19 nt, Human
gucagcaccauggacaggg

SEQ ID NO: 9226 - RNA, 21 nt, Human
gucagcagauccagcacuugu

SEQ ID NO: 9227 - RNA, 22 nt, Human
gucagcagcauguuuaaucaaa

SEQ ID NO: 9228 - RNA, 17 nt, Human
gucagcagcuugcuugu

SEQ ID NO: 9229 - RNA, 22 nt, Human
gucagcaggguccccuugagug

SEQ ID NO: 9230 - RNA, 22 nt, Human
gucagcaguggcagcucccggg

SEQ ID NO: 9231 - RNA, 22 nt, Human
gucagcagugucagcucugggg

SEQ ID NO: 9232 - RNA, 22 nt, Human
gucagcaugagcaagggcugac

SEQ ID NO: 9233 - RNA, 22 nt, Human
gucagcuaugucuguuguugag

SEQ ID NO: 9234 - RNA, 22 nt, Human
gucagcucagcaggugggagug

SEQ ID NO: 9235 - RNA, 22 nt, Human
gucagcuccuagcaccccccaa

SEQ ID NO: 9236 - RNA, 19 nt, Human
gucagcuggaacucugaaa

SEQ ID NO: 9237 - RNA, 22 nt, Human
gucagcugggcaucugcagaug

SEQ ID NO: 9238 - RNA, 22 nt, Human
gucagcugucuccccagagugg

SEQ ID NO: 9239 - RNA, 22 nt, Human
gucagcuucccuuugguuuauu

SEQ ID NO: 9240 - RNA, 22 nt, Human
gucaggaaaaauugauaauuuu

SEQ ID NO: 9241 - RNA, 22 nt, Human
gucaggaagcaagguugggcau

SEQ ID NO: 9242 - RNA, 22 nt, Human
gucaggaaguggcauuggagaa

SEQ ID NO: 9243 - RNA, 22 nt, Human
gucaggagagaucaggacagca

SEQ ID NO: 9244 - RNA, 22 nt, Human
gucaggauuggggucaugaguc

SEQ ID NO: 9245 - RNA, 22 nt, Human
gucaggauuuacaaacuucagu

SEQ ID NO: 9246 - RNA, 19 nt, Human
gucaggcacgugagagcau

SEQ ID NO: 9247 - RNA, 18 nt, Human
gucaggcaugaaucuggg

SEQ ID NO: 9248 - RNA, 22 nt, Human
gucaggccaauacucuccagca

SEQ ID NO: 9249 - RNA, 22 nt, Human
gucaggcugccagucuuuauug

SEQ ID NO: 9250 - RNA, 22 nt, Human
gucaggggaugugcugguggcc

SEQ ID NO: 9251 - RNA, 22 nt, Human
gucaggucuuggaagauaggcu

SEQ ID NO: 9252 - RNA, 22 nt, Human
gucaguaggaaccuagggucaa

SEQ ID NO: 9253 - RNA, 22 nt, Human
gucagugguagggcuaguucag

SEQ ID NO: 9254 - RNA, 22 nt, Human
gucagugugagauaaucuugga

SEQ ID NO: 9255 - RNA, 22 nt, Human
gucaguguuuaacaaccagcuc

SEQ ID NO: 9256 - RNA, 22 nt, Human
gucaguuauucaauugguuuaa

SEQ ID NO: 9257 - RNA, 22 nt, Human
gucauaaaaggaccaccuauug

SEQ ID NO: 9258 - RNA, 22 nt, Human
gucauaaagacagaaacauucc

SEQ ID NO: 9259 - RNA, 22 nt, Human
gucauaggcauggauguggguu

SEQ ID NO: 9260 - RNA, 22 nt, Human
gucauauagguaggauucagcu

SEQ ID NO: 9261 - RNA, 22 nt, Human
gucaucauuuuuagcauauggg

SEQ ID NO: 9262 - RNA, 22 nt, Human
gucaucuucgcagagugauuuu

SEQ ID NO: 9263 - RNA, 22 nt, Human
gucaugccagcggagcucggga

SEQ ID NO: 9264 - RNA, 22 nt, Human
guccuugguaugaccaagguuu

SEQ ID NO: 9265 - RNA, 22 nt, Human
gucguggagcucacagugugcc

SEQ ID NO: 9266 - RNA, 22 nt, Human
gucuaaacacaaugcaagaagu

SEQ ID NO: 9267 - RNA, 22 nt, Human
gucuaaacuuuacagagucaag

SEQ ID NO: 9268 - RNA, 22 nt, Human
gucuaaagcccuuagaauagua

SEQ ID NO: 9269 - RNA, 22 nt, Human
gucuagaaaaugccgagggaug

SEQ ID NO: 9270 - RNA, 22 nt, Human
gucuagaaauagguuucagaaa

SEQ ID NO: 9271 - RNA, 19 nt, Human
gucuagaacauuguaggug

SEQ ID NO: 9272 - RNA, 22 nt, Human
gucuagaauugcuuggcagaug

SEQ ID NO: 9273 - RNA, 22 nt, Human
gucuagcacaucaucucacugc

SEQ ID NO: 9274 - RNA, 22 nt, Human
gucuauaagcaggggaaaacuu

SEQ ID NO: 9275 - RNA, 22 nt, Human
gucucaagggggaacucacugu

SEQ ID NO: 9276 - RNA, 20 nt, Human
gucucagaauggauuugcau

SEQ ID NO: 9277 - RNA, 22 nt, Human
gucucagaccacccucuuuggc

SEQ ID NO: 9278 - RNA, 18 nt, Human
gucucaggaguggcacgu

SEQ ID NO: 9279 - RNA, 22 nt, Human
gucucaguuugaagugaugcca

SEQ ID NO: 9280 - RNA, 20 nt, Human
gucuccacuggggguuaacc

SEQ ID NO: 9281 - RNA, 22 nt, Human
gucuccagaagccuagacagcc

SEQ ID NO: 9282 - RNA, 22 nt, Human
gucuccagaauucuugggaggg

SEQ ID NO: 9283 - RNA, 22 nt, Human
gucuccagauauccuacacaac

SEQ ID NO: 9284 - RNA, 22 nt, Human
gucuccagggacacacuagccg

SEQ ID NO: 9285 - RNA, 22 nt, Human
gucuccaguuacagcagccagg

SEQ ID NO: 9286 - RNA, 22 nt, Human
gucuccuccaguaggaaguggc

SEQ ID NO: 9287 - RNA, 22 nt, Human
gucuccugccacacucaguccc

SEQ ID NO: 9288 - RNA, 22 nt, Human
gucuccugcccccggugcuugg

SEQ ID NO: 9289 - RNA, 22 nt, Human
gucuccuggaaauaugcccaua

SEQ ID NO: 9290 - RNA, 22 nt, Human
gucuccuggccuccaguuucuc

SEQ ID NO: 9291 - RNA, 22 nt, Human
gucuccuuguggaucucaagga

SEQ ID NO: 9292 - RNA, 22 nt, Human
gucucucaaaacuagaagagaa

SEQ ID NO: 9293 - RNA, 22 nt, Human
gucucugugguacguuucaucc

SEQ ID NO: 9294 - RNA, 22 nt, Human
gucucugugucugagagagccc

SEQ ID NO: 9295 - RNA, 22 nt, Human
gucucuuagucucauuuucugc

SEQ ID NO: 9296 - RNA, 22 nt, Human
gucucuuaugggcaggagcaca

SEQ ID NO: 9297 - RNA, 22 nt, Human
gucucuucuuugccgguccugc

SEQ ID NO: 9298 - RNA, 22 nt, Human
gucugaaaauaugauuuugccu

SEQ ID NO: 9299 - RNA, 22 nt, Human
gucugaaacgcauuguuaucga

SEQ ID NO: 9300 - RNA, 22 nt, Human
gucugacaccuagaguccagga

SEQ ID NO: 9301 - RNA, 22 nt, Human
gucugagacccacucccagaga

SEQ ID NO: 9302 - RNA, 22 nt, Human
gucugagacuuuuucugugugg

SEQ ID NO: 9303 - RNA, 22 nt, Human
gucugagcacccuggccuguca

SEQ ID NO: 9304 - RNA, 22 nt, Human
gucugaggaagaugcaggggga

SEQ ID NO: 9305 - RNA, 20 nt, Human
gucugaggagcagugggaaa

SEQ ID NO: 9306 - RNA, 22 nt, Human
gucugaggcgaggccugagaac

SEQ ID NO: 9307 - RNA, 22 nt, Human
gucugcccaucuccgggcgggg

SEQ ID NO: 9308 - RNA, 22 nt, Human
gucugcccugagcucccagugc

SEQ ID NO: 9309 - RNA, 22 nt, Human
gucugcccugcagacaugccuc

SEQ ID NO: 9310 - RNA, 22 nt, Human
gucugcccuuccucuccacgau

SEQ ID NO: 9311 - RNA, 22 nt, Human
gucugcccuuggccugggacuu

SEQ ID NO: 9312 - RNA, 22 nt, Human
gucugccugucuggaugacaga

SEQ ID NO: 9313 - RNA, 22 nt, Human
gucugcugcagucguggcucua

SEQ ID NO: 9314 - RNA, 22 nt, Human
gucugcuguggguccccaggag

SEQ ID NO: 9315 - RNA, 22 nt, Human
gucuggaaagguauuugucuca

SEQ ID NO: 9316 - RNA, 22 nt, Human
gucuggaaauuaagaggagguu

SEQ ID NO: 9317 - RNA, 22 nt, Human
gucuggaaccaagacguguagc

SEQ ID NO: 9318 - RNA, 22 nt, Human
gucuggagacuugggucaucaa

SEQ ID NO: 9319 - RNA, 22 nt, Human
gucuggagagcugagcagaguu

SEQ ID NO: 9320 - RNA, 22 nt, Human
gucuggaggaggaagaaggcac

SEQ ID NO: 9321 - RNA, 22 nt, Human
gucuggaggagggcucugcggc

SEQ ID NO: 9322 - RNA, 22 nt, Human
gucuggagggaagagaugucag

SEQ ID NO: 9323 - RNA, 22 nt, Human
ggggccuccagcacuaggcagc

SEQ ID NO: 9324 - RNA, 22 nt, Human
ggggccuuuucugaauguggaa

SEQ ID NO: 9325 - RNA, 22 nt, Human
ggggcgccccgagggugcgcac

SEQ ID NO: 9326 - RNA, 22 nt, Human
ggggcucaguucggacagccug

SEQ ID NO: 9327 - RNA, 22 nt, Human
ggggcucugcucugagccgugu

SEQ ID NO: 9328 - RNA, 22 nt, Human
ggggcugaaccuggaggugguc

SEQ ID NO: 9329 - RNA, 22 nt, Human
ggggcugagucagugggaagag

SEQ ID NO: 9330 - RNA, 22 nt, Human
ggggcugcucccaccccugagg

SEQ ID NO: 9331 - RNA, 22 nt, Human
ggggcugcugguauuuccaguu

SEQ ID NO: 9332 - RNA, 22 nt, Human
ggggcuggcucacuaagagacu

SEQ ID NO: 9333 - RNA, 22 nt, Human
ggggcuguugaaguuaguugag

SEQ ID NO: 9334 - RNA, 22 nt, Human
ggggcuuccagcgcccgccggu

SEQ ID NO: 9335 - RNA, 22 nt, Human
gggggaagaaagaacauggcau

SEQ ID NO: 9336 - RNA, 22 nt, Human
gggggaagacugggcuagugau

SEQ ID NO: 9337 - RNA, 22 nt, Human
gggggacuaacuggauccugga

SEQ ID NO: 9338 - RNA, 22 nt, Human
gggggacuggaccguccugggu

SEQ ID NO: 9339 - RNA, 22 nt, Human
gggggagagacgagcggcucug

SEQ ID NO: 9340 - RNA, 22 nt, Human
gggggagcuaguccagcugagg

SEQ ID NO: 9341 - RNA, 22 nt, Human
gggggaugcucaggaggcugcu

SEQ ID NO: 9342 - RNA, 22 nt, Human
gggggccuuauucaucugccag

SEQ ID NO: 9343 - RNA, 22 nt, Human
gggggcgccgccgcucaucuca

SEQ ID NO: 9344 - RNA, 22 nt, Human
gggggcggagcacgugaccacg

SEQ ID NO: 9345 - RNA, 23 nt, Human
gggggcgugucauggagggccac

SEQ ID NO: 9346 - RNA, 22 nt, Human
gggggcugaucauuuacugggc

SEQ ID NO: 9347 - RNA, 22 nt, Human
gggggcuggacuuucccacaca

SEQ ID NO: 9348 - RNA, 22 nt, Human
ggggggcagcuguccuggccau

SEQ ID NO: 9349 - RNA, 22 nt, Human
ggggggugcugaucaguggagc

SEQ ID NO: 9350 - RNA, 22 nt, Human
ggggguaggcagacaaggacau

SEQ ID NO: 9351 - RNA, 22 nt, Human
gggggugacgauggcagcuggu

SEQ ID NO: 9352 - RNA, 16 nt, Human
gggggugagagagagu

SEQ ID NO: 9353 - RNA, 22 nt, Human
gggguccuggaggccagcugga

SEQ ID NO: 9354 - RNA, 22 nt, Human
ggggucugcgccacugucugcg

SEQ ID NO: 9355 - RNA, 22 nt, Human
ggggugagugcucagccccgga

SEQ ID NO: 9356 - RNA, 19 nt, Human
ggggugcuagggagggauc

SEQ ID NO: 9357 - RNA, 22 nt, Human
gggguggagcuaaaugucuacu

SEQ ID NO: 9358 - RNA, 22 nt, Human
gggguggaucaggcaggcccag

SEQ ID NO: 9359 - RNA, 22 nt, Human
ggggugggcgugcagggacacc

SEQ ID NO: 9360 - RNA, 22 nt, Human
gggguguggacggcugugccag

SEQ ID NO: 9361 - RNA, 20 nt, Human
ggguaaaaggcaguguugca

SEQ ID NO: 9362 - RNA, 22 nt, Human
ggguaauuggaaauauuaauag

SEQ ID NO: 9363 - RNA, 22 nt, Human
ggguaauuggggccuugcagug

SEQ ID NO: 9364 - RNA, 22 nt, Human
ggguaggagaggugucugugug

SEQ ID NO: 9365 - RNA, 22 nt, Human
ggguagggugacuuaggcuggc

SEQ ID NO: 9366 - RNA, 22 nt, Human
ggguaguguggucucugggcug

SEQ ID NO: 9367 - RNA, 22 nt, Human
ggguaguuuaauuaggaagaaa

SEQ ID NO: 9368 - RNA, 22 nt, Human
ggguaugauagggaggugaaau

SEQ ID NO: 9369 - RNA, 22 nt, Human
gggucagagccguaacaggacu

SEQ ID NO: 9370 - RNA, 22 nt, Human
gggucagcgauuucaggggcag

SEQ ID NO: 9371 - RNA, 22 nt, Human
gggucaggccucaaggugggcu

SEQ ID NO: 9372 - RNA, 22 nt, Human
gggucaggcuagcccagacuuc

SEQ ID NO: 9373 - RNA, 22 nt, Human
guaaaggcucugauaaguacug

SEQ ID NO: 9374 - RNA, 22 nt, Human
guaaaguucuacuagaaucaac

SEQ ID NO: 9375 - RNA, 22 nt, Human
guaaauauuaaaggcugcuaga

SEQ ID NO: 9376 - RNA, 22 nt, Human
guaaaucauaaaauuugagcuc

SEQ ID NO: 9377 - RNA, 22 nt, Human
guaaaucccauccuuucucugg

SEQ ID NO: 9378 - RNA, 22 nt, Human
guaacaaacgguuccaagaugc

SEQ ID NO: 9379 - RNA, 22 nt, Human
guaacacagaaaugaaauucca

SEQ ID NO: 9380 - RNA, 22 nt, Human
guaacacucuaaagggaugcac

SEQ ID NO: 9381 - RNA, 22 nt, Human
guaacacuggcaccgucucaca

SEQ ID NO: 9382 - RNA, 19 nt, Human
guaacagcucuggguucac

SEQ ID NO: 9383 - RNA, 22 nt, Human
guaacaguuuggguuccaauug

SEQ ID NO: 9384 - RNA, 22 nt, Human
guaacauuauucaugagauaca

SEQ ID NO: 9385 - RNA, 22 nt, Human
guaacauucuagaaacuuaaca

SEQ ID NO: 9386 - RNA, 22 nt, Human
guaaccuggaaguuuagggaag

SEQ ID NO: 9387 - RNA, 22 nt, Human
guaacgaauaaacaagugauaa

SEQ ID NO: 9388 - RNA, 22 nt, Human
guaacugguuuucuucccucuc

SEQ ID NO: 9389 - RNA, 22 nt, Human
guaacuuaccauuguagcauca

SEQ ID NO: 9390 - RNA, 22 nt, Human
guaagaggaucaaggcggugca

SEQ ID NO: 9391 - RNA, 22 nt, Human
guaagauuuaaaauagcaauug

SEQ ID NO: 9392 - RNA, 22 nt, Human
guaagcacaugugugugcaugg

SEQ ID NO: 9393 - RNA, 22 nt, Human
guaagcauucauugucuguaua

SEQ ID NO: 9394 - RNA, 22 nt, Human
guaagccugagaaacaccaccu

SEQ ID NO: 9395 - RNA, 22 nt, Human
guaagccuggaauuuuugacuu

SEQ ID NO: 9396 - RNA, 19 nt, Human
guaagggcuaauggacuau

SEQ ID NO: 9397 - RNA, 22 nt, Human
guaaguaauaagugcucaauaa

SEQ ID NO: 9398 - RNA, 22 nt, Human
guaaguuacucuugggcuauuu

SEQ ID NO: 9399 - RNA, 22 nt, Human
guaauaccuuucuaacacuuga

SEQ ID NO: 9400 - RNA, 22 nt, Human
guaauagaugaaacaaugugga

SEQ ID NO: 9401 - RNA, 22 nt, Human
guaauccaaaguaacauuaaac

SEQ ID NO: 9402 - RNA, 23 nt, Human
guaaugaugggaauuuacuuaga

SEQ ID NO: 9403 - RNA, 22 nt, Human
guaaugcuuuugauacagggac

SEQ ID NO: 9404 - RNA, 22 nt, Human
guaauuacauuaggguaaauaa

SEQ ID NO: 9405 - RNA, 22 nt, Human
guaauugaacauuaaguugaag

SEQ ID NO: 9406 - RNA, 22 nt, Human
guacaaaugaaaauagaccacu

SEQ ID NO: 9407 - RNA, 22 nt, Human
guacaaauugauacagguuuuc

SEQ ID NO: 9408 - RNA, 19 nt, Human
guacaacaaugcugagcau

SEQ ID NO: 9409 - RNA, 22 nt, Human
guacaaguguauuuggcuugau

SEQ ID NO: 9410 - RNA, 22 nt, Human
guacaauagucccuguuuggau

SEQ ID NO: 9411 - RNA, 22 nt, Human
guacaauuauuuaaauggugaa

SEQ ID NO: 9412 - RNA, 21 nt, Human
guacacacagguggaugggcu

SEQ ID NO: 9413 - RNA, 22 nt, Human
guacacacuauguauuguacac

SEQ ID NO: 9414 - RNA, 22 nt, Human
guacacacuauuuaaaguguuu

SEQ ID NO: 9415 - RNA, 22 nt, Human
guacacauugucuguuuacuuc

SEQ ID NO: 9416 - RNA, 22 nt, Human
guacacuauuaaaccugcucau

SEQ ID NO: 9417 - RNA, 22 nt, Human
guacacucccccugugaaguug

SEQ ID NO: 9418 - RNA, 22 nt, Human
guacacuugucuugaacagccu

SEQ ID NO: 9419 - RNA, 22 nt, Human
guacagaaaguacccauagaag

SEQ ID NO: 9420 - RNA, 22 nt, Human
guacagauuaauaauauacuga

SEQ ID NO: 9421 - RNA, 22 nt, Human
guacaggucuuaucuccuagga

SEQ ID NO: 9422 - RNA, 22 nt, Human
guacagucuucuuaaugcuuuu

SEQ ID NO: 9423 - RNA, 22 nt, Human
guacaguggaggucuguguuca

SEQ ID NO: 9424 - RNA, 22 nt, Human
guacaugcagauuauagcuaau

SEQ ID NO: 9425 - RNA, 22 nt, Human
guacauucaugguuccaccagg

SEQ ID NO: 9426 - RNA, 22 nt, Human
guacauucuguggacuuggaca

SEQ ID NO: 9427 - RNA, 22 nt, Human
guacauuuauuuuugcagcaua

SEQ ID NO: 9428 - RNA, 22 nt, Human
guacauuucaguuuccuuaaga

SEQ ID NO: 9429 - RNA, 22 nt, Human
guacauuucucccaacacuaaa

SEQ ID NO: 9430 - RNA, 22 nt, Human
guacauuuuacuuuguuugaau

SEQ ID NO: 9431 - RNA, 22 nt, Human
guaccauaaugagucucuuaaa

SEQ ID NO: 9432 - RNA, 22 nt, Human
guaccaugagcaucauguuuuu

SEQ ID NO: 9433 - RNA, 22 nt, Human
guacgugcaugcacgugugccu

SEQ ID NO: 9434 - RNA, 22 nt, Human
guacuauagguaauguagacca

SEQ ID NO: 9435 - RNA, 22 nt, Human
guacuucuggccaggcuggcca

SEQ ID NO: 9436 - RNA, 22 nt, Human
guacuucuuuagucaauaugua

SEQ ID NO: 9437 - RNA, 22 nt, Human
guacuuuagaguaaaauagacc

SEQ ID NO: 9438 - RNA, 22 nt, Human
guacuuuguuaccauagcucca

SEQ ID NO: 9439 - RNA, 22 nt, Human
guagaaauauuuaucucugaga

SEQ ID NO: 9440 - RNA, 22 nt, Human
guagaaaugguguguuucuucu

SEQ ID NO: 9441 - RNA, 22 nt, Human
guagaagugaugucauguuaua

SEQ ID NO: 9442 - RNA, 22 nt, Human
guagacagaaagcggaaucaua

SEQ ID NO: 9443 - RNA, 22 nt, Human
guagacagcaaccaaaccaggu

SEQ ID NO: 9444 - RNA, 22 nt, Human
guagaggcugaaaucugagggc

SEQ ID NO: 9445 - RNA, 22 nt, Human
guagagucaggacggcaauucu

SEQ ID NO: 9446 - RNA, 22 nt, Human
guagaguugaguagugguaaca

SEQ ID NO: 9447 - RNA, 22 nt, Human
guagauaaggauugauuuuuau

SEQ ID NO: 9448 - RNA, 22 nt, Human
guagauuccaguggucuguguc

SEQ ID NO: 9449 - RNA, 22 nt, Human
guagcaacuguagcccaaauuc

SEQ ID NO: 9450 - RNA, 22 nt, Human
guagcacaugauuuugauaugu

SEQ ID NO: 9451 - RNA, 22 nt, Human
guagcagguauucuggugugag

SEQ ID NO: 9452 - RNA, 22 nt, Human
guagcuacuuagagccguucuu

SEQ ID NO: 9453 - RNA, 22 nt, Human
guagcugauauuagcaaugagu

SEQ ID NO: 9454 - RNA, 22 nt, Human
guacauaaaauacugccaugua

SEQ ID NO: 9455 - RNA, 22 nt, Human
guacauaaaggaggcucuuugc

SEQ ID NO: 9456 - RNA, 22 nt, Human
guacauaauuuucagccaguuu

SEQ ID NO: 9457 - RNA, 22 nt, Human
guacauauggcacaugcuauuu

SEQ ID NO: 9458 - RNA, 22 nt, Human
guacauauuacagacaaagcuu

SEQ ID NO: 9459 - RNA, 22 nt, Human
guacaugauuccccauaaaaag

SEQ ID NO: 9460 - RNA, 22 nt, Human
guacauguaugagauaugugua

SEQ ID NO: 9461 - RNA, 22 nt, Human
guacaugucaaaaaaugcauaa

SEQ ID NO: 9462 - RNA, 22 nt, Human
guacaugugcacaacaugcaug

SEQ ID NO: 9463 - RNA, 22 nt, Human
guacaugugcacaaugugcagg

SEQ ID NO: 9464 - RNA, 22 nt, Human
guacauucagcuuagcacuucu

SEQ ID NO: 9465 - RNA, 22 nt, Human
guacauuucucuuguucuuauu

SEQ ID NO: 9466 - RNA, 22 nt, Human
guacauuuugagguuaaaacaa

SEQ ID NO: 9467 - RNA, 22 nt, Human
guaccagucucugugggcaccu

SEQ ID NO: 9468 - RNA, 22 nt, Human
guaccauuguuugaaguacuca

SEQ ID NO: 9469 - RNA, 22 nt, Human
guacccagugauuccuucuuca

SEQ ID NO: 9470 - RNA, 22 nt, Human
guacucucuugaaggccuuucu

SEQ ID NO: 9471 - RNA, 22 nt, Human
guacugaacuuaaaaauccccu

SEQ ID NO: 9472 - RNA, 22 nt, Human
guacuucuuaaauuaggaucaa

SEQ ID NO: 9473 - RNA, 22 nt, Human
guacuuuaaaucaauguagauu

SEQ ID NO: 9474 - RNA, 22 nt, Human
guagaaaaagcaguaagucuca

SEQ ID NO: 9475 - RNA, 22 nt, Human
guagaaaauuaggaugaggcuu

SEQ ID NO: 9476 - RNA, 22 nt, Human
guagaaauuccauuuacuuuga

SEQ ID NO: 9477 - RNA, 22 nt, Human
guagaauauaugguuaguauug

SEQ ID NO: 9478 - RNA, 22 nt, Human
guagaaucccaguggcuauauu

SEQ ID NO: 9479 - RNA, 22 nt, Human
guagacagguuauaaaucagug

SEQ ID NO: 9480 - RNA, 22 nt, Human
guagagcaggacuugagauguu

SEQ ID NO: 9481 - RNA, 22 nt, Human
guagaggcagaaacugaaggac

SEQ ID NO: 9482 - RNA, 22 nt, Human
guauaagguauguaaacuauuu

SEQ ID NO: 9483 - RNA, 22 nt, Human
guauacaacuauuguuggguaa

SEQ ID NO: 9484 - RNA, 22 nt, Human
guauacacugucuccucuaggu

SEQ ID NO: 9485 - RNA, 22 nt, Human
guauacaugugguaaaaugcac

SEQ ID NO: 9486 - RNA, 22 nt, Human
guauaggcauuuugauuagagu

SEQ ID NO: 9487 - RNA, 22 nt, Human
guauagguuuggcucucuccag

SEQ ID NO: 9488 - RNA, 22 nt, Human
guauauaagguaaagcgauugu

SEQ ID NO: 9489 - RNA, 22 nt, Human
guauauaucggcacuauuuuaa

SEQ ID NO: 9490 - RNA, 22 nt, Human
guauauauuggauaaaccagag

SEQ ID NO: 9491 - RNA, 21 nt, Human
guauaucagcagugaauucaa

SEQ ID NO: 9492 - RNA, 22 nt, Human
guauaucucuuacauacacaca

SEQ ID NO: 9493 - RNA, 19 nt, Human
guauauuuauauggcugua

SEQ ID NO: 9494 - RNA, 22 nt, Human
guaucacacuagaaugcauuca

SEQ ID NO: 9495 - RNA, 22 nt, Human
guauccacaauaaagcccuuug

SEQ ID NO: 9496 - RNA, 22 nt, Human
guaucgguuuauuuuugggaua

SEQ ID NO: 9497 - RNA, 22 nt, Human
guaucuagucaaugcuguucaa

SEQ ID NO: 9498 - RNA, 22 nt, Human
guaucuuuuacaccaggaaauu

SEQ ID NO: 9499 - RNA, 22 nt, Human
guaugcugccuacgaacaugca

SEQ ID NO: 9500 - RNA, 22 nt, Human
guaugucaccucuccuaagcac

SEQ ID NO: 9501 - RNA, 22 nt, Human
guauguguugaauucagggguc

SEQ ID NO: 9502 - RNA, 20 nt, Human
guauuacaggcuuagaacca

SEQ ID NO: 9503 - RNA, 22 nt, Human
guauuagcaagaguugugauuu

SEQ ID NO: 9504 - RNA, 20 nt, Human
guauuaggagguaaauguaa

SEQ ID NO: 9505 - RNA, 22 nt, Human
guauuaggagguggagccuuug

SEQ ID NO: 9506 - RNA, 20 nt, Human
guauuagguguuccucuuuc

SEQ ID NO: 9507 - RNA, 22 nt, Human
guauuagguuggugcaaaauug

SEQ ID NO: 9508 - RNA, 22 nt, Human
guauucaguuugauugucuaca

SEQ ID NO: 9509 - RNA, 22 nt, Human
guauucuuaaggauugagcaaa

SEQ ID NO: 9510 - RNA, 22 nt, Human
guauucuugaguggcaacuagg

SEQ ID NO: 9511 - RNA, 21 nt, Human
guauucuuuaugaagugaaaa

SEQ ID NO: 9512 - RNA, 22 nt, Human
guauuguauauuugcaaauaca

SEQ ID NO: 9513 - RNA, 22 nt, Human
guauuguauugggaugagcucu

SEQ ID NO: 9514 - RNA, 22 nt, Human
guauuucacauauggauaugcu

SEQ ID NO: 9515 - RNA, 23 nt, Human
guauuucagcauucucaguuaaa

SEQ ID NO: 9516 - RNA, 22 nt, Human
guauuuccuauagugagggccu

SEQ ID NO: 9517 - RNA, 22 nt, Human
guauuucuagaaaaugcagauu

SEQ ID NO: 9518 - RNA, 22 nt, Human
guauuucugguuaaaugugcua

SEQ ID NO: 9519 - RNA, 22 nt, Human
guauuucuuggaaauccuuuua

SEQ ID NO: 9520 - RNA, 22 nt, Human
guauuucuuuaucuggucagaa

SEQ ID NO: 9521 - RNA, 22 nt, Human
guauuugauagauuucaaagga

SEQ ID NO: 9522 - RNA, 22 nt, Human
guauuugcaaaucuaaaagaga

SEQ ID NO: 9523 - RNA, 22 nt, Human
gucaaagaaacgcaccuuacau

SEQ ID NO: 9524 - RNA, 22 nt, Human
gucaacaagguuugcuuaucuu

SEQ ID NO: 9525 - RNA, 22 nt, Human
gucaacuuuuucauagcucugc

SEQ ID NO: 9526 - RNA, 22 nt, Human
gucaagaugagaauucuuuuua

SEQ ID NO: 9527 - RNA, 20 nt, Human
gucaagucccuggggcagcu

SEQ ID NO: 9528 - RNA, 22 nt, Human
gucaaguuaagauaaggucaug

SEQ ID NO: 9529 - RNA, 22 nt, Human
gucaauauagguuucaaacaug

SEQ ID NO: 9530 - RNA, 22 nt, Human
gucaauuaguggcaauuucaua

SEQ ID NO: 9531 - RNA, 22 nt, Human
gucacaaaggugagggacauga

SEQ ID NO: 9532 - RNA, 22 nt, Human
gucacaaauccccucagcaacu

SEQ ID NO: 9533 - RNA, 22 nt, Human
gucacaauuauaggaacucaga

SEQ ID NO: 9534 - RNA, 22 nt, Human
gucacacaauaguaaguggucc

SEQ ID NO: 9535 - RNA, 22 nt, Human
gucacacagagcccugugcuca

SEQ ID NO: 9536 - RNA, 22 nt, Human
gucacacuagggccaaguggag

SEQ ID NO: 9537 - RNA, 22 nt, Human
gucacagaguuauuaauugugu

SEQ ID NO: 9538 - RNA, 22 nt, Human
gucacaggaagcagcaggcacu

SEQ ID NO: 9539 - RNA, 22 nt, Human
gucacaggcaguaacuaggacc

SEQ ID NO: 9540 - RNA, 22 nt, Human
gucaccauugcccacuccaugg

SEQ ID NO: 9541 - RNA, 22 nt, Human
gucacccugcuguuuguccauu

SEQ ID NO: 9542 - RNA, 22 nt, Human
gucacugccucuuaacuuuuuc

SEQ ID NO: 9543 - RNA, 22 nt, Human
gucacuggaauuacaggcaugc

SEQ ID NO: 9544 - RNA, 22 nt, Human
gucacuggggccacaugcagaa

SEQ ID NO: 9545 - RNA, 22 nt, Human
gucacuguuuccuauuauauuu

SEQ ID NO: 9546 - RNA, 22 nt, Human
gucacuuuggccucuacagcca

SEQ ID NO: 9547 - RNA, 22 nt, Human
gucagaaaaagcaaggcugggc

SEQ ID NO: 9548 - RNA, 22 nt, Human
gucagacugcacucaaggacag

SEQ ID NO: 9549 - RNA, 22 nt, Human
gucagagacaaacuuccucucu

SEQ ID NO: 9550 - RNA, 22 nt, Human
gucagagcugugcaaggcugag

SEQ ID NO: 9551 - RNA, 22 nt, Human
gucagauuaauagcaauaauaa

SEQ ID NO: 9552 - RNA, 22 nt, Human
gucagcaagaugaaucagcagg

SEQ ID NO: 9553 - RNA, 22 nt, Human
gucagcaaggaaaaugugucac

SEQ ID NO: 9554 - RNA, 22 nt, Human
gucagcaauucaagagcucuua

SEQ ID NO: 9555 - RNA, 22 nt, Human
gucagcuaauaggguguguguc

SEQ ID NO: 9556 - RNA, 22 nt, Human
gucagcuagaggaugugacauu

SEQ ID NO: 9557 - RNA, 22 nt, Human
gucagcucauccaucccggugg

SEQ ID NO: 9558 - RNA, 23 nt, Human
gucagcuugaccaguggagaguc

SEQ ID NO: 9559 - RNA, 22 nt, Human
gucaggaaaacccggguugacu

SEQ ID NO: 9560 - RNA, 22 nt, Human
gucaggacucugacccgucccg

SEQ ID NO: 9561 - RNA, 22 nt, Human
gucaggagagaccuguucuccu

SEQ ID NO: 9562 - RNA, 22 nt, Human
gucaggagaggccaucagcuuu

SEQ ID NO: 9563 - RNA, 21 nt, Human
gucaggagccgucuuacauuc

SEQ ID NO: 9564 - RNA, 22 nt, Human
gucaggaucaaauugaaguuau

SEQ ID NO: 9565 - RNA, 22 nt, Human
gucaggaugagggaugaggagu

SEQ ID NO: 9566 - RNA, 22 nt, Human
gucaggauuaaugggaguaugc

SEQ ID NO: 9567 - RNA, 22 nt, Human
ucgauagaauauacuagcugug

SEQ ID NO: 9568 - RNA, 22 nt, Human
ucgcauuuguuaaagcauguug

SEQ ID NO: 9569 - RNA, 22 nt, Human
ucgccucaucauccuaauuaca

SEQ ID NO: 9570 - RNA, 22 nt, Human
ucgcucaggcuugaguguagug

SEQ ID NO: 9571 - RNA, 22 nt, Human
ucggaaccgaccugggagcugg

SEQ ID NO: 9572 - RNA, 22 nt, Human
ucgggcuccugcacuuggagac

SEQ ID NO: 9573 - RNA, 22 nt, Human
ucggggucuuugacacgcucug

SEQ ID NO: 9574 - RNA, 22 nt, Human
ucgggugcuuuuagauauguag

SEQ ID NO: 9575 - RNA, 23 nt, Human
ucggugggcguggaggccgaggc

SEQ ID NO: 9576 - RNA, 22 nt, Human
ucgucaacuguagugacuuaga

SEQ ID NO: 9577 - RNA, 22 nt, Human
ucgucaucugaaggcugucaau

SEQ ID NO: 9578 - RNA, 22 nt, Human
ucguccugugcaccugccugca

SEQ ID NO: 9579 - RNA, 22 nt, Human
ucgugcuccuggugaggcucug

SEQ ID NO: 9580 - RNA, 22 nt, Human
ucguggagaggccauguggagg

SEQ ID NO: 9581 - RNA, 22 nt, Human
ucguggaucaccgcgucugugu

SEQ ID NO: 9582 - RNA, 22 nt, Human
ucguguguauucccucuccuuc

SEQ ID NO: 9583 - RNA, 22 nt, Human
ucguuaaaugcuaaaacugaca

SEQ ID NO: 9584 - RNA, 22 nt, Human
ucguuagccucgagaucuuugu

SEQ ID NO: 9585 - RNA, 22 nt, Human
ucguuauagaacauucuugggu

SEQ ID NO: 9586 - RNA, 22 nt, Human
ucguucuugucaguuuauaaag

SEQ ID NO: 9587 - RNA, 20 nt, Human
ucguuuauuugaaauugcuc

SEQ ID NO: 9588 - RNA, 22 nt, Human
ucguuuuaccaaauugaauguu

SEQ ID NO: 9589 - RNA, 22 nt, Human
ucuaaaaaagucuguucacuug

SEQ ID NO: 9590 - RNA, 19 nt, Human
ucuaaacacagggacaagc

SEQ ID NO: 9591 - RNA, 22 nt, Human
ucaagugagcguagcugaaugg

SEQ ID NO: 9592 - RNA, 22 nt, Human
ucaaguuucucucagauuaugg

SEQ ID NO: 9593 - RNA, 22 nt, Human
ucaauaaauagcuuggcucagc

SEQ ID NO: 9594 - RNA, 22 nt, Human
ucaauaaaucccucugacccug

SEQ ID NO: 9595 - RNA, 22 nt, Human
ucaauacauacaauguauagug

SEQ ID NO: 9596 - RNA, 22 nt, Human
ucaauacauguguguggauggu

SEQ ID NO: 9597 - RNA, 22 nt, Human
ucaauacucacaaagagauuuu

SEQ ID NO: 9598 - RNA, 22 nt, Human
ucaauagcauagcaauuaaugu

SEQ ID NO: 9599 - RNA, 22 nt, Human
ucaauauagcaguguacuugag

SEQ ID NO: 9600 - RNA, 22 nt, Human
ucaaucuguuccauuagaacau

SEQ ID NO: 9601 - RNA, 22 nt, Human
ucaaugaagagauuuaaaucau

SEQ ID NO: 9602 - RNA, 22 nt, Human
ucaaugauaucagcaggaugug

SEQ ID NO: 9603 - RNA, 22 nt, Human
ucaaugauuagaguuuagugug

SEQ ID NO: 9604 - RNA, 22 nt, Human
ucaaugcauaggagguggcaga

SEQ ID NO: 9605 - RNA, 19 nt, Human
ucaaugucuggccaauggu

SEQ ID NO: 9606 - RNA, 22 nt, Human
ucaaugucuucucaagucuuuu

SEQ ID NO: 9607 - RNA, 22 nt, Human
ucaauguucugauucuuuugca

SEQ ID NO: 9608 - RNA, 22 nt, Human
ucaauguuuggaaauccuuugu

SEQ ID NO: 9609 - RNA, 22 nt, Human
ucaauuacagcaaugacuguac

SEQ ID NO: 9610 - RNA, 22 nt, Human
ucaauuacuaaccaaauaaugu

SEQ ID NO: 9611 - RNA, 22 nt, Human
ucaauuauuugauaugaaaggg

SEQ ID NO: 9612 - RNA, 22 nt, Human
ucaauuauuuuggcuaugcuaa

SEQ ID NO: 9613 - RNA, 22 nt, Human
ucaauucaauugaacaguuacu

SEQ ID NO: 9614 - RNA, 22 nt, Human
ucaauucaauugcauuucugug

SEQ ID NO: 9615 - RNA, 22 nt, Human
ucaauucaguccaacaguaauu

SEQ ID NO: 9616 - RNA, 22 nt, Human
ucaauucauagaguugacacag

SEQ ID NO: 9617 - RNA, 22 nt, Human
ucaauucugcauacauuucacu

SEQ ID NO: 9618 - RNA, 20 nt, Human
ucaauuuucuacaacauuug

SEQ ID NO: 9619 - RNA, 22 nt, Human
ucacaaagagaauugugggugu

SEQ ID NO: 9620 - RNA, 22 nt, Human
ucacaaauguuugcaugugucu

SEQ ID NO: 9621 - RNA, 22 nt, Human
ucacaacucacagccaccggug

SEQ ID NO: 9622 - RNA, 21 nt, Human
ucacaacuuugaauuucaaua

SEQ ID NO: 9623 - RNA, 22 nt, Human
ucacaagacaagacaaauugca

SEQ ID NO: 9624 - RNA, 22 nt, Human
ucacaagacagaaaacauuuag

SEQ ID NO: 9625 - RNA, 22 nt, Human
ucacaagaguaaguucaugccu

SEQ ID NO: 9626 - RNA, 22 nt, Human
ucacaagauacaguuagaagca

SEQ ID NO: 9627 - RNA, 22 nt, Human
ucacaagauauuucaguccuuu

SEQ ID NO: 9628 - RNA, 22 nt, Human
ucacaagguucacuauaaauug

SEQ ID NO: 9629 - RNA, 22 nt, Human
ucacaauggcauaguauaaaau

SEQ ID NO: 9630 - RNA, 22 nt, Human
ucacaauugagauccucccacc

SEQ ID NO: 9631 - RNA, 22 nt, Human
ucacaauuguuuuuaggaucaa

SEQ ID NO: 9632 - RNA, 22 nt, Human
ucacacacauuugcugucugau

SEQ ID NO: 9633 - RNA, 21 nt, Human
ucacacacguuuccaagggca

SEQ ID NO: 9634 - RNA, 22 nt, Human
ucacacagugagcggggcucag

SEQ ID NO: 9635 - RNA, 22 nt, Human
ucacacaucucagguguuuaau

SEQ ID NO: 9636 - RNA, 20 nt, Human
ucacacaugguaagcuauga

SEQ ID NO: 9637 - RNA, 22 nt, Human
ucacacauucuagguauguuga

SEQ ID NO: 9638 - RNA, 22 nt, Human
ucacacauuguugcuuaaguug

SEQ ID NO: 9639 - RNA, 22 nt, Human
ucacaccaguuuccuuucaauu

SEQ ID NO: 9640 - RNA, 22 nt, Human
ucacaccuugcuggcugagugc

SEQ ID NO: 9641 - RNA, 22 nt, Human
ucacacgugagguucuauccug

SEQ ID NO: 9642 - RNA, 23 nt, Human
ucacacuaugaaguguguuaucc

SEQ ID NO: 9643 - RNA, 22 nt, Human
ucacacugugaagagacaagca

SEQ ID NO: 9644 - RNA, 20 nt, Human
ucacagaaacaaauagagaa

SEQ ID NO: 9645 - RNA, 22 nt, Human
ucacagaaauaagauaguuauu

SEQ ID NO: 9646 - RNA, 22 nt, Human
ucacagaaaucuguuuuuucua

SEQ ID NO: 9647 - RNA, 22 nt, Human
ucacagaagagcauuaagauga

SEQ ID NO: 9648 - RNA, 22 nt, Human
ucacagaaggcaucacagaaga

SEQ ID NO: 9649 - RNA, 22 nt, Human
ucacagaaguugaauuugcaug

SEQ ID NO: 9650 - RNA, 22 nt, Human
ucacagaauaaauugagaagac

SEQ ID NO: 9651 - RNA, 22 nt, Human
ucacagaaucucugauaagucu

SEQ ID NO: 9652 - RNA, 22 nt, Human
ucacagacauggugagguaaca

SEQ ID NO: 9653 - RNA, 22 nt, Human
ucacagacuggucagucaacuu

SEQ ID NO: 9654 - RNA, 18 nt, Human
ucacagacuuacugggcc

SEQ ID NO: 9655 - RNA, 22 nt, Human
ucacagcaaaagugugcagagc

SEQ ID NO: 9656 - RNA, 22 nt, Human
ucacagcaaaugcugcuucuca

SEQ ID NO: 9657 - RNA, 22 nt, Human
ucacagcauugaguguacuaga

SEQ ID NO: 9658 - RNA, 22 nt, Human
ucacagcauugucacaaggcug

SEQ ID NO: 9659 - RNA, 22 nt, Human
ucacagccuggacaguugccug

SEQ ID NO: 9660 - RNA, 22 nt, Human
ucacagcuauucucauguauuu

SEQ ID NO: 9661 - RNA, 22 nt, Human
ucacaggaagaggugucuaucu

SEQ ID NO: 9662 - RNA, 22 nt, Human
ucacaggagagcugaugcuggu

SEQ ID NO: 9663 - RNA, 22 nt, Human
ucacaggccuggggcagagggc

SEQ ID NO: 9664 - RNA, 22 nt, Human
ucacaggcuccagggccuggau

SEQ ID NO: 9665 - RNA, 22 nt, Human
ucacaggcuggucuccgaggac

SEQ ID NO: 9666 - RNA, 22 nt, Human
ucacagggauggaauagaaaua

SEQ ID NO: 9667 - RNA, 21 nt, Human
ucacaggucaaugugugaagg

SEQ ID NO: 9668 - RNA, 22 nt, Human
ucacaguaaauccagaagaaau

SEQ ID NO: 9669 - RNA, 22 nt, Human
ucacaguaacuuuguugcuuuu

SEQ ID NO: 9670 - RNA, 22 nt, Human
ucacaguacugugugacuugag

SEQ ID NO: 9671 - RNA, 22 nt, Human
ucacaguagacuucucaagagc

SEQ ID NO: 9672 - RNA, 22 nt, Human
ucacaguauagaguuauuuugg

SEQ ID NO: 9673 - RNA, 22 nt, Human
ucacaguaucacacaaggauua

SEQ ID NO: 9674 - RNA, 22 nt, Human
ucacaguaucuagaaaugaggg

SEQ ID NO: 9675 - RNA, 22 nt, Human
ucacaguauuggggguggagga

SEQ ID NO: 9676 - RNA, 22 nt, Human
ucacagugacagccaauguuuu

SEQ ID NO: 9677 - RNA, 22 nt, Human
ucacagugacuuacagagauug

SEQ ID NO: 9678 - RNA, 22 nt, Human
ucacagugagccaugucagaga

SEQ ID NO: 9679 - RNA, 22 nt, Human
ucacagugcaggaucaguuaau

SEQ ID NO: 9680 - RNA, 18 nt, Human
ucacagugcucuugccua

SEQ ID NO: 9681 - RNA, 16 nt, Human
ggcaccagugaacaca

SEQ ID NO: 9682 - RNA, 18 nt, Human
ggcaccucucuugccuua

SEQ ID NO: 9683 - RNA, 22 nt, Human
ggcaccugucugcucacaguga

SEQ ID NO: 9684 - RNA, 22 nt, Human
ggcacgugccuaaggagcaggc

SEQ ID NO: 9685 - RNA, 22 nt, Human
ggcacugagaggcucuuccuaa

SEQ ID NO: 9686 - RNA, 22 nt, Human
ggcacugagcgggcucugagcg

SEQ ID NO: 9687 - RNA, 22 nt, Human
ggcacugagcugccuuggggca

SEQ ID NO: 9688 - RNA, 22 nt, Human
ggcacugauaauguccucucuc

SEQ ID NO: 9689 - RNA, 20 nt, Human
ggcacuggaagcacacagga

SEQ ID NO: 9690 - RNA, 22 nt, Human
ggcacugggugagggucacugg

SEQ ID NO: 9691 - RNA, 22 nt, Human
ggcagaagacaggcaaaucaug

SEQ ID NO: 9692 - RNA, 22 nt, Human
ggcagaagugaugggauauaac

SEQ ID NO: 9693 - RNA, 22 nt, Human
ggcagaccucuccagccccaca

SEQ ID NO: 9694 - RNA, 22 nt, Human
ggcagacuuuuucucugaaggg

SEQ ID NO: 9695 - RNA, 23 nt, Human
ggcagagagcauggcuggggccc

SEQ ID NO: 9696 - RNA, 22 nt, Human
ggcagagcagccccaggguuug

SEQ ID NO: 9697 - RNA, 22 nt, Human
ggcagagcauucgauggaccug

SEQ ID NO: 9698 - RNA, 17 nt, Human
ggcagagcugacagggc

SEQ ID NO: 9699 - RNA, 22 nt, Human
ggcagagcuugcagugagccga

SEQ ID NO: 9700 - RNA, 22 nt, Human
aacaaguucuaccucacaaggu

SEQ ID NO: 9701 - RNA, 23 nt, Human
aacaauagagauaaagugagauc

SEQ ID NO: 9702 - RNA, 22 nt, Human
aacaauaggaccuuuauguucu

SEQ ID NO: 9703 - RNA, 22 nt, Human
aacaauaggagugaugcaguau

SEQ ID NO: 9704 - RNA, 22 nt, Human
aacaaucaaguuucuaaaugac

SEQ ID NO: 9705 - RNA, 20 nt, Human
aacaaucuagaagcuauucu

SEQ ID NO: 9706 - RNA, 22 nt, Human
aacaaucuguucgauagaaaau

SEQ ID NO: 9707 - RNA, 22 nt, Human
aacaaugcaguuaaugggaaga

SEQ ID NO: 9708 - RNA, 16 nt, Human
aacaaugccaauccag

SEQ ID NO: 9709 - RNA, 22 nt, Human
aacaaugccacauuaaguguau

SEQ ID NO: 9710 - RNA, 22 nt, Human
aacaaugccugaugaccuccug

SEQ ID NO: 9711 - RNA, 22 nt, Human
aacaaugcugaacugaggaaag

SEQ ID NO: 9712 - RNA, 22 nt, Human
aacaauguaaucuacucugcuc

SEQ ID NO: 9713 - RNA, 22 nt, Human
aacaauguccugugagaugaua

SEQ ID NO: 9714 - RNA, 22 nt, Human
aacaaugugauugaagcuagaa

SEQ ID NO: 9715 - RNA, 22 nt, Human
aacaauuacuaccaaggccugu

SEQ ID NO: 9716 - RNA, 22 nt, Human
aacacaaagaagcugcaggauc

SEQ ID NO: 9717 - RNA, 22 nt, Human
aacacagacauagugauuacag

SEQ ID NO: 9718 - RNA, 22 nt, Human
aacacagggacucccaggagaa

SEQ ID NO: 9719 - RNA, 22 nt, Human
aacacagguugcugggccucac

SEQ ID NO: 9720 - RNA, 22 nt, Human
aacacagguuugugguaaauaa

SEQ ID NO: 9721 - RNA, 22 nt, Human
aacacagucaguuccuggauca

SEQ ID NO: 9722 - RNA, 22 nt, Human
aacacaguccugcucacuuauu

SEQ ID NO: 9723 - RNA, 22 nt, Human
aacacauggcaagagcaggaaa

SEQ ID NO: 9724 - RNA, 22 nt, Human
aacacauggguguuuauuguac

SEQ ID NO: 9725 - RNA, 22 nt, Human
aacacauuggaagccaagaaug

SEQ ID NO: 9726 - RNA, 23 nt, Human
aacaccaaggcucagagagauaa

SEQ ID NO: 9727 - RNA, 22 nt, Human
aacaccagucccaagagaggcu

SEQ ID NO: 9728 - RNA, 22 nt, Human
aacaccuucuccuugcaggcca

SEQ ID NO: 9729 - RNA, 22 nt, Human
aacacugaaguagugaauacug

SEQ ID NO: 9730 - RNA, 20 nt, Human
aacacugagggcuacucuuc

SEQ ID NO: 9731 - RNA, 22 nt, Human
aacacuggaagggacaucaagu

SEQ ID NO: 9732 - RNA, 22 nt, Human
aacacuggacaggaggcuaggu

SEQ ID NO: 9733 - RNA, 22 nt, Human
aacacugucagccuuugaugga

SEQ ID NO: 9734 - RNA, 22 nt, Human
aacacugugcccacccuagucc

SEQ ID NO: 9735 - RNA, 20 nt, Human
aacacugugcgugguaggug

SEQ ID NO: 9736 - RNA, 22 nt, Human
aacacuguggucuuuucaguaa

SEQ ID NO: 9737 - RNA, 22 nt, Human
aacacuuagauuuuuaagguuu

SEQ ID NO: 9738 - RNA, 22 nt, Human
aacacuuuccguagguuuagua

SEQ ID NO: 9739 - RNA, 22 nt, Human
aacacuuucuauuauuaugguu

SEQ ID NO: 9740 - RNA, 22 nt, Human
aacacuuucuuccuugcucagg

SEQ ID NO: 9741 - RNA, 22 nt, Human
aacacuuuggaugcagaaccaa

SEQ ID NO: 9742 - RNA, 22 nt, Human
aacagaauaguugauguacagu

SEQ ID NO: 9743 - RNA, 22 nt, Human
aacagaauaucaaaagauuaug

SEQ ID NO: 9744 - RNA, 22 nt, Human
aacagacauauuuuuaauaugc

SEQ ID NO: 9745 - RNA, 22 nt, Human
aacagagaggccaccucagcag

SEQ ID NO: 9746 - RNA, 22 nt, Human
aacagagcucugcucucagauu

SEQ ID NO: 9747 - RNA, 22 nt, Human
aacagauuuaagaagccaaggu

SEQ ID NO: 9748 - RNA, 20 nt, Human
aacagcacacauucgcauua

SEQ ID NO: 9749 - RNA, 22 nt, Human
aacagcagaggagcgauggcug

SEQ ID NO: 9750 - RNA, 22 nt, Human
aacagcagcugccugaauuugc

SEQ ID NO: 9751 - RNA, 23 nt, Human
aacagcaggaugauagaggaggu

SEQ ID NO: 9752 - RNA, 22 nt, Human
aacagcagggacuugaauggaa

SEQ ID NO: 9753 - RNA, 22 nt, Human
aacagcaucaccccauaacauu

SEQ ID NO: 9754 - RNA, 22 nt, Human
aacagcaugcuggguaacauug

SEQ ID NO: 9755 - RNA, 22 nt, Human
aacagccugagagaacaaugau

SEQ ID NO: 9756 - RNA, 22 nt, Human
aacagcgacguccuccccaaca

SEQ ID NO: 9757 - RNA, 22 nt, Human
aacagcuaccuucucacugugc

SEQ ID NO: 9758 - RNA, 22 nt, Human
aacagcugcuucaguacuugaa

SEQ ID NO: 9759 - RNA, 22 nt, Human
aacagcugcuucuaucuuuuca

SEQ ID NO: 9760 - RNA, 22 nt, Human
aacagcuguauacuguagcugu

SEQ ID NO: 9761 - RNA, 22 nt, Human
aacagcugucugccuaucucug

SEQ ID NO: 9762 - RNA, 22 nt, Human
aacagcuuagaaauguugcuaa

SEQ ID NO: 9763 - RNA, 22 nt, Human
aacagcuugagacuggauaugc

SEQ ID NO: 9764 - RNA, 22 nt, Human
aacagcuuugagcaguucugua

SEQ ID NO: 9765 - RNA, 22 nt, Human
aacaggaaacaaguuguuagga

SEQ ID NO: 9766 - RNA, 22 nt, Human
aacaggaauugcaggcagaucu

SEQ ID NO: 9767 - RNA, 22 nt, Human
aacaggagaggggaauguagag

SEQ ID NO: 9768 - RNA, 22 nt, Human
aaaggcaagcauuuauauagga

SEQ ID NO: 9769 - RNA, 22 nt, Human
aaaggcaauuucuucuuccuga

SEQ ID NO: 9770 - RNA, 22 nt, Human
aaaggcacacacuccuuguuau

SEQ ID NO: 9771 - RNA, 22 nt, Human
aaaggcacugaucuuauccagu

SEQ ID NO: 9772 - RNA, 22 nt, Human
aaaggcagaguuguuggaggca

SEQ ID NO: 9773 - RNA, 22 nt, Human
aaaggcaggacugcagcauagg

SEQ ID NO: 9774 - RNA, 22 nt, Human
aaaggcaguggguauguggauc

SEQ ID NO: 9775 - RNA, 19 nt, Human
aaaggcaguggguggcgug

SEQ ID NO: 9776 - RNA, 22 nt, Human
aaaggcaugauuaauucugugu

SEQ ID NO: 9777 - RNA, 22 nt, Human
aaaggcaugcauggucugcucc

SEQ ID NO: 9778 - RNA, 22 nt, Human
aaaggcauguggucaaggcuca

SEQ ID NO: 9779 - RNA, 22 nt, Human
aaaggcuaauuaaccaccuggu

SEQ ID NO: 9780 - RNA, 22 nt, Human
aaaggcuauuuuuagauguuug

SEQ ID NO: 9781 - RNA, 22 nt, Human
aaaggcucagaugaggcccugg

SEQ ID NO: 9782 - RNA, 18 nt, Human
aaaggcugaauauagaag

SEQ ID NO: 9783 - RNA, 22 nt, Human
aaaggcuggaaacugaagauaa

SEQ ID NO: 9784 - RNA, 22 nt, Human
aaaggcuggauucagagaggug

SEQ ID NO: 9785 - RNA, 22 nt, Human
aaaggcuggggacugaggaagg

SEQ ID NO: 9786 - RNA, 22 nt, Human
aaaggcuuaacagaagaccuuu

SEQ ID NO: 9787 - RNA, 22 nt, Human
aaaggcuuguacagcagccuuc

SEQ ID NO: 9788 - RNA, 22 nt, Human
aaaggcuuuaaaauguacauau

SEQ ID NO: 9789 - RNA, 22 nt, Human
aaaggcuuuccagcgcgcggac

SEQ ID NO: 9790 - RNA, 22 nt, Human
aaaggcuuugagaaguccugca

SEQ ID NO: 9791 - RNA, 22 nt, Human
aaagggagcauggcugcaggga

SEQ ID NO: 9792 - RNA, 22 nt, Human
aaagggaggggcgauaagccgg

SEQ ID NO: 9793 - RNA, 22 nt, Human
aaagggcagaguucacuagaaa

SEQ ID NO: 9794 - RNA, 22 nt, Human
aaagggcugaugugacauagcu

SEQ ID NO: 9795 - RNA, 22 nt, Human
aaagggcugucaaauaagcaac

SEQ ID NO: 9796 - RNA, 22 nt, Human
aaagguaacugggguuuugcca

SEQ ID NO: 9797 - RNA, 22 nt, Human
aaagguaguacuucuagaaggg

SEQ ID NO: 9798 - RNA, 22 nt, Human
aaaggucauugaaaaggaggaa

SEQ ID NO: 9799 - RNA, 17 nt, Human
aaaggucgauaaggugg

SEQ ID NO: 9800 - RNA, 22 nt, Human
aaaggucuacaucacugaaaga

SEQ ID NO: 9801 - RNA, 22 nt, Human
aaaggucuuuauuggucagcca

SEQ ID NO: 9802 - RNA, 22 nt, Human
aaaggugacacucugccagcug

SEQ ID NO: 9803 - RNA, 22 nt, Human
aaagguguugccuuggagaccu

SEQ ID NO: 9804 - RNA, 22 nt, Human
aaagguuaagguguucaagaaa

SEQ ID NO: 9805 - RNA, 22 nt, Human
aaagguuugaggugggaagagg

SEQ ID NO: 9806 - RNA, 22 nt, Human
aaagguuugccgaccucugcuu

SEQ ID NO: 9807 - RNA, 22 nt, Human
aaagguuuucaucacagcaaga

SEQ ID NO: 9808 - RNA, 22 nt, Human
aaagguuuuuauuuauccugga

SEQ ID NO: 9809 - RNA, 22 nt, Human
aacugcaaucacuuuugcacca

SEQ ID NO: 9810 - RNA, 22 nt, Human
aacugcacuguucuuuucuaca

SEQ ID NO: 9811 - RNA, 22 nt, Human
aacugcaguuaccuuugcacca

SEQ ID NO: 9812 - RNA, 16 nt, Human
aacugcaugagugggu

SEQ ID NO: 9813 - RNA, 20 nt, Human
aacugccugcccagaggugg

SEQ ID NO: 9814 - RNA, 22 nt, Human
aacugccuggccaggcugcaac

SEQ ID NO: 9815 - RNA, 22 nt, Human
aacugcuuagugauggaugacc

SEQ ID NO: 9816 - RNA, 22 nt, Human
aacugcuuaucuuugguagaug

SEQ ID NO: 9817 - RNA, 22 nt, Human
aacugcuuguagugacuugccu

SEQ ID NO: 9818 - RNA, 22 nt, Human
aacuggaaccuuuuauucaguc

SEQ ID NO: 9819 - RNA, 21 nt, Human
aacuggcagaccaacuauggc

SEQ ID NO: 9820 - RNA, 22 nt, Human
aacuggcauaugaacuuguucu

SEQ ID NO: 9821 - RNA, 22 nt, Human
aacuggcugggaacaccuagag

SEQ ID NO: 9822 - RNA, 22 nt, Human
aacugguagaaagcaguaagug

SEQ ID NO: 9823 - RNA, 22 nt, Human
aacugguauggugagaagagag

SEQ ID NO: 9824 - RNA, 22 nt, Human
aacugguucucuuuugcuugug

SEQ ID NO: 9825 - RNA, 22 nt, Human
aacuguaagaaauaaaauucug

SEQ ID NO: 9826 - RNA, 22 nt, Human
aacuguauacaauugucagaca

SEQ ID NO: 9827 - RNA, 22 nt, Human
aacugucaucuuucaaggaaga

SEQ ID NO: 9828 - RNA, 22 nt, Human
aacugucuuaauaacaaaagcu

SEQ ID NO: 9829 - RNA, 23 nt, Human
aacugucuugcaagugugauacc

SEQ ID NO: 9830 - RNA, 22 nt, Human
aacuguggagauucggaaggua

SEQ ID NO: 9831 - RNA, 22 nt, Human
aacuguggcauguugaauuugu

SEQ ID NO: 9832 - RNA, 22 nt, Human
aacuguuacauaguuauagauc

SEQ ID NO: 9833 - RNA, 22 nt, Human
aacuguucuucauuuucaguau

SEQ ID NO: 9834 - RNA, 22 nt, Human
aacuguugcuuguaauaugugc

SEQ ID NO: 9835 - RNA, 22 nt, Human
aacuguuuggaacucuuccaca

SEQ ID NO: 9836 - RNA, 22 nt, Human
aacuuaaacaagcucccaaguu

SEQ ID NO: 9837 - RNA, 22 nt, Human
aacuuacaauguuagagucuca

SEQ ID NO: 9838 - RNA, 22 nt, Human
aacuuaguguaaugcaguacag

SEQ ID NO: 9839 - RNA, 22 nt, Human
aacuuaguuuaggguauugauu

SEQ ID NO: 9840 - RNA, 22 nt, Human
aacuucagggacagaaaagagc

SEQ ID NO: 9841 - RNA, 22 nt, Human
aacuucauuccuuuuuaugacu

SEQ ID NO: 9842 - RNA, 22 nt, Human
aacuucauuuauaaugucauua

SEQ ID NO: 9843 - RNA, 22 nt, Human
aacuuccaacccagaagccuaa

SEQ ID NO: 9844 - RNA, 22 nt, Human
aacuuccaccaaauaguauaua

SEQ ID NO: 9845 - RNA, 22 nt, Human
aacuuccagcuuucugucuaau

SEQ ID NO: 9846 - RNA, 22 nt, Human
aacuucugcuuuuacaggcagu

SEQ ID NO: 9847 - RNA, 22 nt, Human
aacuucuugguccugagcuguu

SEQ ID NO: 9848 - RNA, 22 nt, Human
aacuugaaacuguuccagaaaa

SEQ ID NO: 9849 - RNA, 22 nt, Human
aacuugaaguugcagaaaguac

SEQ ID NO: 9850 - RNA, 22 nt, Human
aacuugaaugagaacuuuugcc

SEQ ID NO: 9851 - RNA, 22 nt, Human
aacuugcagacaccugucucaa

SEQ ID NO: 9852 - RNA, 22 nt, Human
aacuugccaagagcuuugcuag

SEQ ID NO: 9853 - RNA, 22 nt, Human
aacuugcuuauauuauuacauu

SEQ ID NO: 9854 - RNA, 22 nt, Human
aacuugguaaauugugucagau

SEQ ID NO: 9855 - RNA, 22 nt, Human
aacuugguaccaccuucugaag

SEQ ID NO: 9856 - RNA, 22 nt, Human
aacuuguuagaaaugcagaauc

SEQ ID NO: 9857 - RNA, 22 nt, Human
aacuuguuucuuccauucaaca

SEQ ID NO: 9858 - RNA, 22 nt, Human
aacuuuaaaaaauaugucuguu

SEQ ID NO: 9859 - RNA, 23 nt, Human
aacuuuacuauuuugaauaaugc

SEQ ID NO: 9860 - RNA, 21 nt, Human
aacuuuagaaagacugggaag

SEQ ID NO: 9861 - RNA, 22 nt, Human
aacuuuaucggaacagguacuc

SEQ ID NO: 9862 - RNA, 22 nt, Human
aacuuucuagagaugaguucgg

SEQ ID NO: 9863 - RNA, 22 nt, Human
aacuuucuccagugccaacuau

SEQ ID NO: 9864 - RNA, 20 nt, Human
aacuuucucccauuggacug

SEQ ID NO: 9865 - RNA, 22 nt, Human
aacuuucucuacggcauuuguu

SEQ ID NO: 9866 - RNA, 22 nt, Human
aacuuucuguuacguccccaga

SEQ ID NO: 9867 - RNA, 22 nt, Human
aacuuucuuucacagaaguauc

SEQ ID NO: 9868 - RNA, 22 nt, Human
aacuuucuuugcaucuaaguuu

SEQ ID NO: 9869 - RNA, 22 nt, Human
aacuuugaggucacugaauucc

SEQ ID NO: 9870 - RNA, 22 nt, Human
aacuuugcauaacuaacuacag

SEQ ID NO: 9871 - RNA, 21 nt, Human
aacuuugcuuaacugugugga

SEQ ID NO: 9872 - RNA, 22 nt, Human
aacuuugggccuaaguacuguu

SEQ ID NO: 9873 - RNA, 22 nt, Human
aacuuuguguguuuaauauggc

SEQ ID NO: 9874 - RNA, 22 nt, Human
aacuuuuacaaauugucaucau

SEQ ID NO: 9875 - RNA, 22 nt, Human
aacuuuuguccgaucuccugga

SEQ ID NO: 9876 - RNA, 22 nt, Human
aacuuuuucugggauggagggu

SEQ ID NO: 9877 - RNA, 22 nt, Human
aagaaaacaaugacuugccagc

SEQ ID NO: 9878 - RNA, 20 nt, Human
aagaaaacgucuucagggga

SEQ ID NO: 9879 - RNA, 22 nt, Human
aagaaaccuagucuggagcagc

SEQ ID NO: 9880 - RNA, 22 nt, Human
aagaaacugaaaguggcuucau

SEQ ID NO: 9881 - RNA, 22 nt, Human
aagaaagagaucacuccuccau

SEQ ID NO: 9882 - RNA, 22 nt, Human
aagaaagggcuauuguucucca

SEQ ID NO: 9883 - RNA, 22 nt, Human
aagaaagugaugagcuacagau

SEQ ID NO: 9884 - RNA, 22 nt, Human
aagaaauauugggccuuauaaa

SEQ ID NO: 9885 - RNA, 22 nt, Human
aagaaaucugauauuuguuuca

SEQ ID NO: 9886 - RNA, 22 nt, Human
aagaaaugcacacaacugcugg

SEQ ID NO: 9887 - RNA, 22 nt, Human
aaaguuagcauucucucuugcu

SEQ ID NO: 9888 - RNA, 22 nt, Human
aaaguuaguuucuuauaugucu

SEQ ID NO: 9889 - RNA, 22 nt, Human
aaaguucauugaugacugaggu

SEQ ID NO: 9890 - RNA, 22 nt, Human
aaaguuccuuuuauagacauga

SEQ ID NO: 9891 - RNA, 23 nt, Human
aaaguucuagaaugacuuccugu

SEQ ID NO: 9892 - RNA, 22 nt, Human
aaaguucuccuggauugugcug

SEQ ID NO: 9893 - RNA, 22 nt, Human
aaaguucucuaugguguaaaaa

SEQ ID NO: 9894 - RNA, 22 nt, Human
aaaguucugaugcugaucaaag

SEQ ID NO: 9895 - RNA, 22 nt, Human
aaaguucuggagaaaauaauga

SEQ ID NO: 9896 - RNA, 22 nt, Human
aaaguucuucauuuuuauugga

SEQ ID NO: 9897 - RNA, 22 nt, Human
aaaguucuuuuucuauaaaucc

SEQ ID NO: 9898 - RNA, 19 nt, Human
aaaguugagaaacaaugga

SEQ ID NO: 9899 - RNA, 22 nt, Human
aaaguugcagguggugagaggu

SEQ ID NO: 9900 - RNA, 22 nt, Human
aaaguugcagugaaauaaggcu

SEQ ID NO: 9901 - RNA, 22 nt, Human
aaaguugcuguccuagcuggcu

SEQ ID NO: 9902 - RNA, 22 nt, Human
aaaguuuaggcuuugaaaccag

SEQ ID NO: 9903 - RNA, 22 nt, Human
aaaguuuaguguccucuaccac

SEQ ID NO: 9904 - RNA, 22 nt, Human
aaaguuuccaaguuacaccauu

SEQ ID NO: 9905 - RNA, 22 nt, Human
aaaguuugaaugauauauuagu

SEQ ID NO: 9906 - RNA, 22 nt, Human
aaaguuugcaauuuauguuaau

SEQ ID NO: 9907 - RNA, 22 nt, Human
aaaguuuuagaacuaggaagca

SEQ ID NO: 9908 - RNA, 22 nt, Human
aaaguuuuagcuguccaguucc

SEQ ID NO: 9909 - RNA, 19 nt, Human
aaaguuuuauucucauuug

SEQ ID NO: 9910 - RNA, 22 nt, Human
aaauaaagguccacuuuagggc

SEQ ID NO: 9911 - RNA, 22 nt, Human
aaauaacuugguuucaucagag

SEQ ID NO: 9912 - RNA, 22 nt, Human
aaauaagaggacagauguuugg

SEQ ID NO: 9913 - RNA, 22 nt, Human
aaauaagcacuuaacuguauca

SEQ ID NO: 9914 - RNA, 22 nt, Human
aaauaaguaguuuaguguugug

SEQ ID NO: 9915 - RNA, 22 nt, Human
aaauaagugugggccagucaaa

SEQ ID NO: 9916 - RNA, 22 nt, Human
aaauaauguuaggccuuugcuc

SEQ ID NO: 9917 - RNA, 22 nt, Human
aaauacagauucugacucagag

SEQ ID NO: 9918 - RNA, 22 nt, Human
aaauguaccuugauaguuuggu

SEQ ID NO: 9919 - RNA, 22 nt, Human
aaauguaguauguugcauguau

SEQ ID NO: 9920 - RNA, 22 nt, Human
aaauguauccuacuuccugagu

SEQ ID NO: 9921 - RNA, 22 nt, Human
aaaugucaaggugauagaugca

SEQ ID NO: 9922 - RNA, 22 nt, Human
aaauguccugagauucaacuua

SEQ ID NO: 9923 - RNA, 22 nt, Human
aaaugucugagacuucugaacu

SEQ ID NO: 9924 - RNA, 22 nt, Human
aaaugucuguaggggcugcagg

SEQ ID NO: 9925 - RNA, 23 nt, Human
aaaugucuucuagcucuugagaa

SEQ ID NO: 9926 - RNA, 22 nt, Human
aaaugucuuuaucucauguaac

SEQ ID NO: 9927 - RNA, 22 nt, Human
aaaugugacagaugcaguacag

SEQ ID NO: 9928 - RNA, 22 nt, Human
aaaugugcuucuuacucucaau

SEQ ID NO: 9929 - RNA, 22 nt, Human
aaaugugcuugugaucagcugu

SEQ ID NO: 9930 - RNA, 22 nt, Human
aaauguguauaugaaacaugau

SEQ ID NO: 9931 - RNA, 22 nt, Human
aaaugugucaguuucauucucu

SEQ ID NO: 9932 - RNA, 22 nt, Human
aaaugugugcacaaagacagcu

SEQ ID NO: 9933 - RNA, 21 nt, Human
aaauguguuccauaaugcuuu

SEQ ID NO: 9934 - RNA, 22 nt, Human
aaauguguuccuuugcuacaga

SEQ ID NO: 9935 - RNA, 22 nt, Human
aaauguucaccagauccaugac

SEQ ID NO: 9936 - RNA, 22 nt, Human
aaauguuccggguaaggagaaa

SEQ ID NO: 9937 - RNA, 22 nt, Human
aaauguuucuacuugugagcau

SEQ ID NO: 9938 - RNA, 22 nt, Human
aaauuacagaucaccaaugcau

SEQ ID NO: 9939 - RNA, 22 nt, Human
aaauuacagccuuggguagcuu

SEQ ID NO: 9940 - RNA, 22 nt, Human
aaauuagaaauacuuucaaagc

SEQ ID NO: 9941 - RNA, 22 nt, Human
aaauuagucgguuuaggaauuu

SEQ ID NO: 9942 - RNA, 22 nt, Human
aaauuauuaaacagugggaugc

SEQ ID NO: 9943 - RNA, 22 nt, Human
aaauuauuaguuaaguugggca

SEQ ID NO: 9944 - RNA, 22 nt, Human
aaauucaaugaucacuggcuca

SEQ ID NO: 9945 - RNA, 22 nt, Human
aaauucacaagagcauugccug

SEQ ID NO: 9946 - RNA, 22 nt, Human
aaauucacuugccugcuuagcu

SEQ ID NO: 9947 - RNA, 22 nt, Human
aaauucagcagugaaaugcccc

SEQ ID NO: 9948 - RNA, 22 nt, Human
aaauuccagaaacucaguauau

SEQ ID NO: 9949 - RNA, 22 nt, Human
aaauuccauuuugugacuauuc

SEQ ID NO: 9950 - RNA, 22 nt, Human
aaauucucaagugauccuguug

SEQ ID NO: 9951 - RNA, 19 nt, Human
aaauucugacagucuuuua

SEQ ID NO: 9952 - RNA, 22 nt, Human
aaauugaaugauuaagugguga

SEQ ID NO: 9953 - RNA, 22 nt, Human
aaauugauuaaaguccgugcuu

SEQ ID NO: 9954 - RNA, 22 nt, Human
aaauugcauucaggaugcagga

SEQ ID NO: 9955 - RNA, 22 nt, Human
aaauugcauugagcugcuuauu

SEQ ID NO: 9956 - RNA, 22 nt, Human
aaauugccugaguaugucacau

SEQ ID NO: 9957 - RNA, 22 nt, Human
aaauugcucuuuaaaaguacug

SEQ ID NO: 9958 - RNA, 22 nt, Human
aaauugcugacacuugaccauu

SEQ ID NO: 9959 - RNA, 22 nt, Human
aaauuggaugcacauuuagaaa

SEQ ID NO: 9960 - RNA, 22 nt, Human
aaauuggauugggagaauguga

SEQ ID NO: 9961 - RNA, 22 nt, Human
aaauugucaguuaucugggaua

SEQ ID NO: 9962 - RNA, 22 nt, Human
aaauugucauuucugugcccua

SEQ ID NO: 9963 - RNA, 22 nt, Human
aaauuguccuuuuaagaaacag

SEQ ID NO: 9964 - RNA, 22 nt, Human
aaauugugucucaggcaguggu

SEQ ID NO: 9965 - RNA, 20 nt, Human
aaauuguguuugugagcucc

SEQ ID NO: 9966 - RNA, 22 nt, Human
aaauuguugaucuacaguaagg

SEQ ID NO: 9967 - RNA, 22 nt, Human
aaauuuaaggaggugcucacuu

SEQ ID NO: 9968 - RNA, 22 nt, Human
aaauuucaguuggaaugagcuc

SEQ ID NO: 9969 - RNA, 22 nt, Human
aaauuucuaagcagccacuucc

SEQ ID NO: 9970 - RNA, 22 nt, Human
aaauuucuggaagugucagagu

SEQ ID NO: 9971 - RNA, 22 nt, Human
aaauuucuguuguuuugagcca

SEQ ID NO: 9972 - RNA, 22 nt, Human
aaauuugccagaucaauucuga

SEQ ID NO: 9973 - RNA, 22 nt, Human
aaauuuguauuccuuuuccgua

SEQ ID NO: 9974 - RNA, 22 nt, Human
aaauuuguucaaugucuauuug

SEQ ID NO: 9975 - RNA, 22 nt, Human
aaauuuucucucuaagacuuaa

SEQ ID NO: 9976 - RNA, 22 nt, Human
aaauuuuguauucuaguucuag

SEQ ID NO: 9977 - RNA, 22 nt, Human
aacaaaacauuugucuuguuuc

SEQ ID NO: 9978 - RNA, 22 nt, Human
aacaaacaaacauuuugucauc

SEQ ID NO: 9979 - RNA, 22 nt, Human
aacaaacaguuaaguguggaug

SEQ ID NO: 9980 - RNA, 22 nt, Human
aacaaagaagacugguuauuuu

SEQ ID NO: 9981 - RNA, 22 nt, Human
aacaaagcccugcccaagagcu

SEQ ID NO: 9982 - RNA, 22 nt, Human
aacaaaguacuuuucagugcuu

SEQ ID NO: 9983 - RNA, 22 nt, Human
aacaaaguguacuuccauacug

SEQ ID NO: 9984 - RNA, 22 nt, Human
aacaaauggggccuuguaugaa

SEQ ID NO: 9985 - RNA, 22 nt, Human
aacaaauuaguugcaagacugg

SEQ ID NO: 9986 - RNA, 22 nt, Human
aacaacaacggagaaaggguug

SEQ ID NO: 9987 - RNA, 22 nt, Human
aacaaccaaaaagaugaaugua

SEQ ID NO: 9988 - RNA, 22 nt, Human
aacaacuugcguucagagaugu

SEQ ID NO: 9989 - RNA, 22 nt, Human
aacaagaagagagggacguaau

SEQ ID NO: 9990 - RNA, 22 nt, Human
aacaagaauaagugguuucugg

SEQ ID NO: 9991 - RNA, 22 nt, Human
aacaagagacucuguuccagaa

SEQ ID NO: 9992 - RNA, 22 nt, Human
aacaaggcugguaucuuaaaga

SEQ ID NO: 9993 - RNA, 19 nt, Human
aacaaguaggaauggaaga

SEQ ID NO: 9994 - RNA, 22 nt, Human
aacaagucuaagagaauggcag

SEQ ID NO: 9995 - RNA, 22 nt, Human
aacaaguuagauuuugugucuu

SEQ ID NO: 9996 - RNA, 22 nt, Human
aacaaguucuaagugucuacuu

SEQ ID NO: 9997 - RNA, 22 nt, Human
aacaauaacuagacaugccaug

SEQ ID NO: 9998 - RNA, 22 nt, Human
aacaauaauugcgguucucuau

SEQ ID NO: 9999 - RNA, 22 nt, Human
aacaauaggcuauaugcuaggc

SEQ ID NO: 10000 - RNA, 23 nt, Human
aacaauagguuuuggcagaauag

SEQ ID NO: 10001 - RNA, 22 nt, Human
aacaaugcuugccaagugugau

SEQ ID NO: 10002 - RNA, 22 nt, Human
aacaaugugaagugcuguucag

SEQ ID NO: 10003 - RNA, 22 nt, Human
aacacaaucuuccaguuugcug

SEQ ID NO: 10004 - RNA, 20 nt, Human
aacacacugguggcaucagg

SEQ ID NO: 10005 - RNA, 22 nt, Human
aaaugucuacuucccaucugua

SEQ ID NO: 10006 - RNA, 22 nt, Human
aaaugucucuauugccucuggu

SEQ ID NO: 10007 - RNA, 22 nt, Human
aaaugucuuucuucugcuacgu

SEQ ID NO: 10008 - RNA, 23 nt, Human
aaaugugagggaaaaucuuucug

SEQ ID NO: 10009 - RNA, 22 nt, Human
aaaugugaguuauagcaauaga

SEQ ID NO: 10010 - RNA, 22 nt, Human
aaaugugcaugagucagaagug

SEQ ID NO: 10011 - RNA, 22 nt, Human
aaaugugcucauuuauaaaagu

SEQ ID NO: 10012 - RNA, 22 nt, Human
aaauguguuucgaaaacuggug

SEQ ID NO: 10013 - RNA, 22 nt, Human
aaauguguuucuuugugaaugg

SEQ ID NO: 10014 - RNA, 22 nt, Human
aaauguuagguuguacugaguc

SEQ ID NO: 10015 - RNA, 22 nt, Human
aaauguucccaauaugaagcug

SEQ ID NO: 10016 - RNA, 22 nt, Human
aaauguucuaaauuacauguga

SEQ ID NO: 10017 - RNA, 22 nt, Human
aaauguucuacuuugauaauua

SEQ ID NO: 10018 - RNA, 22 nt, Human
aaauguuuugcucccauguggu

SEQ ID NO: 10019 - RNA, 22 nt, Human
aaauuagaccagggcuccugga

SEQ ID NO: 10020 - RNA, 22 nt, Human
aaauuagaccaguucaggucca

SEQ ID NO: 10021 - RNA, 22 nt, Human
aaauuagauaugugugagacuc

SEQ ID NO: 10022 - RNA, 22 nt, Human
aaauuagaucaguggauuuucu

SEQ ID NO: 10023 - RNA, 22 nt, Human
aaauuagucauguuguauuacu

SEQ ID NO: 10024 - RNA, 22 nt, Human
aaauuagugcaccagguugaag

SEQ ID NO: 10025 - RNA, 22 nt, Human
aaauuauucucauguguuucuu

SEQ ID NO: 10026 - RNA, 23 nt, Human
aaauuauugcucuucaauugccu

SEQ ID NO: 10027 - RNA, 22 nt, Human
aagcaguaaugagguacuauuu

SEQ ID NO: 10028 - RNA, 22 nt, Human
aagcagugacucucagaggcag

SEQ ID NO: 10029 - RNA, 22 nt, Human
aagcagugauaagagcuaccau

SEQ ID NO: 10030 - RNA, 22 nt, Human
aagcagugaugcauacagcugu

SEQ ID NO: 10031 - RNA, 22 nt, Human
aagcaguuuuucaacuguuuag

SEQ ID NO: 10032 - RNA, 22 nt, Human
aagcauaacuugcugcacauag

SEQ ID NO: 10033 - RNA, 22 nt, Human
aagcauauauuuuauauguugu

SEQ ID NO: 10034 - RNA, 22 nt, Human
aagcaucaacacuauauugaug

SEQ ID NO: 10035 - RNA, 22 nt, Human
aagcaucuauauuccacuguga

SEQ ID NO: 10036 - RNA, 22 nt, Human
aagcaucuccucaucauuuggg

SEQ ID NO: 10037 - RNA, 22 nt, Human
aagcaucuguaaagacccuuau

SEQ ID NO: 10038 - RNA, 23 nt, Human
aagcaucuuuuccuagcuccauc

SEQ ID NO: 10039 - RNA, 22 nt, Human
aagcauggagcaauagaaugac

SEQ ID NO: 10040 - RNA, 22 nt, Human
aagcauggcuguucuagcuaua

SEQ ID NO: 10041 - RNA, 22 nt, Human
aagcaugggaggccuggaggag

SEQ ID NO: 10042 - RNA, 22 nt, Human
aagcauguacaaugagugucuc

SEQ ID NO: 10043 - RNA, 23 nt, Human
aagcauucgccuucacccuccuc

SEQ ID NO: 10044 - RNA, 22 nt, Human
aagcauuucagguagagauauu

SEQ ID NO: 10045 - RNA, 22 nt, Human
aagcauuugguucugaagacuc

SEQ ID NO: 10046 - RNA, 22 nt, Human
aagcauuugugaaauucagaug

SEQ ID NO: 10047 - RNA, 22 nt, Human
aagcauuuuucacagcaacagc

SEQ ID NO: 10048 - RNA, 22 nt, Human
aagccaaaggcuccagugaccu

SEQ ID NO: 10049 - RNA, 22 nt, Human
aagccaaauaauguagguacau

SEQ ID NO: 10050 - RNA, 22 nt, Human
aagccaauggauugguugcuuu

SEQ ID NO: 10051 - RNA, 22 nt, Human
aagccacuguuuuggagugcuu

SEQ ID NO: 10052 - RNA, 22 nt, Human
aagccacuuucagcugucucag

SEQ ID NO: 10053 - RNA, 18 nt, Human
aagccagagaccacugcc

SEQ ID NO: 10054 - RNA, 22 nt, Human
aagccagaguuuuugagaacuu

SEQ ID NO: 10055 - RNA, 22 nt, Human
aagccagcauuuucccauuccu

SEQ ID NO: 10056 - RNA, 22 nt, Human
aagccaggaagagagccuucac

SEQ ID NO: 10057 - RNA, 22 nt, Human
aagccaggaagggagcuguccc

SEQ ID NO: 10058 - RNA, 22 nt, Human
aagccaggcaugcuuggacagu

SEQ ID NO: 10059 - RNA, 22 nt, Human
aagccagggguugguaugcuau

SEQ ID NO: 10060 - RNA, 18 nt, Human
aagccaggucaagauaag

SEQ ID NO: 10061 - RNA, 22 nt, Human
aagccagguguugugguaagag

SEQ ID NO: 10062 - RNA, 22 nt, Human
aagccagguguuuaggccagcg

SEQ ID NO: 10063 - RNA, 22 nt, Human
aagccagguuccauggaggagc

SEQ ID NO: 10064 - RNA, 22 nt, Human
aagccaguguggucugcccauu

SEQ ID NO: 10065 - RNA, 22 nt, Human
aagccaucuuguuuauauguua

SEQ ID NO: 10066 - RNA, 22 nt, Human
aagccaugguagaaaacucagu

SEQ ID NO: 10067 - RNA, 22 nt, Human
aagccauuuguuguccuucagg

SEQ ID NO: 10068 - RNA, 22 nt, Human
aagcccagaaucaagucuacug

SEQ ID NO: 10069 - RNA, 22 nt, Human
aagcccagcucugccugcucug

SEQ ID NO: 10070 - RNA, 22 nt, Human
aagcccaguaccuucagugagg

SEQ ID NO: 10071 - RNA, 23 nt, Human
aagccccaaggaacuuccuggga

SEQ ID NO: 10072 - RNA, 22 nt, Human
aagcccucagagccucuuugac

SEQ ID NO: 10073 - RNA, 22 nt, Human
aagcccucauuagccauagccc

SEQ ID NO: 10074 - RNA, 22 nt, Human
aagcccugaccugagaguccgu

SEQ ID NO: 10075 - RNA, 22 nt, Human
aagcccugauaggaaaaugcug

SEQ ID NO: 10076 - RNA, 22 nt, Human
aagcccuggaacuuuccuagcc

SEQ ID NO: 10077 - RNA, 22 nt, Human
aagcccuggcccaaccuugauu

SEQ ID NO: 10078 - RNA, 22 nt, Human
aagcccuggcucagcucaccag

SEQ ID NO: 10079 - RNA, 22 nt, Human
aagcccugggguugcacaaggc

SEQ ID NO: 10080 - RNA, 22 nt, Human
aagccggcugggccgaggcugc

SEQ ID NO: 10081 - RNA, 22 nt, Human
aagccuaaaugaugcuauuaug

SEQ ID NO: 10082 - RNA, 22 nt, Human
aagccugagccaugcuuuacug

SEQ ID NO: 10083 - RNA, 22 nt, Human
aagccugaggguguugcuagau

SEQ ID NO: 10084 - RNA, 22 nt, Human
aagccugcuuuguuccacagca

SEQ ID NO: 10085 - RNA, 22 nt, Human
aagccuguguuucugcuagucu

SEQ ID NO: 10086 - RNA, 22 nt, Human
aagccuuccugagugcaaggcc

SEQ ID NO: 10087 - RNA, 23 nt, Human
aagccuuguggaggcucucauuu

SEQ ID NO: 10088 - RNA, 22 nt, Human
aagcguuggccuccccugauga

SEQ ID NO: 10089 - RNA, 19 nt, Human
aagcguuucccacuugcuu

SEQ ID NO: 10090 - RNA, 22 nt, Human
aagcuacaguuuacccaugguu

SEQ ID NO: 10091 - RNA, 22 nt, Human
aagcuagaugacguuauuuuuu

SEQ ID NO: 10092 - RNA, 22 nt, Human
aagcuauagaguguaagaugau

SEQ ID NO: 10093 - RNA, 22 nt, Human
aagcucagaguagcucagcguc

SEQ ID NO: 10094 - RNA, 22 nt, Human
aagcucaggcuggaccuggcuu

SEQ ID NO: 10095 - RNA, 22 nt, Human
aagcucagugaugccuccaggg

SEQ ID NO: 10096 - RNA, 22 nt, Human
aagcucaugggugcuguacuuu

SEQ ID NO: 10097 - RNA, 18 nt, Human
aagcucuuaaaugguuca

SEQ ID NO: 10098 - RNA, 22 nt, Human
aagcucuuuccacuaaaccacu

SEQ ID NO: 10099 - RNA, 22 nt, Human
aagcucuuuucaccauuaaagu

SEQ ID NO: 10100 - RNA, 22 nt, Human
aagcugaagacacagcuccagu

SEQ ID NO: 10101 - RNA, 22 nt, Human
aagcugaagaugccagugggag

SEQ ID NO: 10102 - RNA, 22 nt, Human
aagcugaggcccauggcaaggu

SEQ ID NO: 10103 - RNA, 22 nt, Human
aagcugaggcuccccugaggga

SEQ ID NO: 10104 - RNA, 22 nt, Human
aagcugauuccacuuuuuccac

SEQ ID NO: 10105 - RNA, 22 nt, Human
aagcugauucuaaaauuuauua

SEQ ID NO: 10106 - RNA, 22 nt, Human
aagcugcaugaaguugaguaga

SEQ ID NO: 10107 - RNA, 22 nt, Human
aagcugccugccacgcuagaua

SEQ ID NO: 10108 - RNA, 22 nt, Human
aagcugccuuccaugugaggaa

SEQ ID NO: 10109 - RNA, 22 nt, Human
aagcugcuggugacugggcuga

SEQ ID NO: 10110 - RNA, 22 nt, Human
aagcugcuuugucaggaauaug

SEQ ID NO: 10111 - RNA, 20 nt, Human
aagcuggaagaccagcauug

SEQ ID NO: 10112 - RNA, 22 nt, Human
aagcuggacauuguagggggga

SEQ ID NO: 10113 - RNA, 22 nt, Human
aagcuggacucugccauuuacu

SEQ ID NO: 10114 - RNA, 22 nt, Human
aagcuggagaguuucacagaug

SEQ ID NO: 10115 - RNA, 22 nt, Human
aagcuggaggcugagaucacca

SEQ ID NO: 10116 - RNA, 23 nt, Human
aagcuggcugggagcagaaggga

SEQ ID NO: 10117 - RNA, 22 nt, Human
aagcugggagggagcccagagu

SEQ ID NO: 10118 - RNA, 22 nt, Human
aagcuggggacucagaccccau

SEQ ID NO: 10119 - RNA, 20 nt, Human
aagcuggguaggagaggagc

SEQ ID NO: 10120 - RNA, 22 nt, Human
aagcuguacuuagcauugacuc

SEQ ID NO: 10121 - RNA, 22 nt, Human
aagcuguagcuuuucaaaacgu

SEQ ID NO: 10122 - RNA, 20 nt, Human
aagcugucagagguggacag

SEQ ID NO: 10123 - RNA, 22 nt, Human
aagcugucagugucaggcuaaa

SEQ ID NO: 10124 - RNA, 22 nt, Human
aagcugugagcuggaugcucca

SEQ ID NO: 10125 - RNA, 22 nt, Human
aagcuguucugaaucaguaagu

SEQ ID NO: 10126 - RNA, 22 nt, Human
aagcuucaaugagauaauuguu

SEQ ID NO: 10127 - RNA, 23 nt, Human
aagcuuccuugacuggccccuag

SEQ ID NO: 10128 - RNA, 23 nt, Human
aagcuucuagggugggcaagaug

SEQ ID NO: 10129 - RNA, 23 nt, Human
aagcuucuaucucugcagaagga

SEQ ID NO: 10130 - RNA, 22 nt, Human
aagcuugauuguagucuagaca

SEQ ID NO: 10131 - RNA, 22 nt, Human
aagcuuuaaggaauuuuaugga

SEQ ID NO: 10132 - RNA, 22 nt, Human
aagcuuucagagcagaauguga

SEQ ID NO: 10133 - RNA, 22 nt, Human
aagcuuugacuacugccucuug

SEQ ID NO: 10134 - RNA, 22 nt, Human
aagcuuuugacuugguagggaa

SEQ ID NO: 10135 - RNA, 21 nt, Human
aaggaaaagcuuggucucuga

SEQ ID NO: 10136 - RNA, 22 nt, Human
aaggccugggaguacugggaca

SEQ ID NO: 10137 - RNA, 22 nt, Human
aaggccuuaaagcucucuccag

SEQ ID NO: 10138 - RNA, 22 nt, Human
aaggccuucuaccaaggcuggg

SEQ ID NO: 10139 - RNA, 22 nt, Human
aaggccuucucuugugucugug

SEQ ID NO: 10140 - RNA, 22 nt, Human
aaggccuugguucugagcaaua

SEQ ID NO: 10141 - RNA, 22 nt, Human
aaggcgacacaggcagcaggcc

SEQ ID NO: 10142 - RNA, 22 nt, Human
aaggcuccacccucauggaugc

SEQ ID NO: 10143 - RNA, 22 nt, Human
aaggcugaaagaccuugaaccu

SEQ ID NO: 10144 - RNA, 22 nt, Human
aagaggcaucucagcuuccucu

SEQ ID NO: 10145 - RNA, 22 nt, Human
aagaggccacagcugacagcac

SEQ ID NO: 10146 - RNA, 22 nt, Human
aagaggccucaccucacugccc

SEQ ID NO: 10147 - RNA, 22 nt, Human
aagaggccuuggucugaccuga

SEQ ID NO: 10148 - RNA, 22 nt, Human
aagaggcgcuccucacuuccua

SEQ ID NO: 10149 - RNA, 22 nt, Human
aagaggcuggaggauacugcgc

SEQ ID NO: 10150 - RNA, 22 nt, Human
aagaggcuggcauugaugguag

SEQ ID NO: 10151 - RNA, 22 nt, Human
aagaggcuuauagucuuccugu

SEQ ID NO: 10152 - RNA, 22 nt, Human
aagagggaaauuguuggcugcu

SEQ ID NO: 10153 - RNA, 22 nt, Human
aagagggguggucugugaggau

SEQ ID NO: 10154 - RNA, 22 nt, Human
aagaggugccagggguuuugua

SEQ ID NO: 10155 - RNA, 22 nt, Human
aagaguaaaugucuaauuagga

SEQ ID NO: 10156 - RNA, 19 nt, Human
aagagucacaggcagcccu

SEQ ID NO: 10157 - RNA, 22 nt, Human
aagagucagcuucuguaugggu

SEQ ID NO: 10158 - RNA, 22 nt, Human
aagagucuuauaguguaauuaa

SEQ ID NO: 10159 - RNA, 22 nt, Human
aagaguggagcuggaaaguggg

SEQ ID NO: 10160 - RNA, 22 nt, Human
aagaguucucagaaacgugggu

SEQ ID NO: 10161 - RNA, 22 nt, Human
aagaguuuaugauauaacaugu

SEQ ID NO: 10162 - RNA, 22 nt, Human
aagaguuucugauucaguaggu

SEQ ID NO: 10163 - RNA, 22 nt, Human
aagaguuugucagaucugcacg

SEQ ID NO: 10164 - RNA, 22 nt, Human
aagaguuuuagacaaacugauu

SEQ ID NO: 10165 - RNA, 22 nt, Human
aagauacacggucaacucucaa

SEQ ID NO: 10166 - RNA, 22 nt, Human
aagauacaucauucaggaguga

SEQ ID NO: 10167 - RNA, 22 nt, Human
aagauacauuguuuuugguagu

SEQ ID NO: 10168 - RNA, 22 nt, Human
aagauacauuuucuucagagaa

SEQ ID NO: 10169 - RNA, 22 nt, Human
aagauacugaugauguaggcua

SEQ ID NO: 10170 - RNA, 22 nt, Human
aagauauaauaacuguugucau

SEQ ID NO: 10171 - RNA, 22 nt, Human
aagauauacuauuaaguaccau

SEQ ID NO: 10172 - RNA, 22 nt, Human
aagauaugaggucaccugcugg

SEQ ID NO: 10173 - RNA, 22 nt, Human
aagauauuuuagaacauucacu

SEQ ID NO: 10174 - RNA, 22 nt, Human
aagaucaagugcuggcaguguu

SEQ ID NO: 10175 - RNA, 22 nt, Human
aagauccaggcaaaaguuggaa

SEQ ID NO: 10176 - RNA, 22 nt, Human
aagauccaugagggcagagauu

SEQ ID NO: 10177 - RNA, 22 nt, Human
aagauccaugggaauguuuggc

SEQ ID NO: 10178 - RNA, 22 nt, Human
aagaugaaaauuuacugugaug

SEQ ID NO: 10179 - RNA, 22 nt, Human
aagaugacuauuuaucuguaag

SEQ ID NO: 10180 - RNA, 22 nt, Human
aagaugauagaucugucaaugu

SEQ ID NO: 10181 - RNA, 22 nt, Human
aagauggcugcagcaauuccaa

SEQ ID NO: 10182 - RNA, 22 nt, Human
aagaugguaaggcagcuggcag

SEQ ID NO: 10183 - RNA, 22 nt, Human
aagaugguuucuguagguuuau

SEQ ID NO: 10184 - RNA, 22 nt, Human
aagauguaucuuuccuuuaauu

SEQ ID NO: 10185 - RNA, 22 nt, Human
aagaugugaaauugucucuggg

SEQ ID NO: 10186 - RNA, 22 nt, Human
aagaugugaacagaaccacagg

SEQ ID NO: 10187 - RNA, 22 nt, Human
aagaugugcuaucaacuggaga

SEQ ID NO: 10188 - RNA, 22 nt, Human
aagauguuacucaaccaggaua

SEQ ID NO: 10189 - RNA, 22 nt, Human
aagauguuagaggucaugcaga

SEQ ID NO: 10190 - RNA, 22 nt, Human
aagauguuaggaaaguuagggu

SEQ ID NO: 10191 - RNA, 22 nt, Human
aagauguuauugucuuccuugc

SEQ ID NO: 10192 - RNA, 22 nt, Human
aagauguugggugccuccggaa

SEQ ID NO: 10193 - RNA, 22 nt, Human
aagauguugucguuagugauga

SEQ ID NO: 10194 - RNA, 22 nt, Human
aagauguuuagauuuauacaau

SEQ ID NO: 10195 - RNA, 22 nt, Human
aagauuauuuaagacaggaacc

SEQ ID NO: 10196 - RNA, 22 nt, Human
aagauucucacugcucaacuuu

SEQ ID NO: 10197 - RNA, 22 nt, Human
aagauucucagaaaaaggcuau

SEQ ID NO: 10198 - RNA, 22 nt, Human
aagauucucccugagauauuua

SEQ ID NO: 10199 - RNA, 18 nt, Human
aagauucugcuucucucu

SEQ ID NO: 10200 - RNA, 22 nt, Human
aagauucuuaaauuuguuucuc

SEQ ID NO: 10201 - RNA, 22 nt, Human
aagauucuuugaggauuuuacu

SEQ ID NO: 10202 - RNA, 22 nt, Human
aagauuguuuuggaugcuaacu

SEQ ID NO: 10203 - RNA, 22 nt, Human
aagauuuagggccaguuuacau

SEQ ID NO: 10204 - RNA, 17 nt, Human
aagauuucauuagcuga

SEQ ID NO: 10205 - RNA, 22 nt, Human
aagauuuccuggauguaauucc

SEQ ID NO: 10206 - RNA, 22 nt, Human
aagauuucugcuccugagagaa

SEQ ID NO: 10207 - RNA, 22 nt, Human
aagauuugguaucagaagaccu

SEQ ID NO: 10208 - RNA, 22 nt, Human
aagauuuucagugccuaaaaca

SEQ ID NO: 10209 - RNA, 22 nt, Human
aagauuuucucaacuguauuug

SEQ ID NO: 10210 - RNA, 22 nt, Human
aagcaaauuggaugucugugag

SEQ ID NO: 10211 - RNA, 22 nt, Human
aagcaacuccuaggaggaaagg

SEQ ID NO: 10212 - RNA, 22 nt, Human
aagcaagacagaaguuacugcc

SEQ ID NO: 10213 - RNA, 22 nt, Human
aagcaagcaguguggaauuuua

SEQ ID NO: 10214 - RNA, 22 nt, Human
aagcaagcuguuggcaauaggg

SEQ ID NO: 10215 - RNA, 22 nt, Human
aagcaaggcaaccuauguccag

SEQ ID NO: 10216 - RNA, 22 nt, Human
aagcaaggccggaaggaaacuc

SEQ ID NO: 10217 - RNA, 20 nt, Human
aagcaauauagugcaaaugu

SEQ ID NO: 10218 - RNA, 22 nt, Human
aagcaauucagcaaaccuagaa

SEQ ID NO: 10219 - RNA, 22 nt, Human
aagcaauugguuuuaguaaaau

SEQ ID NO: 10220 - RNA, 22 nt, Human
aagcacaaugaacaucuuagau

SEQ ID NO: 10221 - RNA, 22 nt, Human
aagcacacaucucuggcugggu

SEQ ID NO: 10222 - RNA, 22 nt, Human
aagcacaccucccuggcaggag

SEQ ID NO: 10223 - RNA, 22 nt, Human
aagcacagaaaaggagcaugga

SEQ ID NO: 10224 - RNA, 22 nt, Human
aagcacagaugcaagggggacc

SEQ ID NO: 10225 - RNA, 22 nt, Human
aagcacagauugcugcauccau

SEQ ID NO: 10226 - RNA, 22 nt, Human
aagcacagcuggaacagcagga

SEQ ID NO: 10227 - RNA, 22 nt, Human
aagcacaggggaaauaaguugu

SEQ ID NO: 10228 - RNA, 22 nt, Human
aagcacauacauaauaaagucc

SEQ ID NO: 10229 - RNA, 22 nt, Human
aagcacaucauguuguucagac

SEQ ID NO: 10230 - RNA, 22 nt, Human
aagcacaucucaaacuucaucu

SEQ ID NO: 10231 - RNA, 22 nt, Human
aagcacaucuccugugcagaac

SEQ ID NO: 10232 - RNA, 22 nt, Human
aagcacauuaaggaacauugaa

SEQ ID NO: 10233 - RNA, 22 nt, Human
aagcacauuauagcuaucuagg

SEQ ID NO: 10234 - RNA, 22 nt, Human
aagcacauuguacauuugugcu

SEQ ID NO: 10235 - RNA, 22 nt, Human
aagcacauuuuccagcagcucu

SEQ ID NO: 10236 - RNA, 22 nt, Human
aagcaccucuaugauugcuuuu

SEQ ID NO: 10237 - RNA, 22 nt, Human
aagcaccugcaccggucgccuu

SEQ ID NO: 10238 - RNA, 22 nt, Human
aagcacuaggacuucagucucu

SEQ ID NO: 10239 - RNA, 22 nt, Human
aagcacugagcacaguggcuga

SEQ ID NO: 10240 - RNA, 22 nt, Human
aagcacugaggaaaaauuugau

SEQ ID NO: 10241 - RNA, 22 nt, Human
aagcacuggguauagcaaugau

SEQ ID NO: 10242 - RNA, 22 nt, Human
aagcacuguacaaaugucacuu

SEQ ID NO: 10243 - RNA, 22 nt, Human
aagcacuugcuuagaugugguu

SEQ ID NO: 10244 - RNA, 22 nt, Human
aagcacuuuaugucaauguccu

SEQ ID NO: 10245 - RNA, 22 nt, Human
aguuucauauuaccaugucacc

SEQ ID NO: 10246 - RNA, 22 nt, Human
aguuucauguagccauauuuac

SEQ ID NO: 10247 - RNA, 22 nt, Human
aguuucauugagauguuugcua

SEQ ID NO: 10248 - RNA, 21 nt, Human
aguuuccucaacugcagaagg

SEQ ID NO: 10249 - RNA, 22 nt, Human
aguuuccucaucuguaaaauga

SEQ ID NO: 10250 - RNA, 22 nt, Human
aguuuccuuggauucaauuugg

SEQ ID NO: 10251 - RNA, 22 nt, Human
aguuucucuagagucuuugaaa

SEQ ID NO: 10252 - RNA, 22 nt, Human
aguuucucucaguauagaauag

SEQ ID NO: 10253 - RNA, 22 nt, Human
aguuucuuauucuuaguuaugu

SEQ ID NO: 10254 - RNA, 22 nt, Human
aguuugaagcaaaauugaggaa

SEQ ID NO: 10255 - RNA, 22 nt, Human
aguuugaaggaguugaaucacc

SEQ ID NO: 10256 - RNA, 22 nt, Human
aguuugcagauuauauuagugu

SEQ ID NO: 10257 - RNA, 22 nt, Human
aguuugcugaugaagaaaauuu

SEQ ID NO: 10258 - RNA, 23 nt, Human
aguuuguaaagaaauauuugcac

SEQ ID NO: 10259 - RNA, 22 nt, Human
aguuuuaaaugauggugguggu

SEQ ID NO: 10260 - RNA, 22 nt, Human
aguuuuauaaaggcaccucagu

SEQ ID NO: 10261 - RNA, 21 nt, Human
aguuuuauauuauaagcuaaa

SEQ ID NO: 10262 - RNA, 22 nt, Human
aguuuuaucuguaagcuguuca

SEQ ID NO: 10263 - RNA, 22 nt, Human
aguuuuauuaaauccacagaag

SEQ ID NO: 10264 - RNA, 22 nt, Human
aguuuuauugucccagagguga

SEQ ID NO: 10265 - RNA, 22 nt, Human
aguuuucagaaauugcgaccca

SEQ ID NO: 10266 - RNA, 20 nt, Human
aguuuucagcagaacaccca

SEQ ID NO: 10267 - RNA, 22 nt, Human
aguuuucugaccccugcucuau

SEQ ID NO: 10268 - RNA, 22 nt, Human
aguuuucugccucuggaugcgu

SEQ ID NO: 10269 - RNA, 22 nt, Human
aguuuugaaaugaaauguaguu

SEQ ID NO: 10270 - RNA, 22 nt, Human
aguuuugauacuuucucuucau

SEQ ID NO: 10271 - RNA, 17 nt, Human
aguuuugauauaauggc

SEQ ID NO: 10272 - RNA, 21 nt, Human
aguuuuuacucuuaacugugg

SEQ ID NO: 10273 - RNA, 22 nt, Human
aguuuuuccugauuuuacagaa

SEQ ID NO: 10274 - RNA, 23 nt, Human
aguuuuucugcaugguucuguau

SEQ ID NO: 10275 - RNA, 22 nt, Human
aguuuuugagaauuuacuaugu

SEQ ID NO: 10276 - RNA, 22 nt, Human
auaaaaacugacccauccuuug

SEQ ID NO: 10277 - RNA, 22 nt, Human
auaaaaccaaagcagcaguguu

SEQ ID NO: 10278 - RNA, 20 nt, Human
auaaaacucuaaucuggccu

SEQ ID NO: 10279 - RNA, 22 nt, Human
auaaaagaucccuucugagcuc

SEQ ID NO: 10280 - RNA, 22 nt, Human
auaaaaguaggaccaacuuaca

SEQ ID NO: 10281 - RNA, 22 nt, Human
auaaaaguucaagagaguacag

SEQ ID NO: 10282 - RNA, 22 nt, Human
auaaaaguuuccaaucaugccu

SEQ ID NO: 10283 - RNA, 22 nt, Human
auaaaaugguaaacgaagcuga

SEQ ID NO: 10284 - RNA, 22 nt, Human
auaaaaugucuccacugggcuc

SEQ ID NO: 10285 - RNA, 22 nt, Human
auaaacagaguaguugcuacug

SEQ ID NO: 10286 - RNA, 22 nt, Human
auaaacagcauaaaauacgcuu

SEQ ID NO: 10287 - RNA, 22 nt, Human
auaaacaguagagaaagguggu

SEQ ID NO: 10288 - RNA, 22 nt, Human
auaaaccuaugcuaagcugugg

SEQ ID NO: 10289 - RNA, 22 nt, Human
auaaacuaauugggguauaguu

SEQ ID NO: 10290 - RNA, 22 nt, Human
auaaacucaugccaagaaauga

SEQ ID NO: 10291 - RNA, 22 nt, Human
auaaacucugccucagaagagc

SEQ ID NO: 10292 - RNA, 22 nt, Human
auaaacugugcuggaugaugag

SEQ ID NO: 10293 - RNA, 22 nt, Human
auaaagacaugcuuacuugccc

SEQ ID NO: 10294 - RNA, 22 nt, Human
auaaagaggauguauuuacagc

SEQ ID NO: 10295 - RNA, 22 nt, Human
auaaagauuucuuuuucucuac

SEQ ID NO: 10296 - RNA, 22 nt, Human
auaaagcauacuuuguaugacu

SEQ ID NO: 10297 - RNA, 22 nt, Human
auaaagccuuucuguuuucagg

SEQ ID NO: 10298 - RNA, 22 nt, Human
auaaagcuucugagucuagauc

SEQ ID NO: 10299 - RNA, 22 nt, Human
auaaaguagccacuggaaagcu

SEQ ID NO: 10300 - RNA, 22 nt, Human
auaaaguagcuuucagugccaa

SEQ ID NO: 10301 - RNA, 22 nt, Human
auaaagucaaggcauuuuauga

SEQ ID NO: 10302 - RNA, 22 nt, Human
auaaagucauuaugaagaucua

SEQ ID NO: 10303 - RNA, 22 nt, Human
auaaagucauuucaaaaguuga

SEQ ID NO: 10304 - RNA, 22 nt, Human
auaaauagugugucauaaaguc

SEQ ID NO: 10305 - RNA, 22 nt, Human
auaaauaucacuguugucccuc

SEQ ID NO: 10306 - RNA, 22 nt, Human
auaaaugaacauucacagagcu

SEQ ID NO: 10307 - RNA, 22 nt, Human
auaaaugauucagcaggaaaua

SEQ ID NO: 10308 - RNA, 22 nt, Human
auaaaugccucagaaucauccc

SEQ ID NO: 10309 - RNA, 22 nt, Human
auaaauggcuuucauuccuagg

SEQ ID NO: 10310 - RNA, 22 nt, Human
auaaaugugaauuagagcuuug

SEQ ID NO: 10311 - RNA, 22 nt, Human
auaaauguuuguugaaugaaua

SEQ ID NO: 10312 - RNA, 22 nt, Human
auaaauuaugaauggcccuuuu

SEQ ID NO: 10313 - RNA, 22 nt, Human
auaaauucaaagcauuuaggac

SEQ ID NO: 10314 - RNA, 22 nt, Human
auaacagauacucucugugagg

SEQ ID NO: 10315 - RNA, 22 nt, Human
auaacagaugugaagugcuaau

SEQ ID NO: 10316 - RNA, 22 nt, Human
auaacagguugaauccgaaugu

SEQ ID NO: 10317 - RNA, 22 nt, Human
auaacauggaguuugucauuua

SEQ ID NO: 10318 - RNA, 22 nt, Human
auaacccucuggauaggacagg

SEQ ID NO: 10319 - RNA, 23 nt, Human
auaacugagccgaggcuuaagaa

SEQ ID NO: 10320 - RNA, 22 nt, Human
auaacuuaaugggucaugcucu

SEQ ID NO: 10321 - RNA, 22 nt, Human
auaacuuauuagauuggagcug

SEQ ID NO: 10322 - RNA, 22 nt, Human
auaacuucaguuucuguguccu

SEQ ID NO: 10323 - RNA, 22 nt, Human
auaagaauaauuaaguuagucc

SEQ ID NO: 10324 - RNA, 22 nt, Human
auaagcuugauguaacuaacca

SEQ ID NO: 10325 - RNA, 22 nt, Human
auaagcuuuuaaagcuacuuug

SEQ ID NO: 10326 - RNA, 22 nt, Human
auaaggaaaauuggagaaauug

SEQ ID NO: 10327 - RNA, 22 nt, Human
auaaggacacccuucucuuuac

SEQ ID NO: 10328 - RNA, 22 nt, Human
auaaggacuugaauuagacauu

SEQ ID NO: 10329 - RNA, 22 nt, Human
auaaggcagaaaugauucuagu

SEQ ID NO: 10330 - RNA, 19 nt, Human
auaaggcaggaggaaauuu

SEQ ID NO: 10331 - RNA, 22 nt, Human
auaaggcagucccuuaacaagg

SEQ ID NO: 10332 - RNA, 19 nt, Human
auaaggcagugacuuuuuu

SEQ ID NO: 10333 - RNA, 22 nt, Human
auaaggcauauagucacuuuuu

SEQ ID NO: 10334 - RNA, 22 nt, Human
auaagguuaggauuauaguguu

SEQ ID NO: 10335 - RNA, 22 nt, Human
auaagugcccaaaaugaaagga

SEQ ID NO: 10336 - RNA, 22 nt, Human
auaauaacaaugccagaugccu

SEQ ID NO: 10337 - RNA, 23 nt, Human
auaauaacgucugucuugucucu

SEQ ID NO: 10338 - RNA, 22 nt, Human
auaauaauacugugcaauggau

SEQ ID NO: 10339 - RNA, 22 nt, Human
auaauagcauuagguuuaugca

SEQ ID NO: 10340 - RNA, 22 nt, Human
auaauauuugcauuacugugau

SEQ ID NO: 10341 - RNA, 22 nt, Human
auaaucaaaguccuaugacauc

SEQ ID NO: 10342 - RNA, 22 nt, Human
auaaucagaauucaugaaagau

SEQ ID NO: 10343 - RNA, 22 nt, Human
auaauccauuaauuaaugacca

SEQ ID NO: 10344 - RNA, 22 nt, Human
auaaucugagcuauuucaugag

SEQ ID NO: 10345 - RNA, 22 nt, Human
auaaugaaucagcauaggguga

SEQ ID NO: 10346 - RNA, 22 nt, Human
auaaugaaugcagaguuauuuu

SEQ ID NO: 10347 - RNA, 23 nt, Human
auaaugcaaguggugguaaucug

SEQ ID NO: 10348 - RNA, 22 nt, Human
auaaugcaccuuugaguauggc

SEQ ID NO: 10349 - RNA, 22 nt, Human
auaauggcaugacaguuauaua

SEQ ID NO: 10350 - RNA, 22 nt, Human
auaaugugaagauaaugcaaga

SEQ ID NO: 10351 - RNA, 22 nt, Human
auaauuacauuauacuguuaga

SEQ ID NO: 10352 - RNA, 22 nt, Human
aggaauggugcucagcagaaau

SEQ ID NO: 10353 - RNA, 22 nt, Human
aggaauguaguuugaguagaaa

SEQ ID NO: 10354 - RNA, 22 nt, Human
aggcagugccuggaccccagcu

SEQ ID NO: 10355 - RNA, 22 nt, Human
aggcaguggaugucaggaaugg

SEQ ID NO: 10356 - RNA, 23 nt, Human
aggcagugggggccacuuugcuu

SEQ ID NO: 10357 - RNA, 20 nt, Human
aggcaguuagaaggagauga

SEQ ID NO: 10358 - RNA, 22 nt, Human
aggccaaguagccgcuguccua

SEQ ID NO: 10359 - RNA, 22 nt, Human
aggccaaguuacuugggaaagc

SEQ ID NO: 10360 - RNA, 22 nt, Human
aggccacauugugauucccgca

SEQ ID NO: 10361 - RNA, 20 nt, Human
aggccacugaaugccaauca

SEQ ID NO: 10362 - RNA, 22 nt, Human
aggccagaaaugucagggagug

SEQ ID NO: 10363 - RNA, 22 nt, Human
aggccagaagccagaaaugcuu

SEQ ID NO: 10364 - RNA, 22 nt, Human
aggccagacuuuggccaaaucc

SEQ ID NO: 10365 - RNA, 22 nt, Human
aggccagagaggggaccagccu

SEQ ID NO: 10366 - RNA, 22 nt, Human
aggccagaguuaaggagaacag

SEQ ID NO: 10367 - RNA, 17 nt, Human
aggccagaugaggcaag

SEQ ID NO: 10368 - RNA, 22 nt, Human
aggccagcaccagagucaagaa

SEQ ID NO: 10369 - RNA, 22 nt, Human
aggccagcaugcaguucuaagg

SEQ ID NO: 10370 - RNA, 22 nt, Human
aggccagccuuguaaaugccuc

SEQ ID NO: 10371 - RNA, 22 nt, Human
aggccagcgcugcuagcucccg

SEQ ID NO: 10372 - RNA, 22 nt, Human
aggccaggaccauuagcccaga

SEQ ID NO: 10373 - RNA, 22 nt, Human
aggccagggcacugcucuuuag

SEQ ID NO: 10374 - RNA, 22 nt, Human
aggccagguggucaugcuugcu

SEQ ID NO: 10375 - RNA, 22 nt, Human
aggccagugccuuuccagggcu

SEQ ID NO: 10376 - RNA, 22 nt, Human
aggccaguuuuuggagggaaac

SEQ ID NO: 10377 - RNA, 22 nt, Human
aggcccagcuugaagugggaag

SEQ ID NO: 10378 - RNA, 21 nt, Human
aggcccagcuuuccucuugcu

SEQ ID NO: 10379 - RNA, 22 nt, Human
aggcccaguagucgacggcgcu

SEQ ID NO: 10380 - RNA, 22 nt, Human
aggcccaguagugcugccuuua

SEQ ID NO: 10381 - RNA, 22 nt, Human
aggcccauaguagcucugggca

SEQ ID NO: 10382 - RNA, 20 nt, Human
aggccccaggaaacucucag

SEQ ID NO: 10383 - RNA, 22 nt, Human
aggccccaucaggaaggaggcc

SEQ ID NO: 10384 - RNA, 22 nt, Human
aggcccugaagucggccccuca

SEQ ID NO: 10385 - RNA, 22 nt, Human
aggcccugagaaaaucccugca

SEQ ID NO: 10386 - RNA, 22 nt, Human
aggcccugcaggaagcaggaug

SEQ ID NO: 10387 - RNA, 22 nt, Human
aggcccugcauuguacugaggg

SEQ ID NO: 10388 - RNA, 23 nt, Human
aggcccugccugucccucuuuuu

SEQ ID NO: 10389 - RNA, 22 nt, Human
aggcccugcggaaaugaucauu

SEQ ID NO: 10390 - RNA, 18 nt, Human
aggcccuggccucgaaca

SEQ ID NO: 10391 - RNA, 22 nt, Human
aggcccugggagcagagaugca

SEQ ID NO: 10392 - RNA, 22 nt, Human
aggcccuuaggaccccugcgug

SEQ ID NO: 10393 - RNA, 22 nt, Human
aggccgaaguggaugggcaucu

SEQ ID NO: 10394 - RNA, 22 nt, Human
aggccucacacaacagaugcau

SEQ ID NO: 10395 - RNA, 22 nt, Human
aggccucaguuuccccaguugu

SEQ ID NO: 10396 - RNA, 22 nt, Human
aggccuccagccacaugccagu

SEQ ID NO: 10397 - RNA, 17 nt, Human
aggccucccuccaggcc

SEQ ID NO: 10398 - RNA, 22 nt, Human
aggccucucuccuuggcuugua

SEQ ID NO: 10399 - RNA, 22 nt, Human
aggccucugagcagcacucaug

SEQ ID NO: 10400 - RNA, 22 nt, Human
aggccucuguuccccauguuuu

SEQ ID NO: 10401 - RNA, 22 nt, Human
aggccucuucagggagcaugga

SEQ ID NO: 10402 - RNA, 22 nt, Human
aggccucuugucuuccucacau

SEQ ID NO: 10403 - RNA, 20 nt, Human
aggccugagagaugacuggg

SEQ ID NO: 10404 - RNA, 22 nt, Human
aggccugagcagaggaguggac

SEQ ID NO: 10405 - RNA, 22 nt, Human
aggccugaggaccagauaaaug

SEQ ID NO: 10406 - RNA, 18 nt, Human
aggccugcccagcacugu

SEQ ID NO: 10407 - RNA, 22 nt, Human
aggccugccuggaucacacaga

SEQ ID NO: 10408 - RNA, 22 nt, Human
aggccuggguguucaccagaag

SEQ ID NO: 10409 - RNA, 22 nt, Human
aggccuguuggcgugggcucua

SEQ ID NO: 10410 - RNA, 22 nt, Human
aggccuugggccauagucuccu

SEQ ID NO: 10411 - RNA, 22 nt, Human
aggcgagaggcuugggcuagua

SEQ ID NO: 10412 - RNA, 22 nt, Human
aggcgcacaggguguugaugug

SEQ ID NO: 10413 - RNA, 22 nt, Human
aggcgcagaaggccaggggccu

SEQ ID NO: 10414 - RNA, 22 nt, Human
aggcgcagacauacagggucug

SEQ ID NO: 10415 - RNA, 22 nt, Human
aggcgcugaguaggcaaggagg

SEQ ID NO: 10416 - RNA, 22 nt, Human
aggcgcugcaugugaaggaguu

SEQ ID NO: 10417 - RNA, 22 nt, Human
aggcgcugcgcuggggccagaa

SEQ ID NO: 10418 - RNA, 22 nt, Human
aggcgcugugcuuggggcugga

SEQ ID NO: 10419 - RNA, 22 nt, Human
aggcggguuuaggacaaugcuu

SEQ ID NO: 10420 - RNA, 22 nt, Human
aggcuaaaagagaaucauuuag

SEQ ID NO: 10421 - RNA, 22 nt, Human
aggcuaagaggccuucagauac

SEQ ID NO: 10422 - RNA, 22 nt, Human
aggcuaauauuuaugaaaccaa

SEQ ID NO: 10423 - RNA, 22 nt, Human
aggcuacaauaauucccaugca

SEQ ID NO: 10424 - RNA, 22 nt, Human
aggcuacagauacagaggcuac

SEQ ID NO: 10425 - RNA, 22 nt, Human
aggcuacaggagacgccaggag

SEQ ID NO: 10426 - RNA, 22 nt, Human
aggcuacuucuagagggacaau

SEQ ID NO: 10427 - RNA, 22 nt, Human
aggcuagacuuuggcgaagcac

SEQ ID NO: 10428 - RNA, 22 nt, Human
aggcuagauagagggucaucuu

SEQ ID NO: 10429 - RNA, 22 nt, Human
aggcuagcaaugggagaugagu

SEQ ID NO: 10430 - RNA, 22 nt, Human
aggcuagcuuuggcucaguaaa

SEQ ID NO: 10431 - RNA, 22 nt, Human
aggcuaggccuugcccuggaac

SEQ ID NO: 10432 - RNA, 22 nt, Human
aggcuaggggcagugccagcau

SEQ ID NO: 10433 - RNA, 22 nt, Human
aggcuaguaucaucuacuuuug

SEQ ID NO: 10434 - RNA, 22 nt, Human
aggcuaucagauagaaugaagg

SEQ ID NO: 10435 - RNA, 22 nt, Human
aggcucaagcacugauauuuuu

SEQ ID NO: 10436 - RNA, 16 nt, Human
aggcucagaggcugga

SEQ ID NO: 10437 - RNA, 20 nt, Human
aggcucagauacccagggaa

SEQ ID NO: 10438 - RNA, 20 nt, Human
aggcucagcugagcucuugg

SEQ ID NO: 10439 - RNA, 22 nt, Human
aggcucaggaggagcugccgga

SEQ ID NO: 10440 - RNA, 22 nt, Human
aggcucagucccggcccgcgcc

SEQ ID NO: 10441 - RNA, 22 nt, Human
aggcucagugauguaaaauaua

SEQ ID NO: 10442 - RNA, 22 nt, Human
aggcucagugcaaaucauucug

SEQ ID NO: 10443 - RNA, 22 nt, Human
aggcucaguucuguggugagcc

SEQ ID NO: 10444 - RNA, 22 nt, Human
aggcucauccccacaaagcaaa

SEQ ID NO: 10445 - RNA, 22 nt, Human
aggcuccaaauuaccaagcucu

SEQ ID NO: 10446 - RNA, 22 nt, Human
aggcuccaccccgccagaccuu

SEQ ID NO: 10447 - RNA, 22 nt, Human
aggcuccagcagccagaggaag

SEQ ID NO: 10448 - RNA, 22 nt, Human
aggcuccaugguucucccucag

SEQ ID NO: 10449 - RNA, 22 nt, Human
aggcuccauuuuccugcagcug

SEQ ID NO: 10450 - RNA, 21 nt, Human
aggcucccagaaaugggcauc

SEQ ID NO: 10451 - RNA, 22 nt, Human
aggcuccucggggcugacggcg

SEQ ID NO: 10452 - RNA, 22 nt, Human
aggcuccugcaggugaggugcu

SEQ ID NO: 10453 - RNA, 22 nt, Human
aggcuccuucacagcacucgcc

SEQ ID NO: 10454 - RNA, 22 nt, Human
aggcuccuuguucaucauccau

SEQ ID NO: 10455 - RNA, 22 nt, Human
aggcucucaauaugauccaguc

SEQ ID NO: 10456 - RNA, 22 nt, Human
aggcucucacuauccuccuagc

SEQ ID NO: 10457 - RNA, 22 nt, Human
aggcucucuagaaacugugccu

SEQ ID NO: 10458 - RNA, 22 nt, Human
aggcucugaaggagaaccuguu

SEQ ID NO: 10459 - RNA, 22 nt, Human
aggcucugacgucacacguggc

SEQ ID NO: 10460 - RNA, 22 nt, Human
aggcucugaucagguggcugug

SEQ ID NO: 10461 - RNA, 22 nt, Human
aggcucugcaguccaucccgug

SEQ ID NO: 10462 - RNA, 20 nt, Human
aggcucugcauuucugagug

SEQ ID NO: 10463 - RNA, 22 nt, Human
agguggcagccgagacauaagg

SEQ ID NO: 10464 - RNA, 22 nt, Human
agguggcauuuacaccauggga

SEQ ID NO: 10465 - RNA, 22 nt, Human
agguggccaauaaauguuggag

SEQ ID NO: 10466 - RNA, 23 nt, Human
agguggccaccagaauguuaagg

SEQ ID NO: 10467 - RNA, 22 nt, Human
agguggccccaggccucugcca

SEQ ID NO: 10468 - RNA, 22 nt, Human
agguggcuaugaggaugcaguc

SEQ ID NO: 10469 - RNA, 22 nt, Human
agguggcucugacagcucuggu

SEQ ID NO: 10470 - RNA, 22 nt, Human
agguggcugaagagugggugag

SEQ ID NO: 10471 - RNA, 22 nt, Human
agguggcugguccaggcugcag

SEQ ID NO: 10472 - RNA, 22 nt, Human
agguggcuucuggccaggugug

SEQ ID NO: 10473 - RNA, 22 nt, Human
aggugggaacccagcagggccc

SEQ ID NO: 10474 - RNA, 22 nt, Human
aggugggacccguggggugcga

SEQ ID NO: 10475 - RNA, 21 nt, Human
aggugggagaccauguagguc

SEQ ID NO: 10476 - RNA, 22 nt, Human
aggugggcacaccucccuucuc

SEQ ID NO: 10477 - RNA, 22 nt, Human
aggugggcacuccgcucgaggu

SEQ ID NO: 10478 - RNA, 21 nt, Human
aggugggcagguggaguggcc

SEQ ID NO: 10479 - RNA, 22 nt, Human
aggugggcggaucacaagguca

SEQ ID NO: 10480 - RNA, 22 nt, Human
agguggggaguauauguaauug

SEQ ID NO: 10481 - RNA, 22 nt, Human
agguggggccaaaugcuacagu

SEQ ID NO: 10482 - RNA, 22 nt, Human
agguggggcccaccaauuugca

SEQ ID NO: 10483 - RNA, 22 nt, Human
aggugggguucagucucagccg

SEQ ID NO: 10484 - RNA, 23 nt, Human
agguggucuuguggaugcugcaa

SEQ ID NO: 10485 - RNA, 22 nt, Human
agguggugaugacagaagacag

SEQ ID NO: 10486 - RNA, 22 nt, Human
agguguccggcugcauaaucuu

SEQ ID NO: 10487 - RNA, 20 nt, Human
agguguccuguagcuugagu

SEQ ID NO: 10488 - RNA, 22 nt, Human
aggugugcaggaugaaccccuc

SEQ ID NO: 10489 - RNA, 22 nt, Human
agguguggcuugaagucucuau

SEQ ID NO: 10490 - RNA, 22 nt, Human
aggugugggaaacgggugaccu

SEQ ID NO: 10491 - RNA, 17 nt, Human
agguguggucaagggag

SEQ ID NO: 10492 - RNA, 22 nt, Human
agguguguauaaacauacauau

SEQ ID NO: 10493 - RNA, 19 nt, Human
agguuacaggugucacaga

SEQ ID NO: 10494 - RNA, 22 nt, Human
agguuacagucaucucagaauc

SEQ ID NO: 10495 - RNA, 22 nt, Human
agguuaggaaccaguguuugac

SEQ ID NO: 10496 - RNA, 22 nt, Human
agguuaguaugacacgguuaua

SEQ ID NO: 10497 - RNA, 22 nt, Human
agguuagugcugaaaugacaug

SEQ ID NO: 10498 - RNA, 22 nt, Human
agguuauugcucuccaaguuca

SEQ ID NO: 10499 - RNA, 22 nt, Human
agguucaaaugcaagagaugcu

SEQ ID NO: 10500 - RNA, 22 nt, Human
agguucagacgcauaauaggca

SEQ ID NO: 10501 - RNA, 22 nt, Human
agguucagaugacuuuuaugcu

SEQ ID NO: 10502 - RNA, 23 nt, Human
agguucaggagauggaggaacaa

SEQ ID NO: 10503 - RNA, 22 nt, Human
agguucaguaaauguuaguuga

SEQ ID NO: 10504 - RNA, 22 nt, Human
agguucagucuuuggaccccuc

SEQ ID NO: 10505 - RNA, 22 nt, Human
agguuccaagaaaucaucagug

SEQ ID NO: 10506 - RNA, 20 nt, Human
agguuccagccacaaccagc

SEQ ID NO: 10507 - RNA, 22 nt, Human
agguucuggcauugcucaguaa

SEQ ID NO: 10508 - RNA, 22 nt, Human
agguucuuggugagcauuuggu

SEQ ID NO: 10509 - RNA, 22 nt, Human
agguucuugguguccagauuuc

SEQ ID NO: 10510 - RNA, 22 nt, Human
agguuggcugcucuuuuccuaa

SEQ ID NO: 10511 - RNA, 20 nt, Human
agguuuauauuuagaggugu

SEQ ID NO: 10512 - RNA, 22 nt, Human
agguuuaugaguuuggaagggg

SEQ ID NO: 10513 - RNA, 17 nt, Human
agguuuaugguauuuga

SEQ ID NO: 10514 - RNA, 22 nt, Human
agguuuauuaaguaaauagagc

SEQ ID NO: 10515 - RNA, 22 nt, Human
agguuuauuauguagcauuauu

SEQ ID NO: 10516 - RNA, 22 nt, Human
agguuuccagcaggccauagau

SEQ ID NO: 10517 - RNA, 22 nt, Human
agguuucuccuuuaaagcaugg

SEQ ID NO: 10518 - RNA, 22 nt, Human
agguuucugcuguccuccuucu

SEQ ID NO: 10519 - RNA, 22 nt, Human
agguuucuggaaagguuuugcu

SEQ ID NO: 10520 - RNA, 21 nt, Human
agguuucugugagcagagcag

SEQ ID NO: 10521 - RNA, 22 nt, Human
agguuugggaguagaaaucaga

SEQ ID NO: 10522 - RNA, 22 nt, Human
agguuuguuuauguaucauugg

SEQ ID NO: 10523 - RNA, 22 nt, Human
aguaaaaauaugcuuguggcua

SEQ ID NO: 10524 - RNA, 22 nt, Human
aguaaaaucuuaagcacagugg

SEQ ID NO: 10525 - RNA, 22 nt, Human
aguaaacauagaauguucuucc

SEQ ID NO: 10526 - RNA, 22 nt, Human
aguaaacauuucagauuuauuu

SEQ ID NO: 10527 - RNA, 23 nt, Human
aguaaagcaauuguuggcgagag

SEQ ID NO: 10528 - RNA, 22 nt, Human
aguaaagcggugucacagaaug

SEQ ID NO: 10529 - RNA, 22 nt, Human
aguaaaucagaccucauuaugu

SEQ ID NO: 10530 - RNA, 22 nt, Human
aguaaaugaaagcaauuuuaga

SEQ ID NO: 10531 - RNA, 22 nt, Human
aguaaaugauuauuuugccaac

SEQ ID NO: 10532 - RNA, 22 nt, Human
aguaaauggugguuuuuaucau

SEQ ID NO: 10533 - RNA, 22 nt, Human
aguaaauuauuuagcuuccaga

SEQ ID NO: 10534 - RNA, 22 nt, Human
aguaacaaagugggagaaugau

SEQ ID NO: 10535 - RNA, 22 nt, Human
aguaacaaaugcaucugggcau

SEQ ID NO: 10536 - RNA, 22 nt, Human
aguaacacuauuuucauaugua

SEQ ID NO: 10537 - RNA, 22 nt, Human
aguaacauuuagcuucucacug

SEQ ID NO: 10538 - RNA, 22 nt, Human
aguaacuuaagcaauuguguau

SEQ ID NO: 10539 - RNA, 22 nt, Human
aguaaguaccuccacuugauug

SEQ ID NO: 10540 - RNA, 22 nt, Human
aguaaguuccaguuucauuaug

SEQ ID NO: 10541 - RNA, 22 nt, Human
aguaauaauagcuguaaagugc

SEQ ID NO: 10542 - RNA, 22 nt, Human
aguaauagagauuuuaaugucc

SEQ ID NO: 10543 - RNA, 22 nt, Human
aguaauagugaaucgacuauga

SEQ ID NO: 10544 - RNA, 22 nt, Human
aguaaucaaauuaagcuaauug

SEQ ID NO: 10545 - RNA, 22 nt, Human
aguaaucugauuuuauagcuau

SEQ ID NO: 10546 - RNA, 22 nt, Human
aguaaugauuauguacagaaug

SEQ ID NO: 10547 - RNA, 22 nt, Human
aguaauggguugaaauuuaguu

SEQ ID NO: 10548 - RNA, 22 nt, Human
aguaaugugccugaaauacuug

SEQ ID NO: 10549 - RNA, 22 nt, Human
aguaauuuguuauaaagcaaua

SEQ ID NO: 10550 - RNA, 22 nt, Human
aguacaaacuguuucaaaguag

SEQ ID NO: 10551 - RNA, 22 nt, Human
aguacaaauuauagcgcuugga

SEQ ID NO: 10552 - RNA, 22 nt, Human
aguacacaguagacuuucucau

SEQ ID NO: 10553 - RNA, 22 nt, Human
aguacacuaugguaacuggagu

SEQ ID NO: 10554 - RNA, 22 nt, Human
aguacagauuucugggcccuac

SEQ ID NO: 10555 - RNA, 22 nt, Human
aguacauacuucaaauguacuu

SEQ ID NO: 10556 - RNA, 22 nt, Human
aguacauuuuucaguggggagu

SEQ ID NO: 10557 - RNA, 22 nt, Human
aguaccaucucugccucugccu

SEQ ID NO: 10558 - RNA, 22 nt, Human
aguaccauuauccaguaaagga

SEQ ID NO: 10559 - RNA, 22 nt, Human
aguacuuuagcauaaagcaguu

SEQ ID NO: 10560 - RNA, 22 nt, Human
aguagaauaauuggauuacagu

SEQ ID NO: 10561 - RNA, 22 nt, Human
aguagaaucccuugcaaugucc

SEQ ID NO: 10562 - RNA, 22 nt, Human
aguagcaauguuugagaagcac

SEQ ID NO: 10563 - RNA, 22 nt, Human
aguagcacaauuuugucccuaa

SEQ ID NO: 10564 - RNA, 19 nt, Human
aguagcagaaagugcagug

SEQ ID NO: 10565 - RNA, 22 nt, Human
aguagcagaguuggacuaugca

SEQ ID NO: 10566 - RNA, 22 nt, Human
aguagcaugugcacaguaauuu

SEQ ID NO: 10567 - RNA, 22 nt, Human
aguaggaggcgggagcaugaag

SEQ ID NO: 10568 - RNA, 22 nt, Human
aguaggauaagagccuguccaa

SEQ ID NO: 10569 - RNA, 22 nt, Human
aguaggaugcuuuauaugaaag

SEQ ID NO: 10570 - RNA, 20 nt, Human
aguaggcaaaggaaagaucu

SEQ ID NO: 10571 - RNA, 18 nt, Human
aguaggcacugugggguu

SEQ ID NO: 10572 - RNA, 23 nt, Human
agggguggucaguacccgcagug

SEQ ID NO: 10573 - RNA, 22 nt, Human
aggguauguuuuuaucuacugu

SEQ ID NO: 10574 - RNA, 22 nt, Human
agggucaacaggagucaagaug

SEQ ID NO: 10575 - RNA, 22 nt, Human
agggucaacauuucauugauuc

SEQ ID NO: 10576 - RNA, 22 nt, Human
agggucaccugcuugccagggc

SEQ ID NO: 10577 - RNA, 22 nt, Human
agggucaguagugaugcgugaa

SEQ ID NO: 10578 - RNA, 22 nt, Human
agggucagugaugagggagccc

SEQ ID NO: 10579 - RNA, 22 nt, Human
agggucaguucugugagguguu

SEQ ID NO: 10580 - RNA, 22 nt, Human
aggguccacuuggacauugauc

SEQ ID NO: 10581 - RNA, 22 nt, Human
aggguccauguuuccaguuaau

SEQ ID NO: 10582 - RNA, 22 nt, Human
agggucccgucccucugcaccc

SEQ ID NO: 10583 - RNA, 22 nt, Human
agggucucuggagagcugagga

SEQ ID NO: 10584 - RNA, 22 nt, Human
agggucugacaaugugacuuag

SEQ ID NO: 10585 - RNA, 20 nt, Human
agggucuggcccuguuccuu

SEQ ID NO: 10586 - RNA, 22 nt, Human
agggucuguauuucuggcaagc

SEQ ID NO: 10587 - RNA, 22 nt, Human
agggucuguggaugcaucuggg

SEQ ID NO: 10588 - RNA, 22 nt, Human
agggugacuuugggcaaguuac

SEQ ID NO: 10589 - RNA, 23 nt, Human
agggugagcaagcuauggagacc

SEQ ID NO: 10590 - RNA, 22 nt, Human
aggguggagggagucccugagc

SEQ ID NO: 10591 - RNA, 22 nt, Human
aggguggcaguuacuggagcaa

SEQ ID NO: 10592 - RNA, 22 nt, Human
aggguggcugaguagauggaag

SEQ ID NO: 10593 - RNA, 22 nt, Human
aggguggcugugaagugcuugg

SEQ ID NO: 10594 - RNA, 22 nt, Human
agggugguggcgaugaggacau

SEQ ID NO: 10595 - RNA, 20 nt, Human
agggugugggccuuagccau

SEQ ID NO: 10596 - RNA, 22 nt, Human
aggguucugccagugucuugag

SEQ ID NO: 10597 - RNA, 22 nt, Human
aggguugccucugagugcuccg

SEQ ID NO: 10598 - RNA, 22 nt, Human
agguaaacaggagaaaaugaga

SEQ ID NO: 10599 - RNA, 22 nt, Human
agguaaagacugcaaggagaau

SEQ ID NO: 10600 - RNA, 22 nt, Human
agguaaggagucccaaccaucc

SEQ ID NO: 10601 - RNA, 22 nt, Human
agguaagggcugcgacuauaag

SEQ ID NO: 10602 - RNA, 22 nt, Human
agguaaugcaacuacuuugcua

SEQ ID NO: 10603 - RNA, 22 nt, Human
agguaaugcauauaaagugcuu

SEQ ID NO: 10604 - RNA, 22 nt, Human
agguacaaaagaguauaugaga

SEQ ID NO: 10605 - RNA, 22 nt, Human
agguacaguagacagacaguua

SEQ ID NO: 10606 - RNA, 22 nt, Human
agguacauaggaaaguggagcu

SEQ ID NO: 10607 - RNA, 22 nt, Human
agguacaucuauggggauagaa

SEQ ID NO: 10608 - RNA, 21 nt, Human
agguaccaaaagccugcauga

SEQ ID NO: 10609 - RNA, 22 nt, Human
agguaccaaaagccuuuuucug

SEQ ID NO: 10610 - RNA, 22 nt, Human
agguagaagagcaaggaauaac

SEQ ID NO: 10611 - RNA, 22 nt, Human
agguagaaggaccagaauuuau

SEQ ID NO: 10612 - RNA, 22 nt, Human
agguagagcuccaguagaaaau

SEQ ID NO: 10613 - RNA, 22 nt, Human
agguagcuaaaacaggcuuuug

SEQ ID NO: 10614 - RNA, 22 nt, Human
agguauagaauugaaaggguuu

SEQ ID NO: 10615 - RNA, 19 nt, Human
agguauuugggagauauau

SEQ ID NO: 10616 - RNA, 22 nt, Human
aggucaagauucuacauuugua

SEQ ID NO: 10617 - RNA, 22 nt, Human
aggucaaggcugcagugagcug

SEQ ID NO: 10618 - RNA, 22 nt, Human
aggucaagggagcugagggcca

SEQ ID NO: 10619 - RNA, 22 nt, Human
aggucacagcuuucucgugagg

SEQ ID NO: 10620 - RNA, 22 nt, Human
aggucacguccugugaugucau

SEQ ID NO: 10621 - RNA, 22 nt, Human
aggucacuuccugucuggauaa

SEQ ID NO: 10622 - RNA, 22 nt, Human
aggucagagcaauguauugcuu

SEQ ID NO: 10623 - RNA, 23 nt, Human
aggucagcaggcaaggaaauggc

SEQ ID NO: 10624 - RNA, 22 nt, Human
aggucagcaggccaggggcgaa

SEQ ID NO: 10625 - RNA, 21 nt, Human
agggagcauguuagcuuucga

SEQ ID NO: 10626 - RNA, 22 nt, Human
agggagcauugugacauaucac

SEQ ID NO: 10627 - RNA, 22 nt, Human
agggagccagaguugggagcuc

SEQ ID NO: 10628 - RNA, 22 nt, Human
agggagcucacaguccaguaga

SEQ ID NO: 10629 - RNA, 22 nt, Human
agggagcuguggucagcucagu

SEQ ID NO: 10630 - RNA, 22 nt, Human
agggagcuuccgaacuacagcu

SEQ ID NO: 10631 - RNA, 22 nt, Human
agggagcuucuggccucagccu

SEQ ID NO: 10632 - RNA, 22 nt, Human
agggagcuuuaccccagaucac

SEQ ID NO: 10633 - RNA, 22 nt, Human
agggagcuuucagguagcuuaa

SEQ ID NO: 10634 - RNA, 22 nt, Human
agggaggaccaaugugugguua

SEQ ID NO: 10635 - RNA, 22 nt, Human
agggaggcaggaaaguugucug

SEQ ID NO: 10636 - RNA, 19 nt, Human
agggagguagcauuggaaa

SEQ ID NO: 10637 - RNA, 22 nt, Human
agggaggucuggcugcccugag

SEQ ID NO: 10638 - RNA, 22 nt, Human
agggaggucuuugaggggcuua

SEQ ID NO: 10639 - RNA, 20 nt, Human
agggaggugcugggccugag

SEQ ID NO: 10640 - RNA, 22 nt, Human
agggagucaacacaguaauguu

SEQ ID NO: 10641 - RNA, 22 nt, Human
agggaguguaaauggugcucag

SEQ ID NO: 10642 - RNA, 22 nt, Human
agggaguguuacauaauggguu

SEQ ID NO: 10643 - RNA, 19 nt, Human
agggaguuuauauuugcac

SEQ ID NO: 10644 - RNA, 18 nt, Human
agggaguuuuagggaagg

SEQ ID NO: 10645 - RNA, 22 nt, Human
agggaucaguagggacggcagc

SEQ ID NO: 10646 - RNA, 22 nt, Human
agggaugacucuuggcugauuc

SEQ ID NO: 10647 - RNA, 22 nt, Human
agggauggagugcggcccggac

SEQ ID NO: 10648 - RNA, 22 nt, Human
agggaugggaacuccuccagca

SEQ ID NO: 10649 - RNA, 18 nt, Human
agggauguaugcuggugg

SEQ ID NO: 10650 - RNA, 22 nt, Human
agggauguuaguugugagcuca

SEQ ID NO: 10651 - RNA, 22 nt, Human
agggauguucauuuuguggcug

SEQ ID NO: 10652 - RNA, 22 nt, Human
agggcaaguugagugugcgugg

SEQ ID NO: 10653 - RNA, 22 nt, Human
agggcaauccagccagcugauc

SEQ ID NO: 10654 - RNA, 22 nt, Human
agggcaauggacuacaaaaggu

SEQ ID NO: 10655 - RNA, 22 nt, Human
agggcacaagacucugagcccc

SEQ ID NO: 10656 - RNA, 22 nt, Human
agggcacagccuaaagccuaug

SEQ ID NO: 10657 - RNA, 22 nt, Human
agggcacccucucugcaguacc

SEQ ID NO: 10658 - RNA, 22 nt, Human
agggcaccuguuuuagcuuggu

SEQ ID NO: 10659 - RNA, 23 nt, Human
agggcacuguuggguguugagga

SEQ ID NO: 10660 - RNA, 22 nt, Human
agggcacuuccucugggucccu

SEQ ID NO: 10661 - RNA, 22 nt, Human
agggcacuuuacccauagcuug

SEQ ID NO: 10662 - RNA, 22 nt, Human
agggcagagaaauguaguugag

SEQ ID NO: 10663 - RNA, 22 nt, Human
agggcagagagaugaaugggau

SEQ ID NO: 10664 - RNA, 22 nt, Human
agggcagagauuaauuaagaca

SEQ ID NO: 10665 - RNA, 22 nt, Human
agggcagagcacugaauuggga

SEQ ID NO: 10666 - RNA, 22 nt, Human
agggcagcaaaguuugaccuca

SEQ ID NO: 10667 - RNA, 22 nt, Human
agggcagcaauuugguuccugg

SEQ ID NO: 10668 - RNA, 22 nt, Human
agggcagcagcugucccugaga

SEQ ID NO: 10669 - RNA, 22 nt, Human
agggcagccaugagccuucagg

SEQ ID NO: 10670 - RNA, 22 nt, Human
agggcagcccuucugggagggc

SEQ ID NO: 10671 - RNA, 22 nt, Human
agggcagcggugcuuguguuau

SEQ ID NO: 10672 - RNA, 22 nt, Human
agggcagcugugagccacugug

SEQ ID NO: 10673 - RNA, 22 nt, Human
agggcaguucaacuucauagug

SEQ ID NO: 10674 - RNA, 22 nt, Human
agggcaucagguauuuuaugcu

SEQ ID NO: 10675 - RNA, 22 nt, Human
agggcaucucuaacagucuccu

SEQ ID NO: 10676 - RNA, 22 nt, Human
agggccaaguccaggaccucgg

SEQ ID NO: 10677 - RNA, 22 nt, Human
agggccaccagagcagggcagu

SEQ ID NO: 10678 - RNA, 19 nt, Human
agggccacggggagguauu

SEQ ID NO: 10679 - RNA, 23 nt, Human
agggccacugggaaggauuacug

SEQ ID NO: 10680 - RNA, 22 nt, Human
agggccagcugcagaauuagca

SEQ ID NO: 10681 - RNA, 22 nt, Human
agucuuuacuaaacagaccacc

SEQ ID NO: 10682 - RNA, 22 nt, Human
agucuuuccugcuugacuguuc

SEQ ID NO: 10683 - RNA, 21 nt, Human
agucuuugauaaagacaaagu

SEQ ID NO: 10684 - RNA, 19 nt, Human
agucuuugccuggggccuu

SEQ ID NO: 10685 - RNA, 22 nt, Human
agucuuuuauucaaggcuaagu

SEQ ID NO: 10686 - RNA, 22 nt, Human
agugaaaagaugcauuucucug

SEQ ID NO: 10687 - RNA, 22 nt, Human
agugaaauaaagcugccuaugg

SEQ ID NO: 10688 - RNA, 22 nt, Human
agugaaaucagguuuugacugc

SEQ ID NO: 10689 - RNA, 22 nt, Human
agugaaauccuggucaacaggu

SEQ ID NO: 10690 - RNA, 22 nt, Human
agugaaaugauaguguaaauac

SEQ ID NO: 10691 - RNA, 22 nt, Human
agugaaaugauucugagcaaga

SEQ ID NO: 10692 - RNA, 22 nt, Human
agugaaauugcuguaagaggaa

SEQ ID NO: 10693 - RNA, 22 nt, Human
agugaaauuuguuuagauaggu

SEQ ID NO: 10694 - RNA, 19 nt, Human
agugaacacaaagagaagg

SEQ ID NO: 10695 - RNA, 22 nt, Human
agugaaccaggcugcgucccug

SEQ ID NO: 10696 - RNA, 22 nt, Human
agugaagauauacuguuguccu

SEQ ID NO: 10697 - RNA, 22 nt, Human
agugaagcccauuuuuagcugu

SEQ ID NO: 10698 - RNA, 22 nt, Human
agugaagccccgaugcguuuug

SEQ ID NO: 10699 - RNA, 22 nt, Human
agugaaggaaacaauugguuga

SEQ ID NO: 10700 - RNA, 20 nt, Human
agugaauagagacauugccc

SEQ ID NO: 10701 - RNA, 22 nt, Human
agugaauuagccuauuuguaaa

SEQ ID NO: 10702 - RNA, 22 nt, Human
agugaauuuaaaacacugagga

SEQ ID NO: 10703 - RNA, 22 nt, Human
agugacaaagauucuccuuguu

SEQ ID NO: 10704 - RNA, 22 nt, Human
agugacagggaaaaugacacug

SEQ ID NO: 10705 - RNA, 22 nt, Human
agugacagggaaggauaggauu

SEQ ID NO: 10706 - RNA, 22 nt, Human
agugacaucaugucagcaaagu

SEQ ID NO: 10707 - RNA, 22 nt, Human
agugacaugcucucaggcauaa

SEQ ID NO: 10708 - RNA, 22 nt, Human
agugaccaucuaacgccuguga

SEQ ID NO: 10709 - RNA, 22 nt, Human
agugaccgaggcacuuggcaac

SEQ ID NO: 10710 - RNA, 22 nt, Human
agugacuacuggauuuguuucu

SEQ ID NO: 10711 - RNA, 22 nt, Human
agugacugacaccuguaauccc

SEQ ID NO: 10712 - RNA, 22 nt, Human
agugacugggcagggcagggcc

SEQ ID NO: 10713 - RNA, 22 nt, Human
agugacugguuuugacaggaau

SEQ ID NO: 10714 - RNA, 22 nt, Human
agugagacaguggacucugcau

SEQ ID NO: 10715 - RNA, 22 nt, Human
agugagcaguacuuacuccugc

SEQ ID NO: 10716 - RNA, 22 nt, Human
agugagcuaugaucauguuacu

SEQ ID NO: 10717 - RNA, 22 nt, Human
agugaggcaaagugagaggcag

SEQ ID NO: 10718 - RNA, 22 nt, Human
agugagggacuccaugacuccu

SEQ ID NO: 10719 - RNA, 22 nt, Human
agugaguggacccugcaaggaa

SEQ ID NO: 10720 - RNA, 22 nt, Human
agugaguggguuacagauggga

SEQ ID NO: 10721 - RNA, 22 nt, Human
agugaguugaacauugauaaug

SEQ ID NO: 10722 - RNA, 22 nt, Human
agugaucagcuugaaguaguuu

SEQ ID NO: 10723 - RNA, 22 nt, Human
agugaugccacacaaugcuuug

SEQ ID NO: 10724 - RNA, 22 nt, Human
agugauggugagugagaagcuc

SEQ ID NO: 10725 - RNA, 22 nt, Human
agugauguaacaaacagaguua

SEQ ID NO: 10726 - RNA, 23 nt, Human
agugaugucacccacagacaagg

SEQ ID NO: 10727 - RNA, 22 nt, Human
agugaugugggagaguauagcu

SEQ ID NO: 10728 - RNA, 22 nt, Human
agugauuaaagcuaggauaaaa

SEQ ID NO: 10729 - RNA, 22 nt, Human
agugauugaguguuagcagucu

SEQ ID NO: 10730 - RNA, 22 nt, Human
agugauuuacuaccauauuggg

SEQ ID NO: 10731 - RNA, 20 nt, Human
agugauuuaucuuuuuccac

SEQ ID NO: 10732 - RNA, 22 nt, Human
agugauuuggcggcagaguuag

SEQ ID NO: 10733 - RNA, 22 nt, Human
agugauuuugucagcuucugca

SEQ ID NO: 10734 - RNA, 22 nt, Human
agugcaaaaaaguguugugaca

SEQ ID NO: 10735 - RNA, 22 nt, Human
agugcaaagaaaucagcuuugu

SEQ ID NO: 10736 - RNA, 22 nt, Human
agugcaaagcagccuguacacc

SEQ ID NO: 10737 - RNA, 22 nt, Human
agugcaaagggaucagauuggg

SEQ ID NO: 10738 - RNA, 22 nt, Human
agugcaacagaagcaggcuggc

SEQ ID NO: 10739 - RNA, 22 nt, Human
agugcacuggcaccaucucagc

SEQ ID NO: 10740 - RNA, 22 nt, Human
agugcacuuuugggggauguua

SEQ ID NO: 10741 - RNA, 22 nt, Human
agugcagacugaaaugaccuuc

SEQ ID NO: 10742 - RNA, 19 nt, Human
agugcagggagcacccuca

SEQ ID NO: 10743 - RNA, 22 nt, Human
agugcagguuaaggaacuggcc

SEQ ID NO: 10744 - RNA, 22 nt, Human
agugcauauaugaagaguauga

SEQ ID NO: 10745 - RNA, 22 nt, Human
agugcaugccuuccuguggaug

SEQ ID NO: 10746 - RNA, 22 nt, Human
agugcauguaucuacagucaca

SEQ ID NO: 10747 - RNA, 22 nt, Human
agugcauguccaguaguuuaug

SEQ ID NO: 10748 - RNA, 22 nt, Human
agugcauucaguauucauaggc

SEQ ID NO: 10749 - RNA, 22 nt, Human
agugcauucuccaucaucuagg

SEQ ID NO: 10750 - RNA, 22 nt, Human
agugcauuugggguaguggaag

SEQ ID NO: 10751 - RNA, 19 nt, Human
agugcauuuuauguuucaa

SEQ ID NO: 10752 - RNA, 22 nt, Human
agugccagcuccacacagcagc

SEQ ID NO: 10753 - RNA, 22 nt, Human
agugccauggaggaacagaugc

SEQ ID NO: 10754 - RNA, 22 nt, Human
agugccauguaguccagcagaa

SEQ ID NO: 10755 - RNA, 22 nt, Human
agugcccaguuagguuggagca

SEQ ID NO: 10756 - RNA, 22 nt, Human
agugcccuuuacaacuucuuga

SEQ ID NO: 10757 - RNA, 22 nt, Human
agugcguggaccccuggcugcu

SEQ ID NO: 10758 - RNA, 22 nt, Human
agugcuaaugugcaauauagag

SEQ ID NO: 10759 - RNA, 22 nt, Human
agugcucacucuccacagugcc

SEQ ID NO: 10760 - RNA, 22 nt, Human
agugcucccuagaguugugcaa

SEQ ID NO: 10761 - RNA, 22 nt, Human
agugcuccucagaagaguugga

SEQ ID NO: 10762 - RNA, 23 nt, Human
agugcugaauugaaagcuccagg

SEQ ID NO: 10763 - RNA, 22 nt, Human
agugcugacucugggcacagug

SEQ ID NO: 10764 - RNA, 22 nt, Human
agugcugaggaaggggcccauu

SEQ ID NO: 10765 - RNA, 22 nt, Human
agugcugaggccauacuccaua

SEQ ID NO: 10766 - RNA, 22 nt, Human
agugcuggauuacaggcgugag

SEQ ID NO: 10767 - RNA, 22 nt, Human
agugcuggcccauagcugcugg

SEQ ID NO: 10768 - RNA, 22 nt, Human
agugcugucaguuuuauagaua

SEQ ID NO: 10769 - RNA, 22 nt, Human
agugcugucccgacaacugagg

SEQ ID NO: 10770 - RNA, 22 nt, Human
agugcuucuuaaaccuuucuac

SEQ ID NO: 10771 - RNA, 22 nt, Human
agugcuuuagcauccaacuguc

SEQ ID NO: 10772 - RNA, 22 nt, Human
agugcuuucccugaaaccuucc

SEQ ID NO: 10773 - RNA, 22 nt, Human
agugcuuugaacgaaaggcuga

SEQ ID NO: 10774 - RNA, 22 nt, Human
agugcuuugaauguucugggca

SEQ ID NO: 10775 - RNA, 22 nt, Human
agugcuuuguaguuucauugug

SEQ ID NO: 10776 - RNA, 18 nt, Human
aguggaaaacaaauacac

SEQ ID NO: 10777 - RNA, 22 nt, Human
aguggcuggaauugcaggugcg

SEQ ID NO: 10778 - RNA, 22 nt, Human
aguggcuggacgacaaggguga

SEQ ID NO: 10779 - RNA, 19 nt, Human
aguggcugggcagaagcaa

SEQ ID NO: 10780 - RNA, 22 nt, Human
aguggcuguaggcuaugagaga

SEQ ID NO: 10781 - RNA, 22 nt, Human
aguggcuguaucagucaacccu

SEQ ID NO: 10782 - RNA, 22 nt, Human
aguggcuguccuggcucuaacu

SEQ ID NO: 10783 - RNA, 22 nt, Human
aguggcugucuuccaaaaucug

SEQ ID NO: 10784 - RNA, 22 nt, Human
aguggcuguucauuuuacacaa

SEQ ID NO: 10785 - RNA, 22 nt, Human
aguggcuucauuucugccagaa

SEQ ID NO: 10786 - RNA, 22 nt, Human
aguggcuuuuuaguggcagaug

SEQ ID NO: 10787 - RNA, 22 nt, Human
agugggaaacuggagagacuuc

SEQ ID NO: 10788 - RNA, 22 nt, Human
agugggaauuuucucccaggga

SEQ ID NO: 10789 - RNA, 22 nt, Human
agugggacaguguagagcguca

SEQ ID NO: 10790 - RNA, 22 nt, Human
aguggcaaugggaguggagaca

SEQ ID NO: 10791 - RNA, 22 nt, Human
aguggcaauguagagagugauc

SEQ ID NO: 10792 - RNA, 22 nt, Human
aguggcaauugacaacaaagga

SEQ ID NO: 10793 - RNA, 22 nt, Human
aguggcacaauuuugacucccc

SEQ ID NO: 10794 - RNA, 22 nt, Human
aguggcagagcaggugcuggaa

SEQ ID NO: 10795 - RNA, 22 nt, Human
aguggcagagcugggauuuggg

SEQ ID NO: 10796 - RNA, 22 nt, Human
aguggcagagcugugucuugaa

SEQ ID NO: 10797 - RNA, 22 nt, Human
aguggcagagucaggguuugga

SEQ ID NO: 10798 - RNA, 16 nt, Human
aguggcagauaauacc

SEQ ID NO: 10799 - RNA, 22 nt, Human
aguggcaggaaaguggaagaga

SEQ ID NO: 10800 - RNA, 22 nt, Human
aguggcaggcagaagcuucuca

SEQ ID NO: 10801 - RNA, 20 nt, Human
aguggcagggaaauggaaag

SEQ ID NO: 10802 - RNA, 22 nt, Human
aguggcagggcuggcugcugca

SEQ ID NO: 10803 - RNA, 22 nt, Human
aguggcaucaacuuuaucugua

SEQ ID NO: 10804 - RNA, 20 nt, Human
aguggccacugcagagaugc

SEQ ID NO: 10805 - RNA, 22 nt, Human
aguggcugaagcaucaaaggca

SEQ ID NO: 10806 - RNA, 22 nt, Human
aguggcugaauauauuuuacua

SEQ ID NO: 10807 - RNA, 22 nt, Human
aguggcugagugacugugacuc

SEQ ID NO: 10808 - RNA, 20 nt, Human
aguggcugauggaaagaagc

SEQ ID NO: 10809 - RNA, 22 nt, Human
aguggcugccaagagcaaugcu

SEQ ID NO: 10810 - RNA, 22 nt, Human
aguggcugccaagauauaauuc

SEQ ID NO: 10811 - RNA, 23 nt, Human
aguggcuggacagacuuuccugg

SEQ ID NO: 10812 - RNA, 22 nt, Human
aguggcugguaguuacugagca

SEQ ID NO: 10813 - RNA, 22 nt, Human
aguggcuggucuaaggucacag

SEQ ID NO: 10814 - RNA, 22 nt, Human
aguggcuguuccaggugaggac

SEQ ID NO: 10815 - RNA, 22 nt, Human
aguggcuguuuauaggugggua

SEQ ID NO: 10816 - RNA, 22 nt, Human
aguggcuuaucugggacagcua

SEQ ID NO: 10817 - RNA, 22 nt, Human
aguggcuuauguuuagaaucau

SEQ ID NO: 10818 - RNA, 22 nt, Human
aguggcuugcucugccucagcc

SEQ ID NO: 10819 - RNA, 22 nt, Human
aguggcuuggcugcacuacagg

SEQ ID NO: 10820 - RNA, 22 nt, Human
aguggcuuuucuugcuucuggc

SEQ ID NO: 10821 - RNA, 22 nt, Human
agugggaccggugcuauuccag

SEQ ID NO: 10822 - RNA, 22 nt, Human
agugggagauaacuuaacagcu

SEQ ID NO: 10823 - RNA, 16 nt, Human
agugggaggagaaaga

SEQ ID NO: 10824 - RNA, 22 nt, Human
agugggcaaaacagcucagagc

SEQ ID NO: 10825 - RNA, 22 nt, Human
agugggcagugcgcucggaugc

SEQ ID NO: 10826 - RNA, 22 nt, Human
agugggcauaugaagucucaag

SEQ ID NO: 10827 - RNA, 22 nt, Human
agugggcugagcuugcugggug

SEQ ID NO: 10828 - RNA, 22 nt, Human
aguggggaguuuccagaugugu

SEQ ID NO: 10829 - RNA, 22 nt, Human
aguggggcggacaggaccagga

SEQ ID NO: 10830 - RNA, 22 nt, Human
agugggggccaacgagggcagc

SEQ ID NO: 10831 - RNA, 22 nt, Human
aguggggucuccuccagccccc

SEQ ID NO: 10832 - RNA, 22 nt, Human
agugggugauaagaccaaggag

SEQ ID NO: 10833 - RNA, 22 nt, Human
agugggugggugucugacaguu

SEQ ID NO: 10834 - RNA, 20 nt, Human
aguggguguaaguuauugcc

SEQ ID NO: 10835 - RNA, 22 nt, Human
agugguaagggcauaggcacug

SEQ ID NO: 10836 - RNA, 22 nt, Human
aguggucugccugccucagccu

SEQ ID NO: 10837 - RNA, 22 nt, Human
aguggugaugacagcaguuucu

SEQ ID NO: 10838 - RNA, 22 nt, Human
aguggugaugucucuauuauug

SEQ ID NO: 10839 - RNA, 22 nt, Human
agugguggagagaugaggacac

SEQ ID NO: 10840 - RNA, 22 nt, Human
agugguggagccaggaaaugug

SEQ ID NO: 10841 - RNA, 22 nt, Human
aguggugucgugggaguggaag

SEQ ID NO: 10842 - RNA, 22 nt, Human
agugguuacucaagcaaaucuc

SEQ ID NO: 10843 - RNA, 22 nt, Human
aguguacacuaaaugaauacaa

SEQ ID NO: 10844 - RNA, 22 nt, Human
aguguacaguucuaugaauuuc

SEQ ID NO: 10845 - RNA, 22 nt, Human
aguguaggugagggccuggguu

SEQ ID NO: 10846 - RNA, 22 nt, Human
aguguaugaguuucaguucuuc

SEQ ID NO: 10847 - RNA, 22 nt, Human
aguguauggaauuagcucccuu

SEQ ID NO: 10848 - RNA, 22 nt, Human
aguguauuugucuggcuucucc

SEQ ID NO: 10849 - RNA, 19 nt, Human
aguguauuuuuuucuguag

SEQ ID NO: 10850 - RNA, 22 nt, Human
agugucaacugucuacagggag

SEQ ID NO: 10851 - RNA, 22 nt, Human
agugucaagguugagaaacccu

SEQ ID NO: 10852 - RNA, 22 nt, Human
agugucaagugaggagggaaag

SEQ ID NO: 10853 - RNA, 22 nt, Human
agugucaaugccaacaguauau

SEQ ID NO: 10854 - RNA, 22 nt, Human
agugucaaugcucuguuaaaaa

SEQ ID NO: 10855 - RNA, 22 nt, Human
agugucacagacccaaucagga

SEQ ID NO: 10856 - RNA, 22 nt, Human
agugucaucgugaaaacauagc

SEQ ID NO: 10857 - RNA, 22 nt, Human
agugucaugaaucaaagauuau

SEQ ID NO: 10858 - RNA, 22 nt, Human
aguguccaacucagcuugucaa

SEQ ID NO: 10859 - RNA, 22 nt, Human
aguguccccucugaggagugag

SEQ ID NO: 10860 - RNA, 22 nt, Human
aguguccuagcaagccgguccu

SEQ ID NO: 10861 - RNA, 22 nt, Human
aguguccucaggcuuuguuccu

SEQ ID NO: 10862 - RNA, 22 nt, Human
aguguccucuauuaugacuuua

SEQ ID NO: 10863 - RNA, 22 nt, Human
aguguccuggcaaggguuucag

SEQ ID NO: 10864 - RNA, 22 nt, Human
aguguccuggggcccuaaggcc

SEQ ID NO: 10865 - RNA, 22 nt, Human
aguguccuuguuauuacugcuc

SEQ ID NO: 10866 - RNA, 22 nt, Human
agugucugaaggauuuggcuuc

SEQ ID NO: 10867 - RNA, 22 nt, Human
agugucugagccagaauuagaa

SEQ ID NO: 10868 - RNA, 22 nt, Human
agugucugaucaguugacuaga

SEQ ID NO: 10869 - RNA, 22 nt, Human
agugucugcucagacagcuaca

SEQ ID NO: 10870 - RNA, 22 nt, Human
agugucugggcucccuuggagc

SEQ ID NO: 10871 - RNA, 22 nt, Human
agugucugugaugaggucagga

SEQ ID NO: 10872 - RNA, 22 nt, Human
agugucuguuguucagaacucu

SEQ ID NO: 10873 - RNA, 22 nt, Human
agugucuuacaugaauugauuu

SEQ ID NO: 10874 - RNA, 22 nt, Human
agugucuuacucccucaggcac

SEQ ID NO: 10875 - RNA, 22 nt, Human
agugucuuuagcaaguuuaguc

SEQ ID NO: 10876 - RNA, 22 nt, Human
agugugacauaagagcccugga

SEQ ID NO: 10877 - RNA, 22 nt, Human
agugugagaacggacuaauaaa

SEQ ID NO: 10878 - RNA, 22 nt, Human
agugugagauuaaaccgaauca

SEQ ID NO: 10879 - RNA, 22 nt, Human
agugugagggguucuuugauau

SEQ ID NO: 10880 - RNA, 22 nt, Human
agugugaguaauugagucuguc

SEQ ID NO: 10881 - RNA, 20 nt, Human
agugugcauuuagagucugc

SEQ ID NO: 10882 - RNA, 22 nt, Human
agugugcucugguugccaugcu

SEQ ID NO: 10883 - RNA, 22 nt, Human
aguguggcugcguagggcucuc

SEQ ID NO: 10884 - RNA, 22 nt, Human
agugugggccacgcagcugagc

SEQ ID NO: 10885 - RNA, 22 nt, Human
agugugggcccccagguuagcc

SEQ ID NO: 10886 - RNA, 22 nt, Human
agugugggggcuuuggugucac

SEQ ID NO: 10887 - RNA, 22 nt, Human
agugugggugagggaggcccuc

SEQ ID NO: 10888 - RNA, 22 nt, Human
aguguggguuuuauggagcccu

SEQ ID NO: 10889 - RNA, 22 nt, Human
aguguggucgggagcgcggggc

SEQ ID NO: 10890 - RNA, 17 nt, Human
aguguguaacuugugua

SEQ ID NO: 10891 - RNA, 22 nt, Human
aguguguagcaauaugcuggca

SEQ ID NO: 10892 - RNA, 23 nt, Human
aguguguauugcugagggcagcu

SEQ ID NO: 10893 - RNA, 22 nt, Human
agugugucaguugaaagagauu

SEQ ID NO: 10894 - RNA, 18 nt, Human
agugugugcccuuucagg

SEQ ID NO: 10895 - RNA, 22 nt, Human
caaaggcaggugcugaauauuc

SEQ ID NO: 10896 - RNA, 22 nt, Human
caaaggcaugugaguauaugug

SEQ ID NO: 10897 - RNA, 22 nt, Human
caaaggcucaguaaaucuuugu

SEQ ID NO: 10898 - RNA, 22 nt, Human
caaagggcauuuuagugaacug

SEQ ID NO: 10899 - RNA, 22 nt, Human
augacaucaacaguggugcugu

SEQ ID NO: 10900 - RNA, 22 nt, Human
augacaugaccugguagagaca

SEQ ID NO: 10901 - RNA, 22 nt, Human
augacaugauugccauuugaua

SEQ ID NO: 10902 - RNA, 22 nt, Human
augacauugaauauguuaacua

SEQ ID NO: 10903 - RNA, 22 nt, Human
augacauuuauacagugagcuu

SEQ ID NO: 10904 - RNA, 22 nt, Human
augaccaguuuccccacugucc

SEQ ID NO: 10905 - RNA, 22 nt, Human
augaccccuaaaauuuacuguc

SEQ ID NO: 10906 - RNA, 22 nt, Human
augaccugaggccuuacucuag

SEQ ID NO: 10907 - RNA, 22 nt, Human
augacucagaagauauuuucca

SEQ ID NO: 10908 - RNA, 22 nt, Human
augacucuccagagcugcagau

SEQ ID NO: 10909 - RNA, 22 nt, Human
augacuuuuaaaagcugguacu

SEQ ID NO: 10910 - RNA, 22 nt, Human
augagaaugcauucauguuuug

SEQ ID NO: 10911 - RNA, 22 nt, Human
augagacacaugugacuucuuu

SEQ ID NO: 10912 - RNA, 22 nt, Human
augagacaugacuucaggccuu

SEQ ID NO: 10913 - RNA, 22 nt, Human
augagcaagagcuauguacaga

SEQ ID NO: 10914 - RNA, 19 nt, Human
augagcaauaguuuuaauc

SEQ ID NO: 10915 - RNA, 22 nt, Human
augagcauccagaacagugccu

SEQ ID NO: 10916 - RNA, 22 nt, Human
augagcccagaaaucucccuuu

SEQ ID NO: 10917 - RNA, 22 nt, Human
augagcuuccagacaaaggcau

SEQ ID NO: 10918 - RNA, 22 nt, Human
augagcuugguccagcaggcuu

SEQ ID NO: 10919 - RNA, 22 nt, Human
augaggagcccucauuuagguu

SEQ ID NO: 10920 - RNA, 22 nt, Human
augaggagcuccuugaaaugag

SEQ ID NO: 10921 - RNA, 22 nt, Human
augaggagucaaggagucggag

SEQ ID NO: 10922 - RNA, 22 nt, Human
augaggaugggaagggagccaa

SEQ ID NO: 10923 - RNA, 22 nt, Human
augaggcaaggcuggccguguu

SEQ ID NO: 10924 - RNA, 22 nt, Human
augaggcaaucaugguccaguu

SEQ ID NO: 10925 - RNA, 22 nt, Human
augaggcacguguuacuggccu

SEQ ID NO: 10926 - RNA, 22 nt, Human
augaggcagcacaugggauugu

SEQ ID NO: 10927 - RNA, 22 nt, Human
augaggcaggaaaggcguaucu

SEQ ID NO: 10928 - RNA, 22 nt, Human
augaggccacaguuauagauuu

SEQ ID NO: 10929 - RNA, 22 nt, Human
augaggccagggugccaugaaa

SEQ ID NO: 10930 - RNA, 22 nt, Human
augaggccuaucuuggcagagg

SEQ ID NO: 10931 - RNA, 22 nt, Human
augaggcucucaggggagcugu

SEQ ID NO: 10932 - RNA, 22 nt, Human
augagggaagcucacgugucca

SEQ ID NO: 10933 - RNA, 22 nt, Human
auauugcagggacagucuggau

SEQ ID NO: 10934 - RNA, 22 nt, Human
auauugcauggcuuugcugguu

SEQ ID NO: 10935 - RNA, 22 nt, Human
auauugcuagccuaugaguuca

SEQ ID NO: 10936 - RNA, 22 nt, Human
auauuguacuaggguuacaugu

SEQ ID NO: 10937 - RNA, 22 nt, Human
auauuguugacuauaagaguaa

SEQ ID NO: 10938 - RNA, 22 nt, Human
auauuuaacuggucccaauaua

SEQ ID NO: 10939 - RNA, 22 nt, Human
auauuuagauaaaaaugggcuu

SEQ ID NO: 10940 - RNA, 22 nt, Human
auauuuagcucauuuccagugc

SEQ ID NO: 10941 - RNA, 22 nt, Human
auauuuauaaggcaggcaagua

SEQ ID NO: 10942 - RNA, 22 nt, Human
auauuucagcuuuacuuaggaa

SEQ ID NO: 10943 - RNA, 20 nt, Human
auauuucagguagugugccc

SEQ ID NO: 10944 - RNA, 22 nt, Human
auauuucagguuuugcaggccg

SEQ ID NO: 10945 - RNA, 23 nt, Human
auauuuccagguuagugagguaa

SEQ ID NO: 10946 - RNA, 21 nt, Human
auauuucucauaagguuaugg

SEQ ID NO: 10947 - RNA, 22 nt, Human
auauuucuccaaauguuuucaa

SEQ ID NO: 10948 - RNA, 20 nt, Human
auauuucuuaagaacuuuca

SEQ ID NO: 10949 - RNA, 22 nt, Human
auauuucuugagcaccugguau

SEQ ID NO: 10950 - RNA, 22 nt, Human
auauuuggaaagaaaaucauug

SEQ ID NO: 10951 - RNA, 22 nt, Human
auauuuguaguggguaagaagu

SEQ ID NO: 10952 - RNA, 22 nt, Human
auauuuucacugaaccaaagua

SEQ ID NO: 10953 - RNA, 22 nt, Human
auauuuuccgaacuugagguag

SEQ ID NO: 10954 - RNA, 22 nt, Human
auauuuuggggugaugugcauc

SEQ ID NO: 10955 - RNA, 22 nt, Human
aucaaaacccagacaggcugga

SEQ ID NO: 10956 - RNA, 22 nt, Human
aucaaaaccuugacuuuuaaug

SEQ ID NO: 10957 - RNA, 20 nt, Human
aucaaaauccuauugagguu

SEQ ID NO: 10958 - RNA, 22 nt, Human
aucaaagagcuugacaauccua

SEQ ID NO: 10959 - RNA, 23 nt, Human
aucaaaggauguagagaagaagc

SEQ ID NO: 10960 - RNA, 22 nt, Human
aucaaaguaucucaauauggua

SEQ ID NO: 10961 - RNA, 22 nt, Human
aucaaagugaaaagugcugaug

SEQ ID NO: 10962 - RNA, 23 nt, Human
aucaaaguggaaaucaauuaucu

SEQ ID NO: 10963 - RNA, 22 nt, Human
aucaacauaaagaaguccucag

SEQ ID NO: 10964 - RNA, 22 nt, Human
aucaacaugacaggagaagaga

SEQ ID NO: 10965 - RNA, 22 nt, Human
aucaacaugugagagcaccagu

SEQ ID NO: 10966 - RNA, 22 nt, Human
aucaagcauauauaaaacugca

SEQ ID NO: 10967 - RNA, 22 nt, Human
aucaagcuggcauauguaguuc

SEQ ID NO: 10968 - RNA, 22 nt, Human
aucaaguucugucacauuuguc

SEQ ID NO: 10969 - RNA, 22 nt, Human
aucaauaucagaucagacagga

SEQ ID NO: 10970 - RNA, 22 nt, Human
aucaaugcuugccaaauggaag

SEQ ID NO: 10971 - RNA, 22 nt, Human
aucaauguuuugauagcccaga

SEQ ID NO: 10972 - RNA, 22 nt, Human
aucacacagagcauuaggggcc

SEQ ID NO: 10973 - RNA, 22 nt, Human
aucacagagauugcuuuuaaaa

SEQ ID NO: 10974 - RNA, 22 nt, Human
aucacagcacaccugacaugua

SEQ ID NO: 10975 - RNA, 22 nt, Human
aucacaggcuauguggguuuug

SEQ ID NO: 10976 - RNA, 22 nt, Human
aucacagugccuucguaaauuu

SEQ ID NO: 10977 - RNA, 22 nt, Human
aucacaguguagaccuuuuaaa

SEQ ID NO: 10978 - RNA, 22 nt, Human
aucacaguuacucaaauaauga

SEQ ID NO: 10979 - RNA, 22 nt, Human
aucacaguuuuaccauuuggua

SEQ ID NO: 10980 - RNA, 22 nt, Human
aucacauauaugcaccaagaca

SEQ ID NO: 10981 - RNA, 22 nt, Human
aucacauauuuaagaaacaugu

SEQ ID NO: 10982 - RNA, 22 nt, Human
aucacauucuuucaaagcaguc

SEQ ID NO: 10983 - RNA, 22 nt, Human
aucacauugccagugauuaccc

SEQ ID NO: 10984 - RNA, 22 nt, Human
aucacauuguuagcauagacug

SEQ ID NO: 10985 - RNA, 22 nt, Human
aucaccaaggcuuuaggaauuu

SEQ ID NO: 10986 - RNA, 22 nt, Human
aucaccaggcaaaaugucagag

SEQ ID NO: 10987 - RNA, 22 nt, Human
aucaccaguaaguuuucaguuu

SEQ ID NO: 10988 - RNA, 22 nt, Human
aucacccaagcuggagugcagu

SEQ ID NO: 10989 - RNA, 22 nt, Human
aucacgugcugagaguguuauu

SEQ ID NO: 10990 - RNA, 21 nt, Human
aucacugaaugccuucaagga

SEQ ID NO: 10991 - RNA, 22 nt, Human
aucacugagcuucagugcuggc

SEQ ID NO: 10992 - RNA, 22 nt, Human
aucacuggagugaaaggcaaac

SEQ ID NO: 10993 - RNA, 22 nt, Human
aucacugucgucaucugagauu

SEQ ID NO: 10994 - RNA, 22 nt, Human
aucacuguggcccaaaaccuca

SEQ ID NO: 10995 - RNA, 22 nt, Human
aucacuguguauguauaugcag

SEQ ID NO: 10996 - RNA, 22 nt, Human
aucagaaaauacccaguguuua

SEQ ID NO: 10997 - RNA, 22 nt, Human
aucagaacaaaagaacaguuua

SEQ ID NO: 10998 - RNA, 22 nt, Human
aucagaauaauuagauuucaga

SEQ ID NO: 10999 - RNA, 22 nt, Human
aucagaauacuaucaacaguga

SEQ ID NO: 11000 - RNA, 21 nt, Human
aucagaaucucuagauuugga

SEQ ID NO: 11001 - RNA, 22 nt, Human
aucagaaugcagccagcaguua

SEQ ID NO: 11002 - RNA, 22 nt, Human
aucagaauguuuuggugugcuc

SEQ ID NO: 11003 - RNA, 22 nt, Human
aucagaccauccagcguggaug

SEQ ID NO: 11004 - RNA, 22 nt, Human
aucagacucagaaaugacgugg

SEQ ID NO: 11005 - RNA, 22 nt, Human
aucagagacaaaaccagcacuu

SEQ ID NO: 11006 - RNA, 22 nt, Human
aucagagauggcuccagugcuc

SEQ ID NO: 11007 - RNA, 22 nt, Human
aucagagauuguaguaugugca

SEQ ID NO: 11008 - RNA, 22 nt, Human
auccugagguacugcagggccg

SEQ ID NO: 11009 - RNA, 22 nt, Human
auccugaguucucagagucucc

SEQ ID NO: 11010 - RNA, 22 nt, Human
auccugcaggggguuuuauuca

SEQ ID NO: 11011 - RNA, 22 nt, Human
auccugcugcuguggacuucuc

SEQ ID NO: 11012 - RNA, 22 nt, Human
auccugcuuguuacuuauagag

SEQ ID NO: 11013 - RNA, 22 nt, Human
auccugggaagcugacauugaa

SEQ ID NO: 11014 - RNA, 22 nt, Human
auccugggaaguggccuccucc

SEQ ID NO: 11015 - RNA, 22 nt, Human
auccuggguuugugaguuuaug

SEQ ID NO: 11016 - RNA, 22 nt, Human
auccugucaucauaguacuuga

SEQ ID NO: 11017 - RNA, 22 nt, Human
auccugucuaugaguagauaau

SEQ ID NO: 11018 - RNA, 22 nt, Human
auccugucucuacccaucggcu

SEQ ID NO: 11019 - RNA, 22 nt, Human
auccugugaggauaagcccuug

SEQ ID NO: 11020 - RNA, 22 nt, Human
auccugugcaaugacugcaucu

SEQ ID NO: 11021 - RNA, 22 nt, Human
auccuguuugguugucugccuu

SEQ ID NO: 11022 - RNA, 22 nt, Human
auccuguuugucacuagaaaau

SEQ ID NO: 11023 - RNA, 20 nt, Human
auccuuaaagagaauuucua

SEQ ID NO: 11024 - RNA, 22 nt, Human
auccuuaagaaaguuuucuaua

SEQ ID NO: 11025 - RNA, 22 nt, Human
auccuuaauuuccugggccuca

SEQ ID NO: 11026 - RNA, 21 nt, Human
auccuuagcacuuagaagagu

SEQ ID NO: 11027 - RNA, 22 nt, Human
auccuuccagaguuauucucaa

SEQ ID NO: 11028 - RNA, 22 nt, Human
auccuugaaugacucugcccuc

SEQ ID NO: 11029 - RNA, 22 nt, Human
auccuuggauccuguguuccug

SEQ ID NO: 11030 - RNA, 22 nt, Human
auccuuggaugugucuuuuugu

SEQ ID NO: 11031 - RNA, 20 nt, Human
auccuuggcagaauccagga

SEQ ID NO: 11032 - RNA, 22 nt, Human
auccuugggucucuggaaauug

SEQ ID NO: 11033 - RNA, 22 nt, Human
aucguuaaucuugugugucaac

SEQ ID NO: 11034 - RNA, 22 nt, Human
aucguuuacccugagugauugc

SEQ ID NO: 11035 - RNA, 22 nt, Human
aucuaaaaugugguuaguuggu

SEQ ID NO: 11036 - RNA, 22 nt, Human
aucuaaacuauaguaccuaguc

SEQ ID NO: 11037 - RNA, 19 nt, Human
aucuaagagaugggggaaa

SEQ ID NO: 11038 - RNA, 22 nt, Human
aucuaagaguuaacaucaagaa

SEQ ID NO: 11039 - RNA, 22 nt, Human
aucuaagauuuugcuaagauca

SEQ ID NO: 11040 - RNA, 22 nt, Human
aucuacacuauaacagaaugcu

SEQ ID NO: 11041 - RNA, 22 nt, Human
aucuacagcugucugcacagua

SEQ ID NO: 11042 - RNA, 22 nt, Human
aucuacauaaaacgaauacaua

SEQ ID NO: 11043 - RNA, 22 nt, Human
aucuacauguugauuuaaagaa

SEQ ID NO: 11044 - RNA, 22 nt, Human
aucuacccacugaacacaauau

SEQ ID NO: 11045 - RNA, 22 nt, Human
aucuagaacaauuauugucaca

SEQ ID NO: 11046 - RNA, 22 nt, Human
aucuagaacuuaaagucaguca

SEQ ID NO: 11047 - RNA, 21 nt, Human
aucuagaaucucucuccccac

SEQ ID NO: 11048 - RNA, 22 nt, Human
aucuagcaccaaacuagcuuuu

SEQ ID NO: 11049 - RNA, 22 nt, Human
aucuaggauuugaaugcacagu

SEQ ID NO: 11050 - RNA, 22 nt, Human
aucauuacuccuguaaaauugu

SEQ ID NO: 11051 - RNA, 23 nt, Human
aucauuacuuugauaccuuuucu

SEQ ID NO: 11052 - RNA, 22 nt, Human
aucauuagaccaaacuagagcu

SEQ ID NO: 11053 - RNA, 22 nt, Human
aucauuaguuguggaauucuug

SEQ ID NO: 11054 - RNA, 22 nt, Human
aucauucaaaugauuuggaggu

SEQ ID NO: 11055 - RNA, 22 nt, Human
aucauucaagugcucuaaaaug

SEQ ID NO: 11056 - RNA, 22 nt, Human
aucauucuaguccuuauggucu

SEQ ID NO: 11057 - RNA, 22 nt, Human
aucauucuauuguugagcugcc

SEQ ID NO: 11058 - RNA, 22 nt, Human
aucauugaauauaagugcuauu

SEQ ID NO: 11059 - RNA, 22 nt, Human
aucauugaguaaaaugaauaca

SEQ ID NO: 11060 - RNA, 19 nt, Human
aucauugaucuucaccccu

SEQ ID NO: 11061 - RNA, 22 nt, Human
aucauuuaguggggcauuggaa

SEQ ID NO: 11062 - RNA, 18 nt, Human
auccaaaaagauggaagu

SEQ ID NO: 11063 - RNA, 22 nt, Human
auccaaagauggaaagaacuuu

SEQ ID NO: 11064 - RNA, 22 nt, Human
auccaaaggugacacagaauac

SEQ ID NO: 11065 - RNA, 22 nt, Human
auccaaaguagauuaagucaca

SEQ ID NO: 11066 - RNA, 22 nt, Human
auccaacaggacaaagaaagga

SEQ ID NO: 11067 - RNA, 18 nt, Human
auccaacuaucgcucauu

SEQ ID NO: 11068 - RNA, 22 nt, Human
auccacaggguguguuaagaug

SEQ ID NO: 11069 - RNA, 22 nt, Human
auccacaggucauguaaugugg

SEQ ID NO: 11070 - RNA, 22 nt, Human
auccacagugcagcaagggccc

SEQ ID NO: 11071 - RNA, 22 nt, Human
auccacauuuaggucucuaaaa

SEQ ID NO: 11072 - RNA, 22 nt, Human
auccacucccuaacaccauguu

SEQ ID NO: 11073 - RNA, 22 nt, Human
auccacuugccacuguauaguu

SEQ ID NO: 11074 - RNA, 22 nt, Human
auccagaaugucuugcuggaga

SEQ ID NO: 11075 - RNA, 22 nt, Human
auccagaguaauacagaaugca

SEQ ID NO: 11076 - RNA, 22 nt, Human
auccagcacuuguucaugugaa

SEQ ID NO: 11077 - RNA, 22 nt, Human
auccagccaguguggaugacuu

SEQ ID NO: 11078 - RNA, 22 nt, Human
auccaggaaggauggcauugag

SEQ ID NO: 11079 - RNA, 22 nt, Human
auccaggguguggagagagcuc

SEQ ID NO: 11080 - RNA, 22 nt, Human
auccaguucuuggaagcacagg

SEQ ID NO: 11081 - RNA, 22 nt, Human
auccaucccaucuucaccaggg

SEQ ID NO: 11082 - RNA, 22 nt, Human
auccaucuugauguaauagcca

SEQ ID NO: 11083 - RNA, 23 nt, Human
auccaugcuuaaguaaucauuug

SEQ ID NO: 11084 - RNA, 22 nt, Human
auccauucuaugugaaaugucc

SEQ ID NO: 11085 - RNA, 22 nt, Human
auccauuuccuccacuauaaag

SEQ ID NO: 11086 - RNA, 22 nt, Human
auccauuuuaacuguuagugca

SEQ ID NO: 11087 - RNA, 22 nt, Human
auccauuuucucucuguggggu

SEQ ID NO: 11088 - RNA, 22 nt, Human
aucccagauagugacccucagg

SEQ ID NO: 11089 - RNA, 22 nt, Human
aucccagauggaggcuggucac

SEQ ID NO: 11090 - RNA, 22 nt, Human
auccccagggagugagcugucu

SEQ ID NO: 11091 - RNA, 22 nt, Human
aucccucucugcaugacugugu

SEQ ID NO: 11092 - RNA, 20 nt, Human
aucccucuuccuagaguccc

SEQ ID NO: 11093 - RNA, 23 nt, Human
auccuauauaaccuuggaggcug

SEQ ID NO: 11094 - RNA, 22 nt, Human
auccucagaccucagcaaagcc

SEQ ID NO: 11095 - RNA, 22 nt, Human
auccucucuguuuucguguaug

SEQ ID NO: 11096 - RNA, 22 nt, Human
auccugaggaaggugcagagau

SEQ ID NO: 11097 - RNA, 22 nt, Human
auccugaguuccugccucuaaa

SEQ ID NO: 11098 - RNA, 22 nt, Human
auccuggacaguuuccccuauu

SEQ ID NO: 11099 - RNA, 22 nt, Human
auccuggcccagguguggaggg

SEQ ID NO: 11100 - RNA, 22 nt, Human
auccuggcccucaugaccccuu

SEQ ID NO: 11101 - RNA, 22 nt, Human
auccuggcgccacacggcucua

SEQ ID NO: 11102 - RNA, 18 nt, Human
auccugggagcagacagc

SEQ ID NO: 11103 - RNA, 22 nt, Human
auccugggcaaaguaugcuguc

SEQ ID NO: 11104 - RNA, 22 nt, Human
auccugggcagugugucacucu

SEQ ID NO: 11105 - RNA, 22 nt, Human
auccugggcaguuuugagugcu

SEQ ID NO: 11106 - RNA, 22 nt, Human
auccugucuuuguuuuaaauau

SEQ ID NO: 11107 - RNA, 22 nt, Human
auccuguguugcuacuggagga

SEQ ID NO: 11108 - RNA, 22 nt, Human
auccuuaauuuacuugcaucuu

SEQ ID NO: 11109 - RNA, 22 nt, Human
auccuuagaagggagugaggac

SEQ ID NO: 11110 - RNA, 22 nt, Human
auccuuaguuaagaacaggagu

SEQ ID NO: 11111 - RNA, 22 nt, Human
auccuucaaaaggaauagcagg

SEQ ID NO: 11112 - RNA, 22 nt, Human
auccuucaaggggcugacagcu

SEQ ID NO: 11113 - RNA, 22 nt, Human
auccuucaauuagaaccaauug

SEQ ID NO: 11114 - RNA, 22 nt, Human
auccuucaggaaaccauccuca

SEQ ID NO: 11115 - RNA, 22 nt, Human
auccuuccuucauuugacaggu

SEQ ID NO: 11116 - RNA, 22 nt, Human
auccuucuaccuaggacuauuu

SEQ ID NO: 11117 - RNA, 22 nt, Human
aucuggauagguuguuuugcau

SEQ ID NO: 11118 - RNA, 22 nt, Human
aucuggcuauugacauguuaua

SEQ ID NO: 11119 - RNA, 20 nt, Human
aucuggcucagauccugcag

SEQ ID NO: 11120 - RNA, 22 nt, Human
aucuggcucuuccuggaguucc

SEQ ID NO: 11121 - RNA, 22 nt, Human
aucuggcugcugugcuuaagcu

SEQ ID NO: 11122 - RNA, 22 nt, Human
aucuggcuuaccuagggugccu

SEQ ID NO: 11123 - RNA, 22 nt, Human
aucuggcuuuuaccccacggcc

SEQ ID NO: 11124 - RNA, 22 nt, Human
aucuggcuuuuacugaauugcu

SEQ ID NO: 11125 - RNA, 22 nt, Human
aucugggagcggagguugcagu

SEQ ID NO: 11126 - RNA, 22 nt, Human
aucugggagucuuggcucugcu

SEQ ID NO: 11127 - RNA, 22 nt, Human
aucugggccuguucccucaccu

SEQ ID NO: 11128 - RNA, 22 nt, Human
aucugggucugaagauaaugau

SEQ ID NO: 11129 - RNA, 22 nt, Human
aucuguaaagauaaucauaugu

SEQ ID NO: 11130 - RNA, 22 nt, Human
aucuguaaauaaaaagggaggu

SEQ ID NO: 11131 - RNA, 22 nt, Human
aucuguaaaugcaaauguagcu

SEQ ID NO: 11132 - RNA, 22 nt, Human
aucuguaacaucaguagcagaa

SEQ ID NO: 11133 - RNA, 22 nt, Human
aucugucccugguccaagauuu

SEQ ID NO: 11134 - RNA, 22 nt, Human
aucugucuaugauauagucugu

SEQ ID NO: 11135 - RNA, 22 nt, Human
aucugucuggaggccuggcaug

SEQ ID NO: 11136 - RNA, 22 nt, Human
aucugucuuuuauucaugagcu

SEQ ID NO: 11137 - RNA, 22 nt, Human
aucugugagaaaggcuugugcu

SEQ ID NO: 11138 - RNA, 22 nt, Human
aucuguggauaugaccuuccug

SEQ ID NO: 11139 - RNA, 22 nt, Human
aucuguggcuggugagaggcag

SEQ ID NO: 11140 - RNA, 22 nt, Human
aucuguucuugugucaguaauu

SEQ ID NO: 11141 - RNA, 23 nt, Human
aucuguugugccucuuauaugua

SEQ ID NO: 11142 - RNA, 22 nt, Human
aucuguuguuuguuugcuaaag

SEQ ID NO: 11143 - RNA, 22 nt, Human
aucuguuuaauucauuuucaca

SEQ ID NO: 11144 - RNA, 21 nt, Human
aucuuaaaaggucuuaacuuu

SEQ ID NO: 11145 - RNA, 22 nt, Human
aucuuaaucgaguccaugaaaa

SEQ ID NO: 11146 - RNA, 23 nt, Human
aucuuacauauuuagcaccugaa

SEQ ID NO: 11147 - RNA, 22 nt, Human
aucuuaccucuuccucugcauu

SEQ ID NO: 11148 - RNA, 22 nt, Human
aucuucaacuugaucauuugaa

SEQ ID NO: 11149 - RNA, 22 nt, Human
aucuucaguuuucagugagcca

SEQ ID NO: 11150 - RNA, 22 nt, Human
aucuuccaagcucccuggugua

SEQ ID NO: 11151 - RNA, 22 nt, Human
aucuuccuucacuuucucccac

SEQ ID NO: 11152 - RNA, 22 nt, Human
aucuuccuuugccaugggauag

SEQ ID NO: 11153 - RNA, 22 nt, Human
aucuucugggcagugaaaauug

SEQ ID NO: 11154 - RNA, 22 nt, Human
aucuucuggucaaauuuuugca

SEQ ID NO: 11155 - RNA, 20 nt, Human
aucuucuuggccagcuugcu

SEQ ID NO: 11156 - RNA, 22 nt, Human
aucuugauuccauuaucuuugu

SEQ ID NO: 11157 - RNA, 22 nt, Human
aucuugcauuugcuaaaaugca

SEQ ID NO: 11158 - RNA, 20 nt, Human
aucuugggacagggcacaug

SEQ ID NO: 11159 - RNA, 22 nt, Human
aucuugugugaugaugagaaag

SEQ ID NO: 11160 - RNA, 22 nt, Human
aucuuguuaaaaugcagauucu

SEQ ID NO: 11161 - RNA, 22 nt, Human
aucuuguuauaagagauaaugg

SEQ ID NO: 11162 - RNA, 22 nt, Human
aucuuguucucccuuguucuua

SEQ ID NO: 11163 - RNA, 22 nt, Human
aucuuuaauuuggaucagggcc

SEQ ID NO: 11164 - RNA, 22 nt, Human
aucuuuagcauuacuuuauuca

SEQ ID NO: 11165 - RNA, 22 nt, Human
augcauauuucuugggcuuacc

SEQ ID NO: 11166 - RNA, 22 nt, Human
augcaucaccgaguugcccacc

SEQ ID NO: 11167 - RNA, 23 nt, Human
augcaucaugaaaacuagagagc

SEQ ID NO: 11168 - RNA, 22 nt, Human
augcaucauggaaaacucaguu

SEQ ID NO: 11169 - RNA, 20 nt, Human
augcaucugguaucuuuccu

SEQ ID NO: 11170 - RNA, 22 nt, Human
augcaucuuaucaaaaauuaua

SEQ ID NO: 11171 - RNA, 22 nt, Human
augcaugagcuuugugauccug

SEQ ID NO: 11172 - RNA, 22 nt, Human
augcaugcuucuuauaguacuu

SEQ ID NO: 11173 - RNA, 22 nt, Human
augcauggucugaagucaaccu

SEQ ID NO: 11174 - RNA, 22 nt, Human
augcaugucagcugugcccaug

SEQ ID NO: 11175 - RNA, 22 nt, Human
augcaugugcauggcucuaucu

SEQ ID NO: 11176 - RNA, 21 nt, Human
augcauguuacaguauaugcc

SEQ ID NO: 11177 - RNA, 22 nt, Human
augcauugcucaacagaauaca

SEQ ID NO: 11178 - RNA, 22 nt, Human
augcauugucaggcaauuucau

SEQ ID NO: 11179 - RNA, 21 nt, Human
augccaaacuucuucugcccu

SEQ ID NO: 11180 - RNA, 22 nt, Human
augccaaauucucagccucuuu

SEQ ID NO: 11181 - RNA, 22 nt, Human
augccaaauuucuuucuguucu

SEQ ID NO: 11182 - RNA, 22 nt, Human
augccagaagccaaaaaauauu

SEQ ID NO: 11183 - RNA, 22 nt, Human
augccagaaggcagaauuuauc

SEQ ID NO: 11184 - RNA, 22 nt, Human
augccagaccauccaguuggga

SEQ ID NO: 11185 - RNA, 22 nt, Human
augcccagaacccccuggaugg

SEQ ID NO: 11186 - RNA, 22 nt, Human
augcccccaucucuguuggcuc

SEQ ID NO: 11187 - RNA, 22 nt, Human
augcccugagcaggccuucaag

SEQ ID NO: 11188 - RNA, 22 nt, Human
augcccugcugccaucuggccg

SEQ ID NO: 11189 - RNA, 22 nt, Human
augcccuggggcuaccucugag

SEQ ID NO: 11190 - RNA, 20 nt, Human
augcccuguccucuucuguu

SEQ ID NO: 11191 - RNA, 18 nt, Human
augcccuguugacuucag

SEQ ID NO: 11192 - RNA, 22 nt, Human
augccuccucaaaucugccaca

SEQ ID NO: 11193 - RNA, 22 nt, Human
augccugguaugaagcaaggaa

SEQ ID NO: 11194 - RNA, 22 nt, Human
augccuguaaaacagcacccag

SEQ ID NO: 11195 - RNA, 22 nt, Human
augccuuauuguaaucuuucca

SEQ ID NO: 11196 - RNA, 22 nt, Human
augccuuuuuaucauggaugau

SEQ ID NO: 11197 - RNA, 22 nt, Human
augcguguaggaacagugucua

SEQ ID NO: 11198 - RNA, 22 nt, Human
augcuaaacuaugaucauuuuc

SEQ ID NO: 11199 - RNA, 22 nt, Human
augcuaaagggguaggccuccu

SEQ ID NO: 11200 - RNA, 22 nt, Human
augcuaaauucagacaggguua

SEQ ID NO: 11201 - RNA, 22 nt, Human
augcuaauuccaugagcacagg

SEQ ID NO: 11202 - RNA, 22 nt, Human
augcuacacuccgcgaaaaugu

SEQ ID NO: 11203 - RNA, 22 nt, Human
augcuacagagauagguugggu

SEQ ID NO: 11204 - RNA, 22 nt, Human
augcuagaagggagcacuaugu

SEQ ID NO: 11205 - RNA, 22 nt, Human
augcuauacauaugacaucaca

SEQ ID NO: 11206 - RNA, 22 nt, Human
augcuauguaacuggcagauag

SEQ ID NO: 11207 - RNA, 22 nt, Human
augcuauguuugguguuggaga

SEQ ID NO: 11208 - RNA, 22 nt, Human
augcuauuaauauccagucuga

SEQ ID NO: 11209 - RNA, 22 nt, Human
augcuauuccagaauguaaauu

SEQ ID NO: 11210 - RNA, 22 nt, Human
augcucagggcacacucuggac

SEQ ID NO: 11211 - RNA, 17 nt, Human
augcuccauucagaagc

SEQ ID NO: 11212 - RNA, 18 nt, Human
augcuccuaucucugagc

SEQ ID NO: 11213 - RNA, 22 nt, Human
augcuccucgagugucucacag

SEQ ID NO: 11214 - RNA, 22 nt, Human
augcucugaugcuguuaaaugu

SEQ ID NO: 11215 - RNA, 22 nt, Human
augcugaagaaucacagggacu

SEQ ID NO: 11216 - RNA, 22 nt, Human
augcugaagagagaacuacuca

SEQ ID NO: 11217 - RNA, 22 nt, Human
augcugaagagugcacaggcua

SEQ ID NO: 11218 - RNA, 22 nt, Human
augcugaaggccauccugcauc

SEQ ID NO: 11219 - RNA, 22 nt, Human
augcugagaaacagacguguug

SEQ ID NO: 11220 - RNA, 22 nt, Human
augcugagauaaggcuuuaguc

SEQ ID NO: 11221 - RNA, 22 nt, Human
augcugagugagugaaacccag

SEQ ID NO: 11222 - RNA, 22 nt, Human
augcugaugcugcuuuugcccu

SEQ ID NO: 11223 - RNA, 22 nt, Human
augcugcagcugcaggaucaga

SEQ ID NO: 11224 - RNA, 22 nt, Human
augcugccuccucuucagccgc

SEQ ID NO: 11225 - RNA, 22 nt, Human
augcuguagaucuuagccucua

SEQ ID NO: 11226 - RNA, 22 nt, Human
aaggcugaguaaaacagagaac

SEQ ID NO: 11227 - RNA, 22 nt, Human
aaggcugcuuuuaacaugcaua

SEQ ID NO: 11228 - RNA, 22 nt, Human
aaggcugguuuccuugauguuu

SEQ ID NO: 11229 - RNA, 22 nt, Human
aaggcuguccaggagaaaauag

SEQ ID NO: 11230 - RNA, 22 nt, Human
aaggcugucuuuuccucuuccc

SEQ ID NO: 11231 - RNA, 22 nt, Human
aaggcugugguucuauacagaa

SEQ ID NO: 11232 - RNA, 22 nt, Human
aaggcugugucagaagcucccu

SEQ ID NO: 11233 - RNA, 22 nt, Human
aaggcuucuggagcuugcuggc

SEQ ID NO: 11234 - RNA, 22 nt, Human
aaggcuucuuaugcaauuguuu

SEQ ID NO: 11235 - RNA, 22 nt, Human
aaggcuucuuuaguguccuaau

SEQ ID NO: 11236 - RNA, 22 nt, Human
aaggcuugauauuuacagucuu

SEQ ID NO: 11237 - RNA, 22 nt, Human
aaggcuuggaccagcuacagug

SEQ ID NO: 11238 - RNA, 22 nt, Human
aaggcuuggucuagucaugcca

SEQ ID NO: 11239 - RNA, 22 nt, Human
aaggcuuguguguucagugagg

SEQ ID NO: 11240 - RNA, 22 nt, Human
aaggcuuguugaguaucuacug

SEQ ID NO: 11241 - RNA, 22 nt, Human
aaggcuuuccuguaggaagaca

SEQ ID NO: 11242 - RNA, 22 nt, Human
aaggaaagacauauaaaugacu

SEQ ID NO: 11243 - RNA, 22 nt, Human
aaggaaagcugugguucugaga

SEQ ID NO: 11244 - RNA, 22 nt, Human
aaggaaaggaugagcaugcauu

SEQ ID NO: 11245 - RNA, 22 nt, Human
aaggaaccucuaagccucuguu

SEQ ID NO: 11246 - RNA, 22 nt, Human
aaggaaccugggaaccuaucau

SEQ ID NO: 11247 - RNA, 22 nt, Human
aaggaacuaaauaguucuggaa

SEQ ID NO: 11248 - RNA, 22 nt, Human
aaggaagagcaaagaauuaugu

SEQ ID NO: 11249 - RNA, 22 nt, Human
aaggaagaugaaaguacugcua

SEQ ID NO: 11250 - RNA, 16 nt, Human
aaggaaugucauucug

SEQ ID NO: 11251 - RNA, 22 nt, Human
aaggaauucccuuucugacaga

SEQ ID NO: 11252 - RNA, 22 nt, Human
aaggaauucuagaagguuuugu

SEQ ID NO: 11253 - RNA, 22 nt, Human
aaggacagagagccauuccaga

SEQ ID NO: 11254 - RNA, 22 nt, Human
aaggacagguuggggcuucagg

SEQ ID NO: 11255 - RNA, 22 nt, Human
aaggaccaguuuugcagaauug

SEQ ID NO: 11256 - RNA, 22 nt, Human
aaggagaaggcaucauucaagu

SEQ ID NO: 11257 - RNA, 22 nt, Human
aaggagaagucuguugagauug

SEQ ID NO: 11258 - RNA, 22 nt, Human
aaggagacauuugcagagcacc

SEQ ID NO: 11259 - RNA, 22 nt, Human
aaggagcgcuuagggggcagaa

SEQ ID NO: 11260 - RNA, 22 nt, Human
aaggagcuaugcauaacugauc

SEQ ID NO: 11261 - RNA, 22 nt, Human
aaggagcucccggcagaccagg

SEQ ID NO: 11262 - RNA, 17 nt, Human
aaggagcugagagaugg

SEQ ID NO: 11263 - RNA, 22 nt, Human
aaggagcugggagggacacaug

SEQ ID NO: 11264 - RNA, 22 nt, Human
aaggagcuuucauuacagccuu

SEQ ID NO: 11265 - RNA, 22 nt, Human
aaggaggaaaauauuguugcug

SEQ ID NO: 11266 - RNA, 22 nt, Human
aaggagucugggccauucagag

SEQ ID NO: 11267 - RNA, 22 nt, Human
aaggagugcugaaaggaagcgg

SEQ ID NO: 11268 - RNA, 22 nt, Human
aaggauagucacauuuuuaugu

SEQ ID NO: 11269 - RNA, 22 nt, Human
aaggaucauaguaaacauugau

SEQ ID NO: 11270 - RNA, 23 nt, Human
aaggaucucugagaucauggcuu

SEQ ID NO: 11271 - RNA, 22 nt, Human
aaggaucugacagacuauagaa

SEQ ID NO: 11272 - RNA, 22 nt, Human
aaggauuuguccaaagucacac

SEQ ID NO: 11273 - RNA, 22 nt, Human
aaggcaaaagaggugucaucac

SEQ ID NO: 11274 - RNA, 22 nt, Human
aaggcaaauguguucuuuuagu

SEQ ID NO: 11275 - RNA, 22 nt, Human
aaggcaaggccaagccaucagu

SEQ ID NO: 11276 - RNA, 22 nt, Human
aaggcaaguuuuaguuuucugg

SEQ ID NO: 11277 - RNA, 22 nt, Human
aaggcaauauugaguuucccuu

SEQ ID NO: 11278 - RNA, 22 nt, Human
aaggcaaugcuaagagguuugg

SEQ ID NO: 11279 - RNA, 22 nt, Human
aaggcaauguuagcaacauaau

SEQ ID NO: 11280 - RNA, 22 nt, Human
aaggcaauugcaguuuuugcca

SEQ ID NO: 11281 - RNA, 22 nt, Human
aaggcaauuggcuuguauaaga

SEQ ID NO: 11282 - RNA, 22 nt, Human
aaggcacacaguuagauagagc

SEQ ID NO: 11283 - RNA, 22 nt, Human
aaggcacuagcagaauuaguga

SEQ ID NO: 11284 - RNA, 22 nt, Human
aaggcacucauucaaggagaua

SEQ ID NO: 11285 - RNA, 22 nt, Human
aaggcacugaaaaauugugugu

SEQ ID NO: 11286 - RNA, 22 nt, Human
aaggcacugacugugcagggga

SEQ ID NO: 11287 - RNA, 22 nt, Human
aaggcacugagccagccgucuc

SEQ ID NO: 11288 - RNA, 22 nt, Human
aaggcagaaagggaugugagug

SEQ ID NO: 11289 - RNA, 19 nt, Human
aaggcagaaguuggauaug

SEQ ID NO: 11290 - RNA, 22 nt, Human
aaggcagagauauucuugaucu

SEQ ID NO: 11291 - RNA, 22 nt, Human
aaggcagauaagaauucagcaa

SEQ ID NO: 11292 - RNA, 22 nt, Human
aaggcagcacagcaacugcuca

SEQ ID NO: 11293 - RNA, 22 nt, Human
aaggcagcagaggaaaggugcu

SEQ ID NO: 11294 - RNA, 22 nt, Human
aaggcagccauagcaccaucca

SEQ ID NO: 11295 - RNA, 22 nt, Human
aaggcagccaugugcuuugggu

SEQ ID NO: 11296 - RNA, 22 nt, Human
aaggcaggagcuguaucuuauu

SEQ ID NO: 11297 - RNA, 22 nt, Human
aaggcaggaugggaaaagauuu

SEQ ID NO: 11298 - RNA, 22 nt, Human
aaggcagggaaaguggauuagg

SEQ ID NO: 11299 - RNA, 22 nt, Human
aaggcaguacuuuauguccaua

SEQ ID NO: 11300 - RNA, 22 nt, Human
aaggcagucaaagcagacuucu

SEQ ID NO: 11301 - RNA, 22 nt, Human
aaggcauuaccuaaguuuggga

SEQ ID NO: 11302 - RNA, 22 nt, Human
aaggcauuuguuggauuucuca

SEQ ID NO: 11303 - RNA, 22 nt, Human
aaggccacacuugcuggccagc

SEQ ID NO: 11304 - RNA, 22 nt, Human
aaggccaccaccagcgaggggg

SEQ ID NO: 11305 - RNA, 22 nt, Human
aaggccagauucacuuuacaau

SEQ ID NO: 11306 - RNA, 22 nt, Human
aaggccagauucucucuagggg

SEQ ID NO: 11307 - RNA, 22 nt, Human
aaggccagcuuguagggcuggu

SEQ ID NO: 11308 - RNA, 22 nt, Human
aaggccagggaugccagcucgg

SEQ ID NO: 11309 - RNA, 22 nt, Human
aaggccaggggcuggcgccucc

SEQ ID NO: 11310 - RNA, 22 nt, Human
aaggccaucuacuuacggaauu

SEQ ID NO: 11311 - RNA, 22 nt, Human
aaggccaugcacauccuaggca

SEQ ID NO: 11312 - RNA, 22 nt, Human
aaggcccagggauuggagguca

SEQ ID NO: 11313 - RNA, 22 nt, Human
aaggcccucaugcgucagagcc

SEQ ID NO: 11314 - RNA, 22 nt, Human
aaggcccuggaugguuuugaga

SEQ ID NO: 11315 - RNA, 22 nt, Human
aaggcccuggcaggaagcagga

SEQ ID NO: 11316 - RNA, 22 nt, Human
aaggcccuuuagcagaggaggg

SEQ ID NO: 11317 - RNA, 18 nt, Human
aaggccuagucccucucu

SEQ ID NO: 11318 - RNA, 22 nt, Human
aaggccuugccgaaggaugcca

SEQ ID NO: 11319 - RNA, 22 nt, Human
aaggccuugccugacagcacca

SEQ ID NO: 11320 - RNA, 22 nt, Human
aaggccuuucuagcuuugugcu

SEQ ID NO: 11321 - RNA, 22 nt, Human
aaggccuuugccccgauacagg

SEQ ID NO: 11322 - RNA, 22 nt, Human
aaggcuaaauucuguacugcau

SEQ ID NO: 11323 - RNA, 22 nt, Human
aaggcuagagagguauucaagu

SEQ ID NO: 11324 - RNA, 22 nt, Human
aaggcuauaucucaauacuauu

SEQ ID NO: 11325 - RNA, 22 nt, Human
aaggcuaucuggccuccuugcc

SEQ ID NO: 11326 - RNA, 22 nt, Human
aaggcuauguguuaaggcagau

SEQ ID NO: 11327 - RNA, 22 nt, Human
aaggcucuggguuucauaggug

SEQ ID NO: 11328 - RNA, 22 nt, Human
aaggcucuugaguggugauagu

SEQ ID NO: 11329 - RNA, 22 nt, Human
aaggcucuuggagugaaugcag

SEQ ID NO: 11330 - RNA, 22 nt, Human
aaggcugaccaguuuacacuuu

SEQ ID NO: 11331 - RNA, 22 nt, Human
aaggcugauuagacugauagcu

SEQ ID NO: 11332 - RNA, 22 nt, Human
aaggcugggaaacaugcaggcc

SEQ ID NO: 11333 - RNA, 22 nt, Human
aaggcuggguuugggaugugau

SEQ ID NO: 11334 - RNA, 19 nt, Human
aaggcugguaccauagguu

SEQ ID NO: 11335 - RNA, 22 nt, Human
aagucauagucgggaaagacau

SEQ ID NO: 11336 - RNA, 22 nt, Human
aagucaucacuccucugaacuu

SEQ ID NO: 11337 - RNA, 22 nt, Human
aagucauuaucucuucuaaucu

SEQ ID NO: 11338 - RNA, 22 nt, Human
aagucauucuauuucucuaugu

SEQ ID NO: 11339 - RNA, 22 nt, Human
aagucauugguagcuugauagg

SEQ ID NO: 11340 - RNA, 22 nt, Human
aaguccaccagucagacuagga

SEQ ID NO: 11341 - RNA, 22 nt, Human
aaguccagaccugaggcccuca

SEQ ID NO: 11342 - RNA, 17 nt, Human
aaguccagccugcagcu

SEQ ID NO: 11343 - RNA, 22 nt, Human
aaguccaggcuggcguagaguc

SEQ ID NO: 11344 - RNA, 22 nt, Human
aaguccagggaucaaaguaggc

SEQ ID NO: 11345 - RNA, 22 nt, Human
aaguccagguccucauuccauc

SEQ ID NO: 11346 - RNA, 22 nt, Human
aaguccagugaaauagaaugca

SEQ ID NO: 11347 - RNA, 22 nt, Human
aaguccagugcuuuagauucca

SEQ ID NO: 11348 - RNA, 22 nt, Human
aaguccaguuucauuugagguc

SEQ ID NO: 11349 - RNA, 22 nt, Human
aaguccaguuuuuccagguggu

SEQ ID NO: 11350 - RNA, 22 nt, Human
aaguccaucucugccccacaca

SEQ ID NO: 11351 - RNA, 18 nt, Human
aaguccauggguuuggga

SEQ ID NO: 11352 - RNA, 17 nt, Human
aagucccagcuaacaca

SEQ ID NO: 11353 - RNA, 22 nt, Human
aagucccuggugcuggcugcgc

SEQ ID NO: 11354 - RNA, 22 nt, Human
aagucccugugggguggaggcu

SEQ ID NO: 11355 - RNA, 22 nt, Human
aaguccuggauauuaaauugau

SEQ ID NO: 11356 - RNA, 18 nt, Human
aaguccuuccuuugcuuu

SEQ ID NO: 11357 - RNA, 22 nt, Human
aaguccuuguauacagaaucaa

SEQ ID NO: 11358 - RNA, 22 nt, Human
aaguccuuuaauaucacauagu

SEQ ID NO: 11359 - RNA, 22 nt, Human
aagucucagaaaacuagugugg

SEQ ID NO: 11360 - RNA, 22 nt, Human
aaggcuuugugggcugcaggca

SEQ ID NO: 11361 - RNA, 22 nt, Human
aaggcuuuuaaacugucaagga

SEQ ID NO: 11362 - RNA, 22 nt, Human
aaggcuuuuaacuacuguuuua

SEQ ID NO: 11363 - RNA, 22 nt, Human
aagggaaacuuucacaaugucc

SEQ ID NO: 11364 - RNA, 22 nt, Human
aagggaaauccucagcccagga

SEQ ID NO: 11365 - RNA, 22 nt, Human
aagggagccaagaaagcagggc

SEQ ID NO: 11366 - RNA, 22 nt, Human
aagggagcuuaggagaucaggc

SEQ ID NO: 11367 - RNA, 22 nt, Human
aagggagguaaagcuauuuaaa

SEQ ID NO: 11368 - RNA, 22 nt, Human
aagggcagcuauuaucgucauc

SEQ ID NO: 11369 - RNA, 22 nt, Human
aagggcaggaaaagauggaugu

SEQ ID NO: 11370 - RNA, 22 nt, Human
aagggcaggagaagacggauau

SEQ ID NO: 11371 - RNA, 22 nt, Human
aagggccacaugccauuuaaaa

SEQ ID NO: 11372 - RNA, 22 nt, Human
aagggccuccuggggagccugg

SEQ ID NO: 11373 - RNA, 22 nt, Human
aagggcggacagggcacauuuc

SEQ ID NO: 11374 - RNA, 22 nt, Human
aagggcuccaagagguagcugg

SEQ ID NO: 11375 - RNA, 22 nt, Human
aagggcucccaacucaucuuuu

SEQ ID NO: 11376 - RNA, 22 nt, Human
aagggcucccugccugaggugg

SEQ ID NO: 11377 - RNA, 22 nt, Human
aagggcucugcugucucucccc

SEQ ID NO: 11378 - RNA, 22 nt, Human
aagggcucuguugccauuucag

SEQ ID NO: 11379 - RNA, 22 nt, Human
aagggcugagcacagugagcca

SEQ ID NO: 11380 - RNA, 22 nt, Human
aagggcuggaauaucucuuaga

SEQ ID NO: 11381 - RNA, 22 nt, Human
aagggcuggaucucucugagca

SEQ ID NO: 11382 - RNA, 22 nt, Human
aagggcuggccacauucugggu

SEQ ID NO: 11383 - RNA, 22 nt, Human
aagggcugggucugguuaaccc

SEQ ID NO: 11384 - RNA, 22 nt, Human
aagggcuggucuagaaagggag

SEQ ID NO: 11385 - RNA, 22 nt, Human
aagggcuuaggauuuugcugug

SEQ ID NO: 11386 - RNA, 22 nt, Human
aaggggccucacagaugggcuu

SEQ ID NO: 11387 - RNA, 22 nt, Human
aagggggcgaagacgugauuga

SEQ ID NO: 11388 - RNA, 22 nt, Human
aaggggugcuguuggaaaccca

SEQ ID NO: 11389 - RNA, 22 nt, Human
aaggguccaaggcuuugcguuu

SEQ ID NO: 11390 - RNA, 22 nt, Human
aagggucuuagagguucauuuu

SEQ ID NO: 11391 - RNA, 22 nt, Human
aagggugcauugcgcggggcug

SEQ ID NO: 11392 - RNA, 22 nt, Human
aaggguggauuucugagcucua

SEQ ID NO: 11393 - RNA, 22 nt, Human
aaggguguugaucagagaggau

SEQ ID NO: 11394 - RNA, 22 nt, Human
aaggguuaguuggauuauuuau

SEQ ID NO: 11395 - RNA, 22 nt, Human
aaggguugaagauaaauaaggu

SEQ ID NO: 11396 - RNA, 22 nt, Human
aaggguugcaaggucagaggaa

SEQ ID NO: 11397 - RNA, 22 nt, Human
aagguacaggguauuagauuau

SEQ ID NO: 11398 - RNA, 22 nt, Human
aagguauagcuugcauacagaa

SEQ ID NO: 11399 - RNA, 22 nt, Human
aagguauuauugucuauguacu

SEQ ID NO: 11400 - RNA, 22 nt, Human
aagguauuggucuggucuuccu

SEQ ID NO: 11401 - RNA, 22 nt, Human
aagguauuuucuaauguauacu

SEQ ID NO: 11402 - RNA, 22 nt, Human
aaggucuauggagaagacugag

SEQ ID NO: 11403 - RNA, 22 nt, Human
aaggucucuguugagaacauuu

SEQ ID NO: 11404 - RNA, 22 nt, Human
aaggucugaguuuugccaggcc

SEQ ID NO: 11405 - RNA, 22 nt, Human
aaggugcucacgggcucaggga

SEQ ID NO: 11406 - RNA, 22 nt, Human
aaggugggguccugucaucuga

SEQ ID NO: 11407 - RNA, 22 nt, Human
aagguggugaguacaguuaggu

SEQ ID NO: 11408 - RNA, 22 nt, Human
aaggugguuguaggcuggucug

SEQ ID NO: 11409 - RNA, 22 nt, Human
aaggugucaaacuagaagaugu

SEQ ID NO: 11410 - RNA, 22 nt, Human
aaggugucaggcuugggaaagu

SEQ ID NO: 11411 - RNA, 22 nt, Human
aaggugugaacugauucauugg

SEQ ID NO: 11412 - RNA, 22 nt, Human
aagguuaguaauauuucuauau

SEQ ID NO: 11413 - RNA, 22 nt, Human
aagguuuauuaaaaguugaugg

SEQ ID NO: 11414 - RNA, 22 nt, Human
aagguuuccagugauauugugg

SEQ ID NO: 11415 - RNA, 22 nt, Human
aagguuuuuuuccaguaucucu

SEQ ID NO: 11416 - RNA, 22 nt, Human
aaguaaaacacacaguccaccg

SEQ ID NO: 11417 - RNA, 22 nt, Human
aaguaaaagcuuuaccaugcgc

SEQ ID NO: 11418 - RNA, 22 nt, Human
aaguaaaccacagagaagccac

SEQ ID NO: 11419 - RNA, 22 nt, Human
aaguaaauaucuguagucuuua

SEQ ID NO: 11420 - RNA, 22 nt, Human
aaguaaauaucuguuuauagca

SEQ ID NO: 11421 - RNA, 22 nt, Human
aaguaacacauguuacuucugc

SEQ ID NO: 11422 - RNA, 22 nt, Human
aaguaacagcaucaagucucaa

SEQ ID NO: 11423 - RNA, 22 nt, Human
aaguaaggccuucuugagcaug

SEQ ID NO: 11424 - RNA, 22 nt, Human
aaguacaaauuuugaagagcuu

SEQ ID NO: 11425 - RNA, 22 nt, Human
aaguacaccuuuggaguccacg

SEQ ID NO: 11426 - RNA, 22 nt, Human
aaguacagaaauagcaggugca

SEQ ID NO: 11427 - RNA, 23 nt, Human
aaguacauauauuuagauaguga

SEQ ID NO: 11428 - RNA, 22 nt, Human
aaguacaucaaauguuuggcua

SEQ ID NO: 11429 - RNA, 22 nt, Human
aaguacaugcuguaaugauugg

SEQ ID NO: 11430 - RNA, 22 nt, Human
aaguacauggaggauagcugcu

SEQ ID NO: 11431 - RNA, 22 nt, Human
aaguacauguugcucaacagcc

SEQ ID NO: 11432 - RNA, 22 nt, Human
aaguacauguuguucaaaagcc

SEQ ID NO: 11433 - RNA, 23 nt, Human
aaguaccuacacauuauuucaga

SEQ ID NO: 11434 - RNA, 22 nt, Human
aaguacuaaggcuauuaugaug

SEQ ID NO: 11435 - RNA, 22 nt, Human
aaguagacuuuugcaucaagga

SEQ ID NO: 11436 - RNA, 22 nt, Human
aaguagcagggauuacaggugu

SEQ ID NO: 11437 - RNA, 22 nt, Human
aaguagcauuccaugguauaga

SEQ ID NO: 11438 - RNA, 22 nt, Human
aaguaggaauccgaaugaguag

SEQ ID NO: 11439 - RNA, 22 nt, Human
aaguaguuaguccgccugcucu

SEQ ID NO: 11440 - RNA, 22 nt, Human
aaguauauuuuuugaagcauau

SEQ ID NO: 11441 - RNA, 22 nt, Human
aaguaucugggagauuugcuuu

SEQ ID NO: 11442 - RNA, 22 nt, Human
aaguaucuuggaaaacucuucu

SEQ ID NO: 11443 - RNA, 22 nt, Human
aaguaugaaucaaagacuaucu

SEQ ID NO: 11444 - RNA, 22 nt, Human
aaguucaaguguaaucuuuauu

SEQ ID NO: 11445 - RNA, 22 nt, Human
aaguucagccugguuuuaaugc

SEQ ID NO: 11446 - RNA, 22 nt, Human
aaguucaucaaagaguaaauau

SEQ ID NO: 11447 - RNA, 18 nt, Human
aaguuccacaagagaucu

SEQ ID NO: 11448 - RNA, 22 nt, Human
aaguuccuaaagucagggguca

SEQ ID NO: 11449 - RNA, 22 nt, Human
aaguuccuauauccaaauacag

SEQ ID NO: 11450 - RNA, 22 nt, Human
aaguuccucaaauaaaacauga

SEQ ID NO: 11451 - RNA, 22 nt, Human
aaguuccucuucucugcaggga

SEQ ID NO: 11452 - RNA, 22 nt, Human
aaguuccuguuacuccccagaa

SEQ ID NO: 11453 - RNA, 22 nt, Human
aaguucuaauuuugcauucagg

SEQ ID NO: 11454 - RNA, 22 nt, Human
aaguucuacagcuucgcaggca

SEQ ID NO: 11455 - RNA, 22 nt, Human
aaguucuagagguugauuuggu

SEQ ID NO: 11456 - RNA, 22 nt, Human
aaguucuauagucuuucuacua

SEQ ID NO: 11457 - RNA, 23 nt, Human
aaguucuauuagugcuggucuag

SEQ ID NO: 11458 - RNA, 22 nt, Human
aaguucuugaagacuuuaaaua

SEQ ID NO: 11459 - RNA, 22 nt, Human
aaguucuugauaaguccacugu

SEQ ID NO: 11460 - RNA, 22 nt, Human
aaguugaagcaugaaccaaggu

SEQ ID NO: 11461 - RNA, 22 nt, Human
aaguugaucaaguagcgaguuc

SEQ ID NO: 11462 - RNA, 19 nt, Human
aaguugaucauuuugacag

SEQ ID NO: 11463 - RNA, 22 nt, Human
aaguugauggcgucuuugagau

SEQ ID NO: 11464 - RNA, 22 nt, Human
aaguugcuuuccggcgggcagg

SEQ ID NO: 11465 - RNA, 22 nt, Human
aaguuuagauauagguauucug

SEQ ID NO: 11466 - RNA, 22 nt, Human
aaguuuagcuugagauggaaag

SEQ ID NO: 11467 - RNA, 20 nt, Human
aaguuuaggggaaagugaca

SEQ ID NO: 11468 - RNA, 22 nt, Human
aaguuuagugaaacucuagggg

SEQ ID NO: 11469 - RNA, 22 nt, Human
aaguuuaguggugguguuccau

SEQ ID NO: 11470 - RNA, 22 nt, Human
aaguuuauuaauugacuugugc

SEQ ID NO: 11471 - RNA, 21 nt, Human
aaguuucucccuaauuguugc

SEQ ID NO: 11472 - RNA, 20 nt, Human
aaguuucugguuuauaucuu

SEQ ID NO: 11473 - RNA, 22 nt, Human
aaguuucuguaugcucuucugu

SEQ ID NO: 11474 - RNA, 22 nt, Human
aaguuucuuuauuagcuugucc

SEQ ID NO: 11475 - RNA, 22 nt, Human
aaguuugagaagcuuauagaua

SEQ ID NO: 11476 - RNA, 22 nt, Human
aaguuugaugaguuucuggagg

SEQ ID NO: 11477 - RNA, 21 nt, Human
aaguuuggaagaaagcaaggg

SEQ ID NO: 11478 - RNA, 22 nt, Human
aaguuuggaaugauagagaccu

SEQ ID NO: 11479 - RNA, 22 nt, Human
aaguuuggaggucacuggucuu

SEQ ID NO: 11480 - RNA, 22 nt, Human
aaguuuggccaaggagacaugg

SEQ ID NO: 11481 - RNA, 22 nt, Human
aaguuugguccuucuaagaaga

SEQ ID NO: 11482 - RNA, 22 nt, Human
aaguuuguagcuggaugucugu

SEQ ID NO: 11483 - RNA, 22 nt, Human
aaguuuguguaguuuagcaucc

SEQ ID NO: 11484 - RNA, 22 nt, Human
aaguuuguucagggcuuacauu

SEQ ID NO: 11485 - RNA, 22 nt, Human
aaguuuuauuggcuauagcacu

SEQ ID NO: 11486 - RNA, 22 nt, Human
aaguuuuccuguguccaagaug

SEQ ID NO: 11487 - RNA, 22 nt, Human
aaguuuuucacauugcuguugu

SEQ ID NO: 11488 - RNA, 22 nt, Human
aauaaacugcucaauugcauca

SEQ ID NO: 11489 - RNA, 22 nt, Human
aauaaagacaaacaggggagcc

SEQ ID NO: 11490 - RNA, 22 nt, Human
aauaaagccuuauugauuuuac

SEQ ID NO: 11491 - RNA, 22 nt, Human
aauagcauaagaugucaaauag

SEQ ID NO: 11492 - RNA, 22 nt, Human
aauagcauccuaaaacauacuu

SEQ ID NO: 11493 - RNA, 22 nt, Human
aauagcauccuguaucucuucc

SEQ ID NO: 11494 - RNA, 22 nt, Human
aauagcaugcauccugcauaga

SEQ ID NO: 11495 - RNA, 22 nt, Human
aauagcauguaaguuuaaaaga

SEQ ID NO: 11496 - RNA, 21 nt, Human
aauagcauucaggaugggcuc

SEQ ID NO: 11497 - RNA, 22 nt, Human
aauagcugauuaauguacuacc

SEQ ID NO: 11498 - RNA, 22 nt, Human
aauagcugcauaaaguauagaa

SEQ ID NO: 11499 - RNA, 17 nt, Human
aauagcugcucagagag

SEQ ID NO: 11500 - RNA, 22 nt, Human
aauagcugggaggcacauucau

SEQ ID NO: 11501 - RNA, 22 nt, Human
aauaggaagcaccaaauucucc

SEQ ID NO: 11502 - RNA, 22 nt, Human
aauaggcucaaauguucuucuc

SEQ ID NO: 11503 - RNA, 22 nt, Human
aauaguacaaucuacagacaua

SEQ ID NO: 11504 - RNA, 22 nt, Human
aauaguguuguucacucaggag

SEQ ID NO: 11505 - RNA, 22 nt, Human
aauaguuaagcaacuuuuucca

SEQ ID NO: 11506 - RNA, 22 nt, Human
aauaguuuuauaggugggauua

SEQ ID NO: 11507 - RNA, 22 nt, Human
aauauaaugcuguuuuaugcca

SEQ ID NO: 11508 - RNA, 20 nt, Human
aauauaauucucugaauuua

SEQ ID NO: 11509 - RNA, 22 nt, Human
aauauacuauacuacuuucugg

SEQ ID NO: 11510 - RNA, 22 nt, Human
aauauagauuuacucaagagaa

SEQ ID NO: 11511 - RNA, 22 nt, Human
aauauaguguuagcucauuuga

SEQ ID NO: 11512 - RNA, 22 nt, Human
aauauaguucuagaaauauuuu

SEQ ID NO: 11513 - RNA, 22 nt, Human
aauauauagaaguacccguugu

SEQ ID NO: 11514 - RNA, 22 nt, Human
aauauaugaccaggaaguucug

SEQ ID NO: 11515 - RNA, 22 nt, Human
aauaucagcucugucacuuacu

SEQ ID NO: 11516 - RNA, 21 nt, Human
aauauccaaaugauuagaucu

SEQ ID NO: 11517 - RNA, 22 nt, Human
aauauccacacugugucccugc

SEQ ID NO: 11518 - RNA, 22 nt, Human
aauauccauugggagcaaaugg

SEQ ID NO: 11519 - RNA, 22 nt, Human
aauaucuucuaaggauagaacu

SEQ ID NO: 11520 - RNA, 22 nt, Human
aauaugaguuugccuuuccugc

SEQ ID NO: 11521 - RNA, 22 nt, Human
aauaugaugccaaauugcuaca

SEQ ID NO: 11522 - RNA, 22 nt, Human
aauaugcaaagcguguuaucug

SEQ ID NO: 11523 - RNA, 22 nt, Human
aauauggcuccauuccuuuagg

SEQ ID NO: 11524 - RNA, 22 nt, Human
aauauguugagucuaucuuuau

SEQ ID NO: 11525 - RNA, 22 nt, Human
aauauuaguuucucaagagaga

SEQ ID NO: 11526 - RNA, 22 nt, Human
aauauuauacagucaaccucuu

SEQ ID NO: 11527 - RNA, 22 nt, Human
aauauucauuugcagaagaagu

SEQ ID NO: 11528 - RNA, 23 nt, Human
aauauuccugccauuaaugacuc

SEQ ID NO: 11529 - RNA, 22 nt, Human
aauauuuaugacaggaaguagc

SEQ ID NO: 11530 - RNA, 22 nt, Human
aauauuucguugcguggcuaga

SEQ ID NO: 11531 - RNA, 22 nt, Human
aauauuuguuaguguuuuaaug

SEQ ID NO: 11532 - RNA, 22 nt, Human
aaucaaccauauauuugauggg

SEQ ID NO: 11533 - RNA, 22 nt, Human
aaucaacugagcccugguucuc

SEQ ID NO: 11534 - RNA, 22 nt, Human
aaucaacuguuuccacagggag

SEQ ID NO: 11535 - RNA, 22 nt, Human
aaucaagaaaaugaggauucuu

SEQ ID NO: 11536 - RNA, 22 nt, Human
aaucaagaauaaguuguaaagc

SEQ ID NO: 11537 - RNA, 22 nt, Human
aaucaagagcugacuauauuuu

SEQ ID NO: 11538 - RNA, 22 nt, Human
aaucacaaacgaauugauggaa

SEQ ID NO: 11539 - RNA, 22 nt, Human
aaucacaaauuuagacagagcu

SEQ ID NO: 11540 - RNA, 22 nt, Human
aaucacaguuaguaagggagaa

SEQ ID NO: 11541 - RNA, 22 nt, Human
aaucacaugugggucuuguagc

SEQ ID NO: 11542 - RNA, 22 nt, Human
aaucacauuaagcccuguucag

SEQ ID NO: 11543 - RNA, 22 nt, Human
aaucacauuacagcauaucugu

SEQ ID NO: 11544 - RNA, 22 nt, Human
aaucacauugaaucugcuaccu

SEQ ID NO: 11545 - RNA, 22 nt, Human
aaucacauuuacauugcuaauu

SEQ ID NO: 11546 - RNA, 23 nt, Human
aaucaccagcagccaaugugcag

SEQ ID NO: 11547 - RNA, 22 nt, Human
aaucaccaucucucuugucccc

SEQ ID NO: 11548 - RNA, 22 nt, Human
aaucacuuagaacccaggaagu

SEQ ID NO: 11549 - RNA, 23 nt, Human
aaucacuucccuccaaauggauu

SEQ ID NO: 11550 - RNA, 22 nt, Human
aaucacuuguaaggaauucaau

SEQ ID NO: 11551 - RNA, 20 nt, Human
aaucacuuuguacaggaagc

SEQ ID NO: 11552 - RNA, 22 nt, Human
aaucacuuuucucuaauguagc

SEQ ID NO: 11553 - RNA, 22 nt, Human
aaugugaaaccgcacagaauaa

SEQ ID NO: 11554 - RNA, 22 nt, Human
aaugugaacuuugucauguaac

SEQ ID NO: 11555 - RNA, 22 nt, Human
aaugugaucgcuuuagaagcuu

SEQ ID NO: 11556 - RNA, 22 nt, Human
aaugugauuuucucacucccuu

SEQ ID NO: 11557 - RNA, 22 nt, Human
aaugugcagaugaauaaacaaa

SEQ ID NO: 11558 - RNA, 22 nt, Human
aaugugcuccaauugucuacuu

SEQ ID NO: 11559 - RNA, 23 nt, Human
aaugugcuguauucauuucugga

SEQ ID NO: 11560 - RNA, 17 nt, Human
aauguggaaguacaugc

SEQ ID NO: 11561 - RNA, 22 nt, Human
aauguggaaucauggacuuuau

SEQ ID NO: 11562 - RNA, 22 nt, Human
aauguggcauugucauuauugg

SEQ ID NO: 11563 - RNA, 22 nt, Human
aauguggggaagccauggcuga

SEQ ID NO: 11564 - RNA, 22 nt, Human
aauguguaaaagguuuucuuca

SEQ ID NO: 11565 - RNA, 22 nt, Human
aauguguaaaugaggagucuug

SEQ ID NO: 11566 - RNA, 22 nt, Human
aauguguacaugacagauagaa

SEQ ID NO: 11567 - RNA, 22 nt, Human
aauguguagauguugcauuccu

SEQ ID NO: 11568 - RNA, 22 nt, Human
aaugugucauuucccacaggug

SEQ ID NO: 11569 - RNA, 22 nt, Human
aaugugugaacacuaaugcaac

SEQ ID NO: 11570 - RNA, 21 nt, Human
aaugugugcuauuuaucuuuu

SEQ ID NO: 11571 - RNA, 22 nt, Human
aauguguuaguauugauuuguc

SEQ ID NO: 11572 - RNA, 22 nt, Human
aauguguucacaggaaauacag

SEQ ID NO: 11573 - RNA, 22 nt, Human
aauguuacaguuuuaauucuga

SEQ ID NO: 11574 - RNA, 22 nt, Human
aauguuacauaacccauugucc

SEQ ID NO: 11575 - RNA, 22 nt, Human
aauguuagauuccuccaccuag

SEQ ID NO: 11576 - RNA, 22 nt, Human
aauguuaguaacuugaguauuu

SEQ ID NO: 11577 - RNA, 22 nt, Human
aauguucagaggacaauauaaa

SEQ ID NO: 11578 - RNA, 22 nt, Human
aauguucagcuuucuuacuuaa

SEQ ID NO: 11579 - RNA, 22 nt, Human
aauguucagggcagcccugcua

SEQ ID NO: 11580 - RNA, 20 nt, Human
aauguucaguaauuguuuua

SEQ ID NO: 11581 - RNA, 22 nt, Human
aauguucaguaucugguccacc

SEQ ID NO: 11582 - RNA, 22 nt, Human
aauguucagucucaagagugau

SEQ ID NO: 11583 - RNA, 22 nt, Human
aauguuccacagauauagcaug

SEQ ID NO: 11584 - RNA, 22 nt, Human
aauguugcagagugauugucca

SEQ ID NO: 11585 - RNA, 19 nt, Human
aauguuuaagagaaaaagg

SEQ ID NO: 11586 - RNA, 22 nt, Human
aauguuucauucuugcccauug

SEQ ID NO: 11587 - RNA, 22 nt, Human
aauguuucauuuaguugucucc

SEQ ID NO: 11588 - RNA, 22 nt, Human
aauguuucguaaauugucuaug

SEQ ID NO: 11589 - RNA, 22 nt, Human
aauguuugccugacuagagugg

SEQ ID NO: 11590 - RNA, 22 nt, Human
aauguuuucucugugaacacau

SEQ ID NO: 11591 - RNA, 22 nt, Human
aauguuuugcauuaguuuucua

SEQ ID NO: 11592 - RNA, 22 nt, Human
aauguuuuuuggucugaugaau

SEQ ID NO: 11593 - RNA, 22 nt, Human
aauuaaaugacaggggaagaug

SEQ ID NO: 11594 - RNA, 23 nt, Human
aauuaaauugcuagauccagggc

SEQ ID NO: 11595 - RNA, 22 nt, Human
aauuaacaaauguagcugugau

SEQ ID NO: 11596 - RNA, 22 nt, Human
aauuaauggaaaguaaggaagg

SEQ ID NO: 11597 - RNA, 22 nt, Human
aauuacacagggaucacuuuuu

SEQ ID NO: 11598 - RNA, 22 nt, Human
aauuacugucuguaaagggaau

SEQ ID NO: 11599 - RNA, 22 nt, Human
aauuacuuaacucucugggccu

SEQ ID NO: 11600 - RNA, 22 nt, Human
aauuagaaucuuauuuggggaa

SEQ ID NO: 11601 - RNA, 22 nt, Human
aauuagacuaauuuuacaaggg

SEQ ID NO: 11602 - RNA, 22 nt, Human
aauuagagaucaguucuuugac

SEQ ID NO: 11603 - RNA, 22 nt, Human
aauuagaguggcgagugauuua

SEQ ID NO: 11604 - RNA, 22 nt, Human
aauuagcagcauauucugcgau

SEQ ID NO: 11605 - RNA, 22 nt, Human
aauuaggaaauucagccauuuu

SEQ ID NO: 11606 - RNA, 22 nt, Human
aaucucuuuggcucaaggaucc

SEQ ID NO: 11607 - RNA, 22 nt, Human
aaucugaaaguauggagcagua

SEQ ID NO: 11608 - RNA, 22 nt, Human
aaucugaagggagauacaugua

SEQ ID NO: 11609 - RNA, 22 nt, Human
aaucugagggaacuugaacucc

SEQ ID NO: 11610 - RNA, 21 nt, Human
aaucugcuucccugugacuug

SEQ ID NO: 11611 - RNA, 22 nt, Human
aaucuggagagucaucucugac

SEQ ID NO: 11612 - RNA, 22 nt, Human
aaucuggcauuugagaguagga

SEQ ID NO: 11613 - RNA, 15 nt, Human
aaucuggcggcaagu

SEQ ID NO: 11614 - RNA, 22 nt, Human
aaucugucguaguaaaaagcag

SEQ ID NO: 11615 - RNA, 22 nt, Human
aaucuguuaagaacagaaaugu

SEQ ID NO: 11616 - RNA, 22 nt, Human
aaucuguuccugaggcaccaga

SEQ ID NO: 11617 - RNA, 22 nt, Human
aaucuguucuacucuauucaga

SEQ ID NO: 11618 - RNA, 22 nt, Human
aaucuguuuccauuagagucau

SEQ ID NO: 11619 - RNA, 22 nt, Human
aaucuguuuguuuacaccuuuu

SEQ ID NO: 11620 - RNA, 22 nt, Human
aaucuguuuuugaaacuuugua

SEQ ID NO: 11621 - RNA, 22 nt, Human
aaucuuacaccgaauuuaaacu

SEQ ID NO: 11622 - RNA, 22 nt, Human
aaucuuagguuuggcuucaucu

SEQ ID NO: 11623 - RNA, 22 nt, Human
aaucuucacucuuaacugugca

SEQ ID NO: 11624 - RNA, 22 nt, Human
aaucuugaguaucagaccaaga

SEQ ID NO: 11625 - RNA, 22 nt, Human
aaucuuggaaguguccacuggu

SEQ ID NO: 11626 - RNA, 22 nt, Human
aaucuuucccuauuaaaugugg

SEQ ID NO: 11627 - RNA, 22 nt, Human
aaucuuuuucacaagaaagcac

SEQ ID NO: 11628 - RNA, 22 nt, Human
aaugaaaauuggacccuagaac

SEQ ID NO: 11629 - RNA, 22 nt, Human
aaugaaacuaguagaaucuuug

SEQ ID NO: 11630 - RNA, 22 nt, Human
aaugaaacucgaaauaaucaca

SEQ ID NO: 11631 - RNA, 22 nt, Human
aaugaaacuguauauagacugu

SEQ ID NO: 11632 - RNA, 18 nt, Human
aaugaaauguacaccuuu

SEQ ID NO: 11633 - RNA, 22 nt, Human
aaugaacaacuugauuuuugcc

SEQ ID NO: 11634 - RNA, 22 nt, Human
aaugaacaagaaagacuuugag

SEQ ID NO: 11635 - RNA, 22 nt, Human
aaugaacacauguggucaguuu

SEQ ID NO: 11636 - RNA, 22 nt, Human
aaugaacacuuagccuuucuau

SEQ ID NO: 11637 - RNA, 22 nt, Human
aaugaacagauacacauaggca

SEQ ID NO: 11638 - RNA, 23 nt, Human
aaugaacugagaaucuguacagu

SEQ ID NO: 11639 - RNA, 22 nt, Human
aaugaacuggaucaggguuucu

SEQ ID NO: 11640 - RNA, 22 nt, Human
aaugaacuguguuaacugaaua

SEQ ID NO: 11641 - RNA, 22 nt, Human
aaugaagaaauggacaucuuua

SEQ ID NO: 11642 - RNA, 22 nt, Human
aaugaagacacaucuuucucau

SEQ ID NO: 11643 - RNA, 22 nt, Human
aaugaagauaaaaugggaugga

SEQ ID NO: 11644 - RNA, 22 nt, Human
aaugaagccagcugggaugcga

SEQ ID NO: 11645 - RNA, 22 nt, Human
aaugaauaacaauccucuggag

SEQ ID NO: 11646 - RNA, 22 nt, Human
aaugacagccagauucuucucu

SEQ ID NO: 11647 - RNA, 22 nt, Human
aaugacaguguugggccagaug

SEQ ID NO: 11648 - RNA, 22 nt, Human
aaugacauggagcaucuuuuca

SEQ ID NO: 11649 - RNA, 22 nt, Human
aaugacucugcugcagagacac

SEQ ID NO: 11650 - RNA, 22 nt, Human
aaugacugaagcaauugcagug

SEQ ID NO: 11651 - RNA, 22 nt, Human
aaugagaagccuagguguacug

SEQ ID NO: 11652 - RNA, 20 nt, Human
aaugagaugacuuagaggaa

SEQ ID NO: 11653 - RNA, 22 nt, Human
aaugagggggaugggaaagugu

SEQ ID NO: 11654 - RNA, 22 nt, Human
aaugaggugaggaaggccucag

SEQ ID NO: 11655 - RNA, 19 nt, Human
aaugaguuccaugaaaaga

SEQ ID NO: 11656 - RNA, 22 nt, Human
aaugauaagacaugaguagagg

SEQ ID NO: 11657 - RNA, 22 nt, Human
aaugauacauauguaucguuag

SEQ ID NO: 11658 - RNA, 22 nt, Human
aaugauccuacacauggaauuc

SEQ ID NO: 11659 - RNA, 22 nt, Human
aaugauccuuguuguuuaacca

SEQ ID NO: 11660 - RNA, 22 nt, Human
aaugaucuggcucaggauauca

SEQ ID NO: 11661 - RNA, 22 nt, Human
aaugaugagaacuggaguaauu

SEQ ID NO: 11662 - RNA, 22 nt, Human
aauagcuuggacccauugcuuu

SEQ ID NO: 11663 - RNA, 22 nt, Human
aauaggacuuugguccuagcuc

SEQ ID NO: 11664 - RNA, 22 nt, Human
aauaggcagcuuagcaggggcu

SEQ ID NO: 11665 - RNA, 22 nt, Human
aauagguagccagauauauaaa

SEQ ID NO: 11666 - RNA, 22 nt, Human
aauaguagucgccuuuuguaag

SEQ ID NO: 11667 - RNA, 22 nt, Human
aauaguccuuaguaagcuguga

SEQ ID NO: 11668 - RNA, 22 nt, Human
aauagucucucccacaccaucc

SEQ ID NO: 11669 - RNA, 22 nt, Human
aauagugcugcuguggacaugg

SEQ ID NO: 11670 - RNA, 22 nt, Human
aauaguguauuuuucaaaauua

SEQ ID NO: 11671 - RNA, 22 nt, Human
aauaguucuagcucagaagcuc

SEQ ID NO: 11672 - RNA, 22 nt, Human
aauaguugugaaucaggacuag

SEQ ID NO: 11673 - RNA, 22 nt, Human
aauauaaauuccugggcccagc

SEQ ID NO: 11674 - RNA, 22 nt, Human
aauauaacacagauggccuguu

SEQ ID NO: 11675 - RNA, 21 nt, Human
aauauaugcaaugcuuucugc

SEQ ID NO: 11676 - RNA, 22 nt, Human
aauauauuugaaucaggaacaa

SEQ ID NO: 11677 - RNA, 22 nt, Human
aauaucacaggaggagaccaag

SEQ ID NO: 11678 - RNA, 22 nt, Human
aauaucagaauguaaugguccu

SEQ ID NO: 11679 - RNA, 22 nt, Human
aauaucaggaugcaaagcugug

SEQ ID NO: 11680 - RNA, 22 nt, Human
aauaucuagccuuuagcagcuu

SEQ ID NO: 11681 - RNA, 22 nt, Human
aauaucuggagaugcuuuuugu

SEQ ID NO: 11682 - RNA, 22 nt, Human
aauaucuguggccauacaauuu

SEQ ID NO: 11683 - RNA, 22 nt, Human
aauaucuuggcccaacuccaga

SEQ ID NO: 11684 - RNA, 22 nt, Human
aauaugcauuaacuguguacau

SEQ ID NO: 11685 - RNA, 22 nt, Human
aauaugucugcuaauuguuucu

SEQ ID NO: 11686 - RNA, 22 nt, Human
aauaugugggugcuaaucaaaa

SEQ ID NO: 11687 - RNA, 22 nt, Human
aauauguucaaaauagaucacu

SEQ ID NO: 11688 - RNA, 22 nt, Human
aauauuaauagaagggguucua

SEQ ID NO: 11689 - RNA, 22 nt, Human
aauauugagaaccagcauguuu

SEQ ID NO: 11690 - RNA, 22 nt, Human
aauauuguuucaagaucacaga

SEQ ID NO: 11691 - RNA, 22 nt, Human
aauauuucaaaaggaaacacag

SEQ ID NO: 11692 - RNA, 22 nt, Human
aauauuuccaaggccugucagg

SEQ ID NO: 11693 - RNA, 22 nt, Human
aauauuuuugaggcccuguuau

SEQ ID NO: 11694 - RNA, 22 nt, Human
aaucaaaaccuacagagguaau

SEQ ID NO: 11695 - RNA, 22 nt, Human
aaucaacaggaugugcauugua

SEQ ID NO: 11696 - RNA, 22 nt, Human
aaucaacauuguuuuaagucaa

SEQ ID NO: 11697 - RNA, 22 nt, Human
aaucaagaggcgauggauggaa

SEQ ID NO: 11698 - RNA, 22 nt, Human
aaucaagucaaccaucaugugc

SEQ ID NO: 11699 - RNA, 22 nt, Human
aaucacaaaugcaaguugucac

SEQ ID NO: 11700 - RNA, 22 nt, Human
aaucacaauuacuuuugcacca

SEQ ID NO: 11701 - RNA, 22 nt, Human
aaucacagaaggcagucuucua

SEQ ID NO: 11702 - RNA, 22 nt, Human
aaucacagccacaaccuggggg

SEQ ID NO: 11703 - RNA, 22 nt, Human
aaucacaucacugagaaugagg

SEQ ID NO: 11704 - RNA, 22 nt, Human
aaucacaugaaaacuguguguu

SEQ ID NO: 11705 - RNA, 22 nt, Human
aaucacuuugcacucuuauuug

SEQ ID NO: 11706 - RNA, 22 nt, Human
aaucagaacgcucgaucuucgg

SEQ ID NO: 11707 - RNA, 22 nt, Human
aaucagaacuccuaccacagag

SEQ ID NO: 11708 - RNA, 15 nt, Human
aaucagaaguguggc

SEQ ID NO: 11709 - RNA, 22 nt, Human
aaucagaaucaguugacacagc

SEQ ID NO: 11710 - RNA, 22 nt, Human
aaucagaauuuguccccugagu

SEQ ID NO: 11711 - RNA, 23 nt, Human
aaucagcaugcucuguggcuggc

SEQ ID NO: 11712 - RNA, 22 nt, Human
aaucagcuaaauaaacuaguca

SEQ ID NO: 11713 - RNA, 22 nt, Human
aaucaggaaacuaucaacacau

SEQ ID NO: 11714 - RNA, 21 nt, Human
aaucaggaaguguguguccug

SEQ ID NO: 11715 - RNA, 22 nt, Human
aaucaggacugugccaaaccua

SEQ ID NO: 11716 - RNA, 22 nt, Human
aaucaggagcuagggggcaaug

SEQ ID NO: 11717 - RNA, 21 nt, Human
aaucaguacauacugcacauc

SEQ ID NO: 11718 - RNA, 22 nt, Human
aaucaguauugguauagaauga

SEQ ID NO: 11719 - RNA, 22 nt, Human
aaucagugcaaaggagagggua

SEQ ID NO: 11720 - RNA, 22 nt, Human
aaucaguuagaaggaagagaau

SEQ ID NO: 11721 - RNA, 22 nt, Human
aaucaguuguucacucugaaaa

SEQ ID NO: 11722 - RNA, 22 nt, Human
aaucauaauucaaauaagcuua

SEQ ID NO: 11723 - RNA, 22 nt, Human
aauguuucaauuaagucuuuua

SEQ ID NO: 11724 - RNA, 22 nt, Human
aauguuugaacuuugcauauuu

SEQ ID NO: 11725 - RNA, 22 nt, Human
aauguuugagcaucuacaugcu

SEQ ID NO: 11726 - RNA, 22 nt, Human
aauguuuggcuagauagaugga

SEQ ID NO: 11727 - RNA, 22 nt, Human
aauguuuucugacugcuaacuu

SEQ ID NO: 11728 - RNA, 22 nt, Human
aauuaaaagauaacccaugagu

SEQ ID NO: 11729 - RNA, 22 nt, Human
aauuaaaggucauguuaaaggg

SEQ ID NO: 11730 - RNA, 22 nt, Human
aauuaacuaauuugguacaaga

SEQ ID NO: 11731 - RNA, 22 nt, Human
aauuacaaauguagacucucau

SEQ ID NO: 11732 - RNA, 21 nt, Human
aauuacagauggaauuacaga

SEQ ID NO: 11733 - RNA, 22 nt, Human
aauuacagucggagcagcacug

SEQ ID NO: 11734 - RNA, 22 nt, Human
aauuaccaggauuuuucaguau

SEQ ID NO: 11735 - RNA, 22 nt, Human
aauuaccaucgucaaaucauau

SEQ ID NO: 11736 - RNA, 22 nt, Human
aauuacugaugccuguguucca

SEQ ID NO: 11737 - RNA, 22 nt, Human
aauuacugggucugagauuaau

SEQ ID NO: 11738 - RNA, 22 nt, Human
aauuacugucuccugcuggugu

SEQ ID NO: 11739 - RNA, 22 nt, Human
aauuagaagggaguuauugaua

SEQ ID NO: 11740 - RNA, 22 nt, Human
aauuagagaucgcaauaacggg

SEQ ID NO: 11741 - RNA, 22 nt, Human
aauuagcauuucccauauaaau

SEQ ID NO: 11742 - RNA, 22 nt, Human
aauuagcugucaaugaggaucu

SEQ ID NO: 11743 - RNA, 22 nt, Human
aauuaggaaaugagaguauuug

SEQ ID NO: 11744 - RNA, 22 nt, Human
aauuaggcaaauuaauuucucu

SEQ ID NO: 11745 - RNA, 22 nt, Human
aauuagggaaaauuuacuugua

SEQ ID NO: 11746 - RNA, 22 nt, Human
aauuagggagccaucauaaggu

SEQ ID NO: 11747 - RNA, 19 nt, Human
aauuagggagucgguuaag

SEQ ID NO: 11748 - RNA, 22 nt, Human
aauuaggggaggacguaucaua

SEQ ID NO: 11749 - RNA, 21 nt, Human
aauuagggugccucuuauaau

SEQ ID NO: 11750 - RNA, 22 nt, Human
aauuaguaaccuaauuccaucu

SEQ ID NO: 11751 - RNA, 22 nt, Human
aauuauacaugaaggcauuaua

SEQ ID NO: 11752 - RNA, 22 nt, Human
aauuauccaccuuugcaugauu

SEQ ID NO: 11753 - RNA, 23 nt, Human
aauuaucuauuucaaauuuagca

SEQ ID NO: 11754 - RNA, 22 nt, Human
aauuauggaauuuuuagagaag

SEQ ID NO: 11755 - RNA, 22 nt, Human
aauuauguagccauaugaaaca

SEQ ID NO: 11756 - RNA, 22 nt, Human
aauuauuuaacuccuuuggaga

SEQ ID NO: 11757 - RNA, 22 nt, Human
aauucaaagccgcuugggaauc

SEQ ID NO: 11758 - RNA, 23 nt, Human
aauucaaauucagugugacuagg

SEQ ID NO: 11759 - RNA, 22 nt, Human
aauucaaauuugaguuugugau

SEQ ID NO: 11760 - RNA, 22 nt, Human
aauucaaggaucuguuaaaucu

SEQ ID NO: 11761 - RNA, 22 nt, Human
aauucaaugguuuuuaggauau

SEQ ID NO: 11762 - RNA, 22 nt, Human
aauucacaauguguagucaugc

SEQ ID NO: 11763 - RNA, 22 nt, Human
aauucacaggagguauuugucc

SEQ ID NO: 11764 - RNA, 22 nt, Human
aauucacaggaucacaggagag

SEQ ID NO: 11765 - RNA, 22 nt, Human
aauucacuguuccuucugcuuu

SEQ ID NO: 11766 - RNA, 22 nt, Human
aauucacuugugcacgcuaugg

SEQ ID NO: 11767 - RNA, 22 nt, Human
aauucagagacucauucuggag

SEQ ID NO: 11768 - RNA, 22 nt, Human
aauucaguugugucugaccucg

SEQ ID NO: 11769 - RNA, 22 nt, Human
aauucauauggauaugcuagua

SEQ ID NO: 11770 - RNA, 22 nt, Human
aauuccaaauguuuucaaucca

SEQ ID NO: 11771 - RNA, 22 nt, Human
acacauguauaugcuugugugu

SEQ ID NO: 11772 - RNA, 22 nt, Human
acacauguauguuuuguauuug

SEQ ID NO: 11773 - RNA, 19 nt, Human
acacauguguguuaugugc

SEQ ID NO: 11774 - RNA, 22 nt, Human
acacauuauaggcaaucaaaag

SEQ ID NO: 11775 - RNA, 21 nt, Human
acacauuaugagcauagacuc

SEQ ID NO: 11776 - RNA, 22 nt, Human
acacauucuuuaaaugucuguu

SEQ ID NO: 11777 - RNA, 22 nt, Human
acacauuuagcaccagguuuau

SEQ ID NO: 11778 - RNA, 22 nt, Human
acacauuucuaaauuuuuaccg

SEQ ID NO: 11779 - RNA, 22 nt, Human
acacauuuuggcuagguggaga

SEQ ID NO: 11780 - RNA, 23 nt, Human
acacauuuuucccguucugaggu

SEQ ID NO: 11781 - RNA, 22 nt, Human
acaccaggucccgucuguaccu

SEQ ID NO: 11782 - RNA, 22 nt, Human
acaccaugaugagugauguagc

SEQ ID NO: 11783 - RNA, 22 nt, Human
acacccagcugggccaccucca

SEQ ID NO: 11784 - RNA, 22 nt, Human
acacccagcuuuugaaugcccu

SEQ ID NO: 11785 - RNA, 22 nt, Human
acaccugggucagugugacagu

SEQ ID NO: 11786 - RNA, 22 nt, Human
acaccuggucuuugcaugagca

SEQ ID NO: 11787 - RNA, 23 nt, Human
acaccugugcuguagucacuaca

SEQ ID NO: 11788 - RNA, 22 nt, Human
acaccuuugugaagugaugaug

SEQ ID NO: 11789 - RNA, 22 nt, Human
acacuaaucuuuuauuugguuu

SEQ ID NO: 11790 - RNA, 22 nt, Human
acacuaaugagaaaggaauuaa

SEQ ID NO: 11791 - RNA, 22 nt, Human
acacuacagggagaagacucac

SEQ ID NO: 11792 - RNA, 22 nt, Human
acacuagcuauuaacuucacau

SEQ ID NO: 11793 - RNA, 22 nt, Human
acacuagucucuucuugacuug

SEQ ID NO: 11794 - RNA, 22 nt, Human
acacuaguggaaauugauuugu

SEQ ID NO: 11795 - RNA, 22 nt, Human
acacucuucucacagucaguuu

SEQ ID NO: 11796 - RNA, 22 nt, Human
acacucuugcauuaccugaaua

SEQ ID NO: 11797 - RNA, 22 nt, Human
acacugaauaauugagaguuga

SEQ ID NO: 11798 - RNA, 22 nt, Human
acacugaaucagaaauuguugg

SEQ ID NO: 11799 - RNA, 19 nt, Human
acacugaauguagaauugg

SEQ ID NO: 11800 - RNA, 21 nt, Human
acacugacaaccauccacgag

SEQ ID NO: 11801 - RNA, 22 nt, Human
acacugacaccugcccucaggu

SEQ ID NO: 11802 - RNA, 22 nt, Human
acacugacgcuugacagucacc

SEQ ID NO: 11803 - RNA, 22 nt, Human
acacugacugggacagaagacc

SEQ ID NO: 11804 - RNA, 22 nt, Human
acacugagcugagcauucuugu

SEQ ID NO: 11805 - RNA, 22 nt, Human
acacugcagauguaauuugagu

SEQ ID NO: 11806 - RNA, 21 nt, Human
acacugcuguagcauauuggg

SEQ ID NO: 11807 - RNA, 22 nt, Human
acacuggaccauuuaaacuuga

SEQ ID NO: 11808 - RNA, 22 nt, Human
acacuggagauggaccucacaa

SEQ ID NO: 11809 - RNA, 22 nt, Human
acacuggagcuucuagcccacg

SEQ ID NO: 11810 - RNA, 22 nt, Human
acacugguugguugaauuuacu

SEQ ID NO: 11811 - RNA, 22 nt, Human
acacugguuguuaauaguaaca

SEQ ID NO: 11812 - RNA, 22 nt, Human
acacuguaaacaucucaagcac

SEQ ID NO: 11813 - RNA, 23 nt, Human
acacugucucauggauagacugc

SEQ ID NO: 11814 - RNA, 22 nt, Human
acacugugacaaaggcuguucu

SEQ ID NO: 11815 - RNA, 22 nt, Human
acacugugagcugaagggcugc

SEQ ID NO: 11816 - RNA, 21 nt, Human
acacugugucauaaugcuuaa

SEQ ID NO: 11817 - RNA, 22 nt, Human
acacuguguggucucucucgga

SEQ ID NO: 11818 - RNA, 14 nt, Human
acacuguguuuaga

SEQ ID NO: 11819 - RNA, 22 nt, Human
acacuguuccugaaauuguuau

SEQ ID NO: 11820 - RNA, 22 nt, Human
acacuguucuuugcacugagaa

SEQ ID NO: 11821 - RNA, 23 nt, Human
acacuucacccauugugauagga

SEQ ID NO: 11822 - RNA, 22 nt, Human
acacuucagcaguaugcuuggg

SEQ ID NO: 11823 - RNA, 22 nt, Human
acacuucauagcaagguuggag

SEQ ID NO: 11824 - RNA, 22 nt, Human
acacuucucauuugauacuaac

SEQ ID NO: 11825 - RNA, 22 nt, Human
acacuucucuuugaagaacaau

SEQ ID NO: 11826 - RNA, 22 nt, Human
acacuucuuugucaccugcuuc

SEQ ID NO: 11827 - RNA, 22 nt, Human
acacuugauaggucaaaucagu

SEQ ID NO: 11828 - RNA, 22 nt, Human
acacuuggagcaacacuuaugg

SEQ ID NO: 11829 - RNA, 22 nt, Human
acacuuguguugaaagcuguua

SEQ ID NO: 11830 - RNA, 22 nt, Human
acacuuuacagaauguuuugau

SEQ ID NO: 11831 - RNA, 22 nt, Human
acacuuuacucuuacaccauug

SEQ ID NO: 11832 - RNA, 22 nt, Human
acacuuuaucucaucucagaca

SEQ ID NO: 11833 - RNA, 22 nt, Human
acacuuuaugucuagaucuggg

SEQ ID NO: 11834 - RNA, 23 nt, Human
acacuuucaaauaugcacagagc

SEQ ID NO: 11835 - RNA, 22 nt, Human
acacuuucuggagcugcacaua

SEQ ID NO: 11836 - RNA, 22 nt, Human
acacuuuuguuugaagucucca

SEQ ID NO: 11837 - RNA, 22 nt, Human
acagaaagaagguguauuugag

SEQ ID NO: 11838 - RNA, 22 nt, Human
acagaaauauagaagguaggaa

SEQ ID NO: 11839 - RNA, 22 nt, Human
acagaaauauucguggugcuug

SEQ ID NO: 11840 - RNA, 22 nt, Human
aauuuguuuucaagucacugga

SEQ ID NO: 11841 - RNA, 22 nt, Human
aauuuuacaagaaggccucgua

SEQ ID NO: 11842 - RNA, 22 nt, Human
aauuuuacuucccucaguguag

SEQ ID NO: 11843 - RNA, 22 nt, Human
aauuuuaugccuugcacguugg

SEQ ID NO: 11844 - RNA, 22 nt, Human
aauuuuccauccaaaguaacau

SEQ ID NO: 11845 - RNA, 22 nt, Human
aauuuucuaaggugaugaucug

SEQ ID NO: 11846 - RNA, 22 nt, Human
aauuuucugaugaugaagcacg

SEQ ID NO: 11847 - RNA, 22 nt, Human
acaaaaagcuccauuacugucc

SEQ ID NO: 11848 - RNA, 22 nt, Human
acaaaaauuagcugggcauggu

SEQ ID NO: 11849 - RNA, 22 nt, Human
acaaaauuuuuagacaaggcuu

SEQ ID NO: 11850 - RNA, 22 nt, Human
acaaacagaguugaaaaauagg

SEQ ID NO: 11851 - RNA, 22 nt, Human
acaaacagcuaacauauguuaa

SEQ ID NO: 11852 - RNA, 22 nt, Human
acaaacuucccagacaagcucc

SEQ ID NO: 11853 - RNA, 22 nt, Human
acaaagacgggauaagguuugg

SEQ ID NO: 11854 - RNA, 22 nt, Human
acaaagauaagucagaaaguca

SEQ ID NO: 11855 - RNA, 22 nt, Human
acaaagcucuggaaggcucguc

SEQ ID NO: 11856 - RNA, 22 nt, Human
acaaaggcaggauugacuuagu

SEQ ID NO: 11857 - RNA, 22 nt, Human
acaaaguaagggcuaaugagca

SEQ ID NO: 11858 - RNA, 22 nt, Human
acaaaguaggcagugggcugga

SEQ ID NO: 11859 - RNA, 22 nt, Human
acaaaguaggucaucaaagcuc

SEQ ID NO: 11860 - RNA, 22 nt, Human
acaaagucucuaauaaucuucu

SEQ ID NO: 11861 - RNA, 22 nt, Human
acaaagucugaaaccugaggca

SEQ ID NO: 11862 - RNA, 19 nt, Human
acaaagugcgugcucuuuu

SEQ ID NO: 11863 - RNA, 22 nt, Human
acaaagugugcggagcccaggg

SEQ ID NO: 11864 - RNA, 22 nt, Human
acaaaguuaacaguuggauagu

SEQ ID NO: 11865 - RNA, 22 nt, Human
acaaaguuugugguauuccaag

SEQ ID NO: 11866 - RNA, 16 nt, Human
acaaauacaacugcug

SEQ ID NO: 11867 - RNA, 22 nt, Human
acaaaugagaauguagacagag

SEQ ID NO: 11868 - RNA, 19 nt, Human
acaaaugauguugcacuga

SEQ ID NO: 11869 - RNA, 22 nt, Human
acaaaugauuuuccaagccagu

SEQ ID NO: 11870 - RNA, 18 nt, Human
acaaaugugucacaggaa

SEQ ID NO: 11871 - RNA, 22 nt, Human
acaaauuaccauggaauuuggg

SEQ ID NO: 11872 - RNA, 22 nt, Human
acaaauuauagaaaauugagcu

SEQ ID NO: 11873 - RNA, 22 nt, Human
acaaauucuacaaucauaugau

SEQ ID NO: 11874 - RNA, 22 nt, Human
acaaauucuuucugccuauugg

SEQ ID NO: 11875 - RNA, 22 nt, Human
acaaauugaccgcaagauucau

SEQ ID NO: 11876 - RNA, 20 nt, Human
acaaauuggcagaaugacaa

SEQ ID NO: 11877 - RNA, 19 nt, Human
acaaauuguccucaucaag

SEQ ID NO: 11878 - RNA, 22 nt, Human
acaacaaaaugaggaagugguc

SEQ ID NO: 11879 - RNA, 22 nt, Human
acaacaaagacacuugaaauga

SEQ ID NO: 11880 - RNA, 22 nt, Human
acagguccucaagucagcuggg

SEQ ID NO: 11881 - RNA, 22 nt, Human
acaggugaaguauuacacuaag

SEQ ID NO: 11882 - RNA, 22 nt, Human
acaggugagggagcuuugugcc

SEQ ID NO: 11883 - RNA, 22 nt, Human
acagguggacacagcagcaguc

SEQ ID NO: 11884 - RNA, 22 nt, Human
acagguggaggcuuuaggaggu

SEQ ID NO: 11885 - RNA, 22 nt, Human
acagguggcauaggcaguuuga

SEQ ID NO: 11886 - RNA, 22 nt, Human
acagguggcuuauuggcugauu

SEQ ID NO: 11887 - RNA, 22 nt, Human
acaggugguaaaauggacuguc

SEQ ID NO: 11888 - RNA, 22 nt, Human
acaggugguagaguggaaagag

SEQ ID NO: 11889 - RNA, 22 nt, Human
acaggugugagaacaugccuug

SEQ ID NO: 11890 - RNA, 22 nt, Human
acagguguguucccggaaagcc

SEQ ID NO: 11891 - RNA, 22 nt, Human
acagguguugaaugaugucaca

SEQ ID NO: 11892 - RNA, 22 nt, Human
acagguuugcugcuguuuuagg

SEQ ID NO: 11893 - RNA, 22 nt, Human
acagguuuuuguggauauaugu

SEQ ID NO: 11894 - RNA, 22 nt, Human
acaguaaaaagccuuagaauuu

SEQ ID NO: 11895 - RNA, 22 nt, Human
acaguaaaacauuuuuauuagg

SEQ ID NO: 11896 - RNA, 21 nt, Human
acaguaaauucccugcaaaga

SEQ ID NO: 11897 - RNA, 22 nt, Human
acaguaacaaauggccugagga

SEQ ID NO: 11898 - RNA, 22 nt, Human
acaguaagcgggguuggagggc

SEQ ID NO: 11899 - RNA, 22 nt, Human
acaguaauuaaaauggaucugc

SEQ ID NO: 11900 - RNA, 22 nt, Human
acaguacaagcaugauacauaa

SEQ ID NO: 11901 - RNA, 22 nt, Human
acaguacagcuaaugucauuag

SEQ ID NO: 11902 - RNA, 22 nt, Human
acaguacauaauccugagucug

SEQ ID NO: 11903 - RNA, 22 nt, Human
acaguacuaagugcucacauga

SEQ ID NO: 11904 - RNA, 22 nt, Human
acaguacugcuguucuuguccu

SEQ ID NO: 11905 - RNA, 22 nt, Human
acaguagacccuggauaaacau

SEQ ID NO: 11906 - RNA, 22 nt, Human
acaguagagcauuuguuuugau

SEQ ID NO: 11907 - RNA, 22 nt, Human
acaguagaguaaaagggagccu

SEQ ID NO: 11908 - RNA, 22 nt, Human
acaguagaguaaaugguuagau

SEQ ID NO: 11909 - RNA, 22 nt, Human
acaguaguacacaucuaugucc

SEQ ID NO: 11910 - RNA, 22 nt, Human
acaguagucucaggaauaggca

SEQ ID NO: 11911 - RNA, 22 nt, Human
acaguauacauugauuaggacc

SEQ ID NO: 11912 - RNA, 22 nt, Human
acagucaagaaauggcagagcc

SEQ ID NO: 11913 - RNA, 22 nt, Human
acagucaaugagugagugaaug

SEQ ID NO: 11914 - RNA, 22 nt, Human
acagucaguaucccaggcaaau

SEQ ID NO: 11915 - RNA, 19 nt, Human
acaguccagcuguuuguac

SEQ ID NO: 11916 - RNA, 22 nt, Human
acaguccuaagauaauugucuc

SEQ ID NO: 11917 - RNA, 22 nt, Human
acaguccuagcugcaaagaagu

SEQ ID NO: 11918 - RNA, 22 nt, Human
acaguccuuguguggaacauua

SEQ ID NO: 11919 - RNA, 22 nt, Human
acagucuacaaagugaugugug

SEQ ID NO: 11920 - RNA, 22 nt, Human
acagucuacuugagcuuguaua

SEQ ID NO: 11921 - RNA, 22 nt, Human
acagucuaggccuaggucaaaa

SEQ ID NO: 11922 - RNA, 21 nt, Human
acagucuccccagaucucucc

SEQ ID NO: 11923 - RNA, 22 nt, Human
acagucucuugcuugaauacua

SEQ ID NO: 11924 - RNA, 22 nt, Human
acagucucuuggaauuuucaga

SEQ ID NO: 11925 - RNA, 22 nt, Human
acagucugcaggcaaguucuac

SEQ ID NO: 11926 - RNA, 22 nt, Human
acagucugccucucagagcagc

SEQ ID NO: 11927 - RNA, 19 nt, Human
acagucuuacaaaugucca

SEQ ID NO: 11928 - RNA, 22 nt, Human
acagucuuuaauuucuuugugg

SEQ ID NO: 11929 - RNA, 22 nt, Human
acagugaaaagaauauuagaau

SEQ ID NO: 11930 - RNA, 22 nt, Human
acagugaaaauucuauugauuu

SEQ ID NO: 11931 - RNA, 23 nt, Human
acagugaaacacgcaguaagagu

SEQ ID NO: 11932 - RNA, 22 nt, Human
acagugaaugagaauggagaaa

SEQ ID NO: 11933 - RNA, 22 nt, Human
acagugacacucaggugggaug

SEQ ID NO: 11934 - RNA, 21 nt, Human
acagugagaaauaaauggaaa

SEQ ID NO: 11935 - RNA, 17 nt, Human
acagugagaagucaucu

SEQ ID NO: 11936 - RNA, 22 nt, Human
acagugaggaagcagcugugcu

SEQ ID NO: 11937 - RNA, 22 nt, Human
acagugaucuuuuaguuggaac

SEQ ID NO: 11938 - RNA, 22 nt, Human
acagugaugagggaauuuugug

SEQ ID NO: 11939 - RNA, 22 nt, Human
acagugaugccgggcgagaaug

SEQ ID NO: 11940 - RNA, 22 nt, Human
acagugauuauuaguugguggu

SEQ ID NO: 11941 - RNA, 22 nt, Human
acagugauuggcacugauucag

SEQ ID NO: 11942 - RNA, 22 nt, Human
acagugauugguuuggggguga

SEQ ID NO: 11943 - RNA, 18 nt, Human
acagugauuguucuaugc

SEQ ID NO: 11944 - RNA, 22 nt, Human
acagugauuuuuucgagcagaa

SEQ ID NO: 11945 - RNA, 22 nt, Human
acagugcaaacccucgggaaag

SEQ ID NO: 11946 - RNA, 22 nt, Human
acagugcaaacuuuugucuccu

SEQ ID NO: 11947 - RNA, 22 nt, Human
acagugcagugugaugaguauu

SEQ ID NO: 11948 - RNA, 22 nt, Human
acagugcauaaaaacaacuuuu

SEQ ID NO: 11949 - RNA, 19 nt, Human
acagugcaugggaccuggu

SEQ ID NO: 11950 - RNA, 22 nt, Human
acagugcauuauugcugaaugc

SEQ ID NO: 11951 - RNA, 22 nt, Human
acagugcccuaugaacagcucu

SEQ ID NO: 11952 - RNA, 22 nt, Human
acagugcuaaugaugccaagau

SEQ ID NO: 11953 - RNA, 22 nt, Human
acagugcuuagcacagaguaga

SEQ ID NO: 11954 - RNA, 19 nt, Human
acagugcuucugagugagg

SEQ ID NO: 11955 - RNA, 22 nt, Human
acagugcuuggcacacaguaau

SEQ ID NO: 11956 - RNA, 22 nt, Human
acagugcuuuuguuccucuccu

SEQ ID NO: 11957 - RNA, 22 nt, Human
acaguggaagaagcacugaacu

SEQ ID NO: 11958 - RNA, 22 nt, Human
acaguggaagcaugaugcuauc

SEQ ID NO: 11959 - RNA, 22 nt, Human
acaguggaauuuguagaugugu

SEQ ID NO: 11960 - RNA, 22 nt, Human
acaguggagaagcaaaugcagu

SEQ ID NO: 11961 - RNA, 22 nt, Human
acaguggaguugggguagcccu

SEQ ID NO: 11962 - RNA, 22 nt, Human
acaguguacuagguacauguuc

SEQ ID NO: 11963 - RNA, 22 nt, Human
acaguguauaaaaucuuaaaga

SEQ ID NO: 11964 - RNA, 22 nt, Human
acagugucaugucguguucccc

SEQ ID NO: 11965 - RNA, 22 nt, Human
acaguguccccagcucugugag

SEQ ID NO: 11966 - RNA, 17 nt, Human
acagugucuaugaaaug

SEQ ID NO: 11967 - RNA, 16 nt, Human
acagugucucaagcac

SEQ ID NO: 11968 - RNA, 22 nt, Human
acagugucugacacguaggaag

SEQ ID NO: 11969 - RNA, 23 nt, Human
acagugucugcugcaagauaucu

SEQ ID NO: 11970 - RNA, 16 nt, Human
acagugugcuaagcau

SEQ ID NO: 11971 - RNA, 21 nt, Human
acagugugcuucucucccucc

SEQ ID NO: 11972 - RNA, 22 nt, Human
acagugugggacauuaggaaau

SEQ ID NO: 11973 - RNA, 22 nt, Human
acaguguggggugagauggaac

SEQ ID NO: 11974 - RNA, 22 nt, Human
acaaauagaaaaucuggauugg

SEQ ID NO: 11975 - RNA, 22 nt, Human
acaaaucuguuuuauagacuuu

SEQ ID NO: 11976 - RNA, 22 nt, Human
acaaaugacuauuugguacagg

SEQ ID NO: 11977 - RNA, 22 nt, Human
acaaaugacucaaacaccacuu

SEQ ID NO: 11978 - RNA, 22 nt, Human
acaaaugauuaucacagaggag

SEQ ID NO: 11979 - RNA, 20 nt, Human
acaaaugcauucugugacau

SEQ ID NO: 11980 - RNA, 22 nt, Human
acaaaugccauauauaaauucu

SEQ ID NO: 11981 - RNA, 22 nt, Human
acaaauggaagguguucucuuc

SEQ ID NO: 11982 - RNA, 22 nt, Human
acaaauggagaaacugaggccc

SEQ ID NO: 11983 - RNA, 22 nt, Human
acaaauguggacauggauaaug

SEQ ID NO: 11984 - RNA, 22 nt, Human
acaaauguuacauaaguuugga

SEQ ID NO: 11985 - RNA, 22 nt, Human
acaaauugccccauuuugaacu

SEQ ID NO: 11986 - RNA, 19 nt, Human
acaaauuggcaaaaugcaa

SEQ ID NO: 11987 - RNA, 22 nt, Human
acaaauuguugcuucaugaaug

SEQ ID NO: 11988 - RNA, 22 nt, Human
acaaauuucauaggcaaauuuu

SEQ ID NO: 11989 - RNA, 22 nt, Human
acacuguuccacacuaagaagg

SEQ ID NO: 11990 - RNA, 22 nt, Human
acacuuaacuucugagaauaaa

SEQ ID NO: 11991 - RNA, 22 nt, Human
acacuuauuucuugucuaacca

SEQ ID NO: 11992 - RNA, 22 nt, Human
acacuucaaagggugacuugau

SEQ ID NO: 11993 - RNA, 20 nt, Human
acacuucauuugcagcagcu

SEQ ID NO: 11994 - RNA, 18 nt, Human
acacuuccugguggugug

SEQ ID NO: 11995 - RNA, 22 nt, Human
acacuucuauucccugcacaaa

SEQ ID NO: 11996 - RNA, 22 nt, Human
acacuugccaugcugcacacug

SEQ ID NO: 11997 - RNA, 22 nt, Human
acacuuuaguaugaagagguag

SEQ ID NO: 11998 - RNA, 22 nt, Human
acacuuugauagauaaugcagg

SEQ ID NO: 11999 - RNA, 22 nt, Human
acacuuuguccuuuuucauugu

SEQ ID NO: 12000 - RNA, 22 nt, Human
acacuuuuagcuaugaguuaau

SEQ ID NO: 12001 - RNA, 22 nt, Human
acagaaaaaugagggagcugga

SEQ ID NO: 12002 - RNA, 22 nt, Human
acagaaaaguuuacuuuugcuc

SEQ ID NO: 12003 - RNA, 22 nt, Human
acagaaacccagaaaaccucuc

SEQ ID NO: 12004 - RNA, 22 nt, Human
acagaaagaugauuugaaaugg

SEQ ID NO: 12005 - RNA, 23 nt, Human
acagaaaguucugcuggacagag

SEQ ID NO: 12006 - RNA, 23 nt, Human
acagaaaucauuuguaagguacc

SEQ ID NO: 12007 - RNA, 19 nt, Human
acagaaauuaguuauuuuc

SEQ ID NO: 12008 - RNA, 22 nt, Human
acagaaauucugggacagaaaa

SEQ ID NO: 12009 - RNA, 22 nt, Human
acagaaauugcuaauagcucau

SEQ ID NO: 12010 - RNA, 22 nt, Human
acagaaauugggcaaauggaag

SEQ ID NO: 12011 - RNA, 22 nt, Human
acagaacagaggguuuuagaau

SEQ ID NO: 12012 - RNA, 22 nt, Human
acagaacugagaauucucuauc

SEQ ID NO: 12013 - RNA, 22 nt, Human
acagaacugcaggaggaaaagc

SEQ ID NO: 12014 - RNA, 22 nt, Human
acagaacugggaaaugcacaua

SEQ ID NO: 12015 - RNA, 22 nt, Human
acagaacuuccagggaacauac

SEQ ID NO: 12016 - RNA, 22 nt, Human
acagaagaaagggagguuuugc

SEQ ID NO: 12017 - RNA, 22 nt, Human
acagaagcaaaagcaggaucuu

SEQ ID NO: 12018 - RNA, 22 nt, Human
acagaagcaaagacucaggcaa

SEQ ID NO: 12019 - RNA, 22 nt, Human
acagaagcagccgucacagaua

SEQ ID NO: 12020 - RNA, 19 nt, Human
acagaagcauagaaaagga

SEQ ID NO: 12021 - RNA, 22 nt, Human
acagaagugaguggcaagaacu

SEQ ID NO: 12022 - RNA, 21 nt, Human
acagaaguggcuuggucucag

SEQ ID NO: 12023 - RNA, 22 nt, Human
acagaagugucuuuuucauuca

SEQ ID NO: 12024 - RNA, 22 nt, Human
acagaaguguugaaguuuucau

SEQ ID NO: 12025 - RNA, 22 nt, Human
acagaaguuucaaguaagaagu

SEQ ID NO: 12026 - RNA, 22 nt, Human
acagaauaacucuugcuugagu

SEQ ID NO: 12027 - RNA, 22 nt, Human
acagaauaagguuuaucucucc

SEQ ID NO: 12028 - RNA, 22 nt, Human
acagaauaguagcuuaaaguca

SEQ ID NO: 12029 - RNA, 22 nt, Human
acagaauauuuuauuuagauca

SEQ ID NO: 12030 - RNA, 22 nt, Human
acagaaugcagagaugcccaga

SEQ ID NO: 12031 - RNA, 22 nt, Human
acagaauuaacauuugaugaau

SEQ ID NO: 12032 - RNA, 22 nt, Human
acagaauugauggaaaucucag

SEQ ID NO: 12033 - RNA, 22 nt, Human
acagaauuuaaagcucuagacu

SEQ ID NO: 12034 - RNA, 23 nt, Human
acagacaacacugaugagagaaa

SEQ ID NO: 12035 - RNA, 22 nt, Human
acagacaaguaguucagacaag

SEQ ID NO: 12036 - RNA, 22 nt, Human
acagacagacagauugcauaug

SEQ ID NO: 12037 - RNA, 22 nt, Human
acagacagauuuugucugaugu

SEQ ID NO: 12038 - RNA, 22 nt, Human
acagacauauuuggcccauagc

SEQ ID NO: 12039 - RNA, 22 nt, Human
acagacauggaccaagcacugu

SEQ ID NO: 12040 - RNA, 22 nt, Human
acagacauucauauccucggua

SEQ ID NO: 12041 - RNA, 23 nt, Human
acagacauuguacaucuuguuuu

SEQ ID NO: 12042 - RNA, 22 nt, Human
acagacgggacaacgugcagcu

SEQ ID NO: 12043 - RNA, 22 nt, Human
acagacugaagauauuuccccc

SEQ ID NO: 12044 - RNA, 22 nt, Human
acagacuggagugagagaaaua

SEQ ID NO: 12045 - RNA, 23 nt, Human
acagacuguauucaaaguaggac

SEQ ID NO: 12046 - RNA, 22 nt, Human
acagacugugaguaugcauagu

SEQ ID NO: 12047 - RNA, 22 nt, Human
acagagaccuggccuugcuuug

SEQ ID NO: 12048 - RNA, 22 nt, Human
acagagacuuggagcaggcuga

SEQ ID NO: 12049 - RNA, 22 nt, Human
acagagagaggcccgaggcugc

SEQ ID NO: 12050 - RNA, 22 nt, Human
acagagagcugugauugaguua

SEQ ID NO: 12051 - RNA, 22 nt, Human
acagagagguaaaauauauagu

SEQ ID NO: 12052 - RNA, 20 nt, Human
acagagaucagcugaugggc

SEQ ID NO: 12053 - RNA, 23 nt, Human
acagagaucuugacuuguaugga

SEQ ID NO: 12054 - RNA, 22 nt, Human
acagagaugagucaacacagcu

SEQ ID NO: 12055 - RNA, 22 nt, Human
acagagaugggaacauucaggu

SEQ ID NO: 12056 - RNA, 22 nt, Human
acagagauguggaugagggauu

SEQ ID NO: 12057 - RNA, 22 nt, Human
acagagcaauaacagggagagg

SEQ ID NO: 12058 - RNA, 22 nt, Human
acagagcacugcccugugccgc

SEQ ID NO: 12059 - RNA, 22 nt, Human
acagagcagguccagaagugcc

SEQ ID NO: 12060 - RNA, 21 nt, Human
acagagcauaaugguguggca

SEQ ID NO: 12061 - RNA, 22 nt, Human
acagagcccuuccuugcaccau

SEQ ID NO: 12062 - RNA, 22 nt, Human
acagagccuccaggagugcugg

SEQ ID NO: 12063 - RNA, 17 nt, Human
acagagcuacauauucu

SEQ ID NO: 12064 - RNA, 22 nt, Human
acagagcuuaauucaggagcuu

SEQ ID NO: 12065 - RNA, 18 nt, Human
acagaggcagacauguau

SEQ ID NO: 12066 - RNA, 22 nt, Human
acagaggccaugagcugccacc

SEQ ID NO: 12067 - RNA, 22 nt, Human
acagaggcugaucuucaagccc

SEQ ID NO: 12068 - RNA, 22 nt, Human
acagaggcugcgcuugggaacg

SEQ ID NO: 12069 - RNA, 23 nt, Human
acagaggcuuaaaugaguggcag

SEQ ID NO: 12070 - RNA, 22 nt, Human
acagaggguguggaggaagacg

SEQ ID NO: 12071 - RNA, 23 nt, Human
acagagguccaaacaguauaagc

SEQ ID NO: 12072 - RNA, 17 nt, Human
acagagguuauacagac

SEQ ID NO: 12073 - RNA, 22 nt, Human
acagagguuuccauugagguuu

SEQ ID NO: 12074 - RNA, 20 nt, Human
acagaguagaacauaugcca

SEQ ID NO: 12075 - RNA, 21 nt, Human
acagaguaguugaaacagaga

SEQ ID NO: 12076 - RNA, 22 nt, Human
acagaguauuggaaaggcagug

SEQ ID NO: 12077 - RNA, 22 nt, Human
acagagucauucacugaugaag

SEQ ID NO: 12078 - RNA, 22 nt, Human
acagagucgccuuguagcuggc

SEQ ID NO: 12079 - RNA, 22 nt, Human
acagagucucagggaugaaagc

SEQ ID NO: 12080 - RNA, 22 nt, Human
acagaguuuauguguguacaaa

SEQ ID NO: 12081 - RNA, 22 nt, Human
acagauaauacauugugcuaca

SEQ ID NO: 12082 - RNA, 22 nt, Human
acagauaauuagcauaaaugcu

SEQ ID NO: 12083 - RNA, 22 nt, Human
acagauaguauguaaauuaagc

SEQ ID NO: 12084 - RNA, 22 nt, Human
acagauauaaacuauaguagug

SEQ ID NO: 12085 - RNA, 22 nt, Human
acagauauuuaagagcuuuugu

SEQ ID NO: 12086 - RNA, 23 nt, Human
acagaucaucucgaaacaacuau

SEQ ID NO: 12087 - RNA, 22 nt, Human
acagauccugguuacagccauu

SEQ ID NO: 12088 - RNA, 22 nt, Human
acagaucucaaagccuggaccc

SEQ ID NO: 12089 - RNA, 23 nt, Human
acagugugguggacaaggagcag

SEQ ID NO: 12090 - RNA, 22 nt, Human
acaguguguccuaaaggucugg

SEQ ID NO: 12091 - RNA, 22 nt, Human
acaguguucaaaccacuaggcu

SEQ ID NO: 12092 - RNA, 22 nt, Human
acaguguucacuuaacaaugga

SEQ ID NO: 12093 - RNA, 22 nt, Human
acaguguuccuuuguugugacu

SEQ ID NO: 12094 - RNA, 22 nt, Human
acaguguucuugauauuacagu

SEQ ID NO: 12095 - RNA, 22 nt, Human
acaguguucuuggcgcugagug

SEQ ID NO: 12096 - RNA, 22 nt, Human
acaguguuuauguacagauugu

SEQ ID NO: 12097 - RNA, 22 nt, Human
acaguguuuuaugagaauuguu

SEQ ID NO: 12098 - RNA, 22 nt, Human
auggcuuugcucaaguuuagcc

SEQ ID NO: 12099 - RNA, 22 nt, Human
auggcuuuucacagaggguucu

SEQ ID NO: 12100 - RNA, 22 nt, Human
auggcuuuuuagacuuugguac

SEQ ID NO: 12101 - RNA, 22 nt, Human
augggaaagaagccacugccca

SEQ ID NO: 12102 - RNA, 22 nt, Human
augggaagguuuugagagcggg

SEQ ID NO: 12103 - RNA, 22 nt, Human
augggacaauuugaacacagug

SEQ ID NO: 12104 - RNA, 22 nt, Human
augggacagggcuggcuggucc

SEQ ID NO: 12105 - RNA, 22 nt, Human
augggagaaacaucaugaggca

SEQ ID NO: 12106 - RNA, 22 nt, Human
augggaggaugcucgggugcuc

SEQ ID NO: 12107 - RNA, 22 nt, Human
augggaggguggaaaggcucug

SEQ ID NO: 12108 - RNA, 22 nt, Human
augggaguccaacaucaaggac

SEQ ID NO: 12109 - RNA, 22 nt, Human
augggaguggaggaaaaaaguu

SEQ ID NO: 12110 - RNA, 22 nt, Human
augggaguuggguaaggaucau

SEQ ID NO: 12111 - RNA, 22 nt, Human
augggaguuuucucugaugcuc

SEQ ID NO: 12112 - RNA, 22 nt, Human
augggauaacaagaaggcugag

SEQ ID NO: 12113 - RNA, 22 nt, Human
augggaucuugcccugagggcu

SEQ ID NO: 12114 - RNA, 22 nt, Human
augggcaagggguaaggacacu

SEQ ID NO: 12115 - RNA, 21 nt, Human
augggcagaggcagagaggcu

SEQ ID NO: 12116 - RNA, 22 nt, Human
augggcaguuaggaggccagga

SEQ ID NO: 12117 - RNA, 22 nt, Human
augggcaugauauuaguaccua

SEQ ID NO: 12118 - RNA, 22 nt, Human
augggcucggcgcugcugggau

SEQ ID NO: 12119 - RNA, 22 nt, Human
augggcugacuaaugguaaacu

SEQ ID NO: 12120 - RNA, 22 nt, Human
augggcugagaaucaagaauau

SEQ ID NO: 12121 - RNA, 22 nt, Human
augggcuggccuuucccgcucu

SEQ ID NO: 12122 - RNA, 22 nt, Human
augggcugugagguccggcagg

SEQ ID NO: 12123 - RNA, 22 nt, Human
augggcugugggacccuggacc

SEQ ID NO: 12124 - RNA, 22 nt, Human
auggggaagagccagugagcug

SEQ ID NO: 12125 - RNA, 22 nt, Human
auggggcuagacaaccagugcc

SEQ ID NO: 12126 - RNA, 22 nt, Human
auggggcugaaacauggaagag

SEQ ID NO: 12127 - RNA, 22 nt, Human
augggggccugaacaggcaaaa

SEQ ID NO: 12128 - RNA, 22 nt, Human
augggggcggcugaagcccagg

SEQ ID NO: 12129 - RNA, 22 nt, Human
augguaaaagauauacugugca

SEQ ID NO: 12130 - RNA, 22 nt, Human
augguacagugcacugaaugga

SEQ ID NO: 12131 - RNA, 22 nt, Human
augguacauaguuuaaauaagg

SEQ ID NO: 12132 - RNA, 22 nt, Human
augguauuaagaacaauuccaa

SEQ ID NO: 12133 - RNA, 22 nt, Human
augguauuccuuuauguagaag

SEQ ID NO: 12134 - RNA, 22 nt, Human
augguauucucuaacucagcuu

SEQ ID NO: 12135 - RNA, 22 nt, Human
augguauugcaacaacugucau

SEQ ID NO: 12136 - RNA, 22 nt, Human
auggucacuucacccaugagcu

SEQ ID NO: 12137 - RNA, 22 nt, Human
auggucauaugcuaauucagga

SEQ ID NO: 12138 - RNA, 18 nt, Human
auggucucauacugggag

SEQ ID NO: 12139 - RNA, 22 nt, Human
auggucuuaggguaggcagcug

SEQ ID NO: 12140 - RNA, 22 nt, Human
auggucuucucaagcaacacug

SEQ ID NO: 12141 - RNA, 21 nt, Human
auggugagauacugggugugg

SEQ ID NO: 12142 - RNA, 22 nt, Human
auggugcuccugcaggaagcag

SEQ ID NO: 12143 - RNA, 22 nt, Human
augguggauuugugauucagcu

SEQ ID NO: 12144 - RNA, 22 nt, Human
auggugguagaagcacuaugug

SEQ ID NO: 12145 - RNA, 22 nt, Human
augguguagcaugugauaugac

SEQ ID NO: 12146 - RNA, 22 nt, Human
augguguugagucucucuucac

SEQ ID NO: 12147 - RNA, 22 nt, Human
augguuauuucauggaaaaauu

SEQ ID NO: 12148 - RNA, 22 nt, Human
augguugaagaccaguggaaaa

SEQ ID NO: 12149 - RNA, 22 nt, Human
augguugacccaugugaguuag

SEQ ID NO: 12150 - RNA, 22 nt, Human
augguuuaagggagaauauuga

SEQ ID NO: 12151 - RNA, 22 nt, Human
augguuuagcaacuuagggaaa

SEQ ID NO: 12152 - RNA, 22 nt, Human
augguuuaguuagggcuuuuca

SEQ ID NO: 12153 - RNA, 23 nt, Human
augguuuaugucacacuuuugau

SEQ ID NO: 12154 - RNA, 22 nt, Human
augguuuauuagcugcacaggc

SEQ ID NO: 12155 - RNA, 22 nt, Human
augguuucacaaacaaaagguu

SEQ ID NO: 12156 - RNA, 22 nt, Human
augguuuuauuucucuauagcu

SEQ ID NO: 12157 - RNA, 22 nt, Human
auguaaacaaagaucuuccugc

SEQ ID NO: 12158 - RNA, 22 nt, Human
auguaaacacucacugugcccc

SEQ ID NO: 12159 - RNA, 22 nt, Human
auguaaacucacauuuucuuca

SEQ ID NO: 12160 - RNA, 22 nt, Human
auguaaaguaaucugucgauca

SEQ ID NO: 12161 - RNA, 22 nt, Human
auguaaaguucaguacaguuuu

SEQ ID NO: 12162 - RNA, 22 nt, Human
auguaaauuguacugacacacg

SEQ ID NO: 12163 - RNA, 22 nt, Human
auguaacaaaugguauacaugu

SEQ ID NO: 12164 - RNA, 22 nt, Human
auguaacaggugaagcucugag

SEQ ID NO: 12165 - RNA, 22 nt, Human
auguaacauaugugaucgcauu

SEQ ID NO: 12166 - RNA, 22 nt, Human
auguaaccaccacacaaagcaa

SEQ ID NO: 12167 - RNA, 22 nt, Human
auguaagacuuuaagaaccuaa

SEQ ID NO: 12168 - RNA, 22 nt, Human
auguaagagucuaagauuguag

SEQ ID NO: 12169 - RNA, 22 nt, Human
auguaaggagccacaguggggg

SEQ ID NO: 12170 - RNA, 22 nt, Human
auguaagguucagaguauguga

SEQ ID NO: 12171 - RNA, 22 nt, Human
auguaauaggguaacauaacau

SEQ ID NO: 12172 - RNA, 22 nt, Human
auguacaagcuguuuuacugca

SEQ ID NO: 12173 - RNA, 22 nt, Human
auguacacacacaucuuugcgu

SEQ ID NO: 12174 - RNA, 22 nt, Human
auguacaccaggugaagaugaa

SEQ ID NO: 12175 - RNA, 22 nt, Human
auguacauaaaauguauaauga

SEQ ID NO: 12176 - RNA, 22 nt, Human
auguacaugugaauuuaggcaa

SEQ ID NO: 12177 - RNA, 22 nt, Human
auguacauguuuaagugaagga

SEQ ID NO: 12178 - RNA, 22 nt, Human
auguacauuauucgagugaugg

SEQ ID NO: 12179 - RNA, 21 nt, Human
auguacauucggcaacagaua

SEQ ID NO: 12180 - RNA, 22 nt, Human
auguaccagauguauguucuca

SEQ ID NO: 12181 - RNA, 22 nt, Human
auguagaaaguuauugucacug

SEQ ID NO: 12182 - RNA, 22 nt, Human
auguagaagcugacagugcugu

SEQ ID NO: 12183 - RNA, 22 nt, Human
auguaaaccgugcacucccagg

SEQ ID NO: 12184 - RNA, 22 nt, Human
auguaaaucaagcagugcuggu

SEQ ID NO: 12185 - RNA, 22 nt, Human
auguaacacccacuuuuauagc

SEQ ID NO: 12186 - RNA, 22 nt, Human
auguaacuuccucagggauggu

SEQ ID NO: 12187 - RNA, 23 nt, Human
auguaagaguuccaguuacuuug

SEQ ID NO: 12188 - RNA, 22 nt, Human
auguacaaaaugccacugaauu

SEQ ID NO: 12189 - RNA, 22 nt, Human
auguacaaucuaggguuugcau

SEQ ID NO: 12190 - RNA, 22 nt, Human
auguacaaucuaucacaagaag

SEQ ID NO: 12191 - RNA, 22 nt, Human
auguacaggucuuggcaaaggg

SEQ ID NO: 12192 - RNA, 22 nt, Human
auguacaguggaaacuaacaaa

SEQ ID NO: 12193 - RNA, 22 nt, Human
auguacauacugcauuuucaaa

SEQ ID NO: 12194 - RNA, 22 nt, Human
auguacauagcaucaucuagga

SEQ ID NO: 12195 - RNA, 22 nt, Human
auguacaucuuuauaacaagcu

SEQ ID NO: 12196 - RNA, 22 nt, Human
auguacauucuaaguaugugua

SEQ ID NO: 12197 - RNA, 22 nt, Human
auguacauuuguaguaauauca

SEQ ID NO: 12198 - RNA, 22 nt, Human
auguacauuuuccuaauguuuu

SEQ ID NO: 12199 - RNA, 19 nt, Human
auguaccauuugaaguucu

SEQ ID NO: 12200 - RNA, 22 nt, Human
auguaccucugcauuccugccu

SEQ ID NO: 12201 - RNA, 22 nt, Human
auguacuaaagaaauuugcagg

SEQ ID NO: 12202 - RNA, 22 nt, Human
auguacuaugcagucaacuguu

SEQ ID NO: 12203 - RNA, 20 nt, Human
auguacuccccacaagcaac

SEQ ID NO: 12204 - RNA, 22 nt, Human
auguagaaaguuauuuuacucu

SEQ ID NO: 12205 - RNA, 22 nt, Human
auguagaacagguuaaugacag

SEQ ID NO: 12206 - RNA, 22 nt, Human
auguagaauggugauuggcagg

SEQ ID NO: 12207 - RNA, 22 nt, Human
auuaaaugauggcaugucuuau

SEQ ID NO: 12208 - RNA, 22 nt, Human
auuaaauguuccuuaaauuaua

SEQ ID NO: 12209 - RNA, 22 nt, Human
auuaaauguuggcauauuuugu

SEQ ID NO: 12210 - RNA, 21 nt, Human
auuaacuuguuaaccuaaagu

SEQ ID NO: 12211 - RNA, 22 nt, Human
auuaagacugcccauguuuuua

SEQ ID NO: 12212 - RNA, 22 nt, Human
auuaagaucauuguagaagauu

SEQ ID NO: 12213 - RNA, 22 nt, Human
auuaagaugugggaaaauuuaa

SEQ ID NO: 12214 - RNA, 22 nt, Human
auuaagcuccaaguugcucuga

SEQ ID NO: 12215 - RNA, 22 nt, Human
auuaaggaagccuauucucucc

SEQ ID NO: 12216 - RNA, 22 nt, Human
auuaaggagggcugggcaugau

SEQ ID NO: 12217 - RNA, 22 nt, Human
auuaaggcacuugagcaugaug

SEQ ID NO: 12218 - RNA, 22 nt, Human
auuaaggugucaauguauuugg

SEQ ID NO: 12219 - RNA, 22 nt, Human
auuaagugacuaaaguaaugcu

SEQ ID NO: 12220 - RNA, 22 nt, Human
auuaauaucccccgccguucug

SEQ ID NO: 12221 - RNA, 22 nt, Human
auuaauaugagaaaguggcaga

SEQ ID NO: 12222 - RNA, 22 nt, Human
auuaauauugguucauuagcug

SEQ ID NO: 12223 - RNA, 22 nt, Human
auuaaugaaacuuugguuaagc

SEQ ID NO: 12224 - RNA, 22 nt, Human
auuaauguguagccaacuuaau

SEQ ID NO: 12225 - RNA, 22 nt, Human
auuaauugggaacuuguugaaa

SEQ ID NO: 12226 - RNA, 22 nt, Human
auuaauuuccaggcacugugcu

SEQ ID NO: 12227 - RNA, 22 nt, Human
auuaauuuuucugacagccaca

SEQ ID NO: 12228 - RNA, 22 nt, Human
auuacaacuaugugcucugcaa

SEQ ID NO: 12229 - RNA, 22 nt, Human
auuacaaguagacuaacuuuca

SEQ ID NO: 12230 - RNA, 22 nt, Human
auuacacacucaaguccuguua

SEQ ID NO: 12231 - RNA, 22 nt, Human
auuacacauagacauucguuca

SEQ ID NO: 12232 - RNA, 22 nt, Human
auuacacuaaugugacaacaau

SEQ ID NO: 12233 - RNA, 22 nt, Human
auuacacuuguucaucaucacc

SEQ ID NO: 12234 - RNA, 22 nt, Human
auuacagaaagcaauauugagu

SEQ ID NO: 12235 - RNA, 22 nt, Human
auuacagaaugcaguuccuuau

SEQ ID NO: 12236 - RNA, 21 nt, Human
auuacagcaguggccaaaugc

SEQ ID NO: 12237 - RNA, 22 nt, Human
auuacaguaacagcuacaaugc

SEQ ID NO: 12238 - RNA, 22 nt, Human
auuacaguucugcagguaguuu

SEQ ID NO: 12239 - RNA, 22 nt, Human
auuacaucaguugacaugugag

SEQ ID NO: 12240 - RNA, 22 nt, Human
auuaccacuuaaucaacauaug

SEQ ID NO: 12241 - RNA, 22 nt, Human
auuacccaggguaggaauuccu

SEQ ID NO: 12242 - RNA, 22 nt, Human
auuacccagucugugguauucu

SEQ ID NO: 12243 - RNA, 22 nt, Human
auuacucugucugccucugacc

SEQ ID NO: 12244 - RNA, 22 nt, Human
auuagaaaaacucaagggcucu

SEQ ID NO: 12245 - RNA, 22 nt, Human
auuagaaaccaagaggcaggcu

SEQ ID NO: 12246 - RNA, 22 nt, Human
auuagaagauagugauuucugc

SEQ ID NO: 12247 - RNA, 22 nt, Human
auuagaaugacagaaaugaggc

SEQ ID NO: 12248 - RNA, 22 nt, Human
auuagaauuaugcuugcuaaug

SEQ ID NO: 12249 - RNA, 22 nt, Human
auuagacaucauaugauucagc

SEQ ID NO: 12250 - RNA, 22 nt, Human
auuagagguacaaaccuucacu

SEQ ID NO: 12251 - RNA, 22 nt, Human
auuagcaagguucaugagaaga

SEQ ID NO: 12252 - RNA, 19 nt, Human
auuagcagacuuccuuuca

SEQ ID NO: 12253 - RNA, 22 nt, Human
auuagcagugccuugccugucu

SEQ ID NO: 12254 - RNA, 22 nt, Human
auuagcaugccaagcuuuuaga

SEQ ID NO: 12255 - RNA, 19 nt, Human
auuagcaugcuugaggaug

SEQ ID NO: 12256 - RNA, 22 nt, Human
auuagccuguugcauuuucacu

SEQ ID NO: 12257 - RNA, 22 nt, Human
auuagccuugguaagucuuuca

SEQ ID NO: 12258 - RNA, 22 nt, Human
auuagcuaggaaauuuuguguc

SEQ ID NO: 12259 - RNA, 22 nt, Human
auuagcugaccucuaaggagcc

SEQ ID NO: 12260 - RNA, 22 nt, Human
auuagcuuaucacacaagcugc

SEQ ID NO: 12261 - RNA, 22 nt, Human
auuagcuuauuguaaggugaaa

SEQ ID NO: 12262 - RNA, 22 nt, Human
auuagcuucaaagccaucaacc

SEQ ID NO: 12263 - RNA, 22 nt, Human
auuagcuucugaagcccuugaa

SEQ ID NO: 12264 - RNA, 22 nt, Human
auuagcuucugugcauggacuu

SEQ ID NO: 12265 - RNA, 20 nt, Human
auuagcuuggagacaguggc

SEQ ID NO: 12266 - RNA, 22 nt, Human
auuagcuuuggauucagaagau

SEQ ID NO: 12267 - RNA, 22 nt, Human
auuaggaaacugaaugucagaa

SEQ ID NO: 12268 - RNA, 22 nt, Human
auuaggaaguaaguaucacaag

SEQ ID NO: 12269 - RNA, 22 nt, Human
auuaggacacauacauguacag

SEQ ID NO: 12270 - RNA, 22 nt, Human
auuaggauuuuguccaaguagc

SEQ ID NO: 12271 - RNA, 22 nt, Human
auuaggcagacaacguagccgg

SEQ ID NO: 12272 - RNA, 22 nt, Human
auuaggcagggcaugguggcuc

SEQ ID NO: 12273 - RNA, 22 nt, Human
auuaggcauauaugcuuuuaau

SEQ ID NO: 12274 - RNA, 22 nt, Human
auuagggaaggauuuggccuga

SEQ ID NO: 12275 - RNA, 22 nt, Human
auuagguaagauaaagcagagg

SEQ ID NO: 12276 - RNA, 22 nt, Human
auuagguugugcuuuguggaca

SEQ ID NO: 12277 - RNA, 17 nt, Human
auuagguuuugucauga

SEQ ID NO: 12278 - RNA, 22 nt, Human
auuaguugaacaaguuaaguaa

SEQ ID NO: 12279 - RNA, 22 nt, Human
auuauagaggguuacaguuaau

SEQ ID NO: 12280 - RNA, 22 nt, Human
auuauagggaauucuagaaguc

SEQ ID NO: 12281 - RNA, 22 nt, Human
auuauccaacacccaguuacau

SEQ ID NO: 12282 - RNA, 22 nt, Human
auuaucuaggaauugacagaag

SEQ ID NO: 12283 - RNA, 22 nt, Human
auuaucucaagggauagcagau

SEQ ID NO: 12284 - RNA, 22 nt, Human
auuaugcuuaggaaaauaugaa

SEQ ID NO: 12285 - RNA, 22 nt, Human
auuauguagcuaaaaauugugu

SEQ ID NO: 12286 - RNA, 22 nt, Human
auuauguagguuaggugguugu

SEQ ID NO: 12287 - RNA, 22 nt, Human
auuauuaaagcuuaggucuuau

SEQ ID NO: 12288 - RNA, 22 nt, Human
auuauuagacuuauaugguagu

SEQ ID NO: 12289 - RNA, 22 nt, Human
auuauuagauucuuaauuguaa

SEQ ID NO: 12290 - RNA, 22 nt, Human
auuauuaggacuacugggguug

SEQ ID NO: 12291 - RNA, 20 nt, Human
auuauucauacaugugugac

SEQ ID NO: 12292 - RNA, 22 nt, Human
auuauucuuaaugcagggauua

SEQ ID NO: 12293 - RNA, 22 nt, Human
auuauucuuaugucaucauggc

SEQ ID NO: 12294 - RNA, 22 nt, Human
auuauugcaagcagugaaggga

SEQ ID NO: 12295 - RNA, 22 nt, Human
auuauugcaauuugacauucag

SEQ ID NO: 12296 - RNA, 22 nt, Human
auuauugccagcuauuacaaca

SEQ ID NO: 12297 - RNA, 22 nt, Human
auuauuggacacuucuucugca

SEQ ID NO: 12298 - RNA, 22 nt, Human
auuauuguacuuucaauaaggu

SEQ ID NO: 12299 - RNA, 22 nt, Human
auuauuguuagugacaggguga

SEQ ID NO: 12300 - RNA, 22 nt, Human
auguguauacuugugcuuacuc

SEQ ID NO: 12301 - RNA, 22 nt, Human
auguguauccaucugucuauuu

SEQ ID NO: 12302 - RNA, 22 nt, Human
auguguauuaguuaguuuaaug

SEQ ID NO: 12303 - RNA, 22 nt, Human
auguguauuuccaucgaucagc

SEQ ID NO: 12304 - RNA, 22 nt, Human
auguguccucuggcagguuuag

SEQ ID NO: 12305 - RNA, 22 nt, Human
auguguccugcugugucacaca

SEQ ID NO: 12306 - RNA, 22 nt, Human
auguguccuuauaagaagaaga

SEQ ID NO: 12307 - RNA, 22 nt, Human
auguguccuuguucccauucca

SEQ ID NO: 12308 - RNA, 22 nt, Human
augugucuaauuccaggagcac

SEQ ID NO: 12309 - RNA, 22 nt, Human
augugucuagauugcuguaccg

SEQ ID NO: 12310 - RNA, 22 nt, Human
augugucucuaaaauuuaguaa

SEQ ID NO: 12311 - RNA, 22 nt, Human
augugucugauggcccugaauu

SEQ ID NO: 12312 - RNA, 22 nt, Human
augugucugguuauugacaugc

SEQ ID NO: 12313 - RNA, 20 nt, Human
augugucuguaaacaacucu

SEQ ID NO: 12314 - RNA, 22 nt, Human
augugucuucuaagccaagccu

SEQ ID NO: 12315 - RNA, 22 nt, Human
augugucuucuguggguuugaa

SEQ ID NO: 12316 - RNA, 22 nt, Human
auuuuacuuaguguaaugucca

SEQ ID NO: 12317 - RNA, 22 nt, Human
auuuuagcaaaugcaagaugga

SEQ ID NO: 12318 - RNA, 22 nt, Human
auuuuaguaccucaaguaucca

SEQ ID NO: 12319 - RNA, 22 nt, Human
auuuuaguuuuagcauccaugc

SEQ ID NO: 12320 - RNA, 22 nt, Human
auuuucaagggagaggccucug

SEQ ID NO: 12321 - RNA, 22 nt, Human
auuuucaguugaaaaaguuggu

SEQ ID NO: 12322 - RNA, 22 nt, Human
auuuucaucauggguuuaacau

SEQ ID NO: 12323 - RNA, 22 nt, Human
auuuucaucgcuagguuggccu

SEQ ID NO: 12324 - RNA, 21 nt, Human
auuuucauuuccaggggagga

SEQ ID NO: 12325 - RNA, 22 nt, Human
auuuuccuccaugugagcaguu

SEQ ID NO: 12326 - RNA, 22 nt, Human
auuuucuaagccugucagacuu

SEQ ID NO: 12327 - RNA, 22 nt, Human
auuuucuauguuguaauuguua

SEQ ID NO: 12328 - RNA, 21 nt, Human
auuuucucuggaugaugguca

SEQ ID NO: 12329 - RNA, 22 nt, Human
auuuucuucucucccuggcugc

SEQ ID NO: 12330 - RNA, 22 nt, Human
auuuugaaaccaaguuauuucc

SEQ ID NO: 12331 - RNA, 22 nt, Human
auuuugaaauacuugaaggaaa

SEQ ID NO: 12332 - RNA, 18 nt, Human
auuuugaacaaugcugua

SEQ ID NO: 12333 - RNA, 22 nt, Human
auuuugacauugcggcauugcu

SEQ ID NO: 12334 - RNA, 22 nt, Human
auuuugauaaucauguuagaga

SEQ ID NO: 12335 - RNA, 22 nt, Human
auuuugauguaucuuuguagcu

SEQ ID NO: 12336 - RNA, 22 nt, Human
auuuugcuacaguugguggaaa

SEQ ID NO: 12337 - RNA, 22 nt, Human
auuuugcuggucugaauuacuu

SEQ ID NO: 12338 - RNA, 22 nt, Human
auuuugcuuuauguaaauaugu

SEQ ID NO: 12339 - RNA, 22 nt, Human
auuuuguuaaugucaccgugcu

SEQ ID NO: 12340 - RNA, 22 nt, Human
auuuguaauuucuuaucugugu

SEQ ID NO: 12341 - RNA, 22 nt, Human
auuuguaccauacuguuuauua

SEQ ID NO: 12342 - RNA, 22 nt, Human
auuuguaccaucugguauacag

SEQ ID NO: 12343 - RNA, 22 nt, Human
auuuguacucaggaauucugcu

SEQ ID NO: 12344 - RNA, 22 nt, Human
auuugucaaaacacagagaaca

SEQ ID NO: 12345 - RNA, 22 nt, Human
auuugucaacaggcauuuaggu

SEQ ID NO: 12346 - RNA, 22 nt, Human
auuugucacugagagaguuaga

SEQ ID NO: 12347 - RNA, 22 nt, Human
auuugucaguggaagugauuca

SEQ ID NO: 12348 - RNA, 22 nt, Human
auuugucauauauaauacucuu

SEQ ID NO: 12349 - RNA, 22 nt, Human
auuugucucugcacuuuacuca

SEQ ID NO: 12350 - RNA, 22 nt, Human
auuugucugcuugcugccuucc

SEQ ID NO: 12351 - RNA, 22 nt, Human
auuugucuuugagugcccugcu

SEQ ID NO: 12352 - RNA, 22 nt, Human
auuugugauaauuuguuacagc

SEQ ID NO: 12353 - RNA, 22 nt, Human
auuugugccaaauuauuucuaa

SEQ ID NO: 12354 - RNA, 22 nt, Human
auuuguuccacacauauuuacu

SEQ ID NO: 12355 - RNA, 22 nt, Human
auuuguucuucaugauccuguc

SEQ ID NO: 12356 - RNA, 20 nt, Human
auuuguuucuacucucugac

SEQ ID NO: 12357 - RNA, 22 nt, Human
auuuuaaggcuuauuuaaaggc

SEQ ID NO: 12358 - RNA, 22 nt, Human
auuuuaauaagauccauuuggu

SEQ ID NO: 12359 - RNA, 22 nt, Human
auuuuacauaaggaagguuuaa

SEQ ID NO: 12360 - RNA, 22 nt, Human
auuuuacuucauuugaaaugcc

SEQ ID NO: 12361 - RNA, 22 nt, Human
auuuuagcaguucucuaauuuc

SEQ ID NO: 12362 - RNA, 22 nt, Human
auuuucagaacauucauucacu

SEQ ID NO: 12363 - RNA, 22 nt, Human
auuuucagcccccacucguggc

SEQ ID NO: 12364 - RNA, 22 nt, Human
auuuuccagccuuucuagaacu

SEQ ID NO: 12365 - RNA, 22 nt, Human
auuuuccucaagccucuggaag

SEQ ID NO: 12366 - RNA, 22 nt, Human
auuuuccuucuaagaggaaggu

SEQ ID NO: 12367 - RNA, 22 nt, Human
auuuuccuuguggguuagcgaa

SEQ ID NO: 12368 - RNA, 22 nt, Human
auuuucugagcacgugacagca

SEQ ID NO: 12369 - RNA, 22 nt, Human
auuuucugguugagguuuaaca

SEQ ID NO: 12370 - RNA, 21 nt, Human
auuuucugugauagcugucuc

SEQ ID NO: 12371 - RNA, 18 nt, Human
auuuugaacugggaauau

SEQ ID NO: 12372 - RNA, 22 nt, Human
auuuugaagggaauugaaguuc

SEQ ID NO: 12373 - RNA, 22 nt, Human
auuuugaaucaccuuggaagaa

SEQ ID NO: 12374 - RNA, 23 nt, Human
auuuugccucuuggcugcuuagg

SEQ ID NO: 12375 - RNA, 22 nt, Human
auuuugcugcuaugccuugcaa

SEQ ID NO: 12376 - RNA, 22 nt, Human
auuuugcugugguacauuagga

SEQ ID NO: 12377 - RNA, 21 nt, Human
auuuuguacauagaauuuguc

SEQ ID NO: 12378 - RNA, 22 nt, Human
auuuugugaacccucaagcaau

SEQ ID NO: 12379 - RNA, 22 nt, Human
auuuuguggcagaugcagaacc

SEQ ID NO: 12380 - RNA, 22 nt, Human
auuuuguggguucugcugaugu

SEQ ID NO: 12381 - RNA, 22 nt, Human
auuuuguuauagaacucuguga

SEQ ID NO: 12382 - RNA, 22 nt, Human
auuuuguuuccuuuggaguaga

SEQ ID NO: 12383 - RNA, 23 nt, Human
auuuuuagccucucugagcugag

SEQ ID NO: 12384 - RNA, 22 nt, Human
auuuuucucucacacuuaccag

SEQ ID NO: 12385 - RNA, 22 nt, Human
auuuuucucuuuccacugagau

SEQ ID NO: 12386 - RNA, 22 nt, Human
auuuuuguauccccagcuccug

SEQ ID NO: 12387 - RNA, 22 nt, Human
auuuuuuauauaccaagguggg

SEQ ID NO: 12388 - RNA, 22 nt, Human
auuuuuucuguaaacuggccuu

SEQ ID NO: 12389 - RNA, 23 nt, Human
auuuuuugucuuuguaacuagau

SEQ ID NO: 12390 - RNA, 22 nt, Human
auuuuuuguuaacucaggauag

SEQ ID NO: 12391 - RNA, 22 nt, Human
caaaacauucucugcagcaggg

SEQ ID NO: 12392 - RNA, 22 nt, Human
caaaacugucuagagagagaag

SEQ ID NO: 12393 - RNA, 22 nt, Human
caaaaguaauggcgguuuuuac

SEQ ID NO: 12394 - RNA, 22 nt, Human
caaaaguaauuaugguuuuugc

SEQ ID NO: 12395 - RNA, 22 nt, Human
caaaaguaauugugguuuuugc

SEQ ID NO: 12396 - RNA, 22 nt, Human
caaaaguucucacccagacaug

SEQ ID NO: 12397 - RNA, 22 nt, Human
caaaauagauguuaaccuggaa

SEQ ID NO: 12398 - RNA, 22 nt, Human
caaacaauuugcauuuccuuag

SEQ ID NO: 12399 - RNA, 22 nt, Human
caaacauagugaagcaaugaca

SEQ ID NO: 12400 - RNA, 22 nt, Human
caaacauucaaguacaagucuu

SEQ ID NO: 12401 - RNA, 22 nt, Human
caaacauuuugagugguuucug

SEQ ID NO: 12402 - RNA, 22 nt, Human
caaaccacacucagcguaucgg

SEQ ID NO: 12403 - RNA, 22 nt, Human
caaaccuuguaaaugccaaacu

SEQ ID NO: 12404 - RNA, 22 nt, Human
caaacuauuuacaauggaauca

SEQ ID NO: 12405 - RNA, 22 nt, Human
caaacugagcaucagaaaguuu

SEQ ID NO: 12406 - RNA, 22 nt, Human
caaacugcaacaugaagugucc

SEQ ID NO: 12407 - RNA, 22 nt, Human
caaacuuugcaaaacuuacagu

SEQ ID NO: 12408 - RNA, 22 nt, Human
caaagaauagugagaagaugua

SEQ ID NO: 12409 - RNA, 22 nt, Human
caaagaaucacucaucuuuagc

SEQ ID NO: 12410 - RNA, 22 nt, Human
caaagacacgggaaacaacguu

SEQ ID NO: 12411 - RNA, 22 nt, Human
caaagaggugagaggagccuuu

SEQ ID NO: 12412 - RNA, 23 nt, Human
caaagaugauuggaacauggcuu

SEQ ID NO: 12413 - RNA, 22 nt, Human
caaagcaagggcugaagacucc

SEQ ID NO: 12414 - RNA, 22 nt, Human
caaagcagacgcaguaagggua

SEQ ID NO: 12415 - RNA, 20 nt, Human
caaagcaguaggauaaaaau

SEQ ID NO: 12416 - RNA, 22 nt, Human
caaagccaggcuuucuaaugua

SEQ ID NO: 12417 - RNA, 22 nt, Human
caaagcguccugccuccauuug

SEQ ID NO: 12418 - RNA, 22 nt, Human
caaagcuauaaauucagacaga

SEQ ID NO: 12419 - RNA, 22 nt, Human
caaagcuggacugcucaguuca

SEQ ID NO: 12420 - RNA, 22 nt, Human
caaaggagguaaugggugugag

SEQ ID NO: 12421 - RNA, 22 nt, Human
caaaggcaggucauggccacuu

SEQ ID NO: 12422 - RNA, 22 nt, Human
caaaggcaguuacugaaugaag

SEQ ID NO: 12423 - RNA, 22 nt, Human
caaaggccugagaacugagggg

SEQ ID NO: 12424 - RNA, 22 nt, Human
caaaggcugguagaaugagcca

SEQ ID NO: 12425 - RNA, 22 nt, Human
ccaagggcgccuccguuccccc

SEQ ID NO: 12426 - RNA, 22 nt, Human
ccaagggcucugacuugccugc

SEQ ID NO: 12427 - RNA, 22 nt, Human
ccaaggggccuuuagacacuau

SEQ ID NO: 12428 - RNA, 22 nt, Human
ccaagguuagaaaagguacuuu

SEQ ID NO: 12429 - RNA, 22 nt, Human
ccaagguuuauuuugauacauu

SEQ ID NO: 12430 - RNA, 22 nt, Human
ccaaguacagauuccuccacug

SEQ ID NO: 12431 - RNA, 22 nt, Human
ccaaguacucucaccaaagcuu

SEQ ID NO: 12432 - RNA, 22 nt, Human
ccaaguccucuaccauuccugg

SEQ ID NO: 12433 - RNA, 22 nt, Human
ccaagugauacacccgccucgg

SEQ ID NO: 12434 - RNA, 22 nt, Human
ccaauacuuagauuaaaauagu

SEQ ID NO: 12435 - RNA, 20 nt, Human
ccaaugcaguaucucguucc

SEQ ID NO: 12436 - RNA, 15 nt, Human
ccaaugucagaugcu

SEQ ID NO: 12437 - RNA, 22 nt, Human
ccacaagaugcaaacucuaaca

SEQ ID NO: 12438 - RNA, 22 nt, Human
ccacaaggccuguggggcugcu

SEQ ID NO: 12439 - RNA, 22 nt, Human
ccacaaguuucagcacccagag

SEQ ID NO: 12440 - RNA, 19 nt, Human
ccacacagugugcaauuua

SEQ ID NO: 12441 - RNA, 22 nt, Human
ccacacugaccagcugugagac

SEQ ID NO: 12442 - RNA, 22 nt, Human
ccacagaaccucagcuuugagc

SEQ ID NO: 12443 - RNA, 22 nt, Human
ccacagaagauggggagagugg

SEQ ID NO: 12444 - RNA, 22 nt, Human
ccacagagacaggguccuugcu

SEQ ID NO: 12445 - RNA, 19 nt, Human
ccacagagacuagaagaca

SEQ ID NO: 12446 - RNA, 22 nt, Human
ccacagagacucugcaggacug

SEQ ID NO: 12447 - RNA, 23 nt, Human
ccacagagcugccaauuccugug

SEQ ID NO: 12448 - RNA, 20 nt, Human
ccacagaggacagggcugug

SEQ ID NO: 12449 - RNA, 22 nt, Human
ccacagaguccgcauuugaggc

SEQ ID NO: 12450 - RNA, 22 nt, Human
ccacagcaccugcagccaguug

SEQ ID NO: 12451 - RNA, 19 nt, Human
ccacagccugcugucuucc

SEQ ID NO: 12452 - RNA, 22 nt, Human
ccacagcuagggcaaucugauu

SEQ ID NO: 12453 - RNA, 22 nt, Human
auuuuccuagucaugugcuucu

SEQ ID NO: 12454 - RNA, 22 nt, Human
auuuuccucugguuuccccaga

SEQ ID NO: 12455 - RNA, 22 nt, Human
auuuucucacaauccuaugggg

SEQ ID NO: 12456 - RNA, 22 nt, Human
auuuucucucaaaccuuaaaau

SEQ ID NO: 12457 - RNA, 22 nt, Human
auuuucuguaacuauuucuaua

SEQ ID NO: 12458 - RNA, 22 nt, Human
auuuucugugugcagauaaaua

SEQ ID NO: 12459 - RNA, 22 nt, Human
auuuugaaaagcauuugaguaa

SEQ ID NO: 12460 - RNA, 22 nt, Human
auuuugacugcauuacagaaca

SEQ ID NO: 12461 - RNA, 22 nt, Human
auuuuguugagguaauugucaa

SEQ ID NO: 12462 - RNA, 22 nt, Human
auuuuuaugacaaaccauccuc

SEQ ID NO: 12463 - RNA, 22 nt, Human
auuuuuccugcuggaucugcuc

SEQ ID NO: 12464 - RNA, 22 nt, Human
auuuuugcccugcaguacauaa

SEQ ID NO: 12465 - RNA, 22 nt, Human
auuuuuuagaaccuggccugau

SEQ ID NO: 12466 - RNA, 22 nt, Human
auuuuuuagccaagacucugca

SEQ ID NO: 12467 - RNA, 22 nt, Human
caaaaaacacagaugucugugu

SEQ ID NO: 12468 - RNA, 22 nt, Human
caaaaaacaccugugugaguau

SEQ ID NO: 12469 - RNA, 22 nt, Human
caaaaccuaaacagacugucca

SEQ ID NO: 12470 - RNA, 21 nt, Human
caaaagagacugauucuugga

SEQ ID NO: 12471 - RNA, 20 nt, Human
caaaagcaaugaaguuauga

SEQ ID NO: 12472 - RNA, 22 nt, Human
caaaagcagcaaguuuauaugu

SEQ ID NO: 12473 - RNA, 21 nt, Human
caaaaggauaggaaauuaggg

SEQ ID NO: 12474 - RNA, 22 nt, Human
caaaagggaguucucuggaagg

SEQ ID NO: 12475 - RNA, 22 nt, Human
caaaaguaauugcgguuuuugc

SEQ ID NO: 12476 - RNA, 22 nt, Human
caaaaugcaucugagaccaggc

SEQ ID NO: 12477 - RNA, 22 nt, Human
caaaauugauuguggugauggu

SEQ ID NO: 12478 - RNA, 22 nt, Human
caaacaucugcaccuugaccgg

SEQ ID NO: 12479 - RNA, 22 nt, Human
caaacauugggggcuucaacac

SEQ ID NO: 12480 - RNA, 22 nt, Human
caaacauuugacuucucucagg

SEQ ID NO: 12481 - RNA, 22 nt, Human
caaacauuuguuggaaccccug

SEQ ID NO: 12482 - RNA, 22 nt, Human
caaacauuuuaaauaagggaua

SEQ ID NO: 12483 - RNA, 22 nt, Human
caaacauuuucuacuuccagga

SEQ ID NO: 12484 - RNA, 22 nt, Human
caaaccaguaggaagucuauua

SEQ ID NO: 12485 - RNA, 22 nt, Human
caaaccugacuggggaugggcg

SEQ ID NO: 12486 - RNA, 23 nt, Human
caaaccuguuucucucaccuguc

SEQ ID NO: 12487 - RNA, 22 nt, Human
caaaccuuguuccagucaacuc

SEQ ID NO: 12488 - RNA, 22 nt, Human
caaacucuguaggacaguucaa

SEQ ID NO: 12489 - RNA, 22 nt, Human
caaacugaacacgaaagucuuu

SEQ ID NO: 12490 - RNA, 22 nt, Human
caaacugccaaugguuuuuaua

SEQ ID NO: 12491 - RNA, 22 nt, Human
caaacuggcuaugggaaucuug

SEQ ID NO: 12492 - RNA, 22 nt, Human
caaacuuacguagucuuacuac

SEQ ID NO: 12493 - RNA, 22 nt, Human
caaacuuacuguguuuaaagag

SEQ ID NO: 12494 - RNA, 22 nt, Human
caaacuuuuccuggaaaagauu

SEQ ID NO: 12495 - RNA, 22 nt, Human
caaacuuuugaggaguucagga

SEQ ID NO: 12496 - RNA, 22 nt, Human
caaagaagagauuuacagagcu

SEQ ID NO: 12497 - RNA, 22 nt, Human
caaagaaugagugaguacauaa

SEQ ID NO: 12498 - RNA, 22 nt, Human
caaagaguuuuuucauauaaug

SEQ ID NO: 12499 - RNA, 22 nt, Human
caaagauaugacauggaaaaug

SEQ ID NO: 12500 - RNA, 22 nt, Human
caaagaugcugauguuggauca

SEQ ID NO: 12501 - RNA, 22 nt, Human
caaagauuuuagaauuugcaau

SEQ ID NO: 12502 - RNA, 22 nt, Human
caaagcagaagguucuguggua

SEQ ID NO: 12503 - RNA, 22 nt, Human
caaagcagaccuuuacccuuua

SEQ ID NO: 12504 - RNA, 22 nt, Human
caaagcagagaacugucucauu

SEQ ID NO: 12505 - RNA, 22 nt, Human
caaagcagagccagagcuuguc

SEQ ID NO: 12506 - RNA, 22 nt, Human
caaagcaggcuugucaaauugc

SEQ ID NO: 12507 - RNA, 21 nt, Human
caaagccaggcaacucucucc

SEQ ID NO: 12508 - RNA, 22 nt, Human
caaagcucaugcucuuagccau

SEQ ID NO: 12509 - RNA, 22 nt, Human
caaaggaagcuccuugauggcg

SEQ ID NO: 12510 - RNA, 22 nt, Human
caaaggacccauaauuaaaacc

SEQ ID NO: 12511 - RNA, 22 nt, Human
caaaggcaacauauacuuguuu

SEQ ID NO: 12512 - RNA, 22 nt, Human
caaaggcaaucuuguucucugg

SEQ ID NO: 12513 - RNA, 22 nt, Human
caaaggcacacauaccuuucug

SEQ ID NO: 12514 - RNA, 22 nt, Human
caaaggcaucggcaauuaggga

SEQ ID NO: 12515 - RNA, 22 nt, Human
caaaggcuuccacugcauccuu

SEQ ID NO: 12516 - RNA, 22 nt, Human
caaagggcauggccugagcacu

SEQ ID NO: 12517 - RNA, 22 nt, Human
caaagggcggcugucggagggu

SEQ ID NO: 12518 - RNA, 22 nt, Human
caaagguaaagaucugcugugg

SEQ ID NO: 12519 - RNA, 22 nt, Human
caaagguaguauauauauuguu

SEQ ID NO: 12520 - RNA, 22 nt, Human
caaagguuggaaauguuuacca

SEQ ID NO: 12521 - RNA, 22 nt, Human
caaaguaacugccuuuccaauu

SEQ ID NO: 12522 - RNA, 22 nt, Human
caaaguauaguguaggauggca

SEQ ID NO: 12523 - RNA, 22 nt, Human
caaaguauauuggauugaaugg

SEQ ID NO: 12524 - RNA, 22 nt, Human
caaagucagccagcuaguaggu

SEQ ID NO: 12525 - RNA, 22 nt, Human
caaagucccagcugcuuagaga

SEQ ID NO: 12526 - RNA, 22 nt, Human
caaaguggcuggccgggagauc

SEQ ID NO: 12527 - RNA, 22 nt, Human
caaagugggugcccugaugcuc

SEQ ID NO: 12528 - RNA, 22 nt, Human
caaaguuaucaacugcaacauu

SEQ ID NO: 12529 - RNA, 22 nt, Human
caaauacuacgauucuugcagu

SEQ ID NO: 12530 - RNA, 22 nt, Human
caaauacuggguaaguuaauuu

SEQ ID NO: 12531 - RNA, 21 nt, Human
caaauagacauggcuagagga

SEQ ID NO: 12532 - RNA, 22 nt, Human
caaauagacuucaaucucuuga

SEQ ID NO: 12533 - RNA, 18 nt, Human
caaauagcaugauguccu

SEQ ID NO: 12534 - RNA, 22 nt, Human
cacugcaguuccccagugcgca

SEQ ID NO: 12535 - RNA, 22 nt, Human
cacugcccaccaaguggcuggu

SEQ ID NO: 12536 - RNA, 22 nt, Human
cacugcccuggggguugccauc

SEQ ID NO: 12537 - RNA, 22 nt, Human
cacugccuccccaggcuccaca

SEQ ID NO: 12538 - RNA, 22 nt, Human
cacugccuggaaggagagacau

SEQ ID NO: 12539 - RNA, 22 nt, Human
cacugccuucaccugcccuauc

SEQ ID NO: 12540 - RNA, 22 nt, Human
cacugcuucagucagagaaauu

SEQ ID NO: 12541 - RNA, 22 nt, Human
cacugcuugcaguaugagugga

SEQ ID NO: 12542 - RNA, 22 nt, Human
cacugcuuuucagacaguuauu

SEQ ID NO: 12543 - RNA, 22 nt, Human
cacugcuuuuucuccucacugg

SEQ ID NO: 12544 - RNA, 21 nt, Human
cacuggaauuuucugugacau

SEQ ID NO: 12545 - RNA, 22 nt, Human
cacuggauuuccaggaauacuc

SEQ ID NO: 12546 - RNA, 22 nt, Human
cacuggcaucuaagggugguag

SEQ ID NO: 12547 - RNA, 22 nt, Human
cacuggccuaagcgccucagcc

SEQ ID NO: 12548 - RNA, 22 nt, Human
cacuggggaaaacaggcuucuu

SEQ ID NO: 12549 - RNA, 22 nt, Human
cacuggggugggccugguagag

SEQ ID NO: 12550 - RNA, 22 nt, Human
cacugguacguagguuggggca

SEQ ID NO: 12551 - RNA, 21 nt, Human
cacugguagauggcccgcagg

SEQ ID NO: 12552 - RNA, 22 nt, Human
cacugguagcaguuaaguuagg

SEQ ID NO: 12553 - RNA, 22 nt, Human
cacugguaguuucagcaaccag

SEQ ID NO: 12554 - RNA, 22 nt, Human
cacugguguacaggagguaaaa

SEQ ID NO: 12555 - RNA, 22 nt, Human
cacuguaaagcgucacagggac

SEQ ID NO: 12556 - RNA, 21 nt, Human
cacuguauagcaggagaaaac

SEQ ID NO: 12557 - RNA, 22 nt, Human
cacuguaucuuuuccaaagucu

SEQ ID NO: 12558 - RNA, 22 nt, Human
cacuguauuauuaggaaugaca

SEQ ID NO: 12559 - RNA, 22 nt, Human
cacugucuauuaauauaacuua

SEQ ID NO: 12560 - RNA, 22 nt, Human
cacugucugcuucgacucuuca

SEQ ID NO: 12561 - RNA, 22 nt, Human
cacugucugggacauguggucu

SEQ ID NO: 12562 - RNA, 22 nt, Human
cacugucuucaguuucacugca

SEQ ID NO: 12563 - RNA, 22 nt, Human
cacuguggauacagaaauuagu

SEQ ID NO: 12564 - RNA, 22 nt, Human
cacugugggguuuggcuggaac

SEQ ID NO: 12565 - RNA, 22 nt, Human
cacugugggucccagacuggag

SEQ ID NO: 12566 - RNA, 22 nt, Human
cacugugguuauuaucacuguu

SEQ ID NO: 12567 - RNA, 22 nt, Human
cacuguuauuacuacuauacau

SEQ ID NO: 12568 - RNA, 22 nt, Human
cacuuaaaacuccuggaauugu

SEQ ID NO: 12569 - RNA, 22 nt, Human
cacuuaaaucuguugagaaaaa

SEQ ID NO: 12570 - RNA, 22 nt, Human
cacuuagagccagaugcauagu

SEQ ID NO: 12571 - RNA, 22 nt, Human
cacuuagauacuagaucacaaa

SEQ ID NO: 12572 - RNA, 22 nt, Human
cacuucaaauauggcuucauga

SEQ ID NO: 12573 - RNA, 22 nt, Human
cacuucaccacuaggcuauacu

SEQ ID NO: 12574 - RNA, 22 nt, Human
cacuucauugggaccagggcug

SEQ ID NO: 12575 - RNA, 23 nt, Human
cacuuccccuguggcgagccugc

SEQ ID NO: 12576 - RNA, 22 nt, Human
cacuugaagugaauugcucacc

SEQ ID NO: 12577 - RNA, 22 nt, Human
cacuugcagacuuugccugguu

SEQ ID NO: 12578 - RNA, 22 nt, Human
cacuuggaggcccccugugccc

SEQ ID NO: 12579 - RNA, 22 nt, Human
cacuuguagaggcauuauucca

SEQ ID NO: 12580 - RNA, 22 nt, Human
cacuuguugguggugaaaucac

SEQ ID NO: 12581 - RNA, 22 nt, Human
cacuuuaacucacauuucagcu

SEQ ID NO: 12582 - RNA, 22 nt, Human
cacuuuacccuuguuacucaug

SEQ ID NO: 12583 - RNA, 22 nt, Human
cacuuuauuauaaauuugagag

SEQ ID NO: 12584 - RNA, 22 nt, Human
cacuuucaaguuucagaggaua

SEQ ID NO: 12585 - RNA, 22 nt, Human
cacuuugugugggaucaggggu

SEQ ID NO: 12586 - RNA, 22 nt, Human
cacuuuguuuauugugcaguua

SEQ ID NO: 12587 - RNA, 22 nt, Human
cagaaaauaaacauuuguggaa

SEQ ID NO: 12588 - RNA, 22 nt, Human
cagaaaauaaaguuucuacgca

SEQ ID NO: 12589 - RNA, 22 nt, Human
cagaaacacuguauuuagggaa

SEQ ID NO: 12590 - RNA, 22 nt, Human
cagaaacaggcaacgugugcac

SEQ ID NO: 12591 - RNA, 22 nt, Human
cagaaacauguauaaaguugua

SEQ ID NO: 12592 - RNA, 22 nt, Human
cagaaaccugucuggaguggga

SEQ ID NO: 12593 - RNA, 22 nt, Human
cagaaacuagauuuagacacaa

SEQ ID NO: 12594 - RNA, 21 nt, Human
cagaaacuugcuuugccuucu

SEQ ID NO: 12595 - RNA, 20 nt, Human
cagaaagaagguagauuuuu

SEQ ID NO: 12596 - RNA, 22 nt, Human
cagaaagcaguugucaaugggc

SEQ ID NO: 12597 - RNA, 20 nt, Human
cagaaagcauguuccagggc

SEQ ID NO: 12598 - RNA, 22 nt, Human
cagaaagccaacuccaacuguc

SEQ ID NO: 12599 - RNA, 22 nt, Human
cagaaagccgacuuacaaugga

SEQ ID NO: 12600 - RNA, 22 nt, Human
cagaaagguaugugugccuuug

SEQ ID NO: 12601 - RNA, 22 nt, Human
cagaaauacccagcauuuggag

SEQ ID NO: 12602 - RNA, 21 nt, Human
cagaaauaugaaugaugguga

SEQ ID NO: 12603 - RNA, 23 nt, Human
cagaaaucugaaaucuagaaaug

SEQ ID NO: 12604 - RNA, 22 nt, Human
cacuguuuggcuccuguacuua

SEQ ID NO: 12605 - RNA, 22 nt, Human
cacuuaaagucuuagcuuacag

SEQ ID NO: 12606 - RNA, 22 nt, Human
cacuuagucucaccaguucagu

SEQ ID NO: 12607 - RNA, 22 nt, Human
cacuuaucucauuuaaucacca

SEQ ID NO: 12608 - RNA, 22 nt, Human
cacuuauuaugggcuaggaacu

SEQ ID NO: 12609 - RNA, 22 nt, Human
cacuucaauuaacuucagcauu

SEQ ID NO: 12610 - RNA, 22 nt, Human
cacuucucugauaaucucaguu

SEQ ID NO: 12611 - RNA, 22 nt, Human
cacuugaaaaucagaggaaauu

SEQ ID NO: 12612 - RNA, 22 nt, Human
cacuugaaaguaaugguugugc

SEQ ID NO: 12613 - RNA, 22 nt, Human
cacuugaaugaaagagacuccu

SEQ ID NO: 12614 - RNA, 22 nt, Human
cacuugaaugagaauuuccugg

SEQ ID NO: 12615 - RNA, 22 nt, Human
cacuugaguucuuaauagucag

SEQ ID NO: 12616 - RNA, 22 nt, Human
cacuugauguugucacuauugc

SEQ ID NO: 12617 - RNA, 22 nt, Human
cacuugcuggaugguggcucag

SEQ ID NO: 12618 - RNA, 22 nt, Human
cacuuggaggaaggccuauuca

SEQ ID NO: 12619 - RNA, 22 nt, Human
cacuugggacaaagcuucugcu

SEQ ID NO: 12620 - RNA, 22 nt, Human
cacuugguuugggaguacauaa

SEQ ID NO: 12621 - RNA, 22 nt, Human
cacuuuacuaucuauaaaauaa

SEQ ID NO: 12622 - RNA, 22 nt, Human
cacuuuauaugcauuaccucau

SEQ ID NO: 12623 - RNA, 22 nt, Human
cacuuucuguguugugcaaaaa

SEQ ID NO: 12624 - RNA, 22 nt, Human
cacuuuuaacaggagaauuccc

SEQ ID NO: 12625 - RNA, 22 nt, Human
cagaaaacaaaccuauccugag

SEQ ID NO: 12626 - RNA, 23 nt, Human
cagaaaacccagagcucaguccc

SEQ ID NO: 12627 - RNA, 22 nt, Human
cagaaaaggaagagcuauguaa

SEQ ID NO: 12628 - RNA, 22 nt, Human
cagaaaauagaguuucucugag

SEQ ID NO: 12629 - RNA, 22 nt, Human
cagaaacacuuguagagaaguu

SEQ ID NO: 12630 - RNA, 22 nt, Human
cagaaacagagaaauauuggcu

SEQ ID NO: 12631 - RNA, 22 nt, Human
cagaaacuauguaagaaaguga

SEQ ID NO: 12632 - RNA, 22 nt, Human
cagaaacugcuuguggucaucu

SEQ ID NO: 12633 - RNA, 22 nt, Human
cagaaacuguuuguuaauauuu

SEQ ID NO: 12634 - RNA, 22 nt, Human
cagaaacuucuggugucaaaua

SEQ ID NO: 12635 - RNA, 22 nt, Human
cagaaacuuucuuuacugagca

SEQ ID NO: 12636 - RNA, 22 nt, Human
cagaaacuuuugaugaguguau

SEQ ID NO: 12637 - RNA, 22 nt, Human
cagaaagaccugauuggcaguu

SEQ ID NO: 12638 - RNA, 22 nt, Human
cagaaagcaagccauucacugu

SEQ ID NO: 12639 - RNA, 22 nt, Human
cagaaagugauuugcuauucca

SEQ ID NO: 12640 - RNA, 22 nt, Human
cagaaauaaacuucucacaucg

SEQ ID NO: 12641 - RNA, 22 nt, Human
cagaaauaucaccuggacucua

SEQ ID NO: 12642 - RNA, 22 nt, Human
cagaaauauuccaaguacugca

SEQ ID NO: 12643 - RNA, 22 nt, Human
ccccacaacucauguugaaacu

SEQ ID NO: 12644 - RNA, 22 nt, Human
ccccacagccgccagcagggag

SEQ ID NO: 12645 - RNA, 22 nt, Human
ccccacccucgcuccauuucgg

SEQ ID NO: 12646 - RNA, 22 nt, Human
ccccaccuugcaauuguucccu

SEQ ID NO: 12647 - RNA, 22 nt, Human
ccccacuugcucagcaugucca

SEQ ID NO: 12648 - RNA, 22 nt, Human
ccccagagugagggauugagug

SEQ ID NO: 12649 - RNA, 22 nt, Human
ccccagcagcaccuggggcagu

SEQ ID NO: 12650 - RNA, 22 nt, Human
ccccagcaggaauacagggguc

SEQ ID NO: 12651 - RNA, 22 nt, Human
ccccagccuuccaugggaauug

SEQ ID NO: 12652 - RNA, 22 nt, Human
ccccaggacacauggaccaagu

SEQ ID NO: 12653 - RNA, 22 nt, Human
ccccaggacguggcccucauag

SEQ ID NO: 12654 - RNA, 16 nt, Human
ccccaggacuuggcac

SEQ ID NO: 12655 - RNA, 22 nt, Human
ccccaggagauuugggagcaca

SEQ ID NO: 12656 - RNA, 22 nt, Human
ccccaggcagggccuaacagag

SEQ ID NO: 12657 - RNA, 19 nt, Human
ccccaggguaggcuagggg

SEQ ID NO: 12658 - RNA, 22 nt, Human
ccccauccuauucauguuucug

SEQ ID NO: 12659 - RNA, 22 nt, Human
ccccaugcugggaucugacacc

SEQ ID NO: 12660 - RNA, 22 nt, Human
ccccauucuggccagcccagcu

SEQ ID NO: 12661 - RNA, 22 nt, Human
cccccaaggccaggcugagacc

SEQ ID NO: 12662 - RNA, 22 nt, Human
cccccacuaaguugagggcccu

SEQ ID NO: 12663 - RNA, 22 nt, Human
cccccagaugcgagccauagcc

SEQ ID NO: 12664 - RNA, 22 nt, Human
cccccugcgcccggcacgucau

SEQ ID NO: 12665 - RNA, 22 nt, Human
ccccucagguacccgugcagca

SEQ ID NO: 12666 - RNA, 21 nt, Human
ccccucauacacucuccuugc

SEQ ID NO: 12667 - RNA, 22 nt, Human
ccccucucccucacuuaucaau

SEQ ID NO: 12668 - RNA, 22 nt, Human
ccccucuggucaaccagucaca

SEQ ID NO: 12669 - RNA, 22 nt, Human
ccccucuuggcauugagugcca

SEQ ID NO: 12670 - RNA, 22 nt, Human
ccccugaagacaauggagaggu

SEQ ID NO: 12671 - RNA, 22 nt, Human
ccccugagauucuggcuuggga

SEQ ID NO: 12672 - RNA, 20 nt, Human
ccccuucaucuacagccuga

SEQ ID NO: 12673 - RNA, 22 nt, Human
ccccuuggcugcucucaagucc

SEQ ID NO: 12674 - RNA, 22 nt, Human
cccgaccucgcaaagcgcacuc

SEQ ID NO: 12675 - RNA, 22 nt, Human
cccgagugucuacucacuccca

SEQ ID NO: 12676 - RNA, 22 nt, Human
cccggaaacaggugacaaucuc

SEQ ID NO: 12677 - RNA, 22 nt, Human
cccggaaaggcgauuaucccuc

SEQ ID NO: 12678 - RNA, 18 nt, Human
cccggcuaauuuuuggua

SEQ ID NO: 12679 - RNA, 22 nt, Human
cccgggagguggagacugcagu

SEQ ID NO: 12680 - RNA, 22 nt, Human
cccgucccuuuugcccgcuggu

SEQ ID NO: 12681 - RNA, 21 nt, Human
cccguggagaaaaggaaugag

SEQ ID NO: 12682 - RNA, 22 nt, Human
cccuaagaaucucccuuguagc

SEQ ID NO: 12683 - RNA, 22 nt, Human
cccuaagcuuucgggcugagag

SEQ ID NO: 12684 - RNA, 22 nt, Human
cccuaggaauucuauggccaag

SEQ ID NO: 12685 - RNA, 22 nt, Human
cccuaggcugggcucuuggcuu

SEQ ID NO: 12686 - RNA, 22 nt, Human
cccucacuguccuugggcccuu

SEQ ID NO: 12687 - RNA, 22 nt, Human
cccucacuucacgcucugcaga

SEQ ID NO: 12688 - RNA, 22 nt, Human
cccucagcuucucccugcagcu

SEQ ID NO: 12689 - RNA, 21 nt, Human
cccucaggaaacagaaugcac

SEQ ID NO: 12690 - RNA, 22 nt, Human
cccucaggaugcaguggaagug

SEQ ID NO: 12691 - RNA, 19 nt, Human
cccucaggucugagcaguc

SEQ ID NO: 12692 - RNA, 22 nt, Human
cccucagucuggcugggaagac

SEQ ID NO: 12693 - RNA, 22 nt, Human
cccucauugccuccugcgugca

SEQ ID NO: 12694 - RNA, 22 nt, Human
cccuccacagacaggacuuguc

SEQ ID NO: 12695 - RNA, 22 nt, Human
cccuccagugucccagugggga

SEQ ID NO: 12696 - RNA, 22 nt, Human
cccucccaagcacucugacaua

SEQ ID NO: 12697 - RNA, 22 nt, Human
cccucccagaugggcuugaggu

SEQ ID NO: 12698 - RNA, 22 nt, Human
cccucccaggaguggccagaga

SEQ ID NO: 12699 - RNA, 22 nt, Human
cccucccuauguagaugauguu

SEQ ID NO: 12700 - RNA, 22 nt, Human
cccucccugugugccucauuug

SEQ ID NO: 12701 - RNA, 22 nt, Human
cccucccuuugcagcagugcau

SEQ ID NO: 12702 - RNA, 22 nt, Human
cccuccuggaggcggaugccca

SEQ ID NO: 12703 - RNA, 22 nt, Human
cccuccuuucuaggcuuccagc

SEQ ID NO: 12704 - RNA, 22 nt, Human
cccucuacagggaagcgcuuuc

SEQ ID NO: 12705 - RNA, 22 nt, Human
cccucucccugcagaauguggc

SEQ ID NO: 12706 - RNA, 18 nt, Human
cccucuccugcuaguggg

SEQ ID NO: 12707 - RNA, 22 nt, Human
cccucucucgguugcugugguu

SEQ ID NO: 12708 - RNA, 22 nt, Human
cccucucucuaucgggccccag

SEQ ID NO: 12709 - RNA, 22 nt, Human
cccucugagacagguagcucac

SEQ ID NO: 12710 - RNA, 22 nt, Human
cccucugccucugaguaggaca

SEQ ID NO: 12711 - RNA, 22 nt, Human
cccucugccugggaccaagucc

SEQ ID NO: 12712 - RNA, 20 nt, Human
cccucugcuacacugggagc

SEQ ID NO: 12713 - RNA, 22 nt, Human
cccucugcucaggugcauaggc

SEQ ID NO: 12714 - RNA, 20 nt, Human
cccugagacaaaggaggggc

SEQ ID NO: 12715 - RNA, 20 nt, Human
cccugagaccagagagcagc

SEQ ID NO: 12716 - RNA, 22 nt, Human
cccugagagguugagugucugc

SEQ ID NO: 12717 - RNA, 18 nt, Human
cccugagaugaugcugug

SEQ ID NO: 12718 - RNA, 22 nt, Human
cccugagcacaccuggcagaca

SEQ ID NO: 12719 - RNA, 22 nt, Human
cccugagcagucugcagagagc

SEQ ID NO: 12720 - RNA, 22 nt, Human
cccugagcauucaugugagcuu

SEQ ID NO: 12721 - RNA, 22 nt, Human
cccugaggagagcgcuucccga

SEQ ID NO: 12722 - RNA, 22 nt, Human
cagaaauggaauuuuccaucac

SEQ ID NO: 12723 - RNA, 22 nt, Human
cagaaauggagcccaggaaucu

SEQ ID NO: 12724 - RNA, 22 nt, Human
cagaaauguucuaaugauucag

SEQ ID NO: 12725 - RNA, 22 nt, Human
cagaaauguuuguuaauauugu

SEQ ID NO: 12726 - RNA, 22 nt, Human
cagaaauuggaauagagaaaua

SEQ ID NO: 12727 - RNA, 20 nt, Human
cagaaauuuguaaaagggau

SEQ ID NO: 12728 - RNA, 22 nt, Human
cagaacacauuuucagagucaa

SEQ ID NO: 12729 - RNA, 22 nt, Human
cagaacagagucaaaaguaugu

SEQ ID NO: 12730 - RNA, 19 nt, Human
cagaacagcugggaagaga

SEQ ID NO: 12731 - RNA, 22 nt, Human
cagaacaggucaugcuugcugu

SEQ ID NO: 12732 - RNA, 23 nt, Human
cagaacaguaaaagaugccaugg

SEQ ID NO: 12733 - RNA, 20 nt, Human
cagaacagucugagaggcca

SEQ ID NO: 12734 - RNA, 22 nt, Human
cagaaccugaacgugaggugga

SEQ ID NO: 12735 - RNA, 22 nt, Human
cagaaccugugaauguguuauc

SEQ ID NO: 12736 - RNA, 22 nt, Human
cagaaccuuggugguagggaca

SEQ ID NO: 12737 - RNA, 22 nt, Human
cagaacugggcucgcucugguu

SEQ ID NO: 12738 - RNA, 22 nt, Human
cagaagaauggugucugagcuc

SEQ ID NO: 12739 - RNA, 22 nt, Human
cagaagacagagcacuucucuu

SEQ ID NO: 12740 - RNA, 23 nt, Human
cagaagacagucucaagacaagg

SEQ ID NO: 12741 - RNA, 22 nt, Human
cagaagacugcagggaagggac

SEQ ID NO: 12742 - RNA, 22 nt, Human
cagaagaugcagugucugagaa

SEQ ID NO: 12743 - RNA, 22 nt, Human
cagaagcaaaugccuugcugag

SEQ ID NO: 12744 - RNA, 22 nt, Human
cagaagcaagagccggagcuag

SEQ ID NO: 12745 - RNA, 22 nt, Human
cagaagcaaguagugauucuuu

SEQ ID NO: 12746 - RNA, 23 nt, Human
cagaagcaccuguugacugcugc

SEQ ID NO: 12747 - RNA, 22 nt, Human
cagaagcuuugcucauaaccau

SEQ ID NO: 12748 - RNA, 22 nt, Human
cagaagcuuugucuagucuuga

SEQ ID NO: 12749 - RNA, 17 nt, Human
cagaaggaagcauggca

SEQ ID NO: 12750 - RNA, 20 nt, Human
cagaaggucuaagcuuuaga

SEQ ID NO: 12751 - RNA, 22 nt, Human
cagaagguuugaaagaugucuu

SEQ ID NO: 12752 - RNA, 22 nt, Human
cgggaacaugcuuucauuucag

SEQ ID NO: 12753 - RNA, 22 nt, Human
cgggagcacgggaggcggagcu

SEQ ID NO: 12754 - RNA, 22 nt, Human
cgggaggaaaggcgaggcucug

SEQ ID NO: 12755 - RNA, 22 nt, Human
cgggcacucagggucgaggugg

SEQ ID NO: 12756 - RNA, 22 nt, Human
cgggcagcggcguggccauggu

SEQ ID NO: 12757 - RNA, 22 nt, Human
cgggcagugcccagcggggcag

SEQ ID NO: 12758 - RNA, 22 nt, Human
cgggcuccgggucuuugcaguc

SEQ ID NO: 12759 - RNA, 22 nt, Human
cggggcaccgaccuccugccgc

SEQ ID NO: 12760 - RNA, 22 nt, Human
cggggcagaaaguugucuuuug

SEQ ID NO: 12761 - RNA, 22 nt, Human
cagcuacacaccagaacuauua

SEQ ID NO: 12762 - RNA, 22 nt, Human
cagcuacaggacgggcaucugc

SEQ ID NO: 12763 - RNA, 22 nt, Human
cagcuacagucugauugguuca

SEQ ID NO: 12764 - RNA, 22 nt, Human
cagcuacaguuccacugagcau

SEQ ID NO: 12765 - RNA, 22 nt, Human
cagcuagagggaugcuguguga

SEQ ID NO: 12766 - RNA, 22 nt, Human
cagcuagcuaagaaggccagag

SEQ ID NO: 12767 - RNA, 22 nt, Human
cagcuaguacaaugggagagca

SEQ ID NO: 12768 - RNA, 22 nt, Human
cagcuagucagaggcagggcca

SEQ ID NO: 12769 - RNA, 22 nt, Human
cagcuauggugacaaggucagg

SEQ ID NO: 12770 - RNA, 22 nt, Human
cagcuauuaauguuuuugcuga

SEQ ID NO: 12771 - RNA, 22 nt, Human
cagcuauuauuuucucuaaauu

SEQ ID NO: 12772 - RNA, 22 nt, Human
cagcuauucucugaaaugaaua

SEQ ID NO: 12773 - RNA, 22 nt, Human
cagcuauuuaucuuucaugaua

SEQ ID NO: 12774 - RNA, 22 nt, Human
cagcuauuuugccuaucauggu

SEQ ID NO: 12775 - RNA, 22 nt, Human
cagcucaaguuucccaggucag

SEQ ID NO: 12776 - RNA, 22 nt, Human
cagcucaauagccuaccuuaau

SEQ ID NO: 12777 - RNA, 22 nt, Human
cagcucacccaucacgucugcu

SEQ ID NO: 12778 - RNA, 22 nt, Human
cagcucacuuguuucaucuucu

SEQ ID NO: 12779 - RNA, 23 nt, Human
cagcucagaguguguccuguuuc

SEQ ID NO: 12780 - RNA, 23 nt, Human
cagcucagcacauaggagguacu

SEQ ID NO: 12781 - RNA, 19 nt, Human
cagcucaggacucagcccc

SEQ ID NO: 12782 - RNA, 22 nt, Human
cagcucaggcacuggcgcggga

SEQ ID NO: 12783 - RNA, 22 nt, Human
cagcucaggcucuccaugcucc

SEQ ID NO: 12784 - RNA, 22 nt, Human
cagcucagucuggagagaugca

SEQ ID NO: 12785 - RNA, 22 nt, Human
cagcucaguuucaauaccaggu

SEQ ID NO: 12786 - RNA, 22 nt, Human
cagcucauuccucaaucuagga

SEQ ID NO: 12787 - RNA, 21 nt, Human
cagcuccacuaaagcagcugu

SEQ ID NO: 12788 - RNA, 22 nt, Human
cagcuccagcccaggcagcucc

SEQ ID NO: 12789 - RNA, 22 nt, Human
cagcuccagccugacaccaaga

SEQ ID NO: 12790 - RNA, 22 nt, Human
cagcuccagcucugggcgccuc

SEQ ID NO: 12791 - RNA, 22 nt, Human
cagcucccagagugaccagcag

SEQ ID NO: 12792 - RNA, 22 nt, Human
cagcuccugccugggcagcugu

SEQ ID NO: 12793 - RNA, 22 nt, Human
cagcuccugggccaucuccuag

SEQ ID NO: 12794 - RNA, 22 nt, Human
cagcuccuguuggucuugagga

SEQ ID NO: 12795 - RNA, 22 nt, Human
cagcucuccacccuccugguuc

SEQ ID NO: 12796 - RNA, 22 nt, Human
cagcucugagacugaggcuaug

SEQ ID NO: 12797 - RNA, 21 nt, Human
cagcucugagauuucuacuag

SEQ ID NO: 12798 - RNA, 22 nt, Human
cagcucugccucuggggcugag

SEQ ID NO: 12799 - RNA, 22 nt, Human
cagcucuggcagagcccaaccc

SEQ ID NO: 12800 - RNA, 22 nt, Human
cagcucuggcuauugaggacca

SEQ ID NO: 12801 - RNA, 22 nt, Human
cagcucugguccagggagggca

SEQ ID NO: 12802 - RNA, 22 nt, Human
cagcucugguuccugggcccag

SEQ ID NO: 12803 - RNA, 22 nt, Human
cagcucugucuguagaaacuuc

SEQ ID NO: 12804 - RNA, 22 nt, Human
cagcucugugggagcguaugug

SEQ ID NO: 12805 - RNA, 22 nt, Human
cagcucuguguauuuuccccac

SEQ ID NO: 12806 - RNA, 22 nt, Human
cagcucuuagagggagacagac

SEQ ID NO: 12807 - RNA, 22 nt, Human
cagcucuucagugccugagaua

SEQ ID NO: 12808 - RNA, 22 nt, Human
cagcucuuccuacccuaguugg

SEQ ID NO: 12809 - RNA, 22 nt, Human
cagcucuuccucccaccggaca

SEQ ID NO: 12810 - RNA, 22 nt, Human
cagcucuuggagccuccaguaa

SEQ ID NO: 12811 - RNA, 22 nt, Human
cagcucuuuauugaaacaaaaa

SEQ ID NO: 12812 - RNA, 22 nt, Human
cagcucuuugaguauuccauuu

SEQ ID NO: 12813 - RNA, 22 nt, Human
cagcugaagagaggugcugagu

SEQ ID NO: 12814 - RNA, 22 nt, Human
cagcugaagcucuugucaaagg

SEQ ID NO: 12815 - RNA, 22 nt, Human
cagcugaagguaggaaccagga

SEQ ID NO: 12816 - RNA, 22 nt, Human
cagcugaauggcucccugcuaa

SEQ ID NO: 12817 - RNA, 22 nt, Human
cagcugaauucuucagacucca

SEQ ID NO: 12818 - RNA, 22 nt, Human
cagcugacaagaguccuuggag

SEQ ID NO: 12819 - RNA, 22 nt, Human
cagcugacacuuugaccuagag

SEQ ID NO: 12820 - RNA, 22 nt, Human
cagcugacuucauaggaagaca

SEQ ID NO: 12821 - RNA, 22 nt, Human
cagcugagaaaggcaggcucac

SEQ ID NO: 12822 - RNA, 22 nt, Human
cagcugagaguagaaauggagg

SEQ ID NO: 12823 - RNA, 22 nt, Human
cagcugagcaucacuagucugg

SEQ ID NO: 12824 - RNA, 22 nt, Human
cagcugaggaauacuagaugua

SEQ ID NO: 12825 - RNA, 18 nt, Human
cagcugaggaccaaacug

SEQ ID NO: 12826 - RNA, 22 nt, Human
cagcugaggucaaagaagcagg

SEQ ID NO: 12827 - RNA, 22 nt, Human
cagcugaggucuuuuuuaugug

SEQ ID NO: 12828 - RNA, 22 nt, Human
cagcugaguguuggcauguuca

SEQ ID NO: 12829 - RNA, 22 nt, Human
cagcugauuugagaaagaauga

SEQ ID NO: 12830 - RNA, 22 nt, Human
cagcugcagaaagcaagcaggu

SEQ ID NO: 12831 - RNA, 22 nt, Human
cagcugccacuugcucucggcu

SEQ ID NO: 12832 - RNA, 18 nt, Human
cagcugccagcucaugga

SEQ ID NO: 12833 - RNA, 22 nt, Human
cagcugcccaggccaccuggag

SEQ ID NO: 12834 - RNA, 22 nt, Human
cagcugcccauccugggaaaug

SEQ ID NO: 12835 - RNA, 22 nt, Human
cagcugccccauaaaucacagu

SEQ ID NO: 12836 - RNA, 22 nt, Human
cagcugccuaugaccuagccuc

SEQ ID NO: 12837 - RNA, 20 nt, Human
cagcugccuggcucugggau

SEQ ID NO: 12838 - RNA, 22 nt, Human
cagcugcuuuaguuuuccaucc

SEQ ID NO: 12839 - RNA, 22 nt, Human
cagcuggaucccugcagaacuu

SEQ ID NO: 12840 - RNA, 22 nt, Human
cagcuggccaaucagggcgccc

SEQ ID NO: 12841 - RNA, 22 nt, Human
cagcuggccugaucccuguggc

SEQ ID NO: 12842 - RNA, 22 nt, Human
cagcuggcgggcagagccgcca

SEQ ID NO: 12843 - RNA, 22 nt, Human
cagcuggcguggagugauugca

SEQ ID NO: 12844 - RNA, 22 nt, Human
cagcuggcuggucagugcacaa

SEQ ID NO: 12845 - RNA, 22 nt, Human
cagcugggagcuccauuagaua

SEQ ID NO: 12846 - RNA, 22 nt, Human
cagcugggccuccugagcccug

SEQ ID NO: 12847 - RNA, 22 nt, Human
cagcuggguggcucuucugcuc

SEQ ID NO: 12848 - RNA, 22 nt, Human
cagcugguucagugucugguga

SEQ ID NO: 12849 - RNA, 22 nt, Human
cagcugguugaagaggagcugg

SEQ ID NO: 12850 - RNA, 22 nt, Human
cagcuguccaaacacauuaacu

SEQ ID NO: 12851 - RNA, 22 nt, Human
cagcugucucagggaggugauc

SEQ ID NO: 12852 - RNA, 22 nt, Human
cagcugucugaagcaggagucc

SEQ ID NO: 12853 - RNA, 22 nt, Human
cagcugucugcugaaggaagcu

SEQ ID NO: 12854 - RNA, 17 nt, Human
cagcugugagagccuua

SEQ ID NO: 12855 - RNA, 18 nt, Human
cagcugugcccuguuugg

SEQ ID NO: 12856 - RNA, 22 nt, Human
cagcugugcuagaagccacgaa

SEQ ID NO: 12857 - RNA, 22 nt, Human
cagcugugggccugacguggca

SEQ ID NO: 12858 - RNA, 22 nt, Human
cagcuguguagaugcaggguca

SEQ ID NO: 12859 - RNA, 22 nt, Human
cagcuguguaugagagcaugcu

SEQ ID NO: 12860 - RNA, 22 nt, Human
cagcuguucacauuuccaaaac

SEQ ID NO: 12861 - RNA, 22 nt, Human
caggaugagaagggcucuuacg

SEQ ID NO: 12862 - RNA, 18 nt, Human
caggaugagugaugggga

SEQ ID NO: 12863 - RNA, 19 nt, Human
caggaugaucccaugacac

SEQ ID NO: 12864 - RNA, 22 nt, Human
caggaugcuucuggggccaggc

SEQ ID NO: 12865 - RNA, 22 nt, Human
caggauggagggagggcuguua

SEQ ID NO: 12866 - RNA, 22 nt, Human
caggaugggugucggccagcac

SEQ ID NO: 12867 - RNA, 22 nt, Human
caggauggucucgaucuccuga

SEQ ID NO: 12868 - RNA, 22 nt, Human
caggauuaaggugaggggagua

SEQ ID NO: 12869 - RNA, 22 nt, Human
caggauugaaugcuucucccug

SEQ ID NO: 12870 - RNA, 22 nt, Human
caggauuucauacaucuuuacu

SEQ ID NO: 12871 - RNA, 22 nt, Human
caggcaagcacggugaaccugg

SEQ ID NO: 12872 - RNA, 22 nt, Human
caggcacaaauuucuagauaag

SEQ ID NO: 12873 - RNA, 22 nt, Human
caggcacaaugagcgccaucuu

SEQ ID NO: 12874 - RNA, 22 nt, Human
caggcacacugucuacacugag

SEQ ID NO: 12875 - RNA, 22 nt, Human
caggcacagaguuauucauuua

SEQ ID NO: 12876 - RNA, 22 nt, Human
caggcacagugggguccucucu

SEQ ID NO: 12877 - RNA, 22 nt, Human
caggcacaugggagcucaucau

SEQ ID NO: 12878 - RNA, 22 nt, Human
cuacauuuguucaaauaagcug

SEQ ID NO: 12879 - RNA, 22 nt, Human
cuacauuuguucuauagcuuuu

SEQ ID NO: 12880 - RNA, 22 nt, Human
cuacauuuuaauaagcugcuua

SEQ ID NO: 12881 - RNA, 22 nt, Human
cuacccagcaccuaggcugccu

SEQ ID NO: 12882 - RNA, 22 nt, Human
cuacccaggcuggagugcagua

SEQ ID NO: 12883 - RNA, 16 nt, Human
cuacccagugagaagg

SEQ ID NO: 12884 - RNA, 22 nt, Human
cuacccuguauuuagagaugca

SEQ ID NO: 12885 - RNA, 22 nt, Human
cuacccuuaaguuucugugggg

SEQ ID NO: 12886 - RNA, 22 nt, Human
cuaccuuaucagagugguaagg

SEQ ID NO: 12887 - RNA, 22 nt, Human
cuacuauaaaauacacaucugu

SEQ ID NO: 12888 - RNA, 22 nt, Human
cuacucugaauugaagugauau

SEQ ID NO: 12889 - RNA, 22 nt, Human
cuacucuuuugagucuucagau

SEQ ID NO: 12890 - RNA, 22 nt, Human
cuacugaauuagacugcauuuu

SEQ ID NO: 12891 - RNA, 22 nt, Human
cuacuguccauaaaguauaacu

SEQ ID NO: 12892 - RNA, 22 nt, Human
cuacuguuguguuuuaaaggua

SEQ ID NO: 12893 - RNA, 22 nt, Human
cuacuucuguggcucuaagaga

SEQ ID NO: 12894 - RNA, 22 nt, Human
cuacuuguucacuguaggucgc

SEQ ID NO: 12895 - RNA, 22 nt, Human
cuacuuuaacauggaggcacuu

SEQ ID NO: 12896 - RNA, 22 nt, Human
cuacuuuaauuuucugcagaga

SEQ ID NO: 12897 - RNA, 22 nt, Human
cuacuuuaccuccaucagacug

SEQ ID NO: 12898 - RNA, 22 nt, Human
cuacuuugcugcccagcagugc

SEQ ID NO: 12899 - RNA, 22 nt, Human
cuagaaacgccuuuagcacaac

SEQ ID NO: 12900 - RNA, 22 nt, Human
cuagaaauacaggcacgugcca

SEQ ID NO: 12901 - RNA, 22 nt, Human
cuagaaaugcucaagagaaagu

SEQ ID NO: 12902 - RNA, 22 nt, Human
cuagaaauucugauucaguagg

SEQ ID NO: 12903 - RNA, 22 nt, Human
cuagaacaaauuaggaggcaua

SEQ ID NO: 12904 - RNA, 22 nt, Human
cuagaaggaagcccagcacuuc

SEQ ID NO: 12905 - RNA, 22 nt, Human
cuagaauacucguauuauuccc

SEQ ID NO: 12906 - RNA, 22 nt, Human
cuagacagaggcaagcgcauua

SEQ ID NO: 12907 - RNA, 22 nt, Human
cuagagaaaaagcuuagguacg

SEQ ID NO: 12908 - RNA, 22 nt, Human
cuagagaaacgccgugggagga

SEQ ID NO: 12909 - RNA, 22 nt, Human
cuagagaauugucuugagaguu

SEQ ID NO: 12910 - RNA, 22 nt, Human
cuagaggaacaguuucagguuu

SEQ ID NO: 12911 - RNA, 22 nt, Human
cuagaggggaaaaaggucuugu

SEQ ID NO: 12912 - RNA, 22 nt, Human
cuagagguagaggcagugggaa

SEQ ID NO: 12913 - RNA, 22 nt, Human
cuagaucagcuaacuuuccagu

SEQ ID NO: 12914 - RNA, 22 nt, Human
cuagauccgcagguuuucagug

SEQ ID NO: 12915 - RNA, 22 nt, Human
cuagaugccaauuuuuauggau

SEQ ID NO: 12916 - RNA, 22 nt, Human
cuagauuugcaugccuacacca

SEQ ID NO: 12917 - RNA, 22 nt, Human
cuagcacagcccauucagucua

SEQ ID NO: 12918 - RNA, 22 nt, Human
cuagcaguguacucaacaaggg

SEQ ID NO: 12919 - RNA, 22 nt, Human
cuagcaucucacugauuuacug

SEQ ID NO: 12920 - RNA, 22 nt, Human
cuagccagaugauucccaaaua

SEQ ID NO: 12921 - RNA, 22 nt, Human
cuagcccuuggugagaacagcg

SEQ ID NO: 12922 - RNA, 22 nt, Human
cuagcuagcagcauuacaacaa

SEQ ID NO: 12923 - RNA, 22 nt, Human
cuaggaaauuuaaaauaugauu

SEQ ID NO: 12924 - RNA, 22 nt, Human
cuaggaacaguucaacaguuua

SEQ ID NO: 12925 - RNA, 22 nt, Human
cuaggaagagaaggaauucccc

SEQ ID NO: 12926 - RNA, 22 nt, Human
cuaggaagcugugcggacccug

SEQ ID NO: 12927 - RNA, 22 nt, Human
cuaggaauagcaaaguaggaca

SEQ ID NO: 12928 - RNA, 22 nt, Human
cuaggcagcuuugggugugaag

SEQ ID NO: 12929 - RNA, 22 nt, Human
cuaggcagggugcugugccaug

SEQ ID NO: 12930 - RNA, 22 nt, Human
cuaggccacuugcucucaugga

SEQ ID NO: 12931 - RNA, 22 nt, Human
cuaggccagagagaccucauga

SEQ ID NO: 12932 - RNA, 22 nt, Human
cuaggccaguuaggaagagaag

SEQ ID NO: 12933 - RNA, 22 nt, Human
cuaggccuucauaggcauggaa

SEQ ID NO: 12934 - RNA, 22 nt, Human
cuaggcuggagugcauuggcgu

SEQ ID NO: 12935 - RNA, 22 nt, Human
cuagggaacaagaugcccaggg

SEQ ID NO: 12936 - RNA, 22 nt, Human
cuagggaaggacaaccucuucc

SEQ ID NO: 12937 - RNA, 22 nt, Human
cuagggagcacuagcugccuug

SEQ ID NO: 12938 - RNA, 22 nt, Human
cuagggccaaaggcugugaugc

SEQ ID NO: 12939 - RNA, 22 nt, Human
cuagggcucgcaagggcuggag

SEQ ID NO: 12940 - RNA, 22 nt, Human
cuagggcuuccaagaugccuuc

SEQ ID NO: 12941 - RNA, 19 nt, Human
cuagggcuuggcagcaggc

SEQ ID NO: 12942 - RNA, 22 nt, Human
cuagggucaggggccugcgucg

SEQ ID NO: 12943 - RNA, 22 nt, Human
cuaggguggauuugugcagagu

SEQ ID NO: 12944 - RNA, 22 nt, Human
cuagggugugcagauuuugccu

SEQ ID NO: 12945 - RNA, 22 nt, Human
cuagguggugguggguugacau

SEQ ID NO: 12946 - RNA, 22 nt, Human
cuaguaaaguacucaaauagcc

SEQ ID NO: 12947 - RNA, 22 nt, Human
cuaguacaauuuuagcaagaug

SEQ ID NO: 12948 - RNA, 22 nt, Human
cuagucacuguaauaaucugcu

SEQ ID NO: 12949 - RNA, 22 nt, Human
cuaguccagucucaaaaugcua

SEQ ID NO: 12950 - RNA, 22 nt, Human
cuagucugugugggaccagggc

SEQ ID NO: 12951 - RNA, 22 nt, Human
cuaguucuagaucccugaggaa

SEQ ID NO: 12952 - RNA, 22 nt, Human
cuaguugaagaggcugucauca

SEQ ID NO: 12953 - RNA, 22 nt, Human
cuaguuguuuaauauugauuga

SEQ ID NO: 12954 - RNA, 22 nt, Human
cuauacacuuuuugaaaauaga

SEQ ID NO: 12955 - RNA, 22 nt, Human
cuauacaguaaccacagugauu

SEQ ID NO: 12956 - RNA, 22 nt, Human
cuauagaaacaaccucucuuuc

SEQ ID NO: 12957 - RNA, 22 nt, Human
cuauauacuuuucacagauguu

SEQ ID NO: 12958 - RNA, 22 nt, Human
cuauaucauaaaucugaagagg

SEQ ID NO: 12959 - RNA, 22 nt, Human
cuauauucuggaauguccauuu

SEQ ID NO: 12960 - RNA, 22 nt, Human
cuauauuucuuggcuuuaaaca

SEQ ID NO: 12961 - RNA, 22 nt, Human
cuaucaaacagccauuaauaua

SEQ ID NO: 12962 - RNA, 18 nt, Human
cuaucccuggagcuuggg

SEQ ID NO: 12963 - RNA, 20 nt, Human
cuaucuccuggcgugccuuc

SEQ ID NO: 12964 - RNA, 22 nt, Human
cuaucucuccacaaugccagug

SEQ ID NO: 12965 - RNA, 22 nt, Human
cuaucucuuguuuuccugaagc

SEQ ID NO: 12966 - RNA, 22 nt, Human
cuaugaaaggauuuggaguugu

SEQ ID NO: 12967 - RNA, 22 nt, Human
cuaugagaagaaaacaagauua

SEQ ID NO: 12968 - RNA, 22 nt, Human
cuauggaaacucaacauuuguu

SEQ ID NO: 12969 - RNA, 23 nt, Human
cuauggaauaccaaugauucuca

SEQ ID NO: 12970 - RNA, 22 nt, Human
acauggugugcugagaaugaca

SEQ ID NO: 12971 - RNA, 22 nt, Human
acauguaaaaauuaagguaaga

SEQ ID NO: 12972 - RNA, 22 nt, Human
acauguaggagagucacaaugc

SEQ ID NO: 12973 - RNA, 22 nt, Human
acaugucuacacauucugcaau

SEQ ID NO: 12974 - RNA, 21 nt, Human
acaugucucuaaucucaguga

SEQ ID NO: 12975 - RNA, 22 nt, Human
acaugucucuucugaaagacaa

SEQ ID NO: 12976 - RNA, 21 nt, Human
acaugucuggucauuuuuagc

SEQ ID NO: 12977 - RNA, 22 nt, Human
acaugugaaaucucauaguuag

SEQ ID NO: 12978 - RNA, 22 nt, Human
acaugugaguaaauuuaauguu

SEQ ID NO: 12979 - RNA, 22 nt, Human
acauguguaaaaguggauaaaa

SEQ ID NO: 12980 - RNA, 22 nt, Human
acauguguacuuuuaaggaugu

SEQ ID NO: 12981 - RNA, 22 nt, Human
acauguuuacauuaggugauau

SEQ ID NO: 12982 - RNA, 22 nt, Human
acauguuugauaaauauuuggg

SEQ ID NO: 12983 - RNA, 19 nt, Human
acauguuuugcagaacagc

SEQ ID NO: 12984 - RNA, 22 nt, Human
acauuaaaaaauguugcaugaa

SEQ ID NO: 12985 - RNA, 22 nt, Human
acauuaacaccauaaguguguu

SEQ ID NO: 12986 - RNA, 22 nt, Human
acauuaagaaacgagagagcaa

SEQ ID NO: 12987 - RNA, 22 nt, Human
acauuaagaugugcuguaggau

SEQ ID NO: 12988 - RNA, 22 nt, Human
acauuacacugugguccuguuc

SEQ ID NO: 12989 - RNA, 22 nt, Human
acauuagagaagcuuggagaug

SEQ ID NO: 12990 - RNA, 22 nt, Human
acauuagauaacucagaaagga

SEQ ID NO: 12991 - RNA, 22 nt, Human
acauuagaugacucuuucuuuc

SEQ ID NO: 12992 - RNA, 22 nt, Human
acauuaguuucucagaucauuu

SEQ ID NO: 12993 - RNA, 21 nt, Human
acauuauaauucauauuccac

SEQ ID NO: 12994 - RNA, 22 nt, Human
acauuauagcuuugaguuugga

SEQ ID NO: 12995 - RNA, 22 nt, Human
acauuaugagcccacuggugaa

SEQ ID NO: 12996 - RNA, 22 nt, Human
acauucaaaauuagguuaguug

SEQ ID NO: 12997 - RNA, 22 nt, Human
acauucaaaauugugguuuaga

SEQ ID NO: 12998 - RNA, 22 nt, Human
acauucaaccaauguuugcuau

SEQ ID NO: 12999 - RNA, 22 nt, Human
acauucaaggccuucugacaca

SEQ ID NO: 13000 - RNA, 22 nt, Human
acauucuacaguuaaccauuag

SEQ ID NO: 13001 - RNA, 22 nt, Human
acauucuagaagagcuucacuu

SEQ ID NO: 13002 - RNA, 22 nt, Human
acauucuagaagucuuugcaau

SEQ ID NO: 13003 - RNA, 22 nt, Human
acauucuagauauguuauauuu

SEQ ID NO: 13004 - RNA, 22 nt, Human
acauucuaugguugaugaguug

SEQ ID NO: 13005 - RNA, 22 nt, Human
acauucugaaaaacaguguuuu

SEQ ID NO: 13006 - RNA, 22 nt, Human
acauucugggugauguucuuca

SEQ ID NO: 13007 - RNA, 22 nt, Human
acauucuuaacaguuaaaaacu

SEQ ID NO: 13008 - RNA, 22 nt, Human
acauucuuucgaugucugauuu

SEQ ID NO: 13009 - RNA, 22 nt, Human
acauugaagggaaugcaaagau

SEQ ID NO: 13010 - RNA, 22 nt, Human
acauugaagggcuauccaauag

SEQ ID NO: 13011 - RNA, 22 nt, Human
acauugaucagccucccaugca

SEQ ID NO: 13012 - RNA, 22 nt, Human
acauugaugaaaagguaucauu

SEQ ID NO: 13013 - RNA, 18 nt, Human
acauugauggcuuuaagc

SEQ ID NO: 13014 - RNA, 20 nt, Human
acauugauuauguuuguaga

SEQ ID NO: 13015 - RNA, 22 nt, Human
acauuggucacugaagaaugag

SEQ ID NO: 13016 - RNA, 22 nt, Human
acauuguuaguagaccaguggc

SEQ ID NO: 13017 - RNA, 22 nt, Human
acauuguuccagcgauagagaa

SEQ ID NO: 13018 - RNA, 22 nt, Human
acauuguuccugagaacuuggg

SEQ ID NO: 13019 - RNA, 22 nt, Human
acauuguugugcaauuauaguu

SEQ ID NO: 13020 - RNA, 19 nt, Human
acauuuaaauucagaucuc

SEQ ID NO: 13021 - RNA, 22 nt, Human
acauuuacagugcuagacaauc

SEQ ID NO: 13022 - RNA, 22 nt, Human
acauuuacccuggaacauugga

SEQ ID NO: 13023 - RNA, 22 nt, Human
acauuuagaguucuuuacucca

SEQ ID NO: 13024 - RNA, 22 nt, Human
acauuuagaugguguuauagua

SEQ ID NO: 13025 - RNA, 22 nt, Human
acauuucacuguucacagcagg

SEQ ID NO: 13026 - RNA, 22 nt, Human
acauuucagauguaaugugaug

SEQ ID NO: 13027 - RNA, 22 nt, Human
acauuucagcgugcaugacaug

SEQ ID NO: 13028 - RNA, 17 nt, Human
acauuuccuaacugaag

SEQ ID NO: 13029 - RNA, 22 nt, Human
acauuucgugcucuguuuuguu

SEQ ID NO: 13030 - RNA, 18 nt, Human
acauuucuaggugaaagc

SEQ ID NO: 13031 - RNA, 22 nt, Human
acauuucuaguuguucaucucc

SEQ ID NO: 13032 - RNA, 22 nt, Human
acauuucuauagugcaucuguu

SEQ ID NO: 13033 - RNA, 22 nt, Human
acauuucucagggaguuuugcu

SEQ ID NO: 13034 - RNA, 22 nt, Human
acauuucucagguaagucauuu

SEQ ID NO: 13035 - RNA, 18 nt, Human
acauuucuccuucugacc

SEQ ID NO: 13036 - RNA, 18 nt, Human
acauuucucucugcguga

SEQ ID NO: 13037 - RNA, 22 nt, Human
acauuucucuuagaguuggacu

SEQ ID NO: 13038 - RNA, 22 nt, Human
acauuucugagcagggagcugu

SEQ ID NO: 13039 - RNA, 22 nt, Human
acauuucugcuagaauagguga

SEQ ID NO: 13040 - RNA, 22 nt, Human
acauuucuucccuuuagcagaa

SEQ ID NO: 13041 - RNA, 22 nt, Human
acauuucuuccuaauuaucccu

SEQ ID NO: 13042 - RNA, 22 nt, Human
acauuucuuugcuagacagcag

SEQ ID NO: 13043 - RNA, 22 nt, Human
acauuugaaauucugaacagau

SEQ ID NO: 13044 - RNA, 22 nt, Human
acauuugacucuguucauauua

SEQ ID NO: 13045 - RNA, 22 nt, Human
acauuugagcauauuucuuguc

SEQ ID NO: 13046 - RNA, 22 nt, Human
acauuugauauggaguugugua

SEQ ID NO: 13047 - RNA, 22 nt, Human
acauuugauugaugaaucaaau

SEQ ID NO: 13048 - RNA, 22 nt, Human
acauuugggacccucucuucac

SEQ ID NO: 13049 - RNA, 22 nt, Human
acauuugguugagcuguuguca

SEQ ID NO: 13050 - RNA, 19 nt, Human
acauuugucaagagaaggu

SEQ ID NO: 13051 - RNA, 22 nt, Human
acauuugucuggcuagaaaguu

SEQ ID NO: 13052 - RNA, 22 nt, Human
acauuugugcaacguauccaca

SEQ ID NO: 13053 - RNA, 22 nt, Human
acauuuguuucucuagaguagg

SEQ ID NO: 13054 - RNA, 22 nt, Human
acauuuugcccuuauuugcuga

SEQ ID NO: 13055 - RNA, 22 nt, Human
acauuuuucacauuuguagggu

SEQ ID NO: 13056 - RNA, 22 nt, Human
accaaaggcagagcugaacacu

SEQ ID NO: 13057 - RNA, 22 nt, Human
accaaagggcagaacaugagca

SEQ ID NO: 13058 - RNA, 22 nt, Human
accaaauauaucuuuugaccug

SEQ ID NO: 13059 - RNA, 22 nt, Human
accaaaugcugacagcaugacu

SEQ ID NO: 13060 - RNA, 22 nt, Human
accaaccagggacuuggcuccc

SEQ ID NO: 13061 - RNA, 22 nt, Human
accaagcuagaacauuacaggc

SEQ ID NO: 13062 - RNA, 22 nt, Human
accaaggaagagauucucaguu

SEQ ID NO: 13063 - RNA, 22 nt, Human
accaagugaguacuuggcagaa

SEQ ID NO: 13064 - RNA, 20 nt, Human
accaauguuagcuuaguacu

SEQ ID NO: 13065 - RNA, 18 nt, Human
accacagugcuuaauaug

SEQ ID NO: 13066 - RNA, 22 nt, Human
accacaguuucauucaugcagg

SEQ ID NO: 13067 - RNA, 22 nt, Human
accacaucgggcggacacuggg

SEQ ID NO: 13068 - RNA, 18 nt, Human
accacaugauaucuugcc

SEQ ID NO: 13069 - RNA, 22 nt, Human
accaccaggggauuuucagaac

SEQ ID NO: 13070 - RNA, 22 nt, Human
accacugcccauggugaaaacu

SEQ ID NO: 13071 - RNA, 22 nt, Human
accacuggccugguggggacca

SEQ ID NO: 13072 - RNA, 22 nt, Human
accacugguuuugcagaggcgc

SEQ ID NO: 13073 - RNA, 22 nt, Human
accacugucuacacauugacuc

SEQ ID NO: 13074 - RNA, 22 nt, Human
accacuuaucaucacuaucuca

SEQ ID NO: 13075 - RNA, 22 nt, Human
accacuuuacagaaauggaaag

SEQ ID NO: 13076 - RNA, 22 nt, Human
accagacacugugaagacaggc

SEQ ID NO: 13077 - RNA, 22 nt, Human
accagagaaaacacagcaggcu

SEQ ID NO: 13078 - RNA, 22 nt, Human
accagagacucuuucuaguccu

SEQ ID NO: 13079 - RNA, 18 nt, Human
acccucuggcuucugagc

SEQ ID NO: 13080 - RNA, 22 nt, Human
acccugagaaugagugucuccu

SEQ ID NO: 13081 - RNA, 19 nt, Human
acccugagaggugguccgg

SEQ ID NO: 13082 - RNA, 22 nt, Human
acccugagccaaaccaguuaga

SEQ ID NO: 13083 - RNA, 22 nt, Human
acccugcagggcagaggcuggu

SEQ ID NO: 13084 - RNA, 20 nt, Human
acccugcauacuggaaggcu

SEQ ID NO: 13085 - RNA, 22 nt, Human
acccugccaaggauggccccga

SEQ ID NO: 13086 - RNA, 20 nt, Human
acccugccaggcaugugaau

SEQ ID NO: 13087 - RNA, 22 nt, Human
acagaagaaguucaaggugaag

SEQ ID NO: 13088 - RNA, 22 nt, Human
acagaagacagaguguucaucu

SEQ ID NO: 13089 - RNA, 23 nt, Human
acagaagccaggagccgcugggc

SEQ ID NO: 13090 - RNA, 22 nt, Human
acagaagcucaagagagcagug

SEQ ID NO: 13091 - RNA, 22 nt, Human
acagaaggacuugagaaagaca

SEQ ID NO: 13092 - RNA, 22 nt, Human
acagaaggcggggacaaggcgg

SEQ ID NO: 13093 - RNA, 22 nt, Human
acagaaguggcuucaaagagca

SEQ ID NO: 13094 - RNA, 22 nt, Human
acagaaguguguguguaggaau

SEQ ID NO: 13095 - RNA, 23 nt, Human
acagaauaccauugacuaggugu

SEQ ID NO: 13096 - RNA, 22 nt, Human
acagaauagagacugccugcuc

SEQ ID NO: 13097 - RNA, 22 nt, Human
acagaauagguacagucaguca

SEQ ID NO: 13098 - RNA, 22 nt, Human
acagaauagucagcuguaggcc

SEQ ID NO: 13099 - RNA, 22 nt, Human
acagaauaguuggcccugcuau

SEQ ID NO: 13100 - RNA, 20 nt, Human
acagaauaugcugguugugg

SEQ ID NO: 13101 - RNA, 22 nt, Human
acagaauauuuggcaugcgucu

SEQ ID NO: 13102 - RNA, 22 nt, Human
acagaauucucucugcagaggc

SEQ ID NO: 13103 - RNA, 22 nt, Human
acagaauugaaaguauaaucug

SEQ ID NO: 13104 - RNA, 22 nt, Human
acagaauuuacacaucucuaaa

SEQ ID NO: 13105 - RNA, 22 nt, Human
acagaauuugcuugggcaaugg

SEQ ID NO: 13106 - RNA, 18 nt, Human
acagacacuuaguaugag

SEQ ID NO: 13107 - RNA, 22 nt, Human
acagacagggcaccugccuccu

SEQ ID NO: 13108 - RNA, 16 nt, Human
acagacaugagugagc

SEQ ID NO: 13109 - RNA, 22 nt, Human
acagacauuuuaauuauuaaau

SEQ ID NO: 13110 - RNA, 22 nt, Human
acagaccaaaaaaggauauugg

SEQ ID NO: 13111 - RNA, 22 nt, Human
acagaccugggcacagaaagga

SEQ ID NO: 13112 - RNA, 22 nt, Human
acagacugauucauugcucagg

SEQ ID NO: 13113 - RNA, 22 nt, Human
acagacuggaggagaauaguuu

SEQ ID NO: 13114 - RNA, 22 nt, Human
acagacugugagucucauuuuc

SEQ ID NO: 13115 - RNA, 22 nt, Human
acagacuguuugguucaugucu

SEQ ID NO: 13116 - RNA, 22 nt, Human
acagacuuguucccuagugagu

SEQ ID NO: 13117 - RNA, 22 nt, Human
acagagacaaauguuaguaguu

SEQ ID NO: 13118 - RNA, 22 nt, Human
acagagacucaugaaagaugac

SEQ ID NO: 13119 - RNA, 22 nt, Human
acagagacugggagcaagaggc

SEQ ID NO: 13120 - RNA, 22 nt, Human
acagagagaaacaaucagcagc

SEQ ID NO: 13121 - RNA, 22 nt, Human
acagagaucagaggcauaagca

SEQ ID NO: 13122 - RNA, 22 nt, Human
acagagaugcaaguguguauuu

SEQ ID NO: 13123 - RNA, 22 nt, Human
acagagauggcacagagaaggu

SEQ ID NO: 13124 - RNA, 22 nt, Human
acagagaugucagauuggcagc

SEQ ID NO: 13125 - RNA, 22 nt, Human
acagagcaacuugaguauccuc

SEQ ID NO: 13126 - RNA, 22 nt, Human
acagagcaaugcguguucucua

SEQ ID NO: 13127 - RNA, 22 nt, Human
acagagcaauucuuggguguuu

SEQ ID NO: 13128 - RNA, 22 nt, Human
acagagcaguaagaacacagcu

SEQ ID NO: 13129 - RNA, 22 nt, Human
acagagcauauaaagugcuuug

SEQ ID NO: 13130 - RNA, 21 nt, Human
acagagccgggcacaaagcug

SEQ ID NO: 13131 - RNA, 22 nt, Human
acagagcucccagccaucuccu

SEQ ID NO: 13132 - RNA, 22 nt, Human
acagagcuguacaugugccaug

SEQ ID NO: 13133 - RNA, 22 nt, Human
acagagcuguacuacuuacuga

SEQ ID NO: 13134 - RNA, 17 nt, Human
acagaggcaggagugga

SEQ ID NO: 13135 - RNA, 22 nt, Human
acagaggccccgugggagagcc

SEQ ID NO: 13136 - RNA, 22 nt, Human
acagaggccucggccugcccag

SEQ ID NO: 13137 - RNA, 19 nt, Human
acagagggcaacugagaaa

SEQ ID NO: 13138 - RNA, 22 nt, Human
acagaggucauggagaguucuc

SEQ ID NO: 13139 - RNA, 22 nt, Human
acagagguguuccagaccuagg

SEQ ID NO: 13140 - RNA, 22 nt, Human
acagagguuaggauggguugua

SEQ ID NO: 13141 - RNA, 22 nt, Human
acagaguaggugcugucgacug

SEQ ID NO: 13142 - RNA, 22 nt, Human
acagagucauaagcggagcucg

SEQ ID NO: 13143 - RNA, 22 nt, Human
acagaguccuagcugcaaagaa

SEQ ID NO: 13144 - RNA, 17 nt, Human
acagagugucccgcagu

SEQ ID NO: 13145 - RNA, 22 nt, Human
acagaguuagcagaaaguugga

SEQ ID NO: 13146 - RNA, 22 nt, Human
acagaguuguaaacauuuacca

SEQ ID NO: 13147 - RNA, 22 nt, Human
acagauaaaaguuguuuaaaau

SEQ ID NO: 13148 - RNA, 22 nt, Human
acagauaaagaaacaaucacag

SEQ ID NO: 13149 - RNA, 22 nt, Human
acagauaaggcaguuaagaguu

SEQ ID NO: 13150 - RNA, 22 nt, Human
acagauacagggacuugguauu

SEQ ID NO: 13151 - RNA, 20 nt, Human
acagauaccagggacauggg

SEQ ID NO: 13152 - RNA, 20 nt, Human
acagauacccugugcuggug

SEQ ID NO: 13153 - RNA, 22 nt, Human
acagauacucagcucuaugcuu

SEQ ID NO: 13154 - RNA, 21 nt, Human
acagauauuucauugaacauu

SEQ ID NO: 13155 - RNA, 22 nt, Human
acagaucaccuguuagccaaaa

SEQ ID NO: 13156 - RNA, 22 nt, Human
acagaugaauuuauggauggaa

SEQ ID NO: 13157 - RNA, 22 nt, Human
acagaugaggcccaucagucug

SEQ ID NO: 13158 - RNA, 22 nt, Human
acagaugauuuuuaugaaaaca

SEQ ID NO: 13159 - RNA, 22 nt, Human
acagaugcaaggaaaugauugc

SEQ ID NO: 13160 - RNA, 22 nt, Human
acagaugcgcuugguugccaga

SEQ ID NO: 13161 - RNA, 22 nt, Human
acagaugcuuacuggugguucc

SEQ ID NO: 13162 - RNA, 19 nt, Human
acagaugcuuuugcugccc

SEQ ID NO: 13163 - RNA, 22 nt, Human
acagauggggcacaaagccaca

SEQ ID NO: 13164 - RNA, 22 nt, Human
acagauggugagccgcugaugu

SEQ ID NO: 13165 - RNA, 22 nt, Human
acagauguacacucauauauaa

SEQ ID NO: 13166 - RNA, 21 nt, Human
acagaugugauaugcagucuu

SEQ ID NO: 13167 - RNA, 21 nt, Human
acagauuagcacaaugcaggc

SEQ ID NO: 13168 - RNA, 22 nt, Human
acagauuauggauauaugugga

SEQ ID NO: 13169 - RNA, 22 nt, Human
acagauuuggcccagccaaugc

SEQ ID NO: 13170 - RNA, 22 nt, Human
acagcaagccagcuugucacug

SEQ ID NO: 13171 - RNA, 22 nt, Human
acagcaauuuugugcacaagug

SEQ ID NO: 13172 - RNA, 22 nt, Human
acagcacaggaguugaaugggc

SEQ ID NO: 13173 - RNA, 21 nt, Human
acagcagacaggcuuaggacc

SEQ ID NO: 13174 - RNA, 22 nt, Human
acagcagaccccagugccaugg

SEQ ID NO: 13175 - RNA, 22 nt, Human
acagcagagacacucaggaggc

SEQ ID NO: 13176 - RNA, 22 nt, Human
acagcagagccuagcuuaaucu

SEQ ID NO: 13177 - RNA, 22 nt, Human
acagcagagccugguacuuacu

SEQ ID NO: 13178 - RNA, 22 nt, Human
acagcagaguaguuuuccaacu

SEQ ID NO: 13179 - RNA, 22 nt, Human
acagcagaguggagaugagcac

SEQ ID NO: 13180 - RNA, 22 nt, Human
acagcagaugacaacuauuuau

SEQ ID NO: 13181 - RNA, 22 nt, Human
acagcagccugcagcccugugu

SEQ ID NO: 13182 - RNA, 22 nt, Human
acagcagccuuguugguuucga

SEQ ID NO: 13183 - RNA, 22 nt, Human
acagcagcgugaaguguguuau

SEQ ID NO: 13184 - RNA, 22 nt, Human
acagcaggagccuucauaugcu

SEQ ID NO: 13185 - RNA, 22 nt, Human
acagcaggauuuggcgauguug

SEQ ID NO: 13186 - RNA, 22 nt, Human
acagcaggcacacaaggauaga

SEQ ID NO: 13187 - RNA, 22 nt, Human
acagcaggcaugaagaaauguu

SEQ ID NO: 13188 - RNA, 22 nt, Human
acugagccucucuucccaccuc

SEQ ID NO: 13189 - RNA, 22 nt, Human
acugagcucccugagggcaggc

SEQ ID NO: 13190 - RNA, 22 nt, Human
acugagcugugacaaugcuuaa

SEQ ID NO: 13191 - RNA, 22 nt, Human
acugagggacucccaccuggca

SEQ ID NO: 13192 - RNA, 22 nt, Human
acugaggucuaucaugagccag

SEQ ID NO: 13193 - RNA, 22 nt, Human
acugaggucucagguggggaag

SEQ ID NO: 13194 - RNA, 22 nt, Human
acugagguggggucugcuugga

SEQ ID NO: 13195 - RNA, 21 nt, Human
acugagguuagaugccuugcc

SEQ ID NO: 13196 - RNA, 22 nt, Human
acugaguguaggacuuugaguu

SEQ ID NO: 13197 - RNA, 22 nt, Human
acugaugucuggggcagagucu

SEQ ID NO: 13198 - RNA, 22 nt, Human
acugauguuaacccucucuucu

SEQ ID NO: 13199 - RNA, 22 nt, Human
acugauuaugcguacucucuac

SEQ ID NO: 13200 - RNA, 22 nt, Human
acugcaaacauaguacuugagc

SEQ ID NO: 13201 - RNA, 22 nt, Human
acugcaacaccuccuggguuca

SEQ ID NO: 13202 - RNA, 20 nt, Human
acugcaagucacuuuuaggg

SEQ ID NO: 13203 - RNA, 22 nt, Human
acugcacacacagaauuuaggg

SEQ ID NO: 13204 - RNA, 21 nt, Human
acugcacacuaugugaauuga

SEQ ID NO: 13205 - RNA, 22 nt, Human
acugcacagaugaagcuguaaa

SEQ ID NO: 13206 - RNA, 22 nt, Human
acugcaccuguguaccaagaug

SEQ ID NO: 13207 - RNA, 22 nt, Human
acugcagacucuacaguuauaa

SEQ ID NO: 13208 - RNA, 22 nt, Human
acugcagcaaagcccgugucuu

SEQ ID NO: 13209 - RNA, 22 nt, Human
acugcagccuugaacucugggc

SEQ ID NO: 13210 - RNA, 22 nt, Human
acugcaggaugugcuccuauug

SEQ ID NO: 13211 - RNA, 19 nt, Human
acugcagggaggaggugug

SEQ ID NO: 13212 - RNA, 22 nt, Human
acugcagggcauccuggccaag

SEQ ID NO: 13213 - RNA, 22 nt, Human
acugccagaaucauucaaggaa

SEQ ID NO: 13214 - RNA, 23 nt, Human
acugccagauugaagguuucuua

SEQ ID NO: 13215 - RNA, 22 nt, Human
acugccaguuguuuuguccagu

SEQ ID NO: 13216 - RNA, 22 nt, Human
acugccauugguucuggaaaau

SEQ ID NO: 13217 - RNA, 22 nt, Human
acugccauuuugaauaauuacu

SEQ ID NO: 13218 - RNA, 22 nt, Human
acugcccucccaucuauugcaa

SEQ ID NO: 13219 - RNA, 19 nt, Human
acugccugaggcucacagg

SEQ ID NO: 13220 - RNA, 22 nt, Human
acugccugccucugauucugca

SEQ ID NO: 13221 - RNA, 21 nt, Human
acugccugucuccauagucua

SEQ ID NO: 13222 - RNA, 22 nt, Human
acugccuucaaacagcgccacc

SEQ ID NO: 13223 - RNA, 22 nt, Human
acugccuuccaccuauggauga

SEQ ID NO: 13224 - RNA, 22 nt, Human
acugccuucuuggccuucaaaa

SEQ ID NO: 13225 - RNA, 22 nt, Human
acugccuucuuuaauccuaguu

SEQ ID NO: 13226 - RNA, 20 nt, Human
acugccuugguucaguaggu

SEQ ID NO: 13227 - RNA, 22 nt, Human
acugccuugucucuugccuguu

SEQ ID NO: 13228 - RNA, 22 nt, Human
acugcucacgcauuacuugagc

SEQ ID NO: 13229 - RNA, 22 nt, Human
acugcucucuuugcaggggcua

SEQ ID NO: 13230 - RNA, 22 nt, Human
acugcugcagguccagccccuu

SEQ ID NO: 13231 - RNA, 20 nt, Human
acugcuguagaccaucugca

SEQ ID NO: 13232 - RNA, 22 nt, Human
acugcuuuagaccuagagcucu

SEQ ID NO: 13233 - RNA, 22 nt, Human
acugcuuugcucugcccccagg

SEQ ID NO: 13234 - RNA, 22 nt, Human
acugcuuuuagaaaucuauaga

SEQ ID NO: 13235 - RNA, 22 nt, Human
acugcuuuucagagucugccug

SEQ ID NO: 13236 - RNA, 22 nt, Human
acuggaaaacacuacuacaugc

SEQ ID NO: 13237 - RNA, 22 nt, Human
acuggaaauugagaggucacug

SEQ ID NO: 13238 - RNA, 22 nt, Human
acuggacagaggaaauauggag

SEQ ID NO: 13239 - RNA, 22 nt, Human
acuggaguauuguuuaauacca

SEQ ID NO: 13240 - RNA, 16 nt, Human
acuggaguggggaugc

SEQ ID NO: 13241 - RNA, 20 nt, Human
acuggaguucaugcuaagag

SEQ ID NO: 13242 - RNA, 22 nt, Human
acuggaguucaugguaaaguca

SEQ ID NO: 13243 - RNA, 22 nt, Human
acuggaguuuuaaaggaacuug

SEQ ID NO: 13244 - RNA, 22 nt, Human
acuggaugaggggaaagagaca

SEQ ID NO: 13245 - RNA, 22 nt, Human
acuggauggugucaugagcagc

SEQ ID NO: 13246 - RNA, 22 nt, Human
acuggcagaacgugaugcgggu

SEQ ID NO: 13247 - RNA, 22 nt, Human
acuggcagagggaaaaccauuc

SEQ ID NO: 13248 - RNA, 22 nt, Human
acuggcagccacaacuggcagg

SEQ ID NO: 13249 - RNA, 22 nt, Human
acuggcagguccaucgcccuuu

SEQ ID NO: 13250 - RNA, 22 nt, Human
acuggcaguggcagcagaaaga

SEQ ID NO: 13251 - RNA, 22 nt, Human
acuggcccgggagcagaggccu

SEQ ID NO: 13252 - RNA, 22 nt, Human
acuggcccuggcugcuaggcug

SEQ ID NO: 13253 - RNA, 22 nt, Human
acuggccuaucagcaugagucu

SEQ ID NO: 13254 - RNA, 22 nt, Human
acuggcugaaguuuacuuuuug

SEQ ID NO: 13255 - RNA, 22 nt, Human
acuggcugaggaaguugccacu

SEQ ID NO: 13256 - RNA, 22 nt, Human
acuggcugaguugcuucagcaa

SEQ ID NO: 13257 - RNA, 21 nt, Human
acuggcugccaugauccaggg

SEQ ID NO: 13258 - RNA, 22 nt, Human
acuggcugcgaucuuggcgcuu

SEQ ID NO: 13259 - RNA, 22 nt, Human
acuggcuggacucugaccucuu

SEQ ID NO: 13260 - RNA, 22 nt, Human
acuggcuggccacacccuggua

SEQ ID NO: 13261 - RNA, 21 nt, Human
acuggcugucuuccuacuggu

SEQ ID NO: 13262 - RNA, 22 nt, Human
acuggcugugcagagggcagua

SEQ ID NO: 13263 - RNA, 22 nt, Human
acuggcuucagggggaaagucc

SEQ ID NO: 13264 - RNA, 22 nt, Human
acuggcuugugagacaaugccu

SEQ ID NO: 13265 - RNA, 22 nt, Human
acugggaaauugcccuaguucu

SEQ ID NO: 13266 - RNA, 22 nt, Human
acugggaagauggaggcaagca

SEQ ID NO: 13267 - RNA, 22 nt, Human
acugggaaucucaggaacaugg

SEQ ID NO: 13268 - RNA, 22 nt, Human
acugggaauggagccugggccu

SEQ ID NO: 13269 - RNA, 22 nt, Human
acugggagaaacugacaccuua

SEQ ID NO: 13270 - RNA, 22 nt, Human
acugggcaaggauaugaugggu

SEQ ID NO: 13271 - RNA, 22 nt, Human
acugggcaucccauggcagagc

SEQ ID NO: 13272 - RNA, 22 nt, Human
acugggccaacuauuuguucua

SEQ ID NO: 13273 - RNA, 22 nt, Human
acugggccacauagaccugcug

SEQ ID NO: 13274 - RNA, 18 nt, Human
acugggccagcaggcagg

SEQ ID NO: 13275 - RNA, 20 nt, Human
acugggccuaggggaggcau

SEQ ID NO: 13276 - RNA, 22 nt, Human
acugggccuguacagagaaaac

SEQ ID NO: 13277 - RNA, 22 nt, Human
acugggcuccaaggaccuggag

SEQ ID NO: 13278 - RNA, 19 nt, Human
acugggcuuguccucgugg

SEQ ID NO: 13279 - RNA, 22 nt, Human
acuggggagagucaugccagca

SEQ ID NO: 13280 - RNA, 22 nt, Human
acuggggagugguuuugggaag

SEQ ID NO: 13281 - RNA, 22 nt, Human
acuggggcaggaaaguaugcug

SEQ ID NO: 13282 - RNA, 22 nt, Human
acuggggcagugggcagugguu

SEQ ID NO: 13283 - RNA, 20 nt, Human
acugguggacuguucauuga

SEQ ID NO: 13284 - RNA, 22 nt, Human
acugguggcuuucagacagaaa

SEQ ID NO: 13285 - RNA, 22 nt, Human
acugguguugauuuggaagggg

SEQ ID NO: 13286 - RNA, 22 nt, Human
acuguaaagagguguaucuuua

SEQ ID NO: 13287 - RNA, 22 nt, Human
acuguaaagcuuuucucaugcg

SEQ ID NO: 13288 - RNA, 22 nt, Human
acuguaaauuuugguugcaggu

SEQ ID NO: 13289 - RNA, 22 nt, Human
acuguaaccaguguggugagag

SEQ ID NO: 13290 - RNA, 22 nt, Human
acuguaauuggauugucugacu

SEQ ID NO: 13291 - RNA, 22 nt, Human
acuguacacacuucucugucuu

SEQ ID NO: 13292 - RNA, 22 nt, Human
acuguaccucaaacucuggaac

SEQ ID NO: 13293 - RNA, 22 nt, Human
acuguacucuucuagccaucug

SEQ ID NO: 13294 - RNA, 22 nt, Human
acuguacuguguauuguagaau

SEQ ID NO: 13295 - RNA, 22 nt, Human
acuguacuuuucuuggcuagau

SEQ ID NO: 13296 - RNA, 22 nt, Human
acuguagagaaucugagaaaaa

SEQ ID NO: 13297 - RNA, 22 nt, Human
acauugcaauaauaauucucuu

SEQ ID NO: 13298 - RNA, 22 nt, Human
acauuguaagcauauuagcuga

SEQ ID NO: 13299 - RNA, 22 nt, Human
acauuguacucuuagcguuguu

SEQ ID NO: 13300 - RNA, 22 nt, Human
acauuguaguuguucugcagca

SEQ ID NO: 13301 - RNA, 22 nt, Human
acauuguauaaugauuaucaca

SEQ ID NO: 13302 - RNA, 22 nt, Human
acauuguauacagacuuaguca

SEQ ID NO: 13303 - RNA, 23 nt, Human
acauuguucaaugaaaguuagga

SEQ ID NO: 13304 - RNA, 22 nt, Human
acauuguucacaggggcuucuc

SEQ ID NO: 13305 - RNA, 22 nt, Human
acauuguugccuagccaugagu

SEQ ID NO: 13306 - RNA, 22 nt, Human
acauuguuguuugcagcacagg

SEQ ID NO: 13307 - RNA, 22 nt, Human
acauuguuucugaccaugauga

SEQ ID NO: 13308 - RNA, 22 nt, Human
acauuuaaccuuugaggaacug

SEQ ID NO: 13309 - RNA, 22 nt, Human
acauuuaccuaguuaagucaau

SEQ ID NO: 13310 - RNA, 18 nt, Human
acauuuaggagagucaau

SEQ ID NO: 13311 - RNA, 22 nt, Human
acauuuauauaacucacuagga

SEQ ID NO: 13312 - RNA, 22 nt, Human
acauuuauuacucagguuguug

SEQ ID NO: 13313 - RNA, 22 nt, Human
acauuuauuuucagcugggaaa

SEQ ID NO: 13314 - RNA, 22 nt, Human
acauuuauuuuggcacggcaca

SEQ ID NO: 13315 - RNA, 22 nt, Human
acauuucagugagcuauugaag

SEQ ID NO: 13316 - RNA, 23 nt, Human
acauuucauauaaaagggaucag

SEQ ID NO: 13317 - RNA, 22 nt, Human
acauuucauguuuuccagagca

SEQ ID NO: 13318 - RNA, 22 nt, Human
acauuucauuugcaguauggau

SEQ ID NO: 13319 - RNA, 22 nt, Human
acauuuccuaacguauacacug

SEQ ID NO: 13320 - RNA, 22 nt, Human
acauuucucaucuaguagagua

SEQ ID NO: 13321 - RNA, 22 nt, Human
acauuucucauucuccccuaac

SEQ ID NO: 13322 - RNA, 22 nt, Human
acauuucucuugaugucucuau

SEQ ID NO: 13323 - RNA, 22 nt, Human
acauuucugcaucucagagcua

SEQ ID NO: 13324 - RNA, 22 nt, Human
acauuucugucuuagggacugu

SEQ ID NO: 13325 - RNA, 22 nt, Human
acauuucuuccacaugcugcug

SEQ ID NO: 13326 - RNA, 22 nt, Human
acauuucuugaugccucuguga

SEQ ID NO: 13327 - RNA, 22 nt, Human
acauuucuuucuauucaguagc

SEQ ID NO: 13328 - RNA, 22 nt, Human
acauuugaaaugccaugugagg

SEQ ID NO: 13329 - RNA, 20 nt, Human
acauuugaagucgcauuucu

SEQ ID NO: 13330 - RNA, 22 nt, Human
acauuugacuacauuuauauau

SEQ ID NO: 13331 - RNA, 22 nt, Human
acauuugacuguagauacuugc

SEQ ID NO: 13332 - RNA, 22 nt, Human
acauuugagcaucuacuaagug

SEQ ID NO: 13333 - RNA, 22 nt, Human
acauuugauaauuauaaagaca

SEQ ID NO: 13334 - RNA, 22 nt, Human
acauuuggcaagaaagagaaac

SEQ ID NO: 13335 - RNA, 22 nt, Human
acauuuggcaucuuguaacacu

SEQ ID NO: 13336 - RNA, 22 nt, Human
acauuuguacauuggcaugucu

SEQ ID NO: 13337 - RNA, 22 nt, Human
acauuugucuuccuccucagug

SEQ ID NO: 13338 - RNA, 22 nt, Human
acauuugucuucuuucagauua

SEQ ID NO: 13339 - RNA, 22 nt, Human
acauuugugcacaugugcaugg

SEQ ID NO: 13340 - RNA, 22 nt, Human
acugcccauuaaaggugcuuug

SEQ ID NO: 13341 - RNA, 22 nt, Human
acugcccauuaugguagucacu

SEQ ID NO: 13342 - RNA, 22 nt, Human
acugcccuggcaccacacaugc

SEQ ID NO: 13343 - RNA, 22 nt, Human
acugcccuguaacugccaggua

SEQ ID NO: 13344 - RNA, 19 nt, Human
acugccugcagguguuggg

SEQ ID NO: 13345 - RNA, 22 nt, Human
acugccuggcagagguuugcaa

SEQ ID NO: 13346 - RNA, 22 nt, Human
acugccuggccuggccucacug

SEQ ID NO: 13347 - RNA, 22 nt, Human
acugccuguagcccugagaugu

SEQ ID NO: 13348 - RNA, 22 nt, Human
acugccugugcacuggucuuuu

SEQ ID NO: 13349 - RNA, 23 nt, Human
acugccugugccgaucucucuca

SEQ ID NO: 13350 - RNA, 22 nt, Human
acugccuguuuggcauggcccc

SEQ ID NO: 13351 - RNA, 22 nt, Human
acugccuuagaacaaagcagga

SEQ ID NO: 13352 - RNA, 22 nt, Human
acugccuuauaauaugucaaca

SEQ ID NO: 13353 - RNA, 22 nt, Human
acugccuuuuccauuacuuaau

SEQ ID NO: 13354 - RNA, 22 nt, Human
acugcuaaaucuccaucgauua

SEQ ID NO: 13355 - RNA, 22 nt, Human
acugcuauuuuauaacagaaga

SEQ ID NO: 13356 - RNA, 22 nt, Human
acugcugauauaagaaaagauu

SEQ ID NO: 13357 - RNA, 22 nt, Human
acugcugauuauugaaguagag

SEQ ID NO: 13358 - RNA, 22 nt, Human
acugcuggaaacccagaauggu

SEQ ID NO: 13359 - RNA, 22 nt, Human
acugcuggcaugcauauacaaa

SEQ ID NO: 13360 - RNA, 22 nt, Human
acugcuggggcucauucaucuc

SEQ ID NO: 13361 - RNA, 22 nt, Human
acugcugugaucugauguaauu

SEQ ID NO: 13362 - RNA, 22 nt, Human
acugcuuacaaaaggaaagaau

SEQ ID NO: 13363 - RNA, 22 nt, Human
acugcuuccugagaaaucaaca

SEQ ID NO: 13364 - RNA, 22 nt, Human
acugcuuccuggauggccagca

SEQ ID NO: 13365 - RNA, 20 nt, Human
acugcuucuuucucugaccu

SEQ ID NO: 13366 - RNA, 16 nt, Human
acugcuuuucauaaga

SEQ ID NO: 13367 - RNA, 22 nt, Human
acuggaaaaccacugaaaugag

SEQ ID NO: 13368 - RNA, 22 nt, Human
acuggaaauaaauuuugaaugu

SEQ ID NO: 13369 - RNA, 22 nt, Human
acuggaaaugagaugauaucag

SEQ ID NO: 13370 - RNA, 22 nt, Human
acuggaagccaguugacaauca

SEQ ID NO: 13371 - RNA, 22 nt, Human
acuggaaugaaguuaaucugau

SEQ ID NO: 13372 - RNA, 23 nt, Human
acuggacagaguggacgaggcug

SEQ ID NO: 13373 - RNA, 22 nt, Human
acuggacuccccaagggccagg

SEQ ID NO: 13374 - RNA, 22 nt, Human
acuggacucuggagguuucgua

SEQ ID NO: 13375 - RNA, 18 nt, Human
acuggagcauuagcagcu

SEQ ID NO: 13376 - RNA, 20 nt, Human
acuggagccaucucagccua

SEQ ID NO: 13377 - RNA, 22 nt, Human
acuggagcccguggaggcgcag

SEQ ID NO: 13378 - RNA, 22 nt, Human
acuggagcugagagcaugggua

SEQ ID NO: 13379 - RNA, 22 nt, Human
acuggaggggaaaaugguagua

SEQ ID NO: 13380 - RNA, 22 nt, Human
acuggaguagaucugacugagu

SEQ ID NO: 13381 - RNA, 22 nt, Human
acuggaguccagacccaagagg

SEQ ID NO: 13382 - RNA, 22 nt, Human
acuggagugaguaucgaugaac

SEQ ID NO: 13383 - RNA, 22 nt, Human
acuggaguugauuacauaaaac

SEQ ID NO: 13384 - RNA, 22 nt, Human
acuggaguugggucaagauucu

SEQ ID NO: 13385 - RNA, 22 nt, Human
acuggaucuaauugguuauagu

SEQ ID NO: 13386 - RNA, 22 nt, Human
acuggauuccauugugcaaaga

SEQ ID NO: 13387 - RNA, 22 nt, Human
acuggauucucuuacacagaug

SEQ ID NO: 13388 - RNA, 22 nt, Human
acuggauugggaaaguacuuca

SEQ ID NO: 13389 - RNA, 19 nt, Human
acuggcacacaggggcugc

SEQ ID NO: 13390 - RNA, 22 nt, Human
acuggcacuauguuggagaaau

SEQ ID NO: 13391 - RNA, 22 nt, Human
acuggcagagacccugauggcc

SEQ ID NO: 13392 - RNA, 22 nt, Human
acuggcagaggauagcacuaau

SEQ ID NO: 13393 - RNA, 22 nt, Human
acuggcaggcugcuggccggcg

SEQ ID NO: 13394 - RNA, 22 nt, Human
acuggcagggggagccccgaga

SEQ ID NO: 13395 - RNA, 19 nt, Human
acuggcaguuucugcaugg

SEQ ID NO: 13396 - RNA, 22 nt, Human
acuggcaucccacugguacagg

SEQ ID NO: 13397 - RNA, 22 nt, Human
acuggcaucuguggguagaggc

SEQ ID NO: 13398 - RNA, 22 nt, Human
acuggccaggcagcaguagcuu

SEQ ID NO: 13399 - RNA, 22 nt, Human
acuggccaugaacuugggaucu

SEQ ID NO: 13400 - RNA, 22 nt, Human
acuggcccuugauugcaucagc

SEQ ID NO: 13401 - RNA, 22 nt, Human
acuggcugaaaguaaagaacac

SEQ ID NO: 13402 - RNA, 22 nt, Human
acuggcugaucaccugccucag

SEQ ID NO: 13403 - RNA, 22 nt, Human
acuggcuugaaguagauucaaa

SEQ ID NO: 13404 - RNA, 22 nt, Human
acuggcuuggcaggaggaagau

SEQ ID NO: 13405 - RNA, 22 nt, Human
acuggcuuugagggaauagcua

SEQ ID NO: 13406 - RNA, 22 nt, Human
accucacaagucucugucagcu

SEQ ID NO: 13407 - RNA, 22 nt, Human
accucagaggaggcuccuggcu

SEQ ID NO: 13408 - RNA, 22 nt, Human
accucaguucaauucaguuaga

SEQ ID NO: 13409 - RNA, 22 nt, Human
accucccugccucuuggcguca

SEQ ID NO: 13410 - RNA, 20 nt, Human
accuccuggaagcaggugcc

SEQ ID NO: 13411 - RNA, 21 nt, Human
accuccuggcauccuguuccc

SEQ ID NO: 13412 - RNA, 22 nt, Human
accuccuggcugcucauggaac

SEQ ID NO: 13413 - RNA, 22 nt, Human
accuccuggcuuaucauggaca

SEQ ID NO: 13414 - RNA, 22 nt, Human
accucuaaaaaauuagaagccu

SEQ ID NO: 13415 - RNA, 22 nt, Human
accucucaggucuuccucauau

SEQ ID NO: 13416 - RNA, 22 nt, Human
accucucugggccugcuuccug

SEQ ID NO: 13417 - RNA, 22 nt, Human
accucucuuguagcugcuggug

SEQ ID NO: 13418 - RNA, 19 nt, Human
accucugagaaugccaguc

SEQ ID NO: 13419 - RNA, 22 nt, Human
accucugcaacccuggaauggg

SEQ ID NO: 13420 - RNA, 20 nt, Human
accucugcaucaauccuuug

SEQ ID NO: 13421 - RNA, 22 nt, Human
accucugccacuuucuaacucu

SEQ ID NO: 13422 - RNA, 22 nt, Human
accucugcucaagaccccuccg

SEQ ID NO: 13423 - RNA, 22 nt, Human
accucuguauaguugccugugg

SEQ ID NO: 13424 - RNA, 22 nt, Human
accucuuugaaccucaguguga

SEQ ID NO: 13425 - RNA, 22 nt, Human
accugaauuuuggaugagcugu

SEQ ID NO: 13426 - RNA, 17 nt, Human
accugacaguacagugu

SEQ ID NO: 13427 - RNA, 22 nt, Human
accugagaccuaaucugacugu

SEQ ID NO: 13428 - RNA, 22 nt, Human
accugagacuugggaugggaau

SEQ ID NO: 13429 - RNA, 22 nt, Human
accugagccuagggagguugag

SEQ ID NO: 13430 - RNA, 22 nt, Human
accugagggagauuaggccuga

SEQ ID NO: 13431 - RNA, 22 nt, Human
accugccaagcaucaguggcag

SEQ ID NO: 13432 - RNA, 21 nt, Human
accugccacauugcagacuug

SEQ ID NO: 13433 - RNA, 22 nt, Human
accugccagugaauacuaucuu

SEQ ID NO: 13434 - RNA, 22 nt, Human
accugcccaugaaaauggggag

SEQ ID NO: 13435 - RNA, 22 nt, Human
accugcugugauucuaauuggc

SEQ ID NO: 13436 - RNA, 22 nt, Human
accugcuuuauuccuccugccu

SEQ ID NO: 13437 - RNA, 22 nt, Human
accuggaagugggugcuauggc

SEQ ID NO: 13438 - RNA, 22 nt, Human
accuggaaugggguugagagcu

SEQ ID NO: 13439 - RNA, 22 nt, Human
accuggaccugccaccuaugag

SEQ ID NO: 13440 - RNA, 22 nt, Human
accuggagcuuccaacucaacu

SEQ ID NO: 13441 - RNA, 22 nt, Human
accuggcauaagggcuugaguc

SEQ ID NO: 13442 - RNA, 22 nt, Human
accuggccauccagcuggcauc

SEQ ID NO: 13443 - RNA, 22 nt, Human
accuggcugguugugauuccca

SEQ ID NO: 13444 - RNA, 18 nt, Human
accuggcugugugagcug

SEQ ID NO: 13445 - RNA, 22 nt, Human
accuggcuucagagucuggcca

SEQ ID NO: 13446 - RNA, 20 nt, Human
accugggaaaaccuuuuccu

SEQ ID NO: 13447 - RNA, 22 nt, Human
accugggaacgcuuuguggagg

SEQ ID NO: 13448 - RNA, 22 nt, Human
accugggagagaggagccggcg

SEQ ID NO: 13449 - RNA, 20 nt, Human
accugggauuagauacccaa

SEQ ID NO: 13450 - RNA, 22 nt, Human
accugguuccuccucacugcug

SEQ ID NO: 13451 - RNA, 22 nt, Human
accugucaaguccagcgcaaca

SEQ ID NO: 13452 - RNA, 22 nt, Human
accugucaugucaauguucagu

SEQ ID NO: 13453 - RNA, 22 nt, Human
accuguggaucagauucuugua

SEQ ID NO: 13454 - RNA, 22 nt, Human
accuguguuucuguagugguca

SEQ ID NO: 13455 - RNA, 22 nt, Human
accuguguuuucccucaguuuc

SEQ ID NO: 13456 - RNA, 22 nt, Human
accuguuuaccugcaccuguuu

SEQ ID NO: 13457 - RNA, 22 nt, Human
accuguuuguguuuggacugca

SEQ ID NO: 13458 - RNA, 22 nt, Human
accuguuuuccuaucuagauug

SEQ ID NO: 13459 - RNA, 22 nt, Human
accuuaaacuuuacagccaagu

SEQ ID NO: 13460 - RNA, 22 nt, Human
agaagagaaauagugccacugu

SEQ ID NO: 13461 - RNA, 22 nt, Human
agaagagccuggggaccauggc

SEQ ID NO: 13462 - RNA, 22 nt, Human
agaagaggggugucccuguggc

SEQ ID NO: 13463 - RNA, 22 nt, Human
agaagaugucacugcagacagc

SEQ ID NO: 13464 - RNA, 22 nt, Human
agaagauuauuagagacuuugu

SEQ ID NO: 13465 - RNA, 22 nt, Human
agaagcaaggucugucaguaua

SEQ ID NO: 13466 - RNA, 19 nt, Human
agaagcaccagucauuccu

SEQ ID NO: 13467 - RNA, 22 nt, Human
agaagcacuacgauaggugguc

SEQ ID NO: 13468 - RNA, 22 nt, Human
agaagcagaaggaagcagggcc

SEQ ID NO: 13469 - RNA, 22 nt, Human
agaagcagcaagcccuucaaag

SEQ ID NO: 13470 - RNA, 23 nt, Human
agaagcagcuucuggaguaucgg

SEQ ID NO: 13471 - RNA, 22 nt, Human
agaagcauuauuuaauuuuacu

SEQ ID NO: 13472 - RNA, 20 nt, Human
agaagcauucaaagaaaacu

SEQ ID NO: 13473 - RNA, 22 nt, Human
agaagcauuggaccaggggccc

SEQ ID NO: 13474 - RNA, 22 nt, Human
agaagccaacagggcaggagag

SEQ ID NO: 13475 - RNA, 22 nt, Human
agaagccaauucugugugaguc

SEQ ID NO: 13476 - RNA, 22 nt, Human
agaagccacaggccucgucugg

SEQ ID NO: 13477 - RNA, 22 nt, Human
agaagccagaggcaguggguac

SEQ ID NO: 13478 - RNA, 22 nt, Human
agaagccauguuuaguaggaug

SEQ ID NO: 13479 - RNA, 22 nt, Human
agaagcguuccauuugaugggu

SEQ ID NO: 13480 - RNA, 22 nt, Human
agaagcucggguaagcuccauu

SEQ ID NO: 13481 - RNA, 22 nt, Human
agaagcugacagaugcagcagg

SEQ ID NO: 13482 - RNA, 23 nt, Human
agaagcugggagccuggggaugg

SEQ ID NO: 13483 - RNA, 22 nt, Human
agaagcugugguaugaaaugug

SEQ ID NO: 13484 - RNA, 22 nt, Human
agaaggaaggaagcauucuguu

SEQ ID NO: 13485 - RNA, 18 nt, Human
agaaggagcuaugggcag

SEQ ID NO: 13486 - RNA, 21 nt, Human
agaaggcaaaagcagacaucu

SEQ ID NO: 13487 - RNA, 22 nt, Human
agaaggcacagugcugcuaaga

SEQ ID NO: 13488 - RNA, 20 nt, Human
agaaggcaggagacaaaagg

SEQ ID NO: 13489 - RNA, 22 nt, Human
agaaggccaagaagaagccuau

SEQ ID NO: 13490 - RNA, 22 nt, Human
agaaggcccuguguggucugag

SEQ ID NO: 13491 - RNA, 22 nt, Human
agaaggccuaacuugggggcaa

SEQ ID NO: 13492 - RNA, 22 nt, Human
agaaggcuaaagaaacagauug

SEQ ID NO: 13493 - RNA, 22 nt, Human
agaaggcuagagacuugcccaa

SEQ ID NO: 13494 - RNA, 22 nt, Human
agaaggcuuaaaacauggaaua

SEQ ID NO: 13495 - RNA, 22 nt, Human
agaagggagagaaaguugguua

SEQ ID NO: 13496 - RNA, 23 nt, Human
agaaggugggccugcugaguuau

SEQ ID NO: 13497 - RNA, 22 nt, Human
agaaguaucuugggaaggcacu

SEQ ID NO: 13498 - RNA, 21 nt, Human
agaagucaauugaacugaaau

SEQ ID NO: 13499 - RNA, 20 nt, Human
agaagucagcucagaaguga

SEQ ID NO: 13500 - RNA, 22 nt, Human
agaagucauuuauguuagauga

SEQ ID NO: 13501 - RNA, 22 nt, Human
agaagucuggaauuccugcagg

SEQ ID NO: 13502 - RNA, 22 nt, Human
agaagugcuccagugaguuggg

SEQ ID NO: 13503 - RNA, 23 nt, Human
agaaguggaauggccgugggguc

SEQ ID NO: 13504 - RNA, 22 nt, Human
agaagugucagugcaggcagcu

SEQ ID NO: 13505 - RNA, 22 nt, Human
agaaguuguucaagguggugag

SEQ ID NO: 13506 - RNA, 22 nt, Human
agaaguuuaaccaggugcuacu

SEQ ID NO: 13507 - RNA, 22 nt, Human
agaaguuucacaauggguuuua

SEQ ID NO: 13508 - RNA, 22 nt, Human
agaaguuucuuugaacguguag

SEQ ID NO: 13509 - RNA, 22 nt, Human
agaaguuuuguugaauguguga

SEQ ID NO: 13510 - RNA, 22 nt, Human
agaauaaccaguguuucacagu

SEQ ID NO: 13511 - RNA, 22 nt, Human
agaauaauacugaaaugcugaa

SEQ ID NO: 13512 - RNA, 22 nt, Human
agaauaaucacugaaguucaaa

SEQ ID NO: 13513 - RNA, 21 nt, Human
agaauaaugguaucauuugcu

SEQ ID NO: 13514 - RNA, 22 nt, Human
agaauacaguaugcaaaaagau

SEQ ID NO: 13515 - RNA, 22 nt, Human
accuccaggaagcucuugguac

SEQ ID NO: 13516 - RNA, 22 nt, Human
accucccagaaaguuuugcagg

SEQ ID NO: 13517 - RNA, 22 nt, Human
accuccccgggagcagccuccu

SEQ ID NO: 13518 - RNA, 22 nt, Human
accucccuaacccuuuuggcuc

SEQ ID NO: 13519 - RNA, 22 nt, Human
accucccuggccuucugauucc

SEQ ID NO: 13520 - RNA, 22 nt, Human
accuccugaugagaguaaagga

SEQ ID NO: 13521 - RNA, 22 nt, Human
accucugaagggccaagcaaug

SEQ ID NO: 13522 - RNA, 19 nt, Human
accucugcagagauguuua

SEQ ID NO: 13523 - RNA, 22 nt, Human
accucugggaaaaguauggaaa

SEQ ID NO: 13524 - RNA, 22 nt, Human
accugaaaauuauuauuuccgc

SEQ ID NO: 13525 - RNA, 22 nt, Human
accugaaacucaacuuuaucuc

SEQ ID NO: 13526 - RNA, 22 nt, Human
accugaauccccagggccuucc

SEQ ID NO: 13527 - RNA, 22 nt, Human
accugagcaugccaggagagug

SEQ ID NO: 13528 - RNA, 22 nt, Human
accugaggccuccccagcagac

SEQ ID NO: 13529 - RNA, 20 nt, Human
accugaggucccuauggucu

SEQ ID NO: 13530 - RNA, 18 nt, Human
accugauuggcgcagccc

SEQ ID NO: 13531 - RNA, 22 nt, Human
accugcagccacuucucuccuu

SEQ ID NO: 13532 - RNA, 19 nt, Human
accugcaguaauaauuccu

SEQ ID NO: 13533 - RNA, 22 nt, Human
accugcccuuaacacugugugc

SEQ ID NO: 13534 - RNA, 22 nt, Human
accugccuaguugguucugccc

SEQ ID NO: 13535 - RNA, 22 nt, Human
accugccucagugcagcuggau

SEQ ID NO: 13536 - RNA, 22 nt, Human
accugccucuaagcagcaggug

SEQ ID NO: 13537 - RNA, 18 nt, Human
accugccuguucuucucu

SEQ ID NO: 13538 - RNA, 22 nt, Human
accugccuucucaaggacauga

SEQ ID NO: 13539 - RNA, 22 nt, Human
accugcucaacuggcuucucgc

SEQ ID NO: 13540 - RNA, 22 nt, Human
accugcugucuugggggaaugc

SEQ ID NO: 13541 - RNA, 22 nt, Human
accugcuugagccaguaugaga

SEQ ID NO: 13542 - RNA, 17 nt, Human
accuggagaccaagucc

SEQ ID NO: 13543 - RNA, 22 nt, Human
accuggagauccauggugucga

SEQ ID NO: 13544 - RNA, 22 nt, Human
accuggagggaaguucugacuu

SEQ ID NO: 13545 - RNA, 22 nt, Human
accuggcacagaguaugcucuc

SEQ ID NO: 13546 - RNA, 22 nt, Human
accuggccaguggggccgcgcu

SEQ ID NO: 13547 - RNA, 19 nt, Human
accuggcuggcgcacuugu

SEQ ID NO: 13548 - RNA, 22 nt, Human
accuggcuucuaaucauggcuc

SEQ ID NO: 13549 - RNA, 20 nt, Human
accuggcuugggggaggagu

SEQ ID NO: 13550 - RNA, 22 nt, Human
accuggcuuguuucuaccuccu

SEQ ID NO: 13551 - RNA, 22 nt, Human
accugggaaaaggaguggccau

SEQ ID NO: 13552 - RNA, 22 nt, Human
accugggaggcagagguugcag

SEQ ID NO: 13553 - RNA, 22 nt, Human
accugggagucacaccugagaa

SEQ ID NO: 13554 - RNA, 22 nt, Human
accugggucugguguugggacg

SEQ ID NO: 13555 - RNA, 22 nt, Human
accuguuuagaaagcuuaugag

SEQ ID NO: 13556 - RNA, 22 nt, Human
accuguuuguguccauuaguga

SEQ ID NO: 13557 - RNA, 22 nt, Human
accuguuuguuaagaaagcuuc

SEQ ID NO: 13558 - RNA, 22 nt, Human
accuguuuuagucuuuaaucau

SEQ ID NO: 13559 - RNA, 22 nt, Human
accuuaaaacugacacauggag

SEQ ID NO: 13560 - RNA, 22 nt, Human
accuuaaaggccgaaguaaaga

SEQ ID NO: 13561 - RNA, 22 nt, Human
accuuagaaaaucaaaauuaga

SEQ ID NO: 13562 - RNA, 22 nt, Human
accuuagaaagugacaaacgaa

SEQ ID NO: 13563 - RNA, 22 nt, Human
accuuauuuugaaauagauugu

SEQ ID NO: 13564 - RNA, 22 nt, Human
accuucaagaaacauuuccuug

SEQ ID NO: 13565 - RNA, 22 nt, Human
accuucaauuauuuuuguucca

SEQ ID NO: 13566 - RNA, 20 nt, Human
accuucaggaacuuaucagc

SEQ ID NO: 13567 - RNA, 22 nt, Human
accuucaggugagcacacagau

SEQ ID NO: 13568 - RNA, 22 nt, Human
accuugaacacaagaauuauug

SEQ ID NO: 13569 - RNA, 22 nt, Human
accuugaacccagcuugcugca

SEQ ID NO: 13570 - RNA, 20 nt, Human
accuugaacccgccagccau

SEQ ID NO: 13571 - RNA, 22 nt, Human
accuugaaggcagaggacaccu

SEQ ID NO: 13572 - RNA, 23 nt, Human
accuuggacuucccagcuuccag

SEQ ID NO: 13573 - RNA, 22 nt, Human
accuugggcaaccugcuccugc

SEQ ID NO: 13574 - RNA, 19 nt, Human
accuugggcaagugccuuc

SEQ ID NO: 13575 - RNA, 20 nt, Human
accuugggugagugacgguc

SEQ ID NO: 13576 - RNA, 22 nt, Human
accuuuauagcugauuaugaca

SEQ ID NO: 13577 - RNA, 22 nt, Human
accuuuaugauucacaauguau

SEQ ID NO: 13578 - RNA, 22 nt, Human
acucagaggaaaguugagauug

SEQ ID NO: 13579 - RNA, 22 nt, Human
acucagaggaccaaaaggaaag

SEQ ID NO: 13580 - RNA, 22 nt, Human
acucagaggcagcugcucaccc

SEQ ID NO: 13581 - RNA, 22 nt, Human
acucagaggggacugguguggu

SEQ ID NO: 13582 - RNA, 22 nt, Human
acucagaguagaaaauagguuc

SEQ ID NO: 13583 - RNA, 22 nt, Human
acucagaguuccugugcauagu

SEQ ID NO: 13584 - RNA, 22 nt, Human
acucagaguuugcguuccauac

SEQ ID NO: 13585 - RNA, 22 nt, Human
acucagaguuuuacccagagac

SEQ ID NO: 13586 - RNA, 22 nt, Human
acucagcuaaacucagucuaug

SEQ ID NO: 13587 - RNA, 22 nt, Human
acucagcugaugaagcacaagu

SEQ ID NO: 13588 - RNA, 23 nt, Human
acucagcuuugggagaugacuca

SEQ ID NO: 13589 - RNA, 22 nt, Human
acucaggaaauugagauaaugg

SEQ ID NO: 13590 - RNA, 22 nt, Human
acucaggaagaaagcagcuggu

SEQ ID NO: 13591 - RNA, 17 nt, Human
acucaggaucugggagu

SEQ ID NO: 13592 - RNA, 19 nt, Human
acucagggaaaggagaauu

SEQ ID NO: 13593 - RNA, 22 nt, Human
acucagugggcuugaugucgaa

SEQ ID NO: 13594 - RNA, 22 nt, Human
acucaucagccucuaggaaaga

SEQ ID NO: 13595 - RNA, 20 nt, Human
acucaucuacuccagacccu

SEQ ID NO: 13596 - RNA, 22 nt, Human
acucaucugccauuccuguacc

SEQ ID NO: 13597 - RNA, 22 nt, Human
acucaugauaugccuauaagau

SEQ ID NO: 13598 - RNA, 22 nt, Human
acucaugguagcacaggcugug

SEQ ID NO: 13599 - RNA, 22 nt, Human
acucaugucauguguucuuuac

SEQ ID NO: 13600 - RNA, 22 nt, Human
acuccacauuugaacacaguuc

SEQ ID NO: 13601 - RNA, 22 nt, Human
acuccagaauccuagggucagc

SEQ ID NO: 13602 - RNA, 22 nt, Human
acuccagagcucacaugucuaa

SEQ ID NO: 13603 - RNA, 22 nt, Human
acuccaggaaacuuaggggaaa

SEQ ID NO: 13604 - RNA, 22 nt, Human
acuccagggcuccaucccuugu

SEQ ID NO: 13605 - RNA, 22 nt, Human
acuccagggugacucugucuga

SEQ ID NO: 13606 - RNA, 22 nt, Human
acuccagguaggcacauugaca

SEQ ID NO: 13607 - RNA, 22 nt, Human
acuccaguuaccuuggcugagg

SEQ ID NO: 13608 - RNA, 22 nt, Human
acuccauacaauggcaggcugu

SEQ ID NO: 13609 - RNA, 23 nt, Human
acuccccagucucuucuugccaa

SEQ ID NO: 13610 - RNA, 22 nt, Human
acucccuuuucccguaaucuau

SEQ ID NO: 13611 - RNA, 22 nt, Human
acucccuuuucuacuucuaccc

SEQ ID NO: 13612 - RNA, 22 nt, Human
acuccugccacacagaugcugu

SEQ ID NO: 13613 - RNA, 22 nt, Human
acuccuggguuccggagauucu

SEQ ID NO: 13614 - RNA, 22 nt, Human
acuccuggguugcaguccucaa

SEQ ID NO: 13615 - RNA, 20 nt, Human
acuccugguaacuuuuguga

SEQ ID NO: 13616 - RNA, 17 nt, Human
acuccuggucugaaggg

SEQ ID NO: 13617 - RNA, 22 nt, Human
acuccuggugcugaugaagaga

SEQ ID NO: 13618 - RNA, 22 nt, Human
acuccugguucccaguugagau

SEQ ID NO: 13619 - RNA, 22 nt, Human
acucuaaauagauaaccaugca

SEQ ID NO: 13620 - RNA, 22 nt, Human
acucuaacuaauuaauaaagcc

SEQ ID NO: 13621 - RNA, 22 nt, Human
acucuaccaugccacuccauag

SEQ ID NO: 13622 - RNA, 22 nt, Human
acucuauaaagauaccucaauu

SEQ ID NO: 13623 - RNA, 22 nt, Human
acucucacuagcucugugaccu

SEQ ID NO: 13624 - RNA, 22 nt, Human
acucucccugcuauccacuucc

SEQ ID NO: 13625 - RNA, 22 nt, Human
agauauacagagaauuauucac

SEQ ID NO: 13626 - RNA, 22 nt, Human
agauaucuggaaaaaauguaug

SEQ ID NO: 13627 - RNA, 22 nt, Human
agauaucuguauuguuuccaau

SEQ ID NO: 13628 - RNA, 22 nt, Human
agauaugguuugcauaaauaag

SEQ ID NO: 13629 - RNA, 22 nt, Human
agauaugugcgucuuagauuga

SEQ ID NO: 13630 - RNA, 22 nt, Human
agauauguuaggcuuguucccu

SEQ ID NO: 13631 - RNA, 22 nt, Human
agauauucaaccaaacacuaau

SEQ ID NO: 13632 - RNA, 22 nt, Human
agauauuuaaaucagacaaaga

SEQ ID NO: 13633 - RNA, 22 nt, Human
agaucaaaucugggauuucuaa

SEQ ID NO: 13634 - RNA, 22 nt, Human
agaucacagucaauugcaaguu

SEQ ID NO: 13635 - RNA, 22 nt, Human
agaucagaaagccaauaucaua

SEQ ID NO: 13636 - RNA, 22 nt, Human
agaucagagaugcuaaaagagc

SEQ ID NO: 13637 - RNA, 22 nt, Human
agaucagaguggauugugcugc

SEQ ID NO: 13638 - RNA, 22 nt, Human
agaucagaucuccuuuugcauu

SEQ ID NO: 13639 - RNA, 22 nt, Human
agaucagauucugccuuuguga

SEQ ID NO: 13640 - RNA, 22 nt, Human
agaucaguuagauagcuugaug

SEQ ID NO: 13641 - RNA, 21 nt, Human
agaucauucuucugagcacuu

SEQ ID NO: 13642 - RNA, 22 nt, Human
agauccaggaugucccaaaaua

SEQ ID NO: 13643 - RNA, 21 nt, Human
agauccagugccauaaggccc

SEQ ID NO: 13644 - RNA, 22 nt, Human
agauccaucaucauauuuucua

SEQ ID NO: 13645 - RNA, 22 nt, Human
agaucccaaaucaccugcuuau

SEQ ID NO: 13646 - RNA, 22 nt, Human
agaucccaggauacuggccuau

SEQ ID NO: 13647 - RNA, 21 nt, Human
agaucccugaggagagcaucc

SEQ ID NO: 13648 - RNA, 22 nt, Human
agauccguggauuauaauuuag

SEQ ID NO: 13649 - RNA, 22 nt, Human
agauccuuaauuuaaucacauc

SEQ ID NO: 13650 - RNA, 22 nt, Human
agaucugaguaugauuugccug

SEQ ID NO: 13651 - RNA, 23 nt, Human
agaucugauguuaccaagaauug

SEQ ID NO: 13652 - RNA, 22 nt, Human
agaucuggaacugagguuuauu

SEQ ID NO: 13653 - RNA, 22 nt, Human
agaucuuaugaugcacagggca

SEQ ID NO: 13654 - RNA, 22 nt, Human
agaucuuuaaaaguuauuauua

SEQ ID NO: 13655 - RNA, 22 nt, Human
agaucuuuugguuauuauaaga

SEQ ID NO: 13656 - RNA, 22 nt, Human
agaugaaaauacgugacuuuaa

SEQ ID NO: 13657 - RNA, 22 nt, Human
agaugaaauuuguguugaguug

SEQ ID NO: 13658 - RNA, 22 nt, Human
agaugaagauaucugcaggggc

SEQ ID NO: 13659 - RNA, 22 nt, Human
agaugacuaacauaguauugcu

SEQ ID NO: 13660 - RNA, 22 nt, Human
agaugagggguagaaaggacuu

SEQ ID NO: 13661 - RNA, 22 nt, Human
agaugaugauaauugaaaggca

SEQ ID NO: 13662 - RNA, 22 nt, Human
agaugcauguuuaugucuuucc

SEQ ID NO: 13663 - RNA, 22 nt, Human
agaugcuauacauuguaagaca

SEQ ID NO: 13664 - RNA, 22 nt, Human
agaugcugaauuauugugcuuu

SEQ ID NO: 13665 - RNA, 22 nt, Human
agaugcugccucuccucacaag

SEQ ID NO: 13666 - RNA, 22 nt, Human
agaugcugucacacacacuguu

SEQ ID NO: 13667 - RNA, 22 nt, Human
agaugcugugucuguucccuug

SEQ ID NO: 13668 - RNA, 22 nt, Human
agaugcuuaaguuuucagugua

SEQ ID NO: 13669 - RNA, 22 nt, Human
agauggaaaauauagacagaga

SEQ ID NO: 13670 - RNA, 22 nt, Human
agauggaguggagaugaguaaa

SEQ ID NO: 13671 - RNA, 22 nt, Human
agauggauuucuuccagugaga

SEQ ID NO: 13672 - RNA, 22 nt, Human
agauggcagggguaccuggaag

SEQ ID NO: 13673 - RNA, 22 nt, Human
agauggcugggagcucuguuug

SEQ ID NO: 13674 - RNA, 22 nt, Human
agaugggccuucgagcaugccc

SEQ ID NO: 13675 - RNA, 22 nt, Human
agaugggcgcccuggacugagg

SEQ ID NO: 13676 - RNA, 22 nt, Human
agauggggcucaguguggaggc

SEQ ID NO: 13677 - RNA, 22 nt, Human
agauggguaacuggagucugcu

SEQ ID NO: 13678 - RNA, 22 nt, Human
agaugggucucccuuagcaccu

SEQ ID NO: 13679 - RNA, 16 nt, Human
agaugggugggucacu

SEQ ID NO: 13680 - RNA, 20 nt, Human
agauggguuaaagcuauggg

SEQ ID NO: 13681 - RNA, 22 nt, Human
agaugguccaucuauuuucuau

SEQ ID NO: 13682 - RNA, 20 nt, Human
agauggugaaggccagggag

SEQ ID NO: 13683 - RNA, 22 nt, Human
agauggugauagagcugggauu

SEQ ID NO: 13684 - RNA, 22 nt, Human
agaugguuaucuaagugaaaaa

SEQ ID NO: 13685 - RNA, 22 nt, Human
agaugguucagaauuauaaaga

SEQ ID NO: 13686 - RNA, 22 nt, Human
agaugguugguccauaggccua

SEQ ID NO: 13687 - RNA, 22 nt, Human
agauguaacgguagguggcauu

SEQ ID NO: 13688 - RNA, 22 nt, Human
agauguaguagugggucuuuua

SEQ ID NO: 13689 - RNA, 22 nt, Human
agauguggccggcuagggagag

SEQ ID NO: 13690 - RNA, 22 nt, Human
agaugugggugucaggcaguga

SEQ ID NO: 13691 - RNA, 22 nt, Human
agauguuuaaaaagaugacucu

SEQ ID NO: 13692 - RNA, 22 nt, Human
agauguuucaguaauuuaucuu

SEQ ID NO: 13693 - RNA, 21 nt, Human
agauguuucccccuuggcuuc

SEQ ID NO: 13694 - RNA, 22 nt, Human
agauguuuuguguauuucauca

SEQ ID NO: 13695 - RNA, 22 nt, Human
agauguuuuuccaggucuaauu

SEQ ID NO: 13696 - RNA, 21 nt, Human
agauuaaaaucugugagaagg

SEQ ID NO: 13697 - RNA, 20 nt, Human
agauuaggggcuuucuucuu

SEQ ID NO: 13698 - RNA, 22 nt, Human
agauuagguaugguuuaaguag

SEQ ID NO: 13699 - RNA, 21 nt, Human
agauuauaaagaaccuucuua

SEQ ID NO: 13700 - RNA, 22 nt, Human
agauuauuuaagacaggaacca

SEQ ID NO: 13701 - RNA, 22 nt, Human
agauucagaaaugaggagggcc

SEQ ID NO: 13702 - RNA, 22 nt, Human
agauucaggacuggccacagcc

SEQ ID NO: 13703 - RNA, 22 nt, Human
agauucaguuaaggcugguaga

SEQ ID NO: 13704 - RNA, 22 nt, Human
agauucauuauuaaugugaucu

SEQ ID NO: 13705 - RNA, 22 nt, Human
agauucauugcuuuaggcauug

SEQ ID NO: 13706 - RNA, 22 nt, Human
agauugauagauguuucuaaaa

SEQ ID NO: 13707 - RNA, 22 nt, Human
agauugcuaaugaaguucuuga

SEQ ID NO: 13708 - RNA, 22 nt, Human
agauugcuuuccaaaagcguug

SEQ ID NO: 13709 - RNA, 22 nt, Human
agauuggagauggaagaaaagu

SEQ ID NO: 13710 - RNA, 22 nt, Human
acugcucuguuuucauauguuu

SEQ ID NO: 13711 - RNA, 22 nt, Human
acugcugaccucaggucauccu

SEQ ID NO: 13712 - RNA, 22 nt, Human
acugcugauuaugaaagugaca

SEQ ID NO: 13713 - RNA, 22 nt, Human
acugcugauuuagcuuuguggg

SEQ ID NO: 13714 - RNA, 22 nt, Human
acugcuucuccaaugaauuaga

SEQ ID NO: 13715 - RNA, 22 nt, Human
acugcuuuaaaaaagcaagcuu

SEQ ID NO: 13716 - RNA, 22 nt, Human
acugcuuuaucugagaaguccu

SEQ ID NO: 13717 - RNA, 22 nt, Human
acugcuuuucuaagauucugug

SEQ ID NO: 13718 - RNA, 22 nt, Human
acuggaaaguugauuaugucca

SEQ ID NO: 13719 - RNA, 20 nt, Human
acuggacacugaggugagcu

SEQ ID NO: 13720 - RNA, 22 nt, Human
acuggacucacguauuccugag

SEQ ID NO: 13721 - RNA, 22 nt, Human
acuggagacugugucuuuugau

SEQ ID NO: 13722 - RNA, 22 nt, Human
acuggaguaaaggucacuugug

SEQ ID NO: 13723 - RNA, 22 nt, Human
acuggaguacaguggcgugaac

SEQ ID NO: 13724 - RNA, 22 nt, Human
acuggagucagggaaaaagugu

SEQ ID NO: 13725 - RNA, 22 nt, Human
acuggaguguuuggaggaugca

SEQ ID NO: 13726 - RNA, 22 nt, Human
acuggaguuauuauuugcagcu

SEQ ID NO: 13727 - RNA, 20 nt, Human
acuggaucuggcuggagcug

SEQ ID NO: 13728 - RNA, 19 nt, Human
acuggcaaaaaagguuaau

SEQ ID NO: 13729 - RNA, 22 nt, Human
acuggcaauagcaaaugcuugg

SEQ ID NO: 13730 - RNA, 20 nt, Human
acuggcacugguaggugugg

SEQ ID NO: 13731 - RNA, 22 nt, Human
acuggcagaacuggugauuguc

SEQ ID NO: 13732 - RNA, 22 nt, Human
acuggcagaauugaauaguugu

SEQ ID NO: 13733 - RNA, 22 nt, Human
acuggcagcagcagcccuuggg

SEQ ID NO: 13734 - RNA, 17 nt, Human
caguuggagacaagucc

SEQ ID NO: 13735 - RNA, 22 nt, Human
caguuggugaugaggcuaguag

SEQ ID NO: 13736 - RNA, 22 nt, Human
caguuguccuuuguaccaaguu

SEQ ID NO: 13737 - RNA, 20 nt, Human
caguuuaacuuugagcaguu

SEQ ID NO: 13738 - RNA, 22 nt, Human
caguuuaagacaagggggugua

SEQ ID NO: 13739 - RNA, 22 nt, Human
caguuuaaguagaacugagaau

SEQ ID NO: 13740 - RNA, 22 nt, Human
caguuuaaguguguugaaggua

SEQ ID NO: 13741 - RNA, 22 nt, Human
caguuuaccuauauguaaauuu

SEQ ID NO: 13742 - RNA, 22 nt, Human
caguuuauagcucuagcagcuu

SEQ ID NO: 13743 - RNA, 22 nt, Human
caguuuauaugaggguaucaag

SEQ ID NO: 13744 - RNA, 22 nt, Human
caguuuaugcagcuggaauaga

SEQ ID NO: 13745 - RNA, 22 nt, Human
caguuuccugaagagaaagaau

SEQ ID NO: 13746 - RNA, 22 nt, Human
caguuucucaggccucucccag

SEQ ID NO: 13747 - RNA, 22 nt, Human
caguuucuccaaacgcaggcug

SEQ ID NO: 13748 - RNA, 22 nt, Human
caguuucucucauacauauuug

SEQ ID NO: 13749 - RNA, 22 nt, Human
caguuucugagcccugucauuu

SEQ ID NO: 13750 - RNA, 22 nt, Human
caguuucuguuuuaaauagcag

SEQ ID NO: 13751 - RNA, 22 nt, Human
caguuucuuaagacugagaucu

SEQ ID NO: 13752 - RNA, 22 nt, Human
caguuucuucuauuuugaacua

SEQ ID NO: 13753 - RNA, 22 nt, Human
caguuugcaaaugacuuacaga

SEQ ID NO: 13754 - RNA, 22 nt, Human
caguuugucuugauucagaaca

SEQ ID NO: 13755 - RNA, 22 nt, Human
caguuuuaaauuuugaaugucu

SEQ ID NO: 13756 - RNA, 22 nt, Human
caguuuuauacacugcagcucc

SEQ ID NO: 13757 - RNA, 22 nt, Human
caguuuuauugguugaaaucug

SEQ ID NO: 13758 - RNA, 22 nt, Human
caguuuucuuguuauauuuggg

SEQ ID NO: 13759 - RNA, 23 nt, Human
cauaaaauauuaguaugguagca

SEQ ID NO: 13760 - RNA, 22 nt, Human
cauaaaauggcuuguucuuuaa

SEQ ID NO: 13761 - RNA, 22 nt, Human
cauaaaguaggcaagcauucca

SEQ ID NO: 13762 - RNA, 22 nt, Human
cauaaaguuaagcuguaaguau

SEQ ID NO: 13763 - RNA, 22 nt, Human
cauaaaguuuuauaggcucaaa

SEQ ID NO: 13764 - RNA, 22 nt, Human
cauaacacauucaucagcagag

SEQ ID NO: 13765 - RNA, 22 nt, Human
cauaacaguggcuucagcaagu

SEQ ID NO: 13766 - RNA, 22 nt, Human
cauaacauguacauauaaaugc

SEQ ID NO: 13767 - RNA, 22 nt, Human
cauaacauuaagccucuauuuc

SEQ ID NO: 13768 - RNA, 22 nt, Human
cauaacauugagcagcauuccu

SEQ ID NO: 13769 - RNA, 22 nt, Human
cauaacuagagugaaauguuga

SEQ ID NO: 13770 - RNA, 22 nt, Human
cauaacuugcuuuggagcccgg

SEQ ID NO: 13771 - RNA, 22 nt, Human
cauaagaauauuuaguggcagc

SEQ ID NO: 13772 - RNA, 22 nt, Human
cauaaucccaggcuugcauuca

SEQ ID NO: 13773 - RNA, 22 nt, Human
cauaauccuguccuggauucuu

SEQ ID NO: 13774 - RNA, 22 nt, Human
cauaauguuguaacacauagag

SEQ ID NO: 13775 - RNA, 22 nt, Human
cauaauuaaauucugggcaaga

SEQ ID NO: 13776 - RNA, 22 nt, Human
cauaauuacugauaugcugauu

SEQ ID NO: 13777 - RNA, 22 nt, Human
cauaauuagagaauucauguua

SEQ ID NO: 13778 - RNA, 22 nt, Human
cauaauuagucauguuaugcau

SEQ ID NO: 13779 - RNA, 22 nt, Human
cauaauuucacugucguauggc

SEQ ID NO: 13780 - RNA, 22 nt, Human
cauaauuugauaugcuugaugg

SEQ ID NO: 13781 - RNA, 22 nt, Human
cauacaagcguucaauagaugu

SEQ ID NO: 13782 - RNA, 20 nt, Human
cauacacuauucuguauagu

SEQ ID NO: 13783 - RNA, 22 nt, Human
cauacagucacugugguaccac

SEQ ID NO: 13784 - RNA, 22 nt, Human
cauacaguuuucccuagaugug

SEQ ID NO: 13785 - RNA, 22 nt, Human
cauacauugaauuugcacgugu

SEQ ID NO: 13786 - RNA, 22 nt, Human
cauacauuuugcauauuuacca

SEQ ID NO: 13787 - RNA, 22 nt, Human
cauacugugaagcuuacuauuu

SEQ ID NO: 13788 - RNA, 22 nt, Human
cauagaaaagaguagguaaugu

SEQ ID NO: 13789 - RNA, 22 nt, Human
cauagaaacugagacaaggauu

SEQ ID NO: 13790 - RNA, 22 nt, Human
cauagaaaguauuauggaauuu

SEQ ID NO: 13791 - RNA, 22 nt, Human
cauagaacagcuccuagcacau

SEQ ID NO: 13792 - RNA, 22 nt, Human
cauagaaucauagcacauuuga

SEQ ID NO: 13793 - RNA, 22 nt, Human
cugagcugggacucaguagcaa

SEQ ID NO: 13794 - RNA, 22 nt, Human
cugagcugggagccuggcacca

SEQ ID NO: 13795 - RNA, 22 nt, Human
cugagcugggcaacucuuagau

SEQ ID NO: 13796 - RNA, 21 nt, Human
cugagcuggggugaagguugc

SEQ ID NO: 13797 - RNA, 22 nt, Human
cugagcuggucuauggacuugg

SEQ ID NO: 13798 - RNA, 22 nt, Human
cugagcugguguuucaggguca

SEQ ID NO: 13799 - RNA, 22 nt, Human
cugagcugguucucuugugaaa

SEQ ID NO: 13800 - RNA, 22 nt, Human
cugagcugucaggaauggaaag

SEQ ID NO: 13801 - RNA, 22 nt, Human
cugaggaagagguaccauuugu

SEQ ID NO: 13802 - RNA, 22 nt, Human
cugaggaaugagugaggagcca

SEQ ID NO: 13803 - RNA, 22 nt, Human
cugaggagaaaugggaugguuc

SEQ ID NO: 13804 - RNA, 22 nt, Human
cugaggagaacaaugagaucaa

SEQ ID NO: 13805 - RNA, 22 nt, Human
cugaggagagguggccuguguu

SEQ ID NO: 13806 - RNA, 22 nt, Human
cugaggagaugggcuuuuuagg

SEQ ID NO: 13807 - RNA, 22 nt, Human
cugaggagcaaccccgugcccu

SEQ ID NO: 13808 - RNA, 22 nt, Human
cugaggagcagcuggcccgcua

SEQ ID NO: 13809 - RNA, 22 nt, Human
cugaggaucuaauuauuggguc

SEQ ID NO: 13810 - RNA, 19 nt, Human
cugaggcaaguggugguca

SEQ ID NO: 13811 - RNA, 22 nt, Human
cugaggcacccaucuucuccug

SEQ ID NO: 13812 - RNA, 22 nt, Human
cugaggcacugguaaugggcau

SEQ ID NO: 13813 - RNA, 22 nt, Human
cugaggcacugucagcugaggc

SEQ ID NO: 13814 - RNA, 22 nt, Human
cugaggcagagggcagaccaga

SEQ ID NO: 13815 - RNA, 21 nt, Human
cugaggcagcacagcuaguca

SEQ ID NO: 13816 - RNA, 22 nt, Human
cugaggcaggagaauugcugga

SEQ ID NO: 13817 - RNA, 21 nt, Human
cugaggcaugcaggccugggc

SEQ ID NO: 13818 - RNA, 17 nt, Human
cugaggcccagggccca

SEQ ID NO: 13819 - RNA, 22 nt, Human
cugaggccggagcacugaagag

SEQ ID NO: 13820 - RNA, 22 nt, Human
cugaggccgucugggucugcag

SEQ ID NO: 13821 - RNA, 22 nt, Human
cugaggcuaaccucgagagaca

SEQ ID NO: 13822 - RNA, 22 nt, Human
cugaggcuaguauaaagagcau

SEQ ID NO: 13823 - RNA, 22 nt, Human
cugaggcucagcgugaggaaag

SEQ ID NO: 13824 - RNA, 22 nt, Human
cugaggcucccucgggucugcu

SEQ ID NO: 13825 - RNA, 22 nt, Human
cugaggcucugagaaagccaaa

SEQ ID NO: 13826 - RNA, 22 nt, Human
cugaggcugaagagggccuacg

SEQ ID NO: 13827 - RNA, 22 nt, Human
cugaggcugcccagggccaggu

SEQ ID NO: 13828 - RNA, 22 nt, Human
cugaggcuggcguuugaggaag

SEQ ID NO: 13829 - RNA, 22 nt, Human
cugaggcugggcuugccuucuu

SEQ ID NO: 13830 - RNA, 18 nt, Human
cugaggcuuagagagguu

SEQ ID NO: 13831 - RNA, 22 nt, Human
cugagggaaggcagucaguugg

SEQ ID NO: 13832 - RNA, 22 nt, Human
cugagggcccugaagcuuggca

SEQ ID NO: 13833 - RNA, 21 nt, Human
cugagggccgcagcugggcuc

SEQ ID NO: 13834 - RNA, 22 nt, Human
cugagggcuggagcugaggccu

SEQ ID NO: 13835 - RNA, 23 nt, Human
cugaggggaaaagggcuucaggc

SEQ ID NO: 13836 - RNA, 17 nt, Human
cugaggggagugcugug

SEQ ID NO: 13837 - RNA, 22 nt, Human
cugaggggauaaagguuugggu

SEQ ID NO: 13838 - RNA, 22 nt, Human
cugagggguauccaagggguaa

SEQ ID NO: 13839 - RNA, 20 nt, Human
cugagguagggcagaucacc

SEQ ID NO: 13840 - RNA, 22 nt, Human
cugagguauugggaaguggacu

SEQ ID NO: 13841 - RNA, 22 nt, Human
cugaggucaccccacuggcugu

SEQ ID NO: 13842 - RNA, 22 nt, Human
cugaggugagcuucccugggcu

SEQ ID NO: 13843 - RNA, 22 nt, Human
cugcauugaucaggcagaaucu

SEQ ID NO: 13844 - RNA, 22 nt, Human
cugcauuucacauuuaaacuuu

SEQ ID NO: 13845 - RNA, 22 nt, Human
cugccacaagcuggcccugugu

SEQ ID NO: 13846 - RNA, 22 nt, Human
cugccaccaaauagcugcauga

SEQ ID NO: 13847 - RNA, 22 nt, Human
cugccaccaugccccagcagag

SEQ ID NO: 13848 - RNA, 22 nt, Human
cugccagcucaaagcgcagcua

SEQ ID NO: 13849 - RNA, 22 nt, Human
cugccagcucucuggaggcucu

SEQ ID NO: 13850 - RNA, 22 nt, Human
cugccagcuggagaccaaggaa

SEQ ID NO: 13851 - RNA, 22 nt, Human
cugccaggauucugugaacccc

SEQ ID NO: 13852 - RNA, 22 nt, Human
cugccaggcacgugcagcauca

SEQ ID NO: 13853 - RNA, 22 nt, Human
cugccaggccuccgcugucccc

SEQ ID NO: 13854 - RNA, 22 nt, Human
cugccaggugagcuccaggccu

SEQ ID NO: 13855 - RNA, 22 nt, Human
cugccaucgggggccccacugc

SEQ ID NO: 13856 - RNA, 22 nt, Human
cugccaucugaggguccagccu

SEQ ID NO: 13857 - RNA, 20 nt, Human
cugccaugauugauagagug

SEQ ID NO: 13858 - RNA, 22 nt, Human
cugccaugcaguuagucccuca

SEQ ID NO: 13859 - RNA, 22 nt, Human
cugccauguagucuauggggcg

SEQ ID NO: 13860 - RNA, 22 nt, Human
cugccaugugugaaaggggagg

SEQ ID NO: 13861 - RNA, 20 nt, Human
cugcccacuagaacuaccug

SEQ ID NO: 13862 - RNA, 22 nt, Human
cugcccacuauguugucauggg

SEQ ID NO: 13863 - RNA, 22 nt, Human
cugcccaucuggccacacacag

SEQ ID NO: 13864 - RNA, 22 nt, Human
cugcccauucaaccagcuacag

SEQ ID NO: 13865 - RNA, 22 nt, Human
cugccccacaggcuugguaggg

SEQ ID NO: 13866 - RNA, 22 nt, Human
cugccccugcucauggcugucc

SEQ ID NO: 13867 - RNA, 22 nt, Human
cugccccuggcuggugaagcag

SEQ ID NO: 13868 - RNA, 22 nt, Human
cugccccuggugauggacgcca

SEQ ID NO: 13869 - RNA, 18 nt, Human
cugccccuucucugagau

SEQ ID NO: 13870 - RNA, 22 nt, Human
cugcccucccaguugguccgug

SEQ ID NO: 13871 - RNA, 22 nt, Human
cugcccucgggcccucccauag

SEQ ID NO: 13872 - RNA, 22 nt, Human
cugcccucuagggaugcacugg

SEQ ID NO: 13873 - RNA, 23 nt, Human
cugcccugaucuugaucuauugu

SEQ ID NO: 13874 - RNA, 22 nt, Human
cugcccugcuucugagggaagc

SEQ ID NO: 13875 - RNA, 22 nt, Human
cugcccuggccacugugcccag

SEQ ID NO: 13876 - RNA, 22 nt, Human
cugcccugggaguaccuguccu

SEQ ID NO: 13877 - RNA, 22 nt, Human
cugcccuguaucuucucccaau

SEQ ID NO: 13878 - RNA, 22 nt, Human
cugcccugugguuguggguucu

SEQ ID NO: 13879 - RNA, 22 nt, Human
cugccguccaucuacgucucag

SEQ ID NO: 13880 - RNA, 22 nt, Human
cugccguguuuuucauguuaaa

SEQ ID NO: 13881 - RNA, 22 nt, Human
cugccguugugaagcucuuaga

SEQ ID NO: 13882 - RNA, 22 nt, Human
cugccuagaaaaccaggcuccu

SEQ ID NO: 13883 - RNA, 22 nt, Human
cugccucacauuggcuguguga

SEQ ID NO: 13884 - RNA, 22 nt, Human
cugccucucaggucccugagau

SEQ ID NO: 13885 - RNA, 22 nt, Human
cugccucuguugggcauggucu

SEQ ID NO: 13886 - RNA, 22 nt, Human
cugccucuugacagaucguggc

SEQ ID NO: 13887 - RNA, 22 nt, Human
cugccugaagaauuguguugca

SEQ ID NO: 13888 - RNA, 22 nt, Human
cugccugaguggaggucgaggg

SEQ ID NO: 13889 - RNA, 22 nt, Human
cugccugccuuggccuccagga

SEQ ID NO: 13890 - RNA, 22 nt, Human
cugccugcguugccucgugccu

SEQ ID NO: 13891 - RNA, 22 nt, Human
cugccugcucaccagggcucug

SEQ ID NO: 13892 - RNA, 22 nt, Human
cugccugcugauuaguauuguc

SEQ ID NO: 13893 - RNA, 22 nt, Human
cugccugcugcccuccagagcc

SEQ ID NO: 13894 - RNA, 22 nt, Human
cugccugcuuaccaugcaucag

SEQ ID NO: 13895 - RNA, 22 nt, Human
cugccuggaaggagcaagggga

SEQ ID NO: 13896 - RNA, 22 nt, Human
cugccuggaaugccagcuucuc

SEQ ID NO: 13897 - RNA, 22 nt, Human
cugccuggaccggcagcccucc

SEQ ID NO: 13898 - RNA, 20 nt, Human
cugccuggaggccucuaccu

SEQ ID NO: 13899 - RNA, 17 nt, Human
cugccuggagucccauc

SEQ ID NO: 13900 - RNA, 22 nt, Human
cugccuggccacaacccagggu

SEQ ID NO: 13901 - RNA, 22 nt, Human
cugccuggccugaucuccacgc

SEQ ID NO: 13902 - RNA, 22 nt, Human
cugccuggggaaugugaggauu

SEQ ID NO: 13903 - RNA, 22 nt, Human
cugccuggucucaggcaugggg

SEQ ID NO: 13904 - RNA, 22 nt, Human
cugccugugugugccugcagaa

SEQ ID NO: 13905 - RNA, 19 nt, Human
cugccuguuauggagagaa

SEQ ID NO: 13906 - RNA, 22 nt, Human
cugccuguuuucugauagauuu

SEQ ID NO: 13907 - RNA, 22 nt, Human
cugccuuaaaaguacuuuuacu

SEQ ID NO: 13908 - RNA, 22 nt, Human
cugccuucuuucaaggguaagc

SEQ ID NO: 13909 - RNA, 22 nt, Human
cugccuugcaccggcucucugg

SEQ ID NO: 13910 - RNA, 22 nt, Human
cugccuuggcccuaguucaugg

SEQ ID NO: 13911 - RNA, 22 nt, Human
cugccuugguuucuagcagggc

SEQ ID NO: 13912 - RNA, 22 nt, Human
cugccuuugcccuugacacugu

SEQ ID NO: 13913 - RNA, 22 nt, Human
cauucugcauuuggaaggggca

SEQ ID NO: 13914 - RNA, 22 nt, Human
cauucuuacacaauauuuuaau

SEQ ID NO: 13915 - RNA, 22 nt, Human
cauucuucucccuuaccuucca

SEQ ID NO: 13916 - RNA, 22 nt, Human
cauucuugaaccaggcacugug

SEQ ID NO: 13917 - RNA, 18 nt, Human
cauucuuggcagcuuuug

SEQ ID NO: 13918 - RNA, 22 nt, Human
cauugaaaccuaacauaggcug

SEQ ID NO: 13919 - RNA, 22 nt, Human
cauugaaauauggaaacugaug

SEQ ID NO: 13920 - RNA, 22 nt, Human
cauugagagugacuuggacaau

SEQ ID NO: 13921 - RNA, 21 nt, Human
cauugagauaggagagauugu

SEQ ID NO: 13922 - RNA, 20 nt, Human
cauugcaaaguagcagacug

SEQ ID NO: 13923 - RNA, 22 nt, Human
cauugcacaucugagaagagau

SEQ ID NO: 13924 - RNA, 22 nt, Human
cauugcaccacauugcaucccu

SEQ ID NO: 13925 - RNA, 22 nt, Human
cauugcacuccacccuaggcaa

SEQ ID NO: 13926 - RNA, 22 nt, Human
cauugcacuccagcuugggcaa

SEQ ID NO: 13927 - RNA, 22 nt, Human
cauugcacucuggcuggaacgg

SEQ ID NO: 13928 - RNA, 22 nt, Human
cauugcacugcagcccgggcaa

SEQ ID NO: 13929 - RNA, 22 nt, Human
cauugcacuuuggguccaggac

SEQ ID NO: 13930 - RNA, 22 nt, Human
cauugcaggagaguaaauaaaa

SEQ ID NO: 13931 - RNA, 20 nt, Human
cauugcauauuucauugagg

SEQ ID NO: 13932 - RNA, 22 nt, Human
cauugcccaguaggaucaccag

SEQ ID NO: 13933 - RNA, 20 nt, Human
cauuggacuuggcuucaugg

SEQ ID NO: 13934 - RNA, 22 nt, Human
cauuggcuccugugggacauga

SEQ ID NO: 13935 - RNA, 22 nt, Human
cauugguagaguuuguuuuaua

SEQ ID NO: 13936 - RNA, 22 nt, Human
cauuggucuucuaacagagaga

SEQ ID NO: 13937 - RNA, 22 nt, Human
cauuguaagaggcuuugcagca

SEQ ID NO: 13938 - RNA, 22 nt, Human
cauuguccucugaugccuuccc

SEQ ID NO: 13939 - RNA, 22 nt, Human
cauugucugguaggaagugggc

SEQ ID NO: 13940 - RNA, 22 nt, Human
cauuguuaauugguaucuuaca

SEQ ID NO: 13941 - RNA, 22 nt, Human
cauuguuauagcauuacacacc

SEQ ID NO: 13942 - RNA, 22 nt, Human
cauuguuggcagagggacagag

SEQ ID NO: 13943 - RNA, 22 nt, Human
cauuguuugagcaucugggauc

SEQ ID NO: 13944 - RNA, 22 nt, Human
cauuuaaugcacggauguagcc

SEQ ID NO: 13945 - RNA, 22 nt, Human
cauuuacaauguacagguugug

SEQ ID NO: 13946 - RNA, 22 nt, Human
cauuuacacacagaggugugcu

SEQ ID NO: 13947 - RNA, 21 nt, Human
cauuuacaugacagauugguu

SEQ ID NO: 13948 - RNA, 22 nt, Human
cauuuagaaacuguuuuuaaca

SEQ ID NO: 13949 - RNA, 22 nt, Human
cauuuaguuuugcaguagcagg

SEQ ID NO: 13950 - RNA, 22 nt, Human
cauuuauucagcucagucgguu

SEQ ID NO: 13951 - RNA, 22 nt, Human
cauuuauucaugaucuguagcu

SEQ ID NO: 13952 - RNA, 19 nt, Human
cuguggacucuagaucaug

SEQ ID NO: 13953 - RNA, 23 nt, Human
cuguggagcccuuuguugggaga

SEQ ID NO: 13954 - RNA, 22 nt, Human
cuguggagguaggagcaggaca

SEQ ID NO: 13955 - RNA, 22 nt, Human
cuguggaguuuguggcgcugac

SEQ ID NO: 13956 - RNA, 22 nt, Human
cuguggcaaaugauaccuccca

SEQ ID NO: 13957 - RNA, 23 nt, Human
cuguggcaaguccugcaccugcc

SEQ ID NO: 13958 - RNA, 22 nt, Human
cuguggcaagucugccugucac

SEQ ID NO: 13959 - RNA, 22 nt, Human
cuguggcacauguggcaaggcc

SEQ ID NO: 13960 - RNA, 22 nt, Human
cuguggcaggaagggacuagca

SEQ ID NO: 13961 - RNA, 22 nt, Human
cuguggcagggaagaggccaug

SEQ ID NO: 13962 - RNA, 23 nt, Human
cuguggccaccccuagcuggagg

SEQ ID NO: 13963 - RNA, 22 nt, Human
cuguggccccacccucuuggcc

SEQ ID NO: 13964 - RNA, 22 nt, Human
cuguggccuggggacacuaucu

SEQ ID NO: 13965 - RNA, 22 nt, Human
cuguggcuaggauuauuccuga

SEQ ID NO: 13966 - RNA, 22 nt, Human
cuguggcuaugguguacauacu

SEQ ID NO: 13967 - RNA, 22 nt, Human
cuguggcucauucuugguggca

SEQ ID NO: 13968 - RNA, 22 nt, Human
cuguggcuccauagaaguugca

SEQ ID NO: 13969 - RNA, 22 nt, Human
cuguggcucucagaggcugcug

SEQ ID NO: 13970 - RNA, 22 nt, Human
cuguggcucuccaauggaggga

SEQ ID NO: 13971 - RNA, 22 nt, Human
cuguggcucugcagucccaaca

SEQ ID NO: 13972 - RNA, 22 nt, Human
cuguggcugcagccuugguccu

SEQ ID NO: 13973 - RNA, 22 nt, Human
cuguggcugccucaccuacagg

SEQ ID NO: 13974 - RNA, 22 nt, Human
cuguggcuggccuuauugcugc

SEQ ID NO: 13975 - RNA, 22 nt, Human
cuguggcuggcucaucauaggu

SEQ ID NO: 13976 - RNA, 22 nt, Human
cuguggcugucucuuucccaug

SEQ ID NO: 13977 - RNA, 22 nt, Human
cuguggcuuuggggcggaggac

SEQ ID NO: 13978 - RNA, 22 nt, Human
cugugggaaaggaugagauugc

SEQ ID NO: 13979 - RNA, 18 nt, Human
cugugggaagaguuuggg

SEQ ID NO: 13980 - RNA, 22 nt, Human
cugugggaauacugcgagugua

SEQ ID NO: 13981 - RNA, 22 nt, Human
cugugggagaaguugcuggagu

SEQ ID NO: 13982 - RNA, 22 nt, Human
cugugggagaggugccuggauu

SEQ ID NO: 13983 - RNA, 22 nt, Human
cugugggcauuugagugugggu

SEQ ID NO: 13984 - RNA, 22 nt, Human
cugugggccugauguucuucuc

SEQ ID NO: 13985 - RNA, 22 nt, Human
cugugggugaagacaagggaga

SEQ ID NO: 13986 - RNA, 19 nt, Human
cugugggugugcaagggug

SEQ ID NO: 13987 - RNA, 22 nt, Human
cuguggucaccaggcuggggcc

SEQ ID NO: 13988 - RNA, 22 nt, Human
cuguggucaucucagaguggcc

SEQ ID NO: 13989 - RNA, 22 nt, Human
cuguggugagcaacugacugaa

SEQ ID NO: 13990 - RNA, 22 nt, Human
cuguggugggcccugggcuuca

SEQ ID NO: 13991 - RNA, 22 nt, Human
cuguguagucagguggucccac

SEQ ID NO: 13992 - RNA, 22 nt, Human
cuguguaucucugugggacaga

SEQ ID NO: 13993 - RNA, 22 nt, Human
cuguguccauguucuaauuugg

SEQ ID NO: 13994 - RNA, 22 nt, Human
cuguguccauuuaucauuguca

SEQ ID NO: 13995 - RNA, 22 nt, Human
cugugucccaguaccuugggua

SEQ ID NO: 13996 - RNA, 22 nt, Human
cuguguccugcgucaagccaau

SEQ ID NO: 13997 - RNA, 22 nt, Human
cuguguccugucuccuaaggug

SEQ ID NO: 13998 - RNA, 21 nt, Human
cugugucgcucucgcugggag

SEQ ID NO: 13999 - RNA, 22 nt, Human
cugugucuaaucuuauacauca

SEQ ID NO: 14000 - RNA, 22 nt, Human
cugugucucauccgccucuggc

SEQ ID NO: 14001 - RNA, 22 nt, Human
cugugucuccuuggugggauau

SEQ ID NO: 14002 - RNA, 22 nt, Human
cugugucucguuaaagcauugg

SEQ ID NO: 14003 - RNA, 22 nt, Human
cugugucuguggaauagcgaau

SEQ ID NO: 14004 - RNA, 22 nt, Human
cugugucuucuguuuugaaguu

SEQ ID NO: 14005 - RNA, 22 nt, Human
cugugucuugaguaauucggug

SEQ ID NO: 14006 - RNA, 22 nt, Human
cugugugaugggaagaauguuu

SEQ ID NO: 14007 - RNA, 22 nt, Human
cugugugcaggugcuggguacc

SEQ ID NO: 14008 - RNA, 22 nt, Human
cugugugugagaagcagguuga

SEQ ID NO: 14009 - RNA, 22 nt, Human
cugugugugcuacaggcuucca

SEQ ID NO: 14010 - RNA, 22 nt, Human
cuguguuccccugcugcugagg

SEQ ID NO: 14011 - RNA, 22 nt, Human
cuguguuucuaaguaaaggagc

SEQ ID NO: 14012 - RNA, 22 nt, Human
cuguguuuugagauauuauuaa

SEQ ID NO: 14013 - RNA, 20 nt, Human
cuguuaaaagguaugaauuc

SEQ ID NO: 14014 - RNA, 22 nt, Human
cuguuaaguguagauaaugugg

SEQ ID NO: 14015 - RNA, 22 nt, Human
cuguuaauucuagauggugagu

SEQ ID NO: 14016 - RNA, 22 nt, Human
cuguuaauugugaauuuuacau

SEQ ID NO: 14017 - RNA, 22 nt, Human
cuguuacaagagagagacauga

SEQ ID NO: 14018 - RNA, 22 nt, Human
cuguuacauagcuuuucuuaac

SEQ ID NO: 14019 - RNA, 22 nt, Human
cuguuauuucugccaggugagu

SEQ ID NO: 14020 - RNA, 22 nt, Human
cuguuauuuuauaauucaagaa

SEQ ID NO: 14021 - RNA, 22 nt, Human
cuguucaauuuguuucaguuau

SEQ ID NO: 14022 - RNA, 21 nt, Human
cuguucacugugcugugcaaa

SEQ ID NO: 14023 - RNA, 17 nt, Human
cuguuccccacuacuca

SEQ ID NO: 14024 - RNA, 22 nt, Human
cuguucuguaagcugcuguugu

SEQ ID NO: 14025 - RNA, 22 nt, Human
cuguuggccuuucaucaguaau

SEQ ID NO: 14026 - RNA, 22 nt, Human
cuguuguauuauucaauauuau

SEQ ID NO: 14027 - RNA, 22 nt, Human
cuguugucccugggagcucagc

SEQ ID NO: 14028 - RNA, 22 nt, Human
cuguugucuccucucagauuau

SEQ ID NO: 14029 - RNA, 22 nt, Human
cuguugugaauuuaguuaccaa

SEQ ID NO: 14030 - RNA, 22 nt, Human
cuguuuaaccagaucucauauc

SEQ ID NO: 14031 - RNA, 22 nt, Human
cuguuuauaaaccaccaguuua

SEQ ID NO: 14032 - RNA, 22 nt, Human
cuguuuauaaauagaggggagu

SEQ ID NO: 14033 - RNA, 22 nt, Human
cuguuuauacgacagguggagg

SEQ ID NO: 14034 - RNA, 22 nt, Human
cuguuuaucauguacauuucca

SEQ ID NO: 14035 - RNA, 22 nt, Human
cuguuuauggagguaaggcauc

SEQ ID NO: 14036 - RNA, 22 nt, Human
cuguuucaugucuuccgcagcu

SEQ ID NO: 14037 - RNA, 22 nt, Human
cuguuuccccaugcccugacuc

SEQ ID NO: 14038 - RNA, 22 nt, Human
cuguuucucccauguccaagug

SEQ ID NO: 14039 - RNA, 21 nt, Human
cuguuucuugugaagugacac

SEQ ID NO: 14040 - RNA, 22 nt, Human
cuguuugugauuagcagugggu

SEQ ID NO: 14041 - RNA, 22 nt, Human
cuguuuuauaaaguccaaaagu

SEQ ID NO: 14042 - RNA, 22 nt, Human
cuguuuucccuggaguucagca

SEQ ID NO: 14043 - RNA, 22 nt, Human
cuuaaaaucuggcaguuagcua

SEQ ID NO: 14044 - RNA, 20 nt, Human
cuuaaacacagagauagauu

SEQ ID NO: 14045 - RNA, 22 nt, Human
cuuaaauccaucauuucuaauc

SEQ ID NO: 14046 - RNA, 22 nt, Human
cuuaacaagcccaacuuucauu

SEQ ID NO: 14047 - RNA, 22 nt, Human
cuuaacagagagaaguguugcu

SEQ ID NO: 14048 - RNA, 22 nt, Human
cuuaagaauauugaaguugugg

SEQ ID NO: 14049 - RNA, 22 nt, Human
cuuaauaauaggugaggcuaug

SEQ ID NO: 14050 - RNA, 22 nt, Human
cuuaauuacccaaugugguagg

SEQ ID NO: 14051 - RNA, 22 nt, Human
cuuaauuuuuguaguagaugga

SEQ ID NO: 14052 - RNA, 22 nt, Human
cuuacaagcaaaacaacuguag

SEQ ID NO: 14053 - RNA, 22 nt, Human
cuuacacacuagaugguaggug

SEQ ID NO: 14054 - RNA, 22 nt, Human
cuuacagugacccugcagauuu

SEQ ID NO: 14055 - RNA, 22 nt, Human
cuuacagugaucaacacaaaga

SEQ ID NO: 14056 - RNA, 22 nt, Human
cuuacauaugcaagacaaaggg

SEQ ID NO: 14057 - RNA, 22 nt, Human
cuuacauuaaguaagagauuga

SEQ ID NO: 14058 - RNA, 22 nt, Human
cuuagaaaucgaacucagguua

SEQ ID NO: 14059 - RNA, 22 nt, Human
cuuagaacauacuuagugugau

SEQ ID NO: 14060 - RNA, 22 nt, Human
cuuagaacauucugccugggaa

SEQ ID NO: 14061 - RNA, 22 nt, Human
ccccuuccuuccucagacagcc

SEQ ID NO: 14062 - RNA, 22 nt, Human
ccccuucuggucuucaauggug

SEQ ID NO: 14063 - RNA, 22 nt, Human
ccccuuucucccgcgucuggcc

SEQ ID NO: 14064 - RNA, 22 nt, Human
cccgacuagcugggauuacagg

SEQ ID NO: 14065 - RNA, 22 nt, Human
cccgagccucgguuucuuuucu

SEQ ID NO: 14066 - RNA, 22 nt, Human
cccgaggaaccagagguagcuc

SEQ ID NO: 14067 - RNA, 22 nt, Human
cccgggaggaggaaguugcagu

SEQ ID NO: 14068 - RNA, 21 nt, Human
cccgugccuucagcaguccug

SEQ ID NO: 14069 - RNA, 22 nt, Human
cccguuuaauuacucgagcugu

SEQ ID NO: 14070 - RNA, 23 nt, Human
cccuaacuaauucuagggccuaa

SEQ ID NO: 14071 - RNA, 22 nt, Human
cuuccugaaaguaguagguuga

SEQ ID NO: 14072 - RNA, 22 nt, Human
cuuccugaagagguuggucagg

SEQ ID NO: 14073 - RNA, 22 nt, Human
cuuccugagcaaggaacuauag

SEQ ID NO: 14074 - RNA, 22 nt, Human
cuuccuggaugaacaguagaaa

SEQ ID NO: 14075 - RNA, 22 nt, Human
cuuccuggaugaagcccagcau

SEQ ID NO: 14076 - RNA, 22 nt, Human
cuuccuggcaugggucucauga

SEQ ID NO: 14077 - RNA, 22 nt, Human
cuuccugggcccugcuuaagca

SEQ ID NO: 14078 - RNA, 22 nt, Human
cuuccugggucuggagacugga

SEQ ID NO: 14079 - RNA, 22 nt, Human
cuuccuguuguauuugugagcc

SEQ ID NO: 14080 - RNA, 22 nt, Human
cuuccuuccacaccuucagaau

SEQ ID NO: 14081 - RNA, 22 nt, Human
cuuccuucugaagcauagaagc

SEQ ID NO: 14082 - RNA, 22 nt, Human
cuuccuugugguccuucucauu

SEQ ID NO: 14083 - RNA, 20 nt, Human
cuuccuuuuccuucgucaaa

SEQ ID NO: 14084 - RNA, 23 nt, Human
cuucggaauaugauaagggaccu

SEQ ID NO: 14085 - RNA, 22 nt, Human
cuucguuuuuaguagcaauguu

SEQ ID NO: 14086 - RNA, 19 nt, Human
cuucuaagucauuuggaau

SEQ ID NO: 14087 - RNA, 22 nt, Human
cuucuaauucuuauguaagcuu

SEQ ID NO: 14088 - RNA, 22 nt, Human
cuucuacacaucccucuugcuu

SEQ ID NO: 14089 - RNA, 23 nt, Human
cuucuagagucagcuccaaguuu

SEQ ID NO: 14090 - RNA, 22 nt, Human
cuucuagaguuucugaugcaac

SEQ ID NO: 14091 - RNA, 22 nt, Human
cuucuagccuugaugacuggga

SEQ ID NO: 14092 - RNA, 22 nt, Human
cuucuaugaggagagacaugca

SEQ ID NO: 14093 - RNA, 22 nt, Human
cuucucaaaguugugaaucagg

SEQ ID NO: 14094 - RNA, 22 nt, Human
cuucucagcaugguuacuguga

SEQ ID NO: 14095 - RNA, 22 nt, Human
cuucucagucaccugugagucu

SEQ ID NO: 14096 - RNA, 22 nt, Human
cuucuccagccacgcccacucc

SEQ ID NO: 14097 - RNA, 22 nt, Human
cuucucccaaguaugcaguuug

SEQ ID NO: 14098 - RNA, 22 nt, Human
cuucuccgacaaccgacgccgg

SEQ ID NO: 14099 - RNA, 22 nt, Human
cuucucuaucuuuggcacauca

SEQ ID NO: 14100 - RNA, 22 nt, Human
cuucucugcaccccacuuuugc

SEQ ID NO: 14101 - RNA, 22 nt, Human
cuucucuggcagaugugugucc

SEQ ID NO: 14102 - RNA, 22 nt, Human
cuucucuggcauagcaagcagg

SEQ ID NO: 14103 - RNA, 22 nt, Human
cuucucuggcuccucagcgccc

SEQ ID NO: 14104 - RNA, 22 nt, Human
cuucucugucacaggguuacgu

SEQ ID NO: 14105 - RNA, 22 nt, Human
cuucugaaaugugagcaaaauc

SEQ ID NO: 14106 - RNA, 22 nt, Human
cuucugaagagguuaucauaga

SEQ ID NO: 14107 - RNA, 22 nt, Human
cuucugaaguguuugaugauug

SEQ ID NO: 14108 - RNA, 22 nt, Human
cuucugaauggcuguguaugcu

SEQ ID NO: 14109 - RNA, 22 nt, Human
cuucugagaggggcuaggagca

SEQ ID NO: 14110 - RNA, 22 nt, Human
cuucugagcagaccuccugggg

SEQ ID NO: 14111 - RNA, 22 nt, Human
cuucugcaagagcaucaguugu

SEQ ID NO: 14112 - RNA, 22 nt, Human
cuucugcuggcauacugcccca

SEQ ID NO: 14113 - RNA, 22 nt, Human
cuucuggaaacuuuuccaauuu

SEQ ID NO: 14114 - RNA, 19 nt, Human
cuucuggauccgcagggcc

SEQ ID NO: 14115 - RNA, 22 nt, Human
cuucuggcaaucccagggucuu

SEQ ID NO: 14116 - RNA, 22 nt, Human
cuucuggcguuggaggucugag

SEQ ID NO: 14117 - RNA, 22 nt, Human
cuucugggcauucagcugcaca

SEQ ID NO: 14118 - RNA, 22 nt, Human
cuucuggguaauucuucuucau

SEQ ID NO: 14119 - RNA, 22 nt, Human
cuucuggguguggagugaggac

SEQ ID NO: 14120 - RNA, 22 nt, Human
cuucugugacguaugugaggac

SEQ ID NO: 14121 - RNA, 22 nt, Human
cuucugugagucaguguuucug

SEQ ID NO: 14122 - RNA, 22 nt, Human
cuucugugauuugguuaggaua

SEQ ID NO: 14123 - RNA, 22 nt, Human
cuucugugcaauuguggaggag

SEQ ID NO: 14124 - RNA, 22 nt, Human
cuucuguggauguuggaugcau

SEQ ID NO: 14125 - RNA, 22 nt, Human
cuucuguguuaaaugagucuuu

SEQ ID NO: 14126 - RNA, 22 nt, Human
cuucuguuacuguuagcugaag

SEQ ID NO: 14127 - RNA, 22 nt, Human
cuucuuaaucccuuauauauuu

SEQ ID NO: 14128 - RNA, 22 nt, Human
cuucuuaaugcauaaacugugu

SEQ ID NO: 14129 - RNA, 22 nt, Human
cuucuucaagagaaugggagac

SEQ ID NO: 14130 - RNA, 22 nt, Human
cuucuucaauagcaagcgcaua

SEQ ID NO: 14131 - RNA, 22 nt, Human
cuucuucacacuggucugaagc

SEQ ID NO: 14132 - RNA, 22 nt, Human
cuucuucagcacaauauugaug

SEQ ID NO: 14133 - RNA, 20 nt, Human
cuucuucaguaguuuguucu

SEQ ID NO: 14134 - RNA, 22 nt, Human
cuucuuccaagcuuaugcucaa

SEQ ID NO: 14135 - RNA, 22 nt, Human
cuucuucccagcuucccucacc

SEQ ID NO: 14136 - RNA, 22 nt, Human
cuucuucuuuuaauaaaugucu

SEQ ID NO: 14137 - RNA, 22 nt, Human
cuucuugaaaguggugacccuc

SEQ ID NO: 14138 - RNA, 19 nt, Human
cuucuugauaagguucuuu

SEQ ID NO: 14139 - RNA, 22 nt, Human
cuucuugauugcuuucaaacca

SEQ ID NO: 14140 - RNA, 22 nt, Human
cuucuuggacuacucacuagag

SEQ ID NO: 14141 - RNA, 22 nt, Human
cuucuugugcugggccagcuuc

SEQ ID NO: 14142 - RNA, 22 nt, Human
cuucuuuaccaagagauagagu

SEQ ID NO: 14143 - RNA, 22 nt, Human
cuucuuuagggaucucuugcug

SEQ ID NO: 14144 - RNA, 22 nt, Human
cuucuuuccuuccuccaguggc

SEQ ID NO: 14145 - RNA, 22 nt, Human
cuucuuuguucuguugucucac

SEQ ID NO: 14146 - RNA, 22 nt, Human
cuucuuuucauggcuugggaag

SEQ ID NO: 14147 - RNA, 22 nt, Human
cuucuuuugaagggcguugugu

SEQ ID NO: 14148 - RNA, 22 nt, Human
cuugaaaauaagaaagacuuuc

SEQ ID NO: 14149 - RNA, 22 nt, Human
cuugaaagaagggucuuuuaau

SEQ ID NO: 14150 - RNA, 22 nt, Human
cuugaaagcacuuaguaaauua

SEQ ID NO: 14151 - RNA, 22 nt, Human
cuugaacucaaugugaggaaga

SEQ ID NO: 14152 - RNA, 20 nt, Human
cuugaacugauucuauuucc

SEQ ID NO: 14153 - RNA, 22 nt, Human
cuugaaguugcaaaacauuaau

SEQ ID NO: 14154 - RNA, 23 nt, Human
cuugaaugggauggaauucacug

SEQ ID NO: 14155 - RNA, 22 nt, Human
cuugaaugguaugagaguaauu

SEQ ID NO: 14156 - RNA, 22 nt, Human
cuugaauguccuguggcaaagu

SEQ ID NO: 14157 - RNA, 22 nt, Human
cuugacagaagguuuuauccua

SEQ ID NO: 14158 - RNA, 22 nt, Human
cuugacagucccaggaaaauag

SEQ ID NO: 14159 - RNA, 21 nt, Human
cuugacauagccugucagcuu

SEQ ID NO: 14160 - RNA, 22 nt, Human
cuugagaagagauuuauauuug

SEQ ID NO: 14161 - RNA, 18 nt, Human
cuugagcuaagggacccc

SEQ ID NO: 14162 - RNA, 23 nt, Human
cuugagcucaggaagagcugagu

SEQ ID NO: 14163 - RNA, 22 nt, Human
cuugagcuuagguucaggauug

SEQ ID NO: 14164 - RNA, 22 nt, Human
cuugagggacucuaugacuuag

SEQ ID NO: 14165 - RNA, 20 nt, Human
cuugaugagauaaacagcag

SEQ ID NO: 14166 - RNA, 22 nt, Human
cuugaugagucagaacugaagg

SEQ ID NO: 14167 - RNA, 22 nt, Human
cuugaugaugacgucggugaug

SEQ ID NO: 14168 - RNA, 22 nt, Human
cuugauguauaaguugauaugu

SEQ ID NO: 14169 - RNA, 20 nt, Human
cuugauucuuugaugaggua

SEQ ID NO: 14170 - RNA, 22 nt, Human
gagaaggagcucaaauauggcu

SEQ ID NO: 14171 - RNA, 22 nt, Human
gagaaggauguggcucauagcu

SEQ ID NO: 14172 - RNA, 22 nt, Human
gagaaggccaggaacccagugu

SEQ ID NO: 14173 - RNA, 22 nt, Human
gagaagggauaugccacucucg

SEQ ID NO: 14174 - RNA, 22 nt, Human
gagaaggggugauguggguaau

SEQ ID NO: 14175 - RNA, 22 nt, Human
gagaaguucuaauuggcucuuu

SEQ ID NO: 14176 - RNA, 22 nt, Human
gagaaguuguguggauuuaaag

SEQ ID NO: 14177 - RNA, 22 nt, Human
gagaaguuucuuccuagguuug

SEQ ID NO: 14178 - RNA, 22 nt, Human
gagaauaaaucuaaaguuucuu

SEQ ID NO: 14179 - RNA, 22 nt, Human
gagaauacaaccagaagcugag

SEQ ID NO: 14180 - RNA, 22 nt, Human
gagaaucuacaggaaaccgaag

SEQ ID NO: 14181 - RNA, 22 nt, Human
gagaaucucuuugacaagcaga

SEQ ID NO: 14182 - RNA, 19 nt, Human
gagaaucucuuugauguuu

SEQ ID NO: 14183 - RNA, 22 nt, Human
gagaaucuggguuuuggcuauc

SEQ ID NO: 14184 - RNA, 22 nt, Human
gagaauuagggcguaauucaga

SEQ ID NO: 14185 - RNA, 22 nt, Human
gagaauuuucuaguaguuucau

SEQ ID NO: 14186 - RNA, 22 nt, Human
gagacacaagacgcaacucugu

SEQ ID NO: 14187 - RNA, 22 nt, Human
gagacacaggugguuccuguca

SEQ ID NO: 14188 - RNA, 22 nt, Human
gagacacaguuaucaggcauac

SEQ ID NO: 14189 - RNA, 22 nt, Human
gagacagcuuaauuggugguca

SEQ ID NO: 14190 - RNA, 22 nt, Human
gagacaggcagcuaguggguca

SEQ ID NO: 14191 - RNA, 22 nt, Human
gagacagugguugcagaagcuc

SEQ ID NO: 14192 - RNA, 22 nt, Human
gagacauggcaaaagcacuggu

SEQ ID NO: 14193 - RNA, 19 nt, Human
gagacauguagauagaaga

SEQ ID NO: 14194 - RNA, 22 nt, Human
gagacauucuuaggaacaaugu

SEQ ID NO: 14195 - RNA, 17 nt, Human
gagacccccacuacacc

SEQ ID NO: 14196 - RNA, 22 nt, Human
gagaccuggaggauguggaugg

SEQ ID NO: 14197 - RNA, 22 nt, Human
gagaccuuaagagaugucagcu

SEQ ID NO: 14198 - RNA, 22 nt, Human
gagacguggccuuugccugagc

SEQ ID NO: 14199 - RNA, 22 nt, Human
gagacugcauuguccaaggguu

SEQ ID NO: 14200 - RNA, 22 nt, Human
gagacugguguuugcugggcug

SEQ ID NO: 14201 - RNA, 22 nt, Human
gagacuuuuuaaucacuaggaa

SEQ ID NO: 14202 - RNA, 22 nt, Human
gagagaaaaaugagcuucauug

SEQ ID NO: 14203 - RNA, 22 nt, Human
gagagaaaacaaguucuccauu

SEQ ID NO: 14204 - RNA, 22 nt, Human
gagagaaagccccugcaucccu

SEQ ID NO: 14205 - RNA, 22 nt, Human
gagagaaauuaguugguuugcu

SEQ ID NO: 14206 - RNA, 22 nt, Human
gagagaacccuaaaugagauau

SEQ ID NO: 14207 - RNA, 22 nt, Human
gagagaagaacaaugucauuca

SEQ ID NO: 14208 - RNA, 22 nt, Human
gagagaagaauguuccgaggcc

SEQ ID NO: 14209 - RNA, 22 nt, Human
gagagaagggggauaugagccu

SEQ ID NO: 14210 - RNA, 22 nt, Human
gagagaauguacaugcuagggg

SEQ ID NO: 14211 - RNA, 22 nt, Human
gagagaccuugcuaagugccuu

SEQ ID NO: 14212 - RNA, 22 nt, Human
gagagagaaaaugacuccggac

SEQ ID NO: 14213 - RNA, 22 nt, Human
gagagagaaccccgugcccuuc

SEQ ID NO: 14214 - RNA, 22 nt, Human
gagagagaaggccugugggugu

SEQ ID NO: 14215 - RNA, 22 nt, Human
gagagagacauguaaacgcggu

SEQ ID NO: 14216 - RNA, 23 nt, Human
gagagcaaugagauguaaacacu

SEQ ID NO: 14217 - RNA, 22 nt, Human
gagagcacaugaacauggagga

SEQ ID NO: 14218 - RNA, 22 nt, Human
gagagcagacucucaaagcugg

SEQ ID NO: 14219 - RNA, 22 nt, Human
gagagcauguggucuaguuuua

SEQ ID NO: 14220 - RNA, 22 nt, Human
gagagccagcucacuccagggc

SEQ ID NO: 14221 - RNA, 23 nt, Human
gagagcccauuggcagggguacc

SEQ ID NO: 14222 - RNA, 22 nt, Human
gagagccugccagugaguguau

SEQ ID NO: 14223 - RNA, 22 nt, Human
gagagcugcaagguagggcggg

SEQ ID NO: 14224 - RNA, 22 nt, Human
ccugcuggcggggacccaguga

SEQ ID NO: 14225 - RNA, 22 nt, Human
ccugcuggcugguagaguuccg

SEQ ID NO: 14226 - RNA, 20 nt, Human
ccugcugggaacccucugaa

SEQ ID NO: 14227 - RNA, 22 nt, Human
ccugcugggacgugugguugcc

SEQ ID NO: 14228 - RNA, 22 nt, Human
ccugcugucugcuguguuaagc

SEQ ID NO: 14229 - RNA, 22 nt, Human
ccugcugugaccggggagcagg

SEQ ID NO: 14230 - RNA, 21 nt, Human
ccugcugugaucuuagugagu

SEQ ID NO: 14231 - RNA, 22 nt, Human
ccugcugugugacgggauguua

SEQ ID NO: 14232 - RNA, 22 nt, Human
ccugcuguuuucuucacuucag

SEQ ID NO: 14233 - RNA, 22 nt, Human
ccuggaaagaggaaggaagccu

SEQ ID NO: 14234 - RNA, 22 nt, Human
ccuggaagauucaccacuacca

SEQ ID NO: 14235 - RNA, 22 nt, Human
ccuggaaggcaggcauggauug

SEQ ID NO: 14236 - RNA, 22 nt, Human
ccuggacagagggcagcggcca

SEQ ID NO: 14237 - RNA, 22 nt, Human
ccuggacucagaggugcuggug

SEQ ID NO: 14238 - RNA, 21 nt, Human
ccuggacugggagcagcacug

SEQ ID NO: 14239 - RNA, 22 nt, Human
ccuggacuguguccugugguca

SEQ ID NO: 14240 - RNA, 22 nt, Human
ccuggacuuucaggacuacugu

SEQ ID NO: 14241 - RNA, 22 nt, Human
ccuggacuuucauuuccccuug

SEQ ID NO: 14242 - RNA, 21 nt, Human
ccuggagacaaagacagggug

SEQ ID NO: 14243 - RNA, 22 nt, Human
ccuggagauuucuucaagcuuu

SEQ ID NO: 14244 - RNA, 22 nt, Human
ccuggagcaggagcugcagagg

SEQ ID NO: 14245 - RNA, 22 nt, Human
ccuggagggcagcccauucugg

SEQ ID NO: 14246 - RNA, 22 nt, Human
ccuggagucugugacuuuccuc

SEQ ID NO: 14247 - RNA, 22 nt, Human
ccuggaucgaugccgagggaaa

SEQ ID NO: 14248 - RNA, 22 nt, Human
ccuggaucuuucugacugacaa

SEQ ID NO: 14249 - RNA, 22 nt, Human
ccuggaugauccaugucaugga

SEQ ID NO: 14250 - RNA, 22 nt, Human
ccuggcacaagagcagcauugg

SEQ ID NO: 14251 - RNA, 18 nt, Human
ccuggcacacuggcucau

SEQ ID NO: 14252 - RNA, 22 nt, Human
ccuggcacagauccuucauaca

SEQ ID NO: 14253 - RNA, 22 nt, Human
ccuggcacugaccaggcacuga

SEQ ID NO: 14254 - RNA, 22 nt, Human
ccuggcagcagcacaugccuuc

SEQ ID NO: 14255 - RNA, 18 nt, Human
ccuggcagccaugcgcgc

SEQ ID NO: 14256 - RNA, 22 nt, Human
ccuggcagccucagccaauucu

SEQ ID NO: 14257 - RNA, 22 nt, Human
ccuggcagcgugccgagcugcg

SEQ ID NO: 14258 - RNA, 22 nt, Human
ccuggcagcuccuccccggcgg

SEQ ID NO: 14259 - RNA, 22 nt, Human
ccuggcaggacuguuguaagaa

SEQ ID NO: 14260 - RNA, 22 nt, Human
ccuggcaggcaagaggaaggga

SEQ ID NO: 14261 - RNA, 22 nt, Human
ccuggcagguggcgcccucggc

SEQ ID NO: 14262 - RNA, 22 nt, Human
ccuggcagguuacaaccaguua

SEQ ID NO: 14263 - RNA, 22 nt, Human
ccuggcagucaggggaguccuu

SEQ ID NO: 14264 - RNA, 22 nt, Human
ccuggcaguggugaagaagagg

SEQ ID NO: 14265 - RNA, 22 nt, Human
ccuggcauguccuccuggcaug

SEQ ID NO: 14266 - RNA, 21 nt, Human
ccuggccaaucugauaggguu

SEQ ID NO: 14267 - RNA, 22 nt, Human
ccuggccagaggcgugccugug

SEQ ID NO: 14268 - RNA, 22 nt, Human
ccuggccagcagccccuuccuc

SEQ ID NO: 14269 - RNA, 22 nt, Human
ccuggccucagacagagggugg

SEQ ID NO: 14270 - RNA, 22 nt, Human
ccuggccucgugcucacggcuc

SEQ ID NO: 14271 - RNA, 22 nt, Human
ccuggccucuccgaguaaccug

SEQ ID NO: 14272 - RNA, 22 nt, Human
ccuggccugugaaucugagagc

SEQ ID NO: 14273 - RNA, 23 nt, Human
ccuggcucaccccuuauguccag

SEQ ID NO: 14274 - RNA, 22 nt, Human
ccuggcucagaguaugucaucg

SEQ ID NO: 14275 - RNA, 22 nt, Human
ccuggcucauuaugugccccca

SEQ ID NO: 14276 - RNA, 22 nt, Human
ccuggcucccccaucauagcug

SEQ ID NO: 14277 - RNA, 22 nt, Human
ccuggcucccggaacagggucu

SEQ ID NO: 14278 - RNA, 22 nt, Human
ccuggcuccgguucaagggaaa

SEQ ID NO: 14279 - RNA, 18 nt, Human
cgaggcaggcggaucacg

SEQ ID NO: 14280 - RNA, 20 nt, Human
cgaggccaaggggcugggcc

SEQ ID NO: 14281 - RNA, 22 nt, Human
cgaggccaauguguuuuaugaa

SEQ ID NO: 14282 - RNA, 22 nt, Human
cgaggccaugcaugcugaggac

SEQ ID NO: 14283 - RNA, 17 nt, Human
cgagggcuugcuggcuc

SEQ ID NO: 14284 - RNA, 22 nt, Human
cgaguccaggguuaggaguccg

SEQ ID NO: 14285 - RNA, 22 nt, Human
cgauggaauuggaaagaggaau

SEQ ID NO: 14286 - RNA, 22 nt, Human
cgcaacagagcagguuugauga

SEQ ID NO: 14287 - RNA, 22 nt, Human
cgcagacacugaggguccgggg

SEQ ID NO: 14288 - RNA, 21 nt, Human
cgcagcugagaaauauacaga

SEQ ID NO: 14289 - RNA, 19 nt, Human
cgcaggagccgaggugacc

SEQ ID NO: 14290 - RNA, 22 nt, Human
cgcaggcaaugcuccgcggggg

SEQ ID NO: 14291 - RNA, 19 nt, Human
cgcaggcuucgggucgcuc

SEQ ID NO: 14292 - RNA, 22 nt, Human
cgcaggggaggaagguacaccu

SEQ ID NO: 14293 - RNA, 22 nt, Human
cgcagugagucuguaaaaggcu

SEQ ID NO: 14294 - RNA, 22 nt, Human
cgcauacauagaaacacacaga

SEQ ID NO: 14295 - RNA, 18 nt, Human
cgcauguacacgucaugc

SEQ ID NO: 14296 - RNA, 20 nt, Human
cgcccagugcgguucugacc

SEQ ID NO: 14297 - RNA, 18 nt, Human
cgcccugcuauaaaugac

SEQ ID NO: 14298 - RNA, 22 nt, Human
cgccgccugcugcagcagcugu

SEQ ID NO: 14299 - RNA, 22 nt, Human
cgccggcuugaggcaggcggca

SEQ ID NO: 14300 - RNA, 22 nt, Human
cgccguccccuaggaaagagcu

SEQ ID NO: 14301 - RNA, 22 nt, Human
cgccucagccguggucaucuuc

SEQ ID NO: 14302 - RNA, 16 nt, Human
cgccucccucccucgc

SEQ ID NO: 14303 - RNA, 22 nt, Human
cgccugcucuguuuccaugugg

SEQ ID NO: 14304 - RNA, 22 nt, Human
cgccuggaaccucuaggaccag

SEQ ID NO: 14305 - RNA, 22 nt, Human
cgccuggagaggaggcgacgcg

SEQ ID NO: 14306 - RNA, 22 nt, Human
cgcgcucauuuccgccuccuuc

SEQ ID NO: 14307 - RNA, 22 nt, Human
cgcggucucuuuaaggcggguc

SEQ ID NO: 14308 - RNA, 22 nt, Human
cgcgguggcggccuccagcgcc

SEQ ID NO: 14309 - RNA, 20 nt, Human
cgcuccagucgcuggugugu

SEQ ID NO: 14310 - RNA, 22 nt, Human
cgcuccuugagcgugucggccu

SEQ ID NO: 14311 - RNA, 19 nt, Human
cgcucuggguuucguguca

SEQ ID NO: 14312 - RNA, 22 nt, Human
cgcuggaaauugccguuggcuu

SEQ ID NO: 14313 - RNA, 22 nt, Human
cgcuggcuuccuccuggggcca

SEQ ID NO: 14314 - RNA, 22 nt, Human
cgcugggcgccgaccugcuggc

SEQ ID NO: 14315 - RNA, 22 nt, Human
cgcugggggaacuucagccaau

SEQ ID NO: 14316 - RNA, 22 nt, Human
cgcugugccuggcacccagugu

SEQ ID NO: 14317 - RNA, 22 nt, Human
cgcuguguuuacaucauugcug

SEQ ID NO: 14318 - RNA, 21 nt, Human
cggaaacucggcucugguucc

SEQ ID NO: 14319 - RNA, 23 nt, Human
cggacaaccauuguuuuaguauc

SEQ ID NO: 14320 - RNA, 22 nt, Human
cggagcagagccacucgggccg

SEQ ID NO: 14321 - RNA, 22 nt, Human
cggagcuggcgucuguguggac

SEQ ID NO: 14322 - RNA, 22 nt, Human
cggaggggauacauuuucugaa

SEQ ID NO: 14323 - RNA, 22 nt, Human
cggagggguuugaacagaggag

SEQ ID NO: 14324 - RNA, 18 nt, Human
cggaucaugcgcugaggc

SEQ ID NO: 14325 - RNA, 22 nt, Human
cggauccucagucgugcgggag

SEQ ID NO: 14326 - RNA, 22 nt, Human
cggcagagcccugagucagccu

SEQ ID NO: 14327 - RNA, 22 nt, Human
cggcagcugauugcagagcacc

SEQ ID NO: 14328 - RNA, 22 nt, Human
cggcaggaccucauuuccuucu

SEQ ID NO: 14329 - RNA, 22 nt, Human
cggcagggcuccaugcauuucu

SEQ ID NO: 14330 - RNA, 22 nt, Human
cggcaggguugguuuucucuga

SEQ ID NO: 14331 - RNA, 21 nt, Human
cggccaaauuccuccuaggga

SEQ ID NO: 14332 - RNA, 22 nt, Human
cggcccugcugagcuugucugg

SEQ ID NO: 14333 - RNA, 22 nt, Human
cggccuugacaagcuuagcagc

SEQ ID NO: 14334 - RNA, 22 nt, Human
cggcuggaagcuggacaggccg

SEQ ID NO: 14335 - RNA, 22 nt, Human
cggcuggguagaggugccgggu

SEQ ID NO: 14336 - RNA, 22 nt, Human
cggcuggugucgggcacagcaa

SEQ ID NO: 14337 - RNA, 22 nt, Human
cggcugugucuucacaggagcc

SEQ ID NO: 14338 - RNA, 22 nt, Human
cggcuucaaagggagcgagauc

SEQ ID NO: 14339 - RNA, 22 nt, Human
cggcuucaucuuuacuucaaga

SEQ ID NO: 14340 - RNA, 21 nt, Human
cggcuucugcauuccagagcu

SEQ ID NO: 14341 - RNA, 22 nt, Human
cggcuucuuuuaagguugcuga

SEQ ID NO: 14342 - RNA, 22 nt, Human
cgggcagaucacacagggcuug

SEQ ID NO: 14343 - RNA, 17 nt, Human
cgggcauggagggcagg

SEQ ID NO: 14344 - RNA, 18 nt, Human
cgggcgggcgccuggccc

SEQ ID NO: 14345 - RNA, 22 nt, Human
cggggagaacacuguguccuuc

SEQ ID NO: 14346 - RNA, 22 nt, Human
cggggccuaccgcugcguggcc

SEQ ID NO: 14347 - RNA, 22 nt, Human
cgggggaguugaggcacauggg

SEQ ID NO: 14348 - RNA, 22 nt, Human
cgguccuggcacuugcggcucc

SEQ ID NO: 14349 - RNA, 22 nt, Human
cgguccuguacuugaugagaua

SEQ ID NO: 14350 - RNA, 22 nt, Human
cggucugagauuuuuaauaggc

SEQ ID NO: 14351 - RNA, 21 nt, Human
cgguggcucccgggauggcuc

SEQ ID NO: 14352 - RNA, 22 nt, Human
cgguggucauaaguggcuggcg

SEQ ID NO: 14353 - RNA, 22 nt, Human
cguauacaugaagacauugcug

SEQ ID NO: 14354 - RNA, 22 nt, Human
cgucacuucuuagucuauuuuc

SEQ ID NO: 14355 - RNA, 22 nt, Human
cgucccuaccuggcagcugcgc

SEQ ID NO: 14356 - RNA, 22 nt, Human
cguccugggucugggaaggcau

SEQ ID NO: 14357 - RNA, 22 nt, Human
cgucuccuguguucgagccauu

SEQ ID NO: 14358 - RNA, 22 nt, Human
cgucugccuaaggacugccuuc

SEQ ID NO: 14359 - RNA, 22 nt, Human
cgucuuccucuuacgaugcgcu

SEQ ID NO: 14360 - RNA, 22 nt, Human
cgucuuuauugauuccuucaag

SEQ ID NO: 14361 - RNA, 22 nt, Human
cgugacagggucuggcugguca

SEQ ID NO: 14362 - RNA, 22 nt, Human
cgugagggcauggcagugagga

SEQ ID NO: 14363 - RNA, 22 nt, Human
cgugaguggguagcuuauucuu

SEQ ID NO: 14364 - RNA, 22 nt, Human
cgugauuucuggcuuucuauau

SEQ ID NO: 14365 - RNA, 22 nt, Human
cgugccuuggucccaaccccca

SEQ ID NO: 14366 - RNA, 22 nt, Human
cgugcuaacguuuaagguuaug

SEQ ID NO: 14367 - RNA, 22 nt, Human
cguggccagccauuuccuggaa

SEQ ID NO: 14368 - RNA, 22 nt, Human
cguggggacccacgugcagcac

SEQ ID NO: 14369 - RNA, 23 nt, Human
cguguccuucagggagagugugg

SEQ ID NO: 14370 - RNA, 22 nt, Human
cgugucugggauagcagaagua

SEQ ID NO: 14371 - RNA, 22 nt, Human
cgugucugggcucccauggcag

SEQ ID NO: 14372 - RNA, 22 nt, Human
cgugucuguaugucaaucagcu

SEQ ID NO: 14373 - RNA, 23 nt, Human
cgugucugugggcgauccggccu

SEQ ID NO: 14374 - RNA, 20 nt, Human
cguguguggcuauuuugggu

SEQ ID NO: 14375 - RNA, 22 nt, Human
cguuaauaggugcaagguaagg

SEQ ID NO: 14376 - RNA, 22 nt, Human
cguuaguggaguuugaagcugu

SEQ ID NO: 14377 - RNA, 22 nt, Human
cguucacaucguauuauuggga

SEQ ID NO: 14378 - RNA, 22 nt, Human
cguuccucuacuccagcuaccc

SEQ ID NO: 14379 - RNA, 22 nt, Human
cguuuaaccagcacgcuuggcc

SEQ ID NO: 14380 - RNA, 22 nt, Human
gaugucuuugcuguuauccacu

SEQ ID NO: 14381 - RNA, 22 nt, Human
gaugugaggugguaaacaggga

SEQ ID NO: 14382 - RNA, 22 nt, Human
gaugugagugguagcugggauu

SEQ ID NO: 14383 - RNA, 22 nt, Human
gauguggaugaucuuagauggu

SEQ ID NO: 14384 - RNA, 22 nt, Human
gauguguaacaugcugugacau

SEQ ID NO: 14385 - RNA, 20 nt, Human
gauguguccucagcaguggu

SEQ ID NO: 14386 - RNA, 22 nt, Human
gauguguccuuuucuccaucca

SEQ ID NO: 14387 - RNA, 22 nt, Human
gaugugucuccguuucaaggca

SEQ ID NO: 14388 - RNA, 22 nt, Human
gauguguguuuauacauauauu

SEQ ID NO: 14389 - RNA, 22 nt, Human
gcaagcaguuacccaggauucg

SEQ ID NO: 14390 - RNA, 22 nt, Human
gcaagcugugccuucucaggau

SEQ ID NO: 14391 - RNA, 22 nt, Human
gcaaggaccuuugagcgugcca

SEQ ID NO: 14392 - RNA, 22 nt, Human
gcaaggagcaccuuucuggaac

SEQ ID NO: 14393 - RNA, 22 nt, Human
gcaaggaggcugguggaggaag

SEQ ID NO: 14394 - RNA, 21 nt, Human
gcaaguacuaucaucauuauc

SEQ ID NO: 14395 - RNA, 22 nt, Human
gcaaguagugggaaagaagaug

SEQ ID NO: 14396 - RNA, 22 nt, Human
gcaagugauugucacgucccuu

SEQ ID NO: 14397 - RNA, 22 nt, Human
gcaaguuauuuccauuuaaagc

SEQ ID NO: 14398 - RNA, 22 nt, Human
gcaaguuggagacucaugagaa

SEQ ID NO: 14399 - RNA, 22 nt, Human
gcaauaaagauuuuacugucag

SEQ ID NO: 14400 - RNA, 22 nt, Human
gcaauacaguaagaguacugua

SEQ ID NO: 14401 - RNA, 22 nt, Human
gcaauagagcagcuaauggaaa

SEQ ID NO: 14402 - RNA, 22 nt, Human
gcaauauaaccaguugucaugc

SEQ ID NO: 14403 - RNA, 22 nt, Human
gcaaugaauaaauaauguuuag

SEQ ID NO: 14404 - RNA, 22 nt, Human
gcaaugaggagugguagggaua

SEQ ID NO: 14405 - RNA, 22 nt, Human
gcaaugcaaucuuuauuauauu

SEQ ID NO: 14406 - RNA, 22 nt, Human
gcaaugcagggcaacauggggu

SEQ ID NO: 14407 - RNA, 20 nt, Human
gcaauggcgugcuaguucug

SEQ ID NO: 14408 - RNA, 22 nt, Human
gcaaugucugcaaugggugugg

SEQ ID NO: 14409 - RNA, 22 nt, Human
gcaauuauaucaccagagaucu

SEQ ID NO: 14410 - RNA, 22 nt, Human
gcacaaaacacauuuugacaau

SEQ ID NO: 14411 - RNA, 22 nt, Human
gcacaaacugcaauuacuuuug

SEQ ID NO: 14412 - RNA, 22 nt, Human
gcacaaagaugaauacagaaug

SEQ ID NO: 14413 - RNA, 22 nt, Human
gcacaaauacaaaguugagaaa

SEQ ID NO: 14414 - RNA, 17 nt, Human
gcacaaaucaauuacua

SEQ ID NO: 14415 - RNA, 23 nt, Human
gcacaagaccuggcagcuuccau

SEQ ID NO: 14416 - RNA, 22 nt, Human
gcacaaggguggucucuggagc

SEQ ID NO: 14417 - RNA, 22 nt, Human
gcacaaguuucuucauuguuca

SEQ ID NO: 14418 - RNA, 22 nt, Human
gcacaauaauucuuguuuugcu

SEQ ID NO: 14419 - RNA, 22 nt, Human
gcacaauuauuuaugcaguaug

SEQ ID NO: 14420 - RNA, 22 nt, Human
gcacacacuguuuuccucacau

SEQ ID NO: 14421 - RNA, 22 nt, Human
gcacacagacuaaccauauuuc

SEQ ID NO: 14422 - RNA, 19 nt, Human
gcacacaguagggcuggca

SEQ ID NO: 14423 - RNA, 19 nt, Human
gcacacauacacccuuugg

SEQ ID NO: 14424 - RNA, 22 nt, Human
gcacacaucuuguaauccugag

SEQ ID NO: 14425 - RNA, 22 nt, Human
gcacacauucggauucuuaacc

SEQ ID NO: 14426 - RNA, 22 nt, Human
gcacacccucucaccagcacug

SEQ ID NO: 14427 - RNA, 22 nt, Human
gcacacguagaagaacuugacu

SEQ ID NO: 14428 - RNA, 22 nt, Human
gcacagaaaugucuacacaugu

SEQ ID NO: 14429 - RNA, 22 nt, Human
gcacagaaccagacaugaggca

SEQ ID NO: 14430 - RNA, 22 nt, Human
gcacagaacuucucuuaguagg

SEQ ID NO: 14431 - RNA, 22 nt, Human
gcacagaagagcuuuggaauga

SEQ ID NO: 14432 - RNA, 22 nt, Human
gcacagacucaccuuaauuuga

SEQ ID NO: 14433 - RNA, 22 nt, Human
gcacagagaggcugugagcgcc

SEQ ID NO: 14434 - RNA, 22 nt, Human
gcacagagagggaagguaacuu

SEQ ID NO: 14435 - RNA, 20 nt, Human
gcacagagaugagcaaagua

SEQ ID NO: 14436 - RNA, 22 nt, Human
gcacagagugggugagaugugg

SEQ ID NO: 14437 - RNA, 22 nt, Human
gcacagcagacuugguggggcu

SEQ ID NO: 14438 - RNA, 22 nt, Human
gcacagcagcugcucaguugcu

SEQ ID NO: 14439 - RNA, 21 nt, Human
gcacagcaugaguguuggcau

SEQ ID NO: 14440 - RNA, 22 nt, Human
gcacagccacguaaugugguca

SEQ ID NO: 14441 - RNA, 22 nt, Human
gcacagccggaccgaggaaaag

SEQ ID NO: 14442 - RNA, 18 nt, Human
gcacagcuaggagggucc

SEQ ID NO: 14443 - RNA, 22 nt, Human
gcacagcucgagcucaggaggg

SEQ ID NO: 14444 - RNA, 19 nt, Human
gcacaggacaucugaugga

SEQ ID NO: 14445 - RNA, 22 nt, Human
gcacagggagacagccguggcc

SEQ ID NO: 14446 - RNA, 22 nt, Human
gcacagggccuggcacauaaga

SEQ ID NO: 14447 - RNA, 22 nt, Human
gcacagucaacacuuauucacc

SEQ ID NO: 14448 - RNA, 22 nt, Human
gcacagugauaggcaguugugc

SEQ ID NO: 14449 - RNA, 22 nt, Human
gcacaguggaguguguccaggg

SEQ ID NO: 14450 - RNA, 22 nt, Human
gcacauaacugaccacaucuaa

SEQ ID NO: 14451 - RNA, 22 nt, Human
gcacauauguaaauagcugccu

SEQ ID NO: 14452 - RNA, 22 nt, Human
gcacaugaggcugucuuugucu

SEQ ID NO: 14453 - RNA, 21 nt, Human
gcacaugagggagggcaugcc

SEQ ID NO: 14454 - RNA, 20 nt, Human
gcacaugcaacuuuuauuua

SEQ ID NO: 14455 - RNA, 22 nt, Human
gcacauuguuacucuuacugug

SEQ ID NO: 14456 - RNA, 22 nt, Human
gcacauuucucaaagaauuguc

SEQ ID NO: 14457 - RNA, 22 nt, Human
gcacauuugccacugagcuccu

SEQ ID NO: 14458 - RNA, 22 nt, Human
gcaccacaucaaugaggggagc

SEQ ID NO: 14459 - RNA, 22 nt, Human
gcaccagcugcuggguucuaga

SEQ ID NO: 14460 - RNA, 22 nt, Human
gcaccagggugcuguguucugg

SEQ ID NO: 14461 - RNA, 22 nt, Human
gcacccacuuaggccagucaau

SEQ ID NO: 14462 - RNA, 22 nt, Human
gcacccagaauaaggacaggac

SEQ ID NO: 14463 - RNA, 22 nt, Human
gcacccagaggucagcagugcu

SEQ ID NO: 14464 - RNA, 21 nt, Human
gcacccagccgguucucccag

SEQ ID NO: 14465 - RNA, 19 nt, Human
gcaccccaucuuccuccug

SEQ ID NO: 14466 - RNA, 22 nt, Human
gcaccccuggacgguagggcca

SEQ ID NO: 14467 - RNA, 22 nt, Human
gcacccugcucuauccuugcua

SEQ ID NO: 14468 - RNA, 17 nt, Human
gcaccgugggcacacuc

SEQ ID NO: 14469 - RNA, 22 nt, Human
gcaccugaacgaccugcuccag

SEQ ID NO: 14470 - RNA, 22 nt, Human
gcaccugaggaggcaucuggag

SEQ ID NO: 14471 - RNA, 22 nt, Human
gcaccugauugauuucacugcu

SEQ ID NO: 14472 - RNA, 22 nt, Human
gcaccugguuuauauaaucaua

SEQ ID NO: 14473 - RNA, 22 nt, Human
gcaccuuaauuaagaaauugcc

SEQ ID NO: 14474 - RNA, 22 nt, Human
gcacguguucuguggcaugggu

SEQ ID NO: 14475 - RNA, 22 nt, Human
gcacuagauacuguucaggaaa

SEQ ID NO: 14476 - RNA, 22 nt, Human
gcacuaguucuacugccagcaa

SEQ ID NO: 14477 - RNA, 22 nt, Human
gcacuauagcugcagcacagag

SEQ ID NO: 14478 - RNA, 22 nt, Human
gcacucaguaccaggucacugc

SEQ ID NO: 14479 - RNA, 22 nt, Human
gcacucugugaucugcagagcc

SEQ ID NO: 14480 - RNA, 22 nt, Human
gcacugaaauuauaugcauuug

SEQ ID NO: 14481 - RNA, 19 nt, Human
gcacugaagaguuggucac

SEQ ID NO: 14482 - RNA, 22 nt, Human
gcacugaaugccaaaguguagg

SEQ ID NO: 14483 - RNA, 22 nt, Human
gcacugccaucaaugcaugaca

SEQ ID NO: 14484 - RNA, 22 nt, Human
gcacugccuaugcaaauguacu

SEQ ID NO: 14485 - RNA, 22 nt, Human
gcacugccugugagcccugguu

SEQ ID NO: 14486 - RNA, 22 nt, Human
gcacugcuuucugagucauugu

SEQ ID NO: 14487 - RNA, 22 nt, Human
gcacugggcuccaggaaggagg

SEQ ID NO: 14488 - RNA, 22 nt, Human
gcacuggggucauagccuccag

SEQ ID NO: 14489 - RNA, 22 nt, Human
gcacugggugggagaucugaau

SEQ ID NO: 14490 - RNA, 22 nt, Human
gcacugguuuauuuaagaacaa

SEQ ID NO: 14491 - RNA, 22 nt, Human
gcacugugacagcaagagugag

SEQ ID NO: 14492 - RNA, 22 nt, Human
gcacugugcuaaacauguauca

SEQ ID NO: 14493 - RNA, 22 nt, Human
gcacugugcuuaguucacuauu

SEQ ID NO: 14494 - RNA, 22 nt, Human
gcacuucacaugccuuuuccug

SEQ ID NO: 14495 - RNA, 21 nt, Human
gcacuucugcagggcugcugg

SEQ ID NO: 14496 - RNA, 22 nt, Human
gcacuugacccccagagcuggu

SEQ ID NO: 14497 - RNA, 20 nt, Human
gcacuuggcugcugcuucuc

SEQ ID NO: 14498 - RNA, 22 nt, Human
agaacagcaggaaggccaggua

SEQ ID NO: 14499 - RNA, 22 nt, Human
agaacagcaguuaugguucauu

SEQ ID NO: 14500 - RNA, 22 nt, Human
agaacagccaacuguguaggag

SEQ ID NO: 14501 - RNA, 22 nt, Human
agaacaggaggaagccagcucc

SEQ ID NO: 14502 - RNA, 22 nt, Human
agaacagugcugauaaaucaua

SEQ ID NO: 14503 - RNA, 22 nt, Human
agaacauaucuguuuucuaacu

SEQ ID NO: 14504 - RNA, 22 nt, Human
agaacauuugucaaaaagccaa

SEQ ID NO: 14505 - RNA, 22 nt, Human
agaaccucuggauacaguuuaa

SEQ ID NO: 14506 - RNA, 22 nt, Human
agaaccuugaucuuggacuucu

SEQ ID NO: 14507 - RNA, 22 nt, Human
agaacgucuuuacucuuacgaa

SEQ ID NO: 14508 - RNA, 22 nt, Human
agaacuauugcaauaacaagaa

SEQ ID NO: 14509 - RNA, 22 nt, Human
agaacucugaacacugucugga

SEQ ID NO: 14510 - RNA, 22 nt, Human
agaacucuuuaucuguggaaug

SEQ ID NO: 14511 - RNA, 20 nt, Human
agaacugaaucauuuugggu

SEQ ID NO: 14512 - RNA, 21 nt, Human
agaacugauuaaauaagcagu

SEQ ID NO: 14513 - RNA, 22 nt, Human
agaacugguggugaucaguuau

SEQ ID NO: 14514 - RNA, 22 nt, Human
agaacuguccuuggaggagagu

SEQ ID NO: 14515 - RNA, 22 nt, Human
agaacugugaaguaugugaaau

SEQ ID NO: 14516 - RNA, 22 nt, Human
agaagaaagauugaagguuccu

SEQ ID NO: 14517 - RNA, 22 nt, Human
agaagagaacugccaaacacuu

SEQ ID NO: 14518 - RNA, 22 nt, Human
agaagaguaguaacagaaauua

SEQ ID NO: 14519 - RNA, 22 nt, Human
agaagauguugcaguugaugcg

SEQ ID NO: 14520 - RNA, 23 nt, Human
agaagcaaugcuuuuuuuccucu

SEQ ID NO: 14521 - RNA, 18 nt, Human
agaagcacaagaugucuu

SEQ ID NO: 14522 - RNA, 22 nt, Human
agaagcacaccugaccucuagc

SEQ ID NO: 14523 - RNA, 22 nt, Human
agaagcagacucugaggcaagg

SEQ ID NO: 14524 - RNA, 22 nt, Human
agaagcagcuuucaaggugauu

SEQ ID NO: 14525 - RNA, 22 nt, Human
agaagcaggcagauuucagcuc

SEQ ID NO: 14526 - RNA, 18 nt, Human
agaagcagguucucccag

SEQ ID NO: 14527 - RNA, 20 nt, Human
agaagcaucauucugauguc

SEQ ID NO: 14528 - RNA, 22 nt, Human
agaagccaagaacagacagugc

SEQ ID NO: 14529 - RNA, 20 nt, Human
agaagccaagugacauguuu

SEQ ID NO: 14530 - RNA, 22 nt, Human
agaagccaauccuugucucucu

SEQ ID NO: 14531 - RNA, 22 nt, Human
agaagccagaauauucauggau

SEQ ID NO: 14532 - RNA, 22 nt, Human
agaagccagauuguagugggac

SEQ ID NO: 14533 - RNA, 22 nt, Human
agaagccagucgcucucccgca

SEQ ID NO: 14534 - RNA, 22 nt, Human
agaagccauaguaucucagggu

SEQ ID NO: 14535 - RNA, 22 nt, Human
agaagccauauuuagggaggag

SEQ ID NO: 14536 - RNA, 21 nt, Human
agaagccaugccaguaaaauu

SEQ ID NO: 14537 - RNA, 22 nt, Human
agaagccauggggucaccagag

SEQ ID NO: 14538 - RNA, 22 nt, Human
agaagccauucucaguuccuga

SEQ ID NO: 14539 - RNA, 22 nt, Human
agaagccauugaagcagaccuc

SEQ ID NO: 14540 - RNA, 21 nt, Human
agaagcuagucacuaaaucca

SEQ ID NO: 14541 - RNA, 22 nt, Human
agaagcugagaaugaauuaaga

SEQ ID NO: 14542 - RNA, 20 nt, Human
agaagcugagacuggguuuu

SEQ ID NO: 14543 - RNA, 22 nt, Human
agaagcuguugcauuccuggcg

SEQ ID NO: 14544 - RNA, 22 nt, Human
agaaggaaacagcugugcuuug

SEQ ID NO: 14545 - RNA, 22 nt, Human
agaaggaagccaggagggugca

SEQ ID NO: 14546 - RNA, 22 nt, Human
agaaggaaggauaacugcauua

SEQ ID NO: 14547 - RNA, 22 nt, Human
agaaggcagaugggacggagca

SEQ ID NO: 14548 - RNA, 22 nt, Human
agaaggcaucagaaguguguag

SEQ ID NO: 14549 - RNA, 22 nt, Human
agaaggcugagacugggaugaa

SEQ ID NO: 14550 - RNA, 22 nt, Human
agaaggguagggacuuauccaa

SEQ ID NO: 14551 - RNA, 22 nt, Human
agaaguauaacuauuugcuuuc

SEQ ID NO: 14552 - RNA, 22 nt, Human
agaaguaugugagaaauuaucc

SEQ ID NO: 14553 - RNA, 22 nt, Human
agaagucaaugaugagagugcu

SEQ ID NO: 14554 - RNA, 21 nt, Human
agaaguccccacucugucgca

SEQ ID NO: 14555 - RNA, 22 nt, Human
agaagugagugugacucagcag

SEQ ID NO: 14556 - RNA, 22 nt, Human
agaagugaguugugacuauggg

SEQ ID NO: 14557 - RNA, 22 nt, Human
agaagugccauacuguggucca

SEQ ID NO: 14558 - RNA, 22 nt, Human
agaagugucucaucaggcaaua

SEQ ID NO: 14559 - RNA, 22 nt, Human
agaaguuaauuccugaaauucu

SEQ ID NO: 14560 - RNA, 22 nt, Human
agaaguuaccacauacuucucu

SEQ ID NO: 14561 - RNA, 19 nt, Human
agaaguuagacauugcaau

SEQ ID NO: 14562 - RNA, 22 nt, Human
agaaguuugaaauuaggagaaa

SEQ ID NO: 14563 - RNA, 22 nt, Human
agaaguuuucauuaccuauaca

SEQ ID NO: 14564 - RNA, 22 nt, Human
agaauaaaauagucugaagaug

SEQ ID NO: 14565 - RNA, 22 nt, Human
agaauaaacugcuuuagggcag

SEQ ID NO: 14566 - RNA, 22 nt, Human
agaauaaauguuggacuuagga

SEQ ID NO: 14567 - RNA, 22 nt, Human
agaauagaauucucauagaauu

SEQ ID NO: 14568 - RNA, 22 nt, Human
agaauagagaaaaagguuauuu

SEQ ID NO: 14569 - RNA, 22 nt, Human
agaauaguuuuacuuuucuaug

SEQ ID NO: 14570 - RNA, 22 nt, Human
agaauauaguuaccaaauucug

SEQ ID NO: 14571 - RNA, 22 nt, Human
agaauaucguagcauauuaucu

SEQ ID NO: 14572 - RNA, 22 nt, Human
agaauaugccuuagcaagccca

SEQ ID NO: 14573 - RNA, 22 nt, Human
agaauauugaaaguucuugaca

SEQ ID NO: 14574 - RNA, 22 nt, Human
agaaucaauuagauucuaugag

SEQ ID NO: 14575 - RNA, 22 nt, Human
agaaucagaugaagacuccugc

SEQ ID NO: 14576 - RNA, 22 nt, Human
agaaucagugcuggcuauuagc

SEQ ID NO: 14577 - RNA, 22 nt, Human
agaaucauuauauuuauuaagc

SEQ ID NO: 14578 - RNA, 22 nt, Human
agaauccuauugucagauucuu

SEQ ID NO: 14579 - RNA, 22 nt, Human
agaauccuguuuuacuucauca

SEQ ID NO: 14580 - RNA, 22 nt, Human
agaaucugcauuuuuaauaaca

SEQ ID NO: 14581 - RNA, 22 nt, Human
agaaucuuggaacucagaucac

SEQ ID NO: 14582 - RNA, 22 nt, Human
agaaucuuguuucuuguguguu

SEQ ID NO: 14583 - RNA, 22 nt, Human
agaaugauuuuggacaauaugg

SEQ ID NO: 14584 - RNA, 17 nt, Human
agaaugcaaagcaggcu

SEQ ID NO: 14585 - RNA, 22 nt, Human
agaaugcaagauaaacuuuauu

SEQ ID NO: 14586 - RNA, 22 nt, Human
agaaugcauuuuguguagcuau

SEQ ID NO: 14587 - RNA, 22 nt, Human
agaaugcuccagagcugaaaga

SEQ ID NO: 14588 - RNA, 20 nt, Human
agaaugcuuuuugcauugca

SEQ ID NO: 14589 - RNA, 22 nt, Human
agaaugucuaaguguucagccc

SEQ ID NO: 14590 - RNA, 22 nt, Human
agaaugugaagacccgguuugu

SEQ ID NO: 14591 - RNA, 22 nt, Human
agaaugugauauagugauaugu

SEQ ID NO: 14592 - RNA, 22 nt, Human
agaaugugugcaagcaagugug

SEQ ID NO: 14593 - RNA, 22 nt, Human
agaauguguuuuaacaugggaa

SEQ ID NO: 14594 - RNA, 22 nt, Human
agaauuacagcuuuuagaauag

SEQ ID NO: 14595 - RNA, 22 nt, Human
agaauuagucacaauuauagga

SEQ ID NO: 14596 - RNA, 22 nt, Human
agaauucauaggaaguuuccua

SEQ ID NO: 14597 - RNA, 22 nt, Human
agcaggugagcacagccaggcu

SEQ ID NO: 14598 - RNA, 22 nt, Human
agcaggugaucgcgugugcucc

SEQ ID NO: 14599 - RNA, 22 nt, Human
agcaggugcguuacuucacucu

SEQ ID NO: 14600 - RNA, 22 nt, Human
agcagguggacagaggaagaaa

SEQ ID NO: 14601 - RNA, 18 nt, Human
agcagguggauuuauugg

SEQ ID NO: 14602 - RNA, 22 nt, Human
agcaggugggaucaagcuggca

SEQ ID NO: 14603 - RNA, 22 nt, Human
agcaggugggcaugaaagcuga

SEQ ID NO: 14604 - RNA, 21 nt, Human
agcagguguaaaggaggaaau

SEQ ID NO: 14605 - RNA, 18 nt, Human
agcaggugugcagaaugu

SEQ ID NO: 14606 - RNA, 18 nt, Human
agcagguucucacagcca

SEQ ID NO: 14607 - RNA, 22 nt, Human
agccaggcuacuccuugcugac

SEQ ID NO: 14608 - RNA, 22 nt, Human
agccagggacgcugcaggcuac

SEQ ID NO: 14609 - RNA, 22 nt, Human
agccagggauggcagugcccag

SEQ ID NO: 14610 - RNA, 22 nt, Human
agccagggcucuccuucgcgug

SEQ ID NO: 14611 - RNA, 22 nt, Human
agccagggcugcagguuccuug

SEQ ID NO: 14612 - RNA, 22 nt, Human
agccaggguaagguacuuagua

SEQ ID NO: 14613 - RNA, 22 nt, Human
agccagggucucucgcucuguu

SEQ ID NO: 14614 - RNA, 21 nt, Human
agccaggguggacacuguaug

SEQ ID NO: 14615 - RNA, 17 nt, Human
agccagguacaagucca

SEQ ID NO: 14616 - RNA, 22 nt, Human
agccaggucaggaaagguccca

SEQ ID NO: 14617 - RNA, 22 nt, Human
agccaggugcaguggcacacac

SEQ ID NO: 14618 - RNA, 21 nt, Human
agccagucauuaugagcggga

SEQ ID NO: 14619 - RNA, 22 nt, Human
agccagugaugaagacucugga

SEQ ID NO: 14620 - RNA, 22 nt, Human
agccagugcagcuggaaauuca

SEQ ID NO: 14621 - RNA, 22 nt, Human
agccaguggaauucccaggggu

SEQ ID NO: 14622 - RNA, 22 nt, Human
agccagugucgugugacaugag

SEQ ID NO: 14623 - RNA, 23 nt, Human
agccaguuguagccacagaacuc

SEQ ID NO: 14624 - RNA, 22 nt, Human
agccauaucaagcauucuucac

SEQ ID NO: 14625 - RNA, 23 nt, Human
agccaucauccugcugcuggggc

SEQ ID NO: 14626 - RNA, 22 nt, Human
agccauccucccaccucagccu

SEQ ID NO: 14627 - RNA, 22 nt, Human
agccaucuaagaaauacaaaau

SEQ ID NO: 14628 - RNA, 22 nt, Human
agccaucucugaaaucaaagcu

SEQ ID NO: 14629 - RNA, 22 nt, Human
agccauuagucauuuuagaaua

SEQ ID NO: 14630 - RNA, 22 nt, Human
agccauugaauuuagugccuuu

SEQ ID NO: 14631 - RNA, 22 nt, Human
agccauuguugucuucaucuuc

SEQ ID NO: 14632 - RNA, 22 nt, Human
agccauuuuccugaaauauaac

SEQ ID NO: 14633 - RNA, 22 nt, Human
agccauuuugguaaugauaaca

SEQ ID NO: 14634 - RNA, 22 nt, Human
agcccaagccuggcuggcgaug

SEQ ID NO: 14635 - RNA, 22 nt, Human
agcccaagcuaugaggugaccu

SEQ ID NO: 14636 - RNA, 22 nt, Human
agcccagauaaaguacaaccau

SEQ ID NO: 14637 - RNA, 22 nt, Human
agcccagaugguagcccuagaa

SEQ ID NO: 14638 - RNA, 22 nt, Human
agcccagcaaagggguuugaga

SEQ ID NO: 14639 - RNA, 22 nt, Human
agcccagcacugggggcccagc

SEQ ID NO: 14640 - RNA, 23 nt, Human
agcccagcagagaaccuaggucc

SEQ ID NO: 14641 - RNA, 22 nt, Human
agcccagccugauucuacaccc

SEQ ID NO: 14642 - RNA, 22 nt, Human
agcccagcggagcgggcccggg

SEQ ID NO: 14643 - RNA, 18 nt, Human
agcccagcggagugaauc

SEQ ID NO: 14644 - RNA, 22 nt, Human
agcccaggagccuuuggagggu

SEQ ID NO: 14645 - RNA, 22 nt, Human
agcccaggaguccuuaaggacc

SEQ ID NO: 14646 - RNA, 18 nt, Human
agcccaggcaucgucugc

SEQ ID NO: 14647 - RNA, 20 nt, Human
agcccaggccugugugaguc

SEQ ID NO: 14648 - RNA, 22 nt, Human
agcccagggaaccaggaagugg

SEQ ID NO: 14649 - RNA, 22 nt, Human
agcccaggucuggcccagccug

SEQ ID NO: 14650 - RNA, 22 nt, Human
agcccauguggcugaggcuucu

SEQ ID NO: 14651 - RNA, 22 nt, Human
agccccagccccucucucacaa

SEQ ID NO: 14652 - RNA, 22 nt, Human
agccccaguaagggagggccug

SEQ ID NO: 14653 - RNA, 22 nt, Human
agccccaguccgcugcgggcgg

SEQ ID NO: 14654 - RNA, 23 nt, Human
agccccucauaucugcuuucucu

SEQ ID NO: 14655 - RNA, 22 nt, Human
agccccucuccgcccugagucg

SEQ ID NO: 14656 - RNA, 22 nt, Human
agccccucuguggcucugccuc

SEQ ID NO: 14657 - RNA, 22 nt, Human
agccccugggaguagcugcugc

SEQ ID NO: 14658 - RNA, 22 nt, Human
agccccuguacccugagugcuu

SEQ ID NO: 14659 - RNA, 22 nt, Human
agccccuguccucucugaugac

SEQ ID NO: 14660 - RNA, 22 nt, Human
agccccuguuuuuccagucaga

SEQ ID NO: 14661 - RNA, 22 nt, Human
agcccgagcgcaccuguggaaa

SEQ ID NO: 14662 - RNA, 22 nt, Human
agcccgcaucucgcuaaagaua

SEQ ID NO: 14663 - RNA, 22 nt, Human
agcccuccaucugugcucaggc

SEQ ID NO: 14664 - RNA, 22 nt, Human
agcccuccucacaucagcgucc

SEQ ID NO: 14665 - RNA, 22 nt, Human
agcccugaccuguccuguucug

SEQ ID NO: 14666 - RNA, 22 nt, Human
agcccugauuaaccuuggcuuu

SEQ ID NO: 14667 - RNA, 22 nt, Human
agcccugcccugccauguggca

SEQ ID NO: 14668 - RNA, 22 nt, Human
agcccugcgaucgugauuucuu

SEQ ID NO: 14669 - RNA, 22 nt, Human
agcccugcgcucacguucugca

SEQ ID NO: 14670 - RNA, 22 nt, Human
agcccugcucaucuggaucccg

SEQ ID NO: 14671 - RNA, 22 nt, Human
agcccugcugcuucuuguauuu

SEQ ID NO: 14672 - RNA, 22 nt, Human
agcccuggagcaaaggugucuu

SEQ ID NO: 14673 - RNA, 22 nt, Human
agcccugggcguuacugggaug

SEQ ID NO: 14674 - RNA, 22 nt, Human
agcccugggcuguagauaagca

SEQ ID NO: 14675 - RNA, 22 nt, Human
agcccugggucccaguccuggc

SEQ ID NO: 14676 - RNA, 22 nt, Human
agcccugguuugcagcauuugc

SEQ ID NO: 14677 - RNA, 20 nt, Human
agcccuguaaauccccugga

SEQ ID NO: 14678 - RNA, 22 nt, Human
agcccuguuaacuguuuugaag

SEQ ID NO: 14679 - RNA, 22 nt, Human
agcccuguugucugaugauggg

SEQ ID NO: 14680 - RNA, 20 nt, Human
agcccuguuuccuggagaga

SEQ ID NO: 14681 - RNA, 22 nt, Human
agcccuugaguguaucucaaau

SEQ ID NO: 14682 - RNA, 22 nt, Human
agcccuuuccaauuugauuuau

SEQ ID NO: 14683 - RNA, 22 nt, Human
agccuccaucucccaucuguga

SEQ ID NO: 14684 - RNA, 22 nt, Human
agccuccuggaguuucugggau

SEQ ID NO: 14685 - RNA, 22 nt, Human
agccucuagacccuggccugca

SEQ ID NO: 14686 - RNA, 22 nt, Human
agccucucaaagaaacccugua

SEQ ID NO: 14687 - RNA, 22 nt, Human
agccucucauguucucccccag

SEQ ID NO: 14688 - RNA, 22 nt, Human
agccucugaugaucacaggggg

SEQ ID NO: 14689 - RNA, 18 nt, Human
agccucuggcagagagaa

SEQ ID NO: 14690 - RNA, 22 nt, Human
agccucuggcccuagacugcuu

SEQ ID NO: 14691 - RNA, 22 nt, Human
agccucugguccucccucagcu

SEQ ID NO: 14692 - RNA, 22 nt, Human
agccugccaggcgcugccugga

SEQ ID NO: 14693 - RNA, 17 nt, Human
agccugccccaugcugc

SEQ ID NO: 14694 - RNA, 21 nt, Human
agccugccugaacucuguggc

SEQ ID NO: 14695 - RNA, 22 nt, Human
agccugccugugaggcuuugag

SEQ ID NO: 14696 - RNA, 22 nt, Human
agccugccuugggcugcuugag

SEQ ID NO: 14697 - RNA, 17 nt, Human
agccugcugaucucaca

SEQ ID NO: 14698 - RNA, 22 nt, Human
agccugcugggaagggaggcuu

SEQ ID NO: 14699 - RNA, 20 nt, Human
agccugcuguagaaguuugg

SEQ ID NO: 14700 - RNA, 22 nt, Human
agccuggagaagauguguauug

SEQ ID NO: 14701 - RNA, 19 nt, Human
agccuggagggcuggucac

SEQ ID NO: 14702 - RNA, 20 nt, Human
agccuggcaaacacccccag

SEQ ID NO: 14703 - RNA, 22 nt, Human
agccuggcacugccccauccau

SEQ ID NO: 14704 - RNA, 22 nt, Human
agccuggccaggccugcccagg

SEQ ID NO: 14705 - RNA, 22 nt, Human
agccuggcccugcugaacucug

SEQ ID NO: 14706 - RNA, 22 nt, Human
agccuggccugggcaggcacau

SEQ ID NO: 14707 - RNA, 22 nt, Human
agccuggcuuaauccuccuuuu

SEQ ID NO: 14708 - RNA, 19 nt, Human
agccuggcuuugcucugcu

SEQ ID NO: 14709 - RNA, 22 nt, Human
agccugggagacacuaaguugu

SEQ ID NO: 14710 - RNA, 22 nt, Human
agccugggcaugggacgggagg

SEQ ID NO: 14711 - RNA, 22 nt, Human
agccuggguggggguucggaga

SEQ ID NO: 14712 - RNA, 22 nt, Human
agccuggguuuuuauuaaggag

SEQ ID NO: 14713 - RNA, 22 nt, Human
agccuggugauaucagugguuu

SEQ ID NO: 14714 - RNA, 22 nt, Human
agccugguuuaagcauuuuaua

SEQ ID NO: 14715 - RNA, 22 nt, Human
agccugugacucugugaaacca

SEQ ID NO: 14716 - RNA, 22 nt, Human
agaggacacaucuuuccucaaa

SEQ ID NO: 14717 - RNA, 22 nt, Human
agaggacagagugcuggauuua

SEQ ID NO: 14718 - RNA, 22 nt, Human
agaggacagguuuuccaugggc

SEQ ID NO: 14719 - RNA, 22 nt, Human
agaggaguauuuucuaagggaa

SEQ ID NO: 14720 - RNA, 22 nt, Human
agaggaucuaagugaguccuca

SEQ ID NO: 14721 - RNA, 20 nt, Human
agaggauuuauguggaugug

SEQ ID NO: 14722 - RNA, 22 nt, Human
agaggcaagauuaucagggcau

SEQ ID NO: 14723 - RNA, 19 nt, Human
agaggcaagggcucaugac

SEQ ID NO: 14724 - RNA, 22 nt, Human
agaggcaaguucagagcuagga

SEQ ID NO: 14725 - RNA, 23 nt, Human
agaggcacuaauuauucagagau

SEQ ID NO: 14726 - RNA, 22 nt, Human
agaggcagaaguguucaaaccc

SEQ ID NO: 14727 - RNA, 22 nt, Human
agaggcagcagucauacuacag

SEQ ID NO: 14728 - RNA, 22 nt, Human
agaggcaugaucuuauaauuua

SEQ ID NO: 14729 - RNA, 22 nt, Human
agaggcaugcacagaugugcug

SEQ ID NO: 14730 - RNA, 21 nt, Human
agaggccaagucaucauuucc

SEQ ID NO: 14731 - RNA, 22 nt, Human
agaggccaccagagguggugcc

SEQ ID NO: 14732 - RNA, 22 nt, Human
agaggccagaucaucauagaug

SEQ ID NO: 14733 - RNA, 22 nt, Human
agaggccagcacugcagggaag

SEQ ID NO: 14734 - RNA, 22 nt, Human
agaggccagcuagcgggccauc

SEQ ID NO: 14735 - RNA, 22 nt, Human
agaggccaggcugcagagggau

SEQ ID NO: 14736 - RNA, 22 nt, Human
agaggccagguccagaguuugu

SEQ ID NO: 14737 - RNA, 22 nt, Human
agaggccaucugcucugugggg

SEQ ID NO: 14738 - RNA, 22 nt, Human
agaggccauggggcauuuuuca

SEQ ID NO: 14739 - RNA, 22 nt, Human
agaggcccugggcuggugugcu

SEQ ID NO: 14740 - RNA, 22 nt, Human
agaggccuaauugcuacccuuu

SEQ ID NO: 14741 - RNA, 22 nt, Human
agaggccugugugcuccagugg

SEQ ID NO: 14742 - RNA, 21 nt, Human
agaggccuuacaggauagacc

SEQ ID NO: 14743 - RNA, 22 nt, Human
agaggcgcagacucuugagugu

SEQ ID NO: 14744 - RNA, 22 nt, Human
agaggcggagguugcagugagc

SEQ ID NO: 14745 - RNA, 22 nt, Human
aggaagcuccaugaaggcagag

SEQ ID NO: 14746 - RNA, 22 nt, Human
aggaagcuccuggagagccagu

SEQ ID NO: 14747 - RNA, 22 nt, Human
aggaagcugcuaagaaacaaug

SEQ ID NO: 14748 - RNA, 22 nt, Human
aggaagcuggugugaggaugaa

SEQ ID NO: 14749 - RNA, 22 nt, Human
aggaagcugguuacgaagggau

SEQ ID NO: 14750 - RNA, 22 nt, Human
aggaagcuuagauuuccagauc

SEQ ID NO: 14751 - RNA, 22 nt, Human
aggaagcuuuaugaccagcuaa

SEQ ID NO: 14752 - RNA, 22 nt, Human
aggaaggaagagacaccauuug

SEQ ID NO: 14753 - RNA, 22 nt, Human
aggaaggacuccaugguccguc

SEQ ID NO: 14754 - RNA, 22 nt, Human
aggaaggacugcagcauuuggu

SEQ ID NO: 14755 - RNA, 22 nt, Human
aggaagggcuguuucuccaaga

SEQ ID NO: 14756 - RNA, 22 nt, Human
aggaaggguucuuugugaaaga

SEQ ID NO: 14757 - RNA, 20 nt, Human
aggaagugauguuuuaucug

SEQ ID NO: 14758 - RNA, 21 nt, Human
aggaaguggccagauugggaa

SEQ ID NO: 14759 - RNA, 22 nt, Human
aggaagugggaagggucugcca

SEQ ID NO: 14760 - RNA, 22 nt, Human
aggaagugggguucucucacug

SEQ ID NO: 14761 - RNA, 22 nt, Human
aggaagugucagggauaacgau

SEQ ID NO: 14762 - RNA, 23 nt, Human
aggaaguuaugaagggagaauag

SEQ ID NO: 14763 - RNA, 22 nt, Human
aggaaguuggcauuuuguuuca

SEQ ID NO: 14764 - RNA, 17 nt, Human
aggaauacagaucuuca

SEQ ID NO: 14765 - RNA, 22 nt, Human
aggaaucccgcaccagcugcug

SEQ ID NO: 14766 - RNA, 22 nt, Human
aggaaugauaguaaaagagaau

SEQ ID NO: 14767 - RNA, 22 nt, Human
aggaaugauucaagacuuggcu

SEQ ID NO: 14768 - RNA, 22 nt, Human
aggaaugguuauggggauagua

SEQ ID NO: 14769 - RNA, 22 nt, Human
aggaauguaaaucuagauuuua

SEQ ID NO: 14770 - RNA, 22 nt, Human
aggaauguaacaggaguaaaaa

SEQ ID NO: 14771 - RNA, 14 nt, Human
aggaauguccuagg

SEQ ID NO: 14772 - RNA, 22 nt, Human
aggaaugucgucauaaacauga

SEQ ID NO: 14773 - RNA, 22 nt, Human
aggaaugugacuauuuuuucag

SEQ ID NO: 14774 - RNA, 23 nt, Human
aggaaugugcccacccaucuccu

SEQ ID NO: 14775 - RNA, 22 nt, Human
aggaaugugccuagccucccug

SEQ ID NO: 14776 - RNA, 22 nt, Human
aggaauguggaagguggcggcg

SEQ ID NO: 14777 - RNA, 21 nt, Human
aggaauguguauauauacaau

SEQ ID NO: 14778 - RNA, 22 nt, Human
aggaauguuaaagauuaagagc

SEQ ID NO: 14779 - RNA, 22 nt, Human
aggaauguuuacacgacagaaa

SEQ ID NO: 14780 - RNA, 22 nt, Human
aggacaagacaaggaccagaga

SEQ ID NO: 14781 - RNA, 22 nt, Human
aggacaauugagaguuuguuga

SEQ ID NO: 14782 - RNA, 22 nt, Human
aggacacacagaauacaaaucc

SEQ ID NO: 14783 - RNA, 22 nt, Human
aggacacaccagguccagcugu

SEQ ID NO: 14784 - RNA, 22 nt, Human
aggacacagcugcucugcagag

SEQ ID NO: 14785 - RNA, 22 nt, Human
aggacacaggcaggaggagauc

SEQ ID NO: 14786 - RNA, 22 nt, Human
aggacacaugcacacccugcgu

SEQ ID NO: 14787 - RNA, 22 nt, Human
aggacacuuggcuauuguucca

SEQ ID NO: 14788 - RNA, 22 nt, Human
aggacagaaucuauauucaguu

SEQ ID NO: 14789 - RNA, 22 nt, Human
aggacagagggaccagagccca

SEQ ID NO: 14790 - RNA, 22 nt, Human
aggacagauuuuuggccaccag

SEQ ID NO: 14791 - RNA, 22 nt, Human
aggacagcagccauuggcaguc

SEQ ID NO: 14792 - RNA, 20 nt, Human
aggacagcagcugccacuug

SEQ ID NO: 14793 - RNA, 22 nt, Human
aggacaguccgggguccuccac

SEQ ID NO: 14794 - RNA, 22 nt, Human
aggacaguggacacuagucccu

SEQ ID NO: 14795 - RNA, 22 nt, Human
aggaccagugagucuggcaagu

SEQ ID NO: 14796 - RNA, 22 nt, Human
aggaccauccuaagguaggcaa

SEQ ID NO: 14797 - RNA, 22 nt, Human
aggacccagaggcagaggacgu

SEQ ID NO: 14798 - RNA, 22 nt, Human
aggacccugaggucuccuguga

SEQ ID NO: 14799 - RNA, 22 nt, Human
aggaccugacauuguguuuucu

SEQ ID NO: 14800 - RNA, 22 nt, Human
aggaccuuggaauaacaaauuc

SEQ ID NO: 14801 - RNA, 22 nt, Human
aggaccuuuggcaaggcugcuc

SEQ ID NO: 14802 - RNA, 22 nt, Human
aggacuaaaaagaugcucuccc

SEQ ID NO: 14803 - RNA, 22 nt, Human
aggacuccauguguccuggaga

SEQ ID NO: 14804 - RNA, 18 nt, Human
aggacuccugggaguugg

SEQ ID NO: 14805 - RNA, 23 nt, Human
aggacugcucacuugaggcuucc

SEQ ID NO: 14806 - RNA, 22 nt, Human
aggacuggcggucgguggggau

SEQ ID NO: 14807 - RNA, 22 nt, Human
aggacuggugugugaucagcau

SEQ ID NO: 14808 - RNA, 22 nt, Human
aggacuucaaauggaaacaaaa

SEQ ID NO: 14809 - RNA, 22 nt, Human
aggacuuccauggauggauugg

SEQ ID NO: 14810 - RNA, 22 nt, Human
aggacuucuccgauaagucaga

SEQ ID NO: 14811 - RNA, 22 nt, Human
aggacuucugagcugcuuuaaa

SEQ ID NO: 14812 - RNA, 22 nt, Human
aggagaaggaagugcaucacua

SEQ ID NO: 14813 - RNA, 22 nt, Human
aggagacaucuaacuguagguu

SEQ ID NO: 14814 - RNA, 21 nt, Human
aggagaccggcuuguuugugc

SEQ ID NO: 14815 - RNA, 22 nt, Human
aggagagaauguuccaggcuug

SEQ ID NO: 14816 - RNA, 22 nt, Human
aggagagcaggccagccguccc

SEQ ID NO: 14817 - RNA, 22 nt, Human
aggagauagucaaagcuucuug

SEQ ID NO: 14818 - RNA, 20 nt, Human
aggagaugauccagagucag

SEQ ID NO: 14819 - RNA, 22 nt, Human
aggagauggagcucagugggca

SEQ ID NO: 14820 - RNA, 22 nt, Human
aggagcaaggaagcuacaguuu

SEQ ID NO: 14821 - RNA, 19 nt, Human
aggagcacugccagcacca

SEQ ID NO: 14822 - RNA, 22 nt, Human
aggagcagaacugauucugacu

SEQ ID NO: 14823 - RNA, 22 nt, Human
aggagcagaacuguuguggagg

SEQ ID NO: 14824 - RNA, 22 nt, Human
aggagcagaauuuaaugugcag

SEQ ID NO: 14825 - RNA, 21 nt, Human
agcaggugaaccuccaguaca

SEQ ID NO: 14826 - RNA, 22 nt, Human
agcaggugacccaagcaggcug

SEQ ID NO: 14827 - RNA, 20 nt, Human
agcaggugacggggccugcu

SEQ ID NO: 14828 - RNA, 22 nt, Human
agcagguggauuuagacgggag

SEQ ID NO: 14829 - RNA, 18 nt, Human
agcagguggcgucugcag

SEQ ID NO: 14830 - RNA, 22 nt, Human
agcaggugguaggcagucagca

SEQ ID NO: 14831 - RNA, 22 nt, Human
agcagguggugggccagauuug

SEQ ID NO: 14832 - RNA, 22 nt, Human
agcagguguauauaaggcugag

SEQ ID NO: 14833 - RNA, 22 nt, Human
agcaggugucacuuucacucca

SEQ ID NO: 14834 - RNA, 22 nt, Human
agcagguguuagggauccaaug

SEQ ID NO: 14835 - RNA, 22 nt, Human
agcagguguuuguaucauaagg

SEQ ID NO: 14836 - RNA, 22 nt, Human
agcaguaagcaacugagcuugc

SEQ ID NO: 14837 - RNA, 22 nt, Human
agcaguaagugaagacuaguuu

SEQ ID NO: 14838 - RNA, 18 nt, Human
agcaguagcgccaggugc

SEQ ID NO: 14839 - RNA, 22 nt, Human
agcagucauuuuaggucaugca

SEQ ID NO: 14840 - RNA, 22 nt, Human
agcagugaaacagcugcauaug

SEQ ID NO: 14841 - RNA, 22 nt, Human
agcagugacuugcuuuguuucc

SEQ ID NO: 14842 - RNA, 23 nt, Human
agcagugaguaaacagauaggau

SEQ ID NO: 14843 - RNA, 22 nt, Human
agcagugaguaacacagaccag

SEQ ID NO: 14844 - RNA, 22 nt, Human
agcaguggcugacagacuuacc

SEQ ID NO: 14845 - RNA, 22 nt, Human
agcaguguucaaugauacacug

SEQ ID NO: 14846 - RNA, 22 nt, Human
agcaguuacuaguuaaaugcau

SEQ ID NO: 14847 - RNA, 23 nt, Human
agcaguuagggauacaaguuauc

SEQ ID NO: 14848 - RNA, 22 nt, Human
agcaguugagugggaaucaggc

SEQ ID NO: 14849 - RNA, 22 nt, Human
agcaguuuagcuauacugcuug

SEQ ID NO: 14850 - RNA, 22 nt, Human
agcaguuuggaaaauacuagaa

SEQ ID NO: 14851 - RNA, 22 nt, Human
agcaguuuuagggagacacauu

SEQ ID NO: 14852 - RNA, 22 nt, Human
agcaguuuuuauaacacuggaa

SEQ ID NO: 14853 - RNA, 22 nt, Human
agcauaaaggcacuagaaagag

SEQ ID NO: 14854 - RNA, 22 nt, Human
agcauaaguugguacagccacu

SEQ ID NO: 14855 - RNA, 22 nt, Human
agcauacaggucugaaacagcu

SEQ ID NO: 14856 - RNA, 22 nt, Human
agcauacaguugaaaguggcuu

SEQ ID NO: 14857 - RNA, 22 nt, Human
agcauagaaaagauucccagag

SEQ ID NO: 14858 - RNA, 22 nt, Human
agcauagaauaagcugaaguca

SEQ ID NO: 14859 - RNA, 22 nt, Human
agcauagagcaggaaguuaaga

SEQ ID NO: 14860 - RNA, 22 nt, Human
agcauauaaauggacauauuug

SEQ ID NO: 14861 - RNA, 22 nt, Human
agcauauaggaaauguugaauc

SEQ ID NO: 14862 - RNA, 22 nt, Human
agauauuguuuguuucaccaau

SEQ ID NO: 14863 - RNA, 22 nt, Human
agauauuuguaucuugcuauug

SEQ ID NO: 14864 - RNA, 22 nt, Human
agaucaaaaacuuaauggcuuu

SEQ ID NO: 14865 - RNA, 22 nt, Human
agaucaagcacugugcaaaaau

SEQ ID NO: 14866 - RNA, 22 nt, Human
agaucacagagccaagauucca

SEQ ID NO: 14867 - RNA, 22 nt, Human
agaucacaguggcaacucccuu

SEQ ID NO: 14868 - RNA, 22 nt, Human
agaucacaguucucuauucgua

SEQ ID NO: 14869 - RNA, 23 nt, Human
agaucacauaguuaucagaugac

SEQ ID NO: 14870 - RNA, 23 nt, Human
agaucacaugcugauggaaaaug

SEQ ID NO: 14871 - RNA, 22 nt, Human
agaucacuuugaugcuaccugg

SEQ ID NO: 14872 - RNA, 22 nt, Human
agaucauagcacaaaagugaca

SEQ ID NO: 14873 - RNA, 22 nt, Human
agauccacuauggugcugauga

SEQ ID NO: 14874 - RNA, 22 nt, Human
agauccaggguuggauuugcau

SEQ ID NO: 14875 - RNA, 22 nt, Human
agauccauccagcacucuugcc

SEQ ID NO: 14876 - RNA, 23 nt, Human
agauccaugugggcuggaaacug

SEQ ID NO: 14877 - RNA, 22 nt, Human
agaucugaaucucauccgagga

SEQ ID NO: 14878 - RNA, 22 nt, Human
agaucuggaaaaucacaggugc

SEQ ID NO: 14879 - RNA, 22 nt, Human
agaugaagaugccacuaagacc

SEQ ID NO: 14880 - RNA, 22 nt, Human
agaugaauccacacauggcaaa

SEQ ID NO: 14881 - RNA, 22 nt, Human
agaugaauugauguuggacaga

SEQ ID NO: 14882 - RNA, 22 nt, Human
agaugacaaaucaggggacggg

SEQ ID NO: 14883 - RNA, 22 nt, Human
agaugacaaugaaggaaaaugu

SEQ ID NO: 14884 - RNA, 22 nt, Human
agaugacaugggagcaagcacu

SEQ ID NO: 14885 - RNA, 22 nt, Human
agaugagaauuuuuagagugcu

SEQ ID NO: 14886 - RNA, 23 nt, Human
agaugaggcuucuccauguuggu

SEQ ID NO: 14887 - RNA, 22 nt, Human
agaugaguacagagcuguacuc

SEQ ID NO: 14888 - RNA, 22 nt, Human
agaugaguagguagcauuagua

SEQ ID NO: 14889 - RNA, 22 nt, Human
agaugauauacuacauggcuuc

SEQ ID NO: 14890 - RNA, 21 nt, Human
agaugcaguuugcaggugggu

SEQ ID NO: 14891 - RNA, 22 nt, Human
agaugccugccaguuauuuagc

SEQ ID NO: 14892 - RNA, 22 nt, Human
agaugcugccaggccccucagu

SEQ ID NO: 14893 - RNA, 22 nt, Human
agaugcuucaguguuuaauuua

SEQ ID NO: 14894 - RNA, 22 nt, Human
agauggagaaugacaauuaagg

SEQ ID NO: 14895 - RNA, 22 nt, Human
agauggagaccuuggaugaacu

SEQ ID NO: 14896 - RNA, 22 nt, Human
agauggaguuguagcagugacu

SEQ ID NO: 14897 - RNA, 22 nt, Human
agauggcagcagaacaaacagg

SEQ ID NO: 14898 - RNA, 22 nt, Human
agauggcaggcccugugggggu

SEQ ID NO: 14899 - RNA, 22 nt, Human
agauggcuagauugcaagaacu

SEQ ID NO: 14900 - RNA, 22 nt, Human
agauggcuuagccuggcuccca

SEQ ID NO: 14901 - RNA, 19 nt, Human
agauggcuuggacugaaaa

SEQ ID NO: 14902 - RNA, 22 nt, Human
agauggcuuugcuuuuagaagc

SEQ ID NO: 14903 - RNA, 19 nt, Human
agauggggaagagugugag

SEQ ID NO: 14904 - RNA, 22 nt, Human
agauggguaauugauggcagua

SEQ ID NO: 14905 - RNA, 22 nt, Human
agaugguaaucacauuuaucug

SEQ ID NO: 14906 - RNA, 22 nt, Human
agaugguucucagaaacucaac

SEQ ID NO: 14907 - RNA, 22 nt, Human
agauguaaacucucaugucauu

SEQ ID NO: 14908 - RNA, 22 nt, Human
agaugucuguaauucuaagcau

SEQ ID NO: 14909 - RNA, 23 nt, Human
agaugucuuagaaacugaagcug

SEQ ID NO: 14910 - RNA, 22 nt, Human
agaugugccuccaaggggugca

SEQ ID NO: 14911 - RNA, 22 nt, Human
agaugugggagaugcuucugca

SEQ ID NO: 14912 - RNA, 22 nt, Human
agaugugggcaauggaauggag

SEQ ID NO: 14913 - RNA, 22 nt, Human
agaugugguaguugaagggaag

SEQ ID NO: 14914 - RNA, 22 nt, Human
agaugugguuauucucuuccuu

SEQ ID NO: 14915 - RNA, 22 nt, Human
agauguuuguaaacacacugcu

SEQ ID NO: 14916 - RNA, 22 nt, Human
agauguuuguguuaucuccauu

SEQ ID NO: 14917 - RNA, 22 nt, Human
agauguuuuggagacacuaacc

SEQ ID NO: 14918 - RNA, 22 nt, Human
agauuacaacaugggacgcaua

SEQ ID NO: 14919 - RNA, 22 nt, Human
agauuacagcaugggaauggga

SEQ ID NO: 14920 - RNA, 21 nt, Human
agauuacaggugugauccacc

SEQ ID NO: 14921 - RNA, 22 nt, Human
agauuaucuccugauuuuaagg

SEQ ID NO: 14922 - RNA, 22 nt, Human
agauuaugcuggcugcuacaag

SEQ ID NO: 14923 - RNA, 19 nt, Human
agauuauugcacauucaug

SEQ ID NO: 14924 - RNA, 21 nt, Human
agauucauaaucuguaaaaug

SEQ ID NO: 14925 - RNA, 22 nt, Human
agauucaugggucuaaccagug

SEQ ID NO: 14926 - RNA, 22 nt, Human
agauucauuaucuucuuuguac

SEQ ID NO: 14927 - RNA, 22 nt, Human
agauuccaggccuggggccaag

SEQ ID NO: 14928 - RNA, 22 nt, Human
agauucgaaaccuuuaggucuu

SEQ ID NO: 14929 - RNA, 22 nt, Human
agauucucaacaaagaguagca

SEQ ID NO: 14930 - RNA, 23 nt, Human
agauugaaguauugaccagagcu

SEQ ID NO: 14931 - RNA, 22 nt, Human
agauugaauauagagauucuug

SEQ ID NO: 14932 - RNA, 22 nt, Human
agauuggaucaagcagcaguug

SEQ ID NO: 14933 - RNA, 22 nt, Human
agauugggauuagagaucugua

SEQ ID NO: 14934 - RNA, 22 nt, Human
aggcaacugagaggcccguguu

SEQ ID NO: 14935 - RNA, 22 nt, Human
aggcaacuugcaucucggcaag

SEQ ID NO: 14936 - RNA, 22 nt, Human
aggcaagaaacuuucugggaga

SEQ ID NO: 14937 - RNA, 23 nt, Human
aggcaagaacggguuguucaccc

SEQ ID NO: 14938 - RNA, 22 nt, Human
aggcaagaccagaaagggcuga

SEQ ID NO: 14939 - RNA, 22 nt, Human
aggcaagauuaggaccagaaga

SEQ ID NO: 14940 - RNA, 23 nt, Human
aggcaaggguguaaaggaaauga

SEQ ID NO: 14941 - RNA, 21 nt, Human
aggcaauaaaguuuugucuac

SEQ ID NO: 14942 - RNA, 22 nt, Human
aggcaauaagccucaacugucu

SEQ ID NO: 14943 - RNA, 22 nt, Human
aggcaauagaauaugccugagg

SEQ ID NO: 14944 - RNA, 21 nt, Human
aggcaauucgaaguugcagac

SEQ ID NO: 14945 - RNA, 22 nt, Human
aggcacaaagacagaaaagcac

SEQ ID NO: 14946 - RNA, 22 nt, Human
aggcacacagaccccagcaagu

SEQ ID NO: 14947 - RNA, 22 nt, Human
aggcacaggaacaggaaaagag

SEQ ID NO: 14948 - RNA, 22 nt, Human
aggcacaggaaugucauccagu

SEQ ID NO: 14949 - RNA, 22 nt, Human
aggcacagugccuggaaucaaa

SEQ ID NO: 14950 - RNA, 22 nt, Human
aggcacaguggcccuguuuggg

SEQ ID NO: 14951 - RNA, 22 nt, Human
aggcacaguggcucacaccugu

SEQ ID NO: 14952 - RNA, 20 nt, Human
aggcacaguuccuaguuggg

SEQ ID NO: 14953 - RNA, 22 nt, Human
aggcaccaggaucaguuagaga

SEQ ID NO: 14954 - RNA, 22 nt, Human
aggcaccagguugugguuuguc

SEQ ID NO: 14955 - RNA, 20 nt, Human
aggcaccugucacaggugag

SEQ ID NO: 14956 - RNA, 22 nt, Human
aggcacugaauauccaguaaaa

SEQ ID NO: 14957 - RNA, 22 nt, Human
aggcacugauucucagaguuac

SEQ ID NO: 14958 - RNA, 22 nt, Human
aggcacuggucuaccccuuagu

SEQ ID NO: 14959 - RNA, 22 nt, Human
aggcacuguacuagguacaggg

SEQ ID NO: 14960 - RNA, 22 nt, Human
aggcacuguggaagacaugguu

SEQ ID NO: 14961 - RNA, 22 nt, Human
aggcacuguggguguggccgga

SEQ ID NO: 14962 - RNA, 20 nt, Human
aggcacuguugucuguaucc

SEQ ID NO: 14963 - RNA, 22 nt, Human
aggcacuugaauugaugauguu

SEQ ID NO: 14964 - RNA, 22 nt, Human
aggcacuugauuaaugugaauu

SEQ ID NO: 14965 - RNA, 22 nt, Human
aggcacuuguaauugcagucau

SEQ ID NO: 14966 - RNA, 22 nt, Human
aggcacuuuacaaugugugaca

SEQ ID NO: 14967 - RNA, 22 nt, Human
aggcacuuuccuugaggaguuu

SEQ ID NO: 14968 - RNA, 22 nt, Human
aggcagacaaguccagaacugg

SEQ ID NO: 14969 - RNA, 22 nt, Human
aggcagacuuccugcuuggauc

SEQ ID NO: 14970 - RNA, 22 nt, Human
aggcagagaaaaaccagauaug

SEQ ID NO: 14971 - RNA, 22 nt, Human
aggcagauauuggggugaugug

SEQ ID NO: 14972 - RNA, 22 nt, Human
aggcagauauuucaguucacau

SEQ ID NO: 14973 - RNA, 22 nt, Human
aggcagaugggagcuggaaguu

SEQ ID NO: 14974 - RNA, 22 nt, Human
aggcagaugugauuaauuuccu

SEQ ID NO: 14975 - RNA, 22 nt, Human
agcacagggacaaugccaggug

SEQ ID NO: 14976 - RNA, 22 nt, Human
agcacagggcccagccuaggcc

SEQ ID NO: 14977 - RNA, 22 nt, Human
agcacagguacggagaugcuac

SEQ ID NO: 14978 - RNA, 22 nt, Human
agcacaggugaaacagucaggu

SEQ ID NO: 14979 - RNA, 22 nt, Human
agcacagugccugacauauaug

SEQ ID NO: 14980 - RNA, 22 nt, Human
agcacaguuucuuuuccuuguc

SEQ ID NO: 14981 - RNA, 23 nt, Human
agcacaucaaagcagggaggaga

SEQ ID NO: 14982 - RNA, 22 nt, Human
agcacauuaagugaguucaugu

SEQ ID NO: 14983 - RNA, 22 nt, Human
agcacauucugccuugcuuugc

SEQ ID NO: 14984 - RNA, 22 nt, Human
agcaccaagccuagagugaugu

SEQ ID NO: 14985 - RNA, 22 nt, Human
agcaccagagcuaugggccugc

SEQ ID NO: 14986 - RNA, 22 nt, Human
agcaccaggaaagaaggggcca

SEQ ID NO: 14987 - RNA, 22 nt, Human
agcaccaggauauuguuggaga

SEQ ID NO: 14988 - RNA, 22 nt, Human
agcaccaggcaguauaucaaag

SEQ ID NO: 14989 - RNA, 22 nt, Human
agcaccaggccauggggucccu

SEQ ID NO: 14990 - RNA, 22 nt, Human
agcaccaggcuguuggaagccc

SEQ ID NO: 14991 - RNA, 22 nt, Human
agcaccaggucgcuggcacgcu

SEQ ID NO: 14992 - RNA, 18 nt, Human
agcaccagucacuaacag

SEQ ID NO: 14993 - RNA, 22 nt, Human
agcaccaucacagcuguauguc

SEQ ID NO: 14994 - RNA, 22 nt, Human
agcaccaucagaugcaauaucu

SEQ ID NO: 14995 - RNA, 23 nt, Human
agcaccauuacaguuugauuggg

SEQ ID NO: 14996 - RNA, 22 nt, Human
agcaccauuuaucaucuaggua

SEQ ID NO: 14997 - RNA, 22 nt, Human
agcaccauuucucuaaagcacu

SEQ ID NO: 14998 - RNA, 22 nt, Human
agcacccucagccuuauccaga

SEQ ID NO: 14999 - RNA, 22 nt, Human
agcaccuccuuagcuaugacca

SEQ ID NO: 15000 - RNA, 22 nt, Human
agcaccugcuuaaugugcagug

SEQ ID NO: 15001 - RNA, 22 nt, Human
agcaccuggagggcugggaccu

SEQ ID NO: 15002 - RNA, 22 nt, Human
agcaccuggauuugauagucag

SEQ ID NO: 15003 - RNA, 22 nt, Human
agcaccugucaaguccaggcug

SEQ ID NO: 15004 - RNA, 22 nt, Human
agcaccugugugagcuagaugu

SEQ ID NO: 15005 - RNA, 22 nt, Human
agcaccugugugguagggaggu

SEQ ID NO: 15006 - RNA, 22 nt, Human
agcacgagaucgaugugccuuu

SEQ ID NO: 15007 - RNA, 22 nt, Human
agcacuagcuuuaagcauucug

SEQ ID NO: 15008 - RNA, 20 nt, Human
agcacuagguguggcaggug

SEQ ID NO: 15009 - RNA, 22 nt, Human
agcacucuaagugcaagacacu

SEQ ID NO: 15010 - RNA, 22 nt, Human
agcacuggaaaguuaagaguuu

SEQ ID NO: 15011 - RNA, 22 nt, Human
agcacugugagcaccagcacgc

SEQ ID NO: 15012 - RNA, 22 nt, Human
agcacugugguggaagcaucaa

SEQ ID NO: 15013 - RNA, 22 nt, Human
agcacuuuauucaggaacucca

SEQ ID NO: 15014 - RNA, 22 nt, Human
agcagaaaauuggaaaugacaa

SEQ ID NO: 15015 - RNA, 22 nt, Human
agcagaacugaugagacuugag

SEQ ID NO: 15016 - RNA, 22 nt, Human
agcagaagaaagccacaugacu

SEQ ID NO: 15017 - RNA, 22 nt, Human
agcagaagugccuuagcaauca

SEQ ID NO: 15018 - RNA, 18 nt, Human
agcagaauucuaggguuc

SEQ ID NO: 15019 - RNA, 22 nt, Human
agcagacaauugccuggaugga

SEQ ID NO: 15020 - RNA, 21 nt, Human
agcagacagcccaagaaaauc

SEQ ID NO: 15021 - RNA, 22 nt, Human
agcagacauaucucaugucaca

SEQ ID NO: 15022 - RNA, 21 nt, Human
agcagacugaauacauucuua

SEQ ID NO: 15023 - RNA, 22 nt, Human
agcagagaccugguuuuguuga

SEQ ID NO: 15024 - RNA, 18 nt, Human
agcagagagugaauggga

SEQ ID NO: 15025 - RNA, 19 nt, Human
agcagagcagggccguggg

SEQ ID NO: 15026 - RNA, 22 nt, Human
agcagagcaugcuaagugacuc

SEQ ID NO: 15027 - RNA, 22 nt, Human
agcagagcccuuccauggccuu

SEQ ID NO: 15028 - RNA, 22 nt, Human
agcagagcugcaguggccugcu

SEQ ID NO: 15029 - RNA, 22 nt, Human
agcagaggacaguucuuaggaa

SEQ ID NO: 15030 - RNA, 21 nt, Human
agcagaggggacauguuugau

SEQ ID NO: 15031 - RNA, 22 nt, Human
agcagagguguuuauuauggga

SEQ ID NO: 15032 - RNA, 21 nt, Human
agcagagugcuuugacuuugu

SEQ ID NO: 15033 - RNA, 20 nt, Human
agcagauagcgggagaguuu

SEQ ID NO: 15034 - RNA, 22 nt, Human
agcagaugcauuaugauugaaa

SEQ ID NO: 15035 - RNA, 22 nt, Human
agcagaugggagauggagcugc

SEQ ID NO: 15036 - RNA, 23 nt, Human
agcagcaaaaauuuaucuuucug

SEQ ID NO: 15037 - RNA, 22 nt, Human
agcagcaaagaauaggcccucu

SEQ ID NO: 15038 - RNA, 22 nt, Human
agcagcaaagccaggggauggg

SEQ ID NO: 15039 - RNA, 22 nt, Human
agcagcaaaguauugggcaaga

SEQ ID NO: 15040 - RNA, 21 nt, Human
agcagcaaccacauaguuuuu

SEQ ID NO: 15041 - RNA, 22 nt, Human
agcagcaacuuauuuuucuuau

SEQ ID NO: 15042 - RNA, 22 nt, Human
agcagcaaguguaacugaauau

SEQ ID NO: 15043 - RNA, 22 nt, Human
agccaggaaugcaugcucugcu

SEQ ID NO: 15044 - RNA, 22 nt, Human
agccaggcagggcucucgcucu

SEQ ID NO: 15045 - RNA, 22 nt, Human
agccaggccagcugucuugagu

SEQ ID NO: 15046 - RNA, 22 nt, Human
agccaggcgcaguggcuuaugc

SEQ ID NO: 15047 - RNA, 22 nt, Human
agccaggcgggucuuugcuccu

SEQ ID NO: 15048 - RNA, 22 nt, Human
agccaggcugcaguuggcuggc

SEQ ID NO: 15049 - RNA, 16 nt, Human
agccaggcugccucgg

SEQ ID NO: 15050 - RNA, 22 nt, Human
agccaggggagucagcugcugg

SEQ ID NO: 15051 - RNA, 19 nt, Human
agccaggguccagacaugu

SEQ ID NO: 15052 - RNA, 19 nt, Human
agccagggugagaaggagc

SEQ ID NO: 15053 - RNA, 22 nt, Human
agccagggugagagggcuuugu

SEQ ID NO: 15054 - RNA, 22 nt, Human
agccagggugggugaaugcuau

SEQ ID NO: 15055 - RNA, 20 nt, Human
agccaggguucuggaugcac

SEQ ID NO: 15056 - RNA, 19 nt, Human
agccaguccaaguucuguc

SEQ ID NO: 15057 - RNA, 22 nt, Human
agccagucucucucccuggaga

SEQ ID NO: 15058 - RNA, 19 nt, Human
agccagugagccucugggu

SEQ ID NO: 15059 - RNA, 22 nt, Human
agccauccuacuaccucagcau

SEQ ID NO: 15060 - RNA, 22 nt, Human
agccaugauuuucucauuuuca

SEQ ID NO: 15061 - RNA, 22 nt, Human
agccaugcuccuuccccucugg

SEQ ID NO: 15062 - RNA, 22 nt, Human
agccauggcgccacuagaggga

SEQ ID NO: 15063 - RNA, 22 nt, Human
agccaugggagacugugggaga

SEQ ID NO: 15064 - RNA, 22 nt, Human
agccauguuggggaaggugggc

SEQ ID NO: 15065 - RNA, 22 nt, Human
agccauugaguuuuaugugcua

SEQ ID NO: 15066 - RNA, 22 nt, Human
agccauuggcugccuggugcgu

SEQ ID NO: 15067 - RNA, 22 nt, Human
agccauuuggacuucugguagg

SEQ ID NO: 15068 - RNA, 22 nt, Human
agcccacuguuuucauuucucu

SEQ ID NO: 15069 - RNA, 22 nt, Human
agcccagaaaugaaaggaugau

SEQ ID NO: 15070 - RNA, 22 nt, Human
agcccagaggcugggcgugcau

SEQ ID NO: 15071 - RNA, 22 nt, Human
agcccagaggguagcagaagaa

SEQ ID NO: 15072 - RNA, 22 nt, Human
agcccagccacuauuaaauguu

SEQ ID NO: 15073 - RNA, 22 nt, Human
agcccagccggauucccaguuc

SEQ ID NO: 15074 - RNA, 22 nt, Human
agcccagcugccugccugcugu

SEQ ID NO: 15075 - RNA, 19 nt, Human
agcccagcuuauuugucag

SEQ ID NO: 15076 - RNA, 22 nt, Human
agcccaggaaguugaggcuugc

SEQ ID NO: 15077 - RNA, 22 nt, Human
agcccaggaaucugcaucuuga

SEQ ID NO: 15078 - RNA, 22 nt, Human
agcccagguugaggcugcagug

SEQ ID NO: 15079 - RNA, 20 nt, Human
agcccaucucccacagcuac

SEQ ID NO: 15080 - RNA, 22 nt, Human
agcccccaaaagugcuuaugau

SEQ ID NO: 15081 - RNA, 19 nt, Human
agcccccagacagcaggcc

SEQ ID NO: 15082 - RNA, 15 nt, Human
agcccccucagagga

SEQ ID NO: 15083 - RNA, 22 nt, Human
agccccucuguagcuaauagua

SEQ ID NO: 15084 - RNA, 22 nt, Human
agccccuugcugcccucuagag

SEQ ID NO: 15085 - RNA, 22 nt, Human
agccccuuggaacacagggcug

SEQ ID NO: 15086 - RNA, 22 nt, Human
agcccggcuuccccgguugcua

SEQ ID NO: 15087 - RNA, 22 nt, Human
agcccuagagcuggaggucagu

SEQ ID NO: 15088 - RNA, 22 nt, Human
agcccucucccuuucuucuuag

SEQ ID NO: 15089 - RNA, 22 nt, Human
agcccucugcaaacaccugaua

SEQ ID NO: 15090 - RNA, 22 nt, Human
agcccugaagcuggccaugucc

SEQ ID NO: 15091 - RNA, 22 nt, Human
agcccugagccagccuggucag

SEQ ID NO: 15092 - RNA, 22 nt, Human
aggcagauuuaggagaaaagaa

SEQ ID NO: 15093 - RNA, 22 nt, Human
aggcagcaaagaaaugaugcug

SEQ ID NO: 15094 - RNA, 22 nt, Human
aggcagcaauugaaaucauugu

SEQ ID NO: 15095 - RNA, 22 nt, Human
aggcagcagucaugaggaaaga

SEQ ID NO: 15096 - RNA, 21 nt, Human
aggcagcaucugauuuauaug

SEQ ID NO: 15097 - RNA, 22 nt, Human
aggcagcaugcucugcuucuac

SEQ ID NO: 15098 - RNA, 22 nt, Human
aggcagcauuucugcuuaucca

SEQ ID NO: 15099 - RNA, 22 nt, Human
aggcagccacaugagcuccuga

SEQ ID NO: 15100 - RNA, 22 nt, Human
aggcagccauccaggaggcuca

SEQ ID NO: 15101 - RNA, 22 nt, Human
aggcagcccugugcuggaugcu

SEQ ID NO: 15102 - RNA, 21 nt, Human
aggcagcgauuuucauauugc

SEQ ID NO: 15103 - RNA, 22 nt, Human
aggcagcguagcaaggcuagua

SEQ ID NO: 15104 - RNA, 21 nt, Human
aggcagcgugagggccacuca

SEQ ID NO: 15105 - RNA, 17 nt, Human
aggcagcucagaacauc

SEQ ID NO: 15106 - RNA, 21 nt, Human
aggcagcucaggcccagagag

SEQ ID NO: 15107 - RNA, 22 nt, Human
aggcagcucuguggccucccag

SEQ ID NO: 15108 - RNA, 22 nt, Human
aggcagcugaggucuggcgccc

SEQ ID NO: 15109 - RNA, 22 nt, Human
aggcagcuggacauaacuaacc

SEQ ID NO: 15110 - RNA, 22 nt, Human
aggcagcuggcagcacccaggg

SEQ ID NO: 15111 - RNA, 20 nt, Human
aggcagcugggaaaugaggg

SEQ ID NO: 15112 - RNA, 22 nt, Human
aggcagcuuucuguaggggugu

SEQ ID NO: 15113 - RNA, 22 nt, Human
aggcaggaacccugugugcgcc

SEQ ID NO: 15114 - RNA, 17 nt, Human
aggcaggagauuggaga

SEQ ID NO: 15115 - RNA, 18 nt, Human
aggcaggauccuggccuc

SEQ ID NO: 15116 - RNA, 22 nt, Human
aggcaggcacuccggaaguguc

SEQ ID NO: 15117 - RNA, 22 nt, Human
aggcaggccccugagaauagac

SEQ ID NO: 15118 - RNA, 22 nt, Human
aggcaggcccugggccaucccg

SEQ ID NO: 15119 - RNA, 18 nt, Human
aggcaggcuggagugacu

SEQ ID NO: 15120 - RNA, 22 nt, Human
aggcagggcucauuucuuaggc

SEQ ID NO: 15121 - RNA, 22 nt, Human
aggcagggucuugcuauguugc

SEQ ID NO: 15122 - RNA, 22 nt, Human
aggcaggucacaugcuuggcga

SEQ ID NO: 15123 - RNA, 22 nt, Human
aggcagguguuaacccucugag

SEQ ID NO: 15124 - RNA, 22 nt, Human
aggcagguguuaccucugguuu

SEQ ID NO: 15125 - RNA, 22 nt, Human
aggcagugcucaagacagcagc

SEQ ID NO: 15126 - RNA, 22 nt, Human
aggcagugcugugcccugaacc

SEQ ID NO: 15127 - RNA, 22 nt, Human
aggcaguguauugcuagcggcu

SEQ ID NO: 15128 - RNA, 22 nt, Human
aggcaguucucguguguguccc

SEQ ID NO: 15129 - RNA, 22 nt, Human
aggcaguuguugcugagcagcu

SEQ ID NO: 15130 - RNA, 22 nt, Human
aggcauccaugguggucgcuga

SEQ ID NO: 15131 - RNA, 22 nt, Human
aggcaucuaacagagaucuuua

SEQ ID NO: 15132 - RNA, 22 nt, Human
aggcaucugaguuugcaagcuu

SEQ ID NO: 15133 - RNA, 21 nt, Human
aggcaugagcccugcauggac

SEQ ID NO: 15134 - RNA, 22 nt, Human
aggcaugaugugcaguggcaaa

SEQ ID NO: 15135 - RNA, 22 nt, Human
aggcauucaacaaauguuugug

SEQ ID NO: 15136 - RNA, 22 nt, Human
aggcauugcugguauuggaagu

SEQ ID NO: 15137 - RNA, 22 nt, Human
aggcauuuggcugucauuugua

SEQ ID NO: 15138 - RNA, 22 nt, Human
aggcauuuuuguuaaucuuugg

SEQ ID NO: 15139 - RNA, 22 nt, Human
aggccaaagcaagacccuguaa

SEQ ID NO: 15140 - RNA, 22 nt, Human
aggccaaagcucaccugcagcu

SEQ ID NO: 15141 - RNA, 22 nt, Human
aggccaaguagcuagcauugaa

SEQ ID NO: 15142 - RNA, 21 nt, Human
aggccaaguuggauuucuuca

SEQ ID NO: 15143 - RNA, 22 nt, Human
aggccacaaccacccugugccc

SEQ ID NO: 15144 - RNA, 22 nt, Human
aggccacaggcacccuguguuc

SEQ ID NO: 15145 - RNA, 22 nt, Human
aggccacggcggguggauuacu

SEQ ID NO: 15146 - RNA, 22 nt, Human
aggccagaaaaagacagcucca

SEQ ID NO: 15147 - RNA, 22 nt, Human
aggccagacagcuagaaacagg

SEQ ID NO: 15148 - RNA, 22 nt, Human
aggccagauauugugcuaccca

SEQ ID NO: 15149 - RNA, 22 nt, Human
aggccagcaagaaagagagucu

SEQ ID NO: 15150 - RNA, 22 nt, Human
aggccagcacgacagccgcagg

SEQ ID NO: 15151 - RNA, 18 nt, Human
aggccagcccugcuacug

SEQ ID NO: 15152 - RNA, 22 nt, Human
aggccagccucaggcagggacc

SEQ ID NO: 15153 - RNA, 22 nt, Human
agcugguguggauuuuugaaug

SEQ ID NO: 15154 - RNA, 22 nt, Human
agcugguucacuaagcauaaua

SEQ ID NO: 15155 - RNA, 22 nt, Human
agcugguucaguuucugggccu

SEQ ID NO: 15156 - RNA, 22 nt, Human
agcuguaugcccaagaugcuau

SEQ ID NO: 15157 - RNA, 22 nt, Human
agcuguauuugugaauauuuaa

SEQ ID NO: 15158 - RNA, 22 nt, Human
agcugucaggcagaacugagcu

SEQ ID NO: 15159 - RNA, 22 nt, Human
agcugucuaccugcagaguccu

SEQ ID NO: 15160 - RNA, 19 nt, Human
agcugucugcugcuuuugu

SEQ ID NO: 15161 - RNA, 22 nt, Human
agcugucugucuccugaggaga

SEQ ID NO: 15162 - RNA, 22 nt, Human
agcugucugugaacacagcauu

SEQ ID NO: 15163 - RNA, 22 nt, Human
agcugucuuucauuaccucauu

SEQ ID NO: 15164 - RNA, 22 nt, Human
agcugugaauuuuaugcuagug

SEQ ID NO: 15165 - RNA, 22 nt, Human
agcugugccuugcugcacggug

SEQ ID NO: 15166 - RNA, 22 nt, Human
agcugugcuguggucaucuggg

SEQ ID NO: 15167 - RNA, 22 nt, Human
agcuguggaaaucaggcaauga

SEQ ID NO: 15168 - RNA, 22 nt, Human
agcuguggaagacugucagggu

SEQ ID NO: 15169 - RNA, 22 nt, Human
agcuguggauuggguacuuucu

SEQ ID NO: 15170 - RNA, 21 nt, Human
agcuguggcgaggggaacaug

SEQ ID NO: 15171 - RNA, 22 nt, Human
agcugugguacuugauucacaa

SEQ ID NO: 15172 - RNA, 21 nt, Human
agcugugguuuuacaucuuuu

SEQ ID NO: 15173 - RNA, 22 nt, Human
agcuguguaagucauguaggug

SEQ ID NO: 15174 - RNA, 22 nt, Human
agcuguguagggaaucagagaa

SEQ ID NO: 15175 - RNA, 22 nt, Human
agcugugucauccuggaaaaug

SEQ ID NO: 15176 - RNA, 22 nt, Human
agcugugugcauuugggucuca

SEQ ID NO: 15177 - RNA, 22 nt, Human
agcugugugguuugggcaaauu

SEQ ID NO: 15178 - RNA, 22 nt, Human
agcuguguuaggauguuaauaa

SEQ ID NO: 15179 - RNA, 22 nt, Human
agcuguguuauuagaaaccugc

SEQ ID NO: 15180 - RNA, 22 nt, Human
agcuguuggaguaaagcacuua

SEQ ID NO: 15181 - RNA, 22 nt, Human
agcuguugucugcaggagaagc

SEQ ID NO: 15182 - RNA, 23 nt, Human
agcuguuucauuauuacaacacc

SEQ ID NO: 15183 - RNA, 22 nt, Human
agcuguuuguacuuagauagua

SEQ ID NO: 15184 - RNA, 22 nt, Human
agcuguuuuacugguuguauaa

SEQ ID NO: 15185 - RNA, 22 nt, Human
agcuguuuuugucugcugaucc

SEQ ID NO: 15186 - RNA, 22 nt, Human
agcuguuuuuuccucaccacuu

SEQ ID NO: 15187 - RNA, 22 nt, Human
agcuuacaguucaaugacaaag

SEQ ID NO: 15188 - RNA, 21 nt, Human
agcuuacauuaccauuguugc

SEQ ID NO: 15189 - RNA, 22 nt, Human
agcuuagaagugugcugagagg

SEQ ID NO: 15190 - RNA, 22 nt, Human
agcuuagaauguguuaggaaag

SEQ ID NO: 15191 - RNA, 22 nt, Human
agcuuagucacucuuaaauuua

SEQ ID NO: 15192 - RNA, 22 nt, Human
agcuuaucuuguuaguuucauu

SEQ ID NO: 15193 - RNA, 22 nt, Human
agcuuauuaucuuaucaagcuu

SEQ ID NO: 15194 - RNA, 22 nt, Human
agcuucacuuuguacuuuguca

SEQ ID NO: 15195 - RNA, 20 nt, Human
agcuucagcccuaggauugc

SEQ ID NO: 15196 - RNA, 22 nt, Human
agcuucaugccuaaagacagcg

SEQ ID NO: 15197 - RNA, 22 nt, Human
agcuucauggaaccugaggcua

SEQ ID NO: 15198 - RNA, 22 nt, Human
agcuucauuccagccacuguga

SEQ ID NO: 15199 - RNA, 22 nt, Human
agcuuccaauuucuccaagaga

SEQ ID NO: 15200 - RNA, 21 nt, Human
agcuuccagagcacauuccau

SEQ ID NO: 15201 - RNA, 22 nt, Human
agcuucccaggagaaucaggga

SEQ ID NO: 15202 - RNA, 22 nt, Human
agcuuccugaugcaagagggcu

SEQ ID NO: 15203 - RNA, 23 nt, Human
agcuucgccuuccuuucucugca

SEQ ID NO: 15204 - RNA, 22 nt, Human
agcuucucaggagucugaggca

SEQ ID NO: 15205 - RNA, 22 nt, Human
agcuucuccaucugcccagaga

SEQ ID NO: 15206 - RNA, 22 nt, Human
agcuucucucaggguaucuuuc

SEQ ID NO: 15207 - RNA, 22 nt, Human
agcuucuggaagccuggcagca

SEQ ID NO: 15208 - RNA, 22 nt, Human
agcuucuuccaggcagugacuc

SEQ ID NO: 15209 - RNA, 22 nt, Human
agcuucuucuauuuuggggcca

SEQ ID NO: 15210 - RNA, 22 nt, Human
agcuucuucugauuugucaguc

SEQ ID NO: 15211 - RNA, 22 nt, Human
agcuucuucuuggucuuuccca

SEQ ID NO: 15212 - RNA, 22 nt, Human
agcuucuuguagaacucaaaag

SEQ ID NO: 15213 - RNA, 22 nt, Human
agcuucuuuaauucagcaugau

SEQ ID NO: 15214 - RNA, 19 nt, Human
agcuucuuuggaaacauuu

SEQ ID NO: 15215 - RNA, 22 nt, Human
agcuucuuuuaccaggaaguug

SEQ ID NO: 15216 - RNA, 22 nt, Human
agcuugaaacguaccaacauug

SEQ ID NO: 15217 - RNA, 22 nt, Human
agcuugaaccacaugaaauugc

SEQ ID NO: 15218 - RNA, 22 nt, Human
agcuugaagccuuggcgagauu

SEQ ID NO: 15219 - RNA, 22 nt, Human
agcuugauaguggcuaucaagc

SEQ ID NO: 15220 - RNA, 22 nt, Human
agcuugcacagagaauacagua

SEQ ID NO: 15221 - RNA, 22 nt, Human
agcuugcaguuucugcuguuuu

SEQ ID NO: 15222 - RNA, 22 nt, Human
agcuugccaguugaagaucuuc

SEQ ID NO: 15223 - RNA, 22 nt, Human
agcuugccucccccucuuagga

SEQ ID NO: 15224 - RNA, 22 nt, Human
agcuugggugugccugcgagcu

SEQ ID NO: 15225 - RNA, 22 nt, Human
agguauaugaagaugaaauaac

SEQ ID NO: 15226 - RNA, 22 nt, Human
agguauauugaaugcuuacuua

SEQ ID NO: 15227 - RNA, 22 nt, Human
agguaugagagccacucuguag

SEQ ID NO: 15228 - RNA, 22 nt, Human
agguaugccaauuaggucaagu

SEQ ID NO: 15229 - RNA, 22 nt, Human
agguauggcauaaaucacaggg

SEQ ID NO: 15230 - RNA, 22 nt, Human
agguauguacacacagcucuaa

SEQ ID NO: 15231 - RNA, 22 nt, Human
agguauguauguguguauauuu

SEQ ID NO: 15232 - RNA, 22 nt, Human
agguaugugcuauuguuauauu

SEQ ID NO: 15233 - RNA, 22 nt, Human
agguauuccaguggucaccaag

SEQ ID NO: 15234 - RNA, 17 nt, Human
agguauuuaaggagcug

SEQ ID NO: 15235 - RNA, 22 nt, Human
agguauuuacccacuuuuguuu

SEQ ID NO: 15236 - RNA, 22 nt, Human
agguauuuaugagagcacauau

SEQ ID NO: 15237 - RNA, 22 nt, Human
agguauuucccaaaguggcaug

SEQ ID NO: 15238 - RNA, 22 nt, Human
agguauuuguuauuugagagug

SEQ ID NO: 15239 - RNA, 22 nt, Human
aggucaaaccacagcucuaggc

SEQ ID NO: 15240 - RNA, 23 nt, Human
aggucaaccacaagcugacaaac

SEQ ID NO: 15241 - RNA, 22 nt, Human
aggucaagguucacaggggauc

SEQ ID NO: 15242 - RNA, 22 nt, Human
aggucaaguuuagauagaguua

SEQ ID NO: 15243 - RNA, 22 nt, Human
aggucacacaacugucagaggc

SEQ ID NO: 15244 - RNA, 22 nt, Human
aggucacacuuggaucauagaa

SEQ ID NO: 15245 - RNA, 20 nt, Human
aggucaguagaaugauuuug

SEQ ID NO: 15246 - RNA, 22 nt, Human
aggucauuaaaguuaaaugagg

SEQ ID NO: 15247 - RNA, 22 nt, Human
aggucauuacaauuaucauuuu

SEQ ID NO: 15248 - RNA, 22 nt, Human
aggucauuggggacuaucuccg

SEQ ID NO: 15249 - RNA, 22 nt, Human
aggucauuuuugccuucuauuu

SEQ ID NO: 15250 - RNA, 22 nt, Human
agguccacaguucagcugccca

SEQ ID NO: 15251 - RNA, 22 nt, Human
agguccagccugcccucucucc

SEQ ID NO: 15252 - RNA, 22 nt, Human
agguccagcucuauugaaaaga

SEQ ID NO: 15253 - RNA, 22 nt, Human
agguccagugaaacuuuauuug

SEQ ID NO: 15254 - RNA, 22 nt, Human
agguccaguuuucaguucucau

SEQ ID NO: 15255 - RNA, 22 nt, Human
aggucccaggcauagcuggucu

SEQ ID NO: 15256 - RNA, 22 nt, Human
aggucccucagaggccucaccg

SEQ ID NO: 15257 - RNA, 19 nt, Human
aggucccugucaccucuca

SEQ ID NO: 15258 - RNA, 19 nt, Human
agguccucaggaugacccu

SEQ ID NO: 15259 - RNA, 22 nt, Human
agguccucugugccugcuggcg

SEQ ID NO: 15260 - RNA, 19 nt, Human
agguccugaucagcaagga

SEQ ID NO: 15261 - RNA, 20 nt, Human
agguccugggacuggcagag

SEQ ID NO: 15262 - RNA, 22 nt, Human
aguaacaaauagcugccuuuaa

SEQ ID NO: 15263 - RNA, 22 nt, Human
aguaacagaaggccugacuuaa

SEQ ID NO: 15264 - RNA, 22 nt, Human
aguaacagguguacagacuauc

SEQ ID NO: 15265 - RNA, 22 nt, Human
aguaacaucuuugacauuuguu

SEQ ID NO: 15266 - RNA, 22 nt, Human
aguaagauucuucugaaaaauu

SEQ ID NO: 15267 - RNA, 22 nt, Human
aguaagcaauagagugagaauu

SEQ ID NO: 15268 - RNA, 22 nt, Human
aguaauaauaguagccggcauu

SEQ ID NO: 15269 - RNA, 22 nt, Human
aguaauaauuuauauuagggag

SEQ ID NO: 15270 - RNA, 22 nt, Human
aguaaugaggauguuugcaaaa

SEQ ID NO: 15271 - RNA, 22 nt, Human
aguaaugcuucuagaacuauuu

SEQ ID NO: 15272 - RNA, 22 nt, Human
aguaaugucccuuaaauguggu

SEQ ID NO: 15273 - RNA, 22 nt, Human
aguacaaaggcccuugauuacu

SEQ ID NO: 15274 - RNA, 22 nt, Human
aguacaaaugcagccagaguag

SEQ ID NO: 15275 - RNA, 22 nt, Human
aguacaaguauuagaguuauuc

SEQ ID NO: 15276 - RNA, 23 nt, Human
aguacaauaaguauaauucuuuc

SEQ ID NO: 15277 - RNA, 22 nt, Human
aguacaaugucugacacaguag

SEQ ID NO: 15278 - RNA, 22 nt, Human
aguacacaagacacauuuaaaa

SEQ ID NO: 15279 - RNA, 22 nt, Human
aguacacagaauucuacuuguu

SEQ ID NO: 15280 - RNA, 22 nt, Human
aguacacucaagaaaccgguaa

SEQ ID NO: 15281 - RNA, 19 nt, Human
aguacagaaaagagcccug

SEQ ID NO: 15282 - RNA, 22 nt, Human
aguacagaccugucucuuccug

SEQ ID NO: 15283 - RNA, 22 nt, Human
aguacagauuuagacacgauag

SEQ ID NO: 15284 - RNA, 22 nt, Human
aguacagcaccaugagcacagg

SEQ ID NO: 15285 - RNA, 22 nt, Human
aguacaguagggugcuguuagu

SEQ ID NO: 15286 - RNA, 22 nt, Human
aguacagucaggaagcugcugu

SEQ ID NO: 15287 - RNA, 22 nt, Human
aguacaguggucauaauauaaa

SEQ ID NO: 15288 - RNA, 22 nt, Human
aguacauauaguaauuuagcca

SEQ ID NO: 15289 - RNA, 23 nt, Human
aguacauucgaaaaauucuguga

SEQ ID NO: 15290 - RNA, 22 nt, Human
aguacauuuaguuuaugaacau

SEQ ID NO: 15291 - RNA, 22 nt, Human
aguaccauuacucacuuauuuu

SEQ ID NO: 15292 - RNA, 22 nt, Human
aguacuucagaggcugcccagg

SEQ ID NO: 15293 - RNA, 22 nt, Human
aguacuuuacuucuuacaguuu

SEQ ID NO: 15294 - RNA, 22 nt, Human
aguagaaauguaguguagagaa

SEQ ID NO: 15295 - RNA, 22 nt, Human
aguagaauagauggauacuauu

SEQ ID NO: 15296 - RNA, 22 nt, Human
aguagaaucagccucuugaugg

SEQ ID NO: 15297 - RNA, 22 nt, Human
aguagauuuuagauuacauagu

SEQ ID NO: 15298 - RNA, 23 nt, Human
aguagcacauacaguacuuguuc

SEQ ID NO: 15299 - RNA, 20 nt, Human
aguagcagugugacauugac

SEQ ID NO: 15300 - RNA, 22 nt, Human
aguagcauaaauagugguagua

SEQ ID NO: 15301 - RNA, 22 nt, Human
aguaggacuagggguugaggca

SEQ ID NO: 15302 - RNA, 22 nt, Human
aguaggcauagaaagaagcacc

SEQ ID NO: 15303 - RNA, 22 nt, Human
aguagggaauacauugggguaa

SEQ ID NO: 15304 - RNA, 22 nt, Human
aguagugugacaauuaauauuu

SEQ ID NO: 15305 - RNA, 21 nt, Human
aguaguuuagcacaggguuug

SEQ ID NO: 15306 - RNA, 22 nt, Human
aguauaaugaaaugugucagua

SEQ ID NO: 15307 - RNA, 22 nt, Human
aguauauaugaggaaccacaaa

SEQ ID NO: 15308 - RNA, 22 nt, Human
aguauaucacauguaguaaugg

SEQ ID NO: 15309 - RNA, 22 nt, Human
aguauauuuguuaagauuauuc

SEQ ID NO: 15310 - RNA, 22 nt, Human
aguauauuuugauuguaugugu

SEQ ID NO: 15311 - RNA, 22 nt, Human
aguaucaauaauagaggagcua

SEQ ID NO: 15312 - RNA, 22 nt, Human
aguaucaucuccauuucacuga

SEQ ID NO: 15313 - RNA, 22 nt, Human
aguaugaaccuggguucuggau

SEQ ID NO: 15314 - RNA, 22 nt, Human
aguaugaagcugaaugauuuua

SEQ ID NO: 15315 - RNA, 22 nt, Human
aguaugaaucuuucagaccgua

SEQ ID NO: 15316 - RNA, 23 nt, Human
aguaugaauucauuguuuuaguu

SEQ ID NO: 15317 - RNA, 20 nt, Human
aguaugauccacucugcucu

SEQ ID NO: 15318 - RNA, 22 nt, Human
aguauguauuuuauacuuacag

SEQ ID NO: 15319 - RNA, 22 nt, Human
aguauguugacuuauucuugga

SEQ ID NO: 15320 - RNA, 22 nt, Human
aguauugugacucaaguauucu

SEQ ID NO: 15321 - RNA, 22 nt, Human
aguauuuagagacacaagacgg

SEQ ID NO: 15322 - RNA, 22 nt, Human
aguauuugaucagaugauagua

SEQ ID NO: 15323 - RNA, 22 nt, Human
agucaaagaugaccgaguuccu

SEQ ID NO: 15324 - RNA, 22 nt, Human
agucaaauaucuuaaaaggcua

SEQ ID NO: 15325 - RNA, 22 nt, Human
agucaacaguuuuugauguaaa

SEQ ID NO: 15326 - RNA, 22 nt, Human
agucaagagacuuaaaauauuu

SEQ ID NO: 15327 - RNA, 23 nt, Human
agucaagaugcaucugugaggaa

SEQ ID NO: 15328 - RNA, 22 nt, Human
agucaaggcuauuaugugggaa

SEQ ID NO: 15329 - RNA, 22 nt, Human
agucaauucuuuucaacucaag

SEQ ID NO: 15330 - RNA, 20 nt, Human
agucacaguaucagucuuag

SEQ ID NO: 15331 - RNA, 22 nt, Human
agucacaugaggaaggggaagg

SEQ ID NO: 15332 - RNA, 22 nt, Human
agucacaugaguuucucuuuau

SEQ ID NO: 15333 - RNA, 20 nt, Human
agucacaugcauacacaagu

SEQ ID NO: 15334 - RNA, 22 nt, Human
agucacauucugggguacuggg

SEQ ID NO: 15335 - RNA, 21 nt, Human
agucacauuggggguuuaggg

SEQ ID NO: 15336 - RNA, 22 nt, Human
agucacauuugggggugucaaa

SEQ ID NO: 15337 - RNA, 22 nt, Human
agucaccaacaugguucccagg

SEQ ID NO: 15338 - RNA, 22 nt, Human
agucaccauuuucaccugccuc

SEQ ID NO: 15339 - RNA, 22 nt, Human
agucacugggcugcuuccuaua

SEQ ID NO: 15340 - RNA, 22 nt, Human
agucacugucaaagccacacac

SEQ ID NO: 15341 - RNA, 22 nt, Human
agucacuucuauucuauuaagu

SEQ ID NO: 15342 - RNA, 22 nt, Human
agucacuuucuacuugguuucu

SEQ ID NO: 15343 - RNA, 22 nt, Human
agcccaguugcuccacgcugca

SEQ ID NO: 15344 - RNA, 22 nt, Human
agcccaugcaacaggccuagcg

SEQ ID NO: 15345 - RNA, 20 nt, Human
agccccacccuuguccuggc

SEQ ID NO: 15346 - RNA, 22 nt, Human
agccccacguugucuagcaccu

SEQ ID NO: 15347 - RNA, 22 nt, Human
agccccaggcccggacgccucu

SEQ ID NO: 15348 - RNA, 22 nt, Human
agccccaguucccuggaagucu

SEQ ID NO: 15349 - RNA, 22 nt, Human
agcccccacguuuccugggucc

SEQ ID NO: 15350 - RNA, 22 nt, Human
agccccccaagggccuucucuu

SEQ ID NO: 15351 - RNA, 22 nt, Human
agccccuccaguggcauaaaau

SEQ ID NO: 15352 - RNA, 22 nt, Human
agccccuugugggcgcacagca

SEQ ID NO: 15353 - RNA, 22 nt, Human
agcccuagagaaccagccugug

SEQ ID NO: 15354 - RNA, 22 nt, Human
agcccucauggaacagcuccua

SEQ ID NO: 15355 - RNA, 22 nt, Human
agcccucucuauggcccucuug

SEQ ID NO: 15356 - RNA, 22 nt, Human
agcccucugcuguucuagucuc

SEQ ID NO: 15357 - RNA, 22 nt, Human
agcccugcacaggucuguggcu

SEQ ID NO: 15358 - RNA, 22 nt, Human
agcccugcacaguucgggagga

SEQ ID NO: 15359 - RNA, 22 nt, Human
agcccugcaggaggugggagag

SEQ ID NO: 15360 - RNA, 22 nt, Human
agcccugccucuccaaugccca

SEQ ID NO: 15361 - RNA, 22 nt, Human
agcccugcuucaccauuuacuu

SEQ ID NO: 15362 - RNA, 22 nt, Human
agcccuggauucugagguccaa

SEQ ID NO: 15363 - RNA, 22 nt, Human
agcccuggcagagccagguagu

SEQ ID NO: 15364 - RNA, 22 nt, Human
agcccuggcucccagcagcgcu

SEQ ID NO: 15365 - RNA, 22 nt, Human
agcccugggauacaguaaaagc

SEQ ID NO: 15366 - RNA, 22 nt, Human
agcccugggcagccaaggaagc

SEQ ID NO: 15367 - RNA, 22 nt, Human
agcccuggguuagggugggagc

SEQ ID NO: 15368 - RNA, 17 nt, Human
agcccugugcucuuuuu

SEQ ID NO: 15369 - RNA, 22 nt, Human
agcccugugggccuuguggcac

SEQ ID NO: 15370 - RNA, 22 nt, Human
agcccugugugcuuguguuccu

SEQ ID NO: 15371 - RNA, 22 nt, Human
agcugggaugauaaccucaguc

SEQ ID NO: 15372 - RNA, 22 nt, Human
agcugggcagugcuuggauuca

SEQ ID NO: 15373 - RNA, 22 nt, Human
agcugggccugagcuggaagcu

SEQ ID NO: 15374 - RNA, 22 nt, Human
agcugggccugauuugcagggg

SEQ ID NO: 15375 - RNA, 22 nt, Human
agcugggcuccaagagggaucu

SEQ ID NO: 15376 - RNA, 22 nt, Human
agcugggcuggagcuccaagcg

SEQ ID NO: 15377 - RNA, 22 nt, Human
agcuggguguagggcuggacaa

SEQ ID NO: 15378 - RNA, 22 nt, Human
agcuggguugacaagauggaaa

SEQ ID NO: 15379 - RNA, 22 nt, Human
agcuggguuucuggcaggcuua

SEQ ID NO: 15380 - RNA, 22 nt, Human
agcugguaugaacaggauagga

SEQ ID NO: 15381 - RNA, 22 nt, Human
agcugguauuuguuagggaguu

SEQ ID NO: 15382 - RNA, 22 nt, Human
agcuggucagaguggggauaga

SEQ ID NO: 15383 - RNA, 20 nt, Human
agcuggugaauuaaagacug

SEQ ID NO: 15384 - RNA, 22 nt, Human
agcuggugauggccuaagaagg

SEQ ID NO: 15385 - RNA, 22 nt, Human
agcuggugccugcuuuugugug

SEQ ID NO: 15386 - RNA, 22 nt, Human
agcuggugcucaggggcaugga

SEQ ID NO: 15387 - RNA, 22 nt, Human
agcugguggauuaugcuguaca

SEQ ID NO: 15388 - RNA, 18 nt, Human
agcugguggggagacagc

SEQ ID NO: 15389 - RNA, 22 nt, Human
agcuggugugcucuggaauccu

SEQ ID NO: 15390 - RNA, 22 nt, Human
agcugguuagcaaucuaaguga

SEQ ID NO: 15391 - RNA, 22 nt, Human
agcugguucauggacugccugg

SEQ ID NO: 15392 - RNA, 22 nt, Human
agcugguuuaggaaaagguagg

SEQ ID NO: 15393 - RNA, 22 nt, Human
agcuguccuggcucaggcugug

SEQ ID NO: 15394 - RNA, 22 nt, Human
agcuguccugugggagggagug

SEQ ID NO: 15395 - RNA, 22 nt, Human
agcugucuccagauacaggauu

SEQ ID NO: 15396 - RNA, 22 nt, Human
agcugucucucugguguccaua

SEQ ID NO: 15397 - RNA, 22 nt, Human
agcugucucugguauuauguga

SEQ ID NO: 15398 - RNA, 22 nt, Human
agcugucuuucugccuccugau

SEQ ID NO: 15399 - RNA, 22 nt, Human
agcugucuuuggagagggagag

SEQ ID NO: 15400 - RNA, 19 nt, Human
agcugugcagacacuucgc

SEQ ID NO: 15401 - RNA, 22 nt, Human
agcuguggccagaugugagcgg

SEQ ID NO: 15402 - RNA, 22 nt, Human
agcugugggagaaucucugggu

SEQ ID NO: 15403 - RNA, 22 nt, Human
agcugugggauuugggugugcc

SEQ ID NO: 15404 - RNA, 22 nt, Human
agcugugggccugggagagcug

SEQ ID NO: 15405 - RNA, 19 nt, Human
agcuguggggccuagcacc

SEQ ID NO: 15406 - RNA, 22 nt, Human
agcuguguaggaucauaacacg

SEQ ID NO: 15407 - RNA, 22 nt, Human
agcuguguccugaagacacugc

SEQ ID NO: 15408 - RNA, 22 nt, Human
agcugugugacucuaagcaagu

SEQ ID NO: 15409 - RNA, 22 nt, Human
agcugugugccaggggagaugu

SEQ ID NO: 15410 - RNA, 22 nt, Human
agcugugugcccaugguggagg

SEQ ID NO: 15411 - RNA, 22 nt, Human
agcugugugugaauuuggccua

SEQ ID NO: 15412 - RNA, 22 nt, Human
agcuguguguuuccacugagcu

SEQ ID NO: 15413 - RNA, 22 nt, Human
agcuguguguuugucaugggcg

SEQ ID NO: 15414 - RNA, 22 nt, Human
agcuguguuuccagaugguagc

SEQ ID NO: 15415 - RNA, 22 nt, Human
agcuguucccucacugcaguca

SEQ ID NO: 15416 - RNA, 22 nt, Human
agcuguugcugggaggagagaa

SEQ ID NO: 15417 - RNA, 22 nt, Human
agcuguuggcuggcugagcucu

SEQ ID NO: 15418 - RNA, 22 nt, Human
agcuguuguuaauuaacucauu

SEQ ID NO: 15419 - RNA, 22 nt, Human
agcuguuuaauaaaugucuguu

SEQ ID NO: 15420 - RNA, 21 nt, Human
agcuguuugaagcuauauugg

SEQ ID NO: 15421 - RNA, 22 nt, Human
agcuguuuuacucagaaacaua

SEQ ID NO: 15422 - RNA, 22 nt, Human
agcuguuuucuaaugcauuuga

SEQ ID NO: 15423 - RNA, 22 nt, Human
agcuuaaacucuuugaaguuau

SEQ ID NO: 15424 - RNA, 22 nt, Human
agcuuaaagccgccaucuagua

SEQ ID NO: 15425 - RNA, 22 nt, Human
agcuuaauggaacuugcucaaa

SEQ ID NO: 15426 - RNA, 22 nt, Human
agcuuacaccccccaagauucu

SEQ ID NO: 15427 - RNA, 22 nt, Human
agcuuaggaggaugaugaacau

SEQ ID NO: 15428 - RNA, 22 nt, Human
agcuuauuaauuuuucugcaug

SEQ ID NO: 15429 - RNA, 22 nt, Human
agcuucaagguucaaggaugcu

SEQ ID NO: 15430 - RNA, 22 nt, Human
agcuucagauuuaucuuucugu

SEQ ID NO: 15431 - RNA, 22 nt, Human
agcuucaggaacaggcagccug

SEQ ID NO: 15432 - RNA, 20 nt, Human
agcuucaggcucaagagaac

SEQ ID NO: 15433 - RNA, 22 nt, Human
agcuucagugucaggcccgugg

SEQ ID NO: 15434 - RNA, 17 nt, Human
agcuucaguugcaaaac

SEQ ID NO: 15435 - RNA, 22 nt, Human
agcuucauaauuccuugacuca

SEQ ID NO: 15436 - RNA, 22 nt, Human
agcuuccacaucugucuucagu

SEQ ID NO: 15437 - RNA, 22 nt, Human
agcuuccauacuaagacaaaag

SEQ ID NO: 15438 - RNA, 19 nt, Human
agcuuccauauucucuagu

SEQ ID NO: 15439 - RNA, 22 nt, Human
agcuuccucaccucagaggucu

SEQ ID NO: 15440 - RNA, 22 nt, Human
agcuuccugucuucugcacaaa

SEQ ID NO: 15441 - RNA, 22 nt, Human
agcuucuagcccauccagcagg

SEQ ID NO: 15442 - RNA, 22 nt, Human
agcuucucaaguguuugcgggg

SEQ ID NO: 15443 - RNA, 22 nt, Human
agcuucucaucuuccaaaauug

SEQ ID NO: 15444 - RNA, 22 nt, Human
agcuucucucuuugcacucaca

SEQ ID NO: 15445 - RNA, 22 nt, Human
agcuucugcaucuuuucuuccc

SEQ ID NO: 15446 - RNA, 22 nt, Human
agcuucugcccguguuugcucu

SEQ ID NO: 15447 - RNA, 22 nt, Human
agcuucuuaaguuccugcagca

SEQ ID NO: 15448 - RNA, 20 nt, Human
agcuucuucugucuaauuuu

SEQ ID NO: 15449 - RNA, 22 nt, Human
agcuucuugacggauguucugg

SEQ ID NO: 15450 - RNA, 22 nt, Human
agcuucuugggcuuuacacaaa

SEQ ID NO: 15451 - RNA, 22 nt, Human
agcuucuuugugggcuccagaa

SEQ ID NO: 15452 - RNA, 22 nt, Human
agcuucuuuuacagcucaugcu

SEQ ID NO: 15453 - RNA, 22 nt, Human
agcuugauuucucugcagugug

SEQ ID NO: 15454 - RNA, 23 nt, Human
agcuugcuuuucccaguacugca

SEQ ID NO: 15455 - RNA, 23 nt, Human
agcuuggaacaaugcaaauacag

SEQ ID NO: 15456 - RNA, 22 nt, Human
agcuuguaacagacauaaaaau

SEQ ID NO: 15457 - RNA, 22 nt, Human
agcuuguagaaggccacgagca

SEQ ID NO: 15458 - RNA, 22 nt, Human
aggaccugagaguuggaaaucc

SEQ ID NO: 15459 - RNA, 22 nt, Human
aggaccugccaggugcaaagca

SEQ ID NO: 15460 - RNA, 22 nt, Human
aggaccuguguuuuccuugaau

SEQ ID NO: 15461 - RNA, 22 nt, Human
aggacucaucccugcuugucag

SEQ ID NO: 15462 - RNA, 22 nt, Human
aggacugacuuuugccaugaaa

SEQ ID NO: 15463 - RNA, 22 nt, Human
aggacugaugauggugcugaca

SEQ ID NO: 15464 - RNA, 22 nt, Human
aggacugggugcagagggcauc

SEQ ID NO: 15465 - RNA, 22 nt, Human
aggacuguuuuuucuucuaggg

SEQ ID NO: 15466 - RNA, 22 nt, Human
aggacuucaucaccuguauaaa

SEQ ID NO: 15467 - RNA, 22 nt, Human
aggacuucuagugguacuguga

SEQ ID NO: 15468 - RNA, 22 nt, Human
aggacuucuuagaugccuuccg

SEQ ID NO: 15469 - RNA, 22 nt, Human
aggacuuuagagccagaaagac

SEQ ID NO: 15470 - RNA, 22 nt, Human
aggacuuuaucuucuagaccuc

SEQ ID NO: 15471 - RNA, 22 nt, Human
aggacuuuucaucagcuauccu

SEQ ID NO: 15472 - RNA, 18 nt, Human
aggagaaagggaccaggg

SEQ ID NO: 15473 - RNA, 22 nt, Human
aggagaaauccaucgagaaugg

SEQ ID NO: 15474 - RNA, 19 nt, Human
aggagaagacucucucccc

SEQ ID NO: 15475 - RNA, 19 nt, Human
aggagaaguagcagaaauu

SEQ ID NO: 15476 - RNA, 22 nt, Human
aggagaauuaggaacucaagau

SEQ ID NO: 15477 - RNA, 23 nt, Human
aggagacagggaagugccuggcu

SEQ ID NO: 15478 - RNA, 22 nt, Human
aggagacaguuuggacguguag

SEQ ID NO: 15479 - RNA, 20 nt, Human
aggagaccaagccaagugga

SEQ ID NO: 15480 - RNA, 22 nt, Human
cugauucuguugaacaccuucc

SEQ ID NO: 15481 - RNA, 22 nt, Human
cugauucuuugaagaugcaccc

SEQ ID NO: 15482 - RNA, 22 nt, Human
cugauugagaaggaaggggauc

SEQ ID NO: 15483 - RNA, 22 nt, Human
cugauuguguuccugggagcug

SEQ ID NO: 15484 - RNA, 22 nt, Human
cugauuucucaguucuaggaag

SEQ ID NO: 15485 - RNA, 22 nt, Human
cugcaaaaguaauuggggcuuu

SEQ ID NO: 15486 - RNA, 22 nt, Human
cugcaaaauuguucuuugcucc

SEQ ID NO: 15487 - RNA, 21 nt, Human
cugcaaauaccuaguuaucug

SEQ ID NO: 15488 - RNA, 22 nt, Human
cugcaaaucaaguucuuauaau

SEQ ID NO: 15489 - RNA, 21 nt, Human
cugcaaaugcaaggugaccag

SEQ ID NO: 15490 - RNA, 22 nt, Human
cugcaaaugccgugagagcagg

SEQ ID NO: 15491 - RNA, 22 nt, Human
cugcaagauguugucauaugcu

SEQ ID NO: 15492 - RNA, 22 nt, Human
cugcaaggcuggggugagcugg

SEQ ID NO: 15493 - RNA, 22 nt, Human
cugcacaaugcaccaucaaguu

SEQ ID NO: 15494 - RNA, 22 nt, Human
cugcacagagcagggcagacac

SEQ ID NO: 15495 - RNA, 22 nt, Human
cugcacagcccucaagagccug

SEQ ID NO: 15496 - RNA, 22 nt, Human
cugcacagccugucugggggcc

SEQ ID NO: 15497 - RNA, 22 nt, Human
cugcacagcuggccagggagag

SEQ ID NO: 15498 - RNA, 22 nt, Human
cugcacaggggaugagggcagu

SEQ ID NO: 15499 - RNA, 22 nt, Human
cugcacaguaagcuucagagau

SEQ ID NO: 15500 - RNA, 22 nt, Human
cugcaccgugucucgggcugcc

SEQ ID NO: 15501 - RNA, 22 nt, Human
cugcacguauaaucagucuguu

SEQ ID NO: 15502 - RNA, 22 nt, Human
cugcacugagacccucuuugcu

SEQ ID NO: 15503 - RNA, 22 nt, Human
cugcacugagcaucuaaccuua

SEQ ID NO: 15504 - RNA, 22 nt, Human
cugcagaaagcugagaugauua

SEQ ID NO: 15505 - RNA, 22 nt, Human
cugcagagcaaguaacauccuc

SEQ ID NO: 15506 - RNA, 21 nt, Human
cugcagagcaugcaaaauguu

SEQ ID NO: 15507 - RNA, 22 nt, Human
cugcagagcuaggcugagugaa

SEQ ID NO: 15508 - RNA, 22 nt, Human
cugcagauggcucaguggggca

SEQ ID NO: 15509 - RNA, 22 nt, Human
cugcagcaaauguuaagugacu

SEQ ID NO: 15510 - RNA, 22 nt, Human
cugcagccucaaccuccugagc

SEQ ID NO: 15511 - RNA, 22 nt, Human
cugcagcuccccugagaucaag

SEQ ID NO: 15512 - RNA, 22 nt, Human
cugcagcucuagcuuuugaccu

SEQ ID NO: 15513 - RNA, 22 nt, Human
cugcagcugcgggaccggagcg

SEQ ID NO: 15514 - RNA, 22 nt, Human
cugcagcugcucauguuacuug

SEQ ID NO: 15515 - RNA, 22 nt, Human
cugcagcugggccagggccacc

SEQ ID NO: 15516 - RNA, 22 nt, Human
cugcagcuuuuugugcuuguaa

SEQ ID NO: 15517 - RNA, 22 nt, Human
cugcaggaauucaaagugagcu

SEQ ID NO: 15518 - RNA, 22 nt, Human
cugcaggacugaaagaugaggu

SEQ ID NO: 15519 - RNA, 22 nt, Human
cugcaggaggauccugagagug

SEQ ID NO: 15520 - RNA, 22 nt, Human
cugcaggagggcuggggaagcc

SEQ ID NO: 15521 - RNA, 22 nt, Human
cugcaggagugaaagcaggccu

SEQ ID NO: 15522 - RNA, 22 nt, Human
cugcaggauuucaugggcugac

SEQ ID NO: 15523 - RNA, 22 nt, Human
cugcaggcaucuaacugugggc

SEQ ID NO: 15524 - RNA, 22 nt, Human
cugcaggcugagcgccugccgg

SEQ ID NO: 15525 - RNA, 22 nt, Human
gccaggacuagagggaggugag

SEQ ID NO: 15526 - RNA, 22 nt, Human
gccaggacucuuccuagaaggu

SEQ ID NO: 15527 - RNA, 22 nt, Human
gccaggagaaaaggcgaaugau

SEQ ID NO: 15528 - RNA, 22 nt, Human
gccaggagcccugggcaaguuc

SEQ ID NO: 15529 - RNA, 20 nt, Human
gccaggagggugugaugagc

SEQ ID NO: 15530 - RNA, 22 nt, Human
gccaggaggucagccccucaac

SEQ ID NO: 15531 - RNA, 23 nt, Human
gccaggaguggguagacuaaugc

SEQ ID NO: 15532 - RNA, 22 nt, Human
gccaggaugacuauacaacagc

SEQ ID NO: 15533 - RNA, 22 nt, Human
gccaggcacaguucuaggugcu

SEQ ID NO: 15534 - RNA, 20 nt, Human
gccaggcacuguucucaaua

SEQ ID NO: 15535 - RNA, 22 nt, Human
gccaggcagauaugugagcuua

SEQ ID NO: 15536 - RNA, 22 nt, Human
gccaggcagcagcgaggauggu

SEQ ID NO: 15537 - RNA, 22 nt, Human
gccaggcagcuagcaaccccug

SEQ ID NO: 15538 - RNA, 22 nt, Human
gccaggcauuuguuaggugcug

SEQ ID NO: 15539 - RNA, 22 nt, Human
gccaggcccugggcacuucgug

SEQ ID NO: 15540 - RNA, 22 nt, Human
gccaggcgggucucaaacuccu

SEQ ID NO: 15541 - RNA, 22 nt, Human
gccaggcucaguagcgauuccu

SEQ ID NO: 15542 - RNA, 19 nt, Human
gccaggcucuuauucugug

SEQ ID NO: 15543 - RNA, 22 nt, Human
gccaggcucuuccauuuggguc

SEQ ID NO: 15544 - RNA, 22 nt, Human
gccaggcugacucccccggccu

SEQ ID NO: 15545 - RNA, 22 nt, Human
gccaggcugcuggcugcugucc

SEQ ID NO: 15546 - RNA, 22 nt, Human
gccaggcuggaaagaacagaca

SEQ ID NO: 15547 - RNA, 22 nt, Human
gccaggcugguuauuuaaugag

SEQ ID NO: 15548 - RNA, 22 nt, Human
gccaggcuguuuuuauuacugu

SEQ ID NO: 15549 - RNA, 22 nt, Human
gccagggaacccaagggccuca

SEQ ID NO: 15550 - RNA, 21 nt, Human
gccagggaagagaguuggcug

SEQ ID NO: 15551 - RNA, 21 nt, Human
gccagggaguuaaagagucuu

SEQ ID NO: 15552 - RNA, 22 nt, Human
gccagguacauuuaagaagccu

SEQ ID NO: 15553 - RNA, 22 nt, Human
gccagguaugaauuacgcacga

SEQ ID NO: 15554 - RNA, 22 nt, Human
gccaggucacagggauaaaugg

SEQ ID NO: 15555 - RNA, 22 nt, Human
gccaggucaccucacucaucca

SEQ ID NO: 15556 - RNA, 22 nt, Human
gccaggucugcaggcauccuga

SEQ ID NO: 15557 - RNA, 22 nt, Human
gccagguggcugagugacugag

SEQ ID NO: 15558 - RNA, 22 nt, Human
gccagguucuggggagguacaa

SEQ ID NO: 15559 - RNA, 22 nt, Human
gccagucugauaggggagaagu

SEQ ID NO: 15560 - RNA, 22 nt, Human
gccagugccugcugcucagggc

SEQ ID NO: 15561 - RNA, 21 nt, Human
gccagugcugucugugugauc

SEQ ID NO: 15562 - RNA, 22 nt, Human
gccaguggagcacauggugaag

SEQ ID NO: 15563 - RNA, 22 nt, Human
gccaguggaggacccauggaga

SEQ ID NO: 15564 - RNA, 22 nt, Human
gccagugggacccgcugugggc

SEQ ID NO: 15565 - RNA, 22 nt, Human
gccaguggucacugaggaagaa

SEQ ID NO: 15566 - RNA, 22 nt, Human
gccaguggucagugggagggug

SEQ ID NO: 15567 - RNA, 17 nt, Human
gccaguugucuuggcau

SEQ ID NO: 15568 - RNA, 22 nt, Human
gccaguuuaaaccuugugaaua

SEQ ID NO: 15569 - RNA, 22 nt, Human
gccaucugcugcucuccagugu

SEQ ID NO: 15570 - RNA, 22 nt, Human
gccaugaggcuccgagaaguca

SEQ ID NO: 15571 - RNA, 22 nt, Human
gccaugcaauggaauaaaauca

SEQ ID NO: 15572 - RNA, 22 nt, Human
gccauggcccauaccaggugca

SEQ ID NO: 15573 - RNA, 22 nt, Human
gccaugggcaaaugcagagcug

SEQ ID NO: 15574 - RNA, 22 nt, Human
gccauggggagggcagcgccug

SEQ ID NO: 15575 - RNA, 22 nt, Human
gccaugugggcagaggaggcug

SEQ ID NO: 15576 - RNA, 22 nt, Human
gccauuaaagugcauguuuugc

SEQ ID NO: 15577 - RNA, 22 nt, Human
gccauuaacaagaauauaguag

SEQ ID NO: 15578 - RNA, 22 nt, Human
gccauuaaugagaucaagaauc

SEQ ID NO: 15579 - RNA, 22 nt, Human
gccauucaauucuacaaguaua

SEQ ID NO: 15580 - RNA, 22 nt, Human
gccauucauauuuuagcauuaa

SEQ ID NO: 15581 - RNA, 22 nt, Human
gccauugagauugaaguaagca

SEQ ID NO: 15582 - RNA, 22 nt, Human
gccauuuagggaggcaagguga

SEQ ID NO: 15583 - RNA, 22 nt, Human
gcccaagacuguacaguuaaag

SEQ ID NO: 15584 - RNA, 22 nt, Human
gcccacagcucguuccucuccu

SEQ ID NO: 15585 - RNA, 22 nt, Human
gcccacauccacuagacaugca

SEQ ID NO: 15586 - RNA, 23 nt, Human
gcccacccucagcguccucacgg

SEQ ID NO: 15587 - RNA, 20 nt, Human
gcccacucuaauccacuguc

SEQ ID NO: 15588 - RNA, 22 nt, Human
gcccacuuucugccagcucacc

SEQ ID NO: 15589 - RNA, 22 nt, Human
gccuccugaaaggaagagcucc

SEQ ID NO: 15590 - RNA, 22 nt, Human
gccuccugaagugcugggauua

SEQ ID NO: 15591 - RNA, 22 nt, Human
gccuccugagaagccacaggcu

SEQ ID NO: 15592 - RNA, 22 nt, Human
gccuccugcccagaugagugau

SEQ ID NO: 15593 - RNA, 22 nt, Human
gccuccuggaagucacauguuu

SEQ ID NO: 15594 - RNA, 22 nt, Human
gccucuccuggagaaggcaggg

SEQ ID NO: 15595 - RNA, 22 nt, Human
gccucucuccuuggcuugcagu

SEQ ID NO: 15596 - RNA, 22 nt, Human
gccucucucuacccaguaugau

SEQ ID NO: 15597 - RNA, 22 nt, Human
gccucugauggaggccagcgcu

SEQ ID NO: 15598 - RNA, 22 nt, Human
gccucugcacuguggcacacca

SEQ ID NO: 15599 - RNA, 22 nt, Human
gccucugcaucuucgccgcacu

SEQ ID NO: 15600 - RNA, 22 nt, Human
gccucugcaugcucagcaccca

SEQ ID NO: 15601 - RNA, 22 nt, Human
gccucugcgccucagccgaccu

SEQ ID NO: 15602 - RNA, 22 nt, Human
gccucugcucggacuuugccuc

SEQ ID NO: 15603 - RNA, 22 nt, Human
gccucugcucucagguagccuc

SEQ ID NO: 15604 - RNA, 23 nt, Human
gccucuggagccccagugcucag

SEQ ID NO: 15605 - RNA, 22 nt, Human
gccucuggaguugcuuguaaau

SEQ ID NO: 15606 - RNA, 22 nt, Human
gccucugggguggagcccagca

SEQ ID NO: 15607 - RNA, 22 nt, Human
gccucuggguuggugacaggcu

SEQ ID NO: 15608 - RNA, 22 nt, Human
gccugaagaacagcugugagga

SEQ ID NO: 15609 - RNA, 22 nt, Human
gccugaccucuucugcccuggg

SEQ ID NO: 15610 - RNA, 22 nt, Human
gccugagaaggacacagcaggu

SEQ ID NO: 15611 - RNA, 22 nt, Human
gccugagagucugcauuucuaa

SEQ ID NO: 15612 - RNA, 22 nt, Human
gccugagauucccggagccgug

SEQ ID NO: 15613 - RNA, 22 nt, Human
gccugagcccaggugugcagag

SEQ ID NO: 15614 - RNA, 22 nt, Human
gccugagccgccugagcggcgg

SEQ ID NO: 15615 - RNA, 20 nt, Human
gccugagcuauugccaggau

SEQ ID NO: 15616 - RNA, 22 nt, Human
gccugagcuuuaauuuucuugu

SEQ ID NO: 15617 - RNA, 22 nt, Human
gccugagggcuccuagcaggcu

SEQ ID NO: 15618 - RNA, 21 nt, Human
gccugcagaccccaccaggcu

SEQ ID NO: 15619 - RNA, 22 nt, Human
gccugcagccucagagaauuuu

SEQ ID NO: 15620 - RNA, 22 nt, Human
gccugcagcugcuuccacacac

SEQ ID NO: 15621 - RNA, 17 nt, Human
gccugcaggcccgcaga

SEQ ID NO: 15622 - RNA, 22 nt, Human
gccugcagggccugggccuacc

SEQ ID NO: 15623 - RNA, 18 nt, Human
gccugccaacuccugauc

SEQ ID NO: 15624 - RNA, 18 nt, Human
gccugccagccgagggac

SEQ ID NO: 15625 - RNA, 19 nt, Human
gccugccagccugaaucug

SEQ ID NO: 15626 - RNA, 23 nt, Human
gccugccauauaccuggaaacag

SEQ ID NO: 15627 - RNA, 22 nt, Human
gccugcccugaaagaggugaag

SEQ ID NO: 15628 - RNA, 22 nt, Human
gccugccuagaauugcagcuuu

SEQ ID NO: 15629 - RNA, 22 nt, Human
gccugccugaaggcuguaccag

SEQ ID NO: 15630 - RNA, 19 nt, Human
gccugccuggguuucugag

SEQ ID NO: 15631 - RNA, 22 nt, Human
gccugccuuuuggaggcacauu

SEQ ID NO: 15632 - RNA, 22 nt, Human
gccugcucagaccuagcaggcc

SEQ ID NO: 15633 - RNA, 22 nt, Human
gccugcugccacccuggcuccg

SEQ ID NO: 15634 - RNA, 22 nt, Human
gccugcugggagacacccccag

SEQ ID NO: 15635 - RNA, 22 nt, Human
gccugcuuccuagccuuccaag

SEQ ID NO: 15636 - RNA, 22 nt, Human
gccugcuuccuuuucauagaug

SEQ ID NO: 15637 - RNA, 22 nt, Human
gccugcuuugccuacaagcaga

SEQ ID NO: 15638 - RNA, 22 nt, Human
gccuggaaugcaaugugacgaa

SEQ ID NO: 15639 - RNA, 22 nt, Human
gccuggagacaaggacaaaggg

SEQ ID NO: 15640 - RNA, 22 nt, Human
gccuggagaggaagccggugga

SEQ ID NO: 15641 - RNA, 22 nt, Human
gccuggagcucaugugggcauu

SEQ ID NO: 15642 - RNA, 22 nt, Human
cugcagggaacugaggcccaga

SEQ ID NO: 15643 - RNA, 22 nt, Human
cugcagggaugugaggcccguu

SEQ ID NO: 15644 - RNA, 19 nt, Human
cugcagggaugugcagagu

SEQ ID NO: 15645 - RNA, 22 nt, Human
cugcagggcagaagggcauaga

SEQ ID NO: 15646 - RNA, 22 nt, Human
cugcagggcuguggucuggagu

SEQ ID NO: 15647 - RNA, 20 nt, Human
cugcaggguuagaggcucca

SEQ ID NO: 15648 - RNA, 22 nt, Human
cugcaggguuuuaacaauggac

SEQ ID NO: 15649 - RNA, 22 nt, Human
cugcagguuaggagcacuccuu

SEQ ID NO: 15650 - RNA, 22 nt, Human
cugcagguugagcagccagguu

SEQ ID NO: 15651 - RNA, 22 nt, Human
cugcaguagcagagcugaguag

SEQ ID NO: 15652 - RNA, 22 nt, Human
cugcaguaguuuuugacucuag

SEQ ID NO: 15653 - RNA, 22 nt, Human
cugcaguaucugcuuuggguag

SEQ ID NO: 15654 - RNA, 23 nt, Human
cugcagucgccggccugggugcc

SEQ ID NO: 15655 - RNA, 22 nt, Human
cugcaguguucuggaaugcauu

SEQ ID NO: 15656 - RNA, 22 nt, Human
cugcaguuggcugagacccccc

SEQ ID NO: 15657 - RNA, 20 nt, Human
cugcaucagcggccgcgucu

SEQ ID NO: 15658 - RNA, 22 nt, Human
cugcaucaggccaauuaagaau

SEQ ID NO: 15659 - RNA, 20 nt, Human
cugcaucugugacuugcaaa

SEQ ID NO: 15660 - RNA, 22 nt, Human
cugcaugagcugucaguggagg

SEQ ID NO: 15661 - RNA, 22 nt, Human
cugcauuacagccuccuuagga

SEQ ID NO: 15662 - RNA, 22 nt, Human
cugcauuauuggaacggcugaa

SEQ ID NO: 15663 - RNA, 22 nt, Human
cugcauucauaucagauagaag

SEQ ID NO: 15664 - RNA, 23 nt, Human
cugcauugucuccugggagcaug

SEQ ID NO: 15665 - RNA, 22 nt, Human
cugccaaaaggugcaccugcug

SEQ ID NO: 15666 - RNA, 22 nt, Human
cugccaaggcuggggaggacaa

SEQ ID NO: 15667 - RNA, 22 nt, Human
cugccaaguaaugccugggcuc

SEQ ID NO: 15668 - RNA, 22 nt, Human
cugccagaagagaacaccaguu

SEQ ID NO: 15669 - RNA, 22 nt, Human
cugccagaagguuccugcugca

SEQ ID NO: 15670 - RNA, 22 nt, Human
cugccagcaaugugaccaugcu

SEQ ID NO: 15671 - RNA, 22 nt, Human
cugccagcacugccuccugagg

SEQ ID NO: 15672 - RNA, 22 nt, Human
cugccagcagaggccagcgcug

SEQ ID NO: 15673 - RNA, 22 nt, Human
cugccagccaggccagguaggc

SEQ ID NO: 15674 - RNA, 22 nt, Human
cugccaggacugacgucuucag

SEQ ID NO: 15675 - RNA, 21 nt, Human
cugccaggauagcaugcaggc

SEQ ID NO: 15676 - RNA, 22 nt, Human
cugccaggccuggggugcuguc

SEQ ID NO: 15677 - RNA, 22 nt, Human
cugccaggcugucccagguccg

SEQ ID NO: 15678 - RNA, 22 nt, Human
cugccagguaaacugcaggaau

SEQ ID NO: 15679 - RNA, 22 nt, Human
cugccagugaaauugugucagu

SEQ ID NO: 15680 - RNA, 22 nt, Human
cugccauccucaccagagcagc

SEQ ID NO: 15681 - RNA, 18 nt, Human
cugccauguccuacuguc

SEQ ID NO: 15682 - RNA, 22 nt, Human
cugcccaaauccuucuuccucu

SEQ ID NO: 15683 - RNA, 22 nt, Human
cugcccacaccugagcugggcc

SEQ ID NO: 15684 - RNA, 22 nt, Human
cugcccacaguucucugccaug

SEQ ID NO: 15685 - RNA, 22 nt, Human
cugcccagaaucacucacucga

SEQ ID NO: 15686 - RNA, 18 nt, Human
cugcccagagcauuucau

SEQ ID NO: 15687 - RNA, 22 nt, Human
cugcccaggaaccagaggggca

SEQ ID NO: 15688 - RNA, 22 nt, Human
cugcccaguuugggagccuuuc

SEQ ID NO: 15689 - RNA, 22 nt, Human
cugccccaggccuccuuuucuu

SEQ ID NO: 15690 - RNA, 22 nt, Human
cugccccaggccucgggaggag

SEQ ID NO: 15691 - RNA, 22 nt, Human
cugccccagugccaggcaggug

SEQ ID NO: 15692 - RNA, 22 nt, Human
cugccccauggucccugguggg

SEQ ID NO: 15693 - RNA, 22 nt, Human
cugcccugagggccuguguguu

SEQ ID NO: 15694 - RNA, 22 nt, Human
cugcccugcuugaugacagcga

SEQ ID NO: 15695 - RNA, 22 nt, Human
cugcccugggccaggaagcggc

SEQ ID NO: 15696 - RNA, 22 nt, Human
cugcccugggugcuggggaucc

SEQ ID NO: 15697 - RNA, 22 nt, Human
cugcccuguuuggacagcccgg

SEQ ID NO: 15698 - RNA, 22 nt, Human
cuucagaggggacucaaaguca

SEQ ID NO: 15699 - RNA, 22 nt, Human
cuucagagugcagaagauuggg

SEQ ID NO: 15700 - RNA, 22 nt, Human
cuucagcaccucagcuggagag

SEQ ID NO: 15701 - RNA, 22 nt, Human
cuucagcagaugugcuagagau

SEQ ID NO: 15702 - RNA, 22 nt, Human
cuucagcccugagugccagcag

SEQ ID NO: 15703 - RNA, 22 nt, Human
cuucagccucaacuacuauggu

SEQ ID NO: 15704 - RNA, 22 nt, Human
cuucagcucuugguaaauguuu

SEQ ID NO: 15705 - RNA, 22 nt, Human
cuucaggaaaaucucuaaggau

SEQ ID NO: 15706 - RNA, 20 nt, Human
cuucaggacccauccucccc

SEQ ID NO: 15707 - RNA, 22 nt, Human
cuucaggauuuaggaagaugaa

SEQ ID NO: 15708 - RNA, 22 nt, Human
cuucagucgccuuggcaggggc

SEQ ID NO: 15709 - RNA, 18 nt, Human
cuucagugacagucuggc

SEQ ID NO: 15710 - RNA, 23 nt, Human
cuucagugugggacugcagcgug

SEQ ID NO: 15711 - RNA, 22 nt, Human
cuucaguuagaguuuacaaagu

SEQ ID NO: 15712 - RNA, 22 nt, Human
cuucaguuaugugccaaggaca

SEQ ID NO: 15713 - RNA, 22 nt, Human
cuucauaaacucagaaggcagc

SEQ ID NO: 15714 - RNA, 22 nt, Human
cuucauagaacagaaauuuaau

SEQ ID NO: 15715 - RNA, 22 nt, Human
cuucaucuuucugagccucagu

SEQ ID NO: 15716 - RNA, 22 nt, Human
cuucaugacccauaaaaauuua

SEQ ID NO: 15717 - RNA, 22 nt, Human
cuucaugaggccggcuuuaucc

SEQ ID NO: 15718 - RNA, 22 nt, Human
cuucaugguaaaucugccuuua

SEQ ID NO: 15719 - RNA, 22 nt, Human
cuucauguacaguuauuggaga

SEQ ID NO: 15720 - RNA, 22 nt, Human
cuucauguucuuggugaaaggc

SEQ ID NO: 15721 - RNA, 22 nt, Human
cuucauuaaugucuauaaguuu

SEQ ID NO: 15722 - RNA, 22 nt, Human
cuucauuacuugcucguagcac

SEQ ID NO: 15723 - RNA, 19 nt, Human
cuucauucuucagcuuuug

SEQ ID NO: 15724 - RNA, 22 nt, Human
cuucauuucaggcugaagaaua

SEQ ID NO: 15725 - RNA, 22 nt, Human
cuuccaaaauuuauauguugaa

SEQ ID NO: 15726 - RNA, 22 nt, Human
cuuccaaguugcucugcugacc

SEQ ID NO: 15727 - RNA, 22 nt, Human
cuuccaauagcaacaaagauua

SEQ ID NO: 15728 - RNA, 22 nt, Human
cuuccagaguugcguucucggu

SEQ ID NO: 15729 - RNA, 22 nt, Human
cuuccagcugauuggcauccag

SEQ ID NO: 15730 - RNA, 22 nt, Human
cuuccaggacaccaggguagua

SEQ ID NO: 15731 - RNA, 22 nt, Human
cuuccaggugcuggccuggccu

SEQ ID NO: 15732 - RNA, 22 nt, Human
cuuccaguaguaucauucucau

SEQ ID NO: 15733 - RNA, 22 nt, Human
cuuccagucuagagcuaucugu

SEQ ID NO: 15734 - RNA, 22 nt, Human
cuuccauacagacaaugcaaug

SEQ ID NO: 15735 - RNA, 22 nt, Human
cuucccaaguaaauuuguauuu

SEQ ID NO: 15736 - RNA, 22 nt, Human
cuucccaggugcucuuagcaug

SEQ ID NO: 15737 - RNA, 22 nt, Human
cuucccauauaacuaauuucug

SEQ ID NO: 15738 - RNA, 22 nt, Human
cuuccccaggaccucugcuaaa

SEQ ID NO: 15739 - RNA, 22 nt, Human
cuucccccaaaucaagagaccu

SEQ ID NO: 15740 - RNA, 22 nt, Human
cuucccuucugugcagggcaga

SEQ ID NO: 15741 - RNA, 22 nt, Human
cuucccuuggugaacagagcau

SEQ ID NO: 15742 - RNA, 22 nt, Human
cuuccgugucaguuccaggugg

SEQ ID NO: 15743 - RNA, 22 nt, Human
cuuccuaaaagcuucaagagaa

SEQ ID NO: 15744 - RNA, 22 nt, Human
cuuccucugccucccgugcuca

SEQ ID NO: 15745 - RNA, 16 nt, Human
cuuccucuucacuggc

SEQ ID NO: 15746 - RNA, 22 nt, Human
cuuccugcaggacagccaucug

SEQ ID NO: 15747 - RNA, 22 nt, Human
cuuccugcauggagucugaaug

SEQ ID NO: 15748 - RNA, 22 nt, Human
cuuccugcuccccugccaauuc

SEQ ID NO: 15749 - RNA, 22 nt, Human
cuuccuggaugagcaggcugau

SEQ ID NO: 15750 - RNA, 22 nt, Human
cuuccuggcucggugccucacc

SEQ ID NO: 15751 - RNA, 22 nt, Human
cuuccugggucagccuggaggu

SEQ ID NO: 15752 - RNA, 22 nt, Human
cuuccugguuugaagcucgccg

SEQ ID NO: 15753 - RNA, 22 nt, Human
cuuccuguugucacagucugcg

SEQ ID NO: 15754 - RNA, 22 nt, Human
cuuccuucaauauaauuuuuac

SEQ ID NO: 15755 - RNA, 22 nt, Human
cuuccuuccuuccccgaaaugc

SEQ ID NO: 15756 - RNA, 22 nt, Human
cuuccuucuguaagaccaguug

SEQ ID NO: 15757 - RNA, 22 nt, Human
cuuccuugcggccccugccuag

SEQ ID NO: 15758 - RNA, 19 nt, Human
cuuccuugcuccccaugug

SEQ ID NO: 15759 - RNA, 22 nt, Human
cuuccuugcugucugcuccagg

SEQ ID NO: 15760 - RNA, 22 nt, Human
cuucgauuuaauucuuaaccuu

SEQ ID NO: 15761 - RNA, 22 nt, Human
cuucuaacauccuacaaugcaa

SEQ ID NO: 15762 - RNA, 19 nt, Human
cuucuagaccuuauaccac

SEQ ID NO: 15763 - RNA, 22 nt, Human
cuucuagaguaaggaacaaaug

SEQ ID NO: 15764 - RNA, 22 nt, Human
cuucuagcuauaguguuuucuu

SEQ ID NO: 15765 - RNA, 22 nt, Human
cuucuagggcaucaugacaaau

SEQ ID NO: 15766 - RNA, 22 nt, Human
cuucuauuuucaugccuggguc

SEQ ID NO: 15767 - RNA, 22 nt, Human
cuucucaaacugagacugucua

SEQ ID NO: 15768 - RNA, 22 nt, Human
cuucucagaggccagaagcuau

SEQ ID NO: 15769 - RNA, 22 nt, Human
cuucucagcuuagguaugguuu

SEQ ID NO: 15770 - RNA, 22 nt, Human
cuucucagucuugguuagagag

SEQ ID NO: 15771 - RNA, 22 nt, Human
cuucucaguugcaagugucaga

SEQ ID NO: 15772 - RNA, 18 nt, Human
cuucucccaucuuggcca

SEQ ID NO: 15773 - RNA, 22 nt, Human
cuucuccuaaggucagaauugc

SEQ ID NO: 15774 - RNA, 22 nt, Human
cuucucuaugauguucuaaggu

SEQ ID NO: 15775 - RNA, 22 nt, Human
cuucucuucccagggacacagg

SEQ ID NO: 15776 - RNA, 22 nt, Human
cuucucuuccuuugucaacuga

SEQ ID NO: 15777 - RNA, 22 nt, Human
cuucucuugguaguucuuguug

SEQ ID NO: 15778 - RNA, 22 nt, Human
cuucugagauguuguuuuacag

SEQ ID NO: 15779 - RNA, 22 nt, Human
cuucugaucuggauuccuaacu

SEQ ID NO: 15780 - RNA, 22 nt, Human
cuucugcacugaccuuuugucc

SEQ ID NO: 15781 - RNA, 22 nt, Human
cuucuggaggacacuggcccca

SEQ ID NO: 15782 - RNA, 23 nt, Human
cuucuggcucuauaucagaauuc

SEQ ID NO: 15783 - RNA, 22 nt, Human
cuucugggagagcuuuugcuuc

SEQ ID NO: 15784 - RNA, 22 nt, Human
cuucugggcauggcagagccug

SEQ ID NO: 15785 - RNA, 22 nt, Human
cuucugggccauggccuuccuc

SEQ ID NO: 15786 - RNA, 22 nt, Human
cuucugggugccugugaguguu

SEQ ID NO: 15787 - RNA, 22 nt, Human
cuucugugaaugaaguguggga

SEQ ID NO: 15788 - RNA, 19 nt, Human
cuucugugauacaucaguc

SEQ ID NO: 15789 - RNA, 22 nt, Human
cuucuguggauauguucucucu

SEQ ID NO: 15790 - RNA, 22 nt, Human
cuucuguguagaaagguagccc

SEQ ID NO: 15791 - RNA, 22 nt, Human
cuucuuaaagauuacacaauga

SEQ ID NO: 15792 - RNA, 22 nt, Human
cuggccaguuacugcuauuggc

SEQ ID NO: 15793 - RNA, 22 nt, Human
cuggccaguuguccuggcuugg

SEQ ID NO: 15794 - RNA, 22 nt, Human
cuggcccagguggucguugagg

SEQ ID NO: 15795 - RNA, 20 nt, Human
cuggcccaucuaccgcucug

SEQ ID NO: 15796 - RNA, 22 nt, Human
cuggcccggcugccuggucauu

SEQ ID NO: 15797 - RNA, 22 nt, Human
cuggcccucgucaguuucacug

SEQ ID NO: 15798 - RNA, 22 nt, Human
cuggcccugcuccgcgccgcgg

SEQ ID NO: 15799 - RNA, 22 nt, Human
cuggcccuggagggcugugcga

SEQ ID NO: 15800 - RNA, 23 nt, Human
cuggcccuggcucugugaucaug

SEQ ID NO: 15801 - RNA, 22 nt, Human
cuggcccuguaggaugugaguu

SEQ ID NO: 15802 - RNA, 22 nt, Human
cuggcccuguggaggcaggaac

SEQ ID NO: 15803 - RNA, 22 nt, Human
cuggcccuguggccuaaggacu

SEQ ID NO: 15804 - RNA, 22 nt, Human
cuggccuaaaauugcuucugca

SEQ ID NO: 15805 - RNA, 22 nt, Human
cuggccuaggaaugguuuuccg

SEQ ID NO: 15806 - RNA, 22 nt, Human
cuggccucagagggucauggug

SEQ ID NO: 15807 - RNA, 22 nt, Human
cuucuugcaauuuucaucuuau

SEQ ID NO: 15808 - RNA, 22 nt, Human
cuucuugcugggggccucagug

SEQ ID NO: 15809 - RNA, 22 nt, Human
cuucuuggaagucguccuucca

SEQ ID NO: 15810 - RNA, 22 nt, Human
cuucuuguaaacgguuccccga

SEQ ID NO: 15811 - RNA, 22 nt, Human
cuucuuguaucugccgccgagc

SEQ ID NO: 15812 - RNA, 22 nt, Human
cuucuuguuuuagcccucauac

SEQ ID NO: 15813 - RNA, 22 nt, Human
cuucuuuacuuucuagaaauaa

SEQ ID NO: 15814 - RNA, 22 nt, Human
cuucuuugugccuauuggugac

SEQ ID NO: 15815 - RNA, 22 nt, Human
cuucuuuuacaggucuuggguu

SEQ ID NO: 15816 - RNA, 22 nt, Human
cuugaaaaauaugccuugcuuc

SEQ ID NO: 15817 - RNA, 19 nt, Human
cuugaaacuacuguugaga

SEQ ID NO: 15818 - RNA, 22 nt, Human
cuugaaagucacaugcagcccu

SEQ ID NO: 15819 - RNA, 22 nt, Human
cuugaaagucagcagaguggau

SEQ ID NO: 15820 - RNA, 22 nt, Human
cuugaaauccagauuucagagg

SEQ ID NO: 15821 - RNA, 22 nt, Human
cuugaagacaauggcagauucc

SEQ ID NO: 15822 - RNA, 22 nt, Human
cuugaaugaaaccaacugauga

SEQ ID NO: 15823 - RNA, 22 nt, Human
cuugacacugucacucaggcca

SEQ ID NO: 15824 - RNA, 22 nt, Human
cuugagaacaggguuagguaac

SEQ ID NO: 15825 - RNA, 22 nt, Human
cuugagaaucuucucugaagag

SEQ ID NO: 15826 - RNA, 22 nt, Human
cuugagcuaggaaggcugaggc

SEQ ID NO: 15827 - RNA, 22 nt, Human
cuugaggcugcacuccagggcc

SEQ ID NO: 15828 - RNA, 22 nt, Human
cuugagucauauaaagacagag

SEQ ID NO: 15829 - RNA, 22 nt, Human
cuugaugaaugaccuggguggu

SEQ ID NO: 15830 - RNA, 22 nt, Human
cuugaugagguaugaaccucuc

SEQ ID NO: 15831 - RNA, 22 nt, Human
cuugauggaggggccaggcuuu

SEQ ID NO: 15832 - RNA, 22 nt, Human
cuugauugcuucuacgugacug

SEQ ID NO: 15833 - RNA, 22 nt, Human
cuugcagaggcuguuccagaug

SEQ ID NO: 15834 - RNA, 22 nt, Human
cuugcagggcugaugggaagug

SEQ ID NO: 15835 - RNA, 22 nt, Human
cuugcaguuuagguccucugug

SEQ ID NO: 15836 - RNA, 22 nt, Human
cuugccuguggcuaguuggcuc

SEQ ID NO: 15837 - RNA, 22 nt, Human
cuugcucacaguaccuggcuug

SEQ ID NO: 15838 - RNA, 22 nt, Human
cuugcuggagcggagcgggugu

SEQ ID NO: 15839 - RNA, 22 nt, Human
cuugcuggcagucacuguugcg

SEQ ID NO: 15840 - RNA, 22 nt, Human
cuugcugucccuugguaugaac

SEQ ID NO: 15841 - RNA, 22 nt, Human
cuugcuuaccuaguuagcucca

SEQ ID NO: 15842 - RNA, 22 nt, Human
cuugcuucugcugcacuauccu

SEQ ID NO: 15843 - RNA, 22 nt, Human
cuugcuugauuaugaucauaaa

SEQ ID NO: 15844 - RNA, 22 nt, Human
cuugcuuguuuaguucacagau

SEQ ID NO: 15845 - RNA, 22 nt, Human
cuugcuuguuuugaagaaagau

SEQ ID NO: 15846 - RNA, 22 nt, Human
cuuggaaagguuuuacaaagcg

SEQ ID NO: 15847 - RNA, 22 nt, Human
cuuggaaaguuaucauuuuccu

SEQ ID NO: 15848 - RNA, 21 nt, Human
cuuggaacggguagaacucac

SEQ ID NO: 15849 - RNA, 22 nt, Human
cuuggaacuuaguaauaugaca

SEQ ID NO: 15850 - RNA, 22 nt, Human
cuuggaauugaugauuuucaua

SEQ ID NO: 15851 - RNA, 18 nt, Human
cuuggagaacuaaugaua

SEQ ID NO: 15852 - RNA, 22 nt, Human
cuuggagaauccugguuauuca

SEQ ID NO: 15853 - RNA, 22 nt, Human
cuuggagagagccucagcuguu

SEQ ID NO: 15854 - RNA, 22 nt, Human
cuuggagagggagaaaaauaac

SEQ ID NO: 15855 - RNA, 22 nt, Human
cuuggagauacaagugguaccu

SEQ ID NO: 15856 - RNA, 21 nt, Human
cuuggaguugguugaggaugc

SEQ ID NO: 15857 - RNA, 22 nt, Human
cuuggcagauccaaaaaugaca

SEQ ID NO: 15858 - RNA, 22 nt, Human
cuuggcagcuacacagguaaga

SEQ ID NO: 15859 - RNA, 22 nt, Human
cuuggcaggguggaggaugcag

SEQ ID NO: 15860 - RNA, 22 nt, Human
cuuggccagacagggagcucca

SEQ ID NO: 15861 - RNA, 22 nt, Human
cuuggcccggagccccaugaag

SEQ ID NO: 15862 - RNA, 20 nt, Human
cuuggccuacuuagcuuugu

SEQ ID NO: 15863 - RNA, 22 nt, Human
cuuggccugggccgcagccacu

SEQ ID NO: 15864 - RNA, 22 nt, Human
cuuggcugaacuccaggaugca

SEQ ID NO: 15865 - RNA, 22 nt, Human
cuuggcugggaacugugauuca

SEQ ID NO: 15866 - RNA, 22 nt, Human
cuuggcuguaaaaucagaggcu

SEQ ID NO: 15867 - RNA, 22 nt, Human
cuuggcuuuagaacaugggagc

SEQ ID NO: 15868 - RNA, 22 nt, Human
cuugggaacugccuugccuuug

SEQ ID NO: 15869 - RNA, 22 nt, Human
cuugggaaguguuuaaagcuga

SEQ ID NO: 15870 - RNA, 22 nt, Human
cuugggaggggagcauuggccu

SEQ ID NO: 15871 - RNA, 22 nt, Human
cuugggcaagcagcauucagaa

SEQ ID NO: 15872 - RNA, 22 nt, Human
cuugggcaggguauuguagaag

SEQ ID NO: 15873 - RNA, 22 nt, Human
cuugggcccuccccuugugaau

SEQ ID NO: 15874 - RNA, 23 nt, Human
cuugggcuagagacuuagcagug

SEQ ID NO: 15875 - RNA, 22 nt, Human
cuugggcucuaaaugccaguga

SEQ ID NO: 15876 - RNA, 22 nt, Human
cuuggggaagccacugaucccu

SEQ ID NO: 15877 - RNA, 22 nt, Human
cuugggggccauuaaggggccu

SEQ ID NO: 15878 - RNA, 22 nt, Human
cuuggguguuuuaaaacuagau

SEQ ID NO: 15879 - RNA, 22 nt, Human
cuuggucuaaugguaauaagca

SEQ ID NO: 15880 - RNA, 22 nt, Human
cuuggucuagugagugagcaua

SEQ ID NO: 15881 - RNA, 22 nt, Human
cuuggugcauuacucaaucugu

SEQ ID NO: 15882 - RNA, 19 nt, Human
cuuggugcuugcccuuggc

SEQ ID NO: 15883 - RNA, 22 nt, Human
cuuguacaggaauccaugguau

SEQ ID NO: 15884 - RNA, 22 nt, Human
cuuguacauagagaagaagccu

SEQ ID NO: 15885 - RNA, 22 nt, Human
cuuguauacagagaaggcucau

SEQ ID NO: 15886 - RNA, 22 nt, Human
cuuguauacaguguacacauug

SEQ ID NO: 15887 - RNA, 22 nt, Human
cuuguauuaugguucgcuuagu

SEQ ID NO: 15888 - RNA, 22 nt, Human
cuuguauucagaguggacauga

SEQ ID NO: 15889 - RNA, 22 nt, Human
cuuguauucagcaucuuaacua

SEQ ID NO: 15890 - RNA, 22 nt, Human
cuuguauucuuccacuuaagau

SEQ ID NO: 15891 - RNA, 22 nt, Human
cuuguauugcuguuuugcaucu

SEQ ID NO: 15892 - RNA, 22 nt, Human
cuugucagcacuuugccgaaaa

SEQ ID NO: 15893 - RNA, 22 nt, Human
cuuguccccagcagguugguuu

SEQ ID NO: 15894 - RNA, 22 nt, Human
cuuguccuuuacuugagacuca

SEQ ID NO: 15895 - RNA, 22 nt, Human
cuugucuuuauuucauauucca

SEQ ID NO: 15896 - RNA, 22 nt, Human
cuugugaaaugccagauaaucu

SEQ ID NO: 15897 - RNA, 22 nt, Human
cuugugcaucauaguuugccaa

SEQ ID NO: 15898 - RNA, 22 nt, Human
cuugugcaucucuucaugacca

SEQ ID NO: 15899 - RNA, 22 nt, Human
cuugugcauuucauuccucagg

SEQ ID NO: 15900 - RNA, 22 nt, Human
cuuguggagugccugcugcagu

SEQ ID NO: 15901 - RNA, 21 nt, Human
cuuguuccaagcaugucugag

SEQ ID NO: 15902 - RNA, 22 nt, Human
cuuguucugugcuucuuacauu

SEQ ID NO: 15903 - RNA, 22 nt, Human
cuuguugcugaauucaggauuc

SEQ ID NO: 15904 - RNA, 22 nt, Human
cuuguuuaagccgcuguuaagc

SEQ ID NO: 15905 - RNA, 22 nt, Human
cuuguuuaauaauaccuuagca

SEQ ID NO: 15906 - RNA, 22 nt, Human
cuuguuuugaaagcaguggcca

SEQ ID NO: 15907 - RNA, 22 nt, Human
cugggccagaagacauuuagga

SEQ ID NO: 15908 - RNA, 22 nt, Human
cugggccagaccuuguggucuu

SEQ ID NO: 15909 - RNA, 19 nt, Human
cugggccagagcuguccuc

SEQ ID NO: 15910 - RNA, 22 nt, Human
cugggccaguuaugucucaucu

SEQ ID NO: 15911 - RNA, 22 nt, Human
cugggcccacaaguggaaucgu

SEQ ID NO: 15912 - RNA, 22 nt, Human
cugggcccugaagacagucagg

SEQ ID NO: 15913 - RNA, 17 nt, Human
cugggccucugcccuuu

SEQ ID NO: 15914 - RNA, 22 nt, Human
cugggccugccaccaucuuagg

SEQ ID NO: 15915 - RNA, 22 nt, Human
cugggccuuaugaguaccugga

SEQ ID NO: 15916 - RNA, 22 nt, Human
gacagagcagcacccagccccu

SEQ ID NO: 15917 - RNA, 22 nt, Human
gacagaggcaagaccagaagcc

SEQ ID NO: 15918 - RNA, 22 nt, Human
gacagaguuguugauguaugcu

SEQ ID NO: 15919 - RNA, 22 nt, Human
gacagcaacacaugcuuagugc

SEQ ID NO: 15920 - RNA, 22 nt, Human
gacagcagagcagacuaaugga

SEQ ID NO: 15921 - RNA, 22 nt, Human
gacagcagggaaaguccagacc

SEQ ID NO: 15922 - RNA, 22 nt, Human
gacagcagguaauuaguuaaca

SEQ ID NO: 15923 - RNA, 22 nt, Human
gacagcaggugcuugggaaagg

SEQ ID NO: 15924 - RNA, 22 nt, Human
gacagcaguccuggaguuccca

SEQ ID NO: 15925 - RNA, 22 nt, Human
gacagcauccaagagggaggga

SEQ ID NO: 15926 - RNA, 22 nt, Human
gacagcaucuguguggcaggag

SEQ ID NO: 15927 - RNA, 22 nt, Human
gacagccaggcauagggaguau

SEQ ID NO: 15928 - RNA, 22 nt, Human
gacagccagugcgauggauuca

SEQ ID NO: 15929 - RNA, 22 nt, Human
gacagccaugcacuucugcugu

SEQ ID NO: 15930 - RNA, 22 nt, Human
gacagccucaugaggagcaaaa

SEQ ID NO: 15931 - RNA, 22 nt, Human
gacagccucaugugcaugaacu

SEQ ID NO: 15932 - RNA, 22 nt, Human
gacagccuggcuuaaucugucu

SEQ ID NO: 15933 - RNA, 22 nt, Human
gacagcuggacagacacugaug

SEQ ID NO: 15934 - RNA, 17 nt, Human
gacagcugggcgcacgc

SEQ ID NO: 15935 - RNA, 17 nt, Human
gacagcugguuccuggc

SEQ ID NO: 15936 - RNA, 22 nt, Human
gacagcuguggagaggcaugug

SEQ ID NO: 15937 - RNA, 22 nt, Human
gacagcuucgaggaggugagcu

SEQ ID NO: 15938 - RNA, 22 nt, Human
gacagcuucuugggccgggccu

SEQ ID NO: 15939 - RNA, 22 nt, Human
gacaggaaaggggucuguuuuc

SEQ ID NO: 15940 - RNA, 21 nt, Human
gacaggacuagaccagagcuc

SEQ ID NO: 15941 - RNA, 22 nt, Human
gacaggauguauuggcaagagg

SEQ ID NO: 15942 - RNA, 22 nt, Human
gacaggcacgaaauugggcugg

SEQ ID NO: 15943 - RNA, 22 nt, Human
gacaggcaguuuuccagaucag

SEQ ID NO: 15944 - RNA, 22 nt, Human
gacaggcuuccuaagugccaga

SEQ ID NO: 15945 - RNA, 22 nt, Human
gacagggaaacauugaaguguc

SEQ ID NO: 15946 - RNA, 17 nt, Human
cuuggcaccucugccau

SEQ ID NO: 15947 - RNA, 22 nt, Human
cuuggcagcuuuuggaggagcc

SEQ ID NO: 15948 - RNA, 22 nt, Human
cuuggcauuguguugauagaag

SEQ ID NO: 15949 - RNA, 22 nt, Human
cuuggcccaguugccaaggaaa

SEQ ID NO: 15950 - RNA, 21 nt, Human
cuuggccucuagcuagagcug

SEQ ID NO: 15951 - RNA, 22 nt, Human
cuuggccucuucucaggguggg

SEQ ID NO: 15952 - RNA, 21 nt, Human
cuuggcugcagugacaggcau

SEQ ID NO: 15953 - RNA, 22 nt, Human
cuuggcuguugggcauugagaa

SEQ ID NO: 15954 - RNA, 22 nt, Human
cuugggaaugcuaacagaugac

SEQ ID NO: 15955 - RNA, 22 nt, Human
cuugggagacacaagaagacau

SEQ ID NO: 15956 - RNA, 22 nt, Human
cuugggcacaucccugguauuu

SEQ ID NO: 15957 - RNA, 22 nt, Human
cuugggccaccuggagggacug

SEQ ID NO: 15958 - RNA, 21 nt, Human
cuugggcuuguagauggugga

SEQ ID NO: 15959 - RNA, 22 nt, Human
cuuggggacacagagcccaggg

SEQ ID NO: 15960 - RNA, 22 nt, Human
cuuggggauuuuaaagaccucu

SEQ ID NO: 15961 - RNA, 22 nt, Human
cuugggugcuggaggcugccgc

SEQ ID NO: 15962 - RNA, 22 nt, Human
cuugguaaaacugucuuaaauu

SEQ ID NO: 15963 - RNA, 22 nt, Human
cuuggucuacuagagaaaaaga

SEQ ID NO: 15964 - RNA, 22 nt, Human
cuuggugagacucccacccacc

SEQ ID NO: 15965 - RNA, 22 nt, Human
cuuggugcccagcagguggcug

SEQ ID NO: 15966 - RNA, 20 nt, Human
cuugguggcucugggaagug

SEQ ID NO: 15967 - RNA, 22 nt, Human
cuuguaaaugcagauucugauu

SEQ ID NO: 15968 - RNA, 22 nt, Human
cuuguaauagauaggaucaaau

SEQ ID NO: 15969 - RNA, 20 nt, Human
cuuguacaugauaaagauuu

SEQ ID NO: 15970 - RNA, 22 nt, Human
cuuguacaugauaaucucacuc

SEQ ID NO: 15971 - RNA, 22 nt, Human
cuuguagaccccuggacucacg

SEQ ID NO: 15972 - RNA, 22 nt, Human
cuuguauucugccuaaccuuca

SEQ ID NO: 15973 - RNA, 22 nt, Human
cuugucagccaauuguggauuu

SEQ ID NO: 15974 - RNA, 22 nt, Human
cuugucaguguacuuucuuuug

SEQ ID NO: 15975 - RNA, 22 nt, Human
cuuguccagauguuuguuaggu

SEQ ID NO: 15976 - RNA, 16 nt, Human
cuugucuguugcucau

SEQ ID NO: 15977 - RNA, 22 nt, Human
cuugucuugcacacgguugcca

SEQ ID NO: 15978 - RNA, 21 nt, Human
cuugucuugcuuagaauagac

SEQ ID NO: 15979 - RNA, 22 nt, Human
cuugugcaagaaaccuggaaug

SEQ ID NO: 15980 - RNA, 17 nt, Human
cuuguggccaguuuuua

SEQ ID NO: 15981 - RNA, 22 nt, Human
cuuguguuguacauucuauggg

SEQ ID NO: 15982 - RNA, 22 nt, Human
cuuguuaaaaugcagauuccaa

SEQ ID NO: 15983 - RNA, 22 nt, Human
cuuguucaguccugacuuccug

SEQ ID NO: 15984 - RNA, 22 nt, Human
cuuguucaucucauugggacug

SEQ ID NO: 15985 - RNA, 17 nt, Human
cuuguugagcucguucc

SEQ ID NO: 15986 - RNA, 22 nt, Human
cuuguugggucgugaauucugu

SEQ ID NO: 15987 - RNA, 22 nt, Human
cuuguuuuggcuaguaugaugu

SEQ ID NO: 15988 - RNA, 22 nt, Human
cuuuaacaaaugacucuugucu

SEQ ID NO: 15989 - RNA, 22 nt, Human
cuuuaagacucugcucuuggug

SEQ ID NO: 15990 - RNA, 22 nt, Human
cuuuaauucagauuugaaggga

SEQ ID NO: 15991 - RNA, 22 nt, Human
cuuuacaccaagcagaucuuuc

SEQ ID NO: 15992 - RNA, 22 nt, Human
cuuuacagcuuagugguaugga

SEQ ID NO: 15993 - RNA, 22 nt, Human
cuuuacaggaaaagguggcugu

SEQ ID NO: 15994 - RNA, 22 nt, Human
cuuuaccacaaggacagaacuu

SEQ ID NO: 15995 - RNA, 22 nt, Human
cuuuacuaucaggaauaaacaa

SEQ ID NO: 15996 - RNA, 22 nt, Human
cuuuacugaagugaagaccugg

SEQ ID NO: 15997 - RNA, 22 nt, Human
cuuuacuguuuggugcucuauu

SEQ ID NO: 15998 - RNA, 22 nt, Human
cuuuagaaggguaacggaauua

SEQ ID NO: 15999 - RNA, 19 nt, Human
cuuuagacacaccuggaca

SEQ ID NO: 16000 - RNA, 22 nt, Human
cuuuagacaucucauuguguaa

SEQ ID NO: 16001 - RNA, 18 nt, Human
cuuuagcugucaucuuug

SEQ ID NO: 16002 - RNA, 22 nt, Human
cuuuaguguucaacccagauaa

SEQ ID NO: 16003 - RNA, 22 nt, Human
cuuuaguguuguugugaggauu

SEQ ID NO: 16004 - RNA, 20 nt, Human
cuuuaguuacacguuuccuc

SEQ ID NO: 16005 - RNA, 22 nt, Human
cuuuauauauucccaggcugcc

SEQ ID NO: 16006 - RNA, 22 nt, Human
cuuuaucagaaaacacauuagg

SEQ ID NO: 16007 - RNA, 22 nt, Human
cuuuaucuaggguaagaaaacc

SEQ ID NO: 16008 - RNA, 22 nt, Human
cuuuaugaaccuguucagcuug

SEQ ID NO: 16009 - RNA, 22 nt, Human
cuuuauguguacuuuccauuuu

SEQ ID NO: 16010 - RNA, 22 nt, Human
cuuuauuguccuucuuaggugg

SEQ ID NO: 16011 - RNA, 22 nt, Human
cuuucaaagaguaggagguuuu

SEQ ID NO: 16012 - RNA, 22 nt, Human
cuuucaacuacauacaggcgau

SEQ ID NO: 16013 - RNA, 22 nt, Human
cuuucaaucaaaguuucuagug

SEQ ID NO: 16014 - RNA, 22 nt, Human
cuuucaaugugccugccuuggg

SEQ ID NO: 16015 - RNA, 22 nt, Human
cuuucacaagauuugagaugcu

SEQ ID NO: 16016 - RNA, 22 nt, Human
cuuucacacacauacauuugga

SEQ ID NO: 16017 - RNA, 22 nt, Human
cuuucacagccuucguucugaa

SEQ ID NO: 16018 - RNA, 22 nt, Human
cuuucacagucauaugaugaau

SEQ ID NO: 16019 - RNA, 22 nt, Human
cuuucacaguccugacugagcg

SEQ ID NO: 16020 - RNA, 18 nt, Human
cuuucagauggauaugcu

SEQ ID NO: 16021 - RNA, 22 nt, Human
cuuucagcaucccugggauuac

SEQ ID NO: 16022 - RNA, 22 nt, Human
cuuucaugcaguugacaaggug

SEQ ID NO: 16023 - RNA, 23 nt, Human
cuuucauugugguuucacagagc

SEQ ID NO: 16024 - RNA, 22 nt, Human
cuuuccaacugggugggcagcu

SEQ ID NO: 16025 - RNA, 22 nt, Human
cuuuccaccaacucacuucccu

SEQ ID NO: 16026 - RNA, 19 nt, Human
gaaagauuucaguugagga

SEQ ID NO: 16027 - RNA, 22 nt, Human
gaaagcaauuuguguaaucugu

SEQ ID NO: 16028 - RNA, 22 nt, Human
gaaagcacaggcucaggaacag

SEQ ID NO: 16029 - RNA, 22 nt, Human
gaaagcacaguucaugagacaa

SEQ ID NO: 16030 - RNA, 22 nt, Human
gaaagcagaugaaauugcaaca

SEQ ID NO: 16031 - RNA, 22 nt, Human
gaaagccagagagaaagggcuc

SEQ ID NO: 16032 - RNA, 22 nt, Human
gaaagcugggaaauaaauauua

SEQ ID NO: 16033 - RNA, 22 nt, Human
gaaaggaaauauucuaagcacu

SEQ ID NO: 16034 - RNA, 22 nt, Human
gaaaggagggaaacagagcggu

SEQ ID NO: 16035 - RNA, 22 nt, Human
gaaaggagucagucuuacugaa

SEQ ID NO: 16036 - RNA, 22 nt, Human
gaaaggcuaugaguuugguaua

SEQ ID NO: 16037 - RNA, 22 nt, Human
gaaaggcucagauucccccagg

SEQ ID NO: 16038 - RNA, 19 nt, Human
gaaaggcugcugcuaccug

SEQ ID NO: 16039 - RNA, 22 nt, Human
gaaaggcuugcuuuugcucggu

SEQ ID NO: 16040 - RNA, 22 nt, Human
gaaagggagugaagaugguaua

SEQ ID NO: 16041 - RNA, 17 nt, Human
gaaagguccuagaaauc

SEQ ID NO: 16042 - RNA, 22 nt, Human
gaaaguacagauuccuggccag

SEQ ID NO: 16043 - RNA, 22 nt, Human
gaaaguaugccaucuaccucuu

SEQ ID NO: 16044 - RNA, 22 nt, Human
gaaaguauuagccuagaaguca

SEQ ID NO: 16045 - RNA, 22 nt, Human
gaaaguauucacaaaguucuug

SEQ ID NO: 16046 - RNA, 22 nt, Human
gaaaguauuuacauuaacaucu

SEQ ID NO: 16047 - RNA, 22 nt, Human
gaaaguuauaucaugauuuuag

SEQ ID NO: 16048 - RNA, 22 nt, Human
gaaaguucguccuguggcuucu

SEQ ID NO: 16049 - RNA, 22 nt, Human
gaaaguucugcucugauuggcu

SEQ ID NO: 16050 - RNA, 22 nt, Human
gaaaguuuucauauauaccaaa

SEQ ID NO: 16051 - RNA, 22 nt, Human
gaaauaauacagugcucuucuc

SEQ ID NO: 16052 - RNA, 22 nt, Human
gaaaucacuuuuuucauaguug

SEQ ID NO: 16053 - RNA, 20 nt, Human
gaaaucaguuaaugaugguu

SEQ ID NO: 16054 - RNA, 22 nt, Human
gaaaucauuauaugguauugcu

SEQ ID NO: 16055 - RNA, 22 nt, Human
gaaauccaguucccuacucuua

SEQ ID NO: 16056 - RNA, 23 nt, Human
gaaaucuagucauuuuuagucug

SEQ ID NO: 16057 - RNA, 22 nt, Human
gaaaucuccaaucuuuucuuua

SEQ ID NO: 16058 - RNA, 22 nt, Human
gaaaucugaacaacagcuguca

SEQ ID NO: 16059 - RNA, 22 nt, Human
gaaaucugcccagugcacuggu

SEQ ID NO: 16060 - RNA, 22 nt, Human
gaaaucugucuuuguuugaaua

SEQ ID NO: 16061 - RNA, 22 nt, Human
gaaaucuuccaauggucacauc

SEQ ID NO: 16062 - RNA, 22 nt, Human
gaaaucuuccuucagugaagaa

SEQ ID NO: 16063 - RNA, 22 nt, Human
gaaaucuuugccuuagcugugu

SEQ ID NO: 16064 - RNA, 22 nt, Human
gacagggcauggugcagaguuc

SEQ ID NO: 16065 - RNA, 22 nt, Human
gacagggccgcagauggagacu

SEQ ID NO: 16066 - RNA, 22 nt, Human
gacagggcgagacucagucuca

SEQ ID NO: 16067 - RNA, 22 nt, Human
gacagggcugugggaggagcag

SEQ ID NO: 16068 - RNA, 21 nt, Human
gacaggggaagaagcaaggag

SEQ ID NO: 16069 - RNA, 21 nt, Human
gacaggggccauggguuucua

SEQ ID NO: 16070 - RNA, 22 nt, Human
gacaggggcuuugcaugcuuua

SEQ ID NO: 16071 - RNA, 22 nt, Human
gacaggguacgggcuaggcaca

SEQ ID NO: 16072 - RNA, 22 nt, Human
gacagguaaagaugguggcagg

SEQ ID NO: 16073 - RNA, 22 nt, Human
gacaggugcuaagggaccuggc

SEQ ID NO: 16074 - RNA, 22 nt, Human
gacagguggggaaacuaaggua

SEQ ID NO: 16075 - RNA, 22 nt, Human
gacaggugugaugauuuaggcu

SEQ ID NO: 16076 - RNA, 18 nt, Human
gacaguaaacuuccccau

SEQ ID NO: 16077 - RNA, 22 nt, Human
gacaguaacuacaguucugugg

SEQ ID NO: 16078 - RNA, 22 nt, Human
gacagugacagcuuggaaagca

SEQ ID NO: 16079 - RNA, 22 nt, Human
gacagugauuaguuacuauaaa

SEQ ID NO: 16080 - RNA, 22 nt, Human
gacagugcuaugguaggacauu

SEQ ID NO: 16081 - RNA, 22 nt, Human
gacaguggagggcugauguuaa

SEQ ID NO: 16082 - RNA, 22 nt, Human
gacaguggauucaucuagucaa

SEQ ID NO: 16083 - RNA, 22 nt, Human
gacagugguuccaaggcagcuu

SEQ ID NO: 16084 - RNA, 22 nt, Human
gacagugucccucuggggugga

SEQ ID NO: 16085 - RNA, 22 nt, Human
gacaguuuaagcaccuaauauu

SEQ ID NO: 16086 - RNA, 22 nt, Human
gacauaaaguucuugcuugaau

SEQ ID NO: 16087 - RNA, 22 nt, Human
gacauacaagcugguaccuccu

SEQ ID NO: 16088 - RNA, 22 nt, Human
gacaucaggaagacaugagagg

SEQ ID NO: 16089 - RNA, 22 nt, Human
gacaucaggccugcagucuggg

SEQ ID NO: 16090 - RNA, 22 nt, Human
gacaucauagggugggaggaaa

SEQ ID NO: 16091 - RNA, 22 nt, Human
gacaucauggagaggacaaaca

SEQ ID NO: 16092 - RNA, 22 nt, Human
gacaucuccaaggcaaccuguu

SEQ ID NO: 16093 - RNA, 22 nt, Human
gacaucugaauauuagagagaa

SEQ ID NO: 16094 - RNA, 22 nt, Human
gacaucugaggcccucagagcc

SEQ ID NO: 16095 - RNA, 22 nt, Human
gacaugcaugaaugcaggucuc

SEQ ID NO: 16096 - RNA, 22 nt, Human
gacaugcauuaagacacacuga

SEQ ID NO: 16097 - RNA, 22 nt, Human
gacauguacuucaauuucucuu

SEQ ID NO: 16098 - RNA, 22 nt, Human
gacauguauuagucaugcacag

SEQ ID NO: 16099 - RNA, 22 nt, Human
gacaugucggauagaaugaguu

SEQ ID NO: 16100 - RNA, 20 nt, Human
gacaugucuuucucacacaa

SEQ ID NO: 16101 - RNA, 22 nt, Human
gacaugugagcaagcgugcggc

SEQ ID NO: 16102 - RNA, 22 nt, Human
gacauguuaucucuggcuucaa

SEQ ID NO: 16103 - RNA, 22 nt, Human
gacauuaauggcaaauuaauua

SEQ ID NO: 16104 - RNA, 22 nt, Human
gacauucagccaauuacuuucu

SEQ ID NO: 16105 - RNA, 22 nt, Human
gacauucauuaagccuuucugu

SEQ ID NO: 16106 - RNA, 22 nt, Human
gacauucuaaaaaauauggaag

SEQ ID NO: 16107 - RNA, 22 nt, Human
gacauugaauuugaauguaugu

SEQ ID NO: 16108 - RNA, 21 nt, Human
gacauugagcgugucgcagug

SEQ ID NO: 16109 - RNA, 22 nt, Human
gacauugaguauuucuuuucuc

SEQ ID NO: 16110 - RNA, 22 nt, Human
gacauuggguguacaauuggca

SEQ ID NO: 16111 - RNA, 22 nt, Human
gacauuucuagcccauaaaacu

SEQ ID NO: 16112 - RNA, 22 nt, Human
gacauuuguaucuuaggggaaa

SEQ ID NO: 16113 - RNA, 22 nt, Human
gaccaacagaauuuccuguuuu

SEQ ID NO: 16114 - RNA, 22 nt, Human
gaccacagguaugggcuuggca

SEQ ID NO: 16115 - RNA, 22 nt, Human
gaccacaguccagucaucaugg

SEQ ID NO: 16116 - RNA, 22 nt, Human
gaccagagaaaggcacuggaag

SEQ ID NO: 16117 - RNA, 22 nt, Human
gaccaggaaagagugugacuaa

SEQ ID NO: 16118 - RNA, 22 nt, Human
gaccagggucacucacagggcu

SEQ ID NO: 16119 - RNA, 22 nt, Human
gaccagguccaaagcuacuguc

SEQ ID NO: 16120 - RNA, 22 nt, Human
gacccagaaggagugcccuaga

SEQ ID NO: 16121 - RNA, 22 nt, Human
gacccagcuuaagucacauguu

SEQ ID NO: 16122 - RNA, 22 nt, Human
gacccaggagagaggguugcau

SEQ ID NO: 16123 - RNA, 22 nt, Human
gacccaggguauccagagcugc

SEQ ID NO: 16124 - RNA, 22 nt, Human
gacccagugacucgucucugug

SEQ ID NO: 16125 - RNA, 22 nt, Human
gacccauaggaaucuguugucc

SEQ ID NO: 16126 - RNA, 22 nt, Human
gacccauauauacguaauuugu

SEQ ID NO: 16127 - RNA, 22 nt, Human
gaccccaagggaugcgugugcu

SEQ ID NO: 16128 - RNA, 21 nt, Human
gaccccagaccagcagacaca

SEQ ID NO: 16129 - RNA, 22 nt, Human
gacccucauugucaccgugagc

SEQ ID NO: 16130 - RNA, 22 nt, Human
gacccugaggauucccugcuga

SEQ ID NO: 16131 - RNA, 22 nt, Human
gacccuggggaccaucuagccc

SEQ ID NO: 16132 - RNA, 22 nt, Human
gacccuguggcucuguggcaga

SEQ ID NO: 16133 - RNA, 22 nt, Human
gacccuguuucuacaaauaauu

SEQ ID NO: 16134 - RNA, 22 nt, Human
gacccuuggcugcagcaucaca

SEQ ID NO: 16135 - RNA, 22 nt, Human
gagguggcuggcucagagccag

SEQ ID NO: 16136 - RNA, 22 nt, Human
gagguggugguggaggcauagc

SEQ ID NO: 16137 - RNA, 22 nt, Human
gaggugguucagguagagccca

SEQ ID NO: 16138 - RNA, 22 nt, Human
gaggugucaugagggccugcuc

SEQ ID NO: 16139 - RNA, 22 nt, Human
gaggugucccgcaguccccaag

SEQ ID NO: 16140 - RNA, 22 nt, Human
gaggugucccugacccuuugca

SEQ ID NO: 16141 - RNA, 22 nt, Human
gaggugucugcuguguucaaag

SEQ ID NO: 16142 - RNA, 22 nt, Human
gagguucacaggcuaucacagu

SEQ ID NO: 16143 - RNA, 22 nt, Human
gagguuggagggcuggccugca

SEQ ID NO: 16144 - RNA, 19 nt, Human
gagguuucugaagugggcu

SEQ ID NO: 16145 - RNA, 22 nt, Human
gagguuuuaggcugccauuauu

SEQ ID NO: 16146 - RNA, 22 nt, Human
gaguaaaagaugaggcaguaga

SEQ ID NO: 16147 - RNA, 22 nt, Human
gaguaaaaguuggauuacaaag

SEQ ID NO: 16148 - RNA, 22 nt, Human
gaguaacauguauuggaaggcc

SEQ ID NO: 16149 - RNA, 22 nt, Human
gaguagaacugguuaucuaaua

SEQ ID NO: 16150 - RNA, 22 nt, Human
gaguagaaggaaguuaucuacc

SEQ ID NO: 16151 - RNA, 22 nt, Human
gaguaggaauguucugccaucu

SEQ ID NO: 16152 - RNA, 17 nt, Human
gaguaguuacaacagac

SEQ ID NO: 16153 - RNA, 22 nt, Human
gagucacaaaagaugcccaggg

SEQ ID NO: 16154 - RNA, 22 nt, Human
gagucacauuaauuuaauuuua

SEQ ID NO: 16155 - RNA, 22 nt, Human
gagucaccacugugauagucga

SEQ ID NO: 16156 - RNA, 22 nt, Human
gagucacuucccgaauaaaccc

SEQ ID NO: 16157 - RNA, 22 nt, Human
gagucagaagaaacuauuuaca

SEQ ID NO: 16158 - RNA, 22 nt, Human
gagucagaauuguauuuuaaac

SEQ ID NO: 16159 - RNA, 22 nt, Human
gagucagaugaagauaaaaggg

SEQ ID NO: 16160 - RNA, 22 nt, Human
gagucagauugcagacagggcu

SEQ ID NO: 16161 - RNA, 22 nt, Human
gagucaggaugcaaggggaugg

SEQ ID NO: 16162 - RNA, 22 nt, Human
gagucaggcacugcugcugcuc

SEQ ID NO: 16163 - RNA, 22 nt, Human
gagucaggcaugaagguaauua

SEQ ID NO: 16164 - RNA, 22 nt, Human
gagucaggcuagaggugagucu

SEQ ID NO: 16165 - RNA, 22 nt, Human
gagucaggcuagggugacaggc

SEQ ID NO: 16166 - RNA, 22 nt, Human
gagucaguaauggauaugucau

SEQ ID NO: 16167 - RNA, 22 nt, Human
gagucauuugggggcuucuuga

SEQ ID NO: 16168 - RNA, 22 nt, Human
gaguccaagcuagagccacuca

SEQ ID NO: 16169 - RNA, 22 nt, Human
gaguccagacaccauaccugau

SEQ ID NO: 16170 - RNA, 22 nt, Human
gaguccagcagaaugagccaag

SEQ ID NO: 16171 - RNA, 22 nt, Human
gaguccaggcucagaaacccgu

SEQ ID NO: 16172 - RNA, 18 nt, Human
gaguccaggcucuucacc

SEQ ID NO: 16173 - RNA, 22 nt, Human
gaguccaguuagugaggcuggg

SEQ ID NO: 16174 - RNA, 22 nt, Human
gagucccaugaugauagccaca

SEQ ID NO: 16175 - RNA, 22 nt, Human
gaguccucagauagaaagugcg

SEQ ID NO: 16176 - RNA, 22 nt, Human
gaguccugaauccuguggcaac

SEQ ID NO: 16177 - RNA, 22 nt, Human
gaguccugauccuuagcucucc

SEQ ID NO: 16178 - RNA, 22 nt, Human
gaguccuggcguccaauuuccu

SEQ ID NO: 16179 - RNA, 22 nt, Human
gaguccuguaacuuucuuccua

SEQ ID NO: 16180 - RNA, 22 nt, Human
gaguccuguugucccagauggg

SEQ ID NO: 16181 - RNA, 20 nt, Human
gaguccuuaugggcugaggu

SEQ ID NO: 16182 - RNA, 21 nt, Human
gaguccuuccaauguccucag

SEQ ID NO: 16183 - RNA, 22 nt, Human
gaguccuuuguuccuugccaca

SEQ ID NO: 16184 - RNA, 22 nt, Human
gaguccuuuucucuguccacug

SEQ ID NO: 16185 - RNA, 22 nt, Human
gagucuaucucacucccccagg

SEQ ID NO: 16186 - RNA, 22 nt, Human
gagucuccaauccaugccuguc

SEQ ID NO: 16187 - RNA, 22 nt, Human
gagucucugaccagggugccaa

SEQ ID NO: 16188 - RNA, 22 nt, Human
gagucugagucuaauggcccca

SEQ ID NO: 16189 - RNA, 22 nt, Human
gagucugaugucccccaggcca

SEQ ID NO: 16190 - RNA, 22 nt, Human
gagucuggaaacuuugacaaaa

SEQ ID NO: 16191 - RNA, 22 nt, Human
gagucuggcccugaugcaucau

SEQ ID NO: 16192 - RNA, 22 nt, Human
gagucuggugauggucauuguc

SEQ ID NO: 16193 - RNA, 22 nt, Human
gagucuguaugucuuccaugca

SEQ ID NO: 16194 - RNA, 22 nt, Human
gagucuuaggcaaaaauaaugg

SEQ ID NO: 16195 - RNA, 18 nt, Human
gagucuuuguuacugcug

SEQ ID NO: 16196 - RNA, 22 nt, Human
gagugagggccaacauccagcu

SEQ ID NO: 16197 - RNA, 22 nt, Human
gagugagugcugggcugaggcu

SEQ ID NO: 16198 - RNA, 22 nt, Human
gagugcaauggcaugaucuggg

SEQ ID NO: 16199 - RNA, 21 nt, Human
gagugcaggucugaugccauc

SEQ ID NO: 16200 - RNA, 22 nt, Human
gagugcaucguggccauuuuaa

SEQ ID NO: 16201 - RNA, 21 nt, Human
gagugcucaguuaaguggaga

SEQ ID NO: 16202 - RNA, 22 nt, Human
gagugcugaaugcgagaacaga

SEQ ID NO: 16203 - RNA, 22 nt, Human
gagugcuggaggugugaguggg

SEQ ID NO: 16204 - RNA, 17 nt, Human
gagugcugguggagcuc

SEQ ID NO: 16205 - RNA, 21 nt, Human
gaguggaacgcucuucacacc

SEQ ID NO: 16206 - RNA, 22 nt, Human
gaguggcuccaauuugguccua

SEQ ID NO: 16207 - RNA, 22 nt, Human
gaguggcuguguacaugcccag

SEQ ID NO: 16208 - RNA, 15 nt, Human
gaguggcuuucagaa

SEQ ID NO: 16209 - RNA, 22 nt, Human
gaguggcuuuggagaaguaggg

SEQ ID NO: 16210 - RNA, 22 nt, Human
gaguggcuuuuuuaugguaaug

SEQ ID NO: 16211 - RNA, 22 nt, Human
gaguggggaaagccaggacaga

SEQ ID NO: 16212 - RNA, 22 nt, Human
gaguggggcuuuaaaggcucag

SEQ ID NO: 16213 - RNA, 22 nt, Human
gaguggguaaaggugcuuggcu

SEQ ID NO: 16214 - RNA, 22 nt, Human
gaguggguaccggagcaggugc

SEQ ID NO: 16215 - RNA, 22 nt, Human
gaguguaaaaacuuagugagau

SEQ ID NO: 16216 - RNA, 22 nt, Human
gaguguauggaaggaagagauu

SEQ ID NO: 16217 - RNA, 22 nt, Human
gagugucuaaucacguuucaca

SEQ ID NO: 16218 - RNA, 21 nt, Human
gagugucuaauccaggcuguc

SEQ ID NO: 16219 - RNA, 22 nt, Human
gagugucuauguuuagucuuuc

SEQ ID NO: 16220 - RNA, 22 nt, Human
gagugucugaauuagagcacaa

SEQ ID NO: 16221 - RNA, 22 nt, Human
gagacugcugguaaagauggga

SEQ ID NO: 16222 - RNA, 22 nt, Human
gagacuguaagcuccuugagga

SEQ ID NO: 16223 - RNA, 22 nt, Human
gagacugucacuugggaccugu

SEQ ID NO: 16224 - RNA, 22 nt, Human
gagagaaaggauaacagcucaa

SEQ ID NO: 16225 - RNA, 22 nt, Human
gagagaacacaaagggccagcu

SEQ ID NO: 16226 - RNA, 22 nt, Human
gagagaagggacuucuacacuu

SEQ ID NO: 16227 - RNA, 22 nt, Human
gagagacagcacacaguguggg

SEQ ID NO: 16228 - RNA, 22 nt, Human
gagagacuggaaugggcugugg

SEQ ID NO: 16229 - RNA, 22 nt, Human
gagagagaagugggugucaccu

SEQ ID NO: 16230 - RNA, 22 nt, Human
gagagagagcuaauauuaagcu

SEQ ID NO: 16231 - RNA, 23 nt, Human
gagagagauugcuaaaccacucc

SEQ ID NO: 16232 - RNA, 18 nt, Human
gagagcccagcagguggu

SEQ ID NO: 16233 - RNA, 22 nt, Human
gagagcccucacuccuucccug

SEQ ID NO: 16234 - RNA, 22 nt, Human
gagagcccugcuccuaucccag

SEQ ID NO: 16235 - RNA, 22 nt, Human
gagagcuaacuaccuggaaaug

SEQ ID NO: 16236 - RNA, 23 nt, Human
gagagcugacugucaagacuguu

SEQ ID NO: 16237 - RNA, 22 nt, Human
gagagcugcauucucagacaca

SEQ ID NO: 16238 - RNA, 22 nt, Human
gagagcuguaauagucaugucu

SEQ ID NO: 16239 - RNA, 22 nt, Human
gagagcuguccggcugagcagc

SEQ ID NO: 16240 - RNA, 22 nt, Human
gagagcugugguuugaccaggc

SEQ ID NO: 16241 - RNA, 22 nt, Human
gagaggaagccuucuguacuug

SEQ ID NO: 16242 - RNA, 22 nt, Human
gagaggagguggcuaugacagc

SEQ ID NO: 16243 - RNA, 22 nt, Human
gagaggauccacaaaccaggaa

SEQ ID NO: 16244 - RNA, 22 nt, Human
gagccaagcaccacauuaaguu

SEQ ID NO: 16245 - RNA, 22 nt, Human
gagccaagggcgugcuggagag

SEQ ID NO: 16246 - RNA, 22 nt, Human
gagccacagugguggcccacgu

SEQ ID NO: 16247 - RNA, 22 nt, Human
gagccaccuucaacucaggaau

SEQ ID NO: 16248 - RNA, 22 nt, Human
gagccagacugccugaagcuca

SEQ ID NO: 16249 - RNA, 22 nt, Human
gagccagagauccaggauggcu

SEQ ID NO: 16250 - RNA, 22 nt, Human
gagccagccgcaagagcuguga

SEQ ID NO: 16251 - RNA, 22 nt, Human
gagccagcgccuugccucuggg

SEQ ID NO: 16252 - RNA, 22 nt, Human
gagccaggaagaaggccuuacu

SEQ ID NO: 16253 - RNA, 22 nt, Human
gagccaggagauaccuaagggg

SEQ ID NO: 16254 - RNA, 22 nt, Human
gagccagguuggaggcugcagu

SEQ ID NO: 16255 - RNA, 22 nt, Human
gagccagugaucagacagggag

SEQ ID NO: 16256 - RNA, 22 nt, Human
gagcccagauuggaauuuccca

SEQ ID NO: 16257 - RNA, 22 nt, Human
gagcccagcucuaccucagacu

SEQ ID NO: 16258 - RNA, 22 nt, Human
gagcccagcugcggcccucagc

SEQ ID NO: 16259 - RNA, 22 nt, Human
gagcccaggcugggguucagag

SEQ ID NO: 16260 - RNA, 22 nt, Human
gagcccagguucugcuuccagc

SEQ ID NO: 16261 - RNA, 22 nt, Human
gagccccagcccugcuucuaua

SEQ ID NO: 16262 - RNA, 17 nt, Human
gagccccuuuccaaguu

SEQ ID NO: 16263 - RNA, 22 nt, Human
gagcccgagcgcguacccggcg

SEQ ID NO: 16264 - RNA, 22 nt, Human
gagcccucaaugaaucugcauu

SEQ ID NO: 16265 - RNA, 18 nt, Human
gagcccugggagaucucu

SEQ ID NO: 16266 - RNA, 22 nt, Human
gagcccuguagcaagucauguc

SEQ ID NO: 16267 - RNA, 22 nt, Human
gagcccugugaggaaagagggu

SEQ ID NO: 16268 - RNA, 22 nt, Human
gagccgugccagcccugucucg

SEQ ID NO: 16269 - RNA, 22 nt, Human
gagccucguggcggccacugcg

SEQ ID NO: 16270 - RNA, 22 nt, Human
gagccugcccagcccuguccac

SEQ ID NO: 16271 - RNA, 22 nt, Human
gagccugccccuccaccaggau

SEQ ID NO: 16272 - RNA, 22 nt, Human
gagccugccucuagucucuaga

SEQ ID NO: 16273 - RNA, 22 nt, Human
gagccuggagcuggaacgaagc

SEQ ID NO: 16274 - RNA, 22 nt, Human
gagccuggauugaagugggugg

SEQ ID NO: 16275 - RNA, 22 nt, Human
gagccuggccuccugccucagc

SEQ ID NO: 16276 - RNA, 22 nt, Human
gagcgauugcgggggucagagg

SEQ ID NO: 16277 - RNA, 22 nt, Human
gagcgcgccacaaggagcggcg

SEQ ID NO: 16278 - RNA, 22 nt, Human
gagcuaaaugaaucauaaauca

SEQ ID NO: 16279 - RNA, 22 nt, Human
gagcuaagagucuagaaaggcu

SEQ ID NO: 16280 - RNA, 22 nt, Human
gagcuaaggcacaggcaggcuu

SEQ ID NO: 16281 - RNA, 22 nt, Human
gagcuacaagggagacuuuuuu

SEQ ID NO: 16282 - RNA, 20 nt, Human
gagcuacacaaaugcugcuu

SEQ ID NO: 16283 - RNA, 22 nt, Human
gagcuagaauuaggccaauuuc

SEQ ID NO: 16284 - RNA, 22 nt, Human
gagcuagcuucuuccagguuuc

SEQ ID NO: 16285 - RNA, 22 nt, Human
gagcuaguagaacaagugagga

SEQ ID NO: 16286 - RNA, 22 nt, Human
gagcucagaggauucuggggag

SEQ ID NO: 16287 - RNA, 22 nt, Human
gagcucagcaaaggucugugug

SEQ ID NO: 16288 - RNA, 22 nt, Human
gagcucauccccaugguccguc

SEQ ID NO: 16289 - RNA, 22 nt, Human
gagcuccaccaccuucaggcag

SEQ ID NO: 16290 - RNA, 22 nt, Human
gagcuccagaguuagacacccg

SEQ ID NO: 16291 - RNA, 21 nt, Human
gagcucucaggcaagaagcag

SEQ ID NO: 16292 - RNA, 18 nt, Human
gagcucugccucccaguc

SEQ ID NO: 16293 - RNA, 22 nt, Human
gagcucugggaaacaaagugua

SEQ ID NO: 16294 - RNA, 22 nt, Human
gagcucuucuaaagauggcaau

SEQ ID NO: 16295 - RNA, 22 nt, Human
gagcucuuugaaccugggcagu

SEQ ID NO: 16296 - RNA, 22 nt, Human
gagcugaagcgcuacagcaucc

SEQ ID NO: 16297 - RNA, 22 nt, Human
gagcugaaggagaaagcagggg

SEQ ID NO: 16298 - RNA, 22 nt, Human
gagcugagccuggguggaccgc

SEQ ID NO: 16299 - RNA, 22 nt, Human
gagcugaggccagagucuucug

SEQ ID NO: 16300 - RNA, 23 nt, Human
gagcugaguguagggagacuagg

SEQ ID NO: 16301 - RNA, 20 nt, Human
gagcugaguguggucauggg

SEQ ID NO: 16302 - RNA, 22 nt, Human
gagcugcauagcugggauccuc

SEQ ID NO: 16303 - RNA, 22 nt, Human
gagcugcaugcaacucgaaaau

SEQ ID NO: 16304 - RNA, 22 nt, Human
gagcugcaugcaacuguuuaaa

SEQ ID NO: 16305 - RNA, 22 nt, Human
gagcugccaagauuacaaucag

SEQ ID NO: 16306 - RNA, 18 nt, Human
gagcugccauauuuaguu

SEQ ID NO: 16307 - RNA, 22 nt, Human
gagcugccggcccacaguacua

SEQ ID NO: 16308 - RNA, 22 nt, Human
gagcugccugaacaagcagcag

SEQ ID NO: 16309 - RNA, 22 nt, Human
gagcugccuguugcauagcaac

SEQ ID NO: 16310 - RNA, 22 nt, Human
gagcugcuggauauguggccug

SEQ ID NO: 16311 - RNA, 22 nt, Human
gagcugcuucugugugccgggu

SEQ ID NO: 16312 - RNA, 22 nt, Human
gagcuggaagucuguggucaga

SEQ ID NO: 16313 - RNA, 22 nt, Human
gagcuggcugugguugagugca

SEQ ID NO: 16314 - RNA, 22 nt, Human
gagcugggaagauagcuugagc

SEQ ID NO: 16315 - RNA, 22 nt, Human
gagcugggacauggguccucuc

SEQ ID NO: 16316 - RNA, 18 nt, Human
gagcugggagaaggaagg

SEQ ID NO: 16317 - RNA, 22 nt, Human
gagcugggagcugggauuugga

SEQ ID NO: 16318 - RNA, 22 nt, Human
gagcuggguauauggcuuuaug

SEQ ID NO: 16319 - RNA, 22 nt, Human
gagcuggguguuuauuugccaa

SEQ ID NO: 16320 - RNA, 22 nt, Human
gagcugguccacaaucugcagg

SEQ ID NO: 16321 - RNA, 22 nt, Human
gagcugguucuguccagggaau

SEQ ID NO: 16322 - RNA, 22 nt, Human
gagcuguccgccccugggccga

SEQ ID NO: 16323 - RNA, 22 nt, Human
gagcugucucuauaugaaugcu

SEQ ID NO: 16324 - RNA, 22 nt, Human
gagcugucucuuugggccuuuu

SEQ ID NO: 16325 - RNA, 22 nt, Human
gagcugugaaaagugccugggg

SEQ ID NO: 16326 - RNA, 22 nt, Human
gagcugugacacgcagcccagg

SEQ ID NO: 16327 - RNA, 22 nt, Human
gagcugugagggacacauugcu

SEQ ID NO: 16328 - RNA, 22 nt, Human
gagcugugauuggugucucacu

SEQ ID NO: 16329 - RNA, 22 nt, Human
gagcuguuugugacaggcugug

SEQ ID NO: 16330 - RNA, 22 nt, Human
gagcuguuuuuuaaaguuagga

SEQ ID NO: 16331 - RNA, 22 nt, Human
gagcuucaaauggacgaccuuu

SEQ ID NO: 16332 - RNA, 22 nt, Human
gagcuuccauggacgccaucug

SEQ ID NO: 16333 - RNA, 22 nt, Human
gagcuucccucugcagucccug

SEQ ID NO: 16334 - RNA, 22 nt, Human
gagcuuccucagccuuucucac

SEQ ID NO: 16335 - RNA, 22 nt, Human
gagcuucucaacaguuaucucu

SEQ ID NO: 16336 - RNA, 22 nt, Human
gagcuucuuguuucuucaucug

SEQ ID NO: 16337 - RNA, 22 nt, Human
gagcuuggacaagcucugaagg

SEQ ID NO: 16338 - RNA, 22 nt, Human
gaugaggaaaccaaggcucagg

SEQ ID NO: 16339 - RNA, 22 nt, Human
gaugaggaaugcucagcucaau

SEQ ID NO: 16340 - RNA, 22 nt, Human
gaugaggcagcucagggggaaa

SEQ ID NO: 16341 - RNA, 22 nt, Human
gaugaggcauaaacacagucac

SEQ ID NO: 16342 - RNA, 22 nt, Human
gaugaggcucaugcacccugcg

SEQ ID NO: 16343 - RNA, 22 nt, Human
gaugagugauguugaagaaggu

SEQ ID NO: 16344 - RNA, 22 nt, Human
gaugaugacagugauuagacug

SEQ ID NO: 16345 - RNA, 22 nt, Human
gaugaugaggccaugaggcagg

SEQ ID NO: 16346 - RNA, 22 nt, Human
gaugauggguugaugugaaggg

SEQ ID NO: 16347 - RNA, 22 nt, Human
gaugcaaacugugacauagagu

SEQ ID NO: 16348 - RNA, 22 nt, Human
gaugcaaagaggaccuucagua

SEQ ID NO: 16349 - RNA, 22 nt, Human
gaugcacaaagcagagggaauc

SEQ ID NO: 16350 - RNA, 22 nt, Human
gaugcacggucaugucuuuuca

SEQ ID NO: 16351 - RNA, 22 nt, Human
gaugcagcagccagcuucugaa

SEQ ID NO: 16352 - RNA, 22 nt, Human
gaugcagggaacuuagugggcu

SEQ ID NO: 16353 - RNA, 22 nt, Human
agugacagcugggaaggugaaa

SEQ ID NO: 16354 - RNA, 22 nt, Human
agugacaggggaggcaggugug

SEQ ID NO: 16355 - RNA, 22 nt, Human
agugacagucucagagaucagg

SEQ ID NO: 16356 - RNA, 22 nt, Human
agugacaguuucaggcauuuuu

SEQ ID NO: 16357 - RNA, 22 nt, Human
agugacauuugcaccagcugcu

SEQ ID NO: 16358 - RNA, 22 nt, Human
agugaccaacaaugcugagaag

SEQ ID NO: 16359 - RNA, 22 nt, Human
agugaccauuuucagcuagagg

SEQ ID NO: 16360 - RNA, 22 nt, Human
agugacguuuauugggugugaa

SEQ ID NO: 16361 - RNA, 22 nt, Human
agugacuugacacuugugaggg

SEQ ID NO: 16362 - RNA, 17 nt, Human
agugacuuggaaagagc

SEQ ID NO: 16363 - RNA, 22 nt, Human
agugacuuggcaugaugagaag

SEQ ID NO: 16364 - RNA, 19 nt, Human
agugagcauccagagaggu

SEQ ID NO: 16365 - RNA, 22 nt, Human
agugagcauccagagagguggg

SEQ ID NO: 16366 - RNA, 19 nt, Human
agugagcauggcuugacug

SEQ ID NO: 16367 - RNA, 22 nt, Human
agugagcauucguuuggaaccc

SEQ ID NO: 16368 - RNA, 22 nt, Human
agugaggaaauccauuaucaag

SEQ ID NO: 16369 - RNA, 17 nt, Human
agugaggagauuggaag

SEQ ID NO: 16370 - RNA, 22 nt, Human
agugaggggauucaggcaaggu

SEQ ID NO: 16371 - RNA, 22 nt, Human
agugaggucaggaucucaggga

SEQ ID NO: 16372 - RNA, 22 nt, Human
agugagucaaaaaacuuagaua

SEQ ID NO: 16373 - RNA, 18 nt, Human
agugaguuguugaaagaa

SEQ ID NO: 16374 - RNA, 22 nt, Human
agugaguuuagggugcaggugu

SEQ ID NO: 16375 - RNA, 22 nt, Human
agugaucagcuagaucuacuug

SEQ ID NO: 16376 - RNA, 22 nt, Human
agugaucugacucccaguuaga

SEQ ID NO: 16377 - RNA, 22 nt, Human
agugaucuuuuaaaaagaagug

SEQ ID NO: 16378 - RNA, 22 nt, Human
agugauggcagugaauaaggcu

SEQ ID NO: 16379 - RNA, 22 nt, Human
agugauggcauauauagaugug

SEQ ID NO: 16380 - RNA, 22 nt, Human
agugaugguuuccagucacuga

SEQ ID NO: 16381 - RNA, 22 nt, Human
agugauguagguggauucuggc

SEQ ID NO: 16382 - RNA, 22 nt, Human
agugaugugaggugugagaggg

SEQ ID NO: 16383 - RNA, 22 nt, Human
agugauguugauuuuaccacuu

SEQ ID NO: 16384 - RNA, 22 nt, Human
agugauucccagacuuccuggg

SEQ ID NO: 16385 - RNA, 22 nt, Human
agugauuugacucuuuuauugu

SEQ ID NO: 16386 - RNA, 22 nt, Human
agugauuugggugucagaaagu

SEQ ID NO: 16387 - RNA, 22 nt, Human
agugcaaaaguaauuggaguuu

SEQ ID NO: 16388 - RNA, 22 nt, Human
agugcaaagccgagguuucuug

SEQ ID NO: 16389 - RNA, 22 nt, Human
agugcaaagcugcugcuguggu

SEQ ID NO: 16390 - RNA, 22 nt, Human
agugcaaauaucuacgcgguga

SEQ ID NO: 16391 - RNA, 22 nt, Human
agugcaaauuauuuaccugauu

SEQ ID NO: 16392 - RNA, 22 nt, Human
agugcaacuucacguagaguac

SEQ ID NO: 16393 - RNA, 22 nt, Human
agugcaauuuugcuuucccaau

SEQ ID NO: 16394 - RNA, 22 nt, Human
agugcacaacaugcagguuugu

SEQ ID NO: 16395 - RNA, 22 nt, Human
agugcagagagcaauacucuac

SEQ ID NO: 16396 - RNA, 22 nt, Human
agugcagaguacauuuguggca

SEQ ID NO: 16397 - RNA, 22 nt, Human
agugcagauuuuuagucagcuu

SEQ ID NO: 16398 - RNA, 22 nt, Human
agugcagcaacaaacugcccuc

SEQ ID NO: 16399 - RNA, 22 nt, Human
agugcagccgagaucaggugcu

SEQ ID NO: 16400 - RNA, 22 nt, Human
agugcagcuauuacaacagugu

SEQ ID NO: 16401 - RNA, 22 nt, Human
agugcagcucccucaccugcuu

SEQ ID NO: 16402 - RNA, 22 nt, Human
agugcagcuuuuucuuuacaug

SEQ ID NO: 16403 - RNA, 22 nt, Human
agugcaggagccuggccagagc

SEQ ID NO: 16404 - RNA, 22 nt, Human
agugcagggccugcccagcagg

SEQ ID NO: 16405 - RNA, 22 nt, Human
agugcagggggaaagggugucu

SEQ ID NO: 16406 - RNA, 22 nt, Human
agugcauaaaggaaaaacugaa

SEQ ID NO: 16407 - RNA, 22 nt, Human
agugcaugcgcuugggaggggu

SEQ ID NO: 16408 - RNA, 18 nt, Human
agugcaugcuaggggaag

SEQ ID NO: 16409 - RNA, 19 nt, Human
agugcaugggcgaggugca

SEQ ID NO: 16410 - RNA, 22 nt, Human
agugcauucucuaauuacaggu

SEQ ID NO: 16411 - RNA, 22 nt, Human
agugcauugcaucucugcuuca

SEQ ID NO: 16412 - RNA, 22 nt, Human
agugccaaacaguacauaacau

SEQ ID NO: 16413 - RNA, 22 nt, Human
agugccaagguauuaauuuaua

SEQ ID NO: 16414 - RNA, 18 nt, Human
agugccagcucugcuuuc

SEQ ID NO: 16415 - RNA, 20 nt, Human
agugccagggcaggugagag

SEQ ID NO: 16416 - RNA, 22 nt, Human
agugccccaugggugccugggg

SEQ ID NO: 16417 - RNA, 22 nt, Human
agugcccggggugccagacaca

SEQ ID NO: 16418 - RNA, 20 nt, Human
agugcccuccgacauuguuu

SEQ ID NO: 16419 - RNA, 22 nt, Human
agugcccuggcccagcuggacc

SEQ ID NO: 16420 - RNA, 22 nt, Human
agugcccuucaugaagcaagag

SEQ ID NO: 16421 - RNA, 22 nt, Human
agugccuagauauuguuugaac

SEQ ID NO: 16422 - RNA, 22 nt, Human
agugccuggcacauggaaggug

SEQ ID NO: 16423 - RNA, 22 nt, Human
agugccuuggcugugaugggga

SEQ ID NO: 16424 - RNA, 22 nt, Human
agugccuugugugugggcagcc

SEQ ID NO: 16425 - RNA, 22 nt, Human
agugcucaugcacauuuauagu

SEQ ID NO: 16426 - RNA, 22 nt, Human
agugcuccacauugcacuauuc

SEQ ID NO: 16427 - RNA, 22 nt, Human
agugcuccugaagcuugaggca

SEQ ID NO: 16428 - RNA, 22 nt, Human
agugcuccugccagcuuucugg

SEQ ID NO: 16429 - RNA, 22 nt, Human
agugcuccuuucauugcugccc

SEQ ID NO: 16430 - RNA, 22 nt, Human
agugcucuaacagucaaaaaag

SEQ ID NO: 16431 - RNA, 22 nt, Human
agugcucucuccccagugcuac

SEQ ID NO: 16432 - RNA, 22 nt, Human
agugcucuggguccacuccaga

SEQ ID NO: 16433 - RNA, 22 nt, Human
agugcucugucauuggugggau

SEQ ID NO: 16434 - RNA, 23 nt, Human
agugcuggagaagcuucuggcuu

SEQ ID NO: 16435 - RNA, 22 nt, Human
agugcugggauuacaggcauaa

SEQ ID NO: 16436 - RNA, 22 nt, Human
agugcugggauugcaggcauga

SEQ ID NO: 16437 - RNA, 22 nt, Human
agugcuguuagguuaauauagu

SEQ ID NO: 16438 - RNA, 22 nt, Human
agugcuguuggauaaugcuguc

SEQ ID NO: 16439 - RNA, 22 nt, Human
agugcuucuggugggcgugagg

SEQ ID NO: 16440 - RNA, 22 nt, Human
agugcuuggcaaccuucugacc

SEQ ID NO: 16441 - RNA, 22 nt, Human
agugcuuuagaccuuuuggggu

SEQ ID NO: 16442 - RNA, 22 nt, Human
agugcuuuagagaaauggugcu

SEQ ID NO: 16443 - RNA, 22 nt, Human
agugcuuugguauagaacuauu

SEQ ID NO: 16444 - RNA, 22 nt, Human
agcuauagcuggaucuuaagug

SEQ ID NO: 16445 - RNA, 22 nt, Human
agcuauaguacuuggcuuuucu

SEQ ID NO: 16446 - RNA, 22 nt, Human
agcuauauagaugguguguuug

SEQ ID NO: 16447 - RNA, 22 nt, Human
agcuaucaccuuaauaaacuga

SEQ ID NO: 16448 - RNA, 22 nt, Human
agcuauggaacagaguggcugu

SEQ ID NO: 16449 - RNA, 22 nt, Human
agcuauguauuuguguguuaaa

SEQ ID NO: 16450 - RNA, 22 nt, Human
agcuaugugauuuaaacaaggu

SEQ ID NO: 16451 - RNA, 22 nt, Human
agcuauguuauagcauguauca

SEQ ID NO: 16452 - RNA, 22 nt, Human
agcuauuucaaaguuugagaca

SEQ ID NO: 16453 - RNA, 22 nt, Human
agcucaagugcaagcauucuau

SEQ ID NO: 16454 - RNA, 22 nt, Human
agcucacagaaauccugcagga

SEQ ID NO: 16455 - RNA, 22 nt, Human
agcucacaguguccuuccucaa

SEQ ID NO: 16456 - RNA, 22 nt, Human
agcucagaacugcagacaugug

SEQ ID NO: 16457 - RNA, 22 nt, Human
agcucagcuuccucuccaugcu

SEQ ID NO: 16458 - RNA, 22 nt, Human
agcucaggccggagcuacaggc

SEQ ID NO: 16459 - RNA, 22 nt, Human
agcucagggcaaagacucaaau

SEQ ID NO: 16460 - RNA, 22 nt, Human
agcucagggccaggcgcguuuc

SEQ ID NO: 16461 - RNA, 22 nt, Human
agcucagggccaucggcccuuu

SEQ ID NO: 16462 - RNA, 22 nt, Human
agcugcucuugggugacuucaa

SEQ ID NO: 16463 - RNA, 22 nt, Human
agcugcugaagugagagaauug

SEQ ID NO: 16464 - RNA, 19 nt, Human
agcugcugauugguggagg

SEQ ID NO: 16465 - RNA, 22 nt, Human
agcugcugcaaguggugcuaac

SEQ ID NO: 16466 - RNA, 22 nt, Human
agcugcugcgccucacccuggc

SEQ ID NO: 16467 - RNA, 22 nt, Human
agcugcuguccuaggcacugua

SEQ ID NO: 16468 - RNA, 22 nt, Human
agcugcuguggccacaucuggc

SEQ ID NO: 16469 - RNA, 22 nt, Human
agcugcuguggggcucggccug

SEQ ID NO: 16470 - RNA, 22 nt, Human
agcugcugugugcucaggcagg

SEQ ID NO: 16471 - RNA, 22 nt, Human
agcugcuguuucuugcacguau

SEQ ID NO: 16472 - RNA, 18 nt, Human
agcugcuugcaggccuuc

SEQ ID NO: 16473 - RNA, 22 nt, Human
agcugcuugggaaccaucaauu

SEQ ID NO: 16474 - RNA, 22 nt, Human
agcugcuuugccaaugcguucc

SEQ ID NO: 16475 - RNA, 22 nt, Human
agcugcuuugcugggcaggccc

SEQ ID NO: 16476 - RNA, 22 nt, Human
agcugcuuuuagggccgggcuc

SEQ ID NO: 16477 - RNA, 22 nt, Human
agcugcuuuuauuaggacaaug

SEQ ID NO: 16478 - RNA, 22 nt, Human
agcuggaacccgggugggcagc

SEQ ID NO: 16479 - RNA, 21 nt, Human
agcuggaaucuggcugugcuu

SEQ ID NO: 16480 - RNA, 22 nt, Human
agcuggagaaaccugggagggu

SEQ ID NO: 16481 - RNA, 22 nt, Human
agcuggagaugcccagcaccgg

SEQ ID NO: 16482 - RNA, 19 nt, Human
agcuggagauuggagggca

SEQ ID NO: 16483 - RNA, 22 nt, Human
agcuggaggauaacucacuucu

SEQ ID NO: 16484 - RNA, 22 nt, Human
agcuggauuaaauauagcuuuc

SEQ ID NO: 16485 - RNA, 22 nt, Human
agcuggcaaggcaauuuggauu

SEQ ID NO: 16486 - RNA, 22 nt, Human
agcuggcacagaccaggagauc

SEQ ID NO: 16487 - RNA, 22 nt, Human
agcuggcacuagcguuuccaag

SEQ ID NO: 16488 - RNA, 22 nt, Human
agcuggcagagcauuuguggcc

SEQ ID NO: 16489 - RNA, 22 nt, Human
agcuggcaggugaagaugauuu

SEQ ID NO: 16490 - RNA, 22 nt, Human
agcuggcagucggccuugaugc

SEQ ID NO: 16491 - RNA, 22 nt, Human
agcuggcaucgagcauuugaac

SEQ ID NO: 16492 - RNA, 22 nt, Human
agcuggcaucugaagucagggc

SEQ ID NO: 16493 - RNA, 20 nt, Human
agcuggccaauucuauuacu

SEQ ID NO: 16494 - RNA, 22 nt, Human
agcuggcccucgagagccaauu

SEQ ID NO: 16495 - RNA, 22 nt, Human
agcuggccggccuccaggugga

SEQ ID NO: 16496 - RNA, 22 nt, Human
agcuggcuaugcccugugaacc

SEQ ID NO: 16497 - RNA, 21 nt, Human
agcuggcucucucuggagaga

SEQ ID NO: 16498 - RNA, 19 nt, Human
agcuggcucuucuuugucu

SEQ ID NO: 16499 - RNA, 22 nt, Human
agcuggcuugcaugcuaaggag

SEQ ID NO: 16500 - RNA, 22 nt, Human
agcuggcuuugagcugggaggu

SEQ ID NO: 16501 - RNA, 22 nt, Human
agcugggacucaacugucuggg

SEQ ID NO: 16502 - RNA, 23 nt, Human
agcugggcaaggauccgggcucc

SEQ ID NO: 16503 - RNA, 22 nt, Human
agcugggcagacugcagugguu

SEQ ID NO: 16504 - RNA, 23 nt, Human
agcugggccagguggucagaccu

SEQ ID NO: 16505 - RNA, 21 nt, Human
agcugggccucagccugcagu

SEQ ID NO: 16506 - RNA, 22 nt, Human
agcuggggcauuuauccacuaa

SEQ ID NO: 16507 - RNA, 22 nt, Human
agcuggguacagccugugccua

SEQ ID NO: 16508 - RNA, 22 nt, Human
agcuggguacugaugucuucag

SEQ ID NO: 16509 - RNA, 22 nt, Human
agcugggugaaggcagauggcu

SEQ ID NO: 16510 - RNA, 22 nt, Human
agcugggugcgguggcucaugc

SEQ ID NO: 16511 - RNA, 22 nt, Human
agcuggguggagggcccacggu

SEQ ID NO: 16512 - RNA, 21 nt, Human
agcugggugggcugagugaca

SEQ ID NO: 16513 - RNA, 22 nt, Human
agcugguccuuggcaguucuca

SEQ ID NO: 16514 - RNA, 20 nt, Human
agcuggucuuaaguaacuga

SEQ ID NO: 16515 - RNA, 22 nt, Human
agcuggugaggguugaggggua

SEQ ID NO: 16516 - RNA, 22 nt, Human
agcugguggagccuuucuguuu

SEQ ID NO: 16517 - RNA, 21 nt, Human
agcuggugucagagcucuggg

SEQ ID NO: 16518 - RNA, 22 nt, Human
agcugguguccuccuggagcug

SEQ ID NO: 16519 - RNA, 20 nt, Human
agcugguuaucuuaauucuu

SEQ ID NO: 16520 - RNA, 22 nt, Human
agcugguucagaaauuagaugg

SEQ ID NO: 16521 - RNA, 22 nt, Human
agcugguugcuuaaccucucug

SEQ ID NO: 16522 - RNA, 22 nt, Human
agcugguugucauucagaauug

SEQ ID NO: 16523 - RNA, 22 nt, Human
agcuguaagcuuugggcaaguc

SEQ ID NO: 16524 - RNA, 22 nt, Human
agcuguauucucuuuguauuaa

SEQ ID NO: 16525 - RNA, 22 nt, Human
agcugucaccaggagccggacc

SEQ ID NO: 16526 - RNA, 22 nt, Human
agcugucagugcugugccugua

SEQ ID NO: 16527 - RNA, 22 nt, Human
agcugucuggaaguuccucaug

SEQ ID NO: 16528 - RNA, 22 nt, Human
agcugucuuuaagugagcuuug

SEQ ID NO: 16529 - RNA, 22 nt, Human
agcugugauuauccacuggaau

SEQ ID NO: 16530 - RNA, 22 nt, Human
agcugugcacacugugaaguag

SEQ ID NO: 16531 - RNA, 22 nt, Human
agcuguggaguaggggguugga

SEQ ID NO: 16532 - RNA, 22 nt, Human
agcuguggcaaccuugucagac

SEQ ID NO: 16533 - RNA, 22 nt, Human
agcuguggcagcacuuuggagu

SEQ ID NO: 16534 - RNA, 22 nt, Human
agcuguggucuucaaguugccu

SEQ ID NO: 16535 - RNA, 22 nt, Human
agcugugguuagauagaguccu

SEQ ID NO: 16536 - RNA, 23 nt, Human
agcuguguggccuugggcaaguu

SEQ ID NO: 16537 - RNA, 22 nt, Human
agcugugugugcuugggauuau

SEQ ID NO: 16538 - RNA, 22 nt, Human
agcuguguucugguugauucac

SEQ ID NO: 16539 - RNA, 22 nt, Human
agcuguugcagggaucagcacc

SEQ ID NO: 16540 - RNA, 22 nt, Human
agcuguuuaaaugacuuacuuu

SEQ ID NO: 16541 - RNA, 22 nt, Human
agcuguuuaugcacuccugccu

SEQ ID NO: 16542 - RNA, 22 nt, Human
agcuguuuccauaaaugagaca

SEQ ID NO: 16543 - RNA, 22 nt, Human
agcuguuuccauucuugaguag

SEQ ID NO: 16544 - RNA, 22 nt, Human
agcuguuuuccugguuagagac

SEQ ID NO: 16545 - RNA, 22 nt, Human
agcuguuuucuucuaggaagac

SEQ ID NO: 16546 - RNA, 22 nt, Human
agcuuacugggcaguaaagauu

SEQ ID NO: 16547 - RNA, 22 nt, Human
agcuuagugguuguaugaguua

SEQ ID NO: 16548 - RNA, 22 nt, Human
agcuucagcuugcagcugugau

SEQ ID NO: 16549 - RNA, 22 nt, Human
agcuucagggacuuguggcaga

SEQ ID NO: 16550 - RNA, 22 nt, Human
agcuucagguggucuuguuucu

SEQ ID NO: 16551 - RNA, 22 nt, Human
agcuucaucuuuauguacagga

SEQ ID NO: 16552 - RNA, 20 nt, Human
agcuucauuauagcccacag

SEQ ID NO: 16553 - RNA, 23 nt, Human
agcuucauuauuuuccaugaucu

SEQ ID NO: 16554 - RNA, 22 nt, Human
agcuucccaagguuggaagguu

SEQ ID NO: 16555 - RNA, 22 nt, Human
agcuucccggcaggcacguccu

SEQ ID NO: 16556 - RNA, 18 nt, Human
agcuucccucugagaggg

SEQ ID NO: 16557 - RNA, 22 nt, Human
agcuuccuacaaccaucucaga

SEQ ID NO: 16558 - RNA, 21 nt, Human
agcuuccugcagugggagguc

SEQ ID NO: 16559 - RNA, 22 nt, Human
agcuucucagaagaguccugua

SEQ ID NO: 16560 - RNA, 22 nt, Human
agcuucucagcuucagaacugu

SEQ ID NO: 16561 - RNA, 22 nt, Human
agcuucucccuuuccuauuggu

SEQ ID NO: 16562 - RNA, 22 nt, Human
agcuucuccugguacagaacug

SEQ ID NO: 16563 - RNA, 22 nt, Human
aggauuugcacugguguuugag

SEQ ID NO: 16564 - RNA, 22 nt, Human
aggauuuguauagcuuucuuuu

SEQ ID NO: 16565 - RNA, 22 nt, Human
aggauuuugacuuauucaggga

SEQ ID NO: 16566 - RNA, 22 nt, Human
aggcaaaagaaugucauaaaug

SEQ ID NO: 16567 - RNA, 22 nt, Human
aggcaaaauaagccucuccugu

SEQ ID NO: 16568 - RNA, 22 nt, Human
aggcaaaucugagacauuuaaa

SEQ ID NO: 16569 - RNA, 22 nt, Human
aggcaaauuauuguaugcaguu

SEQ ID NO: 16570 - RNA, 22 nt, Human
aggcaaauugugagaaaaugaa

SEQ ID NO: 16571 - RNA, 17 nt, Human
aucaguagcauaucaga

SEQ ID NO: 16572 - RNA, 22 nt, Human
aucagucauauccaaauuagca

SEQ ID NO: 16573 - RNA, 23 nt, Human
aucagucuugguagcugugccca

SEQ ID NO: 16574 - RNA, 22 nt, Human
aucagugacuucuuccaaaguu

SEQ ID NO: 16575 - RNA, 22 nt, Human
aucagugcauccugccacaaag

SEQ ID NO: 16576 - RNA, 22 nt, Human
aucagugccccauggcuaaugc

SEQ ID NO: 16577 - RNA, 22 nt, Human
aucagugcuucauagcccuggu

SEQ ID NO: 16578 - RNA, 22 nt, Human
aucaguguaccuuauggauuuu

SEQ ID NO: 16579 - RNA, 22 nt, Human
aucaguguuccuugagacugcc

SEQ ID NO: 16580 - RNA, 22 nt, Human
aucaguuauuuuuaagcuauaa

SEQ ID NO: 16581 - RNA, 22 nt, Human
aucaguuuaaaugggcuguugg

SEQ ID NO: 16582 - RNA, 22 nt, Human
aucaguuuggaacauucaggcc

SEQ ID NO: 16583 - RNA, 22 nt, Human
aucaguuuggugcuuucaguga

SEQ ID NO: 16584 - RNA, 22 nt, Human
aucaguuuugggggacauacug

SEQ ID NO: 16585 - RNA, 22 nt, Human
aggcugagccugggcguggugg

SEQ ID NO: 16586 - RNA, 23 nt, Human
aggcugagcucucccagcuucag

SEQ ID NO: 16587 - RNA, 22 nt, Human
aggcugaggcagguggaucauu

SEQ ID NO: 16588 - RNA, 22 nt, Human
aggcugaggcuggcagcuccag

SEQ ID NO: 16589 - RNA, 22 nt, Human
aggcugaggcuuuccuuggaga

SEQ ID NO: 16590 - RNA, 22 nt, Human
aggcugagggcuccugagggca

SEQ ID NO: 16591 - RNA, 22 nt, Human
aggcugaggggcgagggacccu

SEQ ID NO: 16592 - RNA, 20 nt, Human
aggcugagggugauuguguc

SEQ ID NO: 16593 - RNA, 22 nt, Human
aggcugagucgggaggaucacu

SEQ ID NO: 16594 - RNA, 20 nt, Human
aggcugaguucuaugcacuu

SEQ ID NO: 16595 - RNA, 22 nt, Human
aggcugaguuucucauucucgc

SEQ ID NO: 16596 - RNA, 22 nt, Human
aggcugaugcuggcugaggcug

SEQ ID NO: 16597 - RNA, 19 nt, Human
aggcugcaagguggugggc

SEQ ID NO: 16598 - RNA, 18 nt, Human
aggcugcacugucuuaaa

SEQ ID NO: 16599 - RNA, 22 nt, Human
aggcugcagaggugcugccaga

SEQ ID NO: 16600 - RNA, 21 nt, Human
aggcugcaugcaugagugugg

SEQ ID NO: 16601 - RNA, 22 nt, Human
aggcugccagaagccuucagga

SEQ ID NO: 16602 - RNA, 22 nt, Human
aggcugccucgugagcucgcug

SEQ ID NO: 16603 - RNA, 22 nt, Human
aggcugcuauaaacauucccgu

SEQ ID NO: 16604 - RNA, 22 nt, Human
aggcugcucaccucccugucug

SEQ ID NO: 16605 - RNA, 21 nt, Human
aggcugcuggcucaggguccu

SEQ ID NO: 16606 - RNA, 22 nt, Human
aggcuggaaagggaccagagug

SEQ ID NO: 16607 - RNA, 22 nt, Human
aggcuggagcaagggggcauau

SEQ ID NO: 16608 - RNA, 22 nt, Human
aggcuggagugcaguggcguga

SEQ ID NO: 16609 - RNA, 22 nt, Human
aggcuggaguguagcagugcag

SEQ ID NO: 16610 - RNA, 22 nt, Human
aggcuggaucucuguugccuuc

SEQ ID NO: 16611 - RNA, 20 nt, Human
aggcuggcacuccuggccag

SEQ ID NO: 16612 - RNA, 22 nt, Human
aggcuggcagccaccucagcag

SEQ ID NO: 16613 - RNA, 22 nt, Human
aggcuggcccaccucuugucuu

SEQ ID NO: 16614 - RNA, 22 nt, Human
aggcuggcccuacuggcugccu

SEQ ID NO: 16615 - RNA, 22 nt, Human
aggcuggcucggcuuuucuguc

SEQ ID NO: 16616 - RNA, 22 nt, Human
aggcuggcugaaaaacacccuu

SEQ ID NO: 16617 - RNA, 22 nt, Human
aggcuggcugacuucugaagca

SEQ ID NO: 16618 - RNA, 22 nt, Human
aggcuggcugagcugcagccug

SEQ ID NO: 16619 - RNA, 22 nt, Human
aggcuggcuggcaggggacaca

SEQ ID NO: 16620 - RNA, 22 nt, Human
aggcuggcuggggaugcgucuu

SEQ ID NO: 16621 - RNA, 22 nt, Human
aggcugggaagguaaaguugua

SEQ ID NO: 16622 - RNA, 22 nt, Human
aggcuggucccagggagggaau

SEQ ID NO: 16623 - RNA, 22 nt, Human
aggcuggucuauacggagacga

SEQ ID NO: 16624 - RNA, 22 nt, Human
aggcuggugucucuguccuguc

SEQ ID NO: 16625 - RNA, 22 nt, Human
aggcugguguguccugaagccu

SEQ ID NO: 16626 - RNA, 22 nt, Human
aggcugucaucuuugcaggcag

SEQ ID NO: 16627 - RNA, 22 nt, Human
aggcugucucaccucaggaggg

SEQ ID NO: 16628 - RNA, 22 nt, Human
aggcugugaacucuaugcugaa

SEQ ID NO: 16629 - RNA, 22 nt, Human
aggcugugaagguuaaagacga

SEQ ID NO: 16630 - RNA, 22 nt, Human
aggcugugacagggucauggag

SEQ ID NO: 16631 - RNA, 21 nt, Human
aggcugugacuuacacuaucu

SEQ ID NO: 16632 - RNA, 22 nt, Human
aggcugugagaaguccuucagu

SEQ ID NO: 16633 - RNA, 19 nt, Human
aggcugugaggggaaggaa

SEQ ID NO: 16634 - RNA, 22 nt, Human
aggcugugaguuuugucucaga

SEQ ID NO: 16635 - RNA, 22 nt, Human
aggcugugauggauguaaagga

SEQ ID NO: 16636 - RNA, 22 nt, Human
aggcugugauuccaccacucuc

SEQ ID NO: 16637 - RNA, 22 nt, Human
aggcugugcgaggucucagagu

SEQ ID NO: 16638 - RNA, 22 nt, Human
aggcuguggcauuaaacguuug

SEQ ID NO: 16639 - RNA, 22 nt, Human
aggcuguggcccuggucuagca

SEQ ID NO: 16640 - RNA, 22 nt, Human
aggcuguguucugguucuuagc

SEQ ID NO: 16641 - RNA, 22 nt, Human
aggcuguucuaggagaguggga

SEQ ID NO: 16642 - RNA, 22 nt, Human
aggcuguuuuguauaaacugga

SEQ ID NO: 16643 - RNA, 22 nt, Human
aggcuuaacuacaauuuuugcc

SEQ ID NO: 16644 - RNA, 22 nt, Human
aggcuuagaaaggguaagugac

SEQ ID NO: 16645 - RNA, 22 nt, Human
aggcuuauuuuaggucucucuu

SEQ ID NO: 16646 - RNA, 22 nt, Human
aggcuucacauuuucuaggccu

SEQ ID NO: 16647 - RNA, 22 nt, Human
aggcuucacgaugggugaggug

SEQ ID NO: 16648 - RNA, 22 nt, Human
aggcuucagaaagaguaauugg

SEQ ID NO: 16649 - RNA, 22 nt, Human
aggcuucagacaaauguuaugg

SEQ ID NO: 16650 - RNA, 22 nt, Human
aggcuucagaugaccuuagcau

SEQ ID NO: 16651 - RNA, 22 nt, Human
aggcuucaguauucaccgcaug

SEQ ID NO: 16652 - RNA, 22 nt, Human
aggcuucauuacagugguucaa

SEQ ID NO: 16653 - RNA, 22 nt, Human
aggcuucauuguggcaucagga

SEQ ID NO: 16654 - RNA, 22 nt, Human
aggcuucccagcugagcucagc

SEQ ID NO: 16655 - RNA, 22 nt, Human
aggcuucuaaaucacaaggaaa

SEQ ID NO: 16656 - RNA, 19 nt, Human
aggcuucuacccuguccag

SEQ ID NO: 16657 - RNA, 21 nt, Human
aggcuucuccgugcaggaaga

SEQ ID NO: 16658 - RNA, 22 nt, Human
aggcuucucuccuuggcuugca

SEQ ID NO: 16659 - RNA, 22 nt, Human
aggcuucuggaauccaguuucu

SEQ ID NO: 16660 - RNA, 22 nt, Human
aggcuucuggggcaccgagcga

SEQ ID NO: 16661 - RNA, 22 nt, Human
aggcuucugucuuuaggaguug

SEQ ID NO: 16662 - RNA, 22 nt, Human
aggcuucuguuucuuaaaggug

SEQ ID NO: 16663 - RNA, 22 nt, Human
aggcuucuugcuuccaaaugca

SEQ ID NO: 16664 - RNA, 22 nt, Human
aggcuucuugggcuucauucug

SEQ ID NO: 16665 - RNA, 22 nt, Human
aggcuuggaaaauuuacagugu

SEQ ID NO: 16666 - RNA, 21 nt, Human
aggcuuggauagguuauguga

SEQ ID NO: 16667 - RNA, 21 nt, Human
aggcuuggaucuagacaggcc

SEQ ID NO: 16668 - RNA, 19 nt, Human
aggcuuggcuagauuuacu

SEQ ID NO: 16669 - RNA, 22 nt, Human
aggcuuggcuggcagcccuggg

SEQ ID NO: 16670 - RNA, 20 nt, Human
aggcuuggcuuggcaggaac

SEQ ID NO: 16671 - RNA, 22 nt, Human
aggcuugguuaauucuguguga

SEQ ID NO: 16672 - RNA, 22 nt, Human
aggcuuuaagcaagcauauugu

SEQ ID NO: 16673 - RNA, 23 nt, Human
aggcuuuaugguagaaaguuugc

SEQ ID NO: 16674 - RNA, 22 nt, Human
aggcuuuauuugaucuauaugc

SEQ ID NO: 16675 - RNA, 22 nt, Human
aggcuuugcaaaaaagcucaua

SEQ ID NO: 16676 - RNA, 22 nt, Human
aggcuuuggaaucagaguucug

SEQ ID NO: 16677 - RNA, 21 nt, Human
agggaaaaggcugagugaggg

SEQ ID NO: 16678 - RNA, 21 nt, Human
agggaaagaaaaugagcuaau

SEQ ID NO: 16679 - RNA, 20 nt, Human
agggaacaauggacgcuguc

SEQ ID NO: 16680 - RNA, 22 nt, Human
aggcagccugguuugaauggaa

SEQ ID NO: 16681 - RNA, 22 nt, Human
aggcagcuagagagugaaacug

SEQ ID NO: 16682 - RNA, 22 nt, Human
aggcagcugcccucuccuuccu

SEQ ID NO: 16683 - RNA, 22 nt, Human
aggcagcuggaaaacuccaggc

SEQ ID NO: 16684 - RNA, 21 nt, Human
aggcagcuggaaggccuggcu

SEQ ID NO: 16685 - RNA, 20 nt, Human
aggcagcuggccaggcaggu

SEQ ID NO: 16686 - RNA, 23 nt, Human
aggcagcuggguagcaucuuucu

SEQ ID NO: 16687 - RNA, 22 nt, Human
aggcagcuuucagugucucuca

SEQ ID NO: 16688 - RNA, 22 nt, Human
aggcaggaggaucauggaugca

SEQ ID NO: 16689 - RNA, 21 nt, Human
aggcaggauucaaacacagag

SEQ ID NO: 16690 - RNA, 22 nt, Human
aggcaggauugcugacaacaau

SEQ ID NO: 16691 - RNA, 22 nt, Human
aggcaggcaaguucauaugagg

SEQ ID NO: 16692 - RNA, 18 nt, Human
aggcaggcggaucacaag

SEQ ID NO: 16693 - RNA, 22 nt, Human
aggcaggcuagucgcuugagcc

SEQ ID NO: 16694 - RNA, 22 nt, Human
aggcaggcucaaugcccagucu

SEQ ID NO: 16695 - RNA, 22 nt, Human
aggcaggcucuggguaugugca

SEQ ID NO: 16696 - RNA, 22 nt, Human
aggcaggcugcuauggaguaga

SEQ ID NO: 16697 - RNA, 22 nt, Human
aggcagggcugggauuagacuc

SEQ ID NO: 16698 - RNA, 22 nt, Human
aggcaggggagcuggaagggua

SEQ ID NO: 16699 - RNA, 17 nt, Human
aggcagguaagaguuau

SEQ ID NO: 16700 - RNA, 22 nt, Human
aggcagguagaaggaucuuuau

SEQ ID NO: 16701 - RNA, 22 nt, Human
aggcaggucuguaucuagucuc

SEQ ID NO: 16702 - RNA, 18 nt, Human
aggcaggugcuaauauuu

SEQ ID NO: 16703 - RNA, 22 nt, Human
aggcagucagcccugcuagggu

SEQ ID NO: 16704 - RNA, 22 nt, Human
aggcuccaugcaaaggcuguuu

SEQ ID NO: 16705 - RNA, 22 nt, Human
aggcuccauucaugugaaggca

SEQ ID NO: 16706 - RNA, 22 nt, Human
aggcuccauuccaggagcuaga

SEQ ID NO: 16707 - RNA, 22 nt, Human
aggcuccguccagucucaggcc

SEQ ID NO: 16708 - RNA, 22 nt, Human
aggcuccuagccuguggcuggu

SEQ ID NO: 16709 - RNA, 22 nt, Human
aggcuccuaucgcuuucagcaa

SEQ ID NO: 16710 - RNA, 20 nt, Human
aggcuccuccaggaugugug

SEQ ID NO: 16711 - RNA, 17 nt, Human
aggcuccuccuaagguc

SEQ ID NO: 16712 - RNA, 22 nt, Human
aggcuccuggguguggccgcca

SEQ ID NO: 16713 - RNA, 20 nt, Human
aggcuccuguaccugaggaa

SEQ ID NO: 16714 - RNA, 22 nt, Human
aggcuccuuauggcuuuggggu

SEQ ID NO: 16715 - RNA, 22 nt, Human
aggcucuaaggagggcugucua

SEQ ID NO: 16716 - RNA, 22 nt, Human
aggcucucacccucugaccaga

SEQ ID NO: 16717 - RNA, 22 nt, Human
aggcucucagaucagccacauu

SEQ ID NO: 16718 - RNA, 21 nt, Human
aggcucucauccagggaccca

SEQ ID NO: 16719 - RNA, 22 nt, Human
aggcucuccuccccaggaccau

SEQ ID NO: 16720 - RNA, 22 nt, Human
aggcucugaggcagauuuucgu

SEQ ID NO: 16721 - RNA, 22 nt, Human
aggcucugaguagagcugccag

SEQ ID NO: 16722 - RNA, 22 nt, Human
aggcucugcagaccccagcugu

SEQ ID NO: 16723 - RNA, 22 nt, Human
aggcucugcagugcuggaggac

SEQ ID NO: 16724 - RNA, 22 nt, Human
aggcucugcauccaggcuuuau

SEQ ID NO: 16725 - RNA, 22 nt, Human
aggcucugccaauuccuuccuc

SEQ ID NO: 16726 - RNA, 20 nt, Human
aggcucugccauugucccug

SEQ ID NO: 16727 - RNA, 22 nt, Human
aggcucugggaacagacgggug

SEQ ID NO: 16728 - RNA, 22 nt, Human
aggcucugggcucuagauuuug

SEQ ID NO: 16729 - RNA, 22 nt, Human
aggcucugguucaucaugaugg

SEQ ID NO: 16730 - RNA, 19 nt, Human
aggcucuguaggagagggc

SEQ ID NO: 16731 - RNA, 22 nt, Human
aggcucuguaugaagguuuggg

SEQ ID NO: 16732 - RNA, 22 nt, Human
aggcucugugauccacaaugag

SEQ ID NO: 16733 - RNA, 22 nt, Human
aggcucugugaugugccaggca

SEQ ID NO: 16734 - RNA, 22 nt, Human
aggcucugugcagccugcaucu

SEQ ID NO: 16735 - RNA, 22 nt, Human
aggcucugugcauccuccccaa

SEQ ID NO: 16736 - RNA, 22 nt, Human
aggcucuuugagacuaccugga

SEQ ID NO: 16737 - RNA, 22 nt, Human
aggcugagaaagugggaagaug

SEQ ID NO: 16738 - RNA, 22 nt, Human
aggcugagcuggcccuugaaau

SEQ ID NO: 16739 - RNA, 22 nt, Human
aggcugagcugguagugaguac

SEQ ID NO: 16740 - RNA, 22 nt, Human
aggcugaggaucccuguguucu

SEQ ID NO: 16741 - RNA, 22 nt, Human
aggcugaggaucguacuuucca

SEQ ID NO: 16742 - RNA, 22 nt, Human
aggcugaggcaagaggaucacu

SEQ ID NO: 16743 - RNA, 22 nt, Human
aggcugaggcagguggaucacc

SEQ ID NO: 16744 - RNA, 22 nt, Human
aggcugaggcgggaggaucacu

SEQ ID NO: 16745 - RNA, 22 nt, Human
aggcugagguaggaggaucgcu

SEQ ID NO: 16746 - RNA, 22 nt, Human
aggcugaggugugcugugaucg

SEQ ID NO: 16747 - RNA, 22 nt, Human
aggcugagugcuccccuagaug

SEQ ID NO: 16748 - RNA, 22 nt, Human
aggcugcagaacagucaggugc

SEQ ID NO: 16749 - RNA, 23 nt, Human
aggcugcagaagaauagggucau

SEQ ID NO: 16750 - RNA, 22 nt, Human
aggcugccaaagcuucugucuc

SEQ ID NO: 16751 - RNA, 23 nt, Human
aggcugccagaaauuggguaagg

SEQ ID NO: 16752 - RNA, 22 nt, Human
aggcugccgcagccaaugguug

SEQ ID NO: 16753 - RNA, 22 nt, Human
aggcugcguuagccucacuccc

SEQ ID NO: 16754 - RNA, 22 nt, Human
aggcugcucaguagauggagcu

SEQ ID NO: 16755 - RNA, 21 nt, Human
aggcugcucuuucuuguggua

SEQ ID NO: 16756 - RNA, 22 nt, Human
aggcugcugaggccaccacgcu

SEQ ID NO: 16757 - RNA, 22 nt, Human
aggcugcuggaggauuuaugcc

SEQ ID NO: 16758 - RNA, 22 nt, Human
aggcugcuuccuuacguggcug

SEQ ID NO: 16759 - RNA, 22 nt, Human
aggcuggagagugcaguggcgu

SEQ ID NO: 16760 - RNA, 22 nt, Human
aggcuggagggcaauggcaaga

SEQ ID NO: 16761 - RNA, 22 nt, Human
aggcuggaguacaguggcuauu

SEQ ID NO: 16762 - RNA, 22 nt, Human
aggcuggagugcaauggcguga

SEQ ID NO: 16763 - RNA, 22 nt, Human
aggcuggagugcuggagugcug

SEQ ID NO: 16764 - RNA, 22 nt, Human
aggcuggagugugcaguggcgc

SEQ ID NO: 16765 - RNA, 22 nt, Human
aggcuggaugugccucaccgag

SEQ ID NO: 16766 - RNA, 22 nt, Human
aggcuggauuuauggggacuuc

SEQ ID NO: 16767 - RNA, 22 nt, Human
aggcuggcauacauuuguucuu

SEQ ID NO: 16768 - RNA, 22 nt, Human
aggcuggccagugcugcagugg

SEQ ID NO: 16769 - RNA, 17 nt, Human
aggcuggcucacaggga

SEQ ID NO: 16770 - RNA, 23 nt, Human
aggcuggcuucaggagccucucc

SEQ ID NO: 16771 - RNA, 22 nt, Human
aggcuggcuucccaagcguccu

SEQ ID NO: 16772 - RNA, 22 nt, Human
aggcuggguaccugucauaugc

SEQ ID NO: 16773 - RNA, 22 nt, Human
aggcuguccucucuugcucagu

SEQ ID NO: 16774 - RNA, 22 nt, Human
aggcugucucagccugcuugca

SEQ ID NO: 16775 - RNA, 22 nt, Human
aggcugugaggggcccgcaugc

SEQ ID NO: 16776 - RNA, 22 nt, Human
aggcugugcaauuaggguaaga

SEQ ID NO: 16777 - RNA, 22 nt, Human
aggcuguggaugcuuaacaaau

SEQ ID NO: 16778 - RNA, 22 nt, Human
aggcuguggcaucacaucagga

SEQ ID NO: 16779 - RNA, 22 nt, Human
aggcugugggaauggcugcuug

SEQ ID NO: 16780 - RNA, 22 nt, Human
aggcugugggaguugagagucu

SEQ ID NO: 16781 - RNA, 22 nt, Human
aggcugugggguucugcuuuca

SEQ ID NO: 16782 - RNA, 22 nt, Human
aggcuguguccucauuuuauau

SEQ ID NO: 16783 - RNA, 22 nt, Human
aggcuguguggauaauauuggg

SEQ ID NO: 16784 - RNA, 22 nt, Human
aggcuguguggaugagucuuac

SEQ ID NO: 16785 - RNA, 22 nt, Human
aggcuguguuucuugcguuuuc

SEQ ID NO: 16786 - RNA, 22 nt, Human
aggcuuaacuuuacuguuaugc

SEQ ID NO: 16787 - RNA, 22 nt, Human
aggcuuaagccugaggccccag

SEQ ID NO: 16788 - RNA, 22 nt, Human
aggcuuagaaauucagcugagu

SEQ ID NO: 16789 - RNA, 22 nt, Human
augcagaaucuugagaaaaauu

SEQ ID NO: 16790 - RNA, 23 nt, Human
augcagagaauaacaaaugccau

SEQ ID NO: 16791 - RNA, 19 nt, Human
augcagagaauggcaguag

SEQ ID NO: 16792 - RNA, 22 nt, Human
augcagagacagauguggcaug

SEQ ID NO: 16793 - RNA, 22 nt, Human
augcagagcuuccaguggccug

SEQ ID NO: 16794 - RNA, 22 nt, Human
augcagauaagaaucagguuug

SEQ ID NO: 16795 - RNA, 22 nt, Human
augcagauaugcaaacuguagu

SEQ ID NO: 16796 - RNA, 22 nt, Human
augcagaucugugaaaggaaua

SEQ ID NO: 16797 - RNA, 22 nt, Human
augcagauguuccuacuguguu

SEQ ID NO: 16798 - RNA, 22 nt, Human
augcagcacugaucuuuagcca

SEQ ID NO: 16799 - RNA, 22 nt, Human
augcagcagccccuugaggugc

SEQ ID NO: 16800 - RNA, 22 nt, Human
augcagcagcuacuugggaagg

SEQ ID NO: 16801 - RNA, 19 nt, Human
augcagcuccugccuccuu

SEQ ID NO: 16802 - RNA, 22 nt, Human
augcagcugaggguaguggagc

SEQ ID NO: 16803 - RNA, 22 nt, Human
augcagcugcucuuccucuauu

SEQ ID NO: 16804 - RNA, 20 nt, Human
augcagcuggaguuggggug

SEQ ID NO: 16805 - RNA, 22 nt, Human
augcagcugugggcaagaaaug

SEQ ID NO: 16806 - RNA, 22 nt, Human
augcaggaagagcccuggagcu

SEQ ID NO: 16807 - RNA, 22 nt, Human
augcaggagcccucuugagggc

SEQ ID NO: 16808 - RNA, 22 nt, Human
augcaggaguuggaaaaaauga

SEQ ID NO: 16809 - RNA, 21 nt, Human
augcaggcugcucagaagcaa

SEQ ID NO: 16810 - RNA, 22 nt, Human
augcagggaccuuugcuuuggu

SEQ ID NO: 16811 - RNA, 22 nt, Human
augcagggagguaagaggugcc

SEQ ID NO: 16812 - RNA, 22 nt, Human
augcagggucuccgugugacga

SEQ ID NO: 16813 - RNA, 22 nt, Human
augcaguacagauaauucuaca

SEQ ID NO: 16814 - RNA, 22 nt, Human
augcaguacugauacaugccac

SEQ ID NO: 16815 - RNA, 22 nt, Human
augcaguauaaaucauuucugg

SEQ ID NO: 16816 - RNA, 22 nt, Human
augcaguuaugugagggcauga

SEQ ID NO: 16817 - RNA, 22 nt, Human
augcaguuuaucuccaaaucau

SEQ ID NO: 16818 - RNA, 22 nt, Human
augcauaaagaaagcuaucugg

SEQ ID NO: 16819 - RNA, 22 nt, Human
augcauacagauuuaaaauuuu

SEQ ID NO: 16820 - RNA, 20 nt, Human
augcauauauguggugucug

SEQ ID NO: 16821 - RNA, 22 nt, Human
augcauauguacccauguucug

SEQ ID NO: 16822 - RNA, 22 nt, Human
augcauaugugugcacacgugu

SEQ ID NO: 16823 - RNA, 22 nt, Human
augcauauucuuagccccuccu

SEQ ID NO: 16824 - RNA, 22 nt, Human
aggcuugggacugcuuaggagc

SEQ ID NO: 16825 - RNA, 18 nt, Human
aggcuugggcccagcagc

SEQ ID NO: 16826 - RNA, 22 nt, Human
aggcuuguggauuggagcgagu

SEQ ID NO: 16827 - RNA, 22 nt, Human
aggcuuguggggaaucugugug

SEQ ID NO: 16828 - RNA, 22 nt, Human
aggcuuguuuuacuaaaagcaa

SEQ ID NO: 16829 - RNA, 22 nt, Human
aggcuuuaaguggccuacagcu

SEQ ID NO: 16830 - RNA, 21 nt, Human
aggcuuuaccucuggguaggu

SEQ ID NO: 16831 - RNA, 22 nt, Human
aggcuuuccugucacucaugcu

SEQ ID NO: 16832 - RNA, 22 nt, Human
aggcuuucgaugaacgcuugcu

SEQ ID NO: 16833 - RNA, 22 nt, Human
aggcuuuguaccuggggucuua

SEQ ID NO: 16834 - RNA, 22 nt, Human
aggcuuuuagaaucuuauuucu

SEQ ID NO: 16835 - RNA, 22 nt, Human
aggcuuuugcucuggcuccucu

SEQ ID NO: 16836 - RNA, 22 nt, Human
agggaaaggcugaugcuguggg

SEQ ID NO: 16837 - RNA, 22 nt, Human
agggaaagguagugaggucaca

SEQ ID NO: 16838 - RNA, 21 nt, Human
agggaaauccagucacuuuuc

SEQ ID NO: 16839 - RNA, 22 nt, Human
agggaaauggagaguguaguuu

SEQ ID NO: 16840 - RNA, 22 nt, Human
agggaaauuaaugugagcaaug

SEQ ID NO: 16841 - RNA, 22 nt, Human
agggaacaaaacucuaaaauuc

SEQ ID NO: 16842 - RNA, 22 nt, Human
agggaacauuugcacuguuggu

SEQ ID NO: 16843 - RNA, 22 nt, Human
agggaacuccaugaggccagag

SEQ ID NO: 16844 - RNA, 23 nt, Human
agggaagaaacaugaagggcugu

SEQ ID NO: 16845 - RNA, 22 nt, Human
agggaagaugucucaucuuagg

SEQ ID NO: 16846 - RNA, 22 nt, Human
agggaagcaggaauagcucuga

SEQ ID NO: 16847 - RNA, 22 nt, Human
agggaagcuuguuacugagaag

SEQ ID NO: 16848 - RNA, 19 nt, Human
agggaaggauucugucauu

SEQ ID NO: 16849 - RNA, 22 nt, Human
agggaaggcuuuugacauuucc

SEQ ID NO: 16850 - RNA, 23 nt, Human
agggaagggggcuuauuccacag

SEQ ID NO: 16851 - RNA, 22 nt, Human
agggaagguagaggucaccggc

SEQ ID NO: 16852 - RNA, 22 nt, Human
agggaagugauggaguucgauc

SEQ ID NO: 16853 - RNA, 22 nt, Human
agggaaguggucugggaacuug

SEQ ID NO: 16854 - RNA, 22 nt, Human
agggacacacuccaguguuauu

SEQ ID NO: 16855 - RNA, 22 nt, Human
agggacaugaggaugaucuaga

SEQ ID NO: 16856 - RNA, 22 nt, Human
agggaccacauccccucugugg

SEQ ID NO: 16857 - RNA, 22 nt, Human
agggacccauagagagaccagu

SEQ ID NO: 16858 - RNA, 22 nt, Human
agggacccugaugacugaggag

SEQ ID NO: 16859 - RNA, 22 nt, Human
agggaccucauguaaguggauu

SEQ ID NO: 16860 - RNA, 22 nt, Human
agggacuccgugcacagugguu

SEQ ID NO: 16861 - RNA, 22 nt, Human
agggacuggcucucugagcagg

SEQ ID NO: 16862 - RNA, 22 nt, Human
agggagaagagaacaaagcccu

SEQ ID NO: 16863 - RNA, 22 nt, Human
agggagaaugaccaagguauau

SEQ ID NO: 16864 - RNA, 22 nt, Human
agggagaggagcguuucacauc

SEQ ID NO: 16865 - RNA, 22 nt, Human
agggagaggcugaacuauccua

SEQ ID NO: 16866 - RNA, 18 nt, Human
agggagcaucugguugcc

SEQ ID NO: 16867 - RNA, 22 nt, Human
agggagcaugggugaagcaggc

SEQ ID NO: 16868 - RNA, 22 nt, Human
agggagccaggggccagcuauu

SEQ ID NO: 16869 - RNA, 22 nt, Human
agggagcccugaaccagagggu

SEQ ID NO: 16870 - RNA, 22 nt, Human
agggagcuauuucaggguuauu

SEQ ID NO: 16871 - RNA, 22 nt, Human
agggagcucugggggcacacgg

SEQ ID NO: 16872 - RNA, 22 nt, Human
agggagcucuuuggucuugccg

SEQ ID NO: 16873 - RNA, 22 nt, Human
agggagcugacuggcugccauu

SEQ ID NO: 16874 - RNA, 22 nt, Human
agggagcugagcugugagcagc

SEQ ID NO: 16875 - RNA, 21 nt, Human
agggagcuggccacacagccu

SEQ ID NO: 16876 - RNA, 22 nt, Human
agggagcugggccacacugauc

SEQ ID NO: 16877 - RNA, 22 nt, Human
agggaggauaguagucaguuua

SEQ ID NO: 16878 - RNA, 22 nt, Human
agggagguaggagcuucuagcu

SEQ ID NO: 16879 - RNA, 22 nt, Human
agggagguccaucccugcagag

SEQ ID NO: 16880 - RNA, 22 nt, Human
agggagugguuaagaaggugca

SEQ ID NO: 16881 - RNA, 19 nt, Human
agggauauuuaaaaagcuc

SEQ ID NO: 16882 - RNA, 22 nt, Human
agggaucagcagaggguguggu

SEQ ID NO: 16883 - RNA, 22 nt, Human
agggaugcuuugcugacagauu

SEQ ID NO: 16884 - RNA, 22 nt, Human
agggauggaagcucgucugcaa

SEQ ID NO: 16885 - RNA, 22 nt, Human
agggaugggucuaacccagaac

SEQ ID NO: 16886 - RNA, 22 nt, Human
agggaugguggagguugcaagu

SEQ ID NO: 16887 - RNA, 22 nt, Human
agggcacaggcuccggguccag

SEQ ID NO: 16888 - RNA, 21 nt, Human
agggcacccccgcugccuacc

SEQ ID NO: 16889 - RNA, 22 nt, Human
agggcacuccuuggcagcucug

SEQ ID NO: 16890 - RNA, 23 nt, Human
agggcacugaagcuggaauuggg

SEQ ID NO: 16891 - RNA, 22 nt, Human
agggcacuugaggcugggccug

SEQ ID NO: 16892 - RNA, 22 nt, Human
agggcagaaaccaccuugaugg

SEQ ID NO: 16893 - RNA, 22 nt, Human
agggcagaccacgugcaaggau

SEQ ID NO: 16894 - RNA, 22 nt, Human
agggcagagcugucuaaauggc

SEQ ID NO: 16895 - RNA, 22 nt, Human
agggcagagggugccucaccug

SEQ ID NO: 16896 - RNA, 22 nt, Human
agggcagcacaaggcauggacu

SEQ ID NO: 16897 - RNA, 22 nt, Human
agggcagcacagcugugcuccu

SEQ ID NO: 16898 - RNA, 22 nt, Human
aggcuucauauuuaggcauaug

SEQ ID NO: 16899 - RNA, 22 nt, Human
aggcuucauguagaugguuccc

SEQ ID NO: 16900 - RNA, 22 nt, Human
aggcuucauguguccuggguga

SEQ ID NO: 16901 - RNA, 22 nt, Human
aggcuucccaagcagcugcaaa

SEQ ID NO: 16902 - RNA, 22 nt, Human
aggcuuccuggaggaagaggua

SEQ ID NO: 16903 - RNA, 22 nt, Human
aggcuucuacguggucccaggg

SEQ ID NO: 16904 - RNA, 22 nt, Human
aggcuucucugcaagauguuaa

SEQ ID NO: 16905 - RNA, 22 nt, Human
aggcuucugagcauggaguuuu

SEQ ID NO: 16906 - RNA, 22 nt, Human
aggcuucugauaccaugagaga

SEQ ID NO: 16907 - RNA, 22 nt, Human
aggcuucugcugauauuucauu

SEQ ID NO: 16908 - RNA, 22 nt, Human
aggcuucuucuuccuauuuagu

SEQ ID NO: 16909 - RNA, 22 nt, Human
aggcuugacaauuuuacaugua

SEQ ID NO: 16910 - RNA, 22 nt, Human
aggcuuggagguucuguagcca

SEQ ID NO: 16911 - RNA, 22 nt, Human
aggcuuggcucuccuaugagaa

SEQ ID NO: 16912 - RNA, 19 nt, Human
aggcuugguguugaauggg

SEQ ID NO: 16913 - RNA, 19 nt, Human
aggcuugguugcagcaagc

SEQ ID NO: 16914 - RNA, 22 nt, Human
aggcuugguuuauagaaguaau

SEQ ID NO: 16915 - RNA, 22 nt, Human
aggcuuuaauuaucuacaggag

SEQ ID NO: 16916 - RNA, 22 nt, Human
aggcuuuacugccucaggacuc

SEQ ID NO: 16917 - RNA, 22 nt, Human
agggaaacuagacugccuuucu

SEQ ID NO: 16918 - RNA, 22 nt, Human
agggaaaguaagcauuucauua

SEQ ID NO: 16919 - RNA, 23 nt, Human
agggaaaguaguaauggccuuug

SEQ ID NO: 16920 - RNA, 23 nt, Human
agggaaauacugcaauuuuugga

SEQ ID NO: 16921 - RNA, 22 nt, Human
agggaaaucuuucaacacuuca

SEQ ID NO: 16922 - RNA, 22 nt, Human
agggaagaagcugguaguaggu

SEQ ID NO: 16923 - RNA, 22 nt, Human
agggaagagcuugcaagaaacc

SEQ ID NO: 16924 - RNA, 22 nt, Human
agggaagggcagggucuaugca

SEQ ID NO: 16925 - RNA, 20 nt, Human
agggaagugcgccaucaggg

SEQ ID NO: 16926 - RNA, 22 nt, Human
agggaauggaugauggcagguu

SEQ ID NO: 16927 - RNA, 22 nt, Human
agggaaugugaaaacaccucuc

SEQ ID NO: 16928 - RNA, 22 nt, Human
agggacagucuacuguucacug

SEQ ID NO: 16929 - RNA, 22 nt, Human
agggaccaaucaccgacaggcu

SEQ ID NO: 16930 - RNA, 22 nt, Human
agggaccucuucuugcagcuga

SEQ ID NO: 16931 - RNA, 22 nt, Human
agggaccuugauggguuuggga

SEQ ID NO: 16932 - RNA, 22 nt, Human
agggacuauuuacccaucucac

SEQ ID NO: 16933 - RNA, 22 nt, Human
agggacucgguugagugccccu

SEQ ID NO: 16934 - RNA, 22 nt, Human
agggacuugaugucagggagau

SEQ ID NO: 16935 - RNA, 22 nt, Human
agggagaaaauuggaugcacaa

SEQ ID NO: 16936 - RNA, 22 nt, Human
agggagaacaguugcagcagac

SEQ ID NO: 16937 - RNA, 22 nt, Human
agggagaggagggucuuguuga

SEQ ID NO: 16938 - RNA, 22 nt, Human
agggagagguugaaaccucagu

SEQ ID NO: 16939 - RNA, 22 nt, Human
agggagaguagauaucaggugu

SEQ ID NO: 16940 - RNA, 22 nt, Human
agggagcagcagccacaggaug

SEQ ID NO: 16941 - RNA, 22 nt, Human
auggaaugggaagaguguguga

SEQ ID NO: 16942 - RNA, 22 nt, Human
auggaauguuuauacacaguug

SEQ ID NO: 16943 - RNA, 22 nt, Human
auggaauuaauaggggaauacu

SEQ ID NO: 16944 - RNA, 22 nt, Human
auggacagcuggccucaaggga

SEQ ID NO: 16945 - RNA, 22 nt, Human
auggacaggaacucccuuggca

SEQ ID NO: 16946 - RNA, 22 nt, Human
auggacagggcacaggcgcaga

SEQ ID NO: 16947 - RNA, 22 nt, Human
auggacagugugaagcagauag

SEQ ID NO: 16948 - RNA, 22 nt, Human
auggacucacuaauuccuccac

SEQ ID NO: 16949 - RNA, 22 nt, Human
auggagacugcgucugccaucc

SEQ ID NO: 16950 - RNA, 22 nt, Human
auggagagagaaggcuugcugu

SEQ ID NO: 16951 - RNA, 22 nt, Human
auggagauuuuuagaauuacag

SEQ ID NO: 16952 - RNA, 22 nt, Human
auggagcuaaauuguaaucaua

SEQ ID NO: 16953 - RNA, 20 nt, Human
auggaggaagggcaagagaa

SEQ ID NO: 16954 - RNA, 22 nt, Human
auggaggaugugcagcaugggc

SEQ ID NO: 16955 - RNA, 22 nt, Human
auggagggaaaaguggagagcc

SEQ ID NO: 16956 - RNA, 22 nt, Human
auggaggugccaggugugaggg

SEQ ID NO: 16957 - RNA, 20 nt, Human
auggagguggaugugacugc

SEQ ID NO: 16958 - RNA, 22 nt, Human
auggagugccuguggcaguggg

SEQ ID NO: 16959 - RNA, 22 nt, Human
auggagugucaccuuccugguu

SEQ ID NO: 16960 - RNA, 22 nt, Human
auggaguugagcucuguugucc

SEQ ID NO: 16961 - RNA, 22 nt, Human
auggaguuuggggucaaauacu

SEQ ID NO: 16962 - RNA, 22 nt, Human
auggauaagucaaagaguaucc

SEQ ID NO: 16963 - RNA, 22 nt, Human
auggauaaugucucuguuuccc

SEQ ID NO: 16964 - RNA, 22 nt, Human
auggauauuggccaaacucauu

SEQ ID NO: 16965 - RNA, 22 nt, Human
auggaucacagugccgugggug

SEQ ID NO: 16966 - RNA, 22 nt, Human
auggaucagaaucccgggaggg

SEQ ID NO: 16967 - RNA, 22 nt, Human
auggaucuucccucauuucuga

SEQ ID NO: 16968 - RNA, 22 nt, Human
auggaugaaggcgaggaugagg

SEQ ID NO: 16969 - RNA, 19 nt, Human
auggaugccucaugccuca

SEQ ID NO: 16970 - RNA, 22 nt, Human
auggauggaaaaguugaggaga

SEQ ID NO: 16971 - RNA, 22 nt, Human
auggauuggauuuuuauggacc

SEQ ID NO: 16972 - RNA, 22 nt, Human
auggauuugcuuauacacaugu

SEQ ID NO: 16973 - RNA, 22 nt, Human
auggauuuggaugagauuacuu

SEQ ID NO: 16974 - RNA, 22 nt, Human
auggcaaaaacugcaguuaccu

SEQ ID NO: 16975 - RNA, 22 nt, Human
auggcaauuguaaauggaaaga

SEQ ID NO: 16976 - RNA, 22 nt, Human
auggcagaaagaauagaggcua

SEQ ID NO: 16977 - RNA, 22 nt, Human
auggcagagggauugaacagcu

SEQ ID NO: 16978 - RNA, 22 nt, Human
auggcagcaguccauugccuca

SEQ ID NO: 16979 - RNA, 22 nt, Human
auggcagcaguuuggagucuuu

SEQ ID NO: 16980 - RNA, 22 nt, Human
auggcagcaugggauugguaga

SEQ ID NO: 16981 - RNA, 22 nt, Human
auggcagcggagcuggaaauga

SEQ ID NO: 16982 - RNA, 22 nt, Human
auggcagggaccaagcugucau

SEQ ID NO: 16983 - RNA, 22 nt, Human
auggcagggcccuuggcuccca

SEQ ID NO: 16984 - RNA, 22 nt, Human
auggcaguagaaugggggaaaa

SEQ ID NO: 16985 - RNA, 22 nt, Human
auggcaguauuucaguacagag

SEQ ID NO: 16986 - RNA, 22 nt, Human
auggcagugacuugaaggguag

SEQ ID NO: 16987 - RNA, 22 nt, Human
auggcaguuguaugggcuguau

SEQ ID NO: 16988 - RNA, 22 nt, Human
auggcaguuuuagaacuuuuca

SEQ ID NO: 16989 - RNA, 22 nt, Human
auggcauuauagcaaugguuug

SEQ ID NO: 16990 - RNA, 22 nt, Human
auggcauuccaagucuucuuuu

SEQ ID NO: 16991 - RNA, 20 nt, Human
auggccaaccugcuuaugac

SEQ ID NO: 16992 - RNA, 22 nt, Human
auggccaagaaguauuccugac

SEQ ID NO: 16993 - RNA, 22 nt, Human
auggccaagagucgauuugggg

SEQ ID NO: 16994 - RNA, 22 nt, Human
auggccaaggggccuaggcagg

SEQ ID NO: 16995 - RNA, 22 nt, Human
auggccacauuuaguaacuggu

SEQ ID NO: 16996 - RNA, 22 nt, Human
auggccaccaucucuaaaacac

SEQ ID NO: 16997 - RNA, 22 nt, Human
auggccaccauuuaaugaagcu

SEQ ID NO: 16998 - RNA, 22 nt, Human
auggccagaugaaauaauagag

SEQ ID NO: 16999 - RNA, 22 nt, Human
auggccagauuauaugguuuuu

SEQ ID NO: 17000 - RNA, 22 nt, Human
auggccagcuuauaggggcuca

SEQ ID NO: 17001 - RNA, 22 nt, Human
auggccaggguggcacuguggu

SEQ ID NO: 17002 - RNA, 22 nt, Human
auggccaguguuucccucaguu

SEQ ID NO: 17003 - RNA, 19 nt, Human
auggccaguuuagagguuu

SEQ ID NO: 17004 - RNA, 22 nt, Human
auggccauagccuuauagcagg

SEQ ID NO: 17005 - RNA, 22 nt, Human
auggcccaaacugcaauuacuu

SEQ ID NO: 17006 - RNA, 22 nt, Human
auggcccaagugcccugaccug

SEQ ID NO: 17007 - RNA, 23 nt, Human
agguggagcugugcagccggggc

SEQ ID NO: 17008 - RNA, 22 nt, Human
agguggagugugcagggagagc

SEQ ID NO: 17009 - RNA, 22 nt, Human
agguggaguuaagugugaacug

SEQ ID NO: 17010 - RNA, 22 nt, Human
agguggcaaggggcgccucucu

SEQ ID NO: 17011 - RNA, 22 nt, Human
agguggcagagugacaggcuga

SEQ ID NO: 17012 - RNA, 22 nt, Human
agguggcaggaggucagagaaa

SEQ ID NO: 17013 - RNA, 22 nt, Human
agguggcaugccugagacauaa

SEQ ID NO: 17014 - RNA, 18 nt, Human
agguggccugggagcuuu

SEQ ID NO: 17015 - RNA, 23 nt, Human
agguggccuuugccucuuucucu

SEQ ID NO: 17016 - RNA, 20 nt, Human
agguggcuccugcugggggu

SEQ ID NO: 17017 - RNA, 20 nt, Human
agguggcucuuccugggcuu

SEQ ID NO: 17018 - RNA, 21 nt, Human
agguggcugcauccucagaag

SEQ ID NO: 17019 - RNA, 22 nt, Human
aggugggcacagauggagaagu

SEQ ID NO: 17020 - RNA, 22 nt, Human
aggugggcauagcuagaauauu

SEQ ID NO: 17021 - RNA, 22 nt, Human
aggugggcgcugcucccgcugg

SEQ ID NO: 17022 - RNA, 22 nt, Human
agguggggcugggaaagauucc

SEQ ID NO: 17023 - RNA, 22 nt, Human
aggugggggcuguguccuugac

SEQ ID NO: 17024 - RNA, 22 nt, Human
agguggggugagcugcagacua

SEQ ID NO: 17025 - RNA, 22 nt, Human
agguggguaucaugagagauua

SEQ ID NO: 17026 - RNA, 22 nt, Human
agguggguucccgacucuggcu

SEQ ID NO: 17027 - RNA, 19 nt, Human
agguggucuaggcuggaga

SEQ ID NO: 17028 - RNA, 21 nt, Human
agguggucugcagcagcugaa

SEQ ID NO: 17029 - RNA, 22 nt, Human
agguggucuuggcccacccagg

SEQ ID NO: 17030 - RNA, 22 nt, Human
aggugguguuugguuacaugag

SEQ ID NO: 17031 - RNA, 22 nt, Human
aggugucauuucucugcaggug

SEQ ID NO: 17032 - RNA, 22 nt, Human
agguguccaauccugguuggau

SEQ ID NO: 17033 - RNA, 20 nt, Human
agguguccacguggcagggu

SEQ ID NO: 17034 - RNA, 22 nt, Human
agguguccaggaagaugcuggc

SEQ ID NO: 17035 - RNA, 22 nt, Human
aggugucuggacuugugaagca

SEQ ID NO: 17036 - RNA, 22 nt, Human
aggugucuggauggguguccuu

SEQ ID NO: 17037 - RNA, 22 nt, Human
aggugugaagaguugacacauu

SEQ ID NO: 17038 - RNA, 19 nt, Human
aggugugggggcugcagac

SEQ ID NO: 17039 - RNA, 22 nt, Human
agguuaaaaaggauucaguuaa

SEQ ID NO: 17040 - RNA, 23 nt, Human
agguuacaguuguuaaguugcaa

SEQ ID NO: 17041 - RNA, 22 nt, Human
agguuagaauguaagaguuuca

SEQ ID NO: 17042 - RNA, 22 nt, Human
agguuagauaguuuauuagaac

SEQ ID NO: 17043 - RNA, 22 nt, Human
agguuaggaauuuggacagaga

SEQ ID NO: 17044 - RNA, 22 nt, Human
agguuaucaucaguugagcacu

SEQ ID NO: 17045 - RNA, 21 nt, Human
agguuccagcagccagagaau

SEQ ID NO: 17046 - RNA, 22 nt, Human
agguuccagggauuaggaugug

SEQ ID NO: 17047 - RNA, 22 nt, Human
agguucccaggaucugucuggg

SEQ ID NO: 17048 - RNA, 22 nt, Human
agguuccuuauggggauggcua

SEQ ID NO: 17049 - RNA, 22 nt, Human
agguucuccuuaucaaugaaga

SEQ ID NO: 17050 - RNA, 18 nt, Human
agguucugacaguccaaa

SEQ ID NO: 17051 - RNA, 22 nt, Human
agguucuuuuggccaaccucau

SEQ ID NO: 17052 - RNA, 22 nt, Human
agguugaaauagguuaucuaag

SEQ ID NO: 17053 - RNA, 22 nt, Human
agguuggccucagggaggcucu

SEQ ID NO: 17054 - RNA, 22 nt, Human
agguuuacugagggugcugguu

SEQ ID NO: 17055 - RNA, 22 nt, Human
agguuuaugauucugcacgugg

SEQ ID NO: 17056 - RNA, 21 nt, Human
agguuuauuucaacuucagga

SEQ ID NO: 17057 - RNA, 22 nt, Human
agguuucaugggagacaacuca

SEQ ID NO: 17058 - RNA, 22 nt, Human
agguuucugcagcauaguggca

SEQ ID NO: 17059 - RNA, 22 nt, Human
agguuucuggauuuauuauggc

SEQ ID NO: 17060 - RNA, 22 nt, Human
agguuucuuuaugcugcuagaa

SEQ ID NO: 17061 - RNA, 22 nt, Human
agguuuggguucauugcuggcu

SEQ ID NO: 17062 - RNA, 22 nt, Human
agguuugguuugacaagacuga

SEQ ID NO: 17063 - RNA, 23 nt, Human
agguuugucucagaggcagaguu

SEQ ID NO: 17064 - RNA, 22 nt, Human
agguuugugucuugcuuaaggu

SEQ ID NO: 17065 - RNA, 22 nt, Human
aguaaaaaguucagaaugguug

SEQ ID NO: 17066 - RNA, 22 nt, Human
aguaaaaucaccaucucuuugu

SEQ ID NO: 17067 - RNA, 22 nt, Human
aguaaaauuaauggaucagaag

SEQ ID NO: 17068 - RNA, 22 nt, Human
aguaaaauuucugcugaggaga

SEQ ID NO: 17069 - RNA, 22 nt, Human
aguaaacaauguaugaggacag

SEQ ID NO: 17070 - RNA, 22 nt, Human
aguaaacagaaagcaagaugau

SEQ ID NO: 17071 - RNA, 22 nt, Human
agucucugccagcuuguccucu

SEQ ID NO: 17072 - RNA, 22 nt, Human
agucucuggacugggagauggc

SEQ ID NO: 17073 - RNA, 22 nt, Human
agucucuuaaagacaguguuga

SEQ ID NO: 17074 - RNA, 22 nt, Human
agucucuuaaugggcagaaagu

SEQ ID NO: 17075 - RNA, 22 nt, Human
agucucuugcacauuguauuaa

SEQ ID NO: 17076 - RNA, 22 nt, Human
agucucuuuaaucacagugucu

SEQ ID NO: 17077 - RNA, 22 nt, Human
agucucuuuguggacucugccu

SEQ ID NO: 17078 - RNA, 23 nt, Human
agucugaauugagaugugcugug

SEQ ID NO: 17079 - RNA, 22 nt, Human
agucugaguaucucugagccag

SEQ ID NO: 17080 - RNA, 22 nt, Human
agucugccaagccagaucaugu

SEQ ID NO: 17081 - RNA, 22 nt, Human
agucugccuuuccaaucccgug

SEQ ID NO: 17082 - RNA, 22 nt, Human
agucuggaaaaugcauguuuca

SEQ ID NO: 17083 - RNA, 22 nt, Human
agucuggauuuagaggugggcc

SEQ ID NO: 17084 - RNA, 22 nt, Human
agucuggcuuuuugaugagcuu

SEQ ID NO: 17085 - RNA, 22 nt, Human
agucugggagggaugccagugu

SEQ ID NO: 17086 - RNA, 21 nt, Human
agucuggggaagggaucccag

SEQ ID NO: 17087 - RNA, 22 nt, Human
agucugguaaacugaaaaauau

SEQ ID NO: 17088 - RNA, 22 nt, Human
agucugguguucucacacuagu

SEQ ID NO: 17089 - RNA, 22 nt, Human
agucugucuacuuaaagucugu

SEQ ID NO: 17090 - RNA, 22 nt, Human
agucugucugucacuucugcag

SEQ ID NO: 17091 - RNA, 22 nt, Human
agucugugaaaagauaggaagu

SEQ ID NO: 17092 - RNA, 23 nt, Human
agucugugcugaagaaguuacaa

SEQ ID NO: 17093 - RNA, 19 nt, Human
agucuguggauuugugggu

SEQ ID NO: 17094 - RNA, 21 nt, Human
agucuguuaggaugacucuga

SEQ ID NO: 17095 - RNA, 22 nt, Human
agucuuaauagagaaaaacugu

SEQ ID NO: 17096 - RNA, 22 nt, Human
agucuuacaugagaaagaaccu

SEQ ID NO: 17097 - RNA, 22 nt, Human
agucuuagaacuacagugccua

SEQ ID NO: 17098 - RNA, 22 nt, Human
agucuuaggcuccauuaguaga

SEQ ID NO: 17099 - RNA, 22 nt, Human
agucuucagagaaauuaacucu

SEQ ID NO: 17100 - RNA, 22 nt, Human
agucuucauuuaguugauccag

SEQ ID NO: 17101 - RNA, 22 nt, Human
agucuucauuuguguucaagac

SEQ ID NO: 17102 - RNA, 20 nt, Human
agucuucccccagaagaggg

SEQ ID NO: 17103 - RNA, 22 nt, Human
agucuucccugugccagagugu

SEQ ID NO: 17104 - RNA, 18 nt, Human
agucuucugauccauuuu

SEQ ID NO: 17105 - RNA, 22 nt, Human
agucuugcucuugcaucugcuu

SEQ ID NO: 17106 - RNA, 22 nt, Human
agucuuggcuaugcauagagcu

SEQ ID NO: 17107 - RNA, 22 nt, Human
agucuugucuuauuuuaauaga

SEQ ID NO: 17108 - RNA, 22 nt, Human
agucuuuaaguaaugauaggca

SEQ ID NO: 17109 - RNA, 22 nt, Human
agucuuuaaugaucauguauuu

SEQ ID NO: 17110 - RNA, 22 nt, Human
agucuuuaugauugucaaagua

SEQ ID NO: 17111 - RNA, 22 nt, Human
agucuuuauucacuauugauaa

SEQ ID NO: 17112 - RNA, 19 nt, Human
agucuuucccacucgucuu

SEQ ID NO: 17113 - RNA, 22 nt, Human
agucuuuccuuuuggaagaaaa

SEQ ID NO: 17114 - RNA, 22 nt, Human
agugaaaacacuaguucuugcc

SEQ ID NO: 17115 - RNA, 22 nt, Human
agugaaauaugcccauugcugu

SEQ ID NO: 17116 - RNA, 22 nt, Human
auuccaaacagugcugcagacu

SEQ ID NO: 17117 - RNA, 22 nt, Human
auuccaaacgccucgcggacuu

SEQ ID NO: 17118 - RNA, 22 nt, Human
auuccaaagacagaagcagcug

SEQ ID NO: 17119 - RNA, 22 nt, Human
auuccaaagguuaaugcccauu

SEQ ID NO: 17120 - RNA, 22 nt, Human
auuccaauuguacuugcuuuua

SEQ ID NO: 17121 - RNA, 22 nt, Human
auuccacagaggacuccgauug

SEQ ID NO: 17122 - RNA, 22 nt, Human
auuccacagcuacaucaaucua

SEQ ID NO: 17123 - RNA, 17 nt, Human
auuccacagggaaucug

SEQ ID NO: 17124 - RNA, 22 nt, Human
auuccacaugaaaggagcugaa

SEQ ID NO: 17125 - RNA, 22 nt, Human
auuccacuccaauaagugucaa

SEQ ID NO: 17126 - RNA, 22 nt, Human
auuccacugccgaaugauacau

SEQ ID NO: 17127 - RNA, 22 nt, Human
auuccacuguuauaaaaugucc

SEQ ID NO: 17128 - RNA, 22 nt, Human
auuccacuuagugacucauuug

SEQ ID NO: 17129 - RNA, 22 nt, Human
auuccagagaaaggccuggcug

SEQ ID NO: 17130 - RNA, 23 nt, Human
auuccagagcuagagucaagugg

SEQ ID NO: 17131 - RNA, 22 nt, Human
auuccagaugcuuguauuuaaa

SEQ ID NO: 17132 - RNA, 22 nt, Human
auuccagguuguagaaaaguuu

SEQ ID NO: 17133 - RNA, 22 nt, Human
auuccagugugcaugguacaca

SEQ ID NO: 17134 - RNA, 22 nt, Human
auuccaguucuccucucuaaag

SEQ ID NO: 17135 - RNA, 22 nt, Human
auuccauucuugcuuuugaucu

SEQ ID NO: 17136 - RNA, 22 nt, Human
auucccagguaaaaguagagcu

SEQ ID NO: 17137 - RNA, 22 nt, Human
auucccuuugacgaucccuagg

SEQ ID NO: 17138 - RNA, 22 nt, Human
auuccuaaggaaggcuggcaag

SEQ ID NO: 17139 - RNA, 20 nt, Human
auuccucagccccagccuca

SEQ ID NO: 17140 - RNA, 22 nt, Human
auuccuucuaaaacgcugcccu

SEQ ID NO: 17141 - RNA, 22 nt, Human
auuccuucuauucucugugggu

SEQ ID NO: 17142 - RNA, 22 nt, Human
auuccuuggaacagaugcgaag

SEQ ID NO: 17143 - RNA, 22 nt, Human
auuccuugggcugccuuauuau

SEQ ID NO: 17144 - RNA, 22 nt, Human
auucgcacauuaacacucauau

SEQ ID NO: 17145 - RNA, 22 nt, Human
auucggaucauguguauguguu

SEQ ID NO: 17146 - RNA, 22 nt, Human
auucuaaaucagagagcucugu

SEQ ID NO: 17147 - RNA, 22 nt, Human
auucuaaauguaauuuagaauu

SEQ ID NO: 17148 - RNA, 21 nt, Human
auucuaaccaggagaggcuga

SEQ ID NO: 17149 - RNA, 20 nt, Human
auucuacaagaauaagcaug

SEQ ID NO: 17150 - RNA, 22 nt, Human
auucuacacaaagcaagaagac

SEQ ID NO: 17151 - RNA, 22 nt, Human
auucuacaccucucucauuuag

SEQ ID NO: 17152 - RNA, 22 nt, Human
auucuacagaugaaagcggcug

SEQ ID NO: 17153 - RNA, 22 nt, Human
auucuacuuuguguaauuaucu

SEQ ID NO: 17154 - RNA, 18 nt, Human
auucuagaagaugccuug

SEQ ID NO: 17155 - RNA, 22 nt, Human
auucuaguguuuccauuacaag

SEQ ID NO: 17156 - RNA, 22 nt, Human
auucuauuaauauuucuaggaa

SEQ ID NO: 17157 - RNA, 22 nt, Human
auucucaaaacauaacuucacu

SEQ ID NO: 17158 - RNA, 22 nt, Human
auucucagaucuuagaggaaua

SEQ ID NO: 17159 - RNA, 22 nt, Human
auucucagggaguauuuucuau

SEQ ID NO: 17160 - RNA, 22 nt, Human
auucucauaggagcgugaaccu

SEQ ID NO: 17161 - RNA, 22 nt, Human
auucucauuugcuggcuauaug

SEQ ID NO: 17162 - RNA, 22 nt, Human
auucuccaguagucauucuauc

SEQ ID NO: 17163 - RNA, 22 nt, Human
auucuccuuauucugaaaaaag

SEQ ID NO: 17164 - RNA, 22 nt, Human
auucucucucuaugaaaacuga

SEQ ID NO: 17165 - RNA, 20 nt, Human
auucucugcucaaguggcac

SEQ ID NO: 17166 - RNA, 22 nt, Human
auucucuggucauugagcauau

SEQ ID NO: 17167 - RNA, 22 nt, Human
auucucuguacagaagguaccg

SEQ ID NO: 17168 - RNA, 22 nt, Human
auucucugucuuuuugaaaaca

SEQ ID NO: 17169 - RNA, 22 nt, Human
auucugaaguugcaggagaagc

SEQ ID NO: 17170 - RNA, 22 nt, Human
auucugacuuucaucugccuuu

SEQ ID NO: 17171 - RNA, 22 nt, Human
auucugagaaaugcauugucag

SEQ ID NO: 17172 - RNA, 22 nt, Human
auucugaggacagagucuagca

SEQ ID NO: 17173 - RNA, 22 nt, Human
auucugaguccaugggggcagg

SEQ ID NO: 17174 - RNA, 22 nt, Human
auucugaguggaaacuaucaau

SEQ ID NO: 17175 - RNA, 21 nt, Human
auucugaguugucagucuuca

SEQ ID NO: 17176 - RNA, 22 nt, Human
auucugaugccuggguacugcc

SEQ ID NO: 17177 - RNA, 22 nt, Human
auucugcaugguggugucucug

SEQ ID NO: 17178 - RNA, 22 nt, Human
auucugcucccaggugaugcug

SEQ ID NO: 17179 - RNA, 22 nt, Human
auucugcugcacaccuuccccc

SEQ ID NO: 17180 - RNA, 22 nt, Human
auucugcugguaacucuauaaa

SEQ ID NO: 17181 - RNA, 22 nt, Human
auucugcuuaagggaggcuguc

SEQ ID NO: 17182 - RNA, 20 nt, Human
auucugcuuugaaaauaagg

SEQ ID NO: 17183 - RNA, 22 nt, Human
auucuggauauuacuuaucuau

SEQ ID NO: 17184 - RNA, 22 nt, Human
auucuggccuuggcucugucac

SEQ ID NO: 17185 - RNA, 22 nt, Human
auucugggaacuuugucucuca

SEQ ID NO: 17186 - RNA, 22 nt, Human
auucugggacuccuuccucccc

SEQ ID NO: 17187 - RNA, 22 nt, Human
auucugggaguguaggaugguu

SEQ ID NO: 17188 - RNA, 22 nt, Human
aggucaagaauugaugugguuu

SEQ ID NO: 17189 - RNA, 22 nt, Human
aggucaagaguaaauuugggua

SEQ ID NO: 17190 - RNA, 22 nt, Human
aggucaaggccaaaagaguggu

SEQ ID NO: 17191 - RNA, 22 nt, Human
aggucacauggauaaugaucag

SEQ ID NO: 17192 - RNA, 22 nt, Human
aggucagacagggugucuuucu

SEQ ID NO: 17193 - RNA, 22 nt, Human
aggucagaugggagaugggaug

SEQ ID NO: 17194 - RNA, 21 nt, Human
aggucagcccagcucuggaag

SEQ ID NO: 17195 - RNA, 22 nt, Human
aggucagcugcugauaggcagc

SEQ ID NO: 17196 - RNA, 18 nt, Human
aggucaggaaagcagagu

SEQ ID NO: 17197 - RNA, 22 nt, Human
aggucaggagguuaagagucuu

SEQ ID NO: 17198 - RNA, 22 nt, Human
aggucaugauccauuggugagu

SEQ ID NO: 17199 - RNA, 22 nt, Human
aggucauuccuugucuucuugc

SEQ ID NO: 17200 - RNA, 22 nt, Human
aggucauuguuaagucaccaua

SEQ ID NO: 17201 - RNA, 22 nt, Human
aggucauuuccuuagaggcaga

SEQ ID NO: 17202 - RNA, 20 nt, Human
agguccacugaggcugccuc

SEQ ID NO: 17203 - RNA, 22 nt, Human
agguccagacuguguacccuag

SEQ ID NO: 17204 - RNA, 22 nt, Human
agguccagaguugagauacaga

SEQ ID NO: 17205 - RNA, 22 nt, Human
agguccagcuguugcagccucc

SEQ ID NO: 17206 - RNA, 22 nt, Human
agguccaggccucaugauggcc

SEQ ID NO: 17207 - RNA, 22 nt, Human
agguccaguugccagaauggcc

SEQ ID NO: 17208 - RNA, 22 nt, Human
agguccaucguggaugaacugc

SEQ ID NO: 17209 - RNA, 22 nt, Human
agguccauggcagcggguacuu

SEQ ID NO: 17210 - RNA, 22 nt, Human
agguccugaggguucgucugca

SEQ ID NO: 17211 - RNA, 22 nt, Human
agguccuggacugcucuuguua

SEQ ID NO: 17212 - RNA, 22 nt, Human
agguccugucuuaucucuguaa

SEQ ID NO: 17213 - RNA, 19 nt, Human
aggucuaaucauaagacaa

SEQ ID NO: 17214 - RNA, 22 nt, Human
aggucucaaguugagaaggcag

SEQ ID NO: 17215 - RNA, 22 nt, Human
aggucucuaaaauagucaaacu

SEQ ID NO: 17216 - RNA, 22 nt, Human
aggucucucacacucacagggc

SEQ ID NO: 17217 - RNA, 22 nt, Human
aggucucugcagaaaguaaguc

SEQ ID NO: 17218 - RNA, 22 nt, Human
aggucugaaagccucagucaca

SEQ ID NO: 17219 - RNA, 20 nt, Human
aggucugaaugucagggcug

SEQ ID NO: 17220 - RNA, 22 nt, Human
aggucugacuucaagccugugg

SEQ ID NO: 17221 - RNA, 18 nt, Human
aggucugaggaagagccu

SEQ ID NO: 17222 - RNA, 22 nt, Human
aggucugaguauggccugagaa

SEQ ID NO: 17223 - RNA, 22 nt, Human
aggucugagucccagggguacc

SEQ ID NO: 17224 - RNA, 22 nt, Human
aggucugagucuauauacauug

SEQ ID NO: 17225 - RNA, 22 nt, Human
gcagaggcauuucugacgcugc

SEQ ID NO: 17226 - RNA, 22 nt, Human
gcagagggcagggguguuuguu

SEQ ID NO: 17227 - RNA, 22 nt, Human
gcagaggucaaauaccucauuu

SEQ ID NO: 17228 - RNA, 22 nt, Human
gcagaggucucuucaaaauaau

SEQ ID NO: 17229 - RNA, 22 nt, Human
gcagagguuggauuggugacuu

SEQ ID NO: 17230 - RNA, 23 nt, Human
gcagagguuuuucaguaugguuu

SEQ ID NO: 17231 - RNA, 23 nt, Human
gcagagucaaguagucaugagug

SEQ ID NO: 17232 - RNA, 22 nt, Human
gcagagucagccuccgagacag

SEQ ID NO: 17233 - RNA, 22 nt, Human
gcagagucugggcagccuccau

SEQ ID NO: 17234 - RNA, 22 nt, Human
gcagagucugggcuaccucuug

SEQ ID NO: 17235 - RNA, 22 nt, Human
gcagagucugguaggugcuggu

SEQ ID NO: 17236 - RNA, 22 nt, Human
gcagagugaagcauuucuuucu

SEQ ID NO: 17237 - RNA, 22 nt, Human
gcagagugaagggagaggugug

SEQ ID NO: 17238 - RNA, 18 nt, Human
gcagagugcgucucugug

SEQ ID NO: 17239 - RNA, 19 nt, Human
gcagagugggguggagggu

SEQ ID NO: 17240 - RNA, 22 nt, Human
gcagauaggguauuaggaguaa

SEQ ID NO: 17241 - RNA, 22 nt, Human
gcagaucuuuaacagggucacu

SEQ ID NO: 17242 - RNA, 20 nt, Human
gcagaugagacucacagagg

SEQ ID NO: 17243 - RNA, 22 nt, Human
gcagaugaggaagcuaaugcug

SEQ ID NO: 17244 - RNA, 19 nt, Human
gcagaugaugaggcugguc

SEQ ID NO: 17245 - RNA, 22 nt, Human
gcagaugauguagacagacagu

SEQ ID NO: 17246 - RNA, 22 nt, Human
gcagaugccagaucaugcaggg

SEQ ID NO: 17247 - RNA, 22 nt, Human
gaugguuuggaaugaaguagcu

SEQ ID NO: 17248 - RNA, 22 nt, Human
gauguaaaaccuauggagcuga

SEQ ID NO: 17249 - RNA, 22 nt, Human
gauguacuuuaaaauacuucag

SEQ ID NO: 17250 - RNA, 22 nt, Human
gauguagagggaagauuuuaaa

SEQ ID NO: 17251 - RNA, 22 nt, Human
gauguauaguauguaauuucug

SEQ ID NO: 17252 - RNA, 23 nt, Human
gauguauauaugagccgucacau

SEQ ID NO: 17253 - RNA, 22 nt, Human
gauguauauucugugccaggau

SEQ ID NO: 17254 - RNA, 22 nt, Human
gauguaucugagcugcuuaggu

SEQ ID NO: 17255 - RNA, 22 nt, Human
gaugucucucacauagaaggua

SEQ ID NO: 17256 - RNA, 22 nt, Human
gaugucugccaaagaaucaagc

SEQ ID NO: 17257 - RNA, 22 nt, Human
gaugucugugagaucaaacuaa

SEQ ID NO: 17258 - RNA, 22 nt, Human
gaugucuucagauggcaagaga

SEQ ID NO: 17259 - RNA, 22 nt, Human
gaugucuucccauguucaugug

SEQ ID NO: 17260 - RNA, 22 nt, Human
gaugucuuguugauuucauucu

SEQ ID NO: 17261 - RNA, 22 nt, Human
gaugucuuugaggcucacugcu

SEQ ID NO: 17262 - RNA, 22 nt, Human
gaugucuuugccaugcaugugu

SEQ ID NO: 17263 - RNA, 22 nt, Human
gaugugaggacucauguggagg

SEQ ID NO: 17264 - RNA, 22 nt, Human
gaugugggugucuucagcuggu

SEQ ID NO: 17265 - RNA, 22 nt, Human
gauguguagagggaauuucaaa

SEQ ID NO: 17266 - RNA, 23 nt, Human
gauguguagggaaagucagacuc

SEQ ID NO: 17267 - RNA, 22 nt, Human
gaugugucuauucaacaugaaa

SEQ ID NO: 17268 - RNA, 22 nt, Human
gaugugucuggcuccccugcaa

SEQ ID NO: 17269 - RNA, 22 nt, Human
gaugugugcugcauaguauauu

SEQ ID NO: 17270 - RNA, 22 nt, Human
gauguguuuccaggauuuguuu

SEQ ID NO: 17271 - RNA, 22 nt, Human
gauguucgagcagaagaccagg

SEQ ID NO: 17272 - RNA, 22 nt, Human
gauguuuauaucuaacuuaagu

SEQ ID NO: 17273 - RNA, 22 nt, Human
gauguuucaugcuagcaugugu

SEQ ID NO: 17274 - RNA, 22 nt, Human
gauuaacauuucuaagaugcca

SEQ ID NO: 17275 - RNA, 22 nt, Human
gauuaauucaggaucaggaaau

SEQ ID NO: 17276 - RNA, 22 nt, Human
gauuacaaaacucaucuaugac

SEQ ID NO: 17277 - RNA, 20 nt, Human
gauuacaaaaugaaaugcau

SEQ ID NO: 17278 - RNA, 22 nt, Human
gauuacugucuacuugggauag

SEQ ID NO: 17279 - RNA, 22 nt, Human
gauuagaagaacuuguuagccu

SEQ ID NO: 17280 - RNA, 22 nt, Human
gauuagaugacuaaugagcugu

SEQ ID NO: 17281 - RNA, 22 nt, Human
gauuaggagggagaggcaagua

SEQ ID NO: 17282 - RNA, 22 nt, Human
gauuaugguaacaaugauuaaa

SEQ ID NO: 17283 - RNA, 22 nt, Human
gauuauuuugugcaauaaucgg

SEQ ID NO: 17284 - RNA, 22 nt, Human
gauucaaagacagacucauuuc

SEQ ID NO: 17285 - RNA, 22 nt, Human
gauucacucauauuuuacguuu

SEQ ID NO: 17286 - RNA, 22 nt, Human
gauuccacggcucagccucaac

SEQ ID NO: 17287 - RNA, 22 nt, Human
gauuccuuuggugaacugccga

SEQ ID NO: 17288 - RNA, 22 nt, Human
gauucucuucauauggcaaagg

SEQ ID NO: 17289 - RNA, 22 nt, Human
gauucugagcugguguuuuacg

SEQ ID NO: 17290 - RNA, 22 nt, Human
gauucugcugucccuaagugcc

SEQ ID NO: 17291 - RNA, 22 nt, Human
gauucugcuuaccauuugaucu

SEQ ID NO: 17292 - RNA, 20 nt, Human
gauucugggcagucaguguc

SEQ ID NO: 17293 - RNA, 22 nt, Human
gauucuuaagacauuauguauu

SEQ ID NO: 17294 - RNA, 22 nt, Human
gauucuuuacaucucugcugac

SEQ ID NO: 17295 - RNA, 22 nt, Human
gauucuuuacucagauuuuguu

SEQ ID NO: 17296 - RNA, 21 nt, Human
gauugaaaccauggcagugag

SEQ ID NO: 17297 - RNA, 22 nt, Human
gauugagucugaggaugcugca

SEQ ID NO: 17298 - RNA, 22 nt, Human
gauugcaaaucauuacaaagga

SEQ ID NO: 17299 - RNA, 22 nt, Human
gauugcugaagaaagugaguga

SEQ ID NO: 17300 - RNA, 22 nt, Human
gauugcuggggcaggcuguagc

SEQ ID NO: 17301 - RNA, 22 nt, Human
gauugcugggucccacucccag

SEQ ID NO: 17302 - RNA, 23 nt, Human
gauugcuguaugcaggagcauuc

SEQ ID NO: 17303 - RNA, 22 nt, Human
gauuguaauucuacuuuccgcu

SEQ ID NO: 17304 - RNA, 22 nt, Human
gauuguacuuauugagcuaaac

SEQ ID NO: 17305 - RNA, 22 nt, Human
gauugucacucccuauauggua

SEQ ID NO: 17306 - RNA, 19 nt, Human
gauuuaaacguggcucuau

SEQ ID NO: 17307 - RNA, 22 nt, Human
gauuuacaaagcucucuagugu

SEQ ID NO: 17308 - RNA, 22 nt, Human
gauuuacagaucuaagggucac

SEQ ID NO: 17309 - RNA, 22 nt, Human
gauuuacagcuauacccaaugg

SEQ ID NO: 17310 - RNA, 22 nt, Human
gauuuagugcugaaaucccugg

SEQ ID NO: 17311 - RNA, 22 nt, Human
gauuuauaaagguugcacugga

SEQ ID NO: 17312 - RNA, 20 nt, Human
gauuucaaagcagaguggcc

SEQ ID NO: 17313 - RNA, 22 nt, Human
gauuucagccccgcucccagcu

SEQ ID NO: 17314 - RNA, 22 nt, Human
gauuucaggcuaucuaugcaga

SEQ ID NO: 17315 - RNA, 22 nt, Human
gauuucccuauaguuuucucuu

SEQ ID NO: 17316 - RNA, 22 nt, Human
gauuuccuugcauauugguaau

SEQ ID NO: 17317 - RNA, 22 nt, Human
gauuucuaaguuuuaccacaaa

SEQ ID NO: 17318 - RNA, 22 nt, Human
gauuucuucauucauuagaugg

SEQ ID NO: 17319 - RNA, 22 nt, Human
gauuucuugaccccugucucag

SEQ ID NO: 17320 - RNA, 22 nt, Human
gauuucuugagcaaguugcuua

SEQ ID NO: 17321 - RNA, 22 nt, Human
gauuucuugauaaguaguguga

SEQ ID NO: 17322 - RNA, 22 nt, Human
gauuucuuuagcucaucagauc

SEQ ID NO: 17323 - RNA, 22 nt, Human
gauuugacaccuggggcauaua

SEQ ID NO: 17324 - RNA, 22 nt, Human
gauuugcauucugaaagcuacc

SEQ ID NO: 17325 - RNA, 21 nt, Human
gauuuguauuauugguuccaa

SEQ ID NO: 17326 - RNA, 22 nt, Human
gauuuguuucaaguuagcaucu

SEQ ID NO: 17327 - RNA, 22 nt, Human
gauuuuacugucuguguaucuc

SEQ ID NO: 17328 - RNA, 22 nt, Human
gauuuuauagucaggaaaaaga

SEQ ID NO: 17329 - RNA, 22 nt, Human
gauuuuauuagcccaaacuuug

SEQ ID NO: 17330 - RNA, 22 nt, Human
gcaaaaaaugcuuguugcuuag

SEQ ID NO: 17331 - RNA, 22 nt, Human
gcaaaaaccacaauuacuuuug

SEQ ID NO: 17332 - RNA, 22 nt, Human
gcaaacaucuuagccauagagu

SEQ ID NO: 17333 - RNA, 22 nt, Human
gcaaacaucuuuauuuggcaag

SEQ ID NO: 17334 - RNA, 22 nt, Human
gcacauggcggccagcagguga

SEQ ID NO: 17335 - RNA, 22 nt, Human
gcacaugugagaguagaggccu

SEQ ID NO: 17336 - RNA, 22 nt, Human
gcacauguugcuaguuacuugc

SEQ ID NO: 17337 - RNA, 22 nt, Human
gcaccacuagaguagagauggu

SEQ ID NO: 17338 - RNA, 22 nt, Human
gcaccagagggggcucugcagg

SEQ ID NO: 17339 - RNA, 22 nt, Human
gcaccagcugccuucugugccc

SEQ ID NO: 17340 - RNA, 22 nt, Human
gcaccauugcugggcuaguucc

SEQ ID NO: 17341 - RNA, 22 nt, Human
gcacccagccagcaucucagag

SEQ ID NO: 17342 - RNA, 22 nt, Human
gcacccagcccagggcgugaug

SEQ ID NO: 17343 - RNA, 20 nt, Human
gcacccagcuucuuguucua

SEQ ID NO: 17344 - RNA, 22 nt, Human
gcacccagugggaugcuuagca

SEQ ID NO: 17345 - RNA, 23 nt, Human
gcaccccagaugugauuaguuag

SEQ ID NO: 17346 - RNA, 22 nt, Human
gcaccccugcgugccuucccuu

SEQ ID NO: 17347 - RNA, 19 nt, Human
gcacccuggccacucccac

SEQ ID NO: 17348 - RNA, 22 nt, Human
gcacccugucaaaauggaccaa

SEQ ID NO: 17349 - RNA, 22 nt, Human
gcacccuguuuauccugaguuc

SEQ ID NO: 17350 - RNA, 22 nt, Human
gcaccucauuuugcagguagaa

SEQ ID NO: 17351 - RNA, 22 nt, Human
gcaccugcucacacaugugacu

SEQ ID NO: 17352 - RNA, 22 nt, Human
gcaccugcuggaaucagucugu

SEQ ID NO: 17353 - RNA, 22 nt, Human
gcaccugggacccagaggcacc

SEQ ID NO: 17354 - RNA, 22 nt, Human
gcaccugggcaaggauucagag

SEQ ID NO: 17355 - RNA, 22 nt, Human
gcaccuuuggaaugaaaaguug

SEQ ID NO: 17356 - RNA, 22 nt, Human
gcaccuuuuucuaggagaaugu

SEQ ID NO: 17357 - RNA, 19 nt, Human
gcacgcuggcuugauaggg

SEQ ID NO: 17358 - RNA, 22 nt, Human
gcacggcuaauuuuuguauuuu

SEQ ID NO: 17359 - RNA, 22 nt, Human
gcacuagauucugaagcagcag

SEQ ID NO: 17360 - RNA, 22 nt, Human
gcacuagguaaguggguggcaa

SEQ ID NO: 17361 - RNA, 22 nt, Human
gcacuagucuaggugcuaagau

SEQ ID NO: 17362 - RNA, 21 nt, Human
gcacucagucacuacucaaga

SEQ ID NO: 17363 - RNA, 23 nt, Human
gcacucaucugaagcuauggugc

SEQ ID NO: 17364 - RNA, 22 nt, Human
gcagauggagacgagguuccgc

SEQ ID NO: 17365 - RNA, 22 nt, Human
gcagauggaucaccugaggucg

SEQ ID NO: 17366 - RNA, 22 nt, Human
gcagauggauguggacggcgcc

SEQ ID NO: 17367 - RNA, 22 nt, Human
gcagaugggagccccaggggag

SEQ ID NO: 17368 - RNA, 22 nt, Human
gcagauguaauggcuggagguc

SEQ ID NO: 17369 - RNA, 22 nt, Human
gcagauuacuggacugauucca

SEQ ID NO: 17370 - RNA, 19 nt, Human
gcagcaaacaaaacaggua

SEQ ID NO: 17371 - RNA, 22 nt, Human
gcagcaagaggugccaucuuga

SEQ ID NO: 17372 - RNA, 22 nt, Human
gcagcaagucuaguuuguaggc

SEQ ID NO: 17373 - RNA, 19 nt, Human
gcagcaauagaagacaaau

SEQ ID NO: 17374 - RNA, 22 nt, Human
gcagcaaucccaagucugagug

SEQ ID NO: 17375 - RNA, 22 nt, Human
gcagcacuaaugggccccagaa

SEQ ID NO: 17376 - RNA, 22 nt, Human
gcagcacugauccuaaacuuag

SEQ ID NO: 17377 - RNA, 22 nt, Human
gcagcagagaccccaggaagga

SEQ ID NO: 17378 - RNA, 17 nt, Human
gcagcagagagacccuc

SEQ ID NO: 17379 - RNA, 22 nt, Human
gcagcagauuguuuuuucaccu

SEQ ID NO: 17380 - RNA, 22 nt, Human
gcagcagcaggcgcucggccgu

SEQ ID NO: 17381 - RNA, 19 nt, Human
gcagcagcauuugguaaua

SEQ ID NO: 17382 - RNA, 22 nt, Human
gcagcagcucccuauccaggcu

SEQ ID NO: 17383 - RNA, 22 nt, Human
gcagcaggcauggccgcccugg

SEQ ID NO: 17384 - RNA, 22 nt, Human
gcagcaggucugucaaugucau

SEQ ID NO: 17385 - RNA, 22 nt, Human
gcagcaguacucaauauccugg

SEQ ID NO: 17386 - RNA, 22 nt, Human
gcagcagugcgggcagcuacag

SEQ ID NO: 17387 - RNA, 22 nt, Human
gcagcaguggcugcagguccca

SEQ ID NO: 17388 - RNA, 22 nt, Human
gcagcauacagggagaguacuc

SEQ ID NO: 17389 - RNA, 22 nt, Human
gcagcauccugggccacagucc

SEQ ID NO: 17390 - RNA, 22 nt, Human
gcagcauggaguuguggaauga

SEQ ID NO: 17391 - RNA, 21 nt, Human
gcagccacagccaccaagcua

SEQ ID NO: 17392 - RNA, 22 nt, Human
gcagccaccucccauggcgggg

SEQ ID NO: 17393 - RNA, 22 nt, Human
gcagccacugggagugcuuaua

SEQ ID NO: 17394 - RNA, 22 nt, Human
gcagccagagggggugugauca

SEQ ID NO: 17395 - RNA, 22 nt, Human
gcagccagcccuagucccacuu

SEQ ID NO: 17396 - RNA, 22 nt, Human
gcagccaggaagcccaggacac

SEQ ID NO: 17397 - RNA, 22 nt, Human
gcagccagguuugaggaccacu

SEQ ID NO: 17398 - RNA, 22 nt, Human
gcagccagugggaugagaaaga

SEQ ID NO: 17399 - RNA, 22 nt, Human
gcagcccaaaaaagagguagau

SEQ ID NO: 17400 - RNA, 22 nt, Human
gcagcccaggaggcgggagccc

SEQ ID NO: 17401 - RNA, 22 nt, Human
gcagcccagguguagcucuuug

SEQ ID NO: 17402 - RNA, 22 nt, Human
gcagcccauaacauuugaggcc

SEQ ID NO: 17403 - RNA, 22 nt, Human
gcagcccucgcuagcucucccc

SEQ ID NO: 17404 - RNA, 22 nt, Human
gcagcccucggguacucacgug

SEQ ID NO: 17405 - RNA, 22 nt, Human
gcagcccuucaggugaggggca

SEQ ID NO: 17406 - RNA, 22 nt, Human
gcagccucagggcacucagaug

SEQ ID NO: 17407 - RNA, 22 nt, Human
gcagccucugcaguucaggagg

SEQ ID NO: 17408 - RNA, 22 nt, Human
gcagcgacaggcacuggucagg

SEQ ID NO: 17409 - RNA, 22 nt, Human
gcagcgaggugaugaaauagcu

SEQ ID NO: 17410 - RNA, 21 nt, Human
gcagcgcccucugaccuugau

SEQ ID NO: 17411 - RNA, 22 nt, Human
gcagcucacagucuccgccauc

SEQ ID NO: 17412 - RNA, 22 nt, Human
gcagcucagggagagggcacca

SEQ ID NO: 17413 - RNA, 22 nt, Human
gcagcucccuugaacuucuccu

SEQ ID NO: 17414 - RNA, 22 nt, Human
gcagcuccuucaaucucaccau

SEQ ID NO: 17415 - RNA, 22 nt, Human
gcagcucuccucugugaggaac

SEQ ID NO: 17416 - RNA, 22 nt, Human
gcagcucugacaaugccuggaa

SEQ ID NO: 17417 - RNA, 22 nt, Human
gcagcucuggggcaggccugag

SEQ ID NO: 17418 - RNA, 22 nt, Human
gcagcucuucacuuacuccuuu

SEQ ID NO: 17419 - RNA, 22 nt, Human
gcagcugaaagggaucucuaca

SEQ ID NO: 17420 - RNA, 22 nt, Human
gcagcugagagaagaacagggc

SEQ ID NO: 17421 - RNA, 22 nt, Human
gcagcugcaagcacuucuggca

SEQ ID NO: 17422 - RNA, 22 nt, Human
gcagcugcaauaggcaucaagc

SEQ ID NO: 17423 - RNA, 18 nt, Human
gcagcugcaguuguagcu

SEQ ID NO: 17424 - RNA, 22 nt, Human
gcagcugccccgacugugaguc

SEQ ID NO: 17425 - RNA, 22 nt, Human
gcagcugccgugagcucacgcc

SEQ ID NO: 17426 - RNA, 22 nt, Human
gcagcugccuucagcuggaugg

SEQ ID NO: 17427 - RNA, 22 nt, Human
gcagcugcucacauucucacaa

SEQ ID NO: 17428 - RNA, 22 nt, Human
gcagcugcuggaaguuccugcc

SEQ ID NO: 17429 - RNA, 22 nt, Human
gcagcugcuggagggaggcagg

SEQ ID NO: 17430 - RNA, 22 nt, Human
gcagcuggauuucaagagggag

SEQ ID NO: 17431 - RNA, 22 nt, Human
gcagcuggccccuuuccuuguu

SEQ ID NO: 17432 - RNA, 22 nt, Human
gcagcuggcucugggaaaaacu

SEQ ID NO: 17433 - RNA, 22 nt, Human
gcagcugggacacugaggccag

SEQ ID NO: 17434 - RNA, 22 nt, Human
gcagcuggggccacacuuaggc

SEQ ID NO: 17435 - RNA, 22 nt, Human
gcagcugggucugugugggcug

SEQ ID NO: 17436 - RNA, 22 nt, Human
gcagcugguuaaugggagaauu

SEQ ID NO: 17437 - RNA, 22 nt, Human
gcagcuguaaagcagaaauagu

SEQ ID NO: 17438 - RNA, 20 nt, Human
gcagcugugcauucuuagga

SEQ ID NO: 17439 - RNA, 19 nt, Human
gcagcugugggaagagcca

SEQ ID NO: 17440 - RNA, 22 nt, Human
gcagcuguggguuccaagucua

SEQ ID NO: 17441 - RNA, 22 nt, Human
gcagcuguggugcugagauagg

SEQ ID NO: 17442 - RNA, 22 nt, Human
gcagcuguguaaugagcccaca

SEQ ID NO: 17443 - RNA, 22 nt, Human
gcccaggagguugggcugugca

SEQ ID NO: 17444 - RNA, 22 nt, Human
gcccaggauaaugcugucccug

SEQ ID NO: 17445 - RNA, 22 nt, Human
gcccaggaucugcucagaucau

SEQ ID NO: 17446 - RNA, 22 nt, Human
gcccaggauggcuggaggugcu

SEQ ID NO: 17447 - RNA, 22 nt, Human
gcccaggaugguguguaguggu

SEQ ID NO: 17448 - RNA, 22 nt, Human
gcccaggcuggagugcaguagc

SEQ ID NO: 17449 - RNA, 22 nt, Human
gcccagggcuucaaagagagaa

SEQ ID NO: 17450 - RNA, 22 nt, Human
gcccaggggaguagucaauuua

SEQ ID NO: 17451 - RNA, 22 nt, Human
gcccagggugaagugcaguugu

SEQ ID NO: 17452 - RNA, 22 nt, Human
gcccagguuggagagcaguggc

SEQ ID NO: 17453 - RNA, 22 nt, Human
gcccagguuucaucugcuccgu

SEQ ID NO: 17454 - RNA, 22 nt, Human
gcccaguaguucaagguugcag

SEQ ID NO: 17455 - RNA, 21 nt, Human
gcccagugauuucuucacagu

SEQ ID NO: 17456 - RNA, 22 nt, Human
gcccagugguaaaagcaggccu

SEQ ID NO: 17457 - RNA, 22 nt, Human
gcccaguuucagcucugccuuu

SEQ ID NO: 17458 - RNA, 22 nt, Human
gcccaugccccuccuucuggca

SEQ ID NO: 17459 - RNA, 22 nt, Human
gcccauggaaaaccuguccucu

SEQ ID NO: 17460 - RNA, 22 nt, Human
gcccauggcuucccuaggcaca

SEQ ID NO: 17461 - RNA, 22 nt, Human
gcccaugggccugaggcccuag

SEQ ID NO: 17462 - RNA, 22 nt, Human
gcccaugggcuccagaccuggg

SEQ ID NO: 17463 - RNA, 22 nt, Human
gcccauggucagggaggcaggg

SEQ ID NO: 17464 - RNA, 22 nt, Human
gcccaugguggcguucggugca

SEQ ID NO: 17465 - RNA, 22 nt, Human
gcccaugucugacagggugggg

SEQ ID NO: 17466 - RNA, 21 nt, Human
gcccaugugggagggguagaa

SEQ ID NO: 17467 - RNA, 22 nt, Human
gccccacagccugcggucucag

SEQ ID NO: 17468 - RNA, 22 nt, Human
gccccacuguggaaccuaaguc

SEQ ID NO: 17469 - RNA, 22 nt, Human
gccccagaaggggaaagccugg

SEQ ID NO: 17470 - RNA, 22 nt, Human
gccccagcagcaaugcgguuga

SEQ ID NO: 17471 - RNA, 22 nt, Human
gccccaggugguaaaccuaaga

SEQ ID NO: 17472 - RNA, 22 nt, Human
gccccagguugccugucccagg

SEQ ID NO: 17473 - RNA, 22 nt, Human
gcccccaggcucuggagaaccu

SEQ ID NO: 17474 - RNA, 22 nt, Human
gcccccucuuuggagccagcca

SEQ ID NO: 17475 - RNA, 22 nt, Human
gcccccuugaccuaaucaccuu

SEQ ID NO: 17476 - RNA, 22 nt, Human
gccccuccauccaucaccgggg

SEQ ID NO: 17477 - RNA, 22 nt, Human
gccccucccagucaggagcacu

SEQ ID NO: 17478 - RNA, 22 nt, Human
gccccucuccuugugcaccugc

SEQ ID NO: 17479 - RNA, 22 nt, Human
gccccuuccaucaugugaggac

SEQ ID NO: 17480 - RNA, 22 nt, Human
gccccuucucugaggaaccugc

SEQ ID NO: 17481 - RNA, 22 nt, Human
gccccuucuucuggagauucaa

SEQ ID NO: 17482 - RNA, 22 nt, Human
gccccuugucuccaggccccaa

SEQ ID NO: 17483 - RNA, 18 nt, Human
gcccguguggagaccaug

SEQ ID NO: 17484 - RNA, 22 nt, Human
gcccuaggcuuuugugacugcc

SEQ ID NO: 17485 - RNA, 22 nt, Human
gcccucagaaugggcucuaauc

SEQ ID NO: 17486 - RNA, 22 nt, Human
gcccucagugaccacugauuca

SEQ ID NO: 17487 - RNA, 22 nt, Human
gcccucaguggauucuuauugu

SEQ ID NO: 17488 - RNA, 19 nt, Human
gcccucaugauauucagau

SEQ ID NO: 17489 - RNA, 22 nt, Human
gcccuccaccagagcccuucuc

SEQ ID NO: 17490 - RNA, 22 nt, Human
gcccuccaccuggucucucugg

SEQ ID NO: 17491 - RNA, 22 nt, Human
gcccucucuucugcagccucca

SEQ ID NO: 17492 - RNA, 22 nt, Human
gcccucugcacagcucugagca

SEQ ID NO: 17493 - RNA, 22 nt, Human
gcccucugcuggccucaccucg

SEQ ID NO: 17494 - RNA, 22 nt, Human
gcccucuggggcacacagagga

SEQ ID NO: 17495 - RNA, 22 nt, Human
gcccucugguggccgccucggc

SEQ ID NO: 17496 - RNA, 22 nt, Human
gcccucuguguaacaauccaga

SEQ ID NO: 17497 - RNA, 22 nt, Human
gcccucuguuauugcauccuua

SEQ ID NO: 17498 - RNA, 22 nt, Human
gcccugaauaauagagugggga

SEQ ID NO: 17499 - RNA, 22 nt, Human
gcccugagaggcaaugacucuu

SEQ ID NO: 17500 - RNA, 22 nt, Human
gcccugagauucuuggauucug

SEQ ID NO: 17501 - RNA, 22 nt, Human
gcccugagcacugcugcugggg

SEQ ID NO: 17502 - RNA, 19 nt, Human
gcccugaguaagcuaggag

SEQ ID NO: 17503 - RNA, 22 nt, Human
gcccugccugucugcugggagg

SEQ ID NO: 17504 - RNA, 22 nt, Human
gcccugcucauuucacguguuu

SEQ ID NO: 17505 - RNA, 22 nt, Human
gcccugcuccaggagaauaccc

SEQ ID NO: 17506 - RNA, 22 nt, Human
gcccugcucuuuugcccaccca

SEQ ID NO: 17507 - RNA, 22 nt, Human
gcccugcugcuggcagaggcgc

SEQ ID NO: 17508 - RNA, 22 nt, Human
gcccugcuuggucauggccuuc

SEQ ID NO: 17509 - RNA, 22 nt, Human
gcccuggacagugacggugacc

SEQ ID NO: 17510 - RNA, 22 nt, Human
gcccuggagggccagcgacugg

SEQ ID NO: 17511 - RNA, 22 nt, Human
gcccuggauggcaggagccauc

SEQ ID NO: 17512 - RNA, 22 nt, Human
gcccuggccuggcgcguuguca

SEQ ID NO: 17513 - RNA, 22 nt, Human
gcccuggccuucaucucagaca

SEQ ID NO: 17514 - RNA, 22 nt, Human
gcccugggauuggguggaggcu

SEQ ID NO: 17515 - RNA, 22 nt, Human
gcccugggcucccugcuccaca

SEQ ID NO: 17516 - RNA, 18 nt, Human
gcccugguggagcuggug

SEQ ID NO: 17517 - RNA, 22 nt, Human
gcccuggugugcccagcauggg

SEQ ID NO: 17518 - RNA, 22 nt, Human
guggcccuuuguuuugauaccu

SEQ ID NO: 17519 - RNA, 22 nt, Human
guggccguguaacuugaguaca

SEQ ID NO: 17520 - RNA, 22 nt, Human
guggccucaugucuauaaagag

SEQ ID NO: 17521 - RNA, 22 nt, Human
guggccuccuccguccgccucu

SEQ ID NO: 17522 - RNA, 19 nt, Human
guggccucggagcgcgcgg

SEQ ID NO: 17523 - RNA, 22 nt, Human
guggccucugugcuccugccua

SEQ ID NO: 17524 - RNA, 22 nt, Human
guggccugccgugugguauggg

SEQ ID NO: 17525 - RNA, 22 nt, Human
guggccuggcuggcaccaccuc

SEQ ID NO: 17526 - RNA, 22 nt, Human
guggccugucagaagccguggg

SEQ ID NO: 17527 - RNA, 22 nt, Human
guggccuuaagaaacaaacaac

SEQ ID NO: 17528 - RNA, 22 nt, Human
guggccuuggcuucuacccuga

SEQ ID NO: 17529 - RNA, 22 nt, Human
guggccuugggcacugaccuug

SEQ ID NO: 17530 - RNA, 22 nt, Human
guggcgaggggagguccuggcg

SEQ ID NO: 17531 - RNA, 22 nt, Human
guggcgcagaggguggcagaga

SEQ ID NO: 17532 - RNA, 22 nt, Human
guggcuauauuugaggauacgu

SEQ ID NO: 17533 - RNA, 22 nt, Human
guggcucaucuuugggaaguaa

SEQ ID NO: 17534 - RNA, 22 nt, Human
guggcucuguaaaaugccugca

SEQ ID NO: 17535 - RNA, 22 nt, Human
guggcugagcagcagagagcug

SEQ ID NO: 17536 - RNA, 17 nt, Human
guggcugcacacacaug

SEQ ID NO: 17537 - RNA, 22 nt, Human
guggcugcagcggcuguggaga

SEQ ID NO: 17538 - RNA, 22 nt, Human
guggcugcuaagucuccuuccu

SEQ ID NO: 17539 - RNA, 22 nt, Human
guggcugcucgggcuccggccc

SEQ ID NO: 17540 - RNA, 22 nt, Human
guggcugguuuccugcaugcaa

SEQ ID NO: 17541 - RNA, 22 nt, Human
guggcuguucuugccccaugcu

SEQ ID NO: 17542 - RNA, 22 nt, Human
guggcuucaccccaguugucuc

SEQ ID NO: 17543 - RNA, 22 nt, Human
guggcuucaugaacacugauga

SEQ ID NO: 17544 - RNA, 22 nt, Human
guggcuuccaugugcaucugac

SEQ ID NO: 17545 - RNA, 22 nt, Human
guggcuugaccaucccugcuac

SEQ ID NO: 17546 - RNA, 22 nt, Human
guggcuuuggaauuguagacuc

SEQ ID NO: 17547 - RNA, 22 nt, Human
guggcuuuguuuccaaaugaaa

SEQ ID NO: 17548 - RNA, 19 nt, Human
gugggacagacauuacaua

SEQ ID NO: 17549 - RNA, 22 nt, Human
gugggacagcuggagggucccu

SEQ ID NO: 17550 - RNA, 22 nt, Human
gugggagaagcccuguucguag

SEQ ID NO: 17551 - RNA, 22 nt, Human
gugggagagaccccgcuuaggg

SEQ ID NO: 17552 - RNA, 22 nt, Human
gccucagaaaguggcagguagg

SEQ ID NO: 17553 - RNA, 22 nt, Human
gccucagagggcagggugguga

SEQ ID NO: 17554 - RNA, 22 nt, Human
gccucagguaaaacuugaguuu

SEQ ID NO: 17555 - RNA, 20 nt, Human
gccucagucacauggccuac

SEQ ID NO: 17556 - RNA, 22 nt, Human
gccucagugauaugugggacaa

SEQ ID NO: 17557 - RNA, 22 nt, Human
gccucaguggcuuuaggaguuc

SEQ ID NO: 17558 - RNA, 22 nt, Human
gccucaguugaucugugugagc

SEQ ID NO: 17559 - RNA, 23 nt, Human
gccuccaaaccucuaggcuggug

SEQ ID NO: 17560 - RNA, 22 nt, Human
gccuccacuuuugcuggcuucu

SEQ ID NO: 17561 - RNA, 22 nt, Human
gccuccccaaagugcugacagc

SEQ ID NO: 17562 - RNA, 22 nt, Human
gccucccuccaccacugcaggu

SEQ ID NO: 17563 - RNA, 22 nt, Human
gccucccuggcccacagcagcg

SEQ ID NO: 17564 - RNA, 18 nt, Human
gccucccuggcuacacuu

SEQ ID NO: 17565 - RNA, 22 nt, Human
gccuccggagucacagugucuu

SEQ ID NO: 17566 - RNA, 22 nt, Human
gccuccuggauuuuagugccau

SEQ ID NO: 17567 - RNA, 22 nt, Human
gccuccuggccuuugcuccuca

SEQ ID NO: 17568 - RNA, 22 nt, Human
gccuccuggguucaugccauuc

SEQ ID NO: 17569 - RNA, 22 nt, Human
gccucgaggcugagaaggcaca

SEQ ID NO: 17570 - RNA, 22 nt, Human
gccucuccgagccacugccucu

SEQ ID NO: 17571 - RNA, 19 nt, Human
gccucugagggcaggacac

SEQ ID NO: 17572 - RNA, 22 nt, Human
gccucugaguuuggagaagagc

SEQ ID NO: 17573 - RNA, 22 nt, Human
gccucugcaauuacauugugcc

SEQ ID NO: 17574 - RNA, 22 nt, Human
gccucugcaccaguacugugcc

SEQ ID NO: 17575 - RNA, 23 nt, Human
gccucugcagccuaguuaguguc

SEQ ID NO: 17576 - RNA, 22 nt, Human
gccucugcaucaucacuccagc

SEQ ID NO: 17577 - RNA, 22 nt, Human
gccucugccaagggggcugcgg

SEQ ID NO: 17578 - RNA, 22 nt, Human
gccucugcccauccaccaucag

SEQ ID NO: 17579 - RNA, 22 nt, Human
gccucugcccuccugggacugc

SEQ ID NO: 17580 - RNA, 22 nt, Human
gccucugcggagcuguacauca

SEQ ID NO: 17581 - RNA, 22 nt, Human
gccucugcggggcccgagcccg

SEQ ID NO: 17582 - RNA, 23 nt, Human
gccucugcucugcguuggggacu

SEQ ID NO: 17583 - RNA, 17 nt, Human
gccucugcuugugucau

SEQ ID NO: 17584 - RNA, 22 nt, Human
gccucuggaagugggaaggggu

SEQ ID NO: 17585 - RNA, 22 nt, Human
gccucuggcuucugcaucagug

SEQ ID NO: 17586 - RNA, 22 nt, Human
gccucuggggcagcugagucau

SEQ ID NO: 17587 - RNA, 22 nt, Human
gccucugggggcucagaccugu

SEQ ID NO: 17588 - RNA, 22 nt, Human
gccucuguaggagugagagcau

SEQ ID NO: 17589 - RNA, 22 nt, Human
gccucugucauagcucauguga

SEQ ID NO: 17590 - RNA, 22 nt, Human
gccugaaggagucagagagggc

SEQ ID NO: 17591 - RNA, 22 nt, Human
gccugaaguuucaugccucuau

SEQ ID NO: 17592 - RNA, 22 nt, Human
gccugagagacccauggggcaa

SEQ ID NO: 17593 - RNA, 22 nt, Human
gccugagagucuccagaccuug

SEQ ID NO: 17594 - RNA, 22 nt, Human
gccugagaucaggagaaagcca

SEQ ID NO: 17595 - RNA, 22 nt, Human
gccugagcaggcguggaccaug

SEQ ID NO: 17596 - RNA, 22 nt, Human
gccugaggaauugaggggguaa

SEQ ID NO: 17597 - RNA, 18 nt, Human
gccugagggucaagugug

SEQ ID NO: 17598 - RNA, 22 nt, Human
gccugagugcaucugcagacau

SEQ ID NO: 17599 - RNA, 22 nt, Human
gccugaucagguccucggcaua

SEQ ID NO: 17600 - RNA, 22 nt, Human
gccugaugagcuuccagcugag

SEQ ID NO: 17601 - RNA, 21 nt, Human
gccugcacacaguaggugcac

SEQ ID NO: 17602 - RNA, 22 nt, Human
gccugcacucaaacacucucuu

SEQ ID NO: 17603 - RNA, 22 nt, Human
gccugcagaacugugaggcaau

SEQ ID NO: 17604 - RNA, 22 nt, Human
gccugcagcaugcuaggucuug

SEQ ID NO: 17605 - RNA, 22 nt, Human
gccugcagccagggaguucucu

SEQ ID NO: 17606 - RNA, 22 nt, Human
gccugcagccccucugcaguag

SEQ ID NO: 17607 - RNA, 22 nt, Human
gccugcaguucugugcuaggca

SEQ ID NO: 17608 - RNA, 22 nt, Human
gccugccaaaagaagcugcugg

SEQ ID NO: 17609 - RNA, 21 nt, Human
gccugccccauguuucuguug

SEQ ID NO: 17610 - RNA, 22 nt, Human
gccugccccuuccugggcaggg

SEQ ID NO: 17611 - RNA, 22 nt, Human
gccugccucaaaaucccaguuc

SEQ ID NO: 17612 - RNA, 21 nt, Human
gccugccugcgugacccucuu

SEQ ID NO: 17613 - RNA, 22 nt, Human
gccugcucuccggaucccugau

SEQ ID NO: 17614 - RNA, 22 nt, Human
gccugcucuggaauccauguaa

SEQ ID NO: 17615 - RNA, 22 nt, Human
gccugcuggacauuggccggcc

SEQ ID NO: 17616 - RNA, 22 nt, Human
gccugcuggaggagccucaggg

SEQ ID NO: 17617 - RNA, 22 nt, Human
gccugcuggaucaagcuuaugc

SEQ ID NO: 17618 - RNA, 22 nt, Human
gccugcuggauguggccaggcc

SEQ ID NO: 17619 - RNA, 22 nt, Human
gccugcuggcuguccauugcag

SEQ ID NO: 17620 - RNA, 21 nt, Human
gccugcuguucacccugccac

SEQ ID NO: 17621 - RNA, 22 nt, Human
gccugcuguugagggaagagcu

SEQ ID NO: 17622 - RNA, 22 nt, Human
gccugcuucucagucagcuugg

SEQ ID NO: 17623 - RNA, 22 nt, Human
gccugcuuuaagucuguugccu

SEQ ID NO: 17624 - RNA, 22 nt, Human
gccuggaaucaugcagggguua

SEQ ID NO: 17625 - RNA, 22 nt, Human
gccuggagaauuaaaaggaagg

SEQ ID NO: 17626 - RNA, 22 nt, Human
gccuggagacagcagaggcggc

SEQ ID NO: 17627 - RNA, 22 nt, Human
gccuggagcagacgugucccgg

SEQ ID NO: 17628 - RNA, 22 nt, Human
gccuggagcucggcugagggcg

SEQ ID NO: 17629 - RNA, 22 nt, Human
gccuggaggggccaggguggua

SEQ ID NO: 17630 - RNA, 22 nt, Human
gccuggaggguugagguuuugu

SEQ ID NO: 17631 - RNA, 22 nt, Human
gccuggaguuguggugaagcca

SEQ ID NO: 17632 - RNA, 22 nt, Human
gccuggcaaggcccuguugacu

SEQ ID NO: 17633 - RNA, 22 nt, Human
gccuggcacaggaauuaggagg

SEQ ID NO: 17634 - RNA, 22 nt, Human
gccuggcacugggcuccuggcc

SEQ ID NO: 17635 - RNA, 22 nt, Human
guguccugcacagcaccuugca

SEQ ID NO: 17636 - RNA, 22 nt, Human
guguccugguuccuuguggcug

SEQ ID NO: 17637 - RNA, 22 nt, Human
guguccuuaugcauaccagagu

SEQ ID NO: 17638 - RNA, 22 nt, Human
gugucgugcuugccauggguac

SEQ ID NO: 17639 - RNA, 22 nt, Human
gugucuacugaucugauucaga

SEQ ID NO: 17640 - RNA, 22 nt, Human
gugucucuuagccugcuaaugc

SEQ ID NO: 17641 - RNA, 22 nt, Human
gugucugccuuuggacuaacug

SEQ ID NO: 17642 - RNA, 19 nt, Human
gugucugccuuugugccac

SEQ ID NO: 17643 - RNA, 22 nt, Human
gugucugcugcacccucacacc

SEQ ID NO: 17644 - RNA, 20 nt, Human
gugucuggaguacuagagag

SEQ ID NO: 17645 - RNA, 22 nt, Human
gugucugugucauuacuaauag

SEQ ID NO: 17646 - RNA, 22 nt, Human
gugucuguuauacagaggagac

SEQ ID NO: 17647 - RNA, 22 nt, Human
gugucuuaggguugcacagagu

SEQ ID NO: 17648 - RNA, 22 nt, Human
gugugacccaaggacacucucu

SEQ ID NO: 17649 - RNA, 22 nt, Human
gugugaccucaucuuaacugga

SEQ ID NO: 17650 - RNA, 22 nt, Human
gugugagagcaaaacugcagga

SEQ ID NO: 17651 - RNA, 22 nt, Human
gugugagccaugauguguccag

SEQ ID NO: 17652 - RNA, 22 nt, Human
gugugcaacuuucauuaauauu

SEQ ID NO: 17653 - RNA, 22 nt, Human
gugugcacagagcuccaguguu

SEQ ID NO: 17654 - RNA, 22 nt, Human
gugugcagaacagggagugggu

SEQ ID NO: 17655 - RNA, 22 nt, Human
gugugcagaagacacaagacau

SEQ ID NO: 17656 - RNA, 22 nt, Human
gugugcagaggcaggaggugcu

SEQ ID NO: 17657 - RNA, 22 nt, Human
gugugcaggccacaggccaggg

SEQ ID NO: 17658 - RNA, 22 nt, Human
gugugcagggaugagugcaggu

SEQ ID NO: 17659 - RNA, 22 nt, Human
gugugcagucugcuaggcaggg

SEQ ID NO: 17660 - RNA, 22 nt, Human
gugugcaucuuuucugcuugau

SEQ ID NO: 17661 - RNA, 22 nt, Human
gcucugguuaaaaagaauuaaa

SEQ ID NO: 17662 - RNA, 22 nt, Human
gcucuguaccugcggagaugag

SEQ ID NO: 17663 - RNA, 21 nt, Human
gcucugucccugcuguguguc

SEQ ID NO: 17664 - RNA, 20 nt, Human
gcucugucuggccuacuuuu

SEQ ID NO: 17665 - RNA, 21 nt, Human
gcucugugaaauuucaccagg

SEQ ID NO: 17666 - RNA, 22 nt, Human
gcucugugaccuuaggcaaguu

SEQ ID NO: 17667 - RNA, 18 nt, Human
gcucugugaccuugagca

SEQ ID NO: 17668 - RNA, 22 nt, Human
gcucugugcuagaacuaagaau

SEQ ID NO: 17669 - RNA, 20 nt, Human
gcucugugcuggcggaggcu

SEQ ID NO: 17670 - RNA, 22 nt, Human
gcucuguggcaggaggucuugu

SEQ ID NO: 17671 - RNA, 20 nt, Human
gcucugugguuugagucucc

SEQ ID NO: 17672 - RNA, 22 nt, Human
gcucuguguccacagcuggaaa

SEQ ID NO: 17673 - RNA, 22 nt, Human
gcucuguguucccuccaggcuc

SEQ ID NO: 17674 - RNA, 22 nt, Human
gcucuucauucucccaaauagg

SEQ ID NO: 17675 - RNA, 22 nt, Human
gcucuuccauuucucuugaacu

SEQ ID NO: 17676 - RNA, 22 nt, Human
gcucuucuaaagaauguacagg

SEQ ID NO: 17677 - RNA, 21 nt, Human
gcucuugaauaagcauaauaa

SEQ ID NO: 17678 - RNA, 22 nt, Human
gcugaggcuccucgggaggaca

SEQ ID NO: 17679 - RNA, 22 nt, Human
gcugaggcugggagcagccugu

SEQ ID NO: 17680 - RNA, 19 nt, Human
gcugagggccacccagccc

SEQ ID NO: 17681 - RNA, 23 nt, Human
gcugagguccugcugaguggugg

SEQ ID NO: 17682 - RNA, 19 nt, Human
gcugagguggaggaaggag

SEQ ID NO: 17683 - RNA, 22 nt, Human
gcugagguuuucugccugcuca

SEQ ID NO: 17684 - RNA, 22 nt, Human
gcugaguauacagacuauguua

SEQ ID NO: 17685 - RNA, 22 nt, Human
gcugagucagauugcagucuug

SEQ ID NO: 17686 - RNA, 22 nt, Human
gcugagugagguccagagcuug

SEQ ID NO: 17687 - RNA, 22 nt, Human
gcugagugauugauauuuuagu

SEQ ID NO: 17688 - RNA, 17 nt, Human
gcugagugcagggaguc

SEQ ID NO: 17689 - RNA, 22 nt, Human
gcugauagacugaauguuggga

SEQ ID NO: 17690 - RNA, 23 nt, Human
gcugauggagacuuguggccucc

SEQ ID NO: 17691 - RNA, 22 nt, Human
gcugauguuuaguugauguuac

SEQ ID NO: 17692 - RNA, 22 nt, Human
gcugauguuucaaguauagcuu

SEQ ID NO: 17693 - RNA, 22 nt, Human
gcugcaaaccugccaccuggug

SEQ ID NO: 17694 - RNA, 22 nt, Human
gcugcaagcaugucauccucac

SEQ ID NO: 17695 - RNA, 22 nt, Human
gcugcaaguccuucccucucuu

SEQ ID NO: 17696 - RNA, 22 nt, Human
gcugcaaguuaguauacauucu

SEQ ID NO: 17697 - RNA, 22 nt, Human
gcugcacuugagccugggagaa

SEQ ID NO: 17698 - RNA, 22 nt, Human
gcugcagacuucucaucucauu

SEQ ID NO: 17699 - RNA, 22 nt, Human
gcugcagccaaauucauuguca

SEQ ID NO: 17700 - RNA, 22 nt, Human
gcugcagcccugcggaucacuu

SEQ ID NO: 17701 - RNA, 23 nt, Human
gcugcagcuguggauguucucag

SEQ ID NO: 17702 - RNA, 22 nt, Human
gcugcagcuuuaggauccagug

SEQ ID NO: 17703 - RNA, 22 nt, Human
gcugcaggagauuuugagaguc

SEQ ID NO: 17704 - RNA, 22 nt, Human
gcugcaggaugaggcucugcuc

SEQ ID NO: 17705 - RNA, 22 nt, Human
gcugcagguuugucuagucugg

SEQ ID NO: 17706 - RNA, 22 nt, Human
gcugcauggagggugcccagga

SEQ ID NO: 17707 - RNA, 22 nt, Human
gcugccaauccagcugugggag

SEQ ID NO: 17708 - RNA, 22 nt, Human
gcugccacauuuucaggacuaa

SEQ ID NO: 17709 - RNA, 19 nt, Human
gcugccaggacaguuacug

SEQ ID NO: 17710 - RNA, 22 nt, Human
gcugccagggaggugguggagg

SEQ ID NO: 17711 - RNA, 21 nt, Human
gcugcccaacccugcaucucc

SEQ ID NO: 17712 - RNA, 22 nt, Human
gcugcccacagcggguguuucg

SEQ ID NO: 17713 - RNA, 22 nt, Human
gcugcccaggaagccugggguu

SEQ ID NO: 17714 - RNA, 22 nt, Human
gcugcccaggcaacauugacuu

SEQ ID NO: 17715 - RNA, 22 nt, Human
gcugcccauuccacuggauggu

SEQ ID NO: 17716 - RNA, 22 nt, Human
gcugcccauugcucucccacuc

SEQ ID NO: 17717 - RNA, 22 nt, Human
gcugccccagcugggggcugga

SEQ ID NO: 17718 - RNA, 22 nt, Human
gcugccccccggacucggcggg

SEQ ID NO: 17719 - RNA, 22 nt, Human
gcugccccgagccauccuucag

SEQ ID NO: 17720 - RNA, 22 nt, Human
gcugcccuagaaguacagagag

SEQ ID NO: 17721 - RNA, 22 nt, Human
gcugcccuccaguucccacagu

SEQ ID NO: 17722 - RNA, 22 nt, Human
gcugcccucucuggccccacac

SEQ ID NO: 17723 - RNA, 22 nt, Human
gcugcccugccucagacuccuc

SEQ ID NO: 17724 - RNA, 21 nt, Human
gcugcccuggcucagcauuca

SEQ ID NO: 17725 - RNA, 22 nt, Human
gcugcccugucugcagcaggac

SEQ ID NO: 17726 - RNA, 22 nt, Human
gcugccgacccacagggguuaa

SEQ ID NO: 17727 - RNA, 22 nt, Human
gcugccucccccauggcuggaa

SEQ ID NO: 17728 - RNA, 22 nt, Human
gcugccuccgccggcuccacag

SEQ ID NO: 17729 - RNA, 22 nt, Human
gcugccuccugaaagcgcucug

SEQ ID NO: 17730 - RNA, 22 nt, Human
gcugccugaaugaaccuuguuc

SEQ ID NO: 17731 - RNA, 22 nt, Human
gcugccugaucauacaccaggg

SEQ ID NO: 17732 - RNA, 22 nt, Human
gcugccugauguccagcaggac

SEQ ID NO: 17733 - RNA, 22 nt, Human
gcugccugcaguguuuucccag

SEQ ID NO: 17734 - RNA, 18 nt, Human
gcugccugcauuccucac

SEQ ID NO: 17735 - RNA, 21 nt, Human
gcugccugccccucgggggcu

SEQ ID NO: 17736 - RNA, 22 nt, Human
gcugccugcccugggucaucug

SEQ ID NO: 17737 - RNA, 22 nt, Human
gcugccugcucggcuccuggga

SEQ ID NO: 17738 - RNA, 22 nt, Human
gcugccuggagaggcagggaug

SEQ ID NO: 17739 - RNA, 22 nt, Human
gcugccuggauuugcaauccuc

SEQ ID NO: 17740 - RNA, 22 nt, Human
gcugccugggcuggcauuccca

SEQ ID NO: 17741 - RNA, 22 nt, Human
gcugccugucugcugacccagg

SEQ ID NO: 17742 - RNA, 19 nt, Human
gcugccugucuuagccagu

SEQ ID NO: 17743 - RNA, 22 nt, Human
gcugccuugaacauccuaagua

SEQ ID NO: 17744 - RNA, 20 nt, Human
gcugccuuggauggcuacac

SEQ ID NO: 17745 - RNA, 22 nt, Human
gcugccuuuuaaagccucgcuu

SEQ ID NO: 17746 - RNA, 18 nt, Human
gcugcgugggaugugacc

SEQ ID NO: 17747 - RNA, 22 nt, Human
gcugcuaagcguuucuguucca

SEQ ID NO: 17748 - RNA, 20 nt, Human
gcugcucuccacggucugca

SEQ ID NO: 17749 - RNA, 22 nt, Human
gcugcucuccauggccgugagu

SEQ ID NO: 17750 - RNA, 22 nt, Human
gcugcucugugacagccuccgg

SEQ ID NO: 17751 - RNA, 22 nt, Human
gcugcugagaauugcaggcaag

SEQ ID NO: 17752 - RNA, 22 nt, Human
gcugcugcaagagccagcucuu

SEQ ID NO: 17753 - RNA, 22 nt, Human
gcugcugcaugaacagcgguca

SEQ ID NO: 17754 - RNA, 22 nt, Human
gcugcugcgcuugucuacuguu

SEQ ID NO: 17755 - RNA, 22 nt, Human
gcugcuggaacaaaucacccca

SEQ ID NO: 17756 - RNA, 22 nt, Human
gcugcuggagagcgagacuguu

SEQ ID NO: 17757 - RNA, 22 nt, Human
gcugcuggcuuccugcuguuuu

SEQ ID NO: 17758 - RNA, 22 nt, Human
gcugcugguccucagagcucau

SEQ ID NO: 17759 - RNA, 22 nt, Human
gcugcuguacuuggggggugcu

SEQ ID NO: 17760 - RNA, 22 nt, Human
gcugcugucacccacaucuguc

SEQ ID NO: 17761 - RNA, 22 nt, Human
gcugcugucagcaggccuuguu

SEQ ID NO: 17762 - RNA, 22 nt, Human
gcugcugucagugguggcaguu

SEQ ID NO: 17763 - RNA, 22 nt, Human
gcugcugugaauuuuuuaaaug

SEQ ID NO: 17764 - RNA, 22 nt, Human
gcugcugugccccaucugcaga

SEQ ID NO: 17765 - RNA, 22 nt, Human
gcugcugugccuggcguccugu

SEQ ID NO: 17766 - RNA, 22 nt, Human
gcugcuguuccuccaguggauc

SEQ ID NO: 17767 - RNA, 22 nt, Human
gcugcuuccuagaaggcccagu

SEQ ID NO: 17768 - RNA, 22 nt, Human
gcugcuuuagaauugaaacaga

SEQ ID NO: 17769 - RNA, 22 nt, Human
gcugcuuucuguuaggaauugg

SEQ ID NO: 17770 - RNA, 23 nt, Human
uacugccuggggccagagagcgg

SEQ ID NO: 17771 - RNA, 22 nt, Human
uacugcugagcuggguagaagg

SEQ ID NO: 17772 - RNA, 22 nt, Human
uacugcuucacccuugagucuu

SEQ ID NO: 17773 - RNA, 22 nt, Human
uacugcuuguuagcuguauuug

SEQ ID NO: 17774 - RNA, 22 nt, Human
uacuggacacguauauauagau

SEQ ID NO: 17775 - RNA, 23 nt, Human
uacugggcagcugcucugacacc

SEQ ID NO: 17776 - RNA, 21 nt, Human
uacuguagccuugcacuguag

SEQ ID NO: 17777 - RNA, 22 nt, Human
uacuguauaugcuuguaucuga

SEQ ID NO: 17778 - RNA, 22 nt, Human
uacuguaugaauuauguuauuu

SEQ ID NO: 17779 - RNA, 22 nt, Human
uacuguauuguuggcucuuuug

SEQ ID NO: 17780 - RNA, 22 nt, Human
uacugucugcuucuuauagcuu

SEQ ID NO: 17781 - RNA, 22 nt, Human
uacugucuggcaauuaagaauc

SEQ ID NO: 17782 - RNA, 22 nt, Human
uacugucuggguucccaagcaa

SEQ ID NO: 17783 - RNA, 22 nt, Human
uacugugacagaguacuuaaac

SEQ ID NO: 17784 - RNA, 22 nt, Human
uacugugcaaaaaugaauauug

SEQ ID NO: 17785 - RNA, 22 nt, Human
uacuguuaauguuaaauucagg

SEQ ID NO: 17786 - RNA, 18 nt, Human
uacuguuuaauugauuac

SEQ ID NO: 17787 - RNA, 22 nt, Human
uacuguuuccugaagcagaugc

SEQ ID NO: 17788 - RNA, 22 nt, Human
uacuguuuucuauaauggcugu

SEQ ID NO: 17789 - RNA, 22 nt, Human
uacuguuuuuaaaauugcaucc

SEQ ID NO: 17790 - RNA, 22 nt, Human
uacuguuuuuuagacucauggu

SEQ ID NO: 17791 - RNA, 22 nt, Human
uacuuaaaaauuaucaaagugg

SEQ ID NO: 17792 - RNA, 22 nt, Human
uacuuacacagcuguagaaggu

SEQ ID NO: 17793 - RNA, 22 nt, Human
gcucuugauuuccaggagcuag

SEQ ID NO: 17794 - RNA, 21 nt, Human
gcucuuggaaggggcucagcu

SEQ ID NO: 17795 - RNA, 22 nt, Human
gcucuuugcacagcucugcccu

SEQ ID NO: 17796 - RNA, 20 nt, Human
gcucuuuguaagggaauuug

SEQ ID NO: 17797 - RNA, 22 nt, Human
gcugaaaaauagugucguguuu

SEQ ID NO: 17798 - RNA, 22 nt, Human
gcugaaaugaaaacacaggucg

SEQ ID NO: 17799 - RNA, 22 nt, Human
gcugaaaugggcacugaaggcc

SEQ ID NO: 17800 - RNA, 22 nt, Human
gcugaaaugucuuuagcagugu

SEQ ID NO: 17801 - RNA, 19 nt, Human
gcugaacaagucagcaacc

SEQ ID NO: 17802 - RNA, 22 nt, Human
gcugaacuacaugaaguugccg

SEQ ID NO: 17803 - RNA, 22 nt, Human
gcugaagagagaugcguccagc

SEQ ID NO: 17804 - RNA, 22 nt, Human
gcugaagaugcaucccuucucu

SEQ ID NO: 17805 - RNA, 22 nt, Human
gcugaagcagauccaggugugg

SEQ ID NO: 17806 - RNA, 22 nt, Human
gcugaagcugacacauagugcu

SEQ ID NO: 17807 - RNA, 22 nt, Human
gcugaaggcccggaggacaggg

SEQ ID NO: 17808 - RNA, 22 nt, Human
gcugaagucugagaauuugcaa

SEQ ID NO: 17809 - RNA, 22 nt, Human
gcugaauaauguguaaugucuc

SEQ ID NO: 17810 - RNA, 22 nt, Human
gcugaauaauucuuuguugugg

SEQ ID NO: 17811 - RNA, 22 nt, Human
gcugaauaggcacagagggcau

SEQ ID NO: 17812 - RNA, 22 nt, Human
gcugaauaggggucccaaagau

SEQ ID NO: 17813 - RNA, 23 nt, Human
gcugaauguaauguucuuugggu

SEQ ID NO: 17814 - RNA, 18 nt, Human
gcugaaugucugcuuugc

SEQ ID NO: 17815 - RNA, 22 nt, Human
gcugacaaacaaggugguguca

SEQ ID NO: 17816 - RNA, 22 nt, Human
gcugaccugcucucagcagaga

SEQ ID NO: 17817 - RNA, 22 nt, Human
gcugacugauggacacagcacc

SEQ ID NO: 17818 - RNA, 23 nt, Human
gcugacugugaaauucuggagcu

SEQ ID NO: 17819 - RNA, 20 nt, Human
gcugacuguuuggguggcgg

SEQ ID NO: 17820 - RNA, 22 nt, Human
gcugacuuugccugucuuuagc

SEQ ID NO: 17821 - RNA, 22 nt, Human
gcugagacugacaugaagaggu

SEQ ID NO: 17822 - RNA, 22 nt, Human
gcugagacuuccacugccaucu

SEQ ID NO: 17823 - RNA, 22 nt, Human
gcugagagcggccagcugggaa

SEQ ID NO: 17824 - RNA, 22 nt, Human
gcugagaggcagccagacccuc

SEQ ID NO: 17825 - RNA, 18 nt, Human
gcugagcaaauuccuccc

SEQ ID NO: 17826 - RNA, 22 nt, Human
gcugagcacaccuaggguagag

SEQ ID NO: 17827 - RNA, 22 nt, Human
gcugagccuagcugucuccugu

SEQ ID NO: 17828 - RNA, 22 nt, Human
gcugagcuagaaaaggaccaca

SEQ ID NO: 17829 - RNA, 22 nt, Human
gcugagcugcuguucauccugc

SEQ ID NO: 17830 - RNA, 22 nt, Human
gcugaggacaucauggaaggaa

SEQ ID NO: 17831 - RNA, 22 nt, Human
gcugaggcaaaccaagaaugua

SEQ ID NO: 17832 - RNA, 22 nt, Human
gcugaggcaagauuugaaccca

SEQ ID NO: 17833 - RNA, 22 nt, Human
gcugaggcggaaggauugcuag

SEQ ID NO: 17834 - RNA, 22 nt, Human
gcugagggauagcugcucacug

SEQ ID NO: 17835 - RNA, 22 nt, Human
gcugagggcagccuccuagguc

SEQ ID NO: 17836 - RNA, 22 nt, Human
gcugagggcuggucacauuugu

SEQ ID NO: 17837 - RNA, 22 nt, Human
gcugagggcuguaacagcagag

SEQ ID NO: 17838 - RNA, 22 nt, Human
gcugaggguaacacuucgggau

SEQ ID NO: 17839 - RNA, 22 nt, Human
gcugagggucuguucauguugc

SEQ ID NO: 17840 - RNA, 22 nt, Human
gcugagguaggagguugcagug

SEQ ID NO: 17841 - RNA, 22 nt, Human
gcugagguccagcauucgccua

SEQ ID NO: 17842 - RNA, 20 nt, Human
gcugaggucccugugguuuu

SEQ ID NO: 17843 - RNA, 22 nt, Human
gcugaggugaggcuggaaagga

SEQ ID NO: 17844 - RNA, 22 nt, Human
gcugagguggagauugcaguga

SEQ ID NO: 17845 - RNA, 20 nt, Human
gcugagguggaggaaggaga

SEQ ID NO: 17846 - RNA, 22 nt, Human
gcugagguggcugccuuaguaa

SEQ ID NO: 17847 - RNA, 22 nt, Human
gcugagguggugaugguucauc

SEQ ID NO: 17848 - RNA, 18 nt, Human
gcugagguggugucagag

SEQ ID NO: 17849 - RNA, 20 nt, Human
gcugagguuucuuccuauau

SEQ ID NO: 17850 - RNA, 22 nt, Human
gcugagucuugagcacugagca

SEQ ID NO: 17851 - RNA, 22 nt, Human
gcugagugaaaguuugcugugu

SEQ ID NO: 17852 - RNA, 22 nt, Human
gcugagugaggaaaagguuaua

SEQ ID NO: 17853 - RNA, 22 nt, Human
gcugagugauucauacgcugcu

SEQ ID NO: 17854 - RNA, 22 nt, Human
gcugaguugaaagcagaggaua

SEQ ID NO: 17855 - RNA, 22 nt, Human
gcugauauaaaauuacagagga

SEQ ID NO: 17856 - RNA, 22 nt, Human
gcugauccuuuuaugucuagcu

SEQ ID NO: 17857 - RNA, 22 nt, Human
gcugaugagagagacaaaugcu

SEQ ID NO: 17858 - RNA, 22 nt, Human
gcugaugcaggguugagaggag

SEQ ID NO: 17859 - RNA, 22 nt, Human
gcugauguauauagugauugag

SEQ ID NO: 17860 - RNA, 22 nt, Human
gcugaugugaugucagaagagg

SEQ ID NO: 17861 - RNA, 22 nt, Human
gcugauuauuacaugucugugg

SEQ ID NO: 17862 - RNA, 22 nt, Human
gcugauuuugucacauagcaag

SEQ ID NO: 17863 - RNA, 22 nt, Human
gcugcaacuguugcucucugca

SEQ ID NO: 17864 - RNA, 22 nt, Human
gcugcagacugggaggcaggug

SEQ ID NO: 17865 - RNA, 22 nt, Human
gcugcagccuuugggaaggaca

SEQ ID NO: 17866 - RNA, 17 nt, Human
gcugcagcgguaggcag

SEQ ID NO: 17867 - RNA, 22 nt, Human
gcugcagcucgccuuccggccu

SEQ ID NO: 17868 - RNA, 22 nt, Human
gcugcaggcauuuuccugggca

SEQ ID NO: 17869 - RNA, 18 nt, Human
gcugcaggcccuccgagg

SEQ ID NO: 17870 - RNA, 22 nt, Human
gcugcaggcgccugcggucucu

SEQ ID NO: 17871 - RNA, 22 nt, Human
gcugcaggcuguggcaggggag

SEQ ID NO: 17872 - RNA, 22 nt, Human
gcugcagggagcuggaaggcuc

SEQ ID NO: 17873 - RNA, 21 nt, Human
gcugcagggcccagggcaccc

SEQ ID NO: 17874 - RNA, 22 nt, Human
gcugcagggcucucacaggggg

SEQ ID NO: 17875 - RNA, 22 nt, Human
gcugcagggggugggcgucucc

SEQ ID NO: 17876 - RNA, 22 nt, Human
gcugcagugagccaagaucgug

SEQ ID NO: 17877 - RNA, 21 nt, Human
gcugccaccgcgugcuccagg

SEQ ID NO: 17878 - RNA, 22 nt, Human
gcugccaccguggagaugagug

SEQ ID NO: 17879 - RNA, 22 nt, Human
uauaugcagauuuucaucaucg

SEQ ID NO: 17880 - RNA, 22 nt, Human
uauaugcaugcccauguauaca

SEQ ID NO: 17881 - RNA, 22 nt, Human
uauaugcuugugcaugucuuug

SEQ ID NO: 17882 - RNA, 22 nt, Human
uauauggauagugaucauaaga

SEQ ID NO: 17883 - RNA, 22 nt, Human
uauauguguggauucuuguaga

SEQ ID NO: 17884 - RNA, 22 nt, Human
uauauguuuuucuaauuaggga

SEQ ID NO: 17885 - RNA, 22 nt, Human
uauauuaaacccucucuguagg

SEQ ID NO: 17886 - RNA, 22 nt, Human
uauauuaaaugaccaguuuuaa

SEQ ID NO: 17887 - RNA, 22 nt, Human
uauauuagugagauuuauccau

SEQ ID NO: 17888 - RNA, 22 nt, Human
uauauuaguggaaugauaugaa

SEQ ID NO: 17889 - RNA, 22 nt, Human
uauauucaaugauuaguaucag

SEQ ID NO: 17890 - RNA, 22 nt, Human
uauauugacuuuaaagaagcaa

SEQ ID NO: 17891 - RNA, 22 nt, Human
uauauugagauuugagcauugu

SEQ ID NO: 17892 - RNA, 22 nt, Human
uauauuguagcugaugacaaau

SEQ ID NO: 17893 - RNA, 22 nt, Human
uauauuuaaauccagguugaaa

SEQ ID NO: 17894 - RNA, 18 nt, Human
uauauuucacacauauuc

SEQ ID NO: 17895 - RNA, 20 nt, Human
uauauuuucucuuuggccuu

SEQ ID NO: 17896 - RNA, 22 nt, Human
uaucaaaaggaguugaaagggg

SEQ ID NO: 17897 - RNA, 22 nt, Human
uaucaaauugaggcagcugggg

SEQ ID NO: 17898 - RNA, 22 nt, Human
uaucaacaauagccaguguuua

SEQ ID NO: 17899 - RNA, 22 nt, Human
uaucaacugagauuaaauauuu

SEQ ID NO: 17900 - RNA, 17 nt, Human
uaucaagaagucuggcc

SEQ ID NO: 17901 - RNA, 22 nt, Human
uaucaagagucucuacauuaau

SEQ ID NO: 17902 - RNA, 22 nt, Human
uaucaauugggccaaaugguac

SEQ ID NO: 17903 - RNA, 22 nt, Human
uaucacauacuucucauccagg

SEQ ID NO: 17904 - RNA, 22 nt, Human
uaucacauaguguuuaguaaau

SEQ ID NO: 17905 - RNA, 22 nt, Human
uaucagaagacuuacaguaucg

SEQ ID NO: 17906 - RNA, 22 nt, Human
uaucagaaggcacauggagucu

SEQ ID NO: 17907 - RNA, 21 nt, Human
uaucagagacauugagaggca

SEQ ID NO: 17908 - RNA, 22 nt, Human
uaucagauaaucuuuuacaagc

SEQ ID NO: 17909 - RNA, 22 nt, Human
uaucagauauagcauucacugg

SEQ ID NO: 17910 - RNA, 22 nt, Human
uaucagcaagauggcaguauag

SEQ ID NO: 17911 - RNA, 22 nt, Human
uaucagcucggaaucuguugaa

SEQ ID NO: 17912 - RNA, 22 nt, Human
uaucaggacuucauuccuuuua

SEQ ID NO: 17913 - RNA, 22 nt, Human
uaucagugauugcuguauacaa

SEQ ID NO: 17914 - RNA, 23 nt, Human
uaucauuucagcucucugccugg

SEQ ID NO: 17915 - RNA, 22 nt, Human
uaucauuuguuauuauuagugg

SEQ ID NO: 17916 - RNA, 22 nt, Human
uauccaaacauauagucucucu

SEQ ID NO: 17917 - RNA, 22 nt, Human
uauccaauucaccauugauggg

SEQ ID NO: 17918 - RNA, 22 nt, Human
uauccacacugggauguuuuga

SEQ ID NO: 17919 - RNA, 22 nt, Human
uauccagggaguuuuagggcuu

SEQ ID NO: 17920 - RNA, 22 nt, Human
uauccauauucagacugugaau

SEQ ID NO: 17921 - RNA, 22 nt, Human
uauccuguguacugucuaguac

SEQ ID NO: 17922 - RNA, 22 nt, Human
uaucgguaagauggaaaucagg

SEQ ID NO: 17923 - RNA, 22 nt, Human
uaucuaaauggaauauuccaga

SEQ ID NO: 17924 - RNA, 22 nt, Human
uaucuaagagagucaauauuua

SEQ ID NO: 17925 - RNA, 22 nt, Human
uaucuacaggugucagguaaga

SEQ ID NO: 17926 - RNA, 22 nt, Human
uaucuacauguagguauguaug

SEQ ID NO: 17927 - RNA, 22 nt, Human
uaucuacauucuuguaucuucu

SEQ ID NO: 17928 - RNA, 22 nt, Human
uaucuacuccucuuucagaugc

SEQ ID NO: 17929 - RNA, 16 nt, Human
uaucuagaguugaggu

SEQ ID NO: 17930 - RNA, 22 nt, Human
uaucucuuucauuuuagaguca

SEQ ID NO: 17931 - RNA, 22 nt, Human
uaucugucaccuguaggguagg

SEQ ID NO: 17932 - RNA, 22 nt, Human
uaucugugaaauguguuuguau

SEQ ID NO: 17933 - RNA, 22 nt, Human
uaucuguuaggaucagagcugg

SEQ ID NO: 17934 - RNA, 22 nt, Human
uaucuguuccaggcacucagcu

SEQ ID NO: 17935 - RNA, 22 nt, Human
uaucuguucugcuugauuuuga

SEQ ID NO: 17936 - RNA, 22 nt, Human
uaucuguuucugaggauacaug

SEQ ID NO: 17937 - RNA, 22 nt, Human
uaucuguuugcucacagguguu

SEQ ID NO: 17938 - RNA, 22 nt, Human
uaucuuggcuugaaagaugcuu

SEQ ID NO: 17939 - RNA, 22 nt, Human
uaucuuguuuaggugcacaggu

SEQ ID NO: 17940 - RNA, 22 nt, Human
uaucuuuaaugcuuggagguua

SEQ ID NO: 17941 - RNA, 22 nt, Human
uaucuuugcaaauaucucuaag

SEQ ID NO: 17942 - RNA, 22 nt, Human
uaucuuuugaguucucaagaug

SEQ ID NO: 17943 - RNA, 22 nt, Human
uaugaaaugauggggaaaauag

SEQ ID NO: 17944 - RNA, 22 nt, Human
uaugaaauugccauuuuuaugg

SEQ ID NO: 17945 - RNA, 22 nt, Human
ggaucuggggcucugcugcuca

SEQ ID NO: 17946 - RNA, 22 nt, Human
ggaugaggaaaccacagugucc

SEQ ID NO: 17947 - RNA, 22 nt, Human
ggaugagguagaugaacaaggg

SEQ ID NO: 17948 - RNA, 21 nt, Human
ggauggauagggaagagauuu

SEQ ID NO: 17949 - RNA, 22 nt, Human
ggauggcagacagugaguggcu

SEQ ID NO: 17950 - RNA, 22 nt, Human
ggaugggagcagaggacgacca

SEQ ID NO: 17951 - RNA, 22 nt, Human
ggaugggcagacaggacggcac

SEQ ID NO: 17952 - RNA, 22 nt, Human
ggauggguuccgugggcaaaug

SEQ ID NO: 17953 - RNA, 22 nt, Human
ggaugucgaggaugggguagca

SEQ ID NO: 17954 - RNA, 22 nt, Human
ggaugucugucauuaugcuuuc

SEQ ID NO: 17955 - RNA, 18 nt, Human
ggaugugauuuugguuuu

SEQ ID NO: 17956 - RNA, 22 nt, Human
ggauguggaccuugccugguga

SEQ ID NO: 17957 - RNA, 22 nt, Human
ggauguugauugaauggccauu

SEQ ID NO: 17958 - RNA, 22 nt, Human
ggauuaagaccugucaguacac

SEQ ID NO: 17959 - RNA, 22 nt, Human
ggauucaggguaaaguuucagu

SEQ ID NO: 17960 - RNA, 22 nt, Human
ggauucuacugaucagcaccac

SEQ ID NO: 17961 - RNA, 20 nt, Human
ggauucugacugugaagagg

SEQ ID NO: 17962 - RNA, 22 nt, Human
ggauugaagggaaccucagaau

SEQ ID NO: 17963 - RNA, 17 nt, Human
ggauugcauauacagug

SEQ ID NO: 17964 - RNA, 23 nt, Human
ggauuggccccaggaguaugggu

SEQ ID NO: 17965 - RNA, 22 nt, Human
ggauuuacccaauggauagaug

SEQ ID NO: 17966 - RNA, 22 nt, Human
ggauuuacuaucuugaaauaua

SEQ ID NO: 17967 - RNA, 22 nt, Human
ggauuuggaagaccgggucaca

SEQ ID NO: 17968 - RNA, 22 nt, Human
ggcaaaaaguucccaucagugu

SEQ ID NO: 17969 - RNA, 22 nt, Human
ggcaaaaaucaccccugguuca

SEQ ID NO: 17970 - RNA, 22 nt, Human
ggcaaagagacaugcaucgggg

SEQ ID NO: 17971 - RNA, 18 nt, Human
ggcaaaugcaauucaaag

SEQ ID NO: 17972 - RNA, 22 nt, Human
ggcaaccugagcuuguggagaa

SEQ ID NO: 17973 - RNA, 22 nt, Human
ggcaacucuucuugcaaugggg

SEQ ID NO: 17974 - RNA, 22 nt, Human
ggcaagaaccucaauuaccuuu

SEQ ID NO: 17975 - RNA, 22 nt, Human
ggcaagagggcagauggagugc

SEQ ID NO: 17976 - RNA, 22 nt, Human
ggcaagagugaggagugucucu

SEQ ID NO: 17977 - RNA, 22 nt, Human
ggcaagcucaggccucaggugu

SEQ ID NO: 17978 - RNA, 22 nt, Human
ggcaaggaagaagccaugaugu

SEQ ID NO: 17979 - RNA, 22 nt, Human
ggcaaggccuugcccagcauuc

SEQ ID NO: 17980 - RNA, 22 nt, Human
ggcaagggacggccgugagaca

SEQ ID NO: 17981 - RNA, 22 nt, Human
ggcaagguacucuagagcacau

SEQ ID NO: 17982 - RNA, 22 nt, Human
ggcaauaaucuacucugccacu

SEQ ID NO: 17983 - RNA, 22 nt, Human
ggcaauaaugacauuuuaaaaa

SEQ ID NO: 17984 - RNA, 22 nt, Human
ggcaauuaaaguacugugaaug

SEQ ID NO: 17985 - RNA, 22 nt, Human
ggcacaagguuuaaauaacauc

SEQ ID NO: 17986 - RNA, 22 nt, Human
ggcacaauugcagcaauaaaca

SEQ ID NO: 17987 - RNA, 22 nt, Human
ggcacacaaaggcagcauuuga

SEQ ID NO: 17988 - RNA, 22 nt, Human
ggagcacagccuugccaguacc

SEQ ID NO: 17989 - RNA, 22 nt, Human
ggagcagagcauuucacagccu

SEQ ID NO: 17990 - RNA, 22 nt, Human
ggagcagaugucuucauggccu

SEQ ID NO: 17991 - RNA, 22 nt, Human
ggagcagccacgucucagggca

SEQ ID NO: 17992 - RNA, 22 nt, Human
ggagcagggcagugaauucugg

SEQ ID NO: 17993 - RNA, 22 nt, Human
ggagcagucuggugauacucag

SEQ ID NO: 17994 - RNA, 22 nt, Human
ggagcaguuguugagcaagcca

SEQ ID NO: 17995 - RNA, 22 nt, Human
ggagcaucugaacagggagaag

SEQ ID NO: 17996 - RNA, 22 nt, Human
ggagcaugcgcucugugaccga

SEQ ID NO: 17997 - RNA, 22 nt, Human
ggagccagagggaugcaguuga

SEQ ID NO: 17998 - RNA, 23 nt, Human
ggagccagccuguggggagcggg

SEQ ID NO: 17999 - RNA, 18 nt, Human
ggagcccacggcguccca

SEQ ID NO: 18000 - RNA, 22 nt, Human
ggagccccaauugagcaguacg

SEQ ID NO: 18001 - RNA, 22 nt, Human
ggagcccucaccggcgagugcc

SEQ ID NO: 18002 - RNA, 22 nt, Human
ggagccugaaaagucugcauuu

SEQ ID NO: 18003 - RNA, 22 nt, Human
ggagccugagcggcccagggcc

SEQ ID NO: 18004 - RNA, 19 nt, Human
ggagccuggagcacgugcc

SEQ ID NO: 18005 - RNA, 22 nt, Human
ggagccuggaguuucugauggg

SEQ ID NO: 18006 - RNA, 22 nt, Human
ggagccuggcaaugcugcgucc

SEQ ID NO: 18007 - RNA, 19 nt, Human
ggagccuggcaggggcgug

SEQ ID NO: 18008 - RNA, 22 nt, Human
ggagccugggcauuaguaauuu

SEQ ID NO: 18009 - RNA, 22 nt, Human
ggagccuggucagguuggcucc

SEQ ID NO: 18010 - RNA, 22 nt, Human
ggagccugugcccaagcccaga

SEQ ID NO: 18011 - RNA, 22 nt, Human
ggagccuuacuagaaugugagc

SEQ ID NO: 18012 - RNA, 22 nt, Human
ggagccuuagacaucugauccu

SEQ ID NO: 18013 - RNA, 22 nt, Human
ggagccuugggcgcucucccau

SEQ ID NO: 18014 - RNA, 22 nt, Human
ggagcucuccugaugugaagau

SEQ ID NO: 18015 - RNA, 22 nt, Human
ggagcugaaccccaucgugcug

SEQ ID NO: 18016 - RNA, 22 nt, Human
ggagcugaugguagaagaauga

SEQ ID NO: 18017 - RNA, 21 nt, Human
ggagcugcaggagccgaaggc

SEQ ID NO: 18018 - RNA, 20 nt, Human
ggagcugcccugggcuggag

SEQ ID NO: 18019 - RNA, 23 nt, Human
ggagcuggacccuuacaccuuuc

SEQ ID NO: 18020 - RNA, 22 nt, Human
ggagcuggagagcuagccuagg

SEQ ID NO: 18021 - RNA, 20 nt, Human
ggagcuggcauccagccucu

SEQ ID NO: 18022 - RNA, 22 nt, Human
ggagcugggaauuggaucaucu

SEQ ID NO: 18023 - RNA, 22 nt, Human
ggagcugucuguagggcacagg

SEQ ID NO: 18024 - RNA, 22 nt, Human
ggagcugugcagugacuacaga

SEQ ID NO: 18025 - RNA, 22 nt, Human
ggagcugugggacgcuguccca

SEQ ID NO: 18026 - RNA, 22 nt, Human
ggagcuguguuauccauuccca

SEQ ID NO: 18027 - RNA, 19 nt, Human
ggagcuugguggcuguggc

SEQ ID NO: 18028 - RNA, 21 nt, Human
ggaggaaaaaggaaugacuug

SEQ ID NO: 18029 - RNA, 22 nt, Human
ggaggaaaggcucccucccucu

SEQ ID NO: 18030 - RNA, 22 nt, Human
ggaggaagagguuguucucuca

SEQ ID NO: 18031 - RNA, 22 nt, Human
ggaggaagcacacggcuuguau

SEQ ID NO: 18032 - RNA, 22 nt, Human
ggaggaaggguagcauaaugua

SEQ ID NO: 18033 - RNA, 22 nt, Human
ggaggaagugcaguucuacuac

SEQ ID NO: 18034 - RNA, 22 nt, Human
ggaggaccugcuggcccugcaa

SEQ ID NO: 18035 - RNA, 22 nt, Human
ggaggagcacuugacggggucu

SEQ ID NO: 18036 - RNA, 22 nt, Human
ggaggaggcaaguaccagaugc

SEQ ID NO: 18037 - RNA, 22 nt, Human
ggaggagguggguuaaguugua

SEQ ID NO: 18038 - RNA, 22 nt, Human
ggaggagucaguugggcugcuu

SEQ ID NO: 18039 - RNA, 17 nt, Human
ggaggcaacagacaggg

SEQ ID NO: 18040 - RNA, 22 nt, Human
ggaggcacaccucagacuggga

SEQ ID NO: 18041 - RNA, 22 nt, Human
ggaggcacuucccgucucagcc

SEQ ID NO: 18042 - RNA, 22 nt, Human
ggaggcagaauagagugugggu

SEQ ID NO: 18043 - RNA, 22 nt, Human
ggaggcaggaaagacagguuca

SEQ ID NO: 18044 - RNA, 22 nt, Human
ggaggcaucucuguggcugucu

SEQ ID NO: 18045 - RNA, 22 nt, Human
ggaggccaaggcgggcggauca

SEQ ID NO: 18046 - RNA, 22 nt, Human
ggaggccacgguuuagcaccga

SEQ ID NO: 18047 - RNA, 15 nt, Human
ggaggccaggcugug

SEQ ID NO: 18048 - RNA, 22 nt, Human
ggaggccauaguuugggaguca

SEQ ID NO: 18049 - RNA, 22 nt, Human
ggaggccaucagggagggcauu

SEQ ID NO: 18050 - RNA, 22 nt, Human
ggaggccaucuggcuggaggcu

SEQ ID NO: 18051 - RNA, 22 nt, Human
ggaggcccagaaggaagcccag

SEQ ID NO: 18052 - RNA, 22 nt, Human
ggaggccuagccagcuccaguu

SEQ ID NO: 18053 - RNA, 22 nt, Human
ggaggccuugccugcaggcaca

SEQ ID NO: 18054 - RNA, 22 nt, Human
ggaggcggagcuugcagugagc

SEQ ID NO: 18055 - RNA, 22 nt, Human
ggaggcuccuaagcugacuuga

SEQ ID NO: 18056 - RNA, 22 nt, Human
ggaggcucgcuggucgcacagc

SEQ ID NO: 18057 - RNA, 22 nt, Human
ggaggcucuccuggccuugucu

SEQ ID NO: 18058 - RNA, 22 nt, Human
ggaggcucugccaucugucaca

SEQ ID NO: 18059 - RNA, 22 nt, Human
ggaggcugagaaguccaagauc

SEQ ID NO: 18060 - RNA, 22 nt, Human
ggaggcugagaggucgcagugg

SEQ ID NO: 18061 - RNA, 22 nt, Human
ggagggagcagagaacccaacc

SEQ ID NO: 18062 - RNA, 22 nt, Human
ggagggcacaggaccagaaauc

SEQ ID NO: 18063 - RNA, 18 nt, Human
uaugugcauaugugugua

SEQ ID NO: 18064 - RNA, 22 nt, Human
uauguggaaaaugcacuuaaaa

SEQ ID NO: 18065 - RNA, 22 nt, Human
uauguggccuuuuaugucugac

SEQ ID NO: 18066 - RNA, 23 nt, Human
uauguguaaggagaaggagugag

SEQ ID NO: 18067 - RNA, 22 nt, Human
uauguguaaucaaacacaugcu

SEQ ID NO: 18068 - RNA, 22 nt, Human
uauguguaggaggaggacaggg

SEQ ID NO: 18069 - RNA, 22 nt, Human
uauguguagugugaucccaaug

SEQ ID NO: 18070 - RNA, 22 nt, Human
uauguguauuuaguucuauaca

SEQ ID NO: 18071 - RNA, 21 nt, Human
uaugugucuguggaaaacuag

SEQ ID NO: 18072 - RNA, 22 nt, Human
uaugugucuuuaucuggcucuu

SEQ ID NO: 18073 - RNA, 19 nt, Human
uaugugugcauuugugcau

SEQ ID NO: 18074 - RNA, 22 nt, Human
uauguguggcagcugggagugu

SEQ ID NO: 18075 - RNA, 22 nt, Human
uauguguguuucaguggaaaug

SEQ ID NO: 18076 - RNA, 22 nt, Human
uauguguuguauaugugcagag

SEQ ID NO: 18077 - RNA, 21 nt, Human
uauguuagugauguuuguagg

SEQ ID NO: 18078 - RNA, 22 nt, Human
uauguuauauuuugucaauugu

SEQ ID NO: 18079 - RNA, 22 nt, Human
uauguucaugucaaacaaaugc

SEQ ID NO: 18080 - RNA, 22 nt, Human
uauguucuaggaaugguugaug

SEQ ID NO: 18081 - RNA, 22 nt, Human
uauguuguggggugcaucaaaa

SEQ ID NO: 18082 - RNA, 22 nt, Human
uauguuucauucuuuucuggua

SEQ ID NO: 18083 - RNA, 22 nt, Human
uauguuuccugagcuuacacca

SEQ ID NO: 18084 - RNA, 22 nt, Human
uauguuucuuccuuuucauaca

SEQ ID NO: 18085 - RNA, 22 nt, Human
uauguuuuuaagagaaugcauu

SEQ ID NO: 18086 - RNA, 23 nt, Human
uauuacaauuggucuuauuaaga

SEQ ID NO: 18087 - RNA, 22 nt, Human
uauuacaguucgaguuucuagg

SEQ ID NO: 18088 - RNA, 22 nt, Human
uauuacauccacuuuuauugca

SEQ ID NO: 18089 - RNA, 22 nt, Human
uauuacugucaauaucacagaa

SEQ ID NO: 18090 - RNA, 22 nt, Human
uauuacuguuacuucacacugu

SEQ ID NO: 18091 - RNA, 22 nt, Human
uauuagagaaaagauggaugug

SEQ ID NO: 18092 - RNA, 22 nt, Human
uauuagaggaaccaagguggag

SEQ ID NO: 18093 - RNA, 22 nt, Human
uauuagcagcaugagaaugggc

SEQ ID NO: 18094 - RNA, 22 nt, Human
uauuagcgucaggaggugagua

SEQ ID NO: 18095 - RNA, 22 nt, Human
uauuagcucaugauuucggugg

SEQ ID NO: 18096 - RNA, 23 nt, Human
uauuagggccaggacuggcaaau

SEQ ID NO: 18097 - RNA, 18 nt, Human
ggagucucaggagaggaa

SEQ ID NO: 18098 - RNA, 22 nt, Human
ggagucugaguccucauagaca

SEQ ID NO: 18099 - RNA, 22 nt, Human
ggagucugcucccagacaugau

SEQ ID NO: 18100 - RNA, 22 nt, Human
ggagucuucagauagaguauuu

SEQ ID NO: 18101 - RNA, 22 nt, Human
ggagugaaagguaaguugagcu

SEQ ID NO: 18102 - RNA, 22 nt, Human
ggagugacucacagcugggaca

SEQ ID NO: 18103 - RNA, 22 nt, Human
ggagugauggaaagugcuuggc

SEQ ID NO: 18104 - RNA, 22 nt, Human
ggagugggaacaaugacauggu

SEQ ID NO: 18105 - RNA, 22 nt, Human
ggaguguggagaggacaugggu

SEQ ID NO: 18106 - RNA, 22 nt, Human
ggagugugggauggagcucagg

SEQ ID NO: 18107 - RNA, 23 nt, Human
ggaguuggauuguacuugcugcu

SEQ ID NO: 18108 - RNA, 22 nt, Human
ggaguuguucugcaggagagaa

SEQ ID NO: 18109 - RNA, 21 nt, Human
ggaguuuuucuggaagggacu

SEQ ID NO: 18110 - RNA, 22 nt, Human
ggauaaagucuuuagguggaca

SEQ ID NO: 18111 - RNA, 21 nt, Human
ggauaaauggucugguuucuc

SEQ ID NO: 18112 - RNA, 19 nt, Human
ggauaagguuggagugauc

SEQ ID NO: 18113 - RNA, 22 nt, Human
ggauacaagguguucuaucacu

SEQ ID NO: 18114 - RNA, 22 nt, Human
ggauagugggagaaugcuaugu

SEQ ID NO: 18115 - RNA, 22 nt, Human
ggaucacacaugcacuguuuga

SEQ ID NO: 18116 - RNA, 22 nt, Human
ggaucaggcugaagcuaggacu

SEQ ID NO: 18117 - RNA, 22 nt, Human
ggauccagaggugaagauggga

SEQ ID NO: 18118 - RNA, 22 nt, Human
ggaucugauuaauaagguggac

SEQ ID NO: 18119 - RNA, 22 nt, Human
ggaugacaaggaaagcaaacca

SEQ ID NO: 18120 - RNA, 22 nt, Human
ggaugcacgaaggcgccucgga

SEQ ID NO: 18121 - RNA, 22 nt, Human
ggaugcaggacggcauggaugu

SEQ ID NO: 18122 - RNA, 22 nt, Human
ggaugcaggaguugaagaagga

SEQ ID NO: 18123 - RNA, 21 nt, Human
ggaugccacgaagcaccagga

SEQ ID NO: 18124 - RNA, 22 nt, Human
ggaugcugacuuuggagcaugg

SEQ ID NO: 18125 - RNA, 22 nt, Human
ggaugcugauauagagcauucu

SEQ ID NO: 18126 - RNA, 18 nt, Human
ggaugcugugugcuccuu

SEQ ID NO: 18127 - RNA, 22 nt, Human
ggauggagguucucagaugcuc

SEQ ID NO: 18128 - RNA, 22 nt, Human
ggauggcaggacaaggacccag

SEQ ID NO: 18129 - RNA, 22 nt, Human
ggauggcagucugcaugagaaa

SEQ ID NO: 18130 - RNA, 20 nt, Human
ggauggccggaccagagccu

SEQ ID NO: 18131 - RNA, 22 nt, Human
ggauggcuguaaaaggugggaa

SEQ ID NO: 18132 - RNA, 22 nt, Human
ggaugggcugaaagguagcccc

SEQ ID NO: 18133 - RNA, 22 nt, Human
ggauguagugcaaggagugaau

SEQ ID NO: 18134 - RNA, 22 nt, Human
ggaugucuaggguuuaugugcc

SEQ ID NO: 18135 - RNA, 22 nt, Human
ggaugucuggucuauuucaagu

SEQ ID NO: 18136 - RNA, 22 nt, Human
ggauuagaggugaugauuauaa

SEQ ID NO: 18137 - RNA, 22 nt, Human
ggauuagcuuuuguucuugacu

SEQ ID NO: 18138 - RNA, 22 nt, Human
ggauucagcgaggcagccugga

SEQ ID NO: 18139 - RNA, 22 nt, Human
ggauuugggcuugcagcagagc

SEQ ID NO: 18140 - RNA, 22 nt, Human
ggauuuuagaguaccuaagugu

SEQ ID NO: 18141 - RNA, 22 nt, Human
ggcaaaaaccauaauuacuuuu

SEQ ID NO: 18142 - RNA, 22 nt, Human
ggcaaaaaccgcaauaacuucu

SEQ ID NO: 18143 - RNA, 22 nt, Human
ggcaaaaguauuaucucuuuaa

SEQ ID NO: 18144 - RNA, 22 nt, Human
ggcaaacacaccucggugagaa

SEQ ID NO: 18145 - RNA, 22 nt, Human
ggcaaacaccaggcgagggagc

SEQ ID NO: 18146 - RNA, 22 nt, Human
ggcaaacuacauuuuugaaaua

SEQ ID NO: 18147 - RNA, 22 nt, Human
ggcaaagcccugccugguucaa

SEQ ID NO: 18148 - RNA, 22 nt, Human
ggcaaagccuuccagcuguuac

SEQ ID NO: 18149 - RNA, 19 nt, Human
ggcaaauugaggccaguca

SEQ ID NO: 18150 - RNA, 22 nt, Human
ggcaaauugcugcaauuacuua

SEQ ID NO: 18151 - RNA, 21 nt, Human
ggcaacagauauuuugcuuag

SEQ ID NO: 18152 - RNA, 22 nt, Human
ggcaagaaccacaauuacuuuu

SEQ ID NO: 18153 - RNA, 20 nt, Human
ggcaagcaacugagggagga

SEQ ID NO: 18154 - RNA, 22 nt, Human
ggcaagcauaaccuguacagcc

SEQ ID NO: 18155 - RNA, 22 nt, Human
ggcaaggccaggccuccaagac

SEQ ID NO: 18156 - RNA, 22 nt, Human
ggcaaggggucaggcugagaca

SEQ ID NO: 18157 - RNA, 22 nt, Human
ggcaaggugcuacagacaguga

SEQ ID NO: 18158 - RNA, 22 nt, Human
ggcaaguaauacaggauuauuu

SEQ ID NO: 18159 - RNA, 22 nt, Human
ggcaagucaggaaguugacauu

SEQ ID NO: 18160 - RNA, 22 nt, Human
ggcaaucauuggcauucucugg

SEQ ID NO: 18161 - RNA, 22 nt, Human
ggcaauguagauucuguagauu

SEQ ID NO: 18162 - RNA, 22 nt, Human
ggcaauguuucgaugggagcug

SEQ ID NO: 18163 - RNA, 21 nt, Human
ggcaauuaggcuucugaguau

SEQ ID NO: 18164 - RNA, 22 nt, Human
ggcaauuucaugugguuuaaac

SEQ ID NO: 18165 - RNA, 22 nt, Human
ggcacagagaggcccuggaagg

SEQ ID NO: 18166 - RNA, 22 nt, Human
ggcacagcaagaagggaaauga

SEQ ID NO: 18167 - RNA, 22 nt, Human
ggcacagcacagagcacaugua

SEQ ID NO: 18168 - RNA, 22 nt, Human
ggcacagcacaguggacccagg

SEQ ID NO: 18169 - RNA, 22 nt, Human
ggcacagcaccuuuucacauug

SEQ ID NO: 18170 - RNA, 22 nt, Human
ggcacagcccucucuguggaca

SEQ ID NO: 18171 - RNA, 22 nt, Human
ggcacagcuacuugcucacucu

SEQ ID NO: 18172 - RNA, 22 nt, Human
ggcacagcugaugcagacacac

SEQ ID NO: 18173 - RNA, 22 nt, Human
ggcacaggaaucugugaagugc

SEQ ID NO: 18174 - RNA, 22 nt, Human
ggcacagggggcugaggacuag

SEQ ID NO: 18175 - RNA, 17 nt, Human
ggcaccagacggagagu

SEQ ID NO: 18176 - RNA, 23 nt, Human
ggcaccaggccauggagcgggag

SEQ ID NO: 18177 - RNA, 22 nt, Human
ggcaccagggaaggaaggcugg

SEQ ID NO: 18178 - RNA, 22 nt, Human
uauuuauguauguggauguguu

SEQ ID NO: 18179 - RNA, 22 nt, Human
uauuuauuggacaguguugcug

SEQ ID NO: 18180 - RNA, 22 nt, Human
uauuucacagcagcucauuuaa

SEQ ID NO: 18181 - RNA, 22 nt, Human
uauuucacuccgagacucuaug

SEQ ID NO: 18182 - RNA, 22 nt, Human
uauuucaggggguacaagaaga

SEQ ID NO: 18183 - RNA, 22 nt, Human
uauuucauucuuuaucaggagc

SEQ ID NO: 18184 - RNA, 22 nt, Human
uauuuccaaaaaggccauauuc

SEQ ID NO: 18185 - RNA, 22 nt, Human
uauuuccaaaagccuauuauga

SEQ ID NO: 18186 - RNA, 22 nt, Human
uauuuccaccuauuauuuucug

SEQ ID NO: 18187 - RNA, 22 nt, Human
uauuuccugcauggugauguaa

SEQ ID NO: 18188 - RNA, 22 nt, Human
uauuucuaagagauaucuguac

SEQ ID NO: 18189 - RNA, 22 nt, Human
uauuucuaagcuguaagucuga

SEQ ID NO: 18190 - RNA, 22 nt, Human
uauuucucagcauuuuacaucc

SEQ ID NO: 18191 - RNA, 22 nt, Human
uauuucucucacgguugccugg

SEQ ID NO: 18192 - RNA, 22 nt, Human
uauuucugaauccaaaagguca

SEQ ID NO: 18193 - RNA, 22 nt, Human
uauuucuuguuauucucguuga

SEQ ID NO: 18194 - RNA, 22 nt, Human
uauuucuuguucccuccaaguu

SEQ ID NO: 18195 - RNA, 22 nt, Human
uauuucuuucagguauguguug

SEQ ID NO: 18196 - RNA, 21 nt, Human
uauuucuuugacucucucccu

SEQ ID NO: 18197 - RNA, 22 nt, Human
uauuugaaaguguacaaaaacu

SEQ ID NO: 18198 - RNA, 20 nt, Human
uauuugaaauggccaagugu

SEQ ID NO: 18199 - RNA, 22 nt, Human
uauuugcaaagaacuacacuag

SEQ ID NO: 18200 - RNA, 22 nt, Human
uauuugcucaacccugccucca

SEQ ID NO: 18201 - RNA, 22 nt, Human
uauuugcucaauaauaguuuua

SEQ ID NO: 18202 - RNA, 22 nt, Human
uauuuggaaaagggaagggaca

SEQ ID NO: 18203 - RNA, 22 nt, Human
uauuuggaaaguuuaucuaucu

SEQ ID NO: 18204 - RNA, 22 nt, Human
uauuuggaagguauaaacacaa

SEQ ID NO: 18205 - RNA, 22 nt, Human
uauuuggagccuauccauagau

SEQ ID NO: 18206 - RNA, 17 nt, Human
agucauauugugcaguu

SEQ ID NO: 18207 - RNA, 22 nt, Human
agucauauuuagcuuguggaau

SEQ ID NO: 18208 - RNA, 22 nt, Human
agucaucauguacagagagcaa

SEQ ID NO: 18209 - RNA, 22 nt, Human
agucaucauuuauaucaagucu

SEQ ID NO: 18210 - RNA, 22 nt, Human
agucaucuccaauauacaaagc

SEQ ID NO: 18211 - RNA, 22 nt, Human
agucaucucugagauagaagcu

SEQ ID NO: 18212 - RNA, 22 nt, Human
agucaucucuucuacaauaugg

SEQ ID NO: 18213 - RNA, 22 nt, Human
agucauguguucaucuuucauu

SEQ ID NO: 18214 - RNA, 22 nt, Human
agucauuaauuaguaggaaggu

SEQ ID NO: 18215 - RNA, 22 nt, Human
agucauuacagcaggcagaagg

SEQ ID NO: 18216 - RNA, 20 nt, Human
agucauuggguguccuucgg

SEQ ID NO: 18217 - RNA, 22 nt, Human
agucauuguaugaaguguacuc

SEQ ID NO: 18218 - RNA, 22 nt, Human
agucauuuggagcaccuuauua

SEQ ID NO: 18219 - RNA, 22 nt, Human
agucauuuugcuaaaugagggu

SEQ ID NO: 18220 - RNA, 22 nt, Human
aguccaaagcagaugagggcca

SEQ ID NO: 18221 - RNA, 22 nt, Human
aguccaagaccaaggugucacc

SEQ ID NO: 18222 - RNA, 22 nt, Human
aguccaagaucaaggugucagg

SEQ ID NO: 18223 - RNA, 22 nt, Human
aguccaaggagagacagcauuu

SEQ ID NO: 18224 - RNA, 22 nt, Human
aguccaauaaccucuuuccuuc

SEQ ID NO: 18225 - RNA, 22 nt, Human
aguccagaccccggcagcuggu

SEQ ID NO: 18226 - RNA, 21 nt, Human
aguccaggaggaggccagguu

SEQ ID NO: 18227 - RNA, 21 nt, Human
aguccaggccugcccacuucc

SEQ ID NO: 18228 - RNA, 22 nt, Human
aguccaggucucugagucacaa

SEQ ID NO: 18229 - RNA, 22 nt, Human
aguccagugaacuguaaauagg

SEQ ID NO: 18230 - RNA, 22 nt, Human
aguccauaguuuacauuacagc

SEQ ID NO: 18231 - RNA, 22 nt, Human
aguccaugaugaaaccagaucc

SEQ ID NO: 18232 - RNA, 22 nt, Human
aguccaugcugucuacagaauc

SEQ ID NO: 18233 - RNA, 22 nt, Human
aguccaugguucugacucaucu

SEQ ID NO: 18234 - RNA, 22 nt, Human
aguccaugguuguaguucucuc

SEQ ID NO: 18235 - RNA, 22 nt, Human
agucccagacuccaguuuucug

SEQ ID NO: 18236 - RNA, 20 nt, Human
agucccagaucaaauuucug

SEQ ID NO: 18237 - RNA, 22 nt, Human
agucccagaucuccauucgguc

SEQ ID NO: 18238 - RNA, 22 nt, Human
agucccaguucgguucuuccuc

SEQ ID NO: 18239 - RNA, 18 nt, Human
agucccaucuucagcucu

SEQ ID NO: 18240 - RNA, 22 nt, Human
aguccccucuaacccaacuuua

SEQ ID NO: 18241 - RNA, 22 nt, Human
agucccuggauugucucuguca

SEQ ID NO: 18242 - RNA, 20 nt, Human
agucccuuuggucagguauu

SEQ ID NO: 18243 - RNA, 22 nt, Human
aguccuagacuuuucugccacu

SEQ ID NO: 18244 - RNA, 22 nt, Human
aguccucugcugugcgucuuug

SEQ ID NO: 18245 - RNA, 22 nt, Human
aguccucuggaguaugccuuau

SEQ ID NO: 18246 - RNA, 18 nt, Human
aguccuggagaucaccaa

SEQ ID NO: 18247 - RNA, 22 nt, Human
aguccuggcauauagguccuca

SEQ ID NO: 18248 - RNA, 22 nt, Human
aguccuggcauggaauuguccc

SEQ ID NO: 18249 - RNA, 22 nt, Human
aguccuggccccaaggaaggau

SEQ ID NO: 18250 - RNA, 22 nt, Human
aguccugggucuggagaaugga

SEQ ID NO: 18251 - RNA, 22 nt, Human
aguccuguaucugagcugaguc

SEQ ID NO: 18252 - RNA, 22 nt, Human
aguccugucaccucuacuuucg

SEQ ID NO: 18253 - RNA, 22 nt, Human
aguccugugaguuuuucuaguu

SEQ ID NO: 18254 - RNA, 22 nt, Human
aguccuuaugagaugcugccuu

SEQ ID NO: 18255 - RNA, 22 nt, Human
aguccuuaugugguggagagag

SEQ ID NO: 18256 - RNA, 22 nt, Human
aguccuucaagaaaucuggaaa

SEQ ID NO: 18257 - RNA, 22 nt, Human
agucuagggugggguccacagg

SEQ ID NO: 18258 - RNA, 22 nt, Human
agucuauugccuaacagagagg

SEQ ID NO: 18259 - RNA, 22 nt, Human
agucuauuuccccuucucuuga

SEQ ID NO: 18260 - RNA, 22 nt, Human
agucuauuuuugguucuucggg

SEQ ID NO: 18261 - RNA, 23 nt, Human
agucucaagcuggagaauuaccu

SEQ ID NO: 18262 - RNA, 22 nt, Human
agucucacuucuugagcuaugc

SEQ ID NO: 18263 - RNA, 22 nt, Human
agucucagaaaagaagcaugga

SEQ ID NO: 18264 - RNA, 18 nt, Human
agucucagcggaggagua

SEQ ID NO: 18265 - RNA, 22 nt, Human
agucucagggccacccggggaa

SEQ ID NO: 18266 - RNA, 22 nt, Human
agucuccuuaaauauuucccag

SEQ ID NO: 18267 - RNA, 22 nt, Human
agucuccuuggccucaaugccu

SEQ ID NO: 18268 - RNA, 20 nt, Human
agucucucccagaaugagca

SEQ ID NO: 18269 - RNA, 19 nt, Human
agucucugaggccuaaguu

SEQ ID NO: 18270 - RNA, 20 nt, Human
agucucugcaacauagugca

SEQ ID NO: 18271 - RNA, 22 nt, Human
agucucugcaugaugcagcaca

SEQ ID NO: 18272 - RNA, 22 nt, Human
agucucuuggcauucugaaaca

SEQ ID NO: 18273 - RNA, 22 nt, Human
agucucuuuguauaaauaggca

SEQ ID NO: 18274 - RNA, 22 nt, Human
agucugaaauaaugucacuaag

SEQ ID NO: 18275 - RNA, 22 nt, Human
agucugaaccagauggcaaggu

SEQ ID NO: 18276 - RNA, 22 nt, Human
agucugaggcacccugaauauu

SEQ ID NO: 18277 - RNA, 21 nt, Human
agucugagguggggccuagga

SEQ ID NO: 18278 - RNA, 22 nt, Human
agucugaguuaguggaaaugua

SEQ ID NO: 18279 - RNA, 22 nt, Human
agucugcacucagguggagguc

SEQ ID NO: 18280 - RNA, 22 nt, Human
agucugcaggaccgcgucacau

SEQ ID NO: 18281 - RNA, 22 nt, Human
agucugcuuccuggagaacuca

SEQ ID NO: 18282 - RNA, 22 nt, Human
agucuggaguagagccuagaaa

SEQ ID NO: 18283 - RNA, 20 nt, Human
agucuggcaccuauuccugu

SEQ ID NO: 18284 - RNA, 22 nt, Human
agucuggccuugccuugucgag

SEQ ID NO: 18285 - RNA, 17 nt, Human
agucugggaccugcgug

SEQ ID NO: 18286 - RNA, 22 nt, Human
agucugggagaaggugagauua

SEQ ID NO: 18287 - RNA, 22 nt, Human
agucugggaggcuuauaaacag

SEQ ID NO: 18288 - RNA, 22 nt, Human
agucugggcauuuaggauguug

SEQ ID NO: 18289 - RNA, 22 nt, Human
agucugggcugucugcaggagu

SEQ ID NO: 18290 - RNA, 22 nt, Human
agucuggggucugguagaacga

SEQ ID NO: 18291 - RNA, 22 nt, Human
agucugggugugaaugaacuug

SEQ ID NO: 18292 - RNA, 22 nt, Human
agucugguaauguagcucaacc

SEQ ID NO: 18293 - RNA, 22 nt, Human
agucuggugcucgcucugcuuc

SEQ ID NO: 18294 - RNA, 22 nt, Human
auuguuuuccaaagaugcugcu

SEQ ID NO: 18295 - RNA, 22 nt, Human
auuuaaauuuucugauggagag

SEQ ID NO: 18296 - RNA, 22 nt, Human
auuuaacuuucagccccucuuc

SEQ ID NO: 18297 - RNA, 22 nt, Human
auuuaagaggcugcuagaguau

SEQ ID NO: 18298 - RNA, 23 nt, Human
auuuaaugcugaguugaauguua

SEQ ID NO: 18299 - RNA, 22 nt, Human
auuuaauggguagacauuguua

SEQ ID NO: 18300 - RNA, 22 nt, Human
auuuaauuaaucauggugaauu

SEQ ID NO: 18301 - RNA, 22 nt, Human
auuuaauuuauagauguggaua

SEQ ID NO: 18302 - RNA, 22 nt, Human
auuuaauuuggagagagaaacc

SEQ ID NO: 18303 - RNA, 22 nt, Human
auuuaauuuucucaacagugcu

SEQ ID NO: 18304 - RNA, 22 nt, Human
auuuacacauucauaagauuuc

SEQ ID NO: 18305 - RNA, 22 nt, Human
auuuacaccuucuucgauucuc

SEQ ID NO: 18306 - RNA, 22 nt, Human
auuuacagacccucccacuaag

SEQ ID NO: 18307 - RNA, 22 nt, Human
auuuacagguagaauuuuaagu

SEQ ID NO: 18308 - RNA, 22 nt, Human
auuuaccauauguacugaguau

SEQ ID NO: 18309 - RNA, 22 nt, Human
auuuaccauccugugaauggcc

SEQ ID NO: 18310 - RNA, 19 nt, Human
auuuacugccuaaaaucuc

SEQ ID NO: 18311 - RNA, 22 nt, Human
auuuacuggaaaaacuaugagc

SEQ ID NO: 18312 - RNA, 22 nt, Human
auuuagaaauuccaaaaguauu

SEQ ID NO: 18313 - RNA, 22 nt, Human
auuuagaaccccuuccaaccug

SEQ ID NO: 18314 - RNA, 22 nt, Human
auuuagacucucaccuccaccu

SEQ ID NO: 18315 - RNA, 22 nt, Human
aguuuacauaaaaaggcagagg

SEQ ID NO: 18316 - RNA, 22 nt, Human
aguuuacaucuucaaucucauu

SEQ ID NO: 18317 - RNA, 22 nt, Human
auagcacuuauagauuuggucu

SEQ ID NO: 18318 - RNA, 22 nt, Human
auagcagcaucaguuuaucucc

SEQ ID NO: 18319 - RNA, 19 nt, Human
auagcagcuauacccagau

SEQ ID NO: 18320 - RNA, 22 nt, Human
auagcagugacauuuuaaugug

SEQ ID NO: 18321 - RNA, 22 nt, Human
auagcauggccaggaagcuggg

SEQ ID NO: 18322 - RNA, 22 nt, Human
auagcauggccugugacacuuu

SEQ ID NO: 18323 - RNA, 22 nt, Human
auagccagcauauagcagggag

SEQ ID NO: 18324 - RNA, 22 nt, Human
auagccuugguccuugcuccac

SEQ ID NO: 18325 - RNA, 22 nt, Human
auagcuguuagauuggggucga

SEQ ID NO: 18326 - RNA, 22 nt, Human
auagcuuacaggugauaucagc

SEQ ID NO: 18327 - RNA, 19 nt, Human
auagcuugucagcugcucc

SEQ ID NO: 18328 - RNA, 20 nt, Human
auaggaaagggaggggcuuu

SEQ ID NO: 18329 - RNA, 22 nt, Human
auaggaaaucgcuauuaaccua

SEQ ID NO: 18330 - RNA, 22 nt, Human
auaggaauuucuucagcacuga

SEQ ID NO: 18331 - RNA, 22 nt, Human
auaggagaucaauaugcaauuu

SEQ ID NO: 18332 - RNA, 22 nt, Human
auaggagccauaaauaaaaucu

SEQ ID NO: 18333 - RNA, 22 nt, Human
auaggcaaauuaauaagucaua

SEQ ID NO: 18334 - RNA, 22 nt, Human
auaggccauuugagggccaggu

SEQ ID NO: 18335 - RNA, 22 nt, Human
auaggcuuauauaaaaacaucu

SEQ ID NO: 18336 - RNA, 22 nt, Human
auaggcuuuccugauucucagg

SEQ ID NO: 18337 - RNA, 22 nt, Human
auaggcuuuguguuuuguuauc

SEQ ID NO: 18338 - RNA, 22 nt, Human
auagggaggaacugagucagga

SEQ ID NO: 18339 - RNA, 22 nt, Human
auagggcauccuuuauugagau

SEQ ID NO: 18340 - RNA, 22 nt, Human
auagggcuguugugaggauuaa

SEQ ID NO: 18341 - RNA, 22 nt, Human
auagguacagcagauauucuua

SEQ ID NO: 18342 - RNA, 22 nt, Human
auaggucugaaaguguauccug

SEQ ID NO: 18343 - RNA, 20 nt, Human
auaguaaugaagucuuguuc

SEQ ID NO: 18344 - RNA, 22 nt, Human
auaguacaagggaagagugaag

SEQ ID NO: 18345 - RNA, 22 nt, Human
auaguacacauccuacaauguu

SEQ ID NO: 18346 - RNA, 22 nt, Human
auaguacagcauuuuuccugag

SEQ ID NO: 18347 - RNA, 22 nt, Human
auaguagcgagaucucagcuca

SEQ ID NO: 18348 - RNA, 23 nt, Human
auagucugcgcaacugagagagg

SEQ ID NO: 18349 - RNA, 22 nt, Human
auagucuuacuuuucucugcua

SEQ ID NO: 18350 - RNA, 22 nt, Human
auagugaaaaugcugucagcau

SEQ ID NO: 18351 - RNA, 22 nt, Human
auagugauugaaaacauucugu

SEQ ID NO: 18352 - RNA, 22 nt, Human
auagugggaauuacgauauacu

SEQ ID NO: 18353 - RNA, 22 nt, Human
auaguggugagcugcauuuaug

SEQ ID NO: 18354 - RNA, 22 nt, Human
auagugguuggauaugucagag

SEQ ID NO: 18355 - RNA, 22 nt, Human
auagugugacugaggaguugaa

SEQ ID NO: 18356 - RNA, 22 nt, Human
auaguguguaaagugcagugau

SEQ ID NO: 18357 - RNA, 22 nt, Human
auagugugugguauagguagag

SEQ ID NO: 18358 - RNA, 22 nt, Human
auaguguuuuacuuagacuucu

SEQ ID NO: 18359 - RNA, 22 nt, Human
auaguuacaaagacuuuuuaaa

SEQ ID NO: 18360 - RNA, 22 nt, Human
auaguuauuagagaagcuggua

SEQ ID NO: 18361 - RNA, 22 nt, Human
auaguuccagcaucuuugguaa

SEQ ID NO: 18362 - RNA, 22 nt, Human
auaguuccuacuuugcacuaau

SEQ ID NO: 18363 - RNA, 22 nt, Human
auaguucucacucagaauuuga

SEQ ID NO: 18364 - RNA, 23 nt, Human
auaguucugcuuagaaaucagug

SEQ ID NO: 18365 - RNA, 22 nt, Human
auaguucuggauguacuuauag

SEQ ID NO: 18366 - RNA, 22 nt, Human
auaguuuacaaaaaugaugcau

SEQ ID NO: 18367 - RNA, 21 nt, Human
auaguuuggagugggaaaguc

SEQ ID NO: 18368 - RNA, 22 nt, Human
auaguuugugaaacacagcagu

SEQ ID NO: 18369 - RNA, 22 nt, Human
auaguuuucuaugcacuguuau

SEQ ID NO: 18370 - RNA, 22 nt, Human
auauaaaguguuuagaaagcug

SEQ ID NO: 18371 - RNA, 22 nt, Human
auauaauacaaccugcuaagug

SEQ ID NO: 18372 - RNA, 22 nt, Human
auauaauaguuucauaaaggcu

SEQ ID NO: 18373 - RNA, 22 nt, Human
auauaauucucagguuugacua

SEQ ID NO: 18374 - RNA, 22 nt, Human
auauacacauguguauacauuu

SEQ ID NO: 18375 - RNA, 22 nt, Human
auauacacauuugcuuaugugu

SEQ ID NO: 18376 - RNA, 22 nt, Human
auauacacucaccaugguauuu

SEQ ID NO: 18377 - RNA, 22 nt, Human
auauacacuccacugauacagg

SEQ ID NO: 18378 - RNA, 22 nt, Human
auauacaugggaauauguggag

SEQ ID NO: 18379 - RNA, 22 nt, Human
auauaccugaaguugguaauua

SEQ ID NO: 18380 - RNA, 22 nt, Human
auauacuguagugguuuagagc

SEQ ID NO: 18381 - RNA, 22 nt, Human
auauacuuggagacuaucauug

SEQ ID NO: 18382 - RNA, 22 nt, Human
auauagaguaauuauuuggugu

SEQ ID NO: 18383 - RNA, 22 nt, Human
auauagguuaucauauuugccc

SEQ ID NO: 18384 - RNA, 22 nt, Human
auauagucaaacauauaugugu

SEQ ID NO: 18385 - RNA, 22 nt, Human
auauagucacacuuugcaggca

SEQ ID NO: 18386 - RNA, 22 nt, Human
auauaguuuaagaaaguacagu

SEQ ID NO: 18387 - RNA, 22 nt, Human
auauaguuuagguucgaauggg

SEQ ID NO: 18388 - RNA, 22 nt, Human
auauauagagcuagauguuaaa

SEQ ID NO: 18389 - RNA, 22 nt, Human
auauauaugcugauggcugcca

SEQ ID NO: 18390 - RNA, 22 nt, Human
auauauucuuaaagaaucugac

SEQ ID NO: 18391 - RNA, 22 nt, Human
auauauuggugucagaaagagu

SEQ ID NO: 18392 - RNA, 22 nt, Human
auaucaagauuauuagggucau

SEQ ID NO: 18393 - RNA, 22 nt, Human
auaucagacagaaagcauugac

SEQ ID NO: 18394 - RNA, 18 nt, Human
auaucagcuacuucaugg

SEQ ID NO: 18395 - RNA, 22 nt, Human
auaucaguaucuauguauuugu

SEQ ID NO: 18396 - RNA, 22 nt, Human
auaucauuauguuaugagcaca

SEQ ID NO: 18397 - RNA, 22 nt, Human
auauccaagaaacaauuaauuc

SEQ ID NO: 18398 - RNA, 22 nt, Human
auauccuuuacugugucacaga

SEQ ID NO: 18399 - RNA, 22 nt, Human
auaucuguguuucccuuuugcu

SEQ ID NO: 18400 - RNA, 21 nt, Human
auaugaacuguggacuuugga

SEQ ID NO: 18401 - RNA, 22 nt, Human
auaugaagaaucuaggauaggc

SEQ ID NO: 18402 - RNA, 22 nt, Human
auaugaaguuacagguaagaaa

SEQ ID NO: 18403 - RNA, 22 nt, Human
auaugaauuuggcuggaaaggu

SEQ ID NO: 18404 - RNA, 22 nt, Human
auaugacagcggauucacauau

SEQ ID NO: 18405 - RNA, 22 nt, Human
auaugacauaaaaucauuuuug

SEQ ID NO: 18406 - RNA, 22 nt, Human
auaugcaucugugugcgugucu

SEQ ID NO: 18407 - RNA, 22 nt, Human
auaugcaugcaugcuugugaga

SEQ ID NO: 18408 - RNA, 20 nt, Human
auaugcauguguuuucacuu

SEQ ID NO: 18409 - RNA, 22 nt, Human
auaugcauuuaccuggcauaua

SEQ ID NO: 18410 - RNA, 22 nt, Human
auaugccagcuccaaguaagag

SEQ ID NO: 18411 - RNA, 22 nt, Human
auaugccauuagcuagaaauaa

SEQ ID NO: 18412 - RNA, 22 nt, Human
auaugcuggaguacaggaaaua

SEQ ID NO: 18413 - RNA, 22 nt, Human
auaugcuuaugaugucucaagu

SEQ ID NO: 18414 - RNA, 22 nt, Human
auauggacuuaaaauuugaugu

SEQ ID NO: 18415 - RNA, 22 nt, Human
auauggcauucuuuuuaagggu

SEQ ID NO: 18416 - RNA, 22 nt, Human
auauggcauuuuaauguaugag

SEQ ID NO: 18417 - RNA, 23 nt, Human
auauggcuguuguguguuaacau

SEQ ID NO: 18418 - RNA, 22 nt, Human
auauguauguacgcacauauuc

SEQ ID NO: 18419 - RNA, 18 nt, Human
auauguuaauuagguagg

SEQ ID NO: 18420 - RNA, 22 nt, Human
auauguuuuuggaaagaacaca

SEQ ID NO: 18421 - RNA, 22 nt, Human
auauuaaugagcaaguaaguga

SEQ ID NO: 18422 - RNA, 22 nt, Human
auauuacauaaacaugagugaa

SEQ ID NO: 18423 - RNA, 22 nt, Human
auauuagcagugaucaaaaugg

SEQ ID NO: 18424 - RNA, 22 nt, Human
auacaacuuuaucuguaaugag

SEQ ID NO: 18425 - RNA, 18 nt, Human
auacaagaucaaguguuc

SEQ ID NO: 18426 - RNA, 20 nt, Human
auacaagaugaguaauuucu

SEQ ID NO: 18427 - RNA, 22 nt, Human
auacaagguggagucaggaaaa

SEQ ID NO: 18428 - RNA, 22 nt, Human
auacaaguugugauaauguaaa

SEQ ID NO: 18429 - RNA, 22 nt, Human
auacaauaguguuuguuuugag

SEQ ID NO: 18430 - RNA, 22 nt, Human
auacaaucuagucugucagcaa

SEQ ID NO: 18431 - RNA, 22 nt, Human
auacacauguuauuguggaagc

SEQ ID NO: 18432 - RNA, 22 nt, Human
auacaccaccuuggaucuuuca

SEQ ID NO: 18433 - RNA, 22 nt, Human
auacacuggccuuugcagagcc

SEQ ID NO: 18434 - RNA, 22 nt, Human
auauucacuccuggugagacua

SEQ ID NO: 18435 - RNA, 22 nt, Human
auauucugcuuuugaugcauuc

SEQ ID NO: 18436 - RNA, 22 nt, Human
auauucuucuuguucagacuau

SEQ ID NO: 18437 - RNA, 22 nt, Human
auauucuugaagggagauuaua

SEQ ID NO: 18438 - RNA, 22 nt, Human
auauugagaugaggauauuaac

SEQ ID NO: 18439 - RNA, 22 nt, Human
auauuguuaguaauauuucgaa

SEQ ID NO: 18440 - RNA, 22 nt, Human
auauuugcugagaaggagggag

SEQ ID NO: 18441 - RNA, 22 nt, Human
auauuuguaaaauucugugucu

SEQ ID NO: 18442 - RNA, 22 nt, Human
auauuugugguuuuuggcuccu

SEQ ID NO: 18443 - RNA, 22 nt, Human
auauuuguuagagucuaugugu

SEQ ID NO: 18444 - RNA, 22 nt, Human
auauuuucuggaacuaugccug

SEQ ID NO: 18445 - RNA, 22 nt, Human
auauuuuggcaaaugucuagau

SEQ ID NO: 18446 - RNA, 22 nt, Human
aucaaagauguuucagggugua

SEQ ID NO: 18447 - RNA, 20 nt, Human
aucaaaggcugauucagucc

SEQ ID NO: 18448 - RNA, 22 nt, Human
aucaaaguaggcauauguuuuu

SEQ ID NO: 18449 - RNA, 22 nt, Human
aucaaauaaagguaccuagcuu

SEQ ID NO: 18450 - RNA, 23 nt, Human
aucaaaugauuggccauucagug

SEQ ID NO: 18451 - RNA, 22 nt, Human
aucaacagguauggaugagauu

SEQ ID NO: 18452 - RNA, 22 nt, Human
aucaacaugaauuucucugaag

SEQ ID NO: 18453 - RNA, 22 nt, Human
aucaacaugucauaaagugaaa

SEQ ID NO: 18454 - RNA, 22 nt, Human
aucaacugccccaaauguauuu

SEQ ID NO: 18455 - RNA, 22 nt, Human
aucaacuuaaagaaaagauacu

SEQ ID NO: 18456 - RNA, 22 nt, Human
aucaacuuguccuugauguuaa

SEQ ID NO: 18457 - RNA, 22 nt, Human
aucaagaacuuauuuuggaaau

SEQ ID NO: 18458 - RNA, 22 nt, Human
aucaagcacuucuacaugacau

SEQ ID NO: 18459 - RNA, 22 nt, Human
aucaagcagugaaaaaugcuag

SEQ ID NO: 18460 - RNA, 23 nt, Human
aucaagucaucagcaaaauacau

SEQ ID NO: 18461 - RNA, 22 nt, Human
aucaauguugggccaaagcaaa

SEQ ID NO: 18462 - RNA, 22 nt, Human
aucacaaaggguuuucucugag

SEQ ID NO: 18463 - RNA, 22 nt, Human
aucacaauguacguuaaaaugu

SEQ ID NO: 18464 - RNA, 22 nt, Human
aucacacuguuauuuuaguuaa

SEQ ID NO: 18465 - RNA, 19 nt, Human
aucacagacgugccucauc

SEQ ID NO: 18466 - RNA, 22 nt, Human
aucacaguggcuaccucuggau

SEQ ID NO: 18467 - RNA, 22 nt, Human
aucacaguuuacaaaccugcug

SEQ ID NO: 18468 - RNA, 22 nt, Human
aucacaguuuugugccuugugg

SEQ ID NO: 18469 - RNA, 22 nt, Human
aucacaucucaccacugcaacc

SEQ ID NO: 18470 - RNA, 22 nt, Human
aucacauggaaugauuuuagac

SEQ ID NO: 18471 - RNA, 21 nt, Human
aucacauuggcuguuauuauu

SEQ ID NO: 18472 - RNA, 22 nt, Human
aucaccauugaaaaacagguuu

SEQ ID NO: 18473 - RNA, 20 nt, Human
aucaccuguagguucuuugu

SEQ ID NO: 18474 - RNA, 22 nt, Human
aucacuaugggcauuauauuua

SEQ ID NO: 18475 - RNA, 22 nt, Human
aucacugggcuucuaaucacug

SEQ ID NO: 18476 - RNA, 22 nt, Human
aucacuguuaucuagaagcaca

SEQ ID NO: 18477 - RNA, 22 nt, Human
aucagaaaaaugagaagagcug

SEQ ID NO: 18478 - RNA, 22 nt, Human
aucagaaacucuuagagcaggg

SEQ ID NO: 18479 - RNA, 22 nt, Human
aucagaaaggugggcaagcaga

SEQ ID NO: 18480 - RNA, 22 nt, Human
aucagaaaucuaggauucagaa

SEQ ID NO: 18481 - RNA, 22 nt, Human
aucagaagaaauggaugugacu

SEQ ID NO: 18482 - RNA, 22 nt, Human
aucagaagcuuguagucucucu

SEQ ID NO: 18483 - RNA, 22 nt, Human
aucagaaggggagguaaagaag

SEQ ID NO: 18484 - RNA, 22 nt, Human
aucagaaguugugcaugcaugg

SEQ ID NO: 18485 - RNA, 21 nt, Human
aucagaaguuuuggucaguag

SEQ ID NO: 18486 - RNA, 22 nt, Human
aucagaauggagcccacauggu

SEQ ID NO: 18487 - RNA, 22 nt, Human
aucagaauuagccagugaggcu

SEQ ID NO: 18488 - RNA, 22 nt, Human
aucagacaauuguugaguacug

SEQ ID NO: 18489 - RNA, 22 nt, Human
aucagagaccggucaagucaug

SEQ ID NO: 18490 - RNA, 22 nt, Human
aucagagcaauggauaaaauca

SEQ ID NO: 18491 - RNA, 22 nt, Human
aucagagccuuaugcuucucau

SEQ ID NO: 18492 - RNA, 21 nt, Human
aucagaguacgcaugcgcuga

SEQ ID NO: 18493 - RNA, 21 nt, Human
aucagcaaaugccugucuccc

SEQ ID NO: 18494 - RNA, 22 nt, Human
aucagcaagauugugucuugua

SEQ ID NO: 18495 - RNA, 19 nt, Human
aucagcaagguaggaugug

SEQ ID NO: 18496 - RNA, 22 nt, Human
aucagcaaguccuguuaauucu

SEQ ID NO: 18497 - RNA, 22 nt, Human
aucagcaaucaaauugcagagu

SEQ ID NO: 18498 - RNA, 22 nt, Human
aucagcacaacguacagagaaa

SEQ ID NO: 18499 - RNA, 22 nt, Human
aucagcagugucuaccucggug

SEQ ID NO: 18500 - RNA, 22 nt, Human
aucagcccaccaucuucauaac

SEQ ID NO: 18501 - RNA, 22 nt, Human
aucagcucauuuugauggaaau

SEQ ID NO: 18502 - RNA, 22 nt, Human
aucagcugaaaaacaggcagca

SEQ ID NO: 18503 - RNA, 19 nt, Human
aucagcugaagccuucaga

SEQ ID NO: 18504 - RNA, 22 nt, Human
aucagcugaugaauggaugaau

SEQ ID NO: 18505 - RNA, 22 nt, Human
aucagcugcuacauuggccucu

SEQ ID NO: 18506 - RNA, 22 nt, Human
aucagcuuuucucaucagaaau

SEQ ID NO: 18507 - RNA, 22 nt, Human
aucaggaagaauuggaugcuac

SEQ ID NO: 18508 - RNA, 22 nt, Human
aucaggaagccagucuaaugga

SEQ ID NO: 18509 - RNA, 22 nt, Human
aucaggaaugaauacuuuugga

SEQ ID NO: 18510 - RNA, 22 nt, Human
aucaggaauuaggugagaugga

SEQ ID NO: 18511 - RNA, 22 nt, Human
aucaggaucugggagccugaaa

SEQ ID NO: 18512 - RNA, 22 nt, Human
aucaggauucaccccagagcug

SEQ ID NO: 18513 - RNA, 22 nt, Human
aucaggauucaguaucuccagc

SEQ ID NO: 18514 - RNA, 20 nt, Human
aucaggauucuugcuuuguu

SEQ ID NO: 18515 - RNA, 22 nt, Human
aucaggcuaguguguguguuca

SEQ ID NO: 18516 - RNA, 20 nt, Human
aucaggcuuucuguugcgau

SEQ ID NO: 18517 - RNA, 21 nt, Human
aucaguaagguuggaggaaga

SEQ ID NO: 18518 - RNA, 22 nt, Human
aucaguauccugcaguuucuau

SEQ ID NO: 18519 - RNA, 22 nt, Human
aucagucuguguuagaaaagag

SEQ ID NO: 18520 - RNA, 22 nt, Human
aucagucuguuggaauaucgcu

SEQ ID NO: 18521 - RNA, 22 nt, Human
aucagugaccugaaauguuuuu

SEQ ID NO: 18522 - RNA, 19 nt, Human
aucagugcaugagugcugu

SEQ ID NO: 18523 - RNA, 22 nt, Human
aucagugcuaagagagggccug

SEQ ID NO: 18524 - RNA, 22 nt, Human
aucagugcugagagacuaucaa

SEQ ID NO: 18525 - RNA, 22 nt, Human
aucagugugucaaaagcacaaa

SEQ ID NO: 18526 - RNA, 22 nt, Human
aucaguguuguugauuggauag

SEQ ID NO: 18527 - RNA, 22 nt, Human
aucaguguuugcaugggagcuu

SEQ ID NO: 18528 - RNA, 22 nt, Human
aucaguuaguuacugcuaagau

SEQ ID NO: 18529 - RNA, 22 nt, Human
aucaguuuaacugucaagagcc

SEQ ID NO: 18530 - RNA, 22 nt, Human
aucaguuuauacuuauaaaucu

SEQ ID NO: 18531 - RNA, 22 nt, Human
aucaguuucuaccauguggaau

SEQ ID NO: 18532 - RNA, 22 nt, Human
aucaguuucugugaagaacaca

SEQ ID NO: 18533 - RNA, 22 nt, Human
auagacauuuugcauucaagca

SEQ ID NO: 18534 - RNA, 23 nt, Human
auagacccaagaguaaaggcauc

SEQ ID NO: 18535 - RNA, 22 nt, Human
auagacuugaggauauaaugaa

SEQ ID NO: 18536 - RNA, 22 nt, Human
auagacuugguuaguaaauuug

SEQ ID NO: 18537 - RNA, 19 nt, Human
auagagacagaguuuaauc

SEQ ID NO: 18538 - RNA, 22 nt, Human
auagagacuauagagcacuuac

SEQ ID NO: 18539 - RNA, 22 nt, Human
auagaguuuuauuuuccaauaa

SEQ ID NO: 18540 - RNA, 22 nt, Human
auagauaauguguagcagugau

SEQ ID NO: 18541 - RNA, 22 nt, Human
auagauauuagcaaaauuuuau

SEQ ID NO: 18542 - RNA, 22 nt, Human
auagaucaaugagcaauuuaau

SEQ ID NO: 18543 - RNA, 22 nt, Human
auagaucauugauacuugcauc

SEQ ID NO: 18544 - RNA, 22 nt, Human
auagauguacguauguaaauca

SEQ ID NO: 18545 - RNA, 22 nt, Human
auagauguguguaaguacauaa

SEQ ID NO: 18546 - RNA, 22 nt, Human
auagauguuuuaguaauacugu

SEQ ID NO: 18547 - RNA, 22 nt, Human
auagcaaaaaugaacaaagcuu

SEQ ID NO: 18548 - RNA, 22 nt, Human
auagcaaacuggcagcuugugg

SEQ ID NO: 18549 - RNA, 22 nt, Human
auagcaaauucuuuaggugcuu

SEQ ID NO: 18550 - RNA, 22 nt, Human
auagcaagguaugacuggagcc

SEQ ID NO: 18551 - RNA, 22 nt, Human
aucaucuugcuuucuguuuacu

SEQ ID NO: 18552 - RNA, 20 nt, Human
aucaucuuuacaaugucagu

SEQ ID NO: 18553 - RNA, 22 nt, Human
aucaugcugacacaguuuaucu

SEQ ID NO: 18554 - RNA, 22 nt, Human
aucauguucaucguauuuaggc

SEQ ID NO: 18555 - RNA, 22 nt, Human
aucauguugcucaaaauuaaac

SEQ ID NO: 18556 - RNA, 22 nt, Human
aucauguuuuaauuagcaaacu

SEQ ID NO: 18557 - RNA, 22 nt, Human
aucauuaaauauaagcuucaca

SEQ ID NO: 18558 - RNA, 22 nt, Human
aucauuaacccuugaugcuggg

SEQ ID NO: 18559 - RNA, 21 nt, Human
aucauuaauugcugagugaca

SEQ ID NO: 18560 - RNA, 22 nt, Human
aucauucuagcuguuguguuga

SEQ ID NO: 18561 - RNA, 23 nt, Human
aucauucuccaaucuggagcagg

SEQ ID NO: 18562 - RNA, 22 nt, Human
aucauugagauuuuuuacaacu

SEQ ID NO: 18563 - RNA, 22 nt, Human
aucauuuggggaauuguggaca

SEQ ID NO: 18564 - RNA, 22 nt, Human
aucauuuugugacaaugccugu

SEQ ID NO: 18565 - RNA, 22 nt, Human
aucauuuuuaagagacucuucu

SEQ ID NO: 18566 - RNA, 22 nt, Human
auccaaaauuuacuguagcauu

SEQ ID NO: 18567 - RNA, 22 nt, Human
auccaaaccuggacaugagugg

SEQ ID NO: 18568 - RNA, 22 nt, Human
auccaaagaaugcuuagaccug

SEQ ID NO: 18569 - RNA, 22 nt, Human
auccaaauauauuuuauucacu

SEQ ID NO: 18570 - RNA, 22 nt, Human
auccaaaucaugucagaagaac

SEQ ID NO: 18571 - RNA, 22 nt, Human
auccaaaucuucacacauaaca

SEQ ID NO: 18572 - RNA, 22 nt, Human
auccaacacguauuugcuggcc

SEQ ID NO: 18573 - RNA, 22 nt, Human
auccaagucagggauaguuuga

SEQ ID NO: 18574 - RNA, 22 nt, Human
auccaauucuaauauuguguuu

SEQ ID NO: 18575 - RNA, 22 nt, Human
auccacaggaggguuuggaaaa

SEQ ID NO: 18576 - RNA, 22 nt, Human
auccacaguggggguggcggaa

SEQ ID NO: 18577 - RNA, 23 nt, Human
auccacauuacaguaucauacaa

SEQ ID NO: 18578 - RNA, 22 nt, Human
auccacccugugguggcuuucu

SEQ ID NO: 18579 - RNA, 22 nt, Human
auccacuccuggaggugcccca

SEQ ID NO: 18580 - RNA, 22 nt, Human
auccacucggagggaauguuua

SEQ ID NO: 18581 - RNA, 22 nt, Human
auccacucuaagaucuguggug

SEQ ID NO: 18582 - RNA, 22 nt, Human
auccacucucccauucaugcau

SEQ ID NO: 18583 - RNA, 22 nt, Human
auccagagacccaaggacagaa

SEQ ID NO: 18584 - RNA, 22 nt, Human
auccagagacuggggcugggau

SEQ ID NO: 18585 - RNA, 22 nt, Human
auccagagagguuaggugacau

SEQ ID NO: 18586 - RNA, 22 nt, Human
auccaggagucguggcgcucag

SEQ ID NO: 18587 - RNA, 22 nt, Human
auccaggccccaagaccccgac

SEQ ID NO: 18588 - RNA, 22 nt, Human
auccaggccuugaaguaccagu

SEQ ID NO: 18589 - RNA, 22 nt, Human
auccaggcugcuaugaggauga

SEQ ID NO: 18590 - RNA, 22 nt, Human
auccagggauaaaaguaagguu

SEQ ID NO: 18591 - RNA, 22 nt, Human
auccagguaugaauugugugac

SEQ ID NO: 18592 - RNA, 22 nt, Human
auccagucaaaauuaguaaggu

SEQ ID NO: 18593 - RNA, 22 nt, Human
auccagugagugcagcuguugu

SEQ ID NO: 18594 - RNA, 22 nt, Human
auccauaucuggacucuacccc

SEQ ID NO: 18595 - RNA, 20 nt, Human
auccaucauguccaugacuu

SEQ ID NO: 18596 - RNA, 21 nt, Human
auccauccaucuuggccuaac

SEQ ID NO: 18597 - RNA, 22 nt, Human
auccaucuuuccugcugaacug

SEQ ID NO: 18598 - RNA, 22 nt, Human
auccauggcuaaguauauagag

SEQ ID NO: 18599 - RNA, 23 nt, Human
auccaugugagaauagacuagca

SEQ ID NO: 18600 - RNA, 22 nt, Human
auccauuauugggccaauaaag

SEQ ID NO: 18601 - RNA, 22 nt, Human
auccauugucuuguuggcuucu

SEQ ID NO: 18602 - RNA, 22 nt, Human
auccauuguggucuuguacauu

SEQ ID NO: 18603 - RNA, 22 nt, Human
auccauuuaauugaggggaagg

SEQ ID NO: 18604 - RNA, 22 nt, Human
auccauuugacauaauuucagc

SEQ ID NO: 18605 - RNA, 22 nt, Human
auccauuuuugcaaaguuguuc

SEQ ID NO: 18606 - RNA, 18 nt, Human
aucccaaaagacaaggaa

SEQ ID NO: 18607 - RNA, 22 nt, Human
aucccacaccccuacaacauau

SEQ ID NO: 18608 - RNA, 21 nt, Human
aucccagcacccaggagugca

SEQ ID NO: 18609 - RNA, 22 nt, Human
aucccaggcggcacagguugca

SEQ ID NO: 18610 - RNA, 23 nt, Human
auccccugccuugggugaguccc

SEQ ID NO: 18611 - RNA, 22 nt, Human
aucccgaaccucuacuucuuuc

SEQ ID NO: 18612 - RNA, 22 nt, Human
aucccugugacgagcaucccua

SEQ ID NO: 18613 - RNA, 22 nt, Human
auccgcuuaucucagcuggcag

SEQ ID NO: 18614 - RNA, 22 nt, Human
auccgggguucauuuucacuga

SEQ ID NO: 18615 - RNA, 22 nt, Human
auccguuuuuaugaaaugucca

SEQ ID NO: 18616 - RNA, 22 nt, Human
auccuaaagaaauauuuauuaa

SEQ ID NO: 18617 - RNA, 19 nt, Human
auccuaaauccaguuucua

SEQ ID NO: 18618 - RNA, 22 nt, Human
auccucacauucucaggacaac

SEQ ID NO: 18619 - RNA, 20 nt, Human
auccucacccucaguccuag

SEQ ID NO: 18620 - RNA, 22 nt, Human
auccucagcaucuagcaugaag

SEQ ID NO: 18621 - RNA, 22 nt, Human
auccugaaaacuuacgaagugg

SEQ ID NO: 18622 - RNA, 23 nt, Human
auccugcugauggcccuccagga

SEQ ID NO: 18623 - RNA, 20 nt, Human
auccuggaauccaaauggag

SEQ ID NO: 18624 - RNA, 22 nt, Human
auccuggaggcuggaggcuugc

SEQ ID NO: 18625 - RNA, 22 nt, Human
auccuggcgggggaacugccca

SEQ ID NO: 18626 - RNA, 22 nt, Human
auccugggcaagucaauguccc

SEQ ID NO: 18627 - RNA, 22 nt, Human
auccugggggcagcuggaaaca

SEQ ID NO: 18628 - RNA, 19 nt, Human
auccuggguccuccagcug

SEQ ID NO: 18629 - RNA, 22 nt, Human
auccuguggcuccagggagccg

SEQ ID NO: 18630 - RNA, 23 nt, Human
auccuguuguaggcaguaauuag

SEQ ID NO: 18631 - RNA, 22 nt, Human
auccuuaaaggaauucugauuu

SEQ ID NO: 18632 - RNA, 22 nt, Human
auccuuagguggugcaucaggg

SEQ ID NO: 18633 - RNA, 22 nt, Human
auccuucagcugcccuguuacc

SEQ ID NO: 18634 - RNA, 22 nt, Human
auccuucaguggaagacaguag

SEQ ID NO: 18635 - RNA, 22 nt, Human
auccuucuccagucguauuuuu

SEQ ID NO: 18636 - RNA, 17 nt, Human
auccuucuguucuuucu

SEQ ID NO: 18637 - RNA, 22 nt, Human
auccuucuucugcuagugucua

SEQ ID NO: 18638 - RNA, 22 nt, Human
auccuugagaaaauaaaugacc

SEQ ID NO: 18639 - RNA, 22 nt, Human
auccuugagccuuaucuuuugu

SEQ ID NO: 18640 - RNA, 21 nt, Human
auccuugaucagaagagugcu

SEQ ID NO: 18641 - RNA, 18 nt, Human
auccuugaugagaggucu

SEQ ID NO: 18642 - RNA, 22 nt, Human
cacauucuugaguuacagucua

SEQ ID NO: 18643 - RNA, 22 nt, Human
cacauugauucaguccugugug

SEQ ID NO: 18644 - RNA, 22 nt, Human
cacauugcuccacaggguuaac

SEQ ID NO: 18645 - RNA, 22 nt, Human
cacauuuaaagguugaagcuga

SEQ ID NO: 18646 - RNA, 22 nt, Human
cacauuuaagcagauguggacc

SEQ ID NO: 18647 - RNA, 22 nt, Human
cacauuuaugggcugggaggca

SEQ ID NO: 18648 - RNA, 22 nt, Human
cacauuuccuuggccuuuaauu

SEQ ID NO: 18649 - RNA, 22 nt, Human
cacauuucuaggaaauuaaaug

SEQ ID NO: 18650 - RNA, 22 nt, Human
cacauuucuuauggauguuggc

SEQ ID NO: 18651 - RNA, 21 nt, Human
cacauuugaaccucacagcaa

SEQ ID NO: 18652 - RNA, 22 nt, Human
cacauuuuuacugccaacuuaa

SEQ ID NO: 18653 - RNA, 20 nt, Human
caccacagaauuggggacag

SEQ ID NO: 18654 - RNA, 22 nt, Human
caccacugaauuguucacuuuc

SEQ ID NO: 18655 - RNA, 22 nt, Human
caccacuguaucccuagcacuu

SEQ ID NO: 18656 - RNA, 22 nt, Human
caccagcccccucacgcuguca

SEQ ID NO: 18657 - RNA, 22 nt, Human
caccagcgacugugaccagcaa

SEQ ID NO: 18658 - RNA, 22 nt, Human
caccagcuacagacuacugugu

SEQ ID NO: 18659 - RNA, 22 nt, Human
caccagcugcaacaccaucucc

SEQ ID NO: 18660 - RNA, 22 nt, Human
caccagcuuugcccacugccca

SEQ ID NO: 18661 - RNA, 22 nt, Human
caccaggcacauaguaggcacu

SEQ ID NO: 18662 - RNA, 22 nt, Human
caccaggcugcccaggacaggg

SEQ ID NO: 18663 - RNA, 22 nt, Human
caccagggccccaggcugugcc

SEQ ID NO: 18664 - RNA, 16 nt, Human
caccaguccuuccugc

SEQ ID NO: 18665 - RNA, 22 nt, Human
caccauaaaaauaagagaugcc

SEQ ID NO: 18666 - RNA, 22 nt, Human
caccaucuauagagguauuugg

SEQ ID NO: 18667 - RNA, 22 nt, Human
cacccacauuccaucacucugc

SEQ ID NO: 18668 - RNA, 22 nt, Human
cacccacauuccucuaguaugu

SEQ ID NO: 18669 - RNA, 22 nt, Human
cacccagcauuggcuaagagag

SEQ ID NO: 18670 - RNA, 22 nt, Human
cacccaggcuggaaugcaaugg

SEQ ID NO: 18671 - RNA, 22 nt, Human
cacccagggcugugccugccca

SEQ ID NO: 18672 - RNA, 22 nt, Human
cacccaguugacuacaaagggg

SEQ ID NO: 18673 - RNA, 22 nt, Human
cacccauguuucccucugucuu

SEQ ID NO: 18674 - RNA, 23 nt, Human
caccccacccugaggaggaggga

SEQ ID NO: 18675 - RNA, 19 nt, Human
caccccaguccucuuuccc

SEQ ID NO: 18676 - RNA, 22 nt, Human
cacccccaccugugggcuccug

SEQ ID NO: 18677 - RNA, 22 nt, Human
caccccuaccugagucaggagu

SEQ ID NO: 18678 - RNA, 22 nt, Human
cacccguggagaagcaggagcg

SEQ ID NO: 18679 - RNA, 20 nt, Human
cacccuacggccucaccucc

SEQ ID NO: 18680 - RNA, 18 nt, Human
cacccuccgcggcugccc

SEQ ID NO: 18681 - RNA, 17 nt, Human
cacccuggcuagucuga

SEQ ID NO: 18682 - RNA, 22 nt, Human
caccguuugguuuggauuuaca

SEQ ID NO: 18683 - RNA, 22 nt, Human
caccucaugucaucaguaaaau

SEQ ID NO: 18684 - RNA, 22 nt, Human
caccugaauggaacuuugaacc

SEQ ID NO: 18685 - RNA, 22 nt, Human
caccugagcaacccugugcggg

SEQ ID NO: 18686 - RNA, 22 nt, Human
caccugcaaggagcuuucauuu

SEQ ID NO: 18687 - RNA, 22 nt, Human
caccugccccagucuuggagcu

SEQ ID NO: 18688 - RNA, 22 nt, Human
caccugccugguccuuagggcu

SEQ ID NO: 18689 - RNA, 22 nt, Human
caccugcucccucaguuccagc

SEQ ID NO: 18690 - RNA, 22 nt, Human
caccugcugagcugcugggggu

SEQ ID NO: 18691 - RNA, 22 nt, Human
caccuggacccugggaggaggg

SEQ ID NO: 18692 - RNA, 22 nt, Human
caccuggaguagcaagguaauu

SEQ ID NO: 18693 - RNA, 22 nt, Human
caccuggcagcuguuggccacg

SEQ ID NO: 18694 - RNA, 22 nt, Human
caccuggcccagcuccagugcu

SEQ ID NO: 18695 - RNA, 21 nt, Human
caccugugagacucucagacc

SEQ ID NO: 18696 - RNA, 20 nt, Human
caccuucaaauuuccuggca

SEQ ID NO: 18697 - RNA, 22 nt, Human
caccuuccaucuccuuggcuag

SEQ ID NO: 18698 - RNA, 22 nt, Human
caccuugagggggaaaauaauc

SEQ ID NO: 18699 - RNA, 22 nt, Human
cacgaaaucuaggagaguaaca

SEQ ID NO: 18700 - RNA, 22 nt, Human
cacgagaaccucucauuugauu

SEQ ID NO: 18701 - RNA, 22 nt, Human
cacgaggccaucuccuucugga

SEQ ID NO: 18702 - RNA, 22 nt, Human
cacgcacgcuggguggaggcgc

SEQ ID NO: 18703 - RNA, 22 nt, Human
cacgccagccggacacugggcc

SEQ ID NO: 18704 - RNA, 22 nt, Human
cacgcgcacacucaggucaagu

SEQ ID NO: 18705 - RNA, 22 nt, Human
cacggguggaaucagggacucc

SEQ ID NO: 18706 - RNA, 22 nt, Human
cacggucacccaucagagucca

SEQ ID NO: 18707 - RNA, 22 nt, Human
cacuaaauguuucaauguggga

SEQ ID NO: 18708 - RNA, 20 nt, Human
cacuacuuguuuuugucaau

SEQ ID NO: 18709 - RNA, 22 nt, Human
cacuaggcaucugugaggguag

SEQ ID NO: 18710 - RNA, 22 nt, Human
cacuaguaauucuugugcugga

SEQ ID NO: 18711 - RNA, 22 nt, Human
cacuaugcuuacaugcuuauau

SEQ ID NO: 18712 - RNA, 22 nt, Human
cacucacccgguccuucccagu

SEQ ID NO: 18713 - RNA, 22 nt, Human
cacucagcccacccauguuugu

SEQ ID NO: 18714 - RNA, 22 nt, Human
cacuccaagaccuacuuucucu

SEQ ID NO: 18715 - RNA, 22 nt, Human
cacuccagccauuuguccccag

SEQ ID NO: 18716 - RNA, 22 nt, Human
cacucccuucaggagccuagga

SEQ ID NO: 18717 - RNA, 22 nt, Human
cacuccuauaauuaaagaugca

SEQ ID NO: 18718 - RNA, 22 nt, Human
cacuccuguuccacuaaaugag

SEQ ID NO: 18719 - RNA, 22 nt, Human
cacucugacuggcccugcagga

SEQ ID NO: 18720 - RNA, 22 nt, Human
cacucugagaaguacaagcucc

SEQ ID NO: 18721 - RNA, 22 nt, Human
cacucugagcccaagcaggcug

SEQ ID NO: 18722 - RNA, 22 nt, Human
cacucugcagcugaagggcugg

SEQ ID NO: 18723 - RNA, 22 nt, Human
cacucugcaggccaaaccaaag

SEQ ID NO: 18724 - RNA, 22 nt, Human
cacucugccugauguuacaugg

SEQ ID NO: 18725 - RNA, 22 nt, Human
cacucuggggaugcaaggagag

SEQ ID NO: 18726 - RNA, 22 nt, Human
cacucugugauugcagcauucc

SEQ ID NO: 18727 - RNA, 22 nt, Human
cacugaaaauuagcuuuccuga

SEQ ID NO: 18728 - RNA, 22 nt, Human
cacugaaaggaaaccagagcau

SEQ ID NO: 18729 - RNA, 22 nt, Human
cacugaaaggcaaugcugacag

SEQ ID NO: 18730 - RNA, 22 nt, Human
cacugaacaacaaauagugaau

SEQ ID NO: 18731 - RNA, 22 nt, Human
cacugaagccacuggaagagga

SEQ ID NO: 18732 - RNA, 22 nt, Human
cacugaaucucaaggggagggu

SEQ ID NO: 18733 - RNA, 22 nt, Human
cacugacaguaucagagcuguu

SEQ ID NO: 18734 - RNA, 22 nt, Human
cacugacuccaaaaauaaagaa

SEQ ID NO: 18735 - RNA, 22 nt, Human
cacugagaguagggcacaagug

SEQ ID NO: 18736 - RNA, 22 nt, Human
cacugagccuugccagcuuggu

SEQ ID NO: 18737 - RNA, 22 nt, Human
cacugagggaggguuucuucug

SEQ ID NO: 18738 - RNA, 22 nt, Human
cacugagggggugguuucagga

SEQ ID NO: 18739 - RNA, 20 nt, Human
cacugaggugcagcucaugc

SEQ ID NO: 18740 - RNA, 22 nt, Human
cacugcaaaggggaaagaagca

SEQ ID NO: 18741 - RNA, 22 nt, Human
cacugcaacaaccucuaccucc

SEQ ID NO: 18742 - RNA, 22 nt, Human
cacugcagccucgcucuccuga

SEQ ID NO: 18743 - RNA, 23 nt, Human
cacugcagcguggucuggcagga

SEQ ID NO: 18744 - RNA, 22 nt, Human
cacugcaggucugagauggggg

SEQ ID NO: 18745 - RNA, 20 nt, Human
cacugccagaauacacuguc

SEQ ID NO: 18746 - RNA, 22 nt, Human
cacugcccagcgucuuaggcac

SEQ ID NO: 18747 - RNA, 22 nt, Human
cacugcccaggaccugccaccc

SEQ ID NO: 18748 - RNA, 22 nt, Human
cacugcccaggcacccaucuug

SEQ ID NO: 18749 - RNA, 22 nt, Human
cacugcuaugaugaugauauuu

SEQ ID NO: 18750 - RNA, 22 nt, Human
cacugcugauuucauaggcagg

SEQ ID NO: 18751 - RNA, 22 nt, Human
aucuguggaaagguaaccagua

SEQ ID NO: 18752 - RNA, 22 nt, Human
aucuguggaaauuggcaagugc

SEQ ID NO: 18753 - RNA, 22 nt, Human
aucuguggccaaaagacuguug

SEQ ID NO: 18754 - RNA, 22 nt, Human
aucuguggcgcaaacaaaggcu

SEQ ID NO: 18755 - RNA, 22 nt, Human
aucuguggucaaaauagaaacu

SEQ ID NO: 18756 - RNA, 23 nt, Human
aucuguguguggguagggaugau

SEQ ID NO: 18757 - RNA, 22 nt, Human
aucuguuaacaaagaagacagc

SEQ ID NO: 18758 - RNA, 22 nt, Human
aucuguuccccuaugcucucua

SEQ ID NO: 18759 - RNA, 19 nt, Human
aucuuacagagcagaguac

SEQ ID NO: 18760 - RNA, 22 nt, Human
aucuuagacccuugguagaaaa

SEQ ID NO: 18761 - RNA, 22 nt, Human
aucuuauguuguauucaaaauc

SEQ ID NO: 18762 - RNA, 22 nt, Human
aucuuauugcuguugccagaua

SEQ ID NO: 18763 - RNA, 22 nt, Human
aucuucaaagaauuucuugucc

SEQ ID NO: 18764 - RNA, 22 nt, Human
aucuucaaagggauguccaugg

SEQ ID NO: 18765 - RNA, 22 nt, Human
aucuucaaggaaaaaauacagu

SEQ ID NO: 18766 - RNA, 22 nt, Human
aucuucaauugaaaacuagccu

SEQ ID NO: 18767 - RNA, 22 nt, Human
aucuucaucaaguucacagugg

SEQ ID NO: 18768 - RNA, 22 nt, Human
aucuucucaagcagcauccugu

SEQ ID NO: 18769 - RNA, 22 nt, Human
aucuuggacuacagaagagagg

SEQ ID NO: 18770 - RNA, 22 nt, Human
aucuuggggaauccucugugua

SEQ ID NO: 18771 - RNA, 22 nt, Human
aucuuggggacugucucuugua

SEQ ID NO: 18772 - RNA, 22 nt, Human
aucuuguuaaaaagcagauucu

SEQ ID NO: 18773 - RNA, 22 nt, Human
aucuuguuaaagugcagauucu

SEQ ID NO: 18774 - RNA, 22 nt, Human
aucuuuaccaccaaagaaugcu

SEQ ID NO: 18775 - RNA, 21 nt, Human
aucuuuagccauccaaucaga

SEQ ID NO: 18776 - RNA, 22 nt, Human
aucuuuaggcaaguuacuuaac

SEQ ID NO: 18777 - RNA, 22 nt, Human
aucuuuaguagaggaauauauu

SEQ ID NO: 18778 - RNA, 22 nt, Human
aucuuuauauaucuccucugaa

SEQ ID NO: 18779 - RNA, 22 nt, Human
aucuuuccuguuuucagacagc

SEQ ID NO: 18780 - RNA, 22 nt, Human
aucuuucuaugguacuuucucc

SEQ ID NO: 18781 - RNA, 22 nt, Human
cacuguacugugaauaaggagg

SEQ ID NO: 18782 - RNA, 22 nt, Human
cacugucccuguuuccuggaaa

SEQ ID NO: 18783 - RNA, 22 nt, Human
cacugugcuccuaacuagcugu

SEQ ID NO: 18784 - RNA, 22 nt, Human
cacuguggagcaaauuuauuua

SEQ ID NO: 18785 - RNA, 22 nt, Human
cacuguggcaaccugugcccaa

SEQ ID NO: 18786 - RNA, 20 nt, Human
cacuguggcacauugguuua

SEQ ID NO: 18787 - RNA, 22 nt, Human
cacuguggugccaaaccuggag

SEQ ID NO: 18788 - RNA, 22 nt, Human
cacuguucuuuuuguaguccaa

SEQ ID NO: 18789 - RNA, 22 nt, Human
cacuguugaagauacuuccucu

SEQ ID NO: 18790 - RNA, 19 nt, Human
cacuguuguccuaguacuu

SEQ ID NO: 18791 - RNA, 22 nt, Human
cacuguuuuacauguuauuuaa

SEQ ID NO: 18792 - RNA, 22 nt, Human
cacuguuuucagucaguucuau

SEQ ID NO: 18793 - RNA, 22 nt, Human
cacuguuuuuauguaaucagug

SEQ ID NO: 18794 - RNA, 22 nt, Human
cacuuaaauguuccuacagcag

SEQ ID NO: 18795 - RNA, 22 nt, Human
cacuuaagcaguuaauuuaucu

SEQ ID NO: 18796 - RNA, 22 nt, Human
cacuuacacuucugaaagccua

SEQ ID NO: 18797 - RNA, 22 nt, Human
cacuuagaaaacuugagcaagu

SEQ ID NO: 18798 - RNA, 22 nt, Human
cacuucaaauaagcucuucuca

SEQ ID NO: 18799 - RNA, 22 nt, Human
cacuucaaccucugaguccugg

SEQ ID NO: 18800 - RNA, 22 nt, Human
cacuucaaggaauaucuagaaa

SEQ ID NO: 18801 - RNA, 19 nt, Human
cacuucaauccuuuaucaa

SEQ ID NO: 18802 - RNA, 19 nt, Human
cacuucacauggugaaagc

SEQ ID NO: 18803 - RNA, 22 nt, Human
cacuucagcuacaaucacauga

SEQ ID NO: 18804 - RNA, 22 nt, Human
cacuugaacuguuugaaugaga

SEQ ID NO: 18805 - RNA, 22 nt, Human
cacuugaauggcauuguuccuu

SEQ ID NO: 18806 - RNA, 22 nt, Human
cacuugauggaagagcagaaga

SEQ ID NO: 18807 - RNA, 17 nt, Human
cacuugcuggucuaccu

SEQ ID NO: 18808 - RNA, 22 nt, Human
cacuugggagcauugcacaugu

SEQ ID NO: 18809 - RNA, 22 nt, Human
cacuuuaaaacugacagcccuu

SEQ ID NO: 18810 - RNA, 21 nt, Human
cacuuuaauggauauuuguuu

SEQ ID NO: 18811 - RNA, 22 nt, Human
cacuuuauauucuaagacggcc

SEQ ID NO: 18812 - RNA, 22 nt, Human
cacuuuaugggaagcaaaaauu

SEQ ID NO: 18813 - RNA, 22 nt, Human
cacuuugcuuagagaacaaggc

SEQ ID NO: 18814 - RNA, 22 nt, Human
cacuuuggaugccacuggucua

SEQ ID NO: 18815 - RNA, 17 nt, Human
cacuuuguugcuguggg

SEQ ID NO: 18816 - RNA, 22 nt, Human
cacuuuuaaauggguccguguu

SEQ ID NO: 18817 - RNA, 22 nt, Human
cagaaacagacaugacgcagua

SEQ ID NO: 18818 - RNA, 22 nt, Human
cagaaaccaaaugggaugggga

SEQ ID NO: 18819 - RNA, 22 nt, Human
cagaaacuguggauucauuaaa

SEQ ID NO: 18820 - RNA, 22 nt, Human
cagaaagaccugggcucaagag

SEQ ID NO: 18821 - RNA, 22 nt, Human
cagaaagcaaaauggaucucug

SEQ ID NO: 18822 - RNA, 23 nt, Human
cagaaagcccuuuccccacagua

SEQ ID NO: 18823 - RNA, 22 nt, Human
cagaaagcuugguacaauaugc

SEQ ID NO: 18824 - RNA, 22 nt, Human
cagaaaggacagagugagggug

SEQ ID NO: 18825 - RNA, 22 nt, Human
cagaaaggcacccacugggucu

SEQ ID NO: 18826 - RNA, 19 nt, Human
cagaaauagcgaaguguaa

SEQ ID NO: 18827 - RNA, 22 nt, Human
cagaaauaucaguugaaagugc

SEQ ID NO: 18828 - RNA, 22 nt, Human
cagaaaucauugugaugacagg

SEQ ID NO: 18829 - RNA, 22 nt, Human
cagaaaugacaaaguaagagga

SEQ ID NO: 18830 - RNA, 22 nt, Human
cagaaauguacugacaugcagu

SEQ ID NO: 18831 - RNA, 22 nt, Human
cagaaaugugauguacacacac

SEQ ID NO: 18832 - RNA, 22 nt, Human
cagaacacaggcuaaacugaga

SEQ ID NO: 18833 - RNA, 22 nt, Human
cagaacagaaguaaaauuuacc

SEQ ID NO: 18834 - RNA, 22 nt, Human
cagaacagacuuaacagggcug

SEQ ID NO: 18835 - RNA, 19 nt, Human
cagaacaggaccaggggcc

SEQ ID NO: 18836 - RNA, 22 nt, Human
cagaacagucgccugcauggau

SEQ ID NO: 18837 - RNA, 22 nt, Human
cagaacauucacucauaugugg

SEQ ID NO: 18838 - RNA, 22 nt, Human
cagaaccaggaacugauggaga

SEQ ID NO: 18839 - RNA, 22 nt, Human
cagaacugaccucugauucuag

SEQ ID NO: 18840 - RNA, 22 nt, Human
cagaacugagucucauggccau

SEQ ID NO: 18841 - RNA, 22 nt, Human
cagaacugggcagggagcagag

SEQ ID NO: 18842 - RNA, 22 nt, Human
cagaagagaugaaauaguauua

SEQ ID NO: 18843 - RNA, 22 nt, Human
cagaagaucucuuaguggaggg

SEQ ID NO: 18844 - RNA, 22 nt, Human
cagaagcaagggccaaagucuu

SEQ ID NO: 18845 - RNA, 22 nt, Human
cagaagcacuaggaggaaacgu

SEQ ID NO: 18846 - RNA, 22 nt, Human
cagaagcagauucuaaagcaag

SEQ ID NO: 18847 - RNA, 22 nt, Human
cagaagcagugagagaugugca

SEQ ID NO: 18848 - RNA, 22 nt, Human
cagaagccuaaauagugcacca

SEQ ID NO: 18849 - RNA, 22 nt, Human
cagaagcuagcaggaaaguuuu

SEQ ID NO: 18850 - RNA, 22 nt, Human
cagaagcugaggagugaggcaa

SEQ ID NO: 18851 - RNA, 22 nt, Human
cagaaggagcgcuaagguccca

SEQ ID NO: 18852 - RNA, 22 nt, Human
cagaaggcuuuguggaguagac

SEQ ID NO: 18853 - RNA, 22 nt, Human
cagaaguaagauuacugugaga

SEQ ID NO: 18854 - RNA, 21 nt, Human
cagaaguaaggguaacuucuc

SEQ ID NO: 18855 - RNA, 22 nt, Human
cagaagucacccucagaauaac

SEQ ID NO: 18856 - RNA, 22 nt, Human
cagaagucuuucuguuucaccu

SEQ ID NO: 18857 - RNA, 22 nt, Human
cagaagugaaugugauaaacca

SEQ ID NO: 18858 - RNA, 22 nt, Human
cagaagugauguugagcuaguc

SEQ ID NO: 18859 - RNA, 22 nt, Human
cagaaguggauauuagaguaau

SEQ ID NO: 18860 - RNA, 22 nt, Human
cagauuuaagagauaaacagug

SEQ ID NO: 18861 - RNA, 22 nt, Human
cagauuugccacuuacucguug

SEQ ID NO: 18862 - RNA, 22 nt, Human
cagcaaaagccagcauaagcuc

SEQ ID NO: 18863 - RNA, 22 nt, Human
cagcaaagcaggcuccuagaac

SEQ ID NO: 18864 - RNA, 22 nt, Human
cagcaaauacuacuaguuuuua

SEQ ID NO: 18865 - RNA, 22 nt, Human
cagcaaaugaguggcagggcag

SEQ ID NO: 18866 - RNA, 22 nt, Human
cagcaacauauaugaaacugug

SEQ ID NO: 18867 - RNA, 22 nt, Human
cagcaacccgggggaccuuucu

SEQ ID NO: 18868 - RNA, 22 nt, Human
cagcaacuccuauauugaaagc

SEQ ID NO: 18869 - RNA, 22 nt, Human
cagcaacuuggacagcagucuu

SEQ ID NO: 18870 - RNA, 22 nt, Human
cagcaagaaaauucacaugcuc

SEQ ID NO: 18871 - RNA, 22 nt, Human
cagcaagaacagccugaugugc

SEQ ID NO: 18872 - RNA, 19 nt, Human
cagcaagaaugaaggcaua

SEQ ID NO: 18873 - RNA, 22 nt, Human
cagcaagacaguuuccuaagug

SEQ ID NO: 18874 - RNA, 22 nt, Human
cagcaagauuuuuaaagcaagg

SEQ ID NO: 18875 - RNA, 22 nt, Human
cagcaagccaaauguggcccga

SEQ ID NO: 18876 - RNA, 22 nt, Human
cagcaaggcauucuguggauua

SEQ ID NO: 18877 - RNA, 22 nt, Human
cagcaaggguuauaucaaagau

SEQ ID NO: 18878 - RNA, 23 nt, Human
cagcaagugaauuccaagagaga

SEQ ID NO: 18879 - RNA, 22 nt, Human
cagcaauaagccagguuagaca

SEQ ID NO: 18880 - RNA, 22 nt, Human
cagcaauauacacagucuaugg

SEQ ID NO: 18881 - RNA, 22 nt, Human
cagcaauccaagcuuucuuuaa

SEQ ID NO: 18882 - RNA, 20 nt, Human
cagcacagagcuuggcucua

SEQ ID NO: 18883 - RNA, 22 nt, Human
cagcacagcacagcggugacuc

SEQ ID NO: 18884 - RNA, 22 nt, Human
cagcacaggaauaugguggaca

SEQ ID NO: 18885 - RNA, 22 nt, Human
cagcacaggccccucucuccca

SEQ ID NO: 18886 - RNA, 22 nt, Human
cagcacagggcuugagaggugu

SEQ ID NO: 18887 - RNA, 22 nt, Human
cagcacagugaccagacccacu

SEQ ID NO: 18888 - RNA, 22 nt, Human
cagcacaguuugcuuggcagag

SEQ ID NO: 18889 - RNA, 22 nt, Human
cagcacaucuccaagaauuucu

SEQ ID NO: 18890 - RNA, 19 nt, Human
cagcacaugcuucucugag

SEQ ID NO: 18891 - RNA, 22 nt, Human
cagcacauggauggaguuagga

SEQ ID NO: 18892 - RNA, 22 nt, Human
cagcacauuuacucagcccuca

SEQ ID NO: 18893 - RNA, 22 nt, Human
cagcaccauuugcagccucuuu

SEQ ID NO: 18894 - RNA, 22 nt, Human
cagcaccuguuagcauuaaaua

SEQ ID NO: 18895 - RNA, 22 nt, Human
cagcacguugaaguagaguaag

SEQ ID NO: 18896 - RNA, 22 nt, Human
cagcacuaugacauuuaauucu

SEQ ID NO: 18897 - RNA, 22 nt, Human
cagcacucccaggagaaccagc

SEQ ID NO: 18898 - RNA, 22 nt, Human
cagcacugcuucgcagccaggg

SEQ ID NO: 18899 - RNA, 22 nt, Human
cagcacuucaaugagcauuuca

SEQ ID NO: 18900 - RNA, 22 nt, Human
cagcacuuuagcggaggcauca

SEQ ID NO: 18901 - RNA, 22 nt, Human
cagcagaaauggauuuugagau

SEQ ID NO: 18902 - RNA, 20 nt, Human
cagcagaaauggggugggaa

SEQ ID NO: 18903 - RNA, 22 nt, Human
cagcagaacaggcagggaagcu

SEQ ID NO: 18904 - RNA, 22 nt, Human
cagcagaacaguuaaagaaacc

SEQ ID NO: 18905 - RNA, 22 nt, Human
cagcagaagcaacauucaggcu

SEQ ID NO: 18906 - RNA, 22 nt, Human
cagcagaagugcauuugugauu

SEQ ID NO: 18907 - RNA, 20 nt, Human
cagcagagacccauggggag

SEQ ID NO: 18908 - RNA, 22 nt, Human
cagcagagcugggcuuugaauu

SEQ ID NO: 18909 - RNA, 22 nt, Human
cagcagagggagccauugaaau

SEQ ID NO: 18910 - RNA, 22 nt, Human
cagcagagguuggaacaguucu

SEQ ID NO: 18911 - RNA, 22 nt, Human
cagcagaguaggugcuacuucu

SEQ ID NO: 18912 - RNA, 22 nt, Human
cagcagaguauggcacucaacu

SEQ ID NO: 18913 - RNA, 22 nt, Human
cagcagcaacaacggaagccuu

SEQ ID NO: 18914 - RNA, 22 nt, Human
augaaaugauugaaaucuuuac

SEQ ID NO: 18915 - RNA, 22 nt, Human
augaaaugucuggaucuuuuuc

SEQ ID NO: 18916 - RNA, 22 nt, Human
augaaaugugaaugcuuuucau

SEQ ID NO: 18917 - RNA, 22 nt, Human
augaacaaguauuugcaugagc

SEQ ID NO: 18918 - RNA, 22 nt, Human
augaacaauaaaauagaucaca

SEQ ID NO: 18919 - RNA, 22 nt, Human
augaacaauaaucaugucuaug

SEQ ID NO: 18920 - RNA, 22 nt, Human
augaacaaugacuacauauuga

SEQ ID NO: 18921 - RNA, 22 nt, Human
augaacauccuaggaggcauuu

SEQ ID NO: 18922 - RNA, 22 nt, Human
augaacaucucugauccaagca

SEQ ID NO: 18923 - RNA, 22 nt, Human
augaacuagccagguugugcug

SEQ ID NO: 18924 - RNA, 22 nt, Human
augaacucuugcuuuauuucag

SEQ ID NO: 18925 - RNA, 22 nt, Human
augaacugcaguauaaacuugg

SEQ ID NO: 18926 - RNA, 22 nt, Human
augaacuuauuucugaacuuuu

SEQ ID NO: 18927 - RNA, 22 nt, Human
augaacuuucuuuacaguuuug

SEQ ID NO: 18928 - RNA, 22 nt, Human
augaagaaacuguucugggugg

SEQ ID NO: 18929 - RNA, 20 nt, Human
augaagacaaauccgacuug

SEQ ID NO: 18930 - RNA, 23 nt, Human
augaagacccgugguguccccac

SEQ ID NO: 18931 - RNA, 22 nt, Human
augaagauacaggcagggccau

SEQ ID NO: 18932 - RNA, 22 nt, Human
augaagauauucuuguuuucug

SEQ ID NO: 18933 - RNA, 22 nt, Human
augaagcaacagcccuccuauu

SEQ ID NO: 18934 - RNA, 21 nt, Human
augaagcaagggucacacgug

SEQ ID NO: 18935 - RNA, 22 nt, Human
augaagcagccucuucccucug

SEQ ID NO: 18936 - RNA, 22 nt, Human
augaagcagcguuguagaguga

SEQ ID NO: 18937 - RNA, 22 nt, Human
augaagcaguuaaggugcauga

SEQ ID NO: 18938 - RNA, 22 nt, Human
augaagcuaaacccugcagcca

SEQ ID NO: 18939 - RNA, 22 nt, Human
augaagcuugaggugagagcug

SEQ ID NO: 18940 - RNA, 22 nt, Human
augaaggacaacaggggagcag

SEQ ID NO: 18941 - RNA, 19 nt, Human
augaaggcacugaguggga

SEQ ID NO: 18942 - RNA, 22 nt, Human
augaaggcaguuuuauaagauu

SEQ ID NO: 18943 - RNA, 22 nt, Human
augaagucucuuuuucaugaga

SEQ ID NO: 18944 - RNA, 22 nt, Human
augaauaaacaggugccucuuc

SEQ ID NO: 18945 - RNA, 22 nt, Human
augaauaugagacugagagccu

SEQ ID NO: 18946 - RNA, 22 nt, Human
augaauccaaaguuuacuauua

SEQ ID NO: 18947 - RNA, 22 nt, Human
augaaugagaaacaggugagau

SEQ ID NO: 18948 - RNA, 21 nt, Human
augaaugauuucuacucuuaa

SEQ ID NO: 18949 - RNA, 22 nt, Human
augaaugcugggacaaauauau

SEQ ID NO: 18950 - RNA, 22 nt, Human
augaauggauggggucaagaua

SEQ ID NO: 18951 - RNA, 22 nt, Human
augaaugggucauuauuugauc

SEQ ID NO: 18952 - RNA, 22 nt, Human
augaauguaccugaaauagccu

SEQ ID NO: 18953 - RNA, 22 nt, Human
augaauguuuggugaucagaua

SEQ ID NO: 18954 - RNA, 19 nt, Human
augaauugagcacuuacua

SEQ ID NO: 18955 - RNA, 22 nt, Human
augaauuguccgauguugugca

SEQ ID NO: 18956 - RNA, 22 nt, Human
augacaaaauucacagguguga

SEQ ID NO: 18957 - RNA, 22 nt, Human
augacaaccugugagcugguau

SEQ ID NO: 18958 - RNA, 22 nt, Human
augacacauuugugcuguugaa

SEQ ID NO: 18959 - RNA, 22 nt, Human
augacacccccacagcauuguu

SEQ ID NO: 18960 - RNA, 23 nt, Human
augacacuccugugcgcacccug

SEQ ID NO: 18961 - RNA, 22 nt, Human
augacagacagaagggauuuuu

SEQ ID NO: 18962 - RNA, 22 nt, Human
augacagauagucuucauuugc

SEQ ID NO: 18963 - RNA, 22 nt, Human
augacauaaagcuaugcuaggu

SEQ ID NO: 18964 - RNA, 22 nt, Human
augacaugauucuuucuuucau

SEQ ID NO: 18965 - RNA, 22 nt, Human
augacauugacagaccugcugc

SEQ ID NO: 18966 - RNA, 22 nt, Human
augaccagacucucaguggggu

SEQ ID NO: 18967 - RNA, 22 nt, Human
augaccaguguugcuggccccg

SEQ ID NO: 18968 - RNA, 22 nt, Human
augacccaagcucauggcuccc

SEQ ID NO: 18969 - RNA, 22 nt, Human
cagcaugagaaaaugaaucaga

SEQ ID NO: 18970 - RNA, 22 nt, Human
cagcauggacagggguggcguu

SEQ ID NO: 18971 - RNA, 22 nt, Human
cagcauggggaucacuguaggc

SEQ ID NO: 18972 - RNA, 22 nt, Human
cagcaugguggagcugcucuuu

SEQ ID NO: 18973 - RNA, 22 nt, Human
cagcauugaucccaggcugugg

SEQ ID NO: 18974 - RNA, 22 nt, Human
cagcauuuagaauuugaagugu

SEQ ID NO: 18975 - RNA, 22 nt, Human
cagcauuuggugaucaucuuaa

SEQ ID NO: 18976 - RNA, 22 nt, Human
cagccacuacaauugguuccau

SEQ ID NO: 18977 - RNA, 22 nt, Human
cagccacucucagacaguccca

SEQ ID NO: 18978 - RNA, 22 nt, Human
cagccagagaaagggcacugcc

SEQ ID NO: 18979 - RNA, 22 nt, Human
cagccagaggggccagagucgg

SEQ ID NO: 18980 - RNA, 22 nt, Human
cagccagcuucagauccaagcc

SEQ ID NO: 18981 - RNA, 22 nt, Human
cagccaggacagggaaacuagu

SEQ ID NO: 18982 - RNA, 22 nt, Human
cagccaggagccucugcaacua

SEQ ID NO: 18983 - RNA, 22 nt, Human
cagccaggagcucccccugcuc

SEQ ID NO: 18984 - RNA, 22 nt, Human
cagccaggcccccgagucguug

SEQ ID NO: 18985 - RNA, 22 nt, Human
cagccagggagcaaagaguuga

SEQ ID NO: 18986 - RNA, 22 nt, Human
cagccagguaugggcgugcggg

SEQ ID NO: 18987 - RNA, 22 nt, Human
cagccagguucaaguccuuaua

SEQ ID NO: 18988 - RNA, 22 nt, Human
cagccaucaguaaagacagcuu

SEQ ID NO: 18989 - RNA, 22 nt, Human
cagcccacgucagggccacuca

SEQ ID NO: 18990 - RNA, 22 nt, Human
cagcccacuucccagcaccuac

SEQ ID NO: 18991 - RNA, 22 nt, Human
cagcccagagauguuaucuagu

SEQ ID NO: 18992 - RNA, 21 nt, Human
cagcccagagcaguggggcca

SEQ ID NO: 18993 - RNA, 22 nt, Human
cagcccagcagucuuagccugc

SEQ ID NO: 18994 - RNA, 22 nt, Human
cagcccagccgagggccuggcu

SEQ ID NO: 18995 - RNA, 22 nt, Human
cagcccagcugggaucacacuc

SEQ ID NO: 18996 - RNA, 21 nt, Human
cagcccagcuucuuccccagu

SEQ ID NO: 18997 - RNA, 22 nt, Human
cagcccaggcucagauguuggg

SEQ ID NO: 18998 - RNA, 22 nt, Human
cagcccaguaccaagcaguugg

SEQ ID NO: 18999 - RNA, 22 nt, Human
cagcccagugcauuuguguacu

SEQ ID NO: 19000 - RNA, 22 nt, Human
cagcccauuucugggaccugag

SEQ ID NO: 19001 - RNA, 22 nt, Human
cagccccucccucaggcaggug

SEQ ID NO: 19002 - RNA, 22 nt, Human
cagcccucucugggccccaagg

SEQ ID NO: 19003 - RNA, 23 nt, Human
cagcccugaaaucgaggugacac

SEQ ID NO: 19004 - RNA, 22 nt, Human
cagcccugcagccauggccugu

SEQ ID NO: 19005 - RNA, 22 nt, Human
cagcccugcggagguguauacu

SEQ ID NO: 19006 - RNA, 22 nt, Human
cagcccugcugguuuugggcaa

SEQ ID NO: 19007 - RNA, 22 nt, Human
cagcccugcuuccccgcuaguu

SEQ ID NO: 19008 - RNA, 22 nt, Human
cagcccuggcagcuuucagggu

SEQ ID NO: 19009 - RNA, 22 nt, Human
cagcccuggcccaggugccuua

SEQ ID NO: 19010 - RNA, 22 nt, Human
cagcccuggccucuucgcuuuc

SEQ ID NO: 19011 - RNA, 22 nt, Human
cagcccugggaucuuagugccu

SEQ ID NO: 19012 - RNA, 22 nt, Human
cagcccugggucccugcccugg

SEQ ID NO: 19013 - RNA, 22 nt, Human
cagcccuguccaaugucugcuc

SEQ ID NO: 19014 - RNA, 22 nt, Human
cagcccuguccagcagagggug

SEQ ID NO: 19015 - RNA, 22 nt, Human
cagcccuuccuucuguuuauac

SEQ ID NO: 19016 - RNA, 22 nt, Human
cagcccuucuuccaaccagcuu

SEQ ID NO: 19017 - RNA, 22 nt, Human
cagcccuugcgacacccuggcu

SEQ ID NO: 19018 - RNA, 22 nt, Human
cagcccuuguuugggaaggaug

SEQ ID NO: 19019 - RNA, 19 nt, Human
cagccucaaucccucgggc

SEQ ID NO: 19020 - RNA, 22 nt, Human
cagccuccugggacacucaccg

SEQ ID NO: 19021 - RNA, 22 nt, Human
cagccucucuguaucucaggau

SEQ ID NO: 19022 - RNA, 22 nt, Human
cagccugacuauggcugcaggu

SEQ ID NO: 19023 - RNA, 22 nt, Human
cagccugagccuucuguagcaa

SEQ ID NO: 19024 - RNA, 22 nt, Human
cagccugcaggaggccgucagc

SEQ ID NO: 19025 - RNA, 16 nt, Human
cagccugcagugguca

SEQ ID NO: 19026 - RNA, 22 nt, Human
cagccugcauuuguaucuguau

SEQ ID NO: 19027 - RNA, 22 nt, Human
cagccugcuagggcaaugccuu

SEQ ID NO: 19028 - RNA, 22 nt, Human
cagccugucggcuccuucauuc

SEQ ID NO: 19029 - RNA, 22 nt, Human
cagccuguggcagaggucuaau

SEQ ID NO: 19030 - RNA, 22 nt, Human
cagccuuuaagcuuggauaggu

SEQ ID NO: 19031 - RNA, 22 nt, Human
cagccuuucuguuuccuaaggu

SEQ ID NO: 19032 - RNA, 22 nt, Human
augauauuugcaaugugcuugc

SEQ ID NO: 19033 - RNA, 22 nt, Human
augaucagcaguuuucaguguu

SEQ ID NO: 19034 - RNA, 22 nt, Human
augaucauggaagugcacccau

SEQ ID NO: 19035 - RNA, 22 nt, Human
augauccagauuuugggcaguu

SEQ ID NO: 19036 - RNA, 22 nt, Human
augaucugauaaucauccacua

SEQ ID NO: 19037 - RNA, 18 nt, Human
augaucuuagcaaauauu

SEQ ID NO: 19038 - RNA, 22 nt, Human
augaugaagaguaacaggcuga

SEQ ID NO: 19039 - RNA, 19 nt, Human
augaugcagagcugacuca

SEQ ID NO: 19040 - RNA, 22 nt, Human
augauggaauauuauucaggca

SEQ ID NO: 19041 - RNA, 19 nt, Human
augauggucccauucaccu

SEQ ID NO: 19042 - RNA, 22 nt, Human
augauguaaauagagccuaggu

SEQ ID NO: 19043 - RNA, 22 nt, Human
augaugucuggaggcaugcugu

SEQ ID NO: 19044 - RNA, 22 nt, Human
augauuacucccauuugauaga

SEQ ID NO: 19045 - RNA, 22 nt, Human
augauucagcccaauuuuucua

SEQ ID NO: 19046 - RNA, 22 nt, Human
augauugaaaaugacauugcca

SEQ ID NO: 19047 - RNA, 22 nt, Human
augauuuaaagucauugugaac

SEQ ID NO: 19048 - RNA, 22 nt, Human
augauuuguuaacagacuuaau

SEQ ID NO: 19049 - RNA, 22 nt, Human
augcaaaagacuauuuguugcu

SEQ ID NO: 19050 - RNA, 22 nt, Human
augcaaaaguaguugcaguuuu

SEQ ID NO: 19051 - RNA, 22 nt, Human
augcaaacauucgcuugucucu

SEQ ID NO: 19052 - RNA, 22 nt, Human
augcaaauaaacagucuaguug

SEQ ID NO: 19053 - RNA, 22 nt, Human
augcaaaugcagccauugcaga

SEQ ID NO: 19054 - RNA, 22 nt, Human
augcaaaugcuagagaauguug

SEQ ID NO: 19055 - RNA, 22 nt, Human
augcaaauucuuaggcuccauc

SEQ ID NO: 19056 - RNA, 22 nt, Human
augcaaauucuuugcuucuucu

SEQ ID NO: 19057 - RNA, 22 nt, Human
augcaacagagaaaauauugag

SEQ ID NO: 19058 - RNA, 22 nt, Human
augcaacauacauucugaagcu

SEQ ID NO: 19059 - RNA, 22 nt, Human
augcaagaucacaccaaacacg

SEQ ID NO: 19060 - RNA, 22 nt, Human
augcaaggguaaccccagacau

SEQ ID NO: 19061 - RNA, 22 nt, Human
augcaauaccuucugaaaauaa

SEQ ID NO: 19062 - RNA, 22 nt, Human
augcaaugguauauggucaccu

SEQ ID NO: 19063 - RNA, 22 nt, Human
augcaauuuacuguacauaaau

SEQ ID NO: 19064 - RNA, 21 nt, Human
augcacaaaaagacucuuucu

SEQ ID NO: 19065 - RNA, 22 nt, Human
augcacaaacccacaauuaguc

SEQ ID NO: 19066 - RNA, 19 nt, Human
augcacacauugaagagga

SEQ ID NO: 19067 - RNA, 22 nt, Human
augcacagcagugaguucagug

SEQ ID NO: 19068 - RNA, 22 nt, Human
augcacagcugaacacucuaaa

SEQ ID NO: 19069 - RNA, 22 nt, Human
augcacaucuuacagaugcaga

SEQ ID NO: 19070 - RNA, 22 nt, Human
augcacauuguagccacacaau

SEQ ID NO: 19071 - RNA, 22 nt, Human
augcacccagugucuggacuau

SEQ ID NO: 19072 - RNA, 22 nt, Human
augcacccuuaugaauaugauc

SEQ ID NO: 19073 - RNA, 22 nt, Human
augcacuacuagaugcaaaagu

SEQ ID NO: 19074 - RNA, 22 nt, Human
augcacuacuuggcuuuacuga

SEQ ID NO: 19075 - RNA, 22 nt, Human
augcacuguaggugccaucugc

SEQ ID NO: 19076 - RNA, 22 nt, Human
augcacuguuggauauauuugu

SEQ ID NO: 19077 - RNA, 22 nt, Human
augcacuucaagcaucucucug

SEQ ID NO: 19078 - RNA, 22 nt, Human
ggcuuagauugacacugaucuc

SEQ ID NO: 19079 - RNA, 22 nt, Human
ggcuuaggugucucucugcacc

SEQ ID NO: 19080 - RNA, 22 nt, Human
ggcuuaguguuucugcucagcc

SEQ ID NO: 19081 - RNA, 22 nt, Human
ggcuuauguuugucaagcaauc

SEQ ID NO: 19082 - RNA, 22 nt, Human
ggcuucaaauggagcaaccaga

SEQ ID NO: 19083 - RNA, 22 nt, Human
ggcuucacauagcaaugugagc

SEQ ID NO: 19084 - RNA, 22 nt, Human
ggcuucaccgcgggguugcagg

SEQ ID NO: 19085 - RNA, 22 nt, Human
ggcuucagugacuggugcccuc

SEQ ID NO: 19086 - RNA, 22 nt, Human
ggcuagggacacagcucugcuc

SEQ ID NO: 19087 - RNA, 22 nt, Human
ggcuagggaucuagaccaggac

SEQ ID NO: 19088 - RNA, 22 nt, Human
ggcuauguguccagcaucuuug

SEQ ID NO: 19089 - RNA, 22 nt, Human
ggcucacacaugacugggcucu

SEQ ID NO: 19090 - RNA, 22 nt, Human
ggcucacuuuggggucagcugg

SEQ ID NO: 19091 - RNA, 22 nt, Human
ggcucagaaaccucuggugucu

SEQ ID NO: 19092 - RNA, 22 nt, Human
ggcucagaaacuaaaggcgcug

SEQ ID NO: 19093 - RNA, 22 nt, Human
ggcucagagaccugcgaucuga

SEQ ID NO: 19094 - RNA, 22 nt, Human
ggcucagaggagcuggaacggu

SEQ ID NO: 19095 - RNA, 22 nt, Human
ggcucagcuuaucugggcaggc

SEQ ID NO: 19096 - RNA, 22 nt, Human
ggcucaggacugcagcguagag

SEQ ID NO: 19097 - RNA, 22 nt, Human
ggcucaggagaggggcuaaaag

SEQ ID NO: 19098 - RNA, 22 nt, Human
ggcucaggcuggagugcagugg

SEQ ID NO: 19099 - RNA, 22 nt, Human
ggcucaguaagucagguucauu

SEQ ID NO: 19100 - RNA, 22 nt, Human
ggcucagugggaacaagcugag

SEQ ID NO: 19101 - RNA, 22 nt, Human
ggcucauguaugaaagggugug

SEQ ID NO: 19102 - RNA, 22 nt, Human
ggcuccacccugcuuccagaag

SEQ ID NO: 19103 - RNA, 22 nt, Human
ggcuccagaaacuucaguccau

SEQ ID NO: 19104 - RNA, 22 nt, Human
ggcuccaggguaccccuggaug

SEQ ID NO: 19105 - RNA, 22 nt, Human
ggcuccaguuuccccuuggggc

SEQ ID NO: 19106 - RNA, 22 nt, Human
ggcuccaguuugugccuucagc

SEQ ID NO: 19107 - RNA, 22 nt, Human
ggcucccuguucuauucccugg

SEQ ID NO: 19108 - RNA, 22 nt, Human
ggcuccugaggaccaggcacag

SEQ ID NO: 19109 - RNA, 23 nt, Human
ggcuccuggauucaaauccugcc

SEQ ID NO: 19110 - RNA, 22 nt, Human
ggcuccugggaugggacugagc

SEQ ID NO: 19111 - RNA, 22 nt, Human
ggcuccugggcagcugcucccu

SEQ ID NO: 19112 - RNA, 19 nt, Human
ggcuccuggggcucagccc

SEQ ID NO: 19113 - RNA, 22 nt, Human
ggcuccuuaucucuccuaugcc

SEQ ID NO: 19114 - RNA, 22 nt, Human
ggcuccuucaaagcaccuggcu

SEQ ID NO: 19115 - RNA, 22 nt, Human
ggcucuagagacucuagagaaa

SEQ ID NO: 19116 - RNA, 22 nt, Human
ggcucuccacuauggaugagaa

SEQ ID NO: 19117 - RNA, 19 nt, Human
ggcucucuuaaagcuguuu

SEQ ID NO: 19118 - RNA, 17 nt, Human
ggcucucuuccagacuu

SEQ ID NO: 19119 - RNA, 22 nt, Human
ggcucugaaauucucacuuuua

SEQ ID NO: 19120 - RNA, 22 nt, Human
ggcucugaagggugacagguuu

SEQ ID NO: 19121 - RNA, 22 nt, Human
ggcucugaguuuagaagggugg

SEQ ID NO: 19122 - RNA, 22 nt, Human
ggcucugcaaaaguagauacuu

SEQ ID NO: 19123 - RNA, 22 nt, Human
ggcucugcaugugagugggugg

SEQ ID NO: 19124 - RNA, 22 nt, Human
ggcucugccacuucuuggcugu

SEQ ID NO: 19125 - RNA, 22 nt, Human
ggcucugcuucucaccuguucc

SEQ ID NO: 19126 - RNA, 20 nt, Human
ggcucugcuugugagcagcc

SEQ ID NO: 19127 - RNA, 22 nt, Human
ggcucuggagauguccgaccug

SEQ ID NO: 19128 - RNA, 22 nt, Human
ggcucuggcaaggggaggcuac

SEQ ID NO: 19129 - RNA, 22 nt, Human
ggcucuggcuacuccacccugu

SEQ ID NO: 19130 - RNA, 22 nt, Human
ggcucugggccuccaaggucug

SEQ ID NO: 19131 - RNA, 22 nt, Human
ggcucuggggccuccucccuug

SEQ ID NO: 19132 - RNA, 22 nt, Human
ggcucuggggggaagucuguug

SEQ ID NO: 19133 - RNA, 22 nt, Human
ggcucuggguaaggcguuugac

SEQ ID NO: 19134 - RNA, 22 nt, Human
ggcucugggucuguggggagcg

SEQ ID NO: 19135 - RNA, 17 nt, Human
ggcucugggugucacau

SEQ ID NO: 19136 - RNA, 22 nt, Human
ggcucuggugcccuggcuccca

SEQ ID NO: 19137 - RNA, 22 nt, Human
ggcucuggugugaagcagccuc

SEQ ID NO: 19138 - RNA, 23 nt, Human
ggcucugugcugggccugcagga

SEQ ID NO: 19139 - RNA, 22 nt, Human
ggcucuguucuaaauuaauaag

SEQ ID NO: 19140 - RNA, 22 nt, Human
ggcucuucacacagugauguca

SEQ ID NO: 19141 - RNA, 22 nt, Human
ggcucuucuacuucagaugggg

SEQ ID NO: 19142 - RNA, 22 nt, Human
ggcugaaaggugggaggauggc

SEQ ID NO: 19143 - RNA, 20 nt, Human
ggcugaaaguagaaaguauu

SEQ ID NO: 19144 - RNA, 22 nt, Human
ggcugaaauucagaguaaauuc

SEQ ID NO: 19145 - RNA, 22 nt, Human
ggcugaauguuggacacuuacg

SEQ ID NO: 19146 - RNA, 22 nt, Human
ggcugagaacaggcccagccuc

SEQ ID NO: 19147 - RNA, 22 nt, Human
ggcugagaguggaucccaggga

SEQ ID NO: 19148 - RNA, 22 nt, Human
ggcugagaguuuccucuggggc

SEQ ID NO: 19149 - RNA, 22 nt, Human
ggcugagcacuuuaggcaggag

SEQ ID NO: 19150 - RNA, 22 nt, Human
ggcugagggccagggcuagucu

SEQ ID NO: 19151 - RNA, 18 nt, Human
ggcugagguugacuagaa

SEQ ID NO: 19152 - RNA, 22 nt, Human
ggcugaguucucuugcugaauc

SEQ ID NO: 19153 - RNA, 22 nt, Human
ggcugaugagcuuagcuagaga

SEQ ID NO: 19154 - RNA, 22 nt, Human
ggcugcaagacaagguugguuu

SEQ ID NO: 19155 - RNA, 22 nt, Human
ggcugcacgccucucagcuugc

SEQ ID NO: 19156 - RNA, 22 nt, Human
ggcugcagagcuggugcccugg

SEQ ID NO: 19157 - RNA, 22 nt, Human
ggcugcagauuguagucuguua

SEQ ID NO: 19158 - RNA, 22 nt, Human
ggcugcaggcagaggcugucug

SEQ ID NO: 19159 - RNA, 22 nt, Human
ggcugcagguugguuggcagcu

SEQ ID NO: 19160 - RNA, 17 nt, Human
ggcugcaguccaggagg

SEQ ID NO: 19161 - RNA, 20 nt, Human
ggcugcagugcaccucaucu

SEQ ID NO: 19162 - RNA, 22 nt, Human
ggcugccagugagugcagaccg

SEQ ID NO: 19163 - RNA, 22 nt, Human
ggcugccauaacagaguaccac

SEQ ID NO: 19164 - RNA, 22 nt, Human
ggcugccccagugcucauggcu

SEQ ID NO: 19165 - RNA, 22 nt, Human
ggcugcccuagagcuggcaagg

SEQ ID NO: 19166 - RNA, 22 nt, Human
ggcugcccugggaggcaagggu

SEQ ID NO: 19167 - RNA, 22 nt, Human
ggcugccuaacccuuaaguguc

SEQ ID NO: 19168 - RNA, 22 nt, Human
ggcugccuccucgagacaggau

SEQ ID NO: 19169 - RNA, 22 nt, Human
ggcugccucuggaagcuggaga

SEQ ID NO: 19170 - RNA, 22 nt, Human
ggcugccugaacuuuggggaaa

SEQ ID NO: 19171 - RNA, 22 nt, Human
ggcugccugaggcagugagaga

SEQ ID NO: 19172 - RNA, 22 nt, Human
ggcugccugcucaggugcggcg

SEQ ID NO: 19173 - RNA, 22 nt, Human
ggcugccuggaccuccucuuuc

SEQ ID NO: 19174 - RNA, 22 nt, Human
ggcugccugggagcccuccucu

SEQ ID NO: 19175 - RNA, 18 nt, Human
ggcugccuguuccugaag

SEQ ID NO: 19176 - RNA, 22 nt, Human
ggcugccuguugaguauguccc

SEQ ID NO: 19177 - RNA, 22 nt, Human
ggcugccuugacccuggcuccg

SEQ ID NO: 19178 - RNA, 22 nt, Human
ggcugccuuggggguugucauu

SEQ ID NO: 19179 - RNA, 22 nt, Human
ggcugcggccgcgggucugugc

SEQ ID NO: 19180 - RNA, 18 nt, Human
ggcugcuccucucccuac

SEQ ID NO: 19181 - RNA, 22 nt, Human
ggcugcucugcacaggggcugg

SEQ ID NO: 19182 - RNA, 22 nt, Human
ggcugcucugccuuccagcugg

SEQ ID NO: 19183 - RNA, 22 nt, Human
ggcugcucuucuuggcgaccuc

SEQ ID NO: 19184 - RNA, 22 nt, Human
ggcugcugaguuggccaggaga

SEQ ID NO: 19185 - RNA, 22 nt, Human
ggcugcugugaccucaggugau

SEQ ID NO: 19186 - RNA, 17 nt, Human
ggcugcugugcuggugc

SEQ ID NO: 19187 - RNA, 22 nt, Human
gggaacacuccagggcuuggaa

SEQ ID NO: 19188 - RNA, 22 nt, Human
gggaacagggccugagcugggg

SEQ ID NO: 19189 - RNA, 22 nt, Human
gggaaccagccgcuuccgccuc

SEQ ID NO: 19190 - RNA, 22 nt, Human
gggaaccugccccaggccucug

SEQ ID NO: 19191 - RNA, 22 nt, Human
gggaacuugccccagaggaauu

SEQ ID NO: 19192 - RNA, 22 nt, Human
gggaagacuuagucgguucaau

SEQ ID NO: 19193 - RNA, 22 nt, Human
gggaagagauuuccacaucauu

SEQ ID NO: 19194 - RNA, 18 nt, Human
gggaagaggaucuggccc

SEQ ID NO: 19195 - RNA, 22 nt, Human
gggaagaguaacuagcccaugu

SEQ ID NO: 19196 - RNA, 22 nt, Human
gggaagcagcauugugcuggcu

SEQ ID NO: 19197 - RNA, 22 nt, Human
gggaagcaggugcagcucgccu

SEQ ID NO: 19198 - RNA, 22 nt, Human
gggaagcaucugaggguccacu

SEQ ID NO: 19199 - RNA, 22 nt, Human
gggaagcugaagcuagagaaaa

SEQ ID NO: 19200 - RNA, 22 nt, Human
gggaaggaaaguuauuagcaga

SEQ ID NO: 19201 - RNA, 22 nt, Human
gggaaggagccugcuugcuaga

SEQ ID NO: 19202 - RNA, 23 nt, Human
gggaagugaggagccccucagcc

SEQ ID NO: 19203 - RNA, 17 nt, Human
gggaaguggagaaagcu

SEQ ID NO: 19204 - RNA, 22 nt, Human
gggcagguggcaaagccagagg

SEQ ID NO: 19205 - RNA, 22 nt, Human
gggcagguggcagggucucugg

SEQ ID NO: 19206 - RNA, 22 nt, Human
gggcaggugugcagagcuguug

SEQ ID NO: 19207 - RNA, 22 nt, Human
gggcagguuggcaucccgggca

SEQ ID NO: 19208 - RNA, 22 nt, Human
gggcagugggaccaggcaccag

SEQ ID NO: 19209 - RNA, 22 nt, Human
gggcagugucggggcccaggga

SEQ ID NO: 19210 - RNA, 22 nt, Human
gggcagugucugcaaaugaaca

SEQ ID NO: 19211 - RNA, 22 nt, Human
gggcaguguggucgugccuuug

SEQ ID NO: 19212 - RNA, 20 nt, Human
gggcaguucaaugccacucu

SEQ ID NO: 19213 - RNA, 22 nt, Human
gggcaucuucuguagccaucuc

SEQ ID NO: 19214 - RNA, 20 nt, Human
gggcaucuuugcuccuguuu

SEQ ID NO: 19215 - RNA, 22 nt, Human
gggcaugagagggcagcuggca

SEQ ID NO: 19216 - RNA, 22 nt, Human
gggcaugagcgagcugcuuuga

SEQ ID NO: 19217 - RNA, 19 nt, Human
gggcaugcuggcucuagag

SEQ ID NO: 19218 - RNA, 19 nt, Human
gggcauggaugagcuuacc

SEQ ID NO: 19219 - RNA, 18 nt, Human
gggcauggaugcagcauc

SEQ ID NO: 19220 - RNA, 22 nt, Human
gggcauggccaggugagggguc

SEQ ID NO: 19221 - RNA, 22 nt, Human
gggcauggggcggaccugguuc

SEQ ID NO: 19222 - RNA, 22 nt, Human
gggcauggugagggauaugaag

SEQ ID NO: 19223 - RNA, 22 nt, Human
gggcauggugaugugcaccugu

SEQ ID NO: 19224 - RNA, 22 nt, Human
gggccacacagaaccuccuggu

SEQ ID NO: 19225 - RNA, 22 nt, Human
gggccacacagggcagcucccu

SEQ ID NO: 19226 - RNA, 22 nt, Human
gggccaccuggauuccaugugu

SEQ ID NO: 19227 - RNA, 22 nt, Human
gggccagagcacagaggauguu

SEQ ID NO: 19228 - RNA, 22 nt, Human
gggccagucugacucugcuggu

SEQ ID NO: 19229 - RNA, 22 nt, Human
gggccagugagucgggagagcu

SEQ ID NO: 19230 - RNA, 22 nt, Human
gggccagugggaccugggucuc

SEQ ID NO: 19231 - RNA, 22 nt, Human
gggccaguucuccgccucuuuu

SEQ ID NO: 19232 - RNA, 22 nt, Human
gggcccaggccuccuuccuucc

SEQ ID NO: 19233 - RNA, 22 nt, Human
gggccccaagaaccuccuccug

SEQ ID NO: 19234 - RNA, 22 nt, Human
gggcccucagucccaggccuuc

SEQ ID NO: 19235 - RNA, 22 nt, Human
gggcccucugcagcugcccagg

SEQ ID NO: 19236 - RNA, 20 nt, Human
gggcccugggauucagagca

SEQ ID NO: 19237 - RNA, 19 nt, Human
gggccucacccacaccucc

SEQ ID NO: 19238 - RNA, 22 nt, Human
gggccuccgugugcuggugcuc

SEQ ID NO: 19239 - RNA, 22 nt, Human
gggccucuccggccuuugcauc

SEQ ID NO: 19240 - RNA, 22 nt, Human
gggccucugugcagaggggccu

SEQ ID NO: 19241 - RNA, 22 nt, Human
gggccugaggcccagacacugg

SEQ ID NO: 19242 - RNA, 22 nt, Human
gggccugccauugcugccccag

SEQ ID NO: 19243 - RNA, 22 nt, Human
gggccugcuggugcuuccauug

SEQ ID NO: 19244 - RNA, 22 nt, Human
gggccuggggacaccaccauga

SEQ ID NO: 19245 - RNA, 22 nt, Human
gggccuugccauggagccugag

SEQ ID NO: 19246 - RNA, 22 nt, Human
gggcgagggcgaaagcgagagc

SEQ ID NO: 19247 - RNA, 22 nt, Human
gggcgcagccaauccuggcccu

SEQ ID NO: 19248 - RNA, 22 nt, Human
gggcgcgggaaggagcccgaga

SEQ ID NO: 19249 - RNA, 17 nt, Human
gggcgcggguagagccc

SEQ ID NO: 19250 - RNA, 22 nt, Human
gggcggcgucggcgaggccauc

SEQ ID NO: 19251 - RNA, 22 nt, Human
gggcggggggagcuggaaugaa

SEQ ID NO: 19252 - RNA, 22 nt, Human
gggcggugccugucuccgaagc

SEQ ID NO: 19253 - RNA, 22 nt, Human
gggcuaaguggaucagucagga

SEQ ID NO: 19254 - RNA, 22 nt, Human
gggcuacauugugagagaaguu

SEQ ID NO: 19255 - RNA, 22 nt, Human
gggcuacugagcuggaacuggg

SEQ ID NO: 19256 - RNA, 20 nt, Human
gggcuagaccagggcagagg

SEQ ID NO: 19257 - RNA, 18 nt, Human
gggcuaggcaaggaccac

SEQ ID NO: 19258 - RNA, 18 nt, Human
gggcucacacaggucauc

SEQ ID NO: 19259 - RNA, 21 nt, Human
gggcucagcgcucggcuccuc

SEQ ID NO: 19260 - RNA, 22 nt, Human
gggcucagcuccuuccuuccua

SEQ ID NO: 19261 - RNA, 22 nt, Human
gggcucagucggcaagccccuu

SEQ ID NO: 19262 - RNA, 22 nt, Human
gggcucaguucugcuucaugcu

SEQ ID NO: 19263 - RNA, 22 nt, Human
gggcucaucaagccucuccgcc

SEQ ID NO: 19264 - RNA, 22 nt, Human
gggcucaugauguaggcuggua

SEQ ID NO: 19265 - RNA, 22 nt, Human
gggcucauucaucugggcuugg

SEQ ID NO: 19266 - RNA, 22 nt, Human
gggcuccaaaguaagcuuuagu

SEQ ID NO: 19267 - RNA, 22 nt, Human
gggcuccaacggugagcaugga

SEQ ID NO: 19268 - RNA, 22 nt, Human
gggcuccaacuacaucagccuu

SEQ ID NO: 19269 - RNA, 22 nt, Human
gggcuccagaggcucacccugg

SEQ ID NO: 19270 - RNA, 22 nt, Human
gggcuccagccaggugucccca

SEQ ID NO: 19271 - RNA, 22 nt, Human
gggcuccagggcccgagucguc

SEQ ID NO: 19272 - RNA, 22 nt, Human
gggcucucaaggcagggcccca

SEQ ID NO: 19273 - RNA, 22 nt, Human
gggcucugaaucccaggucugc

SEQ ID NO: 19274 - RNA, 18 nt, Human
gggcucugauccuucacc

SEQ ID NO: 19275 - RNA, 22 nt, Human
gggcucugcagugacuugaggg

SEQ ID NO: 19276 - RNA, 22 nt, Human
gggcucuggaguucuagaaaga

SEQ ID NO: 19277 - RNA, 18 nt, Human
gggcucuggcaucugggu

SEQ ID NO: 19278 - RNA, 22 nt, Human
gggcucugggauucagagcaag

SEQ ID NO: 19279 - RNA, 22 nt, Human
gggcucugggucgugucuccau

SEQ ID NO: 19280 - RNA, 22 nt, Human
gggcucuguuuagaucagagau

SEQ ID NO: 19281 - RNA, 22 nt, Human
gggcugaaagcucucacagucu

SEQ ID NO: 19282 - RNA, 22 nt, Human
gggcugaacucaagucagcucc

SEQ ID NO: 19283 - RNA, 22 nt, Human
gggcugacaguuuccccugaaa

SEQ ID NO: 19284 - RNA, 22 nt, Human
gggcugacucaaccuugcaaag

SEQ ID NO: 19285 - RNA, 22 nt, Human
gggcugagaauucagcuuuccu

SEQ ID NO: 19286 - RNA, 22 nt, Human
gggcugagauuggugcccuguc

SEQ ID NO: 19287 - RNA, 22 nt, Human
gggcugagcuguucugaguuua

SEQ ID NO: 19288 - RNA, 22 nt, Human
gggcugagggguaucucauggg

SEQ ID NO: 19289 - RNA, 22 nt, Human
gggcugagucugcugccuguca

SEQ ID NO: 19290 - RNA, 22 nt, Human
gggcugagugaccucaggccaa

SEQ ID NO: 19291 - RNA, 22 nt, Human
gggcugagugggccucuuacuu

SEQ ID NO: 19292 - RNA, 22 nt, Human
gggcugaguuccugccucacuc

SEQ ID NO: 19293 - RNA, 22 nt, Human
gggcugcguguggaggauguaa

SEQ ID NO: 19294 - RNA, 22 nt, Human
gggcugcugcugccagcgacac

SEQ ID NO: 19295 - RNA, 22 nt, Human
gggcugcuuuuuucuuagcaga

SEQ ID NO: 19296 - RNA, 22 nt, Human
gggcuggaagugcauugaugcu

SEQ ID NO: 19297 - RNA, 22 nt, Human
gggucaggcucagcagggcagc

SEQ ID NO: 19298 - RNA, 22 nt, Human
gggucagggaggccccaccaug

SEQ ID NO: 19299 - RNA, 22 nt, Human
ggguccagaaugagaaugggcu

SEQ ID NO: 19300 - RNA, 23 nt, Human
ggguccagagacaggcaugggug

SEQ ID NO: 19301 - RNA, 22 nt, Human
ggguccagcgacagcaggcuca

SEQ ID NO: 19302 - RNA, 22 nt, Human
ggguccaggcacuaugcuaagu

SEQ ID NO: 19303 - RNA, 22 nt, Human
ggguccaggcggcauaguugua

SEQ ID NO: 19304 - RNA, 22 nt, Human
ggguccagggccaguggcugag

SEQ ID NO: 19305 - RNA, 19 nt, Human
gggucccaaaagaugugcu

SEQ ID NO: 19306 - RNA, 18 nt, Human
ggguccuguucuuggaag

SEQ ID NO: 19307 - RNA, 19 nt, Human
gggucgggaaguugagaau

SEQ ID NO: 19308 - RNA, 22 nt, Human
gggucgggcaggcgcccucguc

SEQ ID NO: 19309 - RNA, 22 nt, Human
gggucucucucggcuccacgcg

SEQ ID NO: 19310 - RNA, 21 nt, Human
gggucugaauaucuggugcug

SEQ ID NO: 19311 - RNA, 22 nt, Human
gggucuggcaugcugagaugga

SEQ ID NO: 19312 - RNA, 22 nt, Human
gggugaagcuccugcaggggcc

SEQ ID NO: 19313 - RNA, 22 nt, Human
gggugacauuucccaaugagcc

SEQ ID NO: 19314 - RNA, 20 nt, Human
gggugagauguaggagaggg

SEQ ID NO: 19315 - RNA, 22 nt, Human
gggugagggaugagccuucuuc

SEQ ID NO: 19316 - RNA, 22 nt, Human
gggugcaacuaagaagagguga

SEQ ID NO: 19317 - RNA, 22 nt, Human
gggugcaagcaaguggcacaga

SEQ ID NO: 19318 - RNA, 22 nt, Human
gggugcaugguguaugacugga

SEQ ID NO: 19319 - RNA, 22 nt, Human
ggguggagaggcuaaguccagu

SEQ ID NO: 19320 - RNA, 22 nt, Human
ggguggagccugagaauuugca

SEQ ID NO: 19321 - RNA, 20 nt, Human
ggguggaguugcggucugug

SEQ ID NO: 19322 - RNA, 22 nt, Human
ggguggcacaggugcagagggu

SEQ ID NO: 19323 - RNA, 21 nt, Human
ggguggccgcaugggugcgug

SEQ ID NO: 19324 - RNA, 22 nt, Human
ggguggcuccuaugggcauagc

SEQ ID NO: 19325 - RNA, 22 nt, Human
gggugggaacaggaugccagga

SEQ ID NO: 19326 - RNA, 22 nt, Human
gggugggaaggcuaagggauug

SEQ ID NO: 19327 - RNA, 22 nt, Human
gggugggacucuuuggccugag

SEQ ID NO: 19328 - RNA, 22 nt, Human
gggugggacugaagucugaggg

SEQ ID NO: 19329 - RNA, 22 nt, Human
gggugggagaaaugaguaucua

SEQ ID NO: 19330 - RNA, 22 nt, Human
gggugggagucuggcccucaaa

SEQ ID NO: 19331 - RNA, 22 nt, Human
gggugggaucuguggagccuca

SEQ ID NO: 19332 - RNA, 23 nt, Human
gggugggccaaauuagguagccu

SEQ ID NO: 19333 - RNA, 21 nt, Human
gggugggguuccagccuuuuc

SEQ ID NO: 19334 - RNA, 22 nt, Human
ggguggguggcagcaccgaggc

SEQ ID NO: 19335 - RNA, 22 nt, Human
ggguggucaucugaaggucugg

SEQ ID NO: 19336 - RNA, 22 nt, Human
ggguggugagauguagcugaug

SEQ ID NO: 19337 - RNA, 22 nt, Human
gggugguggccagcagugggca

SEQ ID NO: 19338 - RNA, 18 nt, Human
ggguggugugcucuucgc

SEQ ID NO: 19339 - RNA, 22 nt, Human
ggguguagacacauguucaucu

SEQ ID NO: 19340 - RNA, 22 nt, Human
ggguguggcugcgugccaauaa

SEQ ID NO: 19341 - RNA, 22 nt, Human
gggugugucuuuugcuccugga

SEQ ID NO: 19342 - RNA, 20 nt, Human
gggugugugcagggccuggu

SEQ ID NO: 19343 - RNA, 22 nt, Human
ggguuacugcuucaaaaaauua

SEQ ID NO: 19344 - RNA, 22 nt, Human
ggguuaggucccucccuucugg

SEQ ID NO: 19345 - RNA, 22 nt, Human
ggguuaguugguaguuaauuga

SEQ ID NO: 19346 - RNA, 22 nt, Human
ggguucagugaugccuucagga

SEQ ID NO: 19347 - RNA, 22 nt, Human
ggguucaucaaaggacagacuc

SEQ ID NO: 19348 - RNA, 22 nt, Human
ggguuccaaacauagucuuccu

SEQ ID NO: 19349 - RNA, 22 nt, Human
ggguucuuauaguaucagagcu

SEQ ID NO: 19350 - RNA, 22 nt, Human
ggguuggauuacuuagggagaa

SEQ ID NO: 19351 - RNA, 22 nt, Human
ggguuggggcccagcagucugc

SEQ ID NO: 19352 - RNA, 23 nt, Human
ggguuuccuucuggcuccuccuu

SEQ ID NO: 19353 - RNA, 22 nt, Human
ggguuuuaugguucacuugcaa

SEQ ID NO: 19354 - RNA, 22 nt, Human
gguaaaaugcagauucuuagcc

SEQ ID NO: 19355 - RNA, 22 nt, Human
gguaaacuaaccauuuuaauuu

SEQ ID NO: 19356 - RNA, 22 nt, Human
gguaaauuuuauguuauguaua

SEQ ID NO: 19357 - RNA, 22 nt, Human
gguaacaaggccgauagaaaca

SEQ ID NO: 19358 - RNA, 22 nt, Human
gggugcagggucuccagcagcu

SEQ ID NO: 19359 - RNA, 22 nt, Human
gggugccacagagcuuccacuu

SEQ ID NO: 19360 - RNA, 22 nt, Human
gggugcugacuggggccugaaa

SEQ ID NO: 19361 - RNA, 22 nt, Human
gggugcugaggaagacagcagg

SEQ ID NO: 19362 - RNA, 18 nt, Human
gggugcuggggccccuug

SEQ ID NO: 19363 - RNA, 22 nt, Human
ggguggaaaguauuuggggacc

SEQ ID NO: 19364 - RNA, 22 nt, Human
ggguggaggagaacaggcccca

SEQ ID NO: 19365 - RNA, 22 nt, Human
ggguggaguagaaagaugaauu

SEQ ID NO: 19366 - RNA, 22 nt, Human
ggguggcaaaggcgcugaaagg

SEQ ID NO: 19367 - RNA, 22 nt, Human
ggguggcauagggugauggcuu

SEQ ID NO: 19368 - RNA, 22 nt, Human
gggugggccugucuggccaugu

SEQ ID NO: 19369 - RNA, 22 nt, Human
ggguggggccaggcaauuugca

SEQ ID NO: 19370 - RNA, 22 nt, Human
gggugggguguaucggauccua

SEQ ID NO: 19371 - RNA, 22 nt, Human
gggugggguucaggaaucuuca

SEQ ID NO: 19372 - RNA, 22 nt, Human
ggguggugggcacagaaucugg

SEQ ID NO: 19373 - RNA, 22 nt, Human
gggugguguauuagagcugcag

SEQ ID NO: 19374 - RNA, 22 nt, Human
gggugugcaggucauggcgucu

SEQ ID NO: 19375 - RNA, 20 nt, Human
gggugugggcccggccaggc

SEQ ID NO: 19376 - RNA, 22 nt, Human
ggguuaaaacaggaagaucagc

SEQ ID NO: 19377 - RNA, 22 nt, Human
ggguuagguucuagaggcacaa

SEQ ID NO: 19378 - RNA, 22 nt, Human
ggguucagguuggccugagcac

SEQ ID NO: 19379 - RNA, 22 nt, Human
ggguuccaaugaugagcaagag

SEQ ID NO: 19380 - RNA, 22 nt, Human
ggguuccagucugaaacuacag

SEQ ID NO: 19381 - RNA, 22 nt, Human
ggguuggcagcaccagaggagg

SEQ ID NO: 19382 - RNA, 22 nt, Human
ggguugggacugucaucuggag

SEQ ID NO: 19383 - RNA, 22 nt, Human
ggguuguagagcuggaagggga

SEQ ID NO: 19384 - RNA, 22 nt, Human
gguaacacaggugcaguuuuaa

SEQ ID NO: 19385 - RNA, 22 nt, Human
gguaacaguauguagaguaaga

SEQ ID NO: 19386 - RNA, 22 nt, Human
gguaacugaggccauauucuga

SEQ ID NO: 19387 - RNA, 22 nt, Human
gguaacuuagcucauggcugug

SEQ ID NO: 19388 - RNA, 22 nt, Human
gguacaauccacuguggguuag

SEQ ID NO: 19389 - RNA, 22 nt, Human
gguacaauggaccauaaaagcu

SEQ ID NO: 19390 - RNA, 22 nt, Human
gguacaaugguucauuuuaugu

SEQ ID NO: 19391 - RNA, 22 nt, Human
gguacaauucugggguaugcuc

SEQ ID NO: 19392 - RNA, 22 nt, Human
gguaccaccaauucagcugcca

SEQ ID NO: 19393 - RNA, 22 nt, Human
gguaccaugagaugccacuaau

SEQ ID NO: 19394 - RNA, 22 nt, Human
gguagaaagcccaagucccccu

SEQ ID NO: 19395 - RNA, 22 nt, Human
gguagacaauggaauguggccu

SEQ ID NO: 19396 - RNA, 22 nt, Human
gguagacugucaaacacuagcc

SEQ ID NO: 19397 - RNA, 22 nt, Human
gguagcaagcgcuugcccugcg

SEQ ID NO: 19398 - RNA, 22 nt, Human
gguagcagggcugugagucaga

SEQ ID NO: 19399 - RNA, 22 nt, Human
gguagcaucuuuggauguuauu

SEQ ID NO: 19400 - RNA, 22 nt, Human
gguagccaauuuaaacauuucc

SEQ ID NO: 19401 - RNA, 22 nt, Human
gguagcugcagcaggcuggcaa

SEQ ID NO: 19402 - RNA, 22 nt, Human
gguaggggcagggccaagcugu

SEQ ID NO: 19403 - RNA, 22 nt, Human
gguauaguauuauuugaaagag

SEQ ID NO: 19404 - RNA, 22 nt, Human
gguaugaaaugauuccauguua

SEQ ID NO: 19405 - RNA, 22 nt, Human
gguauggaucagaugggcucaa

SEQ ID NO: 19406 - RNA, 22 nt, Human
ggugauuuauccauuuucuggu

SEQ ID NO: 19407 - RNA, 22 nt, Human
ggugauuuccuuuugcaaaguc

SEQ ID NO: 19408 - RNA, 22 nt, Human
ggugauuuucgaguuucauguu

SEQ ID NO: 19409 - RNA, 22 nt, Human
ggugcaaaaguaaucacaguuu

SEQ ID NO: 19410 - RNA, 22 nt, Human
ggugcaaagauggcaguugcaa

SEQ ID NO: 19411 - RNA, 22 nt, Human
ggugcaaguuuuuugaggaagu

SEQ ID NO: 19412 - RNA, 22 nt, Human
ggugcaauaaaguuguagaacc

SEQ ID NO: 19413 - RNA, 22 nt, Human
ggugcagaaggaagggagcugg

SEQ ID NO: 19414 - RNA, 22 nt, Human
ggugcagaguccacagaaagcu

SEQ ID NO: 19415 - RNA, 22 nt, Human
ggugcagccuccccagugacag

SEQ ID NO: 19416 - RNA, 22 nt, Human
ggugcagccuuuguuucuacuu

SEQ ID NO: 19417 - RNA, 22 nt, Human
ggugcagcugcagccugggagc

SEQ ID NO: 19418 - RNA, 22 nt, Human
ggugcaggaaaauuaccuggag

SEQ ID NO: 19419 - RNA, 22 nt, Human
ggugcaggcgguggggcaagua

SEQ ID NO: 19420 - RNA, 22 nt, Human
ggugcagggagaggcaggcccc

SEQ ID NO: 19421 - RNA, 20 nt, Human
ggugcagguaacgcugugcu

SEQ ID NO: 19422 - RNA, 22 nt, Human
ggugcagugguguggcaaaggg

SEQ ID NO: 19423 - RNA, 22 nt, Human
ggugcaugguggaggugacccu

SEQ ID NO: 19424 - RNA, 22 nt, Human
ggugccacugcacucuggccug

SEQ ID NO: 19425 - RNA, 22 nt, Human
ggugccaggcucccagcucagg

SEQ ID NO: 19426 - RNA, 22 nt, Human
ggugcccuggaagcugcugcau

SEQ ID NO: 19427 - RNA, 22 nt, Human
ggugcccuucagacagugggca

SEQ ID NO: 19428 - RNA, 22 nt, Human
ggugcucaagagggcauccucu

SEQ ID NO: 19429 - RNA, 22 nt, Human
ggugcugaaggacuauaacggu

SEQ ID NO: 19430 - RNA, 19 nt, Human
ggugcugacaucaugcuuu

SEQ ID NO: 19431 - RNA, 22 nt, Human
ggugcugauuaagaacuguaua

SEQ ID NO: 19432 - RNA, 22 nt, Human
ggugcuucugggcauagcagga

SEQ ID NO: 19433 - RNA, 22 nt, Human
gguggaaggcagcagucucagg

SEQ ID NO: 19434 - RNA, 17 nt, Human
gguggaaguuucuaguu

SEQ ID NO: 19435 - RNA, 22 nt, Human
gguggacaaaugaaugacugaa

SEQ ID NO: 19436 - RNA, 22 nt, Human
gguggagagcuggaugagaggu

SEQ ID NO: 19437 - RNA, 22 nt, Human
gguggaugcugacuguucugcu

SEQ ID NO: 19438 - RNA, 22 nt, Human
gguggcagagacauaggacaua

SEQ ID NO: 19439 - RNA, 22 nt, Human
gguggcagcgucuaucugacau

SEQ ID NO: 19440 - RNA, 22 nt, Human
gguggcaggcuggcauuggcaa

SEQ ID NO: 19441 - RNA, 22 nt, Human
gguggcagggagugucccuggg

SEQ ID NO: 19442 - RNA, 18 nt, Human
gguggcaggucagaugcc

SEQ ID NO: 19443 - RNA, 22 nt, Human
gguggcagucuuaagagaucuu

SEQ ID NO: 19444 - RNA, 22 nt, Human
gguggcaguggucucugacaga

SEQ ID NO: 19445 - RNA, 22 nt, Human
gguggcaguuacaggggcaaau

SEQ ID NO: 19446 - RNA, 22 nt, Human
gguggcauaagaacacuaaaga

SEQ ID NO: 19447 - RNA, 22 nt, Human
gguggcauacaacauagaggcu

SEQ ID NO: 19448 - RNA, 22 nt, Human
gguggcaucucaguucaugggc

SEQ ID NO: 19449 - RNA, 22 nt, Human
gguggcaucucuuuccagauuu

SEQ ID NO: 19450 - RNA, 22 nt, Human
gguggccauaggaccagccugg

SEQ ID NO: 19451 - RNA, 22 nt, Human
gguggccucagcaaggcuggca

SEQ ID NO: 19452 - RNA, 22 nt, Human
gguggccugcccugaucccugg

SEQ ID NO: 19453 - RNA, 21 nt, Human
gguggcuagaaagcagugaga

SEQ ID NO: 19454 - RNA, 22 nt, Human
gguggcucaaagagagcacaga

SEQ ID NO: 19455 - RNA, 19 nt, Human
gguggcucagggcccagcc

SEQ ID NO: 19456 - RNA, 18 nt, Human
gguggcuggggacggaca

SEQ ID NO: 19457 - RNA, 22 nt, Human
gguggcugguuuuauaagaggu

SEQ ID NO: 19458 - RNA, 22 nt, Human
ggugggaaauaauuaggauuau

SEQ ID NO: 19459 - RNA, 18 nt, Human
ggugggaagccagggccu

SEQ ID NO: 19460 - RNA, 22 nt, Human
ggugggagccaacacccuucug

SEQ ID NO: 19461 - RNA, 22 nt, Human
ggugggaggacuguuugaggca

SEQ ID NO: 19462 - RNA, 22 nt, Human
ggugggcaacauuuggccugag

SEQ ID NO: 19463 - RNA, 22 nt, Human
ggugggcagcucuuggcaggca

SEQ ID NO: 19464 - RNA, 22 nt, Human
gguggggcuaggaccucaggau

SEQ ID NO: 19465 - RNA, 22 nt, Human
gguggggcucagcaaucugugu

SEQ ID NO: 19466 - RNA, 22 nt, Human
gguggggcugcaagcaguucgg

SEQ ID NO: 19467 - RNA, 16 nt, Human
ggugggguaguuagaa

SEQ ID NO: 19468 - RNA, 22 nt, Human
gguggguaaaacugcuggcacu

SEQ ID NO: 19469 - RNA, 22 nt, Human
ggugggugagcccugggagcug

SEQ ID NO: 19470 - RNA, 22 nt, Human
gguggguuuggaagagcaggcu

SEQ ID NO: 19471 - RNA, 22 nt, Human
ggugguggagccagcugggagu

SEQ ID NO: 19472 - RNA, 22 nt, Human
ggugguggucccgacuugggag

SEQ ID NO: 19473 - RNA, 22 nt, Human
ggugguugcauaggccagcagc

SEQ ID NO: 19474 - RNA, 22 nt, Human
ggugucaaaauaccauuucagg

SEQ ID NO: 19475 - RNA, 22 nt, Human
uccucaugccgggucucacgcu

SEQ ID NO: 19476 - RNA, 22 nt, Human
uccuccaagcguggguguuuga

SEQ ID NO: 19477 - RNA, 20 nt, Human
uccuccagaagggcagggug

SEQ ID NO: 19478 - RNA, 22 nt, Human
uccuccagcccucuaggaaaau

SEQ ID NO: 19479 - RNA, 22 nt, Human
uccuccaggcaccucacuggcu

SEQ ID NO: 19480 - RNA, 22 nt, Human
uccuccaggucuaggguggcuu

SEQ ID NO: 19481 - RNA, 22 nt, Human
uccuccagucuuggugagguug

SEQ ID NO: 19482 - RNA, 23 nt, Human
uccucccaaauuucagccucauu

SEQ ID NO: 19483 - RNA, 22 nt, Human
uccucccugaguggggacagcu

SEQ ID NO: 19484 - RNA, 22 nt, Human
uccucccugggagcuucugagu

SEQ ID NO: 19485 - RNA, 19 nt, Human
uccucccuuugguguccug

SEQ ID NO: 19486 - RNA, 22 nt, Human
uccuccucacgcuguugcuugu

SEQ ID NO: 19487 - RNA, 22 nt, Human
uccuccuccucacagucaccug

SEQ ID NO: 19488 - RNA, 23 nt, Human
uccuccugacacagccugaguga

SEQ ID NO: 19489 - RNA, 22 nt, Human
uccuccugcuguuagucuugaa

SEQ ID NO: 19490 - RNA, 22 nt, Human
uccuccugucuaccaguuccug

SEQ ID NO: 19491 - RNA, 19 nt, Human
uccucugaagguucuuuua

SEQ ID NO: 19492 - RNA, 22 nt, Human
uccucugacuucugguugaguu

SEQ ID NO: 19493 - RNA, 22 nt, Human
uccucugcucagcauuccucac

SEQ ID NO: 19494 - RNA, 22 nt, Human
uccucugggccuauuuguucac

SEQ ID NO: 19495 - RNA, 22 nt, Human
uccucuucugcccaucagaggc

SEQ ID NO: 19496 - RNA, 22 nt, Human
uccucuuuaaaugcuuuuaucu

SEQ ID NO: 19497 - RNA, 22 nt, Human
uccugaaaugugcacaugacau

SEQ ID NO: 19498 - RNA, 22 nt, Human
uccugaacauuaugcaagcuuc

SEQ ID NO: 19499 - RNA, 22 nt, Human
uccugaagaugaaaagagaggu

SEQ ID NO: 19500 - RNA, 22 nt, Human
uccugaaugaguugaucacaau

SEQ ID NO: 19501 - RNA, 22 nt, Human
uccugaauuucccagcaugaac

SEQ ID NO: 19502 - RNA, 20 nt, Human
uccugagaccugggaagguu

SEQ ID NO: 19503 - RNA, 22 nt, Human
uccugagagccuuggcuucaga

SEQ ID NO: 19504 - RNA, 22 nt, Human
uccugagagucaagaaugcagg

SEQ ID NO: 19505 - RNA, 22 nt, Human
uccugagaugcugauuucgggg

SEQ ID NO: 19506 - RNA, 22 nt, Human
uccugagauucugcauuucuaa

SEQ ID NO: 19507 - RNA, 20 nt, Human
uccugagccuccaccauguc

SEQ ID NO: 19508 - RNA, 22 nt, Human
uccugagcucccaugaacaggc

SEQ ID NO: 19509 - RNA, 22 nt, Human
uccugaggagaagagugcuagg

SEQ ID NO: 19510 - RNA, 22 nt, Human
uccugaggaugguugaagugca

SEQ ID NO: 19511 - RNA, 22 nt, Human
uccugagguggauugagcagag

SEQ ID NO: 19512 - RNA, 22 nt, Human
uccugagugagagcugggaggu

SEQ ID NO: 19513 - RNA, 22 nt, Human
uccugagugguuguuuucuucc

SEQ ID NO: 19514 - RNA, 22 nt, Human
uccugaguguuuggccaggcca

SEQ ID NO: 19515 - RNA, 22 nt, Human
gucugccucuauugccuaccug

SEQ ID NO: 19516 - RNA, 22 nt, Human
gucugccucuuucuuucugggu

SEQ ID NO: 19517 - RNA, 22 nt, Human
gucugccugcaauccagagacu

SEQ ID NO: 19518 - RNA, 22 nt, Human
gucugccuggaggcagcugcug

SEQ ID NO: 19519 - RNA, 22 nt, Human
gucugccuuuaucaucuccuua

SEQ ID NO: 19520 - RNA, 22 nt, Human
gucugcucaugcuaccgcgggc

SEQ ID NO: 19521 - RNA, 22 nt, Human
gucugcuguagguaggacagca

SEQ ID NO: 19522 - RNA, 22 nt, Human
gucugcuuuucugaauugccug

SEQ ID NO: 19523 - RNA, 22 nt, Human
gucugcuuuucugcccuuucau

SEQ ID NO: 19524 - RNA, 22 nt, Human
gucugcuuuuguuuuacuggua

SEQ ID NO: 19525 - RNA, 22 nt, Human
gucuggaaauucaauuuaaugc

SEQ ID NO: 19526 - RNA, 22 nt, Human
gucuggaaauuuaagguaugag

SEQ ID NO: 19527 - RNA, 22 nt, Human
gucuggaagagcaggaauaaac

SEQ ID NO: 19528 - RNA, 22 nt, Human
gucuggaagugucuuguuaagu

SEQ ID NO: 19529 - RNA, 22 nt, Human
gucuggacaggacuauuucuaa

SEQ ID NO: 19530 - RNA, 22 nt, Human
gucuggagccccagucaaugag

SEQ ID NO: 19531 - RNA, 22 nt, Human
gucuggaggcacuuucucauga

SEQ ID NO: 19532 - RNA, 17 nt, Human
gucuggaguggccuuca

SEQ ID NO: 19533 - RNA, 22 nt, Human
gucuggaguggggccugagaau

SEQ ID NO: 19534 - RNA, 22 nt, Human
gucuggcauaugcaaagugcau

SEQ ID NO: 19535 - RNA, 22 nt, Human
gucuggcauucuuccuggagaa

SEQ ID NO: 19536 - RNA, 22 nt, Human
gucuggccauuugcccauugug

SEQ ID NO: 19537 - RNA, 22 nt, Human
gucuggccuuuuuagcuugugg

SEQ ID NO: 19538 - RNA, 22 nt, Human
gucuggcuagagacacccuccc

SEQ ID NO: 19539 - RNA, 22 nt, Human
gucuggcucaguccuagcugua

SEQ ID NO: 19540 - RNA, 22 nt, Human
gucugggaguuuggugcugccg

SEQ ID NO: 19541 - RNA, 22 nt, Human
gucugggcaggaaucugcauuc

SEQ ID NO: 19542 - RNA, 22 nt, Human
gucugggccaggcgagccgagg

SEQ ID NO: 19543 - RNA, 22 nt, Human
gucugggcuuagggacauggca

SEQ ID NO: 19544 - RNA, 17 nt, Human
gucugggcuuuagagac

SEQ ID NO: 19545 - RNA, 22 nt, Human
gucugguccucuucacaguggc

SEQ ID NO: 19546 - RNA, 22 nt, Human
gucuggugggauuccaaguggc

SEQ ID NO: 19547 - RNA, 22 nt, Human
gucuguagauauucacuccuuc

SEQ ID NO: 19548 - RNA, 22 nt, Human
gucuguagucacacaggugaca

SEQ ID NO: 19549 - RNA, 22 nt, Human
gucuguaucagaggagugaaug

SEQ ID NO: 19550 - RNA, 22 nt, Human
gucugucauacggcuuauguaa

SEQ ID NO: 19551 - RNA, 22 nt, Human
gucuguccacuuggaagcuccc

SEQ ID NO: 19552 - RNA, 22 nt, Human
gucugucucccugugacugaga

SEQ ID NO: 19553 - RNA, 22 nt, Human
gucugugguagacaggaaggca

SEQ ID NO: 19554 - RNA, 22 nt, Human
gucuguggucccugcuggggac

SEQ ID NO: 19555 - RNA, 19 nt, Human
gucuguguauuuguugcug

SEQ ID NO: 19556 - RNA, 22 nt, Human
gucuguguuuucaggccuuugu

SEQ ID NO: 19557 - RNA, 22 nt, Human
gucuuaagaaugaaugcugaga

SEQ ID NO: 19558 - RNA, 19 nt, Human
gucuuacaggcaacaugag

SEQ ID NO: 19559 - RNA, 22 nt, Human
gucuuaccgcaccucaugaacu

SEQ ID NO: 19560 - RNA, 22 nt, Human
gucuuagauuucaccgauaaug

SEQ ID NO: 19561 - RNA, 22 nt, Human
gucuuauaguacaauuugaagu

SEQ ID NO: 19562 - RNA, 22 nt, Human
gucuuauuaaauugaacccuca

SEQ ID NO: 19563 - RNA, 22 nt, Human
gucuuauugcguauguauacaa

SEQ ID NO: 19564 - RNA, 22 nt, Human
gucuuauuuaaagagaucauac

SEQ ID NO: 19565 - RNA, 22 nt, Human
gucuuauuuaaccuaaauuucu

SEQ ID NO: 19566 - RNA, 22 nt, Human
gucuuauuuucugucuacuaaa

SEQ ID NO: 19567 - RNA, 22 nt, Human
gucuucaacaauaacuaccacu

SEQ ID NO: 19568 - RNA, 22 nt, Human
gucuucauucaacaaauauuca

SEQ ID NO: 19569 - RNA, 22 nt, Human
gucuuccacauuucaagaggcu

SEQ ID NO: 19570 - RNA, 22 nt, Human
gucuucuaaguaucaaagcaga

SEQ ID NO: 19571 - RNA, 20 nt, Human
gucuucuauucccagaaagu

SEQ ID NO: 19572 - RNA, 22 nt, Human
gucuucugccuccauuagaguu

SEQ ID NO: 19573 - RNA, 22 nt, Human
gucuucugucugucuggcaugu

SEQ ID NO: 19574 - RNA, 22 nt, Human
gucuucuuugucaucuuagguu

SEQ ID NO: 19575 - RNA, 22 nt, Human
gucuugaaauucuguuaaagga

SEQ ID NO: 19576 - RNA, 20 nt, Human
gucuugaaggggucauggag

SEQ ID NO: 19577 - RNA, 22 nt, Human
gucuuggccgugcagaugaaga

SEQ ID NO: 19578 - RNA, 19 nt, Human
gucuuguaacacauaagug

SEQ ID NO: 19579 - RNA, 22 nt, Human
gucuuuauauuuacuaaagaau

SEQ ID NO: 19580 - RNA, 22 nt, Human
gucuuuauuacaaauccuuuuc

SEQ ID NO: 19581 - RNA, 22 nt, Human
gucuuuauuugagauugucauu

SEQ ID NO: 19582 - RNA, 21 nt, Human
gucuuucuaccucuauguggc

SEQ ID NO: 19583 - RNA, 22 nt, Human
gucuuuuuuacaccuuacauca

SEQ ID NO: 19584 - RNA, 22 nt, Human
gugaaaauaaggcugguucuug

SEQ ID NO: 19585 - RNA, 22 nt, Human
gugaacuaaggauucaaacuuc

SEQ ID NO: 19586 - RNA, 22 nt, Human
gugaagaccagggaacgcuggc

SEQ ID NO: 19587 - RNA, 22 nt, Human
gugaagacuuggagaaguuaag

SEQ ID NO: 19588 - RNA, 17 nt, Human
gugaagagucauugaau

SEQ ID NO: 19589 - RNA, 22 nt, Human
gugaagaucugagcccucaggu

SEQ ID NO: 19590 - RNA, 22 nt, Human
gugaagcagaguguggaagcaa

SEQ ID NO: 19591 - RNA, 22 nt, Human
gugaagcaguugcguggguucc

SEQ ID NO: 19592 - RNA, 22 nt, Human
gugaaggacugaaugaaaaugu

SEQ ID NO: 19593 - RNA, 22 nt, Human
gugaaggaggggccacagauau

SEQ ID NO: 19594 - RNA, 22 nt, Human
gugaaggauuggagggcaucuu

SEQ ID NO: 19595 - RNA, 22 nt, Human
gugaauaagaccuaaggaugaa

SEQ ID NO: 19596 - RNA, 21 nt, Human
gugaauuaauuauaugccuua

SEQ ID NO: 19597 - RNA, 22 nt, Human
gugaauuucugacuaaaagugc

SEQ ID NO: 19598 - RNA, 22 nt, Human
gugacagaaacagggcuagaau

SEQ ID NO: 19599 - RNA, 16 nt, Human
gugacagacaauaggc

SEQ ID NO: 19600 - RNA, 22 nt, Human
gugacagagauuaauagcuugg

SEQ ID NO: 19601 - RNA, 22 nt, Human
gugacagauuugcugcgcaugg

SEQ ID NO: 19602 - RNA, 18 nt, Human
gugacagcugcuagcuca

SEQ ID NO: 19603 - RNA, 22 nt, Human
gugacaggauagucagcuuugu

SEQ ID NO: 19604 - RNA, 22 nt, Human
gugacaggcauggggucaugca

SEQ ID NO: 19605 - RNA, 22 nt, Human
gugacaggcccagugggaugca

SEQ ID NO: 19606 - RNA, 22 nt, Human
gugacagguauacucaccauug

SEQ ID NO: 19607 - RNA, 22 nt, Human
gugacauguuauggacuggcua

SEQ ID NO: 19608 - RNA, 22 nt, Human
gugacauuuuuacugaugagag

SEQ ID NO: 19609 - RNA, 20 nt, Human
gugaccagaagacagugggu

SEQ ID NO: 19610 - RNA, 22 nt, Human
gugaccaucagagaauaacaaa

SEQ ID NO: 19611 - RNA, 22 nt, Human
gugacccaggacacuguguauc

SEQ ID NO: 19612 - RNA, 22 nt, Human
gugacgugaggggcuccuguug

SEQ ID NO: 19613 - RNA, 22 nt, Human
gugacucacacaggccugggcu

SEQ ID NO: 19614 - RNA, 22 nt, Human
gugacucuacuuaagauuaagc

SEQ ID NO: 19615 - RNA, 22 nt, Human
gugacucugcauuuuauggauc

SEQ ID NO: 19616 - RNA, 22 nt, Human
gugacucuguuucugaaaacag

SEQ ID NO: 19617 - RNA, 18 nt, Human
gugacugccccaaaaggc

SEQ ID NO: 19618 - RNA, 22 nt, Human
gugacuguaauuaccuuagcaa

SEQ ID NO: 19619 - RNA, 22 nt, Human
gugacuuuaacuucagauuaga

SEQ ID NO: 19620 - RNA, 22 nt, Human
gugagaauaccagcagugagaa

SEQ ID NO: 19621 - RNA, 22 nt, Human
gugagacacccaagagucagau

SEQ ID NO: 19622 - RNA, 22 nt, Human
gugagacaucuugggaagugau

SEQ ID NO: 19623 - RNA, 22 nt, Human
gugagagaucccccacucaucu

SEQ ID NO: 19624 - RNA, 22 nt, Human
gugccagccuggugcgccuggg

SEQ ID NO: 19625 - RNA, 20 nt, Human
gugccaggcaagacaggugg

SEQ ID NO: 19626 - RNA, 22 nt, Human
gugccagggaguggaggagcuu

SEQ ID NO: 19627 - RNA, 22 nt, Human
gugcccaggggccagcugccgg

SEQ ID NO: 19628 - RNA, 22 nt, Human
gugcccaguaaaugaaagcuuu

SEQ ID NO: 19629 - RNA, 22 nt, Human
gugcccucacaaaguggaaaga

SEQ ID NO: 19630 - RNA, 22 nt, Human
gugcccucaugaaacgaaggau

SEQ ID NO: 19631 - RNA, 22 nt, Human
ucugaagaaauacagcuggggu

SEQ ID NO: 19632 - RNA, 22 nt, Human
ucugaagaauaggauguugugu

SEQ ID NO: 19633 - RNA, 23 nt, Human
ucugaagaugcuguuuccaguga

SEQ ID NO: 19634 - RNA, 22 nt, Human
ucugaagauuaccagcuaaaug

SEQ ID NO: 19635 - RNA, 22 nt, Human
ucugaagcacagcaggaagggu

SEQ ID NO: 19636 - RNA, 22 nt, Human
ucugaagccaccucugcuuguc

SEQ ID NO: 19637 - RNA, 22 nt, Human
ucugaaggucugagaaccagga

SEQ ID NO: 19638 - RNA, 22 nt, Human
ucugaagguugagaagggcuga

SEQ ID NO: 19639 - RNA, 19 nt, Human
ucugaaugggaugaguugg

SEQ ID NO: 19640 - RNA, 22 nt, Human
ucugaauguuaggaaacuuucu

SEQ ID NO: 19641 - RNA, 22 nt, Human
ucugaauucugacaauuugaau

SEQ ID NO: 19642 - RNA, 19 nt, Human
ucugacacuuacacacccc

SEQ ID NO: 19643 - RNA, 22 nt, Human
ucugacagaggugguagauaca

SEQ ID NO: 19644 - RNA, 22 nt, Human
ucugacagcuccaggcagcaau

SEQ ID NO: 19645 - RNA, 22 nt, Human
ucugacagugugaauauugacu

SEQ ID NO: 19646 - RNA, 22 nt, Human
ucugaccaggcuggcucagggc

SEQ ID NO: 19647 - RNA, 23 nt, Human
ucugaccauuugacaacauccug

SEQ ID NO: 19648 - RNA, 22 nt, Human
ucugacccuacucagcacuuug

SEQ ID NO: 19649 - RNA, 22 nt, Human
ucugacccucagaucaugucca

SEQ ID NO: 19650 - RNA, 22 nt, Human
ucugacuuauuuguccuuggug

SEQ ID NO: 19651 - RNA, 22 nt, Human
ucugagaaaguacuguauguuc

SEQ ID NO: 19652 - RNA, 21 nt, Human
ucugagaacuucugcugcagc

SEQ ID NO: 19653 - RNA, 20 nt, Human
ucugagaagcaaacaauguu

SEQ ID NO: 19654 - RNA, 22 nt, Human
ucugagaagcaccuucuggaca

SEQ ID NO: 19655 - RNA, 22 nt, Human
ucugagaagcgggagccuguga

SEQ ID NO: 19656 - RNA, 22 nt, Human
ucugagaaggugcaucagcugc

SEQ ID NO: 19657 - RNA, 22 nt, Human
ucugagaauaaaaauugcauuu

SEQ ID NO: 19658 - RNA, 22 nt, Human
ucugagacaggaaguggagggu

SEQ ID NO: 19659 - RNA, 21 nt, Human
ucugagacuggguuagaaugu

SEQ ID NO: 19660 - RNA, 22 nt, Human
ucugagagauacaaggaggcaa

SEQ ID NO: 19661 - RNA, 22 nt, Human
ucugagagcaaggcauuagcag

SEQ ID NO: 19662 - RNA, 22 nt, Human
ucugagagcaucacugggguac

SEQ ID NO: 19663 - RNA, 22 nt, Human
ucugagagcucuggggccccuu

SEQ ID NO: 19664 - RNA, 22 nt, Human
ucugagagcuguagaagccuau

SEQ ID NO: 19665 - RNA, 22 nt, Human
ucugagaggcagaccuuccuaa

SEQ ID NO: 19666 - RNA, 22 nt, Human
ucugagaggugaauucagcaaa

SEQ ID NO: 19667 - RNA, 22 nt, Human
ucugagagguuaagcaauuuga

SEQ ID NO: 19668 - RNA, 22 nt, Human
ucugagagucucugaggcagau

SEQ ID NO: 19669 - RNA, 22 nt, Human
ucugagagucuuucuucaagug

SEQ ID NO: 19670 - RNA, 22 nt, Human
ucugagauuaagcagagaugga

SEQ ID NO: 19671 - RNA, 16 nt, Human
ucugagcacaaaacac

SEQ ID NO: 19672 - RNA, 22 nt, Human
ucugagcaccuuauauucuuga

SEQ ID NO: 19673 - RNA, 22 nt, Human
ucugagcagaugcucgcucucc

SEQ ID NO: 19674 - RNA, 22 nt, Human
ucugagccaccugagcccaugg

SEQ ID NO: 19675 - RNA, 22 nt, Human
ucugagccauaagaguacagga

SEQ ID NO: 19676 - RNA, 22 nt, Human
ucugagcccucuuuugcagccc

SEQ ID NO: 19677 - RNA, 22 nt, Human
ucugagcuaauccuguugccga

SEQ ID NO: 19678 - RNA, 22 nt, Human
ucugagcuacgaugccugucac

SEQ ID NO: 19679 - RNA, 22 nt, Human
ucugagcucaagugacaguuag

SEQ ID NO: 19680 - RNA, 22 nt, Human
ucugagcuccaugcaggaggcu

SEQ ID NO: 19681 - RNA, 21 nt, Human
ucugagcugaguccucuaggu

SEQ ID NO: 19682 - RNA, 19 nt, Human
ucugagcugauaugacauu

SEQ ID NO: 19683 - RNA, 22 nt, Human
ucugagcugcagaguggggugg

SEQ ID NO: 19684 - RNA, 22 nt, Human
ucugagcugcuagguaugcauu

SEQ ID NO: 19685 - RNA, 22 nt, Human
ucugagcugggcacagaaggcg

SEQ ID NO: 19686 - RNA, 22 nt, Human
ucugagcuucugcauuuccaac

SEQ ID NO: 19687 - RNA, 22 nt, Human
ucugaggaagcagcaggaagug

SEQ ID NO: 19688 - RNA, 22 nt, Human
ucugaggaauaagaaggaagug

SEQ ID NO: 19689 - RNA, 18 nt, Human
ucugaggaauggaagagc

SEQ ID NO: 19690 - RNA, 22 nt, Human
ucugaggaauucugcagugaga

SEQ ID NO: 19691 - RNA, 21 nt, Human
ucugaggagaaacucuuggug

SEQ ID NO: 19692 - RNA, 22 nt, Human
ucugaggagugacccucuugca

SEQ ID NO: 19693 - RNA, 22 nt, Human
ucugaggaguugggccagugcu

SEQ ID NO: 19694 - RNA, 22 nt, Human
ucugaggcaaacagaggagugu

SEQ ID NO: 19695 - RNA, 22 nt, Human
ucugaggcagcuugccacucua

SEQ ID NO: 19696 - RNA, 17 nt, Human
ucugaggccucuaggag

SEQ ID NO: 19697 - RNA, 22 nt, Human
ucugaggccuucagcaugaauc

SEQ ID NO: 19698 - RNA, 20 nt, Human
ucugaggcugagcccagcgu

SEQ ID NO: 19699 - RNA, 20 nt, Human
ucugaggcugagcucuacuu

SEQ ID NO: 19700 - RNA, 22 nt, Human
ucugaggcuucagacuguacug

SEQ ID NO: 19701 - RNA, 22 nt, Human
ucugagggacaauuuugauggu

SEQ ID NO: 19702 - RNA, 22 nt, Human
ucugaggggguguuuauaagcu

SEQ ID NO: 19703 - RNA, 22 nt, Human
ucugagguaccagcugguuuau

SEQ ID NO: 19704 - RNA, 22 nt, Human
ucugaggucagugcugcaguua

SEQ ID NO: 19705 - RNA, 19 nt, Human
ucugagguggaacuggggg

SEQ ID NO: 19706 - RNA, 23 nt, Human
ucugagugauuagccucuggggu

SEQ ID NO: 19707 - RNA, 22 nt, Human
ucugaguuacacaagcaagggu

SEQ ID NO: 19708 - RNA, 20 nt, Human
ucugauaaaaacuacuccau

SEQ ID NO: 19709 - RNA, 22 nt, Human
ucugauaaaugccaucuuuuug

SEQ ID NO: 19710 - RNA, 22 nt, Human
ucugaucugugccuuaggccug

SEQ ID NO: 19711 - RNA, 21 nt, Human
ucugauguguuuaaugguggg

SEQ ID NO: 19712 - RNA, 22 nt, Human
ucugauuccagugacccuagga

SEQ ID NO: 19713 - RNA, 22 nt, Human
ucugauuuauauaugcagauac

SEQ ID NO: 19714 - RNA, 22 nt, Human
ucugcaaaaguguucauaaaga

SEQ ID NO: 19715 - RNA, 20 nt, Human
ucugcaaacaaguuuuagac

SEQ ID NO: 19716 - RNA, 22 nt, Human
ucugcaagagcuucaagguaga

SEQ ID NO: 19717 - RNA, 19 nt, Human
ucugcaagugucagaggcg

SEQ ID NO: 19718 - RNA, 22 nt, Human
ucugcacaggagggccguggug

SEQ ID NO: 19719 - RNA, 22 nt, Human
ucugcaccucugaaauugguca

SEQ ID NO: 19720 - RNA, 22 nt, Human
ucugcagaaggaaucagcugag

SEQ ID NO: 19721 - RNA, 19 nt, Human
ucugcagaaggcauacaug

SEQ ID NO: 19722 - RNA, 22 nt, Human
ucugcagacaggaagcugaggc

SEQ ID NO: 19723 - RNA, 23 nt, Human
ucugcagacgcuguucuauuguc

SEQ ID NO: 19724 - RNA, 19 nt, Human
ucugcagacuauauuguga

SEQ ID NO: 19725 - RNA, 22 nt, Human
ucugcagacuugccuaagugug

SEQ ID NO: 19726 - RNA, 20 nt, Human
ucugcagauaagggaaagac

SEQ ID NO: 19727 - RNA, 22 nt, Human
ucugcagauuuaucagcagcug

SEQ ID NO: 19728 - RNA, 22 nt, Human
ucugcagcaaccuuucaccucc

SEQ ID NO: 19729 - RNA, 22 nt, Human
ucugcagcuuacuuucacauga

SEQ ID NO: 19730 - RNA, 22 nt, Human
ucugcagcuuuuugguggggug

SEQ ID NO: 19731 - RNA, 22 nt, Human
ucugcaggaaaaaagugccugg

SEQ ID NO: 19732 - RNA, 22 nt, Human
ucugcaggagagugcccuagag

SEQ ID NO: 19733 - RNA, 22 nt, Human
ucugcaggcuuauaggaugggu

SEQ ID NO: 19734 - RNA, 20 nt, Human
uaaaugcaugaauguaaggc

SEQ ID NO: 19735 - RNA, 18 nt, Human
uaaaugcauguuaauaac

SEQ ID NO: 19736 - RNA, 22 nt, Human
uaaaugcuccauacauacacca

SEQ ID NO: 19737 - RNA, 20 nt, Human
uaaauggugcauuucuuaua

SEQ ID NO: 19738 - RNA, 22 nt, Human
uaaauguaccuucugccuuacu

SEQ ID NO: 19739 - RNA, 22 nt, Human
uaaauguauaggcacuaaaccu

SEQ ID NO: 19740 - RNA, 22 nt, Human
uaaaugucuguuaacaugaaug

SEQ ID NO: 19741 - RNA, 22 nt, Human
uaaaugucuuugucacguuggg

SEQ ID NO: 19742 - RNA, 22 nt, Human
uaaaugugggggccacgggcuu

SEQ ID NO: 19743 - RNA, 22 nt, Human
uaaauguguaaaccuccauuac

SEQ ID NO: 19744 - RNA, 22 nt, Human
uaaauguuacuuuccuuucaca

SEQ ID NO: 19745 - RNA, 22 nt, Human
uaaauuauggcuggcagagcag

SEQ ID NO: 19746 - RNA, 22 nt, Human
uaaauuauguuccauguccuuu

SEQ ID NO: 19747 - RNA, 22 nt, Human
uaaauucagugaguaauuucug

SEQ ID NO: 19748 - RNA, 22 nt, Human
gugcccugacacaccuggugug

SEQ ID NO: 19749 - RNA, 22 nt, Human
gugcccuggcucacagugucuc

SEQ ID NO: 19750 - RNA, 22 nt, Human
gugcccugguccccagcauaua

SEQ ID NO: 19751 - RNA, 22 nt, Human
gugcccugugaacuguaaggaa

SEQ ID NO: 19752 - RNA, 22 nt, Human
gugccgcgacgcagucggugcc

SEQ ID NO: 19753 - RNA, 22 nt, Human
gugccgugggccuuagugaucu

SEQ ID NO: 19754 - RNA, 22 nt, Human
gugccucccgggaccaugcacu

SEQ ID NO: 19755 - RNA, 22 nt, Human
gugccucccggggcucuuccuu

SEQ ID NO: 19756 - RNA, 22 nt, Human
gugccucucauuggcugagccc

SEQ ID NO: 19757 - RNA, 22 nt, Human
gugccucugagcucugcuacag

SEQ ID NO: 19758 - RNA, 22 nt, Human
gugccugcaggugccggcuuca

SEQ ID NO: 19759 - RNA, 22 nt, Human
gugccugguuuggggaauguuc

SEQ ID NO: 19760 - RNA, 22 nt, Human
gugccugugccaggggugugcu

SEQ ID NO: 19761 - RNA, 22 nt, Human
gugccugugcggacucagggaa

SEQ ID NO: 19762 - RNA, 17 nt, Human
gugccuguuguccugga

SEQ ID NO: 19763 - RNA, 22 nt, Human
gugcgcacccucccggcauccc

SEQ ID NO: 19764 - RNA, 22 nt, Human
gugcgugaggccccugagcgaa

SEQ ID NO: 19765 - RNA, 22 nt, Human
gugcuaaugaauuggagugccu

SEQ ID NO: 19766 - RNA, 22 nt, Human
gugcucagaaacuugcucauuu

SEQ ID NO: 19767 - RNA, 22 nt, Human
gugcucauagaugaugcucuuu

SEQ ID NO: 19768 - RNA, 22 nt, Human
gugcucauguccuuucacugca

SEQ ID NO: 19769 - RNA, 22 nt, Human
gugcuccaacauuagugugcuu

SEQ ID NO: 19770 - RNA, 19 nt, Human
gugcuccagggcaaggagu

SEQ ID NO: 19771 - RNA, 22 nt, Human
gugcucuaaggcaccacugagc

SEQ ID NO: 19772 - RNA, 22 nt, Human
gugcucuagggucauuauggua

SEQ ID NO: 19773 - RNA, 22 nt, Human
gugcucuaggugauuccaaaau

SEQ ID NO: 19774 - RNA, 22 nt, Human
gugcucuauagagaucuaaucg

SEQ ID NO: 19775 - RNA, 22 nt, Human
gugcucuaugaggauauagggu

SEQ ID NO: 19776 - RNA, 22 nt, Human
gugcucuccagccccacgugga

SEQ ID NO: 19777 - RNA, 22 nt, Human
gugcucugaucugucugacauc

SEQ ID NO: 19778 - RNA, 21 nt, Human
gugcucugggcagcagagggc

SEQ ID NO: 19779 - RNA, 22 nt, Human
gugcugaaauagaggagguggc

SEQ ID NO: 19780 - RNA, 22 nt, Human
gugcugaacauuugggacuugu

SEQ ID NO: 19781 - RNA, 18 nt, Human
gugcugaauaacuacuuu

SEQ ID NO: 19782 - RNA, 22 nt, Human
gugcugagaacaaaaguggaca

SEQ ID NO: 19783 - RNA, 22 nt, Human
gugcugagaauugauguccuug

SEQ ID NO: 19784 - RNA, 22 nt, Human
gugcugagauuacaggugugag

SEQ ID NO: 19785 - RNA, 22 nt, Human
gugcugagcacaaggcccagag

SEQ ID NO: 19786 - RNA, 22 nt, Human
gugcugaggccaaugucagggu

SEQ ID NO: 19787 - RNA, 20 nt, Human
gugcugagggcugggcaaug

SEQ ID NO: 19788 - RNA, 22 nt, Human
gugcugauugggagcugggauu

SEQ ID NO: 19789 - RNA, 23 nt, Human
gugcugcaaaaucggccacugca

SEQ ID NO: 19790 - RNA, 22 nt, Human
gugcugcagggucagcacccuc

SEQ ID NO: 19791 - RNA, 22 nt, Human
gugcugccggcauagcagugaa

SEQ ID NO: 19792 - RNA, 22 nt, Human
gugcugcucaagggacaggaca

SEQ ID NO: 19793 - RNA, 22 nt, Human
gugcuggcugccaggaggcugc

SEQ ID NO: 19794 - RNA, 22 nt, Human
gugcuggggagauaggaagaga

SEQ ID NO: 19795 - RNA, 22 nt, Human
gugcugguauaugacugaguuu

SEQ ID NO: 19796 - RNA, 22 nt, Human
gugcuguaucagaaucugcucu

SEQ ID NO: 19797 - RNA, 22 nt, Human
gugcugucauuagcaucuagag

SEQ ID NO: 19798 - RNA, 18 nt, Human
gugcugugggcaguggcc

SEQ ID NO: 19799 - RNA, 22 nt, Human
gugcugugucuaucaggaauaa

SEQ ID NO: 19800 - RNA, 22 nt, Human
gugcuuaugugggagggagagg

SEQ ID NO: 19801 - RNA, 22 nt, Human
gugcuuccucugccaacacucu

SEQ ID NO: 19802 - RNA, 22 nt, Human
gugcuuccuguauugauuccau

SEQ ID NO: 19803 - RNA, 22 nt, Human
gugcuucucuucacacccaacu

SEQ ID NO: 19804 - RNA, 22 nt, Human
gugcuugggggaaguaacagac

SEQ ID NO: 19805 - RNA, 22 nt, Human
gugcuuuacuggcagugaugua

SEQ ID NO: 19806 - RNA, 22 nt, Human
gugcuuuagcugaguuggucaa

SEQ ID NO: 19807 - RNA, 22 nt, Human
gugcuuuccauccucccugcug

SEQ ID NO: 19808 - RNA, 22 nt, Human
gugcuuucugcugcauuccucu

SEQ ID NO: 19809 - RNA, 22 nt, Human
gugcuuugucuucaggaucaua

SEQ ID NO: 19810 - RNA, 22 nt, Human
gugcuuuucugcaggguccuau

SEQ ID NO: 19811 - RNA, 22 nt, Human
guggaacagccugugcaaaccu

SEQ ID NO: 19812 - RNA, 22 nt, Human
guggaagcaguaaggcaaguuu

SEQ ID NO: 19813 - RNA, 22 nt, Human
guggaagccuacucuugugguu

SEQ ID NO: 19814 - RNA, 22 nt, Human
guggaagcugaugggagacagg

SEQ ID NO: 19815 - RNA, 22 nt, Human
guggaaugaauagauuugcauu

SEQ ID NO: 19816 - RNA, 22 nt, Human
guggaauggccaugggauccuu

SEQ ID NO: 19817 - RNA, 22 nt, Human
guggacagacauaauccuaauu

SEQ ID NO: 19818 - RNA, 22 nt, Human
guggaccaagguggaagauaaa

SEQ ID NO: 19819 - RNA, 22 nt, Human
guggacguuaggauuguguaga

SEQ ID NO: 19820 - RNA, 22 nt, Human
guggacuugcuguccuggacuu

SEQ ID NO: 19821 - RNA, 22 nt, Human
guggagacgggacagaagcuaa

SEQ ID NO: 19822 - RNA, 22 nt, Human
guggagcaggacuagcugagaa

SEQ ID NO: 19823 - RNA, 22 nt, Human
guggagcaugugaggacugagu

SEQ ID NO: 19824 - RNA, 23 nt, Human
guggagccacaucacaggcuccu

SEQ ID NO: 19825 - RNA, 22 nt, Human
guggagcccugguagggacccc

SEQ ID NO: 19826 - RNA, 19 nt, Human
guggagcuaagaaaaggaa

SEQ ID NO: 19827 - RNA, 22 nt, Human
guggagggaaugaaucuucucu

SEQ ID NO: 19828 - RNA, 22 nt, Human
guggaugagauaacuguagaag

SEQ ID NO: 19829 - RNA, 22 nt, Human
guggaugcuuaggcagccuggg

SEQ ID NO: 19830 - RNA, 22 nt, Human
guggauggugguccaguaucau

SEQ ID NO: 19831 - RNA, 22 nt, Human
guggcacagagauggggcauga

SEQ ID NO: 19832 - RNA, 22 nt, Human
guggcacagccaagccucacuc

SEQ ID NO: 19833 - RNA, 22 nt, Human
guggcacagugggagagcccca

SEQ ID NO: 19834 - RNA, 22 nt, Human
guggcacaugcugcugcuucug

SEQ ID NO: 19835 - RNA, 22 nt, Human
guggcagaagaguaggaugggc

SEQ ID NO: 19836 - RNA, 22 nt, Human
guggcagagccuugcggcuuug

SEQ ID NO: 19837 - RNA, 22 nt, Human
guggcagagguuccucagugug

SEQ ID NO: 19838 - RNA, 22 nt, Human
guggcagauugcucaccauggu

SEQ ID NO: 19839 - RNA, 22 nt, Human
guggcagcaaaauccugcauuc

SEQ ID NO: 19840 - RNA, 22 nt, Human
guggcagcagaggggugguaug

SEQ ID NO: 19841 - RNA, 22 nt, Human
guggcagcagguacucacgcac

SEQ ID NO: 19842 - RNA, 22 nt, Human
guggcagcucauguuguuuuaa

SEQ ID NO: 19843 - RNA, 22 nt, Human
uaaaagauaucuuagggauuug

SEQ ID NO: 19844 - RNA, 21 nt, Human
uaaaagaugacaagacagcuc

SEQ ID NO: 19845 - RNA, 22 nt, Human
uaaaaguggauaagcuguagga

SEQ ID NO: 19846 - RNA, 22 nt, Human
uaaaaguuuuaguuguacauaa

SEQ ID NO: 19847 - RNA, 22 nt, Human
uaaaauagcaugugcagugaaa

SEQ ID NO: 19848 - RNA, 22 nt, Human
uaaaaucaugacagauugacau

SEQ ID NO: 19849 - RNA, 22 nt, Human
uaaaauuugucccugaguguug

SEQ ID NO: 19850 - RNA, 22 nt, Human
uaaacaagaaacauuuucuguu

SEQ ID NO: 19851 - RNA, 22 nt, Human
uaaacaagcugucugauauucu

SEQ ID NO: 19852 - RNA, 22 nt, Human
uaaacagagaagacuuugagca

SEQ ID NO: 19853 - RNA, 22 nt, Human
uaaacagagaugccugggucug

SEQ ID NO: 19854 - RNA, 22 nt, Human
uaaacagccuccccuuucacuc

SEQ ID NO: 19855 - RNA, 22 nt, Human
uaaacagcuacugugucaaagg

SEQ ID NO: 19856 - RNA, 21 nt, Human
uaaacauaaccuuguauggcu

SEQ ID NO: 19857 - RNA, 22 nt, Human
uaaacaucugucauguguuuau

SEQ ID NO: 19858 - RNA, 22 nt, Human
uaaacuaucuguguuugaaguu

SEQ ID NO: 19859 - RNA, 22 nt, Human
uaaacucucaacagagaaccac

SEQ ID NO: 19860 - RNA, 22 nt, Human
uaaagaauagauggguagggag

SEQ ID NO: 19861 - RNA, 23 nt, Human
uaaagacagccuucaggauucug

SEQ ID NO: 19862 - RNA, 22 nt, Human
uaaagauaagacaucaacugag

SEQ ID NO: 19863 - RNA, 17 nt, Human
uaaagaucagccaugua

SEQ ID NO: 19864 - RNA, 22 nt, Human
uaaagaucuuaggaagauuuuc

SEQ ID NO: 19865 - RNA, 22 nt, Human
uaaagaugcuauagugaaggag

SEQ ID NO: 19866 - RNA, 22 nt, Human
uaaagcaagacacacccauagc

SEQ ID NO: 19867 - RNA, 22 nt, Human
uaaagcaaggcaaauuguuggu

SEQ ID NO: 19868 - RNA, 22 nt, Human
uaaagcacaguaugagcauugg

SEQ ID NO: 19869 - RNA, 22 nt, Human
uaaagcaggcaucucucuccuc

SEQ ID NO: 19870 - RNA, 22 nt, Human
uaaagcaggccacauaugugau

SEQ ID NO: 19871 - RNA, 22 nt, Human
uaaagcaggugcucagugacca

SEQ ID NO: 19872 - RNA, 22 nt, Human
uaaagcaguaugauggaaggau

SEQ ID NO: 19873 - RNA, 22 nt, Human
uaaagcagugugguuguguccc

SEQ ID NO: 19874 - RNA, 22 nt, Human
uaaagcaguguugggucggacg

SEQ ID NO: 19875 - RNA, 22 nt, Human
uaaagccaacacuuuacugcuc

SEQ ID NO: 19876 - RNA, 22 nt, Human
uaaagcccucugaucacacugg

SEQ ID NO: 19877 - RNA, 22 nt, Human
uaaagcuaaccuuagugaacac

SEQ ID NO: 19878 - RNA, 22 nt, Human
uaaagcuauugcuguuuauugu

SEQ ID NO: 19879 - RNA, 22 nt, Human
uaaagcugcaggcucagaaaac

SEQ ID NO: 19880 - RNA, 22 nt, Human
uaaaggcaaauguguguuugug

SEQ ID NO: 19881 - RNA, 22 nt, Human
uaaaggcacggaguuguuaugg

SEQ ID NO: 19882 - RNA, 22 nt, Human
uaaaggccaugauggaggauca

SEQ ID NO: 19883 - RNA, 22 nt, Human
uaaaggcucacuggcuuggggu

SEQ ID NO: 19884 - RNA, 22 nt, Human
uaaaggcuucugcagggacuga

SEQ ID NO: 19885 - RNA, 22 nt, Human
uaaagguaguuuuaaaggugcu

SEQ ID NO: 19886 - RNA, 22 nt, Human
uaaagguuuauucaacaaaaua

SEQ ID NO: 19887 - RNA, 22 nt, Human
uaaaguauauuuuuucucaaua

SEQ ID NO: 19888 - RNA, 22 nt, Human
uaaagucagagauccuuggcuu

SEQ ID NO: 19889 - RNA, 22 nt, Human
uaaagucaucuuuacaucuuug

SEQ ID NO: 19890 - RNA, 22 nt, Human
uaaagugaaguucagaauggcu

SEQ ID NO: 19891 - RNA, 22 nt, Human
uaaagugcucauaaaaauggau

SEQ ID NO: 19892 - RNA, 22 nt, Human
uaaagugcuuaugauaaccaag

SEQ ID NO: 19893 - RNA, 22 nt, Human
uaaagugguggugcuaauguau

SEQ ID NO: 19894 - RNA, 22 nt, Human
uaaaguguggacaguaucuaua

SEQ ID NO: 19895 - RNA, 22 nt, Human
uaaaguguggauaugauuagua

SEQ ID NO: 19896 - RNA, 22 nt, Human
uaaaguguuuguaugcagauaa

SEQ ID NO: 19897 - RNA, 22 nt, Human
uaaaguuuauuggcaccaccau

SEQ ID NO: 19898 - RNA, 22 nt, Human
uaaaguuuguagcaauugauau

SEQ ID NO: 19899 - RNA, 20 nt, Human
uacucacaaaugguuuagca

SEQ ID NO: 19900 - RNA, 22 nt, Human
uacucagagucauugcccuucu

SEQ ID NO: 19901 - RNA, 22 nt, Human
uacucaguuuaugauuucaagu

SEQ ID NO: 19902 - RNA, 22 nt, Human
uacucaugacugaugaauaccu

SEQ ID NO: 19903 - RNA, 22 nt, Human
uacucucaggguuaguacagga

SEQ ID NO: 19904 - RNA, 22 nt, Human
uacucucuggaaauuauaguga

SEQ ID NO: 19905 - RNA, 22 nt, Human
uacucugccacuaggaguucug

SEQ ID NO: 19906 - RNA, 22 nt, Human
uacucugccccagccaauaaug

SEQ ID NO: 19907 - RNA, 22 nt, Human
uacucuggaguugagaugcgag

SEQ ID NO: 19908 - RNA, 22 nt, Human
uacugaaauggcagauauauaa

SEQ ID NO: 19909 - RNA, 21 nt, Human
uacugagaccucacagugugc

SEQ ID NO: 19910 - RNA, 22 nt, Human
uacugagcugguccacugaggu

SEQ ID NO: 19911 - RNA, 22 nt, Human
uacugauaagaguuguaggagu

SEQ ID NO: 19912 - RNA, 22 nt, Human
uacugauagcacaaaugacauu

SEQ ID NO: 19913 - RNA, 22 nt, Human
uacugauauuuucaacuagaag

SEQ ID NO: 19914 - RNA, 22 nt, Human
uacugcaaaccauuuacaguag

SEQ ID NO: 19915 - RNA, 22 nt, Human
uacugcagauggccuuguucuu

SEQ ID NO: 19916 - RNA, 22 nt, Human
uacugcauagacacugggauau

SEQ ID NO: 19917 - RNA, 22 nt, Human
uacugcaugggugcaugcugcu

SEQ ID NO: 19918 - RNA, 22 nt, Human
uacugcauuaucaaggggaagg

SEQ ID NO: 19919 - RNA, 22 nt, Human
uacugcuugguguuguuguauc

SEQ ID NO: 19920 - RNA, 22 nt, Human
uacuggaaggcuggaagucagg

SEQ ID NO: 19921 - RNA, 20 nt, Human
uacugggcaagcccacagac

SEQ ID NO: 19922 - RNA, 20 nt, Human
uacugggucuggguccugga

SEQ ID NO: 19923 - RNA, 22 nt, Human
uacuguaaugagauuagcuucc

SEQ ID NO: 19924 - RNA, 22 nt, Human
uacuguacucaacaugugaguu

SEQ ID NO: 19925 - RNA, 22 nt, Human
uacuguacugucuuuuuugcug

SEQ ID NO: 19926 - RNA, 21 nt, Human
uacuguauagauguguucuug

SEQ ID NO: 19927 - RNA, 22 nt, Human
uacugucuggaguugccaaagg

SEQ ID NO: 19928 - RNA, 22 nt, Human
uacugucuuuagggguagaaau

SEQ ID NO: 19929 - RNA, 22 nt, Human
uacugugguaacauuuuaaauu

SEQ ID NO: 19930 - RNA, 22 nt, Human
uacugugugauuccauuuacgu

SEQ ID NO: 19931 - RNA, 22 nt, Human
uacuguguggugagcugucucc

SEQ ID NO: 19932 - RNA, 22 nt, Human
uacuguuagagcgauuuguccu

SEQ ID NO: 19933 - RNA, 22 nt, Human
uacuguuauauauagcagcagu

SEQ ID NO: 19934 - RNA, 22 nt, Human
uacuguucaugccuucauaaag

SEQ ID NO: 19935 - RNA, 20 nt, Human
uacuguuguugcuguugcca

SEQ ID NO: 19936 - RNA, 22 nt, Human
uacuguuuucuuuauaguacag

SEQ ID NO: 19937 - RNA, 22 nt, Human
uacuguuuuugccucuuuagaa

SEQ ID NO: 19938 - RNA, 22 nt, Human
uacuuacauaaaaacugaaugu

SEQ ID NO: 19939 - RNA, 20 nt, Human
uacuuaggcuuguuuuggcc

SEQ ID NO: 19940 - RNA, 22 nt, Human
uacuuaggugagauauuuucuu

SEQ ID NO: 19941 - RNA, 22 nt, Human
uacuucaugaguuaauaugcag

SEQ ID NO: 19942 - RNA, 22 nt, Human
uacuuccauguccuuagagucc

SEQ ID NO: 19943 - RNA, 22 nt, Human
uacuucccacuggggucuacca

SEQ ID NO: 19944 - RNA, 22 nt, Human
uacuuccuguuuccaugucugu

SEQ ID NO: 19945 - RNA, 22 nt, Human
uacuucugaaugugaguuuguu

SEQ ID NO: 19946 - RNA, 22 nt, Human
uacuucuggauauucagaacuu

SEQ ID NO: 19947 - RNA, 22 nt, Human
uacuugaguauagucgcuucac

SEQ ID NO: 19948 - RNA, 22 nt, Human
uacuugcuggguguaauuuucu

SEQ ID NO: 19949 - RNA, 22 nt, Human
uacuugcuuggauuucaccaga

SEQ ID NO: 19950 - RNA, 22 nt, Human
uacuuguuaggaauuucuacua

SEQ ID NO: 19951 - RNA, 22 nt, Human
uacuuguuaucaucuuuuccuu

SEQ ID NO: 19952 - RNA, 22 nt, Human
ugacagagcugggauuugaagc

SEQ ID NO: 19953 - RNA, 22 nt, Human
ugacagaggcugaguuagucug

SEQ ID NO: 19954 - RNA, 22 nt, Human
ugacagcaauaauuuuaucuuc

SEQ ID NO: 19955 - RNA, 21 nt, Human
ugacagcacaugcaaucggag

SEQ ID NO: 19956 - RNA, 22 nt, Human
ugacagcagcauagugagcaau

SEQ ID NO: 19957 - RNA, 22 nt, Human
ugacagcagccaccucucaccc

SEQ ID NO: 19958 - RNA, 23 nt, Human
ugacagcaggaacugauuaugua

SEQ ID NO: 19959 - RNA, 22 nt, Human
ugacagcauaacacuggucuug

SEQ ID NO: 19960 - RNA, 22 nt, Human
ugacagcugccacaaaggccau

SEQ ID NO: 19961 - RNA, 22 nt, Human
ugacaggaaacaugcagugauu

SEQ ID NO: 19962 - RNA, 22 nt, Human
ugacaggauaguaggaagaucu

SEQ ID NO: 19963 - RNA, 21 nt, Human
ugacaggcacccuggcuguga

SEQ ID NO: 19964 - RNA, 23 nt, Human
ugacaggccagaagagcagcugg

SEQ ID NO: 19965 - RNA, 22 nt, Human
ugacaggcguuuuucucuagua

SEQ ID NO: 19966 - RNA, 22 nt, Human
ugacaggcuugcuaagacauag

SEQ ID NO: 19967 - RNA, 22 nt, Human
ugacagggaaagguccucuuuu

SEQ ID NO: 19968 - RNA, 22 nt, Human
ugacagggccaugcugcacugc

SEQ ID NO: 19969 - RNA, 22 nt, Human
ugacagggcuagaggcaaugca

SEQ ID NO: 19970 - RNA, 22 nt, Human
ugacagggucagagcugagcug

SEQ ID NO: 19971 - RNA, 21 nt, Human
ugacagguauuuaucuggaaa

SEQ ID NO: 19972 - RNA, 22 nt, Human
ugacaggucauauaagcuugca

SEQ ID NO: 19973 - RNA, 22 nt, Human
ugacagugagcuugggguacuu

SEQ ID NO: 19974 - RNA, 22 nt, Human
ugacagugcggguacaucauag

SEQ ID NO: 19975 - RNA, 22 nt, Human
ugacaguucaggucagauuuau

SEQ ID NO: 19976 - RNA, 22 nt, Human
ugacaguuguauuacaugggaa

SEQ ID NO: 19977 - RNA, 20 nt, Human
ugacaguuucauaugguuca

SEQ ID NO: 19978 - RNA, 21 nt, Human
ugacauaauccauaguacaaa

SEQ ID NO: 19979 - RNA, 22 nt, Human
ugacauccggccacuagacucc

SEQ ID NO: 19980 - RNA, 22 nt, Human
ugacauccuacaccccuggguc

SEQ ID NO: 19981 - RNA, 20 nt, Human
ugacaucuguugaggaggaa

SEQ ID NO: 19982 - RNA, 22 nt, Human
ugacaugaaacuguguugcuac

SEQ ID NO: 19983 - RNA, 22 nt, Human
ugacauguaguuagaaaauagg

SEQ ID NO: 19984 - RNA, 22 nt, Human
ugacauguauguauuuguuuau

SEQ ID NO: 19985 - RNA, 22 nt, Human
ugacaugugcucaucuuggcua

SEQ ID NO: 19986 - RNA, 22 nt, Human
ugacauucuguuaagucucaua

SEQ ID NO: 19987 - RNA, 22 nt, Human
ugacauuuaagccucugauuuc

SEQ ID NO: 19988 - RNA, 22 nt, Human
ugacauuuacuauuccugguua

SEQ ID NO: 19989 - RNA, 21 nt, Human
ugacauuuaguagcauuguca

SEQ ID NO: 19990 - RNA, 22 nt, Human
ugacauuuaucaaagaaauggu

SEQ ID NO: 19991 - RNA, 22 nt, Human
ugacauuuaucuucuacaauga

SEQ ID NO: 19992 - RNA, 22 nt, Human
ugacauuucagauaugguauuu

SEQ ID NO: 19993 - RNA, 18 nt, Human
ugacauuuccagagugua

SEQ ID NO: 19994 - RNA, 22 nt, Human
ugacauuugagagagauauaca

SEQ ID NO: 19995 - RNA, 22 nt, Human
ugaccaauacuguggaugccag

SEQ ID NO: 19996 - RNA, 22 nt, Human
ugaccacauugauuucucaucc

SEQ ID NO: 19997 - RNA, 22 nt, Human
ugaccauggcacauguuugccu

SEQ ID NO: 19998 - RNA, 22 nt, Human
ugaccauggugugcccugugcg

SEQ ID NO: 19999 - RNA, 22 nt, Human
ugacccauuaaccacuuucccu

SEQ ID NO: 20000 - RNA, 22 nt, Human
ugacccuuagugaacauuagaa

SEQ ID NO: 20001 - RNA, 22 nt, Human
ugacccuucugguuccuaccaa

SEQ ID NO: 20002 - RNA, 16 nt, Human
ugacccuugaccagcc

SEQ ID NO: 20003 - RNA, 22 nt, Human
ugacccuugccaaguuccuuuu

SEQ ID NO: 20004 - RNA, 22 nt, Human
ugacccuuggucagagugcccu

SEQ ID NO: 20005 - RNA, 22 nt, Human
ugaccuauuagauuuccuugcc

SEQ ID NO: 20006 - RNA, 22 nt, Human
ugaccuuucuuugagauuccug

SEQ ID NO: 20007 - RNA, 22 nt, Human
ugacuaauuauguuacuaauca

SEQ ID NO: 20008 - RNA, 22 nt, Human
ugacuaauugauaacucuguaa

SEQ ID NO: 20009 - RNA, 21 nt, Human
ugacuaauugugauaaagugc

SEQ ID NO: 20010 - RNA, 22 nt, Human
ugacucaagagccugacucauc

SEQ ID NO: 20011 - RNA, 22 nt, Human
ugacucacaguggagaaagagg

SEQ ID NO: 20012 - RNA, 22 nt, Human
ugacucugauugccuuagcuug

SEQ ID NO: 20013 - RNA, 22 nt, Human
ugacucuguaccugucugccuu

SEQ ID NO: 20014 - RNA, 22 nt, Human
ugacugaaauggcgacagugaa

SEQ ID NO: 20015 - RNA, 21 nt, Human
ugacugaggcuucuucacaca

SEQ ID NO: 20016 - RNA, 22 nt, Human
guuugcauguguacuuaauugg

SEQ ID NO: 20017 - RNA, 22 nt, Human
guuugcauuccaauuuagggga

SEQ ID NO: 20018 - RNA, 22 nt, Human
guuugcuaauuuaaagcuauuu

SEQ ID NO: 20019 - RNA, 22 nt, Human
guuuggaauagcaguaaacauu

SEQ ID NO: 20020 - RNA, 22 nt, Human
guuuggcacuaugaugaggcua

SEQ ID NO: 20021 - RNA, 21 nt, Human
guuuguaaggcacuguguucu

SEQ ID NO: 20022 - RNA, 22 nt, Human
guuuguaugaauguuuuaugcu

SEQ ID NO: 20023 - RNA, 22 nt, Human
guuugucaggagguugaaguca

SEQ ID NO: 20024 - RNA, 22 nt, Human
guuuguuagaagagcagaaucu

SEQ ID NO: 20025 - RNA, 22 nt, Human
guuuguucauggcugaugcuug

SEQ ID NO: 20026 - RNA, 22 nt, Human
guuuguuuguagggaagccgug

SEQ ID NO: 20027 - RNA, 22 nt, Human
guuuuacaaaugacggcauuca

SEQ ID NO: 20028 - RNA, 22 nt, Human
guuuuacaagguuaaucagcag

SEQ ID NO: 20029 - RNA, 22 nt, Human
guuuuacacaccuaugaaagac

SEQ ID NO: 20030 - RNA, 22 nt, Human
guuuuagauaaagcuguccuug

SEQ ID NO: 20031 - RNA, 22 nt, Human
guuuuaugagaccucaggaaua

SEQ ID NO: 20032 - RNA, 22 nt, Human
guuuucaaggggauuuaacuga

SEQ ID NO: 20033 - RNA, 22 nt, Human
guuuucaauuauaagauggcuu

SEQ ID NO: 20034 - RNA, 22 nt, Human
guuuucagccaggagcacauuu

SEQ ID NO: 20035 - RNA, 22 nt, Human
guuuucauuacugcugugauuu

SEQ ID NO: 20036 - RNA, 22 nt, Human
guuuuccugaaacugauggugu

SEQ ID NO: 20037 - RNA, 22 nt, Human
guuuucuaccagggaagagagu

SEQ ID NO: 20038 - RNA, 22 nt, Human
guuuucucugagaugccuuucu

SEQ ID NO: 20039 - RNA, 19 nt, Human
guuuucugaucuugccccc

SEQ ID NO: 20040 - RNA, 22 nt, Human
guuuucuuccugcaauuggcau

SEQ ID NO: 20041 - RNA, 22 nt, Human
guuuucuuugaaugcuucuaga

SEQ ID NO: 20042 - RNA, 18 nt, Human
guuuugaauugucuuaca

SEQ ID NO: 20043 - RNA, 19 nt, Human
guuuugcaggcagagggga

SEQ ID NO: 20044 - RNA, 22 nt, Human
guuuugcuucucauguuaagug

SEQ ID NO: 20045 - RNA, 22 nt, Human
guuuuggcagccguguucacau

SEQ ID NO: 20046 - RNA, 22 nt, Human
guuuugugaggcacccacaggu

SEQ ID NO: 20047 - RNA, 22 nt, Human
guuuuguucaugaacauugggu

SEQ ID NO: 20048 - RNA, 22 nt, Human
guuuuguugcugcagagcucaa

SEQ ID NO: 20049 - RNA, 22 nt, Human
guuuuuauauccuguggagugu

SEQ ID NO: 20050 - RNA, 21 nt, Human
guuuuucagcccugaggugag

SEQ ID NO: 20051 - RNA, 20 nt, Human
guuuuucucucuugccacua

SEQ ID NO: 20052 - RNA, 22 nt, Human
guuuuucucugaaauaguugac

SEQ ID NO: 20053 - RNA, 22 nt, Human
guuuuucuuugugugaagacaa

SEQ ID NO: 20054 - RNA, 22 nt, Human
guuuuuucaugaguaguuaucu

SEQ ID NO: 20055 - RNA, 22 nt, Human
uaaaaaucuuaugaauggcaag

SEQ ID NO: 20056 - RNA, 22 nt, Human
uaaaacaccuguagugucugcc

SEQ ID NO: 20057 - RNA, 22 nt, Human
uaaaaccauuccugcuuucaug

SEQ ID NO: 20058 - RNA, 22 nt, Human
uaaaacuagugguugggacuaa

SEQ ID NO: 20059 - RNA, 22 nt, Human
uaaaagacccucuagaguccca

SEQ ID NO: 20060 - RNA, 22 nt, Human
uaaaagauuuuauaggaacaag

SEQ ID NO: 20061 - RNA, 17 nt, Human
auguaagaagaaagcag

SEQ ID NO: 20062 - RNA, 22 nt, Human
auguaagagcuuugcagggaaa

SEQ ID NO: 20063 - RNA, 22 nt, Human
auguaaguauucaaaauauuuc

SEQ ID NO: 20064 - RNA, 22 nt, Human
auguaauuuagaaaugaacaca

SEQ ID NO: 20065 - RNA, 22 nt, Human
auguaauuuauguuauccauaa

SEQ ID NO: 20066 - RNA, 22 nt, Human
auguaauuugcccucaaguuaa

SEQ ID NO: 20067 - RNA, 22 nt, Human
auguacaaaauguuuugaaaug

SEQ ID NO: 20068 - RNA, 22 nt, Human
auguacaauucuccuugguagg

SEQ ID NO: 20069 - RNA, 22 nt, Human
auguacaauuuuugcuuagggg

SEQ ID NO: 20070 - RNA, 22 nt, Human
auguacacacaaguuugcacgc

SEQ ID NO: 20071 - RNA, 22 nt, Human
auguacacuuuggaagagucac

SEQ ID NO: 20072 - RNA, 22 nt, Human
auguacagccacuucacaguua

SEQ ID NO: 20073 - RNA, 22 nt, Human
auguacaguuucuagacucaaa

SEQ ID NO: 20074 - RNA, 22 nt, Human
auguacauuuagaucauuucug

SEQ ID NO: 20075 - RNA, 18 nt, Human
auguacauuugcuaaagc

SEQ ID NO: 20076 - RNA, 19 nt, Human
auguacccagugucaaucc

SEQ ID NO: 20077 - RNA, 22 nt, Human
auguagaaaguucauagaugcg

SEQ ID NO: 20078 - RNA, 22 nt, Human
auguagaagugggcauuauaga

SEQ ID NO: 20079 - RNA, 22 nt, Human
auguagagcaguguuguccaau

SEQ ID NO: 20080 - RNA, 22 nt, Human
auguagauguucacuugauuuu

SEQ ID NO: 20081 - RNA, 22 nt, Human
auguagcagaagauguuuuccu

SEQ ID NO: 20082 - RNA, 22 nt, Human
auguagcagauauuugugcaca

SEQ ID NO: 20083 - RNA, 21 nt, Human
auguagcuuacaagauaaagg

SEQ ID NO: 20084 - RNA, 21 nt, Human
auguaggaguuauuggaacag

SEQ ID NO: 20085 - RNA, 21 nt, Human
auguaggguuugccuucucua

SEQ ID NO: 20086 - RNA, 22 nt, Human
auguaguauuuggaaauguaaa

SEQ ID NO: 20087 - RNA, 22 nt, Human
auguauaaugcuaauuagcuag

SEQ ID NO: 20088 - RNA, 22 nt, Human
auguauaggaguuaucuguugu

SEQ ID NO: 20089 - RNA, 22 nt, Human
auguauauacuuacaugugugg

SEQ ID NO: 20090 - RNA, 22 nt, Human
auguauaugcaugcauucaaag

SEQ ID NO: 20091 - RNA, 22 nt, Human
auguauaugugaaagauguuua

SEQ ID NO: 20092 - RNA, 22 nt, Human
auguauaugugugcacgcacag

SEQ ID NO: 20093 - RNA, 20 nt, Human
auguauauuacuggcuguga

SEQ ID NO: 20094 - RNA, 22 nt, Human
auguaucaacaaauuguacagu

SEQ ID NO: 20095 - RNA, 19 nt, Human
auguaugaggucuucugcu

SEQ ID NO: 20096 - RNA, 22 nt, Human
auguaugcuuugauuuuagaug

SEQ ID NO: 20097 - RNA, 18 nt, Human
auguauguacauauuuau

SEQ ID NO: 20098 - RNA, 22 nt, Human
auguaugucugaugcacaugca

SEQ ID NO: 20099 - RNA, 22 nt, Human
auguauguuaguguauuaucua

SEQ ID NO: 20100 - RNA, 22 nt, Human
auguauugucucuuuuccuuaa

SEQ ID NO: 20101 - RNA, 22 nt, Human
auguauuucuauguagugaaga

SEQ ID NO: 20102 - RNA, 22 nt, Human
auguauuugcguauggacauac

SEQ ID NO: 20103 - RNA, 22 nt, Human
auguauuuuaagauuugccuca

SEQ ID NO: 20104 - RNA, 22 nt, Human
augucaacaggccuuuaaacau

SEQ ID NO: 20105 - RNA, 22 nt, Human
augucacaaaagucccauuaug

SEQ ID NO: 20106 - RNA, 18 nt, Human
augucacagagggcugaa

SEQ ID NO: 20107 - RNA, 22 nt, Human
augucacagcaggaguauucuu

SEQ ID NO: 20108 - RNA, 22 nt, Human
augucacauggccuguacuuug

SEQ ID NO: 20109 - RNA, 22 nt, Human
augucacuuuugagacuagguu

SEQ ID NO: 20110 - RNA, 22 nt, Human
augucagaaucuacauucuacu

SEQ ID NO: 20111 - RNA, 22 nt, Human
augucagauguuuaucugauuu

SEQ ID NO: 20112 - RNA, 22 nt, Human
augucaggacccuacugcauug

SEQ ID NO: 20113 - RNA, 22 nt, Human
augucauugccaagaugcuaau

SEQ ID NO: 20114 - RNA, 22 nt, Human
auguccaauuucugaggcugcu

SEQ ID NO: 20115 - RNA, 22 nt, Human
auguccagaggugagucagagc

SEQ ID NO: 20116 - RNA, 22 nt, Human
auguccagaguaaagcacauuc

SEQ ID NO: 20117 - RNA, 22 nt, Human
auguccagcaugacacauucuc

SEQ ID NO: 20118 - RNA, 22 nt, Human
auguccaggaagucuuaacuca

SEQ ID NO: 20119 - RNA, 22 nt, Human
auguccagggggcuugacuggu

SEQ ID NO: 20120 - RNA, 22 nt, Human
augucccagcugagagacaacu

SEQ ID NO: 20121 - RNA, 22 nt, Human
augucccucacuccucauucag

SEQ ID NO: 20122 - RNA, 20 nt, Human
auguccucagccacugcccu

SEQ ID NO: 20123 - RNA, 23 nt, Human
auguccugcauaguugcuucugu

SEQ ID NO: 20124 - RNA, 22 nt, Human
auguccuggucuagcuuccggg

SEQ ID NO: 20125 - RNA, 20 nt, Human
auguccuguugcugccccag

SEQ ID NO: 20126 - RNA, 22 nt, Human
auguccuguuuuggcuugcucu

SEQ ID NO: 20127 - RNA, 22 nt, Human
auguccuugagacccuccucgg

SEQ ID NO: 20128 - RNA, 22 nt, Human
augucucagaguggucacuggg

SEQ ID NO: 20129 - RNA, 23 nt, Human
augucucugggcaguagggcuug

SEQ ID NO: 20130 - RNA, 22 nt, Human
augcagaaagagaauguaaugu

SEQ ID NO: 20131 - RNA, 22 nt, Human
augcagaagaaaccauggcuuc

SEQ ID NO: 20132 - RNA, 22 nt, Human
augcagaugggugccaaagucu

SEQ ID NO: 20133 - RNA, 22 nt, Human
augcagauguuugguucauugu

SEQ ID NO: 20134 - RNA, 22 nt, Human
augcagcaguuuacaaagcaau

SEQ ID NO: 20135 - RNA, 22 nt, Human
augcagcugcugacagcuuuca

SEQ ID NO: 20136 - RNA, 22 nt, Human
augcagcugucagggagaacau

SEQ ID NO: 20137 - RNA, 22 nt, Human
augcaggagaccaauuggaugg

SEQ ID NO: 20138 - RNA, 22 nt, Human
augcaggagagcauguuuaaga

SEQ ID NO: 20139 - RNA, 22 nt, Human
augcaggaguucgaggcuguau

SEQ ID NO: 20140 - RNA, 22 nt, Human
augcaggcagacacugugggca

SEQ ID NO: 20141 - RNA, 22 nt, Human
augcagggauuaaaugacugcc

SEQ ID NO: 20142 - RNA, 22 nt, Human
augcagggcagaguacguuagc

SEQ ID NO: 20143 - RNA, 22 nt, Human
augcaggguucugggcuagaga

SEQ ID NO: 20144 - RNA, 22 nt, Human
augcagguauauuuuauuaaag

SEQ ID NO: 20145 - RNA, 22 nt, Human
augcaguccacaggccacagug

SEQ ID NO: 20146 - RNA, 22 nt, Human
augcaguggcuucagugucagu

SEQ ID NO: 20147 - RNA, 22 nt, Human
augcaguguuuggaagcuuaag

SEQ ID NO: 20148 - RNA, 22 nt, Human
augcaguuagcacuacagaaga

SEQ ID NO: 20149 - RNA, 22 nt, Human
augcaguuagcaguagcucccc

SEQ ID NO: 20150 - RNA, 22 nt, Human
augcaguuagguaauagucuca

SEQ ID NO: 20151 - RNA, 22 nt, Human
augcaguugcaauggaggacuc

SEQ ID NO: 20152 - RNA, 18 nt, Human
augcaguugguacucuca

SEQ ID NO: 20153 - RNA, 22 nt, Human
augcaguuuuaaaucauuucag

SEQ ID NO: 20154 - RNA, 22 nt, Human
augcaguuuuaggggaaggguu

SEQ ID NO: 20155 - RNA, 22 nt, Human
augcauaauguauguauugacu

SEQ ID NO: 20156 - RNA, 22 nt, Human
augcauauaaggcacauguauu

SEQ ID NO: 20157 - RNA, 22 nt, Human
augcauaugcaaugcacaauuu

SEQ ID NO: 20158 - RNA, 22 nt, Human
augcauaugccguagaauaagu

SEQ ID NO: 20159 - RNA, 22 nt, Human
augcauauguacuugcauaugu

SEQ ID NO: 20160 - RNA, 22 nt, Human
augcauauuggauuagcagcca

SEQ ID NO: 20161 - RNA, 22 nt, Human
augcauauuucaugaaucuuug

SEQ ID NO: 20162 - RNA, 22 nt, Human
augcauauuucuuggagcaccu

SEQ ID NO: 20163 - RNA, 22 nt, Human
augcauauuuucuacuauaucg

SEQ ID NO: 20164 - RNA, 22 nt, Human
augcauauuuucuguuggugac

SEQ ID NO: 20165 - RNA, 22 nt, Human
augcaucaaagucugaaauuuc

SEQ ID NO: 20166 - RNA, 22 nt, Human
augcaucacuugaggucaggag

SEQ ID NO: 20167 - RNA, 21 nt, Human
augcaucuaucuucuacucca

SEQ ID NO: 20168 - RNA, 22 nt, Human
augcaugauccugagcaaccca

SEQ ID NO: 20169 - RNA, 22 nt, Human
augcaugcacacacugcauugc

SEQ ID NO: 20170 - RNA, 22 nt, Human
auguggaggaaaugaguguaca

SEQ ID NO: 20171 - RNA, 22 nt, Human
auguggaucacagggguguguc

SEQ ID NO: 20172 - RNA, 22 nt, Human
auguggauuugggagugaucag

SEQ ID NO: 20173 - RNA, 22 nt, Human
auguggcauucuuggucauuuc

SEQ ID NO: 20174 - RNA, 22 nt, Human
auguggccagucauguaguaac

SEQ ID NO: 20175 - RNA, 21 nt, Human
auguggccauuguaguccacg

SEQ ID NO: 20176 - RNA, 22 nt, Human
auguggccuuagguucuagugg

SEQ ID NO: 20177 - RNA, 22 nt, Human
auguggcuaguccaauuaauga

SEQ ID NO: 20178 - RNA, 22 nt, Human
auguggcuaguccucugcggca

SEQ ID NO: 20179 - RNA, 18 nt, Human
auguggcuagugcaacug

SEQ ID NO: 20180 - RNA, 22 nt, Human
auguggcuagugcaacugagaa

SEQ ID NO: 20181 - RNA, 22 nt, Human
auguggcuagugcagaugaaua

SEQ ID NO: 20182 - RNA, 18 nt, Human
auguggcuagugcuacug

SEQ ID NO: 20183 - RNA, 22 nt, Human
auguggcuaguggcuaugaucu

SEQ ID NO: 20184 - RNA, 22 nt, Human
auguggcucacauagcuggaaa

SEQ ID NO: 20185 - RNA, 22 nt, Human
auguggcucagcaggcucccgu

SEQ ID NO: 20186 - RNA, 22 nt, Human
auguggcugccaccugccugaa

SEQ ID NO: 20187 - RNA, 22 nt, Human
auguggcugucacagcauaaug

SEQ ID NO: 20188 - RNA, 22 nt, Human
auguggcuugucgauauuagca

SEQ ID NO: 20189 - RNA, 22 nt, Human
auguggcuuucaugauuaagca

SEQ ID NO: 20190 - RNA, 22 nt, Human
augugggagauuucaggaggug

SEQ ID NO: 20191 - RNA, 22 nt, Human
auguguacaaccaagcacuaaa

SEQ ID NO: 20192 - RNA, 22 nt, Human
auguguacacuggacuucugau

SEQ ID NO: 20193 - RNA, 22 nt, Human
auguguagaacuguaaugccca

SEQ ID NO: 20194 - RNA, 22 nt, Human
auguguauauuuggugucaaua

SEQ ID NO: 20195 - RNA, 22 nt, Human
auguguaugagugugcuucuuu

SEQ ID NO: 20196 - RNA, 22 nt, Human
auguguaugauaccuuugcuga

SEQ ID NO: 20197 - RNA, 22 nt, Human
auguguaugcaugcacuaagau

SEQ ID NO: 20198 - RNA, 22 nt, Human
auguguauuuuguacuauuggg

SEQ ID NO: 20199 - RNA, 22 nt, Human
augugucaauuuucaaaugcuu

SEQ ID NO: 20200 - RNA, 22 nt, Human
auguguccacaggugugagaga

SEQ ID NO: 20201 - RNA, 22 nt, Human
auguguccauuaucaguucugg

SEQ ID NO: 20202 - RNA, 17 nt, Human
augugucuagugcaacc

SEQ ID NO: 20203 - RNA, 22 nt, Human
augugucugaccacuguauugg

SEQ ID NO: 20204 - RNA, 17 nt, Human
augugucugaguguccu

SEQ ID NO: 20205 - RNA, 22 nt, Human
augugucuggcauggaaagugu

SEQ ID NO: 20206 - RNA, 20 nt, Human
augugucuuagagcaucagg

SEQ ID NO: 20207 - RNA, 22 nt, Human
augugugcauguuagagagagu

SEQ ID NO: 20208 - RNA, 22 nt, Human
augugugccugagugauggacu

SEQ ID NO: 20209 - RNA, 22 nt, Human
auguguguacacacgugacucu

SEQ ID NO: 20210 - RNA, 22 nt, Human
auguguuggauauuagugggga

SEQ ID NO: 20211 - RNA, 22 nt, Human
auguguuugguuauaugguauu

SEQ ID NO: 20212 - RNA, 22 nt, Human
auguguuuuuauucuggcaugu

SEQ ID NO: 20213 - RNA, 23 nt, Human
auguuaaacauaacugaagagcc

SEQ ID NO: 20214 - RNA, 22 nt, Human
auguuaaagauggugggaaauu

SEQ ID NO: 20215 - RNA, 22 nt, Human
auguuaaaugguuuauuauuaa

SEQ ID NO: 20216 - RNA, 23 nt, Human
auguuaagaagguaguuaggaua

SEQ ID NO: 20217 - RNA, 22 nt, Human
auguuacaaauccuacagguag

SEQ ID NO: 20218 - RNA, 22 nt, Human
auguuacacauaggcauaaaug

SEQ ID NO: 20219 - RNA, 22 nt, Human
auguuacaugaaacggccuacu

SEQ ID NO: 20220 - RNA, 22 nt, Human
auguuacugugaucaugauacu

SEQ ID NO: 20221 - RNA, 22 nt, Human
auguuaggcaaucuuucuuguu

SEQ ID NO: 20222 - RNA, 22 nt, Human
auguuaugacaagcaugacaga

SEQ ID NO: 20223 - RNA, 22 nt, Human
auguuaugugcaagauacauaa

SEQ ID NO: 20224 - RNA, 21 nt, Human
auguuauucuguuccuccagc

SEQ ID NO: 20225 - RNA, 22 nt, Human
auguuauuuauuauccucgguu

SEQ ID NO: 20226 - RNA, 22 nt, Human
auguucaaacuuuuuacacacc

SEQ ID NO: 20227 - RNA, 22 nt, Human
auguuccugguauaucaugacc

SEQ ID NO: 20228 - RNA, 22 nt, Human
auguucuauaucauuauuguga

SEQ ID NO: 20229 - RNA, 22 nt, Human
auguucugaauaaugugcauua

SEQ ID NO: 20230 - RNA, 22 nt, Human
auguucugccuccauuuugagu

SEQ ID NO: 20231 - RNA, 22 nt, Human
auguucuuggauguuguguaua

SEQ ID NO: 20232 - RNA, 22 nt, Human
auguucuuucagccagugcauc

SEQ ID NO: 20233 - RNA, 22 nt, Human
auguucuuugaaauauuuuaga

SEQ ID NO: 20234 - RNA, 22 nt, Human
auguucuuuggaauuuaugaaa

SEQ ID NO: 20235 - RNA, 22 nt, Human
auguucuuugugauucugagcu

SEQ ID NO: 20236 - RNA, 22 nt, Human
auguugagagcugagaucagcc

SEQ ID NO: 20237 - RNA, 22 nt, Human
auguugcacaaaguccauccau

SEQ ID NO: 20238 - RNA, 22 nt, Human
auguuggcuggauuuuagauuu

SEQ ID NO: 20239 - RNA, 22 nt, Human
auguuguagcauaugaaauaua

SEQ ID NO: 20240 - RNA, 22 nt, Human
auguuuaaaggguugagaaaua

SEQ ID NO: 20241 - RNA, 22 nt, Human
auguuuacaaaaaggaggcuug

SEQ ID NO: 20242 - RNA, 22 nt, Human
auguuuacaauucaguauuaca

SEQ ID NO: 20243 - RNA, 22 nt, Human
auguuuacugaaaagauuucaa

SEQ ID NO: 20244 - RNA, 22 nt, Human
auguuucaggcgaacuaacaug

SEQ ID NO: 20245 - RNA, 22 nt, Human
auguuucaugacugagcaaaau

SEQ ID NO: 20246 - RNA, 22 nt, Human
auguuuccagauaugucacccu

SEQ ID NO: 20247 - RNA, 22 nt, Human
augcugggagugaagccccugg

SEQ ID NO: 20248 - RNA, 22 nt, Human
augcuggggccucagaccagaa

SEQ ID NO: 20249 - RNA, 22 nt, Human
augcuggugguugauggcagga

SEQ ID NO: 20250 - RNA, 22 nt, Human
augcuguauacauaugaaauua

SEQ ID NO: 20251 - RNA, 22 nt, Human
augcugugaaaaagaaggcuga

SEQ ID NO: 20252 - RNA, 22 nt, Human
augcugugccuggaaagcggcu

SEQ ID NO: 20253 - RNA, 22 nt, Human
augcugugcuggcuaaccaugg

SEQ ID NO: 20254 - RNA, 22 nt, Human
augcuguggaugccuugcccca

SEQ ID NO: 20255 - RNA, 22 nt, Human
augcuguguauuuuacucuuuc

SEQ ID NO: 20256 - RNA, 22 nt, Human
augcuguguuuuaaauggaaau

SEQ ID NO: 20257 - RNA, 22 nt, Human
augcuguuaagauaauggguuc

SEQ ID NO: 20258 - RNA, 22 nt, Human
augcuguuauucuaauguguga

SEQ ID NO: 20259 - RNA, 22 nt, Human
augcuuaacucuguacauaguu

SEQ ID NO: 20260 - RNA, 22 nt, Human
augcuucagugcuaccuucaaa

SEQ ID NO: 20261 - RNA, 22 nt, Human
augcuuccagauugguaggggu

SEQ ID NO: 20262 - RNA, 22 nt, Human
augcuucccuuugcuccacaug

SEQ ID NO: 20263 - RNA, 22 nt, Human
augcuucucagcucaaggcaaa

SEQ ID NO: 20264 - RNA, 22 nt, Human
augcuucuccugaacaucccug

SEQ ID NO: 20265 - RNA, 22 nt, Human
augcuucugaagaagaaaagac

SEQ ID NO: 20266 - RNA, 22 nt, Human
augcuucuuguauuuggcugac

SEQ ID NO: 20267 - RNA, 22 nt, Human
augcuuggcagaguucuuuuuc

SEQ ID NO: 20268 - RNA, 22 nt, Human
augcuuggcguuucacuuccug

SEQ ID NO: 20269 - RNA, 22 nt, Human
augcuuuagugucaaguuuggg

SEQ ID NO: 20270 - RNA, 19 nt, Human
augcuuuauguuauuucuu

SEQ ID NO: 20271 - RNA, 22 nt, Human
augcuuuauugcuucugggcac

SEQ ID NO: 20272 - RNA, 22 nt, Human
augcuuugaaguuuuuccucau

SEQ ID NO: 20273 - RNA, 18 nt, Human
augcuuugcuuacguuau

SEQ ID NO: 20274 - RNA, 22 nt, Human
augcuuuggccaaugagaagug

SEQ ID NO: 20275 - RNA, 22 nt, Human
augcuuuuaacuccuuuauccc

SEQ ID NO: 20276 - RNA, 22 nt, Human
auggaaaaggcugauuucauua

SEQ ID NO: 20277 - RNA, 19 nt, Human
auggaaaauuguacucaau

SEQ ID NO: 20278 - RNA, 22 nt, Human
auggaaagccaguguuccauca

SEQ ID NO: 20279 - RNA, 22 nt, Human
auuagagaaugugcugacauug

SEQ ID NO: 20280 - RNA, 22 nt, Human
auuagagagagcauauuacugg

SEQ ID NO: 20281 - RNA, 22 nt, Human
auuagagcaguguauuaugaua

SEQ ID NO: 20282 - RNA, 22 nt, Human
auuagauacacagauuuccacu

SEQ ID NO: 20283 - RNA, 22 nt, Human
auuagaucagaucggcaguaau

SEQ ID NO: 20284 - RNA, 22 nt, Human
auuagauuguaaauguuuucac

SEQ ID NO: 20285 - RNA, 22 nt, Human
auuagcaaaacaacuuuucuau

SEQ ID NO: 20286 - RNA, 22 nt, Human
auuagcaaggcagcaucaggca

SEQ ID NO: 20287 - RNA, 22 nt, Human
auuagcaaguuuuccagcuaau

SEQ ID NO: 20288 - RNA, 22 nt, Human
auuagcaaucugaaaauugcgg

SEQ ID NO: 20289 - RNA, 22 nt, Human
auuagcaauuguuucauugauc

SEQ ID NO: 20290 - RNA, 22 nt, Human
auuagcauauuaaauagucauu

SEQ ID NO: 20291 - RNA, 22 nt, Human
auuagccuccuugucucaugcg

SEQ ID NO: 20292 - RNA, 22 nt, Human
auuagccugcucuuuagugaaa

SEQ ID NO: 20293 - RNA, 22 nt, Human
auuagcugugacgaggcauugu

SEQ ID NO: 20294 - RNA, 22 nt, Human
auuagcuuccuauaguaagggg

SEQ ID NO: 20295 - RNA, 22 nt, Human
auuagcuugguaugccauaaag

SEQ ID NO: 20296 - RNA, 22 nt, Human
auuaggacagagaugucaagag

SEQ ID NO: 20297 - RNA, 22 nt, Human
auuaggauguguauauuguguu

SEQ ID NO: 20298 - RNA, 22 nt, Human
auuaggcagugccauuguacgg

SEQ ID NO: 20299 - RNA, 22 nt, Human
auuaggcauuauggggauaagg

SEQ ID NO: 20300 - RNA, 22 nt, Human
auuagggaaacugacuugucuc

SEQ ID NO: 20301 - RNA, 22 nt, Human
auuagguaguauaaucuuuguu

SEQ ID NO: 20302 - RNA, 22 nt, Human
auuaggucauggggaggcccua

SEQ ID NO: 20303 - RNA, 22 nt, Human
auuaguauucaguuuauaacac

SEQ ID NO: 20304 - RNA, 22 nt, Human
auuagugcccaggcugccucuu

SEQ ID NO: 20305 - RNA, 22 nt, Human
auuaguguucuuaucuucuagg

SEQ ID NO: 20306 - RNA, 22 nt, Human
auuaguguuguggcuucauggc

SEQ ID NO: 20307 - RNA, 22 nt, Human
auuauauaggacuugcccuucc

SEQ ID NO: 20308 - RNA, 22 nt, Human
auuauaugugggauagaauuua

SEQ ID NO: 20309 - RNA, 22 nt, Human
auuauauugaguauaaccagag

SEQ ID NO: 20310 - RNA, 22 nt, Human
auuaucaaguuuacugugugga

SEQ ID NO: 20311 - RNA, 22 nt, Human
auuaucacauggacuuugcuuu

SEQ ID NO: 20312 - RNA, 22 nt, Human
auuaucuauguagaaugauuuu

SEQ ID NO: 20313 - RNA, 22 nt, Human
auuaugagaggagaaaagucag

SEQ ID NO: 20314 - RNA, 22 nt, Human
auuaugcauauacauuugacua

SEQ ID NO: 20315 - RNA, 22 nt, Human
auuaugcauuccaaccuuauuc

SEQ ID NO: 20316 - RNA, 22 nt, Human
auuauggauggaggcauuaguc

SEQ ID NO: 20317 - RNA, 22 nt, Human
auuauuaaagcuacaucaagga

SEQ ID NO: 20318 - RNA, 23 nt, Human
auuauuaaggacauggacuuugu

SEQ ID NO: 20319 - RNA, 22 nt, Human
auuauuaggugcucucugacaa

SEQ ID NO: 20320 - RNA, 22 nt, Human
auuauuagugauguuguuacug

SEQ ID NO: 20321 - RNA, 22 nt, Human
auuauuauuguugauguuaggg

SEQ ID NO: 20322 - RNA, 22 nt, Human
auuauuauuuuagagagaggcc

SEQ ID NO: 20323 - RNA, 22 nt, Human
auuauucaacacuugagaaauu

SEQ ID NO: 20324 - RNA, 22 nt, Human
auuauucagucuuguaaggagu

SEQ ID NO: 20325 - RNA, 22 nt, Human
auuauucuuugauaaauggcag

SEQ ID NO: 20326 - RNA, 22 nt, Human
auuauugugauaggugucagug

SEQ ID NO: 20327 - RNA, 22 nt, Human
auuauuuacagugugcucgaag

SEQ ID NO: 20328 - RNA, 22 nt, Human
auuauuugaguuccucucuacc

SEQ ID NO: 20329 - RNA, 22 nt, Human
auucaaacacuuugagaaguuc

SEQ ID NO: 20330 - RNA, 22 nt, Human
auucaaacaggccaauugaccu

SEQ ID NO: 20331 - RNA, 22 nt, Human
auucaaaccccauagacaacuu

SEQ ID NO: 20332 - RNA, 21 nt, Human
auucaaagaagaggaaggccc

SEQ ID NO: 20333 - RNA, 22 nt, Human
auucaaaugucaaauccaccag

SEQ ID NO: 20334 - RNA, 22 nt, Human
auucaagguauuuaaaacauaa

SEQ ID NO: 20335 - RNA, 22 nt, Human
auucaaguccagcuucucuaca

SEQ ID NO: 20336 - RNA, 22 nt, Human
auucaaguggcugcuauguuaa

SEQ ID NO: 20337 - RNA, 22 nt, Human
auucacaaagucacccuuacac

SEQ ID NO: 20338 - RNA, 22 nt, Human
auucacaaguugauggauauuu

SEQ ID NO: 20339 - RNA, 22 nt, Human
auucacacauacucauguguga

SEQ ID NO: 20340 - RNA, 22 nt, Human
auucacacuguauacacaggau

SEQ ID NO: 20341 - RNA, 22 nt, Human
auucacacuuuacuucuuucca

SEQ ID NO: 20342 - RNA, 22 nt, Human
auucacagggggagaaggguau

SEQ ID NO: 20343 - RNA, 22 nt, Human
auucacaguauggacgaaauga

SEQ ID NO: 20344 - RNA, 22 nt, Human
auucacaguuacugcugaacca

SEQ ID NO: 20345 - RNA, 22 nt, Human
auucacauucuagggcccuacu

SEQ ID NO: 20346 - RNA, 22 nt, Human
auucacauugagcuucacugug

SEQ ID NO: 20347 - RNA, 22 nt, Human
auucagaaagcaagugcugggu

SEQ ID NO: 20348 - RNA, 22 nt, Human
auucagaaaguugucauauuug

SEQ ID NO: 20349 - RNA, 22 nt, Human
auucagaagcaaucacagugag

SEQ ID NO: 20350 - RNA, 22 nt, Human
auucagagcacuggguagaauu

SEQ ID NO: 20351 - RNA, 22 nt, Human
auucagcauucauuuccaacuu

SEQ ID NO: 20352 - RNA, 22 nt, Human
auucagcuaagugcuucaugcu

SEQ ID NO: 20353 - RNA, 18 nt, Human
auucaggggcugaaugug

SEQ ID NO: 20354 - RNA, 22 nt, Human
auucaguagaaguuagcuauua

SEQ ID NO: 20355 - RNA, 22 nt, Human
auucaguaggucuagaauaaga

SEQ ID NO: 20356 - RNA, 22 nt, Human
auucagugauucauuuguacaa

SEQ ID NO: 20357 - RNA, 22 nt, Human
auucagugcuguaauacgcuaa

SEQ ID NO: 20358 - RNA, 22 nt, Human
auucaguguaucaaugaaugcu

SEQ ID NO: 20359 - RNA, 22 nt, Human
auucaguuagccacagcuauuc

SEQ ID NO: 20360 - RNA, 22 nt, Human
auucaguuccuugugauuguag

SEQ ID NO: 20361 - RNA, 22 nt, Human
auucaguuguaaucuuuguuag

SEQ ID NO: 20362 - RNA, 22 nt, Human
auucaguugucuacuacugccu

SEQ ID NO: 20363 - RNA, 22 nt, Human
auucaguuucaaucauuguagu

SEQ ID NO: 20364 - RNA, 22 nt, Human
auucaguuucauggcacagcua

SEQ ID NO: 20365 - RNA, 21 nt, Human
auucaguuugacaucuagcag

SEQ ID NO: 20366 - RNA, 22 nt, Human
auucaguuuuuauuggaccagc

SEQ ID NO: 20367 - RNA, 22 nt, Human
auucaguuuuugaagggaaauu

SEQ ID NO: 20368 - RNA, 22 nt, Human
auucauaacggcaaaugucacc

SEQ ID NO: 20369 - RNA, 22 nt, Human
auucauacaggcuuugcucuua

SEQ ID NO: 20370 - RNA, 22 nt, Human
auucaucaacugauagccauag

SEQ ID NO: 20371 - RNA, 22 nt, Human
auucauccuuaccaguccccgg

SEQ ID NO: 20372 - RNA, 22 nt, Human
auucaucucugcauauagaguc

SEQ ID NO: 20373 - RNA, 19 nt, Human
auucaugaaggcuugaagg

SEQ ID NO: 20374 - RNA, 22 nt, Human
auucaugaaucuacauuguggu

SEQ ID NO: 20375 - RNA, 22 nt, Human
auucaugcaggauugucuccaa

SEQ ID NO: 20376 - RNA, 22 nt, Human
auucauguaaaauuggauagac

SEQ ID NO: 20377 - RNA, 22 nt, Human
auucauguaacauuagagaaau

SEQ ID NO: 20378 - RNA, 20 nt, Human
cagggccuaagagcugaaaa

SEQ ID NO: 20379 - RNA, 20 nt, Human
cagggccuaugauugagcuu

SEQ ID NO: 20380 - RNA, 22 nt, Human
cagggccucauugucaguccug

SEQ ID NO: 20381 - RNA, 22 nt, Human
cagggccuccccggcagucuuu

SEQ ID NO: 20382 - RNA, 22 nt, Human
cagggccucuccuccaggaacu

SEQ ID NO: 20383 - RNA, 22 nt, Human
cagggccugcaagagaccuggg

SEQ ID NO: 20384 - RNA, 22 nt, Human
cagggccugccugguuccugga

SEQ ID NO: 20385 - RNA, 22 nt, Human
cagggccugucacgacgcucau

SEQ ID NO: 20386 - RNA, 22 nt, Human
cagggccuuauccugccauuga

SEQ ID NO: 20387 - RNA, 22 nt, Human
cagggccuuucaggguaaaagg

SEQ ID NO: 20388 - RNA, 22 nt, Human
auuauuugacuugagaacaggu

SEQ ID NO: 20389 - RNA, 22 nt, Human
auuauuuggaauaggcauugca

SEQ ID NO: 20390 - RNA, 22 nt, Human
auuauuuuaugugcggccugau

SEQ ID NO: 20391 - RNA, 22 nt, Human
auucaaaagaccaugcagacuc

SEQ ID NO: 20392 - RNA, 22 nt, Human
auucaaacuguguuaggcagca

SEQ ID NO: 20393 - RNA, 22 nt, Human
auucaaagaaccuuuagcauug

SEQ ID NO: 20394 - RNA, 22 nt, Human
auucaaagcccaguaaacauug

SEQ ID NO: 20395 - RNA, 22 nt, Human
auucaaagucuagauguagugu

SEQ ID NO: 20396 - RNA, 22 nt, Human
auucaacauauucugaguaaaa

SEQ ID NO: 20397 - RNA, 22 nt, Human
auucaacggguagaagggucuu

SEQ ID NO: 20398 - RNA, 22 nt, Human
auucaacuagugauuguguuau

SEQ ID NO: 20399 - RNA, 22 nt, Human
auucaacuauguauagucuucu

SEQ ID NO: 20400 - RNA, 22 nt, Human
auucaacuuauaagauauuaau

SEQ ID NO: 20401 - RNA, 22 nt, Human
auucaagauuaauucuauguca

SEQ ID NO: 20402 - RNA, 22 nt, Human
auucaagguuggcucaggaauu

SEQ ID NO: 20403 - RNA, 22 nt, Human
auucaaguucuucugucuuugc

SEQ ID NO: 20404 - RNA, 22 nt, Human
auucaauaagucacuguggaau

SEQ ID NO: 20405 - RNA, 20 nt, Human
auucacaaagccaguguugc

SEQ ID NO: 20406 - RNA, 22 nt, Human
auucacaaaugcugccccauuc

SEQ ID NO: 20407 - RNA, 22 nt, Human
auucacaacugauccuugcuca

SEQ ID NO: 20408 - RNA, 22 nt, Human
auucacaauuagaaguagauaa

SEQ ID NO: 20409 - RNA, 22 nt, Human
auucacacacauuuagagcaga

SEQ ID NO: 20410 - RNA, 22 nt, Human
auucacagagugguuaguggua

SEQ ID NO: 20411 - RNA, 21 nt, Human
auucacagguauccucucccu

SEQ ID NO: 20412 - RNA, 22 nt, Human
auucacaguucauuagcuguaa

SEQ ID NO: 20413 - RNA, 22 nt, Human
auucacaugcccaagcagcacc

SEQ ID NO: 20414 - RNA, 22 nt, Human
auucacauuuacaaagcacuca

SEQ ID NO: 20415 - RNA, 22 nt, Human
auucaccuguuaguaaaaaucu

SEQ ID NO: 20416 - RNA, 22 nt, Human
auucacugucagcuugcauggg

SEQ ID NO: 20417 - RNA, 22 nt, Human
auucagaaacucugggcagaac

SEQ ID NO: 20418 - RNA, 21 nt, Human
auucagaaagggaauaaacuc

SEQ ID NO: 20419 - RNA, 22 nt, Human
auucagaauugugggcaguaca

SEQ ID NO: 20420 - RNA, 22 nt, Human
auucagacugucuaaaugguuu

SEQ ID NO: 20421 - RNA, 21 nt, Human
auucagaguaauucaucuuua

SEQ ID NO: 20422 - RNA, 22 nt, Human
auucagcaaacauuuauugugu

SEQ ID NO: 20423 - RNA, 22 nt, Human
auucagcauaaucaguagcuug

SEQ ID NO: 20424 - RNA, 22 nt, Human
auucagcauucauuaugcgcca

SEQ ID NO: 20425 - RNA, 19 nt, Human
auucagcauucugcacuuc

SEQ ID NO: 20426 - RNA, 22 nt, Human
auucaggagugugccaggaagg

SEQ ID NO: 20427 - RNA, 22 nt, Human
auucaguauucugcugcauaau

SEQ ID NO: 20428 - RNA, 22 nt, Human
auucagugaguguuuaccggaa

SEQ ID NO: 20429 - RNA, 22 nt, Human
auucagugccaaggagaacuug

SEQ ID NO: 20430 - RNA, 22 nt, Human
auucaguguaguuauuaucuuu

SEQ ID NO: 20431 - RNA, 22 nt, Human
auucagugucuacuccauugcc

SEQ ID NO: 20432 - RNA, 19 nt, Human
auucagugucucugacuuc

SEQ ID NO: 20433 - RNA, 22 nt, Human
auucagugucuugaucugggaa

SEQ ID NO: 20434 - RNA, 22 nt, Human
auucaguguggacccauuuaaa

SEQ ID NO: 20435 - RNA, 22 nt, Human
auucaguuaaaaacuguacuuc

SEQ ID NO: 20436 - RNA, 22 nt, Human
auucaguuacucuagacacuuc

SEQ ID NO: 20437 - RNA, 22 nt, Human
auucaguuauucagagaaggga

SEQ ID NO: 20438 - RNA, 22 nt, Human
auucaguuauuuacuuugcuau

SEQ ID NO: 20439 - RNA, 22 nt, Human
auucaguucugcugguucugcu

SEQ ID NO: 20440 - RNA, 22 nt, Human
auucauaaguaaaugauuaccu

SEQ ID NO: 20441 - RNA, 22 nt, Human
auucaucuguacuucaauaucu

SEQ ID NO: 20442 - RNA, 17 nt, Human
auucaugaacauguccu

SEQ ID NO: 20443 - RNA, 22 nt, Human
auucauggcagugguaacguuu

SEQ ID NO: 20444 - RNA, 20 nt, Human
auucaugucuuuauaaaagc

SEQ ID NO: 20445 - RNA, 22 nt, Human
auucauguggggagccuucugu

SEQ ID NO: 20446 - RNA, 22 nt, Human
auucauguucggggccacguug

SEQ ID NO: 20447 - RNA, 22 nt, Human
auucauuccaggucagucagac

SEQ ID NO: 20448 - RNA, 22 nt, Human
auucauucugaccucaagagaa

SEQ ID NO: 20449 - RNA, 22 nt, Human
auucauucuugguaugaacagc

SEQ ID NO: 20450 - RNA, 19 nt, Human
auucauuggccaggguggu

SEQ ID NO: 20451 - RNA, 22 nt, Human
auucauuggcuugaacuccacc

SEQ ID NO: 20452 - RNA, 22 nt, Human
auuccaaacucuuucccugucg

SEQ ID NO: 20453 - RNA, 22 nt, Human
auuccaaacuuaccccagagga

SEQ ID NO: 20454 - RNA, 22 nt, Human
auuccaaagcacaucagaacua

SEQ ID NO: 20455 - RNA, 22 nt, Human
auuccaaagccugaauaaugga

SEQ ID NO: 20456 - RNA, 22 nt, Human
auuccacagccgauaccaugac

SEQ ID NO: 20457 - RNA, 22 nt, Human
auuccacagcucagccucucuu

SEQ ID NO: 20458 - RNA, 22 nt, Human
auuccacuuauaugaaguaacg

SEQ ID NO: 20459 - RNA, 20 nt, Human
auuccacuuguuugagguac

SEQ ID NO: 20460 - RNA, 22 nt, Human
auuccacuuuaugucuguauga

SEQ ID NO: 20461 - RNA, 22 nt, Human
auuccagaauaccggcaagaug

SEQ ID NO: 20462 - RNA, 22 nt, Human
auuccagacagguaaauuaggu

SEQ ID NO: 20463 - RNA, 22 nt, Human
auuccagauggcuucaaguaag

SEQ ID NO: 20464 - RNA, 22 nt, Human
auuccaggauuccaggacaaau

SEQ ID NO: 20465 - RNA, 22 nt, Human
auuccaggcaugcaggaacaag

SEQ ID NO: 20466 - RNA, 22 nt, Human
auuccaguccaaauguuuuccu

SEQ ID NO: 20467 - RNA, 22 nt, Human
auuccaguuggguucuaauaca

SEQ ID NO: 20468 - RNA, 22 nt, Human
auuccauuguguaaggauaucg

SEQ ID NO: 20469 - RNA, 22 nt, Human
auucccacagcugguauaaaua

SEQ ID NO: 20470 - RNA, 22 nt, Human
auucccauagccauccggagag

SEQ ID NO: 20471 - RNA, 22 nt, Human
auucccaucgucaacuucacug

SEQ ID NO: 20472 - RNA, 22 nt, Human
auuccuaaaguaauacacuaga

SEQ ID NO: 20473 - RNA, 22 nt, Human
auuccucaaagguagcccauua

SEQ ID NO: 20474 - RNA, 19 nt, Human
auuccucaaggacagaaau

SEQ ID NO: 20475 - RNA, 22 nt, Human
auuccucagcaggccuuuuguu

SEQ ID NO: 20476 - RNA, 22 nt, Human
auuccucauuuguugagaacca

SEQ ID NO: 20477 - RNA, 23 nt, Human
auuccugaggcuccuuaugcacc

SEQ ID NO: 20478 - RNA, 22 nt, Human
auuccuucuuugagaauaagca

SEQ ID NO: 20479 - RNA, 22 nt, Human
auuccuugcacaucagauaguu

SEQ ID NO: 20480 - RNA, 22 nt, Human
auuccuugcucucaucaaccuu

SEQ ID NO: 20481 - RNA, 22 nt, Human
auuccuuguauaucuacaugca

SEQ ID NO: 20482 - RNA, 22 nt, Human
auucuaaagcuuguggagcuua

SEQ ID NO: 20483 - RNA, 22 nt, Human
auucuaaugcccuggccccagc

SEQ ID NO: 20484 - RNA, 22 nt, Human
auucuacaaaagaacuggaucu

SEQ ID NO: 20485 - RNA, 22 nt, Human
auucuacaaucauguagauccu

SEQ ID NO: 20486 - RNA, 22 nt, Human
auucuacacaacaugaugaugg

SEQ ID NO: 20487 - RNA, 22 nt, Human
auucuagacaucugcaguuguu

SEQ ID NO: 20488 - RNA, 22 nt, Human
auucuagcaguuacaggcugau

SEQ ID NO: 20489 - RNA, 22 nt, Human
auucuagcugaguaucagcccc

SEQ ID NO: 20490 - RNA, 22 nt, Human
auucuaggacuugagagcuaag

SEQ ID NO: 20491 - RNA, 22 nt, Human
auucuaucaagcugucuucuuu

SEQ ID NO: 20492 - RNA, 22 nt, Human
auucuauuuuuuaagaaguagu

SEQ ID NO: 20493 - RNA, 22 nt, Human
auucucaauuuugccaaagggu

SEQ ID NO: 20494 - RNA, 22 nt, Human
auucucagcuuucaaauagaca

SEQ ID NO: 20495 - RNA, 23 nt, Human
cagugccauuugucuugccuaug

SEQ ID NO: 20496 - RNA, 22 nt, Human
cagugccugugggcuucuucca

SEQ ID NO: 20497 - RNA, 22 nt, Human
auugcuggcagcuggaucugca

SEQ ID NO: 20498 - RNA, 22 nt, Human
auugcuggcccagaugcuuuag

SEQ ID NO: 20499 - RNA, 22 nt, Human
auugcugggaggauguguguuc

SEQ ID NO: 20500 - RNA, 22 nt, Human
auugcugugaugauguucugag

SEQ ID NO: 20501 - RNA, 22 nt, Human
auuccagaugaauugcauaguu

SEQ ID NO: 20502 - RNA, 22 nt, Human
auuccaggcaaagcagagaaga

SEQ ID NO: 20503 - RNA, 22 nt, Human
auuccaggcagaccagagagau

SEQ ID NO: 20504 - RNA, 21 nt, Human
auuccaguauaagccucuuug

SEQ ID NO: 20505 - RNA, 22 nt, Human
auuccagugugcuuccuugcua

SEQ ID NO: 20506 - RNA, 22 nt, Human
auuccaguuaguggcagcuuau

SEQ ID NO: 20507 - RNA, 22 nt, Human
auuccauuguauguguagacua

SEQ ID NO: 20508 - RNA, 22 nt, Human
auucccagauuuauauugauag

SEQ ID NO: 20509 - RNA, 22 nt, Human
auuccucauuauuuacugagga

SEQ ID NO: 20510 - RNA, 22 nt, Human
auuccugagacuuaucuguuuc

SEQ ID NO: 20511 - RNA, 22 nt, Human
auuccugcauuggucaacccau

SEQ ID NO: 20512 - RNA, 22 nt, Human
auuccugguggcagaaacauga

SEQ ID NO: 20513 - RNA, 22 nt, Human
auuccuuuggacuccuccuugc

SEQ ID NO: 20514 - RNA, 22 nt, Human
auucgcgggccuggaggguggg

SEQ ID NO: 20515 - RNA, 20 nt, Human
auucuaaagcucugcucuuu

SEQ ID NO: 20516 - RNA, 22 nt, Human
auucuacaggacuggcaauccc

SEQ ID NO: 20517 - RNA, 22 nt, Human
auucuacaugauagaagggaga

SEQ ID NO: 20518 - RNA, 22 nt, Human
auucuacauuuggagugauguc

SEQ ID NO: 20519 - RNA, 22 nt, Human
auucuagaaggcaaagcaaggg

SEQ ID NO: 20520 - RNA, 21 nt, Human
auucuagacaacacugaaauc

SEQ ID NO: 20521 - RNA, 22 nt, Human
auucuagaugcuguaaguagca

SEQ ID NO: 20522 - RNA, 22 nt, Human
auucuagcagauauuggaaauu

SEQ ID NO: 20523 - RNA, 22 nt, Human
auucuagccauuguauucuucc

SEQ ID NO: 20524 - RNA, 22 nt, Human
auucuagcccuggaacggcgac

SEQ ID NO: 20525 - RNA, 22 nt, Human
auucuaucucuauauuucugca

SEQ ID NO: 20526 - RNA, 22 nt, Human
auucucaaacaagugguuugau

SEQ ID NO: 20527 - RNA, 21 nt, Human
auucucaggcccauccucagg

SEQ ID NO: 20528 - RNA, 22 nt, Human
auucucauuuuuauagaugaga

SEQ ID NO: 20529 - RNA, 22 nt, Human
auucuccacuguaagguuauua

SEQ ID NO: 20530 - RNA, 22 nt, Human
auucucucauuuaucuguccua

SEQ ID NO: 20531 - RNA, 22 nt, Human
auucucucuagaagcugagaug

SEQ ID NO: 20532 - RNA, 20 nt, Human
auucucugacaccgcccccg

SEQ ID NO: 20533 - RNA, 22 nt, Human
auucucuuuguauaacaucuug

SEQ ID NO: 20534 - RNA, 22 nt, Human
auucugaguagaaauuauucuu

SEQ ID NO: 20535 - RNA, 22 nt, Human
auucugauaugaacacacauau

SEQ ID NO: 20536 - RNA, 22 nt, Human
auucugaucauucaagauguca

SEQ ID NO: 20537 - RNA, 22 nt, Human
auucugcagguggaggauggca

SEQ ID NO: 20538 - RNA, 22 nt, Human
auucugcauguagguuugcuca

SEQ ID NO: 20539 - RNA, 22 nt, Human
auucugcuaguaacagaugaag

SEQ ID NO: 20540 - RNA, 22 nt, Human
auucugcucauuuuauuuccag

SEQ ID NO: 20541 - RNA, 22 nt, Human
auucugcuccacacugauucau

SEQ ID NO: 20542 - RNA, 16 nt, Human
auucugcugccugcuc

SEQ ID NO: 20543 - RNA, 22 nt, Human
auucugcuucuuauuucacgug

SEQ ID NO: 20544 - RNA, 22 nt, Human
auucugcuuuugcugaccuacc

SEQ ID NO: 20545 - RNA, 22 nt, Human
auucuggaagcaagcuuuuaaa

SEQ ID NO: 20546 - RNA, 22 nt, Human
auucuggaauucuaagauucug

SEQ ID NO: 20547 - RNA, 22 nt, Human
auucugggagguagaacugaaa

SEQ ID NO: 20548 - RNA, 22 nt, Human
auucugggcaagccuucuuaua

SEQ ID NO: 20549 - RNA, 22 nt, Human
auucuggggcugguuauuuuga

SEQ ID NO: 20550 - RNA, 22 nt, Human
auucugucuaagcuggcuacgu

SEQ ID NO: 20551 - RNA, 22 nt, Human
auucugucuuuuuaaaauaaua

SEQ ID NO: 20552 - RNA, 22 nt, Human
auucugucuuuuuauacaucua

SEQ ID NO: 20553 - RNA, 22 nt, Human
auucuguguuaggauagauggu

SEQ ID NO: 20554 - RNA, 22 nt, Human
auucuguuacuuggugaucuuc

SEQ ID NO: 20555 - RNA, 22 nt, Human
auucuuaauugccaugcuguau

SEQ ID NO: 20556 - RNA, 22 nt, Human
auucuuacuccauagaaugaau

SEQ ID NO: 20557 - RNA, 22 nt, Human
auucuuauuaaauagccagaag

SEQ ID NO: 20558 - RNA, 22 nt, Human
auucuucacauaagugcuguac

SEQ ID NO: 20559 - RNA, 22 nt, Human
auucuucaccauggauaauuug

SEQ ID NO: 20560 - RNA, 22 nt, Human
auucuucagcaggggacacuau

SEQ ID NO: 20561 - RNA, 19 nt, Human
auucuucagcagugagacc

SEQ ID NO: 20562 - RNA, 22 nt, Human
auucuucaguauguguggauug

SEQ ID NO: 20563 - RNA, 22 nt, Human
auucuucauaccuacugagguu

SEQ ID NO: 20564 - RNA, 22 nt, Human
auucuucauggcugugaguccu

SEQ ID NO: 20565 - RNA, 22 nt, Human
auucuucauguugaagcuguca

SEQ ID NO: 20566 - RNA, 22 nt, Human
auucuucauuuacuguuacuug

SEQ ID NO: 20567 - RNA, 22 nt, Human
auucuuccucaucaaucuguag

SEQ ID NO: 20568 - RNA, 19 nt, Human
auucuucucaaauauccau

SEQ ID NO: 20569 - RNA, 22 nt, Human
auucuucucuggguuggguuca

SEQ ID NO: 20570 - RNA, 22 nt, Human
auucuucugccuacuuucaucc

SEQ ID NO: 20571 - RNA, 22 nt, Human
auucuugggaugggugucacaa

SEQ ID NO: 20572 - RNA, 22 nt, Human
auucuuguuuaauuugcauccc

SEQ ID NO: 20573 - RNA, 22 nt, Human
auucuuuaauucaauugaagga

SEQ ID NO: 20574 - RNA, 22 nt, Human
auucuuuacauuggcuucuucc

SEQ ID NO: 20575 - RNA, 22 nt, Human
auucuuuauugcugaugguuau

SEQ ID NO: 20576 - RNA, 22 nt, Human
auucuuucaaggaauaguuauu

SEQ ID NO: 20577 - RNA, 22 nt, Human
auucuuugcaucucuggguggc

SEQ ID NO: 20578 - RNA, 22 nt, Human
auucuuuuaagccccagggauu

SEQ ID NO: 20579 - RNA, 22 nt, Human
auugaaaaaugacuauugcuua

SEQ ID NO: 20580 - RNA, 22 nt, Human
auugaaaauaaggccagaaaca

SEQ ID NO: 20581 - RNA, 22 nt, Human
auugaaagguuuugagcagaua

SEQ ID NO: 20582 - RNA, 21 nt, Human
auugaaagucaacaaucaguu

SEQ ID NO: 20583 - RNA, 22 nt, Human
auugaaaucccuaccucagagg

SEQ ID NO: 20584 - RNA, 22 nt, Human
auugaaauugaugaaauucuug

SEQ ID NO: 20585 - RNA, 22 nt, Human
auugaacuaaauaagcagucau

SEQ ID NO: 20586 - RNA, 22 nt, Human
auugaacuauaauuaugauuug

SEQ ID NO: 20587 - RNA, 22 nt, Human
auugaacugauauuugguguag

SEQ ID NO: 20588 - RNA, 22 nt, Human
auugaacuguuggagagguuuu

SEQ ID NO: 20589 - RNA, 22 nt, Human
auugaacuuaacaguaaguggc

SEQ ID NO: 20590 - RNA, 22 nt, Human
auugaagacuugguauccgugg

SEQ ID NO: 20591 - RNA, 22 nt, Human
auugacaagcaguaugucuuag

SEQ ID NO: 20592 - RNA, 22 nt, Human
auugacaaucuacuauguucug

SEQ ID NO: 20593 - RNA, 22 nt, Human
auugacagaaaagauguuggau

SEQ ID NO: 20594 - RNA, 20 nt, Human
auugacagaaaguguucacc

SEQ ID NO: 20595 - RNA, 22 nt, Human
auugacaggucuuugggaguau

SEQ ID NO: 20596 - RNA, 22 nt, Human
auugaccugauuguuccuggaa

SEQ ID NO: 20597 - RNA, 22 nt, Human
auugagaaaauaaguauggaua

SEQ ID NO: 20598 - RNA, 22 nt, Human
auugagaaauauaaucuggaaa

SEQ ID NO: 20599 - RNA, 22 nt, Human
auugagaagcuugcagauuuuu

SEQ ID NO: 20600 - RNA, 23 nt, Human
auugagaaggauacauuguucuc

SEQ ID NO: 20601 - RNA, 22 nt, Human
auugagaaucugagagccuagg

SEQ ID NO: 20602 - RNA, 22 nt, Human
auugagaaugcaaucuacuaug

SEQ ID NO: 20603 - RNA, 22 nt, Human
auugagaguguauagcugaucu

SEQ ID NO: 20604 - RNA, 22 nt, Human
auugagaucugcaucauaagcu

SEQ ID NO: 20605 - RNA, 22 nt, Human
auugauggcggccucuccauau

SEQ ID NO: 20606 - RNA, 22 nt, Human
auuuauaacgugcagccagggu

SEQ ID NO: 20607 - RNA, 22 nt, Human
auuuauagggcauugaaaacug

SEQ ID NO: 20608 - RNA, 22 nt, Human
auuuauauuuugggagcuccug

SEQ ID NO: 20609 - RNA, 22 nt, Human
auuuaucaacauguaccauugg

SEQ ID NO: 20610 - RNA, 22 nt, Human
auuuaucaucagaccuuuuaaa

SEQ ID NO: 20611 - RNA, 22 nt, Human
auuuaugagcugaaccaugaaa

SEQ ID NO: 20612 - RNA, 22 nt, Human
auuuauuaugggauuuggcaca

SEQ ID NO: 20613 - RNA, 22 nt, Human
auuuauuaugggauuuggcuca

SEQ ID NO: 20614 - RNA, 22 nt, Human
auuuauuccugauuccuggcuu

SEQ ID NO: 20615 - RNA, 22 nt, Human
auuuauugaacacugacuaugu

SEQ ID NO: 20616 - RNA, 22 nt, Human
auuuauugagccuuuccuaugu

SEQ ID NO: 20617 - RNA, 19 nt, Human
auuuauuguaugauuccau

SEQ ID NO: 20618 - RNA, 20 nt, Human
caucugagcccacagaaguc

SEQ ID NO: 20619 - RNA, 22 nt, Human
caucugcaggggaagccaguuu

SEQ ID NO: 20620 - RNA, 22 nt, Human
caucugccuaaguggcccuguu

SEQ ID NO: 20621 - RNA, 17 nt, Human
caucugcucugccccuu

SEQ ID NO: 20622 - RNA, 22 nt, Human
caucugcugcuacaaaaagcuu

SEQ ID NO: 20623 - RNA, 22 nt, Human
caucugcugcugaagccagcau

SEQ ID NO: 20624 - RNA, 22 nt, Human
caucuguaaaguaggaauauug

SEQ ID NO: 20625 - RNA, 22 nt, Human
caucuguagcuccaugacaauu

SEQ ID NO: 20626 - RNA, 22 nt, Human
caucuguugcuuccuaacaagu

SEQ ID NO: 20627 - RNA, 22 nt, Human
caucuuaauaaaucuccucccu

SEQ ID NO: 20628 - RNA, 21 nt, Human
caucuuagguuguacauauau

SEQ ID NO: 20629 - RNA, 22 nt, Human
caucuucaggggcuacaucugu

SEQ ID NO: 20630 - RNA, 22 nt, Human
caucuugccugcuauucuguug

SEQ ID NO: 20631 - RNA, 22 nt, Human
caucuugcuugucuuuaguaag

SEQ ID NO: 20632 - RNA, 17 nt, Human
caucuuuaaaauccuga

SEQ ID NO: 20633 - RNA, 22 nt, Human
caucuuuaaaggggagacaccc

SEQ ID NO: 20634 - RNA, 22 nt, Human
caucuuuaacagaauggauuug

SEQ ID NO: 20635 - RNA, 22 nt, Human
caucuuucaguuuauaagucug

SEQ ID NO: 20636 - RNA, 22 nt, Human
caucuuuggagaaacuuccguu

SEQ ID NO: 20637 - RNA, 22 nt, Human
caucuuugguuuucuauaugcc

SEQ ID NO: 20638 - RNA, 22 nt, Human
caucuuuguucuguaaacuuuu

SEQ ID NO: 20639 - RNA, 22 nt, Human
caucuuuguuucaucuguccag

SEQ ID NO: 20640 - RNA, 22 nt, Human
caucuuuucagaagccauucug

SEQ ID NO: 20641 - RNA, 22 nt, Human
caucuuuuggccuauucugagg

SEQ ID NO: 20642 - RNA, 22 nt, Human
caugaaaaauuuacuguuaaca

SEQ ID NO: 20643 - RNA, 22 nt, Human
caugaaauauuaguaacuguuu

SEQ ID NO: 20644 - RNA, 22 nt, Human
caugaaaucacaagcugaggac

SEQ ID NO: 20645 - RNA, 22 nt, Human
caugaacagauucuucauuucu

SEQ ID NO: 20646 - RNA, 22 nt, Human
caugaacauuuguuuacaucug

SEQ ID NO: 20647 - RNA, 22 nt, Human
caugaagauccuguauguuuuu

SEQ ID NO: 20648 - RNA, 22 nt, Human
caugaagcacagcucucuuuuu

SEQ ID NO: 20649 - RNA, 21 nt, Human
caugaagccgguucccuguuu

SEQ ID NO: 20650 - RNA, 22 nt, Human
caugaaggaauuaagguaagga

SEQ ID NO: 20651 - RNA, 22 nt, Human
caugaauauuuaguauuuacuu

SEQ ID NO: 20652 - RNA, 22 nt, Human
caugaaugaguaauuuacaaag

SEQ ID NO: 20653 - RNA, 22 nt, Human
caugaauuauuuuucacaagau

SEQ ID NO: 20654 - RNA, 22 nt, Human
caugacaauauguucuuucauu

SEQ ID NO: 20655 - RNA, 20 nt, Human
caugacacuguuccucugcc

SEQ ID NO: 20656 - RNA, 22 nt, Human
caugacaguccugaagagaacg

SEQ ID NO: 20657 - RNA, 22 nt, Human
caugacaucugcuuaguaugaa

SEQ ID NO: 20658 - RNA, 22 nt, Human
caugacauuuuaaaaagaacau

SEQ ID NO: 20659 - RNA, 22 nt, Human
caugaccccccaaggccugcag

SEQ ID NO: 20660 - RNA, 22 nt, Human
caugagaagguuuuggcauaua

SEQ ID NO: 20661 - RNA, 22 nt, Human
caugagacugccuuuucaaacc

SEQ ID NO: 20662 - RNA, 22 nt, Human
caugagauaauuuuucuccagu

SEQ ID NO: 20663 - RNA, 22 nt, Human
caugagcauaaaucagucacga

SEQ ID NO: 20664 - RNA, 22 nt, Human
caugagcauuuuggucuaguuu

SEQ ID NO: 20665 - RNA, 18 nt, Human
caugagcugccccuagac

SEQ ID NO: 20666 - RNA, 22 nt, Human
caugagcugcugggagccuguc

SEQ ID NO: 20667 - RNA, 22 nt, Human
caugaguucaaaaugccugccu

SEQ ID NO: 20668 - RNA, 21 nt, Human
caugauaaugaagguguuauu

SEQ ID NO: 20669 - RNA, 20 nt, Human
caugauacuuggaagggcuu

SEQ ID NO: 20670 - RNA, 22 nt, Human
caugauagguauuuaauuaaau

SEQ ID NO: 20671 - RNA, 22 nt, Human
caugauauaaaguaguagauaa

SEQ ID NO: 20672 - RNA, 22 nt, Human
caugaucugguccuacuguggg

SEQ ID NO: 20673 - RNA, 19 nt, Human
caugaugagcauccugcag

SEQ ID NO: 20674 - RNA, 22 nt, Human
caugauuauauuaauggcuuca

SEQ ID NO: 20675 - RNA, 22 nt, Human
caugauuuugucuuguguuaau

SEQ ID NO: 20676 - RNA, 23 nt, Human
caugcaaacacuauugcauuugg

SEQ ID NO: 20677 - RNA, 22 nt, Human
caugcaagaagauagauuaaau

SEQ ID NO: 20678 - RNA, 22 nt, Human
caugcaauuuuugguucucuau

SEQ ID NO: 20679 - RNA, 22 nt, Human
caugcagaugucaugaggcaug

SEQ ID NO: 20680 - RNA, 22 nt, Human
caugcagauuugcugagauaau

SEQ ID NO: 20681 - RNA, 22 nt, Human
caugcagccugugaacaguguc

SEQ ID NO: 20682 - RNA, 22 nt, Human
caugcagcggcguuugguuuaa

SEQ ID NO: 20683 - RNA, 22 nt, Human
caugcaggccuauggagcagug

SEQ ID NO: 20684 - RNA, 22 nt, Human
caugcaggcgcaacuucuacaa

SEQ ID NO: 20685 - RNA, 22 nt, Human
caugcagggacuagagaacagg

SEQ ID NO: 20686 - RNA, 22 nt, Human
caugcagggacuugugcuccau

SEQ ID NO: 20687 - RNA, 22 nt, Human
caugcaggucuggagcuugggg

SEQ ID NO: 20688 - RNA, 22 nt, Human
caugcagucaauaaacaugugu

SEQ ID NO: 20689 - RNA, 22 nt, Human
caugcagucuggagccuucugu

SEQ ID NO: 20690 - RNA, 22 nt, Human
caugcagugguaaaaagucagg

SEQ ID NO: 20691 - RNA, 22 nt, Human
caugcaguguguaucuacuuaa

SEQ ID NO: 20692 - RNA, 22 nt, Human
caugcaguugaagcacagagag

SEQ ID NO: 20693 - RNA, 22 nt, Human
caugcauaugucaaaaaagcua

SEQ ID NO: 20694 - RNA, 22 nt, Human
caugcaucagaaucaccuagag

SEQ ID NO: 20695 - RNA, 22 nt, Human
caugcauuacaauugcauagua

SEQ ID NO: 20696 - RNA, 22 nt, Human
caugcauuucuaccaaggaaua

SEQ ID NO: 20697 - RNA, 22 nt, Human
caugcauuuucuauucacucag

SEQ ID NO: 20698 - RNA, 22 nt, Human
caugccaggacucuggaggcuu

SEQ ID NO: 20699 - RNA, 22 nt, Human
caugccaguuuugagaugcacc

SEQ ID NO: 20700 - RNA, 22 nt, Human
caugccauuaacauuagcuagc

SEQ ID NO: 20701 - RNA, 22 nt, Human
caugccauucccugauccuaac

SEQ ID NO: 20702 - RNA, 22 nt, Human
caugccauuuacuuggaggaga

SEQ ID NO: 20703 - RNA, 22 nt, Human
caugccuguauuucugaucuau

SEQ ID NO: 20704 - RNA, 22 nt, Human
caugcgaggcgggaggaggccu

SEQ ID NO: 20705 - RNA, 22 nt, Human
caugcuccaaaaacaagagaau

SEQ ID NO: 20706 - RNA, 22 nt, Human
caugcugaugaacuucuacuug

SEQ ID NO: 20707 - RNA, 22 nt, Human
caugcuggucagccaguggaug

SEQ ID NO: 20708 - RNA, 22 nt, Human
caugcuuucuguccaaauguua

SEQ ID NO: 20709 - RNA, 22 nt, Human
cauggaaagcacucagcccagu

SEQ ID NO: 20710 - RNA, 22 nt, Human
cauggaacugugcugaaaagug

SEQ ID NO: 20711 - RNA, 22 nt, Human
cauggaaggcaaaagacacaga

SEQ ID NO: 20712 - RNA, 22 nt, Human
cauggaauuuucuaggcauaaa

SEQ ID NO: 20713 - RNA, 22 nt, Human
cauggcaauaaaccuacacagu

SEQ ID NO: 20714 - RNA, 22 nt, Human
cauggcaauuucauaaacaggu

SEQ ID NO: 20715 - RNA, 22 nt, Human
auuucacucauucauguuacuu

SEQ ID NO: 20716 - RNA, 22 nt, Human
auuucacucuuaauugcuuccu

SEQ ID NO: 20717 - RNA, 22 nt, Human
auuucagaauguccuaauuuag

SEQ ID NO: 20718 - RNA, 22 nt, Human
auuucagaugaccaaauggaaa

SEQ ID NO: 20719 - RNA, 22 nt, Human
auuucagcccaguaugagcccc

SEQ ID NO: 20720 - RNA, 22 nt, Human
auuucaggagcaguuucagugg

SEQ ID NO: 20721 - RNA, 22 nt, Human
auuucaggauagccuaguuuug

SEQ ID NO: 20722 - RNA, 22 nt, Human
auuucagggugucuuccaacug

SEQ ID NO: 20723 - RNA, 22 nt, Human
auuucaguaguccuuacuugua

SEQ ID NO: 20724 - RNA, 22 nt, Human
auuucaguauuauacaacugcu

SEQ ID NO: 20725 - RNA, 22 nt, Human
auuucagugagaaagcaaucaa

SEQ ID NO: 20726 - RNA, 22 nt, Human
auuucagugucuucuucucccu

SEQ ID NO: 20727 - RNA, 22 nt, Human
auuucauacuaaggcucaaaaa

SEQ ID NO: 20728 - RNA, 22 nt, Human
auuucauauguaucaccuagcc

SEQ ID NO: 20729 - RNA, 22 nt, Human
auuucaugaauuccagaagcuu

SEQ ID NO: 20730 - RNA, 22 nt, Human
auuucaugaguuauuauagugg

SEQ ID NO: 20731 - RNA, 16 nt, Human
auuucaugggcaguga

SEQ ID NO: 20732 - RNA, 22 nt, Human
auuucaugguacaucgugacuu

SEQ ID NO: 20733 - RNA, 22 nt, Human
cauggcuucugaucaaggaacu

SEQ ID NO: 20734 - RNA, 22 nt, Human
cauggcuugucuugucuucuga

SEQ ID NO: 20735 - RNA, 22 nt, Human
cauggcuuuguucuguuagaug

SEQ ID NO: 20736 - RNA, 22 nt, Human
cauggcuuuuagcccuacauga

SEQ ID NO: 20737 - RNA, 22 nt, Human
cauggcuuuugcuuuugcccau

SEQ ID NO: 20738 - RNA, 22 nt, Human
cauggcuuuuuagcauauucaa

SEQ ID NO: 20739 - RNA, 22 nt, Human
caugggaauaaaguuauuucaa

SEQ ID NO: 20740 - RNA, 22 nt, Human
caugggaggucugcaaggugcu

SEQ ID NO: 20741 - RNA, 22 nt, Human
caugggcucucugagcuccagg

SEQ ID NO: 20742 - RNA, 22 nt, Human
caugggcugcugacaggggcuc

SEQ ID NO: 20743 - RNA, 22 nt, Human
caugggcugugaacccaggcug

SEQ ID NO: 20744 - RNA, 23 nt, Human
cauggggagcagugcuccugacc

SEQ ID NO: 20745 - RNA, 22 nt, Human
caugggggucuggacaacaggc

SEQ ID NO: 20746 - RNA, 22 nt, Human
caugguacugccacagaagagu

SEQ ID NO: 20747 - RNA, 22 nt, Human
caugguuuggucuuuguagugg

SEQ ID NO: 20748 - RNA, 22 nt, Human
cauguaaaccauugugagcauc

SEQ ID NO: 20749 - RNA, 22 nt, Human
cauguaaagaauuucacacaag

SEQ ID NO: 20750 - RNA, 22 nt, Human
cauguaauccuggggagaugaa

SEQ ID NO: 20751 - RNA, 22 nt, Human
cauguaaugcugggagcugggc

SEQ ID NO: 20752 - RNA, 23 nt, Human
cauguacacacagcuguacagug

SEQ ID NO: 20753 - RNA, 23 nt, Human
cauguacagaguuugauaaagug

SEQ ID NO: 20754 - RNA, 22 nt, Human
cauguacagccaggguugagaa

SEQ ID NO: 20755 - RNA, 22 nt, Human
cauguacaugccuacuaucaau

SEQ ID NO: 20756 - RNA, 22 nt, Human
cauguacauucuguagauggag

SEQ ID NO: 20757 - RNA, 22 nt, Human
cauguaguccuaaugcugguga

SEQ ID NO: 20758 - RNA, 22 nt, Human
cauguauagacacucauacagu

SEQ ID NO: 20759 - RNA, 22 nt, Human
cauguauagcaaauauuuguuc

SEQ ID NO: 20760 - RNA, 22 nt, Human
cauguaucuuaauugcuuugga

SEQ ID NO: 20761 - RNA, 18 nt, Human
cauguaugcaaauaagca

SEQ ID NO: 20762 - RNA, 17 nt, Human
cauguauuugaaacaga

SEQ ID NO: 20763 - RNA, 22 nt, Human
caugucacaauucuuaauggga

SEQ ID NO: 20764 - RNA, 22 nt, Human
cauguccacaguucugagaggc

SEQ ID NO: 20765 - RNA, 22 nt, Human
caugucugaguagagugugauu

SEQ ID NO: 20766 - RNA, 22 nt, Human
caugucuggguauaugcauaug

SEQ ID NO: 20767 - RNA, 22 nt, Human
caugucuuauauccugucuuca

SEQ ID NO: 20768 - RNA, 21 nt, Human
caugucuuccacacuguagua

SEQ ID NO: 20769 - RNA, 22 nt, Human
caugucuugcccugauuaguag

SEQ ID NO: 20770 - RNA, 22 nt, Human
caugucuuucaaaccacacagu

SEQ ID NO: 20771 - RNA, 22 nt, Human
caugugaccgcugggugagcga

SEQ ID NO: 20772 - RNA, 22 nt, Human
caugugcagacggugggcugga

SEQ ID NO: 20773 - RNA, 22 nt, Human
cauguggauggucuccucauca

SEQ ID NO: 20774 - RNA, 22 nt, Human
cauguggcacaaagaaggaaau

SEQ ID NO: 20775 - RNA, 22 nt, Human
cauguggcuuuggcaugugccc

SEQ ID NO: 20776 - RNA, 22 nt, Human
caugugggaagaggccagcugg

SEQ ID NO: 20777 - RNA, 22 nt, Human
caugugggacuccugcuguuuu

SEQ ID NO: 20778 - RNA, 22 nt, Human
caugugguucaaguacuccaca

SEQ ID NO: 20779 - RNA, 23 nt, Human
cauguguaauuucugguugggug

SEQ ID NO: 20780 - RNA, 22 nt, Human
cauguguccuagcuauucuccu

SEQ ID NO: 20781 - RNA, 22 nt, Human
caugugucuaaucuacuaauau

SEQ ID NO: 20782 - RNA, 22 nt, Human
caugugucuuuauggagccaca

SEQ ID NO: 20783 - RNA, 22 nt, Human
caugugugggacccuuagguug

SEQ ID NO: 20784 - RNA, 22 nt, Human
cauguguugucucauuuaaucc

SEQ ID NO: 20785 - RNA, 22 nt, Human
cauguuaaaauauacauucuga

SEQ ID NO: 20786 - RNA, 22 nt, Human
cauguuaaguguuugauaacca

SEQ ID NO: 20787 - RNA, 22 nt, Human
cauguuaauaugcauugaguac

SEQ ID NO: 20788 - RNA, 22 nt, Human
cauguucuaacaaugagaaacc

SEQ ID NO: 20789 - RNA, 22 nt, Human
cauguucucuuaauguuaacua

SEQ ID NO: 20790 - RNA, 22 nt, Human
cauguuggcugaggcuguauuu

SEQ ID NO: 20791 - RNA, 22 nt, Human
cauguuggugugcugcacccau

SEQ ID NO: 20792 - RNA, 22 nt, Human
cauguuuacuaccaggagaaug

SEQ ID NO: 20793 - RNA, 22 nt, Human
cauuaaguauuucaguuacugu

SEQ ID NO: 20794 - RNA, 22 nt, Human
cauuaagucuguuaacuggaga

SEQ ID NO: 20795 - RNA, 22 nt, Human
cauuacagugucagaggaacug

SEQ ID NO: 20796 - RNA, 22 nt, Human
cauuacaugguccaggauauau

SEQ ID NO: 20797 - RNA, 21 nt, Human
cauuacaugguuuuagugaac

SEQ ID NO: 20798 - RNA, 22 nt, Human
cauuacauuucaaaauguuucc

SEQ ID NO: 20799 - RNA, 22 nt, Human
cauuagaaccuauaaaaagcau

SEQ ID NO: 20800 - RNA, 22 nt, Human
cauuagaauuagguuguuuacc

SEQ ID NO: 20801 - RNA, 22 nt, Human
cauuagcacaugacggaaagca

SEQ ID NO: 20802 - RNA, 22 nt, Human
cauuagcagucauuacugugcu

SEQ ID NO: 20803 - RNA, 22 nt, Human
cauuagcauucagugacuugua

SEQ ID NO: 20804 - RNA, 22 nt, Human
cauuagcucagauaccucugag

SEQ ID NO: 20805 - RNA, 22 nt, Human
cauuagggccaccauaacaaaa

SEQ ID NO: 20806 - RNA, 22 nt, Human
cauuaggguaauugaacacuua

SEQ ID NO: 20807 - RNA, 22 nt, Human
cauuaugcaaagaacacuugag

SEQ ID NO: 20808 - RNA, 22 nt, Human
cauuauggaagacaguguggug

SEQ ID NO: 20809 - RNA, 22 nt, Human
cauuauggcagccaggauauug

SEQ ID NO: 20810 - RNA, 20 nt, Human
cauuaugguugggcacagug

SEQ ID NO: 20811 - RNA, 22 nt, Human
cauuaugugagugauuaauuca

SEQ ID NO: 20812 - RNA, 22 nt, Human
cauuauugaugcaacagcccuu

SEQ ID NO: 20813 - RNA, 22 nt, Human
cauucacaaaaccacaugccau

SEQ ID NO: 20814 - RNA, 22 nt, Human
cauucacucagcgaugccagua

SEQ ID NO: 20815 - RNA, 22 nt, Human
cauucauaaguuuuugugcugg

SEQ ID NO: 20816 - RNA, 22 nt, Human
cauucauaggaagaaaaugggc

SEQ ID NO: 20817 - RNA, 22 nt, Human
cauucaucuaucaaaugguacc

SEQ ID NO: 20818 - RNA, 22 nt, Human
cauucauuuaugaaauaucuau

SEQ ID NO: 20819 - RNA, 22 nt, Human
cauucauuugcccaguaaguca

SEQ ID NO: 20820 - RNA, 22 nt, Human
cauuccuggacaaacaucaaaa

SEQ ID NO: 20821 - RNA, 22 nt, Human
cauuccuuaacguggggagucu

SEQ ID NO: 20822 - RNA, 22 nt, Human
cauucugacccuaugauuuaag

SEQ ID NO: 20823 - RNA, 22 nt, Human
cauucugggucuggcucaggga

SEQ ID NO: 20824 - RNA, 22 nt, Human
caagcuuuauccgccauguagg

SEQ ID NO: 20825 - RNA, 22 nt, Human
caaggaaaagaaguauuucaga

SEQ ID NO: 20826 - RNA, 22 nt, Human
caaggaaggagagaugaugggu

SEQ ID NO: 20827 - RNA, 22 nt, Human
caaggaauauuuaagaacguca

SEQ ID NO: 20828 - RNA, 22 nt, Human
caaggaaucccauuucuaacuc

SEQ ID NO: 20829 - RNA, 22 nt, Human
caaggacacugagcuuuguaaa

SEQ ID NO: 20830 - RNA, 21 nt, Human
caaggacagguugcagggcaa

SEQ ID NO: 20831 - RNA, 22 nt, Human
caaggcaaucucauggcuucuu

SEQ ID NO: 20832 - RNA, 22 nt, Human
caaggcagaauucagacucagg

SEQ ID NO: 20833 - RNA, 22 nt, Human
caaggcagcuuaauagaauuug

SEQ ID NO: 20834 - RNA, 22 nt, Human
caaggcaggccaguuucaaggc

SEQ ID NO: 20835 - RNA, 22 nt, Human
caaggcaugaaaggagugagug

SEQ ID NO: 20836 - RNA, 22 nt, Human
caaggcauuaccauggcuagag

SEQ ID NO: 20837 - RNA, 22 nt, Human
caaggccacguucugcaugcgg

SEQ ID NO: 20838 - RNA, 22 nt, Human
caaggccaguccauuuuggaag

SEQ ID NO: 20839 - RNA, 22 nt, Human
caaggccauaagagauacaaaa

SEQ ID NO: 20840 - RNA, 22 nt, Human
caaggccuucuugggagagauu

SEQ ID NO: 20841 - RNA, 22 nt, Human
caaggcuauaauguugcuggaa

SEQ ID NO: 20842 - RNA, 22 nt, Human
caaggcucugcuucuaucacau

SEQ ID NO: 20843 - RNA, 22 nt, Human
caaggcugaucauuuucccaua

SEQ ID NO: 20844 - RNA, 22 nt, Human
caaggcuggcucacaauaauga

SEQ ID NO: 20845 - RNA, 22 nt, Human
caaggcugugcaggguccauau

SEQ ID NO: 20846 - RNA, 22 nt, Human
caaggcuuauuuuccuccuucc

SEQ ID NO: 20847 - RNA, 22 nt, Human
caaggcuuucucauuauccuuu

SEQ ID NO: 20848 - RNA, 22 nt, Human
caagggaguuacugagggcggg

SEQ ID NO: 20849 - RNA, 22 nt, Human
caagggccuccaccuugcucgu

SEQ ID NO: 20850 - RNA, 22 nt, Human
caagggcucaaacggugguugc

SEQ ID NO: 20851 - RNA, 22 nt, Human
caagggcucacggucugcuggg

SEQ ID NO: 20852 - RNA, 22 nt, Human
caagggcuucaaguggccaaga

SEQ ID NO: 20853 - RNA, 19 nt, Human
caaggguugggucugucau

SEQ ID NO: 20854 - RNA, 22 nt, Human
caagguuccagaauuaugcucu

SEQ ID NO: 20855 - RNA, 22 nt, Human
caagguuugaaaacgccauggc

SEQ ID NO: 20856 - RNA, 22 nt, Human
caaguaacuugauuaagguaag

SEQ ID NO: 20857 - RNA, 22 nt, Human
caaguagaaggaugugauugua

SEQ ID NO: 20858 - RNA, 22 nt, Human
caaguauucuguaaaaagucaa

SEQ ID NO: 20859 - RNA, 22 nt, Human
caaguauuuccugauggccugu

SEQ ID NO: 20860 - RNA, 23 nt, Human
caagucauggauuggaguuucag

SEQ ID NO: 20861 - RNA, 22 nt, Human
caaguccaacaguuuuucagac

SEQ ID NO: 20862 - RNA, 22 nt, Human
caaguccuaggucugauugaac

SEQ ID NO: 20863 - RNA, 21 nt, Human
caaguccuuugccaaagugcu

SEQ ID NO: 20864 - RNA, 22 nt, Human
caaggcuaagcuuuggcuuucu

SEQ ID NO: 20865 - RNA, 22 nt, Human
caaggcuggaguguaauggcau

SEQ ID NO: 20866 - RNA, 22 nt, Human
caaggcuuagucagagggugcu

SEQ ID NO: 20867 - RNA, 22 nt, Human
caaggcuucacguccccagugc

SEQ ID NO: 20868 - RNA, 22 nt, Human
caaggcuucagugugacaaaac

SEQ ID NO: 20869 - RNA, 22 nt, Human
caagggaauugugugugagagg

SEQ ID NO: 20870 - RNA, 22 nt, Human
caagggcagaggcagggccccg

SEQ ID NO: 20871 - RNA, 22 nt, Human
caagggcucuuuugaggaaugu

SEQ ID NO: 20872 - RNA, 20 nt, Human
caaggggaguaguaugggcc

SEQ ID NO: 20873 - RNA, 22 nt, Human
caagggugaaggcagaggacau

SEQ ID NO: 20874 - RNA, 22 nt, Human
caaggugaacuugcuguacagc

SEQ ID NO: 20875 - RNA, 22 nt, Human
caaggugcagcguugucaagcu

SEQ ID NO: 20876 - RNA, 22 nt, Human
caagguucuauagcaaaaucug

SEQ ID NO: 20877 - RNA, 22 nt, Human
caagguuuacuuuaugauccag

SEQ ID NO: 20878 - RNA, 22 nt, Human
caaguacuuugaaaaguugaau

SEQ ID NO: 20879 - RNA, 22 nt, Human
caaguagaacagagcuaccuug

SEQ ID NO: 20880 - RNA, 22 nt, Human
caaguagagauuacagugugca

SEQ ID NO: 20881 - RNA, 22 nt, Human
caaguagaguucacuugucuuu

SEQ ID NO: 20882 - RNA, 22 nt, Human
caaguauauuugaacauguaaa

SEQ ID NO: 20883 - RNA, 22 nt, Human
caaguauuugcggaguuccacg

SEQ ID NO: 20884 - RNA, 22 nt, Human
caagucaacucaaauuguuauc

SEQ ID NO: 20885 - RNA, 22 nt, Human
caagucaaugauuauaagaguc

SEQ ID NO: 20886 - RNA, 22 nt, Human
caagucaucauagaaguucccc

SEQ ID NO: 20887 - RNA, 22 nt, Human
caagucauuacugaaaugucac

SEQ ID NO: 20888 - RNA, 22 nt, Human
caaguccaagaucaagaagcca

SEQ ID NO: 20889 - RNA, 22 nt, Human
caaguccaucagauaagcaaga

SEQ ID NO: 20890 - RNA, 22 nt, Human
caaguccauccuacugccuucu

SEQ ID NO: 20891 - RNA, 22 nt, Human
caaguccuaaauguauuuguug

SEQ ID NO: 20892 - RNA, 22 nt, Human
caagucuagcuuggucacuugg

SEQ ID NO: 20893 - RNA, 19 nt, Human
caagugaagccugggaugg

SEQ ID NO: 20894 - RNA, 22 nt, Human
caagugacuucuuugagcccgu

SEQ ID NO: 20895 - RNA, 22 nt, Human
caagugagugaccagaguuggu

SEQ ID NO: 20896 - RNA, 22 nt, Human
caagugaucagacacugaaguc

SEQ ID NO: 20897 - RNA, 22 nt, Human
caaguguccaugauagucuuag

SEQ ID NO: 20898 - RNA, 22 nt, Human
caagugugacuauuuuuucaua

SEQ ID NO: 20899 - RNA, 22 nt, Human
caaguuaguuauucuugugagc

SEQ ID NO: 20900 - RNA, 22 nt, Human
caaguuaucagggcaguuagag

SEQ ID NO: 20901 - RNA, 22 nt, Human
caaguucaaguccuggcucugc

SEQ ID NO: 20902 - RNA, 21 nt, Human
caaguucugugucuuacuccu

SEQ ID NO: 20903 - RNA, 22 nt, Human
caaguuggucuccuguagcaac

SEQ ID NO: 20904 - RNA, 22 nt, Human
caaguuuacaauguguaugugu

SEQ ID NO: 20905 - RNA, 22 nt, Human
caaguuugcugauccuuguuuu

SEQ ID NO: 20906 - RNA, 22 nt, Human
caaguuuggauuaugaaaaagu

SEQ ID NO: 20907 - RNA, 22 nt, Human
caaguuuguguucuaucauucu

SEQ ID NO: 20908 - RNA, 22 nt, Human
caaguuuuagcaaguggaaagg

SEQ ID NO: 20909 - RNA, 22 nt, Human
caaguuuugcauaguucuguau

SEQ ID NO: 20910 - RNA, 21 nt, Human
caauaaacugcacauugagac

SEQ ID NO: 20911 - RNA, 22 nt, Human
caauaaagaagauuuuugcaau

SEQ ID NO: 20912 - RNA, 22 nt, Human
caauaacuaguaauuauuccgg

SEQ ID NO: 20913 - RNA, 22 nt, Human
caauaagccagguguuuguguu

SEQ ID NO: 20914 - RNA, 20 nt, Human
caauaauuuacuucccuauu

SEQ ID NO: 20915 - RNA, 22 nt, Human
caauacuauucggaccaucucu

SEQ ID NO: 20916 - RNA, 22 nt, Human
caauacuuuaguaaaauggccc

SEQ ID NO: 20917 - RNA, 22 nt, Human
caauagaaaacucaauacuuaa

SEQ ID NO: 20918 - RNA, 22 nt, Human
caauagaaggcacagauaggua

SEQ ID NO: 20919 - RNA, 22 nt, Human
caauagcagaccuagaaagcaa

SEQ ID NO: 20920 - RNA, 22 nt, Human
caauaguaaauuacggaggaga

SEQ ID NO: 20921 - RNA, 22 nt, Human
caauagugucugcuuguuucua

SEQ ID NO: 20922 - RNA, 22 nt, Human
caauaugcaagcuauuaaguau

SEQ ID NO: 20923 - RNA, 22 nt, Human
caaucaguaaccggaucauggu

SEQ ID NO: 20924 - RNA, 22 nt, Human
caaucaguuucuguuguauaau

SEQ ID NO: 20925 - RNA, 22 nt, Human
caauccaucaauuacacaggcu

SEQ ID NO: 20926 - RNA, 22 nt, Human
caaucuauagagcuuuagacua

SEQ ID NO: 20927 - RNA, 22 nt, Human
caaucugaguugggaauguauu

SEQ ID NO: 20928 - RNA, 22 nt, Human
caaucuuagagagauucuuuua

SEQ ID NO: 20929 - RNA, 22 nt, Human
caaucuuaguggcuuacaaaga

SEQ ID NO: 20930 - RNA, 22 nt, Human
caaugaaaauuuaaguugcagc

SEQ ID NO: 20931 - RNA, 22 nt, Human
caaugaaagcaacugccuauaa

SEQ ID NO: 20932 - RNA, 22 nt, Human
caaugaacacagcaauuucaua

SEQ ID NO: 20933 - RNA, 22 nt, Human
caauucaugugagcggacucuu

SEQ ID NO: 20934 - RNA, 22 nt, Human
caauugcugauaugcagaagac

SEQ ID NO: 20935 - RNA, 23 nt, Human
caauuguauaaagcaaaugguuu

SEQ ID NO: 20936 - RNA, 22 nt, Human
caauuucaagauucuguucuuu

SEQ ID NO: 20937 - RNA, 22 nt, Human
caauuucacuaaugaugugggg

SEQ ID NO: 20938 - RNA, 22 nt, Human
caauuucacugacacccuggaa

SEQ ID NO: 20939 - RNA, 22 nt, Human
caauuucagguggauagguuuu

SEQ ID NO: 20940 - RNA, 21 nt, Human
caauuucaugggaagauggga

SEQ ID NO: 20941 - RNA, 22 nt, Human
caauuucucgaacucuaaucca

SEQ ID NO: 20942 - RNA, 19 nt, Human
caauuuggcagauucuccc

SEQ ID NO: 20943 - RNA, 22 nt, Human
caauuugguuuauguguucaga

SEQ ID NO: 20944 - RNA, 18 nt, Human
caauuuuacccagucccu

SEQ ID NO: 20945 - RNA, 23 nt, Human
cacaaagguuccauucucucacc

SEQ ID NO: 20946 - RNA, 19 nt, Human
cacaaaugaugaggaccug

SEQ ID NO: 20947 - RNA, 22 nt, Human
cacaaaugugcagaaaugugag

SEQ ID NO: 20948 - RNA, 23 nt, Human
cacaacuaaucagaaucucuagg

SEQ ID NO: 20949 - RNA, 22 nt, Human
cacaacugccagccaggaaagg

SEQ ID NO: 20950 - RNA, 19 nt, Human
cacaacuucgcuugauucc

SEQ ID NO: 20951 - RNA, 20 nt, Human
cacaagaggaguucccugag

SEQ ID NO: 20952 - RNA, 22 nt, Human
cacaaggacauguauauuuaug

SEQ ID NO: 20953 - RNA, 22 nt, Human
cacaaggacuggauggaguggg

SEQ ID NO: 20954 - RNA, 22 nt, Human
cacaaggcugggacaagugcug

SEQ ID NO: 20955 - RNA, 22 nt, Human
cacaagggcuuuguaggcuuug

SEQ ID NO: 20956 - RNA, 22 nt, Human
cacaagucuguggucuccaaca

SEQ ID NO: 20957 - RNA, 22 nt, Human
cacaauaaauguuugcugauga

SEQ ID NO: 20958 - RNA, 22 nt, Human
cacaauacuauuuuuaggucuu

SEQ ID NO: 20959 - RNA, 22 nt, Human
cacaauguguuggguuaaguuu

SEQ ID NO: 20960 - RNA, 22 nt, Human
cacaauuacuuuugcaccaaca

SEQ ID NO: 20961 - RNA, 19 nt, Human
cacaauuaugagacacuua

SEQ ID NO: 20962 - RNA, 22 nt, Human
cacaauuuccaagucauguuau

SEQ ID NO: 20963 - RNA, 22 nt, Human
cacaauuuccauugagcagcag

SEQ ID NO: 20964 - RNA, 22 nt, Human
cacaauuuggacuucacugguu

SEQ ID NO: 20965 - RNA, 22 nt, Human
cacaauuuggggugcccacugu

SEQ ID NO: 20966 - RNA, 22 nt, Human
cacaauuuggugcuaaagaaag

SEQ ID NO: 20967 - RNA, 22 nt, Human
cacaauuuuaauacacagucaa

SEQ ID NO: 20968 - RNA, 22 nt, Human
cacaauuuuccuuuaaguguau

SEQ ID NO: 20969 - RNA, 22 nt, Human
cacacacuggagcaaggagaug

SEQ ID NO: 20970 - RNA, 22 nt, Human
cacacacuguuaauguaggagu

SEQ ID NO: 20971 - RNA, 22 nt, Human
cacacagacagcucucugaaga

SEQ ID NO: 20972 - RNA, 15 nt, Human
cacacagacagcuug

SEQ ID NO: 20973 - RNA, 22 nt, Human
cacacagcaacaagaauagcca

SEQ ID NO: 20974 - RNA, 22 nt, Human
cacacaggaaaauuggaauuaa

SEQ ID NO: 20975 - RNA, 22 nt, Human
cacacaggagagugcuggaggu

SEQ ID NO: 20976 - RNA, 22 nt, Human
cacacagggagaaagaaagccu

SEQ ID NO: 20977 - RNA, 22 nt, Human
cacacagguauauauauguaca

SEQ ID NO: 20978 - RNA, 22 nt, Human
cacacaguaggcacucauuaau

SEQ ID NO: 20979 - RNA, 22 nt, Human
cacacaucaaccuagacauugu

SEQ ID NO: 20980 - RNA, 22 nt, Human
cacacaugaaucccuaguaccu

SEQ ID NO: 20981 - RNA, 22 nt, Human
cacacaugacccacuuuuaccg

SEQ ID NO: 20982 - RNA, 22 nt, Human
cacacauggcugccagggaggu

SEQ ID NO: 20983 - RNA, 22 nt, Human
cacacaugucucuccaugcucu

SEQ ID NO: 20984 - RNA, 22 nt, Human
cacacauugagcagcuguuugu

SEQ ID NO: 20985 - RNA, 22 nt, Human
cacacauuucagaugcuacaau

SEQ ID NO: 20986 - RNA, 22 nt, Human
cacaccagagguuaccugcaaa

SEQ ID NO: 20987 - RNA, 23 nt, Human
cacaccaggagccgucugggcca

SEQ ID NO: 20988 - RNA, 22 nt, Human
cacacccaaauucuaacaguag

SEQ ID NO: 20989 - RNA, 22 nt, Human
cacaccuguaauaccagcuacu

SEQ ID NO: 20990 - RNA, 22 nt, Human
cacacgagcccuggagccagca

SEQ ID NO: 20991 - RNA, 22 nt, Human
cacacgaugugaauucuugccc

SEQ ID NO: 20992 - RNA, 22 nt, Human
cacacuagucuauccauuagcu

SEQ ID NO: 20993 - RNA, 22 nt, Human
cacacuaucuuccuauccuggc

SEQ ID NO: 20994 - RNA, 22 nt, Human
cacacugcuuacacaaaaugau

SEQ ID NO: 20995 - RNA, 22 nt, Human
cacacuguccccuucuccccag

SEQ ID NO: 20996 - RNA, 22 nt, Human
cacacuugugaccgauauaaug

SEQ ID NO: 20997 - RNA, 22 nt, Human
cacagaacauuuuuagaugcag

SEQ ID NO: 20998 - RNA, 22 nt, Human
cacagaacugguuaauagcaga

SEQ ID NO: 20999 - RNA, 22 nt, Human
cacagaaguuucauagucucga

SEQ ID NO: 21000 - RNA, 22 nt, Human
cacagaaucauauugucaguuu

SEQ ID NO: 21001 - RNA, 22 nt, Human
cacagagagcuacgugcagcgu

SEQ ID NO: 21002 - RNA, 22 nt, Human
cacagagaggcuugucuccaag

SEQ ID NO: 21003 - RNA, 22 nt, Human
cacagagauggucuggcaggug

SEQ ID NO: 21004 - RNA, 22 nt, Human
cacagagcaggggucuguguca

SEQ ID NO: 21005 - RNA, 22 nt, Human
cacagaggacuguagcggggag

SEQ ID NO: 21006 - RNA, 22 nt, Human
cacagaggauuuuuagggcagu

SEQ ID NO: 21007 - RNA, 22 nt, Human
cacagaggcaaccuucuggggu

SEQ ID NO: 21008 - RNA, 22 nt, Human
cacagaggcucaaagccaggug

SEQ ID NO: 21009 - RNA, 22 nt, Human
cacagauaaggcuuugucccca

SEQ ID NO: 21010 - RNA, 22 nt, Human
cacagauaccuagugaaacaua

SEQ ID NO: 21011 - RNA, 22 nt, Human
cacagauagaccuuaugagauu

SEQ ID NO: 21012 - RNA, 20 nt, Human
cacagaugggacaggaaagg

SEQ ID NO: 21013 - RNA, 22 nt, Human
cacagcagaaauaugaaggcag

SEQ ID NO: 21014 - RNA, 22 nt, Human
cacagcagagggagccauugaa

SEQ ID NO: 21015 - RNA, 22 nt, Human
cacagcagccagaacauuuuug

SEQ ID NO: 21016 - RNA, 22 nt, Human
cacagcagcguuccuccgugug

SEQ ID NO: 21017 - RNA, 21 nt, Human
cacagcaggguuccugggcuc

SEQ ID NO: 21018 - RNA, 22 nt, Human
cacagcaggugcuuaaugauua

SEQ ID NO: 21019 - RNA, 22 nt, Human
cacagcauuaacugggacagcu

SEQ ID NO: 21020 - RNA, 19 nt, Human
cacagccacagccaaccuc

SEQ ID NO: 21021 - RNA, 22 nt, Human
cacagcccccuugacacucugg

SEQ ID NO: 21022 - RNA, 22 nt, Human
cacagcuaauggaaguggaauc

SEQ ID NO: 21023 - RNA, 22 nt, Human
cacagcugccauggcugcacuu

SEQ ID NO: 21024 - RNA, 22 nt, Human
cacagcugcccuaacuguacuc

SEQ ID NO: 21025 - RNA, 22 nt, Human
cacagcuggaaugggguaccug

SEQ ID NO: 21026 - RNA, 22 nt, Human
cacagcuggugacagagcccag

SEQ ID NO: 21027 - RNA, 22 nt, Human
cacagcuggugcacuagcucug

SEQ ID NO: 21028 - RNA, 22 nt, Human
cacagcuucccgugcauggaga

SEQ ID NO: 21029 - RNA, 22 nt, Human
cacagcuucugagugaggauuu

SEQ ID NO: 21030 - RNA, 20 nt, Human
cacagcuugccuuuuaugac

SEQ ID NO: 21031 - RNA, 22 nt, Human
cacagcuuugcuuuccuuaaua

SEQ ID NO: 21032 - RNA, 22 nt, Human
cacaggaaaauaaaagaucuaa

SEQ ID NO: 21033 - RNA, 22 nt, Human
cacaggaacaaagaagacaauu

SEQ ID NO: 21034 - RNA, 22 nt, Human
cacaggaagagguauacaauuc

SEQ ID NO: 21035 - RNA, 22 nt, Human
cacaggaaggccuucucacaau

SEQ ID NO: 21036 - RNA, 22 nt, Human
cacaggaaucagcauuaauggc

SEQ ID NO: 21037 - RNA, 22 nt, Human
cacaggaaucgucacuuagcgc

SEQ ID NO: 21038 - RNA, 22 nt, Human
cacaggaaucugcauuuugacc

SEQ ID NO: 21039 - RNA, 22 nt, Human
cacaggaaugaacagggaaaga

SEQ ID NO: 21040 - RNA, 22 nt, Human
cacaggaauuagcagccuaaaa

SEQ ID NO: 21041 - RNA, 22 nt, Human
cacaggaccaauucacauucca

SEQ ID NO: 21042 - RNA, 22 nt, Human
ugcagagggacagccacagcuc

SEQ ID NO: 21043 - RNA, 22 nt, Human
ugcagaggugugcauucuuaag

SEQ ID NO: 21044 - RNA, 22 nt, Human
ugcagagguuuccaggcaaguu

SEQ ID NO: 21045 - RNA, 22 nt, Human
ugcagagguuuuuaauacauuu

SEQ ID NO: 21046 - RNA, 22 nt, Human
ugcagagugggagaggugcggg

SEQ ID NO: 21047 - RNA, 22 nt, Human
ugcagaguugcuuugauagucc

SEQ ID NO: 21048 - RNA, 22 nt, Human
ugcagauagcgucauucuugcu

SEQ ID NO: 21049 - RNA, 22 nt, Human
ugcagaugagggaugaaaauga

SEQ ID NO: 21050 - RNA, 22 nt, Human
ugcagauucaaaugaaaugcaa

SEQ ID NO: 21051 - RNA, 22 nt, Human
ugcagcaaaaggucagagggag

SEQ ID NO: 21052 - RNA, 22 nt, Human
ugcagcaaacaggccuucaggg

SEQ ID NO: 21053 - RNA, 22 nt, Human
ugcagcaagcaaguaugguucu

SEQ ID NO: 21054 - RNA, 22 nt, Human
ugcagcaaguaaccaucuuccu

SEQ ID NO: 21055 - RNA, 22 nt, Human
ugcagcacuguucacaauagcc

SEQ ID NO: 21056 - RNA, 20 nt, Human
ugcagcagaagcccaugcuc

SEQ ID NO: 21057 - RNA, 22 nt, Human
ugcagcagacauaauguggauu

SEQ ID NO: 21058 - RNA, 22 nt, Human
ugcagcagagugggccugggug

SEQ ID NO: 21059 - RNA, 21 nt, Human
ugcagcagauuugggggaaga

SEQ ID NO: 21060 - RNA, 22 nt, Human
ugcagcagccucaucugguuuc

SEQ ID NO: 21061 - RNA, 22 nt, Human
ugcagcagcuccagguuacccu

SEQ ID NO: 21062 - RNA, 22 nt, Human
ugcagcaggcacaggacggaag

SEQ ID NO: 21063 - RNA, 22 nt, Human
ugcagcagguauggcaagcucc

SEQ ID NO: 21064 - RNA, 17 nt, Human
ugcagcaguucccaucu

SEQ ID NO: 21065 - RNA, 22 nt, Human
ugcagcaucuccuugugccaug

SEQ ID NO: 21066 - RNA, 22 nt, Human
ugcagcauuaguacaagucuca

SEQ ID NO: 21067 - RNA, 22 nt, Human
ugcagcauuugcugaagcagga

SEQ ID NO: 21068 - RNA, 19 nt, Human
ugcagccacgugagagacu

SEQ ID NO: 21069 - RNA, 22 nt, Human
ugcagccuagacauucugguca

SEQ ID NO: 21070 - RNA, 18 nt, Human
ugcagccuguagucuugu

SEQ ID NO: 21071 - RNA, 22 nt, Human
ugcagcgguaguucucguggaa

SEQ ID NO: 21072 - RNA, 19 nt, Human
ugcagcucagggcaggggc

SEQ ID NO: 21073 - RNA, 22 nt, Human
ugcagcucauugguguccuggu

SEQ ID NO: 21074 - RNA, 22 nt, Human
ugcagcugaggccagcuaugcc

SEQ ID NO: 21075 - RNA, 22 nt, Human
ugcagcugauaauuacauguuc

SEQ ID NO: 21076 - RNA, 22 nt, Human
ugcagcugauuaaagggcagac

SEQ ID NO: 21077 - RNA, 20 nt, Human
ugcagcugcaggaggguggg

SEQ ID NO: 21078 - RNA, 22 nt, Human
ugcagcugccuagggcuggcuu

SEQ ID NO: 21079 - RNA, 23 nt, Human
ugcagcugccucuggcgggccgg

SEQ ID NO: 21080 - RNA, 22 nt, Human
ugcagcugcucuucauuucccc

SEQ ID NO: 21081 - RNA, 22 nt, Human
ugcagcugcugguggcugaaag

SEQ ID NO: 21082 - RNA, 22 nt, Human
ugcagcugguaucccauggauu

SEQ ID NO: 21083 - RNA, 22 nt, Human
ugcagcugguuuagaacuagau

SEQ ID NO: 21084 - RNA, 22 nt, Human
ugcagcuguaacagaggccuca

SEQ ID NO: 21085 - RNA, 22 nt, Human
ugcagcugugggagaaucucug

SEQ ID NO: 21086 - RNA, 22 nt, Human
ugcagcuucacucaggaagcca

SEQ ID NO: 21087 - RNA, 22 nt, Human
ugcagcuuugcucuggucccca

SEQ ID NO: 21088 - RNA, 22 nt, Human
ugcaggaaaaauaaauaguguu

SEQ ID NO: 21089 - RNA, 22 nt, Human
ugcaggaacauagguuccuugg

SEQ ID NO: 21090 - RNA, 22 nt, Human
ugcaggaacugggagggauagu

SEQ ID NO: 21091 - RNA, 22 nt, Human
ugcaggaacuugguuuuacuca

SEQ ID NO: 21092 - RNA, 22 nt, Human
ugcaggaaguuuccugaacuuu

SEQ ID NO: 21093 - RNA, 22 nt, Human
ugcaggaaugagguucucaguu

SEQ ID NO: 21094 - RNA, 22 nt, Human
ugcaggacaguuuggaagagag

SEQ ID NO: 21095 - RNA, 22 nt, Human
ugcaggaccuugauccuggacu

SEQ ID NO: 21096 - RNA, 22 nt, Human
ugcaggacucaaggguagcagg

SEQ ID NO: 21097 - RNA, 22 nt, Human
ugcaggacuggggagcggaagg

SEQ ID NO: 21098 - RNA, 22 nt, Human
ugcaggagaaaguacggagcgu

SEQ ID NO: 21099 - RNA, 22 nt, Human
ugcaggagcagagauggcugga

SEQ ID NO: 21100 - RNA, 22 nt, Human
ugcaggagcccaggaauacuau

SEQ ID NO: 21101 - RNA, 22 nt, Human
ugcaggagcugcuguccugcuc

SEQ ID NO: 21102 - RNA, 21 nt, Human
ugcaggagucugugagucagg

SEQ ID NO: 21103 - RNA, 21 nt, Human
ugcaggaguguaaugugaccc

SEQ ID NO: 21104 - RNA, 22 nt, Human
ugcaggaguuaagugcucuccu

SEQ ID NO: 21105 - RNA, 22 nt, Human
ugcaggcaggggaugagcagcc

SEQ ID NO: 21106 - RNA, 22 nt, Human
ugcaggcucacccuggagcuga

SEQ ID NO: 21107 - RNA, 17 nt, Human
ugcaggcuccugucccu

SEQ ID NO: 21108 - RNA, 22 nt, Human
ugcaggcucugugugugccugg

SEQ ID NO: 21109 - RNA, 22 nt, Human
ugcaggcugaggcuggcucaac

SEQ ID NO: 21110 - RNA, 22 nt, Human
ugcaggcugcagucucaggugg

SEQ ID NO: 21111 - RNA, 22 nt, Human
ugcaggcugcucaagacuuagu

SEQ ID NO: 21112 - RNA, 22 nt, Human
ugcaggcuggauuugcuuuugu

SEQ ID NO: 21113 - RNA, 22 nt, Human
ugcaggcuggcagauaucucau

SEQ ID NO: 21114 - RNA, 22 nt, Human
ugcaggcuguuugguggaucuc

SEQ ID NO: 21115 - RNA, 20 nt, Human
ugcaggcuucgcucuaggag

SEQ ID NO: 21116 - RNA, 22 nt, Human
ugcagggaagcaaggguggcuc

SEQ ID NO: 21117 - RNA, 22 nt, Human
ugcagggaagucccagcuccug

SEQ ID NO: 21118 - RNA, 22 nt, Human
ugcagggacacgaagacaaaua

SEQ ID NO: 21119 - RNA, 22 nt, Human
ugcagggacaggcucuggggau

SEQ ID NO: 21120 - RNA, 21 nt, Human
ugcagggaucuuucugccuga

SEQ ID NO: 21121 - RNA, 22 nt, Human
ugcagggcacacgcacgggugu

SEQ ID NO: 21122 - RNA, 22 nt, Human
ugcagggcaguuuguuucggca

SEQ ID NO: 21123 - RNA, 22 nt, Human
ugcagggccaugguggcggcug

SEQ ID NO: 21124 - RNA, 22 nt, Human
ugcagggccccucugcaugagu

SEQ ID NO: 21125 - RNA, 19 nt, Human
ugcagggcugcgccugggg

SEQ ID NO: 21126 - RNA, 23 nt, Human
ugcaggggaggcuuaaagcaggu

SEQ ID NO: 21127 - RNA, 22 nt, Human
ugcaggguagaugcaggcugug

SEQ ID NO: 21128 - RNA, 22 nt, Human
ugcagggugguuugaagggucu

SEQ ID NO: 21129 - RNA, 22 nt, Human
ugcaggguguccggaggaucac

SEQ ID NO: 21130 - RNA, 22 nt, Human
ugcaggucaucccugugcuucu

SEQ ID NO: 21131 - RNA, 22 nt, Human
ugcaggugagugcaggggcuca

SEQ ID NO: 21132 - RNA, 22 nt, Human
ugcaggugauucugaugcaguu

SEQ ID NO: 21133 - RNA, 22 nt, Human
ugcaggugcuccgggggugccc

SEQ ID NO: 21134 - RNA, 22 nt, Human
ugcagguggcuccagggacugc

SEQ ID NO: 21135 - RNA, 20 nt, Human
ugcaggugggcccuucuggg

SEQ ID NO: 21136 - RNA, 22 nt, Human
ugcaggugguacuucuuuuucu

SEQ ID NO: 21137 - RNA, 22 nt, Human
ugcaggugguuuggacacugcu

SEQ ID NO: 21138 - RNA, 22 nt, Human
ugcaguaggcacguggcuguga

SEQ ID NO: 21139 - RNA, 22 nt, Human
ugcaguccaagagucuccuggu

SEQ ID NO: 21140 - RNA, 21 nt, Human
ugcaguccuuugacaugauuc

SEQ ID NO: 21141 - RNA, 22 nt, Human
ugcagugaugcuucuggcucag

SEQ ID NO: 21142 - RNA, 22 nt, Human
ugcagugccucggcagugcagc

SEQ ID NO: 21143 - RNA, 22 nt, Human
ugcaguggaaagacucagacuu

SEQ ID NO: 21144 - RNA, 22 nt, Human
ugcaguggaagagguggagauc

SEQ ID NO: 21145 - RNA, 22 nt, Human
ugcagugugaccuguagcgagc

SEQ ID NO: 21146 - RNA, 22 nt, Human
ugcagugugagguccacaucug

SEQ ID NO: 21147 - RNA, 22 nt, Human
ugcagugugauuuucuggcuga

SEQ ID NO: 21148 - RNA, 22 nt, Human
ugcaguucuaucacccaccccg

SEQ ID NO: 21149 - RNA, 22 nt, Human
uauuaacacguauaaaguguuu

SEQ ID NO: 21150 - RNA, 22 nt, Human
uauuaacaugaacugacuuuuc

SEQ ID NO: 21151 - RNA, 22 nt, Human
uaccuucuaggugaugguuaca

SEQ ID NO: 21152 - RNA, 22 nt, Human
uaccuucucuagaucuuuauuc

SEQ ID NO: 21153 - RNA, 22 nt, Human
uagaaacaugagagaaacucuu

SEQ ID NO: 21154 - RNA, 22 nt, Human
uagaaacauucaguugcagucc

SEQ ID NO: 21155 - RNA, 22 nt, Human
uagaaacccaggauuuguauuu

SEQ ID NO: 21156 - RNA, 22 nt, Human
uagaaacccauguuuauucagu

SEQ ID NO: 21157 - RNA, 22 nt, Human
uagaaaccucagggaaaucuuu

SEQ ID NO: 21158 - RNA, 22 nt, Human
uagaaacuacuagaauaagaga

SEQ ID NO: 21159 - RNA, 19 nt, Human
uagaaagaugauggguggg

SEQ ID NO: 21160 - RNA, 22 nt, Human
uagaaagcaaaauccuaccaag

SEQ ID NO: 21161 - RNA, 22 nt, Human
uagaaagcugaguaauacauuu

SEQ ID NO: 21162 - RNA, 22 nt, Human
uagaaagcuggaggaauucuuu

SEQ ID NO: 21163 - RNA, 22 nt, Human
uagaaaggaagcuacuuagggg

SEQ ID NO: 21164 - RNA, 22 nt, Human
uagaaaguagccacuuacagag

SEQ ID NO: 21165 - RNA, 22 nt, Human
uagaaagucaaaacacuguguu

SEQ ID NO: 21166 - RNA, 22 nt, Human
uagaaaugaauguuuaaaaguc

SEQ ID NO: 21167 - RNA, 22 nt, Human
uagaaaugagccaugguagagc

SEQ ID NO: 21168 - RNA, 22 nt, Human
uagaaaugcccagauucugcua

SEQ ID NO: 21169 - RNA, 22 nt, Human
uagaaauguugguauuaacauu

SEQ ID NO: 21170 - RNA, 22 nt, Human
uagaaauucaaugcucugagua

SEQ ID NO: 21171 - RNA, 22 nt, Human
uagaacacagaaauguguggcc

SEQ ID NO: 21172 - RNA, 22 nt, Human
uagaacagaaggcaccuucucu

SEQ ID NO: 21173 - RNA, 22 nt, Human
uagaacagcauuuggcuauuaa

SEQ ID NO: 21174 - RNA, 22 nt, Human
uagaacaggcugucagagcggg

SEQ ID NO: 21175 - RNA, 22 nt, Human
uagaaccaguccacagaauuug

SEQ ID NO: 21176 - RNA, 22 nt, Human
uagaaccuccacaggaccucca

SEQ ID NO: 21177 - RNA, 22 nt, Human
uagaaccucugauuauguuacu

SEQ ID NO: 21178 - RNA, 22 nt, Human
uagaacuacaagcauuaaaagu

SEQ ID NO: 21179 - RNA, 22 nt, Human
uagaacuagaacaaggauuuga

SEQ ID NO: 21180 - RNA, 22 nt, Human
uagaacucuggucuucucaucc

SEQ ID NO: 21181 - RNA, 22 nt, Human
uagaacugcucucauacuugcu

SEQ ID NO: 21182 - RNA, 22 nt, Human
uagaacuggcggcuagaccacu

SEQ ID NO: 21183 - RNA, 22 nt, Human
uagaacuguccaagucugagcu

SEQ ID NO: 21184 - RNA, 22 nt, Human
uagaacuuauuuggcauuauuu

SEQ ID NO: 21185 - RNA, 22 nt, Human
uagaacuugugaaauaucaaug

SEQ ID NO: 21186 - RNA, 22 nt, Human
uagaacuuugccuuagggcaaa

SEQ ID NO: 21187 - RNA, 22 nt, Human
uagaagaaaagcacuuagagau

SEQ ID NO: 21188 - RNA, 22 nt, Human
uagaagauucauuuccucugaa

SEQ ID NO: 21189 - RNA, 22 nt, Human
uagaagcacagguuaaaggcau

SEQ ID NO: 21190 - RNA, 22 nt, Human
uagaagcagcaggaguaaaggc

SEQ ID NO: 21191 - RNA, 22 nt, Human
uagaaguuaaaggaauacagaa

SEQ ID NO: 21192 - RNA, 22 nt, Human
uagaaguuaggaaauaggaaua

SEQ ID NO: 21193 - RNA, 22 nt, Human
uagaaguuaugauaauaauagu

SEQ ID NO: 21194 - RNA, 22 nt, Human
uagaaguugaacuaaaaauauu

SEQ ID NO: 21195 - RNA, 22 nt, Human
uagaaguuuaaauucaccaugc

SEQ ID NO: 21196 - RNA, 22 nt, Human
uagaaguuucaaaagacuucau

SEQ ID NO: 21197 - RNA, 22 nt, Human
uagaauaaguugaugauauaug

SEQ ID NO: 21198 - RNA, 22 nt, Human
uagaauacaguuuaagaacuac

SEQ ID NO: 21199 - RNA, 22 nt, Human
uagaauaugugguguauacuuu

SEQ ID NO: 21200 - RNA, 21 nt, Human
uagaaucacuaauaagaugua

SEQ ID NO: 21201 - RNA, 22 nt, Human
uagaauccaccuacacaagaga

SEQ ID NO: 21202 - RNA, 22 nt, Human
uagaaucuaguucauucauuug

SEQ ID NO: 21203 - RNA, 22 nt, Human
uagaaucugauggcccgucugg

SEQ ID NO: 21204 - RNA, 22 nt, Human
uagaaucugccugcagcaaaga

SEQ ID NO: 21205 - RNA, 22 nt, Human
uagaaucuguguucaaaccuac

SEQ ID NO: 21206 - RNA, 22 nt, Human
uagaaugugccuggaauacagu

SEQ ID NO: 21207 - RNA, 22 nt, Human
uagaauguuaagaauauguaua

SEQ ID NO: 21208 - RNA, 22 nt, Human
uagaauucauguuacuguuagc

SEQ ID NO: 21209 - RNA, 22 nt, Human
uagaauuuucugcuuugauagu

SEQ ID NO: 21210 - RNA, 22 nt, Human
uagacacaucaaggaucaguuu

SEQ ID NO: 21211 - RNA, 22 nt, Human
uagacacaucaaguauaguuaa

SEQ ID NO: 21212 - RNA, 22 nt, Human
uagacagauguuuucuggcugu

SEQ ID NO: 21213 - RNA, 22 nt, Human
uagacagauuucuuguuagaca

SEQ ID NO: 21214 - RNA, 22 nt, Human
uagacagugagcuaugaguggu

SEQ ID NO: 21215 - RNA, 22 nt, Human
uagacaguuaaacuacuggugg

SEQ ID NO: 21216 - RNA, 22 nt, Human
uagacauuugaaugugaaauga

SEQ ID NO: 21217 - RNA, 22 nt, Human
uagaccauuuuacaauagugug

SEQ ID NO: 21218 - RNA, 22 nt, Human
uagacuagaggaucagcaaggg

SEQ ID NO: 21219 - RNA, 22 nt, Human
uagacuauagcucacagugcuu

SEQ ID NO: 21220 - RNA, 22 nt, Human
uagacucuuggggaaaucugca

SEQ ID NO: 21221 - RNA, 23 nt, Human
uagacugcaggcuccuugagggc

SEQ ID NO: 21222 - RNA, 22 nt, Human
uagacugugagcuccuugaggg

SEQ ID NO: 21223 - RNA, 19 nt, Human
uagacuuuuccagcaggca

SEQ ID NO: 21224 - RNA, 23 nt, Human
uagagaaagccaccgagucucuc

SEQ ID NO: 21225 - RNA, 22 nt, Human
uagagaaauaagcuuugccuug

SEQ ID NO: 21226 - RNA, 22 nt, Human
uagagacaccaguaccauucug

SEQ ID NO: 21227 - RNA, 22 nt, Human
uagagacagaaaguagaauggu

SEQ ID NO: 21228 - RNA, 22 nt, Human
uagagagagcugugguggcucu

SEQ ID NO: 21229 - RNA, 22 nt, Human
uagagagcuguuugaaagcagg

SEQ ID NO: 21230 - RNA, 22 nt, Human
uagagagguuugaauuggcugc

SEQ ID NO: 21231 - RNA, 22 nt, Human
uagagaugugauauagcagagu

SEQ ID NO: 21232 - RNA, 23 nt, Human
uagagcagggaaaucugucagag

SEQ ID NO: 21233 - RNA, 23 nt, Human
uagagcaguagaucaccauggga

SEQ ID NO: 21234 - RNA, 22 nt, Human
uagagcaguuggcagcuguauu

SEQ ID NO: 21235 - RNA, 22 nt, Human
uagagcauuuagaggggcagga

SEQ ID NO: 21236 - RNA, 22 nt, Human
uagagcucuccuuccucugugg

SEQ ID NO: 21237 - RNA, 22 nt, Human
uagagcugauaaugaggccaag

SEQ ID NO: 21238 - RNA, 19 nt, Human
uagagcugcuuccuggcag

SEQ ID NO: 21239 - RNA, 22 nt, Human
uagagcuggccgggacagcugg

SEQ ID NO: 21240 - RNA, 22 nt, Human
uagagcuugauuggauucaggg

SEQ ID NO: 21241 - RNA, 22 nt, Human
uagagcuuggacugcauuuucg

SEQ ID NO: 21242 - RNA, 22 nt, Human
uagaggaaccaggcaggcugag

SEQ ID NO: 21243 - RNA, 22 nt, Human
uagaggcugggaauuauuuuca

SEQ ID NO: 21244 - RNA, 22 nt, Human
uagagggaaggaagaauggauu

SEQ ID NO: 21245 - RNA, 22 nt, Human
uagagguauaccaaaaaggcau

SEQ ID NO: 21246 - RNA, 22 nt, Human
uagaggugagauauuuuauuuu

SEQ ID NO: 21247 - RNA, 22 nt, Human
uagaggugagccaucaaggggc

SEQ ID NO: 21248 - RNA, 22 nt, Human
uagagguuggccuuagaaagau

SEQ ID NO: 21249 - RNA, 22 nt, Human
uagaguauagcuaacuguauua

SEQ ID NO: 21250 - RNA, 22 nt, Human
uagaguccauuaaugcaaguuu

SEQ ID NO: 21251 - RNA, 22 nt, Human
uagauaaaagggcaaagggcau

SEQ ID NO: 21252 - RNA, 19 nt, Human
uagauaaggcauuuaaucu

SEQ ID NO: 21253 - RNA, 22 nt, Human
uagauacaggcaagauuaugaa

SEQ ID NO: 21254 - RNA, 22 nt, Human
uagauacaggcucucugagccu

SEQ ID NO: 21255 - RNA, 22 nt, Human
uagauacaguguuaagugugga

SEQ ID NO: 21256 - RNA, 22 nt, Human
uagauacaugaaauggcagaua

SEQ ID NO: 21257 - RNA, 22 nt, Human
uagauacucagaaaugcuuuca

SEQ ID NO: 21258 - RNA, 22 nt, Human
uagauacuuauaaucuuccaag

SEQ ID NO: 21259 - RNA, 23 nt, Human
uagauagcacacugacaucugac

SEQ ID NO: 21260 - RNA, 22 nt, Human
ugcuggaggaguuuacuguggc

SEQ ID NO: 21261 - RNA, 22 nt, Human
ugcuggaggauuaaacaaguca

SEQ ID NO: 21262 - RNA, 22 nt, Human
ugcuggaggcaguggaggugcc

SEQ ID NO: 21263 - RNA, 22 nt, Human
ugcuggaggccugacuguguuu

SEQ ID NO: 21264 - RNA, 20 nt, Human
ugcuggaggcgccggcgcuc

SEQ ID NO: 21265 - RNA, 17 nt, Human
ugcuggaggcgggguau

SEQ ID NO: 21266 - RNA, 22 nt, Human
ugcuggaggggccugaccagga

SEQ ID NO: 21267 - RNA, 19 nt, Human
ugcuggagguugacagggu

SEQ ID NO: 21268 - RNA, 22 nt, Human
ugcuggaguaacaagacacuca

SEQ ID NO: 21269 - RNA, 22 nt, Human
ugcuggcaccagaaugacugca

SEQ ID NO: 21270 - RNA, 22 nt, Human
ugcuggcagccaugccuuggaa

SEQ ID NO: 21271 - RNA, 20 nt, Human
ugcuggcaugcaagagggaa

SEQ ID NO: 21272 - RNA, 22 nt, Human
ugcuggccaacaaggcuccaag

SEQ ID NO: 21273 - RNA, 22 nt, Human
ugcuggccaauggcagaggcgg

SEQ ID NO: 21274 - RNA, 22 nt, Human
ugcuggcccaugaagacgcagu

SEQ ID NO: 21275 - RNA, 23 nt, Human
ugcuggcuaagaaucugcauuuu

SEQ ID NO: 21276 - RNA, 22 nt, Human
ugcuggcucaguuugcagacuc

SEQ ID NO: 21277 - RNA, 22 nt, Human
ugcuggcucccaggagccgcug

SEQ ID NO: 21278 - RNA, 22 nt, Human
ugcuggcucuaggcugagacag

SEQ ID NO: 21279 - RNA, 22 nt, Human
ugcuggcugcagugcugucaaa

SEQ ID NO: 21280 - RNA, 22 nt, Human
ugcuggcuggaucagagauugg

SEQ ID NO: 21281 - RNA, 22 nt, Human
ugcuggcuggccuggccuggac

SEQ ID NO: 21282 - RNA, 22 nt, Human
ugcuggcuguauaugugagagu

SEQ ID NO: 21283 - RNA, 22 nt, Human
ugcuggcuguguaccaucucaa

SEQ ID NO: 21284 - RNA, 23 nt, Human
ugcuggcuguguuauugccaaca

SEQ ID NO: 21285 - RNA, 22 nt, Human
ugcuggcuuccugugcacagca

SEQ ID NO: 21286 - RNA, 22 nt, Human
ugcugggcacacaguaggugcu

SEQ ID NO: 21287 - RNA, 22 nt, Human
ugcugggcaccagugccugcag

SEQ ID NO: 21288 - RNA, 22 nt, Human
ugcugggcccccagugaccuuc

SEQ ID NO: 21289 - RNA, 22 nt, Human
ugcugggcggugggcucauccc

SEQ ID NO: 21290 - RNA, 22 nt, Human
ugcugggcuagaagcugaggcc

SEQ ID NO: 21291 - RNA, 22 nt, Human
ugcugggcuucacccccacagu

SEQ ID NO: 21292 - RNA, 22 nt, Human
ugcuggggcagaagagccaaga

SEQ ID NO: 21293 - RNA, 22 nt, Human
ugcuggggguagcucugcguag

SEQ ID NO: 21294 - RNA, 22 nt, Human
ugcuggggucauggggcgcccg

SEQ ID NO: 21295 - RNA, 22 nt, Human
ugcuggguagaaguauuagucu

SEQ ID NO: 21296 - RNA, 22 nt, Human
ugcugggucccuugagagcuca

SEQ ID NO: 21297 - RNA, 22 nt, Human
ugcuggguguuccgcacuugac

SEQ ID NO: 21298 - RNA, 22 nt, Human
ugcugguaccgcgccuccgcca

SEQ ID NO: 21299 - RNA, 22 nt, Human
ugcugguggagaaaguggaggu

SEQ ID NO: 21300 - RNA, 22 nt, Human
ugcuguccugcugagggaugug

SEQ ID NO: 21301 - RNA, 22 nt, Human
ugcugucugauucagggugauu

SEQ ID NO: 21302 - RNA, 22 nt, Human
ugcugucugcaacaguacuaca

SEQ ID NO: 21303 - RNA, 22 nt, Human
uagugauucgauguggguaagu

SEQ ID NO: 21304 - RNA, 23 nt, Human
uagugauuggaaaaacuaguuuu

SEQ ID NO: 21305 - RNA, 22 nt, Human
uagugauuuagaauucaaaugu

SEQ ID NO: 21306 - RNA, 22 nt, Human
uagugauuuucauauuacauua

SEQ ID NO: 21307 - RNA, 22 nt, Human
uagugcaaaggcccugagaugg

SEQ ID NO: 21308 - RNA, 22 nt, Human
uagugcacacgcauguagcagu

SEQ ID NO: 21309 - RNA, 22 nt, Human
uagugcagaggaggagccucug

SEQ ID NO: 21310 - RNA, 22 nt, Human
uagugccaugcgagggguggga

SEQ ID NO: 21311 - RNA, 22 nt, Human
uagugcuuaaaaguggaagaga

SEQ ID NO: 21312 - RNA, 22 nt, Human
uagugcuuaacacaaagugauu

SEQ ID NO: 21313 - RNA, 22 nt, Human
uagugcuugguggagauggaga

SEQ ID NO: 21314 - RNA, 22 nt, Human
uagugcuuuauuguuccugaaa

SEQ ID NO: 21315 - RNA, 22 nt, Human
uaguggaacugugucauacaaa

SEQ ID NO: 21316 - RNA, 22 nt, Human
uaguggaggggaugcaaagcuu

SEQ ID NO: 21317 - RNA, 22 nt, Human
uaguggggccugggaggguucc

SEQ ID NO: 21318 - RNA, 22 nt, Human
uaguguaaauaacugccuagac

SEQ ID NO: 21319 - RNA, 19 nt, Human
uagugucaaggaggagggu

SEQ ID NO: 21320 - RNA, 22 nt, Human
uagugucagcaucucauugagc

SEQ ID NO: 21321 - RNA, 22 nt, Human
uagugucaggagggaaaugcaa

SEQ ID NO: 21322 - RNA, 22 nt, Human
uagugucaucguugcagcugag

SEQ ID NO: 21323 - RNA, 22 nt, Human
uagugucugauccguaguuaca

SEQ ID NO: 21324 - RNA, 22 nt, Human
uagugucuguccaucaguaacu

SEQ ID NO: 21325 - RNA, 22 nt, Human
uaguguggccccaagaggaucu

SEQ ID NO: 21326 - RNA, 22 nt, Human
uaguguuaauucaguuuauaau

SEQ ID NO: 21327 - RNA, 22 nt, Human
uaguguucuaagaacauccaug

SEQ ID NO: 21328 - RNA, 22 nt, Human
uaguguucugggcugagagggg

SEQ ID NO: 21329 - RNA, 22 nt, Human
uaguguuuucuagaaugguuuu

SEQ ID NO: 21330 - RNA, 22 nt, Human
uaguuaaagagauccacauucc

SEQ ID NO: 21331 - RNA, 22 nt, Human
uaguuaaugcuaauuaacaaau

SEQ ID NO: 21332 - RNA, 22 nt, Human
uaguuaaugugaggcaccuagu

SEQ ID NO: 21333 - RNA, 22 nt, Human
uaguuacaaaccaacaggcagc

SEQ ID NO: 21334 - RNA, 22 nt, Human
uaguuaggaauagcagcgacuc

SEQ ID NO: 21335 - RNA, 22 nt, Human
uaguuaggguucugcagagaca

SEQ ID NO: 21336 - RNA, 22 nt, Human
uaguuaugucugcaugcauauu

SEQ ID NO: 21337 - RNA, 22 nt, Human
uaguucuacagaugguuuguaa

SEQ ID NO: 21338 - RNA, 22 nt, Human
uaguucuagaccaguuaauagu

SEQ ID NO: 21339 - RNA, 22 nt, Human
uaguucuagccagugaaaugua

SEQ ID NO: 21340 - RNA, 22 nt, Human
uaguuuagccccacgugugcuu

SEQ ID NO: 21341 - RNA, 22 nt, Human
uaguuuaggaauuaugagggug

SEQ ID NO: 21342 - RNA, 22 nt, Human
uaguuuaguaagaggagagcug

SEQ ID NO: 21343 - RNA, 22 nt, Human
uaguuuauaguuagcgagcacg

SEQ ID NO: 21344 - RNA, 22 nt, Human
uaguuucagcuccuucauccug

SEQ ID NO: 21345 - RNA, 22 nt, Human
uaguuucauaugcaaaauagua

SEQ ID NO: 21346 - RNA, 22 nt, Human
uaguuucuaaagcuuccuaggu

SEQ ID NO: 21347 - RNA, 22 nt, Human
uaguuucuagucaaucuucuuu

SEQ ID NO: 21348 - RNA, 22 nt, Human
uaguuucucagggaggaaagaa

SEQ ID NO: 21349 - RNA, 22 nt, Human
uaguuuguaaugaggagaagua

SEQ ID NO: 21350 - RNA, 22 nt, Human
uaguuuuauaauguuaacaucu

SEQ ID NO: 21351 - RNA, 22 nt, Human
uaguuuuuaaguguacaauuuc

SEQ ID NO: 21352 - RNA, 22 nt, Human
uaguuuuuacugcgaguuauaa

SEQ ID NO: 21353 - RNA, 22 nt, Human
uauaaaauucucaguuuggggu

SEQ ID NO: 21354 - RNA, 18 nt, Human
uauaaacacacuuagguu

SEQ ID NO: 21355 - RNA, 22 nt, Human
uauaaagaaaugauuuccagaa

SEQ ID NO: 21356 - RNA, 22 nt, Human
uauaaagaaguguaaacaggaa

SEQ ID NO: 21357 - RNA, 22 nt, Human
uauaaagaauccagaagagaca

SEQ ID NO: 21358 - RNA, 22 nt, Human
uauaaagugugaacugugagua

SEQ ID NO: 21359 - RNA, 22 nt, Human
uauaaauuauuaggcugcuaaa

SEQ ID NO: 21360 - RNA, 21 nt, Human
uauaacacacuucagcuucuc

SEQ ID NO: 21361 - RNA, 22 nt, Human
uauaacaguuuaggugguguca

SEQ ID NO: 21362 - RNA, 18 nt, Human
uauaaccucuguuacuca

SEQ ID NO: 21363 - RNA, 22 nt, Human
uauaacuaauacuggccaugag

SEQ ID NO: 21364 - RNA, 22 nt, Human
uauaagaagugaagaagaguua

SEQ ID NO: 21365 - RNA, 22 nt, Human
uauaagaaugcuuguuuggggu

SEQ ID NO: 21366 - RNA, 22 nt, Human
uauaagauacuuggcauagugc

SEQ ID NO: 21367 - RNA, 22 nt, Human
uauaauuuuaagugguaaauua

SEQ ID NO: 21368 - RNA, 22 nt, Human
uauacacaaggugugcauuugu

SEQ ID NO: 21369 - RNA, 22 nt, Human
uauguucauagaaaucaugacc

SEQ ID NO: 21370 - RNA, 22 nt, Human
uauguucuuagaagaggcagca

SEQ ID NO: 21371 - RNA, 22 nt, Human
uauguugagugaaagaagcuag

SEQ ID NO: 21372 - RNA, 22 nt, Human
uauguuuauacuuugauguacu

SEQ ID NO: 21373 - RNA, 22 nt, Human
uauguuuuaggaauuaauuguu

SEQ ID NO: 21374 - RNA, 22 nt, Human
uauguuuuucagacguccuaca

SEQ ID NO: 21375 - RNA, 22 nt, Human
uauuaaauuauggauuuaggag

SEQ ID NO: 21376 - RNA, 22 nt, Human
uauuaauaagugacuacuagcu

SEQ ID NO: 21377 - RNA, 21 nt, Human
uauuaauaugucuaagcugau

SEQ ID NO: 21378 - RNA, 21 nt, Human
uauuaauuuuucuucccacua

SEQ ID NO: 21379 - RNA, 22 nt, Human
uauuacaagaaagggcaugaau

SEQ ID NO: 21380 - RNA, 22 nt, Human
uauuacagggcuaguuaugagu

SEQ ID NO: 21381 - RNA, 22 nt, Human
uauuacguaacuacuuaaauug

SEQ ID NO: 21382 - RNA, 22 nt, Human
uauuagaaagcuuaauaucgug

SEQ ID NO: 21383 - RNA, 22 nt, Human
uauuagcaacagagcucuuguu

SEQ ID NO: 21384 - RNA, 22 nt, Human
uauuagcagccaacuuagcugu

SEQ ID NO: 21385 - RNA, 22 nt, Human
uauuagcauauaugauucaguu

SEQ ID NO: 21386 - RNA, 22 nt, Human
uauuagcgcuuacugaguugcc

SEQ ID NO: 21387 - RNA, 22 nt, Human
uauuagcuccaguacuguugcc

SEQ ID NO: 21388 - RNA, 22 nt, Human
uauuagcuucugguuuuguucu

SEQ ID NO: 21389 - RNA, 22 nt, Human
uauuaggcauuugaggauaaac

SEQ ID NO: 21390 - RNA, 22 nt, Human
uauuaguaauaccugucucaua

SEQ ID NO: 21391 - RNA, 22 nt, Human
uauuaguagcuugaaauuggug

SEQ ID NO: 21392 - RNA, 22 nt, Human
uauuaguugcaaaacauugacu

SEQ ID NO: 21393 - RNA, 22 nt, Human
uauuauaaaauuacuggcaggg

SEQ ID NO: 21394 - RNA, 22 nt, Human
uauuauaauuuagggcuuggau

SEQ ID NO: 21395 - RNA, 22 nt, Human
uauuaucauugguaauaugguc

SEQ ID NO: 21396 - RNA, 22 nt, Human
uauuaugaucccagcccuggag

SEQ ID NO: 21397 - RNA, 22 nt, Human
uauuaugaucgugacucaagga

SEQ ID NO: 21398 - RNA, 22 nt, Human
uauuaugguuguagguuaacaa

SEQ ID NO: 21399 - RNA, 22 nt, Human
uauuauuauaguuauugggaag

SEQ ID NO: 21400 - RNA, 22 nt, Human
uauuauugcaaguauauaaagu

SEQ ID NO: 21401 - RNA, 22 nt, Human
uauucacagcugccgcacucag

SEQ ID NO: 21402 - RNA, 22 nt, Human
uauucacagguucuggggauca

SEQ ID NO: 21403 - RNA, 22 nt, Human
uauucacauucucaggccuggu

SEQ ID NO: 21404 - RNA, 22 nt, Human
uauucacuuugggagagccauu

SEQ ID NO: 21405 - RNA, 22 nt, Human
uauucagaaaacugagcgauga

SEQ ID NO: 21406 - RNA, 22 nt, Human
uauucagaaaauaaauuggauu

SEQ ID NO: 21407 - RNA, 22 nt, Human
uauucagaguguagcaaauaga

SEQ ID NO: 21408 - RNA, 22 nt, Human
uauucagugacaggguauuaug

SEQ ID NO: 21409 - RNA, 22 nt, Human
uauucauguguuggaaaggaac

SEQ ID NO: 21410 - RNA, 22 nt, Human
uauuccaacuucacuauugucu

SEQ ID NO: 21411 - RNA, 20 nt, Human
uauuccaaggguagagaaaa

SEQ ID NO: 21412 - RNA, 22 nt, Human
uauuccaagucacuguguccug

SEQ ID NO: 21413 - RNA, 22 nt, Human
uauuccaauugguuguaaagaa

SEQ ID NO: 21414 - RNA, 22 nt, Human
uauuccagguuucuuguuguau

SEQ ID NO: 21415 - RNA, 22 nt, Human
uauuccagugugaucuuuguag

SEQ ID NO: 21416 - RNA, 22 nt, Human
uauucccacccuaaguaguagg

SEQ ID NO: 21417 - RNA, 22 nt, Human
uauucccacuccucagcaauuu

SEQ ID NO: 21418 - RNA, 22 nt, Human
uauucccugauguacacuggca

SEQ ID NO: 21419 - RNA, 22 nt, Human
uauuccuaagucccaacuacau

SEQ ID NO: 21420 - RNA, 22 nt, Human
uauauuaaccauaggguucuag

SEQ ID NO: 21421 - RNA, 22 nt, Human
uauauucaacaggcuaauguca

SEQ ID NO: 21422 - RNA, 22 nt, Human
uauauucauauuguugucucuc

SEQ ID NO: 21423 - RNA, 22 nt, Human
uauauuccaguucaucucuuga

SEQ ID NO: 21424 - RNA, 22 nt, Human
uauauucugauuccaucugugu

SEQ ID NO: 21425 - RNA, 18 nt, Human
uauauucugugcccuggu

SEQ ID NO: 21426 - RNA, 22 nt, Human
uauauucuuucaccuucuuccu

SEQ ID NO: 21427 - RNA, 22 nt, Human
uauauuguaggugcuauuugaa

SEQ ID NO: 21428 - RNA, 19 nt, Human
uauauuugagugugcaugc

SEQ ID NO: 21429 - RNA, 22 nt, Human
uaucaacaaaggccuuguguuu

SEQ ID NO: 21430 - RNA, 22 nt, Human
uaucaacauuaauauuuucugg

SEQ ID NO: 21431 - RNA, 22 nt, Human
uaucaaccaacuacucguguug

SEQ ID NO: 21432 - RNA, 22 nt, Human
uaucaagugacuaucacagaac

SEQ ID NO: 21433 - RNA, 22 nt, Human
uaucaauacauguuaucagugu

SEQ ID NO: 21434 - RNA, 22 nt, Human
uaucacacgccuugcuucauuu

SEQ ID NO: 21435 - RNA, 22 nt, Human
uaucacacuguuuuaauuacuu

SEQ ID NO: 21436 - RNA, 22 nt, Human
uaucacaucaauguuuuaaaau

SEQ ID NO: 21437 - RNA, 22 nt, Human
uaucacuacacuaagauacaga

SEQ ID NO: 21438 - RNA, 19 nt, Human
uaucacugggcacugagga

SEQ ID NO: 21439 - RNA, 22 nt, Human
uaucagaaagauauuacugggg

SEQ ID NO: 21440 - RNA, 22 nt, Human
uaucagaaaucaacacacagug

SEQ ID NO: 21441 - RNA, 22 nt, Human
uaucagaaugcagccaugugca

SEQ ID NO: 21442 - RNA, 17 nt, Human
uaucagaauguguuuac

SEQ ID NO: 21443 - RNA, 22 nt, Human
uaucagaugacaucuucuaugg

SEQ ID NO: 21444 - RNA, 22 nt, Human
uaucagcaacucagagcagucu

SEQ ID NO: 21445 - RNA, 22 nt, Human
uaucagcaccgcggacagcauc

SEQ ID NO: 21446 - RNA, 22 nt, Human
uaucagcaucuccucaaagaua

SEQ ID NO: 21447 - RNA, 22 nt, Human
uaucagcgugcaaaucuuugga

SEQ ID NO: 21448 - RNA, 23 nt, Human
uaucaguaagcaucccugaaccc

SEQ ID NO: 21449 - RNA, 20 nt, Human
uaucaguaggauauucugcc

SEQ ID NO: 21450 - RNA, 23 nt, Human
uaucagugugaugaggcugcugc

SEQ ID NO: 21451 - RNA, 22 nt, Human
uaucaguuuauucuauaaauag

SEQ ID NO: 21452 - RNA, 22 nt, Human
uaucaucauuggcaggugagaa

SEQ ID NO: 21453 - RNA, 22 nt, Human
uaucaucuuguugucaugcagc

SEQ ID NO: 21454 - RNA, 22 nt, Human
uaucaugaucagcaacuaauca

SEQ ID NO: 21455 - RNA, 22 nt, Human
uaucauucuucucaccuuugaa

SEQ ID NO: 21456 - RNA, 22 nt, Human
uaucauuguguuauuucuucca

SEQ ID NO: 21457 - RNA, 22 nt, Human
uauccaaagagauucauguucu

SEQ ID NO: 21458 - RNA, 23 nt, Human
uauccaguagggcccagagcuga

SEQ ID NO: 21459 - RNA, 22 nt, Human
uauccauuauguuggcuagucu

SEQ ID NO: 21460 - RNA, 22 nt, Human
uauccauuuauuuucuaggcaa

SEQ ID NO: 21461 - RNA, 23 nt, Human
uauccuaaaggcaacaggaaguc

SEQ ID NO: 21462 - RNA, 22 nt, Human
uauccugcuuuguuccucuuga

SEQ ID NO: 21463 - RNA, 22 nt, Human
uauccuuguacuauaguauuua

SEQ ID NO: 21464 - RNA, 22 nt, Human
uaucuaaaggauuuaauuuagu

SEQ ID NO: 21465 - RNA, 20 nt, Human
uaucuaaaugcuuacauuac

SEQ ID NO: 21466 - RNA, 22 nt, Human
uaucuaagguauaugaggaauc

SEQ ID NO: 21467 - RNA, 22 nt, Human
uaucuaauaaaucugauaagua

SEQ ID NO: 21468 - RNA, 22 nt, Human
uaucuagauaccaagaagcaca

SEQ ID NO: 21469 - RNA, 22 nt, Human
uaucuagauuucuuucucugug

SEQ ID NO: 21470 - RNA, 23 nt, Human
uaucucagaggaauguaguuacu

SEQ ID NO: 21471 - RNA, 22 nt, Human
uaucucagcuggaucaguggaa

SEQ ID NO: 21472 - RNA, 17 nt, Human
uaucucuucaaguuuca

SEQ ID NO: 21473 - RNA, 22 nt, Human
uaucugagaaagaagcaccaga

SEQ ID NO: 21474 - RNA, 22 nt, Human
uaucuguagucagaauaauuuu

SEQ ID NO: 21475 - RNA, 22 nt, Human
uaucuguagucucaugguuccu

SEQ ID NO: 21476 - RNA, 22 nt, Human
uaucuguauccccaucuagcua

SEQ ID NO: 21477 - RNA, 22 nt, Human
uaucugucgggagucuuccgga

SEQ ID NO: 21478 - RNA, 22 nt, Human
ucagaauucugaccuuggguca

SEQ ID NO: 21479 - RNA, 19 nt, Human
ucagaauucugucucuuga

SEQ ID NO: 21480 - RNA, 22 nt, Human
ucagaauugauuuucaaaacag

SEQ ID NO: 21481 - RNA, 22 nt, Human
ucagaauugcagggagggcagg

SEQ ID NO: 21482 - RNA, 22 nt, Human
ucagaauuuuaaaccaaggaaa

SEQ ID NO: 21483 - RNA, 22 nt, Human
ucagaauuuuuguuacccuuga

SEQ ID NO: 21484 - RNA, 18 nt, Human
ucagacaaguuagacagg

SEQ ID NO: 21485 - RNA, 22 nt, Human
ucagacaccgucuauuuugccu

SEQ ID NO: 21486 - RNA, 22 nt, Human
ucagacaggcuggacagcuugc

SEQ ID NO: 21487 - RNA, 22 nt, Human
ucagacagucaucagagcuugu

SEQ ID NO: 21488 - RNA, 20 nt, Human
ucagacagucgcaguucugg

SEQ ID NO: 21489 - RNA, 22 nt, Human
ucagacaucucauaauguauua

SEQ ID NO: 21490 - RNA, 22 nt, Human
ucagacauggggagagagaccu

SEQ ID NO: 21491 - RNA, 22 nt, Human
ucagaccccagaaugaagccag

SEQ ID NO: 21492 - RNA, 22 nt, Human
ucagaccuggccgccuccaucc

SEQ ID NO: 21493 - RNA, 22 nt, Human
ucagaccuugucgucacuuaga

SEQ ID NO: 21494 - RNA, 22 nt, Human
ucagacugcugucccugccugg

SEQ ID NO: 21495 - RNA, 21 nt, Human
ucagacuugagcucuucuaca

SEQ ID NO: 21496 - RNA, 22 nt, Human
ucagacuugccuuuuuauaaaa

SEQ ID NO: 21497 - RNA, 22 nt, Human
ucagagaaaauggaaacuuuua

SEQ ID NO: 21498 - RNA, 22 nt, Human
ucagagaaaugaaguagggauu

SEQ ID NO: 21499 - RNA, 22 nt, Human
ucagagaagacaucauugugaa

SEQ ID NO: 21500 - RNA, 20 nt, Human
ucagagaagggacugagauu

SEQ ID NO: 21501 - RNA, 22 nt, Human
ucagagaaguaagguggggugc

SEQ ID NO: 21502 - RNA, 22 nt, Human
ucagagaauguccuucuucauu

SEQ ID NO: 21503 - RNA, 22 nt, Human
ucagagaaugugaauauuaaac

SEQ ID NO: 21504 - RNA, 22 nt, Human
ucagagaauucgauuaaaugca

SEQ ID NO: 21505 - RNA, 22 nt, Human
ucagagagccucaggcacugcc

SEQ ID NO: 21506 - RNA, 23 nt, Human
ucagagagcuguugagagcugcc

SEQ ID NO: 21507 - RNA, 22 nt, Human
ucagagaggcaauacuguuuaa

SEQ ID NO: 21508 - RNA, 23 nt, Human
ucagagaggcccccugcagagau

SEQ ID NO: 21509 - RNA, 22 nt, Human
ucagagaucuggaguacaacug

SEQ ID NO: 21510 - RNA, 22 nt, Human
ucagagcagacuuugaaggagg

SEQ ID NO: 21511 - RNA, 22 nt, Human
ucagagcagcauuuuacaggau

SEQ ID NO: 21512 - RNA, 22 nt, Human
ucagagcuaaggggagagcaaa

SEQ ID NO: 21513 - RNA, 22 nt, Human
ucagagcuccuaagggcugauu

SEQ ID NO: 21514 - RNA, 22 nt, Human
ucagagcugcccaugcaagggg

SEQ ID NO: 21515 - RNA, 22 nt, Human
ucagagcugugcuucaggaaag

SEQ ID NO: 21516 - RNA, 22 nt, Human
ucagagcuuuggagaccaggaa

SEQ ID NO: 21517 - RNA, 22 nt, Human
ucagaggaacacuguuucaugc

SEQ ID NO: 21518 - RNA, 22 nt, Human
ucagaggaaucuguacuugaaa

SEQ ID NO: 21519 - RNA, 22 nt, Human
ucagaggacagcagcuaaauaa

SEQ ID NO: 21520 - RNA, 22 nt, Human
ucagaggagaaguugggaaaau

SEQ ID NO: 21521 - RNA, 18 nt, Human
ucagaggagauaccuaaa

SEQ ID NO: 21522 - RNA, 22 nt, Human
ucagaggagaugguuaccaggg

SEQ ID NO: 21523 - RNA, 22 nt, Human
ucagaggaggcauuuaaacaga

SEQ ID NO: 21524 - RNA, 22 nt, Human
ucagaggagggacucagaccca

SEQ ID NO: 21525 - RNA, 22 nt, Human
ucagaggauugccucagcgagc

SEQ ID NO: 21526 - RNA, 19 nt, Human
ucagaggauuuggcuauga

SEQ ID NO: 21527 - RNA, 22 nt, Human
ucagaggcagcugauguucugu

SEQ ID NO: 21528 - RNA, 22 nt, Human
ucagaggccuaugucuacaacu

SEQ ID NO: 21529 - RNA, 22 nt, Human
ucagaggccugaaagaauuugg

SEQ ID NO: 21530 - RNA, 20 nt, Human
ucagaggcugccagcugggg

SEQ ID NO: 21531 - RNA, 22 nt, Human
ucagaggcuggaagagccuccu

SEQ ID NO: 21532 - RNA, 22 nt, Human
ucagaggcuucugcucaccuca

SEQ ID NO: 21533 - RNA, 22 nt, Human
ucagaggcuugaagcccaagcc

SEQ ID NO: 21534 - RNA, 17 nt, Human
ucagagggaugagcagg

SEQ ID NO: 21535 - RNA, 22 nt, Human
ucagagguaaaaacucacugua

SEQ ID NO: 21536 - RNA, 22 nt, Human
ucagagguaagggcugagagga

SEQ ID NO: 21537 - RNA, 22 nt, Human
ucagagguaguagcagaguuga

SEQ ID NO: 21538 - RNA, 22 nt, Human
ucagaggucccuagcaggagug

SEQ ID NO: 21539 - RNA, 22 nt, Human
ucagaggugagcaugugaccaa

SEQ ID NO: 21540 - RNA, 22 nt, Human
ucagagguggagauaguuggga

SEQ ID NO: 21541 - RNA, 22 nt, Human
ucagagucaacuguugccuguu

SEQ ID NO: 21542 - RNA, 22 nt, Human
ucagagucaggaaugcuugauu

SEQ ID NO: 21543 - RNA, 21 nt, Human
ucagagucucaggagcaaggg

SEQ ID NO: 21544 - RNA, 22 nt, Human
ucagagugggagaaugugccaa

SEQ ID NO: 21545 - RNA, 22 nt, Human
ucagaguguggugagaugugca

SEQ ID NO: 21546 - RNA, 21 nt, Human
ucagaguguguuacagcaagc

SEQ ID NO: 21547 - RNA, 22 nt, Human
ucagaguuggccuuucuguauu

SEQ ID NO: 21548 - RNA, 22 nt, Human
ucagaguuugaaauaauuuuua

SEQ ID NO: 21549 - RNA, 22 nt, Human
ucagauaaaggagagcuuagca

SEQ ID NO: 21550 - RNA, 22 nt, Human
ucagauaccauugaauuuguug

SEQ ID NO: 21551 - RNA, 22 nt, Human
ucagauacuagcucucagccuc

SEQ ID NO: 21552 - RNA, 22 nt, Human
ucagauauagucauuuaaauaa

SEQ ID NO: 21553 - RNA, 22 nt, Human
ucagauaugaauucauaucucu

SEQ ID NO: 21554 - RNA, 22 nt, Human
ucagaugccaacugaacaacag

SEQ ID NO: 21555 - RNA, 22 nt, Human
ucagaugccuguggggucuagg

SEQ ID NO: 21556 - RNA, 22 nt, Human
ucagaugcuagggcugagcuau

SEQ ID NO: 21557 - RNA, 22 nt, Human
ucagaugcuuagagauuagacu

SEQ ID NO: 21558 - RNA, 22 nt, Human
ucagauggaaugaugccacugc

SEQ ID NO: 21559 - RNA, 20 nt, Human
ucagauuaaauguucugucu

SEQ ID NO: 21560 - RNA, 22 nt, Human
ucagauuuaugaauauacuaug

SEQ ID NO: 21561 - RNA, 22 nt, Human
ucagauuuccuguugaagaagu

SEQ ID NO: 21562 - RNA, 22 nt, Human
ucagauuuccuugcaguuugga

SEQ ID NO: 21563 - RNA, 22 nt, Human
ucagauuucuagcguuuggcca

SEQ ID NO: 21564 - RNA, 22 nt, Human
ucagauuugaauauuccuuucg

SEQ ID NO: 21565 - RNA, 22 nt, Human
ucagauuugaugugguuuucua

SEQ ID NO: 21566 - RNA, 22 nt, Human
ucagauuuggacacaggaacuu

SEQ ID NO: 21567 - RNA, 22 nt, Human
ucagauuuugcacgagguuuug

SEQ ID NO: 21568 - RNA, 21 nt, Human
ucagcaaaauaagcaaaugga

SEQ ID NO: 21569 - RNA, 17 nt, Human
uccauuccuaaggcccu

SEQ ID NO: 21570 - RNA, 22 nt, Human
uccauucuuuugcugucuuccu

SEQ ID NO: 21571 - RNA, 22 nt, Human
uccauucuuuuuaccucucaga

SEQ ID NO: 21572 - RNA, 22 nt, Human
uccauugcucaauauagaguuu

SEQ ID NO: 21573 - RNA, 22 nt, Human
uccauuggucucugugcccagg

SEQ ID NO: 21574 - RNA, 22 nt, Human
uccauuugaaaugaaagugaua

SEQ ID NO: 21575 - RNA, 22 nt, Human
uccauuuucuugcucuagguaa

SEQ ID NO: 21576 - RNA, 22 nt, Human
uccauuuuucaugacuccucaa

SEQ ID NO: 21577 - RNA, 20 nt, Human
ucccaaaauucuacuuuauc

SEQ ID NO: 21578 - RNA, 22 nt, Human
ucccaaagaacugaauaguaau

SEQ ID NO: 21579 - RNA, 22 nt, Human
ucccaaagcuacucuucugacu

SEQ ID NO: 21580 - RNA, 22 nt, Human
ucccaagagacagaaugguauc

SEQ ID NO: 21581 - RNA, 22 nt, Human
ucccaagagcuacucaauggaa

SEQ ID NO: 21582 - RNA, 22 nt, Human
ucccaagagcucugggauaagg

SEQ ID NO: 21583 - RNA, 22 nt, Human
ucccaaggcacagggcagggac

SEQ ID NO: 21584 - RNA, 20 nt, Human
ucccaagggcugagaggauc

SEQ ID NO: 21585 - RNA, 22 nt, Human
ucccaaguagaugggaauacag

SEQ ID NO: 21586 - RNA, 22 nt, Human
ucccaagugucuuggaccaggg

SEQ ID NO: 21587 - RNA, 22 nt, Human
ucagggcaucaucaugaauaua

SEQ ID NO: 21588 - RNA, 22 nt, Human
ucagggcaucucuuaaguggug

SEQ ID NO: 21589 - RNA, 22 nt, Human
ucagggcauguauguuucuuua

SEQ ID NO: 21590 - RNA, 22 nt, Human
ucagggcccagagcucaggcaa

SEQ ID NO: 21591 - RNA, 22 nt, Human
ucagggcccagucugugcaucu

SEQ ID NO: 21592 - RNA, 22 nt, Human
ucagggcucagugggauagguc

SEQ ID NO: 21593 - RNA, 22 nt, Human
ucagggcuccggaaguggccuc

SEQ ID NO: 21594 - RNA, 22 nt, Human
ucagggcugccgggcagaccgu

SEQ ID NO: 21595 - RNA, 22 nt, Human
ucaggggcagccggggaagcca

SEQ ID NO: 21596 - RNA, 22 nt, Human
ucagggugaaccaggcaggaau

SEQ ID NO: 21597 - RNA, 22 nt, Human
ucaggguucuuucaguuaaguu

SEQ ID NO: 21598 - RNA, 22 nt, Human
ucaggguugugaaggaaagggg

SEQ ID NO: 21599 - RNA, 22 nt, Human
ucagguaaguguaauauauaga

SEQ ID NO: 21600 - RNA, 20 nt, Human
ucagguagaucuuugagguc

SEQ ID NO: 21601 - RNA, 22 nt, Human
ucagguagugguuaaguucugu

SEQ ID NO: 21602 - RNA, 22 nt, Human
ucagguccccaacucuucucac

SEQ ID NO: 21603 - RNA, 22 nt, Human
ucaggucuauagaagaggaggg

SEQ ID NO: 21604 - RNA, 22 nt, Human
ucaggucuuuugucuccuagaa

SEQ ID NO: 21605 - RNA, 22 nt, Human
ucagguggcugguugcuggcua

SEQ ID NO: 21606 - RNA, 22 nt, Human
ucagguguagguuguucaguuu

SEQ ID NO: 21607 - RNA, 22 nt, Human
ucagguguguggcucuggacca

SEQ ID NO: 21608 - RNA, 22 nt, Human
ucagguguuagaagaaauuuca

SEQ ID NO: 21609 - RNA, 22 nt, Human
ucagguucagacuagucccagu

SEQ ID NO: 21610 - RNA, 22 nt, Human
ucagguucuggugagggcccuu

SEQ ID NO: 21611 - RNA, 22 nt, Human
ucaguaaaugcuugcaggccga

SEQ ID NO: 21612 - RNA, 22 nt, Human
ucaguaauuaccuaugacucga

SEQ ID NO: 21613 - RNA, 22 nt, Human
ucaguacuugcauccucuccuu

SEQ ID NO: 21614 - RNA, 23 nt, Human
ucaguagugcauugaauaagugc

SEQ ID NO: 21615 - RNA, 22 nt, Human
ucaguaguucagcaaauauuuu

SEQ ID NO: 21616 - RNA, 22 nt, Human
ucaguaguuuuaagucuguuaa

SEQ ID NO: 21617 - RNA, 22 nt, Human
ucaguauagcuaaaaguuuguc

SEQ ID NO: 21618 - RNA, 19 nt, Human
ucaguauauaauuacacca

SEQ ID NO: 21619 - RNA, 22 nt, Human
ucaguauccacaaaugcucaaa

SEQ ID NO: 21620 - RNA, 22 nt, Human
ucaguauuucuaaacauuggcu

SEQ ID NO: 21621 - RNA, 22 nt, Human
ucagucacacucacugagguag

SEQ ID NO: 21622 - RNA, 22 nt, Human
ucagucaggagaugccagagau

SEQ ID NO: 21623 - RNA, 22 nt, Human
ucagucauaguuuggagagaau

SEQ ID NO: 21624 - RNA, 23 nt, Human
ucagucccaacagcuucuccugg

SEQ ID NO: 21625 - RNA, 22 nt, Human
ucaguccuacacgcucagggac

SEQ ID NO: 21626 - RNA, 22 nt, Human
ucaguccuccucucauagagag

SEQ ID NO: 21627 - RNA, 22 nt, Human
ucaguccuuggcauuuaggagc

SEQ ID NO: 21628 - RNA, 19 nt, Human
ucagucuaggaaugagcua

SEQ ID NO: 21629 - RNA, 18 nt, Human
ucagucuauuguauaaga

SEQ ID NO: 21630 - RNA, 23 nt, Human
ucagucuuggcuucugauuuucc

SEQ ID NO: 21631 - RNA, 22 nt, Human
ucagugacaacuaugaauauuu

SEQ ID NO: 21632 - RNA, 21 nt, Human
ucagugacaggugcugaccuc

SEQ ID NO: 21633 - RNA, 22 nt, Human
ucagugaucuaaggguauggcc

SEQ ID NO: 21634 - RNA, 22 nt, Human
ucagugauuucuggggugaggg

SEQ ID NO: 21635 - RNA, 20 nt, Human
ucagugauuuugaagaggaa

SEQ ID NO: 21636 - RNA, 21 nt, Human
ucagugcaauucuauggggaa

SEQ ID NO: 21637 - RNA, 22 nt, Human
ucagugcagacuguaaguugga

SEQ ID NO: 21638 - RNA, 20 nt, Human
ucagugcagauuguccaagu

SEQ ID NO: 21639 - RNA, 22 nt, Human
ucagugcagcggcagcagcucu

SEQ ID NO: 21640 - RNA, 22 nt, Human
ucagugccuacuuugaucaauu

SEQ ID NO: 21641 - RNA, 22 nt, Human
ucagugcucugagguccagggu

SEQ ID NO: 21642 - RNA, 22 nt, Human
ucagugcuguaaacaaaaggaa

SEQ ID NO: 21643 - RNA, 22 nt, Human
ucagugcuguguaaauguauua

SEQ ID NO: 21644 - RNA, 22 nt, Human
ucagugcuucggcgagcaccua

SEQ ID NO: 21645 - RNA, 22 nt, Human
ucagugcuugccucuggaggag

SEQ ID NO: 21646 - RNA, 23 nt, Human
ucagugcuugggggugacgcgcc

SEQ ID NO: 21647 - RNA, 22 nt, Human
ucagugcuuuugucacaugguc

SEQ ID NO: 21648 - RNA, 19 nt, Human
ucaguggagaaaggggaag

SEQ ID NO: 21649 - RNA, 22 nt, Human
ucaguggauauuucuguggcug

SEQ ID NO: 21650 - RNA, 22 nt, Human
ucagugguggaagcagcaaacc

SEQ ID NO: 21651 - RNA, 22 nt, Human
ucagugguuaaguucuguccac

SEQ ID NO: 21652 - RNA, 22 nt, Human
ucaguguauggagugcuggauu

SEQ ID NO: 21653 - RNA, 22 nt, Human
ucagugucagucuuuuagauau

SEQ ID NO: 21654 - RNA, 22 nt, Human
ucaguguccaaaaagaggcaag

SEQ ID NO: 21655 - RNA, 22 nt, Human
ucagugucccgucucuuaacuc

SEQ ID NO: 21656 - RNA, 22 nt, Human
ucagugucuagggacaguaauc

SEQ ID NO: 21657 - RNA, 23 nt, Human
ucagugucuaguuguggaauuga

SEQ ID NO: 21658 - RNA, 22 nt, Human
ucagugugaauucauuuuagau

SEQ ID NO: 21659 - RNA, 22 nt, Human
ucaguguggaaaauccuuuggc

SEQ ID NO: 21660 - RNA, 22 nt, Human
ucaguguguaguaaauuguagg

SEQ ID NO: 21661 - RNA, 22 nt, Human
ucagugugucucugcauuuggg

SEQ ID NO: 21662 - RNA, 22 nt, Human
ucaguguguucaauuggauagg

SEQ ID NO: 21663 - RNA, 22 nt, Human
ucaguguucagggaccaggucc

SEQ ID NO: 21664 - RNA, 16 nt, Human
ucaguguuccagaaua

SEQ ID NO: 21665 - RNA, 22 nt, Human
ucaguguugaauuuuuugcaaa

SEQ ID NO: 21666 - RNA, 22 nt, Human
ucaguguuuauucaauguuauu

SEQ ID NO: 21667 - RNA, 22 nt, Human
ucaguguuuauugcggugugua

SEQ ID NO: 21668 - RNA, 22 nt, Human
ucaguguuucaguuuggaaaug

SEQ ID NO: 21669 - RNA, 22 nt, Human
ucaguguuuguggcaaauguua

SEQ ID NO: 21670 - RNA, 22 nt, Human
ucaguguuuuaacugucuuuua

SEQ ID NO: 21671 - RNA, 22 nt, Human
ucaguguuuuuaaagcaauaua

SEQ ID NO: 21672 - RNA, 22 nt, Human
ucaguuaauggauucugucaga

SEQ ID NO: 21673 - RNA, 22 nt, Human
ucaguuagauugccuccuuaga

SEQ ID NO: 21674 - RNA, 22 nt, Human
ucaguucuaacaguuuagaaca

SEQ ID NO: 21675 - RNA, 22 nt, Human
ucaguucugaaguucugccucc

SEQ ID NO: 21676 - RNA, 22 nt, Human
ucaguucuggcugcugcuguca

SEQ ID NO: 21677 - RNA, 22 nt, Human
ucaguucuuaguaaugcagucu

SEQ ID NO: 21678 - RNA, 22 nt, Human
ucaguucuuuauuucacaguga

SEQ ID NO: 21679 - RNA, 22 nt, Human
ucaguugcauauuuuguguucu

SEQ ID NO: 21680 - RNA, 22 nt, Human
ucaguugccaguauuuuauaua

SEQ ID NO: 21681 - RNA, 22 nt, Human
ucaguugccuccauagucaucc

SEQ ID NO: 21682 - RNA, 22 nt, Human
ucaguugcuaugagaaauaaau

SEQ ID NO: 21683 - RNA, 20 nt, Human
ucaguuuaaauccuggcuuu

SEQ ID NO: 21684 - RNA, 22 nt, Human
ucaguuuaagaugacuaacaau

SEQ ID NO: 21685 - RNA, 22 nt, Human
ucaguuuauaaauuguauuuag

SEQ ID NO: 21686 - RNA, 22 nt, Human
ucaguuuauggucuaguucaug

SEQ ID NO: 21687 - RNA, 22 nt, Human
uggcccugcuggccaaaggcua

SEQ ID NO: 21688 - RNA, 22 nt, Human
uggcccugcuguaucaucugcu

SEQ ID NO: 21689 - RNA, 22 nt, Human
uggcccugggcagaggcaacau

SEQ ID NO: 21690 - RNA, 22 nt, Human
uggcccugucccuggagccugg

SEQ ID NO: 21691 - RNA, 22 nt, Human
uggcccuguguccugcugccag

SEQ ID NO: 21692 - RNA, 22 nt, Human
uggcccugugugcaggcugcac

SEQ ID NO: 21693 - RNA, 20 nt, Human
uggcccuguuuucuccaggc

SEQ ID NO: 21694 - RNA, 22 nt, Human
uggcccuucaaauucccuaguc

SEQ ID NO: 21695 - RNA, 22 nt, Human
uggcccuucugagcacagggcc

SEQ ID NO: 21696 - RNA, 22 nt, Human
ucccaagagggguuauuaugcc

SEQ ID NO: 21697 - RNA, 22 nt, Human
ucccaagauacgcuguaagaag

SEQ ID NO: 21698 - RNA, 22 nt, Human
ucccaagaugacacaguggacg

SEQ ID NO: 21699 - RNA, 19 nt, Human
ucccaagauuucuguauca

SEQ ID NO: 21700 - RNA, 22 nt, Human
ucccaagcaaugagucagggcc

SEQ ID NO: 21701 - RNA, 22 nt, Human
ucccaaggauaagagagucuga

SEQ ID NO: 21702 - RNA, 20 nt, Human
ucccaaggaugccugggugu

SEQ ID NO: 21703 - RNA, 22 nt, Human
ucccaaggccaggcaucuagaa

SEQ ID NO: 21704 - RNA, 22 nt, Human
ucccaauuaacagguaucaggc

SEQ ID NO: 21705 - RNA, 22 nt, Human
ucccacacuacacgguuguugg

SEQ ID NO: 21706 - RNA, 22 nt, Human
ucccacacuugaaacaaggcug

SEQ ID NO: 21707 - RNA, 22 nt, Human
ucccacagaccaugaguggaag

SEQ ID NO: 21708 - RNA, 22 nt, Human
ucccacagaguggcucaccuag

SEQ ID NO: 21709 - RNA, 21 nt, Human
ucccacagcgccagcuccugu

SEQ ID NO: 21710 - RNA, 22 nt, Human
ucccacaggaaaguagacauug

SEQ ID NO: 21711 - RNA, 22 nt, Human
ucccacaggaggaguuggaaau

SEQ ID NO: 21712 - RNA, 22 nt, Human
ucccacaggcccagggcggaaa

SEQ ID NO: 21713 - RNA, 22 nt, Human
ucccacagugguacagcccuga

SEQ ID NO: 21714 - RNA, 22 nt, Human
ucccacaugugaauccucaggu

SEQ ID NO: 21715 - RNA, 22 nt, Human
ucccacuauuauccuauguggg

SEQ ID NO: 21716 - RNA, 22 nt, Human
ucccacucacugucucugacac

SEQ ID NO: 21717 - RNA, 21 nt, Human
ucccacugccacagcuucagg

SEQ ID NO: 21718 - RNA, 22 nt, Human
ucccacugucuucucgugcucg

SEQ ID NO: 21719 - RNA, 22 nt, Human
ucccacuuaacugugacuucuc

SEQ ID NO: 21720 - RNA, 22 nt, Human
ucccagaacccugccagguccu

SEQ ID NO: 21721 - RNA, 22 nt, Human
ucccagaaucuccagugcuaca

SEQ ID NO: 21722 - RNA, 22 nt, Human
ucccagagaagagcuggaugga

SEQ ID NO: 21723 - RNA, 22 nt, Human
ucccagagccucugccacucug

SEQ ID NO: 21724 - RNA, 22 nt, Human
ucccagagcucugacaccagcu

SEQ ID NO: 21725 - RNA, 22 nt, Human
ucccagagguugagucacuuau

SEQ ID NO: 21726 - RNA, 22 nt, Human
uggucugaaugacuuguuaguu

SEQ ID NO: 21727 - RNA, 22 nt, Human
uggucugagcggggccauucag

SEQ ID NO: 21728 - RNA, 22 nt, Human
uggucugaggaacaccagcacu

SEQ ID NO: 21729 - RNA, 22 nt, Human
uggucugauuuuucaucuguug

SEQ ID NO: 21730 - RNA, 22 nt, Human
uggugaauaguagcuucagacu

SEQ ID NO: 21731 - RNA, 22 nt, Human
uggugacagcauggaagaagug

SEQ ID NO: 21732 - RNA, 22 nt, Human
uggugagaauugguuggauuua

SEQ ID NO: 21733 - RNA, 22 nt, Human
uggugagacaggaucaaccccu

SEQ ID NO: 21734 - RNA, 22 nt, Human
uggugagauaacuuucggcaag

SEQ ID NO: 21735 - RNA, 22 nt, Human
uggugagauguauggaggguug

SEQ ID NO: 21736 - RNA, 22 nt, Human
uggugagcucuuuagacuggga

SEQ ID NO: 21737 - RNA, 22 nt, Human
uggugcaauauuaugaaaggua

SEQ ID NO: 21738 - RNA, 22 nt, Human
uggugcaguagaaggccgacuu

SEQ ID NO: 21739 - RNA, 22 nt, Human
uggugcaguagagcugucuggg

SEQ ID NO: 21740 - RNA, 22 nt, Human
uggugccacaagaauacaaagc

SEQ ID NO: 21741 - RNA, 22 nt, Human
uggugcugacaguucugagugc

SEQ ID NO: 21742 - RNA, 22 nt, Human
uggugcugcaggugggcacagu

SEQ ID NO: 21743 - RNA, 22 nt, Human
uggugcugugauacgaggcacu

SEQ ID NO: 21744 - RNA, 22 nt, Human
ugguggaaggcagagcuacacc

SEQ ID NO: 21745 - RNA, 22 nt, Human
ugguggacaccgcagccaugaa

SEQ ID NO: 21746 - RNA, 22 nt, Human
ugguggacauucuggaugugcu

SEQ ID NO: 21747 - RNA, 20 nt, Human
ugguggacuuuggcauggcu

SEQ ID NO: 21748 - RNA, 22 nt, Human
ugguggagaccucgcuaacccc

SEQ ID NO: 21749 - RNA, 22 nt, Human
ugguggagagacaguguauugg

SEQ ID NO: 21750 - RNA, 22 nt, Human
ugguggagccuaggcuaagucu

SEQ ID NO: 21751 - RNA, 22 nt, Human
ugguggagcuguggccacgacc

SEQ ID NO: 21752 - RNA, 19 nt, Human
ugguggaggccccauguuc

SEQ ID NO: 21753 - RNA, 19 nt, Human
ugguggaggugcaccugac

SEQ ID NO: 21754 - RNA, 21 nt, Human
ugguggagugugcugagcaug

SEQ ID NO: 21755 - RNA, 22 nt, Human
ugguggaguuucucuuucaaac

SEQ ID NO: 21756 - RNA, 19 nt, Human
ugguggcaaugucagcuaa

SEQ ID NO: 21757 - RNA, 22 nt, Human
ugguggcacaagggagagaauc

SEQ ID NO: 21758 - RNA, 23 nt, Human
ugguggcagaaguagcagaugac

SEQ ID NO: 21759 - RNA, 22 nt, Human
ugguggcagcugagugucaggu

SEQ ID NO: 21760 - RNA, 22 nt, Human
ugguggcagucuccuggcugug

SEQ ID NO: 21761 - RNA, 22 nt, Human
ugguggcaucagugaaguacac

SEQ ID NO: 21762 - RNA, 17 nt, Human
ugguggcuggagucagg

SEQ ID NO: 21763 - RNA, 22 nt, Human
ugguggcuguaagggagagaag

SEQ ID NO: 21764 - RNA, 23 nt, Human
ugguggcuugugguggccaccag

SEQ ID NO: 21765 - RNA, 22 nt, Human
uggugggagugacguugccuuc

SEQ ID NO: 21766 - RNA, 22 nt, Human
ugguggggcuuuccuucugcuu

SEQ ID NO: 21767 - RNA, 22 nt, Human
uggugggggaggcugucuagca

SEQ ID NO: 21768 - RNA, 23 nt, Human
ugguggggucuuggagacagcac

SEQ ID NO: 21769 - RNA, 22 nt, Human
uggugggucggcugggagagcu

SEQ ID NO: 21770 - RNA, 22 nt, Human
ugguggucauagcagaggccgu

SEQ ID NO: 21771 - RNA, 22 nt, Human
uggugucugcacucccuggcgu

SEQ ID NO: 21772 - RNA, 22 nt, Human
ugguguugaaccucagcagggg

SEQ ID NO: 21773 - RNA, 22 nt, Human
ugguguuggagaugguugcauu

SEQ ID NO: 21774 - RNA, 22 nt, Human
ugguuagaugaggcugguuuca

SEQ ID NO: 21775 - RNA, 22 nt, Human
ugguuagucaguaccugagugu

SEQ ID NO: 21776 - RNA, 22 nt, Human
ugguuauaaauugcuaugcaga

SEQ ID NO: 21777 - RNA, 23 nt, Human
ugguucaagugagaaguaauguu

SEQ ID NO: 21778 - RNA, 22 nt, Human
ugguucagagaguugcugacca

SEQ ID NO: 21779 - RNA, 22 nt, Human
ugguucauaauuugcacuacug

SEQ ID NO: 21780 - RNA, 17 nt, Human
ugguuccaaccauacgc

SEQ ID NO: 21781 - RNA, 19 nt, Human
ugguucuccuuccacaguc

SEQ ID NO: 21782 - RNA, 22 nt, Human
ugguugaaaaacauuggcuuuu

SEQ ID NO: 21783 - RNA, 22 nt, Human
ugguugaacaaguuggguauau

SEQ ID NO: 21784 - RNA, 20 nt, Human
ugguugaauuuuuagugacc

SEQ ID NO: 21785 - RNA, 22 nt, Human
ugguugccucucagagauuccg

SEQ ID NO: 21786 - RNA, 22 nt, Human
ugguuggauggcucuuguggcu

SEQ ID NO: 21787 - RNA, 22 nt, Human
ugguugugcugaguuuagugca

SEQ ID NO: 21788 - RNA, 22 nt, Human
ugguugugucacuuagauuaga

SEQ ID NO: 21789 - RNA, 22 nt, Human
ugguuuaugcuguugcagcucu

SEQ ID NO: 21790 - RNA, 21 nt, Human
ugguuuauuucacucagcaua

SEQ ID NO: 21791 - RNA, 22 nt, Human
ugguuuauuucucugaaagguu

SEQ ID NO: 21792 - RNA, 22 nt, Human
ugguuucacacugcauggugua

SEQ ID NO: 21793 - RNA, 21 nt, Human
ugguuucuaagcugucagucu

SEQ ID NO: 21794 - RNA, 22 nt, Human
ugguuucucagacucuuugcag

SEQ ID NO: 21795 - RNA, 22 nt, Human
ugguuucugcccucagagcuca

SEQ ID NO: 21796 - RNA, 22 nt, Human
ugguuucuuuccacucuccacc

SEQ ID NO: 21797 - RNA, 22 nt, Human
ugguuugcccacucgagugauu

SEQ ID NO: 21798 - RNA, 21 nt, Human
ugguuugcggccaaaguuaaa

SEQ ID NO: 21799 - RNA, 22 nt, Human
ugguuuggguaguuauuauuau

SEQ ID NO: 21800 - RNA, 18 nt, Human
ugguuugucaugagaauu

SEQ ID NO: 21801 - RNA, 22 nt, Human
ugguuuguuuguucauguaaaa

SEQ ID NO: 21802 - RNA, 22 nt, Human
ugguuuuugguuuaacacuaug

SEQ ID NO: 21803 - RNA, 22 nt, Human
uguaaaaagcccagccgcugag

SEQ ID NO: 21804 - RNA, 22 nt, Human
uguaaaacaaaauuuguggaga

SEQ ID NO: 21805 - RNA, 22 nt, Human
ucccugcaggugggguggccag

SEQ ID NO: 21806 - RNA, 22 nt, Human
ucccugcauuugggagaguguc

SEQ ID NO: 21807 - RNA, 22 nt, Human
ucccugcugcacucacaccuac

SEQ ID NO: 21808 - RNA, 22 nt, Human
ucccugcuugcucucagcccuu

SEQ ID NO: 21809 - RNA, 22 nt, Human
ucccugcuuucuugugagggga

SEQ ID NO: 21810 - RNA, 22 nt, Human
ucccuggagauaacuucuggga

SEQ ID NO: 21811 - RNA, 22 nt, Human
ucccuggcacaagaaggcuguc

SEQ ID NO: 21812 - RNA, 22 nt, Human
ucccuggcacugcugugauuag

SEQ ID NO: 21813 - RNA, 22 nt, Human
ucccuggcagcuguccuuucag

SEQ ID NO: 21814 - RNA, 22 nt, Human
ucccuggcugguguagagggau

SEQ ID NO: 21815 - RNA, 22 nt, Human
ucccugggaauuaauauuugga

SEQ ID NO: 21816 - RNA, 22 nt, Human
ucccugggcaaguuuacucuuc

SEQ ID NO: 21817 - RNA, 22 nt, Human
ucccugggcaucacguugcuuc

SEQ ID NO: 21818 - RNA, 22 nt, Human
ucccugggcggacauucuccca

SEQ ID NO: 21819 - RNA, 22 nt, Human
ucccuggggaagggcaagcaag

SEQ ID NO: 21820 - RNA, 22 nt, Human
ucccugggguaucgcugaggca

SEQ ID NO: 21821 - RNA, 22 nt, Human
ucccuggguccugcuugcucuc

SEQ ID NO: 21822 - RNA, 22 nt, Human
ucccuggguuaccuuucaaggu

SEQ ID NO: 21823 - RNA, 22 nt, Human
ucccuguacacuaacuugagac

SEQ ID NO: 21824 - RNA, 22 nt, Human
ucccuguacuuacacagcgucc

SEQ ID NO: 21825 - RNA, 22 nt, Human
ucccuguccugggcaaucccag

SEQ ID NO: 21826 - RNA, 22 nt, Human
ucccuguggaagacugccagag

SEQ ID NO: 21827 - RNA, 22 nt, Human
ucccugugggcagaggcugccu

SEQ ID NO: 21828 - RNA, 23 nt, Human
ucccuguguacagccugcaugag

SEQ ID NO: 21829 - RNA, 22 nt, Human
ucccuguguccaugccaggagg

SEQ ID NO: 21830 - RNA, 22 nt, Human
ucccugugucuuccucuugccc

SEQ ID NO: 21831 - RNA, 22 nt, Human
ucccuguguguauauaaacggu

SEQ ID NO: 21832 - RNA, 22 nt, Human
ucccuguuuuauauccuaacaa

SEQ ID NO: 21833 - RNA, 22 nt, Human
ucccuuaaaacucauguguugu

SEQ ID NO: 21834 - RNA, 22 nt, Human
ucccuuagggcugggugggugu

SEQ ID NO: 21835 - RNA, 19 nt, Human
ucccuucuauaguaauaaa

SEQ ID NO: 21836 - RNA, 21 nt, Human
ucccuugggaaacuuucuuga

SEQ ID NO: 21837 - RNA, 22 nt, Human
ucccuugguaauucuguuccuu

SEQ ID NO: 21838 - RNA, 22 nt, Human
ucccuuucacuuaacuagccca

SEQ ID NO: 21839 - RNA, 18 nt, Human
uccgaggcaccauaaaaa

SEQ ID NO: 21840 - RNA, 22 nt, Human
uccgaguugaaguaggauagcg

SEQ ID NO: 21841 - RNA, 22 nt, Human
uccggcagcagcucugaaggag

SEQ ID NO: 21842 - RNA, 22 nt, Human
uccgggcaacugaagggagguu

SEQ ID NO: 21843 - RNA, 22 nt, Human
uguaaguuuugugaaacaaaca

SEQ ID NO: 21844 - RNA, 21 nt, Human
uguaaucuaaagaagcucuuu

SEQ ID NO: 21845 - RNA, 22 nt, Human
uguaauggaaaaacauuagcau

SEQ ID NO: 21846 - RNA, 22 nt, Human
uguaauggagcuuagaguuauc

SEQ ID NO: 21847 - RNA, 22 nt, Human
uguaauucauucaacugaagaa

SEQ ID NO: 21848 - RNA, 22 nt, Human
uguacaaaacaagaugggggua

SEQ ID NO: 21849 - RNA, 22 nt, Human
uguacaagaauaauuuuauaua

SEQ ID NO: 21850 - RNA, 22 nt, Human
uguacaagcaaauagaccuuca

SEQ ID NO: 21851 - RNA, 19 nt, Human
uguacaaggauuaugcagg

SEQ ID NO: 21852 - RNA, 23 nt, Human
uguacaaguacgaccucucccuc

SEQ ID NO: 21853 - RNA, 22 nt, Human
uguacaauagcuauuaucucca

SEQ ID NO: 21854 - RNA, 22 nt, Human
uguacaaucuuggucccuuuau

SEQ ID NO: 21855 - RNA, 22 nt, Human
uguacaaugcugagguuugggg

SEQ ID NO: 21856 - RNA, 22 nt, Human
uguacaauguggccaguguuaa

SEQ ID NO: 21857 - RNA, 22 nt, Human
uguacacaugcccacuugaagc

SEQ ID NO: 21858 - RNA, 22 nt, Human
uguacacguggccaucuuuaca

SEQ ID NO: 21859 - RNA, 22 nt, Human
uguacagaaggcacuaagguca

SEQ ID NO: 21860 - RNA, 22 nt, Human
uguacagagguguacauaugau

SEQ ID NO: 21861 - RNA, 22 nt, Human
uguacagauaaagacuguaaau

SEQ ID NO: 21862 - RNA, 22 nt, Human
uguacagcugccuuuuuuacuu

SEQ ID NO: 21863 - RNA, 22 nt, Human
uguacaguaggaacuuguuauu

SEQ ID NO: 21864 - RNA, 22 nt, Human
uguacaguauauuucaaagcca

SEQ ID NO: 21865 - RNA, 22 nt, Human
uguacaguauugguguuaguag

SEQ ID NO: 21866 - RNA, 22 nt, Human
uguacagucugcagcuugcugu

SEQ ID NO: 21867 - RNA, 22 nt, Human
uguacaguguagucaugagguu

SEQ ID NO: 21868 - RNA, 18 nt, Human
uguacaguuaugagcauu

SEQ ID NO: 21869 - RNA, 23 nt, Human
uguacaguuguuugacucagcuc

SEQ ID NO: 21870 - RNA, 22 nt, Human
uguacauacauagauauacaca

SEQ ID NO: 21871 - RNA, 22 nt, Human
uguacauagaaaggauacagcu

SEQ ID NO: 21872 - RNA, 19 nt, Human
uguacauauagagcucagu

SEQ ID NO: 21873 - RNA, 22 nt, Human
uguacaugacagagagagccaa

SEQ ID NO: 21874 - RNA, 22 nt, Human
uguacauuuagagcucaauaga

SEQ ID NO: 21875 - RNA, 22 nt, Human
uguaccaggaggaggacaaauu

SEQ ID NO: 21876 - RNA, 22 nt, Human
uguaccaguguugagaaugaga

SEQ ID NO: 21877 - RNA, 20 nt, Human
uguaccauaaugacuggcuc

SEQ ID NO: 21878 - RNA, 22 nt, Human
uguaccaucucagcauucagga

SEQ ID NO: 21879 - RNA, 22 nt, Human
uguaccaugcgacgccucucac

SEQ ID NO: 21880 - RNA, 19 nt, Human
uguacguguggguguuuaa

SEQ ID NO: 21881 - RNA, 22 nt, Human
uguacuauuaagaggccuaaau

SEQ ID NO: 21882 - RNA, 22 nt, Human
uguacuguaugccaggcacuau

SEQ ID NO: 21883 - RNA, 22 nt, Human
uguagaaaauuggagcauucau

SEQ ID NO: 21884 - RNA, 22 nt, Human
uguagaaauuaguaagaucaac

SEQ ID NO: 21885 - RNA, 22 nt, Human
uguagaacugacauuuuggacu

SEQ ID NO: 21886 - RNA, 22 nt, Human
uguagaaguaggagucaucuca

SEQ ID NO: 21887 - RNA, 18 nt, Human
uguagagccagguuugcc

SEQ ID NO: 21888 - RNA, 22 nt, Human
uguagauguagacacaggucua

SEQ ID NO: 21889 - RNA, 22 nt, Human
uguagcaccagucaccagccca

SEQ ID NO: 21890 - RNA, 22 nt, Human
uguagcagucugggggaauuac

SEQ ID NO: 21891 - RNA, 19 nt, Human
uguagcaguuuaaaacaac

SEQ ID NO: 21892 - RNA, 22 nt, Human
uguagcauguaaauugguuauu

SEQ ID NO: 21893 - RNA, 20 nt, Human
uguagccagccucucaaugc

SEQ ID NO: 21894 - RNA, 22 nt, Human
uguagcucuccagccagcaagg

SEQ ID NO: 21895 - RNA, 23 nt, Human
uguaggcuguaguuuguaggucc

SEQ ID NO: 21896 - RNA, 22 nt, Human
uguagggacugaggcuggagag

SEQ ID NO: 21897 - RNA, 22 nt, Human
uguagggagaagagaggcaccu

SEQ ID NO: 21898 - RNA, 22 nt, Human
uguagggaggaaagggcucuug

SEQ ID NO: 21899 - RNA, 22 nt, Human
uguagggaggaaggguuggaaa

SEQ ID NO: 21900 - RNA, 23 nt, Human
uguaggucugccuuaucugcugc

SEQ ID NO: 21901 - RNA, 22 nt, Human
uguagugaggaaagacugguug

SEQ ID NO: 21902 - RNA, 22 nt, Human
uguauaaacuuaagcaggaacc

SEQ ID NO: 21903 - RNA, 22 nt, Human
uguauaaguguguagaguaaga

SEQ ID NO: 21904 - RNA, 22 nt, Human
uguauacaauucacacuuccca

SEQ ID NO: 21905 - RNA, 21 nt, Human
uguauacacguguugaaaaca

SEQ ID NO: 21906 - RNA, 22 nt, Human
uguauacaugucugugugcaca

SEQ ID NO: 21907 - RNA, 22 nt, Human
uguauacauucucuuggguuug

SEQ ID NO: 21908 - RNA, 22 nt, Human
uguauagaguuggaagaugacu

SEQ ID NO: 21909 - RNA, 22 nt, Human
uguauagaugaggaagcuguua

SEQ ID NO: 21910 - RNA, 22 nt, Human
uguauaguguggaaagaacagu

SEQ ID NO: 21911 - RNA, 22 nt, Human
uguauaguugagucaaguuuca

SEQ ID NO: 21912 - RNA, 22 nt, Human
uguauauguuuguauguacaca

SEQ ID NO: 21913 - RNA, 22 nt, Human
uguaucaaggguuuauguaagc

SEQ ID NO: 21914 - RNA, 22 nt, Human
cacauggguggauggaugcaug

SEQ ID NO: 21915 - RNA, 22 nt, Human
cacaugugcaguuacaugaauu

SEQ ID NO: 21916 - RNA, 22 nt, Human
cacauguguauaugugaggggg

SEQ ID NO: 21917 - RNA, 22 nt, Human
cacaugugugcugaggacugug

SEQ ID NO: 21918 - RNA, 22 nt, Human
cacauguuucaggccauauuug

SEQ ID NO: 21919 - RNA, 20 nt, Human
cacauuaaggaaaacaacug

SEQ ID NO: 21920 - RNA, 22 nt, Human
cacauucaauuacacagauagg

SEQ ID NO: 21921 - RNA, 22 nt, Human
cacauucagcucauuaaugguc

SEQ ID NO: 21922 - RNA, 22 nt, Human
cacauucagggcagaccacuca

SEQ ID NO: 21923 - RNA, 22 nt, Human
cacauuccugagcuucgaccug

SEQ ID NO: 21924 - RNA, 22 nt, Human
cacauuccuuacauucauagag

SEQ ID NO: 21925 - RNA, 22 nt, Human
cacauugaaccauauauuagug

SEQ ID NO: 21926 - RNA, 22 nt, Human
cacauugauaauuaaggccucc

SEQ ID NO: 21927 - RNA, 22 nt, Human
cacauugcagacguauauuauu

SEQ ID NO: 21928 - RNA, 22 nt, Human
cacauugcagguugagaaggug

SEQ ID NO: 21929 - RNA, 22 nt, Human
cacauuggcaaacgggguugca

SEQ ID NO: 21930 - RNA, 22 nt, Human
cacauugggcuugcaugcacgg

SEQ ID NO: 21931 - RNA, 22 nt, Human
cacauuguauuguggaaaguua

SEQ ID NO: 21932 - RNA, 22 nt, Human
cacauuuaauugguuuagggug

SEQ ID NO: 21933 - RNA, 22 nt, Human
cacauuuacuuuuaucccuugg

SEQ ID NO: 21934 - RNA, 22 nt, Human
cacauuuagagguuagcauggu

SEQ ID NO: 21935 - RNA, 22 nt, Human
cacauuuaggagguggggaagc

SEQ ID NO: 21936 - RNA, 22 nt, Human
cacauuuauuugaggcuaauug

SEQ ID NO: 21937 - RNA, 22 nt, Human
cacauuucucuaccucacacaa

SEQ ID NO: 21938 - RNA, 22 nt, Human
cacauuucuguacuuagguaga

SEQ ID NO: 21939 - RNA, 22 nt, Human
cacauuucugugagucaauauu

SEQ ID NO: 21940 - RNA, 22 nt, Human
caccaaagucgcuucugucguc

SEQ ID NO: 21941 - RNA, 22 nt, Human
caccaccaggcaggacaccgaa

SEQ ID NO: 21942 - RNA, 22 nt, Human
caccacugcuuccugccaucug

SEQ ID NO: 21943 - RNA, 22 nt, Human
caccagagugggugagggugau

SEQ ID NO: 21944 - RNA, 20 nt, Human
caccagcagcagcugccacc

SEQ ID NO: 21945 - RNA, 22 nt, Human
caccagccagagugacagcucc

SEQ ID NO: 21946 - RNA, 22 nt, Human
caccagcuaauuaaaacagcag

SEQ ID NO: 21947 - RNA, 22 nt, Human
caccagcuuacagucucacccc

SEQ ID NO: 21948 - RNA, 22 nt, Human
caccagcuucccaucgcggguc

SEQ ID NO: 21949 - RNA, 22 nt, Human
caccagcuucucauugcggguc

SEQ ID NO: 21950 - RNA, 22 nt, Human
caccagcuugggcuguggaaau

SEQ ID NO: 21951 - RNA, 22 nt, Human
caccaggaccccacgguggguu

SEQ ID NO: 21952 - RNA, 22 nt, Human
caccaggagcaucuaggaggcg

SEQ ID NO: 21953 - RNA, 22 nt, Human
caccaggagccaucaggagucc

SEQ ID NO: 21954 - RNA, 22 nt, Human
caccaggauaaaaccucuagau

SEQ ID NO: 21955 - RNA, 22 nt, Human
caccaggaugggcagguagguc

SEQ ID NO: 21956 - RNA, 22 nt, Human
caccaggggcagagaccaaagu

SEQ ID NO: 21957 - RNA, 22 nt, Human
caccaggguacaauuucgcaga

SEQ ID NO: 21958 - RNA, 22 nt, Human
caccagguuccgggcagagcug

SEQ ID NO: 21959 - RNA, 22 nt, Human
caccagucuuuauuuuguuauu

SEQ ID NO: 21960 - RNA, 22 nt, Human
caccaucuagcauuuauuugga

SEQ ID NO: 21961 - RNA, 22 nt, Human
caccaucugguaggcauuagug

SEQ ID NO: 21962 - RNA, 22 nt, Human
caccaugcuugauuuguaaugu

SEQ ID NO: 21963 - RNA, 22 nt, Human
caccauuuaagaaagccaaauu

SEQ ID NO: 21964 - RNA, 22 nt, Human
caccauuuaguagcaagagcuc

SEQ ID NO: 21965 - RNA, 22 nt, Human
cacccacauggaaauucacagu

SEQ ID NO: 21966 - RNA, 22 nt, Human
cacccagacauguggucccaga

SEQ ID NO: 21967 - RNA, 22 nt, Human
cacccagcuuuugcauccuccg

SEQ ID NO: 21968 - RNA, 22 nt, Human
cacccaggacaaaauauggaau

SEQ ID NO: 21969 - RNA, 22 nt, Human
ccaggagcgcgugaacaggcug

SEQ ID NO: 21970 - RNA, 22 nt, Human
ccaggagcgggaaaaggaagaa

SEQ ID NO: 21971 - RNA, 22 nt, Human
ccaggaggaugauuuuaagagg

SEQ ID NO: 21972 - RNA, 22 nt, Human
ccaggaggcaauaucaagucca

SEQ ID NO: 21973 - RNA, 22 nt, Human
ccaggaggcggaagguacagug

SEQ ID NO: 21974 - RNA, 22 nt, Human
ccaggaggggucucugucuccc

SEQ ID NO: 21975 - RNA, 22 nt, Human
ccaggagucaauaaaggaagcu

SEQ ID NO: 21976 - RNA, 22 nt, Human
ccaggagucuggaugagguguc

SEQ ID NO: 21977 - RNA, 22 nt, Human
ccaggagugcagggaugguauc

SEQ ID NO: 21978 - RNA, 22 nt, Human
ccaggaguggcuggugaccuuc

SEQ ID NO: 21979 - RNA, 19 nt, Human
ccaggagugguggggugag

SEQ ID NO: 21980 - RNA, 22 nt, Human
ccaggaguuggaagcugccaug

SEQ ID NO: 21981 - RNA, 22 nt, Human
ccaggaguuggagguugcagug

SEQ ID NO: 21982 - RNA, 22 nt, Human
ccaggaucuguacaccucugag

SEQ ID NO: 21983 - RNA, 22 nt, Human
ccaggauggggagcagauagaa

SEQ ID NO: 21984 - RNA, 20 nt, Human
ccaggcaacuauccugucuc

SEQ ID NO: 21985 - RNA, 15 nt, Human
ccaggcaagcaggaa

SEQ ID NO: 21986 - RNA, 22 nt, Human
ccaggcaagcucugcugugccc

SEQ ID NO: 21987 - RNA, 22 nt, Human
ccaggcacucagagacugggac

SEQ ID NO: 21988 - RNA, 22 nt, Human
ccaggcagagugcuccagaaag

SEQ ID NO: 21989 - RNA, 22 nt, Human
ccaggcagccugcuccauucug

SEQ ID NO: 21990 - RNA, 22 nt, Human
ccaggcagggagcuguuuggcc

SEQ ID NO: 21991 - RNA, 23 nt, Human
ccaggcaguagcuauugaaguga

SEQ ID NO: 21992 - RNA, 22 nt, Human
ccaggcagucaggguugugugu

SEQ ID NO: 21993 - RNA, 22 nt, Human
ccaggcaucacgggcauguggc

SEQ ID NO: 21994 - RNA, 22 nt, Human
ccaggcauccauugcuuccucu

SEQ ID NO: 21995 - RNA, 22 nt, Human
ccaggcauugugagugggcagg

SEQ ID NO: 21996 - RNA, 22 nt, Human
ccaggccaggagagcgagguuu

SEQ ID NO: 21997 - RNA, 19 nt, Human
ccaggccuccugggagguc

SEQ ID NO: 21998 - RNA, 22 nt, Human
ccaggccugauugggaaucuug

SEQ ID NO: 21999 - RNA, 22 nt, Human
ccaggccugcaucugcugcgca

SEQ ID NO: 22000 - RNA, 22 nt, Human
ccaggccuggacggguggccug

SEQ ID NO: 22001 - RNA, 19 nt, Human
ccaggccuggcgucuccgc

SEQ ID NO: 22002 - RNA, 20 nt, Human
ccaggccugggccugcucua

SEQ ID NO: 22003 - RNA, 22 nt, Human
ccaggccuguguuguguggagg

SEQ ID NO: 22004 - RNA, 22 nt, Human
ccaggcguggcuucagcagccc

SEQ ID NO: 22005 - RNA, 18 nt, Human
ccaggcuacuucuuggcc

SEQ ID NO: 22006 - RNA, 22 nt, Human
ccaggcuagagugcaguggcgu

SEQ ID NO: 22007 - RNA, 22 nt, Human
ccaggcuagcccagaccacagg

SEQ ID NO: 22008 - RNA, 22 nt, Human
ccaggcuccgcauagaccccac

SEQ ID NO: 22009 - RNA, 22 nt, Human
ccaggcucuaucccuccuucuu

SEQ ID NO: 22010 - RNA, 22 nt, Human
ccaggcucugagaggaauguga

SEQ ID NO: 22011 - RNA, 15 nt, Human
ccaggcucugcacuc

SEQ ID NO: 22012 - RNA, 22 nt, Human
ccaggcucuguuccccgaggag

SEQ ID NO: 22013 - RNA, 22 nt, Human
ccaggcugagcaugauuggagc

SEQ ID NO: 22014 - RNA, 22 nt, Human
ccaggcugcagucaaggggcau

SEQ ID NO: 22015 - RNA, 22 nt, Human
ccaggcugccgaggaaagaaag

SEQ ID NO: 22016 - RNA, 22 nt, Human
ccaggcuggauuuugcaguuca

SEQ ID NO: 22017 - RNA, 15 nt, Human
ccaggcugggugagc

SEQ ID NO: 22018 - RNA, 22 nt, Human
ccaggcuggucugaauuucuag

SEQ ID NO: 22019 - RNA, 22 nt, Human
ccaggcuguaagagugauguug

SEQ ID NO: 22020 - RNA, 22 nt, Human
ccaggcugugguuuagauagag

SEQ ID NO: 22021 - RNA, 22 nt, Human
ccaggcuguuuucaaacuuggg

SEQ ID NO: 22022 - RNA, 22 nt, Human
ccaggcuucaggagugguuucc

SEQ ID NO: 22023 - RNA, 22 nt, Human
cacucugcgcugggcgccagcg

SEQ ID NO: 22024 - RNA, 22 nt, Human
cacugaaccugaaccaauacuc

SEQ ID NO: 22025 - RNA, 22 nt, Human
cacugaacuggucuuaggaggu

SEQ ID NO: 22026 - RNA, 22 nt, Human
cacugaagaugcgacuagugcu

SEQ ID NO: 22027 - RNA, 22 nt, Human
cacugaagcuuucauucucuug

SEQ ID NO: 22028 - RNA, 22 nt, Human
cacugaaggaaggacuacugca

SEQ ID NO: 22029 - RNA, 22 nt, Human
cacugaaggacaguaggaaggg

SEQ ID NO: 22030 - RNA, 22 nt, Human
cacugaaggcugcagcucagcc

SEQ ID NO: 22031 - RNA, 22 nt, Human
cacugaagguaggaccaaggcu

SEQ ID NO: 22032 - RNA, 22 nt, Human
cacugagaggucucauuuccaa

SEQ ID NO: 22033 - RNA, 22 nt, Human
cacugagcugauagaauuccag

SEQ ID NO: 22034 - RNA, 22 nt, Human
cacugaggcuuccuuaggcaau

SEQ ID NO: 22035 - RNA, 21 nt, Human
cacugaggucagggguagggu

SEQ ID NO: 22036 - RNA, 22 nt, Human
cacugaguucccugacauuuca

SEQ ID NO: 22037 - RNA, 22 nt, Human
cacugcaaugucuaccuccugg

SEQ ID NO: 22038 - RNA, 22 nt, Human
cacugcagccacauagaugacg

SEQ ID NO: 22039 - RNA, 21 nt, Human
cacugcagccuugaccugggc

SEQ ID NO: 22040 - RNA, 22 nt, Human
cacugcauggaugauggcugua

SEQ ID NO: 22041 - RNA, 22 nt, Human
cacugcauggcugugaggcagc

SEQ ID NO: 22042 - RNA, 21 nt, Human
cacugcauuaagucuguaggu

SEQ ID NO: 22043 - RNA, 20 nt, Human
cacugcauugauggaaacag

SEQ ID NO: 22044 - RNA, 22 nt, Human
cacugccaccugcaugcccuga

SEQ ID NO: 22045 - RNA, 22 nt, Human
cacugcuugauugacaugcacg

SEQ ID NO: 22046 - RNA, 22 nt, Human
cacuggaaccaagacccagggc

SEQ ID NO: 22047 - RNA, 22 nt, Human
cacuggaaguucauucucagaa

SEQ ID NO: 22048 - RNA, 22 nt, Human
cacuggaauggauagagcagag

SEQ ID NO: 22049 - RNA, 22 nt, Human
cacuggaauguugaggagacaa

SEQ ID NO: 22050 - RNA, 22 nt, Human
cacuggaggucaguggagcacu

SEQ ID NO: 22051 - RNA, 22 nt, Human
cacuggcaaagccuguuccuua

SEQ ID NO: 22052 - RNA, 22 nt, Human
cacuggcagauuugggaucugg

SEQ ID NO: 22053 - RNA, 22 nt, Human
cacuggcaucuaguggguugag

SEQ ID NO: 22054 - RNA, 22 nt, Human
cacuggcccagccaggccuguu

SEQ ID NO: 22055 - RNA, 22 nt, Human
cacuggcuaugagggagauggg

SEQ ID NO: 22056 - RNA, 22 nt, Human
cacuggcugagcuucucuaggg

SEQ ID NO: 22057 - RNA, 22 nt, Human
cacuggcuugauggguaaugcc

SEQ ID NO: 22058 - RNA, 22 nt, Human
cacugggaccuaggacugagcu

SEQ ID NO: 22059 - RNA, 22 nt, Human
cacugggagcagcuccaacauu

SEQ ID NO: 22060 - RNA, 22 nt, Human
cacugggcaauucugagccuaa

SEQ ID NO: 22061 - RNA, 22 nt, Human
cacugggcgccagcugcugagc

SEQ ID NO: 22062 - RNA, 22 nt, Human
cacugggcugauaccaggcuuc

SEQ ID NO: 22063 - RNA, 23 nt, Human
cacugggggcugcuacagagagg

SEQ ID NO: 22064 - RNA, 22 nt, Human
cacugguacacugaauggcguu

SEQ ID NO: 22065 - RNA, 22 nt, Human
cacuggucagcaugguagacca

SEQ ID NO: 22066 - RNA, 23 nt, Human
cacuggugggguuuaaaagaagc

SEQ ID NO: 22067 - RNA, 22 nt, Human
cacuguaaccuccaccuccugg

SEQ ID NO: 22068 - RNA, 22 nt, Human
cacuguaagaugagcuuuuuua

SEQ ID NO: 22069 - RNA, 22 nt, Human
cacuguaauagcauuauaagug

SEQ ID NO: 22070 - RNA, 22 nt, Human
cacugucacguucugaaacugu

SEQ ID NO: 22071 - RNA, 22 nt, Human
cacuguccaugcuugcuaaccc

SEQ ID NO: 22072 - RNA, 19 nt, Human
cacuguccuagucgaggcc

SEQ ID NO: 22073 - RNA, 22 nt, Human
cacugucuccuagggggacuuc

SEQ ID NO: 22074 - RNA, 22 nt, Human
cacugucugagcuggugauuag

SEQ ID NO: 22075 - RNA, 22 nt, Human
cacugucuguguguccuugggg

SEQ ID NO: 22076 - RNA, 22 nt, Human
cacugugcuccuuccuuagcac

SEQ ID NO: 22077 - RNA, 19 nt, Human
cacugugguccuucacugc

SEQ ID NO: 22078 - RNA, 22 nt, Human
cacuguggugugagggcugaug

SEQ ID NO: 22079 - RNA, 22 nt, Human
cacuguguaagaagaugggcuu

SEQ ID NO: 22080 - RNA, 22 nt, Human
cacugugucaguuugguuagac

SEQ ID NO: 22081 - RNA, 23 nt, Human
cacuguguuacauguugaagaug

SEQ ID NO: 22082 - RNA, 22 nt, Human
cacuguucacauuuuagucuau

SEQ ID NO: 22083 - RNA, 22 nt, Human
ccagguguucuuugucccuguu

SEQ ID NO: 22084 - RNA, 22 nt, Human
ccaguaaaaagcgacaggaagu

SEQ ID NO: 22085 - RNA, 22 nt, Human
ccaguaaaccaaguguuuacua

SEQ ID NO: 22086 - RNA, 23 nt, Human
ccaguaaacccuuccucaguguc

SEQ ID NO: 22087 - RNA, 22 nt, Human
ccaguacaccucacuucccuuu

SEQ ID NO: 22088 - RNA, 18 nt, Human
ccaguaccuccuccucuc

SEQ ID NO: 22089 - RNA, 22 nt, Human
ccaguacuugcuaccucaauug

SEQ ID NO: 22090 - RNA, 22 nt, Human
ccaguaguuggacaaauagauu

SEQ ID NO: 22091 - RNA, 22 nt, Human
ccaguauucgaucuggccaguu

SEQ ID NO: 22092 - RNA, 22 nt, Human
ccagucaaguugacacaccaag

SEQ ID NO: 22093 - RNA, 22 nt, Human
ccagucacuggaaaaugggaau

SEQ ID NO: 22094 - RNA, 22 nt, Human
ccagucagagaaaauguccacu

SEQ ID NO: 22095 - RNA, 22 nt, Human
ccagucagccaagcugcagcgg

SEQ ID NO: 22096 - RNA, 22 nt, Human
ccagucagggcaggagccuggu

SEQ ID NO: 22097 - RNA, 22 nt, Human
ccaguccacgucaagaagaggu

SEQ ID NO: 22098 - RNA, 22 nt, Human
ccaguccauggauucccaaggu

SEQ ID NO: 22099 - RNA, 22 nt, Human
ccagucccagcucugccaugcu

SEQ ID NO: 22100 - RNA, 22 nt, Human
ccagucccaggcagaaauccag

SEQ ID NO: 22101 - RNA, 19 nt, Human
ccagucccauacaggagau

SEQ ID NO: 22102 - RNA, 22 nt, Human
ccaguccuggccaguaacauga

SEQ ID NO: 22103 - RNA, 22 nt, Human
ccagucuccuaagagccccuga

SEQ ID NO: 22104 - RNA, 22 nt, Human
ccagucugaggccuggugaggg

SEQ ID NO: 22105 - RNA, 22 nt, Human
ccagucugugugccagccugcg

SEQ ID NO: 22106 - RNA, 22 nt, Human
ccagugcaccaagaggccuaga

SEQ ID NO: 22107 - RNA, 22 nt, Human
ccagugcagucccccugaacug

SEQ ID NO: 22108 - RNA, 19 nt, Human
ccagugccggcgcugggga

SEQ ID NO: 22109 - RNA, 22 nt, Human
ccagugccuaucuccucuggga

SEQ ID NO: 22110 - RNA, 22 nt, Human
ccagugccugugggcauggugc

SEQ ID NO: 22111 - RNA, 22 nt, Human
ccagugcucuuaaaggucauaa

SEQ ID NO: 22112 - RNA, 22 nt, Human
ccagugcugaaugaggaggucu

SEQ ID NO: 22113 - RNA, 22 nt, Human
ccagugcuuccaggaauacggu

SEQ ID NO: 22114 - RNA, 22 nt, Human
ccaguggaauuaaaaauaagug

SEQ ID NO: 22115 - RNA, 22 nt, Human
ccaguggaguuuuuauacccag

SEQ ID NO: 22116 - RNA, 23 nt, Human
ccaguggcguaaacuagaggaua

SEQ ID NO: 22117 - RNA, 22 nt, Human
ccaguggcuacagggggguuga

SEQ ID NO: 22118 - RNA, 22 nt, Human
ccagugggaacacuggcauugc

SEQ ID NO: 22119 - RNA, 22 nt, Human
ccagugggagggagcuaggcca

SEQ ID NO: 22120 - RNA, 22 nt, Human
ccagugggugcugggcucugcc

SEQ ID NO: 22121 - RNA, 22 nt, Human
ccagugugaaaggucauuuauc

SEQ ID NO: 22122 - RNA, 22 nt, Human
ccagugugcaaucucuggcuua

SEQ ID NO: 22123 - RNA, 22 nt, Human
ccaguguggccaggugcuggua

SEQ ID NO: 22124 - RNA, 23 nt, Human
ccagugugguagguccacaggug

SEQ ID NO: 22125 - RNA, 22 nt, Human
ccaguguguuaguggauuuccc

SEQ ID NO: 22126 - RNA, 22 nt, Human
ccaguguuccauggagugauua

SEQ ID NO: 22127 - RNA, 22 nt, Human
ccaguguugaacaguauuugga

SEQ ID NO: 22128 - RNA, 22 nt, Human
ccaguguugcauaggaugggga

SEQ ID NO: 22129 - RNA, 22 nt, Human
ccaguuaaucacugaguccugu

SEQ ID NO: 22130 - RNA, 22 nt, Human
ccauaagguuuggggccaugca

SEQ ID NO: 22131 - RNA, 22 nt, Human
ccauaaucguguguuaaauaau

SEQ ID NO: 22132 - RNA, 22 nt, Human
cacccagcacagagggaggcga

SEQ ID NO: 22133 - RNA, 22 nt, Human
cacccagcagcacuuaagacua

SEQ ID NO: 22134 - RNA, 22 nt, Human
cacccaggacaggccagaugug

SEQ ID NO: 22135 - RNA, 22 nt, Human
cacccaggcagguggcugagaa

SEQ ID NO: 22136 - RNA, 22 nt, Human
cacccaggcuggagugcauugg

SEQ ID NO: 22137 - RNA, 22 nt, Human
cacccaguaagcaugaggcccu

SEQ ID NO: 22138 - RNA, 22 nt, Human
caccccaaguucuguccacugc

SEQ ID NO: 22139 - RNA, 22 nt, Human
cacccccaggagcuccagggac

SEQ ID NO: 22140 - RNA, 22 nt, Human
caccccuugucuuuggggucgu

SEQ ID NO: 22141 - RNA, 20 nt, Human
cacccucccagcaccuaugc

SEQ ID NO: 22142 - RNA, 22 nt, Human
cacccuggcuggaggugcagug

SEQ ID NO: 22143 - RNA, 22 nt, Human
cacccuuugcugcucuuccucc

SEQ ID NO: 22144 - RNA, 22 nt, Human
caccuagcagaacagaggugcu

SEQ ID NO: 22145 - RNA, 22 nt, Human
caccuagggcaucccugcccca

SEQ ID NO: 22146 - RNA, 22 nt, Human
caccuaggguuucgccuuucuu

SEQ ID NO: 22147 - RNA, 22 nt, Human
caccugaagauuuagagauuga

SEQ ID NO: 22148 - RNA, 22 nt, Human
caccugcagggggagucaagag

SEQ ID NO: 22149 - RNA, 20 nt, Human
caccuggauaugacccagcu

SEQ ID NO: 22150 - RNA, 22 nt, Human
caccuggcuggaagugcuccgg

SEQ ID NO: 22151 - RNA, 22 nt, Human
caccugguucuagugaaagucu

SEQ ID NO: 22152 - RNA, 22 nt, Human
caccuguuguuuauucaucucu

SEQ ID NO: 22153 - RNA, 22 nt, Human
caccuuguggcccagucagguu

SEQ ID NO: 22154 - RNA, 22 nt, Human
caccuuugaccuugcagcgcac

SEQ ID NO: 22155 - RNA, 22 nt, Human
caccuuuugugucugcguuugu

SEQ ID NO: 22156 - RNA, 22 nt, Human
cacgacuuguggaggagcgcgg

SEQ ID NO: 22157 - RNA, 22 nt, Human
cacggaaacacagguuauaaga

SEQ ID NO: 22158 - RNA, 23 nt, Human
cacggcagccuccgagggugcug

SEQ ID NO: 22159 - RNA, 22 nt, Human
cacggccacugcagcaccccag

SEQ ID NO: 22160 - RNA, 22 nt, Human
cacgggcuguuuccaugcaaaa

SEQ ID NO: 22161 - RNA, 22 nt, Human
cacgguggcccacaggugcaag

SEQ ID NO: 22162 - RNA, 22 nt, Human
cacguccacccaggcugcccag

SEQ ID NO: 22163 - RNA, 22 nt, Human
cacgugagaccuugcagaggug

SEQ ID NO: 22164 - RNA, 22 nt, Human
cacguuuuaugacagaagaagc

SEQ ID NO: 22165 - RNA, 22 nt, Human
cacuaaaacuacauuggaaaca

SEQ ID NO: 22166 - RNA, 22 nt, Human
cacuagaaagguacagauuaug

SEQ ID NO: 22167 - RNA, 22 nt, Human
cacuagagguugaugagaggug

SEQ ID NO: 22168 - RNA, 22 nt, Human
cacuaguggccccaugugguug

SEQ ID NO: 22169 - RNA, 22 nt, Human
cacuaguucacaaaauaggaaa

SEQ ID NO: 22170 - RNA, 22 nt, Human
cacuauaauccuguuuuagaac

SEQ ID NO: 22171 - RNA, 22 nt, Human
cacuauuuauacuuccugaucc

SEQ ID NO: 22172 - RNA, 21 nt, Human
cacuauuuauauaugccagcu

SEQ ID NO: 22173 - RNA, 22 nt, Human
cacuauuuccuggauuuugacg

SEQ ID NO: 22174 - RNA, 22 nt, Human
cacuauuuuucacuuaggcuua

SEQ ID NO: 22175 - RNA, 22 nt, Human
cacucacuuauuucuaacagaa

SEQ ID NO: 22176 - RNA, 22 nt, Human
cacucaggcugugucaggagga

SEQ ID NO: 22177 - RNA, 21 nt, Human
cacucaggguaugugccaggc

SEQ ID NO: 22178 - RNA, 22 nt, Human
cacuccagccucagugacagag

SEQ ID NO: 22179 - RNA, 23 nt, Human
cacuccuguuucuaagccagcau

SEQ ID NO: 22180 - RNA, 20 nt, Human
cacucuaaccauauuuccuc

SEQ ID NO: 22181 - RNA, 22 nt, Human
cacucuaagaacacaaaggccc

SEQ ID NO: 22182 - RNA, 22 nt, Human
cacucucagcauaaugaaugug

SEQ ID NO: 22183 - RNA, 22 nt, Human
cacucucucaggcuuuccuugu

SEQ ID NO: 22184 - RNA, 22 nt, Human
cacucugagaaacacuaaacca

SEQ ID NO: 22185 - RNA, 22 nt, Human
cacucugagccaaaacuaauuc

SEQ ID NO: 22186 - RNA, 20 nt, Human
cacucugagggaguccaugu

SEQ ID NO: 22187 - RNA, 22 nt, Human
cacucugauuccacaaggcucc

SEQ ID NO: 22188 - RNA, 22 nt, Human
cacucugggcucuuguuucaga

SEQ ID NO: 22189 - RNA, 22 nt, Human
cacucugggggcugccgcugcc

SEQ ID NO: 22190 - RNA, 22 nt, Human
cacucugguucugaacaggauc

SEQ ID NO: 22191 - RNA, 22 nt, Human
cacugaaacagguauugcuggu

SEQ ID NO: 22192 - RNA, 22 nt, Human
cacugaccauggccaauuggca

SEQ ID NO: 22193 - RNA, 22 nt, Human
cacugacuaaguuugugaaggu

SEQ ID NO: 22194 - RNA, 22 nt, Human
cacugagcaagucaguacagca

SEQ ID NO: 22195 - RNA, 22 nt, Human
cacugagccaggagcaauauca

SEQ ID NO: 22196 - RNA, 22 nt, Human
cacugaggcugggggagaaggu

SEQ ID NO: 22197 - RNA, 22 nt, Human
cacugagguaucugucucuccu

SEQ ID NO: 22198 - RNA, 22 nt, Human
cacugcaaccuccgccucuugg

SEQ ID NO: 22199 - RNA, 22 nt, Human
cacugcaaccucugccaccugg

SEQ ID NO: 22200 - RNA, 22 nt, Human
cacuacagggguccacagcuga

SEQ ID NO: 22201 - RNA, 22 nt, Human
cacuacuugaaagaauuacaga

SEQ ID NO: 22202 - RNA, 22 nt, Human
cacuagaaccaaugacauuucu

SEQ ID NO: 22203 - RNA, 22 nt, Human
cacuagagaaacgcccaggcuc

SEQ ID NO: 22204 - RNA, 22 nt, Human
cacuagaugauaaucagcugga

SEQ ID NO: 22205 - RNA, 22 nt, Human
cacuaggcgccggguggcugug

SEQ ID NO: 22206 - RNA, 22 nt, Human
cacuaguccugguuucaugcua

SEQ ID NO: 22207 - RNA, 22 nt, Human
cacuauaucucuuucaucuuuu

SEQ ID NO: 22208 - RNA, 22 nt, Human
cacuauaugccuuugaaauaca

SEQ ID NO: 22209 - RNA, 22 nt, Human
cacuauuugcuuugggcuagag

SEQ ID NO: 22210 - RNA, 22 nt, Human
cacucaggguacaauggagggc

SEQ ID NO: 22211 - RNA, 22 nt, Human
cacucauauuggaacaagcuug

SEQ ID NO: 22212 - RNA, 22 nt, Human
cacuccaggucccaguuccugg

SEQ ID NO: 22213 - RNA, 22 nt, Human
cacucuaaccuccaucuuccau

SEQ ID NO: 22214 - RNA, 22 nt, Human
cacucucacaugcccugucagu

SEQ ID NO: 22215 - RNA, 22 nt, Human
cacucucacugagcucaugcca

SEQ ID NO: 22216 - RNA, 22 nt, Human
cacucuccagcacaccccauuu

SEQ ID NO: 22217 - RNA, 21 nt, Human
cacucucccaauccuugcuga

SEQ ID NO: 22218 - RNA, 22 nt, Human
cacucugaugguuucuguucaa

SEQ ID NO: 22219 - RNA, 22 nt, Human
cacucugcugaaaucgccuugu

SEQ ID NO: 22220 - RNA, 22 nt, Human
cacugaaauauuaauaucuuau

SEQ ID NO: 22221 - RNA, 22 nt, Human
cacugaaaucgaaaaauguagg

SEQ ID NO: 22222 - RNA, 22 nt, Human
cacugaaccguaaaugauuuag

SEQ ID NO: 22223 - RNA, 22 nt, Human
cacugaacuccuuguuuguccu

SEQ ID NO: 22224 - RNA, 20 nt, Human
cacugaagacuucuugcuca

SEQ ID NO: 22225 - RNA, 22 nt, Human
cacugaagccugggaguaagac

SEQ ID NO: 22226 - RNA, 22 nt, Human
cacugaaggcuaggauuagaug

SEQ ID NO: 22227 - RNA, 22 nt, Human
cacugagaaagugaccugccaa

SEQ ID NO: 22228 - RNA, 22 nt, Human
cacugagaccagagucccugac

SEQ ID NO: 22229 - RNA, 22 nt, Human
cacugagagaugugucacagca

SEQ ID NO: 22230 - RNA, 22 nt, Human
cacugagcaugagugggcugug

SEQ ID NO: 22231 - RNA, 22 nt, Human
cacugagcugauuucaggugcc

SEQ ID NO: 22232 - RNA, 22 nt, Human
cacugagggcggagcccaggga

SEQ ID NO: 22233 - RNA, 22 nt, Human
cacugauuaagucugcuagagg

SEQ ID NO: 22234 - RNA, 22 nt, Human
cacugcaaccucagacuccugg

SEQ ID NO: 22235 - RNA, 22 nt, Human
cacugcaaccuccagcucucag

SEQ ID NO: 22236 - RNA, 22 nt, Human
cacugcaaccuccgccuaccgg

SEQ ID NO: 22237 - RNA, 22 nt, Human
cacugcacaggugagauguggg

SEQ ID NO: 22238 - RNA, 22 nt, Human
cacugcagaucagaggcugaga

SEQ ID NO: 22239 - RNA, 22 nt, Human
cacugcaguaacucuaggacug

SEQ ID NO: 22240 - RNA, 22 nt, Human
cacugcagucuucaucaaccaa

SEQ ID NO: 22241 - RNA, 22 nt, Human
cagauugagucugggaaaaggc

SEQ ID NO: 22242 - RNA, 22 nt, Human
cagauuuaagauauuuguauug

SEQ ID NO: 22243 - RNA, 22 nt, Human
cagauuucaugcgaaauggggu

SEQ ID NO: 22244 - RNA, 22 nt, Human
cagauuucuuuagcaagcuaag

SEQ ID NO: 22245 - RNA, 22 nt, Human
cagauuuugaugaauguggaaa

SEQ ID NO: 22246 - RNA, 20 nt, Human
cagcaaaaugaaaauggauu

SEQ ID NO: 22247 - RNA, 22 nt, Human
cagcaaaauuugaggauugccu

SEQ ID NO: 22248 - RNA, 19 nt, Human
cagcaaacacuguaaaugg

SEQ ID NO: 22249 - RNA, 22 nt, Human
cagcaacaugugguaguguagg

SEQ ID NO: 22250 - RNA, 22 nt, Human
cagcaacuccuguagcuuaugc

SEQ ID NO: 22251 - RNA, 20 nt, Human
cagcaacuuuggacugaguu

SEQ ID NO: 22252 - RNA, 22 nt, Human
cagcaagaaucagacaaccuca

SEQ ID NO: 22253 - RNA, 22 nt, Human
cagcaagacaaggaacaaacug

SEQ ID NO: 22254 - RNA, 22 nt, Human
cagcaagagacuguucucuaag

SEQ ID NO: 22255 - RNA, 22 nt, Human
cagcaagaggguaagguugaag

SEQ ID NO: 22256 - RNA, 22 nt, Human
cagcaagaguugggguuguugg

SEQ ID NO: 22257 - RNA, 22 nt, Human
cagcaagauuaagggcagaaaa

SEQ ID NO: 22258 - RNA, 22 nt, Human
cagcaaggucugucaauagugg

SEQ ID NO: 22259 - RNA, 22 nt, Human
cagcaagucagugaguagaaga

SEQ ID NO: 22260 - RNA, 22 nt, Human
cagcaauaagguaagcuucucc

SEQ ID NO: 22261 - RNA, 22 nt, Human
cagcaauaaugucuacaaaucu

SEQ ID NO: 22262 - RNA, 22 nt, Human
cagcaaucgggugauaugcaau

SEQ ID NO: 22263 - RNA, 22 nt, Human
cagcacagaguauuuuauugau

SEQ ID NO: 22264 - RNA, 22 nt, Human
cagcacaggccugucuuugucu

SEQ ID NO: 22265 - RNA, 22 nt, Human
cagcacagggacaauagcagau

SEQ ID NO: 22266 - RNA, 22 nt, Human
cagcacaguuucuggcccgccg

SEQ ID NO: 22267 - RNA, 22 nt, Human
cagcacauaaucagugauugug

SEQ ID NO: 22268 - RNA, 22 nt, Human
cagcacauagcaugcuugucag

SEQ ID NO: 22269 - RNA, 22 nt, Human
cagcacauaguagguauucacu

SEQ ID NO: 22270 - RNA, 22 nt, Human
cagcacaucugauuauaugacu

SEQ ID NO: 22271 - RNA, 22 nt, Human
cagcacaucuucugaucuuuug

SEQ ID NO: 22272 - RNA, 22 nt, Human
cagcaccauuuuccuggucagc

SEQ ID NO: 22273 - RNA, 22 nt, Human
cagcacccucggaggcugccgu

SEQ ID NO: 22274 - RNA, 22 nt, Human
cagcaccucugggucuugucuu

SEQ ID NO: 22275 - RNA, 22 nt, Human
cagcaccuuccuauccaggaga

SEQ ID NO: 22276 - RNA, 22 nt, Human
cagcaccuuccuuaacuccagg

SEQ ID NO: 22277 - RNA, 22 nt, Human
cagcacuaggauauacauuucc

SEQ ID NO: 22278 - RNA, 22 nt, Human
cagcacucuggcuucguuaagu

SEQ ID NO: 22279 - RNA, 22 nt, Human
cagcacuggggggauucggagc

SEQ ID NO: 22280 - RNA, 22 nt, Human
cagcacuugagcuuucauguaa

SEQ ID NO: 22281 - RNA, 22 nt, Human
cagcacuuggugccauugagug

SEQ ID NO: 22282 - RNA, 22 nt, Human
cagcagacuggaguaggcagug

SEQ ID NO: 22283 - RNA, 22 nt, Human
cagcagacuuacuagaauguaa

SEQ ID NO: 22284 - RNA, 22 nt, Human
cagcagagaugagauuccuaua

SEQ ID NO: 22285 - RNA, 22 nt, Human
cagcagagcauuugguaggagg

SEQ ID NO: 22286 - RNA, 22 nt, Human
cagcagagcugggaauaaaauu

SEQ ID NO: 22287 - RNA, 22 nt, Human
cagcagagcugugugggaaggg

SEQ ID NO: 22288 - RNA, 22 nt, Human
cagcagaggaaagcaaaucuaa

SEQ ID NO: 22289 - RNA, 22 nt, Human
cagcagcccacgcgugcugucc

SEQ ID NO: 22290 - RNA, 22 nt, Human
cagcagccuacaaugcacagaa

SEQ ID NO: 22291 - RNA, 22 nt, Human
cagcagccuagaagcucuacca

SEQ ID NO: 22292 - RNA, 22 nt, Human
cagcagccuggagggggccacg

SEQ ID NO: 22293 - RNA, 22 nt, Human
cagcagcucacucagguggcuc

SEQ ID NO: 22294 - RNA, 22 nt, Human
cagcagcucaggcuccuuccca

SEQ ID NO: 22295 - RNA, 22 nt, Human
cagcagcuccaaagaauagcca

SEQ ID NO: 22296 - RNA, 22 nt, Human
cagcagcuccucugcggcuaug

SEQ ID NO: 22297 - RNA, 22 nt, Human
cagcagcugccucagcugggga

SEQ ID NO: 22298 - RNA, 22 nt, Human
cagcagcugcgugcccaggccg

SEQ ID NO: 22299 - RNA, 22 nt, Human
cagcagcugguugaauccuucu

SEQ ID NO: 22300 - RNA, 22 nt, Human
cagcagcuuuugcauucucauu

SEQ ID NO: 22301 - RNA, 22 nt, Human
cagcaggaaaaucaauucugug

SEQ ID NO: 22302 - RNA, 22 nt, Human
cagcaggacauggaggaguaaa

SEQ ID NO: 22303 - RNA, 22 nt, Human
cagcaggaccauugaggcauca

SEQ ID NO: 22304 - RNA, 22 nt, Human
cagcaggagcagucagacuccu

SEQ ID NO: 22305 - RNA, 22 nt, Human
cagcaggaggugaguagcaggu

SEQ ID NO: 22306 - RNA, 22 nt, Human
cagcaggcagccauuucacugu

SEQ ID NO: 22307 - RNA, 22 nt, Human
cagcaggccaugcugcuuuuca

SEQ ID NO: 22308 - RNA, 22 nt, Human
cagcaggcguugggagaaagac

SEQ ID NO: 22309 - RNA, 22 nt, Human
cagcaggcuggacuucaguccc

SEQ ID NO: 22310 - RNA, 22 nt, Human
cagcaggcuguggaaauccugg

SEQ ID NO: 22311 - RNA, 22 nt, Human
cagcaggggaacugugggccag

SEQ ID NO: 22312 - RNA, 22 nt, Human
cagcaggguauacagggaauuu

SEQ ID NO: 22313 - RNA, 18 nt, Human
cagcagguagaguuuggu

SEQ ID NO: 22314 - RNA, 22 nt, Human
cagcagguauguuuguucagca

SEQ ID NO: 22315 - RNA, 21 nt, Human
cagcagguggagccucuuguc

SEQ ID NO: 22316 - RNA, 22 nt, Human
cagcagguuaacagaggcuggu

SEQ ID NO: 22317 - RNA, 22 nt, Human
cagcaguaauuagugcugcaug

SEQ ID NO: 22318 - RNA, 22 nt, Human
cagcagugugcaggugugcugg

SEQ ID NO: 22319 - RNA, 22 nt, Human
cagcaguucuguacuuuagagu

SEQ ID NO: 22320 - RNA, 22 nt, Human
cagcaucaacauucucagcucu

SEQ ID NO: 22321 - RNA, 20 nt, Human
cagcaucuagugagauuugc

SEQ ID NO: 22322 - RNA, 22 nt, Human
cagcaucucauuugacuucugc

SEQ ID NO: 22323 - RNA, 22 nt, Human
cagcaucugaccaauaucuaca

SEQ ID NO: 22324 - RNA, 19 nt, Human
cagcaucugagccgugucc

SEQ ID NO: 22325 - RNA, 22 nt, Human
cagcaucuugaaggguaaacca

SEQ ID NO: 22326 - RNA, 22 nt, Human
cagcaugaucccaguugauugc

SEQ ID NO: 22327 - RNA, 22 nt, Human
cagcaugauuggugucugguga

SEQ ID NO: 22328 - RNA, 22 nt, Human
cagcaugccugggcugccugcc

SEQ ID NO: 22329 - RNA, 22 nt, Human
cagcauggagacaaagugggca

SEQ ID NO: 22330 - RNA, 22 nt, Human
cagcaugguuggguucugggga

SEQ ID NO: 22331 - RNA, 22 nt, Human
cagcauguaagccacugcccug

SEQ ID NO: 22332 - RNA, 22 nt, Human
cagcauuggguuaccuuuguuu

SEQ ID NO: 22333 - RNA, 22 nt, Human
cagcauuuaaugcagugcuucc

SEQ ID NO: 22334 - RNA, 22 nt, Human
cagcauuucaggaggcugaggu

SEQ ID NO: 22335 - RNA, 22 nt, Human
cagcacaguguuagguaauuug

SEQ ID NO: 22336 - RNA, 22 nt, Human
cagcacauaagccgaagacugu

SEQ ID NO: 22337 - RNA, 22 nt, Human
cagcacaugcucaucagggaag

SEQ ID NO: 22338 - RNA, 22 nt, Human
cagcaccagcauauuccagggc

SEQ ID NO: 22339 - RNA, 22 nt, Human
cagcaccaggcagaccuggagc

SEQ ID NO: 22340 - RNA, 22 nt, Human
cagcacccuuuccacugccuug

SEQ ID NO: 22341 - RNA, 22 nt, Human
cagcaccuaggacaguagucag

SEQ ID NO: 22342 - RNA, 22 nt, Human
cagcaccuccgcaguucaccug

SEQ ID NO: 22343 - RNA, 22 nt, Human
cagcacuaauccugcaauuucu

SEQ ID NO: 22344 - RNA, 22 nt, Human
cagcacugcugcuguacacaca

SEQ ID NO: 22345 - RNA, 22 nt, Human
cagcacuggggccacuggaguu

SEQ ID NO: 22346 - RNA, 22 nt, Human
cagcacugugauaacugagcca

SEQ ID NO: 22347 - RNA, 22 nt, Human
cagcacuguucccagaccacug

SEQ ID NO: 22348 - RNA, 22 nt, Human
cagcacuucagcauucagauuu

SEQ ID NO: 22349 - RNA, 22 nt, Human
cagcacuuugagggcucuuaau

SEQ ID NO: 22350 - RNA, 22 nt, Human
cagccaggacucccauuuagga

SEQ ID NO: 22351 - RNA, 22 nt, Human
cagccaggauggagaacuguug

SEQ ID NO: 22352 - RNA, 22 nt, Human
cagccaggcccagaucaugcug

SEQ ID NO: 22353 - RNA, 22 nt, Human
cagccaggccuggugaccaaag

SEQ ID NO: 22354 - RNA, 22 nt, Human
cagccagguuagugcuaauugu

SEQ ID NO: 22355 - RNA, 22 nt, Human
cagcccaaagccccaggcuaga

SEQ ID NO: 22356 - RNA, 22 nt, Human
cagcccaccuggcacguguguu

SEQ ID NO: 22357 - RNA, 22 nt, Human
cagcccagaacucacgucucca

SEQ ID NO: 22358 - RNA, 22 nt, Human
cagcccagacaccaucauucua

SEQ ID NO: 22359 - RNA, 22 nt, Human
cagcccagagaaggggcccgug

SEQ ID NO: 22360 - RNA, 22 nt, Human
cagcccagcgcaaacaacuggc

SEQ ID NO: 22361 - RNA, 22 nt, Human
cagcccaggccgacaguuccuc

SEQ ID NO: 22362 - RNA, 22 nt, Human
cagcccaggucucucuuccagu

SEQ ID NO: 22363 - RNA, 22 nt, Human
cagcccagguggcggagguugc

SEQ ID NO: 22364 - RNA, 22 nt, Human
cagccccauggugugcuccagc

SEQ ID NO: 22365 - RNA, 22 nt, Human
cagcccccauggggaggucaag

SEQ ID NO: 22366 - RNA, 22 nt, Human
cagccccuggcgcacgccgagc

SEQ ID NO: 22367 - RNA, 22 nt, Human
cagcccgucacacgcuagcauc

SEQ ID NO: 22368 - RNA, 22 nt, Human
cagcccucaucccgccugcguu

SEQ ID NO: 22369 - RNA, 20 nt, Human
cagcccuccaguggaggcag

SEQ ID NO: 22370 - RNA, 22 nt, Human
cagcccugagaaggaggaucuc

SEQ ID NO: 22371 - RNA, 22 nt, Human
cagcccugcagagggcgcuccu

SEQ ID NO: 22372 - RNA, 22 nt, Human
cagcccugcagcuggaucucac

SEQ ID NO: 22373 - RNA, 22 nt, Human
cagcccugccauggagccuccu

SEQ ID NO: 22374 - RNA, 22 nt, Human
cagcccugcugccuuagugccu

SEQ ID NO: 22375 - RNA, 22 nt, Human
cagcccuggugccaagguuccc

SEQ ID NO: 22376 - RNA, 20 nt, Human
cagcccugugaccuggcccu

SEQ ID NO: 22377 - RNA, 22 nt, Human
cagcccugugcggagggcccug

SEQ ID NO: 22378 - RNA, 22 nt, Human
cagcccuguugcgcuuccggcg

SEQ ID NO: 22379 - RNA, 23 nt, Human
cagcccuuccugcauguuuuugu

SEQ ID NO: 22380 - RNA, 22 nt, Human
cagcccuuggcuggcuccuugc

SEQ ID NO: 22381 - RNA, 22 nt, Human
cagcccuuguuucuaaagcugc

SEQ ID NO: 22382 - RNA, 20 nt, Human
cagcccuuuauccuccuaug

SEQ ID NO: 22383 - RNA, 22 nt, Human
cagcccuuuccuucucagcuuu

SEQ ID NO: 22384 - RNA, 22 nt, Human
cagcccuuuuuugguacaaccg

SEQ ID NO: 22385 - RNA, 22 nt, Human
cagccggaccugagggauuccu

SEQ ID NO: 22386 - RNA, 20 nt, Human
cagccuccacucacucagcu

SEQ ID NO: 22387 - RNA, 22 nt, Human
cagccucugacaccacagucgu

SEQ ID NO: 22388 - RNA, 22 nt, Human
cagccugccgucagccagguag

SEQ ID NO: 22389 - RNA, 22 nt, Human
cagccuggacagcgaccagagu

SEQ ID NO: 22390 - RNA, 22 nt, Human
cagccuggagccacagcccagg

SEQ ID NO: 22391 - RNA, 22 nt, Human
cagccuggauugcagaaugcua

SEQ ID NO: 22392 - RNA, 22 nt, Human
cagccugggcuccagagucccu

SEQ ID NO: 22393 - RNA, 22 nt, Human
cagccuguagaauacaguaaau

SEQ ID NO: 22394 - RNA, 22 nt, Human
cagccuucaaggcuuagcucag

SEQ ID NO: 22395 - RNA, 22 nt, Human
cagccuucugaaugaacguacu

SEQ ID NO: 22396 - RNA, 22 nt, Human
cagccuuugaacuucagagguu

SEQ ID NO: 22397 - RNA, 22 nt, Human
cagccuuuuaggacuauuugug

SEQ ID NO: 22398 - RNA, 22 nt, Human
cagcgcaguguagguggggggc

SEQ ID NO: 22399 - RNA, 22 nt, Human
cagcuacagaggccacauggcu

SEQ ID NO: 22400 - RNA, 22 nt, Human
cagcuagaaaugggauugguau

SEQ ID NO: 22401 - RNA, 22 nt, Human
cagcuagcuucccugcagugcu

SEQ ID NO: 22402 - RNA, 22 nt, Human
cagcuaggaaaccagagggcag

SEQ ID NO: 22403 - RNA, 22 nt, Human
cagcuaggaaguccuuggcgaa

SEQ ID NO: 22404 - RNA, 22 nt, Human
cagcuaggagaaaagguguuuu

SEQ ID NO: 22405 - RNA, 20 nt, Human
cagcuagugguaggagucgg

SEQ ID NO: 22406 - RNA, 22 nt, Human
cagcuauauuguuuucuacugu

SEQ ID NO: 22407 - RNA, 22 nt, Human
cagcuauuccaggaguagaauc

SEQ ID NO: 22408 - RNA, 22 nt, Human
cagcuauuuucucauuaaggau

SEQ ID NO: 22409 - RNA, 22 nt, Human
cagcucacagccacgccauucc

SEQ ID NO: 22410 - RNA, 22 nt, Human
cagcucagucuugaagcacugg

SEQ ID NO: 22411 - RNA, 22 nt, Human
cagcuccagccaccggggggug

SEQ ID NO: 22412 - RNA, 22 nt, Human
cagcucccaguggcagcuccuu

SEQ ID NO: 22413 - RNA, 22 nt, Human
cagcuccccucuguggggcagu

SEQ ID NO: 22414 - RNA, 22 nt, Human
cagcucccgccaucgggaggca

SEQ ID NO: 22415 - RNA, 22 nt, Human
cagcucccuauggugaggcgac

SEQ ID NO: 22416 - RNA, 22 nt, Human
cagcuccuauuagacacugaau

SEQ ID NO: 22417 - RNA, 22 nt, Human
cagcuccucagcccugccuugg

SEQ ID NO: 22418 - RNA, 22 nt, Human
cagcuccucuggccagcccugc

SEQ ID NO: 22419 - RNA, 22 nt, Human
cagcucuacugggcaccauucg

SEQ ID NO: 22420 - RNA, 22 nt, Human
cagcucugaggaacacuccuuu

SEQ ID NO: 22421 - RNA, 17 nt, Human
cagcucugcagacuucc

SEQ ID NO: 22422 - RNA, 22 nt, Human
cagcucugccaucaucugccuu

SEQ ID NO: 22423 - RNA, 22 nt, Human
cagcucugcugggaggaugcag

SEQ ID NO: 22424 - RNA, 22 nt, Human
cagcucuggccagaucuauccu

SEQ ID NO: 22425 - RNA, 22 nt, Human
cagcucuggcuuuggggagcuu

SEQ ID NO: 22426 - RNA, 20 nt, Human
cagcucugggaaagaggcca

SEQ ID NO: 22427 - RNA, 22 nt, Human
cagcucuggguaggaggaaucu

SEQ ID NO: 22428 - RNA, 22 nt, Human
cagcucuguaaauuccuucauc

SEQ ID NO: 22429 - RNA, 22 nt, Human
cagcucuucagagugagcaaug

SEQ ID NO: 22430 - RNA, 22 nt, Human
cagcucuuccauuuccuucagc

SEQ ID NO: 22431 - RNA, 22 nt, Human
cagcugaacauguagagcaucu

SEQ ID NO: 22432 - RNA, 22 nt, Human
cagcugaagaaagagugguuag

SEQ ID NO: 22433 - RNA, 22 nt, Human
cagcugacagugaggugggggc

SEQ ID NO: 22434 - RNA, 22 nt, Human
cagcugacgccagaguggaauu

SEQ ID NO: 22435 - RNA, 22 nt, Human
cagcugagaagugauagcugca

SEQ ID NO: 22436 - RNA, 22 nt, Human
cagcugagaccagaaugcaggu

SEQ ID NO: 22437 - RNA, 22 nt, Human
cagcugagcucccaggccauca

SEQ ID NO: 22438 - RNA, 22 nt, Human
cagcugagucugagguucuuug

SEQ ID NO: 22439 - RNA, 22 nt, Human
cagcugaguggacccuagaggc

SEQ ID NO: 22440 - RNA, 22 nt, Human
cagcugcaaucagaagcuaagg

SEQ ID NO: 22441 - RNA, 22 nt, Human
cagcugcacugaagcagguuug

SEQ ID NO: 22442 - RNA, 22 nt, Human
cagcugcagucaucuucuagaa

SEQ ID NO: 22443 - RNA, 22 nt, Human
cagcugccaagaaucuuuucua

SEQ ID NO: 22444 - RNA, 22 nt, Human
cagcugccacaggacuuucuga

SEQ ID NO: 22445 - RNA, 22 nt, Human
cagcugcccaagccccagaugu

SEQ ID NO: 22446 - RNA, 22 nt, Human
cagcugccugcaacacaagcuu

SEQ ID NO: 22447 - RNA, 22 nt, Human
cagcugccugucuggaggcaau

SEQ ID NO: 22448 - RNA, 21 nt, Human
cagcugcguguccucccaccc

SEQ ID NO: 22449 - RNA, 22 nt, Human
cagcugcucugguggucucucc

SEQ ID NO: 22450 - RNA, 22 nt, Human
cagcugcugaggaagggguugg

SEQ ID NO: 22451 - RNA, 22 nt, Human
cagcugcugauggccugacaga

SEQ ID NO: 22452 - RNA, 22 nt, Human
cagccccucacagagcuguccu

SEQ ID NO: 22453 - RNA, 22 nt, Human
cagccccuuguccgguagccac

SEQ ID NO: 22454 - RNA, 22 nt, Human
cagcccucaaaccacuuccagg

SEQ ID NO: 22455 - RNA, 22 nt, Human
cagcccucagguccucagcagc

SEQ ID NO: 22456 - RNA, 22 nt, Human
cagcccucaucucagcuucuuu

SEQ ID NO: 22457 - RNA, 22 nt, Human
cagcccuccuuucacucccagg

SEQ ID NO: 22458 - RNA, 22 nt, Human
cagcccucugaagaggcgcuug

SEQ ID NO: 22459 - RNA, 18 nt, Human
ccuggaccugucuccuuu

SEQ ID NO: 22460 - RNA, 22 nt, Human
ccuggacuaaaaucuuuucuua

SEQ ID NO: 22461 - RNA, 22 nt, Human
ccuggagaccugauggcagcgg

SEQ ID NO: 22462 - RNA, 22 nt, Human
ccuggagagagaggccaacugc

SEQ ID NO: 22463 - RNA, 22 nt, Human
ccuggagagcucgggccaggca

SEQ ID NO: 22464 - RNA, 22 nt, Human
ccuggagaggagaaagggccca

SEQ ID NO: 22465 - RNA, 22 nt, Human
ccuggagaggcgcugcagagga

SEQ ID NO: 22466 - RNA, 22 nt, Human
ccuggagauuauuugguccaau

SEQ ID NO: 22467 - RNA, 22 nt, Human
ccuggagcccaaggcagugaga

SEQ ID NO: 22468 - RNA, 22 nt, Human
ccuggagccccucuggccagcc

SEQ ID NO: 22469 - RNA, 22 nt, Human
ccuggagcuuuuccaguugaca

SEQ ID NO: 22470 - RNA, 22 nt, Human
ccuggaggagcgcugaccagcu

SEQ ID NO: 22471 - RNA, 22 nt, Human
ccuggaggcagaaauaggacuu

SEQ ID NO: 22472 - RNA, 22 nt, Human
ccuggaggcucugggagggcag

SEQ ID NO: 22473 - RNA, 16 nt, Human
ccuggaggucacuuca

SEQ ID NO: 22474 - RNA, 23 nt, Human
ccuggaguacuaaggggauggaa

SEQ ID NO: 22475 - RNA, 22 nt, Human
ccuggaguuuuuugguugacuc

SEQ ID NO: 22476 - RNA, 22 nt, Human
ccuggaucuuuguuguaaauau

SEQ ID NO: 22477 - RNA, 23 nt, Human
ccuggcacacaguugacauggaa

SEQ ID NO: 22478 - RNA, 22 nt, Human
ccuggcacauaguaaguacuag

SEQ ID NO: 22479 - RNA, 22 nt, Human
ccuggcacaugauagaugcuca

SEQ ID NO: 22480 - RNA, 22 nt, Human
ccuggcagaauauuaaagugca

SEQ ID NO: 22481 - RNA, 22 nt, Human
ccuggcagacagcacugaagcu

SEQ ID NO: 22482 - RNA, 22 nt, Human
ccuggcagcaggugggcccgug

SEQ ID NO: 22483 - RNA, 22 nt, Human
ccuggcagcuaagugcuuugag

SEQ ID NO: 22484 - RNA, 22 nt, Human
ccuggcaggccccuccuggauu

SEQ ID NO: 22485 - RNA, 22 nt, Human
ccuggcagguggagguugcagu

SEQ ID NO: 22486 - RNA, 22 nt, Human
ccuggcaugaggagcaugaggu

SEQ ID NO: 22487 - RNA, 22 nt, Human
ccuggcauucucuccagagaga

SEQ ID NO: 22488 - RNA, 22 nt, Human
ccuggccaaucuagggcuguua

SEQ ID NO: 22489 - RNA, 22 nt, Human
ccuggccacccagccuuggcca

SEQ ID NO: 22490 - RNA, 22 nt, Human
ccuggccacucagguguggggc

SEQ ID NO: 22491 - RNA, 19 nt, Human
ccuggccagacuucugccc

SEQ ID NO: 22492 - RNA, 22 nt, Human
ccuggccaggcauggagucaca

SEQ ID NO: 22493 - RNA, 22 nt, Human
ccuggccaggcucucagcacug

SEQ ID NO: 22494 - RNA, 22 nt, Human
ccuggccaguuuccaggcccug

SEQ ID NO: 22495 - RNA, 16 nt, Human
ccuggcccggcuuccu

SEQ ID NO: 22496 - RNA, 22 nt, Human
ccuggccgacauggugaaacgc

SEQ ID NO: 22497 - RNA, 22 nt, Human
ccuggccucagccuagggcuga

SEQ ID NO: 22498 - RNA, 22 nt, Human
ccuggccugcucggcucuuaag

SEQ ID NO: 22499 - RNA, 22 nt, Human
ccuggcucagcagcucuuucuc

SEQ ID NO: 22500 - RNA, 22 nt, Human
ccuggcuccagcugccuguccu

SEQ ID NO: 22501 - RNA, 22 nt, Human
ccuggcucccuggaccucauua

SEQ ID NO: 22502 - RNA, 22 nt, Human
ccuggcucuggggcggacagcu

SEQ ID NO: 22503 - RNA, 22 nt, Human
ccuggcucuggugaggagaagu

SEQ ID NO: 22504 - RNA, 22 nt, Human
ccuggcucuucugugucagccc

SEQ ID NO: 22505 - RNA, 22 nt, Human
ccuggcugaacaaagucccucc

SEQ ID NO: 22506 - RNA, 22 nt, Human
ccuggcugcucugaugagcgcc

SEQ ID NO: 22507 - RNA, 22 nt, Human
ccuggcugcugucacugaccau

SEQ ID NO: 22508 - RNA, 22 nt, Human
ccuggcugcuuccucugccaug

SEQ ID NO: 22509 - RNA, 22 nt, Human
ccuggcugcuuucacuauggag

SEQ ID NO: 22510 - RNA, 22 nt, Human
ccuggcuggauggagccccugg

SEQ ID NO: 22511 - RNA, 22 nt, Human
ccuggcugguggcagcgacaag

SEQ ID NO: 22512 - RNA, 22 nt, Human
ccuggcuuagagguugccuuuc

SEQ ID NO: 22513 - RNA, 22 nt, Human
ccuggcuuauuuuuauagcagu

SEQ ID NO: 22514 - RNA, 18 nt, Human
ccuggcuuccaucuuggu

SEQ ID NO: 22515 - RNA, 22 nt, Human
ccuggcuuccuggagcucacaa

SEQ ID NO: 22516 - RNA, 22 nt, Human
ccuggcuucuauaccaccaggu

SEQ ID NO: 22517 - RNA, 22 nt, Human
ccugggaacagcagaguccugg

SEQ ID NO: 22518 - RNA, 22 nt, Human
ccugggaacaguggguuggcuc

SEQ ID NO: 22519 - RNA, 22 nt, Human
ccugggaagagcugacaggagg

SEQ ID NO: 22520 - RNA, 22 nt, Human
ccugggaagcccauagcagcuu

SEQ ID NO: 22521 - RNA, 22 nt, Human
ccugggaaggugaggcccugga

SEQ ID NO: 22522 - RNA, 22 nt, Human
ccugggacuuggucugggguuu

SEQ ID NO: 22523 - RNA, 22 nt, Human
ccugggagagucuguggucucc

SEQ ID NO: 22524 - RNA, 21 nt, Human
ccugggagaucagcugccuuc

SEQ ID NO: 22525 - RNA, 22 nt, Human
ccugggagccgacugacugugc

SEQ ID NO: 22526 - RNA, 22 nt, Human
ccugggaggcagagguugcagu

SEQ ID NO: 22527 - RNA, 22 nt, Human
ccugggaggcggagguugcagu

SEQ ID NO: 22528 - RNA, 22 nt, Human
ccugggaggcuguuuccagccu

SEQ ID NO: 22529 - RNA, 22 nt, Human
ccugggaugaaagcagcccacu

SEQ ID NO: 22530 - RNA, 22 nt, Human
ccugggauuuccugagcacucu

SEQ ID NO: 22531 - RNA, 22 nt, Human
ccugggcaauauagugaggccc

SEQ ID NO: 22532 - RNA, 22 nt, Human
ccugggcagggagaccaggcuc

SEQ ID NO: 22533 - RNA, 22 nt, Human
ccugggcagggcuggacucuca

SEQ ID NO: 22534 - RNA, 22 nt, Human
ccugggcagguguggcuucccc

SEQ ID NO: 22535 - RNA, 22 nt, Human
ccugggcauaaaucacuccaag

SEQ ID NO: 22536 - RNA, 22 nt, Human
ccugggcaucaacaagcagaga

SEQ ID NO: 22537 - RNA, 22 nt, Human
ccugggcaucucaugcaccugc

SEQ ID NO: 22538 - RNA, 23 nt, Human
ccugggcauuggcugcagcuucu

SEQ ID NO: 22539 - RNA, 21 nt, Human
ccugggccaaauucccuggac

SEQ ID NO: 22540 - RNA, 19 nt, Human
ccugggccuccaucacccc

SEQ ID NO: 22541 - RNA, 22 nt, Human
ccugggccugaaaacauuucuc

SEQ ID NO: 22542 - RNA, 22 nt, Human
ccugggccuggcgggucggcuc

SEQ ID NO: 22543 - RNA, 22 nt, Human
ccugggcucacagccaaggcuc

SEQ ID NO: 22544 - RNA, 22 nt, Human
ccugggcucaggcuugggcagc

SEQ ID NO: 22545 - RNA, 22 nt, Human
ccugggcucuauccugacccag

SEQ ID NO: 22546 - RNA, 16 nt, Human
ccugggcucuguugga

SEQ ID NO: 22547 - RNA, 22 nt, Human
ccugggcugaagucaagugugg

SEQ ID NO: 22548 - RNA, 22 nt, Human
ccugggcuuacgaccucugacu

SEQ ID NO: 22549 - RNA, 22 nt, Human
ccugggcuuccacgagcagagg

SEQ ID NO: 22550 - RNA, 22 nt, Human
ccugggcuucugucuagauguu

SEQ ID NO: 22551 - RNA, 22 nt, Human
ccugggcuuuggaacaguacuu

SEQ ID NO: 22552 - RNA, 22 nt, Human
ccuggggaagucacuucucuuu

SEQ ID NO: 22553 - RNA, 22 nt, Human
ccuggggaauagagucaagggg

SEQ ID NO: 22554 - RNA, 22 nt, Human
ccuggggagccgccugagcccc

SEQ ID NO: 22555 - RNA, 22 nt, Human
ccuggggauucugacacggagu

SEQ ID NO: 22556 - RNA, 22 nt, Human
ccuggggcuccagagcagcgga

SEQ ID NO: 22557 - RNA, 22 nt, Human
ccugggguauauaggugaauau

SEQ ID NO: 22558 - RNA, 22 nt, Human
ccuggggucagggacgcugugc

SEQ ID NO: 22559 - RNA, 22 nt, Human
ccugggucccaucccagaguga

SEQ ID NO: 22560 - RNA, 22 nt, Human
ccuggguccuggcagccuccug

SEQ ID NO: 22561 - RNA, 22 nt, Human
ccugggucuauagacuucaaga

SEQ ID NO: 22562 - RNA, 22 nt, Human
ccugggucuggucacuaaguca

SEQ ID NO: 22563 - RNA, 22 nt, Human
ccugggucuucagucugcuggu

SEQ ID NO: 22564 - RNA, 22 nt, Human
ccugggugaaugauauucuaaa

SEQ ID NO: 22565 - RNA, 22 nt, Human
ccugggugacccgugagcgucc

SEQ ID NO: 22566 - RNA, 22 nt, Human
ccugggugaugugcugcccucg

SEQ ID NO: 22567 - RNA, 22 nt, Human
ccugggugcccggcccuucucu

SEQ ID NO: 22568 - RNA, 22 nt, Human
caggagcuggauaggaccacaa

SEQ ID NO: 22569 - RNA, 22 nt, Human
caggaggaaaguuccacucaac

SEQ ID NO: 22570 - RNA, 22 nt, Human
caggaggaacaagagguucugg

SEQ ID NO: 22571 - RNA, 22 nt, Human
ccuggugccacuagagaauguc

SEQ ID NO: 22572 - RNA, 22 nt, Human
ccuggugcccccaagccagcug

SEQ ID NO: 22573 - RNA, 22 nt, Human
ccugguuuaugccagauccugu

SEQ ID NO: 22574 - RNA, 22 nt, Human
ccugguuuguauuuuuaacacc

SEQ ID NO: 22575 - RNA, 22 nt, Human
ccugguuuuucaaacauacaag

SEQ ID NO: 22576 - RNA, 22 nt, Human
ccuguaacuccuuggcucaagu

SEQ ID NO: 22577 - RNA, 22 nt, Human
ccuguaccgcgaucugcugcgc

SEQ ID NO: 22578 - RNA, 22 nt, Human
ccuguacuagggucucauugcc

SEQ ID NO: 22579 - RNA, 22 nt, Human
ccuguagaaucuguagacccau

SEQ ID NO: 22580 - RNA, 22 nt, Human
ccuguaggaacgccuucauuug

SEQ ID NO: 22581 - RNA, 22 nt, Human
ccuguaggauauuguagaauac

SEQ ID NO: 22582 - RNA, 22 nt, Human
ccuguauuugcaacuuuucuua

SEQ ID NO: 22583 - RNA, 22 nt, Human
ccuguccagggacugagggaga

SEQ ID NO: 22584 - RNA, 22 nt, Human
ccugucccccaggccuguacca

SEQ ID NO: 22585 - RNA, 22 nt, Human
ccuguccccucacaaugccacu

SEQ ID NO: 22586 - RNA, 22 nt, Human
ccugucucccuggcauggcuca

SEQ ID NO: 22587 - RNA, 22 nt, Human
ccugucugcaugaucccugcca

SEQ ID NO: 22588 - RNA, 22 nt, Human
ccugucuggaacauggccuguu

SEQ ID NO: 22589 - RNA, 22 nt, Human
ccugucuggccuuccacggggg

SEQ ID NO: 22590 - RNA, 22 nt, Human
ccugucuguauugguuugcuau

SEQ ID NO: 22591 - RNA, 19 nt, Human
ccugucugucuucagcuag

SEQ ID NO: 22592 - RNA, 22 nt, Human
ccugucuguuugcccauucuug

SEQ ID NO: 22593 - RNA, 21 nt, Human
ccugucuuggacugaggcacc

SEQ ID NO: 22594 - RNA, 22 nt, Human
ccugugacaaacccgccuauuc

SEQ ID NO: 22595 - RNA, 18 nt, Human
ccugugacagaggcauca

SEQ ID NO: 22596 - RNA, 22 nt, Human
ccugugaccacucugguucugc

SEQ ID NO: 22597 - RNA, 22 nt, Human
ccugugacccuuccagucuacu

SEQ ID NO: 22598 - RNA, 22 nt, Human
ccugugaggucuugcaugugaa

SEQ ID NO: 22599 - RNA, 22 nt, Human
ccugugaugguguuacacuguu

SEQ ID NO: 22600 - RNA, 19 nt, Human
ccugugcacauguguccuu

SEQ ID NO: 22601 - RNA, 22 nt, Human
ccugugcauugcaggguguuca

SEQ ID NO: 22602 - RNA, 22 nt, Human
ccugugccaaaaucuaggcagu

SEQ ID NO: 22603 - RNA, 22 nt, Human
ccugugccuuaacccuuuaggc

SEQ ID NO: 22604 - RNA, 18 nt, Human
ccugugcuccagcaucug

SEQ ID NO: 22605 - RNA, 22 nt, Human
ccugugcucccuauguaucugg

SEQ ID NO: 22606 - RNA, 22 nt, Human
ccugugcuggcuuuauucucag

SEQ ID NO: 22607 - RNA, 22 nt, Human
ccuguggacauucuguguggaa

SEQ ID NO: 22608 - RNA, 21 nt, Human
ccuguggauuuuaaaauugga

SEQ ID NO: 22609 - RNA, 18 nt, Human
ccuguggcucagcccaca

SEQ ID NO: 22610 - RNA, 22 nt, Human
ccuguggcucucuuuggagguc

SEQ ID NO: 22611 - RNA, 22 nt, Human
ccugugggcccuggacagagac

SEQ ID NO: 22612 - RNA, 22 nt, Human
ccuguggggcugaaagaggcuu

SEQ ID NO: 22613 - RNA, 22 nt, Human
ccuguguccaguuccagguugu

SEQ ID NO: 22614 - RNA, 22 nt, Human
ccuguguggaaggcaggaggcc

SEQ ID NO: 22615 - RNA, 22 nt, Human
ccuguguggccgcacugcuccc

SEQ ID NO: 22616 - RNA, 22 nt, Human
ccugugugguagccagcggugc

SEQ ID NO: 22617 - RNA, 22 nt, Human
ccuguguguaggccaggggagu

SEQ ID NO: 22618 - RNA, 22 nt, Human
ccugugugucugucacugcaca

SEQ ID NO: 22619 - RNA, 21 nt, Human
ccugugugugucccuuuaaga

SEQ ID NO: 22620 - RNA, 17 nt, Human
ccuguguuugcuccuuc

SEQ ID NO: 22621 - RNA, 18 nt, Human
ccuguuacacacuggggu

SEQ ID NO: 22622 - RNA, 22 nt, Human
ccuguucaagggaugauugacc

SEQ ID NO: 22623 - RNA, 22 nt, Human
ccuguucaauauucuuccuugu

SEQ ID NO: 22624 - RNA, 22 nt, Human
ccuguucaaugcccuggcuuca

SEQ ID NO: 22625 - RNA, 21 nt, Human
ccuguucacagaucuguaacu

SEQ ID NO: 22626 - RNA, 22 nt, Human
ccuguucaccauggucacgugc

SEQ ID NO: 22627 - RNA, 22 nt, Human
ccuguucacgguguguuguuag

SEQ ID NO: 22628 - RNA, 19 nt, Human
ccuguucaugacucugucc

SEQ ID NO: 22629 - RNA, 22 nt, Human
ccuguuccauucauauccuauu

SEQ ID NO: 22630 - RNA, 22 nt, Human
ccuguucuaaucuuggggcaga

SEQ ID NO: 22631 - RNA, 22 nt, Human
ccuguucuugucucauuggcua

SEQ ID NO: 22632 - RNA, 22 nt, Human
ccuguugcucugcaugaguuua

SEQ ID NO: 22633 - RNA, 17 nt, Human
ccuguuguugccuuugc

SEQ ID NO: 22634 - RNA, 22 nt, Human
ccuguuguuuacugcagugagu

SEQ ID NO: 22635 - RNA, 22 nt, Human
ccuguuuagugaggugaggagu

SEQ ID NO: 22636 - RNA, 22 nt, Human
ccuuaaaagaacuaucucuucu

SEQ ID NO: 22637 - RNA, 22 nt, Human
ccuuaaacucugauaugauauu

SEQ ID NO: 22638 - RNA, 22 nt, Human
ccuuaaacuuuaucuugugaga

SEQ ID NO: 22639 - RNA, 22 nt, Human
ccuuaaagaauaagucuuaucu

SEQ ID NO: 22640 - RNA, 22 nt, Human
ccuuaaucugauauggcuggug

SEQ ID NO: 22641 - RNA, 22 nt, Human
ccuuaauuucuguccuucagau

SEQ ID NO: 22642 - RNA, 22 nt, Human
ccuuacaaugcaguuuacuuag

SEQ ID NO: 22643 - RNA, 22 nt, Human
ccuuagaaauguaccaaaggaa

SEQ ID NO: 22644 - RNA, 22 nt, Human
ccuuagcagggagucuguccag

SEQ ID NO: 22645 - RNA, 22 nt, Human
ccuuagcagggccgggccuggg

SEQ ID NO: 22646 - RNA, 22 nt, Human
ccuuagcuggagugguggaaug

SEQ ID NO: 22647 - RNA, 20 nt, Human
ccuucagaacuuacauagua

SEQ ID NO: 22648 - RNA, 22 nt, Human
ccuucagcguccccuuuacccg

SEQ ID NO: 22649 - RNA, 22 nt, Human
ccuucaggucauauaugucaga

SEQ ID NO: 22650 - RNA, 22 nt, Human
ccuucaugauggaaaggguuca

SEQ ID NO: 22651 - RNA, 22 nt, Human
ccuuccagaguucagucugccc

SEQ ID NO: 22652 - RNA, 22 nt, Human
ccuuccaggagucucugcaggu

SEQ ID NO: 22653 - RNA, 22 nt, Human
ccuuccaggcuggaggcuuggg

SEQ ID NO: 22654 - RNA, 22 nt, Human
ccuuccagugacuaaggaggaa

SEQ ID NO: 22655 - RNA, 22 nt, Human
ccuucccaggcuagaccaacau

SEQ ID NO: 22656 - RNA, 20 nt, Human
ccuuccccacccgcugaggu

SEQ ID NO: 22657 - RNA, 22 nt, Human
ccuuccccaggugcucacuguc

SEQ ID NO: 22658 - RNA, 22 nt, Human
ccuuccuuugcaggucagguca

SEQ ID NO: 22659 - RNA, 22 nt, Human
ccuuccuuugcaucauuucuag

SEQ ID NO: 22660 - RNA, 22 nt, Human
ccuuccuuuuacugucuccgga

SEQ ID NO: 22661 - RNA, 22 nt, Human
ccuucuccugccuuggguucau

SEQ ID NO: 22662 - RNA, 20 nt, Human
ccuucucuggaauugccucc

SEQ ID NO: 22663 - RNA, 18 nt, Human
ccuucugacgcuugagaa

SEQ ID NO: 22664 - RNA, 22 nt, Human
ccuucuucaccaguuuaccuga

SEQ ID NO: 22665 - RNA, 22 nt, Human
ccuucuucuguguggcccaaga

SEQ ID NO: 22666 - RNA, 22 nt, Human
ccuugacugccuucaggcuggg

SEQ ID NO: 22667 - RNA, 22 nt, Human
ccuugacuguaauggaguaggg

SEQ ID NO: 22668 - RNA, 22 nt, Human
ccuugagacacagccaaagaug

SEQ ID NO: 22669 - RNA, 22 nt, Human
ccuugagaugagcuaauuuuuu

SEQ ID NO: 22670 - RNA, 22 nt, Human
ccuugcagcauauagagucccu

SEQ ID NO: 22671 - RNA, 22 nt, Human
ccuugcaguuguuacuguagcc

SEQ ID NO: 22672 - RNA, 22 nt, Human
ccuugcccgcugccucugaguu

SEQ ID NO: 22673 - RNA, 19 nt, Human
ccuugccugucccugcagc

SEQ ID NO: 22674 - RNA, 22 nt, Human
ccuugcugaccaucaccuuuga

SEQ ID NO: 22675 - RNA, 22 nt, Human
ccuuggagacagguuugcuuuc

SEQ ID NO: 22676 - RNA, 22 nt, Human
ccuuggagcggucagcacuggu

SEQ ID NO: 22677 - RNA, 22 nt, Human
ccuuggauuuugugcccacgcc

SEQ ID NO: 22678 - RNA, 22 nt, Human
caggguuucaccauguuagcag

SEQ ID NO: 22679 - RNA, 22 nt, Human
cagguaacuuuagugaaagagc

SEQ ID NO: 22680 - RNA, 22 nt, Human
cagguagaggcugccaucagcu

SEQ ID NO: 22681 - RNA, 22 nt, Human
cagguagggauaugauggugau

SEQ ID NO: 22682 - RNA, 22 nt, Human
cagguagguauggugcagucuu

SEQ ID NO: 22683 - RNA, 22 nt, Human
cagguauaugugcauccauaga

SEQ ID NO: 22684 - RNA, 22 nt, Human
cagguccaauugcgcuaaaauc

SEQ ID NO: 22685 - RNA, 22 nt, Human
cagguccaguaaaaagaguccu

SEQ ID NO: 22686 - RNA, 17 nt, Human
caggucccagggucucu

SEQ ID NO: 22687 - RNA, 22 nt, Human
cagguccccaggguaccuaccu

SEQ ID NO: 22688 - RNA, 22 nt, Human
caggucccguuccccagagauu

SEQ ID NO: 22689 - RNA, 22 nt, Human
cagguccucgggggaggccggc

SEQ ID NO: 22690 - RNA, 22 nt, Human
cagguccugccuugguuacccu

SEQ ID NO: 22691 - RNA, 22 nt, Human
cagguccuuguuuguaaagcag

SEQ ID NO: 22692 - RNA, 22 nt, Human
caggucucggguucagcaguga

SEQ ID NO: 22693 - RNA, 22 nt, Human
caggucucuuuugucacaccac

SEQ ID NO: 22694 - RNA, 22 nt, Human
caggucugaagagucacaugcc

SEQ ID NO: 22695 - RNA, 22 nt, Human
caggucugcaggcuggagucca

SEQ ID NO: 22696 - RNA, 22 nt, Human
caggucuggguugauggccugg

SEQ ID NO: 22697 - RNA, 21 nt, Human
caggucuggugaacacucuca

SEQ ID NO: 22698 - RNA, 22 nt, Human
caggucuguauuaacagagggu

SEQ ID NO: 22699 - RNA, 18 nt, Human
caggucugucugccuccc

SEQ ID NO: 22700 - RNA, 22 nt, Human
caggugaaaaagcaaccauauu

SEQ ID NO: 22701 - RNA, 22 nt, Human
caggugaacucaguuuuguauu

SEQ ID NO: 22702 - RNA, 22 nt, Human
caggugacccucaguguggacu

SEQ ID NO: 22703 - RNA, 17 nt, Human
caggugaccuggugaug

SEQ ID NO: 22704 - RNA, 22 nt, Human
caggugccgggaaugcagcaau

SEQ ID NO: 22705 - RNA, 22 nt, Human
cagggucugaaacugaucacag

SEQ ID NO: 22706 - RNA, 22 nt, Human
cagggugacugcccuggccacu

SEQ ID NO: 22707 - RNA, 22 nt, Human
cagggugagugggaagcagcgu

SEQ ID NO: 22708 - RNA, 22 nt, Human
cagggugcagugucgcugcuag

SEQ ID NO: 22709 - RNA, 22 nt, Human
cagggugccuguccucagcaaa

SEQ ID NO: 22710 - RNA, 22 nt, Human
cagggugcgggagaugugcacc

SEQ ID NO: 22711 - RNA, 22 nt, Human
cagggugcuuagaaauggaccu

SEQ ID NO: 22712 - RNA, 22 nt, Human
cagggugggcacccagccucca

SEQ ID NO: 22713 - RNA, 22 nt, Human
caggguggggcuggcuaucaaa

SEQ ID NO: 22714 - RNA, 22 nt, Human
caggguguauaguguagaaguu

SEQ ID NO: 22715 - RNA, 22 nt, Human
caggguucagugggcccucuug

SEQ ID NO: 22716 - RNA, 22 nt, Human
caggguugauuccuucugaggg

SEQ ID NO: 22717 - RNA, 22 nt, Human
caggguugguuucuccucaggc

SEQ ID NO: 22718 - RNA, 22 nt, Human
cagguaagagacggauuggccc

SEQ ID NO: 22719 - RNA, 22 nt, Human
cagguacacaggacaaaguacu

SEQ ID NO: 22720 - RNA, 17 nt, Human
cagguacauugcuacug

SEQ ID NO: 22721 - RNA, 22 nt, Human
cagguagcugcagagacuauuu

SEQ ID NO: 22722 - RNA, 22 nt, Human
cagguagcugcuggccauguac

SEQ ID NO: 22723 - RNA, 22 nt, Human
cagguagcuuuugauauuaggg

SEQ ID NO: 22724 - RNA, 22 nt, Human
cagguagguuuuaggcuaaaca

SEQ ID NO: 22725 - RNA, 22 nt, Human
cagguaguccacagugagggag

SEQ ID NO: 22726 - RNA, 22 nt, Human
cagguauaacgugcauguugua

SEQ ID NO: 22727 - RNA, 23 nt, Human
cagguauugauuuuucuucuagg

SEQ ID NO: 22728 - RNA, 22 nt, Human
caggucaaagguuaguuauguu

SEQ ID NO: 22729 - RNA, 22 nt, Human
caggucagcuggugccccaggu

SEQ ID NO: 22730 - RNA, 22 nt, Human
cagguccaagagauccuccuac

SEQ ID NO: 22731 - RNA, 22 nt, Human
cagguccaagguuccugaauag

SEQ ID NO: 22732 - RNA, 22 nt, Human
caggucccgccccgggcugacc

SEQ ID NO: 22733 - RNA, 22 nt, Human
caggucccugcgccccggccuc

SEQ ID NO: 22734 - RNA, 22 nt, Human
cagguccucacgccucacccuu

SEQ ID NO: 22735 - RNA, 22 nt, Human
cagguccucugagaugggaggu

SEQ ID NO: 22736 - RNA, 22 nt, Human
cagguccuggcaucaggcaggu

SEQ ID NO: 22737 - RNA, 22 nt, Human
caggucuccagcucagggucca

SEQ ID NO: 22738 - RNA, 22 nt, Human
caggucuccauuuugaugaguu

SEQ ID NO: 22739 - RNA, 22 nt, Human
caggucucccauccccucuguu

SEQ ID NO: 22740 - RNA, 22 nt, Human
caggucucugcagccccucugu

SEQ ID NO: 22741 - RNA, 17 nt, Human
caggucugaggccaggc

SEQ ID NO: 22742 - RNA, 22 nt, Human
caggucugugugccauuuccaa

SEQ ID NO: 22743 - RNA, 22 nt, Human
caggucuguuuccaucagugcu

SEQ ID NO: 22744 - RNA, 22 nt, Human
caggucuguuuucaaggucagu

SEQ ID NO: 22745 - RNA, 22 nt, Human
caggucuuuucuacugguggag

SEQ ID NO: 22746 - RNA, 22 nt, Human
caggugaaucacuugaguccag

SEQ ID NO: 22747 - RNA, 22 nt, Human
caggugacccucucaccugcuu

SEQ ID NO: 22748 - RNA, 22 nt, Human
caggugacuucugaggccuuca

SEQ ID NO: 22749 - RNA, 22 nt, Human
caggugagaggcgguccugcau

SEQ ID NO: 22750 - RNA, 22 nt, Human
caggugaguuugcuauuguaca

SEQ ID NO: 22751 - RNA, 22 nt, Human
caggugcaaugagacagcucug

SEQ ID NO: 22752 - RNA, 22 nt, Human
caggugcucugcugcagguaag

SEQ ID NO: 22753 - RNA, 22 nt, Human
caggugcugcagggcuggcguc

SEQ ID NO: 22754 - RNA, 22 nt, Human
caggugcugcguggcggagcug

SEQ ID NO: 22755 - RNA, 22 nt, Human
cagguggccuugccaucuccug

SEQ ID NO: 22756 - RNA, 22 nt, Human
cagguggcuuagucccauuuua

SEQ ID NO: 22757 - RNA, 22 nt, Human
caggugggagccacagcguaca

SEQ ID NO: 22758 - RNA, 22 nt, Human
caggugggccaugaaaaaugac

SEQ ID NO: 22759 - RNA, 22 nt, Human
caggugggcuugggagaacacu

SEQ ID NO: 22760 - RNA, 18 nt, Human
caggugggucuccugccc

SEQ ID NO: 22761 - RNA, 22 nt, Human
caggugguacuuaaagucagaa

SEQ ID NO: 22762 - RNA, 22 nt, Human
caggugguuccauguuucauga

SEQ ID NO: 22763 - RNA, 22 nt, Human
caggugucggucaggcgguuuu

SEQ ID NO: 22764 - RNA, 22 nt, Human
cagguuagcaacaugguuagag

SEQ ID NO: 22765 - RNA, 22 nt, Human
cagguuaguaaggucuacauaa

SEQ ID NO: 22766 - RNA, 22 nt, Human
cagguuaguuaaucuuuguuuc

SEQ ID NO: 22767 - RNA, 22 nt, Human
cagguucagcaggaggcauccc

SEQ ID NO: 22768 - RNA, 22 nt, Human
cagguucccuagcagcaaagcc

SEQ ID NO: 22769 - RNA, 22 nt, Human
cagguucugccauuuacuugua

SEQ ID NO: 22770 - RNA, 22 nt, Human
cagguugaaaguggaggagcua

SEQ ID NO: 22771 - RNA, 22 nt, Human
cagguugggcugcgaggaggag

SEQ ID NO: 22772 - RNA, 22 nt, Human
cagguuggggacuuaggaugac

SEQ ID NO: 22773 - RNA, 22 nt, Human
caguaaaagauggaaauagaau

SEQ ID NO: 22774 - RNA, 22 nt, Human
caguaaacaguuacuaagaaga

SEQ ID NO: 22775 - RNA, 22 nt, Human
caguaaauccuagagcccucau

SEQ ID NO: 22776 - RNA, 22 nt, Human
caguaaaugguacguauauuuu

SEQ ID NO: 22777 - RNA, 22 nt, Human
caguaaauguccucgcagggaa

SEQ ID NO: 22778 - RNA, 22 nt, Human
caguaaauuaucucaucucugu

SEQ ID NO: 22779 - RNA, 22 nt, Human
caguaacaggcucugugguaua

SEQ ID NO: 22780 - RNA, 22 nt, Human
caguaacauuucaagguagagg

SEQ ID NO: 22781 - RNA, 22 nt, Human
caguaacugaugugaucaaacg

SEQ ID NO: 22782 - RNA, 22 nt, Human
caguaagaauaugaaucaggau

SEQ ID NO: 22783 - RNA, 22 nt, Human
caguaaggaugcacauaacuag

SEQ ID NO: 22784 - RNA, 22 nt, Human
caguaagucaacaaacaugggg

SEQ ID NO: 22785 - RNA, 22 nt, Human
caguaauaaagcuaaguauuuc

SEQ ID NO: 22786 - RNA, 22 nt, Human
caguaauaagcuggagggugug

SEQ ID NO: 22787 - RNA, 22 nt, Human
caguggaugguuugucuugccu

SEQ ID NO: 22788 - RNA, 22 nt, Human
caguggauuagccagagcugga

SEQ ID NO: 22789 - RNA, 22 nt, Human
caguggcaaggacaguaauaau

SEQ ID NO: 22790 - RNA, 22 nt, Human
caguggcaaugggacagagcac

SEQ ID NO: 22791 - RNA, 22 nt, Human
caguggcacccacgggcugggc

SEQ ID NO: 22792 - RNA, 22 nt, Human
caguggcacuugucauuucuga

SEQ ID NO: 22793 - RNA, 22 nt, Human
caguggcagagaacagagaccu

SEQ ID NO: 22794 - RNA, 22 nt, Human
caguggcaggauuucagcucag

SEQ ID NO: 22795 - RNA, 22 nt, Human
caguggcauacuuggcugauau

SEQ ID NO: 22796 - RNA, 22 nt, Human
caguggcaugguugacugcagu

SEQ ID NO: 22797 - RNA, 17 nt, Human
caguggccuauggcuuu

SEQ ID NO: 22798 - RNA, 22 nt, Human
caguggccucuggcuuugcugu

SEQ ID NO: 22799 - RNA, 22 nt, Human
caguggcugagaguggacacug

SEQ ID NO: 22800 - RNA, 20 nt, Human
caguggcugauaacaaauua

SEQ ID NO: 22801 - RNA, 22 nt, Human
caguggcuucucaugucauuca

SEQ ID NO: 22802 - RNA, 20 nt, Human
caguggcuucuguggaauau

SEQ ID NO: 22803 - RNA, 23 nt, Human
cagugggaggacugagauaaaac

SEQ ID NO: 22804 - RNA, 22 nt, Human
cagugggguuucugugggugcu

SEQ ID NO: 22805 - RNA, 22 nt, Human
caguggguggcuaaguggcuga

SEQ ID NO: 22806 - RNA, 22 nt, Human
cagugguacucucagauguuua

SEQ ID NO: 22807 - RNA, 22 nt, Human
cagugguagaagccaaguagau

SEQ ID NO: 22808 - RNA, 17 nt, Human
caguggucugagguaug

SEQ ID NO: 22809 - RNA, 22 nt, Human
cagugguggaaugaggaauugu

SEQ ID NO: 22810 - RNA, 22 nt, Human
cagugguugucagcaacaauau

SEQ ID NO: 22811 - RNA, 22 nt, Human
cagugguuuaggucaaggggag

SEQ ID NO: 22812 - RNA, 22 nt, Human
cagugguuuccaaacuuguucc

SEQ ID NO: 22813 - RNA, 22 nt, Human
caguguaagaauucaaagccua

SEQ ID NO: 22814 - RNA, 22 nt, Human
caguguacuuggaauguaacag

SEQ ID NO: 22815 - RNA, 22 nt, Human
caguguccucagccagcagcua

SEQ ID NO: 22816 - RNA, 22 nt, Human
cagugucucccccagguucugu

SEQ ID NO: 22817 - RNA, 22 nt, Human
cagugucuuauuuguagcucag

SEQ ID NO: 22818 - RNA, 22 nt, Human
cagugucuuucagacucagaaa

SEQ ID NO: 22819 - RNA, 22 nt, Human
cagugugacuucugagcugcca

SEQ ID NO: 22820 - RNA, 22 nt, Human
cagugugaggaauuagugucca

SEQ ID NO: 22821 - RNA, 22 nt, Human
cagugugcugcagagaacauuu

SEQ ID NO: 22822 - RNA, 19 nt, Human
cuccuggcucugucauuuu

SEQ ID NO: 22823 - RNA, 18 nt, Human
cuccuggcugauggugag

SEQ ID NO: 22824 - RNA, 22 nt, Human
cuccugggaaaugaaggggcag

SEQ ID NO: 22825 - RNA, 22 nt, Human
cuccugggaggaugcggacccg

SEQ ID NO: 22826 - RNA, 22 nt, Human
cuccugggaugacucuuucuuu

SEQ ID NO: 22827 - RNA, 22 nt, Human
cuccugggcucauaucauucag

SEQ ID NO: 22828 - RNA, 22 nt, Human
cuccugggcugucggcgcucug

SEQ ID NO: 22829 - RNA, 22 nt, Human
cuccuggggccauggaaggaac

SEQ ID NO: 22830 - RNA, 22 nt, Human
cuccugggucauugccagcaaa

SEQ ID NO: 22831 - RNA, 20 nt, Human
cuccugguccaggagccuga

SEQ ID NO: 22832 - RNA, 22 nt, Human
cuccuguggcuuucugauuuca

SEQ ID NO: 22833 - RNA, 22 nt, Human
cuccugugguacucccagggcc

SEQ ID NO: 22834 - RNA, 22 nt, Human
cuccuguggucaagggugggac

SEQ ID NO: 22835 - RNA, 22 nt, Human
cuccuuagugccucugcacgag

SEQ ID NO: 22836 - RNA, 22 nt, Human
cuccuucagucugcguggcugu

SEQ ID NO: 22837 - RNA, 22 nt, Human
cuccuucaugucauguguccgg

SEQ ID NO: 22838 - RNA, 19 nt, Human
cuccuucccugguuucugu

SEQ ID NO: 22839 - RNA, 22 nt, Human
cuccuucccuucaaguguuccu

SEQ ID NO: 22840 - RNA, 22 nt, Human
cuccuuccugguuagcaccuua

SEQ ID NO: 22841 - RNA, 22 nt, Human
cuccuugguguaguacugagca

SEQ ID NO: 22842 - RNA, 22 nt, Human
cucgagagauccucuugccacc

SEQ ID NO: 22843 - RNA, 22 nt, Human
cucgcaggacagugcuaggacu

SEQ ID NO: 22844 - RNA, 22 nt, Human
cucgccugccugugucucuccc

SEQ ID NO: 22845 - RNA, 22 nt, Human
cucgcggcgcccgaagcccuug

SEQ ID NO: 22846 - RNA, 22 nt, Human
cucggagaugcuggcugagauc

SEQ ID NO: 22847 - RNA, 22 nt, Human
cucgggcaggagggcccucucc

SEQ ID NO: 22848 - RNA, 22 nt, Human
cucguugcugaagccaaaguca

SEQ ID NO: 22849 - RNA, 22 nt, Human
cucuaaauccacgguauaguug

SEQ ID NO: 22850 - RNA, 22 nt, Human
cucuaaggaacucccccaaacu

SEQ ID NO: 22851 - RNA, 22 nt, Human
cucuacuccaaaaggcuacaau

SEQ ID NO: 22852 - RNA, 21 nt, Human
cucuagaaaucgaauaaccuu

SEQ ID NO: 22853 - RNA, 22 nt, Human
cucuagaacugauugggaagaa

SEQ ID NO: 22854 - RNA, 22 nt, Human
cucuagaagcugaggggcccaa

SEQ ID NO: 22855 - RNA, 22 nt, Human
cucuagaaugaauuagcgcagg

SEQ ID NO: 22856 - RNA, 22 nt, Human
cucuagaggcuugaaugggcga

SEQ ID NO: 22857 - RNA, 22 nt, Human
cucuagcuuuugauaccagugu

SEQ ID NO: 22858 - RNA, 22 nt, Human
cucuagggcucugugagguugg

SEQ ID NO: 22859 - RNA, 22 nt, Human
cucuagggugcaggccccagga

SEQ ID NO: 22860 - RNA, 22 nt, Human
cucuauuuauggcaucuuuaug

SEQ ID NO: 22861 - RNA, 20 nt, Human
cucucacagcucccucagcc

SEQ ID NO: 22862 - RNA, 22 nt, Human
cucucagauggagugugaaugg

SEQ ID NO: 22863 - RNA, 22 nt, Human
cucucagguagagcccaagaau

SEQ ID NO: 22864 - RNA, 22 nt, Human
cucucaguccugcgcgccucug

SEQ ID NO: 22865 - RNA, 22 nt, Human
cucucagugccacacagccauu

SEQ ID NO: 22866 - RNA, 22 nt, Human
cucucagugccugcccuaggcu

SEQ ID NO: 22867 - RNA, 23 nt, Human
cucuccaccuucccacccaggga

SEQ ID NO: 22868 - RNA, 22 nt, Human
cucuccagaauuauuacuauua

SEQ ID NO: 22869 - RNA, 22 nt, Human
cucuccagagcccuuccggccc

SEQ ID NO: 22870 - RNA, 22 nt, Human
cucuccagcagauguagucugu

SEQ ID NO: 22871 - RNA, 22 nt, Human
cucuccagccaggggcuuccug

SEQ ID NO: 22872 - RNA, 22 nt, Human
cucuccagccuuuagcccacgc

SEQ ID NO: 22873 - RNA, 19 nt, Human
cucuccagcuccaguagcu

SEQ ID NO: 22874 - RNA, 22 nt, Human
cucuccaggagcucagagucua

SEQ ID NO: 22875 - RNA, 22 nt, Human
cucuccagggcaugaguuccac

SEQ ID NO: 22876 - RNA, 21 nt, Human
cucuccagguaggauaaaugu

SEQ ID NO: 22877 - RNA, 22 nt, Human
cucuccagucaggaacucugac

SEQ ID NO: 22878 - RNA, 22 nt, Human
cucuccagucauauucucaguc

SEQ ID NO: 22879 - RNA, 22 nt, Human
cucuccaguuaccuaggucuga

SEQ ID NO: 22880 - RNA, 22 nt, Human
cucuccaguuauagcugauuug

SEQ ID NO: 22881 - RNA, 22 nt, Human
cucucccccacagcagccuucu

SEQ ID NO: 22882 - RNA, 23 nt, Human
cucucccccuuugauguuagcuc

SEQ ID NO: 22883 - RNA, 22 nt, Human
cucucccuggccagcugugcag

SEQ ID NO: 22884 - RNA, 22 nt, Human
cucucccuugggugggcuuugg

SEQ ID NO: 22885 - RNA, 22 nt, Human
cucuccuauugugugguaagga

SEQ ID NO: 22886 - RNA, 20 nt, Human
cucuccucacccgugucagg

SEQ ID NO: 22887 - RNA, 22 nt, Human
cucuccugguguggaggacagg

SEQ ID NO: 22888 - RNA, 22 nt, Human
cucuccuugaggcuuggacuuc

SEQ ID NO: 22889 - RNA, 22 nt, Human
cucucgcgugugccuuuccgcu

SEQ ID NO: 22890 - RNA, 22 nt, Human
cucucugaggaaggagcaucug

SEQ ID NO: 22891 - RNA, 22 nt, Human
cucucugaggcaggccuguggg

SEQ ID NO: 22892 - RNA, 22 nt, Human
cucucugagugagggacaagcu

SEQ ID NO: 22893 - RNA, 22 nt, Human
cucucugcuguauccuuaggcu

SEQ ID NO: 22894 - RNA, 21 nt, Human
cucucugcuuaugaauaguga

SEQ ID NO: 22895 - RNA, 20 nt, Human
cucucuggaaggugggagcc

SEQ ID NO: 22896 - RNA, 22 nt, Human
ucugaaauagaagugucuuucu

SEQ ID NO: 22897 - RNA, 22 nt, Human
ucugaaauauauuuugaguguu

SEQ ID NO: 22898 - RNA, 22 nt, Human
ucugaaauccuuuaucuuggcu

SEQ ID NO: 22899 - RNA, 22 nt, Human
ucugaaaucuaaugcucugugg

SEQ ID NO: 22900 - RNA, 22 nt, Human
ucugaaauggcagcgggaauga

SEQ ID NO: 22901 - RNA, 22 nt, Human
ucugaaauggcgauggccguug

SEQ ID NO: 22902 - RNA, 22 nt, Human
ucugaacagaaaagaugcacaa

SEQ ID NO: 22903 - RNA, 19 nt, Human
ucugaagaauuagagagca

SEQ ID NO: 22904 - RNA, 22 nt, Human
ucugaagagaaugcugcugaac

SEQ ID NO: 22905 - RNA, 22 nt, Human
ucugaagagucaucuuugggug

SEQ ID NO: 22906 - RNA, 22 nt, Human
ucugaagcacugcaaugcuuua

SEQ ID NO: 22907 - RNA, 22 nt, Human
ucugaagccuuuguacaggccu

SEQ ID NO: 22908 - RNA, 22 nt, Human
ucugaagcuggaggaagcuuug

SEQ ID NO: 22909 - RNA, 22 nt, Human
ucugaaggaaaaggguagauau

SEQ ID NO: 22910 - RNA, 22 nt, Human
ucugaagggcugaguggaggag

SEQ ID NO: 22911 - RNA, 19 nt, Human
ucugaaguccagggcauac

SEQ ID NO: 22912 - RNA, 22 nt, Human
ucugaauagagagagguccuuu

SEQ ID NO: 22913 - RNA, 22 nt, Human
ucugaauaguauauugaaagca

SEQ ID NO: 22914 - RNA, 22 nt, Human
ucugaauauguuuaucaucucu

SEQ ID NO: 22915 - RNA, 18 nt, Human
ucugaauauuaugcagug

SEQ ID NO: 22916 - RNA, 22 nt, Human
ucugaauucuuagaauuaaagg

SEQ ID NO: 22917 - RNA, 22 nt, Human
ucugaauuuuaacuacacaaag

SEQ ID NO: 22918 - RNA, 22 nt, Human
ucugaauuuugaugugcauuga

SEQ ID NO: 22919 - RNA, 22 nt, Human
ucugacaagucaagucuugacu

SEQ ID NO: 22920 - RNA, 22 nt, Human
ucugacaauaacugaguuuaac

SEQ ID NO: 22921 - RNA, 22 nt, Human
ucugacaaugaacaaucuauag

SEQ ID NO: 22922 - RNA, 22 nt, Human
ucugacaauuagccuaguccug

SEQ ID NO: 22923 - RNA, 22 nt, Human
ucugacaggauuuuuucaggca

SEQ ID NO: 22924 - RNA, 22 nt, Human
ucugacagguugggauauggaa

SEQ ID NO: 22925 - RNA, 22 nt, Human
ucugacaugagggcuguggaga

SEQ ID NO: 22926 - RNA, 20 nt, Human
ucugacccagagcccaggcu

SEQ ID NO: 22927 - RNA, 22 nt, Human
ucugacccagauggcaccgugg

SEQ ID NO: 22928 - RNA, 23 nt, Human
ucugaccucguuugcuguguucu

SEQ ID NO: 22929 - RNA, 22 nt, Human
ucugacuucuucauccuugcca

SEQ ID NO: 22930 - RNA, 22 nt, Human
ucugacuugcaucuuaaaggag

SEQ ID NO: 22931 - RNA, 22 nt, Human
ucugagaacauaaauugacuuc

SEQ ID NO: 22932 - RNA, 22 nt, Human
ucugagaacaugcuuugaucau

SEQ ID NO: 22933 - RNA, 22 nt, Human
ucugagaagcgugucucuguuu

SEQ ID NO: 22934 - RNA, 22 nt, Human
ucugagaaggguaggcuccauu

SEQ ID NO: 22935 - RNA, 22 nt, Human
ucugagaauagugccacugugg

SEQ ID NO: 22936 - RNA, 22 nt, Human
ucugagaauggagcuaaaaauc

SEQ ID NO: 22937 - RNA, 22 nt, Human
ucugagacacucuugugauggg

SEQ ID NO: 22938 - RNA, 22 nt, Human
ucugagacccauacaggcccac

SEQ ID NO: 22939 - RNA, 22 nt, Human
ucugagacuucugaagcuagaa

SEQ ID NO: 22940 - RNA, 20 nt, Human
ucugagacuuguagugugga

SEQ ID NO: 22941 - RNA, 22 nt, Human
ucugagacuuuaaccuggggcc

SEQ ID NO: 22942 - RNA, 23 nt, Human
ucugagagaacaaugccuccuau

SEQ ID NO: 22943 - RNA, 22 nt, Human
ucugagagagcaccuauccacu

SEQ ID NO: 22944 - RNA, 22 nt, Human
ucugagaggauuccugucccga

SEQ ID NO: 22945 - RNA, 22 nt, Human
ucugagaguacgggcugcgcgc

SEQ ID NO: 22946 - RNA, 20 nt, Human
ucugagagucugagugauga

SEQ ID NO: 22947 - RNA, 22 nt, Human
ucugagauuuguauggugagac

SEQ ID NO: 22948 - RNA, 22 nt, Human
ucugagcagagcaucauuucag

SEQ ID NO: 22949 - RNA, 22 nt, Human
ucugagcauugaauuuucuucc

SEQ ID NO: 22950 - RNA, 22 nt, Human
ucugagccagccaccuccuuca

SEQ ID NO: 22951 - RNA, 22 nt, Human
ucugagccccuagaacugagcg

SEQ ID NO: 22952 - RNA, 22 nt, Human
ucugagcuagaaaguaugcccu

SEQ ID NO: 22953 - RNA, 22 nt, Human
ucugagcugccccuuuacuuug

SEQ ID NO: 22954 - RNA, 22 nt, Human
ucugagcuggagcccaucaccu

SEQ ID NO: 22955 - RNA, 22 nt, Human
ucugagcugggggccuggcaug

SEQ ID NO: 22956 - RNA, 22 nt, Human
ucugagcugggucuugacagcu

SEQ ID NO: 22957 - RNA, 22 nt, Human
ucugagcuguaaguagacaagg

SEQ ID NO: 22958 - RNA, 22 nt, Human
ucugagcugugaguugcuuagg

SEQ ID NO: 22959 - RNA, 22 nt, Human
ucugagcuguggccauucuucc

SEQ ID NO: 22960 - RNA, 22 nt, Human
ucugagcuuacucagggauaca

SEQ ID NO: 22961 - RNA, 22 nt, Human
ucugaggaaucuugacacauuu

SEQ ID NO: 22962 - RNA, 22 nt, Human
ucugaggacagugcugugccug

SEQ ID NO: 22963 - RNA, 22 nt, Human
ucugaggaucugaagggaacag

SEQ ID NO: 22964 - RNA, 23 nt, Human
ucugaggaugaaggauagcaagu

SEQ ID NO: 22965 - RNA, 22 nt, Human
ucugaggcauaaccuguucugc

SEQ ID NO: 22966 - RNA, 22 nt, Human
ucugaggcauuuaauuaugacc

SEQ ID NO: 22967 - RNA, 22 nt, Human
ucugaggcccaguucaacucuu

SEQ ID NO: 22968 - RNA, 22 nt, Human
ucugaggcuaagagacagaggc

SEQ ID NO: 22969 - RNA, 22 nt, Human
ucugaggcugucucugggcucc

SEQ ID NO: 22970 - RNA, 22 nt, Human
ucugagggaauagcuauuguag

SEQ ID NO: 22971 - RNA, 22 nt, Human
ucugaggggcuggaagggcugc

SEQ ID NO: 22972 - RNA, 22 nt, Human
ucugagggugggagaaggagcu

SEQ ID NO: 22973 - RNA, 22 nt, Human
ucugaggguuguagagagggac

SEQ ID NO: 22974 - RNA, 22 nt, Human
ucugagguccuacuauaagugg

SEQ ID NO: 22975 - RNA, 18 nt, Human
ucugagguggacgaggag

SEQ ID NO: 22976 - RNA, 22 nt, Human
ucugagguuaauccugcugcau

SEQ ID NO: 22977 - RNA, 22 nt, Human
ucugagugagggugugagauau

SEQ ID NO: 22978 - RNA, 22 nt, Human
ucugagugaguguaggccugac

SEQ ID NO: 22979 - RNA, 22 nt, Human
ucuuugaacuuuuuguaaguua

SEQ ID NO: 22980 - RNA, 22 nt, Human
ucuuugaaguuccccuggaaga

SEQ ID NO: 22981 - RNA, 22 nt, Human
ucuuugaaguugaaguaguugg

SEQ ID NO: 22982 - RNA, 22 nt, Human
ucuuugaauuucugacugucuu

SEQ ID NO: 22983 - RNA, 22 nt, Human
ucuuugaccaaauuauccuguu

SEQ ID NO: 22984 - RNA, 22 nt, Human
ucuuugcaacucccauuuccau

SEQ ID NO: 22985 - RNA, 22 nt, Human
ucuuugcaggccaaauuguuaa

SEQ ID NO: 22986 - RNA, 22 nt, Human
ucuuugcauuuuaugccguuau

SEQ ID NO: 22987 - RNA, 22 nt, Human
ucuuugcucuuacacaguuagu

SEQ ID NO: 22988 - RNA, 22 nt, Human
ucuuuggaauuugcuggaaaua

SEQ ID NO: 22989 - RNA, 22 nt, Human
ucuuuggaucucaagguggcag

SEQ ID NO: 22990 - RNA, 22 nt, Human
ucuuuggauuaaaauauuugua

SEQ ID NO: 22991 - RNA, 22 nt, Human
ucuuuggcaucagggccagcua

SEQ ID NO: 22992 - RNA, 22 nt, Human
ucuuuggcuaugauuuacuguu

SEQ ID NO: 22993 - RNA, 19 nt, Human
ucuuuggcuucuggaucag

SEQ ID NO: 22994 - RNA, 22 nt, Human
ucuuuggucagaaagauuacac

SEQ ID NO: 22995 - RNA, 22 nt, Human
ucuuuguaagaaauucuuccgu

SEQ ID NO: 22996 - RNA, 19 nt, Human
ucuuuguacaagucucugc

SEQ ID NO: 22997 - RNA, 20 nt, Human
ucuuuguuaauuuuaucucc

SEQ ID NO: 22998 - RNA, 22 nt, Human
ucuuuguuauugcuuuaucuau

SEQ ID NO: 22999 - RNA, 22 nt, Human
ucuuuguuggaguccaaggaua

SEQ ID NO: 23000 - RNA, 22 nt, Human
ucuuuguuuguacuguuagaau

SEQ ID NO: 23001 - RNA, 22 nt, Human
ucuuuuauagugaauuuucuug

SEQ ID NO: 23002 - RNA, 22 nt, Human
ucuuuucacaaaggagcuggag

SEQ ID NO: 23003 - RNA, 19 nt, Human
ucuuuucacgcauuuugaa

SEQ ID NO: 23004 - RNA, 22 nt, Human
ucuuuucaucauuuaauaggua

SEQ ID NO: 23005 - RNA, 22 nt, Human
ucucacaggugcacguggcugu

SEQ ID NO: 23006 - RNA, 22 nt, Human
ucucacaguaugaauuguucac

SEQ ID NO: 23007 - RNA, 22 nt, Human
ucucacaguuguccacugaaaa

SEQ ID NO: 23008 - RNA, 19 nt, Human
ucucacaguuuccuugccu

SEQ ID NO: 23009 - RNA, 19 nt, Human
ucucacaucagcuccuagc

SEQ ID NO: 23010 - RNA, 22 nt, Human
ucucacauuucauugacagcug

SEQ ID NO: 23011 - RNA, 22 nt, Human
ucucacuggguauaaaugagua

SEQ ID NO: 23012 - RNA, 22 nt, Human
ucucagaaaaacuuugagggua

SEQ ID NO: 23013 - RNA, 22 nt, Human
ucucagaaaaaggagaaacugg

SEQ ID NO: 23014 - RNA, 23 nt, Human
ucucagaaaggagaaguaauuug

SEQ ID NO: 23015 - RNA, 22 nt, Human
ucucagaaaugacaggagguac

SEQ ID NO: 23016 - RNA, 22 nt, Human
ucucagaacacccuucuauggu

SEQ ID NO: 23017 - RNA, 22 nt, Human
ucucagaaggcaagggcugggg

SEQ ID NO: 23018 - RNA, 22 nt, Human
ucucagaaggguggugcuggag

SEQ ID NO: 23019 - RNA, 22 nt, Human
ucucagaagugaucaggauguu

SEQ ID NO: 23020 - RNA, 22 nt, Human
ucucagaaucaggaccuacuuc

SEQ ID NO: 23021 - RNA, 19 nt, Human
ucucagaauuaagagugcu

SEQ ID NO: 23022 - RNA, 23 nt, Human
ucucagacccgaagccagaggaa

SEQ ID NO: 23023 - RNA, 22 nt, Human
ucucagagaaaugugucaccau

SEQ ID NO: 23024 - RNA, 22 nt, Human
ucucagagauuuuguuucccuu

SEQ ID NO: 23025 - RNA, 22 nt, Human
ucucagagcuucagaaagcacc

SEQ ID NO: 23026 - RNA, 19 nt, Human
ucucagaggaaaaauugcu

SEQ ID NO: 23027 - RNA, 23 nt, Human
ucucagaggauuccugggccuug

SEQ ID NO: 23028 - RNA, 22 nt, Human
ucucagagggaaaggccaauuu

SEQ ID NO: 23029 - RNA, 22 nt, Human
ucucagaggucuucagccucug

SEQ ID NO: 23030 - RNA, 22 nt, Human
ucucagagugacaaugagaauu

SEQ ID NO: 23031 - RNA, 22 nt, Human
ucucagaguuccucuggagucc

SEQ ID NO: 23032 - RNA, 22 nt, Human
ucucagauggcaucagcuagag

SEQ ID NO: 23033 - RNA, 22 nt, Human
ucucagcaaggaaagaggcagg

SEQ ID NO: 23034 - RNA, 22 nt, Human
ucucagcagccagauccagagc

SEQ ID NO: 23035 - RNA, 22 nt, Human
ucucagcucagcuuccacagag

SEQ ID NO: 23036 - RNA, 22 nt, Human
ucucagcucauggcagccuuga

SEQ ID NO: 23037 - RNA, 22 nt, Human
ucucagcugccugcccugcucc

SEQ ID NO: 23038 - RNA, 22 nt, Human
ucucagcuugaguggaugagcu

SEQ ID NO: 23039 - RNA, 22 nt, Human
ucucaggaaauaggauuugagu

SEQ ID NO: 23040 - RNA, 22 nt, Human
ucucaggaagauuagggcuaag

SEQ ID NO: 23041 - RNA, 22 nt, Human
ucucaggaucuaauacauggua

SEQ ID NO: 23042 - RNA, 22 nt, Human
ucucaggcaucuguguggcaca

SEQ ID NO: 23043 - RNA, 22 nt, Human
ucucaggcauucccacauagaa

SEQ ID NO: 23044 - RNA, 20 nt, Human
ucucaggcccccuccuugcu

SEQ ID NO: 23045 - RNA, 22 nt, Human
ucucaggccccugaguuucucu

SEQ ID NO: 23046 - RNA, 21 nt, Human
ucucaggcgagaauucuuuua

SEQ ID NO: 23047 - RNA, 19 nt, Human
ucucaggcugggcggcugc

SEQ ID NO: 23048 - RNA, 22 nt, Human
ucucagggagagcugcuggcau

SEQ ID NO: 23049 - RNA, 22 nt, Human
ucucagggaguugaggcugccu

SEQ ID NO: 23050 - RNA, 22 nt, Human
ucucagggaugggaggccccag

SEQ ID NO: 23051 - RNA, 22 nt, Human
ucucagggcgcagugaggcagu

SEQ ID NO: 23052 - RNA, 17 nt, Human
ucucaggggcuagcccu

SEQ ID NO: 23053 - RNA, 22 nt, Human
ucucaggguuuguacaagugua

SEQ ID NO: 23054 - RNA, 22 nt, Human
ucucaguggaucucagaauuuu

SEQ ID NO: 23055 - RNA, 22 nt, Human
ucucaguggcuuccucacuuuu

SEQ ID NO: 23056 - RNA, 22 nt, Human
ucucagugggaagggcacaguu

SEQ ID NO: 23057 - RNA, 22 nt, Human
ucucaguguuaucuaucugccu

SEQ ID NO: 23058 - RNA, 20 nt, Human
ucucaguuucuagagucagg

SEQ ID NO: 23059 - RNA, 22 nt, Human
ucucauaaacucaguuuucuca

SEQ ID NO: 23060 - RNA, 18 nt, Human
ucucauaaaggggugugu

SEQ ID NO: 23061 - RNA, 22 nt, Human
ucucauaaggucagauuucaca

SEQ ID NO: 23062 - RNA, 22 nt, Human
ucucauaauuguuucccagcua

SEQ ID NO: 23063 - RNA, 22 nt, Human
ucucaucuucauaucugaaaga

SEQ ID NO: 23064 - RNA, 22 nt, Human
ucucaucuuuaaaugaaaauuu

SEQ ID NO: 23065 - RNA, 22 nt, Human
ucucaugaugccuaugcagggu

SEQ ID NO: 23066 - RNA, 22 nt, Human
ucucaugccuggaauuaucauu

SEQ ID NO: 23067 - RNA, 22 nt, Human
ucucaugcuguagugcacuaac

SEQ ID NO: 23068 - RNA, 22 nt, Human
ucucauggcuuguaggagguga

SEQ ID NO: 23069 - RNA, 22 nt, Human
ucucauugccuucacucuucag

SEQ ID NO: 23070 - RNA, 22 nt, Human
ucucauugguauauacaugugu

SEQ ID NO: 23071 - RNA, 22 nt, Human
ucucauuguagaaagacugauu

SEQ ID NO: 23072 - RNA, 22 nt, Human
ucucauuugccucaucuauaaa

SEQ ID NO: 23073 - RNA, 22 nt, Human
ucucauuuggcuuuguuuuaaa

SEQ ID NO: 23074 - RNA, 22 nt, Human
ucucauuugugugcaauucaga

SEQ ID NO: 23075 - RNA, 22 nt, Human
ucucauuuugagucagacacua

SEQ ID NO: 23076 - RNA, 19 nt, Human
ucuccaaaaccaaucacua

SEQ ID NO: 23077 - RNA, 22 nt, Human
ucuccaaacucagacuaaguau

SEQ ID NO: 23078 - RNA, 22 nt, Human
ucuccacaagcugaugcuagga

SEQ ID NO: 23079 - RNA, 22 nt, Human
ucuccacaaguguugagaguac

SEQ ID NO: 23080 - RNA, 22 nt, Human
ucuccacacuuucucucccagg

SEQ ID NO: 23081 - RNA, 22 nt, Human
ucuccacagaagguuccaggcc

SEQ ID NO: 23082 - RNA, 22 nt, Human
ucuccacauucuauuggcuaua

SEQ ID NO: 23083 - RNA, 21 nt, Human
ucuccagagugggaggaaauc

SEQ ID NO: 23084 - RNA, 22 nt, Human
ucuccaggaagcccucccugac

SEQ ID NO: 23085 - RNA, 22 nt, Human
ucuccaggacugagcuccagcc

SEQ ID NO: 23086 - RNA, 22 nt, Human
ucuccaggcacuuggcugcuac

SEQ ID NO: 23087 - RNA, 23 nt, Human
ucuccaggccuuacuccaggccu

SEQ ID NO: 23088 - RNA, 22 nt, Human
ucuccaggccuuucccaucuua

SEQ ID NO: 23089 - RNA, 22 nt, Human
ucuccaggcuuuuugugaauug

SEQ ID NO: 23090 - RNA, 22 nt, Human
ucuccaggggcugcugugccac

SEQ ID NO: 23091 - RNA, 22 nt, Human
ucuccagguaaauggcauccug

SEQ ID NO: 23092 - RNA, 19 nt, Human
ucuccaggugccccaaaca

SEQ ID NO: 23093 - RNA, 22 nt, Human
ucuccagucucaagacauugag

SEQ ID NO: 23094 - RNA, 22 nt, Human
ucuccagugaaucuccuccugg

SEQ ID NO: 23095 - RNA, 21 nt, Human
ucuccagugcuucugccucuu

SEQ ID NO: 23096 - RNA, 22 nt, Human
ugaacaguuucaagaaaacuuu

SEQ ID NO: 23097 - RNA, 22 nt, Human
ugaacauauucaccucuaaaua

SEQ ID NO: 23098 - RNA, 22 nt, Human
ugaacauuccugaaugaagcau

SEQ ID NO: 23099 - RNA, 22 nt, Human
ugaaccuucauaaaauuaagug

SEQ ID NO: 23100 - RNA, 22 nt, Human
ugaacuacaaaaaucaacauuu

SEQ ID NO: 23101 - RNA, 22 nt, Human
ugaacucgggaggaggcugcag

SEQ ID NO: 23102 - RNA, 22 nt, Human
ugaacucuaauggugcuuuucu

SEQ ID NO: 23103 - RNA, 22 nt, Human
ugaacucucccccauugcccuc

SEQ ID NO: 23104 - RNA, 22 nt, Human
ugaacugcaggaaucucagugg

SEQ ID NO: 23105 - RNA, 22 nt, Human
ugaacuucagugcauaauuauc

SEQ ID NO: 23106 - RNA, 22 nt, Human
ugaacuuucacaagaauaugcu

SEQ ID NO: 23107 - RNA, 22 nt, Human
ugaagaaccugaugagcugugu

SEQ ID NO: 23108 - RNA, 22 nt, Human
ugaagaauaagauagauggagc

SEQ ID NO: 23109 - RNA, 22 nt, Human
ugaagacaagaaaacacugggg

SEQ ID NO: 23110 - RNA, 22 nt, Human
ugaagacacauacaagggaaug

SEQ ID NO: 23111 - RNA, 22 nt, Human
ugaagacagaccaaggagaaug

SEQ ID NO: 23112 - RNA, 22 nt, Human
ugaagacagggucuuuaacgag

SEQ ID NO: 23113 - RNA, 18 nt, Human
ugaagacaugagguuagu

SEQ ID NO: 23114 - RNA, 22 nt, Human
ucuuuuggaaaugaugugcagg

SEQ ID NO: 23115 - RNA, 22 nt, Human
ucuuuuggguucuuaugauuua

SEQ ID NO: 23116 - RNA, 22 nt, Human
ucuuuugucaucccuuguacau

SEQ ID NO: 23117 - RNA, 22 nt, Human
ucuuuugugaggacaagguacg

SEQ ID NO: 23118 - RNA, 22 nt, Human
ucuuuugugauucuuuaguuac

SEQ ID NO: 23119 - RNA, 22 nt, Human
ugaaaaacacuaauuggaaagc

SEQ ID NO: 23120 - RNA, 22 nt, Human
ugaaaaacugaauaguugagua

SEQ ID NO: 23121 - RNA, 22 nt, Human
ugaaaaacuuuaauccauaaag

SEQ ID NO: 23122 - RNA, 22 nt, Human
ugaaaacagaauccuuguuuuc

SEQ ID NO: 23123 - RNA, 22 nt, Human
ugaaaagacugcaagagagcau

SEQ ID NO: 23124 - RNA, 22 nt, Human
ugaaaaggagccuuagguaggu

SEQ ID NO: 23125 - RNA, 20 nt, Human
ugaaaaggucaggagacaug

SEQ ID NO: 23126 - RNA, 22 nt, Human
ugaaaaugcccucuaugucuca

SEQ ID NO: 23127 - RNA, 22 nt, Human
ugaaaauucaucucauagcaga

SEQ ID NO: 23128 - RNA, 22 nt, Human
ugaaaauuuccaucaguuauau

SEQ ID NO: 23129 - RNA, 22 nt, Human
ugaaacaaaaguauguagcuug

SEQ ID NO: 23130 - RNA, 22 nt, Human
ugaaacaaugugaaguugcuga

SEQ ID NO: 23131 - RNA, 22 nt, Human
ugaaacagucuccagacuugga

SEQ ID NO: 23132 - RNA, 23 nt, Human
ugaaacauuuaggguagaauuuc

SEQ ID NO: 23133 - RNA, 22 nt, Human
ugaaaccuuggcuagagauuga

SEQ ID NO: 23134 - RNA, 22 nt, Human
ugaaacugaaagguauuuauag

SEQ ID NO: 23135 - RNA, 22 nt, Human
ugaaacuugcuaauugcacgua

SEQ ID NO: 23136 - RNA, 22 nt, Human
ugaaagaaacagguauauuggg

SEQ ID NO: 23137 - RNA, 22 nt, Human
ugaaagaaggguggaaaaugua

SEQ ID NO: 23138 - RNA, 22 nt, Human
ucuguaggggccggcggagccc

SEQ ID NO: 23139 - RNA, 22 nt, Human
ucuguaguaugguacuuauuua

SEQ ID NO: 23140 - RNA, 20 nt, Human
ucuguagucuaugaggcuua

SEQ ID NO: 23141 - RNA, 22 nt, Human
ucuguagucucugauauaucug

SEQ ID NO: 23142 - RNA, 22 nt, Human
ucuguauaaggacaaacauuua

SEQ ID NO: 23143 - RNA, 22 nt, Human
ucuguauugauucuguuaggca

SEQ ID NO: 23144 - RNA, 22 nt, Human
ucugucaauauaugugcugcag

SEQ ID NO: 23145 - RNA, 22 nt, Human
ucugucaauuauucacauaggc

SEQ ID NO: 23146 - RNA, 22 nt, Human
ucugucacaaguaauccuuuuc

SEQ ID NO: 23147 - RNA, 22 nt, Human
ucugucaccccuguuucuggcu

SEQ ID NO: 23148 - RNA, 23 nt, Human
ucugucaccuauggcugcucuuc

SEQ ID NO: 23149 - RNA, 22 nt, Human
ucugucacucccugaugaugaa

SEQ ID NO: 23150 - RNA, 22 nt, Human
ucugucacugagcucaggauuc

SEQ ID NO: 23151 - RNA, 22 nt, Human
ucugucacuuaagaauugccua

SEQ ID NO: 23152 - RNA, 23 nt, Human
ucugucacuuucugcuguggagu

SEQ ID NO: 23153 - RNA, 22 nt, Human
ucugucaggagauuggcagcug

SEQ ID NO: 23154 - RNA, 22 nt, Human
ucugucaucucuaaaauagaaa

SEQ ID NO: 23155 - RNA, 22 nt, Human
ucugucaugccacaggacuugg

SEQ ID NO: 23156 - RNA, 18 nt, Human
ucuguccacccugugcug

SEQ ID NO: 23157 - RNA, 17 nt, Human
ucuguccagggagugug

SEQ ID NO: 23158 - RNA, 22 nt, Human
ucuguccaguggcucucaggga

SEQ ID NO: 23159 - RNA, 22 nt, Human
ucugucccugagagcucaggag

SEQ ID NO: 23160 - RNA, 22 nt, Human
ucuguccucuuugaagcugcuc

SEQ ID NO: 23161 - RNA, 22 nt, Human
ucuguccuguuuccuccugaca

SEQ ID NO: 23162 - RNA, 22 nt, Human
ucugucuacagggagaaugaua

SEQ ID NO: 23163 - RNA, 22 nt, Human
ucugucuccucagaugacucca

SEQ ID NO: 23164 - RNA, 22 nt, Human
ucugucuccugccagugccucu

SEQ ID NO: 23165 - RNA, 22 nt, Human
ucugucugagugguguuagagu

SEQ ID NO: 23166 - RNA, 22 nt, Human
ucugucugccuguguccccacc

SEQ ID NO: 23167 - RNA, 22 nt, Human
ucugucuuagccaucucaggcu

SEQ ID NO: 23168 - RNA, 22 nt, Human
ucugucuucuguagcuaauaau

SEQ ID NO: 23169 - RNA, 22 nt, Human
ucugucuuggccagccaucugg

SEQ ID NO: 23170 - RNA, 23 nt, Human
ucugucuuguuuaggccacuguu

SEQ ID NO: 23171 - RNA, 22 nt, Human
ucugucuuugucaggaccagag

SEQ ID NO: 23172 - RNA, 22 nt, Human
ucugugaaaggaaagaacugac

SEQ ID NO: 23173 - RNA, 22 nt, Human
ucugugaaugugaccuuauuug

SEQ ID NO: 23174 - RNA, 22 nt, Human
ucugugacuugcgggaggagaa

SEQ ID NO: 23175 - RNA, 22 nt, Human
ucugugcagucagggcucaguc

SEQ ID NO: 23176 - RNA, 22 nt, Human
ucugugccagcagccuccugga

SEQ ID NO: 23177 - RNA, 21 nt, Human
ucugugccucaacccucaucu

SEQ ID NO: 23178 - RNA, 22 nt, Human
ucugugccuccguaacacacca

SEQ ID NO: 23179 - RNA, 22 nt, Human
ucugugcggucuguguuaugaa

SEQ ID NO: 23180 - RNA, 23 nt, Human
ucugugcuacaaaucgcgucugu

SEQ ID NO: 23181 - RNA, 22 nt, Human
ucugugcuagaggaguuggcca

SEQ ID NO: 23182 - RNA, 23 nt, Human
ucugugcucgggggagcucucug

SEQ ID NO: 23183 - RNA, 22 nt, Human
ucugugcugcccaacuucucaa

SEQ ID NO: 23184 - RNA, 22 nt, Human
ucugugcugucucagagaaagc

SEQ ID NO: 23185 - RNA, 22 nt, Human
ucugugcugucucagauaagca

SEQ ID NO: 23186 - RNA, 22 nt, Human
ucuguggaaauuuccugaggca

SEQ ID NO: 23187 - RNA, 22 nt, Human
ucuguggaccaggguauaagga

SEQ ID NO: 23188 - RNA, 18 nt, Human
ucuguggagagggcaguu

SEQ ID NO: 23189 - RNA, 22 nt, Human
ucuguggcaaacacagugacca

SEQ ID NO: 23190 - RNA, 22 nt, Human
ucuguggcaguucugguucauc

SEQ ID NO: 23191 - RNA, 22 nt, Human
ucuguggcaugguaucuggagg

SEQ ID NO: 23192 - RNA, 22 nt, Human
ucuguggcauguugcacuugua

SEQ ID NO: 23193 - RNA, 22 nt, Human
ucuguggccugccuccucauuu

SEQ ID NO: 23194 - RNA, 22 nt, Human
ucuguggcgcauaguugucucu

SEQ ID NO: 23195 - RNA, 21 nt, Human
ucuguggcggacucuaggccc

SEQ ID NO: 23196 - RNA, 23 nt, Human
ucuguggcuccuucaggcugcug

SEQ ID NO: 23197 - RNA, 22 nt, Human
ucuguggcuggagaacuugucu

SEQ ID NO: 23198 - RNA, 22 nt, Human
ucugugguggagugggcaugag

SEQ ID NO: 23199 - RNA, 22 nt, Human
ucuguguauuugugaccuguau

SEQ ID NO: 23200 - RNA, 22 nt, Human
ucugugucacugaggccugugu

SEQ ID NO: 23201 - RNA, 22 nt, Human
ucugugugcccaccugacaccu

SEQ ID NO: 23202 - RNA, 22 nt, Human
ucugugugguaguuucagugaa

SEQ ID NO: 23203 - RNA, 20 nt, Human
ucuguguuucagcugcuuga

SEQ ID NO: 23204 - RNA, 22 nt, Human
ucuguguuugccauccuugcuc

SEQ ID NO: 23205 - RNA, 22 nt, Human
ucuguguuuuaaacaguagaaa

SEQ ID NO: 23206 - RNA, 22 nt, Human
ucuguuauaaaucacacugcau

SEQ ID NO: 23207 - RNA, 22 nt, Human
ucuguuauacagucuguggcac

SEQ ID NO: 23208 - RNA, 22 nt, Human
ucuguuauauguuuuuucuaaa

SEQ ID NO: 23209 - RNA, 20 nt, Human
ucuguucaaaucuuaguucc

SEQ ID NO: 23210 - RNA, 21 nt, Human
ucuguucaaggaacuacggau

SEQ ID NO: 23211 - RNA, 22 nt, Human
ucuguucagaaauggaagugcc

SEQ ID NO: 23212 - RNA, 22 nt, Human
ucuguucaucaucuggacacau

SEQ ID NO: 23213 - RNA, 17 nt, Human
ucuguucaugcauaccu

SEQ ID NO: 23214 - RNA, 22 nt, Human
ucuguuccauguuuuguuccau

SEQ ID NO: 23215 - RNA, 22 nt, Human
ucuguuccucaaggucugugug

SEQ ID NO: 23216 - RNA, 22 nt, Human
ucuguuccuguccuaagggcca

SEQ ID NO: 23217 - RNA, 22 nt, Human
ucuguucuauuggucuaugugu

SEQ ID NO: 23218 - RNA, 22 nt, Human
ucuguucuuaaagcauucuugc

SEQ ID NO: 23219 - RNA, 22 nt, Human
ucuguucuuggugcagcuggga

SEQ ID NO: 23220 - RNA, 22 nt, Human
ucuguucuuguccccacuucag

SEQ ID NO: 23221 - RNA, 23 nt, Human
ucuguucuuuuagcugaucauuu

SEQ ID NO: 23222 - RNA, 22 nt, Human
ucuguugacuccuagcagccau

SEQ ID NO: 23223 - RNA, 21 nt, Human
ugacagguuuaggauuaaaau

SEQ ID NO: 23224 - RNA, 22 nt, Human
ugacaguaguguuagaacugau

SEQ ID NO: 23225 - RNA, 22 nt, Human
ugacagugaacagguuaccacu

SEQ ID NO: 23226 - RNA, 22 nt, Human
ugacagugaaugacaagguucu

SEQ ID NO: 23227 - RNA, 22 nt, Human
ugacagugcaugugacaaagga

SEQ ID NO: 23228 - RNA, 23 nt, Human
ugacaguguauuugacuauaugg

SEQ ID NO: 23229 - RNA, 22 nt, Human
ugacaguuaagguauacauuca

SEQ ID NO: 23230 - RNA, 22 nt, Human
ugacauaaaucuaaaggaaagg

SEQ ID NO: 23231 - RNA, 22 nt, Human
ugacauaaguugguagaaagga

SEQ ID NO: 23232 - RNA, 22 nt, Human
ugacauacuuuuagauagaugg

SEQ ID NO: 23233 - RNA, 20 nt, Human
ugacauagcucuuggggugc

SEQ ID NO: 23234 - RNA, 22 nt, Human
ugacaucagaauggcauagaaa

SEQ ID NO: 23235 - RNA, 22 nt, Human
ugacauccugaguacauaagag

SEQ ID NO: 23236 - RNA, 22 nt, Human
ugacaucuaguagguagagacc

SEQ ID NO: 23237 - RNA, 22 nt, Human
ugacaucugggcccucagcuaa

SEQ ID NO: 23238 - RNA, 22 nt, Human
ugacaugcuuguuuuccuugaa

SEQ ID NO: 23239 - RNA, 22 nt, Human
ugacauguccugagaagauggc

SEQ ID NO: 23240 - RNA, 22 nt, Human
ugacauguggcuuugacccagg

SEQ ID NO: 23241 - RNA, 22 nt, Human
ugacauugugugcauuuaaagu

SEQ ID NO: 23242 - RNA, 22 nt, Human
ugacauuuaaucccuaaauauu

SEQ ID NO: 23243 - RNA, 22 nt, Human
ugaccaaaggugguuuauuugg

SEQ ID NO: 23244 - RNA, 22 nt, Human
ugaccacacuugaucacucuga

SEQ ID NO: 23245 - RNA, 22 nt, Human
ugaccacugaauaugacugccu

SEQ ID NO: 23246 - RNA, 22 nt, Human
ugaccagugaucuacugggauu

SEQ ID NO: 23247 - RNA, 22 nt, Human
ugacccauggucugaucauagg

SEQ ID NO: 23248 - RNA, 22 nt, Human
ugacccauuggucccuagaucc

SEQ ID NO: 23249 - RNA, 22 nt, Human
ugacccugcuucuuggugcagg

SEQ ID NO: 23250 - RNA, 17 nt, Human
ugacccuguuggguguu

SEQ ID NO: 23251 - RNA, 22 nt, Human
ugacccuuccccucuggguucu

SEQ ID NO: 23252 - RNA, 22 nt, Human
ugacccuucccuucaguuggcu

SEQ ID NO: 23253 - RNA, 23 nt, Human
ugacccuugaugguugacgugca

SEQ ID NO: 23254 - RNA, 22 nt, Human
ugacccuuggaguaggauguau

SEQ ID NO: 23255 - RNA, 22 nt, Human
ugacccuuguuuaucauuucug

SEQ ID NO: 23256 - RNA, 22 nt, Human
ugacccuuucauuauucucauu

SEQ ID NO: 23257 - RNA, 22 nt, Human
uuccuggggcuccagcuaccag

SEQ ID NO: 23258 - RNA, 22 nt, Human
uuccugggugguccugguagag

SEQ ID NO: 23259 - RNA, 22 nt, Human
uuccugguaacaaucucaaagu

SEQ ID NO: 23260 - RNA, 22 nt, Human
uuccugguaguaagacaucugg

SEQ ID NO: 23261 - RNA, 22 nt, Human
uuccuggucccguucuucacug

SEQ ID NO: 23262 - RNA, 22 nt, Human
uuccugguccuauuauauacac

SEQ ID NO: 23263 - RNA, 22 nt, Human
uuccugguggcuuugccaacug

SEQ ID NO: 23264 - RNA, 22 nt, Human
uuccugguuuauggaaagcaug

SEQ ID NO: 23265 - RNA, 20 nt, Human
uuccuguauacaaagaguuc

SEQ ID NO: 23266 - RNA, 22 nt, Human
uuccuguauucuaaagggaaag

SEQ ID NO: 23267 - RNA, 20 nt, Human
uuccuguccucucuuucagg

SEQ ID NO: 23268 - RNA, 22 nt, Human
uuccugugaagccgguggucuc

SEQ ID NO: 23269 - RNA, 19 nt, Human
uuccugugcugcugugucc

SEQ ID NO: 23270 - RNA, 22 nt, Human
uuccuguguguugguggcagaa

SEQ ID NO: 23271 - RNA, 22 nt, Human
uuccuguuguguuagagucaau

SEQ ID NO: 23272 - RNA, 23 nt, Human
uuccuuaacuguuaagauugucu

SEQ ID NO: 23273 - RNA, 22 nt, Human
uuccuuaaugaaucaggccauu

SEQ ID NO: 23274 - RNA, 19 nt, Human
uuccuuagaggaggcggug

SEQ ID NO: 23275 - RNA, 22 nt, Human
uuccuuagaguuuccagaaagc

SEQ ID NO: 23276 - RNA, 22 nt, Human
uuccuuagggaaagggauaagg

SEQ ID NO: 23277 - RNA, 22 nt, Human
uuccuuaguguuagauucugug

SEQ ID NO: 23278 - RNA, 22 nt, Human
uuccuuaguugacugucuuagu

SEQ ID NO: 23279 - RNA, 22 nt, Human
uuccuuccuccuccaguucugg

SEQ ID NO: 23280 - RNA, 22 nt, Human
uuccuuccugucuuccuuacug

SEQ ID NO: 23281 - RNA, 22 nt, Human
uuccuucuccagaacuucuagg

SEQ ID NO: 23282 - RNA, 22 nt, Human
uuccuucucuguggggaaggca

SEQ ID NO: 23283 - RNA, 22 nt, Human
uuccuucugaagccuuuguguu

SEQ ID NO: 23284 - RNA, 22 nt, Human
uuccuucuggaagcuucagggg

SEQ ID NO: 23285 - RNA, 22 nt, Human
uuccuucuggaggcuccagggg

SEQ ID NO: 23286 - RNA, 22 nt, Human
uuccuucuuugugguagaaagu

SEQ ID NO: 23287 - RNA, 22 nt, Human
uuccuucuuuuacaccauaaau

SEQ ID NO: 23288 - RNA, 22 nt, Human
uuccuugaaaguuugaacugac

SEQ ID NO: 23289 - RNA, 22 nt, Human
uuccuugaccacugcauaauga

SEQ ID NO: 23290 - RNA, 22 nt, Human
uuccuugagaugacugucuugu

SEQ ID NO: 23291 - RNA, 22 nt, Human
uuccuugagguauucaguuuua

SEQ ID NO: 23292 - RNA, 22 nt, Human
uuccuugcccucugggaucuug

SEQ ID NO: 23293 - RNA, 22 nt, Human
uuccuuggaaauucugacuuca

SEQ ID NO: 23294 - RNA, 22 nt, Human
uuccuuggagcgcuaaagcucu

SEQ ID NO: 23295 - RNA, 22 nt, Human
uuccuuggaguuaagacccugg

SEQ ID NO: 23296 - RNA, 22 nt, Human
uuccuuggccacacuggugcuu

SEQ ID NO: 23297 - RNA, 22 nt, Human
uuccuugggagaaaaaauauau

SEQ ID NO: 23298 - RNA, 17 nt, Human
uuccuugggugcugggu

SEQ ID NO: 23299 - RNA, 22 nt, Human
uuccuugguacagaguagcuuu

SEQ ID NO: 23300 - RNA, 22 nt, Human
uuccuuguucuacaucccugcc

SEQ ID NO: 23301 - RNA, 22 nt, Human
uuccuuguuuguagcucuggga

SEQ ID NO: 23302 - RNA, 22 nt, Human
uuccuuuagugucauauacuuu

SEQ ID NO: 23303 - RNA, 22 nt, Human
uuccuuucccucacagccucgg

SEQ ID NO: 23304 - RNA, 22 nt, Human
uuccuuuucauaugccccgcgu

SEQ ID NO: 23305 - RNA, 22 nt, Human
uuccuuuucuucuaccacaugu

SEQ ID NO: 23306 - RNA, 22 nt, Human
uuccuuuugcaagguccucuag

SEQ ID NO: 23307 - RNA, 21 nt, Human
uuccuuuuuauggcuuagugg

SEQ ID NO: 23308 - RNA, 22 nt, Human
uucggaguauugacaugugaag

SEQ ID NO: 23309 - RNA, 18 nt, Human
uucggcagauacgcuugg

SEQ ID NO: 23310 - RNA, 22 nt, Human
uucggcuucuuagaggcgcucc

SEQ ID NO: 23311 - RNA, 22 nt, Human
uucggucuuguguaaacacugu

SEQ ID NO: 23312 - RNA, 22 nt, Human
uucguugcuuuaagccacuacg

SEQ ID NO: 23313 - RNA, 22 nt, Human
uucguuuucuaggaccaacaga

SEQ ID NO: 23314 - RNA, 22 nt, Human
uucuaaagacucauggaagugg

SEQ ID NO: 23315 - RNA, 22 nt, Human
uucuaaagagaaugcguuucug

SEQ ID NO: 23316 - RNA, 22 nt, Human
uucuaaagccuguccuaucaga

SEQ ID NO: 23317 - RNA, 22 nt, Human
uucuaacuuuugaggcaaugug

SEQ ID NO: 23318 - RNA, 22 nt, Human
uucuaagaggcuaaugaagaau

SEQ ID NO: 23319 - RNA, 22 nt, Human
uucuaagagucauuaauggccu

SEQ ID NO: 23320 - RNA, 22 nt, Human
uucuaaguuacuguuauggucu

SEQ ID NO: 23321 - RNA, 22 nt, Human
uucuaauagcugccuauguauu

SEQ ID NO: 23322 - RNA, 22 nt, Human
uucuaaugauuucauucaaagc

SEQ ID NO: 23323 - RNA, 22 nt, Human
uucuaauuauucccuuguccca

SEQ ID NO: 23324 - RNA, 20 nt, Human
uucuaauuugauggaguagc

SEQ ID NO: 23325 - RNA, 20 nt, Human
uucuacaaaacugauucuga

SEQ ID NO: 23326 - RNA, 22 nt, Human
uucuacacaccucugaggacau

SEQ ID NO: 23327 - RNA, 22 nt, Human
uucuacauauauuuuucucacu

SEQ ID NO: 23328 - RNA, 22 nt, Human
uucuacauucauguauuaccuc

SEQ ID NO: 23329 - RNA, 22 nt, Human
uucuaccagaccccagacuugu

SEQ ID NO: 23330 - RNA, 22 nt, Human
uucuaccagcuacucacugaua

SEQ ID NO: 23331 - RNA, 22 nt, Human
uucuaccauugggaaaacagcc

SEQ ID NO: 23332 - RNA, 22 nt, Human
ugcagaaaggaggggugggaau

SEQ ID NO: 23333 - RNA, 22 nt, Human
ugcagaaauaaagauauuauca

SEQ ID NO: 23334 - RNA, 22 nt, Human
ugcagaacagggccaugucacc

SEQ ID NO: 23335 - RNA, 22 nt, Human
ugcagaagaccuuccagggcug

SEQ ID NO: 23336 - RNA, 22 nt, Human
ugcagaagauggucugagcacc

SEQ ID NO: 23337 - RNA, 22 nt, Human
ugcagaauuauggugcuggcuu

SEQ ID NO: 23338 - RNA, 22 nt, Human
ugcagacagagaaaugaggccc

SEQ ID NO: 23339 - RNA, 22 nt, Human
ugcagagaaaccaguggaggac

SEQ ID NO: 23340 - RNA, 22 nt, Human
ugcagagagauauggcaagagg

SEQ ID NO: 23341 - RNA, 22 nt, Human
ugcagagauagaacuacuuucu

SEQ ID NO: 23342 - RNA, 22 nt, Human
ugcagaggaccauuguccugga

SEQ ID NO: 23343 - RNA, 22 nt, Human
ugcagaggagucagccugggca

SEQ ID NO: 23344 - RNA, 23 nt, Human
ugcagaggcaugaucacugcuca

SEQ ID NO: 23345 - RNA, 22 nt, Human
ugcagagggaaaaggugcuccu

SEQ ID NO: 23346 - RNA, 15 nt, Human
ugcagagguaccugg

SEQ ID NO: 23347 - RNA, 22 nt, Human
ugcagagucccaggacccagag

SEQ ID NO: 23348 - RNA, 22 nt, Human
ugcagaguccucuggagggacu

SEQ ID NO: 23349 - RNA, 23 nt, Human
ugcagagugucacuugaaaacca

SEQ ID NO: 23350 - RNA, 22 nt, Human
ugcagaugaaugcugagacacu

SEQ ID NO: 23351 - RNA, 22 nt, Human
ugcagaugccugggcugcacca

SEQ ID NO: 23352 - RNA, 17 nt, Human
ugcagcaaaugggggac

SEQ ID NO: 23353 - RNA, 22 nt, Human
ugcagcaagaaggcacugucug

SEQ ID NO: 23354 - RNA, 22 nt, Human
ugcagcaauuugcaguaauuua

SEQ ID NO: 23355 - RNA, 22 nt, Human
ugcagcaccgucccacuggcua

SEQ ID NO: 23356 - RNA, 22 nt, Human
ugcagcaccuauggacacuugu

SEQ ID NO: 23357 - RNA, 20 nt, Human
ugcagcacgggcccuuucca

SEQ ID NO: 23358 - RNA, 19 nt, Human
ugcagcacuaaaaacuuuc

SEQ ID NO: 23359 - RNA, 21 nt, Human
ugcagcagaagucucuguguc

SEQ ID NO: 23360 - RNA, 22 nt, Human
ugcagcagaaguguucuucucu

SEQ ID NO: 23361 - RNA, 22 nt, Human
ugcagcagggcccaggcacaga

SEQ ID NO: 23362 - RNA, 23 nt, Human
ugcagcaggguggucuacuucuc

SEQ ID NO: 23363 - RNA, 22 nt, Human
ugcagcaggugacaacgagugg

SEQ ID NO: 23364 - RNA, 22 nt, Human
ugcagcagguuccaaaggguua

SEQ ID NO: 23365 - RNA, 22 nt, Human
ugcagcauccauauauuauuag

SEQ ID NO: 23366 - RNA, 22 nt, Human
ugcagcaucuccuuaaaucuug

SEQ ID NO: 23367 - RNA, 22 nt, Human
ugcagcaugccaaacgaggagg

SEQ ID NO: 23368 - RNA, 22 nt, Human
ugcagcauuauguagcuguuuu

SEQ ID NO: 23369 - RNA, 22 nt, Human
ugcagcauucugguaaaaggca

SEQ ID NO: 23370 - RNA, 22 nt, Human
ugcagcauucuuggccacuacu

SEQ ID NO: 23371 - RNA, 22 nt, Human
ugcagcauugcaaagcagucuu

SEQ ID NO: 23372 - RNA, 22 nt, Human
ugcagccaucuuucuuggagga

SEQ ID NO: 23373 - RNA, 21 nt, Human
ugcagccauucagcccuaugc

SEQ ID NO: 23374 - RNA, 22 nt, Human
ugcagcccaggcgucagguggu

SEQ ID NO: 23375 - RNA, 22 nt, Human
ugcagccccccagauggccgua

SEQ ID NO: 23376 - RNA, 19 nt, Human
ugcagccccuaccacauuc

SEQ ID NO: 23377 - RNA, 22 nt, Human
ugcagccccuaucgcggacagg

SEQ ID NO: 23378 - RNA, 22 nt, Human
ugcagccccugaaaauggcagc

SEQ ID NO: 23379 - RNA, 22 nt, Human
ugcagcccugugcacauccccu

SEQ ID NO: 23380 - RNA, 22 nt, Human
ugcagcccuuccuuccucuggg

SEQ ID NO: 23381 - RNA, 22 nt, Human
ugcagccuuggcaaccagggac

SEQ ID NO: 23382 - RNA, 22 nt, Human
ugcagccuuuagaaguucagau

SEQ ID NO: 23383 - RNA, 22 nt, Human
ugcagcuccucuggcugccuga

SEQ ID NO: 23384 - RNA, 22 nt, Human
ugcagcuccugugcugagugug

SEQ ID NO: 23385 - RNA, 22 nt, Human
ugcagcucugggcaagugccuu

SEQ ID NO: 23386 - RNA, 22 nt, Human
ugcagcugagucacccagccau

SEQ ID NO: 23387 - RNA, 22 nt, Human
ugcagcugccuccuucccuugu

SEQ ID NO: 23388 - RNA, 22 nt, Human
ugcagcugcuugauucaucuug

SEQ ID NO: 23389 - RNA, 19 nt, Human
ugcagcuguaugagcuuaa

SEQ ID NO: 23390 - RNA, 22 nt, Human
ugcagcuguuacggacccuguc

SEQ ID NO: 23391 - RNA, 22 nt, Human
ugcagcuuaucucuuuggcagu

SEQ ID NO: 23392 - RNA, 20 nt, Human
ugcagcuucaccugugucau

SEQ ID NO: 23393 - RNA, 22 nt, Human
ugcagcuucuuguccugugauu

SEQ ID NO: 23394 - RNA, 22 nt, Human
ugcagcuugcuguaggcuaagu

SEQ ID NO: 23395 - RNA, 22 nt, Human
ugcagcuuuaagcuuucaucag

SEQ ID NO: 23396 - RNA, 22 nt, Human
ugcaggaaaacaccuaucaccc

SEQ ID NO: 23397 - RNA, 22 nt, Human
ugcaggaaauuccaggguggcc

SEQ ID NO: 23398 - RNA, 22 nt, Human
ugcaggaacucgaaaacuauag

SEQ ID NO: 23399 - RNA, 22 nt, Human
ugcaggaauauugaugaacuua

SEQ ID NO: 23400 - RNA, 20 nt, Human
ugcaggaauuugcauuccuu

SEQ ID NO: 23401 - RNA, 22 nt, Human
ugcaggaccggaaccaugggau

SEQ ID NO: 23402 - RNA, 22 nt, Human
ugcaggagagugagucaguagg

SEQ ID NO: 23403 - RNA, 22 nt, Human
ugcaggagauaauggugcuuag

SEQ ID NO: 23404 - RNA, 22 nt, Human
ugcaggagccuuggacuugaaa

SEQ ID NO: 23405 - RNA, 22 nt, Human
ugcaggagcugugcggugaggg

SEQ ID NO: 23406 - RNA, 22 nt, Human
ugcaggaggcuuuauucaggau

SEQ ID NO: 23407 - RNA, 22 nt, Human
ugcaggaguccaaucaggagac

SEQ ID NO: 23408 - RNA, 22 nt, Human
ugcaggaguuccccucugccug

SEQ ID NO: 23409 - RNA, 22 nt, Human
ugcaggcagcuaaaccauguaa

SEQ ID NO: 23410 - RNA, 22 nt, Human
ugcaggcagggccagcgugagg

SEQ ID NO: 23411 - RNA, 22 nt, Human
ugagcagagacgggggccucca

SEQ ID NO: 23412 - RNA, 22 nt, Human
ugagcagagcaggcugcgcccu

SEQ ID NO: 23413 - RNA, 22 nt, Human
ugagcagagcaguaacaggagc

SEQ ID NO: 23414 - RNA, 22 nt, Human
ugagcagaggccagcaccuggg

SEQ ID NO: 23415 - RNA, 22 nt, Human
ugagcagagucgcuccagagug

SEQ ID NO: 23416 - RNA, 22 nt, Human
ugagcagaguuguuucuccuga

SEQ ID NO: 23417 - RNA, 22 nt, Human
ugagcagaugugccaaacugua

SEQ ID NO: 23418 - RNA, 22 nt, Human
ugagcagcccuuccuccggcca

SEQ ID NO: 23419 - RNA, 22 nt, Human
ugagcagcuucugucugaaggc

SEQ ID NO: 23420 - RNA, 21 nt, Human
ugagcaggagucaugggaaug

SEQ ID NO: 23421 - RNA, 22 nt, Human
ugagcaggauucgccucuugca

SEQ ID NO: 23422 - RNA, 22 nt, Human
ugagcaggggagagcgaaugug

SEQ ID NO: 23423 - RNA, 18 nt, Human
ugagcaggggcugaccuu

SEQ ID NO: 23424 - RNA, 22 nt, Human
ugagcaggugagucuagggcag

SEQ ID NO: 23425 - RNA, 17 nt, Human
ugagcaguagaagaugc

SEQ ID NO: 23426 - RNA, 22 nt, Human
ugagcaguaggucugaauagug

SEQ ID NO: 23427 - RNA, 22 nt, Human
ugagcaucaaauugaugggacu

SEQ ID NO: 23428 - RNA, 23 nt, Human
ugagcaucacaggagaaccaggc

SEQ ID NO: 23429 - RNA, 22 nt, Human
ugagcaucuuuuuacagguuua

SEQ ID NO: 23430 - RNA, 22 nt, Human
ugagcauggugggugcagagca

SEQ ID NO: 23431 - RNA, 22 nt, Human
ugagccaaacuucuccuugguc

SEQ ID NO: 23432 - RNA, 22 nt, Human
ugagccagagagguugaggcua

SEQ ID NO: 23433 - RNA, 22 nt, Human
ugagccagauaagggcucacgc

SEQ ID NO: 23434 - RNA, 22 nt, Human
ugagccaggaguuugaggcugu

SEQ ID NO: 23435 - RNA, 22 nt, Human
ugagccaggcuccaugccaccu

SEQ ID NO: 23436 - RNA, 22 nt, Human
ugagccagguuuuccaucauuc

SEQ ID NO: 23437 - RNA, 22 nt, Human
ugagccagucucucagaacccu

SEQ ID NO: 23438 - RNA, 22 nt, Human
ugagccaugggacuccaaggga

SEQ ID NO: 23439 - RNA, 22 nt, Human
ugagcccaggaguuggagaccg

SEQ ID NO: 23440 - RNA, 22 nt, Human
ugagcccaggaguuggaggcug

SEQ ID NO: 23441 - RNA, 22 nt, Human
ugagguaugcugaacucuguuu

SEQ ID NO: 23442 - RNA, 22 nt, Human
ugagguaugguaagguaaaauc

SEQ ID NO: 23443 - RNA, 22 nt, Human
ugagguccugcauguugagguc

SEQ ID NO: 23444 - RNA, 22 nt, Human
ugaggucugcucaagucccugg

SEQ ID NO: 23445 - RNA, 22 nt, Human
ugaggucuguccugucuuugga

SEQ ID NO: 23446 - RNA, 22 nt, Human
ugaggugaccgcagaugggaag

SEQ ID NO: 23447 - RNA, 22 nt, Human
ugaggugagucaugcauuggag

SEQ ID NO: 23448 - RNA, 22 nt, Human
ugaggugguucaagagccuugu

SEQ ID NO: 23449 - RNA, 22 nt, Human
ugaguaauaaacugucuugcuc

SEQ ID NO: 23450 - RNA, 22 nt, Human
ugaguacucuucucacuacacc

SEQ ID NO: 23451 - RNA, 22 nt, Human
ugaguagaccucacgugucaga

SEQ ID NO: 23452 - RNA, 22 nt, Human
ugaguaggauaggguggggcuu

SEQ ID NO: 23453 - RNA, 22 nt, Human
ugaguagggguagaaaguuuag

SEQ ID NO: 23454 - RNA, 22 nt, Human
ugaguauauacccagaagugga

SEQ ID NO: 23455 - RNA, 22 nt, Human
ugaguauugaccagaaaauuua

SEQ ID NO: 23456 - RNA, 19 nt, Human
ugagucacucuuacaguca

SEQ ID NO: 23457 - RNA, 22 nt, Human
ugagucauguaauaaugcugcu

SEQ ID NO: 23458 - RNA, 22 nt, Human
ugaguccaauaggggccuggaa

SEQ ID NO: 23459 - RNA, 22 nt, Human
ugaguccugcucugggcagggu

SEQ ID NO: 23460 - RNA, 22 nt, Human
ugaguccugcugagcagagagg

SEQ ID NO: 23461 - RNA, 22 nt, Human
ugagucuccagcgaaguaggau

SEQ ID NO: 23462 - RNA, 22 nt, Human
ugagucucgguuuccccuccaa

SEQ ID NO: 23463 - RNA, 21 nt, Human
ugagucucucagcuucaggua

SEQ ID NO: 23464 - RNA, 23 nt, Human
ugagucuugagcuuuggauucug

SEQ ID NO: 23465 - RNA, 22 nt, Human
ugagucuuuagaauucuaacuu

SEQ ID NO: 23466 - RNA, 22 nt, Human
ugagucuuuuauccugggaaug

SEQ ID NO: 23467 - RNA, 22 nt, Human
ugagucuuuucauuguguggau

SEQ ID NO: 23468 - RNA, 21 nt, Human
ugagucuuuugcacaaggaau

SEQ ID NO: 23469 - RNA, 19 nt, Human
ugagugaaggccguggugg

SEQ ID NO: 23470 - RNA, 22 nt, Human
ugagugagacaccaaaggcugu

SEQ ID NO: 23471 - RNA, 22 nt, Human
ugagugaggaagcgguggagga

SEQ ID NO: 23472 - RNA, 20 nt, Human
ugagugaguuuguggcagga

SEQ ID NO: 23473 - RNA, 22 nt, Human
ugagugcuggcuaaauagaaaa

SEQ ID NO: 23474 - RNA, 22 nt, Human
ugaguggagaacagaggcucuc

SEQ ID NO: 23475 - RNA, 19 nt, Human
ugaguggagugcaaugaag

SEQ ID NO: 23476 - RNA, 19 nt, Human
ugagugucacgucagugcc

SEQ ID NO: 23477 - RNA, 19 nt, Human
ugaguguguguuucucuaa

SEQ ID NO: 23478 - RNA, 23 nt, Human
ugaguguguucccugugagauuu

SEQ ID NO: 23479 - RNA, 22 nt, Human
ugaguuaaaugagaacaugaaa

SEQ ID NO: 23480 - RNA, 22 nt, Human
ugaguuauugcagcuuccuccu

SEQ ID NO: 23481 - RNA, 22 nt, Human
ugaguucaaagacagguauagg

SEQ ID NO: 23482 - RNA, 22 nt, Human
ugaguucuaguggcugcagauu

SEQ ID NO: 23483 - RNA, 22 nt, Human
ugaguucucaugaaaucuaguu

SEQ ID NO: 23484 - RNA, 22 nt, Human
ugaguucuccaagagaagguaa

SEQ ID NO: 23485 - RNA, 22 nt, Human
ugaguucuccaggaagcagacu

SEQ ID NO: 23486 - RNA, 22 nt, Human
ugaguucuuuccguuagguaug

SEQ ID NO: 23487 - RNA, 22 nt, Human
ugaguucuuugcaaauaacaag

SEQ ID NO: 23488 - RNA, 22 nt, Human
ugaguugcuaucuagauccaga

SEQ ID NO: 23489 - RNA, 22 nt, Human
ugaguuuaauuggagccugaau

SEQ ID NO: 23490 - RNA, 22 nt, Human
ugauaacucucaguuucucaug

SEQ ID NO: 23491 - RNA, 22 nt, Human
ugauacagagaaagcaucuuuu

SEQ ID NO: 23492 - RNA, 21 nt, Human
ugauacaggaaugguucuaug

SEQ ID NO: 23493 - RNA, 22 nt, Human
ugauacagucagcucacaauug

SEQ ID NO: 23494 - RNA, 22 nt, Human
ugauacauaaaccaucauuuug

SEQ ID NO: 23495 - RNA, 22 nt, Human
ugauacuuuggagacuugagua

SEQ ID NO: 23496 - RNA, 22 nt, Human
ugauagaaaggaaauuaauugg

SEQ ID NO: 23497 - RNA, 22 nt, Human
ugauagaaucagauaaaaggau

SEQ ID NO: 23498 - RNA, 22 nt, Human
ugauaguaucugauuauuucac

SEQ ID NO: 23499 - RNA, 22 nt, Human
ugauauaagaaguaguauggau

SEQ ID NO: 23500 - RNA, 22 nt, Human
ugauauccuuuaaccuggaccg

SEQ ID NO: 23501 - RNA, 22 nt, Human
ugauaucuaccauaaccauucg

SEQ ID NO: 23502 - RNA, 22 nt, Human
ugauaucugaaguguauaaaca

SEQ ID NO: 23503 - RNA, 22 nt, Human
ugauauggcuaaagaaaguuuc

SEQ ID NO: 23504 - RNA, 22 nt, Human
ugauauuuuaugagcuuucaua

SEQ ID NO: 23505 - RNA, 22 nt, Human
ugaucaggucugaacagggagg

SEQ ID NO: 23506 - RNA, 22 nt, Human
ugaucuagguuggcuucaacug

SEQ ID NO: 23507 - RNA, 22 nt, Human
ugaucuccugaccuuguaaucc

SEQ ID NO: 23508 - RNA, 22 nt, Human
ugaucuucaccuuguucuuugg

SEQ ID NO: 23509 - RNA, 22 nt, Human
ugaucuuuccucuuguuugucu

SEQ ID NO: 23510 - RNA, 18 nt, Human
ugaucuuugaguauaaug

SEQ ID NO: 23511 - RNA, 22 nt, Human
ugaucuuugguaaucuggcaca

SEQ ID NO: 23512 - RNA, 22 nt, Human
ugaugaaaaccagaacucucau

SEQ ID NO: 23513 - RNA, 22 nt, Human
ugaugaaaauguucagcaauua

SEQ ID NO: 23514 - RNA, 22 nt, Human
ugaugaaaguguuuacucaccu

SEQ ID NO: 23515 - RNA, 22 nt, Human
ugaugacaauguugcugcaaua

SEQ ID NO: 23516 - RNA, 22 nt, Human
ugaugacagcaaaaaaugcuag

SEQ ID NO: 23517 - RNA, 22 nt, Human
ugaugacaguguuacagcucca

SEQ ID NO: 23518 - RNA, 22 nt, Human
ugaugacaugugggcuguggcu

SEQ ID NO: 23519 - RNA, 22 nt, Human
ugaugagagaggucauugaaau

SEQ ID NO: 23520 - RNA, 22 nt, Human
ugaugaggggcucagaggucag

SEQ ID NO: 23521 - RNA, 22 nt, Human
ugaugauaugaaagaaucuuua

SEQ ID NO: 23522 - RNA, 17 nt, Human
ugaugcaaagucagcug

SEQ ID NO: 23523 - RNA, 23 nt, Human
ugaugcaguaaauuggucucuaa

SEQ ID NO: 23524 - RNA, 22 nt, Human
ugaugcuguguaccucauggga

SEQ ID NO: 23525 - RNA, 22 nt, Human
ugauggaaacuuggguaaguca

SEQ ID NO: 23526 - RNA, 21 nt, Human
ugauggaaaggauuuuggguc

SEQ ID NO: 23527 - RNA, 22 nt, Human
uugggggcagagggagcaucug

SEQ ID NO: 23528 - RNA, 22 nt, Human
uugggguguucaggguacuucu

SEQ ID NO: 23529 - RNA, 22 nt, Human
uugggguguuggauggagcaag

SEQ ID NO: 23530 - RNA, 22 nt, Human
uuggguccuaaccccagagucu

SEQ ID NO: 23531 - RNA, 22 nt, Human
uugggucuguuuagcugagaag

SEQ ID NO: 23532 - RNA, 22 nt, Human
uugguaaauacuauaaucaaau

SEQ ID NO: 23533 - RNA, 22 nt, Human
uugguacaaaaccaugaaagaa

SEQ ID NO: 23534 - RNA, 22 nt, Human
uugguacaaaaguaacuguggu

SEQ ID NO: 23535 - RNA, 22 nt, Human
uugguacaaugugcuagguagg

SEQ ID NO: 23536 - RNA, 22 nt, Human
uugguacagaugagguauucuc

SEQ ID NO: 23537 - RNA, 22 nt, Human
uugguacauguuaaggaagagu

SEQ ID NO: 23538 - RNA, 22 nt, Human
uugguagaaugaacauucauug

SEQ ID NO: 23539 - RNA, 22 nt, Human
uugguaggggacuagaguccag

SEQ ID NO: 23540 - RNA, 22 nt, Human
uuggucaaggacauuacaguuu

SEQ ID NO: 23541 - RNA, 22 nt, Human
uuggucacuugcuaugugccaa

SEQ ID NO: 23542 - RNA, 22 nt, Human
uuggucagcacugauguuucag

SEQ ID NO: 23543 - RNA, 22 nt, Human
uuggucagcuaauaaggacagg

SEQ ID NO: 23544 - RNA, 22 nt, Human
uuggucagcucaauggagaggg

SEQ ID NO: 23545 - RNA, 22 nt, Human
uuggucuuguggcaucuuucca

SEQ ID NO: 23546 - RNA, 22 nt, Human
uuggugagugcuauguaccaca

SEQ ID NO: 23547 - RNA, 22 nt, Human
uugguuaaaaucaaauuaauca

SEQ ID NO: 23548 - RNA, 23 nt, Human
uugguuacuggauuugaggggcc

SEQ ID NO: 23549 - RNA, 22 nt, Human
uugguucacauuagauuuccuu

SEQ ID NO: 23550 - RNA, 22 nt, Human
ugccucagucuaaagucucuca

SEQ ID NO: 23551 - RNA, 22 nt, Human
ugccucauuaacuguccuuaau

SEQ ID NO: 23552 - RNA, 22 nt, Human
ugccuccaccauugcucacuuu

SEQ ID NO: 23553 - RNA, 22 nt, Human
ugccucucuaacccaugcccaa

SEQ ID NO: 23554 - RNA, 22 nt, Human
ugccucugaggaagauuguguu

SEQ ID NO: 23555 - RNA, 22 nt, Human
ugccucugccuccauuguuagu

SEQ ID NO: 23556 - RNA, 23 nt, Human
ugccucugccucccuagucugca

SEQ ID NO: 23557 - RNA, 22 nt, Human
ugccucugguuaucugguaccu

SEQ ID NO: 23558 - RNA, 22 nt, Human
ugccucuguggaaauggugguc

SEQ ID NO: 23559 - RNA, 22 nt, Human
ugccugaagaaaacuugcagca

SEQ ID NO: 23560 - RNA, 22 nt, Human
ugccugaagcugcauuccuagu

SEQ ID NO: 23561 - RNA, 22 nt, Human
ugccugagguggucugcaaaug

SEQ ID NO: 23562 - RNA, 22 nt, Human
ugccugagugauguggcagcca

SEQ ID NO: 23563 - RNA, 22 nt, Human
ugcuuuaacauaagauaucuuu

SEQ ID NO: 23564 - RNA, 22 nt, Human
ugcuuuauggauuuguguccug

SEQ ID NO: 23565 - RNA, 22 nt, Human
ugcuuuauucagucucugccau

SEQ ID NO: 23566 - RNA, 22 nt, Human
ugcuuuauuuauaaaauagcaa

SEQ ID NO: 23567 - RNA, 22 nt, Human
ugcuuucacauguaugcacaaa

SEQ ID NO: 23568 - RNA, 22 nt, Human
ugcuuucacugauguaucauuu

SEQ ID NO: 23569 - RNA, 21 nt, Human
ugcuuucagacucuuacagaa

SEQ ID NO: 23570 - RNA, 22 nt, Human
ugcuuucauauugccuaugacu

SEQ ID NO: 23571 - RNA, 22 nt, Human
ugcuuucauugugauaggaagc

SEQ ID NO: 23572 - RNA, 19 nt, Human
ugcuuucuaaacacaugca

SEQ ID NO: 23573 - RNA, 22 nt, Human
ugcuuucuccugucugaaagau

SEQ ID NO: 23574 - RNA, 22 nt, Human
ugcuuucucucuaccccacuuu

SEQ ID NO: 23575 - RNA, 22 nt, Human
ugcuuucugcucuuguccacac

SEQ ID NO: 23576 - RNA, 17 nt, Human
ugcuuucuuccugcccu

SEQ ID NO: 23577 - RNA, 22 nt, Human
ugcuuugccugcuuugacucau

SEQ ID NO: 23578 - RNA, 22 nt, Human
ugcuuuggaucuauuugcugag

SEQ ID NO: 23579 - RNA, 22 nt, Human
ugcuuugugauaugcugugucu

SEQ ID NO: 23580 - RNA, 22 nt, Human
ugcuuuguguuugaauagauaa

SEQ ID NO: 23581 - RNA, 22 nt, Human
ugcuuuuagcuaguaacuagua

SEQ ID NO: 23582 - RNA, 22 nt, Human
ugcuuuuuccccuucuggcgag

SEQ ID NO: 23583 - RNA, 22 nt, Human
ugcuuuuugcacccuuugccgu

SEQ ID NO: 23584 - RNA, 21 nt, Human
uggaaaaauguggccuaguga

SEQ ID NO: 23585 - RNA, 22 nt, Human
uggaaaacaugcacauuggauu

SEQ ID NO: 23586 - RNA, 22 nt, Human
uggaaaacauugagauaccaag

SEQ ID NO: 23587 - RNA, 22 nt, Human
uggaaaacuuugguggugaggg

SEQ ID NO: 23588 - RNA, 22 nt, Human
uggaaacuaacaacagagcaga

SEQ ID NO: 23589 - RNA, 22 nt, Human
uggaaacuagagaguuuguauu

SEQ ID NO: 23590 - RNA, 22 nt, Human
uggaaacuagccuuuuagguug

SEQ ID NO: 23591 - RNA, 21 nt, Human
uggaaacuucuagcuuacgua

SEQ ID NO: 23592 - RNA, 22 nt, Human
uggaaacuuggaacgucuucag

SEQ ID NO: 23593 - RNA, 22 nt, Human
uggaaagaggaagugcccagca

SEQ ID NO: 23594 - RNA, 22 nt, Human
uggaaagguaggauuucaagac

SEQ ID NO: 23595 - RNA, 22 nt, Human
uggaaagugagacauauuuaua

SEQ ID NO: 23596 - RNA, 22 nt, Human
uggaaauagauaguaucauuca

SEQ ID NO: 23597 - RNA, 22 nt, Human
uggaaauagcuccaguuaagca

SEQ ID NO: 23598 - RNA, 22 nt, Human
uggaaauagcuccaguuucauu

SEQ ID NO: 23599 - RNA, 22 nt, Human
uggaaauaguugugagucaggc

SEQ ID NO: 23600 - RNA, 22 nt, Human
uggaaauguuucuugagcucag

SEQ ID NO: 23601 - RNA, 22 nt, Human
uggaaauuaacuugguacauau

SEQ ID NO: 23602 - RNA, 18 nt, Human
uggaaauugaaacagaaa

SEQ ID NO: 23603 - RNA, 22 nt, Human
uggaaauuuauucaucauucau

SEQ ID NO: 23604 - RNA, 22 nt, Human
uggaaauuuugaacaguuucua

SEQ ID NO: 23605 - RNA, 19 nt, Human
uggaacaaacugcaaugac

SEQ ID NO: 23606 - RNA, 22 nt, Human
uggaacacauuaaccacaggga

SEQ ID NO: 23607 - RNA, 19 nt, Human
uggaacacucaaacugggu

SEQ ID NO: 23608 - RNA, 22 nt, Human
uggaacacugaucauugccuuu

SEQ ID NO: 23609 - RNA, 22 nt, Human
uggaacacuguggaugagaaga

SEQ ID NO: 23610 - RNA, 22 nt, Human
uggaacacuuuguugaaaugca

SEQ ID NO: 23611 - RNA, 22 nt, Human
uggaaccaucaaagagauccug

SEQ ID NO: 23612 - RNA, 20 nt, Human
uggaaccuaggcagagcugg

SEQ ID NO: 23613 - RNA, 22 nt, Human
uggaaccuggugauguacaagu

SEQ ID NO: 23614 - RNA, 22 nt, Human
uggaacugcuccaaaaccucca

SEQ ID NO: 23615 - RNA, 21 nt, Human
uggaacuggugaaaaccuccu

SEQ ID NO: 23616 - RNA, 22 nt, Human
uggaacuucaugagauuaugga

SEQ ID NO: 23617 - RNA, 23 nt, Human
uggaagaaaaugguuuggcugug

SEQ ID NO: 23618 - RNA, 22 nt, Human
uggaagaaggcagagaggcauu

SEQ ID NO: 23619 - RNA, 22 nt, Human
uggaagaauagaagaugguuga

SEQ ID NO: 23620 - RNA, 22 nt, Human
uggaagaauuuggggauaaauu

SEQ ID NO: 23621 - RNA, 22 nt, Human
uggaagacacuauuuaccaggu

SEQ ID NO: 23622 - RNA, 22 nt, Human
uggaagacaguugaugggaguu

SEQ ID NO: 23623 - RNA, 22 nt, Human
uggaagaccacaagcccuuaac

SEQ ID NO: 23624 - RNA, 22 nt, Human
uggaagacggaaaucuguagau

SEQ ID NO: 23625 - RNA, 22 nt, Human
uggaagagaaaggaguggaucu

SEQ ID NO: 23626 - RNA, 22 nt, Human
uggaagagcaggcagacaaugc

SEQ ID NO: 23627 - RNA, 20 nt, Human
uggaagaggagaugccucug

SEQ ID NO: 23628 - RNA, 22 nt, Human
uggaagaucaaccaggauugac

SEQ ID NO: 23629 - RNA, 22 nt, Human
uggaagcaaaauauccuuuaau

SEQ ID NO: 23630 - RNA, 22 nt, Human
uggaagcaacaacuauggacca

SEQ ID NO: 23631 - RNA, 22 nt, Human
uggaagcacugaagagacaacc

SEQ ID NO: 23632 - RNA, 23 nt, Human
uggaagcagaaguuucaauaucc

SEQ ID NO: 23633 - RNA, 22 nt, Human
uggaagcagagagcuaucacca

SEQ ID NO: 23634 - RNA, 22 nt, Human
uggaagcagcauuaaugaguua

SEQ ID NO: 23635 - RNA, 22 nt, Human
uggaagcaucacuucuugccug

SEQ ID NO: 23636 - RNA, 22 nt, Human
uggaaggaacagaguuugaaac

SEQ ID NO: 23637 - RNA, 22 nt, Human
uggaaggcaggaccugccuugg

SEQ ID NO: 23638 - RNA, 22 nt, Human
uggaaggcauuucacacaggau

SEQ ID NO: 23639 - RNA, 22 nt, Human
uggaaggcgcagugaugaugcu

SEQ ID NO: 23640 - RNA, 22 nt, Human
uggaaggcgucucgaaggccua

SEQ ID NO: 23641 - RNA, 19 nt, Human
uggaaggcuaagacacuug

SEQ ID NO: 23642 - RNA, 22 nt, Human
uggaaggcugagaguccugggg

SEQ ID NO: 23643 - RNA, 22 nt, Human
uggaaggcuuggaauacuucca

SEQ ID NO: 23644 - RNA, 22 nt, Human
uggaagggagugacagucagag

SEQ ID NO: 23645 - RNA, 22 nt, Human
uggaagggggaagacagcucug

SEQ ID NO: 23646 - RNA, 16 nt, Human
uggaaggggucuccgg

SEQ ID NO: 23647 - RNA, 22 nt, Human
uggaagguggauauccuaguca

SEQ ID NO: 23648 - RNA, 22 nt, Human
uggaagguguggcaggucuagu

SEQ ID NO: 23649 - RNA, 22 nt, Human
uggaagucccuguguguggccu

SEQ ID NO: 23650 - RNA, 22 nt, Human
uggaaguggcagaaaaugaaca

SEQ ID NO: 23651 - RNA, 22 nt, Human
uggaagugucuacauguggagu

SEQ ID NO: 23652 - RNA, 20 nt, Human
uggaaguucuguugcauugg

SEQ ID NO: 23653 - RNA, 23 nt, Human
uggaauaauaagguacauuaaca

SEQ ID NO: 23654 - RNA, 22 nt, Human
uggaauauacucagaacaggcu

SEQ ID NO: 23655 - RNA, 22 nt, Human
uggaauaugcaauugcauuuca

SEQ ID NO: 23656 - RNA, 22 nt, Human
uggaaucuugcgggcacauggc

SEQ ID NO: 23657 - RNA, 22 nt, Human
uggaaugaauauguuuuaagga

SEQ ID NO: 23658 - RNA, 22 nt, Human
uggaaugagcuggcuaauaacc

SEQ ID NO: 23659 - RNA, 22 nt, Human
uggaggaguagauuuucagagg

SEQ ID NO: 23660 - RNA, 22 nt, Human
uggaggauuccacuuacaugag

SEQ ID NO: 23661 - RNA, 20 nt, Human
uggaggcaccuguggagauc

SEQ ID NO: 23662 - RNA, 22 nt, Human
uggaggcaggggauacagguca

SEQ ID NO: 23663 - RNA, 22 nt, Human
uggaggcagguggaggagugaa

SEQ ID NO: 23664 - RNA, 22 nt, Human
uggaggcaguaacugagcaaca

SEQ ID NO: 23665 - RNA, 22 nt, Human
uggaggcagucaaaugacugac

SEQ ID NO: 23666 - RNA, 22 nt, Human
uggaggccagugaaaguagauu

SEQ ID NO: 23667 - RNA, 22 nt, Human
uggaggccaugccagagcccua

SEQ ID NO: 23668 - RNA, 22 nt, Human
uggaggccgcguagucugagca

SEQ ID NO: 23669 - RNA, 22 nt, Human
uggaggccuagguugaugugug

SEQ ID NO: 23670 - RNA, 20 nt, Human
uggaggccugcagguuuggg

SEQ ID NO: 23671 - RNA, 22 nt, Human
uggaggcugugugcaugagacc

SEQ ID NO: 23672 - RNA, 22 nt, Human
uggagggauacaaagaugaaaa

SEQ ID NO: 23673 - RNA, 20 nt, Human
uggagggauuguuggcaaau

SEQ ID NO: 23674 - RNA, 22 nt, Human
uggagggcaugcuguccauggg

SEQ ID NO: 23675 - RNA, 22 nt, Human
uggagggcgcuuagauggaggg

SEQ ID NO: 23676 - RNA, 18 nt, Human
uggagggcuugcugcagc

SEQ ID NO: 23677 - RNA, 19 nt, Human
uggagguccaggaguaggg

SEQ ID NO: 23678 - RNA, 22 nt, Human
uggaggugaaaugagauuuugu

SEQ ID NO: 23679 - RNA, 22 nt, Human
uggaggugagugugguacagca

SEQ ID NO: 23680 - RNA, 22 nt, Human
uggagguggcaucugacagcug

SEQ ID NO: 23681 - RNA, 22 nt, Human
uggaggugggagggacuguccu

SEQ ID NO: 23682 - RNA, 22 nt, Human
ugcucugaaggggaagggaugg

SEQ ID NO: 23683 - RNA, 22 nt, Human
ugcucugaugggguggacauag

SEQ ID NO: 23684 - RNA, 22 nt, Human
ugcucugcaagcaggagcaaga

SEQ ID NO: 23685 - RNA, 23 nt, Human
ugcucugggaggcccuggagagc

SEQ ID NO: 23686 - RNA, 22 nt, Human
ugcucugggcaacagccucccu

SEQ ID NO: 23687 - RNA, 22 nt, Human
ugcucugggcuaucugagaaag

SEQ ID NO: 23688 - RNA, 22 nt, Human
ugcucuggggagcuccucugcg

SEQ ID NO: 23689 - RNA, 22 nt, Human
ugcucuggguccugggccuccu

SEQ ID NO: 23690 - RNA, 18 nt, Human
ugcucuggucucacuugg

SEQ ID NO: 23691 - RNA, 22 nt, Human
ugcucuguaggggaaagagagc

SEQ ID NO: 23692 - RNA, 22 nt, Human
ugcucuguauucuauggcaguu

SEQ ID NO: 23693 - RNA, 22 nt, Human
ugcucuguugugcaugugggau

SEQ ID NO: 23694 - RNA, 18 nt, Human
ugcucuguuuaaugauuu

SEQ ID NO: 23695 - RNA, 22 nt, Human
ugcucuucaccauuacaucaug

SEQ ID NO: 23696 - RNA, 22 nt, Human
ugcugaaaaugcguaucuucca

SEQ ID NO: 23697 - RNA, 20 nt, Human
ugcugaagaaucacagaugg

SEQ ID NO: 23698 - RNA, 19 nt, Human
ugcugaaguugucagucug

SEQ ID NO: 23699 - RNA, 22 nt, Human
ugcugaauaauaagauuacuca

SEQ ID NO: 23700 - RNA, 22 nt, Human
ugcugaaugaauggaugguugc

SEQ ID NO: 23701 - RNA, 22 nt, Human
ugcugaauuaaacucuaugugg

SEQ ID NO: 23702 - RNA, 22 nt, Human
ugcugaauucucauucccugga

SEQ ID NO: 23703 - RNA, 22 nt, Human
ugcugacacuauucuaaaaagc

SEQ ID NO: 23704 - RNA, 21 nt, Human
ugcugacaucaggucugcuau

SEQ ID NO: 23705 - RNA, 19 nt, Human
ugcugacugggccucaccg

SEQ ID NO: 23706 - RNA, 22 nt, Human
ugcugagacaacaggaaacaag

SEQ ID NO: 23707 - RNA, 22 nt, Human
ugcugagacaccuaagguaaau

SEQ ID NO: 23708 - RNA, 22 nt, Human
ugcugagaggaaagaaugcaca

SEQ ID NO: 23709 - RNA, 22 nt, Human
ugcugagaggaaggugcacugg

SEQ ID NO: 23710 - RNA, 22 nt, Human
ugcugagauaagcuaugaccag

SEQ ID NO: 23711 - RNA, 22 nt, Human
ugcugaggaaaaaugugacucu

SEQ ID NO: 23712 - RNA, 22 nt, Human
ugcugaggacaccuagccuucu

SEQ ID NO: 23713 - RNA, 22 nt, Human
ugcugaggagguggcugugcuu

SEQ ID NO: 23714 - RNA, 22 nt, Human
ugcugaggcaguccuaacagga

SEQ ID NO: 23715 - RNA, 20 nt, Human
ugcugaggccugaggccugg

SEQ ID NO: 23716 - RNA, 22 nt, Human
ugcugagggagggguuuuccag

SEQ ID NO: 23717 - RNA, 22 nt, Human
ugcugaggucaccuugcugcua

SEQ ID NO: 23718 - RNA, 22 nt, Human
ugcugaggucauuuccaaguga

SEQ ID NO: 23719 - RNA, 20 nt, Human
ugcugagguugacaugccca

SEQ ID NO: 23720 - RNA, 22 nt, Human
ugcugagguuguggagugcauu

SEQ ID NO: 23721 - RNA, 22 nt, Human
ugcugagguuucgucugcuugc

SEQ ID NO: 23722 - RNA, 22 nt, Human
ugcugaguacucuccuguguag

SEQ ID NO: 23723 - RNA, 22 nt, Human
ugcugagucguauuauuuuuua

SEQ ID NO: 23724 - RNA, 22 nt, Human
ugcugauauauucuaguuuucu

SEQ ID NO: 23725 - RNA, 22 nt, Human
ugcugaugaguccuucuaucgc

SEQ ID NO: 23726 - RNA, 17 nt, Human
ugcugcagacccacccc

SEQ ID NO: 23727 - RNA, 22 nt, Human
ugcugcagacgaagcccaugcc

SEQ ID NO: 23728 - RNA, 22 nt, Human
ugcugcagagaauguuuuggcc

SEQ ID NO: 23729 - RNA, 22 nt, Human
ugcugcagcuaaggugaggugc

SEQ ID NO: 23730 - RNA, 19 nt, Human
ugcugcaggaugcugcugg

SEQ ID NO: 23731 - RNA, 22 nt, Human
ugcugcagguguguucagugag

SEQ ID NO: 23732 - RNA, 22 nt, Human
ugcugcagucacacggcuaucu

SEQ ID NO: 23733 - RNA, 22 nt, Human
ugcugcaguguuugcugaaguu

SEQ ID NO: 23734 - RNA, 22 nt, Human
ugcugccaaaugcgagcucugu

SEQ ID NO: 23735 - RNA, 17 nt, Human
ugcugccaagucccaac

SEQ ID NO: 23736 - RNA, 22 nt, Human
ugcugccagccaggccauggag

SEQ ID NO: 23737 - RNA, 21 nt, Human
ugcugccaucaugcagagaug

SEQ ID NO: 23738 - RNA, 22 nt, Human
ugcugccaucucaacugcccuu

SEQ ID NO: 23739 - RNA, 23 nt, Human
ugcugcccacucuuccagcccuc

SEQ ID NO: 23740 - RNA, 22 nt, Human
ugcugccuaauaagucgagggu

SEQ ID NO: 23741 - RNA, 22 nt, Human
ugcugccuccuuccugccagga

SEQ ID NO: 23742 - RNA, 22 nt, Human
ugcugccucugcugauauggcc

SEQ ID NO: 23743 - RNA, 22 nt, Human
ugcugccuuagaaauggcuaua

SEQ ID NO: 23744 - RNA, 22 nt, Human
ugcugccuuugggaccuggccu

SEQ ID NO: 23745 - RNA, 22 nt, Human
ugcugcuccugccuggcuccca

SEQ ID NO: 23746 - RNA, 22 nt, Human
ugcugcucgccacggcccaggg

SEQ ID NO: 23747 - RNA, 22 nt, Human
ugcugcucuucaccauggccuc

SEQ ID NO: 23748 - RNA, 22 nt, Human
ugcugcugaucauuuauagucu

SEQ ID NO: 23749 - RNA, 22 nt, Human
ugcugcugauggaugccuggac

SEQ ID NO: 23750 - RNA, 20 nt, Human
ugcugcugcuucacccccau

SEQ ID NO: 23751 - RNA, 22 nt, Human
ugcugcuguauccuuaguguca

SEQ ID NO: 23752 - RNA, 20 nt, Human
ugcugcugugagcgucccug

SEQ ID NO: 23753 - RNA, 22 nt, Human
ugcugcuucaccuguuguacag

SEQ ID NO: 23754 - RNA, 22 nt, Human
ugcugcuuugauguguaaauca

SEQ ID NO: 23755 - RNA, 22 nt, Human
ugcugcuuuggaacuccacagg

SEQ ID NO: 23756 - RNA, 21 nt, Human
ugcuggaaaaagugguucuag

SEQ ID NO: 23757 - RNA, 22 nt, Human
ugcuggaaaaaucauuugcuuu

SEQ ID NO: 23758 - RNA, 22 nt, Human
ugcuggaaagagaguuucaaug

SEQ ID NO: 23759 - RNA, 22 nt, Human
ugcuggaaaguuaaauuuugga

SEQ ID NO: 23760 - RNA, 22 nt, Human
ugcuggaaauauauuuguuuau

SEQ ID NO: 23761 - RNA, 22 nt, Human
ugcuggaaauuccuaggaggua

SEQ ID NO: 23762 - RNA, 22 nt, Human
ugcuggaagcuccugcaugucu

SEQ ID NO: 23763 - RNA, 22 nt, Human
ugcuggaagggucggcgugggc

SEQ ID NO: 23764 - RNA, 22 nt, Human
ugcuggaaugagucggggaggg

SEQ ID NO: 23765 - RNA, 22 nt, Human
ugcuggaauuauagaaaaauag

SEQ ID NO: 23766 - RNA, 22 nt, Human
ugcuggaauuuugcucuugcaa

SEQ ID NO: 23767 - RNA, 22 nt, Human
ugcuggagaagcuccugggacu

SEQ ID NO: 23768 - RNA, 22 nt, Human
ugcuggagacucacucaggugc

SEQ ID NO: 23769 - RNA, 22 nt, Human
cauagaaacuugcagcaagcac

SEQ ID NO: 23770 - RNA, 22 nt, Human
cauagaauggauugacaagauu

SEQ ID NO: 23771 - RNA, 22 nt, Human
cauagacauucagcacucacua

SEQ ID NO: 23772 - RNA, 22 nt, Human
cauagccaucuuuagcuuccag

SEQ ID NO: 23773 - RNA, 22 nt, Human
cauaggaagccaucucagucac

SEQ ID NO: 23774 - RNA, 22 nt, Human
cauaggccacggucagcccaca

SEQ ID NO: 23775 - RNA, 22 nt, Human
cauauaauguuugaagaugugg

SEQ ID NO: 23776 - RNA, 22 nt, Human
cauaucaaagagaaggauagga

SEQ ID NO: 23777 - RNA, 22 nt, Human
cauaucuccuccagcacaggcc

SEQ ID NO: 23778 - RNA, 22 nt, Human
cauaucuucugacaugaucagg

SEQ ID NO: 23779 - RNA, 22 nt, Human
cauaugaaauaugaguugaaca

SEQ ID NO: 23780 - RNA, 22 nt, Human
cauauggacaagaacauuuaug

SEQ ID NO: 23781 - RNA, 22 nt, Human
cauauuagacacuuauguccac

SEQ ID NO: 23782 - RNA, 22 nt, Human
cauauucaagggguaaggcaaa

SEQ ID NO: 23783 - RNA, 22 nt, Human
cauauucuguuggucacauaga

SEQ ID NO: 23784 - RNA, 22 nt, Human
cauauuuaguguuuggagaucg

SEQ ID NO: 23785 - RNA, 22 nt, Human
cauauuuauucuucugccagug

SEQ ID NO: 23786 - RNA, 22 nt, Human
cauauuucagucuaagaugugu

SEQ ID NO: 23787 - RNA, 22 nt, Human
cauauuugguauaacuuaagca

SEQ ID NO: 23788 - RNA, 22 nt, Human
caucaaauaaagaaauuccuug

SEQ ID NO: 23789 - RNA, 22 nt, Human
caucaaauaggaauauuuggca

SEQ ID NO: 23790 - RNA, 22 nt, Human
caucaaaucugacuuuucuucc

SEQ ID NO: 23791 - RNA, 22 nt, Human
caucaaauuaugugucaaagca

SEQ ID NO: 23792 - RNA, 22 nt, Human
caucaagagucuuacuaucagu

SEQ ID NO: 23793 - RNA, 23 nt, Human
caucaaguacuuuugacaagugu

SEQ ID NO: 23794 - RNA, 22 nt, Human
caucaagucaucaaagaauuca

SEQ ID NO: 23795 - RNA, 22 nt, Human
caucaagugguucuccagguug

SEQ ID NO: 23796 - RNA, 22 nt, Human
caucacaaaaugauuauucccu

SEQ ID NO: 23797 - RNA, 22 nt, Human
caucacagggggcuagaagucu

SEQ ID NO: 23798 - RNA, 22 nt, Human
caucacagguccugaugacauu

SEQ ID NO: 23799 - RNA, 22 nt, Human
caucacaguuugucagaaauca

SEQ ID NO: 23800 - RNA, 22 nt, Human
caucacaucagugugaacaguu

SEQ ID NO: 23801 - RNA, 22 nt, Human
caucacccggaacugugucugc

SEQ ID NO: 23802 - RNA, 22 nt, Human
caucacuacaaauuuaagaaau

SEQ ID NO: 23803 - RNA, 22 nt, Human
caucacugaaccccaacuuucu

SEQ ID NO: 23804 - RNA, 22 nt, Human
caucagaaaccuugaggaaacu

SEQ ID NO: 23805 - RNA, 22 nt, Human
caucagaaugaauguucuggag

SEQ ID NO: 23806 - RNA, 22 nt, Human
caucagaauguuagagaaggga

SEQ ID NO: 23807 - RNA, 22 nt, Human
caucagagguacuuaaugaaug

SEQ ID NO: 23808 - RNA, 23 nt, Human
caucagagguugccacucccugg

SEQ ID NO: 23809 - RNA, 22 nt, Human
caucagcacuaugauuaaagua

SEQ ID NO: 23810 - RNA, 22 nt, Human
caucagcugagggugagcagaa

SEQ ID NO: 23811 - RNA, 22 nt, Human
caucaggaauuauccuaauuau

SEQ ID NO: 23812 - RNA, 22 nt, Human
caucagucccacggagcagccc

SEQ ID NO: 23813 - RNA, 22 nt, Human
caucagucuagauucuaguacc

SEQ ID NO: 23814 - RNA, 22 nt, Human
caucagugucucucugguacuu

SEQ ID NO: 23815 - RNA, 22 nt, Human
caguuuuugccauuaagaguaa

SEQ ID NO: 23816 - RNA, 22 nt, Human
cauaaaagccaccuauuuaaag

SEQ ID NO: 23817 - RNA, 22 nt, Human
cauaaagucucauaauucacuu

SEQ ID NO: 23818 - RNA, 22 nt, Human
cauaaaguguauaagugaagaa

SEQ ID NO: 23819 - RNA, 22 nt, Human
cauaaauucaguucugccucuu

SEQ ID NO: 23820 - RNA, 22 nt, Human
cauaacaucugugaagcaggaa

SEQ ID NO: 23821 - RNA, 22 nt, Human
cauaacauuauuuucugaagau

SEQ ID NO: 23822 - RNA, 22 nt, Human
cauaacuguuaagauaauuuuu

SEQ ID NO: 23823 - RNA, 22 nt, Human
cauaagaagguaacauccuuaa

SEQ ID NO: 23824 - RNA, 22 nt, Human
cauaauaucuccgauuacuugc

SEQ ID NO: 23825 - RNA, 22 nt, Human
cauaauccugguguagcccucu

SEQ ID NO: 23826 - RNA, 22 nt, Human
cauaauccuugauucaaauaau

SEQ ID NO: 23827 - RNA, 22 nt, Human
cauaaugaacauuagcuacugu

SEQ ID NO: 23828 - RNA, 22 nt, Human
cauaaugucugacacaguaaga

SEQ ID NO: 23829 - RNA, 22 nt, Human
cauaauuauaaacgcaaguuca

SEQ ID NO: 23830 - RNA, 22 nt, Human
cauaauuucccaagagauugaa

SEQ ID NO: 23831 - RNA, 22 nt, Human
cauacaaauguguccaggcucu

SEQ ID NO: 23832 - RNA, 22 nt, Human
cauacagaaaauauauuuugau

SEQ ID NO: 23833 - RNA, 22 nt, Human
cauacagagaaggauaauaaag

SEQ ID NO: 23834 - RNA, 22 nt, Human
cauacauuaccuaacuuaaugc

SEQ ID NO: 23835 - RNA, 22 nt, Human
cauacauuuauacacaucuaug

SEQ ID NO: 23836 - RNA, 21 nt, Human
cauacucaguguauaacuucu

SEQ ID NO: 23837 - RNA, 22 nt, Human
cauacuguaagugcaaaagugu

SEQ ID NO: 23838 - RNA, 22 nt, Human
cauacugucagagccugaaggg

SEQ ID NO: 23839 - RNA, 22 nt, Human
cauacuuucuuuuucacgcaua

SEQ ID NO: 23840 - RNA, 22 nt, Human
cauacuuuuuagaucugccuuc

SEQ ID NO: 23841 - RNA, 22 nt, Human
cauagaaaucaggugagaaucu

SEQ ID NO: 23842 - RNA, 22 nt, Human
cauagauucuuauuuccaucuu

SEQ ID NO: 23843 - RNA, 22 nt, Human
cauagcaacagcaucaagucaa

SEQ ID NO: 23844 - RNA, 22 nt, Human
cauagcaaggugcuuuccacau

SEQ ID NO: 23845 - RNA, 22 nt, Human
cauagcgguauuccacgugguu

SEQ ID NO: 23846 - RNA, 22 nt, Human
cauaggaaaagcauucuucuug

SEQ ID NO: 23847 - RNA, 22 nt, Human
cauaggaaugaggacaauuagc

SEQ ID NO: 23848 - RNA, 22 nt, Human
cauaggucacuguacagguuaa

SEQ ID NO: 23849 - RNA, 22 nt, Human
cauagugacucaugccuauaau

SEQ ID NO: 23850 - RNA, 22 nt, Human
cauagugucugguaacauagua

SEQ ID NO: 23851 - RNA, 22 nt, Human
cauauauuauggacugcagaau

SEQ ID NO: 23852 - RNA, 22 nt, Human
cauauccaauaugacuaguguu

SEQ ID NO: 23853 - RNA, 21 nt, Human
cauaugaaagaaguaucugac

SEQ ID NO: 23854 - RNA, 21 nt, Human
cauauuaaaucggugccuuua

SEQ ID NO: 23855 - RNA, 22 nt, Human
cauauuaaggucuguaaggggu

SEQ ID NO: 23856 - RNA, 22 nt, Human
cauauuagccuccacugggaca

SEQ ID NO: 23857 - RNA, 22 nt, Human
cauauuguaaaagguugaaucc

SEQ ID NO: 23858 - RNA, 22 nt, Human
cauauugucuauugcuguuuuu

SEQ ID NO: 23859 - RNA, 19 nt, Human
cauauuuuugggcuggcau

SEQ ID NO: 23860 - RNA, 22 nt, Human
caucaaaauuagacauuguuga

SEQ ID NO: 23861 - RNA, 22 nt, Human
caucaaacaaaugcuuuuagau

SEQ ID NO: 23862 - RNA, 22 nt, Human
caucaaagggccuguggugcag

SEQ ID NO: 23863 - RNA, 22 nt, Human
caucaaaguugauauccaauua

SEQ ID NO: 23864 - RNA, 22 nt, Human
caucaacagugucagaugaugc

SEQ ID NO: 23865 - RNA, 21 nt, Human
caucaacucuugugcucacac

SEQ ID NO: 23866 - RNA, 22 nt, Human
caucaagauggaagagcaaaua

SEQ ID NO: 23867 - RNA, 22 nt, Human
caucaagugccuuucaccucua

SEQ ID NO: 23868 - RNA, 22 nt, Human
caucacaccacaggcauuuucu

SEQ ID NO: 23869 - RNA, 22 nt, Human
caucacaggcauuuugaguguc

SEQ ID NO: 23870 - RNA, 22 nt, Human
caucacaucuacuauaagugau

SEQ ID NO: 23871 - RNA, 22 nt, Human
caucacauguaggcagcaucac

SEQ ID NO: 23872 - RNA, 22 nt, Human
caucacauuuaaggggaaggac

SEQ ID NO: 23873 - RNA, 22 nt, Human
caucacauuuaauuaaaauguc

SEQ ID NO: 23874 - RNA, 22 nt, Human
caucagaaccaguggggacauu

SEQ ID NO: 23875 - RNA, 22 nt, Human
caucagaagauggcucuggaaa

SEQ ID NO: 23876 - RNA, 22 nt, Human
caucagaaucugagucucugcc

SEQ ID NO: 23877 - RNA, 22 nt, Human
caucagaauuacuuggggagcu

SEQ ID NO: 23878 - RNA, 22 nt, Human
caugaaauguuagaauuagaca

SEQ ID NO: 23879 - RNA, 22 nt, Human
caugaaauuugaaguacagcaa

SEQ ID NO: 23880 - RNA, 22 nt, Human
caugaacagcuaacauuuuggg

SEQ ID NO: 23881 - RNA, 22 nt, Human
caugaacauucagaaauacagc

SEQ ID NO: 23882 - RNA, 22 nt, Human
caugaaccaaaccaaagugucc

SEQ ID NO: 23883 - RNA, 22 nt, Human
caugaagcccucaucagucuga

SEQ ID NO: 23884 - RNA, 22 nt, Human
caugaagcuugaagcaguccac

SEQ ID NO: 23885 - RNA, 22 nt, Human
caugaaggaauaauuguuuaga

SEQ ID NO: 23886 - RNA, 23 nt, Human
caugaagguagcacaaagccucu

SEQ ID NO: 23887 - RNA, 22 nt, Human
caugaagucacuggagcuuuca

SEQ ID NO: 23888 - RNA, 22 nt, Human
caugaauauacauccugauggc

SEQ ID NO: 23889 - RNA, 22 nt, Human
caugaauuuauauuauuaguga

SEQ ID NO: 23890 - RNA, 22 nt, Human
caugaauuuuucuguggguuaa

SEQ ID NO: 23891 - RNA, 22 nt, Human
caugacaaauaaaccuuugcca

SEQ ID NO: 23892 - RNA, 22 nt, Human
caugacaauaagccagcagaaa

SEQ ID NO: 23893 - RNA, 20 nt, Human
caugagaagggcagugugag

SEQ ID NO: 23894 - RNA, 22 nt, Human
caugagagauccuucaugagag

SEQ ID NO: 23895 - RNA, 22 nt, Human
caugaggauccaggugacaggc

SEQ ID NO: 23896 - RNA, 22 nt, Human
caugaguaugauuauacccagu

SEQ ID NO: 23897 - RNA, 16 nt, Human
caugagucaguaagca

SEQ ID NO: 23898 - RNA, 22 nt, Human
caugagucauagugaagcagga

SEQ ID NO: 23899 - RNA, 22 nt, Human
caugagugaguaucucaagaua

SEQ ID NO: 23900 - RNA, 22 nt, Human
caugagugucaucucagcagcu

SEQ ID NO: 23901 - RNA, 22 nt, Human
caugaguuuuuuaguucaugca

SEQ ID NO: 23902 - RNA, 22 nt, Human
caugauacuugaauuuggaagg

SEQ ID NO: 23903 - RNA, 22 nt, Human
caugauacuugacauuugcgau

SEQ ID NO: 23904 - RNA, 22 nt, Human
caugaugucacagagaagcaca

SEQ ID NO: 23905 - RNA, 22 nt, Human
caugauuuacuaaaauuuguuu

SEQ ID NO: 23906 - RNA, 22 nt, Human
caugcaaacacguaaacauuca

SEQ ID NO: 23907 - RNA, 22 nt, Human
caugcaaaugguggcuaaaugg

SEQ ID NO: 23908 - RNA, 20 nt, Human
caugcaacagauuauuuccc

SEQ ID NO: 23909 - RNA, 22 nt, Human
caugcacacugcaacaaggacu

SEQ ID NO: 23910 - RNA, 22 nt, Human
caugcacagagcuuggucauug

SEQ ID NO: 23911 - RNA, 22 nt, Human
caugcacaugcaauagugcuuu

SEQ ID NO: 23912 - RNA, 22 nt, Human
caugcagaggugccacgaggcu

SEQ ID NO: 23913 - RNA, 21 nt, Human
caugcagauucuggagccaga

SEQ ID NO: 23914 - RNA, 21 nt, Human
caugcaggauuuaaccuagaa

SEQ ID NO: 23915 - RNA, 22 nt, Human
caugcaggcacccagagcccac

SEQ ID NO: 23916 - RNA, 22 nt, Human
caugcagggagcagaggagaca

SEQ ID NO: 23917 - RNA, 22 nt, Human
caugcagguuauaugugcuucu

SEQ ID NO: 23918 - RNA, 22 nt, Human
caugcaguauucaggacaguuc

SEQ ID NO: 23919 - RNA, 22 nt, Human
caugcagugaugcacugcauca

SEQ ID NO: 23920 - RNA, 22 nt, Human
caugcauacacaggucaggcag

SEQ ID NO: 23921 - RNA, 22 nt, Human
caugcauagcuuuggagcuagg

SEQ ID NO: 23922 - RNA, 22 nt, Human
caugcauauaugcuacaugcaa

SEQ ID NO: 23923 - RNA, 22 nt, Human
caugcaugccuggcucacagag

SEQ ID NO: 23924 - RNA, 22 nt, Human
caugcaugucagggauccugga

SEQ ID NO: 23925 - RNA, 22 nt, Human
caugcauuccuccucugccuua

SEQ ID NO: 23926 - RNA, 22 nt, Human
caugccaacaacaagcaaugag

SEQ ID NO: 23927 - RNA, 20 nt, Human
caugccagaaugugagguag

SEQ ID NO: 23928 - RNA, 22 nt, Human
caugccagggcuugcugccugg

SEQ ID NO: 23929 - RNA, 23 nt, Human
caugccaguuugugcaggcagau

SEQ ID NO: 23930 - RNA, 20 nt, Human
caugccaugucuacugaggc

SEQ ID NO: 23931 - RNA, 22 nt, Human
cugaacaggcucugauggauuc

SEQ ID NO: 23932 - RNA, 22 nt, Human
cugaaccacuaauauuuugauu

SEQ ID NO: 23933 - RNA, 22 nt, Human
cugaacucuuuaugacagcuug

SEQ ID NO: 23934 - RNA, 22 nt, Human
cugaacugacagacugccugcu

SEQ ID NO: 23935 - RNA, 22 nt, Human
cugaagaaauaugauugcuuaa

SEQ ID NO: 23936 - RNA, 22 nt, Human
cugaagaagcugcagccuggag

SEQ ID NO: 23937 - RNA, 20 nt, Human
cugaagagacuggaggggca

SEQ ID NO: 23938 - RNA, 23 nt, Human
cugaagagccaacaaaaagcuug

SEQ ID NO: 23939 - RNA, 22 nt, Human
cugaagaggacgcagcagcaag

SEQ ID NO: 23940 - RNA, 17 nt, Human
cugaagaguccuggcua

SEQ ID NO: 23941 - RNA, 22 nt, Human
cugaagauagugucugaucaug

SEQ ID NO: 23942 - RNA, 22 nt, Human
cugaagauucgccuuuguuuau

SEQ ID NO: 23943 - RNA, 22 nt, Human
cugaagcaauugagagauguuu

SEQ ID NO: 23944 - RNA, 22 nt, Human
cugaagcagauguggcugagau

SEQ ID NO: 23945 - RNA, 22 nt, Human
cugaagccacgauagcuuccua

SEQ ID NO: 23946 - RNA, 22 nt, Human
cugaagcugaaaacuuccagca

SEQ ID NO: 23947 - RNA, 22 nt, Human
cugaagcugcauaccaaagacu

SEQ ID NO: 23948 - RNA, 22 nt, Human
cugaagcugggcacuuccuuuu

SEQ ID NO: 23949 - RNA, 22 nt, Human
cugaaggauuagagagcacuua

SEQ ID NO: 23950 - RNA, 22 nt, Human
cugaaggcuaaaauggacugaa

SEQ ID NO: 23951 - RNA, 22 nt, Human
cugaaggcugaggcuguguugu

SEQ ID NO: 23952 - RNA, 22 nt, Human
cugaaguuaacaucuugauguc

SEQ ID NO: 23953 - RNA, 22 nt, Human
cugaaguuaaucagagguacaa

SEQ ID NO: 23954 - RNA, 22 nt, Human
cugaaguucauacaauggccau

SEQ ID NO: 23955 - RNA, 22 nt, Human
cugaaguuuuucaauuuauguu

SEQ ID NO: 23956 - RNA, 22 nt, Human
cugaauaaagcccucgcgcgcu

SEQ ID NO: 23957 - RNA, 22 nt, Human
cugaauaauuuuauaguugcug

SEQ ID NO: 23958 - RNA, 22 nt, Human
cugaauaauuuucuguuguaug

SEQ ID NO: 23959 - RNA, 22 nt, Human
cugaauaucauuuaucauuggc

SEQ ID NO: 23960 - RNA, 22 nt, Human
cugaauauuagucaugucugau

SEQ ID NO: 23961 - RNA, 22 nt, Human
cugaaucaugccauuuugcuua

SEQ ID NO: 23962 - RNA, 22 nt, Human
cugaaugccugcagagccagag

SEQ ID NO: 23963 - RNA, 22 nt, Human
cugaauuaagcauuacauacau

SEQ ID NO: 23964 - RNA, 22 nt, Human
cugaauuacugaaggucaacuu

SEQ ID NO: 23965 - RNA, 18 nt, Human
cugaauuaucucaucauu

SEQ ID NO: 23966 - RNA, 21 nt, Human
cugaauuaugugcuuaccuuu

SEQ ID NO: 23967 - RNA, 22 nt, Human
cugaauuauuuaaggugaaggg

SEQ ID NO: 23968 - RNA, 22 nt, Human
cugaauucugccuugaggccuu

SEQ ID NO: 23969 - RNA, 22 nt, Human
cugacaaaccacugcuccagcu

SEQ ID NO: 23970 - RNA, 22 nt, Human
cugacaaacuuaauuuucugaa

SEQ ID NO: 23971 - RNA, 22 nt, Human
cugacaagguugaauuguccca

SEQ ID NO: 23972 - RNA, 22 nt, Human
cugacacacugagcauuugaua

SEQ ID NO: 23973 - RNA, 22 nt, Human
cugacacccagcagaacuggga

SEQ ID NO: 23974 - RNA, 20 nt, Human
cugacagaaaauauuucauc

SEQ ID NO: 23975 - RNA, 22 nt, Human
cugacagaaucauuaagaccau

SEQ ID NO: 23976 - RNA, 22 nt, Human
cugacagaugcugcuggcagua

SEQ ID NO: 23977 - RNA, 22 nt, Human
cugacagauuagaugugcauau

SEQ ID NO: 23978 - RNA, 22 nt, Human
cugacagcagcaaauggagaua

SEQ ID NO: 23979 - RNA, 22 nt, Human
cugacagcuauuuuuguagaua

SEQ ID NO: 23980 - RNA, 22 nt, Human
cugacagcuguugcagugaaug

SEQ ID NO: 23981 - RNA, 22 nt, Human
cugacaguaacuaauguggaga

SEQ ID NO: 23982 - RNA, 22 nt, Human
cugacagucucauugauuugcu

SEQ ID NO: 23983 - RNA, 22 nt, Human
cugacagucuugccaaguuucu

SEQ ID NO: 23984 - RNA, 22 nt, Human
cugacauguauaagcuuuaagu

SEQ ID NO: 23985 - RNA, 22 nt, Human
cugacauuuacugagcacuuac

SEQ ID NO: 23986 - RNA, 20 nt, Human
cugaccagcagccugucucc

SEQ ID NO: 23987 - RNA, 22 nt, Human
cugcugagcaucagggcugccc

SEQ ID NO: 23988 - RNA, 22 nt, Human
cugcugagcccuggcacaggug

SEQ ID NO: 23989 - RNA, 22 nt, Human
cugcugaggccuucccuguccu

SEQ ID NO: 23990 - RNA, 22 nt, Human
cugcugagguauacuaugugac

SEQ ID NO: 23991 - RNA, 22 nt, Human
cugcugcaacucuuuagagggu

SEQ ID NO: 23992 - RNA, 22 nt, Human
cugcugcuuagcauagcagagg

SEQ ID NO: 23993 - RNA, 22 nt, Human
cugcuggacuacaggaagaguu

SEQ ID NO: 23994 - RNA, 22 nt, Human
cugcuggcaccgaugaaagaca

SEQ ID NO: 23995 - RNA, 22 nt, Human
cugcuggcccccauuucagggu

SEQ ID NO: 23996 - RNA, 22 nt, Human
cugcuggcuucuagucauucaa

SEQ ID NO: 23997 - RNA, 22 nt, Human
cugcugggcagaggcugcauga

SEQ ID NO: 23998 - RNA, 22 nt, Human
cugcugguaccaguggccguca

SEQ ID NO: 23999 - RNA, 22 nt, Human
cugcugguuagucuuaguggga

SEQ ID NO: 24000 - RNA, 22 nt, Human
cugcugucauagccaucccucc

SEQ ID NO: 24001 - RNA, 22 nt, Human
cugcugucaucuggcgcugugc

SEQ ID NO: 24002 - RNA, 22 nt, Human
cugcuguccaaccugcacucgc

SEQ ID NO: 24003 - RNA, 20 nt, Human
cugcugugauucccuccucc

SEQ ID NO: 24004 - RNA, 22 nt, Human
cugcugugcagacagacucucu

SEQ ID NO: 24005 - RNA, 22 nt, Human
cugcugugccucuuuucacgug

SEQ ID NO: 24006 - RNA, 22 nt, Human
cugcugugcuuguggccacccg

SEQ ID NO: 24007 - RNA, 22 nt, Human
cugcugugugaccauggacagg

SEQ ID NO: 24008 - RNA, 22 nt, Human
cugcugugugcuuacuuggguu

SEQ ID NO: 24009 - RNA, 20 nt, Human
cugcugugugugccucagcc

SEQ ID NO: 24010 - RNA, 22 nt, Human
cugcuguguuagcagguuuagu

SEQ ID NO: 24011 - RNA, 22 nt, Human
cugcuguguugccagugucacc

SEQ ID NO: 24012 - RNA, 22 nt, Human
cugcuguguuggcauuggauag

SEQ ID NO: 24013 - RNA, 23 nt, Human
cugcuguguuggucucgauggga

SEQ ID NO: 24014 - RNA, 22 nt, Human
cugcuguguuucacaccucugg

SEQ ID NO: 24015 - RNA, 22 nt, Human
cugcuguuuggugagugagaaa

SEQ ID NO: 24016 - RNA, 22 nt, Human
cugcuuauggagaugaguaaga

SEQ ID NO: 24017 - RNA, 22 nt, Human
cugcuuggcauugguaaagaau

SEQ ID NO: 24018 - RNA, 20 nt, Human
cugcuugggccccucuggcc

SEQ ID NO: 24019 - RNA, 22 nt, Human
cugcuuuaacaaggcugaucag

SEQ ID NO: 24020 - RNA, 22 nt, Human
cugcuuuaacagaugauggugu

SEQ ID NO: 24021 - RNA, 22 nt, Human
cugcuuuaauggaaaguguuuu

SEQ ID NO: 24022 - RNA, 22 nt, Human
cugcuuuagacaacugcuggga

SEQ ID NO: 24023 - RNA, 22 nt, Human
cugcuuuagagcugagccucag

SEQ ID NO: 24024 - RNA, 22 nt, Human
cugcuuuagcuagugcucuuag

SEQ ID NO: 24025 - RNA, 19 nt, Human
cugcuuuaggccuuaaaag

SEQ ID NO: 24026 - RNA, 22 nt, Human
cugcuuuauagggcuuccaugu

SEQ ID NO: 24027 - RNA, 23 nt, Human
cugcuuucccacuccaugcucuu

SEQ ID NO: 24028 - RNA, 22 nt, Human
cugcuuugauuagaagaguaca

SEQ ID NO: 24029 - RNA, 22 nt, Human
cugcuuuggcagaagucagcua

SEQ ID NO: 24030 - RNA, 22 nt, Human
cugcuuugggcagcuuuguggc

SEQ ID NO: 24031 - RNA, 22 nt, Human
cuggaaaaugaagaagcagagg

SEQ ID NO: 24032 - RNA, 22 nt, Human
cuggaaagacagagggcauggg

SEQ ID NO: 24033 - RNA, 22 nt, Human
cuggaaagagauggcaggguuu

SEQ ID NO: 24034 - RNA, 22 nt, Human
cuggaaagauuucuuuggaguc

SEQ ID NO: 24035 - RNA, 22 nt, Human
cuggaaaguagauguacuaagg

SEQ ID NO: 24036 - RNA, 23 nt, Human
cuggaacauaguagauggucaga

SEQ ID NO: 24037 - RNA, 22 nt, Human
cuggaacucaggaugguuagga

SEQ ID NO: 24038 - RNA, 21 nt, Human
cuggaagaagcagcaggauuc

SEQ ID NO: 24039 - RNA, 22 nt, Human
cuggaagacguuugaagccaug

SEQ ID NO: 24040 - RNA, 22 nt, Human
cuggaagcuuguuugccagucu

SEQ ID NO: 24041 - RNA, 22 nt, Human
cuggaaggagcccgggcggauc

SEQ ID NO: 24042 - RNA, 19 nt, Human
cuggaaggagggacuguuc

SEQ ID NO: 24043 - RNA, 22 nt, Human
cuggaaggcggagguuguagug

SEQ ID NO: 24044 - RNA, 22 nt, Human
cuggaaggcucugcugccuguc

SEQ ID NO: 24045 - RNA, 22 nt, Human
cuggaagggagcacuguagaga

SEQ ID NO: 24046 - RNA, 22 nt, Human
cuggaagguaacaaggccauua

SEQ ID NO: 24047 - RNA, 22 nt, Human
cuggaagguggauggcgaggcc

SEQ ID NO: 24048 - RNA, 22 nt, Human
cuggaagguuccucccagcucc

SEQ ID NO: 24049 - RNA, 22 nt, Human
cuggaauauuuguaggaugaaa

SEQ ID NO: 24050 - RNA, 22 nt, Human
cuggaaugagagcccggggauc

SEQ ID NO: 24051 - RNA, 22 nt, Human
cuggaaugcggagaguuggaga

SEQ ID NO: 24052 - RNA, 22 nt, Human
cuggaauggcaaugggaagucc

SEQ ID NO: 24053 - RNA, 22 nt, Human
cuggaaugggccauuugaggcc

SEQ ID NO: 24054 - RNA, 22 nt, Human
cuggaauggguuucaggcacug

SEQ ID NO: 24055 - RNA, 22 nt, Human
cuggaauguucuccagcauggc

SEQ ID NO: 24056 - RNA, 22 nt, Human
cuggaauugcauaauauguccu

SEQ ID NO: 24057 - RNA, 22 nt, Human
cuggacagaucccuuguagcuu

SEQ ID NO: 24058 - RNA, 22 nt, Human
cuggacucagggugcuccagcg

SEQ ID NO: 24059 - RNA, 22 nt, Human
cuggacuuuggcccaucugcca

SEQ ID NO: 24060 - RNA, 22 nt, Human
cuggagaaacaucaggcauagg

SEQ ID NO: 24061 - RNA, 22 nt, Human
cuggagaacagagcuguuuaga

SEQ ID NO: 24062 - RNA, 22 nt, Human
cuggagaagcauucaaauaauu

SEQ ID NO: 24063 - RNA, 22 nt, Human
cuggagagaauguggaaugauu

SEQ ID NO: 24064 - RNA, 22 nt, Human
cuggagaguuggaagauggacu

SEQ ID NO: 24065 - RNA, 22 nt, Human
ccaaggcaacguuggugucagg

SEQ ID NO: 24066 - RNA, 22 nt, Human
ccaaggcacacucugcaagguu

SEQ ID NO: 24067 - RNA, 22 nt, Human
ccaaggcagaagauggcucuug

SEQ ID NO: 24068 - RNA, 22 nt, Human
ccaaggcaggggaucaaaguuu

SEQ ID NO: 24069 - RNA, 22 nt, Human
ccaaggccacaaacagccuggc

SEQ ID NO: 24070 - RNA, 22 nt, Human
ccaaggcuccucagcuggucuu

SEQ ID NO: 24071 - RNA, 22 nt, Human
ccaaggcugagguuuccaguug

SEQ ID NO: 24072 - RNA, 22 nt, Human
ccaagggagacugugagaccuc

SEQ ID NO: 24073 - RNA, 22 nt, Human
ccaaggucuuggacagcuaaug

SEQ ID NO: 24074 - RNA, 22 nt, Human
ccaaguaguugagacuacaggu

SEQ ID NO: 24075 - RNA, 20 nt, Human
ccaauaaagcucuauaggga

SEQ ID NO: 24076 - RNA, 22 nt, Human
ccaauauuaugaaagugugaca

SEQ ID NO: 24077 - RNA, 22 nt, Human
ccaauccucauguucaacaacc

SEQ ID NO: 24078 - RNA, 22 nt, Human
ccaaugagacagaaagagccuc

SEQ ID NO: 24079 - RNA, 22 nt, Human
ccaaugcauugaauuagguuuu

SEQ ID NO: 24080 - RNA, 22 nt, Human
ccaauguuaggcucugguuuua

SEQ ID NO: 24081 - RNA, 18 nt, Human
ccaauguuggccccaagg

SEQ ID NO: 24082 - RNA, 20 nt, Human
ccaauguuuacagauuacuu

SEQ ID NO: 24083 - RNA, 22 nt, Human
ccaauguuuauuuuccugcugc

SEQ ID NO: 24084 - RNA, 22 nt, Human
ccaauguuuuauacagaaguac

SEQ ID NO: 24085 - RNA, 22 nt, Human
ccaauucauccucuggggcuuc

SEQ ID NO: 24086 - RNA, 22 nt, Human
ccacaaggaggacagcaguugg

SEQ ID NO: 24087 - RNA, 17 nt, Human
ccacacccuuuccuucc

SEQ ID NO: 24088 - RNA, 22 nt, Human
ccacacuggcaugggauggagg

SEQ ID NO: 24089 - RNA, 22 nt, Human
ccacacuuugagaugacuagga

SEQ ID NO: 24090 - RNA, 22 nt, Human
ccacagaaaauaaagcacgauu

SEQ ID NO: 24091 - RNA, 22 nt, Human
ccacagaccuuggcuuccaccu

SEQ ID NO: 24092 - RNA, 22 nt, Human
ccacagaguuacaaaacaguca

SEQ ID NO: 24093 - RNA, 22 nt, Human
ccacagaguugaugcaauaaga

SEQ ID NO: 24094 - RNA, 22 nt, Human
ccacagcaggacuggagccgcc

SEQ ID NO: 24095 - RNA, 23 nt, Human
ccacagcuauaggguagugcagu

SEQ ID NO: 24096 - RNA, 22 nt, Human
ccagagaaagugaagcaaaugu

SEQ ID NO: 24097 - RNA, 22 nt, Human
ccagagaagguggagcuugugu

SEQ ID NO: 24098 - RNA, 19 nt, Human
ccagagacauuggcaucuu

SEQ ID NO: 24099 - RNA, 22 nt, Human
ccagagagaaauggauuugagu

SEQ ID NO: 24100 - RNA, 22 nt, Human
ccagagagaguacugggcucug

SEQ ID NO: 24101 - RNA, 22 nt, Human
ccagagcccagcacacggugcu

SEQ ID NO: 24102 - RNA, 19 nt, Human
ccagagcccgccagauggg

SEQ ID NO: 24103 - RNA, 22 nt, Human
ccagagcccgggaccuggacuu

SEQ ID NO: 24104 - RNA, 22 nt, Human
ccagagccggcucccucagcuu

SEQ ID NO: 24105 - RNA, 22 nt, Human
ccagagccucaacacagguccu

SEQ ID NO: 24106 - RNA, 22 nt, Human
ccagagccucgcccggagccuc

SEQ ID NO: 24107 - RNA, 22 nt, Human
ccagagccucuuaugaagaucg

SEQ ID NO: 24108 - RNA, 22 nt, Human
ccagagccugcugagccccauu

SEQ ID NO: 24109 - RNA, 22 nt, Human
ccagagcuccagggcuacagaa

SEQ ID NO: 24110 - RNA, 22 nt, Human
ccagagcugaggagaugggcuu

SEQ ID NO: 24111 - RNA, 22 nt, Human
ccagagcugauuccugggacuu

SEQ ID NO: 24112 - RNA, 22 nt, Human
ccagagcugcauccagcagguu

SEQ ID NO: 24113 - RNA, 22 nt, Human
ccagaggaauugggaaacaugu

SEQ ID NO: 24114 - RNA, 22 nt, Human
ccagaggagaugccuccucugu

SEQ ID NO: 24115 - RNA, 22 nt, Human
ccagaggagcauggccuugaga

SEQ ID NO: 24116 - RNA, 22 nt, Human
ccagaggagggcucugaugagg

SEQ ID NO: 24117 - RNA, 22 nt, Human
ccagaggaguugaggcuuuggg

SEQ ID NO: 24118 - RNA, 22 nt, Human
ccagaggaucaguacuggcugg

SEQ ID NO: 24119 - RNA, 19 nt, Human
ccagaggcagcuucuguaa

SEQ ID NO: 24120 - RNA, 22 nt, Human
ccagaggcuggcagccagcuga

SEQ ID NO: 24121 - RNA, 22 nt, Human
ccagagggaagaggaagcgcug

SEQ ID NO: 24122 - RNA, 22 nt, Human
ccagagggcuugguuugggcca

SEQ ID NO: 24123 - RNA, 22 nt, Human
ccagaggucuccugcacgggau

SEQ ID NO: 24124 - RNA, 22 nt, Human
ccagaggugccacagaaagagc

SEQ ID NO: 24125 - RNA, 22 nt, Human
ccagaggugcucuuuggaagug

SEQ ID NO: 24126 - RNA, 22 nt, Human
ccagagguggaagauuguuuug

SEQ ID NO: 24127 - RNA, 22 nt, Human
ccagaggugggagugaucuggu

SEQ ID NO: 24128 - RNA, 22 nt, Human
ccagagguggucauagaaagca

SEQ ID NO: 24129 - RNA, 22 nt, Human
ccagagguuacacccucagccc

SEQ ID NO: 24130 - RNA, 22 nt, Human
ccagagguuccaggcuagggag

SEQ ID NO: 24131 - RNA, 22 nt, Human
ccagagucauuuugagucauaa

SEQ ID NO: 24132 - RNA, 22 nt, Human
ccagagucuuuauauuccugaa

SEQ ID NO: 24133 - RNA, 22 nt, Human
ccagauaaggcuuuuuaaaagc

SEQ ID NO: 24134 - RNA, 22 nt, Human
ccagauauucacuuuuacaugc

SEQ ID NO: 24135 - RNA, 22 nt, Human
ccagaucacucaaccagagcuc

SEQ ID NO: 24136 - RNA, 16 nt, Human
ccagaugaaugggagu

SEQ ID NO: 24137 - RNA, 18 nt, Human
ccagauggccagucugcu

SEQ ID NO: 24138 - RNA, 22 nt, Human
ccagaugggccagggguuuguu

SEQ ID NO: 24139 - RNA, 22 nt, Human
ccagaugggcuuuagcaaauga

SEQ ID NO: 24140 - RNA, 22 nt, Human
ccagauucauagaaacucauag

SEQ ID NO: 24141 - RNA, 23 nt, Human
ccagauuugccacgagagaggcu

SEQ ID NO: 24142 - RNA, 22 nt, Human
ccagcacucgcugauuuuagga

SEQ ID NO: 24143 - RNA, 22 nt, Human
ccagcacucugucccagcuucc

SEQ ID NO: 24144 - RNA, 22 nt, Human
ccagcagaagcucccgcugggu

SEQ ID NO: 24145 - RNA, 22 nt, Human
ccagcagagcuggaagugugcu

SEQ ID NO: 24146 - RNA, 22 nt, Human
ccagcagagggcgcuucacacc

SEQ ID NO: 24147 - RNA, 22 nt, Human
ccagcagagucuaggaaggagg

SEQ ID NO: 24148 - RNA, 22 nt, Human
ccagcagagugggguuuagagu

SEQ ID NO: 24149 - RNA, 22 nt, Human
ccagcagcagcguccaaggaga

SEQ ID NO: 24150 - RNA, 22 nt, Human
ccagcagcauccugcagcacuu

SEQ ID NO: 24151 - RNA, 22 nt, Human
ccagcagcccucuuccaagacu

SEQ ID NO: 24152 - RNA, 22 nt, Human
ccagcagcgauagggugagugc

SEQ ID NO: 24153 - RNA, 22 nt, Human
ccagcagcucccucaggguccg

SEQ ID NO: 24154 - RNA, 22 nt, Human
ccagcagcuuugcauacacuaa

SEQ ID NO: 24155 - RNA, 22 nt, Human
ccagcaggagaugccugugucu

SEQ ID NO: 24156 - RNA, 22 nt, Human
ccagcaucagcacccaaggagc

SEQ ID NO: 24157 - RNA, 22 nt, Human
ccagcauccaugcucccucggg

SEQ ID NO: 24158 - RNA, 22 nt, Human
ccagcaugagacgaugaugaag

SEQ ID NO: 24159 - RNA, 20 nt, Human
ccagcauguacacaugugga

SEQ ID NO: 24160 - RNA, 22 nt, Human
ccagccacagcuuccagcuccu

SEQ ID NO: 24161 - RNA, 22 nt, Human
ccagccaccgcuuguuugcacu

SEQ ID NO: 24162 - RNA, 22 nt, Human
ccagccagccuugaucugagua

SEQ ID NO: 24163 - RNA, 22 nt, Human
ccagccagcugguuggacgccu

SEQ ID NO: 24164 - RNA, 22 nt, Human
ccagccaguccagcauuggugu

SEQ ID NO: 24165 - RNA, 19 nt, Human
ccagcccauaguccaucac

SEQ ID NO: 24166 - RNA, 22 nt, Human
ccagccccgggccuuaccgugc

SEQ ID NO: 24167 - RNA, 22 nt, Human
ccagcccugauuagagaauguc

SEQ ID NO: 24168 - RNA, 18 nt, Human
ccagcccugcagcaccug

SEQ ID NO: 24169 - RNA, 22 nt, Human
ccagcccuguuuaugugucacu

SEQ ID NO: 24170 - RNA, 22 nt, Human
ccagcccuugcugaaggguggc

SEQ ID NO: 24171 - RNA, 22 nt, Human
ccagcccuuugugguucacuga

SEQ ID NO: 24172 - RNA, 19 nt, Human
ccagccucucuuccacccc

SEQ ID NO: 24173 - RNA, 22 nt, Human
ccagccuucaccugcucugguc

SEQ ID NO: 24174 - RNA, 22 nt, Human
ccagcgcuucccaucagggagg

SEQ ID NO: 24175 - RNA, 22 nt, Human
ccagcuaguaagcaccugcauc

SEQ ID NO: 24176 - RNA, 22 nt, Human
ccagcuauugcuguguaacagu

SEQ ID NO: 24177 - RNA, 23 nt, Human
ccagcucccaggucugaggacug

SEQ ID NO: 24178 - RNA, 22 nt, Human
ccagcuccggugugcuuauuuc

SEQ ID NO: 24179 - RNA, 22 nt, Human
ccagcuccucuucccaguguca

SEQ ID NO: 24180 - RNA, 22 nt, Human
ccagcuccucuugucucuagca

SEQ ID NO: 24181 - RNA, 22 nt, Human
caugucuuauuuaugcuucuua

SEQ ID NO: 24182 - RNA, 22 nt, Human
caugucuuucucaucacaucua

SEQ ID NO: 24183 - RNA, 22 nt, Human
caugugauuacacuaagaaggu

SEQ ID NO: 24184 - RNA, 19 nt, Human
caugugcaugagcacagga

SEQ ID NO: 24185 - RNA, 22 nt, Human
cauguggagaauuaaaaaauac

SEQ ID NO: 24186 - RNA, 22 nt, Human
caugugguauugugagauccac

SEQ ID NO: 24187 - RNA, 22 nt, Human
cauguguaaggcucacaggcag

SEQ ID NO: 24188 - RNA, 22 nt, Human
cauguguaccagcuguucuuug

SEQ ID NO: 24189 - RNA, 22 nt, Human
cauguguauuauucuuguggaa

SEQ ID NO: 24190 - RNA, 21 nt, Human
caugugucuuguguuacugcu

SEQ ID NO: 24191 - RNA, 22 nt, Human
caugugugaagacugcgggcca

SEQ ID NO: 24192 - RNA, 22 nt, Human
caugugugaaucuugugaucau

SEQ ID NO: 24193 - RNA, 22 nt, Human
caugugugagugagcagucuuc

SEQ ID NO: 24194 - RNA, 22 nt, Human
caugugugcaccaacccuaugu

SEQ ID NO: 24195 - RNA, 22 nt, Human
caugugugguuaccuacuugac

SEQ ID NO: 24196 - RNA, 22 nt, Human
cauguguguccaugugacuaag

SEQ ID NO: 24197 - RNA, 22 nt, Human
caugugugucuccaccagcugc

SEQ ID NO: 24198 - RNA, 22 nt, Human
cauguguguggcugacaauuuu

SEQ ID NO: 24199 - RNA, 18 nt, Human
cauguguucuacaucagu

SEQ ID NO: 24200 - RNA, 22 nt, Human
cauguucaucagaucaauugua

SEQ ID NO: 24201 - RNA, 22 nt, Human
cauguucuaauauugugacaua

SEQ ID NO: 24202 - RNA, 22 nt, Human
cauguuggcacugucucugccu

SEQ ID NO: 24203 - RNA, 22 nt, Human
cauguuguaucauucuguuccu

SEQ ID NO: 24204 - RNA, 22 nt, Human
cauguuuaauugcgauguuuga

SEQ ID NO: 24205 - RNA, 22 nt, Human
ccagggugaggaggcucccacg

SEQ ID NO: 24206 - RNA, 22 nt, Human
ccagggugcucuguggcgucgc

SEQ ID NO: 24207 - RNA, 22 nt, Human
ccaggguuggaugagucacuua

SEQ ID NO: 24208 - RNA, 22 nt, Human
ccaggguuggcaagcaaggcuu

SEQ ID NO: 24209 - RNA, 22 nt, Human
ccaggguugguauucaccugga

SEQ ID NO: 24210 - RNA, 22 nt, Human
ccagguaacuugagaacaugag

SEQ ID NO: 24211 - RNA, 21 nt, Human
ccagguacauggagaaugugg

SEQ ID NO: 24212 - RNA, 22 nt, Human
ccaggucuaucaaguugggcuc

SEQ ID NO: 24213 - RNA, 22 nt, Human
ccaggucuuguuugacaucaau

SEQ ID NO: 24214 - RNA, 22 nt, Human
ccaggugcacucaagaccugcu

SEQ ID NO: 24215 - RNA, 22 nt, Human
ccaggugcucuugccagggcug

SEQ ID NO: 24216 - RNA, 22 nt, Human
ccagguggaaggucugugcucu

SEQ ID NO: 24217 - RNA, 22 nt, Human
ccagguggacuugauuugaaua

SEQ ID NO: 24218 - RNA, 22 nt, Human
ccagguggcccugcccuacucu

SEQ ID NO: 24219 - RNA, 22 nt, Human
ccaggugggcgugucuucaccu

SEQ ID NO: 24220 - RNA, 20 nt, Human
ccagguggugccuggagagg

SEQ ID NO: 24221 - RNA, 22 nt, Human
ccagguguaagacaugguccua

SEQ ID NO: 24222 - RNA, 22 nt, Human
ccaggugucauggauaaugggu

SEQ ID NO: 24223 - RNA, 22 nt, Human
ccaggugucuguggccagcccu

SEQ ID NO: 24224 - RNA, 22 nt, Human
ccagguguuacacgaguguuaa

SEQ ID NO: 24225 - RNA, 22 nt, Human
ccaguaaauuacuugaugucau

SEQ ID NO: 24226 - RNA, 22 nt, Human
ccaguaacaccucgcagacucc

SEQ ID NO: 24227 - RNA, 22 nt, Human
ccaguaauggaaauagcaguuc

SEQ ID NO: 24228 - RNA, 21 nt, Human
ccaguauuauuucucuaugua

SEQ ID NO: 24229 - RNA, 22 nt, Human
ccagucacagguguguuuauau

SEQ ID NO: 24230 - RNA, 22 nt, Human
ccagucaguucugauuaugugg

SEQ ID NO: 24231 - RNA, 22 nt, Human
ccaguccagugccaugcauggc

SEQ ID NO: 24232 - RNA, 22 nt, Human
ccaguccauauuuauacugccg

SEQ ID NO: 24233 - RNA, 22 nt, Human
ccaguccuaguucuaccuuaca

SEQ ID NO: 24234 - RNA, 19 nt, Human
ccaguccucuuugggccug

SEQ ID NO: 24235 - RNA, 22 nt, Human
ccagucgugacaaccaaaaaua

SEQ ID NO: 24236 - RNA, 20 nt, Human
ccagucucuaucagaaauaa

SEQ ID NO: 24237 - RNA, 22 nt, Human
ccagucugcagccccuggggac

SEQ ID NO: 24238 - RNA, 22 nt, Human
ccagucugcugugguaggaaga

SEQ ID NO: 24239 - RNA, 21 nt, Human
ccagucuguaaaauggggaca

SEQ ID NO: 24240 - RNA, 19 nt, Human
ccagugcaagguaagauag

SEQ ID NO: 24241 - RNA, 22 nt, Human
ccagugcccagcugcccaggca

SEQ ID NO: 24242 - RNA, 22 nt, Human
ccagugccuauccuucuccugu

SEQ ID NO: 24243 - RNA, 22 nt, Human
ccaguggacuucucccuguggu

SEQ ID NO: 24244 - RNA, 20 nt, Human
ccagugggaagugauuaggu

SEQ ID NO: 24245 - RNA, 22 nt, Human
ccaguggguaggccauggugag

SEQ ID NO: 24246 - RNA, 22 nt, Human
ccaguguauuuuugggaccugc

SEQ ID NO: 24247 - RNA, 22 nt, Human
ccaguguccuuccuuuccaugg

SEQ ID NO: 24248 - RNA, 22 nt, Human
ccagugucuacuguggcauauc

SEQ ID NO: 24249 - RNA, 22 nt, Human
ccagugucuagcagaugacagg

SEQ ID NO: 24250 - RNA, 19 nt, Human
ccagugucuagcgcacagc

SEQ ID NO: 24251 - RNA, 22 nt, Human
ccagugucuagucacagguacu

SEQ ID NO: 24252 - RNA, 22 nt, Human
ccagugugaaccucaccacccu

SEQ ID NO: 24253 - RNA, 22 nt, Human
ccagugugauuguugcaagaau

SEQ ID NO: 24254 - RNA, 22 nt, Human
ccagugugccaauuuacagcug

SEQ ID NO: 24255 - RNA, 22 nt, Human
ccaguguggacucucuccuuug

SEQ ID NO: 24256 - RNA, 22 nt, Human
ccagugugguuuaggauaggga

SEQ ID NO: 24257 - RNA, 22 nt, Human
ccaguguguuuuucucugacuc

SEQ ID NO: 24258 - RNA, 22 nt, Human
ccaguguucccucggguucaug

SEQ ID NO: 24259 - RNA, 22 nt, Human
ccaguguuggaggauggcuugc

SEQ ID NO: 24260 - RNA, 22 nt, Human
ccaguguuuccccagaagagag

SEQ ID NO: 24261 - RNA, 22 nt, Human
ccaguuaguuaaaggcgcagua

SEQ ID NO: 24262 - RNA, 22 nt, Human
ccaguucuucuugacacgaaag

SEQ ID NO: 24263 - RNA, 22 nt, Human
ccaguucuuucugugugcaaca

SEQ ID NO: 24264 - RNA, 22 nt, Human
ccaguugguuucaaugggacag

SEQ ID NO: 24265 - RNA, 22 nt, Human
ccaguuuaagacuuaucucaau

SEQ ID NO: 24266 - RNA, 22 nt, Human
ccaguuugagguuucaagaugu

SEQ ID NO: 24267 - RNA, 22 nt, Human
ccaguuuuuccagugcuuucug

SEQ ID NO: 24268 - RNA, 23 nt, Human
ccauaaucaggguuguggggucc

SEQ ID NO: 24269 - RNA, 22 nt, Human
ccauaaucauguaaguaaauuc

SEQ ID NO: 24270 - RNA, 22 nt, Human
ccauaggagcccuggucccuga

SEQ ID NO: 24271 - RNA, 22 nt, Human
ccaucaaugacuaauaaaauag

SEQ ID NO: 24272 - RNA, 22 nt, Human
ccaucaguuuuaucugacaaaa

SEQ ID NO: 24273 - RNA, 22 nt, Human
ccauccauauggugacaaggug

SEQ ID NO: 24274 - RNA, 22 nt, Human
ccauccaugaacgaggaagugg

SEQ ID NO: 24275 - RNA, 22 nt, Human
ccauccaugcgccagacagauu

SEQ ID NO: 24276 - RNA, 22 nt, Human
ccaucccuucucuggccagcag

SEQ ID NO: 24277 - RNA, 22 nt, Human
ccauccugcaggaccuccauau

SEQ ID NO: 24278 - RNA, 22 nt, Human
ccauccugcauugcuauucaga

SEQ ID NO: 24279 - RNA, 22 nt, Human
ccaugcaauuucuguaaaacca

SEQ ID NO: 24280 - RNA, 22 nt, Human
ccaugcagugcuggagcugauu

SEQ ID NO: 24281 - RNA, 22 nt, Human
ccaugccauacuggccacccgg

SEQ ID NO: 24282 - RNA, 19 nt, Human
ccaugccaucauuuuaaag

SEQ ID NO: 24283 - RNA, 22 nt, Human
ccaugcccuaaaggacuggcag

SEQ ID NO: 24284 - RNA, 22 nt, Human
ccaugcccuugucaucuccagg

SEQ ID NO: 24285 - RNA, 22 nt, Human
ccaugccuuccuuucccuggaa

SEQ ID NO: 24286 - RNA, 22 nt, Human
ccaugccuuucacugaaccagu

SEQ ID NO: 24287 - RNA, 22 nt, Human
ccaugcuccuuaccacucacuu

SEQ ID NO: 24288 - RNA, 22 nt, Human
ccaugcugacccugugcaggca

SEQ ID NO: 24289 - RNA, 22 nt, Human
ccauggagcgggugagugagug

SEQ ID NO: 24290 - RNA, 22 nt, Human
ccauggcagccaugggagccac

SEQ ID NO: 24291 - RNA, 22 nt, Human
ccauggcagccuggccuggcuu

SEQ ID NO: 24292 - RNA, 22 nt, Human
ccauggccaauugcaccuugcu

SEQ ID NO: 24293 - RNA, 22 nt, Human
ccauggccucgcucuacguggg

SEQ ID NO: 24294 - RNA, 22 nt, Human
ccauggcucuagagauugaaaa

SEQ ID NO: 24295 - RNA, 22 nt, Human
ccauggcuucuuucucugccag

SEQ ID NO: 24296 - RNA, 22 nt, Human
ccaugggaccuaccuccugugc

SEQ ID NO: 24297 - RNA, 22 nt, Human
ccaugggcgcacaggccuggag

SEQ ID NO: 24298 - RNA, 22 nt, Human
ccauguacaugaacacggcggc

SEQ ID NO: 24299 - RNA, 22 nt, Human
ccaugugcuugcucuggcaccu

SEQ ID NO: 24300 - RNA, 22 nt, Human
ccauguggcuagcgugccugca

SEQ ID NO: 24301 - RNA, 22 nt, Human
ccaugugggauuuuggugucug

SEQ ID NO: 24302 - RNA, 20 nt, Human
cugggcugcccagcuauggg

SEQ ID NO: 24303 - RNA, 22 nt, Human
cugggcugcgggcgccccucca

SEQ ID NO: 24304 - RNA, 22 nt, Human
cugggcugcggugguagguugu

SEQ ID NO: 24305 - RNA, 22 nt, Human
cugggcugcucagcccccucgc

SEQ ID NO: 24306 - RNA, 22 nt, Human
cugggcuggagugcaauggcgc

SEQ ID NO: 24307 - RNA, 22 nt, Human
cugggcuggauaauucuuugcu

SEQ ID NO: 24308 - RNA, 22 nt, Human
cugggcuggcgcauccgacacg

SEQ ID NO: 24309 - RNA, 20 nt, Human
cugggcugggcuacaggguc

SEQ ID NO: 24310 - RNA, 22 nt, Human
cugggcuguaauguggcacuga

SEQ ID NO: 24311 - RNA, 22 nt, Human
cugggcugugguguggcccaaa

SEQ ID NO: 24312 - RNA, 22 nt, Human
cugggcuuagcagcuccugguc

SEQ ID NO: 24313 - RNA, 22 nt, Human
cugggcuuugguacugugauua

SEQ ID NO: 24314 - RNA, 22 nt, Human
cuggggaaggcggugacugcgc

SEQ ID NO: 24315 - RNA, 22 nt, Human
cuggggaauagagcuggagacc

SEQ ID NO: 24316 - RNA, 22 nt, Human
cuggggacugaaggauguugcu

SEQ ID NO: 24317 - RNA, 22 nt, Human
cuggggacuugcagacacaauu

SEQ ID NO: 24318 - RNA, 20 nt, Human
cuggggagccucgcgguggc

SEQ ID NO: 24319 - RNA, 20 nt, Human
cuggggaggaggauguguuc

SEQ ID NO: 24320 - RNA, 22 nt, Human
cuggggauccuuuuugcaucua

SEQ ID NO: 24321 - RNA, 22 nt, Human
cuggggcagagcccagcaauuu

SEQ ID NO: 24322 - RNA, 22 nt, Human
cuggggcaucauccauucuuuc

SEQ ID NO: 24323 - RNA, 22 nt, Human
cuggggcauugggagaggccug

SEQ ID NO: 24324 - RNA, 22 nt, Human
cuggggcccugggucugcccuc

SEQ ID NO: 24325 - RNA, 22 nt, Human
cuggggcucacuuuggucaggc

SEQ ID NO: 24326 - RNA, 23 nt, Human
cuggggcucauugcaguagccau

SEQ ID NO: 24327 - RNA, 22 nt, Human
cuggggcucucuggaaugcuug

SEQ ID NO: 24328 - RNA, 22 nt, Human
cuggggcuguaggaggacuuau

SEQ ID NO: 24329 - RNA, 22 nt, Human
cuggggcugugggagacaaggc

SEQ ID NO: 24330 - RNA, 23 nt, Human
cuggggcuuucaaaucugggcag

SEQ ID NO: 24331 - RNA, 22 nt, Human
cugggggucgcgccucugggca

SEQ ID NO: 24332 - RNA, 22 nt, Human
cugggggucuugaaagggagag

SEQ ID NO: 24333 - RNA, 22 nt, Human
cugggguggauggguccaaguu

SEQ ID NO: 24334 - RNA, 22 nt, Human
cuggggugucucgucugccauu

SEQ ID NO: 24335 - RNA, 22 nt, Human
cuggggugugcucagagcaggg

SEQ ID NO: 24336 - RNA, 22 nt, Human
cugggguuggccagggcccuag

SEQ ID NO: 24337 - RNA, 22 nt, Human
cuggguaaaggcugcuuuucua

SEQ ID NO: 24338 - RNA, 22 nt, Human
cuggguagggcaaggaacuggc

SEQ ID NO: 24339 - RNA, 22 nt, Human
cuggguauaggaaacaguuaag

SEQ ID NO: 24340 - RNA, 22 nt, Human
cugggucuccggcagccucggg

SEQ ID NO: 24341 - RNA, 20 nt, Human
cugggucuccuucugcuuaa

SEQ ID NO: 24342 - RNA, 22 nt, Human
cugggucucuuaccaugugacu

SEQ ID NO: 24343 - RNA, 22 nt, Human
cugggucuggcuacugcuuccu

SEQ ID NO: 24344 - RNA, 22 nt, Human
cugggucuggugucaggcgacg

SEQ ID NO: 24345 - RNA, 22 nt, Human
cugggugcugugggcucagagg

SEQ ID NO: 24346 - RNA, 22 nt, Human
cuggguggaaagugcugagaau

SEQ ID NO: 24347 - RNA, 22 nt, Human
cuggguggaucgcagccccagg

SEQ ID NO: 24348 - RNA, 22 nt, Human
cuggguggcgucuggggccagu

SEQ ID NO: 24349 - RNA, 22 nt, Human
cuggguggcuguccagccagcc

SEQ ID NO: 24350 - RNA, 22 nt, Human
cuggguguagcccaguaugagg

SEQ ID NO: 24351 - RNA, 22 nt, Human
cuggguguucacccgaggcgcu

SEQ ID NO: 24352 - RNA, 22 nt, Human
cuggguugcaaagcgcuggcug

SEQ ID NO: 24353 - RNA, 22 nt, Human
cugguacagggaaauaaaggaa

SEQ ID NO: 24354 - RNA, 22 nt, Human
cugguagggccccacauccuua

SEQ ID NO: 24355 - RNA, 22 nt, Human
cuggucaaaaauuaugcuuacu

SEQ ID NO: 24356 - RNA, 22 nt, Human
cuggucagagcaacugcucaca

SEQ ID NO: 24357 - RNA, 22 nt, Human
cuggucagcugaagccccacac

SEQ ID NO: 24358 - RNA, 18 nt, Human
cuggucagggcaaugggc

SEQ ID NO: 24359 - RNA, 22 nt, Human
cuggucccagcucugccaccaa

SEQ ID NO: 24360 - RNA, 22 nt, Human
cuggucccauccuggcuucaug

SEQ ID NO: 24361 - RNA, 22 nt, Human
cugguccuaaagcccuacucca

SEQ ID NO: 24362 - RNA, 19 nt, Human
cugguccugacugaggggu

SEQ ID NO: 24363 - RNA, 22 nt, Human
cuggucugcaaggccauauaga

SEQ ID NO: 24364 - RNA, 21 nt, Human
cuggucuggccaauaaggucc

SEQ ID NO: 24365 - RNA, 22 nt, Human
cuggugaauauuggaggcauug

SEQ ID NO: 24366 - RNA, 22 nt, Human
cuggugacauuuccggcugcca

SEQ ID NO: 24367 - RNA, 22 nt, Human
cuggugagacgguugacaggag

SEQ ID NO: 24368 - RNA, 22 nt, Human
cuggugcaagauucccugcuuc

SEQ ID NO: 24369 - RNA, 22 nt, Human
cuggugcacuacagccuggaac

SEQ ID NO: 24370 - RNA, 22 nt, Human
cuggugccauucuguggccuag

SEQ ID NO: 24371 - RNA, 22 nt, Human
cuggugcccuguguggcaggag

SEQ ID NO: 24372 - RNA, 22 nt, Human
cuggugccuccucccugugcuu

SEQ ID NO: 24373 - RNA, 22 nt, Human
cuggugcuuugcucauuugaua

SEQ ID NO: 24374 - RNA, 22 nt, Human
cugguggaggugccaggauuug

SEQ ID NO: 24375 - RNA, 22 nt, Human
cugguggcaucuugagaugguu

SEQ ID NO: 24376 - RNA, 22 nt, Human
cuggugucugauucuccccuga

SEQ ID NO: 24377 - RNA, 22 nt, Human
cugguguggacuccgcgcggag

SEQ ID NO: 24378 - RNA, 22 nt, Human
cugguucaaguccuggcucugu

SEQ ID NO: 24379 - RNA, 22 nt, Human
cugguucaauacuaaacuucuu

SEQ ID NO: 24380 - RNA, 22 nt, Human
cugguucacaucuguuuaucug

SEQ ID NO: 24381 - RNA, 22 nt, Human
cugguucaucgcggccacuuau

SEQ ID NO: 24382 - RNA, 22 nt, Human
cugguuccaggauggaucuuuc

SEQ ID NO: 24383 - RNA, 22 nt, Human
cugguucccagcaggaguguag

SEQ ID NO: 24384 - RNA, 22 nt, Human
cugguucugauuuugcugcauu

SEQ ID NO: 24385 - RNA, 22 nt, Human
cugguuuaaaauuacugguuaa

SEQ ID NO: 24386 - RNA, 22 nt, Human
cugguuuaagcuuauauaguug

SEQ ID NO: 24387 - RNA, 22 nt, Human
cugguuuacucugcacugcuca

SEQ ID NO: 24388 - RNA, 19 nt, Human
cugguuuagguagugaguc

SEQ ID NO: 24389 - RNA, 22 nt, Human
cugguuuagucauaauggagaa

SEQ ID NO: 24390 - RNA, 22 nt, Human
cugguuuugucagaagcuuuau

SEQ ID NO: 24391 - RNA, 22 nt, Human
cuguaaacuaggucauuuuuaa

SEQ ID NO: 24392 - RNA, 22 nt, Human
cuguaaauaaugacaguugacu

SEQ ID NO: 24393 - RNA, 22 nt, Human
cuguaacagcugucagagcagg

SEQ ID NO: 24394 - RNA, 22 nt, Human
cuguaacucugccaagaaggcu

SEQ ID NO: 24395 - RNA, 22 nt, Human
cuguaacuuaaugagaggcaga

SEQ ID NO: 24396 - RNA, 22 nt, Human
cuguaagaugggauaagacuuu

SEQ ID NO: 24397 - RNA, 22 nt, Human
cuguacaauguuaccuauuuau

SEQ ID NO: 24398 - RNA, 22 nt, Human
cuguacaggagacgucugugca

SEQ ID NO: 24399 - RNA, 22 nt, Human
cuguacaggucaaugauaagau

SEQ ID NO: 24400 - RNA, 22 nt, Human
cuguacaggugaggagggggcu

SEQ ID NO: 24401 - RNA, 22 nt, Human
cuguacaucccaagauauuucu

SEQ ID NO: 24402 - RNA, 22 nt, Human
cuguacuuuugcaggucacagc

SEQ ID NO: 24403 - RNA, 22 nt, Human
cuguagaacgauccaggcauuu

SEQ ID NO: 24404 - RNA, 22 nt, Human
cuguagcagugugcucuuuuuc

SEQ ID NO: 24405 - RNA, 22 nt, Human
cuguagcuccagccugucuaca

SEQ ID NO: 24406 - RNA, 22 nt, Human
cuguaggcuuagcuagaaguga

SEQ ID NO: 24407 - RNA, 20 nt, Human
cuguagggugcagcaggcuc

SEQ ID NO: 24408 - RNA, 22 nt, Human
cuguaggugauugcuauguuau

SEQ ID NO: 24409 - RNA, 22 nt, Human
cuguagguuugcucugaccugg

SEQ ID NO: 24410 - RNA, 22 nt, Human
cuguauaauucaugcucuuauu

SEQ ID NO: 24411 - RNA, 20 nt, Human
cuguaucagguuacaaagua

SEQ ID NO: 24412 - RNA, 22 nt, Human
cuguaugaaauuaaguaaacag

SEQ ID NO: 24413 - RNA, 22 nt, Human
ccaccuggggcuguggccccuu

SEQ ID NO: 24414 - RNA, 22 nt, Human
ccacgacgagucaucagggcga

SEQ ID NO: 24415 - RNA, 22 nt, Human
ccacggccacccgcucaugggc

SEQ ID NO: 24416 - RNA, 23 nt, Human
ccacuagcaccuguucaacuucu

SEQ ID NO: 24417 - RNA, 22 nt, Human
ccacuauuacuguguggcaguc

SEQ ID NO: 24418 - RNA, 22 nt, Human
ccacucagcacaguggaugcag

SEQ ID NO: 24419 - RNA, 17 nt, Human
ccacucaguaauuucuc

SEQ ID NO: 24420 - RNA, 22 nt, Human
ccacuccccacgugcugucaga

SEQ ID NO: 24421 - RNA, 22 nt, Human
ccacucccuuccgguccagggc

SEQ ID NO: 24422 - RNA, 20 nt, Human
ccacuccgcccccagagggc

SEQ ID NO: 24423 - RNA, 22 nt, Human
ccagugcccagucucccugguc

SEQ ID NO: 24424 - RNA, 22 nt, Human
ccagugccuuuuguggguuugu

SEQ ID NO: 24425 - RNA, 22 nt, Human
ccagugcgagccugugcuggcc

SEQ ID NO: 24426 - RNA, 22 nt, Human
ccagugcuaagguagccucugc

SEQ ID NO: 24427 - RNA, 22 nt, Human
ccagugcucauucaaguccuua

SEQ ID NO: 24428 - RNA, 22 nt, Human
ccagugcuucuuugcuagcugg

SEQ ID NO: 24429 - RNA, 22 nt, Human
ccaguggaaauguggucaggau

SEQ ID NO: 24430 - RNA, 22 nt, Human
ccaguggccaugcacgagcagc

SEQ ID NO: 24431 - RNA, 22 nt, Human
ccagugucagaaagauuauccu

SEQ ID NO: 24432 - RNA, 22 nt, Human
ccagugucuucagaguaaaucu

SEQ ID NO: 24433 - RNA, 22 nt, Human
ccagugugaccaucuguuagcu

SEQ ID NO: 24434 - RNA, 22 nt, Human
ccaguguggccaggucuucugg

SEQ ID NO: 24435 - RNA, 22 nt, Human
ccagugugggcugguggaggac

SEQ ID NO: 24436 - RNA, 22 nt, Human
ccagugugguagguccacaggu

SEQ ID NO: 24437 - RNA, 22 nt, Human
ccaguguguucccugccucacu

SEQ ID NO: 24438 - RNA, 22 nt, Human
ccaguguuacggcuugaacuau

SEQ ID NO: 24439 - RNA, 22 nt, Human
ccaguguuagagacugauacag

SEQ ID NO: 24440 - RNA, 22 nt, Human
ccaguguucaauacauauuugu

SEQ ID NO: 24441 - RNA, 22 nt, Human
cccaaaggcauuuugcugacca

SEQ ID NO: 24442 - RNA, 22 nt, Human
cccaaaggcuguacuuguaacc

SEQ ID NO: 24443 - RNA, 22 nt, Human
cccaaagggcuuccuguucuca

SEQ ID NO: 24444 - RNA, 22 nt, Human
cccaaaguacaaguaaacaugu

SEQ ID NO: 24445 - RNA, 23 nt, Human
cccaacacauuccuuuucuucug

SEQ ID NO: 24446 - RNA, 22 nt, Human
cccaaccagaaauugacagaca

SEQ ID NO: 24447 - RNA, 22 nt, Human
cccaaccccaacuuccuauguu

SEQ ID NO: 24448 - RNA, 22 nt, Human
cccaacuacucucaggcagcuu

SEQ ID NO: 24449 - RNA, 22 nt, Human
cccaagccuuucaaaacucaga

SEQ ID NO: 24450 - RNA, 22 nt, Human
cccaaggacacgggcagggaca

SEQ ID NO: 24451 - RNA, 22 nt, Human
cccaaggccucuccuuggcuug

SEQ ID NO: 24452 - RNA, 22 nt, Human
cccaauggcuggauggagggau

SEQ ID NO: 24453 - RNA, 22 nt, Human
cccacagggcugcugauggcag

SEQ ID NO: 24454 - RNA, 23 nt, Human
cccacaugucugagucagugcca

SEQ ID NO: 24455 - RNA, 22 nt, Human
cccaccagccaucugagagugu

SEQ ID NO: 24456 - RNA, 22 nt, Human
cccaccaugugcccauuggcuu

SEQ ID NO: 24457 - RNA, 22 nt, Human
cccacccacucugaccagaagc

SEQ ID NO: 24458 - RNA, 22 nt, Human
cccacccugggcuacacaucca

SEQ ID NO: 24459 - RNA, 22 nt, Human
cccacgucgaacuugcuccaga

SEQ ID NO: 24460 - RNA, 22 nt, Human
cccacucccuacgacacgcucc

SEQ ID NO: 24461 - RNA, 22 nt, Human
cccacucccugcacgccugccg

SEQ ID NO: 24462 - RNA, 22 nt, Human
cccacugagccuauacaaacag

SEQ ID NO: 24463 - RNA, 22 nt, Human
cccacugaggguuaaugccugc

SEQ ID NO: 24464 - RNA, 22 nt, Human
cccacugcaugaguugguauua

SEQ ID NO: 24465 - RNA, 22 nt, Human
cccacugcugcucuccauggca

SEQ ID NO: 24466 - RNA, 18 nt, Human
cccacuguccccacaggc

SEQ ID NO: 24467 - RNA, 22 nt, Human
cccacuuugguugcacucugcc

SEQ ID NO: 24468 - RNA, 22 nt, Human
cccagacccagagggaggcagg

SEQ ID NO: 24469 - RNA, 22 nt, Human
cccagagaagugaagugacuug

SEQ ID NO: 24470 - RNA, 22 nt, Human
cccagagaaucuuucagaaagg

SEQ ID NO: 24471 - RNA, 22 nt, Human
cccagagacuuuguccgacgac

SEQ ID NO: 24472 - RNA, 22 nt, Human
cccagagagcauuuggacaaag

SEQ ID NO: 24473 - RNA, 22 nt, Human
cccagagagguaaaacagccuu

SEQ ID NO: 24474 - RNA, 17 nt, Human
cccagagaugcugccuu

SEQ ID NO: 24475 - RNA, 22 nt, Human
cccagagauguccugagugaua

SEQ ID NO: 24476 - RNA, 22 nt, Human
cccagagcuccgguccugccca

SEQ ID NO: 24477 - RNA, 22 nt, Human
cccagagcugggugggcagcgg

SEQ ID NO: 24478 - RNA, 23 nt, Human
cccagaggagcagggcgugagau

SEQ ID NO: 24479 - RNA, 22 nt, Human
cccagaggugaaggagguggga

SEQ ID NO: 24480 - RNA, 22 nt, Human
cccagaguggagggugcagaau

SEQ ID NO: 24481 - RNA, 22 nt, Human
cccagaguucaaacccugcguc

SEQ ID NO: 24482 - RNA, 22 nt, Human
cccagaugcagguucaagagua

SEQ ID NO: 24483 - RNA, 22 nt, Human
cccagcacuuugaauaugucac

SEQ ID NO: 24484 - RNA, 18 nt, Human
cccagcacuuugggagcc

SEQ ID NO: 24485 - RNA, 23 nt, Human
cccagcagagaugaggagggguc

SEQ ID NO: 24486 - RNA, 22 nt, Human
cccagcaggcauguugggagga

SEQ ID NO: 24487 - RNA, 22 nt, Human
cccagcaggucggugcugccug

SEQ ID NO: 24488 - RNA, 22 nt, Human
cccagcaguuugcuuagaguga

SEQ ID NO: 24489 - RNA, 22 nt, Human
cccagcaucuccaggcauggcc

SEQ ID NO: 24490 - RNA, 22 nt, Human
cccagcaugcacgcugacacuc

SEQ ID NO: 24491 - RNA, 22 nt, Human
cccagccaaggugcugguguug

SEQ ID NO: 24492 - RNA, 18 nt, Human
cccagcccaccauuucuc

SEQ ID NO: 24493 - RNA, 22 nt, Human
cccagcccaucucaaaggucua

SEQ ID NO: 24494 - RNA, 20 nt, Human
cccagccccuaccuguugcc

SEQ ID NO: 24495 - RNA, 22 nt, Human
cccagcccugaccuauuggaaa

SEQ ID NO: 24496 - RNA, 22 nt, Human
cccagccuacucugccauagca

SEQ ID NO: 24497 - RNA, 22 nt, Human
cccagccugucuuucccaauga

SEQ ID NO: 24498 - RNA, 22 nt, Human
cccagccuuccacccuggacua

SEQ ID NO: 24499 - RNA, 22 nt, Human
cccagcucaucaggagccgccc

SEQ ID NO: 24500 - RNA, 22 nt, Human
cccagcuccagagccagaaaca

SEQ ID NO: 24501 - RNA, 22 nt, Human
cccagcucccauguucuccaau

SEQ ID NO: 24502 - RNA, 22 nt, Human
cccagcuccuuacagggccgaa

SEQ ID NO: 24503 - RNA, 22 nt, Human
cccagcuccuuguuugcaucuc

SEQ ID NO: 24504 - RNA, 22 nt, Human
cccagcucugcagaccugcccu

SEQ ID NO: 24505 - RNA, 22 nt, Human
cccagcugaacuugcauuccaa

SEQ ID NO: 24506 - RNA, 17 nt, Human
cccagcuggcagugccg

SEQ ID NO: 24507 - RNA, 22 nt, Human
cccagcuggccagguggcuuug

SEQ ID NO: 24508 - RNA, 18 nt, Human
cccagcuuagcgccccuc

SEQ ID NO: 24509 - RNA, 22 nt, Human
cccagcuugcgggcggcaggag

SEQ ID NO: 24510 - RNA, 22 nt, Human
cccagcuugucugauucagccu

SEQ ID NO: 24511 - RNA, 23 nt, Human
cccagcuuucccacugccgagag

SEQ ID NO: 24512 - RNA, 22 nt, Human
cccaggaaaagcagugccagca

SEQ ID NO: 24513 - RNA, 22 nt, Human
cccaggaaaggaaaugaauggg

SEQ ID NO: 24514 - RNA, 22 nt, Human
cccaggaaauagccaggaggug

SEQ ID NO: 24515 - RNA, 22 nt, Human
cccaggaaauauguuucuuaac

SEQ ID NO: 24516 - RNA, 22 nt, Human
cccaggaacagcacagaacagc

SEQ ID NO: 24517 - RNA, 22 nt, Human
cccaggaacagggcucagaccc

SEQ ID NO: 24518 - RNA, 22 nt, Human
cccaggaagggaugccaaggaa

SEQ ID NO: 24519 - RNA, 22 nt, Human
cccaggaaguggagguugcagu

SEQ ID NO: 24520 - RNA, 22 nt, Human
cccaggaccauccuucugugcc

SEQ ID NO: 24521 - RNA, 21 nt, Human
cccaggagaagaaaagaugca

SEQ ID NO: 24522 - RNA, 22 nt, Human
cccaggagaccugugaaaggac

SEQ ID NO: 24523 - RNA, 22 nt, Human
cccaggagacugagcuguaacc

SEQ ID NO: 24524 - RNA, 22 nt, Human
cccaggagagagacuugaaucu

SEQ ID NO: 24525 - RNA, 22 nt, Human
cccaggagagaggccaguuggc

SEQ ID NO: 24526 - RNA, 22 nt, Human
cccaggagagggaaccaaaugu

SEQ ID NO: 24527 - RNA, 23 nt, Human
cccaggagccugaguccucucug

SEQ ID NO: 24528 - RNA, 20 nt, Human
cccaggagcugugccccauc

SEQ ID NO: 24529 - RNA, 22 nt, Human
cccaggaggaggaaaaagcucg

SEQ ID NO: 24530 - RNA, 22 nt, Human
cccaggaggcagagguuggagc

SEQ ID NO: 24531 - RNA, 22 nt, Human
cccaggaggcgcagguugcggu

SEQ ID NO: 24532 - RNA, 22 nt, Human
cccaagagcuucuaggacgcug

SEQ ID NO: 24533 - RNA, 22 nt, Human
cccaagaucuuucgugcacuaa

SEQ ID NO: 24534 - RNA, 22 nt, Human
cccaaggaauaggaucccagga

SEQ ID NO: 24535 - RNA, 19 nt, Human
cccaaggcccugggcaggc

SEQ ID NO: 24536 - RNA, 22 nt, Human
cccaagggagugccuggucaac

SEQ ID NO: 24537 - RNA, 22 nt, Human
cccaaguauuccuccucugccc

SEQ ID NO: 24538 - RNA, 22 nt, Human
cccacacaaaucauggggagaa

SEQ ID NO: 24539 - RNA, 18 nt, Human
cccacacagcaguagcuc

SEQ ID NO: 24540 - RNA, 22 nt, Human
cccacagaaugccaaugagacc

SEQ ID NO: 24541 - RNA, 19 nt, Human
cccacaggaggacauaugg

SEQ ID NO: 24542 - RNA, 22 nt, Human
cccacaggcuagggguagggca

SEQ ID NO: 24543 - RNA, 22 nt, Human
cccacagguccccaugaacucg

SEQ ID NO: 24544 - RNA, 22 nt, Human
cccacagugaucgcauucguac

SEQ ID NO: 24545 - RNA, 22 nt, Human
cccacaguuaaccaaaggaauu

SEQ ID NO: 24546 - RNA, 22 nt, Human
cccacaucccuuccccgcugug

SEQ ID NO: 24547 - RNA, 22 nt, Human
cccaccagaccugcaccggcac

SEQ ID NO: 24548 - RNA, 21 nt, Human
cccaccccauaaggcagaacc

SEQ ID NO: 24549 - RNA, 18 nt, Human
cccacccuggcucuuagu

SEQ ID NO: 24550 - RNA, 22 nt, Human
cccacccugggaagcuaggcag

SEQ ID NO: 24551 - RNA, 21 nt, Human
cccacggaaugaugaggcacu

SEQ ID NO: 24552 - RNA, 17 nt, Human
cccacggaggugugaaa

SEQ ID NO: 24553 - RNA, 18 nt, Human
cccacggugcuguagggc

SEQ ID NO: 24554 - RNA, 22 nt, Human
cccacuucaugggcaggaagga

SEQ ID NO: 24555 - RNA, 22 nt, Human
cccagaaggcuaagcguggauu

SEQ ID NO: 24556 - RNA, 22 nt, Human
cccagaaggucgaggcugcagu

SEQ ID NO: 24557 - RNA, 22 nt, Human
cccagaaugauucagcgacagu

SEQ ID NO: 24558 - RNA, 22 nt, Human
cccagacagugauuuacuuaau

SEQ ID NO: 24559 - RNA, 22 nt, Human
gaaaggaacuugugagugggag

SEQ ID NO: 24560 - RNA, 22 nt, Human
gaaaggaagaaaggucauuuua

SEQ ID NO: 24561 - RNA, 22 nt, Human
gaaaggagugcuuuccaggucu

SEQ ID NO: 24562 - RNA, 20 nt, Human
gaaaggagugucccugugag

SEQ ID NO: 24563 - RNA, 22 nt, Human
gaaaggcaggcaggguguccau

SEQ ID NO: 24564 - RNA, 22 nt, Human
gaaaggccacgugccaagauua

SEQ ID NO: 24565 - RNA, 22 nt, Human
gaaaggcuacugucaucaauua

SEQ ID NO: 24566 - RNA, 22 nt, Human
gaaaggcuuaaauuguaagggc

SEQ ID NO: 24567 - RNA, 22 nt, Human
gaaaggcuucuuaagcuucacu

SEQ ID NO: 24568 - RNA, 22 nt, Human
gaaaggcuugagacauugauga

SEQ ID NO: 24569 - RNA, 22 nt, Human
gaaagggaguggacaacaggca

SEQ ID NO: 24570 - RNA, 22 nt, Human
gaaaggucaguuccacuuccau

SEQ ID NO: 24571 - RNA, 22 nt, Human
gaaaggucuuccggucuuccag

SEQ ID NO: 24572 - RNA, 22 nt, Human
gaaagguucuugggaguucaca

SEQ ID NO: 24573 - RNA, 22 nt, Human
gaaagguuguaacaagacucuu

SEQ ID NO: 24574 - RNA, 23 nt, Human
gaaagucaauaugguagcuuuga

SEQ ID NO: 24575 - RNA, 22 nt, Human
gaaagucauggaugaacacuac

SEQ ID NO: 24576 - RNA, 22 nt, Human
gaaagugccucaguccucuuau

SEQ ID NO: 24577 - RNA, 22 nt, Human
gaaagugcuaggaaguguuaga

SEQ ID NO: 24578 - RNA, 22 nt, Human
gaaagugcucucucuauacaca

SEQ ID NO: 24579 - RNA, 22 nt, Human
gaaagugcuuuugagugugugc

SEQ ID NO: 24580 - RNA, 22 nt, Human
gaaaguucaaauuauagaaggu

SEQ ID NO: 24581 - RNA, 22 nt, Human
gaaaguuuauagguuauauaau

SEQ ID NO: 24582 - RNA, 22 nt, Human
gaaaguuucucacacaugcaga

SEQ ID NO: 24583 - RNA, 17 nt, Human
gaaaguuucucucucuu

SEQ ID NO: 24584 - RNA, 22 nt, Human
gaaauaagaguccaugccaggu

SEQ ID NO: 24585 - RNA, 22 nt, Human
gaaauaauuuagaagguauucc

SEQ ID NO: 24586 - RNA, 22 nt, Human
gaaauacagaaagggcugaaug

SEQ ID NO: 24587 - RNA, 22 nt, Human
gaaauacaggaaugccacacag

SEQ ID NO: 24588 - RNA, 21 nt, Human
gaaauacugccuuaggagcug

SEQ ID NO: 24589 - RNA, 22 nt, Human
gaaauacuguaaaguuauuauu

SEQ ID NO: 24590 - RNA, 22 nt, Human
gaaauagacacuuucuaugaau

SEQ ID NO: 24591 - RNA, 22 nt, Human
gaaauauacauugcaggaagag

SEQ ID NO: 24592 - RNA, 22 nt, Human
gaaauauucuugucuuguuuuc

SEQ ID NO: 24593 - RNA, 22 nt, Human
gaaaucaaacccuuuucugaua

SEQ ID NO: 24594 - RNA, 22 nt, Human
gaaaucaaggcuacauucaggu

SEQ ID NO: 24595 - RNA, 22 nt, Human
gaaaucaucugaguaauaaucu

SEQ ID NO: 24596 - RNA, 22 nt, Human
gaaaucauuagcaaagauaugu

SEQ ID NO: 24597 - RNA, 22 nt, Human
gaaaucugcuucuugcauagua

SEQ ID NO: 24598 - RNA, 22 nt, Human
gaaaugacaaggacauuccugu

SEQ ID NO: 24599 - RNA, 22 nt, Human
gaaaugcagaaccugagaccau

SEQ ID NO: 24600 - RNA, 22 nt, Human
gaaauguagaguaucugaggau

SEQ ID NO: 24601 - RNA, 22 nt, Human
gaaauguaggcauaauuauuuu

SEQ ID NO: 24602 - RNA, 20 nt, Human
gaaauguaucucuugauucu

SEQ ID NO: 24603 - RNA, 22 nt, Human
gaaaugucucuugauuuuugga

SEQ ID NO: 24604 - RNA, 22 nt, Human
gaaaugugaccuacuuccuugu

SEQ ID NO: 24605 - RNA, 20 nt, Human
gaaaugugaccucuucugug

SEQ ID NO: 24606 - RNA, 22 nt, Human
gaaaugugggucaugacccauu

SEQ ID NO: 24607 - RNA, 22 nt, Human
gaaauucaaauaagauauguag

SEQ ID NO: 24608 - RNA, 22 nt, Human
gaaauuguaaaggauugcgcca

SEQ ID NO: 24609 - RNA, 22 nt, Human
gaaauugucugugcccaagucu

SEQ ID NO: 24610 - RNA, 22 nt, Human
gaacaaacauuuuuggcaguau

SEQ ID NO: 24611 - RNA, 22 nt, Human
gaacaaacugggucccaaugau

SEQ ID NO: 24612 - RNA, 19 nt, Human
gaacaaacuuaaacuuuuc

SEQ ID NO: 24613 - RNA, 22 nt, Human
gaacaacuuugaaacaugaaga

SEQ ID NO: 24614 - RNA, 22 nt, Human
gaacaaugaaagacauaaacuc

SEQ ID NO: 24615 - RNA, 22 nt, Human
gaacaaugagucauucagguga

SEQ ID NO: 24616 - RNA, 22 nt, Human
gaacacagguggcccggcaggg

SEQ ID NO: 24617 - RNA, 22 nt, Human
gaacacaguuuagaaaaugcug

SEQ ID NO: 24618 - RNA, 22 nt, Human
gaacacauuagucugaguuggc

SEQ ID NO: 24619 - RNA, 22 nt, Human
gaacacugacauuuuccugacu

SEQ ID NO: 24620 - RNA, 22 nt, Human
gaacacugagagagaugggcag

SEQ ID NO: 24621 - RNA, 22 nt, Human
gaacacugaggacacugagaau

SEQ ID NO: 24622 - RNA, 22 nt, Human
gaacacugcuguuggguucuga

SEQ ID NO: 24623 - RNA, 22 nt, Human
gaacagacagaagcuuaucucc

SEQ ID NO: 24624 - RNA, 22 nt, Human
gaacagaugggcucagauccug

SEQ ID NO: 24625 - RNA, 22 nt, Human
gaacagcagcucguucucgaug

SEQ ID NO: 24626 - RNA, 22 nt, Human
gaacagcagcuuccugggaauu

SEQ ID NO: 24627 - RNA, 22 nt, Human
gaacagcagucacucauguuau

SEQ ID NO: 24628 - RNA, 22 nt, Human
gaacagcccuguuaagucuguu

SEQ ID NO: 24629 - RNA, 22 nt, Human
gaacaguaaauuuaugcagcac

SEQ ID NO: 24630 - RNA, 22 nt, Human
gaacaguacaguugaguaguug

SEQ ID NO: 24631 - RNA, 22 nt, Human
gaacaguaucaguagugccagu

SEQ ID NO: 24632 - RNA, 20 nt, Human
gaacagucuucugagccaca

SEQ ID NO: 24633 - RNA, 22 nt, Human
gaacauaacuauugugaauagu

SEQ ID NO: 24634 - RNA, 22 nt, Human
gaacauaauuaaauguccuggg

SEQ ID NO: 24635 - RNA, 22 nt, Human
gaacauaugcauguuuguuuug

SEQ ID NO: 24636 - RNA, 22 nt, Human
gaacaucagucauaauuuaacg

SEQ ID NO: 24637 - RNA, 22 nt, Human
gaacaucuuauccauuuccucu

SEQ ID NO: 24638 - RNA, 22 nt, Human
gaacaugaaaagucuuacacgc

SEQ ID NO: 24639 - RNA, 22 nt, Human
gaacauuacugcuugggagagg

SEQ ID NO: 24640 - RNA, 22 nt, Human
gaacauuccuggaagagugcuu

SEQ ID NO: 24641 - RNA, 22 nt, Human
ugugguuuugguucagaaacaa

SEQ ID NO: 24642 - RNA, 21 nt, Human
uguguaaaguugaaauccugu

SEQ ID NO: 24643 - RNA, 21 nt, Human
uguguaauauguauaagaaua

SEQ ID NO: 24644 - RNA, 22 nt, Human
uguguacaaauuuagccagcag

SEQ ID NO: 24645 - RNA, 22 nt, Human
uguguacaagaguguuuacugu

SEQ ID NO: 24646 - RNA, 22 nt, Human
uguguacacaaguauauauaca

SEQ ID NO: 24647 - RNA, 22 nt, Human
uguguacacacagauauauaca

SEQ ID NO: 24648 - RNA, 22 nt, Human
uguguacagcaggauuucucaa

SEQ ID NO: 24649 - RNA, 22 nt, Human
uguguacagcaugguccagcag

SEQ ID NO: 24650 - RNA, 22 nt, Human
uguguacaggccuugcuagacu

SEQ ID NO: 24651 - RNA, 22 nt, Human
uguguacauauacacaaauaca

SEQ ID NO: 24652 - RNA, 22 nt, Human
uguguacauaucuauccuagau

SEQ ID NO: 24653 - RNA, 22 nt, Human
uguguacaucucuucucacauu

SEQ ID NO: 24654 - RNA, 22 nt, Human
uguguacauguaucaacuaucg

SEQ ID NO: 24655 - RNA, 22 nt, Human
uguguacuaaacuuccauauau

SEQ ID NO: 24656 - RNA, 22 nt, Human
uguguacuuuuguuucuaagcc

SEQ ID NO: 24657 - RNA, 22 nt, Human
uguguauagcaguuuccagucu

SEQ ID NO: 24658 - RNA, 22 nt, Human
uguguauagguugugcuaauag

SEQ ID NO: 24659 - RNA, 22 nt, Human
uguguauauaugugcacaugua

SEQ ID NO: 24660 - RNA, 22 nt, Human
uguguauauguaaauauaguug

SEQ ID NO: 24661 - RNA, 22 nt, Human
uguguauauuaggacacauucu

SEQ ID NO: 24662 - RNA, 18 nt, Human
uguguaugucucagggaa

SEQ ID NO: 24663 - RNA, 22 nt, Human
uguguauguguauacacuauau

SEQ ID NO: 24664 - RNA, 22 nt, Human
uguguauuaauguuuguauaug

SEQ ID NO: 24665 - RNA, 22 nt, Human
ugugucaagacauuuagucauu

SEQ ID NO: 24666 - RNA, 22 nt, Human
ugugucaaggcaucagcccagc

SEQ ID NO: 24667 - RNA, 22 nt, Human
ugugucaauuuaugucauucau

SEQ ID NO: 24668 - RNA, 22 nt, Human
ugugucacuguuccuccagcua

SEQ ID NO: 24669 - RNA, 22 nt, Human
ugugucagaauuuuuguggcaa

SEQ ID NO: 24670 - RNA, 19 nt, Human
ugugucagauuugcuccuu

SEQ ID NO: 24671 - RNA, 22 nt, Human
ugugucagcacaguaucaauua

SEQ ID NO: 24672 - RNA, 22 nt, Human
ugugucaucuguguuacauaau

SEQ ID NO: 24673 - RNA, 22 nt, Human
uguguccuaugaaagaggguua

SEQ ID NO: 24674 - RNA, 22 nt, Human
uguguccucacuguaugcaagg

SEQ ID NO: 24675 - RNA, 22 nt, Human
uguguccugcagacagacucag

SEQ ID NO: 24676 - RNA, 22 nt, Human
uguguccugcaggugcugccug

SEQ ID NO: 24677 - RNA, 22 nt, Human
uguguccuuaugaaaauacugu

SEQ ID NO: 24678 - RNA, 22 nt, Human
uguguccuucugggagucccag

SEQ ID NO: 24679 - RNA, 22 nt, Human
ugugucuaaugacuauuucuuc

SEQ ID NO: 24680 - RNA, 19 nt, Human
ugugucucuguguagccug

SEQ ID NO: 24681 - RNA, 22 nt, Human
ugugucuggaccggggaggagc

SEQ ID NO: 24682 - RNA, 22 nt, Human
ugugucuguccucgguugaugc

SEQ ID NO: 24683 - RNA, 22 nt, Human
ugugucuguguauacacggcau

SEQ ID NO: 24684 - RNA, 22 nt, Human
ugugugaagcacauguucaagg

SEQ ID NO: 24685 - RNA, 22 nt, Human
ugugugaaggaauauauacuca

SEQ ID NO: 24686 - RNA, 22 nt, Human
ugugugagacaauuggcugugg

SEQ ID NO: 24687 - RNA, 22 nt, Human
ugugugaggugguucugagaag

SEQ ID NO: 24688 - RNA, 22 nt, Human
ugugugcaauucuuaacauaca

SEQ ID NO: 24689 - RNA, 20 nt, Human
ugugugcacacaugacauuc

SEQ ID NO: 24690 - RNA, 22 nt, Human
ugugugcacaugauuugaaaug

SEQ ID NO: 24691 - RNA, 18 nt, Human
ugugugcaccugccuuga

SEQ ID NO: 24692 - RNA, 22 nt, Human
ugugugcagcggcaggugaagu

SEQ ID NO: 24693 - RNA, 22 nt, Human
ugugugcaggcacugugccaga

SEQ ID NO: 24694 - RNA, 22 nt, Human
ugugugcauacacacgguaaca

SEQ ID NO: 24695 - RNA, 19 nt, Human
ugugugcaugcgcacgugu

SEQ ID NO: 24696 - RNA, 22 nt, Human
ugugugcauguuaaugagaaaa

SEQ ID NO: 24697 - RNA, 22 nt, Human
uguguggaugcagcgugggucu

SEQ ID NO: 24698 - RNA, 22 nt, Human
uguguggcaagcuguaugcuag

SEQ ID NO: 24699 - RNA, 21 nt, Human
ugugugggcauaucugcugca

SEQ ID NO: 24700 - RNA, 22 nt, Human
ugugugggcaugcuuuuaauuu

SEQ ID NO: 24701 - RNA, 22 nt, Human
ugugugggcgaagacagccuuu

SEQ ID NO: 24702 - RNA, 22 nt, Human
uguguguauaugcauuuaucua

SEQ ID NO: 24703 - RNA, 22 nt, Human
uguguguauccauuagaggcca

SEQ ID NO: 24704 - RNA, 22 nt, Human
ugugugucagagucuccauggu

SEQ ID NO: 24705 - RNA, 22 nt, Human
guccugagaauacuaggcacaa

SEQ ID NO: 24706 - RNA, 22 nt, Human
guccugagaugucacaagguuu

SEQ ID NO: 24707 - RNA, 22 nt, Human
guccugagcauuaagcaauugu

SEQ ID NO: 24708 - RNA, 22 nt, Human
guccugaggaugcagagauaaa

SEQ ID NO: 24709 - RNA, 22 nt, Human
guccugaggcaggauggguuuc

SEQ ID NO: 24710 - RNA, 22 nt, Human
guccugcggccucaguggugag

SEQ ID NO: 24711 - RNA, 22 nt, Human
guccuggaguggcauggcaugg

SEQ ID NO: 24712 - RNA, 22 nt, Human
guccuggcaccucacuggcuac

SEQ ID NO: 24713 - RNA, 22 nt, Human
guccuggccucuggggguaugg

SEQ ID NO: 24714 - RNA, 22 nt, Human
guccuggcugguucuguggggc

SEQ ID NO: 24715 - RNA, 22 nt, Human
guccugggaaggaagccaggga

SEQ ID NO: 24716 - RNA, 17 nt, Human
guccugggaggagagag

SEQ ID NO: 24717 - RNA, 22 nt, Human
guccugggcaugcagggcuuuc

SEQ ID NO: 24718 - RNA, 22 nt, Human
guccugggcccaggggcugccu

SEQ ID NO: 24719 - RNA, 22 nt, Human
guccugggcggagggcugcugu

SEQ ID NO: 24720 - RNA, 22 nt, Human
guccugguagcuggcuugguca

SEQ ID NO: 24721 - RNA, 22 nt, Human
guccugguauaauuguuuaaaa

SEQ ID NO: 24722 - RNA, 22 nt, Human
guccugugaccugcauccugag

SEQ ID NO: 24723 - RNA, 22 nt, Human
guccugugcccagacccucugu

SEQ ID NO: 24724 - RNA, 22 nt, Human
guccugugcccuggguggcgcu

SEQ ID NO: 24725 - RNA, 22 nt, Human
guccugugcucagacauggggg

SEQ ID NO: 24726 - RNA, 22 nt, Human
guccugugggcccaccaugagc

SEQ ID NO: 24727 - RNA, 22 nt, Human
guccuguguaagccaggacaau

SEQ ID NO: 24728 - RNA, 21 nt, Human
guccuguuccugaaccuuccc

SEQ ID NO: 24729 - RNA, 22 nt, Human
guccuguuuguauuugcuggaa

SEQ ID NO: 24730 - RNA, 22 nt, Human
guccuuaaagagagcaucauuc

SEQ ID NO: 24731 - RNA, 22 nt, Human
guccuuaacaaacggggaaaag

SEQ ID NO: 24732 - RNA, 22 nt, Human
guccuuaguuacuuuucauguc

SEQ ID NO: 24733 - RNA, 22 nt, Human
guccuuauuucacuuaaacgua

SEQ ID NO: 24734 - RNA, 21 nt, Human
guccuucagcaaguuaguggc

SEQ ID NO: 24735 - RNA, 22 nt, Human
guccuucagcuuuaucugaaca

SEQ ID NO: 24736 - RNA, 22 nt, Human
guccuucagggagucaaacacu

SEQ ID NO: 24737 - RNA, 22 nt, Human
guccuuccccagccagcucugg

SEQ ID NO: 24738 - RNA, 22 nt, Human
guccuucucaaauccuguguuu

SEQ ID NO: 24739 - RNA, 22 nt, Human
guccuugaggaaacagauguga

SEQ ID NO: 24740 - RNA, 22 nt, Human
guccuuggcuguggcuguaaug

SEQ ID NO: 24741 - RNA, 22 nt, Human
guccuuucgagggugagugaaa

SEQ ID NO: 24742 - RNA, 22 nt, Human
gucuaaacaaaaaugcaccuuu

SEQ ID NO: 24743 - RNA, 22 nt, Human
gucuaaacuuuggcccagauuu

SEQ ID NO: 24744 - RNA, 22 nt, Human
gucuaaggaucuguuagcuuuu

SEQ ID NO: 24745 - RNA, 22 nt, Human
gucuacaaagcuucaagucucu

SEQ ID NO: 24746 - RNA, 22 nt, Human
gucuacacugaauuuccacaga

SEQ ID NO: 24747 - RNA, 22 nt, Human
gucuagaaaucauguacuguga

SEQ ID NO: 24748 - RNA, 22 nt, Human
gucuagaaaugccauacgugcc

SEQ ID NO: 24749 - RNA, 22 nt, Human
gucuagaaauguucucaggggu

SEQ ID NO: 24750 - RNA, 22 nt, Human
gucuagaauggaugagcauuuu

SEQ ID NO: 24751 - RNA, 19 nt, Human
gucuagaccaggcuccuua

SEQ ID NO: 24752 - RNA, 22 nt, Human
gucuagagugcuuccuagucau

SEQ ID NO: 24753 - RNA, 22 nt, Human
gucuagggcuccucagugacaa

SEQ ID NO: 24754 - RNA, 22 nt, Human
gucuauguaaacgucuacauua

SEQ ID NO: 24755 - RNA, 22 nt, Human
gucuauguguaauagcaugugu

SEQ ID NO: 24756 - RNA, 22 nt, Human
gucuauuugggaucaugauaug

SEQ ID NO: 24757 - RNA, 20 nt, Human
gucucaaguaucucacaguc

SEQ ID NO: 24758 - RNA, 22 nt, Human
gucucacacagaguagauuuug

SEQ ID NO: 24759 - RNA, 22 nt, Human
gucucagagagcuacucucuua

SEQ ID NO: 24760 - RNA, 22 nt, Human
gucucagaguccuacuuauucc

SEQ ID NO: 24761 - RNA, 22 nt, Human
gucucagauaacauguauucua

SEQ ID NO: 24762 - RNA, 22 nt, Human
gucucagauucagacaucuaca

SEQ ID NO: 24763 - RNA, 22 nt, Human
gucucagggacugcuucugggg

SEQ ID NO: 24764 - RNA, 22 nt, Human
gucucagugcccaaugccauaa

SEQ ID NO: 24765 - RNA, 22 nt, Human
gucucagugucaccuccagcug

SEQ ID NO: 24766 - RNA, 22 nt, Human
gucuccagcccacucuagauau

SEQ ID NO: 24767 - RNA, 22 nt, Human
gucucccaauccgggacagccu

SEQ ID NO: 24768 - RNA, 22 nt, Human
gucucccacuuucuggccucuu

SEQ ID NO: 24769 - RNA, 23 nt, Human
gucucccauagcgcucccaggcu

SEQ ID NO: 24770 - RNA, 22 nt, Human
gucucccaugucccuguccagu

SEQ ID NO: 24771 - RNA, 22 nt, Human
gucuccucuucauauaccuguu

SEQ ID NO: 24772 - RNA, 22 nt, Human
gucuccugagacugcagucacc

SEQ ID NO: 24773 - RNA, 22 nt, Human
gucuccugagccuugacugcaa

SEQ ID NO: 24774 - RNA, 22 nt, Human
gucuccugaggcauccauugaa

SEQ ID NO: 24775 - RNA, 22 nt, Human
gucuccugcuagcaagcaccac

SEQ ID NO: 24776 - RNA, 22 nt, Human
gucuccuggcuuuugucccagu

SEQ ID NO: 24777 - RNA, 23 nt, Human
gucucuagaguguggagcaaaga

SEQ ID NO: 24778 - RNA, 22 nt, Human
gucucucucccaagauuggcua

SEQ ID NO: 24779 - RNA, 22 nt, Human
gucucucugacugguccacacc

SEQ ID NO: 24780 - RNA, 22 nt, Human
gucucugagcucugagcuggcu

SEQ ID NO: 24781 - RNA, 22 nt, Human
gucucugccuggggggaucaga

SEQ ID NO: 24782 - RNA, 22 nt, Human
gucucugcucuagagucuguga

SEQ ID NO: 24783 - RNA, 19 nt, Human
gucucuggauuucaggucc

SEQ ID NO: 24784 - RNA, 22 nt, Human
gucucugggugugugaugccaa

SEQ ID NO: 24785 - RNA, 22 nt, Human
gucucuggguuaagcagugcau

SEQ ID NO: 24786 - RNA, 22 nt, Human
gucucugucacaacuacucauc

SEQ ID NO: 24787 - RNA, 22 nt, Human
gucucugucuuaggccaggccu

SEQ ID NO: 24788 - RNA, 22 nt, Human
gucucugugccuucuccccacc

SEQ ID NO: 24789 - RNA, 22 nt, Human
gucucuuagucaauauuuucug

SEQ ID NO: 24790 - RNA, 22 nt, Human
gucugaaaguagggcugaucua

SEQ ID NO: 24791 - RNA, 22 nt, Human
gucugaaauggaggugggaacu

SEQ ID NO: 24792 - RNA, 22 nt, Human
gucugaauucuguguaacucua

SEQ ID NO: 24793 - RNA, 22 nt, Human
gucugagaacuacugaggauaa

SEQ ID NO: 24794 - RNA, 22 nt, Human
gucugagacugggcacauaccu

SEQ ID NO: 24795 - RNA, 22 nt, Human
gucugagauuagggaagauuuu

SEQ ID NO: 24796 - RNA, 22 nt, Human
gucugagcuacuuaggauauaa

SEQ ID NO: 24797 - RNA, 22 nt, Human
gucugaggccugaggcccuggg

SEQ ID NO: 24798 - RNA, 22 nt, Human
gucugagggacagaguccuggc

SEQ ID NO: 24799 - RNA, 21 nt, Human
gucugaugcuugaugcaguug

SEQ ID NO: 24800 - RNA, 21 nt, Human
gucugcagaccccuucauugc

SEQ ID NO: 24801 - RNA, 22 nt, Human
gucugcccagaagacauccccu

SEQ ID NO: 24802 - RNA, 19 nt, Human
ucuauguggcagugauggc

SEQ ID NO: 24803 - RNA, 22 nt, Human
ucuauguuagagauacauccua

SEQ ID NO: 24804 - RNA, 22 nt, Human
ucuauuacuacaucagccaggu

SEQ ID NO: 24805 - RNA, 22 nt, Human
ucuauuaugguacuuaucauga

SEQ ID NO: 24806 - RNA, 22 nt, Human
ucuauucaggcagagugcagca

SEQ ID NO: 24807 - RNA, 22 nt, Human
ucuauugauuggcuuccuggau

SEQ ID NO: 24808 - RNA, 22 nt, Human
ucuauuucgcauauaaguuuug

SEQ ID NO: 24809 - RNA, 20 nt, Human
ucuauuuguaaagggcugug

SEQ ID NO: 24810 - RNA, 18 nt, Human
ucucaaaaauaauggcuu

SEQ ID NO: 24811 - RNA, 22 nt, Human
ucucaaacuaacaaugauuaua

SEQ ID NO: 24812 - RNA, 22 nt, Human
ucucaaacuacaguauggcugu

SEQ ID NO: 24813 - RNA, 22 nt, Human
ucucaaaguagcucccacagau

SEQ ID NO: 24814 - RNA, 22 nt, Human
gugugcccgggggaagcaggug

SEQ ID NO: 24815 - RNA, 22 nt, Human
gugugcccuuguucagcagagu

SEQ ID NO: 24816 - RNA, 22 nt, Human
gugugccuuaagcucuauagac

SEQ ID NO: 24817 - RNA, 23 nt, Human
gugugccuuuaucuucuguacuc

SEQ ID NO: 24818 - RNA, 22 nt, Human
gugugccuuucacacacuggga

SEQ ID NO: 24819 - RNA, 22 nt, Human
gugugcucagcucauuuggaua

SEQ ID NO: 24820 - RNA, 23 nt, Human
guguggcagcgcugugguuagcu

SEQ ID NO: 24821 - RNA, 22 nt, Human
guguggcagggcguuugcagac

SEQ ID NO: 24822 - RNA, 22 nt, Human
guguggccguguauccauggcu

SEQ ID NO: 24823 - RNA, 22 nt, Human
guguggccuugggagaggucug

SEQ ID NO: 24824 - RNA, 18 nt, Human
guguggcugagaugaggc

SEQ ID NO: 24825 - RNA, 22 nt, Human
guguggcugccagccaagaggc

SEQ ID NO: 24826 - RNA, 22 nt, Human
guguggcuguuuagugacuuuc

SEQ ID NO: 24827 - RNA, 22 nt, Human
gugugggaauggcggucgugca

SEQ ID NO: 24828 - RNA, 22 nt, Human
gugugggaggaaggugaacaga

SEQ ID NO: 24829 - RNA, 22 nt, Human
guguggggaggagagagcccuu

SEQ ID NO: 24830 - RNA, 22 nt, Human
guguguagaugugagaggacug

SEQ ID NO: 24831 - RNA, 22 nt, Human
gugugucagguacugugcuagg

SEQ ID NO: 24832 - RNA, 22 nt, Human
guguguccaaggccacaauagc

SEQ ID NO: 24833 - RNA, 22 nt, Human
guguguccacacauacauacau

SEQ ID NO: 24834 - RNA, 22 nt, Human
guguguccucauaagauggagg

SEQ ID NO: 24835 - RNA, 22 nt, Human
guguguccuugggccucugcag

SEQ ID NO: 24836 - RNA, 22 nt, Human
gugugucuuuauaagaagaggg

SEQ ID NO: 24837 - RNA, 22 nt, Human
gugugugccaacuuuaugugca

SEQ ID NO: 24838 - RNA, 22 nt, Human
gugugugcuccccaggagagcu

SEQ ID NO: 24839 - RNA, 22 nt, Human
guguguguacucuguauauaaa

SEQ ID NO: 24840 - RNA, 22 nt, Human
guguguuuagcauuagcagggg

SEQ ID NO: 24841 - RNA, 22 nt, Human
guguguuucagaagccaggugu

SEQ ID NO: 24842 - RNA, 22 nt, Human
guguuaaauuucuaauuuguga

SEQ ID NO: 24843 - RNA, 22 nt, Human
guguuaaugguagaaucugagu

SEQ ID NO: 24844 - RNA, 22 nt, Human
guguuacaaaucaccugugcug

SEQ ID NO: 24845 - RNA, 18 nt, Human
guguuacaggagugcagc

SEQ ID NO: 24846 - RNA, 22 nt, Human
guguuacugggaggacggaggu

SEQ ID NO: 24847 - RNA, 22 nt, Human
guguuauuugagugggagcgug

SEQ ID NO: 24848 - RNA, 22 nt, Human
guguucaaaauguagguagauu

SEQ ID NO: 24849 - RNA, 17 nt, Human
guguucacaaugacugu

SEQ ID NO: 24850 - RNA, 22 nt, Human
guguucaugccccagugcagga

SEQ ID NO: 24851 - RNA, 22 nt, Human
guguucuaauggcugagggaug

SEQ ID NO: 24852 - RNA, 22 nt, Human
guguugacucuuggacuucaag

SEQ ID NO: 24853 - RNA, 22 nt, Human
guguuguggagcuugucagggg

SEQ ID NO: 24854 - RNA, 20 nt, Human
guguuucaugugauacaaug

SEQ ID NO: 24855 - RNA, 22 nt, Human
guguuucccuggcacaagaacc

SEQ ID NO: 24856 - RNA, 22 nt, Human
guguuucuggggcauucauagu

SEQ ID NO: 24857 - RNA, 22 nt, Human
guguuugucucuuggccuaccu

SEQ ID NO: 24858 - RNA, 22 nt, Human
guguuuguuuggguagcuagac

SEQ ID NO: 24859 - RNA, 22 nt, Human
guguuuuauuggugcagucaga

SEQ ID NO: 24860 - RNA, 20 nt, Human
guuaaaagaguaauuugagg

SEQ ID NO: 24861 - RNA, 22 nt, Human
guuaaacaguuacaugugcugg

SEQ ID NO: 24862 - RNA, 22 nt, Human
guuaaagaguuuggcuuucuuc

SEQ ID NO: 24863 - RNA, 22 nt, Human
guuaaagugagcuacuuuaggu

SEQ ID NO: 24864 - RNA, 22 nt, Human
guuaaagugaucuugucagguu

SEQ ID NO: 24865 - RNA, 22 nt, Human
guuaaauaaccucauguccguu

SEQ ID NO: 24866 - RNA, 22 nt, Human
guuaaaugcacuauugaaagcu

SEQ ID NO: 24867 - RNA, 22 nt, Human
guuaaaugcagauucugacuca

SEQ ID NO: 24868 - RNA, 22 nt, Human
guuaacaaccaaacagaaguuc

SEQ ID NO: 24869 - RNA, 22 nt, Human
guuaacaagaauuacucuggaa

SEQ ID NO: 24870 - RNA, 22 nt, Human
guuaacacaugcaauugcacuu

SEQ ID NO: 24871 - RNA, 22 nt, Human
guuaacauuucuaggugcaggg

SEQ ID NO: 24872 - RNA, 22 nt, Human
guuaagaagcuagagaugaaca

SEQ ID NO: 24873 - RNA, 22 nt, Human
guuaagccugaaucacauuaau

SEQ ID NO: 24874 - RNA, 22 nt, Human
guuaaugcaaagcagagggcaa

SEQ ID NO: 24875 - RNA, 22 nt, Human
guuaaugucacuuuauguggcu

SEQ ID NO: 24876 - RNA, 22 nt, Human
guuaaugucuuccuauucuaca

SEQ ID NO: 24877 - RNA, 22 nt, Human
guuaauuuaguagaguccagau

SEQ ID NO: 24878 - RNA, 22 nt, Human
guuaauuugcagcuuucgagcu

SEQ ID NO: 24879 - RNA, 22 nt, Human
guuacaacucccugaaccucgg

SEQ ID NO: 24880 - RNA, 22 nt, Human
guuacacucuccaggcacuugg

SEQ ID NO: 24881 - RNA, 22 nt, Human
guuacagucaggagauauuuug

SEQ ID NO: 24882 - RNA, 22 nt, Human
guuacauuaaaaacauucacug

SEQ ID NO: 24883 - RNA, 23 nt, Human
guuaccuuacuucugugaucuuc

SEQ ID NO: 24884 - RNA, 22 nt, Human
guuacucuugagaggcugaggu

SEQ ID NO: 24885 - RNA, 22 nt, Human
guuagaaacacauucuuauuga

SEQ ID NO: 24886 - RNA, 22 nt, Human
guuagagcacauacuuugcaug

SEQ ID NO: 24887 - RNA, 22 nt, Human
guuagagguucagucgcuauaa

SEQ ID NO: 24888 - RNA, 22 nt, Human
guuagcaaugcccaggaaugca

SEQ ID NO: 24889 - RNA, 22 nt, Human
guuagcaccagugcucauaaca

SEQ ID NO: 24890 - RNA, 22 nt, Human
guuagcaugacuuagaaucagg

SEQ ID NO: 24891 - RNA, 22 nt, Human
guuagcauuuguuuaauaucag

SEQ ID NO: 24892 - RNA, 18 nt, Human
guuagcuuccuguugccc

SEQ ID NO: 24893 - RNA, 22 nt, Human
guuaggcaaauaacuguggagc

SEQ ID NO: 24894 - RNA, 22 nt, Human
guuaggcaauaccucuuacacc

SEQ ID NO: 24895 - RNA, 22 nt, Human
guuaggcauuugccuuaauuuu

SEQ ID NO: 24896 - RNA, 22 nt, Human
guuagggagucagguggcucuu

SEQ ID NO: 24897 - RNA, 22 nt, Human
guuaguggguuacucucagccc

SEQ ID NO: 24898 - RNA, 22 nt, Human
guuaguguauauugccuucaaa

SEQ ID NO: 24899 - RNA, 22 nt, Human
guuauacacauuccuggugagg

SEQ ID NO: 24900 - RNA, 22 nt, Human
guuauaggucaugcuaugucaa

SEQ ID NO: 24901 - RNA, 22 nt, Human
guuauauaagacaaaucagagu

SEQ ID NO: 24902 - RNA, 19 nt, Human
guuaucaaggggcuacuuu

SEQ ID NO: 24903 - RNA, 22 nt, Human
guuauccauagaauaagucauc

SEQ ID NO: 24904 - RNA, 22 nt, Human
guuaucuagaccaaaagccuaa

SEQ ID NO: 24905 - RNA, 22 nt, Human
guuaucuuaggguacaaaggac

SEQ ID NO: 24906 - RNA, 22 nt, Human
guuaucuucccuuugaugauuu

SEQ ID NO: 24907 - RNA, 22 nt, Human
guuaucuucuauuucucauacu

SEQ ID NO: 24908 - RNA, 22 nt, Human
guuauguaucuugauugggugg

SEQ ID NO: 24909 - RNA, 22 nt, Human
guuauuaaaguauuugauguua

SEQ ID NO: 24910 - RNA, 22 nt, Human
guuauucuuuguaugguacauc

SEQ ID NO: 24911 - RNA, 22 nt, Human
guuauucuuuuauagcaauaca

SEQ ID NO: 24912 - RNA, 22 nt, Human
guuauugacauguauuaagcac

SEQ ID NO: 24913 - RNA, 22 nt, Human
guuauugagacauagaguuaug

SEQ ID NO: 24914 - RNA, 22 nt, Human
guuauugcuggauagauacauc

SEQ ID NO: 24915 - RNA, 22 nt, Human
gucuagagaggaaggaagugug

SEQ ID NO: 24916 - RNA, 22 nt, Human
gucuauauauugcuugaauaau

SEQ ID NO: 24917 - RNA, 22 nt, Human
gucucaaacuccuaggcuaaag

SEQ ID NO: 24918 - RNA, 22 nt, Human
gucucagggcugagggcagugg

SEQ ID NO: 24919 - RNA, 22 nt, Human
gucucaguccgugcuguucagg

SEQ ID NO: 24920 - RNA, 22 nt, Human
gucucaguuacucucccuggua

SEQ ID NO: 24921 - RNA, 22 nt, Human
gucucaguuguaucaccugguu

SEQ ID NO: 24922 - RNA, 22 nt, Human
gucucaguuuuccaaacuguca

SEQ ID NO: 24923 - RNA, 22 nt, Human
guucaagucuggggcugccagu

SEQ ID NO: 24924 - RNA, 21 nt, Human
guucaagugauccuccugucu

SEQ ID NO: 24925 - RNA, 21 nt, Human
guucaaguuccugcucuguga

SEQ ID NO: 24926 - RNA, 21 nt, Human
guucaauagcucuuugaaugc

SEQ ID NO: 24927 - RNA, 22 nt, Human
guucaauuuagaaagcacaguu

SEQ ID NO: 24928 - RNA, 22 nt, Human
guucacaaaauucuggccagug

SEQ ID NO: 24929 - RNA, 22 nt, Human
guucacaaauaugcacuuacga

SEQ ID NO: 24930 - RNA, 22 nt, Human
guucacaagaguuacagacaga

SEQ ID NO: 24931 - RNA, 22 nt, Human
guucacaagaugugguggggag

SEQ ID NO: 24932 - RNA, 22 nt, Human
guucacaagcugauugucuuuc

SEQ ID NO: 24933 - RNA, 22 nt, Human
guucacaauuuuuacugauugg

SEQ ID NO: 24934 - RNA, 22 nt, Human
guucacagcuuguguuuucucu

SEQ ID NO: 24935 - RNA, 20 nt, Human
guucacaggcuuccuuucag

SEQ ID NO: 24936 - RNA, 22 nt, Human
guucacaguuucuaaucccagc

SEQ ID NO: 24937 - RNA, 22 nt, Human
guucacaugcucucaugcuuuu

SEQ ID NO: 24938 - RNA, 22 nt, Human
guucacauggcauuuucacauc

SEQ ID NO: 24939 - RNA, 22 nt, Human
guucagagacacuuauuggaaa

SEQ ID NO: 24940 - RNA, 22 nt, Human
guucagcccacagagggggccg

SEQ ID NO: 24941 - RNA, 22 nt, Human
guucagugccaguucuaagacu

SEQ ID NO: 24942 - RNA, 22 nt, Human
guucaguuaugugaccucaaaa

SEQ ID NO: 24943 - RNA, 22 nt, Human
guucauauucuaaguaacuggc

SEQ ID NO: 24944 - RNA, 22 nt, Human
guucauccauauuauagcaugu

SEQ ID NO: 24945 - RNA, 22 nt, Human
guucauccugacuuggauuagu

SEQ ID NO: 24946 - RNA, 22 nt, Human
guucaucuuccucccagugccu

SEQ ID NO: 24947 - RNA, 19 nt, Human
guucaugugaggaaggaac

SEQ ID NO: 24948 - RNA, 22 nt, Human
guucauucugaaaagcagcuug

SEQ ID NO: 24949 - RNA, 22 nt, Human
guucauuuuuacuuugaucuac

SEQ ID NO: 24950 - RNA, 22 nt, Human
guucauuuuuagaaugcuagua

SEQ ID NO: 24951 - RNA, 22 nt, Human
guuccaauuccaaauuccaagg

SEQ ID NO: 24952 - RNA, 22 nt, Human
guuccacagagucucacuauga

SEQ ID NO: 24953 - RNA, 22 nt, Human
guuccagguggucacagagcuc

SEQ ID NO: 24954 - RNA, 22 nt, Human
guuccaguaugauuccacccau

SEQ ID NO: 24955 - RNA, 22 nt, Human
guucccacuagacugcuacuua

SEQ ID NO: 24956 - RNA, 22 nt, Human
guucccauacaguaucagugcu

SEQ ID NO: 24957 - RNA, 22 nt, Human
guucccaucagggaugagggug

SEQ ID NO: 24958 - RNA, 19 nt, Human
guucccauugcaguugugg

SEQ ID NO: 24959 - RNA, 22 nt, Human
guucccauugcccuagcuugua

SEQ ID NO: 24960 - RNA, 22 nt, Human
guucccuucucaugggguccag

SEQ ID NO: 24961 - RNA, 22 nt, Human
guuccgcuucauauuuggaguc

SEQ ID NO: 24962 - RNA, 22 nt, Human
guuccguuuauaugcuggauua

SEQ ID NO: 24963 - RNA, 22 nt, Human
guuccuaaaucuggaggaccuc

SEQ ID NO: 24964 - RNA, 22 nt, Human
guuccuaagcacugugcauucu

SEQ ID NO: 24965 - RNA, 22 nt, Human
guuccuauauagccuuaaggau

SEQ ID NO: 24966 - RNA, 22 nt, Human
guuccucaaaaaggagagcccc

SEQ ID NO: 24967 - RNA, 22 nt, Human
guuccugggaggcaugggcugg

SEQ ID NO: 24968 - RNA, 23 nt, Human
guuccuucauguggucauugguu

SEQ ID NO: 24969 - RNA, 22 nt, Human
guuccuuccuaucccgagagcc

SEQ ID NO: 24970 - RNA, 22 nt, Human
guuccuugggaacaacgcugaa

SEQ ID NO: 24971 - RNA, 22 nt, Human
guuccuuguauuucagacauga

SEQ ID NO: 24972 - RNA, 22 nt, Human
guucuaauauuuuaaaagccaa

SEQ ID NO: 24973 - RNA, 22 nt, Human
guucuacaguuccuauuacuua

SEQ ID NO: 24974 - RNA, 22 nt, Human
guucuaggagccaagaauauag

SEQ ID NO: 24975 - RNA, 22 nt, Human
guucuaggcuaggggaguaaga

SEQ ID NO: 24976 - RNA, 22 nt, Human
guucuauuacucccugcuucuu

SEQ ID NO: 24977 - RNA, 16 nt, Human
guucuauuuucguccu

SEQ ID NO: 24978 - RNA, 22 nt, Human
guucucauauggcagagagagu

SEQ ID NO: 24979 - RNA, 22 nt, Human
guucucccuguccccugagcuu

SEQ ID NO: 24980 - RNA, 22 nt, Human
guucuccuuguggcugcagcag

SEQ ID NO: 24981 - RNA, 22 nt, Human
guucucuagggcuguagacugg

SEQ ID NO: 24982 - RNA, 22 nt, Human
guucucucagcgauagugaugg

SEQ ID NO: 24983 - RNA, 22 nt, Human
guucucugccacuuaccagcua

SEQ ID NO: 24984 - RNA, 22 nt, Human
guucucugcgcucccggcccgg

SEQ ID NO: 24985 - RNA, 22 nt, Human
guucucuggagucccugggccc

SEQ ID NO: 24986 - RNA, 22 nt, Human
guucugaggcaaaggcagcagc

SEQ ID NO: 24987 - RNA, 22 nt, Human
guucugggaagguggaccuguu

SEQ ID NO: 24988 - RNA, 22 nt, Human
guucugggucuggacacacaga

SEQ ID NO: 24989 - RNA, 22 nt, Human
guucuggguucaaaccccggcc

SEQ ID NO: 24990 - RNA, 22 nt, Human
guucuguacuccaagcucuucc

SEQ ID NO: 24991 - RNA, 22 nt, Human
guucuucacauuuuggggucac

SEQ ID NO: 24992 - RNA, 22 nt, Human
guucuucaggcugugcucuaga

SEQ ID NO: 24993 - RNA, 22 nt, Human
guucuucaguaaaauuaaaugu

SEQ ID NO: 24994 - RNA, 22 nt, Human
guucuucaguucaggcuguuca

SEQ ID NO: 24995 - RNA, 22 nt, Human
guucuucaucauuaacacucug

SEQ ID NO: 24996 - RNA, 22 nt, Human
guucuucaucauuuuagauagg

SEQ ID NO: 24997 - RNA, 22 nt, Human
guucuucucuuguaauggaauc

SEQ ID NO: 24998 - RNA, 22 nt, Human
guucuuuaaccuagucucauuu

SEQ ID NO: 24999 - RNA, 22 nt, Human
guucuuuaggggcccaauuucc

SEQ ID NO: 25000 - RNA, 19 nt, Human
guucuuuucaccucugugc

SEQ ID NO: 25001 - RNA, 22 nt, Human
guucuuuugguagagugugcau

SEQ ID NO: 25002 - RNA, 22 nt, Human
guugaaaauacagauuccuagg

SEQ ID NO: 25003 - RNA, 22 nt, Human
guugaaagcuuuucauuuaguu

SEQ ID NO: 25004 - RNA, 20 nt, Human
guugaaaguaauaugaugcu

SEQ ID NO: 25005 - RNA, 22 nt, Human
guugaaaguagaugcuauuugg

SEQ ID NO: 25006 - RNA, 22 nt, Human
guugaaaguggagaaccugguu

SEQ ID NO: 25007 - RNA, 22 nt, Human
guugaacuauguuuuaucugac

SEQ ID NO: 25008 - RNA, 22 nt, Human
guugaauaauucauagaagcua

SEQ ID NO: 25009 - RNA, 22 nt, Human
guugaaugaaucauucuaugua

SEQ ID NO: 25010 - RNA, 22 nt, Human
guugacagaaaaauaacauagc

SEQ ID NO: 25011 - RNA, 22 nt, Human
guugacagcuggugagcugcua

SEQ ID NO: 25012 - RNA, 22 nt, Human
guugacagugacccugaaagca

SEQ ID NO: 25013 - RNA, 22 nt, Human
guugauacaccucaugguuacu

SEQ ID NO: 25014 - RNA, 22 nt, Human
guugcaggaagcacacacaugu

SEQ ID NO: 25015 - RNA, 22 nt, Human
guugccguuuguucuaccagac

SEQ ID NO: 25016 - RNA, 22 nt, Human
guugcucaggcaggaguacagu

SEQ ID NO: 25017 - RNA, 22 nt, Human
guugcugaaagcccugacuggc

SEQ ID NO: 25018 - RNA, 22 nt, Human
guugcuggaagcuaugguccag

SEQ ID NO: 25019 - RNA, 22 nt, Human
guugcugggagcagggauccug

SEQ ID NO: 25020 - RNA, 22 nt, Human
guugcuuuucuccaucacaugg

SEQ ID NO: 25021 - RNA, 22 nt, Human
guuggacaguuugggaagggag

SEQ ID NO: 25022 - RNA, 22 nt, Human
guuggccugaauggucaagagg

SEQ ID NO: 25023 - RNA, 22 nt, Human
guugggaagcagauggaugagc

SEQ ID NO: 25024 - RNA, 22 nt, Human
guugggaaggcaagaaguagaa

SEQ ID NO: 25025 - RNA, 22 nt, Human
guugggagcagcagaccaagag

SEQ ID NO: 25026 - RNA, 22 nt, Human
guugggguccaaugaagcgagc

SEQ ID NO: 25027 - RNA, 22 nt, Human
guuguaaauacagcagauaauu

SEQ ID NO: 25028 - RNA, 22 nt, Human
gugaaaucugaggcccaugaug

SEQ ID NO: 25029 - RNA, 22 nt, Human
gugaacaaaauagcacauauua

SEQ ID NO: 25030 - RNA, 22 nt, Human
gugaacagacuguucucuacag

SEQ ID NO: 25031 - RNA, 22 nt, Human
gugaacagauaauagaaaugaa

SEQ ID NO: 25032 - RNA, 22 nt, Human
guggcagcugugggacacuggu

SEQ ID NO: 25033 - RNA, 22 nt, Human
guggcagcuguguugcaguuuu

SEQ ID NO: 25034 - RNA, 22 nt, Human
guggcaggagggcaucacuugg

SEQ ID NO: 25035 - RNA, 22 nt, Human
guggcagggcuuugcuguucuu

SEQ ID NO: 25036 - RNA, 22 nt, Human
guggcaggucccauuggagcag

SEQ ID NO: 25037 - RNA, 22 nt, Human
guggcagguuauaagcaucuca

SEQ ID NO: 25038 - RNA, 22 nt, Human
guggcagucuuuggcaaugaca

SEQ ID NO: 25039 - RNA, 22 nt, Human
guggcagugccagcuccgacaa

SEQ ID NO: 25040 - RNA, 22 nt, Human
guggcagugccguuugguucag

SEQ ID NO: 25041 - RNA, 22 nt, Human
guggcaucgucugagguggggu

SEQ ID NO: 25042 - RNA, 22 nt, Human
guggcaugaaagcaucugugau

SEQ ID NO: 25043 - RNA, 22 nt, Human
guggcaugacagugaaugggca

SEQ ID NO: 25044 - RNA, 22 nt, Human
guggcauggagaaggaggcagu

SEQ ID NO: 25045 - RNA, 22 nt, Human
guggcauuaggccaggugcaua

SEQ ID NO: 25046 - RNA, 22 nt, Human
guggccaaaucaugucaaaggc

SEQ ID NO: 25047 - RNA, 22 nt, Human
guggccaagggacucuaaggca

SEQ ID NO: 25048 - RNA, 22 nt, Human
ucugccagaaguucugagagua

SEQ ID NO: 25049 - RNA, 22 nt, Human
ucugccagcucugugggucucg

SEQ ID NO: 25050 - RNA, 21 nt, Human
ucugccagcugaagaggugga

SEQ ID NO: 25051 - RNA, 22 nt, Human
ucugccaggagccaugagcaag

SEQ ID NO: 25052 - RNA, 22 nt, Human
ucugccaggcauugugcugcuc

SEQ ID NO: 25053 - RNA, 22 nt, Human
ucugccaguauucacggcccgu

SEQ ID NO: 25054 - RNA, 22 nt, Human
ucugccaguuuauagacaagcc

SEQ ID NO: 25055 - RNA, 22 nt, Human
ucugccaucaagaugcucuggc

SEQ ID NO: 25056 - RNA, 22 nt, Human
ucugccaucuuaauucucuuuu

SEQ ID NO: 25057 - RNA, 21 nt, Human
ucugcccacacuggccacugc

SEQ ID NO: 25058 - RNA, 22 nt, Human
ucugcccacagccuccugucca

SEQ ID NO: 25059 - RNA, 20 nt, Human
ucugcccaccccggcuccca

SEQ ID NO: 25060 - RNA, 22 nt, Human
ucugcccaggacaccugccacu

SEQ ID NO: 25061 - RNA, 22 nt, Human
ucugcccaggaggucccauggg

SEQ ID NO: 25062 - RNA, 22 nt, Human
ucugcccucgaggagcuugugu

SEQ ID NO: 25063 - RNA, 23 nt, Human
ucugcccucugccuguuuuugua

SEQ ID NO: 25064 - RNA, 22 nt, Human
ucugccuagguuuccaaugugc

SEQ ID NO: 25065 - RNA, 19 nt, Human
ucugccucuggucaggcuc

SEQ ID NO: 25066 - RNA, 22 nt, Human
ucugccugaaauucacauguaa

SEQ ID NO: 25067 - RNA, 22 nt, Human
ucugccugcaguguggcagggc

SEQ ID NO: 25068 - RNA, 22 nt, Human
ucugccugcgcucacggggccg

SEQ ID NO: 25069 - RNA, 19 nt, Human
ucugccugcuuguaggggc

SEQ ID NO: 25070 - RNA, 22 nt, Human
ucugccuggaugauggcagggc

SEQ ID NO: 25071 - RNA, 22 nt, Human
ucugccuggauuuuggaaagcu

SEQ ID NO: 25072 - RNA, 22 nt, Human
ucugccuguaccucuuuuuugc

SEQ ID NO: 25073 - RNA, 22 nt, Human
ucugccuguugcuagaauguca

SEQ ID NO: 25074 - RNA, 20 nt, Human
ucugccuuagggggagccuc

SEQ ID NO: 25075 - RNA, 22 nt, Human
ucugccuuccccauaaucugau

SEQ ID NO: 25076 - RNA, 22 nt, Human
ucugccuugauggcauugagaa

SEQ ID NO: 25077 - RNA, 22 nt, Human
ucugccuuggcaaccacagcuu

SEQ ID NO: 25078 - RNA, 22 nt, Human
ucugccuuguugcaggcgcuau

SEQ ID NO: 25079 - RNA, 22 nt, Human
ucugccuuugcuuuggcuguca

SEQ ID NO: 25080 - RNA, 22 nt, Human
ucugccuuuguggucgggagaa

SEQ ID NO: 25081 - RNA, 22 nt, Human
ucugccuuuucacugccacuaa

SEQ ID NO: 25082 - RNA, 22 nt, Human
ucugcgccgcauguguucuuuc

SEQ ID NO: 25083 - RNA, 22 nt, Human
ucugcgcugccuugauccuugg

SEQ ID NO: 25084 - RNA, 22 nt, Human
ucugcguggcugcugugagcgu

SEQ ID NO: 25085 - RNA, 22 nt, Human
ucugcgugggacugaggaggcu

SEQ ID NO: 25086 - RNA, 22 nt, Human
ucugcuauuuucuaucugugug

SEQ ID NO: 25087 - RNA, 22 nt, Human
ucugcucaauacugcucaugaa

SEQ ID NO: 25088 - RNA, 20 nt, Human
ucugcucagcccucaguggc

SEQ ID NO: 25089 - RNA, 23 nt, Human
ucugcucugaaguucggcugagc

SEQ ID NO: 25090 - RNA, 22 nt, Human
ucugcugaauggagccaaccuc

SEQ ID NO: 25091 - RNA, 22 nt, Human
ucugcugaccuuucucugacac

SEQ ID NO: 25092 - RNA, 22 nt, Human
ucugcugaggugguuuuagaga

SEQ ID NO: 25093 - RNA, 22 nt, Human
ucugcugcacaaauucaucucu

SEQ ID NO: 25094 - RNA, 22 nt, Human
ucugcugcagggaaagacuuuc

SEQ ID NO: 25095 - RNA, 22 nt, Human
ucugcugcugagcacacuccua

SEQ ID NO: 25096 - RNA, 22 nt, Human
ucugcugguuccgaauuaggcc

SEQ ID NO: 25097 - RNA, 22 nt, Human
ucugcuguaaccuucagaggua

SEQ ID NO: 25098 - RNA, 22 nt, Human
ucugcuguccuuuauauagauu

SEQ ID NO: 25099 - RNA, 22 nt, Human
ucugcugucuaugcaaguccuu

SEQ ID NO: 25100 - RNA, 22 nt, Human
ucugcugugauucuacuagugu

SEQ ID NO: 25101 - RNA, 22 nt, Human
ucugcugugggucuauauuuua

SEQ ID NO: 25102 - RNA, 22 nt, Human
ucugcugugucccuggucuccu

SEQ ID NO: 25103 - RNA, 22 nt, Human
ucugcuguucauucuuuuagcu

SEQ ID NO: 25104 - RNA, 22 nt, Human
ucugcuguucucaugcugauuu

SEQ ID NO: 25105 - RNA, 22 nt, Human
ucugcuguugagcacaagugaa

SEQ ID NO: 25106 - RNA, 22 nt, Human
ucugcuguugccaugaguaaua

SEQ ID NO: 25107 - RNA, 22 nt, Human
ucugcuugcguucugcucccuc

SEQ ID NO: 25108 - RNA, 22 nt, Human
ucugcuugugucuguccagccu

SEQ ID NO: 25109 - RNA, 22 nt, Human
ucugcuuuagaauccaguagcu

SEQ ID NO: 25110 - RNA, 22 nt, Human
ucuggaaaagcgauaaaccauu

SEQ ID NO: 25111 - RNA, 22 nt, Human
ucuggaaagaucauuaaaucca

SEQ ID NO: 25112 - RNA, 22 nt, Human
ucuggaaauuucaguuuuagag

SEQ ID NO: 25113 - RNA, 18 nt, Human
ucuggaacaacuucaugu

SEQ ID NO: 25114 - RNA, 21 nt, Human
ucuggaagaaaaaaguauuau

SEQ ID NO: 25115 - RNA, 22 nt, Human
ucuggaagacagugagcccgcu

SEQ ID NO: 25116 - RNA, 22 nt, Human
ucuggaaggaagagcugagucc

SEQ ID NO: 25117 - RNA, 22 nt, Human
ucuggaaucagaccuaauccca

SEQ ID NO: 25118 - RNA, 22 nt, Human
ucuggaaucaguggcuuacccu

SEQ ID NO: 25119 - RNA, 23 nt, Human
ucuggaauccucccccuugguuc

SEQ ID NO: 25120 - RNA, 22 nt, Human
ucuggaaugaaugagguucugu

SEQ ID NO: 25121 - RNA, 22 nt, Human
ucuggaauuuuauugaucaaaa

SEQ ID NO: 25122 - RNA, 22 nt, Human
ucuggacaggggcgcuuugggg

SEQ ID NO: 25123 - RNA, 22 nt, Human
ucuggagaagaaacuugcucug

SEQ ID NO: 25124 - RNA, 22 nt, Human
ucuggagaagcccagggagcug

SEQ ID NO: 25125 - RNA, 22 nt, Human
ucuggagaccugcauuuauauu

SEQ ID NO: 25126 - RNA, 22 nt, Human
ucuggagaggggccuagaauuu

SEQ ID NO: 25127 - RNA, 19 nt, Human
ucuggagcugaugcaggug

SEQ ID NO: 25128 - RNA, 22 nt, Human
ucuggaggcaggcugccaggau

SEQ ID NO: 25129 - RNA, 22 nt, Human
ucuggagggggaugccucaucc

SEQ ID NO: 25130 - RNA, 22 nt, Human
ucuggaguaugucccuggugaa

SEQ ID NO: 25131 - RNA, 22 nt, Human
ucuggaguccuggaaucagcua

SEQ ID NO: 25132 - RNA, 22 nt, Human
ucuggaguggagcugaucauuu

SEQ ID NO: 25133 - RNA, 22 nt, Human
ucuggaguuacugcuggcuuug

SEQ ID NO: 25134 - RNA, 22 nt, Human
ucuggaguugaaguucuucccc

SEQ ID NO: 25135 - RNA, 22 nt, Human
ucuggaguugagagugugcgag

SEQ ID NO: 25136 - RNA, 22 nt, Human
ucuggaguugugcaguggaccu

SEQ ID NO: 25137 - RNA, 22 nt, Human
ucuggaucgccggcgccugggc

SEQ ID NO: 25138 - RNA, 17 nt, Human
ucuggaugucauggaag

SEQ ID NO: 25139 - RNA, 22 nt, Human
ucuggcacuuaaaugagaauuu

SEQ ID NO: 25140 - RNA, 22 nt, Human
ucuggcagagauauccauccca

SEQ ID NO: 25141 - RNA, 22 nt, Human
gugguuuaggggaaagaacugu

SEQ ID NO: 25142 - RNA, 22 nt, Human
gugguuuuauucguuccucugu

SEQ ID NO: 25143 - RNA, 17 nt, Human
guguaacuaugagccau

SEQ ID NO: 25144 - RNA, 22 nt, Human
guguaacuuuuauucaugcucu

SEQ ID NO: 25145 - RNA, 22 nt, Human
guguaauuauauaaagaucuac

SEQ ID NO: 25146 - RNA, 17 nt, Human
guguacaagcagaaggc

SEQ ID NO: 25147 - RNA, 19 nt, Human
guguacagcucagugaauu

SEQ ID NO: 25148 - RNA, 22 nt, Human
guguacagugauuugaguucac

SEQ ID NO: 25149 - RNA, 22 nt, Human
guguacaguuagccaccaaauu

SEQ ID NO: 25150 - RNA, 22 nt, Human
guguacauagaauugugcuuug

SEQ ID NO: 25151 - RNA, 19 nt, Human
guguagcuauuggucaaaa

SEQ ID NO: 25152 - RNA, 22 nt, Human
guguauaaugcuguuuguacau

SEQ ID NO: 25153 - RNA, 22 nt, Human
guguauaaugcuuugaagauua

SEQ ID NO: 25154 - RNA, 22 nt, Human
guguauccuuauucacacacau

SEQ ID NO: 25155 - RNA, 22 nt, Human
guguaugaacgaaagaauggau

SEQ ID NO: 25156 - RNA, 22 nt, Human
guguaugcaauugagucauaga

SEQ ID NO: 25157 - RNA, 22 nt, Human
guguaugugccuuacauuuuau

SEQ ID NO: 25158 - RNA, 22 nt, Human
gugucaacagccgaagauaaau

SEQ ID NO: 25159 - RNA, 22 nt, Human
gugucacuggaauacugucugu

SEQ ID NO: 25160 - RNA, 22 nt, Human
gugucagauguccagggcagca

SEQ ID NO: 25161 - RNA, 22 nt, Human
gugucauggaaaauugcaaugg

SEQ ID NO: 25162 - RNA, 22 nt, Human
gugucauguagaaauugaugaa

SEQ ID NO: 25163 - RNA, 22 nt, Human
gugucauuaaccaccaugcaaa

SEQ ID NO: 25164 - RNA, 22 nt, Human
gugucauuacugaaagauugaa

SEQ ID NO: 25165 - RNA, 22 nt, Human
ucuggcucacuucaggcuucac

SEQ ID NO: 25166 - RNA, 22 nt, Human
ucuggcucaggucagacaggga

SEQ ID NO: 25167 - RNA, 22 nt, Human
ucuggcucauacaagccugcaa

SEQ ID NO: 25168 - RNA, 22 nt, Human
ucuggcuccacaccucacugca

SEQ ID NO: 25169 - RNA, 22 nt, Human
ucuggcucccuggagcuccaca

SEQ ID NO: 25170 - RNA, 22 nt, Human
ucuggcuccugaguccaugcuc

SEQ ID NO: 25171 - RNA, 22 nt, Human
ucuggcucuaacuaggcaucag

SEQ ID NO: 25172 - RNA, 23 nt, Human
ucuggcucuaugugacagcucuc

SEQ ID NO: 25173 - RNA, 22 nt, Human
ucuggcucucaacaaauauuua

SEQ ID NO: 25174 - RNA, 22 nt, Human
ucuggcucugaauucacuucug

SEQ ID NO: 25175 - RNA, 22 nt, Human
ucuggcucuuugggugauugua

SEQ ID NO: 25176 - RNA, 22 nt, Human
ucuggcugaaaggggcugugcc

SEQ ID NO: 25177 - RNA, 22 nt, Human
ucuggcugaauuagccuugggu

SEQ ID NO: 25178 - RNA, 22 nt, Human
ucuggcugccaccauccucccc

SEQ ID NO: 25179 - RNA, 23 nt, Human
ucuggcugcuccuuucaaugcuc

SEQ ID NO: 25180 - RNA, 22 nt, Human
ucuggcugcugcgugagugcuu

SEQ ID NO: 25181 - RNA, 22 nt, Human
ucuggcuggcucggccgggagu

SEQ ID NO: 25182 - RNA, 22 nt, Human
ucuggcuguguaugagaguuuu

SEQ ID NO: 25183 - RNA, 22 nt, Human
ucuggcuucaagucccagcucu

SEQ ID NO: 25184 - RNA, 22 nt, Human
ucuggcuuggcuggcaucucug

SEQ ID NO: 25185 - RNA, 22 nt, Human
ucuggcuuucauuuguuuaaag

SEQ ID NO: 25186 - RNA, 23 nt, Human
ucuggcuuugcuggaaguuuuga

SEQ ID NO: 25187 - RNA, 22 nt, Human
ucugggaaauagaggacccuag

SEQ ID NO: 25188 - RNA, 22 nt, Human
ucugggaaaugcuguuccuugu

SEQ ID NO: 25189 - RNA, 22 nt, Human
ucugggaaaugggcagcuucgc

SEQ ID NO: 25190 - RNA, 22 nt, Human
ucugggaacagccuggcugugu

SEQ ID NO: 25191 - RNA, 22 nt, Human
ucugggaacauuuugagggcaa

SEQ ID NO: 25192 - RNA, 22 nt, Human
ucugggaaccaaagggugcuua

SEQ ID NO: 25193 - RNA, 22 nt, Human
ucugggaacucugucauuuccc

SEQ ID NO: 25194 - RNA, 22 nt, Human
ucugggaagacggauggacccu

SEQ ID NO: 25195 - RNA, 22 nt, Human
ucugggaagcaaauauguaaga

SEQ ID NO: 25196 - RNA, 19 nt, Human
ucugggaagccgggcucca

SEQ ID NO: 25197 - RNA, 22 nt, Human
ucugggaaggcucugcagauau

SEQ ID NO: 25198 - RNA, 22 nt, Human
ucugggaagugagaugcugugu

SEQ ID NO: 25199 - RNA, 22 nt, Human
ucugggaauacacacugauuua

SEQ ID NO: 25200 - RNA, 19 nt, Human
ucugggaaugaugccagca

SEQ ID NO: 25201 - RNA, 21 nt, Human
ucugggacagggccugaggag

SEQ ID NO: 25202 - RNA, 19 nt, Human
ucugggagagugaaucuga

SEQ ID NO: 25203 - RNA, 22 nt, Human
ucugggagcagaugaugguaua

SEQ ID NO: 25204 - RNA, 21 nt, Human
ucugggagugggaaaaugguc

SEQ ID NO: 25205 - RNA, 22 nt, Human
ucugggagugugucuggccauc

SEQ ID NO: 25206 - RNA, 22 nt, Human
ucugggaugcaaacagaaucug

SEQ ID NO: 25207 - RNA, 22 nt, Human
ucugggauuuuauagacaugcu

SEQ ID NO: 25208 - RNA, 22 nt, Human
ucugggauuuuugacacugaag

SEQ ID NO: 25209 - RNA, 22 nt, Human
ucugggcaauggaugcacucac

SEQ ID NO: 25210 - RNA, 22 nt, Human
ucugggcacacaccaugcccac

SEQ ID NO: 25211 - RNA, 22 nt, Human
ucugggcacugcugagccugua

SEQ ID NO: 25212 - RNA, 22 nt, Human
ucugggcagaagcagugcaaag

SEQ ID NO: 25213 - RNA, 22 nt, Human
ucugggcagagggucuuaguca

SEQ ID NO: 25214 - RNA, 22 nt, Human
ucugggcagcagcagcuaguag

SEQ ID NO: 25215 - RNA, 21 nt, Human
ucugggcagcccaguccugag

SEQ ID NO: 25216 - RNA, 19 nt, Human
ucugggcagggccagcacc

SEQ ID NO: 25217 - RNA, 22 nt, Human
ucugggcaguucggauccucug

SEQ ID NO: 25218 - RNA, 22 nt, Human
ucugggcaugucugugaacacg

SEQ ID NO: 25219 - RNA, 22 nt, Human
ucugggccaacccuuccauggg

SEQ ID NO: 25220 - RNA, 23 nt, Human
ucugggccacuugucugcacuuc

SEQ ID NO: 25221 - RNA, 22 nt, Human
ucugggccagaucuagggaucu

SEQ ID NO: 25222 - RNA, 22 nt, Human
ucugggccagugauuuuuccag

SEQ ID NO: 25223 - RNA, 21 nt, Human
ucugggcccaugcugccucac

SEQ ID NO: 25224 - RNA, 22 nt, Human
ucugggcccuaaaccagcucua

SEQ ID NO: 25225 - RNA, 22 nt, Human
ucugggcccugagauguucuuc

SEQ ID NO: 25226 - RNA, 22 nt, Human
ucugggccucaccugcugcuca

SEQ ID NO: 25227 - RNA, 22 nt, Human
ucugggccucaguuucuucauc

SEQ ID NO: 25228 - RNA, 22 nt, Human
ucugggccugauggcuaaagcc

SEQ ID NO: 25229 - RNA, 22 nt, Human
ucugggcucugcgaagcccuuc

SEQ ID NO: 25230 - RNA, 22 nt, Human
ucugggcugaaaugaaggccuu

SEQ ID NO: 25231 - RNA, 23 nt, Human
ucugggcugagcucgaguguaga

SEQ ID NO: 25232 - RNA, 22 nt, Human
ucugggcugcuaugaggcagag

SEQ ID NO: 25233 - RNA, 22 nt, Human
ucugggcugcuucagccuucgc

SEQ ID NO: 25234 - RNA, 22 nt, Human
ucugggcuggugcucaugaauu

SEQ ID NO: 25235 - RNA, 22 nt, Human
ucugggcugucuacagguuggc

SEQ ID NO: 25236 - RNA, 22 nt, Human
ucugggcugugccaaagcucuu

SEQ ID NO: 25237 - RNA, 22 nt, Human
ucugggcugugguuccacuccg

SEQ ID NO: 25238 - RNA, 22 nt, Human
ucugggcuugccugguugugca

SEQ ID NO: 25239 - RNA, 22 nt, Human
ucugggcuuuacacugugcuua

SEQ ID NO: 25240 - RNA, 22 nt, Human
ucugggcuuuguaaugggaggu

SEQ ID NO: 25241 - RNA, 20 nt, Human
ucuggggaugaggucuagga

SEQ ID NO: 25242 - RNA, 22 nt, Human
ucuggggcaguuacuggggccu

SEQ ID NO: 25243 - RNA, 22 nt, Human
ucugggggaggaggcauggccc

SEQ ID NO: 25244 - RNA, 22 nt, Human
ucugggggcgaccagggacugc

SEQ ID NO: 25245 - RNA, 21 nt, Human
ucugggggugagccuagaaau

SEQ ID NO: 25246 - RNA, 22 nt, Human
ucuggggugugaccugagcaug

SEQ ID NO: 25247 - RNA, 18 nt, Human
ucuggggugugcugugua

SEQ ID NO: 25248 - RNA, 22 nt, Human
ucugggguuuucacgcugucuc

SEQ ID NO: 25249 - RNA, 22 nt, Human
ucuggguacuugcaagauuuuc

SEQ ID NO: 25250 - RNA, 22 nt, Human
guguuuauguuuguguagggga

SEQ ID NO: 25251 - RNA, 22 nt, Human
guguuuauuuagaguaggccau

SEQ ID NO: 25252 - RNA, 22 nt, Human
guguuuggucagacguccgggg

SEQ ID NO: 25253 - RNA, 22 nt, Human
guguuuguucgugacuccaaag

SEQ ID NO: 25254 - RNA, 22 nt, Human
guguuuuagugcugcugagcug

SEQ ID NO: 25255 - RNA, 22 nt, Human
guguuuuaucagacaaaguaua

SEQ ID NO: 25256 - RNA, 22 nt, Human
guguuuuauggagucauaacgu

SEQ ID NO: 25257 - RNA, 22 nt, Human
guguuuuggccauuagugugau

SEQ ID NO: 25258 - RNA, 22 nt, Human
guguuuugugaggccuucuuuc

SEQ ID NO: 25259 - RNA, 22 nt, Human
guuaaacauugcuccacggguu

SEQ ID NO: 25260 - RNA, 22 nt, Human
guuaacaaauguaaagcaauua

SEQ ID NO: 25261 - RNA, 22 nt, Human
guuaaccaaggcaccaagugua

SEQ ID NO: 25262 - RNA, 22 nt, Human
guuaacuuccccaugucugcau

SEQ ID NO: 25263 - RNA, 22 nt, Human
guuaacuugguagucuaagugu

SEQ ID NO: 25264 - RNA, 22 nt, Human
guuaacuuuuuacagaaaugaa

SEQ ID NO: 25265 - RNA, 22 nt, Human
guuaagaacuuguugaaggucu

SEQ ID NO: 25266 - RNA, 22 nt, Human
guuaaguaccagauugucugaa

SEQ ID NO: 25267 - RNA, 22 nt, Human
guuaagugaaugucaugucagg

SEQ ID NO: 25268 - RNA, 22 nt, Human
guuaauaaagguauagaaucag

SEQ ID NO: 25269 - RNA, 22 nt, Human
guuaauacaaccaugaucuucu

SEQ ID NO: 25270 - RNA, 22 nt, Human
guuaaugccuacauauuaagca

SEQ ID NO: 25271 - RNA, 22 nt, Human
guuaaugugauauaaaguauuu

SEQ ID NO: 25272 - RNA, 22 nt, Human
guuaaugugguagugcauaucu

SEQ ID NO: 25273 - RNA, 22 nt, Human
guuacaaaggaagcuucacugc

SEQ ID NO: 25274 - RNA, 22 nt, Human
guuacaauguccuuacaugaaa

SEQ ID NO: 25275 - RNA, 22 nt, Human
guuacacagcuaagcuucuccu

SEQ ID NO: 25276 - RNA, 22 nt, Human
guuacacaggaaaacauuagca

SEQ ID NO: 25277 - RNA, 22 nt, Human
guuacaguggguuuggggccca

SEQ ID NO: 25278 - RNA, 22 nt, Human
guuacaguuugggcuugauuca

SEQ ID NO: 25279 - RNA, 22 nt, Human
guuaccauugucuaggucauug

SEQ ID NO: 25280 - RNA, 16 nt, Human
guuacccacccaaggc

SEQ ID NO: 25281 - RNA, 22 nt, Human
guuacccagugcuguggaggga

SEQ ID NO: 25282 - RNA, 22 nt, Human
guuacuagggacugagaguaaa

SEQ ID NO: 25283 - RNA, 22 nt, Human
guguuacugcuuuuaucuacca

SEQ ID NO: 25284 - RNA, 22 nt, Human
guguuacuuaccugggacagca

SEQ ID NO: 25285 - RNA, 22 nt, Human
guguuauuagagcauuaauuuu

SEQ ID NO: 25286 - RNA, 22 nt, Human
guguucuuuugcuucacagaaa

SEQ ID NO: 25287 - RNA, 22 nt, Human
guguuuauacagcaaagagcau

SEQ ID NO: 25288 - RNA, 22 nt, Human
guguuuaugagugaccuugucu

SEQ ID NO: 25289 - RNA, 22 nt, Human
guguuuauuuucauaguuggcc

SEQ ID NO: 25290 - RNA, 22 nt, Human
guguuuccaguucagaaagcaa

SEQ ID NO: 25291 - RNA, 22 nt, Human
guguuuccuaguuuaaugaaug

SEQ ID NO: 25292 - RNA, 21 nt, Human
guguuuccuguuuauggcuug

SEQ ID NO: 25293 - RNA, 22 nt, Human
guguuucuugcacuccccggac

SEQ ID NO: 25294 - RNA, 22 nt, Human
guguuugcuggagcucuggguc

SEQ ID NO: 25295 - RNA, 22 nt, Human
guguuugugagcuaggugacau

SEQ ID NO: 25296 - RNA, 22 nt, Human
guuaaaagaacaacucggaggu

SEQ ID NO: 25297 - RNA, 22 nt, Human
guuaaacaauaacuggcacaca

SEQ ID NO: 25298 - RNA, 22 nt, Human
guuaaaugcauuuuccaagcac

SEQ ID NO: 25299 - RNA, 22 nt, Human
guuaacaagguguagagguuuu

SEQ ID NO: 25300 - RNA, 18 nt, Human
guuaacaauuacuaacgc

SEQ ID NO: 25301 - RNA, 22 nt, Human
guuaacacaggacucucugccu

SEQ ID NO: 25302 - RNA, 22 nt, Human
guuaacauaggaguuuguugua

SEQ ID NO: 25303 - RNA, 23 nt, Human
guuaacaugguccauggaagagc

SEQ ID NO: 25304 - RNA, 22 nt, Human
guuaagaaucaagacuuaucuu

SEQ ID NO: 25305 - RNA, 22 nt, Human
guuaaggaucuugagaugagga

SEQ ID NO: 25306 - RNA, 22 nt, Human
guuaauauuuaccugucaagaa

SEQ ID NO: 25307 - RNA, 22 nt, Human
guuaaugccauuaggaaauuua

SEQ ID NO: 25308 - RNA, 22 nt, Human
guuaaugugucugacacaaugg

SEQ ID NO: 25309 - RNA, 22 nt, Human
guuacaaagcacuucaagugaa

SEQ ID NO: 25310 - RNA, 22 nt, Human
guuacaaaggacugggggccac

SEQ ID NO: 25311 - RNA, 22 nt, Human
guuacaaaugccaaagcugaga

SEQ ID NO: 25312 - RNA, 22 nt, Human
guuacaaauguaaauucugggg

SEQ ID NO: 25313 - RNA, 22 nt, Human
guuacacacaauauauccuaaa

SEQ ID NO: 25314 - RNA, 22 nt, Human
guuagaaacgcaggcucuccgg

SEQ ID NO: 25315 - RNA, 22 nt, Human
guuagaaaugcagaaacuugac

SEQ ID NO: 25316 - RNA, 22 nt, Human
guuagacaugagugugcuuaca

SEQ ID NO: 25317 - RNA, 22 nt, Human
guuagagacaucucugguuucu

SEQ ID NO: 25318 - RNA, 22 nt, Human
guuagcaaugaaaucuggaugc

SEQ ID NO: 25319 - RNA, 22 nt, Human
guuaggaacacuggagccuaaa

SEQ ID NO: 25320 - RNA, 19 nt, Human
guuaggcaggguggggagu

SEQ ID NO: 25321 - RNA, 22 nt, Human
guuagggaagcgcuguguucuu

SEQ ID NO: 25322 - RNA, 22 nt, Human
guuagggaucaggaacaagagc

SEQ ID NO: 25323 - RNA, 22 nt, Human
guuagguagaaguuuacuuuga

SEQ ID NO: 25324 - RNA, 22 nt, Human
guuaguagcauuucaugacaug

SEQ ID NO: 25325 - RNA, 22 nt, Human
guuagugugacugaggaaugca

SEQ ID NO: 25326 - RNA, 22 nt, Human
guuauacauauguguuaacaaa

SEQ ID NO: 25327 - RNA, 22 nt, Human
guuauaggagcccgaacuaaga

SEQ ID NO: 25328 - RNA, 22 nt, Human
guuauauaauuccugugguagu

SEQ ID NO: 25329 - RNA, 22 nt, Human
guuauauauaguauuucucuga

SEQ ID NO: 25330 - RNA, 22 nt, Human
guuaugaaauaaauauagauca

SEQ ID NO: 25331 - RNA, 22 nt, Human
guuaugauggcaccacugcacu

SEQ ID NO: 25332 - RNA, 22 nt, Human
guuaugauugaaauuccaguuu

SEQ ID NO: 25333 - RNA, 22 nt, Human
guuauucaauggcuuauaagga

SEQ ID NO: 25334 - RNA, 22 nt, Human
guuauucuacagucauugaagu

SEQ ID NO: 25335 - RNA, 22 nt, Human
guuauucuaccacuauguacag

SEQ ID NO: 25336 - RNA, 22 nt, Human
guuauucuauuaaugugauugu

SEQ ID NO: 25337 - RNA, 22 nt, Human
guuauucugcgaugcaauccug

SEQ ID NO: 25338 - RNA, 22 nt, Human
guuauugacucucuuguggcuu

SEQ ID NO: 25339 - RNA, 22 nt, Human
guuauugcaguauagaggucua

SEQ ID NO: 25340 - RNA, 22 nt, Human
guuauuguccagcacaguuggg

SEQ ID NO: 25341 - RNA, 22 nt, Human
guuauuucagccacagagugca

SEQ ID NO: 25342 - RNA, 22 nt, Human
guuauuuuaacuucucaguaau

SEQ ID NO: 25343 - RNA, 22 nt, Human
guucaaaauucaaaugguauac

SEQ ID NO: 25344 - RNA, 21 nt, Human
guucaaauggguagauucaca

SEQ ID NO: 25345 - RNA, 22 nt, Human
guucaaauucuaugaaauaugu

SEQ ID NO: 25346 - RNA, 22 nt, Human
guucaaauugagaugguauaaa

SEQ ID NO: 25347 - RNA, 22 nt, Human
guucaaauuuucuaggugggug

SEQ ID NO: 25348 - RNA, 18 nt, Human
guucaagccaacaucaag

SEQ ID NO: 25349 - RNA, 22 nt, Human
guucaaguuucugagcuuuaau

SEQ ID NO: 25350 - RNA, 22 nt, Human
guucaauuaaguuacaaauuua

SEQ ID NO: 25351 - RNA, 22 nt, Human
guucaauuucagcauccauuga

SEQ ID NO: 25352 - RNA, 22 nt, Human
guucacacuuuugauaugugaa

SEQ ID NO: 25353 - RNA, 22 nt, Human
guucacagaaauuguguaccuc

SEQ ID NO: 25354 - RNA, 22 nt, Human
guucacagauccuugaagccag

SEQ ID NO: 25355 - RNA, 22 nt, Human
guucacaggguuaggaaucacu

SEQ ID NO: 25356 - RNA, 22 nt, Human
guucacaguuaggacaacugcu

SEQ ID NO: 25357 - RNA, 22 nt, Human
guucacauguggucaugcuguc

SEQ ID NO: 25358 - RNA, 21 nt, Human
guucagagauuauugagucau

SEQ ID NO: 25359 - RNA, 22 nt, Human
guuuacaacaugccaacugggc

SEQ ID NO: 25360 - RNA, 22 nt, Human
guuuacagagacagaaaguagu

SEQ ID NO: 25361 - RNA, 22 nt, Human
guuuacaguacucacuugcauu

SEQ ID NO: 25362 - RNA, 22 nt, Human
guuuacaguggcuucauuggau

SEQ ID NO: 25363 - RNA, 22 nt, Human
guuuacaugcaugcaagaauga

SEQ ID NO: 25364 - RNA, 22 nt, Human
guuuacauguaauguguuauug

SEQ ID NO: 25365 - RNA, 22 nt, Human
guuuacuuuucauggagcauau

SEQ ID NO: 25366 - RNA, 22 nt, Human
guuuagaagccaagauuugggu

SEQ ID NO: 25367 - RNA, 22 nt, Human
guuuauaauccaacucugcucc

SEQ ID NO: 25368 - RNA, 22 nt, Human
guuuauaaugucugugccaaaa

SEQ ID NO: 25369 - RNA, 22 nt, Human
guuuaucauuauuauuagcaac

SEQ ID NO: 25370 - RNA, 22 nt, Human
guuuaucuuaauggacucagag

SEQ ID NO: 25371 - RNA, 22 nt, Human
guuuaugaaugugucagacaua

SEQ ID NO: 25372 - RNA, 22 nt, Human
guuuaugaggaaaaguuaugau

SEQ ID NO: 25373 - RNA, 22 nt, Human
guuuaugcacuugguuuguguc

SEQ ID NO: 25374 - RNA, 22 nt, Human
guuuauuaacugucaagugauu

SEQ ID NO: 25375 - RNA, 22 nt, Human
guuuauuggguauuguggagcc

SEQ ID NO: 25376 - RNA, 22 nt, Human
guuucaaauagguuucagcaaa

SEQ ID NO: 25377 - RNA, 22 nt, Human
guuucacagcaaaguucccugu

SEQ ID NO: 25378 - RNA, 22 nt, Human
guuucacaugaaacuuggggaa

SEQ ID NO: 25379 - RNA, 22 nt, Human
guuucagagguguucauuuuca

SEQ ID NO: 25380 - RNA, 22 nt, Human
guuucauagcauauacgugugu

SEQ ID NO: 25381 - RNA, 22 nt, Human
guuucauagcuacgauuuuggg

SEQ ID NO: 25382 - RNA, 22 nt, Human
guuucauauaccaagcacuuga

SEQ ID NO: 25383 - RNA, 22 nt, Human
guuuccaaccccaccaaagugc

SEQ ID NO: 25384 - RNA, 22 nt, Human
guuuccaacuaguaugaucagg

SEQ ID NO: 25385 - RNA, 22 nt, Human
guuuccaagucucucaacaccc

SEQ ID NO: 25386 - RNA, 22 nt, Human
guuuccacuugagaggacuccu

SEQ ID NO: 25387 - RNA, 22 nt, Human
guuuccagccuagagaugguga

SEQ ID NO: 25388 - RNA, 22 nt, Human
guuuccagccuccuggguaaag

SEQ ID NO: 25389 - RNA, 22 nt, Human
guuuccaggcacuuuuucugcu

SEQ ID NO: 25390 - RNA, 22 nt, Human
guuuccaggcgauaucagcugc

SEQ ID NO: 25391 - RNA, 22 nt, Human
guuuccagucaacuugugugug

SEQ ID NO: 25392 - RNA, 22 nt, Human
guuuccauuguccuaucuauag

SEQ ID NO: 25393 - RNA, 22 nt, Human
guuucccagucugcagaguucu

SEQ ID NO: 25394 - RNA, 22 nt, Human
guuuccuaccagugguuccaga

SEQ ID NO: 25395 - RNA, 22 nt, Human
guuuccuagaucaguguucuua

SEQ ID NO: 25396 - RNA, 22 nt, Human
guuuccuaggcuuauacagcug

SEQ ID NO: 25397 - RNA, 20 nt, Human
guuuccuauuuaccuccuca

SEQ ID NO: 25398 - RNA, 18 nt, Human
guuuccugaggugaaggg

SEQ ID NO: 25399 - RNA, 22 nt, Human
guuuccugggccccaacccaga

SEQ ID NO: 25400 - RNA, 22 nt, Human
uaauagaaagguauuuuuugca

SEQ ID NO: 25401 - RNA, 22 nt, Human
uaauagcugugggaaauaaaag

SEQ ID NO: 25402 - RNA, 22 nt, Human
uaauagucauuguauaccuugg

SEQ ID NO: 25403 - RNA, 19 nt, Human
uaauauacagacccaucug

SEQ ID NO: 25404 - RNA, 21 nt, Human
uaauauagguucacaacuagu

SEQ ID NO: 25405 - RNA, 22 nt, Human
uaauauauaccuuuguuaggaa

SEQ ID NO: 25406 - RNA, 22 nt, Human
uaauaugggcagucugaauaua

SEQ ID NO: 25407 - RNA, 22 nt, Human
uaauauuucuacccugcugccu

SEQ ID NO: 25408 - RNA, 22 nt, Human
uaaucacaucaggguaaauggg

SEQ ID NO: 25409 - RNA, 20 nt, Human
uaaucacuuauaagacaaug

SEQ ID NO: 25410 - RNA, 22 nt, Human
uaaucauggccucaaauuuuau

SEQ ID NO: 25411 - RNA, 22 nt, Human
uaauccaauggcacaauguaug

SEQ ID NO: 25412 - RNA, 22 nt, Human
uaauccacaauagagauuaucu

SEQ ID NO: 25413 - RNA, 18 nt, Human
uaauccauaugcuuugcc

SEQ ID NO: 25414 - RNA, 22 nt, Human
uaauccugcuucuucucccuuu

SEQ ID NO: 25415 - RNA, 22 nt, Human
uaauccugugcuguguaaguac

SEQ ID NO: 25416 - RNA, 22 nt, Human
uaaucucucuaaguuuccauuu

SEQ ID NO: 25417 - RNA, 23 nt, Human
uaaucucuucaagagaaggggaa

SEQ ID NO: 25418 - RNA, 22 nt, Human
uaaucugaagaaacaggacuug

SEQ ID NO: 25419 - RNA, 22 nt, Human
uaaugaacacagaauuucacuu

SEQ ID NO: 25420 - RNA, 22 nt, Human
uaaugaaugagaauauaacaga

SEQ ID NO: 25421 - RNA, 22 nt, Human
uaaugagaauucuuuuugggua

SEQ ID NO: 25422 - RNA, 22 nt, Human
uaaugagaucauaucuucugag

SEQ ID NO: 25423 - RNA, 22 nt, Human
uaaugaggcaagagucauggcu

SEQ ID NO: 25424 - RNA, 22 nt, Human
uaaugaugcaguuacugucuca

SEQ ID NO: 25425 - RNA, 22 nt, Human
uaaugcaauuuucucaguccau

SEQ ID NO: 25426 - RNA, 19 nt, Human
uaaugcacuuaacacaugg

SEQ ID NO: 25427 - RNA, 22 nt, Human
uaaugccaauuuaaugauccau

SEQ ID NO: 25428 - RNA, 22 nt, Human
uaaugccuagauuauucuguuu

SEQ ID NO: 25429 - RNA, 20 nt, Human
uaaugccucaugauacuaga

SEQ ID NO: 25430 - RNA, 22 nt, Human
uaaugcuuuguuuugaucuaac

SEQ ID NO: 25431 - RNA, 22 nt, Human
uaauggcagagucaugcuuucu

SEQ ID NO: 25432 - RNA, 22 nt, Human
uaauggcuaaaauucagaagaa

SEQ ID NO: 25433 - RNA, 22 nt, Human
uaaugguauuuguugaaaaacu

SEQ ID NO: 25434 - RNA, 22 nt, Human
uaauguagggguguaacacaca

SEQ ID NO: 25435 - RNA, 22 nt, Human
uaaugucuccaggguugaccua

SEQ ID NO: 25436 - RNA, 22 nt, Human
uaaugugaagacauaaaucaga

SEQ ID NO: 25437 - RNA, 22 nt, Human
uaauguuaguauguaaucuuau

SEQ ID NO: 25438 - RNA, 22 nt, Human
uaauguuugagauguuggauuu

SEQ ID NO: 25439 - RNA, 22 nt, Human
uaauguuugggaaggugcuuug

SEQ ID NO: 25440 - RNA, 22 nt, Human
uaauuaacauacaaaacagcug

SEQ ID NO: 25441 - RNA, 22 nt, Human
uaauuacaaagcaagcacaggg

SEQ ID NO: 25442 - RNA, 22 nt, Human
uaauuacagagguuugccaguu

SEQ ID NO: 25443 - RNA, 22 nt, Human
uaauuacagguccaaaacaauc

SEQ ID NO: 25444 - RNA, 22 nt, Human
uaauuagagucacaaguaacca

SEQ ID NO: 25445 - RNA, 21 nt, Human
uaauuagcaaagcugagauuc

SEQ ID NO: 25446 - RNA, 22 nt, Human
uaauuauaacaguuacaucuua

SEQ ID NO: 25447 - RNA, 22 nt, Human
uaauuauuaugacaacaauugc

SEQ ID NO: 25448 - RNA, 22 nt, Human
uaauugcucgagaaauaaccuc

SEQ ID NO: 25449 - RNA, 22 nt, Human
uaauugcucuuggccgugccag

SEQ ID NO: 25450 - RNA, 22 nt, Human
uaauugcuuguaaagcccugaa

SEQ ID NO: 25451 - RNA, 22 nt, Human
uaauuggauguucucuggaagc

SEQ ID NO: 25452 - RNA, 22 nt, Human
uaauuggcuuuacuuaaagucc

SEQ ID NO: 25453 - RNA, 22 nt, Human
uaauugguagcugguauaaugc

SEQ ID NO: 25454 - RNA, 22 nt, Human
uaauuguacucccugugggaaa

SEQ ID NO: 25455 - RNA, 22 nt, Human
uaauuguagcuuuguaaucagc

SEQ ID NO: 25456 - RNA, 22 nt, Human
uaauuuacagagauacagucag

SEQ ID NO: 25457 - RNA, 22 nt, Human
uaauuuacucagauguucaauc

SEQ ID NO: 25458 - RNA, 22 nt, Human
uaauuucaauagcuugcauaau

SEQ ID NO: 25459 - RNA, 22 nt, Human
uaauuucacaguucaacgcaca

SEQ ID NO: 25460 - RNA, 22 nt, Human
uaauuucagugcaagcucacgg

SEQ ID NO: 25461 - RNA, 22 nt, Human
uaauuucuggagggagaaagag

SEQ ID NO: 25462 - RNA, 22 nt, Human
uaauuuuaauaguauguggcau

SEQ ID NO: 25463 - RNA, 22 nt, Human
uaauuuuacuuccugagcaccu

SEQ ID NO: 25464 - RNA, 22 nt, Human
uaauuuuaugacaguguauuuu

SEQ ID NO: 25465 - RNA, 22 nt, Human
uacaaaaggaagagggaucuua

SEQ ID NO: 25466 - RNA, 22 nt, Human
uacaaaaguaauuacgguuuuu

SEQ ID NO: 25467 - RNA, 22 nt, Human
uacaaacuguuauuauuauugu

SEQ ID NO: 25468 - RNA, 22 nt, Human
uaaaagcucuucuguugaguua

SEQ ID NO: 25469 - RNA, 22 nt, Human
uaaaaggauuagcaggaugggc

SEQ ID NO: 25470 - RNA, 22 nt, Human
uaaaaguaggaaugaaacgcau

SEQ ID NO: 25471 - RNA, 22 nt, Human
uaaaauagaggaugucaugcua

SEQ ID NO: 25472 - RNA, 22 nt, Human
uaaaauagccagugccccucug

SEQ ID NO: 25473 - RNA, 22 nt, Human
uaaaaucaccaaaagcaggugg

SEQ ID NO: 25474 - RNA, 22 nt, Human
uaaaaucauucuggugucagua

SEQ ID NO: 25475 - RNA, 22 nt, Human
uaaaaucgcacugcuguuguua

SEQ ID NO: 25476 - RNA, 22 nt, Human
uaaaaugccagaccaguucacg

SEQ ID NO: 25477 - RNA, 19 nt, Human
uaaaaugucuguggucagu

SEQ ID NO: 25478 - RNA, 22 nt, Human
uaaaauugcggugaauauuucc

SEQ ID NO: 25479 - RNA, 22 nt, Human
uaaacaagcuggacugauaagu

SEQ ID NO: 25480 - RNA, 22 nt, Human
uaaacaaggguuacugagcaug

SEQ ID NO: 25481 - RNA, 22 nt, Human
uaaacaauuccucucuaggcau

SEQ ID NO: 25482 - RNA, 22 nt, Human
uaaacagccuaaaacuuucuuu

SEQ ID NO: 25483 - RNA, 22 nt, Human
uaaacaggccccagggagguug

SEQ ID NO: 25484 - RNA, 20 nt, Human
uaaacaguauuuacuaggag

SEQ ID NO: 25485 - RNA, 22 nt, Human
uaaacagugauacguuccagcu

SEQ ID NO: 25486 - RNA, 22 nt, Human
uaaacaucaggaaugaaaaccu

SEQ ID NO: 25487 - RNA, 22 nt, Human
uaaacaucaguacaaagacuaa

SEQ ID NO: 25488 - RNA, 22 nt, Human
uaaacaugcccagugacaggga

SEQ ID NO: 25489 - RNA, 22 nt, Human
uaaacauggauucugaucacag

SEQ ID NO: 25490 - RNA, 22 nt, Human
uaaacaugugagugugcauaua

SEQ ID NO: 25491 - RNA, 22 nt, Human
uaaacauguugacaucuuaccu

SEQ ID NO: 25492 - RNA, 22 nt, Human
uaaaccaaguguccauauuagu

SEQ ID NO: 25493 - RNA, 22 nt, Human
uaaaccauucagacugaaccac

SEQ ID NO: 25494 - RNA, 21 nt, Human
uaaaccuggcgcuguucaaag

SEQ ID NO: 25495 - RNA, 22 nt, Human
uaaaccuucaugauggucauua

SEQ ID NO: 25496 - RNA, 22 nt, Human
uaaaccuugguagcaucuugcu

SEQ ID NO: 25497 - RNA, 18 nt, Human
uaaaccuuucuuguggca

SEQ ID NO: 25498 - RNA, 22 nt, Human
uaaacuguagcucucguaauuc

SEQ ID NO: 25499 - RNA, 22 nt, Human
uaaacuguggaauguucucuuu

SEQ ID NO: 25500 - RNA, 22 nt, Human
uaaagacaauaggaaaguuguu

SEQ ID NO: 25501 - RNA, 22 nt, Human
uaaagacagauggaccagccau

SEQ ID NO: 25502 - RNA, 22 nt, Human
uaaagacauaggaucagggaga

SEQ ID NO: 25503 - RNA, 22 nt, Human
uaaagacaugguguaggugaac

SEQ ID NO: 25504 - RNA, 19 nt, Human
uaaagagaauaccgguggc

SEQ ID NO: 25505 - RNA, 23 nt, Human
uaaagcaaagucaagugcacucc

SEQ ID NO: 25506 - RNA, 22 nt, Human
uaaagcaaugaaaguuuugcag

SEQ ID NO: 25507 - RNA, 22 nt, Human
uaaagcagccagggucuaagcc

SEQ ID NO: 25508 - RNA, 22 nt, Human
uaaagcagugcaaaagcguuuu

SEQ ID NO: 25509 - RNA, 22 nt, Human
uaaagcauuuuugaaauuauga

SEQ ID NO: 25510 - RNA, 22 nt, Human
uaaagccaauauaccuagcaua

SEQ ID NO: 25511 - RNA, 22 nt, Human
uaaagccacuucauucuagucu

SEQ ID NO: 25512 - RNA, 22 nt, Human
uaaagccauacugaaagccacu

SEQ ID NO: 25513 - RNA, 22 nt, Human
uaaagcuacacauuauuaaucc

SEQ ID NO: 25514 - RNA, 22 nt, Human
uaaagcuagaauuguuccagca

SEQ ID NO: 25515 - RNA, 22 nt, Human
uaaagcuauuauaguuauguuu

SEQ ID NO: 25516 - RNA, 22 nt, Human
uaaagcuguuagaguaguaaga

SEQ ID NO: 25517 - RNA, 22 nt, Human
uaaagcuguucagugcagaaag

SEQ ID NO: 25518 - RNA, 22 nt, Human
uaaaggaacugcugcuauggaa

SEQ ID NO: 25519 - RNA, 22 nt, Human
uaaaggaagaauucucugugau

SEQ ID NO: 25520 - RNA, 22 nt, Human
uaaaggagugugaugaaaggga

SEQ ID NO: 25521 - RNA, 22 nt, Human
uaaaggcaaacucuccaaggau

SEQ ID NO: 25522 - RNA, 22 nt, Human
uaaaggcaguucugauuagguc

SEQ ID NO: 25523 - RNA, 22 nt, Human
uaaaggcaugcaggugaaugua

SEQ ID NO: 25524 - RNA, 22 nt, Human
uaaaggcucagggaaccagauc

SEQ ID NO: 25525 - RNA, 22 nt, Human
uaaaggcuucggagugcacacu

SEQ ID NO: 25526 - RNA, 22 nt, Human
uaaaggcuuuauuuuccaguca

SEQ ID NO: 25527 - RNA, 22 nt, Human
uaaaggguagguuuuacuguaa

SEQ ID NO: 25528 - RNA, 22 nt, Human
uaaagguaacaugaacugcuuu

SEQ ID NO: 25529 - RNA, 22 nt, Human
uaaagguaugucuuaaucaaac

SEQ ID NO: 25530 - RNA, 22 nt, Human
uaaaggucaagagaugcugucu

SEQ ID NO: 25531 - RNA, 22 nt, Human
uaaagguccaaagagggcuacg

SEQ ID NO: 25532 - RNA, 22 nt, Human
uaaaguaauccuucauaaggag

SEQ ID NO: 25533 - RNA, 22 nt, Human
uaaaguauccaguuauucuucu

SEQ ID NO: 25534 - RNA, 22 nt, Human
uaaauaggguaagcguguuuac

SEQ ID NO: 25535 - RNA, 18 nt, Human
uaaauauauuucccccuu

SEQ ID NO: 25536 - RNA, 22 nt, Human
uaaauaucaguccagcucuucc

SEQ ID NO: 25537 - RNA, 22 nt, Human
uaaaucacaaauuuucucauuu

SEQ ID NO: 25538 - RNA, 22 nt, Human
uaaaucacaucgaaaucugggu

SEQ ID NO: 25539 - RNA, 22 nt, Human
uaaaucacauucgucugcuccu

SEQ ID NO: 25540 - RNA, 22 nt, Human
uaaaucagccuuugcuauuuua

SEQ ID NO: 25541 - RNA, 22 nt, Human
uaaauccagcuucuaauuuaga

SEQ ID NO: 25542 - RNA, 22 nt, Human
uaaauccuuaucuucuuugaau

SEQ ID NO: 25543 - RNA, 22 nt, Human
uaaaucuccuguuuuucaucua

SEQ ID NO: 25544 - RNA, 22 nt, Human
uaaaucucucaguggccagaga

SEQ ID NO: 25545 - RNA, 22 nt, Human
uaaaucuucuacaucaucauaa

SEQ ID NO: 25546 - RNA, 22 nt, Human
uaaaugauaauaaugcuagugu

SEQ ID NO: 25547 - RNA, 22 nt, Human
uaaaugcagauuccugagccua

SEQ ID NO: 25548 - RNA, 22 nt, Human
uaaaugcagcaguuucuguucu

SEQ ID NO: 25549 - RNA, 22 nt, Human
uaaaugccauucguuucauaca

SEQ ID NO: 25550 - RNA, 22 nt, Human
uaaaugcuuagauucauagaaa

SEQ ID NO: 25551 - RNA, 22 nt, Human
uaaaugcuuucuaugaaagagg

SEQ ID NO: 25552 - RNA, 22 nt, Human
uaaauggcaaccccuagagcug

SEQ ID NO: 25553 - RNA, 22 nt, Human
uaaauguaaauggcgucuugcg

SEQ ID NO: 25554 - RNA, 21 nt, Human
uaaaugugagcagggcugggc

SEQ ID NO: 25555 - RNA, 22 nt, Human
uaaaugugcacagguuagaagg

SEQ ID NO: 25556 - RNA, 22 nt, Human
uaaaugugucuauggacccgcc

SEQ ID NO: 25557 - RNA, 22 nt, Human
uaaauguguguagccaucugug

SEQ ID NO: 25558 - RNA, 22 nt, Human
uaaauguuuuguggguugaguu

SEQ ID NO: 25559 - RNA, 22 nt, Human
uaaauuaaagauuggagaagga

SEQ ID NO: 25560 - RNA, 22 nt, Human
uaaauuagggacuuuaguuaau

SEQ ID NO: 25561 - RNA, 22 nt, Human
uaaauucacuccugguagaccu

SEQ ID NO: 25562 - RNA, 23 nt, Human
uaaauugaugguauggguuaagc

SEQ ID NO: 25563 - RNA, 22 nt, Human
uaaauuguccucccccugguau

SEQ ID NO: 25564 - RNA, 22 nt, Human
uaaauuuuuguuaacagccucu

SEQ ID NO: 25565 - RNA, 22 nt, Human
uaacaaacuggaaauugacauu

SEQ ID NO: 25566 - RNA, 22 nt, Human
uaacaacuggacaauguugcuc

SEQ ID NO: 25567 - RNA, 22 nt, Human
uaacaaggagauggugggucau

SEQ ID NO: 25568 - RNA, 22 nt, Human
uaacaagguaagccuggccaug

SEQ ID NO: 25569 - RNA, 22 nt, Human
uaacaauaguguuugcuaguca

SEQ ID NO: 25570 - RNA, 21 nt, Human
uaacaaucucuacuucucauu

SEQ ID NO: 25571 - RNA, 22 nt, Human
uaacacaaaagaauaugugugu

SEQ ID NO: 25572 - RNA, 22 nt, Human
uaacacaugaaagcaccuucuu

SEQ ID NO: 25573 - RNA, 22 nt, Human
uaacacaugguucugucaggaa

SEQ ID NO: 25574 - RNA, 22 nt, Human
uaacacaugucugggaugugaa

SEQ ID NO: 25575 - RNA, 22 nt, Human
uaacacauuuuccucauacgga

SEQ ID NO: 25576 - RNA, 22 nt, Human
uaacacugccaugcuggaguca

SEQ ID NO: 25577 - RNA, 22 nt, Human
uaaaugugucuuuuuaaggccu

SEQ ID NO: 25578 - RNA, 22 nt, Human
uaaauguguuguggaugaaguu

SEQ ID NO: 25579 - RNA, 22 nt, Human
uaaauguuuagucuuauuuggg

SEQ ID NO: 25580 - RNA, 22 nt, Human
uaaauuacccuuuagggaauug

SEQ ID NO: 25581 - RNA, 23 nt, Human
uaaauuaccuuuccagugcaggg

SEQ ID NO: 25582 - RNA, 22 nt, Human
uaaauuacucaaugcacauaaa

SEQ ID NO: 25583 - RNA, 22 nt, Human
uaaauuagagccagguaaguuu

SEQ ID NO: 25584 - RNA, 22 nt, Human
uaaauucuacaacuucaaagau

SEQ ID NO: 25585 - RNA, 22 nt, Human
uaaauugagauuauuaggguaa

SEQ ID NO: 25586 - RNA, 22 nt, Human
uaaauugaucguuugggaugaa

SEQ ID NO: 25587 - RNA, 22 nt, Human
uaaauugcauaaguacaaauga

SEQ ID NO: 25588 - RNA, 22 nt, Human
uaaauugcugauuuuagaugcu

SEQ ID NO: 25589 - RNA, 18 nt, Human
uaaauugcuucaccugag

SEQ ID NO: 25590 - RNA, 22 nt, Human
uaaauuguguguugcuagggga

SEQ ID NO: 25591 - RNA, 22 nt, Human
uaaauuguuuucuagaaguugu

SEQ ID NO: 25592 - RNA, 22 nt, Human
uaacaaagguugccaaacuaag

SEQ ID NO: 25593 - RNA, 22 nt, Human
uaacaaaguauuguuuguguau

SEQ ID NO: 25594 - RNA, 22 nt, Human
uaacaacaugcaauuuaaccuu

SEQ ID NO: 25595 - RNA, 22 nt, Human
uaacaacucaguuuguuccuug

SEQ ID NO: 25596 - RNA, 23 nt, Human
uaacaagaaccucaugugacuuu

SEQ ID NO: 25597 - RNA, 22 nt, Human
uaacaagauuuguaaaauugua

SEQ ID NO: 25598 - RNA, 22 nt, Human
uaacaagguggucuugguauuu

SEQ ID NO: 25599 - RNA, 22 nt, Human
uaacaagucauuuuaaauuaug

SEQ ID NO: 25600 - RNA, 21 nt, Human
uaacaagucugcauacauuca

SEQ ID NO: 25601 - RNA, 22 nt, Human
uaacaaugauuagugacuacag

SEQ ID NO: 25602 - RNA, 22 nt, Human
uaacaauucucaaaagagggga

SEQ ID NO: 25603 - RNA, 20 nt, Human
uaacacagaaagcuuccuuc

SEQ ID NO: 25604 - RNA, 22 nt, Human
uaacacagacagccacuaguaa

SEQ ID NO: 25605 - RNA, 22 nt, Human
uaacacaguguccucagaaaca

SEQ ID NO: 25606 - RNA, 22 nt, Human
uaacacauaagcugagaccaug

SEQ ID NO: 25607 - RNA, 22 nt, Human
uaacacuaagaaucuaaauuua

SEQ ID NO: 25608 - RNA, 22 nt, Human
uaacacuggagaguugguugug

SEQ ID NO: 25609 - RNA, 22 nt, Human
uaacacuggcuuuugcugaggc

SEQ ID NO: 25610 - RNA, 22 nt, Human
uaacacuguaaaccuagauguu

SEQ ID NO: 25611 - RNA, 22 nt, Human
uaacacugugcccagaguccca

SEQ ID NO: 25612 - RNA, 22 nt, Human
uaacacugugguguucuuuguc

SEQ ID NO: 25613 - RNA, 22 nt, Human
uaacacuucagaugauuuuguu

SEQ ID NO: 25614 - RNA, 22 nt, Human
uaacacuugaagccauuuuugc

SEQ ID NO: 25615 - RNA, 22 nt, Human
uaacagaaaagaacugaguuug

SEQ ID NO: 25616 - RNA, 22 nt, Human
uaacagaagagcaggcagcccu

SEQ ID NO: 25617 - RNA, 22 nt, Human
uaacagaaguuguucauugugg

SEQ ID NO: 25618 - RNA, 22 nt, Human
uaacagcauaugaaauuacugg

SEQ ID NO: 25619 - RNA, 20 nt, Human
uaacaggaagcauuauuuua

SEQ ID NO: 25620 - RNA, 22 nt, Human
uaacaggaugacagcagacauu

SEQ ID NO: 25621 - RNA, 22 nt, Human
uaacaguauccccauuugcaag

SEQ ID NO: 25622 - RNA, 22 nt, Human
uaacaguauugaagauaaacua

SEQ ID NO: 25623 - RNA, 22 nt, Human
uaacagucaugugcuacugcua

SEQ ID NO: 25624 - RNA, 22 nt, Human
uaacagugaccugaaugucaau

SEQ ID NO: 25625 - RNA, 22 nt, Human
uaacaguguggacuugagaucu

SEQ ID NO: 25626 - RNA, 20 nt, Human
uaacaguugaagaacaagga

SEQ ID NO: 25627 - RNA, 22 nt, Human
uaacaguuuugaguuuugcuuc

SEQ ID NO: 25628 - RNA, 22 nt, Human
uaacauauuguguggcacuagg

SEQ ID NO: 25629 - RNA, 22 nt, Human
uaacauccacauuagaugauuc

SEQ ID NO: 25630 - RNA, 18 nt, Human
uaacaucggcuaugcauc

SEQ ID NO: 25631 - RNA, 22 nt, Human
uaacaucuaagggagagaaagu

SEQ ID NO: 25632 - RNA, 22 nt, Human
uaacaucucccugacuuuugcu

SEQ ID NO: 25633 - RNA, 22 nt, Human
uaacaucuugcaguagcagaac

SEQ ID NO: 25634 - RNA, 22 nt, Human
uaacaucuuuagcagcucgaac

SEQ ID NO: 25635 - RNA, 22 nt, Human
uaacaugaaacuccaaauggua

SEQ ID NO: 25636 - RNA, 22 nt, Human
uaacaugagagcuaagacauua

SEQ ID NO: 25637 - RNA, 22 nt, Human
uaacaugcuaauuugcagauag

SEQ ID NO: 25638 - RNA, 22 nt, Human
uaacaugucccugauucuuugu

SEQ ID NO: 25639 - RNA, 22 nt, Human
uaacauguuaagaaauuagaua

SEQ ID NO: 25640 - RNA, 22 nt, Human
uaacauguuuguacacugaaac

SEQ ID NO: 25641 - RNA, 22 nt, Human
uaacauuaaaagagauaauuga

SEQ ID NO: 25642 - RNA, 22 nt, Human
uaaccagacagaaacagcuaga

SEQ ID NO: 25643 - RNA, 22 nt, Human
uaaccauauucacacuaugccc

SEQ ID NO: 25644 - RNA, 22 nt, Human
uaaccugcaacagaucugucuu

SEQ ID NO: 25645 - RNA, 22 nt, Human
uaaccuguuaagggcugaccca

SEQ ID NO: 25646 - RNA, 22 nt, Human
uaaccuuugaccuugcuugugc

SEQ ID NO: 25647 - RNA, 22 nt, Human
uaaccuuuggugaaauauuaac

SEQ ID NO: 25648 - RNA, 22 nt, Human
uaaccuuuuuaucuuaccucca

SEQ ID NO: 25649 - RNA, 22 nt, Human
uaacuaacuaguguucaaaaua

SEQ ID NO: 25650 - RNA, 22 nt, Human
uaacuagaagaaugcaccaaga

SEQ ID NO: 25651 - RNA, 22 nt, Human
uaacuccacaccccucuuggug

SEQ ID NO: 25652 - RNA, 22 nt, Human
uaacuccagagaauccauccau

SEQ ID NO: 25653 - RNA, 22 nt, Human
uaacuccaucucugugucugcu

SEQ ID NO: 25654 - RNA, 22 nt, Human
uaggaagaagcagccuugcuua

SEQ ID NO: 25655 - RNA, 22 nt, Human
uaggaagcacuuaaagaauuug

SEQ ID NO: 25656 - RNA, 22 nt, Human
uaggaagcucuuuguuuuguga

SEQ ID NO: 25657 - RNA, 18 nt, Human
uaggaagcuuaauguuuu

SEQ ID NO: 25658 - RNA, 22 nt, Human
uaggaaguaaacuuucuucagc

SEQ ID NO: 25659 - RNA, 22 nt, Human
uaggaauccagaucuagacugu

SEQ ID NO: 25660 - RNA, 22 nt, Human
uaggaaugaagaaguaugauau

SEQ ID NO: 25661 - RNA, 22 nt, Human
uaggaaugauuggaauuccagg

SEQ ID NO: 25662 - RNA, 22 nt, Human
uaggaaugucuaugcagugagg

SEQ ID NO: 25663 - RNA, 22 nt, Human
uaggaauugcccgugggguccu

SEQ ID NO: 25664 - RNA, 22 nt, Human
uaggacagagauuuguuuuaug

SEQ ID NO: 25665 - RNA, 21 nt, Human
uaggacagccccccugcccuc

SEQ ID NO: 25666 - RNA, 22 nt, Human
uaggacaguggagauaaccaga

SEQ ID NO: 25667 - RNA, 22 nt, Human
uaggacaguuauggguuuuauu

SEQ ID NO: 25668 - RNA, 22 nt, Human
uaggaccaaguggagugcaggu

SEQ ID NO: 25669 - RNA, 22 nt, Human
uaggacuuggugacucucaaug

SEQ ID NO: 25670 - RNA, 22 nt, Human
uaggacuuuggcgucagaacug

SEQ ID NO: 25671 - RNA, 17 nt, Human
uaggagacuggcugucc

SEQ ID NO: 25672 - RNA, 20 nt, Human
uaggagcaaugagaguagaa

SEQ ID NO: 25673 - RNA, 22 nt, Human
uaggagcuaaaauauuuuauau

SEQ ID NO: 25674 - RNA, 23 nt, Human
uaggaggagaccgcaguguuacc

SEQ ID NO: 25675 - RNA, 18 nt, Human
uaggaggauacugagaug

SEQ ID NO: 25676 - RNA, 22 nt, Human
uaggaggcauuugcucccaggg

SEQ ID NO: 25677 - RNA, 22 nt, Human
uaggaggcuuaaagcugcucag

SEQ ID NO: 25678 - RNA, 22 nt, Human
uaggaguaggaguggccauccc

SEQ ID NO: 25679 - RNA, 22 nt, Human
uaggauaggauggagacagaau

SEQ ID NO: 25680 - RNA, 22 nt, Human
uaggauaugguagaaaucauuc

SEQ ID NO: 25681 - RNA, 22 nt, Human
uaggaucucaccauagaaggaa

SEQ ID NO: 25682 - RNA, 22 nt, Human
uaggaugacacagcaaguauag

SEQ ID NO: 25683 - RNA, 22 nt, Human
uaggaugguacaaggcaggggu

SEQ ID NO: 25684 - RNA, 22 nt, Human
uaggaugugccaggaaagaaag

SEQ ID NO: 25685 - RNA, 22 nt, Human
uaggauuuacuuugacaauauu

SEQ ID NO: 25686 - RNA, 22 nt, Human
ugaggagccacucuagcaguca

SEQ ID NO: 25687 - RNA, 22 nt, Human
ugaggaugacgauggcaauggc

SEQ ID NO: 25688 - RNA, 19 nt, Human
ugaggauugagguccagua

SEQ ID NO: 25689 - RNA, 22 nt, Human
ugaggauuggcaaaacucaggg

SEQ ID NO: 25690 - RNA, 22 nt, Human
ugaggauuuaaugggacucauu

SEQ ID NO: 25691 - RNA, 17 nt, Human
ugaggcaaccaucacua

SEQ ID NO: 25692 - RNA, 22 nt, Human
ugaggcaagaguuugauuagag

SEQ ID NO: 25693 - RNA, 19 nt, Human
ugaggcaagcuuuuucuug

SEQ ID NO: 25694 - RNA, 22 nt, Human
ugaggcacuccaggaugcuguu

SEQ ID NO: 25695 - RNA, 22 nt, Human
ugaggcagaaaauagcaguuca

SEQ ID NO: 25696 - RNA, 22 nt, Human
ugaggcagcaauugauuauuca

SEQ ID NO: 25697 - RNA, 22 nt, Human
ugaggcagcauucuucaagaca

SEQ ID NO: 25698 - RNA, 22 nt, Human
ugaggcagccugcauuaaagag

SEQ ID NO: 25699 - RNA, 22 nt, Human
ugaggcaggaaguuauauaaug

SEQ ID NO: 25700 - RNA, 22 nt, Human
ugaggcaggagaaucaccggaa

SEQ ID NO: 25701 - RNA, 22 nt, Human
ugaggcaggagguugagaacug

SEQ ID NO: 25702 - RNA, 18 nt, Human
ugaggcagucagugaugg

SEQ ID NO: 25703 - RNA, 22 nt, Human
ugaggcagugugagauaauaaa

SEQ ID NO: 25704 - RNA, 22 nt, Human
ugaggcaugguccugagggagc

SEQ ID NO: 25705 - RNA, 22 nt, Human
ugaggccaacuagggagaugga

SEQ ID NO: 25706 - RNA, 22 nt, Human
ugaggccaagccuccucugcca

SEQ ID NO: 25707 - RNA, 22 nt, Human
ugaggccaaugacccugggcag

SEQ ID NO: 25708 - RNA, 22 nt, Human
ugaggccacaggaaagggcccg

SEQ ID NO: 25709 - RNA, 22 nt, Human
ugaggccagagaguuugcauuu

SEQ ID NO: 25710 - RNA, 19 nt, Human
ugaggccagcuggcauuuu

SEQ ID NO: 25711 - RNA, 22 nt, Human
ugaggccagugacauauauuaa

SEQ ID NO: 25712 - RNA, 22 nt, Human
ugaggccauggaacuagcuugg

SEQ ID NO: 25713 - RNA, 22 nt, Human
ugaggccuaccccccuguguuu

SEQ ID NO: 25714 - RNA, 22 nt, Human
ugaggccucauuuagggagagg

SEQ ID NO: 25715 - RNA, 22 nt, Human
ugaggccucugaggccuaggcu

SEQ ID NO: 25716 - RNA, 22 nt, Human
ugaggccugaagccuggagccu

SEQ ID NO: 25717 - RNA, 22 nt, Human
ugaggccugggcacauaaccuc

SEQ ID NO: 25718 - RNA, 22 nt, Human
ugaggcucaagaauagacagua

SEQ ID NO: 25719 - RNA, 22 nt, Human
ugaggcucagaagugccaagug

SEQ ID NO: 25720 - RNA, 17 nt, Human
ugaggcucggugaggag

SEQ ID NO: 25721 - RNA, 22 nt, Human
ugaggcucuaugugguagauua

SEQ ID NO: 25722 - RNA, 22 nt, Human
ugaggcucugcuucuguggcuc

SEQ ID NO: 25723 - RNA, 22 nt, Human
ugaggcugacaaaagaugaggu

SEQ ID NO: 25724 - RNA, 22 nt, Human
ugaggcuggaugggaugccucc

SEQ ID NO: 25725 - RNA, 22 nt, Human
ugaggcuuagauuugguaacuc

SEQ ID NO: 25726 - RNA, 22 nt, Human
ugaggcuuggagaggucaggga

SEQ ID NO: 25727 - RNA, 22 nt, Human
ugagggaauccucacaucaauc

SEQ ID NO: 25728 - RNA, 22 nt, Human
ugagggacaccagggcuggagc

SEQ ID NO: 25729 - RNA, 22 nt, Human
ugagggccgaggagcugugggu

SEQ ID NO: 25730 - RNA, 22 nt, Human
ugagggcugcuuccagagcuag

SEQ ID NO: 25731 - RNA, 22 nt, Human
ugaggggaacugaugcccauug

SEQ ID NO: 25732 - RNA, 19 nt, Human
ugaggggaggagaggccug

SEQ ID NO: 25733 - RNA, 22 nt, Human
ugaggggccagaccccaccuag

SEQ ID NO: 25734 - RNA, 22 nt, Human
ugaggggccgcccaagcacuuc

SEQ ID NO: 25735 - RNA, 22 nt, Human
ugaggggcgcuggcagguuccu

SEQ ID NO: 25736 - RNA, 22 nt, Human
ugaggggcggccugcagaggcc

SEQ ID NO: 25737 - RNA, 21 nt, Human
ugagggguuauaacagggugg

SEQ ID NO: 25738 - RNA, 22 nt, Human
ugagggguugugagaaauguag

SEQ ID NO: 25739 - RNA, 22 nt, Human
ugaggguaaccuggagcugcug

SEQ ID NO: 25740 - RNA, 22 nt, Human
ugaggguagaggcaggagugca

SEQ ID NO: 25741 - RNA, 22 nt, Human
ugaggguauauauuguguggag

SEQ ID NO: 25742 - RNA, 22 nt, Human
ugagggugggccugcaggaaga

SEQ ID NO: 25743 - RNA, 22 nt, Human
ugagguaaauagaaaaaccaug

SEQ ID NO: 25744 - RNA, 22 nt, Human
ugagguaggaggauugauugag

SEQ ID NO: 25745 - RNA, 22 nt, Human
ugagguaggcuugagaugggag

SEQ ID NO: 25746 - RNA, 22 nt, Human
ugagguagggaaggcugguauu

SEQ ID NO: 25747 - RNA, 22 nt, Human
ugagguaggugucgagagaggu

SEQ ID NO: 25748 - RNA, 22 nt, Human
ugagguagguugaaagauagau

SEQ ID NO: 25749 - RNA, 22 nt, Human
ugagguaguaaagguguuaguu

SEQ ID NO: 25750 - RNA, 22 nt, Human
ugagguaguagauuuuugucca

SEQ ID NO: 25751 - RNA, 22 nt, Human
ugagguaguuuguuguacagua

SEQ ID NO: 25752 - RNA, 22 nt, Human
ugagguaugagugugccaggug

SEQ ID NO: 25753 - RNA, 22 nt, Human
ugagguauuuuuuaaagcacaa

SEQ ID NO: 25754 - RNA, 22 nt, Human
ugaggucauggcugauauuucc

SEQ ID NO: 25755 - RNA, 22 nt, Human
ugaggucugcagggcugugcau

SEQ ID NO: 25756 - RNA, 16 nt, Human
ugaggucuuauuagca

SEQ ID NO: 25757 - RNA, 22 nt, Human
ugaggucuuuuauaguguguca

SEQ ID NO: 25758 - RNA, 22 nt, Human
ugaggugaauggugucccugga

SEQ ID NO: 25759 - RNA, 22 nt, Human
ugaggugacaauucauucucca

SEQ ID NO: 25760 - RNA, 22 nt, Human
ugaggugccacccaagagccuu

SEQ ID NO: 25761 - RNA, 22 nt, Human
ugagguggccgaggagcaggac

SEQ ID NO: 25762 - RNA, 22 nt, Human
ugagguggcuggaucucagccu

SEQ ID NO: 25763 - RNA, 22 nt, Human
ugaggugggugucaggucagag

SEQ ID NO: 25764 - RNA, 22 nt, Human
ugagguggugcuaaucucugcu

SEQ ID NO: 25765 - RNA, 22 nt, Human
ugagguuauuuauuaugcauga

SEQ ID NO: 25766 - RNA, 22 nt, Human
ugaguaaaaauucuacauuucc

SEQ ID NO: 25767 - RNA, 22 nt, Human
ugaguaaauauuuaugacuaga

SEQ ID NO: 25768 - RNA, 22 nt, Human
ugaguacugauuuaagauacac

SEQ ID NO: 25769 - RNA, 22 nt, Human
ugaguaggaaaggaaauguuuu

SEQ ID NO: 25770 - RNA, 22 nt, Human
ugaguaucaauuacauaguugu

SEQ ID NO: 25771 - RNA, 22 nt, Human
uaacucugaauccucacagcag

SEQ ID NO: 25772 - RNA, 20 nt, Human
uaacugaucauuuucaccag

SEQ ID NO: 25773 - RNA, 22 nt, Human
uaacugcacugacagugaguga

SEQ ID NO: 25774 - RNA, 22 nt, Human
uaacugccagcagcgaugaaca

SEQ ID NO: 25775 - RNA, 22 nt, Human
uaacugguacucugguagccug

SEQ ID NO: 25776 - RNA, 22 nt, Human
uaacugguccucggauguugug

SEQ ID NO: 25777 - RNA, 22 nt, Human
uaacugguccugaacagcccag

SEQ ID NO: 25778 - RNA, 19 nt, Human
uaacuggugccuucaguca

SEQ ID NO: 25779 - RNA, 22 nt, Human
uaacuguagcuaaccgaugaga

SEQ ID NO: 25780 - RNA, 22 nt, Human
uaacuguauagcuuggacuaaa

SEQ ID NO: 25781 - RNA, 23 nt, Human
uaacuuacaucauucugcacaag

SEQ ID NO: 25782 - RNA, 22 nt, Human
uaacuuagaaguuuaauuguau

SEQ ID NO: 25783 - RNA, 22 nt, Human
uaacuucugcacagaaaauuug

SEQ ID NO: 25784 - RNA, 22 nt, Human
uaacuugaccuguauaaaacac

SEQ ID NO: 25785 - RNA, 19 nt, Human
uaacuuguagauaugaagu

SEQ ID NO: 25786 - RNA, 22 nt, Human
uaacuuuaguguaugagguaag

SEQ ID NO: 25787 - RNA, 22 nt, Human
uaacuuugauaagaaucaggga

SEQ ID NO: 25788 - RNA, 22 nt, Human
uaacuuuggggacacuucucuu

SEQ ID NO: 25789 - RNA, 15 nt, Human
uaacuuuuuugggcu

SEQ ID NO: 25790 - RNA, 22 nt, Human
uaagaaacaugauacuuuuccu

SEQ ID NO: 25791 - RNA, 22 nt, Human
uaagaaacccaggaauuucuua

SEQ ID NO: 25792 - RNA, 22 nt, Human
uaagaaacugucacaguacuau

SEQ ID NO: 25793 - RNA, 23 nt, Human
uaagaacagacaagcauuuacau

SEQ ID NO: 25794 - RNA, 22 nt, Human
uaagaacaguagaacaguaggu

SEQ ID NO: 25795 - RNA, 22 nt, Human
uaauagaauaguggaaacauug

SEQ ID NO: 25796 - RNA, 22 nt, Human
uaauagcauuaucaucaaaacu

SEQ ID NO: 25797 - RNA, 22 nt, Human
uaauaggagccaggucacauag

SEQ ID NO: 25798 - RNA, 22 nt, Human
uaauauaccaaacuguaauuuu

SEQ ID NO: 25799 - RNA, 22 nt, Human
uaauauacuucccauaguuuga

SEQ ID NO: 25800 - RNA, 22 nt, Human
uaauaucuacuucauagaguuu

SEQ ID NO: 25801 - RNA, 22 nt, Human
uaaucacagaaacagacuguuu

SEQ ID NO: 25802 - RNA, 22 nt, Human
uaaucacugugagucuguuuuc

SEQ ID NO: 25803 - RNA, 22 nt, Human
uaaucauauggguaauccaaug

SEQ ID NO: 25804 - RNA, 22 nt, Human
uaauccaaaacugaaucugugg

SEQ ID NO: 25805 - RNA, 22 nt, Human
uaauccacggaccggcagcauu

SEQ ID NO: 25806 - RNA, 22 nt, Human
uaauccaggguauucuaguuuc

SEQ ID NO: 25807 - RNA, 22 nt, Human
uaauccuucuuguguucauuag

SEQ ID NO: 25808 - RNA, 22 nt, Human
uaaucguauguguaucaaauca

SEQ ID NO: 25809 - RNA, 22 nt, Human
uaaucuaccacuauugcaauau

SEQ ID NO: 25810 - RNA, 22 nt, Human
uaaucuacuguuuauaugaaau

SEQ ID NO: 25811 - RNA, 22 nt, Human
uaaucuaucaagcaacaaagug

SEQ ID NO: 25812 - RNA, 22 nt, Human
uaaucucuuuaugagaagaagg

SEQ ID NO: 25813 - RNA, 22 nt, Human
uaaucuguaauuuuugcaauag

SEQ ID NO: 25814 - RNA, 22 nt, Human
uaaucuguuaauauuuguaucc

SEQ ID NO: 25815 - RNA, 18 nt, Human
uaaucuuacagacaggau

SEQ ID NO: 25816 - RNA, 22 nt, Human
uaaucuuagcaaccuccagugu

SEQ ID NO: 25817 - RNA, 21 nt, Human
uaaucuucgaaaauguauuag

SEQ ID NO: 25818 - RNA, 22 nt, Human
uaaugaacaauauaucaauagc

SEQ ID NO: 25819 - RNA, 22 nt, Human
uaaugaacaugcaucgugugua

SEQ ID NO: 25820 - RNA, 22 nt, Human
uaaugaauaaacuugagaguca

SEQ ID NO: 25821 - RNA, 22 nt, Human
uaaugacugccgucucucuuca

SEQ ID NO: 25822 - RNA, 22 nt, Human
uaaugacuugaaggacccaugg

SEQ ID NO: 25823 - RNA, 22 nt, Human
uaaugaggaaauagagggaaug

SEQ ID NO: 25824 - RNA, 22 nt, Human
uaaugaggggaaccaucuguag

SEQ ID NO: 25825 - RNA, 22 nt, Human
uaaugagucauuccugaaugcu

SEQ ID NO: 25826 - RNA, 22 nt, Human
uaaugauauuucccauuucucu

SEQ ID NO: 25827 - RNA, 22 nt, Human
uaaugcaacgugagauaauuaa

SEQ ID NO: 25828 - RNA, 22 nt, Human
uaaugcaaggaauuccaaguag

SEQ ID NO: 25829 - RNA, 22 nt, Human
uaaugcacauagaaguacuuag

SEQ ID NO: 25830 - RNA, 22 nt, Human
uaaugcacaugacugaacuauu

SEQ ID NO: 25831 - RNA, 22 nt, Human
uaaugcauguaaugggcugaua

SEQ ID NO: 25832 - RNA, 23 nt, Human
uaaugccagcccugcaguuaagc

SEQ ID NO: 25833 - RNA, 22 nt, Human
uaaugccgucucuacaagacuc

SEQ ID NO: 25834 - RNA, 22 nt, Human
uaaugccuuaugucaaauguaa

SEQ ID NO: 25835 - RNA, 22 nt, Human
uaaugcucacccugcaucaggc

SEQ ID NO: 25836 - RNA, 22 nt, Human
uaaugcuucaauuuccuugauu

SEQ ID NO: 25837 - RNA, 22 nt, Human
uaaugcuucuguuaggaucuuc

SEQ ID NO: 25838 - RNA, 22 nt, Human
uaaugcuugcaaauuaugggac

SEQ ID NO: 25839 - RNA, 22 nt, Human
uaauggaaguuaaauaugguau

SEQ ID NO: 25840 - RNA, 22 nt, Human
uaauguacaagaggcuagggug

SEQ ID NO: 25841 - RNA, 22 nt, Human
uaauguauaacaaauacucauc

SEQ ID NO: 25842 - RNA, 22 nt, Human
uaaugucaaggucauucuagag

SEQ ID NO: 25843 - RNA, 22 nt, Human
uaaugucuuaguaccuuaauuu

SEQ ID NO: 25844 - RNA, 22 nt, Human
uaaugucuucuuuuaauuuggc

SEQ ID NO: 25845 - RNA, 22 nt, Human
uaaugucuuuaagagcauuggg

SEQ ID NO: 25846 - RNA, 22 nt, Human
uaauguguugaauauuuguaca

SEQ ID NO: 25847 - RNA, 22 nt, Human
uaauuagaguuugguaaacaau

SEQ ID NO: 25848 - RNA, 22 nt, Human
uaauuauacaaaaaggcaugca

SEQ ID NO: 25849 - RNA, 23 nt, Human
uaauuauggaauaauuugcaacg

SEQ ID NO: 25850 - RNA, 22 nt, Human
uaauuauucuagucacauagca

SEQ ID NO: 25851 - RNA, 22 nt, Human
uaauuauuugaagacauuagag

SEQ ID NO: 25852 - RNA, 22 nt, Human
uaauucagggccagaaucccca

SEQ ID NO: 25853 - RNA, 22 nt, Human
uaauucuucaggccuuuugucu

SEQ ID NO: 25854 - RNA, 22 nt, Human
uaauugcagaacuuugggaggc

SEQ ID NO: 25855 - RNA, 22 nt, Human
uaauugcuauuggaaugcuuug

SEQ ID NO: 25856 - RNA, 22 nt, Human
uaauuguaaaguaguaguacag

SEQ ID NO: 25857 - RNA, 22 nt, Human
uaauuguauggagaaggcugca

SEQ ID NO: 25858 - RNA, 22 nt, Human
uaauuuaauccaaguguuacau

SEQ ID NO: 25859 - RNA, 22 nt, Human
uaauuuaauuccauggauucua

SEQ ID NO: 25860 - RNA, 22 nt, Human
uaauuuacaguucgccaugucu

SEQ ID NO: 25861 - RNA, 22 nt, Human
uaauuuauauggaauuguugcu

SEQ ID NO: 25862 - RNA, 22 nt, Human
uaauuucaaguuuagggcucua

SEQ ID NO: 25863 - RNA, 18 nt, Human
uaauuugcacaguugcaa

SEQ ID NO: 25864 - RNA, 22 nt, Human
uaauuuuccacucuguuuaucu

SEQ ID NO: 25865 - RNA, 22 nt, Human
uaauuuugcugugaccauugaa

SEQ ID NO: 25866 - RNA, 22 nt, Human
uaauuuugucacagugacaugc

SEQ ID NO: 25867 - RNA, 22 nt, Human
uacaaaacagugcucugguccu

SEQ ID NO: 25868 - RNA, 20 nt, Human
uacaaagaaugagguucagg

SEQ ID NO: 25869 - RNA, 20 nt, Human
uacaaagagccccucucuuc

SEQ ID NO: 25870 - RNA, 22 nt, Human
uacaaagauaguguuagaguaa

SEQ ID NO: 25871 - RNA, 22 nt, Human
uacaaagauggaagguuauguu

SEQ ID NO: 25872 - RNA, 22 nt, Human
uacaaagccugguagauaucug

SEQ ID NO: 25873 - RNA, 22 nt, Human
uacaaaggcagguuucccagga

SEQ ID NO: 25874 - RNA, 22 nt, Human
uacaaaggcgguuuuucugggc

SEQ ID NO: 25875 - RNA, 22 nt, Human
uacaaaggcuuaaagagauuuc

SEQ ID NO: 25876 - RNA, 22 nt, Human
uacaaagucagaauaacaggug

SEQ ID NO: 25877 - RNA, 22 nt, Human
uacaaagucccauugccaugga

SEQ ID NO: 25878 - RNA, 22 nt, Human
uacaaagugcuuuagaaaugaa

SEQ ID NO: 25879 - RNA, 22 nt, Human
uacaaagugugcccaugcugag

SEQ ID NO: 25880 - RNA, 22 nt, Human
uacaaaugaguuguaugaacca

SEQ ID NO: 25881 - RNA, 22 nt, Human
uacaaauuaaugggcauguuua

SEQ ID NO: 25882 - RNA, 20 nt, Human
uacaaauuuuccauguuucc

SEQ ID NO: 25883 - RNA, 22 nt, Human
uacaacaauuuccacauuagaa

SEQ ID NO: 25884 - RNA, 22 nt, Human
uacaacagaaguguuuauuuag

SEQ ID NO: 25885 - RNA, 22 nt, Human
uacaacagacaggaauaagauu

SEQ ID NO: 25886 - RNA, 22 nt, Human
uacaacaggaauuucaacuuug

SEQ ID NO: 25887 - RNA, 22 nt, Human
uacaacugcacaucugaaucac

SEQ ID NO: 25888 - RNA, 22 nt, Human
uauagacuugaugguauuaagu

SEQ ID NO: 25889 - RNA, 20 nt, Human
uauagaucacaucuucuagc

SEQ ID NO: 25890 - RNA, 22 nt, Human
uauagcaagcaggacagucuca

SEQ ID NO: 25891 - RNA, 22 nt, Human
uauagcauauacagauaagcug

SEQ ID NO: 25892 - RNA, 22 nt, Human
uauagcuaaggucagacuguuu

SEQ ID NO: 25893 - RNA, 22 nt, Human
uauaggaaauaggucuucugug

SEQ ID NO: 25894 - RNA, 22 nt, Human
uauaggaacagcuagcacagaa

SEQ ID NO: 25895 - RNA, 22 nt, Human
uauaggaaguaauuguugccug

SEQ ID NO: 25896 - RNA, 22 nt, Human
uauaggaaguauucaaagacug

SEQ ID NO: 25897 - RNA, 21 nt, Human
uauaggaaucagucacaucug

SEQ ID NO: 25898 - RNA, 22 nt, Human
uauaggaaugacgucauuuccu

SEQ ID NO: 25899 - RNA, 22 nt, Human
uauaggaccgacuuguuuauag

SEQ ID NO: 25900 - RNA, 22 nt, Human
uauaggcuuuuguugcagaaca

SEQ ID NO: 25901 - RNA, 22 nt, Human
uauagugugugagagagugaaa

SEQ ID NO: 25902 - RNA, 22 nt, Human
uauauaacuacuauuuugcuca

SEQ ID NO: 25903 - RNA, 22 nt, Human
uauauacuuucuuccuggguag

SEQ ID NO: 25904 - RNA, 22 nt, Human
ucaagguucaaggcuggcuucu

SEQ ID NO: 25905 - RNA, 22 nt, Human
ucaagguugccaggaaggaaga

SEQ ID NO: 25906 - RNA, 22 nt, Human
ucaaguagaacuauaaugaugu

SEQ ID NO: 25907 - RNA, 22 nt, Human
ucaaguuaccuggucauuacua

SEQ ID NO: 25908 - RNA, 22 nt, Human
ucaaguucacagucuggucgcu

SEQ ID NO: 25909 - RNA, 22 nt, Human
ucaauaaaauuguuuuccuauc

SEQ ID NO: 25910 - RNA, 23 nt, Human
ucaauaacucggguuaaaauaga

SEQ ID NO: 25911 - RNA, 22 nt, Human
ucaauaaggcaacauuaaguua

SEQ ID NO: 25912 - RNA, 22 nt, Human
uaccuuggguugaguucauucu

SEQ ID NO: 25913 - RNA, 22 nt, Human
uacgacacaucugaucucaaaa

SEQ ID NO: 25914 - RNA, 22 nt, Human
uacgcgaagaaggaccugaugg

SEQ ID NO: 25915 - RNA, 21 nt, Human
uacgugugugcauguuuauau

SEQ ID NO: 25916 - RNA, 22 nt, Human
uacuaaaugauuaagcaggaau

SEQ ID NO: 25917 - RNA, 22 nt, Human
uacuaacuuguacacagccuaa

SEQ ID NO: 25918 - RNA, 22 nt, Human
uacuacuuucccccacauauuu

SEQ ID NO: 25919 - RNA, 17 nt, Human
uacuagaauagagacag

SEQ ID NO: 25920 - RNA, 23 nt, Human
uacuauaacgcugugucagcucc

SEQ ID NO: 25921 - RNA, 22 nt, Human
uacuauugaaucauugucaauc

SEQ ID NO: 25922 - RNA, 22 nt, Human
uacucacauucuguuucuugcu

SEQ ID NO: 25923 - RNA, 22 nt, Human
uacucauuucaaacagcacaaa

SEQ ID NO: 25924 - RNA, 22 nt, Human
uacuccagacauucuguccucg

SEQ ID NO: 25925 - RNA, 22 nt, Human
uacugaaaacugagucuuccgu

SEQ ID NO: 25926 - RNA, 22 nt, Human
uacugaaaagccacaaggacca

SEQ ID NO: 25927 - RNA, 22 nt, Human
uacugaaaauccugccuguccu

SEQ ID NO: 25928 - RNA, 22 nt, Human
uacugaaacuuuucuucaacug

SEQ ID NO: 25929 - RNA, 22 nt, Human
uacugaaagagugguggacucu

SEQ ID NO: 25930 - RNA, 22 nt, Human
uacugaaagucuguggguccuc

SEQ ID NO: 25931 - RNA, 22 nt, Human
uacugaaggacuugaggguuuc

SEQ ID NO: 25932 - RNA, 22 nt, Human
uacugcauaacuggcauguggg

SEQ ID NO: 25933 - RNA, 22 nt, Human
uacugcaucgaaaugcuuuuau

SEQ ID NO: 25934 - RNA, 22 nt, Human
uacugcaugaaggcaccuauuu

SEQ ID NO: 25935 - RNA, 22 nt, Human
uacugcauuaaauuuagguuau

SEQ ID NO: 25936 - RNA, 22 nt, Human
uacugccugggggagacagcug

SEQ ID NO: 25937 - RNA, 22 nt, Human
uacugcuagaugaaaauguagg

SEQ ID NO: 25938 - RNA, 22 nt, Human
uacugcugauuagagcugaggu

SEQ ID NO: 25939 - RNA, 20 nt, Human
uacuggaaauuucuccaccu

SEQ ID NO: 25940 - RNA, 22 nt, Human
uacuggagauggaaugcuuuug

SEQ ID NO: 25941 - RNA, 22 nt, Human
uacuggagucagaaaugccuug

SEQ ID NO: 25942 - RNA, 22 nt, Human
uacuggcaauuucauauggugc

SEQ ID NO: 25943 - RNA, 22 nt, Human
uacuguaggugggucacuagua

SEQ ID NO: 25944 - RNA, 23 nt, Human
uacuguauauuacuguguuauac

SEQ ID NO: 25945 - RNA, 22 nt, Human
uacuguaugauuucauguauau

SEQ ID NO: 25946 - RNA, 22 nt, Human
uacuguauuugauaagugaagu

SEQ ID NO: 25947 - RNA, 22 nt, Human
uacugucauuagcauuaacuuu

SEQ ID NO: 25948 - RNA, 22 nt, Human
uacugucuaauaagauugaugg

SEQ ID NO: 25949 - RNA, 22 nt, Human
uacugucucugcccuggccagg

SEQ ID NO: 25950 - RNA, 23 nt, Human
uacugucuucuauuaaguaagga

SEQ ID NO: 25951 - RNA, 22 nt, Human
uacugugguuacugcuauuaga

SEQ ID NO: 25952 - RNA, 22 nt, Human
uacugugucuuaggauguggaa

SEQ ID NO: 25953 - RNA, 22 nt, Human
uacugugugacccuggguaggu

SEQ ID NO: 25954 - RNA, 22 nt, Human
uacuguguugugcugaaaggga

SEQ ID NO: 25955 - RNA, 22 nt, Human
uacuguuagagccagaaaccua

SEQ ID NO: 25956 - RNA, 22 nt, Human
uacuguuucaagcccucacaga

SEQ ID NO: 25957 - RNA, 22 nt, Human
uacuguuucuacuacuuaggga

SEQ ID NO: 25958 - RNA, 22 nt, Human
uacuguuugcaguuugcaguau

SEQ ID NO: 25959 - RNA, 22 nt, Human
uacuuaaaacugauagaaucuc

SEQ ID NO: 25960 - RNA, 22 nt, Human
uacuuacaguuacggcaagugg

SEQ ID NO: 25961 - RNA, 23 nt, Human
uacuuaggaauggggacggcaag

SEQ ID NO: 25962 - RNA, 22 nt, Human
uacuuauaaggaggcacacaaa

SEQ ID NO: 25963 - RNA, 19 nt, Human
uacuuauuagaaauauggg

SEQ ID NO: 25964 - RNA, 22 nt, Human
uacuuauugguucagaaguuua

SEQ ID NO: 25965 - RNA, 22 nt, Human
uacuucaaacaaugguacaaac

SEQ ID NO: 25966 - RNA, 22 nt, Human
uacuucaacaccauaugguccu

SEQ ID NO: 25967 - RNA, 22 nt, Human
uacuucaauuauaugccaguua

SEQ ID NO: 25968 - RNA, 22 nt, Human
uacuucaauuuguauaugugaa

SEQ ID NO: 25969 - RNA, 22 nt, Human
uacuucauuccuuuguaaaaug

SEQ ID NO: 25970 - RNA, 22 nt, Human
uacuuccagcaaucugcauauu

SEQ ID NO: 25971 - RNA, 22 nt, Human
uacuucuagccugccccuugug

SEQ ID NO: 25972 - RNA, 22 nt, Human
uacuucugccuuagagaacacu

SEQ ID NO: 25973 - RNA, 22 nt, Human
uacuucuguuagcucugagagu

SEQ ID NO: 25974 - RNA, 22 nt, Human
uacuugcuguuaguauuuuaca

SEQ ID NO: 25975 - RNA, 23 nt, Human
uacuugguuuugauagaaaucca

SEQ ID NO: 25976 - RNA, 22 nt, Human
uacuuguguucuacuagagaaa

SEQ ID NO: 25977 - RNA, 22 nt, Human
uacuuuaaagagguguaaugag

SEQ ID NO: 25978 - RNA, 22 nt, Human
uacuuuauauuguggcuggcca

SEQ ID NO: 25979 - RNA, 22 nt, Human
uacuuuauucaggaaggcuggu

SEQ ID NO: 25980 - RNA, 22 nt, Human
uacuuucauggguuuucuuuau

SEQ ID NO: 25981 - RNA, 22 nt, Human
uacuuucaugucuauacauauu

SEQ ID NO: 25982 - RNA, 22 nt, Human
uacuuugaauuaaauauuucag

SEQ ID NO: 25983 - RNA, 22 nt, Human
uacuuugauaagguucuucuau

SEQ ID NO: 25984 - RNA, 22 nt, Human
uacuuugcuaaaaugugcagaa

SEQ ID NO: 25985 - RNA, 22 nt, Human
uacuuugguaucaaacuaaaac

SEQ ID NO: 25986 - RNA, 22 nt, Human
uacuuuuccagggcuggcugag

SEQ ID NO: 25987 - RNA, 22 nt, Human
uacuuuuuaugauaagaacuga

SEQ ID NO: 25988 - RNA, 22 nt, Human
uagaaaacuaauacaugcuuga

SEQ ID NO: 25989 - RNA, 22 nt, Human
uagaaaagauaacauucugugc

SEQ ID NO: 25990 - RNA, 22 nt, Human
uagaaaagccccagcuggaggg

SEQ ID NO: 25991 - RNA, 22 nt, Human
uagaaaauccaguguggggaga

SEQ ID NO: 25992 - RNA, 22 nt, Human
uagaaaauggccaagcaggacu

SEQ ID NO: 25993 - RNA, 22 nt, Human
uagaaaauguuccacugccauu

SEQ ID NO: 25994 - RNA, 22 nt, Human
uagaaacaaagaccugggugcu

SEQ ID NO: 25995 - RNA, 22 nt, Human
uagaaacaaguuucucuuuggg

SEQ ID NO: 25996 - RNA, 22 nt, Human
uagaaacaaugacaugcuugua

SEQ ID NO: 25997 - RNA, 22 nt, Human
uagaaacagaauaugagugaga

SEQ ID NO: 25998 - RNA, 22 nt, Human
uagaaacagagagauaugcccc

SEQ ID NO: 25999 - RNA, 22 nt, Human
uagaaacagagcagguggccca

SEQ ID NO: 26000 - RNA, 22 nt, Human
uagaaacauauaggauggcagg

SEQ ID NO: 26001 - RNA, 22 nt, Human
uagaaacaucagcuaaccaaaa

SEQ ID NO: 26002 - RNA, 22 nt, Human
uagaaacucacguuaucauugc

SEQ ID NO: 26003 - RNA, 22 nt, Human
uagaaagaacuucauguaaaac

SEQ ID NO: 26004 - RNA, 22 nt, Human
uagaaagacaaugggaagugcu

SEQ ID NO: 26005 - RNA, 22 nt, Human
uagaaagacagagguuuugucu

SEQ ID NO: 26006 - RNA, 22 nt, Human
uagaaagacuguccagauuuca

SEQ ID NO: 26007 - RNA, 22 nt, Human
uagaaagcaguaucuccauuuu

SEQ ID NO: 26008 - RNA, 22 nt, Human
uagaaaggcaagcgugaaauau

SEQ ID NO: 26009 - RNA, 22 nt, Human
uagaaaguacuaaauuuaacug

SEQ ID NO: 26010 - RNA, 22 nt, Human
uagaaaguagggaagguaggau

SEQ ID NO: 26011 - RNA, 21 nt, Human
uagaaagucaaagcuaucagc

SEQ ID NO: 26012 - RNA, 22 nt, Human
uagaaagugaagguuaauuaau

SEQ ID NO: 26013 - RNA, 22 nt, Human
ucacaguuauagucuguagaau

SEQ ID NO: 26014 - RNA, 22 nt, Human
ucacaguugagcagguugugca

SEQ ID NO: 26015 - RNA, 22 nt, Human
ucacaguuucuuuucugauaaa

SEQ ID NO: 26016 - RNA, 22 nt, Human
ucacaguuuuagcuguuaaaua

SEQ ID NO: 26017 - RNA, 22 nt, Human
ucacauaaauuauacaauuuca

SEQ ID NO: 26018 - RNA, 23 nt, Human
ucacauaauccuucauccacagg

SEQ ID NO: 26019 - RNA, 22 nt, Human
ucacaucaacauuauagcauga

SEQ ID NO: 26020 - RNA, 22 nt, Human
ucacaucaaggacugucuggcu

SEQ ID NO: 26021 - RNA, 17 nt, Human
ucacaucacacaagcaa

SEQ ID NO: 26022 - RNA, 22 nt, Human
ucacaucacaugagugcaagga

SEQ ID NO: 26023 - RNA, 22 nt, Human
ucacaucuaauucgguuagguu

SEQ ID NO: 26024 - RNA, 22 nt, Human
ucacaucucuguuuucuaaauc

SEQ ID NO: 26025 - RNA, 22 nt, Human
ucacaucugaaaaaauauugag

SEQ ID NO: 26026 - RNA, 22 nt, Human
ucacaucugccuccauagcacc

SEQ ID NO: 26027 - RNA, 22 nt, Human
ucacaucuuggauuacaauuuu

SEQ ID NO: 26028 - RNA, 22 nt, Human
ucacaucuugugauguuuucau

SEQ ID NO: 26029 - RNA, 21 nt, Human
uagaacugacgauuucagagu

SEQ ID NO: 26030 - RNA, 22 nt, Human
uagaacuggaauuuugugguuu

SEQ ID NO: 26031 - RNA, 22 nt, Human
uagaacuuaaauauguuuuccc

SEQ ID NO: 26032 - RNA, 22 nt, Human
uagaacuuauuagaaaggcuca

SEQ ID NO: 26033 - RNA, 22 nt, Human
uagaacuuccaauucagggcug

SEQ ID NO: 26034 - RNA, 22 nt, Human
uagaacuugauagacaguacaa

SEQ ID NO: 26035 - RNA, 20 nt, Human
uagaacuuuucaguauggau

SEQ ID NO: 26036 - RNA, 22 nt, Human
uagaagauaagacaagugcugc

SEQ ID NO: 26037 - RNA, 22 nt, Human
uagaagaucuuaaaagcugacu

SEQ ID NO: 26038 - RNA, 22 nt, Human
uagaagcacagccugauggaca

SEQ ID NO: 26039 - RNA, 22 nt, Human
uagaagcaccacucaucacgug

SEQ ID NO: 26040 - RNA, 22 nt, Human
uagaagcucaggaauaggcaua

SEQ ID NO: 26041 - RNA, 22 nt, Human
uagaaguggcaacacucagaaa

SEQ ID NO: 26042 - RNA, 18 nt, Human
uagaagugugcuauacaa

SEQ ID NO: 26043 - RNA, 22 nt, Human
uagaaguucaugcgaauuauuu

SEQ ID NO: 26044 - RNA, 22 nt, Human
uagaaguugcucaauaaauguu

SEQ ID NO: 26045 - RNA, 22 nt, Human
uagaauauacacuacagcuuaa

SEQ ID NO: 26046 - RNA, 18 nt, Human
uagaauauaggucauucu

SEQ ID NO: 26047 - RNA, 22 nt, Human
uagaauaugugguaggaucugg

SEQ ID NO: 26048 - RNA, 22 nt, Human
uagaaucagaagauuugacugu

SEQ ID NO: 26049 - RNA, 21 nt, Human
uagaauccuggacugggacuc

SEQ ID NO: 26050 - RNA, 20 nt, Human
uagaaucuacuauuuggccc

SEQ ID NO: 26051 - RNA, 22 nt, Human
uagaaucugaaaguggcuguga

SEQ ID NO: 26052 - RNA, 22 nt, Human
uagaaucugauuacccuaugaa

SEQ ID NO: 26053 - RNA, 20 nt, Human
uagaaucuguucugauucau

SEQ ID NO: 26054 - RNA, 22 nt, Human
uagaaugaccuccucuuagcuu

SEQ ID NO: 26055 - RNA, 22 nt, Human
uagaaugagaaaguguagcagg

SEQ ID NO: 26056 - RNA, 19 nt, Human
uagaaugcccacuuaaaaa

SEQ ID NO: 26057 - RNA, 22 nt, Human
uagaauguagugcuucaagauu

SEQ ID NO: 26058 - RNA, 23 nt, Human
uagaaugucauucaaugauaugg

SEQ ID NO: 26059 - RNA, 22 nt, Human
uagaauucaagauucaacaggc

SEQ ID NO: 26060 - RNA, 22 nt, Human
uagacaaaagggggcagauaug

SEQ ID NO: 26061 - RNA, 22 nt, Human
uagacaauauuugaaaguagug

SEQ ID NO: 26062 - RNA, 22 nt, Human
uagacacauacccuugcccaaa

SEQ ID NO: 26063 - RNA, 22 nt, Human
uagacacaucuucauccacaau

SEQ ID NO: 26064 - RNA, 22 nt, Human
uagacacuuuagaaguaagggu

SEQ ID NO: 26065 - RNA, 22 nt, Human
uagacauacagugcaguacaua

SEQ ID NO: 26066 - RNA, 22 nt, Human
uagacauuuagauaucucgcug

SEQ ID NO: 26067 - RNA, 22 nt, Human
uagacauuuuaagacauauacc

SEQ ID NO: 26068 - RNA, 22 nt, Human
uagacauuuucccuacccucau

SEQ ID NO: 26069 - RNA, 22 nt, Human
uagaccaggggagucaacaggu

SEQ ID NO: 26070 - RNA, 22 nt, Human
uagaccugaaauauggaccugg

SEQ ID NO: 26071 - RNA, 19 nt, Human
uagacucuaauguuaagcu

SEQ ID NO: 26072 - RNA, 22 nt, Human
uagacucugcauuuaccuccca

SEQ ID NO: 26073 - RNA, 22 nt, Human
uagacuggugaauuagggggaa

SEQ ID NO: 26074 - RNA, 22 nt, Human
uagacuuuuaagucccucuuua

SEQ ID NO: 26075 - RNA, 21 nt, Human
uagagaaaagaagcuguuccu

SEQ ID NO: 26076 - RNA, 22 nt, Human
uagagaaaagcagggaucagga

SEQ ID NO: 26077 - RNA, 22 nt, Human
uagagaauuguagccugcaaga

SEQ ID NO: 26078 - RNA, 22 nt, Human
uagagagccaguugucauaguu

SEQ ID NO: 26079 - RNA, 21 nt, Human
uagagaugacgagcucuagca

SEQ ID NO: 26080 - RNA, 22 nt, Human
uagagauggggucuugcuauga

SEQ ID NO: 26081 - RNA, 21 nt, Human
uagagauguuugcuaaguagc

SEQ ID NO: 26082 - RNA, 22 nt, Human
uagagcagauagugaaacagaa

SEQ ID NO: 26083 - RNA, 22 nt, Human
uagagcaguguuguccaucaga

SEQ ID NO: 26084 - RNA, 22 nt, Human
uagagcauuaugacaaccccau

SEQ ID NO: 26085 - RNA, 22 nt, Human
uagagcuauuuagagcauuuua

SEQ ID NO: 26086 - RNA, 22 nt, Human
uagagcugcuggacuguaacag

SEQ ID NO: 26087 - RNA, 22 nt, Human
uagagcuggaaaacugcaggua

SEQ ID NO: 26088 - RNA, 22 nt, Human
uagagcuuggggauuuaguagu

SEQ ID NO: 26089 - RNA, 22 nt, Human
uagaggaacugccuuucuucug

SEQ ID NO: 26090 - RNA, 22 nt, Human
uagaggagcggcgagcugagcu

SEQ ID NO: 26091 - RNA, 23 nt, Human
uagaggaggaugugaugcauauu

SEQ ID NO: 26092 - RNA, 22 nt, Human
uagaggcacccuggaggagacu

SEQ ID NO: 26093 - RNA, 21 nt, Human
uagaggcaggagggacugcag

SEQ ID NO: 26094 - RNA, 22 nt, Human
uagaggcauuaaugaauaaaca

SEQ ID NO: 26095 - RNA, 22 nt, Human
uagaggccgaaugcugagcugg

SEQ ID NO: 26096 - RNA, 22 nt, Human
uagaggcucuucauugcaguag

SEQ ID NO: 26097 - RNA, 22 nt, Human
uagaggcuucuacugcucacuu

SEQ ID NO: 26098 - RNA, 22 nt, Human
uagaggcuuucagcgguagguc

SEQ ID NO: 26099 - RNA, 22 nt, Human
uagagggccagcuggacagcga

SEQ ID NO: 26100 - RNA, 18 nt, Human
uagagggggccugggcau

SEQ ID NO: 26101 - RNA, 22 nt, Human
uagaggguuauuaggacagaag

SEQ ID NO: 26102 - RNA, 22 nt, Human
uagagguauuuuugauggucau

SEQ ID NO: 26103 - RNA, 22 nt, Human
uagaggugucacuuugggaagu

SEQ ID NO: 26104 - RNA, 22 nt, Human
uagagguguucauucucuccau

SEQ ID NO: 26105 - RNA, 22 nt, Human
uagaguaacacaaacgaauugg

SEQ ID NO: 26106 - RNA, 22 nt, Human
uagaguccuucauucugugcag

SEQ ID NO: 26107 - RNA, 22 nt, Human
uagaguguuguaauugaaaagg

SEQ ID NO: 26108 - RNA, 22 nt, Human
uagaguguuuuguuaggcagca

SEQ ID NO: 26109 - RNA, 22 nt, Human
uagauaacagcacuggccucgc

SEQ ID NO: 26110 - RNA, 22 nt, Human
uagauaacuugcaccuacagga

SEQ ID NO: 26111 - RNA, 22 nt, Human
uagauaauuuggcaucauauug

SEQ ID NO: 26112 - RNA, 22 nt, Human
uagauacauacauuuuaaaaug

SEQ ID NO: 26113 - RNA, 22 nt, Human
uagauacauuuuucuuuccugu

SEQ ID NO: 26114 - RNA, 22 nt, Human
uagauaccugcuggaccucauu

SEQ ID NO: 26115 - RNA, 23 nt, Human
uagauacugcauauagguggaau

SEQ ID NO: 26116 - RNA, 22 nt, Human
uagaucauaaauacuauggugc

SEQ ID NO: 26117 - RNA, 22 nt, Human
uagaucauauuuguggagaaaa

SEQ ID NO: 26118 - RNA, 22 nt, Human
uagaucauggguacugcauaug

SEQ ID NO: 26119 - RNA, 21 nt, Human
uagaucaugguauucuuuggc

SEQ ID NO: 26120 - RNA, 22 nt, Human
uagauccugcauagguugugcu

SEQ ID NO: 26121 - RNA, 23 nt, Human
uagauccuuccaacuacucuuac

SEQ ID NO: 26122 - RNA, 22 nt, Human
ucagaaagacgaaacagauggg

SEQ ID NO: 26123 - RNA, 22 nt, Human
ucagaaagcuauaugguguguc

SEQ ID NO: 26124 - RNA, 22 nt, Human
ucagaaagcugauucuugauac

SEQ ID NO: 26125 - RNA, 22 nt, Human
ucagaaagcuuuuacuuaaaca

SEQ ID NO: 26126 - RNA, 22 nt, Human
ucagaaauaaugaaugaugggg

SEQ ID NO: 26127 - RNA, 22 nt, Human
ucagaaauagcucuaagcuccu

SEQ ID NO: 26128 - RNA, 22 nt, Human
ucagaacaauuccuuuauaaca

SEQ ID NO: 26129 - RNA, 22 nt, Human
ucagaacacuuucucuacugac

SEQ ID NO: 26130 - RNA, 22 nt, Human
ucagaacagcgagaauauucac

SEQ ID NO: 26131 - RNA, 22 nt, Human
ucagaacagguuguacuauguc

SEQ ID NO: 26132 - RNA, 22 nt, Human
ucagaacauauauuuugugaug

SEQ ID NO: 26133 - RNA, 22 nt, Human
ucagaacauuacauuuugagcu

SEQ ID NO: 26134 - RNA, 22 nt, Human
ucagaacauuuaaaaagugguu

SEQ ID NO: 26135 - RNA, 22 nt, Human
ucagaaccagcccagcagauga

SEQ ID NO: 26136 - RNA, 22 nt, Human
ucagaaccugcaagucuaaccu

SEQ ID NO: 26137 - RNA, 22 nt, Human
ucagaagaaagauguuauuacu

SEQ ID NO: 26138 - RNA, 22 nt, Human
ucagaagaagagacuccacagc

SEQ ID NO: 26139 - RNA, 22 nt, Human
ucagaagaagguauauuuauac

SEQ ID NO: 26140 - RNA, 22 nt, Human
ucagaagacuacuaggacacau

SEQ ID NO: 26141 - RNA, 22 nt, Human
ucagaagagcuggugcugccug

SEQ ID NO: 26142 - RNA, 22 nt, Human
ucagaagcaagcuucuacuucu

SEQ ID NO: 26143 - RNA, 22 nt, Human
ucagaagcagaaaauagguggg

SEQ ID NO: 26144 - RNA, 22 nt, Human
ucagaagcauccauuucaccac

SEQ ID NO: 26145 - RNA, 22 nt, Human
ucagaagccggaagugcuccuc

SEQ ID NO: 26146 - RNA, 22 nt, Human
ucagaagcuaaauuugauauuu

SEQ ID NO: 26147 - RNA, 22 nt, Human
ucagaagcugguguccuuugaa

SEQ ID NO: 26148 - RNA, 22 nt, Human
ucagaagguacugaagacaugg

SEQ ID NO: 26149 - RNA, 22 nt, Human
uagcucaaagguuaagugugga

SEQ ID NO: 26150 - RNA, 22 nt, Human
uagcucuagcacuggauaaucc

SEQ ID NO: 26151 - RNA, 22 nt, Human
uagcucucuuuaucuuucuaua

SEQ ID NO: 26152 - RNA, 22 nt, Human
uagcucuggagucuucucagaa

SEQ ID NO: 26153 - RNA, 22 nt, Human
uagcucuuaagucugugauaga

SEQ ID NO: 26154 - RNA, 22 nt, Human
uagcugaauauaggcacaacag

SEQ ID NO: 26155 - RNA, 22 nt, Human
uagcugacagauacaaucagau

SEQ ID NO: 26156 - RNA, 22 nt, Human
uagcugagagcucacuugagga

SEQ ID NO: 26157 - RNA, 22 nt, Human
uagcugagaggccaauugaacu

SEQ ID NO: 26158 - RNA, 19 nt, Human
uagcugauagcuacuuuau

SEQ ID NO: 26159 - RNA, 22 nt, Human
uagcugccagaccauucuuacu

SEQ ID NO: 26160 - RNA, 22 nt, Human
uagcugccauugcuccaggaag

SEQ ID NO: 26161 - RNA, 17 nt, Human
uagcugccccgaaugcu

SEQ ID NO: 26162 - RNA, 22 nt, Human
uagcugcuugaccaggcagugg

SEQ ID NO: 26163 - RNA, 22 nt, Human
uagcuggcuuauauaaaagggc

SEQ ID NO: 26164 - RNA, 22 nt, Human
uagcugguucuccaggagcuag

SEQ ID NO: 26165 - RNA, 22 nt, Human
uagcugucagcaaucaaguggu

SEQ ID NO: 26166 - RNA, 21 nt, Human
uagcugugcaacuuugggcaa

SEQ ID NO: 26167 - RNA, 22 nt, Human
uagcuguguaacaugagaaugu

SEQ ID NO: 26168 - RNA, 22 nt, Human
uagcuguguguccuugggcaaa

SEQ ID NO: 26169 - RNA, 17 nt, Human
uagcuguguuucagcua

SEQ ID NO: 26170 - RNA, 22 nt, Human
uagcuguuaaguuguuuggaaa

SEQ ID NO: 26171 - RNA, 22 nt, Human
uagcuguuacccauaaaagcca

SEQ ID NO: 26172 - RNA, 22 nt, Human
uagcuguuauuuugcuacccau

SEQ ID NO: 26173 - RNA, 22 nt, Human
uagcuguucaaguuccuggaaa

SEQ ID NO: 26174 - RNA, 22 nt, Human
uagcuguugcaauaaacaguuc

SEQ ID NO: 26175 - RNA, 22 nt, Human
uagcuguuucuaaguguuguuu

SEQ ID NO: 26176 - RNA, 22 nt, Human
uagcuguuuuuugugaggaaau

SEQ ID NO: 26177 - RNA, 22 nt, Human
uagcuuaaaaucucuagauucu

SEQ ID NO: 26178 - RNA, 22 nt, Human
uagcuuaucccacagugcccag

SEQ ID NO: 26179 - RNA, 22 nt, Human
uagcuuaucuauacagacuuuu

SEQ ID NO: 26180 - RNA, 22 nt, Human
uagcuucaguggcccuagacac

SEQ ID NO: 26181 - RNA, 22 nt, Human
uagcuuccagaauuuaauguca

SEQ ID NO: 26182 - RNA, 22 nt, Human
uagcuucucuuuucaacaucuu

SEQ ID NO: 26183 - RNA, 22 nt, Human
uagcuucuugagaaagggugcc

SEQ ID NO: 26184 - RNA, 22 nt, Human
uagcuugaguguuucauaaaua

SEQ ID NO: 26185 - RNA, 22 nt, Human
uagcuuggaauaaaaugagaau

SEQ ID NO: 26186 - RNA, 22 nt, Human
uagcuuuaagaugagaugugga

SEQ ID NO: 26187 - RNA, 21 nt, Human
uagcuuuaauauucccacauu

SEQ ID NO: 26188 - RNA, 22 nt, Human
uagcuuuaaugaguugguaaga

SEQ ID NO: 26189 - RNA, 22 nt, Human
uagcuuugaacuucugggcuca

SEQ ID NO: 26190 - RNA, 22 nt, Human
uagcuuugacaguugcaggcag

SEQ ID NO: 26191 - RNA, 22 nt, Human
uagcuuugaccaacgacugguc

SEQ ID NO: 26192 - RNA, 22 nt, Human
uagcuuugccugaaguaaucag

SEQ ID NO: 26193 - RNA, 22 nt, Human
uagcuuugcuggcaagcauguc

SEQ ID NO: 26194 - RNA, 22 nt, Human
uagcuuugggaaugcucuccug

SEQ ID NO: 26195 - RNA, 22 nt, Human
uagcuuuguguaugaugucugu

SEQ ID NO: 26196 - RNA, 22 nt, Human
uagcuuuuaagucauaaccuca

SEQ ID NO: 26197 - RNA, 22 nt, Human
uagcuuuuauccacugcuuuug

SEQ ID NO: 26198 - RNA, 22 nt, Human
uaggaaaauaucucuuauuggg

SEQ ID NO: 26199 - RNA, 22 nt, Human
uaggaaacaaaguggaugaaau

SEQ ID NO: 26200 - RNA, 16 nt, Human
uaggaaacugcaugug

SEQ ID NO: 26201 - RNA, 22 nt, Human
uaggaaaucagagaaagaggug

SEQ ID NO: 26202 - RNA, 22 nt, Human
uaggaaaugaaugcaggcuccc

SEQ ID NO: 26203 - RNA, 22 nt, Human
uaggaaaugaggccaacaugug

SEQ ID NO: 26204 - RNA, 22 nt, Human
uaggaaaugccagccuuccucc

SEQ ID NO: 26205 - RNA, 22 nt, Human
uaggaaauggcucaguuacugc

SEQ ID NO: 26206 - RNA, 22 nt, Human
uaggaaauucucuugcuaaguu

SEQ ID NO: 26207 - RNA, 22 nt, Human
uaggaaauugacaccugcuuga

SEQ ID NO: 26208 - RNA, 22 nt, Human
uaggaaauuggaaacucuucac

SEQ ID NO: 26209 - RNA, 22 nt, Human
uaggaaauuuauagagguguuu

SEQ ID NO: 26210 - RNA, 22 nt, Human
uaggaaccuugaucuuggauuu

SEQ ID NO: 26211 - RNA, 22 nt, Human
uaggaacuuagaugaacacaug

SEQ ID NO: 26212 - RNA, 22 nt, Human
uaggaagagcuauaggucccca

SEQ ID NO: 26213 - RNA, 22 nt, Human
uaggaagaugaguaucaacuug

SEQ ID NO: 26214 - RNA, 22 nt, Human
uaggaagcauuuaaagagaugg

SEQ ID NO: 26215 - RNA, 22 nt, Human
uaggaagccuaaauuaaguggu

SEQ ID NO: 26216 - RNA, 22 nt, Human
uaggaagccugcugugcacagc

SEQ ID NO: 26217 - RNA, 22 nt, Human
uaggaagcuaugggagauguga

SEQ ID NO: 26218 - RNA, 22 nt, Human
uaggaagcugagcagcauuccu

SEQ ID NO: 26219 - RNA, 22 nt, Human
uaggaaggaagagccucagauu

SEQ ID NO: 26220 - RNA, 22 nt, Human
uaggaaguagauagguuguucu

SEQ ID NO: 26221 - RNA, 22 nt, Human
uaggaaugagaaagaauuagau

SEQ ID NO: 26222 - RNA, 19 nt, Human
uaggaauguagaauccuag

SEQ ID NO: 26223 - RNA, 22 nt, Human
uaggaauguuuuuaucaacuua

SEQ ID NO: 26224 - RNA, 22 nt, Human
uaggacagaguucccugauggc

SEQ ID NO: 26225 - RNA, 22 nt, Human
uaggacaggcuaaaagggauaa

SEQ ID NO: 26226 - RNA, 20 nt, Human
uaggacagggccuggcuucu

SEQ ID NO: 26227 - RNA, 22 nt, Human
uaggacaguuuacuuugguuac

SEQ ID NO: 26228 - RNA, 22 nt, Human
uaggacaugcuacauaaauagg

SEQ ID NO: 26229 - RNA, 22 nt, Human
uaggacuuagaacuggaagaca

SEQ ID NO: 26230 - RNA, 22 nt, Human
uaggacuuggaaggagcuccca

SEQ ID NO: 26231 - RNA, 22 nt, Human
ugcuccaugcgcucggccggcg

SEQ ID NO: 26232 - RNA, 22 nt, Human
ugcucccagggacucuggcugg

SEQ ID NO: 26233 - RNA, 22 nt, Human
ugcuccuauccuccugcugaca

SEQ ID NO: 26234 - RNA, 22 nt, Human
ugcuccugaacacagcccuaug

SEQ ID NO: 26235 - RNA, 22 nt, Human
ugcuccugaauuacacuacuac

SEQ ID NO: 26236 - RNA, 22 nt, Human
ugcuccugccguggucgggacu

SEQ ID NO: 26237 - RNA, 22 nt, Human
ugcuccuggcuccuucccuaac

SEQ ID NO: 26238 - RNA, 22 nt, Human
ugcuccuucccuucccagugag

SEQ ID NO: 26239 - RNA, 22 nt, Human
ugcuccuuucauccaauucuca

SEQ ID NO: 26240 - RNA, 22 nt, Human
ugcucuaagaacucuaggaauu

SEQ ID NO: 26241 - RNA, 22 nt, Human
ugcucuaucuuugcuugaggga

SEQ ID NO: 26242 - RNA, 22 nt, Human
ugcucuauuaauuuuaacgaug

SEQ ID NO: 26243 - RNA, 22 nt, Human
ugcucuggacgcugagugguuu

SEQ ID NO: 26244 - RNA, 22 nt, Human
ugcucuggaguggcuugugcac

SEQ ID NO: 26245 - RNA, 22 nt, Human
ugcucuggcugggaugagugca

SEQ ID NO: 26246 - RNA, 22 nt, Human
ugcucugggaccgucauuaaaa

SEQ ID NO: 26247 - RNA, 22 nt, Human
ugcucuggguucuugcuguuac

SEQ ID NO: 26248 - RNA, 22 nt, Human
ugcucugguaacucacuuccau

SEQ ID NO: 26249 - RNA, 22 nt, Human
ugcucugguccucccucggcgc

SEQ ID NO: 26250 - RNA, 22 nt, Human
ugcucuguccagugcaccauca

SEQ ID NO: 26251 - RNA, 22 nt, Human
ugcucugugugugguuauuucc

SEQ ID NO: 26252 - RNA, 22 nt, Human
ugcucuuaauuccauuagacuu

SEQ ID NO: 26253 - RNA, 22 nt, Human
ugcucuucacaguuucagcauc

SEQ ID NO: 26254 - RNA, 22 nt, Human
ugcucuucggggccacugcuug

SEQ ID NO: 26255 - RNA, 22 nt, Human
ugcugaaacaauaacauacugg

SEQ ID NO: 26256 - RNA, 22 nt, Human
ugcugaaagaccguauuuaucu

SEQ ID NO: 26257 - RNA, 22 nt, Human
ugcugaaagucccaaaucucau

SEQ ID NO: 26258 - RNA, 22 nt, Human
ugcugaaauauuuaugggucaa

SEQ ID NO: 26259 - RNA, 22 nt, Human
ugcugaagggaaggucuugaau

SEQ ID NO: 26260 - RNA, 22 nt, Human
ugcugaaguccaagagcuccaa

SEQ ID NO: 26261 - RNA, 22 nt, Human
ugcugaaguccaucuguuugac

SEQ ID NO: 26262 - RNA, 22 nt, Human
ugcugaauaagacguggcuugu

SEQ ID NO: 26263 - RNA, 22 nt, Human
ugcugaaucauaugguaauucu

SEQ ID NO: 26264 - RNA, 21 nt, Human
ugcugaaucugccauauuuuc

SEQ ID NO: 26265 - RNA, 22 nt, Human
ugcugaaugguaaagaaguaua

SEQ ID NO: 26266 - RNA, 23 nt, Human
uaggccagggugaccuggggaga

SEQ ID NO: 26267 - RNA, 22 nt, Human
uaggccaugcagcaaagaggcu

SEQ ID NO: 26268 - RNA, 22 nt, Human
uaggccauugauuuuuauaagu

SEQ ID NO: 26269 - RNA, 19 nt, Human
uaggcccuagcucugcagu

SEQ ID NO: 26270 - RNA, 22 nt, Human
uaggcucagugaguagggaguu

SEQ ID NO: 26271 - RNA, 22 nt, Human
uaggcucccagaucguuugcug

SEQ ID NO: 26272 - RNA, 22 nt, Human
uaggcuccugaguccacagcac

SEQ ID NO: 26273 - RNA, 22 nt, Human
uaggcugagcuaagagagcuua

SEQ ID NO: 26274 - RNA, 22 nt, Human
uaggcugggagccugaggcuag

SEQ ID NO: 26275 - RNA, 22 nt, Human
uaggcuuccgagucuugguauc

SEQ ID NO: 26276 - RNA, 23 nt, Human
uaggcuucugcuguccccgacgc

SEQ ID NO: 26277 - RNA, 22 nt, Human
uaggcuugcuucuccuccacag

SEQ ID NO: 26278 - RNA, 22 nt, Human
uagggaaaagacuucacuguuu

SEQ ID NO: 26279 - RNA, 22 nt, Human
uagggaaggagaccaagccaca

SEQ ID NO: 26280 - RNA, 22 nt, Human
uagggaaguguauaggggucau

SEQ ID NO: 26281 - RNA, 22 nt, Human
uagggacacugcucaugaguuc

SEQ ID NO: 26282 - RNA, 22 nt, Human
uagggacugugugagggacuug

SEQ ID NO: 26283 - RNA, 22 nt, Human
uagggaugaaguugcuauuuac

SEQ ID NO: 26284 - RNA, 22 nt, Human
uagggaugacgaaaggacagag

SEQ ID NO: 26285 - RNA, 22 nt, Human
uagggaugacuaugauucccac

SEQ ID NO: 26286 - RNA, 22 nt, Human
uagggaugagccaguggguagu

SEQ ID NO: 26287 - RNA, 20 nt, Human
uagggaugccaguacuucuc

SEQ ID NO: 26288 - RNA, 22 nt, Human
uagggauggaaacccguuuucu

SEQ ID NO: 26289 - RNA, 22 nt, Human
uagggauggaaacuaggaaucu

SEQ ID NO: 26290 - RNA, 22 nt, Human
uagggaugggagauucucaaac

SEQ ID NO: 26291 - RNA, 22 nt, Human
uagggcaauauuucccagaaaa

SEQ ID NO: 26292 - RNA, 22 nt, Human
uagggcagauucgguggaguuu

SEQ ID NO: 26293 - RNA, 22 nt, Human
uagggcagccuuauagcuccca

SEQ ID NO: 26294 - RNA, 22 nt, Human
uagggcaggugaagaaaagcua

SEQ ID NO: 26295 - RNA, 22 nt, Human
uagggcucagagaaguggggcc

SEQ ID NO: 26296 - RNA, 22 nt, Human
uagggcucagaguccaguuucu

SEQ ID NO: 26297 - RNA, 22 nt, Human
uagggcucagcucuagcuccug

SEQ ID NO: 26298 - RNA, 21 nt, Human
uagggcucuauuuuuauuuca

SEQ ID NO: 26299 - RNA, 22 nt, Human
uagggcugccuauggcuagaua

SEQ ID NO: 26300 - RNA, 22 nt, Human
uagggcugcugcagaugacagg

SEQ ID NO: 26301 - RNA, 22 nt, Human
uagggcugcuuuguauucugcu

SEQ ID NO: 26302 - RNA, 22 nt, Human
uagggcuguggucaguccucua

SEQ ID NO: 26303 - RNA, 22 nt, Human
uagggcuguuaguaauucucag

SEQ ID NO: 26304 - RNA, 22 nt, Human
uagggcuguuuaaaagugaggu

SEQ ID NO: 26305 - RNA, 22 nt, Human
uagggcuucaggugugaggcag

SEQ ID NO: 26306 - RNA, 22 nt, Human
uaggggaggggaucaugugcug

SEQ ID NO: 26307 - RNA, 22 nt, Human
uaggggcagaagcggcggucca

SEQ ID NO: 26308 - RNA, 21 nt, Human
uaggggcuggggcuccagcug

SEQ ID NO: 26309 - RNA, 22 nt, Human
uagggggcuguccugugcauua

SEQ ID NO: 26310 - RNA, 22 nt, Human
uaggguacaugugcacaacaug

SEQ ID NO: 26311 - RNA, 22 nt, Human
uaggguccugccuacagagaca

SEQ ID NO: 26312 - RNA, 22 nt, Human
uagggugggcaguucuugggga

SEQ ID NO: 26313 - RNA, 22 nt, Human
uagguaagauguuaacagcuga

SEQ ID NO: 26314 - RNA, 22 nt, Human
uagguacauuauuagaugcaug

SEQ ID NO: 26315 - RNA, 22 nt, Human
uagguagaaauagauauuggua

SEQ ID NO: 26316 - RNA, 22 nt, Human
uagguagguaaacaggacuaau

SEQ ID NO: 26317 - RNA, 22 nt, Human
uagguaggugcaauuaaaagua

SEQ ID NO: 26318 - RNA, 22 nt, Human
uagguauaauauuuugaagaaa

SEQ ID NO: 26319 - RNA, 21 nt, Human
uagguauuucuaucaugucuc

SEQ ID NO: 26320 - RNA, 22 nt, Human
uagguccacagauuugguuucu

SEQ ID NO: 26321 - RNA, 22 nt, Human
uagguccagcacgguguagcuu

SEQ ID NO: 26322 - RNA, 22 nt, Human
uaggucugauuuccauucaguc

SEQ ID NO: 26323 - RNA, 22 nt, Human
uaggucuggcagaagaaaaaug

SEQ ID NO: 26324 - RNA, 22 nt, Human
uaggugagggagcauugugaga

SEQ ID NO: 26325 - RNA, 22 nt, Human
uaggugcuggauaaagaauggu

SEQ ID NO: 26326 - RNA, 22 nt, Human
uaggugucaggccuccuccagc

SEQ ID NO: 26327 - RNA, 22 nt, Human
uaggugucagguauagaauuua

SEQ ID NO: 26328 - RNA, 22 nt, Human
uagguguccauauaugugugua

SEQ ID NO: 26329 - RNA, 19 nt, Human
uagguguccgccggaggug

SEQ ID NO: 26330 - RNA, 22 nt, Human
uagguguccucguccaaagauu

SEQ ID NO: 26331 - RNA, 22 nt, Human
uaggugucuaacaauaagugua

SEQ ID NO: 26332 - RNA, 23 nt, Human
uaggugucuaguguccacuaugu

SEQ ID NO: 26333 - RNA, 22 nt, Human
uaggugucuugucacuaccguu

SEQ ID NO: 26334 - RNA, 22 nt, Human
uaggugugggcucaggaaugug

SEQ ID NO: 26335 - RNA, 22 nt, Human
uagguucacacaucuuccagau

SEQ ID NO: 26336 - RNA, 22 nt, Human
uagguucacugucuugaggagc

SEQ ID NO: 26337 - RNA, 22 nt, Human
uagguucucuauugcccccaaa

SEQ ID NO: 26338 - RNA, 22 nt, Human
uaguaaaaggucuuccuuuguu

SEQ ID NO: 26339 - RNA, 22 nt, Human
uaguaaaucucagaaaaagauc

SEQ ID NO: 26340 - RNA, 17 nt, Human
uggacccuugggccucc

SEQ ID NO: 26341 - RNA, 22 nt, Human
uggaccugcguaggugcugggc

SEQ ID NO: 26342 - RNA, 21 nt, Human
uggaccuguccuucucgcugu

SEQ ID NO: 26343 - RNA, 20 nt, Human
uggaccugucucuuuaggga

SEQ ID NO: 26344 - RNA, 22 nt, Human
uggacucagugcugccauuccc

SEQ ID NO: 26345 - RNA, 22 nt, Human
uggacugggcuaauggcagaca

SEQ ID NO: 26346 - RNA, 22 nt, Human
uggagaaagcugcauauggaaa

SEQ ID NO: 26347 - RNA, 22 nt, Human
uggagaagauuggucaccauuc

SEQ ID NO: 26348 - RNA, 22 nt, Human
uggagaauuaggccaaaucucc

SEQ ID NO: 26349 - RNA, 22 nt, Human
uggagaauucuauguugagggg

SEQ ID NO: 26350 - RNA, 22 nt, Human
uggagacagagauagccaauug

SEQ ID NO: 26351 - RNA, 22 nt, Human
uggagacucagaaggggaagca

SEQ ID NO: 26352 - RNA, 22 nt, Human
uggagacugugcuaagggaguu

SEQ ID NO: 26353 - RNA, 22 nt, Human
uggagagaaaguugaauggagg

SEQ ID NO: 26354 - RNA, 22 nt, Human
uggagagcaggggaugcgggcg

SEQ ID NO: 26355 - RNA, 22 nt, Human
uggagaggaaagugcaguuuug

SEQ ID NO: 26356 - RNA, 22 nt, Human
uggagaguaauuucugaagacc

SEQ ID NO: 26357 - RNA, 22 nt, Human
uggagagucucaaggcaggaaa

SEQ ID NO: 26358 - RNA, 21 nt, Human
uggagagugauuucagugugg

SEQ ID NO: 26359 - RNA, 22 nt, Human
uggagagugguuugggggacau

SEQ ID NO: 26360 - RNA, 22 nt, Human
uggagaugaacauggugauguu

SEQ ID NO: 26361 - RNA, 22 nt, Human
uggagauggccucaggcccuca

SEQ ID NO: 26362 - RNA, 22 nt, Human
uggagcaagcuggagagaacau

SEQ ID NO: 26363 - RNA, 22 nt, Human
uggagcagaaauggccucuugu

SEQ ID NO: 26364 - RNA, 22 nt, Human
uggagcagagaugggagcccaa

SEQ ID NO: 26365 - RNA, 22 nt, Human
uggagcagaggaagaaggcuuu

SEQ ID NO: 26366 - RNA, 22 nt, Human
uggagcagaguucagcggggag

SEQ ID NO: 26367 - RNA, 22 nt, Human
uggagcagcuaagccucugaga

SEQ ID NO: 26368 - RNA, 22 nt, Human
uggagcaggaagucuauggcug

SEQ ID NO: 26369 - RNA, 22 nt, Human
uggagcaggacugcugcccuca

SEQ ID NO: 26370 - RNA, 22 nt, Human
uggagcaggcaucuuucucucu

SEQ ID NO: 26371 - RNA, 19 nt, Human
uggagcagggcccuuguuu

SEQ ID NO: 26372 - RNA, 18 nt, Human
uggagcagguaggcauga

SEQ ID NO: 26373 - RNA, 22 nt, Human
uggagcaggucggcaccauuug

SEQ ID NO: 26374 - RNA, 22 nt, Human
uggagcaggugccaggugugug

SEQ ID NO: 26375 - RNA, 22 nt, Human
uggagcagugguccuggagaug

SEQ ID NO: 26376 - RNA, 22 nt, Human
uggagcauacuaacccacucug

SEQ ID NO: 26377 - RNA, 22 nt, Human
uggagccaaggccaguucucag

SEQ ID NO: 26378 - RNA, 22 nt, Human
uggagccagcaggacucagagg

SEQ ID NO: 26379 - RNA, 18 nt, Human
uggagccagcucuaggau

SEQ ID NO: 26380 - RNA, 22 nt, Human
uggagccaggcuggcccugcca

SEQ ID NO: 26381 - RNA, 22 nt, Human
uggagccaugccuggccuuucc

SEQ ID NO: 26382 - RNA, 18 nt, Human
uggagccauugccaccau

SEQ ID NO: 26383 - RNA, 22 nt, Human
uggagcccacggaugucgcuuu

SEQ ID NO: 26384 - RNA, 22 nt, Human
uggagcccagggugagaaggag

SEQ ID NO: 26385 - RNA, 22 nt, Human
uggagccugagucagcggaggc

SEQ ID NO: 26386 - RNA, 22 nt, Human
uggagcuccacuggaaaaaugu

SEQ ID NO: 26387 - RNA, 22 nt, Human
uggagcucugauuaaauuggaa

SEQ ID NO: 26388 - RNA, 22 nt, Human
uggagcuggcagcggaaaaggg

SEQ ID NO: 26389 - RNA, 22 nt, Human
uggagcuugggacucuugguag

SEQ ID NO: 26390 - RNA, 22 nt, Human
uggaggaauaacagcaaccuua

SEQ ID NO: 26391 - RNA, 22 nt, Human
uggaggagaacucccuggcuac

SEQ ID NO: 26392 - RNA, 22 nt, Human
uggaggagaccgcauuuuauuu

SEQ ID NO: 26393 - RNA, 22 nt, Human
uggaggagugugauugucugcc

SEQ ID NO: 26394 - RNA, 18 nt, Human
uggaggcagaguucuggc

SEQ ID NO: 26395 - RNA, 23 nt, Human
uggaggcaggaugcuaaggaguc

SEQ ID NO: 26396 - RNA, 22 nt, Human
uggaggcagucaccugaaguca

SEQ ID NO: 26397 - RNA, 22 nt, Human
uggaggcaugacagugucugga

SEQ ID NO: 26398 - RNA, 22 nt, Human
uaugaugggaggaauggaauuu

SEQ ID NO: 26399 - RNA, 22 nt, Human
uaugauguguaccuaagucacc

SEQ ID NO: 26400 - RNA, 22 nt, Human
uaugcaaacaguucaggugaca

SEQ ID NO: 26401 - RNA, 22 nt, Human
uaugcaaaguccuaagaaagaa

SEQ ID NO: 26402 - RNA, 22 nt, Human
uaugcacacauguaugcaugug

SEQ ID NO: 26403 - RNA, 22 nt, Human
uaugcacauucacacaaaaaug

SEQ ID NO: 26404 - RNA, 22 nt, Human
uaugcacauugguuuccucauu

SEQ ID NO: 26405 - RNA, 22 nt, Human
uaugcacuggauuacaaagcaa

SEQ ID NO: 26406 - RNA, 22 nt, Human
uaugcacugguacuauucgugu

SEQ ID NO: 26407 - RNA, 22 nt, Human
uaugcaguguaugcacugagau

SEQ ID NO: 26408 - RNA, 22 nt, Human
uaugcauauagaugcacacaca

SEQ ID NO: 26409 - RNA, 22 nt, Human
uaugccagggacuguuucacca

SEQ ID NO: 26410 - RNA, 22 nt, Human
uaugccugauaacugugucucu

SEQ ID NO: 26411 - RNA, 22 nt, Human
uaugccuggggugcucaggcca

SEQ ID NO: 26412 - RNA, 22 nt, Human
uaugcuaaugacacucuagaaa

SEQ ID NO: 26413 - RNA, 22 nt, Human
uaugcuccuauuggaaugauag

SEQ ID NO: 26414 - RNA, 22 nt, Human
uaugcugcaauaucauuuugcu

SEQ ID NO: 26415 - RNA, 22 nt, Human
uaugcuuuaacauuaaacaaca

SEQ ID NO: 26416 - RNA, 22 nt, Human
uaugcuuuaacccucuuauauu

SEQ ID NO: 26417 - RNA, 22 nt, Human
uauggaaagcucuuuuugauug

SEQ ID NO: 26418 - RNA, 22 nt, Human
uauggaaaguguuuucuucugu

SEQ ID NO: 26419 - RNA, 22 nt, Human
uauggaauggcuauuuucuagg

SEQ ID NO: 26420 - RNA, 22 nt, Human
uauggagauucaaaagcaucuu

SEQ ID NO: 26421 - RNA, 22 nt, Human
uauggauggaaagggccaagcu

SEQ ID NO: 26422 - RNA, 22 nt, Human
uauggcaagagaaucaacugaa

SEQ ID NO: 26423 - RNA, 22 nt, Human
uauggcaagaugacauguucuc

SEQ ID NO: 26424 - RNA, 22 nt, Human
uauggcaauauguaucaagauc

SEQ ID NO: 26425 - RNA, 23 nt, Human
uauggcuuacagugcuuuaggua

SEQ ID NO: 26426 - RNA, 22 nt, Human
uauggcuuaggagaguuuaacu

SEQ ID NO: 26427 - RNA, 22 nt, Human
uauggcuuaugcugaacaccug

SEQ ID NO: 26428 - RNA, 22 nt, Human
uauggcuuccaggcuggccagg

SEQ ID NO: 26429 - RNA, 22 nt, Human
uauggcuucuauaaggaagcuu

SEQ ID NO: 26430 - RNA, 22 nt, Human
uauggcuucuuguguuacugug

SEQ ID NO: 26431 - RNA, 22 nt, Human
uauggcuugacuugcaccggca

SEQ ID NO: 26432 - RNA, 20 nt, Human
uauggcuugcagccacccuu

SEQ ID NO: 26433 - RNA, 22 nt, Human
uauggcuugucccuggucaguc

SEQ ID NO: 26434 - RNA, 22 nt, Human
uauggcuuguggagaguuguag

SEQ ID NO: 26435 - RNA, 22 nt, Human
uauggcuuuaaacaacuuaggu

SEQ ID NO: 26436 - RNA, 22 nt, Human
uauggcuuuaaacuuuucauuu

SEQ ID NO: 26437 - RNA, 22 nt, Human
uauggcuuuuaaggagaucuga

SEQ ID NO: 26438 - RNA, 22 nt, Human
uauggguaaagggcuaggguuu

SEQ ID NO: 26439 - RNA, 22 nt, Human
uauggguauuauugguaagaau

SEQ ID NO: 26440 - RNA, 22 nt, Human
uaugguaaaugagcauauguuc

SEQ ID NO: 26441 - RNA, 22 nt, Human
uaugguuauguaaucaguuguu

SEQ ID NO: 26442 - RNA, 22 nt, Human
uauguaaaaauucaucaggcug

SEQ ID NO: 26443 - RNA, 22 nt, Human
uauguaaaggauugagaugaau

SEQ ID NO: 26444 - RNA, 22 nt, Human
uauguaaaguagauggcaggua

SEQ ID NO: 26445 - RNA, 22 nt, Human
uauguacaauuuguuguauguc

SEQ ID NO: 26446 - RNA, 22 nt, Human
uauguacaccaaggauugaaaa

SEQ ID NO: 26447 - RNA, 22 nt, Human
uauguacaccggggaagguggg

SEQ ID NO: 26448 - RNA, 22 nt, Human
uauguacauauacacgugugug

SEQ ID NO: 26449 - RNA, 22 nt, Human
uggauguuugaaguugcaugug

SEQ ID NO: 26450 - RNA, 22 nt, Human
uggauuagguacuaugaauaua

SEQ ID NO: 26451 - RNA, 22 nt, Human
uggauucaugcugggauuuuuc

SEQ ID NO: 26452 - RNA, 22 nt, Human
uggauucuaaugcacuucaaau

SEQ ID NO: 26453 - RNA, 22 nt, Human
uggauucugggcuguuugcauu

SEQ ID NO: 26454 - RNA, 22 nt, Human
uggauuuaacagaauaccaggu

SEQ ID NO: 26455 - RNA, 22 nt, Human
uggauuuaguucuucacaggcc

SEQ ID NO: 26456 - RNA, 22 nt, Human
uggauuucagcauauggauuuu

SEQ ID NO: 26457 - RNA, 22 nt, Human
uggauuuuagcauguaacugug

SEQ ID NO: 26458 - RNA, 22 nt, Human
uggcaaagauuaccacaucuac

SEQ ID NO: 26459 - RNA, 23 nt, Human
uggcaaagcauucuuauaacagu

SEQ ID NO: 26460 - RNA, 22 nt, Human
uggcaaauucaucuuuaguucu

SEQ ID NO: 26461 - RNA, 22 nt, Human
uggcaacucaauuucuacaaga

SEQ ID NO: 26462 - RNA, 22 nt, Human
uggcaagaacugcaauugcuuu

SEQ ID NO: 26463 - RNA, 22 nt, Human
uggcaagagcaaaauguacagu

SEQ ID NO: 26464 - RNA, 22 nt, Human
uggcaagagggaugcaagguuu

SEQ ID NO: 26465 - RNA, 22 nt, Human
uggcaaggaaauuaguucuccu

SEQ ID NO: 26466 - RNA, 22 nt, Human
uggcaaggaagagccuggugca

SEQ ID NO: 26467 - RNA, 22 nt, Human
uggcaaggcugugggggcagag

SEQ ID NO: 26468 - RNA, 22 nt, Human
uggcaagggauuguggagaacu

SEQ ID NO: 26469 - RNA, 22 nt, Human
uggcaauauuaacaguacuuau

SEQ ID NO: 26470 - RNA, 22 nt, Human
uggcaaugaggucagaugucuu

SEQ ID NO: 26471 - RNA, 22 nt, Human
uggcaauguaaauugaacuaga

SEQ ID NO: 26472 - RNA, 22 nt, Human
uggcaauguaggcaagaacauu

SEQ ID NO: 26473 - RNA, 22 nt, Human
uggcaauucccuuggucaacag

SEQ ID NO: 26474 - RNA, 22 nt, Human
uggcaauuggcaauuucguaug

SEQ ID NO: 26475 - RNA, 22 nt, Human
uggcaauuguccacugucugcc

SEQ ID NO: 26476 - RNA, 22 nt, Human
uggcacaaaucuagucccuggu

SEQ ID NO: 26477 - RNA, 21 nt, Human
uggcacagaaaggaaaguuca

SEQ ID NO: 26478 - RNA, 22 nt, Human
uggcacagacauuuaauagccu

SEQ ID NO: 26479 - RNA, 23 nt, Human
uggcacagaggaccaugcuuugc

SEQ ID NO: 26480 - RNA, 21 nt, Human
uggcacagcaagugggcucau

SEQ ID NO: 26481 - RNA, 22 nt, Human
uggcacagcccauucagagaag

SEQ ID NO: 26482 - RNA, 22 nt, Human
uggcacagcuugucauaaacuc

SEQ ID NO: 26483 - RNA, 22 nt, Human
uggcacaggaauuuagaugcag

SEQ ID NO: 26484 - RNA, 22 nt, Human
uggcacaggaucucagcggcca

SEQ ID NO: 26485 - RNA, 22 nt, Human
uggcacagggcuuggucgcuca

SEQ ID NO: 26486 - RNA, 22 nt, Human
uggcacaguccugggugccugc

SEQ ID NO: 26487 - RNA, 22 nt, Human
uggcacagugcuggauggugcu

SEQ ID NO: 26488 - RNA, 22 nt, Human
uggcacaguuaaaguuguagaa

SEQ ID NO: 26489 - RNA, 22 nt, Human
uggcacaugguaagugcuuaac

SEQ ID NO: 26490 - RNA, 22 nt, Human
uggcacaugguuaaucauaauu

SEQ ID NO: 26491 - RNA, 22 nt, Human
uggcaccaucaaggcugagaac

SEQ ID NO: 26492 - RNA, 22 nt, Human
uggcaccugaacuuagaggugu

SEQ ID NO: 26493 - RNA, 22 nt, Human
uggcacgacaauuggcaccaau

SEQ ID NO: 26494 - RNA, 22 nt, Human
uggcacuauggaugagacugau

SEQ ID NO: 26495 - RNA, 22 nt, Human
uggcacucacucucagagucug

SEQ ID NO: 26496 - RNA, 22 nt, Human
uggcacugaaaaaggagagguu

SEQ ID NO: 26497 - RNA, 22 nt, Human
uggcacugaagcuggaaagccu

SEQ ID NO: 26498 - RNA, 22 nt, Human
uggcacugacagggugcucaag

SEQ ID NO: 26499 - RNA, 22 nt, Human
uggcacugaccccaggccugug

SEQ ID NO: 26500 - RNA, 22 nt, Human
uggcacugccuggcagggcccc

SEQ ID NO: 26501 - RNA, 22 nt, Human
uggcacugggacagaugcucuc

SEQ ID NO: 26502 - RNA, 22 nt, Human
uggcacugucaccaaugcuguc

SEQ ID NO: 26503 - RNA, 22 nt, Human
uggcacuuagaucagguugggu

SEQ ID NO: 26504 - RNA, 22 nt, Human
uggcacuuuacacccauuuggc

SEQ ID NO: 26505 - RNA, 22 nt, Human
uggcagaauuucuagcagauuc

SEQ ID NO: 26506 - RNA, 22 nt, Human
uggcagaccaucuuauuaacaa

SEQ ID NO: 26507 - RNA, 22 nt, Human
uggcagacuuuagggucuacau

SEQ ID NO: 26508 - RNA, 22 nt, Human
uggcagagaacacggcugaucu

SEQ ID NO: 26509 - RNA, 23 nt, Human
uggcagagacccagaaucuacau

SEQ ID NO: 26510 - RNA, 22 nt, Human
uggcagagcaaaaagauagaau

SEQ ID NO: 26511 - RNA, 22 nt, Human
uggcagagcccagaacugagca

SEQ ID NO: 26512 - RNA, 22 nt, Human
uggcagagcccagacuccaguc

SEQ ID NO: 26513 - RNA, 22 nt, Human
uggcagagcuggcugcggauga

SEQ ID NO: 26514 - RNA, 22 nt, Human
uggcagaggaggcucagauuga

SEQ ID NO: 26515 - RNA, 22 nt, Human
uggcagagguaauucaaauccc

SEQ ID NO: 26516 - RNA, 22 nt, Human
uggcagagguauauugggagga

SEQ ID NO: 26517 - RNA, 22 nt, Human
uauuuuagguaauauccauugu

SEQ ID NO: 26518 - RNA, 22 nt, Human
uauuuucaucuuguccuuggau

SEQ ID NO: 26519 - RNA, 19 nt, Human
uauuuucguggaggccuau

SEQ ID NO: 26520 - RNA, 22 nt, Human
uauuuucuggggagagugaacc

SEQ ID NO: 26521 - RNA, 22 nt, Human
uauuuugagccccugacaucua

SEQ ID NO: 26522 - RNA, 22 nt, Human
uauuuuggcugauucaucaugu

SEQ ID NO: 26523 - RNA, 22 nt, Human
uauuuuguaauuggucauagcu

SEQ ID NO: 26524 - RNA, 22 nt, Human
uauuuuguauuuaugcaagaaa

SEQ ID NO: 26525 - RNA, 22 nt, Human
uauuuuguuaauaauccagucc

SEQ ID NO: 26526 - RNA, 22 nt, Human
ucaaaaauaagauauucuggac

SEQ ID NO: 26527 - RNA, 22 nt, Human
ucaaaaauguuuuauauuggua

SEQ ID NO: 26528 - RNA, 22 nt, Human
ucaaaacacuauuaccuuuaau

SEQ ID NO: 26529 - RNA, 22 nt, Human
ucaaaaguggccuguaaaaucu

SEQ ID NO: 26530 - RNA, 18 nt, Human
ucaaaauauuucugugga

SEQ ID NO: 26531 - RNA, 22 nt, Human
ucaaaaucaaagauacuugaaa

SEQ ID NO: 26532 - RNA, 22 nt, Human
ucaaaaugccgagugcccaggu

SEQ ID NO: 26533 - RNA, 22 nt, Human
ucaaaauucuagggagaauggu

SEQ ID NO: 26534 - RNA, 22 nt, Human
ucaaaauuuuauuucucaagga

SEQ ID NO: 26535 - RNA, 22 nt, Human
ucaaacacuguaacauggaaaa

SEQ ID NO: 26536 - RNA, 22 nt, Human
ucaaacagcaggucuuucauag

SEQ ID NO: 26537 - RNA, 22 nt, Human
ucaaacaggacuacauucucau

SEQ ID NO: 26538 - RNA, 22 nt, Human
ucaaacaugaaagcuugauuuu

SEQ ID NO: 26539 - RNA, 22 nt, Human
ucaaaccaccuuguuacugggg

SEQ ID NO: 26540 - RNA, 22 nt, Human
ucaaacuagccugacugguauu

SEQ ID NO: 26541 - RNA, 22 nt, Human
ucaaacugcuaccuuuuaugug

SEQ ID NO: 26542 - RNA, 22 nt, Human
ucaaacuggcagacuucuacuu

SEQ ID NO: 26543 - RNA, 22 nt, Human
ucaaacuggggaacuuauuuau

SEQ ID NO: 26544 - RNA, 18 nt, Human
ucaaacugucauugguga

SEQ ID NO: 26545 - RNA, 23 nt, Human
ucaaacuguuauauugccagagu

SEQ ID NO: 26546 - RNA, 22 nt, Human
ucaaacuguuuacagugagaua

SEQ ID NO: 26547 - RNA, 20 nt, Human
ucaaagcacugccugucauc

SEQ ID NO: 26548 - RNA, 22 nt, Human
ucaaagcagcacauucgcaagc

SEQ ID NO: 26549 - RNA, 22 nt, Human
ucaaagcaucagucaauuuagg

SEQ ID NO: 26550 - RNA, 22 nt, Human
ucaaagcaugguuuugaaagac

SEQ ID NO: 26551 - RNA, 22 nt, Human
ucaaaggaauuugauuuugaug

SEQ ID NO: 26552 - RNA, 22 nt, Human
ucaaaggaguuuaaguuacugg

SEQ ID NO: 26553 - RNA, 20 nt, Human
ucaaaggcaaaggugggugu

SEQ ID NO: 26554 - RNA, 22 nt, Human
ucaaaggcgguccaggaauaaa

SEQ ID NO: 26555 - RNA, 22 nt, Human
ucaaaggcugcuugucuucugg

SEQ ID NO: 26556 - RNA, 22 nt, Human
ucaaaggguaauguaauagucu

SEQ ID NO: 26557 - RNA, 22 nt, Human
ucaaaggguccuuaacaugaga

SEQ ID NO: 26558 - RNA, 22 nt, Human
ucacaagagcuggacugucuuu

SEQ ID NO: 26559 - RNA, 22 nt, Human
ucacaagguccugguggauaga

SEQ ID NO: 26560 - RNA, 22 nt, Human
ucacaauauuuaucuuccaauu

SEQ ID NO: 26561 - RNA, 22 nt, Human
ucacaauucagaaaccaaguag

SEQ ID NO: 26562 - RNA, 22 nt, Human
ucacacagauugguagagcuga

SEQ ID NO: 26563 - RNA, 22 nt, Human
ucacacagcuaguaagggccga

SEQ ID NO: 26564 - RNA, 22 nt, Human
ucacacagcugacagagccuuu

SEQ ID NO: 26565 - RNA, 22 nt, Human
ucacacagcugcucuguuuuau

SEQ ID NO: 26566 - RNA, 23 nt, Human
ucacacagcuggucagguacaga

SEQ ID NO: 26567 - RNA, 22 nt, Human
ucacacaggguucuggucucau

SEQ ID NO: 26568 - RNA, 22 nt, Human
ucacacauaaaaagaagacuag

SEQ ID NO: 26569 - RNA, 20 nt, Human
ucacacauaagugaacgcac

SEQ ID NO: 26570 - RNA, 22 nt, Human
ucacacauacucaugugugagu

SEQ ID NO: 26571 - RNA, 23 nt, Human
ucacacuggauacacaugcaaga

SEQ ID NO: 26572 - RNA, 22 nt, Human
ucacacuggcagugcugaaggc

SEQ ID NO: 26573 - RNA, 22 nt, Human
ucacacuuaucccacucaguca

SEQ ID NO: 26574 - RNA, 22 nt, Human
ucacacuucaaaggguuagauc

SEQ ID NO: 26575 - RNA, 18 nt, Human
ucacacuuccuuuggguc

SEQ ID NO: 26576 - RNA, 22 nt, Human
ucacagaaagcuguguccugac

SEQ ID NO: 26577 - RNA, 22 nt, Human
ucacagaacacaaaugccacuu

SEQ ID NO: 26578 - RNA, 22 nt, Human
ucacagaagaaguagauugcau

SEQ ID NO: 26579 - RNA, 22 nt, Human
ucacagaagagauauugacaga

SEQ ID NO: 26580 - RNA, 22 nt, Human
ucacagaagaugcuggauguug

SEQ ID NO: 26581 - RNA, 22 nt, Human
ucacagaaggaccuuguuucau

SEQ ID NO: 26582 - RNA, 22 nt, Human
ucacagaagggaaagaugccaa

SEQ ID NO: 26583 - RNA, 22 nt, Human
ucacagaaguguguuucaggag

SEQ ID NO: 26584 - RNA, 22 nt, Human
ucacagaauagcacuguaagcg

SEQ ID NO: 26585 - RNA, 22 nt, Human
ucacagaaugucuagcauaauu

SEQ ID NO: 26586 - RNA, 22 nt, Human
ucacagaauugacaugggaauc

SEQ ID NO: 26587 - RNA, 22 nt, Human
ucacagaauuuuugcuuccagu

SEQ ID NO: 26588 - RNA, 22 nt, Human
ucacagacacagggagaagcau

SEQ ID NO: 26589 - RNA, 22 nt, Human
ucacagacacuggguuauugca

SEQ ID NO: 26590 - RNA, 22 nt, Human
ucacagacucaagggcauagga

SEQ ID NO: 26591 - RNA, 22 nt, Human
ucacagacucuugauugucuaa

SEQ ID NO: 26592 - RNA, 22 nt, Human
ucacagagaaaagcuaucacaa

SEQ ID NO: 26593 - RNA, 22 nt, Human
ucacagagaacuauaauccauc

SEQ ID NO: 26594 - RNA, 22 nt, Human
ucacagagagguuaagcaguug

SEQ ID NO: 26595 - RNA, 23 nt, Human
ucacagagcauacugcauuuugc

SEQ ID NO: 26596 - RNA, 21 nt, Human
ucacagagccacagaauuggu

SEQ ID NO: 26597 - RNA, 22 nt, Human
ucacagaguuaaaaguuucuuu

SEQ ID NO: 26598 - RNA, 22 nt, Human
ucacagcaacccugaggcgagu

SEQ ID NO: 26599 - RNA, 22 nt, Human
ucacagcaguaaagaaaacacu

SEQ ID NO: 26600 - RNA, 22 nt, Human
ucacagcauuuuuagaaagauu

SEQ ID NO: 26601 - RNA, 22 nt, Human
ucacagccuggucacucugccc

SEQ ID NO: 26602 - RNA, 22 nt, Human
ucacagcuaagcuuggucacug

SEQ ID NO: 26603 - RNA, 20 nt, Human
ucacagcuggcuaugacagg

SEQ ID NO: 26604 - RNA, 22 nt, Human
ucacagcugggguuuuggcagc

SEQ ID NO: 26605 - RNA, 22 nt, Human
ucacagcuuucagauuguuccc

SEQ ID NO: 26606 - RNA, 22 nt, Human
ucacagcuuugagcagagacca

SEQ ID NO: 26607 - RNA, 22 nt, Human
ucacaggaaccaucagagaaau

SEQ ID NO: 26608 - RNA, 22 nt, Human
ucacaggacccugaggguggcg

SEQ ID NO: 26609 - RNA, 22 nt, Human
ucacaggagauuaugugugcua

SEQ ID NO: 26610 - RNA, 22 nt, Human
ucacaggaggaaccuggccugg

SEQ ID NO: 26611 - RNA, 22 nt, Human
ucacaggaggacugaaagauau

SEQ ID NO: 26612 - RNA, 22 nt, Human
ucacaggagucaaggaauagua

SEQ ID NO: 26613 - RNA, 22 nt, Human
ucacaggagucauaauuacagu

SEQ ID NO: 26614 - RNA, 22 nt, Human
ucacaggcccaaaccacgcuua

SEQ ID NO: 26615 - RNA, 22 nt, Human
ucacagggcauuauggcuccag

SEQ ID NO: 26616 - RNA, 20 nt, Human
ucacaggggaccaggagcag

SEQ ID NO: 26617 - RNA, 23 nt, Human
ucacaggggccagcgcucugugg

SEQ ID NO: 26618 - RNA, 22 nt, Human
ucacaggguguacaucaccuau

SEQ ID NO: 26619 - RNA, 22 nt, Human
ucacaguacuccccaaaguuuc

SEQ ID NO: 26620 - RNA, 22 nt, Human
ucacaguagccauuucaugagu

SEQ ID NO: 26621 - RNA, 22 nt, Human
ucacagugaggaguuacaguuu

SEQ ID NO: 26622 - RNA, 22 nt, Human
ucacagugaggcaguucuugua

SEQ ID NO: 26623 - RNA, 22 nt, Human
ucacagugcacagcaggcgugg

SEQ ID NO: 26624 - RNA, 22 nt, Human
ucacaguguggcaacucacaga

SEQ ID NO: 26625 - RNA, 22 nt, Human
ucacaguuaugggccuugguca

SEQ ID NO: 26626 - RNA, 22 nt, Human
ucacaguucaacuaguucagau

SEQ ID NO: 26627 - RNA, 17 nt, Human
ucacaguuggucucagu

SEQ ID NO: 26628 - RNA, 22 nt, Human
ucacaguuuuaagugugaucca

SEQ ID NO: 26629 - RNA, 22 nt, Human
ucacauacugaaaguccaguga

SEQ ID NO: 26630 - RNA, 16 nt, Human
ucacauacuuccuugc

SEQ ID NO: 26631 - RNA, 23 nt, Human
ucacauauguagaaguggaauuc

SEQ ID NO: 26632 - RNA, 22 nt, Human
ucacauauuuaagaaaguuaaa

SEQ ID NO: 26633 - RNA, 22 nt, Human
ucacaucacaugacaguaggcc

SEQ ID NO: 26634 - RNA, 22 nt, Human
ucacaucaggugucuccccaag

SEQ ID NO: 26635 - RNA, 22 nt, Human
ucacaucuauacccaauaauuu

SEQ ID NO: 26636 - RNA, 21 nt, Human
ucacaucuauguuaagcaaac

SEQ ID NO: 26637 - RNA, 22 nt, Human
uggcagagugcagaagaggcau

SEQ ID NO: 26638 - RNA, 22 nt, Human
uggcagaguucgcuccuauuca

SEQ ID NO: 26639 - RNA, 23 nt, Human
uggcagauacaggcaugacuucu

SEQ ID NO: 26640 - RNA, 22 nt, Human
uggcagaugcguuuucauuuuc

SEQ ID NO: 26641 - RNA, 22 nt, Human
uggcagauggccuggaaccaaa

SEQ ID NO: 26642 - RNA, 22 nt, Human
uggcagauucugguugauacuu

SEQ ID NO: 26643 - RNA, 22 nt, Human
uggcagauuguaggcaguuagg

SEQ ID NO: 26644 - RNA, 22 nt, Human
uggcagauuuugaagacagaga

SEQ ID NO: 26645 - RNA, 22 nt, Human
uggcagcaaaaccagaaucaga

SEQ ID NO: 26646 - RNA, 22 nt, Human
uggcagcaauagaaauauaauc

SEQ ID NO: 26647 - RNA, 22 nt, Human
uggcagcacauugacccgggcu

SEQ ID NO: 26648 - RNA, 22 nt, Human
uggcagcaccagcaguguccuu

SEQ ID NO: 26649 - RNA, 22 nt, Human
uggcagcacggcauccacucuc

SEQ ID NO: 26650 - RNA, 22 nt, Human
uggcagcacuagguacugagcu

SEQ ID NO: 26651 - RNA, 22 nt, Human
uggcagcagacaaaaggccauu

SEQ ID NO: 26652 - RNA, 22 nt, Human
uggcagcagcaaauggcauauc

SEQ ID NO: 26653 - RNA, 22 nt, Human
uggcagcagggaggccaguguu

SEQ ID NO: 26654 - RNA, 22 nt, Human
uggcagcauuaauuauucaggu

SEQ ID NO: 26655 - RNA, 22 nt, Human
uggcagccaucugagggugggg

SEQ ID NO: 26656 - RNA, 22 nt, Human
uggcagccuucucugagaaggu

SEQ ID NO: 26657 - RNA, 22 nt, Human
uggcagcuagauaguguguuua

SEQ ID NO: 26658 - RNA, 22 nt, Human
uggcagcucccagagcuuccaa

SEQ ID NO: 26659 - RNA, 22 nt, Human
uggcagcugcaggccuccugag

SEQ ID NO: 26660 - RNA, 22 nt, Human
uggcagcuggaucccaaggcag

SEQ ID NO: 26661 - RNA, 22 nt, Human
uggcagcugucagaaugcaaau

SEQ ID NO: 26662 - RNA, 22 nt, Human
uggcagcugugcuucauucuuu

SEQ ID NO: 26663 - RNA, 22 nt, Human
uggcagcuuccugcucauagga

SEQ ID NO: 26664 - RNA, 22 nt, Human
uggcagcuugaaugcagucuuu

SEQ ID NO: 26665 - RNA, 18 nt, Human
uggcaggaaaugcacuuu

SEQ ID NO: 26666 - RNA, 22 nt, Human
uggcaggaaccuuaaccacaaa

SEQ ID NO: 26667 - RNA, 22 nt, Human
ucaguuucacuugaagaaaaga

SEQ ID NO: 26668 - RNA, 23 nt, Human
ucaguuuguauaauccauaugca

SEQ ID NO: 26669 - RNA, 19 nt, Human
ucaguuuuagucaucaguu

SEQ ID NO: 26670 - RNA, 22 nt, Human
ucaguuuucaauuucaucagag

SEQ ID NO: 26671 - RNA, 22 nt, Human
ucaguuuucauuucaugagcag

SEQ ID NO: 26672 - RNA, 22 nt, Human
ucaguuuugaaaacauugaaug

SEQ ID NO: 26673 - RNA, 22 nt, Human
ucaguuuuucuauacuuuguag

SEQ ID NO: 26674 - RNA, 22 nt, Human
ucaguuuuuguuugccagauag

SEQ ID NO: 26675 - RNA, 19 nt, Human
ucauaaaaaugguaaccca

SEQ ID NO: 26676 - RNA, 22 nt, Human
ucauaaacaaaacaguuuaugc

SEQ ID NO: 26677 - RNA, 22 nt, Human
ucauaaacucacuaguuuaugu

SEQ ID NO: 26678 - RNA, 19 nt, Human
ucauaaacugggcacagug

SEQ ID NO: 26679 - RNA, 22 nt, Human
ucauaaagcauuucagcuuuug

SEQ ID NO: 26680 - RNA, 22 nt, Human
ucauaaaguucuaagaauugua

SEQ ID NO: 26681 - RNA, 22 nt, Human
ucauaaauaguugugccugaau

SEQ ID NO: 26682 - RNA, 23 nt, Human
ucauaaauauuagcacaguagga

SEQ ID NO: 26683 - RNA, 22 nt, Human
ucauaaauugauuaugugcuuu

SEQ ID NO: 26684 - RNA, 22 nt, Human
ucauaacaaccuggaaggccag

SEQ ID NO: 26685 - RNA, 23 nt, Human
ucauaagugcucaguuacuguua

SEQ ID NO: 26686 - RNA, 22 nt, Human
ucauaauacaaagaguucugca

SEQ ID NO: 26687 - RNA, 22 nt, Human
ucauaauguaguucauggcugg

SEQ ID NO: 26688 - RNA, 22 nt, Human
ucauacauucagcagauauuug

SEQ ID NO: 26689 - RNA, 22 nt, Human
ucauagaaauaucacgucuuuu

SEQ ID NO: 26690 - RNA, 18 nt, Human
ucauagaagugaaucaga

SEQ ID NO: 26691 - RNA, 22 nt, Human
ucauaguuuuacuuaguggugu

SEQ ID NO: 26692 - RNA, 22 nt, Human
ucauauaaguuuaaaacuaucu

SEQ ID NO: 26693 - RNA, 22 nt, Human
ucauauaccagagaguuuauau

SEQ ID NO: 26694 - RNA, 22 nt, Human
ucauauaccugcaugugcaugu

SEQ ID NO: 26695 - RNA, 22 nt, Human
ucauaugauuguaaugagaaua

SEQ ID NO: 26696 - RNA, 20 nt, Human
ucauaugugguuguauacaa

SEQ ID NO: 26697 - RNA, 22 nt, Human
ucauauuaacaaugaaacucag

SEQ ID NO: 26698 - RNA, 20 nt, Human
ucauauugauguagagcagc

SEQ ID NO: 26699 - RNA, 22 nt, Human
ucauauuuggggguguguguuu

SEQ ID NO: 26700 - RNA, 22 nt, Human
ucaucaaaagccuucuggguua

SEQ ID NO: 26701 - RNA, 22 nt, Human
ucaucaaagcgcuuggaguagg

SEQ ID NO: 26702 - RNA, 22 nt, Human
ucaucaucacucuggcaagcau

SEQ ID NO: 26703 - RNA, 22 nt, Human
ucaucaucauucucccccacuu

SEQ ID NO: 26704 - RNA, 22 nt, Human
ucaucauucugacaagucuaca

SEQ ID NO: 26705 - RNA, 22 nt, Human
ucauccagccucaucaggagcu

SEQ ID NO: 26706 - RNA, 21 nt, Human
ucauccagguccugcuucuuc

SEQ ID NO: 26707 - RNA, 22 nt, Human
ucauccaguaugacuggugucu

SEQ ID NO: 26708 - RNA, 22 nt, Human
ucauccaguuguggagagggaa

SEQ ID NO: 26709 - RNA, 22 nt, Human
ucauccauauagaaagaugauu

SEQ ID NO: 26710 - RNA, 21 nt, Human
ucauccauggcuuuugugcuu

SEQ ID NO: 26711 - RNA, 22 nt, Human
ucauccauuguccucacauuag

SEQ ID NO: 26712 - RNA, 22 nt, Human
ucaucccucugccaggcccagg

SEQ ID NO: 26713 - RNA, 22 nt, Human
ucaucucaaaauuaugcugcac

SEQ ID NO: 26714 - RNA, 22 nt, Human
ucaucucucaggauaccagcag

SEQ ID NO: 26715 - RNA, 23 nt, Human
ucaucuguaaguaucuguggagu

SEQ ID NO: 26716 - RNA, 22 nt, Human
ucaucugugaauaaugaacugg

SEQ ID NO: 26717 - RNA, 22 nt, Human
ucaucuguuaugggaguuuuug

SEQ ID NO: 26718 - RNA, 22 nt, Human
ucaucuguugauuuuaagucuu

SEQ ID NO: 26719 - RNA, 21 nt, Human
ucaucuuacaguccuuucuuu

SEQ ID NO: 26720 - RNA, 23 nt, Human
ucaucuuccucauuucuccaggg

SEQ ID NO: 26721 - RNA, 22 nt, Human
ucaucuucuauuaauagggaga

SEQ ID NO: 26722 - RNA, 22 nt, Human
ucaugaacaucucaaauaacca

SEQ ID NO: 26723 - RNA, 22 nt, Human
ucaugaacuuccuagccagacu

SEQ ID NO: 26724 - RNA, 22 nt, Human
ucaugaauauugaaugcuucau

SEQ ID NO: 26725 - RNA, 22 nt, Human
ucaugacaacuugcacaguuuu

SEQ ID NO: 26726 - RNA, 22 nt, Human
ucaugacagccagagcucugac

SEQ ID NO: 26727 - RNA, 22 nt, Human
ucaugauacccaaguaccuaga

SEQ ID NO: 26728 - RNA, 18 nt, Human
ucaugcaaacgcuucaua

SEQ ID NO: 26729 - RNA, 22 nt, Human
ucaugcaaagccaauuccagcu

SEQ ID NO: 26730 - RNA, 22 nt, Human
ucaugcaagaauaauaggaagg

SEQ ID NO: 26731 - RNA, 20 nt, Human
ucaugcaagauucauaaagg

SEQ ID NO: 26732 - RNA, 22 nt, Human
ucaugcaagcaggcacugggaa

SEQ ID NO: 26733 - RNA, 22 nt, Human
ucaugcacaugugucaccauca

SEQ ID NO: 26734 - RNA, 22 nt, Human
ucaugcagaguagaaagggcaa

SEQ ID NO: 26735 - RNA, 22 nt, Human
ucaugcagauaagaauaaguaa

SEQ ID NO: 26736 - RNA, 22 nt, Human
ucaugcagcaauaugcauuagg

SEQ ID NO: 26737 - RNA, 22 nt, Human
ucaugcagcuuuuccauucagc

SEQ ID NO: 26738 - RNA, 20 nt, Human
ucaugcagguguucuagguu

SEQ ID NO: 26739 - RNA, 22 nt, Human
ucaugcagguuuccagccagau

SEQ ID NO: 26740 - RNA, 19 nt, Human
ucaugcaguggggggugug

SEQ ID NO: 26741 - RNA, 23 nt, Human
ucaugcccaggcuccagauguca

SEQ ID NO: 26742 - RNA, 22 nt, Human
ucaugcugugaacuguauacau

SEQ ID NO: 26743 - RNA, 22 nt, Human
ucauggaaacagcaaugcuaau

SEQ ID NO: 26744 - RNA, 22 nt, Human
ucauggaagagguauuuuuugu

SEQ ID NO: 26745 - RNA, 22 nt, Human
ucauggaagauguagggucagg

SEQ ID NO: 26746 - RNA, 22 nt, Human
ucauggaaggaguggccaagug

SEQ ID NO: 26747 - RNA, 22 nt, Human
ucauggacgucaccaugguccu

SEQ ID NO: 26748 - RNA, 22 nt, Human
ucauggauaaaauauugguuaa

SEQ ID NO: 26749 - RNA, 22 nt, Human
ucauggaugauagcuucauugc

SEQ ID NO: 26750 - RNA, 18 nt, Human
ucauggcuugcagauggu

SEQ ID NO: 26751 - RNA, 22 nt, Human
ucauggcuuuuauuauguugag

SEQ ID NO: 26752 - RNA, 22 nt, Human
ucauggggcucuucaaguggag

SEQ ID NO: 26753 - RNA, 22 nt, Human
ucaugggguagaagcauguuua

SEQ ID NO: 26754 - RNA, 22 nt, Human
ucauggggugacagaagggagg

SEQ ID NO: 26755 - RNA, 22 nt, Human
ucauguaaaguguagguuuaga

SEQ ID NO: 26756 - RNA, 18 nt, Human
ucaugucacugugcuccc

SEQ ID NO: 26757 - RNA, 21 nt, Human
ucaugugcugaggaugaugcc

SEQ ID NO: 26758 - RNA, 21 nt, Human
ucauguguaacuuuugaccac

SEQ ID NO: 26759 - RNA, 22 nt, Human
ucaugugucugccaguguuuau

SEQ ID NO: 26760 - RNA, 22 nt, Human
ucauguuucucuuacagcagcu

SEQ ID NO: 26761 - RNA, 22 nt, Human
ucauguuuguuggaaauguggc

SEQ ID NO: 26762 - RNA, 22 nt, Human
ucauguuuuagcugcaaaauga

SEQ ID NO: 26763 - RNA, 22 nt, Human
ucauuaauuugcuuagacuuau

SEQ ID NO: 26764 - RNA, 22 nt, Human
ucauuacuuauuaaaagccuug

SEQ ID NO: 26765 - RNA, 22 nt, Human
ucauuauagaguuguauuuuag

SEQ ID NO: 26766 - RNA, 22 nt, Human
ucauucaagauuucaauagauu

SEQ ID NO: 26767 - RNA, 22 nt, Human
ucauucauaucucucaagcuua

SEQ ID NO: 26768 - RNA, 18 nt, Human
ucauucauuaaacuuggc

SEQ ID NO: 26769 - RNA, 22 nt, Human
ucauucauugcaagcacacgca

SEQ ID NO: 26770 - RNA, 20 nt, Human
ucauuccaaauaguucagca

SEQ ID NO: 26771 - RNA, 23 nt, Human
ucauuccacaaauacuuaucuag

SEQ ID NO: 26772 - RNA, 22 nt, Human
ucauucccccauaaugguauuu

SEQ ID NO: 26773 - RNA, 22 nt, Human
ucauucccuccagcuguggcua

SEQ ID NO: 26774 - RNA, 22 nt, Human
ucauuccuuaacauucauuugc

SEQ ID NO: 26775 - RNA, 22 nt, Human
ucauucggcaauaguguguuag

SEQ ID NO: 26776 - RNA, 22 nt, Human
uccaaaaaacguuugaauaguu

SEQ ID NO: 26777 - RNA, 21 nt, Human
uccaaaccugucucuggcucu

SEQ ID NO: 26778 - RNA, 22 nt, Human
uccaaagaaccuggcuacuguc

SEQ ID NO: 26779 - RNA, 22 nt, Human
uccaaagagcuuaggagagaaa

SEQ ID NO: 26780 - RNA, 18 nt, Human
uccaaagccagagaaguu

SEQ ID NO: 26781 - RNA, 19 nt, Human
uccaaaggacccaccucca

SEQ ID NO: 26782 - RNA, 22 nt, Human
uccaaaguaauuucacuucugu

SEQ ID NO: 26783 - RNA, 22 nt, Human
uccaaaguguugggauuauagg

SEQ ID NO: 26784 - RNA, 22 nt, Human
ucauugaagcccuugacaagcc

SEQ ID NO: 26785 - RNA, 22 nt, Human
ucauugaagugacugaaagauu

SEQ ID NO: 26786 - RNA, 22 nt, Human
ucauugaaugcucugcagguug

SEQ ID NO: 26787 - RNA, 22 nt, Human
ucauugaauuucacagcuuuau

SEQ ID NO: 26788 - RNA, 22 nt, Human
ucauugacuugaagaaaacaau

SEQ ID NO: 26789 - RNA, 22 nt, Human
ucauugagcgguucuuaaccca

SEQ ID NO: 26790 - RNA, 22 nt, Human
ucauugaggaaagguaguggcu

SEQ ID NO: 26791 - RNA, 22 nt, Human
ucauugaguucaaauccuucau

SEQ ID NO: 26792 - RNA, 22 nt, Human
ucauugcaagcucauuuaucug

SEQ ID NO: 26793 - RNA, 22 nt, Human
ucauugcagacuaacaaucuca

SEQ ID NO: 26794 - RNA, 22 nt, Human
ucauugcaggcauuccccugcc

SEQ ID NO: 26795 - RNA, 22 nt, Human
ucauugcucuagguuccuugga

SEQ ID NO: 26796 - RNA, 22 nt, Human
ucauugguaauuauuuuugaca

SEQ ID NO: 26797 - RNA, 22 nt, Human
ucauuguaauuaucugugguau

SEQ ID NO: 26798 - RNA, 22 nt, Human
ucauuguagggcauuuagagag

SEQ ID NO: 26799 - RNA, 22 nt, Human
ucauugucgcucugcgguguuc

SEQ ID NO: 26800 - RNA, 22 nt, Human
ucauugucucucuuuucauaua

SEQ ID NO: 26801 - RNA, 22 nt, Human
ucauuuaauagcuuuugucuuu

SEQ ID NO: 26802 - RNA, 22 nt, Human
ucauuuaauugguuuugcucgu

SEQ ID NO: 26803 - RNA, 22 nt, Human
ucauuuacagacugugugggug

SEQ ID NO: 26804 - RNA, 22 nt, Human
ucauuuacaggugaagcaacua

SEQ ID NO: 26805 - RNA, 22 nt, Human
ucauuuacgcgccuccuuccuu

SEQ ID NO: 26806 - RNA, 22 nt, Human
ucauuuacuguaggcaaaaauu

SEQ ID NO: 26807 - RNA, 22 nt, Human
ucauuuacuucuaugacaacau

SEQ ID NO: 26808 - RNA, 22 nt, Human
ucauuuauaaggaugcaauuaa

SEQ ID NO: 26809 - RNA, 22 nt, Human
ucauuuaucauuugugcuguag

SEQ ID NO: 26810 - RNA, 22 nt, Human
ucauuuauuuauaccauugccu

SEQ ID NO: 26811 - RNA, 22 nt, Human
ucauuuauuugacuuuggagug

SEQ ID NO: 26812 - RNA, 23 nt, Human
ucauuucacagugagcuuccuag

SEQ ID NO: 26813 - RNA, 22 nt, Human
ucauuucacuucucuagggaga

SEQ ID NO: 26814 - RNA, 23 nt, Human
ucauuucagguugcaugguacca

SEQ ID NO: 26815 - RNA, 22 nt, Human
ucauuucaguucagaggccuuu

SEQ ID NO: 26816 - RNA, 22 nt, Human
ucauuuccucaaauucaagguu

SEQ ID NO: 26817 - RNA, 22 nt, Human
ucauuucuaucuaugcagcuuc

SEQ ID NO: 26818 - RNA, 21 nt, Human
ucauuucucuauguauuucac

SEQ ID NO: 26819 - RNA, 22 nt, Human
ucauuucugagccuuccaugau

SEQ ID NO: 26820 - RNA, 17 nt, Human
ucauuugggccucacaa

SEQ ID NO: 26821 - RNA, 22 nt, Human
ucauuugguccucccaacaagc

SEQ ID NO: 26822 - RNA, 21 nt, Human
ucauuugugaucugauuucca

SEQ ID NO: 26823 - RNA, 22 nt, Human
ucauuuguggaagugauugugg

SEQ ID NO: 26824 - RNA, 22 nt, Human
ucauuuguuacagccacauacc

SEQ ID NO: 26825 - RNA, 22 nt, Human
ucauuuguucucauucucuacu

SEQ ID NO: 26826 - RNA, 22 nt, Human
ucauuuguugaacuuuagugcg

SEQ ID NO: 26827 - RNA, 22 nt, Human
ucauuuucacacauaaauagca

SEQ ID NO: 26828 - RNA, 22 nt, Human
ucauuuucccacugaagcuguc

SEQ ID NO: 26829 - RNA, 22 nt, Human
ucauuuugcagagcugaggaac

SEQ ID NO: 26830 - RNA, 22 nt, Human
ucauuuugccugccauuugagu

SEQ ID NO: 26831 - RNA, 18 nt, Human
ucauuuugucugccuuug

SEQ ID NO: 26832 - RNA, 22 nt, Human
ucauuuugugccuuaugaccgc

SEQ ID NO: 26833 - RNA, 21 nt, Human
ucauuuuuauugcuaccuugc

SEQ ID NO: 26834 - RNA, 22 nt, Human
ucauuuuucacacagggucacc

SEQ ID NO: 26835 - RNA, 22 nt, Human
ucauuuuucucuuacacguaga

SEQ ID NO: 26836 - RNA, 22 nt, Human
ucauuuuugaccauggguagga

SEQ ID NO: 26837 - RNA, 22 nt, Human
ucauuuuuuuccgguaggaaua

SEQ ID NO: 26838 - RNA, 22 nt, Human
uccaaacgggagccaaaugagc

SEQ ID NO: 26839 - RNA, 22 nt, Human
uccaaagaacauugcugagacc

SEQ ID NO: 26840 - RNA, 22 nt, Human
uccaaagaauagaggugacauu

SEQ ID NO: 26841 - RNA, 22 nt, Human
uccaaagacuugcuguauguaa

SEQ ID NO: 26842 - RNA, 22 nt, Human
uccaaagccccaugcacuuucu

SEQ ID NO: 26843 - RNA, 22 nt, Human
uccaaaggaagaggcugucagu

SEQ ID NO: 26844 - RNA, 22 nt, Human
uccaaagggaagcgcuuucugu

SEQ ID NO: 26845 - RNA, 22 nt, Human
uccaaauaccagaugggcuaau

SEQ ID NO: 26846 - RNA, 22 nt, Human
uccaaauaguucuggaagacug

SEQ ID NO: 26847 - RNA, 22 nt, Human
uccaaauauacagaaucuccuc

SEQ ID NO: 26848 - RNA, 22 nt, Human
uccaaauauaggaugugauaua

SEQ ID NO: 26849 - RNA, 16 nt, Human
uccaagaagugccccu

SEQ ID NO: 26850 - RNA, 22 nt, Human
uccaagacaagcacauuccugc

SEQ ID NO: 26851 - RNA, 22 nt, Human
uccaagaguaagaggacucuuu

SEQ ID NO: 26852 - RNA, 20 nt, Human
uccaagcccuccuuccauuc

SEQ ID NO: 26853 - RNA, 21 nt, Human
uccaagccuucaacacauuca

SEQ ID NO: 26854 - RNA, 21 nt, Human
uccaagcucaacucccuuccu

SEQ ID NO: 26855 - RNA, 22 nt, Human
uccaagcucucuaugccaugau

SEQ ID NO: 26856 - RNA, 22 nt, Human
uccaaggaagucauuuaaacug

SEQ ID NO: 26857 - RNA, 22 nt, Human
uccaaggacuaaauucuagauu

SEQ ID NO: 26858 - RNA, 22 nt, Human
uccaaggacucuugucagcugu

SEQ ID NO: 26859 - RNA, 22 nt, Human
uccaaggagcagauccagagga

SEQ ID NO: 26860 - RNA, 22 nt, Human
uccaaggcuccggcccuggcgu

SEQ ID NO: 26861 - RNA, 22 nt, Human
uccaagggaaugugggcaaugc

SEQ ID NO: 26862 - RNA, 22 nt, Human
uccaagggaauuuaaaguugcu

SEQ ID NO: 26863 - RNA, 22 nt, Human
uccaagucuuccuucccaaacc

SEQ ID NO: 26864 - RNA, 22 nt, Human
uccaauauucauuaaaaugcag

SEQ ID NO: 26865 - RNA, 22 nt, Human
uccaaucagcuccuaugagaau

SEQ ID NO: 26866 - RNA, 22 nt, Human
uccaauuuucugauuucacuug

SEQ ID NO: 26867 - RNA, 21 nt, Human
uccaauuuuuaagacuauggc

SEQ ID NO: 26868 - RNA, 22 nt, Human
uccacaagaugauaaagagagg

SEQ ID NO: 26869 - RNA, 22 nt, Human
uccacagaccaguaucugcagc

SEQ ID NO: 26870 - RNA, 22 nt, Human
uccacagauaaaaacagagguu

SEQ ID NO: 26871 - RNA, 22 nt, Human
uccacagauuaaaaacauacuu

SEQ ID NO: 26872 - RNA, 22 nt, Human
uccacagcauuauuagaaggau

SEQ ID NO: 26873 - RNA, 22 nt, Human
uccacagcuguccuguaacagg

SEQ ID NO: 26874 - RNA, 22 nt, Human
uccacaggcugaggcccuucug

SEQ ID NO: 26875 - RNA, 22 nt, Human
uccacagggaugccugcggcuu

SEQ ID NO: 26876 - RNA, 22 nt, Human
uccacagguauuucuccuugcu

SEQ ID NO: 26877 - RNA, 22 nt, Human
uccacagugguggaauuguuca

SEQ ID NO: 26878 - RNA, 22 nt, Human
uccacaguuuugccacuagcug

SEQ ID NO: 26879 - RNA, 22 nt, Human
uccacaucaagggcagagaggu

SEQ ID NO: 26880 - RNA, 14 nt, Human
uccacaucagcagu

SEQ ID NO: 26881 - RNA, 22 nt, Human
uccacauccauugcuugacuuu

SEQ ID NO: 26882 - RNA, 22 nt, Human
uccacaucucucgccaaccaau

SEQ ID NO: 26883 - RNA, 22 nt, Human
uccacauuagaauguuuucuca

SEQ ID NO: 26884 - RNA, 22 nt, Human
uccacauuauguuucuccuuuc

SEQ ID NO: 26885 - RNA, 22 nt, Human
uggggcaagaagugcccugaag

SEQ ID NO: 26886 - RNA, 22 nt, Human
uggggcagcuccaucuauucca

SEQ ID NO: 26887 - RNA, 22 nt, Human
uggggcaguuaauaaacauucu

SEQ ID NO: 26888 - RNA, 22 nt, Human
uggggccacagccuccuagcuu

SEQ ID NO: 26889 - RNA, 22 nt, Human
uggggccagguggcugcagguc

SEQ ID NO: 26890 - RNA, 19 nt, Human
uggggccuccugucccugg

SEQ ID NO: 26891 - RNA, 22 nt, Human
uggggccuggucagagcugcac

SEQ ID NO: 26892 - RNA, 22 nt, Human
uggggcgcgagguccuggcucc

SEQ ID NO: 26893 - RNA, 22 nt, Human
uggggcucuccacagugucuca

SEQ ID NO: 26894 - RNA, 23 nt, Human
uggggcucuggcaggccugaggu

SEQ ID NO: 26895 - RNA, 22 nt, Human
uggggcuggcacagucucuauu

SEQ ID NO: 26896 - RNA, 22 nt, Human
uggggcuguggauucucacgaa

SEQ ID NO: 26897 - RNA, 22 nt, Human
ugggggacugcacuggcgucag

SEQ ID NO: 26898 - RNA, 22 nt, Human
ugggggagagugcaagcaugaa

SEQ ID NO: 26899 - RNA, 22 nt, Human
ugggggagauuagagcuucuua

SEQ ID NO: 26900 - RNA, 22 nt, Human
ugggggcugugcacaggcucac

SEQ ID NO: 26901 - RNA, 19 nt, Human
ucuaagccucaauguuuuc

SEQ ID NO: 26902 - RNA, 22 nt, Human
ucuaagccuguguccucugcag

SEQ ID NO: 26903 - RNA, 22 nt, Human
ucuaaggacaaggucuuggaga

SEQ ID NO: 26904 - RNA, 22 nt, Human
ucuaaggacaguuauuacuggg

SEQ ID NO: 26905 - RNA, 22 nt, Human
ucuaaguaaaauuugucauuuc

SEQ ID NO: 26906 - RNA, 19 nt, Human
ucuaauaucuacuucccug

SEQ ID NO: 26907 - RNA, 22 nt, Human
ucuaaugagggugaaggcccag

SEQ ID NO: 26908 - RNA, 23 nt, Human
ucuaaugcaauuagaaauuaggg

SEQ ID NO: 26909 - RNA, 22 nt, Human
ucuacaaagaagaauuaauguc

SEQ ID NO: 26910 - RNA, 22 nt, Human
ucuacaaagccauucaggaucu

SEQ ID NO: 26911 - RNA, 22 nt, Human
ucuacagcugcugcuucucaug

SEQ ID NO: 26912 - RNA, 22 nt, Human
ucuacaguagaaagaucccagu

SEQ ID NO: 26913 - RNA, 22 nt, Human
ucuacagugagucauucaaaca

SEQ ID NO: 26914 - RNA, 22 nt, Human
ucuacauaaaaauucagaaggc

SEQ ID NO: 26915 - RNA, 22 nt, Human
ucuacaugauguaccaucuaag

SEQ ID NO: 26916 - RNA, 22 nt, Human
ucuaccacuuauuagcucugug

SEQ ID NO: 26917 - RNA, 22 nt, Human
ucuaccacuuugaccucucugu

SEQ ID NO: 26918 - RNA, 22 nt, Human
ucuaccagggucacagaggccc

SEQ ID NO: 26919 - RNA, 23 nt, Human
ucuacccacacugcucuagaagg

SEQ ID NO: 26920 - RNA, 22 nt, Human
ucuacccugcggucuuggggca

SEQ ID NO: 26921 - RNA, 22 nt, Human
ucuaccuauuucuucuauuggu

SEQ ID NO: 26922 - RNA, 22 nt, Human
ucuacgaagccaccauggagac

SEQ ID NO: 26923 - RNA, 22 nt, Human
ucuacuauguaugcuuuaugcg

SEQ ID NO: 26924 - RNA, 22 nt, Human
ucuacugagugcugagauuuug

SEQ ID NO: 26925 - RNA, 22 nt, Human
ucuacuuucacucauacuuauu

SEQ ID NO: 26926 - RNA, 22 nt, Human
ucuagaaaaaaacugcugugga

SEQ ID NO: 26927 - RNA, 22 nt, Human
ucuagaaaaccaauauuacaug

SEQ ID NO: 26928 - RNA, 23 nt, Human
ucuagaaaaugaaagaaugcagu

SEQ ID NO: 26929 - RNA, 22 nt, Human
ucuagaaacaugacauugaucu

SEQ ID NO: 26930 - RNA, 22 nt, Human
ucuagaaucuaaacuauaguuu

SEQ ID NO: 26931 - RNA, 22 nt, Human
ucuagaauggcugggcacagcu

SEQ ID NO: 26932 - RNA, 22 nt, Human
ucuagaauguuccaccuuguuu

SEQ ID NO: 26933 - RNA, 22 nt, Human
ucuagaauuugcguagguuaga

SEQ ID NO: 26934 - RNA, 22 nt, Human
ucuagagacaaaggaaggaggg

SEQ ID NO: 26935 - RNA, 22 nt, Human
ucuagauuuggggcaugaaguu

SEQ ID NO: 26936 - RNA, 22 nt, Human
ucuagauuuuugugcaccuuug

SEQ ID NO: 26937 - RNA, 22 nt, Human
ucuagcaccacauuaaauagca

SEQ ID NO: 26938 - RNA, 22 nt, Human
ucuagcagagggaagaggcuuu

SEQ ID NO: 26939 - RNA, 22 nt, Human
ucuagcuuggcguuugccuucu

SEQ ID NO: 26940 - RNA, 22 nt, Human
ucuaggaaauuguuacuauauu

SEQ ID NO: 26941 - RNA, 18 nt, Human
ucuaggagaguaccuacc

SEQ ID NO: 26942 - RNA, 22 nt, Human
ucuagggaacaugggucaagcu

SEQ ID NO: 26943 - RNA, 22 nt, Human
ucuagggagaagcucugucugu

SEQ ID NO: 26944 - RNA, 22 nt, Human
ucuaggggcaaugugcaaggac

SEQ ID NO: 26945 - RNA, 22 nt, Human
ucuaggguccacagggucagcc

SEQ ID NO: 26946 - RNA, 22 nt, Human
ucuaggguggagcugggaaucc

SEQ ID NO: 26947 - RNA, 22 nt, Human
ucuaguacuaguuaggaagagu

SEQ ID NO: 26948 - RNA, 19 nt, Human
ucuagucagucagucauuc

SEQ ID NO: 26949 - RNA, 22 nt, Human
ucuagucauauuuuuucaguau

SEQ ID NO: 26950 - RNA, 22 nt, Human
ucuaguguuuuggaacauggaa

SEQ ID NO: 26951 - RNA, 22 nt, Human
ucuaguuaauuccuuugguguu

SEQ ID NO: 26952 - RNA, 22 nt, Human
ucuaguucuagaucccugagga

SEQ ID NO: 26953 - RNA, 22 nt, Human
ucuaguuuucucaaaugacuug

SEQ ID NO: 26954 - RNA, 22 nt, Human
ucuauaaaugcagauaugugug

SEQ ID NO: 26955 - RNA, 22 nt, Human
ucuauacaaguuucacuuugac

SEQ ID NO: 26956 - RNA, 22 nt, Human
ucuauagacuuggacauauagu

SEQ ID NO: 26957 - RNA, 22 nt, Human
ucuauagaucaguaaauaucuc

SEQ ID NO: 26958 - RNA, 22 nt, Human
ucuauaucuuggcugcugugaa

SEQ ID NO: 26959 - RNA, 21 nt, Human
ucuaucaccuaaauuaaacag

SEQ ID NO: 26960 - RNA, 22 nt, Human
ucuaucagaguagaaggcaacg

SEQ ID NO: 26961 - RNA, 22 nt, Human
ucuauccugcuuagaaguaugu

SEQ ID NO: 26962 - RNA, 22 nt, Human
ucuaucuggccccuuuuauaua

SEQ ID NO: 26963 - RNA, 22 nt, Human
ucuaugaagugcgaagaggcac

SEQ ID NO: 26964 - RNA, 22 nt, Human
ucuaugaaugacacagauaaua

SEQ ID NO: 26965 - RNA, 22 nt, Human
ucuauguauggaccuuuucugu

SEQ ID NO: 26966 - RNA, 22 nt, Human
ucuauguugugugucacacaga

SEQ ID NO: 26967 - RNA, 23 nt, Human
ucuauuacuuauuguacucugga

SEQ ID NO: 26968 - RNA, 22 nt, Human
ucuauuagauuauucucaagga

SEQ ID NO: 26969 - RNA, 22 nt, Human
ucuauuuuauacucaaaucuuc

SEQ ID NO: 26970 - RNA, 22 nt, Human
ucucaaacuacacuguaaauug

SEQ ID NO: 26971 - RNA, 22 nt, Human
ucucaaaucaaacuuugagcuu

SEQ ID NO: 26972 - RNA, 22 nt, Human
ucucaaauggcaaauguggguc

SEQ ID NO: 26973 - RNA, 22 nt, Human
ucucaaauuuauacagaguuca

SEQ ID NO: 26974 - RNA, 22 nt, Human
ucucaacaccacuugcugaaga

SEQ ID NO: 26975 - RNA, 22 nt, Human
ucucaacuuugagaaacauugu

SEQ ID NO: 26976 - RNA, 19 nt, Human
ucucaauucuccccacugc

SEQ ID NO: 26977 - RNA, 22 nt, Human
ucucacacuaaugcucuaucag

SEQ ID NO: 26978 - RNA, 22 nt, Human
ucucacagcaucauugcucaug

SEQ ID NO: 26979 - RNA, 22 nt, Human
ucucacagccauuucucccucu

SEQ ID NO: 26980 - RNA, 22 nt, Human
ucucacagugcaggucugucuc

SEQ ID NO: 26981 - RNA, 22 nt, Human
ucucaccauggugcuugcuuau

SEQ ID NO: 26982 - RNA, 22 nt, Human
ucucacugggucacagcagagg

SEQ ID NO: 26983 - RNA, 22 nt, Human
ucucagaaccucaguuugcucu

SEQ ID NO: 26984 - RNA, 19 nt, Human
ucucagaauuggcaaucau

SEQ ID NO: 26985 - RNA, 22 nt, Human
ucucagacucuuuagugaaggu

SEQ ID NO: 26986 - RNA, 22 nt, Human
ucucagagaacaguuggugcuu

SEQ ID NO: 26987 - RNA, 22 nt, Human
ucucagagaagugaugagcaau

SEQ ID NO: 26988 - RNA, 22 nt, Human
ucucagagaucuuucugcaugu

SEQ ID NO: 26989 - RNA, 22 nt, Human
ucucagagauuuauggaaaacu

SEQ ID NO: 26990 - RNA, 22 nt, Human
ucucagagccuaacuaaccuaa

SEQ ID NO: 26991 - RNA, 22 nt, Human
ucucagagcuucaguuauuuuc

SEQ ID NO: 26992 - RNA, 18 nt, Human
ucucagaggccauccuag

SEQ ID NO: 26993 - RNA, 22 nt, Human
ucucagagggaggauuacugcc

SEQ ID NO: 26994 - RNA, 22 nt, Human
ucucuaaauacagaugucaugg

SEQ ID NO: 26995 - RNA, 22 nt, Human
ucucuaaaugauuguguacucc

SEQ ID NO: 26996 - RNA, 22 nt, Human
ucucuaacaaaggagcugcugc

SEQ ID NO: 26997 - RNA, 22 nt, Human
ucucuaaccuaauguggaggga

SEQ ID NO: 26998 - RNA, 22 nt, Human
ucucuacaaaaauuagcaugca

SEQ ID NO: 26999 - RNA, 21 nt, Human
ucucuacacuuucacuaggcu

SEQ ID NO: 27000 - RNA, 22 nt, Human
ucucuacagaaucuuauuauug

SEQ ID NO: 27001 - RNA, 22 nt, Human
ucucuagacauggggaauguca

SEQ ID NO: 27002 - RNA, 22 nt, Human
ucucuaguauaauauagcaaaa

SEQ ID NO: 27003 - RNA, 22 nt, Human
ucucuaguugaggacugagcag

SEQ ID NO: 27004 - RNA, 22 nt, Human
ucucuauuaauugacaauggcu

SEQ ID NO: 27005 - RNA, 19 nt, Human
ucucucaauugcuucaauu

SEQ ID NO: 27006 - RNA, 22 nt, Human
ucucucagaacugcagcugcag

SEQ ID NO: 27007 - RNA, 22 nt, Human
ucucucagcuuugagaccugcu

SEQ ID NO: 27008 - RNA, 22 nt, Human
ucucucagggggaaggcugaag

SEQ ID NO: 27009 - RNA, 22 nt, Human
ucucucagucagaugcuaaaga

SEQ ID NO: 27010 - RNA, 22 nt, Human
ucucucauagagaaaaauauau

SEQ ID NO: 27011 - RNA, 18 nt, Human
ucucuccaucuauuuguu

SEQ ID NO: 27012 - RNA, 22 nt, Human
ucucuccuaauuucaggugcuu

SEQ ID NO: 27013 - RNA, 22 nt, Human
ucucuccugcacugaauuaugu

SEQ ID NO: 27014 - RNA, 22 nt, Human
ucucuccuuaucauuguguuua

SEQ ID NO: 27015 - RNA, 22 nt, Human
ucucucuccuaguuuuuagugg

SEQ ID NO: 27016 - RNA, 18 nt, Human
ucucucugaagaguuccc

SEQ ID NO: 27017 - RNA, 18 nt, Human
ucucucugauaacauuuu

SEQ ID NO: 27018 - RNA, 22 nt, Human
ucucucugugacagcuuugcug

SEQ ID NO: 27019 - RNA, 22 nt, Human
uggggggauacuugcuacuggc

SEQ ID NO: 27020 - RNA, 23 nt, Human
ugggggugcacgggccacaucuu

SEQ ID NO: 27021 - RNA, 22 nt, Human
ugggguacuuguaucaaagcac

SEQ ID NO: 27022 - RNA, 22 nt, Human
uggggucgaggguucucuggca

SEQ ID NO: 27023 - RNA, 20 nt, Human
uggggucuaguuggccuggg

SEQ ID NO: 27024 - RNA, 22 nt, Human
uggggucugaguaucugcauuu

SEQ ID NO: 27025 - RNA, 22 nt, Human
uggggugaaucuuuguuguccg

SEQ ID NO: 27026 - RNA, 22 nt, Human
uggggugagauucagauauuca

SEQ ID NO: 27027 - RNA, 22 nt, Human
uggggugggguuacucauucug

SEQ ID NO: 27028 - RNA, 22 nt, Human
uggggugguaauacaccguucu

SEQ ID NO: 27029 - RNA, 22 nt, Human
ugggguugaagaaaggaucuag

SEQ ID NO: 27030 - RNA, 22 nt, Human
ugggguugccucccgcccugga

SEQ ID NO: 27031 - RNA, 22 nt, Human
uggguaaacugggucuggagag

SEQ ID NO: 27032 - RNA, 22 nt, Human
uggguacuccuauuaguucagu

SEQ ID NO: 27033 - RNA, 22 nt, Human
uggguagacauuccugaaacuc

SEQ ID NO: 27034 - RNA, 23 nt, Human
uggguagagcugcaaggacacug

SEQ ID NO: 27035 - RNA, 22 nt, Human
uggguagggacuuagcuggcug

SEQ ID NO: 27036 - RNA, 22 nt, Human
uggguaggggacguggaagaaa

SEQ ID NO: 27037 - RNA, 22 nt, Human
uggguaggugcuggggauucag

SEQ ID NO: 27038 - RNA, 22 nt, Human
uggguauacaaauaaucucuuu

SEQ ID NO: 27039 - RNA, 22 nt, Human
uggguauauauguugcuacaga

SEQ ID NO: 27040 - RNA, 22 nt, Human
ugggucacucuauccugcuuag

SEQ ID NO: 27041 - RNA, 23 nt, Human
ugggucacuguuucaccauugcu

SEQ ID NO: 27042 - RNA, 22 nt, Human
ugggucagaaucagagaguugc

SEQ ID NO: 27043 - RNA, 22 nt, Human
uggguccacggaagacuuaggg

SEQ ID NO: 27044 - RNA, 22 nt, Human
uggguccacuucugcacugugg

SEQ ID NO: 27045 - RNA, 22 nt, Human
uggguccauggaacagaggugc

SEQ ID NO: 27046 - RNA, 21 nt, Human
uggguccccgacacgcuaccu

SEQ ID NO: 27047 - RNA, 20 nt, Human
ugggucccugcaguuugaag

SEQ ID NO: 27048 - RNA, 22 nt, Human
ugggucccuucagcucucaugg

SEQ ID NO: 27049 - RNA, 22 nt, Human
uggguccuucaaagcugggucu

SEQ ID NO: 27050 - RNA, 22 nt, Human
ugggucuccaguucagggcagg

SEQ ID NO: 27051 - RNA, 22 nt, Human
ugggugaagaggcuaugcuacu

SEQ ID NO: 27052 - RNA, 22 nt, Human
ugggugagccacaggaguuguc

SEQ ID NO: 27053 - RNA, 22 nt, Human
ugggugagggacaaaaguuucu

SEQ ID NO: 27054 - RNA, 22 nt, Human
ugggugcaggaugagugcuggc

SEQ ID NO: 27055 - RNA, 22 nt, Human
ugggugcuucgucagcucugag

SEQ ID NO: 27056 - RNA, 21 nt, Human
uggguggaagcgggaggccgc

SEQ ID NO: 27057 - RNA, 22 nt, Human
uggguggagaaguggaccugcu

SEQ ID NO: 27058 - RNA, 22 nt, Human
uggguggagcuccacaaccugu

SEQ ID NO: 27059 - RNA, 18 nt, Human
uggguggcuagggaguuu

SEQ ID NO: 27060 - RNA, 22 nt, Human
ugggugggagcacccugucugg

SEQ ID NO: 27061 - RNA, 22 nt, Human
ugggugggagcgcccugucugg

SEQ ID NO: 27062 - RNA, 21 nt, Human
ugggugggcagagucucuuca

SEQ ID NO: 27063 - RNA, 17 nt, Human
ugggugguagggagagg

SEQ ID NO: 27064 - RNA, 22 nt, Human
uggguggucuugcuucccagga

SEQ ID NO: 27065 - RNA, 22 nt, Human
ugggugguugcugaggcuccuu

SEQ ID NO: 27066 - RNA, 18 nt, Human
ugggugguuuuucucucc

SEQ ID NO: 27067 - RNA, 22 nt, Human
ugggugugaagucuguuggccu

SEQ ID NO: 27068 - RNA, 22 nt, Human
ugggugugccauauuccauuuc

SEQ ID NO: 27069 - RNA, 22 nt, Human
uggguuaaaaugauaccuugca

SEQ ID NO: 27070 - RNA, 22 nt, Human
uggguuaacaguuuauaccaga

SEQ ID NO: 27071 - RNA, 22 nt, Human
uggguuaagccucauucauagc

SEQ ID NO: 27072 - RNA, 22 nt, Human
uggguucgauguauauguagcc

SEQ ID NO: 27073 - RNA, 22 nt, Human
uggguuggaagcaggaggcacc

SEQ ID NO: 27074 - RNA, 19 nt, Human
uggguuggaagggaaugaa

SEQ ID NO: 27075 - RNA, 22 nt, Human
uggguuggucagcauaagaugg

SEQ ID NO: 27076 - RNA, 22 nt, Human
ugguaaaguggcuucacagugu

SEQ ID NO: 27077 - RNA, 22 nt, Human
ugguaaaguugauuggugcucu

SEQ ID NO: 27078 - RNA, 22 nt, Human
ugguaaaugcuccaagcaguac

SEQ ID NO: 27079 - RNA, 22 nt, Human
ugguaacacaggcauuaaaguu

SEQ ID NO: 27080 - RNA, 22 nt, Human
ugguaacuuucagcauggugac

SEQ ID NO: 27081 - RNA, 22 nt, Human
ugguaagauaagagccaggccu

SEQ ID NO: 27082 - RNA, 16 nt, Human
ugguaagguuaccaga

SEQ ID NO: 27083 - RNA, 22 nt, Human
ugguaaguaagugaaacaucca

SEQ ID NO: 27084 - RNA, 23 nt, Human
ugguaauagggagcagaagguag

SEQ ID NO: 27085 - RNA, 22 nt, Human
ugguaauauaugccagauaaaa

SEQ ID NO: 27086 - RNA, 22 nt, Human
ugguaauuauaaaauguuuuug

SEQ ID NO: 27087 - RNA, 22 nt, Human
ugguacaaucacagcucacugu

SEQ ID NO: 27088 - RNA, 22 nt, Human
ugguacacauguccaaggucag

SEQ ID NO: 27089 - RNA, 22 nt, Human
ugguacuuggaggcagaaaaau

SEQ ID NO: 27090 - RNA, 21 nt, Human
ugguaggauccaggaaucugc

SEQ ID NO: 27091 - RNA, 22 nt, Human
ugguauauguguuagcacaagu

SEQ ID NO: 27092 - RNA, 22 nt, Human
ugguauauuaacuaguuucuuc

SEQ ID NO: 27093 - RNA, 21 nt, Human
ugguaucaaacuauacaauau

SEQ ID NO: 27094 - RNA, 22 nt, Human
ugguaucugugaaugugacauu

SEQ ID NO: 27095 - RNA, 22 nt, Human
ugguauggcuaacgaggucaag

SEQ ID NO: 27096 - RNA, 22 nt, Human
ugguauuacuucuagacacaag

SEQ ID NO: 27097 - RNA, 22 nt, Human
ugguauuuaagacuucacuccu

SEQ ID NO: 27098 - RNA, 22 nt, Human
ugguauuuccaggcuuauggua

SEQ ID NO: 27099 - RNA, 22 nt, Human
uggucaagggacagagcugaac

SEQ ID NO: 27100 - RNA, 22 nt, Human
uggucaaugaagauacacuauu

SEQ ID NO: 27101 - RNA, 22 nt, Human
uggucacacauguaucucaaug

SEQ ID NO: 27102 - RNA, 22 nt, Human
uggucacaguguauugaucagg

SEQ ID NO: 27103 - RNA, 22 nt, Human
ugucuuuaaaauuaaacacauc

SEQ ID NO: 27104 - RNA, 22 nt, Human
ugucuuuagaccucucuggccu

SEQ ID NO: 27105 - RNA, 21 nt, Human
ugucuuuaggaccuguuaaau

SEQ ID NO: 27106 - RNA, 22 nt, Human
ugucuuuaugcacacugacuug

SEQ ID NO: 27107 - RNA, 22 nt, Human
ugucuuucugacccaagguagu

SEQ ID NO: 27108 - RNA, 23 nt, Human
ugucuuuguuaggacuguguuua

SEQ ID NO: 27109 - RNA, 22 nt, Human
ugucuuuuaguuugugagaucu

SEQ ID NO: 27110 - RNA, 22 nt, Human
ugucuuuuauaacugacauaua

SEQ ID NO: 27111 - RNA, 22 nt, Human
ugucuuuuuacuauguucaauc

SEQ ID NO: 27112 - RNA, 22 nt, Human
ugugaaaagcguguguucuagg

SEQ ID NO: 27113 - RNA, 22 nt, Human
ugugaaacggagucagggaagg

SEQ ID NO: 27114 - RNA, 22 nt, Human
ugugaaagcagccaugggcauu

SEQ ID NO: 27115 - RNA, 20 nt, Human
ugugaaagcaguagaaugac

SEQ ID NO: 27116 - RNA, 22 nt, Human
ugugaaauauuggcaauuucau

SEQ ID NO: 27117 - RNA, 22 nt, Human
ugugaaauauuuauauacucaa

SEQ ID NO: 27118 - RNA, 22 nt, Human
ugugaaaucaauuagcugcaga

SEQ ID NO: 27119 - RNA, 22 nt, Human
ugugaaaucugaugaauugacc

SEQ ID NO: 27120 - RNA, 22 nt, Human
ugugaaaugaagauaauucuug

SEQ ID NO: 27121 - RNA, 22 nt, Human
ugugaaauugagaaacuuucac

SEQ ID NO: 27122 - RNA, 22 nt, Human
ugugaacauuucugguuauuug

SEQ ID NO: 27123 - RNA, 22 nt, Human
ugugaacuuacuguccccacag

SEQ ID NO: 27124 - RNA, 22 nt, Human
ugugaagaucaggguccuagag

SEQ ID NO: 27125 - RNA, 22 nt, Human
ugugaagcuggauccuggagcu

SEQ ID NO: 27126 - RNA, 22 nt, Human
ugugaagguagcucuuggcacu

SEQ ID NO: 27127 - RNA, 22 nt, Human
ugugaauaccuugaauucauca

SEQ ID NO: 27128 - RNA, 22 nt, Human
ugugaauagauugaagcuuugg

SEQ ID NO: 27129 - RNA, 22 nt, Human
ugugaauauccauuuguuucag

SEQ ID NO: 27130 - RNA, 22 nt, Human
ugugaaugcuuguuauggagug

SEQ ID NO: 27131 - RNA, 22 nt, Human
ugugaauguuaauauuggauua

SEQ ID NO: 27132 - RNA, 22 nt, Human
ugugacagccaguaaaguaagc

SEQ ID NO: 27133 - RNA, 22 nt, Human
ugugacaggaacuauguggaug

SEQ ID NO: 27134 - RNA, 22 nt, Human
ugugacagucguuaggagcuca

SEQ ID NO: 27135 - RNA, 22 nt, Human
ugugacaugugucaucuuuucu

SEQ ID NO: 27136 - RNA, 17 nt, Human
ugugacauugggacauu

SEQ ID NO: 27137 - RNA, 21 nt, Human
ugugaccugauguaguacauu

SEQ ID NO: 27138 - RNA, 22 nt, Human
ugugacuaucauucuaaacauc

SEQ ID NO: 27139 - RNA, 22 nt, Human
ugugacuggcuuauuucacuua

SEQ ID NO: 27140 - RNA, 19 nt, Human
ugugacugguugucucgcu

SEQ ID NO: 27141 - RNA, 22 nt, Human
ugugacuuagggcaggugagau

SEQ ID NO: 27142 - RNA, 22 nt, Human
ugugacuucuuuuugaguucaa

SEQ ID NO: 27143 - RNA, 22 nt, Human
ugugacuuugucaaguugcaua

SEQ ID NO: 27144 - RNA, 22 nt, Human
ugugagaagggcaugcagggag

SEQ ID NO: 27145 - RNA, 22 nt, Human
ugugagaagggugaggcuuuua

SEQ ID NO: 27146 - RNA, 22 nt, Human
ugugagacaauugcaucagggc

SEQ ID NO: 27147 - RNA, 22 nt, Human
ugugagagcagaagacacauag

SEQ ID NO: 27148 - RNA, 19 nt, Human
ugugagaggcuagcugccc

SEQ ID NO: 27149 - RNA, 22 nt, Human
ugugagaguauaaucucucugu

SEQ ID NO: 27150 - RNA, 22 nt, Human
ugugagcagagccugacaugag

SEQ ID NO: 27151 - RNA, 20 nt, Human
ugugagcagaugcugaguga

SEQ ID NO: 27152 - RNA, 20 nt, Human
ugugaggagcauggccgcug

SEQ ID NO: 27153 - RNA, 22 nt, Human
ugugaggaggcggccagaagag

SEQ ID NO: 27154 - RNA, 22 nt, Human
ucugcauggagaggagaugcua

SEQ ID NO: 27155 - RNA, 20 nt, Human
ucugccacuaauuaggugau

SEQ ID NO: 27156 - RNA, 22 nt, Human
ucugccacuguggccaugggag

SEQ ID NO: 27157 - RNA, 22 nt, Human
ucugccagcuucuggugguugc

SEQ ID NO: 27158 - RNA, 22 nt, Human
ucugccaggccacacagggcac

SEQ ID NO: 27159 - RNA, 22 nt, Human
ucugcccaaggcugucacuaga

SEQ ID NO: 27160 - RNA, 19 nt, Human
ucugcccacaagaaaggga

SEQ ID NO: 27161 - RNA, 22 nt, Human
ucugcccacaguccaauaguug

SEQ ID NO: 27162 - RNA, 18 nt, Human
ucugcccaggacuuggac

SEQ ID NO: 27163 - RNA, 22 nt, Human
ucugcccagggacaggacacag

SEQ ID NO: 27164 - RNA, 22 nt, Human
ucugcccagggcagggcuugca

SEQ ID NO: 27165 - RNA, 22 nt, Human
ucugcccucauugcugccugga

SEQ ID NO: 27166 - RNA, 21 nt, Human
ucugcccuccaggagcucaua

SEQ ID NO: 27167 - RNA, 22 nt, Human
ucugcccuggggucagccucca

SEQ ID NO: 27168 - RNA, 17 nt, Human
ucugccgacugccagcu

SEQ ID NO: 27169 - RNA, 22 nt, Human
ucugccuaugcuguaccuuugu

SEQ ID NO: 27170 - RNA, 22 nt, Human
ucugccugaaccacucuuggag

SEQ ID NO: 27171 - RNA, 21 nt, Human
ucugccugagacuuugcuggu

SEQ ID NO: 27172 - RNA, 22 nt, Human
ucugccugcuucuucauagucu

SEQ ID NO: 27173 - RNA, 22 nt, Human
ucugccuggcggacucccggaa

SEQ ID NO: 27174 - RNA, 22 nt, Human
ucugccuggguguggagcagag

SEQ ID NO: 27175 - RNA, 22 nt, Human
ucugccuguagucccacaccuc

SEQ ID NO: 27176 - RNA, 22 nt, Human
ucugccuguucccgauuccaug

SEQ ID NO: 27177 - RNA, 22 nt, Human
ucugccuucuuuuagucaucuu

SEQ ID NO: 27178 - RNA, 22 nt, Human
ucugccuugagguccucagcuc

SEQ ID NO: 27179 - RNA, 22 nt, Human
ucugccuuucacacagacggcc

SEQ ID NO: 27180 - RNA, 22 nt, Human
ucugccuuucccaggcuacugu

SEQ ID NO: 27181 - RNA, 22 nt, Human
ucugcgccaccuugugcuugug

SEQ ID NO: 27182 - RNA, 22 nt, Human
ucugcgcccugucgccugcucc

SEQ ID NO: 27183 - RNA, 22 nt, Human
ucugcgugaugagggugcagca

SEQ ID NO: 27184 - RNA, 22 nt, Human
ucugcguuauugaaaagcagcc

SEQ ID NO: 27185 - RNA, 22 nt, Human
ucugcucagugcuuaucucuaa

SEQ ID NO: 27186 - RNA, 22 nt, Human
ucugcugaaucagauagcuaag

SEQ ID NO: 27187 - RNA, 22 nt, Human
ucugcugagaugcccaugguua

SEQ ID NO: 27188 - RNA, 22 nt, Human
ucugcugaggccuucccacucc

SEQ ID NO: 27189 - RNA, 22 nt, Human
ucugcugagucagaccucuggg

SEQ ID NO: 27190 - RNA, 22 nt, Human
ucugcugcagagcugcgggugc

SEQ ID NO: 27191 - RNA, 22 nt, Human
ucugcugcugaccaacacugug

SEQ ID NO: 27192 - RNA, 18 nt, Human
ucugcugcugcguccugc

SEQ ID NO: 27193 - RNA, 19 nt, Human
ucugcuggcagaauucccu

SEQ ID NO: 27194 - RNA, 22 nt, Human
ucugcuggucaaggcugggucc

SEQ ID NO: 27195 - RNA, 23 nt, Human
ucugcuggugacacggucacauu

SEQ ID NO: 27196 - RNA, 22 nt, Human
ucugcuguauuagguugaacug

SEQ ID NO: 27197 - RNA, 22 nt, Human
ucugcugucacucauuugcuuc

SEQ ID NO: 27198 - RNA, 22 nt, Human
ucugcugucugauucccacuuc

SEQ ID NO: 27199 - RNA, 22 nt, Human
ucugcuguguccccugugcggg

SEQ ID NO: 27200 - RNA, 22 nt, Human
ucugcuguuuacugugugauau

SEQ ID NO: 27201 - RNA, 22 nt, Human
ucugcuucuccuacuucauggg

SEQ ID NO: 27202 - RNA, 22 nt, Human
ucugcuuucuuacuaaaaauga

SEQ ID NO: 27203 - RNA, 22 nt, Human
ucuggaaauaaaauuauaguug

SEQ ID NO: 27204 - RNA, 22 nt, Human
ucuggaagaacggggcaugcug

SEQ ID NO: 27205 - RNA, 22 nt, Human
ucuggaaggaacccuuagagga

SEQ ID NO: 27206 - RNA, 22 nt, Human
ucuggaaggcuucaaggucuaa

SEQ ID NO: 27207 - RNA, 22 nt, Human
ucuggaaguuagaggaggaaag

SEQ ID NO: 27208 - RNA, 22 nt, Human
ucuggaauaacccugcuuccaa

SEQ ID NO: 27209 - RNA, 22 nt, Human
ucuggaauucucaaguccugga

SEQ ID NO: 27210 - RNA, 21 nt, Human
ucuggaccaccuuguaaagcu

SEQ ID NO: 27211 - RNA, 22 nt, Human
ucuggagaaggaagagucuuug

SEQ ID NO: 27212 - RNA, 22 nt, Human
ucuaaagccuuccauauaacgc

SEQ ID NO: 27213 - RNA, 21 nt, Human
ucuaaauguccagcaauagaa

SEQ ID NO: 27214 - RNA, 22 nt, Human
ucuaaaugugguagucauaaga

SEQ ID NO: 27215 - RNA, 22 nt, Human
ucuaacauuguuuuucacagau

SEQ ID NO: 27216 - RNA, 22 nt, Human
ucuaaccuuugaaacugcuuuc

SEQ ID NO: 27217 - RNA, 22 nt, Human
ucuaacuuagggaauacuuuag

SEQ ID NO: 27218 - RNA, 22 nt, Human
ucuaacuugugaguauagauga

SEQ ID NO: 27219 - RNA, 22 nt, Human
ucuaagaaaucagaugaugagg

SEQ ID NO: 27220 - RNA, 22 nt, Human
ucuaaggagccaggacuauuag

SEQ ID NO: 27221 - RNA, 22 nt, Human
ucuaaggccuucaugucaguau

SEQ ID NO: 27222 - RNA, 22 nt, Human
ucuaauccuugcuaccugggug

SEQ ID NO: 27223 - RNA, 21 nt, Human
ucuaaugacauccucugacaa

SEQ ID NO: 27224 - RNA, 22 nt, Human
ucuaauugcaauucucagagau

SEQ ID NO: 27225 - RNA, 19 nt, Human
ucuacaaaguggcaucagg

SEQ ID NO: 27226 - RNA, 22 nt, Human
ucuacaacgugguuuuguugua

SEQ ID NO: 27227 - RNA, 22 nt, Human
ucuacagacuccuauguaacac

SEQ ID NO: 27228 - RNA, 22 nt, Human
ucuacagugucaaugugucuug

SEQ ID NO: 27229 - RNA, 22 nt, Human
ucuacaguuuucuugggaguug

SEQ ID NO: 27230 - RNA, 22 nt, Human
ucuacauuuucuuuauguacau

SEQ ID NO: 27231 - RNA, 22 nt, Human
ucuacuagguguacuacugcag

SEQ ID NO: 27232 - RNA, 22 nt, Human
ucuacuguagugaugcugcagu

SEQ ID NO: 27233 - RNA, 22 nt, Human
ucuacuuccgcaaaaggcacau

SEQ ID NO: 27234 - RNA, 22 nt, Human
ucuacuugucagucuucaaauc

SEQ ID NO: 27235 - RNA, 18 nt, Human
ucuagaaacccagacucu

SEQ ID NO: 27236 - RNA, 22 nt, Human
ucuagaaaguacuagagcuggu

SEQ ID NO: 27237 - RNA, 22 nt, Human
ucuagaaaguuuguacugauuu

SEQ ID NO: 27238 - RNA, 22 nt, Human
ucuagaacuucucuaaaaugaa

SEQ ID NO: 27239 - RNA, 21 nt, Human
ucuagaagagguugagaauau

SEQ ID NO: 27240 - RNA, 22 nt, Human
ucuagaagauaccugcugccaa

SEQ ID NO: 27241 - RNA, 22 nt, Human
ucuagaauacugugacaugcca

SEQ ID NO: 27242 - RNA, 21 nt, Human
ucuagaauccuguauaagacu

SEQ ID NO: 27243 - RNA, 22 nt, Human
ucuagacacuacuaguaaccgg

SEQ ID NO: 27244 - RNA, 22 nt, Human
ucuagacaucuuggcugcaauu

SEQ ID NO: 27245 - RNA, 22 nt, Human
ucuagaccuggcacugcccugu

SEQ ID NO: 27246 - RNA, 22 nt, Human
ucuagagacuauaauguguccu

SEQ ID NO: 27247 - RNA, 17 nt, Human
ucuagagcacuuugaga

SEQ ID NO: 27248 - RNA, 22 nt, Human
ucuagaucugcacuguuggaca

SEQ ID NO: 27249 - RNA, 22 nt, Human
ucuagaugaaugugaggauauc

SEQ ID NO: 27250 - RNA, 22 nt, Human
ucuagcaguagcccaaauccag

SEQ ID NO: 27251 - RNA, 22 nt, Human
ucuagcaugggaaaaucacagc

SEQ ID NO: 27252 - RNA, 22 nt, Human
ucuagcauuucuuuccugagga

SEQ ID NO: 27253 - RNA, 20 nt, Human
ucuagcuuagugccugccuc

SEQ ID NO: 27254 - RNA, 22 nt, Human
ucuaggaaagccuuucacaacu

SEQ ID NO: 27255 - RNA, 22 nt, Human
ucuaggaggcacacaaguaguu

SEQ ID NO: 27256 - RNA, 22 nt, Human
ucuaggaggcggagauugcagu

SEQ ID NO: 27257 - RNA, 22 nt, Human
ucuaggaguaaugagcuagcac

SEQ ID NO: 27258 - RNA, 22 nt, Human
ucuagggaaccuauccuaugau

SEQ ID NO: 27259 - RNA, 22 nt, Human
ucuagggaauugugguuuucuu

SEQ ID NO: 27260 - RNA, 22 nt, Human
ucuagggaggcaauagcaaugu

SEQ ID NO: 27261 - RNA, 22 nt, Human
ucuaggguguauaaggaagccu

SEQ ID NO: 27262 - RNA, 22 nt, Human
ucuagggugugcggcagggcua

SEQ ID NO: 27263 - RNA, 22 nt, Human
ucuagguucaugggauucagug

SEQ ID NO: 27264 - RNA, 22 nt, Human
ucuagucaauagaggucacacu

SEQ ID NO: 27265 - RNA, 22 nt, Human
ucuaguguuaaggcaaaguaaa

SEQ ID NO: 27266 - RNA, 19 nt, Human
ucuaguuuugagagacuuc

SEQ ID NO: 27267 - RNA, 22 nt, Human
ucuauaaaacucaagagcaauu

SEQ ID NO: 27268 - RNA, 22 nt, Human
ucuauaaauuaugcagucucag

SEQ ID NO: 27269 - RNA, 21 nt, Human
ucuauaauaugcaggucauca

SEQ ID NO: 27270 - RNA, 22 nt, Human
ucuauacacacaaagaaugcuu

SEQ ID NO: 27271 - RNA, 22 nt, Human
ucuauacaugugcacacacauc

SEQ ID NO: 27272 - RNA, 21 nt, Human
uccucuccaugaucuguuugu

SEQ ID NO: 27273 - RNA, 22 nt, Human
uccucucugcacuggcccugcc

SEQ ID NO: 27274 - RNA, 22 nt, Human
uccucugccaaagggaguugcc

SEQ ID NO: 27275 - RNA, 22 nt, Human
uccucugccccagaugaaauuu

SEQ ID NO: 27276 - RNA, 21 nt, Human
uccucugcucucauaccacaa

SEQ ID NO: 27277 - RNA, 22 nt, Human
uccucugcuggaagggcaagag

SEQ ID NO: 27278 - RNA, 22 nt, Human
uccucuggaaccucacccuugc

SEQ ID NO: 27279 - RNA, 22 nt, Human
uccucuggauauaagccucacc

SEQ ID NO: 27280 - RNA, 22 nt, Human
uccucuggcccagcugccucug

SEQ ID NO: 27281 - RNA, 22 nt, Human
uccucuggccuuggaauccuuu

SEQ ID NO: 27282 - RNA, 22 nt, Human
uccucuggcucuuucccuagga

SEQ ID NO: 27283 - RNA, 22 nt, Human
uccucugggcucccugcaacag

SEQ ID NO: 27284 - RNA, 19 nt, Human
uccucugguaccacccuug

SEQ ID NO: 27285 - RNA, 22 nt, Human
uccucugguuauacuugcaccc

SEQ ID NO: 27286 - RNA, 22 nt, Human
uccucuguggaccgggcuuugg

SEQ ID NO: 27287 - RNA, 22 nt, Human
uccucuucaaaaggauuuccuu

SEQ ID NO: 27288 - RNA, 22 nt, Human
uccucuucaaaauagcucugaa

SEQ ID NO: 27289 - RNA, 22 nt, Human
uccugaaaaauuacauguucag

SEQ ID NO: 27290 - RNA, 22 nt, Human
uccugaagagcccugcucugug

SEQ ID NO: 27291 - RNA, 22 nt, Human
uccugaagagguugucuuuaua

SEQ ID NO: 27292 - RNA, 19 nt, Human
uccugaagauuuccucagc

SEQ ID NO: 27293 - RNA, 22 nt, Human
uccugaagcaguuagcaugagc

SEQ ID NO: 27294 - RNA, 22 nt, Human
uccugaaggagcaguugcuggg

SEQ ID NO: 27295 - RNA, 22 nt, Human
uccugaaggcagauggggauca

SEQ ID NO: 27296 - RNA, 22 nt, Human
uccugaaguauuguuugaguaa

SEQ ID NO: 27297 - RNA, 22 nt, Human
uccugaauaaauuagcugucac

SEQ ID NO: 27298 - RNA, 22 nt, Human
uccugacuaggagggcuaaggu

SEQ ID NO: 27299 - RNA, 22 nt, Human
uccugacucugguguccucuac

SEQ ID NO: 27300 - RNA, 22 nt, Human
uccugacuuaacuacucucugg

SEQ ID NO: 27301 - RNA, 22 nt, Human
uccugagagggguggguuuccc

SEQ ID NO: 27302 - RNA, 22 nt, Human
uccugagauguggagcuccaug

SEQ ID NO: 27303 - RNA, 22 nt, Human
uccugagcacagagacaaggaa

SEQ ID NO: 27304 - RNA, 22 nt, Human
uccugagcccuggggucagugu

SEQ ID NO: 27305 - RNA, 22 nt, Human
uccugagcuacaguaguaugau

SEQ ID NO: 27306 - RNA, 22 nt, Human
uccugagcuucaaaacacuuug

SEQ ID NO: 27307 - RNA, 22 nt, Human
uccugagcuuuacaguaaggac

SEQ ID NO: 27308 - RNA, 23 nt, Human
uccugaggaauggcaucucacau

SEQ ID NO: 27309 - RNA, 22 nt, Human
uccugaggacuaacaggaagga

SEQ ID NO: 27310 - RNA, 22 nt, Human
uccugaggcacaauccuagaau

SEQ ID NO: 27311 - RNA, 22 nt, Human
uccugaggccucugugauguga

SEQ ID NO: 27312 - RNA, 22 nt, Human
uccugaggcuaaagugcagugg

SEQ ID NO: 27313 - RNA, 22 nt, Human
uccugaggcucacuuugaaugu

SEQ ID NO: 27314 - RNA, 20 nt, Human
uccugaggcuucgccagugu

SEQ ID NO: 27315 - RNA, 22 nt, Human
uccugagggcugcagucauagg

SEQ ID NO: 27316 - RNA, 22 nt, Human
uccugagguauaugcuuugcag

SEQ ID NO: 27317 - RNA, 20 nt, Human
uccugagugcaguuggcuug

SEQ ID NO: 27318 - RNA, 22 nt, Human
uccugauggccucuggcuccag

SEQ ID NO: 27319 - RNA, 21 nt, Human
uccugcagaaugccuuccuac

SEQ ID NO: 27320 - RNA, 19 nt, Human
uccugcagaccagaccugu

SEQ ID NO: 27321 - RNA, 22 nt, Human
ucuguucauaguaguguauaug

SEQ ID NO: 27322 - RNA, 22 nt, Human
ucuguucaucucaugggagaau

SEQ ID NO: 27323 - RNA, 22 nt, Human
ucuguucaugaaauaucuuuuu

SEQ ID NO: 27324 - RNA, 22 nt, Human
ucuguucauguugggcuuuucc

SEQ ID NO: 27325 - RNA, 22 nt, Human
ucuguucauuugccucggcucu

SEQ ID NO: 27326 - RNA, 22 nt, Human
ucuguucuaagcauucuaugug

SEQ ID NO: 27327 - RNA, 22 nt, Human
ucuguucuuccuacauucacau

SEQ ID NO: 27328 - RNA, 22 nt, Human
ucuguucuuuagccugcuugag

SEQ ID NO: 27329 - RNA, 22 nt, Human
ucuguugaccaagucuucuucc

SEQ ID NO: 27330 - RNA, 22 nt, Human
ucuguugcuuucuuccugugug

SEQ ID NO: 27331 - RNA, 22 nt, Human
ucuguuggagccuaggaugaca

SEQ ID NO: 27332 - RNA, 22 nt, Human
ucuguugguucuguuucucuga

SEQ ID NO: 27333 - RNA, 22 nt, Human
ucuguuuagacucaguugaaac

SEQ ID NO: 27334 - RNA, 22 nt, Human
ucuguuuaugcauauuuaaaac

SEQ ID NO: 27335 - RNA, 22 nt, Human
ucuguuucuauaaagacaagag

SEQ ID NO: 27336 - RNA, 22 nt, Human
ucuguuucuccaacauugugag

SEQ ID NO: 27337 - RNA, 22 nt, Human
ucuguuuuagauaagaaaggcu

SEQ ID NO: 27338 - RNA, 22 nt, Human
ucuguuuugcauaauguucuuu

SEQ ID NO: 27339 - RNA, 22 nt, Human
ucuguuuuugaggcuaucuucu

SEQ ID NO: 27340 - RNA, 22 nt, Human
ucuuaaagagcgcaauuugagg

SEQ ID NO: 27341 - RNA, 22 nt, Human
ucuuaaagcagcuuguaaaaug

SEQ ID NO: 27342 - RNA, 22 nt, Human
ucuuaacaagcuccucagugcu

SEQ ID NO: 27343 - RNA, 22 nt, Human
ucuuaaguaccuccuuuaucac

SEQ ID NO: 27344 - RNA, 22 nt, Human
ucuuaaugaaagugaaauauca

SEQ ID NO: 27345 - RNA, 22 nt, Human
ucuuacaagaaggaaaagggag

SEQ ID NO: 27346 - RNA, 22 nt, Human
ucuuacccggcaacgugugucg

SEQ ID NO: 27347 - RNA, 22 nt, Human
ucuuacgaauucuuagaggaca

SEQ ID NO: 27348 - RNA, 22 nt, Human
ucuuagaaaugaaguucuuucu

SEQ ID NO: 27349 - RNA, 22 nt, Human
ucuuagaaguucauguuccagc

SEQ ID NO: 27350 - RNA, 22 nt, Human
ucuuagaauugaagucagaggg

SEQ ID NO: 27351 - RNA, 22 nt, Human
ucuuagauggcagcuagagcuc

SEQ ID NO: 27352 - RNA, 22 nt, Human
ucuuagcaugcauguauaaaua

SEQ ID NO: 27353 - RNA, 22 nt, Human
ucuuagcauuucauaacaacug

SEQ ID NO: 27354 - RNA, 22 nt, Human
ucuuauaagcaaacugcugaga

SEQ ID NO: 27355 - RNA, 22 nt, Human
ucuuauacagaagauguuuaau

SEQ ID NO: 27356 - RNA, 22 nt, Human
ucuuaugaaaagcacuuagaac

SEQ ID NO: 27357 - RNA, 22 nt, Human
ucuuaugcauauucauaacaca

SEQ ID NO: 27358 - RNA, 22 nt, Human
ucuuauuauuguuguaaaagca

SEQ ID NO: 27359 - RNA, 22 nt, Human
ucuuauucagugggcucugcca

SEQ ID NO: 27360 - RNA, 19 nt, Human
ucuuauugagcagcugagg

SEQ ID NO: 27361 - RNA, 22 nt, Human
ucuuauuggauaaaaggaaacc

SEQ ID NO: 27362 - RNA, 22 nt, Human
ucuuauugugaugaugaagaac

SEQ ID NO: 27363 - RNA, 22 nt, Human
ucuuauuguuuaaaaguacaca

SEQ ID NO: 27364 - RNA, 22 nt, Human
ucuucaaaaaauauccaucagu

SEQ ID NO: 27365 - RNA, 22 nt, Human
ucuucaaaauugauuggagaag

SEQ ID NO: 27366 - RNA, 22 nt, Human
ucuucaaacugaaaauuuagaa

SEQ ID NO: 27367 - RNA, 22 nt, Human
ucuucaaagaagccuuggauua

SEQ ID NO: 27368 - RNA, 22 nt, Human
ucuucaaauacagucauauuga

SEQ ID NO: 27369 - RNA, 22 nt, Human
ucuucaaguuccaaagugcagg

SEQ ID NO: 27370 - RNA, 22 nt, Human
ucuucaauuuagaauggauuua

SEQ ID NO: 27371 - RNA, 22 nt, Human
ucuucacacacaguccucuuuc

SEQ ID NO: 27372 - RNA, 22 nt, Human
ucuucacaccgggcagcaggaa

SEQ ID NO: 27373 - RNA, 22 nt, Human
ucuucacagaugcauauacuuc

SEQ ID NO: 27374 - RNA, 22 nt, Human
ucuucacagcuuuguccagaag

SEQ ID NO: 27375 - RNA, 22 nt, Human
ucuucacaggagccugccugcc

SEQ ID NO: 27376 - RNA, 22 nt, Human
ucuucacaucauguuuuuuaau

SEQ ID NO: 27377 - RNA, 22 nt, Human
ucuucacaugaccuucaugucu

SEQ ID NO: 27378 - RNA, 22 nt, Human
ucuucaccaucaacagaaugaa

SEQ ID NO: 27379 - RNA, 22 nt, Human
ucuucagacuccaaauguuuua

SEQ ID NO: 27380 - RNA, 22 nt, Human
ucuucagagacucugagccccu

SEQ ID NO: 27381 - RNA, 22 nt, Human
ucuucagaggaagucagucuuu

SEQ ID NO: 27382 - RNA, 20 nt, Human
ucuucagcacuccuuaggua

SEQ ID NO: 27383 - RNA, 22 nt, Human
ucuucagcagagaauuaugaug

SEQ ID NO: 27384 - RNA, 22 nt, Human
ucuucagcagggccucucugag

SEQ ID NO: 27385 - RNA, 22 nt, Human
ucuucaggaagggaaaucaucc

SEQ ID NO: 27386 - RNA, 22 nt, Human
ucuucaggagcugaaagccugc

SEQ ID NO: 27387 - RNA, 22 nt, Human
ucuucaguagguccucagaauc

SEQ ID NO: 27388 - RNA, 18 nt, Human
uccugggaaaggcauaca

SEQ ID NO: 27389 - RNA, 22 nt, Human
uccugggaaguggcuggcugag

SEQ ID NO: 27390 - RNA, 22 nt, Human
uccugggacaccccaauaugag

SEQ ID NO: 27391 - RNA, 22 nt, Human
uccugggacccugggugcagag

SEQ ID NO: 27392 - RNA, 22 nt, Human
uccugggacucuuuaucagaga

SEQ ID NO: 27393 - RNA, 22 nt, Human
uccugggacuuucaaggcuagg

SEQ ID NO: 27394 - RNA, 22 nt, Human
uccugggagcacaugguccugc

SEQ ID NO: 27395 - RNA, 22 nt, Human
uccugggagcaugaagagggau

SEQ ID NO: 27396 - RNA, 22 nt, Human
uccugggaggaacauuuaccua

SEQ ID NO: 27397 - RNA, 22 nt, Human
uccugggaggcaggaccccuuu

SEQ ID NO: 27398 - RNA, 22 nt, Human
uccugggauucugcauuucuaa

SEQ ID NO: 27399 - RNA, 22 nt, Human
uccugggcagcgggacgcucag

SEQ ID NO: 27400 - RNA, 22 nt, Human
uccugggcccaggcugccaggg

SEQ ID NO: 27401 - RNA, 22 nt, Human
uccugggcgauuuucugaauau

SEQ ID NO: 27402 - RNA, 19 nt, Human
uccugggcugcgucuugcc

SEQ ID NO: 27403 - RNA, 22 nt, Human
uccugggcuguggccccgggca

SEQ ID NO: 27404 - RNA, 22 nt, Human
uccugggcuuaguggcuagguc

SEQ ID NO: 27405 - RNA, 22 nt, Human
uccuggggaggucgaggcugag

SEQ ID NO: 27406 - RNA, 16 nt, Human
uccuggggauacugga

SEQ ID NO: 27407 - RNA, 19 nt, Human
uccuggggauguggucacc

SEQ ID NO: 27408 - RNA, 22 nt, Human
uccuggggcugcaaggccuguc

SEQ ID NO: 27409 - RNA, 21 nt, Human
uccugggggguaggugaguuu

SEQ ID NO: 27410 - RNA, 22 nt, Human
uccugggguguguuuugcugcu

SEQ ID NO: 27411 - RNA, 22 nt, Human
uccugggguuuuggccgcagcu

SEQ ID NO: 27412 - RNA, 22 nt, Human
uccugggucccgcacaucuguc

SEQ ID NO: 27413 - RNA, 22 nt, Human
uccuggguccugggaagcccug

SEQ ID NO: 27414 - RNA, 22 nt, Human
uccuggguggcucugcccggcu

SEQ ID NO: 27415 - RNA, 22 nt, Human
uccuggguucauguccuggugc

SEQ ID NO: 27416 - RNA, 20 nt, Human
uccuggucauguggcugggc

SEQ ID NO: 27417 - RNA, 19 nt, Human
uccuggugacccugaaauu

SEQ ID NO: 27418 - RNA, 22 nt, Human
uccuggugaucaaaauucauuu

SEQ ID NO: 27419 - RNA, 22 nt, Human
uccuggugccuggagcucucca

SEQ ID NO: 27420 - RNA, 22 nt, Human
uccugguggcucuuugggaagg

SEQ ID NO: 27421 - RNA, 22 nt, Human
uccugguggcuuucccugccuu

SEQ ID NO: 27422 - RNA, 22 nt, Human
uccugguggucugugcuucuuc

SEQ ID NO: 27423 - RNA, 22 nt, Human
uccugguggugccggugcccgg

SEQ ID NO: 27424 - RNA, 22 nt, Human
uccugguguaaugguaagcaug

SEQ ID NO: 27425 - RNA, 18 nt, Human
uccugguucuguggccac

SEQ ID NO: 27426 - RNA, 22 nt, Human
uccuguauccugauacaauaag

SEQ ID NO: 27427 - RNA, 22 nt, Human
uccugucagugaggcagaugaa

SEQ ID NO: 27428 - RNA, 22 nt, Human
uccuguccacagcccugaccuc

SEQ ID NO: 27429 - RNA, 22 nt, Human
uccugucuaaagaccugcaggc

SEQ ID NO: 27430 - RNA, 22 nt, Human
ucucagaauccuugcccaggug

SEQ ID NO: 27431 - RNA, 22 nt, Human
ucucagagagcuguguuuuccu

SEQ ID NO: 27432 - RNA, 22 nt, Human
ucucagagaggggccgggccuu

SEQ ID NO: 27433 - RNA, 22 nt, Human
ucucagagaugucaagagucua

SEQ ID NO: 27434 - RNA, 22 nt, Human
ucucagagauguuagggaagag

SEQ ID NO: 27435 - RNA, 22 nt, Human
ucucagagcaucauuuucuuag

SEQ ID NO: 27436 - RNA, 19 nt, Human
ucucagagcccuagaggcc

SEQ ID NO: 27437 - RNA, 22 nt, Human
ucucagaguaauucuuuaaggu

SEQ ID NO: 27438 - RNA, 22 nt, Human
ucucagaguuuacggggcugaa

SEQ ID NO: 27439 - RNA, 22 nt, Human
ucucagaguuugaaucuggagu

SEQ ID NO: 27440 - RNA, 22 nt, Human
ucucagaguuuuuuuccaggac

SEQ ID NO: 27441 - RNA, 22 nt, Human
ucucagcagggccauccugagc

SEQ ID NO: 27442 - RNA, 22 nt, Human
ucucagccucaccucuauggag

SEQ ID NO: 27443 - RNA, 23 nt, Human
ucucaggacacacaugucuauca

SEQ ID NO: 27444 - RNA, 23 nt, Human
ucucaggcaaaccaggacaaguu

SEQ ID NO: 27445 - RNA, 20 nt, Human
ucucaggccccaguuuucuu

SEQ ID NO: 27446 - RNA, 22 nt, Human
ucucaggcuaguaaaagauggg

SEQ ID NO: 27447 - RNA, 22 nt, Human
ucucaggcuccugacauauaug

SEQ ID NO: 27448 - RNA, 22 nt, Human
ucucaggcugacauugggacuc

SEQ ID NO: 27449 - RNA, 22 nt, Human
ucucagggagguuccccguucu

SEQ ID NO: 27450 - RNA, 22 nt, Human
ucucagggcaauucucagcgac

SEQ ID NO: 27451 - RNA, 22 nt, Human
ucucagggccucccucuguuuc

SEQ ID NO: 27452 - RNA, 22 nt, Human
ucucagggcucagagcucaggc

SEQ ID NO: 27453 - RNA, 22 nt, Human
ucucaggggauucacuggcacc

SEQ ID NO: 27454 - RNA, 22 nt, Human
ucucaggggccuggaguccugg

SEQ ID NO: 27455 - RNA, 23 nt, Human
ucucaggguggcugggcccaucc

SEQ ID NO: 27456 - RNA, 20 nt, Human
ucucaggguucagcaaagua

SEQ ID NO: 27457 - RNA, 22 nt, Human
ucucagguaaaaggguaucuac

SEQ ID NO: 27458 - RNA, 22 nt, Human
ucucagucuuuuugguuacuca

SEQ ID NO: 27459 - RNA, 23 nt, Human
ucucagugaaucucagaauucgc

SEQ ID NO: 27460 - RNA, 22 nt, Human
ucucagugacacucuucauaca

SEQ ID NO: 27461 - RNA, 17 nt, Human
ucucagugacugauagc

SEQ ID NO: 27462 - RNA, 22 nt, Human
ucucagugacugcugggucccc

SEQ ID NO: 27463 - RNA, 23 nt, Human
ucucagugcacgcaccaugccug

SEQ ID NO: 27464 - RNA, 23 nt, Human
ucucagugccgauugcauacaca

SEQ ID NO: 27465 - RNA, 22 nt, Human
ucucaguggacgugucugucuu

SEQ ID NO: 27466 - RNA, 22 nt, Human
ucucagugguggcauuccagac

SEQ ID NO: 27467 - RNA, 22 nt, Human
ucucagugguguuuugagucca

SEQ ID NO: 27468 - RNA, 22 nt, Human
ucucaguguguugagaggucug

SEQ ID NO: 27469 - RNA, 22 nt, Human
ucucaguuucucauuauaaaag

SEQ ID NO: 27470 - RNA, 22 nt, Human
ucucauaauagcauuucucacc

SEQ ID NO: 27471 - RNA, 22 nt, Human
ucucauacguuuccagguguca

SEQ ID NO: 27472 - RNA, 22 nt, Human
ucucaucuagacucugcccuug

SEQ ID NO: 27473 - RNA, 22 nt, Human
ucucaucuauucacauuaacug

SEQ ID NO: 27474 - RNA, 22 nt, Human
ucucaucucaaauuguaauccc

SEQ ID NO: 27475 - RNA, 21 nt, Human
ucucaucuccugaccugugcc

SEQ ID NO: 27476 - RNA, 22 nt, Human
ucucaucucggaucagaaguga

SEQ ID NO: 27477 - RNA, 22 nt, Human
ucucaucugcgagcucugccag

SEQ ID NO: 27478 - RNA, 22 nt, Human
ucucaucuuguucaucuacccu

SEQ ID NO: 27479 - RNA, 22 nt, Human
ucucaugcaugcauaagucuag

SEQ ID NO: 27480 - RNA, 22 nt, Human
ucucauggcuuaacaagcccac

SEQ ID NO: 27481 - RNA, 22 nt, Human
ucucauguuucugguacuccuu

SEQ ID NO: 27482 - RNA, 18 nt, Human
ucucauuacaaucuuugu

SEQ ID NO: 27483 - RNA, 22 nt, Human
ucucauuauccaucacugcacu

SEQ ID NO: 27484 - RNA, 22 nt, Human
ucucauucauacccuacaugcu

SEQ ID NO: 27485 - RNA, 22 nt, Human
ucucauuuacuuccacaggcug

SEQ ID NO: 27486 - RNA, 23 nt, Human
ucucauuucccuugaucuaucuu

SEQ ID NO: 27487 - RNA, 22 nt, Human
ucuccaaauaguuauauuuaga

SEQ ID NO: 27488 - RNA, 22 nt, Human
ucuccaaggagcuccugugccg

SEQ ID NO: 27489 - RNA, 22 nt, Human
ucuccacgugauggaguccagg

SEQ ID NO: 27490 - RNA, 22 nt, Human
ucuccacuauuuucuagcucuu

SEQ ID NO: 27491 - RNA, 18 nt, Human
ucuccacuucugugagaa

SEQ ID NO: 27492 - RNA, 19 nt, Human
ucuccagcuuugggcuuuu

SEQ ID NO: 27493 - RNA, 17 nt, Human
ucuccaggacgagcuca

SEQ ID NO: 27494 - RNA, 22 nt, Human
ucuccagggacauguuucugga

SEQ ID NO: 27495 - RNA, 22 nt, Human
ucuccaggggcagggucuggag

SEQ ID NO: 27496 - RNA, 22 nt, Human
ucuccaggugaaacuugcaggg

SEQ ID NO: 27497 - RNA, 22 nt, Human
ucuccaggugacucugauguau

SEQ ID NO: 27498 - RNA, 22 nt, Human
ucuccaggugcuaagugugccu

SEQ ID NO: 27499 - RNA, 22 nt, Human
ucuccagguucagucgauggaa

SEQ ID NO: 27500 - RNA, 21 nt, Human
ucuccaguauccuucucugag

SEQ ID NO: 27501 - RNA, 21 nt, Human
ucuccaguugacagugucucc

SEQ ID NO: 27502 - RNA, 21 nt, Human
ucucccaaggagguccugagg

SEQ ID NO: 27503 - RNA, 22 nt, Human
ucucccacagccgugcuucaag

SEQ ID NO: 27504 - RNA, 22 nt, Human
uguuauugucgcugcacuggga

SEQ ID NO: 27505 - RNA, 22 nt, Human
uguuauuuauuucaccuccaga

SEQ ID NO: 27506 - RNA, 22 nt, Human
uguucaaaaauaucuucugcaa

SEQ ID NO: 27507 - RNA, 22 nt, Human
uguucaauccccagguccugaa

SEQ ID NO: 27508 - RNA, 22 nt, Human
uguucacaagaugucuguggcu

SEQ ID NO: 27509 - RNA, 22 nt, Human
uguucacacacggaggccacag

SEQ ID NO: 27510 - RNA, 22 nt, Human
uguucacuuauguucucccauu

SEQ ID NO: 27511 - RNA, 22 nt, Human
uguucagaacaaagguaaauga

SEQ ID NO: 27512 - RNA, 21 nt, Human
uguucagaccaacuuggacug

SEQ ID NO: 27513 - RNA, 19 nt, Human
uguucagauaugucagcuu

SEQ ID NO: 27514 - RNA, 22 nt, Human
uguucaguuugcuaucauaauc

SEQ ID NO: 27515 - RNA, 22 nt, Human
uguucauaucauuuugaaagcu

SEQ ID NO: 27516 - RNA, 22 nt, Human
uguucauauuccuguccgcuga

SEQ ID NO: 27517 - RNA, 22 nt, Human
uguucauuaaacuacugugugg

SEQ ID NO: 27518 - RNA, 22 nt, Human
uguucauucgcuauugucuaug

SEQ ID NO: 27519 - RNA, 22 nt, Human
uguucauugcccccuguguaaa

SEQ ID NO: 27520 - RNA, 22 nt, Human
uguucauuuugaaguacuucaa

SEQ ID NO: 27521 - RNA, 20 nt, Human
uguuccaugacuauuuggau

SEQ ID NO: 27522 - RNA, 17 nt, Human
uguuccauuugaccacc

SEQ ID NO: 27523 - RNA, 22 nt, Human
uguucccuccuccccacugggu

SEQ ID NO: 27524 - RNA, 22 nt, Human
uguuccuguacugcuguggcuu

SEQ ID NO: 27525 - RNA, 22 nt, Human
uguuccuguguggaaaagggcc

SEQ ID NO: 27526 - RNA, 22 nt, Human
uguuccuguuuaaugugcucau

SEQ ID NO: 27527 - RNA, 22 nt, Human
uguuccuucacagcaguggaca

SEQ ID NO: 27528 - RNA, 22 nt, Human
uguucuaaauugcuagcuggaa

SEQ ID NO: 27529 - RNA, 22 nt, Human
uguucucuaagccacccauuuu

SEQ ID NO: 27530 - RNA, 22 nt, Human
uguucucucuggcugccaguac

SEQ ID NO: 27531 - RNA, 23 nt, Human
uguucucuuguccaggccuuaac

SEQ ID NO: 27532 - RNA, 22 nt, Human
uguucugccagcacuucucagc

SEQ ID NO: 27533 - RNA, 22 nt, Human
uguucuggagauaagagguaga

SEQ ID NO: 27534 - RNA, 22 nt, Human
uguucuggugaggccauggggu

SEQ ID NO: 27535 - RNA, 22 nt, Human
uguucuugggaaucuuacaguu

SEQ ID NO: 27536 - RNA, 20 nt, Human
uguugaauucauggugacuu

SEQ ID NO: 27537 - RNA, 22 nt, Human
uguugagacugagggagucagc

SEQ ID NO: 27538 - RNA, 22 nt, Human
uguugcaggccccugggguaug

SEQ ID NO: 27539 - RNA, 22 nt, Human
ugacacaugcaccagucuuuaa

SEQ ID NO: 27540 - RNA, 22 nt, Human
ugacaccacaacuagccauuga

SEQ ID NO: 27541 - RNA, 22 nt, Human
ugacacccaucugugccagucc

SEQ ID NO: 27542 - RNA, 22 nt, Human
ugacacccauuaucugugugac

SEQ ID NO: 27543 - RNA, 22 nt, Human
ugacacccucuccuggagagag

SEQ ID NO: 27544 - RNA, 22 nt, Human
ugacacugcaaauauaaauauu

SEQ ID NO: 27545 - RNA, 22 nt, Human
ugacacuuccgguaaaaaaugc

SEQ ID NO: 27546 - RNA, 22 nt, Human
ugacagacagcuucucauuuua

SEQ ID NO: 27547 - RNA, 22 nt, Human
ugacagagcauguagugacagc

SEQ ID NO: 27548 - RNA, 22 nt, Human
ugacagagucggggcaagcugu

SEQ ID NO: 27549 - RNA, 22 nt, Human
ugacagaguucggauugaguuu

SEQ ID NO: 27550 - RNA, 22 nt, Human
ugacagaugaagcuggggacca

SEQ ID NO: 27551 - RNA, 21 nt, Human
ugacagcauagagcagggagg

SEQ ID NO: 27552 - RNA, 22 nt, Human
ugacagcccaccucacaggauu

SEQ ID NO: 27553 - RNA, 22 nt, Human
ugacagccucacuuuguuaauu

SEQ ID NO: 27554 - RNA, 22 nt, Human
ugacaggacagagaaaugaccu

SEQ ID NO: 27555 - RNA, 22 nt, Human
ugacaggaguggcuagugggag

SEQ ID NO: 27556 - RNA, 22 nt, Human
ugacaggcacugcuguagugcu

SEQ ID NO: 27557 - RNA, 23 nt, Human
ugacaggcuuugcuccuucugcc

SEQ ID NO: 27558 - RNA, 22 nt, Human
ugacagggacaguggagaugga

SEQ ID NO: 27559 - RNA, 22 nt, Human
ugacagggggcagagguggcug

SEQ ID NO: 27560 - RNA, 22 nt, Human
ugacagggugauuaugagagcu

SEQ ID NO: 27561 - RNA, 19 nt, Human
ugacagguuuuauguguuu

SEQ ID NO: 27562 - RNA, 22 nt, Human
ugacaguagaagaugcuguuac

SEQ ID NO: 27563 - RNA, 22 nt, Human
ugacaguauacuugugauggga

SEQ ID NO: 27564 - RNA, 22 nt, Human
ugacagucugcaguuuuaaaaa

SEQ ID NO: 27565 - RNA, 22 nt, Human
ugacagugucaguuuccuaaua

SEQ ID NO: 27566 - RNA, 22 nt, Human
ugacagugugcccggagguuag

SEQ ID NO: 27567 - RNA, 21 nt, Human
ugacaguguggcauggaaggu

SEQ ID NO: 27568 - RNA, 22 nt, Human
ugacaguguuugcacuucaggu

SEQ ID NO: 27569 - RNA, 22 nt, Human
ugacaguugagcauguaagaga

SEQ ID NO: 27570 - RNA, 22 nt, Human
ugacauaaaccagugagcaaaa

SEQ ID NO: 27571 - RNA, 22 nt, Human
ugacauaauaauccaaacauac

SEQ ID NO: 27572 - RNA, 22 nt, Human
ugacaucauuaguaacauagcu

SEQ ID NO: 27573 - RNA, 22 nt, Human
ugacaucuggagucugggcugu

SEQ ID NO: 27574 - RNA, 22 nt, Human
ugacaucugucacccugcugac

SEQ ID NO: 27575 - RNA, 22 nt, Human
ugacaucuuugaucucauuuag

SEQ ID NO: 27576 - RNA, 22 nt, Human
ugacauguaagauggaaaagcg

SEQ ID NO: 27577 - RNA, 22 nt, Human
ugacauguauguuguuggcaug

SEQ ID NO: 27578 - RNA, 22 nt, Human
ugacauguccaggugguccugu

SEQ ID NO: 27579 - RNA, 22 nt, Human
ugacauguguaaucagcuccgu

SEQ ID NO: 27580 - RNA, 22 nt, Human
ugacauuauuaucaugucacca

SEQ ID NO: 27581 - RNA, 22 nt, Human
ugacauugguugcaagguacuc

SEQ ID NO: 27582 - RNA, 22 nt, Human
ugacauuugagcauacauguaa

SEQ ID NO: 27583 - RNA, 21 nt, Human
ugacauuuggauucauaguaa

SEQ ID NO: 27584 - RNA, 22 nt, Human
ugacauuuuaucaauaucacag

SEQ ID NO: 27585 - RNA, 22 nt, Human
ugacauuuuuauaagagucaaa

SEQ ID NO: 27586 - RNA, 22 nt, Human
ugacauuuuuguacaaagucag

SEQ ID NO: 27587 - RNA, 22 nt, Human
ugaccaaagaguugcuuguauu

SEQ ID NO: 27588 - RNA, 22 nt, Human
ugaccacuguagccacuuaaga

SEQ ID NO: 27589 - RNA, 21 nt, Human
ugaccagugccccauccuguc

SEQ ID NO: 27590 - RNA, 22 nt, Human
ugacccugaaauguagugguuu

SEQ ID NO: 27591 - RNA, 22 nt, Human
ugacccugagagcugaauggcu

SEQ ID NO: 27592 - RNA, 22 nt, Human
ugacccuuagaagcugcagcga

SEQ ID NO: 27593 - RNA, 21 nt, Human
ugacccuucuagcagaacaca

SEQ ID NO: 27594 - RNA, 21 nt, Human
ugacccuugccgagcuacauu

SEQ ID NO: 27595 - RNA, 22 nt, Human
ugacccuuggucuugcuuuucc

SEQ ID NO: 27596 - RNA, 22 nt, Human
ugacccuuguggcagaaaacag

SEQ ID NO: 27597 - RNA, 18 nt, Human
ugacccuuucucccugug

SEQ ID NO: 27598 - RNA, 22 nt, Human
ugaccgucuucccacuuucugu

SEQ ID NO: 27599 - RNA, 22 nt, Human
ugaccugacaugaauuaaaaac

SEQ ID NO: 27600 - RNA, 22 nt, Human
ugaccugucacauuuugaugaa

SEQ ID NO: 27601 - RNA, 22 nt, Human
ugaccuuauuugaaaauagaga

SEQ ID NO: 27602 - RNA, 22 nt, Human
ugaccuuucaacccuucuuggc

SEQ ID NO: 27603 - RNA, 22 nt, Human
ugacguuuuagguguuaaaucg

SEQ ID NO: 27604 - RNA, 22 nt, Human
ugacuagaauuguauuuagugu

SEQ ID NO: 27605 - RNA, 22 nt, Human
ugacuagaccuauaucuuuuug

SEQ ID NO: 27606 - RNA, 22 nt, Human
ugacucaggaggaaagacucca

SEQ ID NO: 27607 - RNA, 22 nt, Human
ugacucaguacaucuggaguug

SEQ ID NO: 27608 - RNA, 22 nt, Human
ugacucauauuucauggauacg

SEQ ID NO: 27609 - RNA, 22 nt, Human
ugacuccaaacagaaaacgaau

SEQ ID NO: 27610 - RNA, 22 nt, Human
ugacuccugguauggaugacag

SEQ ID NO: 27611 - RNA, 22 nt, Human
ugacucugcugugaaagcauuu

SEQ ID NO: 27612 - RNA, 22 nt, Human
ugacucugggguugaccagaug

SEQ ID NO: 27613 - RNA, 22 nt, Human
ugacugaaauugcauuuuaaaa

SEQ ID NO: 27614 - RNA, 22 nt, Human
ugacugagagagaacucagcuu

SEQ ID NO: 27615 - RNA, 22 nt, Human
ugacugaggcagccugaguuau

SEQ ID NO: 27616 - RNA, 22 nt, Human
ugacugaggccugauaacaguu

SEQ ID NO: 27617 - RNA, 22 nt, Human
ugacugugccuguugaaugaau

SEQ ID NO: 27618 - RNA, 22 nt, Human
ugacuucaaaggcucuacuccu

SEQ ID NO: 27619 - RNA, 22 nt, Human
ugacuucuagcauuuagcaacc

SEQ ID NO: 27620 - RNA, 22 nt, Human
ugacuuuacagauauguuuccu

SEQ ID NO: 27621 - RNA, 22 nt, Human
ugacuuuagagaugggagguca

SEQ ID NO: 27622 - RNA, 22 nt, Human
ugacuuugucccuuucaaaucc

SEQ ID NO: 27623 - RNA, 22 nt, Human
ugacuuugugccauuuuuauaa

SEQ ID NO: 27624 - RNA, 22 nt, Human
ugagaaaauuacuauaauuguc

SEQ ID NO: 27625 - RNA, 22 nt, Human
ugagaacaguuggaagcaguca

SEQ ID NO: 27626 - RNA, 22 nt, Human
ugagaacauuccucuuccuggc

SEQ ID NO: 27627 - RNA, 22 nt, Human
ugagaaccaagaccaagggccu

SEQ ID NO: 27628 - RNA, 22 nt, Human
ugagaaccaccuggaggugacu

SEQ ID NO: 27629 - RNA, 22 nt, Human
ugagaaccacgacugugcuuaa

SEQ ID NO: 27630 - RNA, 19 nt, Human
ugagaacuuuuacuuaugc

SEQ ID NO: 27631 - RNA, 22 nt, Human
ugagaagagcaaggaacugguu

SEQ ID NO: 27632 - RNA, 23 nt, Human
ugagaagccauuagagcaggugg

SEQ ID NO: 27633 - RNA, 20 nt, Human
ugagaagcuccugucuccuc

SEQ ID NO: 27634 - RNA, 22 nt, Human
ugagaagcucugaaacaguauc

SEQ ID NO: 27635 - RNA, 22 nt, Human
ugagaagcugcuugugcuguau

SEQ ID NO: 27636 - RNA, 22 nt, Human
uuacaaugcacucaccuuuaga

SEQ ID NO: 27637 - RNA, 22 nt, Human
uuacaauuacuugaucucagcu

SEQ ID NO: 27638 - RNA, 22 nt, Human
uuacacacagagcugggccugg

SEQ ID NO: 27639 - RNA, 21 nt, Human
uuacacacugcuucuagaaug

SEQ ID NO: 27640 - RNA, 22 nt, Human
uuacacagaugguuaguagagg

SEQ ID NO: 27641 - RNA, 22 nt, Human
uuacacaggcacuuaaaaugca

SEQ ID NO: 27642 - RNA, 22 nt, Human
uuacacagugaauuuacucaag

SEQ ID NO: 27643 - RNA, 22 nt, Human
uuacacagugguuaagucuggg

SEQ ID NO: 27644 - RNA, 22 nt, Human
uuacacaguugguaggggcaga

SEQ ID NO: 27645 - RNA, 22 nt, Human
uuacacaugaagguccaauguu

SEQ ID NO: 27646 - RNA, 22 nt, Human
uuacacauugcagaucaaaaug

SEQ ID NO: 27647 - RNA, 22 nt, Human
uuacacuaagcuacuucuauau

SEQ ID NO: 27648 - RNA, 22 nt, Human
ugagaaugaaucuuuugcuuuc

SEQ ID NO: 27649 - RNA, 22 nt, Human
ugagaauuuucaguuucacuuu

SEQ ID NO: 27650 - RNA, 22 nt, Human
ugagaauuuuuugucaugcauu

SEQ ID NO: 27651 - RNA, 22 nt, Human
ugagacaacagcuugugcugcu

SEQ ID NO: 27652 - RNA, 20 nt, Human
ugagacaaggcuggagagac

SEQ ID NO: 27653 - RNA, 22 nt, Human
ugagacaauauuaaccuaucuu

SEQ ID NO: 27654 - RNA, 22 nt, Human
ugagacaggagaggccccuccu

SEQ ID NO: 27655 - RNA, 19 nt, Human
ugagacagggauucaggug

SEQ ID NO: 27656 - RNA, 22 nt, Human
ugagaccuguagcuucacagag

SEQ ID NO: 27657 - RNA, 22 nt, Human
ugagaccuuggacuccauccuu

SEQ ID NO: 27658 - RNA, 22 nt, Human
ugagacuuggcacugaggaacu

SEQ ID NO: 27659 - RNA, 21 nt, Human
ugagagacugguggauacagg

SEQ ID NO: 27660 - RNA, 22 nt, Human
ugagagagggaugcacccuccu

SEQ ID NO: 27661 - RNA, 22 nt, Human
ugagagaggggacugccugcuu

SEQ ID NO: 27662 - RNA, 22 nt, Human
ugagagaugaacucugauaugu

SEQ ID NO: 27663 - RNA, 22 nt, Human
ugagagauugcuguauguuuug

SEQ ID NO: 27664 - RNA, 22 nt, Human
ugagagcaacacgcaguaguau

SEQ ID NO: 27665 - RNA, 22 nt, Human
ugagagcacacagaaauauuuu

SEQ ID NO: 27666 - RNA, 18 nt, Human
ugagagcauucgaggcaa

SEQ ID NO: 27667 - RNA, 22 nt, Human
ugagagccuaguagguggaaaa

SEQ ID NO: 27668 - RNA, 22 nt, Human
ugagagccuguguucaaaugcc

SEQ ID NO: 27669 - RNA, 22 nt, Human
ugagagcugcugagacuguccu

SEQ ID NO: 27670 - RNA, 22 nt, Human
ugagagcugggaaauguuagcu

SEQ ID NO: 27671 - RNA, 20 nt, Human
ugagaggacauuuuucaugu

SEQ ID NO: 27672 - RNA, 22 nt, Human
ugagaggguucccagggguuuc

SEQ ID NO: 27673 - RNA, 22 nt, Human
ugagagguaggaaaugaacaag

SEQ ID NO: 27674 - RNA, 22 nt, Human
ugagaggucauuaggccaugag

SEQ ID NO: 27675 - RNA, 22 nt, Human
ugagaguacuuauaugaacauu

SEQ ID NO: 27676 - RNA, 22 nt, Human
ugagaguauuuuggcauuauca

SEQ ID NO: 27677 - RNA, 22 nt, Human
ugagagucuguuccucuugcag

SEQ ID NO: 27678 - RNA, 19 nt, Human
ugagagugaggaaggcuuc

SEQ ID NO: 27679 - RNA, 22 nt, Human
ugagagugauugguucgaaugu

SEQ ID NO: 27680 - RNA, 22 nt, Human
ugagauaacauggaagaguagc

SEQ ID NO: 27681 - RNA, 22 nt, Human
ugagauaacuauucugucaacu

SEQ ID NO: 27682 - RNA, 22 nt, Human
ugagauaagcaaggauaaaggu

SEQ ID NO: 27683 - RNA, 22 nt, Human
ugagauaaggauguuauacucg

SEQ ID NO: 27684 - RNA, 22 nt, Human
ugagauaauaaauagcuuucuu

SEQ ID NO: 27685 - RNA, 22 nt, Human
ugagaugaagugauguaaaaca

SEQ ID NO: 27686 - RNA, 22 nt, Human
ugagaugcuaaagggcugcuca

SEQ ID NO: 27687 - RNA, 22 nt, Human
ugagauggagucucacucuguu

SEQ ID NO: 27688 - RNA, 22 nt, Human
ugagauggaguucugcucuugu

SEQ ID NO: 27689 - RNA, 22 nt, Human
ugagauggauuggguugguucc

SEQ ID NO: 27690 - RNA, 22 nt, Human
ugagaugggucaucagguuugg

SEQ ID NO: 27691 - RNA, 22 nt, Human
ugagaugguucacagagaaggc

SEQ ID NO: 27692 - RNA, 22 nt, Human
ugagauucccauuaauuuuaua

SEQ ID NO: 27693 - RNA, 22 nt, Human
ugagauuuuaauauugagaaaa

SEQ ID NO: 27694 - RNA, 23 nt, Human
ugagcaagugaccaacugucugu

SEQ ID NO: 27695 - RNA, 22 nt, Human
ugagcacaaguuugcaugugug

SEQ ID NO: 27696 - RNA, 22 nt, Human
ugagcacagcucgcaccagcuu

SEQ ID NO: 27697 - RNA, 22 nt, Human
ugagcaccaucuguuugugugc

SEQ ID NO: 27698 - RNA, 22 nt, Human
ugagcagaagauuggaacuuac

SEQ ID NO: 27699 - RNA, 22 nt, Human
ugagcagaagcccuccuggacu

SEQ ID NO: 27700 - RNA, 22 nt, Human
ugagcagaaguuauaaauaaga

SEQ ID NO: 27701 - RNA, 22 nt, Human
ugagcagacucugcagagccac

SEQ ID NO: 27702 - RNA, 22 nt, Human
ugagcagacuugaugaggcagc

SEQ ID NO: 27703 - RNA, 22 nt, Human
ugagcagagacuucaagggcag

SEQ ID NO: 27704 - RNA, 22 nt, Human
ugagcagagaugacugggcauu

SEQ ID NO: 27705 - RNA, 22 nt, Human
ugagcagagcaauaggacucuc

SEQ ID NO: 27706 - RNA, 22 nt, Human
ugagcagauggaggcuucugca

SEQ ID NO: 27707 - RNA, 22 nt, Human
ugagcagaugucuaacuuuuac

SEQ ID NO: 27708 - RNA, 23 nt, Human
ugagcagcuaaaggugaugcggg

SEQ ID NO: 27709 - RNA, 22 nt, Human
ugagcagcuacuguguucaggg

SEQ ID NO: 27710 - RNA, 22 nt, Human
ugagcaggcucccacuucagug

SEQ ID NO: 27711 - RNA, 22 nt, Human
ugagcaguaacagcucacaggg

SEQ ID NO: 27712 - RNA, 22 nt, Human
ugagcagucagacaagcaucac

SEQ ID NO: 27713 - RNA, 22 nt, Human
ugagcagucauccauuucuccu

SEQ ID NO: 27714 - RNA, 22 nt, Human
ugagcagugaugcguuuuguuu

SEQ ID NO: 27715 - RNA, 22 nt, Human
ugagcaguggcuccugcuggac

SEQ ID NO: 27716 - RNA, 22 nt, Human
ugagcaguggggccugcauucu

SEQ ID NO: 27717 - RNA, 22 nt, Human
ugagcagugguguuuuucuauc

SEQ ID NO: 27718 - RNA, 22 nt, Human
ugagcauagcccuucuaguguu

SEQ ID NO: 27719 - RNA, 19 nt, Human
ugagcaugcgagcugagaa

SEQ ID NO: 27720 - RNA, 22 nt, Human
ugagccacagugagagcuccug

SEQ ID NO: 27721 - RNA, 22 nt, Human
ugagccagaggaggcugugugg

SEQ ID NO: 27722 - RNA, 22 nt, Human
ugagccagaguggagugugccu

SEQ ID NO: 27723 - RNA, 22 nt, Human
ugagccagccucagaagucacg

SEQ ID NO: 27724 - RNA, 22 nt, Human
ugagccaggcccagugggguca

SEQ ID NO: 27725 - RNA, 22 nt, Human
ugagccaggucucacucaccuu

SEQ ID NO: 27726 - RNA, 22 nt, Human
ugagccagguuaagacaggagc

SEQ ID NO: 27727 - RNA, 22 nt, Human
ugagccagucugucugggugaa

SEQ ID NO: 27728 - RNA, 22 nt, Human
ugagccaguucuucagauccau

SEQ ID NO: 27729 - RNA, 22 nt, Human
ugagcccagcgucccguucugu

SEQ ID NO: 27730 - RNA, 22 nt, Human
ugagcccaggaguaugaggcug

SEQ ID NO: 27731 - RNA, 22 nt, Human
ugagccccggaguuucaggcug

SEQ ID NO: 27732 - RNA, 22 nt, Human
ugagcccuaagggucaagcagg

SEQ ID NO: 27733 - RNA, 22 nt, Human
ugagcccuccaaacccaggauu

SEQ ID NO: 27734 - RNA, 22 nt, Human
ugagcccuggagcccucuguua

SEQ ID NO: 27735 - RNA, 22 nt, Human
ugagcccuggcucuuucacuua

SEQ ID NO: 27736 - RNA, 22 nt, Human
ugagcccugugacugcuuugag

SEQ ID NO: 27737 - RNA, 18 nt, Human
ugagcccuuaucuuuggc

SEQ ID NO: 27738 - RNA, 22 nt, Human
ugagccuggccugcagagacca

SEQ ID NO: 27739 - RNA, 22 nt, Human
ugagccugggagauggaggcug

SEQ ID NO: 27740 - RNA, 22 nt, Human
ugagccuggggccugggcagcg

SEQ ID NO: 27741 - RNA, 22 nt, Human
ugagccuguccugugcauguga

SEQ ID NO: 27742 - RNA, 23 nt, Human
ugagccuguuaauacuggcucug

SEQ ID NO: 27743 - RNA, 22 nt, Human
ugagcgugcaguaguguuggua

SEQ ID NO: 27744 - RNA, 22 nt, Human
ugagcuacacacuaggcauggg

SEQ ID NO: 27745 - RNA, 22 nt, Human
ugagcuagggcuggugaggagc

SEQ ID NO: 27746 - RNA, 22 nt, Human
ugagcuagguccugugucagcu

SEQ ID NO: 27747 - RNA, 22 nt, Human
ugagcugaguuuaaaagcugcu

SEQ ID NO: 27748 - RNA, 22 nt, Human
ugagcugcauuacagccucugu

SEQ ID NO: 27749 - RNA, 22 nt, Human
ugagcuggcuugucaaccaggg

SEQ ID NO: 27750 - RNA, 22 nt, Human
ugagcugggcugggcugagcug

SEQ ID NO: 27751 - RNA, 22 nt, Human
ugagcuggggucagcuccccug

SEQ ID NO: 27752 - RNA, 23 nt, Human
ugagcugguauuguccaucucca

SEQ ID NO: 27753 - RNA, 22 nt, Human
ugagcuguaaggcugucacuga

SEQ ID NO: 27754 - RNA, 22 nt, Human
ugagcuguagcagaugcuguug

SEQ ID NO: 27755 - RNA, 22 nt, Human
ugagcugucaagguacagugaa

SEQ ID NO: 27756 - RNA, 22 nt, Human
ucuggggagugccuaaguggaa

SEQ ID NO: 27757 - RNA, 21 nt, Human
ucugcacagccccgcaggagg

SEQ ID NO: 27758 - RNA, 22 nt, Human
ucugcacaucccccaaaguauu

SEQ ID NO: 27759 - RNA, 22 nt, Human
ucugcaccuccugcuugcuaga

SEQ ID NO: 27760 - RNA, 22 nt, Human
uuaucucucacuuuuaaggaca

SEQ ID NO: 27761 - RNA, 18 nt, Human
uuaucugcugcaaagggu

SEQ ID NO: 27762 - RNA, 22 nt, Human
uuaucugucuaucaagacuagc

SEQ ID NO: 27763 - RNA, 22 nt, Human
uuaucugugauccuaaaugucu

SEQ ID NO: 27764 - RNA, 22 nt, Human
uuaucuuggcaauucuaaggua

SEQ ID NO: 27765 - RNA, 22 nt, Human
uuaucuuguagagauauuuucg

SEQ ID NO: 27766 - RNA, 22 nt, Human
uuaugaaaacaaucaguaggca

SEQ ID NO: 27767 - RNA, 19 nt, Human
uuaugaaggcuggggggag

SEQ ID NO: 27768 - RNA, 22 nt, Human
uuaugacagaaaugaaaagcug

SEQ ID NO: 27769 - RNA, 22 nt, Human
uuaugacaggaaaaucacagaa

SEQ ID NO: 27770 - RNA, 22 nt, Human
uuaugacauaugaguacaagua

SEQ ID NO: 27771 - RNA, 22 nt, Human
uuaugagcuaaguuguggcccc

SEQ ID NO: 27772 - RNA, 22 nt, Human
uuaugauuuagaaagauucacu

SEQ ID NO: 27773 - RNA, 22 nt, Human
uuaugauuugccacagauuggu

SEQ ID NO: 27774 - RNA, 22 nt, Human
uuaugcaacaggugagcagaca

SEQ ID NO: 27775 - RNA, 23 nt, Human
uuaugcaagcuuccuggucucag

SEQ ID NO: 27776 - RNA, 22 nt, Human
uuaugcuaagugaaauaagcca

SEQ ID NO: 27777 - RNA, 22 nt, Human
uuaugcuguuaggaaaaucaaa

SEQ ID NO: 27778 - RNA, 22 nt, Human
uuaugcuuccugauuggacucu

SEQ ID NO: 27779 - RNA, 22 nt, Human
uuauggaaaugaaauuuuauug

SEQ ID NO: 27780 - RNA, 23 nt, Human
uuauggagugccagacauuuggc

SEQ ID NO: 27781 - RNA, 22 nt, Human
uuauggcuaaauuucaauauua

SEQ ID NO: 27782 - RNA, 22 nt, Human
uuauggcuuaaauacuacaggg

SEQ ID NO: 27783 - RNA, 22 nt, Human
uuaugguaauuaaaacauguau

SEQ ID NO: 27784 - RNA, 22 nt, Human
uuaugguaggagcugucaguuu

SEQ ID NO: 27785 - RNA, 22 nt, Human
uuauguacccacucauauuccc

SEQ ID NO: 27786 - RNA, 22 nt, Human
uuaugugagguucagcuuuauc

SEQ ID NO: 27787 - RNA, 22 nt, Human
uuaugugccacuuuuugaagau

SEQ ID NO: 27788 - RNA, 22 nt, Human
uuauguguaccucaaucugagg

SEQ ID NO: 27789 - RNA, 20 nt, Human
uuauguguaccugugcuccc

SEQ ID NO: 27790 - RNA, 22 nt, Human
uuauguguguacaugcauaugu

SEQ ID NO: 27791 - RNA, 22 nt, Human
uuauguuugaguauaugacuca

SEQ ID NO: 27792 - RNA, 22 nt, Human
uuauuaguguugauauuaggau

SEQ ID NO: 27793 - RNA, 22 nt, Human
uuauuaugccauuaccucccug

SEQ ID NO: 27794 - RNA, 22 nt, Human
uuauuaugugcuagagaaugua

SEQ ID NO: 27795 - RNA, 22 nt, Human
uuauuauuuuguguacagcaaa

SEQ ID NO: 27796 - RNA, 22 nt, Human
uuauucaccaguguaaaacacu

SEQ ID NO: 27797 - RNA, 22 nt, Human
uuauucaccgcaggugcuuccc

SEQ ID NO: 27798 - RNA, 22 nt, Human
uuauucacucauuaaagcagga

SEQ ID NO: 27799 - RNA, 22 nt, Human
uuauucacucauuuaacauuau

SEQ ID NO: 27800 - RNA, 22 nt, Human
uuauucagcucucuagaggcac

SEQ ID NO: 27801 - RNA, 22 nt, Human
uuauucaggcucucuuuggcua

SEQ ID NO: 27802 - RNA, 22 nt, Human
uuauucaggucauggacuguca

SEQ ID NO: 27803 - RNA, 22 nt, Human
uuauucagugcauauauuaaaa

SEQ ID NO: 27804 - RNA, 22 nt, Human
uuauucaguuuguguagaggug

SEQ ID NO: 27805 - RNA, 22 nt, Human
uuauucaucagugcauuaauuu

SEQ ID NO: 27806 - RNA, 22 nt, Human
uuauuccauagaagucaaggaa

SEQ ID NO: 27807 - RNA, 22 nt, Human
uuauuccauugucuuuugacuu

SEQ ID NO: 27808 - RNA, 22 nt, Human
uuauucugccaggagcgucagu

SEQ ID NO: 27809 - RNA, 22 nt, Human
uuauucuguagaaccuaguaca

SEQ ID NO: 27810 - RNA, 22 nt, Human
uuauucugucaaacuuauacau

SEQ ID NO: 27811 - RNA, 22 nt, Human
uuauucuguuggcccucucauc

SEQ ID NO: 27812 - RNA, 18 nt, Human
uuauucuuccaggccacc

SEQ ID NO: 27813 - RNA, 22 nt, Human
uuauucuuuaaacauauauguu

SEQ ID NO: 27814 - RNA, 22 nt, Human
uuauucuuuucuccagaauccc

SEQ ID NO: 27815 - RNA, 21 nt, Human
uuauugaauguuuaccgugug

SEQ ID NO: 27816 - RNA, 22 nt, Human
uuauugcaccuuccucacuaac

SEQ ID NO: 27817 - RNA, 22 nt, Human
uuauugccauccuggaaccuag

SEQ ID NO: 27818 - RNA, 22 nt, Human
uuauugccugucauuauugaau

SEQ ID NO: 27819 - RNA, 22 nt, Human
uuauugcugcuaacauuuuaug

SEQ ID NO: 27820 - RNA, 22 nt, Human
uuauugcuuuggaaaacacuca

SEQ ID NO: 27821 - RNA, 22 nt, Human
uuauugucaaaaacaggacacu

SEQ ID NO: 27822 - RNA, 22 nt, Human
uuauuguggacuacuguucugg

SEQ ID NO: 27823 - RNA, 22 nt, Human
uuauugugugcguuagccuaug

SEQ ID NO: 27824 - RNA, 22 nt, Human
uuauuuaaugugaucugaagag

SEQ ID NO: 27825 - RNA, 22 nt, Human
uuauuuauaucucugcaguuua

SEQ ID NO: 27826 - RNA, 22 nt, Human
uuauuuauuguguaccuacugu

SEQ ID NO: 27827 - RNA, 22 nt, Human
uuauuucaaaagagcuuggggu

SEQ ID NO: 27828 - RNA, 21 nt, Human
uuauuucacauggacuuccag

SEQ ID NO: 27829 - RNA, 20 nt, Human
uuauuucaguugcuagauug

SEQ ID NO: 27830 - RNA, 22 nt, Human
uuauuucauauaauguuaucaa

SEQ ID NO: 27831 - RNA, 22 nt, Human
uuauuucuacuauuuugccuga

SEQ ID NO: 27832 - RNA, 20 nt, Human
uuauuucucauucuccuacu

SEQ ID NO: 27833 - RNA, 22 nt, Human
uuauuugaaaagaagguuacgu

SEQ ID NO: 27834 - RNA, 22 nt, Human
uuauuugcccauguuuagcaga

SEQ ID NO: 27835 - RNA, 23 nt, Human
uuauuuggauuuuaguggaaaga

SEQ ID NO: 27836 - RNA, 22 nt, Human
uuauuuggcaaugcuucaccau

SEQ ID NO: 27837 - RNA, 22 nt, Human
uuauuuguaucaaggacgguug

SEQ ID NO: 27838 - RNA, 22 nt, Human
uuauuuguggcauaugagacga

SEQ ID NO: 27839 - RNA, 22 nt, Human
uuauuuguggcauccauguugg

SEQ ID NO: 27840 - RNA, 22 nt, Human
uuauuuucagcuaggaaagcca

SEQ ID NO: 27841 - RNA, 21 nt, Human
uucaaaaugguguguuugucu

SEQ ID NO: 27842 - RNA, 22 nt, Human
uucaaacaacucauuuaugcaa

SEQ ID NO: 27843 - RNA, 22 nt, Human
uucaaacacagacagcagcaug

SEQ ID NO: 27844 - RNA, 22 nt, Human
uucaaacacugcuuugagaggg

SEQ ID NO: 27845 - RNA, 22 nt, Human
uucaaacaguguagaauauaug

SEQ ID NO: 27846 - RNA, 22 nt, Human
uucaaacuaguuaaaagucaga

SEQ ID NO: 27847 - RNA, 22 nt, Human
uucaaacucacacuagggagac

SEQ ID NO: 27848 - RNA, 22 nt, Human
uucaaacucugaguaguucugc

SEQ ID NO: 27849 - RNA, 22 nt, Human
uucaaacuguguaauuuauaaa

SEQ ID NO: 27850 - RNA, 22 nt, Human
uucaaagauaauuaccaaacau

SEQ ID NO: 27851 - RNA, 22 nt, Human
uucaaagauggagggauagauu

SEQ ID NO: 27852 - RNA, 22 nt, Human
uucaaagcaagacacaauuccu

SEQ ID NO: 27853 - RNA, 22 nt, Human
uucaaagcugcagacuccuggg

SEQ ID NO: 27854 - RNA, 22 nt, Human
uucaaaguuucaaucuguauca

SEQ ID NO: 27855 - RNA, 22 nt, Human
uucaaaucagaccgaaggcaac

SEQ ID NO: 27856 - RNA, 22 nt, Human
uucaacaaaauauauuuuucca

SEQ ID NO: 27857 - RNA, 21 nt, Human
uucaacaaagggaauaaguuu

SEQ ID NO: 27858 - RNA, 22 nt, Human
uucaacaacuugguucaaaugg

SEQ ID NO: 27859 - RNA, 22 nt, Human
uucaacaaggcugucaaaaguu

SEQ ID NO: 27860 - RNA, 22 nt, Human
uucaacacaggaacaugauaua

SEQ ID NO: 27861 - RNA, 22 nt, Human
uucaacauagcugaggcauaua

SEQ ID NO: 27862 - RNA, 22 nt, Human
uucaacaucaagaaugcaugga

SEQ ID NO: 27863 - RNA, 22 nt, Human
uucaacaugcuuuauuucuaaa

SEQ ID NO: 27864 - RNA, 22 nt, Human
uucaacauguucuacauaaggg

SEQ ID NO: 27865 - RNA, 22 nt, Human
uucaacauuacacaggcaauuc

SEQ ID NO: 27866 - RNA, 22 nt, Human
ucuggaggccauagggaaggau

SEQ ID NO: 27867 - RNA, 22 nt, Human
ucuggagggcccacauccacaa

SEQ ID NO: 27868 - RNA, 22 nt, Human
ucuggaguggacccagagcacu

SEQ ID NO: 27869 - RNA, 22 nt, Human
ucuggaguggaggugccuuggg

SEQ ID NO: 27870 - RNA, 22 nt, Human
ucuggaguggcagucaucugaa

SEQ ID NO: 27871 - RNA, 22 nt, Human
ucuggagugggacuuugcaucu

SEQ ID NO: 27872 - RNA, 22 nt, Human
ucuggaguuccugcaggcugug

SEQ ID NO: 27873 - RNA, 22 nt, Human
ucuggaguuugagcacuucaau

SEQ ID NO: 27874 - RNA, 22 nt, Human
ucuggaguuuuuucugucugug

SEQ ID NO: 27875 - RNA, 22 nt, Human
ugaguaauucacaaaacagaug

SEQ ID NO: 27876 - RNA, 22 nt, Human
ugaguacucggagugcuuugga

SEQ ID NO: 27877 - RNA, 22 nt, Human
ugaguacuuuauguuaguuauu

SEQ ID NO: 27878 - RNA, 22 nt, Human
ugaguagacgugaucuaguaac

SEQ ID NO: 27879 - RNA, 22 nt, Human
ugaguagagaauucagcuaagg

SEQ ID NO: 27880 - RNA, 22 nt, Human
ugaguagauccaagacuguccu

SEQ ID NO: 27881 - RNA, 22 nt, Human
ugaguagcggcuauguguaacu

SEQ ID NO: 27882 - RNA, 22 nt, Human
ugaguauccuauaugguguaag

SEQ ID NO: 27883 - RNA, 22 nt, Human
ugaguauuccuuaucugaaaug

SEQ ID NO: 27884 - RNA, 22 nt, Human
ugagucacauccauuuuugugu

SEQ ID NO: 27885 - RNA, 23 nt, Human
ugagucaccacaguuacagucac

SEQ ID NO: 27886 - RNA, 20 nt, Human
ugagucagcugcaugggugg

SEQ ID NO: 27887 - RNA, 22 nt, Human
ugaguccaagagccagugggaa

SEQ ID NO: 27888 - RNA, 22 nt, Human
ugaguccagaugggccagcagg

SEQ ID NO: 27889 - RNA, 22 nt, Human
ugaguccauaguggauccuuca

SEQ ID NO: 27890 - RNA, 22 nt, Human
ugaguccgaaguugcagugagc

SEQ ID NO: 27891 - RNA, 22 nt, Human
ugagucuagguagagaaaugca

SEQ ID NO: 27892 - RNA, 22 nt, Human
ugagucugcuccugguagcaga

SEQ ID NO: 27893 - RNA, 22 nt, Human
ugagugaaaaauuugccuggag

SEQ ID NO: 27894 - RNA, 22 nt, Human
ugagugaaauucugguaaagga

SEQ ID NO: 27895 - RNA, 22 nt, Human
ugagugaggcugggcagucccu

SEQ ID NO: 27896 - RNA, 22 nt, Human
ugagugaggugcuuagggcaca

SEQ ID NO: 27897 - RNA, 22 nt, Human
ugagugccuaccaagugcugga

SEQ ID NO: 27898 - RNA, 22 nt, Human
ugagugccugaacauagaguag

SEQ ID NO: 27899 - RNA, 20 nt, Human
ugagugcuccauucugccca

SEQ ID NO: 27900 - RNA, 22 nt, Human
ugagugcucuguaugugccaga

SEQ ID NO: 27901 - RNA, 22 nt, Human
ugaguggaguagugaaugcauu

SEQ ID NO: 27902 - RNA, 17 nt, Human
ugaguggccgggggaca

SEQ ID NO: 27903 - RNA, 22 nt, Human
ugagugggaccugcguguguca

SEQ ID NO: 27904 - RNA, 22 nt, Human
ugaguguauaucaggagagagc

SEQ ID NO: 27905 - RNA, 22 nt, Human
ugaguguauaugaagguuguaa

SEQ ID NO: 27906 - RNA, 22 nt, Human
ugagugucuggucauggcaggc

SEQ ID NO: 27907 - RNA, 22 nt, Human
ugagugugcagggaaguggcgg

SEQ ID NO: 27908 - RNA, 23 nt, Human
ugaguguggggacagugguuugc

SEQ ID NO: 27909 - RNA, 22 nt, Human
ugaguguuguaaccauaugauu

SEQ ID NO: 27910 - RNA, 21 nt, Human
ugaguuaaaauggagagucuu

SEQ ID NO: 27911 - RNA, 22 nt, Human
ugaguuagcucuauucuuuugg

SEQ ID NO: 27912 - RNA, 22 nt, Human
ugaguuauugagaaauaacugc

SEQ ID NO: 27913 - RNA, 22 nt, Human
ugaguucauauaguucaagaua

SEQ ID NO: 27914 - RNA, 22 nt, Human
ugaguucauuugagugaacacu

SEQ ID NO: 27915 - RNA, 23 nt, Human
ugaguucuaggcuuaaaacuagc

SEQ ID NO: 27916 - RNA, 22 nt, Human
ugaguucuccaagagaagguau

SEQ ID NO: 27917 - RNA, 22 nt, Human
ugaguucugacugugaugccag

SEQ ID NO: 27918 - RNA, 19 nt, Human
ugaguucugugguucucaa

SEQ ID NO: 27919 - RNA, 22 nt, Human
ugaguuuaaugauauuuauaug

SEQ ID NO: 27920 - RNA, 22 nt, Human
ugaguuuagugugagacuuauc

SEQ ID NO: 27921 - RNA, 21 nt, Human
ugaguuucagaggggaaggaa

SEQ ID NO: 27922 - RNA, 22 nt, Human
ugaguuuugucuugcuagaagu

SEQ ID NO: 27923 - RNA, 22 nt, Human
ugaguuuuuucaacauaugaag

SEQ ID NO: 27924 - RNA, 22 nt, Human
ugauaaacauuuuaggaacuaa

SEQ ID NO: 27925 - RNA, 22 nt, Human
ugauaaacuggagagguggagg

SEQ ID NO: 27926 - RNA, 22 nt, Human
ugauacaaucaugagagaggac

SEQ ID NO: 27927 - RNA, 22 nt, Human
ugauagaagcagaagcauacca

SEQ ID NO: 27928 - RNA, 22 nt, Human
ugauaggcuuaauuuuccuguc

SEQ ID NO: 27929 - RNA, 22 nt, Human
ugauaucuaagaaauucuacca

SEQ ID NO: 27930 - RNA, 22 nt, Human
ugauaugcauguaagggagaca

SEQ ID NO: 27931 - RNA, 22 nt, Human
ugauaugugaagcuauuaguuc

SEQ ID NO: 27932 - RNA, 22 nt, Human
ugauauuuaagcaaaaauaugg

SEQ ID NO: 27933 - RNA, 22 nt, Human
ugauauuuuucacuggccucug

SEQ ID NO: 27934 - RNA, 22 nt, Human
ugaucaaagugcuggaauuaca

SEQ ID NO: 27935 - RNA, 21 nt, Human
ugaucacaugaaaaccaugca

SEQ ID NO: 27936 - RNA, 22 nt, Human
ugaucagacaguuaugugcaug

SEQ ID NO: 27937 - RNA, 22 nt, Human
ugaucauuaucaaacuggucau

SEQ ID NO: 27938 - RNA, 22 nt, Human
ugauccauauguguuacuucuc

SEQ ID NO: 27939 - RNA, 22 nt, Human
ugaucccaaucuuuccugcucc

SEQ ID NO: 27940 - RNA, 22 nt, Human
ugaucugagagcagaucaccau

SEQ ID NO: 27941 - RNA, 19 nt, Human
ugaucuggaaggaaccagg

SEQ ID NO: 27942 - RNA, 22 nt, Human
ugaucuggaauucccuguggua

SEQ ID NO: 27943 - RNA, 22 nt, Human
ugaucuuuucuauuuaugguag

SEQ ID NO: 27944 - RNA, 22 nt, Human
ugaugaaaguucaguagugaau

SEQ ID NO: 27945 - RNA, 22 nt, Human
ugaugaaugucauacauaauga

SEQ ID NO: 27946 - RNA, 22 nt, Human
ugaugacuauauaugacuagug

SEQ ID NO: 27947 - RNA, 22 nt, Human
ugaugaggacccaucaccuggu

SEQ ID NO: 27948 - RNA, 22 nt, Human
ugaugaggcauaugcuacacau

SEQ ID NO: 27949 - RNA, 22 nt, Human
ugaugaggcuucuuggugaaca

SEQ ID NO: 27950 - RNA, 22 nt, Human
ugaugagguggauucaaagcag

SEQ ID NO: 27951 - RNA, 22 nt, Human
ugaugaguuuacucuuuucuaa

SEQ ID NO: 27952 - RNA, 22 nt, Human
ugaugauuucauuucuagcugu

SEQ ID NO: 27953 - RNA, 18 nt, Human
ugaugcaagagugagcua

SEQ ID NO: 27954 - RNA, 22 nt, Human
ugaugcaauguuuacaucuuga

SEQ ID NO: 27955 - RNA, 22 nt, Human
ugaugcagaauccuagaguguc

SEQ ID NO: 27956 - RNA, 22 nt, Human
ugaugcccccaaaucuggcuca

SEQ ID NO: 27957 - RNA, 22 nt, Human
ugaugcucuccuaauaugaaaa

SEQ ID NO: 27958 - RNA, 22 nt, Human
ugaugcugagccugggacugac

SEQ ID NO: 27959 - RNA, 22 nt, Human
ugaugcugucaaggaggugaac

SEQ ID NO: 27960 - RNA, 22 nt, Human
ugaugcuguuccaguuauauug

SEQ ID NO: 27961 - RNA, 22 nt, Human
ugaugcuucacgcugaauaugc

SEQ ID NO: 27962 - RNA, 22 nt, Human
ugauggaaauaaaagcauagcu

SEQ ID NO: 27963 - RNA, 22 nt, Human
ugauggaaauguucuguaucug

SEQ ID NO: 27964 - RNA, 22 nt, Human
ugauggaagagcuaacaauauc

SEQ ID NO: 27965 - RNA, 22 nt, Human
ugauggauguggcucuggagcu

SEQ ID NO: 27966 - RNA, 23 nt, Human
ugauggccgcccuuugcccuguc

SEQ ID NO: 27967 - RNA, 22 nt, Human
ugauggcucauguuuggggaug

SEQ ID NO: 27968 - RNA, 22 nt, Human
ugauggcuuauggagagagcaa

SEQ ID NO: 27969 - RNA, 22 nt, Human
ugaugggaaaaugaggccuggg

SEQ ID NO: 27970 - RNA, 22 nt, Human
ugaugguaaacaaagacauuua

SEQ ID NO: 27971 - RNA, 20 nt, Human
ugaugguauuaggaggugug

SEQ ID NO: 27972 - RNA, 22 nt, Human
ugaugguugauuauaaaucagu

SEQ ID NO: 27973 - RNA, 22 nt, Human
ugaugugaacucuugauaugau

SEQ ID NO: 27974 - RNA, 22 nt, Human
ugauguguggcaguuaaacugu

SEQ ID NO: 27975 - RNA, 22 nt, Human
uucagcaaauggcuugagauaa

SEQ ID NO: 27976 - RNA, 22 nt, Human
uucagcaaggcaugugcaggag

SEQ ID NO: 27977 - RNA, 22 nt, Human
uucagcacaagacuagacaggu

SEQ ID NO: 27978 - RNA, 22 nt, Human
uucagcaccuggaauagcaccu

SEQ ID NO: 27979 - RNA, 22 nt, Human
uucagcaggcgguagcugccac

SEQ ID NO: 27980 - RNA, 19 nt, Human
uucagcaggcugaagcuuc

SEQ ID NO: 27981 - RNA, 22 nt, Human
uucagcagugcagacacccagu

SEQ ID NO: 27982 - RNA, 19 nt, Human
uucagcagugucugcucuu

SEQ ID NO: 27983 - RNA, 22 nt, Human
uucagcaugaaaggauuugagu

SEQ ID NO: 27984 - RNA, 23 nt, Human
uucagcaugaagagugaaggcug

SEQ ID NO: 27985 - RNA, 19 nt, Human
uucagcauuauauucuagc

SEQ ID NO: 27986 - RNA, 22 nt, Human
uucagcuauaacauugagacuu

SEQ ID NO: 27987 - RNA, 22 nt, Human
uucagcuaugcgcuuugggcaa

SEQ ID NO: 27988 - RNA, 22 nt, Human
uucagcuauggagucuuaguua

SEQ ID NO: 27989 - RNA, 22 nt, Human
uucagcucuaguaagcagacac

SEQ ID NO: 27990 - RNA, 22 nt, Human
uucagcuugaaucuggcuuuga

SEQ ID NO: 27991 - RNA, 22 nt, Human
uucagcuugcugacugcggcag

SEQ ID NO: 27992 - RNA, 23 nt, Human
uucaggaaaugaauacagacaca

SEQ ID NO: 27993 - RNA, 22 nt, Human
ucuggaucccaccgccacacac

SEQ ID NO: 27994 - RNA, 22 nt, Human
ucuggaugaaagggcuauauau

SEQ ID NO: 27995 - RNA, 22 nt, Human
ucuggaugacagaauggucaua

SEQ ID NO: 27996 - RNA, 22 nt, Human
ucuggaugcucugagcccaagg

SEQ ID NO: 27997 - RNA, 22 nt, Human
ucuggauuuguggaaaaucugc

SEQ ID NO: 27998 - RNA, 22 nt, Human
ucuggcaaaggcaaccacaguu

SEQ ID NO: 27999 - RNA, 22 nt, Human
ucuggcaccacugagucugcag

SEQ ID NO: 28000 - RNA, 22 nt, Human
ucuggcagaaggcagaaauuca

SEQ ID NO: 28001 - RNA, 22 nt, Human
ucuggcagaagugcugucagua

SEQ ID NO: 28002 - RNA, 22 nt, Human
ucuggcagaucuucccacguuu

SEQ ID NO: 28003 - RNA, 22 nt, Human
ucuggcagcuauccucuggcca

SEQ ID NO: 28004 - RNA, 22 nt, Human
ucuggcagcucuccucggcgga

SEQ ID NO: 28005 - RNA, 21 nt, Human
ucuggcaggaagacggauggg

SEQ ID NO: 28006 - RNA, 22 nt, Human
ucuggcaggguguguauuuaca

SEQ ID NO: 28007 - RNA, 22 nt, Human
ucuggcagugaagucaugaggu

SEQ ID NO: 28008 - RNA, 22 nt, Human
ucuggcaguggaugagggcagc

SEQ ID NO: 28009 - RNA, 22 nt, Human
ucuggcaguuccuuguugauau

SEQ ID NO: 28010 - RNA, 22 nt, Human
ucuggcaguugccgcuucaguc

SEQ ID NO: 28011 - RNA, 22 nt, Human
ucuggcaucuguuuucauauuu

SEQ ID NO: 28012 - RNA, 22 nt, Human
ucuggcauuuuggcugggaaac

SEQ ID NO: 28013 - RNA, 22 nt, Human
ucuggccacuaauaggucucac

SEQ ID NO: 28014 - RNA, 22 nt, Human
ucuggccagaaagacuugaugu

SEQ ID NO: 28015 - RNA, 22 nt, Human
ucuggccagcaugagaccuggu

SEQ ID NO: 28016 - RNA, 22 nt, Human
ucuggccaggggucccugaagg

SEQ ID NO: 28017 - RNA, 22 nt, Human
ucuggccaguagauguggguug

SEQ ID NO: 28018 - RNA, 22 nt, Human
ucuggccagugaaaugcagaau

SEQ ID NO: 28019 - RNA, 22 nt, Human
ucuggccccuggucucuggugu

SEQ ID NO: 28020 - RNA, 21 nt, Human
ucuggcccucacagucacacc

SEQ ID NO: 28021 - RNA, 22 nt, Human
ucuggcccugcugcugugagca

SEQ ID NO: 28022 - RNA, 22 nt, Human
ucuggcucaggagcuguguuca

SEQ ID NO: 28023 - RNA, 22 nt, Human
ucuggcuccacuuucuucauuu

SEQ ID NO: 28024 - RNA, 19 nt, Human
ucuggcuccugccaggcug

SEQ ID NO: 28025 - RNA, 22 nt, Human
ucuggcuccuggcuccacugcc

SEQ ID NO: 28026 - RNA, 22 nt, Human
ucuggcucggauuugucuagca

SEQ ID NO: 28027 - RNA, 22 nt, Human
ucuggcucuauaacuccuagcu

SEQ ID NO: 28028 - RNA, 22 nt, Human
ucuggcucucauacucgccagu

SEQ ID NO: 28029 - RNA, 22 nt, Human
ucuggcucuguguccccaccca

SEQ ID NO: 28030 - RNA, 22 nt, Human
ucuggcugcaccauuauaguag

SEQ ID NO: 28031 - RNA, 22 nt, Human
ucuggcugcguggccuuuagca

SEQ ID NO: 28032 - RNA, 22 nt, Human
ucuggcuguguaauauguguag

SEQ ID NO: 28033 - RNA, 22 nt, Human
ucuggcuguuaggccugaccuu

SEQ ID NO: 28034 - RNA, 22 nt, Human
ucuggcuucuccuagagcaaug

SEQ ID NO: 28035 - RNA, 22 nt, Human
ucuggcuuguguccuuccuugc

SEQ ID NO: 28036 - RNA, 22 nt, Human
ucuggcuuuccuggagcaagaa

SEQ ID NO: 28037 - RNA, 22 nt, Human
ucuggcuuucugacucuacaac

SEQ ID NO: 28038 - RNA, 22 nt, Human
ucugggaaacacugcaucccca

SEQ ID NO: 28039 - RNA, 22 nt, Human
ucugggaaaguaaauguaaagg

SEQ ID NO: 28040 - RNA, 22 nt, Human
ucugggaacacuuugugagcuc

SEQ ID NO: 28041 - RNA, 22 nt, Human
ucugggaacgaaggcuaauaug

SEQ ID NO: 28042 - RNA, 22 nt, Human
ucugggaagauguuucaaaggu

SEQ ID NO: 28043 - RNA, 23 nt, Human
ucugggaauuggcuguccacagg

SEQ ID NO: 28044 - RNA, 22 nt, Human
ucugggaauuuauuggcacuuu

SEQ ID NO: 28045 - RNA, 22 nt, Human
ucugggacauucucuccauagu

SEQ ID NO: 28046 - RNA, 22 nt, Human
ucugggagagggaaagaagacu

SEQ ID NO: 28047 - RNA, 22 nt, Human
ucugggagcuggcuuugccuca

SEQ ID NO: 28048 - RNA, 22 nt, Human
ucugggagggcugguucaguau

SEQ ID NO: 28049 - RNA, 22 nt, Human
ucugggagguacugggaggugu

SEQ ID NO: 28050 - RNA, 22 nt, Human
ucugggagguguuuugagaacu

SEQ ID NO: 28051 - RNA, 22 nt, Human
ucugggagugaagcaacagaug

SEQ ID NO: 28052 - RNA, 22 nt, Human
ucugggaguuguaguccggugg

SEQ ID NO: 28053 - RNA, 18 nt, Human
ucugggcaaucucaguau

SEQ ID NO: 28054 - RNA, 23 nt, Human
ucugggcaccuuguugacaugau

SEQ ID NO: 28055 - RNA, 20 nt, Human
ucugggcagggcacauggaa

SEQ ID NO: 28056 - RNA, 22 nt, Human
ucugggcaguaccccucuccua

SEQ ID NO: 28057 - RNA, 22 nt, Human
ucugggcccacucaacuucacu

SEQ ID NO: 28058 - RNA, 22 nt, Human
ucugggccggagccgacggcag

SEQ ID NO: 28059 - RNA, 22 nt, Human
ucugggccuauagaagucuacc

SEQ ID NO: 28060 - RNA, 22 nt, Human
ucugggcuauauggucucugcu

SEQ ID NO: 28061 - RNA, 22 nt, Human
ucugggcucacgagucuggaca

SEQ ID NO: 28062 - RNA, 22 nt, Human
ucugggcucugucagcaccucu

SEQ ID NO: 28063 - RNA, 23 nt, Human
ucugggcugagacuuggaagguc

SEQ ID NO: 28064 - RNA, 21 nt, Human
ucugggcugcugcugcccauc

SEQ ID NO: 28065 - RNA, 22 nt, Human
ucugggcugcugugcagugacc

SEQ ID NO: 28066 - RNA, 23 nt, Human
ucugggcugcuuaaggaucaagg

SEQ ID NO: 28067 - RNA, 22 nt, Human
ucugggcugggagcguguggac

SEQ ID NO: 28068 - RNA, 22 nt, Human
ucugggcugguugugcuugcuu

SEQ ID NO: 28069 - RNA, 22 nt, Human
ucugggcuuggguagaaaucac

SEQ ID NO: 28070 - RNA, 22 nt, Human
ucugggcuugguuagggcuguu

SEQ ID NO: 28071 - RNA, 22 nt, Human
ucugggcuuuaagaacucuguu

SEQ ID NO: 28072 - RNA, 22 nt, Human
ucugggcuuuuccaugccugug

SEQ ID NO: 28073 - RNA, 22 nt, Human
ucugggcuuuugcacuggccau

SEQ ID NO: 28074 - RNA, 22 nt, Human
ucuggggagggagccacagguc

SEQ ID NO: 28075 - RNA, 22 nt, Human
ucuggggauaagacccagguau

SEQ ID NO: 28076 - RNA, 22 nt, Human
ucuggggaugaggaccuagaug

SEQ ID NO: 28077 - RNA, 22 nt, Human
ucuggggaugagguccagugau

SEQ ID NO: 28078 - RNA, 22 nt, Human
ucuggggguuaagugaggacaa

SEQ ID NO: 28079 - RNA, 20 nt, Human
ucuggggugaagcccaggaa

SEQ ID NO: 28080 - RNA, 22 nt, Human
ucuggggugcagccuggacaua

SEQ ID NO: 28081 - RNA, 22 nt, Human
ucugggguggagcccuggaguc

SEQ ID NO: 28082 - RNA, 22 nt, Human
ucugggguugagucugggucag

SEQ ID NO: 28083 - RNA, 22 nt, Human
ucuggguaugaccuauuuuucc

SEQ ID NO: 28084 - RNA, 22 nt, Human
ugcaugcuucaggcuggcucug

SEQ ID NO: 28085 - RNA, 18 nt, Human
ugcaugcuuuuguuucca

SEQ ID NO: 28086 - RNA, 22 nt, Human
ugcauggagcugucugcauggu

SEQ ID NO: 28087 - RNA, 22 nt, Human
ugcauggauauauacccuaggc

SEQ ID NO: 28088 - RNA, 22 nt, Human
ugcaugguguaauucuaaugcu

SEQ ID NO: 28089 - RNA, 22 nt, Human
ugcauguaugugcucacaugug

SEQ ID NO: 28090 - RNA, 22 nt, Human
ugcauguauuuaaaguugcaau

SEQ ID NO: 28091 - RNA, 17 nt, Human
ugcauguccuuuguucc

SEQ ID NO: 28092 - RNA, 22 nt, Human
ugcauguguguauucagagacu

SEQ ID NO: 28093 - RNA, 22 nt, Human
ugcauguuccaacuccaucacu

SEQ ID NO: 28094 - RNA, 22 nt, Human
ugcauguuuauaacagaugagg

SEQ ID NO: 28095 - RNA, 22 nt, Human
ugcauuaaaaugauggagaaau

SEQ ID NO: 28096 - RNA, 22 nt, Human
ugcauuaaauauaaucuguuga

SEQ ID NO: 28097 - RNA, 22 nt, Human
ugcauuaagggccuggagauac

SEQ ID NO: 28098 - RNA, 22 nt, Human
ugcauuaagugucugcauaugg

SEQ ID NO: 28099 - RNA, 22 nt, Human
ugcauuauacauggaucuaaag

SEQ ID NO: 28100 - RNA, 22 nt, Human
ugcauuaucgucuugauccucu

SEQ ID NO: 28101 - RNA, 22 nt, Human
ugcauucaaaucuccaggcuca

SEQ ID NO: 28102 - RNA, 21 nt, Human
ugcauucuagcagcucugagg

SEQ ID NO: 28103 - RNA, 21 nt, Human
ugcauucuuguguaagguagu

SEQ ID NO: 28104 - RNA, 22 nt, Human
ugcauugagauuuuaaaauuca

SEQ ID NO: 28105 - RNA, 22 nt, Human
ugcauuggaaaacuauggcuca

SEQ ID NO: 28106 - RNA, 22 nt, Human
ugcauugggagagauuagggca

SEQ ID NO: 28107 - RNA, 22 nt, Human
ugcauugggagucagugcugaa

SEQ ID NO: 28108 - RNA, 22 nt, Human
ugcauuggucauuugaaaauau

SEQ ID NO: 28109 - RNA, 22 nt, Human
ugcauuuaguuuuaauaaagga

SEQ ID NO: 28110 - RNA, 22 nt, Human
ugcauuuauaaaauguucgugg

SEQ ID NO: 28111 - RNA, 22 nt, Human
ugcauuuaugucucccaccagc

SEQ ID NO: 28112 - RNA, 22 nt, Human
ugcauuucacagacugagaaau

SEQ ID NO: 28113 - RNA, 22 nt, Human
ugcauuucccauuguguggcuc

SEQ ID NO: 28114 - RNA, 21 nt, Human
ugcauuucuaacuaguugacc

SEQ ID NO: 28115 - RNA, 22 nt, Human
ugcauuugaagucagacaggcu

SEQ ID NO: 28116 - RNA, 22 nt, Human
ugcauuuguaacauucaagaau

SEQ ID NO: 28117 - RNA, 20 nt, Human
ugcauuuguuauuuguacuc

SEQ ID NO: 28118 - RNA, 22 nt, Human
ugccaaauuagaguucccaggc

SEQ ID NO: 28119 - RNA, 22 nt, Human
ugccaaauugcccuauaaauga

SEQ ID NO: 28120 - RNA, 17 nt, Human
ugccaagaagagcagag

SEQ ID NO: 28121 - RNA, 22 nt, Human
ugccaagagggcagagggcagu

SEQ ID NO: 28122 - RNA, 22 nt, Human
ugccaagagguccaggugggaa

SEQ ID NO: 28123 - RNA, 22 nt, Human
ugccaagcacagaggggccacu

SEQ ID NO: 28124 - RNA, 22 nt, Human
ugacccuuugcuuccucauugu

SEQ ID NO: 28125 - RNA, 22 nt, Human
ugaccugcagucaagaggggaa

SEQ ID NO: 28126 - RNA, 22 nt, Human
ugaccugcguaggugguuucug

SEQ ID NO: 28127 - RNA, 22 nt, Human
ugaccugggcauuacaggugca

SEQ ID NO: 28128 - RNA, 22 nt, Human
ugacgguauuuagggagcagcg

SEQ ID NO: 28129 - RNA, 22 nt, Human
ugacgucaacugcaaaggccuu

SEQ ID NO: 28130 - RNA, 22 nt, Human
ugacuaaacgcaugaauagcuc

SEQ ID NO: 28131 - RNA, 22 nt, Human
ugacuauuacggccacgaauuu

SEQ ID NO: 28132 - RNA, 21 nt, Human
ugacugaaauagaauuuagcu

SEQ ID NO: 28133 - RNA, 22 nt, Human
ugacugaagaagccacauugga

SEQ ID NO: 28134 - RNA, 22 nt, Human
ugacugaaggacuagauugauu

SEQ ID NO: 28135 - RNA, 22 nt, Human
ugacugccaugagggugagggc

SEQ ID NO: 28136 - RNA, 22 nt, Human
ugacugccgauuguccuucucu

SEQ ID NO: 28137 - RNA, 22 nt, Human
ugacuggagaccucaguagggu

SEQ ID NO: 28138 - RNA, 22 nt, Human
ugacugugcaagcagagagcau

SEQ ID NO: 28139 - RNA, 22 nt, Human
ugacuuaagcuguucuuuagau

SEQ ID NO: 28140 - RNA, 22 nt, Human
ugacuucaagguucagcaccuu

SEQ ID NO: 28141 - RNA, 20 nt, Human
ugacuucuucaugcuguacu

SEQ ID NO: 28142 - RNA, 22 nt, Human
ugacuugucucuuugggagaca

SEQ ID NO: 28143 - RNA, 22 nt, Human
ugacuuuaagcuaucugauucu

SEQ ID NO: 28144 - RNA, 22 nt, Human
ugacuuuaauaggauuuugcau

SEQ ID NO: 28145 - RNA, 22 nt, Human
ugacuuuggacuagugauuuaa

SEQ ID NO: 28146 - RNA, 22 nt, Human
ugagaaaacaguuuguaauaau

SEQ ID NO: 28147 - RNA, 22 nt, Human
ugagaaaacucaaagacagauc

SEQ ID NO: 28148 - RNA, 22 nt, Human
ugagaaaagguugagaugauaa

SEQ ID NO: 28149 - RNA, 22 nt, Human
ugagaaagacagacauuccuaa

SEQ ID NO: 28150 - RNA, 22 nt, Human
ugagaaagccuuuagucccagg

SEQ ID NO: 28151 - RNA, 22 nt, Human
ugagaaagguauuucaugcacu

SEQ ID NO: 28152 - RNA, 22 nt, Human
ugagaaauccagaugugcaguu

SEQ ID NO: 28153 - RNA, 22 nt, Human
ugagaaauggcagcauuacugg

SEQ ID NO: 28154 - RNA, 19 nt, Human
ugagaaauuccacaggaug

SEQ ID NO: 28155 - RNA, 23 nt, Human
ugagaaauuuugauucaguagga

SEQ ID NO: 28156 - RNA, 22 nt, Human
ugagaacaaaguugaaaguuug

SEQ ID NO: 28157 - RNA, 22 nt, Human
ugagaacggauacuaagggcug

SEQ ID NO: 28158 - RNA, 22 nt, Human
ugagaagcagcuuacagguguc

SEQ ID NO: 28159 - RNA, 22 nt, Human
ugagaagcugcugacuuagccu

SEQ ID NO: 28160 - RNA, 19 nt, Human
ugagaaggcaguggggagc

SEQ ID NO: 28161 - RNA, 22 nt, Human
ugagaaggccugugugacaggg

SEQ ID NO: 28162 - RNA, 22 nt, Human
ugagaaggugaaaguguggaga

SEQ ID NO: 28163 - RNA, 22 nt, Human
ugagaauagcagacugguaacu

SEQ ID NO: 28164 - RNA, 22 nt, Human
ugagaaucauccagaggcuucu

SEQ ID NO: 28165 - RNA, 22 nt, Human
ugagaaugaggggguagaaggu

SEQ ID NO: 28166 - RNA, 22 nt, Human
ugagaaugccauaagagcuauu

SEQ ID NO: 28167 - RNA, 22 nt, Human
ugagaauucuacaauagaucaa

SEQ ID NO: 28168 - RNA, 22 nt, Human
ugagaauuuuuggcagaaacaa

SEQ ID NO: 28169 - RNA, 22 nt, Human
ugagacaaagcagcugacagaa

SEQ ID NO: 28170 - RNA, 22 nt, Human
ugagacaacauugggcaagucc

SEQ ID NO: 28171 - RNA, 22 nt, Human
ugagacaaccuaauuaaacacc

SEQ ID NO: 28172 - RNA, 22 nt, Human
ugagacaauaaggcugagaagc

SEQ ID NO: 28173 - RNA, 23 nt, Human
ugagacacucauucauggaguau

SEQ ID NO: 28174 - RNA, 22 nt, Human
ugagacagcccuucugcacagg

SEQ ID NO: 28175 - RNA, 22 nt, Human
ugagacagccucugcacucaug

SEQ ID NO: 28176 - RNA, 18 nt, Human
ugagacagcuaccacuug

SEQ ID NO: 28177 - RNA, 22 nt, Human
ugagacaguaucgccccaaggc

SEQ ID NO: 28178 - RNA, 22 nt, Human
ugagacagucaccaggcaggcc

SEQ ID NO: 28179 - RNA, 22 nt, Human
ugagacagucccaugaucugca

SEQ ID NO: 28180 - RNA, 22 nt, Human
ugagacaugugaauauuuguac

SEQ ID NO: 28181 - RNA, 22 nt, Human
ugagaccucuggguucugagcu

SEQ ID NO: 28182 - RNA, 22 nt, Human
ugagaccugccucugcacuagg

SEQ ID NO: 28183 - RNA, 22 nt, Human
ugagaccuuggggagcccuguu

SEQ ID NO: 28184 - RNA, 19 nt, Human
ugagacugggugcaguacu

SEQ ID NO: 28185 - RNA, 22 nt, Human
ugagagaugaaguuaguuguuc

SEQ ID NO: 28186 - RNA, 22 nt, Human
ugagagcagaggugggcagccu

SEQ ID NO: 28187 - RNA, 22 nt, Human
ugagagccaggaucugcucuau

SEQ ID NO: 28188 - RNA, 21 nt, Human
ugagagccuccaaccggcuac

SEQ ID NO: 28189 - RNA, 18 nt, Human
ugagagccugcuuguccc

SEQ ID NO: 28190 - RNA, 22 nt, Human
ugagagcugccacgugaccaug

SEQ ID NO: 28191 - RNA, 22 nt, Human
ugagaggaacaggcaguagguu

SEQ ID NO: 28192 - RNA, 22 nt, Human
ugagaggauauuuugggaggau

SEQ ID NO: 28193 - RNA, 22 nt, Human
ucuuuuagagcauuucugauuc

SEQ ID NO: 28194 - RNA, 22 nt, Human
ucuuuuagcucugcaaggaaag

SEQ ID NO: 28195 - RNA, 20 nt, Human
ucuuuuauuggcagauccug

SEQ ID NO: 28196 - RNA, 22 nt, Human
ucuuuucacagacaaauggaga

SEQ ID NO: 28197 - RNA, 22 nt, Human
ucuuuucaggaauggcucuagu

SEQ ID NO: 28198 - RNA, 21 nt, Human
ucuuuuguaacuauuucagcc

SEQ ID NO: 28199 - RNA, 22 nt, Human
ucuuuugugauucuucaguuac

SEQ ID NO: 28200 - RNA, 22 nt, Human
ucuuuuguggaugaagaaaugg

SEQ ID NO: 28201 - RNA, 22 nt, Human
ucuuuuucuucuguggaaggug

SEQ ID NO: 28202 - RNA, 22 nt, Human
ugaaaaggaguccuuguuuuca

SEQ ID NO: 28203 - RNA, 22 nt, Human
ugaaaaggguagaucccuaagu

SEQ ID NO: 28204 - RNA, 22 nt, Human
ugaaaauggccugaagaagcaa

SEQ ID NO: 28205 - RNA, 22 nt, Human
ugaaaauucucaggcucacccc

SEQ ID NO: 28206 - RNA, 22 nt, Human
ugaaaauuguuguacuugauaa

SEQ ID NO: 28207 - RNA, 22 nt, Human
ugaaacaaaauuaagauucucg

SEQ ID NO: 28208 - RNA, 19 nt, Human
ugaaacaaacuuaaaagga

SEQ ID NO: 28209 - RNA, 22 nt, Human
ugaaacaagggccaugggaaac

SEQ ID NO: 28210 - RNA, 21 nt, Human
ugaaacaaucagacagagucu

SEQ ID NO: 28211 - RNA, 21 nt, Human
ugaaacacucuuuccaugaga

SEQ ID NO: 28212 - RNA, 21 nt, Human
ugaaacagauggaaguauuug

SEQ ID NO: 28213 - RNA, 22 nt, Human
ugaaacaggaugcagaggagga

SEQ ID NO: 28214 - RNA, 22 nt, Human
ugaaacaggcaaaacugcagau

SEQ ID NO: 28215 - RNA, 22 nt, Human
ugaaacaguagucuguggguuu

SEQ ID NO: 28216 - RNA, 22 nt, Human
ugaaacagugcuucacucagcc

SEQ ID NO: 28217 - RNA, 22 nt, Human
ugaaacauugcacuguaugaau

SEQ ID NO: 28218 - RNA, 22 nt, Human
ugaaaccauucucagguacacu

SEQ ID NO: 28219 - RNA, 22 nt, Human
ugaaaccccagauuaccacaaa

SEQ ID NO: 28220 - RNA, 22 nt, Human
ugaaaccucaaccaaagguuac

SEQ ID NO: 28221 - RNA, 22 nt, Human
ugaaacuuauucaguuucuacc

SEQ ID NO: 28222 - RNA, 22 nt, Human
ugaaagaguuugacaugauucu

SEQ ID NO: 28223 - RNA, 22 nt, Human
ugaaagcacugauucucaacuc

SEQ ID NO: 28224 - RNA, 22 nt, Human
ugaaagcaggcgggcuacuuua

SEQ ID NO: 28225 - RNA, 22 nt, Human
ugaaagcagugauuucuccuuc

SEQ ID NO: 28226 - RNA, 22 nt, Human
ugaaagcagugccaugauuaug

SEQ ID NO: 28227 - RNA, 22 nt, Human
ugaaagcauuagucuaagguag

SEQ ID NO: 28228 - RNA, 22 nt, Human
ugaaaggaagagggcuacuccu

SEQ ID NO: 28229 - RNA, 22 nt, Human
ugaaagggguugaguuacagcu

SEQ ID NO: 28230 - RNA, 22 nt, Human
ugaaagguagcuggccucauag

SEQ ID NO: 28231 - RNA, 22 nt, Human
ugaaagucucuguuauagagaa

SEQ ID NO: 28232 - RNA, 22 nt, Human
ugaaaguuaggauguaguaauu

SEQ ID NO: 28233 - RNA, 22 nt, Human
ugaaaguugcacauaagagaau

SEQ ID NO: 28234 - RNA, 22 nt, Human
ugaaauaacuuuugggugaguu

SEQ ID NO: 28235 - RNA, 20 nt, Human
ugaaauaaggaguuguccuu

SEQ ID NO: 28236 - RNA, 22 nt, Human
ugaaauaauaucuggaucaauc

SEQ ID NO: 28237 - RNA, 20 nt, Human
ugaaauagauacucagagau

SEQ ID NO: 28238 - RNA, 22 nt, Human
ugaaauagucaaguauuugaac

SEQ ID NO: 28239 - RNA, 22 nt, Human
ugaaaucaaugucuucugucuc

SEQ ID NO: 28240 - RNA, 22 nt, Human
uucuggaauacuaaguuccuuu

SEQ ID NO: 28241 - RNA, 22 nt, Human
uucuggaauucuugcagccacu

SEQ ID NO: 28242 - RNA, 22 nt, Human
uucuggagagaaaccuuacaaa

SEQ ID NO: 28243 - RNA, 22 nt, Human
uucuggagaucugccuauggga

SEQ ID NO: 28244 - RNA, 20 nt, Human
uucuggaggcuacaagucug

SEQ ID NO: 28245 - RNA, 22 nt, Human
uucuggagguuauuaggagucu

SEQ ID NO: 28246 - RNA, 22 nt, Human
uucuggaguauuccuggcaccu

SEQ ID NO: 28247 - RNA, 22 nt, Human
uucuggagucccacagccaggg

SEQ ID NO: 28248 - RNA, 22 nt, Human
uucuggaguguauugggucugc

SEQ ID NO: 28249 - RNA, 22 nt, Human
uucuggaguuugaagaucaggu

SEQ ID NO: 28250 - RNA, 22 nt, Human
uucuggauagggguauggagcu

SEQ ID NO: 28251 - RNA, 22 nt, Human
uucuggauuauguguaagugaa

SEQ ID NO: 28252 - RNA, 20 nt, Human
uucuggcaaacagaguucuu

SEQ ID NO: 28253 - RNA, 22 nt, Human
uucuggcucauaugcuaagaag

SEQ ID NO: 28254 - RNA, 22 nt, Human
uucuggcuccagaugcuucugu

SEQ ID NO: 28255 - RNA, 23 nt, Human
uucuggcuccgagcuccaucuuc

SEQ ID NO: 28256 - RNA, 22 nt, Human
uucuggcucuccccugcugggu

SEQ ID NO: 28257 - RNA, 22 nt, Human
uucuggcugcagucccuguaau

SEQ ID NO: 28258 - RNA, 23 nt, Human
uucuggcuguggguggcgucucu

SEQ ID NO: 28259 - RNA, 22 nt, Human
uucuggcuucaucugacaagcc

SEQ ID NO: 28260 - RNA, 22 nt, Human
uucuggcuuugaccaaguucaa

SEQ ID NO: 28261 - RNA, 22 nt, Human
uucugggaacaaaguggagugg

SEQ ID NO: 28262 - RNA, 22 nt, Human
uucugggaggcuggcugucaua

SEQ ID NO: 28263 - RNA, 22 nt, Human
uucugggaugugaaugguuuaa

SEQ ID NO: 28264 - RNA, 22 nt, Human
uucugggcaccaccacagacuu

SEQ ID NO: 28265 - RNA, 20 nt, Human
uucugggcagccauguacuu

SEQ ID NO: 28266 - RNA, 22 nt, Human
uucugggcaggacuggggaccc

SEQ ID NO: 28267 - RNA, 22 nt, Human
uucugggcaguuggaaauuuca

SEQ ID NO: 28268 - RNA, 22 nt, Human
uucugggcccacuguagcaucc

SEQ ID NO: 28269 - RNA, 21 nt, Human
uucugggccggagaaggggcg

SEQ ID NO: 28270 - RNA, 22 nt, Human
uucugggccuccuaggacaggc

SEQ ID NO: 28271 - RNA, 22 nt, Human
uucugggcucucuuucugugug

SEQ ID NO: 28272 - RNA, 22 nt, Human
uucuggggccccaguguccucg

SEQ ID NO: 28273 - RNA, 22 nt, Human
uucugggugcaacucuguucug

SEQ ID NO: 28274 - RNA, 22 nt, Human
uucuggguuuacaucugacuuc

SEQ ID NO: 28275 - RNA, 22 nt, Human
uucugguaugggaaauuucaag

SEQ ID NO: 28276 - RNA, 22 nt, Human
uucuguaauucuguuaguuuca

SEQ ID NO: 28277 - RNA, 22 nt, Human
uucuguaggacuucugccaacu

SEQ ID NO: 28278 - RNA, 22 nt, Human
uucuguaugcucuggguccaga

SEQ ID NO: 28279 - RNA, 22 nt, Human
uucugucaaaugccaguagaga

SEQ ID NO: 28280 - RNA, 22 nt, Human
uucugucacagugcugguauca

SEQ ID NO: 28281 - RNA, 20 nt, Human
uucugucagauuauauggga

SEQ ID NO: 28282 - RNA, 22 nt, Human
uucugucauccuuucuagaugu

SEQ ID NO: 28283 - RNA, 22 nt, Human
uucuguccacugcuggggccuc

SEQ ID NO: 28284 - RNA, 22 nt, Human
uucugucucccugauguagagc

SEQ ID NO: 28285 - RNA, 22 nt, Human
uucugucucuguguuuacauua

SEQ ID NO: 28286 - RNA, 22 nt, Human
uucugucuggaaaaggacauag

SEQ ID NO: 28287 - RNA, 22 nt, Human
uucugugaggacuucucaagga

SEQ ID NO: 28288 - RNA, 22 nt, Human
uucugugcguaggcgaugcagu

SEQ ID NO: 28289 - RNA, 22 nt, Human
uucuguggcugggagccuggcu

SEQ ID NO: 28290 - RNA, 22 nt, Human
uucugugucuucuuguucugug

SEQ ID NO: 28291 - RNA, 22 nt, Human
uucugugugucucagcaagcug

SEQ ID NO: 28292 - RNA, 22 nt, Human
uucuguguucugugcaaugagc

SEQ ID NO: 28293 - RNA, 22 nt, Human
uucuguuaccuuugugaguuuc

SEQ ID NO: 28294 - RNA, 22 nt, Human
uucuguucccuaggaccugggg

SEQ ID NO: 28295 - RNA, 22 nt, Human
uucuguuuacucagaaauacaa

SEQ ID NO: 28296 - RNA, 22 nt, Human
uucuguuuccugccuucccauu

SEQ ID NO: 28297 - RNA, 22 nt, Human
uucuuaacuggaaaaugucaga

SEQ ID NO: 28298 - RNA, 22 nt, Human
uucuuaagaggguuaagugaag

SEQ ID NO: 28299 - RNA, 22 nt, Human
uucuuaaguauuucagagacug

SEQ ID NO: 28300 - RNA, 22 nt, Human
uucuuaagucaguaagaugcaa

SEQ ID NO: 28301 - RNA, 22 nt, Human
uucuuaaucccacaaaucuuca

SEQ ID NO: 28302 - RNA, 22 nt, Human
uggaagauaugcugauucucug

SEQ ID NO: 28303 - RNA, 23 nt, Human
uggaagcaguuccagcacaaaua

SEQ ID NO: 28304 - RNA, 22 nt, Human
uggaagccaggcccgcuccuaa

SEQ ID NO: 28305 - RNA, 22 nt, Human
uggaagcggacguuguggggug

SEQ ID NO: 28306 - RNA, 18 nt, Human
uggaagcuggugagcaga

SEQ ID NO: 28307 - RNA, 22 nt, Human
uggaagcuguggcauaacugag

SEQ ID NO: 28308 - RNA, 22 nt, Human
uggaaggaaagguagcagagaa

SEQ ID NO: 28309 - RNA, 22 nt, Human
uggaaggaagccaaggaagguu

SEQ ID NO: 28310 - RNA, 22 nt, Human
uggaaggagacugggaagugug

SEQ ID NO: 28311 - RNA, 22 nt, Human
uggaaggcagugauauuguuga

SEQ ID NO: 28312 - RNA, 22 nt, Human
uggaaggcuaggugcuaggccc

SEQ ID NO: 28313 - RNA, 22 nt, Human
uggaaggcugugauuacugugc

SEQ ID NO: 28314 - RNA, 22 nt, Human
uggaagggaaaguuuggggucc

SEQ ID NO: 28315 - RNA, 22 nt, Human
uggaaggggagcuggaaagggg

SEQ ID NO: 28316 - RNA, 22 nt, Human
uggaaggggccaggcgcggagu

SEQ ID NO: 28317 - RNA, 20 nt, Human
uggaaggucccagaggaauu

SEQ ID NO: 28318 - RNA, 22 nt, Human
uggaagugaugcugaggugacg

SEQ ID NO: 28319 - RNA, 22 nt, Human
uggaagugcucuucugaccaac

SEQ ID NO: 28320 - RNA, 22 nt, Human
uggaauaacucaccaaggucau

SEQ ID NO: 28321 - RNA, 20 nt, Human
uggaauaaguuaaguuguuu

SEQ ID NO: 28322 - RNA, 23 nt, Human
uggaaucagccuuuuuuccaagg

SEQ ID NO: 28323 - RNA, 18 nt, Human
uggaaucauugucaccau

SEQ ID NO: 28324 - RNA, 22 nt, Human
uggaaucuguauguauguauaa

SEQ ID NO: 28325 - RNA, 23 nt, Human
uggaaucuucgauauugauucag

SEQ ID NO: 28326 - RNA, 22 nt, Human
uggaaugaaaaguacuucagaa

SEQ ID NO: 28327 - RNA, 22 nt, Human
uggaaugaaggagauggccuuu

SEQ ID NO: 28328 - RNA, 22 nt, Human
uggaaugaauuuggcuuccucc

SEQ ID NO: 28329 - RNA, 22 nt, Human
uggaaugacagagagucugaau

SEQ ID NO: 28330 - RNA, 22 nt, Human
uggaaugaucugauguauuuua

SEQ ID NO: 28331 - RNA, 22 nt, Human
uggaaugccgggccaggcuccg

SEQ ID NO: 28332 - RNA, 22 nt, Human
uggaauguaaaccucagguggg

SEQ ID NO: 28333 - RNA, 21 nt, Human
uggaauguaccucccucucuu

SEQ ID NO: 28334 - RNA, 22 nt, Human
uggaauguauuaaguauugagu

SEQ ID NO: 28335 - RNA, 22 nt, Human
uggaaugucagcuacaagaggg

SEQ ID NO: 28336 - RNA, 22 nt, Human
uggaaugugguaucaguagaaa

SEQ ID NO: 28337 - RNA, 22 nt, Human
uggaauguugauaaacauaggc

SEQ ID NO: 28338 - RNA, 22 nt, Human
uggaauguuguguauaggucag

SEQ ID NO: 28339 - RNA, 23 nt, Human
uggaauguuucuuguacugaaug

SEQ ID NO: 28340 - RNA, 22 nt, Human
uggaauuaucugaagugauuug

SEQ ID NO: 28341 - RNA, 22 nt, Human
uggaauucccaaguaacuuuua

SEQ ID NO: 28342 - RNA, 22 nt, Human
uggaauuuuguauuagcuuuga

SEQ ID NO: 28343 - RNA, 22 nt, Human
uggacacaaagaucaaauauug

SEQ ID NO: 28344 - RNA, 22 nt, Human
uggacacacauguaugucagag

SEQ ID NO: 28345 - RNA, 22 nt, Human
uggacacaucacugcagccacu

SEQ ID NO: 28346 - RNA, 22 nt, Human
uggacagaaacccgagugaucu

SEQ ID NO: 28347 - RNA, 22 nt, Human
uggacagcaaacauggagagaa

SEQ ID NO: 28348 - RNA, 22 nt, Human
uggacaggauagugcaguacgc

SEQ ID NO: 28349 - RNA, 22 nt, Human
uggacaggcaagcaagacauac

SEQ ID NO: 28350 - RNA, 22 nt, Human
uggacagggcagagaccgaguc

SEQ ID NO: 28351 - RNA, 18 nt, Human
uggacaggguggagaaaa

SEQ ID NO: 28352 - RNA, 22 nt, Human
uggacaggugcacacagcagcc

SEQ ID NO: 28353 - RNA, 22 nt, Human
uggacagguuugggugccuguu

SEQ ID NO: 28354 - RNA, 22 nt, Human
uggacaguaggaagaguguggg

SEQ ID NO: 28355 - RNA, 23 nt, Human
uggacaguaggguagacagugcc

SEQ ID NO: 28356 - RNA, 21 nt, Human
uggacauuauggagagaguag

SEQ ID NO: 28357 - RNA, 21 nt, Human
uggacauuuacccuucaggga

SEQ ID NO: 28358 - RNA, 22 nt, Human
uggaccaacauucacuggcaua

SEQ ID NO: 28359 - RNA, 20 nt, Human
uggaccacccuccucuuugc

SEQ ID NO: 28360 - RNA, 22 nt, Human
uggacccaggcaggucuguccu

SEQ ID NO: 28361 - RNA, 22 nt, Human
uggaccccagacaagccagggu

SEQ ID NO: 28362 - RNA, 22 nt, Human
uggaccucacugucugcuggua

SEQ ID NO: 28363 - RNA, 19 nt, Human
uggaccugugcccauggcu

SEQ ID NO: 28364 - RNA, 23 nt, Human
uggacgccgacuuuggaggcgcu

SEQ ID NO: 28365 - RNA, 22 nt, Human
uggacucaaguccaaguucacg

SEQ ID NO: 28366 - RNA, 22 nt, Human
uggacucaccuugaguuagcca

SEQ ID NO: 28367 - RNA, 22 nt, Human
uggacucagaguugguggcagu

SEQ ID NO: 28368 - RNA, 22 nt, Human
uggacugaugcucccuauugaa

SEQ ID NO: 28369 - RNA, 22 nt, Human
uggagaaaagguugaauccauc

SEQ ID NO: 28370 - RNA, 22 nt, Human
uggagaauaggggccacuggug

SEQ ID NO: 28371 - RNA, 22 nt, Human
uggagaauggaauguugugcag

SEQ ID NO: 28372 - RNA, 23 nt, Human
uggagaauguguuuacuucgugu

SEQ ID NO: 28373 - RNA, 23 nt, Human
uggagaauucagucuuuguuuug

SEQ ID NO: 28374 - RNA, 23 nt, Human
uggagaauucuuccuuccacugu

SEQ ID NO: 28375 - RNA, 22 nt, Human
uggagaauuuugucaccagaca

SEQ ID NO: 28376 - RNA, 21 nt, Human
uggagacucugguucuuugug

SEQ ID NO: 28377 - RNA, 19 nt, Human
uggagacugagagugagca

SEQ ID NO: 28378 - RNA, 22 nt, Human
uggagagaacagugucugaaag

SEQ ID NO: 28379 - RNA, 22 nt, Human
uggagagcaagucgcagacaug

SEQ ID NO: 28380 - RNA, 22 nt, Human
uggagagcacaguuccugcuuc

SEQ ID NO: 28381 - RNA, 18 nt, Human
uggagagcagcagugggg

SEQ ID NO: 28382 - RNA, 22 nt, Human
uggagagcagggcuggaguuca

SEQ ID NO: 28383 - RNA, 22 nt, Human
uggagagcgugcuuagcacucu

SEQ ID NO: 28384 - RNA, 22 nt, Human
uggagagcuauuuggaccucca

SEQ ID NO: 28385 - RNA, 19 nt, Human
uggagaggaaaugcugcuc

SEQ ID NO: 28386 - RNA, 22 nt, Human
uggagaguggauaugggagcaa

SEQ ID NO: 28387 - RNA, 22 nt, Human
uggagaguuuagccuacuggaa

SEQ ID NO: 28388 - RNA, 22 nt, Human
uggagaugaauauguguaccug

SEQ ID NO: 28389 - RNA, 22 nt, Human
uggagcagcaucacuuugagcu

SEQ ID NO: 28390 - RNA, 22 nt, Human
uggagcagcucuagcgggcgcc

SEQ ID NO: 28391 - RNA, 16 nt, Human
uggagcaggcaggaug

SEQ ID NO: 28392 - RNA, 22 nt, Human
uggagcaggccggaaguggcuu

SEQ ID NO: 28393 - RNA, 22 nt, Human
uggagcagggcaucacugugcg

SEQ ID NO: 28394 - RNA, 22 nt, Human
ugcaggcaguaggccagcucca

SEQ ID NO: 28395 - RNA, 22 nt, Human
ugcaggcauaaccgauguugau

SEQ ID NO: 28396 - RNA, 22 nt, Human
ugcaggccaggguagggacuag

SEQ ID NO: 28397 - RNA, 22 nt, Human
ugcaggcccaguguagaggcuc

SEQ ID NO: 28398 - RNA, 22 nt, Human
ugcaggccuggacugauguggu

SEQ ID NO: 28399 - RNA, 21 nt, Human
ugcaggcuacuucugacucua

SEQ ID NO: 28400 - RNA, 23 nt, Human
ugcaggcuaggaagagagccuuc

SEQ ID NO: 28401 - RNA, 22 nt, Human
ugcaggcuauccuuugcugcaa

SEQ ID NO: 28402 - RNA, 22 nt, Human
ugcaggcuccaugaggacaggc

SEQ ID NO: 28403 - RNA, 22 nt, Human
ugcaggcucucugcugccagau

SEQ ID NO: 28404 - RNA, 22 nt, Human
ugcaggcuggggaggcagacuu

SEQ ID NO: 28405 - RNA, 22 nt, Human
ugcaggcugugucauuuaguga

SEQ ID NO: 28406 - RNA, 22 nt, Human
ugcaggcuuggaucacaucucc

SEQ ID NO: 28407 - RNA, 22 nt, Human
ugcagggaaaguguuggcagca

SEQ ID NO: 28408 - RNA, 22 nt, Human
ugcagggaacuuggacagcuag

SEQ ID NO: 28409 - RNA, 22 nt, Human
ugcagggaaucuguggcuggac

SEQ ID NO: 28410 - RNA, 22 nt, Human
ugcagggagggcccagcaaucu

SEQ ID NO: 28411 - RNA, 17 nt, Human
ugcauuguuggaaauuu

SEQ ID NO: 28412 - RNA, 22 nt, Human
ugcauuuaauagaugcucccug

SEQ ID NO: 28413 - RNA, 22 nt, Human
ugcauuuaccuggaggucauuu

SEQ ID NO: 28414 - RNA, 22 nt, Human
ugcauuuacgguacaacagcag

SEQ ID NO: 28415 - RNA, 22 nt, Human
ugcauuuaguuaugagaaaaac

SEQ ID NO: 28416 - RNA, 22 nt, Human
ugcauuuauggagcaaggcagu

SEQ ID NO: 28417 - RNA, 22 nt, Human
ugcauuuauggaguuaccucau

SEQ ID NO: 28418 - RNA, 22 nt, Human
ugcauuucuuuugaguauaugc

SEQ ID NO: 28419 - RNA, 22 nt, Human
ugcauuugcaauggguacacaa

SEQ ID NO: 28420 - RNA, 22 nt, Human
ugcauuuuacuuaccuguuagu

SEQ ID NO: 28421 - RNA, 22 nt, Human
ugcauuuuuaacaaggcuaauu

SEQ ID NO: 28422 - RNA, 22 nt, Human
ugcauuuuugagguuaacucaa

SEQ ID NO: 28423 - RNA, 22 nt, Human
ugcauuuuugauaacuguguac

SEQ ID NO: 28424 - RNA, 23 nt, Human
ugccaaaguuuaccuaacacugg

SEQ ID NO: 28425 - RNA, 22 nt, Human
ugccaaauugaauuacauaauu

SEQ ID NO: 28426 - RNA, 20 nt, Human
ugccaagcucuuuagaucga

SEQ ID NO: 28427 - RNA, 22 nt, Human
ugccaaguuucucucagggacu

SEQ ID NO: 28428 - RNA, 22 nt, Human
ugccacacagcuguaugaggga

SEQ ID NO: 28429 - RNA, 22 nt, Human
ugccacacauugucagguuagu

SEQ ID NO: 28430 - RNA, 22 nt, Human
ugccacacuccccugcugcagu

SEQ ID NO: 28431 - RNA, 22 nt, Human
ugccagagauuucacacugcua

SEQ ID NO: 28432 - RNA, 22 nt, Human
ugccagaugcaggagguaaggc

SEQ ID NO: 28433 - RNA, 22 nt, Human
ugccagauuguggcauggcacu

SEQ ID NO: 28434 - RNA, 22 nt, Human
ugccagcaagaauagacaguaa

SEQ ID NO: 28435 - RNA, 22 nt, Human
ugccagcacuucuggcugucug

SEQ ID NO: 28436 - RNA, 23 nt, Human
ugccagcagggaaugggaaggac

SEQ ID NO: 28437 - RNA, 22 nt, Human
ugccagcaguagcaguaggcca

SEQ ID NO: 28438 - RNA, 21 nt, Human
ugccagcauguaggcuaguug

SEQ ID NO: 28439 - RNA, 21 nt, Human
ugccagcauuaaacagucauu

SEQ ID NO: 28440 - RNA, 22 nt, Human
ugccagcucccuuuucuccucc

SEQ ID NO: 28441 - RNA, 21 nt, Human
ugccagcugcugcaucugucu

SEQ ID NO: 28442 - RNA, 22 nt, Human
ugccagcuucuuacggcugccu

SEQ ID NO: 28443 - RNA, 19 nt, Human
ugccaggaauacuccagaa

SEQ ID NO: 28444 - RNA, 22 nt, Human
ugccaggaggaggugggacaga

SEQ ID NO: 28445 - RNA, 22 nt, Human
ugccaggauggccagggggcca

SEQ ID NO: 28446 - RNA, 20 nt, Human
ugccaggcacggagugcaug

SEQ ID NO: 28447 - RNA, 22 nt, Human
ugccaggcacgugagaguggcc

SEQ ID NO: 28448 - RNA, 22 nt, Human
ugccaggccaaugaaggcaggg

SEQ ID NO: 28449 - RNA, 21 nt, Human
ugccaggccugagcugggguc

SEQ ID NO: 28450 - RNA, 22 nt, Human
ugccaggcgauugcuaucagca

SEQ ID NO: 28451 - RNA, 22 nt, Human
ugccaggcugucaauucaccca

SEQ ID NO: 28452 - RNA, 22 nt, Human
ugccaggcuuuggucaaaggcu

SEQ ID NO: 28453 - RNA, 20 nt, Human
ugccagggccagcagaggcu

SEQ ID NO: 28454 - RNA, 22 nt, Human
ugccagggcugcuacuggcuga

SEQ ID NO: 28455 - RNA, 22 nt, Human
ugccaggggaccuagggauguc

SEQ ID NO: 28456 - RNA, 22 nt, Human
ugccagggucagcugcagcucu

SEQ ID NO: 28457 - RNA, 22 nt, Human
ugccagggugucaggagagcua

SEQ ID NO: 28458 - RNA, 22 nt, Human
ugccagguacacaaguagccag

SEQ ID NO: 28459 - RNA, 22 nt, Human
ugccagucagugguuuaaaagu

SEQ ID NO: 28460 - RNA, 22 nt, Human
ugccaguugggaaaacagacau

SEQ ID NO: 28461 - RNA, 22 nt, Human
ugccaucacugaacuucugaaa

SEQ ID NO: 28462 - RNA, 22 nt, Human
ugccauccaacaguuccaucuu

SEQ ID NO: 28463 - RNA, 22 nt, Human
ugccauccuugaggaagggcaa

SEQ ID NO: 28464 - RNA, 22 nt, Human
ugccauguuuaaaguugaaggg

SEQ ID NO: 28465 - RNA, 22 nt, Human
ugccauuucucacauauguaug

SEQ ID NO: 28466 - RNA, 22 nt, Human
ugccauuugccccagcacuguc

SEQ ID NO: 28467 - RNA, 22 nt, Human
ugccauuuugagauguuaauga

SEQ ID NO: 28468 - RNA, 22 nt, Human
ugcccaaaccucuccuagcucu

SEQ ID NO: 28469 - RNA, 22 nt, Human
ugcccaagauccuacauccuga

SEQ ID NO: 28470 - RNA, 22 nt, Human
ugcccaagccgagcucucuguu

SEQ ID NO: 28471 - RNA, 22 nt, Human
ugcccaaggucaccuaguuagu

SEQ ID NO: 28472 - RNA, 22 nt, Human
ugcccaaguguuuggcugaguc

SEQ ID NO: 28473 - RNA, 23 nt, Human
ugcccacaaaaguaaagacauuu

SEQ ID NO: 28474 - RNA, 20 nt, Human
ugcccacaauucacaaugcc

SEQ ID NO: 28475 - RNA, 22 nt, Human
ugcccacagauaugugcagucu

SEQ ID NO: 28476 - RNA, 22 nt, Human
ugcccacagcaaagagguagga

SEQ ID NO: 28477 - RNA, 21 nt, Human
ugcccacagcaaaugcagagg

SEQ ID NO: 28478 - RNA, 22 nt, Human
ugcccacagcucagggcugcuc

SEQ ID NO: 28479 - RNA, 22 nt, Human
ugcccacauggugccauggcca

SEQ ID NO: 28480 - RNA, 22 nt, Human
ugcccacauucaaaaggugaug

SEQ ID NO: 28481 - RNA, 21 nt, Human
ugcccaccaagcuccacacug

SEQ ID NO: 28482 - RNA, 18 nt, Human
ugcccaccagaagaggga

SEQ ID NO: 28483 - RNA, 22 nt, Human
ugcccaccuaacaguguuugga

SEQ ID NO: 28484 - RNA, 22 nt, Human
ugcccacuucaaaaucuucauu

SEQ ID NO: 28485 - RNA, 22 nt, Human
ugcccagaauagaugggcugug

SEQ ID NO: 28486 - RNA, 22 nt, Human
ugcccagagccugagaggauua

SEQ ID NO: 28487 - RNA, 20 nt, Human
ugcccagcaagagugcaguu

SEQ ID NO: 28488 - RNA, 22 nt, Human
ugcccagcaauaaaccagaaga

SEQ ID NO: 28489 - RNA, 22 nt, Human
ugcccagccuaaacuuggcaag

SEQ ID NO: 28490 - RNA, 22 nt, Human
ugcccagcugucaaaguagaua

SEQ ID NO: 28491 - RNA, 22 nt, Human
ugcccaggcuccucgcagccuu

SEQ ID NO: 28492 - RNA, 22 nt, Human
ugcccaggguuucuaagagcag

SEQ ID NO: 28493 - RNA, 22 nt, Human
ugcccagguuugagugcccaag

SEQ ID NO: 28494 - RNA, 23 nt, Human
ugcccagugccuuugcccaugca

SEQ ID NO: 28495 - RNA, 23 nt, Human
ugcccagugggugcaggggguau

SEQ ID NO: 28496 - RNA, 22 nt, Human
ugcccauggaccaagcaagggg

SEQ ID NO: 28497 - RNA, 22 nt, Human
ugccccagacucugcucaccuc

SEQ ID NO: 28498 - RNA, 22 nt, Human
ugcccccagacagaauccaguu

SEQ ID NO: 28499 - RNA, 19 nt, Human
ugcccccagcaccucccug

SEQ ID NO: 28500 - RNA, 22 nt, Human
ugccccucgacgcaaugaaggg

SEQ ID NO: 28501 - RNA, 22 nt, Human
ugccccucuaggcccuguucua

SEQ ID NO: 28502 - RNA, 22 nt, Human
ugccccucuccugugauccaag

SEQ ID NO: 28503 - RNA, 22 nt, Human
ugccccucuugagaagcucagc

SEQ ID NO: 28504 - RNA, 22 nt, Human
ugccccugaccucaggcgaagg

SEQ ID NO: 28505 - RNA, 22 nt, Human
ugcccucaagcaacagagagga

SEQ ID NO: 28506 - RNA, 22 nt, Human
ugcccucagcagcagcuccugc

SEQ ID NO: 28507 - RNA, 22 nt, Human
ugcccucagccaccuccaaguu

SEQ ID NO: 28508 - RNA, 22 nt, Human
ugcccucaguuucacaugagug

SEQ ID NO: 28509 - RNA, 22 nt, Human
ugcccugaggcacuccauccau

SEQ ID NO: 28510 - RNA, 19 nt, Human
ugcccugcacgcuguccug

SEQ ID NO: 28511 - RNA, 22 nt, Human
ugcccugcccaucuacccuguc

SEQ ID NO: 28512 - RNA, 22 nt, Human
ugcccugccugagagacaguaa

SEQ ID NO: 28513 - RNA, 22 nt, Human
uuuacauggaauauugucuugu

SEQ ID NO: 28514 - RNA, 22 nt, Human
uuuacaugucaagacuggcagu

SEQ ID NO: 28515 - RNA, 22 nt, Human
uuuacauugcauuagguauuau

SEQ ID NO: 28516 - RNA, 22 nt, Human
uuuaccaaaguacucugaggca

SEQ ID NO: 28517 - RNA, 22 nt, Human
uuuaccaagcuuuaauuacaua

SEQ ID NO: 28518 - RNA, 22 nt, Human
uuuaccagaauugccaccagaa

SEQ ID NO: 28519 - RNA, 22 nt, Human
uuuaccauccucuuuuagaauu

SEQ ID NO: 28520 - RNA, 22 nt, Human
uggcacccugaaguuggucacu

SEQ ID NO: 28521 - RNA, 22 nt, Human
uggcaccuggugcaggguggcc

SEQ ID NO: 28522 - RNA, 22 nt, Human
uggcacguuggauugggaguuc

SEQ ID NO: 28523 - RNA, 22 nt, Human
uggcacugagcagccgcggcag

SEQ ID NO: 28524 - RNA, 21 nt, Human
uggcacugcuuagcagguucc

SEQ ID NO: 28525 - RNA, 22 nt, Human
uggcacuggcgcaggauggcgg

SEQ ID NO: 28526 - RNA, 22 nt, Human
uggcacuguggauuucacaagu

SEQ ID NO: 28527 - RNA, 22 nt, Human
uggcacuuaaugcaugugcuau

SEQ ID NO: 28528 - RNA, 22 nt, Human
uggcacuugcuucagaugaugu

SEQ ID NO: 28529 - RNA, 22 nt, Human
uggcagaaguacacaagcaugc

SEQ ID NO: 28530 - RNA, 22 nt, Human
uggcagaauuuuaaagacagau

SEQ ID NO: 28531 - RNA, 19 nt, Human
uggcagacacaccuucuuc

SEQ ID NO: 28532 - RNA, 22 nt, Human
uggcagacacugucgaagccua

SEQ ID NO: 28533 - RNA, 21 nt, Human
uggcagacuagaguauagaug

SEQ ID NO: 28534 - RNA, 22 nt, Human
uggcagagaauaaaucuugacu

SEQ ID NO: 28535 - RNA, 22 nt, Human
uggcagagacaaggccgggccu

SEQ ID NO: 28536 - RNA, 22 nt, Human
uggcagaggcucugugauguug

SEQ ID NO: 28537 - RNA, 22 nt, Human
uggcagaguuauggguauuuau

SEQ ID NO: 28538 - RNA, 22 nt, Human
uggcagauacccaggcaaaugg

SEQ ID NO: 28539 - RNA, 22 nt, Human
uggcagaugagccgcgcuccaa

SEQ ID NO: 28540 - RNA, 22 nt, Human
uggcagauguauaucacagcuu

SEQ ID NO: 28541 - RNA, 22 nt, Human
uggcagauguggcauagagcau

SEQ ID NO: 28542 - RNA, 22 nt, Human
uggcagaugugguuugagacag

SEQ ID NO: 28543 - RNA, 22 nt, Human
uggcagauuuaacauuggaacu

SEQ ID NO: 28544 - RNA, 22 nt, Human
uggcagcaaguucuugggaggu

SEQ ID NO: 28545 - RNA, 22 nt, Human
uggcagcacaagguggcccaug

SEQ ID NO: 28546 - RNA, 23 nt, Human
uggcagcagaucuuaaagugacc

SEQ ID NO: 28547 - RNA, 22 nt, Human
uggcagcagcuaacuuaggcag

SEQ ID NO: 28548 - RNA, 18 nt, Human
uggcagcaggaagccauu

SEQ ID NO: 28549 - RNA, 22 nt, Human
uggcagcagggccccuggagga

SEQ ID NO: 28550 - RNA, 22 nt, Human
uggcagcaguagccaccccagc

SEQ ID NO: 28551 - RNA, 22 nt, Human
uggcagcauaaagcauuuagcu

SEQ ID NO: 28552 - RNA, 19 nt, Human
uggcagcauugguaccuug

SEQ ID NO: 28553 - RNA, 22 nt, Human
uggcagcauuuuuuccagaaca

SEQ ID NO: 28554 - RNA, 22 nt, Human
uggcagccucagacaaggaccu

SEQ ID NO: 28555 - RNA, 22 nt, Human
uggcagccuggaaucucucagc

SEQ ID NO: 28556 - RNA, 18 nt, Human
uggcagcuagguaaagaa

SEQ ID NO: 28557 - RNA, 22 nt, Human
uggcagcuaucuuuaaugagau

SEQ ID NO: 28558 - RNA, 17 nt, Human
uggcagcugaaagcucu

SEQ ID NO: 28559 - RNA, 22 nt, Human
uggcagcugaauggcuggaugg

SEQ ID NO: 28560 - RNA, 22 nt, Human
uggcagcugaggggaggcuuug

SEQ ID NO: 28561 - RNA, 22 nt, Human
uggcagcugagugcacccccuc

SEQ ID NO: 28562 - RNA, 22 nt, Human
uggcagcugauuagauggugcc

SEQ ID NO: 28563 - RNA, 22 nt, Human
uggcagcuguuaauguuuuguu

SEQ ID NO: 28564 - RNA, 22 nt, Human
uggcaggaaaaagggccagagg

SEQ ID NO: 28565 - RNA, 23 nt, Human
uggcaggaaaugagaauguuccu

SEQ ID NO: 28566 - RNA, 22 nt, Human
uggcaggaaccaggaggcucuc

SEQ ID NO: 28567 - RNA, 22 nt, Human
uggcaggagacacauggcauag

SEQ ID NO: 28568 - RNA, 22 nt, Human
uggcaggagccugcggggaggu

SEQ ID NO: 28569 - RNA, 22 nt, Human
uggcaggcagagagcggccuuu

SEQ ID NO: 28570 - RNA, 22 nt, Human
uggcaggcagugugggagcugg

SEQ ID NO: 28571 - RNA, 22 nt, Human
uggcagggaauacagauguuua

SEQ ID NO: 28572 - RNA, 22 nt, Human
uggcagggccuaccccaauauc

SEQ ID NO: 28573 - RNA, 22 nt, Human
uggcagggccugcucaucaucc

SEQ ID NO: 28574 - RNA, 22 nt, Human
uggcagggugggcuucagcccc

SEQ ID NO: 28575 - RNA, 18 nt, Human
uggcagguagacucaggu

SEQ ID NO: 28576 - RNA, 22 nt, Human
uggcagguagucagaggcgaca

SEQ ID NO: 28577 - RNA, 22 nt, Human
uggcaggugaaguuguuaggga

SEQ ID NO: 28578 - RNA, 22 nt, Human
uggcaggugcacuuuugguuuc

SEQ ID NO: 28579 - RNA, 23 nt, Human
uggcaggugguuagauguuuugu

SEQ ID NO: 28580 - RNA, 22 nt, Human
uggcagguuaacuuacaacugu

SEQ ID NO: 28581 - RNA, 22 nt, Human
uggcagguuaugcgggccacau

SEQ ID NO: 28582 - RNA, 22 nt, Human
uggcaguagagcuggaacuuga

SEQ ID NO: 28583 - RNA, 22 nt, Human
uggcagucccucugguagcacc

SEQ ID NO: 28584 - RNA, 22 nt, Human
uggcaguccucuuccucgggcg

SEQ ID NO: 28585 - RNA, 22 nt, Human
uggcagucgaucauauucagca

SEQ ID NO: 28586 - RNA, 22 nt, Human
uggcagucggacuucuaucuca

SEQ ID NO: 28587 - RNA, 22 nt, Human
uggcagucuucaucaguucugg

SEQ ID NO: 28588 - RNA, 22 nt, Human
uggcaguggcacugcccccaua

SEQ ID NO: 28589 - RNA, 22 nt, Human
uggcaguggcgggacucagggc

SEQ ID NO: 28590 - RNA, 22 nt, Human
uggcaguguauagguggcuccu

SEQ ID NO: 28591 - RNA, 22 nt, Human
uggcagugucuugcuggggcag

SEQ ID NO: 28592 - RNA, 19 nt, Human
uggcaguguggcuuccaga

SEQ ID NO: 28593 - RNA, 22 nt, Human
uggcagugugggaggaagguac

SEQ ID NO: 28594 - RNA, 22 nt, Human
uggcaguucagguuggacucuu

SEQ ID NO: 28595 - RNA, 22 nt, Human
uggcaguucuaauugaccauuu

SEQ ID NO: 28596 - RNA, 22 nt, Human
uggcaguuggggaugaagugag

SEQ ID NO: 28597 - RNA, 22 nt, Human
uggcaguuucaugugauucaac

SEQ ID NO: 28598 - RNA, 23 nt, Human
uggcauagugaggggcacagaga

SEQ ID NO: 28599 - RNA, 22 nt, Human
uggcaucucaaacaggcagauu

SEQ ID NO: 28600 - RNA, 22 nt, Human
uggcaucuccgacagucuugau

SEQ ID NO: 28601 - RNA, 22 nt, Human
uggcaucuuugucccagaagcu

SEQ ID NO: 28602 - RNA, 22 nt, Human
uggcaugauaggaggugcagaa

SEQ ID NO: 28603 - RNA, 19 nt, Human
uggcaugaugauggauggg

SEQ ID NO: 28604 - RNA, 22 nt, Human
uggcaugcaagaggaggcuccc

SEQ ID NO: 28605 - RNA, 21 nt, Human
uggcauggagguagcagugug

SEQ ID NO: 28606 - RNA, 22 nt, Human
uggcauggcguggcaucgugug

SEQ ID NO: 28607 - RNA, 22 nt, Human
uggcauggcuacuggaauggcg

SEQ ID NO: 28608 - RNA, 22 nt, Human
uggcaugggcaaaccagggaaa

SEQ ID NO: 28609 - RNA, 22 nt, Human
uggcaugggccagggagagcug

SEQ ID NO: 28610 - RNA, 22 nt, Human
uggcauguaguaggugcuauaa

SEQ ID NO: 28611 - RNA, 22 nt, Human
uggcauguggcagcugguucag

SEQ ID NO: 28612 - RNA, 22 nt, Human
uggcauguggcuuugagucauc

SEQ ID NO: 28613 - RNA, 22 nt, Human
uggcauguguguguaggauaca

SEQ ID NO: 28614 - RNA, 22 nt, Human
uggcauguugagaggcaagauu

SEQ ID NO: 28615 - RNA, 22 nt, Human
uggcauguuuaauguacuguau

SEQ ID NO: 28616 - RNA, 22 nt, Human
uggcauguuucauggcugcaaa

SEQ ID NO: 28617 - RNA, 19 nt, Human
uggcauguuuggcuaagga

SEQ ID NO: 28618 - RNA, 23 nt, Human
uggcauuucuauacuggcaagug

SEQ ID NO: 28619 - RNA, 22 nt, Human
uggcauuugagcuggaaggaug

SEQ ID NO: 28620 - RNA, 19 nt, Human
uggcauuuggaggcaaccu

SEQ ID NO: 28621 - RNA, 22 nt, Human
uggcauuuguagccacuugccu

SEQ ID NO: 28622 - RNA, 22 nt, Human
uggcauuuucuccuuugaguuu

SEQ ID NO: 28623 - RNA, 22 nt, Human
uggccaaaguagaaaauaauag

SEQ ID NO: 28624 - RNA, 22 nt, Human
uggccaaauuugguguaacuug

SEQ ID NO: 28625 - RNA, 22 nt, Human
uggccaagaaugauaugugaag

SEQ ID NO: 28626 - RNA, 22 nt, Human
uggccacacugcccccacuggg

SEQ ID NO: 28627 - RNA, 22 nt, Human
uggccacauccuuuccuuguca

SEQ ID NO: 28628 - RNA, 22 nt, Human
ugcagggauuguuggcauccau

SEQ ID NO: 28629 - RNA, 22 nt, Human
uuuccaaagcugaguugagcaa

SEQ ID NO: 28630 - RNA, 22 nt, Human
uuuccaaauaaggucacacuca

SEQ ID NO: 28631 - RNA, 22 nt, Human
uuuccaagcugucuuggcccac

SEQ ID NO: 28632 - RNA, 22 nt, Human
ugcucaggcccugggccauccu

SEQ ID NO: 28633 - RNA, 22 nt, Human
ugcucagggacaauggagaggg

SEQ ID NO: 28634 - RNA, 22 nt, Human
ugcucaggucguucugccccuu

SEQ ID NO: 28635 - RNA, 21 nt, Human
ugcucaguaaaugcugaguga

SEQ ID NO: 28636 - RNA, 21 nt, Human
ugcucagucugucuccagcuu

SEQ ID NO: 28637 - RNA, 22 nt, Human
ugcucauuugcccauuagcauc

SEQ ID NO: 28638 - RNA, 22 nt, Human
ugcuccacccucacacucuucc

SEQ ID NO: 28639 - RNA, 22 nt, Human
ugcuccagaaaaacuugagacu

SEQ ID NO: 28640 - RNA, 22 nt, Human
ugcuccagaaccugaccaugcu

SEQ ID NO: 28641 - RNA, 22 nt, Human
ugcuccagcaugacccucaaug

SEQ ID NO: 28642 - RNA, 20 nt, Human
ugcuccaggaacacuggccg

SEQ ID NO: 28643 - RNA, 22 nt, Human
ugcuccaggagcaaccuuugag

SEQ ID NO: 28644 - RNA, 21 nt, Human
ugcuccaggagggggcagucc

SEQ ID NO: 28645 - RNA, 21 nt, Human
ugcuccagggcagcuuccagc

SEQ ID NO: 28646 - RNA, 22 nt, Human
ugcuccaucucucgugguucca

SEQ ID NO: 28647 - RNA, 22 nt, Human
ugcuccauucucuagccagugc

SEQ ID NO: 28648 - RNA, 22 nt, Human
ugcucccaaacgaccuacugug

SEQ ID NO: 28649 - RNA, 22 nt, Human
ugcucccagcuguaggaauguu

SEQ ID NO: 28650 - RNA, 22 nt, Human
ugcuccugagugugcaggagau

SEQ ID NO: 28651 - RNA, 22 nt, Human
ugcuccugauaucuaaugugua

SEQ ID NO: 28652 - RNA, 22 nt, Human
ugcuccugcuggcccucgugcc

SEQ ID NO: 28653 - RNA, 22 nt, Human
ugcuccuguuucaucagcuaua

SEQ ID NO: 28654 - RNA, 22 nt, Human
ugcuccuuccucauccugugca

SEQ ID NO: 28655 - RNA, 22 nt, Human
ugcucgagguccccaccggcuc

SEQ ID NO: 28656 - RNA, 22 nt, Human
ugcucgcgcuguuccagcagcu

SEQ ID NO: 28657 - RNA, 22 nt, Human
ugcucuagccuguaaaacauga

SEQ ID NO: 28658 - RNA, 22 nt, Human
ugcucuccggcuuccguggccu

SEQ ID NO: 28659 - RNA, 22 nt, Human
ugcucuggaaauaaaugauuua

SEQ ID NO: 28660 - RNA, 20 nt, Human
ugcucuggaaauggucugag

SEQ ID NO: 28661 - RNA, 22 nt, Human
ugcucuggaauaguccuaggca

SEQ ID NO: 28662 - RNA, 22 nt, Human
ugcucuggcuggagcaaugacu

SEQ ID NO: 28663 - RNA, 22 nt, Human
ugcucugggauucagcagccug

SEQ ID NO: 28664 - RNA, 22 nt, Human
ugcucugggcucaauggcagcu

SEQ ID NO: 28665 - RNA, 22 nt, Human
ugcucuggggcuccccaccaga

SEQ ID NO: 28666 - RNA, 20 nt, Human
ugcucuggggguggagagac

SEQ ID NO: 28667 - RNA, 21 nt, Human
ugcucugguagaaacucuuuc

SEQ ID NO: 28668 - RNA, 22 nt, Human
ugcucuguaacaaauugacaug

SEQ ID NO: 28669 - RNA, 22 nt, Human
ugcucuguaaggucagaaaagg

SEQ ID NO: 28670 - RNA, 20 nt, Human
ugcucugucuaaaacuuccc

SEQ ID NO: 28671 - RNA, 23 nt, Human
ugcucugugaauaguuggugacu

SEQ ID NO: 28672 - RNA, 22 nt, Human
ugcucugugguccaagauggcu

SEQ ID NO: 28673 - RNA, 17 nt, Human
ugcucuguggucuuuua

SEQ ID NO: 28674 - RNA, 22 nt, Human
ugcucuguucaguguaucuugu

SEQ ID NO: 28675 - RNA, 22 nt, Human
ugcucuuacauuaauucagcau

SEQ ID NO: 28676 - RNA, 22 nt, Human
ugcugaaaaguaaauaggccua

SEQ ID NO: 28677 - RNA, 22 nt, Human
ugcugaaauuagaacauugagg

SEQ ID NO: 28678 - RNA, 22 nt, Human
ugcugaaggcaggggagguggc

SEQ ID NO: 28679 - RNA, 22 nt, Human
ugcugaaguuacuagagacuau

SEQ ID NO: 28680 - RNA, 22 nt, Human
ugcugaaguucuuccccuaaug

SEQ ID NO: 28681 - RNA, 22 nt, Human
ugcugaauaaagauauauuuuc

SEQ ID NO: 28682 - RNA, 22 nt, Human
ugcugaauaaauaaagucuauu

SEQ ID NO: 28683 - RNA, 22 nt, Human
ugcugaauauagagcaagaagu

SEQ ID NO: 28684 - RNA, 22 nt, Human
ugcugaaugcugcaugccguau

SEQ ID NO: 28685 - RNA, 22 nt, Human
ugcugaauucuaccauccauuu

SEQ ID NO: 28686 - RNA, 19 nt, Human
ugcugacacuagaugugca

SEQ ID NO: 28687 - RNA, 22 nt, Human
ugcugagaagagggccgaccca

SEQ ID NO: 28688 - RNA, 22 nt, Human
ugcugagauagcugacuaggca

SEQ ID NO: 28689 - RNA, 22 nt, Human
ugcugagaucugccaguagaug

SEQ ID NO: 28690 - RNA, 22 nt, Human
ugcugagaugaauagggcuguc

SEQ ID NO: 28691 - RNA, 22 nt, Human
ugcugagcgcauccggcggccg

SEQ ID NO: 28692 - RNA, 22 nt, Human
ugcugaggaauaauuguuccug

SEQ ID NO: 28693 - RNA, 22 nt, Human
ugcugaggaauuugguuuaugu

SEQ ID NO: 28694 - RNA, 22 nt, Human
ugcugaggcagaugucugugac

SEQ ID NO: 28695 - RNA, 22 nt, Human
ugcugagggcuguuaaggaagc

SEQ ID NO: 28696 - RNA, 22 nt, Human
ugcugaguauuuguuugaauaa

SEQ ID NO: 28697 - RNA, 22 nt, Human
ugcugagucugaaacagcucag

SEQ ID NO: 28698 - RNA, 22 nt, Human
ugcugaugcuguucuguuagga

SEQ ID NO: 28699 - RNA, 22 nt, Human
ugcugcacaauuggaaaguauc

SEQ ID NO: 28700 - RNA, 22 nt, Human
ugcugcacuuauggcucugagg

SEQ ID NO: 28701 - RNA, 22 nt, Human
ugcugcagaaauucugugagga

SEQ ID NO: 28702 - RNA, 22 nt, Human
ugcugcaggcaauagaaaaccu

SEQ ID NO: 28703 - RNA, 22 nt, Human
ugcugcagggaagucggggggu

SEQ ID NO: 28704 - RNA, 22 nt, Human
ugcugcagggccuucccugcau

SEQ ID NO: 28705 - RNA, 22 nt, Human
ugcugcaguauauauuucuugg

SEQ ID NO: 28706 - RNA, 22 nt, Human
ugcugcauagcagcuccugaaa

SEQ ID NO: 28707 - RNA, 22 nt, Human
ugcugcauucaggagcacaguu

SEQ ID NO: 28708 - RNA, 22 nt, Human
ugcugccacaaauucagcugcc

SEQ ID NO: 28709 - RNA, 22 nt, Human
ugcugccaccccucaccagagc

SEQ ID NO: 28710 - RNA, 22 nt, Human
ugcugccacugguagucucauu

SEQ ID NO: 28711 - RNA, 18 nt, Human
ugcugcccaacucucccc

SEQ ID NO: 28712 - RNA, 22 nt, Human
ugcugcccacuguauuucucca

SEQ ID NO: 28713 - RNA, 22 nt, Human
ugcugcccguaccugugcacuu

SEQ ID NO: 28714 - RNA, 23 nt, Human
ugcugcccugccuucagcucucc

SEQ ID NO: 28715 - RNA, 22 nt, Human
ugcugccucaacugucaggaac

SEQ ID NO: 28716 - RNA, 22 nt, Human
ugcugccucagcuuccugggcu

SEQ ID NO: 28717 - RNA, 22 nt, Human
ugcugccugcuacgagggaaga

SEQ ID NO: 28718 - RNA, 22 nt, Human
ugcugccuuuguggggucacug

SEQ ID NO: 28719 - RNA, 22 nt, Human
ugcugcucacacacagugaaug

SEQ ID NO: 28720 - RNA, 22 nt, Human
ugcugcucucagccaccaggaa

SEQ ID NO: 28721 - RNA, 22 nt, Human
ugcugcugacauuuggggcuug

SEQ ID NO: 28722 - RNA, 22 nt, Human
ugcugcugaggcuaaaguauag

SEQ ID NO: 28723 - RNA, 22 nt, Human
ugcugcugauggcaccuaggca

SEQ ID NO: 28724 - RNA, 20 nt, Human
ugcugcugccuccgccucug

SEQ ID NO: 28725 - RNA, 22 nt, Human
ugcugcugcuucuguacagccu

SEQ ID NO: 28726 - RNA, 22 nt, Human
ugcugcuggguuugacagucac

SEQ ID NO: 28727 - RNA, 22 nt, Human
ugcugcuguaucaugccuucau

SEQ ID NO: 28728 - RNA, 19 nt, Human
ugcugcuguccuugcaggg

SEQ ID NO: 28729 - RNA, 22 nt, Human
ugcugcuguugacggcugucca

SEQ ID NO: 28730 - RNA, 19 nt, Human
ugcugcuuccagcucacuc

SEQ ID NO: 28731 - RNA, 22 nt, Human
ugcugcuuccugguagauagga

SEQ ID NO: 28732 - RNA, 22 nt, Human
ugcugcuuggaaauggggcuga

SEQ ID NO: 28733 - RNA, 22 nt, Human
ugcugcuuguuuuguaaauaaa

SEQ ID NO: 28734 - RNA, 20 nt, Human
ugcuggaaaaagucacucau

SEQ ID NO: 28735 - RNA, 22 nt, Human
ugcuggaacucagugaaucauu

SEQ ID NO: 28736 - RNA, 22 nt, Human
ugcuggaauuugccuucuggaa

SEQ ID NO: 28737 - RNA, 23 nt, Human
ugcuggaauuuguacccuggcag

SEQ ID NO: 28738 - RNA, 22 nt, Human
ugcuggagaugaaagggcccug

SEQ ID NO: 28739 - RNA, 22 nt, Human
ugcuggagcccaggcggccuuu

SEQ ID NO: 28740 - RNA, 22 nt, Human
ugcuggagcggaggugagccag

SEQ ID NO: 28741 - RNA, 22 nt, Human
ugcuggaggccgagaagcagca

SEQ ID NO: 28742 - RNA, 22 nt, Human
ugcuggaggggguaccacucaa

SEQ ID NO: 28743 - RNA, 22 nt, Human
ugcuggagucucuugacccugg

SEQ ID NO: 28744 - RNA, 22 nt, Human
ugcuggagugagugguuucuua

SEQ ID NO: 28745 - RNA, 22 nt, Human
ugcuggagugcaguggcuuaac

SEQ ID NO: 28746 - RNA, 18 nt, Human
ugcuggcaacuacuauug

SEQ ID NO: 28747 - RNA, 22 nt, Human
ugcuggcacgaaagggugucca

SEQ ID NO: 28748 - RNA, 22 nt, Human
ugcuggcacgugacugggaagu

SEQ ID NO: 28749 - RNA, 22 nt, Human
ugcuggcaggcaccuccugggg

SEQ ID NO: 28750 - RNA, 22 nt, Human
ugcuggcaucuuaauguucugu

SEQ ID NO: 28751 - RNA, 22 nt, Human
ugcuggccaagcagaggucaau

SEQ ID NO: 28752 - RNA, 22 nt, Human
ugcuggccggccaggugcugag

SEQ ID NO: 28753 - RNA, 21 nt, Human
ugcuggccucaagggugacuu

SEQ ID NO: 28754 - RNA, 22 nt, Human
ugcuggcuaauggaaaccagau

SEQ ID NO: 28755 - RNA, 22 nt, Human
ugcuggcuacugauggcaggcc

SEQ ID NO: 28756 - RNA, 22 nt, Human
ugcuggcuccaaccuggcaucu

SEQ ID NO: 28757 - RNA, 22 nt, Human
ugcuggcucugggccaagcagg

SEQ ID NO: 28758 - RNA, 21 nt, Human
ugcuggcugaaaggcacagag

SEQ ID NO: 28759 - RNA, 22 nt, Human
ugcuggcugaggccugagcggg

SEQ ID NO: 28760 - RNA, 22 nt, Human
ugcuggcuguucuagggaggcc

SEQ ID NO: 28761 - RNA, 22 nt, Human
ugcuggcuuuaagguuaaagug

SEQ ID NO: 28762 - RNA, 23 nt, Human
ugcuggcuuuuaucuggucccua

SEQ ID NO: 28763 - RNA, 22 nt, Human
ugggaagaugaggugccauggg

SEQ ID NO: 28764 - RNA, 22 nt, Human
ugggaagauggagugacaggca

SEQ ID NO: 28765 - RNA, 22 nt, Human
ugggaagcauuaaugauagggg

SEQ ID NO: 28766 - RNA, 22 nt, Human
ugggaagcugcauuuuaacaag

SEQ ID NO: 28767 - RNA, 22 nt, Human
ugggaaggaacugccuuuagcu

SEQ ID NO: 28768 - RNA, 22 nt, Human
ugggaaggcguggaaguagaag

SEQ ID NO: 28769 - RNA, 22 nt, Human
ugggaagggagaguguccugga

SEQ ID NO: 28770 - RNA, 22 nt, Human
ugggaagggccugcccuuccuc

SEQ ID NO: 28771 - RNA, 22 nt, Human
ugggaaggggagcuggaaagga

SEQ ID NO: 28772 - RNA, 22 nt, Human
ugggaagggucaguuucuucau

SEQ ID NO: 28773 - RNA, 22 nt, Human
ugggaagguacacgggaaagag

SEQ ID NO: 28774 - RNA, 22 nt, Human
ugggaagguguagaaagaacaa

SEQ ID NO: 28775 - RNA, 22 nt, Human
ugggaaguuaggaugccaggga

SEQ ID NO: 28776 - RNA, 22 nt, Human
ugggaauacaaguuauucaccu

SEQ ID NO: 28777 - RNA, 22 nt, Human
ugggaaugcaaggaaagcuguu

SEQ ID NO: 28778 - RNA, 22 nt, Human
ugggaaugcugagcccauguau

SEQ ID NO: 28779 - RNA, 22 nt, Human
ugggaaugggccuagaaggcug

SEQ ID NO: 28780 - RNA, 22 nt, Human
ugggaaugugagcauucauuca

SEQ ID NO: 28781 - RNA, 22 nt, Human
ugggacacaaaccagaccagga

SEQ ID NO: 28782 - RNA, 22 nt, Human
ugggacacagaaaaggcagguu

SEQ ID NO: 28783 - RNA, 22 nt, Human
ugggacaggaggccucuggaga

SEQ ID NO: 28784 - RNA, 22 nt, Human
ugggacagugugccuugcuccu

SEQ ID NO: 28785 - RNA, 22 nt, Human
ugggacaguuguccuccacucu

SEQ ID NO: 28786 - RNA, 22 nt, Human
ugggaccacacuuugaacaaca

SEQ ID NO: 28787 - RNA, 21 nt, Human
ugggaccuauuucaacuggau

SEQ ID NO: 28788 - RNA, 22 nt, Human
ugggaccucucuugagagagca

SEQ ID NO: 28789 - RNA, 22 nt, Human
ugggaccugcuccuggaaugag

SEQ ID NO: 28790 - RNA, 22 nt, Human
ugggaccugcucuuggaaugag

SEQ ID NO: 28791 - RNA, 22 nt, Human
ugggacugugaccuccagggua

SEQ ID NO: 28792 - RNA, 22 nt, Human
ugggagaaacugucucucccac

SEQ ID NO: 28793 - RNA, 22 nt, Human
ugggagaagcagcagccaagug

SEQ ID NO: 28794 - RNA, 21 nt, Human
ugggagaccgccuuccuggga

SEQ ID NO: 28795 - RNA, 22 nt, Human
ugggagagaauucuggugacug

SEQ ID NO: 28796 - RNA, 21 nt, Human
ugggagagcguugcuguccuc

SEQ ID NO: 28797 - RNA, 22 nt, Human
ugggagagcuucaugccuucag

SEQ ID NO: 28798 - RNA, 21 nt, Human
ugggagagggcucagcuaccc

SEQ ID NO: 28799 - RNA, 22 nt, Human
ugggagaguaaccaauuccuuc

SEQ ID NO: 28800 - RNA, 22 nt, Human
ugggagagugcucaaugugcaa

SEQ ID NO: 28801 - RNA, 22 nt, Human
ugggagcagcagggagaugcgg

SEQ ID NO: 28802 - RNA, 22 nt, Human
ugggagcagcuuugcgagggag

SEQ ID NO: 28803 - RNA, 22 nt, Human
ugggagcaggugugcuagggaa

SEQ ID NO: 28804 - RNA, 22 nt, Human
ugggagcucacaggccuggcuc

SEQ ID NO: 28805 - RNA, 22 nt, Human
ugggagcucagaaagggagguc

SEQ ID NO: 28806 - RNA, 22 nt, Human
ugggagcucugagccugcuaug

SEQ ID NO: 28807 - RNA, 22 nt, Human
ugggagcucugagccugcugug

SEQ ID NO: 28808 - RNA, 22 nt, Human
ugggaggagcccucugggaagg

SEQ ID NO: 28809 - RNA, 22 nt, Human
ugggaggaucgcuugagcccag

SEQ ID NO: 28810 - RNA, 22 nt, Human
ugggaggcagguaggugaugau

SEQ ID NO: 28811 - RNA, 22 nt, Human
ugggaggucucuugcggccuag

SEQ ID NO: 28812 - RNA, 20 nt, Human
ugggaguacaaucaugagca

SEQ ID NO: 28813 - RNA, 22 nt, Human
ugggagugauacaguauggaau

SEQ ID NO: 28814 - RNA, 21 nt, Human
ugggauagaaauauggcugcu

SEQ ID NO: 28815 - RNA, 22 nt, Human
ugggauagauugauggauagag

SEQ ID NO: 28816 - RNA, 22 nt, Human
ugggauagggcuauugcucaca

SEQ ID NO: 28817 - RNA, 22 nt, Human
ugggauaguggccaggaccccc

SEQ ID NO: 28818 - RNA, 20 nt, Human
ugggaucgaaucaagucugu

SEQ ID NO: 28819 - RNA, 22 nt, Human
ugggaucugcaguuuaacaaaa

SEQ ID NO: 28820 - RNA, 22 nt, Human
ugggaugagaagugcgaggguu

SEQ ID NO: 28821 - RNA, 22 nt, Human
ugggaugccggcaggaggcaau

SEQ ID NO: 28822 - RNA, 23 nt, Human
ugggauggauucaccagugugcu

SEQ ID NO: 28823 - RNA, 22 nt, Human
ugggcaaacugucaaccauguc

SEQ ID NO: 28824 - RNA, 22 nt, Human
ugggcaaaggcuguaacccauc

SEQ ID NO: 28825 - RNA, 22 nt, Human
ugggcaagcaggagggccucag

SEQ ID NO: 28826 - RNA, 22 nt, Human
ugggcaaggcuggagccugcag

SEQ ID NO: 28827 - RNA, 22 nt, Human
ugggcaagggacaggccuggcu

SEQ ID NO: 28828 - RNA, 22 nt, Human
ugggcaaguaucggacucugag

SEQ ID NO: 28829 - RNA, 18 nt, Human
ugggcacaaugaacagca

SEQ ID NO: 28830 - RNA, 22 nt, Human
ugggcacacugaaucugcuauu

SEQ ID NO: 28831 - RNA, 22 nt, Human
ugggcacagaauagauggccca

SEQ ID NO: 28832 - RNA, 21 nt, Human
ugggcaccaaaaccuaggagu

SEQ ID NO: 28833 - RNA, 20 nt, Human
ugggcaccagaugggaugcc

SEQ ID NO: 28834 - RNA, 22 nt, Human
ugggcacuccuggggacagcug

SEQ ID NO: 28835 - RNA, 22 nt, Human
ugggcagaaugugggauccaga

SEQ ID NO: 28836 - RNA, 22 nt, Human
ugggcagacuaaggucaaagcu

SEQ ID NO: 28837 - RNA, 22 nt, Human
ugggcagaggcucugaagucca

SEQ ID NO: 28838 - RNA, 22 nt, Human
ugggcagaguagcucagaagaa

SEQ ID NO: 28839 - RNA, 22 nt, Human
ugggcagagucguggggaauag

SEQ ID NO: 28840 - RNA, 16 nt, Human
ugggcagaugagaaga

SEQ ID NO: 28841 - RNA, 21 nt, Human
ugggcagauggcaguguggcu

SEQ ID NO: 28842 - RNA, 22 nt, Human
ugggcagauuaaugcaguggcu

SEQ ID NO: 28843 - RNA, 22 nt, Human
ugggcagcauccuccacaguca

SEQ ID NO: 28844 - RNA, 22 nt, Human
ugggcagcuuccacuuaguuag

SEQ ID NO: 28845 - RNA, 22 nt, Human
ugggcaggcaagugaauaccuu

SEQ ID NO: 28846 - RNA, 22 nt, Human
ugggcaggggcccugcuuccgu

SEQ ID NO: 28847 - RNA, 22 nt, Human
uuuguaaaauuagggaauucaa

SEQ ID NO: 28848 - RNA, 22 nt, Human
uuuguaaagucuguucugaguu

SEQ ID NO: 28849 - RNA, 22 nt, Human
uuuguaacaucccaacaaauuu

SEQ ID NO: 28850 - RNA, 22 nt, Human
uuuguaacugagugcucagagc

SEQ ID NO: 28851 - RNA, 22 nt, Human
uuuguaagagcauauguaaagg

SEQ ID NO: 28852 - RNA, 22 nt, Human
uuuguaagcaaguuaacauuuu

SEQ ID NO: 28853 - RNA, 22 nt, Human
uuuguaagcaguguuuuuacag

SEQ ID NO: 28854 - RNA, 22 nt, Human
uuuguaaugauaauguuaaauu

SEQ ID NO: 28855 - RNA, 17 nt, Human
uuuguacaacauuuuaa

SEQ ID NO: 28856 - RNA, 22 nt, Human
uuuguacagugauguuguaugc

SEQ ID NO: 28857 - RNA, 22 nt, Human
uuuguacauauauaaaaucugu

SEQ ID NO: 28858 - RNA, 22 nt, Human
uuuguacauguaagauugcauc

SEQ ID NO: 28859 - RNA, 22 nt, Human
uuuguacuaugguuuuucacua

SEQ ID NO: 28860 - RNA, 22 nt, Human
uuuguacucucagaauucagaa

SEQ ID NO: 28861 - RNA, 22 nt, Human
uuuguacugaccaauuauuuga

SEQ ID NO: 28862 - RNA, 22 nt, Human
uuuguacuggaagaacaugcaa

SEQ ID NO: 28863 - RNA, 22 nt, Human
uuuguagacgucagaaguuacu

SEQ ID NO: 28864 - RNA, 22 nt, Human
uuuguagagaauguuaagcacu

SEQ ID NO: 28865 - RNA, 22 nt, Human
uuuguagauagaaaaaugauua

SEQ ID NO: 28866 - RNA, 22 nt, Human
uuuguauaagaacauucuagca

SEQ ID NO: 28867 - RNA, 22 nt, Human
uuuguaugugauaagacuauuc

SEQ ID NO: 28868 - RNA, 22 nt, Human
uuugucaaaucaaaccacauuc

SEQ ID NO: 28869 - RNA, 22 nt, Human
uuugucaugcuuuccuuaugga

SEQ ID NO: 28870 - RNA, 22 nt, Human
uuuguccuugaaucaauucaca

SEQ ID NO: 28871 - RNA, 22 nt, Human
uuugucuaauugcaaggcaagu

SEQ ID NO: 28872 - RNA, 19 nt, Human
uuugucucugaauaauauu

SEQ ID NO: 28873 - RNA, 22 nt, Human
uuugucugccuugcuggacugu

SEQ ID NO: 28874 - RNA, 20 nt, Human
uuugucuguuaaguguuucu

SEQ ID NO: 28875 - RNA, 22 nt, Human
uuugucuucccccuuuaaucag

SEQ ID NO: 28876 - RNA, 22 nt, Human
uuugucuuguaaguuaaauuca

SEQ ID NO: 28877 - RNA, 19 nt, Human
uuugugaagaaaaugaugc

SEQ ID NO: 28878 - RNA, 22 nt, Human
uuugugaauucuuggaagauug

SEQ ID NO: 28879 - RNA, 22 nt, Human
ugcuggcuuuuccuucaggcag

SEQ ID NO: 28880 - RNA, 22 nt, Human
ugcugggauauagcuucuaggg

SEQ ID NO: 28881 - RNA, 22 nt, Human
ugcugggcacugucuagguacu

SEQ ID NO: 28882 - RNA, 22 nt, Human
ugcugggcagugugcccucgag

SEQ ID NO: 28883 - RNA, 20 nt, Human
ugcugggcaugcaguggaaa

SEQ ID NO: 28884 - RNA, 22 nt, Human
ugcugggccaaagcaggguuuu

SEQ ID NO: 28885 - RNA, 22 nt, Human
ugcugggcccagggagccucug

SEQ ID NO: 28886 - RNA, 22 nt, Human
ugcugggccucuucccuggaua

SEQ ID NO: 28887 - RNA, 22 nt, Human
ugcugggccuuuaccuccaggg

SEQ ID NO: 28888 - RNA, 22 nt, Human
ugcugggcugcacccccagagu

SEQ ID NO: 28889 - RNA, 20 nt, Human
ugcuggggacauacagggug

SEQ ID NO: 28890 - RNA, 22 nt, Human
ugcuggggauccguaccaaccc

SEQ ID NO: 28891 - RNA, 23 nt, Human
ugcugggguaguuuguggcacag

SEQ ID NO: 28892 - RNA, 23 nt, Human
ugcuggguaucagaaucacugag

SEQ ID NO: 28893 - RNA, 22 nt, Human
ugcugggucaggcaucugcaga

SEQ ID NO: 28894 - RNA, 22 nt, Human
ugcugggucagugagagcaggg

SEQ ID NO: 28895 - RNA, 21 nt, Human
ugcuggugagcucauguggcu

SEQ ID NO: 28896 - RNA, 22 nt, Human
ugcuggugagguccuugcugga

SEQ ID NO: 28897 - RNA, 20 nt, Human
ugcuguaagauuagagagcu

SEQ ID NO: 28898 - RNA, 22 nt, Human
ugcuguagggagaaagaguuga

SEQ ID NO: 28899 - RNA, 21 nt, Human
ugcuguagguuucguggcacu

SEQ ID NO: 28900 - RNA, 22 nt, Human
ugcuguagucaaagcaaagcug

SEQ ID NO: 28901 - RNA, 23 nt, Human
ugcuguagucucuacagcugguc

SEQ ID NO: 28902 - RNA, 22 nt, Human
ugcuguauuuauggccacugaa

SEQ ID NO: 28903 - RNA, 22 nt, Human
ugcugucccuaagucucuucaa

SEQ ID NO: 28904 - RNA, 22 nt, Human
ugcugucuuuuucccuuccuaa

SEQ ID NO: 28905 - RNA, 22 nt, Human
ugcugugacccaaaaaagaccu

SEQ ID NO: 28906 - RNA, 22 nt, Human
ugcugugagguugagaaggaag

SEQ ID NO: 28907 - RNA, 22 nt, Human
ugcugugcaucauaguguuugg

SEQ ID NO: 28908 - RNA, 23 nt, Human
ugcugugccuuugucugccucca

SEQ ID NO: 28909 - RNA, 23 nt, Human
ugcuguggauggcagguccuugc

SEQ ID NO: 28910 - RNA, 22 nt, Human
ugcuguggauucagagaugaaa

SEQ ID NO: 28911 - RNA, 22 nt, Human
ugcugugucuuucugugaaaag

SEQ ID NO: 28912 - RNA, 22 nt, Human
ugcuguguucaccaauaugugu

SEQ ID NO: 28913 - RNA, 22 nt, Human
ugcuguuaguaaggaacaugac

SEQ ID NO: 28914 - RNA, 22 nt, Human
ugcuuaaaaagcuccaucaaua

SEQ ID NO: 28915 - RNA, 22 nt, Human
ugcuuaaacccugaucaugugu

SEQ ID NO: 28916 - RNA, 22 nt, Human
ugcuuaaagcugcucaguugua

SEQ ID NO: 28917 - RNA, 22 nt, Human
ugcuuaaauuucagcagcuuaa

SEQ ID NO: 28918 - RNA, 22 nt, Human
ugcuuauauuuauugggcuuag

SEQ ID NO: 28919 - RNA, 22 nt, Human
ugcuuauuaacauguauaucuc

SEQ ID NO: 28920 - RNA, 22 nt, Human
ugcuuauugcuuucaagacugu

SEQ ID NO: 28921 - RNA, 22 nt, Human
ugcuuauuuagguagauauuaa

SEQ ID NO: 28922 - RNA, 22 nt, Human
ugcuuauuuauagucaauagag

SEQ ID NO: 28923 - RNA, 22 nt, Human
ugcuucagaggaaaggcaaaag

SEQ ID NO: 28924 - RNA, 22 nt, Human
ugcuucaggaagaaacgccagg

SEQ ID NO: 28925 - RNA, 17 nt, Human
ugcuucaucccgauccu

SEQ ID NO: 28926 - RNA, 20 nt, Human
ugcuucauuaugugagauag

SEQ ID NO: 28927 - RNA, 22 nt, Human
ugcuuccagcucucuguaaggu

SEQ ID NO: 28928 - RNA, 22 nt, Human
ugcuucccucacuucaccuggc

SEQ ID NO: 28929 - RNA, 22 nt, Human
ugcuucccugcucugcacaccu

SEQ ID NO: 28930 - RNA, 22 nt, Human
ugcuuccgcuaaaaauuaaucc

SEQ ID NO: 28931 - RNA, 22 nt, Human
ugcuuccuauccacacaaugcc

SEQ ID NO: 28932 - RNA, 19 nt, Human
ugcuuccucaccaucuccc

SEQ ID NO: 28933 - RNA, 22 nt, Human
ugcuuccugcuaaggcugccug

SEQ ID NO: 28934 - RNA, 22 nt, Human
ugcuuccuugaucauucccaaa

SEQ ID NO: 28935 - RNA, 22 nt, Human
ugcuucuagacacugcaauuga

SEQ ID NO: 28936 - RNA, 22 nt, Human
ugcuucucaaaaggagguaggu

SEQ ID NO: 28937 - RNA, 22 nt, Human
ugcuucucaaagaagcauaaug

SEQ ID NO: 28938 - RNA, 22 nt, Human
ugcuucugacauguucuugguu

SEQ ID NO: 28939 - RNA, 22 nt, Human
ugcuucugcugauauuuuguga

SEQ ID NO: 28940 - RNA, 22 nt, Human
ugcuucuggaaacaguggcugu

SEQ ID NO: 28941 - RNA, 22 nt, Human
ugcuucuggaguaacaggguga

SEQ ID NO: 28942 - RNA, 22 nt, Human
ugcuucuggcagauugagugag

SEQ ID NO: 28943 - RNA, 22 nt, Human
ugcuucuggcuuaucucgugcc

SEQ ID NO: 28944 - RNA, 22 nt, Human
ugcuucuguuacauaccagaac

SEQ ID NO: 28945 - RNA, 22 nt, Human
ugcuucuuuacuauaggcaauu

SEQ ID NO: 28946 - RNA, 22 nt, Human
ugcuugaagccuacauucguca

SEQ ID NO: 28947 - RNA, 17 nt, Human
ugcuugacucucuuguu

SEQ ID NO: 28948 - RNA, 22 nt, Human
ugcuugacuuugucacagcaug

SEQ ID NO: 28949 - RNA, 22 nt, Human
ugcuugagacacauaugaauuu

SEQ ID NO: 28950 - RNA, 22 nt, Human
ugcuugauggcucuucuuucua

SEQ ID NO: 28951 - RNA, 21 nt, Human
ugcuugcagaacuuucaggcu

SEQ ID NO: 28952 - RNA, 22 nt, Human
ugcuugcuaugcauccugaacu

SEQ ID NO: 28953 - RNA, 22 nt, Human
ugcuugcugaaaggcauuuaga

SEQ ID NO: 28954 - RNA, 22 nt, Human
ugcuugcuggaggcagacagaa

SEQ ID NO: 28955 - RNA, 23 nt, Human
ugcuuggacaagacucuauuaag

SEQ ID NO: 28956 - RNA, 22 nt, Human
uggaauucuuauucugacuuca

SEQ ID NO: 28957 - RNA, 22 nt, Human
uggacaacugguuuuugacaaa

SEQ ID NO: 28958 - RNA, 22 nt, Human
uggacacaauguugccuuaggg

SEQ ID NO: 28959 - RNA, 22 nt, Human
uggacaggaucugagacugaga

SEQ ID NO: 28960 - RNA, 20 nt, Human
uggacaggggcauagguugc

SEQ ID NO: 28961 - RNA, 22 nt, Human
uggacaggugagugacucaggg

SEQ ID NO: 28962 - RNA, 22 nt, Human
uggacauguaaaggcucaaggu

SEQ ID NO: 28963 - RNA, 22 nt, Human
uggaccagcuccucgggagacg

SEQ ID NO: 28964 - RNA, 21 nt, Human
uggaccaggaaggugguggug

SEQ ID NO: 28965 - RNA, 22 nt, Human
uggaccagggucccagaguaug

SEQ ID NO: 28966 - RNA, 22 nt, Human
uggacccuggacugcccuggcc

SEQ ID NO: 28967 - RNA, 22 nt, Human
uggaccgcagggaugcccggca

SEQ ID NO: 28968 - RNA, 22 nt, Human
uggaccugagccuggcccugcc

SEQ ID NO: 28969 - RNA, 22 nt, Human
uggaccugggguggccuccucu

SEQ ID NO: 28970 - RNA, 22 nt, Human
uggacucuaagcagaggaucua

SEQ ID NO: 28971 - RNA, 22 nt, Human
uggacucugaacuggcacugac

SEQ ID NO: 28972 - RNA, 22 nt, Human
uggacugauuuucauuuuaaau

SEQ ID NO: 28973 - RNA, 22 nt, Human
uggacuggaaugcugauccucu

SEQ ID NO: 28974 - RNA, 21 nt, Human
uggacuggugaguuuaggcug

SEQ ID NO: 28975 - RNA, 22 nt, Human
uggacuuucuaggguagaggaa

SEQ ID NO: 28976 - RNA, 22 nt, Human
uggagaagcuguagguggacuc

SEQ ID NO: 28977 - RNA, 22 nt, Human
uggagaaggacagccugagaaa

SEQ ID NO: 28978 - RNA, 22 nt, Human
uggagaaggccggccaggagug

SEQ ID NO: 28979 - RNA, 22 nt, Human
uggagaagucaaagugaacagg

SEQ ID NO: 28980 - RNA, 22 nt, Human
uggagaauauuuccaaaucuaa

SEQ ID NO: 28981 - RNA, 22 nt, Human
uggagaaugauauuccaucauu

SEQ ID NO: 28982 - RNA, 18 nt, Human
uggagacauagacaaugu

SEQ ID NO: 28983 - RNA, 22 nt, Human
uggagacaugggcgaaucuaag

SEQ ID NO: 28984 - RNA, 22 nt, Human
uggagacugauaaaggcuauug

SEQ ID NO: 28985 - RNA, 22 nt, Human
uggagagaaaaaagacaguucu

SEQ ID NO: 28986 - RNA, 22 nt, Human
uggagagagucgggauaguaca

SEQ ID NO: 28987 - RNA, 22 nt, Human
uggagagccuggagucccugau

SEQ ID NO: 28988 - RNA, 22 nt, Human
uggagagcuguugaaaugcaga

SEQ ID NO: 28989 - RNA, 22 nt, Human
uggagaguaaauggcagaauca

SEQ ID NO: 28990 - RNA, 22 nt, Human
uggagaugaggacauggacguc

SEQ ID NO: 28991 - RNA, 23 nt, Human
uggagaugccccacucccugucu

SEQ ID NO: 28992 - RNA, 22 nt, Human
uggagaugggaaaaaggaggua

SEQ ID NO: 28993 - RNA, 22 nt, Human
uggagauggguuaauggagaga

SEQ ID NO: 28994 - RNA, 20 nt, Human
uggcaggaauagggccagag

SEQ ID NO: 28995 - RNA, 20 nt, Human
uggcaggacuggcuccaccc

SEQ ID NO: 28996 - RNA, 22 nt, Human
uggcaggauuugcccggaagga

SEQ ID NO: 28997 - RNA, 22 nt, Human
uggcaggcaaguucagcuccac

SEQ ID NO: 28998 - RNA, 22 nt, Human
uggcaggcauccggcaccuucu

SEQ ID NO: 28999 - RNA, 22 nt, Human
uggcaggcauugaugcgaguuc

SEQ ID NO: 29000 - RNA, 22 nt, Human
uggcaggcggagguugcaguga

SEQ ID NO: 29001 - RNA, 22 nt, Human
uggcaggcucugaguagcaccu

SEQ ID NO: 29002 - RNA, 22 nt, Human
uggcagggccugaaucuuauac

SEQ ID NO: 29003 - RNA, 21 nt, Human
uggcagggguaguaguacagc

SEQ ID NO: 29004 - RNA, 22 nt, Human
uggcagggugccaguugcgagu

SEQ ID NO: 29005 - RNA, 22 nt, Human
uggcaggguuggccaccuuacc

SEQ ID NO: 29006 - RNA, 22 nt, Human
uggcaggucaugaguggccacc

SEQ ID NO: 29007 - RNA, 22 nt, Human
uggcagguccacucacagaucu

SEQ ID NO: 29008 - RNA, 22 nt, Human
uggcaggugccaugggcucaga

SEQ ID NO: 29009 - RNA, 20 nt, Human
uggcagguggccucaguucc

SEQ ID NO: 29010 - RNA, 22 nt, Human
uggcagguggcucuggcauucu

SEQ ID NO: 29011 - RNA, 21 nt, Human
uggcagguucaaaggccuauc

SEQ ID NO: 29012 - RNA, 22 nt, Human
uggcaguaaagcuggaaaagug

SEQ ID NO: 29013 - RNA, 22 nt, Human
uggcaguagauccagucucucu

SEQ ID NO: 29014 - RNA, 22 nt, Human
uggcagucugccucuucaccau

SEQ ID NO: 29015 - RNA, 22 nt, Human
uggcagucuggguuggcaguua

SEQ ID NO: 29016 - RNA, 22 nt, Human
uggcagugaugcggcaggacau

SEQ ID NO: 29017 - RNA, 22 nt, Human
uggcagugaugcuuaugguuug

SEQ ID NO: 29018 - RNA, 22 nt, Human
uggcaguggcaucaccccaaua

SEQ ID NO: 29019 - RNA, 22 nt, Human
uggcagugggaagcuggaaguc

SEQ ID NO: 29020 - RNA, 22 nt, Human
uggcaguuauuaaucaagucuu

SEQ ID NO: 29021 - RNA, 22 nt, Human
uggcaguucaggcugcaaucau

SEQ ID NO: 29022 - RNA, 23 nt, Human
uggcaguuuucuuuugugccagc

SEQ ID NO: 29023 - RNA, 22 nt, Human
uggcaguuuuguauuugagcau

SEQ ID NO: 29024 - RNA, 22 nt, Human
uggcaucauagccaaggugcuu

SEQ ID NO: 29025 - RNA, 22 nt, Human
uggcauccucucuucugagugc

SEQ ID NO: 29026 - RNA, 17 nt, Human
uggcaugaggguguggg

SEQ ID NO: 29027 - RNA, 22 nt, Human
uggcaugaguauaggcuucuca

SEQ ID NO: 29028 - RNA, 22 nt, Human
uggcaugccuugucagacagug

SEQ ID NO: 29029 - RNA, 22 nt, Human
uggcauggacuagugcugaggu

SEQ ID NO: 29030 - RNA, 22 nt, Human
uggcauguauuaguuggcaguu

SEQ ID NO: 29031 - RNA, 22 nt, Human
uggcauguauuuguggugaauu

SEQ ID NO: 29032 - RNA, 22 nt, Human
uggcauguugauaauggagaag

SEQ ID NO: 29033 - RNA, 22 nt, Human
uggcauguuuaaauggcaauaa

SEQ ID NO: 29034 - RNA, 22 nt, Human
uggcauuauguagcagggagca

SEQ ID NO: 29035 - RNA, 22 nt, Human
uggcauugcuucugaaguggag

SEQ ID NO: 29036 - RNA, 22 nt, Human
uggcauuuaguugcguauugca

SEQ ID NO: 29037 - RNA, 22 nt, Human
uggcauuuauaucccaguuuau

SEQ ID NO: 29038 - RNA, 22 nt, Human
uggcauuucaguauuuucauaa

SEQ ID NO: 29039 - RNA, 22 nt, Human
uggcauuucuguuagacucuca

SEQ ID NO: 29040 - RNA, 22 nt, Human
uggcauuugcucccuuguguuc

SEQ ID NO: 29041 - RNA, 21 nt, Human
uggcauuuguacagggacuuu

SEQ ID NO: 29042 - RNA, 22 nt, Human
uggcauuuuagacaugauggug

SEQ ID NO: 29043 - RNA, 21 nt, Human
uggccaaaaccauauuauuaa

SEQ ID NO: 29044 - RNA, 21 nt, Human
uggccaaggaauagaagcucu

SEQ ID NO: 29045 - RNA, 20 nt, Human
uggccaaguauccaacugga

SEQ ID NO: 29046 - RNA, 22 nt, Human
uggccaaucacugacaaaaugc

SEQ ID NO: 29047 - RNA, 22 nt, Human
uggccaauggcuccggccucau

SEQ ID NO: 29048 - RNA, 22 nt, Human
uggccacacccaccuagaggag

SEQ ID NO: 29049 - RNA, 22 nt, Human
uggccacaugcgucugugaggc

SEQ ID NO: 29050 - RNA, 19 nt, Human
uggccaccucugcuguucu

SEQ ID NO: 29051 - RNA, 20 nt, Human
uggccaccugcgucccagcc

SEQ ID NO: 29052 - RNA, 22 nt, Human
uggccaccuucccacuucugcc

SEQ ID NO: 29053 - RNA, 22 nt, Human
uggccagaaccugcaguaggcc

SEQ ID NO: 29054 - RNA, 22 nt, Human
uggccagaagguuuaaaagagg

SEQ ID NO: 29055 - RNA, 22 nt, Human
uggccagcacuuagcccuuacc

SEQ ID NO: 29056 - RNA, 23 nt, Human
uggccagcagaagcaaggggagc

SEQ ID NO: 29057 - RNA, 22 nt, Human
uggccagcagaguucacucucu

SEQ ID NO: 29058 - RNA, 22 nt, Human
uggccagccagaaagaagccuu

SEQ ID NO: 29059 - RNA, 22 nt, Human
uggccagcuguagguugugcag

SEQ ID NO: 29060 - RNA, 22 nt, Human
uggccagcuuugacuguaaacc

SEQ ID NO: 29061 - RNA, 23 nt, Human
uggccaggcauaaaggugggugg

SEQ ID NO: 29062 - RNA, 22 nt, Human
uggccaggccggggacagaacu

SEQ ID NO: 29063 - RNA, 22 nt, Human
uggccaggcuggucuggaacgc

SEQ ID NO: 29064 - RNA, 22 nt, Human
uggccaggggaguuccccucca

SEQ ID NO: 29065 - RNA, 22 nt, Human
uguuuugguagauugauuaugg

SEQ ID NO: 29066 - RNA, 22 nt, Human
uguuuugguuuaaguauaugaa

SEQ ID NO: 29067 - RNA, 22 nt, Human
uguuuugucuaauagggcaggu

SEQ ID NO: 29068 - RNA, 22 nt, Human
uguuuugugcacuucuauagca

SEQ ID NO: 29069 - RNA, 22 nt, Human
uguuuugugcauuuacaacaug

SEQ ID NO: 29070 - RNA, 22 nt, Human
uguuuuguuuaugagagcacag

SEQ ID NO: 29071 - RNA, 22 nt, Human
uguuuuuaaauaaugauagaaa

SEQ ID NO: 29072 - RNA, 22 nt, Human
uguuuuucaaauauugcucugu

SEQ ID NO: 29073 - RNA, 22 nt, Human
uguuuuuguucaaugcuagguc

SEQ ID NO: 29074 - RNA, 22 nt, Human
uuaaaaaccaucuuccuuuccu

SEQ ID NO: 29075 - RNA, 22 nt, Human
uuaaaacagcgugaaucuggca

SEQ ID NO: 29076 - RNA, 22 nt, Human
uuaaaaccaucagcuguaagau

SEQ ID NO: 29077 - RNA, 22 nt, Human
uuaaaaccuagagaucagacag

SEQ ID NO: 29078 - RNA, 22 nt, Human
uuaaaagaauccuguuauccuc

SEQ ID NO: 29079 - RNA, 22 nt, Human
uuaaaagaccuguugagguuag

SEQ ID NO: 29080 - RNA, 22 nt, Human
uuaaaaugcagauuaugacuca

SEQ ID NO: 29081 - RNA, 22 nt, Human
uuaaaaugcagauucugauuca

SEQ ID NO: 29082 - RNA, 23 nt, Human
uuaaacacuaguucgaguagcau

SEQ ID NO: 29083 - RNA, 22 nt, Human
uuaaacacuggggguuaaugca

SEQ ID NO: 29084 - RNA, 22 nt, Human
uuaaacagacaguaaaugaaac

SEQ ID NO: 29085 - RNA, 22 nt, Human
uuaaacagagucugaaauguaa

SEQ ID NO: 29086 - RNA, 22 nt, Human
uuaaacagucccagaggcugac

SEQ ID NO: 29087 - RNA, 22 nt, Human
uuaaacauuuauggaggcagca

SEQ ID NO: 29088 - RNA, 22 nt, Human
uuaaaccaccagaagccauuau

SEQ ID NO: 29089 - RNA, 17 nt, Human
uuaaaccauaaagaagg

SEQ ID NO: 29090 - RNA, 22 nt, Human
uuaaagacaucacagauuacac

SEQ ID NO: 29091 - RNA, 22 nt, Human
uuaaagagaaaguguuugucuu

SEQ ID NO: 29092 - RNA, 22 nt, Human
uuaaagagaacucaaugaauga

SEQ ID NO: 29093 - RNA, 22 nt, Human
uuaaagcaaccaucaauuugga

SEQ ID NO: 29094 - RNA, 22 nt, Human
uuaaagcaaccucagcccucuu

SEQ ID NO: 29095 - RNA, 22 nt, Human
uuaaagcaccuccuuggaugug

SEQ ID NO: 29096 - RNA, 22 nt, Human
uuaaagcacuaaaugaugaggg

SEQ ID NO: 29097 - RNA, 22 nt, Human
uuaaagcauguugcuuaacagg

SEQ ID NO: 29098 - RNA, 22 nt, Human
uuaaagcugagcccucagaagc

SEQ ID NO: 29099 - RNA, 22 nt, Human
uuaaagcuggcguuacaguuug

SEQ ID NO: 29100 - RNA, 22 nt, Human
uuaaaggaauugaguuucuugu

SEQ ID NO: 29101 - RNA, 23 nt, Human
uuaaaggcagauguugaguauua

SEQ ID NO: 29102 - RNA, 22 nt, Human
uuaaaggcgauaaggcaguguu

SEQ ID NO: 29103 - RNA, 22 nt, Human
uuaaaggcuauggcugccuggg

SEQ ID NO: 29104 - RNA, 22 nt, Human
uuaaaggcugaucuuaauauua

SEQ ID NO: 29105 - RNA, 22 nt, Human
uuaaagggccgauuuccaggcc

SEQ ID NO: 29106 - RNA, 22 nt, Human
uuaaaguaugguuuaagggcuu

SEQ ID NO: 29107 - RNA, 19 nt, Human
uuaaagugcgagaagucuu

SEQ ID NO: 29108 - RNA, 22 nt, Human
uuaaaguuugccuauguguugu

SEQ ID NO: 29109 - RNA, 22 nt, Human
uuaaauaguaggucuauuuugg

SEQ ID NO: 29110 - RNA, 22 nt, Human
uuaaauauuuucagcaggguca

SEQ ID NO: 29111 - RNA, 22 nt, Human
uuaaaugaggcugauguagauu

SEQ ID NO: 29112 - RNA, 22 nt, Human
uuaaaugaugcauaucauuuag

SEQ ID NO: 29113 - RNA, 22 nt, Human
uuaaauggagggggaaauacgu

SEQ ID NO: 29114 - RNA, 22 nt, Human
uuaaaugucuguagaugugcug

SEQ ID NO: 29115 - RNA, 22 nt, Human
uuaaaugugauccugguaugca

SEQ ID NO: 29116 - RNA, 22 nt, Human
uuaaauuauuucuagugaggug

SEQ ID NO: 29117 - RNA, 22 nt, Human
uuaacaaagcucuguuccuuuu

SEQ ID NO: 29118 - RNA, 22 nt, Human
uuaacaaaguaacgggaaaaga

SEQ ID NO: 29119 - RNA, 22 nt, Human
uuaacacauauuuaucaauugc

SEQ ID NO: 29120 - RNA, 22 nt, Human
uuaacagacuugggauuuucua

SEQ ID NO: 29121 - RNA, 22 nt, Human
uuaacaggaguaacucuagaaa

SEQ ID NO: 29122 - RNA, 22 nt, Human
uuaacagguuauauuguacagg

SEQ ID NO: 29123 - RNA, 22 nt, Human
uuaacaguuaaacaauuggcua

SEQ ID NO: 29124 - RNA, 22 nt, Human
uuaacuucaacacucucuugua

SEQ ID NO: 29125 - RNA, 20 nt, Human
uuaagaaaagcacauccugc

SEQ ID NO: 29126 - RNA, 22 nt, Human
uuaagaaggcuguuugcuagac

SEQ ID NO: 29127 - RNA, 22 nt, Human
uuaagaagguacucaaagaucu

SEQ ID NO: 29128 - RNA, 22 nt, Human
uuaagaauggaaugaggaauuu

SEQ ID NO: 29129 - RNA, 22 nt, Human
uuaagacauuuuuggagauuau

SEQ ID NO: 29130 - RNA, 22 nt, Human
uuaagagacaggagaaugaugu

SEQ ID NO: 29131 - RNA, 21 nt, Human
uuaagagcuuagcaguaggcc

SEQ ID NO: 29132 - RNA, 22 nt, Human
uuaagauuuucuucaguauuau

SEQ ID NO: 29133 - RNA, 22 nt, Human
uuaagcaacacacauuaauuau

SEQ ID NO: 29134 - RNA, 17 nt, Human
uuaagcauguaaucugc

SEQ ID NO: 29135 - RNA, 22 nt, Human
uuaagcucucauuauuauuauu

SEQ ID NO: 29136 - RNA, 22 nt, Human
uuaaggaaacauuuuuccauag

SEQ ID NO: 29137 - RNA, 22 nt, Human
uuaaggaaccacagcauguuag

SEQ ID NO: 29138 - RNA, 22 nt, Human
uuaaggaaggagucuuaaaugg

SEQ ID NO: 29139 - RNA, 22 nt, Human
uuaaggaaugugcaguuuauau

SEQ ID NO: 29140 - RNA, 23 nt, Human
uuaaggagcuugcacucugggug

SEQ ID NO: 29141 - RNA, 22 nt, Human
uuaaggcauugauauggugcua

SEQ ID NO: 29142 - RNA, 23 nt, Human
uggggagggaagucauuucugua

SEQ ID NO: 29143 - RNA, 22 nt, Human
uggggagguucgggaaucuugu

SEQ ID NO: 29144 - RNA, 22 nt, Human
uggggagucgcugcagagcgau

SEQ ID NO: 29145 - RNA, 17 nt, Human
uggggaugguucaugag

SEQ ID NO: 29146 - RNA, 22 nt, Human
uggggauguaaaugaggugaua

SEQ ID NO: 29147 - RNA, 22 nt, Human
uggggauguagaaaugaacaac

SEQ ID NO: 29148 - RNA, 22 nt, Human
uggggaugucauauaagaggaa

SEQ ID NO: 29149 - RNA, 22 nt, Human
uggggcagcagaccuuucuugg

SEQ ID NO: 29150 - RNA, 22 nt, Human
uggggcaguggcuuuucacccu

SEQ ID NO: 29151 - RNA, 22 nt, Human
uggggcauggaugauaagcugg

SEQ ID NO: 29152 - RNA, 22 nt, Human
uggggccacacaucucuuucua

SEQ ID NO: 29153 - RNA, 22 nt, Human
uggggccagggaggaccagaca

SEQ ID NO: 29154 - RNA, 22 nt, Human
uggggccucaggccuuuuccua

SEQ ID NO: 29155 - RNA, 20 nt, Human
uggggccuguuucugugguu

SEQ ID NO: 29156 - RNA, 22 nt, Human
uggggccuuggccucauuagau

SEQ ID NO: 29157 - RNA, 22 nt, Human
uggggcuaacgagagagcagag

SEQ ID NO: 29158 - RNA, 22 nt, Human
uggggcuccuccuggcaggagg

SEQ ID NO: 29159 - RNA, 23 nt, Human
uggggcugauggagacggaccag

SEQ ID NO: 29160 - RNA, 22 nt, Human
uggggcuggcuauugucucccu

SEQ ID NO: 29161 - RNA, 22 nt, Human
uggggcuggggaucuugagccu

SEQ ID NO: 29162 - RNA, 22 nt, Human
uggggcugugagacuacaggau

SEQ ID NO: 29163 - RNA, 21 nt, Human
ugggggagaauugguugcuuu

SEQ ID NO: 29164 - RNA, 22 nt, Human
ugggggagauugugcaucucua

SEQ ID NO: 29165 - RNA, 22 nt, Human
ugggggaguauagucuggccuc

SEQ ID NO: 29166 - RNA, 22 nt, Human
ugggggcagaggauucaggaau

SEQ ID NO: 29167 - RNA, 22 nt, Human
ugggggcagccaggcugucaag

SEQ ID NO: 29168 - RNA, 17 nt, Human
ugggggcccuguguaga

SEQ ID NO: 29169 - RNA, 22 nt, Human
ugggggcuccaggcuccaggga

SEQ ID NO: 29170 - RNA, 18 nt, Human
uggggggcuugucugaag

SEQ ID NO: 29171 - RNA, 21 nt, Human
ugggggugaggccuaggaauc

SEQ ID NO: 29172 - RNA, 22 nt, Human
ugggggugcccuaugaggaagc

SEQ ID NO: 29173 - RNA, 22 nt, Human
ugggggugguucuugccuccag

SEQ ID NO: 29174 - RNA, 22 nt, Human
ugggguagggaaaagaagucga

SEQ ID NO: 29175 - RNA, 22 nt, Human
ugggguccagugccaccccaag

SEQ ID NO: 29176 - RNA, 22 nt, Human
ugggguccagugccuggcaagg

SEQ ID NO: 29177 - RNA, 22 nt, Human
uggggucccaacucugauugau

SEQ ID NO: 29178 - RNA, 20 nt, Human
ugggguccuggaggggaucc

SEQ ID NO: 29179 - RNA, 18 nt, Human
uggggucucucagguaag

SEQ ID NO: 29180 - RNA, 22 nt, Human
uggggucuggaguugcccauga

SEQ ID NO: 29181 - RNA, 22 nt, Human
uggggugacagugcagugguca

SEQ ID NO: 29182 - RNA, 22 nt, Human
uggggugccgacagggagggca

SEQ ID NO: 29183 - RNA, 22 nt, Human
ugggguggaacccuucugcugg

SEQ ID NO: 29184 - RNA, 22 nt, Human
uggggugugagaaguagaggga

SEQ ID NO: 29185 - RNA, 22 nt, Human
uggggugugcucagagcagggg

SEQ ID NO: 29186 - RNA, 23 nt, Human
ugggguugaauuguagcugugcc

SEQ ID NO: 29187 - RNA, 22 nt, Human
uggguaaauauccuuugugaaa

SEQ ID NO: 29188 - RNA, 22 nt, Human
uggguaagaauugggggcucug

SEQ ID NO: 29189 - RNA, 22 nt, Human
uggguaagguacuguagaucug

SEQ ID NO: 29190 - RNA, 22 nt, Human
uggguagaggaauugggcuacc

SEQ ID NO: 29191 - RNA, 22 nt, Human
uggguagaguggagggauaaga

SEQ ID NO: 29192 - RNA, 22 nt, Human
uggguaggaaucgaguguaugg

SEQ ID NO: 29193 - RNA, 22 nt, Human
uggguagggccugcgccugugc

SEQ ID NO: 29194 - RNA, 22 nt, Human
ugggucagacagccagugggcc

SEQ ID NO: 29195 - RNA, 22 nt, Human
ugggucagagcugugcugccca

SEQ ID NO: 29196 - RNA, 22 nt, Human
ugggucagauugagccccuggu

SEQ ID NO: 29197 - RNA, 23 nt, Human
ugggucagcugccuccaggacaa

SEQ ID NO: 29198 - RNA, 22 nt, Human
uggguccacaaacaucagauau

SEQ ID NO: 29199 - RNA, 22 nt, Human
uggguccagugcagcugcgcgu

SEQ ID NO: 29200 - RNA, 22 nt, Human
ugggucccaaacuccuagaggu

SEQ ID NO: 29201 - RNA, 22 nt, Human
ugggucccaaucugaaauguca

SEQ ID NO: 29202 - RNA, 22 nt, Human
uggguccucuggagcagcagca

SEQ ID NO: 29203 - RNA, 22 nt, Human
uggguccuugcuaacuucuaug

SEQ ID NO: 29204 - RNA, 22 nt, Human
uggguccuugcugauugcugag

SEQ ID NO: 29205 - RNA, 22 nt, Human
uggguccuugcuggcuucaaag

SEQ ID NO: 29206 - RNA, 22 nt, Human
uggguccuuuuuggacuucuuc

SEQ ID NO: 29207 - RNA, 22 nt, Human
ugggucuccugugccugggagg

SEQ ID NO: 29208 - RNA, 23 nt, Human
ugggucucuaguacaggcaggca

SEQ ID NO: 29209 - RNA, 22 nt, Human
ugggugacagacaccucucugu

SEQ ID NO: 29210 - RNA, 22 nt, Human
ugggugaggagaggcugucuaa

SEQ ID NO: 29211 - RNA, 22 nt, Human
ugggugagugggaaaagcccag

SEQ ID NO: 29212 - RNA, 23 nt, Human
ugggugcuaaucugcucugugga

SEQ ID NO: 29213 - RNA, 22 nt, Human
ugggugcucugcgaccguaggg

SEQ ID NO: 29214 - RNA, 22 nt, Human
uggguggcggccugguucugag

SEQ ID NO: 29215 - RNA, 16 nt, Human
ugggugggaggagcgg

SEQ ID NO: 29216 - RNA, 22 nt, Human
ugggugguccaggcucagcaga

SEQ ID NO: 29217 - RNA, 22 nt, Human
ugggugucaaugucacacgauu

SEQ ID NO: 29218 - RNA, 22 nt, Human
uggguguguccauauuuugacu

SEQ ID NO: 29219 - RNA, 22 nt, Human
uggguuaauagaaucauuaacu

SEQ ID NO: 29220 - RNA, 22 nt, Human
uggguucagaucccagcucugu

SEQ ID NO: 29221 - RNA, 22 nt, Human
uggguucuagagggaccagaac

SEQ ID NO: 29222 - RNA, 22 nt, Human
ugguaaaaaccgcaauuacauu

SEQ ID NO: 29223 - RNA, 22 nt, Human
ugguaaaaacugcaauuacuuu

SEQ ID NO: 29224 - RNA, 22 nt, Human
ugguaagaauaggggcuuugga

SEQ ID NO: 29225 - RNA, 22 nt, Human
ugguaaggcccagcuggagucc

SEQ ID NO: 29226 - RNA, 22 nt, Human
ugguaagggguggaaccagagc

SEQ ID NO: 29227 - RNA, 22 nt, Human
ugguaaggguauuauuucaucc

SEQ ID NO: 29228 - RNA, 22 nt, Human
ugguaaggucuucacucagauu

SEQ ID NO: 29229 - RNA, 22 nt, Human
ugguaaugguucucuugcuaua

SEQ ID NO: 29230 - RNA, 22 nt, Human
ugguaauuaauuugauagguuc

SEQ ID NO: 29231 - RNA, 22 nt, Human
ugguaauuuacgcauuucugua

SEQ ID NO: 29232 - RNA, 22 nt, Human
ugguaauuuccgaagugaguaa

SEQ ID NO: 29233 - RNA, 19 nt, Human
ugguacaaaccaagagaga

SEQ ID NO: 29234 - RNA, 21 nt, Human
ugguacaccuugccugucaga

SEQ ID NO: 29235 - RNA, 21 nt, Human
ugguacagaggaggugaagug

SEQ ID NO: 29236 - RNA, 22 nt, Human
ugguaccagggguuauuucugc

SEQ ID NO: 29237 - RNA, 22 nt, Human
ugguaccauuucccaggagugu

SEQ ID NO: 29238 - RNA, 22 nt, Human
ugguaggaaugauuacgacuuu

SEQ ID NO: 29239 - RNA, 22 nt, Human
ugguaggagauauggucuccga

SEQ ID NO: 29240 - RNA, 22 nt, Human
ugguagggacacuaugcagaaa

SEQ ID NO: 29241 - RNA, 22 nt, Human
ugguauaaaacuuuuuauugaa

SEQ ID NO: 29242 - RNA, 22 nt, Human
ugguauaaaagaguaaacuaug

SEQ ID NO: 29243 - RNA, 22 nt, Human
ugguauaagcugugucagagcc

SEQ ID NO: 29244 - RNA, 20 nt, Human
ugguaucaauuacuagauug

SEQ ID NO: 29245 - RNA, 22 nt, Human
ugguaugcuuauuaucuucaac

SEQ ID NO: 29246 - RNA, 22 nt, Human
ugguauggaugguguggcuuuc

SEQ ID NO: 29247 - RNA, 22 nt, Human
ugguauggccuggagaaugcag

SEQ ID NO: 29248 - RNA, 22 nt, Human
ugguauuacagcauuccauauu

SEQ ID NO: 29249 - RNA, 22 nt, Human
ugguauuuccucauucugcuuu

SEQ ID NO: 29250 - RNA, 22 nt, Human
ugguauuucugugcccagcuca

SEQ ID NO: 29251 - RNA, 22 nt, Human
uggucaaaccaguuaucuguaa

SEQ ID NO: 29252 - RNA, 22 nt, Human
uggucaacaggcagggaugaaa

SEQ ID NO: 29253 - RNA, 22 nt, Human
uggucaaggcuuggagauagua

SEQ ID NO: 29254 - RNA, 22 nt, Human
uggucacccacugggacugcgg

SEQ ID NO: 29255 - RNA, 18 nt, Human
uggucacuguggauagug

SEQ ID NO: 29256 - RNA, 22 nt, Human
uggucagacaaaggagaauguu

SEQ ID NO: 29257 - RNA, 19 nt, Human
uggucagcauuaggauuug

SEQ ID NO: 29258 - RNA, 22 nt, Human
uggucaggggcuucugagcugu

SEQ ID NO: 29259 - RNA, 22 nt, Human
uggucaguugcaucagagaagu

SEQ ID NO: 29260 - RNA, 22 nt, Human
uggucaguugugacuagaacac

SEQ ID NO: 29261 - RNA, 22 nt, Human
uggucauuaauucuuaccuuua

SEQ ID NO: 29262 - RNA, 22 nt, Human
ugguccaagugagguggccucu

SEQ ID NO: 29263 - RNA, 22 nt, Human
uguaaguacauugaaacaucuu

SEQ ID NO: 29264 - RNA, 22 nt, Human
uguaaguagaacaacauaaucu

SEQ ID NO: 29265 - RNA, 22 nt, Human
uguaagucuggcuuauagcuuu

SEQ ID NO: 29266 - RNA, 22 nt, Human
uguaauauaagcauuaauaguu

SEQ ID NO: 29267 - RNA, 22 nt, Human
uguaauauauauaacugugugc

SEQ ID NO: 29268 - RNA, 22 nt, Human
uguaaucaugcaucaguuaguu

SEQ ID NO: 29269 - RNA, 22 nt, Human
uguaaugagaaagagagugaau

SEQ ID NO: 29270 - RNA, 22 nt, Human
uguaaugauguacuuagaagga

SEQ ID NO: 29271 - RNA, 18 nt, Human
uguaaugcagcggguggc

SEQ ID NO: 29272 - RNA, 22 nt, Human
uguaauggaagugggauugcau

SEQ ID NO: 29273 - RNA, 22 nt, Human
uguaauuuucucaaguuucuac

SEQ ID NO: 29274 - RNA, 22 nt, Human
uguacaaagccagaacucccaa

SEQ ID NO: 29275 - RNA, 22 nt, Human
uguacaaauucaguucuagggu

SEQ ID NO: 29276 - RNA, 22 nt, Human
uguacaaauucauugaacugua

SEQ ID NO: 29277 - RNA, 17 nt, Human
uguacaacaguaccuuc

SEQ ID NO: 29278 - RNA, 22 nt, Human
uguacaaucugaugauguaugg

SEQ ID NO: 29279 - RNA, 22 nt, Human
uguacaauggcuauaauacccu

SEQ ID NO: 29280 - RNA, 22 nt, Human
uguacacacacguguguaucua

SEQ ID NO: 29281 - RNA, 20 nt, Human
uguacacaguacuuuacaau

SEQ ID NO: 29282 - RNA, 22 nt, Human
uguacacaguaugaggcaucuu

SEQ ID NO: 29283 - RNA, 22 nt, Human
uggucucccagagcagggacgc

SEQ ID NO: 29284 - RNA, 23 nt, Human
uggucugaagccucagguuccuc

SEQ ID NO: 29285 - RNA, 22 nt, Human
uggucugaagguggauuugaga

SEQ ID NO: 29286 - RNA, 22 nt, Human
uggucugauagucugaaaauga

SEQ ID NO: 29287 - RNA, 22 nt, Human
uggucuggaacuccuggcuuca

SEQ ID NO: 29288 - RNA, 22 nt, Human
uggucugggcaaauccuucuga

SEQ ID NO: 29289 - RNA, 22 nt, Human
uggucuggggaccgaggguuac

SEQ ID NO: 29290 - RNA, 22 nt, Human
uggucuguucaagguggcugau

SEQ ID NO: 29291 - RNA, 22 nt, Human
uggugacaccccaucucuaaag

SEQ ID NO: 29292 - RNA, 22 nt, Human
uggugacugggacuggauauga

SEQ ID NO: 29293 - RNA, 22 nt, Human
uggugagaaguuuugagauucu

SEQ ID NO: 29294 - RNA, 22 nt, Human
uggugagaccuuguuccuuaug

SEQ ID NO: 29295 - RNA, 22 nt, Human
uggugagcgaugcugcauguuc

SEQ ID NO: 29296 - RNA, 22 nt, Human
uggugagcucuggcagucugug

SEQ ID NO: 29297 - RNA, 22 nt, Human
uggugaggucauagagaacugu

SEQ ID NO: 29298 - RNA, 22 nt, Human
uggugcaaaacuaauugcgguu

SEQ ID NO: 29299 - RNA, 22 nt, Human
uggugcagagagggaucuaggg

SEQ ID NO: 29300 - RNA, 22 nt, Human
uggugcagauagugguguagua

SEQ ID NO: 29301 - RNA, 22 nt, Human
uggugcagucauuggcccaggg

SEQ ID NO: 29302 - RNA, 22 nt, Human
uggugcaguccaaagggagcag

SEQ ID NO: 29303 - RNA, 22 nt, Human
uggugccaagcaugaggacucu

SEQ ID NO: 29304 - RNA, 22 nt, Human
uggugccaucauagcucacugc

SEQ ID NO: 29305 - RNA, 22 nt, Human
uggugccauuagcccugcuguu

SEQ ID NO: 29306 - RNA, 22 nt, Human
uggugcccacucuggacccagc

SEQ ID NO: 29307 - RNA, 22 nt, Human
uggugcccauguaucccuucac

SEQ ID NO: 29308 - RNA, 22 nt, Human
uggugccuccagcugcuucucc

SEQ ID NO: 29309 - RNA, 22 nt, Human
uggugcucccuggaguugugca

SEQ ID NO: 29310 - RNA, 19 nt, Human
uggugcuggccucccaugg

SEQ ID NO: 29311 - RNA, 22 nt, Human
uggugcuggugccacgccccuu

SEQ ID NO: 29312 - RNA, 22 nt, Human
ugguggcaaaagaggcaaagug

SEQ ID NO: 29313 - RNA, 22 nt, Human
ugguggcaaaguacaaagugac

SEQ ID NO: 29314 - RNA, 22 nt, Human
ugguggcaaaucaggacacuuc

SEQ ID NO: 29315 - RNA, 22 nt, Human
ugguggcaauguccuggagaag

SEQ ID NO: 29316 - RNA, 22 nt, Human
ugguggcaauucaaagacagca

SEQ ID NO: 29317 - RNA, 22 nt, Human
ugguggcagcugggacagaggu

SEQ ID NO: 29318 - RNA, 22 nt, Human
ugguggcagugagaaggagagg

SEQ ID NO: 29319 - RNA, 22 nt, Human
ugguggcaucacucagccuccc

SEQ ID NO: 29320 - RNA, 22 nt, Human
ugguggcuaccagguccugggg

SEQ ID NO: 29321 - RNA, 22 nt, Human
uggugggagugagggcaugcca

SEQ ID NO: 29322 - RNA, 22 nt, Human
uggugggcacagugcccaggcu

SEQ ID NO: 29323 - RNA, 22 nt, Human
uggugggcugagucucaucgga

SEQ ID NO: 29324 - RNA, 16 nt, Human
ugguggggaggacagc

SEQ ID NO: 29325 - RNA, 22 nt, Human
ugguggggccagacuucagcuc

SEQ ID NO: 29326 - RNA, 23 nt, Human
ugguggucagcccuuucuggagg

SEQ ID NO: 29327 - RNA, 18 nt, Human
ugguggugacagggucau

SEQ ID NO: 29328 - RNA, 22 nt, Human
uggugucaggcacuagcaugca

SEQ ID NO: 29329 - RNA, 22 nt, Human
ugguguggggauaagcacucug

SEQ ID NO: 29330 - RNA, 22 nt, Human
ugguguguacauuuuugcuucu

SEQ ID NO: 29331 - RNA, 22 nt, Human
ugguguguuagagcucagggca

SEQ ID NO: 29332 - RNA, 21 nt, Human
ugguuaaaguugugucauccc

SEQ ID NO: 29333 - RNA, 22 nt, Human
ugguuaaaugcuccgaucuugg

SEQ ID NO: 29334 - RNA, 22 nt, Human
ugguuaaguccagaaaggaagc

SEQ ID NO: 29335 - RNA, 22 nt, Human
ugguuacagagauuuuuaagau

SEQ ID NO: 29336 - RNA, 22 nt, Human
ugguuagacucaccuuauaguu

SEQ ID NO: 29337 - RNA, 22 nt, Human
ugguuaguguauauuuggacug

SEQ ID NO: 29338 - RNA, 22 nt, Human
ugguucagauauggagcuggga

SEQ ID NO: 29339 - RNA, 22 nt, Human
ugguucaguugcacaggcuguu

SEQ ID NO: 29340 - RNA, 22 nt, Human
ugguuccaaucgcacuggcuca

SEQ ID NO: 29341 - RNA, 22 nt, Human
ugguuccacuaaccugagagcc

SEQ ID NO: 29342 - RNA, 22 nt, Human
ugguuccugguucacuuggcag

SEQ ID NO: 29343 - RNA, 22 nt, Human
ugguucuaaaggacuauacaga

SEQ ID NO: 29344 - RNA, 22 nt, Human
ugguucuaggcuuugucuuuug

SEQ ID NO: 29345 - RNA, 17 nt, Human
ugguucuuuucauuccc

SEQ ID NO: 29346 - RNA, 22 nt, Human
ugguugaauaagauaguuuuau

SEQ ID NO: 29347 - RNA, 22 nt, Human
ugguugaauguagcauuuaugg

SEQ ID NO: 29348 - RNA, 22 nt, Human
ugguugcauuaacugagagggg

SEQ ID NO: 29349 - RNA, 22 nt, Human
ugguugugagcgauggauggag

SEQ ID NO: 29350 - RNA, 22 nt, Human
ugguuuaauuuccauuuccuug

SEQ ID NO: 29351 - RNA, 22 nt, Human
ugguuucuggguuugucuagga

SEQ ID NO: 29352 - RNA, 22 nt, Human
ugguuugacaaugaggacuggu

SEQ ID NO: 29353 - RNA, 22 nt, Human
ugguuuguauauguuugugaga

SEQ ID NO: 29354 - RNA, 22 nt, Human
ugguuugucuaaaugaguaaua

SEQ ID NO: 29355 - RNA, 22 nt, Human
ugguuuuaaaaacaugcugcau

SEQ ID NO: 29356 - RNA, 22 nt, Human
ugguuuuauuuauguugaguca

SEQ ID NO: 29357 - RNA, 22 nt, Human
ugguuuugcuccaguauaaaua

SEQ ID NO: 29358 - RNA, 23 nt, Human
uguaaaagcauuugucagccugg

SEQ ID NO: 29359 - RNA, 22 nt, Human
uguaaacagccccauggagagc

SEQ ID NO: 29360 - RNA, 22 nt, Human
uguaaacaugcugaggcuggag

SEQ ID NO: 29361 - RNA, 22 nt, Human
uguaaagaaagacgcagaguua

SEQ ID NO: 29362 - RNA, 22 nt, Human
uguaaagacagauaaaacagca

SEQ ID NO: 29363 - RNA, 22 nt, Human
uguaaagacgcuuauagcuugc

SEQ ID NO: 29364 - RNA, 22 nt, Human
uguaaagagaagaaacgugagc

SEQ ID NO: 29365 - RNA, 23 nt, Human
uguaaagaucaagugacugauuu

SEQ ID NO: 29366 - RNA, 22 nt, Human
uguaaagguaggugcaaaauga

SEQ ID NO: 29367 - RNA, 22 nt, Human
uguaaaguaucugugagcucuc

SEQ ID NO: 29368 - RNA, 22 nt, Human
uguaaaguccaagaucaaagag

SEQ ID NO: 29369 - RNA, 22 nt, Human
uguaaaguuacuuuugaaagga

SEQ ID NO: 29370 - RNA, 22 nt, Human
uguaaaucacugaacuaaauga

SEQ ID NO: 29371 - RNA, 23 nt, Human
uguaacaauuucauauacaugca

SEQ ID NO: 29372 - RNA, 23 nt, Human
uguaacagagcacugauugacaa

SEQ ID NO: 29373 - RNA, 22 nt, Human
uguaacaguaagccugugagcu

SEQ ID NO: 29374 - RNA, 22 nt, Human
uguaacaguagauaaggucuug

SEQ ID NO: 29375 - RNA, 22 nt, Human
uguaaccaugaugagcagguau

SEQ ID NO: 29376 - RNA, 22 nt, Human
uguaacugcuuagaagguuuua

SEQ ID NO: 29377 - RNA, 22 nt, Human
uguaacuggacaagauauucau

SEQ ID NO: 29378 - RNA, 22 nt, Human
uguaacugguuauaauuuuuga

SEQ ID NO: 29379 - RNA, 22 nt, Human
uguaagaaaaguaaauagugac

SEQ ID NO: 29380 - RNA, 22 nt, Human
uuauucucaucucccuacuuag

SEQ ID NO: 29381 - RNA, 22 nt, Human
uuauucuguuguucaggguugg

SEQ ID NO: 29382 - RNA, 19 nt, Human
uuauucuuaaaguagcuua

SEQ ID NO: 29383 - RNA, 22 nt, Human
uuauugacuuguuuguccuggu

SEQ ID NO: 29384 - RNA, 22 nt, Human
uuauugagagcuguuuuauggc

SEQ ID NO: 29385 - RNA, 16 nt, Human
uuauugaggccaagga

SEQ ID NO: 29386 - RNA, 22 nt, Human
uuauugaguaucugcuuggugu

SEQ ID NO: 29387 - RNA, 22 nt, Human
uuauugaguuguaagagcucuu

SEQ ID NO: 29388 - RNA, 22 nt, Human
uuauugcaaaggaagagcuuga

SEQ ID NO: 29389 - RNA, 22 nt, Human
uuauugcaacuccuaaauagag

SEQ ID NO: 29390 - RNA, 22 nt, Human
uuauugcaccaugccucaguuu

SEQ ID NO: 29391 - RNA, 22 nt, Human
uuauugcagccgcagggcgcug

SEQ ID NO: 29392 - RNA, 22 nt, Human
uguuuaagugcugguaggguug

SEQ ID NO: 29393 - RNA, 22 nt, Human
uguuuaaguucugcuccuuauu

SEQ ID NO: 29394 - RNA, 22 nt, Human
uguuuaauuuuucaugagccaa

SEQ ID NO: 29395 - RNA, 22 nt, Human
uguuuacagaaggcagacuucc

SEQ ID NO: 29396 - RNA, 22 nt, Human
uguuuacaugcauaagcuuaag

SEQ ID NO: 29397 - RNA, 22 nt, Human
uguuuacauggagguuuucagc

SEQ ID NO: 29398 - RNA, 22 nt, Human
uguuuacuggaccagggagggg

SEQ ID NO: 29399 - RNA, 22 nt, Human
uguuuacuggcuccugugguuc

SEQ ID NO: 29400 - RNA, 22 nt, Human
uguuuacuucuuuccauggcuu

SEQ ID NO: 29401 - RNA, 22 nt, Human
uguuuacuuuccuucucacagg

SEQ ID NO: 29402 - RNA, 22 nt, Human
uguuuacuuuuaauuaccuguc

SEQ ID NO: 29403 - RNA, 22 nt, Human
uguuuagaaucauucaaaaguu

SEQ ID NO: 29404 - RNA, 22 nt, Human
uguuuaguaggaguuuaauacu

SEQ ID NO: 29405 - RNA, 22 nt, Human
uguuuauaaauuuucuugccau

SEQ ID NO: 29406 - RNA, 22 nt, Human
uguuuauaauaugcagugagca

SEQ ID NO: 29407 - RNA, 22 nt, Human
uguuuauagauggccacaauga

SEQ ID NO: 29408 - RNA, 22 nt, Human
uguuuaugugugugcauauaua

SEQ ID NO: 29409 - RNA, 22 nt, Human
uguuuauuacaguucuuggaau

SEQ ID NO: 29410 - RNA, 18 nt, Human
uguuuauucuccugacag

SEQ ID NO: 29411 - RNA, 22 nt, Human
uguuuauugagugccuacuaua

SEQ ID NO: 29412 - RNA, 22 nt, Human
uguuucaaagaaagaaaauaua

SEQ ID NO: 29413 - RNA, 22 nt, Human
uguuucaugaagucuggauauc

SEQ ID NO: 29414 - RNA, 22 nt, Human
uguuucaugauugcugucauuu

SEQ ID NO: 29415 - RNA, 21 nt, Human
uguuucaugcuauuuucuugu

SEQ ID NO: 29416 - RNA, 22 nt, Human
uguuucauuaguacugacaaua

SEQ ID NO: 29417 - RNA, 22 nt, Human
uguuuccauggugacagcagcu

SEQ ID NO: 29418 - RNA, 22 nt, Human
uguuucccuaaggucuggcucu

SEQ ID NO: 29419 - RNA, 22 nt, Human
uguuuccuuucuggugagcaua

SEQ ID NO: 29420 - RNA, 22 nt, Human
uguuucuuacguuuuuagaggc

SEQ ID NO: 29421 - RNA, 22 nt, Human
uguuucuugagaguauuacccu

SEQ ID NO: 29422 - RNA, 22 nt, Human
uguuugaaacuuugaucacuaa

SEQ ID NO: 29423 - RNA, 22 nt, Human
uguuugaaagcaccuacauuuu

SEQ ID NO: 29424 - RNA, 22 nt, Human
uguuugacaacaggcucacaga

SEQ ID NO: 29425 - RNA, 22 nt, Human
uguuugcauuaauuagaaggua

SEQ ID NO: 29426 - RNA, 22 nt, Human
uguuugcuaggguugguauuua

SEQ ID NO: 29427 - RNA, 22 nt, Human
uguuugcuauauccuacuucau

SEQ ID NO: 29428 - RNA, 22 nt, Human
uguuugcuuacuuguaugcugc

SEQ ID NO: 29429 - RNA, 22 nt, Human
uguuuggaaacacuggcagaaa

SEQ ID NO: 29430 - RNA, 22 nt, Human
uguuuguccccaucccucagca

SEQ ID NO: 29431 - RNA, 22 nt, Human
uguuugugagaugugagguacg

SEQ ID NO: 29432 - RNA, 22 nt, Human
uguuugugcugccuggugggca

SEQ ID NO: 29433 - RNA, 22 nt, Human
uguuuguggaauauucuuuaag

SEQ ID NO: 29434 - RNA, 22 nt, Human
uguuuuaagagcgcacuuuaua

SEQ ID NO: 29435 - RNA, 22 nt, Human
uguuuuaagcucuagaagggga

SEQ ID NO: 29436 - RNA, 22 nt, Human
uguuuuaaucucccauugcucu

SEQ ID NO: 29437 - RNA, 22 nt, Human
uguuuuauauaagcagagcggu

SEQ ID NO: 29438 - RNA, 22 nt, Human
uguuuuaucaagauggcauguc

SEQ ID NO: 29439 - RNA, 22 nt, Human
uguuuuaugagccauauaaccu

SEQ ID NO: 29440 - RNA, 22 nt, Human
uguuuucaagucaaggccaaau

SEQ ID NO: 29441 - RNA, 22 nt, Human
uuccaggaauucagcucucagu

SEQ ID NO: 29442 - RNA, 22 nt, Human
uuccaggagacuuccagaaaua

SEQ ID NO: 29443 - RNA, 22 nt, Human
uuccaggaggagguacuagagg

SEQ ID NO: 29444 - RNA, 22 nt, Human
uuccaggcaugucagacauagg

SEQ ID NO: 29445 - RNA, 22 nt, Human
uuccagucaaguaagaauaucu

SEQ ID NO: 29446 - RNA, 22 nt, Human
uuccagucuggccugugcuuag

SEQ ID NO: 29447 - RNA, 22 nt, Human
uuccagugaaacaugaggugug

SEQ ID NO: 29448 - RNA, 22 nt, Human
uuccagugaccauagaguaugg

SEQ ID NO: 29449 - RNA, 22 nt, Human
uuccagugacuaagcuucugcu

SEQ ID NO: 29450 - RNA, 22 nt, Human
uuccaguucaaauuggccaaua

SEQ ID NO: 29451 - RNA, 22 nt, Human
uuccaguucacuccauuucugg

SEQ ID NO: 29452 - RNA, 22 nt, Human
uuccaguucuggcuuugccacu

SEQ ID NO: 29453 - RNA, 22 nt, Human
uuccaguucuucuguaagcacu

SEQ ID NO: 29454 - RNA, 22 nt, Human
uuccauaaaggugauaguauac

SEQ ID NO: 29455 - RNA, 22 nt, Human
uuccauaaucaccuuauucuuu

SEQ ID NO: 29456 - RNA, 18 nt, Human
uuccauaauguauguaac

SEQ ID NO: 29457 - RNA, 22 nt, Human
uuccauaugaaaaagcuguugc

SEQ ID NO: 29458 - RNA, 22 nt, Human
uuccaucacaucacugaagaca

SEQ ID NO: 29459 - RNA, 22 nt, Human
uuccaucuuucagcuuuguugg

SEQ ID NO: 29460 - RNA, 22 nt, Human
uuccaugaaauguguuaugcuu

SEQ ID NO: 29461 - RNA, 22 nt, Human
uuccaugacaccgagggaaguc

SEQ ID NO: 29462 - RNA, 22 nt, Human
uuccaugccucuauuuagaauu

SEQ ID NO: 29463 - RNA, 22 nt, Human
uucccaaaauauaacaguuaac

SEQ ID NO: 29464 - RNA, 22 nt, Human
uucccaagucuccaauguggga

SEQ ID NO: 29465 - RNA, 22 nt, Human
uucccacaacagaucuguauua

SEQ ID NO: 29466 - RNA, 22 nt, Human
uucccacaggaugagagcugag

SEQ ID NO: 29467 - RNA, 23 nt, Human
uucccacaucuuccacagcuaug

SEQ ID NO: 29468 - RNA, 22 nt, Human
uucccagagaaggaugaaaaag

SEQ ID NO: 29469 - RNA, 22 nt, Human
uucccagaggagauuugcuuau

SEQ ID NO: 29470 - RNA, 22 nt, Human
uucccagucaaacgaaggacuu

SEQ ID NO: 29471 - RNA, 22 nt, Human
uucccaugccuggccccuaucc

SEQ ID NO: 29472 - RNA, 22 nt, Human
uuccccaggcggcuuuuucagc

SEQ ID NO: 29473 - RNA, 22 nt, Human
uuccccaggcuggagugcagug

SEQ ID NO: 29474 - RNA, 22 nt, Human
uuccccaguagugacaaucaaa

SEQ ID NO: 29475 - RNA, 17 nt, Human
uuccccugaccaagccu

SEQ ID NO: 29476 - RNA, 22 nt, Human
uuccccugucacagugguucuc

SEQ ID NO: 29477 - RNA, 22 nt, Human
uucccgucuuugcuaugccugc

SEQ ID NO: 29478 - RNA, 22 nt, Human
uucccuaaugucuaacgcuauu

SEQ ID NO: 29479 - RNA, 22 nt, Human
uucccucuccaggagcccugag

SEQ ID NO: 29480 - RNA, 22 nt, Human
uucccucuccuacucaggaaag

SEQ ID NO: 29481 - RNA, 22 nt, Human
uucccucucuccagggcugccu

SEQ ID NO: 29482 - RNA, 22 nt, Human
uucccucugcgcauugaauuuc

SEQ ID NO: 29483 - RNA, 22 nt, Human
uucccucuuucacugugauuuu

SEQ ID NO: 29484 - RNA, 22 nt, Human
uucccugaagaccucaugugac

SEQ ID NO: 29485 - RNA, 22 nt, Human
uucccugaucacgugucaggag

SEQ ID NO: 29486 - RNA, 20 nt, Human
uucccuggaaggagaagcag

SEQ ID NO: 29487 - RNA, 22 nt, Human
uucccuggcccuggcacgcucu

SEQ ID NO: 29488 - RNA, 22 nt, Human
uuccuaacaagucuaucuuuga

SEQ ID NO: 29489 - RNA, 22 nt, Human
uuccuaacucuggcaccuaguc

SEQ ID NO: 29490 - RNA, 22 nt, Human
uuccuaaucacgaacauuauuu

SEQ ID NO: 29491 - RNA, 22 nt, Human
uuccuaauggcaaaacauguuu

SEQ ID NO: 29492 - RNA, 22 nt, Human
uuccuaaugucuacuuuaguuc

SEQ ID NO: 29493 - RNA, 18 nt, Human
uuccuaggaacuaagcuu

SEQ ID NO: 29494 - RNA, 22 nt, Human
uuccuagggcagagccgcuggg

SEQ ID NO: 29495 - RNA, 22 nt, Human
uuccuaugaauaaauauugagc

SEQ ID NO: 29496 - RNA, 22 nt, Human
uuccucacacucccccauucga

SEQ ID NO: 29497 - RNA, 22 nt, Human
uuccucagccaaggcugggauc

SEQ ID NO: 29498 - RNA, 22 nt, Human
uuccucagccagcacuuagggg

SEQ ID NO: 29499 - RNA, 22 nt, Human
uuccucagcucagcgagagaga

SEQ ID NO: 29500 - RNA, 22 nt, Human
uuccucagcuguguccuggcga

SEQ ID NO: 29501 - RNA, 22 nt, Human
uucuaccuccuagaaaaucugg

SEQ ID NO: 29502 - RNA, 19 nt, Human
uucuacuuuguuucccccu

SEQ ID NO: 29503 - RNA, 21 nt, Human
uucuagaaaaguaugggacug

SEQ ID NO: 29504 - RNA, 22 nt, Human
uucuagaaacuggagcaaacag

SEQ ID NO: 29505 - RNA, 19 nt, Human
uucuagaacuguucucuca

SEQ ID NO: 29506 - RNA, 22 nt, Human
uucuagaagugucuaugucugu

SEQ ID NO: 29507 - RNA, 22 nt, Human
uucuagaauccuugucuacuuu

SEQ ID NO: 29508 - RNA, 22 nt, Human
uucuagacuguguacagauuca

SEQ ID NO: 29509 - RNA, 22 nt, Human
uucuagacuucaggcauucucc

SEQ ID NO: 29510 - RNA, 22 nt, Human
uucuagaugcuuauaggcauau

SEQ ID NO: 29511 - RNA, 22 nt, Human
uucuagcacaagauaugaaagu

SEQ ID NO: 29512 - RNA, 22 nt, Human
uucuaggaugcugaugagaccc

SEQ ID NO: 29513 - RNA, 19 nt, Human
uucuaggcuaugaagcagu

SEQ ID NO: 29514 - RNA, 22 nt, Human
uucuaguuaaaguauguauuag

SEQ ID NO: 29515 - RNA, 22 nt, Human
uucuaguuacagaagccuugcu

SEQ ID NO: 29516 - RNA, 22 nt, Human
uucuaguuacucuuaaaugcug

SEQ ID NO: 29517 - RNA, 22 nt, Human
uucuaguucauauucucaaaga

SEQ ID NO: 29518 - RNA, 22 nt, Human
uucuaguucuuagagaauuggu

SEQ ID NO: 29519 - RNA, 22 nt, Human
uucuaguugagggagacaaaua

SEQ ID NO: 29520 - RNA, 22 nt, Human
uucuaguuuagggcucuucaac

SEQ ID NO: 29521 - RNA, 22 nt, Human
uucuaguuuucaguccaccagg

SEQ ID NO: 29522 - RNA, 22 nt, Human
uucuauaaaugaauguguauau

SEQ ID NO: 29523 - RNA, 20 nt, Human
uucuauacauaucacugaaa

SEQ ID NO: 29524 - RNA, 22 nt, Human
uucuauaugacuucuaggcagg

SEQ ID NO: 29525 - RNA, 22 nt, Human
uucuaucucauauguguucuag

SEQ ID NO: 29526 - RNA, 22 nt, Human
uucuauguaccuagcguuguau

SEQ ID NO: 29527 - RNA, 22 nt, Human
uucuaugugaacguuauaguuu

SEQ ID NO: 29528 - RNA, 22 nt, Human
uucuauugaaugauaaucuaua

SEQ ID NO: 29529 - RNA, 22 nt, Human
uucuauuguaccuuuucucuca

SEQ ID NO: 29530 - RNA, 22 nt, Human
uucucaaagaaagcugucauua

SEQ ID NO: 29531 - RNA, 19 nt, Human
uucucagagcuugcagcac

SEQ ID NO: 29532 - RNA, 22 nt, Human
uucucagaggagucgggagcug

SEQ ID NO: 29533 - RNA, 22 nt, Human
uucucagaggcugcuaagugca

SEQ ID NO: 29534 - RNA, 22 nt, Human
uucucagauauuuacugagcau

SEQ ID NO: 29535 - RNA, 22 nt, Human
uucucaggcucugagacccuau

SEQ ID NO: 29536 - RNA, 22 nt, Human
uucucagggucuggauggccug

SEQ ID NO: 29537 - RNA, 22 nt, Human
uucucaggguuggccucaaauc

SEQ ID NO: 29538 - RNA, 22 nt, Human
uucucagguagugcugaugcug

SEQ ID NO: 29539 - RNA, 23 nt, Human
uucucaguccugcccagggaggc

SEQ ID NO: 29540 - RNA, 22 nt, Human
uucucauagagacaugauuaua

SEQ ID NO: 29541 - RNA, 22 nt, Human
uucuccaacacaagcaugaugu

SEQ ID NO: 29542 - RNA, 18 nt, Human
uucuccagaaaacauagc

SEQ ID NO: 29543 - RNA, 22 nt, Human
uucuccagacaggcagagggaa

SEQ ID NO: 29544 - RNA, 22 nt, Human
uucuccagagggcucugcagga

SEQ ID NO: 29545 - RNA, 22 nt, Human
uucuccagagguggcuagaguu

SEQ ID NO: 29546 - RNA, 22 nt, Human
uucuccagaguuucucucacug

SEQ ID NO: 29547 - RNA, 22 nt, Human
uucuccaggggaggguucucca

SEQ ID NO: 29548 - RNA, 22 nt, Human
uucucccacuccgugcuucagu

SEQ ID NO: 29549 - RNA, 22 nt, Human
uucucccagaccaaaggcagca

SEQ ID NO: 29550 - RNA, 22 nt, Human
uucuccccgucucucugaggcc

SEQ ID NO: 29551 - RNA, 22 nt, Human
uucuccgcuaaguucucugcag

SEQ ID NO: 29552 - RNA, 21 nt, Human
uucuccuccaaguugcuccug

SEQ ID NO: 29553 - RNA, 17 nt, Human
uucuccucuguguccuu

SEQ ID NO: 29554 - RNA, 22 nt, Human
uucuccucuguuaccuugcaaa

SEQ ID NO: 29555 - RNA, 22 nt, Human
uucuccugcgcaggcccaggga

SEQ ID NO: 29556 - RNA, 22 nt, Human
uucuccugggagggguugccca

SEQ ID NO: 29557 - RNA, 21 nt, Human
uucuccuucuugauccaagca

SEQ ID NO: 29558 - RNA, 22 nt, Human
uucuccuugguuuaugggacau

SEQ ID NO: 29559 - RNA, 22 nt, Human
uuacaauguaaggcaugguucu

SEQ ID NO: 29560 - RNA, 22 nt, Human
uuacacaaacacauuccagaua

SEQ ID NO: 29561 - RNA, 22 nt, Human
uuacacaaagcuccccaaauag

SEQ ID NO: 29562 - RNA, 22 nt, Human
uuacacaaguucuuuaaccuau

SEQ ID NO: 29563 - RNA, 22 nt, Human
uuacacacaauuagcauaguaa

SEQ ID NO: 29564 - RNA, 22 nt, Human
uuacacagaaacacuguucaga

SEQ ID NO: 29565 - RNA, 22 nt, Human
uuacacagaaauuuuauugccu

SEQ ID NO: 29566 - RNA, 22 nt, Human
uuacacagcuucuauccuugaa

SEQ ID NO: 29567 - RNA, 17 nt, Human
uuacacaggagagcucu

SEQ ID NO: 29568 - RNA, 22 nt, Human
uuacacagugcacaagcagagu

SEQ ID NO: 29569 - RNA, 22 nt, Human
uuacacaugcuuuguguguaug

SEQ ID NO: 29570 - RNA, 22 nt, Human
uuacacuaugaaugagaauaua

SEQ ID NO: 29571 - RNA, 22 nt, Human
uuacacucauauugcacuuacc

SEQ ID NO: 29572 - RNA, 19 nt, Human
uuacacuccugggcagugg

SEQ ID NO: 29573 - RNA, 22 nt, Human
uuacacucugguugugggccuu

SEQ ID NO: 29574 - RNA, 22 nt, Human
uuacacuuaccuguccauugaa

SEQ ID NO: 29575 - RNA, 22 nt, Human
uuacacuuggguguggauuuua

SEQ ID NO: 29576 - RNA, 20 nt, Human
uuacacuuuguagcauuuuu

SEQ ID NO: 29577 - RNA, 22 nt, Human
uuacagaaaagggguuguccuu

SEQ ID NO: 29578 - RNA, 22 nt, Human
uuacagaaaauguguuuuaacu

SEQ ID NO: 29579 - RNA, 22 nt, Human
uuacagaaagguugugggauag

SEQ ID NO: 29580 - RNA, 23 nt, Human
uuacagaaaguaugcuuuuguuu

SEQ ID NO: 29581 - RNA, 22 nt, Human
uuacagaaaguuucccaugccg

SEQ ID NO: 29582 - RNA, 22 nt, Human
uuacagaagaguaacuuggcaa

SEQ ID NO: 29583 - RNA, 22 nt, Human
uuacagaaggaacacuacucag

SEQ ID NO: 29584 - RNA, 22 nt, Human
uuacagaaguauugagagaucc

SEQ ID NO: 29585 - RNA, 22 nt, Human
uuacagaagugaaggccuuuaa

SEQ ID NO: 29586 - RNA, 22 nt, Human
uuacagaaguuucagcguuuua

SEQ ID NO: 29587 - RNA, 22 nt, Human
uuacagagcuggguggagagag

SEQ ID NO: 29588 - RNA, 22 nt, Human
uuacagaggcuuccagggccca

SEQ ID NO: 29589 - RNA, 22 nt, Human
uuacagaguagugcagaacuca

SEQ ID NO: 29590 - RNA, 22 nt, Human
uuacagaguucgcaccuggugg

SEQ ID NO: 29591 - RNA, 22 nt, Human
uuacagauggaucuagcaaaau

SEQ ID NO: 29592 - RNA, 22 nt, Human
uuacagauuaaaaugcugaggu

SEQ ID NO: 29593 - RNA, 21 nt, Human
uuacagcaauguuagcaggaa

SEQ ID NO: 29594 - RNA, 23 nt, Human
uuacagcuaacugcuguuauuag

SEQ ID NO: 29595 - RNA, 22 nt, Human
uuacaggaggugcuagguguuu

SEQ ID NO: 29596 - RNA, 22 nt, Human
uuacaggucugugucaucaucu

SEQ ID NO: 29597 - RNA, 22 nt, Human
uuacagguguggaaauugagua

SEQ ID NO: 29598 - RNA, 22 nt, Human
uuacaguaacauuuucagucug

SEQ ID NO: 29599 - RNA, 22 nt, Human
uuacaguaaucgaguguugugg

SEQ ID NO: 29600 - RNA, 22 nt, Human
uuacaguaauguauuauuuaac

SEQ ID NO: 29601 - RNA, 22 nt, Human
uuacaguaccuguauggccacu

SEQ ID NO: 29602 - RNA, 22 nt, Human
uuacaguagauacaaugaguaa

SEQ ID NO: 29603 - RNA, 22 nt, Human
uuacaguagauuuugaaugugg

SEQ ID NO: 29604 - RNA, 22 nt, Human
uuacaguagcuuuauuuggagu

SEQ ID NO: 29605 - RNA, 23 nt, Human
uuacaguaggaguuggaaaacca

SEQ ID NO: 29606 - RNA, 22 nt, Human
uuacaguauuggucacguuugu

SEQ ID NO: 29607 - RNA, 22 nt, Human
uuacaguauuguuaaacucuuu

SEQ ID NO: 29608 - RNA, 22 nt, Human
uuacaguggcagaguuggguag

SEQ ID NO: 29609 - RNA, 22 nt, Human
uuacaguuaaugugacuaacca

SEQ ID NO: 29610 - RNA, 22 nt, Human
uguacacauuuuuauguuaaca

SEQ ID NO: 29611 - RNA, 22 nt, Human
uguacagauugaucauggagag

SEQ ID NO: 29612 - RNA, 22 nt, Human
uguacagucaugcuuucuguuc

SEQ ID NO: 29613 - RNA, 22 nt, Human
uguacaguggaaaauggauucg

SEQ ID NO: 29614 - RNA, 22 nt, Human
uguacaguguaaauaaguggau

SEQ ID NO: 29615 - RNA, 22 nt, Human
uguacaguuuuaacucugaggg

SEQ ID NO: 29616 - RNA, 22 nt, Human
uguacauauauguauguacgca

SEQ ID NO: 29617 - RNA, 22 nt, Human
uguacaugaauaaaagaucuug

SEQ ID NO: 29618 - RNA, 22 nt, Human
uguacauugucacucaucaagu

SEQ ID NO: 29619 - RNA, 22 nt, Human
uguacauuuucucagaguuuau

SEQ ID NO: 29620 - RNA, 22 nt, Human
uguaccaaacccaucauaacua

SEQ ID NO: 29621 - RNA, 22 nt, Human
uguaccacucuacuaaggguuc

SEQ ID NO: 29622 - RNA, 23 nt, Human
uguaccaggaguuucagcagacu

SEQ ID NO: 29623 - RNA, 22 nt, Human
uguaccauaggucuaucauucu

SEQ ID NO: 29624 - RNA, 22 nt, Human
uguaccauauagaugguaccuu

SEQ ID NO: 29625 - RNA, 22 nt, Human
uguaccaugugacuggagucuu

SEQ ID NO: 29626 - RNA, 22 nt, Human
uguaccgccuugugggguuggg

SEQ ID NO: 29627 - RNA, 22 nt, Human
uguacuaaugcauuuaacuaac

SEQ ID NO: 29628 - RNA, 22 nt, Human
uguacuuaugagauccuagucg

SEQ ID NO: 29629 - RNA, 22 nt, Human
uguacuuauuuuaugucagcac

SEQ ID NO: 29630 - RNA, 22 nt, Human
uguacuuccccaaugacagcac

SEQ ID NO: 29631 - RNA, 22 nt, Human
uguagaaagcucuucugaaauc

SEQ ID NO: 29632 - RNA, 22 nt, Human
uguagauuuuggagucuacaag

SEQ ID NO: 29633 - RNA, 22 nt, Human
uguagcagaguaucucuguuuu

SEQ ID NO: 29634 - RNA, 22 nt, Human
uguagcagugucuaccacauua

SEQ ID NO: 29635 - RNA, 23 nt, Human
uguagcaucucuuauuucucagc

SEQ ID NO: 29636 - RNA, 23 nt, Human
uguagcugucugagcagacacug

SEQ ID NO: 29637 - RNA, 17 nt, Human
uguagcuucuccuucuc

SEQ ID NO: 29638 - RNA, 22 nt, Human
uguaggaauuccagugacuuca

SEQ ID NO: 29639 - RNA, 22 nt, Human
uguaggauguaaggcaggcauc

SEQ ID NO: 29640 - RNA, 22 nt, Human
uguaggcugaagaugaagugga

SEQ ID NO: 29641 - RNA, 22 nt, Human
uguagguaaaagcaucuagugu

SEQ ID NO: 29642 - RNA, 22 nt, Human
uguaggucaaguccauugugcu

SEQ ID NO: 29643 - RNA, 22 nt, Human
uguaguagcauucacgaagugu

SEQ ID NO: 29644 - RNA, 22 nt, Human
uguaguccaggaauugugucug

SEQ ID NO: 29645 - RNA, 22 nt, Human
uguaguuaggcugggaauuggc

SEQ ID NO: 29646 - RNA, 21 nt, Human
uguauaacuucucucccucag

SEQ ID NO: 29647 - RNA, 22 nt, Human
uguauacaggcauaagagauac

SEQ ID NO: 29648 - RNA, 22 nt, Human
uguauacauacauaugugugug

SEQ ID NO: 29649 - RNA, 22 nt, Human
uguauauacauacacacaugaa

SEQ ID NO: 29650 - RNA, 22 nt, Human
uguauauauuucuuucauucua

SEQ ID NO: 29651 - RNA, 22 nt, Human
uguauaugagucugaguguaca

SEQ ID NO: 29652 - RNA, 22 nt, Human
uguauauguguauuuuaugaca

SEQ ID NO: 29653 - RNA, 22 nt, Human
uguauauugccugagucuuucc

SEQ ID NO: 29654 - RNA, 22 nt, Human
uguaucuguaaucccagaucaa

SEQ ID NO: 29655 - RNA, 22 nt, Human
uguaucugugauguagggguuu

SEQ ID NO: 29656 - RNA, 22 nt, Human
uggccugccccgagauccuggc

SEQ ID NO: 29657 - RNA, 22 nt, Human
uggccugcuuucauuugaugcu

SEQ ID NO: 29658 - RNA, 22 nt, Human
uggccuggaaccuggcagggac

SEQ ID NO: 29659 - RNA, 18 nt, Human
uggccuggagacaacucu

SEQ ID NO: 29660 - RNA, 22 nt, Human
uggccuggccacauccagcagg

SEQ ID NO: 29661 - RNA, 22 nt, Human
uggccuggcucacagugagauu

SEQ ID NO: 29662 - RNA, 22 nt, Human
uggccugggccggcagauauac

SEQ ID NO: 29663 - RNA, 22 nt, Human
uggccuggggaagaccaugggc

SEQ ID NO: 29664 - RNA, 22 nt, Human
uggccugguuauauugcuauca

SEQ ID NO: 29665 - RNA, 22 nt, Human
uggccuguguggcuuccuggga

SEQ ID NO: 29666 - RNA, 22 nt, Human
uggccuugauaacuggggagag

SEQ ID NO: 29667 - RNA, 22 nt, Human
uggccuugggcagguggccugc

SEQ ID NO: 29668 - RNA, 20 nt, Human
uggccuuggggagcucacac

SEQ ID NO: 29669 - RNA, 22 nt, Human
uggccuuggucacaaugcaaac

SEQ ID NO: 29670 - RNA, 20 nt, Human
uggccuuuaaauaguauucc

SEQ ID NO: 29671 - RNA, 20 nt, Human
uggccuuuuggcuuggagcu

SEQ ID NO: 29672 - RNA, 22 nt, Human
uggcggugacggcggcgccugg

SEQ ID NO: 29673 - RNA, 22 nt, Human
uggcgugcccuccagacuuggc

SEQ ID NO: 29674 - RNA, 22 nt, Human
uggcuaaacccuaguaaauuaa

SEQ ID NO: 29675 - RNA, 22 nt, Human
uggcuaacaaacaagacauuag

SEQ ID NO: 29676 - RNA, 22 nt, Human
uggcuaagcaugcuccagcugc

SEQ ID NO: 29677 - RNA, 22 nt, Human
uggcuaaucuuaaggcuuuugc

SEQ ID NO: 29678 - RNA, 19 nt, Human
uggcuaauuuuauagaggc

SEQ ID NO: 29679 - RNA, 22 nt, Human
uggcuacaucacagagaauucc

SEQ ID NO: 29680 - RNA, 22 nt, Human
uggcuagauuuauugcugagca

SEQ ID NO: 29681 - RNA, 22 nt, Human
uggcuagcaacucaacuguuaa

SEQ ID NO: 29682 - RNA, 22 nt, Human
uggcuaggaauccaugacucuc

SEQ ID NO: 29683 - RNA, 22 nt, Human
uggcuagguagcuuucugcugu

SEQ ID NO: 29684 - RNA, 22 nt, Human
uggcuauugagugaucucuaga

SEQ ID NO: 29685 - RNA, 22 nt, Human
uggcucaagugauccuccugcc

SEQ ID NO: 29686 - RNA, 22 nt, Human
uggcucacaggacucucugggc

SEQ ID NO: 29687 - RNA, 22 nt, Human
uggcucagaacuacuucuaguu

SEQ ID NO: 29688 - RNA, 22 nt, Human
uggcucagaagaaaagguaaac

SEQ ID NO: 29689 - RNA, 22 nt, Human
uggcucagauaauucaaggggc

SEQ ID NO: 29690 - RNA, 18 nt, Human
uggcucagauggcuuuaa

SEQ ID NO: 29691 - RNA, 22 nt, Human
uggcucagauuuuuguaggcuu

SEQ ID NO: 29692 - RNA, 22 nt, Human
uggcucagcaagacauugaccu

SEQ ID NO: 29693 - RNA, 22 nt, Human
uggcucagcugacucggcuucu

SEQ ID NO: 29694 - RNA, 22 nt, Human
uggcucagcugucacagccugg

SEQ ID NO: 29695 - RNA, 22 nt, Human
uggcucaggcuugaaaauagau

SEQ ID NO: 29696 - RNA, 22 nt, Human
uggcucaggggucuggcucugu

SEQ ID NO: 29697 - RNA, 22 nt, Human
uggcucaggguccccaaauggu

SEQ ID NO: 29698 - RNA, 22 nt, Human
uggcucaguaaucgagucuccu

SEQ ID NO: 29699 - RNA, 22 nt, Human
uggcucagucauggaugaguaa

SEQ ID NO: 29700 - RNA, 22 nt, Human
uggcucagugacauuccuccca

SEQ ID NO: 29701 - RNA, 22 nt, Human
uggcucaguggcagccgcagcu

SEQ ID NO: 29702 - RNA, 21 nt, Human
uggcucaguugcugggcacag

SEQ ID NO: 29703 - RNA, 22 nt, Human
uggcucaguuuagcagcucagu

SEQ ID NO: 29704 - RNA, 22 nt, Human
uggcucaguuucugcccagcug

SEQ ID NO: 29705 - RNA, 22 nt, Human
uggcucaguuugggggauugaa

SEQ ID NO: 29706 - RNA, 22 nt, Human
uggcucaucuaucagaaagucc

SEQ ID NO: 29707 - RNA, 22 nt, Human
uggcucaugccuguaaucuuag

SEQ ID NO: 29708 - RNA, 22 nt, Human
uggcucauucuacucucccugg

SEQ ID NO: 29709 - RNA, 22 nt, Human
uggcuccaccgccgcggagcuc

SEQ ID NO: 29710 - RNA, 22 nt, Human
uggcuccagaucugucuccugu

SEQ ID NO: 29711 - RNA, 22 nt, Human
uggcuccagcccugagcaagcu

SEQ ID NO: 29712 - RNA, 22 nt, Human
uggcuccaggggacacgcagua

SEQ ID NO: 29713 - RNA, 23 nt, Human
uggcuccaugaaaauuacgagga

SEQ ID NO: 29714 - RNA, 22 nt, Human
uggcuccauucuuuaugaguug

SEQ ID NO: 29715 - RNA, 21 nt, Human
uggcucccuugaauugucugu

SEQ ID NO: 29716 - RNA, 22 nt, Human
uggcuccugcauuugugcuaac

SEQ ID NO: 29717 - RNA, 18 nt, Human
uggcuccugccuccugca

SEQ ID NO: 29718 - RNA, 19 nt, Human
uggcuccugccugccuucu

SEQ ID NO: 29719 - RNA, 22 nt, Human
uguaucuucaguuugucuuucc

SEQ ID NO: 29720 - RNA, 22 nt, Human
uguaugaagccagaaucuguuu

SEQ ID NO: 29721 - RNA, 22 nt, Human
uguaugaaucucauuuguuuaa

SEQ ID NO: 29722 - RNA, 22 nt, Human
uguaugcacauggauaaguaug

SEQ ID NO: 29723 - RNA, 22 nt, Human
uguaugcaucuuugauaaauag

SEQ ID NO: 29724 - RNA, 22 nt, Human
uguaugcuuuccaaaaaugcug

SEQ ID NO: 29725 - RNA, 22 nt, Human
uguaugcuuuccuucuuucugg

SEQ ID NO: 29726 - RNA, 22 nt, Human
uguauguaugcaucuuuuaugu

SEQ ID NO: 29727 - RNA, 22 nt, Human
uguaugugcuugagaagguggg

SEQ ID NO: 29728 - RNA, 23 nt, Human
uguauuacagaugcaucagugau

SEQ ID NO: 29729 - RNA, 22 nt, Human
uguauuagagcaguagaauuau

SEQ ID NO: 29730 - RNA, 22 nt, Human
uguauuagaucugagaacuucu

SEQ ID NO: 29731 - RNA, 22 nt, Human
uguauuaugauuguuguucaug

SEQ ID NO: 29732 - RNA, 22 nt, Human
uguauucagggacauauaugua

SEQ ID NO: 29733 - RNA, 22 nt, Human
uguauucagugccuagcauaug

SEQ ID NO: 29734 - RNA, 22 nt, Human
uguauucuuaguuuuaaucaga

SEQ ID NO: 29735 - RNA, 20 nt, Human
uguauucuucuccuuccucc

SEQ ID NO: 29736 - RNA, 20 nt, Human
uguauucuuugcucuccacu

SEQ ID NO: 29737 - RNA, 22 nt, Human
uguauuugaaacagugcauggg

SEQ ID NO: 29738 - RNA, 22 nt, Human
ugucaaaaccagcaauuuuguu

SEQ ID NO: 29739 - RNA, 22 nt, Human
ugucaaaaccuuggaggcaagg

SEQ ID NO: 29740 - RNA, 22 nt, Human
ugucaaagccugaaucacauag

SEQ ID NO: 29741 - RNA, 22 nt, Human
ugucaaaguaucagucucuggc

SEQ ID NO: 29742 - RNA, 22 nt, Human
ugucaaauuuuuauugcaguau

SEQ ID NO: 29743 - RNA, 22 nt, Human
ugucaacaggcuuucuaaggca

SEQ ID NO: 29744 - RNA, 22 nt, Human
ugucaacauuggcugacaguug

SEQ ID NO: 29745 - RNA, 22 nt, Human
ugucaaccagguauuuuggucu

SEQ ID NO: 29746 - RNA, 22 nt, Human
ugucaagucuaguugcuggcuu

SEQ ID NO: 29747 - RNA, 22 nt, Human
ugucaagugauuagccauaaug

SEQ ID NO: 29748 - RNA, 22 nt, Human
ugucaaguuguggcaugucuaa

SEQ ID NO: 29749 - RNA, 22 nt, Human
ugucaauaacauuuacuucuau

SEQ ID NO: 29750 - RNA, 22 nt, Human
ugucaauaucaggcagaccuaa

SEQ ID NO: 29751 - RNA, 22 nt, Human
ugucaaugaagauaugaauaau

SEQ ID NO: 29752 - RNA, 22 nt, Human
ugucaauguguacaggagcuca

SEQ ID NO: 29753 - RNA, 22 nt, Human
ugucaauuaugugacacaucuu

SEQ ID NO: 29754 - RNA, 22 nt, Human
ugucacaacagaggaacugaau

SEQ ID NO: 29755 - RNA, 22 nt, Human
ugucacagaucguuuuugagcu

SEQ ID NO: 29756 - RNA, 22 nt, Human
ugucacauaauuuaucuguagg

SEQ ID NO: 29757 - RNA, 22 nt, Human
ugucacaucaggugguggcugu

SEQ ID NO: 29758 - RNA, 22 nt, Human
ugucacaugaaacuugcucauc

SEQ ID NO: 29759 - RNA, 22 nt, Human
ugucacaugaagccaacauagc

SEQ ID NO: 29760 - RNA, 22 nt, Human
ugucacauuauaugugaggaua

SEQ ID NO: 29761 - RNA, 23 nt, Human
ugucacauuuaguuggcauuguu

SEQ ID NO: 29762 - RNA, 22 nt, Human
ugucaccaguuccaggaaauaa

SEQ ID NO: 29763 - RNA, 22 nt, Human
ugucaccucuuuggcugcagcu

SEQ ID NO: 29764 - RNA, 22 nt, Human
ugucaccuugcucauccucgga

SEQ ID NO: 29765 - RNA, 22 nt, Human
ugucacuucaguuuugaaacaa

SEQ ID NO: 29766 - RNA, 21 nt, Human
ugucagagcuuguaggacauu

SEQ ID NO: 29767 - RNA, 22 nt, Human
ugucagcagcugguuugcuguu

SEQ ID NO: 29768 - RNA, 22 nt, Human
ugucagcaugucagccaaagau

SEQ ID NO: 29769 - RNA, 22 nt, Human
ugucagcauugcgucacugagc

SEQ ID NO: 29770 - RNA, 22 nt, Human
ugucagcauuuaaggaguaagg

SEQ ID NO: 29771 - RNA, 22 nt, Human
ugucagcucccagucagagaga

SEQ ID NO: 29772 - RNA, 22 nt, Human
ugucaggaggguccagagaaaa

SEQ ID NO: 29773 - RNA, 22 nt, Human
ugucaggcaaaggaagguauuu

SEQ ID NO: 29774 - RNA, 22 nt, Human
ugucaggucucugugaugguaa

SEQ ID NO: 29775 - RNA, 22 nt, Human
ugucaguagauuauuacaauaa

SEQ ID NO: 29776 - RNA, 22 nt, Human
ugucagugacagauuuaugauc

SEQ ID NO: 29777 - RNA, 22 nt, Human
ugucagugcacagaugguugau

SEQ ID NO: 29778 - RNA, 22 nt, Human
ugucagugccaacuuugcuggu

SEQ ID NO: 29779 - RNA, 22 nt, Human
ugggccaggggccucuucugau

SEQ ID NO: 29780 - RNA, 22 nt, Human
ugggccaggucugcggucauuu

SEQ ID NO: 29781 - RNA, 22 nt, Human
ugggccaggucugugucagcug

SEQ ID NO: 29782 - RNA, 22 nt, Human
ugggccaggugcagugcuuuag

SEQ ID NO: 29783 - RNA, 21 nt, Human
ugggccaguagaaaggaaggc

SEQ ID NO: 29784 - RNA, 17 nt, Human
ugggccaguagaaggga

SEQ ID NO: 29785 - RNA, 22 nt, Human
ugggccaguagcuacucgcaag

SEQ ID NO: 29786 - RNA, 22 nt, Human
ugggccaguccagccccaggga

SEQ ID NO: 29787 - RNA, 22 nt, Human
ugggccaguccugccuaaggug

SEQ ID NO: 29788 - RNA, 22 nt, Human
ugggccaguuauuucaccucug

SEQ ID NO: 29789 - RNA, 22 nt, Human
ugggccaguuucucauugaaau

SEQ ID NO: 29790 - RNA, 22 nt, Human
ugggccccagcacgucugggga

SEQ ID NO: 29791 - RNA, 22 nt, Human
ugggccguggagcacucugaga

SEQ ID NO: 29792 - RNA, 19 nt, Human
ugggccucacaaugcuccc

SEQ ID NO: 29793 - RNA, 22 nt, Human
ugggccucaguuugcuuaaugu

SEQ ID NO: 29794 - RNA, 22 nt, Human
ugggccuccgcauggcccagcg

SEQ ID NO: 29795 - RNA, 22 nt, Human
ugggccuccuggaagaaugugg

SEQ ID NO: 29796 - RNA, 22 nt, Human
ugggccucggagcacaggagac

SEQ ID NO: 29797 - RNA, 19 nt, Human
ugggccucucauaucugcc

SEQ ID NO: 29798 - RNA, 22 nt, Human
ugggccugaaauucccauuuua

SEQ ID NO: 29799 - RNA, 22 nt, Human
ugggccugaaggagcugcgccc

SEQ ID NO: 29800 - RNA, 22 nt, Human
ugggccugacacuuacuaggga

SEQ ID NO: 29801 - RNA, 22 nt, Human
ugggccugacucaccugccucc

SEQ ID NO: 29802 - RNA, 22 nt, Human
ugggccugauucuugaauccug

SEQ ID NO: 29803 - RNA, 22 nt, Human
ugggccuggaguuuguccagag

SEQ ID NO: 29804 - RNA, 22 nt, Human
ugggccuggcccuguggaggag

SEQ ID NO: 29805 - RNA, 22 nt, Human
ugggccugggagggcagacgcu

SEQ ID NO: 29806 - RNA, 22 nt, Human
ugggccugggcuggacagccug

SEQ ID NO: 29807 - RNA, 22 nt, Human
ugggccuguggcuuggcucuag

SEQ ID NO: 29808 - RNA, 22 nt, Human
ugggccuucuaaucuggucccu

SEQ ID NO: 29809 - RNA, 22 nt, Human
ugggccuucucaaugcacugga

SEQ ID NO: 29810 - RNA, 22 nt, Human
ugggccuuggaucgcuaagcug

SEQ ID NO: 29811 - RNA, 22 nt, Human
ugggccuuguccccucagcugu

SEQ ID NO: 29812 - RNA, 23 nt, Human
ugggcggggcuuuucacucugcc

SEQ ID NO: 29813 - RNA, 22 nt, Human
ugggcucaaacuggagguuguu

SEQ ID NO: 29814 - RNA, 21 nt, Human
ugggcucagccccagcccugc

SEQ ID NO: 29815 - RNA, 22 nt, Human
ugggcuccagcaccugugcucu

SEQ ID NO: 29816 - RNA, 22 nt, Human
ugggcucucagucagacuggca

SEQ ID NO: 29817 - RNA, 22 nt, Human
ugggcucuccuggaggacaaca

SEQ ID NO: 29818 - RNA, 22 nt, Human
ugggcucugaagggucccggau

SEQ ID NO: 29819 - RNA, 22 nt, Human
ugggcucugcaucagugcccau

SEQ ID NO: 29820 - RNA, 22 nt, Human
ugggcucugcugcguaccaguu

SEQ ID NO: 29821 - RNA, 22 nt, Human
ugggcucuggggaaacugugau

SEQ ID NO: 29822 - RNA, 22 nt, Human
ugggcucugguuuccuggcugg

SEQ ID NO: 29823 - RNA, 22 nt, Human
ugggcucuuccuauaguuuaua

SEQ ID NO: 29824 - RNA, 21 nt, Human
ugggcucuuuaacccaggcac

SEQ ID NO: 29825 - RNA, 22 nt, Human
ugggcugagaguaccuuauaaa

SEQ ID NO: 29826 - RNA, 20 nt, Human
ugggcugaggaucaggugcc

SEQ ID NO: 29827 - RNA, 22 nt, Human
ugggcugaggggccuugaugac

SEQ ID NO: 29828 - RNA, 22 nt, Human
ugggcugaguguggaacuaguu

SEQ ID NO: 29829 - RNA, 22 nt, Human
ugggcugcaccuuuguaaaucu

SEQ ID NO: 29830 - RNA, 22 nt, Human
ugggcugcagggguugagagcu

SEQ ID NO: 29831 - RNA, 22 nt, Human
ugggcugcccugaugguccuca

SEQ ID NO: 29832 - RNA, 22 nt, Human
ugggcugcggauaggccucgga

SEQ ID NO: 29833 - RNA, 22 nt, Human
ugggcugcugagaaugagagag

SEQ ID NO: 29834 - RNA, 22 nt, Human
ugggcugcuguuacaggggcug

SEQ ID NO: 29835 - RNA, 22 nt, Human
ugggcugcuuccucagcugaga

SEQ ID NO: 29836 - RNA, 22 nt, Human
ugggcugcuucuauuggugguc

SEQ ID NO: 29837 - RNA, 22 nt, Human
ugggcuguggagcaccuuugca

SEQ ID NO: 29838 - RNA, 22 nt, Human
ugggcuuaggucggaggcggcc

SEQ ID NO: 29839 - RNA, 22 nt, Human
ugggcuucauaauugguccuag

SEQ ID NO: 29840 - RNA, 18 nt, Human
ugggcuugaaagcaaggu

SEQ ID NO: 29841 - RNA, 20 nt, Human
uggggaaagccaucgaugag

SEQ ID NO: 29842 - RNA, 22 nt, Human
uggggaaaggaaaguuaaccug

SEQ ID NO: 29843 - RNA, 22 nt, Human
uggggaaaggagagcauuauuu

SEQ ID NO: 29844 - RNA, 22 nt, Human
uggggaagacagcagacacugu

SEQ ID NO: 29845 - RNA, 22 nt, Human
uggggaaggaucaccacaaucu

SEQ ID NO: 29846 - RNA, 22 nt, Human
uggggaaggcggagcuugcagc

SEQ ID NO: 29847 - RNA, 22 nt, Human
uggggagagaccggaauguuuc

SEQ ID NO: 29848 - RNA, 22 nt, Human
uggggagcccacucaccucccc

SEQ ID NO: 29849 - RNA, 22 nt, Human
uggggaggauaugugaguuauu

SEQ ID NO: 29850 - RNA, 22 nt, Human
ugugugcacgcugggagcugga

SEQ ID NO: 29851 - RNA, 22 nt, Human
ugugugcacguacauacuguau

SEQ ID NO: 29852 - RNA, 22 nt, Human
ugugugcacuuaaugcaaucau

SEQ ID NO: 29853 - RNA, 22 nt, Human
ugugugcagcugaaaagcgcug

SEQ ID NO: 29854 - RNA, 22 nt, Human
ugugugcauucacaugcaugcc

SEQ ID NO: 29855 - RNA, 22 nt, Human
ugugugccagggcaugcacagg

SEQ ID NO: 29856 - RNA, 19 nt, Human
ugugugcccucaccacaua

SEQ ID NO: 29857 - RNA, 22 nt, Human
ugugugcuaauguaugcucuaa

SEQ ID NO: 29858 - RNA, 20 nt, Human
ugugugcuaggacuacagug

SEQ ID NO: 29859 - RNA, 22 nt, Human
ugugugcucuaaugccuaguac

SEQ ID NO: 29860 - RNA, 19 nt, Human
ugugugcugacugccagag

SEQ ID NO: 29861 - RNA, 22 nt, Human
uguguggcguugcguggcuagg

SEQ ID NO: 29862 - RNA, 22 nt, Human
uguguggguacagaugauuguu

SEQ ID NO: 29863 - RNA, 19 nt, Human
uguguggguuuagaguagu

SEQ ID NO: 29864 - RNA, 19 nt, Human
ugugugguuggugaaacuc

SEQ ID NO: 29865 - RNA, 22 nt, Human
uguguguaauguuucucucuuc

SEQ ID NO: 29866 - RNA, 21 nt, Human
uguguguaugcacacacaugc

SEQ ID NO: 29867 - RNA, 22 nt, Human
uguguguauguuuacuuuuccu

SEQ ID NO: 29868 - RNA, 22 nt, Human
ugugugucacugaaagaaaucu

SEQ ID NO: 29869 - RNA, 22 nt, Human
ugugugucuggaagcucaggga

SEQ ID NO: 29870 - RNA, 22 nt, Human
ugugugucuuugccuccucuca

SEQ ID NO: 29871 - RNA, 22 nt, Human
ugugugugacucauacuagaac

SEQ ID NO: 29872 - RNA, 22 nt, Human
ugugugugaguccuggcuuucc

SEQ ID NO: 29873 - RNA, 22 nt, Human
ugugugugcaggagagcaggug

SEQ ID NO: 29874 - RNA, 21 nt, Human
ugugugugcaggcacacacac

SEQ ID NO: 29875 - RNA, 22 nt, Human
uguguguggggaggcagcagau

SEQ ID NO: 29876 - RNA, 22 nt, Human
uguguguguaaaagcauuuaua

SEQ ID NO: 29877 - RNA, 22 nt, Human
ugugugugugcgcgcacgcaua

SEQ ID NO: 29878 - RNA, 22 nt, Human
uguguguguuccuccucagcua

SEQ ID NO: 29879 - RNA, 22 nt, Human
uguguguguuuauaaaucuaaa

SEQ ID NO: 29880 - RNA, 22 nt, Human
uguguguuaacuuauuuaaugu

SEQ ID NO: 29881 - RNA, 22 nt, Human
uguguuaauuuucccuuucucu

SEQ ID NO: 29882 - RNA, 22 nt, Human
uguguucaguaugacauucaca

SEQ ID NO: 29883 - RNA, 23 nt, Human
uguguucagucaaggaucagagu

SEQ ID NO: 29884 - RNA, 22 nt, Human
uguguucaucaugauaucaggu

SEQ ID NO: 29885 - RNA, 22 nt, Human
uguguucauuucucucugcugu

SEQ ID NO: 29886 - RNA, 22 nt, Human
uguguuccugccuggcucuggu

SEQ ID NO: 29887 - RNA, 22 nt, Human
uguguuggcuugccuguuaggc

SEQ ID NO: 29888 - RNA, 23 nt, Human
uguguuuaccugaggaucuuguu

SEQ ID NO: 29889 - RNA, 22 nt, Human
uguguuuagagagcacauucag

SEQ ID NO: 29890 - RNA, 22 nt, Human
uguguuuauaguguaucuucca

SEQ ID NO: 29891 - RNA, 22 nt, Human
uguguuugaguccucacagugc

SEQ ID NO: 29892 - RNA, 22 nt, Human
uguguuugggggagaugcauuu

SEQ ID NO: 29893 - RNA, 22 nt, Human
uguguuuguuagacuaauguua

SEQ ID NO: 29894 - RNA, 22 nt, Human
uguguuuuccagaaugguguuu

SEQ ID NO: 29895 - RNA, 22 nt, Human
uguuaaaccaguuuugcaucau

SEQ ID NO: 29896 - RNA, 22 nt, Human
uguuaaacucguagguuaggcu

SEQ ID NO: 29897 - RNA, 18 nt, Human
uguuaaaugaagauuugc

SEQ ID NO: 29898 - RNA, 22 nt, Human
uguuaaauguuuugcuaguguc

SEQ ID NO: 29899 - RNA, 22 nt, Human
uguuaacacaauucuggagaga

SEQ ID NO: 29900 - RNA, 22 nt, Human
uguuaacagccagauuugguga

SEQ ID NO: 29901 - RNA, 15 nt, Human
uguuaacagcuggga

SEQ ID NO: 29902 - RNA, 22 nt, Human
uguuaacauaguggcgcaucug

SEQ ID NO: 29903 - RNA, 22 nt, Human
uguuaacaucuuggacucguga

SEQ ID NO: 29904 - RNA, 22 nt, Human
uguuaacauguguauuguauga

SEQ ID NO: 29905 - RNA, 22 nt, Human
uguuaagagaagcucucucuga

SEQ ID NO: 29906 - RNA, 22 nt, Human
uguuaaggggauauagcagggc

SEQ ID NO: 29907 - RNA, 23 nt, Human
uguuaauacaucugccacucauu

SEQ ID NO: 29908 - RNA, 22 nt, Human
uguuaauggcugaagacauccu

SEQ ID NO: 29909 - RNA, 17 nt, Human
uguuaauuccaaugaua

SEQ ID NO: 29910 - RNA, 22 nt, Human
uguuacaaaugcggaguuugug

SEQ ID NO: 29911 - RNA, 22 nt, Human
uguuacaagucuugagguacuu

SEQ ID NO: 29912 - RNA, 22 nt, Human
uguuacaauauuaucaacugag

SEQ ID NO: 29913 - RNA, 22 nt, Human
uucuccuuuguaauucucaucc

SEQ ID NO: 29914 - RNA, 22 nt, Human
uucuccuuuuccaguucccagu

SEQ ID NO: 29915 - RNA, 22 nt, Human
uucucuaaaauuaagugaggua

SEQ ID NO: 29916 - RNA, 22 nt, Human
uucucuaaacauauuggaucug

SEQ ID NO: 29917 - RNA, 22 nt, Human
uucucuaaagaguuaggccaag

SEQ ID NO: 29918 - RNA, 22 nt, Human
uucucuaaggcuuggcuucccu

SEQ ID NO: 29919 - RNA, 22 nt, Human
uucucuaauggugaugauuaga

SEQ ID NO: 29920 - RNA, 22 nt, Human
uucucuacuugagauuuuaaug

SEQ ID NO: 29921 - RNA, 22 nt, Human
uucucuagguuuuagaugaaga

SEQ ID NO: 29922 - RNA, 22 nt, Human
uucucuaguuuugacgaggauu

SEQ ID NO: 29923 - RNA, 22 nt, Human
uucucuauguguguuguaguuu

SEQ ID NO: 29924 - RNA, 19 nt, Human
uucucuauuaugucuucuc

SEQ ID NO: 29925 - RNA, 22 nt, Human
uucucucaguuaaacuuuguga

SEQ ID NO: 29926 - RNA, 22 nt, Human
uucucuccagacugcagugggu

SEQ ID NO: 29927 - RNA, 22 nt, Human
uucucuccaguccuggauucug

SEQ ID NO: 29928 - RNA, 21 nt, Human
uucucuccauaugcccagccc

SEQ ID NO: 29929 - RNA, 17 nt, Human
uucucugagcuguauug

SEQ ID NO: 29930 - RNA, 22 nt, Human
uucucugcauuguaaagagcca

SEQ ID NO: 29931 - RNA, 22 nt, Human
uucucugccucacaggucuaag

SEQ ID NO: 29932 - RNA, 22 nt, Human
uucucugccucuagcuauauuc

SEQ ID NO: 29933 - RNA, 22 nt, Human
uucucuggacagugaagagagg

SEQ ID NO: 29934 - RNA, 22 nt, Human
uucucuggagaguaucuucuua

SEQ ID NO: 29935 - RNA, 22 nt, Human
uucucuggagggcugcccggcc

SEQ ID NO: 29936 - RNA, 22 nt, Human
uucucuggauguuucucaguca

SEQ ID NO: 29937 - RNA, 22 nt, Human
uucucuggccauagcuggcuag

SEQ ID NO: 29938 - RNA, 21 nt, Human
uucucuggcuucuguagcugg

SEQ ID NO: 29939 - RNA, 22 nt, Human
uucucugggacaggaacaguuu

SEQ ID NO: 29940 - RNA, 22 nt, Human
uucucugguuugcuguuucuga

SEQ ID NO: 29941 - RNA, 22 nt, Human
uucucuguuuuccccucgaugu

SEQ ID NO: 29942 - RNA, 22 nt, Human
uucucuuagcacuuuguguuac

SEQ ID NO: 29943 - RNA, 22 nt, Human
uucucuucacagggaucauccu

SEQ ID NO: 29944 - RNA, 22 nt, Human
uucucuucccacuuucuguauu

SEQ ID NO: 29945 - RNA, 22 nt, Human
uucucuugacuaccaguuagga

SEQ ID NO: 29946 - RNA, 22 nt, Human
uucucuugugccaaguuguugc

SEQ ID NO: 29947 - RNA, 22 nt, Human
uucucuuuucaccaguugcuaa

SEQ ID NO: 29948 - RNA, 22 nt, Human
uucugaaaccacugaccaacua

SEQ ID NO: 29949 - RNA, 22 nt, Human
uucugaaaccuucaguaugaag

SEQ ID NO: 29950 - RNA, 22 nt, Human
uucugaaaggcaugucagguag

SEQ ID NO: 29951 - RNA, 22 nt, Human
uucugaaauuucaacuuuacua

SEQ ID NO: 29952 - RNA, 22 nt, Human
uucugaagcucccuuuuguagu

SEQ ID NO: 29953 - RNA, 22 nt, Human
uucugacaauucaguaacagca

SEQ ID NO: 29954 - RNA, 22 nt, Human
uucugagaaauggguucacaua

SEQ ID NO: 29955 - RNA, 22 nt, Human
uucugagacagcaaagauucuu

SEQ ID NO: 29956 - RNA, 22 nt, Human
uucugagagcugaagaaauguu

SEQ ID NO: 29957 - RNA, 20 nt, Human
uucugagaguucacagcccc

SEQ ID NO: 29958 - RNA, 22 nt, Human
uucugagcaagcuggacagucu

SEQ ID NO: 29959 - RNA, 22 nt, Human
uguucuaggcaaaagcugauuu

SEQ ID NO: 29960 - RNA, 21 nt, Human
uguucuaucagcucagguguc

SEQ ID NO: 29961 - RNA, 22 nt, Human
uguucucaguaauucuauuuua

SEQ ID NO: 29962 - RNA, 22 nt, Human
uguucucaucuggaucucagga

SEQ ID NO: 29963 - RNA, 22 nt, Human
uguucucuuccacggcgcucgg

SEQ ID NO: 29964 - RNA, 22 nt, Human
uguucucuucucauugaacaug

SEQ ID NO: 29965 - RNA, 22 nt, Human
uguucugagugcagcuuaauaa

SEQ ID NO: 29966 - RNA, 22 nt, Human
uguucugcaagcccugccaccu

SEQ ID NO: 29967 - RNA, 22 nt, Human
uguucuguuuuaugguagggaa

SEQ ID NO: 29968 - RNA, 22 nt, Human
uguucuuaacuuuuguguauau

SEQ ID NO: 29969 - RNA, 22 nt, Human
uguucuuagcaggagcaucuau

SEQ ID NO: 29970 - RNA, 22 nt, Human
uguucuucuagauugccuuuua

SEQ ID NO: 29971 - RNA, 22 nt, Human
uguucuuuagcagaccauguug

SEQ ID NO: 29972 - RNA, 22 nt, Human
uguucuuucaguuagacacagu

SEQ ID NO: 29973 - RNA, 22 nt, Human
uguucuuugcuguugauguaga

SEQ ID NO: 29974 - RNA, 22 nt, Human
uguucuuuggcuuccuuuccgu

SEQ ID NO: 29975 - RNA, 23 nt, Human
uguugaaguaacuguuacauaga

SEQ ID NO: 29976 - RNA, 22 nt, Human
uguugaaucagaaguccuggcu

SEQ ID NO: 29977 - RNA, 22 nt, Human
uguugacugguaacuuuaaaca

SEQ ID NO: 29978 - RNA, 22 nt, Human
uguugacuugaaccaaaguguu

SEQ ID NO: 29979 - RNA, 20 nt, Human
uguugauuggugucaucuca

SEQ ID NO: 29980 - RNA, 22 nt, Human
uguugcacggccuucacagagc

SEQ ID NO: 29981 - RNA, 22 nt, Human
uguugcagagcuggggagggug

SEQ ID NO: 29982 - RNA, 22 nt, Human
uguugcugacaagagaggagca

SEQ ID NO: 29983 - RNA, 22 nt, Human
uguuggaaaagaauuaacuagg

SEQ ID NO: 29984 - RNA, 22 nt, Human
uguuggaaggcaagcagcaauu

SEQ ID NO: 29985 - RNA, 22 nt, Human
uguuggcagauugucuaggguu

SEQ ID NO: 29986 - RNA, 22 nt, Human
uguugggaagcucugccagggg

SEQ ID NO: 29987 - RNA, 22 nt, Human
uguuuaaccaccauucuauucu

SEQ ID NO: 29988 - RNA, 15 nt, Human
uguuuaagccacauu

SEQ ID NO: 29989 - RNA, 22 nt, Human
uguuuaaucuauaaaauggaga

SEQ ID NO: 29990 - RNA, 22 nt, Human
uguuuaaugaagaugguuuuuc

SEQ ID NO: 29991 - RNA, 22 nt, Human
uguuuaaugcauugaccuuggg

SEQ ID NO: 29992 - RNA, 22 nt, Human
uguuuaauuucacaaaguugac

SEQ ID NO: 29993 - RNA, 22 nt, Human
uguuuacaaaaccgugguacug

SEQ ID NO: 29994 - RNA, 22 nt, Human
uguuuacacuucaagguuaagg

SEQ ID NO: 29995 - RNA, 22 nt, Human
uguuuacagcugaucaggcauc

SEQ ID NO: 29996 - RNA, 22 nt, Human
uguuuacaguuuuuaguacccu

SEQ ID NO: 29997 - RNA, 22 nt, Human
uguuuacauaguagcugcccug

SEQ ID NO: 29998 - RNA, 22 nt, Human
uguuuacucacuguauccacaa

SEQ ID NO: 29999 - RNA, 22 nt, Human
uguuuacuccagcugauggaac

SEQ ID NO: 30000 - RNA, 20 nt, Human
uguuuacucuagaggguaga

SEQ ID NO: 30001 - RNA, 22 nt, Human
uguuuacuucaucgaguacuuc

SEQ ID NO: 30002 - RNA, 22 nt, Human
uguuuagacucaaaauugaaag

SEQ ID NO: 30003 - RNA, 22 nt, Human
uguuuagaggaacuggaaucag

SEQ ID NO: 30004 - RNA, 22 nt, Human
uguuuagaucucauucuuccca

SEQ ID NO: 30005 - RNA, 22 nt, Human
uguuuagcauaaagauuuucca

SEQ ID NO: 30006 - RNA, 22 nt, Human
uguuuauaccugcaaccuguca

SEQ ID NO: 30007 - RNA, 22 nt, Human
uguuuauaccuugguauaacca

SEQ ID NO: 30008 - RNA, 22 nt, Human
uguuuaucaggguaaaguguag

SEQ ID NO: 30009 - RNA, 22 nt, Human
uguuuaugcaucguuaauacca

SEQ ID NO: 30010 - RNA, 22 nt, Human
uguuuauugcugcaauugugcc

SEQ ID NO: 30011 - RNA, 22 nt, Human
uguuucaaaauaacaagagggu

SEQ ID NO: 30012 - RNA, 22 nt, Human
uguuucaagcaauagcauuuca

SEQ ID NO: 30013 - RNA, 22 nt, Human
uguuucacuaagcagaaauaua

SEQ ID NO: 30014 - RNA, 22 nt, Human
uguuucaggcuucugggauuuu

SEQ ID NO: 30015 - RNA, 20 nt, Human
uguuucauaagcuguccuau

SEQ ID NO: 30016 - RNA, 18 nt, Human
uguuuccuccuggaggcu

SEQ ID NO: 30017 - RNA, 20 nt, Human
uguuucugacgguaggagag

SEQ ID NO: 30018 - RNA, 22 nt, Human
uguuucugucuguuuucuacau

SEQ ID NO: 30019 - RNA, 22 nt, Human
uguuucuuauccaaguggucug

SEQ ID NO: 30020 - RNA, 22 nt, Human
uguuucuucucacacaaacuca

SEQ ID NO: 30021 - RNA, 22 nt, Human
uguuucuuuguagauauucuuu

SEQ ID NO: 30022 - RNA, 22 nt, Human
uguuugaaguucuucugugacu

SEQ ID NO: 30023 - RNA, 22 nt, Human
uguuugaauuuugcuaacgugu

SEQ ID NO: 30024 - RNA, 22 nt, Human
uguuugacaccucaguguuucu

SEQ ID NO: 30025 - RNA, 22 nt, Human
uguuugaguucuagcgcauuua

SEQ ID NO: 30026 - RNA, 22 nt, Human
uguuugcaacaacuagauggag

SEQ ID NO: 30027 - RNA, 22 nt, Human
uguuugcacauucguuucaaua

SEQ ID NO: 30028 - RNA, 22 nt, Human
uguuugcuuggucaguaaguag

SEQ ID NO: 30029 - RNA, 22 nt, Human
uguuuguaaagcagagccagua

SEQ ID NO: 30030 - RNA, 22 nt, Human
uguuuguaucucucucuguggc

SEQ ID NO: 30031 - RNA, 22 nt, Human
uguuugucaucauugugagaga

SEQ ID NO: 30032 - RNA, 22 nt, Human
uguuugugguuauaauaaguau

SEQ ID NO: 30033 - RNA, 23 nt, Human
uguuuguuucuaugagagauagc

SEQ ID NO: 30034 - RNA, 22 nt, Human
uguuuuaaagccauugccuuuc

SEQ ID NO: 30035 - RNA, 22 nt, Human
uguuuuaguucugucuugcaug

SEQ ID NO: 30036 - RNA, 22 nt, Human
uguuuuauuucuccaagaggga

SEQ ID NO: 30037 - RNA, 22 nt, Human
uguuuucagaugcagggacaca

SEQ ID NO: 30038 - RNA, 22 nt, Human
uguuuucaucacagaauguaac

SEQ ID NO: 30039 - RNA, 17 nt, Human
uguuuucauucauugcu

SEQ ID NO: 30040 - RNA, 21 nt, Human
uguuuuccaccuugaggcaag

SEQ ID NO: 30041 - RNA, 22 nt, Human
uguuuucuagaaacaaugccua

SEQ ID NO: 30042 - RNA, 22 nt, Human
uguuuucuggguggaagguacu

SEQ ID NO: 30043 - RNA, 22 nt, Human
uguuuucuucuguaccgugcca

SEQ ID NO: 30044 - RNA, 22 nt, Human
uguuuugguuuucaccgagucc

SEQ ID NO: 30045 - RNA, 22 nt, Human
uguuuugucuaaucuaaauucu

SEQ ID NO: 30046 - RNA, 19 nt, Human
uguuuuguuaaagcagucc

SEQ ID NO: 30047 - RNA, 23 nt, Human
uguuuuucauucacaugggcugu

SEQ ID NO: 30048 - RNA, 20 nt, Human
uuaaaaagagucacaggaga

SEQ ID NO: 30049 - RNA, 22 nt, Human
uuaaaagagacuuccuuuguuu

SEQ ID NO: 30050 - RNA, 22 nt, Human
uuaaaaggguaagcagcaacuu

SEQ ID NO: 30051 - RNA, 22 nt, Human
uuaaaaucgcuguugcuucugu

SEQ ID NO: 30052 - RNA, 22 nt, Human
uuaaacaccaagugcaaaccac

SEQ ID NO: 30053 - RNA, 22 nt, Human
uuaaacacuggagcuggguguu

SEQ ID NO: 30054 - RNA, 22 nt, Human
uuaaacaguauaucugagcaag

SEQ ID NO: 30055 - RNA, 22 nt, Human
uuaaacaguguuucaugugggg

SEQ ID NO: 30056 - RNA, 22 nt, Human
uuaaagaggcagguuaaauaau

SEQ ID NO: 30057 - RNA, 22 nt, Human
uuaaagagggaaagacuucaga

SEQ ID NO: 30058 - RNA, 22 nt, Human
uuaaagaguaaucauaggucaa

SEQ ID NO: 30059 - RNA, 22 nt, Human
uuaaagcaggcaucauuccuca

SEQ ID NO: 30060 - RNA, 22 nt, Human
uuaaagcccagcauauacuagg

SEQ ID NO: 30061 - RNA, 22 nt, Human
uuaaagcuugauucgaagcuua

SEQ ID NO: 30062 - RNA, 22 nt, Human
uuaaaggaucuuugucauuaau

SEQ ID NO: 30063 - RNA, 22 nt, Human
uuaaaggcaugguuagacaugg

SEQ ID NO: 30064 - RNA, 22 nt, Human
uuaaaguauagaggacaaaaac

SEQ ID NO: 30065 - RNA, 22 nt, Human
uuaaagucccugccuuaauucc

SEQ ID NO: 30066 - RNA, 22 nt, Human
uuaaaucaggcaucauuucagu

SEQ ID NO: 30067 - RNA, 22 nt, Human
uuaaaucaguaggcuacuccuu

SEQ ID NO: 30068 - RNA, 22 nt, Human
uuaaaucuguucucaugucugu

SEQ ID NO: 30069 - RNA, 22 nt, Human
uuaaaugacuuuuauuauucuc

SEQ ID NO: 30070 - RNA, 22 nt, Human
uuaaauuagucaagcuucucug

SEQ ID NO: 30071 - RNA, 22 nt, Human
uuaaauuccagccucauaauag

SEQ ID NO: 30072 - RNA, 22 nt, Human
uuaaauugucauuugagcaaug

SEQ ID NO: 30073 - RNA, 22 nt, Human
uuaaauuucuacgugauccagg

SEQ ID NO: 30074 - RNA, 22 nt, Human
uuaacaauagaguuucuucagg

SEQ ID NO: 30075 - RNA, 22 nt, Human
uuaacaaucauaggaccauuua

SEQ ID NO: 30076 - RNA, 22 nt, Human
uuaacacugauuguagagacac

SEQ ID NO: 30077 - RNA, 22 nt, Human
uuaacagacauauauauuugua

SEQ ID NO: 30078 - RNA, 22 nt, Human
uuaacagaggacacaucaaacu

SEQ ID NO: 30079 - RNA, 22 nt, Human
uuaacagcuuugggucugauau

SEQ ID NO: 30080 - RNA, 19 nt, Human
uuaacagucaccaaggaga

SEQ ID NO: 30081 - RNA, 22 nt, Human
uuaacaugucuugacuucaucu

SEQ ID NO: 30082 - RNA, 22 nt, Human
uuaacauuaaaagcagcauuuu

SEQ ID NO: 30083 - RNA, 22 nt, Human
uuaacauuucuuuuccacucau

SEQ ID NO: 30084 - RNA, 22 nt, Human
uuaacauuugugaagcauuuag

SEQ ID NO: 30085 - RNA, 22 nt, Human
uuaaccuguaaaaugggagaag

SEQ ID NO: 30086 - RNA, 22 nt, Human
uuaacuggggaagcauuucaug

SEQ ID NO: 30087 - RNA, 22 nt, Human
uuaacuugucagaaaauacagu

SEQ ID NO: 30088 - RNA, 22 nt, Human
uuaagaagugauuuuccucauu

SEQ ID NO: 30089 - RNA, 22 nt, Human
uuaagacuaaaugaggucauaa

SEQ ID NO: 30090 - RNA, 23 nt, Human
uuaagacuggcugaacuuaguag

SEQ ID NO: 30091 - RNA, 22 nt, Human
uuaagagcaacauauggugaca

SEQ ID NO: 30092 - RNA, 18 nt, Human
uuaagagcugaaagggga

SEQ ID NO: 30093 - RNA, 22 nt, Human
uuaagcauuuauuaugugccag

SEQ ID NO: 30094 - RNA, 22 nt, Human
uuaagcuaauuaguuccagcau

SEQ ID NO: 30095 - RNA, 22 nt, Human
uuaaggaaggugaauuucuugg

SEQ ID NO: 30096 - RNA, 22 nt, Human
uuaaggaauuuauaguuguacu

SEQ ID NO: 30097 - RNA, 22 nt, Human
uuaaggagcagaaugcuuggac

SEQ ID NO: 30098 - RNA, 22 nt, Human
uuaaggcacagagagguuaagu

SEQ ID NO: 30099 - RNA, 21 nt, Human
uuaaggucacuucugagccua

SEQ ID NO: 30100 - RNA, 22 nt, Human
uuaaggugcuuuauuuagcucu

SEQ ID NO: 30101 - RNA, 22 nt, Human
uuaagguucagaaaucaauacc

SEQ ID NO: 30102 - RNA, 22 nt, Human
uuaagguugagcucacuuuuau

SEQ ID NO: 30103 - RNA, 22 nt, Human
uuaaguaacuuguccaaaugag

SEQ ID NO: 30104 - RNA, 22 nt, Human
uuaagugcaaaaaugaaaguau

SEQ ID NO: 30105 - RNA, 22 nt, Human
uuaauaaaguaugaauuggaaa

SEQ ID NO: 30106 - RNA, 22 nt, Human
uuaauaacauuguguaucaccc

SEQ ID NO: 30107 - RNA, 22 nt, Human
uuaauaaguaguaguuauuguu

SEQ ID NO: 30108 - RNA, 22 nt, Human
uuaauaauaaugagcccauuuu

SEQ ID NO: 30109 - RNA, 22 nt, Human
uuaaucacagauauuaaacaug

SEQ ID NO: 30110 - RNA, 21 nt, Human
uuaaucagucucccugucucc

SEQ ID NO: 30111 - RNA, 22 nt, Human
uuaauccaauauccuggcuauu

SEQ ID NO: 30112 - RNA, 22 nt, Human
uuaauccggggugaauuuaauu

SEQ ID NO: 30113 - RNA, 22 nt, Human
uuaaugaauaugacaggagagg

SEQ ID NO: 30114 - RNA, 22 nt, Human
uuaaugacaucauaggugaagu

SEQ ID NO: 30115 - RNA, 22 nt, Human
uuaaugauaccuauguuaauuu

SEQ ID NO: 30116 - RNA, 18 nt, Human
uuaauguggcuuacuaug

SEQ ID NO: 30117 - RNA, 22 nt, Human
uuaauuaacuagccaaccacua

SEQ ID NO: 30118 - RNA, 22 nt, Human
uuaauuguaaaguuugccuguu

SEQ ID NO: 30119 - RNA, 22 nt, Human
uuaauugucugugaguaccuga

SEQ ID NO: 30120 - RNA, 21 nt, Human
uuaauuuauucaugauagcua

SEQ ID NO: 30121 - RNA, 22 nt, Human
uuaauuuuaaccuguuuguguc

SEQ ID NO: 30122 - RNA, 22 nt, Human
uuaauuuucucaucugugaaau

SEQ ID NO: 30123 - RNA, 22 nt, Human
uuacaaacaagaucuuauucuu

SEQ ID NO: 30124 - RNA, 22 nt, Human
uuacaaacugucauauaguauu

SEQ ID NO: 30125 - RNA, 20 nt, Human
uuacaaagaggcaucgcuuu

SEQ ID NO: 30126 - RNA, 22 nt, Human
uuacaaagugcugcaccauuuu

SEQ ID NO: 30127 - RNA, 22 nt, Human
uuacaacagacacauauucuaa

SEQ ID NO: 30128 - RNA, 22 nt, Human
uuacaaggaggauagcauuucc

SEQ ID NO: 30129 - RNA, 22 nt, Human
uuacaagguaaguuguuaaguc

SEQ ID NO: 30130 - RNA, 22 nt, Human
uuacaaguucagauuuucucau

SEQ ID NO: 30131 - RNA, 23 nt, Human
uuacaaguucugaaauuuccuuc

SEQ ID NO: 30132 - RNA, 22 nt, Human
uuacaaguuucuggcuucaucc

SEQ ID NO: 30133 - RNA, 22 nt, Human
uuacaaucaucuaggauaaaga

SEQ ID NO: 30134 - RNA, 22 nt, Human
uuacaaucugauugucucaucu

SEQ ID NO: 30135 - RNA, 22 nt, Human
uuacaaugggagcccuuggacu

SEQ ID NO: 30136 - RNA, 22 nt, Human
uuacacaaaaauaagauauggc

SEQ ID NO: 30137 - RNA, 22 nt, Human
uuacacaaaagcaagugugugu

SEQ ID NO: 30138 - RNA, 22 nt, Human
uuacacaauauaugguacuugg

SEQ ID NO: 30139 - RNA, 23 nt, Human
uucuggguugcugugcuuggaau

SEQ ID NO: 30140 - RNA, 19 nt, Human
uucuggucuggaaucaagg

SEQ ID NO: 30141 - RNA, 22 nt, Human
uucugguuacauuguuacagcu

SEQ ID NO: 30142 - RNA, 22 nt, Human
uucuguacccucgcgauucucc

SEQ ID NO: 30143 - RNA, 22 nt, Human
uucuguacucuuugagaagaau

SEQ ID NO: 30144 - RNA, 22 nt, Human
uucuguacuucaggggcucugu

SEQ ID NO: 30145 - RNA, 22 nt, Human
uucuguaggcacacaguuucaa

SEQ ID NO: 30146 - RNA, 22 nt, Human
uucuguaugccaauggguuuuu

SEQ ID NO: 30147 - RNA, 22 nt, Human
uucuguauggaaacauccucca

SEQ ID NO: 30148 - RNA, 22 nt, Human
uucuguauuucaaugucuuuau

SEQ ID NO: 30149 - RNA, 22 nt, Human
uucugucacuuaggaggucaua

SEQ ID NO: 30150 - RNA, 22 nt, Human
uucugucacuuuuuuggaaucu

SEQ ID NO: 30151 - RNA, 22 nt, Human
uucugucauuuagcauugucau

SEQ ID NO: 30152 - RNA, 22 nt, Human
uucuguccgcuuguuuguuaga

SEQ ID NO: 30153 - RNA, 22 nt, Human
uucugucugauggugccagaac

SEQ ID NO: 30154 - RNA, 22 nt, Human
uucugugacuccucagagauuu

SEQ ID NO: 30155 - RNA, 22 nt, Human
uucugugauuccuccagccagc

SEQ ID NO: 30156 - RNA, 22 nt, Human
uucugugcccauuuuaaaaugg

SEQ ID NO: 30157 - RNA, 22 nt, Human
uucuguggucucccaugucugu

SEQ ID NO: 30158 - RNA, 22 nt, Human
uucugugugcuuacugguguuc

SEQ ID NO: 30159 - RNA, 22 nt, Human
uucuguuacuguuggucauaac

SEQ ID NO: 30160 - RNA, 22 nt, Human
uucuguuagaauuuugaaaaua

SEQ ID NO: 30161 - RNA, 22 nt, Human
uucuguuaucauuaagcauuau

SEQ ID NO: 30162 - RNA, 22 nt, Human
uucuguucugauacuuguuucu

SEQ ID NO: 30163 - RNA, 22 nt, Human
uucuguucuuuauuuaccauau

SEQ ID NO: 30164 - RNA, 22 nt, Human
uucuguuuauuccuaggagcuc

SEQ ID NO: 30165 - RNA, 22 nt, Human
uucuguuugccauauauaguag

SEQ ID NO: 30166 - RNA, 21 nt, Human
uucuguuuuuuguaccagggc

SEQ ID NO: 30167 - RNA, 22 nt, Human
uucuuaaaauucaagcuagguu

SEQ ID NO: 30168 - RNA, 20 nt, Human
uucuuaaagaccucacuuug

SEQ ID NO: 30169 - RNA, 22 nt, Human
uucuuaacucaaauauauaucc

SEQ ID NO: 30170 - RNA, 22 nt, Human
uucuuaagaaaccaucacauuc

SEQ ID NO: 30171 - RNA, 22 nt, Human
uucuuaagcguaugauaaugaa

SEQ ID NO: 30172 - RNA, 22 nt, Human
uucuuaagugagaaagcaggag

SEQ ID NO: 30173 - RNA, 22 nt, Human
uucuuacaaacaagaucauuga

SEQ ID NO: 30174 - RNA, 22 nt, Human
uucuuacacucuuaaaaaucau

SEQ ID NO: 30175 - RNA, 22 nt, Human
uucuuacagaguuuacagagcc

SEQ ID NO: 30176 - RNA, 22 nt, Human
uucuuacauauuuucauauggu

SEQ ID NO: 30177 - RNA, 22 nt, Human
uugaagaggacuuugcagcugu

SEQ ID NO: 30178 - RNA, 22 nt, Human
uugaagaguagaaaaugcaaau

SEQ ID NO: 30179 - RNA, 22 nt, Human
uugaagaguguccuuguaaaaa

SEQ ID NO: 30180 - RNA, 22 nt, Human
uugaagaguuugauagaguuga

SEQ ID NO: 30181 - RNA, 22 nt, Human
uugaagauaggccaggaugagc

SEQ ID NO: 30182 - RNA, 22 nt, Human
uugaagaucuuugcauugcagg

SEQ ID NO: 30183 - RNA, 22 nt, Human
uugaagaugcugucucuuccag

SEQ ID NO: 30184 - RNA, 22 nt, Human
uugaagauucuuuuuguuagua

SEQ ID NO: 30185 - RNA, 21 nt, Human
uugaagcaaggguggcucuga

SEQ ID NO: 30186 - RNA, 22 nt, Human
uugaagcagagaaauacuugaa

SEQ ID NO: 30187 - RNA, 22 nt, Human
uugaagcauuucuuugagcuuc

SEQ ID NO: 30188 - RNA, 22 nt, Human
uugaagcuaggcugugcauaug

SEQ ID NO: 30189 - RNA, 22 nt, Human
uugaagcuccgguguauaggaa

SEQ ID NO: 30190 - RNA, 22 nt, Human
uugaagcugccguuuuucucca

SEQ ID NO: 30191 - RNA, 21 nt, Human
uugaaggaucacuucuguacc

SEQ ID NO: 30192 - RNA, 22 nt, Human
uugaagguaaauuauauugauc

SEQ ID NO: 30193 - RNA, 23 nt, Human
uugaagucucaguuuucucauag

SEQ ID NO: 30194 - RNA, 22 nt, Human
uugaaguucuaagccccaguac

SEQ ID NO: 30195 - RNA, 22 nt, Human
uugaaguugcacauuauaauuu

SEQ ID NO: 30196 - RNA, 22 nt, Human
uugaauaauuaauuacacucag

SEQ ID NO: 30197 - RNA, 22 nt, Human
uugaauaggacucagcagugau

SEQ ID NO: 30198 - RNA, 22 nt, Human
uugaaucuauguauucagugua

SEQ ID NO: 30199 - RNA, 22 nt, Human
uugaaucucaucccaauguugu

SEQ ID NO: 30200 - RNA, 22 nt, Human
uugaaugaggaagagcacuggc

SEQ ID NO: 30201 - RNA, 22 nt, Human
uugaauggcuucuagguucucc

SEQ ID NO: 30202 - RNA, 22 nt, Human
uugaauuauuuguuugcaagcu

SEQ ID NO: 30203 - RNA, 22 nt, Human
uugaauuggcaaaacugcagcu

SEQ ID NO: 30204 - RNA, 21 nt, Human
uugaauuguaugauuaaacug

SEQ ID NO: 30205 - RNA, 22 nt, Human
uugaauuuagauuguauguuga

SEQ ID NO: 30206 - RNA, 22 nt, Human
uugacaaaaaccucauuucacc

SEQ ID NO: 30207 - RNA, 22 nt, Human
uugacaaaggcugagaggaaaa

SEQ ID NO: 30208 - RNA, 22 nt, Human
uugacaaguggagauauuuaag

SEQ ID NO: 30209 - RNA, 22 nt, Human
uugacacaauguauauuuucaa

SEQ ID NO: 30210 - RNA, 22 nt, Human
uugacacuaagauuuccaaaca

SEQ ID NO: 30211 - RNA, 22 nt, Human
uugacagaauguuacauauaga

SEQ ID NO: 30212 - RNA, 22 nt, Human
uugacagaugugaaagugagca

SEQ ID NO: 30213 - RNA, 22 nt, Human
uugacaggauauaaagacauaa

SEQ ID NO: 30214 - RNA, 23 nt, Human
uugacaguaggugguuuucauug

SEQ ID NO: 30215 - RNA, 22 nt, Human
uugacaguugaggguugucuaa

SEQ ID NO: 30216 - RNA, 22 nt, Human
uugaccacugaaugguucugaa

SEQ ID NO: 30217 - RNA, 22 nt, Human
uugacccagcuuuccccacaau

SEQ ID NO: 30218 - RNA, 22 nt, Human
uugacccgaguccuucuugggg

SEQ ID NO: 30219 - RNA, 22 nt, Human
uugaccuauguuucuucaucug

SEQ ID NO: 30220 - RNA, 20 nt, Human
uugaccugcaagucaucauu

SEQ ID NO: 30221 - RNA, 22 nt, Human
uugacucauaccugccugaccc

SEQ ID NO: 30222 - RNA, 22 nt, Human
uugacuguacaaccuuuuguag

SEQ ID NO: 30223 - RNA, 22 nt, Human
uugacuucagccuguacuugua

SEQ ID NO: 30224 - RNA, 22 nt, Human
uugacuucccagacuuguguuu

SEQ ID NO: 30225 - RNA, 22 nt, Human
uugacuuuaaagcuuugucucu

SEQ ID NO: 30226 - RNA, 22 nt, Human
uugacuuuauguguauguuuac

SEQ ID NO: 30227 - RNA, 18 nt, Human
uugagaaauaagcacuaa

SEQ ID NO: 30228 - RNA, 22 nt, Human
uugagaacaggaguguucuuuu

SEQ ID NO: 30229 - RNA, 22 nt, Human
uugagaacuagcauggucuauc

SEQ ID NO: 30230 - RNA, 22 nt, Human
uugagaagguggucauuugcaa

SEQ ID NO: 30231 - RNA, 22 nt, Human
uugagaauaaauuagcagacau

SEQ ID NO: 30232 - RNA, 22 nt, Human
uugagaaugaugagauucuucc

SEQ ID NO: 30233 - RNA, 22 nt, Human
uugagacagugggguguugccg

SEQ ID NO: 30234 - RNA, 22 nt, Human
uugagauauucaguuccauuga

SEQ ID NO: 30235 - RNA, 22 nt, Human
uugagauggagucucacucugu

SEQ ID NO: 30236 - RNA, 22 nt, Human
uugagcaagaguaggaacugaa

SEQ ID NO: 30237 - RNA, 20 nt, Human
uugagcaaucaguaaaggau

SEQ ID NO: 30238 - RNA, 22 nt, Human
uugagcaaugcugcaaagagau

SEQ ID NO: 30239 - RNA, 22 nt, Human
uugagcaauuaggaaauaaaga

SEQ ID NO: 30240 - RNA, 22 nt, Human
uugagcacaggugaacagcauc

SEQ ID NO: 30241 - RNA, 22 nt, Human
uugagcccuaccucagacuuuc

SEQ ID NO: 30242 - RNA, 23 nt, Human
uugagcucaguagcucugcuggu

SEQ ID NO: 30243 - RNA, 22 nt, Human
uugagcucccgcuucuucuuug

SEQ ID NO: 30244 - RNA, 22 nt, Human
uugagcuguauaccuaugacug

SEQ ID NO: 30245 - RNA, 22 nt, Human
uugaggaaagagugcaaagagg

SEQ ID NO: 30246 - RNA, 23 nt, Human
uugaggacaauuuacaugguguu

SEQ ID NO: 30247 - RNA, 22 nt, Human
uugaggagcaggaugggaggcu

SEQ ID NO: 30248 - RNA, 22 nt, Human
uugaggaggacagaaacauuua

SEQ ID NO: 30249 - RNA, 22 nt, Human
uugaggaggccuuucagggcuu

SEQ ID NO: 30250 - RNA, 22 nt, Human
uugaggagguccuggguuuacu

SEQ ID NO: 30251 - RNA, 22 nt, Human
uugaggaguacaaagcaugcuu

SEQ ID NO: 30252 - RNA, 23 nt, Human
uugaggagugcuuuuucuaucca

SEQ ID NO: 30253 - RNA, 22 nt, Human
uugaggaguguuuagggugagg

SEQ ID NO: 30254 - RNA, 22 nt, Human
uuacacaauuacucacuccugg

SEQ ID NO: 30255 - RNA, 22 nt, Human
uuacacaauuuuauugaccuaa

SEQ ID NO: 30256 - RNA, 22 nt, Human
uuacacagacauggcaucauga

SEQ ID NO: 30257 - RNA, 22 nt, Human
uuacacaguauccaagguucuu

SEQ ID NO: 30258 - RNA, 22 nt, Human
uuacacaucuagacccauuuuu

SEQ ID NO: 30259 - RNA, 22 nt, Human
uuacacaugucucaguggaaau

SEQ ID NO: 30260 - RNA, 22 nt, Human
uuacacguguguguaucuguau

SEQ ID NO: 30261 - RNA, 18 nt, Human
uuacacuagccuugguuc

SEQ ID NO: 30262 - RNA, 22 nt, Human
uuacacuucuaaaaaaagcagg

SEQ ID NO: 30263 - RNA, 22 nt, Human
uuacacuuguaaauggcaugua

SEQ ID NO: 30264 - RNA, 22 nt, Human
uuacagaaucuacucgugguga

SEQ ID NO: 30265 - RNA, 22 nt, Human
uuacagagaggugauugugaag

SEQ ID NO: 30266 - RNA, 22 nt, Human
uuacagagguauguaugucucu

SEQ ID NO: 30267 - RNA, 22 nt, Human
uuacagaguagggaauugaagu

SEQ ID NO: 30268 - RNA, 22 nt, Human
uuacagaguggucuggcuaugu

SEQ ID NO: 30269 - RNA, 22 nt, Human
uuacagauacuuuguaggcaag

SEQ ID NO: 30270 - RNA, 22 nt, Human
uuacagaucaucaagguauaau

SEQ ID NO: 30271 - RNA, 22 nt, Human
uuacagcuagccaauuauuuag

SEQ ID NO: 30272 - RNA, 22 nt, Human
uuacaggggacauuggggacau

SEQ ID NO: 30273 - RNA, 22 nt, Human
uuacaggugagaaaacugaggc

SEQ ID NO: 30274 - RNA, 22 nt, Human
uuacaggugggaaaacuaagcu

SEQ ID NO: 30275 - RNA, 22 nt, Human
uuacagguuguguauucaguga

SEQ ID NO: 30276 - RNA, 22 nt, Human
uuacagucaggcaugaauucag

SEQ ID NO: 30277 - RNA, 22 nt, Human
uuacagucagugaauggaaggg

SEQ ID NO: 30278 - RNA, 22 nt, Human
uuacaguccuuuguauuguuua

SEQ ID NO: 30279 - RNA, 22 nt, Human
uuacagugaagauucagguucc

SEQ ID NO: 30280 - RNA, 22 nt, Human
uuacagugaaguaccauuaaaa

SEQ ID NO: 30281 - RNA, 22 nt, Human
uuacaguguuacuugaugucca

SEQ ID NO: 30282 - RNA, 21 nt, Human
uuacaguugauggaguauucc

SEQ ID NO: 30283 - RNA, 22 nt, Human
uuacaguugcccccagccucgc

SEQ ID NO: 30284 - RNA, 22 nt, Human
uuacaguuguagaaagugguug

SEQ ID NO: 30285 - RNA, 22 nt, Human
uuacaguuuaagaggaaacaaa

SEQ ID NO: 30286 - RNA, 22 nt, Human
uugggggcauauugaguagugg

SEQ ID NO: 30287 - RNA, 22 nt, Human
uugggggguugaggaguagaua

SEQ ID NO: 30288 - RNA, 22 nt, Human
uugggguaaggaaauauggcuu

SEQ ID NO: 30289 - RNA, 22 nt, Human
uugggguaaguuugucaagcug

SEQ ID NO: 30290 - RNA, 22 nt, Human
uuggggucccacaggcugccug

SEQ ID NO: 30291 - RNA, 22 nt, Human
uugggguggaagugaggaucau

SEQ ID NO: 30292 - RNA, 22 nt, Human
uugggugcugucauggggcacg

SEQ ID NO: 30293 - RNA, 22 nt, Human
uugggugguggggagaguucag

SEQ ID NO: 30294 - RNA, 22 nt, Human
uuggguuuucccuugaaacuga

SEQ ID NO: 30295 - RNA, 22 nt, Human
uugguaaaaucauagugguaac

SEQ ID NO: 30296 - RNA, 22 nt, Human
uugguaaauaacaaucacagug

SEQ ID NO: 30297 - RNA, 22 nt, Human
uugguaaauguugauuguggcu

SEQ ID NO: 30298 - RNA, 22 nt, Human
uugguccacugugaaauuggga

SEQ ID NO: 30299 - RNA, 22 nt, Human
uuggucuguaguuuucuuaugu

SEQ ID NO: 30300 - RNA, 22 nt, Human
uuggucuugaguggcuuguuaa

SEQ ID NO: 30301 - RNA, 22 nt, Human
uuggugaauugagaccauuugu

SEQ ID NO: 30302 - RNA, 22 nt, Human
uuggugacuccccaccaugaug

SEQ ID NO: 30303 - RNA, 22 nt, Human
uuggugaguauggacacagaga

SEQ ID NO: 30304 - RNA, 22 nt, Human
uuggugcaaauuccuguaagag

SEQ ID NO: 30305 - RNA, 22 nt, Human
uugguggagucauuggcauaug

SEQ ID NO: 30306 - RNA, 22 nt, Human
uuggugucuuuuuuauacaugu

SEQ ID NO: 30307 - RNA, 22 nt, Human
uuggugugacuaaggcagugug

SEQ ID NO: 30308 - RNA, 22 nt, Human
uugguuacaaguuugcucugcc

SEQ ID NO: 30309 - RNA, 22 nt, Human
uugguucaggacauauuugagu

SEQ ID NO: 30310 - RNA, 22 nt, Human
uugguucauuuucucaucuaga

SEQ ID NO: 30311 - RNA, 22 nt, Human
uugguuccuucugaaaguauug

SEQ ID NO: 30312 - RNA, 22 nt, Human
uugguuuaucuguggaucucuu

SEQ ID NO: 30313 - RNA, 22 nt, Human
uugguuuucuaauguauuaagg

SEQ ID NO: 30314 - RNA, 22 nt, Human
uugguuuucucagcuggaccau

SEQ ID NO: 30315 - RNA, 23 nt, Human
uuguaaaacagugugacgguucc

SEQ ID NO: 30316 - RNA, 22 nt, Human
uuguaaacugcugcaggagugc

SEQ ID NO: 30317 - RNA, 22 nt, Human
uuguaaagcuuugagacuacau

SEQ ID NO: 30318 - RNA, 21 nt, Human
uuguaaagguuuagaagaaug

SEQ ID NO: 30319 - RNA, 22 nt, Human
uuguaacaggcacucugugcca

SEQ ID NO: 30320 - RNA, 22 nt, Human
uuguaaggguuacaagaaaaca

SEQ ID NO: 30321 - RNA, 22 nt, Human
uuguaauuaauggcagcaauua

SEQ ID NO: 30322 - RNA, 22 nt, Human
uuguaauuugcaaauguauugu

SEQ ID NO: 30323 - RNA, 22 nt, Human
uuguacaaagauuucacagcuc

SEQ ID NO: 30324 - RNA, 22 nt, Human
uuguacaaaugcauauuccugg

SEQ ID NO: 30325 - RNA, 22 nt, Human
uuguacaacguuuuaaauuuga

SEQ ID NO: 30326 - RNA, 22 nt, Human
uuguacaaguauuaugugaaca

SEQ ID NO: 30327 - RNA, 22 nt, Human
uuguacaauggaugccagauga

SEQ ID NO: 30328 - RNA, 22 nt, Human
uuguacacacaggaacaaacgu

SEQ ID NO: 30329 - RNA, 22 nt, Human
uuguacagaaacugcauuugga

SEQ ID NO: 30330 - RNA, 22 nt, Human
uuguacagguuccuagggugga

SEQ ID NO: 30331 - RNA, 22 nt, Human
uuguacauaaugaaaggaggcu

SEQ ID NO: 30332 - RNA, 22 nt, Human
uuguacauucugaaucuguccu

SEQ ID NO: 30333 - RNA, 22 nt, Human
uuguacauuuguucaguucuga

SEQ ID NO: 30334 - RNA, 22 nt, Human
uuguacuagaaaauuauucuuu

SEQ ID NO: 30335 - RNA, 22 nt, Human
uuguacuuaaauaugcaaauag

SEQ ID NO: 30336 - RNA, 22 nt, Human
uuguacuugccauagaacaaca

SEQ ID NO: 30337 - RNA, 22 nt, Human
uuguagaacaugcagcacaaug

SEQ ID NO: 30338 - RNA, 22 nt, Human
uuguagaauuuggaucucggca

SEQ ID NO: 30339 - RNA, 18 nt, Human
uuguagcaaauggcagug

SEQ ID NO: 30340 - RNA, 22 nt, Human
uuguagcauuuuaaaugagcau

SEQ ID NO: 30341 - RNA, 21 nt, Human
uuguagcuuguuagaccaugu

SEQ ID NO: 30342 - RNA, 22 nt, Human
uuguauauauucuuaaagaugu

SEQ ID NO: 30343 - RNA, 22 nt, Human
uuguaucaguuagcuauugcug

SEQ ID NO: 30344 - RNA, 21 nt, Human
uuguaugcauacauacacaca

SEQ ID NO: 30345 - RNA, 22 nt, Human
uuguaugcuguaggcaugcauu

SEQ ID NO: 30346 - RNA, 22 nt, Human
uuguauuagcuguaaauuuucu

SEQ ID NO: 30347 - RNA, 22 nt, Human
uuguauucuuccuuagcaguac

SEQ ID NO: 30348 - RNA, 22 nt, Human
uuguauuggcaaagaacuugag

SEQ ID NO: 30349 - RNA, 22 nt, Human
uuguauuuccuauaaccuuucu

SEQ ID NO: 30350 - RNA, 22 nt, Human
uuguauuuggguaguauagaga

SEQ ID NO: 30351 - RNA, 22 nt, Human
uugucaagauugagagaugacu

SEQ ID NO: 30352 - RNA, 22 nt, Human
uugucacacccuuuuuuauacc

SEQ ID NO: 30353 - RNA, 22 nt, Human
uugucacauucaaguuuuauau

SEQ ID NO: 30354 - RNA, 22 nt, Human
uugucauauuuauaaaauguaa

SEQ ID NO: 30355 - RNA, 22 nt, Human
uugucauugggguuauuuguua

SEQ ID NO: 30356 - RNA, 22 nt, Human
uuguccaaggucccacaguuag

SEQ ID NO: 30357 - RNA, 22 nt, Human
uuguccagagccaggcugucgg

SEQ ID NO: 30358 - RNA, 22 nt, Human
uugucccaggacuugcauagau

SEQ ID NO: 30359 - RNA, 23 nt, Human
uuguccucuggaucgguuugguu

SEQ ID NO: 30360 - RNA, 22 nt, Human
uuguccugcaaccucacauggc

SEQ ID NO: 30361 - RNA, 22 nt, Human
uuguccugucaggcugggggcu

SEQ ID NO: 30362 - RNA, 22 nt, Human
uuguccuuggaugaagcuggga

SEQ ID NO: 30363 - RNA, 22 nt, Human
uuguccuuuaauguuuaguauu

SEQ ID NO: 30364 - RNA, 22 nt, Human
uugucuaaugagcuccacuuca

SEQ ID NO: 30365 - RNA, 22 nt, Human
uugucucucauuccugcaacuc

SEQ ID NO: 30366 - RNA, 22 nt, Human
uugucugaaaagguaaauauuu

SEQ ID NO: 30367 - RNA, 22 nt, Human
uugucugaaccaucucccuggc

SEQ ID NO: 30368 - RNA, 22 nt, Human
uugucugaauauguauguaucc

SEQ ID NO: 30369 - RNA, 22 nt, Human
uugucugagaaagugaguugcu

SEQ ID NO: 30370 - RNA, 22 nt, Human
uugucugcauuguuucuauggg

SEQ ID NO: 30371 - RNA, 22 nt, Human
uugucugcuccucccagccuca

SEQ ID NO: 30372 - RNA, 22 nt, Human
uugucuuaaauggauggacaau

SEQ ID NO: 30373 - RNA, 22 nt, Human
uugucuuauuuuaucauaagca

SEQ ID NO: 30374 - RNA, 22 nt, Human
uugugaaguguucugagacagg

SEQ ID NO: 30375 - RNA, 22 nt, Human
uugugaaugcuuaauauguuuc

SEQ ID NO: 30376 - RNA, 22 nt, Human
uugugagaugauuugaaagugu

SEQ ID NO: 30377 - RNA, 22 nt, Human
uugugauaaaacauuagacauu

SEQ ID NO: 30378 - RNA, 22 nt, Human
uugugauacugagcuuggcauu

SEQ ID NO: 30379 - RNA, 22 nt, Human
uugugcaaaggggguuaaucau

SEQ ID NO: 30380 - RNA, 22 nt, Human
uugugcauauuagguacaugcu

SEQ ID NO: 30381 - RNA, 22 nt, Human
uugugcauuucucugagugugu

SEQ ID NO: 30382 - RNA, 22 nt, Human
uugugcccucaaagggugcguc

SEQ ID NO: 30383 - RNA, 22 nt, Human
uugugccuuugcuuuuacaagu

SEQ ID NO: 30384 - RNA, 22 nt, Human
uugugcuagaaccaguacagaa

SEQ ID NO: 30385 - RNA, 22 nt, Human
uucaacaagucuuuuuucacug

SEQ ID NO: 30386 - RNA, 22 nt, Human
uucaacaaugcacuugaguaua

SEQ ID NO: 30387 - RNA, 22 nt, Human
uucaacacugaucguuuacaca

SEQ ID NO: 30388 - RNA, 22 nt, Human
uucaacagacccuucuuucuuu

SEQ ID NO: 30389 - RNA, 22 nt, Human
uucaacagauauuuauugagca

SEQ ID NO: 30390 - RNA, 22 nt, Human
uucaacaggaaagcacuuuaca

SEQ ID NO: 30391 - RNA, 22 nt, Human
uucaacagggcaugaugagacg

SEQ ID NO: 30392 - RNA, 22 nt, Human
uucaacaucauuguaagccucu

SEQ ID NO: 30393 - RNA, 23 nt, Human
uucaacauuuauugagcguccgu

SEQ ID NO: 30394 - RNA, 22 nt, Human
uucaacuuuaugcauauguauu

SEQ ID NO: 30395 - RNA, 22 nt, Human
uucaagaagguacauuuacauc

SEQ ID NO: 30396 - RNA, 22 nt, Human
uucaagacugcgacuaaugccc

SEQ ID NO: 30397 - RNA, 18 nt, Human
uucaagaguuucucuagg

SEQ ID NO: 30398 - RNA, 22 nt, Human
uucaagauccagcacaacagug

SEQ ID NO: 30399 - RNA, 22 nt, Human
uucaagaucuggguuuucagcu

SEQ ID NO: 30400 - RNA, 22 nt, Human
uucaagaucuuccaaaggauac

SEQ ID NO: 30401 - RNA, 22 nt, Human
uucaaggaagaaguggcuuuga

SEQ ID NO: 30402 - RNA, 22 nt, Human
uucaaggagauuggagucuacu

SEQ ID NO: 30403 - RNA, 22 nt, Human
uucaaggcagaguguaguuaaa

SEQ ID NO: 30404 - RNA, 22 nt, Human
uucaagguaaguaugagaaagc

SEQ ID NO: 30405 - RNA, 22 nt, Human
uucaaguaacacaaaugcaccc

SEQ ID NO: 30406 - RNA, 22 nt, Human
uucaaguaaugcuacuccuaug

SEQ ID NO: 30407 - RNA, 22 nt, Human
uucaagucagagcaagccaagu

SEQ ID NO: 30408 - RNA, 22 nt, Human
uucaagucugcccagagucagc

SEQ ID NO: 30409 - RNA, 22 nt, Human
uucaagucuuccaugguauucu

SEQ ID NO: 30410 - RNA, 22 nt, Human
uucaaguuaacucuccuuguac

SEQ ID NO: 30411 - RNA, 22 nt, Human
uucaaguuaaugauucugguuu

SEQ ID NO: 30412 - RNA, 22 nt, Human
uucaaguucuguggagagcugu

SEQ ID NO: 30413 - RNA, 22 nt, Human
uucaaguuuugccuccccaucc

SEQ ID NO: 30414 - RNA, 22 nt, Human
uucaauacaaagaaaggaauuu

SEQ ID NO: 30415 - RNA, 22 nt, Human
uucaauacaccauaggaauagu

SEQ ID NO: 30416 - RNA, 22 nt, Human
uucaauaggaugcaugauauaa

SEQ ID NO: 30417 - RNA, 20 nt, Human
uucaauaugacccuggggag

SEQ ID NO: 30418 - RNA, 22 nt, Human
uucaaucauuccaacacuuuaa

SEQ ID NO: 30419 - RNA, 22 nt, Human
uucaaugagcccaagaacguga

SEQ ID NO: 30420 - RNA, 22 nt, Human
uucaaugaggauagaacuggau

SEQ ID NO: 30421 - RNA, 17 nt, Human
uucaaugauuaaugcau

SEQ ID NO: 30422 - RNA, 22 nt, Human
uucaaugccuuucucuaagcuc

SEQ ID NO: 30423 - RNA, 22 nt, Human
uucaaugugguuauaauaacua

SEQ ID NO: 30424 - RNA, 22 nt, Human
uucaauguuaagaagaauaugu

SEQ ID NO: 30425 - RNA, 22 nt, Human
uucaauucugaugaaggcaaua

SEQ ID NO: 30426 - RNA, 22 nt, Human
uucaauuugugcuaaggcaccg

SEQ ID NO: 30427 - RNA, 22 nt, Human
uucacaaaacacuauuuucugg

SEQ ID NO: 30428 - RNA, 22 nt, Human
uucacaaaaugguuuguugaug

SEQ ID NO: 30429 - RNA, 22 nt, Human
uucacaaacuucaugauggcac

SEQ ID NO: 30430 - RNA, 22 nt, Human
uucacaagugugaaggcagagc

SEQ ID NO: 30431 - RNA, 22 nt, Human
uucacaaugccuuguugauggu

SEQ ID NO: 30432 - RNA, 22 nt, Human
uucacaauuaacuuuauacuua

SEQ ID NO: 30433 - RNA, 22 nt, Human
uucacagaauggcaaguuaugg

SEQ ID NO: 30434 - RNA, 22 nt, Human
uucacagaguuauuuuuaugcu

SEQ ID NO: 30435 - RNA, 22 nt, Human
uucacagaugccugaugugugg

SEQ ID NO: 30436 - RNA, 22 nt, Human
uucacagauuucccugcacaug

SEQ ID NO: 30437 - RNA, 22 nt, Human
uucacagccucugccccaggca

SEQ ID NO: 30438 - RNA, 22 nt, Human
uucacagcucauacuguucuca

SEQ ID NO: 30439 - RNA, 22 nt, Human
uucacagcuuaauaaggcucag

SEQ ID NO: 30440 - RNA, 22 nt, Human
uucacaggaggguggaugcaug

SEQ ID NO: 30441 - RNA, 22 nt, Human
uucacagggcagaucauuucug

SEQ ID NO: 30442 - RNA, 22 nt, Human
uucacagggcagcagcugagcc

SEQ ID NO: 30443 - RNA, 22 nt, Human
uucacagguucuuuuuaaggcu

SEQ ID NO: 30444 - RNA, 22 nt, Human
uucacagugagcuaugucuugu

SEQ ID NO: 30445 - RNA, 21 nt, Human
uucacaguggauaacuuucug

SEQ ID NO: 30446 - RNA, 22 nt, Human
uucacaguggcugugccauuug

SEQ ID NO: 30447 - RNA, 22 nt, Human
uucacaguuugcugggacagga

SEQ ID NO: 30448 - RNA, 22 nt, Human
uucacauaaauagaucacauca

SEQ ID NO: 30449 - RNA, 22 nt, Human
uucacauaaucugcagcaagcg

SEQ ID NO: 30450 - RNA, 22 nt, Human
uucacauuagccaagagaugga

SEQ ID NO: 30451 - RNA, 22 nt, Human
uucacauuauaaucaguucugc

SEQ ID NO: 30452 - RNA, 22 nt, Human
uucacauucucacaagaggaaa

SEQ ID NO: 30453 - RNA, 22 nt, Human
uucacauugugcagauuauggu

SEQ ID NO: 30454 - RNA, 22 nt, Human
uucacauuuacugguuuguccg

SEQ ID NO: 30455 - RNA, 22 nt, Human
uucacauuucucugcuguuuga

SEQ ID NO: 30456 - RNA, 22 nt, Human
uucaccagaccugugagcuucc

SEQ ID NO: 30457 - RNA, 22 nt, Human
uucaccagcagcucacuaguca

SEQ ID NO: 30458 - RNA, 18 nt, Human
uucaccagguagauaggg

SEQ ID NO: 30459 - RNA, 22 nt, Human
uucaccauaaugcaaaguggga

SEQ ID NO: 30460 - RNA, 22 nt, Human
uucaccauguaaaccauguggc

SEQ ID NO: 30461 - RNA, 22 nt, Human
uucaccauuacauacaaagaug

SEQ ID NO: 30462 - RNA, 22 nt, Human
uucaccauuucccacuaaacca

SEQ ID NO: 30463 - RNA, 22 nt, Human
uucacccaauauaacuagagga

SEQ ID NO: 30464 - RNA, 22 nt, Human
uucacguuguugaagaaaauac

SEQ ID NO: 30465 - RNA, 19 nt, Human
uucacuaauuguaagauuu

SEQ ID NO: 30466 - RNA, 22 nt, Human
uucacuaugcuuggaaacuucu

SEQ ID NO: 30467 - RNA, 22 nt, Human
uucacugaaguuucuuccaugu

SEQ ID NO: 30468 - RNA, 22 nt, Human
uucacuguccugcaacucuaga

SEQ ID NO: 30469 - RNA, 22 nt, Human
uucacuguuaugaagcucuggg

SEQ ID NO: 30470 - RNA, 22 nt, Human
uucacuuaacauuuaccaagga

SEQ ID NO: 30471 - RNA, 22 nt, Human
uucagaaagguuaaucuggauu

SEQ ID NO: 30472 - RNA, 22 nt, Human
uucagaaaucccucuucuaccc

SEQ ID NO: 30473 - RNA, 22 nt, Human
uucagaaaugaauauugguauu

SEQ ID NO: 30474 - RNA, 22 nt, Human
uucagaagguaggaaugucccu

SEQ ID NO: 30475 - RNA, 22 nt, Human
uucagaaguagcuaagcaguca

SEQ ID NO: 30476 - RNA, 21 nt, Human
uucagaaguugagggcagguu

SEQ ID NO: 30477 - RNA, 22 nt, Human
uucagaauaauguguuagagaa

SEQ ID NO: 30478 - RNA, 22 nt, Human
uucagaaucuaugugccagcuc

SEQ ID NO: 30479 - RNA, 22 nt, Human
uucagaaugcuauuucugaaau

SEQ ID NO: 30480 - RNA, 22 nt, Human
uucagaauguacugauagaaca

SEQ ID NO: 30481 - RNA, 22 nt, Human
uucagacacagcgcugggaaau

SEQ ID NO: 30482 - RNA, 22 nt, Human
uucagacaggcagcugggcugg

SEQ ID NO: 30483 - RNA, 22 nt, Human
uucagacaguuuucagauucau

SEQ ID NO: 30484 - RNA, 22 nt, Human
uucagacuagacacauuucaag

SEQ ID NO: 30485 - RNA, 22 nt, Human
uucagacuucuugacuggcuuu

SEQ ID NO: 30486 - RNA, 22 nt, Human
uucagagaaacugagguuuaga

SEQ ID NO: 30487 - RNA, 22 nt, Human
uucagagaaagcagauuuacuc

SEQ ID NO: 30488 - RNA, 22 nt, Human
uucagagacagcaaccaggaca

SEQ ID NO: 30489 - RNA, 22 nt, Human
uucagagaguuugugaguccuu

SEQ ID NO: 30490 - RNA, 22 nt, Human
uucagagauggaaggcagaaug

SEQ ID NO: 30491 - RNA, 22 nt, Human
uucagaggacaaccagccaucu

SEQ ID NO: 30492 - RNA, 22 nt, Human
uucagaggggcuaaguacuugc

SEQ ID NO: 30493 - RNA, 20 nt, Human
uucagaguuuacucaaacug

SEQ ID NO: 30494 - RNA, 22 nt, Human
uucagcaaaauaucucagauag

SEQ ID NO: 30495 - RNA, 22 nt, Human
uucagcaacauuuguugagugc

SEQ ID NO: 30496 - RNA, 22 nt, Human
uucuagaaugauaugagguacu

SEQ ID NO: 30497 - RNA, 20 nt, Human
uucuagaaugcccagggaca

SEQ ID NO: 30498 - RNA, 22 nt, Human
uucuagacaaauguguucauuc

SEQ ID NO: 30499 - RNA, 22 nt, Human
uucuagagccagggcagcugca

SEQ ID NO: 30500 - RNA, 22 nt, Human
uucuagauagagugcaaauuau

SEQ ID NO: 30501 - RNA, 20 nt, Human
uucuagcauacuuacaagga

SEQ ID NO: 30502 - RNA, 22 nt, Human
uucuaggaagggaagcauggca

SEQ ID NO: 30503 - RNA, 22 nt, Human
uucuaggggacauaauaugaaa

SEQ ID NO: 30504 - RNA, 22 nt, Human
uuguggcuucuacgcccacagg

SEQ ID NO: 30505 - RNA, 22 nt, Human
uuguguacacgccuuuaaauga

SEQ ID NO: 30506 - RNA, 22 nt, Human
uuguguacucaccagcacauac

SEQ ID NO: 30507 - RNA, 22 nt, Human
uuguguauuuccugaagguaag

SEQ ID NO: 30508 - RNA, 22 nt, Human
uuguguauuuuuugauacuaac

SEQ ID NO: 30509 - RNA, 22 nt, Human
uuguguccccuguucuaccugu

SEQ ID NO: 30510 - RNA, 22 nt, Human
uugugucccugcggcugaggag

SEQ ID NO: 30511 - RNA, 22 nt, Human
uugugucccuguaagacaaagc

SEQ ID NO: 30512 - RNA, 22 nt, Human
uuguguccuaacaucuaguuaa

SEQ ID NO: 30513 - RNA, 23 nt, Human
uugugucuacuuccuaucuaggg

SEQ ID NO: 30514 - RNA, 22 nt, Human
uugugucuaugguuugagcauc

SEQ ID NO: 30515 - RNA, 22 nt, Human
uugugucugggggagugacauc

SEQ ID NO: 30516 - RNA, 22 nt, Human
uugugugauaagucucuugugc

SEQ ID NO: 30517 - RNA, 22 nt, Human
uugugugcugagggccugcugu

SEQ ID NO: 30518 - RNA, 22 nt, Human
uuguguggauaauauuacuuga

SEQ ID NO: 30519 - RNA, 17 nt, Human
uuguguguaguucugau

SEQ ID NO: 30520 - RNA, 19 nt, Human
uugugugucagucagaguu

SEQ ID NO: 30521 - RNA, 22 nt, Human
uuguguuuucuuauggcauaaa

SEQ ID NO: 30522 - RNA, 22 nt, Human
uuguuaaaaugcauauucuggu

SEQ ID NO: 30523 - RNA, 22 nt, Human
uuguuaaggguuaugcagcuuu

SEQ ID NO: 30524 - RNA, 21 nt, Human
uuguuacaaugcaagaguaug

SEQ ID NO: 30525 - RNA, 22 nt, Human
uuguuacacauaauaacauuuu

SEQ ID NO: 30526 - RNA, 22 nt, Human
uuguuaguuuauauaauguagu

SEQ ID NO: 30527 - RNA, 22 nt, Human
uuguuauuauuacuaagucuuc

SEQ ID NO: 30528 - RNA, 22 nt, Human
uuguuauuuacaacaauccuau

SEQ ID NO: 30529 - RNA, 22 nt, Human
uuguucacuaugaagagguugg

SEQ ID NO: 30530 - RNA, 22 nt, Human
uuguucauaaagacaguucaga

SEQ ID NO: 30531 - RNA, 22 nt, Human
uuguucaucaggugacacauac

SEQ ID NO: 30532 - RNA, 22 nt, Human
uuguucuuccaucaucccucag

SEQ ID NO: 30533 - RNA, 22 nt, Human
uuguucuuggagcaggcagaga

SEQ ID NO: 30534 - RNA, 22 nt, Human
uuguugauguggacgucuggaa

SEQ ID NO: 30535 - RNA, 22 nt, Human
uuguugcaagccuggaaucugg

SEQ ID NO: 30536 - RNA, 22 nt, Human
uuguugcagagaugaaugacau

SEQ ID NO: 30537 - RNA, 22 nt, Human
uuguugguggaauugaugcuag

SEQ ID NO: 30538 - RNA, 22 nt, Human
uuguuuaaaauguagcaagaaa

SEQ ID NO: 30539 - RNA, 22 nt, Human
uuguuuaaagaacuucugacuu

SEQ ID NO: 30540 - RNA, 20 nt, Human
uuguuuaaaggugaagaggc

SEQ ID NO: 30541 - RNA, 22 nt, Human
uuguuuaaugccucauacaucu

SEQ ID NO: 30542 - RNA, 22 nt, Human
uuguuuaucgcuugcucacaua

SEQ ID NO: 30543 - RNA, 22 nt, Human
uuguuuauggauuguagaaacu

SEQ ID NO: 30544 - RNA, 22 nt, Human
uuguuuauuagcaauuauccug

SEQ ID NO: 30545 - RNA, 22 nt, Human
uuguuuccagcaaauaguccau

SEQ ID NO: 30546 - RNA, 22 nt, Human
uuguuuccauugcagacugugu

SEQ ID NO: 30547 - RNA, 22 nt, Human
uuguuucccuggaucuagagcu

SEQ ID NO: 30548 - RNA, 22 nt, Human
uuguuucuggaaaaggcgagaa

SEQ ID NO: 30549 - RNA, 22 nt, Human
uuguuugaauaacagacaaauu

SEQ ID NO: 30550 - RNA, 22 nt, Human
uuguuuuaguagguacacugag

SEQ ID NO: 30551 - RNA, 22 nt, Human
uuguuuuaucuuucuacagacu

SEQ ID NO: 30552 - RNA, 22 nt, Human
uuguuuuauucugcaauuuccc

SEQ ID NO: 30553 - RNA, 22 nt, Human
uuguuuucagggugucauucac

SEQ ID NO: 30554 - RNA, 22 nt, Human
uuguuuuuagagaagcccugaa

SEQ ID NO: 30555 - RNA, 22 nt, Human
uuguuuuuaugaacauccagga

SEQ ID NO: 30556 - RNA, 22 nt, Human
uuuaaaaccaaagaaagccucu

SEQ ID NO: 30557 - RNA, 22 nt, Human
uuuaaaaguuaucaucugucca

SEQ ID NO: 30558 - RNA, 22 nt, Human
uuuaaacaaauaggauugccua

SEQ ID NO: 30559 - RNA, 22 nt, Human
uuuaaacuaacaguacacguug

SEQ ID NO: 30560 - RNA, 19 nt, Human
uuuaaagugacugguauuu

SEQ ID NO: 30561 - RNA, 22 nt, Human
uuuaaaguuuuugcacauucug

SEQ ID NO: 30562 - RNA, 22 nt, Human
uuuaaauguuuauagagaguac

SEQ ID NO: 30563 - RNA, 22 nt, Human
uuuaaauuuagaagaaacacug

SEQ ID NO: 30564 - RNA, 22 nt, Human
uuuaacagauaguuucuucugu

SEQ ID NO: 30565 - RNA, 22 nt, Human
uuuaacccaaauaaccacagga

SEQ ID NO: 30566 - RNA, 22 nt, Human
uuuaaccucuaauuuaguucuc

SEQ ID NO: 30567 - RNA, 22 nt, Human
uuuaacuccuaguguguauuag

SEQ ID NO: 30568 - RNA, 20 nt, Human
uuuaacuggccuucuggcuc

SEQ ID NO: 30569 - RNA, 22 nt, Human
uuuaacuggucuccugcugcuu

SEQ ID NO: 30570 - RNA, 23 nt, Human
uuuaacuuuccaauaauucauug

SEQ ID NO: 30571 - RNA, 22 nt, Human
uuuaagaaguuauguuauaaau

SEQ ID NO: 30572 - RNA, 22 nt, Human
uuuaagacagugcaagcugaau

SEQ ID NO: 30573 - RNA, 22 nt, Human
uuuaagacuuagauuuauuggg

SEQ ID NO: 30574 - RNA, 22 nt, Human
uuuaagagcauuugcaauuuau

SEQ ID NO: 30575 - RNA, 22 nt, Human
uuuaagagccuguacaaauauu

SEQ ID NO: 30576 - RNA, 22 nt, Human
uuuaagagcuaguaugucauuu

SEQ ID NO: 30577 - RNA, 22 nt, Human
uuuaagaucauuuguauuaucc

SEQ ID NO: 30578 - RNA, 22 nt, Human
uuuaagcagagaaaugauguau

SEQ ID NO: 30579 - RNA, 22 nt, Human
uuuaaguuccuuuucaacaacu

SEQ ID NO: 30580 - RNA, 22 nt, Human
uuuaauacagaacuugucaggg

SEQ ID NO: 30581 - RNA, 22 nt, Human
uuuaauagggcccaaugagacu

SEQ ID NO: 30582 - RNA, 22 nt, Human
uuuaauauucugcauucuccuu

SEQ ID NO: 30583 - RNA, 22 nt, Human
uuuaaucaggcaaagcauaaua

SEQ ID NO: 30584 - RNA, 22 nt, Human
uuuaaucauaagaaggaaaaua

SEQ ID NO: 30585 - RNA, 22 nt, Human
uuuaaucuauucccuaaacacc

SEQ ID NO: 30586 - RNA, 22 nt, Human
uuuaauguuaaauuuguagaug

SEQ ID NO: 30587 - RNA, 22 nt, Human
uuuaauuauguuaagccacuga

SEQ ID NO: 30588 - RNA, 22 nt, Human
uuuaauuguuguggguacauag

SEQ ID NO: 30589 - RNA, 21 nt, Human
uuuaauuugcauguaugacgc

SEQ ID NO: 30590 - RNA, 22 nt, Human
uuuacaacccaaguccagagag

SEQ ID NO: 30591 - RNA, 22 nt, Human
uuuacaaggcagaacugauuaa

SEQ ID NO: 30592 - RNA, 22 nt, Human
uuuacaaggcaguuauuuuccu

SEQ ID NO: 30593 - RNA, 22 nt, Human
uuuacaagucagggacuguucu

SEQ ID NO: 30594 - RNA, 22 nt, Human
uuuacaagucuguugaucccaa

SEQ ID NO: 30595 - RNA, 22 nt, Human
uuuacaauucucuaccaguguu

SEQ ID NO: 30596 - RNA, 22 nt, Human
uuuacaauugguuuucucuaau

SEQ ID NO: 30597 - RNA, 22 nt, Human
uuuacacaaaagauagcacacc

SEQ ID NO: 30598 - RNA, 22 nt, Human
uuuacaccaaaaugacacagag

SEQ ID NO: 30599 - RNA, 22 nt, Human
uuuacaccauuagaagcuacuu

SEQ ID NO: 30600 - RNA, 22 nt, Human
uuuacacuugaggaaacugagg

SEQ ID NO: 30601 - RNA, 22 nt, Human
uuuacagaagagaaggaugcuu

SEQ ID NO: 30602 - RNA, 22 nt, Human
uuuacagaauguugaauuuggg

SEQ ID NO: 30603 - RNA, 22 nt, Human
uuuacagcaacagugcagaggu

SEQ ID NO: 30604 - RNA, 22 nt, Human
uuuacagcauugcugaaaguuc

SEQ ID NO: 30605 - RNA, 22 nt, Human
uuuacagcuacuguccuauuuc

SEQ ID NO: 30606 - RNA, 22 nt, Human
uuuacagcuucuauacuaugug

SEQ ID NO: 30607 - RNA, 22 nt, Human
uuuacagggaauauuuuggcuu

SEQ ID NO: 30608 - RNA, 22 nt, Human
uuuacaggguucaagaaugaaa

SEQ ID NO: 30609 - RNA, 22 nt, Human
uuuacaguaagguggaugguac

SEQ ID NO: 30610 - RNA, 22 nt, Human
uuuacagucaccaaacuuugcu

SEQ ID NO: 30611 - RNA, 22 nt, Human
uucugccuucaguccucugacu

SEQ ID NO: 30612 - RNA, 18 nt, Human
uucugcggugacagauau

SEQ ID NO: 30613 - RNA, 22 nt, Human
uucccucuuuuccaacaguugu

SEQ ID NO: 30614 - RNA, 22 nt, Human
uucccuggcaugaguguaagau

SEQ ID NO: 30615 - RNA, 22 nt, Human
uucccuggggaaggugaccuuu

SEQ ID NO: 30616 - RNA, 21 nt, Human
uucuucuuggacuguuuuggc

SEQ ID NO: 30617 - RNA, 22 nt, Human
uucuucuugucugcccucacau

SEQ ID NO: 30618 - RNA, 22 nt, Human
uucuucuuucccccugugguac

SEQ ID NO: 30619 - RNA, 19 nt, Human
uucuugaacauguuucuca

SEQ ID NO: 30620 - RNA, 22 nt, Human
uucuugaaggggauauaaauag

SEQ ID NO: 30621 - RNA, 20 nt, Human
uucuugaauacccaacccca

SEQ ID NO: 30622 - RNA, 22 nt, Human
uucuugaauagggauugauaaa

SEQ ID NO: 30623 - RNA, 22 nt, Human
uucuugaugaaugcuaagaacu

SEQ ID NO: 30624 - RNA, 22 nt, Human
uucuugauucuuccuugaagga

SEQ ID NO: 30625 - RNA, 22 nt, Human
uucuugcaucaagacagccugu

SEQ ID NO: 30626 - RNA, 22 nt, Human
uucuugccauauuucagcccuu

SEQ ID NO: 30627 - RNA, 22 nt, Human
uucuugccugcccugugucgua

SEQ ID NO: 30628 - RNA, 22 nt, Human
uucuuggaaauacauucaauaa

SEQ ID NO: 30629 - RNA, 22 nt, Human
uucuuggcaaugguauucaucc

SEQ ID NO: 30630 - RNA, 22 nt, Human
uucuuguacuggagauacauga

SEQ ID NO: 30631 - RNA, 22 nt, Human
uucuuguuuauuaagauauaaa

SEQ ID NO: 30632 - RNA, 22 nt, Human
uucuuuacaguggguuuugaau

SEQ ID NO: 30633 - RNA, 22 nt, Human
uucuuuaccacuacucuuccaa

SEQ ID NO: 30634 - RNA, 22 nt, Human
uucuuuagcaacuuggauuuag

SEQ ID NO: 30635 - RNA, 22 nt, Human
uucuuuagguagauccaguuuu

SEQ ID NO: 30636 - RNA, 23 nt, Human
uucuuuauaaaucaaugggaugu

SEQ ID NO: 30637 - RNA, 22 nt, Human
uucuuuauguuaaugaaucuau

SEQ ID NO: 30638 - RNA, 22 nt, Human
uucuuuauuaguuuagugagcu

SEQ ID NO: 30639 - RNA, 22 nt, Human
uucuuuauugagacuucauugu

SEQ ID NO: 30640 - RNA, 22 nt, Human
uucuuuccaaccagauauuggu

SEQ ID NO: 30641 - RNA, 19 nt, Human
uucuuuccacaucuucucu

SEQ ID NO: 30642 - RNA, 21 nt, Human
uucuuuccccagaggacuaaa

SEQ ID NO: 30643 - RNA, 22 nt, Human
uucuuuccuugccucagugaag

SEQ ID NO: 30644 - RNA, 22 nt, Human
uucuuucucacucuuuaggaag

SEQ ID NO: 30645 - RNA, 22 nt, Human
uucuuucugucaugguguacug

SEQ ID NO: 30646 - RNA, 22 nt, Human
uucuuucuguccauaaugagac

SEQ ID NO: 30647 - RNA, 22 nt, Human
uucuuuggaauaagucaagcug

SEQ ID NO: 30648 - RNA, 22 nt, Human
uucuuugggauuguagcugucu

SEQ ID NO: 30649 - RNA, 22 nt, Human
uucuuuggugggagauugaggu

SEQ ID NO: 30650 - RNA, 22 nt, Human
uucuuugugcauccaauuuucu

SEQ ID NO: 30651 - RNA, 22 nt, Human
uucuuuguugagcaaguaggac

SEQ ID NO: 30652 - RNA, 22 nt, Human
uucuuuuaauagagauccugug

SEQ ID NO: 30653 - RNA, 22 nt, Human
uucuuuuagucauucagggaag

SEQ ID NO: 30654 - RNA, 20 nt, Human
uucuuuugauaagcuugaca

SEQ ID NO: 30655 - RNA, 22 nt, Human
uucuuuuuaucuucccauaaga

SEQ ID NO: 30656 - RNA, 22 nt, Human
uugaaaaaauugguagaggaug

SEQ ID NO: 30657 - RNA, 22 nt, Human
uugaaaagcaaaugauggguag

SEQ ID NO: 30658 - RNA, 17 nt, Human
uugaaaaguaagcuccc

SEQ ID NO: 30659 - RNA, 22 nt, Human
uugaaacauaaaauauuuccug

SEQ ID NO: 30660 - RNA, 22 nt, Human
uugaaacauuaccuguauuucc

SEQ ID NO: 30661 - RNA, 22 nt, Human
uugaaacugaguguguuugggg

SEQ ID NO: 30662 - RNA, 22 nt, Human
uugaaacuuagaaauugagcug

SEQ ID NO: 30663 - RNA, 22 nt, Human
uugaaacuuuucuuggagaaac

SEQ ID NO: 30664 - RNA, 23 nt, Human
uugaaagauugcuaaguaaaaau

SEQ ID NO: 30665 - RNA, 22 nt, Human
uugaaaggugcugugugcugau

SEQ ID NO: 30666 - RNA, 22 nt, Human
uugaaagugauggggaagaugg

SEQ ID NO: 30667 - RNA, 22 nt, Human
uugaaaguuuauggagucugca

SEQ ID NO: 30668 - RNA, 22 nt, Human
uugaaauacugcauuguucagu

SEQ ID NO: 30669 - RNA, 22 nt, Human
uugaaauauuugggaguguuug

SEQ ID NO: 30670 - RNA, 22 nt, Human
uugaaaugagcaaacugucagc

SEQ ID NO: 30671 - RNA, 22 nt, Human
uugaaaugcaucaucauuuaga

SEQ ID NO: 30672 - RNA, 20 nt, Human
uugaaauuggaugguagcua

SEQ ID NO: 30673 - RNA, 19 nt, Human
uugaaauuguuugauaugg

SEQ ID NO: 30674 - RNA, 19 nt, Human
uugaacacuuucuucaagg

SEQ ID NO: 30675 - RNA, 22 nt, Human
uugaacagcuguuacauuguua

SEQ ID NO: 30676 - RNA, 22 nt, Human
uugaacaguccuaagagacccu

SEQ ID NO: 30677 - RNA, 17 nt, Human
uugaacugcugagucag

SEQ ID NO: 30678 - RNA, 22 nt, Human
uugaagaaccaucugugccacu

SEQ ID NO: 30679 - RNA, 22 nt, Human
uugaagaauuaggacgugagua

SEQ ID NO: 30680 - RNA, 22 nt, Human
uugaagacaagggcagggguuc

SEQ ID NO: 30681 - RNA, 22 nt, Human
uugaagagacaauuuggaaagc

SEQ ID NO: 30682 - RNA, 20 nt, Human
uugaagaggauauaucgcuc

SEQ ID NO: 30683 - RNA, 20 nt, Human
uugaagagucagguagggcc

SEQ ID NO: 30684 - RNA, 22 nt, Human
uugaagauggaucgccacucuc

SEQ ID NO: 30685 - RNA, 22 nt, Human
uugaagauuauucuauuaaaag

SEQ ID NO: 30686 - RNA, 22 nt, Human
uugaagcaaggcgaaucuugug

SEQ ID NO: 30687 - RNA, 22 nt, Human
uugaagcacaaugucuuuuauc

SEQ ID NO: 30688 - RNA, 22 nt, Human
uugaagcugucuuucagaauca

SEQ ID NO: 30689 - RNA, 22 nt, Human
uugaaggacauccuauuucuag

SEQ ID NO: 30690 - RNA, 23 nt, Human
uugaaggagaaagcuuucuuggu

SEQ ID NO: 30691 - RNA, 22 nt, Human
uugaaggaggcuccuuuuuaaa

SEQ ID NO: 30692 - RNA, 22 nt, Human
uugaaggugacauaucuggagc

SEQ ID NO: 30693 - RNA, 22 nt, Human
uugaaguccuagccccugguaa

SEQ ID NO: 30694 - RNA, 22 nt, Human
uugaaguccuugccucuugcac

SEQ ID NO: 30695 - RNA, 22 nt, Human
uugaaguuguaguucagugaag

SEQ ID NO: 30696 - RNA, 22 nt, Human
uugaauaaaugagcagugaauu

SEQ ID NO: 30697 - RNA, 22 nt, Human
uugaauaauauguucaggagga

SEQ ID NO: 30698 - RNA, 22 nt, Human
uugaauaauguguauguuguua

SEQ ID NO: 30699 - RNA, 22 nt, Human
uugaauaguuuuggauagcaua

SEQ ID NO: 30700 - RNA, 22 nt, Human
uugaaucuauaauuucaguauu

SEQ ID NO: 30701 - RNA, 22 nt, Human
uugaaucuuagcucugccacuu

SEQ ID NO: 30702 - RNA, 22 nt, Human
uugaaugaauaguugcuagaag

SEQ ID NO: 30703 - RNA, 22 nt, Human
uugaaugaaugguccauauaga

SEQ ID NO: 30704 - RNA, 22 nt, Human
uugaauuagacuuugcuacagg

SEQ ID NO: 30705 - RNA, 18 nt, Human
uugaauucuucuacaugu

SEQ ID NO: 30706 - RNA, 23 nt, Human
uugaauuucucuugcaauauuua

SEQ ID NO: 30707 - RNA, 22 nt, Human
uugacaaaggaauugaaucucu

SEQ ID NO: 30708 - RNA, 22 nt, Human
uugacaagcgaaguaccauaau

SEQ ID NO: 30709 - RNA, 22 nt, Human
uugacaaguaauacuuaaauua

SEQ ID NO: 30710 - RNA, 22 nt, Human
uugacaaucccuguuagaagug

SEQ ID NO: 30711 - RNA, 22 nt, Human
uugacacaaacagugauguagu

SEQ ID NO: 30712 - RNA, 22 nt, Human
uugacacagaucaauauucaac

SEQ ID NO: 30713 - RNA, 22 nt, Human
uugacacagucaacuugauuuu

SEQ ID NO: 30714 - RNA, 22 nt, Human
uugacacaguuuucucauuaag

SEQ ID NO: 30715 - RNA, 22 nt, Human
uugacagaaauguauuugcaug

SEQ ID NO: 30716 - RNA, 22 nt, Human
uugacagagaaaagugugacuu

SEQ ID NO: 30717 - RNA, 22 nt, Human
uugacagcuauuuugcuuugau

SEQ ID NO: 30718 - RNA, 22 nt, Human
uugacaggaaaaaguuuaggau

SEQ ID NO: 30719 - RNA, 21 nt, Human
uugacaggaaagaggggagau

SEQ ID NO: 30720 - RNA, 22 nt, Human
uugacagggccaagaauggacc

SEQ ID NO: 30721 - RNA, 22 nt, Human
uugacaguauagcuuuaccuau

SEQ ID NO: 30722 - RNA, 22 nt, Human
uugacauaagacuuagaguauu

SEQ ID NO: 30723 - RNA, 22 nt, Human
uugacaucaaauagauaucuuu

SEQ ID NO: 30724 - RNA, 22 nt, Human
uugacauuuugucauauugaca

SEQ ID NO: 30725 - RNA, 22 nt, Human
uugacccaguuguaaaagagcu

SEQ ID NO: 30726 - RNA, 22 nt, Human
uugaccugggcacagugagcau

SEQ ID NO: 30727 - RNA, 22 nt, Human
uucccuuucuuaaagaguuagg

SEQ ID NO: 30728 - RNA, 22 nt, Human
uuccgagucuccaagggguugu

SEQ ID NO: 30729 - RNA, 22 nt, Human
uuccgcuggggccgccuggcgg

SEQ ID NO: 30730 - RNA, 22 nt, Human
uuccggacgcccgucuuccagc

SEQ ID NO: 30731 - RNA, 22 nt, Human
uuccggggauaguguuucccau

SEQ ID NO: 30732 - RNA, 22 nt, Human
uuccuaacaagggguauucauc

SEQ ID NO: 30733 - RNA, 22 nt, Human
uuccuaacacaguguaagcaag

SEQ ID NO: 30734 - RNA, 22 nt, Human
uuccuaacgccaguauuuucau

SEQ ID NO: 30735 - RNA, 22 nt, Human
uuccuaacuggccuuuauggau

SEQ ID NO: 30736 - RNA, 22 nt, Human
uuccuacauuugccucacuccc

SEQ ID NO: 30737 - RNA, 22 nt, Human
uuccuagaaugguuagaaaaua

SEQ ID NO: 30738 - RNA, 22 nt, Human
uuccuaggauggugaagcagga

SEQ ID NO: 30739 - RNA, 19 nt, Human
uuccuaguagacugugugu

SEQ ID NO: 30740 - RNA, 22 nt, Human
uuccuaugugggcagagacaca

SEQ ID NO: 30741 - RNA, 22 nt, Human
uuccuauuuccaugaaacacaa

SEQ ID NO: 30742 - RNA, 22 nt, Human
uuccucagacccucauugugag

SEQ ID NO: 30743 - RNA, 22 nt, Human
uuccucagcuggccugauuggg

SEQ ID NO: 30744 - RNA, 22 nt, Human
uuccucagcuuuagacuaugaa

SEQ ID NO: 30745 - RNA, 22 nt, Human
uuccucaugggguuccuucaga

SEQ ID NO: 30746 - RNA, 22 nt, Human
uuccuccagaagcuguagggga

SEQ ID NO: 30747 - RNA, 22 nt, Human
uuccuccuuguccuaguuacug

SEQ ID NO: 30748 - RNA, 22 nt, Human
uuccucucaacaugccugccgg

SEQ ID NO: 30749 - RNA, 22 nt, Human
uuccucucucuugccagaaugu

SEQ ID NO: 30750 - RNA, 21 nt, Human
uuccucugcaacugaugcuca

SEQ ID NO: 30751 - RNA, 22 nt, Human
uuccucuguaguugcugaugaa

SEQ ID NO: 30752 - RNA, 22 nt, Human
uuccucuuauauagccuuggcc

SEQ ID NO: 30753 - RNA, 22 nt, Human
uuccucuuuagggcuggccagg

SEQ ID NO: 30754 - RNA, 22 nt, Human
uuccugaaugcuguugugcugu

SEQ ID NO: 30755 - RNA, 22 nt, Human
uuccugaauugagcuuuagaaa

SEQ ID NO: 30756 - RNA, 22 nt, Human
uuccugagaaauuuguaccugg

SEQ ID NO: 30757 - RNA, 22 nt, Human
uuccugagacccucacagugau

SEQ ID NO: 30758 - RNA, 22 nt, Human
uuccugagcaccagacacugca

SEQ ID NO: 30759 - RNA, 22 nt, Human
uuccugaggaggaccaggacca

SEQ ID NO: 30760 - RNA, 22 nt, Human
uuccugaggcucaucggagucg

SEQ ID NO: 30761 - RNA, 22 nt, Human
uuccugagggacuuuugagauu

SEQ ID NO: 30762 - RNA, 22 nt, Human
uuccugagggccccagaggagg

SEQ ID NO: 30763 - RNA, 22 nt, Human
uuccugauagaacacuuuccaa

SEQ ID NO: 30764 - RNA, 22 nt, Human
uuccugaucccccaggacaaag

SEQ ID NO: 30765 - RNA, 22 nt, Human
uuccugaugcacacagucauuu

SEQ ID NO: 30766 - RNA, 22 nt, Human
uuccugcaggccauagagccug

SEQ ID NO: 30767 - RNA, 22 nt, Human
uuccuggcacccuggacccggc

SEQ ID NO: 30768 - RNA, 22 nt, Human
uuccuggcaugaaaaauaucac

SEQ ID NO: 30769 - RNA, 22 nt, Human
uuccuggccagcuguggugagu

SEQ ID NO: 30770 - RNA, 22 nt, Human
uuccuggccccauccaucuuca

SEQ ID NO: 30771 - RNA, 22 nt, Human
uuccuggccucuuccaccacca

SEQ ID NO: 30772 - RNA, 22 nt, Human
uuccuggcucacagcagugggg

SEQ ID NO: 30773 - RNA, 22 nt, Human
uuccuggcuucauacuuuguac

SEQ ID NO: 30774 - RNA, 22 nt, Human
uuccugggacuggagcagccca

SEQ ID NO: 30775 - RNA, 22 nt, Human
uuccugggagcuagccacaucu

SEQ ID NO: 30776 - RNA, 20 nt, Human
uuccuggggaaugauagaag

SEQ ID NO: 30777 - RNA, 21 nt, Human
uuccuggggacuuccguggga

SEQ ID NO: 30778 - RNA, 22 nt, Human
uuccugggguacuggagaaaau

SEQ ID NO: 30779 - RNA, 22 nt, Human
uuccugguaaauuauguccagg

SEQ ID NO: 30780 - RNA, 22 nt, Human
uuccuggugaccucacugguag

SEQ ID NO: 30781 - RNA, 22 nt, Human
uuccuggugagauuucguucug

SEQ ID NO: 30782 - RNA, 22 nt, Human
uuccuggugguggugacagcac

SEQ ID NO: 30783 - RNA, 22 nt, Human
uuccuguauuuugcgaauuuuc

SEQ ID NO: 30784 - RNA, 22 nt, Human
uuccuguccgcaauggccuggg

SEQ ID NO: 30785 - RNA, 22 nt, Human
uuccuguggcugucacuccugg

SEQ ID NO: 30786 - RNA, 17 nt, Human
uuccugugguuugaucu

SEQ ID NO: 30787 - RNA, 22 nt, Human
uuccuguguccuauuucgacuu

SEQ ID NO: 30788 - RNA, 22 nt, Human
uuccuguuagccauuauuagcu

SEQ ID NO: 30789 - RNA, 22 nt, Human
uuccuuagugacuucuagcuac

SEQ ID NO: 30790 - RNA, 22 nt, Human
uuccuucagcaaguccugagca

SEQ ID NO: 30791 - RNA, 22 nt, Human
uuccuucaguucagggaacccu

SEQ ID NO: 30792 - RNA, 22 nt, Human
uuccuuccacuucaggauuuug

SEQ ID NO: 30793 - RNA, 22 nt, Human
uuccuuccucuuucacaacagc

SEQ ID NO: 30794 - RNA, 22 nt, Human
uuccuucuagcccaaguauugg

SEQ ID NO: 30795 - RNA, 22 nt, Human
uuccuucuauucagcuccaaga

SEQ ID NO: 30796 - RNA, 22 nt, Human
uuccuucuuccagaggcugccc

SEQ ID NO: 30797 - RNA, 22 nt, Human
uuccuugagaaaggcacaaguu

SEQ ID NO: 30798 - RNA, 22 nt, Human
uuccuuggagucaaacagggag

SEQ ID NO: 30799 - RNA, 20 nt, Human
uuccuuggauugugucuuga

SEQ ID NO: 30800 - RNA, 22 nt, Human
uuccuugggaaaugcucguuua

SEQ ID NO: 30801 - RNA, 22 nt, Human
uuccuuggguucugauguguuu

SEQ ID NO: 30802 - RNA, 22 nt, Human
uuccuugguagagagaauauuu

SEQ ID NO: 30803 - RNA, 22 nt, Human
uuccuuggugcgccugcugcag

SEQ ID NO: 30804 - RNA, 22 nt, Human
uuccuugguguaacugcuccua

SEQ ID NO: 30805 - RNA, 22 nt, Human
uuccuuguaagaccuauuuuug

SEQ ID NO: 30806 - RNA, 22 nt, Human
uuccuuguggaaacuauggacg

SEQ ID NO: 30807 - RNA, 22 nt, Human
uuccuuucccuugcuucugugc

SEQ ID NO: 30808 - RNA, 22 nt, Human
uuccuuucugucagccugagug

SEQ ID NO: 30809 - RNA, 22 nt, Human
uuccuuuucuuaaacauaugug

SEQ ID NO: 30810 - RNA, 22 nt, Human
uuccuuuucuuaugcaucauua

SEQ ID NO: 30811 - RNA, 22 nt, Human
uucgacucugugccugaagagc

SEQ ID NO: 30812 - RNA, 22 nt, Human
uucgcuuugcccguugucauuu

SEQ ID NO: 30813 - RNA, 22 nt, Human
uucggcauauuaauggugggug

SEQ ID NO: 30814 - RNA, 22 nt, Human
uucggcuuggguauuucucagg

SEQ ID NO: 30815 - RNA, 22 nt, Human
uucggcuuuccaguuugucucg

SEQ ID NO: 30816 - RNA, 22 nt, Human
uucguauuuauauucucaauac

SEQ ID NO: 30817 - RNA, 18 nt, Human
uucuaaauucuguuuuua

SEQ ID NO: 30818 - RNA, 22 nt, Human
uucuaaauuuuggaagaugcag

SEQ ID NO: 30819 - RNA, 20 nt, Human
uucuaacuacucucccuuug

SEQ ID NO: 30820 - RNA, 22 nt, Human
uucuaacucuguuauguguuuc

SEQ ID NO: 30821 - RNA, 21 nt, Human
uucuaacugggugggccuuga

SEQ ID NO: 30822 - RNA, 22 nt, Human
uucuaacuuaacacuccuguga

SEQ ID NO: 30823 - RNA, 22 nt, Human
uucuaagaaugcuuugcaaaau

SEQ ID NO: 30824 - RNA, 22 nt, Human
uucuaagagaguacaagcaauu

SEQ ID NO: 30825 - RNA, 22 nt, Human
uucuaagcucugaaauaaaucu

SEQ ID NO: 30826 - RNA, 22 nt, Human
uucuaagucacucagauuuugg

SEQ ID NO: 30827 - RNA, 21 nt, Human
uucuaaguguuaccuuuucuu

SEQ ID NO: 30828 - RNA, 22 nt, Human
uucuaaguuucucaguuucagu

SEQ ID NO: 30829 - RNA, 22 nt, Human
uucuaauacacgguaugacuuu

SEQ ID NO: 30830 - RNA, 22 nt, Human
uucuaauccugacucagcugcu

SEQ ID NO: 30831 - RNA, 22 nt, Human
uugcaaaucuuugccagaaggc

SEQ ID NO: 30832 - RNA, 22 nt, Human
uugcaaaugaccauugccacau

SEQ ID NO: 30833 - RNA, 22 nt, Human
uugcaaaugggcaaagcagauc

SEQ ID NO: 30834 - RNA, 22 nt, Human
uugcaaaugugaauaauuacac

SEQ ID NO: 30835 - RNA, 22 nt, Human
uugcaaauuauuuuagucccuu

SEQ ID NO: 30836 - RNA, 22 nt, Human
uugcaaauuccaauccaauauu

SEQ ID NO: 30837 - RNA, 22 nt, Human
uugcaaauucgucacuguuaaa

SEQ ID NO: 30838 - RNA, 22 nt, Human
uugcaacacaaaguuugauucc

SEQ ID NO: 30839 - RNA, 22 nt, Human
uugcaagacacuuggaagcaca

SEQ ID NO: 30840 - RNA, 20 nt, Human
uugcaagcuuucaagauagc

SEQ ID NO: 30841 - RNA, 22 nt, Human
uugcaagggauaccauacuaag

SEQ ID NO: 30842 - RNA, 23 nt, Human
uuuauucucagauacauaggucu

SEQ ID NO: 30843 - RNA, 22 nt, Human
uuuauucucuaguuggucagau

SEQ ID NO: 30844 - RNA, 22 nt, Human
uuuauugaauuguaacccuauu

SEQ ID NO: 30845 - RNA, 22 nt, Human
uuuauugacccaaagcgagagu

SEQ ID NO: 30846 - RNA, 22 nt, Human
uuuauugacuucagugagucuu

SEQ ID NO: 30847 - RNA, 22 nt, Human
uuuauugcuggccaccuguagc

SEQ ID NO: 30848 - RNA, 22 nt, Human
uuuauugcuguguuagggacag

SEQ ID NO: 30849 - RNA, 22 nt, Human
uuuauugucaaucuauucccag

SEQ ID NO: 30850 - RNA, 22 nt, Human
uuuauuguugggucuuaagcug

SEQ ID NO: 30851 - RNA, 22 nt, Human
uuuauuguuuagaagggggcug

SEQ ID NO: 30852 - RNA, 21 nt, Human
uuuauuuauauaggacacaug

SEQ ID NO: 30853 - RNA, 22 nt, Human
uuuauuuauccuucuggauugc

SEQ ID NO: 30854 - RNA, 22 nt, Human
uuuauuucacucuccggauacu

SEQ ID NO: 30855 - RNA, 22 nt, Human
uuuauuuggcauccagggagaa

SEQ ID NO: 30856 - RNA, 15 nt, Human
uuucaaaaugaggcc

SEQ ID NO: 30857 - RNA, 22 nt, Human
uuucaaacauaucuucauuacu

SEQ ID NO: 30858 - RNA, 22 nt, Human
uuucaaacauuccugggagacu

SEQ ID NO: 30859 - RNA, 22 nt, Human
uuucaaagagaggcagaaggaa

SEQ ID NO: 30860 - RNA, 22 nt, Human
uuucaaagcaacugaaaaggaa

SEQ ID NO: 30861 - RNA, 20 nt, Human
uuucaaaggcaccuaugaag

SEQ ID NO: 30862 - RNA, 22 nt, Human
uuucaaagucaagaaggauacu

SEQ ID NO: 30863 - RNA, 22 nt, Human
uuucaaagucaauaucauuacc

SEQ ID NO: 30864 - RNA, 22 nt, Human
uuucaaauaccauaaaccuaau

SEQ ID NO: 30865 - RNA, 22 nt, Human
uuucaaaugcaugucuuuccuc

SEQ ID NO: 30866 - RNA, 22 nt, Human
uuucaacguguaaucuuauuua

SEQ ID NO: 30867 - RNA, 22 nt, Human
uuucaacuagccccuaaguccu

SEQ ID NO: 30868 - RNA, 22 nt, Human
uuucaagaacagcagcauucca

SEQ ID NO: 30869 - RNA, 22 nt, Human
uuucaagagggaacugaacaca

SEQ ID NO: 30870 - RNA, 22 nt, Human
uuucaagcagcgugaaaaacga

SEQ ID NO: 30871 - RNA, 22 nt, Human
uuucaagcauaacugggaagag

SEQ ID NO: 30872 - RNA, 22 nt, Human
uuucaaggauguuauauaaaug

SEQ ID NO: 30873 - RNA, 22 nt, Human
uuucaaggccuucugguucagu

SEQ ID NO: 30874 - RNA, 22 nt, Human
uuucaaggcuaguuuuaauuag

SEQ ID NO: 30875 - RNA, 22 nt, Human
uuucaagggaauaugaaauuca

SEQ ID NO: 30876 - RNA, 23 nt, Human
uuucaaggugucuguaccacuga

SEQ ID NO: 30877 - RNA, 22 nt, Human
uuucaagucauucuauaauauc

SEQ ID NO: 30878 - RNA, 22 nt, Human
uuucaaguguccugauuaaugg

SEQ ID NO: 30879 - RNA, 20 nt, Human
uuucaaguuguaagguauca

SEQ ID NO: 30880 - RNA, 22 nt, Human
uuucaaguuuaguguguucaaa

SEQ ID NO: 30881 - RNA, 22 nt, Human
uuucaauaacaaagcucauuuu

SEQ ID NO: 30882 - RNA, 22 nt, Human
uuucaaucaccauaaagcaacu

SEQ ID NO: 30883 - RNA, 19 nt, Human
uuucaauggcuuagagaaa

SEQ ID NO: 30884 - RNA, 22 nt, Human
uuucaauguaacauuuccaggc

SEQ ID NO: 30885 - RNA, 22 nt, Human
uuucacaaaugucuuuaacuug

SEQ ID NO: 30886 - RNA, 22 nt, Human
uuucacaacguuguggugagag

SEQ ID NO: 30887 - RNA, 22 nt, Human
uuucacaagacagcuacuguug

SEQ ID NO: 30888 - RNA, 22 nt, Human
uuucacaaucaaauggugaaau

SEQ ID NO: 30889 - RNA, 22 nt, Human
uuucacacaacgugaauauacu

SEQ ID NO: 30890 - RNA, 22 nt, Human
uuucacagaaaggauaacauua

SEQ ID NO: 30891 - RNA, 23 nt, Human
uuucacagaaggauuguagggcc

SEQ ID NO: 30892 - RNA, 22 nt, Human
uuucacagagaaauauaacagg

SEQ ID NO: 30893 - RNA, 22 nt, Human
uuucacagaggaggaagcugag

SEQ ID NO: 30894 - RNA, 22 nt, Human
uuucacagauguuuuggagucu

SEQ ID NO: 30895 - RNA, 22 nt, Human
uuucacagcaacacugucugca

SEQ ID NO: 30896 - RNA, 22 nt, Human
uuucacagcauauagguguacu

SEQ ID NO: 30897 - RNA, 22 nt, Human
uuucacagcgucuuucucuugc

SEQ ID NO: 30898 - RNA, 23 nt, Human
uuucacagcuuuuauucugcauc

SEQ ID NO: 30899 - RNA, 22 nt, Human
uuucacaggauucugauguagu

SEQ ID NO: 30900 - RNA, 22 nt, Human
uuucacagguacaaacacuccu

SEQ ID NO: 30901 - RNA, 22 nt, Human
uuucacauauaggggaagcuac

SEQ ID NO: 30902 - RNA, 22 nt, Human
uuucacaucaugggauggaagc

SEQ ID NO: 30903 - RNA, 22 nt, Human
uuucacaugcagcagggaagug

SEQ ID NO: 30904 - RNA, 22 nt, Human
uuucacauggaagcucucgaga

SEQ ID NO: 30905 - RNA, 22 nt, Human
uuucacauucucugguuaucga

SEQ ID NO: 30906 - RNA, 22 nt, Human
uuucacauucuucugaaucuac

SEQ ID NO: 30907 - RNA, 22 nt, Human
uuucacauuuaggcgugaauug

SEQ ID NO: 30908 - RNA, 22 nt, Human
uuucacauuuguuuuaagaagu

SEQ ID NO: 30909 - RNA, 20 nt, Human
uuucacuguggugcuggaga

SEQ ID NO: 30910 - RNA, 22 nt, Human
uuucacuguguuggucaggccg

SEQ ID NO: 30911 - RNA, 22 nt, Human
uuucagaaacgauuaugaacac

SEQ ID NO: 30912 - RNA, 22 nt, Human
uuucagaaaucaaaaccagggu

SEQ ID NO: 30913 - RNA, 22 nt, Human
uuucagaaauuguuauuauucu

SEQ ID NO: 30914 - RNA, 22 nt, Human
uuucagaaccaagagagacauc

SEQ ID NO: 30915 - RNA, 22 nt, Human
uuucagaaccgcuaaaauaaau

SEQ ID NO: 30916 - RNA, 22 nt, Human
uuucagaauagcaaagcaagcu

SEQ ID NO: 30917 - RNA, 22 nt, Human
uuucagacaggcucagagccgu

SEQ ID NO: 30918 - RNA, 21 nt, Human
uuucagaccuaucuuugaagg

SEQ ID NO: 30919 - RNA, 22 nt, Human
uuucagaccugcugugcuaucu

SEQ ID NO: 30920 - RNA, 22 nt, Human
uuucagagaaagcccaaagacu

SEQ ID NO: 30921 - RNA, 22 nt, Human
uuucagagaacugaguccuugc

SEQ ID NO: 30922 - RNA, 22 nt, Human
uuucagaggagagcuggaccaa

SEQ ID NO: 30923 - RNA, 22 nt, Human
uuucagaggugcuuggaaugcu

SEQ ID NO: 30924 - RNA, 20 nt, Human
uuucagagugucuuuccauu

SEQ ID NO: 30925 - RNA, 22 nt, Human
uuucagaguuaguagagcaugu

SEQ ID NO: 30926 - RNA, 22 nt, Human
uuucagaguugucuucuugacc

SEQ ID NO: 30927 - RNA, 22 nt, Human
uuucagaugaaauguguauauu

SEQ ID NO: 30928 - RNA, 22 nt, Human
uuucagauuaucucaacuuugg

SEQ ID NO: 30929 - RNA, 23 nt, Human
uuucagcauucuaguucagguuc

SEQ ID NO: 30930 - RNA, 22 nt, Human
uuucaggaaacauuuaauggca

SEQ ID NO: 30931 - RNA, 22 nt, Human
uuucaggacaccuuuaaaaacg

SEQ ID NO: 30932 - RNA, 22 nt, Human
uuucaggauuaguuuaagcagg

SEQ ID NO: 30933 - RNA, 22 nt, Human
uuucaggcagguggaaugagua

SEQ ID NO: 30934 - RNA, 22 nt, Human
uuucagggagccuagaagagcu

SEQ ID NO: 30935 - RNA, 22 nt, Human
uuucagguaagaaaacuaagaa

SEQ ID NO: 30936 - RNA, 20 nt, Human
uuucagugguuugugccuag

SEQ ID NO: 30937 - RNA, 21 nt, Human
uuucaguguaugacagugaaa

SEQ ID NO: 30938 - RNA, 22 nt, Human
uuucagugucaguaaugcagca

SEQ ID NO: 30939 - RNA, 22 nt, Human
uuucaguucaccugggaacccg

SEQ ID NO: 30940 - RNA, 22 nt, Human
uuuguaugggcagaaauuagau

SEQ ID NO: 30941 - RNA, 22 nt, Human
uuuguauuccauaucaugccau

SEQ ID NO: 30942 - RNA, 22 nt, Human
uuugucaaucccuugaaaaccu

SEQ ID NO: 30943 - RNA, 22 nt, Human
uuugucaggaauugaaaaguuu

SEQ ID NO: 30944 - RNA, 22 nt, Human
uuugucagggaucagaucggua

SEQ ID NO: 30945 - RNA, 22 nt, Human
uuugucagucaugucugcuuuu

SEQ ID NO: 30946 - RNA, 22 nt, Human
uuugucauaacucugcugcaag

SEQ ID NO: 30947 - RNA, 22 nt, Human
uuugucauauugaaggugcuua

SEQ ID NO: 30948 - RNA, 22 nt, Human
uuugucaucaguuauuaauaug

SEQ ID NO: 30949 - RNA, 22 nt, Human
uuugucauucuguguauuuaaa

SEQ ID NO: 30950 - RNA, 18 nt, Human
uuuguccuguggcagcug

SEQ ID NO: 30951 - RNA, 22 nt, Human
uuugucuugaggcuggggaagu

SEQ ID NO: 30952 - RNA, 22 nt, Human
uuugugaacacugcgcagaacu

SEQ ID NO: 30953 - RNA, 22 nt, Human
uuugugaagggaacagaagugu

SEQ ID NO: 30954 - RNA, 22 nt, Human
uuugugacuugcuucucagaau

SEQ ID NO: 30955 - RNA, 22 nt, Human
uuugugaucuccucccucuaga

SEQ ID NO: 30956 - RNA, 22 nt, Human
uuugugcacuucuguagcugcc

SEQ ID NO: 30957 - RNA, 22 nt, Human
uuugugcagugguuaagaccau

SEQ ID NO: 30958 - RNA, 22 nt, Human
uuuguggaacucucuucuugca

SEQ ID NO: 30959 - RNA, 22 nt, Human
uuugugugaaaauauuuaaguu

SEQ ID NO: 30960 - RNA, 22 nt, Human
uuugugugcaacgcauggaguc

SEQ ID NO: 30961 - RNA, 22 nt, Human
uuuguguggauggaaggcagua

SEQ ID NO: 30962 - RNA, 22 nt, Human
uuugugugggggaaacaaggua

SEQ ID NO: 30963 - RNA, 22 nt, Human
uuuguguuaaauguuaaauuca

SEQ ID NO: 30964 - RNA, 22 nt, Human
uuuguuaauucuuauguuagag

SEQ ID NO: 30965 - RNA, 22 nt, Human
uuuguucaaggaauaguaaaug

SEQ ID NO: 30966 - RNA, 22 nt, Human
uuuguucacaugucauguacaa

SEQ ID NO: 30967 - RNA, 22 nt, Human
uuuguucauuuugagcucauca

SEQ ID NO: 30968 - RNA, 22 nt, Human
uuuguucugaaaacucaagucc

SEQ ID NO: 30969 - RNA, 22 nt, Human
uuuguugaguuacagagaugaa

SEQ ID NO: 30970 - RNA, 22 nt, Human
uuuguugugaacagaauaauau

SEQ ID NO: 30971 - RNA, 22 nt, Human
uuuguuugaaagucucuacagc

SEQ ID NO: 30972 - RNA, 22 nt, Human
uuuguuuugaacuagcucagaa

SEQ ID NO: 30973 - RNA, 22 nt, Human
uugucuguaaagacggccacca

SEQ ID NO: 30974 - RNA, 22 nt, Human
uugucuuagagugaaaacuuua

SEQ ID NO: 30975 - RNA, 22 nt, Human
uugucuuuggaaauuuaauguu

SEQ ID NO: 30976 - RNA, 22 nt, Human
uugugaaacauucauggauuug

SEQ ID NO: 30977 - RNA, 21 nt, Human
uugugaaaguccaggaacaac

SEQ ID NO: 30978 - RNA, 18 nt, Human
uugugaaauauuggaguc

SEQ ID NO: 30979 - RNA, 22 nt, Human
uugugaaauguuucaaaauagu

SEQ ID NO: 30980 - RNA, 22 nt, Human
uugugaauagugccacaauaaa

SEQ ID NO: 30981 - RNA, 22 nt, Human
uugugacauugauuaaacuaug

SEQ ID NO: 30982 - RNA, 19 nt, Human
uugugacuggcucugcaua

SEQ ID NO: 30983 - RNA, 22 nt, Human
uugugagcauuuuggugagcuu

SEQ ID NO: 30984 - RNA, 22 nt, Human
uugugaguagugccgcaauaaa

SEQ ID NO: 30985 - RNA, 22 nt, Human
uugugaucuguguugauggccu

SEQ ID NO: 30986 - RNA, 22 nt, Human
uugugcaagaauuggaaagcaa

SEQ ID NO: 30987 - RNA, 22 nt, Human
uugugcaaggcucuuggaaugu

SEQ ID NO: 30988 - RNA, 22 nt, Human
uugugcaauccccucauuuuau

SEQ ID NO: 30989 - RNA, 22 nt, Human
uugugcaauuuaaaaucuuccu

SEQ ID NO: 30990 - RNA, 22 nt, Human
uugugcagcuauaaagaaaugg

SEQ ID NO: 30991 - RNA, 22 nt, Human
uugugcauauagaguuagaugg

SEQ ID NO: 30992 - RNA, 22 nt, Human
uugugccaugaacuguaugaag

SEQ ID NO: 30993 - RNA, 22 nt, Human
uugugcucuaaggucagggcga

SEQ ID NO: 30994 - RNA, 22 nt, Human
uugugcugcugacuuaagauau

SEQ ID NO: 30995 - RNA, 22 nt, Human
uuguggcucaucuucagcuccc

SEQ ID NO: 30996 - RNA, 22 nt, Human
uugugggaucucccuguugcuc

SEQ ID NO: 30997 - RNA, 23 nt, Human
uugugggcagauuccauggggag

SEQ ID NO: 30998 - RNA, 22 nt, Human
uugugguuaaccgcacauuuuu

SEQ ID NO: 30999 - RNA, 22 nt, Human
uuguguaaaugucugucuuucu

SEQ ID NO: 31000 - RNA, 22 nt, Human
uuguguacuacaguaugccaca

SEQ ID NO: 31001 - RNA, 22 nt, Human
uuguguacuguugguugauauu

SEQ ID NO: 31002 - RNA, 20 nt, Human
uuguguaggucuaaugcaua

SEQ ID NO: 31003 - RNA, 22 nt, Human
uugugucaggggcccauacuca

SEQ ID NO: 31004 - RNA, 22 nt, Human
uugugucauguuccauugaaaa

SEQ ID NO: 31005 - RNA, 22 nt, Human
uuguguccauuugagucaugug

SEQ ID NO: 31006 - RNA, 22 nt, Human
uuguguccuauaugcauguucu

SEQ ID NO: 31007 - RNA, 22 nt, Human
uuguguccugauuugacacaau

SEQ ID NO: 31008 - RNA, 22 nt, Human
uugugucuaaauaaggagaccu

SEQ ID NO: 31009 - RNA, 22 nt, Human
uugugugcauaaauucugaugu

SEQ ID NO: 31010 - RNA, 22 nt, Human
uuguguguacugguuaugggca

SEQ ID NO: 31011 - RNA, 21 nt, Human
uuguguuuccccagucacuuu

SEQ ID NO: 31012 - RNA, 22 nt, Human
uuguuaaaaauagauuuccagg

SEQ ID NO: 31013 - RNA, 22 nt, Human
uuguuaaaaugaggucauucug

SEQ ID NO: 31014 - RNA, 22 nt, Human
uuguuaaaauuggagccgagag

SEQ ID NO: 31015 - RNA, 22 nt, Human
uuguuaaagaugcagauuccau

SEQ ID NO: 31016 - RNA, 22 nt, Human
uuguuaacggaaaacuguuuuc

SEQ ID NO: 31017 - RNA, 22 nt, Human
uuguuacagcagcaauagaaaa

SEQ ID NO: 31018 - RNA, 22 nt, Human
uuguuacauggacaacuguaug

SEQ ID NO: 31019 - RNA, 22 nt, Human
uuguuacuaagccuuuaaauag

SEQ ID NO: 31020 - RNA, 22 nt, Human
uuguuacuguucuacauacagu

SEQ ID NO: 31021 - RNA, 22 nt, Human
uuguuagauauuucuuagaaga

SEQ ID NO: 31022 - RNA, 22 nt, Human
uuguuagugcaauguuugguga

SEQ ID NO: 31023 - RNA, 22 nt, Human
uuguuauaaagacuaaauaugu

SEQ ID NO: 31024 - RNA, 22 nt, Human
uuguuaucaaugaaucaaaacu

SEQ ID NO: 31025 - RNA, 22 nt, Human
uuguucauccaacacaagguug

SEQ ID NO: 31026 - RNA, 19 nt, Human
uuguucguuccugacaggc

SEQ ID NO: 31027 - RNA, 22 nt, Human
uuguucuagccuccuguuuuga

SEQ ID NO: 31028 - RNA, 22 nt, Human
uuguucuauggugaggcagcca

SEQ ID NO: 31029 - RNA, 21 nt, Human
uuguucuuccagaagcaaagu

SEQ ID NO: 31030 - RNA, 22 nt, Human
uuguucuugccaagacaugaag

SEQ ID NO: 31031 - RNA, 20 nt, Human
uuguugagcucuucaaagaa

SEQ ID NO: 31032 - RNA, 22 nt, Human
uuguugcugcucaaccucuaua

SEQ ID NO: 31033 - RNA, 22 nt, Human
uuguuggaaaugagaggcuagg

SEQ ID NO: 31034 - RNA, 22 nt, Human
uuguugggcaugcaguggcugu

SEQ ID NO: 31035 - RNA, 22 nt, Human
uuguugucauuguagaggauuu

SEQ ID NO: 31036 - RNA, 22 nt, Human
uuguuuaauccuuguacccaug

SEQ ID NO: 31037 - RNA, 22 nt, Human
uuguuuacacugcagaauuggg

SEQ ID NO: 31038 - RNA, 22 nt, Human
uuguuuauguguugucuauggc

SEQ ID NO: 31039 - RNA, 22 nt, Human
uuguuuccauaauuaaguguga

SEQ ID NO: 31040 - RNA, 21 nt, Human
uuguuuccucccaaaaugcca

SEQ ID NO: 31041 - RNA, 22 nt, Human
uuguuucugaguuuucauguau

SEQ ID NO: 31042 - RNA, 22 nt, Human
uuguuucuucaggcuuuuagga

SEQ ID NO: 31043 - RNA, 22 nt, Human
uuguuucuuugaaguuucuaga

SEQ ID NO: 31044 - RNA, 23 nt, Human
uuguuucuuuguauugucucuau

SEQ ID NO: 31045 - RNA, 22 nt, Human
uuguuugucauaauaucauuac

SEQ ID NO: 31046 - RNA, 22 nt, Human
uuguuugugcuauuuaauguag

SEQ ID NO: 31047 - RNA, 20 nt, Human
uuguuuuaaauccuggauga

SEQ ID NO: 31048 - RNA, 22 nt, Human
uuguuuucacagcuuugcccgg

SEQ ID NO: 31049 - RNA, 21 nt, Human
uugcugcccucccuuuccuca

SEQ ID NO: 31050 - RNA, 22 nt, Human
uugcugccugaggagcaacacu

SEQ ID NO: 31051 - RNA, 20 nt, Human
uugcugggaccuuuuucaac

SEQ ID NO: 31052 - RNA, 22 nt, Human
uugcugggcucuucaacacaca

SEQ ID NO: 31053 - RNA, 22 nt, Human
uugcuguaccaaagauuccuga

SEQ ID NO: 31054 - RNA, 22 nt, Human
uugcuguuuaaugaugucuuau

SEQ ID NO: 31055 - RNA, 22 nt, Human
uugcuuaauucugaaaauauag

SEQ ID NO: 31056 - RNA, 22 nt, Human
uugcuuagcgacuccccuuccu

SEQ ID NO: 31057 - RNA, 21 nt, Human
uugcuuauggcacugcuuugc

SEQ ID NO: 31058 - RNA, 22 nt, Human
uugcuuauuugauuaaaugucu

SEQ ID NO: 31059 - RNA, 22 nt, Human
uugcuucagucagugcugccca

SEQ ID NO: 31060 - RNA, 22 nt, Human
uugcuucauuaaguucucacag

SEQ ID NO: 31061 - RNA, 22 nt, Human
uugcuucccccuguucuaguuc

SEQ ID NO: 31062 - RNA, 22 nt, Human
uugcuuccuccuagccacuugc

SEQ ID NO: 31063 - RNA, 22 nt, Human
uugcuugcagacuuagcaaauu

SEQ ID NO: 31064 - RNA, 22 nt, Human
uugcuuuaacuaguaaaugggg

SEQ ID NO: 31065 - RNA, 22 nt, Human
uugcuuuacauguucugguaaa

SEQ ID NO: 31066 - RNA, 22 nt, Human
uugcuuuacggcaaggccccag

SEQ ID NO: 31067 - RNA, 22 nt, Human
uugcuuuagaaucugcuucugg

SEQ ID NO: 31068 - RNA, 22 nt, Human
uugcuuuaggauuuaaguggca

SEQ ID NO: 31069 - RNA, 20 nt, Human
uugcuuuaucagacaugaua

SEQ ID NO: 31070 - RNA, 22 nt, Human
uugcuuuauucacaucuauauu

SEQ ID NO: 31071 - RNA, 22 nt, Human
uugcuuuauuuggcaugccacu

SEQ ID NO: 31072 - RNA, 22 nt, Human
uugcuuucccaaggcagaacau

SEQ ID NO: 31073 - RNA, 22 nt, Human
uugcuuugccaccagaagucua

SEQ ID NO: 31074 - RNA, 22 nt, Human
uugcuuugguagcagcuauaga

SEQ ID NO: 31075 - RNA, 22 nt, Human
uugcuuuguggugguucuucca

SEQ ID NO: 31076 - RNA, 22 nt, Human
uugcuuuuuaauuaggaggcag

SEQ ID NO: 31077 - RNA, 22 nt, Human
uuggaaaaauugccugaugucu

SEQ ID NO: 31078 - RNA, 22 nt, Human
uuggaaaacuuacacagagcug

SEQ ID NO: 31079 - RNA, 22 nt, Human
uuggaaaagugaaacuagaugc

SEQ ID NO: 31080 - RNA, 22 nt, Human
uuggaaaauguauuucuagaag

SEQ ID NO: 31081 - RNA, 22 nt, Human
uuggaaagaagggcugagcaag

SEQ ID NO: 31082 - RNA, 22 nt, Human
uuggaaagcaagcuggacauac

SEQ ID NO: 31083 - RNA, 22 nt, Human
uuggaaagggauaucuguacuu

SEQ ID NO: 31084 - RNA, 22 nt, Human
uuggaaagucucacccaguuga

SEQ ID NO: 31085 - RNA, 22 nt, Human
uuggaaaugcaaauauauugaa

SEQ ID NO: 31086 - RNA, 22 nt, Human
uuuacaacguuccuggugcuaa

SEQ ID NO: 31087 - RNA, 22 nt, Human
uuuacaacuuucuguucuguau

SEQ ID NO: 31088 - RNA, 22 nt, Human
uuuacaaguacaccuaacagcu

SEQ ID NO: 31089 - RNA, 19 nt, Human
uuuacaaguucuuuguaug

SEQ ID NO: 31090 - RNA, 22 nt, Human
uuuacacaaaauguuaguagau

SEQ ID NO: 31091 - RNA, 22 nt, Human
uuuacacggcauuaucuucaug

SEQ ID NO: 31092 - RNA, 22 nt, Human
uuuacacuccuggaaaugauau

SEQ ID NO: 31093 - RNA, 22 nt, Human
uuuacacugugaaacagguauc

SEQ ID NO: 31094 - RNA, 22 nt, Human
uuuacacuuauuaugaagcuuu

SEQ ID NO: 31095 - RNA, 22 nt, Human
uuuacagaucuguugauuuguu

SEQ ID NO: 31096 - RNA, 22 nt, Human
uuuacagaugaggauacugagg

SEQ ID NO: 31097 - RNA, 22 nt, Human
uuuacagauguggaaagugagc

SEQ ID NO: 31098 - RNA, 22 nt, Human
uuuacagcagcaugauuuauaa

SEQ ID NO: 31099 - RNA, 22 nt, Human
uuuacaguauaguaggacucau

SEQ ID NO: 31100 - RNA, 22 nt, Human
uuuacagugagagcuuagugag

SEQ ID NO: 31101 - RNA, 22 nt, Human
uuuacaucucaccagauucaua

SEQ ID NO: 31102 - RNA, 22 nt, Human
uuuacauguccuucaagagcag

SEQ ID NO: 31103 - RNA, 22 nt, Human
uuuaccaaaugagacuauuguu

SEQ ID NO: 31104 - RNA, 22 nt, Human
uuuaccaagauagcaucugguu

SEQ ID NO: 31105 - RNA, 22 nt, Human
uuuaccacaauuuuaaacaaug

SEQ ID NO: 31106 - RNA, 22 nt, Human
uuuaccaguguuaaacaccagc

SEQ ID NO: 31107 - RNA, 22 nt, Human
uuuaccauuauuaaaauuaagu

SEQ ID NO: 31108 - RNA, 22 nt, Human
uuuacccauucagacucacuug

SEQ ID NO: 31109 - RNA, 22 nt, Human
uuuaccuaguauaaugcaaccu

SEQ ID NO: 31110 - RNA, 22 nt, Human
uuuaccuuuugcuaugguggaa

SEQ ID NO: 31111 - RNA, 22 nt, Human
uuuacgaauggggugacaacuu

SEQ ID NO: 31112 - RNA, 22 nt, Human
uuuacuacuucauugacuuacg

SEQ ID NO: 31113 - RNA, 22 nt, Human
uuuacuguguccaucugugacu

SEQ ID NO: 31114 - RNA, 22 nt, Human
uuuacuguuacaccuaccuucu

SEQ ID NO: 31115 - RNA, 22 nt, Human
uuuacuguucaacuugcaagua

SEQ ID NO: 31116 - RNA, 22 nt, Human
uuuacuguuuuauauuguccag

SEQ ID NO: 31117 - RNA, 22 nt, Human
uuuacuuucucaaguauauagg

SEQ ID NO: 31118 - RNA, 22 nt, Human
uuuacuuugugucaagucaaga

SEQ ID NO: 31119 - RNA, 22 nt, Human
uuuagaagacagaugcacagcc

SEQ ID NO: 31120 - RNA, 22 nt, Human
uuuagaaggacuacagugugau

SEQ ID NO: 31121 - RNA, 22 nt, Human
uuuagaagggcuggucagaaau

SEQ ID NO: 31122 - RNA, 22 nt, Human
uuuagaaguucacacauuuaaa

SEQ ID NO: 31123 - RNA, 22 nt, Human
uuuagacaagauccuucugaau

SEQ ID NO: 31124 - RNA, 22 nt, Human
uuuagacacacuuuguauauuu

SEQ ID NO: 31125 - RNA, 22 nt, Human
uuuagacacuagggaugcagug

SEQ ID NO: 31126 - RNA, 22 nt, Human
uuuagacauuugugguuugcaa

SEQ ID NO: 31127 - RNA, 22 nt, Human
uuuagagaaguuaggaaauaaa

SEQ ID NO: 31128 - RNA, 22 nt, Human
uuuagagaauuagaacaguacu

SEQ ID NO: 31129 - RNA, 22 nt, Human
uuuagagacacacuggcauuug

SEQ ID NO: 31130 - RNA, 22 nt, Human
uuuagagagaauuuucaaagug

SEQ ID NO: 31131 - RNA, 22 nt, Human
uuuagaggcaucuugcuuuucu

SEQ ID NO: 31132 - RNA, 22 nt, Human
uuuagaguaaaaacugugaccu

SEQ ID NO: 31133 - RNA, 22 nt, Human
uuuagagucccuuucucaccac

SEQ ID NO: 31134 - RNA, 22 nt, Human
uuuagaguugguccccugugag

SEQ ID NO: 31135 - RNA, 22 nt, Human
uuuagaguuucuaaauggaauu

SEQ ID NO: 31136 - RNA, 22 nt, Human
uuuagcaaaacauuaugucugu

SEQ ID NO: 31137 - RNA, 22 nt, Human
uuuagcaaauauuucuguugau

SEQ ID NO: 31138 - RNA, 22 nt, Human
uuuagcaagguagguccaugga

SEQ ID NO: 31139 - RNA, 22 nt, Human
uuuagcaauuagaauccagcau

SEQ ID NO: 31140 - RNA, 22 nt, Human
uuuagcaauuauuaaggguuga

SEQ ID NO: 31141 - RNA, 20 nt, Human
uuuagcacauuguacaaaac

SEQ ID NO: 31142 - RNA, 22 nt, Human
uuuagcagaucuauguauguga

SEQ ID NO: 31143 - RNA, 22 nt, Human
uuuagcagcaaauaaguagugc

SEQ ID NO: 31144 - RNA, 22 nt, Human
uuuagcauauccuauaaaacua

SEQ ID NO: 31145 - RNA, 22 nt, Human
uuuagcauccaagguuaugacu

SEQ ID NO: 31146 - RNA, 23 nt, Human
uuuagcaugaagcagcuggagaa

SEQ ID NO: 31147 - RNA, 22 nt, Human
uuuagcauguuccuuucauaga

SEQ ID NO: 31148 - RNA, 22 nt, Human
uuuagcauuaagcuuuucaaau

SEQ ID NO: 31149 - RNA, 22 nt, Human
uuuagcuucaguucuagcuucu

SEQ ID NO: 31150 - RNA, 23 nt, Human
uuuagcuucccuuuaguuagggg

SEQ ID NO: 31151 - RNA, 22 nt, Human
uuuagcuucuucagcuuguuca

SEQ ID NO: 31152 - RNA, 22 nt, Human
uuuagcuuguuggaacaauuga

SEQ ID NO: 31153 - RNA, 22 nt, Human
uuuaggaagaucugaaggaaga

SEQ ID NO: 31154 - RNA, 22 nt, Human
uuuaggaaugugguuuuugagc

SEQ ID NO: 31155 - RNA, 22 nt, Human
uuuaggagucaaauguuuuagg

SEQ ID NO: 31156 - RNA, 22 nt, Human
uuuaggcaauagauggcagugu

SEQ ID NO: 31157 - RNA, 22 nt, Human
uuuaggcauacuuuugggagaa

SEQ ID NO: 31158 - RNA, 22 nt, Human
uuggccaacauggugaaacccc

SEQ ID NO: 31159 - RNA, 22 nt, Human
uuggccaagucacugguuaaug

SEQ ID NO: 31160 - RNA, 22 nt, Human
uuggccaauggugauucccggc

SEQ ID NO: 31161 - RNA, 22 nt, Human
uuggccagacacuaccccccuu

SEQ ID NO: 31162 - RNA, 22 nt, Human
uuggccagagaccagagcaggg

SEQ ID NO: 31163 - RNA, 22 nt, Human
uuggccagagguuucucucaug

SEQ ID NO: 31164 - RNA, 22 nt, Human
uuggccagguccauuucuccau

SEQ ID NO: 31165 - RNA, 22 nt, Human
uuggccagugaaccaggccugg

SEQ ID NO: 31166 - RNA, 22 nt, Human
uuggccaguggaaagaggagga

SEQ ID NO: 31167 - RNA, 22 nt, Human
uuggcccacaguaccaugcugu

SEQ ID NO: 31168 - RNA, 22 nt, Human
uuggcccagacucggggacuga

SEQ ID NO: 31169 - RNA, 22 nt, Human
uuggcccuagacucuaaguccg

SEQ ID NO: 31170 - RNA, 22 nt, Human
uuggcccuccaccuggcugugc

SEQ ID NO: 31171 - RNA, 22 nt, Human
uuggccguuucacugggcaguu

SEQ ID NO: 31172 - RNA, 22 nt, Human
uuggccucauggacagcucauc

SEQ ID NO: 31173 - RNA, 22 nt, Human
uuggccuucccuaccugggcca

SEQ ID NO: 31174 - RNA, 22 nt, Human
uuggccuuguacaucauauuaa

SEQ ID NO: 31175 - RNA, 22 nt, Human
uuggccuuguuaaggaggcccu

SEQ ID NO: 31176 - RNA, 22 nt, Human
uuggccuuugcugggcuguuga

SEQ ID NO: 31177 - RNA, 22 nt, Human
uuggcuaaccuggguuaucagc

SEQ ID NO: 31178 - RNA, 22 nt, Human
uuggcucaggaccccugugacu

SEQ ID NO: 31179 - RNA, 22 nt, Human
uuggcucagugugagggagaug

SEQ ID NO: 31180 - RNA, 20 nt, Human
uuggcucugaucaguggagc

SEQ ID NO: 31181 - RNA, 22 nt, Human
uuggcucugugucuccacucaa

SEQ ID NO: 31182 - RNA, 22 nt, Human
uuggcucuuuccucacacagga

SEQ ID NO: 31183 - RNA, 22 nt, Human
uuggcugacaaauggaaucucu

SEQ ID NO: 31184 - RNA, 22 nt, Human
uuggcugcauuuuggguucguu

SEQ ID NO: 31185 - RNA, 21 nt, Human
uuggcugccugagauuagaau

SEQ ID NO: 31186 - RNA, 22 nt, Human
uuggcugccuucaccccuggcc

SEQ ID NO: 31187 - RNA, 22 nt, Human
uuggcuggcuucucgacuuguu

SEQ ID NO: 31188 - RNA, 22 nt, Human
uuggcugucacugucaguucag

SEQ ID NO: 31189 - RNA, 22 nt, Human
uuggcugugagggguugcacag

SEQ ID NO: 31190 - RNA, 22 nt, Human
uuggcuuccaggggcuuuuaca

SEQ ID NO: 31191 - RNA, 22 nt, Human
uuggcuucuguuuuggcucugu

SEQ ID NO: 31192 - RNA, 22 nt, Human
uuggcuucuuauaaugcaauag

SEQ ID NO: 31193 - RNA, 22 nt, Human
uuggcuucuucgcacagcagua

SEQ ID NO: 31194 - RNA, 22 nt, Human
uuggcuucuugugaaaucugag

SEQ ID NO: 31195 - RNA, 22 nt, Human
uuggcuucuuuucuagacagaa

SEQ ID NO: 31196 - RNA, 22 nt, Human
uuggcuugaugacuggcagugu

SEQ ID NO: 31197 - RNA, 22 nt, Human
uugggaaagccacaaauuggag

SEQ ID NO: 31198 - RNA, 23 nt, Human
uugggaaauaguuaagacaugag

SEQ ID NO: 31199 - RNA, 22 nt, Human
uuuuaaagagaugcugugcaua

SEQ ID NO: 31200 - RNA, 22 nt, Human
uuuuaaaggauagcucugguug

SEQ ID NO: 31201 - RNA, 21 nt, Human
uuuuaacaaggauuucccuag

SEQ ID NO: 31202 - RNA, 22 nt, Human
uuuuaacacucagcacuaucuc

SEQ ID NO: 31203 - RNA, 22 nt, Human
uuuuaacuuaaaauacauagau

SEQ ID NO: 31204 - RNA, 22 nt, Human
uuuuaaguuaauauaauugagg

SEQ ID NO: 31205 - RNA, 22 nt, Human
uuuuaauacugcuauuguagga

SEQ ID NO: 31206 - RNA, 22 nt, Human
uuuuaauccaucugguaaaccu

SEQ ID NO: 31207 - RNA, 22 nt, Human
uuuuaauucaaagugaauagug

SEQ ID NO: 31208 - RNA, 23 nt, Human
uuuuaauuuggacauaagaagau

SEQ ID NO: 31209 - RNA, 22 nt, Human
uuuuaauuuuagcccuucuggu

SEQ ID NO: 31210 - RNA, 22 nt, Human
uuuuacaaaugaggagcuggag

SEQ ID NO: 31211 - RNA, 21 nt, Human
uuuuacagaugaggggaaggg

SEQ ID NO: 31212 - RNA, 22 nt, Human
uuuuacaggugaaaaaugaaga

SEQ ID NO: 31213 - RNA, 22 nt, Human
uuuuacaguuccaugcaaagcg

SEQ ID NO: 31214 - RNA, 22 nt, Human
uuuuacuuuggauacaguacuu

SEQ ID NO: 31215 - RNA, 22 nt, Human
uuuuagaaguucacuuggguuu

SEQ ID NO: 31216 - RNA, 22 nt, Human
uuuuagauaguuuaacugcacu

SEQ ID NO: 31217 - RNA, 22 nt, Human
uuuuagcacacuuucuuuagcg

SEQ ID NO: 31218 - RNA, 22 nt, Human
uuuuagcacuaagugauaugcu

SEQ ID NO: 31219 - RNA, 22 nt, Human
uuuuagcuguugauuguucccc

SEQ ID NO: 31220 - RNA, 22 nt, Human
uuuuagugccugauuaaugggu

SEQ ID NO: 31221 - RNA, 22 nt, Human
uuuuaguuguacugucaacagu

SEQ ID NO: 31222 - RNA, 20 nt, Human
uuuuauauguaggguauaug

SEQ ID NO: 31223 - RNA, 22 nt, Human
uuuuaucuaccuaugcucauuu

SEQ ID NO: 31224 - RNA, 22 nt, Human
uuuuaucuucauuccuaucuac

SEQ ID NO: 31225 - RNA, 22 nt, Human
uuuuaugagaaugcgccacuug

SEQ ID NO: 31226 - RNA, 21 nt, Human
uuuuaugcauaggaaauauau

SEQ ID NO: 31227 - RNA, 22 nt, Human
uuuuaugugucaaagcaguggu

SEQ ID NO: 31228 - RNA, 22 nt, Human
uuuuaugugugaaaugcugucu

SEQ ID NO: 31229 - RNA, 22 nt, Human
uuuuauguuccucuuuaugcga

SEQ ID NO: 31230 - RNA, 22 nt, Human
uuuuauguuccugaagcuaucu

SEQ ID NO: 31231 - RNA, 22 nt, Human
uuuuauuggagugauaccaagc

SEQ ID NO: 31232 - RNA, 22 nt, Human
uuuuauugggaguccucuacug

SEQ ID NO: 31233 - RNA, 22 nt, Human
uuuuauugguaaugauaaaagu

SEQ ID NO: 31234 - RNA, 22 nt, Human
uuuuauugucucccaguucugg

SEQ ID NO: 31235 - RNA, 22 nt, Human
uuuucaaagacuggaggcugau

SEQ ID NO: 31236 - RNA, 22 nt, Human
uuuucaagagaguguucuaugu

SEQ ID NO: 31237 - RNA, 22 nt, Human
uuuucaagggcagggaaaucau

SEQ ID NO: 31238 - RNA, 22 nt, Human
uuuucaauuuugaggcaguggu

SEQ ID NO: 31239 - RNA, 22 nt, Human
uuuucacacaaggugauaaguu

SEQ ID NO: 31240 - RNA, 19 nt, Human
uuuucacauacuggauccu

SEQ ID NO: 31241 - RNA, 22 nt, Human
uuuucacaugcuuggggacuua

SEQ ID NO: 31242 - RNA, 22 nt, Human
uuuucagugguaucuuuguaaa

SEQ ID NO: 31243 - RNA, 22 nt, Human
uuuucaugucauguccuugagg

SEQ ID NO: 31244 - RNA, 22 nt, Human
uuuucauuguaaaucaggaaac

SEQ ID NO: 31245 - RNA, 22 nt, Human
uuuucauuguuccucgagcauu

SEQ ID NO: 31246 - RNA, 22 nt, Human
uuuuccacuuuagugcaauaac

SEQ ID NO: 31247 - RNA, 20 nt, Human
uuuuccagaaaguaucauug

SEQ ID NO: 31248 - RNA, 19 nt, Human
uuuucccacccuuuagaau

SEQ ID NO: 31249 - RNA, 22 nt, Human
uuuuccuauaugcaaagaaugc

SEQ ID NO: 31250 - RNA, 22 nt, Human
uuuuccucuguauuugaaaugc

SEQ ID NO: 31251 - RNA, 22 nt, Human
uuuuccucuguuauuaguguga

SEQ ID NO: 31252 - RNA, 22 nt, Human
uuuuccugccuuugcucaggga

SEQ ID NO: 31253 - RNA, 20 nt, Human
uuuuccugugguuugauaug

SEQ ID NO: 31254 - RNA, 22 nt, Human
uuuuccuuagcuucucugcgag

SEQ ID NO: 31255 - RNA, 19 nt, Human
uuuuccuucuccucuuaau

SEQ ID NO: 31256 - RNA, 22 nt, Human
uuuuccuucugauacuccauuu

SEQ ID NO: 31257 - RNA, 22 nt, Human
uuuuccuuugaaaggugagggc

SEQ ID NO: 31258 - RNA, 22 nt, Human
uuuucuaacuuuacacucgaaa

SEQ ID NO: 31259 - RNA, 22 nt, Human
uuuucuauucauugucuauggu

SEQ ID NO: 31260 - RNA, 19 nt, Human
uuuucucagcuucuagcgg

SEQ ID NO: 31261 - RNA, 22 nt, Human
uuuucuccuuucaagauagcau

SEQ ID NO: 31262 - RNA, 22 nt, Human
uuuucucuauauugucugugaa

SEQ ID NO: 31263 - RNA, 22 nt, Human
uuuucugacucuauugagguau

SEQ ID NO: 31264 - RNA, 22 nt, Human
uuuucuggucacauguuauuaa

SEQ ID NO: 31265 - RNA, 22 nt, Human
uuuucuguauuauugugcuuca

SEQ ID NO: 31266 - RNA, 22 nt, Human
uuuucugugauucugagguugg

SEQ ID NO: 31267 - RNA, 22 nt, Human
uuucacauacaguguauaguag

SEQ ID NO: 31268 - RNA, 22 nt, Human
uuucacauaucaacucuauccu

SEQ ID NO: 31269 - RNA, 22 nt, Human
uuucacaucccgcgcgcccuua

SEQ ID NO: 31270 - RNA, 20 nt, Human
uuucacaucugucccuuuaa

SEQ ID NO: 31271 - RNA, 22 nt, Human
uuucacauggacuuuuuguucu

SEQ ID NO: 31272 - RNA, 22 nt, Human
uuucacauguauauaggcauua

SEQ ID NO: 31273 - RNA, 22 nt, Human
uuucacaugugcuguugucaau

SEQ ID NO: 31274 - RNA, 22 nt, Human
uuucacauucagauauagacuu

SEQ ID NO: 31275 - RNA, 22 nt, Human
uuucacuagaacguucuuguuu

SEQ ID NO: 31276 - RNA, 22 nt, Human
uuucacucagcucucauugucu

SEQ ID NO: 31277 - RNA, 22 nt, Human
uuucacuggaauuuuaacauuu

SEQ ID NO: 31278 - RNA, 22 nt, Human
uuucagaaaacuuaucaucagu

SEQ ID NO: 31279 - RNA, 22 nt, Human
uuucagaaagcugaacauauga

SEQ ID NO: 31280 - RNA, 22 nt, Human
uuucagaaauuauauuagaugc

SEQ ID NO: 31281 - RNA, 22 nt, Human
uuucagaagucaacuagguaaa

SEQ ID NO: 31282 - RNA, 22 nt, Human
uuucagaagucacaguugacug

SEQ ID NO: 31283 - RNA, 22 nt, Human
uuucagacagauucuucucagu

SEQ ID NO: 31284 - RNA, 22 nt, Human
uuucagacaguggguccaucca

SEQ ID NO: 31285 - RNA, 22 nt, Human
uuucagacauagccugauucug

SEQ ID NO: 31286 - RNA, 19 nt, Human
uuucagacauuucaaauuu

SEQ ID NO: 31287 - RNA, 22 nt, Human
uuucagacucagaacuuagcaa

SEQ ID NO: 31288 - RNA, 19 nt, Human
uuucagacucaucuccagc

SEQ ID NO: 31289 - RNA, 22 nt, Human
uuucagacuccaaauucauaag

SEQ ID NO: 31290 - RNA, 22 nt, Human
uuucagagaauuagaagcugau

SEQ ID NO: 31291 - RNA, 22 nt, Human
uuucagagagaucaacauagcu

SEQ ID NO: 31292 - RNA, 22 nt, Human
uuucagagaugcagaauucagg

SEQ ID NO: 31293 - RNA, 22 nt, Human
uuucagaguuauguaagaaaau

SEQ ID NO: 31294 - RNA, 22 nt, Human
uuucagaguuggggaaaagcag

SEQ ID NO: 31295 - RNA, 22 nt, Human
uuucagaucacuuucaggaaag

SEQ ID NO: 31296 - RNA, 22 nt, Human
uuucagcuuuaccauuccauga

SEQ ID NO: 31297 - RNA, 22 nt, Human
uuucaggagagaccagaaauga

SEQ ID NO: 31298 - RNA, 22 nt, Human
uuucaggaucaaaugaaaucgu

SEQ ID NO: 31299 - RNA, 22 nt, Human
uuucaggauuuuaugagauagu

SEQ ID NO: 31300 - RNA, 22 nt, Human
uuucagugcacguaguuuauuu

SEQ ID NO: 31301 - RNA, 22 nt, Human
uuucaguggagugacaugaucu

SEQ ID NO: 31302 - RNA, 22 nt, Human
uuucaguggcaucgauuacccu

SEQ ID NO: 31303 - RNA, 22 nt, Human
uuucaguggguuuauuucaugu

SEQ ID NO: 31304 - RNA, 22 nt, Human
uuucaguguaagguuuccagga

SEQ ID NO: 31305 - RNA, 22 nt, Human
uuucaguguaucuuccaaaagc

SEQ ID NO: 31306 - RNA, 22 nt, Human
uuucaguguguaaauugaaaua

SEQ ID NO: 31307 - RNA, 22 nt, Human
uuucaguguuaugacuuucauu

SEQ ID NO: 31308 - RNA, 22 nt, Human
uuucaguuaaguggcuaguccc

SEQ ID NO: 31309 - RNA, 22 nt, Human
uuucaguuacugcuauaucauu

SEQ ID NO: 31310 - RNA, 22 nt, Human
uuucaguuagcugagacccagg

SEQ ID NO: 31311 - RNA, 22 nt, Human
uuucaguucaguuuauuauauc

SEQ ID NO: 31312 - RNA, 22 nt, Human
uuucaguucaucugugaagauu

SEQ ID NO: 31313 - RNA, 23 nt, Human
uuucaguuccagaaaaggggagc

SEQ ID NO: 31314 - RNA, 22 nt, Human
uuuuugcaccaaccuaauagaa

SEQ ID NO: 31315 - RNA, 22 nt, Human
uuuuugcuaauccccagccacu

SEQ ID NO: 31316 - RNA, 22 nt, Human
uuuuugcugauaagcagaauuc

SEQ ID NO: 31317 - RNA, 22 nt, Human
uuuuugucaucuauuucuggug

SEQ ID NO: 31318 - RNA, 22 nt, Human
uuuuugugguauauugcaacaa

SEQ ID NO: 31319 - RNA, 22 nt, Human
uuuuuguggugcagacuaaagc

SEQ ID NO: 31320 - RNA, 22 nt, Human
uuuuuuauaucaacugaagucu

SEQ ID NO: 31321 - RNA, 22 nt, Human
uuuuuuccaacuuaagacuuca

SEQ ID NO: 31322 - RNA, 22 nt, Human
uuuuuuccagcuucuagaggcc

SEQ ID NO: 31323 - RNA, 22 nt, Human
uuuuuuccaggaagccacugga

SEQ ID NO: 31324 - RNA, 22 nt, Human
uuuuuuccugagccuugugguc

SEQ ID NO: 31325 - RNA, 21 nt, Human
uuuuuucuugcgugaggccug

SEQ ID NO: 31326 - RNA, 22 nt, Human
uuuuuugucccagagagccugg

SEQ ID NO: 31327 - RNA, 22 nt, Human
uuuuuugucuugaagaaauggu

SEQ ID NO: 31328 - RNA, 23 nt, Human
uuuuuugucuugcuaggcugccc

SEQ ID NO: 31329 - RNA, 22 nt, Human
acaguguaauucauggcugaaa

SEQ ID NO: 31330 - RNA, 22 nt, Human
acaguguagugugaugucaaaa

SEQ ID NO: 31331 - RNA, 22 nt, Human
acaguguaugauauuucacagu

SEQ ID NO: 31332 - RNA, 22 nt, Human
acagugucaucaguuucucaac

SEQ ID NO: 31333 - RNA, 22 nt, Human
acagugucucacugcugaaauc

SEQ ID NO: 31334 - RNA, 22 nt, Human
acaguguggaaagucaacuuga

SEQ ID NO: 31335 - RNA, 22 nt, Human
acagugugguuguuucugguua

SEQ ID NO: 31336 - RNA, 22 nt, Human
acagugugguuugagcacuggg

SEQ ID NO: 31337 - RNA, 22 nt, Human
acagugugugcuuucccuuacg

SEQ ID NO: 31338 - RNA, 22 nt, Human
acagugugugggaaaugugacu

SEQ ID NO: 31339 - RNA, 22 nt, Human
acaguguguuggaggagacugu

SEQ ID NO: 31340 - RNA, 22 nt, Human
acaguguucucuuccuguauag

SEQ ID NO: 31341 - RNA, 22 nt, Human
acaguguucugaaaguugaggg

SEQ ID NO: 31342 - RNA, 22 nt, Human
acaguguuguauuuaguuugau

SEQ ID NO: 31343 - RNA, 22 nt, Human
acaguguuuaaaauaauaugcu

SEQ ID NO: 31344 - RNA, 22 nt, Human
acaguguuuaagagauggcauu

SEQ ID NO: 31345 - RNA, 22 nt, Human
acaguguuucacuuaaccguuu

SEQ ID NO: 31346 - RNA, 22 nt, Human
acaguguuuugucuggcagggc

SEQ ID NO: 31347 - RNA, 22 nt, Human
acaguuaauuguuguugggugu

SEQ ID NO: 31348 - RNA, 22 nt, Human
acaguuacaugauucuugugag

SEQ ID NO: 31349 - RNA, 22 nt, Human
acaguuacucauagaagcacuu

SEQ ID NO: 31350 - RNA, 22 nt, Human
acaguuagguccuaaaauucug

SEQ ID NO: 31351 - RNA, 22 nt, Human
acaguuauauacauguagcugu

SEQ ID NO: 31352 - RNA, 22 nt, Human
acaguuauuuacugcauaaacu

SEQ ID NO: 31353 - RNA, 22 nt, Human
acaguuauuuucccagcauuua

SEQ ID NO: 31354 - RNA, 22 nt, Human
acgggccuucucuucaggcgag

SEQ ID NO: 31355 - RNA, 22 nt, Human
acguagauuccuccaugcgcag

SEQ ID NO: 31356 - RNA, 22 nt, Human
acguauauugaaauaucaugag

SEQ ID NO: 31357 - RNA, 22 nt, Human
acgucuucguuggcagagauuu

SEQ ID NO: 31358 - RNA, 22 nt, Human
acgugauauauuuacuucccca

SEQ ID NO: 31359 - RNA, 22 nt, Human
acgugcaggaucugguuggcga

SEQ ID NO: 31360 - RNA, 22 nt, Human
acgugcuggagaagagcucgcc

SEQ ID NO: 31361 - RNA, 18 nt, Human
acgugcugugccuuuugc

SEQ ID NO: 31362 - RNA, 22 nt, Human
acguggagagaauagggcacca

SEQ ID NO: 31363 - RNA, 22 nt, Human
acguggagccacagauggagca

SEQ ID NO: 31364 - RNA, 20 nt, Human
acgugugugugcacgcgcgc

SEQ ID NO: 31365 - RNA, 22 nt, Human
acguuagaaaagcaggagcuca

SEQ ID NO: 31366 - RNA, 22 nt, Human
acguuauaucugaaaaaaguga

SEQ ID NO: 31367 - RNA, 22 nt, Human
acguuuucagugacugugcuuc

SEQ ID NO: 31368 - RNA, 22 nt, Human
acguuuucuagagaauaugcag

SEQ ID NO: 31369 - RNA, 22 nt, Human
acuaaacugaagcaugaaaagg

SEQ ID NO: 31370 - RNA, 22 nt, Human
acuaaauagccucugguaguug

SEQ ID NO: 31371 - RNA, 22 nt, Human
acuaaaugcugcauaaaugcuu

SEQ ID NO: 31372 - RNA, 22 nt, Human
acuaacauguuaaucaaaagaa

SEQ ID NO: 31373 - RNA, 22 nt, Human
acuaacuugcugagugaccaug

SEQ ID NO: 31374 - RNA, 22 nt, Human
acuaagaccuagauacuagggg

SEQ ID NO: 31375 - RNA, 22 nt, Human
acuaaguuguagucacacaucc

SEQ ID NO: 31376 - RNA, 22 nt, Human
acuaauagagacaaacauagau

SEQ ID NO: 31377 - RNA, 22 nt, Human
acuacagaagucuuauuagaga

SEQ ID NO: 31378 - RNA, 23 nt, Human
acuacagauacuccugcuguuug

SEQ ID NO: 31379 - RNA, 22 nt, Human
acuacagucccucauauguugg

SEQ ID NO: 31380 - RNA, 22 nt, Human
acuacagugugauaagaggggc

SEQ ID NO: 31381 - RNA, 22 nt, Human
acuacauuugcagagaagcaau

SEQ ID NO: 31382 - RNA, 22 nt, Human
acuacuuugggccauuuguuua

SEQ ID NO: 31383 - RNA, 22 nt, Human
acuagaaacuaauggauuauua

SEQ ID NO: 31384 - RNA, 22 nt, Human
acuagaaagcaaaagccauuuc

SEQ ID NO: 31385 - RNA, 22 nt, Human
acuagaaauguauugguagcug

SEQ ID NO: 31386 - RNA, 22 nt, Human
acuagauaauuauaaaagguag

SEQ ID NO: 31387 - RNA, 19 nt, Human
acuagauacaacaugcaga

SEQ ID NO: 31388 - RNA, 22 nt, Human
acuagauuuuggccauuauaca

SEQ ID NO: 31389 - RNA, 22 nt, Human
acuagcagggauguuauuacuu

SEQ ID NO: 31390 - RNA, 22 nt, Human
acuagccaaguuuuacgacuaa

SEQ ID NO: 31391 - RNA, 22 nt, Human
acuaggaaggcauaugggcaga

SEQ ID NO: 31392 - RNA, 22 nt, Human
acuaggaaguggcaaaacugga

SEQ ID NO: 31393 - RNA, 22 nt, Human
acuagggaaaguuauguucaca

SEQ ID NO: 31394 - RNA, 22 nt, Human
acuaguauaauugcccuaaccu

SEQ ID NO: 31395 - RNA, 22 nt, Human
acuagugcacauuguuucucaa

SEQ ID NO: 31396 - RNA, 22 nt, Human
acuaguuuaugcucagaugucu

SEQ ID NO: 31397 - RNA, 22 nt, Human
acuaguuugaaaauaucugauu

SEQ ID NO: 31398 - RNA, 22 nt, Human
acuauacaagauuagggauuug

SEQ ID NO: 31399 - RNA, 22 nt, Human
acuauacauugaauguuaaggu

SEQ ID NO: 31400 - RNA, 20 nt, Human
acuaugaaguuagcccucca

SEQ ID NO: 31401 - RNA, 22 nt, Human
acuaugaauagccagauaguga

SEQ ID NO: 31402 - RNA, 21 nt, Human
acuaugucauuuaagucacug

SEQ ID NO: 31403 - RNA, 22 nt, Human
acuauucaccuuucaugcagga

SEQ ID NO: 31404 - RNA, 22 nt, Human
acuauucauguuuccuaacuau

SEQ ID NO: 31405 - RNA, 22 nt, Human
acuauuuacucaaaugagguug

SEQ ID NO: 31406 - RNA, 22 nt, Human
acucaaauagcaacggugagaa

SEQ ID NO: 31407 - RNA, 22 nt, Human
acucacagcagacuaugaggga

SEQ ID NO: 31408 - RNA, 22 nt, Human
acucacaggacucugcauauag

SEQ ID NO: 31409 - RNA, 22 nt, Human
acucacagggccucaguuuucc

SEQ ID NO: 31410 - RNA, 22 nt, Human
acucaccacacccuugcacuug

SEQ ID NO: 31411 - RNA, 22 nt, Human
acucacugcacuuugaaaugug

SEQ ID NO: 31412 - RNA, 22 nt, Human
acucacuuuccauucaagcacc

SEQ ID NO: 31413 - RNA, 22 nt, Human
acucagaagauauaaugacuca

SEQ ID NO: 31414 - RNA, 22 nt, Human
acucagaagauguggguagaua

SEQ ID NO: 31415 - RNA, 22 nt, Human
acucagaaugacugaugcugug

SEQ ID NO: 31416 - RNA, 22 nt, Human
acucagagaacuggauuagagg

SEQ ID NO: 31417 - RNA, 22 nt, Human
acucagagauauggugguugau

SEQ ID NO: 31418 - RNA, 22 nt, Human
acucagagcagagcagccugag

SEQ ID NO: 31419 - RNA, 22 nt, Human
acucagaggaaacccuccuagg

SEQ ID NO: 31420 - RNA, 22 nt, Human
acucagagucaauguuaauggc

SEQ ID NO: 31421 - RNA, 22 nt, Human
acucagcacagcacugggaacc

SEQ ID NO: 31422 - RNA, 22 nt, Human
acucagcuugcacacaucaaug

SEQ ID NO: 31423 - RNA, 22 nt, Human
acucaggaaaugaagacugguu

SEQ ID NO: 31424 - RNA, 18 nt, Human
acucaggaaaugaugaca

SEQ ID NO: 31425 - RNA, 22 nt, Human
acucaggagggaucagcuauca

SEQ ID NO: 31426 - RNA, 22 nt, Human
acucaggccccaucgcccaucu

SEQ ID NO: 31427 - RNA, 22 nt, Human
acucaggccuccuucuguccuu

SEQ ID NO: 31428 - RNA, 22 nt, Human
acucaggcuagggaaaaagugg

SEQ ID NO: 31429 - RNA, 22 nt, Human
acucaggcuguuuuuuccuugu

SEQ ID NO: 31430 - RNA, 22 nt, Human
acucagugaauuuucaucaaau

SEQ ID NO: 31431 - RNA, 22 nt, Human
acucaucaacuguuacaaaugu

SEQ ID NO: 31432 - RNA, 23 nt, Human
acucaucuucugguauccacagu

SEQ ID NO: 31433 - RNA, 21 nt, Human
acucaucuuuuuggagaccag

SEQ ID NO: 31434 - RNA, 22 nt, Human
acucauguccuaggaguaaagc

SEQ ID NO: 31435 - RNA, 22 nt, Human
acucauguuuucucuagcugga

SEQ ID NO: 31436 - RNA, 22 nt, Human
acucauugaaacuuaagaucua

SEQ ID NO: 31437 - RNA, 22 nt, Human
acucauugggaaagugcucucu

SEQ ID NO: 31438 - RNA, 22 nt, Human
acuuuagauauuccucuguaca

SEQ ID NO: 31439 - RNA, 22 nt, Human
acuuuaugauacagggaagggu

SEQ ID NO: 31440 - RNA, 23 nt, Human
acuuuauugaccccaggucaguu

SEQ ID NO: 31441 - RNA, 22 nt, Human
acuuucaaauaucaugauucua

SEQ ID NO: 31442 - RNA, 22 nt, Human
acuuucaugcucugagcacugg

SEQ ID NO: 31443 - RNA, 22 nt, Human
acuuucauggaucucuguucag

SEQ ID NO: 31444 - RNA, 22 nt, Human
acuuucuaaaauugcuagcacu

SEQ ID NO: 31445 - RNA, 22 nt, Human
acuuucuauucccacagagaua

SEQ ID NO: 31446 - RNA, 22 nt, Human
acuuucuauuguuuagauucug

SEQ ID NO: 31447 - RNA, 22 nt, Human
acuuucucaaaucagacuuuaa

SEQ ID NO: 31448 - RNA, 22 nt, Human
acuuucuccagaaaaccaagga

SEQ ID NO: 31449 - RNA, 20 nt, Human
acuuucucgguuucucaccu

SEQ ID NO: 31450 - RNA, 21 nt, Human
acuuucuguggguucaagcau

SEQ ID NO: 31451 - RNA, 22 nt, Human
acuuucugugguuaccagggag

SEQ ID NO: 31452 - RNA, 22 nt, Human
acuuucuucuuaugcauuaagg

SEQ ID NO: 31453 - RNA, 22 nt, Human
acuuugaaauguguaagagaga

SEQ ID NO: 31454 - RNA, 22 nt, Human
acuuugaaucucagauaaccaa

SEQ ID NO: 31455 - RNA, 22 nt, Human
acuuugcacuucaauauaacuu

SEQ ID NO: 31456 - RNA, 22 nt, Human
acuuugcagcugaggacauuuc

SEQ ID NO: 31457 - RNA, 21 nt, Human
acuuugcaucuaccuuggguu

SEQ ID NO: 31458 - RNA, 22 nt, Human
acuuugcccuacagcagcucug

SEQ ID NO: 31459 - RNA, 22 nt, Human
acuuugccuucuuacuguguug

SEQ ID NO: 31460 - RNA, 22 nt, Human
acuuuggaauaagcuauauaac

SEQ ID NO: 31461 - RNA, 22 nt, Human
acuuuggggaucuacggcugga

SEQ ID NO: 31462 - RNA, 22 nt, Human
acuuuguaaauuguugugacuc

SEQ ID NO: 31463 - RNA, 22 nt, Human
acuuuguaggaaaaagucacaa

SEQ ID NO: 31464 - RNA, 22 nt, Human
acuuuguagguuucagugaaac

SEQ ID NO: 31465 - RNA, 22 nt, Human
acuuuguugaagaauauguuag

SEQ ID NO: 31466 - RNA, 22 nt, Human
acuuuguugaugaaauaguuuu

SEQ ID NO: 31467 - RNA, 23 nt, Human
acuuuucaauuagcuaugcuuaa

SEQ ID NO: 31468 - RNA, 22 nt, Human
acuuuucuaagcaauggucuug

SEQ ID NO: 31469 - RNA, 22 nt, Human
acuuuucugcagaugaucucuu

SEQ ID NO: 31470 - RNA, 22 nt, Human
acuuuugaagaauuaugcaaaa

SEQ ID NO: 31471 - RNA, 22 nt, Human
acuuuugguucuguaacuguga

SEQ ID NO: 31472 - RNA, 22 nt, Human
acuuuuuacaggguguauacca

SEQ ID NO: 31473 - RNA, 22 nt, Human
acuuuuucucagaaggauuggu

SEQ ID NO: 31474 - RNA, 22 nt, Human
agaaaaagaaaguggauuuguc

SEQ ID NO: 31475 - RNA, 20 nt, Human
agaaaaaguguggaaauuuc

SEQ ID NO: 31476 - RNA, 22 nt, Human
agaaaacagaaagucauuggug

SEQ ID NO: 31477 - RNA, 22 nt, Human
agaaaacauaggagacaggaaa

SEQ ID NO: 31478 - RNA, 22 nt, Human
agaaaacauuacauaggugugu

SEQ ID NO: 31479 - RNA, 22 nt, Human
agaaaacuugucacagcucuca

SEQ ID NO: 31480 - RNA, 23 nt, Human
agaaaaguucauaccuuuuuaac

SEQ ID NO: 31481 - RNA, 22 nt, Human
agaaaaguuuaaaucuuggcac

SEQ ID NO: 31482 - RNA, 22 nt, Human
agaaaaguuuucugagacugac

SEQ ID NO: 31483 - RNA, 21 nt, Human
agaaaauggcguuuuagauuu

SEQ ID NO: 31484 - RNA, 20 nt, Human
agaaacagcacaauucuguu

SEQ ID NO: 31485 - RNA, 22 nt, Human
agaaacauccugcuuuccauuu

SEQ ID NO: 31486 - RNA, 22 nt, Human
agaaacaucuuggcaacuggaa

SEQ ID NO: 31487 - RNA, 22 nt, Human
agaaaccugugugcugugauga

SEQ ID NO: 31488 - RNA, 22 nt, Human
agaaacuaaagccaagggcucu

SEQ ID NO: 31489 - RNA, 21 nt, Human
agaaacugacuccuagaggca

SEQ ID NO: 31490 - RNA, 17 nt, Human
agaaacugaggcucagu

SEQ ID NO: 31491 - RNA, 22 nt, Human
agaaagaacgcacuugugcugc

SEQ ID NO: 31492 - RNA, 22 nt, Human
agaaagagaugaaugcuuuaag

SEQ ID NO: 31493 - RNA, 22 nt, Human
agaaagcacgggccccaggcuc

SEQ ID NO: 31494 - RNA, 22 nt, Human
agaaagcaucuccauuguaggu

SEQ ID NO: 31495 - RNA, 22 nt, Human
agaaagcccaggagaacagauu

SEQ ID NO: 31496 - RNA, 22 nt, Human
agaaagcuccccaugagaugau

SEQ ID NO: 31497 - RNA, 22 nt, Human
agaaagcuggaagagcugggau

SEQ ID NO: 31498 - RNA, 22 nt, Human
agaaagcuuaugaaugggcaag

SEQ ID NO: 31499 - RNA, 22 nt, Human
agaaagggaugagguagcugcu

SEQ ID NO: 31500 - RNA, 22 nt, Human
agaaaguacagaugagacacuu

SEQ ID NO: 31501 - RNA, 22 nt, Human
agaaagugaacguguucaguuu

SEQ ID NO: 31502 - RNA, 22 nt, Human
agaaagugaccuugaaaacugg

SEQ ID NO: 31503 - RNA, 22 nt, Human
agaaagugccucccuugggagc

SEQ ID NO: 31504 - RNA, 20 nt, Human
agacacccccugacagggaa

SEQ ID NO: 31505 - RNA, 22 nt, Human
agacacugaaauguauugaaga

SEQ ID NO: 31506 - RNA, 22 nt, Human
agacacugaaucagagggacau

SEQ ID NO: 31507 - RNA, 22 nt, Human
agacacugaauguuuggugguc

SEQ ID NO: 31508 - RNA, 22 nt, Human
agacacuggugaagaaaucagg

SEQ ID NO: 31509 - RNA, 22 nt, Human
agacacuucauguaaguggaau

SEQ ID NO: 31510 - RNA, 21 nt, Human
agacagaacaacugcucucca

SEQ ID NO: 31511 - RNA, 22 nt, Human
agacagacagagaauuuaaaua

SEQ ID NO: 31512 - RNA, 18 nt, Human
agacagacagguuugugc

SEQ ID NO: 31513 - RNA, 22 nt, Human
agacagacauagaaauuaguaa

SEQ ID NO: 31514 - RNA, 22 nt, Human
agacagacauucuagagccacc

SEQ ID NO: 31515 - RNA, 17 nt, Human
agacagaccucugcauc

SEQ ID NO: 31516 - RNA, 22 nt, Human
agacagacggcuuuauacacag

SEQ ID NO: 31517 - RNA, 19 nt, Human
agacagagacugaaauaga

SEQ ID NO: 31518 - RNA, 21 nt, Human
agacagcagauagucgaaagg

SEQ ID NO: 31519 - RNA, 22 nt, Human
agacagcagcagaggggcuccc

SEQ ID NO: 31520 - RNA, 22 nt, Human
agacagcaugagccugcugaug

SEQ ID NO: 31521 - RNA, 22 nt, Human
agacagcaugauacaugaugcu

SEQ ID NO: 31522 - RNA, 22 nt, Human
agacagcauggagcugauaaca

SEQ ID NO: 31523 - RNA, 22 nt, Human
agacagcauuucccggaaccgc

SEQ ID NO: 31524 - RNA, 22 nt, Human
agacagcauuucuagcaccagg

SEQ ID NO: 31525 - RNA, 22 nt, Human
agacagcuaauaaaugagugug

SEQ ID NO: 31526 - RNA, 22 nt, Human
agacagcuccaagugucucugu

SEQ ID NO: 31527 - RNA, 19 nt, Human
agacagcucuauuauuuug

SEQ ID NO: 31528 - RNA, 22 nt, Human
agacagcuguuccuucauguuu

SEQ ID NO: 31529 - RNA, 21 nt, Human
agacagcuuuaaagacacagg

SEQ ID NO: 31530 - RNA, 22 nt, Human
agacaggcagggcauggaaaaa

SEQ ID NO: 31531 - RNA, 22 nt, Human
agacagggagggagcgcggcug

SEQ ID NO: 31532 - RNA, 22 nt, Human
agacagguagcaggacagauau

SEQ ID NO: 31533 - RNA, 22 nt, Human
agacaggugcucgcccaagucc

SEQ ID NO: 31534 - RNA, 17 nt, Human
agacagugagugccuug

SEQ ID NO: 31535 - RNA, 22 nt, Human
agacagugauguaagcaggagu

SEQ ID NO: 31536 - RNA, 22 nt, Human
agacagugauucuucacauuuc

SEQ ID NO: 31537 - RNA, 22 nt, Human
agacagugcaagaagagcaggc

SEQ ID NO: 31538 - RNA, 19 nt, Human
agacaguggcuaggacuua

SEQ ID NO: 31539 - RNA, 22 nt, Human
agacaguguaauguaauuguua

SEQ ID NO: 31540 - RNA, 22 nt, Human
agacagugugaguucagggugg

SEQ ID NO: 31541 - RNA, 22 nt, Human
agacagugugguuggugguucc

SEQ ID NO: 31542 - RNA, 22 nt, Human
agacaguguguguauauauggu

SEQ ID NO: 31543 - RNA, 22 nt, Human
agacaguugauauacuauaaaa

SEQ ID NO: 31544 - RNA, 22 nt, Human
agacauaagccagucacucacu

SEQ ID NO: 31545 - RNA, 22 nt, Human
agacauagaaaaucauuaggaa

SEQ ID NO: 31546 - RNA, 22 nt, Human
agacauauauugcaauucacug

SEQ ID NO: 31547 - RNA, 22 nt, Human
agagaugagaacaugcuuggau

SEQ ID NO: 31548 - RNA, 22 nt, Human
agagaugcaggguacauggaau

SEQ ID NO: 31549 - RNA, 22 nt, Human
agagaugcaucucuuaaaauug

SEQ ID NO: 31550 - RNA, 19 nt, Human
agagaugcuaagagucuuu

SEQ ID NO: 31551 - RNA, 22 nt, Human
agagaugcuguggguagaggca

SEQ ID NO: 31552 - RNA, 22 nt, Human
agagauggcgucucagagccug

SEQ ID NO: 31553 - RNA, 22 nt, Human
agagaugggcgggggcuucugc

SEQ ID NO: 31554 - RNA, 20 nt, Human
agagaugggguaucaccgua

SEQ ID NO: 31555 - RNA, 22 nt, Human
agagaugguagaacagucauaa

SEQ ID NO: 31556 - RNA, 22 nt, Human
agagaugucgccuugcccaggg

SEQ ID NO: 31557 - RNA, 22 nt, Human
agagauugcuagcuggcuuuaa

SEQ ID NO: 31558 - RNA, 22 nt, Human
agagauuuacacaugccuuuuc

SEQ ID NO: 31559 - RNA, 22 nt, Human
agagcacacugacgucagucug

SEQ ID NO: 31560 - RNA, 22 nt, Human
agagcacaguaucugcacauca

SEQ ID NO: 31561 - RNA, 22 nt, Human
agagcaccaaggugguuuggac

SEQ ID NO: 31562 - RNA, 22 nt, Human
agagcacggccaccauuuacaa

SEQ ID NO: 31563 - RNA, 22 nt, Human
agagcacugcugauuuacaguc

SEQ ID NO: 31564 - RNA, 22 nt, Human
agagcagagggcucugggacaa

SEQ ID NO: 31565 - RNA, 22 nt, Human
agagcagauggccagggggccu

SEQ ID NO: 31566 - RNA, 22 nt, Human
agagcagcacguuguccccaca

SEQ ID NO: 31567 - RNA, 18 nt, Human
agagcagcggcaucacac

SEQ ID NO: 31568 - RNA, 22 nt, Human
agagcagcuggcugcaucuaga

SEQ ID NO: 31569 - RNA, 22 nt, Human
agagcagguggcaacucuggga

SEQ ID NO: 31570 - RNA, 22 nt, Human
agagcagucaggcuaggacacu

SEQ ID NO: 31571 - RNA, 22 nt, Human
agagccaaggcugagagcuauu

SEQ ID NO: 31572 - RNA, 22 nt, Human
agagccaaucuucagagcagag

SEQ ID NO: 31573 - RNA, 22 nt, Human
agagccacaguggauaggagcc

SEQ ID NO: 31574 - RNA, 22 nt, Human
agagccacuccaggacucaggg

SEQ ID NO: 31575 - RNA, 22 nt, Human
agagccagaccauugccgugca

SEQ ID NO: 31576 - RNA, 22 nt, Human
agagccagauggagccgugugu

SEQ ID NO: 31577 - RNA, 22 nt, Human
agagccagcaacucuagcccug

SEQ ID NO: 31578 - RNA, 22 nt, Human
agagccagccuucucagcuuac

SEQ ID NO: 31579 - RNA, 22 nt, Human
agagccaggaaguggcgugggg

SEQ ID NO: 31580 - RNA, 22 nt, Human
agagccaggaucuguuuugggg

SEQ ID NO: 31581 - RNA, 22 nt, Human
agagcccugcaguucuucagga

SEQ ID NO: 31582 - RNA, 22 nt, Human
agagcccugccaauggaugagg

SEQ ID NO: 31583 - RNA, 22 nt, Human
agagcccuggagggcagucccg

SEQ ID NO: 31584 - RNA, 22 nt, Human
agagcccuguggacugucaagu

SEQ ID NO: 31585 - RNA, 22 nt, Human
agagcccuugcccucagucacc

SEQ ID NO: 31586 - RNA, 23 nt, Human
agagccugaaagacuucuggcac

SEQ ID NO: 31587 - RNA, 20 nt, Human
agagccuggaaaaagacauc

SEQ ID NO: 31588 - RNA, 22 nt, Human
agagccuggagguucugcugaa

SEQ ID NO: 31589 - RNA, 22 nt, Human
agagccugggaauuugcauguu

SEQ ID NO: 31590 - RNA, 22 nt, Human
agagccugucugccuuucuacc

SEQ ID NO: 31591 - RNA, 22 nt, Human
agagccuguucggaggcgcccc

SEQ ID NO: 31592 - RNA, 22 nt, Human
agagccuugcucuaaauuucuc

SEQ ID NO: 31593 - RNA, 22 nt, Human
agagccuuuggagcugcuauua

SEQ ID NO: 31594 - RNA, 23 nt, Human
agagccuuuucacacuucaaugu

SEQ ID NO: 31595 - RNA, 22 nt, Human
agagcgagucuggggcucggau

SEQ ID NO: 31596 - RNA, 22 nt, Human
agagcuagaaggaagcauuucu

SEQ ID NO: 31597 - RNA, 22 nt, Human
agagcucaagacgcucacagua

SEQ ID NO: 31598 - RNA, 21 nt, Human
agagcucaaggcaaaaauaau

SEQ ID NO: 31599 - RNA, 22 nt, Human
agagcucucuucauaacggccu

SEQ ID NO: 31600 - RNA, 17 nt, Human
agagcucuucacuguga

SEQ ID NO: 31601 - RNA, 22 nt, Human
agagcugaauuuggguggugga

SEQ ID NO: 31602 - RNA, 22 nt, Human
agagcugagaauguggcuuccu

SEQ ID NO: 31603 - RNA, 22 nt, Human
agagcugauuugauuacagugc

SEQ ID NO: 31604 - RNA, 22 nt, Human
agagcugcaggguggacccagg

SEQ ID NO: 31605 - RNA, 22 nt, Human
agagcugccgagcuggggccau

SEQ ID NO: 31606 - RNA, 22 nt, Human
agagcugcucagaugucacugc

SEQ ID NO: 31607 - RNA, 22 nt, Human
agagcuggacgucugagcccua

SEQ ID NO: 31608 - RNA, 22 nt, Human
agagcuggauggucaagauggc

SEQ ID NO: 31609 - RNA, 22 nt, Human
agagcuggccagggaucacucu

SEQ ID NO: 31610 - RNA, 22 nt, Human
agagcuggcugguagcccugau

SEQ ID NO: 31611 - RNA, 20 nt, Human
agagcugggaagcucccuau

SEQ ID NO: 31612 - RNA, 21 nt, Human
agagcugggacuugccugaga

SEQ ID NO: 31613 - RNA, 22 nt, Human
agagcuggggcauaaaugccac

SEQ ID NO: 31614 - RNA, 22 nt, Human
agagcuggggcucuggguuuaa

SEQ ID NO: 31615 - RNA, 22 nt, Human
agagcuggguggacuuguaguu

SEQ ID NO: 31616 - RNA, 22 nt, Human
agagcuguauccccuuaccagu

SEQ ID NO: 31617 - RNA, 22 nt, Human
agagcuguguccugugcacuag

SEQ ID NO: 31618 - RNA, 22 nt, Human
agagcuguguuaagaacaggcc

SEQ ID NO: 31619 - RNA, 22 nt, Human
agagcuguucagcagccagguu

SEQ ID NO: 31620 - RNA, 22 nt, Human
agaaaguuaaacagugauaaga

SEQ ID NO: 31621 - RNA, 22 nt, Human
agaaaguuuauuucuugaugga

SEQ ID NO: 31622 - RNA, 22 nt, Human
agaaaguuuggggcugggcacg

SEQ ID NO: 31623 - RNA, 23 nt, Human
agaaaguuugugccuugugacac

SEQ ID NO: 31624 - RNA, 22 nt, Human
agaaaguuuguuuuuauccaua

SEQ ID NO: 31625 - RNA, 22 nt, Human
agaaauacuaggaauauucaua

SEQ ID NO: 31626 - RNA, 22 nt, Human
agaaauacuuaaucuuugcagg

SEQ ID NO: 31627 - RNA, 19 nt, Human
agaaauagccuuccuuguc

SEQ ID NO: 31628 - RNA, 22 nt, Human
agaaaucacaggaggcagaagg

SEQ ID NO: 31629 - RNA, 22 nt, Human
agaaaucacuuaaugaacguag

SEQ ID NO: 31630 - RNA, 22 nt, Human
agaaaucacuuagaggaaguga

SEQ ID NO: 31631 - RNA, 22 nt, Human
agaaaucagaacccugaaguuc

SEQ ID NO: 31632 - RNA, 22 nt, Human
agaaaucaugacuaagagcagu

SEQ ID NO: 31633 - RNA, 22 nt, Human
agaaaucuaagaugcucaagga

SEQ ID NO: 31634 - RNA, 22 nt, Human
agaaaucuauuauuucagaguu

SEQ ID NO: 31635 - RNA, 19 nt, Human
agaaaucucgagauuuguu

SEQ ID NO: 31636 - RNA, 22 nt, Human
agaaaucuuuccugaaguguuu

SEQ ID NO: 31637 - RNA, 22 nt, Human
agaaaugaagagagucaagguu

SEQ ID NO: 31638 - RNA, 22 nt, Human
agaaauggaaauccaagcaacu

SEQ ID NO: 31639 - RNA, 22 nt, Human
agaaauggugagugagagcccc

SEQ ID NO: 31640 - RNA, 22 nt, Human
agaaaugucaggaaagaagucc

SEQ ID NO: 31641 - RNA, 22 nt, Human
agaaauguggaggaacagggcu

SEQ ID NO: 31642 - RNA, 22 nt, Human
agaaauguggaucguuuuaaaa

SEQ ID NO: 31643 - RNA, 22 nt, Human
agaaauuaggaaaguaacacuu

SEQ ID NO: 31644 - RNA, 22 nt, Human
agaaauuauuagugaauagucu

SEQ ID NO: 31645 - RNA, 22 nt, Human
agaaauucaauucuaauuagcu

SEQ ID NO: 31646 - RNA, 22 nt, Human
agaacaaggcuguuuccaaugc

SEQ ID NO: 31647 - RNA, 22 nt, Human
agaacacauagagaaguuuuau

SEQ ID NO: 31648 - RNA, 22 nt, Human
agaacacugcuaguauaaucac

SEQ ID NO: 31649 - RNA, 22 nt, Human
agaacagaggccuuauguuuca

SEQ ID NO: 31650 - RNA, 22 nt, Human
agaacagcaacaucagacaaag

SEQ ID NO: 31651 - RNA, 22 nt, Human
agaacagcagcacgucaagcug

SEQ ID NO: 31652 - RNA, 22 nt, Human
agaacagcugcaaaacuuaauc

SEQ ID NO: 31653 - RNA, 22 nt, Human
agaacagggacuggaggcuuca

SEQ ID NO: 31654 - RNA, 23 nt, Human
agaacagugacuaauauagagag

SEQ ID NO: 31655 - RNA, 22 nt, Human
agaacaguuuguuggagacugu

SEQ ID NO: 31656 - RNA, 22 nt, Human
agauauauuuccugcccaaggc

SEQ ID NO: 31657 - RNA, 22 nt, Human
agauaucuccagugaugcucgu

SEQ ID NO: 31658 - RNA, 22 nt, Human
agauaucugaugaaaauacucu

SEQ ID NO: 31659 - RNA, 22 nt, Human
agauauggccucauacagacau

SEQ ID NO: 31660 - RNA, 22 nt, Human
agaagagaguccuaccccauac

SEQ ID NO: 31661 - RNA, 22 nt, Human
agaagagcccuuuaagggggaa

SEQ ID NO: 31662 - RNA, 20 nt, Human
agaagaggauacaaccaggc

SEQ ID NO: 31663 - RNA, 22 nt, Human
agaagaugacuuuggaguugga

SEQ ID NO: 31664 - RNA, 22 nt, Human
agaagauuaugaauuagagcag

SEQ ID NO: 31665 - RNA, 22 nt, Human
agaagcaccugucagcuacaug

SEQ ID NO: 31666 - RNA, 22 nt, Human
agaagcacgguuuugucuagca

SEQ ID NO: 31667 - RNA, 22 nt, Human
agaagcagaaaagggcacuuuu

SEQ ID NO: 31668 - RNA, 22 nt, Human
agaagcaggccucacagaucug

SEQ ID NO: 31669 - RNA, 22 nt, Human
agaagccaaaggggccagauau

SEQ ID NO: 31670 - RNA, 22 nt, Human
agaagccaaucagcucucugcu

SEQ ID NO: 31671 - RNA, 22 nt, Human
agaagccaccagcugaggaaga

SEQ ID NO: 31672 - RNA, 18 nt, Human
agaagccacgaggagucc

SEQ ID NO: 31673 - RNA, 22 nt, Human
agaagccacugcucccagugag

SEQ ID NO: 31674 - RNA, 22 nt, Human
agaagccacuggagguugagau

SEQ ID NO: 31675 - RNA, 22 nt, Human
agaagccagccuugccuccuuu

SEQ ID NO: 31676 - RNA, 22 nt, Human
agaagccauagucugggaggca

SEQ ID NO: 31677 - RNA, 22 nt, Human
agaagccaugguaugcaacuac

SEQ ID NO: 31678 - RNA, 19 nt, Human
agaagcccagaucccagcc

SEQ ID NO: 31679 - RNA, 18 nt, Human
agaagccugccucaaugc

SEQ ID NO: 31680 - RNA, 21 nt, Human
agaagccuggggaauguggcu

SEQ ID NO: 31681 - RNA, 22 nt, Human
agaagcuacugggauauuaauu

SEQ ID NO: 31682 - RNA, 22 nt, Human
agaagcuaggcuagacaaguga

SEQ ID NO: 31683 - RNA, 20 nt, Human
agaagcugauacugauggaa

SEQ ID NO: 31684 - RNA, 22 nt, Human
agaagcuggaggaagacuaagc

SEQ ID NO: 31685 - RNA, 22 nt, Human
agaaggaaggcugagugcugau

SEQ ID NO: 31686 - RNA, 22 nt, Human
agaaggcaccguggccaauauu

SEQ ID NO: 31687 - RNA, 22 nt, Human
agaaggcagaaaguccagguau

SEQ ID NO: 31688 - RNA, 20 nt, Human
agaaggcauuccucauucuu

SEQ ID NO: 31689 - RNA, 22 nt, Human
agaaggccaauagggugcacug

SEQ ID NO: 31690 - RNA, 22 nt, Human
agaaggccagauggacggggcu

SEQ ID NO: 31691 - RNA, 22 nt, Human
agaaggccuagaguaagacauu

SEQ ID NO: 31692 - RNA, 22 nt, Human
agaaggcugaagaagauccguu

SEQ ID NO: 31693 - RNA, 22 nt, Human
agaaggcuggccauggugcccu

SEQ ID NO: 31694 - RNA, 22 nt, Human
agaaggcuggcccuggguggcc

SEQ ID NO: 31695 - RNA, 22 nt, Human
agaaggcuuuaaguacuggcau

SEQ ID NO: 31696 - RNA, 22 nt, Human
agaagggaacucagagaugauu

SEQ ID NO: 31697 - RNA, 22 nt, Human
agaagggccagcuggacaccug

SEQ ID NO: 31698 - RNA, 22 nt, Human
agaagggcuacacgggcucucc

SEQ ID NO: 31699 - RNA, 22 nt, Human
agaaggggagaagcuaccagga

SEQ ID NO: 31700 - RNA, 22 nt, Human
agaaggguaguuguaagaguga

SEQ ID NO: 31701 - RNA, 23 nt, Human
agaaggguccuuggcagcgacag

SEQ ID NO: 31702 - RNA, 22 nt, Human
agaaguaggcagggcuguauca

SEQ ID NO: 31703 - RNA, 22 nt, Human
agaaguaguccaguggaaagua

SEQ ID NO: 31704 - RNA, 22 nt, Human
agaaguauaaagaauguuuaug

SEQ ID NO: 31705 - RNA, 22 nt, Human
agaaguaucaggaagauucuca

SEQ ID NO: 31706 - RNA, 22 nt, Human
agaaguauucugcauguacuga

SEQ ID NO: 31707 - RNA, 22 nt, Human
agaagucugguugcaaagcgcu

SEQ ID NO: 31708 - RNA, 22 nt, Human
agaagugagacucaguugauga

SEQ ID NO: 31709 - RNA, 22 nt, Human
agaagugaggaaauccucuuua

SEQ ID NO: 31710 - RNA, 22 nt, Human
agaaguggucugucuuccagau

SEQ ID NO: 31711 - RNA, 22 nt, Human
agaagugguguguggccgagcu

SEQ ID NO: 31712 - RNA, 22 nt, Human
agaaguuguagguuugcauauu

SEQ ID NO: 31713 - RNA, 22 nt, Human
agaaguuugguccuauaaacuc

SEQ ID NO: 31714 - RNA, 22 nt, Human
agaauaaaucaaauguccugag

SEQ ID NO: 31715 - RNA, 22 nt, Human
agaauaaaugcuaccuaucaca

SEQ ID NO: 31716 - RNA, 22 nt, Human
agaauacaguaggagccugggc

SEQ ID NO: 31717 - RNA, 22 nt, Human
agaauaccauaauauagaaaga

SEQ ID NO: 31718 - RNA, 22 nt, Human
agaauacccaucccuucaacuc

SEQ ID NO: 31719 - RNA, 22 nt, Human
agaauacuugggaauggguuaa

SEQ ID NO: 31720 - RNA, 22 nt, Human
agaauaguggcaaugacugcac

SEQ ID NO: 31721 - RNA, 22 nt, Human
agaauauaugacugcaagacua

SEQ ID NO: 31722 - RNA, 22 nt, Human
agaauaugaggaaacugugaau

SEQ ID NO: 31723 - RNA, 22 nt, Human
agaauaugaucggaauacagau

SEQ ID NO: 31724 - RNA, 22 nt, Human
agaauaugaugguuggagaauu

SEQ ID NO: 31725 - RNA, 22 nt, Human
agaaucaaggugaagcccacag

SEQ ID NO: 31726 - RNA, 22 nt, Human
agaaucaggaagacagccuggc

SEQ ID NO: 31727 - RNA, 22 nt, Human
agaaucaggaccuguggcuguc

SEQ ID NO: 31728 - RNA, 21 nt, Human
agaaucauuuuucccuucucu

SEQ ID NO: 31729 - RNA, 21 nt, Human
agaauccauucagaccuucuc

SEQ ID NO: 31730 - RNA, 22 nt, Human
agaauccgcuugacuuugaagu

SEQ ID NO: 31731 - RNA, 22 nt, Human
agaauccuugacucaggcugag

SEQ ID NO: 31732 - RNA, 22 nt, Human
agaaucuaaguacacagacaga

SEQ ID NO: 31733 - RNA, 22 nt, Human
agaaucuacauuuuaacaagau

SEQ ID NO: 31734 - RNA, 20 nt, Human
agaaucugacccagagagac

SEQ ID NO: 31735 - RNA, 22 nt, Human
agaaucugcauuuuaacaagcc

SEQ ID NO: 31736 - RNA, 22 nt, Human
agaaucuucagaugauuuguca

SEQ ID NO: 31737 - RNA, 22 nt, Human
agaaucuucagucuaauuccua

SEQ ID NO: 31738 - RNA, 22 nt, Human
agaaucuuucugaaugacugug

SEQ ID NO: 31739 - RNA, 22 nt, Human
agaaugauacucuaugccaaau

SEQ ID NO: 31740 - RNA, 22 nt, Human
agaaugauagcuaguauuuacu

SEQ ID NO: 31741 - RNA, 22 nt, Human
agaaugcaguuugaaauaaggu

SEQ ID NO: 31742 - RNA, 22 nt, Human
agaaugcaucuaaaagcagaga

SEQ ID NO: 31743 - RNA, 22 nt, Human
agaaugugaagauuuugaauua

SEQ ID NO: 31744 - RNA, 22 nt, Human
agaaugugggggaaaagagugu

SEQ ID NO: 31745 - RNA, 22 nt, Human
agaaugugugauugaagcucuu

SEQ ID NO: 31746 - RNA, 21 nt, Human
agaauuaaauuggauuugugu

SEQ ID NO: 31747 - RNA, 22 nt, Human
agaauuagaggccauguacuug

SEQ ID NO: 31748 - RNA, 22 nt, Human
agaauucagaaugcauuucuaa

SEQ ID NO: 31749 - RNA, 22 nt, Human
agaauucucuuccauugaaaca

SEQ ID NO: 31750 - RNA, 22 nt, Human
agaauugcuaacucuccuccug

SEQ ID NO: 31751 - RNA, 18 nt, Human
agaauugcugcuucuucu

SEQ ID NO: 31752 - RNA, 23 nt, Human
agaauuguuguuagggaaaagua

SEQ ID NO: 31753 - RNA, 19 nt, Human
agaauuguuuuaugucuuc

SEQ ID NO: 31754 - RNA, 22 nt, Human
agaauuucaaauggaaguuuua

SEQ ID NO: 31755 - RNA, 22 nt, Human
agaauuuccuaugagagauucc

SEQ ID NO: 31756 - RNA, 22 nt, Human
agaauuucuggaagauugcaag

SEQ ID NO: 31757 - RNA, 18 nt, Human
agacaaacuucuucugcc

SEQ ID NO: 31758 - RNA, 22 nt, Human
agacaaaggauuaaugaugaug

SEQ ID NO: 31759 - RNA, 22 nt, Human
agacaacaccaaaugcuagugu

SEQ ID NO: 31760 - RNA, 22 nt, Human
agacaacugcagagcaaagaau

SEQ ID NO: 31761 - RNA, 22 nt, Human
agacaagaaacugggagucucu

SEQ ID NO: 31762 - RNA, 22 nt, Human
agacaagacuaggcaguuguug

SEQ ID NO: 31763 - RNA, 22 nt, Human
agacaagagcugaggacauauu

SEQ ID NO: 31764 - RNA, 22 nt, Human
agacaaggcuggaguuuaggca

SEQ ID NO: 31765 - RNA, 20 nt, Human
agcaaaaugcaagauuuuca

SEQ ID NO: 31766 - RNA, 22 nt, Human
agcaaacaguuucuggggaucu

SEQ ID NO: 31767 - RNA, 22 nt, Human
agcaaagaaggguucuucauua

SEQ ID NO: 31768 - RNA, 18 nt, Human
agcaaagcaagagaucac

SEQ ID NO: 31769 - RNA, 20 nt, Human
agcaaagccuuuagaguuug

SEQ ID NO: 31770 - RNA, 22 nt, Human
agcaaagcuaccaauuauugag

SEQ ID NO: 31771 - RNA, 22 nt, Human
agcaaaguggcuuuccaaacca

SEQ ID NO: 31772 - RNA, 22 nt, Human
agcaaaguuaagguuucucuuu

SEQ ID NO: 31773 - RNA, 22 nt, Human
agcaaauggguuuauauuugac

SEQ ID NO: 31774 - RNA, 18 nt, Human
agcaacagaaacauaugg

SEQ ID NO: 31775 - RNA, 22 nt, Human
agcaacagguuuauuaucuuau

SEQ ID NO: 31776 - RNA, 22 nt, Human
agcaacaguguauaucauaggc

SEQ ID NO: 31777 - RNA, 19 nt, Human
agcaaccugucagagaugc

SEQ ID NO: 31778 - RNA, 22 nt, Human
agcaacuuuauuccacugggca

SEQ ID NO: 31779 - RNA, 22 nt, Human
agcugaacgugcuucugcagca

SEQ ID NO: 31780 - RNA, 22 nt, Human
agcugaagaccucaaguaagag

SEQ ID NO: 31781 - RNA, 22 nt, Human
agcugaagcagucaguucagcu

SEQ ID NO: 31782 - RNA, 22 nt, Human
agcugaagcucagcccaguagu

SEQ ID NO: 31783 - RNA, 22 nt, Human
agcugaagggaggauauguaca

SEQ ID NO: 31784 - RNA, 22 nt, Human
agcugaaguucaguccagagaa

SEQ ID NO: 31785 - RNA, 22 nt, Human
agcugaccaaaugccuacaguu

SEQ ID NO: 31786 - RNA, 17 nt, Human
agcugaccagauggacu

SEQ ID NO: 31787 - RNA, 22 nt, Human
agcugagagguggcaagcugua

SEQ ID NO: 31788 - RNA, 22 nt, Human
agcugagauuaugcucuucuca

SEQ ID NO: 31789 - RNA, 22 nt, Human
agcugagcacauucaaacaggu

SEQ ID NO: 31790 - RNA, 17 nt, Human
agcugagcuggccaggg

SEQ ID NO: 31791 - RNA, 22 nt, Human
agcugaggaggaaugaugggua

SEQ ID NO: 31792 - RNA, 22 nt, Human
agcugaggcaugaugcuaucag

SEQ ID NO: 31793 - RNA, 22 nt, Human
agcugaggccugauuucgccgu

SEQ ID NO: 31794 - RNA, 22 nt, Human
agcugaggcucugagagggaag

SEQ ID NO: 31795 - RNA, 18 nt, Human
agcugaggggacugaaga

SEQ ID NO: 31796 - RNA, 21 nt, Human
agcugagguaaggcaagagag

SEQ ID NO: 31797 - RNA, 21 nt, Human
agcugcaaaaacauacaguuc

SEQ ID NO: 31798 - RNA, 20 nt, Human
agcugcaacagacuguaugg

SEQ ID NO: 31799 - RNA, 22 nt, Human
agcugcaaccuuagcuauaggc

SEQ ID NO: 31800 - RNA, 23 nt, Human
agcugcaagacucccugucugag

SEQ ID NO: 31801 - RNA, 22 nt, Human
agcugcaaguccaaaggaauua

SEQ ID NO: 31802 - RNA, 22 nt, Human
agcugcaccggcuggaccacug

SEQ ID NO: 31803 - RNA, 20 nt, Human
agcugcagaacccacuggac

SEQ ID NO: 31804 - RNA, 19 nt, Human
agcugcagaccagaagugc

SEQ ID NO: 31805 - RNA, 18 nt, Human
agcugcagaccaggaggu

SEQ ID NO: 31806 - RNA, 22 nt, Human
agcugcagagaaaagaggcugg

SEQ ID NO: 31807 - RNA, 22 nt, Human
agcugcagauaggauguuauuu

SEQ ID NO: 31808 - RNA, 17 nt, Human
agcugcagaugaaguug

SEQ ID NO: 31809 - RNA, 23 nt, Human
agcugcagaugcucagcgggcag

SEQ ID NO: 31810 - RNA, 22 nt, Human
agcugcagauucucuacuucau

SEQ ID NO: 31811 - RNA, 22 nt, Human
agcugcagcccuccugcauggc

SEQ ID NO: 31812 - RNA, 22 nt, Human
agcugcaggagucgccuaggau

SEQ ID NO: 31813 - RNA, 22 nt, Human
agcugcaguaugaggcuggugg

SEQ ID NO: 31814 - RNA, 22 nt, Human
agcugcauuucagugaaauauu

SEQ ID NO: 31815 - RNA, 22 nt, Human
agcugccaaguuucucaguuua

SEQ ID NO: 31816 - RNA, 22 nt, Human
agcugccacagagccuggccag

SEQ ID NO: 31817 - RNA, 21 nt, Human
agcugccacccuagcuucuga

SEQ ID NO: 31818 - RNA, 22 nt, Human
agcugccacugagggugcacag

SEQ ID NO: 31819 - RNA, 22 nt, Human
agcugccagaugacagugcuau

SEQ ID NO: 31820 - RNA, 22 nt, Human
agcugccaucugaagaacugca

SEQ ID NO: 31821 - RNA, 22 nt, Human
agcugcccagcuaggaagaagg

SEQ ID NO: 31822 - RNA, 22 nt, Human
agcugcccagguucauugggcc

SEQ ID NO: 31823 - RNA, 22 nt, Human
agcugccccaugagaggcaggu

SEQ ID NO: 31824 - RNA, 22 nt, Human
agcugcccccagggcugugcuu

SEQ ID NO: 31825 - RNA, 22 nt, Human
agcugccccucauuuucaccac

SEQ ID NO: 31826 - RNA, 20 nt, Human
agcugccccugggcacugcc

SEQ ID NO: 31827 - RNA, 22 nt, Human
agcugcccucgcuggggccaga

SEQ ID NO: 31828 - RNA, 22 nt, Human
agcugccucagcaacacagacc

SEQ ID NO: 31829 - RNA, 22 nt, Human
agcugccuccauggucaaagau

SEQ ID NO: 31830 - RNA, 22 nt, Human
agcugccugggcuuguacaccu

SEQ ID NO: 31831 - RNA, 22 nt, Human
agcugccuguaaaaugugugau

SEQ ID NO: 31832 - RNA, 20 nt, Human
agcugccuucauuuucuaga

SEQ ID NO: 31833 - RNA, 22 nt, Human
agcugccuucccucucauuagg

SEQ ID NO: 31834 - RNA, 22 nt, Human
agcugcuaugacaacaccagcc

SEQ ID NO: 31835 - RNA, 22 nt, Human
agcugcucaggagagccagguc

SEQ ID NO: 31836 - RNA, 22 nt, Human
agcugcucauucccagcacaug

SEQ ID NO: 31837 - RNA, 22 nt, Human
agcugcuccaacccagcgggcu

SEQ ID NO: 31838 - RNA, 22 nt, Human
agcugcuccuuggcugugguuc

SEQ ID NO: 31839 - RNA, 22 nt, Human
agcugcucugggaaacagaagu

SEQ ID NO: 31840 - RNA, 22 nt, Human
agcugcugagagucugccgggc

SEQ ID NO: 31841 - RNA, 22 nt, Human
agcugcugccucacuggucugu

SEQ ID NO: 31842 - RNA, 21 nt, Human
agcugcuucaccuggacaaca

SEQ ID NO: 31843 - RNA, 21 nt, Human
agcugcuuucagcuccuagag

SEQ ID NO: 31844 - RNA, 22 nt, Human
agcuggaacuggguuuguugga

SEQ ID NO: 31845 - RNA, 22 nt, Human
agcuggaagugcauuucucacu

SEQ ID NO: 31846 - RNA, 22 nt, Human
agcuggagaauguggaugaucc

SEQ ID NO: 31847 - RNA, 22 nt, Human
agcuggcaccaaauauaguaaa

SEQ ID NO: 31848 - RNA, 19 nt, Human
agcuggcacuagaauccag

SEQ ID NO: 31849 - RNA, 22 nt, Human
agcuggcagcucucagggguac

SEQ ID NO: 31850 - RNA, 22 nt, Human
agcuggcagggguucacacugc

SEQ ID NO: 31851 - RNA, 22 nt, Human
agcuggcaguaugacuggugac

SEQ ID NO: 31852 - RNA, 22 nt, Human
agcuggcagucauccuagugag

SEQ ID NO: 31853 - RNA, 22 nt, Human
agcuggcauucuccuuguuauu

SEQ ID NO: 31854 - RNA, 22 nt, Human
agcuggcauugaagaaugguua

SEQ ID NO: 31855 - RNA, 22 nt, Human
agcuggccucacugcagaaugc

SEQ ID NO: 31856 - RNA, 20 nt, Human
agcuggccuguccuaggccu

SEQ ID NO: 31857 - RNA, 22 nt, Human
agcuggccuguuagagcugagu

SEQ ID NO: 31858 - RNA, 22 nt, Human
agcuggccuucggugucacugg

SEQ ID NO: 31859 - RNA, 22 nt, Human
agcuggcuauacuugaaaaguc

SEQ ID NO: 31860 - RNA, 22 nt, Human
agcuggcucagccggguggucu

SEQ ID NO: 31861 - RNA, 22 nt, Human
agcuggcuccagaaggagucgu

SEQ ID NO: 31862 - RNA, 22 nt, Human
agcuggcugccuucuccuuagg

SEQ ID NO: 31863 - RNA, 22 nt, Human
agcuggcugggugccagucucc

SEQ ID NO: 31864 - RNA, 22 nt, Human
agcuggcuucucugcagacauu

SEQ ID NO: 31865 - RNA, 22 nt, Human
agcuggcuuuaugguuggcuaa

SEQ ID NO: 31866 - RNA, 22 nt, Human
agcugggaagaguuuucugcag

SEQ ID NO: 31867 - RNA, 20 nt, Human
agcugggcaauuaugacuau

SEQ ID NO: 31868 - RNA, 22 nt, Human
agcugggcaccccgcugcgucu

SEQ ID NO: 31869 - RNA, 19 nt, Human
agcugggcuuacucacucg

SEQ ID NO: 31870 - RNA, 19 nt, Human
agcuggggcgguguguguu

SEQ ID NO: 31871 - RNA, 22 nt, Human
agcuggggcugcagagaacagg

SEQ ID NO: 31872 - RNA, 22 nt, Human
agcugggguugcacacauuuug

SEQ ID NO: 31873 - RNA, 22 nt, Human
agcugggucuugggccaggaga

SEQ ID NO: 31874 - RNA, 22 nt, Human
agcuggguggccucuccucggg

SEQ ID NO: 31875 - RNA, 22 nt, Human
agagacaagaaauaccugggac

SEQ ID NO: 31876 - RNA, 19 nt, Human
agagacacagguaaguagg

SEQ ID NO: 31877 - RNA, 22 nt, Human
agagacagacacaucgggcugc

SEQ ID NO: 31878 - RNA, 18 nt, Human
agagacagcagcaaaaga

SEQ ID NO: 31879 - RNA, 22 nt, Human
agagacaggauaucugcucaug

SEQ ID NO: 31880 - RNA, 22 nt, Human
agagacaggguuuugucguguu

SEQ ID NO: 31881 - RNA, 22 nt, Human
agagacaugcaguuguugugaa

SEQ ID NO: 31882 - RNA, 23 nt, Human
agagacauuuggauacagaaaca

SEQ ID NO: 31883 - RNA, 22 nt, Human
agagacccauugccggaaucac

SEQ ID NO: 31884 - RNA, 22 nt, Human
agagacugcaaaucauaagaau

SEQ ID NO: 31885 - RNA, 22 nt, Human
agagacugcgugucagcgcugg

SEQ ID NO: 31886 - RNA, 22 nt, Human
agagacuguacguggcaaguau

SEQ ID NO: 31887 - RNA, 21 nt, Human
agagacugucacugcaguacc

SEQ ID NO: 31888 - RNA, 22 nt, Human
agagagaagcaaucaguggcca

SEQ ID NO: 31889 - RNA, 17 nt, Human
agagagagcaugccacc

SEQ ID NO: 31890 - RNA, 20 nt, Human
agagagagguaaauugagca

SEQ ID NO: 31891 - RNA, 23 nt, Human
agagagaguuugugucagguacc

SEQ ID NO: 31892 - RNA, 22 nt, Human
agagagccugaguggcagcuau

SEQ ID NO: 31893 - RNA, 22 nt, Human
agagagcucuggcugggugacc

SEQ ID NO: 31894 - RNA, 22 nt, Human
agagccuugccuggggcccugu

SEQ ID NO: 31895 - RNA, 21 nt, Human
agagcggcggggcgcgucugc

SEQ ID NO: 31896 - RNA, 22 nt, Human
agagcuaagaaacagaauugcu

SEQ ID NO: 31897 - RNA, 22 nt, Human
agagcuauaacagcacuguaca

SEQ ID NO: 31898 - RNA, 22 nt, Human
agagcuauauacagauuauuga

SEQ ID NO: 31899 - RNA, 22 nt, Human
agagcuauuucuuaaaagcugu

SEQ ID NO: 31900 - RNA, 22 nt, Human
agagcucaguguguuaugguua

SEQ ID NO: 31901 - RNA, 22 nt, Human
agagcugaaaaagcugacccgg

SEQ ID NO: 31902 - RNA, 22 nt, Human
agagcugaauucaagugcuggc

SEQ ID NO: 31903 - RNA, 22 nt, Human
agagcugcccacacagcagauu

SEQ ID NO: 31904 - RNA, 22 nt, Human
agagcuggaaaaguuguuuuaa

SEQ ID NO: 31905 - RNA, 22 nt, Human
agagcuggaaucagaccucagg

SEQ ID NO: 31906 - RNA, 22 nt, Human
agagcuggcagcagcuucuccu

SEQ ID NO: 31907 - RNA, 21 nt, Human
agagcuggccugccaggcccu

SEQ ID NO: 31908 - RNA, 22 nt, Human
agagcuggcugcugcggugcuu

SEQ ID NO: 31909 - RNA, 22 nt, Human
agagcugggaccgucuggaagu

SEQ ID NO: 31910 - RNA, 22 nt, Human
agagcuggggcccguaaagcca

SEQ ID NO: 31911 - RNA, 21 nt, Human
agagcugguagguagguaggu

SEQ ID NO: 31912 - RNA, 22 nt, Human
agagcuguagcuuccuagagcc

SEQ ID NO: 31913 - RNA, 22 nt, Human
agagcugucacauagagccaga

SEQ ID NO: 31914 - RNA, 22 nt, Human
agagcugucagcguuuuggcca

SEQ ID NO: 31915 - RNA, 22 nt, Human
agagcugugcuuugcaccacgu

SEQ ID NO: 31916 - RNA, 22 nt, Human
agagcuguucaacguagcaaug

SEQ ID NO: 31917 - RNA, 22 nt, Human
agagcuguuuggacaucugagu

SEQ ID NO: 31918 - RNA, 22 nt, Human
agagcuuuagcugcuggucugg

SEQ ID NO: 31919 - RNA, 22 nt, Human
agagcuuuuacuuacauucuau

SEQ ID NO: 31920 - RNA, 22 nt, Human
agagcuuuugggaauucaggua

SEQ ID NO: 31921 - RNA, 22 nt, Human
agaggaaacauagguuuuuaaa

SEQ ID NO: 31922 - RNA, 21 nt, Human
agaggaagaagaguguauuau

SEQ ID NO: 31923 - RNA, 22 nt, Human
agaggaagccauugcuuacuga

SEQ ID NO: 31924 - RNA, 22 nt, Human
agaggaauuucuggaaggaggc

SEQ ID NO: 31925 - RNA, 22 nt, Human
agaggacagcccccuugucugg

SEQ ID NO: 31926 - RNA, 22 nt, Human
agaggaggaagagcuuuaaaau

SEQ ID NO: 31927 - RNA, 22 nt, Human
agaggaggauuuguaaaggucu

SEQ ID NO: 31928 - RNA, 22 nt, Human
agaggaggccaggcccacaccu

SEQ ID NO: 31929 - RNA, 22 nt, Human
agaggaggcucugggaucgucc

SEQ ID NO: 31930 - RNA, 22 nt, Human
agaggagguggugaugcuuuaa

SEQ ID NO: 31931 - RNA, 22 nt, Human
agaggaucaucuaguuugacuc

SEQ ID NO: 31932 - RNA, 18 nt, Human
agaggaugcaucuaagag

SEQ ID NO: 31933 - RNA, 22 nt, Human
agaggauguucuaggcacucau

SEQ ID NO: 31934 - RNA, 22 nt, Human
agaggauuguuacugauuagcu

SEQ ID NO: 31935 - RNA, 22 nt, Human
agaggauuuuaaaagcauaugu

SEQ ID NO: 31936 - RNA, 22 nt, Human
agaggcaaggcaggauucuucu

SEQ ID NO: 31937 - RNA, 22 nt, Human
agaggcacaaacuggaaaggac

SEQ ID NO: 31938 - RNA, 22 nt, Human
agaggcacaacagucccauugu

SEQ ID NO: 31939 - RNA, 22 nt, Human
agaggcacagaggcaguccccu

SEQ ID NO: 31940 - RNA, 22 nt, Human
agaggcacccaguuaagcugca

SEQ ID NO: 31941 - RNA, 22 nt, Human
agaggcacggaggcugcaugga

SEQ ID NO: 31942 - RNA, 22 nt, Human
agaggcagccguauuucaaagg

SEQ ID NO: 31943 - RNA, 23 nt, Human
agaggccaacuucuugccccucc

SEQ ID NO: 31944 - RNA, 22 nt, Human
agaggccaagccagacugugca

SEQ ID NO: 31945 - RNA, 22 nt, Human
agaggccaauaguagguggcau

SEQ ID NO: 31946 - RNA, 22 nt, Human
agaggccacaccagccucccgu

SEQ ID NO: 31947 - RNA, 22 nt, Human
agaggccaccacugucagggac

SEQ ID NO: 31948 - RNA, 22 nt, Human
agaggccaccuucucuugagaa

SEQ ID NO: 31949 - RNA, 22 nt, Human
agaggccacuuugccugugaug

SEQ ID NO: 31950 - RNA, 22 nt, Human
agaggccagaaaguaugccacc

SEQ ID NO: 31951 - RNA, 22 nt, Human
agaggccagaaggcgcaccccg

SEQ ID NO: 31952 - RNA, 22 nt, Human
agaggccagcaaccacaguaaa

SEQ ID NO: 31953 - RNA, 22 nt, Human
agaggccagcagugccuaucug

SEQ ID NO: 31954 - RNA, 22 nt, Human
agaggccagggacacugcucaa

SEQ ID NO: 31955 - RNA, 20 nt, Human
agaggccaguuaggagucua

SEQ ID NO: 31956 - RNA, 22 nt, Human
agaggcccucucugcucagucu

SEQ ID NO: 31957 - RNA, 22 nt, Human
agaggcccuggcuagagcagcu

SEQ ID NO: 31958 - RNA, 22 nt, Human
agaggccucaaaccagaccuga

SEQ ID NO: 31959 - RNA, 16 nt, Human
agaggccuugaggaag

SEQ ID NO: 31960 - RNA, 22 nt, Human
agaggccuuucuguugagugaa

SEQ ID NO: 31961 - RNA, 22 nt, Human
agaggcggagcuugcagugagc

SEQ ID NO: 31962 - RNA, 21 nt, Human
agaggcgggguuuuggaggcc

SEQ ID NO: 31963 - RNA, 22 nt, Human
agaggcuaggaccauguaucau

SEQ ID NO: 31964 - RNA, 22 nt, Human
agaggcuccgucaucccucuuu

SEQ ID NO: 31965 - RNA, 16 nt, Human
agaggcuguaauggaa

SEQ ID NO: 31966 - RNA, 22 nt, Human
agagggaaaaacucaugucauu

SEQ ID NO: 31967 - RNA, 18 nt, Human
agagggaaagcaggcuga

SEQ ID NO: 31968 - RNA, 22 nt, Human
agagggaaugugauugcaccau

SEQ ID NO: 31969 - RNA, 23 nt, Human
agagggagauguuuuucucaaga

SEQ ID NO: 31970 - RNA, 22 nt, Human
agagggagcuuuauuuuucugu

SEQ ID NO: 31971 - RNA, 22 nt, Human
agagggcagcagcaacaacucu

SEQ ID NO: 31972 - RNA, 22 nt, Human
agagggcauuaacucugucuug

SEQ ID NO: 31973 - RNA, 21 nt, Human
agagggcgaaggcgggguccg

SEQ ID NO: 31974 - RNA, 22 nt, Human
agagggcugggaugugcugugu

SEQ ID NO: 31975 - RNA, 22 nt, Human
agagggcuuugauucucaguuc

SEQ ID NO: 31976 - RNA, 22 nt, Human
agaggggcucauauccugucau

SEQ ID NO: 31977 - RNA, 22 nt, Human
agaggguagaagacaggguugc

SEQ ID NO: 31978 - RNA, 22 nt, Human
agagggugagcagguacacaug

SEQ ID NO: 31979 - RNA, 22 nt, Human
agagggugggcacgugauggau

SEQ ID NO: 31980 - RNA, 22 nt, Human
agagguaugggcauggugcugu

SEQ ID NO: 31981 - RNA, 22 nt, Human
agagguauguucacuucccuuu

SEQ ID NO: 31982 - RNA, 22 nt, Human
agagguauugcacgugcucucu

SEQ ID NO: 31983 - RNA, 22 nt, Human
agaggucaaugggacuuggauc

SEQ ID NO: 31984 - RNA, 18 nt, Human
agccagguggaauggaac

SEQ ID NO: 31985 - RNA, 22 nt, Human
agccagguuaaaccacagucaa

SEQ ID NO: 31986 - RNA, 22 nt, Human
agccaguagaucgggaggaugu

SEQ ID NO: 31987 - RNA, 22 nt, Human
agccaguccaucacuaaugggu

SEQ ID NO: 31988 - RNA, 22 nt, Human
agccagucccuugagcgugccc

SEQ ID NO: 31989 - RNA, 22 nt, Human
agccagucggggccaugcuggg

SEQ ID NO: 31990 - RNA, 21 nt, Human
agccagucucaguacuguacu

SEQ ID NO: 31991 - RNA, 21 nt, Human
agccagucugccagagaagcc

SEQ ID NO: 31992 - RNA, 21 nt, Human
agccagucuguuuucuagugc

SEQ ID NO: 31993 - RNA, 22 nt, Human
agccagugacauacgauuggga

SEQ ID NO: 31994 - RNA, 22 nt, Human
agccagugggauuagagccucu

SEQ ID NO: 31995 - RNA, 22 nt, Human
agccaguuggcuaugaggagga

SEQ ID NO: 31996 - RNA, 22 nt, Human
agccaguuuccagauauuaacu

SEQ ID NO: 31997 - RNA, 22 nt, Human
agccaucacuugagaaucuauu

SEQ ID NO: 31998 - RNA, 22 nt, Human
agccaucauuucugucacuggc

SEQ ID NO: 31999 - RNA, 22 nt, Human
agccauccuccacagccuugau

SEQ ID NO: 32000 - RNA, 22 nt, Human
agccaugcucaguuccuggagc

SEQ ID NO: 32001 - RNA, 22 nt, Human
agccaugggcucccaguccuuu

SEQ ID NO: 32002 - RNA, 22 nt, Human
agccauguaugaggguuuccag

SEQ ID NO: 32003 - RNA, 22 nt, Human
agccauguuaaauggacuugau

SEQ ID NO: 32004 - RNA, 22 nt, Human
agccauucauugugcucucaga

SEQ ID NO: 32005 - RNA, 22 nt, Human
agcccaagaagagcuuucuugc

SEQ ID NO: 32006 - RNA, 22 nt, Human
agcccaaggcuucccugcuggc

SEQ ID NO: 32007 - RNA, 23 nt, Human
agcccaccuuguuaguccugugg

SEQ ID NO: 32008 - RNA, 22 nt, Human
agcccagagacaaugcucagua

SEQ ID NO: 32009 - RNA, 22 nt, Human
agcccagagccccggccauguu

SEQ ID NO: 32010 - RNA, 22 nt, Human
agcccagcagaaaguccagccu

SEQ ID NO: 32011 - RNA, 22 nt, Human
agcccagcccgggcugcgcuuu

SEQ ID NO: 32012 - RNA, 22 nt, Human
agcccagcuuucaccccucugg

SEQ ID NO: 32013 - RNA, 22 nt, Human
agcccaggagguggagguugca

SEQ ID NO: 32014 - RNA, 22 nt, Human
agcccagggaguugauuagcau

SEQ ID NO: 32015 - RNA, 22 nt, Human
agcccaggucucaaaguacagg

SEQ ID NO: 32016 - RNA, 22 nt, Human
agcccaggugacucauacaccc

SEQ ID NO: 32017 - RNA, 22 nt, Human
agcccaggugagggguucgaaa

SEQ ID NO: 32018 - RNA, 22 nt, Human
agcccagguggagugugugggg

SEQ ID NO: 32019 - RNA, 22 nt, Human
agcccaugcagaccuucccaga

SEQ ID NO: 32020 - RNA, 22 nt, Human
agcccaugguguacucuguggc

SEQ ID NO: 32021 - RNA, 22 nt, Human
agccccacacucucucugagaa

SEQ ID NO: 32022 - RNA, 22 nt, Human
agccccaggaugggccgcagga

SEQ ID NO: 32023 - RNA, 17 nt, Human
agcccccacucccaagu

SEQ ID NO: 32024 - RNA, 22 nt, Human
agcccccaggagucuccacgcc

SEQ ID NO: 32025 - RNA, 22 nt, Human
agcccccagucuaaacuguugg

SEQ ID NO: 32026 - RNA, 22 nt, Human
agcccccucccuagugacugga

SEQ ID NO: 32027 - RNA, 17 nt, Human
agccccucagcgucacc

SEQ ID NO: 32028 - RNA, 23 nt, Human
agccccucauggugucuagacag

SEQ ID NO: 32029 - RNA, 22 nt, Human
agccccugcuggguguagcuca

SEQ ID NO: 32030 - RNA, 22 nt, Human
agccccuuccaguucucagauc

SEQ ID NO: 32031 - RNA, 22 nt, Human
agccccuugcacuuccccacgc

SEQ ID NO: 32032 - RNA, 22 nt, Human
agcccuaaauuaucuuuauuuu

SEQ ID NO: 32033 - RNA, 22 nt, Human
agcccuaacucccaguaucuug

SEQ ID NO: 32034 - RNA, 22 nt, Human
agcccucaggcuuugcugggcc

SEQ ID NO: 32035 - RNA, 22 nt, Human
agcccuccaaagguugggggag

SEQ ID NO: 32036 - RNA, 22 nt, Human
agcccuccuggggccacgcugg

SEQ ID NO: 32037 - RNA, 22 nt, Human
agcccuccuuuguucaugcugc

SEQ ID NO: 32038 - RNA, 22 nt, Human
agcccucugagcuagucaccau

SEQ ID NO: 32039 - RNA, 22 nt, Human
agcccugagcuggccugggcuu

SEQ ID NO: 32040 - RNA, 22 nt, Human
agcccugcaggaugagggaggu

SEQ ID NO: 32041 - RNA, 22 nt, Human
agcccugcauagaagggaacac

SEQ ID NO: 32042 - RNA, 22 nt, Human
agcccugccauucucuggagcu

SEQ ID NO: 32043 - RNA, 22 nt, Human
agcccugcgugccaggggacug

SEQ ID NO: 32044 - RNA, 22 nt, Human
aggcuucuuagauuggcuggag

SEQ ID NO: 32045 - RNA, 22 nt, Human
aggcuucuugauaaaaugcaga

SEQ ID NO: 32046 - RNA, 18 nt, Human
aggcuucuuggcucaguc

SEQ ID NO: 32047 - RNA, 22 nt, Human
aggcuugaaaugaaaucuguaa

SEQ ID NO: 32048 - RNA, 22 nt, Human
aggcuugauuuguccugcuuaa

SEQ ID NO: 32049 - RNA, 21 nt, Human
aggcuuggauagauauucaua

SEQ ID NO: 32050 - RNA, 19 nt, Human
aggcuuggauuguggccaa

SEQ ID NO: 32051 - RNA, 21 nt, Human
aggcuuggguaaaaaggucau

SEQ ID NO: 32052 - RNA, 22 nt, Human
aggcuugggucagaaggcuugu

SEQ ID NO: 32053 - RNA, 22 nt, Human
aggcuuggugccaaggagccug

SEQ ID NO: 32054 - RNA, 22 nt, Human
aggcuugucucagaagaugcug

SEQ ID NO: 32055 - RNA, 20 nt, Human
aggcuugugcuuugucacuc

SEQ ID NO: 32056 - RNA, 22 nt, Human
aggcuuuggggcauucuguguu

SEQ ID NO: 32057 - RNA, 22 nt, Human
aggcuuuuggagaagcauaugc

SEQ ID NO: 32058 - RNA, 22 nt, Human
agggaaauaaucuauucugagg

SEQ ID NO: 32059 - RNA, 23 nt, Human
agggaacaagcaagcugcuaguc

SEQ ID NO: 32060 - RNA, 22 nt, Human
agggaacagugaaaggcaucag

SEQ ID NO: 32061 - RNA, 22 nt, Human
agggaagcaauauuagauauca

SEQ ID NO: 32062 - RNA, 22 nt, Human
agggaagcaaugauuauuauuc

SEQ ID NO: 32063 - RNA, 22 nt, Human
agggaagccaagccuuagagaa

SEQ ID NO: 32064 - RNA, 22 nt, Human
agggaagcccuggcugagaccc

SEQ ID NO: 32065 - RNA, 22 nt, Human
agggaagcugcuggguccaccu

SEQ ID NO: 32066 - RNA, 22 nt, Human
agggaaggaaaagcugucgcuu

SEQ ID NO: 32067 - RNA, 22 nt, Human
agggaaggaggccauguguccc

SEQ ID NO: 32068 - RNA, 22 nt, Human
agggaagggaaaaacacucguc

SEQ ID NO: 32069 - RNA, 22 nt, Human
agggaauccaucuaucuucauu

SEQ ID NO: 32070 - RNA, 22 nt, Human
agggacacaugugauuauuuau

SEQ ID NO: 32071 - RNA, 22 nt, Human
agggacacugaugagaaauucu

SEQ ID NO: 32072 - RNA, 22 nt, Human
agggacaguauccaucucacag

SEQ ID NO: 32073 - RNA, 22 nt, Human
agggaccagccugcccagggcu

SEQ ID NO: 32074 - RNA, 22 nt, Human
agggaccagcgugagucugagg

SEQ ID NO: 32075 - RNA, 22 nt, Human
agggaccugucaaugacaguua

SEQ ID NO: 32076 - RNA, 22 nt, Human
agggacgccgugcgggaccgug

SEQ ID NO: 32077 - RNA, 22 nt, Human
agggacucccugggccgacacg

SEQ ID NO: 32078 - RNA, 22 nt, Human
agggacugagcuaggaucuagu

SEQ ID NO: 32079 - RNA, 22 nt, Human
agggacuuguguccuauguaug

SEQ ID NO: 32080 - RNA, 22 nt, Human
agggagaagguccaugccuguc

SEQ ID NO: 32081 - RNA, 22 nt, Human
agggagaagguuuagcugugag

SEQ ID NO: 32082 - RNA, 19 nt, Human
agggagaauuccaagagga

SEQ ID NO: 32083 - RNA, 22 nt, Human
agggagagacauuuccuucuug

SEQ ID NO: 32084 - RNA, 16 nt, Human
agggagagaggaacau

SEQ ID NO: 32085 - RNA, 22 nt, Human
agggagaguuugauguuuccuc

SEQ ID NO: 32086 - RNA, 23 nt, Human
agggagaugccacaaagaugccc

SEQ ID NO: 32087 - RNA, 22 nt, Human
agggagcaaagguuucaggguu

SEQ ID NO: 32088 - RNA, 22 nt, Human
agggagcagggcuccuuugggu

SEQ ID NO: 32089 - RNA, 21 nt, Human
agggagcuauuuauaguaagc

SEQ ID NO: 32090 - RNA, 22 nt, Human
agggagcucgaugccugagugu

SEQ ID NO: 32091 - RNA, 22 nt, Human
agggagcuucuacuucaaggca

SEQ ID NO: 32092 - RNA, 21 nt, Human
agggagcuuuagguagaaguu

SEQ ID NO: 32093 - RNA, 22 nt, Human
agccugugcuguguuugcucca

SEQ ID NO: 32094 - RNA, 22 nt, Human
agccuguggaucccugcacugg

SEQ ID NO: 32095 - RNA, 22 nt, Human
agccuuacauaaacagccuuau

SEQ ID NO: 32096 - RNA, 22 nt, Human
agccuucaaccuagcuagagca

SEQ ID NO: 32097 - RNA, 22 nt, Human
agccuucacugggaccuuggau

SEQ ID NO: 32098 - RNA, 23 nt, Human
agccuucaggcaaugucaguaga

SEQ ID NO: 32099 - RNA, 22 nt, Human
agccuucaguaagggcuuagca

SEQ ID NO: 32100 - RNA, 22 nt, Human
agccuuccagguagauggcaca

SEQ ID NO: 32101 - RNA, 22 nt, Human
agccuuuaacacuucacauuga

SEQ ID NO: 32102 - RNA, 22 nt, Human
agccuuuuggaguuauucuggg

SEQ ID NO: 32103 - RNA, 22 nt, Human
agcgacagaaaccaaggacaag

SEQ ID NO: 32104 - RNA, 22 nt, Human
agcgcccaggggcagggcucuc

SEQ ID NO: 32105 - RNA, 22 nt, Human
agcgcuggugaucucuauuuug

SEQ ID NO: 32106 - RNA, 22 nt, Human
agcgcugugggcgugcgaggag

SEQ ID NO: 32107 - RNA, 21 nt, Human
agcggcagacccugcauuuga

SEQ ID NO: 32108 - RNA, 22 nt, Human
agcggcugucggccagccggag

SEQ ID NO: 32109 - RNA, 22 nt, Human
agcgggucugcaagccuucccu

SEQ ID NO: 32110 - RNA, 22 nt, Human
agcggucaggagaaauaagcau

SEQ ID NO: 32111 - RNA, 22 nt, Human
agcguaugaauauuugaagaga

SEQ ID NO: 32112 - RNA, 22 nt, Human
agcguggauguggggcgcggcu

SEQ ID NO: 32113 - RNA, 22 nt, Human
agcuaaaucacuuauucuuuca

SEQ ID NO: 32114 - RNA, 22 nt, Human
agcuaaauguugcuuaaaauuu

SEQ ID NO: 32115 - RNA, 22 nt, Human
agcuaacaugacuagaagcuuc

SEQ ID NO: 32116 - RNA, 19 nt, Human
agcuaagacaagggacauc

SEQ ID NO: 32117 - RNA, 20 nt, Human
agcuaagaggaaaagugaga

SEQ ID NO: 32118 - RNA, 22 nt, Human
agcuaagauuuauuaaaggccc

SEQ ID NO: 32119 - RNA, 22 nt, Human
agcuaaggaugacuaguacuuc

SEQ ID NO: 32120 - RNA, 19 nt, Human
agcuaauggaaguuuacug

SEQ ID NO: 32121 - RNA, 17 nt, Human
agcuacaaggcaguuca

SEQ ID NO: 32122 - RNA, 20 nt, Human
agcuacaaugcgaagcuggc

SEQ ID NO: 32123 - RNA, 22 nt, Human
agcuacaccccuuuacaguccu

SEQ ID NO: 32124 - RNA, 22 nt, Human
agcuacagaugagcccaguauc

SEQ ID NO: 32125 - RNA, 22 nt, Human
agcuacagcuguacucugcagg

SEQ ID NO: 32126 - RNA, 22 nt, Human
agcuacccgaggacaggcuaag

SEQ ID NO: 32127 - RNA, 22 nt, Human
agcuagaacuacaggcaugugc

SEQ ID NO: 32128 - RNA, 22 nt, Human
agcuagaaguccuagauaaagg

SEQ ID NO: 32129 - RNA, 22 nt, Human
agcuagaauauugaucugaaau

SEQ ID NO: 32130 - RNA, 23 nt, Human
agcuagcauaaugucuggcuccu

SEQ ID NO: 32131 - RNA, 17 nt, Human
agcuagggccuagaauc

SEQ ID NO: 32132 - RNA, 22 nt, Human
agcuaguuaaacuaugaauaca

SEQ ID NO: 32133 - RNA, 23 nt, Human
agcuauaaaaucugugacagcag

SEQ ID NO: 32134 - RNA, 22 nt, Human
agcuaucaguaggaccauguuc

SEQ ID NO: 32135 - RNA, 22 nt, Human
agcuaucucaggcacucacauu

SEQ ID NO: 32136 - RNA, 22 nt, Human
agcuauggguguggguuccauu

SEQ ID NO: 32137 - RNA, 22 nt, Human
agcuaugguaaucauccaccaa

SEQ ID NO: 32138 - RNA, 22 nt, Human
agcuauugugugcccagcagga

SEQ ID NO: 32139 - RNA, 22 nt, Human
agcuauuuauugagcuccauug

SEQ ID NO: 32140 - RNA, 21 nt, Human
agcuauuucagauuugagagc

SEQ ID NO: 32141 - RNA, 22 nt, Human
agcucaaagcuguuacauugua

SEQ ID NO: 32142 - RNA, 22 nt, Human
agcucaauuuaaggcuuggcuu

SEQ ID NO: 32143 - RNA, 22 nt, Human
agcucacaccucaucagggugg

SEQ ID NO: 32144 - RNA, 18 nt, Human
agcucacagaucuguuuu

SEQ ID NO: 32145 - RNA, 22 nt, Human
agcucacauucucaucagaugu

SEQ ID NO: 32146 - RNA, 22 nt, Human
agcucagaaaugccaguaggua

SEQ ID NO: 32147 - RNA, 22 nt, Human
agcucagagauaaucaagagac

SEQ ID NO: 32148 - RNA, 22 nt, Human
agcucagagggaggugaagugg

SEQ ID NO: 32149 - RNA, 21 nt, Human
agcucagcaagauggaggcuc

SEQ ID NO: 32150 - RNA, 22 nt, Human
agcucagcacugucagcacucc

SEQ ID NO: 32151 - RNA, 22 nt, Human
agcucaggcaacucugggcccc

SEQ ID NO: 32152 - RNA, 19 nt, Human
agcucaggcccaucguccc

SEQ ID NO: 32153 - RNA, 22 nt, Human
agcucaggucauuccagggaug

SEQ ID NO: 32154 - RNA, 22 nt, Human
agcuccaagguugaggagugag

SEQ ID NO: 32155 - RNA, 22 nt, Human
agcuccacucccugccuguuuc

SEQ ID NO: 32156 - RNA, 23 nt, Human
agcuccagaacauagcacaggaa

SEQ ID NO: 32157 - RNA, 22 nt, Human
agcuccagaagccugcaaggua

SEQ ID NO: 32158 - RNA, 22 nt, Human
agcuccagauuaauuguaggag

SEQ ID NO: 32159 - RNA, 22 nt, Human
agcuccagcccuaguacagcug

SEQ ID NO: 32160 - RNA, 22 nt, Human
agcuccagcggauggucuuaua

SEQ ID NO: 32161 - RNA, 22 nt, Human
agggcuccaaggaaguguagcu

SEQ ID NO: 32162 - RNA, 22 nt, Human
agggcucccgcgguguccggga

SEQ ID NO: 32163 - RNA, 22 nt, Human
agggcuccgggccaccggccug

SEQ ID NO: 32164 - RNA, 18 nt, Human
agggcucucugcuggguu

SEQ ID NO: 32165 - RNA, 22 nt, Human
agggcucucuuggacaacugcu

SEQ ID NO: 32166 - RNA, 20 nt, Human
agggcucugccuugcugaug

SEQ ID NO: 32167 - RNA, 23 nt, Human
agggcugaaugcagagaagcaga

SEQ ID NO: 32168 - RNA, 22 nt, Human
agggcugacaaauggcagugac

SEQ ID NO: 32169 - RNA, 22 nt, Human
agggcugagaaugacagggccg

SEQ ID NO: 32170 - RNA, 22 nt, Human
agggcugagcccaggcauguag

SEQ ID NO: 32171 - RNA, 22 nt, Human
agggcugaguggugcagucaaa

SEQ ID NO: 32172 - RNA, 18 nt, Human
agggcugaugaguuuggg

SEQ ID NO: 32173 - RNA, 22 nt, Human
agggcugcaaugggagauaacu

SEQ ID NO: 32174 - RNA, 22 nt, Human
agggcugcaggcaagauauggc

SEQ ID NO: 32175 - RNA, 22 nt, Human
agggcugcccagugugagagcu

SEQ ID NO: 32176 - RNA, 22 nt, Human
agggcugcuaccuuaaucaguu

SEQ ID NO: 32177 - RNA, 22 nt, Human
agggcugcuuugcuaaauaugg

SEQ ID NO: 32178 - RNA, 22 nt, Human
agggcuggagccacagcuggga

SEQ ID NO: 32179 - RNA, 22 nt, Human
agggcuggcaucucuaaugcug

SEQ ID NO: 32180 - RNA, 22 nt, Human
agggcuguuuuucaguguguga

SEQ ID NO: 32181 - RNA, 22 nt, Human
agggcuguuuuuggcaccuggg

SEQ ID NO: 32182 - RNA, 22 nt, Human
agggcuugacaagggcuggagc

SEQ ID NO: 32183 - RNA, 22 nt, Human
agggcuuguaggguggcuguag

SEQ ID NO: 32184 - RNA, 22 nt, Human
agggcuuguggucguggcugug

SEQ ID NO: 32185 - RNA, 22 nt, Human
agggcuuuacuucucaguucua

SEQ ID NO: 32186 - RNA, 22 nt, Human
agggcuuuggcccccugcugca

SEQ ID NO: 32187 - RNA, 19 nt, Human
agggcuuugugugcugcuc

SEQ ID NO: 32188 - RNA, 22 nt, Human
agggcuuuugagcgcacgucug

SEQ ID NO: 32189 - RNA, 22 nt, Human
aggggaaaucucucgccaucug

SEQ ID NO: 32190 - RNA, 22 nt, Human
aggggaaaugccuuggugguac

SEQ ID NO: 32191 - RNA, 22 nt, Human
aggggaagauuauacuuuugaa

SEQ ID NO: 32192 - RNA, 21 nt, Human
aggggaaguagaguuuugauu

SEQ ID NO: 32193 - RNA, 22 nt, Human
aggggacauuuagcaaugacua

SEQ ID NO: 32194 - RNA, 22 nt, Human
aggggaugccuaguggagucuc

SEQ ID NO: 32195 - RNA, 22 nt, Human
aggggaugccugaggaucugua

SEQ ID NO: 32196 - RNA, 22 nt, Human
aggggauggagcuggaaggcag

SEQ ID NO: 32197 - RNA, 20 nt, Human
aggggcaccugcgacggggc

SEQ ID NO: 32198 - RNA, 22 nt, Human
aggggcacuucucaggcugugg

SEQ ID NO: 32199 - RNA, 22 nt, Human
aggggcaggugcugcacuuaga

SEQ ID NO: 32200 - RNA, 21 nt, Human
aggggcccuugccaggacgcc

SEQ ID NO: 32201 - RNA, 22 nt, Human
aggggcggccugccugaagcag

SEQ ID NO: 32202 - RNA, 22 nt, Human
aaagcagcaaauacuuuugcac

SEQ ID NO: 32203 - RNA, 22 nt, Human
aaagcagcaaguauuuguuacu

SEQ ID NO: 32204 - RNA, 22 nt, Human
aaagcagcagaaagcuggcccc

SEQ ID NO: 32205 - RNA, 22 nt, Human
aaagcagcagaaucucucaggg

SEQ ID NO: 32206 - RNA, 22 nt, Human
aaagcagcugauagucucaucu

SEQ ID NO: 32207 - RNA, 22 nt, Human
aaagcaggguccaaggagaugu

SEQ ID NO: 32208 - RNA, 22 nt, Human
aaagcaguaguuuucaaauagu

SEQ ID NO: 32209 - RNA, 22 nt, Human
aaagcaguauaaguaacggaag

SEQ ID NO: 32210 - RNA, 22 nt, Human
aaagcaguaugaaaggcaauaa

SEQ ID NO: 32211 - RNA, 20 nt, Human
aaagcaguaugcaaguagag

SEQ ID NO: 32212 - RNA, 22 nt, Human
aaagcaguccuucccuuaaggu

SEQ ID NO: 32213 - RNA, 21 nt, Human
aaagcaucacgaacauuuggg

SEQ ID NO: 32214 - RNA, 22 nt, Human
aaagcaugacucaagaauuacu

SEQ ID NO: 32215 - RNA, 22 nt, Human
aaagcaugauuagauagaugau

SEQ ID NO: 32216 - RNA, 22 nt, Human
aaagcaugugaauagaauaugg

SEQ ID NO: 32217 - RNA, 22 nt, Human
aaagcauguugggucccucuuu

SEQ ID NO: 32218 - RNA, 22 nt, Human
aaagcauuacuagacuggauuu

SEQ ID NO: 32219 - RNA, 22 nt, Human
aaagcauuucaugucuagaaag

SEQ ID NO: 32220 - RNA, 22 nt, Human
aaagccacaguucuaugucugc

SEQ ID NO: 32221 - RNA, 22 nt, Human
aaagccaggcagccaagccagu

SEQ ID NO: 32222 - RNA, 22 nt, Human
aaagccaggggagggauuccca

SEQ ID NO: 32223 - RNA, 22 nt, Human
aaagccaguucuuagagaaagc

SEQ ID NO: 32224 - RNA, 22 nt, Human
aaagccauaucuauucuauucu

SEQ ID NO: 32225 - RNA, 22 nt, Human
aaagccaucugcugguucgcau

SEQ ID NO: 32226 - RNA, 22 nt, Human
aaagccaugaauguuauagagg

SEQ ID NO: 32227 - RNA, 22 nt, Human
aaagccaugggucuuuggcaua

SEQ ID NO: 32228 - RNA, 22 nt, Human
aaagcccauguggaaguacagg

SEQ ID NO: 32229 - RNA, 22 nt, Human
aaagccuucugucuagcagaua

SEQ ID NO: 32230 - RNA, 22 nt, Human
aaagccuucuucggucugugau

SEQ ID NO: 32231 - RNA, 22 nt, Human
aaagccuuugucucaggcucug

SEQ ID NO: 32232 - RNA, 22 nt, Human
aaagccuuuucuguuuaacaca

SEQ ID NO: 32233 - RNA, 22 nt, Human
aaagcuaguaauauuuuaaucc

SEQ ID NO: 32234 - RNA, 22 nt, Human
aaagcuauuugugaguuauaga

SEQ ID NO: 32235 - RNA, 22 nt, Human
aaagcuauuuuauugcagcucu

SEQ ID NO: 32236 - RNA, 22 nt, Human
aaagcucaucauuaggaggcua

SEQ ID NO: 32237 - RNA, 22 nt, Human
aaagcucucugaacaccagacc

SEQ ID NO: 32238 - RNA, 22 nt, Human
aaagcucugguuuggagcauuu

SEQ ID NO: 32239 - RNA, 22 nt, Human
aaagcucuuacuguacuaguga

SEQ ID NO: 32240 - RNA, 22 nt, Human
aaagcucuuauguaaacagaaa

SEQ ID NO: 32241 - RNA, 22 nt, Human
aaagcucuuggauuuuagacuc

SEQ ID NO: 32242 - RNA, 22 nt, Human
aaagcugcugccaaucaggcuu

SEQ ID NO: 32243 - RNA, 22 nt, Human
aaagcugcugugaaugguuugg

SEQ ID NO: 32244 - RNA, 22 nt, Human
aaagcugcuuuaaacaucuaug

SEQ ID NO: 32245 - RNA, 22 nt, Human
aaagcugggcuagguuuguuuc

SEQ ID NO: 32246 - RNA, 22 nt, Human
aaacagucaugguugcuguuca

SEQ ID NO: 32247 - RNA, 22 nt, Human
aaacaguggccaauucuggaga

SEQ ID NO: 32248 - RNA, 22 nt, Human
aaacaguuuauaacaugauacu

SEQ ID NO: 32249 - RNA, 22 nt, Human
aaacaguuuuuuaagucucuag

SEQ ID NO: 32250 - RNA, 22 nt, Human
aaacaucaccauuuuaccuaau

SEQ ID NO: 32251 - RNA, 22 nt, Human
aaacaugagcacuugcuucaua

SEQ ID NO: 32252 - RNA, 22 nt, Human
aaacaugagcauuucuguuuaa

SEQ ID NO: 32253 - RNA, 22 nt, Human
aaacaugaugucauauaugcca

SEQ ID NO: 32254 - RNA, 22 nt, Human
aaacaugcauucaagaaaaucu

SEQ ID NO: 32255 - RNA, 22 nt, Human
aaacauuagacaccauaugcuc

SEQ ID NO: 32256 - RNA, 22 nt, Human
aaacauugaugggaaguuuaau

SEQ ID NO: 32257 - RNA, 22 nt, Human
aaacauuguaauuuuagcaugg

SEQ ID NO: 32258 - RNA, 22 nt, Human
aaaccaacccuggcuggccuag

SEQ ID NO: 32259 - RNA, 22 nt, Human
aaaccacaguucagugcuuuug

SEQ ID NO: 32260 - RNA, 22 nt, Human
aaaccacaugccuucaaaugcu

SEQ ID NO: 32261 - RNA, 22 nt, Human
aaaccagugauagacuagacac

SEQ ID NO: 32262 - RNA, 18 nt, Human
aaacccacucagcgcuga

SEQ ID NO: 32263 - RNA, 22 nt, Human
aaaccuagaaggaagggucucu

SEQ ID NO: 32264 - RNA, 22 nt, Human
aaaccucuuaauggccuguaau

SEQ ID NO: 32265 - RNA, 22 nt, Human
aaaccucuuuuaaggaguuguu

SEQ ID NO: 32266 - RNA, 22 nt, Human
aaaccugaaggaugauacaaca

SEQ ID NO: 32267 - RNA, 22 nt, Human
aaaccugaauguaugucagaag

SEQ ID NO: 32268 - RNA, 22 nt, Human
aaaccuggaacauuugacuagg

SEQ ID NO: 32269 - RNA, 22 nt, Human
aaaccuggacuuguaaugauaa

SEQ ID NO: 32270 - RNA, 22 nt, Human
aaaccuguagcaguuuguuaca

SEQ ID NO: 32271 - RNA, 22 nt, Human
aaaccuuucucagugcuaaaau

SEQ ID NO: 32272 - RNA, 22 nt, Human
aaaccuuucugcucucagcgua

SEQ ID NO: 32273 - RNA, 22 nt, Human
aaaccuuugccuggaagggagu

SEQ ID NO: 32274 - RNA, 20 nt, Human
aaacgagccaucauucuggu

SEQ ID NO: 32275 - RNA, 21 nt, Human
aaacuagaguguggcaaagcu

SEQ ID NO: 32276 - RNA, 21 nt, Human
aaacuagcagcaaccaugauc

SEQ ID NO: 32277 - RNA, 19 nt, Human
aaacucauagacucauauu

SEQ ID NO: 32278 - RNA, 22 nt, Human
aaacuccugggcucaagcaguu

SEQ ID NO: 32279 - RNA, 22 nt, Human
aaacucuaagacacuguacaau

SEQ ID NO: 32280 - RNA, 22 nt, Human
aaacucuaaucaaauauagcau

SEQ ID NO: 32281 - RNA, 22 nt, Human
aaacucuaguuaugaaguuugu

SEQ ID NO: 32282 - RNA, 22 nt, Human
aaacucucuuuucuucaguagg

SEQ ID NO: 32283 - RNA, 19 nt, Human
aaacucugaaggccacugg

SEQ ID NO: 32284 - RNA, 22 nt, Human
aaacucugaugcuuauugggaa

SEQ ID NO: 32285 - RNA, 22 nt, Human
aaacucugccauuuuuggccug

SEQ ID NO: 32286 - RNA, 22 nt, Human
aaacucuuccuuucuuuaaagu

SEQ ID NO: 32287 - RNA, 22 nt, Human
aaacucuuggucaacaugagga

SEQ ID NO: 32288 - RNA, 22 nt, Human
aaacugaaacaucaucauguug

SEQ ID NO: 32289 - RNA, 22 nt, Human
aaacugaagccuuggagugaca

SEQ ID NO: 32290 - RNA, 22 nt, Human
aaacugcaaugacagguaggag

SEQ ID NO: 32291 - RNA, 22 nt, Human
aaacugcacacgaugugccuga

SEQ ID NO: 32292 - RNA, 22 nt, Human
aaacugcacaugaggcuggugc

SEQ ID NO: 32293 - RNA, 22 nt, Human
aaacugcacuuuauuuugucaa

SEQ ID NO: 32294 - RNA, 22 nt, Human
aaacugcaugaagcugauuuua

SEQ ID NO: 32295 - RNA, 18 nt, Human
aaacuggcuuggccugug

SEQ ID NO: 32296 - RNA, 22 nt, Human
aaacugguaaucggcaagugag

SEQ ID NO: 32297 - RNA, 22 nt, Human
aaacugguagcaauuuaagggu

SEQ ID NO: 32298 - RNA, 22 nt, Human
aaacugguauucaaauguuugg

SEQ ID NO: 32299 - RNA, 22 nt, Human
aaacuguaaagcaggugaguag

SEQ ID NO: 32300 - RNA, 22 nt, Human
aaacuguaaauacuaguaagug

SEQ ID NO: 32301 - RNA, 22 nt, Human
aaacuguaagagaauaaacuac

SEQ ID NO: 32302 - RNA, 22 nt, Human
aaacuguaaugcaggaucaaga

SEQ ID NO: 32303 - RNA, 22 nt, Human
aaacugucauuuuauauaguua

SEQ ID NO: 32304 - RNA, 22 nt, Human
aaacuguccucccgagguuucc

SEQ ID NO: 32305 - RNA, 22 nt, Human
aaacuguuccuuuuucagcaac

SEQ ID NO: 32306 - RNA, 23 nt, Human
aaacuguugcuucaauguauccu

SEQ ID NO: 32307 - RNA, 22 nt, Human
aaacuuauuuuaucacaguuca

SEQ ID NO: 32308 - RNA, 22 nt, Human
aaacuucagggaauaaaagagu

SEQ ID NO: 32309 - RNA, 22 nt, Human
aaacuucagugaaugacuuaug

SEQ ID NO: 32310 - RNA, 17 nt, Human
aaacuucauucucagga

SEQ ID NO: 32311 - RNA, 22 nt, Human
aaacccauggcugauaucacua

SEQ ID NO: 32312 - RNA, 22 nt, Human
aaaccggggccuuuccacaaug

SEQ ID NO: 32313 - RNA, 22 nt, Human
aaaccuauuggcaagaauaaua

SEQ ID NO: 32314 - RNA, 22 nt, Human
aaaccucuuuccauuagaggaa

SEQ ID NO: 32315 - RNA, 22 nt, Human
aaaccugauagauuuucagaau

SEQ ID NO: 32316 - RNA, 22 nt, Human
aaaccugguggaacggugaaua

SEQ ID NO: 32317 - RNA, 19 nt, Human
aaaccuguuaguagagcac

SEQ ID NO: 32318 - RNA, 23 nt, Human
aaaccuuuuguagaacaauugcu

SEQ ID NO: 32319 - RNA, 22 nt, Human
aaacggauauaacagcaaacgc

SEQ ID NO: 32320 - RNA, 22 nt, Human
aaacuaaugaagugaagacgcu

SEQ ID NO: 32321 - RNA, 22 nt, Human
aaacuacacuuugggaccagca

SEQ ID NO: 32322 - RNA, 22 nt, Human
aaacuacugauuugugaauuga

SEQ ID NO: 32323 - RNA, 22 nt, Human
aaacuacuggauuaguaacuua

SEQ ID NO: 32324 - RNA, 22 nt, Human
aaacuagaaaucagcaagauag

SEQ ID NO: 32325 - RNA, 22 nt, Human
aaacuagagauggcagguggaa

SEQ ID NO: 32326 - RNA, 22 nt, Human
aaacuagagcaugugaguggga

SEQ ID NO: 32327 - RNA, 22 nt, Human
aaacuagguucugauuuccaag

SEQ ID NO: 32328 - RNA, 22 nt, Human
aaacuaucccugccauaauuuu

SEQ ID NO: 32329 - RNA, 22 nt, Human
aaacucaagucuaugaacaagg

SEQ ID NO: 32330 - RNA, 22 nt, Human
aaacucagaagguacagaaggg

SEQ ID NO: 32331 - RNA, 22 nt, Human
aaacuccugcauacucagaagc

SEQ ID NO: 32332 - RNA, 22 nt, Human
aaacucuaggacgaugggauag

SEQ ID NO: 32333 - RNA, 22 nt, Human
aaacucugcacugcgguaaggu

SEQ ID NO: 32334 - RNA, 22 nt, Human
aaacucuguauuugcugugggu

SEQ ID NO: 32335 - RNA, 22 nt, Human
aaacugaagagcuuuuugacac

SEQ ID NO: 32336 - RNA, 22 nt, Human
aaacugaaguucuggaggggua

SEQ ID NO: 32337 - RNA, 16 nt, Human
aaacugacggcaucug

SEQ ID NO: 32338 - RNA, 22 nt, Human
aaacugaggaaugacagcauua

SEQ ID NO: 32339 - RNA, 22 nt, Human
aaacugaggaguuagacuaggg

SEQ ID NO: 32340 - RNA, 22 nt, Human
aaacugauaaaauaaguacauu

SEQ ID NO: 32341 - RNA, 22 nt, Human
aaacugcaauuauuuuugcaau

SEQ ID NO: 32342 - RNA, 22 nt, Human
aaacugcaggucaugacccauu

SEQ ID NO: 32343 - RNA, 22 nt, Human
aaacugccaaaagaccuuggau

SEQ ID NO: 32344 - RNA, 22 nt, Human
aaacugguaauaaaauggauua

SEQ ID NO: 32345 - RNA, 22 nt, Human
aaacugguuucugagauggaac

SEQ ID NO: 32346 - RNA, 22 nt, Human
aaacuguaaguuugaggggaaa

SEQ ID NO: 32347 - RNA, 22 nt, Human
aaacuguaggagggaaaggaag

SEQ ID NO: 32348 - RNA, 22 nt, Human
aaacuguauagggaaaaguaga

SEQ ID NO: 32349 - RNA, 22 nt, Human
aaacuguauauuuauggcaugu

SEQ ID NO: 32350 - RNA, 22 nt, Human
aaacuguauuccauccucauca

SEQ ID NO: 32351 - RNA, 22 nt, Human
aaacugucaccuaauguauuuu

SEQ ID NO: 32352 - RNA, 22 nt, Human
aaacugugaagcaaguacaagg

SEQ ID NO: 32353 - RNA, 22 nt, Human
aaacuguguaugcagagagcau

SEQ ID NO: 32354 - RNA, 22 nt, Human
aaacuguuucccuccauaaccu

SEQ ID NO: 32355 - RNA, 22 nt, Human
aaacuuaguagaguucauauua

SEQ ID NO: 32356 - RNA, 22 nt, Human
aaacuucagacuccccacuucu

SEQ ID NO: 32357 - RNA, 23 nt, Human
aaacuucaguagugucaucagcc

SEQ ID NO: 32358 - RNA, 22 nt, Human
aaacuugagccaagggcuuggg

SEQ ID NO: 32359 - RNA, 22 nt, Human
aaacuugauuuagaacuaaggc

SEQ ID NO: 32360 - RNA, 22 nt, Human
aaacuugggugacccugagcaa

SEQ ID NO: 32361 - RNA, 22 nt, Human
aaacuuuguagagaaugcuggc

SEQ ID NO: 32362 - RNA, 22 nt, Human
aaacuuuuuuagguucauaggc

SEQ ID NO: 32363 - RNA, 22 nt, Human
aaagggaaaauauuuagacaua

SEQ ID NO: 32364 - RNA, 22 nt, Human
aaagggaacucuaauuaucuuc

SEQ ID NO: 32365 - RNA, 22 nt, Human
aaagggaauguguaggacaugu

SEQ ID NO: 32366 - RNA, 22 nt, Human
aaagggccaauggagagugugg

SEQ ID NO: 32367 - RNA, 22 nt, Human
aaagggcugaaguagucucugu

SEQ ID NO: 32368 - RNA, 22 nt, Human
aaaggucagcugccaucguucu

SEQ ID NO: 32369 - RNA, 22 nt, Human
aaaggucuuaagguuaagcagg

SEQ ID NO: 32370 - RNA, 22 nt, Human
aaagguuaguucuuagaagugc

SEQ ID NO: 32371 - RNA, 22 nt, Human
aaagguucucuuguucauuauu

SEQ ID NO: 32372 - RNA, 22 nt, Human
aaagguuuauugauucugcucu

SEQ ID NO: 32373 - RNA, 22 nt, Human
aaagguuuauuuguugcucaca

SEQ ID NO: 32374 - RNA, 22 nt, Human
aaagguuugcauggaauuuacc

SEQ ID NO: 32375 - RNA, 22 nt, Human
aaagguuuuguucaucgauuuu

SEQ ID NO: 32376 - RNA, 22 nt, Human
aaaguaacaauaagguucuauu

SEQ ID NO: 32377 - RNA, 22 nt, Human
aaaguaagauuugcauuucaga

SEQ ID NO: 32378 - RNA, 22 nt, Human
aaaguaaggguuaaucuacuuu

SEQ ID NO: 32379 - RNA, 22 nt, Human
aaaguacucgaggaggaggagc

SEQ ID NO: 32380 - RNA, 22 nt, Human
aaaguacugaugccaucagcac

SEQ ID NO: 32381 - RNA, 22 nt, Human
aaaguaguauaaaauucaugug

SEQ ID NO: 32382 - RNA, 22 nt, Human
aaaguaguuagucaugugaaaa

SEQ ID NO: 32383 - RNA, 22 nt, Human
aaaguaucaagggaagcauuuu

SEQ ID NO: 32384 - RNA, 22 nt, Human
aaaguaucuuacugcagccgag

SEQ ID NO: 32385 - RNA, 22 nt, Human
aaaguauucaaaaauauuuggu

SEQ ID NO: 32386 - RNA, 22 nt, Human
aaaguauuuuugacaggcauua

SEQ ID NO: 32387 - RNA, 22 nt, Human
aaagucaaaaugcucuccuguc

SEQ ID NO: 32388 - RNA, 22 nt, Human
aaagucacuuacagcucuuuug

SEQ ID NO: 32389 - RNA, 22 nt, Human
aaagucacuuccuucugucagc

SEQ ID NO: 32390 - RNA, 22 nt, Human
aaagucaggcuguguaccuaac

SEQ ID NO: 32391 - RNA, 22 nt, Human
aaagucaucauuucuuuucaaa

SEQ ID NO: 32392 - RNA, 22 nt, Human
aaagucaucuaggagcagauuu

SEQ ID NO: 32393 - RNA, 22 nt, Human
aaagucaugcaguugaacuuuu

SEQ ID NO: 32394 - RNA, 22 nt, Human
aaagucauguuuuuguuuagca

SEQ ID NO: 32395 - RNA, 22 nt, Human
aaagucauuuagccuuaucucc

SEQ ID NO: 32396 - RNA, 22 nt, Human
aaagucauuuguauauacccuu

SEQ ID NO: 32397 - RNA, 22 nt, Human
aaaguccaauuuuguucaggcu

SEQ ID NO: 32398 - RNA, 22 nt, Human
aaaguccuugcaguuuccucuu

SEQ ID NO: 32399 - RNA, 22 nt, Human
aaaguccuuuuugccaugcaag

SEQ ID NO: 32400 - RNA, 22 nt, Human
aaagucuccacugggaaccaaa

SEQ ID NO: 32401 - RNA, 22 nt, Human
aaagucugaaagauaagaguga

SEQ ID NO: 32402 - RNA, 20 nt, Human
aaagucuguuuaucucugga

SEQ ID NO: 32403 - RNA, 22 nt, Human
aaagucuucacggcacuagugu

SEQ ID NO: 32404 - RNA, 22 nt, Human
aaagucuuuauuuuguaucuuu

SEQ ID NO: 32405 - RNA, 19 nt, Human
aaagugaaugcuguuuucu

SEQ ID NO: 32406 - RNA, 22 nt, Human
aaagugacugccagugcugggc

SEQ ID NO: 32407 - RNA, 22 nt, Human
aaagugaugccaggagucuggu

SEQ ID NO: 32408 - RNA, 19 nt, Human
aaagugauuuuuucuggca

SEQ ID NO: 32409 - RNA, 22 nt, Human
aaagugcaccugcuucuucuug

SEQ ID NO: 32410 - RNA, 22 nt, Human
aaagugcacucucagugcugcu

SEQ ID NO: 32411 - RNA, 22 nt, Human
aaagugcaguaacuugcccaag

SEQ ID NO: 32412 - RNA, 22 nt, Human
aaagugcauuguuuguguuccu

SEQ ID NO: 32413 - RNA, 22 nt, Human
aaagugcugaaauuacaggugu

SEQ ID NO: 32414 - RNA, 22 nt, Human
aaagugcugagacagacuggga

SEQ ID NO: 32415 - RNA, 22 nt, Human
aaagugcugagauuacaagcgu

SEQ ID NO: 32416 - RNA, 22 nt, Human
aaagugcugggauuacaggcuu

SEQ ID NO: 32417 - RNA, 22 nt, Human
aaagugcugggauuccaggcgu

SEQ ID NO: 32418 - RNA, 22 nt, Human
aaagugcugugggcuguaagug

SEQ ID NO: 32419 - RNA, 22 nt, Human
aaagugcuuucccacauuuguu

SEQ ID NO: 32420 - RNA, 22 nt, Human
aacacugagggaaaagagauag

SEQ ID NO: 32421 - RNA, 22 nt, Human
aacacugcuccaaaaaaggcuu

SEQ ID NO: 32422 - RNA, 20 nt, Human
aacacugcuucuauauuuuc

SEQ ID NO: 32423 - RNA, 22 nt, Human
aacacugggauaggugauagac

SEQ ID NO: 32424 - RNA, 17 nt, Human
aacacugggugagccuc

SEQ ID NO: 32425 - RNA, 22 nt, Human
aacacugguucugacuacacag

SEQ ID NO: 32426 - RNA, 22 nt, Human
aacacuguaacagcaucauuuu

SEQ ID NO: 32427 - RNA, 22 nt, Human
aacacuguaucagucuucaaua

SEQ ID NO: 32428 - RNA, 22 nt, Human
aacacugugagguaaugaccua

SEQ ID NO: 32429 - RNA, 22 nt, Human
aacacuuaaggagagaucaaau

SEQ ID NO: 32430 - RNA, 22 nt, Human
aacacuuauccacauuugaaag

SEQ ID NO: 32431 - RNA, 22 nt, Human
aacacuucccaucagagggaca

SEQ ID NO: 32432 - RNA, 22 nt, Human
aacacuucccgaccauauggcu

SEQ ID NO: 32433 - RNA, 22 nt, Human
aacacuuuccugccuuucugau

SEQ ID NO: 32434 - RNA, 22 nt, Human
aacacuuuguugccuaugaacg

SEQ ID NO: 32435 - RNA, 22 nt, Human
aacacuuuuuaguaaagauuga

SEQ ID NO: 32436 - RNA, 22 nt, Human
aacagaaaagguagguggcuuu

SEQ ID NO: 32437 - RNA, 22 nt, Human
aacagaacuguuguucuggagg

SEQ ID NO: 32438 - RNA, 22 nt, Human
aacagaauugcugcugccaaug

SEQ ID NO: 32439 - RNA, 22 nt, Human
aacagacucacagcuagagaag

SEQ ID NO: 32440 - RNA, 22 nt, Human
aacagaguggagccaaacuuug

SEQ ID NO: 32441 - RNA, 22 nt, Human
aacagaguuucaaauaacaucu

SEQ ID NO: 32442 - RNA, 22 nt, Human
aacagauaaguauaucuaugua

SEQ ID NO: 32443 - RNA, 22 nt, Human
aacagauaauuucuaaguuacu

SEQ ID NO: 32444 - RNA, 22 nt, Human
aacagauggccaagugcauggg

SEQ ID NO: 32445 - RNA, 22 nt, Human
aacagauuguaaccugauagcc

SEQ ID NO: 32446 - RNA, 19 nt, Human
aacagcaacuuccuaguca

SEQ ID NO: 32447 - RNA, 22 nt, Human
aacagcaagggcggggucaaga

SEQ ID NO: 32448 - RNA, 22 nt, Human
aacagcagcaugacagcugggu

SEQ ID NO: 32449 - RNA, 22 nt, Human
aacagcaggcaccaaggcuaug

SEQ ID NO: 32450 - RNA, 22 nt, Human
aacagcauauuucauauauuga

SEQ ID NO: 32451 - RNA, 22 nt, Human
aacagccacugauacugaauag

SEQ ID NO: 32452 - RNA, 22 nt, Human
aacagcgucuuuccagcuguuc

SEQ ID NO: 32453 - RNA, 22 nt, Human
aacagcuagaauucuacuggcu

SEQ ID NO: 32454 - RNA, 22 nt, Human
aacagcuauuagaacuucaugg

SEQ ID NO: 32455 - RNA, 22 nt, Human
aacagcuuacucaauggugauu

SEQ ID NO: 32456 - RNA, 22 nt, Human
aacagcuucaucacauggcaua

SEQ ID NO: 32457 - RNA, 22 nt, Human
aacagcuugaggaauaucauca

SEQ ID NO: 32458 - RNA, 22 nt, Human
aacagcuugcugcaccuuaaua

SEQ ID NO: 32459 - RNA, 22 nt, Human
aacagcuuuguauacaguaacu

SEQ ID NO: 32460 - RNA, 22 nt, Human
aacaggaggccuuccaguccag

SEQ ID NO: 32461 - RNA, 18 nt, Human
aacaggauccuccacuuc

SEQ ID NO: 32462 - RNA, 22 nt, Human
aacaggccuuguuuuuguucau

SEQ ID NO: 32463 - RNA, 22 nt, Human
aacaggcucacucugacuucua

SEQ ID NO: 32464 - RNA, 22 nt, Human
aacaggcucuucauuuccagag

SEQ ID NO: 32465 - RNA, 22 nt, Human
aacaggggcugguugaaagagc

SEQ ID NO: 32466 - RNA, 20 nt, Human
aacagggggcugcagagggc

SEQ ID NO: 32467 - RNA, 22 nt, Human
aacaguaacgagauguccuaac

SEQ ID NO: 32468 - RNA, 22 nt, Human
aacaguaguauuuaaacugaac

SEQ ID NO: 32469 - RNA, 22 nt, Human
aacaguauaugaaauguuagga

SEQ ID NO: 32470 - RNA, 22 nt, Human
aacaguaugugagauuuacaca

SEQ ID NO: 32471 - RNA, 22 nt, Human
aacagucacauuguucaacuuu

SEQ ID NO: 32472 - RNA, 22 nt, Human
aacagucagcuucucgggacau

SEQ ID NO: 32473 - RNA, 22 nt, Human
aacagucugggaguuccuuaua

SEQ ID NO: 32474 - RNA, 22 nt, Human
aacagucuuacagaaguagcca

SEQ ID NO: 32475 - RNA, 22 nt, Human
aacagucuuggaagucuuguua

SEQ ID NO: 32476 - RNA, 22 nt, Human
aacagugaggugaauaugcucc

SEQ ID NO: 32477 - RNA, 22 nt, Human
aacagugcuguuauaaauguac

SEQ ID NO: 32478 - RNA, 22 nt, Human
aacaguggggaaaagaguuggu

SEQ ID NO: 32479 - RNA, 22 nt, Human
aacaguguguacacaucauagg

SEQ ID NO: 32480 - RNA, 17 nt, Human
aacaguuaaugggggaa

SEQ ID NO: 32481 - RNA, 22 nt, Human
aacaguuacccuuaagaucuuu

SEQ ID NO: 32482 - RNA, 21 nt, Human
aacaguucucuuugaaggugu

SEQ ID NO: 32483 - RNA, 22 nt, Human
aacaguuuaugagauaugcuau

SEQ ID NO: 32484 - RNA, 22 nt, Human
aacaguuugcuuuaagaggcac

SEQ ID NO: 32485 - RNA, 22 nt, Human
aacaguuuggguagguauguag

SEQ ID NO: 32486 - RNA, 22 nt, Human
aacauacagugagcaguggacu

SEQ ID NO: 32487 - RNA, 22 nt, Human
aacauagaauaaaugaguuagg

SEQ ID NO: 32488 - RNA, 22 nt, Human
aacauagaauggcuccagagcu

SEQ ID NO: 32489 - RNA, 22 nt, Human
aacauagagacaggaagugcuu

SEQ ID NO: 32490 - RNA, 22 nt, Human
aacauaucauaggaugucauug

SEQ ID NO: 32491 - RNA, 22 nt, Human
aacauaucuacggauacgauua

SEQ ID NO: 32492 - RNA, 22 nt, Human
aacaucaguauucucaucugua

SEQ ID NO: 32493 - RNA, 22 nt, Human
aacaucauccuuugaguauuua

SEQ ID NO: 32494 - RNA, 22 nt, Human
aacauccccuucaugucaugau

SEQ ID NO: 32495 - RNA, 22 nt, Human
aacaucuacuaagugccaggca

SEQ ID NO: 32496 - RNA, 22 nt, Human
aacaucuagguucucaucgaua

SEQ ID NO: 32497 - RNA, 22 nt, Human
aacaucuaguuccuauauaaua

SEQ ID NO: 32498 - RNA, 22 nt, Human
aacaucuccaaccuacauccac

SEQ ID NO: 32499 - RNA, 19 nt, Human
aacaucuguaacuauuuuc

SEQ ID NO: 32500 - RNA, 22 nt, Human
aacaucuuaucugcaugauccc

SEQ ID NO: 32501 - RNA, 22 nt, Human
aacaucuucagagaagcuaagu

SEQ ID NO: 32502 - RNA, 22 nt, Human
aacaucuuuacaacagaccuag

SEQ ID NO: 32503 - RNA, 22 nt, Human
aacaucuuuuuguuugcugaaa

SEQ ID NO: 32504 - RNA, 22 nt, Human
aacaugauuggaaaaugcuguc

SEQ ID NO: 32505 - RNA, 22 nt, Human
aacaugcagugagccgaugagg

SEQ ID NO: 32506 - RNA, 22 nt, Human
aacaugcaugaagaaguuauau

SEQ ID NO: 32507 - RNA, 22 nt, Human
aacaugcucuguuucuuggaug

SEQ ID NO: 32508 - RNA, 22 nt, Human
aacaugcucuuccuggcuaguc

SEQ ID NO: 32509 - RNA, 22 nt, Human
aacaugcugccuuucuacgagu

SEQ ID NO: 32510 - RNA, 22 nt, Human
aacaugcuugcuuagaaucagc

SEQ ID NO: 32511 - RNA, 22 nt, Human
aacaugcuuugauaaauaaaag

SEQ ID NO: 32512 - RNA, 22 nt, Human
aacauguaccuacaaucagaau

SEQ ID NO: 32513 - RNA, 20 nt, Human
aagaaggccugcccagacac

SEQ ID NO: 32514 - RNA, 22 nt, Human
aagaaggcggaccagaagggag

SEQ ID NO: 32515 - RNA, 22 nt, Human
aagaagguugaaugacuacuuu

SEQ ID NO: 32516 - RNA, 22 nt, Human
aagaaguuggaaaugauugaga

SEQ ID NO: 32517 - RNA, 22 nt, Human
aagaauaacacuuagguuuugc

SEQ ID NO: 32518 - RNA, 22 nt, Human
aagaauacuucguaaguaggau

SEQ ID NO: 32519 - RNA, 23 nt, Human
aagaaucaguaaguaaggagacc

SEQ ID NO: 32520 - RNA, 22 nt, Human
aagaaucucucaagugugacaa

SEQ ID NO: 32521 - RNA, 18 nt, Human
aagaaucucugacucuuu

SEQ ID NO: 32522 - RNA, 22 nt, Human
aagaaucuuuccaguuuugaug

SEQ ID NO: 32523 - RNA, 22 nt, Human
aagaaugagcucaaagaucuua

SEQ ID NO: 32524 - RNA, 22 nt, Human
aagaauggugguggggccagca

SEQ ID NO: 32525 - RNA, 22 nt, Human
aagaauguggcauuuauuuaua

SEQ ID NO: 32526 - RNA, 22 nt, Human
aagaauuaucugaaagcugugu

SEQ ID NO: 32527 - RNA, 22 nt, Human
aagaauuauugcaauacuagau

SEQ ID NO: 32528 - RNA, 22 nt, Human
aagaauucacugguagagucaa

SEQ ID NO: 32529 - RNA, 22 nt, Human
aagauacauaaagguagagucu

SEQ ID NO: 32530 - RNA, 22 nt, Human
aagauacauauuuguucuagug

SEQ ID NO: 32531 - RNA, 22 nt, Human
aagauacauguuaggagcaacc

SEQ ID NO: 32532 - RNA, 22 nt, Human
aagauacucaguggauaugcau

SEQ ID NO: 32533 - RNA, 20 nt, Human
aagauacuccagaaauuaaa

SEQ ID NO: 32534 - RNA, 22 nt, Human
aagauauagauggugguauaaa

SEQ ID NO: 32535 - RNA, 22 nt, Human
aagauauauuuuggugauuuca

SEQ ID NO: 32536 - RNA, 22 nt, Human
aagaucaagaucagagaacagc

SEQ ID NO: 32537 - RNA, 22 nt, Human
aagaucagaacuuuauacagga

SEQ ID NO: 32538 - RNA, 22 nt, Human
aagaucaugguuuaucugggag

SEQ ID NO: 32539 - RNA, 22 nt, Human
aagaucuauuaugagucagguc

SEQ ID NO: 32540 - RNA, 22 nt, Human
aagaugaaucaguauguguccu

SEQ ID NO: 32541 - RNA, 21 nt, Human
aagaugauauuuuaucuguag

SEQ ID NO: 32542 - RNA, 22 nt, Human
aagaugccuguagcaggaagau

SEQ ID NO: 32543 - RNA, 22 nt, Human
aagaugcuaauuguggaaguug

SEQ ID NO: 32544 - RNA, 22 nt, Human
aagauggaguaguguaaugguu

SEQ ID NO: 32545 - RNA, 22 nt, Human
aagauggcuuagaguccuggug

SEQ ID NO: 32546 - RNA, 22 nt, Human
aagaugugcugucuugccacuc

SEQ ID NO: 32547 - RNA, 22 nt, Human
aagaugugucucaucagggugu

SEQ ID NO: 32548 - RNA, 22 nt, Human
aagauguuaaaucuguagaauu

SEQ ID NO: 32549 - RNA, 22 nt, Human
aagauguuaaauugggggcauu

SEQ ID NO: 32550 - RNA, 22 nt, Human
aagauguuagauuauggggaca

SEQ ID NO: 32551 - RNA, 22 nt, Human
aagauguugcauuagaauaccu

SEQ ID NO: 32552 - RNA, 18 nt, Human
aagauguuuaaugggaag

SEQ ID NO: 32553 - RNA, 22 nt, Human
aagauguuuagguaaaaaguuu

SEQ ID NO: 32554 - RNA, 22 nt, Human
aagauuacuacggaacaugacc

SEQ ID NO: 32555 - RNA, 22 nt, Human
aagauucacagagugaaugaaa

SEQ ID NO: 32556 - RNA, 22 nt, Human
aagauucagccaaauuguucau

SEQ ID NO: 32557 - RNA, 22 nt, Human
aagauucaguugauguguucca

SEQ ID NO: 32558 - RNA, 22 nt, Human
aagauucuacaaacucugguaa

SEQ ID NO: 32559 - RNA, 22 nt, Human
aagauucuagaggaacuucuua

SEQ ID NO: 32560 - RNA, 22 nt, Human
aagauucucagagugaaagaau

SEQ ID NO: 32561 - RNA, 20 nt, Human
aagauucugauuuguagcgu

SEQ ID NO: 32562 - RNA, 22 nt, Human
aagauucuguauuucuaacaau

SEQ ID NO: 32563 - RNA, 22 nt, Human
aagauucuuaccuauacccagu

SEQ ID NO: 32564 - RNA, 22 nt, Human
aagauugacggcuuugagugcu

SEQ ID NO: 32565 - RNA, 22 nt, Human
aagauugccccauuuacacugc

SEQ ID NO: 32566 - RNA, 22 nt, Human
aagauuguuuugggggaagugg

SEQ ID NO: 32567 - RNA, 22 nt, Human
aagauuuacuuucuuuguaaua

SEQ ID NO: 32568 - RNA, 22 nt, Human
aagauuuccauuucuagcucau

SEQ ID NO: 32569 - RNA, 22 nt, Human
aagauuuccuucaguagagcua

SEQ ID NO: 32570 - RNA, 22 nt, Human
aagauuucucuccuggaaagca

SEQ ID NO: 32571 - RNA, 19 nt, Human
aagauuuggucauugauaa

SEQ ID NO: 32572 - RNA, 22 nt, Human
aagauuuuuuuccacagacuca

SEQ ID NO: 32573 - RNA, 22 nt, Human
aagcaaacaggagaagagcugu

SEQ ID NO: 32574 - RNA, 22 nt, Human
aagcaaagaguuuaguggguga

SEQ ID NO: 32575 - RNA, 22 nt, Human
aagcaaagugaauuuugccaag

SEQ ID NO: 32576 - RNA, 22 nt, Human
aagcaaaugaaccagagguaau

SEQ ID NO: 32577 - RNA, 22 nt, Human
aagcaacauucucuguggcauu

SEQ ID NO: 32578 - RNA, 22 nt, Human
aagcaacucccuccucauuuuu

SEQ ID NO: 32579 - RNA, 22 nt, Human
aagcaacuggcucauugucuca

SEQ ID NO: 32580 - RNA, 22 nt, Human
aagcaagaggaaauguggaccu

SEQ ID NO: 32581 - RNA, 22 nt, Human
aagcaagaguuggagugauguu

SEQ ID NO: 32582 - RNA, 22 nt, Human
aagcaagcccaggcucagucaa

SEQ ID NO: 32583 - RNA, 19 nt, Human
aagcaagcuuugagugggu

SEQ ID NO: 32584 - RNA, 22 nt, Human
aagcaaggcccagagcaucagc

SEQ ID NO: 32585 - RNA, 22 nt, Human
aagcaauaagccagauuuggau

SEQ ID NO: 32586 - RNA, 22 nt, Human
aagcaauacaaguggucauuga

SEQ ID NO: 32587 - RNA, 22 nt, Human
aagcaauaggguaaucuacuca

SEQ ID NO: 32588 - RNA, 23 nt, Human
aagcaaugcugagccaguucuga

SEQ ID NO: 32589 - RNA, 21 nt, Human
aagcaauuaccuucccaugug

SEQ ID NO: 32590 - RNA, 22 nt, Human
aagcacaauuuaggacugaaau

SEQ ID NO: 32591 - RNA, 22 nt, Human
aagcacacagcaaaggggagcu

SEQ ID NO: 32592 - RNA, 22 nt, Human
aagcacacuuggcucuguguac

SEQ ID NO: 32593 - RNA, 23 nt, Human
aagcacagaaugguuuaggaguu

SEQ ID NO: 32594 - RNA, 22 nt, Human
aagcacagacacaaaaggcuuu

SEQ ID NO: 32595 - RNA, 22 nt, Human
aagcacagauaaaacaggauuc

SEQ ID NO: 32596 - RNA, 22 nt, Human
aagcacagccagguuaggggcu

SEQ ID NO: 32597 - RNA, 22 nt, Human
aagcacagggacucaggaccgg

SEQ ID NO: 32598 - RNA, 22 nt, Human
aagcacagugggcagagcagcc

SEQ ID NO: 32599 - RNA, 22 nt, Human
aagcacaugagcuauucaugcu

SEQ ID NO: 32600 - RNA, 20 nt, Human
aagcacauuucuacaauaau

SEQ ID NO: 32601 - RNA, 22 nt, Human
aagcaccacccucccaaccugu

SEQ ID NO: 32602 - RNA, 22 nt, Human
aagcacccaauuuacagcaguu

SEQ ID NO: 32603 - RNA, 22 nt, Human
aagcacuaggucacacaaguua

SEQ ID NO: 32604 - RNA, 22 nt, Human
aagcacuggggccacagacacg

SEQ ID NO: 32605 - RNA, 22 nt, Human
aagcagaaagaacaacugagug

SEQ ID NO: 32606 - RNA, 22 nt, Human
aagcagaacugggaaguagugg

SEQ ID NO: 32607 - RNA, 20 nt, Human
aagcagaagcugcucucagc

SEQ ID NO: 32608 - RNA, 18 nt, Human
aagcagacagcagacagu

SEQ ID NO: 32609 - RNA, 22 nt, Human
aagcagacaucccauacuuuug

SEQ ID NO: 32610 - RNA, 22 nt, Human
aagcagauauugugggaguggg

SEQ ID NO: 32611 - RNA, 22 nt, Human
aagcagaugcagcuaauaaagc

SEQ ID NO: 32612 - RNA, 15 nt, Human
aagcagcaauauaua

SEQ ID NO: 32613 - RNA, 22 nt, Human
aagcagcacaguaauauuggug

SEQ ID NO: 32614 - RNA, 22 nt, Human
aagcagcagcaggauuaaagag

SEQ ID NO: 32615 - RNA, 22 nt, Human
aagcagcauagcucccuuaguu

SEQ ID NO: 32616 - RNA, 22 nt, Human
aagcagcauaugacagcaucca

SEQ ID NO: 32617 - RNA, 22 nt, Human
aagcagcauccugggcagaccu

SEQ ID NO: 32618 - RNA, 22 nt, Human
aagcagcaugcuaugcuggugg

SEQ ID NO: 32619 - RNA, 22 nt, Human
aagcagcauucagugaaaugug

SEQ ID NO: 32620 - RNA, 22 nt, Human
aagcagccaccucaucuccacu

SEQ ID NO: 32621 - RNA, 19 nt, Human
aagcagcccuggcaagagc

SEQ ID NO: 32622 - RNA, 22 nt, Human
aagcagcuuccccaaagugccu

SEQ ID NO: 32623 - RNA, 22 nt, Human
aagcagcuuuugaagagugagg

SEQ ID NO: 32624 - RNA, 21 nt, Human
aagcaggacauaugaugcccu

SEQ ID NO: 32625 - RNA, 22 nt, Human
aagcaggcaggguggagaguuu

SEQ ID NO: 32626 - RNA, 18 nt, Human
aagcaggguccauugugc

SEQ ID NO: 32627 - RNA, 22 nt, Human
aagcagggucuuccucaguugg

SEQ ID NO: 32628 - RNA, 22 nt, Human
aagcaggguuuuuccaccgcag

SEQ ID NO: 32629 - RNA, 22 nt, Human
aagcagguuaugaaauauagaa

SEQ ID NO: 32630 - RNA, 22 nt, Human
aaccauuugccauuaucuuaag

SEQ ID NO: 32631 - RNA, 22 nt, Human
aacccagagcuggaggagagua

SEQ ID NO: 32632 - RNA, 22 nt, Human
aacccaggagacagguugcagu

SEQ ID NO: 32633 - RNA, 22 nt, Human
aacccaggagauggagguugug

SEQ ID NO: 32634 - RNA, 22 nt, Human
aaccccaguaccccaggauaug

SEQ ID NO: 32635 - RNA, 22 nt, Human
aacccgagggccccaggcucgg

SEQ ID NO: 32636 - RNA, 22 nt, Human
aacccgggaggcagagguugug

SEQ ID NO: 32637 - RNA, 22 nt, Human
aacccucagcuguuugaggaga

SEQ ID NO: 32638 - RNA, 22 nt, Human
aaguugauuuaaacuacuaguc

SEQ ID NO: 32639 - RNA, 22 nt, Human
aaguugcuaaaggaguucuuug

SEQ ID NO: 32640 - RNA, 20 nt, Human
aaguuggcuccuccuagcaa

SEQ ID NO: 32641 - RNA, 22 nt, Human
aaguuuacauaagugaugauga

SEQ ID NO: 32642 - RNA, 22 nt, Human
aaguuuagaacuauaagaguga

SEQ ID NO: 32643 - RNA, 22 nt, Human
aaguuuagcgcucucucaagga

SEQ ID NO: 32644 - RNA, 22 nt, Human
aaguuuaucuuugcuggguacu

SEQ ID NO: 32645 - RNA, 22 nt, Human
aaguuucaaauguugauuaugc

SEQ ID NO: 32646 - RNA, 22 nt, Human
aaguuucaugacuugguuauua

SEQ ID NO: 32647 - RNA, 20 nt, Human
aaguuucaugcucuggggau

SEQ ID NO: 32648 - RNA, 22 nt, Human
aaguuucauuguucauguaaca

SEQ ID NO: 32649 - RNA, 22 nt, Human
aaguuucuauuauuacauucgu

SEQ ID NO: 32650 - RNA, 22 nt, Human
aaguuucucaauggcaacuggg

SEQ ID NO: 32651 - RNA, 22 nt, Human
aaguuucugauauuguuaaagc

SEQ ID NO: 32652 - RNA, 22 nt, Human
aaguuucugggcaagacaaggc

SEQ ID NO: 32653 - RNA, 21 nt, Human
aaguuugggauucaguuucca

SEQ ID NO: 32654 - RNA, 22 nt, Human
aaguuugucgaaauuaucagca

SEQ ID NO: 32655 - RNA, 22 nt, Human
aaguuugugucagagcuguuac

SEQ ID NO: 32656 - RNA, 22 nt, Human
aaguuuguuguacauguuagua

SEQ ID NO: 32657 - RNA, 21 nt, Human
aaguuuuauguugccauuugu

SEQ ID NO: 32658 - RNA, 20 nt, Human
aaguuuucuccaaauacagu

SEQ ID NO: 32659 - RNA, 22 nt, Human
aaguuuuugguagagaaaagua

SEQ ID NO: 32660 - RNA, 20 nt, Human
aauaaacuacugagagaugu

SEQ ID NO: 32661 - RNA, 22 nt, Human
aauaaacuuccacuguguuuuu

SEQ ID NO: 32662 - RNA, 22 nt, Human
aauaaagaauggaugagaucgu

SEQ ID NO: 32663 - RNA, 22 nt, Human
aauaaaggcaccauaaggcaaa

SEQ ID NO: 32664 - RNA, 22 nt, Human
aauaaaguagcguuuaaggugc

SEQ ID NO: 32665 - RNA, 22 nt, Human
aauaacagagaaggguggcuuc

SEQ ID NO: 32666 - RNA, 22 nt, Human
aauaacaggguugauuugcaau

SEQ ID NO: 32667 - RNA, 22 nt, Human
aauaaccuuacuuauuacaugg

SEQ ID NO: 32668 - RNA, 22 nt, Human
aauaacuuaagaaauuucccca

SEQ ID NO: 32669 - RNA, 22 nt, Human
aagucccaaagucacucugcuu

SEQ ID NO: 32670 - RNA, 22 nt, Human
aagucccugguuccuagcaaaa

SEQ ID NO: 32671 - RNA, 22 nt, Human
aaguccuagacuuggauaguuu

SEQ ID NO: 32672 - RNA, 20 nt, Human
aaguccugaccuagucuaaa

SEQ ID NO: 32673 - RNA, 22 nt, Human
aaguccugccaccuauaagccu

SEQ ID NO: 32674 - RNA, 22 nt, Human
aaguccugugcuagagacaccu

SEQ ID NO: 32675 - RNA, 22 nt, Human
aaguccugugugcuuacacuug

SEQ ID NO: 32676 - RNA, 22 nt, Human
aaguccuguuccucauacuucc

SEQ ID NO: 32677 - RNA, 22 nt, Human
aaguccuuaggaagcagucguu

SEQ ID NO: 32678 - RNA, 22 nt, Human
aaguccuuuccaguccugugau

SEQ ID NO: 32679 - RNA, 22 nt, Human
aaguccuuucucauggaggaau

SEQ ID NO: 32680 - RNA, 22 nt, Human
aagucuaaacacauauuuaaaa

SEQ ID NO: 32681 - RNA, 22 nt, Human
aagucuaaccuauuccgguguu

SEQ ID NO: 32682 - RNA, 22 nt, Human
aagucucucugugugggauaag

SEQ ID NO: 32683 - RNA, 22 nt, Human
aagucucuuuucuuccuguauu

SEQ ID NO: 32684 - RNA, 22 nt, Human
aagucuggaagucucaguuuuc

SEQ ID NO: 32685 - RNA, 22 nt, Human
aagucugggccagggcacagcc

SEQ ID NO: 32686 - RNA, 22 nt, Human
aagucuggugcuguccucaccc

SEQ ID NO: 32687 - RNA, 22 nt, Human
aagucuguagaaaaacaguuua

SEQ ID NO: 32688 - RNA, 22 nt, Human
aagucuuacagacaagcugaag

SEQ ID NO: 32689 - RNA, 22 nt, Human
aagucuuacauaaacaggaaau

SEQ ID NO: 32690 - RNA, 22 nt, Human
aagucuuauuugucauguaugu

SEQ ID NO: 32691 - RNA, 22 nt, Human
aagucuugaugaucuccuccuu

SEQ ID NO: 32692 - RNA, 18 nt, Human
aagucuuggaauuuccac

SEQ ID NO: 32693 - RNA, 22 nt, Human
aagucuugguagagaaggacuu

SEQ ID NO: 32694 - RNA, 22 nt, Human
aagucuuucauaagucucuuau

SEQ ID NO: 32695 - RNA, 22 nt, Human
aagucuuuuugaaucuauaacu

SEQ ID NO: 32696 - RNA, 22 nt, Human
aagugaaacauguaucucuuua

SEQ ID NO: 32697 - RNA, 22 nt, Human
aagugaaucuccuuucuuuauu

SEQ ID NO: 32698 - RNA, 22 nt, Human
aagugaauggggcagacuucag

SEQ ID NO: 32699 - RNA, 22 nt, Human
aagugaauucauuguguuauau

SEQ ID NO: 32700 - RNA, 22 nt, Human
aagugacuuaaucuccucucag

SEQ ID NO: 32701 - RNA, 22 nt, Human
aagugagugaaaaugcagaaua

SEQ ID NO: 32702 - RNA, 22 nt, Human
aagugagugguaaggagcaugg

SEQ ID NO: 32703 - RNA, 22 nt, Human
aagugauacaucuagucuauaa

SEQ ID NO: 32704 - RNA, 22 nt, Human
aagugaugcuacgacuuugaca

SEQ ID NO: 32705 - RNA, 22 nt, Human
aagugauuaaccaugcucugcu

SEQ ID NO: 32706 - RNA, 22 nt, Human
aagugauuugcaugcuuaauuc

SEQ ID NO: 32707 - RNA, 22 nt, Human
aagugauuuuccuacuugcuaa

SEQ ID NO: 32708 - RNA, 22 nt, Human
aagugcaauuugaaauucugca

SEQ ID NO: 32709 - RNA, 22 nt, Human
aagugcagagagcugacgaacu

SEQ ID NO: 32710 - RNA, 22 nt, Human
aagugcuaggauuacaggugug

SEQ ID NO: 32711 - RNA, 23 nt, Human
aagugcuauguuuauaagagcug

SEQ ID NO: 32712 - RNA, 22 nt, Human
aagugcucccauauccugcccu

SEQ ID NO: 32713 - RNA, 22 nt, Human
aagugcuguacaguguguaaau

SEQ ID NO: 32714 - RNA, 22 nt, Human
aagugcuguuucugaugaaugc

SEQ ID NO: 32715 - RNA, 22 nt, Human
aagugcuugaucauaguucuca

SEQ ID NO: 32716 - RNA, 22 nt, Human
aagugcuuuaaaauuuccugag

SEQ ID NO: 32717 - RNA, 22 nt, Human
aaguggagccagggaaacugaa

SEQ ID NO: 32718 - RNA, 22 nt, Human
aaguggagcuauaggcucagau

SEQ ID NO: 32719 - RNA, 22 nt, Human
aaguggaggccgaguucacgca

SEQ ID NO: 32720 - RNA, 22 nt, Human
aaguggcacgcuuuuuggaguu

SEQ ID NO: 32721 - RNA, 22 nt, Human
aaguggcaguucaggaagcaga

SEQ ID NO: 32722 - RNA, 22 nt, Human
aaguggcauguauaagaaagaa

SEQ ID NO: 32723 - RNA, 22 nt, Human
aaguggcucauguggcuucugc

SEQ ID NO: 32724 - RNA, 22 nt, Human
aaguggcuuugagcuucugcca

SEQ ID NO: 32725 - RNA, 22 nt, Human
aaguggggccuggugguacagu

SEQ ID NO: 32726 - RNA, 22 nt, Human
aagugggucagggacagaucuu

SEQ ID NO: 32727 - RNA, 22 nt, Human
aagugguagacaaagauaauug

SEQ ID NO: 32728 - RNA, 22 nt, Human
aagugguaggaagagagcacug

SEQ ID NO: 32729 - RNA, 21 nt, Human
aagugguuuagguuaccgggg

SEQ ID NO: 32730 - RNA, 22 nt, Human
aagugguuugauucaguuuaug

SEQ ID NO: 32731 - RNA, 22 nt, Human
aaguguaaauucacagacuuca

SEQ ID NO: 32732 - RNA, 22 nt, Human
aaguguauuuuuguacuaacau

SEQ ID NO: 32733 - RNA, 22 nt, Human
aagugucaauauuuuuguaggu

SEQ ID NO: 32734 - RNA, 22 nt, Human
aagugucuacauuugcuaacca

SEQ ID NO: 32735 - RNA, 22 nt, Human
aagugucuucugauggggugug

SEQ ID NO: 32736 - RNA, 22 nt, Human
aagugugggaaguugcuaaaau

SEQ ID NO: 32737 - RNA, 22 nt, Human
aagugugucuggcggcccagug

SEQ ID NO: 32738 - RNA, 22 nt, Human
aagugugucuugggaagggagg

SEQ ID NO: 32739 - RNA, 22 nt, Human
aagugugugggcaggcaguggu

SEQ ID NO: 32740 - RNA, 22 nt, Human
aaguguguugacugaauugggg

SEQ ID NO: 32741 - RNA, 22 nt, Human
aaguguguuuucaguguacuua

SEQ ID NO: 32742 - RNA, 22 nt, Human
aaguguuuaaauuauuugcagg

SEQ ID NO: 32743 - RNA, 22 nt, Human
aaguguuuacuuaaagucaugg

SEQ ID NO: 32744 - RNA, 22 nt, Human
aaguguuuagguuugcagucga

SEQ ID NO: 32745 - RNA, 22 nt, Human
aaguguuuaugguuauuguuaa

SEQ ID NO: 32746 - RNA, 22 nt, Human
aaguguuuccauugugcaggcu

SEQ ID NO: 32747 - RNA, 22 nt, Human
aauauuucuguagcuauguucu

SEQ ID NO: 32748 - RNA, 22 nt, Human
aauauuugcaucauuagcuauu

SEQ ID NO: 32749 - RNA, 19 nt, Human
aauauuuuagccucuuccu

SEQ ID NO: 32750 - RNA, 22 nt, Human
aauauuuuaggcuuuccaggcu

SEQ ID NO: 32751 - RNA, 22 nt, Human
aaucaaagaaugggcuaguugg

SEQ ID NO: 32752 - RNA, 21 nt, Human
aaucaagaguacugguguggc

SEQ ID NO: 32753 - RNA, 22 nt, Human
aaucaagaguuguguaauauuu

SEQ ID NO: 32754 - RNA, 22 nt, Human
aaucaaguauuuuccaguggca

SEQ ID NO: 32755 - RNA, 23 nt, Human
aaucacacguuuggccaggaugc

SEQ ID NO: 32756 - RNA, 20 nt, Human
aaucacaguuaacucuuucu

SEQ ID NO: 32757 - RNA, 22 nt, Human
aaucagaaagaucuugaugaga

SEQ ID NO: 32758 - RNA, 22 nt, Human
aaucagaaaggcuaaggaagca

SEQ ID NO: 32759 - RNA, 22 nt, Human
aaucagaaauugagggucuggu

SEQ ID NO: 32760 - RNA, 22 nt, Human
aaucagagcaagacauggaaca

SEQ ID NO: 32761 - RNA, 21 nt, Human
aaucagaggcuuccuaguugg

SEQ ID NO: 32762 - RNA, 17 nt, Human
aaucagauuucugagga

SEQ ID NO: 32763 - RNA, 22 nt, Human
aaucagcaaaugcuuacucagg

SEQ ID NO: 32764 - RNA, 22 nt, Human
aaucagccauuuuuccaaggag

SEQ ID NO: 32765 - RNA, 19 nt, Human
aaucaggagccuaauuagg

SEQ ID NO: 32766 - RNA, 22 nt, Human
aaucaggaggauaagggggucc

SEQ ID NO: 32767 - RNA, 22 nt, Human
aaucaggagugugcacuuugau

SEQ ID NO: 32768 - RNA, 22 nt, Human
aaucaggaugacugucauuuca

SEQ ID NO: 32769 - RNA, 22 nt, Human
aaucagucucauuuagcaggga

SEQ ID NO: 32770 - RNA, 21 nt, Human
aaucaguguucucaggggcaa

SEQ ID NO: 32771 - RNA, 21 nt, Human
aaucauacaaaacaugucagg

SEQ ID NO: 32772 - RNA, 22 nt, Human
aaucaucacgaacacaacagcg

SEQ ID NO: 32773 - RNA, 22 nt, Human
aaucauccugaagucaauaaag

SEQ ID NO: 32774 - RNA, 22 nt, Human
aaucaugugggauagucugcuc

SEQ ID NO: 32775 - RNA, 22 nt, Human
aaucauucuuauuucacagcaa

SEQ ID NO: 32776 - RNA, 22 nt, Human
aaucauuguaaaugguuuuguu

SEQ ID NO: 32777 - RNA, 22 nt, Human
aaucauuguugucguuccuaga

SEQ ID NO: 32778 - RNA, 22 nt, Human
aauccacggcaacacugggccc

SEQ ID NO: 32779 - RNA, 22 nt, Human
aauccacuuugugccccucucu

SEQ ID NO: 32780 - RNA, 22 nt, Human
aauccagcugugucacagguga

SEQ ID NO: 32781 - RNA, 22 nt, Human
aauccagguggcggagguugug

SEQ ID NO: 32782 - RNA, 22 nt, Human
aauccaugcaugcaaggaaagg

SEQ ID NO: 32783 - RNA, 22 nt, Human
aaucccauuguggaauuaagga

SEQ ID NO: 32784 - RNA, 22 nt, Human
aaucccuccccaggcaaguccu

SEQ ID NO: 32785 - RNA, 22 nt, Human
aauccgauucguguacauuaau

SEQ ID NO: 32786 - RNA, 22 nt, Human
aauccugaccugggcaugcuug

SEQ ID NO: 32787 - RNA, 22 nt, Human
aauccuuacugaaugagaaaaa

SEQ ID NO: 32788 - RNA, 22 nt, Human
aaguucaaggcagguccugagg

SEQ ID NO: 32789 - RNA, 22 nt, Human
aaguucaaggcucuagaguucc

SEQ ID NO: 32790 - RNA, 22 nt, Human
aaguucaaguaguguuacaugg

SEQ ID NO: 32791 - RNA, 23 nt, Human
aaguucaagucacagccugucuu

SEQ ID NO: 32792 - RNA, 22 nt, Human
aaguucaaucagaugaaaaagc

SEQ ID NO: 32793 - RNA, 22 nt, Human
aaguucaauggaaaagcuuuag

SEQ ID NO: 32794 - RNA, 22 nt, Human
aaguuccuugaaugaagcuagg

SEQ ID NO: 32795 - RNA, 22 nt, Human
aaguucuacuguggguaaaaug

SEQ ID NO: 32796 - RNA, 22 nt, Human
aaguucuauaucugccucacca

SEQ ID NO: 32797 - RNA, 19 nt, Human
aaguucucagaguucaaag

SEQ ID NO: 32798 - RNA, 22 nt, Human
aaguucuuagacaagcuugugg

SEQ ID NO: 32799 - RNA, 22 nt, Human
aaguucuugcugugugucagau

SEQ ID NO: 32800 - RNA, 22 nt, Human
aaguucuuguauuugccuuucu

SEQ ID NO: 32801 - RNA, 22 nt, Human
aaguucuuucauaucuuaauua

SEQ ID NO: 32802 - RNA, 22 nt, Human
aaguucuuugccagacacgugu

SEQ ID NO: 32803 - RNA, 22 nt, Human
aaguugaaucaguaacacaguu

SEQ ID NO: 32804 - RNA, 22 nt, Human
aaguugaaugcguacgugacau

SEQ ID NO: 32805 - RNA, 22 nt, Human
aaguugagaugucauaggagac

SEQ ID NO: 32806 - RNA, 22 nt, Human
aaguugauuaaucuuucgagaa

SEQ ID NO: 32807 - RNA, 22 nt, Human
aaguugcuaaugauguguuugc

SEQ ID NO: 32808 - RNA, 22 nt, Human
aaguugcuagugcuuuucugag

SEQ ID NO: 32809 - RNA, 22 nt, Human
aaguuggaaucuggaacugauc

SEQ ID NO: 32810 - RNA, 22 nt, Human
aaguugguaggagacagaaggu

SEQ ID NO: 32811 - RNA, 22 nt, Human
aaguugguguaugagacagaag

SEQ ID NO: 32812 - RNA, 22 nt, Human
aaguuguaacagaaauuuaaug

SEQ ID NO: 32813 - RNA, 22 nt, Human
aaguuguagucagaugucaguu

SEQ ID NO: 32814 - RNA, 22 nt, Human
aaguuguauauaccgcuuuaag

SEQ ID NO: 32815 - RNA, 22 nt, Human
aaguuguaugucuuagaaagua

SEQ ID NO: 32816 - RNA, 23 nt, Human
aaguuguuuuuggccagggaaag

SEQ ID NO: 32817 - RNA, 22 nt, Human
aaguuuaacuugaauucuuucu

SEQ ID NO: 32818 - RNA, 22 nt, Human
aaguuuacuggggagaucaccu

SEQ ID NO: 32819 - RNA, 22 nt, Human
aaguuuagggaagucugagcgc

SEQ ID NO: 32820 - RNA, 22 nt, Human
aaguuuaguagggacagaugga

SEQ ID NO: 32821 - RNA, 22 nt, Human
aaguuuagucuugucuuaguaa

SEQ ID NO: 32822 - RNA, 22 nt, Human
aaguuuaguuaaguaaacucuu

SEQ ID NO: 32823 - RNA, 22 nt, Human
aaguuuaucccucucacaguua

SEQ ID NO: 32824 - RNA, 22 nt, Human
aaguuuaugaagucuaagccaa

SEQ ID NO: 32825 - RNA, 22 nt, Human
aaguuuauguucuuugaaggca

SEQ ID NO: 32826 - RNA, 22 nt, Human
aaguuuauguugguaagauauc

SEQ ID NO: 32827 - RNA, 22 nt, Human
aaguuucaaauauaaaauuaca

SEQ ID NO: 32828 - RNA, 22 nt, Human
aaguuucaagagguucuuugaa

SEQ ID NO: 32829 - RNA, 22 nt, Human
aaguuucauguggagguagacu

SEQ ID NO: 32830 - RNA, 22 nt, Human
aaguuucugccauacuguggug

SEQ ID NO: 32831 - RNA, 22 nt, Human
aaguuucuguucauaucucuga

SEQ ID NO: 32832 - RNA, 22 nt, Human
aaguuucuguucgcuuuaauaa

SEQ ID NO: 32833 - RNA, 22 nt, Human
aaguuugacagaaguuucuaau

SEQ ID NO: 32834 - RNA, 22 nt, Human
aaguuugcauagauuaagcauu

SEQ ID NO: 32835 - RNA, 22 nt, Human
aaguuugucucauuugaucuuc

SEQ ID NO: 32836 - RNA, 22 nt, Human
aaguuugugagguuaaucccuu

SEQ ID NO: 32837 - RNA, 22 nt, Human
aaguuuguggucauuuauuaua

SEQ ID NO: 32838 - RNA, 22 nt, Human
aaguuugugguuauacuugauu

SEQ ID NO: 32839 - RNA, 22 nt, Human
aaguuuuaacaaguacuuacua

SEQ ID NO: 32840 - RNA, 22 nt, Human
aaguuuuacugaggacacaugu

SEQ ID NO: 32841 - RNA, 22 nt, Human
aaguuuuaugggaagaugugca

SEQ ID NO: 32842 - RNA, 22 nt, Human
aaguuuuugauucuaagagaga

SEQ ID NO: 32843 - RNA, 20 nt, Human
aauaaaagaagccuucaccc

SEQ ID NO: 32844 - RNA, 22 nt, Human
aauaaaaugaacugguagaguu

SEQ ID NO: 32845 - RNA, 22 nt, Human
aauaaaauggucaguuuucuca

SEQ ID NO: 32846 - RNA, 22 nt, Human
aauaaacaaauccuuccuuccc

SEQ ID NO: 32847 - RNA, 22 nt, Human
aauaaagcaggguccuugcacu

SEQ ID NO: 32848 - RNA, 22 nt, Human
aauaaagcaugaggcauuuauc

SEQ ID NO: 32849 - RNA, 22 nt, Human
aauaaagccugucucuuuagag

SEQ ID NO: 32850 - RNA, 22 nt, Human
aauaaaucaauccuauugguag

SEQ ID NO: 32851 - RNA, 22 nt, Human
aauaacagagucuucaagauag

SEQ ID NO: 32852 - RNA, 22 nt, Human
aauaacaggcucaucagaugcu

SEQ ID NO: 32853 - RNA, 22 nt, Human
aauaacagugccaugaaauuga

SEQ ID NO: 32854 - RNA, 21 nt, Human
aauaaccacuaauauaguggc

SEQ ID NO: 32855 - RNA, 22 nt, Human
aauaacuggcacauaucacaua

SEQ ID NO: 32856 - RNA, 21 nt, Human
acaaugcauggaacucauggc

SEQ ID NO: 32857 - RNA, 21 nt, Human
acaaugucaaggucagacauu

SEQ ID NO: 32858 - RNA, 22 nt, Human
acaaugucugcuauuuggcucu

SEQ ID NO: 32859 - RNA, 22 nt, Human
acaaugucuuugucuccuucag

SEQ ID NO: 32860 - RNA, 22 nt, Human
acaauguguuuuuauacauuug

SEQ ID NO: 32861 - RNA, 22 nt, Human
acaauguuucucuuuagucauu

SEQ ID NO: 32862 - RNA, 22 nt, Human
acaauucauuaaugugagguag

SEQ ID NO: 32863 - RNA, 22 nt, Human
acaauuccacauggcaugcagg

SEQ ID NO: 32864 - RNA, 22 nt, Human
acaauuccugagaauacuuguu

SEQ ID NO: 32865 - RNA, 22 nt, Human
acaauuucaccuuuugguucaa

SEQ ID NO: 32866 - RNA, 22 nt, Human
acaauuucuaauauagaucuua

SEQ ID NO: 32867 - RNA, 22 nt, Human
acacaaaaucaaaguccuaggc

SEQ ID NO: 32868 - RNA, 22 nt, Human
acacaaacagucuauagcacca

SEQ ID NO: 32869 - RNA, 22 nt, Human
acacaaacugcuagaaaauugg

SEQ ID NO: 32870 - RNA, 22 nt, Human
acacaaauuguaggauaauugc

SEQ ID NO: 32871 - RNA, 22 nt, Human
acacaagaauaaugaugaaggu

SEQ ID NO: 32872 - RNA, 22 nt, Human
acacaagauuguguauugaauu

SEQ ID NO: 32873 - RNA, 20 nt, Human
acacaagcacuucugguauu

SEQ ID NO: 32874 - RNA, 22 nt, Human
acacaaguucuaaagauugcgc

SEQ ID NO: 32875 - RNA, 22 nt, Human
acacaaugcauauuuuuccaga

SEQ ID NO: 32876 - RNA, 22 nt, Human
acacacaaaucuauuagugaau

SEQ ID NO: 32877 - RNA, 22 nt, Human
acacacaacucauuguguaaua

SEQ ID NO: 32878 - RNA, 22 nt, Human
acacacaauuaguuuuaugcuu

SEQ ID NO: 32879 - RNA, 22 nt, Human
acacacacaagcagguugugga

SEQ ID NO: 32880 - RNA, 22 nt, Human
acacacagaguuuauacaggca

SEQ ID NO: 32881 - RNA, 22 nt, Human
acacacagcgccuaccaugugc

SEQ ID NO: 32882 - RNA, 22 nt, Human
acacacaugcaugcuugccauu

SEQ ID NO: 32883 - RNA, 22 nt, Human
acacacaugccuuuccuaagua

SEQ ID NO: 32884 - RNA, 22 nt, Human
acacacaugguauuguucagaa

SEQ ID NO: 32885 - RNA, 22 nt, Human
acacacucaauugcauaagcac

SEQ ID NO: 32886 - RNA, 22 nt, Human
acacacuggagguaaauggggu

SEQ ID NO: 32887 - RNA, 20 nt, Human
acacacuuugaucuugagcc

SEQ ID NO: 32888 - RNA, 22 nt, Human
acacacuuuugcuaaaaauugu

SEQ ID NO: 32889 - RNA, 20 nt, Human
acacagacucagcuuggaug

SEQ ID NO: 32890 - RNA, 22 nt, Human
acacagagauguaaaguuaggc

SEQ ID NO: 32891 - RNA, 22 nt, Human
acacagagcaaaucaugacaga

SEQ ID NO: 32892 - RNA, 22 nt, Human
acacagagccagggaauacagu

SEQ ID NO: 32893 - RNA, 22 nt, Human
acacagagguggccacucuuuu

SEQ ID NO: 32894 - RNA, 22 nt, Human
acacagauauuuugaauacaua

SEQ ID NO: 32895 - RNA, 22 nt, Human
acacagaugcauuacacaucua

SEQ ID NO: 32896 - RNA, 22 nt, Human
acacagcaaggucugacuuugg

SEQ ID NO: 32897 - RNA, 21 nt, Human
acacagcugccggagacggau

SEQ ID NO: 32898 - RNA, 22 nt, Human
acacagcugugcaguuuuuuca

SEQ ID NO: 32899 - RNA, 22 nt, Human
acacaggacggcccuguggcuu

SEQ ID NO: 32900 - RNA, 22 nt, Human
acacaggagauauguaauggcu

SEQ ID NO: 32901 - RNA, 19 nt, Human
acacagggcuagaguuaca

SEQ ID NO: 32902 - RNA, 22 nt, Human
acacagggucuagaguuaggcc

SEQ ID NO: 32903 - RNA, 22 nt, Human
acacagguacacauauguaccu

SEQ ID NO: 32904 - RNA, 22 nt, Human
acacaguaaauauugucuccuc

SEQ ID NO: 32905 - RNA, 17 nt, Human
acacaguacuuuuuugc

SEQ ID NO: 32906 - RNA, 22 nt, Human
acacaguaugacauuggcagag

SEQ ID NO: 32907 - RNA, 22 nt, Human
acacaguauuacaauaggugcu

SEQ ID NO: 32908 - RNA, 22 nt, Human
acacaguggugagucuggaccu

SEQ ID NO: 32909 - RNA, 22 nt, Human
acacagugguguuuacaaaauu

SEQ ID NO: 32910 - RNA, 22 nt, Human
acacagugucuuagguaguguc

SEQ ID NO: 32911 - RNA, 22 nt, Human
acacauaagaaacuacaaagag

SEQ ID NO: 32912 - RNA, 22 nt, Human
acacauaagccuaaucaucucc

SEQ ID NO: 32913 - RNA, 22 nt, Human
acacauauaugucgaaguccuc

SEQ ID NO: 32914 - RNA, 22 nt, Human
acacauaucuaagauagaugac

SEQ ID NO: 32915 - RNA, 22 nt, Human
acacauaugcagaucccccaca

SEQ ID NO: 32916 - RNA, 22 nt, Human
acacauaugccauuacagcaaa

SEQ ID NO: 32917 - RNA, 22 nt, Human
acacauaugguugguaggaguu

SEQ ID NO: 32918 - RNA, 22 nt, Human
acacauauguaugcaucaugug

SEQ ID NO: 32919 - RNA, 22 nt, Human
acacauauguggcaacuguaga

SEQ ID NO: 32920 - RNA, 22 nt, Human
acacaucagaaauaugaaugag

SEQ ID NO: 32921 - RNA, 22 nt, Human
acacaucaugccaaguuucacc

SEQ ID NO: 32922 - RNA, 22 nt, Human
acacaucuaucucuacacaagg

SEQ ID NO: 32923 - RNA, 22 nt, Human
acacaucuccagccagcaggag

SEQ ID NO: 32924 - RNA, 19 nt, Human
acacaugaggagggacccc

SEQ ID NO: 32925 - RNA, 22 nt, Human
acacaugaguucucaucuugug

SEQ ID NO: 32926 - RNA, 22 nt, Human
acacaugauuaaugccaagcau

SEQ ID NO: 32927 - RNA, 22 nt, Human
acacaugcacaacaguucuuuc

SEQ ID NO: 32928 - RNA, 22 nt, Human
acacaugcauaagccuucccuu

SEQ ID NO: 32929 - RNA, 20 nt, Human
acacaugcauagagagagag

SEQ ID NO: 32930 - RNA, 20 nt, Human
acacaugcauucaugugggc

SEQ ID NO: 32931 - RNA, 22 nt, Human
acacaugcgauagagagguagg

SEQ ID NO: 32932 - RNA, 22 nt, Human
acacauguaaaacacuuagcaa

SEQ ID NO: 32933 - RNA, 22 nt, Human
acacauguuuacagucuucagu

SEQ ID NO: 32934 - RNA, 22 nt, Human
acacauguuuccaaaagcaccc

SEQ ID NO: 32935 - RNA, 22 nt, Human
acacauuaaaacgucuacaaug

SEQ ID NO: 32936 - RNA, 22 nt, Human
aaugcuuccaaaauaccaagcc

SEQ ID NO: 32937 - RNA, 22 nt, Human
aaugcuuucucagaguccuuca

SEQ ID NO: 32938 - RNA, 22 nt, Human
aaugcuuugucugcuccagacu

SEQ ID NO: 32939 - RNA, 18 nt, Human
aauggaaggggugcuguu

SEQ ID NO: 32940 - RNA, 21 nt, Human
aauggaaguuuaaagguaucc

SEQ ID NO: 32941 - RNA, 22 nt, Human
aauggagaggcugugagugaga

SEQ ID NO: 32942 - RNA, 22 nt, Human
aauggcaaaaggauaacaagga

SEQ ID NO: 32943 - RNA, 22 nt, Human
aauggcaacaugguauagugag

SEQ ID NO: 32944 - RNA, 22 nt, Human
aauggcaagagccacagaggcg

SEQ ID NO: 32945 - RNA, 22 nt, Human
aauggcaagcugaacucagaag

SEQ ID NO: 32946 - RNA, 22 nt, Human
aauggcaaggaaaccguuacca

SEQ ID NO: 32947 - RNA, 22 nt, Human
aauggcagaaugggccagaagc

SEQ ID NO: 32948 - RNA, 22 nt, Human
aauggccagcugggagaguuga

SEQ ID NO: 32949 - RNA, 22 nt, Human
aauggccuuugagaugaaaggg

SEQ ID NO: 32950 - RNA, 21 nt, Human
aauggcugggcaaggucucuc

SEQ ID NO: 32951 - RNA, 22 nt, Human
aauggcuggguuucauuuugua

SEQ ID NO: 32952 - RNA, 22 nt, Human
aauggcuucuuuuugguauaau

SEQ ID NO: 32953 - RNA, 22 nt, Human
aauggcuugcaaauggguccau

SEQ ID NO: 32954 - RNA, 22 nt, Human
aauggcuuucagcaaggauaga

SEQ ID NO: 32955 - RNA, 22 nt, Human
aauggcuuuggucuggguccca

SEQ ID NO: 32956 - RNA, 22 nt, Human
aauggcuuuugcacuuaaaucg

SEQ ID NO: 32957 - RNA, 22 nt, Human
aaugggagagaacacaaagucc

SEQ ID NO: 32958 - RNA, 22 nt, Human
aaugggagguaguaugggaggu

SEQ ID NO: 32959 - RNA, 22 nt, Human
aaugggauaauuguucauggga

SEQ ID NO: 32960 - RNA, 22 nt, Human
aaugggauaggucuucaggaau

SEQ ID NO: 32961 - RNA, 22 nt, Human
aaugguaauauuucauaguugu

SEQ ID NO: 32962 - RNA, 22 nt, Human
aaugguaauuugcagaaagucc

SEQ ID NO: 32963 - RNA, 22 nt, Human
aauggucaaaaagauacguaaa

SEQ ID NO: 32964 - RNA, 22 nt, Human
aauggucacuauguaaggugau

SEQ ID NO: 32965 - RNA, 18 nt, Human
acacacacaccuguguau

SEQ ID NO: 32966 - RNA, 22 nt, Human
acacacagaaggaagccccacu

SEQ ID NO: 32967 - RNA, 22 nt, Human
acacacagguaaaggagccugg

SEQ ID NO: 32968 - RNA, 22 nt, Human
acacacgugcucaacacgcucc

SEQ ID NO: 32969 - RNA, 21 nt, Human
acacacuacacauuccuaguu

SEQ ID NO: 32970 - RNA, 21 nt, Human
acacacucugagucuucuauu

SEQ ID NO: 32971 - RNA, 22 nt, Human
acacacuguaaggacuaucacu

SEQ ID NO: 32972 - RNA, 22 nt, Human
acacacuucacccuugagcuaa

SEQ ID NO: 32973 - RNA, 22 nt, Human
acacacuucagauguaauuugu

SEQ ID NO: 32974 - RNA, 22 nt, Human
acacacuugcagagaggaggga

SEQ ID NO: 32975 - RNA, 22 nt, Human
acacacuuuaaauuaaaccucu

SEQ ID NO: 32976 - RNA, 17 nt, Human
acacagacaggcagaca

SEQ ID NO: 32977 - RNA, 22 nt, Human
acacagaggaaagugugaaggg

SEQ ID NO: 32978 - RNA, 21 nt, Human
acacagaggcaucaucacuuu

SEQ ID NO: 32979 - RNA, 22 nt, Human
acacagagggcagaagauacau

SEQ ID NO: 32980 - RNA, 20 nt, Human
acacagagugagucugcuug

SEQ ID NO: 32981 - RNA, 22 nt, Human
acacagauaaugcucauauagg

SEQ ID NO: 32982 - RNA, 22 nt, Human
acacagauauuguacuugaucc

SEQ ID NO: 32983 - RNA, 22 nt, Human
acacagauuucacuggaauaga

SEQ ID NO: 32984 - RNA, 22 nt, Human
acacagcaacuugcaguaugga

SEQ ID NO: 32985 - RNA, 22 nt, Human
acacagccgugaaucugcuucu

SEQ ID NO: 32986 - RNA, 22 nt, Human
acacagcuagugaguggcagag

SEQ ID NO: 32987 - RNA, 22 nt, Human
acacagcuaugggguaggaaac

SEQ ID NO: 32988 - RNA, 22 nt, Human
acacagcuuucagucauuaucu

SEQ ID NO: 32989 - RNA, 22 nt, Human
acacaggaaaugguuuaguuuu

SEQ ID NO: 32990 - RNA, 22 nt, Human
acacaggaacucaagcucgcuu

SEQ ID NO: 32991 - RNA, 22 nt, Human
acacaggaacucugagaggugg

SEQ ID NO: 32992 - RNA, 22 nt, Human
acacaggacagggauguguuuu

SEQ ID NO: 32993 - RNA, 18 nt, Human
acacaggcugacagcacc

SEQ ID NO: 32994 - RNA, 17 nt, Human
acacagggagagggagc

SEQ ID NO: 32995 - RNA, 22 nt, Human
acacagggauauuucagguggu

SEQ ID NO: 32996 - RNA, 22 nt, Human
acacagggcaaugcuuugaccu

SEQ ID NO: 32997 - RNA, 22 nt, Human
acacagggcugcgccugacccc

SEQ ID NO: 32998 - RNA, 22 nt, Human
acacagguuaaaauaauuggga

SEQ ID NO: 32999 - RNA, 22 nt, Human
acacagguuccaucuccaccuu

SEQ ID NO: 33000 - RNA, 21 nt, Human
acacaguaacugggcgcaggg

SEQ ID NO: 33001 - RNA, 20 nt, Human
acacaguagaugagugacug

SEQ ID NO: 33002 - RNA, 22 nt, Human
acacaguaucaaauuucaucuu

SEQ ID NO: 33003 - RNA, 22 nt, Human
acacaguaugcaucuagaaauu

SEQ ID NO: 33004 - RNA, 22 nt, Human
acacaguucuuagcaggugucu

SEQ ID NO: 33005 - RNA, 22 nt, Human
acacaguucuuucacuguuggu

SEQ ID NO: 33006 - RNA, 22 nt, Human
acacaguuuaugguauucuguu

SEQ ID NO: 33007 - RNA, 22 nt, Human
acacauacauggggaagaugag

SEQ ID NO: 33008 - RNA, 20 nt, Human
acacauagauaagaagcuga

SEQ ID NO: 33009 - RNA, 20 nt, Human
acacauauagcagcauaaac

SEQ ID NO: 33010 - RNA, 22 nt, Human
acacauauauacauauuugugc

SEQ ID NO: 33011 - RNA, 22 nt, Human
acacauaugucauugaaaaauc

SEQ ID NO: 33012 - RNA, 22 nt, Human
acacaucagccucagcuuuggg

SEQ ID NO: 33013 - RNA, 22 nt, Human
acacaucucaggggacacucuc

SEQ ID NO: 33014 - RNA, 22 nt, Human
acacaucuuagacugaaauaug

SEQ ID NO: 33015 - RNA, 22 nt, Human
acacaugaaucacugguggaag

SEQ ID NO: 33016 - RNA, 22 nt, Human
acacaugugauucuaagacagc

SEQ ID NO: 33017 - RNA, 20 nt, Human
acacaugugcguguucagua

SEQ ID NO: 33018 - RNA, 22 nt, Human
acacaugugucugcaugcagug

SEQ ID NO: 33019 - RNA, 22 nt, Human
acacauguucaagaauguucag

SEQ ID NO: 33020 - RNA, 22 nt, Human
acacauguuuguguagucaguu

SEQ ID NO: 33021 - RNA, 22 nt, Human
acacauuaugagcaguugucuu

SEQ ID NO: 33022 - RNA, 22 nt, Human
acacauuccugcagacaugaug

SEQ ID NO: 33023 - RNA, 22 nt, Human
acacauugcagacaucucauua

SEQ ID NO: 33024 - RNA, 22 nt, Human
acacauuuauuacaugcaugug

SEQ ID NO: 33025 - RNA, 22 nt, Human
acacauuucucccagucuccau

SEQ ID NO: 33026 - RNA, 22 nt, Human
acacauuucucuuuuuguaagu

SEQ ID NO: 33027 - RNA, 22 nt, Human
acacauuuucaacacugucaag

SEQ ID NO: 33028 - RNA, 22 nt, Human
acaccaaaguagaauuaaugua

SEQ ID NO: 33029 - RNA, 22 nt, Human
acaccacaaguaacucuuuucc

SEQ ID NO: 33030 - RNA, 22 nt, Human
acaccagggauaugaggaagga

SEQ ID NO: 33031 - RNA, 22 nt, Human
acaccauacucauguugguucc

SEQ ID NO: 33032 - RNA, 22 nt, Human
acacccagagcgccagugccga

SEQ ID NO: 33033 - RNA, 22 nt, Human
acacccagauuaugcacacaaa

SEQ ID NO: 33034 - RNA, 22 nt, Human
acacccuuguccauagcagaug

SEQ ID NO: 33035 - RNA, 22 nt, Human
acaccuuugccccaagucauag

SEQ ID NO: 33036 - RNA, 22 nt, Human
acaccuuuuauucgccaggcac

SEQ ID NO: 33037 - RNA, 22 nt, Human
acacggaaucccuuuugugaca

SEQ ID NO: 33038 - RNA, 22 nt, Human
acacgguggccagcaguaggug

SEQ ID NO: 33039 - RNA, 23 nt, Human
acacguguguguacauagauagu

SEQ ID NO: 33040 - RNA, 22 nt, Human
acacuaaaugagucuacaguac

SEQ ID NO: 33041 - RNA, 23 nt, Human
acacuaaaugugaaggagcaaag

SEQ ID NO: 33042 - RNA, 22 nt, Human
acacuaagguuggagucacagu

SEQ ID NO: 33043 - RNA, 22 nt, Human
acacuaguagaauaguguuugc

SEQ ID NO: 33044 - RNA, 22 nt, Human
acacuauacuuccauugcuggu

SEQ ID NO: 33045 - RNA, 22 nt, Human
acacucacccucccacugccug

SEQ ID NO: 33046 - RNA, 22 nt, Human
acacucaguaaacgacaauggg

SEQ ID NO: 33047 - RNA, 22 nt, Human
acacucuacagagcaaucuacc

SEQ ID NO: 33048 - RNA, 22 nt, Human
acacucugcucugagcuucagg

SEQ ID NO: 33049 - RNA, 22 nt, Human
acacucugugaggcauguaaug

SEQ ID NO: 33050 - RNA, 22 nt, Human
acacucuuucacuaccuuaauu

SEQ ID NO: 33051 - RNA, 22 nt, Human
acacucuuuuugugguugucua

SEQ ID NO: 33052 - RNA, 22 nt, Human
acacugaagagcacuuucaaag

SEQ ID NO: 33053 - RNA, 22 nt, Human
acacugacugggcaguauaguc

SEQ ID NO: 33054 - RNA, 19 nt, Human
acacugaucagaucagcag

SEQ ID NO: 33055 - RNA, 22 nt, Human
acagagcugggugcccccugga

SEQ ID NO: 33056 - RNA, 22 nt, Human
acagaggaagcauauagcacaa

SEQ ID NO: 33057 - RNA, 22 nt, Human
acagaggacaacuaggcgcuca

SEQ ID NO: 33058 - RNA, 22 nt, Human
acagaggccgccucucucacgg

SEQ ID NO: 33059 - RNA, 22 nt, Human
acagaggccucguagguacaac

SEQ ID NO: 33060 - RNA, 22 nt, Human
acagaggggucacagccugaag

SEQ ID NO: 33061 - RNA, 22 nt, Human
acagagggucugggcacaggac

SEQ ID NO: 33062 - RNA, 22 nt, Human
acagaggguuucuaaggauuug

SEQ ID NO: 33063 - RNA, 22 nt, Human
acagaggucaccuuuguaucuu

SEQ ID NO: 33064 - RNA, 22 nt, Human
acagagguggaccucagcaggc

SEQ ID NO: 33065 - RNA, 22 nt, Human
acagagguguguguaggacagu

SEQ ID NO: 33066 - RNA, 23 nt, Human
acagaguacagugugcuuagugg

SEQ ID NO: 33067 - RNA, 22 nt, Human
acagaguacauucagagacuau

SEQ ID NO: 33068 - RNA, 22 nt, Human
acagaguaggugcucaguaaau

SEQ ID NO: 33069 - RNA, 22 nt, Human
acagaguaucuaucaggaguau

SEQ ID NO: 33070 - RNA, 22 nt, Human
acagagucaugguagucaaagg

SEQ ID NO: 33071 - RNA, 19 nt, Human
acagaguccagaggaaagg

SEQ ID NO: 33072 - RNA, 22 nt, Human
acagagucugacagguaggcgc

SEQ ID NO: 33073 - RNA, 22 nt, Human
acagagucuuacguggugauaa

SEQ ID NO: 33074 - RNA, 22 nt, Human
uguaagaaucagucuuuaaugu

SEQ ID NO: 33075 - RNA, 22 nt, Human
uguaagauauucagcuuauuga

SEQ ID NO: 33076 - RNA, 22 nt, Human
uguaaggacaacaggagaaaaa

SEQ ID NO: 33077 - RNA, 22 nt, Human
uguaaggagugugaguuugagu

SEQ ID NO: 33078 - RNA, 21 nt, Human
uguaaguuucaucugaauugg

SEQ ID NO: 33079 - RNA, 22 nt, Human
uguaaugagucacuuaccuuaa

SEQ ID NO: 33080 - RNA, 22 nt, Human
uguaauuaaacugaagacagaa

SEQ ID NO: 33081 - RNA, 22 nt, Human
uguguauagaugcaugcauaua

SEQ ID NO: 33082 - RNA, 22 nt, Human
uguguauauauguuuaagucau

SEQ ID NO: 33083 - RNA, 20 nt, Human
uguguaugugcacaugcgaa

SEQ ID NO: 33084 - RNA, 22 nt, Human
uguguauuaccauuuuacagcu

SEQ ID NO: 33085 - RNA, 22 nt, Human
uguguauucugagguagguaua

SEQ ID NO: 33086 - RNA, 22 nt, Human
uguguauuucuggaacagacua

SEQ ID NO: 33087 - RNA, 22 nt, Human
ugugucaaagucaggugucacu

SEQ ID NO: 33088 - RNA, 22 nt, Human
ugugucaaaguguggaguauuu

SEQ ID NO: 33089 - RNA, 22 nt, Human
ugugucaaguggaauuucaggg

SEQ ID NO: 33090 - RNA, 22 nt, Human
ugugucaauuuucauuccuacu

SEQ ID NO: 33091 - RNA, 22 nt, Human
ugugucagagguagagauggca

SEQ ID NO: 33092 - RNA, 19 nt, Human
ugugucagcagggggcuuc

SEQ ID NO: 33093 - RNA, 20 nt, Human
ugugucaggcccugauuaaa

SEQ ID NO: 33094 - RNA, 22 nt, Human
ugugucauagagagcacaaauc

SEQ ID NO: 33095 - RNA, 22 nt, Human
uguguccacugaauguguauua

SEQ ID NO: 33096 - RNA, 19 nt, Human
uguguccuagcagccaguc

SEQ ID NO: 33097 - RNA, 22 nt, Human
uguguccucagggaagcagaga

SEQ ID NO: 33098 - RNA, 22 nt, Human
uguguccucuuaccucugaccc

SEQ ID NO: 33099 - RNA, 22 nt, Human
uguguccugugcaaggggauga

SEQ ID NO: 33100 - RNA, 22 nt, Human
uguguccuuucuuaagagugag

SEQ ID NO: 33101 - RNA, 22 nt, Human
uguguccuuuggaggaucagcg

SEQ ID NO: 33102 - RNA, 22 nt, Human
ugugucucauuuccuccugcug

SEQ ID NO: 33103 - RNA, 22 nt, Human
ugugucuccauagccagcuagc

SEQ ID NO: 33104 - RNA, 22 nt, Human
ugugucucuccuggaagcacgu

SEQ ID NO: 33105 - RNA, 22 nt, Human
ugugucucuuuguccuagagcu

SEQ ID NO: 33106 - RNA, 22 nt, Human
ugugucugaacaugcuuuguaa

SEQ ID NO: 33107 - RNA, 22 nt, Human
ugugucugaacuaguugcucuc

SEQ ID NO: 33108 - RNA, 23 nt, Human
ugugucuguuuagggaggaugug

SEQ ID NO: 33109 - RNA, 22 nt, Human
ugugucuuuggcgaugucugga

SEQ ID NO: 33110 - RNA, 20 nt, Human
ugugugaacacggacucugu

SEQ ID NO: 33111 - RNA, 22 nt, Human
ugugugaacauguuuucauuuc

SEQ ID NO: 33112 - RNA, 22 nt, Human
ugugugaagugauuuuaagucu

SEQ ID NO: 33113 - RNA, 22 nt, Human
ugugugaaucuauugaauauau

SEQ ID NO: 33114 - RNA, 22 nt, Human
ugugugaauucugagcaguuua

SEQ ID NO: 33115 - RNA, 22 nt, Human
ugugugacccccagugaagccu

SEQ ID NO: 33116 - RNA, 22 nt, Human
ugugugaggacucagugaaaca

SEQ ID NO: 33117 - RNA, 22 nt, Human
ugugugaggauuccugguucuu

SEQ ID NO: 33118 - RNA, 22 nt, Human
ugugugaguaaggcugagagag

SEQ ID NO: 33119 - RNA, 22 nt, Human
ugugugauugcaggagaugugg

SEQ ID NO: 33120 - RNA, 19 nt, Human
ugugugcaaauggaagcca

SEQ ID NO: 33121 - RNA, 22 nt, Human
ugugugcacaaagaguacaugg

SEQ ID NO: 33122 - RNA, 22 nt, Human
ugugugcacaggaguguuugaa

SEQ ID NO: 33123 - RNA, 22 nt, Human
ugugugcagacagauauuacuu

SEQ ID NO: 33124 - RNA, 21 nt, Human
ugugugcauaugcauguacau

SEQ ID NO: 33125 - RNA, 20 nt, Human
ugugugcaucuguauguauu

SEQ ID NO: 33126 - RNA, 22 nt, Human
ugugugccagauacaagcacug

SEQ ID NO: 33127 - RNA, 22 nt, Human
ugugugccccagaugaguagcu

SEQ ID NO: 33128 - RNA, 22 nt, Human
ugugugccugagccgugccugg

SEQ ID NO: 33129 - RNA, 22 nt, Human
ugugugcucgauggcccugcag

SEQ ID NO: 33130 - RNA, 22 nt, Human
uguguggauucaucucaaagag

SEQ ID NO: 33131 - RNA, 22 nt, Human
ugugugggagcacgggcuguug

SEQ ID NO: 33132 - RNA, 22 nt, Human
ugugugggugguaaggaaggcc

SEQ ID NO: 33133 - RNA, 22 nt, Human
uguguguaaggaagcuuuaugg

SEQ ID NO: 33134 - RNA, 22 nt, Human
uguguguacucuccaguccuga

SEQ ID NO: 33135 - RNA, 22 nt, Human
uguguguauaauaaugucugca

SEQ ID NO: 33136 - RNA, 19 nt, Human
uguguguauuucaguucuu

SEQ ID NO: 33137 - RNA, 22 nt, Human
ugugugucagucuuguuuaggg

SEQ ID NO: 33138 - RNA, 22 nt, Human
ugugugucauuuaggguggagc

SEQ ID NO: 33139 - RNA, 22 nt, Human
ugugugucugcacauguauaau

SEQ ID NO: 33140 - RNA, 22 nt, Human
ugugugugcacaugcauauaca

SEQ ID NO: 33141 - RNA, 22 nt, Human
ugugugugcacgugcgcgcgag

SEQ ID NO: 33142 - RNA, 22 nt, Human
uguguguguccucauuugcaga

SEQ ID NO: 33143 - RNA, 22 nt, Human
uguguguucucaauuauugaug

SEQ ID NO: 33144 - RNA, 22 nt, Human
uguguuaaggcacugauaucug

SEQ ID NO: 33145 - RNA, 22 nt, Human
uguguuaaggugcaucuagugc

SEQ ID NO: 33146 - RNA, 22 nt, Human
uguguuaauuuauugccucaga

SEQ ID NO: 33147 - RNA, 19 nt, Human
uguguucaaacuccaucuc

SEQ ID NO: 33148 - RNA, 22 nt, Human
uguguucagcaggcaccuucuu

SEQ ID NO: 33149 - RNA, 22 nt, Human
uguguucaucuuuaaagggaag

SEQ ID NO: 33150 - RNA, 22 nt, Human
uguguucauguauguauacaua

SEQ ID NO: 33151 - RNA, 22 nt, Human
uguguucauguugauucauagc

SEQ ID NO: 33152 - RNA, 22 nt, Human
uguguuccuucgucuucccuuc

SEQ ID NO: 33153 - RNA, 22 nt, Human
uguguucugaaggagaagagug

SEQ ID NO: 33154 - RNA, 22 nt, Human
uguguucuggcugugacagcug

SEQ ID NO: 33155 - RNA, 21 nt, Human
uguguucuucuaggucagcua

SEQ ID NO: 33156 - RNA, 22 nt, Human
uguguuuacuucuaugcaguuu

SEQ ID NO: 33157 - RNA, 22 nt, Human
uguguuucagaaccuucuuuca

SEQ ID NO: 33158 - RNA, 22 nt, Human
uguguuuuaaauggaaauuuga

SEQ ID NO: 33159 - RNA, 22 nt, Human
uguguuuuaucuauuguaucuu

SEQ ID NO: 33160 - RNA, 22 nt, Human
uguuaaaaaugcagauuccuau

SEQ ID NO: 33161 - RNA, 22 nt, Human
uguuaaaaccacaggugaggac

SEQ ID NO: 33162 - RNA, 22 nt, Human
uguuaaacagcugucuucuuca

SEQ ID NO: 33163 - RNA, 20 nt, Human
uguuaaaggacacuugcuuu

SEQ ID NO: 33164 - RNA, 22 nt, Human
uguuaaaugcucagcucgggga

SEQ ID NO: 33165 - RNA, 22 nt, Human
uguuaaauguuccuuuacugga

SEQ ID NO: 33166 - RNA, 22 nt, Human
uguuaaauugauucaccuuucu

SEQ ID NO: 33167 - RNA, 22 nt, Human
uguuaacaauaaguccaggcau

SEQ ID NO: 33168 - RNA, 22 nt, Human
uguuaacauacugcuuucuaau

SEQ ID NO: 33169 - RNA, 22 nt, Human
uguuaagagaguuucuaauauu

SEQ ID NO: 33170 - RNA, 22 nt, Human
uguuaaggagacacaugaaaaa

SEQ ID NO: 33171 - RNA, 22 nt, Human
uguuaaggguaaacagcaguaa

SEQ ID NO: 33172 - RNA, 22 nt, Human
uguuaaguugccaguguaugac

SEQ ID NO: 33173 - RNA, 22 nt, Human
uguuaauauacuaaaauccacu

SEQ ID NO: 33174 - RNA, 22 nt, Human
uguuacaaacuguuguuucuau

SEQ ID NO: 33175 - RNA, 23 nt, Human
uguuacaagcaccacagguggcu

SEQ ID NO: 33176 - RNA, 22 nt, Human
uguuacaaggaagaauguaggu

SEQ ID NO: 33177 - RNA, 22 nt, Human
uguuacacccacaaaaaauucc

SEQ ID NO: 33178 - RNA, 22 nt, Human
uguuacagcagaauugaaagag

SEQ ID NO: 33179 - RNA, 22 nt, Human
uguuacagggauaaaugaggua

SEQ ID NO: 33180 - RNA, 22 nt, Human
uguuacagucauuguuuucuga

SEQ ID NO: 33181 - RNA, 22 nt, Human
uguuaccauaggucagaacguu

SEQ ID NO: 33182 - RNA, 22 nt, Human
uguuacuucuuauuucuuacau

SEQ ID NO: 33183 - RNA, 22 nt, Human
uguuagaaaggcuauuggacca

SEQ ID NO: 33184 - RNA, 22 nt, Human
uguuagaaguuaaucacuaauu

SEQ ID NO: 33185 - RNA, 22 nt, Human
uguuagaauauuguaauauucg

SEQ ID NO: 33186 - RNA, 22 nt, Human
uguuagagcuaagauaacaucu

SEQ ID NO: 33187 - RNA, 22 nt, Human
uguuagauuccugaugaauuua

SEQ ID NO: 33188 - RNA, 22 nt, Human
uguuagccucaugcuuaauagg

SEQ ID NO: 33189 - RNA, 16 nt, Human
uguuagcugugcauua

SEQ ID NO: 33190 - RNA, 22 nt, Human
uucaacaaguaguacacacagu

SEQ ID NO: 33191 - RNA, 22 nt, Human
uucaacaaguauuuauugagca

SEQ ID NO: 33192 - RNA, 22 nt, Human
uucaacaauuaaguaucagccu

SEQ ID NO: 33193 - RNA, 22 nt, Human
uucaacagugauggccuuugua

SEQ ID NO: 33194 - RNA, 22 nt, Human
uucaacauaugaauuuugggug

SEQ ID NO: 33195 - RNA, 22 nt, Human
uucaacaugcaaacauguuugu

SEQ ID NO: 33196 - RNA, 22 nt, Human
uucaacaugcaaacuuugggag

SEQ ID NO: 33197 - RNA, 19 nt, Human
uucaacaugcugaggcagc

SEQ ID NO: 33198 - RNA, 22 nt, Human
uucaacauuugaaaugaaugaa

SEQ ID NO: 33199 - RNA, 22 nt, Human
uucaacuaauguuuauuuuaug

SEQ ID NO: 33200 - RNA, 22 nt, Human
uucaacuagauuuauacaauuc

SEQ ID NO: 33201 - RNA, 22 nt, Human
uucaacuauuaugaauaaaauu

SEQ ID NO: 33202 - RNA, 22 nt, Human
uucaacucuucaagaucacauc

SEQ ID NO: 33203 - RNA, 22 nt, Human
uucaacuuuggagauuuaauaa

SEQ ID NO: 33204 - RNA, 22 nt, Human
uucaagaggcuuaauucuggau

SEQ ID NO: 33205 - RNA, 23 nt, Human
uucaagauacgguuuccaggcug

SEQ ID NO: 33206 - RNA, 17 nt, Human
uucaagauauugaaaug

SEQ ID NO: 33207 - RNA, 21 nt, Human
uucaagauauuuaaaaggugg

SEQ ID NO: 33208 - RNA, 22 nt, Human
uucaagaucgaguuuaaaguga

SEQ ID NO: 33209 - RNA, 22 nt, Human
uucaagauggccccagugagcc

SEQ ID NO: 33210 - RNA, 22 nt, Human
uucaagguaugguagcugguca

SEQ ID NO: 33211 - RNA, 22 nt, Human
uucaaguagucacacaugauau

SEQ ID NO: 33212 - RNA, 22 nt, Human
uucaaguaugagaaaggggacu

SEQ ID NO: 33213 - RNA, 22 nt, Human
uucaagucaauuuuugaaugac

SEQ ID NO: 33214 - RNA, 22 nt, Human
uucaagucugaagaggacuaau

SEQ ID NO: 33215 - RNA, 22 nt, Human
uucaagucuggagaucuggaac

SEQ ID NO: 33216 - RNA, 22 nt, Human
uucaaguuuacuuugaaguuua

SEQ ID NO: 33217 - RNA, 22 nt, Human
uucaaguuuuauauccauggcu

SEQ ID NO: 33218 - RNA, 22 nt, Human
uucaaguuuuauauugaagcaa

SEQ ID NO: 33219 - RNA, 22 nt, Human
uucaaguuuugacuuaguccuu

SEQ ID NO: 33220 - RNA, 22 nt, Human
uucaauagaaagucccuaguua

SEQ ID NO: 33221 - RNA, 22 nt, Human
uucaauaucauuguuuagucuc

SEQ ID NO: 33222 - RNA, 22 nt, Human
uucaauaucucuaagaaugagg

SEQ ID NO: 33223 - RNA, 22 nt, Human
uucaauaugauauuagcugugg

SEQ ID NO: 33224 - RNA, 22 nt, Human
uucaaucauugcaaaguaaugg

SEQ ID NO: 33225 - RNA, 21 nt, Human
uucaaugaaaacaaagugagg

SEQ ID NO: 33226 - RNA, 22 nt, Human
uucaaugauuuuuagggaucau

SEQ ID NO: 33227 - RNA, 22 nt, Human
uucaaugcaagggaggucugaa

SEQ ID NO: 33228 - RNA, 22 nt, Human
uucaaugcuuauauggacuaau

SEQ ID NO: 33229 - RNA, 22 nt, Human
uucacaaagcuggagcauuucc

SEQ ID NO: 33230 - RNA, 21 nt, Human
uucacaaccugcuuuaguggg

SEQ ID NO: 33231 - RNA, 22 nt, Human
uucacaagucauuagcugcaua

SEQ ID NO: 33232 - RNA, 19 nt, Human
uucacaauuaugaaauuag

SEQ ID NO: 33233 - RNA, 22 nt, Human
uucacaauuucccuucaucagg

SEQ ID NO: 33234 - RNA, 22 nt, Human
uucacacacagcuuccuauugu

SEQ ID NO: 33235 - RNA, 22 nt, Human
uucacacagaaucugaggagcu

SEQ ID NO: 33236 - RNA, 22 nt, Human
uucacacuguuuuucauagugg

SEQ ID NO: 33237 - RNA, 22 nt, Human
uucacacuuguuaggauggcuu

SEQ ID NO: 33238 - RNA, 22 nt, Human
uucacacuuuggaauuccaccu

SEQ ID NO: 33239 - RNA, 22 nt, Human
uucacagagagaacucaaacca

SEQ ID NO: 33240 - RNA, 23 nt, Human
uucacagauuaaauauuucuucu

SEQ ID NO: 33241 - RNA, 22 nt, Human
uucacaggcuuggagguggggg

SEQ ID NO: 33242 - RNA, 22 nt, Human
uucacagggccacuggcaggag

SEQ ID NO: 33243 - RNA, 22 nt, Human
uucacaggugacuggggauaac

SEQ ID NO: 33244 - RNA, 22 nt, Human
uucacagguugaagccuaaucc

SEQ ID NO: 33245 - RNA, 22 nt, Human
uucacaguauagguuuccagcg

SEQ ID NO: 33246 - RNA, 22 nt, Human
uucacagucacccuucuccaug

SEQ ID NO: 33247 - RNA, 22 nt, Human
uucacaguggcugacaggcugg

SEQ ID NO: 33248 - RNA, 22 nt, Human
uucacaguuuaauggcaaggau

SEQ ID NO: 33249 - RNA, 22 nt, Human
uucacauaggagcaugguuuuu

SEQ ID NO: 33250 - RNA, 22 nt, Human
uucacaucucagcacugccucu

SEQ ID NO: 33251 - RNA, 22 nt, Human
uucacauuaucaggauuguuuc

SEQ ID NO: 33252 - RNA, 22 nt, Human
uucacauugaaggugcuuucuu

SEQ ID NO: 33253 - RNA, 22 nt, Human
uucacauugugguucaugugaa

SEQ ID NO: 33254 - RNA, 19 nt, Human
uucacauuuugcucugagg

SEQ ID NO: 33255 - RNA, 19 nt, Human
uucacauuuuuguggcacu

SEQ ID NO: 33256 - RNA, 22 nt, Human
uucaccccaaauucccagugga

SEQ ID NO: 33257 - RNA, 22 nt, Human
uucaccgugaaccgauuccuca

SEQ ID NO: 33258 - RNA, 22 nt, Human
uucaccuggcacaugugagccu

SEQ ID NO: 33259 - RNA, 22 nt, Human
uucacugcuacauccaggugcc

SEQ ID NO: 33260 - RNA, 22 nt, Human
uucacugugauguuuaagagaa

SEQ ID NO: 33261 - RNA, 22 nt, Human
uucacuguuggcuuugcuuguc

SEQ ID NO: 33262 - RNA, 22 nt, Human
uucacuguuucauccuacuucu

SEQ ID NO: 33263 - RNA, 22 nt, Human
uucagaaaaagaccauugcaau

SEQ ID NO: 33264 - RNA, 22 nt, Human
uucagaaauaaaauaucccaac

SEQ ID NO: 33265 - RNA, 22 nt, Human
uucagaaaugucagccaucaga

SEQ ID NO: 33266 - RNA, 22 nt, Human
uucagaaauucauggaguucag

SEQ ID NO: 33267 - RNA, 22 nt, Human
uucagaacaaccaugguuagau

SEQ ID NO: 33268 - RNA, 22 nt, Human
uucagaacugucuguccuuuuc

SEQ ID NO: 33269 - RNA, 22 nt, Human
uucagaaggugcagccugggcc

SEQ ID NO: 33270 - RNA, 22 nt, Human
uucagaauauccguuuaaguuu

SEQ ID NO: 33271 - RNA, 22 nt, Human
uuagaauuucugcucacuuuga

SEQ ID NO: 33272 - RNA, 23 nt, Human
uuagacaauccucaaaagguaau

SEQ ID NO: 33273 - RNA, 22 nt, Human
uuagacaaucuguugguaaggu

SEQ ID NO: 33274 - RNA, 22 nt, Human
uuagacauuaaaugccauuuaa

SEQ ID NO: 33275 - RNA, 22 nt, Human
uuagacuagaagcuuccacuuu

SEQ ID NO: 33276 - RNA, 22 nt, Human
uuagagaaccaaugaauagucu

SEQ ID NO: 33277 - RNA, 22 nt, Human
uuagagauugucuaguauugug

SEQ ID NO: 33278 - RNA, 22 nt, Human
uuagagcaggaguugacagauu

SEQ ID NO: 33279 - RNA, 22 nt, Human
uuagagccaguuacaaggucaa

SEQ ID NO: 33280 - RNA, 22 nt, Human
uuagagcugauaguacacuggu

SEQ ID NO: 33281 - RNA, 22 nt, Human
uuagaggaaagugacuccgaug

SEQ ID NO: 33282 - RNA, 22 nt, Human
uuagaggacuguaggugggaau

SEQ ID NO: 33283 - RNA, 21 nt, Human
uuagaguagagaacaugaucc

SEQ ID NO: 33284 - RNA, 22 nt, Human
uuagaguagagccauuucuguu

SEQ ID NO: 33285 - RNA, 21 nt, Human
uuagaguugccauuauaugua

SEQ ID NO: 33286 - RNA, 22 nt, Human
uuagaguuuucuguuccucuaa

SEQ ID NO: 33287 - RNA, 22 nt, Human
uuagauacccaaguggaucugu

SEQ ID NO: 33288 - RNA, 18 nt, Human
uuagauacuagugugcua

SEQ ID NO: 33289 - RNA, 22 nt, Human
uuagauaggacucauagauugg

SEQ ID NO: 33290 - RNA, 22 nt, Human
uuagaucaauacuaaagaaguu

SEQ ID NO: 33291 - RNA, 22 nt, Human
uuagaucauuuugaacuaauuu

SEQ ID NO: 33292 - RNA, 22 nt, Human
uuagauuuacaagcacuguuua

SEQ ID NO: 33293 - RNA, 22 nt, Human
uuagauuuauaugugagaaugg

SEQ ID NO: 33294 - RNA, 21 nt, Human
uuagcaaagcaaacacaugcu

SEQ ID NO: 33295 - RNA, 22 nt, Human
uuagcaaauuuccaggugaugc

SEQ ID NO: 33296 - RNA, 22 nt, Human
uuagcaauaugaaugcauuugc

SEQ ID NO: 33297 - RNA, 22 nt, Human
uuagcacccugauacuagaaug

SEQ ID NO: 33298 - RNA, 22 nt, Human
uuagcagcaucccuggccugua

SEQ ID NO: 33299 - RNA, 22 nt, Human
uugccaccgucauggccauuau

SEQ ID NO: 33300 - RNA, 22 nt, Human
uugccagauaggcaugaaaagu

SEQ ID NO: 33301 - RNA, 22 nt, Human
uugccaggcucugguuccagcc

SEQ ID NO: 33302 - RNA, 22 nt, Human
uugccaggggacaucuggagcc

SEQ ID NO: 33303 - RNA, 22 nt, Human
uugccagggucaggaugagauc

SEQ ID NO: 33304 - RNA, 22 nt, Human
uugccaucccuuaccucaguca

SEQ ID NO: 33305 - RNA, 22 nt, Human
uugccauuaaaacauguuaucu

SEQ ID NO: 33306 - RNA, 22 nt, Human
uugcccaccuucuuuucgugcc

SEQ ID NO: 33307 - RNA, 22 nt, Human
uugcccacucagcccuguggag

SEQ ID NO: 33308 - RNA, 22 nt, Human
uugcccagagucacccagcuca

SEQ ID NO: 33309 - RNA, 22 nt, Human
uugcccagaguccacagcguac

SEQ ID NO: 33310 - RNA, 22 nt, Human
uugcccugcggguccugcgcaa

SEQ ID NO: 33311 - RNA, 22 nt, Human
uugcccugucaguagaagugca

SEQ ID NO: 33312 - RNA, 22 nt, Human
uugcccugucucacuauguuaa

SEQ ID NO: 33313 - RNA, 22 nt, Human
uugccuagaguugcacaucugg

SEQ ID NO: 33314 - RNA, 22 nt, Human
uugccucaagauuuuuuauuga

SEQ ID NO: 33315 - RNA, 22 nt, Human
uugccucauuuucuggugaaau

SEQ ID NO: 33316 - RNA, 22 nt, Human
uugccuccuuuuaaggaaauca

SEQ ID NO: 33317 - RNA, 22 nt, Human
uugccuggacucugcugguauu

SEQ ID NO: 33318 - RNA, 22 nt, Human
uugccuuguuauucucucagaa

SEQ ID NO: 33319 - RNA, 22 nt, Human
uugccuuuaaccccugaaaggc

SEQ ID NO: 33320 - RNA, 22 nt, Human
uugcgcgcggcuaggucucggu

SEQ ID NO: 33321 - RNA, 22 nt, Human
uugcuaaaaauggaauuauagg

SEQ ID NO: 33322 - RNA, 22 nt, Human
uugcuaaauguguuauaucugu

SEQ ID NO: 33323 - RNA, 22 nt, Human
uugcuaaguuauagaguaucuu

SEQ ID NO: 33324 - RNA, 22 nt, Human
uugcuaauaaaguuuuuaugug

SEQ ID NO: 33325 - RNA, 22 nt, Human
uugcuaaucauauuucaucacu

SEQ ID NO: 33326 - RNA, 22 nt, Human
uugcuagcugguguaugcauug

SEQ ID NO: 33327 - RNA, 22 nt, Human
uugcuauacucauuaguuauuu

SEQ ID NO: 33328 - RNA, 22 nt, Human
uugcucagcacuggagccagcu

SEQ ID NO: 33329 - RNA, 22 nt, Human
uugcucaggcuggugugcagug

SEQ ID NO: 33330 - RNA, 22 nt, Human
uugcucaggcuuagagcuacua

SEQ ID NO: 33331 - RNA, 22 nt, Human
uugcucauuccgugagaagauc

SEQ ID NO: 33332 - RNA, 22 nt, Human
uugcucauuugccuuuagguuu

SEQ ID NO: 33333 - RNA, 21 nt, Human
uugcucuacagugagggcagc

SEQ ID NO: 33334 - RNA, 22 nt, Human
uugcucugauuagguggaaaca

SEQ ID NO: 33335 - RNA, 22 nt, Human
uugcucugcaguccagacagua

SEQ ID NO: 33336 - RNA, 22 nt, Human
uugcucuguccagccagcaggu

SEQ ID NO: 33337 - RNA, 22 nt, Human
uugcugaaaacaggucaucagg

SEQ ID NO: 33338 - RNA, 22 nt, Human
uugcugaaagguagcugugugg

SEQ ID NO: 33339 - RNA, 22 nt, Human
uugcugaaaucuaugacauccu

SEQ ID NO: 33340 - RNA, 19 nt, Human
uugcugaaggaagccucug

SEQ ID NO: 33341 - RNA, 22 nt, Human
uugcugaaggccucuugggguu

SEQ ID NO: 33342 - RNA, 22 nt, Human
uugcugaaugcaaguuggauag

SEQ ID NO: 33343 - RNA, 22 nt, Human
uugcugauaaaauaaaccaaga

SEQ ID NO: 33344 - RNA, 22 nt, Human
uugcugauggagggaaugcuca

SEQ ID NO: 33345 - RNA, 22 nt, Human
uugcugauuuguuucuauucca

SEQ ID NO: 33346 - RNA, 22 nt, Human
uugcugccagcgcccugcaggg

SEQ ID NO: 33347 - RNA, 23 nt, Human
uugcugccugagccuuccucugg

SEQ ID NO: 33348 - RNA, 22 nt, Human
uugcugccuuggagaagcuccu

SEQ ID NO: 33349 - RNA, 22 nt, Human
uugcugccuugucucagggucu

SEQ ID NO: 33350 - RNA, 22 nt, Human
uugcuggcaauuuagagauuuc

SEQ ID NO: 33351 - RNA, 22 nt, Human
uugcuggcuugaagauagagga

SEQ ID NO: 33352 - RNA, 22 nt, Human
uugcuggggugugaaaucugau

SEQ ID NO: 33353 - RNA, 22 nt, Human
uugcugggucagaagccaggag

SEQ ID NO: 33354 - RNA, 22 nt, Human
uugcugggugcuauuaugaaca

SEQ ID NO: 33355 - RNA, 22 nt, Human
uugcuguagcucauuucacucu

SEQ ID NO: 33356 - RNA, 22 nt, Human
uugcugugucauuuguuuaauc

SEQ ID NO: 33357 - RNA, 22 nt, Human
uugcugugucugauggcugaga

SEQ ID NO: 33358 - RNA, 22 nt, Human
uugcuguuacaauuauuuaccc

SEQ ID NO: 33359 - RNA, 22 nt, Human
uugcuguugaugaugugauaca

SEQ ID NO: 33360 - RNA, 22 nt, Human
uugcuuauagagaguuucauac

SEQ ID NO: 33361 - RNA, 22 nt, Human
uugcuucacuacuucuaggcuc

SEQ ID NO: 33362 - RNA, 22 nt, Human
uugcuucaguagcucuuuaaag

SEQ ID NO: 33363 - RNA, 22 nt, Human
uugcuucauauuuguggcuugc

SEQ ID NO: 33364 - RNA, 22 nt, Human
uugcuucauuuccucaggcuuu

SEQ ID NO: 33365 - RNA, 22 nt, Human
uugcuuccucgaggccagcgug

SEQ ID NO: 33366 - RNA, 22 nt, Human
uugcuuccucuaguuucuugaa

SEQ ID NO: 33367 - RNA, 22 nt, Human
uugcuuccuggaugugacuuug

SEQ ID NO: 33368 - RNA, 22 nt, Human
uugcuucucagggccugaugca

SEQ ID NO: 33369 - RNA, 22 nt, Human
uugcuucuggaacuuucuguuc

SEQ ID NO: 33370 - RNA, 22 nt, Human
uugcuucuuagauauuccucuc

SEQ ID NO: 33371 - RNA, 22 nt, Human
uugcuugacuuuguguaccugu

SEQ ID NO: 33372 - RNA, 23 nt, Human
uugcuugagcccaggaaguggag

SEQ ID NO: 33373 - RNA, 22 nt, Human
uugcuugcuucuauuuuauaca

SEQ ID NO: 33374 - RNA, 22 nt, Human
uugcuuggcaggcuuccagucu

SEQ ID NO: 33375 - RNA, 15 nt, Human
uugcuuuaagacaug

SEQ ID NO: 33376 - RNA, 22 nt, Human
uugcuuuaagguaucuggagaa

SEQ ID NO: 33377 - RNA, 22 nt, Human
uugcuuuaaugagauuuugcca

SEQ ID NO: 33378 - RNA, 22 nt, Human
uugcuuuacaaaaauugauggu

SEQ ID NO: 33379 - RNA, 22 nt, Human
uugcuuuaucuaagcauggcca

SEQ ID NO: 33380 - RNA, 22 nt, Human
uugcuuuauuggguuuacugcc

SEQ ID NO: 33381 - RNA, 22 nt, Human
uugcuuuccgucaugugcuaau

SEQ ID NO: 33382 - RNA, 18 nt, Human
uugcuuuguaagcuugca

SEQ ID NO: 33383 - RNA, 22 nt, Human
uugcuuuguuuaaaagugguau

SEQ ID NO: 33384 - RNA, 22 nt, Human
uugcuuuucccugucucugauu

SEQ ID NO: 33385 - RNA, 22 nt, Human
uugcuuuugugugcucucugga

SEQ ID NO: 33386 - RNA, 22 nt, Human
uuggaaacuuggauggaaaacc

SEQ ID NO: 33387 - RNA, 22 nt, Human
uuggaaagauuauuauuaugaa

SEQ ID NO: 33388 - RNA, 22 nt, Human
uuggaaagcaacuuuugagagu

SEQ ID NO: 33389 - RNA, 22 nt, Human
uuggaaaggagauucuauugug

SEQ ID NO: 33390 - RNA, 22 nt, Human
uuggaaaguuuuuacugaagac

SEQ ID NO: 33391 - RNA, 22 nt, Human
uuggaacacagcagcugauuuu

SEQ ID NO: 33392 - RNA, 22 nt, Human
uuggaacagaaacagacaaaua

SEQ ID NO: 33393 - RNA, 20 nt, Human
uuggaacaguggaucagcag

SEQ ID NO: 33394 - RNA, 22 nt, Human
uuggaacucaauaauucuucuu

SEQ ID NO: 33395 - RNA, 22 nt, Human
uuggaacucuaccaacaguagu

SEQ ID NO: 33396 - RNA, 22 nt, Human
uuggaacuggaggaacaugcua

SEQ ID NO: 33397 - RNA, 22 nt, Human
uuggaacuuaacccugauaggu

SEQ ID NO: 33398 - RNA, 22 nt, Human
uuggaagacaaugcugauucuc

SEQ ID NO: 33399 - RNA, 22 nt, Human
uuggaagaccagaggccuuguc

SEQ ID NO: 33400 - RNA, 22 nt, Human
uuggaagaggaaaaugagccua

SEQ ID NO: 33401 - RNA, 22 nt, Human
uuggaagaucuaacagaggcau

SEQ ID NO: 33402 - RNA, 22 nt, Human
uuggaagcgagcacauggagga

SEQ ID NO: 33403 - RNA, 22 nt, Human
uuggaaggaauuaaggucauga

SEQ ID NO: 33404 - RNA, 22 nt, Human
uuggaaggaccaggccuugauu

SEQ ID NO: 33405 - RNA, 22 nt, Human
uuggaagggaacaccauuugac

SEQ ID NO: 33406 - RNA, 22 nt, Human
uuggaaggguuucaguuagucu

SEQ ID NO: 33407 - RNA, 22 nt, Human
uuggaagguucuggucaugguu

SEQ ID NO: 33408 - RNA, 22 nt, Human
uuucuaguccucaugcaucauu

SEQ ID NO: 33409 - RNA, 22 nt, Human
uuucuagugguuaagauuuaca

SEQ ID NO: 33410 - RNA, 22 nt, Human
uuucuauagcuuucuugggagu

SEQ ID NO: 33411 - RNA, 22 nt, Human
uuucuaucugagaagauaucua

SEQ ID NO: 33412 - RNA, 22 nt, Human
uuucuauuggcgucacuguugu

SEQ ID NO: 33413 - RNA, 22 nt, Human
uuucuauuuuaaaggcauaugg

SEQ ID NO: 33414 - RNA, 18 nt, Human
uuucucagacucucuuuc

SEQ ID NO: 33415 - RNA, 22 nt, Human
uuucucagagcacggggaguga

SEQ ID NO: 33416 - RNA, 22 nt, Human
uuucucagcuguggagccuauc

SEQ ID NO: 33417 - RNA, 22 nt, Human
uuucucaguaguaauggcaguc

SEQ ID NO: 33418 - RNA, 22 nt, Human
uuucucagucacaugaaccaau

SEQ ID NO: 33419 - RNA, 22 nt, Human
uuucucauggacccuucaugau

SEQ ID NO: 33420 - RNA, 22 nt, Human
uuucucauggcccuuggcuuuu

SEQ ID NO: 33421 - RNA, 16 nt, Human
uuucucauugucauca

SEQ ID NO: 33422 - RNA, 22 nt, Human
uuucuccaauguaucagcacac

SEQ ID NO: 33423 - RNA, 22 nt, Human
uuucucccaacucuggaagcca

SEQ ID NO: 33424 - RNA, 22 nt, Human
uuucucccagucuccugagaca

SEQ ID NO: 33425 - RNA, 22 nt, Human
uuucucccuccacuacaggcuc

SEQ ID NO: 33426 - RNA, 22 nt, Human
uuucucgcguuugagcucucag

SEQ ID NO: 33427 - RNA, 22 nt, Human
uuucucggcagagaugaugggc

SEQ ID NO: 33428 - RNA, 22 nt, Human
uuucucucuggcccugauuguc

SEQ ID NO: 33429 - RNA, 22 nt, Human
uugcuuuagguauagaauccau

SEQ ID NO: 33430 - RNA, 22 nt, Human
uugcuuuauauucaagagagga

SEQ ID NO: 33431 - RNA, 23 nt, Human
uugcuuucaucaugagaugcucc

SEQ ID NO: 33432 - RNA, 22 nt, Human
uugcuuuuaauuaaucauugcu

SEQ ID NO: 33433 - RNA, 22 nt, Human
uuggaaaccaggcuuugagacg

SEQ ID NO: 33434 - RNA, 22 nt, Human
uuggaaacgucaccuuuuccuu

SEQ ID NO: 33435 - RNA, 22 nt, Human
uuggaaagaccgaauuccuguu

SEQ ID NO: 33436 - RNA, 22 nt, Human
uuggaaagggaggaauguagac

SEQ ID NO: 33437 - RNA, 22 nt, Human
uuggaaaugauuucuauuauua

SEQ ID NO: 33438 - RNA, 22 nt, Human
uuggaaauggcuguaguuauga

SEQ ID NO: 33439 - RNA, 21 nt, Human
uuggaacaagcagcaguuugc

SEQ ID NO: 33440 - RNA, 23 nt, Human
uuggaacacaguaaaugcacaau

SEQ ID NO: 33441 - RNA, 22 nt, Human
uuggaacacuagaaucuguacu

SEQ ID NO: 33442 - RNA, 22 nt, Human
uuggaacaugccgggguccagg

SEQ ID NO: 33443 - RNA, 22 nt, Human
uuggaagaaauaucaauagugu

SEQ ID NO: 33444 - RNA, 22 nt, Human
uuggaagcccucugcaagaucc

SEQ ID NO: 33445 - RNA, 22 nt, Human
uuggaaggauuuagagaugucu

SEQ ID NO: 33446 - RNA, 22 nt, Human
uuggaaggccagcaccuugagu

SEQ ID NO: 33447 - RNA, 22 nt, Human
uuggaaggcccugccuagcagg

SEQ ID NO: 33448 - RNA, 22 nt, Human
uuggaagggauauuggcauaug

SEQ ID NO: 33449 - RNA, 20 nt, Human
uuggaagguggagaagagga

SEQ ID NO: 33450 - RNA, 22 nt, Human
uuggaauccugagaugagaauu

SEQ ID NO: 33451 - RNA, 21 nt, Human
uuggaaucuuaggaguguggg

SEQ ID NO: 33452 - RNA, 22 nt, Human
uuggaauugaggauuuacauag

SEQ ID NO: 33453 - RNA, 22 nt, Human
uuggaauugugaacuaagugau

SEQ ID NO: 33454 - RNA, 22 nt, Human
uuggaauuuaguaaaauaaugc

SEQ ID NO: 33455 - RNA, 22 nt, Human
uuggaauuugagaccaagaaaa

SEQ ID NO: 33456 - RNA, 23 nt, Human
uuggacaaggccagagccagcac

SEQ ID NO: 33457 - RNA, 22 nt, Human
uuggaccaaauuaaaaguuggc

SEQ ID NO: 33458 - RNA, 23 nt, Human
uuggaccacuacuguuuucucuu

SEQ ID NO: 33459 - RNA, 17 nt, Human
uuggaccagauucuaaa

SEQ ID NO: 33460 - RNA, 22 nt, Human
uuggaccaugguagggaacuug

SEQ ID NO: 33461 - RNA, 22 nt, Human
uuggagaacuggcauuuuuaau

SEQ ID NO: 33462 - RNA, 22 nt, Human
uuggagagaggcugcucaggcu

SEQ ID NO: 33463 - RNA, 22 nt, Human
uuggagagauuaucagaccagc

SEQ ID NO: 33464 - RNA, 22 nt, Human
uuggagagauuuaggucucagu

SEQ ID NO: 33465 - RNA, 22 nt, Human
uuggagagggcuuggaucacac

SEQ ID NO: 33466 - RNA, 23 nt, Human
uuggagagggugaguagugucag

SEQ ID NO: 33467 - RNA, 22 nt, Human
uuggagauaucacaccuucaca

SEQ ID NO: 33468 - RNA, 22 nt, Human
uuggaggaagcucaugggggau

SEQ ID NO: 33469 - RNA, 22 nt, Human
uuggaggaggcauuggaggauu

SEQ ID NO: 33470 - RNA, 15 nt, Human
uuggaggauguagua

SEQ ID NO: 33471 - RNA, 22 nt, Human
uuggagggacagauggcuaggc

SEQ ID NO: 33472 - RNA, 22 nt, Human
uuggaggggccacugcagagcu

SEQ ID NO: 33473 - RNA, 22 nt, Human
uuggagugacagaugaggaaac

SEQ ID NO: 33474 - RNA, 22 nt, Human
uuggauaaaaauguuuaagugu

SEQ ID NO: 33475 - RNA, 22 nt, Human
uuggaucacucugaagccuuac

SEQ ID NO: 33476 - RNA, 22 nt, Human
uuggauccaucucaggcauagg

SEQ ID NO: 33477 - RNA, 22 nt, Human
uuggaugagagggugugguaca

SEQ ID NO: 33478 - RNA, 22 nt, Human
uuggaugagguugagaaucauu

SEQ ID NO: 33479 - RNA, 22 nt, Human
uuggauggagguucaagcacua

SEQ ID NO: 33480 - RNA, 21 nt, Human
uuggauguauuuauguuuuag

SEQ ID NO: 33481 - RNA, 20 nt, Human
uuggaugugcauggccgugc

SEQ ID NO: 33482 - RNA, 22 nt, Human
uuggcaaucaauucugacgucu

SEQ ID NO: 33483 - RNA, 22 nt, Human
uuggcacuauucacuccauggg

SEQ ID NO: 33484 - RNA, 22 nt, Human
uuggcacucauccugguuguuu

SEQ ID NO: 33485 - RNA, 22 nt, Human
uuggcacugugccuggcacauu

SEQ ID NO: 33486 - RNA, 22 nt, Human
uuggcagaaauguggcugggag

SEQ ID NO: 33487 - RNA, 22 nt, Human
uuggcagacugacaaucuguuu

SEQ ID NO: 33488 - RNA, 22 nt, Human
uuggcagaugagaccagggguu

SEQ ID NO: 33489 - RNA, 22 nt, Human
uuggcagauggauucaacauua

SEQ ID NO: 33490 - RNA, 22 nt, Human
uuggcagcaagaggcucuucug

SEQ ID NO: 33491 - RNA, 20 nt, Human
uuggcagcaguuccaaguga

SEQ ID NO: 33492 - RNA, 22 nt, Human
uuggcagggcugcuugucuagg

SEQ ID NO: 33493 - RNA, 22 nt, Human
uuggcaguaaaagaaaaugcuu

SEQ ID NO: 33494 - RNA, 22 nt, Human
uuggcaguagugguaguacauu

SEQ ID NO: 33495 - RNA, 21 nt, Human
uuggcagucagaaaugugagg

SEQ ID NO: 33496 - RNA, 22 nt, Human
uuggcagucagucuuggugcuu

SEQ ID NO: 33497 - RNA, 22 nt, Human
uuggcauaccuuagugguggag

SEQ ID NO: 33498 - RNA, 22 nt, Human
uuggcauccacuuugcaaguuu

SEQ ID NO: 33499 - RNA, 22 nt, Human
uuggcauuggagaugcaagaac

SEQ ID NO: 33500 - RNA, 22 nt, Human
uuggccaaagcucaccagugcu

SEQ ID NO: 33501 - RNA, 22 nt, Human
uuggccaaauacacaccuuuug

SEQ ID NO: 33502 - RNA, 22 nt, Human
uuggccaaccagaacggagguc

SEQ ID NO: 33503 - RNA, 22 nt, Human
uuggccaaggucacugggugag

SEQ ID NO: 33504 - RNA, 22 nt, Human
uuggccaauccuauuggguggg

SEQ ID NO: 33505 - RNA, 22 nt, Human
uuggccaauuccagaggaucau

SEQ ID NO: 33506 - RNA, 22 nt, Human
uuggccacaauccaagccuugg

SEQ ID NO: 33507 - RNA, 22 nt, Human
uuggccagcagcucuggcuuag

SEQ ID NO: 33508 - RNA, 22 nt, Human
uuggccagcgacgaccuucuua

SEQ ID NO: 33509 - RNA, 22 nt, Human
uuggccagcucuggaaaguggu

SEQ ID NO: 33510 - RNA, 22 nt, Human
uuggccagguguaggucacacc

SEQ ID NO: 33511 - RNA, 22 nt, Human
uuggccagguguccagcccagg

SEQ ID NO: 33512 - RNA, 22 nt, Human
uuggccagugcuugugauuuuc

SEQ ID NO: 33513 - RNA, 22 nt, Human
uuggcccacucucagaaugugg

SEQ ID NO: 33514 - RNA, 22 nt, Human
uuggcccagcaugcgggucugu

SEQ ID NO: 33515 - RNA, 22 nt, Human
uuggcccuagaugauuaaguug

SEQ ID NO: 33516 - RNA, 22 nt, Human
uuggcccuggcacacccccacg

SEQ ID NO: 33517 - RNA, 22 nt, Human
uugcaaauguuucauaacagua

SEQ ID NO: 33518 - RNA, 22 nt, Human
uugcaaauuaaagaggauagca

SEQ ID NO: 33519 - RNA, 22 nt, Human
uugcaaauuauauaagggaugc

SEQ ID NO: 33520 - RNA, 22 nt, Human
uugcaaauugcaagaguuggau

SEQ ID NO: 33521 - RNA, 22 nt, Human
uugcaacagguguguuuuggug

SEQ ID NO: 33522 - RNA, 22 nt, Human
uugcaacuaaaagaacuugaca

SEQ ID NO: 33523 - RNA, 16 nt, Human
uugcaaggcguuuaua

SEQ ID NO: 33524 - RNA, 22 nt, Human
uugcaaggcuagguucacccac

SEQ ID NO: 33525 - RNA, 22 nt, Human
uugcaagggcaugugugcgugu

SEQ ID NO: 33526 - RNA, 22 nt, Human
uugcaagguuucucucugccua

SEQ ID NO: 33527 - RNA, 22 nt, Human
uugcaaguuaaaaauuauuagu

SEQ ID NO: 33528 - RNA, 20 nt, Human
uugcacagagaaggaggcag

SEQ ID NO: 33529 - RNA, 22 nt, Human
uugcacagaguggauauucagu

SEQ ID NO: 33530 - RNA, 22 nt, Human
uugcacagaugagggugaugcu

SEQ ID NO: 33531 - RNA, 22 nt, Human
uugcacagaugcacaugguugc

SEQ ID NO: 33532 - RNA, 23 nt, Human
uugcacaguuucggaaacugagg

SEQ ID NO: 33533 - RNA, 22 nt, Human
uugcagaaaacaguuuucuugu

SEQ ID NO: 33534 - RNA, 22 nt, Human
uugcagaagggcacagugauca

SEQ ID NO: 33535 - RNA, 22 nt, Human
uugcagaaucucaggaaggaga

SEQ ID NO: 33536 - RNA, 22 nt, Human
uugcagacagugagagugaaag

SEQ ID NO: 33537 - RNA, 22 nt, Human
uugcagaggcaaaaaugaacuc

SEQ ID NO: 33538 - RNA, 22 nt, Human
uugcagaugaagaaagugguag

SEQ ID NO: 33539 - RNA, 19 nt, Human
uugcagcaaaguuaggacc

SEQ ID NO: 33540 - RNA, 22 nt, Human
uugcagcagggugaauucacuc

SEQ ID NO: 33541 - RNA, 22 nt, Human
uugcagcucugauccagggacc

SEQ ID NO: 33542 - RNA, 22 nt, Human
uugcagcugugagcuuuacacg

SEQ ID NO: 33543 - RNA, 22 nt, Human
uugcagcuguugcaaagucucu

SEQ ID NO: 33544 - RNA, 22 nt, Human
uugcagcuucuugcaucagaaa

SEQ ID NO: 33545 - RNA, 22 nt, Human
uugcaggaaacugagugugagc

SEQ ID NO: 33546 - RNA, 22 nt, Human
uugcagggaccugcagaaagcu

SEQ ID NO: 33547 - RNA, 22 nt, Human
uugcagggcaaauggucagaua

SEQ ID NO: 33548 - RNA, 22 nt, Human
uuugcagugucagcuucugugu

SEQ ID NO: 33549 - RNA, 22 nt, Human
uuugcauaggauggacauuuua

SEQ ID NO: 33550 - RNA, 22 nt, Human
uuugcauauuaauaucugcgcu

SEQ ID NO: 33551 - RNA, 22 nt, Human
uuugcauccugugugugaaagu

SEQ ID NO: 33552 - RNA, 22 nt, Human
uuugcaugggagguaguaauca

SEQ ID NO: 33553 - RNA, 22 nt, Human
uuugcauuaguuuagauuucaa

SEQ ID NO: 33554 - RNA, 22 nt, Human
uuugcauuaucucacuuauaua

SEQ ID NO: 33555 - RNA, 22 nt, Human
uuugcauugccucugacuuaug

SEQ ID NO: 33556 - RNA, 22 nt, Human
uuugcauuucucguaaggaaac

SEQ ID NO: 33557 - RNA, 22 nt, Human
uuugcauuuuagauuuaggccu

SEQ ID NO: 33558 - RNA, 19 nt, Human
uuugccuugcagcugugug

SEQ ID NO: 33559 - RNA, 22 nt, Human
uuugcgucuaugugugagccuu

SEQ ID NO: 33560 - RNA, 22 nt, Human
uuugcuaaaagugaugaagaca

SEQ ID NO: 33561 - RNA, 22 nt, Human
uuugcuauuuuucugugcagcu

SEQ ID NO: 33562 - RNA, 22 nt, Human
uuugcucaguucucuguauuuu

SEQ ID NO: 33563 - RNA, 22 nt, Human
uuugcucuuaugaacaaggugg

SEQ ID NO: 33564 - RNA, 22 nt, Human
uuugcugaacuaaaauucugaa

SEQ ID NO: 33565 - RNA, 22 nt, Human
uuugcugggcucugugccagac

SEQ ID NO: 33566 - RNA, 21 nt, Human
uuugcuucaauuccagaagcu

SEQ ID NO: 33567 - RNA, 22 nt, Human
uuugcuuccuaguuggguaaua

SEQ ID NO: 33568 - RNA, 22 nt, Human
uuugcuugacccuugugcugaa

SEQ ID NO: 33569 - RNA, 22 nt, Human
uuugcuuugggagguugucugg

SEQ ID NO: 33570 - RNA, 22 nt, Human
uuugcuuuguuuaaaaguggua

SEQ ID NO: 33571 - RNA, 22 nt, Human
uuuggaaaaagacagcuuauga

SEQ ID NO: 33572 - RNA, 22 nt, Human
uuuggaaacacggucaucuucc

SEQ ID NO: 33573 - RNA, 22 nt, Human
uuuggaaagugugauuucaagg

SEQ ID NO: 33574 - RNA, 22 nt, Human
uuuggaaaguugucacuuuaga

SEQ ID NO: 33575 - RNA, 22 nt, Human
uuuggaaauuacucauuguccu

SEQ ID NO: 33576 - RNA, 22 nt, Human
uuuggaagacagggcaggaaag

SEQ ID NO: 33577 - RNA, 22 nt, Human
uuuggaagggaaccaaaacaug

SEQ ID NO: 33578 - RNA, 22 nt, Human
uuuggaauaaucagauccuagu

SEQ ID NO: 33579 - RNA, 22 nt, Human
uuuggaauauuaaaaugucuca

SEQ ID NO: 33580 - RNA, 22 nt, Human
uuuggaauggaauagagauugc

SEQ ID NO: 33581 - RNA, 22 nt, Human
uuuggaauucugcagcucaugu

SEQ ID NO: 33582 - RNA, 22 nt, Human
uuuggaauuggcauucuauucu

SEQ ID NO: 33583 - RNA, 22 nt, Human
uuuggacaaguuacugguuucc

SEQ ID NO: 33584 - RNA, 22 nt, Human
uuuggacugcaugaugaucugg

SEQ ID NO: 33585 - RNA, 22 nt, Human
uuuggaggggaagaccuuggag

SEQ ID NO: 33586 - RNA, 22 nt, Human
uuuggauauguuucugucuucu

SEQ ID NO: 33587 - RNA, 22 nt, Human
uuuggauugcuuggaugcuucg

SEQ ID NO: 33588 - RNA, 22 nt, Human
uuuggcaaagauggcuagcugu

SEQ ID NO: 33589 - RNA, 22 nt, Human
uuuggcaaauucuugguaguau

SEQ ID NO: 33590 - RNA, 22 nt, Human
uuuggcagaggaagaaggcaca

SEQ ID NO: 33591 - RNA, 21 nt, Human
uuuggcaguuucccaggaaau

SEQ ID NO: 33592 - RNA, 22 nt, Human
uuuggcaugggcuauuugcuuu

SEQ ID NO: 33593 - RNA, 22 nt, Human
uuuggccacuugggaguccagg

SEQ ID NO: 33594 - RNA, 22 nt, Human
uuuggcggacugagaacgcggg

SEQ ID NO: 33595 - RNA, 22 nt, Human
uuuggcuaauuaggugcugauu

SEQ ID NO: 33596 - RNA, 23 nt, Human
uuuggcuccauggguggcucauu

SEQ ID NO: 33597 - RNA, 22 nt, Human
uuuggcucuaguaaauauaacc

SEQ ID NO: 33598 - RNA, 19 nt, Human
uuuggcucuggucagagag

SEQ ID NO: 33599 - RNA, 22 nt, Human
uuuggcucugugucuucaccca

SEQ ID NO: 33600 - RNA, 21 nt, Human
uuuggcuucucugcugcagcc

SEQ ID NO: 33601 - RNA, 22 nt, Human
uuugggaaauaguagaaaaugu

SEQ ID NO: 33602 - RNA, 22 nt, Human
uuugggaacaaugaggaucuga

SEQ ID NO: 33603 - RNA, 22 nt, Human
uuugggcacacaaauauuuuau

SEQ ID NO: 33604 - RNA, 20 nt, Human
uuugggcacggcuagauuuu

SEQ ID NO: 33605 - RNA, 22 nt, Human
uuugggcagugggcuuagcggc

SEQ ID NO: 33606 - RNA, 22 nt, Human
uuugggcauuagaauauucuuu

SEQ ID NO: 33607 - RNA, 22 nt, Human
uuugggcuguacaauuucugua

SEQ ID NO: 33608 - RNA, 22 nt, Human
uuuggggagacauggccagcug

SEQ ID NO: 33609 - RNA, 22 nt, Human
uuugguaaaaugaacuagcuuu

SEQ ID NO: 33610 - RNA, 22 nt, Human
uuugguaaccuugcauucuuua

SEQ ID NO: 33611 - RNA, 22 nt, Human
uuugguaaguaugaaugcagua

SEQ ID NO: 33612 - RNA, 22 nt, Human
uuuggucuuggauuuaucagug

SEQ ID NO: 33613 - RNA, 22 nt, Human
uuugguuaaacgagagaacaua

SEQ ID NO: 33614 - RNA, 22 nt, Human
uuugguuugaaugagcauaaga

SEQ ID NO: 33615 - RNA, 22 nt, Human
uuuguaaaagcccaagcuguag

SEQ ID NO: 33616 - RNA, 22 nt, Human
uuuguaacaaguugaucuggua

SEQ ID NO: 33617 - RNA, 22 nt, Human
uuuguaacucucccuuuguaua

SEQ ID NO: 33618 - RNA, 19 nt, Human
uuuguaaguccuuacugau

SEQ ID NO: 33619 - RNA, 22 nt, Human
uuuguacacaaccugugguagu

SEQ ID NO: 33620 - RNA, 22 nt, Human
uuuguacaccuaccuaauacag

SEQ ID NO: 33621 - RNA, 22 nt, Human
uuuguacauauaaaucuuguau

SEQ ID NO: 33622 - RNA, 18 nt, Human
uuuguacccuuuuccuag

SEQ ID NO: 33623 - RNA, 22 nt, Human
uuuguagaacuauacuuacauu

SEQ ID NO: 33624 - RNA, 22 nt, Human
uuuguagaggguaauugacaga

SEQ ID NO: 33625 - RNA, 22 nt, Human
uuuguauaaaugaagaugcugg

SEQ ID NO: 33626 - RNA, 22 nt, Human
cccaguggagauaggagugugg

SEQ ID NO: 33627 - RNA, 22 nt, Human
cccaguggggaaauagcuagcu

SEQ ID NO: 33628 - RNA, 22 nt, Human
cccagugucaccaacaggacac

SEQ ID NO: 33629 - RNA, 20 nt, Human
cccaguguccagccuugcca

SEQ ID NO: 33630 - RNA, 22 nt, Human
cccagugugguucuuuggagaa

SEQ ID NO: 33631 - RNA, 22 nt, Human
cccaguuucaacuuuccagugg

SEQ ID NO: 33632 - RNA, 22 nt, Human
cccaucccugauuuucacucgu

SEQ ID NO: 33633 - RNA, 17 nt, Human
cccaugagcccacuccc

SEQ ID NO: 33634 - RNA, 22 nt, Human
cccaugcacccucuaagaagga

SEQ ID NO: 33635 - RNA, 22 nt, Human
cccauggagugccugagggcca

SEQ ID NO: 33636 - RNA, 22 nt, Human
cccauggggacaccaugaagga

SEQ ID NO: 33637 - RNA, 22 nt, Human
cccauucauccucgcuuccuuc

SEQ ID NO: 33638 - RNA, 22 nt, Human
cccauuuagaguauaagagaga

SEQ ID NO: 33639 - RNA, 22 nt, Human
cccauuuagauaacaguucaaa

SEQ ID NO: 33640 - RNA, 23 nt, Human
cccauuuagcggaugagggaagu

SEQ ID NO: 33641 - RNA, 22 nt, Human
cccauuuaugacuacacaggug

SEQ ID NO: 33642 - RNA, 22 nt, Human
cccauuuugcuuaugcugcugu

SEQ ID NO: 33643 - RNA, 22 nt, Human
cccauuuuugugugaguaauga

SEQ ID NO: 33644 - RNA, 22 nt, Human
ccccaaaacuuagugacuuaaa

SEQ ID NO: 33645 - RNA, 22 nt, Human
ccccaaaacuuggugacuucca

SEQ ID NO: 33646 - RNA, 20 nt, Human
ccccacacuauugagcacuu

SEQ ID NO: 33647 - RNA, 22 nt, Human
ccccacagcuuguggagagaau

SEQ ID NO: 33648 - RNA, 22 nt, Human
ccccacaggugucugaggcagg

SEQ ID NO: 33649 - RNA, 22 nt, Human
ccccaccauguagaaacugaga

SEQ ID NO: 33650 - RNA, 22 nt, Human
ccccaccugugcgucugccgca

SEQ ID NO: 33651 - RNA, 22 nt, Human
ccccagagaaagucagcagcau

SEQ ID NO: 33652 - RNA, 22 nt, Human
ccccagagagcaccaugaagcc

SEQ ID NO: 33653 - RNA, 22 nt, Human
ccccagcacaggcuccucagau

SEQ ID NO: 33654 - RNA, 21 nt, Human
ccccagcaccuugccagccug

SEQ ID NO: 33655 - RNA, 22 nt, Human
ccccagcacucugacucuuacc

SEQ ID NO: 33656 - RNA, 22 nt, Human
ccccagcccacaagcauauuaa

SEQ ID NO: 33657 - RNA, 22 nt, Human
ccccaggagcuuguuuuagaga

SEQ ID NO: 33658 - RNA, 22 nt, Human
cccccaccugaggacagucuua

SEQ ID NO: 33659 - RNA, 22 nt, Human
cccccagucugaacagcagcug

SEQ ID NO: 33660 - RNA, 22 nt, Human
ccccgcgcguugucccgcaggu

SEQ ID NO: 33661 - RNA, 22 nt, Human
ccccucauaggucagacacgca

SEQ ID NO: 33662 - RNA, 22 nt, Human
ccccucauucauguccuugcuu

SEQ ID NO: 33663 - RNA, 23 nt, Human
ccccucugguggcucagcuccug

SEQ ID NO: 33664 - RNA, 22 nt, Human
ccucuguaagccuuagucuaga

SEQ ID NO: 33665 - RNA, 22 nt, Human
ccucuguacagccucuuuauug

SEQ ID NO: 33666 - RNA, 22 nt, Human
ccucugugacuucuaccuucac

SEQ ID NO: 33667 - RNA, 22 nt, Human
ccucugugucagggaagagacu

SEQ ID NO: 33668 - RNA, 22 nt, Human
ccucuucaccucgggcacacug

SEQ ID NO: 33669 - RNA, 22 nt, Human
ccucuuccacugggccccaucc

SEQ ID NO: 33670 - RNA, 22 nt, Human
ccucuuccugcacugacauuuu

SEQ ID NO: 33671 - RNA, 22 nt, Human
ccucuuccuucucacuguggaa

SEQ ID NO: 33672 - RNA, 19 nt, Human
ccucuucucuggcagcaga

SEQ ID NO: 33673 - RNA, 22 nt, Human
ccucuucugcuucaggagcacu

SEQ ID NO: 33674 - RNA, 22 nt, Human
ccucuuggagucuaucauucug

SEQ ID NO: 33675 - RNA, 22 nt, Human
ccucuuuaaucccauccaugug

SEQ ID NO: 33676 - RNA, 22 nt, Human
ccucuuugagauucaguuuucc

SEQ ID NO: 33677 - RNA, 22 nt, Human
ccugaaacaucuucuguaaaua

SEQ ID NO: 33678 - RNA, 22 nt, Human
ccugaaaugaguucugcucacu

SEQ ID NO: 33679 - RNA, 21 nt, Human
ccugaaauucucacuagcuua

SEQ ID NO: 33680 - RNA, 22 nt, Human
ccugaacagucugaaaggagac

SEQ ID NO: 33681 - RNA, 22 nt, Human
ccugaacucuaaauagagcagu

SEQ ID NO: 33682 - RNA, 22 nt, Human
ccugaagaugcuguggccuggu

SEQ ID NO: 33683 - RNA, 23 nt, Human
ccugaagggucaggguccucagc

SEQ ID NO: 33684 - RNA, 22 nt, Human
ccugacagugguagccuuggca

SEQ ID NO: 33685 - RNA, 22 nt, Human
ccugaccaacguggugaaaccc

SEQ ID NO: 33686 - RNA, 19 nt, Human
ccugaccacacaggccuug

SEQ ID NO: 33687 - RNA, 22 nt, Human
ccugaccacccuuggacaaggu

SEQ ID NO: 33688 - RNA, 22 nt, Human
ccugacuagcugggacuacaga

SEQ ID NO: 33689 - RNA, 22 nt, Human
ccugacucuggccaggccagcu

SEQ ID NO: 33690 - RNA, 22 nt, Human
ccugacuuaagucuccuguugg

SEQ ID NO: 33691 - RNA, 22 nt, Human
ccugagaauaauucuccauagc

SEQ ID NO: 33692 - RNA, 22 nt, Human
ccugagaauguuuaacagagaa

SEQ ID NO: 33693 - RNA, 22 nt, Human
ccugagagagaagcgaccuggu

SEQ ID NO: 33694 - RNA, 22 nt, Human
ccugagagcauuccacacugaa

SEQ ID NO: 33695 - RNA, 22 nt, Human
ccugagagcccuagccaggcgc

SEQ ID NO: 33696 - RNA, 22 nt, Human
ccugagagguuggccuguccag

SEQ ID NO: 33697 - RNA, 22 nt, Human
ccugagagugcgugccuccuua

SEQ ID NO: 33698 - RNA, 22 nt, Human
ccugagauuucauugucuggcc

SEQ ID NO: 33699 - RNA, 22 nt, Human
ccugagcacaagggagcuuuga

SEQ ID NO: 33700 - RNA, 22 nt, Human
ccugagcagggcucugcagggc

SEQ ID NO: 33701 - RNA, 22 nt, Human
ccugagccaagagucagaaucu

SEQ ID NO: 33702 - RNA, 22 nt, Human
ccugagcuccaguagcagccag

SEQ ID NO: 33703 - RNA, 22 nt, Human
ccugagcugaacuaagcaguuu

SEQ ID NO: 33704 - RNA, 22 nt, Human
ccugagcuuuaaaagccaugua

SEQ ID NO: 33705 - RNA, 19 nt, Human
ccugaggaaaagaugauug

SEQ ID NO: 33706 - RNA, 22 nt, Human
ccugaggacacacgcugcagga

SEQ ID NO: 33707 - RNA, 22 nt, Human
ccugaggcaaggacuugguggc

SEQ ID NO: 33708 - RNA, 22 nt, Human
ccugaggcuccaccuccagaga

SEQ ID NO: 33709 - RNA, 22 nt, Human
ccugaggcuugggaguuccgcc

SEQ ID NO: 33710 - RNA, 22 nt, Human
ccugagggaacaugcacccaau

SEQ ID NO: 33711 - RNA, 22 nt, Human
ccugagggaaggaugcuaccca

SEQ ID NO: 33712 - RNA, 22 nt, Human
ccugagggcgccgagcucccag

SEQ ID NO: 33713 - RNA, 22 nt, Human
ccugaggucagccauucuugcc

SEQ ID NO: 33714 - RNA, 22 nt, Human
ccugagguuauccaucuaccug

SEQ ID NO: 33715 - RNA, 22 nt, Human
ccugaguagcuggaauuaaagg

SEQ ID NO: 33716 - RNA, 22 nt, Human
ccugaguggcaggguuugggcu

SEQ ID NO: 33717 - RNA, 22 nt, Human
ccugaguggccaggcagcugug

SEQ ID NO: 33718 - RNA, 22 nt, Human
ccugaguggggagcuaagugag

SEQ ID NO: 33719 - RNA, 19 nt, Human
ccugaguguuucagagaca

SEQ ID NO: 33720 - RNA, 22 nt, Human
ccugaguugucaguugcuguag

SEQ ID NO: 33721 - RNA, 22 nt, Human
ccugaucaaagaggucagcauu

SEQ ID NO: 33722 - RNA, 22 nt, Human
ccugauggagcccugcugcaug

SEQ ID NO: 33723 - RNA, 19 nt, Human
ccugauggagcuggugcaa

SEQ ID NO: 33724 - RNA, 22 nt, Human
ccugaugguauauuguugggag

SEQ ID NO: 33725 - RNA, 22 nt, Human
ccugauuauuguaaauauauuu

SEQ ID NO: 33726 - RNA, 22 nt, Human
ccugcaagaccugagacacacc

SEQ ID NO: 33727 - RNA, 22 nt, Human
ccugcacaggccaggcaucuga

SEQ ID NO: 33728 - RNA, 22 nt, Human
ccugcacaugugugcgccugua

SEQ ID NO: 33729 - RNA, 22 nt, Human
ccugcacccaggccgcaccucu

SEQ ID NO: 33730 - RNA, 22 nt, Human
ccugcaccuaacacaacgcucu

SEQ ID NO: 33731 - RNA, 22 nt, Human
ccugcaccugagcagccugacu

SEQ ID NO: 33732 - RNA, 22 nt, Human
ccugcaccugccaugugagaua

SEQ ID NO: 33733 - RNA, 22 nt, Human
ccugcagaagaguccagcucau

SEQ ID NO: 33734 - RNA, 22 nt, Human
ccugcagacacuuguccagcaa

SEQ ID NO: 33735 - RNA, 22 nt, Human
gagcucugaaaaagcuugccuu

SEQ ID NO: 33736 - RNA, 23 nt, Human
gagcucugcacuaggcccuggga

SEQ ID NO: 33737 - RNA, 22 nt, Human
gagcucugccauggcucccacc

SEQ ID NO: 33738 - RNA, 22 nt, Human
gagcucugcggaaaacgugccg

SEQ ID NO: 33739 - RNA, 22 nt, Human
gagcucugcuuggguucuuagg

SEQ ID NO: 33740 - RNA, 22 nt, Human
gagcucuggcagggcaggucug

SEQ ID NO: 33741 - RNA, 22 nt, Human
gagcucuggguguguugucagu

SEQ ID NO: 33742 - RNA, 22 nt, Human
gagcucuguucucguccugcug

SEQ ID NO: 33743 - RNA, 22 nt, Human
gagcucuuccccaucuuacauc

SEQ ID NO: 33744 - RNA, 22 nt, Human
gagcucuuuaccaggucaggac

SEQ ID NO: 33745 - RNA, 22 nt, Human
gagcugaacaaauugcgagugg

SEQ ID NO: 33746 - RNA, 22 nt, Human
gagcugaagaugucagaaccgu

SEQ ID NO: 33747 - RNA, 22 nt, Human
gagcugaauugaagcaaggagc

SEQ ID NO: 33748 - RNA, 22 nt, Human
gagcugagaucgugccauugca

SEQ ID NO: 33749 - RNA, 22 nt, Human
gagcugagauuugaagcaaguu

SEQ ID NO: 33750 - RNA, 22 nt, Human
gagcugagcagggagccucacu

SEQ ID NO: 33751 - RNA, 22 nt, Human
gagcugaggcugaggccucacu

SEQ ID NO: 33752 - RNA, 22 nt, Human
gagcugaguaucccacugaagu

SEQ ID NO: 33753 - RNA, 21 nt, Human
gagcugcaccuugaccuguuu

SEQ ID NO: 33754 - RNA, 22 nt, Human
gagcugcacgcagcauccaaga

SEQ ID NO: 33755 - RNA, 22 nt, Human
gagcugcagacuugauacagga

SEQ ID NO: 33756 - RNA, 22 nt, Human
gagcugcagagcucgaaggaac

SEQ ID NO: 33757 - RNA, 22 nt, Human
gagcugcagcggcugacgcaac

SEQ ID NO: 33758 - RNA, 22 nt, Human
gagcugcccugagcuuugcaug

SEQ ID NO: 33759 - RNA, 22 nt, Human
gagcugccugugugccaugaug

SEQ ID NO: 33760 - RNA, 19 nt, Human
gagcugccuuuugaagacc

SEQ ID NO: 33761 - RNA, 22 nt, Human
gagcugcuggcuccucagguua

SEQ ID NO: 33762 - RNA, 22 nt, Human
gagcuggaggcagugcugaggu

SEQ ID NO: 33763 - RNA, 22 nt, Human
gagcuggcaagucuguccuugg

SEQ ID NO: 33764 - RNA, 22 nt, Human
gagcuggcagugguagacaugg

SEQ ID NO: 33765 - RNA, 22 nt, Human
gagcuggcuaauacugacuuau

SEQ ID NO: 33766 - RNA, 22 nt, Human
gagcuggcuccgccaugcugcu

SEQ ID NO: 33767 - RNA, 22 nt, Human
gagcugggaguuauagcauguu

SEQ ID NO: 33768 - RNA, 22 nt, Human
gagcugggauuugaaccuggga

SEQ ID NO: 33769 - RNA, 22 nt, Human
gagcugggcgagccggggaagu

SEQ ID NO: 33770 - RNA, 21 nt, Human
gagcugggcgaggcuccgggg

SEQ ID NO: 33771 - RNA, 22 nt, Human
gagcugggcuggcuuccucccu

SEQ ID NO: 33772 - RNA, 22 nt, Human
gagcugggucuccaccuuggca

SEQ ID NO: 33773 - RNA, 22 nt, Human
gagcugguuuuaggcuaugucu

SEQ ID NO: 33774 - RNA, 20 nt, Human
gagcugugcucucaggagcc

SEQ ID NO: 33775 - RNA, 22 nt, Human
gagcuguggaaggcagggacca

SEQ ID NO: 33776 - RNA, 22 nt, Human
gagcugugugccuggauggucu

SEQ ID NO: 33777 - RNA, 22 nt, Human
gagcuguucaaggacaggcacg

SEQ ID NO: 33778 - RNA, 22 nt, Human
gagcuguuuuuccaaacuauug

SEQ ID NO: 33779 - RNA, 22 nt, Human
gagcuucagaauuuaacagacu

SEQ ID NO: 33780 - RNA, 22 nt, Human
gagcuuccacucuagaaggagu

SEQ ID NO: 33781 - RNA, 22 nt, Human
gagcuuccauccuuacugugug

SEQ ID NO: 33782 - RNA, 22 nt, Human
gagcuuccugaugccgaccagu

SEQ ID NO: 33783 - RNA, 22 nt, Human
gagcuuccuuuuucugcaugac

SEQ ID NO: 33784 - RNA, 22 nt, Human
gagcuuggacaccuuggcaggu

SEQ ID NO: 33785 - RNA, 22 nt, Human
gagcuuggugaugccuccuggu

SEQ ID NO: 33786 - RNA, 22 nt, Human
gagcuuuaagggcacuggucuu

SEQ ID NO: 33787 - RNA, 22 nt, Human
gagcuuuaccuuagguucuguu

SEQ ID NO: 33788 - RNA, 22 nt, Human
gagcuuugagauucuuauggua

SEQ ID NO: 33789 - RNA, 22 nt, Human
gagcuuuggugccaaguauuug

SEQ ID NO: 33790 - RNA, 22 nt, Human
gagcuuuuacugcuguauugaa

SEQ ID NO: 33791 - RNA, 22 nt, Human
gagcuuuugugggggccaaggu

SEQ ID NO: 33792 - RNA, 22 nt, Human
gaggaaaauauucagggagguu

SEQ ID NO: 33793 - RNA, 22 nt, Human
gaggaaacauuguagaagcagu

SEQ ID NO: 33794 - RNA, 22 nt, Human
gaggaacagagacgggaucgcu

SEQ ID NO: 33795 - RNA, 22 nt, Human
gaggaacagcagccacaugucc

SEQ ID NO: 33796 - RNA, 22 nt, Human
gaggaaccacucugagaagcca

SEQ ID NO: 33797 - RNA, 22 nt, Human
gaggaacccagcugggguugcc

SEQ ID NO: 33798 - RNA, 22 nt, Human
gaggaaccugggcuuccauccu

SEQ ID NO: 33799 - RNA, 19 nt, Human
gaggaacuggcuugguucc

SEQ ID NO: 33800 - RNA, 22 nt, Human
gaggaacuuaugauauucuacu

SEQ ID NO: 33801 - RNA, 22 nt, Human
gaggaagagcauggccaguuuc

SEQ ID NO: 33802 - RNA, 22 nt, Human
gaggaagcagggcuuggcugag

SEQ ID NO: 33803 - RNA, 22 nt, Human
ccugcccacacagcaauuuuaa

SEQ ID NO: 33804 - RNA, 23 nt, Human
ccugcccaggaauccggcggcgu

SEQ ID NO: 33805 - RNA, 22 nt, Human
ccugcccagggucaccacagag

SEQ ID NO: 33806 - RNA, 22 nt, Human
ccugcccauacugaccucuaau

SEQ ID NO: 33807 - RNA, 22 nt, Human
ccugcccccgucagaggugaug

SEQ ID NO: 33808 - RNA, 22 nt, Human
ccugcccuaauccagagacuag

SEQ ID NO: 33809 - RNA, 22 nt, Human
ccugcccugucacuggcuaggg

SEQ ID NO: 33810 - RNA, 22 nt, Human
ccugccucaggacucugcauau

SEQ ID NO: 33811 - RNA, 22 nt, Human
ccugccugacagagaagguuca

SEQ ID NO: 33812 - RNA, 19 nt, Human
ccugccugaccccggcuac

SEQ ID NO: 33813 - RNA, 22 nt, Human
ccugccugcagaaaguaucucc

SEQ ID NO: 33814 - RNA, 22 nt, Human
ccugccugccugcuggccggga

SEQ ID NO: 33815 - RNA, 22 nt, Human
ccugccugcuuucugcuuugca

SEQ ID NO: 33816 - RNA, 22 nt, Human
ccugccuggcuuccagaagaga

SEQ ID NO: 33817 - RNA, 22 nt, Human
ccugccuguaagauggguacaa

SEQ ID NO: 33818 - RNA, 22 nt, Human
ccugccugucuuuauccccugu

SEQ ID NO: 33819 - RNA, 20 nt, Human
ccugccuguguuugugauga

SEQ ID NO: 33820 - RNA, 22 nt, Human
ccugcguccacggcugggagac

SEQ ID NO: 33821 - RNA, 19 nt, Human
ccugcugaagugaugcagc

SEQ ID NO: 33822 - RNA, 20 nt, Human
ccugcugagccagugugagg

SEQ ID NO: 33823 - RNA, 22 nt, Human
ccugcugaggucagccacccaa

SEQ ID NO: 33824 - RNA, 22 nt, Human
ccugcuggacguggaggagggg

SEQ ID NO: 33825 - RNA, 22 nt, Human
ccugcuggccacugcuccaccu

SEQ ID NO: 33826 - RNA, 22 nt, Human
ccugcugguguccaggcuuugg

SEQ ID NO: 33827 - RNA, 22 nt, Human
ccugcugguuuuuacaaagaug

SEQ ID NO: 33828 - RNA, 22 nt, Human
ccugcuguaaugugucuuuauu

SEQ ID NO: 33829 - RNA, 22 nt, Human
ccugcuguccccugagccugga

SEQ ID NO: 33830 - RNA, 22 nt, Human
ccugcugucucugggcaggcag

SEQ ID NO: 33831 - RNA, 22 nt, Human
ccugcugugaaacuggcauaug

SEQ ID NO: 33832 - RNA, 22 nt, Human
ccugcugugaagccaggccugu

SEQ ID NO: 33833 - RNA, 22 nt, Human
ccugcugugucccuggcuuucu

SEQ ID NO: 33834 - RNA, 22 nt, Human
ccugcuguuagauuucagucac

SEQ ID NO: 33835 - RNA, 20 nt, Human
ccugcuguuuccauggggcc

SEQ ID NO: 33836 - RNA, 22 nt, Human
ccugcuucagggaugauggcac

SEQ ID NO: 33837 - RNA, 22 nt, Human
ccugcuuccuucaaguuuaucu

SEQ ID NO: 33838 - RNA, 22 nt, Human
ccugcuuugagaugggcagcag

SEQ ID NO: 33839 - RNA, 22 nt, Human
ccuggaaaaugccacuuucaca

SEQ ID NO: 33840 - RNA, 22 nt, Human
ccuggaaacacaugaugaugaa

SEQ ID NO: 33841 - RNA, 22 nt, Human
ccuggaaagagaaugaaugagc

SEQ ID NO: 33842 - RNA, 22 nt, Human
ccuggaaaugucgcguguagaa

SEQ ID NO: 33843 - RNA, 20 nt, Human
ccuggaagagcuccccaggc

SEQ ID NO: 33844 - RNA, 22 nt, Human
gaggaugccugggucggggaag

SEQ ID NO: 33845 - RNA, 22 nt, Human
gaggaugguaugaggcaagcaa

SEQ ID NO: 33846 - RNA, 22 nt, Human
gaggauguccacauggacggug

SEQ ID NO: 33847 - RNA, 22 nt, Human
gaggaugugucuggucugggca

SEQ ID NO: 33848 - RNA, 22 nt, Human
gaggcaacacauuuggaaagca

SEQ ID NO: 33849 - RNA, 22 nt, Human
gaggcacaauacaugucucaag

SEQ ID NO: 33850 - RNA, 22 nt, Human
gaggcacagaguaggugcacac

SEQ ID NO: 33851 - RNA, 22 nt, Human
gaggcacagucccgaggcaagg

SEQ ID NO: 33852 - RNA, 22 nt, Human
gaggcacaguucuuccuccaga

SEQ ID NO: 33853 - RNA, 22 nt, Human
gaggcacauauauacagagccc

SEQ ID NO: 33854 - RNA, 22 nt, Human
gaggcaccagccccgcuagccu

SEQ ID NO: 33855 - RNA, 22 nt, Human
gaggcaccucgcgggaggaggc

SEQ ID NO: 33856 - RNA, 22 nt, Human
gaggcagaaguugcagugagca

SEQ ID NO: 33857 - RNA, 22 nt, Human
gaggcagcagggcugguuccuu

SEQ ID NO: 33858 - RNA, 22 nt, Human
gaggcagcggcucacagagaaa

SEQ ID NO: 33859 - RNA, 18 nt, Human
gaggcagcuagcaauuuu

SEQ ID NO: 33860 - RNA, 22 nt, Human
gaggcagcugaagcuucaaaga

SEQ ID NO: 33861 - RNA, 22 nt, Human
gaggcagcuuggggcugugggu

SEQ ID NO: 33862 - RNA, 22 nt, Human
gaggcaggcagauugcuugagg

SEQ ID NO: 33863 - RNA, 22 nt, Human
gaggcagugaacaauuccugug

SEQ ID NO: 33864 - RNA, 22 nt, Human
gaggcaguguugaaaaggagag

SEQ ID NO: 33865 - RNA, 22 nt, Human
gaggcaugucuggccuguccca

SEQ ID NO: 33866 - RNA, 22 nt, Human
gaggccacaguccugaggcauc

SEQ ID NO: 33867 - RNA, 22 nt, Human
gaggccacggaagggagcugug

SEQ ID NO: 33868 - RNA, 22 nt, Human
gaggccagccccucuugaaggc

SEQ ID NO: 33869 - RNA, 22 nt, Human
gaggccaggaagcccaagauca

SEQ ID NO: 33870 - RNA, 22 nt, Human
gaggccaggacaugaaagcuga

SEQ ID NO: 33871 - RNA, 22 nt, Human
gaggccaggaggaucucucuaa

SEQ ID NO: 33872 - RNA, 22 nt, Human
gaggccaggagugcuguaaguu

SEQ ID NO: 33873 - RNA, 15 nt, Human
gaggccaggcaugug

SEQ ID NO: 33874 - RNA, 22 nt, Human
gaggccaggggucagcaauugg

SEQ ID NO: 33875 - RNA, 22 nt, Human
gaggcccaggucaagcagccac

SEQ ID NO: 33876 - RNA, 20 nt, Human
gaggccucagccucagcucc

SEQ ID NO: 33877 - RNA, 22 nt, Human
gaggccucugucccgccaggga

SEQ ID NO: 33878 - RNA, 23 nt, Human
gaggccuggcccugccacaucuc

SEQ ID NO: 33879 - RNA, 22 nt, Human
gaggccuggcugucagucccca

SEQ ID NO: 33880 - RNA, 22 nt, Human
gaggccugggagccuguccucc

SEQ ID NO: 33881 - RNA, 22 nt, Human
gaggccuggugcuguguccaca

SEQ ID NO: 33882 - RNA, 22 nt, Human
gaggccugguuuccagcauccu

SEQ ID NO: 33883 - RNA, 22 nt, Human
gaggccuguagucauggaugua

SEQ ID NO: 33884 - RNA, 22 nt, Human
gaggccuugggaugugccacgg

SEQ ID NO: 33885 - RNA, 22 nt, Human
gaggcuaagcacuggcauuucu

SEQ ID NO: 33886 - RNA, 22 nt, Human
gaggcuaaguaacuguccaugg

SEQ ID NO: 33887 - RNA, 22 nt, Human
gaggcuagauguuugcugggag

SEQ ID NO: 33888 - RNA, 22 nt, Human
gaggcucaaaccuggacagagc

SEQ ID NO: 33889 - RNA, 22 nt, Human
gaggcucaacccacagggguug

SEQ ID NO: 33890 - RNA, 22 nt, Human
gaggcucacgacgggacgaacu

SEQ ID NO: 33891 - RNA, 22 nt, Human
gaggcucacugggcaaagacuc

SEQ ID NO: 33892 - RNA, 22 nt, Human
gaggcucagagaagucauggua

SEQ ID NO: 33893 - RNA, 22 nt, Human
gaggcucagagacuuuaaguuu

SEQ ID NO: 33894 - RNA, 22 nt, Human
gaggcucagagagguccacaua

SEQ ID NO: 33895 - RNA, 22 nt, Human
gaggcucagagggagcaugguc

SEQ ID NO: 33896 - RNA, 22 nt, Human
gaggcucaguuauuuuagccug

SEQ ID NO: 33897 - RNA, 22 nt, Human
gaggcuccccaugaggccccag

SEQ ID NO: 33898 - RNA, 22 nt, Human
gaggcuccuccuuacauuuacc

SEQ ID NO: 33899 - RNA, 22 nt, Human
gaggcuccuugaaagggggacu

SEQ ID NO: 33900 - RNA, 22 nt, Human
gaggcucugugaugugccaggc

SEQ ID NO: 33901 - RNA, 22 nt, Human
gaggcucuucaauaggucaaug

SEQ ID NO: 33902 - RNA, 22 nt, Human
gaggcucuuucuuuggacuuca

SEQ ID NO: 33903 - RNA, 22 nt, Human
gaggcugaacagguucucauga

SEQ ID NO: 33904 - RNA, 22 nt, Human
gaggcugaaguguacaugggug

SEQ ID NO: 33905 - RNA, 22 nt, Human
gaggcugaauggccagaagcca

SEQ ID NO: 33906 - RNA, 22 nt, Human
gaggcugcaggcaaugcugccc

SEQ ID NO: 33907 - RNA, 22 nt, Human
gaggcugcauucuucccacugc

SEQ ID NO: 33908 - RNA, 22 nt, Human
gaggcugccccuuccucagcug

SEQ ID NO: 33909 - RNA, 22 nt, Human
gaggcugcugccaucauuaggu

SEQ ID NO: 33910 - RNA, 22 nt, Human
gaggcugcuguuagcccugggc

SEQ ID NO: 33911 - RNA, 22 nt, Human
gaggcuggacgugcauuucuac

SEQ ID NO: 33912 - RNA, 22 nt, Human
gaggcuggagauauuccaaucu

SEQ ID NO: 33913 - RNA, 22 nt, Human
gaggcuguaacuugggcacugg

SEQ ID NO: 33914 - RNA, 22 nt, Human
gaggcugugugucccucuggac

SEQ ID NO: 33915 - RNA, 22 nt, Human
gaggcuguuaggagggacucug

SEQ ID NO: 33916 - RNA, 22 nt, Human
gaggcuguuggcugaucugagu

SEQ ID NO: 33917 - RNA, 22 nt, Human
gaggcuuuauaacuauuuguuc

SEQ ID NO: 33918 - RNA, 22 nt, Human
gaggcuuugguuauaaaagauc

SEQ ID NO: 33919 - RNA, 22 nt, Human
gaggcuuuucucuaaauagugg

SEQ ID NO: 33920 - RNA, 22 nt, Human
gagggaagaggguuugaauuca

SEQ ID NO: 33921 - RNA, 22 nt, Human
gagggaaggacccauuuuaagu

SEQ ID NO: 33922 - RNA, 22 nt, Human
gagggaaggucacccuuguagc

SEQ ID NO: 33923 - RNA, 22 nt, Human
cgggcagauugggaagguucau

SEQ ID NO: 33924 - RNA, 21 nt, Human
cgggcuggccgggcccucacc

SEQ ID NO: 33925 - RNA, 22 nt, Human
cgggcuuccuccagggaagugc

SEQ ID NO: 33926 - RNA, 22 nt, Human
cggggagggcagaggcucccuc

SEQ ID NO: 33927 - RNA, 22 nt, Human
cggggcagagggucuucuccag

SEQ ID NO: 33928 - RNA, 22 nt, Human
cggggccucaguuuccccaccu

SEQ ID NO: 33929 - RNA, 22 nt, Human
cggggcugacagcaggugugcu

SEQ ID NO: 33930 - RNA, 22 nt, Human
cggggcugaggcaacgcggaga

SEQ ID NO: 33931 - RNA, 22 nt, Human
cggggcugcgcucuuccugccg

SEQ ID NO: 33932 - RNA, 22 nt, Human
cggggcuguagcacagcugagc

SEQ ID NO: 33933 - RNA, 22 nt, Human
cgggguggcacucuaaauagaa

SEQ ID NO: 33934 - RNA, 22 nt, Human
cgguaaggucugagacaacacc

SEQ ID NO: 33935 - RNA, 22 nt, Human
cggucugagagcaggagaaggg

SEQ ID NO: 33936 - RNA, 22 nt, Human
cggucugaucuggaaauagggc

SEQ ID NO: 33937 - RNA, 20 nt, Human
cguaaggcaagugcugcauc

SEQ ID NO: 33938 - RNA, 19 nt, Human
cguaccugacacagaacag

SEQ ID NO: 33939 - RNA, 22 nt, Human
cguaucaaagcaaaacauauuu

SEQ ID NO: 33940 - RNA, 22 nt, Human
cguaugaaauuuuugacauuug

SEQ ID NO: 33941 - RNA, 22 nt, Human
cguauuuagaaggcugcugaaa

SEQ ID NO: 33942 - RNA, 22 nt, Human
cgucauccuuuggaugaaucac

SEQ ID NO: 33943 - RNA, 22 nt, Human
cguccauauuccugagggcuca

SEQ ID NO: 33944 - RNA, 22 nt, Human
cgucccaguuccagccgcgcug

SEQ ID NO: 33945 - RNA, 22 nt, Human
cguccccucguucccacuuugg

SEQ ID NO: 33946 - RNA, 22 nt, Human
cgucuagacaguuuccaaaaga

SEQ ID NO: 33947 - RNA, 18 nt, Human
cgugaguggaggcugcgg

SEQ ID NO: 33948 - RNA, 22 nt, Human
cgugaugcucaggaggucauag

SEQ ID NO: 33949 - RNA, 22 nt, Human
cgugcagcggagcuggucacug

SEQ ID NO: 33950 - RNA, 22 nt, Human
cgugcucuggacucguggcaca

SEQ ID NO: 33951 - RNA, 20 nt, Human
cgugcugugaccuugagcau

SEQ ID NO: 33952 - RNA, 22 nt, Human
cguggcaguggaaggcugggug

SEQ ID NO: 33953 - RNA, 21 nt, Human
cuagagugggaccggagucua

SEQ ID NO: 33954 - RNA, 23 nt, Human
cuagaugcaagcuccaugaggga

SEQ ID NO: 33955 - RNA, 22 nt, Human
cuagauucauauauuuuuggag

SEQ ID NO: 33956 - RNA, 22 nt, Human
cuagcacuuagggauuguuaug

SEQ ID NO: 33957 - RNA, 22 nt, Human
cuagcagaagcuccuugagggu

SEQ ID NO: 33958 - RNA, 22 nt, Human
cuagcagcaucacaggaagacu

SEQ ID NO: 33959 - RNA, 22 nt, Human
cuagcagcauucuucuaguuag

SEQ ID NO: 33960 - RNA, 22 nt, Human
cuagccaacaccuuauuuucug

SEQ ID NO: 33961 - RNA, 20 nt, Human
cuagccuggccuugcucugg

SEQ ID NO: 33962 - RNA, 22 nt, Human
cuagcuucaaguccuggcugug

SEQ ID NO: 33963 - RNA, 22 nt, Human
cuagcuuuguccauugucuugc

SEQ ID NO: 33964 - RNA, 22 nt, Human
cuaggaaagacacagagaguuu

SEQ ID NO: 33965 - RNA, 22 nt, Human
cuaggaauccuuuuagaguugg

SEQ ID NO: 33966 - RNA, 22 nt, Human
cuaggaaugguaccucuuacaa

SEQ ID NO: 33967 - RNA, 22 nt, Human
cuaggcacuuguaaggccgcuc

SEQ ID NO: 33968 - RNA, 22 nt, Human
cuaggcagauggagaaguggcu

SEQ ID NO: 33969 - RNA, 20 nt, Human
cuaggcagcgagugacugag

SEQ ID NO: 33970 - RNA, 22 nt, Human
cuaggccacagggcaaaaagga

SEQ ID NO: 33971 - RNA, 22 nt, Human
cuaggcugcagaugcauggaau

SEQ ID NO: 33972 - RNA, 22 nt, Human
cuagggcacuaggacucaugug

SEQ ID NO: 33973 - RNA, 22 nt, Human
cuagggcagggaguguuugcgc

SEQ ID NO: 33974 - RNA, 22 nt, Human
cuagggcuagacagacgcaugu

SEQ ID NO: 33975 - RNA, 18 nt, Human
cuagggcuguggcucuca

SEQ ID NO: 33976 - RNA, 22 nt, Human
cuaggggcaugaaauagagaau

SEQ ID NO: 33977 - RNA, 22 nt, Human
cuagguauucauguuucguggc

SEQ ID NO: 33978 - RNA, 22 nt, Human
cuaggugauccacugcucucuu

SEQ ID NO: 33979 - RNA, 22 nt, Human
cuaguagcccauuuuggauacc

SEQ ID NO: 33980 - RNA, 22 nt, Human
cuaguauuaagugugaguaaaa

SEQ ID NO: 33981 - RNA, 22 nt, Human
cuagucacacaguaaggacggg

SEQ ID NO: 33982 - RNA, 22 nt, Human
cuagucacucagcacugacaaa

SEQ ID NO: 33983 - RNA, 22 nt, Human
cuaguccacuguccugccucca

SEQ ID NO: 33984 - RNA, 20 nt, Human
cuagucucacaucccuggca

SEQ ID NO: 33985 - RNA, 22 nt, Human
cuagugagucugaaugaguugc

SEQ ID NO: 33986 - RNA, 22 nt, Human
cuaguguacaagugguggagau

SEQ ID NO: 33987 - RNA, 22 nt, Human
cuaguuaguucugggucauccu

SEQ ID NO: 33988 - RNA, 22 nt, Human
cuaguucuaaaucuguugucca

SEQ ID NO: 33989 - RNA, 22 nt, Human
cuaguucuccugaaauguuugg

SEQ ID NO: 33990 - RNA, 22 nt, Human
cuaguucugccauucaguguca

SEQ ID NO: 33991 - RNA, 22 nt, Human
cuaguugcucuccuuuaaaccu

SEQ ID NO: 33992 - RNA, 22 nt, Human
cuaguuuuaagcuccuugaggu

SEQ ID NO: 33993 - RNA, 22 nt, Human
cuauaaaucuacccagcauugg

SEQ ID NO: 33994 - RNA, 22 nt, Human
cuauacagagcauccuuaacuu

SEQ ID NO: 33995 - RNA, 22 nt, Human
cuauacagcagcuuacuaguua

SEQ ID NO: 33996 - RNA, 22 nt, Human
cuauacaucccaauuucagaga

SEQ ID NO: 33997 - RNA, 22 nt, Human
cuauacuacuauacagauguaa

SEQ ID NO: 33998 - RNA, 22 nt, Human
cuauagaaaauuguaucacacg

SEQ ID NO: 33999 - RNA, 22 nt, Human
cuauauauaucaucuuccaguu

SEQ ID NO: 34000 - RNA, 22 nt, Human
cuauaucaucauuaccugcacc

SEQ ID NO: 34001 - RNA, 22 nt, Human
cuauaucuacauuugcuguuug

SEQ ID NO: 34002 - RNA, 22 nt, Human
cuauccauuaaagccuuggaaa

SEQ ID NO: 34003 - RNA, 22 nt, Human
cuaucuguaaauuugagguucu

SEQ ID NO: 34004 - RNA, 22 nt, Human
cuaucuuucgauucuagcuuaa

SEQ ID NO: 34005 - RNA, 22 nt, Human
cuaugcaucugaacaauagaga

SEQ ID NO: 34006 - RNA, 22 nt, Human
cuauggaagggaugcaaagaaa

SEQ ID NO: 34007 - RNA, 22 nt, Human
cuauggcucaauucuagugguu

SEQ ID NO: 34008 - RNA, 22 nt, Human
cuauguaugcgauuagaauuuu

SEQ ID NO: 34009 - RNA, 18 nt, Human
cuauuacaaugcaguggu

SEQ ID NO: 34010 - RNA, 22 nt, Human
cuauuagaaagcaucuucuaua

SEQ ID NO: 34011 - RNA, 19 nt, Human
cuauuagcuugggcaucau

SEQ ID NO: 34012 - RNA, 22 nt, Human
cuauuaggcuuccauuucaugc

SEQ ID NO: 34013 - RNA, 22 nt, Human
cuauuauuagauaaucuacuug

SEQ ID NO: 34014 - RNA, 22 nt, Human
cuauucagccucuaagacaagu

SEQ ID NO: 34015 - RNA, 22 nt, Human
cuauucaguugugggcaacaau

SEQ ID NO: 34016 - RNA, 22 nt, Human
cuauucugauuaccagauauug

SEQ ID NO: 34017 - RNA, 22 nt, Human
cuauugaauagcccaaaucauu

SEQ ID NO: 34018 - RNA, 22 nt, Human
cuauugaauuaacuauuaaagu

SEQ ID NO: 34019 - RNA, 19 nt, Human
cuauugcacauagcugaag

SEQ ID NO: 34020 - RNA, 22 nt, Human
cuauugcauuugcaucuucauc

SEQ ID NO: 34021 - RNA, 22 nt, Human
cuauugcuaucauucugguggu

SEQ ID NO: 34022 - RNA, 22 nt, Human
cuauuguuauaauuguugacau

SEQ ID NO: 34023 - RNA, 22 nt, Human
cuauuuaagaauaaaaggggca

SEQ ID NO: 34024 - RNA, 22 nt, Human
cuauuuaugugcuauuuuguau

SEQ ID NO: 34025 - RNA, 22 nt, Human
cuauuuauuguggguauccagg

SEQ ID NO: 34026 - RNA, 22 nt, Human
cuauuucaaggcccagauauga

SEQ ID NO: 34027 - RNA, 22 nt, Human
cuauuucugccuaaugaccugu

SEQ ID NO: 34028 - RNA, 22 nt, Human
cuauuugaauugucacaggcua

SEQ ID NO: 34029 - RNA, 22 nt, Human
cuauuuggccagaagaggguca

SEQ ID NO: 34030 - RNA, 22 nt, Human
cuauuuguacagcauuaguaau

SEQ ID NO: 34031 - RNA, 22 nt, Human
cuauuuguacagcauucgaguu

SEQ ID NO: 34032 - RNA, 22 nt, Human
cuauuugucacaacugguguuu

SEQ ID NO: 34033 - RNA, 22 nt, Human
cuauuugucaguuuggcuuuaa

SEQ ID NO: 34034 - RNA, 22 nt, Human
cuauuuuaacuugauuaccucu

SEQ ID NO: 34035 - RNA, 22 nt, Human
cuauuuucauucuuacauuguc

SEQ ID NO: 34036 - RNA, 17 nt, Human
cuauuuuggagauuaaa

SEQ ID NO: 34037 - RNA, 22 nt, Human
cuauuuuguccuuagugcaggg

SEQ ID NO: 34038 - RNA, 22 nt, Human
cucaaaagacuuaaacauaaga

SEQ ID NO: 34039 - RNA, 22 nt, Human
cucaaaaugguuaauuuuaaua

SEQ ID NO: 34040 - RNA, 22 nt, Human
cucaaacugugcuuguaaauuc

SEQ ID NO: 34041 - RNA, 22 nt, Human
cucaagaagagggagaccuaca

SEQ ID NO: 34042 - RNA, 22 nt, Human
gaguccugcuuucaauucuuuu

SEQ ID NO: 34043 - RNA, 22 nt, Human
gaguccuuuucauagcaguggg

SEQ ID NO: 34044 - RNA, 22 nt, Human
gagucgagcagaaagccgucgg

SEQ ID NO: 34045 - RNA, 22 nt, Human
gagucuccuacuggcuguccuu

SEQ ID NO: 34046 - RNA, 22 nt, Human
gagucucugcuauguuuucucu

SEQ ID NO: 34047 - RNA, 22 nt, Human
gagucucuggaggggucagacc

SEQ ID NO: 34048 - RNA, 22 nt, Human
gagucugaggggagagcugggu

SEQ ID NO: 34049 - RNA, 22 nt, Human
gagucuggucauuuucucuccc

SEQ ID NO: 34050 - RNA, 22 nt, Human
gagucugugguauuuuaucaua

SEQ ID NO: 34051 - RNA, 22 nt, Human
gagucuucugaguuauuggaua

SEQ ID NO: 34052 - RNA, 22 nt, Human
gagugacaggaauauuuaucug

SEQ ID NO: 34053 - RNA, 22 nt, Human
gagugaguggccaggaggcaga

SEQ ID NO: 34054 - RNA, 22 nt, Human
gagugaguuggaaaacagacac

SEQ ID NO: 34055 - RNA, 22 nt, Human
gagugaugucuguagugaagaa

SEQ ID NO: 34056 - RNA, 22 nt, Human
gagugcaauaaacuguuuucua

SEQ ID NO: 34057 - RNA, 22 nt, Human
gagugcagaaauucccuuccug

SEQ ID NO: 34058 - RNA, 22 nt, Human
gagugcagaugaacagaagauu

SEQ ID NO: 34059 - RNA, 22 nt, Human
gagugcagaugccagccccagu

SEQ ID NO: 34060 - RNA, 21 nt, Human
gagugcagcaagguagagucu

SEQ ID NO: 34061 - RNA, 22 nt, Human
gagugcauggacuacuggcuug

SEQ ID NO: 34062 - RNA, 22 nt, Human
gauccguuugugugggaguauu

SEQ ID NO: 34063 - RNA, 22 nt, Human
gauccugucuccgcaccguguu

SEQ ID NO: 34064 - RNA, 22 nt, Human
gauccuugcacuugacuuggca

SEQ ID NO: 34065 - RNA, 22 nt, Human
gaucgauucagugugccuaccc

SEQ ID NO: 34066 - RNA, 22 nt, Human
gaucucaaagcaguguggguug

SEQ ID NO: 34067 - RNA, 22 nt, Human
gaucuccaucugcagugucugg

SEQ ID NO: 34068 - RNA, 22 nt, Human
gaucucugaaucugaagccuuc

SEQ ID NO: 34069 - RNA, 18 nt, Human
gaucucugcagugccuac

SEQ ID NO: 34070 - RNA, 22 nt, Human
gaucucuguggacucuuagcac

SEQ ID NO: 34071 - RNA, 22 nt, Human
gaucugaaaaugcucuucuucu

SEQ ID NO: 34072 - RNA, 22 nt, Human
gaucugaaauagcuacugcaga

SEQ ID NO: 34073 - RNA, 22 nt, Human
gaucugaaccuugccuguuggg

SEQ ID NO: 34074 - RNA, 22 nt, Human
gaucugaagaguuauuuucuga

SEQ ID NO: 34075 - RNA, 22 nt, Human
gaucugcacucugagaggcuug

SEQ ID NO: 34076 - RNA, 22 nt, Human
gaucuggaaucugaaggcugag

SEQ ID NO: 34077 - RNA, 22 nt, Human
gaucugguacaggccugcagcc

SEQ ID NO: 34078 - RNA, 22 nt, Human
gaucuguuucauucacagucug

SEQ ID NO: 34079 - RNA, 22 nt, Human
gaucuucucuuuaguagaaaca

SEQ ID NO: 34080 - RNA, 22 nt, Human
gaucuuggaauggcacagcuga

SEQ ID NO: 34081 - RNA, 21 nt, Human
gaucuuuacuuuccuacuuac

SEQ ID NO: 34082 - RNA, 22 nt, Human
gaucuuuucagucuugguaguu

SEQ ID NO: 34083 - RNA, 22 nt, Human
gaugaaauagaauuaauuuagg

SEQ ID NO: 34084 - RNA, 22 nt, Human
gaugaaaugcugagccugaguu

SEQ ID NO: 34085 - RNA, 22 nt, Human
gaugaacauauuccucuccaga

SEQ ID NO: 34086 - RNA, 22 nt, Human
gaugaacauuuaaagccucuug

SEQ ID NO: 34087 - RNA, 22 nt, Human
gaugaagaggcacugacauauu

SEQ ID NO: 34088 - RNA, 22 nt, Human
gaugaagcuauuugguuggcac

SEQ ID NO: 34089 - RNA, 22 nt, Human
gaugaaggggcuggugcccucu

SEQ ID NO: 34090 - RNA, 22 nt, Human
gaugacaaaacuuuugccagca

SEQ ID NO: 34091 - RNA, 22 nt, Human
gaugacaaaagaguaaguaaug

SEQ ID NO: 34092 - RNA, 22 nt, Human
gaugacacuaagcauguugugg

SEQ ID NO: 34093 - RNA, 22 nt, Human
gaugacaguucuagcaucugaa

SEQ ID NO: 34094 - RNA, 22 nt, Human
gaugagaaauggacaggagugg

SEQ ID NO: 34095 - RNA, 20 nt, Human
gaugagacccaugcaugaga

SEQ ID NO: 34096 - RNA, 22 nt, Human
gaugagcugugauuaauaagua

SEQ ID NO: 34097 - RNA, 22 nt, Human
gaugagggccugguggcugugc

SEQ ID NO: 34098 - RNA, 22 nt, Human
gaugaggggucauuggcuggga

SEQ ID NO: 34099 - RNA, 22 nt, Human
gaugaggucauguuuuacauau

SEQ ID NO: 34100 - RNA, 22 nt, Human
gaugagguuuuugaaaugugga

SEQ ID NO: 34101 - RNA, 22 nt, Human
gaugagugaggacaggguggca

SEQ ID NO: 34102 - RNA, 22 nt, Human
gaugauaacucuuuaugaugaa

SEQ ID NO: 34103 - RNA, 22 nt, Human
gaugauaagauggaguugaauu

SEQ ID NO: 34104 - RNA, 22 nt, Human
gaugauauauauggaaagccua

SEQ ID NO: 34105 - RNA, 22 nt, Human
gaugaucaucuguaaaguuaga

SEQ ID NO: 34106 - RNA, 22 nt, Human
gaugaucugagguacaugaaac

SEQ ID NO: 34107 - RNA, 22 nt, Human
gaugaugggauccagcaaugua

SEQ ID NO: 34108 - RNA, 22 nt, Human
gaugauuguuggcucucuugau

SEQ ID NO: 34109 - RNA, 22 nt, Human
gaugauuucuccauucccuucu

SEQ ID NO: 34110 - RNA, 22 nt, Human
gaugauuuuaugucuugucauu

SEQ ID NO: 34111 - RNA, 22 nt, Human
gaugcaaaccuuacauggaccu

SEQ ID NO: 34112 - RNA, 22 nt, Human
gaugcagggcagcucugggaca

SEQ ID NO: 34113 - RNA, 22 nt, Human
gaugcagggggaacgacgcccu

SEQ ID NO: 34114 - RNA, 22 nt, Human
gaugcauucgggauguuuacuu

SEQ ID NO: 34115 - RNA, 22 nt, Human
gaugcccaggcccaaccaugga

SEQ ID NO: 34116 - RNA, 22 nt, Human
gaugccuguggugagcacacau

SEQ ID NO: 34117 - RNA, 22 nt, Human
gaugcgggcccgcuccacugcc

SEQ ID NO: 34118 - RNA, 22 nt, Human
gaugcuccaaacagcaauucuu

SEQ ID NO: 34119 - RNA, 22 nt, Human
gaugcuccuuggugauagaaua

SEQ ID NO: 34120 - RNA, 22 nt, Human
gaugcugagagauuggagacua

SEQ ID NO: 34121 - RNA, 22 nt, Human
gaugcugauaauucaugagaag

SEQ ID NO: 34122 - RNA, 22 nt, Human
gaugcuggaagugcugaucuug

SEQ ID NO: 34123 - RNA, 22 nt, Human
gaugcugggaccacagaguguu

SEQ ID NO: 34124 - RNA, 22 nt, Human
gaugcugugguaagccccaccg

SEQ ID NO: 34125 - RNA, 22 nt, Human
gaugcuuacauagcccaagugu

SEQ ID NO: 34126 - RNA, 22 nt, Human
gaugcuuuccaagaaauccuca

SEQ ID NO: 34127 - RNA, 22 nt, Human
gauggacaccuccugagguucu

SEQ ID NO: 34128 - RNA, 22 nt, Human
gauggagucugaagcugggaac

SEQ ID NO: 34129 - RNA, 22 nt, Human
gauggccaaggaccacgcaucg

SEQ ID NO: 34130 - RNA, 22 nt, Human
gauggcuuaagaguaaaaggca

SEQ ID NO: 34131 - RNA, 22 nt, Human
gauggcuuccuucucacugugu

SEQ ID NO: 34132 - RNA, 22 nt, Human
gauggcuucucucuagcuuggu

SEQ ID NO: 34133 - RNA, 20 nt, Human
gauggcuuuagaagcuggua

SEQ ID NO: 34134 - RNA, 22 nt, Human
gauggcuuugaggaauuugaau

SEQ ID NO: 34135 - RNA, 22 nt, Human
gauggcuuugccugcugugagg

SEQ ID NO: 34136 - RNA, 22 nt, Human
gaugggcagcacagcuggccaa

SEQ ID NO: 34137 - RNA, 22 nt, Human
gaugggcguggcgcguuuggug

SEQ ID NO: 34138 - RNA, 22 nt, Human
gaugggcuucuuccaugaagaa

SEQ ID NO: 34139 - RNA, 22 nt, Human
gaugggguccuugaccuggcca

SEQ ID NO: 34140 - RNA, 22 nt, Human
gauggguagccuuucaauagca

SEQ ID NO: 34141 - RNA, 22 nt, Human
gauggguauuggcagaagaggg

SEQ ID NO: 34142 - RNA, 22 nt, Human
gauggguggguucugugagagg

SEQ ID NO: 34143 - RNA, 21 nt, Human
gaugguagccucauagaagua

SEQ ID NO: 34144 - RNA, 22 nt, Human
gauggucaggcuuuaacaucug

SEQ ID NO: 34145 - RNA, 22 nt, Human
gauggugcaggugaagugcugg

SEQ ID NO: 34146 - RNA, 22 nt, Human
gaugguuuaugauagaugggaa

SEQ ID NO: 34147 - RNA, 22 nt, Human
gaugguuugguaaaaguauguu

SEQ ID NO: 34148 - RNA, 18 nt, Human
gauguaaaauaguagcuu

SEQ ID NO: 34149 - RNA, 22 nt, Human
gauguaaagcuucagagccggc

SEQ ID NO: 34150 - RNA, 22 nt, Human
gauguaaauggucuuuggcaga

SEQ ID NO: 34151 - RNA, 22 nt, Human
gauguauaaccuggcuauguua

SEQ ID NO: 34152 - RNA, 22 nt, Human
gauguauagcuuuaacugaccc

SEQ ID NO: 34153 - RNA, 22 nt, Human
gauguauagggccaugacacca

SEQ ID NO: 34154 - RNA, 22 nt, Human
gaugucaucaggcuaagacacu

SEQ ID NO: 34155 - RNA, 22 nt, Human
gauguccagcgucuggcugccu

SEQ ID NO: 34156 - RNA, 18 nt, Human
gaugucucgaggagacua

SEQ ID NO: 34157 - RNA, 22 nt, Human
gaugucugucugagccgcugga

SEQ ID NO: 34158 - RNA, 22 nt, Human
gaugucuuacuaacuagccuuu

SEQ ID NO: 34159 - RNA, 22 nt, Human
gaugucuuucugugugccuaga

SEQ ID NO: 34160 - RNA, 22 nt, Human
ccuuugugaauaugcagaaaau

SEQ ID NO: 34161 - RNA, 22 nt, Human
ccuuugugcaucucugcuccua

SEQ ID NO: 34162 - RNA, 22 nt, Human
ccuuugugguggcccagugugg

SEQ ID NO: 34163 - RNA, 22 nt, Human
ccuuuuauacucagugauauca

SEQ ID NO: 34164 - RNA, 22 nt, Human
ccuuuuauauggcucaucacag

SEQ ID NO: 34165 - RNA, 22 nt, Human
ccuuuucccauguuucuggagc

SEQ ID NO: 34166 - RNA, 22 nt, Human
ccuuuucuaggaugcuuuauag

SEQ ID NO: 34167 - RNA, 22 nt, Human
ccuuuucuauguaccagcagug

SEQ ID NO: 34168 - RNA, 22 nt, Human
ccuuuucuugccacugacucgg

SEQ ID NO: 34169 - RNA, 22 nt, Human
cgaaacaucuaugaucauuaau

SEQ ID NO: 34170 - RNA, 22 nt, Human
cgagaugguauuuuuaacgcag

SEQ ID NO: 34171 - RNA, 22 nt, Human
gcagcccugcagcuccacaccg

SEQ ID NO: 34172 - RNA, 22 nt, Human
gcagcccuuucugggcagggga

SEQ ID NO: 34173 - RNA, 22 nt, Human
gcagccucugaugauggccgua

SEQ ID NO: 34174 - RNA, 17 nt, Human
gcagccucuugguagug

SEQ ID NO: 34175 - RNA, 22 nt, Human
gcagccuucaguuuggcaggag

SEQ ID NO: 34176 - RNA, 22 nt, Human
gcagccuuuggaauuagagacu

SEQ ID NO: 34177 - RNA, 22 nt, Human
gcagcgagugcggcugccacag

SEQ ID NO: 34178 - RNA, 22 nt, Human
gcagcgcuguaggcccaaggca

SEQ ID NO: 34179 - RNA, 22 nt, Human
gcagcuaguccaguuauguggc

SEQ ID NO: 34180 - RNA, 22 nt, Human
gcagcucaaaggccacggacgg

SEQ ID NO: 34181 - RNA, 22 nt, Human
gcagcucacacagcaaguuuug

SEQ ID NO: 34182 - RNA, 22 nt, Human
gcagcucaguaaaagaggagca

SEQ ID NO: 34183 - RNA, 22 nt, Human
gcagcuccuggcacaguuuuuu

SEQ ID NO: 34184 - RNA, 22 nt, Human
cucaggagcuuccucagcccau

SEQ ID NO: 34185 - RNA, 22 nt, Human
cucaggaggaggaaguucauug

SEQ ID NO: 34186 - RNA, 22 nt, Human
cucaggaggugguagaggcccu

SEQ ID NO: 34187 - RNA, 22 nt, Human
cucaggaguaguucagcagcug

SEQ ID NO: 34188 - RNA, 20 nt, Human
cucaggauacugcaaaguug

SEQ ID NO: 34189 - RNA, 22 nt, Human
cucaggauagauuguccucuca

SEQ ID NO: 34190 - RNA, 22 nt, Human
cucaggaucgcuugcccuaggg

SEQ ID NO: 34191 - RNA, 21 nt, Human
cucaggaucuuauauauuagu

SEQ ID NO: 34192 - RNA, 22 nt, Human
cucaggauggaagccuacagga

SEQ ID NO: 34193 - RNA, 21 nt, Human
cucaggauggcggccuggugg

SEQ ID NO: 34194 - RNA, 22 nt, Human
cucaggauuuacuaauuucaag

SEQ ID NO: 34195 - RNA, 22 nt, Human
cucaggcaaggcccgcauucuc

SEQ ID NO: 34196 - RNA, 22 nt, Human
cucaggcacgggucagugagcg

SEQ ID NO: 34197 - RNA, 21 nt, Human
cucaggcauuugaggagaguc

SEQ ID NO: 34198 - RNA, 21 nt, Human
cucaggcuggcagcaggcuag

SEQ ID NO: 34199 - RNA, 22 nt, Human
cucaggcugugaugugauggca

SEQ ID NO: 34200 - RNA, 22 nt, Human
cucagggacggaggcuugcgga

SEQ ID NO: 34201 - RNA, 22 nt, Human
cucagggaggagcuucugggcc

SEQ ID NO: 34202 - RNA, 22 nt, Human
cucagggaggcccugggacccu

SEQ ID NO: 34203 - RNA, 22 nt, Human
cucagggcucugcaugcacacg

SEQ ID NO: 34204 - RNA, 21 nt, Human
cucagggcuugguguccucau

SEQ ID NO: 34205 - RNA, 22 nt, Human
cucaggucacggaucugagcug

SEQ ID NO: 34206 - RNA, 22 nt, Human
cucaggucuuaguucugucauc

SEQ ID NO: 34207 - RNA, 22 nt, Human
cucaguacuuuauguauaugau

SEQ ID NO: 34208 - RNA, 22 nt, Human
cucagucugucuugucuguguu

SEQ ID NO: 34209 - RNA, 22 nt, Human
cucagugaauuggaggauggcc

SEQ ID NO: 34210 - RNA, 22 nt, Human
cucagugcagcuaggcaugaga

SEQ ID NO: 34211 - RNA, 22 nt, Human
cucagugcuagaaguagauugc

SEQ ID NO: 34212 - RNA, 22 nt, Human
cucagugcuucuagcuugauga

SEQ ID NO: 34213 - RNA, 20 nt, Human
cucagugcuuucauugccuc

SEQ ID NO: 34214 - RNA, 22 nt, Human
cucagugucuuauuguacacau

SEQ ID NO: 34215 - RNA, 22 nt, Human
cucagugugaaugcucaguaaa

SEQ ID NO: 34216 - RNA, 22 nt, Human
cucaguuucuuacucuguauaa

SEQ ID NO: 34217 - RNA, 22 nt, Human
cucaguuugaaugcugacacug

SEQ ID NO: 34218 - RNA, 22 nt, Human
cucaguuuugcuagcuggaguu

SEQ ID NO: 34219 - RNA, 22 nt, Human
cucaguuuuugcugucugguuc

SEQ ID NO: 34220 - RNA, 22 nt, Human
cucauaaacaauucuuugaggu

SEQ ID NO: 34221 - RNA, 22 nt, Human
cucauacauaugccauuccugc

SEQ ID NO: 34222 - RNA, 22 nt, Human
cucauagguuuggaaccaggua

SEQ ID NO: 34223 - RNA, 22 nt, Human
cucaucaccacauauaacaaag

SEQ ID NO: 34224 - RNA, 22 nt, Human
cucauccacccucacuaggaaa

SEQ ID NO: 34225 - RNA, 22 nt, Human
cucauccaccgcagccccucag

SEQ ID NO: 34226 - RNA, 22 nt, Human
cucaucugucugggcugguuuu

SEQ ID NO: 34227 - RNA, 22 nt, Human
cucaugauguagcgaaugagaa

SEQ ID NO: 34228 - RNA, 22 nt, Human
cucauguagcucucaggccaca

SEQ ID NO: 34229 - RNA, 22 nt, Human
cucauuagacagguauacuuua

SEQ ID NO: 34230 - RNA, 22 nt, Human
cucauuccauguguauuuugag

SEQ ID NO: 34231 - RNA, 22 nt, Human
cucauuuacuguagaacaguua

SEQ ID NO: 34232 - RNA, 22 nt, Human
cucauuuauguaaugauuaagg

SEQ ID NO: 34233 - RNA, 23 nt, Human
cuccaaggcccaacugucuaggc

SEQ ID NO: 34234 - RNA, 20 nt, Human
cuccaaggcuugcaggaggc

SEQ ID NO: 34235 - RNA, 22 nt, Human
cuccaagggcucccagacgucu

SEQ ID NO: 34236 - RNA, 22 nt, Human
cuccaccacacaucuguccacc

SEQ ID NO: 34237 - RNA, 22 nt, Human
cuccacucuggggugggugaga

SEQ ID NO: 34238 - RNA, 22 nt, Human
cuccagaaggugggggagccac

SEQ ID NO: 34239 - RNA, 22 nt, Human
cuccagagacacuucucaugau

SEQ ID NO: 34240 - RNA, 18 nt, Human
cuccagagcugugagaca

SEQ ID NO: 34241 - RNA, 22 nt, Human
cuccagauccagcugagcugca

SEQ ID NO: 34242 - RNA, 22 nt, Human
cuccagcuagggcuggcuuacu

SEQ ID NO: 34243 - RNA, 22 nt, Human
cuccaggaccagggcuccugga

SEQ ID NO: 34244 - RNA, 22 nt, Human
cuccaggagcugugucuuucuu

SEQ ID NO: 34245 - RNA, 22 nt, Human
cuccaggagggcuuccugugau

SEQ ID NO: 34246 - RNA, 22 nt, Human
cuccaggagggggauggcugua

SEQ ID NO: 34247 - RNA, 22 nt, Human
cuccaggagguugcugcuuccu

SEQ ID NO: 34248 - RNA, 22 nt, Human
cuccaggauguuagacguccag

SEQ ID NO: 34249 - RNA, 22 nt, Human
cuccaggcgggaggcgguucca

SEQ ID NO: 34250 - RNA, 22 nt, Human
cuccaggcucguccaagaucga

SEQ ID NO: 34251 - RNA, 22 nt, Human
cuccagggagcugcgggagcca

SEQ ID NO: 34252 - RNA, 22 nt, Human
cuccagggaugagacagaguag

SEQ ID NO: 34253 - RNA, 22 nt, Human
cuccagggcagcauggcagugg

SEQ ID NO: 34254 - RNA, 22 nt, Human
cuccagggcuaccagguuuuag

SEQ ID NO: 34255 - RNA, 22 nt, Human
cuccaggggccagaagccuggc

SEQ ID NO: 34256 - RNA, 22 nt, Human
cuccagggggcauccacacagc

SEQ ID NO: 34257 - RNA, 22 nt, Human
cuccaggugcagaaggacucag

SEQ ID NO: 34258 - RNA, 22 nt, Human
cuccagguugacuucagucaau

SEQ ID NO: 34259 - RNA, 22 nt, Human
cuccagugagugagcaggcgac

SEQ ID NO: 34260 - RNA, 22 nt, Human
cuccagugcacccagaggauuu

SEQ ID NO: 34261 - RNA, 22 nt, Human
cuccagugcuucuagaaaauac

SEQ ID NO: 34262 - RNA, 22 nt, Human
cuccaguggcaaguccgggcgg

SEQ ID NO: 34263 - RNA, 22 nt, Human
cuccagugggggugagccuaga

SEQ ID NO: 34264 - RNA, 22 nt, Human
cuccaguggugauggggaagaa

SEQ ID NO: 34265 - RNA, 20 nt, Human
cuccaguguucaggggagug

SEQ ID NO: 34266 - RNA, 22 nt, Human
cuccauauguucaguuaugcag

SEQ ID NO: 34267 - RNA, 22 nt, Human
cuccaugaauuugagcuuugug

SEQ ID NO: 34268 - RNA, 22 nt, Human
cucccaagauaaauaaggcagu

SEQ ID NO: 34269 - RNA, 22 nt, Human
cucccaagcugugcugaacugu

SEQ ID NO: 34270 - RNA, 22 nt, Human
cucccaagggguaagggagcug

SEQ ID NO: 34271 - RNA, 22 nt, Human
cucccagagagcaggugggccg

SEQ ID NO: 34272 - RNA, 22 nt, Human
cucccaggcagggcugcccacu

SEQ ID NO: 34273 - RNA, 22 nt, Human
cucccagggccaucgagucacu

SEQ ID NO: 34274 - RNA, 21 nt, Human
cucccagggugacuguucaac

SEQ ID NO: 34275 - RNA, 22 nt, Human
cucccagguuccgacgccucuu

SEQ ID NO: 34276 - RNA, 22 nt, Human
cuccccaccuucgcggucccug

SEQ ID NO: 34277 - RNA, 22 nt, Human
cuccccagguucaggagguggg

SEQ ID NO: 34278 - RNA, 22 nt, Human
cuccccauggcaacaguuaugg

SEQ ID NO: 34279 - RNA, 22 nt, Human
cuccccauugugaccucaucca

SEQ ID NO: 34280 - RNA, 22 nt, Human
gcaggguccauggaggcagccc

SEQ ID NO: 34281 - RNA, 22 nt, Human
gcagggucugaggccacagagg

SEQ ID NO: 34282 - RNA, 19 nt, Human
gcaggguguugacuguccc

SEQ ID NO: 34283 - RNA, 22 nt, Human
gcaggguucucagcagugaugg

SEQ ID NO: 34284 - RNA, 21 nt, Human
gcaggguuugugcugugaguu

SEQ ID NO: 34285 - RNA, 19 nt, Human
gcagguagagacagcagcc

SEQ ID NO: 34286 - RNA, 22 nt, Human
gcaggucuugaaggugugauuu

SEQ ID NO: 34287 - RNA, 18 nt, Human
gcaggugccacugcuguu

SEQ ID NO: 34288 - RNA, 22 nt, Human
gcagguggaagcagcagacuca

SEQ ID NO: 34289 - RNA, 16 nt, Human
gcagguggaucaccug

SEQ ID NO: 34290 - RNA, 15 nt, Human
gcagguggaucacuu

SEQ ID NO: 34291 - RNA, 22 nt, Human
gcaggugggggucggugcaucu

SEQ ID NO: 34292 - RNA, 22 nt, Human
gcaggugucuucagcaggauga

SEQ ID NO: 34293 - RNA, 19 nt, Human
gcaggugugaauccguaga

SEQ ID NO: 34294 - RNA, 22 nt, Human
gcagguguggguggcugccagg

SEQ ID NO: 34295 - RNA, 22 nt, Human
gcagguuagauuuaauccauuc

SEQ ID NO: 34296 - RNA, 22 nt, Human
gcaguaaagccugagauauaug

SEQ ID NO: 34297 - RNA, 22 nt, Human
gcaguaaaggugacaauauagg

SEQ ID NO: 34298 - RNA, 22 nt, Human
gcaguaaauaauuuuguguaua

SEQ ID NO: 34299 - RNA, 22 nt, Human
gcaguaagaaagucaagcaguu

SEQ ID NO: 34300 - RNA, 22 nt, Human
gcaguaagaugggguaaucgua

SEQ ID NO: 34301 - RNA, 22 nt, Human
gcaguaagauguuucccagagc

SEQ ID NO: 34302 - RNA, 20 nt, Human
cuccucaguuccaugggagg

SEQ ID NO: 34303 - RNA, 22 nt, Human
cuccuccagacuuacugaaucc

SEQ ID NO: 34304 - RNA, 22 nt, Human
cuccuccagcuuccaguggcuc

SEQ ID NO: 34305 - RNA, 22 nt, Human
cuccuccaguccuccaaggaca

SEQ ID NO: 34306 - RNA, 22 nt, Human
cuccucccucuuugccacacau

SEQ ID NO: 34307 - RNA, 22 nt, Human
cuccuccuaaaugauucuuccu

SEQ ID NO: 34308 - RNA, 22 nt, Human
cuccucgaagcaaccugcaggc

SEQ ID NO: 34309 - RNA, 22 nt, Human
cuccucuagaagcugaccugga

SEQ ID NO: 34310 - RNA, 17 nt, Human
cuccucucuggguuacu

SEQ ID NO: 34311 - RNA, 22 nt, Human
cuccucuggguccugguggcca

SEQ ID NO: 34312 - RNA, 22 nt, Human
cuccucugucuaccacgagggu

SEQ ID NO: 34313 - RNA, 22 nt, Human
cuccucuuuggggauuuacaca

SEQ ID NO: 34314 - RNA, 22 nt, Human
cuccugagaauuuucaguugga

SEQ ID NO: 34315 - RNA, 22 nt, Human
cuccugagcugcagccuugugu

SEQ ID NO: 34316 - RNA, 22 nt, Human
cuccugaggaaaagcuugguca

SEQ ID NO: 34317 - RNA, 22 nt, Human
cuccugaggggacaggacucau

SEQ ID NO: 34318 - RNA, 22 nt, Human
cuccugaguaguagcauuguca

SEQ ID NO: 34319 - RNA, 22 nt, Human
cuccugagucuccacgccccgu

SEQ ID NO: 34320 - RNA, 22 nt, Human
cuccugccaccgcgguguccug

SEQ ID NO: 34321 - RNA, 22 nt, Human
cuccugcgguacuacugugcuu

SEQ ID NO: 34322 - RNA, 22 nt, Human
cuccuggacauggagcggagga

SEQ ID NO: 34323 - RNA, 22 nt, Human
cuccuggaccagggcuauuggg

SEQ ID NO: 34324 - RNA, 22 nt, Human
cuccuggcagcaacauuuauau

SEQ ID NO: 34325 - RNA, 17 nt, Human
cuccuggcagccucagg

SEQ ID NO: 34326 - RNA, 22 nt, Human
cuccuggcucgcccccagcuga

SEQ ID NO: 34327 - RNA, 22 nt, Human
cuccuggcucugccacuuacua

SEQ ID NO: 34328 - RNA, 22 nt, Human
cuccugggagucuuccuggaug

SEQ ID NO: 34329 - RNA, 22 nt, Human
cuccuggggcacuuagaagcaa

SEQ ID NO: 34330 - RNA, 22 nt, Human
cuccugggggacagcggcaggg

SEQ ID NO: 34331 - RNA, 22 nt, Human
cuccugguucagagagcugaga

SEQ ID NO: 34332 - RNA, 22 nt, Human
cuccugguuccugucuuaaaua

SEQ ID NO: 34333 - RNA, 22 nt, Human
cuccugucccggggaccgccga

SEQ ID NO: 34334 - RNA, 22 nt, Human
cuccugugaggcuuaagcccag

SEQ ID NO: 34335 - RNA, 20 nt, Human
cuccugugccucucugggcc

SEQ ID NO: 34336 - RNA, 22 nt, Human
cuccuguguucaagcgauucuc

SEQ ID NO: 34337 - RNA, 22 nt, Human
cuccuucacgcaggcugccaug

SEQ ID NO: 34338 - RNA, 22 nt, Human
cuccuucccaugagugugggca

SEQ ID NO: 34339 - RNA, 22 nt, Human
cuccuuccccuacucagcaucc

SEQ ID NO: 34340 - RNA, 22 nt, Human
cuccuuccugcagaucugagau

SEQ ID NO: 34341 - RNA, 22 nt, Human
cuccuuggccguuaaugucaca

SEQ ID NO: 34342 - RNA, 22 nt, Human
cucggaauggaacaacagcggu

SEQ ID NO: 34343 - RNA, 22 nt, Human
cucggcagguggagguuguagu

SEQ ID NO: 34344 - RNA, 19 nt, Human
cucgugcacccaucaccug

SEQ ID NO: 34345 - RNA, 22 nt, Human
cucuaacacuguaaugcuuucu

SEQ ID NO: 34346 - RNA, 22 nt, Human
cucuagaacagugcugagccuu

SEQ ID NO: 34347 - RNA, 22 nt, Human
cucuagaaggucucccugccag

SEQ ID NO: 34348 - RNA, 18 nt, Human
cucuagaaugggagauuu

SEQ ID NO: 34349 - RNA, 22 nt, Human
cucuagcagcagcccuuccuua

SEQ ID NO: 34350 - RNA, 22 nt, Human
cucuagcucccagggagcgucu

SEQ ID NO: 34351 - RNA, 22 nt, Human
cucuagcugaggucacugcuau

SEQ ID NO: 34352 - RNA, 22 nt, Human
cucuaggccauccagggccauu

SEQ ID NO: 34353 - RNA, 22 nt, Human
cucuauguuaugcagaauuaag

SEQ ID NO: 34354 - RNA, 20 nt, Human
cucuauuauuaauuucuuaa

SEQ ID NO: 34355 - RNA, 22 nt, Human
cucuauucuaauggauucuggg

SEQ ID NO: 34356 - RNA, 22 nt, Human
cucucaaaguaagguguauaca

SEQ ID NO: 34357 - RNA, 22 nt, Human
cucucaaaugucauuccucuau

SEQ ID NO: 34358 - RNA, 22 nt, Human
cucucagaaguagcacgugggc

SEQ ID NO: 34359 - RNA, 22 nt, Human
cucucagcaggaaagcaugcaa

SEQ ID NO: 34360 - RNA, 15 nt, Human
cucucaggcaggcag

SEQ ID NO: 34361 - RNA, 22 nt, Human
cucucagggcagguggccuuuc

SEQ ID NO: 34362 - RNA, 22 nt, Human
cucucaguaaauuucugcccca

SEQ ID NO: 34363 - RNA, 22 nt, Human
cucuccagaucugcugagccag

SEQ ID NO: 34364 - RNA, 22 nt, Human
cucuccagccacagaagcugcu

SEQ ID NO: 34365 - RNA, 22 nt, Human
cucuccaggagagcacuuugag

SEQ ID NO: 34366 - RNA, 22 nt, Human
cucuccaggcgagguccuacug

SEQ ID NO: 34367 - RNA, 22 nt, Human
cucuccagggaagcaguguacu

SEQ ID NO: 34368 - RNA, 22 nt, Human
cucuccagggguagaugccuuc

SEQ ID NO: 34369 - RNA, 22 nt, Human
cucuccaucugugugaccuccc

SEQ ID NO: 34370 - RNA, 22 nt, Human
cucucccagucaggcucaggau

SEQ ID NO: 34371 - RNA, 22 nt, Human
cucuccccgguacgagcggccg

SEQ ID NO: 34372 - RNA, 22 nt, Human
cucuccucugaaguggugaccc

SEQ ID NO: 34373 - RNA, 22 nt, Human
cucuccuggggagcacacacac

SEQ ID NO: 34374 - RNA, 22 nt, Human
cucuccuuuacugcagagagcg

SEQ ID NO: 34375 - RNA, 22 nt, Human
cucuccuuugaagcaacuguau

SEQ ID NO: 34376 - RNA, 22 nt, Human
cucucuaacgacauucccauuc

SEQ ID NO: 34377 - RNA, 19 nt, Human
cucucuccaguggcuggcu

SEQ ID NO: 34378 - RNA, 23 nt, Human
cucucucuaccaugugaggacac

SEQ ID NO: 34379 - RNA, 22 nt, Human
cucucucuaugcguuguuccua

SEQ ID NO: 34380 - RNA, 22 nt, Human
cucucucuucuuuguaggggcc

SEQ ID NO: 34381 - RNA, 22 nt, Human
cucucucuuuagaagcgucugg

SEQ ID NO: 34382 - RNA, 22 nt, Human
cucucugaguggcuguacuuuc

SEQ ID NO: 34383 - RNA, 22 nt, Human
cucucuggaauuaaagcccaau

SEQ ID NO: 34384 - RNA, 22 nt, Human
cucucuggacuugaguaucagc

SEQ ID NO: 34385 - RNA, 22 nt, Human
cucucugguacauagaguuugg

SEQ ID NO: 34386 - RNA, 22 nt, Human
cucucuggucccagauuccaga

SEQ ID NO: 34387 - RNA, 18 nt, Human
cucucuggucuggauccc

SEQ ID NO: 34388 - RNA, 22 nt, Human
cucucugucuuggcauuugguc

SEQ ID NO: 34389 - RNA, 22 nt, Human
cucucugugcucacaagggcag

SEQ ID NO: 34390 - RNA, 22 nt, Human
uuuguguuuuagcuggugaggc

SEQ ID NO: 34391 - RNA, 22 nt, Human
uuuguuaaaaugcagauucugu

SEQ ID NO: 34392 - RNA, 22 nt, Human
uuuguuacaaagaaagaagagc

SEQ ID NO: 34393 - RNA, 22 nt, Human
uuuguuauaacaauaaaaaguc

SEQ ID NO: 34394 - RNA, 22 nt, Human
uuuguucaaauuuuccuaucug

SEQ ID NO: 34395 - RNA, 22 nt, Human
uuuguucaacaggugaaauaga

SEQ ID NO: 34396 - RNA, 22 nt, Human
uuuguucaacaucacuuccacc

SEQ ID NO: 34397 - RNA, 22 nt, Human
uuuguucaauauguguuugucc

SEQ ID NO: 34398 - RNA, 21 nt, Human
uuuguucacacacagggcagc

SEQ ID NO: 34399 - RNA, 22 nt, Human
uuuguucacaggguuguuguag

SEQ ID NO: 34400 - RNA, 22 nt, Human
uuuguucaccucaaggauggga

SEQ ID NO: 34401 - RNA, 22 nt, Human
uuuguucacuauaucccucagu

SEQ ID NO: 34402 - RNA, 16 nt, Human
uuuguucacuccaugg

SEQ ID NO: 34403 - RNA, 22 nt, Human
uuuguucagcucucauugauua

SEQ ID NO: 34404 - RNA, 21 nt, Human
uuuguucaggcaaguuacagu

SEQ ID NO: 34405 - RNA, 21 nt, Human
uuuguucauagcucacucuuu

SEQ ID NO: 34406 - RNA, 23 nt, Human
uuuguucaucauuagagucuagc

SEQ ID NO: 34407 - RNA, 17 nt, Human
uuuguucauugaagaga

SEQ ID NO: 34408 - RNA, 22 nt, Human
uuuguucguucaugcacgguag

SEQ ID NO: 34409 - RNA, 22 nt, Human
uuuguucuaacuucugcagaca

SEQ ID NO: 34410 - RNA, 22 nt, Human
uuuguucugaaaaucuucccuu

SEQ ID NO: 34411 - RNA, 22 nt, Human
uuuguucuuaguaucugugugc

SEQ ID NO: 34412 - RNA, 22 nt, Human
uuuguugugauaauggucugca

SEQ ID NO: 34413 - RNA, 22 nt, Human
uuuguuuacaaaaauaagcagu

SEQ ID NO: 34414 - RNA, 22 nt, Human
uuuguuuagaaagagauuggug

SEQ ID NO: 34415 - RNA, 22 nt, Human
uuuguuuauuaggggagaguug

SEQ ID NO: 34416 - RNA, 22 nt, Human
uuuguuuggcaacuugguaaag

SEQ ID NO: 34417 - RNA, 22 nt, Human
uuuguuuucaaugugucauuca

SEQ ID NO: 34418 - RNA, 22 nt, Human
uuuguuuucuguaggccuuucc

SEQ ID NO: 34419 - RNA, 22 nt, Human
uuuuaaacuccccuaguuggug

SEQ ID NO: 34420 - RNA, 22 nt, Human
uuuuaaaggcagauuauggcuu

SEQ ID NO: 34421 - RNA, 22 nt, Human
uuuuaaaucuccaguugacccc

SEQ ID NO: 34422 - RNA, 22 nt, Human
uuuuaagaaauguaugacuguc

SEQ ID NO: 34423 - RNA, 22 nt, Human
uuuuaagaacuguucugugcuu

SEQ ID NO: 34424 - RNA, 22 nt, Human
uuuuaagaggaggcuguuugaa

SEQ ID NO: 34425 - RNA, 22 nt, Human
uuuuaagugcaaucugaaugcg

SEQ ID NO: 34426 - RNA, 19 nt, Human
uuuuaagugcccuuucuuc

SEQ ID NO: 34427 - RNA, 22 nt, Human
uuuuaauccucuugguaucuua

SEQ ID NO: 34428 - RNA, 22 nt, Human
uuuuaauugcaauuaugguccc

SEQ ID NO: 34429 - RNA, 18 nt, Human
uuuuaauuucaggggugg

SEQ ID NO: 34430 - RNA, 22 nt, Human
uuuuacagucagucaaacucag

SEQ ID NO: 34431 - RNA, 22 nt, Human
uuuuaccacugggugacaugga

SEQ ID NO: 34432 - RNA, 22 nt, Human
uuuuacuuaauucuuggucaug

SEQ ID NO: 34433 - RNA, 22 nt, Human
uuuuagaaggaaugcuauggug

SEQ ID NO: 34434 - RNA, 22 nt, Human
uuuuagauuauaagucuaauuc

SEQ ID NO: 34435 - RNA, 22 nt, Human
uuuuaguaccaaccagaagaug

SEQ ID NO: 34436 - RNA, 22 nt, Human
uuuuaguguagucaccgugggu

SEQ ID NO: 34437 - RNA, 22 nt, Human
uuuuauauggcacauugguugg

SEQ ID NO: 34438 - RNA, 22 nt, Human
uuuuauauugagugagaguucc

SEQ ID NO: 34439 - RNA, 22 nt, Human
uuuuauguaauaaacuguacac

SEQ ID NO: 34440 - RNA, 22 nt, Human
uuuuauguaauccuuacugucg

SEQ ID NO: 34441 - RNA, 22 nt, Human
uuuuaugucauaaggacacuca

SEQ ID NO: 34442 - RNA, 22 nt, Human
uuuuauucuaaguaugauggga

SEQ ID NO: 34443 - RNA, 22 nt, Human
uuuuauucucagcuccagagag

SEQ ID NO: 34444 - RNA, 22 nt, Human
uuuuauugcaauaaagugugua

SEQ ID NO: 34445 - RNA, 22 nt, Human
uuuuauugucuguauugccuau

SEQ ID NO: 34446 - RNA, 22 nt, Human
uuuucagaaagaugagaaauua

SEQ ID NO: 34447 - RNA, 22 nt, Human
uuuucaggcugauuuguguuag

SEQ ID NO: 34448 - RNA, 22 nt, Human
uuuucaguuacuguuuauguga

SEQ ID NO: 34449 - RNA, 22 nt, Human
uuuucaguuccaucucugcucu

SEQ ID NO: 34450 - RNA, 22 nt, Human
uuuucaguuugcacugcagugc

SEQ ID NO: 34451 - RNA, 22 nt, Human
uuuucaucucugcuuuguaccu

SEQ ID NO: 34452 - RNA, 22 nt, Human
uuuucauguuccuuguuaagug

SEQ ID NO: 34453 - RNA, 22 nt, Human
uuuucauugagcaccugaguaa

SEQ ID NO: 34454 - RNA, 22 nt, Human
uuuucauuuuuguagaugcaag

SEQ ID NO: 34455 - RNA, 22 nt, Human
uuuuccaaaguaccaugucccu

SEQ ID NO: 34456 - RNA, 22 nt, Human
uuucaguuuaaguaacugcuau

SEQ ID NO: 34457 - RNA, 22 nt, Human
uuucaguuuagacuaaagguag

SEQ ID NO: 34458 - RNA, 22 nt, Human
uuucaguuuuauaacuuuggcc

SEQ ID NO: 34459 - RNA, 22 nt, Human
uuucauaauauccagagauuuu

SEQ ID NO: 34460 - RNA, 22 nt, Human
uuucaucaccccaaaucuaugg

SEQ ID NO: 34461 - RNA, 22 nt, Human
uuucaucauguuggcagauugg

SEQ ID NO: 34462 - RNA, 22 nt, Human
uuucaucucucuaaaagacagu

SEQ ID NO: 34463 - RNA, 22 nt, Human
uuucaugaggggcaaaaucuca

SEQ ID NO: 34464 - RNA, 22 nt, Human
uuucaugauccauuuacaaaau

SEQ ID NO: 34465 - RNA, 22 nt, Human
uuucaugauuaacuuagugaau

SEQ ID NO: 34466 - RNA, 22 nt, Human
uuucaugccucuugagaaagau

SEQ ID NO: 34467 - RNA, 22 nt, Human
uuucauguauuucccaaagcuu

SEQ ID NO: 34468 - RNA, 22 nt, Human
uuucaugugcaauuagcaauau

SEQ ID NO: 34469 - RNA, 22 nt, Human
uuucaugugcauuuagguucau

SEQ ID NO: 34470 - RNA, 22 nt, Human
uuucauguguugaauguguaca

SEQ ID NO: 34471 - RNA, 22 nt, Human
uuucauguuacaguguaaaagu

SEQ ID NO: 34472 - RNA, 22 nt, Human
uuucauguuacauuuaaaaugu

SEQ ID NO: 34473 - RNA, 22 nt, Human
uuucauguuggauacuguuuca

SEQ ID NO: 34474 - RNA, 22 nt, Human
uuucauguuuucuuaaauggca

SEQ ID NO: 34475 - RNA, 22 nt, Human
uuucauuaaagucaaaucuggu

SEQ ID NO: 34476 - RNA, 22 nt, Human
uuucauuacguguuugacuugu

SEQ ID NO: 34477 - RNA, 22 nt, Human
uuucauugacaguugggggaaa

SEQ ID NO: 34478 - RNA, 22 nt, Human
uuucauuggcagagccuguuuu

SEQ ID NO: 34479 - RNA, 20 nt, Human
uuucauugucagaaucuuau

SEQ ID NO: 34480 - RNA, 22 nt, Human
uuucauugucaucuaucuuaga

SEQ ID NO: 34481 - RNA, 22 nt, Human
uuucauuguccccaggcaagac

SEQ ID NO: 34482 - RNA, 22 nt, Human
uuucauugugaugcuuuuauca

SEQ ID NO: 34483 - RNA, 22 nt, Human
uuuccaaaggcuaaacucaguu

SEQ ID NO: 34484 - RNA, 16 nt, Human
uuuccaaagggcagcu

SEQ ID NO: 34485 - RNA, 22 nt, Human
uuuccaaagguggcaggaacaa

SEQ ID NO: 34486 - RNA, 22 nt, Human
uuuccaagagcuuauuucugaa

SEQ ID NO: 34487 - RNA, 22 nt, Human
uuuccaagauaauacacagaaa

SEQ ID NO: 34488 - RNA, 22 nt, Human
uuuccaaggaugugucucucua

SEQ ID NO: 34489 - RNA, 22 nt, Human
uuuccacaauguuuuugcagga

SEQ ID NO: 34490 - RNA, 22 nt, Human
uuuccacagcuguauaaaauaa

SEQ ID NO: 34491 - RNA, 22 nt, Human
uuuccacaucaccaugagguga

SEQ ID NO: 34492 - RNA, 22 nt, Human
uuuccacucuggccaccaucuu

SEQ ID NO: 34493 - RNA, 20 nt, Human
uuuccacuguaauguaugau

SEQ ID NO: 34494 - RNA, 22 nt, Human
uuuccagauuaagauaccacuu

SEQ ID NO: 34495 - RNA, 23 nt, Human
uuuccaggugaccgucagaauua

SEQ ID NO: 34496 - RNA, 22 nt, Human
uuuccaggugcauagaaaacag

SEQ ID NO: 34497 - RNA, 22 nt, Human
uuuccaguaaguggcaaggagc

SEQ ID NO: 34498 - RNA, 22 nt, Human
uuuccagucaccacuagaucag

SEQ ID NO: 34499 - RNA, 22 nt, Human
uuucuggauucauacagaugua

SEQ ID NO: 34500 - RNA, 22 nt, Human
uuucuguaaagaccaagccagc

SEQ ID NO: 34501 - RNA, 22 nt, Human
uuucuguaaggacuuaaugcaa

SEQ ID NO: 34502 - RNA, 22 nt, Human
uuucuguaaguggcaaauaaug

SEQ ID NO: 34503 - RNA, 22 nt, Human
uuucuguacacccacuauucau

SEQ ID NO: 34504 - RNA, 22 nt, Human
uuucuguagugugguauguagg

SEQ ID NO: 34505 - RNA, 21 nt, Human
uuucuguccuuuccaucagcu

SEQ ID NO: 34506 - RNA, 21 nt, Human
uuucugucucugccacuaguu

SEQ ID NO: 34507 - RNA, 22 nt, Human
uuucugucugacaucccugccu

SEQ ID NO: 34508 - RNA, 22 nt, Human
uuucugugaauuauaaaauuug

SEQ ID NO: 34509 - RNA, 20 nt, Human
uuucugugagaaacacuguu

SEQ ID NO: 34510 - RNA, 20 nt, Human
uuucugugauagagaggugu

SEQ ID NO: 34511 - RNA, 22 nt, Human
uuucugugguggguaguucaga

SEQ ID NO: 34512 - RNA, 22 nt, Human
uuucuguuguuggugucuggcu

SEQ ID NO: 34513 - RNA, 22 nt, Human
uuucuuaaauauuugcaggaca

SEQ ID NO: 34514 - RNA, 22 nt, Human
uuucuuagcgaugcuugauaaa

SEQ ID NO: 34515 - RNA, 19 nt, Human
uuucuuaggccuuuggccu

SEQ ID NO: 34516 - RNA, 22 nt, Human
uuucuuaggcucuaaaaugacu

SEQ ID NO: 34517 - RNA, 22 nt, Human
uuucuuagggacuguaaaauag

SEQ ID NO: 34518 - RNA, 22 nt, Human
uuucuuaguccuagagugauuu

SEQ ID NO: 34519 - RNA, 22 nt, Human
uuucuuauauucugucauuguu

SEQ ID NO: 34520 - RNA, 22 nt, Human
uuucuucagccuucacaaccug

SEQ ID NO: 34521 - RNA, 19 nt, Human
uuucuuccaaagacuaugg

SEQ ID NO: 34522 - RNA, 22 nt, Human
uuucuucccaagcaguuucaga

SEQ ID NO: 34523 - RNA, 22 nt, Human
uuucuuccccacugcaggcucu

SEQ ID NO: 34524 - RNA, 21 nt, Human
uuucuucccuuggcuucugag

SEQ ID NO: 34525 - RNA, 22 nt, Human
uuucuuccuauguaucuugcug

SEQ ID NO: 34526 - RNA, 22 nt, Human
uuucuucucacccaggacagag

SEQ ID NO: 34527 - RNA, 22 nt, Human
uuucuucucaucccugaaauca

SEQ ID NO: 34528 - RNA, 22 nt, Human
uuucuucugagaucagggagaa

SEQ ID NO: 34529 - RNA, 22 nt, Human
uuucuucuugaguaaccagauu

SEQ ID NO: 34530 - RNA, 22 nt, Human
uuucuugccagagaaaaagagu

SEQ ID NO: 34531 - RNA, 22 nt, Human
uuucuuggguuccaguucccag

SEQ ID NO: 34532 - RNA, 22 nt, Human
uuucuuguaaaagcugugggaa

SEQ ID NO: 34533 - RNA, 22 nt, Human
uuucuuguaagauguuuauuaa

SEQ ID NO: 34534 - RNA, 22 nt, Human
uuucuuuaaaggaacucuguuu

SEQ ID NO: 34535 - RNA, 22 nt, Human
uuucuuucaauucuccuaaugc

SEQ ID NO: 34536 - RNA, 22 nt, Human
uuucuuuccaugagccuaugua

SEQ ID NO: 34537 - RNA, 21 nt, Human
uuucuuucuggcucucacagu

SEQ ID NO: 34538 - RNA, 22 nt, Human
uuucuuuguaguagcauaauca

SEQ ID NO: 34539 - RNA, 19 nt, Human
uuucuuuuccccucagcac

SEQ ID NO: 34540 - RNA, 22 nt, Human
uuugaaaaaggccuuugguaug

SEQ ID NO: 34541 - RNA, 22 nt, Human
uuugaaaauuagacacaggcua

SEQ ID NO: 34542 - RNA, 22 nt, Human
uuugaaacaggugauucagcua

SEQ ID NO: 34543 - RNA, 22 nt, Human
uuugaaagaauuuauguacuuu

SEQ ID NO: 34544 - RNA, 22 nt, Human
uuugaaagacagaauauuuuug

SEQ ID NO: 34545 - RNA, 22 nt, Human
uuugaaagcaggugugggaggg

SEQ ID NO: 34546 - RNA, 22 nt, Human
uuugaaagcuacuuucggguca

SEQ ID NO: 34547 - RNA, 22 nt, Human
uuugaaagucaaccuuccaguu

SEQ ID NO: 34548 - RNA, 22 nt, Human
uuugaaaguguuuacuugggaa

SEQ ID NO: 34549 - RNA, 22 nt, Human
uuugaaauaugugucuuuugaa

SEQ ID NO: 34550 - RNA, 22 nt, Human
uuugaaauguaucaguauaggu

SEQ ID NO: 34551 - RNA, 22 nt, Human
uuugaacuaccucuccuuagca

SEQ ID NO: 34552 - RNA, 21 nt, Human
uuugaacuagagguaaauucc

SEQ ID NO: 34553 - RNA, 22 nt, Human
uuugaacuucuaccugucauau

SEQ ID NO: 34554 - RNA, 23 nt, Human
uuugaagaagugaauaucauaua

SEQ ID NO: 34555 - RNA, 22 nt, Human
uuugaagaccuuaucucuaaau

SEQ ID NO: 34556 - RNA, 22 nt, Human
uuugaagcagaugguuaagcuu

SEQ ID NO: 34557 - RNA, 23 nt, Human
uuugaagcauuuuguaucuuagu

SEQ ID NO: 34558 - RNA, 22 nt, Human
uuugaagucaaagauugauucc

SEQ ID NO: 34559 - RNA, 22 nt, Human
uuugaaguccaucuggcccagu

SEQ ID NO: 34560 - RNA, 22 nt, Human
uuugaagugcaaugaggauucu

SEQ ID NO: 34561 - RNA, 22 nt, Human
uuugaaguguuauuucuaucac

SEQ ID NO: 34562 - RNA, 22 nt, Human
uuugaaguucccccauaucaga

SEQ ID NO: 34563 - RNA, 22 nt, Human
uuugaauaaucacugggcauua

SEQ ID NO: 34564 - RNA, 19 nt, Human
uuugaauauaaugcagcua

SEQ ID NO: 34565 - RNA, 22 nt, Human
uuugaaucugauauggcagcau

SEQ ID NO: 34566 - RNA, 20 nt, Human
uuugaauguaaagcauguca

SEQ ID NO: 34567 - RNA, 22 nt, Human
uuugacaaaauuaugcuaauau

SEQ ID NO: 34568 - RNA, 22 nt, Human
uuugacaaauaggggaauaagg

SEQ ID NO: 34569 - RNA, 22 nt, Human
uuugacaaauauuuauuggcac

SEQ ID NO: 34570 - RNA, 22 nt, Human
uuugacaacacguuauuugccu

SEQ ID NO: 34571 - RNA, 22 nt, Human
cucugggucaccaucggggauu

SEQ ID NO: 34572 - RNA, 22 nt, Human
cucugggucaggacacaaaagu

SEQ ID NO: 34573 - RNA, 22 nt, Human
cucugggucucccugaggcuaa

SEQ ID NO: 34574 - RNA, 22 nt, Human
cucugggugucuuaggagcuca

SEQ ID NO: 34575 - RNA, 22 nt, Human
cucuggguucuggccugcaccc

SEQ ID NO: 34576 - RNA, 22 nt, Human
cucuggguuuugucagcugagg

SEQ ID NO: 34577 - RNA, 22 nt, Human
cucuggucaagcaaagagguuu

SEQ ID NO: 34578 - RNA, 22 nt, Human
cucuggucauuuggaagagcau

SEQ ID NO: 34579 - RNA, 22 nt, Human
cucugguguccuuuagaauuua

SEQ ID NO: 34580 - RNA, 22 nt, Human
cucugguucagggcucccuggc

SEQ ID NO: 34581 - RNA, 22 nt, Human
cucugguuucgcaggaaauaga

SEQ ID NO: 34582 - RNA, 17 nt, Human
cucuguacaggaaagag

SEQ ID NO: 34583 - RNA, 22 nt, Human
cucuguacaggagacaucucua

SEQ ID NO: 34584 - RNA, 22 nt, Human
cucuguagaaacagggcagaag

SEQ ID NO: 34585 - RNA, 22 nt, Human
cucuguagacuccaccuuugag

SEQ ID NO: 34586 - RNA, 22 nt, Human
cucugucaggcugcagaugcuc

SEQ ID NO: 34587 - RNA, 22 nt, Human
cucugucccagacccaccucuc

SEQ ID NO: 34588 - RNA, 22 nt, Human
cucuguccuaugcuugauagaa

SEQ ID NO: 34589 - RNA, 22 nt, Human
cucuguccuccaccugcuuuca

SEQ ID NO: 34590 - RNA, 22 nt, Human
cucugugagggucuguacagaa

SEQ ID NO: 34591 - RNA, 22 nt, Human
cucugugauucucauguaccac

SEQ ID NO: 34592 - RNA, 22 nt, Human
cucugugccucaguuuucuucu

SEQ ID NO: 34593 - RNA, 22 nt, Human
cucugugcgggccauggucagg

SEQ ID NO: 34594 - RNA, 22 nt, Human
cucuguggcuugccuuucuguc

SEQ ID NO: 34595 - RNA, 22 nt, Human
cucugugggccugugcuuuagu

SEQ ID NO: 34596 - RNA, 22 nt, Human
cucugugucagcugggugugca

SEQ ID NO: 34597 - RNA, 22 nt, Human
cucugugucugaguuauggucu

SEQ ID NO: 34598 - RNA, 22 nt, Human
cucugugugguccucuguauug

SEQ ID NO: 34599 - RNA, 22 nt, Human
cucuguugagcauuuuuccccu

SEQ ID NO: 34600 - RNA, 18 nt, Human
cucuuaagccuuugucaa

SEQ ID NO: 34601 - RNA, 22 nt, Human
cucuuaauuaagcugagaucug

SEQ ID NO: 34602 - RNA, 19 nt, Human
cucuuacagaauagacaca

SEQ ID NO: 34603 - RNA, 22 nt, Human
cucuuagaaacuauagagauua

SEQ ID NO: 34604 - RNA, 20 nt, Human
cucuuaguacuguuccuggu

SEQ ID NO: 34605 - RNA, 22 nt, Human
cucuuagugcaucucauuaguu

SEQ ID NO: 34606 - RNA, 22 nt, Human
cucuuaguuuaucuuugacaaa

SEQ ID NO: 34607 - RNA, 22 nt, Human
cugagguagaggaaauguagcu

SEQ ID NO: 34608 - RNA, 22 nt, Human
cugagguagggacgugccguag

SEQ ID NO: 34609 - RNA, 22 nt, Human
cugagguauuuuauugggcuag

SEQ ID NO: 34610 - RNA, 22 nt, Human
cugaggucagaguuuagucugg

SEQ ID NO: 34611 - RNA, 22 nt, Human
cugaggucaggaguucaagcug

SEQ ID NO: 34612 - RNA, 22 nt, Human
cugagguccuugacugcuugcc

SEQ ID NO: 34613 - RNA, 22 nt, Human
cugaggucuauuuugaaacugc

SEQ ID NO: 34614 - RNA, 23 nt, Human
cugaggucugcaauucuaguagu

SEQ ID NO: 34615 - RNA, 22 nt, Human
cugaggugagaggaggccaugu

SEQ ID NO: 34616 - RNA, 22 nt, Human
cugagguggccucugccgggga

SEQ ID NO: 34617 - RNA, 22 nt, Human
cugagguuuacaagcuauugcu

SEQ ID NO: 34618 - RNA, 22 nt, Human
cugagguuuguccauccuuggu

SEQ ID NO: 34619 - RNA, 19 nt, Human
cugagucaaagguuguggg

SEQ ID NO: 34620 - RNA, 22 nt, Human
cugaguuuccagauaagaccuu

SEQ ID NO: 34621 - RNA, 22 nt, Human
cugauacaaugcuaauaaauuu

SEQ ID NO: 34622 - RNA, 22 nt, Human
cugauacauaguagcaugucau

SEQ ID NO: 34623 - RNA, 22 nt, Human
cugauauuucucuuaacacuag

SEQ ID NO: 34624 - RNA, 22 nt, Human
cugaucaugugggaggauaugu

SEQ ID NO: 34625 - RNA, 22 nt, Human
cugaugccucucuucuuggcuu

SEQ ID NO: 34626 - RNA, 22 nt, Human
cugaugcucuggauguagucaa

SEQ ID NO: 34627 - RNA, 22 nt, Human
cugauggaugcuacguaagagg

SEQ ID NO: 34628 - RNA, 22 nt, Human
cugauguucauuucuuuuguac

SEQ ID NO: 34629 - RNA, 19 nt, Human
cugauguuccagagaagcu

SEQ ID NO: 34630 - RNA, 22 nt, Human
cugauuaggcuaagcaagaggg

SEQ ID NO: 34631 - RNA, 22 nt, Human
cugauuccaaagccaaagcuau

SEQ ID NO: 34632 - RNA, 22 nt, Human
cugauuccugauucaugcucuu

SEQ ID NO: 34633 - RNA, 22 nt, Human
cugauucuaggcguuccucuca

SEQ ID NO: 34634 - RNA, 22 nt, Human
cugauucuccucaagacuuucg

SEQ ID NO: 34635 - RNA, 22 nt, Human
cugauuucaugcuaucaauguu

SEQ ID NO: 34636 - RNA, 22 nt, Human
cugcaaaaguaauugcagguuu

SEQ ID NO: 34637 - RNA, 20 nt, Human
cugcaaaaugacauuaggaa

SEQ ID NO: 34638 - RNA, 22 nt, Human
cugcaaauaggaaaagggcaua

SEQ ID NO: 34639 - RNA, 22 nt, Human
cugcaaauccucagaaaggguu

SEQ ID NO: 34640 - RNA, 23 nt, Human
cugcaacucagucuggagcaguu

SEQ ID NO: 34641 - RNA, 22 nt, Human
cugcaagauuggaagaugcaau

SEQ ID NO: 34642 - RNA, 22 nt, Human
cugcaaggucaugacucucugg

SEQ ID NO: 34643 - RNA, 22 nt, Human
cugcaauaguuuagaauaauug

SEQ ID NO: 34644 - RNA, 22 nt, Human
cugcaaucuccaugcuugauuu

SEQ ID NO: 34645 - RNA, 23 nt, Human
cugcaauugccugaucucauugg

SEQ ID NO: 34646 - RNA, 22 nt, Human
cugcacacauauggcuucucuc

SEQ ID NO: 34647 - RNA, 22 nt, Human
cugcacagagcggcaguucuua

SEQ ID NO: 34648 - RNA, 22 nt, Human
cugcacaguggacagugaagau

SEQ ID NO: 34649 - RNA, 22 nt, Human
cugcacaguggguggggcguca

SEQ ID NO: 34650 - RNA, 22 nt, Human
cugcacaguguuggaagcugcc

SEQ ID NO: 34651 - RNA, 22 nt, Human
cugcacauaguaaguacucaau

SEQ ID NO: 34652 - RNA, 22 nt, Human
cugcaccauccuucaugcucug

SEQ ID NO: 34653 - RNA, 22 nt, Human
cugcacccucaaacuccugggc

SEQ ID NO: 34654 - RNA, 19 nt, Human
cugcacugagaaaaggagg

SEQ ID NO: 34655 - RNA, 22 nt, Human
cugcagaaauauggaugugaua

SEQ ID NO: 34656 - RNA, 22 nt, Human
cugcagaauggggccaagugga

SEQ ID NO: 34657 - RNA, 23 nt, Human
cugcagagaacugagggacagcc

SEQ ID NO: 34658 - RNA, 22 nt, Human
cugcagagaccuaggucagguu

SEQ ID NO: 34659 - RNA, 22 nt, Human
cugcagagcaugaggaggucug

SEQ ID NO: 34660 - RNA, 22 nt, Human
cugcagagcuugucuggaugug

SEQ ID NO: 34661 - RNA, 22 nt, Human
cugcagaggguuugagcauccu

SEQ ID NO: 34662 - RNA, 22 nt, Human
cugcagaguggagccucggcug

SEQ ID NO: 34663 - RNA, 22 nt, Human
cugcagaucuuguguacuuguc

SEQ ID NO: 34664 - RNA, 22 nt, Human
cugcagaugguauuguucuggu

SEQ ID NO: 34665 - RNA, 22 nt, Human
cugcagauuggccugauguuca

SEQ ID NO: 34666 - RNA, 22 nt, Human
cugcagcaagagaagugcugac

SEQ ID NO: 34667 - RNA, 22 nt, Human
cugcagcagaauaaucugcuca

SEQ ID NO: 34668 - RNA, 22 nt, Human
cugcagcagggcuugcccaccu

SEQ ID NO: 34669 - RNA, 22 nt, Human
cugcagcauccuagggucugug

SEQ ID NO: 34670 - RNA, 22 nt, Human
cugcagcaucgccaccugccuc

SEQ ID NO: 34671 - RNA, 22 nt, Human
cugcagccacgagucacagccc

SEQ ID NO: 34672 - RNA, 22 nt, Human
cugcagccuaggugcagcuggg

SEQ ID NO: 34673 - RNA, 19 nt, Human
cugcagcugcaccauccca

SEQ ID NO: 34674 - RNA, 22 nt, Human
cugcagcugccagugauuucag

SEQ ID NO: 34675 - RNA, 22 nt, Human
cugcagcuggagcaucuucuca

SEQ ID NO: 34676 - RNA, 22 nt, Human
cugcagcugugagugcuggaug

SEQ ID NO: 34677 - RNA, 22 nt, Human
cugcagcuuaagggagggguug

SEQ ID NO: 34678 - RNA, 22 nt, Human
cugcagcuuuggaaaccuguuu

SEQ ID NO: 34679 - RNA, 22 nt, Human
cugcaggacagggaggagcaag

SEQ ID NO: 34680 - RNA, 21 nt, Human
cuggaacaaauacuagcaaac

SEQ ID NO: 34681 - RNA, 22 nt, Human
cuggaacagaagcacuggagag

SEQ ID NO: 34682 - RNA, 22 nt, Human
cuggaagaacuccaguucugug

SEQ ID NO: 34683 - RNA, 22 nt, Human
cuggaagacucaauggccugcc

SEQ ID NO: 34684 - RNA, 22 nt, Human
cuggaagaggaagccagcugga

SEQ ID NO: 34685 - RNA, 22 nt, Human
cuggaagagugacuuugcauuu

SEQ ID NO: 34686 - RNA, 22 nt, Human
cuggaaggguacauaggaaacu

SEQ ID NO: 34687 - RNA, 22 nt, Human
cuggaagggucuacuuagcaga

SEQ ID NO: 34688 - RNA, 22 nt, Human
cuggaaggugacugucuugaau

SEQ ID NO: 34689 - RNA, 22 nt, Human
cuggaaguauaggggagaugau

SEQ ID NO: 34690 - RNA, 22 nt, Human
cuggaaguggagaguggcccuc

SEQ ID NO: 34691 - RNA, 22 nt, Human
cuggaaugaagcuauguacauu

SEQ ID NO: 34692 - RNA, 22 nt, Human
cuggaaugagcagggcuuaugg

SEQ ID NO: 34693 - RNA, 19 nt, Human
cuggaaugauagagaccuc

SEQ ID NO: 34694 - RNA, 22 nt, Human
cuggaaugucugcucaauguuu

SEQ ID NO: 34695 - RNA, 16 nt, Human
cuggacagaaaaaccu

SEQ ID NO: 34696 - RNA, 22 nt, Human
cuggacagaaaaggccacugga

SEQ ID NO: 34697 - RNA, 22 nt, Human
cuggacagaaguggcugggcag

SEQ ID NO: 34698 - RNA, 22 nt, Human
cuggacagcccucacugugugc

SEQ ID NO: 34699 - RNA, 22 nt, Human
cuggacaggcuggggacugcaa

SEQ ID NO: 34700 - RNA, 22 nt, Human
cuggacagugcugcuugagaug

SEQ ID NO: 34701 - RNA, 22 nt, Human
cuggacagugggcagaggagac

SEQ ID NO: 34702 - RNA, 22 nt, Human
cuggaccagccuccgccuucac

SEQ ID NO: 34703 - RNA, 23 nt, Human
cuggacucaggggaugugaagga

SEQ ID NO: 34704 - RNA, 22 nt, Human
cuggacucugcagagaaaagua

SEQ ID NO: 34705 - RNA, 22 nt, Human
cuggagaaaauccauguguaug

SEQ ID NO: 34706 - RNA, 22 nt, Human
cuggagaagccaaacuagucac

SEQ ID NO: 34707 - RNA, 22 nt, Human
cuggagagaaaugacaaagcua

SEQ ID NO: 34708 - RNA, 22 nt, Human
cuggagagaauguucauugcag

SEQ ID NO: 34709 - RNA, 22 nt, Human
cuggagagggagcccuggcagu

SEQ ID NO: 34710 - RNA, 22 nt, Human
cuggagauaaguaaagaggcaa

SEQ ID NO: 34711 - RNA, 22 nt, Human
cuggagauguccgggugcuguu

SEQ ID NO: 34712 - RNA, 22 nt, Human
cuggagcaaaagugacuccucu

SEQ ID NO: 34713 - RNA, 17 nt, Human
cuggagccuccaacucc

SEQ ID NO: 34714 - RNA, 22 nt, Human
cuggagccugcaguuuucacuu

SEQ ID NO: 34715 - RNA, 22 nt, Human
cuggagcuaggaaguccaagau

SEQ ID NO: 34716 - RNA, 22 nt, Human
cuggagcugccagacgggcaca

SEQ ID NO: 34717 - RNA, 22 nt, Human
cuggagcuuauugggagcagaa

SEQ ID NO: 34718 - RNA, 22 nt, Human
cuggaggaggaagucuacaaug

SEQ ID NO: 34719 - RNA, 22 nt, Human
cuggaggcacccuuagagaggc

SEQ ID NO: 34720 - RNA, 22 nt, Human
cuggaggcugaguugggucucc

SEQ ID NO: 34721 - RNA, 22 nt, Human
cuggagggggaaauguucauug

SEQ ID NO: 34722 - RNA, 22 nt, Human
cuggaggguggagagaagucuc

SEQ ID NO: 34723 - RNA, 22 nt, Human
cuggaguaaguuaagauguucc

SEQ ID NO: 34724 - RNA, 21 nt, Human
cuggagucauuuucugaguag

SEQ ID NO: 34725 - RNA, 22 nt, Human
cuggagugacuuuguuccuuuu

SEQ ID NO: 34726 - RNA, 22 nt, Human
cuggagugaggucugggagccu

SEQ ID NO: 34727 - RNA, 22 nt, Human
cuggagugcaaccucugccucc

SEQ ID NO: 34728 - RNA, 22 nt, Human
cuggaguucuaugugcuuguga

SEQ ID NO: 34729 - RNA, 22 nt, Human
cuggaguuugcggggacagaga

SEQ ID NO: 34730 - RNA, 22 nt, Human
cuggauaaauguuugcuuuaga

SEQ ID NO: 34731 - RNA, 22 nt, Human
cuggauaaucacagaggagcau

SEQ ID NO: 34732 - RNA, 22 nt, Human
cuggauccuucucuguguauuu

SEQ ID NO: 34733 - RNA, 22 nt, Human
cuggaugauaacagcaauauuu

SEQ ID NO: 34734 - RNA, 22 nt, Human
cuggaugcugagagguaccaag

SEQ ID NO: 34735 - RNA, 22 nt, Human
cuggaugcuuccucucugcuag

SEQ ID NO: 34736 - RNA, 22 nt, Human
cuggauggaaggaggauaguau

SEQ ID NO: 34737 - RNA, 22 nt, Human
cuggcacaaugucacuuuugcu

SEQ ID NO: 34738 - RNA, 22 nt, Human
cuggcacacaguaggcaccaau

SEQ ID NO: 34739 - RNA, 22 nt, Human
cuggcacagagugagcauucaa

SEQ ID NO: 34740 - RNA, 22 nt, Human
cuggcacagccacugcaggcag

SEQ ID NO: 34741 - RNA, 22 nt, Human
cuggcacaucacuccuaguuua

SEQ ID NO: 34742 - RNA, 22 nt, Human
cuggcaccaggcaugcugggag

SEQ ID NO: 34743 - RNA, 22 nt, Human
cuggaguuagaguagacacuga

SEQ ID NO: 34744 - RNA, 22 nt, Human
cuggaguucgacugaguugaau

SEQ ID NO: 34745 - RNA, 22 nt, Human
cuggaguugggaugugccugga

SEQ ID NO: 34746 - RNA, 22 nt, Human
cuggaguuuguggcuugcucaa

SEQ ID NO: 34747 - RNA, 22 nt, Human
cuggauaaaugcuuuaguugga

SEQ ID NO: 34748 - RNA, 22 nt, Human
cuggaucaugggaaagggauca

SEQ ID NO: 34749 - RNA, 22 nt, Human
cuggaucuaaagguggauguag

SEQ ID NO: 34750 - RNA, 22 nt, Human
cuggaucugaacaucgguauca

SEQ ID NO: 34751 - RNA, 22 nt, Human
cuggaucuguccccuuuuuguu

SEQ ID NO: 34752 - RNA, 22 nt, Human
cuggaucugucuuuuggauccc

SEQ ID NO: 34753 - RNA, 22 nt, Human
cuggaucuugcugcauugagaa

SEQ ID NO: 34754 - RNA, 20 nt, Human
cuggaugcuaaaacacacac

SEQ ID NO: 34755 - RNA, 22 nt, Human
cuggauggucccaugagcagcu

SEQ ID NO: 34756 - RNA, 22 nt, Human
cuggauguaaagggugaagaaa

SEQ ID NO: 34757 - RNA, 22 nt, Human
cuggauguccuuccccugaagc

SEQ ID NO: 34758 - RNA, 22 nt, Human
cuggaugucuuggggacuccug

SEQ ID NO: 34759 - RNA, 22 nt, Human
cuggauguucuucugcaauuau

SEQ ID NO: 34760 - RNA, 18 nt, Human
cuggauuaagacagugcu

SEQ ID NO: 34761 - RNA, 22 nt, Human
cuggauuuaauuaacuguugcu

SEQ ID NO: 34762 - RNA, 22 nt, Human
cuggauuugccuauggugcuuu

SEQ ID NO: 34763 - RNA, 22 nt, Human
cuggauuuuaucauuguaguuu

SEQ ID NO: 34764 - RNA, 22 nt, Human
cuggcacaacuccaccucagcg

SEQ ID NO: 34765 - RNA, 22 nt, Human
cuggcacacaaguauuuccuuu

SEQ ID NO: 34766 - RNA, 22 nt, Human
cuggcacacagaggcccucggg

SEQ ID NO: 34767 - RNA, 22 nt, Human
cuggcacagagacagaaggauu

SEQ ID NO: 34768 - RNA, 22 nt, Human
cuggcacagcuugggccccauc

SEQ ID NO: 34769 - RNA, 22 nt, Human
cuggcacaguuaacauaugcua

SEQ ID NO: 34770 - RNA, 22 nt, Human
cuggcacaugcucccugagugg

SEQ ID NO: 34771 - RNA, 22 nt, Human
cuggcacaugugagccacauca

SEQ ID NO: 34772 - RNA, 22 nt, Human
cuggcacucauaggccaguuca

SEQ ID NO: 34773 - RNA, 22 nt, Human
cuggcacugaguggcuuaugac

SEQ ID NO: 34774 - RNA, 22 nt, Human
cuggcagaguugggucucaaau

SEQ ID NO: 34775 - RNA, 22 nt, Human
cuggcagauaguaagugaucaa

SEQ ID NO: 34776 - RNA, 22 nt, Human
cuggcagauauuugcagacaug

SEQ ID NO: 34777 - RNA, 22 nt, Human
cuggcagcaguuaugaaacaau

SEQ ID NO: 34778 - RNA, 22 nt, Human
cuggcagcauuuuuuucagaag

SEQ ID NO: 34779 - RNA, 22 nt, Human
cuggcagcuggaggcuagaggc

SEQ ID NO: 34780 - RNA, 22 nt, Human
cuggcagcuuauuagaaaugca

SEQ ID NO: 34781 - RNA, 22 nt, Human
cuggcaggcacucaugaaauaa

SEQ ID NO: 34782 - RNA, 22 nt, Human
cuggcaggcggagguugcagug

SEQ ID NO: 34783 - RNA, 22 nt, Human
cuggcagggcucuuugggugcu

SEQ ID NO: 34784 - RNA, 22 nt, Human
cuggcagggugggcuuugcuuu

SEQ ID NO: 34785 - RNA, 22 nt, Human
cuggcaguauuaagagaaguga

SEQ ID NO: 34786 - RNA, 22 nt, Human
cuggcagugacauugcaggugc

SEQ ID NO: 34787 - RNA, 22 nt, Human
cuggcaguggaggaagaaaacu

SEQ ID NO: 34788 - RNA, 22 nt, Human
cuggcaguuggcagggcugcca

SEQ ID NO: 34789 - RNA, 22 nt, Human
cuggcccuaggcaaacacagau

SEQ ID NO: 34790 - RNA, 22 nt, Human
cuggcccuauuccaggccuucc

SEQ ID NO: 34791 - RNA, 22 nt, Human
cuggcccucagacucaugggca

SEQ ID NO: 34792 - RNA, 22 nt, Human
cuggcccugccuaauguacuug

SEQ ID NO: 34793 - RNA, 16 nt, Human
cuggcccuggcucugg

SEQ ID NO: 34794 - RNA, 22 nt, Human
cuggcccuggcuggagcccagg

SEQ ID NO: 34795 - RNA, 22 nt, Human
cuggcccugguaaggacaccca

SEQ ID NO: 34796 - RNA, 22 nt, Human
cuggcccugucagcacagaauc

SEQ ID NO: 34797 - RNA, 22 nt, Human
cuggcccuugacuuacagcagg

SEQ ID NO: 34798 - RNA, 22 nt, Human
cuggccgccuggggccggguga

SEQ ID NO: 34799 - RNA, 22 nt, Human
cuggccgguauuugccucuggg

SEQ ID NO: 34800 - RNA, 22 nt, Human
cuggccuagcucucugcuugaa

SEQ ID NO: 34801 - RNA, 22 nt, Human
cuggccucacagaggcuaagcc

SEQ ID NO: 34802 - RNA, 22 nt, Human
cuggccucaccucagacuuacu

SEQ ID NO: 34803 - RNA, 22 nt, Human
cuggccugaggccgccuucaga

SEQ ID NO: 34804 - RNA, 22 nt, Human
cuggccugccugccgguugucg

SEQ ID NO: 34805 - RNA, 22 nt, Human
cuggccugggagcugcuagcgu

SEQ ID NO: 34806 - RNA, 22 nt, Human
cuggccuguccugacccagccu

SEQ ID NO: 34807 - RNA, 22 nt, Human
cuggccugugggcugucuccgg

SEQ ID NO: 34808 - RNA, 22 nt, Human
cuggccuuuagccccagugucu

SEQ ID NO: 34809 - RNA, 22 nt, Human
cuggcucaauuuguacugcugu

SEQ ID NO: 34810 - RNA, 22 nt, Human
cuggcucaggguggucuggguc

SEQ ID NO: 34811 - RNA, 22 nt, Human
cuggcucauagagcagcuccaa

SEQ ID NO: 34812 - RNA, 22 nt, Human
cuggcucauuuuagcaucaggu

SEQ ID NO: 34813 - RNA, 22 nt, Human
cuggcucccaugagcucucacg

SEQ ID NO: 34814 - RNA, 22 nt, Human
cuggcuccccuacuucuuauug

SEQ ID NO: 34815 - RNA, 22 nt, Human
cuggcucccgaagcccucagug

SEQ ID NO: 34816 - RNA, 22 nt, Human
cuggcucccucgcugaggugcu

SEQ ID NO: 34817 - RNA, 22 nt, Human
cuggcuccucuacacacccaaa

SEQ ID NO: 34818 - RNA, 22 nt, Human
cuggcuccugaggcuuggcccc

SEQ ID NO: 34819 - RNA, 22 nt, Human
cuggcucuaagugucagcuccc

SEQ ID NO: 34820 - RNA, 22 nt, Human
cuggcucugaguggcucuaauu

SEQ ID NO: 34821 - RNA, 22 nt, Human
cuggcucugagugguaucuuga

SEQ ID NO: 34822 - RNA, 22 nt, Human
cuggcucugggccucagacacu

SEQ ID NO: 34823 - RNA, 22 nt, Human
cuggcucugggcuaagcuccca

SEQ ID NO: 34824 - RNA, 22 nt, Human
cuggcucuguggcuuccuucau

SEQ ID NO: 34825 - RNA, 22 nt, Human
cuggcugaagcugggcucuccu

SEQ ID NO: 34826 - RNA, 22 nt, Human
cuggcugacacaaagguaucga

SEQ ID NO: 34827 - RNA, 22 nt, Human
cuggcugaguuacuccacugag

SEQ ID NO: 34828 - RNA, 19 nt, Human
cuggcugcaaugccagggu

SEQ ID NO: 34829 - RNA, 22 nt, Human
cuggcugcaggaugaggcugcc

SEQ ID NO: 34830 - RNA, 22 nt, Human
cuggcugcaguagcaagagacu

SEQ ID NO: 34831 - RNA, 22 nt, Human
cuggcugccuauagucucccuu

SEQ ID NO: 34832 - RNA, 22 nt, Human
cuggcugcgcuaguccagaaga

SEQ ID NO: 34833 - RNA, 22 nt, Human
cuggcugcuuguagacucgacu

SEQ ID NO: 34834 - RNA, 22 nt, Human
cuggcugcuuguuuugaugggu

SEQ ID NO: 34835 - RNA, 16 nt, Human
cuggcuggaagccugg

SEQ ID NO: 34836 - RNA, 22 nt, Human
cuggcuggaaguuagagaacuu

SEQ ID NO: 34837 - RNA, 22 nt, Human
cuggcuggcaaguagaacacaa

SEQ ID NO: 34838 - RNA, 22 nt, Human
cuggcuggccauguagagauga

SEQ ID NO: 34839 - RNA, 22 nt, Human
cuggcuggcguuuuccaaaagc

SEQ ID NO: 34840 - RNA, 22 nt, Human
cuggcugggguaccaguugaac

SEQ ID NO: 34841 - RNA, 22 nt, Human
cuggcugggguccauccucuaa

SEQ ID NO: 34842 - RNA, 22 nt, Human
cuggcuggucaugucaugagcc

SEQ ID NO: 34843 - RNA, 22 nt, Human
cuggcugguccucggggacagc

SEQ ID NO: 34844 - RNA, 22 nt, Human
cuggcugguuggggagaagaca

SEQ ID NO: 34845 - RNA, 22 nt, Human
cuggcugguugucucaauccag

SEQ ID NO: 34846 - RNA, 22 nt, Human
cuggcugugcagucuuccagaa

SEQ ID NO: 34847 - RNA, 22 nt, Human
cuggcuguggauuaucacaggc

SEQ ID NO: 34848 - RNA, 22 nt, Human
cuggcugugugcccccggcacc

SEQ ID NO: 34849 - RNA, 22 nt, Human
cuggcuguuucaggcagugucc

SEQ ID NO: 34850 - RNA, 22 nt, Human
cuggcuguuucuccuuugucua

SEQ ID NO: 34851 - RNA, 20 nt, Human
cuggcuucgggaacuaguuu

SEQ ID NO: 34852 - RNA, 22 nt, Human
cuggcuugcagcucaucauaaa

SEQ ID NO: 34853 - RNA, 22 nt, Human
cuggcuugggucuaccugccuu

SEQ ID NO: 34854 - RNA, 22 nt, Human
cuggcuuguuuuaagaauacaa

SEQ ID NO: 34855 - RNA, 22 nt, Human
cuggcuuucauuucaagcacgu

SEQ ID NO: 34856 - RNA, 22 nt, Human
cuggcuuucugcaaaucuccau

SEQ ID NO: 34857 - RNA, 22 nt, Human
cuggcuuucuguuauaaagaca

SEQ ID NO: 34858 - RNA, 22 nt, Human
cuggcuuugaaaugcauuucag

SEQ ID NO: 34859 - RNA, 22 nt, Human
cuggcuuugaggauccccucuu

SEQ ID NO: 34860 - RNA, 22 nt, Human
cuggcuguggucacagguaacu

SEQ ID NO: 34861 - RNA, 22 nt, Human
cuggcugugucuuggaggagcu

SEQ ID NO: 34862 - RNA, 22 nt, Human
cuggcuguuuucaauguugaug

SEQ ID NO: 34863 - RNA, 19 nt, Human
cuggcuucaagcaguccuc

SEQ ID NO: 34864 - RNA, 23 nt, Human
cuggcuucuggggccucuguuuc

SEQ ID NO: 34865 - RNA, 22 nt, Human
cuggcuuuaaaaugcuccugga

SEQ ID NO: 34866 - RNA, 22 nt, Human
cuggcuuuaacccuacaaaccu

SEQ ID NO: 34867 - RNA, 22 nt, Human
cuggcuuuagguuggagagcug

SEQ ID NO: 34868 - RNA, 22 nt, Human
cuggcuuucauggcgcaguuga

SEQ ID NO: 34869 - RNA, 22 nt, Human
cuggcuuuccuugucugcaucc

SEQ ID NO: 34870 - RNA, 22 nt, Human
cuggcuuucucugugguguuca

SEQ ID NO: 34871 - RNA, 22 nt, Human
cuggcuuucugcacagaauugg

SEQ ID NO: 34872 - RNA, 18 nt, Human
cuggcuuucuuauccauc

SEQ ID NO: 34873 - RNA, 22 nt, Human
cuggcuuuguucugauugcuuc

SEQ ID NO: 34874 - RNA, 22 nt, Human
cugggaagccauguuucuagga

SEQ ID NO: 34875 - RNA, 22 nt, Human
cugggaagggacgccagugccu

SEQ ID NO: 34876 - RNA, 22 nt, Human
cugggaagggagucaagauacu

SEQ ID NO: 34877 - RNA, 22 nt, Human
cugggacacccagagcugcaga

SEQ ID NO: 34878 - RNA, 22 nt, Human
cugggacauauugcuaguguug

SEQ ID NO: 34879 - RNA, 22 nt, Human
cugggacaugauagaaacagau

SEQ ID NO: 34880 - RNA, 23 nt, Human
cugggacaugguaggggcacaac

SEQ ID NO: 34881 - RNA, 22 nt, Human
cugggacauggugcugucuuua

SEQ ID NO: 34882 - RNA, 22 nt, Human
cugggaccuccucacuguucua

SEQ ID NO: 34883 - RNA, 22 nt, Human
cugggaccucggggugaucaaa

SEQ ID NO: 34884 - RNA, 18 nt, Human
cugggacucaaugcuacu

SEQ ID NO: 34885 - RNA, 22 nt, Human
cugggacucagaccaguucugu

SEQ ID NO: 34886 - RNA, 22 nt, Human
cugggacuugaugaaaugacug

SEQ ID NO: 34887 - RNA, 22 nt, Human
cugggacuuguagucucggcgc

SEQ ID NO: 34888 - RNA, 22 nt, Human
cugggacuuuacccuguggccc

SEQ ID NO: 34889 - RNA, 22 nt, Human
cugggacuuuguaggccaguug

SEQ ID NO: 34890 - RNA, 22 nt, Human
cugggagcaagucaggaaaggu

SEQ ID NO: 34891 - RNA, 22 nt, Human
cugggagcccgcguccuggugg

SEQ ID NO: 34892 - RNA, 22 nt, Human
cugggagccuggcaguugcuga

SEQ ID NO: 34893 - RNA, 22 nt, Human
cugggagcugaggcugacgcug

SEQ ID NO: 34894 - RNA, 22 nt, Human
cugggagcuggaaugggagaag

SEQ ID NO: 34895 - RNA, 22 nt, Human
cugggaggcacuauucaggagg

SEQ ID NO: 34896 - RNA, 22 nt, Human
cugggagggguagccaauccua

SEQ ID NO: 34897 - RNA, 19 nt, Human
cugggagguguucagagaa

SEQ ID NO: 34898 - RNA, 22 nt, Human
gcucugcccaaugucccuacac

SEQ ID NO: 34899 - RNA, 22 nt, Human
gcucugcucuugacuuaccagg

SEQ ID NO: 34900 - RNA, 22 nt, Human
gcucugcugauccgcagccauc

SEQ ID NO: 34901 - RNA, 22 nt, Human
gcucugcuugcaucaugacugc

SEQ ID NO: 34902 - RNA, 22 nt, Human
gcucuggacuggggccugagaa

SEQ ID NO: 34903 - RNA, 22 nt, Human
gcucuggcagcugauauuagga

SEQ ID NO: 34904 - RNA, 23 nt, Human
gcucuggcagcuugugucagcac

SEQ ID NO: 34905 - RNA, 21 nt, Human
gcucuggccuacuguucccuc

SEQ ID NO: 34906 - RNA, 22 nt, Human
gcucuggcuuggggcacucguc

SEQ ID NO: 34907 - RNA, 22 nt, Human
gcucugggaacugacugccuuc

SEQ ID NO: 34908 - RNA, 22 nt, Human
gcucugggaaggaucguaguga

SEQ ID NO: 34909 - RNA, 22 nt, Human
gcucugggaaguccuuuaccau

SEQ ID NO: 34910 - RNA, 22 nt, Human
gcucugggauuaccagccuuag

SEQ ID NO: 34911 - RNA, 22 nt, Human
gcucugggccauccuggccggg

SEQ ID NO: 34912 - RNA, 22 nt, Human
gcucugggcugcccucuggaca

SEQ ID NO: 34913 - RNA, 18 nt, Human
gcucugguuccuucaacc

SEQ ID NO: 34914 - RNA, 22 nt, Human
gcucugguucucuuagaguagu

SEQ ID NO: 34915 - RNA, 22 nt, Human
gcucuguaucuguggggcuucc

SEQ ID NO: 34916 - RNA, 22 nt, Human
gcucugucauuuugcagacacu

SEQ ID NO: 34917 - RNA, 22 nt, Human
gcucugugaguauuggcccugg

SEQ ID NO: 34918 - RNA, 22 nt, Human
gcucugugccagggcugggcca

SEQ ID NO: 34919 - RNA, 22 nt, Human
gcucugugguggggcagaguuu

SEQ ID NO: 34920 - RNA, 21 nt, Human
gcucuguguuacaaguugggg

SEQ ID NO: 34921 - RNA, 22 nt, Human
gcucuguguugucagaggcacc

SEQ ID NO: 34922 - RNA, 22 nt, Human
gcucuguguuuugcccaggaga

SEQ ID NO: 34923 - RNA, 22 nt, Human
gcucuugaaaaucaaaagggaa

SEQ ID NO: 34924 - RNA, 22 nt, Human
gcucuugaauauggguuucaug

SEQ ID NO: 34925 - RNA, 22 nt, Human
gcucuugaccuuggagaacucg

SEQ ID NO: 34926 - RNA, 22 nt, Human
gcucuugauacaucaagaacuu

SEQ ID NO: 34927 - RNA, 22 nt, Human
gcucuugauguucauugacuug

SEQ ID NO: 34928 - RNA, 22 nt, Human
gcucuuuguauuuuggaaucaa

SEQ ID NO: 34929 - RNA, 19 nt, Human
gcugaaaucaaauuuggaa

SEQ ID NO: 34930 - RNA, 22 nt, Human
gcugaaauguuuaauuugggag

SEQ ID NO: 34931 - RNA, 18 nt, Human
gcugaaauucuaaacaaa

SEQ ID NO: 34932 - RNA, 17 nt, Human
gcugaacaaggaaaaua

SEQ ID NO: 34933 - RNA, 21 nt, Human
gcugaagaacucuuuauuuuc

SEQ ID NO: 34934 - RNA, 23 nt, Human
gcugaagagcaaaccaggcaaaa

SEQ ID NO: 34935 - RNA, 20 nt, Human
gcugaagauucccaugcaag

SEQ ID NO: 34936 - RNA, 22 nt, Human
gcugaagauuuuugcuagcccc

SEQ ID NO: 34937 - RNA, 16 nt, Human
gcugaagugaguauag

SEQ ID NO: 34938 - RNA, 22 nt, Human
gcugaauaggacugucaucucu

SEQ ID NO: 34939 - RNA, 22 nt, Human
gcugacaaugagaaagagcaaa

SEQ ID NO: 34940 - RNA, 22 nt, Human
gcugacacuuagaagugcccug

SEQ ID NO: 34941 - RNA, 22 nt, Human
gcugacagagugccuggccuca

SEQ ID NO: 34942 - RNA, 22 nt, Human
gcugacagcaaggggcugcccu

SEQ ID NO: 34943 - RNA, 17 nt, Human
gcugacccuggagaagu

SEQ ID NO: 34944 - RNA, 22 nt, Human
gcugaccuguggcagaagcuca

SEQ ID NO: 34945 - RNA, 22 nt, Human
gcugaccuuugccaggaaggca

SEQ ID NO: 34946 - RNA, 22 nt, Human
gcugagaacagagcucugagcu

SEQ ID NO: 34947 - RNA, 22 nt, Human
gcugagaauguuccuacuggua

SEQ ID NO: 34948 - RNA, 21 nt, Human
gcugagacgcaaccucaguga

SEQ ID NO: 34949 - RNA, 22 nt, Human
gcugagacuggcagcaggaagu

SEQ ID NO: 34950 - RNA, 22 nt, Human
gcugagagaaaagugagguucu

SEQ ID NO: 34951 - RNA, 22 nt, Human
gcugagagcaaagcaugucuag

SEQ ID NO: 34952 - RNA, 17 nt, Human
gcugagaggcagcacag

SEQ ID NO: 34953 - RNA, 21 nt, Human
gcugagagguugggaaguuca

SEQ ID NO: 34954 - RNA, 22 nt, Human
gcugagagugggugcagugcuu

SEQ ID NO: 34955 - RNA, 22 nt, Human
gcugagagugugagaucagauu

SEQ ID NO: 34956 - RNA, 22 nt, Human
gcugagcaacguggagaguuuu

SEQ ID NO: 34957 - RNA, 22 nt, Human
gcugagcacagcaaagagacaa

SEQ ID NO: 34958 - RNA, 22 nt, Human
gcugagcaggguggggaaaggc

SEQ ID NO: 34959 - RNA, 22 nt, Human
gcugagcagguguaaggaaggc

SEQ ID NO: 34960 - RNA, 22 nt, Human
gcugagccacaggcagugcacu

SEQ ID NO: 34961 - RNA, 22 nt, Human
gcugagcugaggcagggcuggg

SEQ ID NO: 34962 - RNA, 22 nt, Human
gcugaggaaaccaaugcucaga

SEQ ID NO: 34963 - RNA, 22 nt, Human
gcugaggaaaggcuggaaggga

SEQ ID NO: 34964 - RNA, 22 nt, Human
gcugaggacauacacauugugc

SEQ ID NO: 34965 - RNA, 20 nt, Human
gcugaggagcagugugguug

SEQ ID NO: 34966 - RNA, 22 nt, Human
gcugaggagcgagaacucugcu

SEQ ID NO: 34967 - RNA, 22 nt, Human
gcugaggauauagcaggaacaa

SEQ ID NO: 34968 - RNA, 20 nt, Human
gcugaggauuccuggccccu

SEQ ID NO: 34969 - RNA, 22 nt, Human
gcugaggcaaauaguuuuaagu

SEQ ID NO: 34970 - RNA, 22 nt, Human
gcugaggccaguuuaaugagga

SEQ ID NO: 34971 - RNA, 22 nt, Human
gcugaggccucagaaggcugag

SEQ ID NO: 34972 - RNA, 22 nt, Human
gcugaggcucaauccccuucug

SEQ ID NO: 34973 - RNA, 22 nt, Human
gcugaggcuuagcuaaaaauuu

SEQ ID NO: 34974 - RNA, 22 nt, Human
gcugagggaccauguuucagga

SEQ ID NO: 34975 - RNA, 22 nt, Human
gcugagggaggcugaacugagu

SEQ ID NO: 34976 - RNA, 22 nt, Human
gcugagggcauguguggcgacu

SEQ ID NO: 34977 - RNA, 22 nt, Human
gcugagggggaaggaaagcuga

SEQ ID NO: 34978 - RNA, 22 nt, Human
cuggcuuugcgucuuugccaca

SEQ ID NO: 34979 - RNA, 22 nt, Human
cuggcuuugcuggacugggagu

SEQ ID NO: 34980 - RNA, 22 nt, Human
cuggcuuuucaaacuguucagu

SEQ ID NO: 34981 - RNA, 22 nt, Human
cugggaaagcaagguuguggau

SEQ ID NO: 34982 - RNA, 22 nt, Human
cugggaaauauaauaaaguggu

SEQ ID NO: 34983 - RNA, 22 nt, Human
cugggaagaaauugugggaggc

SEQ ID NO: 34984 - RNA, 22 nt, Human
cugggaagaagggacaacagcg

SEQ ID NO: 34985 - RNA, 22 nt, Human
cugggaagaagugggcuacauu

SEQ ID NO: 34986 - RNA, 22 nt, Human
cugggaagauggugacagaauu

SEQ ID NO: 34987 - RNA, 22 nt, Human
cugggaagcauggugaugguau

SEQ ID NO: 34988 - RNA, 22 nt, Human
cugggaagcuucgagcaggaaa

SEQ ID NO: 34989 - RNA, 19 nt, Human
cugggacaaugaaagcauc

SEQ ID NO: 34990 - RNA, 22 nt, Human
cugggacacccaaggaaagagc

SEQ ID NO: 34991 - RNA, 22 nt, Human
cugggacagcugagacaggaga

SEQ ID NO: 34992 - RNA, 22 nt, Human
cugggaccagugaagcaacuca

SEQ ID NO: 34993 - RNA, 22 nt, Human
cugggacccccacugcguagcu

SEQ ID NO: 34994 - RNA, 22 nt, Human
cugggacccugcccuguggccu

SEQ ID NO: 34995 - RNA, 22 nt, Human
cugggaccugugugccugggcc

SEQ ID NO: 34996 - RNA, 22 nt, Human
cugggacuugcagagcaggagg

SEQ ID NO: 34997 - RNA, 22 nt, Human
cugggacuugggcuaugcucug

SEQ ID NO: 34998 - RNA, 22 nt, Human
cugggagaauuuguugaaggau

SEQ ID NO: 34999 - RNA, 22 nt, Human
cugggagacaagagagggcuga

SEQ ID NO: 35000 - RNA, 22 nt, Human
cugggagagaagcgaagcuggg

SEQ ID NO: 35001 - RNA, 22 nt, Human
cugggagagguggugggaagua

SEQ ID NO: 35002 - RNA, 22 nt, Human
cugggagauaugaggaucugga

SEQ ID NO: 35003 - RNA, 22 nt, Human
cugggagaucuccugagggcag

SEQ ID NO: 35004 - RNA, 22 nt, Human
cugggagaucuguugggacugg

SEQ ID NO: 35005 - RNA, 22 nt, Human
cugggagauugcuagagaugca

SEQ ID NO: 35006 - RNA, 22 nt, Human
cugggagcgcagcaggcacaac

SEQ ID NO: 35007 - RNA, 22 nt, Human
cuguucagaaaaaaucuucaug

SEQ ID NO: 35008 - RNA, 22 nt, Human
cuguucaugcugauucuguaug

SEQ ID NO: 35009 - RNA, 22 nt, Human
cuguucccgguggccgggccag

SEQ ID NO: 35010 - RNA, 22 nt, Human
cuguuccuccaccucaacaaac

SEQ ID NO: 35011 - RNA, 20 nt, Human
cuguuccugucccaugaagc

SEQ ID NO: 35012 - RNA, 22 nt, Human
cuguucugcugcauaaaaacuu

SEQ ID NO: 35013 - RNA, 22 nt, Human
cuguucuucugggaauggcccu

SEQ ID NO: 35014 - RNA, 22 nt, Human
cuguugauuagaauuucacauc

SEQ ID NO: 35015 - RNA, 22 nt, Human
cuguugcaucauggcucuuaau

SEQ ID NO: 35016 - RNA, 22 nt, Human
cuguugcuccagggaacacaga

SEQ ID NO: 35017 - RNA, 22 nt, Human
cuguuggacuuuucaaggucug

SEQ ID NO: 35018 - RNA, 22 nt, Human
cuguuggagucauuccuuccag

SEQ ID NO: 35019 - RNA, 22 nt, Human
cuguuguaaagcuauucauuug

SEQ ID NO: 35020 - RNA, 22 nt, Human
cuguuguauuuccaacuaugua

SEQ ID NO: 35021 - RNA, 22 nt, Human
cuguuguucaucaucugucauu

SEQ ID NO: 35022 - RNA, 22 nt, Human
cuguuuaaugcaaugaaaugag

SEQ ID NO: 35023 - RNA, 22 nt, Human
cuguuuauacucaaaagauaca

SEQ ID NO: 35024 - RNA, 22 nt, Human
cuguuuaucuaggaguugcagg

SEQ ID NO: 35025 - RNA, 22 nt, Human
cuguuuaucucuaaccuguuua

SEQ ID NO: 35026 - RNA, 21 nt, Human
cuguuuauuucaccugggugc

SEQ ID NO: 35027 - RNA, 19 nt, Human
cuguuucaaguaggaggag

SEQ ID NO: 35028 - RNA, 22 nt, Human
cuguuucaagugaagucagaca

SEQ ID NO: 35029 - RNA, 22 nt, Human
cuguuucacguguuuaagccca

SEQ ID NO: 35030 - RNA, 22 nt, Human
cuguuucagcuacuguuccaug

SEQ ID NO: 35031 - RNA, 22 nt, Human
cuguuucaugaaugcaauuuca

SEQ ID NO: 35032 - RNA, 22 nt, Human
cuguuuccaccuucauggcuaa

SEQ ID NO: 35033 - RNA, 22 nt, Human
cuguuuccauacagguuuuugg

SEQ ID NO: 35034 - RNA, 22 nt, Human
cuguuucuccacacucuuccca

SEQ ID NO: 35035 - RNA, 22 nt, Human
cuguuuguuggcuauugacagu

SEQ ID NO: 35036 - RNA, 22 nt, Human
cuguuuuaauggagacugaugu

SEQ ID NO: 35037 - RNA, 22 nt, Human
cuguuuucaaagagagagaaug

SEQ ID NO: 35038 - RNA, 22 nt, Human
cuuaaaagagaugacggcaggg

SEQ ID NO: 35039 - RNA, 22 nt, Human
cuuaaacaggaaagagccaggu

SEQ ID NO: 35040 - RNA, 22 nt, Human
cuuaaacugggcauucagagaa

SEQ ID NO: 35041 - RNA, 22 nt, Human
cuuaaaggucauucuguugaua

SEQ ID NO: 35042 - RNA, 22 nt, Human
cuuaaaguagaauacaagaccu

SEQ ID NO: 35043 - RNA, 22 nt, Human
cuuaaaguauugguuuaaccaa

SEQ ID NO: 35044 - RNA, 22 nt, Human
cuuaaccagaaaaugcacuugu

SEQ ID NO: 35045 - RNA, 22 nt, Human
cuuaacucuacacugcacuuua

SEQ ID NO: 35046 - RNA, 22 nt, Human
cuuaagagucuuucuguguuua

SEQ ID NO: 35047 - RNA, 22 nt, Human
cuuaagauuugcgauaccuaau

SEQ ID NO: 35048 - RNA, 22 nt, Human
cuuaauaaaugguagcuguuau

SEQ ID NO: 35049 - RNA, 22 nt, Human
cuuaaucucaccugcaaagucc

SEQ ID NO: 35050 - RNA, 22 nt, Human
cuuaaugaaagguugcacaugg

SEQ ID NO: 35051 - RNA, 22 nt, Human
cuuaaugaaugcugcuguauuu

SEQ ID NO: 35052 - RNA, 22 nt, Human
cuuaauuuaaaauaguucaggc

SEQ ID NO: 35053 - RNA, 22 nt, Human
cuuacaaaggagaggagauagg

SEQ ID NO: 35054 - RNA, 22 nt, Human
cuuacaacuuguaugugauugu

SEQ ID NO: 35055 - RNA, 22 nt, Human
cuuacacagucuggcacuucuu

SEQ ID NO: 35056 - RNA, 22 nt, Human
cuuacagcauuguucagaggcu

SEQ ID NO: 35057 - RNA, 22 nt, Human
cuuacaggaaagaagaaagcau

SEQ ID NO: 35058 - RNA, 22 nt, Human
cuuacauugugugcaugagggg

SEQ ID NO: 35059 - RNA, 22 nt, Human
cuuacauuuaaucaugugucau

SEQ ID NO: 35060 - RNA, 22 nt, Human
cuuagaaaugcagauucucagg

SEQ ID NO: 35061 - RNA, 22 nt, Human
cuuagaacagugucugccagag

SEQ ID NO: 35062 - RNA, 22 nt, Human
cuuagaagaaugccuaggacag

SEQ ID NO: 35063 - RNA, 22 nt, Human
cuuagaaggaacaguuuagugc

SEQ ID NO: 35064 - RNA, 22 nt, Human
cuuagauacaguagaaagacuc

SEQ ID NO: 35065 - RNA, 22 nt, Human
cuuagaugaagucacagaaccc

SEQ ID NO: 35066 - RNA, 22 nt, Human
cuuagcaauaagagggaauaua

SEQ ID NO: 35067 - RNA, 22 nt, Human
cuuagcagaagcuucagcuuca

SEQ ID NO: 35068 - RNA, 22 nt, Human
cuuagcaugugguguccuugua

SEQ ID NO: 35069 - RNA, 22 nt, Human
cuuagccagcuaacuuaagcac

SEQ ID NO: 35070 - RNA, 22 nt, Human
cuuagcuucacugggucucagu

SEQ ID NO: 35071 - RNA, 22 nt, Human
cuuagcuuuuccagcuucuaga

SEQ ID NO: 35072 - RNA, 22 nt, Human
cuuaggaaaguuggcugauuuc

SEQ ID NO: 35073 - RNA, 22 nt, Human
cuuaggaagcuuuugaggacaa

SEQ ID NO: 35074 - RNA, 22 nt, Human
cuuaggaaugucccuucccaca

SEQ ID NO: 35075 - RNA, 22 nt, Human
cuuaggauuuaauuucagacuc

SEQ ID NO: 35076 - RNA, 22 nt, Human
cuuaggcagggcuggaagaucu

SEQ ID NO: 35077 - RNA, 22 nt, Human
cuuagugacauguauucuucau

SEQ ID NO: 35078 - RNA, 22 nt, Human
cuuagugaggaaugaauuuguu

SEQ ID NO: 35079 - RNA, 22 nt, Human
cuuauacacccucuucccaggc

SEQ ID NO: 35080 - RNA, 22 nt, Human
cuuauacacgaacacaaggugu

SEQ ID NO: 35081 - RNA, 22 nt, Human
cuuauaguaugauguugagaau

SEQ ID NO: 35082 - RNA, 22 nt, Human
cuuauguaaaacggaaagggaa

SEQ ID NO: 35083 - RNA, 22 nt, Human
cuuauuagaaagaaaagacaug

SEQ ID NO: 35084 - RNA, 19 nt, Human
cuuauuagagugagagcuu

SEQ ID NO: 35085 - RNA, 22 nt, Human
cuuauucaaugcuggaaauguu

SEQ ID NO: 35086 - RNA, 22 nt, Human
cuuauucauaagucagacacac

SEQ ID NO: 35087 - RNA, 22 nt, Human
cuuauuggucccaggaggagaa

SEQ ID NO: 35088 - RNA, 22 nt, Human
cuuauugucuuacaguaauaga

SEQ ID NO: 35089 - RNA, 22 nt, Human
cuuauugugauaccaugcagua

SEQ ID NO: 35090 - RNA, 22 nt, Human
cuuauuuaugucugucucuaau

SEQ ID NO: 35091 - RNA, 22 nt, Human
cuuauuucagcccugggcaccc

SEQ ID NO: 35092 - RNA, 19 nt, Human
cuuauuucugguuuugggu

SEQ ID NO: 35093 - RNA, 22 nt, Human
cuuauuuguacuaauaaaucug

SEQ ID NO: 35094 - RNA, 22 nt, Human
cuucaaacccagauuaaaugca

SEQ ID NO: 35095 - RNA, 23 nt, Human
gcugagguacauuuacaggaaga

SEQ ID NO: 35096 - RNA, 22 nt, Human
gcugagguggaggaaggagacc

SEQ ID NO: 35097 - RNA, 22 nt, Human
gcugagucuugccugugcuguc

SEQ ID NO: 35098 - RNA, 22 nt, Human
gcugaguggagcagucagcgcu

SEQ ID NO: 35099 - RNA, 22 nt, Human
gcugaguguaaugauggcagag

SEQ ID NO: 35100 - RNA, 22 nt, Human
gcugaucucccuuuucucacag

SEQ ID NO: 35101 - RNA, 22 nt, Human
gcugaugggagcuggcucaccc

SEQ ID NO: 35102 - RNA, 22 nt, Human
gcugaugucccacugacagcca

SEQ ID NO: 35103 - RNA, 22 nt, Human
gcugauuaacuucauuguaguu

SEQ ID NO: 35104 - RNA, 22 nt, Human
gcugcaagucacagaaacagug

SEQ ID NO: 35105 - RNA, 22 nt, Human
gcugcaagugcauguugcaacu

SEQ ID NO: 35106 - RNA, 19 nt, Human
gcugcacacccagcaacug

SEQ ID NO: 35107 - RNA, 22 nt, Human
gcugcacagaacagucauuggc

SEQ ID NO: 35108 - RNA, 22 nt, Human
gcugcagaauuuccuucucauu

SEQ ID NO: 35109 - RNA, 22 nt, Human
gcugcagaccucaugcaggugg

SEQ ID NO: 35110 - RNA, 22 nt, Human
gcugcagagacagcugccgaug

SEQ ID NO: 35111 - RNA, 22 nt, Human
gcugcagagaugggugcccuuu

SEQ ID NO: 35112 - RNA, 22 nt, Human
gcugcagagggucuuagagagg

SEQ ID NO: 35113 - RNA, 19 nt, Human
gcugcagaguauucuuggg

SEQ ID NO: 35114 - RNA, 22 nt, Human
gcugcagaucccacccauuccc

SEQ ID NO: 35115 - RNA, 19 nt, Human
gcugcagcagagaaacugg

SEQ ID NO: 35116 - RNA, 22 nt, Human
cuguggccagauggugccaguu

SEQ ID NO: 35117 - RNA, 22 nt, Human
cuguggccagucccacaccucc

SEQ ID NO: 35118 - RNA, 23 nt, Human
cuguggcccugcuucaugcagcc

SEQ ID NO: 35119 - RNA, 19 nt, Human
cuguggccuccaggaggga

SEQ ID NO: 35120 - RNA, 18 nt, Human
gcuuucugugcagcggag

SEQ ID NO: 35121 - RNA, 21 nt, Human
gcuuucuguggacucugcacc

SEQ ID NO: 35122 - RNA, 22 nt, Human
gcuuucuugcugcaugguggcu

SEQ ID NO: 35123 - RNA, 22 nt, Human
gcuuugaagucugugucuuuug

SEQ ID NO: 35124 - RNA, 22 nt, Human
gcuuugauucuuggcuuaucag

SEQ ID NO: 35125 - RNA, 18 nt, Human
gcuuugcacucauguugu

SEQ ID NO: 35126 - RNA, 22 nt, Human
gcuuugcacuccagcuguggcc

SEQ ID NO: 35127 - RNA, 22 nt, Human
gcuuugcagacaaaauuccagc

SEQ ID NO: 35128 - RNA, 22 nt, Human
gcuuugcaggaaaccagugcau

SEQ ID NO: 35129 - RNA, 22 nt, Human
gcuuugcauuguuuaaucagga

SEQ ID NO: 35130 - RNA, 22 nt, Human
gcuuugcuagcacugcgcuucc

SEQ ID NO: 35131 - RNA, 17 nt, Human
gcuuuggaaagccuucc

SEQ ID NO: 35132 - RNA, 22 nt, Human
gcuuuucuauaagaacuuucaa

SEQ ID NO: 35133 - RNA, 19 nt, Human
gcuuuucuccuucaagcca

SEQ ID NO: 35134 - RNA, 22 nt, Human
gcuuuuggccagauggggaaac

SEQ ID NO: 35135 - RNA, 22 nt, Human
gcuuuugucauucaaaugcucu

SEQ ID NO: 35136 - RNA, 22 nt, Human
gcuuuugugagcucucacuuug

SEQ ID NO: 35137 - RNA, 22 nt, Human
gcuuuuguggcugucuucauug

SEQ ID NO: 35138 - RNA, 22 nt, Human
gcuuuuguuccacaguuuugaa

SEQ ID NO: 35139 - RNA, 18 nt, Human
gcuuuuuagugcaucuuc

SEQ ID NO: 35140 - RNA, 22 nt, Human
gcuuuuucaaaugaaagcuggu

SEQ ID NO: 35141 - RNA, 21 nt, Human
gcuuuuuguauggcccaggaa

SEQ ID NO: 35142 - RNA, 22 nt, Human
gcuuuuuuagguaagacccagg

SEQ ID NO: 35143 - RNA, 22 nt, Human
gcuuuuuugggaugccugccuu

SEQ ID NO: 35144 - RNA, 22 nt, Human
ggaaaaauagaguauacuuuaa

SEQ ID NO: 35145 - RNA, 20 nt, Human
ggaaaaaugcaugcucaaga

SEQ ID NO: 35146 - RNA, 22 nt, Human
ggaaaacuguauuugaauaacu

SEQ ID NO: 35147 - RNA, 21 nt, Human
ggaaaacuuuccuugucugaa

SEQ ID NO: 35148 - RNA, 22 nt, Human
ggaaaagaaagggacugauugg

SEQ ID NO: 35149 - RNA, 17 nt, Human
ggaaaagaagaguagga

SEQ ID NO: 35150 - RNA, 18 nt, Human
ggaaaaggagugucuagc

SEQ ID NO: 35151 - RNA, 21 nt, Human
ggaaaauuccauacacccacg

SEQ ID NO: 35152 - RNA, 22 nt, Human
ggaaaauuuccuucaaaaugug

SEQ ID NO: 35153 - RNA, 22 nt, Human
ggaaacacaugaucagacaucu

SEQ ID NO: 35154 - RNA, 19 nt, Human
ggaaacaggggccagagga

SEQ ID NO: 35155 - RNA, 18 nt, Human
ggaaaccacaggguucug

SEQ ID NO: 35156 - RNA, 22 nt, Human
ggaaacuaaagagguguuuuug

SEQ ID NO: 35157 - RNA, 22 nt, Human
ggaaagagaaguugggaggaau

SEQ ID NO: 35158 - RNA, 23 nt, Human
ggaaagagaggaguugugcauag

SEQ ID NO: 35159 - RNA, 22 nt, Human
ggaaagauguaauauuaucuaa

SEQ ID NO: 35160 - RNA, 22 nt, Human
ggaaagcuacugguguccucug

SEQ ID NO: 35161 - RNA, 22 nt, Human
ggaaaggagaugaauaggauua

SEQ ID NO: 35162 - RNA, 22 nt, Human
ggaaagucuuguguagaugucu

SEQ ID NO: 35163 - RNA, 22 nt, Human
ggaaaucagggguguugcuuuc

SEQ ID NO: 35164 - RNA, 22 nt, Human
ggaaaucuuccuucacucuuuc

SEQ ID NO: 35165 - RNA, 22 nt, Human
ggaaauguaaucacagaggguu

SEQ ID NO: 35166 - RNA, 22 nt, Human
ggaaaugucauagaaauauaag

SEQ ID NO: 35167 - RNA, 22 nt, Human
ggaacacagugccuuacaaacu

SEQ ID NO: 35168 - RNA, 22 nt, Human
ggaacacucgucaaauagcggg

SEQ ID NO: 35169 - RNA, 22 nt, Human
ggaacaguagacgaucuccuuu

SEQ ID NO: 35170 - RNA, 20 nt, Human
ggaacaugaaugugaguggc

SEQ ID NO: 35171 - RNA, 22 nt, Human
ggaacauguagagggccuguag

SEQ ID NO: 35172 - RNA, 22 nt, Human
ggaacauuggcauuuuaaggcu

SEQ ID NO: 35173 - RNA, 22 nt, Human
ggaacauuuccuggcagagagg

SEQ ID NO: 35174 - RNA, 22 nt, Human
ggaaccaggaguuacacgaguu

SEQ ID NO: 35175 - RNA, 22 nt, Human
ggaacuccugcuccaagcagcu

SEQ ID NO: 35176 - RNA, 22 nt, Human
ggaacuggguuagggucucuuc

SEQ ID NO: 35177 - RNA, 22 nt, Human
ggaacuuauacugccagauucu

SEQ ID NO: 35178 - RNA, 22 nt, Human
ggaacuuuaggauccuggcuca

SEQ ID NO: 35179 - RNA, 22 nt, Human
ggaagaaagcacacaaacuuga

SEQ ID NO: 35180 - RNA, 22 nt, Human
ggaagagaaaugagucaagacu

SEQ ID NO: 35181 - RNA, 19 nt, Human
ggaagagaggaaaggugga

SEQ ID NO: 35182 - RNA, 22 nt, Human
ggaagagagguucagcccuaag

SEQ ID NO: 35183 - RNA, 22 nt, Human
ggaagaggcugagccagguccc

SEQ ID NO: 35184 - RNA, 22 nt, Human
ggaagaggcugguagugcccgu

SEQ ID NO: 35185 - RNA, 22 nt, Human
ggaagagggaaccacgacugua

SEQ ID NO: 35186 - RNA, 22 nt, Human
ggaagauucaguuaucucauga

SEQ ID NO: 35187 - RNA, 22 nt, Human
ggaagcagccugaagccaaggg

SEQ ID NO: 35188 - RNA, 22 nt, Human
ggaagccagaaagugagaauau

SEQ ID NO: 35189 - RNA, 20 nt, Human
ggaagccagcauccuugagg

SEQ ID NO: 35190 - RNA, 22 nt, Human
ggaagccaggcccagagaugcu

SEQ ID NO: 35191 - RNA, 22 nt, Human
ggaagccccagacccagagucu

SEQ ID NO: 35192 - RNA, 22 nt, Human
ggaagccccagcugugggaucc

SEQ ID NO: 35193 - RNA, 19 nt, Human
ggaagcccuaaaggaccua

SEQ ID NO: 35194 - RNA, 22 nt, Human
ggaagccuaaagcccaggucuc

SEQ ID NO: 35195 - RNA, 22 nt, Human
ggaagcugcuuagcuaauguag

SEQ ID NO: 35196 - RNA, 22 nt, Human
ggaagcuggcauauguaauccu

SEQ ID NO: 35197 - RNA, 22 nt, Human
ggaagcugguaauuguugggac

SEQ ID NO: 35198 - RNA, 20 nt, Human
ggaagcuguggguccccagg

SEQ ID NO: 35199 - RNA, 21 nt, Human
ggaagcuguguccaugcuccu

SEQ ID NO: 35200 - RNA, 22 nt, Human
ggaagcuguuaucaucuguauc

SEQ ID NO: 35201 - RNA, 22 nt, Human
ggaaggaaguaaaugaugcuau

SEQ ID NO: 35202 - RNA, 22 nt, Human
ggaaggaagugcagacuuuaaa

SEQ ID NO: 35203 - RNA, 22 nt, Human
ggaaggaggaugcucuggccuu

SEQ ID NO: 35204 - RNA, 22 nt, Human
ggaaggaucuggcugaaaucca

SEQ ID NO: 35205 - RNA, 19 nt, Human
ggaaggcagaggggcugug

SEQ ID NO: 35206 - RNA, 22 nt, Human
ggaaggcagaggugucgugggg

SEQ ID NO: 35207 - RNA, 19 nt, Human
ggaaggccacggcaggcuu

SEQ ID NO: 35208 - RNA, 22 nt, Human
ggaaggcucuguuccuugacuu

SEQ ID NO: 35209 - RNA, 22 nt, Human
ggaaggcuuucuguucugugac

SEQ ID NO: 35210 - RNA, 22 nt, Human
ggaaggcuuugaggggugcugg

SEQ ID NO: 35211 - RNA, 22 nt, Human
ggaaggguuuggaaagccgaga

SEQ ID NO: 35212 - RNA, 22 nt, Human
ggaaggucgagcugcaucuggc

SEQ ID NO: 35213 - RNA, 22 nt, Human
ggaagugaggaauuagguuuau

SEQ ID NO: 35214 - RNA, 22 nt, Human
ggaaguguuuccuugggcagca

SEQ ID NO: 35215 - RNA, 18 nt, Human
ggaaguuuggguccccug

SEQ ID NO: 35216 - RNA, 22 nt, Human
ggaaguuuguauacuggccucu

SEQ ID NO: 35217 - RNA, 22 nt, Human
ggaauaaagaaucugguucccc

SEQ ID NO: 35218 - RNA, 22 nt, Human
ggaauacaaaucuuuguucucu

SEQ ID NO: 35219 - RNA, 22 nt, Human
ggaauauagccaguaacaguca

SEQ ID NO: 35220 - RNA, 22 nt, Human
ggaaucagaauuaggauuugaa

SEQ ID NO: 35221 - RNA, 22 nt, Human
ggaauccugguguuuucugccu

SEQ ID NO: 35222 - RNA, 22 nt, Human
ggaaucuuaauggcauggaguu

SEQ ID NO: 35223 - RNA, 22 nt, Human
ggaauguucuggaacaccgcuu

SEQ ID NO: 35224 - RNA, 22 nt, Human
ggaauguugucauuuacauuau

SEQ ID NO: 35225 - RNA, 23 nt, Human
ggaauguuuaccugugaauguca

SEQ ID NO: 35226 - RNA, 22 nt, Human
ugugugucagcccaagggccuu

SEQ ID NO: 35227 - RNA, 22 nt, Human
ugugugugaaccauugagggcu

SEQ ID NO: 35228 - RNA, 22 nt, Human
ugugugugacaaccuaguucag

SEQ ID NO: 35229 - RNA, 22 nt, Human
uguguguguuuacaguuucuca

SEQ ID NO: 35230 - RNA, 22 nt, Human
uguguguguuucugcucauaca

SEQ ID NO: 35231 - RNA, 22 nt, Human
uguguguuauuuucagccauua

SEQ ID NO: 35232 - RNA, 22 nt, Human
uguguguuggcuggagagggcu

SEQ ID NO: 35233 - RNA, 22 nt, Human
uguguuaacacugcaugauaau

SEQ ID NO: 35234 - RNA, 22 nt, Human
uguguuaaguauuugauacacu

SEQ ID NO: 35235 - RNA, 22 nt, Human
uguguuaauuccacaaacauuc

SEQ ID NO: 35236 - RNA, 22 nt, Human
uguguucaagauuaguucuagu

SEQ ID NO: 35237 - RNA, 22 nt, Human
uguguucaccaaaguguagaaa

SEQ ID NO: 35238 - RNA, 22 nt, Human
uguguucaugucacuggaaucc

SEQ ID NO: 35239 - RNA, 22 nt, Human
uguguucauuagcauugccuug

SEQ ID NO: 35240 - RNA, 22 nt, Human
uguguucuccuacagauaagga

SEQ ID NO: 35241 - RNA, 22 nt, Human
uguguucuggaaagcucacuga

SEQ ID NO: 35242 - RNA, 22 nt, Human
uguguucuuaaaagcagugaua

SEQ ID NO: 35243 - RNA, 22 nt, Human
uguguugugacauucuuggaug

SEQ ID NO: 35244 - RNA, 22 nt, Human
uguguuguuuuaagcugcugca

SEQ ID NO: 35245 - RNA, 21 nt, Human
uguguuuuaaugauauucugu

SEQ ID NO: 35246 - RNA, 22 nt, Human
uguuaaaugagauuggaauuug

SEQ ID NO: 35247 - RNA, 22 nt, Human
uguuaacaaagguuggcugggc

SEQ ID NO: 35248 - RNA, 22 nt, Human
uguuaacagaggucauuuuggg

SEQ ID NO: 35249 - RNA, 22 nt, Human
uguuaacuaauggucuaacauu

SEQ ID NO: 35250 - RNA, 22 nt, Human
uguuaacuuccuccuccucugc

SEQ ID NO: 35251 - RNA, 22 nt, Human
uguuaagaagaggcaguacuua

SEQ ID NO: 35252 - RNA, 18 nt, Human
uguuaaggauccaguagu

SEQ ID NO: 35253 - RNA, 22 nt, Human
uguuaagguccugacuucugca

SEQ ID NO: 35254 - RNA, 22 nt, Human
uguuaaucaacaacaaacagug

SEQ ID NO: 35255 - RNA, 22 nt, Human
uguuaauuucuuuagaagugga

SEQ ID NO: 35256 - RNA, 22 nt, Human
uguuacaacuauagaucccaag

SEQ ID NO: 35257 - RNA, 22 nt, Human
uguuacagaaaguuuaugaaug

SEQ ID NO: 35258 - RNA, 22 nt, Human
uguuacagaaugaauuuccgga

SEQ ID NO: 35259 - RNA, 22 nt, Human
uguuacaggaaauagaauuacc

SEQ ID NO: 35260 - RNA, 22 nt, Human
uguuacauuggaguuguuuaga

SEQ ID NO: 35261 - RNA, 22 nt, Human
uguuacauuucucuuucuugga

SEQ ID NO: 35262 - RNA, 22 nt, Human
uguuaccaaaaucuuguauauc

SEQ ID NO: 35263 - RNA, 22 nt, Human
uguuaccaggcaguauugcuua

SEQ ID NO: 35264 - RNA, 22 nt, Human
uguuacuccuucccuacucaug

SEQ ID NO: 35265 - RNA, 22 nt, Human
uguuacuuaucucacgugaugc

SEQ ID NO: 35266 - RNA, 22 nt, Human
uguuagaagacucuuuuaccua

SEQ ID NO: 35267 - RNA, 22 nt, Human
uguuagcaaggauaauuaugau

SEQ ID NO: 35268 - RNA, 22 nt, Human
uguuagcauagcucagaaggag

SEQ ID NO: 35269 - RNA, 22 nt, Human
uguuagcugugcuuuagccuuc

SEQ ID NO: 35270 - RNA, 22 nt, Human
cuuaacagauacaucugugguu

SEQ ID NO: 35271 - RNA, 22 nt, Human
cuuaagaaauugcauucuaauc

SEQ ID NO: 35272 - RNA, 22 nt, Human
cuuaagacaggcucaaagauua

SEQ ID NO: 35273 - RNA, 22 nt, Human
cuuaaggaaaagucucuuuuaa

SEQ ID NO: 35274 - RNA, 22 nt, Human
cuuaaggaguaguggugauggc

SEQ ID NO: 35275 - RNA, 22 nt, Human
cuuaaggcuucagcacagguau

SEQ ID NO: 35276 - RNA, 22 nt, Human
cuuaauuacuguccaauaugca

SEQ ID NO: 35277 - RNA, 22 nt, Human
cuuaauuucaaacugcuaguga

SEQ ID NO: 35278 - RNA, 22 nt, Human
cuuacacuucaucucauccagg

SEQ ID NO: 35279 - RNA, 22 nt, Human
cuuacaguacuucuaauaugau

SEQ ID NO: 35280 - RNA, 22 nt, Human
cuuacauugucucuugcugagc

SEQ ID NO: 35281 - RNA, 22 nt, Human
cuuacauugucuuaguuuucaa

SEQ ID NO: 35282 - RNA, 22 nt, Human
ggacaaagccugguggcaggug

SEQ ID NO: 35283 - RNA, 22 nt, Human
ggacaaaggucuggggaaccug

SEQ ID NO: 35284 - RNA, 22 nt, Human
ggacaaauucccuauuugcaug

SEQ ID NO: 35285 - RNA, 22 nt, Human
ggacaacacuucauuccagcua

SEQ ID NO: 35286 - RNA, 22 nt, Human
ggacaacauguuuuaauuaagg

SEQ ID NO: 35287 - RNA, 22 nt, Human
ggacacagauaaucacacagau

SEQ ID NO: 35288 - RNA, 22 nt, Human
ggacacagccacuuaggguacc

SEQ ID NO: 35289 - RNA, 22 nt, Human
ggacacagggcucacucucucu

SEQ ID NO: 35290 - RNA, 22 nt, Human
ggacacuacaaucugccugcau

SEQ ID NO: 35291 - RNA, 22 nt, Human
ggacacuagauggagaagggaa

SEQ ID NO: 35292 - RNA, 23 nt, Human
ggacacugcuauaaaggaucugc

SEQ ID NO: 35293 - RNA, 22 nt, Human
ggacagacagugugagugaggc

SEQ ID NO: 35294 - RNA, 22 nt, Human
ggacagcugcuuucaggccaca

SEQ ID NO: 35295 - RNA, 22 nt, Human
ggacaggcccggggagccugga

SEQ ID NO: 35296 - RNA, 22 nt, Human
ggacaggcgcagggccaaggaa

SEQ ID NO: 35297 - RNA, 22 nt, Human
ggacagggcucuuggcacuccu

SEQ ID NO: 35298 - RNA, 22 nt, Human
ggacaggggcguggggauuguu

SEQ ID NO: 35299 - RNA, 22 nt, Human
ggacaggguaaguacuagugug

SEQ ID NO: 35300 - RNA, 22 nt, Human
ggacaggugugaggcuggcaca

SEQ ID NO: 35301 - RNA, 19 nt, Human
ggacagucucagccucaug

SEQ ID NO: 35302 - RNA, 22 nt, Human
ggacagugucugcuucaggccc

SEQ ID NO: 35303 - RNA, 22 nt, Human
ggacagugugggccaucucacu

SEQ ID NO: 35304 - RNA, 22 nt, Human
ggacauggaaaucggcuugcuc

SEQ ID NO: 35305 - RNA, 22 nt, Human
ggacauggagcuccauggaggc

SEQ ID NO: 35306 - RNA, 23 nt, Human
ggacaugucucuggguauuuuga

SEQ ID NO: 35307 - RNA, 22 nt, Human
ggacaugugcaacuucuuugga

SEQ ID NO: 35308 - RNA, 22 nt, Human
ggacauuuaguuucauugggca

SEQ ID NO: 35309 - RNA, 22 nt, Human
ggaccaaaugcuuuuuaauuga

SEQ ID NO: 35310 - RNA, 22 nt, Human
ggaccacaauauuugugagguu

SEQ ID NO: 35311 - RNA, 22 nt, Human
ggaccacagcacuuggcuugag

SEQ ID NO: 35312 - RNA, 19 nt, Human
ggaccagguccugggcagc

SEQ ID NO: 35313 - RNA, 22 nt, Human
ggaccaucucuagccagagcuu

SEQ ID NO: 35314 - RNA, 22 nt, Human
ggacccaccaggccgggcucca

SEQ ID NO: 35315 - RNA, 22 nt, Human
ggacccagcucugagacccugc

SEQ ID NO: 35316 - RNA, 18 nt, Human
ggacccagggccucaccc

SEQ ID NO: 35317 - RNA, 22 nt, Human
ggaccccagagauaccaguuuu

SEQ ID NO: 35318 - RNA, 22 nt, Human
ggacccugggcucugggccuau

SEQ ID NO: 35319 - RNA, 23 nt, Human
ggacccuguggagggugagaguc

SEQ ID NO: 35320 - RNA, 22 nt, Human
ggaccugccagaacucaggcua

SEQ ID NO: 35321 - RNA, 22 nt, Human
ggaccugcccuggcucagaugc

SEQ ID NO: 35322 - RNA, 22 nt, Human
ggaccugcucucccaguucucu

SEQ ID NO: 35323 - RNA, 22 nt, Human
ggaccuggcaauuugcaucucu

SEQ ID NO: 35324 - RNA, 22 nt, Human
ggacgcagccgagggagcaggg

SEQ ID NO: 35325 - RNA, 22 nt, Human
ggacgcagcgagggaagcagcc

SEQ ID NO: 35326 - RNA, 22 nt, Human
ggacggggagcuggaaagggga

SEQ ID NO: 35327 - RNA, 22 nt, Human
ggacugaacacuuaaaugucca

SEQ ID NO: 35328 - RNA, 22 nt, Human
ggacugagcugacaucuguugg

SEQ ID NO: 35329 - RNA, 22 nt, Human
ggacugccucugucaccccagc

SEQ ID NO: 35330 - RNA, 22 nt, Human
ggacuggacucucaggcucaca

SEQ ID NO: 35331 - RNA, 22 nt, Human
ggacugugaggucugggugagg

SEQ ID NO: 35332 - RNA, 21 nt, Human
ggacuuacauagguaaggggu

SEQ ID NO: 35333 - RNA, 22 nt, Human
ggacuucuaagugccagacacu

SEQ ID NO: 35334 - RNA, 22 nt, Human
ggacuugcuaagguggcugaac

SEQ ID NO: 35335 - RNA, 22 nt, Human
ggacuuggcuucuuucagagac

SEQ ID NO: 35336 - RNA, 22 nt, Human
ggacuuuaggugagaaggcauu

SEQ ID NO: 35337 - RNA, 22 nt, Human
ggagaaagcuaugugggggagu

SEQ ID NO: 35338 - RNA, 22 nt, Human
ggagaaagggacugaucugcuc

SEQ ID NO: 35339 - RNA, 22 nt, Human
ggagaagcaggugcuuuggguc

SEQ ID NO: 35340 - RNA, 22 nt, Human
ggagaagccacacauugggugu

SEQ ID NO: 35341 - RNA, 22 nt, Human
ggagaaggaauauuggaguagg

SEQ ID NO: 35342 - RNA, 21 nt, Human
ggagaaggacaauguugagua

SEQ ID NO: 35343 - RNA, 22 nt, Human
ggagaaggcacacccaccucug

SEQ ID NO: 35344 - RNA, 22 nt, Human
ggagaagggaacugaguuuuug

SEQ ID NO: 35345 - RNA, 22 nt, Human
ggagaaggguauguguggcgga

SEQ ID NO: 35346 - RNA, 22 nt, Human
ggagaaggugcuggucacugug

SEQ ID NO: 35347 - RNA, 22 nt, Human
ggagaaugauucuuugcucacu

SEQ ID NO: 35348 - RNA, 22 nt, Human
ggagaauucuuuauuagcuuuu

SEQ ID NO: 35349 - RNA, 22 nt, Human
ggagacaacaaucaugugugaa

SEQ ID NO: 35350 - RNA, 22 nt, Human
ggagacacauauacagaaagag

SEQ ID NO: 35351 - RNA, 22 nt, Human
ggagacacccacauugcugggu

SEQ ID NO: 35352 - RNA, 22 nt, Human
ggagacaggguugaaccacgca

SEQ ID NO: 35353 - RNA, 22 nt, Human
ggagaccagaaggaagcuucga

SEQ ID NO: 35354 - RNA, 22 nt, Human
ggagaccaggucagagauggug

SEQ ID NO: 35355 - RNA, 22 nt, Human
ggagacccagguuaggaaguaa

SEQ ID NO: 35356 - RNA, 18 nt, Human
ggagacuaaacuguugac

SEQ ID NO: 35357 - RNA, 22 nt, Human
ggagacucggguucuagccuug

SEQ ID NO: 35358 - RNA, 22 nt, Human
ggagacuuggcuuggaugcuuc

SEQ ID NO: 35359 - RNA, 22 nt, Human
ggagagaauucagcuuaagauu

SEQ ID NO: 35360 - RNA, 22 nt, Human
ggagagacccuggagaaggucc

SEQ ID NO: 35361 - RNA, 22 nt, Human
ggagagagagauuguguuuauu

SEQ ID NO: 35362 - RNA, 22 nt, Human
ggagagaggcuggccgugauga

SEQ ID NO: 35363 - RNA, 22 nt, Human
ggagagauggaaaaccucccag

SEQ ID NO: 35364 - RNA, 22 nt, Human
ggagagccugugcagccggguu

SEQ ID NO: 35365 - RNA, 22 nt, Human
ggagaggacauggcucccacag

SEQ ID NO: 35366 - RNA, 22 nt, Human
ggagaggcuuggcccagccugg

SEQ ID NO: 35367 - RNA, 22 nt, Human
ggagaggguguggaaaguuauc

SEQ ID NO: 35368 - RNA, 22 nt, Human
ggagagucugagccugcuggag

SEQ ID NO: 35369 - RNA, 22 nt, Human
ggagagugggagcaacuguugc

SEQ ID NO: 35370 - RNA, 22 nt, Human
ggagaguuguuuuugccuagau

SEQ ID NO: 35371 - RNA, 22 nt, Human
ggagauaauccagggagggacu

SEQ ID NO: 35372 - RNA, 22 nt, Human
ggagauccaggcugagucuuuc

SEQ ID NO: 35373 - RNA, 23 nt, Human
ggagaucuagguuggcauuuccu

SEQ ID NO: 35374 - RNA, 22 nt, Human
ggagaugcgacucgcggggcug

SEQ ID NO: 35375 - RNA, 22 nt, Human
ggagauggaguggauucagcag

SEQ ID NO: 35376 - RNA, 22 nt, Human
ggagauggcucugcaaggucua

SEQ ID NO: 35377 - RNA, 22 nt, Human
ggagaugggggauuuuacagcg

SEQ ID NO: 35378 - RNA, 21 nt, Human
ggagauggguaucgccugggc

SEQ ID NO: 35379 - RNA, 22 nt, Human
cuuccauaaucuuguuuauuua

SEQ ID NO: 35380 - RNA, 22 nt, Human
cuucccacagaauucaaucagu

SEQ ID NO: 35381 - RNA, 22 nt, Human
cuucccaguucugcuugagggg

SEQ ID NO: 35382 - RNA, 22 nt, Human
cuucccuccuggauuccagacu

SEQ ID NO: 35383 - RNA, 22 nt, Human
cuucccugagcuuucucaggcu

SEQ ID NO: 35384 - RNA, 22 nt, Human
cuucccugauaagagccucaga

SEQ ID NO: 35385 - RNA, 22 nt, Human
cuucccuuccuggggcaauuua

SEQ ID NO: 35386 - RNA, 22 nt, Human
cuuccucaggcauuagcuggac

SEQ ID NO: 35387 - RNA, 22 nt, Human
cuuccucuagccuaguaaugcc

SEQ ID NO: 35388 - RNA, 22 nt, Human
cuuccucugaggcuucugaguc

SEQ ID NO: 35389 - RNA, 22 nt, Human
cuuccucuguguccugggcuuc

SEQ ID NO: 35390 - RNA, 22 nt, Human
cuuccucuguguccugggcuug

SEQ ID NO: 35391 - RNA, 18 nt, Human
cuuccugacuagcucugg

SEQ ID NO: 35392 - RNA, 22 nt, Human
cuuccugcaacaccuguguugc

SEQ ID NO: 35393 - RNA, 22 nt, Human
cuuccugcauugugccagaguu

SEQ ID NO: 35394 - RNA, 22 nt, Human
cuuccuggcaaagcaaucagag

SEQ ID NO: 35395 - RNA, 22 nt, Human
cuuccuggccauugccauggca

SEQ ID NO: 35396 - RNA, 22 nt, Human
cuuccugggcaauguucugcuu

SEQ ID NO: 35397 - RNA, 22 nt, Human
cuuccuuucagaggaaggccug

SEQ ID NO: 35398 - RNA, 22 nt, Human
cuuccuuugcuguucggagguu

SEQ ID NO: 35399 - RNA, 22 nt, Human
ggagccugcgggagcucccauu

SEQ ID NO: 35400 - RNA, 23 nt, Human
ggagccuggcauaugagacgcau

SEQ ID NO: 35401 - RNA, 22 nt, Human
ggagccuggccuggcucugugu

SEQ ID NO: 35402 - RNA, 22 nt, Human
ggagccugggccuccugcccuu

SEQ ID NO: 35403 - RNA, 22 nt, Human
ggagccuguuaguugagugcuc

SEQ ID NO: 35404 - RNA, 22 nt, Human
ggagccuuccagacugcccaca

SEQ ID NO: 35405 - RNA, 22 nt, Human
ggagcggucagcuggccacacg

SEQ ID NO: 35406 - RNA, 22 nt, Human
ggagcuaggcaaagcucacgga

SEQ ID NO: 35407 - RNA, 22 nt, Human
ggagcucaguggggggacugug

SEQ ID NO: 35408 - RNA, 22 nt, Human
ggagcucauaacaagguagcca

SEQ ID NO: 35409 - RNA, 22 nt, Human
ggagcuccuggcagugacagag

SEQ ID NO: 35410 - RNA, 22 nt, Human
ggagcucucuugugguacuccc

SEQ ID NO: 35411 - RNA, 22 nt, Human
ggagcugagacccaguggcuga

SEQ ID NO: 35412 - RNA, 22 nt, Human
ggagcugaguggguuuauugau

SEQ ID NO: 35413 - RNA, 22 nt, Human
ggagcugcuccuucagccaagu

SEQ ID NO: 35414 - RNA, 22 nt, Human
ggagcuggaauauauugaaacc

SEQ ID NO: 35415 - RNA, 22 nt, Human
ggagcuggagaguacagaguuu

SEQ ID NO: 35416 - RNA, 22 nt, Human
ggagcuggcccucugaguuugu

SEQ ID NO: 35417 - RNA, 22 nt, Human
ggagcuggcuacagagaacucc

SEQ ID NO: 35418 - RNA, 22 nt, Human
ggagcugggaacuauguaguau

SEQ ID NO: 35419 - RNA, 22 nt, Human
ggagcugggacccugucaucug

SEQ ID NO: 35420 - RNA, 18 nt, Human
ggagcugggccccacucc

SEQ ID NO: 35421 - RNA, 22 nt, Human
ggagcuguaacgagccauugcu

SEQ ID NO: 35422 - RNA, 22 nt, Human
ggagcuguuaaaugcagaauuu

SEQ ID NO: 35423 - RNA, 22 nt, Human
ggaggaaauccuuaguaaggca

SEQ ID NO: 35424 - RNA, 22 nt, Human
ggaggacaggggcugcagcaca

SEQ ID NO: 35425 - RNA, 22 nt, Human
ggaggaccccagcagcucccca

SEQ ID NO: 35426 - RNA, 22 nt, Human
ggaggagacggagugauuagug

SEQ ID NO: 35427 - RNA, 22 nt, Human
ggaggagagagguugcaaacac

SEQ ID NO: 35428 - RNA, 22 nt, Human
ggaggagcacuucugagcucag

SEQ ID NO: 35429 - RNA, 22 nt, Human
ggaggagcugcugugggggccc

SEQ ID NO: 35430 - RNA, 22 nt, Human
ggaggaggcggcagaaguuccu

SEQ ID NO: 35431 - RNA, 22 nt, Human
ggaggaggggcgcuuugucuau

SEQ ID NO: 35432 - RNA, 22 nt, Human
ggaggaugccaagcugugcaca

SEQ ID NO: 35433 - RNA, 22 nt, Human
ggaggauuugucaucugaagau

SEQ ID NO: 35434 - RNA, 22 nt, Human
ggaggcacuucaugcugacccg

SEQ ID NO: 35435 - RNA, 22 nt, Human
ggaggccaagucacugaccugg

SEQ ID NO: 35436 - RNA, 22 nt, Human
ggaggccagaaucuguguugga

SEQ ID NO: 35437 - RNA, 22 nt, Human
ggaggccaggaaggcucggaga

SEQ ID NO: 35438 - RNA, 22 nt, Human
ggaggccaguccuggccgggcu

SEQ ID NO: 35439 - RNA, 22 nt, Human
ggaggccaugggcagaaucuuu

SEQ ID NO: 35440 - RNA, 22 nt, Human
ggaggccuggacuuccugaugg

SEQ ID NO: 35441 - RNA, 22 nt, Human
ggaggcgauccugggaaacacc

SEQ ID NO: 35442 - RNA, 22 nt, Human
ggaggcgcggcucggcugugcc

SEQ ID NO: 35443 - RNA, 22 nt, Human
ggaggcucagacuccauccuca

SEQ ID NO: 35444 - RNA, 22 nt, Human
ggaggcucuuauuuguucaaca

SEQ ID NO: 35445 - RNA, 22 nt, Human
ggaggcucuugagaggggagua

SEQ ID NO: 35446 - RNA, 22 nt, Human
ggaggcugaggccccucacagg

SEQ ID NO: 35447 - RNA, 22 nt, Human
ggaggcuuccuggcucuugauu

SEQ ID NO: 35448 - RNA, 22 nt, Human
ggagggaaccuuggcuggauug

SEQ ID NO: 35449 - RNA, 22 nt, Human
ggagggaagugaguucucagcu

SEQ ID NO: 35450 - RNA, 22 nt, Human
ggagggaaugucuagcauucuu

SEQ ID NO: 35451 - RNA, 22 nt, Human
ggagggacccacucuagaggug

SEQ ID NO: 35452 - RNA, 22 nt, Human
ggagggaguuucauuccugccc

SEQ ID NO: 35453 - RNA, 22 nt, Human
ggagggcucccugggaguggau

SEQ ID NO: 35454 - RNA, 22 nt, Human
ggagggcuguagaggagaccug

SEQ ID NO: 35455 - RNA, 22 nt, Human
ggaggggagguccagcugaucu

SEQ ID NO: 35456 - RNA, 22 nt, Human
ggaggggcagccauggaacucc

SEQ ID NO: 35457 - RNA, 22 nt, Human
ggaggggcauaguucaccauca

SEQ ID NO: 35458 - RNA, 22 nt, Human
ggaggggcuccuguucgccccc

SEQ ID NO: 35459 - RNA, 22 nt, Human
ggaggggcugagcaacuuucag

SEQ ID NO: 35460 - RNA, 22 nt, Human
ggagggggacugacacugauuu

SEQ ID NO: 35461 - RNA, 22 nt, Human
ggaggggugcucagcugucacg

SEQ ID NO: 35462 - RNA, 22 nt, Human
ggagggguggaaggagugccug

SEQ ID NO: 35463 - RNA, 22 nt, Human
ggagggguggucaccuggcagg

SEQ ID NO: 35464 - RNA, 22 nt, Human
ggagggucuaagggagaacuga

SEQ ID NO: 35465 - RNA, 22 nt, Human
ggagggugcagacccuuugcaa

SEQ ID NO: 35466 - RNA, 20 nt, Human
ggaggucaaaugaugagaag

SEQ ID NO: 35467 - RNA, 22 nt, Human
ggaggucacaaggugaguaaag

SEQ ID NO: 35468 - RNA, 23 nt, Human
ggaggucagugccugagggugag

SEQ ID NO: 35469 - RNA, 22 nt, Human
ggaggucauaaguguauagaug

SEQ ID NO: 35470 - RNA, 22 nt, Human
ggaggucauagcugugcaggua

SEQ ID NO: 35471 - RNA, 22 nt, Human
ggagguggagguugcaaugagc

SEQ ID NO: 35472 - RNA, 22 nt, Human
ggaggugggauuaggaccuaaa

SEQ ID NO: 35473 - RNA, 22 nt, Human
ggagguucugauuugucacaac

SEQ ID NO: 35474 - RNA, 22 nt, Human
ggaguagcugcauuccgagcac

SEQ ID NO: 35475 - RNA, 22 nt, Human
ggaguaggccccgggagagagu

SEQ ID NO: 35476 - RNA, 22 nt, Human
ggaguauaucguguaucauaug

SEQ ID NO: 35477 - RNA, 22 nt, Human
ggagucacacaggaagaaggac

SEQ ID NO: 35478 - RNA, 22 nt, Human
ggagucagccugucagagugua

SEQ ID NO: 35479 - RNA, 21 nt, Human
ggaguccaaaaauuagccaug

SEQ ID NO: 35480 - RNA, 22 nt, Human
ggaguccaacgugcagccagga

SEQ ID NO: 35481 - RNA, 22 nt, Human
ggagucccagcaaagccuuccc

SEQ ID NO: 35482 - RNA, 22 nt, Human
ggagucuggaguggggcccaag

SEQ ID NO: 35483 - RNA, 22 nt, Human
ggagucugucaccuguuucucu

SEQ ID NO: 35484 - RNA, 22 nt, Human
ggagucuguuuuacaugcagga

SEQ ID NO: 35485 - RNA, 22 nt, Human
ggagucuuggccugcugagaaa

SEQ ID NO: 35486 - RNA, 22 nt, Human
ggagugaaguggcgcgaucucg

SEQ ID NO: 35487 - RNA, 22 nt, Human
ggagugaauaaguagggggaaa

SEQ ID NO: 35488 - RNA, 22 nt, Human
gaauauguguuccuggacaaga

SEQ ID NO: 35489 - RNA, 22 nt, Human
gaauauuaguaucaguuauacc

SEQ ID NO: 35490 - RNA, 22 nt, Human
gaaucaaugguagauuaaguaa

SEQ ID NO: 35491 - RNA, 22 nt, Human
gaaucagccugaguuugcagcu

SEQ ID NO: 35492 - RNA, 23 nt, Human
gaaucaguggcuaacaaggaaac

SEQ ID NO: 35493 - RNA, 22 nt, Human
gaauccaggguuguuugagcua

SEQ ID NO: 35494 - RNA, 22 nt, Human
gaaucccuugcaaguuguugua

SEQ ID NO: 35495 - RNA, 22 nt, Human
gaauccgugugauguggacuag

SEQ ID NO: 35496 - RNA, 17 nt, Human
gaauccuucucuguucu

SEQ ID NO: 35497 - RNA, 22 nt, Human
gaauccuugguuuuaagcaaua

SEQ ID NO: 35498 - RNA, 22 nt, Human
gaaucuaaaaacgggcuugguu

SEQ ID NO: 35499 - RNA, 22 nt, Human
gaaucugcauuuuaacaagauc

SEQ ID NO: 35500 - RNA, 22 nt, Human
gaaucuuagucuccuaacggcu

SEQ ID NO: 35501 - RNA, 22 nt, Human
gaaucuuaugugguguuuucua

SEQ ID NO: 35502 - RNA, 21 nt, Human
gaaucuuugauuuacauggga

SEQ ID NO: 35503 - RNA, 22 nt, Human
gaaugaaucuguaagugacaag

SEQ ID NO: 35504 - RNA, 22 nt, Human
gaaugaauucagcacauggaau

SEQ ID NO: 35505 - RNA, 22 nt, Human
gaaugagggagauguuggugca

SEQ ID NO: 35506 - RNA, 22 nt, Human
gaaugaguuaauauuugcuugg

SEQ ID NO: 35507 - RNA, 22 nt, Human
gaaugauaaauggaagcagcau

SEQ ID NO: 35508 - RNA, 22 nt, Human
gaaugcaaagcucucuauguua

SEQ ID NO: 35509 - RNA, 22 nt, Human
gaaugcuaagcaugugggaguu

SEQ ID NO: 35510 - RNA, 22 nt, Human
gaaugcuauuauuucugugugu

SEQ ID NO: 35511 - RNA, 22 nt, Human
gaaugcucucauuuuccaacau

SEQ ID NO: 35512 - RNA, 22 nt, Human
gaaugcugagacuaaagagcuu

SEQ ID NO: 35513 - RNA, 22 nt, Human
gaaugcugagucuuaucucuua

SEQ ID NO: 35514 - RNA, 22 nt, Human
cuuuggaagccaggcaguucac

SEQ ID NO: 35515 - RNA, 22 nt, Human
cuuuggaagugaccacaauccu

SEQ ID NO: 35516 - RNA, 22 nt, Human
cuuuggaagugauagauaugau

SEQ ID NO: 35517 - RNA, 22 nt, Human
cuuuggaauaaucaagcucuga

SEQ ID NO: 35518 - RNA, 22 nt, Human
cuuuggaggucauagccaagag

SEQ ID NO: 35519 - RNA, 20 nt, Human
cuuuggcaaugagaacaggg

SEQ ID NO: 35520 - RNA, 22 nt, Human
cuuuggcagccucagcugcagg

SEQ ID NO: 35521 - RNA, 22 nt, Human
cuuuggcagccucugcuauuga

SEQ ID NO: 35522 - RNA, 22 nt, Human
cuuuggcugacagguuucuggu

SEQ ID NO: 35523 - RNA, 22 nt, Human
cuuugggauuucaugagagcua

SEQ ID NO: 35524 - RNA, 22 nt, Human
cuuuguaaucauucccuugguu

SEQ ID NO: 35525 - RNA, 22 nt, Human
cuuuguaucuaaauaucuugaa

SEQ ID NO: 35526 - RNA, 22 nt, Human
cuuuguccauugauucguucaa

SEQ ID NO: 35527 - RNA, 22 nt, Human
cuuugugaugaggccuaagaca

SEQ ID NO: 35528 - RNA, 22 nt, Human
cuuugugcuuugaaugauagcu

SEQ ID NO: 35529 - RNA, 22 nt, Human
cuuuguugugccugagugcacc

SEQ ID NO: 35530 - RNA, 22 nt, Human
cuuuguuuuacucagaggcaug

SEQ ID NO: 35531 - RNA, 23 nt, Human
cuuuuaaccggcaugggagggca

SEQ ID NO: 35532 - RNA, 23 nt, Human
cuuuuaacuugaucugagaccag

SEQ ID NO: 35533 - RNA, 22 nt, Human
cuuuuaagggauaauaagaugu

SEQ ID NO: 35534 - RNA, 22 nt, Human
cuuuuacacucaucugggaggg

SEQ ID NO: 35535 - RNA, 22 nt, Human
cuuuuagcugcaaguguucaca

SEQ ID NO: 35536 - RNA, 22 nt, Human
cuuuuauuuugaauuaagggcu

SEQ ID NO: 35537 - RNA, 22 nt, Human
cuuuucagagcugagaucaccg

SEQ ID NO: 35538 - RNA, 22 nt, Human
cuuuucaugagucuguuauggg

SEQ ID NO: 35539 - RNA, 23 nt, Human
cuuuucauugccuuagcgcagag

SEQ ID NO: 35540 - RNA, 22 nt, Human
cuuuucucugcaccauguguga

SEQ ID NO: 35541 - RNA, 22 nt, Human
cuuuucucuuacauuccacugg

SEQ ID NO: 35542 - RNA, 22 nt, Human
cuuuucugugaugcugacaguc

SEQ ID NO: 35543 - RNA, 21 nt, Human
cuuuucuguguuccucccugu

SEQ ID NO: 35544 - RNA, 22 nt, Human
cuuuucuuacucccgcaaggca

SEQ ID NO: 35545 - RNA, 22 nt, Human
cuuuucuucucacggcugucag

SEQ ID NO: 35546 - RNA, 22 nt, Human
cuuuugauaguugcugagcagg

SEQ ID NO: 35547 - RNA, 22 nt, Human
cuuuugauugagcaguuucaaa

SEQ ID NO: 35548 - RNA, 22 nt, Human
cuuuugcaccuuuuaaguaaug

SEQ ID NO: 35549 - RNA, 22 nt, Human
cuuuuugcaagaguuucucauc

SEQ ID NO: 35550 - RNA, 22 nt, Human
cuuuuuguguaugcuacaguug

SEQ ID NO: 35551 - RNA, 22 nt, Human
cuuuuuguuguccacacuagga

SEQ ID NO: 35552 - RNA, 22 nt, Human
cuuuuuuccuaaggcaacauga

SEQ ID NO: 35553 - RNA, 19 nt, Human
gaaaacaugggugaggguc

SEQ ID NO: 35554 - RNA, 21 nt, Human
gaaaaccauuugcaucaugag

SEQ ID NO: 35555 - RNA, 22 nt, Human
gaaaacugugauuagaaugccu

SEQ ID NO: 35556 - RNA, 22 nt, Human
gaaaacuuggaucucuagaaug

SEQ ID NO: 35557 - RNA, 22 nt, Human
gaaaagcuuacugccacuuggc

SEQ ID NO: 35558 - RNA, 22 nt, Human
gaaaaggccuggggcaaagugu

SEQ ID NO: 35559 - RNA, 22 nt, Human
gaaaagggcaagagagagggca

SEQ ID NO: 35560 - RNA, 22 nt, Human
gaaaaguaaacacuagggguca

SEQ ID NO: 35561 - RNA, 22 nt, Human
gaaaaguauguuuauuuugacu

SEQ ID NO: 35562 - RNA, 22 nt, Human
gaaaauagcagauagaccaaug

SEQ ID NO: 35563 - RNA, 20 nt, Human
gaaaauaggccagccaggua

SEQ ID NO: 35564 - RNA, 22 nt, Human
gaaaauguuuccuguuauuugc

SEQ ID NO: 35565 - RNA, 22 nt, Human
gaaaauuucugccacaugugug

SEQ ID NO: 35566 - RNA, 22 nt, Human
gaaacaaucaucaugugauuug

SEQ ID NO: 35567 - RNA, 22 nt, Human
gaaacacauaugaacaguugau

SEQ ID NO: 35568 - RNA, 22 nt, Human
gaaacacaugcagcuccauaga

SEQ ID NO: 35569 - RNA, 22 nt, Human
gaaacacucaauuuaguaauuc

SEQ ID NO: 35570 - RNA, 22 nt, Human
gaaacacugguaaagacugccg

SEQ ID NO: 35571 - RNA, 22 nt, Human
gaaacagauuaacagcauauuu

SEQ ID NO: 35572 - RNA, 22 nt, Human
gaaacagccccugugugaagca

SEQ ID NO: 35573 - RNA, 22 nt, Human
gaaacagggaguaguaauuuac

SEQ ID NO: 35574 - RNA, 22 nt, Human
gaaacagguggcaggcuagauu

SEQ ID NO: 35575 - RNA, 22 nt, Human
gaaacagucaacuuucuuuccc

SEQ ID NO: 35576 - RNA, 22 nt, Human
gaaacauuggucugccccuuau

SEQ ID NO: 35577 - RNA, 22 nt, Human
gaaacauuguguucuacagauu

SEQ ID NO: 35578 - RNA, 22 nt, Human
gaaacauuuguugaguacuugc

SEQ ID NO: 35579 - RNA, 22 nt, Human
gaaacccaaacuaagacaguag

SEQ ID NO: 35580 - RNA, 22 nt, Human
gaaacccuuccuagagggcaag

SEQ ID NO: 35581 - RNA, 18 nt, Human
gaaaccugaggaagaaag

SEQ ID NO: 35582 - RNA, 22 nt, Human
gaaaccugagugcagaucagga

SEQ ID NO: 35583 - RNA, 22 nt, Human
gaaaccugguucugcgugaggg

SEQ ID NO: 35584 - RNA, 22 nt, Human
gaaaccuuugccgauggggucc

SEQ ID NO: 35585 - RNA, 22 nt, Human
gaaacugugaggaucuuaacuu

SEQ ID NO: 35586 - RNA, 22 nt, Human
gaaacuugccugaagucaacca

SEQ ID NO: 35587 - RNA, 22 nt, Human
gaaacuuucaugaauauaagau

SEQ ID NO: 35588 - RNA, 22 nt, Human
gaaagaagcuuuagauggcuau

SEQ ID NO: 35589 - RNA, 22 nt, Human
gaaagaaugcuauagugacuuc

SEQ ID NO: 35590 - RNA, 22 nt, Human
gaaagaccguuugggcucuaaa

SEQ ID NO: 35591 - RNA, 22 nt, Human
gaaagagaaccugggccuagau

SEQ ID NO: 35592 - RNA, 22 nt, Human
gaaagaguaugggagcuuuacu

SEQ ID NO: 35593 - RNA, 22 nt, Human
gaaagauaaucaauuacuccuu

SEQ ID NO: 35594 - RNA, 22 nt, Human
gaaagcacauacuauaaaucac

SEQ ID NO: 35595 - RNA, 22 nt, Human
gaaagcacccaagauuuccuuc

SEQ ID NO: 35596 - RNA, 22 nt, Human
gaaagcacgauaguagcaaaag

SEQ ID NO: 35597 - RNA, 22 nt, Human
gagaagguggaccugaaggagc

SEQ ID NO: 35598 - RNA, 22 nt, Human
gagaagucauuugaccaccuag

SEQ ID NO: 35599 - RNA, 22 nt, Human
gagaaguuucugguuugcauag

SEQ ID NO: 35600 - RNA, 22 nt, Human
gagaauauauugaaguaguucc

SEQ ID NO: 35601 - RNA, 22 nt, Human
gagaaucuuuccccacagaagg

SEQ ID NO: 35602 - RNA, 22 nt, Human
gagaaugaugauuuccaauuuc

SEQ ID NO: 35603 - RNA, 22 nt, Human
gagaauguuaauguugaaguau

SEQ ID NO: 35604 - RNA, 22 nt, Human
gagacaaaaguuggagugcaag

SEQ ID NO: 35605 - RNA, 22 nt, Human
gagacacaaacacauuuagagg

SEQ ID NO: 35606 - RNA, 22 nt, Human
gagacacaaacauuuauuccac

SEQ ID NO: 35607 - RNA, 18 nt, Human
gagacacaagggccugga

SEQ ID NO: 35608 - RNA, 22 nt, Human
gagacacaaucucauuuacauu

SEQ ID NO: 35609 - RNA, 22 nt, Human
gagacacaauuuccccauccua

SEQ ID NO: 35610 - RNA, 22 nt, Human
gagacacucaacaaagauauga

SEQ ID NO: 35611 - RNA, 21 nt, Human
gagacagacuuucguccccug

SEQ ID NO: 35612 - RNA, 22 nt, Human
gagacagaguuucacucuuguu

SEQ ID NO: 35613 - RNA, 22 nt, Human
gagacagcagggccagggccug

SEQ ID NO: 35614 - RNA, 22 nt, Human
gagacaguguccauccaggggc

SEQ ID NO: 35615 - RNA, 23 nt, Human
gagaccagggccagcugugucau

SEQ ID NO: 35616 - RNA, 22 nt, Human
gagaccccagcucagccuccag

SEQ ID NO: 35617 - RNA, 22 nt, Human
gagacgggguuugagacggguu

SEQ ID NO: 35618 - RNA, 21 nt, Human
gagacucucauguuauuugga

SEQ ID NO: 35619 - RNA, 22 nt, Human
gagacugauggggcucccagaa

SEQ ID NO: 35620 - RNA, 22 nt, Human
gagacugggggcuuggccuuuu

SEQ ID NO: 35621 - RNA, 22 nt, Human
gagagaaaggcuugcaggcugu

SEQ ID NO: 35622 - RNA, 22 nt, Human
gagagaaaugugcaguuugggc

SEQ ID NO: 35623 - RNA, 22 nt, Human
gagagaagaaagccaugguccu

SEQ ID NO: 35624 - RNA, 22 nt, Human
gagagacagcagaacgugcagc

SEQ ID NO: 35625 - RNA, 22 nt, Human
gagagacugauguggcuaugua

SEQ ID NO: 35626 - RNA, 22 nt, Human
gagagaggccuccauguacuga

SEQ ID NO: 35627 - RNA, 22 nt, Human
gagagcacggucuugggcaugg

SEQ ID NO: 35628 - RNA, 22 nt, Human
gagagcaggaggcagcgggacg

SEQ ID NO: 35629 - RNA, 22 nt, Human
gagagcaggcucucgggggcca

SEQ ID NO: 35630 - RNA, 22 nt, Human
gagagccagcaguaaagacauu

SEQ ID NO: 35631 - RNA, 22 nt, Human
gagagccaugguggagaugggg

SEQ ID NO: 35632 - RNA, 17 nt, Human
gagagcccucagauguc

SEQ ID NO: 35633 - RNA, 22 nt, Human
gagagcccuuagguuuagaguu

SEQ ID NO: 35634 - RNA, 22 nt, Human
gagagccuuugaagggaaguga

SEQ ID NO: 35635 - RNA, 22 nt, Human
gagagcugaggggccuggcacu

SEQ ID NO: 35636 - RNA, 18 nt, Human
gagagcugcuaccuagcu

SEQ ID NO: 35637 - RNA, 22 nt, Human
gagagcuggauucuggauaggu

SEQ ID NO: 35638 - RNA, 22 nt, Human
gagagcugggaaagccguggag

SEQ ID NO: 35639 - RNA, 22 nt, Human
gagagcugggcuuugggugaag

SEQ ID NO: 35640 - RNA, 22 nt, Human
gagagcuggguucaaguagcug

SEQ ID NO: 35641 - RNA, 22 nt, Human
gagaggaacucccagugccugg

SEQ ID NO: 35642 - RNA, 22 nt, Human
gagaggaagccaggggguguug

SEQ ID NO: 35643 - RNA, 22 nt, Human
gagaggaauaucauuauauuag

SEQ ID NO: 35644 - RNA, 22 nt, Human
gagaggagaagccugcgcuuca

SEQ ID NO: 35645 - RNA, 18 nt, Human
gagaggagccagaauuuu

SEQ ID NO: 35646 - RNA, 22 nt, Human
gagaggaguagacacuuugguu

SEQ ID NO: 35647 - RNA, 22 nt, Human
gagaggaguaggcugauggugc

SEQ ID NO: 35648 - RNA, 22 nt, Human
gagaggagucccuaucacaguu

SEQ ID NO: 35649 - RNA, 22 nt, Human
gaagauuaaaugaagugaccug

SEQ ID NO: 35650 - RNA, 22 nt, Human
gaagauuaaugagaaaccugcu

SEQ ID NO: 35651 - RNA, 22 nt, Human
gaagauugaaggcugggaauua

SEQ ID NO: 35652 - RNA, 22 nt, Human
gaagauuggggccucugcaccc

SEQ ID NO: 35653 - RNA, 22 nt, Human
gaagauuucuuuaugaaagaug

SEQ ID NO: 35654 - RNA, 22 nt, Human
gaagauuugcccaugcacuuuu

SEQ ID NO: 35655 - RNA, 22 nt, Human
gaagcaaagagcuagugccgcu

SEQ ID NO: 35656 - RNA, 22 nt, Human
gaagcaagugcaaggaagaggc

SEQ ID NO: 35657 - RNA, 22 nt, Human
gaagcaauuaaguuugugaucu

SEQ ID NO: 35658 - RNA, 22 nt, Human
gaagcacugcauuucaagauca

SEQ ID NO: 35659 - RNA, 22 nt, Human
gaagcacugugcugcuaaguug

SEQ ID NO: 35660 - RNA, 22 nt, Human
gaagcagacuuuugcuuauuug

SEQ ID NO: 35661 - RNA, 22 nt, Human
gaagcagagccuaaggcagaca

SEQ ID NO: 35662 - RNA, 22 nt, Human
gaagcagcagcuggggacaguu

SEQ ID NO: 35663 - RNA, 22 nt, Human
gaagcagcuuucuggugaggag

SEQ ID NO: 35664 - RNA, 22 nt, Human
gaagcauacuuucuauacugcu

SEQ ID NO: 35665 - RNA, 22 nt, Human
gaagccacaacuuuuucuuagc

SEQ ID NO: 35666 - RNA, 23 nt, Human
gaagccacacaaaggucgccaag

SEQ ID NO: 35667 - RNA, 22 nt, Human
gaagccagauuaucacaagcca

SEQ ID NO: 35668 - RNA, 22 nt, Human
gaagcccaagcuucacagcuau

SEQ ID NO: 35669 - RNA, 22 nt, Human
gaagcccagcaaacugugauca

SEQ ID NO: 35670 - RNA, 22 nt, Human
gaagcccaggcuuccuuggcuu

SEQ ID NO: 35671 - RNA, 22 nt, Human
gaagccucaacaucucugcguc

SEQ ID NO: 35672 - RNA, 22 nt, Human
gaagccuggagaccagauguug

SEQ ID NO: 35673 - RNA, 22 nt, Human
gaagccugguccagagcuccca

SEQ ID NO: 35674 - RNA, 22 nt, Human
gaagccuuaucagucacuuaua

SEQ ID NO: 35675 - RNA, 22 nt, Human
gaagccuugaacugcaaacccc

SEQ ID NO: 35676 - RNA, 22 nt, Human
gaagcugaggucaggugggugg

SEQ ID NO: 35677 - RNA, 22 nt, Human
gaagcugaguggacucuggcca

SEQ ID NO: 35678 - RNA, 22 nt, Human
gaagcugcguguagccauacuu

SEQ ID NO: 35679 - RNA, 22 nt, Human
gaagcuggagaaugggucuagg

SEQ ID NO: 35680 - RNA, 22 nt, Human
gaagcuggcugaaguucagcua

SEQ ID NO: 35681 - RNA, 22 nt, Human
gaagcugugcugggggaucugu

SEQ ID NO: 35682 - RNA, 22 nt, Human
gaaggaagacugguuuaaaugu

SEQ ID NO: 35683 - RNA, 22 nt, Human
gaaggaagauucuguuggaauc

SEQ ID NO: 35684 - RNA, 22 nt, Human
gaaggaagcugucuggaugugu

SEQ ID NO: 35685 - RNA, 22 nt, Human
gaaggaagggcuggcugucuug

SEQ ID NO: 35686 - RNA, 22 nt, Human
gaaggacccacgaagucacugg

SEQ ID NO: 35687 - RNA, 22 nt, Human
gaaggacccucuggggucucag

SEQ ID NO: 35688 - RNA, 22 nt, Human
gaaggagacccugaagaugcug

SEQ ID NO: 35689 - RNA, 22 nt, Human
gaaggagagagacaucgucccu

SEQ ID NO: 35690 - RNA, 22 nt, Human
gaaggagaggauugugaggcug

SEQ ID NO: 35691 - RNA, 22 nt, Human
gaaggagagggucaaggauaau

SEQ ID NO: 35692 - RNA, 22 nt, Human
gaaggagccgagcucuucccca

SEQ ID NO: 35693 - RNA, 22 nt, Human
gaaggaggcuccccaaagucug

SEQ ID NO: 35694 - RNA, 22 nt, Human
gaaggaggucugauacaauaug

SEQ ID NO: 35695 - RNA, 22 nt, Human
gaaggcaagugcuccuuggguc

SEQ ID NO: 35696 - RNA, 20 nt, Human
gaaggcaaugguuuggcaca

SEQ ID NO: 35697 - RNA, 22 nt, Human
gaaggcagguuuuucaaaacug

SEQ ID NO: 35698 - RNA, 22 nt, Human
gaaggcauuuuaugccuuauag

SEQ ID NO: 35699 - RNA, 22 nt, Human
gaaggccacaagagaaguuaag

SEQ ID NO: 35700 - RNA, 22 nt, Human
gaaggccucacucugcagcaua

SEQ ID NO: 35701 - RNA, 22 nt, Human
gaaggccugugguagugagacg

SEQ ID NO: 35702 - RNA, 22 nt, Human
gaaggcuaaaggggcagagguu

SEQ ID NO: 35703 - RNA, 22 nt, Human
gaaggcugagcagacaggccaa

SEQ ID NO: 35704 - RNA, 22 nt, Human
gaaggcugaugacagauucugc

SEQ ID NO: 35705 - RNA, 22 nt, Human
gaaggcugccaguggcccucuu

SEQ ID NO: 35706 - RNA, 22 nt, Human
gacugugggcucuguuugucuu

SEQ ID NO: 35707 - RNA, 22 nt, Human
gacuguggggggcggacacaag

SEQ ID NO: 35708 - RNA, 22 nt, Human
gacuuaaaggcugaauguagga

SEQ ID NO: 35709 - RNA, 22 nt, Human
gacuucaaaucaugcuaaaccu

SEQ ID NO: 35710 - RNA, 22 nt, Human
gacuucaacuucuggggagcaa

SEQ ID NO: 35711 - RNA, 22 nt, Human
gacuucacaauaaugugacacu

SEQ ID NO: 35712 - RNA, 22 nt, Human
gacuucagauauuuuuuaaguu

SEQ ID NO: 35713 - RNA, 22 nt, Human
gacuucuauuaauaccucuacu

SEQ ID NO: 35714 - RNA, 22 nt, Human
gacuucuccagacugccuggua

SEQ ID NO: 35715 - RNA, 22 nt, Human
gacuucucccaaccaucagagg

SEQ ID NO: 35716 - RNA, 22 nt, Human
gacuucucggcacccuuuggca

SEQ ID NO: 35717 - RNA, 22 nt, Human
gacuucugaauuccuaucaggu

SEQ ID NO: 35718 - RNA, 22 nt, Human
gacuucugagcuauccagcugu

SEQ ID NO: 35719 - RNA, 22 nt, Human
gacuugggcuugggcguggguu

SEQ ID NO: 35720 - RNA, 22 nt, Human
gacuuggggauuuaucucacag

SEQ ID NO: 35721 - RNA, 22 nt, Human
gacuugggggaagauguggcug

SEQ ID NO: 35722 - RNA, 22 nt, Human
gacuuggguggauugugacucu

SEQ ID NO: 35723 - RNA, 18 nt, Human
gacuuuaaaacacugcuc

SEQ ID NO: 35724 - RNA, 22 nt, Human
gacuuuaaaaguuugugcuugg

SEQ ID NO: 35725 - RNA, 22 nt, Human
gacuuuaaagccugacauuuua

SEQ ID NO: 35726 - RNA, 22 nt, Human
gacuuuaucuuguccuuccugc

SEQ ID NO: 35727 - RNA, 22 nt, Human
gacuuuauuuccuuauuuguga

SEQ ID NO: 35728 - RNA, 22 nt, Human
gacuuuauuuuaacggagauuc

SEQ ID NO: 35729 - RNA, 22 nt, Human
gacuuucuaaugcucuguagau

SEQ ID NO: 35730 - RNA, 22 nt, Human
gacuuucucuccucccaggugu

SEQ ID NO: 35731 - RNA, 22 nt, Human
gacuuucuuaggcccccuaaua

SEQ ID NO: 35732 - RNA, 22 nt, Human
gacuuucuugcagaaauauucc

SEQ ID NO: 35733 - RNA, 22 nt, Human
gacuuugaacaguguaucagua

SEQ ID NO: 35734 - RNA, 22 nt, Human
gacuuugacgaaagagucauua

SEQ ID NO: 35735 - RNA, 22 nt, Human
gacuuugagggauacaaacauu

SEQ ID NO: 35736 - RNA, 22 nt, Human
gacuuugccacuugcuccagcu

SEQ ID NO: 35737 - RNA, 22 nt, Human
gacuuuggauucauuaucugga

SEQ ID NO: 35738 - RNA, 22 nt, Human
gacuuuugaauaagguaggaua

SEQ ID NO: 35739 - RNA, 22 nt, Human
gagaaacaggaauugagucgcu

SEQ ID NO: 35740 - RNA, 22 nt, Human
gagaaacugaaacauagggcca

SEQ ID NO: 35741 - RNA, 22 nt, Human
gagaaagauggaaucuuacagg

SEQ ID NO: 35742 - RNA, 19 nt, Human
gagaaagcaggcacagcac

SEQ ID NO: 35743 - RNA, 22 nt, Human
gagaaagcuucagaaauggccu

SEQ ID NO: 35744 - RNA, 22 nt, Human
gagaaagcuucuuucccacagg

SEQ ID NO: 35745 - RNA, 22 nt, Human
gagaaagggauaauuugaagag

SEQ ID NO: 35746 - RNA, 22 nt, Human
gagaacacaugcagacugggua

SEQ ID NO: 35747 - RNA, 22 nt, Human
gagaacagagauaauuuuacuu

SEQ ID NO: 35748 - RNA, 23 nt, Human
gagaacagccacagagagcugug

SEQ ID NO: 35749 - RNA, 22 nt, Human
gagaacauuaauaguuaauuuu

SEQ ID NO: 35750 - RNA, 22 nt, Human
gagaacuaaucaugcauggagu

SEQ ID NO: 35751 - RNA, 22 nt, Human
gagaagaaauagaaucacauuu

SEQ ID NO: 35752 - RNA, 22 nt, Human
gagaagcaaucagcagccaccc

SEQ ID NO: 35753 - RNA, 22 nt, Human
gagaagcaaucgugacaucucc

SEQ ID NO: 35754 - RNA, 22 nt, Human
gagaagcaauuuccaacugugc

SEQ ID NO: 35755 - RNA, 22 nt, Human
gagaaggaaguugagccagcau

SEQ ID NO: 35756 - RNA, 22 nt, Human
gagaaggaggcgaagcgugugc

SEQ ID NO: 35757 - RNA, 22 nt, Human
gagaaggaguagcugaccuggg

SEQ ID NO: 35758 - RNA, 18 nt, Human
gagaaggccacuuguuuu

SEQ ID NO: 35759 - RNA, 22 nt, Human
gagaaggcuucuuuuccucuga

SEQ ID NO: 35760 - RNA, 22 nt, Human
gagaagggcuugggagucaaca

SEQ ID NO: 35761 - RNA, 22 nt, Human
gagaaguuguaggagaauuuug

SEQ ID NO: 35762 - RNA, 22 nt, Human
gagaaguuuaaucauuagacca

SEQ ID NO: 35763 - RNA, 17 nt, Human
gagaaguuuugcuaccg

SEQ ID NO: 35764 - RNA, 22 nt, Human
gagaaguuuuucuuauuacaug

SEQ ID NO: 35765 - RNA, 22 nt, Human
gagaauaucuuggcagucucug

SEQ ID NO: 35766 - RNA, 22 nt, Human
gaauacaccaaggaaucagaau

SEQ ID NO: 35767 - RNA, 22 nt, Human
gaauacacgcacgacacggggg

SEQ ID NO: 35768 - RNA, 22 nt, Human
gaauacaugauacaugaacugc

SEQ ID NO: 35769 - RNA, 18 nt, Human
gaauacugagagcacaaa

SEQ ID NO: 35770 - RNA, 22 nt, Human
gaauacuuuuguuaggaaaacg

SEQ ID NO: 35771 - RNA, 22 nt, Human
gaauagauagcuuggaugguug

SEQ ID NO: 35772 - RNA, 22 nt, Human
gaauauauuggugaaaauaguu

SEQ ID NO: 35773 - RNA, 18 nt, Human
gaauaucuagcacauagu

SEQ ID NO: 35774 - RNA, 22 nt, Human
gaaucaauuauccaggcuguug

SEQ ID NO: 35775 - RNA, 22 nt, Human
gaaucaauugugaagacuauga

SEQ ID NO: 35776 - RNA, 22 nt, Human
gaaucacagaggcaaauucuga

SEQ ID NO: 35777 - RNA, 22 nt, Human
gaaucagacugaccugaguuca

SEQ ID NO: 35778 - RNA, 22 nt, Human
gaaucuagggccuagaucacag

SEQ ID NO: 35779 - RNA, 22 nt, Human
gaaucuaugccucauauagacc

SEQ ID NO: 35780 - RNA, 22 nt, Human
gaaucucaguggaagcaggaag

SEQ ID NO: 35781 - RNA, 22 nt, Human
gaaucucauucuaacuaguagg

SEQ ID NO: 35782 - RNA, 22 nt, Human
gaaucuuaccucucuauuguug

SEQ ID NO: 35783 - RNA, 20 nt, Human
gaaucuuuccccaugcaaug

SEQ ID NO: 35784 - RNA, 22 nt, Human
gaaucuuuugucucgugaauaa

SEQ ID NO: 35785 - RNA, 22 nt, Human
gaaugaaagauuugcauucuau

SEQ ID NO: 35786 - RNA, 22 nt, Human
gaaugaagcaggucacacaguu

SEQ ID NO: 35787 - RNA, 22 nt, Human
gaaugaauagguguccagaugg

SEQ ID NO: 35788 - RNA, 22 nt, Human
gaaugaauuuuggauggugaag

SEQ ID NO: 35789 - RNA, 22 nt, Human
gaaugagacuaugcgaguguga

SEQ ID NO: 35790 - RNA, 22 nt, Human
gaaugauagagcugccuucgga

SEQ ID NO: 35791 - RNA, 22 nt, Human
gaaugauauauuagcagauuuu

SEQ ID NO: 35792 - RNA, 22 nt, Human
gaaugauuugguuguuuagauu

SEQ ID NO: 35793 - RNA, 22 nt, Human
gaaugcacacgugugugcaugc

SEQ ID NO: 35794 - RNA, 19 nt, Human
gaaugcagaagagagugga

SEQ ID NO: 35795 - RNA, 22 nt, Human
gaaugcagauggcugguguaug

SEQ ID NO: 35796 - RNA, 22 nt, Human
gaaugcagcugacagucguuuu

SEQ ID NO: 35797 - RNA, 22 nt, Human
gaaugcaugugaagcaaagaau

SEQ ID NO: 35798 - RNA, 22 nt, Human
gaaugcuuggaaccugaaguuc

SEQ ID NO: 35799 - RNA, 22 nt, Human
gaaugcuuugggaauucagaau

SEQ ID NO: 35800 - RNA, 22 nt, Human
gaauggaaacugggagauggcc

SEQ ID NO: 35801 - RNA, 22 nt, Human
gaauggcauagcuuucuuuaca

SEQ ID NO: 35802 - RNA, 22 nt, Human
gaauguaauaggaaacgugugg

SEQ ID NO: 35803 - RNA, 22 nt, Human
gaauguccuccuggaucacucc

SEQ ID NO: 35804 - RNA, 22 nt, Human
gaaugucuguuucaacaagcac

SEQ ID NO: 35805 - RNA, 22 nt, Human
gaaugugucacccugucccaug

SEQ ID NO: 35806 - RNA, 22 nt, Human
gaauguucugaggaaucagaga

SEQ ID NO: 35807 - RNA, 22 nt, Human
gaauguuuaaggaaggcguggc

SEQ ID NO: 35808 - RNA, 19 nt, Human
gaauguuucugucucuucu

SEQ ID NO: 35809 - RNA, 22 nt, Human
gaauguuuuuaggaauguuaug

SEQ ID NO: 35810 - RNA, 22 nt, Human
gaauguuuuuauaaguguuaca

SEQ ID NO: 35811 - RNA, 22 nt, Human
gaauuacaaagugagacaagcu

SEQ ID NO: 35812 - RNA, 22 nt, Human
gaauuacauuguuagccuuccu

SEQ ID NO: 35813 - RNA, 22 nt, Human
gaauuaguguugaaaucagggc

SEQ ID NO: 35814 - RNA, 22 nt, Human
gaauuccacuuuggcuuuuggg

SEQ ID NO: 35815 - RNA, 22 nt, Human
ggcccagcuguauauuacaguu

SEQ ID NO: 35816 - RNA, 22 nt, Human
ggcccagcugugcuuccagccc

SEQ ID NO: 35817 - RNA, 22 nt, Human
ggcccagucuggggcccuguga

SEQ ID NO: 35818 - RNA, 20 nt, Human
ggcccagugaaccaggacgg

SEQ ID NO: 35819 - RNA, 22 nt, Human
ggcccaguguaccccaggcagu

SEQ ID NO: 35820 - RNA, 22 nt, Human
ggcccaguguugccagaccuga

SEQ ID NO: 35821 - RNA, 22 nt, Human
ggcccaucucuugcucuggguu

SEQ ID NO: 35822 - RNA, 22 nt, Human
ggccccacgggggaguccuagu

SEQ ID NO: 35823 - RNA, 22 nt, Human
ggccccagauucugggcugggu

SEQ ID NO: 35824 - RNA, 22 nt, Human
ggccccagcuguggugaauaga

SEQ ID NO: 35825 - RNA, 22 nt, Human
ggccccagcuucaaccccgugg

SEQ ID NO: 35826 - RNA, 17 nt, Human
ggccccggagccugaca

SEQ ID NO: 35827 - RNA, 22 nt, Human
ggccccucagcaucugagucag

SEQ ID NO: 35828 - RNA, 22 nt, Human
ggcccucccggugaugaagagc

SEQ ID NO: 35829 - RNA, 22 nt, Human
ggcccugcgauuagguggcagg

SEQ ID NO: 35830 - RNA, 22 nt, Human
ggcccugcugaguggaguggag

SEQ ID NO: 35831 - RNA, 22 nt, Human
ggcccugggacacaacaccgaa

SEQ ID NO: 35832 - RNA, 22 nt, Human
ggcccuguccuggcugucuccg

SEQ ID NO: 35833 - RNA, 20 nt, Human
ggccgaaauaauaguggcuu

SEQ ID NO: 35834 - RNA, 22 nt, Human
ggccgcggauuuucccgcuggc

SEQ ID NO: 35835 - RNA, 22 nt, Human
ggccggccuuugcgagcauucu

SEQ ID NO: 35836 - RNA, 22 nt, Human
ggccuaguuuuuucugguaggu

SEQ ID NO: 35837 - RNA, 22 nt, Human
ggccuauguuccugggcuaggg

SEQ ID NO: 35838 - RNA, 22 nt, Human
ggccucaagcuacccucucacc

SEQ ID NO: 35839 - RNA, 21 nt, Human
ggccucagccaccuggcucug

SEQ ID NO: 35840 - RNA, 22 nt, Human
ggccucaggguugggcccauua

SEQ ID NO: 35841 - RNA, 22 nt, Human
ggccuccucacccugcucaggc

SEQ ID NO: 35842 - RNA, 22 nt, Human
ggccucgagcaauacucccauc

SEQ ID NO: 35843 - RNA, 22 nt, Human
ggccucucauguccugggcuuc

SEQ ID NO: 35844 - RNA, 22 nt, Human
ggccucucuggcauggcugccc

SEQ ID NO: 35845 - RNA, 20 nt, Human
ggccucugaggacaaggaga

SEQ ID NO: 35846 - RNA, 22 nt, Human
ggccucugcaggccucgacaag

SEQ ID NO: 35847 - RNA, 22 nt, Human
ggccucugggguccugagccca

SEQ ID NO: 35848 - RNA, 22 nt, Human
ggccucugguucacagggagga

SEQ ID NO: 35849 - RNA, 22 nt, Human
ggccucuguucugcauuccucc

SEQ ID NO: 35850 - RNA, 22 nt, Human
ggccucuguuuggagccaggau

SEQ ID NO: 35851 - RNA, 22 nt, Human
ggccugaaauaaaguagcagaa

SEQ ID NO: 35852 - RNA, 22 nt, Human
ggccugaaugccugaguguggg

SEQ ID NO: 35853 - RNA, 20 nt, Human
ggccugagcauggcuggcag

SEQ ID NO: 35854 - RNA, 22 nt, Human
ggccugaggccaccagcagccc

SEQ ID NO: 35855 - RNA, 22 nt, Human
ggccugaggcgucccagcugug

SEQ ID NO: 35856 - RNA, 22 nt, Human
ggccugaucuuugacccucauc

SEQ ID NO: 35857 - RNA, 22 nt, Human
ggccugcucaguccucuuucuu

SEQ ID NO: 35858 - RNA, 22 nt, Human
ggccugcucuguuuagaggggg

SEQ ID NO: 35859 - RNA, 22 nt, Human
ggccugcugacccaaguccugu

SEQ ID NO: 35860 - RNA, 22 nt, Human
ggccugcugcagugugacaguu

SEQ ID NO: 35861 - RNA, 22 nt, Human
ggccugcuggcuccagcgcccg

SEQ ID NO: 35862 - RNA, 22 nt, Human
ggccugcuucucagugagcuug

SEQ ID NO: 35863 - RNA, 22 nt, Human
ggccuggacaccugaggucuua

SEQ ID NO: 35864 - RNA, 22 nt, Human
ggccuggagcagagacuaggga

SEQ ID NO: 35865 - RNA, 22 nt, Human
ggccuggagucagggaaagcaa

SEQ ID NO: 35866 - RNA, 22 nt, Human
ggccuggaguuuggggaauaga

SEQ ID NO: 35867 - RNA, 22 nt, Human
ggccuggcauggggacuaaggg

SEQ ID NO: 35868 - RNA, 22 nt, Human
ggccugggccuuuguguuuuga

SEQ ID NO: 35869 - RNA, 22 nt, Human
ggccuguccagccugccuggcu

SEQ ID NO: 35870 - RNA, 22 nt, Human
ggccugucucacccccgggugc

SEQ ID NO: 35871 - RNA, 22 nt, Human
ggccugugagaaucaaggaaaa

SEQ ID NO: 35872 - RNA, 22 nt, Human
ggccugugagcccuugcaugua

SEQ ID NO: 35873 - RNA, 22 nt, Human
ggccugugagccuuaguuuaua

SEQ ID NO: 35874 - RNA, 22 nt, Human
ggccuguggcuuuggcgucuaa

SEQ ID NO: 35875 - RNA, 22 nt, Human
ggccuguguccuccuugcccug

SEQ ID NO: 35876 - RNA, 23 nt, Human
ggccuguguuuugucugaaguac

SEQ ID NO: 35877 - RNA, 22 nt, Human
ggccuuagcggucauagcaaag

SEQ ID NO: 35878 - RNA, 22 nt, Human
ggccuuaggcucaacaggcaga

SEQ ID NO: 35879 - RNA, 22 nt, Human
gacagcaaccucaugagaaacu

SEQ ID NO: 35880 - RNA, 22 nt, Human
gacagcaagagacagagcaucc

SEQ ID NO: 35881 - RNA, 22 nt, Human
gacagcagacagaacuaccugc

SEQ ID NO: 35882 - RNA, 22 nt, Human
gacagcagaugaagccugcaga

SEQ ID NO: 35883 - RNA, 22 nt, Human
gacagcagcauaauacaugaac

SEQ ID NO: 35884 - RNA, 22 nt, Human
gacagcaugagagaugccagug

SEQ ID NO: 35885 - RNA, 22 nt, Human
gacagccaggucugaugaccca

SEQ ID NO: 35886 - RNA, 22 nt, Human
gacagcugaaggaugauucagg

SEQ ID NO: 35887 - RNA, 22 nt, Human
gacagcuggcaguggaaaggug

SEQ ID NO: 35888 - RNA, 18 nt, Human
gacagcuguccugagccc

SEQ ID NO: 35889 - RNA, 22 nt, Human
gacagcugugcaggagaagggg

SEQ ID NO: 35890 - RNA, 22 nt, Human
gacagcuuaggaaguuucuauu

SEQ ID NO: 35891 - RNA, 22 nt, Human
gacaggaaauauggggguuguu

SEQ ID NO: 35892 - RNA, 19 nt, Human
gacaggaaggcuaccagua

SEQ ID NO: 35893 - RNA, 22 nt, Human
gacaggauauuaugauagauuc

SEQ ID NO: 35894 - RNA, 21 nt, Human
gacaggcaaggagucacuuag

SEQ ID NO: 35895 - RNA, 22 nt, Human
gacaggcaggccagggcugugg

SEQ ID NO: 35896 - RNA, 22 nt, Human
gacaggcuagguugcuguccuc

SEQ ID NO: 35897 - RNA, 22 nt, Human
gacaggcuauuuucuuacgggu

SEQ ID NO: 35898 - RNA, 22 nt, Human
gacagggacgaggcuucaggca

SEQ ID NO: 35899 - RNA, 22 nt, Human
gacagggaggaaagagacugcu

SEQ ID NO: 35900 - RNA, 22 nt, Human
gacaggguuugcaaggacuucg

SEQ ID NO: 35901 - RNA, 21 nt, Human
gacaggugauucagagcaggg

SEQ ID NO: 35902 - RNA, 18 nt, Human
gacaggugggugagacca

SEQ ID NO: 35903 - RNA, 22 nt, Human
gacagguguguguauauuaggg

SEQ ID NO: 35904 - RNA, 22 nt, Human
gacagguugaaguaucaaaggu

SEQ ID NO: 35905 - RNA, 22 nt, Human
gacaguaagaccuuaccagccu

SEQ ID NO: 35906 - RNA, 22 nt, Human
gacaguaagagugucuggguuc

SEQ ID NO: 35907 - RNA, 22 nt, Human
gacaguaagucagagacuuggu

SEQ ID NO: 35908 - RNA, 22 nt, Human
gacaguacagguagaagucacu

SEQ ID NO: 35909 - RNA, 22 nt, Human
gacagucacuuccaggagagga

SEQ ID NO: 35910 - RNA, 22 nt, Human
gacaguccuugcccaguaucua

SEQ ID NO: 35911 - RNA, 22 nt, Human
gacaguggaaugacccuuugag

SEQ ID NO: 35912 - RNA, 22 nt, Human
gacagugguguuuuccauugca

SEQ ID NO: 35913 - RNA, 22 nt, Human
gacaguguuacaauuuaaugga

SEQ ID NO: 35914 - RNA, 22 nt, Human
gacaguguuuguauaauuccug

SEQ ID NO: 35915 - RNA, 22 nt, Human
gacaguuuugcuaaaagguuga

SEQ ID NO: 35916 - RNA, 22 nt, Human
gacaguuuuuaauccuuucaug

SEQ ID NO: 35917 - RNA, 22 nt, Human
gacauauacuauggaugguucu

SEQ ID NO: 35918 - RNA, 22 nt, Human
gacauauuugaaaccaagagaa

SEQ ID NO: 35919 - RNA, 22 nt, Human
gacaucaauauucugcagggau

SEQ ID NO: 35920 - RNA, 20 nt, Human
gacaucauguacacauugcc

SEQ ID NO: 35921 - RNA, 21 nt, Human
gacauccaugugaguggcagu

SEQ ID NO: 35922 - RNA, 23 nt, Human
gacaucuguuuugucccugugcu

SEQ ID NO: 35923 - RNA, 22 nt, Human
gacaugauggaaaaaaaugcuc

SEQ ID NO: 35924 - RNA, 22 nt, Human
gacuuauucacgcagcuauacu

SEQ ID NO: 35925 - RNA, 22 nt, Human
gacuucaaaagcugacauucau

SEQ ID NO: 35926 - RNA, 22 nt, Human
gacuucauaauauugagcaugu

SEQ ID NO: 35927 - RNA, 22 nt, Human
gacuucaugacauucaggucag

SEQ ID NO: 35928 - RNA, 22 nt, Human
gacuuccuaagauucaggaaug

SEQ ID NO: 35929 - RNA, 22 nt, Human
gacuucugccucaggggaaggu

SEQ ID NO: 35930 - RNA, 22 nt, Human
gacuucuguuaacuuguaagag

SEQ ID NO: 35931 - RNA, 22 nt, Human
gacuucuucaugucuuuuccac

SEQ ID NO: 35932 - RNA, 22 nt, Human
gacuugggggcuuuggauaggc

SEQ ID NO: 35933 - RNA, 21 nt, Human
gacuuuaauuugagagcaaaa

SEQ ID NO: 35934 - RNA, 20 nt, Human
gacuuuacaucagcacucuu

SEQ ID NO: 35935 - RNA, 22 nt, Human
gacuuuauuauaguggcaauag

SEQ ID NO: 35936 - RNA, 22 nt, Human
gacuuucugagucaaagaaagg

SEQ ID NO: 35937 - RNA, 22 nt, Human
gacuuucugcuauacuuucugu

SEQ ID NO: 35938 - RNA, 22 nt, Human
gacuuucuuuuaccucaaggau

SEQ ID NO: 35939 - RNA, 22 nt, Human
gacuuugcccuaaugaggucuc

SEQ ID NO: 35940 - RNA, 22 nt, Human
gacuuugcugugucagcuucag

SEQ ID NO: 35941 - RNA, 22 nt, Human
gacuuuggagcagaaagaaauu

SEQ ID NO: 35942 - RNA, 22 nt, Human
gacuuuggcaucuagacauugu

SEQ ID NO: 35943 - RNA, 22 nt, Human
gacuuugguuugagcaagucag

SEQ ID NO: 35944 - RNA, 22 nt, Human
gagaaaaucuugggucaagaau

SEQ ID NO: 35945 - RNA, 22 nt, Human
gagaaaaugucagacuuggucg

SEQ ID NO: 35946 - RNA, 22 nt, Human
gagaaacacuguuaguuuauua

SEQ ID NO: 35947 - RNA, 22 nt, Human
gagaaaccgauucugcauguca

SEQ ID NO: 35948 - RNA, 23 nt, Human
gagaaaccucgguaagcaggagg

SEQ ID NO: 35949 - RNA, 22 nt, Human
gagaaaccuguaaggaaggaag

SEQ ID NO: 35950 - RNA, 22 nt, Human
gagaaacuguuggaauuuuaau

SEQ ID NO: 35951 - RNA, 22 nt, Human
gagaaagggaacuuacagagug

SEQ ID NO: 35952 - RNA, 22 nt, Human
gagaaauaggcaaugguaucua

SEQ ID NO: 35953 - RNA, 22 nt, Human
gagaaaugcaugcaugucauca

SEQ ID NO: 35954 - RNA, 22 nt, Human
gagaacaaggaagagucggcag

SEQ ID NO: 35955 - RNA, 22 nt, Human
gagaacuucaggauuauucaag

SEQ ID NO: 35956 - RNA, 22 nt, Human
gagaacuugaacuuuuccucug

SEQ ID NO: 35957 - RNA, 22 nt, Human
gagaacuuucuguguuuuuauc

SEQ ID NO: 35958 - RNA, 22 nt, Human
gagaagaaaauuccgugaacac

SEQ ID NO: 35959 - RNA, 22 nt, Human
gagaagaacuugggcaaaguca

SEQ ID NO: 35960 - RNA, 22 nt, Human
gagaagacgugauggccaagaa

SEQ ID NO: 35961 - RNA, 16 nt, Human
gagaagagcccggcag

SEQ ID NO: 35962 - RNA, 22 nt, Human
gagaagcucuagagguguuuuu

SEQ ID NO: 35963 - RNA, 22 nt, Human
gagaagcuggacuuuccaaacu

SEQ ID NO: 35964 - RNA, 22 nt, Human
gagaaggagcuccuuggggucu

SEQ ID NO: 35965 - RNA, 22 nt, Human
gagaaggaugaggaaaugguau

SEQ ID NO: 35966 - RNA, 22 nt, Human
gagaaggcugauccuuggaguu

SEQ ID NO: 35967 - RNA, 22 nt, Human
gagaaggcuggucuuaagucga

SEQ ID NO: 35968 - RNA, 18 nt, Human
gagaagugcauacauuau

SEQ ID NO: 35969 - RNA, 22 nt, Human
gagaaguuagcucuguuuaggu

SEQ ID NO: 35970 - RNA, 22 nt, Human
gagaaguuuggagugaagguuu

SEQ ID NO: 35971 - RNA, 22 nt, Human
gagaauauuagaguuaguuuau

SEQ ID NO: 35972 - RNA, 22 nt, Human
gagaauauuuuuagcuuuccuc

SEQ ID NO: 35973 - RNA, 22 nt, Human
gagaaucauggcaacagaauga

SEQ ID NO: 35974 - RNA, 22 nt, Human
gagaaucauuuacagaaugauu

SEQ ID NO: 35975 - RNA, 22 nt, Human
gagaaucuccagaugaaguccu

SEQ ID NO: 35976 - RNA, 22 nt, Human
gagaauuacuguuuuuauaaca

SEQ ID NO: 35977 - RNA, 22 nt, Human
gagaauuucccagucugugcug

SEQ ID NO: 35978 - RNA, 22 nt, Human
gagacaaagcuuccugugggua

SEQ ID NO: 35979 - RNA, 22 nt, Human
gagacacacauucuggagagaa

SEQ ID NO: 35980 - RNA, 22 nt, Human
gagacacacccaagguuaugag

SEQ ID NO: 35981 - RNA, 22 nt, Human
gagacacagagaggcuguguga

SEQ ID NO: 35982 - RNA, 22 nt, Human
gagacacagcagauauucaauc

SEQ ID NO: 35983 - RNA, 22 nt, Human
gagacacaggcacagaagaggc

SEQ ID NO: 35984 - RNA, 22 nt, Human
gagacacuugcugugaggucgc

SEQ ID NO: 35985 - RNA, 22 nt, Human
gagacagagagguacucaacau

SEQ ID NO: 35986 - RNA, 22 nt, Human
gagacagagaucuugcugaguc

SEQ ID NO: 35987 - RNA, 22 nt, Human
gagacagaugcugcuggagcau

SEQ ID NO: 35988 - RNA, 22 nt, Human
gagacagcacaggccacuggga

SEQ ID NO: 35989 - RNA, 17 nt, Human
gagacagcaggagcccc

SEQ ID NO: 35990 - RNA, 21 nt, Human
gagacagcccagugccagggc

SEQ ID NO: 35991 - RNA, 22 nt, Human
gagacagccuacuccagucuca

SEQ ID NO: 35992 - RNA, 22 nt, Human
gagacaggauuuaaccaaagcu

SEQ ID NO: 35993 - RNA, 22 nt, Human
gagaccaggaaguacagcagcc

SEQ ID NO: 35994 - RNA, 22 nt, Human
gagaccucuugguaucgcuagg

SEQ ID NO: 35995 - RNA, 22 nt, Human
gagacucuugcuuuaauagccc

SEQ ID NO: 35996 - RNA, 22 nt, Human
gagacugcauagauggccacaa

SEQ ID NO: 35997 - RNA, 22 nt, Human
ggccuuagugagguccugaugc

SEQ ID NO: 35998 - RNA, 22 nt, Human
ggccuuccugcugcuccgggcc

SEQ ID NO: 35999 - RNA, 19 nt, Human
ggccuugcucuguggcagc

SEQ ID NO: 36000 - RNA, 22 nt, Human
ggccuugcuuggguuauaugcc

SEQ ID NO: 36001 - RNA, 22 nt, Human
ggccuuggauccaagcugcggc

SEQ ID NO: 36002 - RNA, 22 nt, Human
ggccuuggccuagcccuccagg

SEQ ID NO: 36003 - RNA, 22 nt, Human
ggccuugggaggagggucagaa

SEQ ID NO: 36004 - RNA, 22 nt, Human
ggccuuggggaggauggugucc

SEQ ID NO: 36005 - RNA, 22 nt, Human
ggccuugguaaagggaugcaug

SEQ ID NO: 36006 - RNA, 22 nt, Human
ggccuugguaaugggggacugu

SEQ ID NO: 36007 - RNA, 22 nt, Human
ggccuugguacuguaaaccgag

SEQ ID NO: 36008 - RNA, 22 nt, Human
ggccuugguuccaaagcaggca

SEQ ID NO: 36009 - RNA, 22 nt, Human
ggcgagcagcgcugugucaggu

SEQ ID NO: 36010 - RNA, 22 nt, Human
ggcgaggccgggacaggcugga

SEQ ID NO: 36011 - RNA, 22 nt, Human
ggcgcacaaugugcagguuugu

SEQ ID NO: 36012 - RNA, 22 nt, Human
ggcgccagcgguaaguaagaca

SEQ ID NO: 36013 - RNA, 22 nt, Human
ggcgcccaucggugcagagggc

SEQ ID NO: 36014 - RNA, 22 nt, Human
ggcggcccugcacgugcugagg

SEQ ID NO: 36015 - RNA, 22 nt, Human
ggcggcuuauucacucugggga

SEQ ID NO: 36016 - RNA, 22 nt, Human
ggcgggagcagcagcucugagc

SEQ ID NO: 36017 - RNA, 22 nt, Human
ggcggguggcgaggcuucucgg

SEQ ID NO: 36018 - RNA, 18 nt, Human
ggcggguguuuuauucac

SEQ ID NO: 36019 - RNA, 22 nt, Human
ggcgugggaaguggggcuucug

SEQ ID NO: 36020 - RNA, 22 nt, Human
ggcguuucaccauguugaccag

SEQ ID NO: 36021 - RNA, 22 nt, Human
ggcuacagggccuggccaaggu

SEQ ID NO: 36022 - RNA, 22 nt, Human
ggcuacaguggcucagugcugg

SEQ ID NO: 36023 - RNA, 22 nt, Human
ggcuaccagauaaauuacagag

SEQ ID NO: 36024 - RNA, 22 nt, Human
ggcuacuagacuuugauacuag

SEQ ID NO: 36025 - RNA, 22 nt, Human
ggcuacuagguaccauuuagaa

SEQ ID NO: 36026 - RNA, 22 nt, Human
ggcuagaaacucaggcaagaaa

SEQ ID NO: 36027 - RNA, 22 nt, Human
ggcuagaugguauauaaggaug

SEQ ID NO: 36028 - RNA, 22 nt, Human
ggcuagcuccuccgcgcaucca

SEQ ID NO: 36029 - RNA, 22 nt, Human
ggcuagcuuagagucaugcuag

SEQ ID NO: 36030 - RNA, 22 nt, Human
ggcuaggcucaccuggagaguu

SEQ ID NO: 36031 - RNA, 22 nt, Human
ggcuagggacuccuccucaggg

SEQ ID NO: 36032 - RNA, 22 nt, Human
ggcuauauccucacaagaugga

SEQ ID NO: 36033 - RNA, 22 nt, Human
gaggcucacuuucauccucuuc

SEQ ID NO: 36034 - RNA, 22 nt, Human
gaggcucagagggacuuucaag

SEQ ID NO: 36035 - RNA, 22 nt, Human
gaggcucagggaaacagcgcag

SEQ ID NO: 36036 - RNA, 22 nt, Human
gaggcucauugcauugugcauu

SEQ ID NO: 36037 - RNA, 22 nt, Human
gaggcuccauggaggaguaugg

SEQ ID NO: 36038 - RNA, 22 nt, Human
gaggcucccaaggggcuaggcc

SEQ ID NO: 36039 - RNA, 22 nt, Human
gaggcucccuuuagguccagau

SEQ ID NO: 36040 - RNA, 20 nt, Human
gaggcucugggcauggcgcc

SEQ ID NO: 36041 - RNA, 22 nt, Human
gaggcucuuuaaaucuuuugga

SEQ ID NO: 36042 - RNA, 22 nt, Human
gaggcugagacucugaauuuuu

SEQ ID NO: 36043 - RNA, 22 nt, Human
gaggcugagaguuuguucuacu

SEQ ID NO: 36044 - RNA, 22 nt, Human
gaggcugaggguuagagaguca

SEQ ID NO: 36045 - RNA, 22 nt, Human
gaggcugccaaugugugcaugu

SEQ ID NO: 36046 - RNA, 20 nt, Human
gaggcugcggacugcuggac

SEQ ID NO: 36047 - RNA, 22 nt, Human
gaggcugcggggaggagccugc

SEQ ID NO: 36048 - RNA, 22 nt, Human
gaggcugcugagagcccuguuu

SEQ ID NO: 36049 - RNA, 22 nt, Human
gaggcuggaauauuagaaaugu

SEQ ID NO: 36050 - RNA, 22 nt, Human
gaggcugggaaguccaagauca

SEQ ID NO: 36051 - RNA, 22 nt, Human
gaggcugguaggaaaggaaaca

SEQ ID NO: 36052 - RNA, 22 nt, Human
gaggcugguucccuugaucuuu

SEQ ID NO: 36053 - RNA, 22 nt, Human
gaggcugguuugccuuuuggca

SEQ ID NO: 36054 - RNA, 22 nt, Human
gaggcuguaaguguggagccua

SEQ ID NO: 36055 - RNA, 22 nt, Human
gaggcugugucuugggguggaa

SEQ ID NO: 36056 - RNA, 22 nt, Human
gaggcuguuagggccugaggua

SEQ ID NO: 36057 - RNA, 22 nt, Human
gaggcuucuggaaagccuggca

SEQ ID NO: 36058 - RNA, 22 nt, Human
gaggcuucuguaacccuguccu

SEQ ID NO: 36059 - RNA, 23 nt, Human
gaggcuugaucagcuuccuccac

SEQ ID NO: 36060 - RNA, 22 nt, Human
gagggaaacagauggguugugg

SEQ ID NO: 36061 - RNA, 22 nt, Human
gagggaagaaagaauugaugcg

SEQ ID NO: 36062 - RNA, 22 nt, Human
gagggaagauuccccauauggg

SEQ ID NO: 36063 - RNA, 22 nt, Human
gagggaagucauaauguucuag

SEQ ID NO: 36064 - RNA, 22 nt, Human
gagggacagcuaaagagaaauu

SEQ ID NO: 36065 - RNA, 22 nt, Human
gagggaccccaggcuggcccuu

SEQ ID NO: 36066 - RNA, 22 nt, Human
gagggaccuuuacacagacauu

SEQ ID NO: 36067 - RNA, 22 nt, Human
gagggaggcaucaugaauccag

SEQ ID NO: 36068 - RNA, 22 nt, Human
gagggagggaaaguuuaacacu

SEQ ID NO: 36069 - RNA, 22 nt, Human
gagggagggccaggucccaacc

SEQ ID NO: 36070 - RNA, 18 nt, Human
gagggaguagcugagguu

SEQ ID NO: 36071 - RNA, 22 nt, Human
gagggagugccagagggccagc

SEQ ID NO: 36072 - RNA, 22 nt, Human
gagggaugcagaaacagaggcc

SEQ ID NO: 36073 - RNA, 22 nt, Human
gagggaugugccugaaggcagg

SEQ ID NO: 36074 - RNA, 20 nt, Human
gagggcacauuguuccgugc

SEQ ID NO: 36075 - RNA, 22 nt, Human
gagggcaccagaagagccagau

SEQ ID NO: 36076 - RNA, 22 nt, Human
gagggcacuggguuucaauguc

SEQ ID NO: 36077 - RNA, 22 nt, Human
gagggcagagucuaaugaugca

SEQ ID NO: 36078 - RNA, 22 nt, Human
gagggccagaaaguuauugaga

SEQ ID NO: 36079 - RNA, 22 nt, Human
gagggccagaguccugggguca

SEQ ID NO: 36080 - RNA, 22 nt, Human
gagggccagaucccaggaggaa

SEQ ID NO: 36081 - RNA, 22 nt, Human
gagggccagccugccaagggcc

SEQ ID NO: 36082 - RNA, 22 nt, Human
gagggcccuggcuggcuccagc

SEQ ID NO: 36083 - RNA, 22 nt, Human
gagggccuagaagcuccauaug

SEQ ID NO: 36084 - RNA, 22 nt, Human
gagggccucugcugcuccacau

SEQ ID NO: 36085 - RNA, 22 nt, Human
gagggccuggcacagggaggcu

SEQ ID NO: 36086 - RNA, 22 nt, Human
gagggcgcuucagagagaugaa

SEQ ID NO: 36087 - RNA, 22 nt, Human
gagggcguucagucagugucuc

SEQ ID NO: 36088 - RNA, 22 nt, Human
gagggcucaacuacuacuaggc

SEQ ID NO: 36089 - RNA, 22 nt, Human
gagggcucugucuggaagggaa

SEQ ID NO: 36090 - RNA, 22 nt, Human
gagggcugaaguguuuuaugag

SEQ ID NO: 36091 - RNA, 22 nt, Human
gagggcugccacguugggcgag

SEQ ID NO: 36092 - RNA, 22 nt, Human
gagggcuggggcuuaggcuuag

SEQ ID NO: 36093 - RNA, 19 nt, Human
gagggcuugauggacccga

SEQ ID NO: 36094 - RNA, 22 nt, Human
gaggggaagacuucuggacagu

SEQ ID NO: 36095 - RNA, 22 nt, Human
gaggggaguaaagucauguuac

SEQ ID NO: 36096 - RNA, 22 nt, Human
gaggggcagaaugugaucaggg

SEQ ID NO: 36097 - RNA, 22 nt, Human
gaggggcaggauuauugggauu

SEQ ID NO: 36098 - RNA, 22 nt, Human
gaggggcagugcacccgggccc

SEQ ID NO: 36099 - RNA, 22 nt, Human
gaggggccggcaugugccucuc

SEQ ID NO: 36100 - RNA, 22 nt, Human
gaggggcuguggagcucucugg

SEQ ID NO: 36101 - RNA, 22 nt, Human
gaggggcuugaggcccugaugg

SEQ ID NO: 36102 - RNA, 22 nt, Human
gagggggacguauccugguaug

SEQ ID NO: 36103 - RNA, 22 nt, Human
gagggggcucccugaagccagu

SEQ ID NO: 36104 - RNA, 22 nt, Human
gagggggcucugccaaccuguc

SEQ ID NO: 36105 - RNA, 22 nt, Human
gagggguccugccuuggcugga

SEQ ID NO: 36106 - RNA, 22 nt, Human
gagggguggcccuggcguguac

SEQ ID NO: 36107 - RNA, 22 nt, Human
gagggucccugcucagggccag

SEQ ID NO: 36108 - RNA, 22 nt, Human
gagggugcaggcaagagcaaaa

SEQ ID NO: 36109 - RNA, 22 nt, Human
gaggguggaaaggguguaccug

SEQ ID NO: 36110 - RNA, 22 nt, Human
gaggguggccuuuagagcccau

SEQ ID NO: 36111 - RNA, 22 nt, Human
gaggguggcuccucccugggcc

SEQ ID NO: 36112 - RNA, 22 nt, Human
gagggugggccagauaugaggg

SEQ ID NO: 36113 - RNA, 22 nt, Human
gagggugucuggaugcuagacu

SEQ ID NO: 36114 - RNA, 22 nt, Human
gaggguuggugcaaaugggaug

SEQ ID NO: 36115 - RNA, 22 nt, Human
gagguaacacuguucagugggc

SEQ ID NO: 36116 - RNA, 22 nt, Human
gagguaauuacuauguucagau

SEQ ID NO: 36117 - RNA, 22 nt, Human
gagguacagaguguuccaaugu

SEQ ID NO: 36118 - RNA, 22 nt, Human
gagguacaugaggauacacagg

SEQ ID NO: 36119 - RNA, 22 nt, Human
gagguagcaugcuggaagggac

SEQ ID NO: 36120 - RNA, 22 nt, Human
gagguaggcugugaaagggggu

SEQ ID NO: 36121 - RNA, 22 nt, Human
gagguauaguucuauuagauga

SEQ ID NO: 36122 - RNA, 22 nt, Human
gagguauggauaucuggagagg

SEQ ID NO: 36123 - RNA, 22 nt, Human
gagguauugacuaugggauggc

SEQ ID NO: 36124 - RNA, 22 nt, Human
gaggucaaggucaagagacaga

SEQ ID NO: 36125 - RNA, 22 nt, Human
gaggucaggcucaagcugggcc

SEQ ID NO: 36126 - RNA, 22 nt, Human
gaggucagucagaccaggguuu

SEQ ID NO: 36127 - RNA, 22 nt, Human
gaggucauuguugcauuaauug

SEQ ID NO: 36128 - RNA, 22 nt, Human
gagguccaacacaauggguguu

SEQ ID NO: 36129 - RNA, 22 nt, Human
gagguccauacagcuauucuac

SEQ ID NO: 36130 - RNA, 22 nt, Human
gagguccauuuucacauaugau

SEQ ID NO: 36131 - RNA, 22 nt, Human
gaggucugccuucaggagaguu

SEQ ID NO: 36132 - RNA, 22 nt, Human
gaggucuuagaagaaaaaucau

SEQ ID NO: 36133 - RNA, 22 nt, Human
gaggucuugucugauagggaaa

SEQ ID NO: 36134 - RNA, 22 nt, Human
gaggugagaagggggucagaug

SEQ ID NO: 36135 - RNA, 22 nt, Human
gaggugaguggggucuccaggg

SEQ ID NO: 36136 - RNA, 22 nt, Human
gaggugauuuucaaaagaacuu

SEQ ID NO: 36137 - RNA, 22 nt, Human
gaggugcugcuguacuucuugc

SEQ ID NO: 36138 - RNA, 22 nt, Human
gagguggaaggcaggaacaaau

SEQ ID NO: 36139 - RNA, 22 nt, Human
gagguggcgcgccaucccugcc

SEQ ID NO: 36140 - RNA, 22 nt, Human
gagguggcuccaggagcaaugc

SEQ ID NO: 36141 - RNA, 22 nt, Human
gagguggcuccuucagggaaua

SEQ ID NO: 36142 - RNA, 22 nt, Human
gggaucuugaaacagcuggauu

SEQ ID NO: 36143 - RNA, 22 nt, Human
gggaucuuucugaugcuguggc

SEQ ID NO: 36144 - RNA, 22 nt, Human
gggaugaauugagucagaaggg

SEQ ID NO: 36145 - RNA, 22 nt, Human
gggaugacuacuuaugggaagu

SEQ ID NO: 36146 - RNA, 19 nt, Human
gggaugcacucugaccacu

SEQ ID NO: 36147 - RNA, 22 nt, Human
gggauggaggguagagcaagug

SEQ ID NO: 36148 - RNA, 22 nt, Human
gggauggggggaagcguccaug

SEQ ID NO: 36149 - RNA, 22 nt, Human
gggauggggucgggacccugcu

SEQ ID NO: 36150 - RNA, 22 nt, Human
gggaugucguggguggcagcug

SEQ ID NO: 36151 - RNA, 22 nt, Human
gggauugaauugggggaucaca

SEQ ID NO: 36152 - RNA, 22 nt, Human
gggauuugugggauggccagug

SEQ ID NO: 36153 - RNA, 22 nt, Human
gggcaaagugguggaggcaguu

SEQ ID NO: 36154 - RNA, 22 nt, Human
gggcaagcacagcgagcgugcg

SEQ ID NO: 36155 - RNA, 22 nt, Human
gggcaagcagugaggacagcac

SEQ ID NO: 36156 - RNA, 22 nt, Human
gggcaauuaaggucccguuucc

SEQ ID NO: 36157 - RNA, 22 nt, Human
gggcacagaagucuaagacauc

SEQ ID NO: 36158 - RNA, 22 nt, Human
gggcacaugcuuagggaggaaa

SEQ ID NO: 36159 - RNA, 22 nt, Human
gggcacuggaaggcucucaggc

SEQ ID NO: 36160 - RNA, 18 nt, Human
gggcacuggggacuggag

SEQ ID NO: 36161 - RNA, 22 nt, Human
gggcacuguacacugugcaugg

SEQ ID NO: 36162 - RNA, 22 nt, Human
gggcacuguguucagagugcag

SEQ ID NO: 36163 - RNA, 22 nt, Human
gggcacuuaaugggcacagaga

SEQ ID NO: 36164 - RNA, 22 nt, Human
gggcacuucuaagcauggggcu

SEQ ID NO: 36165 - RNA, 22 nt, Human
gggcagacugguuauacacggg

SEQ ID NO: 36166 - RNA, 22 nt, Human
gggcagagagcuggaacuccuu

SEQ ID NO: 36167 - RNA, 20 nt, Human
gggcagcaagacauuugaca

SEQ ID NO: 36168 - RNA, 22 nt, Human
gggcagcagaauuggacagaaa

SEQ ID NO: 36169 - RNA, 22 nt, Human
gggcagcagagcccugccgagu

SEQ ID NO: 36170 - RNA, 21 nt, Human
gggcagcagcagcaacaaggg

SEQ ID NO: 36171 - RNA, 22 nt, Human
gggcagcagcaggaggucucug

SEQ ID NO: 36172 - RNA, 22 nt, Human
gggcagcagccacucauuuagc

SEQ ID NO: 36173 - RNA, 22 nt, Human
gggcagcaggcuccacguuccu

SEQ ID NO: 36174 - RNA, 22 nt, Human
gggcagcaguugcccuaaucaa

SEQ ID NO: 36175 - RNA, 22 nt, Human
gggcagcaugucacuagcaugg

SEQ ID NO: 36176 - RNA, 22 nt, Human
gggcagccccagcgcguuggcu

SEQ ID NO: 36177 - RNA, 22 nt, Human
gggcagccugcuuucugaucca

SEQ ID NO: 36178 - RNA, 22 nt, Human
gggcagcuagcccucuagccca

SEQ ID NO: 36179 - RNA, 20 nt, Human
gggcagcuccccucauucug

SEQ ID NO: 36180 - RNA, 21 nt, Human
gggcagcucuguuuuauuuuc

SEQ ID NO: 36181 - RNA, 22 nt, Human
gggcagcugccagaggccaugg

SEQ ID NO: 36182 - RNA, 22 nt, Human
gggcagcuggauaguuuuaaau

SEQ ID NO: 36183 - RNA, 16 nt, Human
gggcaggaaucagggu

SEQ ID NO: 36184 - RNA, 22 nt, Human
gggcaggagagggccaccugga

SEQ ID NO: 36185 - RNA, 22 nt, Human
gggcaggaggcuaauucugcau

SEQ ID NO: 36186 - RNA, 22 nt, Human
gggcaggaugcaguuucagaga

SEQ ID NO: 36187 - RNA, 22 nt, Human
gggcagguacaagaugcuucuu

SEQ ID NO: 36188 - RNA, 22 nt, Human
gggcagguaggugaaauaauga

SEQ ID NO: 36189 - RNA, 15 nt, Human
gggcaggucuggggc

SEQ ID NO: 36190 - RNA, 22 nt, Human
gggcaggugaccucuuguccug

SEQ ID NO: 36191 - RNA, 22 nt, Human
gggcaggugauuuuggcuccau

SEQ ID NO: 36192 - RNA, 22 nt, Human
gggcaggugccagcucccuguc

SEQ ID NO: 36193 - RNA, 22 nt, Human
gggcaggugcccagggccagag

SEQ ID NO: 36194 - RNA, 22 nt, Human
gggcagguggagggcccagcca

SEQ ID NO: 36195 - RNA, 22 nt, Human
gggcagguuauuggaguaggga

SEQ ID NO: 36196 - RNA, 22 nt, Human
gggcaguagcuucguaggcauc

SEQ ID NO: 36197 - RNA, 22 nt, Human
gggcagugauuuuccuuagagg

SEQ ID NO: 36198 - RNA, 22 nt, Human
gggcagugguuacacagcugag

SEQ ID NO: 36199 - RNA, 22 nt, Human
gggcagugucgaggucuggucc

SEQ ID NO: 36200 - RNA, 23 nt, Human
gggcaguuauguuguccuuggcu

SEQ ID NO: 36201 - RNA, 19 nt, Human
gggcaucaaagugcuggug

SEQ ID NO: 36202 - RNA, 22 nt, Human
gggcaucuuguagccuucacuu

SEQ ID NO: 36203 - RNA, 22 nt, Human
gggcaugacuuuuggaguggga

SEQ ID NO: 36204 - RNA, 22 nt, Human
gggcaugagaggcaggcaagug

SEQ ID NO: 36205 - RNA, 22 nt, Human
gggcauggaggucugucugcag

SEQ ID NO: 36206 - RNA, 22 nt, Human
gggcauggcgugugcuggauuc

SEQ ID NO: 36207 - RNA, 22 nt, Human
gggcaugguggcaggcaccugu

SEQ ID NO: 36208 - RNA, 22 nt, Human
gggcauguaggaauccauggag

SEQ ID NO: 36209 - RNA, 21 nt, Human
gggccacaccuucugcagacc

SEQ ID NO: 36210 - RNA, 22 nt, Human
gggccacggaaggaccaguggg

SEQ ID NO: 36211 - RNA, 22 nt, Human
gggccagguaucgucuuuagua

SEQ ID NO: 36212 - RNA, 22 nt, Human
gggcccacuggcugucugaccc

SEQ ID NO: 36213 - RNA, 19 nt, Human
gggcccagcauggaggguu

SEQ ID NO: 36214 - RNA, 22 nt, Human
gggcccagcccucugcucacug

SEQ ID NO: 36215 - RNA, 22 nt, Human
gggcccaguacccucugccaag

SEQ ID NO: 36216 - RNA, 22 nt, Human
gggccccuuguaucucuggcuc

SEQ ID NO: 36217 - RNA, 22 nt, Human
gggcccugccuaaggaacacac

SEQ ID NO: 36218 - RNA, 22 nt, Human
gggcccuggacguggcggcaga

SEQ ID NO: 36219 - RNA, 22 nt, Human
gggcccuggauuuaagcaugga

SEQ ID NO: 36220 - RNA, 22 nt, Human
gggcccuggccgaaucccucug

SEQ ID NO: 36221 - RNA, 22 nt, Human
gggcccugggauucagagcaag

SEQ ID NO: 36222 - RNA, 22 nt, Human
gggcccugugauuucuugagga

SEQ ID NO: 36223 - RNA, 22 nt, Human
gggcccuucagcuuccucugca

SEQ ID NO: 36224 - RNA, 22 nt, Human
gggccggagcugggucccgcgc

SEQ ID NO: 36225 - RNA, 22 nt, Human
gggccucacuaugugguccagg

SEQ ID NO: 36226 - RNA, 22 nt, Human
gggccucagagauggucaguga

SEQ ID NO: 36227 - RNA, 22 nt, Human
gggccuccggggugagcugugg

SEQ ID NO: 36228 - RNA, 22 nt, Human
gggccucucccuucucacgcau

SEQ ID NO: 36229 - RNA, 22 nt, Human
gggccugaaaccuucagggcuu

SEQ ID NO: 36230 - RNA, 22 nt, Human
gggccugcagguucugagaggc

SEQ ID NO: 36231 - RNA, 22 nt, Human
gggccugcuccccaucgcugcu

SEQ ID NO: 36232 - RNA, 22 nt, Human
gggccuggcaugcagccccguu

SEQ ID NO: 36233 - RNA, 22 nt, Human
gggccuuccgacucccaaggcc

SEQ ID NO: 36234 - RNA, 22 nt, Human
gggccuuggcgaaguguggugg

SEQ ID NO: 36235 - RNA, 22 nt, Human
gggcgaggacugacucugggca

SEQ ID NO: 36236 - RNA, 22 nt, Human
gggcgccgugggaaacagccgg

SEQ ID NO: 36237 - RNA, 22 nt, Human
gggcgcgcacgccagacagccu

SEQ ID NO: 36238 - RNA, 18 nt, Human
gggcggaagggaagauaa

SEQ ID NO: 36239 - RNA, 19 nt, Human
gggcggagccugaccuggg

SEQ ID NO: 36240 - RNA, 22 nt, Human
gggcgugaccaucugggagcuc

SEQ ID NO: 36241 - RNA, 21 nt, Human
gggcuaagagugaccaggcag

SEQ ID NO: 36242 - RNA, 22 nt, Human
gggcuacagacaugcucuaagc

SEQ ID NO: 36243 - RNA, 22 nt, Human
gggcuagaaauucugcagugga

SEQ ID NO: 36244 - RNA, 22 nt, Human
gggcuagaauccgcgucucuug

SEQ ID NO: 36245 - RNA, 22 nt, Human
gauuucuuugaauuagagaggu

SEQ ID NO: 36246 - RNA, 22 nt, Human
gauuucuuugcaagcuguguuc

SEQ ID NO: 36247 - RNA, 22 nt, Human
gauuuuacaaacugcaggaccc

SEQ ID NO: 36248 - RNA, 22 nt, Human
gauuuuauauggcauacugugg

SEQ ID NO: 36249 - RNA, 22 nt, Human
gauuuucauuauagcuaguuuc

SEQ ID NO: 36250 - RNA, 22 nt, Human
gauuuucugagccuucaaauuu

SEQ ID NO: 36251 - RNA, 22 nt, Human
gauggggaugagaagugagcag

SEQ ID NO: 36252 - RNA, 22 nt, Human
gaugggggccagggccugcuuu

SEQ ID NO: 36253 - RNA, 18 nt, Human
gaugggguccaggcauag

SEQ ID NO: 36254 - RNA, 22 nt, Human
gaugggguuuugccaggcuggu

SEQ ID NO: 36255 - RNA, 22 nt, Human
gauggucaggucaucucaugga

SEQ ID NO: 36256 - RNA, 22 nt, Human
gauggucuguauuaaacagaug

SEQ ID NO: 36257 - RNA, 22 nt, Human
gauggucuuugucucugauaag

SEQ ID NO: 36258 - RNA, 22 nt, Human
gauggugcaauuaucgugcaug

SEQ ID NO: 36259 - RNA, 22 nt, Human
gaugguggcaagagccaagucu

SEQ ID NO: 36260 - RNA, 22 nt, Human
gauguaaacugggacuuccuag

SEQ ID NO: 36261 - RNA, 22 nt, Human
gauguacaagauuguaggaaug

SEQ ID NO: 36262 - RNA, 22 nt, Human
gauguacaaugucacuaugacc

SEQ ID NO: 36263 - RNA, 22 nt, Human
gauguacacucagaaaagucau

SEQ ID NO: 36264 - RNA, 22 nt, Human
gauguacaggaguuuuucaagg

SEQ ID NO: 36265 - RNA, 22 nt, Human
gauguacuugccuuaucuaucc

SEQ ID NO: 36266 - RNA, 22 nt, Human
gauguagacacuuggaggcuua

SEQ ID NO: 36267 - RNA, 22 nt, Human
gauguagcggcagcuguuuuuc

SEQ ID NO: 36268 - RNA, 22 nt, Human
gauguauauaccugguguggaa

SEQ ID NO: 36269 - RNA, 22 nt, Human
gauguccauuucaaaccucauu

SEQ ID NO: 36270 - RNA, 17 nt, Human
gauguccucuggacuac

SEQ ID NO: 36271 - RNA, 22 nt, Human
gauguccugcagaaacaugaga

SEQ ID NO: 36272 - RNA, 22 nt, Human
gaugucucugacuaaggcagug

SEQ ID NO: 36273 - RNA, 22 nt, Human
gaugucuggcuaccacucgcac

SEQ ID NO: 36274 - RNA, 22 nt, Human
gaugucuuaagcccagaaguuc

SEQ ID NO: 36275 - RNA, 20 nt, Human
gaugucuuggucacaguggc

SEQ ID NO: 36276 - RNA, 22 nt, Human
gaugucuuuagggcaaaauauu

SEQ ID NO: 36277 - RNA, 22 nt, Human
gaugucuuucuaauacuggcuu

SEQ ID NO: 36278 - RNA, 22 nt, Human
gaugucuuuuuccaggcucuuu

SEQ ID NO: 36279 - RNA, 22 nt, Human
gauguggcugccauggagccug

SEQ ID NO: 36280 - RNA, 22 nt, Human
gaugugucauuuggucaucugc

SEQ ID NO: 36281 - RNA, 22 nt, Human
gaugugucccuuucaacucaga

SEQ ID NO: 36282 - RNA, 22 nt, Human
gauguguccuaguacggguggg

SEQ ID NO: 36283 - RNA, 22 nt, Human
gaugugucuccauacaccaccc

SEQ ID NO: 36284 - RNA, 22 nt, Human
gaugugugugcccugggccugc

SEQ ID NO: 36285 - RNA, 22 nt, Human
gauguguuuguuucuggaggag

SEQ ID NO: 36286 - RNA, 22 nt, Human
gauguuaacuuguucugccucu

SEQ ID NO: 36287 - RNA, 22 nt, Human
gauguuaagaaggaauugaagu

SEQ ID NO: 36288 - RNA, 22 nt, Human
gauguucuuauaccauuguggg

SEQ ID NO: 36289 - RNA, 21 nt, Human
gauuaaauuuaagcuacaugc

SEQ ID NO: 36290 - RNA, 22 nt, Human
gauuagaauaugucagucauaa

SEQ ID NO: 36291 - RNA, 22 nt, Human
gauuagaauggauagaucccca

SEQ ID NO: 36292 - RNA, 22 nt, Human
gauuaggacauggauguauguu

SEQ ID NO: 36293 - RNA, 22 nt, Human
gauuaguaagaguuuaccuauu

SEQ ID NO: 36294 - RNA, 22 nt, Human
gauuauauaauggaagcucuug

SEQ ID NO: 36295 - RNA, 22 nt, Human
gauuauggagaaauaauuagaa

SEQ ID NO: 36296 - RNA, 22 nt, Human
gauuauggauggacaguggagc

SEQ ID NO: 36297 - RNA, 22 nt, Human
gauucaaaaauaagcuccuauu

SEQ ID NO: 36298 - RNA, 22 nt, Human
gauucaaaaguuugagcuccaa

SEQ ID NO: 36299 - RNA, 22 nt, Human
gauucaauguugcagauggaau

SEQ ID NO: 36300 - RNA, 22 nt, Human
gauucacaacugcccugaaggg

SEQ ID NO: 36301 - RNA, 22 nt, Human
gauucacaguuuaggcugggcu

SEQ ID NO: 36302 - RNA, 22 nt, Human
gauucagcuucugagcaguaau

SEQ ID NO: 36303 - RNA, 22 nt, Human
gauucaggccugcaucucagca

SEQ ID NO: 36304 - RNA, 22 nt, Human
gauucagugggcuuugggacag

SEQ ID NO: 36305 - RNA, 22 nt, Human
gauucauguuauagagagucag

SEQ ID NO: 36306 - RNA, 22 nt, Human
gauucccauccucagcagcagc

SEQ ID NO: 36307 - RNA, 22 nt, Human
gauucucucuggaucccaugga

SEQ ID NO: 36308 - RNA, 22 nt, Human
gauucucuuggauguaggcaua

SEQ ID NO: 36309 - RNA, 22 nt, Human
gauucuggcaaaauccuggcuu

SEQ ID NO: 36310 - RNA, 22 nt, Human
gauucuuaugagugaacuuuac

SEQ ID NO: 36311 - RNA, 22 nt, Human
gauucuugggccuucugaaguu

SEQ ID NO: 36312 - RNA, 22 nt, Human
gauucuuugacaggguguuggg

SEQ ID NO: 36313 - RNA, 22 nt, Human
gauucuuuggccuuuauugaca

SEQ ID NO: 36314 - RNA, 22 nt, Human
gauugaaacauaggcagucgag

SEQ ID NO: 36315 - RNA, 22 nt, Human
gauugaaagacuguuugggaga

SEQ ID NO: 36316 - RNA, 22 nt, Human
gauugaaaggaaaaccagagug

SEQ ID NO: 36317 - RNA, 22 nt, Human
gauugaaucauaugaaauugug

SEQ ID NO: 36318 - RNA, 22 nt, Human
gauugcugcaaucaacaaguau

SEQ ID NO: 36319 - RNA, 22 nt, Human
gauugcugugcgccccaggugu

SEQ ID NO: 36320 - RNA, 22 nt, Human
gauugcuuauacacaagaugaa

SEQ ID NO: 36321 - RNA, 22 nt, Human
gauugucugugaucaugagcaa

SEQ ID NO: 36322 - RNA, 22 nt, Human
gauuuaaaguagaccuuuguuu

SEQ ID NO: 36323 - RNA, 22 nt, Human
gauuuagagcaggaaugcaugg

SEQ ID NO: 36324 - RNA, 22 nt, Human
gauuuagauucgcuggggcugg

SEQ ID NO: 36325 - RNA, 21 nt, Human
gauuuauaagccuuaagccua

SEQ ID NO: 36326 - RNA, 22 nt, Human
gauuuauuggucuuucauuggu

SEQ ID NO: 36327 - RNA, 22 nt, Human
gauuuauugucccuguccugcu

SEQ ID NO: 36328 - RNA, 22 nt, Human
gauuucaaccuaacaguaugac

SEQ ID NO: 36329 - RNA, 22 nt, Human
gauuucaauccagcuuucuucu

SEQ ID NO: 36330 - RNA, 22 nt, Human
gauuucaccugaucuugucauc

SEQ ID NO: 36331 - RNA, 21 nt, Human
gauuucacuuaccuucauuua

SEQ ID NO: 36332 - RNA, 22 nt, Human
gauuuccucacuaacauccauc

SEQ ID NO: 36333 - RNA, 22 nt, Human
gauuucucaauccuaguacuau

SEQ ID NO: 36334 - RNA, 22 nt, Human
gauuucucacuguggauuuccu

SEQ ID NO: 36335 - RNA, 22 nt, Human
gauuucucauuuguggauugaa

SEQ ID NO: 36336 - RNA, 22 nt, Human
gauuucuucaggagcagaggag

SEQ ID NO: 36337 - RNA, 22 nt, Human
gauuucuucucucccaagagga

SEQ ID NO: 36338 - RNA, 22 nt, Human
gauuucuuggcccacucucaga

SEQ ID NO: 36339 - RNA, 21 nt, Human
gauuugcagaaacuagacagg

SEQ ID NO: 36340 - RNA, 22 nt, Human
gauuuguagcuuuucagucugu

SEQ ID NO: 36341 - RNA, 22 nt, Human
gauuuguaguuuuaugugucag

SEQ ID NO: 36342 - RNA, 22 nt, Human
gauuugugcucauuuuccauua

SEQ ID NO: 36343 - RNA, 22 nt, Human
gauuuguggugugaggaagagc

SEQ ID NO: 36344 - RNA, 22 nt, Human
gauuuuacaugucauaucuauu

SEQ ID NO: 36345 - RNA, 22 nt, Human
gauuuuaucgucauccuucugg

SEQ ID NO: 36346 - RNA, 22 nt, Human
gauuuucaugauaaacuuguga

SEQ ID NO: 36347 - RNA, 22 nt, Human
gauuuucauuugcacucuagaa

SEQ ID NO: 36348 - RNA, 22 nt, Human
gauuuugaauauuaaagaagag

SEQ ID NO: 36349 - RNA, 22 nt, Human
gauuuuuauauaaagugagaaa

SEQ ID NO: 36350 - RNA, 22 nt, Human
gauuuuucaguauaaaauauau

SEQ ID NO: 36351 - RNA, 22 nt, Human
gcaaaaaccacaauuacuuuua

SEQ ID NO: 36352 - RNA, 22 nt, Human
gcaaaacagucgaugccuccca

SEQ ID NO: 36353 - RNA, 22 nt, Human
gcaaaacucgcaauuacuuuug

SEQ ID NO: 36354 - RNA, 20 nt, Human
gcaaaauaggcucuguuggu

SEQ ID NO: 36355 - RNA, 22 nt, Human
gcaaacagaaaugcaggacgcu

SEQ ID NO: 36356 - RNA, 22 nt, Human
gcaaacauaauaugaagacacu

SEQ ID NO: 36357 - RNA, 22 nt, Human
gcaaacauccacugcccuugua

SEQ ID NO: 36358 - RNA, 22 nt, Human
gcaaacaugugcucauuuugug

SEQ ID NO: 36359 - RNA, 22 nt, Human
gcaaacauguugugagauacca

SEQ ID NO: 36360 - RNA, 22 nt, Human
gccuccugacuuacacugagcu

SEQ ID NO: 36361 - RNA, 22 nt, Human
gccuccugguugcuucuccaac

SEQ ID NO: 36362 - RNA, 21 nt, Human
gccucuccaaauccugccuuc

SEQ ID NO: 36363 - RNA, 22 nt, Human
gccucugcaggugcgguuaucc

SEQ ID NO: 36364 - RNA, 21 nt, Human
gccucugcugucuuauuguga

SEQ ID NO: 36365 - RNA, 22 nt, Human
gccucugggguuaauagaguuu

SEQ ID NO: 36366 - RNA, 22 nt, Human
gccucugggugacgaaagguga

SEQ ID NO: 36367 - RNA, 22 nt, Human
gccucuguggcucagccuugcu

SEQ ID NO: 36368 - RNA, 18 nt, Human
gccucuguugcuugccug

SEQ ID NO: 36369 - RNA, 22 nt, Human
gccugagaaggauaggaagcga

SEQ ID NO: 36370 - RNA, 22 nt, Human
gccugagauuggacauuauuua

SEQ ID NO: 36371 - RNA, 22 nt, Human
gccugagcuacuagggagucug

SEQ ID NO: 36372 - RNA, 22 nt, Human
gccugcaagauggcuggucacu

SEQ ID NO: 36373 - RNA, 20 nt, Human
gccugcagagaaggucagag

SEQ ID NO: 36374 - RNA, 22 nt, Human
gccugcagaggugcugcuagcu

SEQ ID NO: 36375 - RNA, 22 nt, Human
gccugcaggcuguaguuuguga

SEQ ID NO: 36376 - RNA, 22 nt, Human
gccugcagggugaugggcugcc

SEQ ID NO: 36377 - RNA, 22 nt, Human
gccugcagugagugcagaaggu

SEQ ID NO: 36378 - RNA, 22 nt, Human
gccugccagccacaguggcagc

SEQ ID NO: 36379 - RNA, 22 nt, Human
gccugccaugagcuaaugacac

SEQ ID NO: 36380 - RNA, 21 nt, Human
gccugcccucugugauggcca

SEQ ID NO: 36381 - RNA, 20 nt, Human
gccugccucagcuagcugag

SEQ ID NO: 36382 - RNA, 22 nt, Human
gccugccugcugugugcaaguu

SEQ ID NO: 36383 - RNA, 22 nt, Human
gccugccuguuggcugaggugc

SEQ ID NO: 36384 - RNA, 22 nt, Human
gccugccuucggugcgcagcgg

SEQ ID NO: 36385 - RNA, 22 nt, Human
gccugccuuuguaugacccuga

SEQ ID NO: 36386 - RNA, 22 nt, Human
gccugccuuugugaggaagcgg

SEQ ID NO: 36387 - RNA, 22 nt, Human
gccugcucugacauccauccca

SEQ ID NO: 36388 - RNA, 18 nt, Human
gccugcucugcucucccc

SEQ ID NO: 36389 - RNA, 22 nt, Human
gccugcugaaccucaugcaguc

SEQ ID NO: 36390 - RNA, 22 nt, Human
gccugcugagggaaguugggca

SEQ ID NO: 36391 - RNA, 21 nt, Human
gccugcugccuguggccgguc

SEQ ID NO: 36392 - RNA, 22 nt, Human
gccugcuggcuggaaauucucc

SEQ ID NO: 36393 - RNA, 23 nt, Human
gccugcuggucaccuaaucugcc

SEQ ID NO: 36394 - RNA, 22 nt, Human
gccugcuucacggacaggccuc

SEQ ID NO: 36395 - RNA, 22 nt, Human
gccuggaaauugaggcacaguu

SEQ ID NO: 36396 - RNA, 22 nt, Human
gccuggaagugugucgugggaa

SEQ ID NO: 36397 - RNA, 22 nt, Human
gccuggagaaaggaagguggga

SEQ ID NO: 36398 - RNA, 22 nt, Human
gccuggagaagauggaacuagc

SEQ ID NO: 36399 - RNA, 22 nt, Human
gccuggagaccugcuccucuac

SEQ ID NO: 36400 - RNA, 22 nt, Human
gccuggagagcacugugcgcuu

SEQ ID NO: 36401 - RNA, 22 nt, Human
gccuggagcuacuggacacuga

SEQ ID NO: 36402 - RNA, 20 nt, Human
gccuggaggcagagauaaag

SEQ ID NO: 36403 - RNA, 22 nt, Human
gccuggagggauagaaugcaag

SEQ ID NO: 36404 - RNA, 22 nt, Human
gccuggaguacuccuugaagug

SEQ ID NO: 36405 - RNA, 22 nt, Human
gccuggagugcaguggcgugau

SEQ ID NO: 36406 - RNA, 22 nt, Human
gccuggaguggacuuggccccu

SEQ ID NO: 36407 - RNA, 16 nt, Human
gccuggaguggcaggg

SEQ ID NO: 36408 - RNA, 22 nt, Human
gccuggagugguccugcugccc

SEQ ID NO: 36409 - RNA, 22 nt, Human
gccuggaguguugguauuucuc

SEQ ID NO: 36410 - RNA, 22 nt, Human
gccuggaucccagggagucagg

SEQ ID NO: 36411 - RNA, 22 nt, Human
gccuggauuacaaacagccaac

SEQ ID NO: 36412 - RNA, 22 nt, Human
gccuggcaauggccucaggaag

SEQ ID NO: 36413 - RNA, 20 nt, Human
gccuggcacccggggcuggc

SEQ ID NO: 36414 - RNA, 22 nt, Human
gccuggcaggccuguuggggcu

SEQ ID NO: 36415 - RNA, 22 nt, Human
gccuggcaggggccugggagug

SEQ ID NO: 36416 - RNA, 21 nt, Human
gccuggcagguggaagggcuc

SEQ ID NO: 36417 - RNA, 22 nt, Human
gccuggcagugaugucuuuugg

SEQ ID NO: 36418 - RNA, 22 nt, Human
gccuggcaguguaauuccuguc

SEQ ID NO: 36419 - RNA, 22 nt, Human
gccuggcauuacagcacuccug

SEQ ID NO: 36420 - RNA, 23 nt, Human
gccuggccaccccagggcugcuu

SEQ ID NO: 36421 - RNA, 21 nt, Human
gccuggcuagaagcuccuagc

SEQ ID NO: 36422 - RNA, 22 nt, Human
gccuggcuauggccucccccau

SEQ ID NO: 36423 - RNA, 22 nt, Human
gccuggcucgggcacucgccag

SEQ ID NO: 36424 - RNA, 21 nt, Human
gccuggcucucacuggccugg

SEQ ID NO: 36425 - RNA, 22 nt, Human
gccuggcucugaguuucucucc

SEQ ID NO: 36426 - RNA, 22 nt, Human
gccuggcugagguggggaggca

SEQ ID NO: 36427 - RNA, 22 nt, Human
gccuggcugcucagccacucac

SEQ ID NO: 36428 - RNA, 22 nt, Human
gccuggcugcuuagccuacuuc

SEQ ID NO: 36429 - RNA, 22 nt, Human
gccuggcugguagagggggcuc

SEQ ID NO: 36430 - RNA, 22 nt, Human
gccuggcugucaaacccagaag

SEQ ID NO: 36431 - RNA, 22 nt, Human
gccuggcuucccuuggagcauu

SEQ ID NO: 36432 - RNA, 22 nt, Human
gccuggcuuuugccucauguuc

SEQ ID NO: 36433 - RNA, 22 nt, Human
gccugggaaagaguagggaaau

SEQ ID NO: 36434 - RNA, 22 nt, Human
gccugggaacucugaucuccug

SEQ ID NO: 36435 - RNA, 22 nt, Human
gccugggacugcagauccccag

SEQ ID NO: 36436 - RNA, 23 nt, Human
gccugggacugguagugugaccu

SEQ ID NO: 36437 - RNA, 21 nt, Human
gccugggauaguggccuccgg

SEQ ID NO: 36438 - RNA, 22 nt, Human
gccugggauucccagaggggca

SEQ ID NO: 36439 - RNA, 22 nt, Human
gccugggauuguguaagugaau

SEQ ID NO: 36440 - RNA, 22 nt, Human
gccuggggucccuuguuggcac

SEQ ID NO: 36441 - RNA, 22 nt, Human
gccuggguaggagacaaaaggu

SEQ ID NO: 36442 - RNA, 22 nt, Human
gccuggguccacugaucaugcu

SEQ ID NO: 36443 - RNA, 23 nt, Human
gccugggucuagagauaagagcc

SEQ ID NO: 36444 - RNA, 22 nt, Human
gccugggucuccuccgcuuccc

SEQ ID NO: 36445 - RNA, 22 nt, Human
gccugggugcccaaugaugaga

SEQ ID NO: 36446 - RNA, 23 nt, Human
gccuggguuguaacuagugcauc

SEQ ID NO: 36447 - RNA, 22 nt, Human
gccuggucucuuucaugucagu

SEQ ID NO: 36448 - RNA, 22 nt, Human
gccuggugauaagcagugaccu

SEQ ID NO: 36449 - RNA, 22 nt, Human
gccuggugcuaugagggccagc

SEQ ID NO: 36450 - RNA, 22 nt, Human
gccugguguccagaggcgagug

SEQ ID NO: 36451 - RNA, 22 nt, Human
gccuguccuauacaggcggcug

SEQ ID NO: 36452 - RNA, 22 nt, Human
gccugucuacacuuucucugca

SEQ ID NO: 36453 - RNA, 22 nt, Human
gccugugaugcccccauaagua

SEQ ID NO: 36454 - RNA, 23 nt, Human
gccugugccuaugcccagcucug

SEQ ID NO: 36455 - RNA, 22 nt, Human
gccugugccucagccugcagcc

SEQ ID NO: 36456 - RNA, 22 nt, Human
gccuguggggcugaggcugccu

SEQ ID NO: 36457 - RNA, 20 nt, Human
gccugugucuucucugcugu

SEQ ID NO: 36458 - RNA, 22 nt, Human
gccuguguggaugcgccggugc

SEQ ID NO: 36459 - RNA, 22 nt, Human
gccuguuccuuaguggcuucac

SEQ ID NO: 36460 - RNA, 22 nt, Human
gccuguucugcccugagagccu

SEQ ID NO: 36461 - RNA, 22 nt, Human
gccuguuggugacuuucuguug

SEQ ID NO: 36462 - RNA, 22 nt, Human
gccuguuuggaaucuguuuaau

SEQ ID NO: 36463 - RNA, 22 nt, Human
gccuguuuggcaucauugguug

SEQ ID NO: 36464 - RNA, 22 nt, Human
gccuguuuggcugcugacauug

SEQ ID NO: 36465 - RNA, 22 nt, Human
gccuguuuuagaugcauugaug

SEQ ID NO: 36466 - RNA, 22 nt, Human
gccuguuuuccugcugugguug

SEQ ID NO: 36467 - RNA, 22 nt, Human
gccuuaauuuaugucuaacaua

SEQ ID NO: 36468 - RNA, 22 nt, Human
gccuuauuaccugcacuuugaa

SEQ ID NO: 36469 - RNA, 23 nt, Human
gcucagccucagcaggcccagga

SEQ ID NO: 36470 - RNA, 22 nt, Human
gcucagcuaucaguguuccuga

SEQ ID NO: 36471 - RNA, 18 nt, Human
gcucagcuaugggagguu

SEQ ID NO: 36472 - RNA, 22 nt, Human
gcucagcuggaccaucguguuu

SEQ ID NO: 36473 - RNA, 22 nt, Human
gcucagcuggagagggacgggu

SEQ ID NO: 36474 - RNA, 22 nt, Human
gcucagcugggaccaauguguu

SEQ ID NO: 36475 - RNA, 22 nt, Human
gcucaggacuggaggagcgggg

SEQ ID NO: 36476 - RNA, 23 nt, Human
gcucuaucaggaacaagccaggu

SEQ ID NO: 36477 - RNA, 21 nt, Human
gcucuaucaggccaaaauguc

SEQ ID NO: 36478 - RNA, 22 nt, Human
gcucuaugaaccugaaucucac

SEQ ID NO: 36479 - RNA, 22 nt, Human
gcucucagggugauggcauacu

SEQ ID NO: 36480 - RNA, 19 nt, Human
gcucucccucucaguugag

SEQ ID NO: 36481 - RNA, 22 nt, Human
gcucucugccauaugaggauac

SEQ ID NO: 36482 - RNA, 22 nt, Human
gcucucuggaagguaucauuau

SEQ ID NO: 36483 - RNA, 22 nt, Human
gcucucuugacagcuugcuguu

SEQ ID NO: 36484 - RNA, 22 nt, Human
gcucucuugguggcuguccugg

SEQ ID NO: 36485 - RNA, 22 nt, Human
gcucucuuuaaacugcauggcu

SEQ ID NO: 36486 - RNA, 22 nt, Human
gcucucuuucacagagguagga

SEQ ID NO: 36487 - RNA, 22 nt, Human
gcucucuuuccauguggaggau

SEQ ID NO: 36488 - RNA, 22 nt, Human
gcucucuuuuuccagugguggu

SEQ ID NO: 36489 - RNA, 22 nt, Human
gcucugaagggugagcuguucg

SEQ ID NO: 36490 - RNA, 22 nt, Human
gcucugacacauuuguucuacc

SEQ ID NO: 36491 - RNA, 22 nt, Human
gcucugacuuccugcgcuccag

SEQ ID NO: 36492 - RNA, 22 nt, Human
gcucugagaggaugcugagcag

SEQ ID NO: 36493 - RNA, 23 nt, Human
gcucugaggaaguugggcacggg

SEQ ID NO: 36494 - RNA, 22 nt, Human
gcucugaggaccaauuccugug

SEQ ID NO: 36495 - RNA, 22 nt, Human
gcucugaggcugggagcacucu

SEQ ID NO: 36496 - RNA, 23 nt, Human
gcucugagggcuuaucccuccca

SEQ ID NO: 36497 - RNA, 22 nt, Human
gcucugagucacacugcccugu

SEQ ID NO: 36498 - RNA, 22 nt, Human
gcucugagugaucagcugggaa

SEQ ID NO: 36499 - RNA, 17 nt, Human
gcucugccaggaaagag

SEQ ID NO: 36500 - RNA, 22 nt, Human
gcucugcccaaagcuguggcug

SEQ ID NO: 36501 - RNA, 22 nt, Human
gcucugcccagugcccugagac

SEQ ID NO: 36502 - RNA, 22 nt, Human
gcucugccuucucacuggguuc

SEQ ID NO: 36503 - RNA, 22 nt, Human
gcucugcuaauauuguaguacc

SEQ ID NO: 36504 - RNA, 19 nt, Human
gcucugcuacuauuaccac

SEQ ID NO: 36505 - RNA, 22 nt, Human
gcucugcucccucaaaugacau

SEQ ID NO: 36506 - RNA, 23 nt, Human
gcucugcucuguuucauagacag

SEQ ID NO: 36507 - RNA, 16 nt, Human
gcucugcugaggccca

SEQ ID NO: 36508 - RNA, 22 nt, Human
gcucugcugcuuacuagauggu

SEQ ID NO: 36509 - RNA, 22 nt, Human
gcucugcugggugggcaguuau

SEQ ID NO: 36510 - RNA, 22 nt, Human
gcucugcugucuucuugcaggc

SEQ ID NO: 36511 - RNA, 22 nt, Human
gcucuggagauggagccuugag

SEQ ID NO: 36512 - RNA, 23 nt, Human
gcucuggagcugggccuggcagg

SEQ ID NO: 36513 - RNA, 17 nt, Human
gcucuggcacaggauug

SEQ ID NO: 36514 - RNA, 22 nt, Human
gcucuggcacuggcgcgggaug

SEQ ID NO: 36515 - RNA, 22 nt, Human
gcucuggcuacuccacccuguu

SEQ ID NO: 36516 - RNA, 22 nt, Human
gcucuggcuaguuaccucuuac

SEQ ID NO: 36517 - RNA, 22 nt, Human
gcucugggaauucagaaagccu

SEQ ID NO: 36518 - RNA, 22 nt, Human
gcucugggccgggcaccagccu

SEQ ID NO: 36519 - RNA, 22 nt, Human
gcucugggcugaaucauuuauc

SEQ ID NO: 36520 - RNA, 22 nt, Human
gcucuggguagccacugccugg

SEQ ID NO: 36521 - RNA, 22 nt, Human
gcucugggugaacuuggagcaa

SEQ ID NO: 36522 - RNA, 20 nt, Human
gcucugggugguaaaugacu

SEQ ID NO: 36523 - RNA, 22 nt, Human
gcucugguagauccucaggcuc

SEQ ID NO: 36524 - RNA, 22 nt, Human
gcucuguaaagaagagaaaugc

SEQ ID NO: 36525 - RNA, 22 nt, Human
gcucuguacgcaggaugagggg

SEQ ID NO: 36526 - RNA, 21 nt, Human
gcucuguacguuggugccuuc

SEQ ID NO: 36527 - RNA, 22 nt, Human
gcucuguaguauuuaguaaaua

SEQ ID NO: 36528 - RNA, 22 nt, Human
gcucuguagugggcaugugauu

SEQ ID NO: 36529 - RNA, 22 nt, Human
gcucuguaucuuacaacagggu

SEQ ID NO: 36530 - RNA, 22 nt, Human
gcucugucuucagcacacagua

SEQ ID NO: 36531 - RNA, 22 nt, Human
gcucugugaaggguguugcuca

SEQ ID NO: 36532 - RNA, 22 nt, Human
gcucugugcaaauagcaccccu

SEQ ID NO: 36533 - RNA, 22 nt, Human
gcucugugcaguucagggacac

SEQ ID NO: 36534 - RNA, 22 nt, Human
gcucugugccacaugcaguguu

SEQ ID NO: 36535 - RNA, 22 nt, Human
gcucuguguaaauguagggucc

SEQ ID NO: 36536 - RNA, 22 nt, Human
gcucuguguauguggcaggugc

SEQ ID NO: 36537 - RNA, 21 nt, Human
gcucuguuauuuucuaugcag

SEQ ID NO: 36538 - RNA, 22 nt, Human
gcucuguuuaucccugacaauu

SEQ ID NO: 36539 - RNA, 22 nt, Human
gcucuugaggaagugcagggca

SEQ ID NO: 36540 - RNA, 22 nt, Human
gcucuugucaaaaauuaguuga

SEQ ID NO: 36541 - RNA, 22 nt, Human
gcucuuuggauuccuuuacaaa

SEQ ID NO: 36542 - RNA, 23 nt, Human
gcucuuuguucauguggaugccu

SEQ ID NO: 36543 - RNA, 22 nt, Human
gcugaaaggggugacauucuuu

SEQ ID NO: 36544 - RNA, 22 nt, Human
gcugaaaucccagcauucccca

SEQ ID NO: 36545 - RNA, 22 nt, Human
gcugaaaugcagaucccucacu

SEQ ID NO: 36546 - RNA, 22 nt, Human
gcugaaauucagauuccuaggc

SEQ ID NO: 36547 - RNA, 22 nt, Human
gcugaaauuggaaccugggccu

SEQ ID NO: 36548 - RNA, 22 nt, Human
gcugaagacaauggaauugacu

SEQ ID NO: 36549 - RNA, 22 nt, Human
gcugaagagaggccuugagcac

SEQ ID NO: 36550 - RNA, 22 nt, Human
gcugaagauaagugaagaggcu

SEQ ID NO: 36551 - RNA, 22 nt, Human
gcugaagauaggcauuucagca

SEQ ID NO: 36552 - RNA, 22 nt, Human
gcugaagcccacguggcuugua

SEQ ID NO: 36553 - RNA, 22 nt, Human
gcugaaggagccugggguggga

SEQ ID NO: 36554 - RNA, 22 nt, Human
gcugaaggaggcucugguacua

SEQ ID NO: 36555 - RNA, 22 nt, Human
gcugaagggagugcugagucug

SEQ ID NO: 36556 - RNA, 22 nt, Human
gcugaagguaugaguuuuaucu

SEQ ID NO: 36557 - RNA, 22 nt, Human
gcugaagguguguggagagagg

SEQ ID NO: 36558 - RNA, 22 nt, Human
gcugaaguccuaaucccaagua

SEQ ID NO: 36559 - RNA, 22 nt, Human
gcugaaguugaauauucuggga

SEQ ID NO: 36560 - RNA, 22 nt, Human
gcugaaguugccuauuuuaaua

SEQ ID NO: 36561 - RNA, 22 nt, Human
gcugaaguuuaugucuucuuuu

SEQ ID NO: 36562 - RNA, 22 nt, Human
gcugaaguuuugcagagaguaa

SEQ ID NO: 36563 - RNA, 22 nt, Human
gcugaauaagagucuacuuugc

SEQ ID NO: 36564 - RNA, 22 nt, Human
gcugaauacagcaugccuuaug

SEQ ID NO: 36565 - RNA, 20 nt, Human
gcugaccauaaaucacacug

SEQ ID NO: 36566 - RNA, 20 nt, Human
gcugaccccugcugucaugc

SEQ ID NO: 36567 - RNA, 22 nt, Human
gcugacucagaugcagcuggau

SEQ ID NO: 36568 - RNA, 22 nt, Human
gcugacugcucagggccagcug

SEQ ID NO: 36569 - RNA, 22 nt, Human
gcugacugguucaggucccgcu

SEQ ID NO: 36570 - RNA, 22 nt, Human
gcugacugguugcacagagggu

SEQ ID NO: 36571 - RNA, 22 nt, Human
gcugacuguccgcugcucccgg

SEQ ID NO: 36572 - RNA, 22 nt, Human
gcugagagaucaaggcaggauu

SEQ ID NO: 36573 - RNA, 22 nt, Human
gcugagagcacauagaaggggc

SEQ ID NO: 36574 - RNA, 22 nt, Human
gcugagagcaguguggccuuaa

SEQ ID NO: 36575 - RNA, 22 nt, Human
gcugagaggcacuaucuccgga

SEQ ID NO: 36576 - RNA, 22 nt, Human
gcugagaguguaggauguuuac

SEQ ID NO: 36577 - RNA, 22 nt, Human
gcugagaugucguuagauaucu

SEQ ID NO: 36578 - RNA, 22 nt, Human
ggaaugugcugacacgcgagag

SEQ ID NO: 36579 - RNA, 22 nt, Human
ggaauguuuuccagaccuagau

SEQ ID NO: 36580 - RNA, 22 nt, Human
ggaauguuuuucauugcucucu

SEQ ID NO: 36581 - RNA, 22 nt, Human
ggaauucucuaugcucuguucc

SEQ ID NO: 36582 - RNA, 22 nt, Human
ggacaaaacuucuugcauuucu

SEQ ID NO: 36583 - RNA, 19 nt, Human
ggacacagaaagcugcauu

SEQ ID NO: 36584 - RNA, 17 nt, Human
ggacacagcucauggcu

SEQ ID NO: 36585 - RNA, 23 nt, Human
ggacacauuuauuucagaauuca

SEQ ID NO: 36586 - RNA, 21 nt, Human
ggacaccagucacacuggauu

SEQ ID NO: 36587 - RNA, 22 nt, Human
ggacaccccggguaccaggucu

SEQ ID NO: 36588 - RNA, 22 nt, Human
ggacacuaaauggaagugucug

SEQ ID NO: 36589 - RNA, 22 nt, Human
ggacacuggccacauuucaaaa

SEQ ID NO: 36590 - RNA, 20 nt, Human
ggacacuguagauuucaaac

SEQ ID NO: 36591 - RNA, 22 nt, Human
ggacacuguauaaguuagagua

SEQ ID NO: 36592 - RNA, 22 nt, Human
ggacacuguucauggggagggg

SEQ ID NO: 36593 - RNA, 22 nt, Human
ggacagacaaaaauaguaagca

SEQ ID NO: 36594 - RNA, 22 nt, Human
ggacagagagugaauaugacau

SEQ ID NO: 36595 - RNA, 22 nt, Human
ggacagagcagacgagcagcgg

SEQ ID NO: 36596 - RNA, 21 nt, Human
ggacagaggagaaggcacccu

SEQ ID NO: 36597 - RNA, 22 nt, Human
ggacagcacagcucuugacaac

SEQ ID NO: 36598 - RNA, 22 nt, Human
ggacagcauaucagcagggcag

SEQ ID NO: 36599 - RNA, 22 nt, Human
ggacagcauuccuaguuccaaa

SEQ ID NO: 36600 - RNA, 22 nt, Human
ggacagcccauacacaugucug

SEQ ID NO: 36601 - RNA, 22 nt, Human
ggacagcuccugcacuugagua

SEQ ID NO: 36602 - RNA, 21 nt, Human
ggacagcugcgcgcagggcuc

SEQ ID NO: 36603 - RNA, 20 nt, Human
ggacaggaagacaaccuacc

SEQ ID NO: 36604 - RNA, 22 nt, Human
ggacaggauaagagacacugcc

SEQ ID NO: 36605 - RNA, 22 nt, Human
ggacaggcaggugauuuccaga

SEQ ID NO: 36606 - RNA, 23 nt, Human
ggacagggcccugcccuauggcc

SEQ ID NO: 36607 - RNA, 22 nt, Human
ggacaggugcaaagggcacaug

SEQ ID NO: 36608 - RNA, 22 nt, Human
ggacagguucagcaguuuauaa

SEQ ID NO: 36609 - RNA, 22 nt, Human
ggacagugaaucuggagguaua

SEQ ID NO: 36610 - RNA, 22 nt, Human
uacuuacacugaagcaaagaua

SEQ ID NO: 36611 - RNA, 22 nt, Human
uacuuacagagcuuauaaguua

SEQ ID NO: 36612 - RNA, 22 nt, Human
uacuuacaugaauucaagagca

SEQ ID NO: 36613 - RNA, 22 nt, Human
uacuuacauuagcaaacaaggu

SEQ ID NO: 36614 - RNA, 22 nt, Human
uacuuacauuucuguaaucggc

SEQ ID NO: 36615 - RNA, 22 nt, Human
uacuuagacucuaucuagagau

SEQ ID NO: 36616 - RNA, 22 nt, Human
uacuuagucuuucugaugaaau

SEQ ID NO: 36617 - RNA, 22 nt, Human
uacuuauuguugaacugaauca

SEQ ID NO: 36618 - RNA, 22 nt, Human
uacuucaaccuucucuauuaga

SEQ ID NO: 36619 - RNA, 22 nt, Human
uacuucauaccugcuagaaugg

SEQ ID NO: 36620 - RNA, 22 nt, Human
uacuucauuauucuaguuuuga

SEQ ID NO: 36621 - RNA, 22 nt, Human
uacuuccaggcggacaaagccc

SEQ ID NO: 36622 - RNA, 22 nt, Human
uacuucugcaccaaccuuaaua

SEQ ID NO: 36623 - RNA, 22 nt, Human
uacuucuguucuuaaaccaaga

SEQ ID NO: 36624 - RNA, 20 nt, Human
uacuugaauguugcagcagu

SEQ ID NO: 36625 - RNA, 22 nt, Human
uacuugccaucagaguuuauua

SEQ ID NO: 36626 - RNA, 22 nt, Human
uacuuguagcagguggcauuua

SEQ ID NO: 36627 - RNA, 22 nt, Human
uacuuguuaaaauauuagcuau

SEQ ID NO: 36628 - RNA, 22 nt, Human
uacuuguuaucccuuacucuug

SEQ ID NO: 36629 - RNA, 22 nt, Human
uacuuuacaguauuagauaauu

SEQ ID NO: 36630 - RNA, 22 nt, Human
uacuuuagaaggaaauaaguuc

SEQ ID NO: 36631 - RNA, 18 nt, Human
uacuuuauucccccucca

SEQ ID NO: 36632 - RNA, 22 nt, Human
uacuuuauuguaaaugcugaug

SEQ ID NO: 36633 - RNA, 22 nt, Human
uacuuucuguccuucuguuaaa

SEQ ID NO: 36634 - RNA, 22 nt, Human
uacuuucuuguuccuuucauaa

SEQ ID NO: 36635 - RNA, 22 nt, Human
uacuuugaagacaauaucugga

SEQ ID NO: 36636 - RNA, 21 nt, Human
uacuuugcaauguaucuccuu

SEQ ID NO: 36637 - RNA, 22 nt, Human
uacuuugcaugcuugugugauc

SEQ ID NO: 36638 - RNA, 22 nt, Human
uacuuuggauccuuacaauagc

SEQ ID NO: 36639 - RNA, 22 nt, Human
uacuuuggguuuagaauaaacu

SEQ ID NO: 36640 - RNA, 22 nt, Human
uacuuugguuaaugaaauguga

SEQ ID NO: 36641 - RNA, 22 nt, Human
uacuuuguccauuugcaggcag

SEQ ID NO: 36642 - RNA, 22 nt, Human
uacuuuuaugugaugaaaucug

SEQ ID NO: 36643 - RNA, 22 nt, Human
uacuuuucuguguggcagucac

SEQ ID NO: 36644 - RNA, 22 nt, Human
uacuuuuuagcacagugugugc

SEQ ID NO: 36645 - RNA, 22 nt, Human
uagaaaagaauuuuauuugaua

SEQ ID NO: 36646 - RNA, 22 nt, Human
uagaaacaaaaucugaugacuc

SEQ ID NO: 36647 - RNA, 22 nt, Human
uagaaacagaaaacuguaauag

SEQ ID NO: 36648 - RNA, 22 nt, Human
uagaaacauauguuugagacau

SEQ ID NO: 36649 - RNA, 22 nt, Human
uagaaacauguucuguucuguu

SEQ ID NO: 36650 - RNA, 22 nt, Human
uagaaacccugccuuaguagcu

SEQ ID NO: 36651 - RNA, 22 nt, Human
uagaaacuagauugauagcgga

SEQ ID NO: 36652 - RNA, 22 nt, Human
uagaaacucucaaucugggaug

SEQ ID NO: 36653 - RNA, 22 nt, Human
uagaaacucucacgagugaaac

SEQ ID NO: 36654 - RNA, 22 nt, Human
uagaaacugauagucuugugcu

SEQ ID NO: 36655 - RNA, 22 nt, Human
uagaaagaaauucagauuggcu

SEQ ID NO: 36656 - RNA, 22 nt, Human
uagaaagacaugggccagcagc

SEQ ID NO: 36657 - RNA, 22 nt, Human
uagaaagagcauaguauuauaa

SEQ ID NO: 36658 - RNA, 22 nt, Human
uagaaagaucuguaggcaagag

SEQ ID NO: 36659 - RNA, 19 nt, Human
uagaaagccagaaaacaga

SEQ ID NO: 36660 - RNA, 22 nt, Human
uagaaagcuugggguguuuaaa

SEQ ID NO: 36661 - RNA, 22 nt, Human
uagaaaggagcauuuuagacua

SEQ ID NO: 36662 - RNA, 22 nt, Human
uagaaaggauauugagaugaau

SEQ ID NO: 36663 - RNA, 22 nt, Human
uagaaagucaugaauuacacca

SEQ ID NO: 36664 - RNA, 22 nt, Human
uagaaagugguugagaguuuag

SEQ ID NO: 36665 - RNA, 22 nt, Human
uagaaauaaaucugcagcuggg

SEQ ID NO: 36666 - RNA, 22 nt, Human
uagaaaucagguuuuuagaaag

SEQ ID NO: 36667 - RNA, 22 nt, Human
uagaaaugauugagcuguaaua

SEQ ID NO: 36668 - RNA, 22 nt, Human
uagaaaugauuuugaugcuuca

SEQ ID NO: 36669 - RNA, 22 nt, Human
uagaaauggagaacagauuaau

SEQ ID NO: 36670 - RNA, 22 nt, Human
uagaaauggggaaguaguuagg

SEQ ID NO: 36671 - RNA, 22 nt, Human
uagaaauggguuacauuuagag

SEQ ID NO: 36672 - RNA, 22 nt, Human
uagaaaugucgucuccacauuu

SEQ ID NO: 36673 - RNA, 22 nt, Human
uagaaaugugauaauagcuuaa

SEQ ID NO: 36674 - RNA, 22 nt, Human
uagaacaaugaauuucuggagg

SEQ ID NO: 36675 - RNA, 22 nt, Human
uagaacaguauaggcuaaacau

SEQ ID NO: 36676 - RNA, 22 nt, Human
uagaacauaagucauucauuug

SEQ ID NO: 36677 - RNA, 22 nt, Human
uagaacaucagguugaauuugg

SEQ ID NO: 36678 - RNA, 23 nt, Human
uagaacaucggugucuuggagca

SEQ ID NO: 36679 - RNA, 22 nt, Human
uagaaccuauuagaaauguauu

SEQ ID NO: 36680 - RNA, 22 nt, Human
uagaaccucauaagaaucgaaa

SEQ ID NO: 36681 - RNA, 22 nt, Human
uagaacugacguuagggaagaa

SEQ ID NO: 36682 - RNA, 22 nt, Human
uagaacuuagcacuagacuugu

SEQ ID NO: 36683 - RNA, 22 nt, Human
uagaacuugagaucaggucuuc

SEQ ID NO: 36684 - RNA, 22 nt, Human
uagaacuuucagaaauuccaaa

SEQ ID NO: 36685 - RNA, 22 nt, Human
uagaagacaggaaauacaaacc

SEQ ID NO: 36686 - RNA, 22 nt, Human
uagaagaugccuuaaaguugaa

SEQ ID NO: 36687 - RNA, 22 nt, Human
uagcaaaguuuuguggugauua

SEQ ID NO: 36688 - RNA, 22 nt, Human
uagcaaaugucugaaggaauag

SEQ ID NO: 36689 - RNA, 21 nt, Human
uagcaaauugcuauuaaggca

SEQ ID NO: 36690 - RNA, 22 nt, Human
uagcaacaccaucuggugagaa

SEQ ID NO: 36691 - RNA, 22 nt, Human
uagcaacauaagaaacauuuug

SEQ ID NO: 36692 - RNA, 22 nt, Human
uagcaacgguaugcaaucuguc

SEQ ID NO: 36693 - RNA, 22 nt, Human
uagcaagaucgugucucuaaaa

SEQ ID NO: 36694 - RNA, 22 nt, Human
uagcaagcagauuagaagaucc

SEQ ID NO: 36695 - RNA, 22 nt, Human
uagcaaggacaacauaugagag

SEQ ID NO: 36696 - RNA, 22 nt, Human
uagcaaguggcaccacauuucu

SEQ ID NO: 36697 - RNA, 22 nt, Human
uagcaauguguguguauaaauu

SEQ ID NO: 36698 - RNA, 21 nt, Human
uagcaauuauagaugucuaaa

SEQ ID NO: 36699 - RNA, 22 nt, Human
uagcacaagaaguacacauaga

SEQ ID NO: 36700 - RNA, 22 nt, Human
uagcacacacugcaucuacaaa

SEQ ID NO: 36701 - RNA, 22 nt, Human
uagcacagcuucuugaugucac

SEQ ID NO: 36702 - RNA, 22 nt, Human
uagcacauacauaauagauaga

SEQ ID NO: 36703 - RNA, 22 nt, Human
uagcacauuguugaccagaagg

SEQ ID NO: 36704 - RNA, 22 nt, Human
uagcaccaauaugugcuuuuca

SEQ ID NO: 36705 - RNA, 22 nt, Human
uagcaccacaaucaagauacag

SEQ ID NO: 36706 - RNA, 22 nt, Human
uagcaccacuucaugcuuucag

SEQ ID NO: 36707 - RNA, 22 nt, Human
uagcaccauacccggcagcucg

SEQ ID NO: 36708 - RNA, 22 nt, Human
uagcacccaccucgugggguuu

SEQ ID NO: 36709 - RNA, 22 nt, Human
uagcaccggcagugguaggugc

SEQ ID NO: 36710 - RNA, 22 nt, Human
uagcaccuagaguauuuuauca

SEQ ID NO: 36711 - RNA, 22 nt, Human
uagcaccuuaacucugcugcgu

SEQ ID NO: 36712 - RNA, 22 nt, Human
uagcacuacuuagguacagcca

SEQ ID NO: 36713 - RNA, 22 nt, Human
uagcacuauuuuucacuauccu

SEQ ID NO: 36714 - RNA, 22 nt, Human
uagcacuguucuagcauguuuu

SEQ ID NO: 36715 - RNA, 22 nt, Human
uagcagaggaaaagagaacauu

SEQ ID NO: 36716 - RNA, 22 nt, Human
uagcagaguaauacuuuggagc

SEQ ID NO: 36717 - RNA, 22 nt, Human
uagcagcaaagcaggaucugcu

SEQ ID NO: 36718 - RNA, 22 nt, Human
uagcagcacagaaagccuggag

SEQ ID NO: 36719 - RNA, 22 nt, Human
uagcagcacuauuuguuguagu

SEQ ID NO: 36720 - RNA, 18 nt, Human
uagcagcacuggccgcuu

SEQ ID NO: 36721 - RNA, 22 nt, Human
uagcagcaggggaaacagcugu

SEQ ID NO: 36722 - RNA, 22 nt, Human
uagcagcauguaagugaguaga

SEQ ID NO: 36723 - RNA, 22 nt, Human
uagcagcccaguuucuggccaa

SEQ ID NO: 36724 - RNA, 22 nt, Human
uagcagcuaccuggcuaagagu

SEQ ID NO: 36725 - RNA, 22 nt, Human
gcugccugucccaggaugagga

SEQ ID NO: 36726 - RNA, 22 nt, Human
gcugccuguccugaggaguccg

SEQ ID NO: 36727 - RNA, 22 nt, Human
gcugccuuagagggagugguuc

SEQ ID NO: 36728 - RNA, 18 nt, Human
gcugccuucccagucaag

SEQ ID NO: 36729 - RNA, 22 nt, Human
gcugccuucuggaggaagugaa

SEQ ID NO: 36730 - RNA, 22 nt, Human
gcugccuucuucugacucuauu

SEQ ID NO: 36731 - RNA, 22 nt, Human
gcugccuugaacuuggccuggg

SEQ ID NO: 36732 - RNA, 22 nt, Human
gcugccuugguagugaccaucu

SEQ ID NO: 36733 - RNA, 22 nt, Human
gcugccuuugugagccaagggg

SEQ ID NO: 36734 - RNA, 22 nt, Human
gcugcuagggcauuaugauaaa

SEQ ID NO: 36735 - RNA, 22 nt, Human
gcugcucacugaaggacccugu

SEQ ID NO: 36736 - RNA, 22 nt, Human
gcugcuccgcagagugugugug

SEQ ID NO: 36737 - RNA, 21 nt, Human
gcugcucgagauccagugcuu

SEQ ID NO: 36738 - RNA, 22 nt, Human
gcugcucucauagauggcuuca

SEQ ID NO: 36739 - RNA, 19 nt, Human
gcugcucugggucucaucu

SEQ ID NO: 36740 - RNA, 22 nt, Human
gcugcucuugaggggcucacug

SEQ ID NO: 36741 - RNA, 22 nt, Human
gcugcucuuuucagagaugaga

SEQ ID NO: 36742 - RNA, 20 nt, Human
gcugcugagcuucccugggg

SEQ ID NO: 36743 - RNA, 22 nt, Human
gcugcugccuguagccagggug

SEQ ID NO: 36744 - RNA, 22 nt, Human
gcugcuggaugcgcuugauggu

SEQ ID NO: 36745 - RNA, 22 nt, Human
gcugcuggcacuggagugagcc

SEQ ID NO: 36746 - RNA, 22 nt, Human
gcugcuggccccacaugcucca

SEQ ID NO: 36747 - RNA, 22 nt, Human
gcugcuggccgcccagcuucuc

SEQ ID NO: 36748 - RNA, 22 nt, Human
gcugcuggcgcugggcguccgg

SEQ ID NO: 36749 - RNA, 22 nt, Human
gcugcugggggaacaguuaaaa

SEQ ID NO: 36750 - RNA, 22 nt, Human
gcugcugggguggagaaacgcu

SEQ ID NO: 36751 - RNA, 22 nt, Human
gcugcugucuggucugagggcu

SEQ ID NO: 36752 - RNA, 21 nt, Human
gcugcugugggccagggaggc

SEQ ID NO: 36753 - RNA, 22 nt, Human
gcugcuguguucucuugaccca

SEQ ID NO: 36754 - RNA, 22 nt, Human
gcugcuguugauuuaguccaau

SEQ ID NO: 36755 - RNA, 22 nt, Human
gcugcuucagggacgugccagc

SEQ ID NO: 36756 - RNA, 22 nt, Human
gcugcuugauuagguugacacu

SEQ ID NO: 36757 - RNA, 22 nt, Human
gcuggaaguaaaaacuuacuag

SEQ ID NO: 36758 - RNA, 22 nt, Human
gcuggacuucaugcauuccugu

SEQ ID NO: 36759 - RNA, 22 nt, Human
gcuggagaaacaggaggaggaa

SEQ ID NO: 36760 - RNA, 22 nt, Human
gcuggagaguaguaagcaguua

SEQ ID NO: 36761 - RNA, 22 nt, Human
gcuggagccaagcugcucuugg

SEQ ID NO: 36762 - RNA, 22 nt, Human
gcuggagcggguucgggccgcu

SEQ ID NO: 36763 - RNA, 22 nt, Human
gcuggaggauggacuggaagaa

SEQ ID NO: 36764 - RNA, 22 nt, Human
gcuggaggcaguucagacacca

SEQ ID NO: 36765 - RNA, 22 nt, Human
gcuggaguaucuggggaaggag

SEQ ID NO: 36766 - RNA, 22 nt, Human
gcuggagucuacauucaagaau

SEQ ID NO: 36767 - RNA, 22 nt, Human
gcuggagucuggaggugugcca

SEQ ID NO: 36768 - RNA, 22 nt, Human
gcuggagucuugaaaguggacu

SEQ ID NO: 36769 - RNA, 22 nt, Human
gcuggagugaugccugugucuc

SEQ ID NO: 36770 - RNA, 22 nt, Human
gcuggagugcaguugcacaguc

SEQ ID NO: 36771 - RNA, 22 nt, Human
gcuggaucauauggugguucua

SEQ ID NO: 36772 - RNA, 22 nt, Human
gcuggcaaugguguggucuggu

SEQ ID NO: 36773 - RNA, 22 nt, Human
gcuggcacagguggaugcuggc

SEQ ID NO: 36774 - RNA, 22 nt, Human
gcuggcacuugggacaaaaucu

SEQ ID NO: 36775 - RNA, 22 nt, Human
gcuggcagagacaagaagacua

SEQ ID NO: 36776 - RNA, 22 nt, Human
gcuggcagagcucugggcuggg

SEQ ID NO: 36777 - RNA, 22 nt, Human
gcuggcagcauuagacccuggg

SEQ ID NO: 36778 - RNA, 22 nt, Human
gcuggcaggagaaacggggugc

SEQ ID NO: 36779 - RNA, 22 nt, Human
gcuggcagggacagcugcgugu

SEQ ID NO: 36780 - RNA, 22 nt, Human
gcuggcagguaaagccccgggg

SEQ ID NO: 36781 - RNA, 22 nt, Human
gcuggcagguccaagauagagc

SEQ ID NO: 36782 - RNA, 22 nt, Human
gcuggcagugugaaugacaagc

SEQ ID NO: 36783 - RNA, 22 nt, Human
gcuggcaguuuccucaccgagg

SEQ ID NO: 36784 - RNA, 22 nt, Human
gcuggcauggagacucuggguc

SEQ ID NO: 36785 - RNA, 22 nt, Human
gcuggccagggcugcucgcgga

SEQ ID NO: 36786 - RNA, 22 nt, Human
gcuggccaggugcuuugguucu

SEQ ID NO: 36787 - RNA, 22 nt, Human
gcuggccagugucccagggauc

SEQ ID NO: 36788 - RNA, 22 nt, Human
gcuggccauagaagccaaagag

SEQ ID NO: 36789 - RNA, 22 nt, Human
gcuggccauauauuuugcuguu

SEQ ID NO: 36790 - RNA, 22 nt, Human
gcuggccauggggagugaggag

SEQ ID NO: 36791 - RNA, 22 nt, Human
gcuggccauucucuuugagaug

SEQ ID NO: 36792 - RNA, 22 nt, Human
gcuggccugcaaagcccggcug

SEQ ID NO: 36793 - RNA, 22 nt, Human
gcuggccugggcagccugucgg

SEQ ID NO: 36794 - RNA, 22 nt, Human
gcuggcucccagaggccccagc

SEQ ID NO: 36795 - RNA, 22 nt, Human
gcuggcucgggaagcaggggau

SEQ ID NO: 36796 - RNA, 22 nt, Human
ggaaacuagaagaauacuaguc

SEQ ID NO: 36797 - RNA, 22 nt, Human
ggaaagaacccuggauggcugg

SEQ ID NO: 36798 - RNA, 22 nt, Human
ggaaagaaucaagugauccugu

SEQ ID NO: 36799 - RNA, 22 nt, Human
ggaaagaggauaguggguaggu

SEQ ID NO: 36800 - RNA, 22 nt, Human
ggaaagagggacccagcuuggu

SEQ ID NO: 36801 - RNA, 22 nt, Human
ggaaagaguuuugguauauuug

SEQ ID NO: 36802 - RNA, 22 nt, Human
ggaaagauuugucacaugaaug

SEQ ID NO: 36803 - RNA, 22 nt, Human
ggaaagcucagaucuuguugga

SEQ ID NO: 36804 - RNA, 22 nt, Human
ggaaaggcuaacagucauggaa

SEQ ID NO: 36805 - RNA, 22 nt, Human
ggaaagggaguuuugcuuauga

SEQ ID NO: 36806 - RNA, 22 nt, Human
ggaaagggcagaggccuuggag

SEQ ID NO: 36807 - RNA, 22 nt, Human
ggaaaggggccuggaucuuuug

SEQ ID NO: 36808 - RNA, 22 nt, Human
ggaaauauugauugcucuguau

SEQ ID NO: 36809 - RNA, 22 nt, Human
ggaaauauuuugucuaauuugu

SEQ ID NO: 36810 - RNA, 20 nt, Human
ggaaaucaccaggcuccacc

SEQ ID NO: 36811 - RNA, 22 nt, Human
ggaaaucaucugauuggcuuuc

SEQ ID NO: 36812 - RNA, 22 nt, Human
ggaaaucucagaucucccagau

SEQ ID NO: 36813 - RNA, 22 nt, Human
ggaaaugacuuggugcuucguu

SEQ ID NO: 36814 - RNA, 22 nt, Human
ggaaaugguggaggaaggcuua

SEQ ID NO: 36815 - RNA, 22 nt, Human
ggaaaugugggcuguuucugua

SEQ ID NO: 36816 - RNA, 22 nt, Human
ggaacacaaaugggagagcugg

SEQ ID NO: 36817 - RNA, 22 nt, Human
ggaacacagaagggcugaaaaa

SEQ ID NO: 36818 - RNA, 22 nt, Human
ggaacacugccuuuuauuuucc

SEQ ID NO: 36819 - RNA, 20 nt, Human
ggaacacuguucauucugua

SEQ ID NO: 36820 - RNA, 22 nt, Human
ggaacagggauuuggccugguu

SEQ ID NO: 36821 - RNA, 22 nt, Human
ggaacaguugcgucaugggccu

SEQ ID NO: 36822 - RNA, 21 nt, Human
ggaacauuguuaauagucucu

SEQ ID NO: 36823 - RNA, 22 nt, Human
ggaacauuuaaauucuuauuug

SEQ ID NO: 36824 - RNA, 22 nt, Human
ggaaccaguaacuggucauugc

SEQ ID NO: 36825 - RNA, 22 nt, Human
ggaacccaugauuaugguuagg

SEQ ID NO: 36826 - RNA, 22 nt, Human
ggaaccuuaguguucuuuuacc

SEQ ID NO: 36827 - RNA, 22 nt, Human
ggaacugaaugucucgguauaa

SEQ ID NO: 36828 - RNA, 22 nt, Human
ggaacugagcaauggcaugaaa

SEQ ID NO: 36829 - RNA, 22 nt, Human
ggaacuggagaaugcccucuuu

SEQ ID NO: 36830 - RNA, 22 nt, Human
ggaacuugaaaaucaagguggu

SEQ ID NO: 36831 - RNA, 22 nt, Human
ggaacuugcaaccucuggucac

SEQ ID NO: 36832 - RNA, 21 nt, Human
ggaacuuucaugaaucuagca

SEQ ID NO: 36833 - RNA, 22 nt, Human
ggaagaaaagcuuccagcgccu

SEQ ID NO: 36834 - RNA, 22 nt, Human
ggaagaagggucauuggcagcc

SEQ ID NO: 36835 - RNA, 22 nt, Human
ggaagacaagcaguggcugagc

SEQ ID NO: 36836 - RNA, 22 nt, Human
ggaagacugcauggcauaguga

SEQ ID NO: 36837 - RNA, 22 nt, Human
ggaagagaauuucucucuuuuu

SEQ ID NO: 36838 - RNA, 22 nt, Human
ggaagaguaacaggagguggaa

SEQ ID NO: 36839 - RNA, 22 nt, Human
ggaagaugagaaguggggcucc

SEQ ID NO: 36840 - RNA, 22 nt, Human
uagcagcucugauucugggccc

SEQ ID NO: 36841 - RNA, 22 nt, Human
uagcaggaauaaaaauguaccc

SEQ ID NO: 36842 - RNA, 22 nt, Human
uagcaggacaugugcagagaag

SEQ ID NO: 36843 - RNA, 22 nt, Human
uagcaggaccaugacaagaaaa

SEQ ID NO: 36844 - RNA, 22 nt, Human
uagcaggaggcaguuccucgcu

SEQ ID NO: 36845 - RNA, 22 nt, Human
uagcaggauuugaagaagaucu

SEQ ID NO: 36846 - RNA, 22 nt, Human
uagcaggcucgcaauaaaaugu

SEQ ID NO: 36847 - RNA, 23 nt, Human
uagcaggcuuucuuuucucucac

SEQ ID NO: 36848 - RNA, 22 nt, Human
uagcagggaaggugugcugagc

SEQ ID NO: 36849 - RNA, 22 nt, Human
uagcaggguuuugaagaggguu

SEQ ID NO: 36850 - RNA, 22 nt, Human
uagcaguauauuuuaaggaagc

SEQ ID NO: 36851 - RNA, 22 nt, Human
uagcagugcacaguaggacacc

SEQ ID NO: 36852 - RNA, 22 nt, Human
uagcagugcccuguggaauaag

SEQ ID NO: 36853 - RNA, 22 nt, Human
uagcaucaugaucagaacuguu

SEQ ID NO: 36854 - RNA, 22 nt, Human
uagcaucucaaccuccugaaag

SEQ ID NO: 36855 - RNA, 22 nt, Human
uagcaucuccuuaggguaagga

SEQ ID NO: 36856 - RNA, 22 nt, Human
uagcaucugcauuuguaacuag

SEQ ID NO: 36857 - RNA, 22 nt, Human
uagcaucuguuucucuuuguga

SEQ ID NO: 36858 - RNA, 22 nt, Human
uagcaucuugauuucagaccag

SEQ ID NO: 36859 - RNA, 20 nt, Human
uagcaugggugaggguagag

SEQ ID NO: 36860 - RNA, 22 nt, Human
uagcauuauuuccucuuuuugu

SEQ ID NO: 36861 - RNA, 20 nt, Human
uagcauuccagaaaacucag

SEQ ID NO: 36862 - RNA, 22 nt, Human
uagcauuccaucuuggacuugu

SEQ ID NO: 36863 - RNA, 22 nt, Human
uagcauuccuuguggcuucuga

SEQ ID NO: 36864 - RNA, 22 nt, Human
uagcauuuagaacaccuugaga

SEQ ID NO: 36865 - RNA, 17 nt, Human
uagcauuuaucuuccuu

SEQ ID NO: 36866 - RNA, 22 nt, Human
uagcauuuauuccagauuugga

SEQ ID NO: 36867 - RNA, 22 nt, Human
uagccaaaguagcuguuauagc

SEQ ID NO: 36868 - RNA, 22 nt, Human
uagccacaugcagacuuucaug

SEQ ID NO: 36869 - RNA, 23 nt, Human
uagccaggcccagcauggacacc

SEQ ID NO: 36870 - RNA, 22 nt, Human
uagccaggcugcagcugauccg

SEQ ID NO: 36871 - RNA, 21 nt, Human
uagccauguuccuuaugguuc

SEQ ID NO: 36872 - RNA, 22 nt, Human
uagcccagaagagggaagcaac

SEQ ID NO: 36873 - RNA, 19 nt, Human
uagcccagagccuggcuac

SEQ ID NO: 36874 - RNA, 22 nt, Human
uagcccagagucccaauuccag

SEQ ID NO: 36875 - RNA, 22 nt, Human
uagcccagauacaaaucaugau

SEQ ID NO: 36876 - RNA, 22 nt, Human
uagcccagcaugagcagagcug

SEQ ID NO: 36877 - RNA, 22 nt, Human
uagcccaggagaauugucuuuc

SEQ ID NO: 36878 - RNA, 22 nt, Human
uagcccaggcuggagggcagug

SEQ ID NO: 36879 - RNA, 22 nt, Human
uagcccucaucugcucaaaagg

SEQ ID NO: 36880 - RNA, 22 nt, Human
uagcccuguccuuggccugugc

SEQ ID NO: 36881 - RNA, 20 nt, Human
uagcuaccuugauccccugg

SEQ ID NO: 36882 - RNA, 22 nt, Human
uagcuagaaaguuucagcugug

SEQ ID NO: 36883 - RNA, 22 nt, Human
uagcuaucuguguccagaucca

SEQ ID NO: 36884 - RNA, 22 nt, Human
uagcuauuuagcccagauaagu

SEQ ID NO: 36885 - RNA, 22 nt, Human
uagcucagcaggugggacaggu

SEQ ID NO: 36886 - RNA, 22 nt, Human
uagcuccuacaaguacagcaaa

SEQ ID NO: 36887 - RNA, 22 nt, Human
uagcuccuggcugcagggccuc

SEQ ID NO: 36888 - RNA, 22 nt, Human
uagcuccuggugagccuacucu

SEQ ID NO: 36889 - RNA, 22 nt, Human
uagcucugaccaagagacugag

SEQ ID NO: 36890 - RNA, 22 nt, Human
uagcucugucacauacacugca

SEQ ID NO: 36891 - RNA, 18 nt, Human
uagcucuuguugguccau

SEQ ID NO: 36892 - RNA, 22 nt, Human
uagcugaaugugaccuuaaaga

SEQ ID NO: 36893 - RNA, 22 nt, Human
uagcugaugaauaauuauucuu

SEQ ID NO: 36894 - RNA, 20 nt, Human
uagcugcacagcccuaggag

SEQ ID NO: 36895 - RNA, 22 nt, Human
uagcugcacaggaaguaagauu

SEQ ID NO: 36896 - RNA, 22 nt, Human
uagcugcccaucuuuccuuuag

SEQ ID NO: 36897 - RNA, 22 nt, Human
uagcugccuaugugauaagaga

SEQ ID NO: 36898 - RNA, 22 nt, Human
uagcugcuucucacaugggcaa

SEQ ID NO: 36899 - RNA, 22 nt, Human
uagcugggacuacuggcccugc

SEQ ID NO: 36900 - RNA, 22 nt, Human
uagcugucaccagaaauggcca

SEQ ID NO: 36901 - RNA, 22 nt, Human
uagcugucagcugcaggcaggc

SEQ ID NO: 36902 - RNA, 22 nt, Human
uagcuguccagugagucccuuu

SEQ ID NO: 36903 - RNA, 22 nt, Human
uagcugugaagagcuaaaaaau

SEQ ID NO: 36904 - RNA, 22 nt, Human
uagcuguggagcagaggucucc

SEQ ID NO: 36905 - RNA, 22 nt, Human
ggacaaaggguggagccucuga

SEQ ID NO: 36906 - RNA, 22 nt, Human
ggacaaaucucauuauuucuga

SEQ ID NO: 36907 - RNA, 21 nt, Human
ggacaauuguucauuuucuuu

SEQ ID NO: 36908 - RNA, 22 nt, Human
ggacacaaaagugaauaaaaua

SEQ ID NO: 36909 - RNA, 22 nt, Human
ggacacacaaguuaucuaauga

SEQ ID NO: 36910 - RNA, 22 nt, Human
ggacacagaccuuucuguucua

SEQ ID NO: 36911 - RNA, 22 nt, Human
ggacacagcugcagccacaccc

SEQ ID NO: 36912 - RNA, 23 nt, Human
ggacacaggccuugucugcgccu

SEQ ID NO: 36913 - RNA, 22 nt, Human
ggacacagguaaauaccacuga

SEQ ID NO: 36914 - RNA, 22 nt, Human
ggacacaguggaagacagcuug

SEQ ID NO: 36915 - RNA, 21 nt, Human
ggacacugauaaucuuguugc

SEQ ID NO: 36916 - RNA, 22 nt, Human
ggacagaaauucuuguuggaca

SEQ ID NO: 36917 - RNA, 19 nt, Human
ggacagacgcagagaucug

SEQ ID NO: 36918 - RNA, 22 nt, Human
ggacagacuuuacagccccggg

SEQ ID NO: 36919 - RNA, 22 nt, Human
ggacagagcccugguggccuaa

SEQ ID NO: 36920 - RNA, 22 nt, Human
ggacagaggguugacagaguau

SEQ ID NO: 36921 - RNA, 22 nt, Human
ggacagcagccucuuacaugaa

SEQ ID NO: 36922 - RNA, 22 nt, Human
ggacagcauucuacuguaggca

SEQ ID NO: 36923 - RNA, 22 nt, Human
ggacagcguggcugguggaggg

SEQ ID NO: 36924 - RNA, 22 nt, Human
ggacagcucugccaggagcuca

SEQ ID NO: 36925 - RNA, 18 nt, Human
ggacaggagacaugggug

SEQ ID NO: 36926 - RNA, 22 nt, Human
ggacaggaugcugaagaugaag

SEQ ID NO: 36927 - RNA, 22 nt, Human
ggacaggccauauggaauacau

SEQ ID NO: 36928 - RNA, 22 nt, Human
ggacaggcccucuggucagcuu

SEQ ID NO: 36929 - RNA, 22 nt, Human
ggacaggccgccucgguggggg

SEQ ID NO: 36930 - RNA, 22 nt, Human
ggacaggguuggggcauauaaa

SEQ ID NO: 36931 - RNA, 21 nt, Human
ggacaguaguagucaggagag

SEQ ID NO: 36932 - RNA, 22 nt, Human
ggacaguccaccucagugaaga

SEQ ID NO: 36933 - RNA, 22 nt, Human
ggacagugcgagacacaguaac

SEQ ID NO: 36934 - RNA, 22 nt, Human
ggacauggaaguauggagugga

SEQ ID NO: 36935 - RNA, 22 nt, Human
ggacauggagcauguagagaaa

SEQ ID NO: 36936 - RNA, 22 nt, Human
ggacauguuccuuuucaucuuu

SEQ ID NO: 36937 - RNA, 22 nt, Human
ggacauuuagaacagaguauuu

SEQ ID NO: 36938 - RNA, 22 nt, Human
ggacauuucauaagaccauucu

SEQ ID NO: 36939 - RNA, 22 nt, Human
ggacauuugcaccuaccucagc

SEQ ID NO: 36940 - RNA, 22 nt, Human
ggaccaaaauuacagucgcucc

SEQ ID NO: 36941 - RNA, 22 nt, Human
ggaccaggacuggugguaucuc

SEQ ID NO: 36942 - RNA, 22 nt, Human
ggaccaggagcucagagcccuc

SEQ ID NO: 36943 - RNA, 22 nt, Human
ggaccaggcugagcaccugccu

SEQ ID NO: 36944 - RNA, 22 nt, Human
ggaccaugaggagaugggccuc

SEQ ID NO: 36945 - RNA, 22 nt, Human
ggacccagaggggagucuggca

SEQ ID NO: 36946 - RNA, 22 nt, Human
ggacccugggcagcuggcugcu

SEQ ID NO: 36947 - RNA, 22 nt, Human
ggacccuguaaagucgugucca

SEQ ID NO: 36948 - RNA, 22 nt, Human
ggaccugcauuuuaacaagauc

SEQ ID NO: 36949 - RNA, 23 nt, Human
ggacuaggcaacagaugggacag

SEQ ID NO: 36950 - RNA, 22 nt, Human
ggacuccucuagaaguugaggc

SEQ ID NO: 36951 - RNA, 22 nt, Human
ggacucuggcucaguguugcuu

SEQ ID NO: 36952 - RNA, 22 nt, Human
ggacucuguuuuccugaucacu

SEQ ID NO: 36953 - RNA, 22 nt, Human
ggacugaaagcgaagaauuugu

SEQ ID NO: 36954 - RNA, 22 nt, Human
ggacugaaggacaaucugguuc

SEQ ID NO: 36955 - RNA, 22 nt, Human
uaggaaggaggccaucuuggcg

SEQ ID NO: 36956 - RNA, 22 nt, Human
uaggaaggccugucacuacuug

SEQ ID NO: 36957 - RNA, 22 nt, Human
uaggaagggcucagggcucggu

SEQ ID NO: 36958 - RNA, 22 nt, Human
uaggaagguccaugucuuaucu

SEQ ID NO: 36959 - RNA, 22 nt, Human
uaggaagguguuuuuaaggagc

SEQ ID NO: 36960 - RNA, 22 nt, Human
uaggaaugcagaugcauaauaa

SEQ ID NO: 36961 - RNA, 22 nt, Human
uaggaaugggcaagacaaagaa

SEQ ID NO: 36962 - RNA, 22 nt, Human
uaggaauuaugaugcuaucaag

SEQ ID NO: 36963 - RNA, 22 nt, Human
uaggaauuuuuguaaugguacu

SEQ ID NO: 36964 - RNA, 20 nt, Human
uaggacaggcagccgagggg

SEQ ID NO: 36965 - RNA, 22 nt, Human
uaggacauaaguauucuaacuu

SEQ ID NO: 36966 - RNA, 22 nt, Human
uaggacauguguuuuauauaug

SEQ ID NO: 36967 - RNA, 22 nt, Human
uaggaccagcagggucaggguc

SEQ ID NO: 36968 - RNA, 22 nt, Human
uaggaccaggggcugccaggaa

SEQ ID NO: 36969 - RNA, 22 nt, Human
uaggaccccugugguagauggg

SEQ ID NO: 36970 - RNA, 22 nt, Human
uaggacuuagucuaauuuuucu

SEQ ID NO: 36971 - RNA, 22 nt, Human
uaggacuuugagaauuguuauu

SEQ ID NO: 36972 - RNA, 22 nt, Human
uaggagaggugaauggcacacu

SEQ ID NO: 36973 - RNA, 22 nt, Human
uaggagggcccugaaaauggca

SEQ ID NO: 36974 - RNA, 22 nt, Human
uaggauaugcauuuuuauacau

SEQ ID NO: 36975 - RNA, 22 nt, Human
uaggauaugugaaaucauauua

SEQ ID NO: 36976 - RNA, 22 nt, Human
uaggaugaucuuguagagagau

SEQ ID NO: 36977 - RNA, 22 nt, Human
uaggauggucacagagauggac

SEQ ID NO: 36978 - RNA, 22 nt, Human
uaggauuauuuguucuauuucu

SEQ ID NO: 36979 - RNA, 22 nt, Human
uaggauuccagaacagugcugc

SEQ ID NO: 36980 - RNA, 22 nt, Human
uaggauuuaauaaaagaauaga

SEQ ID NO: 36981 - RNA, 22 nt, Human
uaggauuuaggcuuuaacaucu

SEQ ID NO: 36982 - RNA, 22 nt, Human
uaggauuuggcuuuagucaggu

SEQ ID NO: 36983 - RNA, 22 nt, Human
uaggcaaggcauuuggcucuug

SEQ ID NO: 36984 - RNA, 22 nt, Human
uaggcaaguggaccagagguuu

SEQ ID NO: 36985 - RNA, 20 nt, Human
uaggcaauuaguagauaaca

SEQ ID NO: 36986 - RNA, 22 nt, Human
uaggcacuagacaugguuacca

SEQ ID NO: 36987 - RNA, 22 nt, Human
uaggcacugaggggagcaaggu

SEQ ID NO: 36988 - RNA, 22 nt, Human
uaggcagaauucauugugcugc

SEQ ID NO: 36989 - RNA, 22 nt, Human
uaggcagaauugugggcucuaa

SEQ ID NO: 36990 - RNA, 22 nt, Human
uaggcagagaggccauaagaau

SEQ ID NO: 36991 - RNA, 20 nt, Human
uaggcagagcugugcagccu

SEQ ID NO: 36992 - RNA, 22 nt, Human
uaggcagagguaugguaaggac

SEQ ID NO: 36993 - RNA, 22 nt, Human
uaggcagaguuuaaugguuaag

SEQ ID NO: 36994 - RNA, 22 nt, Human
uaggcagauguuaacaggaaaa

SEQ ID NO: 36995 - RNA, 22 nt, Human
uaggcagcagugcuaugauucu

SEQ ID NO: 36996 - RNA, 22 nt, Human
uaggcagcuuagguuagaagug

SEQ ID NO: 36997 - RNA, 22 nt, Human
uaggcaggcugaauguagauuu

SEQ ID NO: 36998 - RNA, 22 nt, Human
uaggcaggugugcacugcccac

SEQ ID NO: 36999 - RNA, 22 nt, Human
uaggcauuuaagauggauaagg

SEQ ID NO: 37000 - RNA, 22 nt, Human
uaggccaguggcagguugugug

SEQ ID NO: 37001 - RNA, 22 nt, Human
uaggccaguugguggcccugga

SEQ ID NO: 37002 - RNA, 22 nt, Human
uaggccauucuuggagcuuacu

SEQ ID NO: 37003 - RNA, 22 nt, Human
uaggcccaguuccgccucccgg

SEQ ID NO: 37004 - RNA, 22 nt, Human
uaggccucaggaccccagggcu

SEQ ID NO: 37005 - RNA, 23 nt, Human
uaggccucccuggagcacccagc

SEQ ID NO: 37006 - RNA, 22 nt, Human
uaggccuggaucucugggagca

SEQ ID NO: 37007 - RNA, 22 nt, Human
uaggcucacauagcacuaagug

SEQ ID NO: 37008 - RNA, 22 nt, Human
uaggcucauuaaguccccaggg

SEQ ID NO: 37009 - RNA, 22 nt, Human
uaggcucuagauguggucuuug

SEQ ID NO: 37010 - RNA, 23 nt, Human
uaggcucuguagguagagauggg

SEQ ID NO: 37011 - RNA, 22 nt, Human
uaggcugaaaggagaggugaag

SEQ ID NO: 37012 - RNA, 22 nt, Human
uaggcugcucaccaggcucaga

SEQ ID NO: 37013 - RNA, 22 nt, Human
uaggcuggaggaagcagugccu

SEQ ID NO: 37014 - RNA, 22 nt, Human
uaguguauguucagcuuauaug

SEQ ID NO: 37015 - RNA, 23 nt, Human
uagugucaagagggaguguaauu

SEQ ID NO: 37016 - RNA, 22 nt, Human
uagugucagggagugauaaaug

SEQ ID NO: 37017 - RNA, 22 nt, Human
uagugucuagugaguuugaugc

SEQ ID NO: 37018 - RNA, 22 nt, Human
uagugucucuuccuguuugaaa

SEQ ID NO: 37019 - RNA, 22 nt, Human
uagugucuguugcuuuuguuca

SEQ ID NO: 37020 - RNA, 22 nt, Human
uagugugucccuggggaguguu

SEQ ID NO: 37021 - RNA, 22 nt, Human
uaguguuccagaagcaaacaag

SEQ ID NO: 37022 - RNA, 22 nt, Human
uaguguuuaguacauaugcaua

SEQ ID NO: 37023 - RNA, 19 nt, Human
uaguguuuuucuggagcag

SEQ ID NO: 37024 - RNA, 22 nt, Human
uaguuacagagaaaugauuuga

SEQ ID NO: 37025 - RNA, 22 nt, Human
uaguuaggaaaguccagggagc

SEQ ID NO: 37026 - RNA, 22 nt, Human
uaguuaggggaaaaacgacagg

SEQ ID NO: 37027 - RNA, 22 nt, Human
uaguuauauccagucuuuaaaa

SEQ ID NO: 37028 - RNA, 23 nt, Human
uaguuauuuucucuguaauuugc

SEQ ID NO: 37029 - RNA, 22 nt, Human
uaguucaaccgucuucuccccu

SEQ ID NO: 37030 - RNA, 22 nt, Human
uaguucaccccucuuuauuuuc

SEQ ID NO: 37031 - RNA, 22 nt, Human
uaguucaggaagagaaacaaca

SEQ ID NO: 37032 - RNA, 22 nt, Human
uaguucaggguuauuucaaggu

SEQ ID NO: 37033 - RNA, 22 nt, Human
uaguucuacucaaagugugauc

SEQ ID NO: 37034 - RNA, 22 nt, Human
uaguucuagggcaucaucccag

SEQ ID NO: 37035 - RNA, 22 nt, Human
uaguucucaggacgucaagguu

SEQ ID NO: 37036 - RNA, 22 nt, Human
uaguucuggacacacguuccca

SEQ ID NO: 37037 - RNA, 22 nt, Human
uaguugacaucaucagccugga

SEQ ID NO: 37038 - RNA, 22 nt, Human
uaguugacuucucuaucccagc

SEQ ID NO: 37039 - RNA, 20 nt, Human
uaguugccaaaaugcccugc

SEQ ID NO: 37040 - RNA, 22 nt, Human
uaguuuaaaaguuagggaugau

SEQ ID NO: 37041 - RNA, 22 nt, Human
uaguuuaauggucaacuaauga

SEQ ID NO: 37042 - RNA, 22 nt, Human
uaguuuaccaaauugaucuucc

SEQ ID NO: 37043 - RNA, 22 nt, Human
uaguuuacuguucacuuugccc

SEQ ID NO: 37044 - RNA, 22 nt, Human
uaguuuagacuucaacccuuug

SEQ ID NO: 37045 - RNA, 22 nt, Human
uaguuuagagaauuggggauga

SEQ ID NO: 37046 - RNA, 22 nt, Human
uaguuuagcacuaagaaaaaca

SEQ ID NO: 37047 - RNA, 22 nt, Human
uaguuuaggaacaaguagugga

SEQ ID NO: 37048 - RNA, 22 nt, Human
uaguuuaggugggguagacaga

SEQ ID NO: 37049 - RNA, 21 nt, Human
uaguuucuacccaguuaaugg

SEQ ID NO: 37050 - RNA, 22 nt, Human
uaguuucuagacaguaagaauu

SEQ ID NO: 37051 - RNA, 22 nt, Human
uaguuucuuucacguaguaaua

SEQ ID NO: 37052 - RNA, 22 nt, Human
uaguuugagaauugaaauagaa

SEQ ID NO: 37053 - RNA, 22 nt, Human
uaguuuguagaaaucuagaaau

SEQ ID NO: 37054 - RNA, 22 nt, Human
uaguuugucaaccacugucaca

SEQ ID NO: 37055 - RNA, 22 nt, Human
uaguuuuacuugcgaugauaau

SEQ ID NO: 37056 - RNA, 22 nt, Human
uaguuuuagcagcaaugggaug

SEQ ID NO: 37057 - RNA, 22 nt, Human
uaguuuuaugaauugguauaau

SEQ ID NO: 37058 - RNA, 22 nt, Human
uauaaaacagaaagcacuaccu

SEQ ID NO: 37059 - RNA, 22 nt, Human
uauaaaauggcaucagcuccaa

SEQ ID NO: 37060 - RNA, 22 nt, Human
uauaaacuauauguuagccaga

SEQ ID NO: 37061 - RNA, 22 nt, Human
uauaaagagucuaucugguggc

SEQ ID NO: 37062 - RNA, 22 nt, Human
uauaaaugccaggacuuuagau

SEQ ID NO: 37063 - RNA, 22 nt, Human
uauaaauuaaugugcccaugag

SEQ ID NO: 37064 - RNA, 22 nt, Human
uauaacacucagaaagaaucau

SEQ ID NO: 37065 - RNA, 20 nt, Human
uauaacaguguugggugugu

SEQ ID NO: 37066 - RNA, 18 nt, Human
uauaaccuguuuugaugg

SEQ ID NO: 37067 - RNA, 22 nt, Human
uauaaccuuuucuuuauccucc

SEQ ID NO: 37068 - RNA, 22 nt, Human
uauaagaaacaaggcaaauuuu

SEQ ID NO: 37069 - RNA, 20 nt, Human
uauaagcagcuccaggcaga

SEQ ID NO: 37070 - RNA, 22 nt, Human
uauaagugugucagcuuccaac

SEQ ID NO: 37071 - RNA, 22 nt, Human
ggaacauucuagaguguuguga

SEQ ID NO: 37072 - RNA, 15 nt, Human
ggaacauuucuguuu

SEQ ID NO: 37073 - RNA, 22 nt, Human
ggaacauuuuuuaaggcagaaa

SEQ ID NO: 37074 - RNA, 22 nt, Human
ggaaccacagcccccagcaggc

SEQ ID NO: 37075 - RNA, 19 nt, Human
ggaaccuuagagcuucagc

SEQ ID NO: 37076 - RNA, 22 nt, Human
ggaacugaggaacgaacuggga

SEQ ID NO: 37077 - RNA, 22 nt, Human
ggaacugauuaagucaugagaa

SEQ ID NO: 37078 - RNA, 17 nt, Human
ggaagaaaaggaucauc

SEQ ID NO: 37079 - RNA, 22 nt, Human
ggaagaaaguagaaaaccgugg

SEQ ID NO: 37080 - RNA, 22 nt, Human
ggaagaaaugcucuucuaugcg

SEQ ID NO: 37081 - RNA, 22 nt, Human
ggaagacaucugcuugcaccag

SEQ ID NO: 37082 - RNA, 22 nt, Human
ggaagagagaucccauagaugu

SEQ ID NO: 37083 - RNA, 22 nt, Human
ggaagagagggcugggccucaa

SEQ ID NO: 37084 - RNA, 18 nt, Human
ggaagauuggcuaugugc

SEQ ID NO: 37085 - RNA, 22 nt, Human
ggaagauuucccguagcugugc

SEQ ID NO: 37086 - RNA, 22 nt, Human
ggaagauuuuccauuccucuuu

SEQ ID NO: 37087 - RNA, 22 nt, Human
ggaagcaaauuccagaaccaca

SEQ ID NO: 37088 - RNA, 22 nt, Human
ggaagccaggcugggggaucug

SEQ ID NO: 37089 - RNA, 22 nt, Human
ggaagccaugagggacaguucu

SEQ ID NO: 37090 - RNA, 22 nt, Human
ggaagcuaagauaauuuaagua

SEQ ID NO: 37091 - RNA, 22 nt, Human
ggaagcuaguuguguuucagga

SEQ ID NO: 37092 - RNA, 23 nt, Human
ggaagcucacguaguccugcacu

SEQ ID NO: 37093 - RNA, 22 nt, Human
ggaagcuccccaagccugcccu

SEQ ID NO: 37094 - RNA, 22 nt, Human
ggaagcugaauccagagacagg

SEQ ID NO: 37095 - RNA, 22 nt, Human
ggaagcugaggcccagugaagg

SEQ ID NO: 37096 - RNA, 22 nt, Human
ggaagcugccaguccaccagcu

SEQ ID NO: 37097 - RNA, 22 nt, Human
ggaagcuggacaggcuuugagu

SEQ ID NO: 37098 - RNA, 22 nt, Human
ggaagcugggaucucucucccg

SEQ ID NO: 37099 - RNA, 22 nt, Human
ggaagcugugcucucaggccuc

SEQ ID NO: 37100 - RNA, 22 nt, Human
ggaagcuguugugagugcagca

SEQ ID NO: 37101 - RNA, 22 nt, Human
ggaagcuucauaccuuuauuua

SEQ ID NO: 37102 - RNA, 22 nt, Human
ggaaggaagaggaccgagcugg

SEQ ID NO: 37103 - RNA, 22 nt, Human
ggaaggaauuccaagacuaaag

SEQ ID NO: 37104 - RNA, 19 nt, Human
ggaaggagagaaaugcaug

SEQ ID NO: 37105 - RNA, 22 nt, Human
ggaaggagccauaucauaucca

SEQ ID NO: 37106 - RNA, 22 nt, Human
ggaaggagucuuuaacacccau

SEQ ID NO: 37107 - RNA, 18 nt, Human
ggaaggaguggaccccag

SEQ ID NO: 37108 - RNA, 21 nt, Human
ggaaggcuaugguguauuuuu

SEQ ID NO: 37109 - RNA, 22 nt, Human
ggaaggcuccauacacaaagca

SEQ ID NO: 37110 - RNA, 22 nt, Human
ggaaggcuugaguucccagguc

SEQ ID NO: 37111 - RNA, 22 nt, Human
ggaagggcggauaguauaaguu

SEQ ID NO: 37112 - RNA, 22 nt, Human
ggaaggggagcuggaaagggua

SEQ ID NO: 37113 - RNA, 22 nt, Human
ggaaggggccuugagcaaacug

SEQ ID NO: 37114 - RNA, 21 nt, Human
ggaagggguccucccaacagu

SEQ ID NO: 37115 - RNA, 22 nt, Human
ggaaggguuuaagcaggagagu

SEQ ID NO: 37116 - RNA, 17 nt, Human
ggaaggucaaggggagg

SEQ ID NO: 37117 - RNA, 22 nt, Human
ggaagguuuuucuccugguggg

SEQ ID NO: 37118 - RNA, 22 nt, Human
ggaaguauuuguuuuugcaucc

SEQ ID NO: 37119 - RNA, 22 nt, Human
ggaaucuuugaaggauuuuaag

SEQ ID NO: 37120 - RNA, 20 nt, Human
ggaaucuuugcaggaaaaua

SEQ ID NO: 37121 - RNA, 22 nt, Human
ggaaucuuuuucauaagccuca

SEQ ID NO: 37122 - RNA, 22 nt, Human
ggaaugauggugccuagauuau

SEQ ID NO: 37123 - RNA, 22 nt, Human
uauuuggaggccacuguugagu

SEQ ID NO: 37124 - RNA, 22 nt, Human
uauuuggagugauggaaauguu

SEQ ID NO: 37125 - RNA, 22 nt, Human
uauuuguagcuucccaaagcuu

SEQ ID NO: 37126 - RNA, 22 nt, Human
uauuuguauuucaugcaguaaa

SEQ ID NO: 37127 - RNA, 22 nt, Human
uauuugucacuagaaaggguaa

SEQ ID NO: 37128 - RNA, 22 nt, Human
uauuugucuaagaggcugacag

SEQ ID NO: 37129 - RNA, 23 nt, Human
uauuugucucuuaccacugcugu

SEQ ID NO: 37130 - RNA, 22 nt, Human
uauuuguugcgggaauugcuau

SEQ ID NO: 37131 - RNA, 22 nt, Human
uauuuuacuauuuggcaaaguc

SEQ ID NO: 37132 - RNA, 22 nt, Human
uauuuucaccauguaucccugu

SEQ ID NO: 37133 - RNA, 23 nt, Human
uauuuuccuggcaacaggggaac

SEQ ID NO: 37134 - RNA, 22 nt, Human
uauuuucuggacagucuugcuu

SEQ ID NO: 37135 - RNA, 22 nt, Human
uauuuugaaagucuguuuugaa

SEQ ID NO: 37136 - RNA, 22 nt, Human
uauuuugacuauuaaaccaaca

SEQ ID NO: 37137 - RNA, 22 nt, Human
uauuuugcaaaccugaguuuga

SEQ ID NO: 37138 - RNA, 22 nt, Human
uauuuugugccaugcacugccu

SEQ ID NO: 37139 - RNA, 22 nt, Human
ucaaaacaacacucagguguaa

SEQ ID NO: 37140 - RNA, 19 nt, Human
ucaaaacacaaaugguuga

SEQ ID NO: 37141 - RNA, 22 nt, Human
ucaaaaggacagaagaccuaaa

SEQ ID NO: 37142 - RNA, 22 nt, Human
ucaaaagucugcauucuucaca

SEQ ID NO: 37143 - RNA, 22 nt, Human
ucaaaaguuucacauagagaua

SEQ ID NO: 37144 - RNA, 23 nt, Human
ucaaacagguuucagagcaucuu

SEQ ID NO: 37145 - RNA, 22 nt, Human
ucaaacauaggcacacauucag

SEQ ID NO: 37146 - RNA, 22 nt, Human
ucaaacauaucugauuuuccau

SEQ ID NO: 37147 - RNA, 22 nt, Human
ucaaacauccccaccagggacu

SEQ ID NO: 37148 - RNA, 22 nt, Human
ucaaacaucuaaacuacccacu

SEQ ID NO: 37149 - RNA, 21 nt, Human
ucaaacaugaucugggucauc

SEQ ID NO: 37150 - RNA, 22 nt, Human
ucaaacauguuagcagucugug

SEQ ID NO: 37151 - RNA, 22 nt, Human
ucaaaccugcugucuuguucau

SEQ ID NO: 37152 - RNA, 22 nt, Human
ucaaacugaacuaagauccaac

SEQ ID NO: 37153 - RNA, 22 nt, Human
ucaaacuguucagaacuccuuu

SEQ ID NO: 37154 - RNA, 22 nt, Human
ucaaacuugguaagagaaauac

SEQ ID NO: 37155 - RNA, 22 nt, Human
ucaaagaagugcaaaccucauc

SEQ ID NO: 37156 - RNA, 22 nt, Human
ucaaagacagacaucagucaaa

SEQ ID NO: 37157 - RNA, 22 nt, Human
ucaaagacauggggaagcugag

SEQ ID NO: 37158 - RNA, 22 nt, Human
ucaaagacuauauauuuuauuu

SEQ ID NO: 37159 - RNA, 22 nt, Human
ucaaagaucagaugguuguagg

SEQ ID NO: 37160 - RNA, 21 nt, Human
ucaaagcacauauuugcacau

SEQ ID NO: 37161 - RNA, 22 nt, Human
ucaaagccuguggauaguuugg

SEQ ID NO: 37162 - RNA, 22 nt, Human
ucaaagcuuagauaauuucuuu

SEQ ID NO: 37163 - RNA, 22 nt, Human
ucaaaggcauugccaauaagua

SEQ ID NO: 37164 - RNA, 22 nt, Human
ucaaaggcuugugguucuggga

SEQ ID NO: 37165 - RNA, 22 nt, Human
ucaaaguaccagagugaacuga

SEQ ID NO: 37166 - RNA, 22 nt, Human
ucaaaguaccauuaucagugga

SEQ ID NO: 37167 - RNA, 23 nt, Human
ucaaaguaguuuuauccaauaaa

SEQ ID NO: 37168 - RNA, 22 nt, Human
ucaaagucacaacucucuaauu

SEQ ID NO: 37169 - RNA, 18 nt, Human
ucaaagucuggcuccacu

SEQ ID NO: 37170 - RNA, 22 nt, Human
ucaaaguuggaaaagcuggccc

SEQ ID NO: 37171 - RNA, 22 nt, Human
ucaaaguuuguggcaauuuauu

SEQ ID NO: 37172 - RNA, 22 nt, Human
ucaaauaaugccauucaucauc

SEQ ID NO: 37173 - RNA, 22 nt, Human
ucaaauacagaagauccuuucc

SEQ ID NO: 37174 - RNA, 22 nt, Human
ucaaauagguaugaguagaaau

SEQ ID NO: 37175 - RNA, 22 nt, Human
ucaaauaguugacauuaacuug

SEQ ID NO: 37176 - RNA, 22 nt, Human
ucaaauauuggcuauuucacau

SEQ ID NO: 37177 - RNA, 22 nt, Human
ucaaaucagcaagcagcuuccc

SEQ ID NO: 37178 - RNA, 21 nt, Human
ucaaaucauguacugaccaca

SEQ ID NO: 37179 - RNA, 22 nt, Human
ucaaaugagaggcagggcagcu

SEQ ID NO: 37180 - RNA, 22 nt, Human
ucaaaugaggcugaugaaugug

SEQ ID NO: 37181 - RNA, 22 nt, Human
ucaaaugagugacucacacagg

SEQ ID NO: 37182 - RNA, 22 nt, Human
ucaaaugcacguagagaaaaua

SEQ ID NO: 37183 - RNA, 22 nt, Human
ucaaauuauuuaggauagugcu

SEQ ID NO: 37184 - RNA, 22 nt, Human
ucaaauuuuaacaugcauuaga

SEQ ID NO: 37185 - RNA, 22 nt, Human
ucaacacuauccaggcaaucuu

SEQ ID NO: 37186 - RNA, 22 nt, Human
ucaacacuggcuacaguuaugc

SEQ ID NO: 37187 - RNA, 22 nt, Human
ucaacagaagugauagcuauua

SEQ ID NO: 37188 - RNA, 22 nt, Human
ucaacagacauuuuuaagcacu

SEQ ID NO: 37189 - RNA, 22 nt, Human
ucaacaguggcaaagaggcacg

SEQ ID NO: 37190 - RNA, 22 nt, Human
ucaacauacauacauggucagg

SEQ ID NO: 37191 - RNA, 22 nt, Human
ucaacauucauauauagccaca

SEQ ID NO: 37192 - RNA, 22 nt, Human
ucaacccuguuuucuuugcaau

SEQ ID NO: 37193 - RNA, 22 nt, Human
ucaacguuuguuaaaugaguau

SEQ ID NO: 37194 - RNA, 22 nt, Human
ucaagaaagggcuucaccagga

SEQ ID NO: 37195 - RNA, 22 nt, Human
ucaagaagauaaugucuagggu

SEQ ID NO: 37196 - RNA, 22 nt, Human
ucaagaaggagacuccacugug

SEQ ID NO: 37197 - RNA, 22 nt, Human
ucaagagacaggacguguuuca

SEQ ID NO: 37198 - RNA, 22 nt, Human
ucaagagagugcugcuuggggu

SEQ ID NO: 37199 - RNA, 22 nt, Human
ucaagagccagguaagcacagg

SEQ ID NO: 37200 - RNA, 22 nt, Human
ucaagaguuggucaaauccaaa

SEQ ID NO: 37201 - RNA, 22 nt, Human
ucaagaugaaccaggacauuca

SEQ ID NO: 37202 - RNA, 20 nt, Human
ucaagaugaggucauacugg

SEQ ID NO: 37203 - RNA, 22 nt, Human
ucaagaugcauggguggcauaa

SEQ ID NO: 37204 - RNA, 22 nt, Human
ucaagcaaaguuuagcugguua

SEQ ID NO: 37205 - RNA, 22 nt, Human
ucaagcaacagaacugugagac

SEQ ID NO: 37206 - RNA, 22 nt, Human
ggcacacaggcagauggagugu

SEQ ID NO: 37207 - RNA, 22 nt, Human
ggcacacauagaucugcacugg

SEQ ID NO: 37208 - RNA, 22 nt, Human
ggcacacucaccacguggaggg

SEQ ID NO: 37209 - RNA, 22 nt, Human
ggcacagagcaggccacuaauc

SEQ ID NO: 37210 - RNA, 22 nt, Human
ggcacagagcuccagccuuggc

SEQ ID NO: 37211 - RNA, 22 nt, Human
ggcacagagcuuugucccaguu

SEQ ID NO: 37212 - RNA, 22 nt, Human
ggcacagaguuggcagagcugc

SEQ ID NO: 37213 - RNA, 22 nt, Human
ggcacagcacuguaggccuggg

SEQ ID NO: 37214 - RNA, 22 nt, Human
ggcacagccacuuuggagaacu

SEQ ID NO: 37215 - RNA, 22 nt, Human
ggcacagcgacuaccaucgaaa

SEQ ID NO: 37216 - RNA, 22 nt, Human
ggcacagggagccgcaguugca

SEQ ID NO: 37217 - RNA, 22 nt, Human
ggcacagggugauguugcaguu

SEQ ID NO: 37218 - RNA, 22 nt, Human
ggcacaguuuucuacauaugcu

SEQ ID NO: 37219 - RNA, 20 nt, Human
ggcacaguuuuugcaccugc

SEQ ID NO: 37220 - RNA, 22 nt, Human
ggcacauguaugugggagugug

SEQ ID NO: 37221 - RNA, 22 nt, Human
ggcaccaggacaugacucccag

SEQ ID NO: 37222 - RNA, 20 nt, Human
ggcaccaggcuaggauugga

SEQ ID NO: 37223 - RNA, 22 nt, Human
ggcaccagggcaagggucuuuc

SEQ ID NO: 37224 - RNA, 22 nt, Human
ggcaccaggggauguaaugucc

SEQ ID NO: 37225 - RNA, 22 nt, Human
ggcaccaucagcugugcagggg

SEQ ID NO: 37226 - RNA, 22 nt, Human
ggcaccucugggcucuguuagg

SEQ ID NO: 37227 - RNA, 22 nt, Human
ggcaccuguguaagaucuggaa

SEQ ID NO: 37228 - RNA, 22 nt, Human
ggcaccuuggcuagugaucaac

SEQ ID NO: 37229 - RNA, 22 nt, Human
ggcacuaggagaccuggggguc

SEQ ID NO: 37230 - RNA, 22 nt, Human
ggcacuagugacaaggggacau

SEQ ID NO: 37231 - RNA, 22 nt, Human
ggcacuaugaguuauaagugga

SEQ ID NO: 37232 - RNA, 22 nt, Human
ggccccugcggacugccuagag

SEQ ID NO: 37233 - RNA, 22 nt, Human
ggcccucucuacauguuagacg

SEQ ID NO: 37234 - RNA, 22 nt, Human
ggcccucugccugugcuggcga

SEQ ID NO: 37235 - RNA, 22 nt, Human
ggcccucugcucacuuccuauu

SEQ ID NO: 37236 - RNA, 22 nt, Human
ggcccucuguggcugccaugga

SEQ ID NO: 37237 - RNA, 22 nt, Human
ggcccucuuuuauccaucauaa

SEQ ID NO: 37238 - RNA, 22 nt, Human
ggcccugaagugauugugaguu

SEQ ID NO: 37239 - RNA, 22 nt, Human
ggcccugaucuccuggauucuu

SEQ ID NO: 37240 - RNA, 22 nt, Human
ggcccugcaagguacccaggcc

SEQ ID NO: 37241 - RNA, 22 nt, Human
ggcccugcucaggcugcgauga

SEQ ID NO: 37242 - RNA, 21 nt, Human
ggcccugguuacgccuccucu

SEQ ID NO: 37243 - RNA, 22 nt, Human
ggcccugucccuggccgucugu

SEQ ID NO: 37244 - RNA, 22 nt, Human
ggcccugucugucugcccagcu

SEQ ID NO: 37245 - RNA, 22 nt, Human
ggcccuuggagccuccacagug

SEQ ID NO: 37246 - RNA, 22 nt, Human
ggccgcugcgccuccaaccgag

SEQ ID NO: 37247 - RNA, 22 nt, Human
ggccgggcaggucucagccagc

SEQ ID NO: 37248 - RNA, 22 nt, Human
ggccgggcuguggagaaggggu

SEQ ID NO: 37249 - RNA, 22 nt, Human
ggccggggccuccccgcgucgc

SEQ ID NO: 37250 - RNA, 22 nt, Human
ggccgugcuccaaagucaucgu

SEQ ID NO: 37251 - RNA, 22 nt, Human
ggccuaagugguuaaauggcuu

SEQ ID NO: 37252 - RNA, 22 nt, Human
ggccuaggauucugcauuucua

SEQ ID NO: 37253 - RNA, 22 nt, Human
ggccuagggaguggccaugccu

SEQ ID NO: 37254 - RNA, 22 nt, Human
ggccuagggcuuggucauggca

SEQ ID NO: 37255 - RNA, 22 nt, Human
ggccucacccaucggugccuuu

SEQ ID NO: 37256 - RNA, 22 nt, Human
ggccucagaaauagaguaaaau

SEQ ID NO: 37257 - RNA, 22 nt, Human
ggccucagagaaggcugugcgg

SEQ ID NO: 37258 - RNA, 23 nt, Human
ggccucagcgcacagaaacugcu

SEQ ID NO: 37259 - RNA, 22 nt, Human
ggccucaucacagugcauuagu

SEQ ID NO: 37260 - RNA, 22 nt, Human
ggccuccaggccuacucagggc

SEQ ID NO: 37261 - RNA, 22 nt, Human
ggccuccaucuuaucuuacucu

SEQ ID NO: 37262 - RNA, 20 nt, Human
ggccucggacuucaucguag

SEQ ID NO: 37263 - RNA, 22 nt, Human
ggccucucauucucccuggucc

SEQ ID NO: 37264 - RNA, 22 nt, Human
ggccucucgaagcuucagucca

SEQ ID NO: 37265 - RNA, 22 nt, Human
ggccucucucccuggcuugcag

SEQ ID NO: 37266 - RNA, 22 nt, Human
ggccucucuccuuggcuugcag

SEQ ID NO: 37267 - RNA, 22 nt, Human
ggccucucugagagcagacguu

SEQ ID NO: 37268 - RNA, 22 nt, Human
ggccucugccccagccacaccu

SEQ ID NO: 37269 - RNA, 22 nt, Human
ggccucugccccgcggggcucg

SEQ ID NO: 37270 - RNA, 18 nt, Human
ggccucuggacuggcagc

SEQ ID NO: 37271 - RNA, 22 nt, Human
ggccucuggugccugaagcgcc

SEQ ID NO: 37272 - RNA, 21 nt, Human
ggccugaaaaagugaaugcuu

SEQ ID NO: 37273 - RNA, 22 nt, Human
ggccugacaagugggaagaggc

SEQ ID NO: 37274 - RNA, 22 nt, Human
ggccugacuugaucggcucucu

SEQ ID NO: 37275 - RNA, 21 nt, Human
ggccugaguauaggacaggcc

SEQ ID NO: 37276 - RNA, 22 nt, Human
ggccugagucacaucaggagag

SEQ ID NO: 37277 - RNA, 22 nt, Human
ggccugagucccaccuggcugu

SEQ ID NO: 37278 - RNA, 22 nt, Human
ggccugccucacagucagcacc

SEQ ID NO: 37279 - RNA, 22 nt, Human
ggccugcucugcagccucuaca

SEQ ID NO: 37280 - RNA, 22 nt, Human
ggccugcucuggcuguggucag

SEQ ID NO: 37281 - RNA, 22 nt, Human
ggccugcugcuaugacuuccug

SEQ ID NO: 37282 - RNA, 22 nt, Human
ggccuggaagaggacagagaaa

SEQ ID NO: 37283 - RNA, 19 nt, Human
ggccuggauuuagggcucc

SEQ ID NO: 37284 - RNA, 22 nt, Human
ggccuggcccucccggguucaa

SEQ ID NO: 37285 - RNA, 22 nt, Human
ggccuggcugguucaguacccu

SEQ ID NO: 37286 - RNA, 22 nt, Human
ggccugugguuucuaguagguu

SEQ ID NO: 37287 - RNA, 22 nt, Human
ggccugugucggccccggguuc

SEQ ID NO: 37288 - RNA, 22 nt, Human
ggccuuagagaccaccuagucu

SEQ ID NO: 37289 - RNA, 18 nt, Human
ggccuuaguaugugccuu

SEQ ID NO: 37290 - RNA, 22 nt, Human
ggccuuccaucugccucuguuu

SEQ ID NO: 37291 - RNA, 22 nt, Human
ggccuuccuggcggcucagggu

SEQ ID NO: 37292 - RNA, 22 nt, Human
ggccuuccuguuguguccaccg

SEQ ID NO: 37293 - RNA, 22 nt, Human
ggccuuccuucccagccuacug

SEQ ID NO: 37294 - RNA, 22 nt, Human
ggccuugacaguuaagagaccu

SEQ ID NO: 37295 - RNA, 22 nt, Human
ggccuugauccuccagagcacu

SEQ ID NO: 37296 - RNA, 19 nt, Human
ggccuugaugaguggggag

SEQ ID NO: 37297 - RNA, 22 nt, Human
ggccuugcggaacgcucaggcg

SEQ ID NO: 37298 - RNA, 22 nt, Human
ggccuugcugcuuccagaaggu

SEQ ID NO: 37299 - RNA, 22 nt, Human
ggccuuggauuuuacccuaaag

SEQ ID NO: 37300 - RNA, 22 nt, Human
ggccuuggcuccugcagggagu

SEQ ID NO: 37301 - RNA, 17 nt, Human
ggccuugggcugcucuu

SEQ ID NO: 37302 - RNA, 22 nt, Human
ggccuugggcuggcugcaguau

SEQ ID NO: 37303 - RNA, 22 nt, Human
ggccuugggguggccuuguccc

SEQ ID NO: 37304 - RNA, 22 nt, Human
ggccuuggugcucuguguugca

SEQ ID NO: 37305 - RNA, 22 nt, Human
ggccuugguucugucacagccg

SEQ ID NO: 37306 - RNA, 20 nt, Human
ggcgccuggccucauggcug

SEQ ID NO: 37307 - RNA, 22 nt, Human
ggcgcucaguguugccccagag

SEQ ID NO: 37308 - RNA, 22 nt, Human
ggcggagguugcaguaagccga

SEQ ID NO: 37309 - RNA, 22 nt, Human
ggcggcgcguagccggagacuu

SEQ ID NO: 37310 - RNA, 19 nt, Human
ggcggguggacuggagccc

SEQ ID NO: 37311 - RNA, 22 nt, Human
ggcggguguaaguaggacagcg

SEQ ID NO: 37312 - RNA, 22 nt, Human
ggcguugcucuccccaggcuca

SEQ ID NO: 37313 - RNA, 22 nt, Human
ggcuaaggacgggcaaguccca

SEQ ID NO: 37314 - RNA, 22 nt, Human
ggcuacugugauggucugcaag

SEQ ID NO: 37315 - RNA, 22 nt, Human
ggcuagaauaauugacuucauu

SEQ ID NO: 37316 - RNA, 21 nt, Human
ggcuaggaugcugggguuucc

SEQ ID NO: 37317 - RNA, 22 nt, Human
ggcuaggcaggcucagagccua

SEQ ID NO: 37318 - RNA, 22 nt, Human
ggcuagggaaauccugauccaa

SEQ ID NO: 37319 - RNA, 22 nt, Human
ggcuagggagacagagggcaug

SEQ ID NO: 37320 - RNA, 22 nt, Human
ucaagcaacugaauucuaaaag

SEQ ID NO: 37321 - RNA, 22 nt, Human
ucaagcaaguugcauauugcua

SEQ ID NO: 37322 - RNA, 22 nt, Human
ucaagcagagucaaaaguacca

SEQ ID NO: 37323 - RNA, 20 nt, Human
ucaagcuaguuuccaaaguu

SEQ ID NO: 37324 - RNA, 22 nt, Human
ucaagcugcaucagugcaguga

SEQ ID NO: 37325 - RNA, 22 nt, Human
ucaaggaagauagcuauuauga

SEQ ID NO: 37326 - RNA, 22 nt, Human
ucaaggaaggucuguugcucca

SEQ ID NO: 37327 - RNA, 22 nt, Human
ucaaggaauuuaguuuaguaaa

SEQ ID NO: 37328 - RNA, 20 nt, Human
ucaaggacucccugggaaga

SEQ ID NO: 37329 - RNA, 22 nt, Human
ucaaggagcccacagucuaaug

SEQ ID NO: 37330 - RNA, 22 nt, Human
ucaaggcacuucaugucucagu

SEQ ID NO: 37331 - RNA, 22 nt, Human
ucaaggcuaaacuuucagagua

SEQ ID NO: 37332 - RNA, 22 nt, Human
ucaagggaggagacacagcccu

SEQ ID NO: 37333 - RNA, 22 nt, Human
ucaaggugacugaacuauaaac

SEQ ID NO: 37334 - RNA, 22 nt, Human
ucaaguauaucuagucauuagg

SEQ ID NO: 37335 - RNA, 22 nt, Human
ucaaguaugacaucaaguuucu

SEQ ID NO: 37336 - RNA, 22 nt, Human
ucaagucauuugacuguguguu

SEQ ID NO: 37337 - RNA, 22 nt, Human
ucaaguccugcuguggaccaca

SEQ ID NO: 37338 - RNA, 22 nt, Human
ucaagucucaauguauuauggu

SEQ ID NO: 37339 - RNA, 22 nt, Human
ucaagucuggagaucuggaacu

SEQ ID NO: 37340 - RNA, 22 nt, Human
ucaagucuugagggacagcauu

SEQ ID NO: 37341 - RNA, 22 nt, Human
ucacaucuuauuagaguaucuc

SEQ ID NO: 37342 - RNA, 22 nt, Human
ucacaugaguauuauuuuccaa

SEQ ID NO: 37343 - RNA, 20 nt, Human
ucacaugcauauucguuucu

SEQ ID NO: 37344 - RNA, 22 nt, Human
ucacaugccacagaugaggcaa

SEQ ID NO: 37345 - RNA, 21 nt, Human
ucacaugcuuauuccuggaau

SEQ ID NO: 37346 - RNA, 22 nt, Human
ucacaugucaagaagauaauuu

SEQ ID NO: 37347 - RNA, 22 nt, Human
ucacaugucacaaaacacugcc

SEQ ID NO: 37348 - RNA, 22 nt, Human
ucacauucuagaauguuaucgu

SEQ ID NO: 37349 - RNA, 22 nt, Human
ucacauuguucuuaguuuaccu

SEQ ID NO: 37350 - RNA, 22 nt, Human
ucacauuuauacuccauuugca

SEQ ID NO: 37351 - RNA, 22 nt, Human
ucacauuuauuucaaaguuacu

SEQ ID NO: 37352 - RNA, 22 nt, Human
ucacauuugcaauugcauuguu

SEQ ID NO: 37353 - RNA, 22 nt, Human
ucacauuugcuaucccacuccu

SEQ ID NO: 37354 - RNA, 22 nt, Human
ucacauuuguguuuuauuagag

SEQ ID NO: 37355 - RNA, 22 nt, Human
ucacauuuguuccucugcacuu

SEQ ID NO: 37356 - RNA, 22 nt, Human
ucacauuuguucuugaaucuaa

SEQ ID NO: 37357 - RNA, 22 nt, Human
ucacauuuucuacuacuguacg

SEQ ID NO: 37358 - RNA, 22 nt, Human
ucaccaguuaaaauaacaguaa

SEQ ID NO: 37359 - RNA, 22 nt, Human
ucacccagacugucugacucuu

SEQ ID NO: 37360 - RNA, 22 nt, Human
ucacccagccuuggcggguuug

SEQ ID NO: 37361 - RNA, 22 nt, Human
ucaccgccuugcccggccgggc

SEQ ID NO: 37362 - RNA, 22 nt, Human
ucaccgucgggggucgcugucu

SEQ ID NO: 37363 - RNA, 20 nt, Human
ucaccuaaaccagcaguuuc

SEQ ID NO: 37364 - RNA, 21 nt, Human
ucaccuggcuucugaccuggc

SEQ ID NO: 37365 - RNA, 22 nt, Human
ucaccuguucaacagcaauaau

SEQ ID NO: 37366 - RNA, 22 nt, Human
ucaccuuagcuagaggaagaga

SEQ ID NO: 37367 - RNA, 20 nt, Human
ucaccuuuguugguauucau

SEQ ID NO: 37368 - RNA, 22 nt, Human
ucacgagggcccugggcagcug

SEQ ID NO: 37369 - RNA, 22 nt, Human
ucacgugagggaccugugucug

SEQ ID NO: 37370 - RNA, 22 nt, Human
ucacguuuuacugagugagaua

SEQ ID NO: 37371 - RNA, 22 nt, Human
ucacuaaguuacauuuaguauu

SEQ ID NO: 37372 - RNA, 22 nt, Human
ucacuaaugagcuaaggaaaag

SEQ ID NO: 37373 - RNA, 22 nt, Human
ucacuaaugauuuugaaagaag

SEQ ID NO: 37374 - RNA, 22 nt, Human
ucacuacaaaagucucccuuuc

SEQ ID NO: 37375 - RNA, 22 nt, Human
ucacuacaaccgcuaccugaca

SEQ ID NO: 37376 - RNA, 20 nt, Human
ucacuaguaaccaucugcuu

SEQ ID NO: 37377 - RNA, 22 nt, Human
ucacuagucaucaacuuccauu

SEQ ID NO: 37378 - RNA, 22 nt, Human
ucacuagucgcggggggaggua

SEQ ID NO: 37379 - RNA, 22 nt, Human
ucacucagcuagcuucaggagc

SEQ ID NO: 37380 - RNA, 22 nt, Human
ucacuccaucuuugcuacuggu

SEQ ID NO: 37381 - RNA, 22 nt, Human
ucacucugacuuggccuccaac

SEQ ID NO: 37382 - RNA, 22 nt, Human
ucacucuggccucugcagcagu

SEQ ID NO: 37383 - RNA, 22 nt, Human
ucacucugggccagcgcaggua

SEQ ID NO: 37384 - RNA, 22 nt, Human
ucacucugucccccauugagau

SEQ ID NO: 37385 - RNA, 22 nt, Human
ucacucuguuagaggaaagugc

SEQ ID NO: 37386 - RNA, 22 nt, Human
ucacugaaaaccauacuucuuu

SEQ ID NO: 37387 - RNA, 22 nt, Human
ucacugaagacugggcucuaaa

SEQ ID NO: 37388 - RNA, 21 nt, Human
ucacugaagccuaagauguuu

SEQ ID NO: 37389 - RNA, 22 nt, Human
ucacugaauacuugucucaucc

SEQ ID NO: 37390 - RNA, 22 nt, Human
ucacugaaugcagauacgugac

SEQ ID NO: 37391 - RNA, 22 nt, Human
ucacugauuaugaaaaugaagg

SEQ ID NO: 37392 - RNA, 22 nt, Human
ucacugcaaucucugccuucca

SEQ ID NO: 37393 - RNA, 21 nt, Human
ucacugcaaugcuaggagaaa

SEQ ID NO: 37394 - RNA, 22 nt, Human
ucacugcgcugacugcuacgau

SEQ ID NO: 37395 - RNA, 22 nt, Human
ucacugcucgauaacaugauua

SEQ ID NO: 37396 - RNA, 22 nt, Human
ucacugcuuuguuuacaacuau

SEQ ID NO: 37397 - RNA, 22 nt, Human
ucacuggaaaugcacagcugua

SEQ ID NO: 37398 - RNA, 21 nt, Human
ucacuggaauacaauugauuu

SEQ ID NO: 37399 - RNA, 22 nt, Human
ucacugggcaucggagcugaaa

SEQ ID NO: 37400 - RNA, 22 nt, Human
ucacuggguaggacaugcugau

SEQ ID NO: 37401 - RNA, 22 nt, Human
ucacuggucuuuggcuucucag

SEQ ID NO: 37402 - RNA, 22 nt, Human
ucacuguaaacuaggucagucc

SEQ ID NO: 37403 - RNA, 22 nt, Human
ucacuguauuuggaagggaugg

SEQ ID NO: 37404 - RNA, 22 nt, Human
ucacugucugaaagaaauggcc

SEQ ID NO: 37405 - RNA, 22 nt, Human
ucacugucuuuuaaggugguua

SEQ ID NO: 37406 - RNA, 21 nt, Human
ucacugugcaaauguugaugg

SEQ ID NO: 37407 - RNA, 19 nt, Human
ucacuucuguuagcaugga

SEQ ID NO: 37408 - RNA, 22 nt, Human
ucacuucuucccuugcacauau

SEQ ID NO: 37409 - RNA, 20 nt, Human
ucacuucuuccuuuugucua

SEQ ID NO: 37410 - RNA, 22 nt, Human
ucacuugaccucuugaacuccu

SEQ ID NO: 37411 - RNA, 22 nt, Human
ucacuugagagauauuagaagu

SEQ ID NO: 37412 - RNA, 22 nt, Human
ucacuuuaccucauucaggcag

SEQ ID NO: 37413 - RNA, 22 nt, Human
ucacuuuuugauaucauucugc

SEQ ID NO: 37414 - RNA, 22 nt, Human
ucagaaaagguagcugugacaa

SEQ ID NO: 37415 - RNA, 22 nt, Human
ucagaaacacucuucuucuguc

SEQ ID NO: 37416 - RNA, 22 nt, Human
ucagaaaccagcucucucaauu

SEQ ID NO: 37417 - RNA, 22 nt, Human
ucagaaagguucuauguuuuac

SEQ ID NO: 37418 - RNA, 22 nt, Human
ucagaaagugaacuguugacau

SEQ ID NO: 37419 - RNA, 22 nt, Human
ucagaaauacaaaacacuuacu

SEQ ID NO: 37420 - RNA, 22 nt, Human
ucagaaauacuaucagcuuuug

SEQ ID NO: 37421 - RNA, 22 nt, Human
ucagaaauagucuuuaaaauga

SEQ ID NO: 37422 - RNA, 22 nt, Human
ucagaaauguaagcugaugacu

SEQ ID NO: 37423 - RNA, 22 nt, Human
ucagaaauuuaggcuggacuug

SEQ ID NO: 37424 - RNA, 22 nt, Human
ucagaacagaagcuggcuauaa

SEQ ID NO: 37425 - RNA, 20 nt, Human
ucagaacaguagaggagcua

SEQ ID NO: 37426 - RNA, 22 nt, Human
ucagaacagugccuggcacuaa

SEQ ID NO: 37427 - RNA, 22 nt, Human
ucagaacauggcauguuccauc

SEQ ID NO: 37428 - RNA, 22 nt, Human
ucagaacauuaaggauuugaag

SEQ ID NO: 37429 - RNA, 22 nt, Human
ucagaacauugacauucuuauu

SEQ ID NO: 37430 - RNA, 22 nt, Human
ucagaacauuugggacuuuggg

SEQ ID NO: 37431 - RNA, 22 nt, Human
ucagaagaguaauagggugaga

SEQ ID NO: 37432 - RNA, 22 nt, Human
ucagaagcaaacaucacucuag

SEQ ID NO: 37433 - RNA, 22 nt, Human
ucagaagcagauauuucaaaau

SEQ ID NO: 37434 - RNA, 22 nt, Human
ucagaagcauguggggagccug

SEQ ID NO: 37435 - RNA, 22 nt, Human
ucagaagccaccuuuuguuggg

SEQ ID NO: 37436 - RNA, 22 nt, Human
ucagaagcugggucucagaagc

SEQ ID NO: 37437 - RNA, 22 nt, Human
ucagaaggaaacgaugccagcu

SEQ ID NO: 37438 - RNA, 22 nt, Human
ggcuauccauggaucugaacuc

SEQ ID NO: 37439 - RNA, 22 nt, Human
ggcuauggcaaagaacucagau

SEQ ID NO: 37440 - RNA, 22 nt, Human
ggcuauguggucauauaagaua

SEQ ID NO: 37441 - RNA, 22 nt, Human
ggcucagaccucccagcuccag

SEQ ID NO: 37442 - RNA, 22 nt, Human
ggcucagcaaugaugagccccu

SEQ ID NO: 37443 - RNA, 22 nt, Human
ggcucaggccuguaauccuagc

SEQ ID NO: 37444 - RNA, 22 nt, Human
ggcucaggggccaggccugucc

SEQ ID NO: 37445 - RNA, 22 nt, Human
ggcucagguugggucacaugac

SEQ ID NO: 37446 - RNA, 20 nt, Human
ggcucaucuugucugcugac

SEQ ID NO: 37447 - RNA, 22 nt, Human
ggcuccacaauuacacacugga

SEQ ID NO: 37448 - RNA, 22 nt, Human
ggcuccagauguccccuggcaa

SEQ ID NO: 37449 - RNA, 22 nt, Human
ggcuccagcccuggcucuucac

SEQ ID NO: 37450 - RNA, 22 nt, Human
gcagguggggcugcuaccagaa

SEQ ID NO: 37451 - RNA, 22 nt, Human
gcaggugguccccguggagugg

SEQ ID NO: 37452 - RNA, 22 nt, Human
gcaggugguuaaggucccaugu

SEQ ID NO: 37453 - RNA, 23 nt, Human
gcaggugguucgaacagaaguuu

SEQ ID NO: 37454 - RNA, 22 nt, Human
gcagguguccugggcuggcagu

SEQ ID NO: 37455 - RNA, 22 nt, Human
gcaggugucuucauggaacucu

SEQ ID NO: 37456 - RNA, 18 nt, Human
gcagguguggagaagggg

SEQ ID NO: 37457 - RNA, 22 nt, Human
gcagguguggaguggggugagc

SEQ ID NO: 37458 - RNA, 22 nt, Human
gcagguguuuuaagacauugaa

SEQ ID NO: 37459 - RNA, 22 nt, Human
gcaguaggagaagaggaugcuu

SEQ ID NO: 37460 - RNA, 18 nt, Human
gcaguaggcgcgcaggac

SEQ ID NO: 37461 - RNA, 22 nt, Human
gcaguaguucgucuguguuccc

SEQ ID NO: 37462 - RNA, 22 nt, Human
gcaguaguuuauggcuaaaccu

SEQ ID NO: 37463 - RNA, 22 nt, Human
gcaguaucuaugugauggguug

SEQ ID NO: 37464 - RNA, 21 nt, Human
gcagucacucgguuggcuacc

SEQ ID NO: 37465 - RNA, 22 nt, Human
gcagucagacaggaggagcucc

SEQ ID NO: 37466 - RNA, 22 nt, Human
gcaguccucauccuuuagcagu

SEQ ID NO: 37467 - RNA, 22 nt, Human
gcaguccucguaaaggucgaag

SEQ ID NO: 37468 - RNA, 22 nt, Human
gcaguccugggauucuguccuu

SEQ ID NO: 37469 - RNA, 22 nt, Human
gcagucuccauauacauuuaca

SEQ ID NO: 37470 - RNA, 20 nt, Human
gcagucugucacagagcaug

SEQ ID NO: 37471 - RNA, 19 nt, Human
gcagucuguugaagggcag

SEQ ID NO: 37472 - RNA, 22 nt, Human
gcagucuuuuucuucuagcuaa

SEQ ID NO: 37473 - RNA, 22 nt, Human
gcagugaaacaauaggaucaaa

SEQ ID NO: 37474 - RNA, 22 nt, Human
gcagugaacauaacacagaagg

SEQ ID NO: 37475 - RNA, 22 nt, Human
gcagugaaucuggcaagaauuu

SEQ ID NO: 37476 - RNA, 22 nt, Human
gcagugaauuuaacacucagau

SEQ ID NO: 37477 - RNA, 22 nt, Human
gcagugacagggcugcugccuu

SEQ ID NO: 37478 - RNA, 22 nt, Human
gcagugauaacuuuacucuuuu

SEQ ID NO: 37479 - RNA, 22 nt, Human
gcagugauggggaucucacugg

SEQ ID NO: 37480 - RNA, 20 nt, Human
gcagugauuugucuauguuu

SEQ ID NO: 37481 - RNA, 22 nt, Human
gcagugauuuugcucagauaaa

SEQ ID NO: 37482 - RNA, 18 nt, Human
gcagugcaggaagaagag

SEQ ID NO: 37483 - RNA, 22 nt, Human
gcagugcucugccuauaaugga

SEQ ID NO: 37484 - RNA, 23 nt, Human
gcagugcuuggcacagcuggguc

SEQ ID NO: 37485 - RNA, 22 nt, Human
gcaguggaagccucuuuaagca

SEQ ID NO: 37486 - RNA, 22 nt, Human
gcaguggauggccagcaggggc

SEQ ID NO: 37487 - RNA, 22 nt, Human
gcaguggcagagacagcaccaa

SEQ ID NO: 37488 - RNA, 22 nt, Human
gcaguggcagcugaggggguau

SEQ ID NO: 37489 - RNA, 22 nt, Human
gcaguggcaugaugugggcuca

SEQ ID NO: 37490 - RNA, 22 nt, Human
gcagugggcaacaagagcugga

SEQ ID NO: 37491 - RNA, 22 nt, Human
gcagugggccugaggaagggug

SEQ ID NO: 37492 - RNA, 22 nt, Human
gcaguggggaaugcuggggaga

SEQ ID NO: 37493 - RNA, 21 nt, Human
gcagugucaugguuucaaguu

SEQ ID NO: 37494 - RNA, 22 nt, Human
gcaguguccaggguggucugca

SEQ ID NO: 37495 - RNA, 23 nt, Human
gcagugugaauccaguguuucag

SEQ ID NO: 37496 - RNA, 22 nt, Human
gcagugugaccgagcuugcuuc

SEQ ID NO: 37497 - RNA, 22 nt, Human
gcaguguguagaguuuaggaaa

SEQ ID NO: 37498 - RNA, 22 nt, Human
gcaguguguuuggauaacacac

SEQ ID NO: 37499 - RNA, 22 nt, Human
gcaguguuacuugguuugcaga

SEQ ID NO: 37500 - RNA, 22 nt, Human
gcaguguucuuguugcuuuuau

SEQ ID NO: 37501 - RNA, 22 nt, Human
gcaguguuguuaaaagauuaga

SEQ ID NO: 37502 - RNA, 22 nt, Human
gcaguguuuacauauuagaaac

SEQ ID NO: 37503 - RNA, 22 nt, Human
gcaguguuucaaaucaaaggca

SEQ ID NO: 37504 - RNA, 22 nt, Human
gcaguguuuggauccauagcga

SEQ ID NO: 37505 - RNA, 22 nt, Human
gcaguucacccaagugcagaga

SEQ ID NO: 37506 - RNA, 22 nt, Human
gcaguucuccagaauaaagggu

SEQ ID NO: 37507 - RNA, 21 nt, Human
gcaguuuauguaauaugcacu

SEQ ID NO: 37508 - RNA, 22 nt, Human
gcaguuugaaaguaugagucca

SEQ ID NO: 37509 - RNA, 22 nt, Human
gcaguuugagguuuucugaugu

SEQ ID NO: 37510 - RNA, 22 nt, Human
gcaguuuuaguggaucuggggc

SEQ ID NO: 37511 - RNA, 19 nt, Human
gcauaaaaugucaaugugu

SEQ ID NO: 37512 - RNA, 22 nt, Human
gcauacaguccuuguauucuuc

SEQ ID NO: 37513 - RNA, 22 nt, Human
gcauacauugcacccugguagu

SEQ ID NO: 37514 - RNA, 22 nt, Human
gugaggcauugaagaccggaau

SEQ ID NO: 37515 - RNA, 16 nt, Human
gugagggacauagcuu

SEQ ID NO: 37516 - RNA, 22 nt, Human
gugagggcaaauuagaaucaaa

SEQ ID NO: 37517 - RNA, 17 nt, Human
gugagggcagaggaugg

SEQ ID NO: 37518 - RNA, 21 nt, Human
gugagguauuaggaccuacau

SEQ ID NO: 37519 - RNA, 22 nt, Human
gugaggugaguagugagaagcc

SEQ ID NO: 37520 - RNA, 22 nt, Human
gugaggugccuaauaccgugac

SEQ ID NO: 37521 - RNA, 22 nt, Human
gugagucugccuagcacaucac

SEQ ID NO: 37522 - RNA, 23 nt, Human
gugagucuugccuuugcugugga

SEQ ID NO: 37523 - RNA, 22 nt, Human
gugagugucagucaaagguuuu

SEQ ID NO: 37524 - RNA, 22 nt, Human
gugauaaaauagaaacaguggu

SEQ ID NO: 37525 - RNA, 22 nt, Human
gugauaaagacgugucauaauu

SEQ ID NO: 37526 - RNA, 22 nt, Human
gugauaagacaguaggcacaag

SEQ ID NO: 37527 - RNA, 22 nt, Human
gugauacaggauggugauaaau

SEQ ID NO: 37528 - RNA, 22 nt, Human
gugauauuuuuaaagauuaagg

SEQ ID NO: 37529 - RNA, 22 nt, Human
gugaucuuguaauugggcaaug

SEQ ID NO: 37530 - RNA, 22 nt, Human
gugauucugaaauauuagaaaa

SEQ ID NO: 37531 - RNA, 22 nt, Human
gugauucugauauagcuaaagu

SEQ ID NO: 37532 - RNA, 22 nt, Human
gugauucuguguguaaauuuua

SEQ ID NO: 37533 - RNA, 18 nt, Human
gugauucuuauuuguaca

SEQ ID NO: 37534 - RNA, 22 nt, Human
gugauugugaaaacauuaagaa

SEQ ID NO: 37535 - RNA, 22 nt, Human
gugauuuaguguuaaguauguu

SEQ ID NO: 37536 - RNA, 23 nt, Human
gugauuucagggaacagaaucag

SEQ ID NO: 37537 - RNA, 22 nt, Human
gugauuucuaaucaucugaaug

SEQ ID NO: 37538 - RNA, 22 nt, Human
gugauuuugagaccuauauagu

SEQ ID NO: 37539 - RNA, 22 nt, Human
gugcaaaaaucuaucaccagca

SEQ ID NO: 37540 - RNA, 22 nt, Human
gugcaaaagcaauugcaguuuu

SEQ ID NO: 37541 - RNA, 22 nt, Human
gugcaaaagcaguuggauuuuu

SEQ ID NO: 37542 - RNA, 22 nt, Human
gugcaaaaguaaaugugguuuu

SEQ ID NO: 37543 - RNA, 22 nt, Human
gugcaaaaguaauggcaguuuu

SEQ ID NO: 37544 - RNA, 22 nt, Human
gugcaaaauuuggccaauaaca

SEQ ID NO: 37545 - RNA, 22 nt, Human
gugcaaauguaauugcaguuuu

SEQ ID NO: 37546 - RNA, 22 nt, Human
gugcaaauuccacuggaaagcu

SEQ ID NO: 37547 - RNA, 22 nt, Human
gugcaauccaguugauuuuuac

SEQ ID NO: 37548 - RNA, 22 nt, Human
gugcaaucugguuaauacgacu

SEQ ID NO: 37549 - RNA, 22 nt, Human
gugcaauggggcaauaucagcu

SEQ ID NO: 37550 - RNA, 22 nt, Human
gugcaaugucugugauaugaaa

SEQ ID NO: 37551 - RNA, 22 nt, Human
gugcaaugugcuucgugccaug

SEQ ID NO: 37552 - RNA, 22 nt, Human
gugcacacauacaugaacgcug

SEQ ID NO: 37553 - RNA, 22 nt, Human
gugcacacucuuggggcacuuu

SEQ ID NO: 37554 - RNA, 22 nt, Human
gugcacagaaacauacaaugug

SEQ ID NO: 37555 - RNA, 22 nt, Human
gugcacagaaauugguaagacu

SEQ ID NO: 37556 - RNA, 22 nt, Human
gugcacaggugggaaaaugagu

SEQ ID NO: 37557 - RNA, 22 nt, Human
gugcacuugaucuagacagauu

SEQ ID NO: 37558 - RNA, 22 nt, Human
gugcacuuugggagucucagug

SEQ ID NO: 37559 - RNA, 20 nt, Human
gcucuaaaccacaaagccca

SEQ ID NO: 37560 - RNA, 22 nt, Human
gcucuaacuauuaagaggucau

SEQ ID NO: 37561 - RNA, 22 nt, Human
gcucuagaucauaggucauuau

SEQ ID NO: 37562 - RNA, 22 nt, Human
gcucuagcccauuuccugcuug

SEQ ID NO: 37563 - RNA, 22 nt, Human
gcucuagcuggcgcugaccugg

SEQ ID NO: 37564 - RNA, 22 nt, Human
gcucuaggaggugugcuuagaa

SEQ ID NO: 37565 - RNA, 22 nt, Human
gcucuaugggcacagccagugu

SEQ ID NO: 37566 - RNA, 23 nt, Human
gcucuauguguuauagcuguuuu

SEQ ID NO: 37567 - RNA, 22 nt, Human
gcucuauguugaccuucagugg

SEQ ID NO: 37568 - RNA, 22 nt, Human
gcucucagaagagccaggcuac

SEQ ID NO: 37569 - RNA, 22 nt, Human
gcucucagaaguaacuugucca

SEQ ID NO: 37570 - RNA, 22 nt, Human
gcucucagcccacugaggggaa

SEQ ID NO: 37571 - RNA, 21 nt, Human
gcucucagcugccugcugguu

SEQ ID NO: 37572 - RNA, 22 nt, Human
gcucuccaggggcucccaggau

SEQ ID NO: 37573 - RNA, 22 nt, Human
gcucucucccuaggcaagugag

SEQ ID NO: 37574 - RNA, 22 nt, Human
gcucucugcaagucagcagccu

SEQ ID NO: 37575 - RNA, 21 nt, Human
gcucucugcaugguggcucag

SEQ ID NO: 37576 - RNA, 22 nt, Human
gcucucugggugugucuagaua

SEQ ID NO: 37577 - RNA, 22 nt, Human
gcucucugguuccagucaggaa

SEQ ID NO: 37578 - RNA, 22 nt, Human
gcucugagaaccaggaacacag

SEQ ID NO: 37579 - RNA, 22 nt, Human
gcucugagacacaaagggugca

SEQ ID NO: 37580 - RNA, 22 nt, Human
gcucugagacaguagagauggc

SEQ ID NO: 37581 - RNA, 22 nt, Human
gcucugagagcuacacagggua

SEQ ID NO: 37582 - RNA, 22 nt, Human
gcucugagaggugcagcaguaa

SEQ ID NO: 37583 - RNA, 22 nt, Human
gcucugagauugagccuuuggu

SEQ ID NO: 37584 - RNA, 22 nt, Human
gcucugagcacugugcggcugg

SEQ ID NO: 37585 - RNA, 22 nt, Human
gcucugaggagccaagaaugug

SEQ ID NO: 37586 - RNA, 22 nt, Human
gcucugagucucagcuaccaca

SEQ ID NO: 37587 - RNA, 18 nt, Human
gcucugcaggugcucggu

SEQ ID NO: 37588 - RNA, 23 nt, Human
gcucugccacuuaauagcugugu

SEQ ID NO: 37589 - RNA, 22 nt, Human
gcucugccagacacuguggcca

SEQ ID NO: 37590 - RNA, 18 nt, Human
gcucugcccaggcugccc

SEQ ID NO: 37591 - RNA, 22 nt, Human
gcucugcccugggccguuguaa

SEQ ID NO: 37592 - RNA, 17 nt, Human
gcucugccucucccacc

SEQ ID NO: 37593 - RNA, 22 nt, Human
gcucugcucuaacauuccugac

SEQ ID NO: 37594 - RNA, 22 nt, Human
gcucugcugaagccccuugcau

SEQ ID NO: 37595 - RNA, 22 nt, Human
gcucugcugagauaucugggag

SEQ ID NO: 37596 - RNA, 22 nt, Human
gcucugcuggaaguucucugga

SEQ ID NO: 37597 - RNA, 22 nt, Human
gcucugcuguggaauccucucc

SEQ ID NO: 37598 - RNA, 22 nt, Human
gcucugcuguguuuguucagca

SEQ ID NO: 37599 - RNA, 22 nt, Human
gcucugcuuucuggggggaucc

SEQ ID NO: 37600 - RNA, 22 nt, Human
gcucuggaagcaucugagagga

SEQ ID NO: 37601 - RNA, 22 nt, Human
gcucuggauccggcugggucug

SEQ ID NO: 37602 - RNA, 22 nt, Human
gcucuggggaugcuucugccgu

SEQ ID NO: 37603 - RNA, 22 nt, Human
gcucuggggcccagggaucaca

SEQ ID NO: 37604 - RNA, 15 nt, Human
gcucuggguauuuga

SEQ ID NO: 37605 - RNA, 22 nt, Human
gcucugggugaaggguaccauu

SEQ ID NO: 37606 - RNA, 22 nt, Human
gcucugggugaauggcagauug

SEQ ID NO: 37607 - RNA, 22 nt, Human
gcucuggugaguguaguucagg

SEQ ID NO: 37608 - RNA, 22 nt, Human
gcucuguaugagggugagagau

SEQ ID NO: 37609 - RNA, 22 nt, Human
gcucuguauguaguucuugcuu

SEQ ID NO: 37610 - RNA, 22 nt, Human
gcucugucaacagcuagcugug

SEQ ID NO: 37611 - RNA, 22 nt, Human
gcucuguccagcgugcacagaa

SEQ ID NO: 37612 - RNA, 22 nt, Human
gcucugugagccacuugaugua

SEQ ID NO: 37613 - RNA, 19 nt, Human
gcucugugaugcugagggg

SEQ ID NO: 37614 - RNA, 22 nt, Human
gcucugugccccugccguggac

SEQ ID NO: 37615 - RNA, 22 nt, Human
gcucuguggcauucaugggcag

SEQ ID NO: 37616 - RNA, 22 nt, Human
gcucugugggggaaauccuggg

SEQ ID NO: 37617 - RNA, 22 nt, Human
gcucugugggugaguagaaucu

SEQ ID NO: 37618 - RNA, 22 nt, Human
gcucuguguuccucuggauugc

SEQ ID NO: 37619 - RNA, 22 nt, Human
gcucuguuaacaguccagcuuu

SEQ ID NO: 37620 - RNA, 22 nt, Human
gcucuguucaucaguuuguugg

SEQ ID NO: 37621 - RNA, 22 nt, Human
gcucuguuucuccaugcugugg

SEQ ID NO: 37622 - RNA, 22 nt, Human
gcucuuauagucccagcauguu

SEQ ID NO: 37623 - RNA, 22 nt, Human
gcucuucucagauuguacacuc

SEQ ID NO: 37624 - RNA, 22 nt, Human
gcucuugaaauaauggcuaaug

SEQ ID NO: 37625 - RNA, 22 nt, Human
gcucuugacagcuacaucuggc

SEQ ID NO: 37626 - RNA, 22 nt, Human
gcucuugacucccaguucugug

SEQ ID NO: 37627 - RNA, 22 nt, Human
gcucuuggccaaguggaagggu

SEQ ID NO: 37628 - RNA, 22 nt, Human
gcucuugggggacagauggagu

SEQ ID NO: 37629 - RNA, 22 nt, Human
gcucuuggucucagccucugaa

SEQ ID NO: 37630 - RNA, 22 nt, Human
gcucuugucagagaggccagcu

SEQ ID NO: 37631 - RNA, 18 nt, Human
gcucuuucugucuccagc

SEQ ID NO: 37632 - RNA, 22 nt, Human
gcucuuuucacaguccaaaaug

SEQ ID NO: 37633 - RNA, 22 nt, Human
gcugaaaugccuuguaaauauu

SEQ ID NO: 37634 - RNA, 22 nt, Human
gcugaaauuagacugcagaagu

SEQ ID NO: 37635 - RNA, 22 nt, Human
gcugaagagcaaggcugggucu

SEQ ID NO: 37636 - RNA, 22 nt, Human
gcugaagcugcagcaggaggaa

SEQ ID NO: 37637 - RNA, 19 nt, Human
gcugaaggaggugccugca

SEQ ID NO: 37638 - RNA, 22 nt, Human
gcugaaggucucuggagagguc

SEQ ID NO: 37639 - RNA, 22 nt, Human
gcugaaguaacucacaucguua

SEQ ID NO: 37640 - RNA, 22 nt, Human
gcugaagugcuuuugaauuugg

SEQ ID NO: 37641 - RNA, 22 nt, Human
gcugaaguggcgugaucagaau

SEQ ID NO: 37642 - RNA, 22 nt, Human
gcugaaguguggagugacaguu

SEQ ID NO: 37643 - RNA, 22 nt, Human
gcugaauagaagucuucaaagg

SEQ ID NO: 37644 - RNA, 22 nt, Human
gcugaaugaauguauuuuaaaa

SEQ ID NO: 37645 - RNA, 22 nt, Human
gcugacaguuacugcuguaaca

SEQ ID NO: 37646 - RNA, 22 nt, Human
gcugacaguuguaccugccccu

SEQ ID NO: 37647 - RNA, 22 nt, Human
gcugaccauuaggaggacgaua

SEQ ID NO: 37648 - RNA, 22 nt, Human
gcugacucuuugacaaaaugca

SEQ ID NO: 37649 - RNA, 22 nt, Human
gcugagaaaugcagacaugcug

SEQ ID NO: 37650 - RNA, 17 nt, Human
gcugagaaggggaagag

SEQ ID NO: 37651 - RNA, 22 nt, Human
gcugagaaucaagauggagagg

SEQ ID NO: 37652 - RNA, 22 nt, Human
gcugagagcaaggacaaagcau

SEQ ID NO: 37653 - RNA, 22 nt, Human
gcugagaguccaggaaaacauc

SEQ ID NO: 37654 - RNA, 22 nt, Human
gcugagagugagcacuggauau

SEQ ID NO: 37655 - RNA, 22 nt, Human
gcugagcacagccuguguccuc

SEQ ID NO: 37656 - RNA, 22 nt, Human
gcugagcagccuaagcaaauuu

SEQ ID NO: 37657 - RNA, 22 nt, Human
gccuggcagauugacauagcca

SEQ ID NO: 37658 - RNA, 22 nt, Human
gccuggcagccuccaaccuuca

SEQ ID NO: 37659 - RNA, 22 nt, Human
gccuggcaggccugggccagca

SEQ ID NO: 37660 - RNA, 22 nt, Human
gccuggcagggcccggacggca

SEQ ID NO: 37661 - RNA, 22 nt, Human
gccuggcaguggggcccuggga

SEQ ID NO: 37662 - RNA, 19 nt, Human
gccuggcaguguacaaggc

SEQ ID NO: 37663 - RNA, 22 nt, Human
gccuggccugaacuaggaggug

SEQ ID NO: 37664 - RNA, 22 nt, Human
gccuggcgccgggcugccuguc

SEQ ID NO: 37665 - RNA, 22 nt, Human
gccuggcuaauuuugguauuuu

SEQ ID NO: 37666 - RNA, 22 nt, Human
gccuggcuacccacugaaauau

SEQ ID NO: 37667 - RNA, 22 nt, Human
gccuggcuaguuagugucaggu

SEQ ID NO: 37668 - RNA, 22 nt, Human
gcugaggaggugugguuaggug

SEQ ID NO: 37669 - RNA, 22 nt, Human
gcugaggauuacuugaagucag

SEQ ID NO: 37670 - RNA, 22 nt, Human
gcugaggcucaagucauggguc

SEQ ID NO: 37671 - RNA, 22 nt, Human
gcugagggccgcauagggucau

SEQ ID NO: 37672 - RNA, 20 nt, Human
gcugaggggucuauggcaua

SEQ ID NO: 37673 - RNA, 22 nt, Human
gcugaggucaggagcugugggg

SEQ ID NO: 37674 - RNA, 20 nt, Human
gcugaggucauuaugccuca

SEQ ID NO: 37675 - RNA, 22 nt, Human
gcugaggugucaccuugcuggg

SEQ ID NO: 37676 - RNA, 22 nt, Human
gcugagguuucaggaguggcag

SEQ ID NO: 37677 - RNA, 22 nt, Human
gcugagugaggcugucaaaaug

SEQ ID NO: 37678 - RNA, 22 nt, Human
gcugauaaauaguugauguacc

SEQ ID NO: 37679 - RNA, 23 nt, Human
gcugauaaugcauucuguuuaau

SEQ ID NO: 37680 - RNA, 22 nt, Human
gcugauggcuugcuggcugaca

SEQ ID NO: 37681 - RNA, 22 nt, Human
gcugauguaagacuuuugguuu

SEQ ID NO: 37682 - RNA, 22 nt, Human
gcugauuuugagaagcacaguc

SEQ ID NO: 37683 - RNA, 21 nt, Human
gcugcaaauucuaacaauuau

SEQ ID NO: 37684 - RNA, 22 nt, Human
gcugcaagucauggcuuuugca

SEQ ID NO: 37685 - RNA, 22 nt, Human
gcugcacauggcagaggccuuu

SEQ ID NO: 37686 - RNA, 22 nt, Human
gcugcaccagcuccaccagggc

SEQ ID NO: 37687 - RNA, 22 nt, Human
gcugcaccagcugcacccagua

SEQ ID NO: 37688 - RNA, 22 nt, Human
gcugcagagccuggagcccugg

SEQ ID NO: 37689 - RNA, 22 nt, Human
gcugcagagggaggggcucgca

SEQ ID NO: 37690 - RNA, 19 nt, Human
gcugcagaggugaagaaga

SEQ ID NO: 37691 - RNA, 22 nt, Human
gcugcagagugaugaagugggg

SEQ ID NO: 37692 - RNA, 22 nt, Human
gcugcagcaagcccuccagggg

SEQ ID NO: 37693 - RNA, 22 nt, Human
gcugcagcagaaguucucagag

SEQ ID NO: 37694 - RNA, 22 nt, Human
gcugcagcagcugcaggguugu

SEQ ID NO: 37695 - RNA, 22 nt, Human
gcugcagcuguaggacacaauu

SEQ ID NO: 37696 - RNA, 22 nt, Human
gcugcagggaauguauggauuu

SEQ ID NO: 37697 - RNA, 22 nt, Human
gcugcaggggggucuggacuug

SEQ ID NO: 37698 - RNA, 22 nt, Human
gcugcaguguuggaccucaggg

SEQ ID NO: 37699 - RNA, 22 nt, Human
gcugcaugacagacaggccugg

SEQ ID NO: 37700 - RNA, 22 nt, Human
gcugccacgaucucugcuguag

SEQ ID NO: 37701 - RNA, 22 nt, Human
gcugccagccagggugggaucc

SEQ ID NO: 37702 - RNA, 22 nt, Human
gcugccagcccucggggucuga

SEQ ID NO: 37703 - RNA, 22 nt, Human
gcugccagcuuuccuuggcuga

SEQ ID NO: 37704 - RNA, 22 nt, Human
gcugccaggcccuggggcuaug

SEQ ID NO: 37705 - RNA, 22 nt, Human
gcugccaggggcagcugucuca

SEQ ID NO: 37706 - RNA, 20 nt, Human
gcugccagugccugaugcuu

SEQ ID NO: 37707 - RNA, 22 nt, Human
gcugccaguguggcaugaugca

SEQ ID NO: 37708 - RNA, 22 nt, Human
gcugccaucagaguucaggaau

SEQ ID NO: 37709 - RNA, 22 nt, Human
gcugcccaaugguagugucuuu

SEQ ID NO: 37710 - RNA, 22 nt, Human
gcugcccagcaggccccagggg

SEQ ID NO: 37711 - RNA, 22 nt, Human
gcugcccagugugcucaugcag

SEQ ID NO: 37712 - RNA, 22 nt, Human
gcugcccuaauaucacauguua

SEQ ID NO: 37713 - RNA, 22 nt, Human
gcugcccugcaucugugccuuc

SEQ ID NO: 37714 - RNA, 22 nt, Human
gcugcccugugguccagcaggu

SEQ ID NO: 37715 - RNA, 22 nt, Human
gcugccucacuccagcccaaua

SEQ ID NO: 37716 - RNA, 22 nt, Human
gcugccuccugagauuugggca

SEQ ID NO: 37717 - RNA, 23 nt, Human
gcugccucuguuggucuucaguu

SEQ ID NO: 37718 - RNA, 22 nt, Human
gcugccugcacagagcugcuuu

SEQ ID NO: 37719 - RNA, 22 nt, Human
gcugccugccuaguuccacagu

SEQ ID NO: 37720 - RNA, 22 nt, Human
gcugccugcuucaugugggaga

SEQ ID NO: 37721 - RNA, 22 nt, Human
gcugccuggcugaugaaaauuc

SEQ ID NO: 37722 - RNA, 22 nt, Human
gcugccuggcuuuaguccacuu

SEQ ID NO: 37723 - RNA, 22 nt, Human
gcugccugguuucucagcugca

SEQ ID NO: 37724 - RNA, 22 nt, Human
gcugccugucuguuucuuuuau

SEQ ID NO: 37725 - RNA, 20 nt, Human
gcugccuguuucuguaagua

SEQ ID NO: 37726 - RNA, 22 nt, Human
gcugccuuaacuucuucgcugu

SEQ ID NO: 37727 - RNA, 22 nt, Human
gcugccuuaugucuauuaguau

SEQ ID NO: 37728 - RNA, 22 nt, Human
gcugccuuccauaauguacgua

SEQ ID NO: 37729 - RNA, 22 nt, Human
gcugccuucccaggccuuugcu

SEQ ID NO: 37730 - RNA, 22 nt, Human
gcugccuucccggaaugucauc

SEQ ID NO: 37731 - RNA, 20 nt, Human
gcugccuuguccugcuuggu

SEQ ID NO: 37732 - RNA, 22 nt, Human
gcugccuuuagggggugcucag

SEQ ID NO: 37733 - RNA, 22 nt, Human
gcugccuuuugcuccucccacc

SEQ ID NO: 37734 - RNA, 22 nt, Human
gcugcgccggaucccacguucc

SEQ ID NO: 37735 - RNA, 22 nt, Human
gcugcggucacugcgggggcug

SEQ ID NO: 37736 - RNA, 22 nt, Human
gcugcgguggcuggcgauggga

SEQ ID NO: 37737 - RNA, 22 nt, Human
gcugcuccagcugugcugcaga

SEQ ID NO: 37738 - RNA, 22 nt, Human
gcugcuccaguguucugucuag

SEQ ID NO: 37739 - RNA, 20 nt, Human
gcugcucgcugcagucacuc

SEQ ID NO: 37740 - RNA, 22 nt, Human
gcugcucucagagcucaugcug

SEQ ID NO: 37741 - RNA, 22 nt, Human
gcugcucugaaaaugacuguug

SEQ ID NO: 37742 - RNA, 22 nt, Human
gcugcucugcuguguaagcagg

SEQ ID NO: 37743 - RNA, 22 nt, Human
gcugcucuggcucugcaguguc

SEQ ID NO: 37744 - RNA, 22 nt, Human
gcugcucugggucugcccagcu

SEQ ID NO: 37745 - RNA, 21 nt, Human
gcugcugccccuagugaggcc

SEQ ID NO: 37746 - RNA, 22 nt, Human
gcugcugccgcggccgcuggga

SEQ ID NO: 37747 - RNA, 19 nt, Human
gcugcugcuccucccucgc

SEQ ID NO: 37748 - RNA, 22 nt, Human
gcugcugcugaggaugcaccug

SEQ ID NO: 37749 - RNA, 22 nt, Human
gcugcugcuugaaggcucggag

SEQ ID NO: 37750 - RNA, 22 nt, Human
gcugcuggaagcaugcgaugaa

SEQ ID NO: 37751 - RNA, 22 nt, Human
gcugcuggagcuuugcagaagg

SEQ ID NO: 37752 - RNA, 22 nt, Human
gcugcugggagggaucguaaau

SEQ ID NO: 37753 - RNA, 22 nt, Human
gcugcugggcacccccugagcu

SEQ ID NO: 37754 - RNA, 22 nt, Human
gcugcuggggccuucccucggg

SEQ ID NO: 37755 - RNA, 22 nt, Human
gcugcugggucccucugugcca

SEQ ID NO: 37756 - RNA, 22 nt, Human
gcugcuguccuuagggaguucu

SEQ ID NO: 37757 - RNA, 22 nt, Human
gcugcugucucaugcgaugcgg

SEQ ID NO: 37758 - RNA, 22 nt, Human
gcugcugugugggagacaggcg

SEQ ID NO: 37759 - RNA, 22 nt, Human
gcugcuguguuggagagggacu

SEQ ID NO: 37760 - RNA, 22 nt, Human
gcugcuuccuuuccugcugacc

SEQ ID NO: 37761 - RNA, 22 nt, Human
gcugcuucucugauggagucca

SEQ ID NO: 37762 - RNA, 22 nt, Human
gcugcuuuacugaagagauaug

SEQ ID NO: 37763 - RNA, 22 nt, Human
gcugcuuuauaaucucggcaga

SEQ ID NO: 37764 - RNA, 20 nt, Human
gcugcuuucaaaugacacgu

SEQ ID NO: 37765 - RNA, 22 nt, Human
gcugcuuugacagugggaacag

SEQ ID NO: 37766 - RNA, 22 nt, Human
gcugcuuugcaguagaguaaua

SEQ ID NO: 37767 - RNA, 22 nt, Human
gcugcuuuggggaugaaugaga

SEQ ID NO: 37768 - RNA, 22 nt, Human
gcugcuuugucuguaaaaugga

SEQ ID NO: 37769 - RNA, 22 nt, Human
gcuggaaaucaaagaaguggau

SEQ ID NO: 37770 - RNA, 22 nt, Human
gcuggaaaucauauuuuguugu

SEQ ID NO: 37771 - RNA, 22 nt, Human
gcuggaaggcuaggcucaguug

SEQ ID NO: 37772 - RNA, 22 nt, Human
gcuggacccggccccucaccuc

SEQ ID NO: 37773 - RNA, 22 nt, Human
gcuggacuagaagcagggcuca

SEQ ID NO: 37774 - RNA, 22 nt, Human
uaaagugcuggauuugaguaaa

SEQ ID NO: 37775 - RNA, 22 nt, Human
uaaaguggaaggauccacuaag

SEQ ID NO: 37776 - RNA, 22 nt, Human
uaaaguguaugccaucucucau

SEQ ID NO: 37777 - RNA, 22 nt, Human
ggcauugaugggagauggugga

SEQ ID NO: 37778 - RNA, 22 nt, Human
ggcauugucuauuugcauucau

SEQ ID NO: 37779 - RNA, 22 nt, Human
ggcauuuaauccaucugauuga

SEQ ID NO: 37780 - RNA, 22 nt, Human
ggcauuugagccauuggccugu

SEQ ID NO: 37781 - RNA, 22 nt, Human
ggcauuuuugacaaagagcaau

SEQ ID NO: 37782 - RNA, 22 nt, Human
ggccaaauccuccaugguggcu

SEQ ID NO: 37783 - RNA, 22 nt, Human
ggccaagaucccauuauacaaa

SEQ ID NO: 37784 - RNA, 22 nt, Human
ggccaaggaugguggcucuggu

SEQ ID NO: 37785 - RNA, 23 nt, Human
ggccacaaauagucuccccuggc

SEQ ID NO: 37786 - RNA, 22 nt, Human
ggccacagaacagcuacaggac

SEQ ID NO: 37787 - RNA, 17 nt, Human
ggccacagagcuugggg

SEQ ID NO: 37788 - RNA, 22 nt, Human
ggccacagucucuggaaggaug

SEQ ID NO: 37789 - RNA, 22 nt, Human
ggccaccaaaguccuguggcuu

SEQ ID NO: 37790 - RNA, 20 nt, Human
ggccaccugcuucagacccc

SEQ ID NO: 37791 - RNA, 22 nt, Human
ggccacucggccaccccugccg

SEQ ID NO: 37792 - RNA, 23 nt, Human
ggccacugaauuuucugcaucuu

SEQ ID NO: 37793 - RNA, 22 nt, Human
ggccagacugagugaggucaag

SEQ ID NO: 37794 - RNA, 22 nt, Human
ggccagagcugaccuaucaaug

SEQ ID NO: 37795 - RNA, 22 nt, Human
ggccagaggaccucucauagcc

SEQ ID NO: 37796 - RNA, 22 nt, Human
ggccagaggugguacauagcuu

SEQ ID NO: 37797 - RNA, 21 nt, Human
ggccagcagcguccacugugg

SEQ ID NO: 37798 - RNA, 22 nt, Human
ggccagcaggcccugugauccu

SEQ ID NO: 37799 - RNA, 22 nt, Human
ggccagcucagacuccacuugc

SEQ ID NO: 37800 - RNA, 18 nt, Human
ggccagcuccugaggcag

SEQ ID NO: 37801 - RNA, 22 nt, Human
ggccagcuccuuggcagugccu

SEQ ID NO: 37802 - RNA, 21 nt, Human
ggccagcucggaaggucccau

SEQ ID NO: 37803 - RNA, 22 nt, Human
ggccagcucuuguccacggagg

SEQ ID NO: 37804 - RNA, 22 nt, Human
ggccagcugagcugcugcacag

SEQ ID NO: 37805 - RNA, 22 nt, Human
ggccagcugcucagugucucug

SEQ ID NO: 37806 - RNA, 20 nt, Human
ggccagcuggaggcgccggg

SEQ ID NO: 37807 - RNA, 22 nt, Human
ggccagcuguaagcugcugaau

SEQ ID NO: 37808 - RNA, 22 nt, Human
ggccagcugugggauuuucugc

SEQ ID NO: 37809 - RNA, 22 nt, Human
ggccagcuucuggacaaagucc

SEQ ID NO: 37810 - RNA, 22 nt, Human
ggccagcuuucugucuucuagg

SEQ ID NO: 37811 - RNA, 22 nt, Human
ggccaggagauggacaccacau

SEQ ID NO: 37812 - RNA, 22 nt, Human
ggccaggaucuguuuguccacc

SEQ ID NO: 37813 - RNA, 22 nt, Human
ggccaggccaagaggguuggaa

SEQ ID NO: 37814 - RNA, 22 nt, Human
ggccaggcugguuccuugaccu

SEQ ID NO: 37815 - RNA, 22 nt, Human
ggccagggggcuucagacucca

SEQ ID NO: 37816 - RNA, 22 nt, Human
ggccagucugggccacggucgg

SEQ ID NO: 37817 - RNA, 22 nt, Human
ggccagugugcaggucagagau

SEQ ID NO: 37818 - RNA, 22 nt, Human
ggccaucugccucaaugugugc

SEQ ID NO: 37819 - RNA, 22 nt, Human
ggccaugcaggucagagguggg

SEQ ID NO: 37820 - RNA, 22 nt, Human
ggccaugccaggcugccuggga

SEQ ID NO: 37821 - RNA, 22 nt, Human
ggccaugcuguugccugcuggu

SEQ ID NO: 37822 - RNA, 23 nt, Human
ggccauggagacuuagaaugggc

SEQ ID NO: 37823 - RNA, 22 nt, Human
ggccauggggacagagggugaa

SEQ ID NO: 37824 - RNA, 17 nt, Human
ggccauggugcaagguu

SEQ ID NO: 37825 - RNA, 22 nt, Human
ggcccaaggcccaggucgagcu

SEQ ID NO: 37826 - RNA, 22 nt, Human
ggcccacuugaaauggagcuca

SEQ ID NO: 37827 - RNA, 22 nt, Human
ggcccagcacagugcuuggggg

SEQ ID NO: 37828 - RNA, 22 nt, Human
ggcccagccucagacaugcccu

SEQ ID NO: 37829 - RNA, 22 nt, Human
ggcccagcugggcggggacacg

SEQ ID NO: 37830 - RNA, 22 nt, Human
ggcccaguguggguggauguug

SEQ ID NO: 37831 - RNA, 22 nt, Human
ggcccaugacccuagccaacug

SEQ ID NO: 37832 - RNA, 22 nt, Human
ggccccagcagugcuuguuuau

SEQ ID NO: 37833 - RNA, 22 nt, Human
ggccccaggccuuuggucuggc

SEQ ID NO: 37834 - RNA, 22 nt, Human
ggccccagggauuaggccaacc

SEQ ID NO: 37835 - RNA, 22 nt, Human
ggccccuguaaaauguacaugu

SEQ ID NO: 37836 - RNA, 22 nt, Human
ggcccucccugagccagguggg

SEQ ID NO: 37837 - RNA, 22 nt, Human
ggcccucugaguagcugcaaac

SEQ ID NO: 37838 - RNA, 22 nt, Human
ggcccucuggcuuccgcauggg

SEQ ID NO: 37839 - RNA, 22 nt, Human
ggcccugagucuagcugcucuu

SEQ ID NO: 37840 - RNA, 22 nt, Human
ggcccugcaugagauuaagguu

SEQ ID NO: 37841 - RNA, 22 nt, Human
ggcccugggaugcucagcagug

SEQ ID NO: 37842 - RNA, 22 nt, Human
ggcccugggcagaggagugggc

SEQ ID NO: 37843 - RNA, 22 nt, Human
ggcccugggcccucuagcuugu

SEQ ID NO: 37844 - RNA, 22 nt, Human
ggcccugugauggauguauuag

SEQ ID NO: 37845 - RNA, 22 nt, Human
ggcccugugguuuugcaaaguc

SEQ ID NO: 37846 - RNA, 22 nt, Human
ggcccuguuagagcucccacaa

SEQ ID NO: 37847 - RNA, 21 nt, Human
ggccuaggggcagauggugcu

SEQ ID NO: 37848 - RNA, 23 nt, Human
ggccuaugggcaggcaaggaagc

SEQ ID NO: 37849 - RNA, 22 nt, Human
ggccucagaccggagcuggcca

SEQ ID NO: 37850 - RNA, 22 nt, Human
ggccucagggucacucuguaga

SEQ ID NO: 37851 - RNA, 22 nt, Human
ggccucagugggccgcugcagg

SEQ ID NO: 37852 - RNA, 22 nt, Human
ggccucaguuucuccauggguu

SEQ ID NO: 37853 - RNA, 23 nt, Human
ggccuccuggucuaggcuagacu

SEQ ID NO: 37854 - RNA, 22 nt, Human
ggccucucuagcauccagccug

SEQ ID NO: 37855 - RNA, 22 nt, Human
ggccucucuccagucagugcag

SEQ ID NO: 37856 - RNA, 22 nt, Human
ggccucugcaacuggcuguggc

SEQ ID NO: 37857 - RNA, 19 nt, Human
ggccucugcaggccgcccc

SEQ ID NO: 37858 - RNA, 21 nt, Human
ggccucugccuugccccacuc

SEQ ID NO: 37859 - RNA, 22 nt, Human
ggccucuggucaagacaagcau

SEQ ID NO: 37860 - RNA, 22 nt, Human
ggccucugguucguggugaccu

SEQ ID NO: 37861 - RNA, 21 nt, Human
ggccucugucauccugggaag

SEQ ID NO: 37862 - RNA, 22 nt, Human
ggccucuucugcucauacuuuc

SEQ ID NO: 37863 - RNA, 22 nt, Human
ggccugacugaccugauucuaa

SEQ ID NO: 37864 - RNA, 22 nt, Human
ggccugagaaccauggggccaa

SEQ ID NO: 37865 - RNA, 22 nt, Human
ggccugagaauguaccagaucu

SEQ ID NO: 37866 - RNA, 22 nt, Human
ggccugagcagacagcaugaug

SEQ ID NO: 37867 - RNA, 22 nt, Human
ggccugagcuugggcagcguau

SEQ ID NO: 37868 - RNA, 18 nt, Human
ggccugaggauuucagca

SEQ ID NO: 37869 - RNA, 22 nt, Human
ggccugagggugggcucucagu

SEQ ID NO: 37870 - RNA, 17 nt, Human
ggccugcaagaacgaga

SEQ ID NO: 37871 - RNA, 22 nt, Human
ggccugcacagagguggcucua

SEQ ID NO: 37872 - RNA, 18 nt, Human
ggccugcagugaagcaag

SEQ ID NO: 37873 - RNA, 22 nt, Human
ggccugcuccgggggcugagcu

SEQ ID NO: 37874 - RNA, 22 nt, Human
ggccugcugggccccacagucc

SEQ ID NO: 37875 - RNA, 22 nt, Human
ggccugcuggggccucagacac

SEQ ID NO: 37876 - RNA, 22 nt, Human
ggccugcuuuccgagccugcag

SEQ ID NO: 37877 - RNA, 23 nt, Human
ggccuggcccagggcccugauga

SEQ ID NO: 37878 - RNA, 22 nt, Human
ggccugugcacaugugcaggaa

SEQ ID NO: 37879 - RNA, 22 nt, Human
ucagaaggaagaagucauggga

SEQ ID NO: 37880 - RNA, 22 nt, Human
ucagaaggaaguuagaguaugg

SEQ ID NO: 37881 - RNA, 22 nt, Human
ucagaaggcccguugcuaagag

SEQ ID NO: 37882 - RNA, 22 nt, Human
ucagaagguacagaagggaggu

SEQ ID NO: 37883 - RNA, 22 nt, Human
ucagaagguggagguugcagug

SEQ ID NO: 37884 - RNA, 20 nt, Human
ucagaagugcagcugccccu

SEQ ID NO: 37885 - RNA, 23 nt, Human
ucagaagugggauacaaagcuga

SEQ ID NO: 37886 - RNA, 22 nt, Human
uccagcaugaaggggcuuuuau

SEQ ID NO: 37887 - RNA, 22 nt, Human
uccagcauuuuucaauagaauu

SEQ ID NO: 37888 - RNA, 22 nt, Human
uccagccaagggagguuacuag

SEQ ID NO: 37889 - RNA, 22 nt, Human
uccagccaaucagagcugaggc

SEQ ID NO: 37890 - RNA, 22 nt, Human
uccagccacguauuaucucacu

SEQ ID NO: 37891 - RNA, 22 nt, Human
uccagccacuugcacaguuaaa

SEQ ID NO: 37892 - RNA, 22 nt, Human
uccagccaggauggcccaggga

SEQ ID NO: 37893 - RNA, 22 nt, Human
uccagccauaucuuguagcccu

SEQ ID NO: 37894 - RNA, 22 nt, Human
uccagccauucauuaugacacc

SEQ ID NO: 37895 - RNA, 20 nt, Human
uccagcccagcagccugaca

SEQ ID NO: 37896 - RNA, 22 nt, Human
uccagcccaggcuggaguguag

SEQ ID NO: 37897 - RNA, 22 nt, Human
uccagcccaguuuggugaauug

SEQ ID NO: 37898 - RNA, 22 nt, Human
uccagccccuccugagccaagc

SEQ ID NO: 37899 - RNA, 22 nt, Human
uccagcccgggggcaggugacc

SEQ ID NO: 37900 - RNA, 22 nt, Human
uccagcccugcacugauuagau

SEQ ID NO: 37901 - RNA, 17 nt, Human
uccagcccugcccgacg

SEQ ID NO: 37902 - RNA, 22 nt, Human
uccagcccugcuuccugccuca

SEQ ID NO: 37903 - RNA, 22 nt, Human
uccagcccugugucugggagag

SEQ ID NO: 37904 - RNA, 22 nt, Human
uccagccucauuucuccugcuu

SEQ ID NO: 37905 - RNA, 23 nt, Human
uccagccucuugcucucacaugc

SEQ ID NO: 37906 - RNA, 19 nt, Human
uccagccugcuguuucucu

SEQ ID NO: 37907 - RNA, 22 nt, Human
uccagccuucucaaggcuggcu

SEQ ID NO: 37908 - RNA, 22 nt, Human
uccagccuugccacuuuucugu

SEQ ID NO: 37909 - RNA, 22 nt, Human
uccagcuaacaccuacuggcca

SEQ ID NO: 37910 - RNA, 22 nt, Human
uccagcucaaauucagcuucca

SEQ ID NO: 37911 - RNA, 22 nt, Human
uccagcucacagauagcguggg

SEQ ID NO: 37912 - RNA, 17 nt, Human
uccagcuccucauuguu

SEQ ID NO: 37913 - RNA, 22 nt, Human
uccagcuccucuacccgaugcg

SEQ ID NO: 37914 - RNA, 21 nt, Human
uccagcuccugccacuccuua

SEQ ID NO: 37915 - RNA, 22 nt, Human
uccagcucuggcuuggcuagcu

SEQ ID NO: 37916 - RNA, 22 nt, Human
gggaaguuuguuuggacuggga

SEQ ID NO: 37917 - RNA, 22 nt, Human
gggaaucuuccuuuuuuguaag

SEQ ID NO: 37918 - RNA, 22 nt, Human
gggaauguaaucauggaaugcu

SEQ ID NO: 37919 - RNA, 22 nt, Human
gggaaugugaaacaguaaggga

SEQ ID NO: 37920 - RNA, 22 nt, Human
gggaauuauagcugucacaggc

SEQ ID NO: 37921 - RNA, 22 nt, Human
gggacaaccaacuuagcauuac

SEQ ID NO: 37922 - RNA, 22 nt, Human
gggacacagccaucuguguuuu

SEQ ID NO: 37923 - RNA, 21 nt, Human
gggacaccaacuccagggcuu

SEQ ID NO: 37924 - RNA, 22 nt, Human
gggacacucaaugagaccugca

SEQ ID NO: 37925 - RNA, 22 nt, Human
gggacacuggacccagugucca

SEQ ID NO: 37926 - RNA, 22 nt, Human
gggacaggcugagacuugagcu

SEQ ID NO: 37927 - RNA, 22 nt, Human
gggacaucuuucuagucagggu

SEQ ID NO: 37928 - RNA, 22 nt, Human
gggaccagaagaaggaugguga

SEQ ID NO: 37929 - RNA, 23 nt, Human
gggaccagcuagggcugugaccu

SEQ ID NO: 37930 - RNA, 22 nt, Human
gggacccucaacaucugcuucu

SEQ ID NO: 37931 - RNA, 22 nt, Human
gggaccucuggagucggccuua

SEQ ID NO: 37932 - RNA, 22 nt, Human
gggaccuggcaccuuugcucug

SEQ ID NO: 37933 - RNA, 22 nt, Human
gggaccuggggacuccuuguuc

SEQ ID NO: 37934 - RNA, 23 nt, Human
gggaccugguaggaggugauugg

SEQ ID NO: 37935 - RNA, 22 nt, Human
gggacgggcacggagggcccuc

SEQ ID NO: 37936 - RNA, 22 nt, Human
gggacgggcaguccaagggguc

SEQ ID NO: 37937 - RNA, 17 nt, Human
gggacucaagauggggu

SEQ ID NO: 37938 - RNA, 22 nt, Human
gggacuccauaagcacauggau

SEQ ID NO: 37939 - RNA, 22 nt, Human
gggacucugagagccugagggu

SEQ ID NO: 37940 - RNA, 19 nt, Human
gggacuggaggauguggag

SEQ ID NO: 37941 - RNA, 22 nt, Human
gggacuggaguagaggccggug

SEQ ID NO: 37942 - RNA, 22 nt, Human
gggacugggagauccuccuggc

SEQ ID NO: 37943 - RNA, 22 nt, Human
gggacuguaaauucauauggcc

SEQ ID NO: 37944 - RNA, 22 nt, Human
gggacuguccggcagaagguac

SEQ ID NO: 37945 - RNA, 22 nt, Human
gggagaaggagcuaguucuuga

SEQ ID NO: 37946 - RNA, 20 nt, Human
gggagaagggcugaugagag

SEQ ID NO: 37947 - RNA, 22 nt, Human
gggagacaaggagaaccaaaga

SEQ ID NO: 37948 - RNA, 19 nt, Human
gggagacagcucugggcug

SEQ ID NO: 37949 - RNA, 22 nt, Human
gggagacaguucagauaguuuc

SEQ ID NO: 37950 - RNA, 22 nt, Human
gggagacccccaaugccagguc

SEQ ID NO: 37951 - RNA, 22 nt, Human
gggagacuagugcuauguuuuc

SEQ ID NO: 37952 - RNA, 22 nt, Human
gggagagaaauuauagcaauga

SEQ ID NO: 37953 - RNA, 19 nt, Human
gggagagccaggcucaccc

SEQ ID NO: 37954 - RNA, 22 nt, Human
gggagauggcucagaggccgcg

SEQ ID NO: 37955 - RNA, 22 nt, Human
gggagcacugagaggcagguag

SEQ ID NO: 37956 - RNA, 19 nt, Human
gggagcaggaaagcugugg

SEQ ID NO: 37957 - RNA, 22 nt, Human
gggagcaggacauaauagcaau

SEQ ID NO: 37958 - RNA, 22 nt, Human
gggagcaggagccugccugcca

SEQ ID NO: 37959 - RNA, 23 nt, Human
gggagccaggaccucgcgcccca

SEQ ID NO: 37960 - RNA, 22 nt, Human
gggagccuugggagugccagcc

SEQ ID NO: 37961 - RNA, 22 nt, Human
gggagcucgugcgcccaggugc

SEQ ID NO: 37962 - RNA, 22 nt, Human
gggagcugaacugcugaaguug

SEQ ID NO: 37963 - RNA, 22 nt, Human
gggagcugaggagccccgucgg

SEQ ID NO: 37964 - RNA, 22 nt, Human
gggagcugaucagguggauuca

SEQ ID NO: 37965 - RNA, 22 nt, Human
gggagcugaugauguaaguccc

SEQ ID NO: 37966 - RNA, 22 nt, Human
gggagcugccuuagaccggagg

SEQ ID NO: 37967 - RNA, 22 nt, Human
gggagcuggagcuggaagacuc

SEQ ID NO: 37968 - RNA, 22 nt, Human
gggagcuggaguuguguugccu

SEQ ID NO: 37969 - RNA, 22 nt, Human
gggagcuguaagggacagguag

SEQ ID NO: 37970 - RNA, 22 nt, Human
gggagcuucuggaaggcaggaa

SEQ ID NO: 37971 - RNA, 22 nt, Human
gggaggaaaugugcagcgaauu

SEQ ID NO: 37972 - RNA, 22 nt, Human
gggaggaggaauguuuugugua

SEQ ID NO: 37973 - RNA, 20 nt, Human
gggaggcgagggcugagcag

SEQ ID NO: 37974 - RNA, 22 nt, Human
gggaggcucugcucagcccccg

SEQ ID NO: 37975 - RNA, 22 nt, Human
gggaggcugccauccuucagga

SEQ ID NO: 37976 - RNA, 22 nt, Human
gggagggaaagcuugaucuguc

SEQ ID NO: 37977 - RNA, 22 nt, Human
gggagggaaggaccuuaugaau

SEQ ID NO: 37978 - RNA, 22 nt, Human
gggagggaagguaccuguguga

SEQ ID NO: 37979 - RNA, 21 nt, Human
gggagggauggaaaugauguu

SEQ ID NO: 37980 - RNA, 22 nt, Human
gggagggccaggcucacccagg

SEQ ID NO: 37981 - RNA, 22 nt, Human
gggagggucugccaugcucccu

SEQ ID NO: 37982 - RNA, 22 nt, Human
gggaggucagggugccugcugg

SEQ ID NO: 37983 - RNA, 22 nt, Human
gggagguccuaaaggggaccag

SEQ ID NO: 37984 - RNA, 22 nt, Human
gggagguguuccaguguuggua

SEQ ID NO: 37985 - RNA, 22 nt, Human
gggagguucuguucgcacuuga

SEQ ID NO: 37986 - RNA, 22 nt, Human
gggaguaaacuauggugaggau

SEQ ID NO: 37987 - RNA, 20 nt, Human
gggagucuggaugaaagaug

SEQ ID NO: 37988 - RNA, 22 nt, Human
gggagucugggcuagacuccuu

SEQ ID NO: 37989 - RNA, 22 nt, Human
gggaguggagagcaauggauga

SEQ ID NO: 37990 - RNA, 22 nt, Human
gggaguggauuauguggaccca

SEQ ID NO: 37991 - RNA, 22 nt, Human
gggaucugacuugcuggugggu

SEQ ID NO: 37992 - RNA, 22 nt, Human
gggaucugaugcacugcugaaa

SEQ ID NO: 37993 - RNA, 22 nt, Human
gggaucuguguugcgauggauu

SEQ ID NO: 37994 - RNA, 21 nt, Human
gggaucuuguacuggcgugga

SEQ ID NO: 37995 - RNA, 21 nt, Human
gguggcucaccugauuggaua

SEQ ID NO: 37996 - RNA, 22 nt, Human
gguggcucagggcuccaagcau

SEQ ID NO: 37997 - RNA, 22 nt, Human
gguggcucucugucagugacag

SEQ ID NO: 37998 - RNA, 22 nt, Human
gguggcucucuuaagggcagcg

SEQ ID NO: 37999 - RNA, 22 nt, Human
gguggcugaagcagucuucggg

SEQ ID NO: 38000 - RNA, 22 nt, Human
gguggcugaaucaaaucaggcc

SEQ ID NO: 38001 - RNA, 22 nt, Human
gguggcugcuuccucaagagga

SEQ ID NO: 38002 - RNA, 22 nt, Human
gguggcugggauuaguagccca

SEQ ID NO: 38003 - RNA, 22 nt, Human
ggugggaaggccacugaagguu

SEQ ID NO: 38004 - RNA, 22 nt, Human
ggugggagagcuugcuuugaug

SEQ ID NO: 38005 - RNA, 23 nt, Human
ggugggagauuauccagaauuau

SEQ ID NO: 38006 - RNA, 22 nt, Human
ggugggaggcaggcugcuccca

SEQ ID NO: 38007 - RNA, 22 nt, Human
ggugggaucaaagagucauucg

SEQ ID NO: 38008 - RNA, 22 nt, Human
ggugggaugccucuggagaagu

SEQ ID NO: 38009 - RNA, 22 nt, Human
ggugggauggaggaucuuagac

SEQ ID NO: 38010 - RNA, 21 nt, Human
ggugggcacaggagagcagag

SEQ ID NO: 38011 - RNA, 22 nt, Human
ggugggccaggaaggccgccag

SEQ ID NO: 38012 - RNA, 22 nt, Human
gguggggauuccugaucacugu

SEQ ID NO: 38013 - RNA, 22 nt, Human
gguggggcccuggcacugguau

SEQ ID NO: 38014 - RNA, 22 nt, Human
gguggggccugcuccagcggcc

SEQ ID NO: 38015 - RNA, 22 nt, Human
ggugggggagacuuggucaaga

SEQ ID NO: 38016 - RNA, 22 nt, Human
ggugggguauuugguacuugua

SEQ ID NO: 38017 - RNA, 22 nt, Human
gguggguauugaauacaggugu

SEQ ID NO: 38018 - RNA, 22 nt, Human
ggugggucuugcggggcagcuu

SEQ ID NO: 38019 - RNA, 22 nt, Human
ggugggucuuguggggcagcuu

SEQ ID NO: 38020 - RNA, 22 nt, Human
ggugggugaaaucuaggugugu

SEQ ID NO: 38021 - RNA, 22 nt, Human
gguggguggaaacagcauguac

SEQ ID NO: 38022 - RNA, 19 nt, Human
gguggguuggugguucccu

SEQ ID NO: 38023 - RNA, 22 nt, Human
gguggugaagacaaguggaagu

SEQ ID NO: 38024 - RNA, 23 nt, Human
ggugguggugagucacgggcuca

SEQ ID NO: 38025 - RNA, 22 nt, Human
gguguagcucugugucccacug

SEQ ID NO: 38026 - RNA, 22 nt, Human
ggugucaaauuauugaguuuca

SEQ ID NO: 38027 - RNA, 22 nt, Human
ggugucagauacauaggaagua

SEQ ID NO: 38028 - RNA, 22 nt, Human
gguguccucaugauuuucuaga

SEQ ID NO: 38029 - RNA, 21 nt, Human
gguguccugagggauagguag

SEQ ID NO: 38030 - RNA, 22 nt, Human
gguguccugggcaggcagcuga

SEQ ID NO: 38031 - RNA, 22 nt, Human
ggugucuaugauucaguuuaug

SEQ ID NO: 38032 - RNA, 21 nt, Human
uccagcucuuauguucaugaa

SEQ ID NO: 38033 - RNA, 19 nt, Human
uccagcugguaugcccaga

SEQ ID NO: 38034 - RNA, 20 nt, Human
uccagcuguugagaucugag

SEQ ID NO: 38035 - RNA, 22 nt, Human
uccagcuguuguuuuaucucag

SEQ ID NO: 38036 - RNA, 22 nt, Human
uccagcuuauagguagauuuaa

SEQ ID NO: 38037 - RNA, 22 nt, Human
uccagcuuggcagagcuaccug

SEQ ID NO: 38038 - RNA, 22 nt, Human
uccagcuugggugggaggaggu

SEQ ID NO: 38039 - RNA, 22 nt, Human
uccagcuuugccugaucauaua

SEQ ID NO: 38040 - RNA, 22 nt, Human
uccaggaaaaggcuugcagggg

SEQ ID NO: 38041 - RNA, 22 nt, Human
uccaggaaagcacugggcuggg

SEQ ID NO: 38042 - RNA, 22 nt, Human
uccaggaaagugggaugugugu

SEQ ID NO: 38043 - RNA, 21 nt, Human
uccaggaaaguuuuaagagug

SEQ ID NO: 38044 - RNA, 22 nt, Human
uccaggaaaucagaagugguaa

SEQ ID NO: 38045 - RNA, 22 nt, Human
uccaggaacgagaggcugggca

SEQ ID NO: 38046 - RNA, 22 nt, Human
uccaggaaggacuaaugguuug

SEQ ID NO: 38047 - RNA, 22 nt, Human
uccaggaaucugugccuagccc

SEQ ID NO: 38048 - RNA, 21 nt, Human
uccaggaaugucuguucaucu

SEQ ID NO: 38049 - RNA, 22 nt, Human
uccaggacuagcauuucugaua

SEQ ID NO: 38050 - RNA, 22 nt, Human
uccaggacuauaggaaagacac

SEQ ID NO: 38051 - RNA, 22 nt, Human
uccaggacuuucuuaaggcacu

SEQ ID NO: 38052 - RNA, 23 nt, Human
uccaggagaaccccugucugucc

SEQ ID NO: 38053 - RNA, 20 nt, Human
uccaggagaacugggagccg

SEQ ID NO: 38054 - RNA, 23 nt, Human
uccaggagaauuccagggcccgg

SEQ ID NO: 38055 - RNA, 22 nt, Human
uccaggagacacaagguacaua

SEQ ID NO: 38056 - RNA, 22 nt, Human
uccaggagacacccuugugugu

SEQ ID NO: 38057 - RNA, 22 nt, Human
uccaggagaggccugaccaggu

SEQ ID NO: 38058 - RNA, 22 nt, Human
uccaggagagguagaggguucc

SEQ ID NO: 38059 - RNA, 22 nt, Human
uccaggagauacacugcaccag

SEQ ID NO: 38060 - RNA, 19 nt, Human
uccaggagcaaagccaguu

SEQ ID NO: 38061 - RNA, 22 nt, Human
uccaggaggcaccuuuggacca

SEQ ID NO: 38062 - RNA, 22 nt, Human
uccaggaggcagggcugugccc

SEQ ID NO: 38063 - RNA, 22 nt, Human
uccaggagggggagccgugccg

SEQ ID NO: 38064 - RNA, 22 nt, Human
uccaggagguaugaguggcccc

SEQ ID NO: 38065 - RNA, 22 nt, Human
uccaggagguugagugaguucc

SEQ ID NO: 38066 - RNA, 22 nt, Human
uccaggagucagacagauggug

SEQ ID NO: 38067 - RNA, 22 nt, Human
uccaggagugcugguuagagua

SEQ ID NO: 38068 - RNA, 21 nt, Human
uccaggaguggcugggcaggg

SEQ ID NO: 38069 - RNA, 21 nt, Human
uccaggaguucuaauaggugu

SEQ ID NO: 38070 - RNA, 22 nt, Human
uccaggaguuugagacugcagu

SEQ ID NO: 38071 - RNA, 22 nt, Human
uccaggauggugacgguggcca

SEQ ID NO: 38072 - RNA, 22 nt, Human
uccaggauugucagccagaagg

SEQ ID NO: 38073 - RNA, 22 nt, Human
uccaggcaaaaaccaacuacag

SEQ ID NO: 38074 - RNA, 22 nt, Human
uccaggcaaaaggaacugcuug

SEQ ID NO: 38075 - RNA, 17 nt, Human
uccaggcagcaacugag

SEQ ID NO: 38076 - RNA, 20 nt, Human
uccaggcagcucagaguguc

SEQ ID NO: 38077 - RNA, 22 nt, Human
uccaggcagggcagccaucaag

SEQ ID NO: 38078 - RNA, 22 nt, Human
uccaggcaucccccaggacaga

SEQ ID NO: 38079 - RNA, 22 nt, Human
uccaggcaugguguaauuuugc

SEQ ID NO: 38080 - RNA, 22 nt, Human
uccaggcaugucccaagccgga

SEQ ID NO: 38081 - RNA, 22 nt, Human
uccaggcauguggccaguacuc

SEQ ID NO: 38082 - RNA, 15 nt, Human
uccaggcauucauuc

SEQ ID NO: 38083 - RNA, 22 nt, Human
uccaggcauuccagccauucca

SEQ ID NO: 38084 - RNA, 22 nt, Human
uccaggcauuggagagauaaug

SEQ ID NO: 38085 - RNA, 22 nt, Human
uccaggccacauggauggcgau

SEQ ID NO: 38086 - RNA, 19 nt, Human
uccaggccauucccagagc

SEQ ID NO: 38087 - RNA, 22 nt, Human
uccaggcccacucagcugaaau

SEQ ID NO: 38088 - RNA, 22 nt, Human
uccaggcccacucgguggggcu

SEQ ID NO: 38089 - RNA, 22 nt, Human
uccaggcccauagacacuucuc

SEQ ID NO: 38090 - RNA, 22 nt, Human
uccaggccccagcaccuuggga

SEQ ID NO: 38091 - RNA, 22 nt, Human
uccaggccucuagccccuaucu

SEQ ID NO: 38092 - RNA, 22 nt, Human
uccaggcuaauuuugcauuguu

SEQ ID NO: 38093 - RNA, 22 nt, Human
uccaggcuacuuggauuccugg

SEQ ID NO: 38094 - RNA, 22 nt, Human
uccaggcuagaagucacaggcc

SEQ ID NO: 38095 - RNA, 22 nt, Human
uccaggcuagccugguagagaa

SEQ ID NO: 38096 - RNA, 22 nt, Human
uccaggcuccccugcgugcucc

SEQ ID NO: 38097 - RNA, 20 nt, Human
uccaggcuccuccacuuagu

SEQ ID NO: 38098 - RNA, 22 nt, Human
uccaggcuccugacuuuuuggg

SEQ ID NO: 38099 - RNA, 22 nt, Human
uccaggcugauccaugaagaau

SEQ ID NO: 38100 - RNA, 22 nt, Human
uccaggcuggacaugaggcggg

SEQ ID NO: 38101 - RNA, 18 nt, Human
uccaggcuggauugauga

SEQ ID NO: 38102 - RNA, 22 nt, Human
uccaggcuggccucgcgugaca

SEQ ID NO: 38103 - RNA, 22 nt, Human
uccaggcugggcugaagggugc

SEQ ID NO: 38104 - RNA, 22 nt, Human
guaacaaaguuucuaggugcug

SEQ ID NO: 38105 - RNA, 22 nt, Human
guaacacuuggcugcaaccugg

SEQ ID NO: 38106 - RNA, 22 nt, Human
guaacagaaagucaugcucauu

SEQ ID NO: 38107 - RNA, 22 nt, Human
guaacagagaacucagguguua

SEQ ID NO: 38108 - RNA, 22 nt, Human
guaacauaguuugugcuucauc

SEQ ID NO: 38109 - RNA, 16 nt, Human
guaacauucuguagcc

SEQ ID NO: 38110 - RNA, 22 nt, Human
guaacauuuugagcaguaggcu

SEQ ID NO: 38111 - RNA, 22 nt, Human
guaaccugggauguagcacaga

SEQ ID NO: 38112 - RNA, 22 nt, Human
guaaccugucggaaagccuugu

SEQ ID NO: 38113 - RNA, 22 nt, Human
guaacucuggguagaacucaug

SEQ ID NO: 38114 - RNA, 22 nt, Human
guaacugaggcagcuuuuaaga

SEQ ID NO: 38115 - RNA, 23 nt, Human
guaacuggggaauuugagcuaug

SEQ ID NO: 38116 - RNA, 22 nt, Human
guaagacauagauuucucauga

SEQ ID NO: 38117 - RNA, 22 nt, Human
guaagagcacugucuccugcug

SEQ ID NO: 38118 - RNA, 22 nt, Human
guaagaggagugggaagccuca

SEQ ID NO: 38119 - RNA, 22 nt, Human
guaagcaaacagcaaaugauuu

SEQ ID NO: 38120 - RNA, 17 nt, Human
guaaggcuugcagaugc

SEQ ID NO: 38121 - RNA, 22 nt, Human
guaagggauuugaacauagguu

SEQ ID NO: 38122 - RNA, 22 nt, Human
guaagucugaguguaauucaca

SEQ ID NO: 38123 - RNA, 22 nt, Human
guaaguuauauuaaaauuucag

SEQ ID NO: 38124 - RNA, 22 nt, Human
guaauaauacuagucagccuug

SEQ ID NO: 38125 - RNA, 22 nt, Human
guaauaaugguccccaaacacu

SEQ ID NO: 38126 - RNA, 22 nt, Human
guaauagaacacucagcaugga

SEQ ID NO: 38127 - RNA, 22 nt, Human
guaaucguggugguuaauucca

SEQ ID NO: 38128 - RNA, 22 nt, Human
guaaucuguaguaaagcaccau

SEQ ID NO: 38129 - RNA, 22 nt, Human
guaaugaaucaacauuaaugau

SEQ ID NO: 38130 - RNA, 22 nt, Human
guaaugaaugaaagaaacuggg

SEQ ID NO: 38131 - RNA, 22 nt, Human
guacaaaguggaccugauagua

SEQ ID NO: 38132 - RNA, 22 nt, Human
guacaaauugauacagauuuga

SEQ ID NO: 38133 - RNA, 22 nt, Human
guacaaggcauuuaucuguuca

SEQ ID NO: 38134 - RNA, 22 nt, Human
guacaaguugccuaccuuaagu

SEQ ID NO: 38135 - RNA, 22 nt, Human
guacaauagcaguuuucccuuu

SEQ ID NO: 38136 - RNA, 18 nt, Human
guacacaaagucaaagua

SEQ ID NO: 38137 - RNA, 22 nt, Human
guacacaaauaauaaaguuaca

SEQ ID NO: 38138 - RNA, 22 nt, Human
guacacacaaucucuggucagu

SEQ ID NO: 38139 - RNA, 22 nt, Human
guacacagaugcuugagaaucu

SEQ ID NO: 38140 - RNA, 22 nt, Human
guacacaggcagcccagugcug

SEQ ID NO: 38141 - RNA, 21 nt, Human
guacacagugguucugaggga

SEQ ID NO: 38142 - RNA, 20 nt, Human
guacacauauauguaugugu

SEQ ID NO: 38143 - RNA, 22 nt, Human
guacacauauuuccaaggguaa

SEQ ID NO: 38144 - RNA, 22 nt, Human
guacacauuaugcuucucuaaa

SEQ ID NO: 38145 - RNA, 20 nt, Human
guacacuucauguuucaccu

SEQ ID NO: 38146 - RNA, 22 nt, Human
guacacuugacucauaggaaau

SEQ ID NO: 38147 - RNA, 22 nt, Human
guacagaaauggggccccaggu

SEQ ID NO: 38148 - RNA, 22 nt, Human
guacagaaggagcuuuggauuc

SEQ ID NO: 38149 - RNA, 22 nt, Human
guacagaauuaugccaugaggg

SEQ ID NO: 38150 - RNA, 22 nt, Human
guacagcuaagaauuucaucuu

SEQ ID NO: 38151 - RNA, 22 nt, Human
guacaggaccgcggcccccugg

SEQ ID NO: 38152 - RNA, 22 nt, Human
guacaggcagcaaacaccauaa

SEQ ID NO: 38153 - RNA, 22 nt, Human
guacagggccccucagcagggc

SEQ ID NO: 38154 - RNA, 22 nt, Human
guacaguaaauguaaauggauu

SEQ ID NO: 38155 - RNA, 22 nt, Human
guacaguaaucccguucuucug

SEQ ID NO: 38156 - RNA, 22 nt, Human
guacaguagagccagguucagu

SEQ ID NO: 38157 - RNA, 22 nt, Human
guacagugccagacuucuaggu

SEQ ID NO: 38158 - RNA, 19 nt, Human
guacagugguaagcuauga

SEQ ID NO: 38159 - RNA, 22 nt, Human
guacagugugacuuuggaguga

SEQ ID NO: 38160 - RNA, 22 nt, Human
guacauauccuuuacguuuugu

SEQ ID NO: 38161 - RNA, 22 nt, Human
guacauauuaaaggucuauaaa

SEQ ID NO: 38162 - RNA, 22 nt, Human
guacauauuauaaaauacagcu

SEQ ID NO: 38163 - RNA, 22 nt, Human
guacaucuuuaaauuguucagu

SEQ ID NO: 38164 - RNA, 22 nt, Human
guacauuucauuuaaaugaugu

SEQ ID NO: 38165 - RNA, 20 nt, Human
guacauuuucaggaggggau

SEQ ID NO: 38166 - RNA, 22 nt, Human
guacccagaggcaugaucccag

SEQ ID NO: 38167 - RNA, 22 nt, Human
guacccaggcacgccuugcuga

SEQ ID NO: 38168 - RNA, 22 nt, Human
guacccuguggccagccagcca

SEQ ID NO: 38169 - RNA, 22 nt, Human
guacuaaaaaaugaucaguuug

SEQ ID NO: 38170 - RNA, 22 nt, Human
guacuaaacagagaaccaauau

SEQ ID NO: 38171 - RNA, 22 nt, Human
guacuaagucaggagaagaauu

SEQ ID NO: 38172 - RNA, 22 nt, Human
guacuagaugagacagcguggg

SEQ ID NO: 38173 - RNA, 22 nt, Human
guacucaguaauauaacauauu

SEQ ID NO: 38174 - RNA, 20 nt, Human
guacuucagguguggucuga

SEQ ID NO: 38175 - RNA, 22 nt, Human
guacuuccagccaagugagaca

SEQ ID NO: 38176 - RNA, 22 nt, Human
guacuucccugggaggcaagca

SEQ ID NO: 38177 - RNA, 22 nt, Human
guacuuccguggacuaauuguu

SEQ ID NO: 38178 - RNA, 22 nt, Human
guacuuucaggcuuucccuuaa

SEQ ID NO: 38179 - RNA, 22 nt, Human
guagaaauagugguugacagga

SEQ ID NO: 38180 - RNA, 22 nt, Human
guagaacuaggacuucagguau

SEQ ID NO: 38181 - RNA, 22 nt, Human
guagaauuuuaauaauggagau

SEQ ID NO: 38182 - RNA, 22 nt, Human
guagacaagcacaggacucaga

SEQ ID NO: 38183 - RNA, 22 nt, Human
guagaggacauuugacaugaug

SEQ ID NO: 38184 - RNA, 21 nt, Human
guagauaaagcauuuucauua

SEQ ID NO: 38185 - RNA, 18 nt, Human
guagauccuugagcuacc

SEQ ID NO: 38186 - RNA, 22 nt, Human
guagaucucagacuuugaaauu

SEQ ID NO: 38187 - RNA, 22 nt, Human
guagaugagcucacaugaccuu

SEQ ID NO: 38188 - RNA, 22 nt, Human
guagcagaaucagugcuacaga

SEQ ID NO: 38189 - RNA, 22 nt, Human
guagcagagcugagaguggaac

SEQ ID NO: 38190 - RNA, 22 nt, Human
guagcagagggcccagguaacu

SEQ ID NO: 38191 - RNA, 22 nt, Human
guagcaucuguuggcugcuccu

SEQ ID NO: 38192 - RNA, 16 nt, Human
guagccguggccgcug

SEQ ID NO: 38193 - RNA, 22 nt, Human
guagccuagaggucacgucuuc

SEQ ID NO: 38194 - RNA, 22 nt, Human
guagcuauuuaugauacucaug

SEQ ID NO: 38195 - RNA, 22 nt, Human
guagcuucaaguacucucccug

SEQ ID NO: 38196 - RNA, 22 nt, Human
guaggcagauaggagugcagcc

SEQ ID NO: 38197 - RNA, 22 nt, Human
guaggcagugcuugauuuucca

SEQ ID NO: 38198 - RNA, 20 nt, Human
guaggcauaugaccaauuac

SEQ ID NO: 38199 - RNA, 22 nt, Human
guagggacccacagucuauauu

SEQ ID NO: 38200 - RNA, 22 nt, Human
guagggcagaaguucaaugugg

SEQ ID NO: 38201 - RNA, 22 nt, Human
guaggggccagaaagacuuaga

SEQ ID NO: 38202 - RNA, 22 nt, Human
guaggucagacauaagaggaca

SEQ ID NO: 38203 - RNA, 22 nt, Human
guaguacaugaagcacuuggca

SEQ ID NO: 38204 - RNA, 22 nt, Human
guagugcgcauggccuguuugu

SEQ ID NO: 38205 - RNA, 22 nt, Human
guagugggugaggaaggaagga

SEQ ID NO: 38206 - RNA, 22 nt, Human
guaguuagaguugugcuggaga

SEQ ID NO: 38207 - RNA, 22 nt, Human
guaguuuucugaaaauuacuuu

SEQ ID NO: 38208 - RNA, 22 nt, Human
guauaaacauggagugcauucu

SEQ ID NO: 38209 - RNA, 22 nt, Human
guauaaaggcacagguuuucug

SEQ ID NO: 38210 - RNA, 19 nt, Human
guauaacuuacaccagcaa

SEQ ID NO: 38211 - RNA, 22 nt, Human
guauaagcccauucucagagac

SEQ ID NO: 38212 - RNA, 22 nt, Human
guauacauagaugaugaacaag

SEQ ID NO: 38213 - RNA, 22 nt, Human
gucaugugaauaaguguggggu

SEQ ID NO: 38214 - RNA, 22 nt, Human
gucauuccuuauguugauucag

SEQ ID NO: 38215 - RNA, 17 nt, Human
gucauucucagaaaaug

SEQ ID NO: 38216 - RNA, 22 nt, Human
gucauugauuuucaguuugucc

SEQ ID NO: 38217 - RNA, 22 nt, Human
gucauuuaaagaccauuguggg

SEQ ID NO: 38218 - RNA, 22 nt, Human
gucauuuaggucugucagaaau

SEQ ID NO: 38219 - RNA, 22 nt, Human
gucauuuaucuucagaauuucu

SEQ ID NO: 38220 - RNA, 22 nt, Human
gucauuuuaugggaacagauuu

SEQ ID NO: 38221 - RNA, 22 nt, Human
gucauuuuucacugcauauaga

SEQ ID NO: 38222 - RNA, 22 nt, Human
guccaagagauguaacgaagaa

SEQ ID NO: 38223 - RNA, 22 nt, Human
guccaaugguaaauccaaauaa

SEQ ID NO: 38224 - RNA, 22 nt, Human
guccacagcuggccagggccuc

SEQ ID NO: 38225 - RNA, 22 nt, Human
guccacagggauggccacacau

SEQ ID NO: 38226 - RNA, 21 nt, Human
guccacagggguuuguccugg

SEQ ID NO: 38227 - RNA, 22 nt, Human
guccaccauagggagggcgugg

SEQ ID NO: 38228 - RNA, 22 nt, Human
guccacccaugacaccugccug

SEQ ID NO: 38229 - RNA, 22 nt, Human
guccacucacucuuagucacuc

SEQ ID NO: 38230 - RNA, 22 nt, Human
guccacucuagggcagcucucg

SEQ ID NO: 38231 - RNA, 22 nt, Human
guccagaagcucaaguugaacu

SEQ ID NO: 38232 - RNA, 22 nt, Human
guccagagauggacgagcagau

SEQ ID NO: 38233 - RNA, 22 nt, Human
guccagagcuggcacacuguca

SEQ ID NO: 38234 - RNA, 22 nt, Human
guccagagggcugcaggaugcu

SEQ ID NO: 38235 - RNA, 22 nt, Human
guccagccagcugguccuugcc

SEQ ID NO: 38236 - RNA, 22 nt, Human
guccagcuccagggaggcaggc

SEQ ID NO: 38237 - RNA, 22 nt, Human
guccagcugcagcugggcagaa

SEQ ID NO: 38238 - RNA, 22 nt, Human
guccagcugggccagggcacuc

SEQ ID NO: 38239 - RNA, 20 nt, Human
guccaggacccagcaggagg

SEQ ID NO: 38240 - RNA, 22 nt, Human
guccaggcaccucccuugugcu

SEQ ID NO: 38241 - RNA, 22 nt, Human
guccaggccaugguggacacag

SEQ ID NO: 38242 - RNA, 22 nt, Human
guccaggccccagggauucuug

SEQ ID NO: 38243 - RNA, 22 nt, Human
guccaggccugccucugaggag

SEQ ID NO: 38244 - RNA, 22 nt, Human
guccaggcucaaaagguuguua

SEQ ID NO: 38245 - RNA, 22 nt, Human
guccagggggcuuaagcaaacu

SEQ ID NO: 38246 - RNA, 22 nt, Human
guccagucacugucaauguucc

SEQ ID NO: 38247 - RNA, 22 nt, Human
guccagugcuaacagguugagg

SEQ ID NO: 38248 - RNA, 22 nt, Human
guccagugcuuauagaaucagu

SEQ ID NO: 38249 - RNA, 22 nt, Human
guccaguggucaauuaucugga

SEQ ID NO: 38250 - RNA, 22 nt, Human
guccaguuucagggucugcgcu

SEQ ID NO: 38251 - RNA, 22 nt, Human
guccauacaguggcacacaucu

SEQ ID NO: 38252 - RNA, 22 nt, Human
guccauccgugguagcauggau

SEQ ID NO: 38253 - RNA, 22 nt, Human
guccaugauucuguguaguaga

SEQ ID NO: 38254 - RNA, 22 nt, Human
guccaugcuuaaauaccuuaaa

SEQ ID NO: 38255 - RNA, 22 nt, Human
guccauggcauuuccgucacau

SEQ ID NO: 38256 - RNA, 22 nt, Human
guccaugguugcuuucauguaa

SEQ ID NO: 38257 - RNA, 22 nt, Human
gucccacugggcaacuagaaaa

SEQ ID NO: 38258 - RNA, 22 nt, Human
gucccaggaguugcugggccuu

SEQ ID NO: 38259 - RNA, 22 nt, Human
gucccaggugggcuccaccucu

SEQ ID NO: 38260 - RNA, 22 nt, Human
gucccauaaguagugcaacuug

SEQ ID NO: 38261 - RNA, 22 nt, Human
gucccauuuucuacuauggaau

SEQ ID NO: 38262 - RNA, 22 nt, Human
guccccagagcugguggugguu

SEQ ID NO: 38263 - RNA, 22 nt, Human
guccccagcuaaucucuuugcc

SEQ ID NO: 38264 - RNA, 22 nt, Human
gucccccugaaagcagccgcag

SEQ ID NO: 38265 - RNA, 22 nt, Human
gucccucugugucccugcaguc

SEQ ID NO: 38266 - RNA, 22 nt, Human
gggcugugccucaggugggguc

SEQ ID NO: 38267 - RNA, 18 nt, Human
gggcuguguucaugccca

SEQ ID NO: 38268 - RNA, 22 nt, Human
gggcuuauggagggcuuuguac

SEQ ID NO: 38269 - RNA, 22 nt, Human
gggcuucaauagcagaggcgug

SEQ ID NO: 38270 - RNA, 22 nt, Human
gggcuucagcuggggauggagc

SEQ ID NO: 38271 - RNA, 22 nt, Human
gggcuucaggagggucagccca

SEQ ID NO: 38272 - RNA, 22 nt, Human
gggcuucaguaccaaaguuuga

SEQ ID NO: 38273 - RNA, 23 nt, Human
gggcuucauuuuaauucagcugc

SEQ ID NO: 38274 - RNA, 22 nt, Human
gggcuucuagaauuucugauau

SEQ ID NO: 38275 - RNA, 22 nt, Human
gggcuucuagaccagcagugag

SEQ ID NO: 38276 - RNA, 22 nt, Human
gggcuucuauucuggcacaaga

SEQ ID NO: 38277 - RNA, 22 nt, Human
gggcuucucucagaaacuauca

SEQ ID NO: 38278 - RNA, 22 nt, Human
gggcuucucugggaguccuggu

SEQ ID NO: 38279 - RNA, 22 nt, Human
gggcuucuguaccuaccuggaa

SEQ ID NO: 38280 - RNA, 22 nt, Human
gggcuugaggugaagguaggga

SEQ ID NO: 38281 - RNA, 22 nt, Human
gggcuugcugauuugggcagga

SEQ ID NO: 38282 - RNA, 22 nt, Human
gggcuuuaaucuuguuaacuag

SEQ ID NO: 38283 - RNA, 18 nt, Human
gggcuuuacagaguggag

SEQ ID NO: 38284 - RNA, 17 nt, Human
gggcuuuagguggugua

SEQ ID NO: 38285 - RNA, 22 nt, Human
ggggaaacugaggcacagacag

SEQ ID NO: 38286 - RNA, 22 nt, Human
ggggaaagugaauuguguagug

SEQ ID NO: 38287 - RNA, 22 nt, Human
ggggaagaaauagaacauuuug

SEQ ID NO: 38288 - RNA, 22 nt, Human
ggggaagaccuggcacuacagc

SEQ ID NO: 38289 - RNA, 22 nt, Human
ggggaagagcauugcacggugu

SEQ ID NO: 38290 - RNA, 22 nt, Human
ggggaagaggcgugauggaucc

SEQ ID NO: 38291 - RNA, 22 nt, Human
ggggaagauggcccuccaugug

SEQ ID NO: 38292 - RNA, 23 nt, Human
ggggacagagggcagcccgcauc

SEQ ID NO: 38293 - RNA, 20 nt, Human
ggggacccagaaucacagcu

SEQ ID NO: 38294 - RNA, 22 nt, Human
ggggaccuaggcucugucucuu

SEQ ID NO: 38295 - RNA, 22 nt, Human
ggggagaauaaaucagauuuua

SEQ ID NO: 38296 - RNA, 22 nt, Human
ggggagaccaucugaaggugau

SEQ ID NO: 38297 - RNA, 22 nt, Human
ggggagaguauuuuauucaagu

SEQ ID NO: 38298 - RNA, 18 nt, Human
ggggagcagacugaacuc

SEQ ID NO: 38299 - RNA, 22 nt, Human
ggggaggaccuuuccaaggcuu

SEQ ID NO: 38300 - RNA, 22 nt, Human
ggggagugguugccugugaucc

SEQ ID NO: 38301 - RNA, 22 nt, Human
ggggaucuaggauauuucauga

SEQ ID NO: 38302 - RNA, 22 nt, Human
ggggaugagacuagagcuaaag

SEQ ID NO: 38303 - RNA, 22 nt, Human
ggggaugguagaccggugacgu

SEQ ID NO: 38304 - RNA, 22 nt, Human
ggggaugguggcauuuguaaaa

SEQ ID NO: 38305 - RNA, 22 nt, Human
ggggcagaaguagugccccuga

SEQ ID NO: 38306 - RNA, 22 nt, Human
ggggcagccuccaggaaagcug

SEQ ID NO: 38307 - RNA, 22 nt, Human
ggggcagcucccgagggcagga

SEQ ID NO: 38308 - RNA, 22 nt, Human
ggggcaggagcccuucuucagc

SEQ ID NO: 38309 - RNA, 22 nt, Human
ggggccagauaucacuaagguu

SEQ ID NO: 38310 - RNA, 22 nt, Human
ggggccagcaauguugaggaau

SEQ ID NO: 38311 - RNA, 22 nt, Human
ggggccagcacugugccuuugu

SEQ ID NO: 38312 - RNA, 22 nt, Human
ggggccaguaggagugauguac

SEQ ID NO: 38313 - RNA, 22 nt, Human
ggggccccuguggcuugaugcc

SEQ ID NO: 38314 - RNA, 22 nt, Human
ggggccucugcagucacgcugg

SEQ ID NO: 38315 - RNA, 19 nt, Human
ggggccugugauggucaca

SEQ ID NO: 38316 - RNA, 22 nt, Human
ggggcucaggggaaguguccag

SEQ ID NO: 38317 - RNA, 22 nt, Human
ggggcugacgggcauguggcuu

SEQ ID NO: 38318 - RNA, 22 nt, Human
ggggcugcucgccgcgcguuuc

SEQ ID NO: 38319 - RNA, 22 nt, Human
ggggcugggauuugaacccagg

SEQ ID NO: 38320 - RNA, 22 nt, Human
ggggcuucuuucugccaccgac

SEQ ID NO: 38321 - RNA, 22 nt, Human
gggggaagaggcaugaaguccu

SEQ ID NO: 38322 - RNA, 22 nt, Human
ucccuggguucccguggaagug

SEQ ID NO: 38323 - RNA, 22 nt, Human
ucccuguaaaccucaaguugau

SEQ ID NO: 38324 - RNA, 22 nt, Human
ucccuguaguucguggucuuug

SEQ ID NO: 38325 - RNA, 22 nt, Human
ucccuguauaucacaagggcua

SEQ ID NO: 38326 - RNA, 22 nt, Human
ucccugucuaauaugccaugaa

SEQ ID NO: 38327 - RNA, 22 nt, Human
ucccugucucccuugagacuag

SEQ ID NO: 38328 - RNA, 22 nt, Human
ucccugugacaagucugaguuc

SEQ ID NO: 38329 - RNA, 22 nt, Human
ucccugugagaaaugaagcagg

SEQ ID NO: 38330 - RNA, 22 nt, Human
ucccuguggauaucugcagcug

SEQ ID NO: 38331 - RNA, 22 nt, Human
ucccuguggcuaagacaugaca

SEQ ID NO: 38332 - RNA, 22 nt, Human
ucccuucaucagugagcaagcc

SEQ ID NO: 38333 - RNA, 22 nt, Human
ucccuuccucauaggcagaagg

SEQ ID NO: 38334 - RNA, 19 nt, Human
ucccuuccugucgggcucc

SEQ ID NO: 38335 - RNA, 22 nt, Human
ucccuucuggcagcagugugag

SEQ ID NO: 38336 - RNA, 22 nt, Human
ucccuugagaguuggccaauug

SEQ ID NO: 38337 - RNA, 22 nt, Human
ucccuugugagaacauguguug

SEQ ID NO: 38338 - RNA, 22 nt, Human
uccgagaagcauaaagcaggaa

SEQ ID NO: 38339 - RNA, 22 nt, Human
uccgaggcgcaccggcgcuccu

SEQ ID NO: 38340 - RNA, 22 nt, Human
uccgcuggagagggggcugcca

SEQ ID NO: 38341 - RNA, 22 nt, Human
uccggacucaccugacaauggc

SEQ ID NO: 38342 - RNA, 22 nt, Human
uccggcggccggccugagcccg

SEQ ID NO: 38343 - RNA, 22 nt, Human
uccguggagauuuugugcaggg

SEQ ID NO: 38344 - RNA, 22 nt, Human
uccguugacacugcauggagau

SEQ ID NO: 38345 - RNA, 22 nt, Human
uccuaaaggcugcuuuuauauu

SEQ ID NO: 38346 - RNA, 22 nt, Human
uccuaaaugauucagaaauuuc

SEQ ID NO: 38347 - RNA, 23 nt, Human
uccuaacugauucugcagucucu

SEQ ID NO: 38348 - RNA, 16 nt, Human
uccuaacuggcaguuc

SEQ ID NO: 38349 - RNA, 22 nt, Human
uccuacaaugcacagaauagcc

SEQ ID NO: 38350 - RNA, 22 nt, Human
uccuagaaagaugucuuuucac

SEQ ID NO: 38351 - RNA, 22 nt, Human
uccuagaagauggaucagagaa

SEQ ID NO: 38352 - RNA, 22 nt, Human
uccuagaauaaguaacaggaca

SEQ ID NO: 38353 - RNA, 22 nt, Human
uccuagaauaaucuuugacugc

SEQ ID NO: 38354 - RNA, 22 nt, Human
uccuagaauagugugucuggag

SEQ ID NO: 38355 - RNA, 19 nt, Human
uccuagaaugaggguguug

SEQ ID NO: 38356 - RNA, 22 nt, Human
uccuagagaguaauacaguuuu

SEQ ID NO: 38357 - RNA, 22 nt, Human
uccuagagccuccagagggaga

SEQ ID NO: 38358 - RNA, 22 nt, Human
uccuagaggaugguaggaagcu

SEQ ID NO: 38359 - RNA, 19 nt, Human
uccuagcaccuggcacaua

SEQ ID NO: 38360 - RNA, 20 nt, Human
uccuagcuucucucuguaca

SEQ ID NO: 38361 - RNA, 22 nt, Human
uccuagcuugucaguucucuaa

SEQ ID NO: 38362 - RNA, 22 nt, Human
uccuaggcaguuggugcuccau

SEQ ID NO: 38363 - RNA, 22 nt, Human
uccuaguucucugccagucgcu

SEQ ID NO: 38364 - RNA, 22 nt, Human
uccucacacuauagaugaggau

SEQ ID NO: 38365 - RNA, 22 nt, Human
uccucacagaugggugcauagc

SEQ ID NO: 38366 - RNA, 22 nt, Human
uccucacagcugguucauucag

SEQ ID NO: 38367 - RNA, 22 nt, Human
uccucacagggcaggaaggagg

SEQ ID NO: 38368 - RNA, 22 nt, Human
uccucagaauggauggcagggg

SEQ ID NO: 38369 - RNA, 22 nt, Human
uccucagagaugggcaucuaag

SEQ ID NO: 38370 - RNA, 22 nt, Human
uccucagagcagcccuccgcau

SEQ ID NO: 38371 - RNA, 22 nt, Human
uccucagagcauagcgcugucu

SEQ ID NO: 38372 - RNA, 22 nt, Human
uccucagcaaacacuucacucu

SEQ ID NO: 38373 - RNA, 22 nt, Human
uccucagcaggucuguguacca

SEQ ID NO: 38374 - RNA, 22 nt, Human
uccucagcauggaaucuggacu

SEQ ID NO: 38375 - RNA, 21 nt, Human
uccucagggccccagagcacu

SEQ ID NO: 38376 - RNA, 19 nt, Human
uccucaggggcucacagac

SEQ ID NO: 38377 - RNA, 23 nt, Human
uccucaguauauaaaggcagaug

SEQ ID NO: 38378 - RNA, 22 nt, Human
uccucaguuauaaauaggaaac

SEQ ID NO: 38379 - RNA, 22 nt, Human
gucccugacacccggguggagg

SEQ ID NO: 38380 - RNA, 22 nt, Human
gucccugcaucaccacgggacu

SEQ ID NO: 38381 - RNA, 22 nt, Human
gucccugcaucugcaggccaug

SEQ ID NO: 38382 - RNA, 22 nt, Human
gucccuggagcugagcagugcu

SEQ ID NO: 38383 - RNA, 22 nt, Human
gucccugggaaaggagagggca

SEQ ID NO: 38384 - RNA, 22 nt, Human
gucccugggaugcccuucuggg

SEQ ID NO: 38385 - RNA, 19 nt, Human
gucccugggcagaggcacc

SEQ ID NO: 38386 - RNA, 22 nt, Human
gucccuggggguuuaggacuca

SEQ ID NO: 38387 - RNA, 22 nt, Human
gucccuuggcucacaaacagcu

SEQ ID NO: 38388 - RNA, 20 nt, Human
guccuagguuugaagguaaa

SEQ ID NO: 38389 - RNA, 22 nt, Human
guccucagagugggcagguccu

SEQ ID NO: 38390 - RNA, 22 nt, Human
guccucaggcuugaguguuuau

SEQ ID NO: 38391 - RNA, 22 nt, Human
guccucagggagucccagucau

SEQ ID NO: 38392 - RNA, 19 nt, Human
guccucauguuguucucca

SEQ ID NO: 38393 - RNA, 22 nt, Human
guccucugaaguugugcaaugc

SEQ ID NO: 38394 - RNA, 22 nt, Human
guccucugauuucuagguauau

SEQ ID NO: 38395 - RNA, 22 nt, Human
guccucugggagccuugagccu

SEQ ID NO: 38396 - RNA, 22 nt, Human
guccucuggugaaagcauuccc

SEQ ID NO: 38397 - RNA, 22 nt, Human
guccucuguagggcugggccac

SEQ ID NO: 38398 - RNA, 22 nt, Human
guccucugucccuggggcacgg

SEQ ID NO: 38399 - RNA, 22 nt, Human
guccucuguuagaaaugugcuu

SEQ ID NO: 38400 - RNA, 22 nt, Human
guccugaaugccuucauagucc

SEQ ID NO: 38401 - RNA, 22 nt, Human
guccugagggcccaggcauucu

SEQ ID NO: 38402 - RNA, 19 nt, Human
guccugcaacuggcucucc

SEQ ID NO: 38403 - RNA, 22 nt, Human
guccugcacauggagggcaaug

SEQ ID NO: 38404 - RNA, 22 nt, Human
guccuggaauccuagaacagug

SEQ ID NO: 38405 - RNA, 22 nt, Human
guccuggauugaacauaggcag

SEQ ID NO: 38406 - RNA, 22 nt, Human
guccuggcccaggaguacacau

SEQ ID NO: 38407 - RNA, 19 nt, Human
guccuggcgccgccacacc

SEQ ID NO: 38408 - RNA, 22 nt, Human
guccuggcuuaguucgcuguaa

SEQ ID NO: 38409 - RNA, 22 nt, Human
guccugggagaugggacccuga

SEQ ID NO: 38410 - RNA, 22 nt, Human
guccugguccugccuccccaug

SEQ ID NO: 38411 - RNA, 22 nt, Human
guccuggugcuggucauugucg

SEQ ID NO: 38412 - RNA, 22 nt, Human
guccugugagauucaugcucaa

SEQ ID NO: 38413 - RNA, 22 nt, Human
guccugugucccagagaaagag

SEQ ID NO: 38414 - RNA, 22 nt, Human
guccuguguguugccggcugaa

SEQ ID NO: 38415 - RNA, 22 nt, Human
guccuguuaagaugcagagucc

SEQ ID NO: 38416 - RNA, 22 nt, Human
guccuguugggguguugcaguc

SEQ ID NO: 38417 - RNA, 22 nt, Human
guccuucaagaguccccuacug

SEQ ID NO: 38418 - RNA, 22 nt, Human
guccuucaaguaaccugggacc

SEQ ID NO: 38419 - RNA, 22 nt, Human
guccuucagcaccucccucggc

SEQ ID NO: 38420 - RNA, 22 nt, Human
guccuucauaucauggauuaua

SEQ ID NO: 38421 - RNA, 21 nt, Human
guccuucauuaucaagucaaa

SEQ ID NO: 38422 - RNA, 22 nt, Human
guccuuccugcagggauggaug

SEQ ID NO: 38423 - RNA, 22 nt, Human
guccuuggagcuccccucugua

SEQ ID NO: 38424 - RNA, 22 nt, Human
guccuuggagucaggcaaggcu

SEQ ID NO: 38425 - RNA, 22 nt, Human
guccuuggcagcaguccacccc

SEQ ID NO: 38426 - RNA, 22 nt, Human
guccuuggcaucaugauuuggu

SEQ ID NO: 38427 - RNA, 22 nt, Human
guccuuggccuggguagagugg

SEQ ID NO: 38428 - RNA, 22 nt, Human
guccuuggccuucuuguaggca

SEQ ID NO: 38429 - RNA, 22 nt, Human
guccuuggcugggcuugccucg

SEQ ID NO: 38430 - RNA, 22 nt, Human
guccuuggcuucuuguugacug

SEQ ID NO: 38431 - RNA, 22 nt, Human
gugcacaucgugcagguuuguu

SEQ ID NO: 38432 - RNA, 22 nt, Human
gugcaccagucacaugggcaga

SEQ ID NO: 38433 - RNA, 22 nt, Human
gugcagaaguaacaauuaaaga

SEQ ID NO: 38434 - RNA, 22 nt, Human
gugcagacccacguccagggcc

SEQ ID NO: 38435 - RNA, 22 nt, Human
gugcagacuuacagauuauccc

SEQ ID NO: 38436 - RNA, 20 nt, Human
gugcagaggcagccuguggg

SEQ ID NO: 38437 - RNA, 22 nt, Human
gugcagauccugauugcaguuc

SEQ ID NO: 38438 - RNA, 18 nt, Human
gugcagauugcggagccc

SEQ ID NO: 38439 - RNA, 22 nt, Human
gugcagcaaacuagugcgaggg

SEQ ID NO: 38440 - RNA, 22 nt, Human
gugcagcagggggaagacagug

SEQ ID NO: 38441 - RNA, 20 nt, Human
gugcagccaagcugagccgc

SEQ ID NO: 38442 - RNA, 22 nt, Human
gugcagccugucgccaguggau

SEQ ID NO: 38443 - RNA, 22 nt, Human
gugcagcugcccaagccugagc

SEQ ID NO: 38444 - RNA, 22 nt, Human
gugcagcugccgaucagauagg

SEQ ID NO: 38445 - RNA, 22 nt, Human
gugcaggagcucccgcaguggu

SEQ ID NO: 38446 - RNA, 22 nt, Human
gugcaggcaaaagggccaggcc

SEQ ID NO: 38447 - RNA, 22 nt, Human
gugcaggcucucguucuugaca

SEQ ID NO: 38448 - RNA, 22 nt, Human
gugcagguggcuucuagcuucu

SEQ ID NO: 38449 - RNA, 22 nt, Human
gugcagguguuuuggcugccag

SEQ ID NO: 38450 - RNA, 22 nt, Human
gugcagugaaaaaagaaugucc

SEQ ID NO: 38451 - RNA, 22 nt, Human
gugcagugacccuggagagcug

SEQ ID NO: 38452 - RNA, 22 nt, Human
gugcaguggcagauccuagcuc

SEQ ID NO: 38453 - RNA, 22 nt, Human
gugcauauaugugcagcaucaa

SEQ ID NO: 38454 - RNA, 22 nt, Human
gugcauauguaccugugaucau

SEQ ID NO: 38455 - RNA, 21 nt, Human
gugcaugcgccgcugagaugc

SEQ ID NO: 38456 - RNA, 22 nt, Human
gugcaugucggggugcauguca

SEQ ID NO: 38457 - RNA, 22 nt, Human
gugcaugugcauccauguguac

SEQ ID NO: 38458 - RNA, 23 nt, Human
gugcaugugucuuuacaguagca

SEQ ID NO: 38459 - RNA, 22 nt, Human
gugcaugugucuuuauaguaga

SEQ ID NO: 38460 - RNA, 22 nt, Human
gugcauguuaaugguguacaaa

SEQ ID NO: 38461 - RNA, 22 nt, Human
gugcauuaacaacccagaacuc

SEQ ID NO: 38462 - RNA, 22 nt, Human
gugcauuaguuuccuauugcug

SEQ ID NO: 38463 - RNA, 19 nt, Human
gugcauuccaaagcaccau

SEQ ID NO: 38464 - RNA, 20 nt, Human
gugcauuucaccuguacugu

SEQ ID NO: 38465 - RNA, 22 nt, Human
gugccaccagaugcuguugcua

SEQ ID NO: 38466 - RNA, 22 nt, Human
gugccaccucugccccagaggg

SEQ ID NO: 38467 - RNA, 22 nt, Human
gugccacugcacucuagccuag

SEQ ID NO: 38468 - RNA, 22 nt, Human
gugccagagcaaucaggcucug

SEQ ID NO: 38469 - RNA, 22 nt, Human
gugccagcaguuauggugauuu

SEQ ID NO: 38470 - RNA, 22 nt, Human
gugccaggugcuaagcugugcu

SEQ ID NO: 38471 - RNA, 22 nt, Human
gugcccaggcccaaggcaccac

SEQ ID NO: 38472 - RNA, 22 nt, Human
gugcccaguugaggccaggacu

SEQ ID NO: 38473 - RNA, 20 nt, Human
gugcccaguuggugacagac

SEQ ID NO: 38474 - RNA, 22 nt, Human
gugcccuccguguucauagagc

SEQ ID NO: 38475 - RNA, 22 nt, Human
gugcccugaaagaguuaauuca

SEQ ID NO: 38476 - RNA, 22 nt, Human
gugcccugaggucuucacuuug

SEQ ID NO: 38477 - RNA, 22 nt, Human
gugcccugaguggguaggagag

SEQ ID NO: 38478 - RNA, 22 nt, Human
gugcccugcaugccccggguau

SEQ ID NO: 38479 - RNA, 22 nt, Human
gugcccuggggugaaccccugg

SEQ ID NO: 38480 - RNA, 22 nt, Human
gugccuccaggcucgacuaguc

SEQ ID NO: 38481 - RNA, 22 nt, Human
gugccuccaucagugccuccaa

SEQ ID NO: 38482 - RNA, 22 nt, Human
gugccugcagcaauccauggca

SEQ ID NO: 38483 - RNA, 22 nt, Human
gugccugcugcagagucgcugu

SEQ ID NO: 38484 - RNA, 22 nt, Human
gugccugcugcagcugagcagu

SEQ ID NO: 38485 - RNA, 22 nt, Human
gugccuggaacuggguaggcug

SEQ ID NO: 38486 - RNA, 22 nt, Human
gugccuggcaugcgccggugcu

SEQ ID NO: 38487 - RNA, 22 nt, Human
gugccugggacuugcuccggau

SEQ ID NO: 38488 - RNA, 22 nt, Human
gugccugggcaugagcuuguug

SEQ ID NO: 38489 - RNA, 22 nt, Human
gugccuggggguaauguaggau

SEQ ID NO: 38490 - RNA, 22 nt, Human
gugccugggguugagcuaugaa

SEQ ID NO: 38491 - RNA, 22 nt, Human
gugccugguuuggggaguguuc

SEQ ID NO: 38492 - RNA, 22 nt, Human
gugccuuugagaaguuucucug

SEQ ID NO: 38493 - RNA, 22 nt, Human
gugcgcuucuuccugagccagg

SEQ ID NO: 38494 - RNA, 20 nt, Human
gugcuaaguacugugaaggg

SEQ ID NO: 38495 - RNA, 22 nt, Human
gugcuacagacugaguacacuu

SEQ ID NO: 38496 - RNA, 22 nt, Human
gugcuacaugguaguguaguua

SEQ ID NO: 38497 - RNA, 22 nt, Human
gugcuaggauuacaggcauggg

SEQ ID NO: 38498 - RNA, 22 nt, Human
gugcuagggacaaagcagugaa

SEQ ID NO: 38499 - RNA, 22 nt, Human
gugcucagcccggaugagauca

SEQ ID NO: 38500 - RNA, 22 nt, Human
gugcucaggaagcuguuccugc

SEQ ID NO: 38501 - RNA, 22 nt, Human
gugcucaggggcaauccuggga

SEQ ID NO: 38502 - RNA, 22 nt, Human
gugcuccaggucgcucagagag

SEQ ID NO: 38503 - RNA, 22 nt, Human
gugcuccuggccacaugaagcu

SEQ ID NO: 38504 - RNA, 22 nt, Human
gugcucuaauaaagccugacau

SEQ ID NO: 38505 - RNA, 22 nt, Human
gugcucuagaaauagucagugg

SEQ ID NO: 38506 - RNA, 22 nt, Human
gugcucuaggaccuuagaagug

SEQ ID NO: 38507 - RNA, 22 nt, Human
gugcucuaggggucagugguua

SEQ ID NO: 38508 - RNA, 23 nt, Human
gugcucugcggucugcuagucug

SEQ ID NO: 38509 - RNA, 22 nt, Human
gugcucuggcuggucucccggu

SEQ ID NO: 38510 - RNA, 22 nt, Human
gguugacagauauacauuguag

SEQ ID NO: 38511 - RNA, 22 nt, Human
gguugcaaacuccugggaucaa

SEQ ID NO: 38512 - RNA, 22 nt, Human
gguugccggggcaggacuggaa

SEQ ID NO: 38513 - RNA, 22 nt, Human
gguugcuggggguggcagagcu

SEQ ID NO: 38514 - RNA, 21 nt, Human
gguugguguguccaguggcca

SEQ ID NO: 38515 - RNA, 22 nt, Human
gguuuaauugguccaggauggg

SEQ ID NO: 38516 - RNA, 22 nt, Human
gguuuauugaaggccaccccac

SEQ ID NO: 38517 - RNA, 22 nt, Human
gguuucaacucagcuaguaagg

SEQ ID NO: 38518 - RNA, 22 nt, Human
gguuucaaugagaagugcuugu

SEQ ID NO: 38519 - RNA, 22 nt, Human
gguuucacaauuuagagcagug

SEQ ID NO: 38520 - RNA, 22 nt, Human
gguuucagcccugcuguuccug

SEQ ID NO: 38521 - RNA, 22 nt, Human
gguuuccaaagauagaguagua

SEQ ID NO: 38522 - RNA, 22 nt, Human
gguuuccacuugcugaagaaag

SEQ ID NO: 38523 - RNA, 22 nt, Human
gguuucuagcagagucucuuua

SEQ ID NO: 38524 - RNA, 22 nt, Human
gguuucucaccuucagcacuac

SEQ ID NO: 38525 - RNA, 19 nt, Human
gguuugaagaaaaucuugc

SEQ ID NO: 38526 - RNA, 22 nt, Human
gguuugacagcuuggggcuguc

SEQ ID NO: 38527 - RNA, 22 nt, Human
gguuugcaugugauguugggca

SEQ ID NO: 38528 - RNA, 22 nt, Human
gguuuguggagcuggaaacacu

SEQ ID NO: 38529 - RNA, 22 nt, Human
gguuuuaacuacagaauugcaa

SEQ ID NO: 38530 - RNA, 22 nt, Human
gguuuuauuaccccuuaaacac

SEQ ID NO: 38531 - RNA, 23 nt, Human
gguuuucauggcauuccuugccu

SEQ ID NO: 38532 - RNA, 22 nt, Human
gguuuucucccccucuucucag

SEQ ID NO: 38533 - RNA, 22 nt, Human
guaaaacaagcuuuaugguucc

SEQ ID NO: 38534 - RNA, 22 nt, Human
guaaaacugucuaaugguauau

SEQ ID NO: 38535 - RNA, 22 nt, Human
guaaaauagaauaacguggcua

SEQ ID NO: 38536 - RNA, 22 nt, Human
guaaacaacacaaaucauuuga

SEQ ID NO: 38537 - RNA, 22 nt, Human
guaaacauuacugugcuguaua

SEQ ID NO: 38538 - RNA, 22 nt, Human
guaaagaaggcaaccugguuau

SEQ ID NO: 38539 - RNA, 22 nt, Human
guaaaggcccauucaaacagcu

SEQ ID NO: 38540 - RNA, 22 nt, Human
ucuaaacacgucucuuugaaua

SEQ ID NO: 38541 - RNA, 22 nt, Human
ucuaaacauaacuuugugugau

SEQ ID NO: 38542 - RNA, 19 nt, Human
ucuaaacuagucccauaac

SEQ ID NO: 38543 - RNA, 19 nt, Human
ucuaaacucuauacuggua

SEQ ID NO: 38544 - RNA, 22 nt, Human
ucuaaagauguuuauugacaua

SEQ ID NO: 38545 - RNA, 22 nt, Human
ucuaaagauuuggauucauuug

SEQ ID NO: 38546 - RNA, 22 nt, Human
ucuaaauuacuuugggcaguau

SEQ ID NO: 38547 - RNA, 19 nt, Human
ucuaacagaagugucgucc

SEQ ID NO: 38548 - RNA, 22 nt, Human
ucuaacauuuauggccacugga

SEQ ID NO: 38549 - RNA, 22 nt, Human
ucuaacucugccaggacacaga

SEQ ID NO: 38550 - RNA, 22 nt, Human
ucuaagaauacucauaucuucu

SEQ ID NO: 38551 - RNA, 22 nt, Human
ucuaagaggcaucaagacaagc

SEQ ID NO: 38552 - RNA, 22 nt, Human
ucuaagccaggacugagagacg

SEQ ID NO: 38553 - RNA, 21 nt, Human
ucuaagccuugcagauggguu

SEQ ID NO: 38554 - RNA, 22 nt, Human
ucuaaggacauuggcuuuggag

SEQ ID NO: 38555 - RNA, 23 nt, Human
ucuaauacaugaaaccuagaugu

SEQ ID NO: 38556 - RNA, 22 nt, Human
ucuaaugaaagauguaggaacu

SEQ ID NO: 38557 - RNA, 22 nt, Human
ucuaaugaggacuuuauagaga

SEQ ID NO: 38558 - RNA, 22 nt, Human
ucuaaugaguuagauaauuuug

SEQ ID NO: 38559 - RNA, 22 nt, Human
ucuaaugcuugacugggggcuu

SEQ ID NO: 38560 - RNA, 22 nt, Human
ucuaauuuuaggcauuuguuca

SEQ ID NO: 38561 - RNA, 22 nt, Human
ucuaauuuuggcauuuuaaccu

SEQ ID NO: 38562 - RNA, 22 nt, Human
ucuacaaagguugaggugcccu

SEQ ID NO: 38563 - RNA, 22 nt, Human
ucuacaaauaaauuacuaugua

SEQ ID NO: 38564 - RNA, 22 nt, Human
ucuacaagucaagucuaucaag

SEQ ID NO: 38565 - RNA, 22 nt, Human
ucuacaaguuuaauuccacuua

SEQ ID NO: 38566 - RNA, 22 nt, Human
ucuacacaagugaguggcacaa

SEQ ID NO: 38567 - RNA, 22 nt, Human
ucuacacauuuguaaaggcauu

SEQ ID NO: 38568 - RNA, 22 nt, Human
ucuacagaaacuggcuacucuc

SEQ ID NO: 38569 - RNA, 22 nt, Human
ucuacagacagagcagguggga

SEQ ID NO: 38570 - RNA, 22 nt, Human
ucuacagccauuuugagcagug

SEQ ID NO: 38571 - RNA, 22 nt, Human
ucuacagguggggccuggcaau

SEQ ID NO: 38572 - RNA, 21 nt, Human
ucuacauaucaauauguaauu

SEQ ID NO: 38573 - RNA, 22 nt, Human
ucuacauuccuuuuauaauauc

SEQ ID NO: 38574 - RNA, 22 nt, Human
ucuacauuuuaacaagaugccc

SEQ ID NO: 38575 - RNA, 22 nt, Human
ucuaccacuaagugugcuuuga

SEQ ID NO: 38576 - RNA, 22 nt, Human
ucuaccacucaugcuacuuacu

SEQ ID NO: 38577 - RNA, 22 nt, Human
ucuaccaugugcugugcauugg

SEQ ID NO: 38578 - RNA, 22 nt, Human
ucuacccagagcuaugaccuga

SEQ ID NO: 38579 - RNA, 18 nt, Human
ucuacccucucagagucu

SEQ ID NO: 38580 - RNA, 22 nt, Human
ucuacugccacuuaagacauuu

SEQ ID NO: 38581 - RNA, 22 nt, Human
ucuacugugguccuuguaacca

SEQ ID NO: 38582 - RNA, 22 nt, Human
ucuacuuuauaaguauauaagu

SEQ ID NO: 38583 - RNA, 22 nt, Human
ucuacuuuucccuauacaguuu

SEQ ID NO: 38584 - RNA, 18 nt, Human
ucuagaaacuucucuccu

SEQ ID NO: 38585 - RNA, 22 nt, Human
ucuagaaagccaaauuaggaau

SEQ ID NO: 38586 - RNA, 22 nt, Human
ucuagaacuccaguuaggcaau

SEQ ID NO: 38587 - RNA, 22 nt, Human
ucuagaaucacuguuuccaucu

SEQ ID NO: 38588 - RNA, 22 nt, Human
ucuagaauuuugccauauagcu

SEQ ID NO: 38589 - RNA, 22 nt, Human
ucuagacaaugcacuguaagga

SEQ ID NO: 38590 - RNA, 19 nt, Human
ucuagacaccaaaguuguc

SEQ ID NO: 38591 - RNA, 20 nt, Human
ucuagacagggcacaggaau

SEQ ID NO: 38592 - RNA, 22 nt, Human
ucuagagccaaagucuuggggg

SEQ ID NO: 38593 - RNA, 22 nt, Human
ucuagagcuggaguagaaugug

SEQ ID NO: 38594 - RNA, 22 nt, Human
ucuagagcuuuuuccucuugua

SEQ ID NO: 38595 - RNA, 22 nt, Human
ucuagauuccuccugcauccug

SEQ ID NO: 38596 - RNA, 19 nt, Human
ucuagcaacccacugcaug

SEQ ID NO: 38597 - RNA, 22 nt, Human
ucuagcaagcucgugcucaagg

SEQ ID NO: 38598 - RNA, 22 nt, Human
ucuagcaggcaaaagcucggca

SEQ ID NO: 38599 - RNA, 22 nt, Human
ucuagcagggaaagcagagaau

SEQ ID NO: 38600 - RNA, 22 nt, Human
ucuagcugaggguaggagaccu

SEQ ID NO: 38601 - RNA, 22 nt, Human
ucuagcugccccgaggcagggu

SEQ ID NO: 38602 - RNA, 22 nt, Human
ucuagcuguggucgagugagga

SEQ ID NO: 38603 - RNA, 22 nt, Human
ucuaggaaccugacaucucuca

SEQ ID NO: 38604 - RNA, 22 nt, Human
ucuaggaauguucuuagggauu

SEQ ID NO: 38605 - RNA, 22 nt, Human
ucuaggagcaugaagggaaggc

SEQ ID NO: 38606 - RNA, 22 nt, Human
ucuaggagcuuaaaggaggcca

SEQ ID NO: 38607 - RNA, 22 nt, Human
ucuaggcccaggccugcggcug

SEQ ID NO: 38608 - RNA, 22 nt, Human
ucuaggccguaggauacagagc

SEQ ID NO: 38609 - RNA, 22 nt, Human
ucuagggagcucuagcaguggu

SEQ ID NO: 38610 - RNA, 22 nt, Human
ucuaggggugcagaagggaucc

SEQ ID NO: 38611 - RNA, 22 nt, Human
ucuagguuagaacccagaaaag

SEQ ID NO: 38612 - RNA, 22 nt, Human
ucuagucauucaugcuaugauu

SEQ ID NO: 38613 - RNA, 22 nt, Human
ucuaguuuugguaugagaugca

SEQ ID NO: 38614 - RNA, 21 nt, Human
ucuauaacuauagugacagau

SEQ ID NO: 38615 - RNA, 23 nt, Human
ucuauacauacugcagccucugg

SEQ ID NO: 38616 - RNA, 22 nt, Human
ucuauauaaccuccacuucuac

SEQ ID NO: 38617 - RNA, 22 nt, Human
ucuaucugaggaggugacauuu

SEQ ID NO: 38618 - RNA, 22 nt, Human
ucuaugaaucaauuuuaacauc

SEQ ID NO: 38619 - RNA, 21 nt, Human
ucuaugcaagacccuaguccu

SEQ ID NO: 38620 - RNA, 22 nt, Human
ucuauguaaagccauauugaua

SEQ ID NO: 38621 - RNA, 22 nt, Human
ucuauguagugccagcuaguau

SEQ ID NO: 38622 - RNA, 22 nt, Human
ucuauguauaucuuuccauuca

SEQ ID NO: 38623 - RNA, 22 nt, Human
ucuaugucacucuuuggaaaga

SEQ ID NO: 38624 - RNA, 22 nt, Human
ucuaugucagcaucuuucuacc

SEQ ID NO: 38625 - RNA, 22 nt, Human
ucuaugucucgacccaagacaa

SEQ ID NO: 38626 - RNA, 22 nt, Human
ucuaugucucuggaaggagugu

SEQ ID NO: 38627 - RNA, 22 nt, Human
gugcugaagugaaauucaucaa

SEQ ID NO: 38628 - RNA, 22 nt, Human
gugcugaauaacaguagaaauu

SEQ ID NO: 38629 - RNA, 22 nt, Human
gugcugaauuggagaugcuccu

SEQ ID NO: 38630 - RNA, 22 nt, Human
gugcugagaguuuauuaugaua

SEQ ID NO: 38631 - RNA, 19 nt, Human
gugcugagaugugguacua

SEQ ID NO: 38632 - RNA, 22 nt, Human
gugcugagcugcagaugcgcuc

SEQ ID NO: 38633 - RNA, 22 nt, Human
gugcugaguagaaugaaugccu

SEQ ID NO: 38634 - RNA, 22 nt, Human
gugcugcugccagcaggauccu

SEQ ID NO: 38635 - RNA, 22 nt, Human
gugcuggaacugugcuaagaga

SEQ ID NO: 38636 - RNA, 22 nt, Human
gugcuggacccuggaagguggu

SEQ ID NO: 38637 - RNA, 22 nt, Human
gugcuggcaccccucuccaguu

SEQ ID NO: 38638 - RNA, 17 nt, Human
gugcuggccuggggcuc

SEQ ID NO: 38639 - RNA, 22 nt, Human
gugcuggcuggggcaucaggca

SEQ ID NO: 38640 - RNA, 22 nt, Human
gugcugggauuacaggugugag

SEQ ID NO: 38641 - RNA, 22 nt, Human
gugcuggggguuucuguagguc

SEQ ID NO: 38642 - RNA, 22 nt, Human
gugcugggugcugcagacaggu

SEQ ID NO: 38643 - RNA, 22 nt, Human
gugcuguacuucuguguugaag

SEQ ID NO: 38644 - RNA, 22 nt, Human
gugcuguauaugcaagaggaag

SEQ ID NO: 38645 - RNA, 23 nt, Human
gugcugugagccccuuggccucc

SEQ ID NO: 38646 - RNA, 22 nt, Human
gugcugugcgcuuuuucuguau

SEQ ID NO: 38647 - RNA, 22 nt, Human
gugcuguuuugagugcuacccc

SEQ ID NO: 38648 - RNA, 22 nt, Human
gugcuuaaggcagucugucaaa

SEQ ID NO: 38649 - RNA, 22 nt, Human
aaagucauacauggugcuuacu

SEQ ID NO: 38650 - RNA, 22 nt, Human
aaagucaucuguccuaggcucu

SEQ ID NO: 38651 - RNA, 22 nt, Human
aaagucauugcuguuaucaaug

SEQ ID NO: 38652 - RNA, 22 nt, Human
aaaguccagggaaagagcgucu

SEQ ID NO: 38653 - RNA, 20 nt, Human
aaagucccuuagugggagca

SEQ ID NO: 38654 - RNA, 22 nt, Human
aaaguccuagcgauccacagaa

SEQ ID NO: 38655 - RNA, 22 nt, Human
aaaguccugacugcaggggaug

SEQ ID NO: 38656 - RNA, 22 nt, Human
aaagucuaaauuauucaauaag

SEQ ID NO: 38657 - RNA, 22 nt, Human
aaagucucaggcaaaccaggac

SEQ ID NO: 38658 - RNA, 22 nt, Human
aaagucuuucucauuggccaug

SEQ ID NO: 38659 - RNA, 22 nt, Human
aaagugacaaccauuuauuaag

SEQ ID NO: 38660 - RNA, 22 nt, Human
aaagugauuuaaguaccucagg

SEQ ID NO: 38661 - RNA, 20 nt, Human
aaagugcacagauacagcuc

SEQ ID NO: 38662 - RNA, 22 nt, Human
aaagugcagaacuguucucacu

SEQ ID NO: 38663 - RNA, 22 nt, Human
aaagugcagggugcucugguau

SEQ ID NO: 38664 - RNA, 22 nt, Human
aaagugcaguccaugaaauuaa

SEQ ID NO: 38665 - RNA, 22 nt, Human
aaagugcauucgaaaguccauc

SEQ ID NO: 38666 - RNA, 22 nt, Human
aaagugccacaacuggacaacc

SEQ ID NO: 38667 - RNA, 22 nt, Human
aaagugccuucuauuuuaguga

SEQ ID NO: 38668 - RNA, 22 nt, Human
aaagugcuaaauaagcccugaa

SEQ ID NO: 38669 - RNA, 22 nt, Human
aaagugcucggauuacagguau

SEQ ID NO: 38670 - RNA, 22 nt, Human
aaagugcugaaauuacaggggu

SEQ ID NO: 38671 - RNA, 22 nt, Human
aaagugcugggauuacaggccu

SEQ ID NO: 38672 - RNA, 22 nt, Human
aaagugcugggauuacaggugu

SEQ ID NO: 38673 - RNA, 22 nt, Human
aaaguggggucuagagggccug

SEQ ID NO: 38674 - RNA, 22 nt, Human
aaaguguaaaagcauguuaggg

SEQ ID NO: 38675 - RNA, 22 nt, Human
aaaguguugggaagaaagugca

SEQ ID NO: 38676 - RNA, 22 nt, Human
aaaguguugggauuacaggcau

SEQ ID NO: 38677 - RNA, 19 nt, Human
aaaguguuuuaaagaggau

SEQ ID NO: 38678 - RNA, 22 nt, Human
aaaguuagguguggauuucuca

SEQ ID NO: 38679 - RNA, 22 nt, Human
aaaguucacugaccagcacugg

SEQ ID NO: 38680 - RNA, 18 nt, Human
aaaguucagggagaguug

SEQ ID NO: 38681 - RNA, 22 nt, Human
aaaguucagugccuucuauaca

SEQ ID NO: 38682 - RNA, 21 nt, Human
aaaguucaugcuuuaauauuc

SEQ ID NO: 38683 - RNA, 20 nt, Human
aaaguucauguuugcacuuu

SEQ ID NO: 38684 - RNA, 22 nt, Human
aaaguucuaaaacucuuuguga

SEQ ID NO: 38685 - RNA, 22 nt, Human
aaaguucuagaguugcaagaga

SEQ ID NO: 38686 - RNA, 23 nt, Human
aaaguucucuugcgugugggaaa

SEQ ID NO: 38687 - RNA, 22 nt, Human
aaaguucugagaagcaguuuac

SEQ ID NO: 38688 - RNA, 22 nt, Human
aaaguucuuugcaucuuugcuc

SEQ ID NO: 38689 - RNA, 22 nt, Human
aaaguugaguuuuauguguuac

SEQ ID NO: 38690 - RNA, 15 nt, Human
aaaguugauggcucu

SEQ ID NO: 38691 - RNA, 23 nt, Human
aaaguugauuugcaguuuaagag

SEQ ID NO: 38692 - RNA, 22 nt, Human
aaaguugauuuggagggauauu

SEQ ID NO: 38693 - RNA, 22 nt, Human
aaaguugcuggcuuugguucau

SEQ ID NO: 38694 - RNA, 22 nt, Human
aaaguuguaauggaagaaaugc

SEQ ID NO: 38695 - RNA, 22 nt, Human
aaaguugugaaaccgaacaugu

SEQ ID NO: 38696 - RNA, 22 nt, Human
aaaguuuacagugcacaugggu

SEQ ID NO: 38697 - RNA, 22 nt, Human
aaaguuuaucauagccggggac

SEQ ID NO: 38698 - RNA, 22 nt, Human
aaaguuucaauagaggaagugg

SEQ ID NO: 38699 - RNA, 22 nt, Human
aaaguuuccugcuaagugcuau

SEQ ID NO: 38700 - RNA, 22 nt, Human
aaaguuugagugauuugacaca

SEQ ID NO: 38701 - RNA, 22 nt, Human
aaaguuuguugcuuacaaagaa

SEQ ID NO: 38702 - RNA, 22 nt, Human
aaauaacuuucuguguauaguc

SEQ ID NO: 38703 - RNA, 22 nt, Human
aaauaaguaaugucuuccuuuu

SEQ ID NO: 38704 - RNA, 22 nt, Human
aaauaaguuaaacuagaaugau

SEQ ID NO: 38705 - RNA, 22 nt, Human
aaagacaguggauucaaaaucc

SEQ ID NO: 38706 - RNA, 22 nt, Human
aaagacauauuucuaaguuuau

SEQ ID NO: 38707 - RNA, 22 nt, Human
aaagacaucagaaccagcugag

SEQ ID NO: 38708 - RNA, 22 nt, Human
aaagaccauguuuacagcuagg

SEQ ID NO: 38709 - RNA, 23 nt, Human
aaagaccuaggaugagggagacg

SEQ ID NO: 38710 - RNA, 22 nt, Human
aaagaccugaaauauaaucuag

SEQ ID NO: 38711 - RNA, 22 nt, Human
aaagacuaagaagaguauuauu

SEQ ID NO: 38712 - RNA, 22 nt, Human
aaagacuacacgggaaagagcu

SEQ ID NO: 38713 - RNA, 23 nt, Human
aaagacucuccagagggaaguag

SEQ ID NO: 38714 - RNA, 23 nt, Human
aaagacugaggaaagucucuguc

SEQ ID NO: 38715 - RNA, 22 nt, Human
aaagacugcaaaaacgcacaga

SEQ ID NO: 38716 - RNA, 22 nt, Human
aaagacuugggagcaguaugcu

SEQ ID NO: 38717 - RNA, 22 nt, Human
aaagagaaaaagaucccggcuc

SEQ ID NO: 38718 - RNA, 22 nt, Human
aaagagcauggaaaguucagga

SEQ ID NO: 38719 - RNA, 22 nt, Human
aaagagcccuuccaugacucuu

SEQ ID NO: 38720 - RNA, 22 nt, Human
aaagagcucggaaaguguugaa

SEQ ID NO: 38721 - RNA, 22 nt, Human
aaagagcugagaccugguggag

SEQ ID NO: 38722 - RNA, 22 nt, Human
aaagagcuggcauuuauagucu

SEQ ID NO: 38723 - RNA, 22 nt, Human
aaagagcuucauuuccauuuau

SEQ ID NO: 38724 - RNA, 17 nt, Human
aaagagcuuggaguguu

SEQ ID NO: 38725 - RNA, 22 nt, Human
aaagaggcagguguuacuggaa

SEQ ID NO: 38726 - RNA, 22 nt, Human
aaagaggcucaaggugggccag

SEQ ID NO: 38727 - RNA, 22 nt, Human
aaagaguuaagagucuuaagcu

SEQ ID NO: 38728 - RNA, 22 nt, Human
aaagaguucuguuugagcugaa

SEQ ID NO: 38729 - RNA, 22 nt, Human
aaagaguuggacuuucucaggc

SEQ ID NO: 38730 - RNA, 22 nt, Human
aaagaguuuacaaauuagguaa

SEQ ID NO: 38731 - RNA, 22 nt, Human
aaagaucaaguaggcauggccu

SEQ ID NO: 38732 - RNA, 22 nt, Human
aaagaucaauagauaaagcuac

SEQ ID NO: 38733 - RNA, 21 nt, Human
aaagaugagaacuggauggcu

SEQ ID NO: 38734 - RNA, 22 nt, Human
aaagaugucagucagauaggau

SEQ ID NO: 38735 - RNA, 22 nt, Human
aaagaugucaguuugaaauaac

SEQ ID NO: 38736 - RNA, 22 nt, Human
aaagaugucauacacauuaaga

SEQ ID NO: 38737 - RNA, 22 nt, Human
aaagaugugccuguuucauagu

SEQ ID NO: 38738 - RNA, 22 nt, Human
aaagauguuuuacauagcaccu

SEQ ID NO: 38739 - RNA, 22 nt, Human
aaagauuagauaagauagauuu

SEQ ID NO: 38740 - RNA, 22 nt, Human
aaagauuauggaacacacauga

SEQ ID NO: 38741 - RNA, 22 nt, Human
aaagauugaaagagaauuuguc

SEQ ID NO: 38742 - RNA, 22 nt, Human
aaagauugaucaugaauugaca

SEQ ID NO: 38743 - RNA, 22 nt, Human
aaagauuucagaagccugugcc

SEQ ID NO: 38744 - RNA, 22 nt, Human
aaagauuugaaauuaggcauca

SEQ ID NO: 38745 - RNA, 22 nt, Human
aaagcaauagguuaggucaaga

SEQ ID NO: 38746 - RNA, 22 nt, Human
aaagcaaugggucuaagguaaa

SEQ ID NO: 38747 - RNA, 22 nt, Human
aaagcaaugucucugccugguu

SEQ ID NO: 38748 - RNA, 22 nt, Human
aaagcacaggagaguucaguaa

SEQ ID NO: 38749 - RNA, 22 nt, Human
aaagcacagggugcuagagagu

SEQ ID NO: 38750 - RNA, 22 nt, Human
aaagcacauaguagaaggauuu

SEQ ID NO: 38751 - RNA, 22 nt, Human
aaagcacaugaguaguguagua

SEQ ID NO: 38752 - RNA, 22 nt, Human
aaagcaccuagcauagugcuua

SEQ ID NO: 38753 - RNA, 22 nt, Human
aaagcacucuauccuuuguaga

SEQ ID NO: 38754 - RNA, 22 nt, Human
aaagcacugcacauauauuugc

SEQ ID NO: 38755 - RNA, 22 nt, Human
aaagcagagaucauggcuugua

SEQ ID NO: 38756 - RNA, 19 nt, Human
aaagcagaggagcaucuga

SEQ ID NO: 38757 - RNA, 22 nt, Human
aaagcagcaacgugcauauaac

SEQ ID NO: 38758 - RNA, 22 nt, Human
aaagcaauugugguuuuugcca

SEQ ID NO: 38759 - RNA, 22 nt, Human
aaagcaauuuaauggaccauga

SEQ ID NO: 38760 - RNA, 22 nt, Human
aaagcacuugaaaucuggcagu

SEQ ID NO: 38761 - RNA, 22 nt, Human
aaagcacuuugagacugacagg

SEQ ID NO: 38762 - RNA, 22 nt, Human
aaagcagacugauuugcaucac

SEQ ID NO: 38763 - RNA, 22 nt, Human
aaagcagagcagggcacuuaug

SEQ ID NO: 38764 - RNA, 22 nt, Human
aaagcagauucugaugcaguag

SEQ ID NO: 38765 - RNA, 22 nt, Human
aaagcagcacauggauaucagu

SEQ ID NO: 38766 - RNA, 22 nt, Human
aaagcagcagcacguggaagag

SEQ ID NO: 38767 - RNA, 22 nt, Human
aaagcagccacucucucugccu

SEQ ID NO: 38768 - RNA, 21 nt, Human
aaagcagcccauggcacaguc

SEQ ID NO: 38769 - RNA, 22 nt, Human
aaagcagcuuucggcccucggg

SEQ ID NO: 38770 - RNA, 22 nt, Human
aaagcagggaaaucuauuugca

SEQ ID NO: 38771 - RNA, 22 nt, Human
aaagcagguugcaauuacagug

SEQ ID NO: 38772 - RNA, 22 nt, Human
aaagcaguauaguggaagggcu

SEQ ID NO: 38773 - RNA, 22 nt, Human
aaagcaguauauugguaguugu

SEQ ID NO: 38774 - RNA, 22 nt, Human
aaagcagucucagacuuaagca

SEQ ID NO: 38775 - RNA, 21 nt, Human
aaagcaguucuuccugccucu

SEQ ID NO: 38776 - RNA, 22 nt, Human
aaagcauagaauuagaguuagg

SEQ ID NO: 38777 - RNA, 22 nt, Human
aaagcauaguucaucuguccau

SEQ ID NO: 38778 - RNA, 22 nt, Human
aaagcauauuaggacugaauua

SEQ ID NO: 38779 - RNA, 22 nt, Human
aaagcauuauucuguggaaaaa

SEQ ID NO: 38780 - RNA, 22 nt, Human
aaagccaaaugaaagaugguuc

SEQ ID NO: 38781 - RNA, 22 nt, Human
aaagccaagcugggaaggcagg

SEQ ID NO: 38782 - RNA, 23 nt, Human
aaagccaagucagucuacuggaa

SEQ ID NO: 38783 - RNA, 22 nt, Human
aaagccacguggccuggggagc

SEQ ID NO: 38784 - RNA, 22 nt, Human
aaagccaggaggagggcgcucg

SEQ ID NO: 38785 - RNA, 22 nt, Human
aaagccaggcuggccugggguu

SEQ ID NO: 38786 - RNA, 22 nt, Human
aaagccaggguccaggccugcc

SEQ ID NO: 38787 - RNA, 22 nt, Human
aaagccagguugugugcaggaa

SEQ ID NO: 38788 - RNA, 22 nt, Human
aaagccaucuguauuaagugaa

SEQ ID NO: 38789 - RNA, 22 nt, Human
aaagccauugaacuguacuuua

SEQ ID NO: 38790 - RNA, 22 nt, Human
aaagccugucuggucauagcua

SEQ ID NO: 38791 - RNA, 22 nt, Human
aaagccuucuuguaucgagcca

SEQ ID NO: 38792 - RNA, 22 nt, Human
aaagccuugggauuugugauca

SEQ ID NO: 38793 - RNA, 22 nt, Human
aaagccuuuuaugaucaguuaa

SEQ ID NO: 38794 - RNA, 22 nt, Human
aaagcgcuauauaaauguuaac

SEQ ID NO: 38795 - RNA, 22 nt, Human
aaagcuaucaucaaugcaacuu

SEQ ID NO: 38796 - RNA, 22 nt, Human
aaagcucacaguaauacaaggc

SEQ ID NO: 38797 - RNA, 22 nt, Human
aaagcucagucagugguguaug

SEQ ID NO: 38798 - RNA, 22 nt, Human
aaagcucugagaagcacugcaa

SEQ ID NO: 38799 - RNA, 22 nt, Human
aaagcucuuaaauugaccugcu

SEQ ID NO: 38800 - RNA, 22 nt, Human
aaagcucuuauagcagagugug

SEQ ID NO: 38801 - RNA, 22 nt, Human
aaagcugaugucuacuagagaa

SEQ ID NO: 38802 - RNA, 22 nt, Human
aaagcugcaagcuccugaggaa

SEQ ID NO: 38803 - RNA, 22 nt, Human
aaagcugcuaugaacauucuau

SEQ ID NO: 38804 - RNA, 22 nt, Human
aaagcugcuuugguuucuggaa

SEQ ID NO: 38805 - RNA, 22 nt, Human
aaagcugucaaggcaggaggcu

SEQ ID NO: 38806 - RNA, 22 nt, Human
aaagcuguuaaaugcauaaugc

SEQ ID NO: 38807 - RNA, 23 nt, Human
aaagcuuaacuggguaauaaagc

SEQ ID NO: 38808 - RNA, 22 nt, Human
aaagcuuagaggccaguggagg

SEQ ID NO: 38809 - RNA, 22 nt, Human
aaagcuuagcauuuucaaaaug

SEQ ID NO: 38810 - RNA, 22 nt, Human
aaagcuuauuuguaugcauguu

SEQ ID NO: 38811 - RNA, 22 nt, Human
aaagcuuuggguaggaauggga

SEQ ID NO: 38812 - RNA, 22 nt, Human
aaaggaagauugagcuuuucca

SEQ ID NO: 38813 - RNA, 22 nt, Human
aaaggacacacaggaggugucu

SEQ ID NO: 38814 - RNA, 22 nt, Human
aaaggacaugucaauaucaggc

SEQ ID NO: 38815 - RNA, 22 nt, Human
aaaggauggcucugcauauuug

SEQ ID NO: 38816 - RNA, 22 nt, Human
aaaggauuagagauaccaugcc

SEQ ID NO: 38817 - RNA, 22 nt, Human
aaaggcaaaauucuuagcagga

SEQ ID NO: 38818 - RNA, 22 nt, Human
aaauaguucagccacggugacu

SEQ ID NO: 38819 - RNA, 22 nt, Human
aaauauaauuucugccucaaua

SEQ ID NO: 38820 - RNA, 22 nt, Human
aaauauacggucccuaacaguc

SEQ ID NO: 38821 - RNA, 22 nt, Human
aaauauacuagaugaugaccca

SEQ ID NO: 38822 - RNA, 22 nt, Human
aaauaucauucuggugcacaga

SEQ ID NO: 38823 - RNA, 22 nt, Human
aaauauccauaagcacaucuau

SEQ ID NO: 38824 - RNA, 22 nt, Human
aaauaugacuagaaugccaggu

SEQ ID NO: 38825 - RNA, 22 nt, Human
aaauaugagggugaugcccaga

SEQ ID NO: 38826 - RNA, 22 nt, Human
aaauauguaaccaaggugaagu

SEQ ID NO: 38827 - RNA, 22 nt, Human
aaauauguuuuccaguugucau

SEQ ID NO: 38828 - RNA, 23 nt, Human
aaauauucuuuuuuaguaagugc

SEQ ID NO: 38829 - RNA, 22 nt, Human
aaauauugguaggaugcuuguu

SEQ ID NO: 38830 - RNA, 22 nt, Human
aaauauuugucugaggcgguug

SEQ ID NO: 38831 - RNA, 22 nt, Human
aaaucacuaaguuauagugugg

SEQ ID NO: 38832 - RNA, 22 nt, Human
aaaucacugauuaaaguuagaa

SEQ ID NO: 38833 - RNA, 17 nt, Human
aaaucacugucaguuca

SEQ ID NO: 38834 - RNA, 19 nt, Human
aaaucagaaucugcauuuu

SEQ ID NO: 38835 - RNA, 22 nt, Human
aaaucagacuugaauuuucauc

SEQ ID NO: 38836 - RNA, 22 nt, Human
aaaucagagaauauauuuagaa

SEQ ID NO: 38837 - RNA, 22 nt, Human
aaaucagaguagaauugagcca

SEQ ID NO: 38838 - RNA, 22 nt, Human
aaaucagagugguuggucaucc

SEQ ID NO: 38839 - RNA, 22 nt, Human
aaaucagaugcuuccuaguugg

SEQ ID NO: 38840 - RNA, 22 nt, Human
aaaucagugcucauuugaaagg

SEQ ID NO: 38841 - RNA, 22 nt, Human
aaaucaugaggacauuaugcca

SEQ ID NO: 38842 - RNA, 21 nt, Human
aaauccaaacacuaguccaca

SEQ ID NO: 38843 - RNA, 22 nt, Human
aaauccaacgacagguguacuu

SEQ ID NO: 38844 - RNA, 19 nt, Human
aaauccaagcucaggccuc

SEQ ID NO: 38845 - RNA, 22 nt, Human
aaauccagcuacggggcaacau

SEQ ID NO: 38846 - RNA, 22 nt, Human
aaauccaggagaauuuccacuu

SEQ ID NO: 38847 - RNA, 22 nt, Human
aaauccagguaguuugguuuga

SEQ ID NO: 38848 - RNA, 22 nt, Human
aaauccaguggguccucaugag

SEQ ID NO: 38849 - RNA, 22 nt, Human
aaauccaucaaaucuucuagaa

SEQ ID NO: 38850 - RNA, 22 nt, Human
aaauccaugguaaucuguuaca

SEQ ID NO: 38851 - RNA, 22 nt, Human
aaauccuaaaaguuugacuuaa

SEQ ID NO: 38852 - RNA, 22 nt, Human
aaauccuaagcagaggaauuua

SEQ ID NO: 38853 - RNA, 22 nt, Human
aaauccuaaggagaauaugauu

SEQ ID NO: 38854 - RNA, 22 nt, Human
aaauccuaccaagaaauucccu

SEQ ID NO: 38855 - RNA, 22 nt, Human
aaaucucugcaggcaaauguga

SEQ ID NO: 38856 - RNA, 22 nt, Human
aaaucugggagcagcucggcca

SEQ ID NO: 38857 - RNA, 22 nt, Human
aaaugaaaugagugccuggagg

SEQ ID NO: 38858 - RNA, 22 nt, Human
aaaugaacaucaagaauagccu

SEQ ID NO: 38859 - RNA, 22 nt, Human
aaaugaacucuuccugcauccc

SEQ ID NO: 38860 - RNA, 22 nt, Human
aaaugacaauaaaaguccaugc

SEQ ID NO: 38861 - RNA, 22 nt, Human
aaaugacacuaggcuuuuugca

SEQ ID NO: 38862 - RNA, 22 nt, Human
aaaugaccagaauacaggcuuc

SEQ ID NO: 38863 - RNA, 23 nt, Human
aaaugacuaaauguucuuauaga

SEQ ID NO: 38864 - RNA, 22 nt, Human
aaaugaguuuccucaauguccu

SEQ ID NO: 38865 - RNA, 22 nt, Human
aaaugaugauuaaaaugaggua

SEQ ID NO: 38866 - RNA, 22 nt, Human
aaaugaugcuacaguuuuccca

SEQ ID NO: 38867 - RNA, 20 nt, Human
aaagucuuaugguuaauuuu

SEQ ID NO: 38868 - RNA, 22 nt, Human
aaagugaauugauuuaagggga

SEQ ID NO: 38869 - RNA, 22 nt, Human
aaagugaugaacucugugaccu

SEQ ID NO: 38870 - RNA, 22 nt, Human
aaagugauuaugcugucaaaga

SEQ ID NO: 38871 - RNA, 22 nt, Human
aaagugcaaggauuacaggcau

SEQ ID NO: 38872 - RNA, 22 nt, Human
aaagugcaaucaguuagaccau

SEQ ID NO: 38873 - RNA, 22 nt, Human
aaagugcacuagaauccagauu

SEQ ID NO: 38874 - RNA, 22 nt, Human
aaagugcuaagucacccagcua

SEQ ID NO: 38875 - RNA, 22 nt, Human
aaagugcucggcgcugguccca

SEQ ID NO: 38876 - RNA, 22 nt, Human
aaagugcugaagaccuagcugu

SEQ ID NO: 38877 - RNA, 22 nt, Human
aaagugcugggauuacaagcgu

SEQ ID NO: 38878 - RNA, 22 nt, Human
aaaguggucaccuucucauuuc

SEQ ID NO: 38879 - RNA, 22 nt, Human
aaagugguucuuacauccgugg

SEQ ID NO: 38880 - RNA, 22 nt, Human
aaagugguuuaugauauuccaa

SEQ ID NO: 38881 - RNA, 20 nt, Human
aaaguguaagcauauaauua

SEQ ID NO: 38882 - RNA, 22 nt, Human
aaaguguaaggaauuuaaguaa

SEQ ID NO: 38883 - RNA, 20 nt, Human
aaaguguaaggcaaaguugu

SEQ ID NO: 38884 - RNA, 22 nt, Human
aaagugucuuacccagggagaa

SEQ ID NO: 38885 - RNA, 22 nt, Human
aaaguguggucguucauuuugu

SEQ ID NO: 38886 - RNA, 22 nt, Human
aaaguguuaugcaaaacucugu

SEQ ID NO: 38887 - RNA, 22 nt, Human
aaaguguugauuuuauagugca

SEQ ID NO: 38888 - RNA, 22 nt, Human
aaaguguuuacauugcuauaag

SEQ ID NO: 38889 - RNA, 22 nt, Human
aaaguguuuucugauguguucu

SEQ ID NO: 38890 - RNA, 22 nt, Human
aaaguguuuugugagcagucug

SEQ ID NO: 38891 - RNA, 22 nt, Human
aaaguuagucagaaccagccau

SEQ ID NO: 38892 - RNA, 22 nt, Human
aaaguucagauuagacucaaga

SEQ ID NO: 38893 - RNA, 22 nt, Human
aaaguucaugguguuauagaaa

SEQ ID NO: 38894 - RNA, 22 nt, Human
aaaguucuauguaauguuuuuu

SEQ ID NO: 38895 - RNA, 19 nt, Human
aaaguucugacuguagagc

SEQ ID NO: 38896 - RNA, 22 nt, Human
aaaguucugggggagaagaacg

SEQ ID NO: 38897 - RNA, 22 nt, Human
aaaguucuggggguguuucugg

SEQ ID NO: 38898 - RNA, 22 nt, Human
aaaguucuuagauuaaucacug

SEQ ID NO: 38899 - RNA, 22 nt, Human
aaaguugaccgaaagauuuuga

SEQ ID NO: 38900 - RNA, 22 nt, Human
aaaguugacuacuaaggaaugu

SEQ ID NO: 38901 - RNA, 22 nt, Human
aaaguugagugcugaucugauu

SEQ ID NO: 38902 - RNA, 22 nt, Human
aaaguugauaagguaucguagu

SEQ ID NO: 38903 - RNA, 21 nt, Human
aaaguugauuuagauugguga

SEQ ID NO: 38904 - RNA, 22 nt, Human
aaaguugcacaacuuuguauac

SEQ ID NO: 38905 - RNA, 22 nt, Human
aaaguugugguuugaugcaguu

SEQ ID NO: 38906 - RNA, 22 nt, Human
aaaguuguuguucacagguuau

SEQ ID NO: 38907 - RNA, 22 nt, Human
aaaguuuauuuucccugguuag

SEQ ID NO: 38908 - RNA, 22 nt, Human
aaaguuucccaaaguaauguga

SEQ ID NO: 38909 - RNA, 22 nt, Human
aaaguuuggauuagcaguuaga

SEQ ID NO: 38910 - RNA, 22 nt, Human
aaaguuuuauaugcugcagcga

SEQ ID NO: 38911 - RNA, 22 nt, Human
aaaguuuuauucaagcauuagu

SEQ ID NO: 38912 - RNA, 22 nt, Human
aaaguuuuguugauuguggaau

SEQ ID NO: 38913 - RNA, 22 nt, Human
aaauaaacugaagcacagagag

SEQ ID NO: 38914 - RNA, 22 nt, Human
aaauaacagucagggacaacau

SEQ ID NO: 38915 - RNA, 22 nt, Human
aaauaacuuaugaucgucuggc

SEQ ID NO: 38916 - RNA, 22 nt, Human
aaauaaucaauuuuuguagaua

SEQ ID NO: 38917 - RNA, 22 nt, Human
aaauacaaaaauuagccaggca

SEQ ID NO: 38918 - RNA, 22 nt, Human
aaauacaauuucaggcuguaau

SEQ ID NO: 38919 - RNA, 22 nt, Human
aaauacacguacauguguaaaa

SEQ ID NO: 38920 - RNA, 22 nt, Human
aaauacagauagauuuaaccca

SEQ ID NO: 38921 - RNA, 21 nt, Human
aaauacagaugcaaaucuguu

SEQ ID NO: 38922 - RNA, 19 nt, Human
aaauacagcagcuguuucc

SEQ ID NO: 38923 - RNA, 22 nt, Human
aaauacaguguguguucuuuga

SEQ ID NO: 38924 - RNA, 22 nt, Human
aaauacauacacuguacguggc

SEQ ID NO: 38925 - RNA, 19 nt, Human
aaauacugaaguuguucau

SEQ ID NO: 38926 - RNA, 22 nt, Human
aaauacugcugcuauuccuuuu

SEQ ID NO: 38927 - RNA, 22 nt, Human
aaauacuggcaagugcuaauuc

SEQ ID NO: 38928 - RNA, 22 nt, Human
aaauacugggcucaaaaggguu

SEQ ID NO: 38929 - RNA, 22 nt, Human
aaauacuguccaccauggagca

SEQ ID NO: 38930 - RNA, 22 nt, Human
aaauacugucucugagagagcc

SEQ ID NO: 38931 - RNA, 22 nt, Human
aaauacuguugaaugaaguaag

SEQ ID NO: 38932 - RNA, 22 nt, Human
aaauagaaaccaacaaggucag

SEQ ID NO: 38933 - RNA, 23 nt, Human
aaauucaguccuucaacucugag

SEQ ID NO: 38934 - RNA, 22 nt, Human
aaauuccaccagaaucaguaau

SEQ ID NO: 38935 - RNA, 22 nt, Human
aaauuccauuaggaaacuucca

SEQ ID NO: 38936 - RNA, 22 nt, Human
aaauuccugucauuugcacuuu

SEQ ID NO: 38937 - RNA, 22 nt, Human
aaauucucuucagaggaaccag

SEQ ID NO: 38938 - RNA, 22 nt, Human
aaauucugauuuaauaagugua

SEQ ID NO: 38939 - RNA, 22 nt, Human
aaauucuuuugugcggugaagu

SEQ ID NO: 38940 - RNA, 22 nt, Human
aaauugaauuugggaaacauug

SEQ ID NO: 38941 - RNA, 22 nt, Human
aaauugagacuuuuuuccucca

SEQ ID NO: 38942 - RNA, 22 nt, Human
aaauugauguucccaguugaaa

SEQ ID NO: 38943 - RNA, 22 nt, Human
aaauugcaaaaguacuuuuagg

SEQ ID NO: 38944 - RNA, 22 nt, Human
aaauugcagaugcuaaaugacu

SEQ ID NO: 38945 - RNA, 22 nt, Human
aaauugcauucuugucuugaua

SEQ ID NO: 38946 - RNA, 22 nt, Human
aaauugccaaauuguuuuccag

SEQ ID NO: 38947 - RNA, 21 nt, Human
aaauugccacacauuucuucc

SEQ ID NO: 38948 - RNA, 22 nt, Human
aaauugcuaaauuguaagaggg

SEQ ID NO: 38949 - RNA, 22 nt, Human
aaauugcuauaugugaauguga

SEQ ID NO: 38950 - RNA, 22 nt, Human
aaauugcugaccaaguauauuc

SEQ ID NO: 38951 - RNA, 22 nt, Human
aaauugcuggauccuacuccca

SEQ ID NO: 38952 - RNA, 22 nt, Human
aaauugcuggcagccuuuauuc

SEQ ID NO: 38953 - RNA, 22 nt, Human
aaauugcugggucccacccaag

SEQ ID NO: 38954 - RNA, 22 nt, Human
aaauugcugugaggugguagua

SEQ ID NO: 38955 - RNA, 22 nt, Human
aaauugcuugagauuagucucc

SEQ ID NO: 38956 - RNA, 22 nt, Human
aaauuggauuuuaaacuguugg

SEQ ID NO: 38957 - RNA, 22 nt, Human
aaauuguaaugacuucacuuga

SEQ ID NO: 38958 - RNA, 22 nt, Human
aaauugucuuuaaucaggucau

SEQ ID NO: 38959 - RNA, 22 nt, Human
aaauugugagcuauagaucuag

SEQ ID NO: 38960 - RNA, 22 nt, Human
aaauugugcucacacugauauu

SEQ ID NO: 38961 - RNA, 22 nt, Human
aaauuguggcgucuguaagagu

SEQ ID NO: 38962 - RNA, 22 nt, Human
aaauuuaaaaagcagcauugca

SEQ ID NO: 38963 - RNA, 22 nt, Human
aaauuucaguuaccuuuacguu

SEQ ID NO: 38964 - RNA, 22 nt, Human
aaauuugauaagccauuguuac

SEQ ID NO: 38965 - RNA, 22 nt, Human
aaauuuuaaggcuggaacuuaa

SEQ ID NO: 38966 - RNA, 22 nt, Human
aaauuuuagacuccugggucua

SEQ ID NO: 38967 - RNA, 20 nt, Human
aacaaacuacaaaauuaugu

SEQ ID NO: 38968 - RNA, 22 nt, Human
aacaaagcaccacugagucagu

SEQ ID NO: 38969 - RNA, 22 nt, Human
aacaaauuuagcucugagugcu

SEQ ID NO: 38970 - RNA, 22 nt, Human
aacaacagcugcuaaagaguug

SEQ ID NO: 38971 - RNA, 22 nt, Human
aacaacugaaaagcuuuuucug

SEQ ID NO: 38972 - RNA, 22 nt, Human
aacaacugcuaagguguguccu

SEQ ID NO: 38973 - RNA, 22 nt, Human
aacaagauguuuugauauaugu

SEQ ID NO: 38974 - RNA, 22 nt, Human
aacaagugauauauaauggaag

SEQ ID NO: 38975 - RNA, 22 nt, Human
aacaaguguauuaauggaaaua

SEQ ID NO: 38976 - RNA, 22 nt, Human
aacaagaagggaaggcaugauu

SEQ ID NO: 38977 - RNA, 22 nt, Human
aacaagauagauaucacuuagg

SEQ ID NO: 38978 - RNA, 22 nt, Human
aacaagcagaugcaaugcacuu

SEQ ID NO: 38979 - RNA, 22 nt, Human
aacaaggcaagucugugagcau

SEQ ID NO: 38980 - RNA, 22 nt, Human
aacaaggcacaagcuggcuguu

SEQ ID NO: 38981 - RNA, 22 nt, Human
aacaagucauuccauuugacag

SEQ ID NO: 38982 - RNA, 22 nt, Human
aacaaguuacucuuaaaguaua

SEQ ID NO: 38983 - RNA, 22 nt, Human
aacaaguuagggucuuuuacuu

SEQ ID NO: 38984 - RNA, 22 nt, Human
aacaaguuguugaaaauaauua

SEQ ID NO: 38985 - RNA, 22 nt, Human
aacaaugaggaucuguucugag

SEQ ID NO: 38986 - RNA, 22 nt, Human
aacaaugaguccucugagguua

SEQ ID NO: 38987 - RNA, 22 nt, Human
aacaaugauauagggauuggca

SEQ ID NO: 38988 - RNA, 22 nt, Human
aacaaugucucauccuaugugg

SEQ ID NO: 38989 - RNA, 22 nt, Human
aacaauguguucagcacugugg

SEQ ID NO: 38990 - RNA, 22 nt, Human
aacaauuaucauauacauugca

SEQ ID NO: 38991 - RNA, 23 nt, Human
aacacaaagcugauuccaguggc

SEQ ID NO: 38992 - RNA, 22 nt, Human
aacacacgccuccuccaugggg

SEQ ID NO: 38993 - RNA, 22 nt, Human
aacacagaucaaaauauuuccu

SEQ ID NO: 38994 - RNA, 22 nt, Human
aacacagcuaauuucugucaau

SEQ ID NO: 38995 - RNA, 22 nt, Human
aacacaggccagccugugcagu

SEQ ID NO: 38996 - RNA, 22 nt, Human
aacacaggggguuacaaauugu

SEQ ID NO: 38997 - RNA, 22 nt, Human
aacacagucauuagaggcagcc

SEQ ID NO: 38998 - RNA, 22 nt, Human
aacacaguuucugcauugguag

SEQ ID NO: 38999 - RNA, 22 nt, Human
aacacaguuuuccaaaauagag

SEQ ID NO: 39000 - RNA, 22 nt, Human
aacaccuaaaaaucauuguuga

SEQ ID NO: 39001 - RNA, 22 nt, Human
aacacucuacgugcagcuccua

SEQ ID NO: 39002 - RNA, 22 nt, Human
aacacucucuguugguaaggcu

SEQ ID NO: 39003 - RNA, 22 nt, Human
aacacugaaacauugauugaca

SEQ ID NO: 39004 - RNA, 22 nt, Human
aacacugaccucuacccucagu

SEQ ID NO: 39005 - RNA, 22 nt, Human
aacacugagaacuguugguggu

SEQ ID NO: 39006 - RNA, 20 nt, Human
aacacugaggccuacucuuc

SEQ ID NO: 39007 - RNA, 22 nt, Human
aacacugucuuauacuucaaug

SEQ ID NO: 39008 - RNA, 22 nt, Human
aacacuuugggcauggccuucc

SEQ ID NO: 39009 - RNA, 22 nt, Human
aacacuuuuuauauauuguauc

SEQ ID NO: 39010 - RNA, 22 nt, Human
aacagaacccgagugugaaucu

SEQ ID NO: 39011 - RNA, 22 nt, Human
aacagaauauuuugccuuucuc

SEQ ID NO: 39012 - RNA, 22 nt, Human
aacagaaucuuggguucuuuuc

SEQ ID NO: 39013 - RNA, 22 nt, Human
aacagaaugcaggggaugcugc

SEQ ID NO: 39014 - RNA, 22 nt, Human
aacagaauuguacaccagggag

SEQ ID NO: 39015 - RNA, 22 nt, Human
aacagacaacuccuguggcuca

SEQ ID NO: 39016 - RNA, 22 nt, Human
aacagacuuagagcaucccaau

SEQ ID NO: 39017 - RNA, 22 nt, Human
aacagagaucuuaauuccugua

SEQ ID NO: 39018 - RNA, 22 nt, Human
aacagagcauucugcacuacaa

SEQ ID NO: 39019 - RNA, 22 nt, Human
aacagaggcucccugcacuugu

SEQ ID NO: 39020 - RNA, 22 nt, Human
aacagauauaggcagaacuuug

SEQ ID NO: 39021 - RNA, 22 nt, Human
aacagcaauagcacuauucauu

SEQ ID NO: 39022 - RNA, 22 nt, Human
aacagcaccgaagucgucuaag

SEQ ID NO: 39023 - RNA, 22 nt, Human
aacagcagcaaguaagcagguc

SEQ ID NO: 39024 - RNA, 22 nt, Human
aacagcagcugaggagcugggc

SEQ ID NO: 39025 - RNA, 22 nt, Human
aacagcagcuuucaggaucauc

SEQ ID NO: 39026 - RNA, 22 nt, Human
aacagcaggcauuucuuagcuc

SEQ ID NO: 39027 - RNA, 22 nt, Human
aacagcagggaugggguggcca

SEQ ID NO: 39028 - RNA, 22 nt, Human
aacagcaguuacuuuugcauca

SEQ ID NO: 39029 - RNA, 22 nt, Human
aacagcauaaguauuuauuuca

SEQ ID NO: 39030 - RNA, 22 nt, Human
aacagcauaccaauguacauau

SEQ ID NO: 39031 - RNA, 23 nt, Human
aacagccaacuuuagcggguggc

SEQ ID NO: 39032 - RNA, 22 nt, Human
aacagccucagugagauuagga

SEQ ID NO: 39033 - RNA, 22 nt, Human
aacagcuaguggucuagacuuu

SEQ ID NO: 39034 - RNA, 22 nt, Human
aacagcuauucacuacuauggg

SEQ ID NO: 39035 - RNA, 22 nt, Human
aacagcuuuagaggauaauagu

SEQ ID NO: 39036 - RNA, 22 nt, Human
aacagcuuugcuucuggagaca

SEQ ID NO: 39037 - RNA, 22 nt, Human
aacagcuuuuuuggucagcauu

SEQ ID NO: 39038 - RNA, 22 nt, Human
aacaggaaaacagcacaauagc

SEQ ID NO: 39039 - RNA, 22 nt, Human
aacaggaauugaugggaguccu

SEQ ID NO: 39040 - RNA, 22 nt, Human
aacaggaccccgcguggugucu

SEQ ID NO: 39041 - RNA, 22 nt, Human
aacaggaccuuccaauccauca

SEQ ID NO: 39042 - RNA, 22 nt, Human
aacaggaugucauuucucaugu

SEQ ID NO: 39043 - RNA, 15 nt, Human
aacaggcauuuauau

SEQ ID NO: 39044 - RNA, 22 nt, Human
aacaggcuaaauuguccauuuc

SEQ ID NO: 39045 - RNA, 22 nt, Human
aacaggcuucuucugggcuccu

SEQ ID NO: 39046 - RNA, 22 nt, Human
aacaggggauuagauagcaggc

SEQ ID NO: 39047 - RNA, 22 nt, Human
aacagguagggacucuaacuug

SEQ ID NO: 39048 - RNA, 22 nt, Human
aacaggagaguaaauauaugau

SEQ ID NO: 39049 - RNA, 23 nt, Human
aacaggaugugcuucaucuuuug

SEQ ID NO: 39050 - RNA, 22 nt, Human
aacaggcaacaguugacucuga

SEQ ID NO: 39051 - RNA, 22 nt, Human
aacaggcaauuuaggacucuuu

SEQ ID NO: 39052 - RNA, 22 nt, Human
aacaggcaggagaauucugccu

SEQ ID NO: 39053 - RNA, 22 nt, Human
aacaggcuaaguauuugguagc

SEQ ID NO: 39054 - RNA, 22 nt, Human
aacaggcuaguuuuaaagcaua

SEQ ID NO: 39055 - RNA, 22 nt, Human
aacagggcuuuggaagucuccg

SEQ ID NO: 39056 - RNA, 22 nt, Human
aacaggggugggugcuacugga

SEQ ID NO: 39057 - RNA, 22 nt, Human
aacagguacaguuucccucugg

SEQ ID NO: 39058 - RNA, 22 nt, Human
aacaguaaagacagaauuuauc

SEQ ID NO: 39059 - RNA, 20 nt, Human
aacaguaccauuuaucucag

SEQ ID NO: 39060 - RNA, 20 nt, Human
aacaguaccccccuuguucu

SEQ ID NO: 39061 - RNA, 22 nt, Human
aacaguagguguaaccaaacaa

SEQ ID NO: 39062 - RNA, 22 nt, Human
aacaguaguggucaauaugcca

SEQ ID NO: 39063 - RNA, 22 nt, Human
aacaguauggaagccauuagga

SEQ ID NO: 39064 - RNA, 22 nt, Human
aacaguauugguugaacucaag

SEQ ID NO: 39065 - RNA, 22 nt, Human
aacagucaaaguuugguuccuu

SEQ ID NO: 39066 - RNA, 19 nt, Human
aacagucugggaagcacag

SEQ ID NO: 39067 - RNA, 19 nt, Human
aacagugaggcccagccug

SEQ ID NO: 39068 - RNA, 22 nt, Human
aacagugaguugaugacugaau

SEQ ID NO: 39069 - RNA, 22 nt, Human
aacagugcuucauucacacauu

SEQ ID NO: 39070 - RNA, 22 nt, Human
aacaguuaaugaagaggaagcc

SEQ ID NO: 39071 - RNA, 22 nt, Human
aacaguuaucucacauauggaa

SEQ ID NO: 39072 - RNA, 22 nt, Human
aacaguuuauguaaauguccag

SEQ ID NO: 39073 - RNA, 22 nt, Human
aacaguuucaguuacugaugag

SEQ ID NO: 39074 - RNA, 18 nt, Human
aacaguuuccagauucuc

SEQ ID NO: 39075 - RNA, 22 nt, Human
aacaguuuccugacuccuauga

SEQ ID NO: 39076 - RNA, 22 nt, Human
aacaguuugagcuuugaauuuc

SEQ ID NO: 39077 - RNA, 22 nt, Human
aacauaaauuugaaguggcaaa

SEQ ID NO: 39078 - RNA, 23 nt, Human
aacauacuguuuaauauucacag

SEQ ID NO: 39079 - RNA, 22 nt, Human
aacauauaaacucuuaaguuca

SEQ ID NO: 39080 - RNA, 22 nt, Human
aacauaucauuuaacccucacc

SEQ ID NO: 39081 - RNA, 22 nt, Human
aacauauucagaugccaagucc

SEQ ID NO: 39082 - RNA, 22 nt, Human
aacaucacaauuucauuuaugc

SEQ ID NO: 39083 - RNA, 15 nt, Human
aacaucacuauuuug

SEQ ID NO: 39084 - RNA, 22 nt, Human
aacaucaggaucuuguuacagu

SEQ ID NO: 39085 - RNA, 22 nt, Human
aaauacagcagacuccuguugu

SEQ ID NO: 39086 - RNA, 22 nt, Human
aaauacauaaagguuguaccag

SEQ ID NO: 39087 - RNA, 22 nt, Human
aaauacauuuacagucguggcu

SEQ ID NO: 39088 - RNA, 21 nt, Human
aaauacugggcagugacuuga

SEQ ID NO: 39089 - RNA, 22 nt, Human
aaauacuguuuuauuccaugau

SEQ ID NO: 39090 - RNA, 22 nt, Human
aaauagaauuaacuagcuacug

SEQ ID NO: 39091 - RNA, 23 nt, Human
aaauagagauaggccagcuuugc

SEQ ID NO: 39092 - RNA, 22 nt, Human
aaauagauuuaacauccauccc

SEQ ID NO: 39093 - RNA, 22 nt, Human
aaauagauuucucuggguuugu

SEQ ID NO: 39094 - RNA, 22 nt, Human
aaauagcaaugugaaaagagga

SEQ ID NO: 39095 - RNA, 22 nt, Human
aaauagcagaagcagagggggu

SEQ ID NO: 39096 - RNA, 22 nt, Human
aaauagcuguauuuacccugua

SEQ ID NO: 39097 - RNA, 22 nt, Human
aaauaggagcuuaagcacuucu

SEQ ID NO: 39098 - RNA, 22 nt, Human
aaauaguccugggaauaguacu

SEQ ID NO: 39099 - RNA, 22 nt, Human
aaauaguucagcuuguaaaccc

SEQ ID NO: 39100 - RNA, 22 nt, Human
aaauaguuuagcucucauuuca

SEQ ID NO: 39101 - RNA, 22 nt, Human
aaauauaccaguugccugcauc

SEQ ID NO: 39102 - RNA, 19 nt, Human
aaauaucagagagaugaua

SEQ ID NO: 39103 - RNA, 22 nt, Human
aaauaucauuuauaacuuuuaa

SEQ ID NO: 39104 - RNA, 22 nt, Human
aaauaugaaugauaagaguuau

SEQ ID NO: 39105 - RNA, 17 nt, Human
aaauaugaccucaaagu

SEQ ID NO: 39106 - RNA, 22 nt, Human
aaauaugagauguucucuuucg

SEQ ID NO: 39107 - RNA, 23 nt, Human
aaauaugucugagggcaaagaau

SEQ ID NO: 39108 - RNA, 22 nt, Human
aaauauuauugcuuaaggggag

SEQ ID NO: 39109 - RNA, 22 nt, Human
aaaucacuguuauugaucuuaa

SEQ ID NO: 39110 - RNA, 22 nt, Human
aaaucagacacagugaaaguua

SEQ ID NO: 39111 - RNA, 22 nt, Human
aaaucagaggcaacaacuacuu

SEQ ID NO: 39112 - RNA, 22 nt, Human
aaaucagaucuuacacaauugu

SEQ ID NO: 39113 - RNA, 22 nt, Human
aaaucagauuauuugauuggca

SEQ ID NO: 39114 - RNA, 22 nt, Human
aaaucagucccucuuggaauuu

SEQ ID NO: 39115 - RNA, 22 nt, Human
aaaucaguucacguucugaggu

SEQ ID NO: 39116 - RNA, 22 nt, Human
aaaucaguuguuauauuaaaga

SEQ ID NO: 39117 - RNA, 22 nt, Human
aaaucaucucugcauccuuagc

SEQ ID NO: 39118 - RNA, 22 nt, Human
aaaucauguuggcacaauaaaa

SEQ ID NO: 39119 - RNA, 20 nt, Human
aaauccaguguguauuuuac

SEQ ID NO: 39120 - RNA, 22 nt, Human
aaauccaguguucaaaguuuga

SEQ ID NO: 39121 - RNA, 22 nt, Human
aaaucccaaugcuagacccggu

SEQ ID NO: 39122 - RNA, 22 nt, Human
aaaucccacucacgaguuuugc

SEQ ID NO: 39123 - RNA, 22 nt, Human
aaaucccuugcucucucagacc

SEQ ID NO: 39124 - RNA, 22 nt, Human
aaauccgucauuggccugguug

SEQ ID NO: 39125 - RNA, 22 nt, Human
aaauccuaauaaugcacuagug

SEQ ID NO: 39126 - RNA, 22 nt, Human
aaauccuaaugacaaguuuagu

SEQ ID NO: 39127 - RNA, 22 nt, Human
aaauccuggccucaaguggucc

SEQ ID NO: 39128 - RNA, 22 nt, Human
aaaucgguugguucaagguaau

SEQ ID NO: 39129 - RNA, 22 nt, Human
aaaucguggaagacaccagugg

SEQ ID NO: 39130 - RNA, 22 nt, Human
aaaucuaggcucauccuggucc

SEQ ID NO: 39131 - RNA, 22 nt, Human
aaaucuaguaccuuuuugauua

SEQ ID NO: 39132 - RNA, 22 nt, Human
aaaucucaaaggcuuagcaucu

SEQ ID NO: 39133 - RNA, 22 nt, Human
aaaucucaauuugaauuguagc

SEQ ID NO: 39134 - RNA, 22 nt, Human
aaaucucaguguucuaagcauu

SEQ ID NO: 39135 - RNA, 22 nt, Human
aaaucucuggcagaaauaaacu

SEQ ID NO: 39136 - RNA, 22 nt, Human
aaaucucuggucacagaacuua

SEQ ID NO: 39137 - RNA, 22 nt, Human
aaaucugggucaagguggagug

SEQ ID NO: 39138 - RNA, 22 nt, Human
aaaucuguaagcaauugcucag

SEQ ID NO: 39139 - RNA, 22 nt, Human
aaaucuguuucagguauauuug

SEQ ID NO: 39140 - RNA, 22 nt, Human
aaaucuuucccuuuacuaucca

SEQ ID NO: 39141 - RNA, 22 nt, Human
aaaugaacaguugcauucucug

SEQ ID NO: 39142 - RNA, 22 nt, Human
aaaugacagaguaagcuguuua

SEQ ID NO: 39143 - RNA, 22 nt, Human
aaaugaguuugccucuagauag

SEQ ID NO: 39144 - RNA, 22 nt, Human
aaaugauaguauggaacuagga

SEQ ID NO: 39145 - RNA, 22 nt, Human
aaaugaucauguaauuucagaa

SEQ ID NO: 39146 - RNA, 22 nt, Human
aaaugauggaaaugaggcugaa

SEQ ID NO: 39147 - RNA, 22 nt, Human
aaaugauguuauaagaccagga

SEQ ID NO: 39148 - RNA, 22 nt, Human
aaaugcaaggauuuuguuaggc

SEQ ID NO: 39149 - RNA, 22 nt, Human
aaaugcaauuguauguacucca

SEQ ID NO: 39150 - RNA, 22 nt, Human
aaaugcacagaggccagagagg

SEQ ID NO: 39151 - RNA, 22 nt, Human
aaaugcacaggagaaccaauuc

SEQ ID NO: 39152 - RNA, 23 nt, Human
aaaugcacaguauugauuuuuaa

SEQ ID NO: 39153 - RNA, 22 nt, Human
aaaugcaccuugcugugagacu

SEQ ID NO: 39154 - RNA, 22 nt, Human
aaaugcacugaacacauguugu

SEQ ID NO: 39155 - RNA, 22 nt, Human
aaaugcagauucaugagcccca

SEQ ID NO: 39156 - RNA, 22 nt, Human
aaaugcagauuccuaggcccca

SEQ ID NO: 39157 - RNA, 22 nt, Human
aaaugcagauugucauucagga

SEQ ID NO: 39158 - RNA, 22 nt, Human
aaaugcagcugggcaugagagg

SEQ ID NO: 39159 - RNA, 21 nt, Human
aaaugcagucucugagaucug

SEQ ID NO: 39160 - RNA, 20 nt, Human
aaaugcaguucugccuuggc

SEQ ID NO: 39161 - RNA, 22 nt, Human
aaaugcauguagaauaauagag

SEQ ID NO: 39162 - RNA, 22 nt, Human
aaaugcauguauguaauaugcu

SEQ ID NO: 39163 - RNA, 22 nt, Human
aaaugcauugguuucuacuugu

SEQ ID NO: 39164 - RNA, 20 nt, Human
aaaugccagugauucugcuu

SEQ ID NO: 39165 - RNA, 21 nt, Human
aacaggucccccacgggcuuu

SEQ ID NO: 39166 - RNA, 22 nt, Human
aacagguugaggucaaaugcaa

SEQ ID NO: 39167 - RNA, 22 nt, Human
aacaguaaaaaucauuuaguug

SEQ ID NO: 39168 - RNA, 22 nt, Human
aacaguaagagauguuuuaucu

SEQ ID NO: 39169 - RNA, 17 nt, Human
aacaguaagcccuguuu

SEQ ID NO: 39170 - RNA, 22 nt, Human
aacaguaauuugcgguuuuugc

SEQ ID NO: 39171 - RNA, 22 nt, Human
aacaguaggcaucacauaauga

SEQ ID NO: 39172 - RNA, 22 nt, Human
aacaguaucuacgggaacuauu

SEQ ID NO: 39173 - RNA, 22 nt, Human
aacaguaucuuuuaucagaaau

SEQ ID NO: 39174 - RNA, 22 nt, Human
aacagucuuccuacggccauua

SEQ ID NO: 39175 - RNA, 22 nt, Human
aacagugauaucaagacagaca

SEQ ID NO: 39176 - RNA, 22 nt, Human
aacagugcugcauucauugagc

SEQ ID NO: 39177 - RNA, 21 nt, Human
aacagugcuuaguagauguuc

SEQ ID NO: 39178 - RNA, 22 nt, Human
aacagugucugugguuaaaggu

SEQ ID NO: 39179 - RNA, 22 nt, Human
aacaguguucuaggguguggcu

SEQ ID NO: 39180 - RNA, 22 nt, Human
aacaguguuuugcucuuugccc

SEQ ID NO: 39181 - RNA, 22 nt, Human
aacaguguuuuucuucagcacu

SEQ ID NO: 39182 - RNA, 22 nt, Human
aacaguuauuaucacauuagug

SEQ ID NO: 39183 - RNA, 22 nt, Human
aacaguuuaugauaaauucuua

SEQ ID NO: 39184 - RNA, 22 nt, Human
aacaguuucuauguuagugguu

SEQ ID NO: 39185 - RNA, 22 nt, Human
aacauaagggagcuucaaaacu

SEQ ID NO: 39186 - RNA, 22 nt, Human
aacauaaguggcacuuugccca

SEQ ID NO: 39187 - RNA, 22 nt, Human
aacauacauauuucagugucca

SEQ ID NO: 39188 - RNA, 22 nt, Human
aacauagcuuuacucaaaugac

SEQ ID NO: 39189 - RNA, 22 nt, Human
aacaucagaauauccauguugg

SEQ ID NO: 39190 - RNA, 22 nt, Human
aacaucaucagaugggugcuug

SEQ ID NO: 39191 - RNA, 19 nt, Human
aacaucauggcucuuucca

SEQ ID NO: 39192 - RNA, 22 nt, Human
aacaucauuauguccauuaaug

SEQ ID NO: 39193 - RNA, 22 nt, Human
aacaucuacagugagauguuag

SEQ ID NO: 39194 - RNA, 22 nt, Human
aacugcuucuuacugcugggca

SEQ ID NO: 39195 - RNA, 22 nt, Human
aacugcuugagauauguuuguc

SEQ ID NO: 39196 - RNA, 22 nt, Human
aacugcuuguaaauaauguuga

SEQ ID NO: 39197 - RNA, 17 nt, Human
aacugcuuuuuuuagcc

SEQ ID NO: 39198 - RNA, 22 nt, Human
aacuggaaagaucaguaggaag

SEQ ID NO: 39199 - RNA, 22 nt, Human
aacuggagccccucugccacug

SEQ ID NO: 39200 - RNA, 22 nt, Human
aacuggauuuaggaacagagaa

SEQ ID NO: 39201 - RNA, 22 nt, Human
aacugggcccagucugaguugg

SEQ ID NO: 39202 - RNA, 22 nt, Human
aacugguaucucuucaguguaa

SEQ ID NO: 39203 - RNA, 22 nt, Human
aacuggugagauaaauuauuua

SEQ ID NO: 39204 - RNA, 22 nt, Human
aacugguucuggaggcugcagg

SEQ ID NO: 39205 - RNA, 19 nt, Human
aacuguaaagaucuguagc

SEQ ID NO: 39206 - RNA, 22 nt, Human
aacuguaaagguugagugguaa

SEQ ID NO: 39207 - RNA, 22 nt, Human
aacuguaaggcuuagaacagca

SEQ ID NO: 39208 - RNA, 22 nt, Human
aacuguaaugaauuguucauga

SEQ ID NO: 39209 - RNA, 22 nt, Human
aacuguagaagggacacaaaag

SEQ ID NO: 39210 - RNA, 22 nt, Human
aacuguagggaucugucuuagu

SEQ ID NO: 39211 - RNA, 22 nt, Human
aacuguagugcuuauagacucu

SEQ ID NO: 39212 - RNA, 22 nt, Human
aacugucuaaggagaauaugaa

SEQ ID NO: 39213 - RNA, 22 nt, Human
aacugucugaaacugggguuuc

SEQ ID NO: 39214 - RNA, 22 nt, Human
aacugucuuauuuauauuucug

SEQ ID NO: 39215 - RNA, 22 nt, Human
aacuguucacacugaugugacg

SEQ ID NO: 39216 - RNA, 18 nt, Human
aacuguugaaauagcuug

SEQ ID NO: 39217 - RNA, 22 nt, Human
aacuuaaugauuucaugcaugu

SEQ ID NO: 39218 - RNA, 22 nt, Human
aacuuagagcucuccuaaauga

SEQ ID NO: 39219 - RNA, 22 nt, Human
aacuuaggaaaauaaggcauga

SEQ ID NO: 39220 - RNA, 22 nt, Human
aacuuagucuuucaauuugaua

SEQ ID NO: 39221 - RNA, 22 nt, Human
aacuuagugagccacucuugca

SEQ ID NO: 39222 - RNA, 22 nt, Human
aacuuaguuaagauuaagucuc

SEQ ID NO: 39223 - RNA, 22 nt, Human
aacuuaguucaauaucagugcu

SEQ ID NO: 39224 - RNA, 22 nt, Human
aacuuaguuggggacaccaugg

SEQ ID NO: 39225 - RNA, 22 nt, Human
aacuucaguugagaaaggcaug

SEQ ID NO: 39226 - RNA, 22 nt, Human
aacuucauguaauuuaaaacag

SEQ ID NO: 39227 - RNA, 22 nt, Human
aacuuccuuggguaugaaaaca

SEQ ID NO: 39228 - RNA, 22 nt, Human
aacuucugccaaacagcuguua

SEQ ID NO: 39229 - RNA, 22 nt, Human
aacuucuggauguuucaaaugu

SEQ ID NO: 39230 - RNA, 22 nt, Human
aacuugauccugcuggguacua

SEQ ID NO: 39231 - RNA, 23 nt, Human
aacuugcuguaaaguucuaggca

SEQ ID NO: 39232 - RNA, 22 nt, Human
aacuugguuguuggcaauuugc

SEQ ID NO: 39233 - RNA, 22 nt, Human
aacuuguauauguuauucagag

SEQ ID NO: 39234 - RNA, 21 nt, Human
aacuuguauuucuccuuauuc

SEQ ID NO: 39235 - RNA, 20 nt, Human
aacuugucuuccuguuuggc

SEQ ID NO: 39236 - RNA, 22 nt, Human
aacuuuagcuauuuaaucugau

SEQ ID NO: 39237 - RNA, 22 nt, Human
aacuuucagcaaguaauucugg

SEQ ID NO: 39238 - RNA, 22 nt, Human
aacuuucaggcaaugaauauuu

SEQ ID NO: 39239 - RNA, 22 nt, Human
aacuuucuaaagucaaauuggu

SEQ ID NO: 39240 - RNA, 22 nt, Human
aacuuucugaaaagcuugauca

SEQ ID NO: 39241 - RNA, 22 nt, Human
aacuuucugucugagcugcaga

SEQ ID NO: 39242 - RNA, 22 nt, Human
aacuuugcaagggggcccugcg

SEQ ID NO: 39243 - RNA, 19 nt, Human
aacuuugcuacccuauccu

SEQ ID NO: 39244 - RNA, 22 nt, Human
aacuuugcuggaaaauuggagc

SEQ ID NO: 39245 - RNA, 22 nt, Human
aacuuugcuuuuguggguaaag

SEQ ID NO: 39246 - RNA, 22 nt, Human
aacuuuggcaagucagacuucu

SEQ ID NO: 39247 - RNA, 22 nt, Human
aacuuuggguaaugcuucaauu

SEQ ID NO: 39248 - RNA, 22 nt, Human
aacuuugucuuuuaugcuuaca

SEQ ID NO: 39249 - RNA, 22 nt, Human
aacuuuuagacuuggguauaaa

SEQ ID NO: 39250 - RNA, 23 nt, Human
aacuuuuagaguuuaacaguguu

SEQ ID NO: 39251 - RNA, 22 nt, Human
aacuuuucauaagggcaaauuu

SEQ ID NO: 39252 - RNA, 22 nt, Human
aacuuuucauugaaucauguca

SEQ ID NO: 39253 - RNA, 22 nt, Human
aagaaaaucaguucuggucagu

SEQ ID NO: 39254 - RNA, 22 nt, Human
aagaaacguuugagcuuugacu

SEQ ID NO: 39255 - RNA, 20 nt, Human
aagaaacuugaaaguacaag

SEQ ID NO: 39256 - RNA, 21 nt, Human
aagaaagauaauuaaggaccc

SEQ ID NO: 39257 - RNA, 22 nt, Human
aagaaagguguguuugcagaug

SEQ ID NO: 39258 - RNA, 22 nt, Human
aagaaaguggguaauaugauuu

SEQ ID NO: 39259 - RNA, 22 nt, Human
aagaaauggaagauccauggug

SEQ ID NO: 39260 - RNA, 22 nt, Human
aagaaauuaaugugccauuacu

SEQ ID NO: 39261 - RNA, 22 nt, Human
aagaacaguugggaggugagcc

SEQ ID NO: 39262 - RNA, 22 nt, Human
aagaacaugaguuaugaugauu

SEQ ID NO: 39263 - RNA, 22 nt, Human
aagaacaugauggccaugugca

SEQ ID NO: 39264 - RNA, 22 nt, Human
aagaacaugcuauaauuaucuu

SEQ ID NO: 39265 - RNA, 22 nt, Human
aagaacauguuaaaagauucac

SEQ ID NO: 39266 - RNA, 22 nt, Human
aagaacauucgaacuauuuucu

SEQ ID NO: 39267 - RNA, 22 nt, Human
aagaacauugacuaagaggggc

SEQ ID NO: 39268 - RNA, 22 nt, Human
aagaacauuuuguagaaugaca

SEQ ID NO: 39269 - RNA, 22 nt, Human
aagaaccuauaugcugaugaau

SEQ ID NO: 39270 - RNA, 22 nt, Human
aagaacugaguacguuaauaaa

SEQ ID NO: 39271 - RNA, 22 nt, Human
aagaacuguaucaagauguagu

SEQ ID NO: 39272 - RNA, 22 nt, Human
aagaacuuugauuucauugcau

SEQ ID NO: 39273 - RNA, 19 nt, Human
aagaagcaauaagcuguga

SEQ ID NO: 39274 - RNA, 22 nt, Human
aagaagcagagcuguggguguu

SEQ ID NO: 39275 - RNA, 22 nt, Human
aagaagcagcugccaggccagu

SEQ ID NO: 39276 - RNA, 22 nt, Human
aagaagcaggucacagacaggg

SEQ ID NO: 39277 - RNA, 20 nt, Human
aagaagccgggaaggcaggc

SEQ ID NO: 39278 - RNA, 22 nt, Human
aagaagcuguagggauuaacuc

SEQ ID NO: 39279 - RNA, 22 nt, Human
aagaaggaaguguggacaucac

SEQ ID NO: 39280 - RNA, 22 nt, Human
aagaagguguggaaagaugcuc

SEQ ID NO: 39281 - RNA, 22 nt, Human
aagaaguuaauaauggugagaa

SEQ ID NO: 39282 - RNA, 20 nt, Human
aagaaguugguaagcagugc

SEQ ID NO: 39283 - RNA, 21 nt, Human
aagaaguuuggauuuuguccu

SEQ ID NO: 39284 - RNA, 22 nt, Human
aagaauauagauuuuuugaagu

SEQ ID NO: 39285 - RNA, 17 nt, Human
aagaaucauuagagaag

SEQ ID NO: 39286 - RNA, 22 nt, Human
aagaaucucucuacuuuauuac

SEQ ID NO: 39287 - RNA, 22 nt, Human
aagaaucuguugauuccccacu

SEQ ID NO: 39288 - RNA, 22 nt, Human
aagaaugucguugguauuuuaa

SEQ ID NO: 39289 - RNA, 22 nt, Human
aagaauguucuuguagucauga

SEQ ID NO: 39290 - RNA, 22 nt, Human
aagacaauaauuuuugggcagg

SEQ ID NO: 39291 - RNA, 22 nt, Human
aagacaauccuggacagucagc

SEQ ID NO: 39292 - RNA, 22 nt, Human
aagacacacacauaugcugagu

SEQ ID NO: 39293 - RNA, 22 nt, Human
aagacacugauacucugugauu

SEQ ID NO: 39294 - RNA, 22 nt, Human
aagacagaagugauuugaugug

SEQ ID NO: 39295 - RNA, 22 nt, Human
aagacagcauugcugagggcuu

SEQ ID NO: 39296 - RNA, 22 nt, Human
aagacagccagcuccaugggau

SEQ ID NO: 39297 - RNA, 22 nt, Human
aagacaggaaaagcuccaggcc

SEQ ID NO: 39298 - RNA, 22 nt, Human
aagacaugacugcacagccaaa

SEQ ID NO: 39299 - RNA, 22 nt, Human
aagauacaccaagagccuagua

SEQ ID NO: 39300 - RNA, 23 nt, Human
aagauacagguguggaaugguuu

SEQ ID NO: 39301 - RNA, 22 nt, Human
aagauacagugaaagggcauug

SEQ ID NO: 39302 - RNA, 22 nt, Human
aagauacaucaaagcaaauugg

SEQ ID NO: 39303 - RNA, 22 nt, Human
aaggaaacagaggaugaccuug

SEQ ID NO: 39304 - RNA, 22 nt, Human
aaggaaagauucucucucuaga

SEQ ID NO: 39305 - RNA, 22 nt, Human
aagacauuagaaucagccuguu

SEQ ID NO: 39306 - RNA, 22 nt, Human
aagacauucaugaagaagggau

SEQ ID NO: 39307 - RNA, 22 nt, Human
aagacauuggacaauccagagg

SEQ ID NO: 39308 - RNA, 22 nt, Human
aagacauuguggagauguugcu

SEQ ID NO: 39309 - RNA, 22 nt, Human
aagaccauaauguaagaugaau

SEQ ID NO: 39310 - RNA, 22 nt, Human
aagaccauugcuguauuuguag

SEQ ID NO: 39311 - RNA, 22 nt, Human
aagacccacaaggcugaauguu

SEQ ID NO: 39312 - RNA, 22 nt, Human
aagacccuucucugaggaggaa

SEQ ID NO: 39313 - RNA, 22 nt, Human
aagaccugcguuauccugccug

SEQ ID NO: 39314 - RNA, 23 nt, Human
aagacuaauucuuaauugcuuag

SEQ ID NO: 39315 - RNA, 22 nt, Human
aagacuacuuuuggcagugugu

SEQ ID NO: 39316 - RNA, 22 nt, Human
aagacuagaccagugaauagga

SEQ ID NO: 39317 - RNA, 22 nt, Human
aagacugaauuugcauaguugg

SEQ ID NO: 39318 - RNA, 22 nt, Human
aagacugauguccagucccaug

SEQ ID NO: 39319 - RNA, 22 nt, Human
aagacugugucuauggcuacuc

SEQ ID NO: 39320 - RNA, 22 nt, Human
aagacuuucaaaccuauguuug

SEQ ID NO: 39321 - RNA, 22 nt, Human
aagacuuucuguaaagcuacag

SEQ ID NO: 39322 - RNA, 22 nt, Human
aagagaaggugaggaagccggu

SEQ ID NO: 39323 - RNA, 22 nt, Human
aagagacaugaauacucgaagg

SEQ ID NO: 39324 - RNA, 21 nt, Human
aagagacauuucucaucagca

SEQ ID NO: 39325 - RNA, 22 nt, Human
aagagacuggaaacuaggguca

SEQ ID NO: 39326 - RNA, 22 nt, Human
aagagacuguaaaggcgugagu

SEQ ID NO: 39327 - RNA, 22 nt, Human
aagagagaguuccuaggcaaaa

SEQ ID NO: 39328 - RNA, 22 nt, Human
aagagagggguugcauggaaau

SEQ ID NO: 39329 - RNA, 22 nt, Human
aagagauguugaaguuuauuag

SEQ ID NO: 39330 - RNA, 22 nt, Human
aagagauugguuauaagagauu

SEQ ID NO: 39331 - RNA, 22 nt, Human
aagagcaaguggguagugaagc

SEQ ID NO: 39332 - RNA, 22 nt, Human
aagagcagaaguccuuggaucc

SEQ ID NO: 39333 - RNA, 22 nt, Human
aagagcaggacagaaucagaac

SEQ ID NO: 39334 - RNA, 19 nt, Human
aagagcagggaaagaauug

SEQ ID NO: 39335 - RNA, 22 nt, Human
aagagcauaugguucucaaagc

SEQ ID NO: 39336 - RNA, 22 nt, Human
aagagcaucgguggagccccca

SEQ ID NO: 39337 - RNA, 22 nt, Human
aagagcauuuccacuggcacug

SEQ ID NO: 39338 - RNA, 22 nt, Human
aagagcauuuggugagauuuga

SEQ ID NO: 39339 - RNA, 22 nt, Human
aagagcauuuuguaaaauccuu

SEQ ID NO: 39340 - RNA, 22 nt, Human
aagagccagugggaaagucuug

SEQ ID NO: 39341 - RNA, 20 nt, Human
aagagcccgcagggcagugc

SEQ ID NO: 39342 - RNA, 20 nt, Human
aagagcuacuuagccuuucc

SEQ ID NO: 39343 - RNA, 22 nt, Human
aagagcuccaggcaaugcgguc

SEQ ID NO: 39344 - RNA, 22 nt, Human
aagagcugcccaaggugaacag

SEQ ID NO: 39345 - RNA, 22 nt, Human
aagagcuggcucuugcagcagc

SEQ ID NO: 39346 - RNA, 22 nt, Human
aagagcuggucacagguccauu

SEQ ID NO: 39347 - RNA, 22 nt, Human
aagagcuguaugccauaugauu

SEQ ID NO: 39348 - RNA, 21 nt, Human
aagagcugucaggaaggcugc

SEQ ID NO: 39349 - RNA, 22 nt, Human
aagagcugugggugguaguccu

SEQ ID NO: 39350 - RNA, 18 nt, Human
aagagcuucgcauauaca

SEQ ID NO: 39351 - RNA, 22 nt, Human
aagaggaagucuccauggagag

SEQ ID NO: 39352 - RNA, 22 nt, Human
aagaggaccaguagauaaauuu

SEQ ID NO: 39353 - RNA, 22 nt, Human
aagaggagaaaggcuggcuuug

SEQ ID NO: 39354 - RNA, 22 nt, Human
aagaggcagcccgcugaggcug

SEQ ID NO: 39355 - RNA, 22 nt, Human
aagaggcaguggugaugaaugg

SEQ ID NO: 39356 - RNA, 22 nt, Human
aagaggcgccggguacguggcg

SEQ ID NO: 39357 - RNA, 22 nt, Human
aagaggcuagccggcucacuaa

SEQ ID NO: 39358 - RNA, 20 nt, Human
aagaggcuguggauccuacu

SEQ ID NO: 39359 - RNA, 22 nt, Human
aagaggcuuucagugaacuugu

SEQ ID NO: 39360 - RNA, 22 nt, Human
aagagggcucgauuuggcaaaa

SEQ ID NO: 39361 - RNA, 22 nt, Human
aagagggcugcaaucuuauugc

SEQ ID NO: 39362 - RNA, 22 nt, Human
aagaggucauaccagauaaggg

SEQ ID NO: 39363 - RNA, 22 nt, Human
aagaguauuugguauagaacac

SEQ ID NO: 39364 - RNA, 22 nt, Human
aagagucuauuggaacuagaca

SEQ ID NO: 39365 - RNA, 22 nt, Human
aagagugacuuuucagcuguga

SEQ ID NO: 39366 - RNA, 22 nt, Human
aagaguggagaauaaaauagga

SEQ ID NO: 39367 - RNA, 22 nt, Human
aagaguuaagcaacagauacca

SEQ ID NO: 39368 - RNA, 22 nt, Human
aagaguuauaccuauuucuaac

SEQ ID NO: 39369 - RNA, 22 nt, Human
aagaguuauaguugguaugugg

SEQ ID NO: 39370 - RNA, 22 nt, Human
aagaguuaugaaagcaaggcau

SEQ ID NO: 39371 - RNA, 22 nt, Human
aagaguuucuuacuggcaucua

SEQ ID NO: 39372 - RNA, 22 nt, Human
aagaguuugaccugugccaucc

SEQ ID NO: 39373 - RNA, 22 nt, Human
aagaguuuuuaauggguacugg

SEQ ID NO: 39374 - RNA, 22 nt, Human
aagaguuuuuggagugugaguu

SEQ ID NO: 39375 - RNA, 22 nt, Human
aagauaaacucuugauuucuga

SEQ ID NO: 39376 - RNA, 22 nt, Human
aagauaacaggaggaguuugua

SEQ ID NO: 39377 - RNA, 22 nt, Human
aagauaauauucauuaacuaga

SEQ ID NO: 39378 - RNA, 22 nt, Human
aagauaauguucuagcugucag

SEQ ID NO: 39379 - RNA, 22 nt, Human
aagauacaaaugucaauauugg

SEQ ID NO: 39380 - RNA, 22 nt, Human
aagauacagacagagccaaaau

SEQ ID NO: 39381 - RNA, 22 nt, Human
aagauacauuaugucucucuga

SEQ ID NO: 39382 - RNA, 20 nt, Human
aagauagaauccuaacuuug

SEQ ID NO: 39383 - RNA, 22 nt, Human
aagaucaggcguggaaaacacu

SEQ ID NO: 39384 - RNA, 22 nt, Human
aagaucauaauauuuaucucau

SEQ ID NO: 39385 - RNA, 21 nt, Human
aagauccaagcaggcacuugu

SEQ ID NO: 39386 - RNA, 22 nt, Human
aagaugaacugucuucacccau

SEQ ID NO: 39387 - RNA, 22 nt, Human
aagaugaagaacaugagcacac

SEQ ID NO: 39388 - RNA, 22 nt, Human
aagaugacccugagggcaauug

SEQ ID NO: 39389 - RNA, 22 nt, Human
aagaugauguuguguuuucacu

SEQ ID NO: 39390 - RNA, 22 nt, Human
aagaugauuauguagauuggga

SEQ ID NO: 39391 - RNA, 22 nt, Human
aagaugcagcaaacuacuuuuu

SEQ ID NO: 39392 - RNA, 22 nt, Human
aagaugcagcuuccacuuuugc

SEQ ID NO: 39393 - RNA, 22 nt, Human
aagaugcagcuuuacaauaagg

SEQ ID NO: 39394 - RNA, 22 nt, Human
aagaugcaugcugaagcuggcu

SEQ ID NO: 39395 - RNA, 22 nt, Human
aagaugcgguugaccauggugu

SEQ ID NO: 39396 - RNA, 22 nt, Human
aagaugcuuauugcuccugcag

SEQ ID NO: 39397 - RNA, 22 nt, Human
aagaugcuugagaacuguuuga

SEQ ID NO: 39398 - RNA, 22 nt, Human
aagauggagcacgagcagaagc

SEQ ID NO: 39399 - RNA, 22 nt, Human
aagauggcaggaaucauaagcu

SEQ ID NO: 39400 - RNA, 22 nt, Human
aagauggucuugagauauuaua

SEQ ID NO: 39401 - RNA, 22 nt, Human
aagaugguggccagaguggaaa

SEQ ID NO: 39402 - RNA, 21 nt, Human
aagaugguuaugugcuaaaga

SEQ ID NO: 39403 - RNA, 22 nt, Human
aagauguguccauucuuugcuc

SEQ ID NO: 39404 - RNA, 22 nt, Human
aagauguugacuccuuugaugu

SEQ ID NO: 39405 - RNA, 22 nt, Human
aagauguugcaagggacucuuc

SEQ ID NO: 39406 - RNA, 22 nt, Human
aagauguuuuaauauuucgagg

SEQ ID NO: 39407 - RNA, 20 nt, Human
aagauucauuguaauuaggg

SEQ ID NO: 39408 - RNA, 22 nt, Human
aagauucugucaguuaggagga

SEQ ID NO: 39409 - RNA, 22 nt, Human
aagauucuugacuagaaugauu

SEQ ID NO: 39410 - RNA, 22 nt, Human
aagauugucaggcuugcuguau

SEQ ID NO: 39411 - RNA, 22 nt, Human
aagauuucagaguuugggggaa

SEQ ID NO: 39412 - RNA, 22 nt, Human
agcuugaauuauucugcucuua

SEQ ID NO: 39413 - RNA, 22 nt, Human
agcuugcuguauuuucuggagg

SEQ ID NO: 39414 - RNA, 17 nt, Human
agcuuggagcagcauga

SEQ ID NO: 39415 - RNA, 17 nt, Human
agcuuguuuuugaaagc

SEQ ID NO: 39416 - RNA, 22 nt, Human
agcuuuacaucgaaguucaguc

SEQ ID NO: 39417 - RNA, 22 nt, Human
agcuuuaccugccuuggggcac

SEQ ID NO: 39418 - RNA, 22 nt, Human
agcuuuaucacaauauuggcua

SEQ ID NO: 39419 - RNA, 22 nt, Human
agcuuuaucuucaccugggaau

SEQ ID NO: 39420 - RNA, 22 nt, Human
agcuuuauuaacucuccaggug

SEQ ID NO: 39421 - RNA, 22 nt, Human
agcuuucacgauuuggaacagg

SEQ ID NO: 39422 - RNA, 22 nt, Human
agcuuucguuccuuagacacau

SEQ ID NO: 39423 - RNA, 22 nt, Human
agcuuucuaguuuagccaucuu

SEQ ID NO: 39424 - RNA, 22 nt, Human
agcuuucugucaccugugcuug

SEQ ID NO: 39425 - RNA, 22 nt, Human
agcuuugaaaauccaaauuaca

SEQ ID NO: 39426 - RNA, 22 nt, Human
agcuuugaaucugguguuugca

SEQ ID NO: 39427 - RNA, 22 nt, Human
agcuuugcacugagacagcuca

SEQ ID NO: 39428 - RNA, 21 nt, Human
agcuuugcuuuguacucauuu

SEQ ID NO: 39429 - RNA, 22 nt, Human
agcuuuggcaucugacuagccg

SEQ ID NO: 39430 - RNA, 22 nt, Human
agcuuuggcccuggagguuacu

SEQ ID NO: 39431 - RNA, 22 nt, Human
agcuuuguuugcucacccgccg

SEQ ID NO: 39432 - RNA, 23 nt, Human
agcuuuuagguggaaauggcacu

SEQ ID NO: 39433 - RNA, 22 nt, Human
agcuuuuaguacguuaaaauug

SEQ ID NO: 39434 - RNA, 21 nt, Human
agcuuuucuguuuuauaucua

SEQ ID NO: 39435 - RNA, 22 nt, Human
aggaaaaucaaugucuuuuuaa

SEQ ID NO: 39436 - RNA, 22 nt, Human
aggaaacggcaaaacugcuuag

SEQ ID NO: 39437 - RNA, 22 nt, Human
aggaaacuaaggcucagugaag

SEQ ID NO: 39438 - RNA, 22 nt, Human
aggaaacucugagcggaccagc

SEQ ID NO: 39439 - RNA, 22 nt, Human
aggaaacugagguuacgggacu

SEQ ID NO: 39440 - RNA, 22 nt, Human
aggaaacugauguuuuuuacaa

SEQ ID NO: 39441 - RNA, 22 nt, Human
aggaaagacuggggccccagaa

SEQ ID NO: 39442 - RNA, 22 nt, Human
aggaaagauggaaggaggauaa

SEQ ID NO: 39443 - RNA, 22 nt, Human
aggaaagcaauggcugagaaca

SEQ ID NO: 39444 - RNA, 21 nt, Human
aggaaaggaaguccccagggu

SEQ ID NO: 39445 - RNA, 21 nt, Human
aggaaaggccagcacguaggg

SEQ ID NO: 39446 - RNA, 22 nt, Human
aggaaagguucagugauugaaa

SEQ ID NO: 39447 - RNA, 22 nt, Human
aggaaauaagggacaagacaaa

SEQ ID NO: 39448 - RNA, 22 nt, Human
aggaaauaggaccagacaaagc

SEQ ID NO: 39449 - RNA, 22 nt, Human
aggaaaugcaggcaaauacucu

SEQ ID NO: 39450 - RNA, 22 nt, Human
aggaaauugucuuuuuccuugu

SEQ ID NO: 39451 - RNA, 22 nt, Human
aggaacacaacuuccugagagc

SEQ ID NO: 39452 - RNA, 22 nt, Human
aggaacauucucauuuccugcc

SEQ ID NO: 39453 - RNA, 22 nt, Human
aggaaccagacagaacugaaug

SEQ ID NO: 39454 - RNA, 22 nt, Human
aggaaccagagguugagcaacu

SEQ ID NO: 39455 - RNA, 22 nt, Human
aggaagaaaugugacuucaaac

SEQ ID NO: 39456 - RNA, 22 nt, Human
aggaagaacagauaauggacgc

SEQ ID NO: 39457 - RNA, 22 nt, Human
aggaagagcaucuuugggucug

SEQ ID NO: 39458 - RNA, 22 nt, Human
aggaagagcccgggugacauaa

SEQ ID NO: 39459 - RNA, 21 nt, Human
aggaagaucuggaggucggcg

SEQ ID NO: 39460 - RNA, 22 nt, Human
aggaagaugggagagcucugga

SEQ ID NO: 39461 - RNA, 22 nt, Human
aggaagcauguuggauccacuu

SEQ ID NO: 39462 - RNA, 23 nt, Human
aggaagcccauuuuagucuaccu

SEQ ID NO: 39463 - RNA, 22 nt, Human
aggaagcccuugucauuucugu

SEQ ID NO: 39464 - RNA, 22 nt, Human
aggaagccuggcauuaaaaagc

SEQ ID NO: 39465 - RNA, 22 nt, Human
aggaagcucagagaagucuuuu

SEQ ID NO: 39466 - RNA, 20 nt, Human
aggaagcugagauguagagg

SEQ ID NO: 39467 - RNA, 21 nt, Human
aggaagcugcccagauaguag

SEQ ID NO: 39468 - RNA, 22 nt, Human
aggaagcugccugggaugggaa

SEQ ID NO: 39469 - RNA, 22 nt, Human
aggaagcugcuggaguagugug

SEQ ID NO: 39470 - RNA, 22 nt, Human
aggaagcugggaaacugacauu

SEQ ID NO: 39471 - RNA, 22 nt, Human
aggaagcuuagugaaaggacca

SEQ ID NO: 39472 - RNA, 23 nt, Human
aggaagcuuggcaauaagguuug

SEQ ID NO: 39473 - RNA, 19 nt, Human
aggaaggaaccugagucug

SEQ ID NO: 39474 - RNA, 20 nt, Human
aggaaggagaaucugagcaa

SEQ ID NO: 39475 - RNA, 22 nt, Human
aggaagggagcaguuuguuguu

SEQ ID NO: 39476 - RNA, 17 nt, Human
aggaagggcaaguuucu

SEQ ID NO: 39477 - RNA, 22 nt, Human
aggaagguaaugaacugaggag

SEQ ID NO: 39478 - RNA, 22 nt, Human
aggaaggugcaguagggugugc

SEQ ID NO: 39479 - RNA, 20 nt, Human
aggaaguauugucaugaagg

SEQ ID NO: 39480 - RNA, 22 nt, Human
aggaagugacuagguaacccaa

SEQ ID NO: 39481 - RNA, 22 nt, Human
aggaagugcuaagagaacauca

SEQ ID NO: 39482 - RNA, 23 nt, Human
aggaaguuaaggcagacagacag

SEQ ID NO: 39483 - RNA, 22 nt, Human
aggaaguuaguaaauuaugugc

SEQ ID NO: 39484 - RNA, 22 nt, Human
aggaauagaccacuucacugag

SEQ ID NO: 39485 - RNA, 22 nt, Human
aggaauauggauuugcucagcu

SEQ ID NO: 39486 - RNA, 22 nt, Human
aggaauauuacuuugcuuuuau

SEQ ID NO: 39487 - RNA, 22 nt, Human
aggaaucugugguuuuaacagg

SEQ ID NO: 39488 - RNA, 22 nt, Human
aggaaugacuuguagcucugag

SEQ ID NO: 39489 - RNA, 21 nt, Human
aggaaugcugaggcucacuuu

SEQ ID NO: 39490 - RNA, 22 nt, Human
aggaauguaauaguguggcuca

SEQ ID NO: 39491 - RNA, 22 nt, Human
aggaauguauugaccuguugca

SEQ ID NO: 39492 - RNA, 22 nt, Human
aggaaugucauagaauaaucau

SEQ ID NO: 39493 - RNA, 22 nt, Human
aggaaugugaggcaaguuguga

SEQ ID NO: 39494 - RNA, 22 nt, Human
aggaauguguguccaccgggga

SEQ ID NO: 39495 - RNA, 22 nt, Human
aggaauguguuucuaggcuguu

SEQ ID NO: 39496 - RNA, 22 nt, Human
aggaauguuaagaaggucuacc

SEQ ID NO: 39497 - RNA, 22 nt, Human
aggaauguuaggagaugagucu

SEQ ID NO: 39498 - RNA, 22 nt, Human
aggaauuggcacggccuucuca

SEQ ID NO: 39499 - RNA, 22 nt, Human
aggaauugguucaagguuuauc

SEQ ID NO: 39500 - RNA, 22 nt, Human
aggaauuguguuguaguggaga

SEQ ID NO: 39501 - RNA, 19 nt, Human
aggaauuucucagggaggc

SEQ ID NO: 39502 - RNA, 22 nt, Human
aggaauuugagugcuguaggaa

SEQ ID NO: 39503 - RNA, 22 nt, Human
aggaauuuuaauaugcuugucu

SEQ ID NO: 39504 - RNA, 22 nt, Human
aggaauuuuacaagcugguugc

SEQ ID NO: 39505 - RNA, 22 nt, Human
aggacaaaggaccagaucugga

SEQ ID NO: 39506 - RNA, 22 nt, Human
aggacaaucucuccuuuaucag

SEQ ID NO: 39507 - RNA, 22 nt, Human
aggacaauuagacucuuuguuu

SEQ ID NO: 39508 - RNA, 22 nt, Human
aggacaauuagucuggcuuggc

SEQ ID NO: 39509 - RNA, 22 nt, Human
aggacaauuuuggcauaguucu

SEQ ID NO: 39510 - RNA, 22 nt, Human
aggacacaacaucauuucugug

SEQ ID NO: 39511 - RNA, 22 nt, Human
aggacacacuucugaggucuuu

SEQ ID NO: 39512 - RNA, 21 nt, Human
aggacacagagacaccuauug

SEQ ID NO: 39513 - RNA, 22 nt, Human
aggacacagcucuucaguaaga

SEQ ID NO: 39514 - RNA, 23 nt, Human
aggacagcaaaccccgccucccc

SEQ ID NO: 39515 - RNA, 22 nt, Human
aggacagcagugcuggcacuug

SEQ ID NO: 39516 - RNA, 22 nt, Human
aggacagcccccaacagcaaca

SEQ ID NO: 39517 - RNA, 22 nt, Human
aguuuauuucuccauuuaccua

SEQ ID NO: 39518 - RNA, 22 nt, Human
aguuuauuuuugauaagucuug

SEQ ID NO: 39519 - RNA, 22 nt, Human
aguuucacauagcucagugcuc

SEQ ID NO: 39520 - RNA, 22 nt, Human
aguuucaguucugucauuuaua

SEQ ID NO: 39521 - RNA, 22 nt, Human
auagacacagaucuauauaugu

SEQ ID NO: 39522 - RNA, 22 nt, Human
auagacagcgcauuaaaaaugu

SEQ ID NO: 39523 - RNA, 22 nt, Human
aggaucaggcccucuaggguag

SEQ ID NO: 39524 - RNA, 22 nt, Human
aggaucauauaagcuccagcua

SEQ ID NO: 39525 - RNA, 22 nt, Human
aggaucauguggucauuccuga

SEQ ID NO: 39526 - RNA, 22 nt, Human
aggauccuuuggccacuucuua

SEQ ID NO: 39527 - RNA, 22 nt, Human
aggauccuuuuucugcuguuug

SEQ ID NO: 39528 - RNA, 22 nt, Human
aggaucugugagugcugcagac

SEQ ID NO: 39529 - RNA, 22 nt, Human
aggaugaauauuuagugggaua

SEQ ID NO: 39530 - RNA, 22 nt, Human
aggaugagagauacauggagca

SEQ ID NO: 39531 - RNA, 22 nt, Human
aggaugccuucauugcauggcc

SEQ ID NO: 39532 - RNA, 22 nt, Human
aggauggauucuguauguggga

SEQ ID NO: 39533 - RNA, 22 nt, Human
aggauggcuugcaggaggcugu

SEQ ID NO: 39534 - RNA, 22 nt, Human
aggauggggucugcagccuggu

(The sequence listing continues in the following parts.)

1. A bioinformatically detectable isolated oligonucleotide which is endogenously processed from a hairpin-shaped precursor, and anneals to a portion of a mRNA transcript of a target gene, wherein binding of said oligonucleotide to said mRNA transcript represses expression of said target gene, and wherein said oligonucleotide has at least 80% sequence identity with a nucleotide sequence selected from the group consisting of SEQ ID NOs: 1-1672 and 1673-119264.

2. A bioinformatically detectable isolated oligonucleotide having a nucleotide sequence selected from the group consisting of SEQ ID NOs: 1-1672 and 1673-119264.

3. A bioinformatically detectable first oligonucleotide which is a portion of a mRNA transcript of a target gene, and anneals to a second oligonucleotide that is endogenously processed from a hairpin precursor, wherein binding of said first oligonucleotide to said second oligonucleotide represses expression of said target gene, and wherein nucleotide sequence of said second nucleotide is selected from the group consisting of SEQ ID NOs: 1-1672 and 1673-119264.

4. A bioinformatically detectable oligonucleotide having a nucleotide sequence selected from the group consisting of SEQ ID NOs: 3362235-4097720.

5. A bioinformatically detectable isolated oligonucleotide which anneals to a portion of a mRNA transcript of a target gene associated with B19 virus infection, wherein binding of said oligonucleotide to said mRNA transcript represses expression of said target gene, and wherein said oligonucleotide has at least 80% sequence identity with a nucleotide sequence selected from the group consisting of SEQ ID NOs shown in Table 13 row 2.

6. A bioinformatically detectable isolated oligonucleotide which anneals to a portion of a mRNA transcript of a target gene associated with Barmah Forest virus infection, wherein binding of said oligonucleotide to said mRNA transcript represses expression of said target gene, and wherein said oligonucleotide has at least 80% sequence identity with a nucleotide sequence selected from the group consisting of SEQ ID NOs shown in Table 13 row 3.

7. A bioinformatically detectable isolated oligonucleotide which anneals to a portion of a mRNA transcript of a target gene associated with BK polyomavirus infection, wherein binding of said oligonucleotide to said mRNA transcript represses expression of said target gene, and wherein said oligonucleotide has at least 80% sequence identity with a nucleotide sequence selected from the group consisting of SEQ ID NOs shown in Table 13 row 4.

8. A bioinformatically detectable isolated oligonucleotide which anneals to a portion of a mRNA transcript of a target gene associated with Bunyamwera virus infection, wherein binding of said oligonucleotide to said mRNA transcript represses expression of said target gene, and wherein said oligonucleotide has at least 80% sequence identity with a nucleotide sequence selected from the group consisting of SEQ ID NOs shown in Table 13 row 5.

9. A bioinformatically detectable isolated oligonucleotide which anneals to a portion of a mRNA transcript of a target gene associated with Colorado tick fever virus infection, wherein binding of said oligonucleotide to said mRNA transcript represses expression of said target gene, and wherein said oligonucleotide has at least 80% sequence identity with a nucleotide sequence selected from the group consisting of SEQ ID NOs shown in Table 13 row 6.

10. A method for treatment of a disease involving a tissue in which a protein is pathologically expressed to an undesirable extent, said protein having a messenger RNA, the method comprising: providing a material which modulates activity of a microRNA oligonucleotide which binds complementarily to a segment of said messenger RNA; and introducing said material into said tissue, causing modulation of said activity of said microRNA oligonucleotide and thereby modulating expression of said protein in a desired manner.

11. A method for treatment of a disease involving tissue in which a protein is pathologically expressed to an undesirable extent, said protein having a messenger RNA, the method comprising: providing a material which at least partially binds a segment of said messenger RNA that is bound complementarily by a microRNA oligonucleotide, thereby modulating expression of said protein; and introducing said material into said tissue, thereby modulating expression of said protein.

12. A method for treatment of a disease involving a tissue in which a protein is pathologically over-expressed, said protein having a messenger RNA, the method comprising: providing a microRNA oligonucleotide which binds complementarily to a segment of said messenger RNA; and introducing said microRNA oligonucleotide into said tissue, causing said microRNA oligonucleotide to bind complementarily to a segment of said messenger RNA and thereby inhibit expression of said protein.

13. A method for treatment of a disease involving a tissue in which a protein is pathologically over-expressed, said protein having a messenger RNA, the method comprising: providing a chemically-modified microRNA oligonucleotide which binds complementarily to a segment of said messenger RNA; and introducing said chemically-modified microRNA oligonucleotide into said tissue, causing said microRNA oligonucleotide to bind complementarily to a segment of said messenger RNA and thereby inhibit expression of said protein.

14. A method for treatment of a disease involving a tissue in which a protein is pathologically under-expressed, said protein having a messenger RNA, the method comprising: providing an oligonucleotide that inhibits activity of a microRNA oligonucleotide which binds complementarily to a segment of said messenger RNA; and introducing said oligonucleotide into said tissue, causing inhibition of said activity of said microRNA oligonucleotide and thereby promotion of translation of said protein.

15. A method for treatment of a disease involving a tissue in which a protein is pathologically under-expressed, said protein having a messenger RNA, the method comprising: providing a chemically-modified oligonucleotide that inhibits activity of a microRNA oligonucleotide which binds complementarily to a segment of said messenger RNA; and introducing said chemically-modified oligonucleotide into said tissue, causing inhibition of said activity of said microRNA oligonucleotide and thereby promotion of translation of said protein.

16. A method for diagnosis of a disease involving a tissue in which a protein is expressed to abnormal extent, said protein having a messenger RNA, the method comprising: assaying a microRNA oligonucleotide which at least partially binds a segment of said messenger RNA and modulates expression of said protein, thereby providing an indication of at least one parameter of said disease.

17. A method for detection of expression of an oligonucleotide, the method comprising: determining a first nucleotide sequence of a first oligonucleotide, which first nucleotide sequence is not complementary to a genome of an organism; receiving a second nucleotide sequence of a second oligonucleotide whose expression is sought to be detected; designing a third nucleotide sequence that is complementary to said second nucleotide sequence of said second oligonucleotide, and a fourth nucleotide sequence that is complementary to a fifth nucleotide sequence which is different from said second nucleotide sequence of said second oligonucleotide by at least one nucleotide; synthesizing a first oligonucleotide probe having a sixth nucleotide sequence comprising said third nucleotide sequence followed by said first nucleotide sequence of said first oligonucleotide, and a second oligonucleotide probe having a seventh nucleotide sequence comprising said fourth nucleotide sequence followed by said first nucleotide sequence of said first oligonucleotide; locating said first oligonucleotide probe and said second oligonucleotide probe on a microarray platform; receiving an RNA test sample from at least one tissue of said organism; obtaining size-fractionated RNA from said RNA test sample; amplifying said size-fractionated RNA; hybridizing said adaptor-linked RNA with said first and second oligonucleotide probes on said microarray platform; and determining expression of said first oligonucleotide in said at least one tissue of said organism, based at least in part on said hybridizing.

18. A bioinformatically detectable isolated polynucleotide which is endogenously processed into a plurality of hairpin-shaped precursor oligonucleotides, each of which is endogenously processed into a respective oligonucleotide, which in turn anneals to a portion of a mRNA transcript of a target gene, wherein binding of said oligonucleotide to said mRNA transcript represses expression of said target gene.

19. A bioinformatically detectable isolated oligonucleotide which is endogenously processed from a hairpin-shaped precursor, and anneals to a portion of a mRNA transcript of a target gene, wherein binding of said oligonucleotide to said mRNA transcript represses expression of said target gene, and wherein said target gene does not encode a protein.

20. A bioinformatically detectable isolated oligonucleotide which is endogenously processed from a hairpin-shaped precursor, and anneals to a portion of a mRNA transcript of a target gene, wherein binding of said oligonucleotide to said mRNA transcript represses expression of said target gene, and wherein a function of said oligonucleotide comprises modulation of cell type.

21. A bioinformatically detectable isolated oligonucleotide which is endogenously processed from a hairpin-shaped precursor, and anneals to a portion of a mRNA transcript of a target gene, wherein binding of said oligonucleotide to said mRNA transcript represses expression of said target gene, and wherein said oligonucleotide is maternally transferred by a cell to at least one daughter cell of said cell, and a function of said oligonucleotide comprises modulation of cell type of said daughter cell.

22. A method for bioinformatic detection of microRNA oligonucleotides, the method comprising: bioinformatically detecting a hairpin-shaped precursor oligonucleotide; bioinformatically detecting an oligonucleotide which is endogenously processed from said hairpin-shaped precursor oligonucleotide; and bioinformatically detecting a target gene of said oligonucleotide wherein said oligonucleotide anneals to at least one portion of a mRNA transcript of said target gene, and wherein said binding represses expression of said target gene, and said target gene is associated with a disease.
